United States Patent Application Publication US 2007/0042381 A1 - sequence listing, part 13

SEQ ID NO: 541894 - RNA, 22 nt, Human
ccacacagggggaugaguuauu

SEQ ID NO: 541895 - RNA, 22 nt, Human
cugggccugccaccaucuuagg

SEQ ID NO: 541896 - RNA, 22 nt, Human
caguggucugugcuucuguaca

SEQ ID NO: 541897 - RNA, 22 nt, Human
agugauucuuuaaagugguauu

SEQ ID NO: 541898 - RNA, 22 nt, Human
uuaguuaguggggcugucaguc

SEQ ID NO: 541899 - RNA, 22 nt, Human
uccugggaaguggcuggcugag

SEQ ID NO: 541900 - RNA, 22 nt, Human
agaacagaagggaggaaggccu

SEQ ID NO: 541901 - RNA, 22 nt, Human
caggagcccagaguccucagcu

SEQ ID NO: 541902 - RNA, 22 nt, Human
augggcagaguggggacaggaa

SEQ ID NO: 541903 - RNA, 22 nt, Human
gccuucugaucgcuggacugac

SEQ ID NO: 541904 - RNA, 22 nt, Human
gucccauuucaagaaauucaug

SEQ ID NO: 541905 - RNA, 22 nt, Human
ccucccugucuaccuguugugg

SEQ ID NO: 541906 - RNA, 22 nt, Human
ugugcuucugcagagacuauuu

SEQ ID NO: 541907 - RNA, 22 nt, Human
aucuuugaagaggacuugaagu

SEQ ID NO: 541908 - RNA, 22 nt, Human
guguggcugugggagauguuca

SEQ ID NO: 541909 - RNA, 22 nt, Human
aaggaagaagggaaguuacuua

SEQ ID NO: 541910 - RNA, 22 nt, Human
gcugcccugucugcagcaggac

SEQ ID NO: 541911 - RNA, 22 nt, Human
uccugggacuuucaaggcuagg

SEQ ID NO: 541912 - RNA, 22 nt, Human
aggaccuggaucacagagaucu

SEQ ID NO: 541913 - RNA, 21 nt, Human
aggcugcuggcucaggguccu

SEQ ID NO: 541914 - RNA, 22 nt, Human
auucuguauuucuaauaagauc

SEQ ID NO: 541915 - RNA, 22 nt, Human
gaggcagcugaaggagugacag

SEQ ID NO: 541916 - RNA, 22 nt, Human
ugucagagcaaggccaggccag

SEQ ID NO: 541917 - RNA, 22 nt, Human
aggcugggcuccgcccaacucc

SEQ ID NO: 541918 - RNA, 22 nt, Human
gcuggcuccucuguccucacgg

SEQ ID NO: 541919 - RNA, 23 nt, Human
agacaaaagccucagucuuaggc

SEQ ID NO: 541920 - RNA, 22 nt, Human
ucucagagaagugaugagcaau

SEQ ID NO: 541921 - RNA, 22 nt, Human
aaagcucacaguaauacaaggc

SEQ ID NO: 541922 - RNA, 22 nt, Human
cucaggccauucuuccagcugc

SEQ ID NO: 541923 - RNA, 20 nt, Human
ccagauggucccugugaaaa

SEQ ID NO: 541924 - RNA, 22 nt, Human
aucagagaccggucaagucaug

SEQ ID NO: 541925 - RNA, 22 nt, Human
guggcucuccauugacauggaa

SEQ ID NO: 541926 - RNA, 22 nt, Human
acaguuugcccugacauucucc

SEQ ID NO: 541927 - RNA, 22 nt, Human
acgugcaggaucugguuggcga

SEQ ID NO: 541928 - RNA, 22 nt, Human
caucauuuuauuaaccaagaaa

SEQ ID NO: 541929 - RNA, 17 nt, Human
ccugggaggaguuauga

SEQ ID NO: 541930 - RNA, 22 nt, Human
ucugucacaauuugcuuacucu

SEQ ID NO: 541931 - RNA, 22 nt, Human
gcagggcucugcuguaguccua

SEQ ID NO: 541932 - RNA, 23 nt, Human
cauauucaaaacuggaccacucu

SEQ ID NO: 541933 - RNA, 21 nt, Human
uuugugugucacgugcacagg

SEQ ID NO: 541934 - RNA, 22 nt, Human
cggggcugcgcucuuccugccg

SEQ ID NO: 541935 - RNA, 22 nt, Human
gaauucugguccuguccaaggu

SEQ ID NO: 541936 - RNA, 22 nt, Human
aagaagaugguuaacuuucagu

SEQ ID NO: 541937 - RNA, 22 nt, Human
cuggcugggguccauccucuaa

SEQ ID NO: 541938 - RNA, 20 nt, Human
cccugagaccagagagcagc

SEQ ID NO: 541939 - RNA, 22 nt, Human
acaguguacuccuuuaccggag

SEQ ID NO: 541940 - RNA, 22 nt, Human
agugaguggguuacagauggga

SEQ ID NO: 541941 - RNA, 19 nt, Human
ugcagccacgugagagacu

SEQ ID NO: 541942 - RNA, 22 nt, Human
cagagguagaaggcaugcagug

SEQ ID NO: 541943 - RNA, 22 nt, Human
uccaauuuuacgucuguauaaa

SEQ ID NO: 541944 - RNA, 22 nt, Human
agcagagaggagguggcccugu

SEQ ID NO: 541945 - RNA, 22 nt, Human
acagauggagguuauuaugaac

SEQ ID NO: 541946 - RNA, 22 nt, Human
ucugagagcaucacugggguac

SEQ ID NO: 541947 - RNA, 22 nt, Human
gagcagcugguaggugaaccca

SEQ ID NO: 541948 - RNA, 22 nt, Human
aagcagagagcagaauuaaguu

SEQ ID NO: 541949 - RNA, 22 nt, Human
ucugaggcuucagacuguacug

SEQ ID NO: 541950 - RNA, 22 nt, Human
agcagugggugacagagcugag

SEQ ID NO: 541951 - RNA, 22 nt, Human
aggccagguuccucaaucuuga

SEQ ID NO: 541952 - RNA, 19 nt, Human
gcagagucaagagcugcug

SEQ ID NO: 541953 - RNA, 22 nt, Human
cagcucccagagugaccagcag

SEQ ID NO: 541954 - RNA, 22 nt, Human
ggcagccauacucagaccuggg

SEQ ID NO: 541955 - RNA, 22 nt, Human
ggcuggccuguguggccgccac

SEQ ID NO: 541956 - RNA, 22 nt, Human
aaaucaguuggaacacaagcag

SEQ ID NO: 541957 - RNA, 21 nt, Human
uagagaaaagaagcuguuccu

SEQ ID NO: 541958 - RNA, 22 nt, Human
ugggugggagcacccugucugg

SEQ ID NO: 541959 - RNA, 22 nt, Human
agugggcagugcgcucggaugc

SEQ ID NO: 541960 - RNA, 22 nt, Human
ccugcagggaaucgaggcagaa

SEQ ID NO: 541961 - RNA, 22 nt, Human
aaggcagagggcuggaucagag

SEQ ID NO: 541962 - RNA, 22 nt, Human
cagagcugcuucccaguuugug

SEQ ID NO: 541963 - RNA, 22 nt, Human
uagagcuggccgggacagcugg

SEQ ID NO: 541964 - RNA, 22 nt, Human
aaaugucuuucaauagagaaau

SEQ ID NO: 541965 - RNA, 22 nt, Human
gcugucacauuuggagcacugg

SEQ ID NO: 541966 - RNA, 22 nt, Human
uuucauguuuauggaaaaugag

SEQ ID NO: 541967 - RNA, 22 nt, Human
ggugguggagccagcugggagu

SEQ ID NO: 541968 - RNA, 22 nt, Human
ggccucagaggaggugugaguc

SEQ ID NO: 541969 - RNA, 22 nt, Human
caaggagauaaaauguugagcu

SEQ ID NO: 541970 - RNA, 22 nt, Human
ugguugugcacggagcugcagg

SEQ ID NO: 541971 - RNA, 17 nt, Human
cagaaggaagcauggca

SEQ ID NO: 541972 - RNA, 22 nt, Human
cagcccugggaguuggggccga

SEQ ID NO: 541973 - RNA, 22 nt, Human
gggaagguauuuagcugcugaa

SEQ ID NO: 541974 - RNA, 22 nt, Human
gcucagagauggggaaugaaaa

SEQ ID NO: 541975 - RNA, 22 nt, Human
cauuugaagaagaaacguacua

SEQ ID NO: 541976 - RNA, 22 nt, Human
ugucaguggaccuggagaggcc

SEQ ID NO: 541977 - RNA, 22 nt, Human
gugcuaggauuacaggcauggg

SEQ ID NO: 541978 - RNA, 22 nt, Human
uuucaagaacaacauucauuca

SEQ ID NO: 541979 - RNA, 22 nt, Human
guacagcuaagaauuucaucuu

SEQ ID NO: 541980 - RNA, 22 nt, Human
acugucuccucaucaugccugg

SEQ ID NO: 541981 - RNA, 22 nt, Human
ucagggcucaccagccucugcc

SEQ ID NO: 541982 - RNA, 22 nt, Human
cacuguccaugcuugcuaaccc

SEQ ID NO: 541983 - RNA, 22 nt, Human
caggcccacugcuugucuaguc

SEQ ID NO: 541984 - RNA, 22 nt, Human
uaauagcauuaucaucaaaacu

SEQ ID NO: 541985 - RNA, 22 nt, Human
aaaagcucuuucugcuguagau

SEQ ID NO: 541986 - RNA, 22 nt, Human
uucuucaaggguaaaggcaacg

SEQ ID NO: 541987 - RNA, 23 nt, Human
auuuuaaccuugacuaacaugca

SEQ ID NO: 541988 - RNA, 22 nt, Human
cuggcuggagcuguuguaggcu

SEQ ID NO: 541989 - RNA, 22 nt, Human
acaggcuuacaggcugcaagua

SEQ ID NO: 541990 - RNA, 21 nt, Human
ucuuuucucugcaggauuccu

SEQ ID NO: 541991 - RNA, 22 nt, Human
uucuucaggauacgucauccag

SEQ ID NO: 541992 - RNA, 22 nt, Human
guuauauugccaaguauauugu

SEQ ID NO: 541993 - RNA, 22 nt, Human
uuaugcuaagugcaacaagcca

SEQ ID NO: 541994 - RNA, 22 nt, Human
uccaaaaaacguuugaauaguu

SEQ ID NO: 541995 - RNA, 22 nt, Human
agcagggcaguuaaaggguccu

SEQ ID NO: 541996 - RNA, 22 nt, Human
ugugaguacugcuauuuauaua

SEQ ID NO: 541997 - RNA, 22 nt, Human
cuuauucauaagucagacacac

SEQ ID NO: 541998 - RNA, 22 nt, Human
ggggcucugcucugagccgugu

SEQ ID NO: 541999 - RNA, 22 nt, Human
gugcccuggagggguugaaggg

SEQ ID NO: 542000 - RNA, 22 nt, Human
cccuccccacaaagcuucacac

SEQ ID NO: 542001 - RNA, 22 nt, Human
ugaagauuuuguagcuuucagc

SEQ ID NO: 542002 - RNA, 22 nt, Human
agaaaucaaugaagucugcuaa

SEQ ID NO: 542003 - RNA, 22 nt, Human
gggcugaccaaugccuugcuuu

SEQ ID NO: 542004 - RNA, 22 nt, Human
aaauagcacagcagcugaggcu

SEQ ID NO: 542005 - RNA, 22 nt, Human
acaaaguaagggcuaaugagca

SEQ ID NO: 542006 - RNA, 17 nt, Human
ugagcaguagaagaugc

SEQ ID NO: 542007 - RNA, 20 nt, Human
cagggcucugggccuggccu

SEQ ID NO: 542008 - RNA, 22 nt, Human
guggccucugugcuccugccua

SEQ ID NO: 542009 - RNA, 22 nt, Human
ugggcagggucucuguuaucag

SEQ ID NO: 542010 - RNA, 22 nt, Human
acaggcucuggggcaggauggc

SEQ ID NO: 542011 - RNA, 22 nt, Human
gcucccagguucuugggccuug

SEQ ID NO: 542012 - RNA, 23 nt, Human
uggugccucagaagcagugggcu

SEQ ID NO: 542013 - RNA, 22 nt, Human
ucgauguggugacaagguacgu

SEQ ID NO: 542014 - RNA, 22 nt, Human
ugcucugggcucaauggcagcu

SEQ ID NO: 542015 - RNA, 22 nt, Human
aggagcugagggagcgcccuug

SEQ ID NO: 542016 - RNA, 22 nt, Human
ccuggcugcauuuugcuggaug

SEQ ID NO: 542017 - RNA, 23 nt, Human
uuuauuuauuuaggcugagggau

SEQ ID NO: 542018 - RNA, 22 nt, Human
agggagacacaugaggaaguca

SEQ ID NO: 542019 - RNA, 22 nt, Human
aggcagccugguuugaauggaa

SEQ ID NO: 542020 - RNA, 22 nt, Human
ugaguagggguagaaaguuuag

SEQ ID NO: 542021 - RNA, 22 nt, Human
augccuuauuccaacaaucuag

SEQ ID NO: 542022 - RNA, 22 nt, Human
caaauacuaaacauaagauuuu

SEQ ID NO: 542023 - RNA, 22 nt, Human
uguguguauaugcauuuaucua

SEQ ID NO: 542024 - RNA, 22 nt, Human
ucauugcagaaauaaaggugaa

SEQ ID NO: 542025 - RNA, 21 nt, Human
uagcuucuugaggcuuggccg

SEQ ID NO: 542026 - RNA, 22 nt, Human
cacauugaaccauauauuagug

SEQ ID NO: 542027 - RNA, 22 nt, Human
gucucagauucagacaucuaca

SEQ ID NO: 542028 - RNA, 21 nt, Human
acagaugggaugagcacacug

SEQ ID NO: 542029 - RNA, 22 nt, Human
aaucauaauuguauacauucau

SEQ ID NO: 542030 - RNA, 22 nt, Human
acucugugugaguagagccugu

SEQ ID NO: 542031 - RNA, 22 nt, Human
gcagagcagugcuugcccagcg

SEQ ID NO: 542032 - RNA, 18 nt, Human
uggacaggguggagaaaa

SEQ ID NO: 542033 - RNA, 22 nt, Human
gccauccucugagcacuaggca

SEQ ID NO: 542034 - RNA, 21 nt, Human
uugcaacaaccuauauauuuu

SEQ ID NO: 542035 - RNA, 22 nt, Human
uuaagaauggaaugaggaauuu

SEQ ID NO: 542036 - RNA, 22 nt, Human
ggugcaggcgguggggcaagua

SEQ ID NO: 542037 - RNA, 22 nt, Human
ucacaacuugaagcugauuuaa

SEQ ID NO: 542038 - RNA, 22 nt, Human
agugggguccaucccuucccuc

SEQ ID NO: 542039 - RNA, 22 nt, Human
gucccaggcagagucaggaggg

SEQ ID NO: 542040 - RNA, 21 nt, Human
gcagagccggggcgagaaggc

SEQ ID NO: 542041 - RNA, 22 nt, Human
aggcuccuugcucacaggcuca

SEQ ID NO: 542042 - RNA, 22 nt, Human
aucuaagaguuaacaucaagaa

SEQ ID NO: 542043 - RNA, 22 nt, Human
gagaggccaccugacgagcagu

SEQ ID NO: 542044 - RNA, 22 nt, Human
caggugggagcggagacugauu

SEQ ID NO: 542045 - RNA, 22 nt, Human
uuucacagaaaggauaacauua

SEQ ID NO: 542046 - RNA, 22 nt, Human
uuucaaagggaaguuaugaagu

SEQ ID NO: 542047 - RNA, 22 nt, Human
gauucuuuggccuuuauugaca

SEQ ID NO: 542048 - RNA, 22 nt, Human
aaacaagucacuuuaucuugaa

SEQ ID NO: 542049 - RNA, 22 nt, Human
gcaggcugcugagauccuuagg

SEQ ID NO: 542050 - RNA, 22 nt, Human
ucacagacacagggagaagcau

SEQ ID NO: 542051 - RNA, 21 nt, Human
accaggcuugugggagggagc

SEQ ID NO: 542052 - RNA, 22 nt, Human
auguucugccuccauuuugagu

SEQ ID NO: 542053 - RNA, 21 nt, Human
ugggugcaagcugcggaugcu

SEQ ID NO: 542054 - RNA, 22 nt, Human
agccagggauggcagugcccag

SEQ ID NO: 542055 - RNA, 22 nt, Human
agggagaaaauuggaugcacaa

SEQ ID NO: 542056 - RNA, 19 nt, Human
aaccuuuagaucauucucc

SEQ ID NO: 542057 - RNA, 21 nt, Human
uugggccuuuucugguagcuu

SEQ ID NO: 542058 - RNA, 22 nt, Human
cauuaggguaauugaacacuua

SEQ ID NO: 542059 - RNA, 22 nt, Human
uuggcauuggagaugcaagaac

SEQ ID NO: 542060 - RNA, 22 nt, Human
uccagaguacggaagagucauc

SEQ ID NO: 542061 - RNA, 22 nt, Human
uugguucaacuuuucuaaguag

SEQ ID NO: 542062 - RNA, 22 nt, Human
ccugccugcguccucugagggc

SEQ ID NO: 542063 - RNA, 22 nt, Human
guacuuccguggacuaauuguu

SEQ ID NO: 542064 - RNA, 22 nt, Human
ugacuucaaaggcucuacuccu

SEQ ID NO: 542065 - RNA, 22 nt, Human
ugcugccagccaggccauggag

SEQ ID NO: 542066 - RNA, 20 nt, Human
augugagggguugaaguggg

SEQ ID NO: 542067 - RNA, 22 nt, Human
ggcagcugauuagcaucaagga

SEQ ID NO: 542068 - RNA, 22 nt, Human
aucagaagaaauggaugugacu

SEQ ID NO: 542069 - RNA, 20 nt, Human
cucuuaaauguaaaguaggc

SEQ ID NO: 542070 - RNA, 22 nt, Human
caucacagggggcuagaagucu

SEQ ID NO: 542071 - RNA, 22 nt, Human
gcaggcugagaguccaagaagg

SEQ ID NO: 542072 - RNA, 22 nt, Human
gcagauggagauaaauggaacu

SEQ ID NO: 542073 - RNA, 22 nt, Human
ggccucucaugcccagagccaa

SEQ ID NO: 542074 - RNA, 22 nt, Human
aguggggccggugaggccgagg

SEQ ID NO: 542075 - RNA, 22 nt, Human
uuugcauugccucugacuuaug

SEQ ID NO: 542076 - RNA, 22 nt, Human
aaggaggcccucuccuucugga

SEQ ID NO: 542077 - RNA, 22 nt, Human
ucugggcuuuguaaugggaggu

SEQ ID NO: 542078 - RNA, 22 nt, Human
gggcaaaggcagaaagcggugu

SEQ ID NO: 542079 - RNA, 22 nt, Human
uggaccugagccuggcccugcc

SEQ ID NO: 542080 - RNA, 22 nt, Human
gcacagcagccgaaaugcccuu

SEQ ID NO: 542081 - RNA, 22 nt, Human
uggcagcuuccugcucauagga

SEQ ID NO: 542082 - RNA, 22 nt, Human
cucagagaaaugucacaacaau

SEQ ID NO: 542083 - RNA, 22 nt, Human
ucagcucuguuuugaguggaac

SEQ ID NO: 542084 - RNA, 22 nt, Human
aaugucauugagcuccaauccu

SEQ ID NO: 542085 - RNA, 22 nt, Human
uggcagcuccuggggccagcac

SEQ ID NO: 542086 - RNA, 22 nt, Human
aggcacagcacaccuggccccc

SEQ ID NO: 542087 - RNA, 22 nt, Human
agucacuguucugucaugucaa

SEQ ID NO: 542088 - RNA, 22 nt, Human
agcagaggaggauuuaguuagg

SEQ ID NO: 542089 - RNA, 22 nt, Human
cugccaugcaguuagucccuca

SEQ ID NO: 542090 - RNA, 22 nt, Human
cgggcuccgggucuuugcaguc

SEQ ID NO: 542091 - RNA, 22 nt, Human
acaguuucuccauuuacaccuu

SEQ ID NO: 542092 - RNA, 22 nt, Human
aaugcacaugucuuggccucac

SEQ ID NO: 542093 - RNA, 22 nt, Human
uaacaguagccuuauguggucu

SEQ ID NO: 542094 - RNA, 22 nt, Human
cacagcugcacagaggaggugc

SEQ ID NO: 542095 - RNA, 22 nt, Human
acugucaaauuuauggaaagag

SEQ ID NO: 542096 - RNA, 22 nt, Human
auguaguguagagauuagucuc

SEQ ID NO: 542097 - RNA, 22 nt, Human
uuugcaaagaaauuauugcugu

SEQ ID NO: 542098 - RNA, 22 nt, Human
agcagcaggcuuaaggaaaagu

SEQ ID NO: 542099 - RNA, 23 nt, Human
uguaucuguacuauuccugccuc

SEQ ID NO: 542100 - RNA, 22 nt, Human
acuaaaacaguggcuaguagac

SEQ ID NO: 542101 - RNA, 22 nt, Human
agcagccaguucucugugguag

SEQ ID NO: 542102 - RNA, 22 nt, Human
ggccagcccagugguccucucu

SEQ ID NO: 542103 - RNA, 22 nt, Human
aauuucuugggagcucagagaa

SEQ ID NO: 542104 - RNA, 22 nt, Human
caacagcugaucuuugaugaag

SEQ ID NO: 542105 - RNA, 18 nt, Human
agauuuugagaaauacaa

SEQ ID NO: 542106 - RNA, 22 nt, Human
uacauuaacuuacguccacaug

SEQ ID NO: 542107 - RNA, 22 nt, Human
aguccaaggagagacagcauuu

SEQ ID NO: 542108 - RNA, 22 nt, Human
ggcaggguggcagaggcucaga

SEQ ID NO: 542109 - RNA, 22 nt, Human
cugggcucuguguuucaguuuc

SEQ ID NO: 542110 - RNA, 22 nt, Human
uguccacaucacucacuuguca

SEQ ID NO: 542111 - RNA, 22 nt, Human
caguagcagggauuauuuuagg

SEQ ID NO: 542112 - RNA, 22 nt, Human
uauacagaaagaauucaagucu

SEQ ID NO: 542113 - RNA, 22 nt, Human
ugggaggaucgcuugagcccag

SEQ ID NO: 542114 - RNA, 22 nt, Human
ugggccugggcuccuguccucu

SEQ ID NO: 542115 - RNA, 22 nt, Human
ugaggcaguugagcuuccugag

SEQ ID NO: 542116 - RNA, 22 nt, Human
agcaggugggcaugaaagcuga

SEQ ID NO: 542117 - RNA, 22 nt, Human
accaugccaguggcagccagac

SEQ ID NO: 542118 - RNA, 22 nt, Human
aauaugaauuauuguuacaagu

SEQ ID NO: 542119 - RNA, 22 nt, Human
auacauguucguguacauguuc

SEQ ID NO: 542120 - RNA, 22 nt, Human
agaagcuugaaggagcagugac

SEQ ID NO: 542121 - RNA, 22 nt, Human
cagauacagguuuuuguuagau

SEQ ID NO: 542122 - RNA, 22 nt, Human
augcaacaaaugcuacgaaucg

SEQ ID NO: 542123 - RNA, 22 nt, Human
aucagaaucauuucaucccuau

SEQ ID NO: 542124 - RNA, 22 nt, Human
cugggccucaaucucagaguuu

SEQ ID NO: 542125 - RNA, 17 nt, Human
uaaauacacaaggguau

SEQ ID NO: 542126 - RNA, 22 nt, Human
agagacuguacguggcaaguau

SEQ ID NO: 542127 - RNA, 23 nt, Human
caaauucuaggcaggcucuuuug

SEQ ID NO: 542128 - RNA, 22 nt, Human
acauuucuggaguuucucaaca

SEQ ID NO: 542129 - RNA, 22 nt, Human
gacccuggaguuaguccugugu

SEQ ID NO: 542130 - RNA, 22 nt, Human
gagagugaugaaugguuaaaca

SEQ ID NO: 542131 - RNA, 22 nt, Human
caggaaccuugucuguguuguu

SEQ ID NO: 542132 - RNA, 22 nt, Human
uccagggaugccagccauguug

SEQ ID NO: 542133 - RNA, 22 nt, Human
gaaaucugaacucuguauccuu

SEQ ID NO: 542134 - RNA, 22 nt, Human
ugagcccagagcccuuguaggg

SEQ ID NO: 542135 - RNA, 22 nt, Human
agaacagaugugggcagaccug

SEQ ID NO: 542136 - RNA, 22 nt, Human
uggcagaauuucuagcagauuc

SEQ ID NO: 542137 - RNA, 22 nt, Human
ucauuuuuugcauaccuguguc

SEQ ID NO: 542138 - RNA, 22 nt, Human
ucaccuguauuaauacagaacu

SEQ ID NO: 542139 - RNA, 22 nt, Human
ggcacagggaggcccuggugug

SEQ ID NO: 542140 - RNA, 23 nt, Human
uuucacaaugagcauuacagaau

SEQ ID NO: 542141 - RNA, 22 nt, Human
uagcuuuaauaagcugcugaau

SEQ ID NO: 542142 - RNA, 22 nt, Human
ccucuuccacugggccccaucc

SEQ ID NO: 542143 - RNA, 22 nt, Human
gugucccaauguucaggacggc

SEQ ID NO: 542144 - RNA, 23 nt, Human
agcagcugugguuuaccuuagua

SEQ ID NO: 542145 - RNA, 22 nt, Human
uccaggcaguuuuccagguugu

SEQ ID NO: 542146 - RNA, 22 nt, Human
cagcuacuccucccaugacuuc

SEQ ID NO: 542147 - RNA, 22 nt, Human
cuucugugcuucacaguugcca

SEQ ID NO: 542148 - RNA, 22 nt, Human
gggcccacuggcugucugaccc

SEQ ID NO: 542149 - RNA, 22 nt, Human
uccauggggcccaggaugagag

SEQ ID NO: 542150 - RNA, 22 nt, Human
agaguguaauaagggcaagggc

SEQ ID NO: 542151 - RNA, 22 nt, Human
ucuccugucuucucagcacccc

SEQ ID NO: 542152 - RNA, 22 nt, Human
gcagcuuugaagacuuauuugc

SEQ ID NO: 542153 - RNA, 22 nt, Human
caagggcucuuuugaggaaugu

SEQ ID NO: 542154 - RNA, 22 nt, Human
gacacagcacuguacaaggaau

SEQ ID NO: 542155 - RNA, 22 nt, Human
agcucccagcagagcuggccac

SEQ ID NO: 542156 - RNA, 22 nt, Human
ggcugcagauagccagccacca

SEQ ID NO: 542157 - RNA, 22 nt, Human
gccuucagcccugacuggccag

SEQ ID NO: 542158 - RNA, 22 nt, Human
ccuggcagcuccuccccggcgg

SEQ ID NO: 542159 - RNA, 22 nt, Human
uggcucugcugaaccuagugca

SEQ ID NO: 542160 - RNA, 22 nt, Human
gcccugcucauuucacguguuu

SEQ ID NO: 542161 - RNA, 22 nt, Human
gucaggaugcuauuguuauuaa

SEQ ID NO: 542162 - RNA, 22 nt, Human
ugcuuuauucgacaucugguag

SEQ ID NO: 542163 - RNA, 22 nt, Human
agaugcugucacacacacuguu

SEQ ID NO: 542164 - RNA, 22 nt, Human
aagcauuucuguuuaucuaucg

SEQ ID NO: 542165 - RNA, 17 nt, Human
uggagcugcguguguuc

SEQ ID NO: 542166 - RNA, 22 nt, Human
agggacacacuccaguguuauu

SEQ ID NO: 542167 - RNA, 22 nt, Human
agcaggcugcuggcguugaagu

SEQ ID NO: 542168 - RNA, 22 nt, Human
cuggacaggaagaauugggagc

SEQ ID NO: 542169 - RNA, 22 nt, Human
gaggaaaaugggacaggcugua

SEQ ID NO: 542170 - RNA, 22 nt, Human
ucuuucuugugggugcccuuuu

SEQ ID NO: 542171 - RNA, 22 nt, Human
gcccuggagagggauauggcau

SEQ ID NO: 542172 - RNA, 22 nt, Human
aggcagaugguaacugugauau

SEQ ID NO: 542173 - RNA, 22 nt, Human
agagcuggaaucagaccucagg

SEQ ID NO: 542174 - RNA, 22 nt, Human
uccuugaacagagggccugggu

SEQ ID NO: 542175 - RNA, 22 nt, Human
aguuuuaagaugcgcuucuguu

SEQ ID NO: 542176 - RNA, 22 nt, Human
cugagccaaggggacagugaca

SEQ ID NO: 542177 - RNA, 22 nt, Human
agccuucaguaaauccacugug

SEQ ID NO: 542178 - RNA, 22 nt, Human
cucuggagaacuccuugugucu

SEQ ID NO: 542179 - RNA, 22 nt, Human
ggagggugcauuuuacccugug

SEQ ID NO: 542180 - RNA, 22 nt, Human
uuucagaugcaauuaauuuuca

SEQ ID NO: 542181 - RNA, 22 nt, Human
gacuauuuuuaucuaacugggu

SEQ ID NO: 542182 - RNA, 20 nt, Human
guaaaauauggucuuugggu

SEQ ID NO: 542183 - RNA, 22 nt, Human
ugguaccagcuguguguucacu

SEQ ID NO: 542184 - RNA, 22 nt, Human
gggcuggcugauuuuccucucu

SEQ ID NO: 542185 - RNA, 22 nt, Human
gcugagcugggacaguccuggg

SEQ ID NO: 542186 - RNA, 22 nt, Human
uuucagaugugugucucugaag

SEQ ID NO: 542187 - RNA, 23 nt, Human
ccucagcauggcaggagcccagc

SEQ ID NO: 542188 - RNA, 22 nt, Human
cauaacauugagcagcauuccu

SEQ ID NO: 542189 - RNA, 19 nt, Human
ucaggaaguugaugaggug

SEQ ID NO: 542190 - RNA, 22 nt, Human
uucugggggccaggacaguggu

SEQ ID NO: 542191 - RNA, 22 nt, Human
uccaggaggccucauuuccugu

SEQ ID NO: 542192 - RNA, 22 nt, Human
ggccagagaauaugccuuacgu

SEQ ID NO: 542193 - RNA, 22 nt, Human
auuuccucaugaucauaaugca

SEQ ID NO: 542194 - RNA, 22 nt, Human
cagaacuggccuuucaucaguc

SEQ ID NO: 542195 - RNA, 18 nt, Human
cggcagagugcuucuagc

SEQ ID NO: 542196 - RNA, 22 nt, Human
ugagagaggggacugccugcuu

SEQ ID NO: 542197 - RNA, 17 nt, Human
aggugcagaggcagagc

SEQ ID NO: 542198 - RNA, 22 nt, Human
ugcagaggagucagccugggca

SEQ ID NO: 542199 - RNA, 22 nt, Human
agaugaagacucaggagcaggu

SEQ ID NO: 542200 - RNA, 22 nt, Human
uaugcacacauuagcacagggu

SEQ ID NO: 542201 - RNA, 22 nt, Human
gcagccacacuguuacagaaug

SEQ ID NO: 542202 - RNA, 22 nt, Human
guauuuguaguagcauagaauu

SEQ ID NO: 542203 - RNA, 22 nt, Human
cagggagcuggcuggcugugcc

SEQ ID NO: 542204 - RNA, 22 nt, Human
cucagggggaaucaggucacag

SEQ ID NO: 542205 - RNA, 22 nt, Human
aagcacagagagguaaaguaac

SEQ ID NO: 542206 - RNA, 22 nt, Human
uggaagaauagaagaugguuga

SEQ ID NO: 542207 - RNA, 22 nt, Human
uacaugaacaaaauagcagaaa

SEQ ID NO: 542208 - RNA, 22 nt, Human
uucacauuagugguucuauaua

SEQ ID NO: 542209 - RNA, 22 nt, Human
cagcacaggucaguuuuuuaag

SEQ ID NO: 542210 - RNA, 22 nt, Human
auuuccauacacccauuucuga

SEQ ID NO: 542211 - RNA, 22 nt, Human
aauuaugagguagauaucacau

SEQ ID NO: 542212 - RNA, 22 nt, Human
gcaggagcuuugcuuacugcug

SEQ ID NO: 542213 - RNA, 22 nt, Human
uccagccuuucuacucacugag

SEQ ID NO: 542214 - RNA, 22 nt, Human
ggaggagacggagugauuagug

SEQ ID NO: 542215 - RNA, 22 nt, Human
aaagccaguuucuggaaguacc

SEQ ID NO: 542216 - RNA, 22 nt, Human
acugggcauuuugaacguucuu

SEQ ID NO: 542217 - RNA, 22 nt, Human
gggagggaaagcuugaucuguc

SEQ ID NO: 542218 - RNA, 22 nt, Human
guccucuggagguuuuuaggug

SEQ ID NO: 542219 - RNA, 22 nt, Human
acaggcucgugcgcgcacgugu

SEQ ID NO: 542220 - RNA, 18 nt, Human
gaugaagcugcuggggau

SEQ ID NO: 542221 - RNA, 22 nt, Human
gaggccuggaauuccagccugg

SEQ ID NO: 542222 - RNA, 22 nt, Human
gguagcagggcugugagucaga

SEQ ID NO: 542223 - RNA, 22 nt, Human
aggcaccuugagagcaggagcu

SEQ ID NO: 542224 - RNA, 22 nt, Human
ucuuuucuccagaccugggauc

SEQ ID NO: 542225 - RNA, 22 nt, Human
ugaaaucuccucuuuauauauc

SEQ ID NO: 542226 - RNA, 22 nt, Human
uuguuacacauaauaacauuuu

SEQ ID NO: 542227 - RNA, 20 nt, Human
ccagagcagccacugaaguu

SEQ ID NO: 542228 - RNA, 22 nt, Human
uggaaagaaaaacaggccauga

SEQ ID NO: 542229 - RNA, 18 nt, Human
acugccuggcgaagauag

SEQ ID NO: 542230 - RNA, 22 nt, Human
gagaggggcgcgcagcucgcga

SEQ ID NO: 542231 - RNA, 22 nt, Human
agcagguggucuguugcugcug

SEQ ID NO: 542232 - RNA, 22 nt, Human
accucaggauguggacacagaa

SEQ ID NO: 542233 - RNA, 22 nt, Human
ugccaggcccucccacagauua

SEQ ID NO: 542234 - RNA, 22 nt, Human
uuacaauaccacaucaccucau

SEQ ID NO: 542235 - RNA, 22 nt, Human
ucucccagaggaucccagugga

SEQ ID NO: 542236 - RNA, 22 nt, Human
aucaacaugaauuucucugaag

SEQ ID NO: 542237 - RNA, 22 nt, Human
ggcaccuggagguuuacuggau

SEQ ID NO: 542238 - RNA, 22 nt, Human
acucugaggcaggucagggcag

SEQ ID NO: 542239 - RNA, 17 nt, Human
cugagcauccgugcucu

SEQ ID NO: 542240 - RNA, 22 nt, Human
ccugggagcuguggaaaggcug

SEQ ID NO: 542241 - RNA, 21 nt, Human
uaccaauugccuucuaguugu

SEQ ID NO: 542242 - RNA, 22 nt, Human
gaagccucaacaucucugcguc

SEQ ID NO: 542243 - RNA, 22 nt, Human
ugcagugugaccuguagcgagc

SEQ ID NO: 542244 - RNA, 22 nt, Human
acagccugcagccccaggucgc

SEQ ID NO: 542245 - RNA, 22 nt, Human
uaacagaaacagauaaguguaa

SEQ ID NO: 542246 - RNA, 22 nt, Human
cugggagcggcugucacugguu

SEQ ID NO: 542247 - RNA, 22 nt, Human
agggcgacaauggagagcguuu

SEQ ID NO: 542248 - RNA, 17 nt, Human
ucugccgacugccagcu

SEQ ID NO: 542249 - RNA, 22 nt, Human
agcugcuaugacaacaccagcc

SEQ ID NO: 542250 - RNA, 22 nt, Human
ucuuucaaugagcauucuuucc

SEQ ID NO: 542251 - RNA, 22 nt, Human
agcuggcuaugcccugugaacc

SEQ ID NO: 542252 - RNA, 22 nt, Human
uacacauaggucugaauaaaaa

SEQ ID NO: 542253 - RNA, 22 nt, Human
caggcaggagaggaggauuucu

SEQ ID NO: 542254 - RNA, 22 nt, Human
uucucuuacauuuucucagccu

SEQ ID NO: 542255 - RNA, 22 nt, Human
auuuguuucagggccuugguau

SEQ ID NO: 542256 - RNA, 22 nt, Human
ucaaauaaugccauucaucauc

SEQ ID NO: 542257 - RNA, 22 nt, Human
accaaggagacaaagguguauu

SEQ ID NO: 542258 - RNA, 22 nt, Human
aauguuaauguguuugcuuaug

SEQ ID NO: 542259 - RNA, 22 nt, Human
aauuaacaaauguagcugugau

SEQ ID NO: 542260 - RNA, 22 nt, Human
ugcucugcacaucccucacaaa

SEQ ID NO: 542261 - RNA, 22 nt, Human
aucaaaucauugcauuaauguu

SEQ ID NO: 542262 - RNA, 22 nt, Human
agagugggacacgggcgcuguc

SEQ ID NO: 542263 - RNA, 22 nt, Human
gcccugcugcuggcagaggcgc

SEQ ID NO: 542264 - RNA, 19 nt, Human
uuuacaaguucuuuguaug

SEQ ID NO: 542265 - RNA, 22 nt, Human
gccaggcagccacccucugcga

SEQ ID NO: 542266 - RNA, 22 nt, Human
ucaaaguuggaaaagcuggccc

SEQ ID NO: 542267 - RNA, 22 nt, Human
ggccaugguuggggaagacaug

SEQ ID NO: 542268 - RNA, 22 nt, Human
uguuugcucugacuaucuugcg

SEQ ID NO: 542269 - RNA, 21 nt, Human
ggcagccucuguggaagggga

SEQ ID NO: 542270 - RNA, 22 nt, Human
ugaagccuuguguggccucucu

SEQ ID NO: 542271 - RNA, 22 nt, Human
agauacaucauuuauaccuuca

SEQ ID NO: 542272 - RNA, 22 nt, Human
aaguccagggaucaaaguaggc

SEQ ID NO: 542273 - RNA, 22 nt, Human
uuucacagcagugugcugcuuu

SEQ ID NO: 542274 - RNA, 22 nt, Human
ugaguccaucgcagggaagugg

SEQ ID NO: 542275 - RNA, 22 nt, Human
auguuuguguuacacucugcag

SEQ ID NO: 542276 - RNA, 22 nt, Human
uggcagagucaucacaucugga

SEQ ID NO: 542277 - RNA, 22 nt, Human
agguuacagugauuauagguuu

SEQ ID NO: 542278 - RNA, 22 nt, Human
uccugagauucugcauuucuaa

SEQ ID NO: 542279 - RNA, 20 nt, Human
cuaucuccuggcgugccuuc

SEQ ID NO: 542280 - RNA, 22 nt, Human
gccugagagucugcauuucuaa

SEQ ID NO: 542281 - RNA, 17 nt, Human
ugaaggccaugaccacg

SEQ ID NO: 542282 - RNA, 22 nt, Human
caguucugacuuucauaauguc

SEQ ID NO: 542283 - RNA, 22 nt, Human
ucaaaggcauugccaauaagua

SEQ ID NO: 542284 - RNA, 22 nt, Human
ucagagucuaugcaacagaauu

SEQ ID NO: 542285 - RNA, 21 nt, Human
ucagggcagcugcucuucaga

SEQ ID NO: 542286 - RNA, 22 nt, Human
guucacagggauccuuguugaa

SEQ ID NO: 542287 - RNA, 22 nt, Human
gucaggagauagggcaagcuuc

SEQ ID NO: 542288 - RNA, 22 nt, Human
ugagggugggccugcaggaaga

SEQ ID NO: 542289 - RNA, 22 nt, Human
auagaccuucuacacaggacaa

SEQ ID NO: 542290 - RNA, 22 nt, Human
gccaccagcagaaaaggggcca

SEQ ID NO: 542291 - RNA, 22 nt, Human
aguguggcugcguagggcucuc

SEQ ID NO: 542292 - RNA, 22 nt, Human
uugcaucaguccucaauaaaau

SEQ ID NO: 542293 - RNA, 21 nt, Human
aguugcauaggccagccaucc

SEQ ID NO: 542294 - RNA, 22 nt, Human
guuagggagggugcauaugugu

SEQ ID NO: 542295 - RNA, 22 nt, Human
gagcugguuuuaggcuaugucu

SEQ ID NO: 542296 - RNA, 22 nt, Human
ugacagaacagguugggagcaa

SEQ ID NO: 542297 - RNA, 22 nt, Human
gagagcuggauucuggauaggu

SEQ ID NO: 542298 - RNA, 22 nt, Human
uggggccugagguggagcugca

SEQ ID NO: 542299 - RNA, 22 nt, Human
acuuuucucccuccugccuuca

SEQ ID NO: 542300 - RNA, 22 nt, Human
gcagcugaagcugcaguuccag

SEQ ID NO: 542301 - RNA, 22 nt, Human
agccagggagguggagguugca

SEQ ID NO: 542302 - RNA, 21 nt, Human
ucucccaaggagguccugagg

SEQ ID NO: 542303 - RNA, 22 nt, Human
caaagucauaaaacuuguaagu

SEQ ID NO: 542304 - RNA, 19 nt, Human
ugcccugcccgcagccuug

SEQ ID NO: 542305 - RNA, 22 nt, Human
aggcuggcgucaggggcuguac

SEQ ID NO: 542306 - RNA, 22 nt, Human
cagugauguuucugcaucagag

SEQ ID NO: 542307 - RNA, 22 nt, Human
gcuggggagcaagaguagugag

SEQ ID NO: 542308 - RNA, 22 nt, Human
cuucagagcaucacuucagcug

SEQ ID NO: 542309 - RNA, 22 nt, Human
gggagguguucugccaacgcgg

SEQ ID NO: 542310 - RNA, 22 nt, Human
acaaagugaaaagcaucgaauu

SEQ ID NO: 542311 - RNA, 22 nt, Human
ccaguguuuacaguugaacaaa

SEQ ID NO: 542312 - RNA, 22 nt, Human
ugggccucuguuuccucaucug

SEQ ID NO: 542313 - RNA, 22 nt, Human
caaagucauggggaugcagguc

SEQ ID NO: 542314 - RNA, 22 nt, Human
aguggagugaguggcagaagga

SEQ ID NO: 542315 - RNA, 20 nt, Human
ugcuguaagauuagagagcu

SEQ ID NO: 542316 - RNA, 18 nt, Human
cagauccaggcagcuauu

SEQ ID NO: 542317 - RNA, 22 nt, Human
ucuggagauaagacagacagau

SEQ ID NO: 542318 - RNA, 22 nt, Human
uauuuaauuagugauuguagag

SEQ ID NO: 542319 - RNA, 20 nt, Human
ugugggcccuuggcuggcaa

SEQ ID NO: 542320 - RNA, 22 nt, Human
gccaggcaggugucggagcccu

SEQ ID NO: 542321 - RNA, 22 nt, Human
agccucugguccucccucagcu

SEQ ID NO: 542322 - RNA, 20 nt, Human
caucagaaauccugacccac

SEQ ID NO: 542323 - RNA, 22 nt, Human
acccugccucugcuuccuguag

SEQ ID NO: 542324 - RNA, 22 nt, Human
gcagugaacauaacacagaagg

SEQ ID NO: 542325 - RNA, 22 nt, Human
ccacuguaguuaugaugaaguu

SEQ ID NO: 542326 - RNA, 22 nt, Human
gaaggaaguuuauuuuagaaga

SEQ ID NO: 542327 - RNA, 22 nt, Human
uauacagaacauuaagaacugu

SEQ ID NO: 542328 - RNA, 22 nt, Human
aagauguaucaguuaagucuuc

SEQ ID NO: 542329 - RNA, 22 nt, Human
ucuuagaaaugaaguucuuucu

SEQ ID NO: 542330 - RNA, 22 nt, Human
cuccuggaguccuuuccuauuc

SEQ ID NO: 542331 - RNA, 22 nt, Human
ucagaggccugaaagaauuugg

SEQ ID NO: 542332 - RNA, 22 nt, Human
uaggaaaauaucucuuauuggg

SEQ ID NO: 542333 - RNA, 22 nt, Human
caccaggugcuggaggacauca

SEQ ID NO: 542334 - RNA, 22 nt, Human
gugcccagugcaggcccgcagg

SEQ ID NO: 542335 - RNA, 22 nt, Human
ggugggugagcccugggagcug

SEQ ID NO: 542336 - RNA, 22 nt, Human
cugcuuugggcagcuuuguggc

SEQ ID NO: 542337 - RNA, 22 nt, Human
acacugaaugcuguuuagaaau

SEQ ID NO: 542338 - RNA, 22 nt, Human
ccucuugccaaucagcuacaga

SEQ ID NO: 542339 - RNA, 18 nt, Human
uguaaacacuuucauucu

SEQ ID NO: 542340 - RNA, 22 nt, Human
gcagugaaacaauaggaucaaa

SEQ ID NO: 542341 - RNA, 22 nt, Human
agcucuccacacauaggacuag

SEQ ID NO: 542342 - RNA, 22 nt, Human
gugauucauucgauuaguauuu

SEQ ID NO: 542343 - RNA, 22 nt, Human
agaauauaaagauaauucuguu

SEQ ID NO: 542344 - RNA, 22 nt, Human
gugcccugaggucuucacuuug

SEQ ID NO: 542345 - RNA, 22 nt, Human
caggcagcccugcaccaagugu

SEQ ID NO: 542346 - RNA, 23 nt, Human
ggcagagagcauggcuggggccc

SEQ ID NO: 542347 - RNA, 22 nt, Human
aggcuggcaaggcagaugugug

SEQ ID NO: 542348 - RNA, 22 nt, Human
agcugcagagguuugugcaaca

SEQ ID NO: 542349 - RNA, 21 nt, Human
gaaguacaccaggaaggccac

SEQ ID NO: 542350 - RNA, 22 nt, Human
uuucuuguaagauguuuauuaa

SEQ ID NO: 542351 - RNA, 22 nt, Human
gaaguuaguguggaugcaggga

SEQ ID NO: 542352 - RNA, 22 nt, Human
guccucaguaagagggccucug

SEQ ID NO: 542353 - RNA, 22 nt, Human
agggcccaggacagcaucaggg

SEQ ID NO: 542354 - RNA, 22 nt, Human
uuguaacagcugcuuaauagag

SEQ ID NO: 542355 - RNA, 22 nt, Human
ggcagcucugugucugggaagc

SEQ ID NO: 542356 - RNA, 22 nt, Human
uggcccugcuggccaaaggcua

SEQ ID NO: 542357 - RNA, 23 nt, Human
gaaagucaauaugguagcuuuga

SEQ ID NO: 542358 - RNA, 22 nt, Human
ggugcagagcagugucagagca

SEQ ID NO: 542359 - RNA, 22 nt, Human
aucugccugagucuagguuuuc

SEQ ID NO: 542360 - RNA, 22 nt, Human
agcugagcugcagaugacugua

SEQ ID NO: 542361 - RNA, 22 nt, Human
ugauuuguuuagugccaaguuu

SEQ ID NO: 542362 - RNA, 17 nt, Human
caggccuugagccuuua

SEQ ID NO: 542363 - RNA, 22 nt, Human
gcagagcugggucuguauccaa

SEQ ID NO: 542364 - RNA, 22 nt, Human
ucucagagaucuuucugcaugu

SEQ ID NO: 542365 - RNA, 22 nt, Human
ggacucagcagccaggaguggc

SEQ ID NO: 542366 - RNA, 22 nt, Human
uuuacaaguacaccuaacagcu

SEQ ID NO: 542367 - RNA, 22 nt, Human
gcuggccuccugcuagauggaa

SEQ ID NO: 542368 - RNA, 20 nt, Human
gugcccugugggcuauuuuc

SEQ ID NO: 542369 - RNA, 23 nt, Human
ucugucacuuucugcuguggagu

SEQ ID NO: 542370 - RNA, 22 nt, Human
uaguauuuaaucacuuuugucu

SEQ ID NO: 542371 - RNA, 22 nt, Human
cucaggauggaagccuacagga

SEQ ID NO: 542372 - RNA, 22 nt, Human
ggcuccuguccuccuggagcuc

SEQ ID NO: 542373 - RNA, 22 nt, Human
aaacuguaagagaauaaacuac

SEQ ID NO: 542374 - RNA, 22 nt, Human
agcuccugcuugacagaagagg

SEQ ID NO: 542375 - RNA, 22 nt, Human
ccagagcagauguggccuuggu

SEQ ID NO: 542376 - RNA, 22 nt, Human
ucucccagugucuggcagucag

SEQ ID NO: 542377 - RNA, 19 nt, Human
gguuauuugaggguuaaga

SEQ ID NO: 542378 - RNA, 22 nt, Human
gaggggcugggguugacuccaa

SEQ ID NO: 542379 - RNA, 22 nt, Human
uaacuagauauagacuuucuac

SEQ ID NO: 542380 - RNA, 22 nt, Human
caggaaugacugcagauggggc

SEQ ID NO: 542381 - RNA, 22 nt, Human
gccagcagcccagaaggacuuu

SEQ ID NO: 542382 - RNA, 22 nt, Human
aguguccccuccaagggccugg

SEQ ID NO: 542383 - RNA, 22 nt, Human
gaaaguacagauuccuggccag

SEQ ID NO: 542384 - RNA, 22 nt, Human
gcaguuacuagcaauuugugaa

SEQ ID NO: 542385 - RNA, 22 nt, Human
caagcagagaggucaacuaaua

SEQ ID NO: 542386 - RNA, 22 nt, Human
cuggcagcauuaacagagagca

SEQ ID NO: 542387 - RNA, 22 nt, Human
uggcugagccacuuguucagau

SEQ ID NO: 542388 - RNA, 22 nt, Human
agggcaguguggugggacugac

SEQ ID NO: 542389 - RNA, 22 nt, Human
acucacaggacucugcauauag

SEQ ID NO: 542390 - RNA, 22 nt, Human
uaugaaaauuuagcugaagcau

SEQ ID NO: 542391 - RNA, 19 nt, Human
gggcuuggggcugaagccu

SEQ ID NO: 542392 - RNA, 22 nt, Human
caauguaucaaccagaaaguuc

SEQ ID NO: 542393 - RNA, 22 nt, Human
agcagggccugagugaccuaac

SEQ ID NO: 542394 - RNA, 22 nt, Human
uugcaaggagccacucugccug

SEQ ID NO: 542395 - RNA, 22 nt, Human
ucaugaaucguggaaugauuua

SEQ ID NO: 542396 - RNA, 17 nt, Human
agcaaaaguaucaaagc

SEQ ID NO: 542397 - RNA, 17 nt, Human
gagccacccugugcgag

SEQ ID NO: 542398 - RNA, 22 nt, Human
uuuguagacgucagaaguuacu

SEQ ID NO: 542399 - RNA, 23 nt, Human
auauaaacaccagauagauugua

SEQ ID NO: 542400 - RNA, 22 nt, Human
ucaaaguagggguaagccaggc

SEQ ID NO: 542401 - RNA, 22 nt, Human
agcaguggaccucagugcuauu

SEQ ID NO: 542402 - RNA, 22 nt, Human
ucuagaaauuuugccuuguauu

SEQ ID NO: 542403 - RNA, 22 nt, Human
cacucugcgcugggcgccagcg

SEQ ID NO: 542404 - RNA, 22 nt, Human
cagucauuuuauuugaaaauua

SEQ ID NO: 542405 - RNA, 22 nt, Human
augucuuucaaauucugccuag

SEQ ID NO: 542406 - RNA, 22 nt, Human
gcuuuucuagcuagaacauccg

SEQ ID NO: 542407 - RNA, 22 nt, Human
aagcaauauacugauaugauua

SEQ ID NO: 542408 - RNA, 22 nt, Human
aggucauuuuugccuucuauuu

SEQ ID NO: 542409 - RNA, 22 nt, Human
gaggcugauucggggaacagca

SEQ ID NO: 542410 - RNA, 22 nt, Human
aucugucuauguggcuauguau

SEQ ID NO: 542411 - RNA, 22 nt, Human
aggccaggaauccuugucccag

SEQ ID NO: 542412 - RNA, 22 nt, Human
uuccacauagaucacagguguu

SEQ ID NO: 542413 - RNA, 22 nt, Human
uaagucauuaggcugaguucaa

SEQ ID NO: 542414 - RNA, 22 nt, Human
guaucacuuuugagagugagaa

SEQ ID NO: 542415 - RNA, 22 nt, Human
gcuuccugagaaacaaucugau

SEQ ID NO: 542416 - RNA, 22 nt, Human
gacagacagggguucuccugga

SEQ ID NO: 542417 - RNA, 22 nt, Human
uacagagaacucauagaaagaa

SEQ ID NO: 542418 - RNA, 22 nt, Human
caagggccuccaccuugcucgu

SEQ ID NO: 542419 - RNA, 22 nt, Human
guaaacaagucuaccauuagaa

SEQ ID NO: 542420 - RNA, 21 nt, Human
ugcaggcugugcgcuccugcc

SEQ ID NO: 542421 - RNA, 20 nt, Human
aacaaacuacaaaauuaugu

SEQ ID NO: 542422 - RNA, 22 nt, Human
cugauuucucaguucuaggaag

SEQ ID NO: 542423 - RNA, 22 nt, Human
cugggcugugguguggcccaaa

SEQ ID NO: 542424 - RNA, 22 nt, Human
cugucagguuggucucagagcu

SEQ ID NO: 542425 - RNA, 22 nt, Human
uggucaggcugcucugcggcgu

SEQ ID NO: 542426 - RNA, 20 nt, Human
ugacucugcaaccgucucuc

SEQ ID NO: 542427 - RNA, 20 nt, Human
ugguaucaauuacuagauug

SEQ ID NO: 542428 - RNA, 22 nt, Human
gcugaggaaaggcuggaaggga

SEQ ID NO: 542429 - RNA, 22 nt, Human
cccugaccccacggcuggagaa

SEQ ID NO: 542430 - RNA, 22 nt, Human
uuaugggagcaauuggggaggu

SEQ ID NO: 542431 - RNA, 22 nt, Human
cuggagugaagcuuauuuuuca

SEQ ID NO: 542432 - RNA, 22 nt, Human
gcagagccugugucugagcaaa

SEQ ID NO: 542433 - RNA, 22 nt, Human
aguguauuugccuauaaaaaug

SEQ ID NO: 542434 - RNA, 22 nt, Human
agaguggagagaaacaacucug

SEQ ID NO: 542435 - RNA, 22 nt, Human
uuccagcccgcgacuuguucag

SEQ ID NO: 542436 - RNA, 22 nt, Human
gugcccugguccccagcauaua

SEQ ID NO: 542437 - RNA, 22 nt, Human
cugugcaguccagcccuggaca

SEQ ID NO: 542438 - RNA, 22 nt, Human
agcagcaggcuagggaacugcu

SEQ ID NO: 542439 - RNA, 22 nt, Human
agcuggccauugugaguggccu

SEQ ID NO: 542440 - RNA, 22 nt, Human
auacaucuaugccuuucugaca

SEQ ID NO: 542441 - RNA, 22 nt, Human
caccagggcucugagcucugaa

SEQ ID NO: 542442 - RNA, 22 nt, Human
cugggagcuagcucugagcuga

SEQ ID NO: 542443 - RNA, 22 nt, Human
gucuuuuugucuggcagagguc

SEQ ID NO: 542444 - RNA, 22 nt, Human
cauuaucucuucuauaugcuag

SEQ ID NO: 542445 - RNA, 21 nt, Human
ccagagccugcugagcccccu

SEQ ID NO: 542446 - RNA, 22 nt, Human
guuuuuucaugaguaguuaucu

SEQ ID NO: 542447 - RNA, 22 nt, Human
ggcuucuccagguacugagcau

SEQ ID NO: 542448 - RNA, 22 nt, Human
guuucaaagcacagcucacauu

SEQ ID NO: 542449 - RNA, 22 nt, Human
aguccuaggcccugcuccagau

SEQ ID NO: 542450 - RNA, 22 nt, Human
cagugccaugucugagccccua

SEQ ID NO: 542451 - RNA, 22 nt, Human
uacagaauaaagcgugaagcuu

SEQ ID NO: 542452 - RNA, 22 nt, Human
uauuuguguggguaucuauaua

SEQ ID NO: 542453 - RNA, 22 nt, Human
aaaguucagauuagacucaaga

SEQ ID NO: 542454 - RNA, 19 nt, Human
ucacaggcaucuccccaga

SEQ ID NO: 542455 - RNA, 22 nt, Human
ggaguaggaguagaacucauca

SEQ ID NO: 542456 - RNA, 22 nt, Human
cugaggcuuggaggggucuggu

SEQ ID NO: 542457 - RNA, 22 nt, Human
agguccugggaguucuagugug

SEQ ID NO: 542458 - RNA, 22 nt, Human
uccaaguuucuucugcacaaca

SEQ ID NO: 542459 - RNA, 22 nt, Human
ggcuccagggaguggagagaag

SEQ ID NO: 542460 - RNA, 22 nt, Human
gauacauuuuaucuccuaacag

SEQ ID NO: 542461 - RNA, 22 nt, Human
uaaugguauuuguugaaaaacu

SEQ ID NO: 542462 - RNA, 19 nt, Human
ugcucauggggacuucucc

SEQ ID NO: 542463 - RNA, 22 nt, Human
uauuuguccuuauuaagaucug

SEQ ID NO: 542464 - RNA, 22 nt, Human
ucucaugugauucccgugcaug

SEQ ID NO: 542465 - RNA, 22 nt, Human
cuuugcauacaauuuuuagaaa

SEQ ID NO: 542466 - RNA, 22 nt, Human
ccauaaucuggcuuugagagag

SEQ ID NO: 542467 - RNA, 22 nt, Human
uggugagagcagaccuucuuuu

SEQ ID NO: 542468 - RNA, 22 nt, Human
uucaugugaucacagauuguaa

SEQ ID NO: 542469 - RNA, 21 nt, Human
ggcagccugacccccagagag

SEQ ID NO: 542470 - RNA, 22 nt, Human
aagagcauggaauggagaucca

SEQ ID NO: 542471 - RNA, 22 nt, Human
aaggagcuuguucgccuuccuc

SEQ ID NO: 542472 - RNA, 22 nt, Human
ugggcugaacuucaucugauga

SEQ ID NO: 542473 - RNA, 22 nt, Human
ucagagcuuuggagaccaggaa

SEQ ID NO: 542474 - RNA, 22 nt, Human
guccaggcugaccccuagagga

SEQ ID NO: 542475 - RNA, 22 nt, Human
aggaccuguguuuuccuugaau

SEQ ID NO: 542476 - RNA, 22 nt, Human
ggagagaauuccauggacaugu

SEQ ID NO: 542477 - RNA, 22 nt, Human
uacuuguuaucaucuuuuccuu

SEQ ID NO: 542478 - RNA, 22 nt, Human
ugucccagacauaaguggacau

SEQ ID NO: 542479 - RNA, 22 nt, Human
uucaaacaaaacuguucccaua

SEQ ID NO: 542480 - RNA, 22 nt, Human
ugcauuccuccaccuccugcac

SEQ ID NO: 542481 - RNA, 22 nt, Human
aggcuccauaccaucuccggag

SEQ ID NO: 542482 - RNA, 22 nt, Human
uuuggaaaaagccugaacauag

SEQ ID NO: 542483 - RNA, 22 nt, Human
uuucuguaaggacuuaaugcaa

SEQ ID NO: 542484 - RNA, 22 nt, Human
ucccacacagcccgcucaccgg

SEQ ID NO: 542485 - RNA, 22 nt, Human
aucuggcucacuuagucuagga

SEQ ID NO: 542486 - RNA, 22 nt, Human
gcucuugauguucauugacuug

SEQ ID NO: 542487 - RNA, 22 nt, Human
auaaaacuuauuagaauugugu

SEQ ID NO: 542488 - RNA, 22 nt, Human
ggcugccuucccugagccccgg

SEQ ID NO: 542489 - RNA, 22 nt, Human
cugccacuuucacccagugcuc

SEQ ID NO: 542490 - RNA, 22 nt, Human
uggcaacaugucgaagugcugu

SEQ ID NO: 542491 - RNA, 20 nt, Human
gagagcuggggaugaggcug

SEQ ID NO: 542492 - RNA, 22 nt, Human
cagcucugugcaggccugggga

SEQ ID NO: 542493 - RNA, 22 nt, Human
aauuucaccuaucacuuaagcc

SEQ ID NO: 542494 - RNA, 22 nt, Human
ccuggcaccuucacagacuacu

SEQ ID NO: 542495 - RNA, 22 nt, Human
uguuaccaggcaguauugcuua

SEQ ID NO: 542496 - RNA, 17 nt, Human
ugauucaacuagaaacu

SEQ ID NO: 542497 - RNA, 22 nt, Human
aacaaauggggccuuguaugaa

SEQ ID NO: 542498 - RNA, 22 nt, Human
ccugugcuucagcuggaggagg

SEQ ID NO: 542499 - RNA, 22 nt, Human
uguuaaucaaucaacaguauua

SEQ ID NO: 542500 - RNA, 23 nt, Human
uuccuuaacuguuaagauugucu

SEQ ID NO: 542501 - RNA, 22 nt, Human
guuauuuuaucucugagagguu

SEQ ID NO: 542502 - RNA, 22 nt, Human
uggccccccagagcuggaggac

SEQ ID NO: 542503 - RNA, 22 nt, Human
gcugggcucagaccuagugaac

SEQ ID NO: 542504 - RNA, 22 nt, Human
uauguauaaaugcaugugugga

SEQ ID NO: 542505 - RNA, 22 nt, Human
ucauaacaggcugagaggauuu

SEQ ID NO: 542506 - RNA, 22 nt, Human
aaauaaacugaagcacagagag

SEQ ID NO: 542507 - RNA, 22 nt, Human
ucugccuguaauauuuggagaa

SEQ ID NO: 542508 - RNA, 22 nt, Human
cugccuugaggagguuguggga

SEQ ID NO: 542509 - RNA, 20 nt, Human
aauguauauuuuaugccagg

SEQ ID NO: 542510 - RNA, 22 nt, Human
acuacauuucucaguaccugaa

SEQ ID NO: 542511 - RNA, 22 nt, Human
cuggcugccacuucagggucuu

SEQ ID NO: 542512 - RNA, 22 nt, Human
caggggccaaggguccagaccu

SEQ ID NO: 542513 - RNA, 22 nt, Human
ggucccaguugcccaggucagg

SEQ ID NO: 542514 - RNA, 22 nt, Human
ucaccuuaacaaucugaccauc

SEQ ID NO: 542515 - RNA, 22 nt, Human
cugccugcuucugagccagagg

SEQ ID NO: 542516 - RNA, 22 nt, Human
aaauugcaaaaguacuuuuagg

SEQ ID NO: 542517 - RNA, 22 nt, Human
aggagcugaaacuucucauaug

SEQ ID NO: 542518 - RNA, 22 nt, Human
ucaggcucaaagggccggauga

SEQ ID NO: 542519 - RNA, 22 nt, Human
ugcugccaggucuugcugucca

SEQ ID NO: 542520 - RNA, 22 nt, Human
cuggggccacaacggcgcacgc

SEQ ID NO: 542521 - RNA, 22 nt, Human
uuaagcuaauuaguuccagcau

SEQ ID NO: 542522 - RNA, 22 nt, Human
cagucaccaccagguggcagua

SEQ ID NO: 542523 - RNA, 22 nt, Human
ugcccugcugugccuggagcca

SEQ ID NO: 542524 - RNA, 22 nt, Human
gaggccagaagucugagaucag

SEQ ID NO: 542525 - RNA, 22 nt, Human
gugcauccacuagggcucuccc

SEQ ID NO: 542526 - RNA, 22 nt, Human
ugccugggaaccaauccuggcu

SEQ ID NO: 542527 - RNA, 22 nt, Human
agagacagaggcaauauagcuu

SEQ ID NO: 542528 - RNA, 22 nt, Human
ccagagaguaaacauuuuccgg

SEQ ID NO: 542529 - RNA, 19 nt, Human
uucauucuuucuacuuacc

SEQ ID NO: 542530 - RNA, 23 nt, Human
uaaagacagccuucaggauucug

SEQ ID NO: 542531 - RNA, 22 nt, Human
agucauauguggcauuuucuaa

SEQ ID NO: 542532 - RNA, 22 nt, Human
aaaugugaguuauagcaauaga

SEQ ID NO: 542533 - RNA, 22 nt, Human
cagaagacugcagggaagggac

SEQ ID NO: 542534 - RNA, 22 nt, Human
ucacauuugcaauugcauuguu

SEQ ID NO: 542535 - RNA, 22 nt, Human
ucaguuuucucaucugugaaau

SEQ ID NO: 542536 - RNA, 21 nt, Human
aucuggaagaacugguaagug

SEQ ID NO: 542537 - RNA, 22 nt, Human
ugccugaggagucagggcaggu

SEQ ID NO: 542538 - RNA, 23 nt, Human
ucacaggggccagcgcucugugg

SEQ ID NO: 542539 - RNA, 22 nt, Human
ugcaaacaauuuccuauaaagu

SEQ ID NO: 542540 - RNA, 22 nt, Human
ugauuuuuagcuauucugaaga

SEQ ID NO: 542541 - RNA, 22 nt, Human
guauucuugguuaucaaaauac

SEQ ID NO: 542542 - RNA, 22 nt, Human
aggaagcugggaaacugacauu

SEQ ID NO: 542543 - RNA, 22 nt, Human
gggcagcugccaagugcaucgc

SEQ ID NO: 542544 - RNA, 22 nt, Human
uaugaaauuucuaguucugcuu

SEQ ID NO: 542545 - RNA, 22 nt, Human
auuuacagguagaauuuuaagu

SEQ ID NO: 542546 - RNA, 22 nt, Human
aguggugcugcgcgcggagcuc

SEQ ID NO: 542547 - RNA, 22 nt, Human
cacugaaucucaaggggagggu

SEQ ID NO: 542548 - RNA, 22 nt, Human
gugaagcacgcugccgcacugg

SEQ ID NO: 542549 - RNA, 22 nt, Human
ucaacagaagugauagcuauua

SEQ ID NO: 542550 - RNA, 22 nt, Human
aacuuucagaauccuaugcauu

SEQ ID NO: 542551 - RNA, 20 nt, Human
auuccucagccccagccuca

SEQ ID NO: 542552 - RNA, 22 nt, Human
caguuuuacccaagcuuauuuu

SEQ ID NO: 542553 - RNA, 22 nt, Human
caugcaguguguaucuacuuaa

SEQ ID NO: 542554 - RNA, 22 nt, Human
aaggagagguuguccguguugu

SEQ ID NO: 542555 - RNA, 22 nt, Human
aagggcugccagggggugccag

SEQ ID NO: 542556 - RNA, 22 nt, Human
accaggcacuccugaggucuga

SEQ ID NO: 542557 - RNA, 22 nt, Human
ugggcucaaacuggagguuguu

SEQ ID NO: 542558 - RNA, 22 nt, Human
ugacaagaggcagaaucagcug

SEQ ID NO: 542559 - RNA, 22 nt, Human
ugagagcugccacgugaccaug

SEQ ID NO: 542560 - RNA, 22 nt, Human
uagcugccagaccauucuuacu

SEQ ID NO: 542561 - RNA, 22 nt, Human
auuuccaagaaagcuuuaggau

SEQ ID NO: 542562 - RNA, 22 nt, Human
cagcucccgccaucgggaggca

SEQ ID NO: 542563 - RNA, 22 nt, Human
aauuucagagguagagauucua

SEQ ID NO: 542564 - RNA, 22 nt, Human
uucuaaagccuguccuaucaga

SEQ ID NO: 542565 - RNA, 22 nt, Human
ugcuggguuaccuaagccuaaa

SEQ ID NO: 542566 - RNA, 22 nt, Human
ucacaggcuccagggccuggau

SEQ ID NO: 542567 - RNA, 23 nt, Human
uugggcuggcucucgaugccucu

SEQ ID NO: 542568 - RNA, 22 nt, Human
acacacaaaucuauuagugaau

SEQ ID NO: 542569 - RNA, 20 nt, Human
ccuggagccuggaaggaguc

SEQ ID NO: 542570 - RNA, 22 nt, Human
ccaggccaaauucagucagcag

SEQ ID NO: 542571 - RNA, 22 nt, Human
ugucuccauuuucaaguagcag

SEQ ID NO: 542572 - RNA, 20 nt, Human
auagaaguauuauguaaugu

SEQ ID NO: 542573 - RNA, 22 nt, Human
gaagaacugacaaacuagauca

SEQ ID NO: 542574 - RNA, 22 nt, Human
uuucaagagggaacugaacaca

SEQ ID NO: 542575 - RNA, 22 nt, Human
cuuauuauggcauguaaguggg

SEQ ID NO: 542576 - RNA, 16 nt, Human
uguuagcugugcauua

SEQ ID NO: 542577 - RNA, 22 nt, Human
acaugggaucaaugaggcaggc

SEQ ID NO: 542578 - RNA, 20 nt, Human
gaaauguaucucuugauucu

SEQ ID NO: 542579 - RNA, 22 nt, Human
auuuuugcccugcaguacauaa

SEQ ID NO: 542580 - RNA, 22 nt, Human
agggcugacacaccuuauccuc

SEQ ID NO: 542581 - RNA, 18 nt, Human
aguaguggguuuagcuuc

SEQ ID NO: 542582 - RNA, 22 nt, Human
ccaggcugagcaugauuggagc

SEQ ID NO: 542583 - RNA, 19 nt, Human
ucaaagcaagcauguucug

SEQ ID NO: 542584 - RNA, 21 nt, Human
cuugaaagguagagucuacag

SEQ ID NO: 542585 - RNA, 22 nt, Human
uaugcauagguaucuauacuca

SEQ ID NO: 542586 - RNA, 22 nt, Human
augcugugucaccuuaggauuu

SEQ ID NO: 542587 - RNA, 22 nt, Human
auucacacauacucauguguga

SEQ ID NO: 542588 - RNA, 22 nt, Human
aggugagaaaacgaggguugca

SEQ ID NO: 542589 - RNA, 22 nt, Human
gccuccuggauuuuagugccau

SEQ ID NO: 542590 - RNA, 22 nt, Human
caguuuuaugaaugcuuauuag

SEQ ID NO: 542591 - RNA, 22 nt, Human
aaaguuuccugcuaagugcuau

SEQ ID NO: 542592 - RNA, 22 nt, Human
gacuucaaaggucaaacaucgc

SEQ ID NO: 542593 - RNA, 22 nt, Human
uagaaacauauguuugagacau

SEQ ID NO: 542594 - RNA, 22 nt, Human
uuuuauugucucccaguucugg

SEQ ID NO: 542595 - RNA, 22 nt, Human
cagggccuccuaaggcaucuaa

SEQ ID NO: 542596 - RNA, 22 nt, Human
ugucccagcagcuggguucucu

SEQ ID NO: 542597 - RNA, 22 nt, Human
uuucugaaaucucuuuugagga

SEQ ID NO: 542598 - RNA, 22 nt, Human
acauuuuacaccaagacuucuu

SEQ ID NO: 542599 - RNA, 22 nt, Human
ucuccuggauggaccuucucuu

SEQ ID NO: 542600 - RNA, 19 nt, Human
ggaggccuggguauuugcc

SEQ ID NO: 542601 - RNA, 21 nt, Human
auuuccaaggguaccuaagau

SEQ ID NO: 542602 - RNA, 22 nt, Human
uagcucuucauuucaucugauu

SEQ ID NO: 542603 - RNA, 22 nt, Human
gggcugaaaggccgccucagau

SEQ ID NO: 542604 - RNA, 22 nt, Human
cucagaguucuccugggaggug

SEQ ID NO: 542605 - RNA, 22 nt, Human
gcuggcagacugggggcagaac

SEQ ID NO: 542606 - RNA, 22 nt, Human
aaaugaccagaauacaggcuuc

SEQ ID NO: 542607 - RNA, 22 nt, Human
ucagucuucuagcaaauccagg

SEQ ID NO: 542608 - RNA, 22 nt, Human
gcacacacuguuuuccucacau

SEQ ID NO: 542609 - RNA, 22 nt, Human
uaaagccacgcuggaaaucagg

SEQ ID NO: 542610 - RNA, 22 nt, Human
uaaagacacccagggagggacu

SEQ ID NO: 542611 - RNA, 22 nt, Human
uuugcauugcagugguuuacag

SEQ ID NO: 542612 - RNA, 22 nt, Human
aaggccauuauucugauauauu

SEQ ID NO: 542613 - RNA, 22 nt, Human
ucucccuggagcccugaagcau

SEQ ID NO: 542614 - RNA, 22 nt, Human
agcugcccuuaauaggcauuca

SEQ ID NO: 542615 - RNA, 22 nt, Human
auuucugauaaacguaagcugc

SEQ ID NO: 542616 - RNA, 22 nt, Human
ucucccaggucauacacagaga

SEQ ID NO: 542617 - RNA, 22 nt, Human
aucaaaguggaaguuuacuagg

SEQ ID NO: 542618 - RNA, 22 nt, Human
cucuggagcgcugcuucccgcg

SEQ ID NO: 542619 - RNA, 22 nt, Human
gagcucauucauucauugccug

SEQ ID NO: 542620 - RNA, 22 nt, Human
cucugggccaccgcugguguau

SEQ ID NO: 542621 - RNA, 22 nt, Human
uuugggcucuugcugaccuggg

SEQ ID NO: 542622 - RNA, 22 nt, Human
cuccucacuuuccagacugggc

SEQ ID NO: 542623 - RNA, 22 nt, Human
uuuaauaucucacacuuccaug

SEQ ID NO: 542624 - RNA, 22 nt, Human
agcucugggcugacaugcuccc

SEQ ID NO: 542625 - RNA, 22 nt, Human
cagaagaaaguggggagacaag

SEQ ID NO: 542626 - RNA, 22 nt, Human
cuucagugauauaggcuucucc

SEQ ID NO: 542627 - RNA, 17 nt, Human
aguguuuccuuaucauu

SEQ ID NO: 542628 - RNA, 22 nt, Human
ucaguaaaauuacagaucuaca

SEQ ID NO: 542629 - RNA, 22 nt, Human
uucacaguaaguaggauaguug

SEQ ID NO: 542630 - RNA, 22 nt, Human
acauuuaaguuaaaaccucagu

SEQ ID NO: 542631 - RNA, 16 nt, Human
auucugcugccugcuc

SEQ ID NO: 542632 - RNA, 22 nt, Human
aucacauugccagugauuaccc

SEQ ID NO: 542633 - RNA, 22 nt, Human
gcccugagacugagcauggguu

SEQ ID NO: 542634 - RNA, 22 nt, Human
uggcucagcugucacagccugg

SEQ ID NO: 542635 - RNA, 22 nt, Human
agacauaagcgagcaucacagg

SEQ ID NO: 542636 - RNA, 22 nt, Human
aaacuguaaauacuaguaagug

SEQ ID NO: 542637 - RNA, 22 nt, Human
uuucacaacugcuuauuugaga

SEQ ID NO: 542638 - RNA, 21 nt, Human
aucaccagcagaagcugcaga

SEQ ID NO: 542639 - RNA, 22 nt, Human
uugcuuuugggaaaacaugccu

SEQ ID NO: 542640 - RNA, 22 nt, Human
ugggcucagggaagcuuggccu

SEQ ID NO: 542641 - RNA, 22 nt, Human
cuuuucuuacucccgcaaggca

SEQ ID NO: 542642 - RNA, 22 nt, Human
ugagugccugaacauagaguag

SEQ ID NO: 542643 - RNA, 22 nt, Human
ugagggcugcuuccagagcuag

SEQ ID NO: 542644 - RNA, 22 nt, Human
uucuuucugaauacaguugagu

SEQ ID NO: 542645 - RNA, 22 nt, Human
uacauaguauucacauuguuuu

SEQ ID NO: 542646 - RNA, 22 nt, Human
uguaggcugaagaugaagugga

SEQ ID NO: 542647 - RNA, 22 nt, Human
acacuuaacuucugagaauaaa

SEQ ID NO: 542648 - RNA, 22 nt, Human
agcuucuuguagaacucaaaag

SEQ ID NO: 542649 - RNA, 23 nt, Human
agacccagagacuggcucugcuc

SEQ ID NO: 542650 - RNA, 21 nt, Human
ggagauggguaucgccugggc

SEQ ID NO: 542651 - RNA, 22 nt, Human
auucuucacauggauaggaucu

SEQ ID NO: 542652 - RNA, 22 nt, Human
agggaagaaucacugggauguu

SEQ ID NO: 542653 - RNA, 22 nt, Human
agccuggacagcuacggagaac

SEQ ID NO: 542654 - RNA, 22 nt, Human
cugggccauggaagucucugcc

SEQ ID NO: 542655 - RNA, 22 nt, Human
ccagccacugggccacugccag

SEQ ID NO: 542656 - RNA, 22 nt, Human
ccucaggauccgcaggugcagu

SEQ ID NO: 542657 - RNA, 22 nt, Human
gucaugccuggcuucuuagaca

SEQ ID NO: 542658 - RNA, 22 nt, Human
ggccuggcauggggacuaaggg

SEQ ID NO: 542659 - RNA, 22 nt, Human
aagaauuuuccagcaugucagu

SEQ ID NO: 542660 - RNA, 23 nt, Human
cccagcgcugagcccugcaggca

SEQ ID NO: 542661 - RNA, 22 nt, Human
acaguguaauucauggcugaaa

SEQ ID NO: 542662 - RNA, 22 nt, Human
uuucacaggaugcuguuuuaua

SEQ ID NO: 542663 - RNA, 19 nt, Human
ucuaaacuagucccauaac

SEQ ID NO: 542664 - RNA, 22 nt, Human
guuuuucucugaaauaguugac

SEQ ID NO: 542665 - RNA, 22 nt, Human
ucuaauuuuaggcauuuguuca

SEQ ID NO: 542666 - RNA, 22 nt, Human
cagcugccuucugcgggaaguc

SEQ ID NO: 542667 - RNA, 22 nt, Human
uuauuaggaacucaggauuuuu

SEQ ID NO: 542668 - RNA, 22 nt, Human
acucagaggaaacccuccuagg

SEQ ID NO: 542669 - RNA, 22 nt, Human
uguacauagaucuugaaaauua

SEQ ID NO: 542670 - RNA, 22 nt, Human
gcccauggcuucccuaggcaca

SEQ ID NO: 542671 - RNA, 22 nt, Human
agagggcuggacgcagguugga

SEQ ID NO: 542672 - RNA, 22 nt, Human
gagggcagugaauuuugaagcu

SEQ ID NO: 542673 - RNA, 22 nt, Human
acugcagccuagggaccacagu

SEQ ID NO: 542674 - RNA, 22 nt, Human
uaggacaggugaggggcugugg

SEQ ID NO: 542675 - RNA, 22 nt, Human
aggaggcugggcacaguggccu

SEQ ID NO: 542676 - RNA, 22 nt, Human
uggcauguauuaguuggcaguu

SEQ ID NO: 542677 - RNA, 19 nt, Human
ugccugucaguagaucuca

SEQ ID NO: 542678 - RNA, 22 nt, Human
ucuggccuacuggaguccauga

SEQ ID NO: 542679 - RNA, 22 nt, Human
gcuggccugcugggcaccaccg

SEQ ID NO: 542680 - RNA, 22 nt, Human
accaggaaaaacacuguguugg

SEQ ID NO: 542681 - RNA, 22 nt, Human
gccacaugcaauugcagcacgu

SEQ ID NO: 542682 - RNA, 22 nt, Human
gaaucagccugaguuugcagcu

SEQ ID NO: 542683 - RNA, 22 nt, Human
cagcuggcgccuggggaccaga

SEQ ID NO: 542684 - RNA, 22 nt, Human
agaugaaagauuuuuauagaga

SEQ ID NO: 542685 - RNA, 22 nt, Human
aaagcucuuauagcagagugug

SEQ ID NO: 542686 - RNA, 22 nt, Human
gacuuauucacgcagcuauacu

SEQ ID NO: 542687 - RNA, 22 nt, Human
guuacaaacucaggugccaaaa

SEQ ID NO: 542688 - RNA, 19 nt, Human
aaucagaaauaucgaggcc

SEQ ID NO: 542689 - RNA, 22 nt, Human
gcccuggacagugacggugacc

SEQ ID NO: 542690 - RNA, 22 nt, Human
cucaccaggaacagcugcggag

SEQ ID NO: 542691 - RNA, 22 nt, Human
aaaaguauaggguuuggaguca

SEQ ID NO: 542692 - RNA, 22 nt, Human
cacuaaaacuacauuggaaaca

SEQ ID NO: 542693 - RNA, 22 nt, Human
aacaaaucuuaaaguaauucaa

SEQ ID NO: 542694 - RNA, 22 nt, Human
auagacaaacacgaagaugaca

SEQ ID NO: 542695 - RNA, 22 nt, Human
uacagagacuuuauggcacaaa

SEQ ID NO: 542696 - RNA, 22 nt, Human
agggcagcaaugcagcugcugc

SEQ ID NO: 542697 - RNA, 22 nt, Human
auacuuacuuuucuucagacua

SEQ ID NO: 542698 - RNA, 22 nt, Human
cagacauauguuuuaacagauu

SEQ ID NO: 542699 - RNA, 22 nt, Human
ccugggaggcagagguugcagu

SEQ ID NO: 542700 - RNA, 22 nt, Human
uuuggaaaguguacaaauuuga

SEQ ID NO: 542701 - RNA, 22 nt, Human
acagaucacuugacuaaaauga

SEQ ID NO: 542702 - RNA, 22 nt, Human
ugauacuuuggagacuugagua

SEQ ID NO: 542703 - RNA, 22 nt, Human
cccaggucgucagcaguguggu

SEQ ID NO: 542704 - RNA, 22 nt, Human
aagaggcauaaaauuuauaugg

SEQ ID NO: 542705 - RNA, 21 nt, Human
acagagcauaaugguguggca

SEQ ID NO: 542706 - RNA, 22 nt, Human
augauggugagguugagcacag

SEQ ID NO: 542707 - RNA, 22 nt, Human
uucaaagaauuuugagaccuga

SEQ ID NO: 542708 - RNA, 22 nt, Human
gucucccacuuucuggccucuu

SEQ ID NO: 542709 - RNA, 23 nt, Human
ucagggacaugaugugucauauc

SEQ ID NO: 542710 - RNA, 22 nt, Human
ugcacacacaugaaguagcaug

SEQ ID NO: 542711 - RNA, 22 nt, Human
uccugggcuucacagacucugu

SEQ ID NO: 542712 - RNA, 22 nt, Human
ucaauucaacacaugcacauug

SEQ ID NO: 542713 - RNA, 22 nt, Human
uccugccuugccugggacauca

SEQ ID NO: 542714 - RNA, 22 nt, Human
accaggggaugguuggcacugu

SEQ ID NO: 542715 - RNA, 22 nt, Human
ugcaggugagugcaggggcuca

SEQ ID NO: 542716 - RNA, 22 nt, Human
cugcugggcagaggcugcauga

SEQ ID NO: 542717 - RNA, 22 nt, Human
ucaggcucagguuaggggccaa

SEQ ID NO: 542718 - RNA, 22 nt, Human
ccaggccuccugugaguggacc

SEQ ID NO: 542719 - RNA, 22 nt, Human
ugaggccugcccuggggaaguu

SEQ ID NO: 542720 - RNA, 21 nt, Human
aucaacauugaaagagcugga

SEQ ID NO: 542721 - RNA, 20 nt, Human
aagaaacuugaaaguacaag

SEQ ID NO: 542722 - RNA, 22 nt, Human
ucccugaaucucgaacuagccu

SEQ ID NO: 542723 - RNA, 22 nt, Human
guuuuccacuggauuguuugga

SEQ ID NO: 542724 - RNA, 23 nt, Human
ugauuuccagugagucaguggga

SEQ ID NO: 542725 - RNA, 22 nt, Human
ugagagggcccagagcacacca

SEQ ID NO: 542726 - RNA, 22 nt, Human
cagggcuggauuucauuucuag

SEQ ID NO: 542727 - RNA, 22 nt, Human
ggguccagacacuccagaggaa

SEQ ID NO: 542728 - RNA, 22 nt, Human
gaagaagggagugcguguaaua

SEQ ID NO: 542729 - RNA, 22 nt, Human
ucuuuaagccaagauauauuua

SEQ ID NO: 542730 - RNA, 22 nt, Human
agaagccagaauauucauggau

SEQ ID NO: 542731 - RNA, 22 nt, Human
gcugcccugacuccagcagccu

SEQ ID NO: 542732 - RNA, 23 nt, Human
agcugcugggccugccguggccu

SEQ ID NO: 542733 - RNA, 22 nt, Human
cagaacauucacucauaugugg

SEQ ID NO: 542734 - RNA, 22 nt, Human
caggcugauaggguccaaaguu

SEQ ID NO: 542735 - RNA, 19 nt, Human
ccaggccuccugggagguc

SEQ ID NO: 542736 - RNA, 22 nt, Human
aaagccagagcaagcugucaca

SEQ ID NO: 542737 - RNA, 22 nt, Human
uccagcagggaauuaguagucu

SEQ ID NO: 542738 - RNA, 22 nt, Human
agaacagcagcacgucaagcug

SEQ ID NO: 542739 - RNA, 17 nt, Human
ggcagcugccacuuuuu

SEQ ID NO: 542740 - RNA, 22 nt, Human
gccuucccaagacgccugaguu

SEQ ID NO: 542741 - RNA, 22 nt, Human
uaugagaacugacagagugcca

SEQ ID NO: 542742 - RNA, 22 nt, Human
uguacaugugucuguauaucuu

SEQ ID NO: 542743 - RNA, 22 nt, Human
agagcuggcugugggugacuuu

SEQ ID NO: 542744 - RNA, 22 nt, Human
auaaaaacugacccauccuuug

SEQ ID NO: 542745 - RNA, 17 nt, Human
agcugccuugcuugagc

SEQ ID NO: 542746 - RNA, 22 nt, Human
aguaugaaucucuuuauucugc

SEQ ID NO: 542747 - RNA, 22 nt, Human
cacauuuacuuuuaucccuugg

SEQ ID NO: 542748 - RNA, 22 nt, Human
cugagccuugaugucccuuguc

SEQ ID NO: 542749 - RNA, 23 nt, Human
uucaagauacgguuuccaggcug

SEQ ID NO: 542750 - RNA, 22 nt, Human
uggcacuggcgcaggauggcgg

SEQ ID NO: 542751 - RNA, 22 nt, Human
gagggccaauggauuucaacug

SEQ ID NO: 542752 - RNA, 22 nt, Human
uuucacagguauccacgggucu

SEQ ID NO: 542753 - RNA, 22 nt, Human
cagcagcuacuuggagcagcag

SEQ ID NO: 542754 - RNA, 22 nt, Human
uucuucaaauagcagggaguca

SEQ ID NO: 542755 - RNA, 22 nt, Human
ucuccacacuuucucucccagg

SEQ ID NO: 542756 - RNA, 22 nt, Human
uaaaggagugugaugaaaggga

SEQ ID NO: 542757 - RNA, 22 nt, Human
auauauuugagaauauucauga

SEQ ID NO: 542758 - RNA, 22 nt, Human
acuauaaaaggauaaaccagaa

SEQ ID NO: 542759 - RNA, 22 nt, Human
ccaggccugugcaaggagggag

SEQ ID NO: 542760 - RNA, 22 nt, Human
auaaaaaggacagauguggucu

SEQ ID NO: 542761 - RNA, 22 nt, Human
ggugggguuuuaggcugcugca

SEQ ID NO: 542762 - RNA, 22 nt, Human
gaggccagcgcgcagcacuuuu

SEQ ID NO: 542763 - RNA, 22 nt, Human
ugugccuucucaguccugcuca

SEQ ID NO: 542764 - RNA, 22 nt, Human
cagcuuagauggauacaaaggu

SEQ ID NO: 542765 - RNA, 22 nt, Human
aggccaggcaacauucugaagu

SEQ ID NO: 542766 - RNA, 22 nt, Human
auccagggauaaaaguaagguu

SEQ ID NO: 542767 - RNA, 22 nt, Human
cuuauguaaacuacagauaaua

SEQ ID NO: 542768 - RNA, 21 nt, Human
uucuucuuggacuguuuuggc

SEQ ID NO: 542769 - RNA, 22 nt, Human
agggagccuuccuggcuguggu

SEQ ID NO: 542770 - RNA, 22 nt, Human
aaccaacauaggaaugcagaga

SEQ ID NO: 542771 - RNA, 22 nt, Human
gcugccuugaacuuggccuggg

SEQ ID NO: 542772 - RNA, 22 nt, Human
gucugcccucacgccagcuggg

SEQ ID NO: 542773 - RNA, 22 nt, Human
caauguguguguuuuucucaac

SEQ ID NO: 542774 - RNA, 22 nt, Human
aggcugaggcuuuccuuggaga

SEQ ID NO: 542775 - RNA, 22 nt, Human
acagguggucuuugcuccuuuu

SEQ ID NO: 542776 - RNA, 22 nt, Human
aggugauguccacagcuugcag

SEQ ID NO: 542777 - RNA, 22 nt, Human
cugugacuguguuggaugcaca

SEQ ID NO: 542778 - RNA, 22 nt, Human
acaaacuucccagacaagcucc

SEQ ID NO: 542779 - RNA, 20 nt, Human
agucccuuuggucagguauu

SEQ ID NO: 542780 - RNA, 22 nt, Human
ugaggcaggaaguuauauaaug

SEQ ID NO: 542781 - RNA, 22 nt, Human
uucuuacauuacuuuacaugug

SEQ ID NO: 542782 - RNA, 20 nt, Human
gguuacauugucuacaugug

SEQ ID NO: 542783 - RNA, 22 nt, Human
aaacagaaggguagguaaacau

SEQ ID NO: 542784 - RNA, 22 nt, Human
acaguggaguugggguagcccu

SEQ ID NO: 542785 - RNA, 22 nt, Human
cugggaaagcaagguuguggau

SEQ ID NO: 542786 - RNA, 22 nt, Human
uggagcccagacacuggcauug

SEQ ID NO: 542787 - RNA, 22 nt, Human
uguaucuuucuguacuuuuaug

SEQ ID NO: 542788 - RNA, 22 nt, Human
ccugagagcccuagccaggcgc

SEQ ID NO: 542789 - RNA, 22 nt, Human
gccucucucuacccaguaugau

SEQ ID NO: 542790 - RNA, 22 nt, Human
uauuaguagcuugaaauuggug

SEQ ID NO: 542791 - RNA, 22 nt, Human
ugaguaggauaggguggggcuu

SEQ ID NO: 542792 - RNA, 22 nt, Human
aaagcacagggugcuagagagu

SEQ ID NO: 542793 - RNA, 22 nt, Human
ucagacaggcuggacagcuugc

SEQ ID NO: 542794 - RNA, 22 nt, Human
ugccugugacccaaggaugcga

SEQ ID NO: 542795 - RNA, 22 nt, Human
guacaauaacuagucuuauagu

SEQ ID NO: 542796 - RNA, 22 nt, Human
agccagaguugaaugugagucu

SEQ ID NO: 542797 - RNA, 23 nt, Human
ccaaagucgaagucuaguccaga

SEQ ID NO: 542798 - RNA, 22 nt, Human
uccaggcugauccaugaagaau

SEQ ID NO: 542799 - RNA, 22 nt, Human
gugggcaguuggugauucucgu

SEQ ID NO: 542800 - RNA, 22 nt, Human
augaggcaucuaacauugcaaa

SEQ ID NO: 542801 - RNA, 22 nt, Human
cgcaggcugcagccaagaagag

SEQ ID NO: 542802 - RNA, 22 nt, Human
gcuuccuagaucugugguacuc

SEQ ID NO: 542803 - RNA, 22 nt, Human
ggggcagagcauagcuccaauu

SEQ ID NO: 542804 - RNA, 22 nt, Human
cucaaauagaacugaucuauaa

SEQ ID NO: 542805 - RNA, 22 nt, Human
cccugcagggaggauucugaag

SEQ ID NO: 542806 - RNA, 22 nt, Human
ggaccugcauuuuaacaagauc

SEQ ID NO: 542807 - RNA, 22 nt, Human
gaaaugguagaguaggaagauu

SEQ ID NO: 542808 - RNA, 22 nt, Human
ucuucauguuaguuggguuuuc

SEQ ID NO: 542809 - RNA, 23 nt, Human
ugcaggugugcagagggcucuug

SEQ ID NO: 542810 - RNA, 22 nt, Human
aggccagcuguuacuagagcca

SEQ ID NO: 542811 - RNA, 22 nt, Human
ugaacuucagugauuugcugca

SEQ ID NO: 542812 - RNA, 22 nt, Human
cauuucacaguauauucaaaau

SEQ ID NO: 542813 - RNA, 22 nt, Human
aggacuucaucaccuguauaaa

SEQ ID NO: 542814 - RNA, 22 nt, Human
cgccucagccguggucaucuuc

SEQ ID NO: 542815 - RNA, 22 nt, Human
ucugaaauaggaaagcaaaugg

SEQ ID NO: 542816 - RNA, 22 nt, Human
cuuuucaugccagcccaucaca

SEQ ID NO: 542817 - RNA, 22 nt, Human
uaaaauagcaugugcagugaaa

SEQ ID NO: 542818 - RNA, 22 nt, Human
gccagagugauguaacauauau

SEQ ID NO: 542819 - RNA, 22 nt, Human
aaauuauuacaagcuaguuggc

SEQ ID NO: 542820 - RNA, 22 nt, Human
ggucauuuucacuuucaaguua

SEQ ID NO: 542821 - RNA, 22 nt, Human
ccagcuuuucuuaucauuauaa

SEQ ID NO: 542822 - RNA, 22 nt, Human
cugcaagauuggaagaugcaau

SEQ ID NO: 542823 - RNA, 22 nt, Human
ugcccuuggguaacuugcugau

SEQ ID NO: 542824 - RNA, 22 nt, Human
uugauucuacuuaaaacauaug

SEQ ID NO: 542825 - RNA, 23 nt, Human
cauaaaauauuaguaugguagca

SEQ ID NO: 542826 - RNA, 21 nt, Human
uccagaggaggacagacucag

SEQ ID NO: 542827 - RNA, 22 nt, Human
cagguggguacaucacagagac

SEQ ID NO: 542828 - RNA, 22 nt, Human
gcagccacugggagugcuuaua

SEQ ID NO: 542829 - RNA, 22 nt, Human
gcuggcaucacuggcuucggug

SEQ ID NO: 542830 - RNA, 22 nt, Human
gcagggaccugccacugcuguc

SEQ ID NO: 542831 - RNA, 22 nt, Human
ccugcuggcggggacccaguga

SEQ ID NO: 542832 - RNA, 22 nt, Human
guguggcuagaagugucuuguu

SEQ ID NO: 542833 - RNA, 22 nt, Human
ugaagggcaaccccaggcccag

SEQ ID NO: 542834 - RNA, 22 nt, Human
cugcaggcucgaagacacggau

SEQ ID NO: 542835 - RNA, 22 nt, Human
gaaaugucauagucuucaagcc

SEQ ID NO: 542836 - RNA, 22 nt, Human
ggcauuugagccauuggccugu

SEQ ID NO: 542837 - RNA, 22 nt, Human
uccugggaagagaccugagcau

SEQ ID NO: 542838 - RNA, 17 nt, Human
cugucugcgcaugaggu

SEQ ID NO: 542839 - RNA, 22 nt, Human
gcacagggcaacaggucuguua

SEQ ID NO: 542840 - RNA, 22 nt, Human
gcccugucggaacugcgaccuc

SEQ ID NO: 542841 - RNA, 22 nt, Human
cuuauauuugucaacuuuacaa

SEQ ID NO: 542842 - RNA, 22 nt, Human
cacagccuugagcgaggacaag

SEQ ID NO: 542843 - RNA, 22 nt, Human
uccagaaacuucauuugcaagc

SEQ ID NO: 542844 - RNA, 22 nt, Human
aggucauuccagccauuccccu

SEQ ID NO: 542845 - RNA, 22 nt, Human
uuccucucaacaugccugccgg

SEQ ID NO: 542846 - RNA, 23 nt, Human
gggauauggaccuuggaggaguc

SEQ ID NO: 542847 - RNA, 22 nt, Human
gacugucauucuagugcccaug

SEQ ID NO: 542848 - RNA, 22 nt, Human
ggcacagcaggagcuaugugaa

SEQ ID NO: 542849 - RNA, 22 nt, Human
gcagacagccagacugcacugg

SEQ ID NO: 542850 - RNA, 22 nt, Human
ggagaaagucagcuccaagcag

SEQ ID NO: 542851 - RNA, 22 nt, Human
gacaaagucaacaguacucuca

SEQ ID NO: 542852 - RNA, 22 nt, Human
ccaggagcaccaggccugugcc

SEQ ID NO: 542853 - RNA, 22 nt, Human
ucaugcacaugugucaccauca

SEQ ID NO: 542854 - RNA, 22 nt, Human
uagcaaaagccacgauuacuuu

SEQ ID NO: 542855 - RNA, 22 nt, Human
acagcuaugacagauggauaau

SEQ ID NO: 542856 - RNA, 22 nt, Human
ucaggcagaguuaauuugcucc

SEQ ID NO: 542857 - RNA, 22 nt, Human
ccuuucaaaguuuugccaugcu

SEQ ID NO: 542858 - RNA, 22 nt, Human
caggccuuaucuccacccugca

SEQ ID NO: 542859 - RNA, 22 nt, Human
aggaagaguguuaccuaugggu

SEQ ID NO: 542860 - RNA, 22 nt, Human
aagacaaugcauuacuaagaag

SEQ ID NO: 542861 - RNA, 22 nt, Human
gccagccccuuagggcucuccc

SEQ ID NO: 542862 - RNA, 22 nt, Human
uugugaaaucguguuuggaagc

SEQ ID NO: 542863 - RNA, 22 nt, Human
ccagggcaauaggaacacuuuu

SEQ ID NO: 542864 - RNA, 22 nt, Human
ugcaggugucugggggcaacag

SEQ ID NO: 542865 - RNA, 22 nt, Human
uaggaagaucaaguuuaucuca

SEQ ID NO: 542866 - RNA, 22 nt, Human
ugcuuuauucccuucugaugug

SEQ ID NO: 542867 - RNA, 22 nt, Human
guuucaaagucagaaaaggagg

SEQ ID NO: 542868 - RNA, 22 nt, Human
uuucuaaguaagauuaacuucu

SEQ ID NO: 542869 - RNA, 22 nt, Human
cuagggaguggcagagcuggga

SEQ ID NO: 542870 - RNA, 22 nt, Human
ccuucaugucauuggacaccuu

SEQ ID NO: 542871 - RNA, 22 nt, Human
ugguuugcccacucgagugauu

SEQ ID NO: 542872 - RNA, 22 nt, Human
uguuucaggaccuaucuuuuag

SEQ ID NO: 542873 - RNA, 22 nt, Human
gccugccugaaggcuguaccag

SEQ ID NO: 542874 - RNA, 22 nt, Human
gauccuugcacuugacuuggca

SEQ ID NO: 542875 - RNA, 22 nt, Human
ugugccagccucuggcuguguc

SEQ ID NO: 542876 - RNA, 22 nt, Human
gccagggcucgcggucccucgu

SEQ ID NO: 542877 - RNA, 19 nt, Human
ugggccugcaucugggucu

SEQ ID NO: 542878 - RNA, 22 nt, Human
cuguaaacuaggucauuuuuaa

SEQ ID NO: 542879 - RNA, 22 nt, Human
acuuggagggagcuggguggaa

SEQ ID NO: 542880 - RNA, 22 nt, Human
acaauguucuacauauacauaa

SEQ ID NO: 542881 - RNA, 20 nt, Human
ucagggcaugggacagcccc

SEQ ID NO: 542882 - RNA, 22 nt, Human
aguaaaaauugaggugcaaaau

SEQ ID NO: 542883 - RNA, 22 nt, Human
gggugcccuggguaggucaguu

SEQ ID NO: 542884 - RNA, 22 nt, Human
uugacaauugggagauauaaag

SEQ ID NO: 542885 - RNA, 22 nt, Human
gggguccuggaggccagcugga

SEQ ID NO: 542886 - RNA, 22 nt, Human
ggguuccuccaguuccuagagc

SEQ ID NO: 542887 - RNA, 22 nt, Human
cagggccuuuuagcaucuucuc

SEQ ID NO: 542888 - RNA, 22 nt, Human
ugggcagaucuuugguggcuag

SEQ ID NO: 542889 - RNA, 22 nt, Human
cagcugagaccagaaugcaggu

SEQ ID NO: 542890 - RNA, 22 nt, Human
cugcagccuaggugcagcuggg

SEQ ID NO: 542891 - RNA, 22 nt, Human
ggcagcagaacuggcccuguau

SEQ ID NO: 542892 - RNA, 22 nt, Human
cugcccaggaaccagaggggca

SEQ ID NO: 542893 - RNA, 22 nt, Human
aagacuuauagucaguaauucu

SEQ ID NO: 542894 - RNA, 22 nt, Human
cauuuguacagaacagcuuuau

SEQ ID NO: 542895 - RNA, 22 nt, Human
uggaggcagucaaaugacugac

SEQ ID NO: 542896 - RNA, 22 nt, Human
cuccagugagugagcaggcgac

SEQ ID NO: 542897 - RNA, 22 nt, Human
gagggcugccacguugggcgag

SEQ ID NO: 542898 - RNA, 22 nt, Human
uggcugaacuaaugugcuguuu

SEQ ID NO: 542899 - RNA, 22 nt, Human
cuacauuucccagcugccuucc

SEQ ID NO: 542900 - RNA, 18 nt, Human
ucagagagaauaguaauu

SEQ ID NO: 542901 - RNA, 22 nt, Human
ucacagaagcuugaagauuuuc

SEQ ID NO: 542902 - RNA, 22 nt, Human
cagugaaguuuaaaguguagau

SEQ ID NO: 542903 - RNA, 22 nt, Human
aaagaaauaccuuucucagcuu

SEQ ID NO: 542904 - RNA, 22 nt, Human
gaagagcuggaauccagucugg

SEQ ID NO: 542905 - RNA, 22 nt, Human
gaggcaugucuggccuguccca

SEQ ID NO: 542906 - RNA, 22 nt, Human
cagcuuaccucccacagcucuc

SEQ ID NO: 542907 - RNA, 22 nt, Human
uuccucaguuagugccugaggc

SEQ ID NO: 542908 - RNA, 22 nt, Human
gggagcugaacugcugaaguug

SEQ ID NO: 542909 - RNA, 19 nt, Human
cuccaaguuaagagggagg

SEQ ID NO: 542910 - RNA, 22 nt, Human
uuuauuuauaagccacuugcug

SEQ ID NO: 542911 - RNA, 22 nt, Human
aacuaaaucuggcauuuagagc

SEQ ID NO: 542912 - RNA, 22 nt, Human
aagccagguguuuaggccagcg

SEQ ID NO: 542913 - RNA, 22 nt, Human
gggagaaguggaaaucucauua

SEQ ID NO: 542914 - RNA, 22 nt, Human
uucaggcaucccuacaguuagg

SEQ ID NO: 542915 - RNA, 22 nt, Human
uggagcaggugccaggugugug

SEQ ID NO: 542916 - RNA, 22 nt, Human
ugggcucagucugcuugguccu

SEQ ID NO: 542917 - RNA, 22 nt, Human
gaugauuuuaugucuugucauu

SEQ ID NO: 542918 - RNA, 22 nt, Human
aucagaaggggagguaaagaag

SEQ ID NO: 542919 - RNA, 21 nt, Human
gcccagcaaggugagaaggcc

SEQ ID NO: 542920 - RNA, 22 nt, Human
uguaugaagguuuaccugcugu

SEQ ID NO: 542921 - RNA, 21 nt, Human
ucagggcagugggagguuccu

SEQ ID NO: 542922 - RNA, 21 nt, Human
gcucuuggaaggggcucagcu

SEQ ID NO: 542923 - RNA, 22 nt, Human
acagcagcuaaaggugucuccu

SEQ ID NO: 542924 - RNA, 23 nt, Human
gugagcagcccacuaggaaugcc

SEQ ID NO: 542925 - RNA, 22 nt, Human
aaauaugugaucagugaauaaa

SEQ ID NO: 542926 - RNA, 22 nt, Human
cauuucaaaagaauugccagaa

SEQ ID NO: 542927 - RNA, 22 nt, Human
agggccugggguagcuuacugc

SEQ ID NO: 542928 - RNA, 22 nt, Human
uuugagaaaugggcucugugcu

SEQ ID NO: 542929 - RNA, 22 nt, Human
gcuggccugggcucaagaccag

SEQ ID NO: 542930 - RNA, 22 nt, Human
agugugugcuguuccccggagg

SEQ ID NO: 542931 - RNA, 22 nt, Human
ugcucagcacagaccaggccag

SEQ ID NO: 542932 - RNA, 22 nt, Human
gagggcucugaaaggaggucac

SEQ ID NO: 542933 - RNA, 19 nt, Human
gcagccaccgcggcggccg

SEQ ID NO: 542934 - RNA, 22 nt, Human
agacauaagugcuaugacauug

SEQ ID NO: 542935 - RNA, 22 nt, Human
gagagcugggaaagccguggag

SEQ ID NO: 542936 - RNA, 20 nt, Human
acagaaagcugccuuguccc

SEQ ID NO: 542937 - RNA, 22 nt, Human
aagguacaccaaaguucaaguu

SEQ ID NO: 542938 - RNA, 22 nt, Human
auauuauucuaguaacagugau

SEQ ID NO: 542939 - RNA, 22 nt, Human
ccucagaggugaacaucagugc

SEQ ID NO: 542940 - RNA, 22 nt, Human
gaguuauuggguggaaagguag

SEQ ID NO: 542941 - RNA, 22 nt, Human
ugguggggauucccucccuggc

SEQ ID NO: 542942 - RNA, 22 nt, Human
accagggcugacaaucugaugg

SEQ ID NO: 542943 - RNA, 22 nt, Human
acagguggccccgagggagugg

SEQ ID NO: 542944 - RNA, 22 nt, Human
ggcuucaggggcccagucagca

SEQ ID NO: 542945 - RNA, 22 nt, Human
uggagccaaugaacauuugcug

SEQ ID NO: 542946 - RNA, 22 nt, Human
uuguuacaucuuauguaagugg

SEQ ID NO: 542947 - RNA, 22 nt, Human
agagaugucgccuugcccaggg

SEQ ID NO: 542948 - RNA, 22 nt, Human
caaggccugccucuggcagaaa

SEQ ID NO: 542949 - RNA, 22 nt, Human
agguggcaggaggucagagaaa

SEQ ID NO: 542950 - RNA, 20 nt, Human
uccaagggcagcagaaucag

SEQ ID NO: 542951 - RNA, 22 nt, Human
auuacaguaacagcuacaaugc

SEQ ID NO: 542952 - RNA, 21 nt, Human
aggcacuguuugugguuuggg

SEQ ID NO: 542953 - RNA, 22 nt, Human
uugcacagaugcacaugguugc

SEQ ID NO: 542954 - RNA, 22 nt, Human
uuucucaucuggaaacagugcu

SEQ ID NO: 542955 - RNA, 22 nt, Human
aaguucaagaucaagguuccag

SEQ ID NO: 542956 - RNA, 22 nt, Human
cuuacacagucuggcacuucuu

SEQ ID NO: 542957 - RNA, 21 nt, Human
ucuggggaagacaucuaggau

SEQ ID NO: 542958 - RNA, 22 nt, Human
aaaguguagagacuuuggaacc

SEQ ID NO: 542959 - RNA, 22 nt, Human
acacacaacucauuguguaaua

SEQ ID NO: 542960 - RNA, 22 nt, Human
ugggcaagucacuucugucuuu

SEQ ID NO: 542961 - RNA, 22 nt, Human
agcugccuccauggucaaagau

SEQ ID NO: 542962 - RNA, 22 nt, Human
ucccugggccacagcugugagc

SEQ ID NO: 542963 - RNA, 22 nt, Human
gcccaggcuagcguagagugca

SEQ ID NO: 542964 - RNA, 22 nt, Human
ugcaggcugcaccccugcccug

SEQ ID NO: 542965 - RNA, 22 nt, Human
aacaaauguguggcaguguggg

SEQ ID NO: 542966 - RNA, 22 nt, Human
auauuauucuagcucuugugug

SEQ ID NO: 542967 - RNA, 22 nt, Human
aaggucauggcaaauuacuuuu

SEQ ID NO: 542968 - RNA, 22 nt, Human
aggaaugguuauggggauagua

SEQ ID NO: 542969 - RNA, 22 nt, Human
uagaaaucagcaggcauaugua

SEQ ID NO: 542970 - RNA, 22 nt, Human
uggccugcagaggcuguggggc

SEQ ID NO: 542971 - RNA, 22 nt, Human
acagcugugauuucuaucauga

SEQ ID NO: 542972 - RNA, 23 nt, Human
ggacacauuuauuucagaauuca

SEQ ID NO: 542973 - RNA, 22 nt, Human
gcagggugugucucauacaguu

SEQ ID NO: 542974 - RNA, 22 nt, Human
aagcagagaaucugggagcgag

SEQ ID NO: 542975 - RNA, 22 nt, Human
gugcccugacacaccuggugug

SEQ ID NO: 542976 - RNA, 22 nt, Human
auggccagagaggccagccugg

SEQ ID NO: 542977 - RNA, 22 nt, Human
uuuguacauguaagauugcauc

SEQ ID NO: 542978 - RNA, 22 nt, Human
augaacuagccagguugugcug

SEQ ID NO: 542979 - RNA, 19 nt, Human
agugucaucagcuacucag

SEQ ID NO: 542980 - RNA, 22 nt, Human
uucuacauucauguauuaccuc

SEQ ID NO: 542981 - RNA, 22 nt, Human
ucacauacacuaggauauuuuu

SEQ ID NO: 542982 - RNA, 22 nt, Human
ccagagaggccuuggcaagaca

SEQ ID NO: 542983 - RNA, 22 nt, Human
uccuuuguugagauaaauuggg

SEQ ID NO: 542984 - RNA, 22 nt, Human
ucaaaguuuguggcaauuuauu

SEQ ID NO: 542985 - RNA, 22 nt, Human
ccuggccagccagggcuggggu

SEQ ID NO: 542986 - RNA, 17 nt, Human
cccagcuggcagugccg

SEQ ID NO: 542987 - RNA, 22 nt, Human
ugaagccacacuagcuuguccu

SEQ ID NO: 542988 - RNA, 22 nt, Human
auuguucauuguacaccuagua

SEQ ID NO: 542989 - RNA, 22 nt, Human
uuaaauauuuucagcaggguca

SEQ ID NO: 542990 - RNA, 22 nt, Human
uacauugacuuggauuguuaga

SEQ ID NO: 542991 - RNA, 22 nt, Human
gggcagcauuugaaaaacagau

SEQ ID NO: 542992 - RNA, 17 nt, Human
agggucaggugaaguuc

SEQ ID NO: 542993 - RNA, 23 nt, Human
ugagcugguauuguccaucucca

SEQ ID NO: 542994 - RNA, 22 nt, Human
ucaguuuuuacggucacaggga

SEQ ID NO: 542995 - RNA, 22 nt, Human
ucucaguggacgugucugucuu

SEQ ID NO: 542996 - RNA, 22 nt, Human
cuccuuaaguaugggcugugca

SEQ ID NO: 542997 - RNA, 22 nt, Human
uaaauguguuguggaugaaguu

SEQ ID NO: 542998 - RNA, 23 nt, Human
gcaguuaguccacuuugcagaga

SEQ ID NO: 542999 - RNA, 22 nt, Human
gcugggcucaccaggccacuag

SEQ ID NO: 543000 - RNA, 22 nt, Human
ccugagugaauucccucacugu

SEQ ID NO: 543001 - RNA, 22 nt, Human
ccuuccagaguucagucugccc

SEQ ID NO: 543002 - RNA, 22 nt, Human
uuacagaugggguugcaauaaa

SEQ ID NO: 543003 - RNA, 22 nt, Human
aagggcugggucugguuaaccc

SEQ ID NO: 543004 - RNA, 22 nt, Human
acaaaaaccguggauucagcau

SEQ ID NO: 543005 - RNA, 20 nt, Human
ucagauuuuucuaacuuuga

SEQ ID NO: 543006 - RNA, 22 nt, Human
uggcucugucaaacugcacaca

SEQ ID NO: 543007 - RNA, 22 nt, Human
ccuucaugauggaaaggguuca

SEQ ID NO: 543008 - RNA, 22 nt, Human
aagacuuucaaguaugcaugca

SEQ ID NO: 543009 - RNA, 23 nt, Human
gugagcagcaccaugaggcuaga

SEQ ID NO: 543010 - RNA, 19 nt, Human
agacuuuuguaaguugaga

SEQ ID NO: 543011 - RNA, 22 nt, Human
uacaaagugugcccaugcugag

SEQ ID NO: 543012 - RNA, 21 nt, Human
ucucuggaauuagaccauguu

SEQ ID NO: 543013 - RNA, 22 nt, Human
cuagggaaauaaacugaguggu

SEQ ID NO: 543014 - RNA, 21 nt, Human
agagacagagaaaguaacauu

SEQ ID NO: 543015 - RNA, 22 nt, Human
caggagccgccaggcacguugg

SEQ ID NO: 543016 - RNA, 22 nt, Human
caagacuuagagcaucuugaaa

SEQ ID NO: 543017 - RNA, 22 nt, Human
gcugcucugaaaaugacuguug

SEQ ID NO: 543018 - RNA, 22 nt, Human
gcaggcagagagggguuuccag

SEQ ID NO: 543019 - RNA, 22 nt, Human
cugugccaucuuuuugcuaccu

SEQ ID NO: 543020 - RNA, 22 nt, Human
gaaagacauaguugcaagaugg

SEQ ID NO: 543021 - RNA, 22 nt, Human
gaggaagagagcucugccuugu

SEQ ID NO: 543022 - RNA, 22 nt, Human
uuuagggaauagaagaucugaa

SEQ ID NO: 543023 - RNA, 22 nt, Human
uccucaguuauaaauaggaaac

SEQ ID NO: 543024 - RNA, 22 nt, Human
auucuaaaucagagagcucugu

SEQ ID NO: 543025 - RNA, 22 nt, Human
agugaaccaggcugcgucccug

SEQ ID NO: 543026 - RNA, 22 nt, Human
gagggccaacuagcaccacuuu

SEQ ID NO: 543027 - RNA, 22 nt, Human
cucuuaguuuaucuuugacaaa

SEQ ID NO: 543028 - RNA, 22 nt, Human
cuggccuuggaagggagcccgu

SEQ ID NO: 543029 - RNA, 22 nt, Human
uuucaaaguaaggauuuucauc

SEQ ID NO: 543030 - RNA, 20 nt, Human
accccagccccucuaucuga

SEQ ID NO: 543031 - RNA, 22 nt, Human
acuacauucaugcucguguugg

SEQ ID NO: 543032 - RNA, 22 nt, Human
gggcaaagugguggaggcaguu

SEQ ID NO: 543033 - RNA, 22 nt, Human
cagcaggcugcgauugcucauu

SEQ ID NO: 543034 - RNA, 22 nt, Human
ucugccuguggauacaugcucu

SEQ ID NO: 543035 - RNA, 22 nt, Human
agggcccuagggaaugagacau

SEQ ID NO: 543036 - RNA, 22 nt, Human
gcagcuguaaagcagaaauagu

SEQ ID NO: 543037 - RNA, 22 nt, Human
ucuccaggagcaagucacccag

SEQ ID NO: 543038 - RNA, 22 nt, Human
ucaggugggaguagaaugcuag

SEQ ID NO: 543039 - RNA, 22 nt, Human
ggcuuuauaggguagaggauca

SEQ ID NO: 543040 - RNA, 22 nt, Human
cauccagggcagccauggccug

SEQ ID NO: 543041 - RNA, 22 nt, Human
agauauaauaauuuacaagugu

SEQ ID NO: 543042 - RNA, 22 nt, Human
cagcuguuugggcauggccaga

SEQ ID NO: 543043 - RNA, 22 nt, Human
uuauauaaagauaacuuuucuu

SEQ ID NO: 543044 - RNA, 22 nt, Human
caagggcuucaaguggccaaga

SEQ ID NO: 543045 - RNA, 22 nt, Human
cccagaguggagggugcagaau

SEQ ID NO: 543046 - RNA, 22 nt, Human
cugaggcugggcugaggguaua

SEQ ID NO: 543047 - RNA, 22 nt, Human
aggcuauuuccacucuucucau

SEQ ID NO: 543048 - RNA, 22 nt, Human
uggggcuccuccuggcaggagg

SEQ ID NO: 543049 - RNA, 20 nt, Human
acuuuacagagaagacugac

SEQ ID NO: 543050 - RNA, 22 nt, Human
cagggggugcaggcccugugac

SEQ ID NO: 543051 - RNA, 22 nt, Human
agaaauaugcugauuagaugaa

SEQ ID NO: 543052 - RNA, 22 nt, Human
ugggccuggaguuuguccagag

SEQ ID NO: 543053 - RNA, 22 nt, Human
gaaguuaguguaaugcagggug

SEQ ID NO: 543054 - RNA, 23 nt, Human
uggcugagauccuacuguuugcu

SEQ ID NO: 543055 - RNA, 22 nt, Human
gcuuccuaaaugcacagggcag

SEQ ID NO: 543056 - RNA, 21 nt, Human
uggcucuggguaggagagugc

SEQ ID NO: 543057 - RNA, 19 nt, Human
acacauuugcacaauccac

SEQ ID NO: 543058 - RNA, 22 nt, Human
gaagcuucguggcucuucaaau

SEQ ID NO: 543059 - RNA, 22 nt, Human
gcucagagauguucaguagcuu

SEQ ID NO: 543060 - RNA, 22 nt, Human
cagggcugagaauuuagagaca

SEQ ID NO: 543061 - RNA, 22 nt, Human
uucaacacaggaacaugauaua

SEQ ID NO: 543062 - RNA, 22 nt, Human
augaagcuaaacccugcagcca

SEQ ID NO: 543063 - RNA, 22 nt, Human
ggcugagcguggcugccguggg

SEQ ID NO: 543064 - RNA, 22 nt, Human
cagauccacccuuguagugaca

SEQ ID NO: 543065 - RNA, 22 nt, Human
guggcagguuauaagcaucuca

SEQ ID NO: 543066 - RNA, 22 nt, Human
gaacauuuggauuuguaaauuu

SEQ ID NO: 543067 - RNA, 22 nt, Human
aauauaauuuuauuccuagagu

SEQ ID NO: 543068 - RNA, 22 nt, Human
aguaacaagugccaacguuaga

SEQ ID NO: 543069 - RNA, 22 nt, Human
ucugcaggaggcuggcugcagg

SEQ ID NO: 543070 - RNA, 22 nt, Human
aggauggggucugcagccuggu

SEQ ID NO: 543071 - RNA, 22 nt, Human
uuaucaagggagaaacaggagg

SEQ ID NO: 543072 - RNA, 22 nt, Human
ccauuucacuggguaguugugg

SEQ ID NO: 543073 - RNA, 22 nt, Human
auugaaaauaaggccagaaaca

SEQ ID NO: 543074 - RNA, 22 nt, Human
caaagaugucauugguaagaca

SEQ ID NO: 543075 - RNA, 22 nt, Human
gaguggggcccacugcugggug

SEQ ID NO: 543076 - RNA, 22 nt, Human
gaggccacgguuuuccuugggg

SEQ ID NO: 543077 - RNA, 22 nt, Human
gucuggaggaggaagaaggcac

SEQ ID NO: 543078 - RNA, 17 nt, Human
gcauccaguaacaugcc

SEQ ID NO: 543079 - RNA, 22 nt, Human
aguuacagaauguacagagguu

SEQ ID NO: 543080 - RNA, 22 nt, Human
ucaaaauuucagcacuagcccu

SEQ ID NO: 543081 - RNA, 22 nt, Human
gugaagaugccucaggugaccc

SEQ ID NO: 543082 - RNA, 23 nt, Human
caagucauggauuggaguuucag

SEQ ID NO: 543083 - RNA, 21 nt, Human
agcacagcauauccaauguca

SEQ ID NO: 543084 - RNA, 22 nt, Human
guggcugcucgggcuccggccc

SEQ ID NO: 543085 - RNA, 22 nt, Human
ccuguggcugccacuuggguga

SEQ ID NO: 543086 - RNA, 15 nt, Human
uggcagcuuguuaag

SEQ ID NO: 543087 - RNA, 22 nt, Human
aaaucaaggagggauuauauuu

SEQ ID NO: 543088 - RNA, 22 nt, Human
ggaggaagcccucggugcccca

SEQ ID NO: 543089 - RNA, 22 nt, Human
aauucuauaggcaagcuauuuu

SEQ ID NO: 543090 - RNA, 22 nt, Human
ucacaugcccuguauuuaccag

SEQ ID NO: 543091 - RNA, 22 nt, Human
agcagccaaaugaagauuuuac

SEQ ID NO: 543092 - RNA, 22 nt, Human
uaggugggugacuuccaugggg

SEQ ID NO: 543093 - RNA, 22 nt, Human
ccuguccuccaagagcacaucu

SEQ ID NO: 543094 - RNA, 22 nt, Human
cauuuucagcacccaucugaaa

SEQ ID NO: 543095 - RNA, 22 nt, Human
ucuggccauggcaagccgagug

SEQ ID NO: 543096 - RNA, 22 nt, Human
ggccucagugggccgcugcagg

SEQ ID NO: 543097 - RNA, 22 nt, Human
caagauggagaagcagcaaggg

SEQ ID NO: 543098 - RNA, 22 nt, Human
caggaaagguagucacaaugua

SEQ ID NO: 543099 - RNA, 22 nt, Human
ucaggauaaaauguaauggcaa

SEQ ID NO: 543100 - RNA, 22 nt, Human
aggaaagcucccaguagggcuc

SEQ ID NO: 543101 - RNA, 23 nt, Human
cccagcagagaugaggagggguc

SEQ ID NO: 543102 - RNA, 22 nt, Human
ugcagaaggaggaggaaaucca

SEQ ID NO: 543103 - RNA, 22 nt, Human
cucagaagaacaaaggcucuac

SEQ ID NO: 543104 - RNA, 22 nt, Human
uuuugauaucaugaugaacaga

SEQ ID NO: 543105 - RNA, 22 nt, Human
aggcuggccagugcugcagugg

SEQ ID NO: 543106 - RNA, 22 nt, Human
gggacaucuuucuagucagggu

SEQ ID NO: 543107 - RNA, 22 nt, Human
ccugccugucccucaguccaca

SEQ ID NO: 543108 - RNA, 18 nt, Human
uccagcuugcacuuaaau

SEQ ID NO: 543109 - RNA, 22 nt, Human
ugccaggcuuuggucaaaggcu

SEQ ID NO: 543110 - RNA, 22 nt, Human
caaaguccuagaacagugcuug

SEQ ID NO: 543111 - RNA, 22 nt, Human
aaaggcuuagacacagaacugu

SEQ ID NO: 543112 - RNA, 22 nt, Human
cugugccauccgcuugaccugg

SEQ ID NO: 543113 - RNA, 22 nt, Human
ucacaugcuugaggaaagaaaa

SEQ ID NO: 543114 - RNA, 22 nt, Human
aggagccugagucacagugccu

SEQ ID NO: 543115 - RNA, 17 nt, Human
uggacccuugggccucc

SEQ ID NO: 543116 - RNA, 22 nt, Human
gagucacaaaagaugcccaggg

SEQ ID NO: 543117 - RNA, 22 nt, Human
gcuucugguagaauucaauaga

SEQ ID NO: 543118 - RNA, 22 nt, Human
ugcacuccaggcugggugacag

SEQ ID NO: 543119 - RNA, 22 nt, Human
cuuacagagaagaaaauguagu

SEQ ID NO: 543120 - RNA, 23 nt, Human
cugcagucgccggccugggugcc

SEQ ID NO: 543121 - RNA, 22 nt, Human
ugcaugcaaugugaagaaagcu

SEQ ID NO: 543122 - RNA, 22 nt, Human
aggcugccuguuccaaucuccu

SEQ ID NO: 543123 - RNA, 22 nt, Human
uguuagaaauuauuaguaauau

SEQ ID NO: 543124 - RNA, 22 nt, Human
ggggcuccagucuucacauuuu

SEQ ID NO: 543125 - RNA, 22 nt, Human
agcugcugcggaaagaugccac

SEQ ID NO: 543126 - RNA, 22 nt, Human
aucaaagugguuuucugugcuu

SEQ ID NO: 543127 - RNA, 22 nt, Human
uuguaugaauguauccuaauuu

SEQ ID NO: 543128 - RNA, 22 nt, Human
ucuaagaaagauuaagaaauuu

SEQ ID NO: 543129 - RNA, 22 nt, Human
ugcauuguuugauaggugaauu

SEQ ID NO: 543130 - RNA, 22 nt, Human
ucaggaaagaagaugcucagug

SEQ ID NO: 543131 - RNA, 22 nt, Human
gaggagcccagcaccaucacuu

SEQ ID NO: 543132 - RNA, 22 nt, Human
ccaaucuuaucuuuauuuucua

SEQ ID NO: 543133 - RNA, 22 nt, Human
agccaggcucaaggccugcucc

SEQ ID NO: 543134 - RNA, 22 nt, Human
aauauaaugcuguuuuaugcca

SEQ ID NO: 543135 - RNA, 22 nt, Human
cucaggccagguuucucccaca

SEQ ID NO: 543136 - RNA, 22 nt, Human
uguggccucucaggcuugauca

SEQ ID NO: 543137 - RNA, 22 nt, Human
guuuuucuagaaaucuccuccu

SEQ ID NO: 543138 - RNA, 22 nt, Human
gggcucucaaggcagggcccca

SEQ ID NO: 543139 - RNA, 20 nt, Human
guuuccaaauugugcauuuu

SEQ ID NO: 543140 - RNA, 22 nt, Human
ucaggccugcaggcuuccugga

SEQ ID NO: 543141 - RNA, 22 nt, Human
gcagcuuucuugcccuaaucuu

SEQ ID NO: 543142 - RNA, 22 nt, Human
augcccuggacuucuaguauuc

SEQ ID NO: 543143 - RNA, 19 nt, Human
ggcugccuuuccuuaccag

SEQ ID NO: 543144 - RNA, 18 nt, Human
gggcccuggcguccgccc

SEQ ID NO: 543145 - RNA, 22 nt, Human
aaagcuaugaggcaugcauuuc

SEQ ID NO: 543146 - RNA, 22 nt, Human
uucugaaaauugggucauacuu

SEQ ID NO: 543147 - RNA, 19 nt, Human
ugaaacaaacuuaaaagga

SEQ ID NO: 543148 - RNA, 22 nt, Human
ugaaaaacacuaauuggaaagc

SEQ ID NO: 543149 - RNA, 22 nt, Human
ggagaggcgaugagucacagcc

SEQ ID NO: 543150 - RNA, 22 nt, Human
acaggcagcacuaaucucuggu

SEQ ID NO: 543151 - RNA, 22 nt, Human
gacagcagggacauguaggaag

SEQ ID NO: 543152 - RNA, 22 nt, Human
aagaauaucuguuuuauuuagg

SEQ ID NO: 543153 - RNA, 22 nt, Human
cucugggcggcccaggccaacc

SEQ ID NO: 543154 - RNA, 22 nt, Human
cggcuggguagaggugccgggu

SEQ ID NO: 543155 - RNA, 22 nt, Human
ggcucagguuuaaagugcuuua

SEQ ID NO: 543156 - RNA, 18 nt, Human
gcugaaauucuaaacaaa

SEQ ID NO: 543157 - RNA, 22 nt, Human
cuuccaaacccaggguaugggc

SEQ ID NO: 543158 - RNA, 22 nt, Human
uuggcaggaauauugcagaggu

SEQ ID NO: 543159 - RNA, 22 nt, Human
gguguccuugcagaaggcggcg

SEQ ID NO: 543160 - RNA, 19 nt, Human
cuggaaugagaacaugccc

SEQ ID NO: 543161 - RNA, 22 nt, Human
cagagggcacaugguuuccuca

SEQ ID NO: 543162 - RNA, 22 nt, Human
uacauguggccagaaauuugag

SEQ ID NO: 543163 - RNA, 19 nt, Human
uuuacucuccaaggugagu

SEQ ID NO: 543164 - RNA, 22 nt, Human
aggggacacggcuucuccaggg

SEQ ID NO: 543165 - RNA, 22 nt, Human
uucauucuuauuugugaucugg

SEQ ID NO: 543166 - RNA, 22 nt, Human
uagaggugacacugagaccaua

SEQ ID NO: 543167 - RNA, 22 nt, Human
uacaugcucaguaacuuucagu

SEQ ID NO: 543168 - RNA, 22 nt, Human
aauaucaucucucuuuucugca

SEQ ID NO: 543169 - RNA, 19 nt, Human
ggcaggugugcuuaugcuu

SEQ ID NO: 543170 - RNA, 22 nt, Human
aguuauauuccauagauucaga

SEQ ID NO: 543171 - RNA, 22 nt, Human
gccuguguguuuagcucugggg

SEQ ID NO: 543172 - RNA, 22 nt, Human
ggaggccaaggcagguggauca

SEQ ID NO: 543173 - RNA, 22 nt, Human
uagagugguuaacaguuuagaa

SEQ ID NO: 543174 - RNA, 22 nt, Human
cauaacuugguguuggaaacug

SEQ ID NO: 543175 - RNA, 22 nt, Human
gcagcugguuaaugggagaauu

SEQ ID NO: 543176 - RNA, 22 nt, Human
gcuuccagaucccaugcucuua

SEQ ID NO: 543177 - RNA, 22 nt, Human
augcagcaguuuacaaagcaau

SEQ ID NO: 543178 - RNA, 22 nt, Human
acacuucucccaucuccuguug

SEQ ID NO: 543179 - RNA, 22 nt, Human
aggcagcaugggccccagcucc

SEQ ID NO: 543180 - RNA, 21 nt, Human
uguggcagauguugggaggca

SEQ ID NO: 543181 - RNA, 22 nt, Human
uugaacagcuguuacauuguua

SEQ ID NO: 543182 - RNA, 22 nt, Human
ggagccugugggaugagaugug

SEQ ID NO: 543183 - RNA, 22 nt, Human
uccugggcuugcuccuccagcu

SEQ ID NO: 543184 - RNA, 21 nt, Human
ggugggguaccuaagguagcu

SEQ ID NO: 543185 - RNA, 22 nt, Human
aucuuuagauuagaaacucuaa

SEQ ID NO: 543186 - RNA, 18 nt, Human
cgaggcaggcggaucacg

SEQ ID NO: 543187 - RNA, 22 nt, Human
uuucacaucagagguagauuag

SEQ ID NO: 543188 - RNA, 22 nt, Human
cacauuccuggugcucagcagc

SEQ ID NO: 543189 - RNA, 22 nt, Human
ucccaagagcaagaacuugcug

SEQ ID NO: 543190 - RNA, 22 nt, Human
uuguuaaaaugcauauucuggu

SEQ ID NO: 543191 - RNA, 23 nt, Human
uaaagcaaagucaagugcacucc

SEQ ID NO: 543192 - RNA, 22 nt, Human
guucacaguuuuauaccugaga

SEQ ID NO: 543193 - RNA, 22 nt, Human
agaagcagaaggaagcagggcc

SEQ ID NO: 543194 - RNA, 22 nt, Human
ggggaccuuuccauuucugaga

SEQ ID NO: 543195 - RNA, 21 nt, Human
uaggugggagccccaguaugc

SEQ ID NO: 543196 - RNA, 22 nt, Human
agggaagaggaccagagucucu

SEQ ID NO: 543197 - RNA, 22 nt, Human
gugccugguuuggggaguguuc

SEQ ID NO: 543198 - RNA, 22 nt, Human
cagaaauguucuaaugauucag

SEQ ID NO: 543199 - RNA, 22 nt, Human
aauuaggaauaaaugaguacuu

SEQ ID NO: 543200 - RNA, 22 nt, Human
uuuguuuagaaagagauuggug

SEQ ID NO: 543201 - RNA, 22 nt, Human
gagauggcaggugugugggaca

SEQ ID NO: 543202 - RNA, 22 nt, Human
aucugaaagcuaggaguucuca

SEQ ID NO: 543203 - RNA, 22 nt, Human
ccaggagccugggccaggcugg

SEQ ID NO: 543204 - RNA, 23 nt, Human
cccuguagcccaggacaggcuuu

SEQ ID NO: 543205 - RNA, 22 nt, Human
ggccugugcugagaaccuggcu

SEQ ID NO: 543206 - RNA, 22 nt, Human
ccagagaagguggagcuugugu

SEQ ID NO: 543207 - RNA, 22 nt, Human
agcugcugagagucugccgggc

SEQ ID NO: 543208 - RNA, 22 nt, Human
aguggcuguuuauaggugggua

SEQ ID NO: 543209 - RNA, 22 nt, Human
cugggaggauacacaagaucag

SEQ ID NO: 543210 - RNA, 17 nt, Human
uccagcccugcccgacg

SEQ ID NO: 543211 - RNA, 22 nt, Human
cagcuuuaggacucauaauaaa

SEQ ID NO: 543212 - RNA, 22 nt, Human
ugaggcagucacccccuccugc

SEQ ID NO: 543213 - RNA, 22 nt, Human
acauuuuuuagagucccacauu

SEQ ID NO: 543214 - RNA, 22 nt, Human
ucagaauucugaagggcacaaa

SEQ ID NO: 543215 - RNA, 22 nt, Human
gucccuggucuaccguggcuuc

SEQ ID NO: 543216 - RNA, 22 nt, Human
uauacacauaucuucuaggccu

SEQ ID NO: 543217 - RNA, 22 nt, Human
aggagccaggaaaccugcucug

SEQ ID NO: 543218 - RNA, 22 nt, Human
gguaugaaaugauuccauguua

SEQ ID NO: 543219 - RNA, 22 nt, Human
gaaggcugagcagacaggccaa

SEQ ID NO: 543220 - RNA, 20 nt, Human
agguauaagaaaugugauuu

SEQ ID NO: 543221 - RNA, 22 nt, Human
gagguauguaugcuacauucuu

SEQ ID NO: 543222 - RNA, 22 nt, Human
caaguagaaggaugugauugua

SEQ ID NO: 543223 - RNA, 22 nt, Human
cacucccuucaggagccuagga

SEQ ID NO: 543224 - RNA, 22 nt, Human
cccucuggcucuucucaggccg

SEQ ID NO: 543225 - RNA, 22 nt, Human
acuugaaacaucuuuaaaugua

SEQ ID NO: 543226 - RNA, 22 nt, Human
uggagagguugaauaacuuguc

SEQ ID NO: 543227 - RNA, 22 nt, Human
agaauuuaggaugcaugugaau

SEQ ID NO: 543228 - RNA, 22 nt, Human
ucauuuauaaggaugcaauuaa

SEQ ID NO: 543229 - RNA, 22 nt, Human
ucuucaugcaccucacagcuag

SEQ ID NO: 543230 - RNA, 22 nt, Human
ucaucugucccaggcuuuuuuc

SEQ ID NO: 543231 - RNA, 22 nt, Human
ugugagacaggaccuguugacu

SEQ ID NO: 543232 - RNA, 22 nt, Human
aauucuagcccaggcaaaacua

SEQ ID NO: 543233 - RNA, 21 nt, Human
gcugggccuguacuugcccug

SEQ ID NO: 543234 - RNA, 18 nt, Human
cagagugggccaagagac

SEQ ID NO: 543235 - RNA, 22 nt, Human
uagggcaguuauaacauuagug

SEQ ID NO: 543236 - RNA, 22 nt, Human
ggcaggcuuugagaaagagcau

SEQ ID NO: 543237 - RNA, 22 nt, Human
acucaagauagggaaaguacaa

SEQ ID NO: 543238 - RNA, 22 nt, Human
gguggagcuggaccaggagagg

SEQ ID NO: 543239 - RNA, 22 nt, Human
ucauuucacuucucuagggaga

SEQ ID NO: 543240 - RNA, 22 nt, Human
aagaacaugaacacaauguuua

SEQ ID NO: 543241 - RNA, 22 nt, Human
guucacaugcucucaugcuuuu

SEQ ID NO: 543242 - RNA, 22 nt, Human
cucucugagugagggacaagcu

SEQ ID NO: 543243 - RNA, 22 nt, Human
acauguacauacacauauguaa

SEQ ID NO: 543244 - RNA, 22 nt, Human
gcaggccucuguugagggccuu

SEQ ID NO: 543245 - RNA, 22 nt, Human
cugccaggggccucacaggcca

SEQ ID NO: 543246 - RNA, 22 nt, Human
ggggggugcugaucaguggagc

SEQ ID NO: 543247 - RNA, 22 nt, Human
ugggcuccguugccuggggcag

SEQ ID NO: 543248 - RNA, 22 nt, Human
cuauuuaucuauuucugaauga

SEQ ID NO: 543249 - RNA, 22 nt, Human
cuggccagugccugugggcccc

SEQ ID NO: 543250 - RNA, 22 nt, Human
uagcugccauugcuccaggaag

SEQ ID NO: 543251 - RNA, 18 nt, Human
gggcucacacaggucauc

SEQ ID NO: 543252 - RNA, 22 nt, Human
ucccagccuuucuuucuccagc

SEQ ID NO: 543253 - RNA, 22 nt, Human
agcagcuguuagaaacaggaag

SEQ ID NO: 543254 - RNA, 22 nt, Human
ucacagaaggcaucacagaaga

SEQ ID NO: 543255 - RNA, 22 nt, Human
ggcuggaaguccaagaucaagg

SEQ ID NO: 543256 - RNA, 22 nt, Human
ccuggccaaucuagggcuguua

SEQ ID NO: 543257 - RNA, 19 nt, Human
ugcaagugucuuggacaag

SEQ ID NO: 543258 - RNA, 22 nt, Human
gccuccuggguucaugccauuc

SEQ ID NO: 543259 - RNA, 22 nt, Human
aagugauuuagucuuauaaagg

SEQ ID NO: 543260 - RNA, 22 nt, Human
ucccagggauuaggacauggau

SEQ ID NO: 543261 - RNA, 22 nt, Human
aguuuuuccguggcuacgauaa

SEQ ID NO: 543262 - RNA, 22 nt, Human
ccagugccuuuuguggguuugu

SEQ ID NO: 543263 - RNA, 22 nt, Human
agcaguuuuccugagcuccuca

SEQ ID NO: 543264 - RNA, 22 nt, Human
cauaacaguggcuucagcaagu

SEQ ID NO: 543265 - RNA, 22 nt, Human
caaggccacuccagagacuggu

SEQ ID NO: 543266 - RNA, 22 nt, Human
aguucuggaacucuacagcaac

SEQ ID NO: 543267 - RNA, 20 nt, Human
ugcucugucuaaaacuuccc

SEQ ID NO: 543268 - RNA, 22 nt, Human
cauccaggcaccacaaccagcu

SEQ ID NO: 543269 - RNA, 22 nt, Human
agugcauuauauguuucaaugg

SEQ ID NO: 543270 - RNA, 22 nt, Human
caguuucuuuccauuguuaccu

SEQ ID NO: 543271 - RNA, 22 nt, Human
uccaggcaugucugaguccuuc

SEQ ID NO: 543272 - RNA, 22 nt, Human
gcaggagagucugugccagguu

SEQ ID NO: 543273 - RNA, 22 nt, Human
aggcugugcucagccaauggga

SEQ ID NO: 543274 - RNA, 21 nt, Human
caguauuuuaagcagugaguu

SEQ ID NO: 543275 - RNA, 22 nt, Human
uagcuguguagacacucagagc

SEQ ID NO: 543276 - RNA, 18 nt, Human
acugugguuuauguguag

SEQ ID NO: 543277 - RNA, 22 nt, Human
cauagaaacugagacaaggauu

SEQ ID NO: 543278 - RNA, 22 nt, Human
uggaaauuuugaacaguuucua

SEQ ID NO: 543279 - RNA, 22 nt, Human
aggucaaggccaaaagaguggu

SEQ ID NO: 543280 - RNA, 22 nt, Human
cagcucuggguaggaggaaucu

SEQ ID NO: 543281 - RNA, 22 nt, Human
ggguacaaagauuucauaagau

SEQ ID NO: 543282 - RNA, 22 nt, Human
aaagggcugucaaauaagcaac

SEQ ID NO: 543283 - RNA, 22 nt, Human
aggaaaggccuuugcauuuggu

SEQ ID NO: 543284 - RNA, 22 nt, Human
caguuuuaaauuguuagauaau

SEQ ID NO: 543285 - RNA, 22 nt, Human
aggcacuguacuagguacaggg

SEQ ID NO: 543286 - RNA, 22 nt, Human
ccuuaaauucuccauuugaaag

SEQ ID NO: 543287 - RNA, 22 nt, Human
uccuggcucgauugcuaccaau

SEQ ID NO: 543288 - RNA, 22 nt, Human
gaagcagcuuucuggugaggag

SEQ ID NO: 543289 - RNA, 22 nt, Human
auauugcaauagaugcaucauu

SEQ ID NO: 543290 - RNA, 22 nt, Human
cagcuguuccugguugguggga

SEQ ID NO: 543291 - RNA, 21 nt, Human
uggcccuggccacggcugcca

SEQ ID NO: 543292 - RNA, 21 nt, Human
ccacucaugacuccacucacc

SEQ ID NO: 543293 - RNA, 22 nt, Human
aguauacugaaaguaaauauga

SEQ ID NO: 543294 - RNA, 20 nt, Human
uuucaaguuguaagguauca

SEQ ID NO: 543295 - RNA, 22 nt, Human
gccugcugcauccaggcuauug

SEQ ID NO: 543296 - RNA, 18 nt, Human
ucagagagcagcuuuauu

SEQ ID NO: 543297 - RNA, 20 nt, Human
guucucacugaucugcaggg

SEQ ID NO: 543298 - RNA, 22 nt, Human
guaacacagaaaugaaauucca

SEQ ID NO: 543299 - RNA, 22 nt, Human
uaaagacacugguuuuaaucau

SEQ ID NO: 543300 - RNA, 22 nt, Human
caccaucagcagcaggugucaa

SEQ ID NO: 543301 - RNA, 20 nt, Human
ugcacacacccuguccucca

SEQ ID NO: 543302 - RNA, 18 nt, Human
agcagcugugccacacug

SEQ ID NO: 543303 - RNA, 22 nt, Human
caucagaagaaagacaaaugau

SEQ ID NO: 543304 - RNA, 19 nt, Human
uaacaaagucugaagucag

SEQ ID NO: 543305 - RNA, 22 nt, Human
ggccugugcugucagcccuagu

SEQ ID NO: 543306 - RNA, 22 nt, Human
gcugcaggagcuggagcugugg

SEQ ID NO: 543307 - RNA, 22 nt, Human
acagcucugcauggcaguuauu

SEQ ID NO: 543308 - RNA, 22 nt, Human
augcaaauaaagcaacuauaca

SEQ ID NO: 543309 - RNA, 23 nt, Human
guccuauuuuuugaaauacugag

SEQ ID NO: 543310 - RNA, 21 nt, Human
agcaacucugacuagaugagg

SEQ ID NO: 543311 - RNA, 22 nt, Human
cugggcucaagaagucuucccu

SEQ ID NO: 543312 - RNA, 22 nt, Human
ggcaguuucucaggcaggggua

SEQ ID NO: 543313 - RNA, 22 nt, Human
gcucugaggcugugaggugcug

SEQ ID NO: 543314 - RNA, 22 nt, Human
ggagugucagaaacaguguccu

SEQ ID NO: 543315 - RNA, 22 nt, Human
uauaacacucagaaagaaucau

SEQ ID NO: 543316 - RNA, 22 nt, Human
augcauauugauuauagauuca

SEQ ID NO: 543317 - RNA, 22 nt, Human
aagagcaggacagaaucagaac

SEQ ID NO: 543318 - RNA, 22 nt, Human
gugccaggcccagggagcgggg

SEQ ID NO: 543319 - RNA, 21 nt, Human
uuaccaauggcuucucuuucc

SEQ ID NO: 543320 - RNA, 22 nt, Human
ucuuuauuucugaaucccccau

SEQ ID NO: 543321 - RNA, 17 nt, Human
caguggucugagguaug

SEQ ID NO: 543322 - RNA, 22 nt, Human
aggagguggcaacugucgacag

SEQ ID NO: 543323 - RNA, 22 nt, Human
aaaugaacaguugcauucucug

SEQ ID NO: 543324 - RNA, 21 nt, Human
ugggcagauggcaguguggcu

SEQ ID NO: 543325 - RNA, 22 nt, Human
ccugggcauucuuugaguucuc

SEQ ID NO: 543326 - RNA, 22 nt, Human
ccugccagcauggcuuaucucc

SEQ ID NO: 543327 - RNA, 22 nt, Human
ccaggcuggagugcaauggugc

SEQ ID NO: 543328 - RNA, 22 nt, Human
uacuuugauaagguucuucuau

SEQ ID NO: 543329 - RNA, 22 nt, Human
acaaaugaaccugaaaucucag

SEQ ID NO: 543330 - RNA, 22 nt, Human
aggcuucuuagauuggcuggag

SEQ ID NO: 543331 - RNA, 22 nt, Human
gagggcaggggucuugcacggu

SEQ ID NO: 543332 - RNA, 19 nt, Human
auuccucaaggacagaaau

SEQ ID NO: 543333 - RNA, 22 nt, Human
gugcuuaaccuaguuucuagua

SEQ ID NO: 543334 - RNA, 22 nt, Human
gcaguggcagcugaggggguau

SEQ ID NO: 543335 - RNA, 22 nt, Human
uuguguguagacucagccauug

SEQ ID NO: 543336 - RNA, 22 nt, Human
guggccuggauagacuccaucu

SEQ ID NO: 543337 - RNA, 22 nt, Human
acaaauuuauugaagggcauau

SEQ ID NO: 543338 - RNA, 22 nt, Human
uggugucaggcacuagcaugca

SEQ ID NO: 543339 - RNA, 22 nt, Human
gggaccugaggagggguuucag

SEQ ID NO: 543340 - RNA, 22 nt, Human
cuggaagaggaagccagcugga

SEQ ID NO: 543341 - RNA, 22 nt, Human
auuucauccagaguccuauuag

SEQ ID NO: 543342 - RNA, 22 nt, Human
aacuagaaccacuuguauuucc

SEQ ID NO: 543343 - RNA, 22 nt, Human
cugagcaggauauucacagcag

SEQ ID NO: 543344 - RNA, 22 nt, Human
cacagugugacugaccuucagc

SEQ ID NO: 543345 - RNA, 22 nt, Human
gaaaucaaggcuacauucaggu

SEQ ID NO: 543346 - RNA, 20 nt, Human
aaaaacaguaaugcugaaga

SEQ ID NO: 543347 - RNA, 22 nt, Human
acagccagggcauugucgccga

SEQ ID NO: 543348 - RNA, 22 nt, Human
uuucaaaggaggcugagaggau

SEQ ID NO: 543349 - RNA, 22 nt, Human
aauucucagguaaaaguuaagu

SEQ ID NO: 543350 - RNA, 21 nt, Human
aggaagaaagguuggagguug

SEQ ID NO: 543351 - RNA, 22 nt, Human
uguggcaguaaaauugggcaac

SEQ ID NO: 543352 - RNA, 22 nt, Human
gccuggagcucggcugagggcg

SEQ ID NO: 543353 - RNA, 22 nt, Human
cugccugaguacaagucccaga

SEQ ID NO: 543354 - RNA, 22 nt, Human
uaacauccuacacuguugucuu

SEQ ID NO: 543355 - RNA, 22 nt, Human
cagccaucaguaaagacagcuu

SEQ ID NO: 543356 - RNA, 22 nt, Human
gcugcugggggaacaguuaaaa

SEQ ID NO: 543357 - RNA, 22 nt, Human
uucuguauauuguaaagacuca

SEQ ID NO: 543358 - RNA, 22 nt, Human
cucugaccauucccuugauuuu

SEQ ID NO: 543359 - RNA, 22 nt, Human
cuggggacgucgggcaguguuc

SEQ ID NO: 543360 - RNA, 18 nt, Human
uacaaacuccuugaaggc

SEQ ID NO: 543361 - RNA, 22 nt, Human
aagggcucugggcuacgcacug

SEQ ID NO: 543362 - RNA, 22 nt, Human
ugagaacauacaaacagagaaa

SEQ ID NO: 543363 - RNA, 22 nt, Human
ucagugucuugggcuugaaugc

SEQ ID NO: 543364 - RNA, 21 nt, Human
agagaauugccuuagauguuc

SEQ ID NO: 543365 - RNA, 22 nt, Human
cauuuaauccucacaagccuau

SEQ ID NO: 543366 - RNA, 22 nt, Human
ggucccugcugaagccuuggug

SEQ ID NO: 543367 - RNA, 22 nt, Human
aaagagaaaaagaucccggcuc

SEQ ID NO: 543368 - RNA, 18 nt, Human
cccacacagcaguagcuc

SEQ ID NO: 543369 - RNA, 22 nt, Human
cugggcaguaugaauauucaaa

SEQ ID NO: 543370 - RNA, 22 nt, Human
ggguggggcccaggaaaucuau

SEQ ID NO: 543371 - RNA, 23 nt, Human
cucccuggcccuugggagaccug

SEQ ID NO: 543372 - RNA, 22 nt, Human
aagaaacaaccacugcucuccu

SEQ ID NO: 543373 - RNA, 22 nt, Human
ucuggagcuuccucauuuacag

SEQ ID NO: 543374 - RNA, 22 nt, Human
uccaggcuccccugcgugcucc

SEQ ID NO: 543375 - RNA, 22 nt, Human
gcaaagcacacccucagaguuu

SEQ ID NO: 543376 - RNA, 22 nt, Human
ccaggcugaauauguuccaggg

SEQ ID NO: 543377 - RNA, 22 nt, Human
agucacccuccaacucuccacu

SEQ ID NO: 543378 - RNA, 22 nt, Human
ugcaccugagaggucucugagg

SEQ ID NO: 543379 - RNA, 22 nt, Human
uggggacaggagacuuacagcu

SEQ ID NO: 543380 - RNA, 22 nt, Human
ucccacacuacacgguuguugg

SEQ ID NO: 543381 - RNA, 22 nt, Human
cagaaggcuggcagauugagau

SEQ ID NO: 543382 - RNA, 22 nt, Human
ggcagugagcuggagggaagga

SEQ ID NO: 543383 - RNA, 22 nt, Human
gggagguucuguucgcacuuga

SEQ ID NO: 543384 - RNA, 22 nt, Human
cagcuuugccaaguaaggucuu

SEQ ID NO: 543385 - RNA, 22 nt, Human
aaaugcucaccacagggaugug

SEQ ID NO: 543386 - RNA, 22 nt, Human
uggaugcuguaggacacgcucu

SEQ ID NO: 543387 - RNA, 18 nt, Human
ucacaucaucccaugcuu

SEQ ID NO: 543388 - RNA, 22 nt, Human
gcaccugguuuauauaaucaua

SEQ ID NO: 543389 - RNA, 22 nt, Human
uaagacagggagggcucucagc

SEQ ID NO: 543390 - RNA, 22 nt, Human
gcuucauuuugcccucuggugg

SEQ ID NO: 543391 - RNA, 21 nt, Human
uguucacauggagcagaaugu

SEQ ID NO: 543392 - RNA, 22 nt, Human
guguaauugaaauugagaacca

SEQ ID NO: 543393 - RNA, 22 nt, Human
auaacauuuugacaacugguga

SEQ ID NO: 543394 - RNA, 22 nt, Human
gcagaggcaaucagguaugugg

SEQ ID NO: 543395 - RNA, 22 nt, Human
uugaaacauucuccuauugauu

SEQ ID NO: 543396 - RNA, 22 nt, Human
ucccagagcccaaguuggagag

SEQ ID NO: 543397 - RNA, 22 nt, Human
ucucagagagcuguguuuuccu

SEQ ID NO: 543398 - RNA, 22 nt, Human
guggagccaggggcuguaggua

SEQ ID NO: 543399 - RNA, 21 nt, Human
ucccugcuuucuggcccaguc

SEQ ID NO: 543400 - RNA, 20 nt, Human
ugcuccaucuaaagugauua

SEQ ID NO: 543401 - RNA, 22 nt, Human
ucaucacuguaucauugauaga

SEQ ID NO: 543402 - RNA, 22 nt, Human
ccagucccaucucugucgcuua

SEQ ID NO: 543403 - RNA, 22 nt, Human
uuucugaauuccuaggauguug

SEQ ID NO: 543404 - RNA, 22 nt, Human
auucaaguucuucugucuuugc

SEQ ID NO: 543405 - RNA, 22 nt, Human
cagcaucucugccugccugcaa

SEQ ID NO: 543406 - RNA, 22 nt, Human
ugaggguggcacaggcacaaag

SEQ ID NO: 543407 - RNA, 20 nt, Human
uccaugaguuagagacuaua

SEQ ID NO: 543408 - RNA, 22 nt, Human
ucccagaggcuccagucucuau

SEQ ID NO: 543409 - RNA, 22 nt, Human
cugccuggcuaaacucaagucg

SEQ ID NO: 543410 - RNA, 22 nt, Human
agaggcuccuucacucuggcac

SEQ ID NO: 543411 - RNA, 22 nt, Human
ccagcuggagccaagguggacu

SEQ ID NO: 543412 - RNA, 22 nt, Human
cuggugccuccucccugugcuu

SEQ ID NO: 543413 - RNA, 22 nt, Human
uucauacaguggcugcacucca

SEQ ID NO: 543414 - RNA, 22 nt, Human
cugggcuuaggaccuggugcgg

SEQ ID NO: 543415 - RNA, 22 nt, Human
ucuuuguuauugcuuuaucuau

SEQ ID NO: 543416 - RNA, 21 nt, Human
agaaauguaucauucuuuucc

SEQ ID NO: 543417 - RNA, 22 nt, Human
aaucaguuaggguguuaaugag

SEQ ID NO: 543418 - RNA, 22 nt, Human
acuggggaguugaagcacuuuc

SEQ ID NO: 543419 - RNA, 22 nt, Human
agccuccaucccaugcacaaag

SEQ ID NO: 543420 - RNA, 22 nt, Human
uguacagaacuugcugucccuu

SEQ ID NO: 543421 - RNA, 22 nt, Human
cuugaaagcuuugcgucuucua

SEQ ID NO: 543422 - RNA, 22 nt, Human
ggcucaggggccaggccugucc

SEQ ID NO: 543423 - RNA, 22 nt, Human
ccaaaguccauaguuuacauua

SEQ ID NO: 543424 - RNA, 22 nt, Human
agagugaaggccagguuacagu

SEQ ID NO: 543425 - RNA, 22 nt, Human
gaauucuucugucuuuaacuga

SEQ ID NO: 543426 - RNA, 22 nt, Human
ucccagcauuaaugccugucag

SEQ ID NO: 543427 - RNA, 22 nt, Human
ugggucuccaguucagggcagg

SEQ ID NO: 543428 - RNA, 22 nt, Human
aaugaacaggugaaugucagau

SEQ ID NO: 543429 - RNA, 22 nt, Human
acaaaauuaccuaguuauuuuc

SEQ ID NO: 543430 - RNA, 22 nt, Human
cugcuucugggaugauggagua

SEQ ID NO: 543431 - RNA, 17 nt, Human
gcuaggagagggaggag

SEQ ID NO: 543432 - RNA, 22 nt, Human
gagacugcauuguccaaggguu

SEQ ID NO: 543433 - RNA, 23 nt, Human
uuaggcacuuaguagggccagag

SEQ ID NO: 543434 - RNA, 22 nt, Human
gcagagugagccgaggcugcuc

SEQ ID NO: 543435 - RNA, 22 nt, Human
gagcagcugcagugcagacccu

SEQ ID NO: 543436 - RNA, 22 nt, Human
gcagaggccaucaacuuugcca

SEQ ID NO: 543437 - RNA, 22 nt, Human
gaaaguuuauagguuauauaau

SEQ ID NO: 543438 - RNA, 22 nt, Human
ccaaagugcugggguuacaggc

SEQ ID NO: 543439 - RNA, 22 nt, Human
uaacacauagauauuuuaacuu

SEQ ID NO: 543440 - RNA, 21 nt, Human
gcuugguuuugguuacuugcc

SEQ ID NO: 543441 - RNA, 22 nt, Human
uuguuucugaguuuucauguau

SEQ ID NO: 543442 - RNA, 22 nt, Human
ccacagggacuguuaaaacccu

SEQ ID NO: 543443 - RNA, 22 nt, Human
auucuuggagcagucaaagaag

SEQ ID NO: 543444 - RNA, 22 nt, Human
guccucaggaaagcagauaaca

SEQ ID NO: 543445 - RNA, 22 nt, Human
gaaugaaagauuugcauucuau

SEQ ID NO: 543446 - RNA, 23 nt, Human
uccuggcucugcacuugcuaaug

SEQ ID NO: 543447 - RNA, 22 nt, Human
auaucauuauguuaugagcaca

SEQ ID NO: 543448 - RNA, 22 nt, Human
cugugccuuggcgcugugccac

SEQ ID NO: 543449 - RNA, 22 nt, Human
gcagggcugggugggagacaga

SEQ ID NO: 543450 - RNA, 22 nt, Human
auuagcugaccucuaaggagcc

SEQ ID NO: 543451 - RNA, 23 nt, Human
cagcucagcacauaggagguacu

SEQ ID NO: 543452 - RNA, 22 nt, Human
uucagagccacuucaagucuaa

SEQ ID NO: 543453 - RNA, 22 nt, Human
gccuggagcccaguguggggcu

SEQ ID NO: 543454 - RNA, 21 nt, Human
agcuuugcuuuguacucauuu

SEQ ID NO: 543455 - RNA, 22 nt, Human
aggcgcagacauacagggucug

SEQ ID NO: 543456 - RNA, 22 nt, Human
agaaagaacguugguuaucuua

SEQ ID NO: 543457 - RNA, 22 nt, Human
agcuaggaaauugaggcugaga

SEQ ID NO: 543458 - RNA, 22 nt, Human
aaaucaugguggaagaaacaga

SEQ ID NO: 543459 - RNA, 21 nt, Human
uccauaagagaccaucuccua

SEQ ID NO: 543460 - RNA, 22 nt, Human
ggugccaggcuguagucagggu

SEQ ID NO: 543461 - RNA, 22 nt, Human
aaacagcuaauggccaggaaua

SEQ ID NO: 543462 - RNA, 22 nt, Human
uuccaagucacccuuaggguca

SEQ ID NO: 543463 - RNA, 22 nt, Human
uccuggugucgccuggucaguu

SEQ ID NO: 543464 - RNA, 22 nt, Human
agcagggcagugaucagaaagg

SEQ ID NO: 543465 - RNA, 22 nt, Human
gggcugacaguuuccccugaaa

SEQ ID NO: 543466 - RNA, 22 nt, Human
ccuccugggccuugcucuguga

SEQ ID NO: 543467 - RNA, 22 nt, Human
agagcugagcaccaagcauggu

SEQ ID NO: 543468 - RNA, 22 nt, Human
aagccaguccucuacugggcac

SEQ ID NO: 543469 - RNA, 22 nt, Human
acagaggcagugugagauacug

SEQ ID NO: 543470 - RNA, 22 nt, Human
gcuguuccugcuuagaggucgg

SEQ ID NO: 543471 - RNA, 22 nt, Human
auuccugacugcuagucauuca

SEQ ID NO: 543472 - RNA, 22 nt, Human
ccuguguccuaauccaucaggc

SEQ ID NO: 543473 - RNA, 22 nt, Human
agagucaaaauuuaccagaaug

SEQ ID NO: 543474 - RNA, 21 nt, Human
uucaagucucuaggacuucuc

SEQ ID NO: 543475 - RNA, 22 nt, Human
ccuuaaaagaacuaucucuucu

SEQ ID NO: 543476 - RNA, 22 nt, Human
agccuggaagaaccugaagucu

SEQ ID NO: 543477 - RNA, 22 nt, Human
aguagaaagaaggcacugggcc

SEQ ID NO: 543478 - RNA, 22 nt, Human
agaauuguaagcaauuugauua

SEQ ID NO: 543479 - RNA, 22 nt, Human
ucaaaagaaacaccauguuccu

SEQ ID NO: 543480 - RNA, 22 nt, Human
uccuuuuugguccaaggugacc

SEQ ID NO: 543481 - RNA, 22 nt, Human
agauuuccugcacugccuuuga

SEQ ID NO: 543482 - RNA, 22 nt, Human
ucagggucaggacccagcuguu

SEQ ID NO: 543483 - RNA, 22 nt, Human
ugagcucauagcucuuauuaug

SEQ ID NO: 543484 - RNA, 19 nt, Human
aaaccuguuaguagagcac

SEQ ID NO: 543485 - RNA, 22 nt, Human
uccauggguagcccugguugag

SEQ ID NO: 543486 - RNA, 21 nt, Human
gagcugggcgaggcuccgggg

SEQ ID NO: 543487 - RNA, 22 nt, Human
caggcucccacaagcucccagc

SEQ ID NO: 543488 - RNA, 22 nt, Human
augggaggcagacacuaaguuc

SEQ ID NO: 543489 - RNA, 22 nt, Human
uuuccaauucaagcuuuuacgu

SEQ ID NO: 543490 - RNA, 22 nt, Human
gaggucagucagaccaggguuu

SEQ ID NO: 543491 - RNA, 22 nt, Human
aggcccagcccguccucgugcu

SEQ ID NO: 543492 - RNA, 22 nt, Human
ucccagccuuccuuguggugaa

SEQ ID NO: 543493 - RNA, 22 nt, Human
cuggcugggagcgagcugcuca

SEQ ID NO: 543494 - RNA, 22 nt, Human
auaguuguguggggauucuggu

SEQ ID NO: 543495 - RNA, 22 nt, Human
gaggaaccaaucugugauauuc

SEQ ID NO: 543496 - RNA, 22 nt, Human
uauauuuaaauccagguugaaa

SEQ ID NO: 543497 - RNA, 22 nt, Human
ccaggacaggaguuggcuucgc

SEQ ID NO: 543498 - RNA, 22 nt, Human
auauuaaugagcaaguaaguga

SEQ ID NO: 543499 - RNA, 22 nt, Human
cuccucuggguccugguggcca

SEQ ID NO: 543500 - RNA, 22 nt, Human
acugggaagacaagaaagauag

SEQ ID NO: 543501 - RNA, 22 nt, Human
gcauacagagaggauguggcau

SEQ ID NO: 543502 - RNA, 20 nt, Human
agggucugaugugguggccc

SEQ ID NO: 543503 - RNA, 22 nt, Human
uuuaagagcuaguaugucauuu

SEQ ID NO: 543504 - RNA, 22 nt, Human
aguaucaaucacccuuugaagu

SEQ ID NO: 543505 - RNA, 22 nt, Human
auuucuuaaaacuucagggaga

SEQ ID NO: 543506 - RNA, 22 nt, Human
agaaacaucgcuuaguccucau

SEQ ID NO: 543507 - RNA, 22 nt, Human
aauaucuguggccauacaauuu

SEQ ID NO: 543508 - RNA, 22 nt, Human
uuuauucuagcucagaauaguu

SEQ ID NO: 543509 - RNA, 22 nt, Human
ucaaagcuuagauaauuucuuu

SEQ ID NO: 543510 - RNA, 22 nt, Human
ugggugaggaugaugaggcagc

SEQ ID NO: 543511 - RNA, 22 nt, Human
ucaguguuaaucagugguaccu

SEQ ID NO: 543512 - RNA, 22 nt, Human
ugaaaucaauugcaauguuuau

SEQ ID NO: 543513 - RNA, 22 nt, Human
caauuucaagauucuguucuuu

SEQ ID NO: 543514 - RNA, 22 nt, Human
uccaaagagguuaagaacgaga

SEQ ID NO: 543515 - RNA, 22 nt, Human
ugggcagaggcagcagaaaccu

SEQ ID NO: 543516 - RNA, 22 nt, Human
ccaggcucaggccugcucguug

SEQ ID NO: 543517 - RNA, 22 nt, Human
ugccuacauuccuugcuuaugg

SEQ ID NO: 543518 - RNA, 22 nt, Human
aagcacaggggaaauaaguugu

SEQ ID NO: 543519 - RNA, 22 nt, Human
ucuccucuauuucuguauguau

SEQ ID NO: 543520 - RNA, 22 nt, Human
aguacuucagaggcugcccagg

SEQ ID NO: 543521 - RNA, 22 nt, Human
aauacugucuuucacagauauu

SEQ ID NO: 543522 - RNA, 20 nt, Human
aaacgagccaucauucuggu

SEQ ID NO: 543523 - RNA, 22 nt, Human
acagugauugggguaucugcag

SEQ ID NO: 543524 - RNA, 22 nt, Human
uuuuaucaaucauuaagacauu

SEQ ID NO: 543525 - RNA, 22 nt, Human
ugauuuccuagcugacaugaaa

SEQ ID NO: 543526 - RNA, 22 nt, Human
uuggaaaagugaaacuagaugc

SEQ ID NO: 543527 - RNA, 22 nt, Human
aacaguguuuugcucuuugccc

SEQ ID NO: 543528 - RNA, 22 nt, Human
aggagcugcauggauaccuggu

SEQ ID NO: 543529 - RNA, 22 nt, Human
ucuauuaaugauucaauagugu

SEQ ID NO: 543530 - RNA, 22 nt, Human
ucacaagaauuuguagaugaaa

SEQ ID NO: 543531 - RNA, 22 nt, Human
uuauaauugcuuauuagaccca

SEQ ID NO: 543532 - RNA, 22 nt, Human
cucaagacugaucgcaguggaa

SEQ ID NO: 543533 - RNA, 22 nt, Human
ggccugugggaggacagcuggg

SEQ ID NO: 543534 - RNA, 22 nt, Human
acaguaauuaaaauggaucugc

SEQ ID NO: 543535 - RNA, 22 nt, Human
uugcccugucuuaagcuggcaa

SEQ ID NO: 543536 - RNA, 22 nt, Human
gaaggcugcgaggggagugccg

SEQ ID NO: 543537 - RNA, 22 nt, Human
aaaaguauuuugagcacuuuau

SEQ ID NO: 543538 - RNA, 21 nt, Human
agcagcugcaguuucuaucug

SEQ ID NO: 543539 - RNA, 22 nt, Human
ugcuucaggaagaaacgccagg

SEQ ID NO: 543540 - RNA, 22 nt, Human
ccuuucaaauuacaugacugcu

SEQ ID NO: 543541 - RNA, 22 nt, Human
uucaaacucugaguaguucugc

SEQ ID NO: 543542 - RNA, 22 nt, Human
cuguccugggggugguccuugc

SEQ ID NO: 543543 - RNA, 22 nt, Human
uugaaagauagugaagccagcc

SEQ ID NO: 543544 - RNA, 22 nt, Human
aggcaggaacccugugugcgcc

SEQ ID NO: 543545 - RNA, 22 nt, Human
gcugcccuacccgaggcacucu

SEQ ID NO: 543546 - RNA, 22 nt, Human
ccugagagccagugccugccca

SEQ ID NO: 543547 - RNA, 22 nt, Human
augggcugugggacccuggacc

SEQ ID NO: 543548 - RNA, 22 nt, Human
agaaacuucagcuauucuuuug

SEQ ID NO: 543549 - RNA, 22 nt, Human
agucaacauuugagaugcaaug

SEQ ID NO: 543550 - RNA, 22 nt, Human
cucuggagguggagguugcagu

SEQ ID NO: 543551 - RNA, 22 nt, Human
ugucaugcagguuuguuauaga

SEQ ID NO: 543552 - RNA, 22 nt, Human
aagcccaguuucacacugagac

SEQ ID NO: 543553 - RNA, 22 nt, Human
gcaaagaaagccaaggucuaac

SEQ ID NO: 543554 - RNA, 22 nt, Human
ugucauaaaacacaagcuguug

SEQ ID NO: 543555 - RNA, 22 nt, Human
uaugaaaagguggccaauguag

SEQ ID NO: 543556 - RNA, 21 nt, Human
uuacuuuugcagcaaccuaau

SEQ ID NO: 543557 - RNA, 15 nt, Human
gcuucuccagaugac

SEQ ID NO: 543558 - RNA, 22 nt, Human
auuucacaaaccauccugauuu

SEQ ID NO: 543559 - RNA, 22 nt, Human
uccaggccuugacaggucaguu

SEQ ID NO: 543560 - RNA, 22 nt, Human
agggccucugacgcccccagcc

SEQ ID NO: 543561 - RNA, 23 nt, Human
agcaauaagaagggauacaugug

SEQ ID NO: 543562 - RNA, 22 nt, Human
aaaaugugcaguuuuuaagcug

SEQ ID NO: 543563 - RNA, 22 nt, Human
uugaauaguguuuucaguauac

SEQ ID NO: 543564 - RNA, 22 nt, Human
caaugauggcuaggcagcugcu

SEQ ID NO: 543565 - RNA, 22 nt, Human
agaggcugggcaggacccacag

SEQ ID NO: 543566 - RNA, 22 nt, Human
cuuauucagaaggagaaaugga

SEQ ID NO: 543567 - RNA, 22 nt, Human
ugcucccaaacgaccuacugug

SEQ ID NO: 543568 - RNA, 20 nt, Human
acaaaguauugaggacaagu

SEQ ID NO: 543569 - RNA, 22 nt, Human
gaggcuggugguuaguuccauu

SEQ ID NO: 543570 - RNA, 22 nt, Human
gucaacaucggaaagcguguaa

SEQ ID NO: 543571 - RNA, 20 nt, Human
agcaccagugggggcagccc

SEQ ID NO: 543572 - RNA, 22 nt, Human
gaugucuuuuuccaggcucuuu

SEQ ID NO: 543573 - RNA, 22 nt, Human
caagucauuacugaaaugucac

SEQ ID NO: 543574 - RNA, 18 nt, Human
uuuguccuguggcagcug

SEQ ID NO: 543575 - RNA, 22 nt, Human
agcagcagaaaguugauggcag

SEQ ID NO: 543576 - RNA, 23 nt, Human
acugccugugccgaucucucuca

SEQ ID NO: 543577 - RNA, 22 nt, Human
cagcuggaugggagaccauguu

SEQ ID NO: 543578 - RNA, 22 nt, Human
uuccaggaagcaguuagcagcc

SEQ ID NO: 543579 - RNA, 22 nt, Human
auauguguacgugcaguauaua

SEQ ID NO: 543580 - RNA, 22 nt, Human
ugucccauggacacaacuucuu

SEQ ID NO: 543581 - RNA, 22 nt, Human
ucuguaguagguuguaguucuu

SEQ ID NO: 543582 - RNA, 22 nt, Human
agugccuugugugugggcagcc

SEQ ID NO: 543583 - RNA, 22 nt, Human
aucaaagaaugugacugaaaua

SEQ ID NO: 543584 - RNA, 22 nt, Human
aucucagggcuggagcccugga

SEQ ID NO: 543585 - RNA, 22 nt, Human
ucauuuguugcuguuaccugag

SEQ ID NO: 543586 - RNA, 22 nt, Human
aggcagaauguuggaaaggaag

SEQ ID NO: 543587 - RNA, 21 nt, Human
gcagccagccgagaccaugcc

SEQ ID NO: 543588 - RNA, 22 nt, Human
guggugaagccccaucucugcu

SEQ ID NO: 543589 - RNA, 22 nt, Human
gcucucagaugcuccagcagcc

SEQ ID NO: 543590 - RNA, 22 nt, Human
gcugcagccaaauucauuguca

SEQ ID NO: 543591 - RNA, 22 nt, Human
aagaacugugcuccaggcucca

SEQ ID NO: 543592 - RNA, 22 nt, Human
uggcugggcccccaccugccuc

SEQ ID NO: 543593 - RNA, 22 nt, Human
ugcuuuauuuuaaauaugccau

SEQ ID NO: 543594 - RNA, 22 nt, Human
cuucuuaaugcauaaacugugu

SEQ ID NO: 543595 - RNA, 22 nt, Human
ccagugccugugggcauggugc

SEQ ID NO: 543596 - RNA, 18 nt, Human
caggagcaggaguugaac

SEQ ID NO: 543597 - RNA, 22 nt, Human
gaaaugugaccuacuuccuugu

SEQ ID NO: 543598 - RNA, 22 nt, Human
acaggcuguugggguccagggu

SEQ ID NO: 543599 - RNA, 22 nt, Human
caggaaccuaaugaaggcucac

SEQ ID NO: 543600 - RNA, 22 nt, Human
acaugucaauuuaguacucuua

SEQ ID NO: 543601 - RNA, 22 nt, Human
agaguggcuugcucagcuagca

SEQ ID NO: 543602 - RNA, 22 nt, Human
augcagagacagauguggcaug

SEQ ID NO: 543603 - RNA, 21 nt, Human
auuuucauuuccaggggagga

SEQ ID NO: 543604 - RNA, 22 nt, Human
aaaacucugcaguuaguuucua

SEQ ID NO: 543605 - RNA, 22 nt, Human
ggcagcuccaaaaggaaacacu

SEQ ID NO: 543606 - RNA, 22 nt, Human
aaguucaagucuccugaguaua

SEQ ID NO: 543607 - RNA, 22 nt, Human
gcuggcucccauugguccuucc

SEQ ID NO: 543608 - RNA, 22 nt, Human
ugaagacagaccaaggagaaug

SEQ ID NO: 543609 - RNA, 21 nt, Human
uaaaugugagcagggcugggc

SEQ ID NO: 543610 - RNA, 22 nt, Human
cucccagguuccgacgccucuu

SEQ ID NO: 543611 - RNA, 22 nt, Human
gcacugaaauuauaugcauuug

SEQ ID NO: 543612 - RNA, 22 nt, Human
gccaaaucuugcacacucuugu

SEQ ID NO: 543613 - RNA, 22 nt, Human
aaaucauguuggcacaauaaaa

SEQ ID NO: 543614 - RNA, 22 nt, Human
cuuugcaugggucugaaggcuu

SEQ ID NO: 543615 - RNA, 21 nt, Human
agcagccauuucacagagacu

SEQ ID NO: 543616 - RNA, 22 nt, Human
ugagccuguggggugacaacca

SEQ ID NO: 543617 - RNA, 20 nt, Human
agcaguuuccuaacucagcu

SEQ ID NO: 543618 - RNA, 22 nt, Human
augcaguauaaaucauuucugg

SEQ ID NO: 543619 - RNA, 22 nt, Human
gaggaaaagagacagguuauug

SEQ ID NO: 543620 - RNA, 22 nt, Human
guuucauaugcaguuaacagca

SEQ ID NO: 543621 - RNA, 21 nt, Human
gaucuuuacuuuccuacuuac

SEQ ID NO: 543622 - RNA, 19 nt, Human
cuccucagucccagagguc

SEQ ID NO: 543623 - RNA, 22 nt, Human
auucauaucauagaguuauuga

SEQ ID NO: 543624 - RNA, 22 nt, Human
cuuccucccggcccaugcucug

SEQ ID NO: 543625 - RNA, 22 nt, Human
uccuggaggcaaaugagcacau

SEQ ID NO: 543626 - RNA, 22 nt, Human
uuccucugaaauggcuuggaaa

SEQ ID NO: 543627 - RNA, 22 nt, Human
uucuggauguuguagucugaga

SEQ ID NO: 543628 - RNA, 22 nt, Human
gcccacagcucguuccucuccu

SEQ ID NO: 543629 - RNA, 22 nt, Human
agccagggcucuccuucgcgug

SEQ ID NO: 543630 - RNA, 22 nt, Human
accagggcacaggagucugaag

SEQ ID NO: 543631 - RNA, 22 nt, Human
aggacagcaguuggugagguuc

SEQ ID NO: 543632 - RNA, 22 nt, Human
gagcagagucuauuuccacacu

SEQ ID NO: 543633 - RNA, 22 nt, Human
ccugggugaaaucucuccugca

SEQ ID NO: 543634 - RNA, 23 nt, Human
acacucuucccagaagguucuga

SEQ ID NO: 543635 - RNA, 20 nt, Human
ccagucccugagcaccaggg

SEQ ID NO: 543636 - RNA, 22 nt, Human
guggccucuguuggcuccuagg

SEQ ID NO: 543637 - RNA, 22 nt, Human
gcucugagaggaugcugagcag

SEQ ID NO: 543638 - RNA, 20 nt, Human
ugugcccaauguccagguuc

SEQ ID NO: 543639 - RNA, 22 nt, Human
cuuuguuuuacucagaggcaug

SEQ ID NO: 543640 - RNA, 22 nt, Human
uaacugaacaucucaaaucaag

SEQ ID NO: 543641 - RNA, 17 nt, Human
gugaagagucauugaau

SEQ ID NO: 543642 - RNA, 22 nt, Human
uggcagaaagaaccaugugcaa

SEQ ID NO: 543643 - RNA, 22 nt, Human
uugucugucccagcuugugcau

SEQ ID NO: 543644 - RNA, 22 nt, Human
gcuucucuggccugcagggcau

SEQ ID NO: 543645 - RNA, 22 nt, Human
acagggaaguucugcaacagga

SEQ ID NO: 543646 - RNA, 22 nt, Human
ccucugcagcagagagccagag

SEQ ID NO: 543647 - RNA, 22 nt, Human
caggaggaggguacaccaucag

SEQ ID NO: 543648 - RNA, 22 nt, Human
cagaaucucugggaguggauca

SEQ ID NO: 543649 - RNA, 22 nt, Human
auggggcugggauucuccucgg

SEQ ID NO: 543650 - RNA, 22 nt, Human
ugggaaggauacguuacaagau

SEQ ID NO: 543651 - RNA, 22 nt, Human
uuaugaaggaucagguacuugg

SEQ ID NO: 543652 - RNA, 22 nt, Human
ggggugugaguagagcugggga

SEQ ID NO: 543653 - RNA, 22 nt, Human
uuagaaauacaagugagguuga

SEQ ID NO: 543654 - RNA, 22 nt, Human
accaggcuggagugcaguggcg

SEQ ID NO: 543655 - RNA, 22 nt, Human
uuaugcaacaggugagcagaca

SEQ ID NO: 543656 - RNA, 22 nt, Human
ggagagguguauucaguggguc

SEQ ID NO: 543657 - RNA, 21 nt, Human
auuuccaaauaaggucacauu

SEQ ID NO: 543658 - RNA, 22 nt, Human
ucagaggagaccaaggggaaua

SEQ ID NO: 543659 - RNA, 22 nt, Human
ggccaccuuccaguugccugca

SEQ ID NO: 543660 - RNA, 22 nt, Human
ggcaggugaucuagagucaaua

SEQ ID NO: 543661 - RNA, 22 nt, Human
gaaagacucuugaugucuuugg

SEQ ID NO: 543662 - RNA, 22 nt, Human
uuugacagcauaauccuacacc

SEQ ID NO: 543663 - RNA, 23 nt, Human
agggcuccuuguugauuagcauu

SEQ ID NO: 543664 - RNA, 22 nt, Human
guauuugucuuguuggucucca

SEQ ID NO: 543665 - RNA, 22 nt, Human
aagaaauguagagccuaguaaa

SEQ ID NO: 543666 - RNA, 22 nt, Human
ucucaggaguagugggauccau

SEQ ID NO: 543667 - RNA, 22 nt, Human
gugacucuuaaagcaaaucuug

SEQ ID NO: 543668 - RNA, 22 nt, Human
ugcuuccugaggccgucuucuc

SEQ ID NO: 543669 - RNA, 22 nt, Human
auggccagcuuauaggggcuca

SEQ ID NO: 543670 - RNA, 22 nt, Human
uccugucuaaagaccugcaggc

SEQ ID NO: 543671 - RNA, 22 nt, Human
gccaggggacgcggagcgacga

SEQ ID NO: 543672 - RNA, 22 nt, Human
ugcugugauggagaauucugga

SEQ ID NO: 543673 - RNA, 22 nt, Human
ccagcauggcaccugagaugag

SEQ ID NO: 543674 - RNA, 22 nt, Human
cacauacuuguguguacauaug

SEQ ID NO: 543675 - RNA, 22 nt, Human
ugggaggacuugugggcuucau

SEQ ID NO: 543676 - RNA, 22 nt, Human
cuggcccauggugagcucuggg

SEQ ID NO: 543677 - RNA, 22 nt, Human
gugggccuucaacccugucugg

SEQ ID NO: 543678 - RNA, 22 nt, Human
ugccagaguuacaugaggguca

SEQ ID NO: 543679 - RNA, 22 nt, Human
gcuuucaaauccuaauuccaac

SEQ ID NO: 543680 - RNA, 22 nt, Human
acaacaguccaguauagacugu

SEQ ID NO: 543681 - RNA, 22 nt, Human
uaagaaacauuuuuaugacagu

SEQ ID NO: 543682 - RNA, 22 nt, Human
uguuugaauuuugcuaacgugu

SEQ ID NO: 543683 - RNA, 22 nt, Human
acugcuuuucuaagauucugug

SEQ ID NO: 543684 - RNA, 22 nt, Human
aaagcaaugaugguagacacgu

SEQ ID NO: 543685 - RNA, 22 nt, Human
gucuguggcaggggagaaguuu

SEQ ID NO: 543686 - RNA, 20 nt, Human
augcccuguccucuucuguu

SEQ ID NO: 543687 - RNA, 22 nt, Human
uccugccuguuuaccuguacuu

SEQ ID NO: 543688 - RNA, 22 nt, Human
agagcugguuuacucaggaauu

SEQ ID NO: 543689 - RNA, 22 nt, Human
acaguguguuggaggagacugu

SEQ ID NO: 543690 - RNA, 22 nt, Human
guguacauagaauugugcuuug

SEQ ID NO: 543691 - RNA, 22 nt, Human
ugccugucuccucugcagggug

SEQ ID NO: 543692 - RNA, 22 nt, Human
agaagccauagucugggaggca

SEQ ID NO: 543693 - RNA, 22 nt, Human
gagagugucuggaggaagcuaa

SEQ ID NO: 543694 - RNA, 22 nt, Human
aaguuuuccuguguccaagaug

SEQ ID NO: 543695 - RNA, 22 nt, Human
uugacaaaaaccucauuucacc

SEQ ID NO: 543696 - RNA, 22 nt, Human
aucuggcuauugacauguuaua

SEQ ID NO: 543697 - RNA, 22 nt, Human
uagagcugcuggacuguaacag

SEQ ID NO: 543698 - RNA, 22 nt, Human
ccucucccgggugccgcugggc

SEQ ID NO: 543699 - RNA, 22 nt, Human
uuagccaugugggaaaaacagc

SEQ ID NO: 543700 - RNA, 22 nt, Human
agcagcagcucauucuuccugu

SEQ ID NO: 543701 - RNA, 22 nt, Human
uggaagcaucacuucuugccug

SEQ ID NO: 543702 - RNA, 22 nt, Human
gaaugaguuaauauuugcuugg

SEQ ID NO: 543703 - RNA, 21 nt, Human
ucuggaagaaaaaaguauuau

SEQ ID NO: 543704 - RNA, 22 nt, Human
uauccaaagagauucauguucu

SEQ ID NO: 543705 - RNA, 22 nt, Human
gcugccugcuucaugugggaga

SEQ ID NO: 543706 - RNA, 22 nt, Human
caggagcagaggguggucagca

SEQ ID NO: 543707 - RNA, 22 nt, Human
gugggugauguacuggaggcca

SEQ ID NO: 543708 - RNA, 22 nt, Human
caggaucccuggccuccgccca

SEQ ID NO: 543709 - RNA, 23 nt, Human
aguuuuucugcaugguucuguau

SEQ ID NO: 543710 - RNA, 22 nt, Human
auguacauuuuccuaauguuuu

SEQ ID NO: 543711 - RNA, 22 nt, Human
ugauucaguugguuuuguucag

SEQ ID NO: 543712 - RNA, 22 nt, Human
aaggcagcaccgccuccugaaa

SEQ ID NO: 543713 - RNA, 22 nt, Human
cccucccaggaguggccagaga

SEQ ID NO: 543714 - RNA, 22 nt, Human
uggcucagaugcucuuccagug

SEQ ID NO: 543715 - RNA, 22 nt, Human
gaagaacacuucaugauucauu

SEQ ID NO: 543716 - RNA, 22 nt, Human
agaagggccagcuggacaccug

SEQ ID NO: 543717 - RNA, 18 nt, Human
acuggcuuuagcaucaga

SEQ ID NO: 543718 - RNA, 22 nt, Human
ucugagagagggucagaugcua

SEQ ID NO: 543719 - RNA, 22 nt, Human
cugugcauugucuugucuguag

SEQ ID NO: 543720 - RNA, 22 nt, Human
cuauuugucaguuuggcuuuaa

SEQ ID NO: 543721 - RNA, 22 nt, Human
uguggaaaauuggaacguuccu

SEQ ID NO: 543722 - RNA, 21 nt, Human
ucuguacaucauugagucccc

SEQ ID NO: 543723 - RNA, 22 nt, Human
gugcugagcugcagaugcgcuc

SEQ ID NO: 543724 - RNA, 22 nt, Human
ucucagagcuucagaaagcacc

SEQ ID NO: 543725 - RNA, 22 nt, Human
aacaucuuuacaacagaccuag

SEQ ID NO: 543726 - RNA, 16 nt, Human
cuucacagaggagagu

SEQ ID NO: 543727 - RNA, 22 nt, Human
aagccaguguccagaaugggca

SEQ ID NO: 543728 - RNA, 22 nt, Human
uccaugagacagauacuguaag

SEQ ID NO: 543729 - RNA, 22 nt, Human
aagcccagaugugagaacugag

SEQ ID NO: 543730 - RNA, 22 nt, Human
ugggauaguggccaggaccccc

SEQ ID NO: 543731 - RNA, 22 nt, Human
aggcaugaugugcaguggcaaa

SEQ ID NO: 543732 - RNA, 22 nt, Human
uuucauaauauccagagauuuu

SEQ ID NO: 543733 - RNA, 22 nt, Human
gaagcccuauccucuccuggga

SEQ ID NO: 543734 - RNA, 22 nt, Human
acauuucuugaugccucuguga

SEQ ID NO: 543735 - RNA, 22 nt, Human
cagccagcuggcacugugagua

SEQ ID NO: 543736 - RNA, 22 nt, Human
acaggcucaguucacuggauuu

SEQ ID NO: 543737 - RNA, 22 nt, Human
cccugccugugggcaucaacau

SEQ ID NO: 543738 - RNA, 20 nt, Human
ccugaggguuuguguucuuu

SEQ ID NO: 543739 - RNA, 22 nt, Human
uaaaggcaaauguguguuugug

SEQ ID NO: 543740 - RNA, 22 nt, Human
agcagccauagauagcaugcaa

SEQ ID NO: 543741 - RNA, 22 nt, Human
uaaguuaguccuuuuuaaaagu

SEQ ID NO: 543742 - RNA, 22 nt, Human
acagagaaagugggcugaagau

SEQ ID NO: 543743 - RNA, 22 nt, Human
auacuguuuugugacuuaucuu

SEQ ID NO: 543744 - RNA, 22 nt, Human
uucuuuucugcagcugguauuu

SEQ ID NO: 543745 - RNA, 22 nt, Human
caagagcucagaaacccuugcu

SEQ ID NO: 543746 - RNA, 22 nt, Human
ucuuccuaugccaacauucugu

SEQ ID NO: 543747 - RNA, 22 nt, Human
uuacaacuuuccugugucaaau

SEQ ID NO: 543748 - RNA, 22 nt, Human
uccccacaucucugcaucaggc

SEQ ID NO: 543749 - RNA, 22 nt, Human
agggcagcauugccuuucucca

SEQ ID NO: 543750 - RNA, 22 nt, Human
ugcuccugccguggucgggacu

SEQ ID NO: 543751 - RNA, 22 nt, Human
ggagauagacuuggugagccac

SEQ ID NO: 543752 - RNA, 22 nt, Human
aggcacugggggaugagcaagg

SEQ ID NO: 543753 - RNA, 22 nt, Human
auggcagaccuccuggccacaa

SEQ ID NO: 543754 - RNA, 22 nt, Human
gagagcugauagaugagcuacu

SEQ ID NO: 543755 - RNA, 22 nt, Human
gcaucuucacacaaagccagug

SEQ ID NO: 543756 - RNA, 22 nt, Human
cuuagaugaagucacagaaccc

SEQ ID NO: 543757 - RNA, 21 nt, Human
ugauccuuucccccauguugc

SEQ ID NO: 543758 - RNA, 22 nt, Human
agcagggcuccauuucacugcc

SEQ ID NO: 543759 - RNA, 22 nt, Human
aggcagggucuugcuauguugc

SEQ ID NO: 543760 - RNA, 20 nt, Human
ucaccuaaaccagcaguuuc

SEQ ID NO: 543761 - RNA, 22 nt, Human
auuguucaaagugcuuugcaug

SEQ ID NO: 543762 - RNA, 22 nt, Human
ggggcagaaguagugccccuga

SEQ ID NO: 543763 - RNA, 22 nt, Human
ucuuuuggguucuuaugauuua

SEQ ID NO: 543764 - RNA, 22 nt, Human
uggggcugugagacuacaggau

SEQ ID NO: 543765 - RNA, 22 nt, Human
gaggcucacugggcaaagacuc

SEQ ID NO: 543766 - RNA, 22 nt, Human
ccagagggcaaaaugaagcuua

SEQ ID NO: 543767 - RNA, 22 nt, Human
uuucaguuguuuuagcucugug

SEQ ID NO: 543768 - RNA, 22 nt, Human
gagcugugagggacacauugcu

SEQ ID NO: 543769 - RNA, 22 nt, Human
uuauuuuaccuuccucugagcu

SEQ ID NO: 543770 - RNA, 22 nt, Human
agggccagcugaugagaaugag

SEQ ID NO: 543771 - RNA, 22 nt, Human
gaauguuucauguguauguuag

SEQ ID NO: 543772 - RNA, 23 nt, Human
agcugggaauuuucugaagcuuu

SEQ ID NO: 543773 - RNA, 22 nt, Human
caggauggucucgaucuccuga

SEQ ID NO: 543774 - RNA, 22 nt, Human
uacaugcuccacuuucuccugu

SEQ ID NO: 543775 - RNA, 22 nt, Human
aauucaacagucaguuaucuca

SEQ ID NO: 543776 - RNA, 22 nt, Human
agcccugcauaaaucaguuggu

SEQ ID NO: 543777 - RNA, 22 nt, Human
augaguaagaccauaauuuuug

SEQ ID NO: 543778 - RNA, 22 nt, Human
agggacacaugugauuauuuau

SEQ ID NO: 543779 - RNA, 22 nt, Human
auuucuuccucugucaguaacu

SEQ ID NO: 543780 - RNA, 20 nt, Human
ucaaaggcaaaggugggugu

SEQ ID NO: 543781 - RNA, 22 nt, Human
agagcuggacgucugagcccua

SEQ ID NO: 543782 - RNA, 22 nt, Human
aagugauuuucuucuuaguuau

SEQ ID NO: 543783 - RNA, 22 nt, Human
agagcugcccacacagcagauu

SEQ ID NO: 543784 - RNA, 19 nt, Human
agugaaauggaguauucaa

SEQ ID NO: 543785 - RNA, 22 nt, Human
guucauucaucaaauauuuacu

SEQ ID NO: 543786 - RNA, 19 nt, Human
uugaaauuguuugauaugg

SEQ ID NO: 543787 - RNA, 22 nt, Human
gaaggccaagaggcuccaagau

SEQ ID NO: 543788 - RNA, 22 nt, Human
gcugagagcaaagcaugucuag

SEQ ID NO: 543789 - RNA, 22 nt, Human
acaguggaggccauaugguccu

SEQ ID NO: 543790 - RNA, 22 nt, Human
aagucauagucgggaaagacau

SEQ ID NO: 543791 - RNA, 22 nt, Human
uuucugaaaugcuggcuuugga

SEQ ID NO: 543792 - RNA, 22 nt, Human
gaugcaggauagcuucacccag

SEQ ID NO: 543793 - RNA, 22 nt, Human
gcaggugguuaaggucccaugu

SEQ ID NO: 543794 - RNA, 22 nt, Human
aaugaagcaagcugcuguguuu

SEQ ID NO: 543795 - RNA, 22 nt, Human
aauguacaaggguuccaguuuu

SEQ ID NO: 543796 - RNA, 21 nt, Human
ucauuugugaucugauuucca

SEQ ID NO: 543797 - RNA, 23 nt, Human
gggaagugaggagccccucagcc

SEQ ID NO: 543798 - RNA, 22 nt, Human
uugaaaacagcguagauucaca

SEQ ID NO: 543799 - RNA, 22 nt, Human
caggagugaguuggggucuaca

SEQ ID NO: 543800 - RNA, 22 nt, Human
gccuggcaaggcccuguugacu

SEQ ID NO: 543801 - RNA, 22 nt, Human
uucucauucugacucaguguag

SEQ ID NO: 543802 - RNA, 20 nt, Human
acuguucaagggccuggugg

SEQ ID NO: 543803 - RNA, 22 nt, Human
guguuuaauagguagcugaauc

SEQ ID NO: 543804 - RNA, 22 nt, Human
ucuuuccucugagcuccuguag

SEQ ID NO: 543805 - RNA, 22 nt, Human
aggaagcccuugucauuucugu

SEQ ID NO: 543806 - RNA, 22 nt, Human
auuguauuagcacaauacaauu

SEQ ID NO: 543807 - RNA, 22 nt, Human
gaggagcucugcuccauccuuc

SEQ ID NO: 543808 - RNA, 22 nt, Human
agcagcugcagagggcuccccc

SEQ ID NO: 543809 - RNA, 22 nt, Human
ucaggcagcauuaaacuucagc

SEQ ID NO: 543810 - RNA, 20 nt, Human
aagcacauuucuacaauaau

SEQ ID NO: 543811 - RNA, 21 nt, Human
gcagggaccgcgacuucuggg

SEQ ID NO: 543812 - RNA, 17 nt, Human
ugcauuguaggcuagcc

SEQ ID NO: 543813 - RNA, 22 nt, Human
uccaggcuagaagucacaggcc

SEQ ID NO: 543814 - RNA, 21 nt, Human
aagaaguuuggauuuuguccu

SEQ ID NO: 543815 - RNA, 22 nt, Human
aaucagaauuuauugaaucuuu

SEQ ID NO: 543816 - RNA, 22 nt, Human
cagacaggagacuggaucaugg

SEQ ID NO: 543817 - RNA, 22 nt, Human
cgggcuggcugcagcugcugga

SEQ ID NO: 543818 - RNA, 22 nt, Human
ugguggggccagacuucagcuc

SEQ ID NO: 543819 - RNA, 17 nt, Human
gcuuuggaaggguagac

SEQ ID NO: 543820 - RNA, 22 nt, Human
uuacaguuuaguccaagccaga

SEQ ID NO: 543821 - RNA, 22 nt, Human
gaggggauuggaaggaacaccc

SEQ ID NO: 543822 - RNA, 22 nt, Human
ucagagucaggaaugcuugauu

SEQ ID NO: 543823 - RNA, 22 nt, Human
ggagccuggcaaugcugcgucc

SEQ ID NO: 543824 - RNA, 22 nt, Human
ugaguuuugucuugcuagaagu

SEQ ID NO: 543825 - RNA, 22 nt, Human
aaugcaguuucauuuguagaau

SEQ ID NO: 543826 - RNA, 22 nt, Human
ucugagcuggagcccaucaccu

SEQ ID NO: 543827 - RNA, 22 nt, Human
aggccagggcacugcucuuuag

SEQ ID NO: 543828 - RNA, 22 nt, Human
uccagucauuuccauuguuccc

SEQ ID NO: 543829 - RNA, 19 nt, Human
ggucucagugcagcugcag

SEQ ID NO: 543830 - RNA, 22 nt, Human
ugacagcauaacacuggucuug

SEQ ID NO: 543831 - RNA, 22 nt, Human
aaggagcugggagggacacaug

SEQ ID NO: 543832 - RNA, 22 nt, Human
uaaaugcaaugugcuuuaccag

SEQ ID NO: 543833 - RNA, 22 nt, Human
cagcaguggaacuacccaggga

SEQ ID NO: 543834 - RNA, 22 nt, Human
agcccaggucuggcccagccug

SEQ ID NO: 543835 - RNA, 22 nt, Human
cagggagcuggcuggcgugagu

SEQ ID NO: 543836 - RNA, 22 nt, Human
guagaaauagugguugacagga

SEQ ID NO: 543837 - RNA, 22 nt, Human
gggccagguggaccccagccuc

SEQ ID NO: 543838 - RNA, 22 nt, Human
ucucagagcaucauuuucuuag

SEQ ID NO: 543839 - RNA, 22 nt, Human
gccccucccagucaggagcacu

SEQ ID NO: 543840 - RNA, 22 nt, Human
ugggcuggcugaggcauucacu

SEQ ID NO: 543841 - RNA, 22 nt, Human
cuuacaaaggagaggagauagg

SEQ ID NO: 543842 - RNA, 22 nt, Human
cugugcagugugggguaggccu

SEQ ID NO: 543843 - RNA, 22 nt, Human
cugggcagaauuuuaggauggc

SEQ ID NO: 543844 - RNA, 22 nt, Human
caggccuuucuggggaagugag

SEQ ID NO: 543845 - RNA, 22 nt, Human
cuucacugaugggacagcucaa

SEQ ID NO: 543846 - RNA, 22 nt, Human
uggacucagaaguguucuuuua

SEQ ID NO: 543847 - RNA, 22 nt, Human
gugggccucuugaggguggcua

SEQ ID NO: 543848 - RNA, 23 nt, Human
uggcugagguccagguaguuuca

SEQ ID NO: 543849 - RNA, 22 nt, Human
caacauuugugaugagcaaacu

SEQ ID NO: 543850 - RNA, 22 nt, Human
guauuuuuagguaaggaaagua

SEQ ID NO: 543851 - RNA, 22 nt, Human
uggcagagguaauucaaauccc

SEQ ID NO: 543852 - RNA, 22 nt, Human
ugcagugguugagagcccagac

SEQ ID NO: 543853 - RNA, 22 nt, Human
ucugucaacaugucaaagggcu

SEQ ID NO: 543854 - RNA, 22 nt, Human
caagaaacaccaaugacugcug

SEQ ID NO: 543855 - RNA, 22 nt, Human
auacaucucauguaagagauaa

SEQ ID NO: 543856 - RNA, 22 nt, Human
uucauucccaagaguaaacaua

SEQ ID NO: 543857 - RNA, 22 nt, Human
uuccugcccugccugugccacu

SEQ ID NO: 543858 - RNA, 22 nt, Human
gaugcacagugacccugccagu

SEQ ID NO: 543859 - RNA, 22 nt, Human
cacaggaauaagucaaacuuca

SEQ ID NO: 543860 - RNA, 22 nt, Human
ggaaaugucauagaaauauaag

SEQ ID NO: 543861 - RNA, 22 nt, Human
auaaucaaaguccuaugacauc

SEQ ID NO: 543862 - RNA, 22 nt, Human
cuccuggaccaccuuguggcca

SEQ ID NO: 543863 - RNA, 22 nt, Human
uggcacuguggauuucacaagu

SEQ ID NO: 543864 - RNA, 22 nt, Human
agagcugaaaaagcugacccgg

SEQ ID NO: 543865 - RNA, 22 nt, Human
gcuggccuuugaggaagcugcg

SEQ ID NO: 543866 - RNA, 22 nt, Human
cagcugccacuugcucucggcu

SEQ ID NO: 543867 - RNA, 22 nt, Human
uggccuugggcagguggccugc

SEQ ID NO: 543868 - RNA, 22 nt, Human
aacuacucaacucugccauugu

SEQ ID NO: 543869 - RNA, 22 nt, Human
cuggagagauccuccugaaaaa

SEQ ID NO: 543870 - RNA, 22 nt, Human
uucaugugaauauauuugucuu

SEQ ID NO: 543871 - RNA, 22 nt, Human
uggagcagaaauggccucuugu

SEQ ID NO: 543872 - RNA, 22 nt, Human
auauauuuugcggucacguggc

SEQ ID NO: 543873 - RNA, 22 nt, Human
gggaggagugaagauucaccug

SEQ ID NO: 543874 - RNA, 22 nt, Human
acauuucuaguuguucaucucc

SEQ ID NO: 543875 - RNA, 22 nt, Human
cugucaacacgggugugcgugc

SEQ ID NO: 543876 - RNA, 22 nt, Human
gcccuggauggcaggagccauc

SEQ ID NO: 543877 - RNA, 22 nt, Human
ucacuguaaaguaauacuguca

SEQ ID NO: 543878 - RNA, 22 nt, Human
gugugcagggggccagcgcagc

SEQ ID NO: 543879 - RNA, 22 nt, Human
aguacuuuacuucuuacaguuu

SEQ ID NO: 543880 - RNA, 22 nt, Human
uugaaaacauuuauauuagaau

SEQ ID NO: 543881 - RNA, 22 nt, Human
uagaacaugugaaaauauagcc

SEQ ID NO: 543882 - RNA, 22 nt, Human
aaaaauaggucaaccguguaug

SEQ ID NO: 543883 - RNA, 22 nt, Human
ucccagccacagguguagcccu

SEQ ID NO: 543884 - RNA, 22 nt, Human
gcaauauaaccaguugucaugc

SEQ ID NO: 543885 - RNA, 22 nt, Human
cucccagagaccaagcugagaa

SEQ ID NO: 543886 - RNA, 22 nt, Human
ucuacugcacuggugucucauc

SEQ ID NO: 543887 - RNA, 22 nt, Human
ucugaaggucugagaaccagga

SEQ ID NO: 543888 - RNA, 22 nt, Human
uacaaaacagugcucugguccu

SEQ ID NO: 543889 - RNA, 22 nt, Human
agcagggaauagcggaaagaau

SEQ ID NO: 543890 - RNA, 20 nt, Human
gccugcagguuggaugggau

SEQ ID NO: 543891 - RNA, 22 nt, Human
gcugucugacuccaaguuggag

SEQ ID NO: 543892 - RNA, 22 nt, Human
aagaucaagaucagagaacagc

SEQ ID NO: 543893 - RNA, 22 nt, Human
cagagcuguugcggggcuuggc

SEQ ID NO: 543894 - RNA, 22 nt, Human
gcagaugaggaagcuaaugcug

SEQ ID NO: 543895 - RNA, 22 nt, Human
gcagugugaccgagcuugcuuc

SEQ ID NO: 543896 - RNA, 22 nt, Human
uauguacauaacaugaaaugca

SEQ ID NO: 543897 - RNA, 22 nt, Human
ucaaagaugauaggaaaucaua

SEQ ID NO: 543898 - RNA, 22 nt, Human
ucucagagcuucaguuauuuuc

SEQ ID NO: 543899 - RNA, 22 nt, Human
ugcagcugauuaaagggcagac

SEQ ID NO: 543900 - RNA, 22 nt, Human
caguagcaggcaggugcuuuug

SEQ ID NO: 543901 - RNA, 22 nt, Human
cacugcuuaguugguaaaugug

SEQ ID NO: 543902 - RNA, 22 nt, Human
uaauaucuacuucauagaguuu

SEQ ID NO: 543903 - RNA, 22 nt, Human
aaugcaaacuucuuguuacuug

SEQ ID NO: 543904 - RNA, 22 nt, Human
aguaugaaaguuaaucaauuua

SEQ ID NO: 543905 - RNA, 22 nt, Human
uugacaaaguuuaguaauaauc

SEQ ID NO: 543906 - RNA, 22 nt, Human
agcaaggaaaguaggcacggaa

SEQ ID NO: 543907 - RNA, 22 nt, Human
ucagccugcgucauggugacac

SEQ ID NO: 543908 - RNA, 22 nt, Human
caggcagauuugcugcccucca

SEQ ID NO: 543909 - RNA, 23 nt, Human
agcagccagagauccucggcccu

SEQ ID NO: 543910 - RNA, 22 nt, Human
uuaaacagucccagaggcugac

SEQ ID NO: 543911 - RNA, 19 nt, Human
aguguuaacccaguguugg

SEQ ID NO: 543912 - RNA, 22 nt, Human
aguaugaagcugaaugauuuua

SEQ ID NO: 543913 - RNA, 22 nt, Human
caggaugugaggaggccauuug

SEQ ID NO: 543914 - RNA, 22 nt, Human
ucuuuucuguaacucagugucu

SEQ ID NO: 543915 - RNA, 22 nt, Human
gcaggaguggagaccaugggga

SEQ ID NO: 543916 - RNA, 22 nt, Human
ugaaggugucuuugugaacauc

SEQ ID NO: 543917 - RNA, 22 nt, Human
gaugaggcucaugcacccugcg

SEQ ID NO: 543918 - RNA, 22 nt, Human
augaguugaagcuacaagaggc

SEQ ID NO: 543919 - RNA, 22 nt, Human
acaggcugcccgcuccccaccu

SEQ ID NO: 543920 - RNA, 22 nt, Human
uugggacagaaaaggagaagau

SEQ ID NO: 543921 - RNA, 22 nt, Human
ggcucuggucagugaggggccu

SEQ ID NO: 543922 - RNA, 22 nt, Human
cauggcaggugcagauucugug

SEQ ID NO: 543923 - RNA, 22 nt, Human
ucuggccugaaaguccaugcuu

SEQ ID NO: 543924 - RNA, 22 nt, Human
ggcaggugguaaggauuucaua

SEQ ID NO: 543925 - RNA, 22 nt, Human
guauaucaccccaagcagcuga

SEQ ID NO: 543926 - RNA, 23 nt, Human
gccagccuugcucuccugcagcc

SEQ ID NO: 543927 - RNA, 22 nt, Human
ggucccaggcugcgggcuggug

SEQ ID NO: 543928 - RNA, 22 nt, Human
gcagggaaggggacggaaccag

SEQ ID NO: 543929 - RNA, 22 nt, Human
cugcugggucccccugcugauu

SEQ ID NO: 543930 - RNA, 22 nt, Human
cauuugaauuguucugugggaa

SEQ ID NO: 543931 - RNA, 22 nt, Human
cuaaauaaucccucuggucuua

SEQ ID NO: 543932 - RNA, 22 nt, Human
cuggcagccaagugggauacuc

SEQ ID NO: 543933 - RNA, 22 nt, Human
uucaagaugccagggacgcggc

SEQ ID NO: 543934 - RNA, 22 nt, Human
cauugcacugcagcccgggcaa

SEQ ID NO: 543935 - RNA, 22 nt, Human
auuugaaaucccuucuacugua

SEQ ID NO: 543936 - RNA, 22 nt, Human
agggucagggagugaguauuua

SEQ ID NO: 543937 - RNA, 22 nt, Human
cugcugcauuacucuucucaag

SEQ ID NO: 543938 - RNA, 22 nt, Human
augcauaauguauguauugacu

SEQ ID NO: 543939 - RNA, 22 nt, Human
uccugccuagcaggugaccuau

SEQ ID NO: 543940 - RNA, 22 nt, Human
ggcaggcucagcagccaaggag

SEQ ID NO: 543941 - RNA, 22 nt, Human
cccaggcaggagugugguggcu

SEQ ID NO: 543942 - RNA, 22 nt, Human
cagauggaacacagaaaggaga

SEQ ID NO: 543943 - RNA, 22 nt, Human
gugggcuggauuugcuugcaga

SEQ ID NO: 543944 - RNA, 22 nt, Human
gcagaaagcuccuugcgaucug

SEQ ID NO: 543945 - RNA, 22 nt, Human
uaucuacuccucuuucagaugc

SEQ ID NO: 543946 - RNA, 22 nt, Human
uuggaauuaaaaggagaacuuc

SEQ ID NO: 543947 - RNA, 22 nt, Human
cacucaggguacaauggagggc

SEQ ID NO: 543948 - RNA, 22 nt, Human
aggugcagcugacaccaugugg

SEQ ID NO: 543949 - RNA, 22 nt, Human
aaacagcugucauuguuuuaaa

SEQ ID NO: 543950 - RNA, 22 nt, Human
ugcuucugaaguggaugggugc

SEQ ID NO: 543951 - RNA, 22 nt, Human
acagacagggcaccugccuccu

SEQ ID NO: 543952 - RNA, 20 nt, Human
ccucucugaagaggucaucu

SEQ ID NO: 543953 - RNA, 22 nt, Human
guguuuuauuggugcagucaga

SEQ ID NO: 543954 - RNA, 22 nt, Human
uaaaaugaucucucauguucuu

SEQ ID NO: 543955 - RNA, 22 nt, Human
ugaaggcacuugccuaggggca

SEQ ID NO: 543956 - RNA, 22 nt, Human
cagggacagccuugggguggcg

SEQ ID NO: 543957 - RNA, 22 nt, Human
ggaggccuccugggggagguuc

SEQ ID NO: 543958 - RNA, 22 nt, Human
ucugccagaaguucugagagua

SEQ ID NO: 543959 - RNA, 18 nt, Human
cucagggcaucagucugg

SEQ ID NO: 543960 - RNA, 21 nt, Human
gauuuaguggcuguucuaccu

SEQ ID NO: 543961 - RNA, 22 nt, Human
caugggcucuucuggacugcac

SEQ ID NO: 543962 - RNA, 22 nt, Human
cgagcaugaugacggcuguggc

SEQ ID NO: 543963 - RNA, 22 nt, Human
ggaggccaggguggguggaucg

SEQ ID NO: 543964 - RNA, 20 nt, Human
ucacaucuggcagcugauga

SEQ ID NO: 543965 - RNA, 22 nt, Human
aggaaagaaaggaggugcauuu

SEQ ID NO: 543966 - RNA, 18 nt, Human
caggugggucuccugccc

SEQ ID NO: 543967 - RNA, 22 nt, Human
agcugaauguucucagaccaga

SEQ ID NO: 543968 - RNA, 22 nt, Human
uccccucugguugacccaggag

SEQ ID NO: 543969 - RNA, 22 nt, Human
ucccaggcaaaggcagcucauu

SEQ ID NO: 543970 - RNA, 22 nt, Human
agugcagggggaaagggugucu

SEQ ID NO: 543971 - RNA, 22 nt, Human
agugccagcuccacacagcagc

SEQ ID NO: 543972 - RNA, 22 nt, Human
agggacuggcucucugagcagg

SEQ ID NO: 543973 - RNA, 18 nt, Human
acaaggucaauugguuac

SEQ ID NO: 543974 - RNA, 18 nt, Human
uguacaguuaugagcauu

SEQ ID NO: 543975 - RNA, 22 nt, Human
uagugugguaaauaaauguuuu

SEQ ID NO: 543976 - RNA, 22 nt, Human
uuucacagaacucacuaaggag

SEQ ID NO: 543977 - RNA, 22 nt, Human
uaauuuaauuccauggauucua

SEQ ID NO: 543978 - RNA, 22 nt, Human
aaagcagauucugaugcaguag

SEQ ID NO: 543979 - RNA, 22 nt, Human
aacaacugaaaagcuuuuucug

SEQ ID NO: 543980 - RNA, 22 nt, Human
ccugggcuuccacgagcagagg

SEQ ID NO: 543981 - RNA, 18 nt, Human
uccucucuuuccccaggg

SEQ ID NO: 543982 - RNA, 22 nt, Human
gagcuuugcuggaagccugggg

SEQ ID NO: 543983 - RNA, 22 nt, Human
uggccugaguugucugcaggcc

SEQ ID NO: 543984 - RNA, 22 nt, Human
uccaguuugcacuguauaauag

SEQ ID NO: 543985 - RNA, 22 nt, Human
ucucugagcugcuucuugcaua

SEQ ID NO: 543986 - RNA, 22 nt, Human
uugccucccagcaugggcagcu

SEQ ID NO: 543987 - RNA, 22 nt, Human
cuccccagguucaggagguggg

SEQ ID NO: 543988 - RNA, 22 nt, Human
gugcagggagcccagaaggucc

SEQ ID NO: 543989 - RNA, 22 nt, Human
cauuaaauuccuuguucucaaa

SEQ ID NO: 543990 - RNA, 21 nt, Human
caggaaagaaaacguacauau

SEQ ID NO: 543991 - RNA, 22 nt, Human
ccacugggggcugcaggcacuc

SEQ ID NO: 543992 - RNA, 22 nt, Human
auggggcuguucucugcccugc

SEQ ID NO: 543993 - RNA, 20 nt, Human
ggcugcugguuuggcucugu

SEQ ID NO: 543994 - RNA, 22 nt, Human
cuuuauguuggggugucuuagu

SEQ ID NO: 543995 - RNA, 22 nt, Human
caacuauauagaaauugauugu

SEQ ID NO: 543996 - RNA, 22 nt, Human
uagcaaggcguggcacucaaau

SEQ ID NO: 543997 - RNA, 22 nt, Human
ucagagcucaugagcagagcca

SEQ ID NO: 543998 - RNA, 22 nt, Human
ccugcagaaaggguccccagga

SEQ ID NO: 543999 - RNA, 22 nt, Human
gacacagagauaggccuguguu

SEQ ID NO: 544000 - RNA, 22 nt, Human
uggggcagaguaggauuuuggc

SEQ ID NO: 544001 - RNA, 22 nt, Human
auauuugcaggaaacuaguuuu

SEQ ID NO: 544002 - RNA, 22 nt, Human
acacccaggcuggcgugcagug

SEQ ID NO: 544003 - RNA, 21 nt, Human
ugaaacaaucagacagagucu

SEQ ID NO: 544004 - RNA, 22 nt, Human
aaauacugugaauaaagguuuu

SEQ ID NO: 544005 - RNA, 22 nt, Human
ggagaagcagcuucuugaugaa

SEQ ID NO: 544006 - RNA, 22 nt, Human
gaaauuaagcaggggucugugg

SEQ ID NO: 544007 - RNA, 22 nt, Human
aagggacccuggaucaaaugga

SEQ ID NO: 544008 - RNA, 22 nt, Human
acagagguguguguaggacagu

SEQ ID NO: 544009 - RNA, 22 nt, Human
aaauccaguuugucauuuccca

SEQ ID NO: 544010 - RNA, 22 nt, Human
aaucauaauuuugugaauguag

SEQ ID NO: 544011 - RNA, 22 nt, Human
aggaaggagggcagauauuaag

SEQ ID NO: 544012 - RNA, 22 nt, Human
ggggagugguugccugugaucc

SEQ ID NO: 544013 - RNA, 22 nt, Human
guucacaucacuucacugaacc

SEQ ID NO: 544014 - RNA, 22 nt, Human
ucagaauucagagggagugggg

SEQ ID NO: 544015 - RNA, 22 nt, Human
ugcagcagguuccaaaggguua

SEQ ID NO: 544016 - RNA, 22 nt, Human
cuggaacagaagcacuggagag

SEQ ID NO: 544017 - RNA, 22 nt, Human
ugcagggccuuguugaugugcu

SEQ ID NO: 544018 - RNA, 22 nt, Human
uaagauaugguaggaaguuugg

SEQ ID NO: 544019 - RNA, 22 nt, Human
caaacuuuuccuggaaaagauu

SEQ ID NO: 544020 - RNA, 22 nt, Human
aucugcuugaaacuucuuauac

SEQ ID NO: 544021 - RNA, 22 nt, Human
ccagcagccaccuucucgaaau

SEQ ID NO: 544022 - RNA, 22 nt, Human
cagcugagucugagguucuuug

SEQ ID NO: 544023 - RNA, 22 nt, Human
aagaggaagucuccauggagag

SEQ ID NO: 544024 - RNA, 22 nt, Human
ggcagaggaaggaugaauucac

SEQ ID NO: 544025 - RNA, 22 nt, Human
aaguucuuguauuugccuuucu

SEQ ID NO: 544026 - RNA, 22 nt, Human
uucuccaggcuugggccagguc

SEQ ID NO: 544027 - RNA, 22 nt, Human
aagucugggccuccuucccaga

SEQ ID NO: 544028 - RNA, 20 nt, Human
aggcucaggguguuuaggaa

SEQ ID NO: 544029 - RNA, 22 nt, Human
ucuuucaaaugcuugaauugga

SEQ ID NO: 544030 - RNA, 22 nt, Human
cugucaggggcggguggagcgg

SEQ ID NO: 544031 - RNA, 22 nt, Human
guggcauuugaacaaucacaua

SEQ ID NO: 544032 - RNA, 22 nt, Human
aaacacuucuuaggucuuaagu

SEQ ID NO: 544033 - RNA, 22 nt, Human
cagcuuuauuucacguguuugu

SEQ ID NO: 544034 - RNA, 22 nt, Human
ugagcccaggaguuggaggcug

SEQ ID NO: 544035 - RNA, 22 nt, Human
aucuaaacuauaguaccuaguc

SEQ ID NO: 544036 - RNA, 22 nt, Human
gugcaggggaucagguugcagc

SEQ ID NO: 544037 - RNA, 22 nt, Human
agagccugugauugucaucacc

SEQ ID NO: 544038 - RNA, 19 nt, Human
aggguccagggagcggcuc

SEQ ID NO: 544039 - RNA, 22 nt, Human
gcacaggcacagagggccacug

SEQ ID NO: 544040 - RNA, 22 nt, Human
agcaaagcaucacuccaaucug

SEQ ID NO: 544041 - RNA, 18 nt, Human
accaggaagcuucuuguc

SEQ ID NO: 544042 - RNA, 22 nt, Human
agggucagcuggcugucagggg

SEQ ID NO: 544043 - RNA, 22 nt, Human
uccugggcccaggcugccaggg

SEQ ID NO: 544044 - RNA, 22 nt, Human
aggcugggaaauguagucuucc

SEQ ID NO: 544045 - RNA, 22 nt, Human
aauuucaaguggcaucuuugau

SEQ ID NO: 544046 - RNA, 22 nt, Human
ggggcaggagcccuucuucagc

SEQ ID NO: 544047 - RNA, 22 nt, Human
aaaguucugagaagcaguuuac

SEQ ID NO: 544048 - RNA, 22 nt, Human
uaagaaauuuaguuauagaaug

SEQ ID NO: 544049 - RNA, 21 nt, Human
uccagaccucccucuccuagc

SEQ ID NO: 544050 - RNA, 22 nt, Human
aggugucuuugcggcccgccgc

SEQ ID NO: 544051 - RNA, 22 nt, Human
ucaagcaucuuggucuacgauc

SEQ ID NO: 544052 - RNA, 22 nt, Human
gcucugucaacagcuagcugug

SEQ ID NO: 544053 - RNA, 18 nt, Human
cagaagcaggcagugcag

SEQ ID NO: 544054 - RNA, 22 nt, Human
uauggaaauaauuagacaagug

SEQ ID NO: 544055 - RNA, 22 nt, Human
aagacaugcaauuagcaaggaa

SEQ ID NO: 544056 - RNA, 22 nt, Human
ccugccugguguaagucuaagg

SEQ ID NO: 544057 - RNA, 22 nt, Human
gagcaggaugggagcuggggcc

SEQ ID NO: 544058 - RNA, 23 nt, Human
gugauuucagggaacagaaucag

SEQ ID NO: 544059 - RNA, 22 nt, Human
uggggacagggcucagcaauuu

SEQ ID NO: 544060 - RNA, 22 nt, Human
cauuuauugaguggccacagug

SEQ ID NO: 544061 - RNA, 22 nt, Human
agcccggcuuccccgguugcua

SEQ ID NO: 544062 - RNA, 18 nt, Human
ucuuccaacacugacacc

SEQ ID NO: 544063 - RNA, 19 nt, Human
guuuuucccagacgaggca

SEQ ID NO: 544064 - RNA, 20 nt, Human
agucccagaucaaauuucug

SEQ ID NO: 544065 - RNA, 19 nt, Human
uaaggccaaaaguaagugu

SEQ ID NO: 544066 - RNA, 22 nt, Human
ugggccugggagggcagacgcu

SEQ ID NO: 544067 - RNA, 22 nt, Human
ucaguggauuguagaaggcuua

SEQ ID NO: 544068 - RNA, 22 nt, Human
aggucaagaauugaugugguuu

SEQ ID NO: 544069 - RNA, 22 nt, Human
ugucucaguauacgaaacacuu

SEQ ID NO: 544070 - RNA, 20 nt, Human
auucacaggcacaaaacccu

SEQ ID NO: 544071 - RNA, 22 nt, Human
uuaaaaucgcuguugcuucugu

SEQ ID NO: 544072 - RNA, 22 nt, Human
ugcugccuuugggaccuggccu

SEQ ID NO: 544073 - RNA, 22 nt, Human
uugaaauacugcauuguucagu

SEQ ID NO: 544074 - RNA, 22 nt, Human
ucuguaaauccugcucagcaac

SEQ ID NO: 544075 - RNA, 22 nt, Human
ggcccaaggcccaggucgagcu

SEQ ID NO: 544076 - RNA, 22 nt, Human
gaauguuugacuaaagguagcu

SEQ ID NO: 544077 - RNA, 22 nt, Human
augaacacauguacacauuucu

SEQ ID NO: 544078 - RNA, 22 nt, Human
aggcucaguauagcuggcaagu

SEQ ID NO: 544079 - RNA, 20 nt, Human
aggcugccaggucucacauc

SEQ ID NO: 544080 - RNA, 22 nt, Human
gaaggaagccguuucucuccag

SEQ ID NO: 544081 - RNA, 22 nt, Human
gcaauuauuuuugcaccaaugu

SEQ ID NO: 544082 - RNA, 22 nt, Human
ccagcccuccuccaucagagga

SEQ ID NO: 544083 - RNA, 22 nt, Human
gcagccacucucauuccacgug

SEQ ID NO: 544084 - RNA, 22 nt, Human
ucacacaugcuaagccagagau

SEQ ID NO: 544085 - RNA, 22 nt, Human
agcugcugagccauguccugcu

SEQ ID NO: 544086 - RNA, 22 nt, Human
aaaauccuuagccgagugaggu

SEQ ID NO: 544087 - RNA, 22 nt, Human
acucugcuuauugcugcaggca

SEQ ID NO: 544088 - RNA, 18 nt, Human
acagugauuguucuaugc

SEQ ID NO: 544089 - RNA, 22 nt, Human
ggugaagggccuuaggagacag

SEQ ID NO: 544090 - RNA, 22 nt, Human
gggucccuggaauuacuugaca

SEQ ID NO: 544091 - RNA, 22 nt, Human
uaguuuuuucaacaaauggugc

SEQ ID NO: 544092 - RNA, 22 nt, Human
cagugcagaggccagggaggau

SEQ ID NO: 544093 - RNA, 22 nt, Human
ccagagcaauucucacagaacu

SEQ ID NO: 544094 - RNA, 22 nt, Human
uuuaaaaucagaugggaguugg

SEQ ID NO: 544095 - RNA, 21 nt, Human
gggcagaggggccuccugggu

SEQ ID NO: 544096 - RNA, 20 nt, Human
ccagcauguacacaugugga

SEQ ID NO: 544097 - RNA, 22 nt, Human
agcugccauggccugaauuuac

SEQ ID NO: 544098 - RNA, 21 nt, Human
ucagcuuugcaacugcacauc

SEQ ID NO: 544099 - RNA, 22 nt, Human
auuauucaacacuugagaaauu

SEQ ID NO: 544100 - RNA, 22 nt, Human
acuuuauuuccuauugcaucca

SEQ ID NO: 544101 - RNA, 22 nt, Human
ccagugcacagccaggcaggug

SEQ ID NO: 544102 - RNA, 22 nt, Human
uauuugcaggacauagauaugg

SEQ ID NO: 544103 - RNA, 22 nt, Human
ccccagccagcaggaccucuga

SEQ ID NO: 544104 - RNA, 22 nt, Human
aauguuucauuuaguugucucc

SEQ ID NO: 544105 - RNA, 22 nt, Human
aucaagaauugggagcuauuga

SEQ ID NO: 544106 - RNA, 18 nt, Human
gguccugaaugccugcua

SEQ ID NO: 544107 - RNA, 22 nt, Human
auacagaaaaugaugcagaguu

SEQ ID NO: 544108 - RNA, 21 nt, Human
ucuuccaagggcugcugagac

SEQ ID NO: 544109 - RNA, 22 nt, Human
auucaguucuaaggucagugcc

SEQ ID NO: 544110 - RNA, 21 nt, Human
ugcuuuaugggaaaaauguca

SEQ ID NO: 544111 - RNA, 22 nt, Human
cccuggcagaaugucucugggc

SEQ ID NO: 544112 - RNA, 22 nt, Human
aggucacauggauaaugaucag

SEQ ID NO: 544113 - RNA, 22 nt, Human
caagagcucuccacuagguugg

SEQ ID NO: 544114 - RNA, 19 nt, Human
guucaaacacugauucagc

SEQ ID NO: 544115 - RNA, 22 nt, Human
ugccugggccuucccaccucug

SEQ ID NO: 544116 - RNA, 22 nt, Human
acagaugguuauugucauuucu

SEQ ID NO: 544117 - RNA, 22 nt, Human
ucccagagucagagguggggcc

SEQ ID NO: 544118 - RNA, 22 nt, Human
cagggcuccaugcagggacucc

SEQ ID NO: 544119 - RNA, 18 nt, Human
ugucucaggcugaaacag

SEQ ID NO: 544120 - RNA, 22 nt, Human
auaugccauuagcuagaaauaa

SEQ ID NO: 544121 - RNA, 22 nt, Human
uggagcuggaauuucugggccu

SEQ ID NO: 544122 - RNA, 22 nt, Human
cagccucuugcacuuugaaggc

SEQ ID NO: 544123 - RNA, 22 nt, Human
cuuucacauaauugaccuugaa

SEQ ID NO: 544124 - RNA, 22 nt, Human
cacuuagucucaccaguucagu

SEQ ID NO: 544125 - RNA, 22 nt, Human
gggcugcacguauucugcucac

SEQ ID NO: 544126 - RNA, 22 nt, Human
gggcucuggaaaugggagcucc

SEQ ID NO: 544127 - RNA, 22 nt, Human
ggagccagugcccucuggugga

SEQ ID NO: 544128 - RNA, 22 nt, Human
ggagcauguggggugagcaggg

SEQ ID NO: 544129 - RNA, 22 nt, Human
uuucagagaggcuucaaaucuu

SEQ ID NO: 544130 - RNA, 22 nt, Human
guccucugggcuuugagcaguc

SEQ ID NO: 544131 - RNA, 22 nt, Human
uucaaucauuuuuacauagucc

SEQ ID NO: 544132 - RNA, 22 nt, Human
aguaugaagaauacauagauga

SEQ ID NO: 544133 - RNA, 22 nt, Human
cuggccgguauuugccucuggg

SEQ ID NO: 544134 - RNA, 22 nt, Human
uuuguaacuuuagaauugaucc

SEQ ID NO: 544135 - RNA, 22 nt, Human
agcaguuuggaaaauacuagaa

SEQ ID NO: 544136 - RNA, 22 nt, Human
ucaggggacuuaggagagaagu

SEQ ID NO: 544137 - RNA, 22 nt, Human
ccagccaggcauugcaaacuga

SEQ ID NO: 544138 - RNA, 22 nt, Human
caaggagaguaauugaaugaga

SEQ ID NO: 544139 - RNA, 22 nt, Human
gguggagcuguggacaggaagg

SEQ ID NO: 544140 - RNA, 22 nt, Human
ucacuccucauugcugcccauu

SEQ ID NO: 544141 - RNA, 22 nt, Human
caggccugcaggaaaggcuccc

SEQ ID NO: 544142 - RNA, 22 nt, Human
gagggguccaggaggcacuuac

SEQ ID NO: 544143 - RNA, 22 nt, Human
cugggccuucauugcucuccca

SEQ ID NO: 544144 - RNA, 22 nt, Human
uuacuucuuacaaaagaaauau

SEQ ID NO: 544145 - RNA, 22 nt, Human
uucaggauucucucccauuuac

SEQ ID NO: 544146 - RNA, 21 nt, Human
gcucucugcaugguggcucag

SEQ ID NO: 544147 - RNA, 22 nt, Human
uggcugcugcuuggucuucuuc

SEQ ID NO: 544148 - RNA, 22 nt, Human
gcaggcuggucugaccaucccu

SEQ ID NO: 544149 - RNA, 22 nt, Human
ugucuguaagguguuuauguua

SEQ ID NO: 544150 - RNA, 22 nt, Human
uuagcugcauuaucaaaguuau

SEQ ID NO: 544151 - RNA, 22 nt, Human
ccaguguucauaauuuuacacu

SEQ ID NO: 544152 - RNA, 22 nt, Human
agggcugcuccuccuucaggcc

SEQ ID NO: 544153 - RNA, 22 nt, Human
acaaaagugagugugucucaga

SEQ ID NO: 544154 - RNA, 22 nt, Human
ccagcaggguugguuucuucug

SEQ ID NO: 544155 - RNA, 22 nt, Human
aauuagaagcuguuagcaaaau

SEQ ID NO: 544156 - RNA, 22 nt, Human
cuuccaaagcacuuuauggacc

SEQ ID NO: 544157 - RNA, 22 nt, Human
aggugcuggaguagaagaaaaa

SEQ ID NO: 544158 - RNA, 22 nt, Human
gggcccugccuaaggaacacac

SEQ ID NO: 544159 - RNA, 22 nt, Human
aauaauuauuugagagcagacc

SEQ ID NO: 544160 - RNA, 22 nt, Human
ucaacacuaaagaauaaucuuu

SEQ ID NO: 544161 - RNA, 22 nt, Human
aaguccagcucuaaauaucuga

SEQ ID NO: 544162 - RNA, 23 nt, Human
acugaaaggauccuagcagagac

SEQ ID NO: 544163 - RNA, 22 nt, Human
gcccaugguuacuuuucuggcu

SEQ ID NO: 544164 - RNA, 22 nt, Human
gcaaauaauauacuuugaucuc

SEQ ID NO: 544165 - RNA, 22 nt, Human
agcagaggacaguucuuaggaa

SEQ ID NO: 544166 - RNA, 21 nt, Human
aagaggaagcauuauggcaua

SEQ ID NO: 544167 - RNA, 22 nt, Human
ccacacuaaacugcucaaacca

SEQ ID NO: 544168 - RNA, 22 nt, Human
gcauuuuagaauauuggagcaa

SEQ ID NO: 544169 - RNA, 19 nt, Human
ugaagcaauaccauuuuug

SEQ ID NO: 544170 - RNA, 22 nt, Human
cccucugcugccuggcuggguc

SEQ ID NO: 544171 - RNA, 22 nt, Human
augaggcagguggaggcugcca

SEQ ID NO: 544172 - RNA, 22 nt, Human
uuugacauuggcuuauucuguu

SEQ ID NO: 544173 - RNA, 22 nt, Human
acaucacagagcccagauaaag

SEQ ID NO: 544174 - RNA, 22 nt, Human
ugaaggagcucaaugaugaugc

SEQ ID NO: 544175 - RNA, 22 nt, Human
ucaguggaguauggaugaaguc

SEQ ID NO: 544176 - RNA, 22 nt, Human
gggcuucucccuaaggacucug

SEQ ID NO: 544177 - RNA, 22 nt, Human
ccacaucauggauacaguuaug

SEQ ID NO: 544178 - RNA, 22 nt, Human
uagucuuuugagaaguauaucu

SEQ ID NO: 544179 - RNA, 22 nt, Human
aacaguguguuuuguuauuaag

SEQ ID NO: 544180 - RNA, 19 nt, Human
gcucagagggcccugugcu

SEQ ID NO: 544181 - RNA, 22 nt, Human
ccuggagcacauggcaggaggc

SEQ ID NO: 544182 - RNA, 22 nt, Human
cacagcugaaguagccaugugg

SEQ ID NO: 544183 - RNA, 22 nt, Human
uaugaagauauaucugaucucu

SEQ ID NO: 544184 - RNA, 23 nt, Human
gagggcucugagugcuugggcca

SEQ ID NO: 544185 - RNA, 22 nt, Human
ggaggagggguuuacauuggaa

SEQ ID NO: 544186 - RNA, 22 nt, Human
ggaagccaggccaaugagaaca

SEQ ID NO: 544187 - RNA, 22 nt, Human
agcuggggguuggauaagggua

SEQ ID NO: 544188 - RNA, 22 nt, Human
ugugugcagccucugucuuugg

SEQ ID NO: 544189 - RNA, 22 nt, Human
aaaugcacaauaaaguaaaggc

SEQ ID NO: 544190 - RNA, 22 nt, Human
ggcugugaacccuggcagugug

SEQ ID NO: 544191 - RNA, 22 nt, Human
agcaccaucagaugcaauaucu

SEQ ID NO: 544192 - RNA, 22 nt, Human
ucaggagucugugcaguuccac

SEQ ID NO: 544193 - RNA, 22 nt, Human
agcagcugccagagagaguucc

SEQ ID NO: 544194 - RNA, 22 nt, Human
uggcagggaauacagauguuua

SEQ ID NO: 544195 - RNA, 22 nt, Human
gagaaagauggaaucuuacagg

SEQ ID NO: 544196 - RNA, 22 nt, Human
gugccugccccacuccucagca

SEQ ID NO: 544197 - RNA, 22 nt, Human
ggucacugcucuaaacaaaagu

SEQ ID NO: 544198 - RNA, 22 nt, Human
acaaauauuuacugaauccacu

SEQ ID NO: 544199 - RNA, 22 nt, Human
ucaggagagaaagaauacaauu

SEQ ID NO: 544200 - RNA, 22 nt, Human
cagagagaaucuuggcagcuga

SEQ ID NO: 544201 - RNA, 22 nt, Human
uccucuggggucagggcacuac

SEQ ID NO: 544202 - RNA, 22 nt, Human
cccagguggcagaagcugcagu

SEQ ID NO: 544203 - RNA, 22 nt, Human
caggaggaaaugugacccugcu

SEQ ID NO: 544204 - RNA, 22 nt, Human
guuuuauaggugaaauauuacu

SEQ ID NO: 544205 - RNA, 18 nt, Human
cguuuuuccgggauugca

SEQ ID NO: 544206 - RNA, 22 nt, Human
uacuuuuugucucuuugaaugu

SEQ ID NO: 544207 - RNA, 22 nt, Human
ugagcccuaagggucaagcagg

SEQ ID NO: 544208 - RNA, 22 nt, Human
ucccuggcugggggcugccuug

SEQ ID NO: 544209 - RNA, 22 nt, Human
uuccauauuuguguggcaaaag

SEQ ID NO: 544210 - RNA, 22 nt, Human
accagguggccccagcgugguu

SEQ ID NO: 544211 - RNA, 19 nt, Human
gcugggagcagacccuccc

SEQ ID NO: 544212 - RNA, 20 nt, Human
agacaaaaugacuucaugca

SEQ ID NO: 544213 - RNA, 22 nt, Human
uagggcaggugaagaaaagcua

SEQ ID NO: 544214 - RNA, 22 nt, Human
aauguguuaguauugauuuguc

SEQ ID NO: 544215 - RNA, 22 nt, Human
auugcuuuuccuuaacacaugc

SEQ ID NO: 544216 - RNA, 22 nt, Human
ccugggaaguuguggcugcagu

SEQ ID NO: 544217 - RNA, 22 nt, Human
ucagggagaggugagagccugu

SEQ ID NO: 544218 - RNA, 22 nt, Human
ccagagggccuuuggaguuauc

SEQ ID NO: 544219 - RNA, 22 nt, Human
acuggacagaggaaauauggag

SEQ ID NO: 544220 - RNA, 22 nt, Human
ggcaucaggguaggaagguauc

SEQ ID NO: 544221 - RNA, 22 nt, Human
acccugccugacaacagaggau

SEQ ID NO: 544222 - RNA, 22 nt, Human
uuaaauuuuagaaacagacucu

SEQ ID NO: 544223 - RNA, 22 nt, Human
ugcagcuguaacagaggccuca

SEQ ID NO: 544224 - RNA, 22 nt, Human
gagggcugauaacaggaauaca

SEQ ID NO: 544225 - RNA, 22 nt, Human
uccuucaguuaaagaucucaca

SEQ ID NO: 544226 - RNA, 22 nt, Human
auacaugaggcucauuuauguc

SEQ ID NO: 544227 - RNA, 21 nt, Human
ucaaagcacauauuugcacau

SEQ ID NO: 544228 - RNA, 22 nt, Human
gcuguggaugcuauggaucauc

SEQ ID NO: 544229 - RNA, 22 nt, Human
aaggcacuguacuaguuaguua

SEQ ID NO: 544230 - RNA, 22 nt, Human
uuauuagguuuacauaaagguu

SEQ ID NO: 544231 - RNA, 22 nt, Human
ugcuuccacuaaugagcugugu

SEQ ID NO: 544232 - RNA, 22 nt, Human
cagucccaaggaggaagcaguc

SEQ ID NO: 544233 - RNA, 22 nt, Human
cagagacauuaagugccaugau

SEQ ID NO: 544234 - RNA, 22 nt, Human
aauuagggagagguagcuaggu

SEQ ID NO: 544235 - RNA, 22 nt, Human
gggcucuggaaggugcaccaug

SEQ ID NO: 544236 - RNA, 22 nt, Human
uucuggaggccccuuccuucuc

SEQ ID NO: 544237 - RNA, 22 nt, Human
agcagcucuggcacuguagcau

SEQ ID NO: 544238 - RNA, 22 nt, Human
caugucuuauauccugucuuca

SEQ ID NO: 544239 - RNA, 22 nt, Human
ggcugccugccuccaagccggg

SEQ ID NO: 544240 - RNA, 22 nt, Human
uggcagagagagugcagucgac

SEQ ID NO: 544241 - RNA, 22 nt, Human
aguacaauuuaaugaagauagc

SEQ ID NO: 544242 - RNA, 22 nt, Human
cccaagaucuuucgugcacuaa

SEQ ID NO: 544243 - RNA, 22 nt, Human
aagcagugcgcucaucuaaggg

SEQ ID NO: 544244 - RNA, 22 nt, Human
acaaagguggaccauguggcuu

SEQ ID NO: 544245 - RNA, 17 nt, Human
gggcagggacuccuggg

SEQ ID NO: 544246 - RNA, 22 nt, Human
aaucagaaaggcuaaggaagca

SEQ ID NO: 544247 - RNA, 22 nt, Human
uuauuuguaaagguccauagua

SEQ ID NO: 544248 - RNA, 22 nt, Human
aggugagugugacugcaagaga

SEQ ID NO: 544249 - RNA, 22 nt, Human
acugaaggaaagccuuugcaug

SEQ ID NO: 544250 - RNA, 22 nt, Human
ugcauuauuugcaugugccugu

SEQ ID NO: 544251 - RNA, 22 nt, Human
acagagcaacuuuauuucaugg

SEQ ID NO: 544252 - RNA, 22 nt, Human
cuguuacacggaccuucaaauc

SEQ ID NO: 544253 - RNA, 22 nt, Human
cugaagcaaaggaucgagcuaa

SEQ ID NO: 544254 - RNA, 22 nt, Human
uccucaggaucuaggagugcuu

SEQ ID NO: 544255 - RNA, 23 nt, Human
uccuccuggauacaaagggaaca

SEQ ID NO: 544256 - RNA, 22 nt, Human
uccugccucuccaugcuaacua

SEQ ID NO: 544257 - RNA, 22 nt, Human
ggaaaaauagaguauacuuuaa

SEQ ID NO: 544258 - RNA, 22 nt, Human
gaaaacuaacggaaaaguuagg

SEQ ID NO: 544259 - RNA, 22 nt, Human
uggaagaugaauaaagauucua

SEQ ID NO: 544260 - RNA, 20 nt, Human
aaauuacugccacacauuuc

SEQ ID NO: 544261 - RNA, 22 nt, Human
uuucuaaggaaaguaccuggga

SEQ ID NO: 544262 - RNA, 22 nt, Human
augcucuggaguacgugaaauu

SEQ ID NO: 544263 - RNA, 23 nt, Human
cagcaggagggugccugggcugc

SEQ ID NO: 544264 - RNA, 22 nt, Human
uuugucuuggccucaguuuucu

SEQ ID NO: 544265 - RNA, 22 nt, Human
cuguggaccugcucuuagagac

SEQ ID NO: 544266 - RNA, 22 nt, Human
ugcagggccgcuggaggucaug

SEQ ID NO: 544267 - RNA, 22 nt, Human
uugcuuuacuuugccauucguu

SEQ ID NO: 544268 - RNA, 22 nt, Human
caggaaaaucugcccacacaag

SEQ ID NO: 544269 - RNA, 22 nt, Human
augcaguagauaggcacuuuua

SEQ ID NO: 544270 - RNA, 22 nt, Human
acaguaccugcucucaagcaaa

SEQ ID NO: 544271 - RNA, 22 nt, Human
aacuuuuucugggauggagggu

SEQ ID NO: 544272 - RNA, 22 nt, Human
cacaggcugcccgcagcuggga

SEQ ID NO: 544273 - RNA, 22 nt, Human
uacacauuacauaauacuaucu

SEQ ID NO: 544274 - RNA, 22 nt, Human
augcacaagguagauuauuauu

SEQ ID NO: 544275 - RNA, 22 nt, Human
cauccaauaccaguuugcaggc

SEQ ID NO: 544276 - RNA, 22 nt, Human
ugaagguggcauaggagagaug

SEQ ID NO: 544277 - RNA, 22 nt, Human
caggcugccaaggcuggggagg

SEQ ID NO: 544278 - RNA, 22 nt, Human
ugagcauggugggugcagagca

SEQ ID NO: 544279 - RNA, 22 nt, Human
acacauuuagcaccagguuuau

SEQ ID NO: 544280 - RNA, 22 nt, Human
agacaugucaccaauucuuacu

SEQ ID NO: 544281 - RNA, 22 nt, Human
ggaccaggccagccucccugcg

SEQ ID NO: 544282 - RNA, 22 nt, Human
auacacaucuauuuaagagaca

SEQ ID NO: 544283 - RNA, 22 nt, Human
uauuuguugaguuguuaugucu

SEQ ID NO: 544284 - RNA, 22 nt, Human
agaggcacccaguuaagcugca

SEQ ID NO: 544285 - RNA, 22 nt, Human
auguuuguagguaagugacacu

SEQ ID NO: 544286 - RNA, 22 nt, Human
ccaggguguagggauuccagau

SEQ ID NO: 544287 - RNA, 22 nt, Human
gggggaagacugggcuagugau

SEQ ID NO: 544288 - RNA, 18 nt, Human
uucacaggaaaugucuuu

SEQ ID NO: 544289 - RNA, 22 nt, Human
uaacaaaguaccauagauuggg

SEQ ID NO: 544290 - RNA, 22 nt, Human
ucuguggauuuuaguguucaug

SEQ ID NO: 544291 - RNA, 22 nt, Human
cuggguggcgucuggggccagu

SEQ ID NO: 544292 - RNA, 22 nt, Human
aaagagacugguggcauuuugc

SEQ ID NO: 544293 - RNA, 22 nt, Human
ugcuucuggcacuugagggggu

SEQ ID NO: 544294 - RNA, 22 nt, Human
ggaggggaggauuaaugacaaa

SEQ ID NO: 544295 - RNA, 22 nt, Human
cagugcaguuucccagaugcug

SEQ ID NO: 544296 - RNA, 22 nt, Human
gggcccagcgugguuccaucug

SEQ ID NO: 544297 - RNA, 22 nt, Human
acauuucucauucuccccuaac

SEQ ID NO: 544298 - RNA, 22 nt, Human
uuugccaggcuugcaugaauuu

SEQ ID NO: 544299 - RNA, 22 nt, Human
acacacuucacccuugagcuaa

SEQ ID NO: 544300 - RNA, 22 nt, Human
guguccacggcugagaaugauu

SEQ ID NO: 544301 - RNA, 22 nt, Human
auuacacagcgguuacuacuag

SEQ ID NO: 544302 - RNA, 22 nt, Human
cugugggcauuugagugugggu

SEQ ID NO: 544303 - RNA, 22 nt, Human
uuugcuuucuguugaacagagu

SEQ ID NO: 544304 - RNA, 22 nt, Human
uggagcugggaguccugggcug

SEQ ID NO: 544305 - RNA, 22 nt, Human
cauguguaugcauucauacaua

SEQ ID NO: 544306 - RNA, 19 nt, Human
ucuggagcugaugcaggug

SEQ ID NO: 544307 - RNA, 22 nt, Human
gaaagggcaugggcaugacaac

SEQ ID NO: 544308 - RNA, 22 nt, Human
gccaggcuggugucacaacucu

SEQ ID NO: 544309 - RNA, 22 nt, Human
uuuaauugcauuuaaagaugga

SEQ ID NO: 544310 - RNA, 22 nt, Human
acaagaauguagauuaguuaag

SEQ ID NO: 544311 - RNA, 22 nt, Human
cugaugcuauaagccacagugg

SEQ ID NO: 544312 - RNA, 22 nt, Human
cacccagcuuuugcauccuccg

SEQ ID NO: 544313 - RNA, 20 nt, Human
uguauauuuucugguguaaa

SEQ ID NO: 544314 - RNA, 22 nt, Human
gaaguucaggugggaauugagc

SEQ ID NO: 544315 - RNA, 22 nt, Human
uggggcuguccuuagucugaga

SEQ ID NO: 544316 - RNA, 22 nt, Human
cugaaggacacgugaggagcca

SEQ ID NO: 544317 - RNA, 22 nt, Human
auuguuaugaaaauaagauguu

SEQ ID NO: 544318 - RNA, 22 nt, Human
agggcagcuagcuguagaaaga

SEQ ID NO: 544319 - RNA, 20 nt, Human
gcauccagacacccagcugc

SEQ ID NO: 544320 - RNA, 22 nt, Human
uuguuuccuuucuauacaggau

SEQ ID NO: 544321 - RNA, 22 nt, Human
aguucuagaagacuuuuccauu

SEQ ID NO: 544322 - RNA, 22 nt, Human
acagauugaucuugagaauuau

SEQ ID NO: 544323 - RNA, 19 nt, Human
ggcuucaguuuagcaggcu

SEQ ID NO: 544324 - RNA, 22 nt, Human
ugacaacucuaguuaaugaauu

SEQ ID NO: 544325 - RNA, 19 nt, Human
uuagccauccacagugaaa

SEQ ID NO: 544326 - RNA, 22 nt, Human
gagguuggugaggggacacggu

SEQ ID NO: 544327 - RNA, 21 nt, Human
agcagagugcuuugacuuugu

SEQ ID NO: 544328 - RNA, 22 nt, Human
gcucuucauucucccaaauagg

SEQ ID NO: 544329 - RNA, 22 nt, Human
uggagguggcaucugacagcug

SEQ ID NO: 544330 - RNA, 22 nt, Human
cacauguacagaagcaggcugg

SEQ ID NO: 544331 - RNA, 22 nt, Human
ucucugauguauaucagagaac

SEQ ID NO: 544332 - RNA, 22 nt, Human
ugcugcacaauuggaaaguauc

SEQ ID NO: 544333 - RNA, 22 nt, Human
ugccaggcauguaguagacuug

SEQ ID NO: 544334 - RNA, 22 nt, Human
cagagcugguaagugguagagg

SEQ ID NO: 544335 - RNA, 22 nt, Human
agaggucuuuuggucugcagaa

SEQ ID NO: 544336 - RNA, 22 nt, Human
ggcacucagagauucaggcugu

SEQ ID NO: 544337 - RNA, 22 nt, Human
gcagggacaccuuugugaagcu

SEQ ID NO: 544338 - RNA, 22 nt, Human
cacagugaagcaugcagacauc

SEQ ID NO: 544339 - RNA, 22 nt, Human
ucacaguaaauccagaagaaau

SEQ ID NO: 544340 - RNA, 22 nt, Human
uaacugaauguauuacaacaga

SEQ ID NO: 544341 - RNA, 22 nt, Human
uaggaagcacuuaaagaauuug

SEQ ID NO: 544342 - RNA, 17 nt, Human
uagcugccccgaaugcu

SEQ ID NO: 544343 - RNA, 22 nt, Human
ucuuacauauagcaugaguaca

SEQ ID NO: 544344 - RNA, 22 nt, Human
agcugguuagcaaucuaaguga

SEQ ID NO: 544345 - RNA, 22 nt, Human
cuggccugagcacagcggcugc

SEQ ID NO: 544346 - RNA, 22 nt, Human
gggcccugaucugugagcgcag

SEQ ID NO: 544347 - RNA, 20 nt, Human
agugugcauuuagagucugc

SEQ ID NO: 544348 - RNA, 22 nt, Human
agggcagcugugagccacugug

SEQ ID NO: 544349 - RNA, 22 nt, Human
augaacuaagagucauuagugu

SEQ ID NO: 544350 - RNA, 22 nt, Human
aaauucucuaaagaaaacauga

SEQ ID NO: 544351 - RNA, 22 nt, Human
uggcucagcugacucggcuucu

SEQ ID NO: 544352 - RNA, 22 nt, Human
gccugggaacucugaucuccug

SEQ ID NO: 544353 - RNA, 22 nt, Human
gcagggguuuucugacuugagu

SEQ ID NO: 544354 - RNA, 22 nt, Human
gcuauacaaguguagaauagag

SEQ ID NO: 544355 - RNA, 22 nt, Human
aauauucauuugcagaagaagu

SEQ ID NO: 544356 - RNA, 22 nt, Human
gggugggaacaggaugccagga

SEQ ID NO: 544357 - RNA, 22 nt, Human
uaguuuuuaaguguacaauuuc

SEQ ID NO: 544358 - RNA, 20 nt, Human
aagcuggguaggagaggagc

SEQ ID NO: 544359 - RNA, 22 nt, Human
ccaggaaccgaugaucagaggg

SEQ ID NO: 544360 - RNA, 22 nt, Human
ucacacacauaaucuaagauua

SEQ ID NO: 544361 - RNA, 17 nt, Human
cugaagauaauggcaac

SEQ ID NO: 544362 - RNA, 22 nt, Human
caugggagguuggcuuggcaug

SEQ ID NO: 544363 - RNA, 22 nt, Human
uucuuauugggagaccuuuucu

SEQ ID NO: 544364 - RNA, 22 nt, Human
ggaggcucccacgcagcucaca

SEQ ID NO: 544365 - RNA, 22 nt, Human
auccaggguguggagagagcuc

SEQ ID NO: 544366 - RNA, 22 nt, Human
uaacagaagagcaggcagcccu

SEQ ID NO: 544367 - RNA, 22 nt, Human
agcaugaagacuucagagcuag

SEQ ID NO: 544368 - RNA, 22 nt, Human
uuuguaaaggccugaauuucag

SEQ ID NO: 544369 - RNA, 22 nt, Human
ggaaagggcagaggccuuggag

SEQ ID NO: 544370 - RNA, 19 nt, Human
acauagcuggcuacacugu

SEQ ID NO: 544371 - RNA, 22 nt, Human
gccugcagccccucugcaguag

SEQ ID NO: 544372 - RNA, 22 nt, Human
agaaacauuuagauuauauguc

SEQ ID NO: 544373 - RNA, 22 nt, Human
gaaagaggaaggagauguauua

SEQ ID NO: 544374 - RNA, 22 nt, Human
aaaguuugagugauuugacaca

SEQ ID NO: 544375 - RNA, 22 nt, Human
cacucugagaaguacaagcucc

SEQ ID NO: 544376 - RNA, 22 nt, Human
aaagaacuaaugugcaagguuu

SEQ ID NO: 544377 - RNA, 22 nt, Human
uggguagagacacagucugggg

SEQ ID NO: 544378 - RNA, 22 nt, Human
cugagccagcuggcaugugcua

SEQ ID NO: 544379 - RNA, 22 nt, Human
gagggcuccacacgggcccagc

SEQ ID NO: 544380 - RNA, 22 nt, Human
aggcucaggugccucauucaca

SEQ ID NO: 544381 - RNA, 22 nt, Human
caggccugaguguggaagucuu

SEQ ID NO: 544382 - RNA, 22 nt, Human
uccagggacacagaguccuucu

SEQ ID NO: 544383 - RNA, 22 nt, Human
ucuagcauuucuuuccugagga

SEQ ID NO: 544384 - RNA, 22 nt, Human
uauucccagccucuuucuaucu

SEQ ID NO: 544385 - RNA, 22 nt, Human
acagagauggcacagagaaggu

SEQ ID NO: 544386 - RNA, 22 nt, Human
uaauacaucauucaucuaagga

SEQ ID NO: 544387 - RNA, 22 nt, Human
guuauuuucauuggcucagacu

SEQ ID NO: 544388 - RNA, 22 nt, Human
caccagcagaagacugagggug

SEQ ID NO: 544389 - RNA, 22 nt, Human
aggacagcauaugggaaccagu

SEQ ID NO: 544390 - RNA, 22 nt, Human
gcagcugggccccagccucucc

SEQ ID NO: 544391 - RNA, 22 nt, Human
uagagcauuuagaggggcagga

SEQ ID NO: 544392 - RNA, 22 nt, Human
cccagcuaccucugcuaggaga

SEQ ID NO: 544393 - RNA, 22 nt, Human
caggcugucugaauggaggccc

SEQ ID NO: 544394 - RNA, 22 nt, Human
auguuaaaugguuuauuauuaa

SEQ ID NO: 544395 - RNA, 22 nt, Human
cugagaguucguuccacccucc

SEQ ID NO: 544396 - RNA, 22 nt, Human
uaugagauaauagauguguaaa

SEQ ID NO: 544397 - RNA, 22 nt, Human
agagccuggaccugagcuacaa

SEQ ID NO: 544398 - RNA, 22 nt, Human
cucagagcccaggguacacccg

SEQ ID NO: 544399 - RNA, 22 nt, Human
ccugaagggacuccagagagca

SEQ ID NO: 544400 - RNA, 22 nt, Human
acagggcagagugaaaugcuau

SEQ ID NO: 544401 - RNA, 22 nt, Human
ucauucuuuaccaaguugucac

SEQ ID NO: 544402 - RNA, 22 nt, Human
gcaggguccauggaggcagccc

SEQ ID NO: 544403 - RNA, 22 nt, Human
ugaaggaagaauaggcaguguu

SEQ ID NO: 544404 - RNA, 22 nt, Human
gaaggcugaguggguacggagg

SEQ ID NO: 544405 - RNA, 22 nt, Human
aggaagagcaucuuugggucug

SEQ ID NO: 544406 - RNA, 22 nt, Human
acacagaguauuuagaaggggu

SEQ ID NO: 544407 - RNA, 22 nt, Human
ggaccaaaugcuuuuuaauuga

SEQ ID NO: 544408 - RNA, 22 nt, Human
cugcagguuuauuuucuuaccu

SEQ ID NO: 544409 - RNA, 22 nt, Human
agggcuccaggggcugggugac

SEQ ID NO: 544410 - RNA, 22 nt, Human
cugcuuuguaaaauagacauaa

SEQ ID NO: 544411 - RNA, 22 nt, Human
uuugauaucuugguauacagau

SEQ ID NO: 544412 - RNA, 22 nt, Human
ucauggagacuuugagccuguu

SEQ ID NO: 544413 - RNA, 22 nt, Human
gcuggcauuacaggagagaacc

SEQ ID NO: 544414 - RNA, 22 nt, Human
acugggaagauggaggcaagca

SEQ ID NO: 544415 - RNA, 22 nt, Human
uaggaaagcaguagagccagga

SEQ ID NO: 544416 - RNA, 22 nt, Human
uggcaggauuugcccggaagga

SEQ ID NO: 544417 - RNA, 22 nt, Human
agugcugucuccuucccccggg

SEQ ID NO: 544418 - RNA, 22 nt, Human
uugaucagguugcuguggugua

SEQ ID NO: 544419 - RNA, 22 nt, Human
auucaaguacaguuuucuucuu

SEQ ID NO: 544420 - RNA, 21 nt, Human
cugaggcaugcaggccugggc

SEQ ID NO: 544421 - RNA, 22 nt, Human
uggaggaaguggacaguugugu

SEQ ID NO: 544422 - RNA, 22 nt, Human
uguguggauucaucucaaagag

SEQ ID NO: 544423 - RNA, 22 nt, Human
acaaaauuaugaagaggccuug

SEQ ID NO: 544424 - RNA, 22 nt, Human
ggccugcucuguuuagaggggg

SEQ ID NO: 544425 - RNA, 22 nt, Human
ugucuuuagaaagaagcagaca

SEQ ID NO: 544426 - RNA, 20 nt, Human
ucauccaggacaggaguggc

SEQ ID NO: 544427 - RNA, 22 nt, Human
caagcaggaggagaaguuucug

SEQ ID NO: 544428 - RNA, 22 nt, Human
aagaaugauuacaaagcaacga

SEQ ID NO: 544429 - RNA, 22 nt, Human
aaagaacagauguguggugcau

SEQ ID NO: 544430 - RNA, 22 nt, Human
ucaaacuucuauucucuguuuu

SEQ ID NO: 544431 - RNA, 22 nt, Human
gcucaggaaauaguuuaguguu

SEQ ID NO: 544432 - RNA, 22 nt, Human
cuggggcucucuggaaugcuug

SEQ ID NO: 544433 - RNA, 22 nt, Human
uacauguaagacaugagacucu

SEQ ID NO: 544434 - RNA, 22 nt, Human
aggcugaggaucguacuuucca

SEQ ID NO: 544435 - RNA, 22 nt, Human
uuugcuaaaagugaugaagaca

SEQ ID NO: 544436 - RNA, 22 nt, Human
ggcaggugccuucugugcuagc

SEQ ID NO: 544437 - RNA, 22 nt, Human
cagccagugguugaagaugcag

SEQ ID NO: 544438 - RNA, 17 nt, Human
gggcugacaguggccuc

SEQ ID NO: 544439 - RNA, 22 nt, Human
uugguuuacuaggauucaaauu

SEQ ID NO: 544440 - RNA, 22 nt, Human
ccucaggggugcccacagcugc

SEQ ID NO: 544441 - RNA, 22 nt, Human
uggcagagugcggcauccccug

SEQ ID NO: 544442 - RNA, 22 nt, Human
ccagucccaggcagaaauccag

SEQ ID NO: 544443 - RNA, 18 nt, Human
cugaggcuggcaggagcc

SEQ ID NO: 544444 - RNA, 22 nt, Human
aaggugggcagaucacaagguc

SEQ ID NO: 544445 - RNA, 22 nt, Human
uucuuuggggaauauucugguu

SEQ ID NO: 544446 - RNA, 19 nt, Human
uggaaaauggauugaauca

SEQ ID NO: 544447 - RNA, 22 nt, Human
gaggcucagagaagucauggua

SEQ ID NO: 544448 - RNA, 22 nt, Human
ugaauucaggggcuauuauauu

SEQ ID NO: 544449 - RNA, 22 nt, Human
gaaugcucucauuuuccaacau

SEQ ID NO: 544450 - RNA, 22 nt, Human
uuccagaggcucuaggggagaa

SEQ ID NO: 544451 - RNA, 22 nt, Human
ucacuuagauggggaucaucac

SEQ ID NO: 544452 - RNA, 22 nt, Human
uuuccaaaggaggaaccaguuu

SEQ ID NO: 544453 - RNA, 22 nt, Human
caggccacaaguuggguucaag

SEQ ID NO: 544454 - RNA, 22 nt, Human
aagccagcauuuucccauuccu

SEQ ID NO: 544455 - RNA, 22 nt, Human
uaucagaaagauauuacugggg

SEQ ID NO: 544456 - RNA, 22 nt, Human
aguuuucugauguguagugaga

SEQ ID NO: 544457 - RNA, 22 nt, Human
gucucagaccacccucuuuggc

SEQ ID NO: 544458 - RNA, 22 nt, Human
aagugucuuaacuccuuuuggg

SEQ ID NO: 544459 - RNA, 22 nt, Human
guaacaguuuggguuccaauug

SEQ ID NO: 544460 - RNA, 22 nt, Human
aucacuguuaucuagaagcaca

SEQ ID NO: 544461 - RNA, 16 nt, Human
uaaaucugugaucaca

SEQ ID NO: 544462 - RNA, 22 nt, Human
auugacaagcaguaugucuuag

SEQ ID NO: 544463 - RNA, 22 nt, Human
ccuuucucuggcagcaggacag

SEQ ID NO: 544464 - RNA, 22 nt, Human
uuccauaacugaccgaaugcau

SEQ ID NO: 544465 - RNA, 22 nt, Human
aaaaggaucagauuuugagcag

SEQ ID NO: 544466 - RNA, 22 nt, Human
ugaaaaggaguccuuguuuuca

SEQ ID NO: 544467 - RNA, 22 nt, Human
ugcacacacgcggcacaucugu

SEQ ID NO: 544468 - RNA, 20 nt, Human
cagauucuccacuaacauau

SEQ ID NO: 544469 - RNA, 22 nt, Human
gucccagaugucuggaacuccc

SEQ ID NO: 544470 - RNA, 22 nt, Human
gcuaggagugggauggaagucg

SEQ ID NO: 544471 - RNA, 22 nt, Human
ugcugccaccccucaccagagc

SEQ ID NO: 544472 - RNA, 22 nt, Human
uggagcaggugcucaggguaau

SEQ ID NO: 544473 - RNA, 22 nt, Human
acagaggaaggcugagcugccc

SEQ ID NO: 544474 - RNA, 22 nt, Human
uuccaggacuggguguuugaag

SEQ ID NO: 544475 - RNA, 22 nt, Human
aaucuucauuuugacaagauuc

SEQ ID NO: 544476 - RNA, 22 nt, Human
ucugaaaugaacucuugaacuu

SEQ ID NO: 544477 - RNA, 22 nt, Human
ccugggcugggcgucucauggg

SEQ ID NO: 544478 - RNA, 22 nt, Human
gugcuuucugcugcauuccucu

SEQ ID NO: 544479 - RNA, 22 nt, Human
ugcacuggggucccagcgcacg

SEQ ID NO: 544480 - RNA, 22 nt, Human
ccauggccgccgcugcucagga

SEQ ID NO: 544481 - RNA, 22 nt, Human
guucuucaggcugugcucuaga

SEQ ID NO: 544482 - RNA, 22 nt, Human
uugaaggacaucuuguuucuag

SEQ ID NO: 544483 - RNA, 22 nt, Human
agggcagcuaaggugcugacug

SEQ ID NO: 544484 - RNA, 22 nt, Human
aagggcaggugggcauuucugg

SEQ ID NO: 544485 - RNA, 22 nt, Human
uggccuggcugcccugucugga

SEQ ID NO: 544486 - RNA, 22 nt, Human
ucaaagaauguuaugaggguag

SEQ ID NO: 544487 - RNA, 19 nt, Human
uucuguaaggacauuaauc

SEQ ID NO: 544488 - RNA, 22 nt, Human
cagggcucccuugcaaggaggg

SEQ ID NO: 544489 - RNA, 20 nt, Human
accuccuggaagcaggugcc

SEQ ID NO: 544490 - RNA, 22 nt, Human
gugucccaaagauuagaaauca

SEQ ID NO: 544491 - RNA, 21 nt, Human
ugucagagcuuguaggacauu

SEQ ID NO: 544492 - RNA, 22 nt, Human
uuuuugcaccaaccuaauagaa

SEQ ID NO: 544493 - RNA, 18 nt, Human
uggaagcuggcagauuuu

SEQ ID NO: 544494 - RNA, 22 nt, Human
uacaggcacugaaaugcuuauu

SEQ ID NO: 544495 - RNA, 22 nt, Human
cucuggaguucuucaagcuacu

SEQ ID NO: 544496 - RNA, 22 nt, Human
agaauuguugggguaauaaaag

SEQ ID NO: 544497 - RNA, 22 nt, Human
aggaauggugcucagcagaaau

SEQ ID NO: 544498 - RNA, 22 nt, Human
ugucucugguauuaggugaaaa

SEQ ID NO: 544499 - RNA, 22 nt, Human
ucugcucuccauacuuccgcac

SEQ ID NO: 544500 - RNA, 22 nt, Human
agcagguguuuguaucauaagg

SEQ ID NO: 544501 - RNA, 22 nt, Human
cucccaagauaaauaaggcagu

SEQ ID NO: 544502 - RNA, 22 nt, Human
gcugucaggaacaugccuuggu

SEQ ID NO: 544503 - RNA, 22 nt, Human
uggcaggagacacauggcauag

SEQ ID NO: 544504 - RNA, 22 nt, Human
ggcuugcuucuuguccaggaau

SEQ ID NO: 544505 - RNA, 22 nt, Human
agaaaucaauaucuauauguug

SEQ ID NO: 544506 - RNA, 22 nt, Human
aucuagaaaaggugacuaaaau

SEQ ID NO: 544507 - RNA, 22 nt, Human
ggcuggcacaaagcuccaaauc

SEQ ID NO: 544508 - RNA, 22 nt, Human
gucugaauucuguguaacucua

SEQ ID NO: 544509 - RNA, 22 nt, Human
uccaggcaggguuaaggguccu

SEQ ID NO: 544510 - RNA, 22 nt, Human
aagaauaagaggauuuagaaca

SEQ ID NO: 544511 - RNA, 22 nt, Human
caaacauuuuaaauaagggaua

SEQ ID NO: 544512 - RNA, 22 nt, Human
cugccagcaaugugaccaugcu

SEQ ID NO: 544513 - RNA, 22 nt, Human
aaaucagacuugaauuuucauc

SEQ ID NO: 544514 - RNA, 22 nt, Human
acaugcaugucuaugggcaggu

SEQ ID NO: 544515 - RNA, 22 nt, Human
cagggccagagagggcuggcug

SEQ ID NO: 544516 - RNA, 22 nt, Human
gcugccugggcaggaggcgcug

SEQ ID NO: 544517 - RNA, 22 nt, Human
uggcuggggccacaguuuuccu

SEQ ID NO: 544518 - RNA, 22 nt, Human
gggauggggucaacauguaccu

SEQ ID NO: 544519 - RNA, 23 nt, Human
ugauuacaggaaguucaaguguu

SEQ ID NO: 544520 - RNA, 22 nt, Human
guuauaaauaccuaauaggauu

SEQ ID NO: 544521 - RNA, 22 nt, Human
auuaaauguuccuuaaauuaua

SEQ ID NO: 544522 - RNA, 22 nt, Human
uguccccaagguucagcccaca

SEQ ID NO: 544523 - RNA, 22 nt, Human
auuagggaaacugacuugucuc

SEQ ID NO: 544524 - RNA, 22 nt, Human
gaaguuaggcuuuccuaugcuu

SEQ ID NO: 544525 - RNA, 22 nt, Human
aaauaacuugguuucaucagag

SEQ ID NO: 544526 - RNA, 22 nt, Human
acuggagcccguggaggcgcag

SEQ ID NO: 544527 - RNA, 22 nt, Human
agcagccacacgccuccuucuc

SEQ ID NO: 544528 - RNA, 22 nt, Human
cugaggaugguguggucuucuc

SEQ ID NO: 544529 - RNA, 22 nt, Human
uggcugaauaaaauaugguguu

SEQ ID NO: 544530 - RNA, 22 nt, Human
uacaugaaguugucuaaacugg

SEQ ID NO: 544531 - RNA, 23 nt, Human
cagggcugguagggaagagcgug

SEQ ID NO: 544532 - RNA, 22 nt, Human
ugcccccugguggccagagccg

SEQ ID NO: 544533 - RNA, 22 nt, Human
aacuucuaaucuguacaguuuu

SEQ ID NO: 544534 - RNA, 22 nt, Human
ggguacaguucuuccaguguca

SEQ ID NO: 544535 - RNA, 22 nt, Human
aggacacacagaauacaaaucc

SEQ ID NO: 544536 - RNA, 22 nt, Human
gcucccucugcucaggcacuug

SEQ ID NO: 544537 - RNA, 22 nt, Human
aagcaucucuauguggagagug

SEQ ID NO: 544538 - RNA, 22 nt, Human
acaaaggugcgucccuucagcu

SEQ ID NO: 544539 - RNA, 22 nt, Human
gcuggccacacugcugauggag

SEQ ID NO: 544540 - RNA, 17 nt, Human
agaugcuggccacaugu

SEQ ID NO: 544541 - RNA, 18 nt, Human
guaggucaguaccaagca

SEQ ID NO: 544542 - RNA, 22 nt, Human
gguccuugggucuccuguguuu

SEQ ID NO: 544543 - RNA, 21 nt, Human
uuggacuuuugcgugauugag

SEQ ID NO: 544544 - RNA, 22 nt, Human
gaaaugcaggcuuggauucagc

SEQ ID NO: 544545 - RNA, 22 nt, Human
uccugccucacaguugaaguuu

SEQ ID NO: 544546 - RNA, 22 nt, Human
aaagcaguauauugguaguugu

SEQ ID NO: 544547 - RNA, 22 nt, Human
aaaguuugcaauuuauguuaau

SEQ ID NO: 544548 - RNA, 22 nt, Human
cacauuuaaagguugaagcuga

SEQ ID NO: 544549 - RNA, 22 nt, Human
uuacagauacuuuguaggcaag

SEQ ID NO: 544550 - RNA, 22 nt, Human
ucacagacauggugagguaaca

SEQ ID NO: 544551 - RNA, 22 nt, Human
aaaagcagaucuccaaagucua

SEQ ID NO: 544552 - RNA, 20 nt, Human
gcagugauuugucuauguuu

SEQ ID NO: 544553 - RNA, 22 nt, Human
uagggcuguuuaaaagugaggu

SEQ ID NO: 544554 - RNA, 22 nt, Human
aaaguguaaaagcauguuaggg

SEQ ID NO: 544555 - RNA, 22 nt, Human
ugcaaaaugacuucugaaaaga

SEQ ID NO: 544556 - RNA, 22 nt, Human
uccugggaagcgccggccugcg

SEQ ID NO: 544557 - RNA, 22 nt, Human
uuuacaagucagggacuguucu

SEQ ID NO: 544558 - RNA, 22 nt, Human
caagaauauaaauacuuucaaa

SEQ ID NO: 544559 - RNA, 22 nt, Human
uuauuagcugggcuucagggug

SEQ ID NO: 544560 - RNA, 22 nt, Human
acugggccuacccagauuggca

SEQ ID NO: 544561 - RNA, 22 nt, Human
aaauauugguaggaugcuuguu

SEQ ID NO: 544562 - RNA, 22 nt, Human
gcugagagcacauagaaggggc

SEQ ID NO: 544563 - RNA, 22 nt, Human
cgcugggcgccgaccugcuggc

SEQ ID NO: 544564 - RNA, 22 nt, Human
uaauuucaccguugcuagaaau

SEQ ID NO: 544565 - RNA, 22 nt, Human
gaggcagcaggcugaggaggau

SEQ ID NO: 544566 - RNA, 22 nt, Human
ugcacacaguggacaagucuug

SEQ ID NO: 544567 - RNA, 23 nt, Human
uggcucugagagguucagaugcu

SEQ ID NO: 544568 - RNA, 22 nt, Human
aaugauguauuaguacaacaca

SEQ ID NO: 544569 - RNA, 22 nt, Human
cucucugggggccaugccaaga

SEQ ID NO: 544570 - RNA, 22 nt, Human
ucucagggccucccucuguuuc

SEQ ID NO: 544571 - RNA, 22 nt, Human
uuuacaauucucuaccaguguu

SEQ ID NO: 544572 - RNA, 22 nt, Human
cacauccuucagcugagcccag

SEQ ID NO: 544573 - RNA, 22 nt, Human
cugcucuggcguacucggcauc

SEQ ID NO: 544574 - RNA, 22 nt, Human
agagccuggggauuggcaaggg

SEQ ID NO: 544575 - RNA, 22 nt, Human
agugggcaggcagggugcgcag

SEQ ID NO: 544576 - RNA, 22 nt, Human
ucugccuggauuccauucucca

SEQ ID NO: 544577 - RNA, 22 nt, Human
auaggcuuauauaaaaacaucu

SEQ ID NO: 544578 - RNA, 22 nt, Human
agcugucugucuccugaggaga

SEQ ID NO: 544579 - RNA, 22 nt, Human
auguuacagaaagcaaagauga

SEQ ID NO: 544580 - RNA, 22 nt, Human
ggcuguggccagcggggcugag

SEQ ID NO: 544581 - RNA, 20 nt, Human
aaagucuuaugguuaauuuu

SEQ ID NO: 544582 - RNA, 22 nt, Human
cagcaguguggaagcugagggg

SEQ ID NO: 544583 - RNA, 23 nt, Human
uagauguuuggggaacuuugccc

SEQ ID NO: 544584 - RNA, 23 nt, Human
ucagcugcuuccuccugccugcc

SEQ ID NO: 544585 - RNA, 22 nt, Human
agggcucaucugagacugacau

SEQ ID NO: 544586 - RNA, 22 nt, Human
uuucaaacuuaaauaccuuucc

SEQ ID NO: 544587 - RNA, 22 nt, Human
gucuuucuuaauucaagugcuu

SEQ ID NO: 544588 - RNA, 22 nt, Human
aagauuacuacggaacaugacc

SEQ ID NO: 544589 - RNA, 16 nt, Human
cagaggcaccuggcuc

SEQ ID NO: 544590 - RNA, 19 nt, Human
ggcugccuggagcgagggc

SEQ ID NO: 544591 - RNA, 22 nt, Human
gccuucaguaguauccucauga

SEQ ID NO: 544592 - RNA, 19 nt, Human
cagcaagaaugaaggcaua

SEQ ID NO: 544593 - RNA, 22 nt, Human
cuuuggaaaagcauaccaagga

SEQ ID NO: 544594 - RNA, 22 nt, Human
augaggcagauguugcaugagg

SEQ ID NO: 544595 - RNA, 22 nt, Human
agggacuauuuacccaucucac

SEQ ID NO: 544596 - RNA, 22 nt, Human
uuagaaaauuugcuucuuugga

SEQ ID NO: 544597 - RNA, 22 nt, Human
agcuggagcuucaagcagguaa

SEQ ID NO: 544598 - RNA, 22 nt, Human
uguuuuaguucugucuugcaug

SEQ ID NO: 544599 - RNA, 22 nt, Human
gcuguucacagacucugcucug

SEQ ID NO: 544600 - RNA, 22 nt, Human
ccaggccauucccagaguugcu

SEQ ID NO: 544601 - RNA, 22 nt, Human
uugguuuaggaacuggcuugga

SEQ ID NO: 544602 - RNA, 22 nt, Human
agagaacagcauugcagcuuug

SEQ ID NO: 544603 - RNA, 22 nt, Human
ugauuuccaauaaggagaaugu

SEQ ID NO: 544604 - RNA, 22 nt, Human
caguacuuaguucucaugguuu

SEQ ID NO: 544605 - RNA, 22 nt, Human
cagcucugccaucaucugccuu

SEQ ID NO: 544606 - RNA, 22 nt, Human
cuauucaacuugacuguuucac

SEQ ID NO: 544607 - RNA, 22 nt, Human
aggaccaguaugagagcaucug

SEQ ID NO: 544608 - RNA, 22 nt, Human
uguguuuauaguguaucuucca

SEQ ID NO: 544609 - RNA, 17 nt, Human
cccuggcucuaggugga

SEQ ID NO: 544610 - RNA, 22 nt, Human
ccucccacauccuagcucugcu

SEQ ID NO: 544611 - RNA, 20 nt, Human
cacaggcuauaugagagcca

SEQ ID NO: 544612 - RNA, 22 nt, Human
gagggugcugugccaagaugac

SEQ ID NO: 544613 - RNA, 22 nt, Human
agugaaauuuguuuagauaggu

SEQ ID NO: 544614 - RNA, 22 nt, Human
aagauggcaucuccuauagaug

SEQ ID NO: 544615 - RNA, 22 nt, Human
ggcaccuggauguagcagugaa

SEQ ID NO: 544616 - RNA, 22 nt, Human
gccuggcauuggagccggggca

SEQ ID NO: 544617 - RNA, 22 nt, Human
ugccucagagugggcuugcuau

SEQ ID NO: 544618 - RNA, 22 nt, Human
uuauuucauguaaaauuuaugu

SEQ ID NO: 544619 - RNA, 19 nt, Human
gucagcaccauggacaggg

SEQ ID NO: 544620 - RNA, 22 nt, Human
uuggaaaaacacgauagugguu

SEQ ID NO: 544621 - RNA, 22 nt, Human
aucaggauagucuguaaauugu

SEQ ID NO: 544622 - RNA, 20 nt, Human
uuguuucugcuauuuucuaa

SEQ ID NO: 544623 - RNA, 22 nt, Human
cucugagacucaagugaguggg

SEQ ID NO: 544624 - RNA, 22 nt, Human
acuucuggugucauacugcauu

SEQ ID NO: 544625 - RNA, 23 nt, Human
gcugccucuguuggucuucaguu

SEQ ID NO: 544626 - RNA, 22 nt, Human
ccuucucuacuccugaugcaug

SEQ ID NO: 544627 - RNA, 22 nt, Human
ccacuguuuuucaguuaacuuu

SEQ ID NO: 544628 - RNA, 22 nt, Human
uccugccucuugccuucuucac

SEQ ID NO: 544629 - RNA, 22 nt, Human
ggagagaaauugagguagcaag

SEQ ID NO: 544630 - RNA, 22 nt, Human
uggugagauaacuuucggcaag

SEQ ID NO: 544631 - RNA, 22 nt, Human
aggcagcagagguugaggaaag

SEQ ID NO: 544632 - RNA, 22 nt, Human
aguucugggaaaaacauggcca

SEQ ID NO: 544633 - RNA, 22 nt, Human
uccugggaacucggaaagcucu

SEQ ID NO: 544634 - RNA, 22 nt, Human
ucucagucuuugcaaggaugcu

SEQ ID NO: 544635 - RNA, 22 nt, Human
cuucaagagaaugcagggaugu

SEQ ID NO: 544636 - RNA, 22 nt, Human
gugccugggcaugagcuuguug

SEQ ID NO: 544637 - RNA, 22 nt, Human
uaugugugcuuuuuccaugcau

SEQ ID NO: 544638 - RNA, 22 nt, Human
gcuggcaccugcaccaagcagg

SEQ ID NO: 544639 - RNA, 22 nt, Human
aguauuucaguuacuuuaaaau

SEQ ID NO: 544640 - RNA, 22 nt, Human
uguuuucuuccuaauugcucau

SEQ ID NO: 544641 - RNA, 19 nt, Human
uggagacugagagugagca

SEQ ID NO: 544642 - RNA, 20 nt, Human
ucagaggcugccagcugggg

SEQ ID NO: 544643 - RNA, 22 nt, Human
caucaaauggcaagugaaagcu

SEQ ID NO: 544644 - RNA, 22 nt, Human
accagugcuuccugcuggagcu

SEQ ID NO: 544645 - RNA, 22 nt, Human
acugggaggcaucuggagcuga

SEQ ID NO: 544646 - RNA, 22 nt, Human
ugauuuuuggaucugagcugca

SEQ ID NO: 544647 - RNA, 22 nt, Human
uuuacaaggcagaacugauuaa

SEQ ID NO: 544648 - RNA, 22 nt, Human
ucuaacauuguuuuucacagau

SEQ ID NO: 544649 - RNA, 22 nt, Human
cagcuauuuucucauuaaggau

SEQ ID NO: 544650 - RNA, 22 nt, Human
agcaggugaugugagucuggaa

SEQ ID NO: 544651 - RNA, 22 nt, Human
auucuucauguugaagcuguca

SEQ ID NO: 544652 - RNA, 22 nt, Human
ugcagaagacacaagguaacgu

SEQ ID NO: 544653 - RNA, 22 nt, Human
cugaaggaagcagaagcgaggu

SEQ ID NO: 544654 - RNA, 22 nt, Human
agcuucuugaccaagccuguaa

SEQ ID NO: 544655 - RNA, 22 nt, Human
aaaggucaaaaucgugacauug

SEQ ID NO: 544656 - RNA, 22 nt, Human
gccuggcucugagggagcuccu

SEQ ID NO: 544657 - RNA, 22 nt, Human
ugagaguauuuuggcauuauca

SEQ ID NO: 544658 - RNA, 22 nt, Human
uguacuguauucaucuuuaacu

SEQ ID NO: 544659 - RNA, 22 nt, Human
uggaugugucgcccuggcucuc

SEQ ID NO: 544660 - RNA, 22 nt, Human
uacagcuuuucauauuuguguu

SEQ ID NO: 544661 - RNA, 22 nt, Human
gccuggguccacugaucaugcu

SEQ ID NO: 544662 - RNA, 22 nt, Human
cuaaagaauuuugcuugaccag

SEQ ID NO: 544663 - RNA, 22 nt, Human
aaaugucaaggugauagaugca

SEQ ID NO: 544664 - RNA, 22 nt, Human
ggagaggugaauggcugcucua

SEQ ID NO: 544665 - RNA, 22 nt, Human
gccccugggagcagagccacca

SEQ ID NO: 544666 - RNA, 22 nt, Human
gcucugcugucuucuugcaggc

SEQ ID NO: 544667 - RNA, 22 nt, Human
auuuuucucuccacuccauuaa

SEQ ID NO: 544668 - RNA, 22 nt, Human
agcugccaaguuucucaguuua

SEQ ID NO: 544669 - RNA, 22 nt, Human
agggucaagucacugguucacg

SEQ ID NO: 544670 - RNA, 22 nt, Human
gucccagaggacagggucacau

SEQ ID NO: 544671 - RNA, 22 nt, Human
ugcaguggaagagguggagauc

SEQ ID NO: 544672 - RNA, 22 nt, Human
ucuguucaugucuuuuuaagug

SEQ ID NO: 544673 - RNA, 22 nt, Human
acuucauguacuguucaaggcc

SEQ ID NO: 544674 - RNA, 22 nt, Human
guucuuuugguagagugugcau

SEQ ID NO: 544675 - RNA, 22 nt, Human
caaggcagucccuacucccugc

SEQ ID NO: 544676 - RNA, 22 nt, Human
uaggaagaaacuuucccugcag

SEQ ID NO: 544677 - RNA, 22 nt, Human
cacaucccuggaguuacccagu

SEQ ID NO: 544678 - RNA, 22 nt, Human
gcacagggagcaggucucuggu

SEQ ID NO: 544679 - RNA, 22 nt, Human
ugcagggaauccagucuagggu

SEQ ID NO: 544680 - RNA, 22 nt, Human
aaagcucuuaaauugaccugcu

SEQ ID NO: 544681 - RNA, 22 nt, Human
cggcagcuccgcgccguaggac

SEQ ID NO: 544682 - RNA, 22 nt, Human
aguuuacagaugcuacaggagc

SEQ ID NO: 544683 - RNA, 22 nt, Human
uaugcacacaggcuuaauucau

SEQ ID NO: 544684 - RNA, 22 nt, Human
agaggccaguggcugugcuguc

SEQ ID NO: 544685 - RNA, 22 nt, Human
uggguagaggaauugggcuacc

SEQ ID NO: 544686 - RNA, 22 nt, Human
ugcccauggaccaagcaagggg

SEQ ID NO: 544687 - RNA, 22 nt, Human
uauucucagcaacacacaugga

SEQ ID NO: 544688 - RNA, 22 nt, Human
aagacauuacuggaaucugacu

SEQ ID NO: 544689 - RNA, 22 nt, Human
agaauuagguaaguucaucuga

SEQ ID NO: 544690 - RNA, 22 nt, Human
gcucuggcuacuguggcuaccg

SEQ ID NO: 544691 - RNA, 22 nt, Human
cacaggugcuccucggggagcu

SEQ ID NO: 544692 - RNA, 22 nt, Human
cccugcaggcucagacuggagu

SEQ ID NO: 544693 - RNA, 19 nt, Human
ccucucccaugcuuaccuc

SEQ ID NO: 544694 - RNA, 22 nt, Human
gcugggaaguggcagagcugga

SEQ ID NO: 544695 - RNA, 22 nt, Human
acacacacaagcagguugugga

SEQ ID NO: 544696 - RNA, 20 nt, Human
uuauuucaguugcuagauug

SEQ ID NO: 544697 - RNA, 22 nt, Human
uuucuaagaauauugcucuuaa

SEQ ID NO: 544698 - RNA, 22 nt, Human
cugggcuggauaauucuuugcu

SEQ ID NO: 544699 - RNA, 22 nt, Human
ugggaaggggagcuggaaagga

SEQ ID NO: 544700 - RNA, 22 nt, Human
ucuuuuuauauugacaaaaggu

SEQ ID NO: 544701 - RNA, 22 nt, Human
acagagcaugcucaguguguga

SEQ ID NO: 544702 - RNA, 22 nt, Human
uugcuaaaaggugaaaagugua

SEQ ID NO: 544703 - RNA, 22 nt, Human
ugcagugaugcuucuggcucag

SEQ ID NO: 544704 - RNA, 20 nt, Human
gcagggcaucuuggccccca

SEQ ID NO: 544705 - RNA, 22 nt, Human
guaugaaguaagauauuguuca

SEQ ID NO: 544706 - RNA, 17 nt, Human
ccucacagggaccagac

SEQ ID NO: 544707 - RNA, 22 nt, Human
gcagggcagaccuccagccuau

SEQ ID NO: 544708 - RNA, 22 nt, Human
uacuuuucuuugucaugcaucu

SEQ ID NO: 544709 - RNA, 18 nt, Human
uucuuuucaugugaucuc

SEQ ID NO: 544710 - RNA, 21 nt, Human
aucuuaaaaggucuuaacuuu

SEQ ID NO: 544711 - RNA, 20 nt, Human
uugaaaaugcauugugcagu

SEQ ID NO: 544712 - RNA, 22 nt, Human
ugaggggagcccgcccuggacg

SEQ ID NO: 544713 - RNA, 22 nt, Human
gccauuuggcaaaacugacuuc

SEQ ID NO: 544714 - RNA, 22 nt, Human
ggaaagaaagugugaacaacuu

SEQ ID NO: 544715 - RNA, 22 nt, Human
aggcaguguauugcuagcggcu

SEQ ID NO: 544716 - RNA, 22 nt, Human
uuuaaauuuguguuuagagggu

SEQ ID NO: 544717 - RNA, 20 nt, Human
aauauaauucucugaauuua

SEQ ID NO: 544718 - RNA, 22 nt, Human
uacacaucacuguaucuuucag

SEQ ID NO: 544719 - RNA, 22 nt, Human
uuuuucauugcagccucucucc

SEQ ID NO: 544720 - RNA, 22 nt, Human
aaggaaagacauauaaaugacu

SEQ ID NO: 544721 - RNA, 22 nt, Human
gauuucuucucucccaagagga

SEQ ID NO: 544722 - RNA, 20 nt, Human
ugcaggcuucgcucuaggag

SEQ ID NO: 544723 - RNA, 22 nt, Human
uuccugugugcucucauuuagu

SEQ ID NO: 544724 - RNA, 22 nt, Human
uuuccuacccuuccaggcagag

SEQ ID NO: 544725 - RNA, 22 nt, Human
cuuguacaggaauccaugguau

SEQ ID NO: 544726 - RNA, 22 nt, Human
cuucauuaaccaaaaugcaaua

SEQ ID NO: 544727 - RNA, 22 nt, Human
uauuagggaacugcaagacuaa

SEQ ID NO: 544728 - RNA, 22 nt, Human
acucuucaguacaauaauaucu

SEQ ID NO: 544729 - RNA, 22 nt, Human
ugauuaacugucuauuaaucau

SEQ ID NO: 544730 - RNA, 22 nt, Human
gcugggcuugguuucccugcuu

SEQ ID NO: 544731 - RNA, 23 nt, Human
uaaauuaccuuuccagugcaggg

SEQ ID NO: 544732 - RNA, 22 nt, Human
cccuggaggcaaagguugcagu

SEQ ID NO: 544733 - RNA, 22 nt, Human
ugggauggagccugaguauagu

SEQ ID NO: 544734 - RNA, 22 nt, Human
caaggccaaagggccacuguca

SEQ ID NO: 544735 - RNA, 22 nt, Human
augcaaaugucaccacuucuaa

SEQ ID NO: 544736 - RNA, 22 nt, Human
ugcuuccuugagcucuccaauc

SEQ ID NO: 544737 - RNA, 22 nt, Human
uguuuucaugguuaugugucua

SEQ ID NO: 544738 - RNA, 22 nt, Human
uaaagcaauuacucaguggcuu

SEQ ID NO: 544739 - RNA, 21 nt, Human
gugucaugguugacuuuggca

SEQ ID NO: 544740 - RNA, 22 nt, Human
aggcccuggguuagggcccacu

SEQ ID NO: 544741 - RNA, 22 nt, Human
gagaggcugaaaucacaggagc

SEQ ID NO: 544742 - RNA, 22 nt, Human
ggcgguggcgugaagguggcug

SEQ ID NO: 544743 - RNA, 22 nt, Human
cugccuugcaccggcucucugg

SEQ ID NO: 544744 - RNA, 22 nt, Human
uaauuauuaugacaacaauugc

SEQ ID NO: 544745 - RNA, 22 nt, Human
uucaggccucuaaagggaaagc

SEQ ID NO: 544746 - RNA, 22 nt, Human
gcuucuaucccuccacugcacu

SEQ ID NO: 544747 - RNA, 22 nt, Human
gggguguggacggcugugccag

SEQ ID NO: 544748 - RNA, 20 nt, Human
ggcagagcuaugucuguugc

SEQ ID NO: 544749 - RNA, 22 nt, Human
guggcagagggugagcuggacu

SEQ ID NO: 544750 - RNA, 22 nt, Human
ggcaggugccaguuggcuuggg

SEQ ID NO: 544751 - RNA, 22 nt, Human
aggucauuaaaguuaaaugagg

SEQ ID NO: 544752 - RNA, 22 nt, Human
aaucauguuuacgugacauguc

SEQ ID NO: 544753 - RNA, 22 nt, Human
cccaguggcccagcauguggug

SEQ ID NO: 544754 - RNA, 22 nt, Human
auguuauuuuggaaaauacaaa

SEQ ID NO: 544755 - RNA, 22 nt, Human
uguauagaguuggaagaugacu

SEQ ID NO: 544756 - RNA, 22 nt, Human
gcugucccgaaccccugguaau

SEQ ID NO: 544757 - RNA, 22 nt, Human
ugggcucagccaugaccuccac

SEQ ID NO: 544758 - RNA, 23 nt, Human
ucucugaguuguacuuucccuug

SEQ ID NO: 544759 - RNA, 21 nt, Human
cuggacugaggagacagucgc

SEQ ID NO: 544760 - RNA, 22 nt, Human
agugcagagagcaauacucuac

SEQ ID NO: 544761 - RNA, 20 nt, Human
ccacauuuuacuguuugcca

SEQ ID NO: 544762 - RNA, 22 nt, Human
agcaugcaggaaccacauggca

SEQ ID NO: 544763 - RNA, 22 nt, Human
aaacacagauuucuuuguccca

SEQ ID NO: 544764 - RNA, 22 nt, Human
cagccagggagcaaagaguuga

SEQ ID NO: 544765 - RNA, 22 nt, Human
agugaaaugauucugagcaaga

SEQ ID NO: 544766 - RNA, 22 nt, Human
aggagaauuaggaacucaagau

SEQ ID NO: 544767 - RNA, 22 nt, Human
acccagcucuuugauggucuug

SEQ ID NO: 544768 - RNA, 22 nt, Human
gagcugccagacaugggaauga

SEQ ID NO: 544769 - RNA, 22 nt, Human
uugcaaagagucauguaaguca

SEQ ID NO: 544770 - RNA, 22 nt, Human
acaccagggccuagccagggcg

SEQ ID NO: 544771 - RNA, 22 nt, Human
uagaauaaguugaugauauaug

SEQ ID NO: 544772 - RNA, 22 nt, Human
gcaggugauucacccugggccu

SEQ ID NO: 544773 - RNA, 22 nt, Human
aggagaggcucuaacucugugu

SEQ ID NO: 544774 - RNA, 22 nt, Human
gaggccuguagucauggaugua

SEQ ID NO: 544775 - RNA, 18 nt, Human
ggcuuugcugggguuucu

SEQ ID NO: 544776 - RNA, 19 nt, Human
aucagcaagguaggaugug

SEQ ID NO: 544777 - RNA, 22 nt, Human
aguaaugaagauuuguugcaca

SEQ ID NO: 544778 - RNA, 22 nt, Human
ggggccagcaauguugaggaau

SEQ ID NO: 544779 - RNA, 22 nt, Human
uuuguacauccuaauucugagu

SEQ ID NO: 544780 - RNA, 22 nt, Human
acugaaggguaaugugggagcc

SEQ ID NO: 544781 - RNA, 23 nt, Human
aaguucaagucacagccugucuu

SEQ ID NO: 544782 - RNA, 22 nt, Human
cugagccuguguuucucuggca

SEQ ID NO: 544783 - RNA, 22 nt, Human
gacaaaacacauuaguuuaaaa

SEQ ID NO: 544784 - RNA, 22 nt, Human
cagggcccauggcucagguagg

SEQ ID NO: 544785 - RNA, 22 nt, Human
gcagaugggagccccaggggag

SEQ ID NO: 544786 - RNA, 22 nt, Human
gcgagugccgagagggcagggc

SEQ ID NO: 544787 - RNA, 22 nt, Human
aggagcuggguuccuuuggugg

SEQ ID NO: 544788 - RNA, 22 nt, Human
ucagaggugguaaaggacagca

SEQ ID NO: 544789 - RNA, 22 nt, Human
gcaggguaggugacagguaguc

SEQ ID NO: 544790 - RNA, 22 nt, Human
cugaggaguuuggguuguucaa

SEQ ID NO: 544791 - RNA, 22 nt, Human
acucagcugaugaagcacaagu

SEQ ID NO: 544792 - RNA, 22 nt, Human
aagugcuaggauuacaggugug

SEQ ID NO: 544793 - RNA, 22 nt, Human
uucuagaugauaaaccagcagc

SEQ ID NO: 544794 - RNA, 22 nt, Human
cagguucccuagcagcaaagcc

SEQ ID NO: 544795 - RNA, 22 nt, Human
uggcugggagcuggaacugggc

SEQ ID NO: 544796 - RNA, 22 nt, Human
ugcagugagaagcaguuaugau

SEQ ID NO: 544797 - RNA, 22 nt, Human
guggcagcaaaauccugcauuc

SEQ ID NO: 544798 - RNA, 22 nt, Human
uucugggcaguuggaaauuuca

SEQ ID NO: 544799 - RNA, 22 nt, Human
uagauacaggcucucugagccu

SEQ ID NO: 544800 - RNA, 22 nt, Human
accaggcagagcugggccuuaa

SEQ ID NO: 544801 - RNA, 22 nt, Human
uaaaucucacuggguauauugg

SEQ ID NO: 544802 - RNA, 22 nt, Human
augagcuucccagacaggaugg

SEQ ID NO: 544803 - RNA, 20 nt, Human
gagauccucaucuguaaagu

SEQ ID NO: 544804 - RNA, 17 nt, Human
uucucuuccuggauagu

SEQ ID NO: 544805 - RNA, 22 nt, Human
aggcucagagaugaguaagcac

SEQ ID NO: 544806 - RNA, 22 nt, Human
aaagccaaaugaaagaugguuc

SEQ ID NO: 544807 - RNA, 23 nt, Human
ccucccaggcugcgagucccgag

SEQ ID NO: 544808 - RNA, 22 nt, Human
uuucugaagucuucuaacagau

SEQ ID NO: 544809 - RNA, 22 nt, Human
acaaaaccagaaaaucucuacc

SEQ ID NO: 544810 - RNA, 22 nt, Human
ggaggggagguccagcugaucu

SEQ ID NO: 544811 - RNA, 21 nt, Human
gcaguuaauagcagagcacac

SEQ ID NO: 544812 - RNA, 22 nt, Human
aagcugccuuccaugugaggaa

SEQ ID NO: 544813 - RNA, 22 nt, Human
ccuggaugauccaugucaugga

SEQ ID NO: 544814 - RNA, 22 nt, Human
gcugccacucugagcuugcuuc

SEQ ID NO: 544815 - RNA, 22 nt, Human
uuguaugaucaaaagaaaugua

SEQ ID NO: 544816 - RNA, 23 nt, Human
cagaagcaccuguugacugcugc

SEQ ID NO: 544817 - RNA, 22 nt, Human
uccuggcuaacacggugacacc

SEQ ID NO: 544818 - RNA, 17 nt, Human
uccaggcagcaacugag

SEQ ID NO: 544819 - RNA, 22 nt, Human
aauauuugaacagucacugagu

SEQ ID NO: 544820 - RNA, 22 nt, Human
aggaagugcuaagagaacauca

SEQ ID NO: 544821 - RNA, 22 nt, Human
uaccuuggguugaguucauucu

SEQ ID NO: 544822 - RNA, 22 nt, Human
cuuugcuagugauuuguuuagg

SEQ ID NO: 544823 - RNA, 22 nt, Human
ggcuuuaucaaaugagacccug

SEQ ID NO: 544824 - RNA, 22 nt, Human
gagaaguuagcucuguuuaggu

SEQ ID NO: 544825 - RNA, 22 nt, Human
agcaccugcuaugugucaggga

SEQ ID NO: 544826 - RNA, 22 nt, Human
acuuuguagguuucagugaaac

SEQ ID NO: 544827 - RNA, 22 nt, Human
uucauuuggccucugcuuaaaa

SEQ ID NO: 544828 - RNA, 22 nt, Human
ugcaggggcuugucugggccug

SEQ ID NO: 544829 - RNA, 22 nt, Human
uuagccauggacugaauugacu

SEQ ID NO: 544830 - RNA, 22 nt, Human
gcugggcagccuggccgcugcc

SEQ ID NO: 544831 - RNA, 19 nt, Human
gcuguauuaaagauacaug

SEQ ID NO: 544832 - RNA, 22 nt, Human
gaguccuguugucccagauggg

SEQ ID NO: 544833 - RNA, 22 nt, Human
gggaagugagcuggaaucaagg

SEQ ID NO: 544834 - RNA, 22 nt, Human
guauuaggaaauaugaagaaag

SEQ ID NO: 544835 - RNA, 22 nt, Human
ugcagggcauaggguccaguuu

SEQ ID NO: 544836 - RNA, 22 nt, Human
aauguguauaugaacauacagg

SEQ ID NO: 544837 - RNA, 22 nt, Human
agugggccaaauggaggcaagu

SEQ ID NO: 544838 - RNA, 22 nt, Human
uuccagaaccuuccugcuggaa

SEQ ID NO: 544839 - RNA, 22 nt, Human
aacacaguuucucuaugagagu

SEQ ID NO: 544840 - RNA, 22 nt, Human
uagguucaggagauauugcaca

SEQ ID NO: 544841 - RNA, 22 nt, Human
uggcagcagggccccuggagga

SEQ ID NO: 544842 - RNA, 22 nt, Human
ccugcugguguccaggcuuugg

SEQ ID NO: 544843 - RNA, 20 nt, Human
aagaaggccugcccagacac

SEQ ID NO: 544844 - RNA, 22 nt, Human
uucaaagaccuuacuuggcaaa

SEQ ID NO: 544845 - RNA, 22 nt, Human
gcagagugagauaugaacccag

SEQ ID NO: 544846 - RNA, 22 nt, Human
cuacuuuaauuuucugcagaga

SEQ ID NO: 544847 - RNA, 22 nt, Human
uuuagaaguucacacauuuaaa

SEQ ID NO: 544848 - RNA, 22 nt, Human
caggucagagguagaugagaug

SEQ ID NO: 544849 - RNA, 22 nt, Human
gcacagccggaccgaggaaaag

SEQ ID NO: 544850 - RNA, 22 nt, Human
caagaauuguacaaacugggug

SEQ ID NO: 544851 - RNA, 20 nt, Human
ggcugcugugggcagagagg

SEQ ID NO: 544852 - RNA, 22 nt, Human
cugugggagcacaugacagaua

SEQ ID NO: 544853 - RNA, 22 nt, Human
cugccuggguucaaguccuguu

SEQ ID NO: 544854 - RNA, 22 nt, Human
aaacaauguugucuccaagagg

SEQ ID NO: 544855 - RNA, 22 nt, Human
ucaccaggauugggcuguaggc

SEQ ID NO: 544856 - RNA, 22 nt, Human
gagggauggugugagaggcuca

SEQ ID NO: 544857 - RNA, 22 nt, Human
aggcagugagugugacuucaca

SEQ ID NO: 544858 - RNA, 22 nt, Human
gugugguggcccuccuucaggc

SEQ ID NO: 544859 - RNA, 22 nt, Human
aggguaggguaaaugaugcauc

SEQ ID NO: 544860 - RNA, 22 nt, Human
aaaaagguugauccagauuagg

SEQ ID NO: 544861 - RNA, 22 nt, Human
cugggaguguucuaggucacau

SEQ ID NO: 544862 - RNA, 22 nt, Human
auuucauugaaguuaauucuuc

SEQ ID NO: 544863 - RNA, 22 nt, Human
uaugcacagaaguuugcugaau

SEQ ID NO: 544864 - RNA, 22 nt, Human
auguaaggcugccuaugacacu

SEQ ID NO: 544865 - RNA, 22 nt, Human
uaaguuuucuggaauaacuugg

SEQ ID NO: 544866 - RNA, 22 nt, Human
gagaggggaccugugugucuag

SEQ ID NO: 544867 - RNA, 22 nt, Human
gaugguuuaugauagaugggaa

SEQ ID NO: 544868 - RNA, 22 nt, Human
uuccagaggcuucagggaagaa

SEQ ID NO: 544869 - RNA, 22 nt, Human
auuucuguaguccacauucuuu

SEQ ID NO: 544870 - RNA, 22 nt, Human
auucuggaagcaagcuuuuaaa

SEQ ID NO: 544871 - RNA, 22 nt, Human
aaacagaguuugguaaauagcc

SEQ ID NO: 544872 - RNA, 22 nt, Human
ggcaggcugggugucauggagu

SEQ ID NO: 544873 - RNA, 22 nt, Human
ggggauggaggcgugugguccu

SEQ ID NO: 544874 - RNA, 22 nt, Human
uggaacacuggcuuuccacugu

SEQ ID NO: 544875 - RNA, 22 nt, Human
auuucccuccagggaaagcuua

SEQ ID NO: 544876 - RNA, 22 nt, Human
ucugccugccgagaacaccuac

SEQ ID NO: 544877 - RNA, 22 nt, Human
gggugaagcuccugcaggggcc

SEQ ID NO: 544878 - RNA, 22 nt, Human
augcccugcugccaucuggccg

SEQ ID NO: 544879 - RNA, 22 nt, Human
uuaucaguuguguguauacacg

SEQ ID NO: 544880 - RNA, 22 nt, Human
ggggaugguagaccggugacgu

SEQ ID NO: 544881 - RNA, 22 nt, Human
aaaggucaagcuggacucaggu

SEQ ID NO: 544882 - RNA, 22 nt, Human
gccuguguggaugcgccggugc

SEQ ID NO: 544883 - RNA, 22 nt, Human
cagggcuguggaaaacuggugc

SEQ ID NO: 544884 - RNA, 22 nt, Human
cugguucaaguccuggcucugu

SEQ ID NO: 544885 - RNA, 22 nt, Human
aggggugaaagagggcccucaa

SEQ ID NO: 544886 - RNA, 22 nt, Human
ugguccuggggaucugcaguga

SEQ ID NO: 544887 - RNA, 22 nt, Human
ucuuuuauagugaauuuucuug

SEQ ID NO: 544888 - RNA, 22 nt, Human
uaggcagauguuaacaggaaaa

SEQ ID NO: 544889 - RNA, 22 nt, Human
ucaguauccacaaaugcucaaa

SEQ ID NO: 544890 - RNA, 22 nt, Human
ucaggaucaggggccuuuccuu

SEQ ID NO: 544891 - RNA, 22 nt, Human
cugggcagaguccggaagaugg

SEQ ID NO: 544892 - RNA, 22 nt, Human
gguggcaggcccugagcauccc

SEQ ID NO: 544893 - RNA, 22 nt, Human
ucuucagcagggccucucugag

SEQ ID NO: 544894 - RNA, 22 nt, Human
cacacugucagguaaauaacac

SEQ ID NO: 544895 - RNA, 22 nt, Human
uacuguuucuacuacuuaggga

SEQ ID NO: 544896 - RNA, 22 nt, Human
uuuaagaaguuauguuauaaau

SEQ ID NO: 544897 - RNA, 22 nt, Human
accugcuuuguaguguuugcug

SEQ ID NO: 544898 - RNA, 22 nt, Human
uugggaaggcguggaagcagaa

SEQ ID NO: 544899 - RNA, 22 nt, Human
gcagccagggagagaaccaggg

SEQ ID NO: 544900 - RNA, 22 nt, Human
aggcuggugcuuccuagggcag

SEQ ID NO: 544901 - RNA, 22 nt, Human
cauuucugggagacaugcuaga

SEQ ID NO: 544902 - RNA, 22 nt, Human
aacauucuuuggaggauuauuc

SEQ ID NO: 544903 - RNA, 21 nt, Human
gcacagugccaggcacacagu

SEQ ID NO: 544904 - RNA, 22 nt, Human
uuauaggcuuaguucugugugu

SEQ ID NO: 544905 - RNA, 22 nt, Human
caaaggcuuugcuaugaugcau

SEQ ID NO: 544906 - RNA, 22 nt, Human
cagccagcuucagauccaagcc

SEQ ID NO: 544907 - RNA, 22 nt, Human
ugcacacaaguuggagaaugaa

SEQ ID NO: 544908 - RNA, 22 nt, Human
ucuugggagucccaggacauag

SEQ ID NO: 544909 - RNA, 22 nt, Human
gccagggggucagcaggcacuu

SEQ ID NO: 544910 - RNA, 22 nt, Human
agcugccaaguuggaguagcaa

SEQ ID NO: 544911 - RNA, 22 nt, Human
uaagauguuuugguuugauaag

SEQ ID NO: 544912 - RNA, 22 nt, Human
aaauacuguccaccauggagca

SEQ ID NO: 544913 - RNA, 19 nt, Human
ucugcuggcagaauucccu

SEQ ID NO: 544914 - RNA, 22 nt, Human
agagauauggaugucagaaacu

SEQ ID NO: 544915 - RNA, 22 nt, Human
gcugucacaucaaggcacuaaa

SEQ ID NO: 544916 - RNA, 22 nt, Human
aaaugucuuuaucucauguaac

SEQ ID NO: 544917 - RNA, 22 nt, Human
aaauaguuagcccugcauauau

SEQ ID NO: 544918 - RNA, 22 nt, Human
ggcucagcuuggugcgcagaaa

SEQ ID NO: 544919 - RNA, 22 nt, Human
ugcauuuuugagguuaacucaa

SEQ ID NO: 544920 - RNA, 22 nt, Human
ccagcagcagcguccaaggaga

SEQ ID NO: 544921 - RNA, 22 nt, Human
cuccucugucuaccacgagggu

SEQ ID NO: 544922 - RNA, 22 nt, Human
gaacagagaagcuuuacuaaag

SEQ ID NO: 544923 - RNA, 22 nt, Human
agcccugcuucaccauuuacuu

SEQ ID NO: 544924 - RNA, 22 nt, Human
cagaguaaggagcugucaaacg

SEQ ID NO: 544925 - RNA, 22 nt, Human
aggcacugacagauucuguguc

SEQ ID NO: 544926 - RNA, 19 nt, Human
caugagcugcucacuuccc

SEQ ID NO: 544927 - RNA, 22 nt, Human
ugcuucuggggacaggcugccu

SEQ ID NO: 544928 - RNA, 20 nt, Human
gcacagcugaguucaggguc

SEQ ID NO: 544929 - RNA, 19 nt, Human
ccagcccugucacuucuug

SEQ ID NO: 544930 - RNA, 22 nt, Human
ggcucugccacuucuuggcugu

SEQ ID NO: 544931 - RNA, 22 nt, Human
ucaaaguauaauugcuuuuuug

SEQ ID NO: 544932 - RNA, 22 nt, Human
ugcaucuaaguggcuaacaacc

SEQ ID NO: 544933 - RNA, 22 nt, Human
ggcagcuccucucagcaaaaga

SEQ ID NO: 544934 - RNA, 22 nt, Human
acucaggagggaucagcuauca

SEQ ID NO: 544935 - RNA, 22 nt, Human
uuuuggaaugaggaacauccag

SEQ ID NO: 544936 - RNA, 22 nt, Human
gaggcagagacuccaccuucag

SEQ ID NO: 544937 - RNA, 22 nt, Human
ccacugucuuuuccaggcugaa

SEQ ID NO: 544938 - RNA, 22 nt, Human
agugggcugagcuugcugggug

SEQ ID NO: 544939 - RNA, 22 nt, Human
aagcaagacagaaguuacugcc

SEQ ID NO: 544940 - RNA, 22 nt, Human
cugagauggaguuuugcucuug

SEQ ID NO: 544941 - RNA, 22 nt, Human
cucugcccucacuuggggccug

SEQ ID NO: 544942 - RNA, 22 nt, Human
ccaaggcuggagugcaguggcg

SEQ ID NO: 544943 - RNA, 20 nt, Human
ucuguuauugcauguacaua

SEQ ID NO: 544944 - RNA, 17 nt, Human
ccagguggaaucgugga

SEQ ID NO: 544945 - RNA, 21 nt, Human
ugggggagaauugguugcuuu

SEQ ID NO: 544946 - RNA, 22 nt, Human
gcaggcugugaggcucagaugg

SEQ ID NO: 544947 - RNA, 22 nt, Human
gccuggagugcaguggcgugau

SEQ ID NO: 544948 - RNA, 22 nt, Human
aguucuuuucuagauucuggau

SEQ ID NO: 544949 - RNA, 19 nt, Human
ccugggagucagcugaagg

SEQ ID NO: 544950 - RNA, 17 nt, Human
cucugcagugcauggcu

SEQ ID NO: 544951 - RNA, 22 nt, Human
uuauuauuccccaagucauuau

SEQ ID NO: 544952 - RNA, 22 nt, Human
gccaggcauuuauugauugaau

SEQ ID NO: 544953 - RNA, 22 nt, Human
uagagagcuguuugaaagcagg

SEQ ID NO: 544954 - RNA, 22 nt, Human
uaagucguggaugauucuucgg

SEQ ID NO: 544955 - RNA, 22 nt, Human
uaaagcauguacugugugcuag

SEQ ID NO: 544956 - RNA, 22 nt, Human
ucagggucagauuccagagccu

SEQ ID NO: 544957 - RNA, 22 nt, Human
cuggcuggccggaggcaucccu

SEQ ID NO: 544958 - RNA, 17 nt, Human
ucagcaggggccaagcu

SEQ ID NO: 544959 - RNA, 22 nt, Human
cccaggugggcaccucgaggaa

SEQ ID NO: 544960 - RNA, 22 nt, Human
gcugccacgaucucugcuguag

SEQ ID NO: 544961 - RNA, 22 nt, Human
uccucuugggaauaccuuucua

SEQ ID NO: 544962 - RNA, 22 nt, Human
uucaaagauuuucccaaagcuc

SEQ ID NO: 544963 - RNA, 22 nt, Human
uucuuuaaaauagugagaaaga

SEQ ID NO: 544964 - RNA, 22 nt, Human
gcucagagaaucagcagacacc

SEQ ID NO: 544965 - RNA, 22 nt, Human
cagggcucagggacugcagaaa

SEQ ID NO: 544966 - RNA, 22 nt, Human
gcuccucuucucccacugaaug

SEQ ID NO: 544967 - RNA, 22 nt, Human
agcgugaaggcgggcagucggc

SEQ ID NO: 544968 - RNA, 22 nt, Human
uggccucugggaaagcagauuc

SEQ ID NO: 544969 - RNA, 22 nt, Human
uccaggccaauguagcaggccc

SEQ ID NO: 544970 - RNA, 22 nt, Human
guggggaaaggaguggggcuca

SEQ ID NO: 544971 - RNA, 17 nt, Human
aaaauucuguaaagagg

SEQ ID NO: 544972 - RNA, 22 nt, Human
uuccuuccgggcaccaggcacu

SEQ ID NO: 544973 - RNA, 22 nt, Human
ggagcuguuggcagcuaucuug

SEQ ID NO: 544974 - RNA, 22 nt, Human
gcagugggaagguuggcacaug

SEQ ID NO: 544975 - RNA, 22 nt, Human
accugucugcaugaucuaaaac

SEQ ID NO: 544976 - RNA, 22 nt, Human
gcccugagggguggugucugua

SEQ ID NO: 544977 - RNA, 22 nt, Human
ggccaggcuggucucagacuuc

SEQ ID NO: 544978 - RNA, 22 nt, Human
cauguugaauggccuugauuuu

SEQ ID NO: 544979 - RNA, 22 nt, Human
guucuucaucuuaaccaucugu

SEQ ID NO: 544980 - RNA, 22 nt, Human
gggagguguuccaguguuggua

SEQ ID NO: 544981 - RNA, 22 nt, Human
cugagcugguggaagcaugcag

SEQ ID NO: 544982 - RNA, 22 nt, Human
ggcugccugcuccuccugcacg

SEQ ID NO: 544983 - RNA, 18 nt, Human
gcugcugguggagggagc

SEQ ID NO: 544984 - RNA, 22 nt, Human
gcagccucaaacuccccagcuc

SEQ ID NO: 544985 - RNA, 22 nt, Human
ucucugagaaguuccuuuguga

SEQ ID NO: 544986 - RNA, 22 nt, Human
guuugcauuccaauuuagggga

SEQ ID NO: 544987 - RNA, 22 nt, Human
cagcuccccucuguggggcagu

SEQ ID NO: 544988 - RNA, 22 nt, Human
ugucacauguguggcauuuuuc

SEQ ID NO: 544989 - RNA, 22 nt, Human
gggacuggcacagggcugggag

SEQ ID NO: 544990 - RNA, 22 nt, Human
uucugaauccucgaaacauagc

SEQ ID NO: 544991 - RNA, 22 nt, Human
guauuuuaagugacuacuaggu

SEQ ID NO: 544992 - RNA, 22 nt, Human
gggaccuggcaccuuugcucug

SEQ ID NO: 544993 - RNA, 22 nt, Human
uucaagucaaggaaagaggucu

SEQ ID NO: 544994 - RNA, 22 nt, Human
uugaggagcacuagucagguau

SEQ ID NO: 544995 - RNA, 22 nt, Human
gccuggaggggccaggguggua

SEQ ID NO: 544996 - RNA, 22 nt, Human
uuuucuggucacauguuauuaa

SEQ ID NO: 544997 - RNA, 22 nt, Human
caaggccaguucaccaagggca

SEQ ID NO: 544998 - RNA, 22 nt, Human
cagcuguuguguaucaggcaga

SEQ ID NO: 544999 - RNA, 22 nt, Human
agcagcugaucaaagcacuuau

SEQ ID NO: 545000 - RNA, 22 nt, Human
cuaaagaagcuagcaaucuaua

SEQ ID NO: 545001 - RNA, 22 nt, Human
ugguccuggccuugaccccagg

SEQ ID NO: 545002 - RNA, 22 nt, Human
uggagacugugcuaagggaguu

SEQ ID NO: 545003 - RNA, 22 nt, Human
agccaggccuuagggagaggca

SEQ ID NO: 545004 - RNA, 22 nt, Human
uucugaggcauagaggaugaga

SEQ ID NO: 545005 - RNA, 22 nt, Human
ugaagcagauggucuggucauu

SEQ ID NO: 545006 - RNA, 22 nt, Human
gccuggagaggaagccggugga

SEQ ID NO: 545007 - RNA, 22 nt, Human
aaaguuaguaaaaugggauaua

SEQ ID NO: 545008 - RNA, 22 nt, Human
ggcacacagcggaauuugcucu

SEQ ID NO: 545009 - RNA, 22 nt, Human
uugcaugcaccuaacaaauuau

SEQ ID NO: 545010 - RNA, 16 nt, Human
gaagcagaggguguug

SEQ ID NO: 545011 - RNA, 22 nt, Human
acaguagauggcucagagacag

SEQ ID NO: 545012 - RNA, 22 nt, Human
gcagaagcuguucgaaggccgc

SEQ ID NO: 545013 - RNA, 22 nt, Human
uuacaaagaaaauuaggcauuu

SEQ ID NO: 545014 - RNA, 22 nt, Human
caggggcucccugggugccagu

SEQ ID NO: 545015 - RNA, 22 nt, Human
acaaaguccugguguauggcca

SEQ ID NO: 545016 - RNA, 22 nt, Human
uuggaauuugcuucagcuaaua

SEQ ID NO: 545017 - RNA, 20 nt, Human
gugggcagcaggcauacugg

SEQ ID NO: 545018 - RNA, 22 nt, Human
cucugguguccuuuagaauuua

SEQ ID NO: 545019 - RNA, 22 nt, Human
cauugaaauauggaaacugaug

SEQ ID NO: 545020 - RNA, 22 nt, Human
uggaacaaucccgguuuagcuc

SEQ ID NO: 545021 - RNA, 22 nt, Human
uggcugaguuucaugcaucaug

SEQ ID NO: 545022 - RNA, 22 nt, Human
cagcugccccuccagggcuggg

SEQ ID NO: 545023 - RNA, 22 nt, Human
ccagcuuuauagcuucaaagga

SEQ ID NO: 545024 - RNA, 22 nt, Human
uuagaaaaaggcuguggucuua

SEQ ID NO: 545025 - RNA, 22 nt, Human
uucaggaugacaccauguccag

SEQ ID NO: 545026 - RNA, 22 nt, Human
ccagugggaacacuggcauugc

SEQ ID NO: 545027 - RNA, 22 nt, Human
gcucccacgcaauucuuuucag

SEQ ID NO: 545028 - RNA, 22 nt, Human
aggggaagauuauacuuuugaa

SEQ ID NO: 545029 - RNA, 22 nt, Human
gggcagauggggcacaggcuga

SEQ ID NO: 545030 - RNA, 22 nt, Human
agugaaauaugcccauugcugu

SEQ ID NO: 545031 - RNA, 22 nt, Human
ccuuagacuggagcuaugccgu

SEQ ID NO: 545032 - RNA, 22 nt, Human
ggcuucuccccuuugagucuuc

SEQ ID NO: 545033 - RNA, 22 nt, Human
auuuccaaaaccacuuauugcc

SEQ ID NO: 545034 - RNA, 22 nt, Human
agaaaucaggaacaguaaggag

SEQ ID NO: 545035 - RNA, 22 nt, Human
acacacaauuaguuuuaugcuu

SEQ ID NO: 545036 - RNA, 22 nt, Human
gagggucccugcucagggccag

SEQ ID NO: 545037 - RNA, 22 nt, Human
acaggugaccugcucauaugaa

SEQ ID NO: 545038 - RNA, 22 nt, Human
ugggacagggaaucugaucccc

SEQ ID NO: 545039 - RNA, 22 nt, Human
ugggcugccggcaggcucugcc

SEQ ID NO: 545040 - RNA, 22 nt, Human
ggcagccagcaaugagaaguuu

SEQ ID NO: 545041 - RNA, 22 nt, Human
gcuuuccuggcccugucccugc

SEQ ID NO: 545042 - RNA, 22 nt, Human
cuggccaguuacugcuauuggc

SEQ ID NO: 545043 - RNA, 22 nt, Human
agauuucaauggauauugcaag

SEQ ID NO: 545044 - RNA, 22 nt, Human
ucucugagcccagugucccccu

SEQ ID NO: 545045 - RNA, 22 nt, Human
ccuuccaggagucucugcaggu

SEQ ID NO: 545046 - RNA, 22 nt, Human
uuauugcagauggugugagaga

SEQ ID NO: 545047 - RNA, 22 nt, Human
agagucugaaugcucagaguug

SEQ ID NO: 545048 - RNA, 22 nt, Human
aggcucagucuguucaugcacu

SEQ ID NO: 545049 - RNA, 22 nt, Human
ucuaaacacgucucuuugaaua

SEQ ID NO: 545050 - RNA, 22 nt, Human
gugcugucaauugcuuucagua

SEQ ID NO: 545051 - RNA, 22 nt, Human
ugcuugucagugugcuagaaac

SEQ ID NO: 545052 - RNA, 20 nt, Human
acaauacagguugugucuga

SEQ ID NO: 545053 - RNA, 21 nt, Human
uagagccagugguguucugac

SEQ ID NO: 545054 - RNA, 22 nt, Human
ucaaaucucaucuugaauugua

SEQ ID NO: 545055 - RNA, 22 nt, Human
uucaggaugcagagguuguagu

SEQ ID NO: 545056 - RNA, 22 nt, Human
cugaggccagcugcagagcucu

SEQ ID NO: 545057 - RNA, 22 nt, Human
agggcacaagacucugagcccc

SEQ ID NO: 545058 - RNA, 22 nt, Human
auuuuuucuguaaacuggccuu

SEQ ID NO: 545059 - RNA, 22 nt, Human
acuguucaucucuuagaaagua

SEQ ID NO: 545060 - RNA, 22 nt, Human
aagaauguggguggauaugaug

SEQ ID NO: 545061 - RNA, 22 nt, Human
ggcaggcacugugcuaggcgcu

SEQ ID NO: 545062 - RNA, 22 nt, Human
cccuggaguccggagcucaccu

SEQ ID NO: 545063 - RNA, 22 nt, Human
uccccaccccagaacuacuagg

SEQ ID NO: 545064 - RNA, 22 nt, Human
agccuguggaucccugcacugg

SEQ ID NO: 545065 - RNA, 18 nt, Human
gagcugccauauuuaguu

SEQ ID NO: 545066 - RNA, 17 nt, Human
ugccagccugucccagg

SEQ ID NO: 545067 - RNA, 22 nt, Human
caggcagcucaaccuugggagc

SEQ ID NO: 545068 - RNA, 22 nt, Human
aaaucuggccccuugccuauuu

SEQ ID NO: 545069 - RNA, 22 nt, Human
uacagugucuggauaucaaagg

SEQ ID NO: 545070 - RNA, 22 nt, Human
agccuggcccugcugaacucug

SEQ ID NO: 545071 - RNA, 22 nt, Human
uaagaaacugucacaguacuau

SEQ ID NO: 545072 - RNA, 21 nt, Human
ucccacucuaaauggacugaa

SEQ ID NO: 545073 - RNA, 22 nt, Human
gggcuccuggcagucaugcuca

SEQ ID NO: 545074 - RNA, 22 nt, Human
caacauauaauauuugaguucu

SEQ ID NO: 545075 - RNA, 22 nt, Human
uggugcuguggaggggcagaag

SEQ ID NO: 545076 - RNA, 22 nt, Human
ugucccagacacaguaugcgcu

SEQ ID NO: 545077 - RNA, 22 nt, Human
agcagggcaaagucaggcuaac

SEQ ID NO: 545078 - RNA, 22 nt, Human
ggaagggaguaguuggaaugca

SEQ ID NO: 545079 - RNA, 22 nt, Human
ggcugaguugagaggauuacuu

SEQ ID NO: 545080 - RNA, 22 nt, Human
uuugucaaaucaaaccacauuc

SEQ ID NO: 545081 - RNA, 22 nt, Human
aggagagaauguuccaggcuug

SEQ ID NO: 545082 - RNA, 18 nt, Human
aggcacuggaauuaaggg

SEQ ID NO: 545083 - RNA, 21 nt, Human
cccagggaagccgcagucacc

SEQ ID NO: 545084 - RNA, 18 nt, Human
guucaaggucaagagaga

SEQ ID NO: 545085 - RNA, 22 nt, Human
aaggaagaugaaaguacugcua

SEQ ID NO: 545086 - RNA, 22 nt, Human
gccugcaggcuguaguuuguga

SEQ ID NO: 545087 - RNA, 22 nt, Human
aaugauuuccccuacacagaag

SEQ ID NO: 545088 - RNA, 22 nt, Human
ugaaaucugcaugcaaaguccu

SEQ ID NO: 545089 - RNA, 21 nt, Human
gcagaggaaugguauacauaa

SEQ ID NO: 545090 - RNA, 22 nt, Human
ugagcagaaguuauaaauaaga

SEQ ID NO: 545091 - RNA, 22 nt, Human
gccugaggaaugcuccugacuu

SEQ ID NO: 545092 - RNA, 23 nt, Human
uggagcugggcucagacccuggg

SEQ ID NO: 545093 - RNA, 22 nt, Human
uuucugaacaaagccauuauca

SEQ ID NO: 545094 - RNA, 22 nt, Human
uagcugcugcagcacagggagg

SEQ ID NO: 545095 - RNA, 22 nt, Human
uaggggugaggccaggcaucag

SEQ ID NO: 545096 - RNA, 22 nt, Human
gggagccaugcuggucuucuuu

SEQ ID NO: 545097 - RNA, 22 nt, Human
gaggcuguuagggccugaggua

SEQ ID NO: 545098 - RNA, 22 nt, Human
ggccuggagucagggaaagcaa

SEQ ID NO: 545099 - RNA, 22 nt, Human
agcuagagcugagaagcacuug

SEQ ID NO: 545100 - RNA, 22 nt, Human
uucagaaugcuauuucugaaau

SEQ ID NO: 545101 - RNA, 22 nt, Human
agagcugagaauguggcuuccu

SEQ ID NO: 545102 - RNA, 22 nt, Human
ucucauugguauauacaugugu

SEQ ID NO: 545103 - RNA, 22 nt, Human
agucagggccuggccugcugaa

SEQ ID NO: 545104 - RNA, 22 nt, Human
agagccaaguugucaaggcacu

SEQ ID NO: 545105 - RNA, 22 nt, Human
gccaaggccucugcaggaugag

SEQ ID NO: 545106 - RNA, 22 nt, Human
uccuuaauaaguacuucauugu

SEQ ID NO: 545107 - RNA, 22 nt, Human
ccaggcucugugugggcuagag

SEQ ID NO: 545108 - RNA, 22 nt, Human
gcagggacagggcagggccuuu

SEQ ID NO: 545109 - RNA, 22 nt, Human
cagauggcacagauuuagagug

SEQ ID NO: 545110 - RNA, 22 nt, Human
gcccugcccugagccguagacc

SEQ ID NO: 545111 - RNA, 22 nt, Human
aucaaaguuucccagaaguugu

SEQ ID NO: 545112 - RNA, 17 nt, Human
uguuccauuugaccacc

SEQ ID NO: 545113 - RNA, 22 nt, Human
ucagagccccuccgcuguccca

SEQ ID NO: 545114 - RNA, 22 nt, Human
ggaggugggauuaggaccuaaa

SEQ ID NO: 545115 - RNA, 22 nt, Human
agcuguguggugucugacagcu

SEQ ID NO: 545116 - RNA, 22 nt, Human
uggaagaauuuggggauaaauu

SEQ ID NO: 545117 - RNA, 22 nt, Human
gccucugcugacaagauggaca

SEQ ID NO: 545118 - RNA, 22 nt, Human
uguacagacuguauuuacaagu

SEQ ID NO: 545119 - RNA, 22 nt, Human
aggccugcagcaggagcaaacc

SEQ ID NO: 545120 - RNA, 22 nt, Human
uauucacauucucaggccuggu

SEQ ID NO: 545121 - RNA, 19 nt, Human
agggucaggacaaggacuu

SEQ ID NO: 545122 - RNA, 22 nt, Human
gcaugggcuuucucagaguucu

SEQ ID NO: 545123 - RNA, 22 nt, Human
gaugauuacacuuuuaaaacag

SEQ ID NO: 545124 - RNA, 22 nt, Human
caaugucauuucacugggcuua

SEQ ID NO: 545125 - RNA, 17 nt, Human
cagugcagagcccuuuc

SEQ ID NO: 545126 - RNA, 22 nt, Human
cagcuuuggcccagucgggagg

SEQ ID NO: 545127 - RNA, 22 nt, Human
cuggcaggaagaggaaagguca

SEQ ID NO: 545128 - RNA, 22 nt, Human
aggcugaggcagguggaucacc

SEQ ID NO: 545129 - RNA, 22 nt, Human
uacauucuacuuuuucacuccc

SEQ ID NO: 545130 - RNA, 22 nt, Human
cacaaaugacugaaacgacugu

SEQ ID NO: 545131 - RNA, 22 nt, Human
gccuggagugguccugcugccc

SEQ ID NO: 545132 - RNA, 22 nt, Human
auguguaugagugugcuucuuu

SEQ ID NO: 545133 - RNA, 22 nt, Human
ugggcucauggcccagcacugg

SEQ ID NO: 545134 - RNA, 22 nt, Human
agaggccaugcuagaggccugg

SEQ ID NO: 545135 - RNA, 22 nt, Human
agguaaugcauauaaagugcuu

SEQ ID NO: 545136 - RNA, 22 nt, Human
agaggcugucccuugcuauucc

SEQ ID NO: 545137 - RNA, 22 nt, Human
uuuuccuucugauacuccauuu

SEQ ID NO: 545138 - RNA, 22 nt, Human
cugauucuguaauuuuuccuaa

SEQ ID NO: 545139 - RNA, 22 nt, Human
cauagaaaagaguagguaaugu

SEQ ID NO: 545140 - RNA, 22 nt, Human
cuccacagccccuccaguggca

SEQ ID NO: 545141 - RNA, 22 nt, Human
ggccucugcaacuggcuguggc

SEQ ID NO: 545142 - RNA, 22 nt, Human
ucagaggaaagggaacauaguc

SEQ ID NO: 545143 - RNA, 22 nt, Human
gagccaggguuugaaacuagac

SEQ ID NO: 545144 - RNA, 22 nt, Human
aggcugagcugaccugguuugg

SEQ ID NO: 545145 - RNA, 22 nt, Human
acauuugaggauguuaagaaug

SEQ ID NO: 545146 - RNA, 22 nt, Human
ccagcccugccagagagagcug

SEQ ID NO: 545147 - RNA, 22 nt, Human
ggacccugggcuugcuccuggg

SEQ ID NO: 545148 - RNA, 21 nt, Human
uccagggaauuucaacuuuua

SEQ ID NO: 545149 - RNA, 22 nt, Human
agcaggugagcacagccaggcu

SEQ ID NO: 545150 - RNA, 22 nt, Human
ucugucacuuuuauuuacugaa

SEQ ID NO: 545151 - RNA, 22 nt, Human
ugaggccucuugguauggugug

SEQ ID NO: 545152 - RNA, 22 nt, Human
cucccugggcagauguggcucu

SEQ ID NO: 545153 - RNA, 22 nt, Human
gcacugagucugucaugcugca

SEQ ID NO: 545154 - RNA, 22 nt, Human
cacugaagguaggaccaaggcu

SEQ ID NO: 545155 - RNA, 22 nt, Human
augggcugggaauacacagggg

SEQ ID NO: 545156 - RNA, 22 nt, Human
gguggcaguuacaggggcaaau

SEQ ID NO: 545157 - RNA, 19 nt, Human
ugaggggcucacagucuca

SEQ ID NO: 545158 - RNA, 22 nt, Human
gccugcuuccuagccuuccaag

SEQ ID NO: 545159 - RNA, 22 nt, Human
aaaagcagguacucagcuuggg

SEQ ID NO: 545160 - RNA, 22 nt, Human
ccagacaggggcuguuccugcu

SEQ ID NO: 545161 - RNA, 22 nt, Human
uuggacuuaacaaagggugaug

SEQ ID NO: 545162 - RNA, 22 nt, Human
ccuggcucgcugaccucagggg

SEQ ID NO: 545163 - RNA, 20 nt, Human
accugggaaaaccuuuuccu

SEQ ID NO: 545164 - RNA, 22 nt, Human
uauuccaagcacagcaacccag

SEQ ID NO: 545165 - RNA, 22 nt, Human
cccucagcuccacccucagcag

SEQ ID NO: 545166 - RNA, 22 nt, Human
aagagcaucgguggagccccca

SEQ ID NO: 545167 - RNA, 22 nt, Human
uguccucaaggagcuucagucu

SEQ ID NO: 545168 - RNA, 22 nt, Human
acuuucuauucccacagagaua

SEQ ID NO: 545169 - RNA, 22 nt, Human
agggcagaggcggacacggaag

SEQ ID NO: 545170 - RNA, 22 nt, Human
uauuuaaaauagugcuccagca

SEQ ID NO: 545171 - RNA, 22 nt, Human
acaaauguuacauaaguuugga

SEQ ID NO: 545172 - RNA, 22 nt, Human
gaugagggccugguggcugugc

SEQ ID NO: 545173 - RNA, 22 nt, Human
gcugcuggaacaaaucacccca

SEQ ID NO: 545174 - RNA, 22 nt, Human
agggcugcaucugccuggugaa

SEQ ID NO: 545175 - RNA, 22 nt, Human
ucuuucaagggcccuaguuugg

SEQ ID NO: 545176 - RNA, 21 nt, Human
ucauuuuuauugcuaccuugc

SEQ ID NO: 545177 - RNA, 18 nt, Human
cccucuccugcuaguggg

SEQ ID NO: 545178 - RNA, 22 nt, Human
ccagagaccagaacauggggau

SEQ ID NO: 545179 - RNA, 22 nt, Human
agguaaagacugcaaggagaau

SEQ ID NO: 545180 - RNA, 22 nt, Human
auuguaacaacaauaguuuagg

SEQ ID NO: 545181 - RNA, 22 nt, Human
uuuaucugaaaaaacucuugga

SEQ ID NO: 545182 - RNA, 22 nt, Human
ugugaggagaggcccagcuccc

SEQ ID NO: 545183 - RNA, 22 nt, Human
aagggcuggagacugggucuuc

SEQ ID NO: 545184 - RNA, 22 nt, Human
ggcagcacgacaggaguggaag

SEQ ID NO: 545185 - RNA, 22 nt, Human
ugaauaugugacuuugauuuca

SEQ ID NO: 545186 - RNA, 22 nt, Human
gggaaagaagaucuagauacug

SEQ ID NO: 545187 - RNA, 22 nt, Human
caguauagaaaguuuuaaauug

SEQ ID NO: 545188 - RNA, 19 nt, Human
ggaccagguccugggcagc

SEQ ID NO: 545189 - RNA, 22 nt, Human
cugaaggauuuaguucuuugcu

SEQ ID NO: 545190 - RNA, 22 nt, Human
ucugaacauccuacaacauuuu

SEQ ID NO: 545191 - RNA, 22 nt, Human
caaaugcaggucagcagguguc

SEQ ID NO: 545192 - RNA, 22 nt, Human
ugaggggaaggcaugauaaaua

SEQ ID NO: 545193 - RNA, 22 nt, Human
uaguguuuucuagaaugguuuu

SEQ ID NO: 545194 - RNA, 20 nt, Human
agauggugaaggccagggag

SEQ ID NO: 545195 - RNA, 22 nt, Human
uccugaccugaacuggggucuu

SEQ ID NO: 545196 - RNA, 22 nt, Human
ggcaggcuccaagcauccuaug

SEQ ID NO: 545197 - RNA, 22 nt, Human
gcagggcaggauuugaacccag

SEQ ID NO: 545198 - RNA, 22 nt, Human
ccauuaaaauugugacauagga

SEQ ID NO: 545199 - RNA, 19 nt, Human
uguccuguccugcucugac

SEQ ID NO: 545200 - RNA, 22 nt, Human
ugcacacauucuauggggcuga

SEQ ID NO: 545201 - RNA, 22 nt, Human
aaucaguuucuuggcaaguuua

SEQ ID NO: 545202 - RNA, 22 nt, Human
cuucugugaaugaaguguggga

SEQ ID NO: 545203 - RNA, 22 nt, Human
caggaaagaaaugagaacacca

SEQ ID NO: 545204 - RNA, 22 nt, Human
gccaaugacagucucaguucug

SEQ ID NO: 545205 - RNA, 22 nt, Human
cccugugccagagaggcaggag

SEQ ID NO: 545206 - RNA, 22 nt, Human
gagcucagccugaggccuggcu

SEQ ID NO: 545207 - RNA, 22 nt, Human
cauuugcuuccugggucuugaa

SEQ ID NO: 545208 - RNA, 21 nt, Human
gaaggagaaagcaagugcugc

SEQ ID NO: 545209 - RNA, 22 nt, Human
ugcugugacgccucaggaaucc

SEQ ID NO: 545210 - RNA, 22 nt, Human
ggaagaggcugagccagguccc

SEQ ID NO: 545211 - RNA, 22 nt, Human
acagguggcuuauuggcugauu

SEQ ID NO: 545212 - RNA, 22 nt, Human
gaaaggagggcucacaaaagug

SEQ ID NO: 545213 - RNA, 22 nt, Human
ugggggagccuucacaguagcu

SEQ ID NO: 545214 - RNA, 22 nt, Human
cagccuucugaaugaacguacu

SEQ ID NO: 545215 - RNA, 23 nt, Human
agaaggugggccugcugaguuau

SEQ ID NO: 545216 - RNA, 22 nt, Human
uucuggggacauaacaguaagc

SEQ ID NO: 545217 - RNA, 22 nt, Human
uccagggcuggguuggcucagc

SEQ ID NO: 545218 - RNA, 22 nt, Human
uggucacaguguauugaucagg

SEQ ID NO: 545219 - RNA, 22 nt, Human
agauguggccggcuagggagag

SEQ ID NO: 545220 - RNA, 22 nt, Human
ugucaguguauacauacaguau

SEQ ID NO: 545221 - RNA, 22 nt, Human
ccuggcugggguagaagugagg

SEQ ID NO: 545222 - RNA, 22 nt, Human
uggcugaggcuuuucuuaaaga

SEQ ID NO: 545223 - RNA, 22 nt, Human
gguggccucgguggugcacagg

SEQ ID NO: 545224 - RNA, 19 nt, Human
ugaaggagggggauggcca

SEQ ID NO: 545225 - RNA, 21 nt, Human
cuguuucuugugaagugacac

SEQ ID NO: 545226 - RNA, 22 nt, Human
agcucccagagcucgagaguaa

SEQ ID NO: 545227 - RNA, 21 nt, Human
gugcucugggcagcagagggc

SEQ ID NO: 545228 - RNA, 22 nt, Human
gcucucagguacaaagcugugu

SEQ ID NO: 545229 - RNA, 22 nt, Human
ugcuggaggggccugaccagga

SEQ ID NO: 545230 - RNA, 22 nt, Human
gccuggaguagcauggcaagcc

SEQ ID NO: 545231 - RNA, 22 nt, Human
auuucaguguuuuaagaguuca

SEQ ID NO: 545232 - RNA, 22 nt, Human
uucaaagucagccaucuggcua

SEQ ID NO: 545233 - RNA, 21 nt, Human
cagcagaagcaucuauggaag

SEQ ID NO: 545234 - RNA, 22 nt, Human
uucacauuugcccuuaugugug

SEQ ID NO: 545235 - RNA, 22 nt, Human
caucucaugggcaugccaagcu

SEQ ID NO: 545236 - RNA, 22 nt, Human
cacccacccacugcucauuggc

SEQ ID NO: 545237 - RNA, 22 nt, Human
cuuugauauaaguauacauagu

SEQ ID NO: 545238 - RNA, 22 nt, Human
cucaagaaucuagggaggauuc

SEQ ID NO: 545239 - RNA, 22 nt, Human
ucccagcccagauuugugugac

SEQ ID NO: 545240 - RNA, 22 nt, Human
uguuacagaaauauugcuucuu

SEQ ID NO: 545241 - RNA, 22 nt, Human
gcugcccucccagggcaagcuu

SEQ ID NO: 545242 - RNA, 22 nt, Human
aggggcagccucacaauccucu

SEQ ID NO: 545243 - RNA, 22 nt, Human
gacuccagggauuggaagaugu

SEQ ID NO: 545244 - RNA, 22 nt, Human
uccaggcagucauuaaucucua

SEQ ID NO: 545245 - RNA, 22 nt, Human
uuucuucagccuucacaaccug

SEQ ID NO: 545246 - RNA, 22 nt, Human
agucccagccuguaggauuggg

SEQ ID NO: 545247 - RNA, 22 nt, Human
ugggcugccagcucuccagaug

SEQ ID NO: 545248 - RNA, 20 nt, Human
uauuuacaacuuagagccuc

SEQ ID NO: 545249 - RNA, 22 nt, Human
agccagugaugaagacucugga

SEQ ID NO: 545250 - RNA, 22 nt, Human
caccauuuaagaaagccaaauu

SEQ ID NO: 545251 - RNA, 22 nt, Human
ugccucagagaccugacaguac

SEQ ID NO: 545252 - RNA, 22 nt, Human
uacaacauguaaagugguuuaa

SEQ ID NO: 545253 - RNA, 21 nt, Human
ccagcugucuguccuuaggca

SEQ ID NO: 545254 - RNA, 22 nt, Human
ucaaaaauaagauauucuggac

SEQ ID NO: 545255 - RNA, 22 nt, Human
caugucuguguacacaugcaca

SEQ ID NO: 545256 - RNA, 22 nt, Human
ucagggaaauuuccauguguuu

SEQ ID NO: 545257 - RNA, 22 nt, Human
ccugggagagccaucuguggcc

SEQ ID NO: 545258 - RNA, 22 nt, Human
uaaaacuucucauuuuuauggu

SEQ ID NO: 545259 - RNA, 22 nt, Human
ggaagauuucccguagcugugc

SEQ ID NO: 545260 - RNA, 22 nt, Human
aacaaaugauuguugguuggag

SEQ ID NO: 545261 - RNA, 22 nt, Human
uagccucucuccuccacaaccu

SEQ ID NO: 545262 - RNA, 22 nt, Human
auguuugaaauuguaaguauau

SEQ ID NO: 545263 - RNA, 22 nt, Human
uaaacaaggguuacugagcaug

SEQ ID NO: 545264 - RNA, 22 nt, Human
caggcccagcccagcccuucga

SEQ ID NO: 545265 - RNA, 21 nt, Human
ggcagaaguagcauggacggg

SEQ ID NO: 545266 - RNA, 22 nt, Human
ccugggcuuucaaaaccagccu

SEQ ID NO: 545267 - RNA, 22 nt, Human
cagaggacuucccacucaucug

SEQ ID NO: 545268 - RNA, 22 nt, Human
gucuuuaugguaugaaaacuga

SEQ ID NO: 545269 - RNA, 22 nt, Human
gaggaggcuaagugggcucugg

SEQ ID NO: 545270 - RNA, 22 nt, Human
gagcagcuagauaaagcccuuc

SEQ ID NO: 545271 - RNA, 22 nt, Human
ucccaggcuaggccucugcguu

SEQ ID NO: 545272 - RNA, 22 nt, Human
ucagcagugcagggugaggcag

SEQ ID NO: 545273 - RNA, 22 nt, Human
cuauauauaucaucuuccaguu

SEQ ID NO: 545274 - RNA, 22 nt, Human
cuggcuggucaugucaugagcc

SEQ ID NO: 545275 - RNA, 22 nt, Human
ugcuggcuguauaugugagagu

SEQ ID NO: 545276 - RNA, 17 nt, Human
aagcauuuaauuugcua

SEQ ID NO: 545277 - RNA, 22 nt, Human
cagucccagaagagccugggag

SEQ ID NO: 545278 - RNA, 22 nt, Human
aagggugggcaccgccagguca

SEQ ID NO: 545279 - RNA, 22 nt, Human
uuacaauguaaggcaugguucu

SEQ ID NO: 545280 - RNA, 22 nt, Human
uacaaagucccauugccaugga

SEQ ID NO: 545281 - RNA, 21 nt, Human
uaucaagauguuaugguugaa

SEQ ID NO: 545282 - RNA, 22 nt, Human
uggcaguggcucagagugcaga

SEQ ID NO: 545283 - RNA, 22 nt, Human
cucaggaggccauucucaaggu

SEQ ID NO: 545284 - RNA, 22 nt, Human
aauaugucucuggcuagacauu

SEQ ID NO: 545285 - RNA, 22 nt, Human
uuucaucaccccaaaucuaugg

SEQ ID NO: 545286 - RNA, 22 nt, Human
caaaguaauauggucccaguga

SEQ ID NO: 545287 - RNA, 22 nt, Human
cuccagaaauucaacagcaaau

SEQ ID NO: 545288 - RNA, 22 nt, Human
uccagccuaauguucuucccac

SEQ ID NO: 545289 - RNA, 22 nt, Human
uuugaaaggaaguuaauacuuu

SEQ ID NO: 545290 - RNA, 22 nt, Human
uuaaagcaggcaucauuccuca

SEQ ID NO: 545291 - RNA, 19 nt, Human
aucuacaauuauucucagu

SEQ ID NO: 545292 - RNA, 22 nt, Human
agccaaggcagcuagagcucug

SEQ ID NO: 545293 - RNA, 22 nt, Human
guggccuggaaaggcuggucug

SEQ ID NO: 545294 - RNA, 22 nt, Human
guugggcugggagcugcccuga

SEQ ID NO: 545295 - RNA, 22 nt, Human
gcugccacuuggucaugucaug

SEQ ID NO: 545296 - RNA, 22 nt, Human
ucagguggcuuggagggggacg

SEQ ID NO: 545297 - RNA, 22 nt, Human
acaugauucuugauaggcauug

SEQ ID NO: 545298 - RNA, 22 nt, Human
ggaagaaagcacacaaacuuga

SEQ ID NO: 545299 - RNA, 22 nt, Human
gcagcguggggacaggagcuca

SEQ ID NO: 545300 - RNA, 22 nt, Human
ugaaaaaccucaguccgcuuua

SEQ ID NO: 545301 - RNA, 19 nt, Human
ucaggcaguuauucacaaa

SEQ ID NO: 545302 - RNA, 22 nt, Human
uggggagugaugccucggauaa

SEQ ID NO: 545303 - RNA, 22 nt, Human
uuacaagauaaccugaugcugu

SEQ ID NO: 545304 - RNA, 22 nt, Human
aggccuggccugggcggcauug

SEQ ID NO: 545305 - RNA, 22 nt, Human
agacacaggauucugcauuucu

SEQ ID NO: 545306 - RNA, 22 nt, Human
aaauccuaaugacaaguuuagu

SEQ ID NO: 545307 - RNA, 22 nt, Human
gaacauuuccagaaaggaacua

SEQ ID NO: 545308 - RNA, 22 nt, Human
ugcugcugacauuuggggcuug

SEQ ID NO: 545309 - RNA, 22 nt, Human
agggaaggagguuagaacccac

SEQ ID NO: 545310 - RNA, 22 nt, Human
aggccagagaggggaccagccu

SEQ ID NO: 545311 - RNA, 18 nt, Human
ugcuggcaacuacuauug

SEQ ID NO: 545312 - RNA, 22 nt, Human
ugagauuuucagcaucacuuca

SEQ ID NO: 545313 - RNA, 23 nt, Human
gagagcugacugucaagacuguu

SEQ ID NO: 545314 - RNA, 22 nt, Human
agcagagcugcaguggccugcu

SEQ ID NO: 545315 - RNA, 22 nt, Human
ucagaggaugcuguucuuuaau

SEQ ID NO: 545316 - RNA, 21 nt, Human
accuuuaauucaagcaucagg

SEQ ID NO: 545317 - RNA, 22 nt, Human
cucagagaagucuuugcuaaac

SEQ ID NO: 545318 - RNA, 22 nt, Human
aaaugguaguagcauuccauau

SEQ ID NO: 545319 - RNA, 22 nt, Human
gaaaaaugagcugaugucaggg

SEQ ID NO: 545320 - RNA, 22 nt, Human
caagauaauuuauucugaguuu

SEQ ID NO: 545321 - RNA, 20 nt, Human
ugggccucuggugccucugg

SEQ ID NO: 545322 - RNA, 22 nt, Human
caggggaguuuuaugcaacaga

SEQ ID NO: 545323 - RNA, 22 nt, Human
acaauacaggcuucuggacuua

SEQ ID NO: 545324 - RNA, 22 nt, Human
caaggccagagccagcgauaag

SEQ ID NO: 545325 - RNA, 22 nt, Human
aggccugaaguguggagugggg

SEQ ID NO: 545326 - RNA, 22 nt, Human
uggcucagaaggcugccuucac

SEQ ID NO: 545327 - RNA, 22 nt, Human
aggagcugcagauucugccuug

SEQ ID NO: 545328 - RNA, 18 nt, Human
ugcaaaggacacugagau

SEQ ID NO: 545329 - RNA, 19 nt, Human
ugcuucuggaaugcaaggc

SEQ ID NO: 545330 - RNA, 22 nt, Human
ggcccacuugaaauggagcuca

SEQ ID NO: 545331 - RNA, 22 nt, Human
aucagaaaucuaggauucagaa

SEQ ID NO: 545332 - RNA, 20 nt, Human
gcaaggcacagugaggaggg

SEQ ID NO: 545333 - RNA, 22 nt, Human
auuuguaucaaucucaauauau

SEQ ID NO: 545334 - RNA, 22 nt, Human
cauggcagagaaggggaacugg

SEQ ID NO: 545335 - RNA, 22 nt, Human
uacuuuucauaaugaagcagca

SEQ ID NO: 545336 - RNA, 22 nt, Human
aggugucugugaugggagcgau

SEQ ID NO: 545337 - RNA, 22 nt, Human
ugcagggauuguuggcauccau

SEQ ID NO: 545338 - RNA, 22 nt, Human
gaaggcugcugggaaguguggu

SEQ ID NO: 545339 - RNA, 22 nt, Human
gaggcugggaaguccaagauca

SEQ ID NO: 545340 - RNA, 19 nt, Human
gcgaggaagucacuguggc

SEQ ID NO: 545341 - RNA, 22 nt, Human
aagggcucccugccugaggugg

SEQ ID NO: 545342 - RNA, 22 nt, Human
ucagggcacguuucugcaaugc

SEQ ID NO: 545343 - RNA, 22 nt, Human
ccaguggacuucucccuguggu

SEQ ID NO: 545344 - RNA, 22 nt, Human
ggcacagcugaugcagacacac

SEQ ID NO: 545345 - RNA, 22 nt, Human
agcagggcuugccgcuuguccu

SEQ ID NO: 545346 - RNA, 22 nt, Human
uucaagucuuccaugguauucu

SEQ ID NO: 545347 - RNA, 22 nt, Human
uccaagcucucuaugccaugau

SEQ ID NO: 545348 - RNA, 22 nt, Human
ggcuuugacaugcugaauuaaa

SEQ ID NO: 545349 - RNA, 22 nt, Human
ccacccuuggguucggaggccg

SEQ ID NO: 545350 - RNA, 22 nt, Human
ugcuggcuacauuauugcuguc

SEQ ID NO: 545351 - RNA, 22 nt, Human
gcaaacaaggacauacauccug

SEQ ID NO: 545352 - RNA, 22 nt, Human
acagucaggccgagaugggccu

SEQ ID NO: 545353 - RNA, 19 nt, Human
gguuccucacgcuaagggc

SEQ ID NO: 545354 - RNA, 20 nt, Human
cagucccaauccagggccag

SEQ ID NO: 545355 - RNA, 22 nt, Human
auuuuaucugcuuacuuucagg

SEQ ID NO: 545356 - RNA, 22 nt, Human
auacauacauguacacauaaau

SEQ ID NO: 545357 - RNA, 22 nt, Human
ucugagagcaaggcauuagcag

SEQ ID NO: 545358 - RNA, 22 nt, Human
cagacaggaaguucagaagaaa

SEQ ID NO: 545359 - RNA, 22 nt, Human
ugcucuccggcuuccguggccu

SEQ ID NO: 545360 - RNA, 22 nt, Human
ugggcagggaucucuuuugcaa

SEQ ID NO: 545361 - RNA, 22 nt, Human
uaggcugggcauucuggccagg

SEQ ID NO: 545362 - RNA, 22 nt, Human
acauacacaagcguacaugaac

SEQ ID NO: 545363 - RNA, 22 nt, Human
ugccuaggaaaccucaugcuuc

SEQ ID NO: 545364 - RNA, 22 nt, Human
auuuguugaauaaauuaguauu

SEQ ID NO: 545365 - RNA, 22 nt, Human
agugcagcugggacuguagggu

SEQ ID NO: 545366 - RNA, 22 nt, Human
ugggagaggcugccaucuugca

SEQ ID NO: 545367 - RNA, 22 nt, Human
aagagguugucugugaugaguu

SEQ ID NO: 545368 - RNA, 22 nt, Human
aaaugcaauucaggaagacaag

SEQ ID NO: 545369 - RNA, 22 nt, Human
acuguggcgucaggaagaaauu

SEQ ID NO: 545370 - RNA, 21 nt, Human
gggcuggacaugguggcucau

SEQ ID NO: 545371 - RNA, 22 nt, Human
auugaaagaguuuucugcugca

SEQ ID NO: 545372 - RNA, 22 nt, Human
ccauaagguugaaaacuguaca

SEQ ID NO: 545373 - RNA, 22 nt, Human
guuccugguggucauggcagcu

SEQ ID NO: 545374 - RNA, 22 nt, Human
ugccugucagggggagugggaa

SEQ ID NO: 545375 - RNA, 22 nt, Human
ugaaggagaaauggaaaguggg

SEQ ID NO: 545376 - RNA, 22 nt, Human
agcaaggugacaucaugcugag

SEQ ID NO: 545377 - RNA, 20 nt, Human
accugccacagagaaaggua

SEQ ID NO: 545378 - RNA, 22 nt, Human
uuuaugccuccagaucuugcuu

SEQ ID NO: 545379 - RNA, 22 nt, Human
ucaaaugcggucauggcuuuua

SEQ ID NO: 545380 - RNA, 22 nt, Human
gaggcucagagagguccacaua

SEQ ID NO: 545381 - RNA, 22 nt, Human
ccucaggggucacugugaggag

SEQ ID NO: 545382 - RNA, 22 nt, Human
ccugggcuguugcaucauccuu

SEQ ID NO: 545383 - RNA, 22 nt, Human
aaagccagcaaggugaguuuca

SEQ ID NO: 545384 - RNA, 22 nt, Human
uaaugcaguacugauauaaaca

SEQ ID NO: 545385 - RNA, 22 nt, Human
gcuguucagaugcgauucagga

SEQ ID NO: 545386 - RNA, 23 nt, Human
uagcaaaguuguuugggaaauuu

SEQ ID NO: 545387 - RNA, 22 nt, Human
uccuugaagagugggcggucga

SEQ ID NO: 545388 - RNA, 22 nt, Human
gugucccaggccucuggaauua

SEQ ID NO: 545389 - RNA, 22 nt, Human
ggcgagggagcagugcgguggg

SEQ ID NO: 545390 - RNA, 22 nt, Human
gcuggccaggugcuuugguucu

SEQ ID NO: 545391 - RNA, 22 nt, Human
ucagcacuuuuacucucuuugc

SEQ ID NO: 545392 - RNA, 22 nt, Human
aaauuucaguuggaaugagcuc

SEQ ID NO: 545393 - RNA, 22 nt, Human
cugggguggaggagcuccccug

SEQ ID NO: 545394 - RNA, 22 nt, Human
auuuuaauaagauucccaagua

SEQ ID NO: 545395 - RNA, 22 nt, Human
ucucagggcagcaaggaagcau

SEQ ID NO: 545396 - RNA, 22 nt, Human
uggcagagugcagaagaggcau

SEQ ID NO: 545397 - RNA, 22 nt, Human
ucuggagugaaugaaguagugu

SEQ ID NO: 545398 - RNA, 22 nt, Human
agucucugcacaguaagaagca

SEQ ID NO: 545399 - RNA, 22 nt, Human
ugaagccauuacuguguuaggg

SEQ ID NO: 545400 - RNA, 22 nt, Human
gugcucugaguuugcaugucag

SEQ ID NO: 545401 - RNA, 22 nt, Human
ccugggcucaccaugccuugga

SEQ ID NO: 545402 - RNA, 22 nt, Human
ccacucugauuucaagggagau

SEQ ID NO: 545403 - RNA, 21 nt, Human
aaaugaaugugguagugcaag

SEQ ID NO: 545404 - RNA, 21 nt, Human
auggagccuaagaguggaggu

SEQ ID NO: 545405 - RNA, 19 nt, Human
ucaggaguuaguugugcuc

SEQ ID NO: 545406 - RNA, 22 nt, Human
cacauaagaaaugaauaugaga

SEQ ID NO: 545407 - RNA, 22 nt, Human
gcucccagcauugcugcugaau

SEQ ID NO: 545408 - RNA, 22 nt, Human
uggggugugagaaguagaggga

SEQ ID NO: 545409 - RNA, 22 nt, Human
uggagaaggccggccaggagug

SEQ ID NO: 545410 - RNA, 22 nt, Human
uguggcagcuggagguggagaa

SEQ ID NO: 545411 - RNA, 22 nt, Human
cuacacaguucugccuaauggc

SEQ ID NO: 545412 - RNA, 22 nt, Human
ugggaagaguuagagacagcug

SEQ ID NO: 545413 - RNA, 22 nt, Human
uaugcauaugaccccaagcuug

SEQ ID NO: 545414 - RNA, 22 nt, Human
gagaagucauuugaccaccuag

SEQ ID NO: 545415 - RNA, 22 nt, Human
auagaacagaaacagaugcaca

SEQ ID NO: 545416 - RNA, 22 nt, Human
agagcagugcugaagaguaggg

SEQ ID NO: 545417 - RNA, 22 nt, Human
cuccuggaagcccgcccugcug

SEQ ID NO: 545418 - RNA, 22 nt, Human
ucugaaauaacugaugccagau

SEQ ID NO: 545419 - RNA, 22 nt, Human
gagcagagcuucucaaaguaaa

SEQ ID NO: 545420 - RNA, 22 nt, Human
gccaggcuguuuuuauuacugu

SEQ ID NO: 545421 - RNA, 22 nt, Human
auuccacuuuaugucuguauga

SEQ ID NO: 545422 - RNA, 22 nt, Human
ccuggcaguuuugcccaggauu

SEQ ID NO: 545423 - RNA, 21 nt, Human
uggcugaguggaugcaugaau

SEQ ID NO: 545424 - RNA, 22 nt, Human
agucccagugagaugaaccagg

SEQ ID NO: 545425 - RNA, 22 nt, Human
uuuguuuucaaugugucauuca

SEQ ID NO: 545426 - RNA, 22 nt, Human
uuuagcagagcauaugauaucc

SEQ ID NO: 545427 - RNA, 18 nt, Human
accugccuguucuucucu

SEQ ID NO: 545428 - RNA, 22 nt, Human
uucaagaucuggguuuucagcu

SEQ ID NO: 545429 - RNA, 22 nt, Human
ugggcucucgucccugcagaag

SEQ ID NO: 545430 - RNA, 22 nt, Human
aggagcugucagagugccagag

SEQ ID NO: 545431 - RNA, 22 nt, Human
aaguuagugccuccuuaaauuu

SEQ ID NO: 545432 - RNA, 22 nt, Human
uuucauuuugguuaugccauaa

SEQ ID NO: 545433 - RNA, 22 nt, Human
uagaaacucaggauacucuucc

SEQ ID NO: 545434 - RNA, 22 nt, Human
agccaacuaggagauuaaggua

SEQ ID NO: 545435 - RNA, 22 nt, Human
cagguggcuaacggccucauag

SEQ ID NO: 545436 - RNA, 22 nt, Human
uggagggcaucuguggucaggc

SEQ ID NO: 545437 - RNA, 22 nt, Human
gcucugcugaagccccuugcau

SEQ ID NO: 545438 - RNA, 22 nt, Human
ugaaagguguccaauauuucuc

SEQ ID NO: 545439 - RNA, 22 nt, Human
gcuucugggcaccugaacagga

SEQ ID NO: 545440 - RNA, 22 nt, Human
uccugcaggccagaggggugag

SEQ ID NO: 545441 - RNA, 22 nt, Human
ggcgcucaguguugccccagag

SEQ ID NO: 545442 - RNA, 21 nt, Human
acagaguaguugaaacagaga

SEQ ID NO: 545443 - RNA, 22 nt, Human
auccugggaagcugacauugaa

SEQ ID NO: 545444 - RNA, 22 nt, Human
aggcagcaugcucugcuucuac

SEQ ID NO: 545445 - RNA, 20 nt, Human
accuggcucucaggagcaac

SEQ ID NO: 545446 - RNA, 22 nt, Human
ggggcagcuaccggaaguaggg

SEQ ID NO: 545447 - RNA, 22 nt, Human
acuuuccuagacuucagugaca

SEQ ID NO: 545448 - RNA, 22 nt, Human
uuuacagcuagacauaccugag

SEQ ID NO: 545449 - RNA, 22 nt, Human
uuucacaggauucugauguagu

SEQ ID NO: 545450 - RNA, 22 nt, Human
uucauguaauuccauaagguaa

SEQ ID NO: 545451 - RNA, 22 nt, Human
uuucaaguggcgagauaaggaa

SEQ ID NO: 545452 - RNA, 22 nt, Human
ggcuccuguggcaagacagcuu

SEQ ID NO: 545453 - RNA, 22 nt, Human
aggaugaauaacugaaauggug

SEQ ID NO: 545454 - RNA, 22 nt, Human
auucuacuuuguguaauuaucu

SEQ ID NO: 545455 - RNA, 22 nt, Human
uggccuggaaccuggcagggac

SEQ ID NO: 545456 - RNA, 21 nt, Human
ggccugaguauaggacaggcc

SEQ ID NO: 545457 - RNA, 22 nt, Human
aaacuuuaggaaggaauuuaca

SEQ ID NO: 545458 - RNA, 22 nt, Human
augagguuugagccucuugacc

SEQ ID NO: 545459 - RNA, 23 nt, Human
gcugacugugaaauucuggagcu

SEQ ID NO: 545460 - RNA, 22 nt, Human
cagggccaccguguuugcugcu

SEQ ID NO: 545461 - RNA, 22 nt, Human
gaggcugaauggccagaagcca

SEQ ID NO: 545462 - RNA, 19 nt, Human
gagcugagaguagcacugg

SEQ ID NO: 545463 - RNA, 22 nt, Human
uaacaguauagccuaacauuuc

SEQ ID NO: 545464 - RNA, 22 nt, Human
uccaggaggaggaaggcugcca

SEQ ID NO: 545465 - RNA, 22 nt, Human
uucuagaacaggcaaaaccaau

SEQ ID NO: 545466 - RNA, 22 nt, Human
aaaauacacauacuaggggaaa

SEQ ID NO: 545467 - RNA, 22 nt, Human
ugcuucugacuaagcugcauga

SEQ ID NO: 545468 - RNA, 22 nt, Human
uauuuacccuggcagcuguagc

SEQ ID NO: 545469 - RNA, 22 nt, Human
auaucaaacgaaguuauuuuaa

SEQ ID NO: 545470 - RNA, 22 nt, Human
uauuccaaugucaguuauauca

SEQ ID NO: 545471 - RNA, 22 nt, Human
ucugggcugcuaugaggcagag

SEQ ID NO: 545472 - RNA, 22 nt, Human
agaggccaggcugcagagggau

SEQ ID NO: 545473 - RNA, 23 nt, Human
gccuucagcucgggaaggcuccc

SEQ ID NO: 545474 - RNA, 22 nt, Human
cuuaaauuggaugaguuaaguu

SEQ ID NO: 545475 - RNA, 22 nt, Human
ugggaaauguguuucuggacca

SEQ ID NO: 545476 - RNA, 22 nt, Human
uguauuuuuagaccuuuagacc

SEQ ID NO: 545477 - RNA, 20 nt, Human
ugcagguguguccaagcacu

SEQ ID NO: 545478 - RNA, 22 nt, Human
ggacauuuagaacagaguauuu

SEQ ID NO: 545479 - RNA, 22 nt, Human
cagcuuuuaggacugugagaaa

SEQ ID NO: 545480 - RNA, 20 nt, Human
aggcagagcgcacuuuuaga

SEQ ID NO: 545481 - RNA, 22 nt, Human
cucuggaauuaaggaagccugu

SEQ ID NO: 545482 - RNA, 22 nt, Human
ucaggggcuugaggugcauguc

SEQ ID NO: 545483 - RNA, 22 nt, Human
aggcugagauagguggaucauu

SEQ ID NO: 545484 - RNA, 22 nt, Human
ggaggguggcagcguccugggc

SEQ ID NO: 545485 - RNA, 22 nt, Human
cucuggccgcagcucagcucug

SEQ ID NO: 545486 - RNA, 22 nt, Human
ggcaguuuggcaggauggaggg

SEQ ID NO: 545487 - RNA, 22 nt, Human
uuauuacacugaaagaauugcg

SEQ ID NO: 545488 - RNA, 22 nt, Human
cuggggcuucaaugcuucggug

SEQ ID NO: 545489 - RNA, 22 nt, Human
gcaguccucucauuggccuccu

SEQ ID NO: 545490 - RNA, 22 nt, Human
ggcugccuggaccuccucuuuc

SEQ ID NO: 545491 - RNA, 22 nt, Human
gucaggcccuggcagccgugac

SEQ ID NO: 545492 - RNA, 22 nt, Human
cuggccuuuaaaaugaccuuau

SEQ ID NO: 545493 - RNA, 22 nt, Human
gccacccugagcugggccaggg

SEQ ID NO: 545494 - RNA, 18 nt, Human
cugaggcuuagagagguu

SEQ ID NO: 545495 - RNA, 22 nt, Human
aggauguggcugagacuucugg

SEQ ID NO: 545496 - RNA, 22 nt, Human
cugcacaaauuaaucaguuaau

SEQ ID NO: 545497 - RNA, 17 nt, Human
ugaguagggaagaggag

SEQ ID NO: 545498 - RNA, 22 nt, Human
gaagagaaaggcaaggaguuuu

SEQ ID NO: 545499 - RNA, 22 nt, Human
acagguggacacagcagcaguc

SEQ ID NO: 545500 - RNA, 22 nt, Human
cugcccugcuugaugacagcga

SEQ ID NO: 545501 - RNA, 22 nt, Human
agcaggaacucagggaguucuc

SEQ ID NO: 545502 - RNA, 22 nt, Human
uucaaguagcuaaauuagcugc

SEQ ID NO: 545503 - RNA, 22 nt, Human
gggauggcucaaaggagucagg

SEQ ID NO: 545504 - RNA, 19 nt, Human
uaugacaaguacuaguucu

SEQ ID NO: 545505 - RNA, 22 nt, Human
ugcagaagaauguaggcauaag

SEQ ID NO: 545506 - RNA, 22 nt, Human
uggaagaaugcuccacagggaa

SEQ ID NO: 545507 - RNA, 22 nt, Human
cagcaccauuugcagccucuuu

SEQ ID NO: 545508 - RNA, 22 nt, Human
ugaggggagguuggggcacauc

SEQ ID NO: 545509 - RNA, 21 nt, Human
agcuggcagauauggugucug

SEQ ID NO: 545510 - RNA, 22 nt, Human
cuggggugucucgucugccauu

SEQ ID NO: 545511 - RNA, 22 nt, Human
uugucugugaaauggaaauagu

SEQ ID NO: 545512 - RNA, 22 nt, Human
cucaggccauuccuaccaaggg

SEQ ID NO: 545513 - RNA, 22 nt, Human
ugccuggcugaggugacagguu

SEQ ID NO: 545514 - RNA, 22 nt, Human
ggaaucagaauuaggauuugaa

SEQ ID NO: 545515 - RNA, 22 nt, Human
agcaaggucucccugcaccugg

SEQ ID NO: 545516 - RNA, 22 nt, Human
aggcaguggagcuggaauaggc

SEQ ID NO: 545517 - RNA, 22 nt, Human
agauguuuuguguauuucauca

SEQ ID NO: 545518 - RNA, 22 nt, Human
gcaguggaagccucuuuaagca

SEQ ID NO: 545519 - RNA, 22 nt, Human
guuaaaagaacaacucggaggu

SEQ ID NO: 545520 - RNA, 22 nt, Human
augaguaagugaaucuccaaag

SEQ ID NO: 545521 - RNA, 22 nt, Human
aggggagcaucugugaugguua

SEQ ID NO: 545522 - RNA, 22 nt, Human
uucaacaaugcacuugaguaua

SEQ ID NO: 545523 - RNA, 22 nt, Human
caggcagagucagauuagacuu

SEQ ID NO: 545524 - RNA, 22 nt, Human
aaauuaacuaucacuuuuguga

SEQ ID NO: 545525 - RNA, 22 nt, Human
aggcugagucgggaggaucacu

SEQ ID NO: 545526 - RNA, 22 nt, Human
uuuauuugucuugccauuuagu

SEQ ID NO: 545527 - RNA, 22 nt, Human
aaaugcagcagcuaauugaaaa

SEQ ID NO: 545528 - RNA, 22 nt, Human
agucucugccagcuuguccucu

SEQ ID NO: 545529 - RNA, 22 nt, Human
gcacauacccacugucaagcac

SEQ ID NO: 545530 - RNA, 22 nt, Human
uuaguuuucccaucuuuauggu

SEQ ID NO: 545531 - RNA, 22 nt, Human
gagauggcucucagaucuuuga

SEQ ID NO: 545532 - RNA, 22 nt, Human
gggcugagucugcugccuguca

SEQ ID NO: 545533 - RNA, 22 nt, Human
aauuuauuauauccuaggggaa

SEQ ID NO: 545534 - RNA, 22 nt, Human
ugcaaauagccugaugaaagaa

SEQ ID NO: 545535 - RNA, 23 nt, Human
uggccugcagaguuucugcuggg

SEQ ID NO: 545536 - RNA, 23 nt, Human
agaguuuucuguuuucuguaggg

SEQ ID NO: 545537 - RNA, 22 nt, Human
ugcugcagguguguucagugag

SEQ ID NO: 545538 - RNA, 22 nt, Human
agauacauuaguaguuacuugu

SEQ ID NO: 545539 - RNA, 22 nt, Human
cauuguuaccaucuuuuaccua

SEQ ID NO: 545540 - RNA, 22 nt, Human
gggcagguggagggcccagcca

SEQ ID NO: 545541 - RNA, 22 nt, Human
gcuggcagagagcuggugagga

SEQ ID NO: 545542 - RNA, 22 nt, Human
accagggcaaauguuuguacuc

SEQ ID NO: 545543 - RNA, 22 nt, Human
guuuacauauuuuaauugguga

SEQ ID NO: 545544 - RNA, 22 nt, Human
gcagcagaugcuuucauggaca

SEQ ID NO: 545545 - RNA, 18 nt, Human
gggaagaggaucuggccc

SEQ ID NO: 545546 - RNA, 22 nt, Human
agcaaggaguagaacaagagug

SEQ ID NO: 545547 - RNA, 20 nt, Human
uggggucuaguuggccuggg

SEQ ID NO: 545548 - RNA, 22 nt, Human
agagacugucacauaacagagg

SEQ ID NO: 545549 - RNA, 22 nt, Human
cagaauaugacaagauuuuccu

SEQ ID NO: 545550 - RNA, 22 nt, Human
cugcugugcaggugccuaugau

SEQ ID NO: 545551 - RNA, 22 nt, Human
acauuugagucauauuugcuua

SEQ ID NO: 545552 - RNA, 21 nt, Human
aggcucagagaucaaacagua

SEQ ID NO: 545553 - RNA, 22 nt, Human
uacauguucaaauuugucuuuc

SEQ ID NO: 545554 - RNA, 22 nt, Human
uucuagcuuuuugcaccaaggu

SEQ ID NO: 545555 - RNA, 22 nt, Human
aaggcugagggcuguaccuggc

SEQ ID NO: 545556 - RNA, 22 nt, Human
aguugacauccagagacauucu

SEQ ID NO: 545557 - RNA, 22 nt, Human
ucugaaauagaagugucuuucu

SEQ ID NO: 545558 - RNA, 22 nt, Human
auuuugcugugguacauuagga

SEQ ID NO: 545559 - RNA, 22 nt, Human
cccugcagcuuuugcauaguca

SEQ ID NO: 545560 - RNA, 22 nt, Human
uaagaauagucccuagaugugu

SEQ ID NO: 545561 - RNA, 21 nt, Human
aucacauuggcuguuauuauu

SEQ ID NO: 545562 - RNA, 22 nt, Human
uuuguuuacucauucauugaug

SEQ ID NO: 545563 - RNA, 22 nt, Human
agaccugcagggccaggccugc

SEQ ID NO: 545564 - RNA, 17 nt, Human
auacaguuuauuuuaca

SEQ ID NO: 545565 - RNA, 22 nt, Human
gagggcuguggggcaugaccag

SEQ ID NO: 545566 - RNA, 22 nt, Human
ggucucagcccucgccagcagc

SEQ ID NO: 545567 - RNA, 19 nt, Human
aaaugugaugguacaauuc

SEQ ID NO: 545568 - RNA, 22 nt, Human
cagcuggcgggcagagccgcca

SEQ ID NO: 545569 - RNA, 22 nt, Human
acugggcuuauuucuugugaac

SEQ ID NO: 545570 - RNA, 17 nt, Human
cucuggggacaguucua

SEQ ID NO: 545571 - RNA, 22 nt, Human
agauguggauccuaggguagaa

SEQ ID NO: 545572 - RNA, 22 nt, Human
ucagugaaccuucuguggcagg

SEQ ID NO: 545573 - RNA, 22 nt, Human
aggcagguccccuggaaggcac

SEQ ID NO: 545574 - RNA, 22 nt, Human
gcucccagcuggagccucaaca

SEQ ID NO: 545575 - RNA, 22 nt, Human
gcugccugucccaggaugagga

SEQ ID NO: 545576 - RNA, 22 nt, Human
cuucagaacuauaaaaaguacu

SEQ ID NO: 545577 - RNA, 22 nt, Human
gcagggcucauucuaguacaau

SEQ ID NO: 545578 - RNA, 22 nt, Human
agagaaaacucauugagguguc

SEQ ID NO: 545579 - RNA, 22 nt, Human
uggccucuuaggacauccucua

SEQ ID NO: 545580 - RNA, 22 nt, Human
uuugcaaugugaaauuaaagaa

SEQ ID NO: 545581 - RNA, 22 nt, Human
aagcaaaagguuacacuucugg

SEQ ID NO: 545582 - RNA, 22 nt, Human
gaugauuuucuguguuagaaga

SEQ ID NO: 545583 - RNA, 22 nt, Human
gccuguguccuucccagugggg

SEQ ID NO: 545584 - RNA, 20 nt, Human
ucuaaacaguuggcaugggg

SEQ ID NO: 545585 - RNA, 22 nt, Human
gaccugguccuuguacuuugaa

SEQ ID NO: 545586 - RNA, 17 nt, Human
gcacugaacaauccugu

SEQ ID NO: 545587 - RNA, 22 nt, Human
aaagcagccacagagagagcgu

SEQ ID NO: 545588 - RNA, 22 nt, Human
gguuggaggugggaauagcuag

SEQ ID NO: 545589 - RNA, 22 nt, Human
ggccucucucccuggcuugcag

SEQ ID NO: 545590 - RNA, 22 nt, Human
aaggaagagaauccuucucaga

SEQ ID NO: 545591 - RNA, 22 nt, Human
gguggccuuuuaugagcagggu

SEQ ID NO: 545592 - RNA, 22 nt, Human
gcugccuguggcccuucugggu

SEQ ID NO: 545593 - RNA, 23 nt, Human
agucaguguaaguuuggaaugca

SEQ ID NO: 545594 - RNA, 22 nt, Human
acacagggggcauucuaggagu

SEQ ID NO: 545595 - RNA, 22 nt, Human
ugaaccacaugcaaagugaaua

SEQ ID NO: 545596 - RNA, 22 nt, Human
uuccugggugguccugguagag

SEQ ID NO: 545597 - RNA, 19 nt, Human
ugcaggaggacugagcaga

SEQ ID NO: 545598 - RNA, 22 nt, Human
ugaaggccagcagagugaaggc

SEQ ID NO: 545599 - RNA, 19 nt, Human
gugauuucuuuccacaagc

SEQ ID NO: 545600 - RNA, 22 nt, Human
guauaucaggcagaauguucuc

SEQ ID NO: 545601 - RNA, 22 nt, Human
auugugcaauguuuuacaauuu

SEQ ID NO: 545602 - RNA, 22 nt, Human
cccagacauaacagcagagagg

SEQ ID NO: 545603 - RNA, 22 nt, Human
caugucuugcccugauuaguag

SEQ ID NO: 545604 - RNA, 22 nt, Human
aucccacaccccuacaacauau

SEQ ID NO: 545605 - RNA, 22 nt, Human
cauggcaggaggcugcuggcag

SEQ ID NO: 545606 - RNA, 22 nt, Human
gaggcaguggucugaugcaagg

SEQ ID NO: 545607 - RNA, 22 nt, Human
ugucacaguuuguacuuuauag

SEQ ID NO: 545608 - RNA, 22 nt, Human
ggcucaggacacagugguuuag

SEQ ID NO: 545609 - RNA, 22 nt, Human
uggagagcaagucgcagacaug

SEQ ID NO: 545610 - RNA, 22 nt, Human
agcaaacacaagagguaauuuc

SEQ ID NO: 545611 - RNA, 22 nt, Human
uugaaucuauguauucagugua

SEQ ID NO: 545612 - RNA, 22 nt, Human
cagggacccgcacagguagcau

SEQ ID NO: 545613 - RNA, 18 nt, Human
ucugagggugcgggagcu

SEQ ID NO: 545614 - RNA, 22 nt, Human
gcagagcuaucuucuggauuug

SEQ ID NO: 545615 - RNA, 22 nt, Human
augacaaacccaggauguaaca

SEQ ID NO: 545616 - RNA, 22 nt, Human
acaggacaggcugggcuagacu

SEQ ID NO: 545617 - RNA, 22 nt, Human
agauuucacaugcugcucuauu

SEQ ID NO: 545618 - RNA, 22 nt, Human
aucuggcucaccuggguaaaua

SEQ ID NO: 545619 - RNA, 22 nt, Human
gcaggaaagguugagacuuugc

SEQ ID NO: 545620 - RNA, 22 nt, Human
uugguccugcagaggggucugg

SEQ ID NO: 545621 - RNA, 22 nt, Human
caaagucagccagcuaguaggu

SEQ ID NO: 545622 - RNA, 22 nt, Human
uggcagcagccauggaaggccc

SEQ ID NO: 545623 - RNA, 22 nt, Human
agucuuugguuauaagagacag

SEQ ID NO: 545624 - RNA, 20 nt, Human
ccugggcuccaggagccccg

SEQ ID NO: 545625 - RNA, 22 nt, Human
acauuuguugccauucauggag

SEQ ID NO: 545626 - RNA, 20 nt, Human
agcauuugaaauaugacuau

SEQ ID NO: 545627 - RNA, 22 nt, Human
uccaugugccaaggggcagagg

SEQ ID NO: 545628 - RNA, 22 nt, Human
gugagagcucagcugcccuggg

SEQ ID NO: 545629 - RNA, 22 nt, Human
ugggugcaggaugagugcuggc

SEQ ID NO: 545630 - RNA, 22 nt, Human
ggagucccagcaaagccuuccc

SEQ ID NO: 545631 - RNA, 21 nt, Human
gucuuuuuaauugcgauuucc

SEQ ID NO: 545632 - RNA, 22 nt, Human
gcuggggagcuagaccucagca

SEQ ID NO: 545633 - RNA, 17 nt, Human
ucugucuugacugucac

SEQ ID NO: 545634 - RNA, 22 nt, Human
agaccaugggcucugaagagca

SEQ ID NO: 545635 - RNA, 22 nt, Human
uguggagaagaaggccacugca

SEQ ID NO: 545636 - RNA, 22 nt, Human
auuuuuccugggugcuuuaguu

SEQ ID NO: 545637 - RNA, 22 nt, Human
cuaguauuuaaaggcuaugauu

SEQ ID NO: 545638 - RNA, 22 nt, Human
gaggggaugcagagaggcuuau

SEQ ID NO: 545639 - RNA, 22 nt, Human
gcgucucaaggcccccaggcca

SEQ ID NO: 545640 - RNA, 22 nt, Human
uugcauuguaggauguuagaag

SEQ ID NO: 545641 - RNA, 22 nt, Human
caaagguaaagaucugcugugg

SEQ ID NO: 545642 - RNA, 22 nt, Human
aaaucaguucucccuuucuuca

SEQ ID NO: 545643 - RNA, 22 nt, Human
auuaaacaauguaaaguucuug

SEQ ID NO: 545644 - RNA, 22 nt, Human
gaggcugguaggaaaggaaaca

SEQ ID NO: 545645 - RNA, 22 nt, Human
caucacagauguuguguggagu

SEQ ID NO: 545646 - RNA, 22 nt, Human
uggaagaaaauucaaucgaguu

SEQ ID NO: 545647 - RNA, 22 nt, Human
aguuaacaaguuggcaaucaac

SEQ ID NO: 545648 - RNA, 22 nt, Human
augaauauguacacaucuguca

SEQ ID NO: 545649 - RNA, 22 nt, Human
uggcuaggcuccaagagcugga

SEQ ID NO: 545650 - RNA, 22 nt, Human
guagggacuguucucaccugag

SEQ ID NO: 545651 - RNA, 22 nt, Human
cacagccugcugcacucaagaa

SEQ ID NO: 545652 - RNA, 22 nt, Human
ucuaaauggaaagaaaauaccu

SEQ ID NO: 545653 - RNA, 22 nt, Human
gccagcugaaauuucaguucug

SEQ ID NO: 545654 - RNA, 22 nt, Human
ugaggccacuuccccacagccc

SEQ ID NO: 545655 - RNA, 22 nt, Human
uagaaacaagggagaggauucu

SEQ ID NO: 545656 - RNA, 22 nt, Human
ccagggucuuggagaggagugc

SEQ ID NO: 545657 - RNA, 22 nt, Human
auacaguaauuuguaacucauc

SEQ ID NO: 545658 - RNA, 22 nt, Human
guguggcugauugacaugguca

SEQ ID NO: 545659 - RNA, 21 nt, Human
ccccagcaccuugccagccug

SEQ ID NO: 545660 - RNA, 22 nt, Human
uauugaugcuuggauugggcca

SEQ ID NO: 545661 - RNA, 16 nt, Human
uagggcugggaaggag

SEQ ID NO: 545662 - RNA, 22 nt, Human
uccccacacagauacagaguag

SEQ ID NO: 545663 - RNA, 22 nt, Human
uuuuuccuuggaugugucucuc

SEQ ID NO: 545664 - RNA, 22 nt, Human
uuccuaaaagaauacacuggau

SEQ ID NO: 545665 - RNA, 22 nt, Human
gaggcugagacucugaauuuuu

SEQ ID NO: 545666 - RNA, 22 nt, Human
ugaucuccugaccuuguaaucc

SEQ ID NO: 545667 - RNA, 22 nt, Human
uaguaugggaagaacuuuguag

SEQ ID NO: 545668 - RNA, 19 nt, Human
caucucugcaaggagcugc

SEQ ID NO: 545669 - RNA, 22 nt, Human
gcacuguucucagagcauuaga

SEQ ID NO: 545670 - RNA, 17 nt, Human
ggcugcugugcuggugc

SEQ ID NO: 545671 - RNA, 20 nt, Human
aucagcaacugccacucagu

SEQ ID NO: 545672 - RNA, 22 nt, Human
auaaauaucacuguugucccuc

SEQ ID NO: 545673 - RNA, 22 nt, Human
gcuggcugggucccugagaggc

SEQ ID NO: 545674 - RNA, 22 nt, Human
uuuggcuugcacuggcaccaac

SEQ ID NO: 545675 - RNA, 21 nt, Human
uccuucaguucugcacuuucu

SEQ ID NO: 545676 - RNA, 22 nt, Human
cuucccacuaguaucacagagc

SEQ ID NO: 545677 - RNA, 22 nt, Human
ugugaaaugcuauuuccaugag

SEQ ID NO: 545678 - RNA, 22 nt, Human
ggccucuguuuggagccaggau

SEQ ID NO: 545679 - RNA, 22 nt, Human
ugaaguuuaagguuagauaagu

SEQ ID NO: 545680 - RNA, 22 nt, Human
aggaagaugggagagcucugga

SEQ ID NO: 545681 - RNA, 22 nt, Human
cauguacauucuguagauggag

SEQ ID NO: 545682 - RNA, 22 nt, Human
uaauguuuagaagcagacagcu

SEQ ID NO: 545683 - RNA, 22 nt, Human
uuuauacauggagaauuuuugc

SEQ ID NO: 545684 - RNA, 22 nt, Human
ccucagcucuucccugugcaca

SEQ ID NO: 545685 - RNA, 22 nt, Human
aaauacugcugcuauuccuuuu

SEQ ID NO: 545686 - RNA, 21 nt, Human
aaagagguuaauauuguaagu

SEQ ID NO: 545687 - RNA, 22 nt, Human
gcagcuggcccugacacgcaga

SEQ ID NO: 545688 - RNA, 22 nt, Human
gcugccugcucacccggccugg

SEQ ID NO: 545689 - RNA, 22 nt, Human
ggucucagacuggcaggcagug

SEQ ID NO: 545690 - RNA, 22 nt, Human
ugguccugccccgugcacagag

SEQ ID NO: 545691 - RNA, 22 nt, Human
uucccaggcugugcuaccagag

SEQ ID NO: 545692 - RNA, 23 nt, Human
ucguugaauagcaauagcacaac

SEQ ID NO: 545693 - RNA, 22 nt, Human
ucuugccucuuccccuuuccau

SEQ ID NO: 545694 - RNA, 22 nt, Human
gcagcuggagcaucuucucauc

SEQ ID NO: 545695 - RNA, 22 nt, Human
aacaucuuuguaguguucuccu

SEQ ID NO: 545696 - RNA, 22 nt, Human
agaaacuauuaugguaaacaaa

SEQ ID NO: 545697 - RNA, 22 nt, Human
cuucuaagcugagaaugccuuu

SEQ ID NO: 545698 - RNA, 22 nt, Human
gggggacuaacuggauccugga

SEQ ID NO: 545699 - RNA, 21 nt, Human
cuagagugggaccggagucua

SEQ ID NO: 545700 - RNA, 19 nt, Human
aucugccuuagugcugcug

SEQ ID NO: 545701 - RNA, 22 nt, Human
cugggaguacugggggauguca

SEQ ID NO: 545702 - RNA, 22 nt, Human
agcugccugcuuaugagcucca

SEQ ID NO: 545703 - RNA, 22 nt, Human
uagagcuguaucaaagagccuu

SEQ ID NO: 545704 - RNA, 22 nt, Human
ucaggaagucucaauuagcuac

SEQ ID NO: 545705 - RNA, 22 nt, Human
auacauauaugguacuuccugg

SEQ ID NO: 545706 - RNA, 22 nt, Human
aaaugucagagcuggaaggggc

SEQ ID NO: 545707 - RNA, 22 nt, Human
aaugcuuuaauugcauguagug

SEQ ID NO: 545708 - RNA, 22 nt, Human
ggcgugggaaguggggcuucug

SEQ ID NO: 545709 - RNA, 22 nt, Human
cagugaggugcccagccugccc

SEQ ID NO: 545710 - RNA, 17 nt, Human
ggccuugggcugcucuu

SEQ ID NO: 545711 - RNA, 22 nt, Human
aagaugugcauggguaugcaau

SEQ ID NO: 545712 - RNA, 22 nt, Human
ccuucaaauucucuuagcugaa

SEQ ID NO: 545713 - RNA, 22 nt, Human
aaagcucucccacuguaugaag

SEQ ID NO: 545714 - RNA, 22 nt, Human
ccccugccauagucaaaucuaa

SEQ ID NO: 545715 - RNA, 23 nt, Human
ucagaaugcacugaauuuacccu

SEQ ID NO: 545716 - RNA, 22 nt, Human
gaggaagucucucuacaagaaa

SEQ ID NO: 545717 - RNA, 22 nt, Human
gagcucagauucuggugucaga

SEQ ID NO: 545718 - RNA, 22 nt, Human
ccuggcuggcaagaucgugaag

SEQ ID NO: 545719 - RNA, 22 nt, Human
ccagggaguuuccaaucugaga

SEQ ID NO: 545720 - RNA, 22 nt, Human
uucauguuugccuauuugacuu

SEQ ID NO: 545721 - RNA, 22 nt, Human
uugauuuauagaauguucaagc

SEQ ID NO: 545722 - RNA, 22 nt, Human
cagacccugggccacagaggag

SEQ ID NO: 545723 - RNA, 23 nt, Human
aaauuauugcucuucaauugccu

SEQ ID NO: 545724 - RNA, 22 nt, Human
gaggcucauugcauugugcauu

SEQ ID NO: 545725 - RNA, 21 nt, Human
gcaaggcuuuuguguuuccca

SEQ ID NO: 545726 - RNA, 18 nt, Human
aaguccuuccuuugcuuu

SEQ ID NO: 545727 - RNA, 21 nt, Human
ccugggccaaauucccuggac

SEQ ID NO: 545728 - RNA, 22 nt, Human
cuggugagacgguugacaggag

SEQ ID NO: 545729 - RNA, 22 nt, Human
ugugggccucagcaggacucca

SEQ ID NO: 545730 - RNA, 22 nt, Human
uucuuuucggccugugagaagg

SEQ ID NO: 545731 - RNA, 22 nt, Human
ggugggaucaaagagucauucg

SEQ ID NO: 545732 - RNA, 22 nt, Human
ccaggcugggcggggaaccugg

SEQ ID NO: 545733 - RNA, 20 nt, Human
cccaggcagagcuagcggca

SEQ ID NO: 545734 - RNA, 22 nt, Human
aaugagaauguaagugaagaga

SEQ ID NO: 545735 - RNA, 22 nt, Human
aaaaaugucauuauggaacuga

SEQ ID NO: 545736 - RNA, 22 nt, Human
ugggcugcuucuauuggugguc

SEQ ID NO: 545737 - RNA, 22 nt, Human
caauuauucagugacuuaagag

SEQ ID NO: 545738 - RNA, 22 nt, Human
uuaagaagugauuuuccucauu

SEQ ID NO: 545739 - RNA, 22 nt, Human
uggcuucaaagguagcauacaa

SEQ ID NO: 545740 - RNA, 22 nt, Human
aaauucuucagguaauuuugau

SEQ ID NO: 545741 - RNA, 22 nt, Human
cccauggggacaccaugaagga

SEQ ID NO: 545742 - RNA, 19 nt, Human
uuucaauggcuuagagaaa

SEQ ID NO: 545743 - RNA, 22 nt, Human
gagggccacguucagggcucuc

SEQ ID NO: 545744 - RNA, 22 nt, Human
auccagaaugucuugcuggaga

SEQ ID NO: 545745 - RNA, 22 nt, Human
caucaaauaggaauauuuggca

SEQ ID NO: 545746 - RNA, 20 nt, Human
uauuuguauuugggaaaguu

SEQ ID NO: 545747 - RNA, 22 nt, Human
uaaaugugggggccacgggcuu

SEQ ID NO: 545748 - RNA, 22 nt, Human
aagggcaggaaaagauggaugu

SEQ ID NO: 545749 - RNA, 22 nt, Human
uccuggcuccacugagcaggcc

SEQ ID NO: 545750 - RNA, 22 nt, Human
caaagcagcggauugggauagu

SEQ ID NO: 545751 - RNA, 22 nt, Human
cuggagcccugaaugggcagga

SEQ ID NO: 545752 - RNA, 22 nt, Human
guuauacaguuuugggucugcu

SEQ ID NO: 545753 - RNA, 22 nt, Human
ugagcaguaggucugaauagug

SEQ ID NO: 545754 - RNA, 22 nt, Human
cagaagaguagcugaacaaguu

SEQ ID NO: 545755 - RNA, 22 nt, Human
auguuggagucguaaggcaugg

SEQ ID NO: 545756 - RNA, 20 nt, Human
agagagagguaaauugagca

SEQ ID NO: 545757 - RNA, 20 nt, Human
cugcagggugagugggcgau

SEQ ID NO: 545758 - RNA, 22 nt, Human
cagacccucgggugaguuggcc

SEQ ID NO: 545759 - RNA, 22 nt, Human
gagaaaugcaugcaugucauca

SEQ ID NO: 545760 - RNA, 17 nt, Human
gagagcugcugcuuccg

SEQ ID NO: 545761 - RNA, 22 nt, Human
acuuccuggcugggugaccugg

SEQ ID NO: 545762 - RNA, 22 nt, Human
ggaggagcacuucugagcucag

SEQ ID NO: 545763 - RNA, 22 nt, Human
acauuugagcaucuacuaagug

SEQ ID NO: 545764 - RNA, 22 nt, Human
acccugggucauauacagugug

SEQ ID NO: 545765 - RNA, 22 nt, Human
gcccucagaguuccccacagug

SEQ ID NO: 545766 - RNA, 22 nt, Human
auauuuucacagaacuugcaaa

SEQ ID NO: 545767 - RNA, 22 nt, Human
ucuucccagcugcugcgaugcc

SEQ ID NO: 545768 - RNA, 22 nt, Human
auaccuuuuagacauguaguug

SEQ ID NO: 545769 - RNA, 22 nt, Human
caagaacaguuugccaaauugg

SEQ ID NO: 545770 - RNA, 19 nt, Human
gaaaacaugggugaggguc

SEQ ID NO: 545771 - RNA, 22 nt, Human
aauauuucuggugcuucucacu

SEQ ID NO: 545772 - RNA, 22 nt, Human
aaggcacucauucaaggagaua

SEQ ID NO: 545773 - RNA, 20 nt, Human
agagccuggaaaaagacauc

SEQ ID NO: 545774 - RNA, 22 nt, Human
ggccucucauguccugggcuuc

SEQ ID NO: 545775 - RNA, 22 nt, Human
caggcuggagugcaauggcaca

SEQ ID NO: 545776 - RNA, 22 nt, Human
uguaugaagacuucuucugugu

SEQ ID NO: 545777 - RNA, 22 nt, Human
uaggaagaagcagccuugcuua

SEQ ID NO: 545778 - RNA, 22 nt, Human
gucuaaacacaaugcaagaagu

SEQ ID NO: 545779 - RNA, 22 nt, Human
uagggcagaguccaggaugggc

SEQ ID NO: 545780 - RNA, 22 nt, Human
ugggcagguuguuauuugacau

SEQ ID NO: 545781 - RNA, 22 nt, Human
agcagagcccuuccauggccuu

SEQ ID NO: 545782 - RNA, 22 nt, Human
ucacugaagacugggcucuaaa

SEQ ID NO: 545783 - RNA, 17 nt, Human
ugccugugauaagcaca

SEQ ID NO: 545784 - RNA, 22 nt, Human
acacuuuguuguggcauauacg

SEQ ID NO: 545785 - RNA, 22 nt, Human
agaagccauguuuaguaggaug

SEQ ID NO: 545786 - RNA, 22 nt, Human
ugaguucauauaguucaagaua

SEQ ID NO: 545787 - RNA, 22 nt, Human
uuucacaaguaaaguccuaagu

SEQ ID NO: 545788 - RNA, 20 nt, Human
ucugcccaccccggcuccca

SEQ ID NO: 545789 - RNA, 22 nt, Human
uggaggagaccauuccacucag

SEQ ID NO: 545790 - RNA, 19 nt, Human
aaacucauagacucauauu

SEQ ID NO: 545791 - RNA, 22 nt, Human
ugggugcaggucuugugccagg

SEQ ID NO: 545792 - RNA, 20 nt, Human
augcaaaucccaaaaucagg

SEQ ID NO: 545793 - RNA, 20 nt, Human
gcugggcuaccacuggcccu

SEQ ID NO: 545794 - RNA, 22 nt, Human
agagauaugaguaguugugaca

SEQ ID NO: 545795 - RNA, 22 nt, Human
ggcuggccucaggguccucgcu

SEQ ID NO: 545796 - RNA, 17 nt, Human
cugggccucugcccuuu

SEQ ID NO: 545797 - RNA, 19 nt, Human
aggugagugugggaaaggg

SEQ ID NO: 545798 - RNA, 22 nt, Human
auggggcucugcggcugcuccc

SEQ ID NO: 545799 - RNA, 22 nt, Human
ugagcagagcaauaggacucuc

SEQ ID NO: 545800 - RNA, 22 nt, Human
agaauucuuggugguuagaaua

SEQ ID NO: 545801 - RNA, 22 nt, Human
ggugcaugguggaggugacccu

SEQ ID NO: 545802 - RNA, 22 nt, Human
cauaagaaauuuaacagaacuu

SEQ ID NO: 545803 - RNA, 22 nt, Human
augcauugucugguuucauuuu

SEQ ID NO: 545804 - RNA, 22 nt, Human
aaauacagauucugacucagag

SEQ ID NO: 545805 - RNA, 22 nt, Human
caggaaccaggagagucccuga

SEQ ID NO: 545806 - RNA, 22 nt, Human
ggagcagccgcgucucagggca

SEQ ID NO: 545807 - RNA, 21 nt, Human
uacacaaagcgugguccagag

SEQ ID NO: 545808 - RNA, 22 nt, Human
cauuucugucacguucuuuuau

SEQ ID NO: 545809 - RNA, 22 nt, Human
uuugcaaaugcucugcagagcu

SEQ ID NO: 545810 - RNA, 22 nt, Human
uagcucuagcacuggauaaucc

SEQ ID NO: 545811 - RNA, 22 nt, Human
uacaagagugagauuaucaugu

SEQ ID NO: 545812 - RNA, 22 nt, Human
gaaggagcuaaagggagcccug

SEQ ID NO: 545813 - RNA, 22 nt, Human
gggaguggguuuggccuaggcc

SEQ ID NO: 545814 - RNA, 22 nt, Human
aauggccagcugggagaguuga

SEQ ID NO: 545815 - RNA, 22 nt, Human
cugagccaaaaagcagagcuug

SEQ ID NO: 545816 - RNA, 22 nt, Human
agcaugaaaggcgugccaacuu

SEQ ID NO: 545817 - RNA, 19 nt, Human
cuggaaggagggacuguuc

SEQ ID NO: 545818 - RNA, 22 nt, Human
cuggcuccaucacugggugaug

SEQ ID NO: 545819 - RNA, 22 nt, Human
ugagaaauggcagcauuacugg

SEQ ID NO: 545820 - RNA, 19 nt, Human
gcaugcuugguggcuucug

SEQ ID NO: 545821 - RNA, 22 nt, Human
cacagcuaccugcaugccugcu

SEQ ID NO: 545822 - RNA, 22 nt, Human
agaccagcugccucccagggcc

SEQ ID NO: 545823 - RNA, 22 nt, Human
aaggaccuauauugucagagga

SEQ ID NO: 545824 - RNA, 22 nt, Human
cccuccugugccugaggccagc

SEQ ID NO: 545825 - RNA, 18 nt, Human
acagaaauagcugugccu

SEQ ID NO: 545826 - RNA, 22 nt, Human
acaaugcaccagcaucuucacc

SEQ ID NO: 545827 - RNA, 22 nt, Human
ucaggggacagccagcuggagg

SEQ ID NO: 545828 - RNA, 22 nt, Human
gucucccaaccccugugcccag

SEQ ID NO: 545829 - RNA, 22 nt, Human
auaauuuacaacugcuuuuaau

SEQ ID NO: 545830 - RNA, 22 nt, Human
aagcaggaagcucagguccuug

SEQ ID NO: 545831 - RNA, 18 nt, Human
agcagcugucagaaugcc

SEQ ID NO: 545832 - RNA, 22 nt, Human
aaugcacacauuugguacugaa

SEQ ID NO: 545833 - RNA, 23 nt, Human
cagcugguugugggaguggcugc

SEQ ID NO: 545834 - RNA, 22 nt, Human
ugcucugcaagcaggagcaaga

SEQ ID NO: 545835 - RNA, 22 nt, Human
acacaucagaaauaugaaugag

SEQ ID NO: 545836 - RNA, 22 nt, Human
gcaguuaccuauuuuguagaaa

SEQ ID NO: 545837 - RNA, 22 nt, Human
ugggcuuuaucaugggucuggu

SEQ ID NO: 545838 - RNA, 20 nt, Human
acccugccaggcaugugaau

SEQ ID NO: 545839 - RNA, 22 nt, Human
aucaguggggacgagaaguuua

SEQ ID NO: 545840 - RNA, 22 nt, Human
ggcagcuguggacgucgucauu

SEQ ID NO: 545841 - RNA, 22 nt, Human
caugcaguuucucuaugcguag

SEQ ID NO: 545842 - RNA, 22 nt, Human
uggccuuccuggugacucauga

SEQ ID NO: 545843 - RNA, 22 nt, Human
uggccuuguguuuuagagaaag

SEQ ID NO: 545844 - RNA, 22 nt, Human
accacccucagcagagcugaaa

SEQ ID NO: 545845 - RNA, 22 nt, Human
aagggcugaaagaccuugggca

SEQ ID NO: 545846 - RNA, 22 nt, Human
uaaaugugaccuucauuuuaua

SEQ ID NO: 545847 - RNA, 22 nt, Human
auuaaagaaacccagcauguga

SEQ ID NO: 545848 - RNA, 21 nt, Human
uccucugcagugagguggccu

SEQ ID NO: 545849 - RNA, 22 nt, Human
aacucuauuuacccuacuaaac

SEQ ID NO: 545850 - RNA, 22 nt, Human
aauuucacagugaacuuugagg

SEQ ID NO: 545851 - RNA, 22 nt, Human
aaucaagaaaaugaggauucuu

SEQ ID NO: 545852 - RNA, 22 nt, Human
guggagcaaucagagggucagu

SEQ ID NO: 545853 - RNA, 22 nt, Human
aaaagcaguuaucugggaggaa

SEQ ID NO: 545854 - RNA, 22 nt, Human
caguagcacuagauaugugugg

SEQ ID NO: 545855 - RNA, 22 nt, Human
augaaauuaaucaacacauaca

SEQ ID NO: 545856 - RNA, 22 nt, Human
uaauuuaauuucaugccagccu

SEQ ID NO: 545857 - RNA, 23 nt, Human
aggcagcagguuguccaggguga

SEQ ID NO: 545858 - RNA, 22 nt, Human
agcugugguguuuucaagcccu

SEQ ID NO: 545859 - RNA, 22 nt, Human
ccucugcugcuguugagcaccg

SEQ ID NO: 545860 - RNA, 22 nt, Human
aggcuccugcaggugaggugcu

SEQ ID NO: 545861 - RNA, 22 nt, Human
ucacucagguucaugucuuugu

SEQ ID NO: 545862 - RNA, 22 nt, Human
uuucagaguuaguagagcaugu

SEQ ID NO: 545863 - RNA, 22 nt, Human
auuagagguacaaaccuucacu

SEQ ID NO: 545864 - RNA, 22 nt, Human
gcaugggcaccagucucuaggu

SEQ ID NO: 545865 - RNA, 22 nt, Human
auuuuaauaagauccauuuggu

SEQ ID NO: 545866 - RNA, 22 nt, Human
cucucccuagguuagcggucag

SEQ ID NO: 545867 - RNA, 22 nt, Human
cagguggccaguacucaaggau

SEQ ID NO: 545868 - RNA, 20 nt, Human
aggccaggaaauguaguucu

SEQ ID NO: 545869 - RNA, 22 nt, Human
uuauuauugauucgcucucaaa

SEQ ID NO: 545870 - RNA, 22 nt, Human
cagugagggcauucagugcugg

SEQ ID NO: 545871 - RNA, 22 nt, Human
cacugcagaucagaggcugaga

SEQ ID NO: 545872 - RNA, 22 nt, Human
auucuuuaauucaauugaagga

SEQ ID NO: 545873 - RNA, 22 nt, Human
cccuggcucuucaccaccugcc

SEQ ID NO: 545874 - RNA, 22 nt, Human
uauuauuaugcauagcaugaaa

SEQ ID NO: 545875 - RNA, 22 nt, Human
uaacacauaagcugagaccaug

SEQ ID NO: 545876 - RNA, 22 nt, Human
cacaacuuuaggaaccacauuc

SEQ ID NO: 545877 - RNA, 22 nt, Human
uugauuuuuccagcuucuagag

SEQ ID NO: 545878 - RNA, 22 nt, Human
uggaagggggaagacagcucug

SEQ ID NO: 545879 - RNA, 17 nt, Human
cugaggcccagggccca

SEQ ID NO: 545880 - RNA, 22 nt, Human
acccagagcugggcuuggcaaa

SEQ ID NO: 545881 - RNA, 22 nt, Human
gggcuucucuuuagugagcuga

SEQ ID NO: 545882 - RNA, 22 nt, Human
aggggccugguuggccucuguu

SEQ ID NO: 545883 - RNA, 22 nt, Human
cauuucugugacacuuccaucu

SEQ ID NO: 545884 - RNA, 22 nt, Human
agagauauuauuuaccaaguua

SEQ ID NO: 545885 - RNA, 22 nt, Human
cagagccauuauggagacuugc

SEQ ID NO: 545886 - RNA, 22 nt, Human
agggaggucuggcugcccugag

SEQ ID NO: 545887 - RNA, 22 nt, Human
ccagcccugucaccaacuggag

SEQ ID NO: 545888 - RNA, 22 nt, Human
ugaggcaguucuuacuuguauu

SEQ ID NO: 545889 - RNA, 23 nt, Human
acacauuuuucccguucugaggu

SEQ ID NO: 545890 - RNA, 22 nt, Human
uggcagucuggguuggcaguua

SEQ ID NO: 545891 - RNA, 22 nt, Human
cgggcagugcccagcggggcag

SEQ ID NO: 545892 - RNA, 22 nt, Human
uggcucagcagguuagaaacua

SEQ ID NO: 545893 - RNA, 22 nt, Human
aaugcuagugugauauguaagg

SEQ ID NO: 545894 - RNA, 22 nt, Human
cccauggagugccugagggcca

SEQ ID NO: 545895 - RNA, 22 nt, Human
uccugcugugcuuauuauccug

SEQ ID NO: 545896 - RNA, 22 nt, Human
gugggagcugcggaggccuggg

SEQ ID NO: 545897 - RNA, 22 nt, Human
gagcagaugugugccaggaugc

SEQ ID NO: 545898 - RNA, 22 nt, Human
cucaguuucuucauauuguagg

SEQ ID NO: 545899 - RNA, 21 nt, Human
ccagacuggccuaugugguag

SEQ ID NO: 545900 - RNA, 22 nt, Human
cugaaauauagaugugaacagu

SEQ ID NO: 545901 - RNA, 22 nt, Human
acugucuguccugcucuccgug

SEQ ID NO: 545902 - RNA, 22 nt, Human
auauucguggucaaguaaggcc

SEQ ID NO: 545903 - RNA, 22 nt, Human
cugccucuccccagaguggccc

SEQ ID NO: 545904 - RNA, 22 nt, Human
ugggggagauugugcaucucua

SEQ ID NO: 545905 - RNA, 22 nt, Human
uuuacaaccucauauucugaug

SEQ ID NO: 545906 - RNA, 22 nt, Human
ccagaugguauaguagggagag

SEQ ID NO: 545907 - RNA, 22 nt, Human
guggccagccccauggacaguu

SEQ ID NO: 545908 - RNA, 22 nt, Human
cuggccagggugcgaucguggu

SEQ ID NO: 545909 - RNA, 23 nt, Human
ugcucccaggugacgcugcuguu

SEQ ID NO: 545910 - RNA, 22 nt, Human
ugcagagagauccucaggguuu

SEQ ID NO: 545911 - RNA, 22 nt, Human
cuguugcaucauggcucuuaau

SEQ ID NO: 545912 - RNA, 22 nt, Human
gacauuuauuggauuuuacgag

SEQ ID NO: 545913 - RNA, 22 nt, Human
uauaucaccaaaaacaguucug

SEQ ID NO: 545914 - RNA, 22 nt, Human
auguacacaugcaugcaugugc

SEQ ID NO: 545915 - RNA, 16 nt, Human
ggagagugucugcaaa

SEQ ID NO: 545916 - RNA, 22 nt, Human
uaacaaguuucauuuauagaau

SEQ ID NO: 545917 - RNA, 22 nt, Human
ccgcccacacuaaauaugagcg

SEQ ID NO: 545918 - RNA, 22 nt, Human
agccacuuuacuuucauauuuu

SEQ ID NO: 545919 - RNA, 22 nt, Human
aagcacuugcuuagaugugguu

SEQ ID NO: 545920 - RNA, 22 nt, Human
guucuccacugcagagucucuc

SEQ ID NO: 545921 - RNA, 22 nt, Human
caggcagcagaggaguguggga

SEQ ID NO: 545922 - RNA, 22 nt, Human
uucacagacauugcagacugaa

SEQ ID NO: 545923 - RNA, 22 nt, Human
aauacuauguagccaaaauaau

SEQ ID NO: 545924 - RNA, 22 nt, Human
cugggcugaaaguguuccuuga

SEQ ID NO: 545925 - RNA, 22 nt, Human
uuaaagcugcugaauccuauuu

SEQ ID NO: 545926 - RNA, 22 nt, Human
gaggugggagggcagucccuaa

SEQ ID NO: 545927 - RNA, 22 nt, Human
agccuggagguaaugaggaaac

SEQ ID NO: 545928 - RNA, 22 nt, Human
agaggggaguccuaaucugauu

SEQ ID NO: 545929 - RNA, 22 nt, Human
cugaaggagguagagugacaua

SEQ ID NO: 545930 - RNA, 22 nt, Human
gcuggggcugggcugaggaaga

SEQ ID NO: 545931 - RNA, 22 nt, Human
uucuugaaaauagccauguaca

SEQ ID NO: 545932 - RNA, 22 nt, Human
uggcucagugcauucacaguaa

SEQ ID NO: 545933 - RNA, 23 nt, Human
uuuugugugacuuaauaucucuu

SEQ ID NO: 545934 - RNA, 22 nt, Human
aaaacuuucagggauacagaaa

SEQ ID NO: 545935 - RNA, 22 nt, Human
ucacugcagagaccucuaguca

SEQ ID NO: 545936 - RNA, 23 nt, Human
gcuuuauaguucucccaacauua

SEQ ID NO: 545937 - RNA, 22 nt, Human
uguuucuucucacacaaacuca

SEQ ID NO: 545938 - RNA, 22 nt, Human
guuucauuaccugacccaugag

SEQ ID NO: 545939 - RNA, 22 nt, Human
auuauaaaccuuugaggguggg

SEQ ID NO: 545940 - RNA, 17 nt, Human
gcucugccucucccacc

SEQ ID NO: 545941 - RNA, 22 nt, Human
ugcagccaucuuucuuggagga

SEQ ID NO: 545942 - RNA, 22 nt, Human
cugggcucuucucacccuguuu

SEQ ID NO: 545943 - RNA, 22 nt, Human
gcccucgcuucuuccuaggggu

SEQ ID NO: 545944 - RNA, 22 nt, Human
cucagcuacgcuuucaccagcu

SEQ ID NO: 545945 - RNA, 22 nt, Human
ggagacagugguagggccuaag

SEQ ID NO: 545946 - RNA, 22 nt, Human
ugaaaucauugggguugaauaa

SEQ ID NO: 545947 - RNA, 22 nt, Human
aacacugagaggggaguggcac

SEQ ID NO: 545948 - RNA, 22 nt, Human
uguguucaaugacuucaucuuu

SEQ ID NO: 545949 - RNA, 19 nt, Human
gcaggguggcagagcucuu

SEQ ID NO: 545950 - RNA, 18 nt, Human
ucuggcucaggacugaac

SEQ ID NO: 545951 - RNA, 22 nt, Human
gaggaaccacucugagaagcca

SEQ ID NO: 545952 - RNA, 22 nt, Human
agccaggguuagaagauaguca

SEQ ID NO: 545953 - RNA, 18 nt, Human
uccugggaacuugcuagc

SEQ ID NO: 545954 - RNA, 22 nt, Human
cuggcccagagagcagagcuua

SEQ ID NO: 545955 - RNA, 22 nt, Human
ugcaggcucaccugccagggcc

SEQ ID NO: 545956 - RNA, 22 nt, Human
ucaggcugguccccacagugga

SEQ ID NO: 545957 - RNA, 22 nt, Human
uucaacauguucuacauaaggg

SEQ ID NO: 545958 - RNA, 22 nt, Human
gcagagccccucaagccagccu

SEQ ID NO: 545959 - RNA, 22 nt, Human
uaaagcaaaaaugaacugccau

SEQ ID NO: 545960 - RNA, 20 nt, Human
auaaaacucuaaucuggccu

SEQ ID NO: 545961 - RNA, 22 nt, Human
gcugucugcugggucgcucagg

SEQ ID NO: 545962 - RNA, 22 nt, Human
gcuggagcuugagaggacaggg

SEQ ID NO: 545963 - RNA, 22 nt, Human
uagaaacaaguuucucuuuggg

SEQ ID NO: 545964 - RNA, 22 nt, Human
acagggccucagccagggcaga

SEQ ID NO: 545965 - RNA, 22 nt, Human
aaaugaacaucaagaauagccu

SEQ ID NO: 545966 - RNA, 21 nt, Human
uuacuuuagaaauugccuuuu

SEQ ID NO: 545967 - RNA, 22 nt, Human
uugagaagaaauaguuugcaau

SEQ ID NO: 545968 - RNA, 22 nt, Human
acacagauauuuugaauacaua

SEQ ID NO: 545969 - RNA, 22 nt, Human
uuuucuuaugugcagcuauaug

SEQ ID NO: 545970 - RNA, 22 nt, Human
augucuuuuauggagaugucau

SEQ ID NO: 545971 - RNA, 22 nt, Human
ggggcuggcucacuaagagacu

SEQ ID NO: 545972 - RNA, 22 nt, Human
caggcagagugagguggucuaa

SEQ ID NO: 545973 - RNA, 22 nt, Human
cccuggaggaaaaucugaggcu

SEQ ID NO: 545974 - RNA, 22 nt, Human
uuugaaagccuggcuuuucucu

SEQ ID NO: 545975 - RNA, 22 nt, Human
gagggguggcccuggcguguac

SEQ ID NO: 545976 - RNA, 22 nt, Human
aaggcugagguagggccuaaaa

SEQ ID NO: 545977 - RNA, 16 nt, Human
gagccaggugccuuga

SEQ ID NO: 545978 - RNA, 22 nt, Human
acauuuaacccucagguuucug

SEQ ID NO: 545979 - RNA, 22 nt, Human
accaagcuucguggaggaaguu

SEQ ID NO: 545980 - RNA, 22 nt, Human
cuggcucaauaaauauuagcug

SEQ ID NO: 545981 - RNA, 22 nt, Human
cagccagaaccuaggaugagcu

SEQ ID NO: 545982 - RNA, 21 nt, Human
uccuguaagcuuggguggcuc

SEQ ID NO: 545983 - RNA, 22 nt, Human
uguaaauugaaggaaauuugug

SEQ ID NO: 545984 - RNA, 22 nt, Human
uggccaugaaggaggcagcaga

SEQ ID NO: 545985 - RNA, 22 nt, Human
gccucugcggggcccgagcccg

SEQ ID NO: 545986 - RNA, 22 nt, Human
cagcuuuugcagacuucuugcc

SEQ ID NO: 545987 - RNA, 22 nt, Human
gccuccccugcaauuguccuug

SEQ ID NO: 545988 - RNA, 22 nt, Human
caggaggcagagguugcaguga

SEQ ID NO: 545989 - RNA, 21 nt, Human
aagcuucccugcucuccaggg

SEQ ID NO: 545990 - RNA, 22 nt, Human
uuguaacacucccacucuucuu

SEQ ID NO: 545991 - RNA, 22 nt, Human
cccacgucgaacuugcuccaga

SEQ ID NO: 545992 - RNA, 19 nt, Human
accaggcuuauggucagug

SEQ ID NO: 545993 - RNA, 22 nt, Human
uacaaagagguaauugcauaua

SEQ ID NO: 545994 - RNA, 22 nt, Human
ggugcagaaggaagggagcugg

SEQ ID NO: 545995 - RNA, 23 nt, Human
aggaaagcauucauuuuuaccau

SEQ ID NO: 545996 - RNA, 22 nt, Human
gaggcagcauucgcauagacag

SEQ ID NO: 545997 - RNA, 19 nt, Human
cacaaaugaugaggaccug

SEQ ID NO: 545998 - RNA, 22 nt, Human
caaguuauuccuuuacacuaua

SEQ ID NO: 545999 - RNA, 21 nt, Human
ugagccaggcugacggcugug

SEQ ID NO: 546000 - RNA, 22 nt, Human
cugagccagcgggcucacuuuu

SEQ ID NO: 546001 - RNA, 18 nt, Human
aggugcagccucugaggc

SEQ ID NO: 546002 - RNA, 22 nt, Human
agcuuacaccccccaagauucu

SEQ ID NO: 546003 - RNA, 22 nt, Human
cacaggccugucucuuucuaac

SEQ ID NO: 546004 - RNA, 22 nt, Human
auacaaguggccacuugaauuc

SEQ ID NO: 546005 - RNA, 23 nt, Human
gggcucagauuucauucugugcc

SEQ ID NO: 546006 - RNA, 22 nt, Human
auuugauuagcuguguaauuuu

SEQ ID NO: 546007 - RNA, 22 nt, Human
gaggggcuggcuguggucccau

SEQ ID NO: 546008 - RNA, 22 nt, Human
cauucacaauggauugcuucaa

SEQ ID NO: 546009 - RNA, 22 nt, Human
cugguuuagcuguaagguuccc

SEQ ID NO: 546010 - RNA, 22 nt, Human
agcaauauuucagcuagcaggu

SEQ ID NO: 546011 - RNA, 22 nt, Human
ucagagagcagaacuuuuuuac

SEQ ID NO: 546012 - RNA, 22 nt, Human
cugaagaggacgcagcagcaag

SEQ ID NO: 546013 - RNA, 22 nt, Human
auccagaagcauguguaauuug

SEQ ID NO: 546014 - RNA, 22 nt, Human
ugugggcccuaggcaccuuguc

SEQ ID NO: 546015 - RNA, 22 nt, Human
auuuaaaugcuuaagaggguuu

SEQ ID NO: 546016 - RNA, 20 nt, Human
cuaggaacuauggucuggcu

SEQ ID NO: 546017 - RNA, 21 nt, Human
aacauuucaggauccaaauug

SEQ ID NO: 546018 - RNA, 22 nt, Human
agcaggaggguuuuguagaguc

SEQ ID NO: 546019 - RNA, 22 nt, Human
ugccugugucacagugauguuu

SEQ ID NO: 546020 - RNA, 22 nt, Human
ccugagaccaaguugcagccau

SEQ ID NO: 546021 - RNA, 22 nt, Human
caucaucaaaacaaauggaguc

SEQ ID NO: 546022 - RNA, 22 nt, Human
uguucuuaacuuuuguguauau

SEQ ID NO: 546023 - RNA, 22 nt, Human
aggccugagccccagguuuguu

SEQ ID NO: 546024 - RNA, 22 nt, Human
auaauuaucucagacacuuguu

SEQ ID NO: 546025 - RNA, 22 nt, Human
gagggcugaugcuuacuuauuu

SEQ ID NO: 546026 - RNA, 20 nt, Human
ccuuuauuauuuguaugaug

SEQ ID NO: 546027 - RNA, 22 nt, Human
cuggaaagugcuuuucugagag

SEQ ID NO: 546028 - RNA, 22 nt, Human
ugcugaggagguggcugugcuu

SEQ ID NO: 546029 - RNA, 22 nt, Human
gucaccagugcuaagaggugga

SEQ ID NO: 546030 - RNA, 22 nt, Human
cucugagaaagcugugagcuaa

SEQ ID NO: 546031 - RNA, 22 nt, Human
gugaggugguacaauauuaacu

SEQ ID NO: 546032 - RNA, 22 nt, Human
auauauucuuaaagaaucugac

SEQ ID NO: 546033 - RNA, 22 nt, Human
auggcagacgaggcagcagggg

SEQ ID NO: 546034 - RNA, 22 nt, Human
agaagccagcuucagcugcccg

SEQ ID NO: 546035 - RNA, 22 nt, Human
guacaguuuucaguguucacug

SEQ ID NO: 546036 - RNA, 22 nt, Human
ccaggcauccauugcuuccucu

SEQ ID NO: 546037 - RNA, 20 nt, Human
gcuccccuucucugggccuc

SEQ ID NO: 546038 - RNA, 22 nt, Human
agguauuuuauagauaaguaaa

SEQ ID NO: 546039 - RNA, 22 nt, Human
caggcacuucugcugcuugucu

SEQ ID NO: 546040 - RNA, 22 nt, Human
cagcucuucccucuucuuguag

SEQ ID NO: 546041 - RNA, 22 nt, Human
ucagggaacuacuucucccuau

SEQ ID NO: 546042 - RNA, 22 nt, Human
ugauggcuaucccuggaagggc

SEQ ID NO: 546043 - RNA, 22 nt, Human
agaauauaguuaccaaauucug

SEQ ID NO: 546044 - RNA, 22 nt, Human
acacauuuucaacacugucaag

SEQ ID NO: 546045 - RNA, 22 nt, Human
agguagagcuccaguagaaaau

SEQ ID NO: 546046 - RNA, 19 nt, Human
ucugcagaaggcauacaug

SEQ ID NO: 546047 - RNA, 20 nt, Human
gcugggggugugcugaguga

SEQ ID NO: 546048 - RNA, 22 nt, Human
uguccucagauaugucuacucu

SEQ ID NO: 546049 - RNA, 22 nt, Human
gugguaaucggauucuuaccgg

SEQ ID NO: 546050 - RNA, 23 nt, Human
aaacuacaacgccaggcacugag

SEQ ID NO: 546051 - RNA, 22 nt, Human
acacagugguguuuacaaaauu

SEQ ID NO: 546052 - RNA, 22 nt, Human
ucaagucucaauguauuauggu

SEQ ID NO: 546053 - RNA, 22 nt, Human
ugcauauuuuauaaagauggaa

SEQ ID NO: 546054 - RNA, 22 nt, Human
ugcagcuguuacggacccuguc

SEQ ID NO: 546055 - RNA, 22 nt, Human
augaagaaaaauccagcugucc

SEQ ID NO: 546056 - RNA, 22 nt, Human
cucagaagaacccaggguccca

SEQ ID NO: 546057 - RNA, 23 nt, Human
ccuggggagcuguauccagagug

SEQ ID NO: 546058 - RNA, 22 nt, Human
uuugucaucaguuauuaauaug

SEQ ID NO: 546059 - RNA, 22 nt, Human
cagcucugaggaacacuccuuu

SEQ ID NO: 546060 - RNA, 21 nt, Human
gagcauggcuuacaucagcag

SEQ ID NO: 546061 - RNA, 22 nt, Human
cccaguuucaacuuuccagugg

SEQ ID NO: 546062 - RNA, 22 nt, Human
uggugguuaugcgcuuuguggg

SEQ ID NO: 546063 - RNA, 22 nt, Human
ucuggcucuauaacuccuagcu

SEQ ID NO: 546064 - RNA, 22 nt, Human
aaguucuaauuuugcauucagg

SEQ ID NO: 546065 - RNA, 22 nt, Human
uacagagagauaaguguaaaag

SEQ ID NO: 546066 - RNA, 22 nt, Human
acaaaaagcuccauuacugucc

SEQ ID NO: 546067 - RNA, 22 nt, Human
aaggaggaauaaagagguggug

SEQ ID NO: 546068 - RNA, 22 nt, Human
augcagcuucaggauuaugaug

SEQ ID NO: 546069 - RNA, 22 nt, Human
gggugggccacugagcagcgug

SEQ ID NO: 546070 - RNA, 22 nt, Human
agaggaacccagacagggcuuu

SEQ ID NO: 546071 - RNA, 22 nt, Human
cccuggcaugcaugucccuggc

SEQ ID NO: 546072 - RNA, 22 nt, Human
cccaggcuggauuucgguggca

SEQ ID NO: 546073 - RNA, 22 nt, Human
uaaggcaaguuuuuaguggaca

SEQ ID NO: 546074 - RNA, 22 nt, Human
uauuucugucagccagauaugg

SEQ ID NO: 546075 - RNA, 22 nt, Human
auucuaagucuuguucacauuc

SEQ ID NO: 546076 - RNA, 22 nt, Human
gauugaaacauaggcagucgag

SEQ ID NO: 546077 - RNA, 22 nt, Human
uucagaaucuaugugccagcuc

SEQ ID NO: 546078 - RNA, 22 nt, Human
ccugggcuuucggcggcuuccu

SEQ ID NO: 546079 - RNA, 22 nt, Human
cuggagccccagacagggagag

SEQ ID NO: 546080 - RNA, 22 nt, Human
cugaaaaacgggauuuggcugg

SEQ ID NO: 546081 - RNA, 22 nt, Human
gcuggccugggcagccugucgg

SEQ ID NO: 546082 - RNA, 22 nt, Human
aucuggcugagcgaggcccaca

SEQ ID NO: 546083 - RNA, 22 nt, Human
gagguggauguugcagugagcu

SEQ ID NO: 546084 - RNA, 22 nt, Human
uccaacuaggcacacagcuggu

SEQ ID NO: 546085 - RNA, 22 nt, Human
ggcacagagcccagcuuccuag

SEQ ID NO: 546086 - RNA, 22 nt, Human
ucuuuuggaaaugaugugcagg

SEQ ID NO: 546087 - RNA, 23 nt, Human
ugggccuggccucccaguccagc

SEQ ID NO: 546088 - RNA, 22 nt, Human
uugaaacugaguguguuugggg

SEQ ID NO: 546089 - RNA, 22 nt, Human
aagaucaccuugacaugaaaag

SEQ ID NO: 546090 - RNA, 20 nt, Human
gcuucaguuuccucacuggu

SEQ ID NO: 546091 - RNA, 22 nt, Human
uccuuaaagugcaccuccucau

SEQ ID NO: 546092 - RNA, 22 nt, Human
ucccagggugcgccugcccucg

SEQ ID NO: 546093 - RNA, 22 nt, Human
cagcagagguuuugcuccauga

SEQ ID NO: 546094 - RNA, 22 nt, Human
ugguaauuuacgcauuucugua

SEQ ID NO: 546095 - RNA, 22 nt, Human
cuggagcuaggaaguccaagau

SEQ ID NO: 546096 - RNA, 22 nt, Human
auggaagguccuacagagcgca

SEQ ID NO: 546097 - RNA, 22 nt, Human
aggcauaugauuguaaccuuua

SEQ ID NO: 546098 - RNA, 22 nt, Human
uugcaaaggggaauaaagcaau

SEQ ID NO: 546099 - RNA, 22 nt, Human
acccaggguagagugcaguggc

SEQ ID NO: 546100 - RNA, 22 nt, Human
uaaagcagucuguguaugugaa

SEQ ID NO: 546101 - RNA, 22 nt, Human
cuccuucccuucaaguguuccu

SEQ ID NO: 546102 - RNA, 22 nt, Human
agcccugcacaggucuguggcu

SEQ ID NO: 546103 - RNA, 22 nt, Human
gagagcugcauucucagacaca

SEQ ID NO: 546104 - RNA, 22 nt, Human
ggacagcccauacacaugucug

SEQ ID NO: 546105 - RNA, 22 nt, Human
uucuucagcccauaucuuccag

SEQ ID NO: 546106 - RNA, 22 nt, Human
ggagcugggacccugucaucug

SEQ ID NO: 546107 - RNA, 22 nt, Human
uaacuguaguuauaaagcuauc

SEQ ID NO: 546108 - RNA, 22 nt, Human
aauguucugcaacuguuuucau

SEQ ID NO: 546109 - RNA, 22 nt, Human
ccacauacaaauggggugcugu

SEQ ID NO: 546110 - RNA, 22 nt, Human
acaugcauacaagcacauguag

SEQ ID NO: 546111 - RNA, 22 nt, Human
gcuguucugcgucccaggcugg

SEQ ID NO: 546112 - RNA, 22 nt, Human
aagguccuguagccacagagcc

SEQ ID NO: 546113 - RNA, 22 nt, Human
gcauuucuuccuggugugagcc

SEQ ID NO: 546114 - RNA, 19 nt, Human
cugaggugcaguaagaggc

SEQ ID NO: 546115 - RNA, 22 nt, Human
ccacuugugaaauaaucaaaua

SEQ ID NO: 546116 - RNA, 20 nt, Human
auuauucauacaugugugac

SEQ ID NO: 546117 - RNA, 22 nt, Human
uggguaggggacguggaagaaa

SEQ ID NO: 546118 - RNA, 22 nt, Human
gcaugucaugucauguaggaau

SEQ ID NO: 546119 - RNA, 22 nt, Human
acaaacuuccaucaugaauuuu

SEQ ID NO: 546120 - RNA, 22 nt, Human
uaagacuucauuaguaauaugg

SEQ ID NO: 546121 - RNA, 22 nt, Human
guuucauauauaguaacugaaa

SEQ ID NO: 546122 - RNA, 22 nt, Human
cuuaaauucuuaaugcccucau

SEQ ID NO: 546123 - RNA, 22 nt, Human
cacagcuucaguuucugacuug

SEQ ID NO: 546124 - RNA, 22 nt, Human
auaagaauaauuaaguuagucc

SEQ ID NO: 546125 - RNA, 22 nt, Human
cuccagaagacccauccucaug

SEQ ID NO: 546126 - RNA, 22 nt, Human
gcucagaggcacgaccucuugg

SEQ ID NO: 546127 - RNA, 22 nt, Human
gggaaauugucaacacucucaa

SEQ ID NO: 546128 - RNA, 22 nt, Human
gguggggcuaggaccucaggau

SEQ ID NO: 546129 - RNA, 22 nt, Human
ggggcaggagguguucucuuuu

SEQ ID NO: 546130 - RNA, 22 nt, Human
cugggccaucagaggggcugga

SEQ ID NO: 546131 - RNA, 22 nt, Human
ccuaggcccuaggcuuccauca

SEQ ID NO: 546132 - RNA, 22 nt, Human
aagucaaguacuacaggaaaca

SEQ ID NO: 546133 - RNA, 22 nt, Human
ccagccuucugagcugccugga

SEQ ID NO: 546134 - RNA, 22 nt, Human
uggggcagcagaccuuucuugg

SEQ ID NO: 546135 - RNA, 22 nt, Human
cagugagggaagaucucagcac

SEQ ID NO: 546136 - RNA, 22 nt, Human
cauuucacuauucacuaaaagg

SEQ ID NO: 546137 - RNA, 22 nt, Human
ucacaggguuuggaagccuccu

SEQ ID NO: 546138 - RNA, 22 nt, Human
aaaucugggagcagcucggcca

SEQ ID NO: 546139 - RNA, 22 nt, Human
uucauugugauucuuggcuagc

SEQ ID NO: 546140 - RNA, 22 nt, Human
cagggcacggagaagucacccc

SEQ ID NO: 546141 - RNA, 22 nt, Human
ggagcuggucagccuugagcau

SEQ ID NO: 546142 - RNA, 22 nt, Human
cugggaguugacgaggcuugua

SEQ ID NO: 546143 - RNA, 20 nt, Human
cauuccugaggaauucaugu

SEQ ID NO: 546144 - RNA, 22 nt, Human
uuugugugugcucacauagaug

SEQ ID NO: 546145 - RNA, 22 nt, Human
aaaugcaaguucauauuuuguu

SEQ ID NO: 546146 - RNA, 23 nt, Human
cuagggcaguauuucacagacac

SEQ ID NO: 546147 - RNA, 22 nt, Human
auacauaauuacuuccgauguu

SEQ ID NO: 546148 - RNA, 22 nt, Human
ucuggcagggucagggcccagg

SEQ ID NO: 546149 - RNA, 22 nt, Human
caggccugugacaccgugucug

SEQ ID NO: 546150 - RNA, 22 nt, Human
cccccagccagcagugcucagc

SEQ ID NO: 546151 - RNA, 22 nt, Human
uuugucuuuccccuccucauug

SEQ ID NO: 546152 - RNA, 21 nt, Human
cagaaguaaggguaacuucuc

SEQ ID NO: 546153 - RNA, 21 nt, Human
ccagcuccaggaccuuggauc

SEQ ID NO: 546154 - RNA, 22 nt, Human
acucugggccccagguggagcu

SEQ ID NO: 546155 - RNA, 22 nt, Human
agcaggugggaucaagcuggca

SEQ ID NO: 546156 - RNA, 22 nt, Human
gccugagauucccggagccgug

SEQ ID NO: 546157 - RNA, 22 nt, Human
aauggaacuuguaauuaugucc

SEQ ID NO: 546158 - RNA, 22 nt, Human
uggcccugucugcacacaggau

SEQ ID NO: 546159 - RNA, 22 nt, Human
gaagcagaaguacgauuuacua

SEQ ID NO: 546160 - RNA, 22 nt, Human
aucugcuuguugcaugucuguu

SEQ ID NO: 546161 - RNA, 22 nt, Human
gacaugcaacaauuuggcauuu

SEQ ID NO: 546162 - RNA, 22 nt, Human
ggccuugggauguggcugcagc

SEQ ID NO: 546163 - RNA, 22 nt, Human
caauguuugugaucuacugacu

SEQ ID NO: 546164 - RNA, 22 nt, Human
uucauagaagcagaaaguaaac

SEQ ID NO: 546165 - RNA, 22 nt, Human
ggcugccauaacugauaccaua

SEQ ID NO: 546166 - RNA, 22 nt, Human
uuacaagugucagguacuggca

SEQ ID NO: 546167 - RNA, 21 nt, Human
ugggccugauucccaggguca

SEQ ID NO: 546168 - RNA, 22 nt, Human
ugcuggaggccugacuguguuu

SEQ ID NO: 546169 - RNA, 22 nt, Human
agucucuuuguauaaauaggca

SEQ ID NO: 546170 - RNA, 22 nt, Human
acucaggaagaaagcagcuggu

SEQ ID NO: 546171 - RNA, 22 nt, Human
cagaguguggcaucuuccaacu

SEQ ID NO: 546172 - RNA, 22 nt, Human
gggaagagggagcuggaaugau

SEQ ID NO: 546173 - RNA, 22 nt, Human
ugcugaaugguaaagaaguaua

SEQ ID NO: 546174 - RNA, 22 nt, Human
cugccugcugccuguggagggu

SEQ ID NO: 546175 - RNA, 22 nt, Human
uguuaacauacugcuuucuaau

SEQ ID NO: 546176 - RNA, 22 nt, Human
uguaggaagauauaaaauaucu

SEQ ID NO: 546177 - RNA, 18 nt, Human
gcugggguugagcucucc

SEQ ID NO: 546178 - RNA, 22 nt, Human
cugggccuuugggaguucggug

SEQ ID NO: 546179 - RNA, 22 nt, Human
gauggccuggguccccuuccgg

SEQ ID NO: 546180 - RNA, 22 nt, Human
uuggaauugcucauaagagaga

SEQ ID NO: 546181 - RNA, 22 nt, Human
uuuaacauguucaagaaacaua

SEQ ID NO: 546182 - RNA, 22 nt, Human
aaaaguuaccucuguaauauaa

SEQ ID NO: 546183 - RNA, 18 nt, Human
agcaggugcuguuucuuu

SEQ ID NO: 546184 - RNA, 22 nt, Human
gcucccaacucaggccuccucc

SEQ ID NO: 546185 - RNA, 22 nt, Human
uggccugaggcucggcaugggu

SEQ ID NO: 546186 - RNA, 22 nt, Human
ucaaagacuauauauuuuauuu

SEQ ID NO: 546187 - RNA, 22 nt, Human
aaccaggacaauuugaauagaa

SEQ ID NO: 546188 - RNA, 22 nt, Human
guggcgcagaggguggcagaga

SEQ ID NO: 546189 - RNA, 22 nt, Human
cauucaaacauuaauuuauuca

SEQ ID NO: 546190 - RNA, 20 nt, Human
cccuggccuguuucaugccc

SEQ ID NO: 546191 - RNA, 22 nt, Human
aauguguagcauuuaaugcagu

SEQ ID NO: 546192 - RNA, 22 nt, Human
gcugccuggcugaugaaaauuc

SEQ ID NO: 546193 - RNA, 22 nt, Human
acaccauacucauguugguucc

SEQ ID NO: 546194 - RNA, 22 nt, Human
uguggggcucccuggcagccug

SEQ ID NO: 546195 - RNA, 22 nt, Human
uucuuacauauuuucauauggu

SEQ ID NO: 546196 - RNA, 22 nt, Human
cagcugcccugccuugcccuua

SEQ ID NO: 546197 - RNA, 20 nt, Human
caugacacuguuccucugcc

SEQ ID NO: 546198 - RNA, 22 nt, Human
cccagccucuguuugcuccucu

SEQ ID NO: 546199 - RNA, 22 nt, Human
uuuucuuauagagcuuaaaguu

SEQ ID NO: 546200 - RNA, 22 nt, Human
guauugcauuguuucaagcugu

SEQ ID NO: 546201 - RNA, 22 nt, Human
guuauacacauuccuggugagg

SEQ ID NO: 546202 - RNA, 22 nt, Human
aauguguagggugccuguuuuu

SEQ ID NO: 546203 - RNA, 22 nt, Human
ucugguuagccaauaaugccaa

SEQ ID NO: 546204 - RNA, 22 nt, Human
uauuuccagcaguaagaagaca

SEQ ID NO: 546205 - RNA, 22 nt, Human
aaacaugaugccuguacuaaga

SEQ ID NO: 546206 - RNA, 22 nt, Human
uagaacaaugaauuucuggagg

SEQ ID NO: 546207 - RNA, 22 nt, Human
gcacauuucucaaagaauuguc

SEQ ID NO: 546208 - RNA, 22 nt, Human
aaugaucuggcucaggauauca

SEQ ID NO: 546209 - RNA, 22 nt, Human
ugagaaaaguacauggagaagc

SEQ ID NO: 546210 - RNA, 22 nt, Human
ccaggagcagauauggacauaa

SEQ ID NO: 546211 - RNA, 22 nt, Human
uggcugagaaaaaagagcuaua

SEQ ID NO: 546212 - RNA, 22 nt, Human
ggaggcucugcuccguguguuc

SEQ ID NO: 546213 - RNA, 22 nt, Human
uaaggccaauuaacaaccaggg

SEQ ID NO: 546214 - RNA, 22 nt, Human
caaauguguaaggaaguguuag

SEQ ID NO: 546215 - RNA, 22 nt, Human
aaauugugagcuauagaucuag

SEQ ID NO: 546216 - RNA, 19 nt, Human
aucugagauuauaaacaga

SEQ ID NO: 546217 - RNA, 22 nt, Human
cugcagggcagggccuccuggc

SEQ ID NO: 546218 - RNA, 22 nt, Human
agcaggagauggggcgugaugu

SEQ ID NO: 546219 - RNA, 22 nt, Human
augcagggagguaagaggugcc

SEQ ID NO: 546220 - RNA, 22 nt, Human
ucagucucuggggcuucuguuu

SEQ ID NO: 546221 - RNA, 22 nt, Human
ugucccaguuuugcagguuaga

SEQ ID NO: 546222 - RNA, 22 nt, Human
ucacugcagacaaccucaguca

SEQ ID NO: 546223 - RNA, 22 nt, Human
uagggcucugcucaucaguugu

SEQ ID NO: 546224 - RNA, 22 nt, Human
uuuuuaguagagguggguuuca

SEQ ID NO: 546225 - RNA, 22 nt, Human
cagggcaguuuuacuucucucu

SEQ ID NO: 546226 - RNA, 22 nt, Human
uaugucaaaguuaagaaauagg

SEQ ID NO: 546227 - RNA, 22 nt, Human
ucucaaacuacacuguaaauug

SEQ ID NO: 546228 - RNA, 22 nt, Human
gcagagcuguuaauggagcuga

SEQ ID NO: 546229 - RNA, 22 nt, Human
agauuauuuaagacaggaacca

SEQ ID NO: 546230 - RNA, 22 nt, Human
ugcuaucucuauauccauuuau

SEQ ID NO: 546231 - RNA, 22 nt, Human
cagccccucccucaggcaggug

SEQ ID NO: 546232 - RNA, 22 nt, Human
uacagugucugcaacugcacac

SEQ ID NO: 546233 - RNA, 22 nt, Human
gaagauauucucuaaauacuuu

SEQ ID NO: 546234 - RNA, 22 nt, Human
uauucacaaaaugagguccuca

SEQ ID NO: 546235 - RNA, 22 nt, Human
acugccuguagcccugagaugu

SEQ ID NO: 546236 - RNA, 22 nt, Human
ggggcugacgggcauguggcuu

SEQ ID NO: 546237 - RNA, 18 nt, Human
gaggccugagaaccaggu

SEQ ID NO: 546238 - RNA, 22 nt, Human
aggcaguggcugagaccagggg

SEQ ID NO: 546239 - RNA, 23 nt, Human
uccuuugucuuugcauagauggu

SEQ ID NO: 546240 - RNA, 22 nt, Human
gggcugacgaaggccaugugug

SEQ ID NO: 546241 - RNA, 23 nt, Human
auuuccuacuauaaaagagguaa

SEQ ID NO: 546242 - RNA, 22 nt, Human
ucccagagcaguacuccaggag

SEQ ID NO: 546243 - RNA, 22 nt, Human
aagacaagcaucaaaucaggca

SEQ ID NO: 546244 - RNA, 22 nt, Human
augcugugccuggaaagcggcu

SEQ ID NO: 546245 - RNA, 22 nt, Human
uaugcagugguaucauuuuaaa

SEQ ID NO: 546246 - RNA, 22 nt, Human
cugcagccucaaccuccugagc

SEQ ID NO: 546247 - RNA, 22 nt, Human
gagauuuucagcuugacuggga

SEQ ID NO: 546248 - RNA, 21 nt, Human
uggccucccacacuuccaugg

SEQ ID NO: 546249 - RNA, 22 nt, Human
gcuagaggcaacaacuuuauag

SEQ ID NO: 546250 - RNA, 22 nt, Human
ugggcaggugcuauuuuccaug

SEQ ID NO: 546251 - RNA, 22 nt, Human
cagcuggccugaucccuguggc

SEQ ID NO: 546252 - RNA, 22 nt, Human
gcagugggagcuuaggcagugc

SEQ ID NO: 546253 - RNA, 22 nt, Human
gcaggaugggagcuucacucug

SEQ ID NO: 546254 - RNA, 22 nt, Human
ucacauuuuaucuauuuuaagu

SEQ ID NO: 546255 - RNA, 22 nt, Human
gugguccuguccugacggcuuc

SEQ ID NO: 546256 - RNA, 22 nt, Human
cucuugggagugcucuggagaa

SEQ ID NO: 546257 - RNA, 20 nt, Human
agcugaggcaccugagguua

SEQ ID NO: 546258 - RNA, 22 nt, Human
ucauuacaguguuuauaugucu

SEQ ID NO: 546259 - RNA, 22 nt, Human
agugacagcugggaaggugaaa

SEQ ID NO: 546260 - RNA, 22 nt, Human
gcugcagcuuuaggauccagug

SEQ ID NO: 546261 - RNA, 22 nt, Human
aaacagugauguugaguguaaa

SEQ ID NO: 546262 - RNA, 22 nt, Human
uggcaaauauuuuguuuuguaa

SEQ ID NO: 546263 - RNA, 22 nt, Human
ccugggccucacccagcucuug

SEQ ID NO: 546264 - RNA, 22 nt, Human
uuucacagguacaaacacuccu

SEQ ID NO: 546265 - RNA, 22 nt, Human
aguguacauaguuaggaacauc

SEQ ID NO: 546266 - RNA, 21 nt, Human
uucccagcaccuagcacaggu

SEQ ID NO: 546267 - RNA, 22 nt, Human
aggcacaggccucagcacccag

SEQ ID NO: 546268 - RNA, 21 nt, Human
aagcagggacugcccaggucc

SEQ ID NO: 546269 - RNA, 22 nt, Human
aaagagggacaggcgcagacac

SEQ ID NO: 546270 - RNA, 23 nt, Human
aacacaaagcugauuccaguggc

SEQ ID NO: 546271 - RNA, 22 nt, Human
gggcacugcuggaggcucccug

SEQ ID NO: 546272 - RNA, 18 nt, Human
auuuugaacaaugcugua

SEQ ID NO: 546273 - RNA, 22 nt, Human
cacugcauggaugauggcugua

SEQ ID NO: 546274 - RNA, 22 nt, Human
aauaagugaguuuagcaaguuu

SEQ ID NO: 546275 - RNA, 22 nt, Human
cugcccaggggagugcugucgg

SEQ ID NO: 546276 - RNA, 19 nt, Human
agcugggcugucacaguga

SEQ ID NO: 546277 - RNA, 22 nt, Human
cagagcuggcggugagaagaca

SEQ ID NO: 546278 - RNA, 22 nt, Human
uccugagaugcugauuucgggg

SEQ ID NO: 546279 - RNA, 22 nt, Human
gcgaaaaauguguaaauauguu

SEQ ID NO: 546280 - RNA, 22 nt, Human
ccagucagucaguugcuggcau

SEQ ID NO: 546281 - RNA, 18 nt, Human
gcaaggcucaggccaggc

SEQ ID NO: 546282 - RNA, 22 nt, Human
cuggagagaccgaaagaggcug

SEQ ID NO: 546283 - RNA, 22 nt, Human
ugugccuggcauucugggcuuc

SEQ ID NO: 546284 - RNA, 22 nt, Human
gcaaaguuccuacuuuacugga

SEQ ID NO: 546285 - RNA, 22 nt, Human
cccagcacaggcaauuccauac

SEQ ID NO: 546286 - RNA, 22 nt, Human
ugauugaagaggugaggaaguu

SEQ ID NO: 546287 - RNA, 22 nt, Human
aaaagcaagaggcuggauuaaa

SEQ ID NO: 546288 - RNA, 22 nt, Human
guuauguaucuugauugggugg

SEQ ID NO: 546289 - RNA, 22 nt, Human
cuccccaccuucgcggucccug

SEQ ID NO: 546290 - RNA, 22 nt, Human
aaagcaggguccaaggagaugu

SEQ ID NO: 546291 - RNA, 22 nt, Human
agcccaggagguggagguugca

SEQ ID NO: 546292 - RNA, 22 nt, Human
gaaaugcaaauucucucucgcu

SEQ ID NO: 546293 - RNA, 22 nt, Human
aggcacugcagauuacaggcgc

SEQ ID NO: 546294 - RNA, 22 nt, Human
aaaggcaaaauucuuagcagga

SEQ ID NO: 546295 - RNA, 22 nt, Human
aaaggucagcugccaucguucu

SEQ ID NO: 546296 - RNA, 22 nt, Human
uuccuguccgcaauggccuggg

SEQ ID NO: 546297 - RNA, 22 nt, Human
aggcacuggguaauuaguagcu

SEQ ID NO: 546298 - RNA, 22 nt, Human
gauauuuugagaaauccuauga

SEQ ID NO: 546299 - RNA, 22 nt, Human
auauuagggucucuaaauucua

SEQ ID NO: 546300 - RNA, 22 nt, Human
cugggcuuugguacugugauua

SEQ ID NO: 546301 - RNA, 22 nt, Human
cacucuccagcacaccccauuu

SEQ ID NO: 546302 - RNA, 21 nt, Human
uccugggagucugagauccug

SEQ ID NO: 546303 - RNA, 17 nt, Human
cccagagaugcugccuu

SEQ ID NO: 546304 - RNA, 22 nt, Human
gcaggaagaggcucgaagcccc

SEQ ID NO: 546305 - RNA, 22 nt, Human
ccaggugcucuugccagggcug

SEQ ID NO: 546306 - RNA, 22 nt, Human
gggcuggaggaccggccucgga

SEQ ID NO: 546307 - RNA, 22 nt, Human
aggcuucccaagcagcugcaaa

SEQ ID NO: 546308 - RNA, 18 nt, Human
acccauuauauuuguagc

SEQ ID NO: 546309 - RNA, 22 nt, Human
uaccuugggguuuuguugcucu

SEQ ID NO: 546310 - RNA, 22 nt, Human
ggcuucuguccucuggaucugu

SEQ ID NO: 546311 - RNA, 22 nt, Human
auucuagaguuucaauccaagg

SEQ ID NO: 546312 - RNA, 22 nt, Human
ggcagcaguccauggcccaagg

SEQ ID NO: 546313 - RNA, 22 nt, Human
uuuguguguauauccuuccaga

SEQ ID NO: 546314 - RNA, 22 nt, Human
acauucuaugguugaugaguug

SEQ ID NO: 546315 - RNA, 22 nt, Human
acuccagaauccuagggucagc

SEQ ID NO: 546316 - RNA, 22 nt, Human
uuggcagugaugcagcuuguuc

SEQ ID NO: 546317 - RNA, 22 nt, Human
acagcaguuacugaaauaaagu

SEQ ID NO: 546318 - RNA, 20 nt, Human
agucacaugcauacacaagu

SEQ ID NO: 546319 - RNA, 21 nt, Human
gaaaggucuuaacuuacagag

SEQ ID NO: 546320 - RNA, 22 nt, Human
uugacagcaaagauugugccua

SEQ ID NO: 546321 - RNA, 22 nt, Human
ucagcacuauacauuuugaaua

SEQ ID NO: 546322 - RNA, 16 nt, Human
ggagguggguaaggug

SEQ ID NO: 546323 - RNA, 22 nt, Human
auuacagaaauauggucaaaga

SEQ ID NO: 546324 - RNA, 22 nt, Human
guuucuaagggagagcugccag

SEQ ID NO: 546325 - RNA, 17 nt, Human
agagagaaaagggccau

SEQ ID NO: 546326 - RNA, 21 nt, Human
caaaugcuggcuggaugagga

SEQ ID NO: 546327 - RNA, 22 nt, Human
uaauuuuaacugugcuguuugg

SEQ ID NO: 546328 - RNA, 22 nt, Human
auccagagagguuaggugacau

SEQ ID NO: 546329 - RNA, 22 nt, Human
cagaggccccagaacuagcucu

SEQ ID NO: 546330 - RNA, 22 nt, Human
uuacaguauuguuaaacucuuu

SEQ ID NO: 546331 - RNA, 18 nt, Human
ccuggcagccaugcgcgc

SEQ ID NO: 546332 - RNA, 22 nt, Human
gcugagagcggccagcugggaa

SEQ ID NO: 546333 - RNA, 22 nt, Human
aauaauacaugagauuaauguu

SEQ ID NO: 546334 - RNA, 22 nt, Human
ccagaagaccggggagucaggg

SEQ ID NO: 546335 - RNA, 22 nt, Human
gaggccuggcugucagucccca

SEQ ID NO: 546336 - RNA, 22 nt, Human
uccugcagcugauaaauacagu

SEQ ID NO: 546337 - RNA, 22 nt, Human
gugcagcugagggccucuucua

SEQ ID NO: 546338 - RNA, 20 nt, Human
caguccaaucagaggccacc

SEQ ID NO: 546339 - RNA, 22 nt, Human
agcugcccuucucuugcccuug

SEQ ID NO: 546340 - RNA, 22 nt, Human
caaaguacagugcuuccuggga

SEQ ID NO: 546341 - RNA, 22 nt, Human
aaagguuaagguguucaagaaa

SEQ ID NO: 546342 - RNA, 22 nt, Human
cugaggcugaagagggccuacg

SEQ ID NO: 546343 - RNA, 22 nt, Human
gcagagccgugaauggauuuca

SEQ ID NO: 546344 - RNA, 22 nt, Human
ccacuguagagauuugaaugcc

SEQ ID NO: 546345 - RNA, 22 nt, Human
gggcugucaugugucagugacc

SEQ ID NO: 546346 - RNA, 22 nt, Human
uagaaaugauuuugaugcuuca

SEQ ID NO: 546347 - RNA, 22 nt, Human
aaguucaaggugauaguggcag

SEQ ID NO: 546348 - RNA, 22 nt, Human
gcaaauucuuaacuggacugug

SEQ ID NO: 546349 - RNA, 22 nt, Human
uuauggcauauuccucauugua

SEQ ID NO: 546350 - RNA, 23 nt, Human
aggcacugaaugugucagugagu

SEQ ID NO: 546351 - RNA, 20 nt, Human
uucauuuguugagcaccuuc

SEQ ID NO: 546352 - RNA, 22 nt, Human
uggaggagggcuggugucugua

SEQ ID NO: 546353 - RNA, 22 nt, Human
auuuguaacacgugacagguug

SEQ ID NO: 546354 - RNA, 22 nt, Human
agaguguuucagucuuccuaga

SEQ ID NO: 546355 - RNA, 22 nt, Human
uacaaagugggaaacgaagguu

SEQ ID NO: 546356 - RNA, 22 nt, Human
cacaauuuuaauacacagucaa

SEQ ID NO: 546357 - RNA, 22 nt, Human
ugcaggcuggauuugcuuuugu

SEQ ID NO: 546358 - RNA, 22 nt, Human
guuuauuauucaacuucauguu

SEQ ID NO: 546359 - RNA, 22 nt, Human
caucuuuaaaggggagacaccc

SEQ ID NO: 546360 - RNA, 22 nt, Human
guaagagcacugucuccugcug

SEQ ID NO: 546361 - RNA, 22 nt, Human
uguuacaguacuacaauucugc

SEQ ID NO: 546362 - RNA, 22 nt, Human
agccucugucaagcuuuucaaa

SEQ ID NO: 546363 - RNA, 19 nt, Human
gagaggccugugcuugaag

SEQ ID NO: 546364 - RNA, 22 nt, Human
uggcagcugucuguggggucuc

SEQ ID NO: 546365 - RNA, 21 nt, Human
agauuauaaagaaccuucuua

SEQ ID NO: 546366 - RNA, 22 nt, Human
agagcugcaggguggacccagg

SEQ ID NO: 546367 - RNA, 22 nt, Human
uuuagcagaucuauguauguga

SEQ ID NO: 546368 - RNA, 22 nt, Human
cccuggagugugacgaggcauu

SEQ ID NO: 546369 - RNA, 22 nt, Human
ccaaacaaauccccauucuuag

SEQ ID NO: 546370 - RNA, 22 nt, Human
ccccaccugugcgucugccgca

SEQ ID NO: 546371 - RNA, 22 nt, Human
ucuuccagcaaugugaaaucac

SEQ ID NO: 546372 - RNA, 22 nt, Human
gugcucuguguauuaggauguc

SEQ ID NO: 546373 - RNA, 22 nt, Human
aagauggucuugagauauuaua

SEQ ID NO: 546374 - RNA, 22 nt, Human
auaguacacauccuacaauguu

SEQ ID NO: 546375 - RNA, 22 nt, Human
uccuuaaaugugaucuagauuu

SEQ ID NO: 546376 - RNA, 22 nt, Human
gcuggcuuuugaagucuagcua

SEQ ID NO: 546377 - RNA, 22 nt, Human
gcaaagguagccaaggagcuca

SEQ ID NO: 546378 - RNA, 22 nt, Human
cagggaggaugggcuguuuugc

SEQ ID NO: 546379 - RNA, 22 nt, Human
ugaaacauugcacuguaugaau

SEQ ID NO: 546380 - RNA, 22 nt, Human
cagugaggcucugcugagcggu

SEQ ID NO: 546381 - RNA, 22 nt, Human
gcacauacugcaaagauuacua

SEQ ID NO: 546382 - RNA, 22 nt, Human
ugggccacuugaaaguggaugu

SEQ ID NO: 546383 - RNA, 22 nt, Human
gcaugagggggguuaggaaguu

SEQ ID NO: 546384 - RNA, 22 nt, Human
ggagugacucucggggccacua

SEQ ID NO: 546385 - RNA, 22 nt, Human
caguaaauuugagggaucuaau

SEQ ID NO: 546386 - RNA, 22 nt, Human
gcucugugccacaugcaguguu

SEQ ID NO: 546387 - RNA, 22 nt, Human
ucaguguuuccuagagcauaua

SEQ ID NO: 546388 - RNA, 22 nt, Human
cagcaagacaaggaacaaacug

SEQ ID NO: 546389 - RNA, 22 nt, Human
uucagaggcuguaugacuagau

SEQ ID NO: 546390 - RNA, 22 nt, Human
gaggcacagucccgaggcaagg

SEQ ID NO: 546391 - RNA, 22 nt, Human
cagcaaaagccagcauaagcuc

SEQ ID NO: 546392 - RNA, 22 nt, Human
agccugugugaagcccucagag

SEQ ID NO: 546393 - RNA, 22 nt, Human
ggaggggagauguuugggcuca

SEQ ID NO: 546394 - RNA, 22 nt, Human
auaacagugaccucucagcacc

SEQ ID NO: 546395 - RNA, 22 nt, Human
ucagggaaugggcccagucccu

SEQ ID NO: 546396 - RNA, 22 nt, Human
ucaaacaugaaagcuugauuuu

SEQ ID NO: 546397 - RNA, 22 nt, Human
auuauguagcuaaaaauugugu

SEQ ID NO: 546398 - RNA, 22 nt, Human
uucauucaucucuaaaaugccu

SEQ ID NO: 546399 - RNA, 22 nt, Human
ugcugggggcuuucuggauacc

SEQ ID NO: 546400 - RNA, 22 nt, Human
agcugcagugaacuguuuuguc

SEQ ID NO: 546401 - RNA, 22 nt, Human
agggccaggaucacagccaaga

SEQ ID NO: 546402 - RNA, 22 nt, Human
ugucuacuugggcucuacagca

SEQ ID NO: 546403 - RNA, 22 nt, Human
aggcuucuaggguuggcagcgg

SEQ ID NO: 546404 - RNA, 19 nt, Human
acauuuagaauguacuugc

SEQ ID NO: 546405 - RNA, 22 nt, Human
uaugaagcucucacuguguguc

SEQ ID NO: 546406 - RNA, 22 nt, Human
cucaggcucuguacucccuuug

SEQ ID NO: 546407 - RNA, 22 nt, Human
uaagucaucacauugcagagau

SEQ ID NO: 546408 - RNA, 22 nt, Human
aaaugcauuuuuaauuagaccc

SEQ ID NO: 546409 - RNA, 22 nt, Human
ccuggagcuuuuccauccugga

SEQ ID NO: 546410 - RNA, 22 nt, Human
gaagcucucaaacucuccccuu

SEQ ID NO: 546411 - RNA, 22 nt, Human
uauuaaagagagaaucaucauc

SEQ ID NO: 546412 - RNA, 22 nt, Human
uguauuuugugaggaucacucu

SEQ ID NO: 546413 - RNA, 23 nt, Human
uggagcugggcagcugggaaagu

SEQ ID NO: 546414 - RNA, 22 nt, Human
augccaaauucucagccucuuu

SEQ ID NO: 546415 - RNA, 22 nt, Human
agauacauagcugugagcacac

SEQ ID NO: 546416 - RNA, 22 nt, Human
cccagucauccugcaggugaaa

SEQ ID NO: 546417 - RNA, 22 nt, Human
guucacaguuaggacaacugcu

SEQ ID NO: 546418 - RNA, 22 nt, Human
ccugggcaucucaugcaccugc

SEQ ID NO: 546419 - RNA, 22 nt, Human
gggcucaggaguuugaggcugc

SEQ ID NO: 546420 - RNA, 22 nt, Human
agccucugacugucagcaaggu

SEQ ID NO: 546421 - RNA, 22 nt, Human
ccagcagcuguggcuuugccuc

SEQ ID NO: 546422 - RNA, 23 nt, Human
ugagaagccauuagagcaggugg

SEQ ID NO: 546423 - RNA, 22 nt, Human
cagcuguucuugggacagacag

SEQ ID NO: 546424 - RNA, 22 nt, Human
auuuuccaaaauaauuguuacu

SEQ ID NO: 546425 - RNA, 22 nt, Human
gccucagagggcccuagggaca

SEQ ID NO: 546426 - RNA, 22 nt, Human
guggggacgggauggcucacug

SEQ ID NO: 546427 - RNA, 22 nt, Human
uggaggaaaaaaccaggcagag

SEQ ID NO: 546428 - RNA, 22 nt, Human
acaguguuuuagaaaagcuuga

SEQ ID NO: 546429 - RNA, 22 nt, Human
uuggccuuaaccucucugugcc

SEQ ID NO: 546430 - RNA, 22 nt, Human
agccagggucucucgcucuguu

SEQ ID NO: 546431 - RNA, 22 nt, Human
ccugcugguuuuuacaaagaug

SEQ ID NO: 546432 - RNA, 22 nt, Human
ugccaggccucaggagucucca

SEQ ID NO: 546433 - RNA, 22 nt, Human
aaguccugugugcuuacacuug

SEQ ID NO: 546434 - RNA, 22 nt, Human
gccuuguuucauuacacguggu

SEQ ID NO: 546435 - RNA, 22 nt, Human
auuacaaaagaagggagaaggu

SEQ ID NO: 546436 - RNA, 22 nt, Human
uaauugaaaucauuucaauuca

SEQ ID NO: 546437 - RNA, 22 nt, Human
uggggcagcuccaucuauucca

SEQ ID NO: 546438 - RNA, 16 nt, Human
gcaggaguaccacuug

SEQ ID NO: 546439 - RNA, 22 nt, Human
agggcagcucucaccucuggcc

SEQ ID NO: 546440 - RNA, 22 nt, Human
ucaggaguaaagacagaguucc

SEQ ID NO: 546441 - RNA, 22 nt, Human
ggcagugaaaaaguauguuucc

SEQ ID NO: 546442 - RNA, 22 nt, Human
uaaaggcuuuuagugaugguaa

SEQ ID NO: 546443 - RNA, 22 nt, Human
ggucccaggauugguugcgcag

SEQ ID NO: 546444 - RNA, 22 nt, Human
ucauacauaacuuguacaguga

SEQ ID NO: 546445 - RNA, 22 nt, Human
uuauugagaccguaagucaggu

SEQ ID NO: 546446 - RNA, 22 nt, Human
gaggcagcggcucacagagaaa

SEQ ID NO: 546447 - RNA, 20 nt, Human
cuccugggacugcugguuau

SEQ ID NO: 546448 - RNA, 22 nt, Human
gugaaggacuagcauggagggc

SEQ ID NO: 546449 - RNA, 22 nt, Human
uaagcaaauagcuagaucagag

SEQ ID NO: 546450 - RNA, 22 nt, Human
uauuugaagauucuucugaugu

SEQ ID NO: 546451 - RNA, 22 nt, Human
uggaaauuuauucaucauucau

SEQ ID NO: 546452 - RNA, 22 nt, Human
cugggguccuugccauguguca

SEQ ID NO: 546453 - RNA, 22 nt, Human
acagagcacugcccugugccgc

SEQ ID NO: 546454 - RNA, 22 nt, Human
cuucuucucuacauccuuugau

SEQ ID NO: 546455 - RNA, 17 nt, Human
ucuguucaugcauaccu

SEQ ID NO: 546456 - RNA, 22 nt, Human
gccaggcgggucucaaacuccu

SEQ ID NO: 546457 - RNA, 20 nt, Human
aacauugcuucaauguaacc

SEQ ID NO: 546458 - RNA, 22 nt, Human
aucagaaacucuuagagcaggg

SEQ ID NO: 546459 - RNA, 22 nt, Human
agaaacuaaagccaagggcucu

SEQ ID NO: 546460 - RNA, 22 nt, Human
agcagccaggaaucugcagagc

SEQ ID NO: 546461 - RNA, 22 nt, Human
ugaaggcagcaugcacacuagu

SEQ ID NO: 546462 - RNA, 22 nt, Human
guuuucuuugaaugcuucuaga

SEQ ID NO: 546463 - RNA, 22 nt, Human
uuucuucucugauuaaggcuca

SEQ ID NO: 546464 - RNA, 22 nt, Human
ccaaagcaagucacaugaucaa

SEQ ID NO: 546465 - RNA, 22 nt, Human
acugggcuguaaagagaggcaa

SEQ ID NO: 546466 - RNA, 22 nt, Human
ucaucagucagaacuuaagcuu

SEQ ID NO: 546467 - RNA, 22 nt, Human
ggaagccaggcugggggaucug

SEQ ID NO: 546468 - RNA, 22 nt, Human
ugcuuccaauucaaaucugugg

SEQ ID NO: 546469 - RNA, 22 nt, Human
uagcuuuuaagucauaaccuca

SEQ ID NO: 546470 - RNA, 22 nt, Human
uucaaucauuccaacacuuuaa

SEQ ID NO: 546471 - RNA, 22 nt, Human
ggaagaggcucucauugagggc

SEQ ID NO: 546472 - RNA, 22 nt, Human
agccaggcgcaguggcuuaugc

SEQ ID NO: 546473 - RNA, 22 nt, Human
cuuucuuaauuuuuaaggacac

SEQ ID NO: 546474 - RNA, 22 nt, Human
cacuggcaugugaggcgguggc

SEQ ID NO: 546475 - RNA, 22 nt, Human
gugagggcagcuuggucagugu

SEQ ID NO: 546476 - RNA, 20 nt, Human
ucacuguaauugccuacauu

SEQ ID NO: 546477 - RNA, 22 nt, Human
ucuuuagagcacgggaaaaaca

SEQ ID NO: 546478 - RNA, 22 nt, Human
gcagaggcauuucugacgcugc

SEQ ID NO: 546479 - RNA, 22 nt, Human
uggagaugcacgagcaggugga

SEQ ID NO: 546480 - RNA, 22 nt, Human
gagugcaggccugagcaccauc

SEQ ID NO: 546481 - RNA, 22 nt, Human
cccaguggaaggaguagaagac

SEQ ID NO: 546482 - RNA, 22 nt, Human
aaguuaggcuuaguugagauuu

SEQ ID NO: 546483 - RNA, 22 nt, Human
uuuuucauauuccccucucugg

SEQ ID NO: 546484 - RNA, 22 nt, Human
gcaggcaguuauuuaguagaau

SEQ ID NO: 546485 - RNA, 22 nt, Human
cuuuacauaaggauaaaccugg

SEQ ID NO: 546486 - RNA, 22 nt, Human
uuuacagaauguugaauuuggg

SEQ ID NO: 546487 - RNA, 22 nt, Human
auuuccauguccaaaaauuagu

SEQ ID NO: 546488 - RNA, 22 nt, Human
ccuuuuauacucuguccucugg

SEQ ID NO: 546489 - RNA, 23 nt, Human
uugucugugcuuuuccaguugcu

SEQ ID NO: 546490 - RNA, 22 nt, Human
acuaucaacaucauugcucuag

SEQ ID NO: 546491 - RNA, 21 nt, Human
ucccagcugggucagugcugc

SEQ ID NO: 546492 - RNA, 22 nt, Human
auuuacagaagcauguaauagc

SEQ ID NO: 546493 - RNA, 22 nt, Human
gcagaagaccaugguggaaaga

SEQ ID NO: 546494 - RNA, 22 nt, Human
acagaaugggauuugaauauuu

SEQ ID NO: 546495 - RNA, 22 nt, Human
uacauguuauuucacuauuggu

SEQ ID NO: 546496 - RNA, 22 nt, Human
gcugucccaugguugcaagaug

SEQ ID NO: 546497 - RNA, 22 nt, Human
ggucagggggaucugugaggua

SEQ ID NO: 546498 - RNA, 22 nt, Human
ucagggcaagauugguuaauaa

SEQ ID NO: 546499 - RNA, 22 nt, Human
gugcugagugcagagugcagag

SEQ ID NO: 546500 - RNA, 22 nt, Human
uccauuggucucugugcccagg

SEQ ID NO: 546501 - RNA, 22 nt, Human
ggccucaguuucuccauggguu

SEQ ID NO: 546502 - RNA, 22 nt, Human
agcucccagaaggcccugcgcc

SEQ ID NO: 546503 - RNA, 22 nt, Human
agggaggugguuccccagugga

SEQ ID NO: 546504 - RNA, 22 nt, Human
acuuuacaggcacuucaaguau

SEQ ID NO: 546505 - RNA, 22 nt, Human
acagaaauaacuuuuuauguuu

SEQ ID NO: 546506 - RNA, 22 nt, Human
uaagaauaccucucagcucuuu

SEQ ID NO: 546507 - RNA, 22 nt, Human
uacagaaacagcgugguuagaa

SEQ ID NO: 546508 - RNA, 22 nt, Human
guucacagcugggacaagacug

SEQ ID NO: 546509 - RNA, 22 nt, Human
cccugcagagggaugggggcag

SEQ ID NO: 546510 - RNA, 22 nt, Human
ucuuccuagaaggaagaaaucu

SEQ ID NO: 546511 - RNA, 22 nt, Human
cagcucagucuugaagcacugg

SEQ ID NO: 546512 - RNA, 22 nt, Human
ucccugguuacguauaaagaug

SEQ ID NO: 546513 - RNA, 22 nt, Human
gcugucuuccuugcuccaaggg

SEQ ID NO: 546514 - RNA, 22 nt, Human
uaauaguugugacuuuguaaag

SEQ ID NO: 546515 - RNA, 22 nt, Human
ucuuuacacaagacaagaauaa

SEQ ID NO: 546516 - RNA, 22 nt, Human
ucucaccaaagccuugaccaua

SEQ ID NO: 546517 - RNA, 22 nt, Human
gaucuugagcaaguuguguaac

SEQ ID NO: 546518 - RNA, 22 nt, Human
uaauuacuggaaauuucaaaua

SEQ ID NO: 546519 - RNA, 22 nt, Human
cagguccuuuaguguccagaac

SEQ ID NO: 546520 - RNA, 22 nt, Human
gcaaagcaaucaggaguagcau

SEQ ID NO: 546521 - RNA, 22 nt, Human
cuuuucaugagucuguuauggg

SEQ ID NO: 546522 - RNA, 22 nt, Human
cauuuguaauacugacuugcag

SEQ ID NO: 546523 - RNA, 22 nt, Human
acacugugcagauucccuguga

SEQ ID NO: 546524 - RNA, 22 nt, Human
uuacaucuaaacugugaacaau

SEQ ID NO: 546525 - RNA, 22 nt, Human
cacauuucuaggaaauuaaaug

SEQ ID NO: 546526 - RNA, 22 nt, Human
agagggaucacccuguuucugg

SEQ ID NO: 546527 - RNA, 22 nt, Human
gcuuuuuuagguaagacccagg

SEQ ID NO: 546528 - RNA, 22 nt, Human
uccuaguucucugccagucgcu

SEQ ID NO: 546529 - RNA, 22 nt, Human
cugagaggugacagcgugcugg

SEQ ID NO: 546530 - RNA, 22 nt, Human
auaucaagauuauuagggucau

SEQ ID NO: 546531 - RNA, 22 nt, Human
aggccucuucagggagcaugga

SEQ ID NO: 546532 - RNA, 22 nt, Human
uuuugucuaagaacuuugcaaa

SEQ ID NO: 546533 - RNA, 22 nt, Human
cccugcagugugaccucaccua

SEQ ID NO: 546534 - RNA, 22 nt, Human
ucagcuccucaugcaggggaua

SEQ ID NO: 546535 - RNA, 23 nt, Human
gguggcaggaguggaugcugagc

SEQ ID NO: 546536 - RNA, 22 nt, Human
caggcccuggcagggcugaguc

SEQ ID NO: 546537 - RNA, 22 nt, Human
ucugaaauuguuaguaaaaaug

SEQ ID NO: 546538 - RNA, 22 nt, Human
uccagaggcuccaaagggagau

SEQ ID NO: 546539 - RNA, 22 nt, Human
acaggaaaugaaaugguaucua

SEQ ID NO: 546540 - RNA, 22 nt, Human
uuucagaucauuuuuuaaguac

SEQ ID NO: 546541 - RNA, 22 nt, Human
acugcucucugcaaguagaugg

SEQ ID NO: 546542 - RNA, 22 nt, Human
uuguuuaaaauguagcaagaaa

SEQ ID NO: 546543 - RNA, 22 nt, Human
ucauaauacaaagaguucugca

SEQ ID NO: 546544 - RNA, 22 nt, Human
agcuuuaccugaaauuugaucc

SEQ ID NO: 546545 - RNA, 22 nt, Human
aaggcaguagguguuucaaacu

SEQ ID NO: 546546 - RNA, 22 nt, Human
uugugucccccuuugagagcca

SEQ ID NO: 546547 - RNA, 22 nt, Human
uaaguuagagcacaauucuuac

SEQ ID NO: 546548 - RNA, 22 nt, Human
gucaggaugagggaugaggagu

SEQ ID NO: 546549 - RNA, 22 nt, Human
cuuggggcugucacucuggcau

SEQ ID NO: 546550 - RNA, 22 nt, Human
gaugaggggucauuggcuggga

SEQ ID NO: 546551 - RNA, 22 nt, Human
caucugcuguaauuaacaagcc

SEQ ID NO: 546552 - RNA, 22 nt, Human
aagcagcaugcuaugcuggugg

SEQ ID NO: 546553 - RNA, 22 nt, Human
aaaggaagaugccaggacucug

SEQ ID NO: 546554 - RNA, 22 nt, Human
uguacaauagcuauuaucucca

SEQ ID NO: 546555 - RNA, 22 nt, Human
ggugauuuucgaguuucauguu

SEQ ID NO: 546556 - RNA, 22 nt, Human
agcauuuaguuaguaaauguuu

SEQ ID NO: 546557 - RNA, 22 nt, Human
ucauuugugcugucagcaugca

SEQ ID NO: 546558 - RNA, 20 nt, Human
ggcagagggccugggagaag

SEQ ID NO: 546559 - RNA, 22 nt, Human
aacuggaaagaucaguaggaag

SEQ ID NO: 546560 - RNA, 22 nt, Human
gcaguggcaccgcuggcucugg

SEQ ID NO: 546561 - RNA, 22 nt, Human
gaagggggaaaaugacaacaga

SEQ ID NO: 546562 - RNA, 22 nt, Human
caaauacuggguaaguuaauuu

SEQ ID NO: 546563 - RNA, 22 nt, Human
ugcaagcaauccaggaaggcua

SEQ ID NO: 546564 - RNA, 16 nt, Human
agaggccuugaggaag

SEQ ID NO: 546565 - RNA, 22 nt, Human
gcagggcuaauggggcaaguag

SEQ ID NO: 546566 - RNA, 22 nt, Human
uggcugaguguuccaaggagca

SEQ ID NO: 546567 - RNA, 22 nt, Human
gaggggcacaguaaaggguccc

SEQ ID NO: 546568 - RNA, 22 nt, Human
gacucagugauuugacaugccu

SEQ ID NO: 546569 - RNA, 22 nt, Human
ggccagggccuggggacugucc

SEQ ID NO: 546570 - RNA, 22 nt, Human
gaaggcaaggagggaagccacc

SEQ ID NO: 546571 - RNA, 22 nt, Human
ccaggcucaggugcgagagaca

SEQ ID NO: 546572 - RNA, 22 nt, Human
cuggcaggagcauucacagagg

SEQ ID NO: 546573 - RNA, 22 nt, Human
gccagaguugaggcaguuuauu

SEQ ID NO: 546574 - RNA, 22 nt, Human
gcagggcaaauguggaaaggag

SEQ ID NO: 546575 - RNA, 22 nt, Human
ccaaguacagauuccuccacug

SEQ ID NO: 546576 - RNA, 22 nt, Human
gcuggcuggaggagggagguug

SEQ ID NO: 546577 - RNA, 22 nt, Human
ucugaacagcauggaaucauuu

SEQ ID NO: 546578 - RNA, 22 nt, Human
gcaaagcagaacccucucuauc

SEQ ID NO: 546579 - RNA, 22 nt, Human
uauguuuuucaagugcacacua

SEQ ID NO: 546580 - RNA, 22 nt, Human
gguggggcucagcaaucugugu

SEQ ID NO: 546581 - RNA, 22 nt, Human
ucccugccuccuggcagugcca

SEQ ID NO: 546582 - RNA, 22 nt, Human
acauguaggagagucacaaugc

SEQ ID NO: 546583 - RNA, 22 nt, Human
uuaugaaagacauuucuguugg

SEQ ID NO: 546584 - RNA, 22 nt, Human
gacauguauuagucaugcacag

SEQ ID NO: 546585 - RNA, 22 nt, Human
aucacagauuugauacuuuugu

SEQ ID NO: 546586 - RNA, 22 nt, Human
uugaucucuuguguaugguaga

SEQ ID NO: 546587 - RNA, 22 nt, Human
uugauuaaaaugagacaucauu

SEQ ID NO: 546588 - RNA, 18 nt, Human
uguuccaaggaaggaauc

SEQ ID NO: 546589 - RNA, 22 nt, Human
uuuuaaucaugcuucuaugucc

SEQ ID NO: 546590 - RNA, 22 nt, Human
cucucuucccgugaguguugca

SEQ ID NO: 546591 - RNA, 19 nt, Human
uucuggagguuacccugag

SEQ ID NO: 546592 - RNA, 19 nt, Human
uucuaugauuaacaugaga

SEQ ID NO: 546593 - RNA, 22 nt, Human
uggcagagcccagaacugagca

SEQ ID NO: 546594 - RNA, 23 nt, Human
uuacuacacaaguaacgauuccc

SEQ ID NO: 546595 - RNA, 22 nt, Human
aggcuccuuguucaucauccau

SEQ ID NO: 546596 - RNA, 16 nt, Human
gaggcuggcagauguc

SEQ ID NO: 546597 - RNA, 22 nt, Human
ugaagccacuuuccagaaucac

SEQ ID NO: 546598 - RNA, 22 nt, Human
augaggcagcugcuggagaacg

SEQ ID NO: 546599 - RNA, 20 nt, Human
gccugccucagcuagcugag

SEQ ID NO: 546600 - RNA, 22 nt, Human
augaugguggguaauguguaaa

SEQ ID NO: 546601 - RNA, 22 nt, Human
ccagcagagggucuuggccauu

SEQ ID NO: 546602 - RNA, 20 nt, Human
gggcccugggauucagagca

SEQ ID NO: 546603 - RNA, 22 nt, Human
ggcugugccucaaggcuacuca

SEQ ID NO: 546604 - RNA, 22 nt, Human
gcuugcucaacccccgucucuc

SEQ ID NO: 546605 - RNA, 22 nt, Human
ugugccaugaggcucugauaug

SEQ ID NO: 546606 - RNA, 22 nt, Human
aggggaggagcuuuucuugccu

SEQ ID NO: 546607 - RNA, 22 nt, Human
uuagcuaaacuguaacuagaau

SEQ ID NO: 546608 - RNA, 22 nt, Human
uucugugaaucuuuuuucccac

SEQ ID NO: 546609 - RNA, 22 nt, Human
cagaggaagcagacacaucuug

SEQ ID NO: 546610 - RNA, 22 nt, Human
cauuggaaugcauuugaagaga

SEQ ID NO: 546611 - RNA, 17 nt, Human
ucuguccagggagugug

SEQ ID NO: 546612 - RNA, 22 nt, Human
agcugcagucaagcugggccac

SEQ ID NO: 546613 - RNA, 22 nt, Human
ggcugccagugagugcagaccg

SEQ ID NO: 546614 - RNA, 22 nt, Human
uguacaguuaaucuuaagccau

SEQ ID NO: 546615 - RNA, 22 nt, Human
gcuguucugcaccagacuucag

SEQ ID NO: 546616 - RNA, 22 nt, Human
ucacauuuuaucugagauugac

SEQ ID NO: 546617 - RNA, 22 nt, Human
guguaauuauauaaagaucuac

SEQ ID NO: 546618 - RNA, 22 nt, Human
uuugaauggacugagaaucuug

SEQ ID NO: 546619 - RNA, 22 nt, Human
agcaagaagggcaaggaaguuu

SEQ ID NO: 546620 - RNA, 22 nt, Human
uggcugagugauauuugcaaag

SEQ ID NO: 546621 - RNA, 22 nt, Human
ccagggcauguaacuaauggug

SEQ ID NO: 546622 - RNA, 22 nt, Human
ccaggcucacagcaucccagga

SEQ ID NO: 546623 - RNA, 22 nt, Human
aaauacaguguguguucuuuga

SEQ ID NO: 546624 - RNA, 21 nt, Human
aagcaggaacuucaaagggac

SEQ ID NO: 546625 - RNA, 22 nt, Human
acuauacauugaauguuaaggu

SEQ ID NO: 546626 - RNA, 17 nt, Human
aggcagguaagaguuau

SEQ ID NO: 546627 - RNA, 22 nt, Human
ccaaggcuucccagagaugcuc

SEQ ID NO: 546628 - RNA, 22 nt, Human
uaaaaguauacuuucaaaggag

SEQ ID NO: 546629 - RNA, 22 nt, Human
gaagcagcuggugagauggagc

SEQ ID NO: 546630 - RNA, 22 nt, Human
aaaaguaauugcaauuuuguag

SEQ ID NO: 546631 - RNA, 22 nt, Human
ucucacuuuccagacuuuucaa

SEQ ID NO: 546632 - RNA, 22 nt, Human
gaauucuuuucuuucugaaagu

SEQ ID NO: 546633 - RNA, 22 nt, Human
ucuugacauuguuguuagcagg

SEQ ID NO: 546634 - RNA, 23 nt, Human
ucucagugaaucucagaauucgc

SEQ ID NO: 546635 - RNA, 22 nt, Human
gcagguggaucaccacgucagg

SEQ ID NO: 546636 - RNA, 22 nt, Human
agauuuauguggucacacucag

SEQ ID NO: 546637 - RNA, 22 nt, Human
accaggaggccuggagcacaaa

SEQ ID NO: 546638 - RNA, 22 nt, Human
caggaagaaggguggugagucc

SEQ ID NO: 546639 - RNA, 22 nt, Human
cagagccccucagcucucuccc

SEQ ID NO: 546640 - RNA, 22 nt, Human
guuacaauguccuuacaugaaa

SEQ ID NO: 546641 - RNA, 22 nt, Human
uugcaagggauaccauacuaag

SEQ ID NO: 546642 - RNA, 22 nt, Human
augaaauugaucuugaacuuuu

SEQ ID NO: 546643 - RNA, 22 nt, Human
aggugacaggacaggagcuggu

SEQ ID NO: 546644 - RNA, 22 nt, Human
uccuuaggcaauuugggagagu

SEQ ID NO: 546645 - RNA, 22 nt, Human
gaguggggcgaagucggcgagu

SEQ ID NO: 546646 - RNA, 22 nt, Human
uccuucagaggacggcagccag

SEQ ID NO: 546647 - RNA, 22 nt, Human
auguaugagagauucuuuuauu

SEQ ID NO: 546648 - RNA, 22 nt, Human
uaaaucacaucgaaaucugggu

SEQ ID NO: 546649 - RNA, 22 nt, Human
cucuucagauaaaagggauauu

SEQ ID NO: 546650 - RNA, 22 nt, Human
gagugaaaaaggaagggccaua

SEQ ID NO: 546651 - RNA, 22 nt, Human
ggugaagguggaacgcagagca

SEQ ID NO: 546652 - RNA, 22 nt, Human
cuggagccagccagggcccucu

SEQ ID NO: 546653 - RNA, 22 nt, Human
acugggcuagaguggaagcugg

SEQ ID NO: 546654 - RNA, 22 nt, Human
agccacagcgaaccucucuucc

SEQ ID NO: 546655 - RNA, 22 nt, Human
auguaacuguuauauuuuguug

SEQ ID NO: 546656 - RNA, 20 nt, Human
agugaauagagacauugccc

SEQ ID NO: 546657 - RNA, 22 nt, Human
uggcagcacaagguggcccaug

SEQ ID NO: 546658 - RNA, 22 nt, Human
ccuggcugugcauugccggccc

SEQ ID NO: 546659 - RNA, 22 nt, Human
gaguauuccucagucauuuugu

SEQ ID NO: 546660 - RNA, 22 nt, Human
ucugucaggagauuggcagcug

SEQ ID NO: 546661 - RNA, 22 nt, Human
cagcugcccauccugggaaaug

SEQ ID NO: 546662 - RNA, 22 nt, Human
aaaugcacugaacacauguugu

SEQ ID NO: 546663 - RNA, 22 nt, Human
gcugucuggaggcucugaggga

SEQ ID NO: 546664 - RNA, 22 nt, Human
aacuuaguuaagauuaagucuc

SEQ ID NO: 546665 - RNA, 22 nt, Human
ugagggugggcccugggcaucu

SEQ ID NO: 546666 - RNA, 22 nt, Human
aagcuuccugaaugcucauuua

SEQ ID NO: 546667 - RNA, 22 nt, Human
acugugggaaccacugaaucag

SEQ ID NO: 546668 - RNA, 22 nt, Human
ccugggccuggcgggucggcuc

SEQ ID NO: 546669 - RNA, 22 nt, Human
ucuggcucaggucagacaggga

SEQ ID NO: 546670 - RNA, 22 nt, Human
ucauacauucagcagauauuug

SEQ ID NO: 546671 - RNA, 22 nt, Human
ggagcugaugacgucaccaugg

SEQ ID NO: 546672 - RNA, 17 nt, Human
ucaaauguacagaacua

SEQ ID NO: 546673 - RNA, 22 nt, Human
gccagcugcuggaacagcgcga

SEQ ID NO: 546674 - RNA, 22 nt, Human
gccagagguaucaaagauagua

SEQ ID NO: 546675 - RNA, 22 nt, Human
ggucccaggcucccucuugucc

SEQ ID NO: 546676 - RNA, 22 nt, Human
gcaguguuguuaaaagauuaga

SEQ ID NO: 546677 - RNA, 22 nt, Human
cugauuucaugcuaucaauguu

SEQ ID NO: 546678 - RNA, 22 nt, Human
gcagugguccaguucacaccca

SEQ ID NO: 546679 - RNA, 22 nt, Human
gcaagaaaaaggcuucaugaac

SEQ ID NO: 546680 - RNA, 22 nt, Human
cagggcucacucggcuggcguc

SEQ ID NO: 546681 - RNA, 22 nt, Human
gguggggagucaggcauucuug

SEQ ID NO: 546682 - RNA, 22 nt, Human
auuuugaagggaauugaaguuc

SEQ ID NO: 546683 - RNA, 22 nt, Human
uaacauuaaaagagauaauuga

SEQ ID NO: 546684 - RNA, 22 nt, Human
ugcauuguuuagaacucuuugg

SEQ ID NO: 546685 - RNA, 22 nt, Human
ccaggcuccucaugaucuuguu

SEQ ID NO: 546686 - RNA, 22 nt, Human
ucugcaggccucgacaaggcca

SEQ ID NO: 546687 - RNA, 22 nt, Human
uaaagcaauuugagcaaguucu

SEQ ID NO: 546688 - RNA, 22 nt, Human
ugcaucuuacguuuugaaaggg

SEQ ID NO: 546689 - RNA, 22 nt, Human
ugcacacacucguguauaugag

SEQ ID NO: 546690 - RNA, 23 nt, Human
ugagcccaggaggucaaggcugc

SEQ ID NO: 546691 - RNA, 22 nt, Human
gcugcaggcgccugcggucucu

SEQ ID NO: 546692 - RNA, 22 nt, Human
caggacaguauaggcuuuagga

SEQ ID NO: 546693 - RNA, 22 nt, Human
aguaugaagaugaugaaaaaua

SEQ ID NO: 546694 - RNA, 22 nt, Human
caggggcuguggcacauggugu

SEQ ID NO: 546695 - RNA, 22 nt, Human
cauauuucagucuaagaugugu

SEQ ID NO: 546696 - RNA, 22 nt, Human
aagagcaggcugcuguggagua

SEQ ID NO: 546697 - RNA, 22 nt, Human
gggcacuguggggcccaugcug

SEQ ID NO: 546698 - RNA, 22 nt, Human
agaagccaacagggcaggagag

SEQ ID NO: 546699 - RNA, 22 nt, Human
gcagaacaacguaggaguggag

SEQ ID NO: 546700 - RNA, 22 nt, Human
ucaacacucuuuggcacaguua

SEQ ID NO: 546701 - RNA, 22 nt, Human
caucuggcuagcuaucauugug

SEQ ID NO: 546702 - RNA, 22 nt, Human
agaauuagucacaauuauagga

SEQ ID NO: 546703 - RNA, 22 nt, Human
uugaagacacagacauauagag

SEQ ID NO: 546704 - RNA, 22 nt, Human
ccagggugugggcgucggcacg

SEQ ID NO: 546705 - RNA, 22 nt, Human
agagccugugggagaugcagcu

SEQ ID NO: 546706 - RNA, 22 nt, Human
acugucugcccugagaugccag

SEQ ID NO: 546707 - RNA, 19 nt, Human
aggugaggggcaccauguc

SEQ ID NO: 546708 - RNA, 19 nt, Human
uggcauugguccagauaaa

SEQ ID NO: 546709 - RNA, 22 nt, Human
aaaagagguuaaccaggugugu

SEQ ID NO: 546710 - RNA, 23 nt, Human
acaaaugucuagagaggguguga

SEQ ID NO: 546711 - RNA, 22 nt, Human
ccuggcaggcaagaggaaggga

SEQ ID NO: 546712 - RNA, 22 nt, Human
ccagagccggauugugaagugc

SEQ ID NO: 546713 - RNA, 22 nt, Human
uagcagagcacaucuucauucu

SEQ ID NO: 546714 - RNA, 22 nt, Human
agcuuaggaggaugaugaacau

SEQ ID NO: 546715 - RNA, 22 nt, Human
cacagcuucugagugaggauuu

SEQ ID NO: 546716 - RNA, 22 nt, Human
gcagcagagaacacaaugaugg

SEQ ID NO: 546717 - RNA, 22 nt, Human
auuuucaucauggguuuaacau

SEQ ID NO: 546718 - RNA, 22 nt, Human
acuguacacgugucauuuacag

SEQ ID NO: 546719 - RNA, 22 nt, Human
gccuggagacagcagaggcggc

SEQ ID NO: 546720 - RNA, 22 nt, Human
ggcagggaagcuggcaucacgg

SEQ ID NO: 546721 - RNA, 22 nt, Human
agaggugggagccuggucacau

SEQ ID NO: 546722 - RNA, 22 nt, Human
cucugagaggugagaagcagca

SEQ ID NO: 546723 - RNA, 22 nt, Human
cucagacuggagccccaaggac

SEQ ID NO: 546724 - RNA, 18 nt, Human
gagcagaggcucaacugg

SEQ ID NO: 546725 - RNA, 22 nt, Human
uaaagcaagacacacccauagc

SEQ ID NO: 546726 - RNA, 22 nt, Human
gugagcaggauuucauggugua

SEQ ID NO: 546727 - RNA, 22 nt, Human
gaaacagguggcaggcuagauu

SEQ ID NO: 546728 - RNA, 22 nt, Human
uugggccucucaaagugcuggg

SEQ ID NO: 546729 - RNA, 22 nt, Human
ccucuguccuggggaguggagc

SEQ ID NO: 546730 - RNA, 21 nt, Human
uuguucuuccagaagcaaagu

SEQ ID NO: 546731 - RNA, 22 nt, Human
ccuggccuggcacucccucugc

SEQ ID NO: 546732 - RNA, 22 nt, Human
uaaagacaugguguaggugaac

SEQ ID NO: 546733 - RNA, 22 nt, Human
guuucuuuugugaucaccaacc

SEQ ID NO: 546734 - RNA, 22 nt, Human
aaagucuuuauuuuguaucuuu

SEQ ID NO: 546735 - RNA, 23 nt, Human
ucuuuacauacugaugaguucuc

SEQ ID NO: 546736 - RNA, 22 nt, Human
gaaggccuaggaaggaagccuu

SEQ ID NO: 546737 - RNA, 22 nt, Human
ucagugaucuaaggguauggcc

SEQ ID NO: 546738 - RNA, 22 nt, Human
cugugcccuuucgcugcacugu

SEQ ID NO: 546739 - RNA, 23 nt, Human
auuaccagccugacaccaacaaa

SEQ ID NO: 546740 - RNA, 22 nt, Human
uagaaguuuaaauucaccaugc

SEQ ID NO: 546741 - RNA, 22 nt, Human
uccugggagcccuugcuccacc

SEQ ID NO: 546742 - RNA, 22 nt, Human
aaugaaacucgaaauaaucaca

SEQ ID NO: 546743 - RNA, 22 nt, Human
ugcugccagggcucugcccaca

SEQ ID NO: 546744 - RNA, 22 nt, Human
uauuggaauuuaguuagagaau

SEQ ID NO: 546745 - RNA, 22 nt, Human
aucagaauguuuuggugugcuc

SEQ ID NO: 546746 - RNA, 22 nt, Human
gcugccucccccauggcuggaa

SEQ ID NO: 546747 - RNA, 22 nt, Human
uucaguauuugaaaccauaggc

SEQ ID NO: 546748 - RNA, 22 nt, Human
aagggcucugugcuugucccau

SEQ ID NO: 546749 - RNA, 22 nt, Human
uuucuaaaugguggcugcauug

SEQ ID NO: 546750 - RNA, 22 nt, Human
uaaggccaggcuguggucggca

SEQ ID NO: 546751 - RNA, 19 nt, Human
uucauuuguaucugcucac

SEQ ID NO: 546752 - RNA, 22 nt, Human
aguccggggucuggacaccugg

SEQ ID NO: 546753 - RNA, 22 nt, Human
ggggagcagaagcagcaacaac

SEQ ID NO: 546754 - RNA, 22 nt, Human
uucacauaaugauacaaagcuu

SEQ ID NO: 546755 - RNA, 22 nt, Human
cagcccagcagucuuagccugc

SEQ ID NO: 546756 - RNA, 22 nt, Human
uucuuaacucaaauauauaucc

SEQ ID NO: 546757 - RNA, 22 nt, Human
acacagggcagagagcuggcuc

SEQ ID NO: 546758 - RNA, 22 nt, Human
agagcugaauuuggguggugga

SEQ ID NO: 546759 - RNA, 22 nt, Human
uuccaaaugcccaucuacacag

SEQ ID NO: 546760 - RNA, 22 nt, Human
cugggccuggagcccacgagcc

SEQ ID NO: 546761 - RNA, 22 nt, Human
uuucaucucucuaaaagacagu

SEQ ID NO: 546762 - RNA, 21 nt, Human
ugcagcagaguaagcagggga

SEQ ID NO: 546763 - RNA, 22 nt, Human
uuugaucucccagacuaaggag

SEQ ID NO: 546764 - RNA, 22 nt, Human
ucuucauguauuugacaaccau

SEQ ID NO: 546765 - RNA, 22 nt, Human
ugcuuuauaaccauuucugugg

SEQ ID NO: 546766 - RNA, 22 nt, Human
ggcagagacuggguuggcagag

SEQ ID NO: 546767 - RNA, 22 nt, Human
aacuacuaccacagucaagaca

SEQ ID NO: 546768 - RNA, 22 nt, Human
aguuauauaacuaucuagaugc

SEQ ID NO: 546769 - RNA, 22 nt, Human
gaaacaauacuuguccucacua

SEQ ID NO: 546770 - RNA, 22 nt, Human
aaaggcaguggguauguggauc

SEQ ID NO: 546771 - RNA, 22 nt, Human
uguauguguauguacauaugca

SEQ ID NO: 546772 - RNA, 22 nt, Human
cuuucuuuguccaccaacaaug

SEQ ID NO: 546773 - RNA, 21 nt, Human
uuugaaagcccuauguuuuca

SEQ ID NO: 546774 - RNA, 22 nt, Human
uacaaauggguuaaaauauagu

SEQ ID NO: 546775 - RNA, 22 nt, Human
uuauuauguggaugaaagaugu

SEQ ID NO: 546776 - RNA, 16 nt, Human
cacauauauuuauaug

SEQ ID NO: 546777 - RNA, 22 nt, Human
acugagaguugugcauucaugc

SEQ ID NO: 546778 - RNA, 22 nt, Human
aaggagaguacaggaguuggua

SEQ ID NO: 546779 - RNA, 22 nt, Human
gcagugaguuaugaucaugcca

SEQ ID NO: 546780 - RNA, 22 nt, Human
gucaccauugcccacuccaugg

SEQ ID NO: 546781 - RNA, 22 nt, Human
cagucaacagagagcccgucag

SEQ ID NO: 546782 - RNA, 18 nt, Human
aaaugcuaggcuacauga

SEQ ID NO: 546783 - RNA, 22 nt, Human
auucacagggggagaaggguau

SEQ ID NO: 546784 - RNA, 22 nt, Human
aagcagcuuucuuuccugugaa

SEQ ID NO: 546785 - RNA, 22 nt, Human
ucagaaaggccacauggugcag

SEQ ID NO: 546786 - RNA, 22 nt, Human
uacauguauugauuucucuucu

SEQ ID NO: 546787 - RNA, 22 nt, Human
ggaaagccaggugcucuggugu

SEQ ID NO: 546788 - RNA, 22 nt, Human
cuguugugaaauguccaucaac

SEQ ID NO: 546789 - RNA, 22 nt, Human
uuuuuccaccguacuuccugag

SEQ ID NO: 546790 - RNA, 22 nt, Human
ucagacagggagucagaaaaua

SEQ ID NO: 546791 - RNA, 21 nt, Human
cucacaggaugcaguguuacu

SEQ ID NO: 546792 - RNA, 22 nt, Human
cugccaggcacgugcagcauca

SEQ ID NO: 546793 - RNA, 22 nt, Human
caaagcagccugcaguguggac

SEQ ID NO: 546794 - RNA, 22 nt, Human
guucagggagggacagaugaag

SEQ ID NO: 546795 - RNA, 22 nt, Human
agguccuguccuuggucucuga

SEQ ID NO: 546796 - RNA, 22 nt, Human
cccuuccuccucgccugucaga

SEQ ID NO: 546797 - RNA, 22 nt, Human
aaugaacacagcccucuacuuu

SEQ ID NO: 546798 - RNA, 22 nt, Human
aggauccuccuuagaaaagacc

SEQ ID NO: 546799 - RNA, 22 nt, Human
uaagacacaugcguacaagaua

SEQ ID NO: 546800 - RNA, 22 nt, Human
cagaagaaaucauuaucuggac

SEQ ID NO: 546801 - RNA, 22 nt, Human
aaaggcaggcuuucacaucuca

SEQ ID NO: 546802 - RNA, 22 nt, Human
agagggcugcugcacagugcuc

SEQ ID NO: 546803 - RNA, 19 nt, Human
aagcagcccuggcaagagc

SEQ ID NO: 546804 - RNA, 22 nt, Human
aaaacugaaauacgauccaaug

SEQ ID NO: 546805 - RNA, 22 nt, Human
uaugcauauagaugcacacaca

SEQ ID NO: 546806 - RNA, 22 nt, Human
uggcagcacuagguacugagcu

SEQ ID NO: 546807 - RNA, 22 nt, Human
ugggcucagucugcaccugcgg

SEQ ID NO: 546808 - RNA, 22 nt, Human
ucagggcaggcgagcagcugcu

SEQ ID NO: 546809 - RNA, 22 nt, Human
gaacaacuuugaaacaugaaga

SEQ ID NO: 546810 - RNA, 22 nt, Human
ggcucugcccagaugaagagga

SEQ ID NO: 546811 - RNA, 22 nt, Human
caggaaccugugcguagggaug

SEQ ID NO: 546812 - RNA, 22 nt, Human
ucucuucuugauuuucacugga

SEQ ID NO: 546813 - RNA, 22 nt, Human
uacacauguuuggcaaguaugu

SEQ ID NO: 546814 - RNA, 22 nt, Human
acauaaaguacugagagacucu

SEQ ID NO: 546815 - RNA, 22 nt, Human
agaaauguaauugcaacugucu

SEQ ID NO: 546816 - RNA, 22 nt, Human
cucugcagauucaucccuucac

SEQ ID NO: 546817 - RNA, 22 nt, Human
uuucacagcaacacugucugca

SEQ ID NO: 546818 - RNA, 22 nt, Human
cccagccugugacagccguccu

SEQ ID NO: 546819 - RNA, 22 nt, Human
agcaggcuugguccccagccuc

SEQ ID NO: 546820 - RNA, 22 nt, Human
aacuacagaaaagguaagcucu

SEQ ID NO: 546821 - RNA, 22 nt, Human
aaggcaguuugggccaccaucu

SEQ ID NO: 546822 - RNA, 19 nt, Human
ugcagaagacacaguggug

SEQ ID NO: 546823 - RNA, 22 nt, Human
ucuucagcuguagucauuguuc

SEQ ID NO: 546824 - RNA, 22 nt, Human
caggacaaagcccuuugagaaa

SEQ ID NO: 546825 - RNA, 22 nt, Human
uucaaacagaugacucugcucu

SEQ ID NO: 546826 - RNA, 22 nt, Human
guuuagaauucuaacuuuaagg

SEQ ID NO: 546827 - RNA, 20 nt, Human
ccugcugggaacccucugaa

SEQ ID NO: 546828 - RNA, 22 nt, Human
uagaaaucuuguuacuaugugu

SEQ ID NO: 546829 - RNA, 21 nt, Human
uuuucuggaguaugucuccuc

SEQ ID NO: 546830 - RNA, 21 nt, Human
uaaacauaaccuuguauggcu

SEQ ID NO: 546831 - RNA, 22 nt, Human
ggcucuggcuacuccacccugu

SEQ ID NO: 546832 - RNA, 22 nt, Human
ggcuguccuuggccaaggcacu

SEQ ID NO: 546833 - RNA, 22 nt, Human
accaagcuagaacauuacaggc

SEQ ID NO: 546834 - RNA, 22 nt, Human
uggcccugcacccagagcaguu

SEQ ID NO: 546835 - RNA, 22 nt, Human
gagcugccaguguaugaauucu

SEQ ID NO: 546836 - RNA, 22 nt, Human
ccuggugccacuagagaauguc

SEQ ID NO: 546837 - RNA, 22 nt, Human
uccucagggguuucagguguac

SEQ ID NO: 546838 - RNA, 22 nt, Human
caugaagcuugaagcaguccac

SEQ ID NO: 546839 - RNA, 22 nt, Human
gugccagggggcacugaacaga

SEQ ID NO: 546840 - RNA, 21 nt, Human
cagugggcugcugcgcuccag

SEQ ID NO: 546841 - RNA, 22 nt, Human
gaaguuuauuucaaucuauuca

SEQ ID NO: 546842 - RNA, 22 nt, Human
gagacugcauagauggccacaa

SEQ ID NO: 546843 - RNA, 22 nt, Human
ugucucugaacagcuuacuaaa

SEQ ID NO: 546844 - RNA, 22 nt, Human
aacugcauucagaaagcucacu

SEQ ID NO: 546845 - RNA, 22 nt, Human
agguggcuguggcuucccuugu

SEQ ID NO: 546846 - RNA, 22 nt, Human
cacugggcugauaccaggcuuc

SEQ ID NO: 546847 - RNA, 22 nt, Human
uccugcagacauuuacaccuuu

SEQ ID NO: 546848 - RNA, 22 nt, Human
acucuucaugcuaugcucaacu

SEQ ID NO: 546849 - RNA, 22 nt, Human
cagagaaagacuugcccuuagu

SEQ ID NO: 546850 - RNA, 22 nt, Human
ucaggccuccagguuaccauuu

SEQ ID NO: 546851 - RNA, 22 nt, Human
cagcuccagcccaggcagcucc

SEQ ID NO: 546852 - RNA, 22 nt, Human
auaaguaggaaaauuugaauau

SEQ ID NO: 546853 - RNA, 22 nt, Human
uggccuuggcagugagaagagu

SEQ ID NO: 546854 - RNA, 22 nt, Human
gacacuauaugacacuucaguu

SEQ ID NO: 546855 - RNA, 22 nt, Human
acauucuucuugugaauuuacu

SEQ ID NO: 546856 - RNA, 22 nt, Human
cucagagaggcaguggaaguca

SEQ ID NO: 546857 - RNA, 22 nt, Human
augccugagacuguuaauuggc

SEQ ID NO: 546858 - RNA, 22 nt, Human
uaaaucaguuucucuuauuggu

SEQ ID NO: 546859 - RNA, 19 nt, Human
caguggagauuggaggagg

SEQ ID NO: 546860 - RNA, 22 nt, Human
gaggcaggcccugaaugaguca

SEQ ID NO: 546861 - RNA, 23 nt, Human
aaaguguagccagguuaagaacc

SEQ ID NO: 546862 - RNA, 22 nt, Human
gacuuuggcaucuagacauugu

SEQ ID NO: 546863 - RNA, 22 nt, Human
aaucagucauuagcucugaccu

SEQ ID NO: 546864 - RNA, 22 nt, Human
aucuccagauugugaucaucag

SEQ ID NO: 546865 - RNA, 22 nt, Human
aaaacugagguuuccugaagaa

SEQ ID NO: 546866 - RNA, 22 nt, Human
cagaaccaggaacugauggaga

SEQ ID NO: 546867 - RNA, 22 nt, Human
aaguccagugcuuuagauucca

SEQ ID NO: 546868 - RNA, 22 nt, Human
auuuucuagauagaugaugcau

SEQ ID NO: 546869 - RNA, 23 nt, Human
uccuccuuuugcuugugcuuccc

SEQ ID NO: 546870 - RNA, 22 nt, Human
augaccagccgagauaaacaga

SEQ ID NO: 546871 - RNA, 22 nt, Human
uggggacacagagguucguugg

SEQ ID NO: 546872 - RNA, 22 nt, Human
aaugagacacgugaagcagaug

SEQ ID NO: 546873 - RNA, 22 nt, Human
uaguauucagcuucucaggcaa

SEQ ID NO: 546874 - RNA, 22 nt, Human
agaagcuggaggaagacuaagc

SEQ ID NO: 546875 - RNA, 22 nt, Human
aaggaagaaucaucacguuggg

SEQ ID NO: 546876 - RNA, 22 nt, Human
uaccugggcccaccagugccug

SEQ ID NO: 546877 - RNA, 22 nt, Human
caguuucugggcguucacaggu

SEQ ID NO: 546878 - RNA, 22 nt, Human
uaaaucacccaucuccuaaucu

SEQ ID NO: 546879 - RNA, 22 nt, Human
agcccagcagaaaguccagccu

SEQ ID NO: 546880 - RNA, 22 nt, Human
cucugagguuuccucacaagcu

SEQ ID NO: 546881 - RNA, 19 nt, Human
ggcccaaguacugagugcc

SEQ ID NO: 546882 - RNA, 22 nt, Human
gagugcaguaugagaggcugcu

SEQ ID NO: 546883 - RNA, 22 nt, Human
gcccucugcacagcucugagca

SEQ ID NO: 546884 - RNA, 18 nt, Human
aggaagcaggaggaaggc

SEQ ID NO: 546885 - RNA, 22 nt, Human
ucugucucuuuguucugugagu

SEQ ID NO: 546886 - RNA, 22 nt, Human
ccacagggccuuuccugcuggc

SEQ ID NO: 546887 - RNA, 22 nt, Human
aucacgucaugguuugaucugg

SEQ ID NO: 546888 - RNA, 22 nt, Human
uggcacagaaaaaugcuccauu

SEQ ID NO: 546889 - RNA, 22 nt, Human
guuacaaauguaaauucugggg

SEQ ID NO: 546890 - RNA, 22 nt, Human
ucugaacagaaaagaugcacaa

SEQ ID NO: 546891 - RNA, 22 nt, Human
acaggugugagaacaugccuug

SEQ ID NO: 546892 - RNA, 22 nt, Human
ugcucuggagggugaagcuuuu

SEQ ID NO: 546893 - RNA, 22 nt, Human
aagcccagcugaaagcauuuuu

SEQ ID NO: 546894 - RNA, 22 nt, Human
aggaggaggugggacacaguga

SEQ ID NO: 546895 - RNA, 22 nt, Human
accagagucaauuauuuugcca

SEQ ID NO: 546896 - RNA, 22 nt, Human
gggcacuggaggccaaggagcu

SEQ ID NO: 546897 - RNA, 22 nt, Human
agaucacagagccaagauucca

SEQ ID NO: 546898 - RNA, 22 nt, Human
acugagcugugacaaugcuuaa

SEQ ID NO: 546899 - RNA, 22 nt, Human
gcccagcaccucucucaggguu

SEQ ID NO: 546900 - RNA, 22 nt, Human
accacugggcgggcagccugcu

SEQ ID NO: 546901 - RNA, 22 nt, Human
accugccuaucagcugccugcu

SEQ ID NO: 546902 - RNA, 22 nt, Human
ggcccugagcugaaguacugug

SEQ ID NO: 546903 - RNA, 22 nt, Human
uaagucaguagaacugugguca

SEQ ID NO: 546904 - RNA, 22 nt, Human
gccuuggccuuccuaggccuga

SEQ ID NO: 546905 - RNA, 22 nt, Human
aauuauauuguggugugaaugu

SEQ ID NO: 546906 - RNA, 22 nt, Human
aauacuuugccaaguucgaaga

SEQ ID NO: 546907 - RNA, 20 nt, Human
cuguggcucaugcaucugcc

SEQ ID NO: 546908 - RNA, 22 nt, Human
cuucuggcaaaacaggcagaaa

SEQ ID NO: 546909 - RNA, 22 nt, Human
ucugucauguuuccauuacaug

SEQ ID NO: 546910 - RNA, 22 nt, Human
aaacaaguguaaacuagucugu

SEQ ID NO: 546911 - RNA, 22 nt, Human
aagagguaaccauagcaaccac

SEQ ID NO: 546912 - RNA, 22 nt, Human
aucaguuucacuugcuugcaaa

SEQ ID NO: 546913 - RNA, 22 nt, Human
ugaggcaggagaaucacaugaa

SEQ ID NO: 546914 - RNA, 22 nt, Human
aauuauauguuaaucuucaauu

SEQ ID NO: 546915 - RNA, 22 nt, Human
uccaauauuucucacauaugga

SEQ ID NO: 546916 - RNA, 22 nt, Human
aacauuuaugauugagguaaau

SEQ ID NO: 546917 - RNA, 21 nt, Human
gcagggacaaagcuucaggag

SEQ ID NO: 546918 - RNA, 22 nt, Human
cugcagcuccucucugugcccc

SEQ ID NO: 546919 - RNA, 22 nt, Human
ugagcaggcucccacuucagug

SEQ ID NO: 546920 - RNA, 22 nt, Human
caggcugcagaggccuuucaug

SEQ ID NO: 546921 - RNA, 19 nt, Human
aaggaacccuggguugcuc

SEQ ID NO: 546922 - RNA, 22 nt, Human
gauauauuuggaccagagcauu

SEQ ID NO: 546923 - RNA, 22 nt, Human
uucuggagaugacuuuuagaaa

SEQ ID NO: 546924 - RNA, 22 nt, Human
augaaacugaaggacaaccaga

SEQ ID NO: 546925 - RNA, 22 nt, Human
uacagauacagaucuagauaca

SEQ ID NO: 546926 - RNA, 22 nt, Human
ucuccuuugaaaguuaggacug

SEQ ID NO: 546927 - RNA, 20 nt, Human
agcagcuguguuuucauccu

SEQ ID NO: 546928 - RNA, 22 nt, Human
ccagaggaggggggucuuucug

SEQ ID NO: 546929 - RNA, 22 nt, Human
cccucccaagcacucugacaua

SEQ ID NO: 546930 - RNA, 22 nt, Human
aagagcuggauggaaucuggga

SEQ ID NO: 546931 - RNA, 22 nt, Human
cugggccagauccagccucaca

SEQ ID NO: 546932 - RNA, 22 nt, Human
uuuuaagaaauguaugacuguc

SEQ ID NO: 546933 - RNA, 22 nt, Human
acaguggagcucagaugaaaau

SEQ ID NO: 546934 - RNA, 22 nt, Human
caggccugauacacugaacucu

SEQ ID NO: 546935 - RNA, 22 nt, Human
aucaacauaugcaugggaaagu

SEQ ID NO: 546936 - RNA, 22 nt, Human
ggugcaggacgaaguggggguu

SEQ ID NO: 546937 - RNA, 22 nt, Human
agaagaaaugugaaggccacug

SEQ ID NO: 546938 - RNA, 22 nt, Human
uuucacagcuuccacuuaagga

SEQ ID NO: 546939 - RNA, 22 nt, Human
uuggagcccugaggaucuggau

SEQ ID NO: 546940 - RNA, 22 nt, Human
aucagugcuaaagcaaaugccc

SEQ ID NO: 546941 - RNA, 22 nt, Human
ggaaaucaugggagaguuggaa

SEQ ID NO: 546942 - RNA, 22 nt, Human
acaggcaggcuucggccagagc

SEQ ID NO: 546943 - RNA, 22 nt, Human
uaccugggaagugggaccugag

SEQ ID NO: 546944 - RNA, 22 nt, Human
auguguuaguuugugauuauac

SEQ ID NO: 546945 - RNA, 22 nt, Human
augugaaaauccaauggcagca

SEQ ID NO: 546946 - RNA, 22 nt, Human
uaaguuuuaagcaaucugauaa

SEQ ID NO: 546947 - RNA, 22 nt, Human
aagcaauaagccagauuuggau

SEQ ID NO: 546948 - RNA, 22 nt, Human
cagcugcaugucuguggugguc

SEQ ID NO: 546949 - RNA, 22 nt, Human
cagggcaguuugugccuaugag

SEQ ID NO: 546950 - RNA, 22 nt, Human
aaugcuuuagcagugauuagug

SEQ ID NO: 546951 - RNA, 22 nt, Human
cuugucugugucggauaaaacu

SEQ ID NO: 546952 - RNA, 22 nt, Human
gugcauugcgaugcagacgacc

SEQ ID NO: 546953 - RNA, 20 nt, Human
aaucacaguuaacucuuucu

SEQ ID NO: 546954 - RNA, 22 nt, Human
aacaucuuguacugcacauuuu

SEQ ID NO: 546955 - RNA, 22 nt, Human
uccugucugucuuuggucccuu

SEQ ID NO: 546956 - RNA, 22 nt, Human
aagucagagcaacugagacauu

SEQ ID NO: 546957 - RNA, 22 nt, Human
ucugccuguugagccuaaggcc

SEQ ID NO: 546958 - RNA, 22 nt, Human
acugcuggggcucauucaucuc

SEQ ID NO: 546959 - RNA, 22 nt, Human
ugucuccuacugccuguggauc

SEQ ID NO: 546960 - RNA, 22 nt, Human
uccaauauucauuaaaaugcag

SEQ ID NO: 546961 - RNA, 22 nt, Human
agucagaggaaugggccaggcu

SEQ ID NO: 546962 - RNA, 22 nt, Human
ccagcaugagacgaugaugaag

SEQ ID NO: 546963 - RNA, 22 nt, Human
ucaacauauaggcaaccuguaa

SEQ ID NO: 546964 - RNA, 22 nt, Human
uccaugagggacacuggaugcu

SEQ ID NO: 546965 - RNA, 22 nt, Human
gcccugcuuggucauggccuuc

SEQ ID NO: 546966 - RNA, 22 nt, Human
uguaucuuagugugaaaauauu

SEQ ID NO: 546967 - RNA, 22 nt, Human
gggcgccgugggaaacagccgg

SEQ ID NO: 546968 - RNA, 22 nt, Human
cagugaguucaucaagacauga

SEQ ID NO: 546969 - RNA, 22 nt, Human
uuauaaagauuguuauguaucu

SEQ ID NO: 546970 - RNA, 22 nt, Human
agaaaagguugaaaguaggauu

SEQ ID NO: 546971 - RNA, 22 nt, Human
caagaaaugggauuugacugcc

SEQ ID NO: 546972 - RNA, 22 nt, Human
cuucuuuccuuccuccaguggc

SEQ ID NO: 546973 - RNA, 22 nt, Human
gcagagucugggcuaccucuug

SEQ ID NO: 546974 - RNA, 22 nt, Human
gagcugggucuccaccuuggca

SEQ ID NO: 546975 - RNA, 22 nt, Human
cacaacuuagcagcuugaaaca

SEQ ID NO: 546976 - RNA, 22 nt, Human
caugagugucaucucagcagcu

SEQ ID NO: 546977 - RNA, 22 nt, Human
uuccgcuggggccgccuggcgg

SEQ ID NO: 546978 - RNA, 23 nt, Human
cagaggguuccauggagcauggu

SEQ ID NO: 546979 - RNA, 18 nt, Human
ggcagggaaaagauaggg

SEQ ID NO: 546980 - RNA, 22 nt, Human
uggcagucggacuucuaucuca

SEQ ID NO: 546981 - RNA, 22 nt, Human
ggaggccaucuggcuggaggcu

SEQ ID NO: 546982 - RNA, 22 nt, Human
cuccccacauuucucccugucu

SEQ ID NO: 546983 - RNA, 22 nt, Human
agcuauuucucuuauuauaucc

SEQ ID NO: 546984 - RNA, 22 nt, Human
aaguccaugaucaagauguggc

SEQ ID NO: 546985 - RNA, 22 nt, Human
acauuugucuucuuucagauua

SEQ ID NO: 546986 - RNA, 22 nt, Human
caucuuuguaacuuccacauaa

SEQ ID NO: 546987 - RNA, 22 nt, Human
aaggcucuuggagugaaugcag

SEQ ID NO: 546988 - RNA, 21 nt, Human
ggagggcagcccagacuggcu

SEQ ID NO: 546989 - RNA, 23 nt, Human
aucagucuugguagcugugccca

SEQ ID NO: 546990 - RNA, 22 nt, Human
agcugccaccucugccuuuggg

SEQ ID NO: 546991 - RNA, 22 nt, Human
ugcucagcaaaaagcuugugag

SEQ ID NO: 546992 - RNA, 22 nt, Human
cugcaguguucuggaaugcauu

SEQ ID NO: 546993 - RNA, 22 nt, Human
uuuaauauuucuuuccugaagc

SEQ ID NO: 546994 - RNA, 18 nt, Human
cagcucuucuccaguaac

SEQ ID NO: 546995 - RNA, 22 nt, Human
cuguucugaacugccugcaugc

SEQ ID NO: 546996 - RNA, 18 nt, Human
aucucccauuggccaagg

SEQ ID NO: 546997 - RNA, 22 nt, Human
gauuuuaauuauaggagguccu

SEQ ID NO: 546998 - RNA, 22 nt, Human
ugcaguuugcccuuugcucacu

SEQ ID NO: 546999 - RNA, 22 nt, Human
ugcccuguuccugccuccagcu

SEQ ID NO: 547000 - RNA, 22 nt, Human
gucccagagagcacuaguccau

SEQ ID NO: 547001 - RNA, 22 nt, Human
aauauuuguuaguguuuuaaug

SEQ ID NO: 547002 - RNA, 22 nt, Human
acugccaggauggcacuagagg

SEQ ID NO: 547003 - RNA, 22 nt, Human
caggggcugagaaggaacgucc

SEQ ID NO: 547004 - RNA, 22 nt, Human
uggaggcaugacagugucugga

SEQ ID NO: 547005 - RNA, 22 nt, Human
cuguauuugaaagaaaagauuu

SEQ ID NO: 547006 - RNA, 22 nt, Human
uccucaguauuguggagcagau

SEQ ID NO: 547007 - RNA, 22 nt, Human
caacaacaugggauucauuucu

SEQ ID NO: 547008 - RNA, 22 nt, Human
gauggcagguaguggucucauc

SEQ ID NO: 547009 - RNA, 22 nt, Human
ucccaggcuggggccaggugac

SEQ ID NO: 547010 - RNA, 22 nt, Human
cacagggcaccaguuggccauc

SEQ ID NO: 547011 - RNA, 22 nt, Human
uggcuccuaucaaggagugggu

SEQ ID NO: 547012 - RNA, 22 nt, Human
uugguuccuucugaaaguauug

SEQ ID NO: 547013 - RNA, 22 nt, Human
aggcacuguggguguggccgga

SEQ ID NO: 547014 - RNA, 22 nt, Human
ggcuucugccacgagagggaag

SEQ ID NO: 547015 - RNA, 21 nt, Human
ugacauuuccaauauaaagcc

SEQ ID NO: 547016 - RNA, 22 nt, Human
guuuauuagaguuuucugucug

SEQ ID NO: 547017 - RNA, 23 nt, Human
ggccucagcgcacagaaacugcu

SEQ ID NO: 547018 - RNA, 22 nt, Human
guuugcaaauuauguuaaaagu

SEQ ID NO: 547019 - RNA, 22 nt, Human
ccacugccgugggccuugggga

SEQ ID NO: 547020 - RNA, 22 nt, Human
uucaagauggcaccagugagug

SEQ ID NO: 547021 - RNA, 22 nt, Human
guggucagagaugacagugggu

SEQ ID NO: 547022 - RNA, 22 nt, Human
ugggcacaaacaucugccuguu

SEQ ID NO: 547023 - RNA, 22 nt, Human
cuucaguguugguucauuacga

SEQ ID NO: 547024 - RNA, 22 nt, Human
cuuaaaaucuggcaguuagcua

SEQ ID NO: 547025 - RNA, 23 nt, Human
agaagcagcuucuggaguaucgg

SEQ ID NO: 547026 - RNA, 22 nt, Human
gccagagccggcuucacaggau

SEQ ID NO: 547027 - RNA, 22 nt, Human
gugagcuguuggaguggcagag

SEQ ID NO: 547028 - RNA, 22 nt, Human
uucauuuaaucagaaucucuaa

SEQ ID NO: 547029 - RNA, 22 nt, Human
acugucugcaaaacucauacuc

SEQ ID NO: 547030 - RNA, 22 nt, Human
uaucuucacuuauaucuuucuu

SEQ ID NO: 547031 - RNA, 22 nt, Human
auacaguauuaccuguucagga

SEQ ID NO: 547032 - RNA, 22 nt, Human
agugccuggaccccaugacaua

SEQ ID NO: 547033 - RNA, 22 nt, Human
uacccagcuucaagucaggacu

SEQ ID NO: 547034 - RNA, 22 nt, Human
aguugcuggcaccugugaguau

SEQ ID NO: 547035 - RNA, 22 nt, Human
auggaauuucuccggcuccacc

SEQ ID NO: 547036 - RNA, 22 nt, Human
agucccagaucuacaggaggga

SEQ ID NO: 547037 - RNA, 22 nt, Human
aacaguaacgagauguccuaac

SEQ ID NO: 547038 - RNA, 22 nt, Human
aggucauuggggacuaucuccg

SEQ ID NO: 547039 - RNA, 22 nt, Human
aagcagaugggacuccaaggca

SEQ ID NO: 547040 - RNA, 22 nt, Human
aucaaauuaugugcuacaagaa

SEQ ID NO: 547041 - RNA, 22 nt, Human
gcuucaugggugugcaaccugu

SEQ ID NO: 547042 - RNA, 22 nt, Human
ugugucccuuggaaccucagcu

SEQ ID NO: 547043 - RNA, 21 nt, Human
aggcagcaggauccagggaca

SEQ ID NO: 547044 - RNA, 22 nt, Human
auggauaagaacaaauaucuga

SEQ ID NO: 547045 - RNA, 22 nt, Human
cuguugucccugggagcucagc

SEQ ID NO: 547046 - RNA, 22 nt, Human
ggcggggguccaggagccugca

SEQ ID NO: 547047 - RNA, 22 nt, Human
aaaguguugggauuacaggugu

SEQ ID NO: 547048 - RNA, 22 nt, Human
cugagccacugcuuguucagug

SEQ ID NO: 547049 - RNA, 22 nt, Human
ucccacugugccuguuguaauc

SEQ ID NO: 547050 - RNA, 22 nt, Human
gccugucuacacuuucucugca

SEQ ID NO: 547051 - RNA, 22 nt, Human
cagggcugucuccaaaggcccc

SEQ ID NO: 547052 - RNA, 22 nt, Human
uggcccugacuuggaggccuga

SEQ ID NO: 547053 - RNA, 22 nt, Human
agacucuggagucagcuaggau

SEQ ID NO: 547054 - RNA, 22 nt, Human
cucugcugaucucagcugggcu

SEQ ID NO: 547055 - RNA, 22 nt, Human
cccuggagguggagguugcagg

SEQ ID NO: 547056 - RNA, 22 nt, Human
gaaaguuucuucauuaagaugu

SEQ ID NO: 547057 - RNA, 22 nt, Human
ugcuggcccaguauggacugca

SEQ ID NO: 547058 - RNA, 22 nt, Human
agcagugagugggaggaccaug

SEQ ID NO: 547059 - RNA, 22 nt, Human
cugguucauccccuuccaggaa

SEQ ID NO: 547060 - RNA, 22 nt, Human
ccuguucuguuaauuaaacuuu

SEQ ID NO: 547061 - RNA, 22 nt, Human
ucagaauuuugguuugguuggu

SEQ ID NO: 547062 - RNA, 22 nt, Human
cucugcaaggcccuccaguagc

SEQ ID NO: 547063 - RNA, 22 nt, Human
gaaacccaaacuaagacaguag

SEQ ID NO: 547064 - RNA, 22 nt, Human
acaguucuuaaaacuugaauua

SEQ ID NO: 547065 - RNA, 22 nt, Human
aggcuuaacuuuacuguuaugc

SEQ ID NO: 547066 - RNA, 22 nt, Human
ugccuguguauuuccggccugc

SEQ ID NO: 547067 - RNA, 22 nt, Human
cagcagaacaggcagggaagcu

SEQ ID NO: 547068 - RNA, 22 nt, Human
guauuuauaggggaaugagagu

SEQ ID NO: 547069 - RNA, 22 nt, Human
guuuuucuaaguagcgauauuu

SEQ ID NO: 547070 - RNA, 22 nt, Human
guccucuguuuccaucugacuu

SEQ ID NO: 547071 - RNA, 22 nt, Human
ugucuuuauauauuuggaaaau

SEQ ID NO: 547072 - RNA, 22 nt, Human
uuguaaacuuguuugaagguau

SEQ ID NO: 547073 - RNA, 22 nt, Human
augcacaauguuuugauuugag

SEQ ID NO: 547074 - RNA, 20 nt, Human
acagauauuugauuuucagu

SEQ ID NO: 547075 - RNA, 22 nt, Human
aaagaccugaaauauaaucuag

SEQ ID NO: 547076 - RNA, 22 nt, Human
uaagucauaagucaacaaagga

SEQ ID NO: 547077 - RNA, 22 nt, Human
gccuucagcggccgcucgcugc

SEQ ID NO: 547078 - RNA, 22 nt, Human
ugcagggcuuccucuuggaguu

SEQ ID NO: 547079 - RNA, 18 nt, Human
gaagggagcuggaaugca

SEQ ID NO: 547080 - RNA, 22 nt, Human
uccccucuggaggcugcagggg

SEQ ID NO: 547081 - RNA, 20 nt, Human
ucacaggggaccaggagcag

SEQ ID NO: 547082 - RNA, 22 nt, Human
caggcagaaauuuuguuucauu

SEQ ID NO: 547083 - RNA, 22 nt, Human
ccacaggaccagaggagaucac

SEQ ID NO: 547084 - RNA, 22 nt, Human
aggcuggggaauugaauuugcu

SEQ ID NO: 547085 - RNA, 22 nt, Human
ugcagccaggaaauauuugcug

SEQ ID NO: 547086 - RNA, 22 nt, Human
gcagagccaggagagacccuug

SEQ ID NO: 547087 - RNA, 22 nt, Human
ccagcccuugaggucuguccau

SEQ ID NO: 547088 - RNA, 22 nt, Human
aggaauauggauuugcucagcu

SEQ ID NO: 547089 - RNA, 22 nt, Human
gucucagaguccuacuuauucc

SEQ ID NO: 547090 - RNA, 22 nt, Human
guggcccaggcuuggcgcuggc

SEQ ID NO: 547091 - RNA, 20 nt, Human
cccugagacaaaggaggggc

SEQ ID NO: 547092 - RNA, 22 nt, Human
agggccugacacccuugccagc

SEQ ID NO: 547093 - RNA, 22 nt, Human
cuuggacuuuagucucucucca

SEQ ID NO: 547094 - RNA, 22 nt, Human
agaaaccuggggguuguacaua

SEQ ID NO: 547095 - RNA, 18 nt, Human
cagggcuguggggucacu

SEQ ID NO: 547096 - RNA, 22 nt, Human
guacaaaguggaccugauagua

SEQ ID NO: 547097 - RNA, 22 nt, Human
cuacuucugugaugaaacuaca

SEQ ID NO: 547098 - RNA, 22 nt, Human
aaaaucuaaguagcgaguaagg

SEQ ID NO: 547099 - RNA, 22 nt, Human
augaaacucuagcuuucagcac

SEQ ID NO: 547100 - RNA, 22 nt, Human
ccagcuggugacauccccaacc

SEQ ID NO: 547101 - RNA, 21 nt, Human
agcugagguaaggcaagagag

SEQ ID NO: 547102 - RNA, 21 nt, Human
agccugcaauguagguaccgg

SEQ ID NO: 547103 - RNA, 22 nt, Human
aauagauucaugguuaagagca

SEQ ID NO: 547104 - RNA, 22 nt, Human
gagcuuuaccuuagguucuguu

SEQ ID NO: 547105 - RNA, 22 nt, Human
acagggucaagggugcuacaag

SEQ ID NO: 547106 - RNA, 22 nt, Human
aaagauuugaaauuaggcauca

SEQ ID NO: 547107 - RNA, 22 nt, Human
uuuugaaagggugauuuggcuu

SEQ ID NO: 547108 - RNA, 20 nt, Human
aggaaaaggguggugguaga

SEQ ID NO: 547109 - RNA, 22 nt, Human
caucugccuaaguggcccuguu

SEQ ID NO: 547110 - RNA, 22 nt, Human
aauguuugcaucuauucacaug

SEQ ID NO: 547111 - RNA, 22 nt, Human
uacaaaguuuucuuggauugag

SEQ ID NO: 547112 - RNA, 22 nt, Human
uugaaaacuuucuagaccaaga

SEQ ID NO: 547113 - RNA, 22 nt, Human
cacccaggacaggccagaugug

SEQ ID NO: 547114 - RNA, 21 nt, Human
gggcucuccugaggccaugaa

SEQ ID NO: 547115 - RNA, 22 nt, Human
caugcagugacucagacacagg

SEQ ID NO: 547116 - RNA, 22 nt, Human
ccuggcagcgccgaagcuggcc

SEQ ID NO: 547117 - RNA, 22 nt, Human
uggaagcacuuggguuuuguug

SEQ ID NO: 547118 - RNA, 22 nt, Human
acagucauagcagccuuuguua

SEQ ID NO: 547119 - RNA, 22 nt, Human
uuugaaagucaaccuuccaguu

SEQ ID NO: 547120 - RNA, 22 nt, Human
aggaauucaagaccagcugggc

SEQ ID NO: 547121 - RNA, 22 nt, Human
uuccucagagagacagaaacua

SEQ ID NO: 547122 - RNA, 19 nt, Human
ggcggguggacuggagccc

SEQ ID NO: 547123 - RNA, 22 nt, Human
guuaauuuaguagaguccagau

SEQ ID NO: 547124 - RNA, 22 nt, Human
ggcagguggcacugcugcuccc

SEQ ID NO: 547125 - RNA, 22 nt, Human
uugcaagacacuuggaagcaca

SEQ ID NO: 547126 - RNA, 22 nt, Human
cuguauaugugcauacacacac

SEQ ID NO: 547127 - RNA, 22 nt, Human
gagcuagaauuaggccaauuuc

SEQ ID NO: 547128 - RNA, 22 nt, Human
cauacauugcucauucaguauc

SEQ ID NO: 547129 - RNA, 22 nt, Human
uugaauucauuucucauugagu

SEQ ID NO: 547130 - RNA, 22 nt, Human
gaaacuuucaugaauauaagau

SEQ ID NO: 547131 - RNA, 22 nt, Human
gcauuuuauaaagaguuauuug

SEQ ID NO: 547132 - RNA, 22 nt, Human
aggcucagggacggggccccuu

SEQ ID NO: 547133 - RNA, 22 nt, Human
gcugccugauguccagcaggac

SEQ ID NO: 547134 - RNA, 21 nt, Human
ucucugguuggaguugugcca

SEQ ID NO: 547135 - RNA, 22 nt, Human
ccaaggaggccccaggucagcu

SEQ ID NO: 547136 - RNA, 22 nt, Human
uguacacaauucuuaacauaca

SEQ ID NO: 547137 - RNA, 22 nt, Human
cuccuucaaaagucauaguaaa

SEQ ID NO: 547138 - RNA, 22 nt, Human
gaaggcaggcuucugauuaggu

SEQ ID NO: 547139 - RNA, 22 nt, Human
agccagcaggugagugcagccu

SEQ ID NO: 547140 - RNA, 22 nt, Human
cugcuuugauuagaagaguaca

SEQ ID NO: 547141 - RNA, 22 nt, Human
uuaccaaaucccgugcacauuc

SEQ ID NO: 547142 - RNA, 22 nt, Human
uaacauuucggugacaguggga

SEQ ID NO: 547143 - RNA, 22 nt, Human
aacaaauuaguugcaagacugg

SEQ ID NO: 547144 - RNA, 22 nt, Human
guagaaaugguguguuucuucu

SEQ ID NO: 547145 - RNA, 22 nt, Human
ucccuggggauguuggccugcc

SEQ ID NO: 547146 - RNA, 22 nt, Human
guacaugucaaaaaaugcauaa

SEQ ID NO: 547147 - RNA, 22 nt, Human
aaggacagaaacagauugcugg

SEQ ID NO: 547148 - RNA, 22 nt, Human
aagauucuugacuagaaugauu

SEQ ID NO: 547149 - RNA, 22 nt, Human
acaaaguuucuucuaacaucug

SEQ ID NO: 547150 - RNA, 22 nt, Human
uugaucauuuuucugguaaaau

SEQ ID NO: 547151 - RNA, 23 nt, Human
auuugacagagcauagcauuucu

SEQ ID NO: 547152 - RNA, 19 nt, Human
ccugugacuaucuuuguaa

SEQ ID NO: 547153 - RNA, 19 nt, Human
cugugcaggccgggcugag

SEQ ID NO: 547154 - RNA, 22 nt, Human
ucugcucuaguugcuuccugcc

SEQ ID NO: 547155 - RNA, 22 nt, Human
uuggcuuccaggaucucagcag

SEQ ID NO: 547156 - RNA, 22 nt, Human
caggcugcggucggcucugguc

SEQ ID NO: 547157 - RNA, 22 nt, Human
ucuucauggucugguucuccag

SEQ ID NO: 547158 - RNA, 20 nt, Human
aggcugaguucuaugcacuu

SEQ ID NO: 547159 - RNA, 22 nt, Human
aagcaaagaguuuaguggguga

SEQ ID NO: 547160 - RNA, 22 nt, Human
gcuccagcucguggcucccagc

SEQ ID NO: 547161 - RNA, 22 nt, Human
auggaaaggcuguggaaacuua

SEQ ID NO: 547162 - RNA, 22 nt, Human
aaugucuucaguucuguauugu

SEQ ID NO: 547163 - RNA, 22 nt, Human
uccugcaggcuugaguccucag

SEQ ID NO: 547164 - RNA, 22 nt, Human
agcagcuccugccaugagugcu

SEQ ID NO: 547165 - RNA, 22 nt, Human
agcugcaguaaagcucuccagg

SEQ ID NO: 547166 - RNA, 22 nt, Human
uuguaaacugcugcaggagugc

SEQ ID NO: 547167 - RNA, 22 nt, Human
aaaugcacugaauauuccaaau

SEQ ID NO: 547168 - RNA, 22 nt, Human
ugcaggugcagcgauacuguga

SEQ ID NO: 547169 - RNA, 22 nt, Human
ccaucagcuccaguaucuucug

SEQ ID NO: 547170 - RNA, 22 nt, Human
aauuauauugaaguugaauguc

SEQ ID NO: 547171 - RNA, 22 nt, Human
aagggcagcuauuaucgucauc

SEQ ID NO: 547172 - RNA, 22 nt, Human
cccaggcauuuucaacuuuagu

SEQ ID NO: 547173 - RNA, 20 nt, Human
caggaugauuggacacgaug

SEQ ID NO: 547174 - RNA, 22 nt, Human
ggaagagccuggggugucaggc

SEQ ID NO: 547175 - RNA, 22 nt, Human
aauuucagaccauuugcaauua

SEQ ID NO: 547176 - RNA, 22 nt, Human
augcuuuguuuaaagauuuuca

SEQ ID NO: 547177 - RNA, 22 nt, Human
aacaaaguuucaggaagauaga

SEQ ID NO: 547178 - RNA, 22 nt, Human
ucaguguuggcauucagaaaug

SEQ ID NO: 547179 - RNA, 22 nt, Human
cugggagagaagcgaagcuggg

SEQ ID NO: 547180 - RNA, 22 nt, Human
ggucuuccgagaggccugugcu

SEQ ID NO: 547181 - RNA, 22 nt, Human
auauuucaugggguuccauacu

SEQ ID NO: 547182 - RNA, 22 nt, Human
gccagcuggcugcaggucccag

SEQ ID NO: 547183 - RNA, 22 nt, Human
aggaggggcaaugauagucugg

SEQ ID NO: 547184 - RNA, 22 nt, Human
uccaggaggugaggggaccaaa

SEQ ID NO: 547185 - RNA, 22 nt, Human
aggauccuuuggccacuucuua

SEQ ID NO: 547186 - RNA, 22 nt, Human
ugagcagggacuuugaguguag

SEQ ID NO: 547187 - RNA, 22 nt, Human
aggucucugaguacugcuggac

SEQ ID NO: 547188 - RNA, 22 nt, Human
ggcuggcauccagggaaaucca

SEQ ID NO: 547189 - RNA, 22 nt, Human
aucuucuauagauauucugaag

SEQ ID NO: 547190 - RNA, 22 nt, Human
ucaccaggcaacuauguacucc

SEQ ID NO: 547191 - RNA, 22 nt, Human
uaugcauaauuggauaaguaga

SEQ ID NO: 547192 - RNA, 22 nt, Human
gcuuuucuauaagaacuuucaa

SEQ ID NO: 547193 - RNA, 22 nt, Human
agcagggcccacuaggggagau

SEQ ID NO: 547194 - RNA, 22 nt, Human
cuggagccggcgagccccagcc

SEQ ID NO: 547195 - RNA, 23 nt, Human
cuuuucauugccuuagcgcagag

SEQ ID NO: 547196 - RNA, 22 nt, Human
aaggaaaggaugagcaugcauu

SEQ ID NO: 547197 - RNA, 22 nt, Human
agaauaguggcaaugacugcac

SEQ ID NO: 547198 - RNA, 22 nt, Human
uggaaugaauauguuuuaagga

SEQ ID NO: 547199 - RNA, 22 nt, Human
ccucacagcuugggcaaacggc

SEQ ID NO: 547200 - RNA, 22 nt, Human
cucucuggaagggggagcugau

SEQ ID NO: 547201 - RNA, 22 nt, Human
auaauaacaccugaauaggaaa

SEQ ID NO: 547202 - RNA, 22 nt, Human
aaauuauucucauguguuucuu

SEQ ID NO: 547203 - RNA, 22 nt, Human
cugccuagaaaaccaggcuccu

SEQ ID NO: 547204 - RNA, 22 nt, Human
acccuggagguggaggugcagu

SEQ ID NO: 547205 - RNA, 22 nt, Human
uacauugugauguuucaauaca

SEQ ID NO: 547206 - RNA, 22 nt, Human
agucagcacuccugaggaucac

SEQ ID NO: 547207 - RNA, 22 nt, Human
acugucucucuagcaguucagg

SEQ ID NO: 547208 - RNA, 22 nt, Human
uuuguuaaaaugcagauucugu

SEQ ID NO: 547209 - RNA, 21 nt, Human
cccaggucguggucuucccag

SEQ ID NO: 547210 - RNA, 19 nt, Human
cacacccaugcuugccaag

SEQ ID NO: 547211 - RNA, 22 nt, Human
aucauucagccuaagcaaguac

SEQ ID NO: 547212 - RNA, 20 nt, Human
ucugggcagggcacauggaa

SEQ ID NO: 547213 - RNA, 22 nt, Human
ccuccugggcuccugucugcac

SEQ ID NO: 547214 - RNA, 22 nt, Human
aggccugaggaccagauaaaug

SEQ ID NO: 547215 - RNA, 18 nt, Human
ucugggcuucccgaggcu

SEQ ID NO: 547216 - RNA, 21 nt, Human
cucuuuguggcaauguauuuu

SEQ ID NO: 547217 - RNA, 22 nt, Human
gauaauauuagaagauacaaau

SEQ ID NO: 547218 - RNA, 22 nt, Human
gauuucuguugagaaacauggg

SEQ ID NO: 547219 - RNA, 22 nt, Human
acucuucauucaaguaugcaaa

SEQ ID NO: 547220 - RNA, 22 nt, Human
aauguuacgaucaacaacacau

SEQ ID NO: 547221 - RNA, 22 nt, Human
uccagaaaaaguaauuuauuug

SEQ ID NO: 547222 - RNA, 22 nt, Human
ccuuuucuauguaccagcagug

SEQ ID NO: 547223 - RNA, 22 nt, Human
uguuuaagcugaugagguaucg

SEQ ID NO: 547224 - RNA, 22 nt, Human
caguccaggccuggaggagcca

SEQ ID NO: 547225 - RNA, 21 nt, Human
uucuucaugaugauuaauggc

SEQ ID NO: 547226 - RNA, 22 nt, Human
gcugucacacaugggaucucag

SEQ ID NO: 547227 - RNA, 22 nt, Human
gcucucugguuccagucaggaa

SEQ ID NO: 547228 - RNA, 22 nt, Human
uucaucaucuacaaccaggacc

SEQ ID NO: 547229 - RNA, 22 nt, Human
ggagcagacauaaccuuacaga

SEQ ID NO: 547230 - RNA, 22 nt, Human
agcugauuccacuuuuucccca

SEQ ID NO: 547231 - RNA, 22 nt, Human
auaauggccgggggcugaaugc

SEQ ID NO: 547232 - RNA, 22 nt, Human
acguuuucagugacugugcuuc

SEQ ID NO: 547233 - RNA, 22 nt, Human
aucaauaucagaucagacagga

SEQ ID NO: 547234 - RNA, 22 nt, Human
uucaaacaggggucagggagau

SEQ ID NO: 547235 - RNA, 22 nt, Human
uugcaucuagggcaacccagag

SEQ ID NO: 547236 - RNA, 22 nt, Human
ccaggcugcuguugguguccgc

SEQ ID NO: 547237 - RNA, 23 nt, Human
ccuggcagcaaacgaggagguua

SEQ ID NO: 547238 - RNA, 22 nt, Human
ucagaaaucuugucaaggcauc

SEQ ID NO: 547239 - RNA, 22 nt, Human
auacaaaguauugauccugagu

SEQ ID NO: 547240 - RNA, 22 nt, Human
gaagcaaaaugucugcacauau

SEQ ID NO: 547241 - RNA, 22 nt, Human
guacauuggcaacucucuuaga

SEQ ID NO: 547242 - RNA, 22 nt, Human
cuguggcauugugaggacugca

SEQ ID NO: 547243 - RNA, 22 nt, Human
acacacagcgccuaccaugugc

SEQ ID NO: 547244 - RNA, 18 nt, Human
uucaucaugacucugugg

SEQ ID NO: 547245 - RNA, 23 nt, Human
aggcgagcucuucuccagcacgu

SEQ ID NO: 547246 - RNA, 19 nt, Human
ucccaggaagcaaauguca

SEQ ID NO: 547247 - RNA, 22 nt, Human
uugcccugcggguccugcgcaa

SEQ ID NO: 547248 - RNA, 22 nt, Human
ccugggagguggagguugcagc

SEQ ID NO: 547249 - RNA, 22 nt, Human
agguaaaauagauaguauuucu

SEQ ID NO: 547250 - RNA, 22 nt, Human
uggcaauaaagaccaacagguu

SEQ ID NO: 547251 - RNA, 22 nt, Human
ugcauauacccgcauuuacaua

SEQ ID NO: 547252 - RNA, 22 nt, Human
caggacugauguuccuccagcc

SEQ ID NO: 547253 - RNA, 22 nt, Human
uaccugcagcgggaauccauua

SEQ ID NO: 547254 - RNA, 22 nt, Human
ugggggcugugcacaggcucac

SEQ ID NO: 547255 - RNA, 22 nt, Human
gugccaaaagcuauaauuuggu

SEQ ID NO: 547256 - RNA, 22 nt, Human
ucucagaggucuucagccucug

SEQ ID NO: 547257 - RNA, 22 nt, Human
ggaagccccagacccagagucu

SEQ ID NO: 547258 - RNA, 22 nt, Human
ugggcugaaaugcuguggacua

SEQ ID NO: 547259 - RNA, 22 nt, Human
uaugcacauucacacaaaaaug

SEQ ID NO: 547260 - RNA, 22 nt, Human
ugucucugauaaguaguucagu

SEQ ID NO: 547261 - RNA, 22 nt, Human
ggagccaguuuagaccucaguu

SEQ ID NO: 547262 - RNA, 22 nt, Human
gccugggugucgaucacuagug

SEQ ID NO: 547263 - RNA, 22 nt, Human
ugcugaggucaccuugcugcua

SEQ ID NO: 547264 - RNA, 22 nt, Human
caggcugauuaggccucgucca

SEQ ID NO: 547265 - RNA, 22 nt, Human
acagauggugagccgcugaugu

SEQ ID NO: 547266 - RNA, 22 nt, Human
auguaucaugcaggguccauga

SEQ ID NO: 547267 - RNA, 22 nt, Human
gcaaaguauuaaguauuaaguu

SEQ ID NO: 547268 - RNA, 22 nt, Human
cuuauacacccucuucccaggc

SEQ ID NO: 547269 - RNA, 22 nt, Human
guggccugaugccagcccugug

SEQ ID NO: 547270 - RNA, 22 nt, Human
caaaguuuuaguaaacauauau

SEQ ID NO: 547271 - RNA, 22 nt, Human
ugcaguuuuggccauugaaggc

SEQ ID NO: 547272 - RNA, 22 nt, Human
cacagcuaugagcagccuagcu

SEQ ID NO: 547273 - RNA, 22 nt, Human
ugcccugcaugcagggagcugu

SEQ ID NO: 547274 - RNA, 22 nt, Human
guuucuuaaaagaggaguuaga

SEQ ID NO: 547275 - RNA, 22 nt, Human
aaagaacaaauuagcuguuuua

SEQ ID NO: 547276 - RNA, 22 nt, Human
gugggccugaugcugccaugag

SEQ ID NO: 547277 - RNA, 21 nt, Human
agguggggcugcaccucugcu

SEQ ID NO: 547278 - RNA, 22 nt, Human
agugaccaaucaugguuagauu

SEQ ID NO: 547279 - RNA, 20 nt, Human
acugagcugcauggagagga

SEQ ID NO: 547280 - RNA, 19 nt, Human
uugguucauggaugcccaa

SEQ ID NO: 547281 - RNA, 22 nt, Human
gaauguuuuuauaaguguuaca

SEQ ID NO: 547282 - RNA, 22 nt, Human
aaagacaguggauucaaaaucc

SEQ ID NO: 547283 - RNA, 22 nt, Human
ggcacugagcugccuuggggca

SEQ ID NO: 547284 - RNA, 22 nt, Human
caggacauugauccauuggcac

SEQ ID NO: 547285 - RNA, 22 nt, Human
ugucucagaguaucccugaacu

SEQ ID NO: 547286 - RNA, 23 nt, Human
ucaauuaucaauggaaagaaguu

SEQ ID NO: 547287 - RNA, 22 nt, Human
ggagccagaaaugcugugguug

SEQ ID NO: 547288 - RNA, 22 nt, Human
agagcuggggccagagucaagg

SEQ ID NO: 547289 - RNA, 22 nt, Human
ugcaagagacauggguugugug

SEQ ID NO: 547290 - RNA, 22 nt, Human
agcucccagcuccuuugagaga

SEQ ID NO: 547291 - RNA, 22 nt, Human
agcagaugagccucaugacugg

SEQ ID NO: 547292 - RNA, 22 nt, Human
cucugagcccgcugcagcccca

SEQ ID NO: 547293 - RNA, 20 nt, Human
cuugccaguucccuggcaga

SEQ ID NO: 547294 - RNA, 23 nt, Human
gcagaggagcaagcuggacacca

SEQ ID NO: 547295 - RNA, 22 nt, Human
aauaaacaaauccuuccuuccc

SEQ ID NO: 547296 - RNA, 22 nt, Human
uucauuuguaacucuguuaggg

SEQ ID NO: 547297 - RNA, 22 nt, Human
ugcauuuuuaacaaggcuaauu

SEQ ID NO: 547298 - RNA, 22 nt, Human
uguucuugggaaucuuacaguu

SEQ ID NO: 547299 - RNA, 22 nt, Human
ccagggcagggaccacgugucu

SEQ ID NO: 547300 - RNA, 22 nt, Human
acugggcucauaaugucauaga

SEQ ID NO: 547301 - RNA, 22 nt, Human
ggcagauggagaagcagcaggu

SEQ ID NO: 547302 - RNA, 22 nt, Human
aggagucauaaaugugaacaaa

SEQ ID NO: 547303 - RNA, 22 nt, Human
caguuacauauuuaguagguua

SEQ ID NO: 547304 - RNA, 22 nt, Human
uuuuccucaggaaugcuaagcu

SEQ ID NO: 547305 - RNA, 22 nt, Human
aauguugagcuugaaaguaggu

SEQ ID NO: 547306 - RNA, 22 nt, Human
aagagggguggucugugaggau

SEQ ID NO: 547307 - RNA, 22 nt, Human
ucccacacuugaaacaaggcug

SEQ ID NO: 547308 - RNA, 22 nt, Human
cacagcuagauggauagauaga

SEQ ID NO: 547309 - RNA, 22 nt, Human
ugggaauacaaguuauucaccu

SEQ ID NO: 547310 - RNA, 22 nt, Human
ggagaugccagaauugcaaauu

SEQ ID NO: 547311 - RNA, 19 nt, Human
ucuaacagaagugucgucc

SEQ ID NO: 547312 - RNA, 22 nt, Human
aguggcuuggcugcacuacagg

SEQ ID NO: 547313 - RNA, 22 nt, Human
aaacaugagcacuugcuucaua

SEQ ID NO: 547314 - RNA, 22 nt, Human
auaaaguuuaaaagucaauagu

SEQ ID NO: 547315 - RNA, 22 nt, Human
auguuugugggauaaacaaaug

SEQ ID NO: 547316 - RNA, 22 nt, Human
uggcagagguauauugggagga

SEQ ID NO: 547317 - RNA, 22 nt, Human
ucacaaauauuuuaacaguagg

SEQ ID NO: 547318 - RNA, 22 nt, Human
ucuuuggauaucgcuagaccgu

SEQ ID NO: 547319 - RNA, 22 nt, Human
acuuuguuguuccuugucuaaa

SEQ ID NO: 547320 - RNA, 22 nt, Human
guguacauauugagucugcuga

SEQ ID NO: 547321 - RNA, 19 nt, Human
agcauccagucaugggauc

SEQ ID NO: 547322 - RNA, 22 nt, Human
ucugaaauacugcagguucucu

SEQ ID NO: 547323 - RNA, 22 nt, Human
aaaaaauuaucauaguuccuga

SEQ ID NO: 547324 - RNA, 22 nt, Human
agcaccuggucuccuggcgcug

SEQ ID NO: 547325 - RNA, 22 nt, Human
uaacagaauuugcuaaacuccg

SEQ ID NO: 547326 - RNA, 22 nt, Human
gcccggcagucacacacccagg

SEQ ID NO: 547327 - RNA, 22 nt, Human
aacauaaauuugaaguggcaaa

SEQ ID NO: 547328 - RNA, 22 nt, Human
gggcucuguguucuagcucucg

SEQ ID NO: 547329 - RNA, 22 nt, Human
ccacagggucagccacucugca

SEQ ID NO: 547330 - RNA, 22 nt, Human
ggcugccucaaagcucaagcuc

SEQ ID NO: 547331 - RNA, 22 nt, Human
ccaggccucaccugcccaccua

SEQ ID NO: 547332 - RNA, 22 nt, Human
cagagagagucaaaucuuugcu

SEQ ID NO: 547333 - RNA, 22 nt, Human
aauuugcaugaugagaacaaua

SEQ ID NO: 547334 - RNA, 22 nt, Human
ccaggcaucacgggcauguggc

SEQ ID NO: 547335 - RNA, 22 nt, Human
agcagggaggcggugugcuggc

SEQ ID NO: 547336 - RNA, 22 nt, Human
cuguuucaauuugaggaucagc

SEQ ID NO: 547337 - RNA, 22 nt, Human
agucaguguucuccggagaggc

SEQ ID NO: 547338 - RNA, 22 nt, Human
ucuuugcaugcauuuucccuua

SEQ ID NO: 547339 - RNA, 22 nt, Human
acugucagggaucaugaaagcu

SEQ ID NO: 547340 - RNA, 22 nt, Human
agcagccaauuggaggaugaag

SEQ ID NO: 547341 - RNA, 22 nt, Human
uucuuucugggguccuucggcu

SEQ ID NO: 547342 - RNA, 22 nt, Human
ucuuccuaguuacauaugcaca

SEQ ID NO: 547343 - RNA, 22 nt, Human
cuugcucacaguaccuggcuug

SEQ ID NO: 547344 - RNA, 22 nt, Human
cuacauaaauauuuaugugucu

SEQ ID NO: 547345 - RNA, 21 nt, Human
aauuacagauggaauuacaga

SEQ ID NO: 547346 - RNA, 22 nt, Human
uacauguuuacuccaagucagg

SEQ ID NO: 547347 - RNA, 22 nt, Human
aaggcucuggguuucauaggug

SEQ ID NO: 547348 - RNA, 22 nt, Human
acacauuuauggaucgcagaaa

SEQ ID NO: 547349 - RNA, 22 nt, Human
ucauugcauuuauucacuggca

SEQ ID NO: 547350 - RNA, 22 nt, Human
ugcagggcuccuggcuccaauc

SEQ ID NO: 547351 - RNA, 22 nt, Human
gagugcagaugaacagaagauu

SEQ ID NO: 547352 - RNA, 22 nt, Human
aagcaaggcccagagcaucagc

SEQ ID NO: 547353 - RNA, 22 nt, Human
agcuucucaggagucugaggca

SEQ ID NO: 547354 - RNA, 22 nt, Human
gagaccucuugguaucgcuagg

SEQ ID NO: 547355 - RNA, 22 nt, Human
aaggaaccauuugugugcaugg

SEQ ID NO: 547356 - RNA, 22 nt, Human
ucauuucaguggcacagaagau

SEQ ID NO: 547357 - RNA, 22 nt, Human
acacagggaggaggugcugugc

SEQ ID NO: 547358 - RNA, 21 nt, Human
gggcucaguggaaaagagugu

SEQ ID NO: 547359 - RNA, 17 nt, Human
ccugccugagccauagc

SEQ ID NO: 547360 - RNA, 22 nt, Human
ggaggggcagccauggaacucc

SEQ ID NO: 547361 - RNA, 22 nt, Human
uugaagauggaucgccacucuc

SEQ ID NO: 547362 - RNA, 22 nt, Human
aaauguguguauguacauauau

SEQ ID NO: 547363 - RNA, 22 nt, Human
gggccuccgugugcuggugcuc

SEQ ID NO: 547364 - RNA, 20 nt, Human
caugccugcugguaucuggc

SEQ ID NO: 547365 - RNA, 22 nt, Human
agccagagagccccagguucua

SEQ ID NO: 547366 - RNA, 23 nt, Human
agccagggcacugguggagauug

SEQ ID NO: 547367 - RNA, 22 nt, Human
ccagagcugauuccugggacuu

SEQ ID NO: 547368 - RNA, 15 nt, Human
ugauuuccuacuaac

SEQ ID NO: 547369 - RNA, 22 nt, Human
agaaagcuggagucaagcagag

SEQ ID NO: 547370 - RNA, 22 nt, Human
auucacaauuagaaguagauaa

SEQ ID NO: 547371 - RNA, 22 nt, Human
gcugcuggaugcgcuugauggu

SEQ ID NO: 547372 - RNA, 22 nt, Human
cagagccagcuguccuuggcau

SEQ ID NO: 547373 - RNA, 22 nt, Human
agaaaucauucccaaacccaua

SEQ ID NO: 547374 - RNA, 17 nt, Human
uugggagagaaagguau

SEQ ID NO: 547375 - RNA, 22 nt, Human
uagaggcauuaaugaauaaaca

SEQ ID NO: 547376 - RNA, 16 nt, Human
gaggggagcaguaggc

SEQ ID NO: 547377 - RNA, 22 nt, Human
ucucagagaggggccgggccuu

SEQ ID NO: 547378 - RNA, 23 nt, Human
aacagccaacuuuagcggguggc

SEQ ID NO: 547379 - RNA, 22 nt, Human
uagauggcaccuucuguguguc

SEQ ID NO: 547380 - RNA, 22 nt, Human
gagcaggaacagaucccuugga

SEQ ID NO: 547381 - RNA, 22 nt, Human
agguggccggugccagccgggc

SEQ ID NO: 547382 - RNA, 22 nt, Human
uagcagagcugcaauauagacc

SEQ ID NO: 547383 - RNA, 22 nt, Human
gaccaccagagguccgugggua

SEQ ID NO: 547384 - RNA, 22 nt, Human
augagacaggacuguaugcagg

SEQ ID NO: 547385 - RNA, 22 nt, Human
uauuuagaaugcguguacgugu

SEQ ID NO: 547386 - RNA, 22 nt, Human
aacauuuacaaauccuucugca

SEQ ID NO: 547387 - RNA, 22 nt, Human
uggccuuguguuuaagcaagaa

SEQ ID NO: 547388 - RNA, 22 nt, Human
aaguccuuggagaauagaaagg

SEQ ID NO: 547389 - RNA, 22 nt, Human
ccaggcucacugacuaccacau

SEQ ID NO: 547390 - RNA, 22 nt, Human
acagaauaguagcuuaaaguca

SEQ ID NO: 547391 - RNA, 22 nt, Human
ccagccuggagggcaguggugg

SEQ ID NO: 547392 - RNA, 22 nt, Human
gcccagaaguugaggcugcagu

SEQ ID NO: 547393 - RNA, 18 nt, Human
ugagagugugugcucuug

SEQ ID NO: 547394 - RNA, 22 nt, Human
ucugggccucaguuucuucauc

SEQ ID NO: 547395 - RNA, 22 nt, Human
acagaauauuguaagugccacu

SEQ ID NO: 547396 - RNA, 22 nt, Human
ccagcccucacugaggccucuc

SEQ ID NO: 547397 - RNA, 22 nt, Human
caggccuggagugcaauggcac

SEQ ID NO: 547398 - RNA, 22 nt, Human
ucuuugaaagcuguucuagagu

SEQ ID NO: 547399 - RNA, 22 nt, Human
cucaugauguagcgaaugagaa

SEQ ID NO: 547400 - RNA, 22 nt, Human
uuauuuguggcauccauguugg

SEQ ID NO: 547401 - RNA, 19 nt, Human
gggcuccuugggccucucu

SEQ ID NO: 547402 - RNA, 22 nt, Human
cauuagggucucucagcugaau

SEQ ID NO: 547403 - RNA, 23 nt, Human
aguguuaaauuucgcaccuaaau

SEQ ID NO: 547404 - RNA, 22 nt, Human
ggagacaguauggcuuguagcu

SEQ ID NO: 547405 - RNA, 21 nt, Human
cuguccaguaauuccuggcac

SEQ ID NO: 547406 - RNA, 22 nt, Human
gagaaagaugaagaguggcguu

SEQ ID NO: 547407 - RNA, 22 nt, Human
uucagcuaugcgcuuugggcaa

SEQ ID NO: 547408 - RNA, 22 nt, Human
augguucauauuaugcaucuga

SEQ ID NO: 547409 - RNA, 22 nt, Human
acauuugagcauauuucuuguc

SEQ ID NO: 547410 - RNA, 22 nt, Human
ucagaacuuaaagccgauuggg

SEQ ID NO: 547411 - RNA, 18 nt, Human
ucuaggagaguaccuacc

SEQ ID NO: 547412 - RNA, 22 nt, Human
uaucuguuccaggcacucagcu

SEQ ID NO: 547413 - RNA, 22 nt, Human
aucauuccacauguaccacuag

SEQ ID NO: 547414 - RNA, 22 nt, Human
acacuaaucuuuuauuugguuu

SEQ ID NO: 547415 - RNA, 22 nt, Human
uugggggcauauugaguagugg

SEQ ID NO: 547416 - RNA, 22 nt, Human
aaauauuagggagaacagggac

SEQ ID NO: 547417 - RNA, 22 nt, Human
gagccagccuucuucugagguc

SEQ ID NO: 547418 - RNA, 22 nt, Human
cuaugaccccagcaugaauaag

SEQ ID NO: 547419 - RNA, 22 nt, Human
gaggaacccaagcucaccguca

SEQ ID NO: 547420 - RNA, 22 nt, Human
uggcuggcuagugggcaggauu

SEQ ID NO: 547421 - RNA, 23 nt, Human
cacaccaggagccgucugggcca

SEQ ID NO: 547422 - RNA, 22 nt, Human
ugucucagaggcaggaagagcc

SEQ ID NO: 547423 - RNA, 22 nt, Human
cccucccagaugggcuugaggu

SEQ ID NO: 547424 - RNA, 22 nt, Human
ucuccuggaagaauaccacacu

SEQ ID NO: 547425 - RNA, 22 nt, Human
gcacccagaggucagcagugcu

SEQ ID NO: 547426 - RNA, 22 nt, Human
uuguuucaugaguguaaaggga

SEQ ID NO: 547427 - RNA, 18 nt, Human
ggcuguggacaagauuag

SEQ ID NO: 547428 - RNA, 22 nt, Human
ccagggcaaaugagaucauagc

SEQ ID NO: 547429 - RNA, 22 nt, Human
ccuuuucuacaagcaaaugugc

SEQ ID NO: 547430 - RNA, 22 nt, Human
ucaucuaagagucuuacauuua

SEQ ID NO: 547431 - RNA, 22 nt, Human
guuucuuagacagacauuaucu

SEQ ID NO: 547432 - RNA, 22 nt, Human
uucugggguuaugggugauucu

SEQ ID NO: 547433 - RNA, 22 nt, Human
cucuguccuaugcuugauagaa

SEQ ID NO: 547434 - RNA, 22 nt, Human
agcugcugaaugacacugcaag

SEQ ID NO: 547435 - RNA, 22 nt, Human
uuuauuuauccuucuggauugc

SEQ ID NO: 547436 - RNA, 22 nt, Human
uucucagugaaguuuagaacau

SEQ ID NO: 547437 - RNA, 23 nt, Human
agaagcaaugcuuuuuuuccucu

SEQ ID NO: 547438 - RNA, 23 nt, Human
cagagcuggcucagagcugccug

SEQ ID NO: 547439 - RNA, 22 nt, Human
cauguuaaaauauacauucuga

SEQ ID NO: 547440 - RNA, 22 nt, Human
caaaugcagucccuuuguugcu

SEQ ID NO: 547441 - RNA, 22 nt, Human
uuacauuaagccaauggauucu

SEQ ID NO: 547442 - RNA, 22 nt, Human
caacacuucuuauacuuacuga

SEQ ID NO: 547443 - RNA, 22 nt, Human
ucgcagaggcacgagugcagaa

SEQ ID NO: 547444 - RNA, 22 nt, Human
uggcucagucauggaugaguaa

SEQ ID NO: 547445 - RNA, 22 nt, Human
uggcccugccacucacugcuga

SEQ ID NO: 547446 - RNA, 22 nt, Human
ggcuggaaguccaagaucaaga

SEQ ID NO: 547447 - RNA, 22 nt, Human
ucagucucaucaacucuauucc

SEQ ID NO: 547448 - RNA, 22 nt, Human
acaugcuagguacagaucuaaa

SEQ ID NO: 547449 - RNA, 22 nt, Human
ugcccugcggcuaucuagauga

SEQ ID NO: 547450 - RNA, 22 nt, Human
uuaaaguucauuaaaugagcca

SEQ ID NO: 547451 - RNA, 22 nt, Human
gcuaaggagggucuugcaaauu

SEQ ID NO: 547452 - RNA, 22 nt, Human
acccagccuacaaagcucaccu

SEQ ID NO: 547453 - RNA, 22 nt, Human
uguggggugugguccaggcauc

SEQ ID NO: 547454 - RNA, 20 nt, Human
cuguaucagguuacaaagua

SEQ ID NO: 547455 - RNA, 22 nt, Human
aagauacauaaagguagagucu

SEQ ID NO: 547456 - RNA, 22 nt, Human
ugcugccacugguagucucauu

SEQ ID NO: 547457 - RNA, 22 nt, Human
ccaggccagcaggcacaccugc

SEQ ID NO: 547458 - RNA, 22 nt, Human
uaucacauaguguuuaguaaau

SEQ ID NO: 547459 - RNA, 18 nt, Human
gaugggagcaagagaaga

SEQ ID NO: 547460 - RNA, 22 nt, Human
agauaaaaugguucaaaggcua

SEQ ID NO: 547461 - RNA, 22 nt, Human
uucuuuaucaguuacucauagg

SEQ ID NO: 547462 - RNA, 22 nt, Human
ucaguguuacauuauauagaac

SEQ ID NO: 547463 - RNA, 22 nt, Human
ugcagaccucccauggcugccu

SEQ ID NO: 547464 - RNA, 22 nt, Human
uuaagucacuuaucuaaagaca

SEQ ID NO: 547465 - RNA, 22 nt, Human
aaacaugagcaucucuucaagc

SEQ ID NO: 547466 - RNA, 22 nt, Human
agaaaguuuugugcuauauaug

SEQ ID NO: 547467 - RNA, 23 nt, Human
uuacaugugugcacacauucugg

SEQ ID NO: 547468 - RNA, 22 nt, Human
acuaagugauucuaagcaucuu

SEQ ID NO: 547469 - RNA, 22 nt, Human
cugacaggguagacagagggca

SEQ ID NO: 547470 - RNA, 17 nt, Human
acacagccagguucucc

SEQ ID NO: 547471 - RNA, 22 nt, Human
uuucaaagucaagaaggauacu

SEQ ID NO: 547472 - RNA, 22 nt, Human
gggccuucagccuuggacugag

SEQ ID NO: 547473 - RNA, 22 nt, Human
ggcaggcauuagagauucccag

SEQ ID NO: 547474 - RNA, 22 nt, Human
ccccuuccacagugcuuccuaa

SEQ ID NO: 547475 - RNA, 18 nt, Human
agaauuaccaaagugcuu

SEQ ID NO: 547476 - RNA, 22 nt, Human
augccuggacugacaugcacug

SEQ ID NO: 547477 - RNA, 22 nt, Human
acagacauuuucuguauugccu

SEQ ID NO: 547478 - RNA, 22 nt, Human
cugcuuuggacaacuauucuug

SEQ ID NO: 547479 - RNA, 20 nt, Human
aggaaggaaguuugcaugga

SEQ ID NO: 547480 - RNA, 22 nt, Human
cuauuacauuucuggacauuca

SEQ ID NO: 547481 - RNA, 19 nt, Human
ggagaagcaucuagaaaua

SEQ ID NO: 547482 - RNA, 22 nt, Human
uccccacagcagaagaucugag

SEQ ID NO: 547483 - RNA, 22 nt, Human
gggugagacagaaagagcaaaa

SEQ ID NO: 547484 - RNA, 23 nt, Human
cagaaaacccagagcucaguccc

SEQ ID NO: 547485 - RNA, 22 nt, Human
gccaccagugggggccugggca

SEQ ID NO: 547486 - RNA, 22 nt, Human
guuauuaucuugaggaaucugu

SEQ ID NO: 547487 - RNA, 22 nt, Human
uucuguuuuagaaauaaguagu

SEQ ID NO: 547488 - RNA, 16 nt, Human
gccuggaguggcaggg

SEQ ID NO: 547489 - RNA, 22 nt, Human
caagcagauauuuuagucaaga

SEQ ID NO: 547490 - RNA, 22 nt, Human
ucaggcagguggcuggcuaugg

SEQ ID NO: 547491 - RNA, 22 nt, Human
ugggaagcugcauuuuaacaag

SEQ ID NO: 547492 - RNA, 22 nt, Human
uuagugaugacuagacuuuugu

SEQ ID NO: 547493 - RNA, 22 nt, Human
uggcagcuggagggcaauggcc

SEQ ID NO: 547494 - RNA, 20 nt, Human
aguuauaguaucuagccaug

SEQ ID NO: 547495 - RNA, 22 nt, Human
ccugucagcugauggcuaugua

SEQ ID NO: 547496 - RNA, 22 nt, Human
aaugucugcucuacucaggagg

SEQ ID NO: 547497 - RNA, 22 nt, Human
caggccuuaguaggugcucccu

SEQ ID NO: 547498 - RNA, 22 nt, Human
gcugcccugugguccagcaggu

SEQ ID NO: 547499 - RNA, 20 nt, Human
aagaaaacgucuucagggga

SEQ ID NO: 547500 - RNA, 22 nt, Human
aggaagauguguuuagcagguu

SEQ ID NO: 547501 - RNA, 22 nt, Human
auacaagacucagcacagacgg

SEQ ID NO: 547502 - RNA, 22 nt, Human
cacaaaugguuguagacauuaa

SEQ ID NO: 547503 - RNA, 22 nt, Human
ucagggcagguuaacuugggug

SEQ ID NO: 547504 - RNA, 22 nt, Human
uguguuuugaacucaucuacug

SEQ ID NO: 547505 - RNA, 22 nt, Human
cuggcuuccucaggagcagugg

SEQ ID NO: 547506 - RNA, 22 nt, Human
gggcucuggugccuucacagaa

SEQ ID NO: 547507 - RNA, 22 nt, Human
gauguuuggcucaaacgagugu

SEQ ID NO: 547508 - RNA, 22 nt, Human
gccucugcaauuacauugugcc

SEQ ID NO: 547509 - RNA, 22 nt, Human
auggccagccacuccugauggc

SEQ ID NO: 547510 - RNA, 22 nt, Human
uuaacagaggacacaucaaacu

SEQ ID NO: 547511 - RNA, 22 nt, Human
acacagugugugcagucggacg

SEQ ID NO: 547512 - RNA, 22 nt, Human
ugcaagagguaaaaugaaagga

SEQ ID NO: 547513 - RNA, 22 nt, Human
ugccuuuuccaguuccuagaag

SEQ ID NO: 547514 - RNA, 22 nt, Human
caggcccauucuaggcuugcua

SEQ ID NO: 547515 - RNA, 22 nt, Human
cccuggaggaccccaauguggc

SEQ ID NO: 547516 - RNA, 22 nt, Human
cugccuggaaggagcaagggga

SEQ ID NO: 547517 - RNA, 22 nt, Human
gugcauuggugcgccacuucac

SEQ ID NO: 547518 - RNA, 22 nt, Human
aguguuccacacaucuggggaa

SEQ ID NO: 547519 - RNA, 22 nt, Human
cauuucuguucucuuccuguac

SEQ ID NO: 547520 - RNA, 22 nt, Human
gccaggcagcaggaagccagug

SEQ ID NO: 547521 - RNA, 22 nt, Human
agguggggccaaaugcuacagu

SEQ ID NO: 547522 - RNA, 22 nt, Human
ugaguaggaaaggaaauguuuu

SEQ ID NO: 547523 - RNA, 22 nt, Human
gaaaugucucuugauuuuugga

SEQ ID NO: 547524 - RNA, 22 nt, Human
agcaggguuuggggauuggcac

SEQ ID NO: 547525 - RNA, 22 nt, Human
auuuguacaaauuuauguuagu

SEQ ID NO: 547526 - RNA, 22 nt, Human
ccuggcugcuuucacuauggag

SEQ ID NO: 547527 - RNA, 22 nt, Human
uauauucaacaggcuaauguca

SEQ ID NO: 547528 - RNA, 22 nt, Human
auauuuguauuucgugugugua

SEQ ID NO: 547529 - RNA, 22 nt, Human
ugccugugggugaugauuugau

SEQ ID NO: 547530 - RNA, 20 nt, Human
gaauguuucacuugcuccau

SEQ ID NO: 547531 - RNA, 22 nt, Human
cagucucucagcuuucagcugu

SEQ ID NO: 547532 - RNA, 22 nt, Human
ggaaagaaucaagugauccugu

SEQ ID NO: 547533 - RNA, 22 nt, Human
aaccauuagucaaucagcaaga

SEQ ID NO: 547534 - RNA, 22 nt, Human
acccugccaaggauggccccga

SEQ ID NO: 547535 - RNA, 22 nt, Human
cugcugcucagugucaucaugu

SEQ ID NO: 547536 - RNA, 22 nt, Human
agcagagucugugugcacuuua

SEQ ID NO: 547537 - RNA, 22 nt, Human
uagaaacagaauaugagugaga

SEQ ID NO: 547538 - RNA, 22 nt, Human
ccuggagcgcgggucaagcugg

SEQ ID NO: 547539 - RNA, 22 nt, Human
aggguggccaugagggagagau

SEQ ID NO: 547540 - RNA, 22 nt, Human
gaaguuagucauugaagcccca

SEQ ID NO: 547541 - RNA, 22 nt, Human
ggaagcugcauaacuagcgugg

SEQ ID NO: 547542 - RNA, 22 nt, Human
auaugauuccacuauuguaugg

SEQ ID NO: 547543 - RNA, 22 nt, Human
cuucugagaggggcuaggagca

SEQ ID NO: 547544 - RNA, 22 nt, Human
uucaagucauguuaacugcuuc

SEQ ID NO: 547545 - RNA, 22 nt, Human
cauauuugguauaacuuaagca

SEQ ID NO: 547546 - RNA, 22 nt, Human
cugcagccuccugggguacaug

SEQ ID NO: 547547 - RNA, 22 nt, Human
aucaugcugacacaguuuaucu

SEQ ID NO: 547548 - RNA, 22 nt, Human
caaagauaaucacagaauaccc

SEQ ID NO: 547549 - RNA, 22 nt, Human
gaguuguucaacgugugugaaa

SEQ ID NO: 547550 - RNA, 22 nt, Human
uucuugauguaccaacuuggga

SEQ ID NO: 547551 - RNA, 22 nt, Human
ggggcagccuccaggaaagcug

SEQ ID NO: 547552 - RNA, 22 nt, Human
cucagggacguuagaggacagg

SEQ ID NO: 547553 - RNA, 22 nt, Human
cagcuguuaccaaucuuagggc

SEQ ID NO: 547554 - RNA, 22 nt, Human
uuauuauuuuguguacagcaaa

SEQ ID NO: 547555 - RNA, 22 nt, Human
acagccagaggugguccugggu

SEQ ID NO: 547556 - RNA, 20 nt, Human
uacaguguauguauuuaggc

SEQ ID NO: 547557 - RNA, 22 nt, Human
agugggaccggugcuauuccag

SEQ ID NO: 547558 - RNA, 22 nt, Human
uuaaaaugaauauugauuagca

SEQ ID NO: 547559 - RNA, 22 nt, Human
cagaagcauugacuccuugcuc

SEQ ID NO: 547560 - RNA, 22 nt, Human
agccauccuacuaccucagcau

SEQ ID NO: 547561 - RNA, 22 nt, Human
guaaaucauaaaauuugagcuc

SEQ ID NO: 547562 - RNA, 21 nt, Human
ccaccaggucuucugcucggg

SEQ ID NO: 547563 - RNA, 22 nt, Human
ugggggaagagcuuguuaaagu

SEQ ID NO: 547564 - RNA, 20 nt, Human
ugugugcacacaugacauuc

SEQ ID NO: 547565 - RNA, 22 nt, Human
cuaccuaauaauuugauauuca

SEQ ID NO: 547566 - RNA, 22 nt, Human
ugcauguuaagaaaauauugag

SEQ ID NO: 547567 - RNA, 22 nt, Human
uagggcugccuauggcuagaua

SEQ ID NO: 547568 - RNA, 22 nt, Human
gcagagcaguacucucuugacu

SEQ ID NO: 547569 - RNA, 22 nt, Human
gaaucucaaggcuugugaggau

SEQ ID NO: 547570 - RNA, 18 nt, Human
ccagauggccagucugcu

SEQ ID NO: 547571 - RNA, 22 nt, Human
cauaacauccuugcuacuuuga

SEQ ID NO: 547572 - RNA, 22 nt, Human
ucagagucuuggcaauagguua

SEQ ID NO: 547573 - RNA, 22 nt, Human
uaauacuuuugccuuguauuca

SEQ ID NO: 547574 - RNA, 22 nt, Human
agggcagcacaaggcauggacu

SEQ ID NO: 547575 - RNA, 20 nt, Human
ugugaggagcauggccgcug

SEQ ID NO: 547576 - RNA, 22 nt, Human
agcagagccagaauuggaccag

SEQ ID NO: 547577 - RNA, 22 nt, Human
cagcugugagagugcauugaag

SEQ ID NO: 547578 - RNA, 22 nt, Human
caugcacuuaccugaaauucaa

SEQ ID NO: 547579 - RNA, 22 nt, Human
ugguacuuggaggcagaaaaau

SEQ ID NO: 547580 - RNA, 22 nt, Human
caagaugaaacuacagggagga

SEQ ID NO: 547581 - RNA, 22 nt, Human
agccccaggcccggacgccucu

SEQ ID NO: 547582 - RNA, 22 nt, Human
gccugucucuuggaacuuggua

SEQ ID NO: 547583 - RNA, 22 nt, Human
aaugcacagcguuccaugcuug

SEQ ID NO: 547584 - RNA, 22 nt, Human
uggagagcgcgacgggaggaag

SEQ ID NO: 547585 - RNA, 22 nt, Human
ugagcaggugagucuagggcag

SEQ ID NO: 547586 - RNA, 22 nt, Human
ccaaaggcggaacugagucucu

SEQ ID NO: 547587 - RNA, 22 nt, Human
aggcaguuucugggacagcaua

SEQ ID NO: 547588 - RNA, 22 nt, Human
uaaacagagaagacuuugagca

SEQ ID NO: 547589 - RNA, 22 nt, Human
aaaugcacacaccaggaaacua

SEQ ID NO: 547590 - RNA, 22 nt, Human
acaggcugagcguccaucuuca

SEQ ID NO: 547591 - RNA, 22 nt, Human
uuugucagucaugucugcuuuu

SEQ ID NO: 547592 - RNA, 22 nt, Human
ggcccaugcauccugugcagcc

SEQ ID NO: 547593 - RNA, 22 nt, Human
cuggucagagcaacugcucaca

SEQ ID NO: 547594 - RNA, 20 nt, Human
ccucaggaugagggugagca

SEQ ID NO: 547595 - RNA, 22 nt, Human
ucuuaaaccacaaaauucagag

SEQ ID NO: 547596 - RNA, 22 nt, Human
uguacagauaaagacuguaaau

SEQ ID NO: 547597 - RNA, 23 nt, Human
cagugugacgaggugaggcaggc

SEQ ID NO: 547598 - RNA, 19 nt, Human
ucccucagucugccaggcc

SEQ ID NO: 547599 - RNA, 22 nt, Human
ucugucauaaacacacacaagc

SEQ ID NO: 547600 - RNA, 22 nt, Human
guggccuuuccugaagaaauga

SEQ ID NO: 547601 - RNA, 22 nt, Human
uccagagggcgauggcuggggg

SEQ ID NO: 547602 - RNA, 22 nt, Human
gccuuugcaccaucagugcaau

SEQ ID NO: 547603 - RNA, 22 nt, Human
aagagggcugcaaucuuauugc

SEQ ID NO: 547604 - RNA, 22 nt, Human
gggcccugugauuucuugagga

SEQ ID NO: 547605 - RNA, 23 nt, Human
acagcaagaggaccagaugugag

SEQ ID NO: 547606 - RNA, 22 nt, Human
cugaggugcuagggucccugcu

SEQ ID NO: 547607 - RNA, 22 nt, Human
uaagaagguaguuuccaaguca

SEQ ID NO: 547608 - RNA, 22 nt, Human
ucuguucaguuguaccuucccc

SEQ ID NO: 547609 - RNA, 22 nt, Human
aggcagcuggcagcacccaggg

SEQ ID NO: 547610 - RNA, 22 nt, Human
aaguguuuaacggugauugagc

SEQ ID NO: 547611 - RNA, 22 nt, Human
uucuucaacaaggacacuguua

SEQ ID NO: 547612 - RNA, 22 nt, Human
gccugggagugcacagugaggu

SEQ ID NO: 547613 - RNA, 22 nt, Human
gaaugcacucacccaucacuca

SEQ ID NO: 547614 - RNA, 22 nt, Human
cccaggccccagggcuugucag

SEQ ID NO: 547615 - RNA, 22 nt, Human
cuccagaacugggagagaauaa

SEQ ID NO: 547616 - RNA, 22 nt, Human
uugcauauccuccaacacaugg

SEQ ID NO: 547617 - RNA, 22 nt, Human
ccugugccauccugagcauccc

SEQ ID NO: 547618 - RNA, 22 nt, Human
gugcccugaguggguaggagag

SEQ ID NO: 547619 - RNA, 22 nt, Human
acacauuauagagaguauaaua

SEQ ID NO: 547620 - RNA, 22 nt, Human
accagcuguguccuggcugcag

SEQ ID NO: 547621 - RNA, 22 nt, Human
auggcagagggauugaacagcu

SEQ ID NO: 547622 - RNA, 22 nt, Human
aaagggaggggcgauaagccgg

SEQ ID NO: 547623 - RNA, 22 nt, Human
uacauacagccaaguaugaagu

SEQ ID NO: 547624 - RNA, 22 nt, Human
cuggagccuagguugaccuggg

SEQ ID NO: 547625 - RNA, 22 nt, Human
cccagcacuuugaauaugucac

SEQ ID NO: 547626 - RNA, 22 nt, Human
ugugaagguaaggaggggcaag

SEQ ID NO: 547627 - RNA, 22 nt, Human
gugugcaguagagaaagagcag

SEQ ID NO: 547628 - RNA, 22 nt, Human
cagauggcauuuccuuucuggc

SEQ ID NO: 547629 - RNA, 22 nt, Human
agcagggcagcugaugcgcacg

SEQ ID NO: 547630 - RNA, 22 nt, Human
gcagggacaucuuugucuagua

SEQ ID NO: 547631 - RNA, 22 nt, Human
uuuuuuccaacuuaagacuuca

SEQ ID NO: 547632 - RNA, 22 nt, Human
gccagagguucaacaacugucu

SEQ ID NO: 547633 - RNA, 22 nt, Human
ugcccccagacagaauccaguu

SEQ ID NO: 547634 - RNA, 22 nt, Human
cuggggacuuugguucuccaug

SEQ ID NO: 547635 - RNA, 22 nt, Human
ccucagggacuccaugcugcag

SEQ ID NO: 547636 - RNA, 22 nt, Human
uaaggcuucuuggaauacugca

SEQ ID NO: 547637 - RNA, 21 nt, Human
auggaaauuggcaaaugcuac

SEQ ID NO: 547638 - RNA, 22 nt, Human
agagcaaagggacauggaagag

SEQ ID NO: 547639 - RNA, 22 nt, Human
uggcagcuacagacagagguga

SEQ ID NO: 547640 - RNA, 22 nt, Human
aacaggcaaacugugggauccc

SEQ ID NO: 547641 - RNA, 21 nt, Human
uuuaaggccagcaggagguga

SEQ ID NO: 547642 - RNA, 22 nt, Human
aauguuucaauuaagucuuuua

SEQ ID NO: 547643 - RNA, 22 nt, Human
agcagcugcagggagggucugc

SEQ ID NO: 547644 - RNA, 22 nt, Human
uaguuaggaaaguccagggagc

SEQ ID NO: 547645 - RNA, 22 nt, Human
ugaaaacacuuuaguuuagguc

SEQ ID NO: 547646 - RNA, 23 nt, Human
ugauuacaagggccaaagaaagg

SEQ ID NO: 547647 - RNA, 22 nt, Human
caggaggagcauuagcgucuca

SEQ ID NO: 547648 - RNA, 22 nt, Human
ugcagguggcagcggggcacca

SEQ ID NO: 547649 - RNA, 22 nt, Human
uggggcucaccuaggcuggaag

SEQ ID NO: 547650 - RNA, 22 nt, Human
uucccucuccuacucaggaaag

SEQ ID NO: 547651 - RNA, 22 nt, Human
uuauuauuggugaguuaaggaa

SEQ ID NO: 547652 - RNA, 22 nt, Human
uuuuaaaggauagcucugguug

SEQ ID NO: 547653 - RNA, 22 nt, Human
gcuaguuucuugaauacucuaa

SEQ ID NO: 547654 - RNA, 22 nt, Human
aaagacauggaacuagagaugg

SEQ ID NO: 547655 - RNA, 22 nt, Human
ggaagcugccaguccaccagcu

SEQ ID NO: 547656 - RNA, 22 nt, Human
caggggccggcuguccgugccc

SEQ ID NO: 547657 - RNA, 22 nt, Human
aagguccuuuugcagugugauc

SEQ ID NO: 547658 - RNA, 22 nt, Human
uguaugaaguuacugagccucu

SEQ ID NO: 547659 - RNA, 22 nt, Human
auuacagaagauaugcucaaca

SEQ ID NO: 547660 - RNA, 22 nt, Human
uggcagaauuuuaaagacagau

SEQ ID NO: 547661 - RNA, 22 nt, Human
gcaguuuuauuaugauggaaau

SEQ ID NO: 547662 - RNA, 22 nt, Human
uuucauaaacaguagaagacua

SEQ ID NO: 547663 - RNA, 22 nt, Human
cagagccaaaccucagggcccg

SEQ ID NO: 547664 - RNA, 22 nt, Human
augaggcaggauuaagcuauca

SEQ ID NO: 547665 - RNA, 22 nt, Human
cagaggaagcuggguguggagu

SEQ ID NO: 547666 - RNA, 22 nt, Human
uuucugaagauacagcuuugcu

SEQ ID NO: 547667 - RNA, 22 nt, Human
cagcucccaguggcagcuccuu

SEQ ID NO: 547668 - RNA, 22 nt, Human
auggaaagggaagcaaggaaca

SEQ ID NO: 547669 - RNA, 22 nt, Human
uaauuucacugauaugaaguca

SEQ ID NO: 547670 - RNA, 22 nt, Human
ugcugccuccaacuccugggcu

SEQ ID NO: 547671 - RNA, 22 nt, Human
uaaguucaaugaacucaguucu

SEQ ID NO: 547672 - RNA, 22 nt, Human
cauauugcugucauugucccuc

SEQ ID NO: 547673 - RNA, 22 nt, Human
uccuucaggccucauucucaua

SEQ ID NO: 547674 - RNA, 22 nt, Human
uucaaguagucacacaugauau

SEQ ID NO: 547675 - RNA, 20 nt, Human
cgcccaggagggcccaugug

SEQ ID NO: 547676 - RNA, 19 nt, Human
cugggccagagcuguccuc

SEQ ID NO: 547677 - RNA, 22 nt, Human
ucagggaagagagaucuccuag

SEQ ID NO: 547678 - RNA, 22 nt, Human
uccagagguauguagagaguau

SEQ ID NO: 547679 - RNA, 22 nt, Human
aagugacacauggcacuucuau

SEQ ID NO: 547680 - RNA, 22 nt, Human
acuuuaaagcagaauggcuaug

SEQ ID NO: 547681 - RNA, 22 nt, Human
uaccuugaaaagaaggugcuca

SEQ ID NO: 547682 - RNA, 22 nt, Human
cgagaguggacagggcgcagcu

SEQ ID NO: 547683 - RNA, 22 nt, Human
ucccagggccgcaaacgaguuu

SEQ ID NO: 547684 - RNA, 22 nt, Human
aaauggcauucagcaaccuuuc

SEQ ID NO: 547685 - RNA, 22 nt, Human
gcucucugggugugucuagaua

SEQ ID NO: 547686 - RNA, 22 nt, Human
ugugguggggucugguauucca

SEQ ID NO: 547687 - RNA, 22 nt, Human
cggggccuagcugcacacccuc

SEQ ID NO: 547688 - RNA, 22 nt, Human
ggccccaggaccuccacggucc

SEQ ID NO: 547689 - RNA, 22 nt, Human
ugggaccugcucuuggaaugag

SEQ ID NO: 547690 - RNA, 22 nt, Human
cucugggcugccuuuuagcucu

SEQ ID NO: 547691 - RNA, 18 nt, Human
gagaggcccggcugugcc

SEQ ID NO: 547692 - RNA, 22 nt, Human
caggacccaucagccaggcacu

SEQ ID NO: 547693 - RNA, 22 nt, Human
uaagaugggggaaagaaauagu

SEQ ID NO: 547694 - RNA, 21 nt, Human
gggccuggcugcgcaggacgg

SEQ ID NO: 547695 - RNA, 22 nt, Human
agaggccagaaaguaugccacc

SEQ ID NO: 547696 - RNA, 22 nt, Human
uuccauuguuucugucuucacu

SEQ ID NO: 547697 - RNA, 22 nt, Human
cguaugaaauuuuugacauuug

SEQ ID NO: 547698 - RNA, 22 nt, Human
ccuggcucuucagagguuccua

SEQ ID NO: 547699 - RNA, 22 nt, Human
uuucagagaauuagaagcugau

SEQ ID NO: 547700 - RNA, 22 nt, Human
ugcagugaggcaguuggguugg

SEQ ID NO: 547701 - RNA, 22 nt, Human
aggaaggacugcagcauuuggu

SEQ ID NO: 547702 - RNA, 22 nt, Human
uguuccauaaguggugcuuugu

SEQ ID NO: 547703 - RNA, 22 nt, Human
aagcaucaacacuauauugaug

SEQ ID NO: 547704 - RNA, 22 nt, Human
ugugauuauuugauuaacaugu

SEQ ID NO: 547705 - RNA, 23 nt, Human
ucuguacaauugagaagagaaca

SEQ ID NO: 547706 - RNA, 22 nt, Human
gccagggaaacugcagaccagc

SEQ ID NO: 547707 - RNA, 22 nt, Human
uccagggaccucccugagagcu

SEQ ID NO: 547708 - RNA, 22 nt, Human
gaagaagguggcccagggguag

SEQ ID NO: 547709 - RNA, 18 nt, Human
acagaggcagacauguau

SEQ ID NO: 547710 - RNA, 22 nt, Human
gagauaaauuuuugauaaauau

SEQ ID NO: 547711 - RNA, 22 nt, Human
gcugagugauugauauuuuagu

SEQ ID NO: 547712 - RNA, 22 nt, Human
ggcaggugaggcaugugccugg

SEQ ID NO: 547713 - RNA, 22 nt, Human
caacauuugaguaaagaaaugg

SEQ ID NO: 547714 - RNA, 22 nt, Human
ggcuggcuggcuuagcagagga

SEQ ID NO: 547715 - RNA, 22 nt, Human
uuuguaaaauuagggaauucaa

SEQ ID NO: 547716 - RNA, 22 nt, Human
gacugcagugaaggcacauggg

SEQ ID NO: 547717 - RNA, 23 nt, Human
uggaggaaacacaucagaagacc

SEQ ID NO: 547718 - RNA, 22 nt, Human
aaugcagugagccauuaaaugg

SEQ ID NO: 547719 - RNA, 22 nt, Human
cucugguuucgcaggaaauaga

SEQ ID NO: 547720 - RNA, 22 nt, Human
cagggccaggcugauggccugg

SEQ ID NO: 547721 - RNA, 19 nt, Human
ucucuucucccugguuuua

SEQ ID NO: 547722 - RNA, 22 nt, Human
accauuugaaggaaucauugac

SEQ ID NO: 547723 - RNA, 22 nt, Human
aucaggauucaguaucuccagc

SEQ ID NO: 547724 - RNA, 22 nt, Human
acaguauauaugguuaucugau

SEQ ID NO: 547725 - RNA, 22 nt, Human
ugugaaagucaaauuaauugaa

SEQ ID NO: 547726 - RNA, 22 nt, Human
uggaauggaaacaaacugagga

SEQ ID NO: 547727 - RNA, 22 nt, Human
gcaggagcaaacugcagugugg

SEQ ID NO: 547728 - RNA, 19 nt, Human
agccagggugagaaggagc

SEQ ID NO: 547729 - RNA, 22 nt, Human
ugggccacacacagaagaauca

SEQ ID NO: 547730 - RNA, 20 nt, Human
uggcaggaggcagcagugga

SEQ ID NO: 547731 - RNA, 22 nt, Human
ugcagaagugagucaugaggaa

SEQ ID NO: 547732 - RNA, 22 nt, Human
cuccuugguguaguacugagca

SEQ ID NO: 547733 - RNA, 22 nt, Human
gguuucaaauuaaagucuuaag

SEQ ID NO: 547734 - RNA, 22 nt, Human
uuccaguucccaugaggauuaa

SEQ ID NO: 547735 - RNA, 22 nt, Human
ccuggagcacagcccaguccca

SEQ ID NO: 547736 - RNA, 22 nt, Human
uggcccugcuggacacgccugc

SEQ ID NO: 547737 - RNA, 22 nt, Human
acagagucucagggaugaaagc

SEQ ID NO: 547738 - RNA, 22 nt, Human
gguuugcaugugauguugggca

SEQ ID NO: 547739 - RNA, 22 nt, Human
accauuaaucucacaaggauaa

SEQ ID NO: 547740 - RNA, 22 nt, Human
cccugcugaaucccauggaguc

SEQ ID NO: 547741 - RNA, 22 nt, Human
ggauggagaugaccauggugac

SEQ ID NO: 547742 - RNA, 22 nt, Human
ccagcuaggcuugcacucuugu

SEQ ID NO: 547743 - RNA, 22 nt, Human
uacauacauuaccucauuuagu

SEQ ID NO: 547744 - RNA, 22 nt, Human
gcagcagaggcccuacucuuug

SEQ ID NO: 547745 - RNA, 22 nt, Human
uagcagaggcugucugacuuaa

SEQ ID NO: 547746 - RNA, 22 nt, Human
gccugagagacccauggggcaa

SEQ ID NO: 547747 - RNA, 22 nt, Human
ugguggcagcugagugucaggu

SEQ ID NO: 547748 - RNA, 22 nt, Human
uuugaaaggagcuuuauccaga

SEQ ID NO: 547749 - RNA, 18 nt, Human
ugcaggcuguugaaacug

SEQ ID NO: 547750 - RNA, 22 nt, Human
ugcucugucaagaaaagaugcc

SEQ ID NO: 547751 - RNA, 20 nt, Human
guccugggagccacagcaca

SEQ ID NO: 547752 - RNA, 22 nt, Human
gaguuauuaauggcugaguuug

SEQ ID NO: 547753 - RNA, 22 nt, Human
uacauucaacaugucacuaugu

SEQ ID NO: 547754 - RNA, 22 nt, Human
uuccucuccucccaccagguga

SEQ ID NO: 547755 - RNA, 19 nt, Human
agggagaauuccaagagga

SEQ ID NO: 547756 - RNA, 22 nt, Human
ggcugugaacacucuuagcauc

SEQ ID NO: 547757 - RNA, 22 nt, Human
aucuuuaggaaccuaaccuauu

SEQ ID NO: 547758 - RNA, 22 nt, Human
agaugugguaguugaagggaag

SEQ ID NO: 547759 - RNA, 22 nt, Human
aaaugccucugcuguacacaau

SEQ ID NO: 547760 - RNA, 22 nt, Human
aggagagagaacacuugggucc

SEQ ID NO: 547761 - RNA, 22 nt, Human
uguccugggaaugggaugcagu

SEQ ID NO: 547762 - RNA, 22 nt, Human
cagagccagcaguggggacagg

SEQ ID NO: 547763 - RNA, 22 nt, Human
ucccagggucaguggugaggcc

SEQ ID NO: 547764 - RNA, 17 nt, Human
ugaaaucagcacccagg

SEQ ID NO: 547765 - RNA, 22 nt, Human
caguggaaaucagagugagagu

SEQ ID NO: 547766 - RNA, 22 nt, Human
gauacaaauucaugucugaauu

SEQ ID NO: 547767 - RNA, 22 nt, Human
aguuaguagacuuuuccauuua

SEQ ID NO: 547768 - RNA, 22 nt, Human
ggcagcugaccuagcaccaucc

SEQ ID NO: 547769 - RNA, 20 nt, Human
uguuccaagcuaaugaauga

SEQ ID NO: 547770 - RNA, 21 nt, Human
uucaauacuauuucaauaguc

SEQ ID NO: 547771 - RNA, 22 nt, Human
augggcugagaaucaagaauau

SEQ ID NO: 547772 - RNA, 22 nt, Human
aaaugcagugguucuacuucuc

SEQ ID NO: 547773 - RNA, 22 nt, Human
ccagcuccgggaguugcugcug

SEQ ID NO: 547774 - RNA, 22 nt, Human
augggaggguggaaaggcucug

SEQ ID NO: 547775 - RNA, 22 nt, Human
uuccuuccauagcaaaacaugc

SEQ ID NO: 547776 - RNA, 22 nt, Human
ucucuggaguauaaccagggau

SEQ ID NO: 547777 - RNA, 22 nt, Human
uuugaaaggugucgagaugugu

SEQ ID NO: 547778 - RNA, 17 nt, Human
agcaggcugcagaggcc

SEQ ID NO: 547779 - RNA, 22 nt, Human
cccuccuggaggcggaugccca

SEQ ID NO: 547780 - RNA, 21 nt, Human
caucagauuuagaaguucuau

SEQ ID NO: 547781 - RNA, 22 nt, Human
cagcacacagugacucgcaccu

SEQ ID NO: 547782 - RNA, 22 nt, Human
acauugaacaguacaaaugauc

SEQ ID NO: 547783 - RNA, 22 nt, Human
aucuggcucauucagggaacgg

SEQ ID NO: 547784 - RNA, 22 nt, Human
agagucagaaagcagacagggg

SEQ ID NO: 547785 - RNA, 22 nt, Human
uauuucagcaagaagaaugugg

SEQ ID NO: 547786 - RNA, 22 nt, Human
cuggggaggcagggcugccccu

SEQ ID NO: 547787 - RNA, 22 nt, Human
aacaugaaacccaaacagaaua

SEQ ID NO: 547788 - RNA, 22 nt, Human
uggagcccagggugagaaggag

SEQ ID NO: 547789 - RNA, 22 nt, Human
ucuggcuccaccuccuuuacua

SEQ ID NO: 547790 - RNA, 22 nt, Human
agagugucugguagcugcucug

SEQ ID NO: 547791 - RNA, 22 nt, Human
ccaggcagcucugauuuauguc

SEQ ID NO: 547792 - RNA, 22 nt, Human
ugcaaucagguaccauuugauu

SEQ ID NO: 547793 - RNA, 18 nt, Human
uuucacaaccuccagagg

SEQ ID NO: 547794 - RNA, 22 nt, Human
gcucccaggaagagaagggcca

SEQ ID NO: 547795 - RNA, 22 nt, Human
uggccugcucugacuuuggggg

SEQ ID NO: 547796 - RNA, 16 nt, Human
gcugggagggagaggu

SEQ ID NO: 547797 - RNA, 21 nt, Human
uaaaucucuguauucuucagu

SEQ ID NO: 547798 - RNA, 22 nt, Human
ccagcccuugagauggaaggga

SEQ ID NO: 547799 - RNA, 22 nt, Human
cagugcaggcugggggcccugc

SEQ ID NO: 547800 - RNA, 20 nt, Human
aaagcaguaugcaaguagag

SEQ ID NO: 547801 - RNA, 22 nt, Human
agugaaauggaugcugcuacug

SEQ ID NO: 547802 - RNA, 22 nt, Human
uaugcacauauaaccugcacug

SEQ ID NO: 547803 - RNA, 19 nt, Human
caaguuaaaaugaggucau

SEQ ID NO: 547804 - RNA, 22 nt, Human
gucuacaaagcauauaaaagag

SEQ ID NO: 547805 - RNA, 22 nt, Human
ucuccucugcgcggcagugccc

SEQ ID NO: 547806 - RNA, 22 nt, Human
uguccuuuucuuuagugcagcu

SEQ ID NO: 547807 - RNA, 22 nt, Human
uccauaagcagguucuuccuga

SEQ ID NO: 547808 - RNA, 22 nt, Human
uuaaaaucacagucacccagua

SEQ ID NO: 547809 - RNA, 22 nt, Human
ggcucugcccagguggacagca

SEQ ID NO: 547810 - RNA, 22 nt, Human
gucagcuacugcagggaacuuu

SEQ ID NO: 547811 - RNA, 22 nt, Human
ugggcagauguggcucuccuug

SEQ ID NO: 547812 - RNA, 22 nt, Human
gaauucugucgcuuacuagaug

SEQ ID NO: 547813 - RNA, 22 nt, Human
acaggaaauuggcauaucaguu

SEQ ID NO: 547814 - RNA, 22 nt, Human
ugcagggccccucugcaugagu

SEQ ID NO: 547815 - RNA, 22 nt, Human
ucuucauguauacucaugguac

SEQ ID NO: 547816 - RNA, 22 nt, Human
uccuggauggagcugcccucgc

SEQ ID NO: 547817 - RNA, 22 nt, Human
acuguccauucacucauauuca

SEQ ID NO: 547818 - RNA, 22 nt, Human
auacaugugggucuaaacauau

SEQ ID NO: 547819 - RNA, 22 nt, Human
uccuuuccagccucaccucagc

SEQ ID NO: 547820 - RNA, 22 nt, Human
gaauucuuugaucuuaaucuug

SEQ ID NO: 547821 - RNA, 22 nt, Human
uuuuaucuucauuccuaucuac

SEQ ID NO: 547822 - RNA, 22 nt, Human
cuuaagaauauugaaguugugg

SEQ ID NO: 547823 - RNA, 22 nt, Human
caggaguggugugagggacucc

SEQ ID NO: 547824 - RNA, 22 nt, Human
aaagucauuguaauauaugcua

SEQ ID NO: 547825 - RNA, 21 nt, Human
acagggcaugcagcuggcugu

SEQ ID NO: 547826 - RNA, 20 nt, Human
uucuacaaaacugauucuga

SEQ ID NO: 547827 - RNA, 22 nt, Human
gggacuucauagcuaggcacuu

SEQ ID NO: 547828 - RNA, 22 nt, Human
agucucuuucuaaauaagguca

SEQ ID NO: 547829 - RNA, 22 nt, Human
cccacacauuuuucacuuaccg

SEQ ID NO: 547830 - RNA, 22 nt, Human
ggaagccaguugcuuggugugg

SEQ ID NO: 547831 - RNA, 19 nt, Human
uuugaauccagcugguaac

SEQ ID NO: 547832 - RNA, 22 nt, Human
aacagucugggaguuccuuaua

SEQ ID NO: 547833 - RNA, 22 nt, Human
gcccagcugcacccuggugggu

SEQ ID NO: 547834 - RNA, 22 nt, Human
agaaauguacgauguuaugcag

SEQ ID NO: 547835 - RNA, 22 nt, Human
ucccuggagauaacuucuggga

SEQ ID NO: 547836 - RNA, 20 nt, Human
gcagcagugcaaguccucuu

SEQ ID NO: 547837 - RNA, 22 nt, Human
cuggcccuguggaggcaggaac

SEQ ID NO: 547838 - RNA, 22 nt, Human
ggacaggguaaguacuagugug

SEQ ID NO: 547839 - RNA, 22 nt, Human
agcaaggggcagugaaagugug

SEQ ID NO: 547840 - RNA, 22 nt, Human
guaaucucagcuacuugggagg

SEQ ID NO: 547841 - RNA, 22 nt, Human
uuguuuuugugaggcagcccau

SEQ ID NO: 547842 - RNA, 21 nt, Human
aucuuuauuacgcagagaaga

SEQ ID NO: 547843 - RNA, 22 nt, Human
auggggggaugaaggaguccaa

SEQ ID NO: 547844 - RNA, 22 nt, Human
ccacaggcugcugcaggucccg

SEQ ID NO: 547845 - RNA, 22 nt, Human
aaacuucauggauaauauaaag

SEQ ID NO: 547846 - RNA, 22 nt, Human
uuaaguaagaccuuaugucuug

SEQ ID NO: 547847 - RNA, 22 nt, Human
uuaaaugacuuuuauuauucuc

SEQ ID NO: 547848 - RNA, 22 nt, Human
ugggcaggcaagugaauaccuu

SEQ ID NO: 547849 - RNA, 22 nt, Human
ucagcacugucuuuuauuugaa

SEQ ID NO: 547850 - RNA, 22 nt, Human
uuuuaaaggcagauuauggcuu

SEQ ID NO: 547851 - RNA, 22 nt, Human
ucccagagcagaugugcuaaag

SEQ ID NO: 547852 - RNA, 22 nt, Human
aaaguuuuagaacuaggaagca

SEQ ID NO: 547853 - RNA, 21 nt, Human
uagcuuuaauauucccacauu

SEQ ID NO: 547854 - RNA, 22 nt, Human
cagaggccaccuguggccacug

SEQ ID NO: 547855 - RNA, 23 nt, Human
ccugcucaggcgugugcccugcu

SEQ ID NO: 547856 - RNA, 22 nt, Human
cucaaggacuuauucaugccug

SEQ ID NO: 547857 - RNA, 20 nt, Human
agguccugguucucugggau

SEQ ID NO: 547858 - RNA, 23 nt, Human
ugaaaguucugaagagaucaugc

SEQ ID NO: 547859 - RNA, 22 nt, Human
uuuuaccacugggugacaugga

SEQ ID NO: 547860 - RNA, 18 nt, Human
cucaggccuuucccugug

SEQ ID NO: 547861 - RNA, 22 nt, Human
gcauuucaugccguggaagucc

SEQ ID NO: 547862 - RNA, 22 nt, Human
aagcugcccucauucccagugc

SEQ ID NO: 547863 - RNA, 22 nt, Human
cggggcugcucguccuccugug

SEQ ID NO: 547864 - RNA, 22 nt, Human
ugcaggcugccuucacagagcc

SEQ ID NO: 547865 - RNA, 22 nt, Human
aaguguuuaugguuauuguuaa

SEQ ID NO: 547866 - RNA, 22 nt, Human
ucacugcucucuaagcaucgcc

SEQ ID NO: 547867 - RNA, 22 nt, Human
ugcauauugugaaaauguagau

SEQ ID NO: 547868 - RNA, 22 nt, Human
cuaaaauuaucaagauaauucc

SEQ ID NO: 547869 - RNA, 22 nt, Human
caggugggcuugggagaacacu

SEQ ID NO: 547870 - RNA, 21 nt, Human
auuauuauuucuguguccagc

SEQ ID NO: 547871 - RNA, 22 nt, Human
gaaagccaucuggcugcuggga

SEQ ID NO: 547872 - RNA, 22 nt, Human
agaaauuaggaaaguaacacuu

SEQ ID NO: 547873 - RNA, 22 nt, Human
acuuccugcaaucguccacucc

SEQ ID NO: 547874 - RNA, 22 nt, Human
uacaaagugaaauaauucugag

SEQ ID NO: 547875 - RNA, 22 nt, Human
cagagacagggcagggagugug

SEQ ID NO: 547876 - RNA, 22 nt, Human
uaggcugggcugagcuggacgg

SEQ ID NO: 547877 - RNA, 22 nt, Human
agccccucuguggcucugccuc

SEQ ID NO: 547878 - RNA, 22 nt, Human
uuucugacugguguauaauagg

SEQ ID NO: 547879 - RNA, 22 nt, Human
uaauaacaauuguaggacauga

SEQ ID NO: 547880 - RNA, 22 nt, Human
ccugagggcgccgagcucccag

SEQ ID NO: 547881 - RNA, 22 nt, Human
caauguuuacuggggacccaga

SEQ ID NO: 547882 - RNA, 22 nt, Human
gucuucuguucugugaggcuuc

SEQ ID NO: 547883 - RNA, 22 nt, Human
ucaaagucacaacucucuaauu

SEQ ID NO: 547884 - RNA, 22 nt, Human
cugucaucacaguugagcagcc

SEQ ID NO: 547885 - RNA, 22 nt, Human
uguaacagagcuuuuuuauagc

SEQ ID NO: 547886 - RNA, 22 nt, Human
ugccagaagugcuuuauaagug

SEQ ID NO: 547887 - RNA, 20 nt, Human
agguguccacguggcagggu

SEQ ID NO: 547888 - RNA, 22 nt, Human
ucagaaaaugaaauggacucuc

SEQ ID NO: 547889 - RNA, 22 nt, Human
cagcugagaaaggcaggcucac

SEQ ID NO: 547890 - RNA, 20 nt, Human
acugugaaugcugaauuagc

SEQ ID NO: 547891 - RNA, 22 nt, Human
aauuuuguucuuggaaaucagg

SEQ ID NO: 547892 - RNA, 22 nt, Human
uuucuuuugaauaguguguggu

SEQ ID NO: 547893 - RNA, 22 nt, Human
gcucccuguucucagccaugau

SEQ ID NO: 547894 - RNA, 22 nt, Human
ggaaagaccugagauaggaaua

SEQ ID NO: 547895 - RNA, 22 nt, Human
ggccucugcccucacuccuguc

SEQ ID NO: 547896 - RNA, 22 nt, Human
uggcuuccugcauggauccucu

SEQ ID NO: 547897 - RNA, 22 nt, Human
cacagcugugagaagggagccu

SEQ ID NO: 547898 - RNA, 20 nt, Human
uggcaggaauagggccagag

SEQ ID NO: 547899 - RNA, 22 nt, Human
ugucauucauuuaaguauguuu

SEQ ID NO: 547900 - RNA, 22 nt, Human
ccaaaguccuuucuccaccugc

SEQ ID NO: 547901 - RNA, 19 nt, Human
gagcacagcggcauuuggu

SEQ ID NO: 547902 - RNA, 20 nt, Human
uuugauuucacaaggccagu

SEQ ID NO: 547903 - RNA, 20 nt, Human
aauaaacuacugagagaugu

SEQ ID NO: 547904 - RNA, 22 nt, Human
uaauauacuucccauaguuuga

SEQ ID NO: 547905 - RNA, 22 nt, Human
acaacuuucuggguuaucugau

SEQ ID NO: 547906 - RNA, 22 nt, Human
aggguccugggugcaguugcuu

SEQ ID NO: 547907 - RNA, 22 nt, Human
cugcagagcaaguaacauccuc

SEQ ID NO: 547908 - RNA, 22 nt, Human
uuuucucaggugcuuaucuaag

SEQ ID NO: 547909 - RNA, 22 nt, Human
ucccaaggcacagggcagggac

SEQ ID NO: 547910 - RNA, 22 nt, Human
cagcugggagcuccauuagaua

SEQ ID NO: 547911 - RNA, 22 nt, Human
uggagccaaggccaguucucag

SEQ ID NO: 547912 - RNA, 22 nt, Human
cugagaucuuuauacgaggcac

SEQ ID NO: 547913 - RNA, 22 nt, Human
aauaaacaaaucuuuccugugg

SEQ ID NO: 547914 - RNA, 22 nt, Human
uauuucuuucagguauguguug

SEQ ID NO: 547915 - RNA, 22 nt, Human
uuggaaaaauugccugaugucu

SEQ ID NO: 547916 - RNA, 19 nt, Human
ccuggguccacucagacua

SEQ ID NO: 547917 - RNA, 22 nt, Human
aauuuggcagugucuugaagua

SEQ ID NO: 547918 - RNA, 22 nt, Human
ggcagugaugucaaacagugaa

SEQ ID NO: 547919 - RNA, 22 nt, Human
uucugucacuuaggaggucaua

SEQ ID NO: 547920 - RNA, 22 nt, Human
uuuccucugggcccugccaccc

SEQ ID NO: 547921 - RNA, 22 nt, Human
gaugauuuuguuggugauucaa

SEQ ID NO: 547922 - RNA, 22 nt, Human
gcugauuauuacaugucugugg

SEQ ID NO: 547923 - RNA, 22 nt, Human
aaaaguugcaaaauugcucuuc

SEQ ID NO: 547924 - RNA, 22 nt, Human
agagaagacuuacagccacagu

SEQ ID NO: 547925 - RNA, 22 nt, Human
uaaacaagaaacauuuucuguu

SEQ ID NO: 547926 - RNA, 22 nt, Human
cuuucucuguguuucacaugcu

SEQ ID NO: 547927 - RNA, 22 nt, Human
ggcuccacccugcuuccagaag

SEQ ID NO: 547928 - RNA, 22 nt, Human
gcaaggaagcagaguugcuauc

SEQ ID NO: 547929 - RNA, 22 nt, Human
agcaguggcugaagauguuccu

SEQ ID NO: 547930 - RNA, 22 nt, Human
caugagauuugggaggggccag

SEQ ID NO: 547931 - RNA, 22 nt, Human
auguaagguucagaguauguga

SEQ ID NO: 547932 - RNA, 22 nt, Human
aucagacaauuguugaguacug

SEQ ID NO: 547933 - RNA, 22 nt, Human
gcaguggcaugaugugggcuca

SEQ ID NO: 547934 - RNA, 22 nt, Human
cacaaaauaucaagcacuuuua

SEQ ID NO: 547935 - RNA, 22 nt, Human
gagguggccaagcgaggaaggg

SEQ ID NO: 547936 - RNA, 22 nt, Human
agauuucccacuccauguauug

SEQ ID NO: 547937 - RNA, 22 nt, Human
aaacacuagcaggaagcacuga

SEQ ID NO: 547938 - RNA, 22 nt, Human
cugaaugaggaaaagagugagg

SEQ ID NO: 547939 - RNA, 22 nt, Human
caaggcugcugcgggucgcacc

SEQ ID NO: 547940 - RNA, 22 nt, Human
aagaagguguggaaagaugcuc

SEQ ID NO: 547941 - RNA, 22 nt, Human
cagaagcacuaggaggaaacgu

SEQ ID NO: 547942 - RNA, 22 nt, Human
cauguccacaguucugagaggc

SEQ ID NO: 547943 - RNA, 22 nt, Human
uaaucacaucaggguaaauggg

SEQ ID NO: 547944 - RNA, 22 nt, Human
ccaggcugggcuacaaguugag

SEQ ID NO: 547945 - RNA, 22 nt, Human
ggucaggguauaaucaagugag

SEQ ID NO: 547946 - RNA, 22 nt, Human
auugcuggcugccaucuugccc

SEQ ID NO: 547947 - RNA, 22 nt, Human
aaguaugcuaauuaacuagcac

SEQ ID NO: 547948 - RNA, 22 nt, Human
agaggcuccaccuucucugucc

SEQ ID NO: 547949 - RNA, 22 nt, Human
acuugccuguuacauuucuagu

SEQ ID NO: 547950 - RNA, 22 nt, Human
gucauuguguggacauggagaa

SEQ ID NO: 547951 - RNA, 22 nt, Human
uggggccuggucagagcugcac

SEQ ID NO: 547952 - RNA, 22 nt, Human
agaaaauuuaaagagacacaca

SEQ ID NO: 547953 - RNA, 22 nt, Human
gagccuggauugaagugggugg

SEQ ID NO: 547954 - RNA, 22 nt, Human
ggcagcuggggcagugcccugu

SEQ ID NO: 547955 - RNA, 22 nt, Human
ugaggaggucagagucuggcug

SEQ ID NO: 547956 - RNA, 22 nt, Human
aaggcugagccagggccccuau

SEQ ID NO: 547957 - RNA, 22 nt, Human
ugccucugaggaagauuguguu

SEQ ID NO: 547958 - RNA, 22 nt, Human
caggcagccuucucgucucaca

SEQ ID NO: 547959 - RNA, 22 nt, Human
uugaagcacaaugucuuuuauc

SEQ ID NO: 547960 - RNA, 22 nt, Human
gacaggcuucauccucagaguu

SEQ ID NO: 547961 - RNA, 22 nt, Human
uauuuugagguauuuuugagcu

SEQ ID NO: 547962 - RNA, 22 nt, Human
ugggccugagcucaccaggggc

SEQ ID NO: 547963 - RNA, 22 nt, Human
ucagagugaccuuacauggucu

SEQ ID NO: 547964 - RNA, 22 nt, Human
ccaaaguauuaaaucuuagcaa

SEQ ID NO: 547965 - RNA, 22 nt, Human
uauuucuucgggauucaagcua

SEQ ID NO: 547966 - RNA, 22 nt, Human
cagggagcuggugccagccgac

SEQ ID NO: 547967 - RNA, 21 nt, Human
uggcucugaaagagugcugca

SEQ ID NO: 547968 - RNA, 22 nt, Human
uucuuauaaguuaauauuucca

SEQ ID NO: 547969 - RNA, 22 nt, Human
ggcugccuccucgagacaggau

SEQ ID NO: 547970 - RNA, 22 nt, Human
aaugcugcucucauaauuauag

SEQ ID NO: 547971 - RNA, 22 nt, Human
aaugagcugcugcuguuccacc

SEQ ID NO: 547972 - RNA, 22 nt, Human
uuuacagcuucuauacuaugug

SEQ ID NO: 547973 - RNA, 22 nt, Human
ggaggcggagcuugcagugagc

SEQ ID NO: 547974 - RNA, 22 nt, Human
uccaggcuagguuuacaggaca

SEQ ID NO: 547975 - RNA, 22 nt, Human
gagguggguguaucacagguca

SEQ ID NO: 547976 - RNA, 22 nt, Human
ugcuccugagguuggagaucca

SEQ ID NO: 547977 - RNA, 22 nt, Human
cuugcuuaccuaguuagcucca

SEQ ID NO: 547978 - RNA, 22 nt, Human
gccuucugugcuccuggccuuu

SEQ ID NO: 547979 - RNA, 22 nt, Human
agggacaguuacaucaucagac

SEQ ID NO: 547980 - RNA, 22 nt, Human
aucagcaagauugugucuugua

SEQ ID NO: 547981 - RNA, 22 nt, Human
uccugccuuagagcaaggaaaa

SEQ ID NO: 547982 - RNA, 22 nt, Human
agaagauuuagguugacgcuau

SEQ ID NO: 547983 - RNA, 22 nt, Human
ccugugcuuuaggccucaaacu

SEQ ID NO: 547984 - RNA, 22 nt, Human
uucaauucuaaacuaauauucu

SEQ ID NO: 547985 - RNA, 22 nt, Human
aguggggaagagcaugggcccu

SEQ ID NO: 547986 - RNA, 20 nt, Human
aagagaagaagucuuugaaa

SEQ ID NO: 547987 - RNA, 22 nt, Human
gcucuggguagccacugccugg

SEQ ID NO: 547988 - RNA, 22 nt, Human
aggcacugcuucuaaguaggaa

SEQ ID NO: 547989 - RNA, 22 nt, Human
uugcauugaaaauauauuuuaa

SEQ ID NO: 547990 - RNA, 22 nt, Human
gcugccugaaauguugccuagc

SEQ ID NO: 547991 - RNA, 22 nt, Human
ugaaaugagagcacagaauaaa

SEQ ID NO: 547992 - RNA, 22 nt, Human
uugguucacauuagauuuccuu

SEQ ID NO: 547993 - RNA, 22 nt, Human
cagccaggagccucugcaacua

SEQ ID NO: 547994 - RNA, 19 nt, Human
guauuucaggacaagacgu

SEQ ID NO: 547995 - RNA, 23 nt, Human
aauauauguguuuuucugcuuca

SEQ ID NO: 547996 - RNA, 22 nt, Human
ucaggcugaaggaggccuaucu

SEQ ID NO: 547997 - RNA, 22 nt, Human
cagcugugauuccugcugucca

SEQ ID NO: 547998 - RNA, 22 nt, Human
aggcucagcaucugauucauau

SEQ ID NO: 547999 - RNA, 22 nt, Human
cugcuuuagacaacugcuggga

SEQ ID NO: 548000 - RNA, 21 nt, Human
ucacacacguuuccaagggca

SEQ ID NO: 548001 - RNA, 22 nt, Human
cugcugagagcugaaggcugua

SEQ ID NO: 548002 - RNA, 22 nt, Human
accagcagaguugaggaggaca

SEQ ID NO: 548003 - RNA, 22 nt, Human
ugccaggcugcccuccagucug

SEQ ID NO: 548004 - RNA, 20 nt, Human
gcugccuuguccugcuuggu

SEQ ID NO: 548005 - RNA, 22 nt, Human
gcccagcacauugcugaggacc

SEQ ID NO: 548006 - RNA, 22 nt, Human
uccagccaacugccuagggagc

SEQ ID NO: 548007 - RNA, 22 nt, Human
ggggauggugggaaggcaaucu

SEQ ID NO: 548008 - RNA, 22 nt, Human
uagauguuccacauauauaugu

SEQ ID NO: 548009 - RNA, 22 nt, Human
acaauucucucauaucuuauua

SEQ ID NO: 548010 - RNA, 22 nt, Human
ucaucuucuauuaauagggaga

SEQ ID NO: 548011 - RNA, 22 nt, Human
cugccacuuacuaggcauggug

SEQ ID NO: 548012 - RNA, 22 nt, Human
caggggcucugggugaugugag

SEQ ID NO: 548013 - RNA, 22 nt, Human
agcauuuaggagaauuugagaa

SEQ ID NO: 548014 - RNA, 22 nt, Human
agaugauggccauguccucucc

SEQ ID NO: 548015 - RNA, 22 nt, Human
cagaacuguuauaacagcuguu

SEQ ID NO: 548016 - RNA, 22 nt, Human
gcugucugucucugugacuuaa

SEQ ID NO: 548017 - RNA, 22 nt, Human
caggccucaggggcucaggcug

SEQ ID NO: 548018 - RNA, 22 nt, Human
ugagaauucuacaauagaucaa

SEQ ID NO: 548019 - RNA, 22 nt, Human
uggccagcccucuucccacacu

SEQ ID NO: 548020 - RNA, 22 nt, Human
ggcucuggugggaagguuagau

SEQ ID NO: 548021 - RNA, 22 nt, Human
aaguucaaguaguguuacaugg

SEQ ID NO: 548022 - RNA, 22 nt, Human
gcccugucccuuggcuucuagg

SEQ ID NO: 548023 - RNA, 22 nt, Human
acagauggcacuuuuuaggacu

SEQ ID NO: 548024 - RNA, 23 nt, Human
uggaagcagaaguuucaauaucc

SEQ ID NO: 548025 - RNA, 21 nt, Human
ugcagcugacacugguaugcc

SEQ ID NO: 548026 - RNA, 22 nt, Human
uucuaaaauaaguuuaucuggu

SEQ ID NO: 548027 - RNA, 22 nt, Human
ugcagucuuuccucgaguuugu

SEQ ID NO: 548028 - RNA, 22 nt, Human
agccuggaauuaaggaaaugca

SEQ ID NO: 548029 - RNA, 22 nt, Human
accccagcccugcuucugggag

SEQ ID NO: 548030 - RNA, 22 nt, Human
aaaugcacaaaguaaguguaau

SEQ ID NO: 548031 - RNA, 22 nt, Human
ggcugcugggaauaugccagcu

SEQ ID NO: 548032 - RNA, 22 nt, Human
auuucuucagguucuucuagga

SEQ ID NO: 548033 - RNA, 22 nt, Human
uuacagauggaucuagcaaaau

SEQ ID NO: 548034 - RNA, 22 nt, Human
aauuuuguuuaagugaucugcu

SEQ ID NO: 548035 - RNA, 18 nt, Human
uaggaaccacuugcagag

SEQ ID NO: 548036 - RNA, 22 nt, Human
cuggcccuaugagccuccugau

SEQ ID NO: 548037 - RNA, 22 nt, Human
cguuccucuacuccagcuaccc

SEQ ID NO: 548038 - RNA, 22 nt, Human
gaggagagggcugcgggcccac

SEQ ID NO: 548039 - RNA, 22 nt, Human
uuucuucuaggacuaauaagag

SEQ ID NO: 548040 - RNA, 23 nt, Human
agaaaaacaggauuguguuccua

SEQ ID NO: 548041 - RNA, 20 nt, Human
aauguauuguuuuguuucag

SEQ ID NO: 548042 - RNA, 21 nt, Human
caucaacucuugugcucacac

SEQ ID NO: 548043 - RNA, 22 nt, Human
gcugggcugagaaguuaagcaa

SEQ ID NO: 548044 - RNA, 22 nt, Human
aaaaaugcugugguagcugugu

SEQ ID NO: 548045 - RNA, 22 nt, Human
gcccugggauuggguggaggcu

SEQ ID NO: 548046 - RNA, 22 nt, Human
uucaacuagauuuauacaauuc

SEQ ID NO: 548047 - RNA, 22 nt, Human
uuauuccauucaguucaacaag

SEQ ID NO: 548048 - RNA, 22 nt, Human
guuccuauauagccuuaaggau

SEQ ID NO: 548049 - RNA, 22 nt, Human
aaagguuugcauggaauuuacc

SEQ ID NO: 548050 - RNA, 21 nt, Human
uucaaagagugggcauuguca

SEQ ID NO: 548051 - RNA, 22 nt, Human
aacacuuaaggagagaucaaau

SEQ ID NO: 548052 - RNA, 22 nt, Human
ucagacaguuugcagugugccu

SEQ ID NO: 548053 - RNA, 22 nt, Human
aggcugcagaacagucaggugc

SEQ ID NO: 548054 - RNA, 22 nt, Human
agaucaaagccaugagagauuu

SEQ ID NO: 548055 - RNA, 22 nt, Human
auuagggcuggaugcaaggaaa

SEQ ID NO: 548056 - RNA, 22 nt, Human
caccuagggcaucccugcccca

SEQ ID NO: 548057 - RNA, 22 nt, Human
ucccaccaggugaccauuucau

SEQ ID NO: 548058 - RNA, 22 nt, Human
aguauuuagagacacaagaugg

SEQ ID NO: 548059 - RNA, 22 nt, Human
ugugcucuggaguugccuucac

SEQ ID NO: 548060 - RNA, 22 nt, Human
ggaacacagugccuuacaaacu

SEQ ID NO: 548061 - RNA, 22 nt, Human
ugaaggaauggaggaucagagc

SEQ ID NO: 548062 - RNA, 22 nt, Human
acaguggaaagaacauggauuu

SEQ ID NO: 548063 - RNA, 22 nt, Human
acaguggaaaugugggagggga

SEQ ID NO: 548064 - RNA, 22 nt, Human
agaguucugcucuucucaguga

SEQ ID NO: 548065 - RNA, 22 nt, Human
gaggcagccagagguucucauu

SEQ ID NO: 548066 - RNA, 22 nt, Human
uugaaagaggcaaaguuugauc

SEQ ID NO: 548067 - RNA, 20 nt, Human
uucuugaauacccaacccca

SEQ ID NO: 548068 - RNA, 20 nt, Human
ugccaggcugcacgccugcc

SEQ ID NO: 548069 - RNA, 23 nt, Human
ucugagagaacaaugccuccuau

SEQ ID NO: 548070 - RNA, 22 nt, Human
gaggccuggagccgccuaggcg

SEQ ID NO: 548071 - RNA, 22 nt, Human
ggaggcccagagaggugaagug

SEQ ID NO: 548072 - RNA, 22 nt, Human
caggaaaaugucaauggaaagc

SEQ ID NO: 548073 - RNA, 22 nt, Human
ggcugccugggagcccuccucu

SEQ ID NO: 548074 - RNA, 20 nt, Human
cucugcagcaaggccugggu

SEQ ID NO: 548075 - RNA, 22 nt, Human
uuauuaugugcuagagaaugua

SEQ ID NO: 548076 - RNA, 21 nt, Human
agagucugcauuucugacaag

SEQ ID NO: 548077 - RNA, 19 nt, Human
caggaugaucccaugacac

SEQ ID NO: 548078 - RNA, 23 nt, Human
aaagugcaguugaggaaucauag

SEQ ID NO: 548079 - RNA, 22 nt, Human
acacauauguggcaacuguaga

SEQ ID NO: 548080 - RNA, 22 nt, Human
cuuccaagaugaacagcaagcg

SEQ ID NO: 548081 - RNA, 22 nt, Human
aaggcagguauugaugccacag

SEQ ID NO: 548082 - RNA, 23 nt, Human
ucccaucuauugugaucaaugcc

SEQ ID NO: 548083 - RNA, 22 nt, Human
uuucaauuuccaggcuagaauu

SEQ ID NO: 548084 - RNA, 22 nt, Human
ucacagugagccaugucagaga

SEQ ID NO: 548085 - RNA, 22 nt, Human
gaaugcucuuugguccuagacu

SEQ ID NO: 548086 - RNA, 22 nt, Human
ugaguuaaaugagaacaugaaa

SEQ ID NO: 548087 - RNA, 22 nt, Human
ggguccagcuacaucagggugg

SEQ ID NO: 548088 - RNA, 22 nt, Human
acagaacuuccugcuggagugg

SEQ ID NO: 548089 - RNA, 22 nt, Human
ccagguggacggcgaguacagg

SEQ ID NO: 548090 - RNA, 22 nt, Human
uagcagagagguuucagcuaau

SEQ ID NO: 548091 - RNA, 22 nt, Human
ugaucaaagugcuggaauuaca

SEQ ID NO: 548092 - RNA, 22 nt, Human
cagugcaguugguggcaggggu

SEQ ID NO: 548093 - RNA, 22 nt, Human
gaguguucccacaccccaguug

SEQ ID NO: 548094 - RNA, 22 nt, Human
aguccagguggaccuuggccag

SEQ ID NO: 548095 - RNA, 22 nt, Human
gggcaggaacaaaucaaaugau

SEQ ID NO: 548096 - RNA, 22 nt, Human
gaacuguaguuaauacuacaca

SEQ ID NO: 548097 - RNA, 22 nt, Human
uauuaauaugugugugcaugua

SEQ ID NO: 548098 - RNA, 22 nt, Human
ucccuggacaacagacuucacu

SEQ ID NO: 548099 - RNA, 22 nt, Human
cauuuagagucuugcaauuuua

SEQ ID NO: 548100 - RNA, 22 nt, Human
ugaguuuuguaauauucaagau

SEQ ID NO: 548101 - RNA, 22 nt, Human
acuuggaaaauucaaaauggca

SEQ ID NO: 548102 - RNA, 22 nt, Human
caaaaaacacagaugucugugu

SEQ ID NO: 548103 - RNA, 22 nt, Human
cagccugcauuuguaucuguau

SEQ ID NO: 548104 - RNA, 22 nt, Human
gagagcugcagccgagaggggg

SEQ ID NO: 548105 - RNA, 21 nt, Human
cccuugccugcacuccucggc

SEQ ID NO: 548106 - RNA, 22 nt, Human
gcccgcagagaucuuuaacaaa

SEQ ID NO: 548107 - RNA, 22 nt, Human
aaguguuucuuggaauguugcg

SEQ ID NO: 548108 - RNA, 22 nt, Human
auucagcuaagugcuucaugcu

SEQ ID NO: 548109 - RNA, 22 nt, Human
ggagaccagaaggaagcuucga

SEQ ID NO: 548110 - RNA, 22 nt, Human
uggaggcaccacuggcugcccg

SEQ ID NO: 548111 - RNA, 22 nt, Human
caacugggauaaagagcuaaag

SEQ ID NO: 548112 - RNA, 22 nt, Human
uacauauguaaacauguauaaa

SEQ ID NO: 548113 - RNA, 22 nt, Human
uggcugugggauaugugacuga

SEQ ID NO: 548114 - RNA, 22 nt, Human
caccugccucauuugucccugc

SEQ ID NO: 548115 - RNA, 22 nt, Human
cugggcaggagggcucuaugga

SEQ ID NO: 548116 - RNA, 22 nt, Human
ugaaaaaacaaguuggcccauu

SEQ ID NO: 548117 - RNA, 20 nt, Human
auuuggcaugaaguauugau

SEQ ID NO: 548118 - RNA, 22 nt, Human
uuaaaaaccaucuuccuuuccu

SEQ ID NO: 548119 - RNA, 22 nt, Human
uugaaacugucagcuuuuacgc

SEQ ID NO: 548120 - RNA, 22 nt, Human
gaggaaagagucaaaucugaag

SEQ ID NO: 548121 - RNA, 22 nt, Human
caagaaauucuguucagauagc

SEQ ID NO: 548122 - RNA, 22 nt, Human
ugggccuuacuuggggcugacu

SEQ ID NO: 548123 - RNA, 20 nt, Human
uugauucccucuaaacucgc

SEQ ID NO: 548124 - RNA, 22 nt, Human
cagcuccugcagcuggcuccca

SEQ ID NO: 548125 - RNA, 22 nt, Human
auuuccuauagauauggugagu

SEQ ID NO: 548126 - RNA, 22 nt, Human
aggcuggcuggcaggggacaca

SEQ ID NO: 548127 - RNA, 22 nt, Human
uucacaaucuggcuuagcauug

SEQ ID NO: 548128 - RNA, 22 nt, Human
ucugccugcuaacuccugcacc

SEQ ID NO: 548129 - RNA, 21 nt, Human
gcagugcagcuuggaggguag

SEQ ID NO: 548130 - RNA, 22 nt, Human
auaugugucgugcuacugccca

SEQ ID NO: 548131 - RNA, 22 nt, Human
agugccuagauauuguuugaac

SEQ ID NO: 548132 - RNA, 22 nt, Human
auuauuacuccugauuguacug

SEQ ID NO: 548133 - RNA, 21 nt, Human
acagcaagccuuccuuucagg

SEQ ID NO: 548134 - RNA, 21 nt, Human
gcagcuggucucagagcuugc

SEQ ID NO: 548135 - RNA, 23 nt, Human
ucugggcaccuuguugacaugau

SEQ ID NO: 548136 - RNA, 22 nt, Human
agcccccaaaagugcuuaugau

SEQ ID NO: 548137 - RNA, 22 nt, Human
ggugaagccagggcaucaauau

SEQ ID NO: 548138 - RNA, 19 nt, Human
gcugugugaccuugggcaa

SEQ ID NO: 548139 - RNA, 22 nt, Human
gaauuugaaaagugaugggaau

SEQ ID NO: 548140 - RNA, 22 nt, Human
guuagggaucaggaacaagagc

SEQ ID NO: 548141 - RNA, 23 nt, Human
cugugcccggggcuccaccugau

SEQ ID NO: 548142 - RNA, 22 nt, Human
aagaggcagcccgcugaggcug

SEQ ID NO: 548143 - RNA, 22 nt, Human
cuggauuuaauuaacuguugcu

SEQ ID NO: 548144 - RNA, 22 nt, Human
gggcuggcgggaaaggcaauuc

SEQ ID NO: 548145 - RNA, 22 nt, Human
caguccagcucaucaguggcac

SEQ ID NO: 548146 - RNA, 20 nt, Human
gcaggcuccgggcuugggag

SEQ ID NO: 548147 - RNA, 22 nt, Human
caagucauuguuuagucauguu

SEQ ID NO: 548148 - RNA, 22 nt, Human
uuucauguuuucuuaaauggca

SEQ ID NO: 548149 - RNA, 22 nt, Human
aaagucacgcugaugggaaaug

SEQ ID NO: 548150 - RNA, 22 nt, Human
aucaccaggcaaaaugucagag

SEQ ID NO: 548151 - RNA, 22 nt, Human
ugagcagaacacgggauccaug

SEQ ID NO: 548152 - RNA, 22 nt, Human
aggcaaggugcuacagacagug

SEQ ID NO: 548153 - RNA, 22 nt, Human
gagacagcagggccagggccug

SEQ ID NO: 548154 - RNA, 22 nt, Human
acagauaaaaguuguuuaaaau

SEQ ID NO: 548155 - RNA, 22 nt, Human
acauauuuugaaagcuuucuaa

SEQ ID NO: 548156 - RNA, 22 nt, Human
gagcucagacucgggccugggg

SEQ ID NO: 548157 - RNA, 22 nt, Human
ucuugggauugcccugcaguuc

SEQ ID NO: 548158 - RNA, 22 nt, Human
ucucaaauuuguuagauaaaau

SEQ ID NO: 548159 - RNA, 22 nt, Human
cagggcuguaaauuagugcuga

SEQ ID NO: 548160 - RNA, 22 nt, Human
caggcagacauuuuugacauag

SEQ ID NO: 548161 - RNA, 22 nt, Human
ggagccugcgggagcucccauu

SEQ ID NO: 548162 - RNA, 22 nt, Human
uucagaaauaaaauaucccaac

SEQ ID NO: 548163 - RNA, 23 nt, Human
augcaguauaugucaguaguuua

SEQ ID NO: 548164 - RNA, 22 nt, Human
cugcagcuccccugagaucaag

SEQ ID NO: 548165 - RNA, 22 nt, Human
ucugucaaaugagcaaguaacu

SEQ ID NO: 548166 - RNA, 22 nt, Human
acacagggcugcgccugacccc

SEQ ID NO: 548167 - RNA, 22 nt, Human
uuccuugguagagagaauauuu

SEQ ID NO: 548168 - RNA, 22 nt, Human
ccuuucucauuuuaagcauuag

SEQ ID NO: 548169 - RNA, 22 nt, Human
ggagcagucuggugauacucag

SEQ ID NO: 548170 - RNA, 22 nt, Human
ccagagccccugagcuucccug

SEQ ID NO: 548171 - RNA, 22 nt, Human
ucagaugguuccaucauuuuuc

SEQ ID NO: 548172 - RNA, 21 nt, Human
agcagaggggacauguuugau

SEQ ID NO: 548173 - RNA, 19 nt, Human
guggccugcgcugggugcg

SEQ ID NO: 548174 - RNA, 22 nt, Human
gggcacagagggucuugaagaa

SEQ ID NO: 548175 - RNA, 22 nt, Human
cugggagucaccaggagcaagg

SEQ ID NO: 548176 - RNA, 21 nt, Human
acugugaagaugcuauaaacu

SEQ ID NO: 548177 - RNA, 20 nt, Human
cucugcuuuaggagagucag

SEQ ID NO: 548178 - RNA, 22 nt, Human
uccacugcagcuucugauggaa

SEQ ID NO: 548179 - RNA, 23 nt, Human
ucauuucagguugcaugguacca

SEQ ID NO: 548180 - RNA, 22 nt, Human
ucaauuuaagguacuacuuugg

SEQ ID NO: 548181 - RNA, 22 nt, Human
cacguuuuaugacagaagaagc

SEQ ID NO: 548182 - RNA, 22 nt, Human
gggagagagaaaacguggcgca

SEQ ID NO: 548183 - RNA, 22 nt, Human
agauacauggaacgucaaaccu

SEQ ID NO: 548184 - RNA, 22 nt, Human
ugcagggaaaguguuggcagca

SEQ ID NO: 548185 - RNA, 22 nt, Human
ugcuucaugcuucugacaauag

SEQ ID NO: 548186 - RNA, 22 nt, Human
cagagccaugguaugggcuugu

SEQ ID NO: 548187 - RNA, 22 nt, Human
uugauacauagcacaguuuagg

SEQ ID NO: 548188 - RNA, 22 nt, Human
gucaaauauacuaagagguaaa

SEQ ID NO: 548189 - RNA, 22 nt, Human
augguacaaaauguauaaaguc

SEQ ID NO: 548190 - RNA, 22 nt, Human
agucuucagagaaauuaacucu

SEQ ID NO: 548191 - RNA, 21 nt, Human
aguucauacugaguaacaaaa

SEQ ID NO: 548192 - RNA, 22 nt, Human
auuaugagaggagaaaagucag

SEQ ID NO: 548193 - RNA, 22 nt, Human
aaguucaaguguaaucuuuauu

SEQ ID NO: 548194 - RNA, 22 nt, Human
cccaggagguggagguugcagu

SEQ ID NO: 548195 - RNA, 22 nt, Human
agggugccugcugcagguucag

SEQ ID NO: 548196 - RNA, 22 nt, Human
uuucacaaagcauagcacuuua

SEQ ID NO: 548197 - RNA, 22 nt, Human
agagugguacuucuuuuucuuc

SEQ ID NO: 548198 - RNA, 22 nt, Human
ccagagucccuugcagcucagu

SEQ ID NO: 548199 - RNA, 22 nt, Human
ggccagaggccacagcuguguc

SEQ ID NO: 548200 - RNA, 22 nt, Human
ucucuggccccauggcugagcu

SEQ ID NO: 548201 - RNA, 19 nt, Human
gacuccaacuuuaagcaug

SEQ ID NO: 548202 - RNA, 22 nt, Human
ucuggcucccuggagcuccaca

SEQ ID NO: 548203 - RNA, 23 nt, Human
cuggggcucauugcaguagccau

SEQ ID NO: 548204 - RNA, 22 nt, Human
cuaauuauguuguuauaaucaa

SEQ ID NO: 548205 - RNA, 22 nt, Human
ucugaaauaggagccauguaga

SEQ ID NO: 548206 - RNA, 22 nt, Human
agcaggcuaaucuugcugaaca

SEQ ID NO: 548207 - RNA, 20 nt, Human
cucuuuugacucuuugcaag

SEQ ID NO: 548208 - RNA, 22 nt, Human
agccagcuggugggucagcugg

SEQ ID NO: 548209 - RNA, 22 nt, Human
uuggcuucuggcagucuggacg

SEQ ID NO: 548210 - RNA, 22 nt, Human
ugccauccaucaguauuugugg

SEQ ID NO: 548211 - RNA, 21 nt, Human
uguggcugccucuggcccugg

SEQ ID NO: 548212 - RNA, 22 nt, Human
uagcagcugugaguaaaagcca

SEQ ID NO: 548213 - RNA, 22 nt, Human
uauuuuaaagacugccagccua

SEQ ID NO: 548214 - RNA, 22 nt, Human
uggcucaguggcagccgcagcu

SEQ ID NO: 548215 - RNA, 22 nt, Human
acuggcugcguuccugugagac

SEQ ID NO: 548216 - RNA, 22 nt, Human
caugaagcacagcucucuuuuu

SEQ ID NO: 548217 - RNA, 17 nt, Human
uuucuccuuccaucuca

SEQ ID NO: 548218 - RNA, 22 nt, Human
aggcugaggagggauguugcuu

SEQ ID NO: 548219 - RNA, 20 nt, Human
ucccagucagccagagugag

SEQ ID NO: 548220 - RNA, 22 nt, Human
ggaguauaucguguaucauaug

SEQ ID NO: 548221 - RNA, 22 nt, Human
acauuucucagguaagucauuu

SEQ ID NO: 548222 - RNA, 22 nt, Human
gcuuccaaugcuucuaucacau

SEQ ID NO: 548223 - RNA, 22 nt, Human
gccuugccucagccauggaaac

SEQ ID NO: 548224 - RNA, 22 nt, Human
aauaacaggcucaucagaugcu

SEQ ID NO: 548225 - RNA, 22 nt, Human
gggccuggugcuucugacuccu

SEQ ID NO: 548226 - RNA, 22 nt, Human
ugaggcagugauguuuaagcac

SEQ ID NO: 548227 - RNA, 22 nt, Human
augcuuuacaguuuuccaaaca

SEQ ID NO: 548228 - RNA, 22 nt, Human
agggccuggaacuggagaccac

SEQ ID NO: 548229 - RNA, 21 nt, Human
uccagggaacuucucaggaau

SEQ ID NO: 548230 - RNA, 22 nt, Human
uacaaaguuugggguccucaaa

SEQ ID NO: 548231 - RNA, 22 nt, Human
aguuguaauaacaauaccaaaa

SEQ ID NO: 548232 - RNA, 22 nt, Human
uaagcagagcccucuuuauuag

SEQ ID NO: 548233 - RNA, 22 nt, Human
gugcagaggucacaaaagugaa

SEQ ID NO: 548234 - RNA, 22 nt, Human
gaagcaaagagcuagugccgcu

SEQ ID NO: 548235 - RNA, 22 nt, Human
ggacagcauuccuaguuccaaa

SEQ ID NO: 548236 - RNA, 22 nt, Human
gaaaaggaaauuuauagagauc

SEQ ID NO: 548237 - RNA, 19 nt, Human
cuguggcugaccucuggcc

SEQ ID NO: 548238 - RNA, 22 nt, Human
ucagacagaaggacuauuugaa

SEQ ID NO: 548239 - RNA, 22 nt, Human
gagccugaugaaacaggcagac

SEQ ID NO: 548240 - RNA, 22 nt, Human
uaucacacauaacuaagcugca

SEQ ID NO: 548241 - RNA, 22 nt, Human
ucagccuuguggcccugcucca

SEQ ID NO: 548242 - RNA, 22 nt, Human
acauuugugcaacguauccaca

SEQ ID NO: 548243 - RNA, 21 nt, Human
uucuuuccccagaggacuaaa

SEQ ID NO: 548244 - RNA, 22 nt, Human
cuucuggaggcuccagggaggu

SEQ ID NO: 548245 - RNA, 22 nt, Human
guacuucccugggaggcaagca

SEQ ID NO: 548246 - RNA, 18 nt, Human
ggcugugcguggaggcug

SEQ ID NO: 548247 - RNA, 22 nt, Human
aaauuccaccagaaucaguaau

SEQ ID NO: 548248 - RNA, 22 nt, Human
acagauggggcacaaagccaca

SEQ ID NO: 548249 - RNA, 22 nt, Human
aucuaagagagagagcaugucu

SEQ ID NO: 548250 - RNA, 22 nt, Human
gccacagcagggcccucucagg

SEQ ID NO: 548251 - RNA, 22 nt, Human
cucaacaugccuacucagucug

SEQ ID NO: 548252 - RNA, 22 nt, Human
uggugagauguauggaggguug

SEQ ID NO: 548253 - RNA, 22 nt, Human
ggcuggcacagagggcuggugu

SEQ ID NO: 548254 - RNA, 22 nt, Human
agggcagaaauauugauacugu

SEQ ID NO: 548255 - RNA, 22 nt, Human
guucagcccacagagggggccg

SEQ ID NO: 548256 - RNA, 22 nt, Human
cagagccagcccacuguucccg

SEQ ID NO: 548257 - RNA, 22 nt, Human
uaguggaggccuguugugugca

SEQ ID NO: 548258 - RNA, 22 nt, Human
aggucacacuuggaucauagaa

SEQ ID NO: 548259 - RNA, 22 nt, Human
ggcgcuggccacgguggcucug

SEQ ID NO: 548260 - RNA, 22 nt, Human
acauuucuaauuuaauguaaca

SEQ ID NO: 548261 - RNA, 22 nt, Human
acauacauguaaaggaaauuau

SEQ ID NO: 548262 - RNA, 22 nt, Human
uacaaaguaauguauaauaucg

SEQ ID NO: 548263 - RNA, 23 nt, Human
agucuuaauacagcucuuuucua

SEQ ID NO: 548264 - RNA, 22 nt, Human
ugcuucugaaaugcaggucuuc

SEQ ID NO: 548265 - RNA, 22 nt, Human
agagcuguuaauuuugcacugg

SEQ ID NO: 548266 - RNA, 22 nt, Human
uuaggaaaucacuuugcucacc

SEQ ID NO: 548267 - RNA, 22 nt, Human
ccaccccaaaugaagaccucuc

SEQ ID NO: 548268 - RNA, 22 nt, Human
ggcucagguuuccuucccagcu

SEQ ID NO: 548269 - RNA, 22 nt, Human
guguuuuauggagucauaacgu

SEQ ID NO: 548270 - RNA, 20 nt, Human
agcuggccuguccuaggccu

SEQ ID NO: 548271 - RNA, 22 nt, Human
gggcugugggacccggcacuuu

SEQ ID NO: 548272 - RNA, 22 nt, Human
gaugggaggaaccugggucccu

SEQ ID NO: 548273 - RNA, 23 nt, Human
aucuguugugccucuuauaugua

SEQ ID NO: 548274 - RNA, 22 nt, Human
ugaaaacuccaaguuucaucag

SEQ ID NO: 548275 - RNA, 22 nt, Human
gcuggccugggcagaggcuaug

SEQ ID NO: 548276 - RNA, 22 nt, Human
ucuuuugugauucuuuaguuac

SEQ ID NO: 548277 - RNA, 22 nt, Human
ggaggccaugaggcucuaggug

SEQ ID NO: 548278 - RNA, 22 nt, Human
ucaaaguaccauuaucagugga

SEQ ID NO: 548279 - RNA, 22 nt, Human
agggaagagcuugcaagaaacc

SEQ ID NO: 548280 - RNA, 22 nt, Human
uuugugaaaugaagucacaacu

SEQ ID NO: 548281 - RNA, 22 nt, Human
uauaauuuaucaugucacaguu

SEQ ID NO: 548282 - RNA, 22 nt, Human
gugaagcagggaaggaaaggau

SEQ ID NO: 548283 - RNA, 22 nt, Human
acacugcucacuucuucccuug

SEQ ID NO: 548284 - RNA, 22 nt, Human
agcucauggugcuaucucaggg

SEQ ID NO: 548285 - RNA, 22 nt, Human
gcuggccugaccugaggcuggg

SEQ ID NO: 548286 - RNA, 22 nt, Human
agggcugccugcucugcauuga

SEQ ID NO: 548287 - RNA, 22 nt, Human
cugggcuccuaaccauccaggu

SEQ ID NO: 548288 - RNA, 22 nt, Human
auaucagacagaaagcauugac

SEQ ID NO: 548289 - RNA, 22 nt, Human
aggaagagcccgggugacauaa

SEQ ID NO: 548290 - RNA, 22 nt, Human
ugucuucaucucagacacaguu

SEQ ID NO: 548291 - RNA, 19 nt, Human
gccugggaugggcagaacu

SEQ ID NO: 548292 - RNA, 22 nt, Human
cucuccagaucugcugagccag

SEQ ID NO: 548293 - RNA, 22 nt, Human
ucaagaaaugugcuuggauaua

SEQ ID NO: 548294 - RNA, 20 nt, Human
agacccucuggacugggccc

SEQ ID NO: 548295 - RNA, 22 nt, Human
uggcuggagcauuccuugucuu

SEQ ID NO: 548296 - RNA, 22 nt, Human
uuacugaaaauucuucaggauu

SEQ ID NO: 548297 - RNA, 22 nt, Human
caggugggccaugaaaaaugac

SEQ ID NO: 548298 - RNA, 22 nt, Human
aaagguuaguucuuagaagugc

SEQ ID NO: 548299 - RNA, 22 nt, Human
ggcuucuggugggagcaugacu

SEQ ID NO: 548300 - RNA, 22 nt, Human
acagaaggcggggacaaggcgg

SEQ ID NO: 548301 - RNA, 22 nt, Human
agcacacagucuuccuuccucc

SEQ ID NO: 548302 - RNA, 22 nt, Human
uucaacagcuuccaaagugugu

SEQ ID NO: 548303 - RNA, 22 nt, Human
agacccucuccaugcccacugc

SEQ ID NO: 548304 - RNA, 22 nt, Human
ucucagagaccugaacucccug

SEQ ID NO: 548305 - RNA, 22 nt, Human
ugggcucaaucugcuucuguuu

SEQ ID NO: 548306 - RNA, 22 nt, Human
gugggcuguuguucccuguucu

SEQ ID NO: 548307 - RNA, 22 nt, Human
acaguucccgucuugcacagcu

SEQ ID NO: 548308 - RNA, 22 nt, Human
gggcauggugaugugcaccugu

SEQ ID NO: 548309 - RNA, 22 nt, Human
gccugagaguugaaguucagug

SEQ ID NO: 548310 - RNA, 22 nt, Human
ucuacacaagugaguggcacaa

SEQ ID NO: 548311 - RNA, 22 nt, Human
acagagcugggaucugaaccca

SEQ ID NO: 548312 - RNA, 22 nt, Human
gaguucaguguuucuaguagug

SEQ ID NO: 548313 - RNA, 22 nt, Human
agacaucauguuacagauuaag

SEQ ID NO: 548314 - RNA, 22 nt, Human
uaucuacaggugucagguaaga

SEQ ID NO: 548315 - RNA, 22 nt, Human
aaugaugaguucuaauagaccc

SEQ ID NO: 548316 - RNA, 22 nt, Human
guuucuuaauagcaggggccaa

SEQ ID NO: 548317 - RNA, 20 nt, Human
cuucuucauuaacccuacug

SEQ ID NO: 548318 - RNA, 22 nt, Human
acccagcuggaugcauggaggc

SEQ ID NO: 548319 - RNA, 22 nt, Human
gggcagcaugucacuagcaugg

SEQ ID NO: 548320 - RNA, 22 nt, Human
ucacauuuauuucaaaguuacu

SEQ ID NO: 548321 - RNA, 21 nt, Human
uggcucugagccucauggcug

SEQ ID NO: 548322 - RNA, 22 nt, Human
accccagcucugagccacacca

SEQ ID NO: 548323 - RNA, 22 nt, Human
ucucaggaucuaauacauggua

SEQ ID NO: 548324 - RNA, 22 nt, Human
gcuggcuguguuccuucugcca

SEQ ID NO: 548325 - RNA, 22 nt, Human
ugggccugacucaccugccucc

SEQ ID NO: 548326 - RNA, 22 nt, Human
uagaaucuaguucauucauuug

SEQ ID NO: 548327 - RNA, 18 nt, Human
uggcucuggacuugcucc

SEQ ID NO: 548328 - RNA, 22 nt, Human
aaucuucacagagaaaauuagg

SEQ ID NO: 548329 - RNA, 22 nt, Human
aaaaaguauuggccaugguuga

SEQ ID NO: 548330 - RNA, 22 nt, Human
aggccuggcuuugguuugcuga

SEQ ID NO: 548331 - RNA, 22 nt, Human
cuggugcuguagccugauugag

SEQ ID NO: 548332 - RNA, 22 nt, Human
ugacaucauuggccauugggga

SEQ ID NO: 548333 - RNA, 22 nt, Human
gaggcugguucugaaguacugu

SEQ ID NO: 548334 - RNA, 22 nt, Human
aaauuugauaagccauuguuac

SEQ ID NO: 548335 - RNA, 22 nt, Human
aggcugugcacagggcaccugc

SEQ ID NO: 548336 - RNA, 22 nt, Human
agugucugccaacugcaugguc

SEQ ID NO: 548337 - RNA, 22 nt, Human
ccuggugcuuaccagagcuuuu

SEQ ID NO: 548338 - RNA, 22 nt, Human
ucucaguguuuaaaaagauuuc

SEQ ID NO: 548339 - RNA, 22 nt, Human
ccagccuuacugcccuucagug

SEQ ID NO: 548340 - RNA, 22 nt, Human
cacaggggcaaacuguagggga

SEQ ID NO: 548341 - RNA, 22 nt, Human
ugaaacuaggccaaucaaauua

SEQ ID NO: 548342 - RNA, 22 nt, Human
uaugcacaauaugaucuauuug

SEQ ID NO: 548343 - RNA, 22 nt, Human
cugccugugucuauuccuuuuu

SEQ ID NO: 548344 - RNA, 22 nt, Human
acaaaacaguguuccugccccu

SEQ ID NO: 548345 - RNA, 22 nt, Human
ccauuugucaccucugcacucc

SEQ ID NO: 548346 - RNA, 22 nt, Human
gaggaagggcugccugccgggc

SEQ ID NO: 548347 - RNA, 22 nt, Human
uguaacacucaaucuguuuaac

SEQ ID NO: 548348 - RNA, 22 nt, Human
gagcuuuacuucugacuggugc

SEQ ID NO: 548349 - RNA, 22 nt, Human
gaggcaguuugccaugccagga

SEQ ID NO: 548350 - RNA, 22 nt, Human
aauaugauccuuaaccuucaug

SEQ ID NO: 548351 - RNA, 22 nt, Human
ucauuucuaucuaugcagcuuc

SEQ ID NO: 548352 - RNA, 22 nt, Human
acagcuuuuaugggaccagcca

SEQ ID NO: 548353 - RNA, 20 nt, Human
uuauuuguuuacuuuggucc

SEQ ID NO: 548354 - RNA, 22 nt, Human
caaaagcaaagucccugaaugu

SEQ ID NO: 548355 - RNA, 22 nt, Human
agccuccacagaugcaaagggc

SEQ ID NO: 548356 - RNA, 22 nt, Human
gguggguauaguuagggccucu

SEQ ID NO: 548357 - RNA, 22 nt, Human
gagcugggaagauagcuugagc

SEQ ID NO: 548358 - RNA, 22 nt, Human
ugugacagaucuuuaaauaaug

SEQ ID NO: 548359 - RNA, 22 nt, Human
ugaaaguuaggauguaguaauu

SEQ ID NO: 548360 - RNA, 22 nt, Human
caaggaaucccauuucuaacuc

SEQ ID NO: 548361 - RNA, 22 nt, Human
cccaggaguaagugacauuguu

SEQ ID NO: 548362 - RNA, 22 nt, Human
gcuggggacuccccaccauagc

SEQ ID NO: 548363 - RNA, 22 nt, Human
auacagaagaacuauagccacu

SEQ ID NO: 548364 - RNA, 22 nt, Human
cugucuguucagauucauuacu

SEQ ID NO: 548365 - RNA, 22 nt, Human
cuuauuagugucugucugaguu

SEQ ID NO: 548366 - RNA, 22 nt, Human
caauacaauuaccaguuaauca

SEQ ID NO: 548367 - RNA, 22 nt, Human
uccuggccgccgcguggggccg

SEQ ID NO: 548368 - RNA, 22 nt, Human
caggcugccgugaagcaggccu

SEQ ID NO: 548369 - RNA, 22 nt, Human
aacagcugcuucuaucuuuuca

SEQ ID NO: 548370 - RNA, 22 nt, Human
cccacucccugcacgccugccg

SEQ ID NO: 548371 - RNA, 22 nt, Human
agcaggugcauggcgagcgcgg

SEQ ID NO: 548372 - RNA, 22 nt, Human
ucugucacugagcucaggauuc

SEQ ID NO: 548373 - RNA, 22 nt, Human
agguucccagagauagagcugu

SEQ ID NO: 548374 - RNA, 22 nt, Human
gcucccacugcagcccugagcc

SEQ ID NO: 548375 - RNA, 22 nt, Human
ucauugcagugauguuguaugu

SEQ ID NO: 548376 - RNA, 19 nt, Human
gggaaauucacuugcuucc

SEQ ID NO: 548377 - RNA, 22 nt, Human
gugaaauuguauuuggcauuga

SEQ ID NO: 548378 - RNA, 22 nt, Human
ggcugggcuccgggagcaugcg

SEQ ID NO: 548379 - RNA, 22 nt, Human
agguccuguuucuucccugggg

SEQ ID NO: 548380 - RNA, 21 nt, Human
gcagcaguguucuagaauacu

SEQ ID NO: 548381 - RNA, 22 nt, Human
gcagugacagggcugcugccuu

SEQ ID NO: 548382 - RNA, 22 nt, Human
uuuguaacaaguugaucuggua

SEQ ID NO: 548383 - RNA, 22 nt, Human
ucugcuguaaagaauuucugcc

SEQ ID NO: 548384 - RNA, 22 nt, Human
cagcagagaccaagugauuuga

SEQ ID NO: 548385 - RNA, 22 nt, Human
aaacaaagccagggaaguuaug

SEQ ID NO: 548386 - RNA, 22 nt, Human
agcuuccugaugcaagagggcu

SEQ ID NO: 548387 - RNA, 22 nt, Human
ugcaagaggaauucuagaagca

SEQ ID NO: 548388 - RNA, 22 nt, Human
ugggaguguucuuggcuugcuu

SEQ ID NO: 548389 - RNA, 22 nt, Human
cacaggaaucagcauuaauggc

SEQ ID NO: 548390 - RNA, 22 nt, Human
caugcucuccauuggacacaga

SEQ ID NO: 548391 - RNA, 22 nt, Human
uuugggcugagaugugggccga

SEQ ID NO: 548392 - RNA, 22 nt, Human
gcugucuguucgagcguguguu

SEQ ID NO: 548393 - RNA, 22 nt, Human
agacaggacacaagcugcauaa

SEQ ID NO: 548394 - RNA, 20 nt, Human
agaaacauuucuugagaacu

SEQ ID NO: 548395 - RNA, 22 nt, Human
aagcagcauugugguaggggag

SEQ ID NO: 548396 - RNA, 22 nt, Human
ucagcucuguguacaguuagca

SEQ ID NO: 548397 - RNA, 22 nt, Human
uucuucaaaauccagcaugauu

SEQ ID NO: 548398 - RNA, 22 nt, Human
aacagcuuagaaauguugcuaa

SEQ ID NO: 548399 - RNA, 20 nt, Human
aauaaaagaagccuucaccc

SEQ ID NO: 548400 - RNA, 21 nt, Human
cgcagagcgaacuugcggcgc

SEQ ID NO: 548401 - RNA, 22 nt, Human
ucaaguauaucuagucauuagg

SEQ ID NO: 548402 - RNA, 22 nt, Human
gcuguauuuauuuucuaggguu

SEQ ID NO: 548403 - RNA, 22 nt, Human
caacauguguuagacaauagac

SEQ ID NO: 548404 - RNA, 22 nt, Human
ucuuacauauacgucauuuagu

SEQ ID NO: 548405 - RNA, 22 nt, Human
aaauuugucaacuucauauguu

SEQ ID NO: 548406 - RNA, 22 nt, Human
cugguucaauacuaaacuucuu

SEQ ID NO: 548407 - RNA, 22 nt, Human
ccaggcccuugcaagucccacc

SEQ ID NO: 548408 - RNA, 22 nt, Human
caucuucagguguuuuccauca

SEQ ID NO: 548409 - RNA, 22 nt, Human
cugcccugucuuuuucugauga

SEQ ID NO: 548410 - RNA, 22 nt, Human
uguagaaagaauauguuucaua

SEQ ID NO: 548411 - RNA, 20 nt, Human
ggcagcaggaguuuccucuu

SEQ ID NO: 548412 - RNA, 22 nt, Human
cuggcucuaagugucagcuccc

SEQ ID NO: 548413 - RNA, 22 nt, Human
ucuggcucugacacuacuguua

SEQ ID NO: 548414 - RNA, 22 nt, Human
aacauguauuuuccuuggcaac

SEQ ID NO: 548415 - RNA, 22 nt, Human
caauuucuuguuaauucucagg

SEQ ID NO: 548416 - RNA, 22 nt, Human
gcaggagaaaugaagauugggu

SEQ ID NO: 548417 - RNA, 22 nt, Human
agaucuuuugguuauuauaaga

SEQ ID NO: 548418 - RNA, 22 nt, Human
ccaagggcugcugaggugucca

SEQ ID NO: 548419 - RNA, 22 nt, Human
uauuuauucuuuguacugccuu

SEQ ID NO: 548420 - RNA, 22 nt, Human
gcuggcagaagagcugguucaa

SEQ ID NO: 548421 - RNA, 22 nt, Human
caugauuuugucuuguguuaau

SEQ ID NO: 548422 - RNA, 22 nt, Human
ccacagcuucgcagucugcugc

SEQ ID NO: 548423 - RNA, 23 nt, Human
agcuuuggugaugugacagauaa

SEQ ID NO: 548424 - RNA, 22 nt, Human
uuuguacauauaaaucuuguau

SEQ ID NO: 548425 - RNA, 22 nt, Human
gguguccaucaggcugugcuuc

SEQ ID NO: 548426 - RNA, 22 nt, Human
gucagaggaggcugaguaggaa

SEQ ID NO: 548427 - RNA, 22 nt, Human
cagaggaaaguauuucuggaag

SEQ ID NO: 548428 - RNA, 22 nt, Human
caaggcuggaguguaauggcau

SEQ ID NO: 548429 - RNA, 22 nt, Human
ucccagaggcaguugguaacuu

SEQ ID NO: 548430 - RNA, 22 nt, Human
cacauaauaaauguuccugaug

SEQ ID NO: 548431 - RNA, 22 nt, Human
ucuucaugauacccuaagccac

SEQ ID NO: 548432 - RNA, 22 nt, Human
cagagcugugauaaauagauau

SEQ ID NO: 548433 - RNA, 22 nt, Human
ucucuuauuuugccuuugacaa

SEQ ID NO: 548434 - RNA, 22 nt, Human
uauuaagauacguaguuguaaa

SEQ ID NO: 548435 - RNA, 22 nt, Human
agccaagcacucaacuccugga

SEQ ID NO: 548436 - RNA, 22 nt, Human
ugugaaagcaagucuaguucuc

SEQ ID NO: 548437 - RNA, 22 nt, Human
gagcagugacuggagcaugaga

SEQ ID NO: 548438 - RNA, 22 nt, Human
auguaauuugcccucaaguuaa

SEQ ID NO: 548439 - RNA, 22 nt, Human
ucuuccaaaugcagcuaaagcu

SEQ ID NO: 548440 - RNA, 22 nt, Human
uccaacuuucuccuccggcuug

SEQ ID NO: 548441 - RNA, 22 nt, Human
ccugcucugccaaguccucuuu

SEQ ID NO: 548442 - RNA, 22 nt, Human
gccaauggcucaugagcaggac

SEQ ID NO: 548443 - RNA, 23 nt, Human
cugugugugccgaggguggccac

SEQ ID NO: 548444 - RNA, 22 nt, Human
uucuaaaaccaauucugcuucu

SEQ ID NO: 548445 - RNA, 22 nt, Human
uaaaugugucuuuuuaaggccu

SEQ ID NO: 548446 - RNA, 21 nt, Human
gggugggguuccagccuuuuc

SEQ ID NO: 548447 - RNA, 22 nt, Human
cauaauuucuguaucagcacca

SEQ ID NO: 548448 - RNA, 20 nt, Human
ugaaggugacuccuuucuug

SEQ ID NO: 548449 - RNA, 22 nt, Human
cagaggucccuguucuuaagga

SEQ ID NO: 548450 - RNA, 22 nt, Human
guucaaagcuccugguacagua

SEQ ID NO: 548451 - RNA, 22 nt, Human
uguuuguucccucucuuuccug

SEQ ID NO: 548452 - RNA, 22 nt, Human
uauuucccagggagcaacaagc

SEQ ID NO: 548453 - RNA, 23 nt, Human
gaauacaaagcagaugguccagc

SEQ ID NO: 548454 - RNA, 22 nt, Human
ggcucagguugggucacaugac

SEQ ID NO: 548455 - RNA, 22 nt, Human
cugggugguucuaacuguugau

SEQ ID NO: 548456 - RNA, 22 nt, Human
aacucaguguguuucuuaguau

SEQ ID NO: 548457 - RNA, 22 nt, Human
uccugggcuguggccccgggca

SEQ ID NO: 548458 - RNA, 23 nt, Human
ugaaaucagaacccuuaccucuc

SEQ ID NO: 548459 - RNA, 22 nt, Human
cacucugacuggcccugcagga

SEQ ID NO: 548460 - RNA, 22 nt, Human
aggccaggguagggcccauugu

SEQ ID NO: 548461 - RNA, 18 nt, Human
gcugccugcauuccucac

SEQ ID NO: 548462 - RNA, 22 nt, Human
ggguuucaugguucucacaaug

SEQ ID NO: 548463 - RNA, 22 nt, Human
ugagaagcugcuugugcuguau

SEQ ID NO: 548464 - RNA, 22 nt, Human
uggcacugggacagaugcucuc

SEQ ID NO: 548465 - RNA, 16 nt, Human
agcagccagcacugga

SEQ ID NO: 548466 - RNA, 22 nt, Human
cugaggcacugucagcugaggc

SEQ ID NO: 548467 - RNA, 22 nt, Human
uggcugagcucccuguguguug

SEQ ID NO: 548468 - RNA, 22 nt, Human
ucuguauuuuaagaugcuguuu

SEQ ID NO: 548469 - RNA, 22 nt, Human
caggaugggugucggccagcac

SEQ ID NO: 548470 - RNA, 22 nt, Human
uugaaacaguagcucauagacc

SEQ ID NO: 548471 - RNA, 22 nt, Human
agaaauguugaauacacaaaau

SEQ ID NO: 548472 - RNA, 22 nt, Human
uaacuucuggaaaugcaucugc

SEQ ID NO: 548473 - RNA, 22 nt, Human
ugcaggaggcuuuauucaggau

SEQ ID NO: 548474 - RNA, 22 nt, Human
uucuucuucuggcugcaccugg

SEQ ID NO: 548475 - RNA, 22 nt, Human
gauaaacacaaggugauuucau

SEQ ID NO: 548476 - RNA, 22 nt, Human
gccuggagcagacgugucccgg

SEQ ID NO: 548477 - RNA, 22 nt, Human
ugucagagcaaugagguucagc

SEQ ID NO: 548478 - RNA, 22 nt, Human
aauauauagaaguacccguugu

SEQ ID NO: 548479 - RNA, 22 nt, Human
gcucacugccauucucuagaug

SEQ ID NO: 548480 - RNA, 20 nt, Human
uuacucaguuccugccaugc

SEQ ID NO: 548481 - RNA, 22 nt, Human
cucugucaggcugcagaugcuc

SEQ ID NO: 548482 - RNA, 22 nt, Human
acucucucacagcuuggcugau

SEQ ID NO: 548483 - RNA, 22 nt, Human
uuguuuguaugcugagaagaau

SEQ ID NO: 548484 - RNA, 22 nt, Human
ucuguucaucucaugggagaau

SEQ ID NO: 548485 - RNA, 22 nt, Human
aggugcuugguaaauauuuuag

SEQ ID NO: 548486 - RNA, 22 nt, Human
gacccaggcccaaggcugccag

SEQ ID NO: 548487 - RNA, 22 nt, Human
augcugagacuggagcagcugg

SEQ ID NO: 548488 - RNA, 22 nt, Human
aaagcacaugaguaguguagua

SEQ ID NO: 548489 - RNA, 21 nt, Human
auauuucucauaagguuaugg

SEQ ID NO: 548490 - RNA, 22 nt, Human
gugauuuugagaccuauauagu

SEQ ID NO: 548491 - RNA, 23 nt, Human
ugaaacauuuaggguagaauuuc

SEQ ID NO: 548492 - RNA, 22 nt, Human
uucacacagaaucugaggagcu

SEQ ID NO: 548493 - RNA, 22 nt, Human
acauuacauaagauuguaaccu

SEQ ID NO: 548494 - RNA, 22 nt, Human
gcugaaauuagacugcagaagu

SEQ ID NO: 548495 - RNA, 22 nt, Human
uugagaguuugggggcaauaug

SEQ ID NO: 548496 - RNA, 22 nt, Human
uuccagauuucuacacaagacc

SEQ ID NO: 548497 - RNA, 22 nt, Human
uuaugcauauagcagauacgag

SEQ ID NO: 548498 - RNA, 22 nt, Human
aucuagaaaguguugaagauca

SEQ ID NO: 548499 - RNA, 22 nt, Human
uucaaguuaccuuuaaacagcu

SEQ ID NO: 548500 - RNA, 22 nt, Human
ggugaggcuaagugacacaggg

SEQ ID NO: 548501 - RNA, 22 nt, Human
cucuggaguucccuugaucuga

SEQ ID NO: 548502 - RNA, 22 nt, Human
uuagauauguuuuugcuaaugc

SEQ ID NO: 548503 - RNA, 21 nt, Human
guccagagagccggcuccuga

SEQ ID NO: 548504 - RNA, 22 nt, Human
auacaucuagagucauaaaaac

SEQ ID NO: 548505 - RNA, 22 nt, Human
cacaagagagugcgcguugcaa

SEQ ID NO: 548506 - RNA, 22 nt, Human
acugaaaaugaauuagaaacag

SEQ ID NO: 548507 - RNA, 23 nt, Human
aaaaucuucugccuaugaagaaa

SEQ ID NO: 548508 - RNA, 22 nt, Human
ggcugcaguuugucuuuugcuu

SEQ ID NO: 548509 - RNA, 20 nt, Human
acccagcucugugcccuggg

SEQ ID NO: 548510 - RNA, 22 nt, Human
aaauucuaaggucacaauguug

SEQ ID NO: 548511 - RNA, 22 nt, Human
gaaucacgguauucugcacggg

SEQ ID NO: 548512 - RNA, 22 nt, Human
uugauaaaaugauaucuucuuu

SEQ ID NO: 548513 - RNA, 22 nt, Human
gaguuauucuagguccuuugua

SEQ ID NO: 548514 - RNA, 22 nt, Human
gccuccugguugcuucuccaac

SEQ ID NO: 548515 - RNA, 22 nt, Human
caaaagaagcucuuggggcuag

SEQ ID NO: 548516 - RNA, 22 nt, Human
ucuuuucuggacucugcaugga

SEQ ID NO: 548517 - RNA, 22 nt, Human
uuugaaaggaauuaggaugaca

SEQ ID NO: 548518 - RNA, 22 nt, Human
ugucucugagaugacucccacc

SEQ ID NO: 548519 - RNA, 22 nt, Human
agccaggcggggcagguuuccu

SEQ ID NO: 548520 - RNA, 22 nt, Human
ugucaugcccaggagcaaggua

SEQ ID NO: 548521 - RNA, 20 nt, Human
uaaagacauaagcuacuauc

SEQ ID NO: 548522 - RNA, 20 nt, Human
uguaaaacaaggugaauccu

SEQ ID NO: 548523 - RNA, 22 nt, Human
caagugaucagacacugaaguc

SEQ ID NO: 548524 - RNA, 22 nt, Human
agagugcagaggucaaagaaca

SEQ ID NO: 548525 - RNA, 22 nt, Human
cagcuggcagaaccugcaucca

SEQ ID NO: 548526 - RNA, 22 nt, Human
gugucauggaaaauugcaaugg

SEQ ID NO: 548527 - RNA, 22 nt, Human
uuucaugauccauuuacaaaau

SEQ ID NO: 548528 - RNA, 22 nt, Human
agaccacagucaggcuccuggu

SEQ ID NO: 548529 - RNA, 20 nt, Human
aauuucuccuggguaacaga

SEQ ID NO: 548530 - RNA, 22 nt, Human
aguggcaguuugggagcuacag

SEQ ID NO: 548531 - RNA, 22 nt, Human
ccaggcuagaaacugaggcaca

SEQ ID NO: 548532 - RNA, 21 nt, Human
uagcagagaguuaacuucucc

SEQ ID NO: 548533 - RNA, 22 nt, Human
uucuuaagugagaaagcaggag

SEQ ID NO: 548534 - RNA, 22 nt, Human
ucugggcccugagauguucuuc

SEQ ID NO: 548535 - RNA, 17 nt, Human
ugcauuguuggaaauuu

SEQ ID NO: 548536 - RNA, 18 nt, Human
aggcccuggccucgaaca

SEQ ID NO: 548537 - RNA, 18 nt, Human
gcuuugcagaaauacaga

SEQ ID NO: 548538 - RNA, 22 nt, Human
cugugccuggggggcagagcug

SEQ ID NO: 548539 - RNA, 22 nt, Human
gaagagcugcucagaacaugau

SEQ ID NO: 548540 - RNA, 22 nt, Human
cagcagagcuuauuaacuaaaa

SEQ ID NO: 548541 - RNA, 21 nt, Human
ucuuguccuugcucucccacu

SEQ ID NO: 548542 - RNA, 21 nt, Human
ugcuucucuagaucaacuacu

SEQ ID NO: 548543 - RNA, 22 nt, Human
ggucccugaagaggccuggggu

SEQ ID NO: 548544 - RNA, 22 nt, Human
guacagaaaguacccauagaag

SEQ ID NO: 548545 - RNA, 22 nt, Human
aggagccccucuucaguccugg

SEQ ID NO: 548546 - RNA, 22 nt, Human
agaaacugaauuauuucugagg

SEQ ID NO: 548547 - RNA, 22 nt, Human
uccaggcugggcugaagggugc

SEQ ID NO: 548548 - RNA, 22 nt, Human
augcccugaaagauucaaaggc

SEQ ID NO: 548549 - RNA, 22 nt, Human
uucugggacaucuggacaguuu

SEQ ID NO: 548550 - RNA, 22 nt, Human
cacacaaauauucuggaggcaa

SEQ ID NO: 548551 - RNA, 22 nt, Human
cagcauugaucccaggcugugg

SEQ ID NO: 548552 - RNA, 22 nt, Human
agaggaaguaaucaggaccugc

SEQ ID NO: 548553 - RNA, 22 nt, Human
cccaccaguacagaugguagau

SEQ ID NO: 548554 - RNA, 22 nt, Human
aguauuucuaguugguucuacu

SEQ ID NO: 548555 - RNA, 22 nt, Human
cauuuaaagguuguggguaaaa

SEQ ID NO: 548556 - RNA, 22 nt, Human
acauagcucaguaucacuuacu

SEQ ID NO: 548557 - RNA, 21 nt, Human
agcaccaaaugcaggcucugg

SEQ ID NO: 548558 - RNA, 22 nt, Human
uccuugaauccuagcauccuau

SEQ ID NO: 548559 - RNA, 22 nt, Human
aggcagcagggccacuggcuga

SEQ ID NO: 548560 - RNA, 22 nt, Human
agaagugcuccagugaguuggg

SEQ ID NO: 548561 - RNA, 22 nt, Human
gugucccagcagcacauuggcu

SEQ ID NO: 548562 - RNA, 23 nt, Human
uguccuaugcagcuaaaauuccu

SEQ ID NO: 548563 - RNA, 22 nt, Human
gaugcacuuucuuuucaacagu

SEQ ID NO: 548564 - RNA, 18 nt, Human
acagacacuuaguaugag

SEQ ID NO: 548565 - RNA, 22 nt, Human
uuucuggacagcaagaucaguu

SEQ ID NO: 548566 - RNA, 22 nt, Human
ggagcugcauuuagggagccuu

SEQ ID NO: 548567 - RNA, 22 nt, Human
cagcaggcccagaguuucaugg

SEQ ID NO: 548568 - RNA, 22 nt, Human
agggagagacauuuccuucuug

SEQ ID NO: 548569 - RNA, 22 nt, Human
acacucuuucacuaccuuaauu

SEQ ID NO: 548570 - RNA, 22 nt, Human
ugcaggcuggggaggcagacuu

SEQ ID NO: 548571 - RNA, 22 nt, Human
gucuccaguguucaggugacug

SEQ ID NO: 548572 - RNA, 22 nt, Human
uauuccuauuucuaaacauaug

SEQ ID NO: 548573 - RNA, 22 nt, Human
cacugcaguaacucuaggacug

SEQ ID NO: 548574 - RNA, 22 nt, Human
ucaaggaggugcuuggcuucac

SEQ ID NO: 548575 - RNA, 22 nt, Human
uccagggagauacuggcugcca

SEQ ID NO: 548576 - RNA, 22 nt, Human
auugcuuuugagcuagaauuuu

SEQ ID NO: 548577 - RNA, 22 nt, Human
uucuagauugccuguaaguaaa

SEQ ID NO: 548578 - RNA, 22 nt, Human
ucagggcagccuaaggcaccuc

SEQ ID NO: 548579 - RNA, 22 nt, Human
uggcuccuaggauggugccugg

SEQ ID NO: 548580 - RNA, 22 nt, Human
ucacugcaaucucugccuucca

SEQ ID NO: 548581 - RNA, 22 nt, Human
cagagccaaaaccguaacagcc

SEQ ID NO: 548582 - RNA, 22 nt, Human
agcugccauccgaggugucaga

SEQ ID NO: 548583 - RNA, 22 nt, Human
ccuaagaauuaaugaauacacc

SEQ ID NO: 548584 - RNA, 22 nt, Human
cuuacauugucucuugcugagc

SEQ ID NO: 548585 - RNA, 22 nt, Human
acccaggcugcuucucaguggc

SEQ ID NO: 548586 - RNA, 22 nt, Human
aacaacagcugcuaaagaguug

SEQ ID NO: 548587 - RNA, 22 nt, Human
cugggcagcuaccaccacugcu

SEQ ID NO: 548588 - RNA, 19 nt, Human
ucagggcaguccggucccc

SEQ ID NO: 548589 - RNA, 22 nt, Human
aggcacuguggaagacaugguu

SEQ ID NO: 548590 - RNA, 22 nt, Human
gaggugagaagggggucagaug

SEQ ID NO: 548591 - RNA, 22 nt, Human
gccuguuggguaacagaguuca

SEQ ID NO: 548592 - RNA, 22 nt, Human
guguuccauguuugagguaguu

SEQ ID NO: 548593 - RNA, 22 nt, Human
agagcuguucagcagccagguu

SEQ ID NO: 548594 - RNA, 20 nt, Human
gcaggcagggaaugggggug

SEQ ID NO: 548595 - RNA, 23 nt, Human
uacauucuguauuuuuauagagu

SEQ ID NO: 548596 - RNA, 17 nt, Human
ucaugcccaacuauuac

SEQ ID NO: 548597 - RNA, 22 nt, Human
uuucacauuuguuuuaagaagu

SEQ ID NO: 548598 - RNA, 21 nt, Human
gauuucacuuaccuucauuua

SEQ ID NO: 548599 - RNA, 22 nt, Human
gguggggcccuggcacugguau

SEQ ID NO: 548600 - RNA, 23 nt, Human
acaaaguaauuccugcuuccaaa

SEQ ID NO: 548601 - RNA, 22 nt, Human
uagccucuggaauccuuucucu

SEQ ID NO: 548602 - RNA, 22 nt, Human
uggcagcaguggagguagaaag

SEQ ID NO: 548603 - RNA, 22 nt, Human
caacagaagguguacuacugaa

SEQ ID NO: 548604 - RNA, 22 nt, Human
uguacacugcaggaugcauugc

SEQ ID NO: 548605 - RNA, 22 nt, Human
ucaggcugcuguacugugaaug

SEQ ID NO: 548606 - RNA, 22 nt, Human
auucacaaaaugauauagauac

SEQ ID NO: 548607 - RNA, 22 nt, Human
ggccagagagcagccaggauuc

SEQ ID NO: 548608 - RNA, 19 nt, Human
agacagagacugaaauaga

SEQ ID NO: 548609 - RNA, 22 nt, Human
aagaaugagcucaaagaucuua

SEQ ID NO: 548610 - RNA, 22 nt, Human
uacaguaaccagucuacuuaga

SEQ ID NO: 548611 - RNA, 22 nt, Human
uauggucauuuguuagugcuuu

SEQ ID NO: 548612 - RNA, 22 nt, Human
gccugagaucagccaagccccu

SEQ ID NO: 548613 - RNA, 22 nt, Human
ggagucaccaaguaggagucuu

SEQ ID NO: 548614 - RNA, 22 nt, Human
cuuccccaaccccgacugugug

SEQ ID NO: 548615 - RNA, 22 nt, Human
cuucaaagauuugauaaagcca

SEQ ID NO: 548616 - RNA, 22 nt, Human
caaagcaagggcugaagacucc

SEQ ID NO: 548617 - RNA, 21 nt, Human
ucucugggaggacuugugaga

SEQ ID NO: 548618 - RNA, 22 nt, Human
ucccaggacaggccacauggaa

SEQ ID NO: 548619 - RNA, 21 nt, Human
ugaaaguuggagucaaaugua

SEQ ID NO: 548620 - RNA, 22 nt, Human
ggccugugucggccccggguuc

SEQ ID NO: 548621 - RNA, 22 nt, Human
accauuaagaaucugguuuccu

SEQ ID NO: 548622 - RNA, 22 nt, Human
guggggcaguggccugggagca

SEQ ID NO: 548623 - RNA, 22 nt, Human
auucaguuucauggcacagcua

SEQ ID NO: 548624 - RNA, 22 nt, Human
agaauaugaggaaacugugaau

SEQ ID NO: 548625 - RNA, 22 nt, Human
uuccaacaauguguuauuguuc

SEQ ID NO: 548626 - RNA, 22 nt, Human
aggcuggcuuggcucuccugug

SEQ ID NO: 548627 - RNA, 22 nt, Human
uacauuccuguuagcaucuaag

SEQ ID NO: 548628 - RNA, 22 nt, Human
aaucacaguggguacuagauug

SEQ ID NO: 548629 - RNA, 22 nt, Human
ugcuggcuuugcgagaugcauu

SEQ ID NO: 548630 - RNA, 18 nt, Human
ccagcaugccagaggcug

SEQ ID NO: 548631 - RNA, 22 nt, Human
cugaaggauuagagagcacuua

SEQ ID NO: 548632 - RNA, 22 nt, Human
guuucuuucuauugacugaaca

SEQ ID NO: 548633 - RNA, 17 nt, Human
ucgguuugccaggcuuc

SEQ ID NO: 548634 - RNA, 22 nt, Human
gaugcagggcuggcaggagcuu

SEQ ID NO: 548635 - RNA, 22 nt, Human
aauaauuuuagcucagaguugu

SEQ ID NO: 548636 - RNA, 22 nt, Human
uauugaguuacagaaaauacuu

SEQ ID NO: 548637 - RNA, 22 nt, Human
acacaccaugauuuauuuaccc

SEQ ID NO: 548638 - RNA, 22 nt, Human
aaguugaaugcguacgugacau

SEQ ID NO: 548639 - RNA, 22 nt, Human
aacuuacaauguuagagucuca

SEQ ID NO: 548640 - RNA, 22 nt, Human
uuguacaaaggauuuggaagag

SEQ ID NO: 548641 - RNA, 22 nt, Human
auaugcacacucugcccacaga

SEQ ID NO: 548642 - RNA, 22 nt, Human
ggagguggagcuggaaguucca

SEQ ID NO: 548643 - RNA, 23 nt, Human
gaggcagcuccugcagugcccug

SEQ ID NO: 548644 - RNA, 22 nt, Human
agccccaguccgcugcgggcgg

SEQ ID NO: 548645 - RNA, 19 nt, Human
uuucacaaagagagcguga

SEQ ID NO: 548646 - RNA, 22 nt, Human
acaguggauauauuaaaugaga

SEQ ID NO: 548647 - RNA, 22 nt, Human
agugauggagcuuccucugcua

SEQ ID NO: 548648 - RNA, 22 nt, Human
aacaaaguguacuuccauacug

SEQ ID NO: 548649 - RNA, 20 nt, Human
aguuuauuccaggagaacug

SEQ ID NO: 548650 - RNA, 22 nt, Human
gaugaaaaauugcugugucaua

SEQ ID NO: 548651 - RNA, 22 nt, Human
ugaugaaaauaugauucugagg

SEQ ID NO: 548652 - RNA, 22 nt, Human
caaaguuaugaaugauaagauu

SEQ ID NO: 548653 - RNA, 22 nt, Human
ucuggcucuguguccucaccca

SEQ ID NO: 548654 - RNA, 22 nt, Human
uugccuuuaaccccugaaaggc

SEQ ID NO: 548655 - RNA, 22 nt, Human
agcagguggccacgaggaggag

SEQ ID NO: 548656 - RNA, 22 nt, Human
cagaaaaccugacucuagaacu

SEQ ID NO: 548657 - RNA, 22 nt, Human
gcugccagcucacucuccugag

SEQ ID NO: 548658 - RNA, 22 nt, Human
uguacaauggcuauaauacccu

SEQ ID NO: 548659 - RNA, 22 nt, Human
ggcaguggugggaggcucgcuc

SEQ ID NO: 548660 - RNA, 20 nt, Human
guuuuaugccaguucugugu

SEQ ID NO: 548661 - RNA, 21 nt, Human
aaaggccauaaucacggagca

SEQ ID NO: 548662 - RNA, 22 nt, Human
aggagcucauguggcugccugu

SEQ ID NO: 548663 - RNA, 22 nt, Human
ugggcagacuaaggucaaagcu

SEQ ID NO: 548664 - RNA, 19 nt, Human
guggccucggagcgcgcgg

SEQ ID NO: 548665 - RNA, 22 nt, Human
guacauuuuacuuuguuugaau

SEQ ID NO: 548666 - RNA, 22 nt, Human
ucagugauugguggacugccua

SEQ ID NO: 548667 - RNA, 22 nt, Human
ugcccuggaaccaucuacaguc

SEQ ID NO: 548668 - RNA, 22 nt, Human
cucugugcccuacugcucagcu

SEQ ID NO: 548669 - RNA, 22 nt, Human
accuucaauuauuuuuguucca

SEQ ID NO: 548670 - RNA, 22 nt, Human
aagggcucuucuauuuauggcc

SEQ ID NO: 548671 - RNA, 22 nt, Human
gaacuacagugcauuuucuuaa

SEQ ID NO: 548672 - RNA, 19 nt, Human
ucaaggcucccugagggau

SEQ ID NO: 548673 - RNA, 22 nt, Human
uucagagauggaaggcagaaug

SEQ ID NO: 548674 - RNA, 22 nt, Human
acaggggcaggcaggacccuuu

SEQ ID NO: 548675 - RNA, 22 nt, Human
ggcugccugaacuuuggggaaa

SEQ ID NO: 548676 - RNA, 19 nt, Human
cauaaauguacaagauaca

SEQ ID NO: 548677 - RNA, 22 nt, Human
cugccagcagaggccagcgcug

SEQ ID NO: 548678 - RNA, 17 nt, Human
uuuuguucaucuucaaa

SEQ ID NO: 548679 - RNA, 22 nt, Human
gggaaggaaaucuugcuuguga

SEQ ID NO: 548680 - RNA, 22 nt, Human
ccagaaaaugcagaacauagaa

SEQ ID NO: 548681 - RNA, 22 nt, Human
ugccagcaguagcaguaggcca

SEQ ID NO: 548682 - RNA, 22 nt, Human
gcugagcugaggcagggcuggg

SEQ ID NO: 548683 - RNA, 22 nt, Human
auccugcuuguuacuuauagag

SEQ ID NO: 548684 - RNA, 22 nt, Human
cagcucuacguuucuaugaauc

SEQ ID NO: 548685 - RNA, 22 nt, Human
ucaguggagagcuuccaggauu

SEQ ID NO: 548686 - RNA, 22 nt, Human
gggcagagguucaacuucaaca

SEQ ID NO: 548687 - RNA, 22 nt, Human
gaagagcugugauucaggcuua

SEQ ID NO: 548688 - RNA, 22 nt, Human
accuuucauuaaagucuguagu

SEQ ID NO: 548689 - RNA, 22 nt, Human
ggguacagagagaugagguaac

SEQ ID NO: 548690 - RNA, 22 nt, Human
caguguggugagauuccaggug

SEQ ID NO: 548691 - RNA, 22 nt, Human
cuuagaaaugcagauucucagg

SEQ ID NO: 548692 - RNA, 21 nt, Human
uaagugcaaagagacagauac

SEQ ID NO: 548693 - RNA, 22 nt, Human
gggcagagaaauggacaguugg

SEQ ID NO: 548694 - RNA, 17 nt, Human
guccugggaggagagag

SEQ ID NO: 548695 - RNA, 22 nt, Human
cuugcuuuguccagaaauucag

SEQ ID NO: 548696 - RNA, 22 nt, Human
uauugaaauucuucauguccuc

SEQ ID NO: 548697 - RNA, 22 nt, Human
agcagcucacaggauuccugaa

SEQ ID NO: 548698 - RNA, 22 nt, Human
ggcugccuccugcugggcugga

SEQ ID NO: 548699 - RNA, 22 nt, Human
cuggggcuguaggaggacuuau

SEQ ID NO: 548700 - RNA, 20 nt, Human
auucuaaagcucugcucuuu

SEQ ID NO: 548701 - RNA, 22 nt, Human
cuuauucagcaaguuuggguac

SEQ ID NO: 548702 - RNA, 22 nt, Human
agugggguccucaguaugguuc

SEQ ID NO: 548703 - RNA, 22 nt, Human
gcugcccuaauaucacauguua

SEQ ID NO: 548704 - RNA, 22 nt, Human
guacucaguaauauaacauauu

SEQ ID NO: 548705 - RNA, 22 nt, Human
auuaaaauuccaagguaugcca

SEQ ID NO: 548706 - RNA, 22 nt, Human
ggaaggggagcuaaaucuacug

SEQ ID NO: 548707 - RNA, 22 nt, Human
cagaaauguuuguuaauauugu

SEQ ID NO: 548708 - RNA, 22 nt, Human
aggaaaaaccuguuaaugguag

SEQ ID NO: 548709 - RNA, 22 nt, Human
gccugaaguuucaugccucuau

SEQ ID NO: 548710 - RNA, 22 nt, Human
acagaguauuggaaaggcagug

SEQ ID NO: 548711 - RNA, 22 nt, Human
agaccauggccauccuaggaaa

SEQ ID NO: 548712 - RNA, 22 nt, Human
gcugaggaggugugguuaggug

SEQ ID NO: 548713 - RNA, 21 nt, Human
acugagagauguuggaucaua

SEQ ID NO: 548714 - RNA, 22 nt, Human
gcucccuccaugaggcagaccg

SEQ ID NO: 548715 - RNA, 19 nt, Human
acugccugcagguguuggg

SEQ ID NO: 548716 - RNA, 22 nt, Human
ccuuuggguucaaucucggucu

SEQ ID NO: 548717 - RNA, 22 nt, Human
auuuccuagccucucuugcagu

SEQ ID NO: 548718 - RNA, 22 nt, Human
cuuuacaaagcaauuuugucuc

SEQ ID NO: 548719 - RNA, 22 nt, Human
uguguucauguugauucauagc

SEQ ID NO: 548720 - RNA, 22 nt, Human
cucagcuaguaacguacauguc

SEQ ID NO: 548721 - RNA, 22 nt, Human
aagcaacagaaacauucuaaua

SEQ ID NO: 548722 - RNA, 22 nt, Human
uuccauaaaggugauaguauac

SEQ ID NO: 548723 - RNA, 22 nt, Human
uggugccauuagcccugcuguu

SEQ ID NO: 548724 - RNA, 22 nt, Human
uaaggcacccuucugaguagag

SEQ ID NO: 548725 - RNA, 22 nt, Human
ucugagagauacaaggaggcaa

SEQ ID NO: 548726 - RNA, 22 nt, Human
uucuacaugguugcucagaggg

SEQ ID NO: 548727 - RNA, 20 nt, Human
agcaagaguaaggacagcga

SEQ ID NO: 548728 - RNA, 22 nt, Human
ggucugagcuugagcccaugcu

SEQ ID NO: 548729 - RNA, 22 nt, Human
ugaagcaggaaacuucuuguuu

SEQ ID NO: 548730 - RNA, 22 nt, Human
gcaaagacggacucaggagugc

SEQ ID NO: 548731 - RNA, 22 nt, Human
gugcugucguggaacugggcug

SEQ ID NO: 548732 - RNA, 22 nt, Human
aguggugcccaccugagccuga

SEQ ID NO: 548733 - RNA, 22 nt, Human
ucuggcuccuggcuccacugcc

SEQ ID NO: 548734 - RNA, 21 nt, Human
agggccugugcucuccagguc

SEQ ID NO: 548735 - RNA, 22 nt, Human
guccucuguguaggcugcagac

SEQ ID NO: 548736 - RNA, 22 nt, Human
acagagcauauaaagugcuuug

SEQ ID NO: 548737 - RNA, 22 nt, Human
cagucccagacccagaaggugg

SEQ ID NO: 548738 - RNA, 22 nt, Human
ggcucuggcaaggggaggcuac

SEQ ID NO: 548739 - RNA, 19 nt, Human
aguuauuucuaaauuuacc

SEQ ID NO: 548740 - RNA, 22 nt, Human
uauuuuguauuuaugcaagaaa

SEQ ID NO: 548741 - RNA, 22 nt, Human
gauucacagaacuuagucaagc

SEQ ID NO: 548742 - RNA, 22 nt, Human
gagcagugaugggaggacguca

SEQ ID NO: 548743 - RNA, 22 nt, Human
ccucacugaagaggugacauuu

SEQ ID NO: 548744 - RNA, 22 nt, Human
agcuuccucaccucagaggucu

SEQ ID NO: 548745 - RNA, 22 nt, Human
ggacacaguggaagacagcuug

SEQ ID NO: 548746 - RNA, 22 nt, Human
ugcccacaggaagacaccagcg

SEQ ID NO: 548747 - RNA, 22 nt, Human
gccuucugcgcucgugucuccg

SEQ ID NO: 548748 - RNA, 22 nt, Human
aggcugaggcagguggaucacu

SEQ ID NO: 548749 - RNA, 22 nt, Human
uccuugaauggacauuacacug

SEQ ID NO: 548750 - RNA, 22 nt, Human
acaguguaauaugggagucagu

SEQ ID NO: 548751 - RNA, 22 nt, Human
uuccucagagggcgcuggggaa

SEQ ID NO: 548752 - RNA, 22 nt, Human
gugauuucuaaucaucugaaug

SEQ ID NO: 548753 - RNA, 22 nt, Human
acuuguguaacacagaaagaac

SEQ ID NO: 548754 - RNA, 22 nt, Human
gcagggcagcuuagucccuguc

SEQ ID NO: 548755 - RNA, 20 nt, Human
cuggggacagcaauggcugu

SEQ ID NO: 548756 - RNA, 22 nt, Human
aaagauaugucuccaaagagau

SEQ ID NO: 548757 - RNA, 22 nt, Human
aaauauguaaccaaggugaagu

SEQ ID NO: 548758 - RNA, 22 nt, Human
ggcaggugcugggagcaucuca

SEQ ID NO: 548759 - RNA, 22 nt, Human
uuugcauugcauacaaggaacu

SEQ ID NO: 548760 - RNA, 22 nt, Human
uagcuagagguagauggguuag

SEQ ID NO: 548761 - RNA, 22 nt, Human
cuugaaagcacuccuuugacug

SEQ ID NO: 548762 - RNA, 22 nt, Human
cagaguggugcaagggcagugu

SEQ ID NO: 548763 - RNA, 22 nt, Human
uaauuauugucugaagaguuau

SEQ ID NO: 548764 - RNA, 22 nt, Human
gaagagcuuagacagaaucaaa

SEQ ID NO: 548765 - RNA, 22 nt, Human
agccugugugcuuuggacaggg

SEQ ID NO: 548766 - RNA, 22 nt, Human
agcagagguguuuauuauggga

SEQ ID NO: 548767 - RNA, 22 nt, Human
gauauugcaccucuaauacauu

SEQ ID NO: 548768 - RNA, 22 nt, Human
accucagagggauguuacaggc

SEQ ID NO: 548769 - RNA, 22 nt, Human
cacauacauucauguuacucua

SEQ ID NO: 548770 - RNA, 20 nt, Human
aacacacugguggcaucagg

SEQ ID NO: 548771 - RNA, 22 nt, Human
uuggaacagaaacagacaaaua

SEQ ID NO: 548772 - RNA, 22 nt, Human
uuaaacaguguuucaugugggg

SEQ ID NO: 548773 - RNA, 22 nt, Human
agcagggcucugccaugggccc

SEQ ID NO: 548774 - RNA, 22 nt, Human
auauucaaauuacauuuacuaa

SEQ ID NO: 548775 - RNA, 22 nt, Human
uggcccugcuuaugucucucuu

SEQ ID NO: 548776 - RNA, 22 nt, Human
cccugcagccggccagcucauu

SEQ ID NO: 548777 - RNA, 22 nt, Human
acccagcaugacaccugcacau

SEQ ID NO: 548778 - RNA, 22 nt, Human
aagaacaguguccugggacucg

SEQ ID NO: 548779 - RNA, 22 nt, Human
agagcagaguggcuguagcuug

SEQ ID NO: 548780 - RNA, 22 nt, Human
ugcagcucugaacagucaugaa

SEQ ID NO: 548781 - RNA, 22 nt, Human
guuccuaagcacugugcauucu

SEQ ID NO: 548782 - RNA, 22 nt, Human
gagcacagccaaaguaagaagg

SEQ ID NO: 548783 - RNA, 22 nt, Human
aaauguuucuacuugugagcau

SEQ ID NO: 548784 - RNA, 22 nt, Human
cugggaugucuauagaacacuu

SEQ ID NO: 548785 - RNA, 22 nt, Human
aucaaauacaaagggcauaagg

SEQ ID NO: 548786 - RNA, 22 nt, Human
uagcagaggcuacugcuccuug

SEQ ID NO: 548787 - RNA, 22 nt, Human
cagagcugggaucccaugggcg

SEQ ID NO: 548788 - RNA, 22 nt, Human
gaggcuguucaguguccagcuu

SEQ ID NO: 548789 - RNA, 22 nt, Human
uagcagggccaggcugggaacc

SEQ ID NO: 548790 - RNA, 22 nt, Human
auccagagacccaaggacagaa

SEQ ID NO: 548791 - RNA, 22 nt, Human
caaagggcucuagacucagcag

SEQ ID NO: 548792 - RNA, 22 nt, Human
aggcugagggcuccugagggca

SEQ ID NO: 548793 - RNA, 22 nt, Human
uuucacuguuaggaguaugcua

SEQ ID NO: 548794 - RNA, 22 nt, Human
agagcugcaccuaugcagaccu

SEQ ID NO: 548795 - RNA, 22 nt, Human
aaagguaacugggguuuugcca

SEQ ID NO: 548796 - RNA, 22 nt, Human
agaugcugugucuguucccuug

SEQ ID NO: 548797 - RNA, 22 nt, Human
guauuauugucaugaaauaaua

SEQ ID NO: 548798 - RNA, 22 nt, Human
ucuuuucauugagaacacacug

SEQ ID NO: 548799 - RNA, 23 nt, Human
uucuuucaagaaguucacagugc

SEQ ID NO: 548800 - RNA, 22 nt, Human
ggaggccacgguuuagcaccga

SEQ ID NO: 548801 - RNA, 22 nt, Human
caggcugaggguuaggccuuag

SEQ ID NO: 548802 - RNA, 22 nt, Human
gcagacuggucuucagccuugg

SEQ ID NO: 548803 - RNA, 22 nt, Human
ugugugugggcggaacggcccc

SEQ ID NO: 548804 - RNA, 21 nt, Human
uggcagaguugaguaguuaug

SEQ ID NO: 548805 - RNA, 22 nt, Human
cucaucaccacauauaacaaag

SEQ ID NO: 548806 - RNA, 22 nt, Human
cccaggucccgccccagcucua

SEQ ID NO: 548807 - RNA, 22 nt, Human
agggggaggcugugcugcgucu

SEQ ID NO: 548808 - RNA, 22 nt, Human
agaauauugaaaguucuugaca

SEQ ID NO: 548809 - RNA, 22 nt, Human
ucagguggaauuaauuaagaga

SEQ ID NO: 548810 - RNA, 20 nt, Human
ugcucuggggguggagagac

SEQ ID NO: 548811 - RNA, 21 nt, Human
ccugccaggaaacugaguguc

SEQ ID NO: 548812 - RNA, 22 nt, Human
cggcugaggaucuccaggccug

SEQ ID NO: 548813 - RNA, 22 nt, Human
aguuccagcugugaccagaaaa

SEQ ID NO: 548814 - RNA, 22 nt, Human
agggaaggaggccauguguccc

SEQ ID NO: 548815 - RNA, 22 nt, Human
cagagauuauuauaacuaauua

SEQ ID NO: 548816 - RNA, 22 nt, Human
ucuucagugcauguuaccuaua

SEQ ID NO: 548817 - RNA, 22 nt, Human
uccagaaaauucagaaauuguu

SEQ ID NO: 548818 - RNA, 22 nt, Human
gcaggugguggcgcgcgcccug

SEQ ID NO: 548819 - RNA, 22 nt, Human
ucuggagccacaaaccucagcu

SEQ ID NO: 548820 - RNA, 22 nt, Human
gcuggucacucugggagcugcu

SEQ ID NO: 548821 - RNA, 22 nt, Human
ggcugcuggggacgugggagag

SEQ ID NO: 548822 - RNA, 22 nt, Human
ucuuuguacaggaaggcacugu

SEQ ID NO: 548823 - RNA, 22 nt, Human
gcacaugagcugcugggauggg

SEQ ID NO: 548824 - RNA, 22 nt, Human
aaauccuggccucaaguggucc

SEQ ID NO: 548825 - RNA, 22 nt, Human
auccaguuccaaagaucauuua

SEQ ID NO: 548826 - RNA, 22 nt, Human
aaagagcauggaaaguucagga

SEQ ID NO: 548827 - RNA, 22 nt, Human
cuguacucaagguaaaccagga

SEQ ID NO: 548828 - RNA, 22 nt, Human
caugcuccaaaaacaagagaau

SEQ ID NO: 548829 - RNA, 20 nt, Human
ugggagcuggugaggucuca

SEQ ID NO: 548830 - RNA, 22 nt, Human
ugcaugcacgugcuauguauga

SEQ ID NO: 548831 - RNA, 22 nt, Human
ggcaggucagguccaugaccaa

SEQ ID NO: 548832 - RNA, 22 nt, Human
gaccugccugagcugccucugc

SEQ ID NO: 548833 - RNA, 22 nt, Human
aaaaccuucagguuuggaguuu

SEQ ID NO: 548834 - RNA, 22 nt, Human
gcccccagaagggccacagauu

SEQ ID NO: 548835 - RNA, 22 nt, Human
ucugagaggcagaccuuccuaa

SEQ ID NO: 548836 - RNA, 22 nt, Human
guauuuuacuuacgcaugacuu

SEQ ID NO: 548837 - RNA, 22 nt, Human
aacuucuugguccugagcuguu

SEQ ID NO: 548838 - RNA, 22 nt, Human
ugagaucauauguacaaggucu

SEQ ID NO: 548839 - RNA, 22 nt, Human
caucacaaaaugauuauucccu

SEQ ID NO: 548840 - RNA, 22 nt, Human
gguggcucggccagugcaggcc

SEQ ID NO: 548841 - RNA, 22 nt, Human
cagacacaccaggcccauucug

SEQ ID NO: 548842 - RNA, 22 nt, Human
auggagauuuuuagaauuacag

SEQ ID NO: 548843 - RNA, 22 nt, Human
ccagaaaauauggcuaagguga

SEQ ID NO: 548844 - RNA, 22 nt, Human
gcuuuacauuuuggaaagguga

SEQ ID NO: 548845 - RNA, 22 nt, Human
aggccucugggccugcggguuu

SEQ ID NO: 548846 - RNA, 22 nt, Human
cagcagggaagcugugcuguuu

SEQ ID NO: 548847 - RNA, 22 nt, Human
agagggcauuaacucugucuug

SEQ ID NO: 548848 - RNA, 22 nt, Human
agguccuggugaccauggaguu

SEQ ID NO: 548849 - RNA, 22 nt, Human
aauguuugaacuuugcauauuu

SEQ ID NO: 548850 - RNA, 22 nt, Human
uggcucaggugugagcugaaga

SEQ ID NO: 548851 - RNA, 22 nt, Human
ugcuuaaaggauaguuuaaacu

SEQ ID NO: 548852 - RNA, 22 nt, Human
gcucugggaauucagaaagccu

SEQ ID NO: 548853 - RNA, 22 nt, Human
cuacauggagaagaaaauucuu

SEQ ID NO: 548854 - RNA, 22 nt, Human
uggcugaggagggucuucuggu

SEQ ID NO: 548855 - RNA, 22 nt, Human
uuaaaauccaguguugguggau

SEQ ID NO: 548856 - RNA, 22 nt, Human
caggaccuggaaugcuugugaa

SEQ ID NO: 548857 - RNA, 22 nt, Human
agcaaagcacuuugcauacaua

SEQ ID NO: 548858 - RNA, 22 nt, Human
aaauugugcucacacugauauu

SEQ ID NO: 548859 - RNA, 22 nt, Human
ggcucugcagugacuugagggg

SEQ ID NO: 548860 - RNA, 22 nt, Human
uuucagauuaucucaacuuugg

SEQ ID NO: 548861 - RNA, 22 nt, Human
uggggguguccuggugcacaca

SEQ ID NO: 548862 - RNA, 22 nt, Human
ugaggccugcauugaacuagaa

SEQ ID NO: 548863 - RNA, 22 nt, Human
auugauuugaacaaagauauua

SEQ ID NO: 548864 - RNA, 22 nt, Human
agagugggccucugagucccag

SEQ ID NO: 548865 - RNA, 22 nt, Human
uggcugagagucauccugugug

SEQ ID NO: 548866 - RNA, 22 nt, Human
acagagaaacuaaggaguuugg

SEQ ID NO: 548867 - RNA, 22 nt, Human
auaaaucuauuggacaugugug

SEQ ID NO: 548868 - RNA, 22 nt, Human
gagagcugugguuugaccaggc

SEQ ID NO: 548869 - RNA, 22 nt, Human
ucacagaagggaaagaugccaa

SEQ ID NO: 548870 - RNA, 22 nt, Human
ucccagcagcauagcucagaau

SEQ ID NO: 548871 - RNA, 22 nt, Human
ucuucaugucuugccugauaua

SEQ ID NO: 548872 - RNA, 22 nt, Human
gucuuuuuuacaccuuacauca

SEQ ID NO: 548873 - RNA, 22 nt, Human
auuucauagauuguaaaucccu

SEQ ID NO: 548874 - RNA, 22 nt, Human
cagagcucuauguucauggagg

SEQ ID NO: 548875 - RNA, 22 nt, Human
ucagccucucugaguccagacc

SEQ ID NO: 548876 - RNA, 22 nt, Human
auacuacaagguaugugcuaaa

SEQ ID NO: 548877 - RNA, 22 nt, Human
ugccucuguggaaauggugguc

SEQ ID NO: 548878 - RNA, 22 nt, Human
accaggggugucaacagcauuu

SEQ ID NO: 548879 - RNA, 22 nt, Human
acagaggaagcauauagcacaa

SEQ ID NO: 548880 - RNA, 22 nt, Human
aggcaauccccugaggauacuu

SEQ ID NO: 548881 - RNA, 22 nt, Human
cugaggccucuguucaccagaa

SEQ ID NO: 548882 - RNA, 22 nt, Human
uuugaaagaaaccagugaguga

SEQ ID NO: 548883 - RNA, 22 nt, Human
aacagaaaagguagguggcuuu

SEQ ID NO: 548884 - RNA, 16 nt, Human
cagaguguaaacagga

SEQ ID NO: 548885 - RNA, 22 nt, Human
cugggaaggggaagguccucuc

SEQ ID NO: 548886 - RNA, 22 nt, Human
uugagaagaauguguugaguuu

SEQ ID NO: 548887 - RNA, 21 nt, Human
aggcucagagagaaacucuug

SEQ ID NO: 548888 - RNA, 22 nt, Human
aagauggcuuagaguccuggug

SEQ ID NO: 548889 - RNA, 22 nt, Human
aguggcagcugucaugcccuag

SEQ ID NO: 548890 - RNA, 22 nt, Human
uggaggaauaacagcaaccuua

SEQ ID NO: 548891 - RNA, 22 nt, Human
cucuuuuucaccucugucagcg

SEQ ID NO: 548892 - RNA, 22 nt, Human
acauaugcgaucauaggaugca

SEQ ID NO: 548893 - RNA, 22 nt, Human
uccuuuggagcuugacugguag

SEQ ID NO: 548894 - RNA, 22 nt, Human
uuugaaugagaauuauugucau

SEQ ID NO: 548895 - RNA, 19 nt, Human
auacacuaauauaaaccac

SEQ ID NO: 548896 - RNA, 22 nt, Human
ccagugcccagcugcccaggca

SEQ ID NO: 548897 - RNA, 22 nt, Human
gcguggggcagcccagggcuuc

SEQ ID NO: 548898 - RNA, 22 nt, Human
ccugaagagcacucuagaguug

SEQ ID NO: 548899 - RNA, 22 nt, Human
aaguguuuaaugguuuugauga

SEQ ID NO: 548900 - RNA, 22 nt, Human
gagggcagaaaauuaugcggug

SEQ ID NO: 548901 - RNA, 20 nt, Human
aguggggagucaggagugcc

SEQ ID NO: 548902 - RNA, 22 nt, Human
ccagucugaggccuggugaggg

SEQ ID NO: 548903 - RNA, 22 nt, Human
uuugggcaauucagugggaccu

SEQ ID NO: 548904 - RNA, 22 nt, Human
gccucuggucccucaugcugug

SEQ ID NO: 548905 - RNA, 22 nt, Human
ucucuggaauuuugagagugac

SEQ ID NO: 548906 - RNA, 18 nt, Human
gagaggagccagaauuuu

SEQ ID NO: 548907 - RNA, 22 nt, Human
ugcauuauaacugaauguuguu

SEQ ID NO: 548908 - RNA, 22 nt, Human
gugagagccugucuggaugucg

SEQ ID NO: 548909 - RNA, 22 nt, Human
cugugcuggcagaccuggaguu

SEQ ID NO: 548910 - RNA, 22 nt, Human
ucucugagcucaggagcugcag

SEQ ID NO: 548911 - RNA, 19 nt, Human
ucaucucacagggccuggc

SEQ ID NO: 548912 - RNA, 22 nt, Human
ugggcuggcguggagaguuuag

SEQ ID NO: 548913 - RNA, 22 nt, Human
gugcaguugauaguuuuaguga

SEQ ID NO: 548914 - RNA, 22 nt, Human
uuaaaagucugaugauuuacau

SEQ ID NO: 548915 - RNA, 22 nt, Human
cugccugugauuuuucucuagu

SEQ ID NO: 548916 - RNA, 19 nt, Human
gacucacaccuuccgcugu

SEQ ID NO: 548917 - RNA, 22 nt, Human
cugcugugggcaggguagcugg

SEQ ID NO: 548918 - RNA, 22 nt, Human
ugcaggaauuuuuugcagaaag

SEQ ID NO: 548919 - RNA, 22 nt, Human
gcaggcuccaaggccugggaga

SEQ ID NO: 548920 - RNA, 22 nt, Human
gaaaagaacugcaugggauuaa

SEQ ID NO: 548921 - RNA, 22 nt, Human
gcugcugcgcuugucuacuguu

SEQ ID NO: 548922 - RNA, 22 nt, Human
cagcuguuacucugaguaaaug

SEQ ID NO: 548923 - RNA, 22 nt, Human
gauuuagagaauguuuuguaag

SEQ ID NO: 548924 - RNA, 22 nt, Human
ggucccagguugacagggagac

SEQ ID NO: 548925 - RNA, 22 nt, Human
ggagaagauuggaauuaagcac

SEQ ID NO: 548926 - RNA, 22 nt, Human
uguacagcugccuuuuuuacuu

SEQ ID NO: 548927 - RNA, 22 nt, Human
uuguaaaggcuguuauugacuu

SEQ ID NO: 548928 - RNA, 22 nt, Human
uuuaagacuuagauuuauuggg

SEQ ID NO: 548929 - RNA, 22 nt, Human
gccacuggcgcugugcagagug

SEQ ID NO: 548930 - RNA, 22 nt, Human
gaaaccagcuagaggcagaggg

SEQ ID NO: 548931 - RNA, 22 nt, Human
cuggcucagacagcugugcagu

SEQ ID NO: 548932 - RNA, 22 nt, Human
cagugcuguuguaagcucauug

SEQ ID NO: 548933 - RNA, 22 nt, Human
aggcugaggcggguagaucacc

SEQ ID NO: 548934 - RNA, 22 nt, Human
cuguagccagaagcagaaggcc

SEQ ID NO: 548935 - RNA, 22 nt, Human
gagcagcucgagaaggaagcag

SEQ ID NO: 548936 - RNA, 22 nt, Human
cugggcucugcaguugauguuu

SEQ ID NO: 548937 - RNA, 22 nt, Human
caaggcagcuauugucuccaua

SEQ ID NO: 548938 - RNA, 22 nt, Human
gagaagcaaucgugacaucucc

SEQ ID NO: 548939 - RNA, 22 nt, Human
uccaagaugguugguguggugg

SEQ ID NO: 548940 - RNA, 22 nt, Human
ucccagagauuuccucuccuuc

SEQ ID NO: 548941 - RNA, 22 nt, Human
acacauuauaggcaaucaaaag

SEQ ID NO: 548942 - RNA, 22 nt, Human
acagaauugaagcugaguaaau

SEQ ID NO: 548943 - RNA, 22 nt, Human
accaacauguccucacacagcc

SEQ ID NO: 548944 - RNA, 22 nt, Human
ccauguggugggaaggagaaug

SEQ ID NO: 548945 - RNA, 22 nt, Human
gcagcugaaagggaucucuaca

SEQ ID NO: 548946 - RNA, 22 nt, Human
ucuggcagggguucugcacuug

SEQ ID NO: 548947 - RNA, 22 nt, Human
uuguguguuuguagaaaaucca

SEQ ID NO: 548948 - RNA, 22 nt, Human
ugcaggagcagagauggcugga

SEQ ID NO: 548949 - RNA, 22 nt, Human
uaguaucuauuaguaacaagag

SEQ ID NO: 548950 - RNA, 22 nt, Human
ugcagccuugccuccucccagc

SEQ ID NO: 548951 - RNA, 22 nt, Human
agcccuggcccggcugugcuuu

SEQ ID NO: 548952 - RNA, 22 nt, Human
agcugcucugauaaaccuacuu

SEQ ID NO: 548953 - RNA, 22 nt, Human
ucugccugucuccuugaauugu

SEQ ID NO: 548954 - RNA, 22 nt, Human
agggaaaguaagcauuucauua

SEQ ID NO: 548955 - RNA, 22 nt, Human
uuagaacaauauucucccuaca

SEQ ID NO: 548956 - RNA, 22 nt, Human
agggucugacaaugugacuuag

SEQ ID NO: 548957 - RNA, 22 nt, Human
uagcuuuagugaaaaauaucag

SEQ ID NO: 548958 - RNA, 22 nt, Human
guggcugcuaagucuccuuccu

SEQ ID NO: 548959 - RNA, 22 nt, Human
uacaaaguauauuucuagcugu

SEQ ID NO: 548960 - RNA, 22 nt, Human
uuuccucuucuggcaggcaggg

SEQ ID NO: 548961 - RNA, 22 nt, Human
cugcugcugagagcucagccug

SEQ ID NO: 548962 - RNA, 22 nt, Human
uuuaaacuaacaguacacguug

SEQ ID NO: 548963 - RNA, 20 nt, Human
uucaaagacccucaggucca

SEQ ID NO: 548964 - RNA, 22 nt, Human
cacaaaaucuuucucgauuauu

SEQ ID NO: 548965 - RNA, 22 nt, Human
cagaguuuuaucauacguggau

SEQ ID NO: 548966 - RNA, 22 nt, Human
uuuacacaaaagauagcacacc

SEQ ID NO: 548967 - RNA, 22 nt, Human
ucuagaaucuaaacuauaguuu

SEQ ID NO: 548968 - RNA, 22 nt, Human
uucacaggauauaugugcaggg

SEQ ID NO: 548969 - RNA, 22 nt, Human
cagaguggcaugaaugaagccu

SEQ ID NO: 548970 - RNA, 22 nt, Human
ugacagcugagccccaggcaag

SEQ ID NO: 548971 - RNA, 22 nt, Human
gccuggaguucagccaaguccc

SEQ ID NO: 548972 - RNA, 22 nt, Human
auuuaggaauguucugcacaaa

SEQ ID NO: 548973 - RNA, 22 nt, Human
acaguaaaacauuuuuauuagg

SEQ ID NO: 548974 - RNA, 20 nt, Human
cccagggaccugagcuccau

SEQ ID NO: 548975 - RNA, 22 nt, Human
acaaaguauuuuuagguuugua

SEQ ID NO: 548976 - RNA, 22 nt, Human
ccugcucagagcgucuugugug

SEQ ID NO: 548977 - RNA, 22 nt, Human
cagagcagggguuucccagguu

SEQ ID NO: 548978 - RNA, 21 nt, Human
cauuuacaugacagauugguu

SEQ ID NO: 548979 - RNA, 20 nt, Human
cugcugagagccuggcuugc

SEQ ID NO: 548980 - RNA, 22 nt, Human
uucaacaaguauuuauugagca

SEQ ID NO: 548981 - RNA, 22 nt, Human
gaaaucugucuuuguuugaaua

SEQ ID NO: 548982 - RNA, 22 nt, Human
gcauggcagugaggauggugcu

SEQ ID NO: 548983 - RNA, 19 nt, Human
ccugggaggcggagguugc

SEQ ID NO: 548984 - RNA, 22 nt, Human
acuuuugguucuguaacuguga

SEQ ID NO: 548985 - RNA, 22 nt, Human
uaaaauugcggugaauauuucc

SEQ ID NO: 548986 - RNA, 22 nt, Human
uugccaggagcucaucugaggg

SEQ ID NO: 548987 - RNA, 22 nt, Human
uggcaaauucaucuuuaguucu

SEQ ID NO: 548988 - RNA, 23 nt, Human
ggagugcaauggcgccaucucgg

SEQ ID NO: 548989 - RNA, 18 nt, Human
cugcuuugccuucauucc

SEQ ID NO: 548990 - RNA, 23 nt, Human
uuugaaugggucuauuuuucuua

SEQ ID NO: 548991 - RNA, 22 nt, Human
cugggcaguuuuacaucauugc

SEQ ID NO: 548992 - RNA, 22 nt, Human
uccaauauuucucauauaugga

SEQ ID NO: 548993 - RNA, 22 nt, Human
uuauuucuugucuauguagcca

SEQ ID NO: 548994 - RNA, 19 nt, Human
uuuaagcaauaguaucuug

SEQ ID NO: 548995 - RNA, 22 nt, Human
cacaucaagcauccaugaguuu

SEQ ID NO: 548996 - RNA, 22 nt, Human
ucaggcagagcuguggagcucu

SEQ ID NO: 548997 - RNA, 22 nt, Human
cucaggauagauuguccucuca

SEQ ID NO: 548998 - RNA, 20 nt, Human
gcccugugaugucuugaccu

SEQ ID NO: 548999 - RNA, 22 nt, Human
ucaauuucucagaaauggucuu

SEQ ID NO: 549000 - RNA, 23 nt, Human
ccucucucccuguuuggcaaaua

SEQ ID NO: 549001 - RNA, 22 nt, Human
acacccagcuuuugaaugcccu

SEQ ID NO: 549002 - RNA, 19 nt, Human
cagugcccgacgcaggucu

SEQ ID NO: 549003 - RNA, 22 nt, Human
gcagccagaagacucagaacaa

SEQ ID NO: 549004 - RNA, 22 nt, Human
gaggcuggcagaaaagcacagg

SEQ ID NO: 549005 - RNA, 21 nt, Human
uccauuguuuucccaggguuu

SEQ ID NO: 549006 - RNA, 17 nt, Human
ucaggauccaggguucu

SEQ ID NO: 549007 - RNA, 22 nt, Human
gcuggccaguguggugaccacc

SEQ ID NO: 549008 - RNA, 22 nt, Human
uggguagagcaggcuggggcuu

SEQ ID NO: 549009 - RNA, 21 nt, Human
cagagcagcguucugcugugg

SEQ ID NO: 549010 - RNA, 22 nt, Human
gccagagucuucugacccugug

SEQ ID NO: 549011 - RNA, 22 nt, Human
auauuauagacagagucuucug

SEQ ID NO: 549012 - RNA, 22 nt, Human
uugguucauuuucucaucuaga

SEQ ID NO: 549013 - RNA, 22 nt, Human
aagaguuuucuauaaucuuggc

SEQ ID NO: 549014 - RNA, 22 nt, Human
gggcugacaaccaucugacaag

SEQ ID NO: 549015 - RNA, 22 nt, Human
augggcugacccagucguggca

SEQ ID NO: 549016 - RNA, 22 nt, Human
aaagaauuuguacacccuacua

SEQ ID NO: 549017 - RNA, 22 nt, Human
uuguagauuggagaguguguga

SEQ ID NO: 549018 - RNA, 22 nt, Human
cagauuucuauuucaaauacau

SEQ ID NO: 549019 - RNA, 22 nt, Human
aacauauuuggcugauauuccc

SEQ ID NO: 549020 - RNA, 22 nt, Human
caagacuuuggaggaauuugga

SEQ ID NO: 549021 - RNA, 22 nt, Human
cugcagggagaggggacagccu

SEQ ID NO: 549022 - RNA, 22 nt, Human
gagcagcugagcuggaaugaga

SEQ ID NO: 549023 - RNA, 22 nt, Human
agguaaggcuguaagcuaagcc

SEQ ID NO: 549024 - RNA, 22 nt, Human
uuauuauugugaccugagaaug

SEQ ID NO: 549025 - RNA, 22 nt, Human
ccagggaaacuuuggaguggag

SEQ ID NO: 549026 - RNA, 22 nt, Human
aaauacugggcucaaaaggguu

SEQ ID NO: 549027 - RNA, 22 nt, Human
uguuuuuaaaauguccugguua

SEQ ID NO: 549028 - RNA, 22 nt, Human
agacacugagcauuuuccuagc

SEQ ID NO: 549029 - RNA, 22 nt, Human
ugucauuuaguccucugugugu

SEQ ID NO: 549030 - RNA, 22 nt, Human
ucagccuccgaaagugcuggga

SEQ ID NO: 549031 - RNA, 22 nt, Human
guccucaggaaggcuuucugac

SEQ ID NO: 549032 - RNA, 22 nt, Human
ucaguuuucucaucuguaauuu

SEQ ID NO: 549033 - RNA, 22 nt, Human
gcuggcagccaagugaagaggg

SEQ ID NO: 549034 - RNA, 22 nt, Human
agggucaacaggagucaagaug

SEQ ID NO: 549035 - RNA, 22 nt, Human
cauuagaagaacaguuauauua

SEQ ID NO: 549036 - RNA, 22 nt, Human
uuuguaacucucccuuuguaua

SEQ ID NO: 549037 - RNA, 22 nt, Human
ucagggacgugagcucagaguc

SEQ ID NO: 549038 - RNA, 22 nt, Human
aaauuuuagaccaggcaaaacu

SEQ ID NO: 549039 - RNA, 19 nt, Human
auacacauacguaaacuga

SEQ ID NO: 549040 - RNA, 22 nt, Human
agcaaagaaauggaggcucaga

SEQ ID NO: 549041 - RNA, 22 nt, Human
ucaggcagcuccaggaauggua

SEQ ID NO: 549042 - RNA, 22 nt, Human
agauggguaacuggagucugcu

SEQ ID NO: 549043 - RNA, 23 nt, Human
aggugcagcccuggaccugcccc

SEQ ID NO: 549044 - RNA, 22 nt, Human
ccagaagaccccguccaccucc

SEQ ID NO: 549045 - RNA, 22 nt, Human
gggcuccaacggugagcaugga

SEQ ID NO: 549046 - RNA, 22 nt, Human
aggcaggcuggucugaagagug

SEQ ID NO: 549047 - RNA, 22 nt, Human
agaauucuggaguugggaggaa

SEQ ID NO: 549048 - RNA, 22 nt, Human
uggcagagcuggcugcggauga

SEQ ID NO: 549049 - RNA, 22 nt, Human
aggcccuguccauggugcugaa

SEQ ID NO: 549050 - RNA, 22 nt, Human
ugggccugacacuuacuaggga

SEQ ID NO: 549051 - RNA, 22 nt, Human
cuggggcugcggacgggagccc

SEQ ID NO: 549052 - RNA, 21 nt, Human
auccauccaucuuggccuaac

SEQ ID NO: 549053 - RNA, 22 nt, Human
ugaaggaaagagggaacauccc

SEQ ID NO: 549054 - RNA, 22 nt, Human
uaaaugcaagugcuccugggag

SEQ ID NO: 549055 - RNA, 18 nt, Human
cucugcuaaugggcagcu

SEQ ID NO: 549056 - RNA, 22 nt, Human
ugggcugcugagaaugagagag

SEQ ID NO: 549057 - RNA, 22 nt, Human
gcuggccauucucuuugagaug

SEQ ID NO: 549058 - RNA, 22 nt, Human
cuguuauucaagacaaaggcag

SEQ ID NO: 549059 - RNA, 22 nt, Human
cuguguggacugguugaggccc

SEQ ID NO: 549060 - RNA, 22 nt, Human
ggaaagagcccagcagugcuug

SEQ ID NO: 549061 - RNA, 19 nt, Human
ugcuuccucaccaucuccc

SEQ ID NO: 549062 - RNA, 22 nt, Human
gacuauuuuauaaacuagugaa

SEQ ID NO: 549063 - RNA, 22 nt, Human
ggaggagacccugugucaguuu

SEQ ID NO: 549064 - RNA, 22 nt, Human
agaggggaggcgaaccagaguc

SEQ ID NO: 549065 - RNA, 22 nt, Human
uaaguaaauuuauaaugugauu

SEQ ID NO: 549066 - RNA, 22 nt, Human
guggccagaaucuugaggccuu

SEQ ID NO: 549067 - RNA, 22 nt, Human
uguucaauccccagguccugaa

SEQ ID NO: 549068 - RNA, 22 nt, Human
gcugucugagaacaugguggaa

SEQ ID NO: 549069 - RNA, 22 nt, Human
ugggcugagcacugaggaagga

SEQ ID NO: 549070 - RNA, 22 nt, Human
agcccugccauucucuggagcu

SEQ ID NO: 549071 - RNA, 21 nt, Human
gcagccagacgggauucaguu

SEQ ID NO: 549072 - RNA, 22 nt, Human
uuacagaguagugcagaacuca

SEQ ID NO: 549073 - RNA, 22 nt, Human
ugcugcagaaauucugugagga

SEQ ID NO: 549074 - RNA, 22 nt, Human
aauacuuuugaacugaaaggca

SEQ ID NO: 549075 - RNA, 22 nt, Human
caguuucucucaauaagcaucg

SEQ ID NO: 549076 - RNA, 22 nt, Human
guagaauaaauguacacaucug

SEQ ID NO: 549077 - RNA, 22 nt, Human
ggugaaggcacaagagggcaag

SEQ ID NO: 549078 - RNA, 22 nt, Human
ugucucugaggugagggucagc

SEQ ID NO: 549079 - RNA, 22 nt, Human
uccagcagcccgaaggcccauc

SEQ ID NO: 549080 - RNA, 22 nt, Human
gccagggaggcuguaggguccu

SEQ ID NO: 549081 - RNA, 22 nt, Human
acauacaucaaguaucacaaga

SEQ ID NO: 549082 - RNA, 22 nt, Human
gacaucauagggugggaggaaa

SEQ ID NO: 549083 - RNA, 20 nt, Human
gccuggcacccggggcuggc

SEQ ID NO: 549084 - RNA, 22 nt, Human
ugcaagagcuguggcaaaagca

SEQ ID NO: 549085 - RNA, 22 nt, Human
cuggaguggccggugcuguggc

SEQ ID NO: 549086 - RNA, 22 nt, Human
auuauacaaggcuggugccuaa

SEQ ID NO: 549087 - RNA, 22 nt, Human
ggcccucccugagccagguggg

SEQ ID NO: 549088 - RNA, 22 nt, Human
ugcacccucaucagucaaaugg

SEQ ID NO: 549089 - RNA, 22 nt, Human
uagggcucgggcacaggacagg

SEQ ID NO: 549090 - RNA, 22 nt, Human
uccaggcagggcagccaucaag

SEQ ID NO: 549091 - RNA, 22 nt, Human
ugccucugggugaccaaggagc

SEQ ID NO: 549092 - RNA, 22 nt, Human
gaggcucagggaguauaugaau

SEQ ID NO: 549093 - RNA, 21 nt, Human
agcugcaggccucccagggau

SEQ ID NO: 549094 - RNA, 19 nt, Human
cagaaauagcgaaguguaa

SEQ ID NO: 549095 - RNA, 22 nt, Human
ccagccaggcuggcuguggagg

SEQ ID NO: 549096 - RNA, 22 nt, Human
aacagcagggggaccugcuggu

SEQ ID NO: 549097 - RNA, 21 nt, Human
aggggacagaguagcuccagg

SEQ ID NO: 549098 - RNA, 22 nt, Human
caaguuaguuauucuugugagc

SEQ ID NO: 549099 - RNA, 22 nt, Human
aaggaggaauucugaguucaug

SEQ ID NO: 549100 - RNA, 22 nt, Human
ggugagggaguggaacgaggug

SEQ ID NO: 549101 - RNA, 22 nt, Human
ucauuuuucacacagggucacc

SEQ ID NO: 549102 - RNA, 23 nt, Human
uaauuauggaauaauuugcaacg

SEQ ID NO: 549103 - RNA, 22 nt, Human
augcaaaugcuagagaauguug

SEQ ID NO: 549104 - RNA, 22 nt, Human
ucccuuaaaacucauguguugu

SEQ ID NO: 549105 - RNA, 19 nt, Human
ggugugaagugaggaguua

SEQ ID NO: 549106 - RNA, 20 nt, Human
uucugcuugcaaauaucaag

SEQ ID NO: 549107 - RNA, 22 nt, Human
uauagaaguaagcauugugaug

SEQ ID NO: 549108 - RNA, 22 nt, Human
cauguuaauaugcauugaguac

SEQ ID NO: 549109 - RNA, 22 nt, Human
cucccuggcuuuguccugaggc

SEQ ID NO: 549110 - RNA, 22 nt, Human
acaggaacgaauguacauuguu

SEQ ID NO: 549111 - RNA, 22 nt, Human
cauacauugaaggagaaaggaa

SEQ ID NO: 549112 - RNA, 22 nt, Human
gggcugagccacagcuuuuguu

SEQ ID NO: 549113 - RNA, 22 nt, Human
cacaccuguaauaccagcuacu

SEQ ID NO: 549114 - RNA, 21 nt, Human
aggaaaggccagcacguaggg

SEQ ID NO: 549115 - RNA, 22 nt, Human
cacugcaguuccccagugcgca

SEQ ID NO: 549116 - RNA, 22 nt, Human
uccugagaauagaguugcaugu

SEQ ID NO: 549117 - RNA, 22 nt, Human
cauaauauacuacauugaugaa

SEQ ID NO: 549118 - RNA, 22 nt, Human
guacacacaaucucuggucagu

SEQ ID NO: 549119 - RNA, 22 nt, Human
uuccagaagccuccauauuacu

SEQ ID NO: 549120 - RNA, 22 nt, Human
cacuacuugaaagaauuacaga

SEQ ID NO: 549121 - RNA, 22 nt, Human
ccuccagggcagacggggagca

SEQ ID NO: 549122 - RNA, 22 nt, Human
aauaugugggugcuaaucaaaa

SEQ ID NO: 549123 - RNA, 22 nt, Human
ggaagaacagguuuauuuuccu

SEQ ID NO: 549124 - RNA, 22 nt, Human
gcuguggcuguacagagaccau

SEQ ID NO: 549125 - RNA, 22 nt, Human
gcuucuccucccgcucccaggc

SEQ ID NO: 549126 - RNA, 22 nt, Human
gaauuuaucuacguuaaguaug

SEQ ID NO: 549127 - RNA, 19 nt, Human
ccagagucaugucuccccc

SEQ ID NO: 549128 - RNA, 22 nt, Human
uugcucuguaauaaucuggggu

SEQ ID NO: 549129 - RNA, 22 nt, Human
uggcucuguugugcugagccag

SEQ ID NO: 549130 - RNA, 20 nt, Human
ugcguguguauuuauuuucu

SEQ ID NO: 549131 - RNA, 22 nt, Human
acaguucaagucuuagacaaca

SEQ ID NO: 549132 - RNA, 17 nt, Human
agugacuuggaaagagc

SEQ ID NO: 549133 - RNA, 22 nt, Human
auuauuauuguugauguuaggg

SEQ ID NO: 549134 - RNA, 22 nt, Human
caggcagcucgaugccuuguug

SEQ ID NO: 549135 - RNA, 22 nt, Human
gaaugaauagguguccagaugg

SEQ ID NO: 549136 - RNA, 22 nt, Human
gguccugcauugccagcaagcu

SEQ ID NO: 549137 - RNA, 22 nt, Human
ugggggcagccaggcugucaag

SEQ ID NO: 549138 - RNA, 23 nt, Human
cugcagagaacugagggacagcc

SEQ ID NO: 549139 - RNA, 22 nt, Human
caaugguggugucagaagagau

SEQ ID NO: 549140 - RNA, 22 nt, Human
acacuuuaugucuagaucuggg

SEQ ID NO: 549141 - RNA, 19 nt, Human
uggcugagcuggacugagg

SEQ ID NO: 549142 - RNA, 22 nt, Human
cugucagcacucuacuacagau

SEQ ID NO: 549143 - RNA, 22 nt, Human
uuccagggcuaauuccugugga

SEQ ID NO: 549144 - RNA, 22 nt, Human
uugauuccuugaaauauccuug

SEQ ID NO: 549145 - RNA, 21 nt, Human
aaaaagcuggggcaugcaugc

SEQ ID NO: 549146 - RNA, 22 nt, Human
caugaagcauguuuugucauga

SEQ ID NO: 549147 - RNA, 22 nt, Human
uuuuccuaguaggccuauuaga

SEQ ID NO: 549148 - RNA, 22 nt, Human
gagcagaacaggccggguggga

SEQ ID NO: 549149 - RNA, 22 nt, Human
ucugaaauucacaguugaguca

SEQ ID NO: 549150 - RNA, 22 nt, Human
aggaaacagugaacuuggcagg

SEQ ID NO: 549151 - RNA, 22 nt, Human
ggcacugauaauguccucucuc

SEQ ID NO: 549152 - RNA, 20 nt, Human
ccuccuggucaggugugcag

SEQ ID NO: 549153 - RNA, 22 nt, Human
ugaaauguguaauguggaugcc

SEQ ID NO: 549154 - RNA, 22 nt, Human
acugcuuuagaccuagagcucu

SEQ ID NO: 549155 - RNA, 22 nt, Human
ugagaaccaugaaaagcuguca

SEQ ID NO: 549156 - RNA, 22 nt, Human
ucaaagucuaucuguaauuacu

SEQ ID NO: 549157 - RNA, 22 nt, Human
cuuguacauagagaagaagccu

SEQ ID NO: 549158 - RNA, 22 nt, Human
acuccuggguugcaguccucaa

SEQ ID NO: 549159 - RNA, 22 nt, Human
aaggccuugccugacagcacca

SEQ ID NO: 549160 - RNA, 22 nt, Human
aagauuuucagcuaauggugca

SEQ ID NO: 549161 - RNA, 22 nt, Human
gagcacagggaauagacagaua

SEQ ID NO: 549162 - RNA, 18 nt, Human
aguguuuauuuaggugaa

SEQ ID NO: 549163 - RNA, 22 nt, Human
caguguggagggagagagccug

SEQ ID NO: 549164 - RNA, 22 nt, Human
uggcaugggcaaaccagggaaa

SEQ ID NO: 549165 - RNA, 22 nt, Human
ugcuccuggaugagguacucca

SEQ ID NO: 549166 - RNA, 22 nt, Human
agugugggggcuuuggugucac

SEQ ID NO: 549167 - RNA, 22 nt, Human
aaauagauuuaacauccauccc

SEQ ID NO: 549168 - RNA, 17 nt, Human
gcugccaccuuuggagc

SEQ ID NO: 549169 - RNA, 22 nt, Human
uggaagagaaaggaguggaucu

SEQ ID NO: 549170 - RNA, 22 nt, Human
gucccuggaauggacucugcgc

SEQ ID NO: 549171 - RNA, 22 nt, Human
aaugugaggccuugguaguuau

SEQ ID NO: 549172 - RNA, 22 nt, Human
caguggaauacgagcagauguc

SEQ ID NO: 549173 - RNA, 22 nt, Human
aggguauguuuuuaucuacugu

SEQ ID NO: 549174 - RNA, 22 nt, Human
aaggcugaggagggccugcagg

SEQ ID NO: 549175 - RNA, 22 nt, Human
ugggagcagccaacauggccuu

SEQ ID NO: 549176 - RNA, 19 nt, Human
guucuuuucaccucugugc

SEQ ID NO: 549177 - RNA, 22 nt, Human
uguuuuaugagccauauaaccu

SEQ ID NO: 549178 - RNA, 22 nt, Human
cuuuucacaggaggauaagccc

SEQ ID NO: 549179 - RNA, 22 nt, Human
gaacauuugaugaugacauugg

SEQ ID NO: 549180 - RNA, 22 nt, Human
uaguauuuuagaaaaccaugaa

SEQ ID NO: 549181 - RNA, 22 nt, Human
ucaggagggugacaggcccugg

SEQ ID NO: 549182 - RNA, 17 nt, Human
uucaagauauugaaaug

SEQ ID NO: 549183 - RNA, 20 nt, Human
cugaaccaaggcuuucucag

SEQ ID NO: 549184 - RNA, 22 nt, Human
uguauuuuuaggaaugcgcuau

SEQ ID NO: 549185 - RNA, 22 nt, Human
auuugaagaaaguuuucuagau

SEQ ID NO: 549186 - RNA, 22 nt, Human
gagcucagcccaaagagcagug

SEQ ID NO: 549187 - RNA, 23 nt, Human
aucaaacuggugagaaugucagu

SEQ ID NO: 549188 - RNA, 22 nt, Human
uggcaagagcaaaauguacagu

SEQ ID NO: 549189 - RNA, 21 nt, Human
gcagaugggaagagacgaggc

SEQ ID NO: 549190 - RNA, 22 nt, Human
aaaauauggggugagcccagag

SEQ ID NO: 549191 - RNA, 22 nt, Human
cccagcuugucugauucagccu

SEQ ID NO: 549192 - RNA, 22 nt, Human
uagcagcaauuacacaguccgu

SEQ ID NO: 549193 - RNA, 22 nt, Human
cagcauggugccagugagucca

SEQ ID NO: 549194 - RNA, 22 nt, Human
ucaaugauaucagcaggaugug

SEQ ID NO: 549195 - RNA, 22 nt, Human
cuuccaauagcaacaaagauua

SEQ ID NO: 549196 - RNA, 22 nt, Human
uuggccuucugguguucauuuu

SEQ ID NO: 549197 - RNA, 22 nt, Human
ugaggcagauauuuauuggguu

SEQ ID NO: 549198 - RNA, 22 nt, Human
agucacaguuccuacccaguaa

SEQ ID NO: 549199 - RNA, 21 nt, Human
aggcucagcagguguauaaag

SEQ ID NO: 549200 - RNA, 22 nt, Human
ucucaacaccacuugcugaaga

SEQ ID NO: 549201 - RNA, 22 nt, Human
gcugaaggaggcucugguacua

SEQ ID NO: 549202 - RNA, 22 nt, Human
gccucugcaccaguacugugcc

SEQ ID NO: 549203 - RNA, 22 nt, Human
uugcaaaagccgaggcacucca

SEQ ID NO: 549204 - RNA, 20 nt, Human
ucucccugcccaucucagau

SEQ ID NO: 549205 - RNA, 22 nt, Human
ggcauccaguucugaucaacaa

SEQ ID NO: 549206 - RNA, 22 nt, Human
cagcuggcuccaccucugggcu

SEQ ID NO: 549207 - RNA, 22 nt, Human
aauucuacauugguucacauuu

SEQ ID NO: 549208 - RNA, 22 nt, Human
gucagcugggcaucugcagaug

SEQ ID NO: 549209 - RNA, 22 nt, Human
ccucagagaaagguauggcuga

SEQ ID NO: 549210 - RNA, 22 nt, Human
ggaggccaaggugggcggauca

SEQ ID NO: 549211 - RNA, 22 nt, Human
uggcagugccccuugaccagug

SEQ ID NO: 549212 - RNA, 22 nt, Human
uuugauaacagugaauaucaug

SEQ ID NO: 549213 - RNA, 22 nt, Human
aaggcacuagcaagcugccugg

SEQ ID NO: 549214 - RNA, 20 nt, Human
ugugccuggcuuuguccuga

SEQ ID NO: 549215 - RNA, 22 nt, Human
agaauuuuaucuaaagggagua

SEQ ID NO: 549216 - RNA, 22 nt, Human
acuccuggggauccauuccuuu

SEQ ID NO: 549217 - RNA, 22 nt, Human
gcugcuggcgcugggcguccgg

SEQ ID NO: 549218 - RNA, 22 nt, Human
ggagcuguucaggacugcuuca

SEQ ID NO: 549219 - RNA, 22 nt, Human
aaucagaaagaucuugaugaga

SEQ ID NO: 549220 - RNA, 22 nt, Human
cagcccuggaacagcugacuca

SEQ ID NO: 549221 - RNA, 19 nt, Human
uugcauuguaguuggacug

SEQ ID NO: 549222 - RNA, 22 nt, Human
aaacaaacauagguuugaaagu

SEQ ID NO: 549223 - RNA, 22 nt, Human
ucccacugugaauccaaggccu

SEQ ID NO: 549224 - RNA, 22 nt, Human
aaccugcaguuuuuauucugag

SEQ ID NO: 549225 - RNA, 19 nt, Human
aagagcagggaaagaauug

SEQ ID NO: 549226 - RNA, 22 nt, Human
gguucaguuuacauuaaaaucu

SEQ ID NO: 549227 - RNA, 22 nt, Human
aucuggcucgcuaggcucuggg

SEQ ID NO: 549228 - RNA, 22 nt, Human
aggcuuuggaaucagaguucug

SEQ ID NO: 549229 - RNA, 22 nt, Human
aaauauagugacacuuauaguc

SEQ ID NO: 549230 - RNA, 22 nt, Human
uccaggcuggccucgcgugaca

SEQ ID NO: 549231 - RNA, 22 nt, Human
agagaaggucacuaaggaccca

SEQ ID NO: 549232 - RNA, 22 nt, Human
guuucaaguagcugcugauuau

SEQ ID NO: 549233 - RNA, 22 nt, Human
uuuacagaugaggauacugagg

SEQ ID NO: 549234 - RNA, 22 nt, Human
gggcagugguccaggcuacagc

SEQ ID NO: 549235 - RNA, 22 nt, Human
aucuaacugggcuauuuuauug

SEQ ID NO: 549236 - RNA, 22 nt, Human
gccucugcaucuucgccgcacu

SEQ ID NO: 549237 - RNA, 22 nt, Human
aagucuggugcuguccucaccc

SEQ ID NO: 549238 - RNA, 22 nt, Human
ccuggccagaggcgugccugug

SEQ ID NO: 549239 - RNA, 22 nt, Human
aaacuacugauuugugaauuga

SEQ ID NO: 549240 - RNA, 22 nt, Human
cuugugcaauugacauugaauc

SEQ ID NO: 549241 - RNA, 22 nt, Human
gcucaggaaaacagucuaguaa

SEQ ID NO: 549242 - RNA, 18 nt, Human
acauuucuccuucugacc

SEQ ID NO: 549243 - RNA, 22 nt, Human
cucuggaggucagguguggugg

SEQ ID NO: 549244 - RNA, 22 nt, Human
aagccaggcaugcuuggacagu

SEQ ID NO: 549245 - RNA, 22 nt, Human
aagucacagcuaaauagcuaag

SEQ ID NO: 549246 - RNA, 19 nt, Human
gucuucugaauguggcugc

SEQ ID NO: 549247 - RNA, 22 nt, Human
caggaggccaacugugggacuu

SEQ ID NO: 549248 - RNA, 22 nt, Human
guuauuaguaagacucgcacau

SEQ ID NO: 549249 - RNA, 22 nt, Human
augucaaaugcugcaaacucau

SEQ ID NO: 549250 - RNA, 22 nt, Human
gugggggcuggcucguccugug

SEQ ID NO: 549251 - RNA, 22 nt, Human
ucaggaguccugccugcagccu

SEQ ID NO: 549252 - RNA, 22 nt, Human
ucaucaaaggauugcaugauuu

SEQ ID NO: 549253 - RNA, 22 nt, Human
uagaaacagagagauaugcccc

SEQ ID NO: 549254 - RNA, 22 nt, Human
aagggcaggcagagaucauaua

SEQ ID NO: 549255 - RNA, 18 nt, Human
ucucuuuccucaguggag

SEQ ID NO: 549256 - RNA, 22 nt, Human
ugguuccugguucacuuggcag

SEQ ID NO: 549257 - RNA, 22 nt, Human
gaggccacagcuaucagggaca

SEQ ID NO: 549258 - RNA, 22 nt, Human
cugagccaguagucagggacaa

SEQ ID NO: 549259 - RNA, 22 nt, Human
cagcucaggcucuccaugcucc

SEQ ID NO: 549260 - RNA, 22 nt, Human
uuugaaauguaucaguauaggu

SEQ ID NO: 549261 - RNA, 20 nt, Human
ggugcagguaacgcugugcu

SEQ ID NO: 549262 - RNA, 22 nt, Human
gagccaggaggcagagacugca

SEQ ID NO: 549263 - RNA, 22 nt, Human
gcuggagauaguaggauccaua

SEQ ID NO: 549264 - RNA, 22 nt, Human
uuucacagcuggguggcagagu

SEQ ID NO: 549265 - RNA, 22 nt, Human
ggcacuguuuuuguauucaguu

SEQ ID NO: 549266 - RNA, 22 nt, Human
cugcuggagguuggagcaugca

SEQ ID NO: 549267 - RNA, 22 nt, Human
ucaggugggaccugcuaggaca

SEQ ID NO: 549268 - RNA, 22 nt, Human
cccagcauggagugaggacuca

SEQ ID NO: 549269 - RNA, 22 nt, Human
gaagccaguacugugcucugca

SEQ ID NO: 549270 - RNA, 20 nt, Human
ccaagagcaugcaugaggaa

SEQ ID NO: 549271 - RNA, 22 nt, Human
aaaguuaguuucuuauaugucu

SEQ ID NO: 549272 - RNA, 22 nt, Human
gugucccacucuggaggugaag

SEQ ID NO: 549273 - RNA, 22 nt, Human
ucagccugcuccaagugcugcc

SEQ ID NO: 549274 - RNA, 22 nt, Human
ucaggcagguuggcugcagguc

SEQ ID NO: 549275 - RNA, 22 nt, Human
ugcccuguggguaucugauggc

SEQ ID NO: 549276 - RNA, 22 nt, Human
uuauuuaaaauguagguuggga

SEQ ID NO: 549277 - RNA, 22 nt, Human
uaaagcaggccacauaugugau

SEQ ID NO: 549278 - RNA, 22 nt, Human
gcaggcagagucaauuugaucc

SEQ ID NO: 549279 - RNA, 22 nt, Human
gccagggcaggggagcaucugc

SEQ ID NO: 549280 - RNA, 21 nt, Human
aggcccagcuuuccucuugcu

SEQ ID NO: 549281 - RNA, 22 nt, Human
gccugagcaggcguggaccaug

SEQ ID NO: 549282 - RNA, 22 nt, Human
agcugcaggccucuccugggga

SEQ ID NO: 549283 - RNA, 22 nt, Human
uuuccuuugcccaauacauguc

SEQ ID NO: 549284 - RNA, 22 nt, Human
uauguaaaguagauggcaggua

SEQ ID NO: 549285 - RNA, 22 nt, Human
uggggacauagccagucuggcu

SEQ ID NO: 549286 - RNA, 22 nt, Human
gcagaagggaauaaggagcuuu

SEQ ID NO: 549287 - RNA, 22 nt, Human
ucucagaguuuuuuuccaggac

SEQ ID NO: 549288 - RNA, 22 nt, Human
uagaacacuugaccacugcucc

SEQ ID NO: 549289 - RNA, 22 nt, Human
gagugucugaauuagagcacaa

SEQ ID NO: 549290 - RNA, 22 nt, Human
uuuggaaacacggucaucuucc

SEQ ID NO: 549291 - RNA, 22 nt, Human
gagugcaguuggggugagggga

SEQ ID NO: 549292 - RNA, 22 nt, Human
ggggccuguagagcuucaggga

SEQ ID NO: 549293 - RNA, 22 nt, Human
uggaaggaacagaguuugaaac

SEQ ID NO: 549294 - RNA, 22 nt, Human
agcugcuguggggcucggccug

SEQ ID NO: 549295 - RNA, 22 nt, Human
uuugaaagcuacuuucggguca

SEQ ID NO: 549296 - RNA, 22 nt, Human
agaggccuaauugcuacccuuu

SEQ ID NO: 549297 - RNA, 22 nt, Human
ugaggccaaugacccugggcag

SEQ ID NO: 549298 - RNA, 20 nt, Human
accauuaauguaagcuuugu

SEQ ID NO: 549299 - RNA, 22 nt, Human
ccaguggaguuuuuauacccag

SEQ ID NO: 549300 - RNA, 22 nt, Human
aggugggcccagugggcuccag

SEQ ID NO: 549301 - RNA, 22 nt, Human
caggguggaagcuguagagugg

SEQ ID NO: 549302 - RNA, 22 nt, Human
uauuucugaauccaaaagguca

SEQ ID NO: 549303 - RNA, 22 nt, Human
cagcccucaucucagcuucuuu

SEQ ID NO: 549304 - RNA, 21 nt, Human
ugcagugaggggagcugucag

SEQ ID NO: 549305 - RNA, 22 nt, Human
cuucuucauguauugauagucu

SEQ ID NO: 549306 - RNA, 20 nt, Human
gggcuagaccagggcagagg

SEQ ID NO: 549307 - RNA, 22 nt, Human
aacaaauguaaaaugcagaugc

SEQ ID NO: 549308 - RNA, 22 nt, Human
cagcccuuuccuucucagcuuu

SEQ ID NO: 549309 - RNA, 22 nt, Human
aggcucugcagugcuggaggac

SEQ ID NO: 549310 - RNA, 22 nt, Human
aaauggaauguguuuauaauuc

SEQ ID NO: 549311 - RNA, 22 nt, Human
uuugugaacaaacaugaagaug

SEQ ID NO: 549312 - RNA, 22 nt, Human
ccaaggagcugcaggcacuugu

SEQ ID NO: 549313 - RNA, 22 nt, Human
aaguaagucuuacauucacauu

SEQ ID NO: 549314 - RNA, 22 nt, Human
gagacaucauaaugaaguuucc

SEQ ID NO: 549315 - RNA, 22 nt, Human
ucuguauauauuaaugaaauuc

SEQ ID NO: 549316 - RNA, 19 nt, Human
cagaccuguccagccugug

SEQ ID NO: 549317 - RNA, 22 nt, Human
gcaaguuauuuccauuuaaagc

SEQ ID NO: 549318 - RNA, 22 nt, Human
aggagccaaauuacuagcucug

SEQ ID NO: 549319 - RNA, 22 nt, Human
gacuacucaaacuuucucuaua

SEQ ID NO: 549320 - RNA, 22 nt, Human
aaauaggagcuuaagcacuucu

SEQ ID NO: 549321 - RNA, 22 nt, Human
ccucugggcagguagcagcagc

SEQ ID NO: 549322 - RNA, 22 nt, Human
agcuaggauaagcagagacugg

SEQ ID NO: 549323 - RNA, 22 nt, Human
uuuuaaacugcagaauuuagaa

SEQ ID NO: 549324 - RNA, 22 nt, Human
uaaagcauguguuagaagugca

SEQ ID NO: 549325 - RNA, 21 nt, Human
uuucuaaggaggaagaaaaga

SEQ ID NO: 549326 - RNA, 22 nt, Human
ugcuucugggccugguguuccc

SEQ ID NO: 549327 - RNA, 21 nt, Human
uuugcugaaugauuccagggc

SEQ ID NO: 549328 - RNA, 22 nt, Human
uggcaagagggaugcaagguuu

SEQ ID NO: 549329 - RNA, 22 nt, Human
ugggaagcuuuaaauggguguc

SEQ ID NO: 549330 - RNA, 22 nt, Human
aggugccagugcuguggucccc

SEQ ID NO: 549331 - RNA, 22 nt, Human
cagggaagagccgaugcugcag

SEQ ID NO: 549332 - RNA, 22 nt, Human
uagcagaggcaaggaugugaau

SEQ ID NO: 549333 - RNA, 22 nt, Human
gaaguggaauuacugggucaua

SEQ ID NO: 549334 - RNA, 22 nt, Human
cauuuuaagaugaccugguuuc

SEQ ID NO: 549335 - RNA, 22 nt, Human
ucagauggcauagguuggaauu

SEQ ID NO: 549336 - RNA, 22 nt, Human
cauguguaaggcucacaggcag

SEQ ID NO: 549337 - RNA, 22 nt, Human
ugcacacaguucucaggaaaga

SEQ ID NO: 549338 - RNA, 22 nt, Human
aaagcaugacucaagaauuacu

SEQ ID NO: 549339 - RNA, 22 nt, Human
ugcugcucucagccaccaggaa

SEQ ID NO: 549340 - RNA, 22 nt, Human
guucugaguccuccuuugaagg

SEQ ID NO: 549341 - RNA, 22 nt, Human
cccagccuggugcacugugggg

SEQ ID NO: 549342 - RNA, 23 nt, Human
ugacacauuuccuuuccacugca

SEQ ID NO: 549343 - RNA, 22 nt, Human
uacaguuacugcauuucuaaua

SEQ ID NO: 549344 - RNA, 22 nt, Human
guuacauuuggugauuuggugc

SEQ ID NO: 549345 - RNA, 22 nt, Human
gggcaggagagaacagucaugg

SEQ ID NO: 549346 - RNA, 22 nt, Human
guguccuuuuaugugacugguu

SEQ ID NO: 549347 - RNA, 22 nt, Human
gcaaggcugcugccacccaucu

SEQ ID NO: 549348 - RNA, 22 nt, Human
ccagggcugcugugggacucca

SEQ ID NO: 549349 - RNA, 22 nt, Human
guuugcauuuauuagucuucug

SEQ ID NO: 549350 - RNA, 22 nt, Human
ugucaaaaugacuuuacuacag

SEQ ID NO: 549351 - RNA, 22 nt, Human
aggauccuguauggagaagcug

SEQ ID NO: 549352 - RNA, 22 nt, Human
uucauagugauuguucagauag

SEQ ID NO: 549353 - RNA, 22 nt, Human
acagguggaaacaugguguugg

SEQ ID NO: 549354 - RNA, 22 nt, Human
gucauuuuuuucguaauagugg

SEQ ID NO: 549355 - RNA, 22 nt, Human
gugaaaauaaggcugguucuug

SEQ ID NO: 549356 - RNA, 22 nt, Human
ugggaaagccagcagugucacc

SEQ ID NO: 549357 - RNA, 22 nt, Human
ccuggccucagccuagggcuga

SEQ ID NO: 549358 - RNA, 22 nt, Human
uucacaggugacuggggauaac

SEQ ID NO: 549359 - RNA, 22 nt, Human
ugaaucaaugaauugcacuuca

SEQ ID NO: 549360 - RNA, 22 nt, Human
agccaaagaucagugugcaagu

SEQ ID NO: 549361 - RNA, 22 nt, Human
acaacaggguaaggcaggccau

SEQ ID NO: 549362 - RNA, 22 nt, Human
cccagacuccucuggcuggugg

SEQ ID NO: 549363 - RNA, 22 nt, Human
gcacugugcuagaagccagggg

SEQ ID NO: 549364 - RNA, 22 nt, Human
ugcaaauugcaugauguguauc

SEQ ID NO: 549365 - RNA, 22 nt, Human
gacacagauaucucugagauua

SEQ ID NO: 549366 - RNA, 22 nt, Human
agugcauauaugaagaguauga

SEQ ID NO: 549367 - RNA, 22 nt, Human
accauuuuggguauuuucagag

SEQ ID NO: 549368 - RNA, 18 nt, Human
ucuuggaguaaugaucaa

SEQ ID NO: 549369 - RNA, 22 nt, Human
ugacaucacguccuuucagaga

SEQ ID NO: 549370 - RNA, 22 nt, Human
ucugagaggauuccugucccga

SEQ ID NO: 549371 - RNA, 22 nt, Human
aaaguagaacauuuucuuaucu

SEQ ID NO: 549372 - RNA, 22 nt, Human
ucaugacaacuauauuauucca

SEQ ID NO: 549373 - RNA, 22 nt, Human
aggugucugggcuuuggaguca

SEQ ID NO: 549374 - RNA, 22 nt, Human
ccagaagaacuuaauucaaaac

SEQ ID NO: 549375 - RNA, 22 nt, Human
cagaaauggagcccaggaaucu

SEQ ID NO: 549376 - RNA, 22 nt, Human
aauuagagaucaguucuuugac

SEQ ID NO: 549377 - RNA, 22 nt, Human
auaugugaaugauaucacuuug

SEQ ID NO: 549378 - RNA, 22 nt, Human
aaacauguaauucugcuuaaga

SEQ ID NO: 549379 - RNA, 22 nt, Human
acaggcuuuuuuagaaugacau

SEQ ID NO: 549380 - RNA, 22 nt, Human
uuucagaggaggaaggcaguua

SEQ ID NO: 549381 - RNA, 22 nt, Human
aggggagccccugguccuggug

SEQ ID NO: 549382 - RNA, 22 nt, Human
gccugggauucucaaaggggug

SEQ ID NO: 549383 - RNA, 22 nt, Human
cauuuguuggucagauuguagu

SEQ ID NO: 549384 - RNA, 22 nt, Human
augucuuuauaaauguauaaug

SEQ ID NO: 549385 - RNA, 22 nt, Human
ugggcagagucguggggaauag

SEQ ID NO: 549386 - RNA, 22 nt, Human
cccagccucuggauucugcccu

SEQ ID NO: 549387 - RNA, 22 nt, Human
acagcuguggccacuugcaucc

SEQ ID NO: 549388 - RNA, 22 nt, Human
ucauaacagcuaagucccuuuc

SEQ ID NO: 549389 - RNA, 22 nt, Human
gcaggcaggcuuccuugaacug

SEQ ID NO: 549390 - RNA, 22 nt, Human
aaaugcagaaugauuucaucua

SEQ ID NO: 549391 - RNA, 22 nt, Human
ugaugcaauagagagauagaua

SEQ ID NO: 549392 - RNA, 22 nt, Human
cuggcucuucagugcuugguuc

SEQ ID NO: 549393 - RNA, 22 nt, Human
ggggcugggauuugaacccagg

SEQ ID NO: 549394 - RNA, 20 nt, Human
gaaauucucguauuaguuua

SEQ ID NO: 549395 - RNA, 22 nt, Human
uguagcacagagcuuugacacu

SEQ ID NO: 549396 - RNA, 22 nt, Human
ugcaggcugggaagagggacaa

SEQ ID NO: 549397 - RNA, 22 nt, Human
augcaagacauaaauaaucuuu

SEQ ID NO: 549398 - RNA, 22 nt, Human
aucaaguuuucuuaguugacug

SEQ ID NO: 549399 - RNA, 22 nt, Human
guggcuuggaccagucacagug

SEQ ID NO: 549400 - RNA, 22 nt, Human
ugugcccauuccacuugaguac

SEQ ID NO: 549401 - RNA, 22 nt, Human
ucagacaggcuucuuucucccu

SEQ ID NO: 549402 - RNA, 22 nt, Human
ugcugucugauucagggugauu

SEQ ID NO: 549403 - RNA, 22 nt, Human
augucuaaaagauaaaguuuaa

SEQ ID NO: 549404 - RNA, 22 nt, Human
uggcagagucucuccuuuccag

SEQ ID NO: 549405 - RNA, 19 nt, Human
acaaagcugugagcagcuu

SEQ ID NO: 549406 - RNA, 22 nt, Human
auaguguuacccuucuuaaagu

SEQ ID NO: 549407 - RNA, 22 nt, Human
aaucacaaauuuagacagagcu

SEQ ID NO: 549408 - RNA, 22 nt, Human
cucuggcuucuaccuugcaguu

SEQ ID NO: 549409 - RNA, 22 nt, Human
caggagaagucucuagggggug

SEQ ID NO: 549410 - RNA, 20 nt, Human
agccugccagcuggcccaga

SEQ ID NO: 549411 - RNA, 22 nt, Human
gaugugggguugagggaccagc

SEQ ID NO: 549412 - RNA, 23 nt, Human
cuguggcugaguccuguuggagu

SEQ ID NO: 549413 - RNA, 20 nt, Human
ucugucucugagcuagacuu

SEQ ID NO: 549414 - RNA, 22 nt, Human
uguaucaaaccaaauuaauucu

SEQ ID NO: 549415 - RNA, 22 nt, Human
augggggccugaacaggcaaaa

SEQ ID NO: 549416 - RNA, 22 nt, Human
aggcagguguuaccucugguuu

SEQ ID NO: 549417 - RNA, 22 nt, Human
acagugugguuugagcacuggg

SEQ ID NO: 549418 - RNA, 22 nt, Human
auuuauugagacuuaacaaccc

SEQ ID NO: 549419 - RNA, 19 nt, Human
gcccugcaggagguggggc

SEQ ID NO: 549420 - RNA, 22 nt, Human
ggagccaggcaaucuguacuuu

SEQ ID NO: 549421 - RNA, 22 nt, Human
ggccuggaagaggacagagaaa

SEQ ID NO: 549422 - RNA, 22 nt, Human
gggcucuuuucugagcuucacu

SEQ ID NO: 549423 - RNA, 22 nt, Human
cagcagaaguccgacuccaguc

SEQ ID NO: 549424 - RNA, 22 nt, Human
ucucaggagccacagcgggagu

SEQ ID NO: 549425 - RNA, 22 nt, Human
ucuguuuuguaccagauacagc

SEQ ID NO: 549426 - RNA, 22 nt, Human
uacauacacaaauauacuguuu

SEQ ID NO: 549427 - RNA, 22 nt, Human
augccagucaaagaagaugaca

SEQ ID NO: 549428 - RNA, 22 nt, Human
ucuggggauggucuacuuucug

SEQ ID NO: 549429 - RNA, 22 nt, Human
ucaccuaauugaagucaggagu

SEQ ID NO: 549430 - RNA, 22 nt, Human
ggaacagacugacuucuugaau

SEQ ID NO: 549431 - RNA, 22 nt, Human
acauucuuaacaguuaaaaacu

SEQ ID NO: 549432 - RNA, 22 nt, Human
cauuugaaccuggauguucuua

SEQ ID NO: 549433 - RNA, 22 nt, Human
accugggagucacaccugagaa

SEQ ID NO: 549434 - RNA, 22 nt, Human
ccccacacucuuuacauucaua

SEQ ID NO: 549435 - RNA, 22 nt, Human
uucaacaacuugguucaaaugg

SEQ ID NO: 549436 - RNA, 22 nt, Human
gugcuucucuucacacccaacu

SEQ ID NO: 549437 - RNA, 22 nt, Human
cugcccaggcugaaggaacauc

SEQ ID NO: 549438 - RNA, 22 nt, Human
aucaaaguaauuaacacugaga

SEQ ID NO: 549439 - RNA, 22 nt, Human
aggcuccaugcaaaggcuguuu

SEQ ID NO: 549440 - RNA, 22 nt, Human
aaguguuuaaauuauuugcagg

SEQ ID NO: 549441 - RNA, 22 nt, Human
agucaguuuuaccaaucucagu

SEQ ID NO: 549442 - RNA, 23 nt, Human
gugcaugugucuuuacaguagca

SEQ ID NO: 549443 - RNA, 22 nt, Human
auguguagaacuguaaugccca

SEQ ID NO: 549444 - RNA, 22 nt, Human
gugugagggacagagaaagggg

SEQ ID NO: 549445 - RNA, 22 nt, Human
gcagaacauuucacaguaucuu

SEQ ID NO: 549446 - RNA, 22 nt, Human
gccuggggaacuugauccuguc

SEQ ID NO: 549447 - RNA, 22 nt, Human
cagugaaguucuacugaauggu

SEQ ID NO: 549448 - RNA, 22 nt, Human
ucaaaguaccagagugaacuga

SEQ ID NO: 549449 - RNA, 22 nt, Human
uccagaaacuuuuccagucuca

SEQ ID NO: 549450 - RNA, 22 nt, Human
cugcugagccgcacccaggagc

SEQ ID NO: 549451 - RNA, 22 nt, Human
cugccaggccuccgcugucccc

SEQ ID NO: 549452 - RNA, 22 nt, Human
ucucuucauuugcuauggguca

SEQ ID NO: 549453 - RNA, 23 nt, Human
ugccucugccucccuagucugca

SEQ ID NO: 549454 - RNA, 22 nt, Human
aaagucauggaaaaucuuggaa

SEQ ID NO: 549455 - RNA, 22 nt, Human
cagucacauugcccugcauuua

SEQ ID NO: 549456 - RNA, 22 nt, Human
ccagcuuucucagaggcuucua

SEQ ID NO: 549457 - RNA, 22 nt, Human
guacauuuugagguuaaaacaa

SEQ ID NO: 549458 - RNA, 23 nt, Human
cuuauucauucauguagcccauu

SEQ ID NO: 549459 - RNA, 22 nt, Human
cucaggacccgguccagguggg

SEQ ID NO: 549460 - RNA, 22 nt, Human
aucauaaaccacuuuguaaucu

SEQ ID NO: 549461 - RNA, 22 nt, Human
auuuggggcucaccagggcuga

SEQ ID NO: 549462 - RNA, 22 nt, Human
auauacuguguuccauggacca

SEQ ID NO: 549463 - RNA, 22 nt, Human
acauuucucagggaguuuugcu

SEQ ID NO: 549464 - RNA, 22 nt, Human
gagugugcuuagagagcugcau

SEQ ID NO: 549465 - RNA, 22 nt, Human
agcacagcuucaccgagcccau

SEQ ID NO: 549466 - RNA, 22 nt, Human
ugaggcuugauuugcccgagag

SEQ ID NO: 549467 - RNA, 22 nt, Human
cccagugccaggcacaggcagc

SEQ ID NO: 549468 - RNA, 19 nt, Human
guuucauuaagauaggaaa

SEQ ID NO: 549469 - RNA, 22 nt, Human
ugagccugggcuuucucuggag

SEQ ID NO: 549470 - RNA, 22 nt, Human
ggcagaaggccucccagcuccu

SEQ ID NO: 549471 - RNA, 22 nt, Human
accugaaaccaacuuguguacu

SEQ ID NO: 549472 - RNA, 22 nt, Human
ggcuucagaggagaagagggug

SEQ ID NO: 549473 - RNA, 22 nt, Human
ucagacagcuugggauaacuga

SEQ ID NO: 549474 - RNA, 22 nt, Human
agagccuggacuuuucugagcc

SEQ ID NO: 549475 - RNA, 22 nt, Human
uauauguaagcuauguaagagu

SEQ ID NO: 549476 - RNA, 22 nt, Human
aagaucaggcguggaaaacacu

SEQ ID NO: 549477 - RNA, 22 nt, Human
aaagaguucuaugaucuuucca

SEQ ID NO: 549478 - RNA, 22 nt, Human
ucagggcaucucuuaaguggug

SEQ ID NO: 549479 - RNA, 22 nt, Human
ucucccaaccucuggugggugc

SEQ ID NO: 549480 - RNA, 23 nt, Human
agaggcacuaauuauucagagau

SEQ ID NO: 549481 - RNA, 22 nt, Human
aguccauagaggcugcuuucau

SEQ ID NO: 549482 - RNA, 22 nt, Human
aaugaucuacucucauuaucuc

SEQ ID NO: 549483 - RNA, 22 nt, Human
gugcccugugaacuguaaggaa

SEQ ID NO: 549484 - RNA, 22 nt, Human
uguguuggcugccggcacagga

SEQ ID NO: 549485 - RNA, 22 nt, Human
gaagcccacguuuggugaugua

SEQ ID NO: 549486 - RNA, 22 nt, Human
aacauguaaauaucauuguacu

SEQ ID NO: 549487 - RNA, 22 nt, Human
uggggugguaauacaccguucu

SEQ ID NO: 549488 - RNA, 22 nt, Human
cagggagcaggcucuguccauc

SEQ ID NO: 549489 - RNA, 22 nt, Human
gugauucauccuggcauucauu

SEQ ID NO: 549490 - RNA, 22 nt, Human
aguaaugaauacgguauuugaa

SEQ ID NO: 549491 - RNA, 22 nt, Human
cauuaacaauuguuuaugcugu

SEQ ID NO: 549492 - RNA, 22 nt, Human
cauaauuuuuuuaagucagaac

SEQ ID NO: 549493 - RNA, 22 nt, Human
gaguggggcguggauccagcgu

SEQ ID NO: 549494 - RNA, 22 nt, Human
cccugcugucaggugcugggag

SEQ ID NO: 549495 - RNA, 22 nt, Human
gguggccucucaugcaagguag

SEQ ID NO: 549496 - RNA, 22 nt, Human
ucaagaaacugugcuacagagu

SEQ ID NO: 549497 - RNA, 22 nt, Human
cuggggcucacuuuggucaggc

SEQ ID NO: 549498 - RNA, 22 nt, Human
ggcuucagugacuggugcccuc

SEQ ID NO: 549499 - RNA, 22 nt, Human
cagcuugugcaaagguccuggg

SEQ ID NO: 549500 - RNA, 22 nt, Human
gucaaacaaauuaacauaucca

SEQ ID NO: 549501 - RNA, 22 nt, Human
gcagggcaaugaucccgagagg

SEQ ID NO: 549502 - RNA, 20 nt, Human
cuuguacaugauaaagauuu

SEQ ID NO: 549503 - RNA, 22 nt, Human
gaaccaaguaggauacaaggag

SEQ ID NO: 549504 - RNA, 21 nt, Human
ucugccugagacuuugcuggu

SEQ ID NO: 549505 - RNA, 18 nt, Human
cugcugcaggcacucagg

SEQ ID NO: 549506 - RNA, 22 nt, Human
cucugaauggacacuccagugu

SEQ ID NO: 549507 - RNA, 22 nt, Human
uucacagaauggcaaguuaugg

SEQ ID NO: 549508 - RNA, 22 nt, Human
uaaugccuuaugucaaauguaa

SEQ ID NO: 549509 - RNA, 22 nt, Human
aaaugcaugagaaaguauucug

SEQ ID NO: 549510 - RNA, 22 nt, Human
cugggagaugacucagagcagg

SEQ ID NO: 549511 - RNA, 22 nt, Human
ucucacuggguauaaaugagua

SEQ ID NO: 549512 - RNA, 19 nt, Human
ucauucaggaccaguggau

SEQ ID NO: 549513 - RNA, 22 nt, Human
cccugcaguccuuucuuggcuc

SEQ ID NO: 549514 - RNA, 22 nt, Human
uugcauugaugucuauacgcug

SEQ ID NO: 549515 - RNA, 18 nt, Human
uccgaggcaccauaaaaa

SEQ ID NO: 549516 - RNA, 22 nt, Human
ccugggcuuugagggcaggaug

SEQ ID NO: 549517 - RNA, 22 nt, Human
gauucuuuacaucucugcugac

SEQ ID NO: 549518 - RNA, 17 nt, Human
caggaaaauaugaguga

SEQ ID NO: 549519 - RNA, 22 nt, Human
gagaggcugguaaagucugaac

SEQ ID NO: 549520 - RNA, 22 nt, Human
uacauauacugagugauuugcu

SEQ ID NO: 549521 - RNA, 22 nt, Human
gccagaagggguggauccaggc

SEQ ID NO: 549522 - RNA, 22 nt, Human
ccugcagaccacacucaguccu

SEQ ID NO: 549523 - RNA, 23 nt, Human
aggugccaacugagagcugagag

SEQ ID NO: 549524 - RNA, 22 nt, Human
acagugaugggggugcaggaag

SEQ ID NO: 549525 - RNA, 22 nt, Human
aacaugauggggaagaacaaga

SEQ ID NO: 549526 - RNA, 22 nt, Human
cauucuuauauuuacucauuca

SEQ ID NO: 549527 - RNA, 20 nt, Human
auguccagugacuggaccau

SEQ ID NO: 549528 - RNA, 22 nt, Human
caacauaugauuuuguauauaa

SEQ ID NO: 549529 - RNA, 22 nt, Human
cugguggggaguccuggucucc

SEQ ID NO: 549530 - RNA, 22 nt, Human
caggcagcguccugcuuccugu

SEQ ID NO: 549531 - RNA, 22 nt, Human
cugucuggauauaccuuggcca

SEQ ID NO: 549532 - RNA, 22 nt, Human
agcagggaggcccagggcacug

SEQ ID NO: 549533 - RNA, 22 nt, Human
cagccucugacaccacagucgu

SEQ ID NO: 549534 - RNA, 22 nt, Human
cagacagagucuucccaucagu

SEQ ID NO: 549535 - RNA, 22 nt, Human
agcaacagcagguuugcacucc

SEQ ID NO: 549536 - RNA, 22 nt, Human
ugucccagucaaggcugucauc

SEQ ID NO: 549537 - RNA, 22 nt, Human
cacugcuuuuuuggcuauguac

SEQ ID NO: 549538 - RNA, 17 nt, Human
aagacaagacaaaugca

SEQ ID NO: 549539 - RNA, 22 nt, Human
agucucagcaagcauggcuagu

SEQ ID NO: 549540 - RNA, 22 nt, Human
caggaagaaagaggugaggugu

SEQ ID NO: 549541 - RNA, 22 nt, Human
aggagguggccugagcgugccc

SEQ ID NO: 549542 - RNA, 22 nt, Human
ucagaaagcuuagugucuugca

SEQ ID NO: 549543 - RNA, 22 nt, Human
ugggaaaguguagccugcaggc

SEQ ID NO: 549544 - RNA, 22 nt, Human
augccuguaaucccagugcuuu

SEQ ID NO: 549545 - RNA, 22 nt, Human
cacccuagcugucauuucaguu

SEQ ID NO: 549546 - RNA, 22 nt, Human
auuggccugaaacugguucagc

SEQ ID NO: 549547 - RNA, 22 nt, Human
caaugauguuuagauaaaaucc

SEQ ID NO: 549548 - RNA, 22 nt, Human
uccuuggagaaucuuguuuuac

SEQ ID NO: 549549 - RNA, 22 nt, Human
uguucccugguaaacugacucc

SEQ ID NO: 549550 - RNA, 22 nt, Human
uagcagggucucaggagucagg

SEQ ID NO: 549551 - RNA, 22 nt, Human
cuggcaggcagacuucugcaag

SEQ ID NO: 549552 - RNA, 22 nt, Human
auagauauuugaguuguuucca

SEQ ID NO: 549553 - RNA, 22 nt, Human
acaaguauuggugaggauguag

SEQ ID NO: 549554 - RNA, 20 nt, Human
agcacagcgcgguguuccuu

SEQ ID NO: 549555 - RNA, 22 nt, Human
aauuaguauugcgauucauuag

SEQ ID NO: 549556 - RNA, 22 nt, Human
ucugaacauccagcaaugcaca

SEQ ID NO: 549557 - RNA, 22 nt, Human
ucucagugcuauccauauucca

SEQ ID NO: 549558 - RNA, 22 nt, Human
gcaaggcugugcacuuugcauu

SEQ ID NO: 549559 - RNA, 22 nt, Human
uaagaauauugggaauggaugg

SEQ ID NO: 549560 - RNA, 22 nt, Human
gccccagcucugccacaacuag

SEQ ID NO: 549561 - RNA, 22 nt, Human
cagagccacuuggagaugagaa

SEQ ID NO: 549562 - RNA, 22 nt, Human
cugcagcugucucuacugggca

SEQ ID NO: 549563 - RNA, 22 nt, Human
ccugccagcugugggccagccu

SEQ ID NO: 549564 - RNA, 22 nt, Human
aguguaucuagguaucuauagu

SEQ ID NO: 549565 - RNA, 19 nt, Human
gggcaguggcacuagggag

SEQ ID NO: 549566 - RNA, 22 nt, Human
ccugguguugugaaguagccgu

SEQ ID NO: 549567 - RNA, 22 nt, Human
uagcagaggaaaagagaacauu

SEQ ID NO: 549568 - RNA, 22 nt, Human
uacuuauugguucagaaguuua

SEQ ID NO: 549569 - RNA, 22 nt, Human
auucuacaaaagaacuggaucu

SEQ ID NO: 549570 - RNA, 22 nt, Human
uuucuggauucauacagaugua

SEQ ID NO: 549571 - RNA, 22 nt, Human
uggcagagaaccugggcuuugu

SEQ ID NO: 549572 - RNA, 22 nt, Human
ucuacagacagagcagguggga

SEQ ID NO: 549573 - RNA, 22 nt, Human
gcagaggagaugaagauacuuu

SEQ ID NO: 549574 - RNA, 22 nt, Human
auuugcaugcuucuauugugaa

SEQ ID NO: 549575 - RNA, 22 nt, Human
uggcagaggcucugugauguug

SEQ ID NO: 549576 - RNA, 22 nt, Human
agccaggcgggucuuugcuccu

SEQ ID NO: 549577 - RNA, 22 nt, Human
aacagcauaccaauguacauau

SEQ ID NO: 549578 - RNA, 22 nt, Human
guucaaauggcugcaguuacca

SEQ ID NO: 549579 - RNA, 22 nt, Human
cuuucaaugugccugccuuggg

SEQ ID NO: 549580 - RNA, 22 nt, Human
aagguucccucucuggaagccu

SEQ ID NO: 549581 - RNA, 19 nt, Human
caggucuucuuggaggacu

SEQ ID NO: 549582 - RNA, 22 nt, Human
gacagggcauggugcagaguuc

SEQ ID NO: 549583 - RNA, 22 nt, Human
uaacaguauccccauuugcaag

SEQ ID NO: 549584 - RNA, 22 nt, Human
uccagggccaagucauggaacc

SEQ ID NO: 549585 - RNA, 22 nt, Human
cucacaggcaucucaucaggcu

SEQ ID NO: 549586 - RNA, 22 nt, Human
aaguguuuauuuauaacgaucu

SEQ ID NO: 549587 - RNA, 22 nt, Human
gguggcagcgucuaucugacau

SEQ ID NO: 549588 - RNA, 22 nt, Human
agcagggcucuguggagggugg

SEQ ID NO: 549589 - RNA, 22 nt, Human
uacaaagucacauugaaaugaa

SEQ ID NO: 549590 - RNA, 22 nt, Human
ugaaacaaaauuaagauucucg

SEQ ID NO: 549591 - RNA, 22 nt, Human
auuuccagcagcauauuugucu

SEQ ID NO: 549592 - RNA, 22 nt, Human
acacauuaugagcaguugucuu

SEQ ID NO: 549593 - RNA, 22 nt, Human
ucuggccugggccugccggugc

SEQ ID NO: 549594 - RNA, 22 nt, Human
uuccagaauuuuguucugcuug

SEQ ID NO: 549595 - RNA, 23 nt, Human
aaagacugcugagaauuuuagga

SEQ ID NO: 549596 - RNA, 22 nt, Human
aaaaauuuaugguucuucucug

SEQ ID NO: 549597 - RNA, 22 nt, Human
ugccuguggaaaggcuggugcu

SEQ ID NO: 549598 - RNA, 22 nt, Human
agcagguggacagaggaagaaa

SEQ ID NO: 549599 - RNA, 23 nt, Human
uguagcaucucuuauuucucagc

SEQ ID NO: 549600 - RNA, 22 nt, Human
cacagaggucugggcccagcag

SEQ ID NO: 549601 - RNA, 22 nt, Human
ggaggaggggcgcuuugucuau

SEQ ID NO: 549602 - RNA, 22 nt, Human
cccaggcagucuggcucuaaag

SEQ ID NO: 549603 - RNA, 22 nt, Human
uaagaacaguagaacaguaggu

SEQ ID NO: 549604 - RNA, 23 nt, Human
agcaggcugcuucuccacagcug

SEQ ID NO: 549605 - RNA, 22 nt, Human
acaaggcugaacagugaagccg

SEQ ID NO: 549606 - RNA, 22 nt, Human
caauuucucuuuauaucucaca

SEQ ID NO: 549607 - RNA, 22 nt, Human
cugcccuguuuggacagcccgg

SEQ ID NO: 549608 - RNA, 22 nt, Human
aagagacaaugucuuuuggaua

SEQ ID NO: 549609 - RNA, 22 nt, Human
uugauuaaacaggcauauucaa

SEQ ID NO: 549610 - RNA, 22 nt, Human
gauuucaagcccccagagauuc

SEQ ID NO: 549611 - RNA, 22 nt, Human
gagguggcagaggccuggaccu

SEQ ID NO: 549612 - RNA, 22 nt, Human
agggcucaggggccccaagcug

SEQ ID NO: 549613 - RNA, 18 nt, Human
ccuggcacacuggcucau

SEQ ID NO: 549614 - RNA, 22 nt, Human
agcagaugcgucugagugggag

SEQ ID NO: 549615 - RNA, 23 nt, Human
aacacauugcuaauuacauucaa

SEQ ID NO: 549616 - RNA, 22 nt, Human
cugccugugccaccgccucauu

SEQ ID NO: 549617 - RNA, 22 nt, Human
auucagcucugaaucagcagac

SEQ ID NO: 549618 - RNA, 22 nt, Human
caguacuuggucaaggaagcag

SEQ ID NO: 549619 - RNA, 22 nt, Human
gaggccugucgcuaggccucug

SEQ ID NO: 549620 - RNA, 22 nt, Human
cagagcugcaaaugccccuccg

SEQ ID NO: 549621 - RNA, 22 nt, Human
cauauaaauacaacauguguua

SEQ ID NO: 549622 - RNA, 22 nt, Human
cuuucauucuuagauauuagug

SEQ ID NO: 549623 - RNA, 22 nt, Human
cucagaauuacaucccauuuua

SEQ ID NO: 549624 - RNA, 22 nt, Human
agagcuguuuggacaucugagu

SEQ ID NO: 549625 - RNA, 22 nt, Human
aguguuucuggcaaaugaaagu

SEQ ID NO: 549626 - RNA, 22 nt, Human
acuccagggcuccaucccuugu

SEQ ID NO: 549627 - RNA, 22 nt, Human
cugaaauugaugacagggaugg

SEQ ID NO: 549628 - RNA, 22 nt, Human
cugcugagcaucagggcugccc

SEQ ID NO: 549629 - RNA, 22 nt, Human
caggaggcagagguugcagcga

SEQ ID NO: 549630 - RNA, 22 nt, Human
uuaauagauuugauuuuaaagg

SEQ ID NO: 549631 - RNA, 22 nt, Human
uucaagauaauaggaaugaaaa

SEQ ID NO: 549632 - RNA, 22 nt, Human
aguguuuauggaaucuuaguua

SEQ ID NO: 549633 - RNA, 22 nt, Human
uagaaaucauuuagaaguauug

SEQ ID NO: 549634 - RNA, 22 nt, Human
ccugugugcugaugacgacaga

SEQ ID NO: 549635 - RNA, 22 nt, Human
auugaaaauauaauucuaggag

SEQ ID NO: 549636 - RNA, 22 nt, Human
acagauauaugauuguguaaau

SEQ ID NO: 549637 - RNA, 22 nt, Human
gccccuggcuggccagcuccuc

SEQ ID NO: 549638 - RNA, 22 nt, Human
cugccuggccacaacccagggu

SEQ ID NO: 549639 - RNA, 22 nt, Human
cagggcugaacugagcuuguga

SEQ ID NO: 549640 - RNA, 22 nt, Human
uggucagacaaaggagaauguu

SEQ ID NO: 549641 - RNA, 20 nt, Human
agggcagagggauuacaggc

SEQ ID NO: 549642 - RNA, 22 nt, Human
gccaccucuuugucucugccgc

SEQ ID NO: 549643 - RNA, 23 nt, Human
ugagcugggccugcaggggucuc

SEQ ID NO: 549644 - RNA, 22 nt, Human
ucagcagucacauguuguccca

SEQ ID NO: 549645 - RNA, 22 nt, Human
gggcugacuccuauuggaugaa

SEQ ID NO: 549646 - RNA, 22 nt, Human
agcacacaggccaccuccacuu

SEQ ID NO: 549647 - RNA, 22 nt, Human
caggcagccugagggaucuggg

SEQ ID NO: 549648 - RNA, 22 nt, Human
acaagaaagguaggauucaggu

SEQ ID NO: 549649 - RNA, 22 nt, Human
agauuuguccugcuuucuaccu

SEQ ID NO: 549650 - RNA, 22 nt, Human
gcaggccagcugugcagauggg

SEQ ID NO: 549651 - RNA, 22 nt, Human
gagagugaggccugggaaucua

SEQ ID NO: 549652 - RNA, 22 nt, Human
ccugagauguguaacagauggu

SEQ ID NO: 549653 - RNA, 22 nt, Human
acauuucaguaaguguuaauuu

SEQ ID NO: 549654 - RNA, 22 nt, Human
cugcucuggggaagccagaugu

SEQ ID NO: 549655 - RNA, 22 nt, Human
uggagccagcccaggccccucu

SEQ ID NO: 549656 - RNA, 22 nt, Human
uugcccuguggggccuccagcc

SEQ ID NO: 549657 - RNA, 19 nt, Human
ugaguggagugcaaugaag

SEQ ID NO: 549658 - RNA, 22 nt, Human
ugauuauauucuaacuucauaa

SEQ ID NO: 549659 - RNA, 22 nt, Human
accaggcaacugugaaugggcu

SEQ ID NO: 549660 - RNA, 22 nt, Human
cgcaggcuggcgcggaguggca

SEQ ID NO: 549661 - RNA, 22 nt, Human
ccagccucacuggcaucaccua

SEQ ID NO: 549662 - RNA, 22 nt, Human
uagguuccauuuaaacaaagaa

SEQ ID NO: 549663 - RNA, 22 nt, Human
accugccucagugcagcuggau

SEQ ID NO: 549664 - RNA, 22 nt, Human
uauuucugggaguucagaaauu

SEQ ID NO: 549665 - RNA, 22 nt, Human
ccagcuuguuugaagcucguca

SEQ ID NO: 549666 - RNA, 17 nt, Human
ugaggccugcaucagug

SEQ ID NO: 549667 - RNA, 22 nt, Human
guuaauaaagguauagaaucag

SEQ ID NO: 549668 - RNA, 22 nt, Human
cagagcccagggccuacguccc

SEQ ID NO: 549669 - RNA, 22 nt, Human
auaugaaaguaagcaugugugu

SEQ ID NO: 549670 - RNA, 22 nt, Human
agguggaguuaagugugaacug

SEQ ID NO: 549671 - RNA, 22 nt, Human
aagggcucugcugucucucccc

SEQ ID NO: 549672 - RNA, 22 nt, Human
cuuucugaaguuuaaguucuaa

SEQ ID NO: 549673 - RNA, 22 nt, Human
uguacagauugaucauggagag

SEQ ID NO: 549674 - RNA, 22 nt, Human
agggaguuccgaucugugcacc

SEQ ID NO: 549675 - RNA, 22 nt, Human
uuucacaggaauacccggcuuu

SEQ ID NO: 549676 - RNA, 20 nt, Human
gccagaguuaugaugagagg

SEQ ID NO: 549677 - RNA, 22 nt, Human
cugagcugggacucaguagcaa

SEQ ID NO: 549678 - RNA, 22 nt, Human
acauuuguaugcguuuuuacug

SEQ ID NO: 549679 - RNA, 22 nt, Human
uggaagagcaggcagacaaugc

SEQ ID NO: 549680 - RNA, 22 nt, Human
uuucucauagucaugccucuua

SEQ ID NO: 549681 - RNA, 17 nt, Human
gccagggagaggaagcc

SEQ ID NO: 549682 - RNA, 22 nt, Human
auacauguugagaaaauaucug

SEQ ID NO: 549683 - RNA, 22 nt, Human
ggcauauguagcguguguucug

SEQ ID NO: 549684 - RNA, 22 nt, Human
uauuauguaaagguuauugcag

SEQ ID NO: 549685 - RNA, 17 nt, Human
gagauggcauuggcagc

SEQ ID NO: 549686 - RNA, 22 nt, Human
aaucuacauagagaucaaauga

SEQ ID NO: 549687 - RNA, 22 nt, Human
aauuucaguaugaaguuucaca

SEQ ID NO: 549688 - RNA, 22 nt, Human
ggcuagggaaaaugauuggaua

SEQ ID NO: 549689 - RNA, 20 nt, Human
aagggagaauaaugauugua

SEQ ID NO: 549690 - RNA, 22 nt, Human
cgucuuccucuuacgaugcgcu

SEQ ID NO: 549691 - RNA, 22 nt, Human
ugccugggguuggcaaacugcu

SEQ ID NO: 549692 - RNA, 22 nt, Human
gcuuccucgcugggcagaggca

SEQ ID NO: 549693 - RNA, 22 nt, Human
aagccaggcugcacuugcuggg

SEQ ID NO: 549694 - RNA, 22 nt, Human
aauauucaaguuauucuuucuu

SEQ ID NO: 549695 - RNA, 20 nt, Human
caaagcaguaggauaaaaau

SEQ ID NO: 549696 - RNA, 22 nt, Human
ccugucuguaucgguucagagu

SEQ ID NO: 549697 - RNA, 22 nt, Human
gggcugcugcccaggaggcacc

SEQ ID NO: 549698 - RNA, 22 nt, Human
cugccucugcgucccacagagu

SEQ ID NO: 549699 - RNA, 22 nt, Human
ccagaugggaagaagcaugacu

SEQ ID NO: 549700 - RNA, 22 nt, Human
ccuuccccaggugcucacuguc

SEQ ID NO: 549701 - RNA, 22 nt, Human
uggugcccacucuggacccagc

SEQ ID NO: 549702 - RNA, 22 nt, Human
caggagacaauggcuguggggc

SEQ ID NO: 549703 - RNA, 22 nt, Human
ucacauaaauuuaccagaugau

SEQ ID NO: 549704 - RNA, 22 nt, Human
ccagccagcugguuggacgccu

SEQ ID NO: 549705 - RNA, 22 nt, Human
aaacucuuuugcauauuagagg

SEQ ID NO: 549706 - RNA, 21 nt, Human
ggcagcugaccgcgcggugca

SEQ ID NO: 549707 - RNA, 22 nt, Human
agguggcuccucccauggcugg

SEQ ID NO: 549708 - RNA, 22 nt, Human
uugaauaaaugagcagugaauu

SEQ ID NO: 549709 - RNA, 22 nt, Human
ccucccaccauuuagagagagc

SEQ ID NO: 549710 - RNA, 22 nt, Human
cacacaucuuaucccaguuauu

SEQ ID NO: 549711 - RNA, 22 nt, Human
agcagagcgccugcucagaggg

SEQ ID NO: 549712 - RNA, 22 nt, Human
auugaaucugcacuaguauuuu

SEQ ID NO: 549713 - RNA, 22 nt, Human
ggcucagguuaccagucccucc

SEQ ID NO: 549714 - RNA, 22 nt, Human
ggcaggcuugauauggggggac

SEQ ID NO: 549715 - RNA, 22 nt, Human
caaaacauucucugcagcaggg

SEQ ID NO: 549716 - RNA, 22 nt, Human
ugcucugggcaacagccucccu

SEQ ID NO: 549717 - RNA, 22 nt, Human
ugagguggugcuaaucucugcu

SEQ ID NO: 549718 - RNA, 22 nt, Human
cagggccaguucucgcagcagu

SEQ ID NO: 549719 - RNA, 22 nt, Human
cggcagagacggcgcuuugaac

SEQ ID NO: 549720 - RNA, 22 nt, Human
ucuuucuacauuuuauaugcuu

SEQ ID NO: 549721 - RNA, 22 nt, Human
uuucacaugguacugccuguuu

SEQ ID NO: 549722 - RNA, 22 nt, Human
gcacugcagccucagauggugg

SEQ ID NO: 549723 - RNA, 22 nt, Human
gcugucucauacaaggcccugc

SEQ ID NO: 549724 - RNA, 22 nt, Human
gcuguucuuugcaucucuggug

SEQ ID NO: 549725 - RNA, 22 nt, Human
uggcacuggaaucguagccuug

SEQ ID NO: 549726 - RNA, 22 nt, Human
uguaaagaaagacgcagaguua

SEQ ID NO: 549727 - RNA, 22 nt, Human
aaacuugauuuagaacuaaggc

SEQ ID NO: 549728 - RNA, 22 nt, Human
cagcuuccaucuccacugcccu

SEQ ID NO: 549729 - RNA, 22 nt, Human
ccauuaaagcaccacuguaaua

SEQ ID NO: 549730 - RNA, 22 nt, Human
uggagguguccaacucgugggu

SEQ ID NO: 549731 - RNA, 21 nt, Human
ggugggcacaggagagcagag

SEQ ID NO: 549732 - RNA, 22 nt, Human
agaucaaaaacuuaauggcuuu

SEQ ID NO: 549733 - RNA, 20 nt, Human
auguagaugaaagcaaaggc

SEQ ID NO: 549734 - RNA, 22 nt, Human
cuggggacucauucagagcaua

SEQ ID NO: 549735 - RNA, 22 nt, Human
ucagaggaccuuacugagaacc

SEQ ID NO: 549736 - RNA, 22 nt, Human
uuuagacacacuuuguauauuu

SEQ ID NO: 549737 - RNA, 23 nt, Human
gcagagcugcccuauugccuugg

SEQ ID NO: 549738 - RNA, 22 nt, Human
cagggcagcuuccuuuguuagg

SEQ ID NO: 549739 - RNA, 22 nt, Human
aaucagaaaauucaguggaauu

SEQ ID NO: 549740 - RNA, 22 nt, Human
cugaggcaguuuaauuuuugaa

SEQ ID NO: 549741 - RNA, 22 nt, Human
cugaggcaggggcagcuggaga

SEQ ID NO: 549742 - RNA, 22 nt, Human
ucagggaaauagcagggcugaa

SEQ ID NO: 549743 - RNA, 22 nt, Human
ucugcaugaugaacaaaugagc

SEQ ID NO: 549744 - RNA, 22 nt, Human
gaguguuccagaaacuggcccu

SEQ ID NO: 549745 - RNA, 22 nt, Human
aagauuuccuucaguagagcua

SEQ ID NO: 549746 - RNA, 22 nt, Human
aaaauauuuuagggccaggaga

SEQ ID NO: 549747 - RNA, 22 nt, Human
gcagacagaugagggugcuggg

SEQ ID NO: 549748 - RNA, 22 nt, Human
uaggagaggugaauggcacacu

SEQ ID NO: 549749 - RNA, 18 nt, Human
aggagaaagggaccaggg

SEQ ID NO: 549750 - RNA, 22 nt, Human
ccacagggauaggaauggggcu

SEQ ID NO: 549751 - RNA, 22 nt, Human
aaguuuuugguagagaaaagua

SEQ ID NO: 549752 - RNA, 22 nt, Human
ggccaggcacugugugagauau

SEQ ID NO: 549753 - RNA, 22 nt, Human
ggcugcuucucacucauuugca

SEQ ID NO: 549754 - RNA, 22 nt, Human
uccucaggcugccuggaagacu

SEQ ID NO: 549755 - RNA, 22 nt, Human
auggacaggcugagcuuccuca

SEQ ID NO: 549756 - RNA, 22 nt, Human
uuauugaguuguaagagcucuu

SEQ ID NO: 549757 - RNA, 22 nt, Human
aaguccuuuccaguccugugau

SEQ ID NO: 549758 - RNA, 22 nt, Human
cuuuguuuauauuucuccucga

SEQ ID NO: 549759 - RNA, 22 nt, Human
caagacaagaucuaagcaugcu

SEQ ID NO: 549760 - RNA, 22 nt, Human
cccaggaggccaagguugcagu

SEQ ID NO: 549761 - RNA, 22 nt, Human
gcccccucuuuggagccagcca

SEQ ID NO: 549762 - RNA, 22 nt, Human
ggagggagucagcugauuagaa

SEQ ID NO: 549763 - RNA, 22 nt, Human
ugcuucuggcagauugagugag

SEQ ID NO: 549764 - RNA, 22 nt, Human
ggagggcaucaaucaggccugg

SEQ ID NO: 549765 - RNA, 22 nt, Human
cugagccagggccacacaugga

SEQ ID NO: 549766 - RNA, 22 nt, Human
gcagcagcccagggcucucaga

SEQ ID NO: 549767 - RNA, 22 nt, Human
uucuaauacacgguaugacuuu

SEQ ID NO: 549768 - RNA, 22 nt, Human
ccaaggagcucauauucuuguu

SEQ ID NO: 549769 - RNA, 22 nt, Human
uccuucagccaugggcucucca

SEQ ID NO: 549770 - RNA, 17 nt, Human
gagugcugguggagcuc

SEQ ID NO: 549771 - RNA, 22 nt, Human
ucuguuuaugugucuaaauaaa

SEQ ID NO: 549772 - RNA, 22 nt, Human
aguaaacauaauuuaccuguag

SEQ ID NO: 549773 - RNA, 22 nt, Human
gagagaaaggauaacagcucaa

SEQ ID NO: 549774 - RNA, 22 nt, Human
agaaauguggaucguuuuaaaa

SEQ ID NO: 549775 - RNA, 22 nt, Human
uggagcugagaaguggagcucu

SEQ ID NO: 549776 - RNA, 22 nt, Human
gagcaacaguuuaugguuuuuc

SEQ ID NO: 549777 - RNA, 22 nt, Human
cugcccugccuggccagugugg

SEQ ID NO: 549778 - RNA, 22 nt, Human
augcagaaagcggcaaacaggu

SEQ ID NO: 549779 - RNA, 22 nt, Human
gggguggccaaggacucugacc

SEQ ID NO: 549780 - RNA, 22 nt, Human
uguaaagauuagauuacaugaa

SEQ ID NO: 549781 - RNA, 22 nt, Human
gaauguuuaaggaaggcguggc

SEQ ID NO: 549782 - RNA, 22 nt, Human
gauaccagacagggagggagaa

SEQ ID NO: 549783 - RNA, 22 nt, Human
uugaaucuggguacuuguaaua

SEQ ID NO: 549784 - RNA, 22 nt, Human
uuauucacucauuaaagcagga

SEQ ID NO: 549785 - RNA, 22 nt, Human
gggcaugagaggcaggcaagug

SEQ ID NO: 549786 - RNA, 22 nt, Human
uuauaacaucaaucagaguuaa

SEQ ID NO: 549787 - RNA, 22 nt, Human
acaauuucugaucagugaauuu

SEQ ID NO: 549788 - RNA, 22 nt, Human
uuugggaagaggaaucucugga

SEQ ID NO: 549789 - RNA, 19 nt, Human
agaaaucucgagauuuguu

SEQ ID NO: 549790 - RNA, 22 nt, Human
gaagagcuaaaggcacaggcuu

SEQ ID NO: 549791 - RNA, 22 nt, Human
gagagcuggccagcuucaguau

SEQ ID NO: 549792 - RNA, 22 nt, Human
aggcuuaagccugaggccccag

SEQ ID NO: 549793 - RNA, 22 nt, Human
caagagcuacccugugccauau

SEQ ID NO: 549794 - RNA, 22 nt, Human
cacaaauggccguguucaaaga

SEQ ID NO: 549795 - RNA, 22 nt, Human
uuugggaacucuaucauggaaa

SEQ ID NO: 549796 - RNA, 22 nt, Human
gaauuaaaauaguuuuggucga

SEQ ID NO: 549797 - RNA, 22 nt, Human
cacagcuuccauuagaaugaga

SEQ ID NO: 549798 - RNA, 22 nt, Human
aaaugucuuugaguauuucugc

SEQ ID NO: 549799 - RNA, 22 nt, Human
aguaggcauagaaagaagcacc

SEQ ID NO: 549800 - RNA, 22 nt, Human
aaggaagaaaugaauaggugga

SEQ ID NO: 549801 - RNA, 22 nt, Human
uaccugcaaaguuccuuuugcc

SEQ ID NO: 549802 - RNA, 22 nt, Human
gcuucaugcuugcuccaaagcu

SEQ ID NO: 549803 - RNA, 22 nt, Human
aggaggugagcggucauguggu

SEQ ID NO: 549804 - RNA, 22 nt, Human
uuguaauuaauggcagcaauua

SEQ ID NO: 549805 - RNA, 22 nt, Human
uggcagagaugaagaguuguuu

SEQ ID NO: 549806 - RNA, 22 nt, Human
ugugagcagagccugacaugag

SEQ ID NO: 549807 - RNA, 22 nt, Human
ggggaccuucccagagcaguug

SEQ ID NO: 549808 - RNA, 22 nt, Human
ucucuucuuguguuuuccugcc

SEQ ID NO: 549809 - RNA, 22 nt, Human
guuugcauauuugcacaggaau

SEQ ID NO: 549810 - RNA, 22 nt, Human
auuuugaaauacuugaaggaaa

SEQ ID NO: 549811 - RNA, 17 nt, Human
ccuggcugggaaucuga

SEQ ID NO: 549812 - RNA, 22 nt, Human
ugaaugugaugcuaaacauaug

SEQ ID NO: 549813 - RNA, 22 nt, Human
ggagccugugcccaagcccaga

SEQ ID NO: 549814 - RNA, 22 nt, Human
uuccugugccucaggucucagc

SEQ ID NO: 549815 - RNA, 19 nt, Human
gcagccaggugcucuaccu

SEQ ID NO: 549816 - RNA, 22 nt, Human
aaggcagucugguuucaaagca

SEQ ID NO: 549817 - RNA, 22 nt, Human
acuuugcagagccagaagagaa

SEQ ID NO: 549818 - RNA, 22 nt, Human
agggcuggaggguacuaguuua

SEQ ID NO: 549819 - RNA, 20 nt, Human
gcugggcuuugacugacaca

SEQ ID NO: 549820 - RNA, 22 nt, Human
gccugggauuguguaagugaau

SEQ ID NO: 549821 - RNA, 22 nt, Human
aaggccagaguacuagaggcug

SEQ ID NO: 549822 - RNA, 22 nt, Human
uccaggcaugguguaauuuugc

SEQ ID NO: 549823 - RNA, 23 nt, Human
ugggaguguugggaucucugcuc

SEQ ID NO: 549824 - RNA, 22 nt, Human
ccugucuguccucucaugagcc

SEQ ID NO: 549825 - RNA, 22 nt, Human
cagccagccucucaaccaugca

SEQ ID NO: 549826 - RNA, 22 nt, Human
cagcagcugcgugcccaggccg

SEQ ID NO: 549827 - RNA, 19 nt, Human
auauccuugagaaagggaa

SEQ ID NO: 549828 - RNA, 22 nt, Human
uccagggagauggcagaggcug

SEQ ID NO: 549829 - RNA, 22 nt, Human
gcucucugccauaugaggauac

SEQ ID NO: 549830 - RNA, 19 nt, Human
agggaaggauucugucauu

SEQ ID NO: 549831 - RNA, 22 nt, Human
uaacugaacagccuaauucuuu

SEQ ID NO: 549832 - RNA, 17 nt, Human
cucuccuuccucugagg

SEQ ID NO: 549833 - RNA, 22 nt, Human
uaauguuugagauguuggauuu

SEQ ID NO: 549834 - RNA, 22 nt, Human
guaucuuuugguggaaaaauaa

SEQ ID NO: 549835 - RNA, 22 nt, Human
agggacacugaugagaaauucu

SEQ ID NO: 549836 - RNA, 22 nt, Human
gccaggcauuauuccgaucccu

SEQ ID NO: 549837 - RNA, 22 nt, Human
acagagaugcaaguguguauuu

SEQ ID NO: 549838 - RNA, 22 nt, Human
acugggcugccugguucuucua

SEQ ID NO: 549839 - RNA, 22 nt, Human
gaugcacaugugaguauagaag

SEQ ID NO: 549840 - RNA, 20 nt, Human
gucuuuauguuuuaugaccu

SEQ ID NO: 549841 - RNA, 22 nt, Human
ggggaccugggcuucaaggguu

SEQ ID NO: 549842 - RNA, 22 nt, Human
ugcagggacaggcucuggggau

SEQ ID NO: 549843 - RNA, 22 nt, Human
aaggcccuggccccagcuucuu

SEQ ID NO: 549844 - RNA, 22 nt, Human
uggaggcauugugacugcugaa

SEQ ID NO: 549845 - RNA, 22 nt, Human
uuaaagcauguugcuuaacagg

SEQ ID NO: 549846 - RNA, 22 nt, Human
acaugcuaugagagauuacuuc

SEQ ID NO: 549847 - RNA, 22 nt, Human
cuggcuccauccuugagcucug

SEQ ID NO: 549848 - RNA, 22 nt, Human
ugcaaagauuuaucuuucucca

SEQ ID NO: 549849 - RNA, 22 nt, Human
acaaaaauuagcugggcauggu

SEQ ID NO: 549850 - RNA, 20 nt, Human
agagaauucccuuuggagau

SEQ ID NO: 549851 - RNA, 22 nt, Human
uggaaagagauguuguuucuga

SEQ ID NO: 549852 - RNA, 22 nt, Human
uuguuuuuagagaagcccugaa

SEQ ID NO: 549853 - RNA, 22 nt, Human
ugaaguuuucugguugauuaag

SEQ ID NO: 549854 - RNA, 22 nt, Human
ucugccugccagucugguccuc

SEQ ID NO: 549855 - RNA, 22 nt, Human
cacucacuuauuucuaacagaa

SEQ ID NO: 549856 - RNA, 22 nt, Human
uagucaaaccucagaauacccc

SEQ ID NO: 549857 - RNA, 22 nt, Human
agccuucacugggaccuuggau

SEQ ID NO: 549858 - RNA, 22 nt, Human
aaugucuuuugauacaaguuac

SEQ ID NO: 549859 - RNA, 22 nt, Human
uaaggcaccauaauauauuuaa

SEQ ID NO: 549860 - RNA, 22 nt, Human
cccugcagacgucuugaugccu

SEQ ID NO: 549861 - RNA, 22 nt, Human
agcaggguauguuagagcugua

SEQ ID NO: 549862 - RNA, 22 nt, Human
aagaagagaaaugugcugcugg

SEQ ID NO: 549863 - RNA, 22 nt, Human
aauaaauguuaagauugucuca

SEQ ID NO: 549864 - RNA, 18 nt, Human
uccagagcuacuguggug

SEQ ID NO: 549865 - RNA, 22 nt, Human
aggaggugacagccugcaucug

SEQ ID NO: 549866 - RNA, 22 nt, Human
ugaggccuggagggaggaguuu

SEQ ID NO: 549867 - RNA, 22 nt, Human
aacauguaaccagcauucaucu

SEQ ID NO: 549868 - RNA, 20 nt, Human
uaugaagauaugugaacagc

SEQ ID NO: 549869 - RNA, 22 nt, Human
ucagaggauugccucagcgagc

SEQ ID NO: 549870 - RNA, 22 nt, Human
ugggcuggugagggaucauuua

SEQ ID NO: 549871 - RNA, 22 nt, Human
ugucauguguucuuaaauacau

SEQ ID NO: 549872 - RNA, 22 nt, Human
accugggaggcagagguugcag

SEQ ID NO: 549873 - RNA, 22 nt, Human
acaaagucuuuuacaacaguca

SEQ ID NO: 549874 - RNA, 22 nt, Human
uauaagucuggcauauguaugc

SEQ ID NO: 549875 - RNA, 22 nt, Human
acagacuggccugucucgcacc

SEQ ID NO: 549876 - RNA, 22 nt, Human
uuguggcucgugagauguuagg

SEQ ID NO: 549877 - RNA, 23 nt, Human
gacacaggagcacccagcugagc

SEQ ID NO: 549878 - RNA, 22 nt, Human
ccagggcugagcugugaccaug

SEQ ID NO: 549879 - RNA, 22 nt, Human
acaggcuucucacagaaaaggg

SEQ ID NO: 549880 - RNA, 22 nt, Human
gaacaguacuaagagcuuuaca

SEQ ID NO: 549881 - RNA, 22 nt, Human
ucugagccaauuucugugucca

SEQ ID NO: 549882 - RNA, 22 nt, Human
agucagugaaggcauugcucaa

SEQ ID NO: 549883 - RNA, 22 nt, Human
cagcugagcucccaggccauca

SEQ ID NO: 549884 - RNA, 22 nt, Human
agaaagaacgcacuugugcugc

SEQ ID NO: 549885 - RNA, 22 nt, Human
ugcuucuguauuuugggcuuga

SEQ ID NO: 549886 - RNA, 22 nt, Human
acaaaguuugugguauuccaag

SEQ ID NO: 549887 - RNA, 22 nt, Human
gggcacagucuaaaguugggcc

SEQ ID NO: 549888 - RNA, 22 nt, Human
auucaguuaaaaacuguacuuc

SEQ ID NO: 549889 - RNA, 22 nt, Human
uuauacauguuuauaagguuga

SEQ ID NO: 549890 - RNA, 22 nt, Human
uguucauuuugaaguacuucaa

SEQ ID NO: 549891 - RNA, 22 nt, Human
aacaacugcuaagguguguccu

SEQ ID NO: 549892 - RNA, 22 nt, Human
cugcaucaggccaauuaagaau

SEQ ID NO: 549893 - RNA, 22 nt, Human
cagcuggcaaguggagcagggu

SEQ ID NO: 549894 - RNA, 22 nt, Human
uaacagaaauagaaaugagagu

SEQ ID NO: 549895 - RNA, 22 nt, Human
gauuucuuuagguguaauagug

SEQ ID NO: 549896 - RNA, 22 nt, Human
gaggcacaugacucaccaaugg

SEQ ID NO: 549897 - RNA, 22 nt, Human
ccuugaaucucugcucuagaac

SEQ ID NO: 549898 - RNA, 22 nt, Human
cacaucuucuuaacuccaaagu

SEQ ID NO: 549899 - RNA, 22 nt, Human
ucacagcaaaagugugcagagc

SEQ ID NO: 549900 - RNA, 22 nt, Human
gggcugagacgauggggucuuc

SEQ ID NO: 549901 - RNA, 22 nt, Human
ugcugccacaaauucagcugcc

SEQ ID NO: 549902 - RNA, 21 nt, Human
ucugugcuuuuuuggcuccua

SEQ ID NO: 549903 - RNA, 22 nt, Human
guccaagucuuccuucccaaac

SEQ ID NO: 549904 - RNA, 22 nt, Human
aaugaagaaauggacaucuuua

SEQ ID NO: 549905 - RNA, 21 nt, Human
ccaggcuccugaggcugguca

SEQ ID NO: 549906 - RNA, 22 nt, Human
agcugcucccuauccuuuccuu

SEQ ID NO: 549907 - RNA, 22 nt, Human
cagaagucacccucagaauaac

SEQ ID NO: 549908 - RNA, 22 nt, Human
uaacacuugggggcauccuuag

SEQ ID NO: 549909 - RNA, 21 nt, Human
gccaccucgucucggagcagc

SEQ ID NO: 549910 - RNA, 22 nt, Human
uacaaacucuuuauauuucaua

SEQ ID NO: 549911 - RNA, 22 nt, Human
caaaggcaguuacugaaugaag

SEQ ID NO: 549912 - RNA, 22 nt, Human
uaugacuuuggaaaaauuacuu

SEQ ID NO: 549913 - RNA, 22 nt, Human
ugccugucuuaauaucuggaaa

SEQ ID NO: 549914 - RNA, 22 nt, Human
cucugucccagacccaccucuc

SEQ ID NO: 549915 - RNA, 23 nt, Human
aaguaccuacacauuauuucaga

SEQ ID NO: 549916 - RNA, 22 nt, Human
ugcugaguauuuguuugaauaa

SEQ ID NO: 549917 - RNA, 22 nt, Human
aggaaaggccucagcagaaacc

SEQ ID NO: 549918 - RNA, 22 nt, Human
agcagcaugaugacagagucuc

SEQ ID NO: 549919 - RNA, 22 nt, Human
uugucuuagagugaaaacuuua

SEQ ID NO: 549920 - RNA, 22 nt, Human
ugggccugaaauucccauuuua

SEQ ID NO: 549921 - RNA, 22 nt, Human
cuggcucuaucuccaaggcugg

SEQ ID NO: 549922 - RNA, 22 nt, Human
uaaauaaguucuucauuguuug

SEQ ID NO: 549923 - RNA, 19 nt, Human
auggccaguuuagagguuu

SEQ ID NO: 549924 - RNA, 22 nt, Human
ugccucauuaacuguccuuaau

SEQ ID NO: 549925 - RNA, 22 nt, Human
gccuucccacccugcgaggcug

SEQ ID NO: 549926 - RNA, 22 nt, Human
ccaggacuucgaggcuacagug

SEQ ID NO: 549927 - RNA, 22 nt, Human
gggaggcuggcucuggccacag

SEQ ID NO: 549928 - RNA, 22 nt, Human
uaacaagucauuuuaucagcag

SEQ ID NO: 549929 - RNA, 22 nt, Human
auauuccuguuuuuaacacuuu

SEQ ID NO: 549930 - RNA, 22 nt, Human
gacacuucaccuuucccagccu

SEQ ID NO: 549931 - RNA, 20 nt, Human
ugcuuuaugcuauacuuugu

SEQ ID NO: 549932 - RNA, 22 nt, Human
acaggugagggguucuaggcug

SEQ ID NO: 549933 - RNA, 22 nt, Human
cagcuuggaggaggaucuaaga

SEQ ID NO: 549934 - RNA, 22 nt, Human
auugcuuuuagugaaauuauau

SEQ ID NO: 549935 - RNA, 22 nt, Human
gcucucuggguggugggcaaca

SEQ ID NO: 549936 - RNA, 22 nt, Human
ucauggaagaaagguuuguuuc

SEQ ID NO: 549937 - RNA, 22 nt, Human
cuggcugguccucggggacagc

SEQ ID NO: 549938 - RNA, 22 nt, Human
ggcacugauuccauucaugaag

SEQ ID NO: 549939 - RNA, 22 nt, Human
caggaugggauguagugggccc

SEQ ID NO: 549940 - RNA, 22 nt, Human
gucaaacagccuccuguucuaa

SEQ ID NO: 549941 - RNA, 22 nt, Human
uagccggguguugugucaugca

SEQ ID NO: 549942 - RNA, 22 nt, Human
caggguggggaaauagcgcccu

SEQ ID NO: 549943 - RNA, 19 nt, Human
ucauggaagaaaugugaua

SEQ ID NO: 549944 - RNA, 22 nt, Human
cucaagucuauugauaagugca

SEQ ID NO: 549945 - RNA, 22 nt, Human
ggaaggaagugcagacuuuaaa

SEQ ID NO: 549946 - RNA, 23 nt, Human
caucagugagggggaaucacuaa

SEQ ID NO: 549947 - RNA, 22 nt, Human
aaggugaaacuggaagcuggcc

SEQ ID NO: 549948 - RNA, 22 nt, Human
ucugcagaauucgaggaagaaa

SEQ ID NO: 549949 - RNA, 22 nt, Human
uucaguuuccacuuacauuuaa

SEQ ID NO: 549950 - RNA, 22 nt, Human
ugcugccaaaugcgagcucugu

SEQ ID NO: 549951 - RNA, 22 nt, Human
uuucucacccaagaguuauuuu

SEQ ID NO: 549952 - RNA, 22 nt, Human
aagcugcccuguguuagaguuc

SEQ ID NO: 549953 - RNA, 22 nt, Human
cugcaagauguugucauaugcu

SEQ ID NO: 549954 - RNA, 22 nt, Human
ccaggcaggcuagaauguaaau

SEQ ID NO: 549955 - RNA, 22 nt, Human
uguguccucauguggcagagag

SEQ ID NO: 549956 - RNA, 22 nt, Human
uaugaauauaccacaauuuagg

SEQ ID NO: 549957 - RNA, 22 nt, Human
acauuucuccuugcaggaguca

SEQ ID NO: 549958 - RNA, 22 nt, Human
cuggccccaggcagccugcugg

SEQ ID NO: 549959 - RNA, 22 nt, Human
gccugccugcugugugcaaguu

SEQ ID NO: 549960 - RNA, 22 nt, Human
aaggugucaccagauuggcagg

SEQ ID NO: 549961 - RNA, 21 nt, Human
aguguguguggaaugagaaua

SEQ ID NO: 549962 - RNA, 22 nt, Human
gucugucaucugagauggagug

SEQ ID NO: 549963 - RNA, 17 nt, Human
gagauggguggaucacc

SEQ ID NO: 549964 - RNA, 22 nt, Human
uggagccugagucagcggaggc

SEQ ID NO: 549965 - RNA, 22 nt, Human
ggagugggaacaaugacauggu

SEQ ID NO: 549966 - RNA, 22 nt, Human
agcuuuauauaaaagaguacau

SEQ ID NO: 549967 - RNA, 22 nt, Human
uaugagcuuccaguguugcaug

SEQ ID NO: 549968 - RNA, 22 nt, Human
guucuggaggagagccuggugu

SEQ ID NO: 549969 - RNA, 22 nt, Human
ccagaggaaaaauaucucccua

SEQ ID NO: 549970 - RNA, 22 nt, Human
ccaggugucaugcgugugaccc

SEQ ID NO: 549971 - RNA, 22 nt, Human
cuuauucagaccuuggauucuu

SEQ ID NO: 549972 - RNA, 22 nt, Human
gggugcugacuggggccugaaa

SEQ ID NO: 549973 - RNA, 22 nt, Human
uggcucagccagcccuaggaac

SEQ ID NO: 549974 - RNA, 18 nt, Human
uuucacagauucaugacu

SEQ ID NO: 549975 - RNA, 22 nt, Human
cucaggauuuaaaggggcacuc

SEQ ID NO: 549976 - RNA, 22 nt, Human
acauuucagauguaaugugaug

SEQ ID NO: 549977 - RNA, 22 nt, Human
uucuucuucauuucugacgaug

SEQ ID NO: 549978 - RNA, 22 nt, Human
uccaggcaucuguauuuuuuaa

SEQ ID NO: 549979 - RNA, 23 nt, Human
agcuucauugaccuccgcagggg

SEQ ID NO: 549980 - RNA, 22 nt, Human
augaaaacuuuagccucauuag

SEQ ID NO: 549981 - RNA, 22 nt, Human
uugauucaaccacuuaauaauc

SEQ ID NO: 549982 - RNA, 20 nt, Human
uuggcucugaucaguggagc

SEQ ID NO: 549983 - RNA, 22 nt, Human
ugccuuuuagugcucaauaaag

SEQ ID NO: 549984 - RNA, 22 nt, Human
cuggugcuuugcucauuugaua

SEQ ID NO: 549985 - RNA, 19 nt, Human
uuaugaauagcuucaucca

SEQ ID NO: 549986 - RNA, 22 nt, Human
gugaucuuguaauugggcaaug

SEQ ID NO: 549987 - RNA, 22 nt, Human
augugcaaauuauuuugccaga

SEQ ID NO: 549988 - RNA, 22 nt, Human
ucugaaauggcgauggccguug

SEQ ID NO: 549989 - RNA, 21 nt, Human
ugcagagauaucugaagcaga

SEQ ID NO: 549990 - RNA, 19 nt, Human
gcugcuggcucuggcugga

SEQ ID NO: 549991 - RNA, 22 nt, Human
aaucuacaugcaauauuuuuag

SEQ ID NO: 549992 - RNA, 22 nt, Human
ucauccaguucacauggugagu

SEQ ID NO: 549993 - RNA, 22 nt, Human
ucucacucauuuccuaggucuu

SEQ ID NO: 549994 - RNA, 22 nt, Human
ugagaaaaguguggaggucaau

SEQ ID NO: 549995 - RNA, 22 nt, Human
gcaggaugccagggcagcagcg

SEQ ID NO: 549996 - RNA, 22 nt, Human
ccucucuguaagggucccuccc

SEQ ID NO: 549997 - RNA, 22 nt, Human
uuauagaauguuuccaaugccu

SEQ ID NO: 549998 - RNA, 22 nt, Human
guccugggccugcugaggcuga

SEQ ID NO: 549999 - RNA, 22 nt, Human
caugggaggucugcaaggugcu

SEQ ID NO: 550000 - RNA, 19 nt, Human
agcuuccauauucucuagu

SEQ ID NO: 550001 - RNA, 21 nt, Human
ggcuccugcuuugugaggggc

SEQ ID NO: 550002 - RNA, 18 nt, Human
agcuggggccucuggucc

SEQ ID NO: 550003 - RNA, 22 nt, Human
ucucugggaauucacaagcccu

SEQ ID NO: 550004 - RNA, 22 nt, Human
caagaauagcuaccucccauau

SEQ ID NO: 550005 - RNA, 18 nt, Human
aggcaggauccuggccuc

SEQ ID NO: 550006 - RNA, 22 nt, Human
auucauacaggcuuugcucuua

SEQ ID NO: 550007 - RNA, 22 nt, Human
gccuguuggugacuuucuguug

SEQ ID NO: 550008 - RNA, 22 nt, Human
ggccagagaagucagacccuug

SEQ ID NO: 550009 - RNA, 22 nt, Human
cuguaugaacccauauacuuau

SEQ ID NO: 550010 - RNA, 23 nt, Human
uuguuuaccguaggacuuuuaac

SEQ ID NO: 550011 - RNA, 22 nt, Human
uuucuaaucuuuaguuacaaaa

SEQ ID NO: 550012 - RNA, 22 nt, Human
ugugaagcuggauccuggagcu

SEQ ID NO: 550013 - RNA, 22 nt, Human
gcucccaccuuugcuaucagua

SEQ ID NO: 550014 - RNA, 22 nt, Human
ugaccugcagucaagaggggaa

SEQ ID NO: 550015 - RNA, 22 nt, Human
gccugccuucggugcgcagcgg

SEQ ID NO: 550016 - RNA, 21 nt, Human
uuuauguacuucauagaguag

SEQ ID NO: 550017 - RNA, 22 nt, Human
uuucuaaguaaacacagcauac

SEQ ID NO: 550018 - RNA, 22 nt, Human
cuggaaggucuguccccacugc

SEQ ID NO: 550019 - RNA, 18 nt, Human
acagggagggcgcugggg

SEQ ID NO: 550020 - RNA, 22 nt, Human
ggcacagcgacuaccaucgaaa

SEQ ID NO: 550021 - RNA, 22 nt, Human
ugaucagucccaugaucuucca

SEQ ID NO: 550022 - RNA, 22 nt, Human
acagauuugacugguaccuggc

SEQ ID NO: 550023 - RNA, 22 nt, Human
aauaucaacaguguccuucuaa

SEQ ID NO: 550024 - RNA, 22 nt, Human
ccagagagucgaugggggacac

SEQ ID NO: 550025 - RNA, 22 nt, Human
agagacaggauaucugcucaug

SEQ ID NO: 550026 - RNA, 22 nt, Human
gaagaacuuaacauaauaagga

SEQ ID NO: 550027 - RNA, 22 nt, Human
uuucauguuacauuuaaaaugu

SEQ ID NO: 550028 - RNA, 18 nt, Human
gagaagugcauacauuau

SEQ ID NO: 550029 - RNA, 22 nt, Human
gggggcaguaaccucaaagugu

SEQ ID NO: 550030 - RNA, 22 nt, Human
acaguguacuaaauaguaagag

SEQ ID NO: 550031 - RNA, 22 nt, Human
ugccuggguguaaagggccaac

SEQ ID NO: 550032 - RNA, 22 nt, Human
ccuggggauucugacacggagu

SEQ ID NO: 550033 - RNA, 22 nt, Human
gcugcucuacccaugcaucugu

SEQ ID NO: 550034 - RNA, 22 nt, Human
aaaucucuggcagaaauaaacu

SEQ ID NO: 550035 - RNA, 22 nt, Human
aaaauucugucauuaaauugug

SEQ ID NO: 550036 - RNA, 22 nt, Human
uuuguucacugauguaucccaa

SEQ ID NO: 550037 - RNA, 22 nt, Human
gcacuggauuuugaucugcaag

SEQ ID NO: 550038 - RNA, 22 nt, Human
cuucacaguaaauccagaagaa

SEQ ID NO: 550039 - RNA, 22 nt, Human
gggaggugaaaggucaugugug

SEQ ID NO: 550040 - RNA, 22 nt, Human
guuguacaaaauaucagugagg

SEQ ID NO: 550041 - RNA, 22 nt, Human
guaaaauagaauaacguggcua

SEQ ID NO: 550042 - RNA, 22 nt, Human
ugaaaagugaucauggauuagg

SEQ ID NO: 550043 - RNA, 22 nt, Human
uaagaaacuauggagaagaacu

SEQ ID NO: 550044 - RNA, 22 nt, Human
aguaaaaaguucagaaugguug

SEQ ID NO: 550045 - RNA, 22 nt, Human
aaauuguugaucuacaguaagg

SEQ ID NO: 550046 - RNA, 22 nt, Human
cagggcacaguuauggaggugg

SEQ ID NO: 550047 - RNA, 22 nt, Human
acugcagccuugaacucugggc

SEQ ID NO: 550048 - RNA, 22 nt, Human
auagauguuuuaguaauacugu

SEQ ID NO: 550049 - RNA, 19 nt, Human
acaauaacucauugauugc

SEQ ID NO: 550050 - RNA, 22 nt, Human
guguucaaaauguagguagauu

SEQ ID NO: 550051 - RNA, 22 nt, Human
ccugugcauccgguggucauug

SEQ ID NO: 550052 - RNA, 22 nt, Human
cuucacagagucccugauuguu

SEQ ID NO: 550053 - RNA, 22 nt, Human
cugugggagaaguugcuggagu

SEQ ID NO: 550054 - RNA, 21 nt, Human
acacacugaguuuuccacugu

SEQ ID NO: 550055 - RNA, 22 nt, Human
aggcugagccugggcguggugg

SEQ ID NO: 550056 - RNA, 22 nt, Human
agcuccuccugugccaggccag

SEQ ID NO: 550057 - RNA, 22 nt, Human
ugaagcaacuggacaaguuggc

SEQ ID NO: 550058 - RNA, 22 nt, Human
ugaugaaauguugaggcaguga

SEQ ID NO: 550059 - RNA, 22 nt, Human
caggcccucgcccgcagcgacc

SEQ ID NO: 550060 - RNA, 22 nt, Human
uugcugaaaagcuggccuuugu

SEQ ID NO: 550061 - RNA, 22 nt, Human
ccauuucacccacugcuuuagg

SEQ ID NO: 550062 - RNA, 22 nt, Human
gaggcucacuaggcauccuggg

SEQ ID NO: 550063 - RNA, 22 nt, Human
acacaugcugauaagaauauaa

SEQ ID NO: 550064 - RNA, 22 nt, Human
gagcugaguuaccuccagauca

SEQ ID NO: 550065 - RNA, 22 nt, Human
uuagugucuucuucauccucug

SEQ ID NO: 550066 - RNA, 22 nt, Human
gccagcaguauguccuggcagu

SEQ ID NO: 550067 - RNA, 22 nt, Human
aucugcuuagaauucauugucc

SEQ ID NO: 550068 - RNA, 22 nt, Human
agauggugauagagcugggauu

SEQ ID NO: 550069 - RNA, 22 nt, Human
uagcuuuacaaagugcugcacc

SEQ ID NO: 550070 - RNA, 21 nt, Human
ucucuacacuuucacuaggcu

SEQ ID NO: 550071 - RNA, 22 nt, Human
uacaaaguuugagaaugcuuuc

SEQ ID NO: 550072 - RNA, 22 nt, Human
cagcuuuccagagaccugcccc

SEQ ID NO: 550073 - RNA, 22 nt, Human
auaauaacuccuguugaagaac

SEQ ID NO: 550074 - RNA, 22 nt, Human
ugugccagaaaauaugcugagg

SEQ ID NO: 550075 - RNA, 22 nt, Human
ugacagagcuggagaauaauuu

SEQ ID NO: 550076 - RNA, 22 nt, Human
gaggggaaagugugaggcugcg

SEQ ID NO: 550077 - RNA, 22 nt, Human
ugcccugccugagagacaguaa

SEQ ID NO: 550078 - RNA, 22 nt, Human
gcacacaggcaguuuccagcca

SEQ ID NO: 550079 - RNA, 22 nt, Human
acaucacaguaguuaagccaga

SEQ ID NO: 550080 - RNA, 22 nt, Human
gguggcuggaggagcugaugga

SEQ ID NO: 550081 - RNA, 22 nt, Human
cgcgguggcggccuccagcgcc

SEQ ID NO: 550082 - RNA, 22 nt, Human
auuagaaugacagaaaugaggc

SEQ ID NO: 550083 - RNA, 22 nt, Human
uggcccugaggggcugugcccc

SEQ ID NO: 550084 - RNA, 22 nt, Human
aaacuuuaaauuuguaccucug

SEQ ID NO: 550085 - RNA, 22 nt, Human
ccucugaguccucccugguugc

SEQ ID NO: 550086 - RNA, 22 nt, Human
aacucaguuacauauuagaaua

SEQ ID NO: 550087 - RNA, 22 nt, Human
agccaacuaauuaaacaacuuu

SEQ ID NO: 550088 - RNA, 22 nt, Human
gcugggcaaugccagagaggag

SEQ ID NO: 550089 - RNA, 22 nt, Human
agguacagggugaaaguuuaug

SEQ ID NO: 550090 - RNA, 22 nt, Human
gggaggugauggcaagcagcgg

SEQ ID NO: 550091 - RNA, 22 nt, Human
aaugucugaaaaucagacugca

SEQ ID NO: 550092 - RNA, 20 nt, Human
agaagccaagugacauguuu

SEQ ID NO: 550093 - RNA, 22 nt, Human
uucuguauuucaaugucuuuau

SEQ ID NO: 550094 - RNA, 22 nt, Human
uguugaagauaaaguucucauu

SEQ ID NO: 550095 - RNA, 22 nt, Human
aacagacagaaaaaugugaucu

SEQ ID NO: 550096 - RNA, 22 nt, Human
gacaggaaacaagaaggcagga

SEQ ID NO: 550097 - RNA, 22 nt, Human
uguuaggguccugugcaggggc

SEQ ID NO: 550098 - RNA, 22 nt, Human
agcagccaagguaaccugugcu

SEQ ID NO: 550099 - RNA, 22 nt, Human
gccucugcaggugcgguuaucc

SEQ ID NO: 550100 - RNA, 21 nt, Human
uaagccaccaugugaaaccag

SEQ ID NO: 550101 - RNA, 22 nt, Human
caagcuuguuucuccugggggu

SEQ ID NO: 550102 - RNA, 22 nt, Human
agagcuuauaucuuggccaucc

SEQ ID NO: 550103 - RNA, 22 nt, Human
agggcugaaacauaauccuucu

SEQ ID NO: 550104 - RNA, 22 nt, Human
aggcucagucccggcccgcgcc

SEQ ID NO: 550105 - RNA, 22 nt, Human
uaaagucaucuuuaaacaugcc

SEQ ID NO: 550106 - RNA, 22 nt, Human
gacugccagaaugugaggccug

SEQ ID NO: 550107 - RNA, 22 nt, Human
cacauauaugaaaugaggaauu

SEQ ID NO: 550108 - RNA, 22 nt, Human
cuggguggaucgcagccccagg

SEQ ID NO: 550109 - RNA, 22 nt, Human
acauuuauuuuggcacggcaca

SEQ ID NO: 550110 - RNA, 22 nt, Human
cagcugccagcuucucuccauc

SEQ ID NO: 550111 - RNA, 22 nt, Human
gagggggagaugugcacacacu

SEQ ID NO: 550112 - RNA, 22 nt, Human
aaggaggagcggaggcuuguug

SEQ ID NO: 550113 - RNA, 23 nt, Human
acuuaaaugguucuuuaucucag

SEQ ID NO: 550114 - RNA, 21 nt, Human
agcuggccugguuugagcucc

SEQ ID NO: 550115 - RNA, 22 nt, Human
aggaggccgggauucuggagau

SEQ ID NO: 550116 - RNA, 22 nt, Human
uuuuaucagcagggauaacaag

SEQ ID NO: 550117 - RNA, 22 nt, Human
uauuuucauucugugugacugu

SEQ ID NO: 550118 - RNA, 22 nt, Human
ugucaugccauuuaaaauguuu

SEQ ID NO: 550119 - RNA, 22 nt, Human
ucagaacagaagaaggaacacg

SEQ ID NO: 550120 - RNA, 22 nt, Human
aaaugcuaaaugcagcaaguag

SEQ ID NO: 550121 - RNA, 22 nt, Human
ucugcugguuccgaauuaggcc

SEQ ID NO: 550122 - RNA, 22 nt, Human
caucaaaugccauauaugguug

SEQ ID NO: 550123 - RNA, 22 nt, Human
gccagcagguggagagaucaag

SEQ ID NO: 550124 - RNA, 22 nt, Human
aucuggcuuucuuaaugacuua

SEQ ID NO: 550125 - RNA, 22 nt, Human
uucaggauaguggugaguggca

SEQ ID NO: 550126 - RNA, 22 nt, Human
uuggccuucccuaccugggcca

SEQ ID NO: 550127 - RNA, 22 nt, Human
gcugcucuugaggggcucacug

SEQ ID NO: 550128 - RNA, 22 nt, Human
aagcuuuaaggaauuuuaugga

SEQ ID NO: 550129 - RNA, 22 nt, Human
cuucucuguguagagauucaga

SEQ ID NO: 550130 - RNA, 22 nt, Human
auggcuagcaccgcguugcugg

SEQ ID NO: 550131 - RNA, 23 nt, Human
augcucugggcugugggaccugc

SEQ ID NO: 550132 - RNA, 22 nt, Human
uugcauccgaaacaauuucucu

SEQ ID NO: 550133 - RNA, 22 nt, Human
aggaagggcuguuucuccaaga

SEQ ID NO: 550134 - RNA, 22 nt, Human
aggguggagggagucccugagc

SEQ ID NO: 550135 - RNA, 22 nt, Human
auggcagggcagccucucagag

SEQ ID NO: 550136 - RNA, 22 nt, Human
acaaaggcagccaaucaucugc

SEQ ID NO: 550137 - RNA, 22 nt, Human
uucaagauccagcacaacagug

SEQ ID NO: 550138 - RNA, 21 nt, Human
auuauuauaaagaccacaggg

SEQ ID NO: 550139 - RNA, 22 nt, Human
aagccaggaagagagccuucac

SEQ ID NO: 550140 - RNA, 22 nt, Human
cagccugcagggcugccuguug

SEQ ID NO: 550141 - RNA, 22 nt, Human
cugagcaguagagggucucuuu

SEQ ID NO: 550142 - RNA, 22 nt, Human
ugcucagcuggugccagggucc

SEQ ID NO: 550143 - RNA, 22 nt, Human
aucuggcuuaccuagggugccu

SEQ ID NO: 550144 - RNA, 20 nt, Human
cacugaagacuucuugcuca

SEQ ID NO: 550145 - RNA, 22 nt, Human
cucacagguaccagcacccucc

SEQ ID NO: 550146 - RNA, 22 nt, Human
gugauuucagguuuuucauacu

SEQ ID NO: 550147 - RNA, 22 nt, Human
aaauauuugucugaggcgguug

SEQ ID NO: 550148 - RNA, 22 nt, Human
ugaggaaacugaggcacagaug

SEQ ID NO: 550149 - RNA, 22 nt, Human
uggcucaguuaggucagaaaca

SEQ ID NO: 550150 - RNA, 22 nt, Human
ccuacagacaaaccagugacua

SEQ ID NO: 550151 - RNA, 20 nt, Human
gcuguucacauuauuaguag

SEQ ID NO: 550152 - RNA, 22 nt, Human
gagauauaaccuaaaggucacu

SEQ ID NO: 550153 - RNA, 22 nt, Human
caaagauuuuagaauuugcaau

SEQ ID NO: 550154 - RNA, 22 nt, Human
cagcaagauuaagggcagaaaa

SEQ ID NO: 550155 - RNA, 20 nt, Human
aaaauauguauaacucuucu

SEQ ID NO: 550156 - RNA, 23 nt, Human
agcauggaauaggaaagaggcag

SEQ ID NO: 550157 - RNA, 22 nt, Human
ccaggaaggccuggaugccccc

SEQ ID NO: 550158 - RNA, 22 nt, Human
cagugucuuauuuguagcucag

SEQ ID NO: 550159 - RNA, 22 nt, Human
auuaguagcacacagagaucag

SEQ ID NO: 550160 - RNA, 22 nt, Human
uugcauacugaccucuaagcuu

SEQ ID NO: 550161 - RNA, 22 nt, Human
gaaagcaguauuuaguucuguu

SEQ ID NO: 550162 - RNA, 22 nt, Human
aagggcugcaauccaaaacacu

SEQ ID NO: 550163 - RNA, 22 nt, Human
ucaauuaugccauugcaauauu

SEQ ID NO: 550164 - RNA, 21 nt, Human
ugccagggauuuacagagccu

SEQ ID NO: 550165 - RNA, 22 nt, Human
ccagagugacgugaagugugaa

SEQ ID NO: 550166 - RNA, 22 nt, Human
ugcuucugauucaugguuauug

SEQ ID NO: 550167 - RNA, 22 nt, Human
aaugcacaaaaauuguauguaa

SEQ ID NO: 550168 - RNA, 22 nt, Human
augauuucuauauaaacuuaaa

SEQ ID NO: 550169 - RNA, 22 nt, Human
ucagcccugggacccagggaug

SEQ ID NO: 550170 - RNA, 22 nt, Human
cucaggagacaguguccacaug

SEQ ID NO: 550171 - RNA, 22 nt, Human
ggccucaguuucuucaacugua

SEQ ID NO: 550172 - RNA, 22 nt, Human
cuggccacuggagguggcaccc

SEQ ID NO: 550173 - RNA, 22 nt, Human
cacacacuguuaauguaggagu

SEQ ID NO: 550174 - RNA, 22 nt, Human
uggaauuuaguuaauuccauuu

SEQ ID NO: 550175 - RNA, 22 nt, Human
ugagagagccugaaucucuuac

SEQ ID NO: 550176 - RNA, 22 nt, Human
cagcuguugugauuuccaggag

SEQ ID NO: 550177 - RNA, 22 nt, Human
aggcagcaaugaaugaaaugga

SEQ ID NO: 550178 - RNA, 20 nt, Human
cagggccacgcuccaaggca

SEQ ID NO: 550179 - RNA, 22 nt, Human
uguggcgagaacauuggaccau

SEQ ID NO: 550180 - RNA, 22 nt, Human
aaagugcacucucagugcugcu

SEQ ID NO: 550181 - RNA, 22 nt, Human
uggaguucucaggugagggcuu

SEQ ID NO: 550182 - RNA, 18 nt, Human
cccagcccaccauuucuc

SEQ ID NO: 550183 - RNA, 23 nt, Human
aggaggaaaaguuaucugcugag

SEQ ID NO: 550184 - RNA, 22 nt, Human
aaacagcuggucucaaauguuc

SEQ ID NO: 550185 - RNA, 22 nt, Human
gcuaagugguuuucuucuccuc

SEQ ID NO: 550186 - RNA, 22 nt, Human
cagagcaguccuugucaaucag

SEQ ID NO: 550187 - RNA, 22 nt, Human
ugaacacugccauauuuaagaa

SEQ ID NO: 550188 - RNA, 19 nt, Human
accaggccucagaggcccu

SEQ ID NO: 550189 - RNA, 22 nt, Human
ucccagaggaaauggcagcuga

SEQ ID NO: 550190 - RNA, 22 nt, Human
acuuuugaagaauuaugcaaaa

SEQ ID NO: 550191 - RNA, 22 nt, Human
cagcaggaagguuuccccugca

SEQ ID NO: 550192 - RNA, 22 nt, Human
gcugugcacuaccuauacaucc

SEQ ID NO: 550193 - RNA, 22 nt, Human
cugccuugguucccagccagca

SEQ ID NO: 550194 - RNA, 22 nt, Human
acacaguaugcaucuagaaauu

SEQ ID NO: 550195 - RNA, 22 nt, Human
acagagcuuaauucaggagcuu

SEQ ID NO: 550196 - RNA, 22 nt, Human
uggcucagauuuuuguaggcuu

SEQ ID NO: 550197 - RNA, 22 nt, Human
ucagagugguagccuauuuucu

SEQ ID NO: 550198 - RNA, 19 nt, Human
aggcagcauucuggggcuu

SEQ ID NO: 550199 - RNA, 22 nt, Human
gauguguauuuggaagacaaaa

SEQ ID NO: 550200 - RNA, 22 nt, Human
acauucuauucugcaggacaag

SEQ ID NO: 550201 - RNA, 22 nt, Human
ugcccaggauugugaggucagg

SEQ ID NO: 550202 - RNA, 22 nt, Human
acaguggaauuuguagaugugu

SEQ ID NO: 550203 - RNA, 22 nt, Human
agcagacagguaggaggauaaa

SEQ ID NO: 550204 - RNA, 23 nt, Human
ugguccugccaacggugccccuc

SEQ ID NO: 550205 - RNA, 20 nt, Human
aaagauacuuuuuguaaugg

SEQ ID NO: 550206 - RNA, 22 nt, Human
ccacagaccuuggcuuccaccu

SEQ ID NO: 550207 - RNA, 22 nt, Human
aauaaagaauggaugagaucgu

SEQ ID NO: 550208 - RNA, 22 nt, Human
uucuuaggagcauuaguaauuu

SEQ ID NO: 550209 - RNA, 19 nt, Human
gcugggcuuggguuuguag

SEQ ID NO: 550210 - RNA, 22 nt, Human
cugcaggaauucaaagugagcu

SEQ ID NO: 550211 - RNA, 22 nt, Human
ggcuggcagaagugugcuggcu

SEQ ID NO: 550212 - RNA, 22 nt, Human
acugggaagacuggaauugcuc

SEQ ID NO: 550213 - RNA, 22 nt, Human
gaaauuaaccaccuuuggcuuu

SEQ ID NO: 550214 - RNA, 22 nt, Human
ggugaggggagagugaaagaaa

SEQ ID NO: 550215 - RNA, 22 nt, Human
agggcugguauguccaugaaag

SEQ ID NO: 550216 - RNA, 23 nt, Human
uuuaaaaguuguaauguaggcuu

SEQ ID NO: 550217 - RNA, 22 nt, Human
cuuauuagaaagaaaagacaug

SEQ ID NO: 550218 - RNA, 22 nt, Human
aagcagcagcaggauuaaagag

SEQ ID NO: 550219 - RNA, 22 nt, Human
gguuuauuaaugugaacuguau

SEQ ID NO: 550220 - RNA, 22 nt, Human
uuuuuuaguuaggucagaaugu

SEQ ID NO: 550221 - RNA, 22 nt, Human
uggagccuguguuucugcccag

SEQ ID NO: 550222 - RNA, 22 nt, Human
ugacacagaaauuaagcuguca

SEQ ID NO: 550223 - RNA, 22 nt, Human
uucaugaauggaaucaaugcuc

SEQ ID NO: 550224 - RNA, 22 nt, Human
aaaggcuccuucucccaugacc

SEQ ID NO: 550225 - RNA, 22 nt, Human
uagcugcccaucuuuccuuuag

SEQ ID NO: 550226 - RNA, 22 nt, Human
agcccagcuuugaaccauauca

SEQ ID NO: 550227 - RNA, 22 nt, Human
gcccugccggguauuuugugcu

SEQ ID NO: 550228 - RNA, 22 nt, Human
ccaggccagccuggagcauggc

SEQ ID NO: 550229 - RNA, 22 nt, Human
acuugaaaagcucagcaguagu

SEQ ID NO: 550230 - RNA, 22 nt, Human
uggagcauauucuggagcuugg

SEQ ID NO: 550231 - RNA, 22 nt, Human
ucugcccugcagggagcaguaa

SEQ ID NO: 550232 - RNA, 22 nt, Human
gcugccugcccugggucaucug

SEQ ID NO: 550233 - RNA, 22 nt, Human
ugcccugcuaaauauagguagc

SEQ ID NO: 550234 - RNA, 22 nt, Human
gcauucuugguggagugcuaaa

SEQ ID NO: 550235 - RNA, 22 nt, Human
cuagaguccuccuggaaaaggu

SEQ ID NO: 550236 - RNA, 22 nt, Human
ugcugcuguaucaugccuucau

SEQ ID NO: 550237 - RNA, 22 nt, Human
uuuucucuacaaaauaaccagc

SEQ ID NO: 550238 - RNA, 22 nt, Human
uugaagaggacuuugcagcugu

SEQ ID NO: 550239 - RNA, 22 nt, Human
uucacagugguaaggguuguga

SEQ ID NO: 550240 - RNA, 22 nt, Human
acaauuucuaauauagaucuua

SEQ ID NO: 550241 - RNA, 22 nt, Human
cuacagaagaaacuaucacuau

SEQ ID NO: 550242 - RNA, 22 nt, Human
caggcagcgcucguggccuggc

SEQ ID NO: 550243 - RNA, 22 nt, Human
cccuggggcugagggauggccg

SEQ ID NO: 550244 - RNA, 22 nt, Human
ccuggcugccgagugugcagcg

SEQ ID NO: 550245 - RNA, 19 nt, Human
ccaaaagcaauuccaagua

SEQ ID NO: 550246 - RNA, 22 nt, Human
agacauuuggaagauacacaua

SEQ ID NO: 550247 - RNA, 22 nt, Human
ugaguggagaacagaggcucuc

SEQ ID NO: 550248 - RNA, 22 nt, Human
ucugggcuuggauuggcucugc

SEQ ID NO: 550249 - RNA, 22 nt, Human
uugaaaauaucacaggagcagc

SEQ ID NO: 550250 - RNA, 22 nt, Human
gcacggcuaauuuuuguauuuu

SEQ ID NO: 550251 - RNA, 20 nt, Human
uucuauggaccaguauauuu

SEQ ID NO: 550252 - RNA, 22 nt, Human
gggagggaaggaggcgccgugu

SEQ ID NO: 550253 - RNA, 22 nt, Human
cuccagugcgcaggacagcccc

SEQ ID NO: 550254 - RNA, 22 nt, Human
ucaggguugcugugaucagucc

SEQ ID NO: 550255 - RNA, 23 nt, Human
ccuggcugaccugaagguguagu

SEQ ID NO: 550256 - RNA, 22 nt, Human
uggcucaggccacuucuuuuau

SEQ ID NO: 550257 - RNA, 22 nt, Human
aagggcuggccacauucugggu

SEQ ID NO: 550258 - RNA, 22 nt, Human
uggcagcacuugaacuugagcc

SEQ ID NO: 550259 - RNA, 22 nt, Human
gugugccaacaaaagacagugc

SEQ ID NO: 550260 - RNA, 22 nt, Human
acaucuuugcucuuauagagcu

SEQ ID NO: 550261 - RNA, 22 nt, Human
caagcccaggauuccccaguua

SEQ ID NO: 550262 - RNA, 22 nt, Human
aaggcagauauaaagacuagag

SEQ ID NO: 550263 - RNA, 22 nt, Human
cauuuacagugagaguuuuuac

SEQ ID NO: 550264 - RNA, 22 nt, Human
aaacaucuuucuauugcaaguu

SEQ ID NO: 550265 - RNA, 22 nt, Human
acauacuuaacauuaaagucau

SEQ ID NO: 550266 - RNA, 19 nt, Human
gcugugccucucuccugcu

SEQ ID NO: 550267 - RNA, 22 nt, Human
guggccagaagacugcaaugcu

SEQ ID NO: 550268 - RNA, 22 nt, Human
agauuuagacugccuuaaucau

SEQ ID NO: 550269 - RNA, 22 nt, Human
acagagagaggcccgaggcugc

SEQ ID NO: 550270 - RNA, 22 nt, Human
ccuggcagucaggggaguccuu

SEQ ID NO: 550271 - RNA, 22 nt, Human
cugggugaguugaugaaggaga

SEQ ID NO: 550272 - RNA, 22 nt, Human
uuuuuuauaucaacugaagucu

SEQ ID NO: 550273 - RNA, 22 nt, Human
aguuauuucaguaacauaauag

SEQ ID NO: 550274 - RNA, 22 nt, Human
uuagcaagauaacaguaauuuu

SEQ ID NO: 550275 - RNA, 22 nt, Human
agcagcugagaugguaagauuc

SEQ ID NO: 550276 - RNA, 19 nt, Human
ggcucagggcgcugccgcc

SEQ ID NO: 550277 - RNA, 22 nt, Human
acaaaauuuuuagacaaggcuu

SEQ ID NO: 550278 - RNA, 22 nt, Human
ccagacagcaguuaaaggacau

SEQ ID NO: 550279 - RNA, 22 nt, Human
aaggcagugguugugauacugu

SEQ ID NO: 550280 - RNA, 22 nt, Human
ggcucugccugcccagcagcac

SEQ ID NO: 550281 - RNA, 22 nt, Human
aggaccugccaggugcaaagca

SEQ ID NO: 550282 - RNA, 22 nt, Human
uguguugugacauucuuggaug

SEQ ID NO: 550283 - RNA, 22 nt, Human
cggcugagacggccauagacac

SEQ ID NO: 550284 - RNA, 22 nt, Human
cccugggacccgcugcagaggc

SEQ ID NO: 550285 - RNA, 22 nt, Human
gauuaauagacacaaccaagcu

SEQ ID NO: 550286 - RNA, 22 nt, Human
gaggcaguguuuacugcccugu

SEQ ID NO: 550287 - RNA, 22 nt, Human
uggagaaggggcagggucucca

SEQ ID NO: 550288 - RNA, 22 nt, Human
acagcaagccagcuugucacug

SEQ ID NO: 550289 - RNA, 22 nt, Human
uagcuagaaaguuucagcugug

SEQ ID NO: 550290 - RNA, 22 nt, Human
cagucuuugaugcauccuagcc

SEQ ID NO: 550291 - RNA, 22 nt, Human
acucugccuuucagcagaugaa

SEQ ID NO: 550292 - RNA, 22 nt, Human
gccucugcucucagguagccuc

SEQ ID NO: 550293 - RNA, 22 nt, Human
cccugccuucuuggccuuuaaa

SEQ ID NO: 550294 - RNA, 22 nt, Human
acuucacagauauuuauuuggu

SEQ ID NO: 550295 - RNA, 22 nt, Human
auucuuaauuccaaagacugag

SEQ ID NO: 550296 - RNA, 22 nt, Human
aagaagugguccuuuucuuucu

SEQ ID NO: 550297 - RNA, 22 nt, Human
cagaggaaggcucugggaaugu

SEQ ID NO: 550298 - RNA, 22 nt, Human
uuuggcauuuaauaggugauca

SEQ ID NO: 550299 - RNA, 22 nt, Human
uagggcagagcuuguacacgau

SEQ ID NO: 550300 - RNA, 22 nt, Human
aguggcuggaauugcaggugcg

SEQ ID NO: 550301 - RNA, 22 nt, Human
uguaaucauuacaguacaugga

SEQ ID NO: 550302 - RNA, 22 nt, Human
ucucaugguuugugauucaaau

SEQ ID NO: 550303 - RNA, 22 nt, Human
agaugguugguccauaggccua

SEQ ID NO: 550304 - RNA, 22 nt, Human
augaagcguucgagauagguag

SEQ ID NO: 550305 - RNA, 22 nt, Human
cucuugaagcaggggccaguuc

SEQ ID NO: 550306 - RNA, 22 nt, Human
cauuacaaaguuauaaacaguu

SEQ ID NO: 550307 - RNA, 22 nt, Human
uagaauauacacuacagcuuaa

SEQ ID NO: 550308 - RNA, 22 nt, Human
aggccucagugaucaucaucag

SEQ ID NO: 550309 - RNA, 22 nt, Human
uucuucuucaagugcugcauuc

SEQ ID NO: 550310 - RNA, 22 nt, Human
caucagcaggcaacacucuugg

SEQ ID NO: 550311 - RNA, 22 nt, Human
uguaugcaaauuuauuagcaca

SEQ ID NO: 550312 - RNA, 22 nt, Human
agagaggcgaguuaccugugcu

SEQ ID NO: 550313 - RNA, 22 nt, Human
guagaagugaugucauguuaua

SEQ ID NO: 550314 - RNA, 19 nt, Human
auagaaaggguuaaagaca

SEQ ID NO: 550315 - RNA, 22 nt, Human
cugcccuguggcucugagucau

SEQ ID NO: 550316 - RNA, 22 nt, Human
auucucauuugcuggcuauaug

SEQ ID NO: 550317 - RNA, 20 nt, Human
ggccuuggccucuuugcagc

SEQ ID NO: 550318 - RNA, 22 nt, Human
cagaguguaucuguguaagcau

SEQ ID NO: 550319 - RNA, 22 nt, Human
guggcagcugugggacacuggu

SEQ ID NO: 550320 - RNA, 22 nt, Human
uaugcacaguuacaagaauauc

SEQ ID NO: 550321 - RNA, 22 nt, Human
aggagaggguggcauuaaguuu

SEQ ID NO: 550322 - RNA, 22 nt, Human
acucaucagccucuaggaaaga

SEQ ID NO: 550323 - RNA, 20 nt, Human
cucaggauugucuagccccu

SEQ ID NO: 550324 - RNA, 22 nt, Human
gucccuuggcucacaaacagcu

SEQ ID NO: 550325 - RNA, 22 nt, Human
aggagcugacuuguaaagcauu

SEQ ID NO: 550326 - RNA, 20 nt, Human
cuuugccuauucucugccug

SEQ ID NO: 550327 - RNA, 22 nt, Human
uuucacagcauauagguguacu

SEQ ID NO: 550328 - RNA, 22 nt, Human
aauagaauguaaucuaauacau

SEQ ID NO: 550329 - RNA, 22 nt, Human
aagcccagcaucccugcaccag

SEQ ID NO: 550330 - RNA, 20 nt, Human
caggccagagguuugauggc

SEQ ID NO: 550331 - RNA, 20 nt, Human
gaggccucagccucagcucc

SEQ ID NO: 550332 - RNA, 22 nt, Human
uuucacagguaagcaauacagg

SEQ ID NO: 550333 - RNA, 22 nt, Human
ugaugaaacugagguuccaaga

SEQ ID NO: 550334 - RNA, 22 nt, Human
ccagcuuuuggggugacaauuu

SEQ ID NO: 550335 - RNA, 22 nt, Human
gcagggugaaggucacauagaa

SEQ ID NO: 550336 - RNA, 22 nt, Human
ucucccaguccucugugcuuac

SEQ ID NO: 550337 - RNA, 22 nt, Human
cugguucauauaggcaaguuua

SEQ ID NO: 550338 - RNA, 22 nt, Human
uugugaauggugccgcaauaaa

SEQ ID NO: 550339 - RNA, 22 nt, Human
caguggccugagccaggcuucc

SEQ ID NO: 550340 - RNA, 22 nt, Human
gaagccacaacuuuuucuuagc

SEQ ID NO: 550341 - RNA, 22 nt, Human
ugaggugguccaaagacuguuu

SEQ ID NO: 550342 - RNA, 22 nt, Human
cccucuacagggaagcgcuuuc

SEQ ID NO: 550343 - RNA, 22 nt, Human
uaugugaauacagcaguggaug

SEQ ID NO: 550344 - RNA, 22 nt, Human
uguauuagagcaguagaauuau

SEQ ID NO: 550345 - RNA, 22 nt, Human
gaacaguuucccuguagaaaau

SEQ ID NO: 550346 - RNA, 22 nt, Human
aaagagaaaaugaucuguacau

SEQ ID NO: 550347 - RNA, 22 nt, Human
uucacagacuuuccauagauug

SEQ ID NO: 550348 - RNA, 22 nt, Human
aagaugguggccagaguggaaa

SEQ ID NO: 550349 - RNA, 22 nt, Human
ggaagggaaaauucauucggcu

SEQ ID NO: 550350 - RNA, 22 nt, Human
caggggcagucugugugcgugg

SEQ ID NO: 550351 - RNA, 22 nt, Human
cacauguaguaagcaggcaaug

SEQ ID NO: 550352 - RNA, 22 nt, Human
gagggcugcuggaaaaaugcag

SEQ ID NO: 550353 - RNA, 22 nt, Human
uuaaugcagaaaucaaacugac

SEQ ID NO: 550354 - RNA, 22 nt, Human
aggcugcaggucugggucaugu

SEQ ID NO: 550355 - RNA, 22 nt, Human
ggcacagcucaggucccagcuc

SEQ ID NO: 550356 - RNA, 22 nt, Human
uucuccgcuaaguucucugcag

SEQ ID NO: 550357 - RNA, 22 nt, Human
ugucucagaauggcucauaaua

SEQ ID NO: 550358 - RNA, 22 nt, Human
uccagccaugacucggacagug

SEQ ID NO: 550359 - RNA, 22 nt, Human
cugcuguguaucauuuuagaug

SEQ ID NO: 550360 - RNA, 22 nt, Human
gggccuggcaugcagccccguu

SEQ ID NO: 550361 - RNA, 21 nt, Human
ugauuucugccaaguucacua

SEQ ID NO: 550362 - RNA, 22 nt, Human
uccagggauguccuguagcacu

SEQ ID NO: 550363 - RNA, 22 nt, Human
aacagcaugcuggguaacauug

SEQ ID NO: 550364 - RNA, 22 nt, Human
uuuuuugucuugaagaaauggu

SEQ ID NO: 550365 - RNA, 22 nt, Human
ugcaggugugugcaagggaggg

SEQ ID NO: 550366 - RNA, 22 nt, Human
gcccaggauucuuucuuccuua

SEQ ID NO: 550367 - RNA, 18 nt, Human
cagcugccagcucaugga

SEQ ID NO: 550368 - RNA, 22 nt, Human
cagcuuuagagaaaacauauuu

SEQ ID NO: 550369 - RNA, 22 nt, Human
gcagcugcagagaccggguggg

SEQ ID NO: 550370 - RNA, 22 nt, Human
gcaggaugagugaguacauuua

SEQ ID NO: 550371 - RNA, 22 nt, Human
ggaaggaggggcaaagcaguuc

SEQ ID NO: 550372 - RNA, 22 nt, Human
ccauggaguuccucuggucuau

SEQ ID NO: 550373 - RNA, 22 nt, Human
auucuuggcaaggagauuuaaa

SEQ ID NO: 550374 - RNA, 22 nt, Human
gcagggcugcagagggcacugu

SEQ ID NO: 550375 - RNA, 22 nt, Human
aucuggcuauuucuggucgggg

SEQ ID NO: 550376 - RNA, 22 nt, Human
ggcuagaauaauugacuucauu

SEQ ID NO: 550377 - RNA, 22 nt, Human
acccaggaggcagagguugcag

SEQ ID NO: 550378 - RNA, 22 nt, Human
uccaggcauuggagagauaaug

SEQ ID NO: 550379 - RNA, 22 nt, Human
ggagggcugccagguggagcgg

SEQ ID NO: 550380 - RNA, 22 nt, Human
gcauuucauguaagucagacca

SEQ ID NO: 550381 - RNA, 22 nt, Human
agcagcucuuaacaaagcaugg

SEQ ID NO: 550382 - RNA, 22 nt, Human
cugucuguuuuaccuucuccag

SEQ ID NO: 550383 - RNA, 22 nt, Human
ugagcuucuuuauuuggccaga

SEQ ID NO: 550384 - RNA, 22 nt, Human
aauaucagaauguaaugguccu

SEQ ID NO: 550385 - RNA, 22 nt, Human
aauaagaauugccagauuugaa

SEQ ID NO: 550386 - RNA, 21 nt, Human
ugguaucaaacuauacaauau

SEQ ID NO: 550387 - RNA, 22 nt, Human
ucagaaaagagaaaaucuuaua

SEQ ID NO: 550388 - RNA, 22 nt, Human
aagauucuuugaggauuuuacu

SEQ ID NO: 550389 - RNA, 22 nt, Human
uccauuauacuucugauucaaa

SEQ ID NO: 550390 - RNA, 22 nt, Human
agguacaguagacagacaguua

SEQ ID NO: 550391 - RNA, 22 nt, Human
uacaucuuugucuaugaccagc

SEQ ID NO: 550392 - RNA, 22 nt, Human
acaguaaaucaacagaauaucu

SEQ ID NO: 550393 - RNA, 22 nt, Human
acauagcauaaagaaugacucu

SEQ ID NO: 550394 - RNA, 17 nt, Human
ugcuucuguauugcugg

SEQ ID NO: 550395 - RNA, 22 nt, Human
ucauauuuugcaaggucagcua

SEQ ID NO: 550396 - RNA, 22 nt, Human
cugggcuguaauguggcacuga

SEQ ID NO: 550397 - RNA, 22 nt, Human
uccaaagaauagaggugacauu

SEQ ID NO: 550398 - RNA, 22 nt, Human
acagggcaaccucugggagacu

SEQ ID NO: 550399 - RNA, 22 nt, Human
uuauuuauaucucugcaguuua

SEQ ID NO: 550400 - RNA, 22 nt, Human
cagagcuguccaaacccugaca

SEQ ID NO: 550401 - RNA, 22 nt, Human
uuuguaaggcuaaauaauauuc

SEQ ID NO: 550402 - RNA, 22 nt, Human
gagggggcgaacagaagcaagg

SEQ ID NO: 550403 - RNA, 22 nt, Human
uugccuuugacggugcagcagu

SEQ ID NO: 550404 - RNA, 22 nt, Human
acuuugcaaugggcagaaccca

SEQ ID NO: 550405 - RNA, 19 nt, Human
accaaacaguggacggagc

SEQ ID NO: 550406 - RNA, 22 nt, Human
cuggccccaucuggagucugag

SEQ ID NO: 550407 - RNA, 22 nt, Human
cugaggcaugaaugugggcuuu

SEQ ID NO: 550408 - RNA, 22 nt, Human
uauagaagagacaugugcauag

SEQ ID NO: 550409 - RNA, 22 nt, Human
gcaaguacaaacgcaucggcug

SEQ ID NO: 550410 - RNA, 22 nt, Human
cgugacacauucuggacauggu

SEQ ID NO: 550411 - RNA, 22 nt, Human
ccuggcagcuaagugcuuugag

SEQ ID NO: 550412 - RNA, 22 nt, Human
aaugggaagccagaagacaagg

SEQ ID NO: 550413 - RNA, 22 nt, Human
uagcagagugauuggccaugag

SEQ ID NO: 550414 - RNA, 22 nt, Human
ggagaaaggauaggaaugugcu

SEQ ID NO: 550415 - RNA, 22 nt, Human
gcugugcuauaucucugagugu

SEQ ID NO: 550416 - RNA, 22 nt, Human
cagaagaauggugucugagcuc

SEQ ID NO: 550417 - RNA, 17 nt, Human
aggaggaucagagagua

SEQ ID NO: 550418 - RNA, 22 nt, Human
uggcccugaaucaaggccagca

SEQ ID NO: 550419 - RNA, 22 nt, Human
gagcuuccugaugccgaccagu

SEQ ID NO: 550420 - RNA, 22 nt, Human
uguggcccagaugagugugcua

SEQ ID NO: 550421 - RNA, 23 nt, Human
auugaugacuugauuacacuuuu

SEQ ID NO: 550422 - RNA, 22 nt, Human
uauaauccugcuucacauugaa

SEQ ID NO: 550423 - RNA, 22 nt, Human
cacugugucaguuugguuagac

SEQ ID NO: 550424 - RNA, 22 nt, Human
aagaaagcauuagacaggcauu

SEQ ID NO: 550425 - RNA, 23 nt, Human
acagucguagguauccuuuuccu

SEQ ID NO: 550426 - RNA, 22 nt, Human
ggcaggugagagcucuuugaaa

SEQ ID NO: 550427 - RNA, 22 nt, Human
gcucucugucguuaugcuucau

SEQ ID NO: 550428 - RNA, 22 nt, Human
uguggccuccuguuccugggua

SEQ ID NO: 550429 - RNA, 22 nt, Human
uuccaaagaaguucacauuuac

SEQ ID NO: 550430 - RNA, 16 nt, Human
gggagugaaggagggu

SEQ ID NO: 550431 - RNA, 19 nt, Human
ggcagucucaagcagcaca

SEQ ID NO: 550432 - RNA, 22 nt, Human
ggccuguguccuccuugcccug

SEQ ID NO: 550433 - RNA, 22 nt, Human
cucaggauauugggcuggagca

SEQ ID NO: 550434 - RNA, 22 nt, Human
cuguggagaugcagaccaggcc

SEQ ID NO: 550435 - RNA, 22 nt, Human
ucugaaauuccuuccagacuuu

SEQ ID NO: 550436 - RNA, 22 nt, Human
agcagggguaacagaaggaaag

SEQ ID NO: 550437 - RNA, 22 nt, Human
acugaaggaagcgggcaggggu

SEQ ID NO: 550438 - RNA, 22 nt, Human
gggcagggguagcauuccaagu

SEQ ID NO: 550439 - RNA, 22 nt, Human
augcuuuauacaaaacacuuaa

SEQ ID NO: 550440 - RNA, 22 nt, Human
uuucauugugaugcuuuuauca

SEQ ID NO: 550441 - RNA, 22 nt, Human
ucccugccaguccuggucugaa

SEQ ID NO: 550442 - RNA, 22 nt, Human
uagggcaguuucauguuaucuu

SEQ ID NO: 550443 - RNA, 22 nt, Human
uuagaaagcuuuccauagucaa

SEQ ID NO: 550444 - RNA, 22 nt, Human
cuggcuggucaucagcaguacg

SEQ ID NO: 550445 - RNA, 22 nt, Human
ggcuucccuuuccgagaggaga

SEQ ID NO: 550446 - RNA, 22 nt, Human
uaagaauuaucucauggauaau

SEQ ID NO: 550447 - RNA, 22 nt, Human
ucaauuaagaggcuaaguuacu

SEQ ID NO: 550448 - RNA, 19 nt, Human
auaaggcaauuggauuugg

SEQ ID NO: 550449 - RNA, 22 nt, Human
ugaggcaggaauggggaaaagu

SEQ ID NO: 550450 - RNA, 22 nt, Human
acagaauugauggaaaucucag

SEQ ID NO: 550451 - RNA, 22 nt, Human
uggagcuggcuuguggaaguug

SEQ ID NO: 550452 - RNA, 22 nt, Human
uacuauuuggaauuuuaaauug

SEQ ID NO: 550453 - RNA, 22 nt, Human
acacaucucaggggacacucuc

SEQ ID NO: 550454 - RNA, 22 nt, Human
gguaaaaugcagauucuuagcc

SEQ ID NO: 550455 - RNA, 22 nt, Human
aaagacuuucaccuagcaaaga

SEQ ID NO: 550456 - RNA, 22 nt, Human
caggccuggguucaaaucccuu

SEQ ID NO: 550457 - RNA, 22 nt, Human
cuuagaaaucgaacucagguua

SEQ ID NO: 550458 - RNA, 22 nt, Human
gaagcacugcauuucaagauca

SEQ ID NO: 550459 - RNA, 22 nt, Human
agggcucugagcuggaccaccu

SEQ ID NO: 550460 - RNA, 22 nt, Human
caaaauaccacgacuuguuuua

SEQ ID NO: 550461 - RNA, 23 nt, Human
uggggcugauggagacggaccag

SEQ ID NO: 550462 - RNA, 22 nt, Human
ucccaggguuacagccagggca

SEQ ID NO: 550463 - RNA, 22 nt, Human
gaaggccucacucugcagcaua

SEQ ID NO: 550464 - RNA, 22 nt, Human
aggccuccugcagggaugagug

SEQ ID NO: 550465 - RNA, 22 nt, Human
uuucaaaguggagaauuagaca

SEQ ID NO: 550466 - RNA, 20 nt, Human
acacaaagcaauggaguaca

SEQ ID NO: 550467 - RNA, 22 nt, Human
cagugcauaaucuaaauggggg

SEQ ID NO: 550468 - RNA, 22 nt, Human
acaaaugcuuaguucaccaaaa

SEQ ID NO: 550469 - RNA, 22 nt, Human
ccaaagugcugagauuacaggu

SEQ ID NO: 550470 - RNA, 23 nt, Human
agcugaggcugugggugucagag

SEQ ID NO: 550471 - RNA, 22 nt, Human
aacccuggggcagcugcuaggg

SEQ ID NO: 550472 - RNA, 20 nt, Human
guguuucaugugauacaaug

SEQ ID NO: 550473 - RNA, 22 nt, Human
ggcagcuccucaaaaaauuaaa

SEQ ID NO: 550474 - RNA, 22 nt, Human
gggcugagcuguucugaguuua

SEQ ID NO: 550475 - RNA, 19 nt, Human
aggcugcaagguggugggc

SEQ ID NO: 550476 - RNA, 22 nt, Human
augcacuacuagaugcaaaagu

SEQ ID NO: 550477 - RNA, 22 nt, Human
augcaagaucacaccaaacacg

SEQ ID NO: 550478 - RNA, 21 nt, Human
agcagccauggaugguaugua

SEQ ID NO: 550479 - RNA, 22 nt, Human
aaggcacuuaacgugggaggau

SEQ ID NO: 550480 - RNA, 22 nt, Human
gcugccugguuucucagcugca

SEQ ID NO: 550481 - RNA, 22 nt, Human
uaauguuuuucucaacauugcu

SEQ ID NO: 550482 - RNA, 22 nt, Human
gauuucuugauaauucaaaucc

SEQ ID NO: 550483 - RNA, 22 nt, Human
uauuuaguuaucuuucauaaaa

SEQ ID NO: 550484 - RNA, 22 nt, Human
ccugugucuuccccacuggugu

SEQ ID NO: 550485 - RNA, 22 nt, Human
uuugugugggggaaacaaggua

SEQ ID NO: 550486 - RNA, 22 nt, Human
cagagcuggguuugggaaaccu

SEQ ID NO: 550487 - RNA, 22 nt, Human
gagaaacuuggaguuauucugg

SEQ ID NO: 550488 - RNA, 18 nt, Human
cugaaggauccaggugua

SEQ ID NO: 550489 - RNA, 22 nt, Human
agcccagaggcugggcgugcau

SEQ ID NO: 550490 - RNA, 22 nt, Human
uagcaguggaaucuuuugucca

SEQ ID NO: 550491 - RNA, 22 nt, Human
aaacugaaguagauucugaaau

SEQ ID NO: 550492 - RNA, 22 nt, Human
aaggagaaaugguagaugugca

SEQ ID NO: 550493 - RNA, 22 nt, Human
gcagcuuucugggacagaaagg

SEQ ID NO: 550494 - RNA, 22 nt, Human
ucagagagaaauaguuuuugac

SEQ ID NO: 550495 - RNA, 22 nt, Human
aggccuggugaaugaaguaucu

SEQ ID NO: 550496 - RNA, 22 nt, Human
cucuggagcauuucaccuacau

SEQ ID NO: 550497 - RNA, 22 nt, Human
auuccagugugcaugguacaca

SEQ ID NO: 550498 - RNA, 22 nt, Human
ccuggcuggauggagccccugg

SEQ ID NO: 550499 - RNA, 22 nt, Human
cuggaguuuuggaaaaaugcuu

SEQ ID NO: 550500 - RNA, 22 nt, Human
uguggccaccagagcugcuauu

SEQ ID NO: 550501 - RNA, 22 nt, Human
gcucuguaccugcggagaugag

SEQ ID NO: 550502 - RNA, 22 nt, Human
acagaacauggauuuuugaagu

SEQ ID NO: 550503 - RNA, 23 nt, Human
agugagcagcuguagggcaagga

SEQ ID NO: 550504 - RNA, 22 nt, Human
uccuccaggucuaggguggcuu

SEQ ID NO: 550505 - RNA, 22 nt, Human
guccugaaugccuucauagucc

SEQ ID NO: 550506 - RNA, 22 nt, Human
augacacaauuuuagagcugaa

SEQ ID NO: 550507 - RNA, 22 nt, Human
cauguucuaacaaugagaaacc

SEQ ID NO: 550508 - RNA, 22 nt, Human
caggcccugcugcugagaccuu

SEQ ID NO: 550509 - RNA, 20 nt, Human
ucaaagaagauucagcucaa

SEQ ID NO: 550510 - RNA, 22 nt, Human
uacauucccccaauuaccaaug

SEQ ID NO: 550511 - RNA, 22 nt, Human
uguccuuuuggcugucuauggu

SEQ ID NO: 550512 - RNA, 22 nt, Human
agcagccaaccuuacauucauc

SEQ ID NO: 550513 - RNA, 22 nt, Human
ucaucacaauuuuaugacccuc

SEQ ID NO: 550514 - RNA, 22 nt, Human
agggagaggagggucuuguuga

SEQ ID NO: 550515 - RNA, 22 nt, Human
cauggccucaaaggacugcaga

SEQ ID NO: 550516 - RNA, 22 nt, Human
gaggcacauauauacagagccc

SEQ ID NO: 550517 - RNA, 20 nt, Human
ccugucugcaauggagguca

SEQ ID NO: 550518 - RNA, 22 nt, Human
ggcaagaguugaagcuccagga

SEQ ID NO: 550519 - RNA, 22 nt, Human
uuuaauguauucuuuggaacca

SEQ ID NO: 550520 - RNA, 22 nt, Human
uauucacauguacauaugcuca

SEQ ID NO: 550521 - RNA, 22 nt, Human
gcaccugggacccagaggcacc

SEQ ID NO: 550522 - RNA, 22 nt, Human
gggaccugggccagaggacagu

SEQ ID NO: 550523 - RNA, 22 nt, Human
cagggccacuguagaugaggag

SEQ ID NO: 550524 - RNA, 22 nt, Human
agacauuuauugaacaccuagc

SEQ ID NO: 550525 - RNA, 22 nt, Human
ucagauggcacacagagccugc

SEQ ID NO: 550526 - RNA, 22 nt, Human
cgcaggugggcccuucauugau

SEQ ID NO: 550527 - RNA, 22 nt, Human
uuggaagacagugaaacagcac

SEQ ID NO: 550528 - RNA, 22 nt, Human
ggccugugucugugccuguccu

SEQ ID NO: 550529 - RNA, 22 nt, Human
cuucauuaaugucuauaaguuu

SEQ ID NO: 550530 - RNA, 22 nt, Human
uuacgaauguuagauugcaucu

SEQ ID NO: 550531 - RNA, 21 nt, Human
ucugucucuccacugcccugc

SEQ ID NO: 550532 - RNA, 22 nt, Human
ccagcagcccacaggcgucccu

SEQ ID NO: 550533 - RNA, 22 nt, Human
agaaaauuagauuuuacugugu

SEQ ID NO: 550534 - RNA, 18 nt, Human
ggagagugagaucaaaca

SEQ ID NO: 550535 - RNA, 22 nt, Human
gaggcacagagcccuaggagcu

SEQ ID NO: 550536 - RNA, 22 nt, Human
accauuaacaugauuuugggga

SEQ ID NO: 550537 - RNA, 22 nt, Human
cugccaucugagccaaaagugc

SEQ ID NO: 550538 - RNA, 17 nt, Human
uggcaagaauggaaaug

SEQ ID NO: 550539 - RNA, 22 nt, Human
gcaggagcugcucuccugacga

SEQ ID NO: 550540 - RNA, 22 nt, Human
agaaaugugaauuucauuuccu

SEQ ID NO: 550541 - RNA, 22 nt, Human
ucuucacaccgggcagcaggaa

SEQ ID NO: 550542 - RNA, 22 nt, Human
ucauuacagagauauaaucuac

SEQ ID NO: 550543 - RNA, 22 nt, Human
ccugccuggagcugagugugga

SEQ ID NO: 550544 - RNA, 18 nt, Human
gcccagaggucugggccc

SEQ ID NO: 550545 - RNA, 22 nt, Human
cagggacauugguggccagguu

SEQ ID NO: 550546 - RNA, 22 nt, Human
aggagucaggaccaaauggaaa

SEQ ID NO: 550547 - RNA, 22 nt, Human
cagaaaugugauguacacacac

SEQ ID NO: 550548 - RNA, 22 nt, Human
ugcuuuauuggaaccucauccu

SEQ ID NO: 550549 - RNA, 22 nt, Human
ccacagagacagagcccagggu

SEQ ID NO: 550550 - RNA, 19 nt, Human
ccaguagagacagcugcag

SEQ ID NO: 550551 - RNA, 22 nt, Human
accccagaggcggaggcugcag

SEQ ID NO: 550552 - RNA, 22 nt, Human
gcagggcucaacaggacacccc

SEQ ID NO: 550553 - RNA, 22 nt, Human
acaguguacuagguacauguuc

SEQ ID NO: 550554 - RNA, 22 nt, Human
cagugauuuucucagaacuuga

SEQ ID NO: 550555 - RNA, 22 nt, Human
gcuaggaguggugggucaagga

SEQ ID NO: 550556 - RNA, 22 nt, Human
gugaagcacaugggcguugggu

SEQ ID NO: 550557 - RNA, 22 nt, Human
uguaugaaagaacaagggcuua

SEQ ID NO: 550558 - RNA, 22 nt, Human
uuaacacuugaacucuacaugu

SEQ ID NO: 550559 - RNA, 22 nt, Human
ucaaaguauuuuaacuguaucc

SEQ ID NO: 550560 - RNA, 22 nt, Human
ucuuugaugggagaucugagag

SEQ ID NO: 550561 - RNA, 22 nt, Human
uaugaagaagacaaaugacacu

SEQ ID NO: 550562 - RNA, 22 nt, Human
caguuacagagccaguuagaga

SEQ ID NO: 550563 - RNA, 22 nt, Human
accauguguuuuacacauggua

SEQ ID NO: 550564 - RNA, 22 nt, Human
gcccugugccagucacgcugug

SEQ ID NO: 550565 - RNA, 23 nt, Human
agcagccauagggaagcaauaca

SEQ ID NO: 550566 - RNA, 23 nt, Human
cuggggcuuucaaaucugggcag

SEQ ID NO: 550567 - RNA, 17 nt, Human
agcagcuggcacaggag

SEQ ID NO: 550568 - RNA, 22 nt, Human
ugugggaaugacgaggaagagg

SEQ ID NO: 550569 - RNA, 22 nt, Human
uuucaaaguugggaauuguaau

SEQ ID NO: 550570 - RNA, 17 nt, Human
aguggcaggcagauggg

SEQ ID NO: 550571 - RNA, 22 nt, Human
cuggcucaccuccgcuccagca

SEQ ID NO: 550572 - RNA, 18 nt, Human
acaaaggucugcaagacc

SEQ ID NO: 550573 - RNA, 22 nt, Human
guggaggacaaaagaagccuuu

SEQ ID NO: 550574 - RNA, 23 nt, Human
agaguggccuacucacacucauu

SEQ ID NO: 550575 - RNA, 22 nt, Human
cauccacuagaaugacagaguu

SEQ ID NO: 550576 - RNA, 22 nt, Human
accugccucuaagcagcaggug

SEQ ID NO: 550577 - RNA, 22 nt, Human
ugggcucagccuucauguggcc

SEQ ID NO: 550578 - RNA, 22 nt, Human
cacagggcuaaaugaaggguug

SEQ ID NO: 550579 - RNA, 22 nt, Human
aaucacaucucauucaacagcc

SEQ ID NO: 550580 - RNA, 22 nt, Human
caaaugaagaaccuucucaccu

SEQ ID NO: 550581 - RNA, 22 nt, Human
aggagcucauugaaguggauga

SEQ ID NO: 550582 - RNA, 22 nt, Human
gcagcugccgugagcucacgcc

SEQ ID NO: 550583 - RNA, 22 nt, Human
gggaagagaccguacccuggcc

SEQ ID NO: 550584 - RNA, 23 nt, Human
ugcuguccaacagacuggccaug

SEQ ID NO: 550585 - RNA, 22 nt, Human
auguucuuccaaaucuguaaca

SEQ ID NO: 550586 - RNA, 22 nt, Human
agguccagcuguugcagccucc

SEQ ID NO: 550587 - RNA, 21 nt, Human
ggcagcccgcccucuccuggc

SEQ ID NO: 550588 - RNA, 22 nt, Human
gucuucauucaacaaauauuca

SEQ ID NO: 550589 - RNA, 22 nt, Human
aauaaaaugaacugguagaguu

SEQ ID NO: 550590 - RNA, 22 nt, Human
cagagcagugggguuggucaga

SEQ ID NO: 550591 - RNA, 20 nt, Human
ucuucagaugcuuuuggagu

SEQ ID NO: 550592 - RNA, 22 nt, Human
ugggcagaguagcucagaagaa

SEQ ID NO: 550593 - RNA, 22 nt, Human
acagauuuguucuuuugggcua

SEQ ID NO: 550594 - RNA, 22 nt, Human
agguggagugaaggaaaggcag

SEQ ID NO: 550595 - RNA, 22 nt, Human
auucuggauuaucaguccacca

SEQ ID NO: 550596 - RNA, 22 nt, Human
uguccagguggccucugcugcu

SEQ ID NO: 550597 - RNA, 22 nt, Human
cacuauuuccuggauuuugacg

SEQ ID NO: 550598 - RNA, 22 nt, Human
acuguguggaaauuugugaggg

SEQ ID NO: 550599 - RNA, 22 nt, Human
gcagcuggggaggucgugggga

SEQ ID NO: 550600 - RNA, 22 nt, Human
acagcagcuggguucccaccau

SEQ ID NO: 550601 - RNA, 22 nt, Human
ccagucuggcaggagggggaac

SEQ ID NO: 550602 - RNA, 22 nt, Human
ugcaagcacucaaugcaaacag

SEQ ID NO: 550603 - RNA, 22 nt, Human
aaauuauuaguuaaguugggca

SEQ ID NO: 550604 - RNA, 22 nt, Human
ccugcuggccaguggagggcug

SEQ ID NO: 550605 - RNA, 22 nt, Human
cuaugcaucugaacaauagaga

SEQ ID NO: 550606 - RNA, 22 nt, Human
ugaaggcauugaugaaggaauc

SEQ ID NO: 550607 - RNA, 17 nt, Human
aggcugcugggccaggg

SEQ ID NO: 550608 - RNA, 22 nt, Human
aaugcuuugagggaagaugaaa

SEQ ID NO: 550609 - RNA, 22 nt, Human
ggugccaggcucccagcucagg

SEQ ID NO: 550610 - RNA, 22 nt, Human
cccuggagugccggaaucaaga

SEQ ID NO: 550611 - RNA, 22 nt, Human
uguguucagcaggcaccuucuu

SEQ ID NO: 550612 - RNA, 22 nt, Human
uccaggcacagaguuggucagu

SEQ ID NO: 550613 - RNA, 22 nt, Human
ucacugcugcugccaugaugga

SEQ ID NO: 550614 - RNA, 22 nt, Human
ggggcucucaggucuccccaaa

SEQ ID NO: 550615 - RNA, 18 nt, Human
aaugcacacauuuacucc

SEQ ID NO: 550616 - RNA, 20 nt, Human
ccugcugagccagugugagg

SEQ ID NO: 550617 - RNA, 22 nt, Human
aauaugcauuaacuguguacau

SEQ ID NO: 550618 - RNA, 22 nt, Human
caucuuuaauuugugacaacua

SEQ ID NO: 550619 - RNA, 22 nt, Human
accaaagggcagaacaugagca

SEQ ID NO: 550620 - RNA, 18 nt, Human
uccauuguucuacuguga

SEQ ID NO: 550621 - RNA, 19 nt, Human
uguguaaagucugugguca

SEQ ID NO: 550622 - RNA, 22 nt, Human
caggaaaaggagacuuuagcac

SEQ ID NO: 550623 - RNA, 22 nt, Human
uuuacagaaugucaauuucuau

SEQ ID NO: 550624 - RNA, 18 nt, Human
cucucuggucuggauccc

SEQ ID NO: 550625 - RNA, 22 nt, Human
ucaggccucagcagcccacagg

SEQ ID NO: 550626 - RNA, 22 nt, Human
cccaguccuaaagcagacgcca

SEQ ID NO: 550627 - RNA, 22 nt, Human
cacaauuuguauuuugcaucca

SEQ ID NO: 550628 - RNA, 22 nt, Human
agacaguaugauauaugaauac

SEQ ID NO: 550629 - RNA, 22 nt, Human
cagcugcuguucaguuuuguuu

SEQ ID NO: 550630 - RNA, 22 nt, Human
cucucugaggcaggccuguggg

SEQ ID NO: 550631 - RNA, 22 nt, Human
uccagagagaaaaacaagcuuu

SEQ ID NO: 550632 - RNA, 22 nt, Human
cuguccagucuuuagcaagcug

SEQ ID NO: 550633 - RNA, 22 nt, Human
uaguaacagauuuauacagucu

SEQ ID NO: 550634 - RNA, 22 nt, Human
uucuggaguauuccuggcaccu

SEQ ID NO: 550635 - RNA, 22 nt, Human
gggcugagaaguugaucccaag

SEQ ID NO: 550636 - RNA, 22 nt, Human
caggggacauuaaagcuccaua

SEQ ID NO: 550637 - RNA, 22 nt, Human
cucccaagcugugcugaacugu

SEQ ID NO: 550638 - RNA, 22 nt, Human
aggugccagcucucaggcagga

SEQ ID NO: 550639 - RNA, 22 nt, Human
agggcccucuggcaggccaggc

SEQ ID NO: 550640 - RNA, 22 nt, Human
uccagcuugacaaaugauuuua

SEQ ID NO: 550641 - RNA, 23 nt, Human
aguggggaaucaacagauucuuu

SEQ ID NO: 550642 - RNA, 22 nt, Human
caggcuugggagcagagccacu

SEQ ID NO: 550643 - RNA, 22 nt, Human
cagggagaggcaucauagggaa

SEQ ID NO: 550644 - RNA, 19 nt, Human
uccugcagguggcuugcag

SEQ ID NO: 550645 - RNA, 22 nt, Human
gugcgccagcucaaggggaggc

SEQ ID NO: 550646 - RNA, 22 nt, Human
aauucauugccagaaucuauga

SEQ ID NO: 550647 - RNA, 22 nt, Human
uggagcaggaagucuauggcug

SEQ ID NO: 550648 - RNA, 22 nt, Human
ugaaaggugacauuucuuggau

SEQ ID NO: 550649 - RNA, 17 nt, Human
acaggcagaucaccuga

SEQ ID NO: 550650 - RNA, 22 nt, Human
cucacacugugccaaauccuuu

SEQ ID NO: 550651 - RNA, 22 nt, Human
uguuuaaucuauaaaauggaga

SEQ ID NO: 550652 - RNA, 22 nt, Human
uggcccgaccucugcucaugca

SEQ ID NO: 550653 - RNA, 22 nt, Human
uugcaacucuugaaaagcauug

SEQ ID NO: 550654 - RNA, 22 nt, Human
acccagcaaagauaaacuuaug

SEQ ID NO: 550655 - RNA, 22 nt, Human
cacacuagucuauccauuagcu

SEQ ID NO: 550656 - RNA, 22 nt, Human
caguggaggcucaagugugcuu

SEQ ID NO: 550657 - RNA, 22 nt, Human
agcagccacagcagaucugagu

SEQ ID NO: 550658 - RNA, 22 nt, Human
uuucacagaaagaagcuaguuu

SEQ ID NO: 550659 - RNA, 22 nt, Human
ggcagggcaggaaagucaggaa

SEQ ID NO: 550660 - RNA, 22 nt, Human
ggcacacagauggagcacuagc

SEQ ID NO: 550661 - RNA, 22 nt, Human
aguuugaaggaguugaaucacc

SEQ ID NO: 550662 - RNA, 22 nt, Human
ugaggcaggaugcuugcacagg

SEQ ID NO: 550663 - RNA, 22 nt, Human
uuaggaauauuuucugaguagu

SEQ ID NO: 550664 - RNA, 22 nt, Human
uuuuuguagucauuagaagagg

SEQ ID NO: 550665 - RNA, 22 nt, Human
ugaguccauugauggauaguga

SEQ ID NO: 550666 - RNA, 22 nt, Human
aagucauuccugcuuguugccc

SEQ ID NO: 550667 - RNA, 20 nt, Human
uucaggauucuagaccacac

SEQ ID NO: 550668 - RNA, 22 nt, Human
gaaaggcaguacagcugagccu

SEQ ID NO: 550669 - RNA, 22 nt, Human
ccugggcucaagugaugguccc

SEQ ID NO: 550670 - RNA, 22 nt, Human
aagauucuacaguagguacauu

SEQ ID NO: 550671 - RNA, 21 nt, Human
gccuggcucucacuggccugg

SEQ ID NO: 550672 - RNA, 22 nt, Human
uggggcugaggagccucacucu

SEQ ID NO: 550673 - RNA, 22 nt, Human
uguauaaacuuaagcaggaacc

SEQ ID NO: 550674 - RNA, 21 nt, Human
gcaggggauagaaauggucug

SEQ ID NO: 550675 - RNA, 17 nt, Human
agagagagcaugccacc

SEQ ID NO: 550676 - RNA, 23 nt, Human
aguacauucgaaaaauucuguga

SEQ ID NO: 550677 - RNA, 22 nt, Human
caccugggcuaaacuaugcagg

SEQ ID NO: 550678 - RNA, 22 nt, Human
cacccaggcuggagugcagggg

SEQ ID NO: 550679 - RNA, 22 nt, Human
cagaaacaggcaacgugugcac

SEQ ID NO: 550680 - RNA, 21 nt, Human
acaugcauagagagauuucug

SEQ ID NO: 550681 - RNA, 19 nt, Human
uuaagcuaagauacuagua

SEQ ID NO: 550682 - RNA, 22 nt, Human
caggccugugaguugaggcccc

SEQ ID NO: 550683 - RNA, 22 nt, Human
aucugguuuggggauccuugug

SEQ ID NO: 550684 - RNA, 22 nt, Human
aggugcuguuugucagcaguuu

SEQ ID NO: 550685 - RNA, 22 nt, Human
accugugcaaagacuggucagg

SEQ ID NO: 550686 - RNA, 22 nt, Human
acucaggaaauugagauaaugg

SEQ ID NO: 550687 - RNA, 22 nt, Human
uuauucacuucuuggucccuca

SEQ ID NO: 550688 - RNA, 22 nt, Human
uaugucaugucuuagagaauga

SEQ ID NO: 550689 - RNA, 22 nt, Human
auguuuuauauuuugcagcagu

SEQ ID NO: 550690 - RNA, 22 nt, Human
auucaguaggucuagaauaaga

SEQ ID NO: 550691 - RNA, 23 nt, Human
gaaaucuagucauuuuuagucug

SEQ ID NO: 550692 - RNA, 20 nt, Human
auaaaauaacugccacaaga

SEQ ID NO: 550693 - RNA, 22 nt, Human
gaacagacuuggaggagugauc

SEQ ID NO: 550694 - RNA, 22 nt, Human
gcagagucccagcagguggugg

SEQ ID NO: 550695 - RNA, 22 nt, Human
aguauuucuucauaugauuacu

SEQ ID NO: 550696 - RNA, 21 nt, Human
ugauuuccagaaaauuggccc

SEQ ID NO: 550697 - RNA, 22 nt, Human
agaggcugugcagagggagugc

SEQ ID NO: 550698 - RNA, 22 nt, Human
aggcuuuaauuaucuacaggag

SEQ ID NO: 550699 - RNA, 22 nt, Human
gcccucugcuggccucaccucg

SEQ ID NO: 550700 - RNA, 22 nt, Human
agugcuccuauggaucaguugu

SEQ ID NO: 550701 - RNA, 17 nt, Human
aagauuucauuagcuga

SEQ ID NO: 550702 - RNA, 22 nt, Human
uacaaagccugguagauaucug

SEQ ID NO: 550703 - RNA, 22 nt, Human
uagggcucugagaguucagccu

SEQ ID NO: 550704 - RNA, 22 nt, Human
uguuccugacggccaaagaggu

SEQ ID NO: 550705 - RNA, 21 nt, Human
ucaggcaggcgcagagggaag

SEQ ID NO: 550706 - RNA, 22 nt, Human
uggcugccuagugucugagcag

SEQ ID NO: 550707 - RNA, 22 nt, Human
acccuggacaucuugucauagc

SEQ ID NO: 550708 - RNA, 22 nt, Human
aaaagcaguaaauguaugaccu

SEQ ID NO: 550709 - RNA, 22 nt, Human
ccuagagcucugcuuuaucuaa

SEQ ID NO: 550710 - RNA, 22 nt, Human
ccagguggacaaggcuuucaca

SEQ ID NO: 550711 - RNA, 22 nt, Human
ccagcuuuuccucucauugcuu

SEQ ID NO: 550712 - RNA, 22 nt, Human
caagcagacaguaggccuagaa

SEQ ID NO: 550713 - RNA, 22 nt, Human
agagugaaguuuuugaaaguga

SEQ ID NO: 550714 - RNA, 21 nt, Human
cuuauucacuguuauuuauca

SEQ ID NO: 550715 - RNA, 17 nt, Human
acaggccugcuugcacu

SEQ ID NO: 550716 - RNA, 21 nt, Human
aaauguguuccauaaugcuuu

SEQ ID NO: 550717 - RNA, 22 nt, Human
aaguuuuaacaaguacuuacua

SEQ ID NO: 550718 - RNA, 23 nt, Human
uuguuuuuagagguggcaugaga

SEQ ID NO: 550719 - RNA, 22 nt, Human
acagagagggagugauaaaucc

SEQ ID NO: 550720 - RNA, 22 nt, Human
uucaaagcaauagaaagaguga

SEQ ID NO: 550721 - RNA, 22 nt, Human
gucauucuccaagaacccgcug

SEQ ID NO: 550722 - RNA, 17 nt, Human
guuugcaugguguuaac

SEQ ID NO: 550723 - RNA, 22 nt, Human
agugucuuugucaaauuacagg

SEQ ID NO: 550724 - RNA, 22 nt, Human
uaaaaaacauuacucuguccug

SEQ ID NO: 550725 - RNA, 22 nt, Human
cugacucagcagcugaugaucc

SEQ ID NO: 550726 - RNA, 22 nt, Human
aaaaucucauuaucaggaaggg

SEQ ID NO: 550727 - RNA, 22 nt, Human
guucuguacuccaagcucuucc

SEQ ID NO: 550728 - RNA, 22 nt, Human
guuuccugacccuggcccagca

SEQ ID NO: 550729 - RNA, 21 nt, Human
agagaagaggacuuucucaca

SEQ ID NO: 550730 - RNA, 23 nt, Human
agcuccagcugacgugggcagcc

SEQ ID NO: 550731 - RNA, 22 nt, Human
cuucugggauuuuugaagacuc

SEQ ID NO: 550732 - RNA, 22 nt, Human
ucuuccaaaugaauaugguuuu

SEQ ID NO: 550733 - RNA, 22 nt, Human
ucagggacauuuagacacugau

SEQ ID NO: 550734 - RNA, 22 nt, Human
caacuacuggugcucaggaaau

SEQ ID NO: 550735 - RNA, 22 nt, Human
aaagaauagccuuuguccaaau

SEQ ID NO: 550736 - RNA, 22 nt, Human
guucacagcaaaccuaugaacu

SEQ ID NO: 550737 - RNA, 22 nt, Human
augucuuucucacagccaguuc

SEQ ID NO: 550738 - RNA, 22 nt, Human
uaagacauuugaaaugugaucc

SEQ ID NO: 550739 - RNA, 22 nt, Human
acagugaucaguuacugucugu

SEQ ID NO: 550740 - RNA, 22 nt, Human
ccagggccugccacuuagcaag

SEQ ID NO: 550741 - RNA, 22 nt, Human
acacauuuauuacaugcaugug

SEQ ID NO: 550742 - RNA, 20 nt, Human
uccaggagaacugggagccg

SEQ ID NO: 550743 - RNA, 22 nt, Human
ugcagggcccuugggguugaac

SEQ ID NO: 550744 - RNA, 18 nt, Human
uuugggcugauguugggc

SEQ ID NO: 550745 - RNA, 22 nt, Human
ucucugaaggggagcuguuuaa

SEQ ID NO: 550746 - RNA, 22 nt, Human
cagggcccaggccacuggguug

SEQ ID NO: 550747 - RNA, 22 nt, Human
ucauccaaggauuuuauugcau

SEQ ID NO: 550748 - RNA, 22 nt, Human
cugcucugcaaggcacagugau

SEQ ID NO: 550749 - RNA, 22 nt, Human
gcagccacccucaaggcugaau

SEQ ID NO: 550750 - RNA, 22 nt, Human
agcagggggccacagucacagc

SEQ ID NO: 550751 - RNA, 22 nt, Human
aucuguggcuggugagaggcag

SEQ ID NO: 550752 - RNA, 22 nt, Human
aggccuggcaugagaccugaga

SEQ ID NO: 550753 - RNA, 17 nt, Human
uucaaugauuaaugcau

SEQ ID NO: 550754 - RNA, 22 nt, Human
ugcuuuauguggcugauacuca

SEQ ID NO: 550755 - RNA, 22 nt, Human
ggaggaagggcccaggcuuuau

SEQ ID NO: 550756 - RNA, 22 nt, Human
gagggaccccaggcuggcccuu

SEQ ID NO: 550757 - RNA, 22 nt, Human
ggucugugcucuggagccucug

SEQ ID NO: 550758 - RNA, 22 nt, Human
gccugcagccucagagaauuuu

SEQ ID NO: 550759 - RNA, 22 nt, Human
caagagcauuuaguuagcuggu

SEQ ID NO: 550760 - RNA, 22 nt, Human
acuucauguuguuuacaacuua

SEQ ID NO: 550761 - RNA, 22 nt, Human
cagcugggugaucuugggcagg

SEQ ID NO: 550762 - RNA, 22 nt, Human
ugaaauauuuagagaguaaguu

SEQ ID NO: 550763 - RNA, 22 nt, Human
gagcucccuggagguucagaua

SEQ ID NO: 550764 - RNA, 22 nt, Human
acaaaguuauucuuucagagga

SEQ ID NO: 550765 - RNA, 22 nt, Human
ggacacagguaaauaccacuga

SEQ ID NO: 550766 - RNA, 22 nt, Human
gagcccaggaaguggaggcuga

SEQ ID NO: 550767 - RNA, 22 nt, Human
ugauacauaaaccaucauuuug

SEQ ID NO: 550768 - RNA, 22 nt, Human
ugcaauuuggcuuccauuuucu

SEQ ID NO: 550769 - RNA, 22 nt, Human
aagcuuuaugaucucucagcua

SEQ ID NO: 550770 - RNA, 22 nt, Human
ugagccugcaauaagcacagcc

SEQ ID NO: 550771 - RNA, 22 nt, Human
auuacagagggucggucguuuu

SEQ ID NO: 550772 - RNA, 22 nt, Human
aggaauuaacaauauauuuagg

SEQ ID NO: 550773 - RNA, 22 nt, Human
acccaggguagaaccucagagc

SEQ ID NO: 550774 - RNA, 22 nt, Human
acauuugugcacaugugcaugg

SEQ ID NO: 550775 - RNA, 22 nt, Human
aggccugggucucgugccuacc

SEQ ID NO: 550776 - RNA, 22 nt, Human
uuaaacagacaguaaaugaaac

SEQ ID NO: 550777 - RNA, 20 nt, Human
cagcuuggaugagaggcuga

SEQ ID NO: 550778 - RNA, 21 nt, Human
gcagccacagccaccaagcua

SEQ ID NO: 550779 - RNA, 21 nt, Human
agggaaauccagucacuuuuc

SEQ ID NO: 550780 - RNA, 22 nt, Human
augaaaauugacagcggaagua

SEQ ID NO: 550781 - RNA, 20 nt, Human
aaaagcagccagagauggua

SEQ ID NO: 550782 - RNA, 22 nt, Human
gggcuggaggugagcaggacag

SEQ ID NO: 550783 - RNA, 22 nt, Human
cagggccugccugguuccugga

SEQ ID NO: 550784 - RNA, 21 nt, Human
ggacaccagucacacuggauu

SEQ ID NO: 550785 - RNA, 22 nt, Human
cugauucuuucuucuugccagg

SEQ ID NO: 550786 - RNA, 22 nt, Human
aaaaucaguacacuuuauuuug

SEQ ID NO: 550787 - RNA, 22 nt, Human
uguaacauauguaaaagcaccu

SEQ ID NO: 550788 - RNA, 20 nt, Human
uccagccacuuccgcugguc

SEQ ID NO: 550789 - RNA, 22 nt, Human
augcagaagacugaaaagcuga

SEQ ID NO: 550790 - RNA, 22 nt, Human
cugccucuguugggcauggucu

SEQ ID NO: 550791 - RNA, 22 nt, Human
gcagcagagaccccaggaagga

SEQ ID NO: 550792 - RNA, 22 nt, Human
caggcaggagccagggauucca

SEQ ID NO: 550793 - RNA, 22 nt, Human
cccagggauuauaaaggugaaa

SEQ ID NO: 550794 - RNA, 21 nt, Human
cauucacagucuggcucuuga

SEQ ID NO: 550795 - RNA, 22 nt, Human
guuauucuacagucauugaagu

SEQ ID NO: 550796 - RNA, 22 nt, Human
uacagauauauagugugugccu

SEQ ID NO: 550797 - RNA, 22 nt, Human
cugaagccaugugcucacuggu

SEQ ID NO: 550798 - RNA, 22 nt, Human
uuaaagcaaccucagcccucuu

SEQ ID NO: 550799 - RNA, 22 nt, Human
ugcuggaggcaguggaggugcc

SEQ ID NO: 550800 - RNA, 23 nt, Human
ucaggauauugugugccaaggug

SEQ ID NO: 550801 - RNA, 22 nt, Human
cugcugauguaagccaugcucu

SEQ ID NO: 550802 - RNA, 22 nt, Human
gaaggaagacugguuuaaaugu

SEQ ID NO: 550803 - RNA, 22 nt, Human
cccuggcuuggcacucuccacu

SEQ ID NO: 550804 - RNA, 22 nt, Human
aauucugugcaggcagagcuau

SEQ ID NO: 550805 - RNA, 22 nt, Human
uauuccagaugaaaucauucag

SEQ ID NO: 550806 - RNA, 20 nt, Human
gcaauuaauuuuugguuaca

SEQ ID NO: 550807 - RNA, 22 nt, Human
ugagacaguucugcagcugggu

SEQ ID NO: 550808 - RNA, 22 nt, Human
gaggccuggugugucucccgcu

SEQ ID NO: 550809 - RNA, 22 nt, Human
uggaucuucacaagagagggcg

SEQ ID NO: 550810 - RNA, 22 nt, Human
uccaggcauagaaggcacgcac

SEQ ID NO: 550811 - RNA, 22 nt, Human
auauacaugggaauauguggag

SEQ ID NO: 550812 - RNA, 22 nt, Human
uuucaaaugcaugucuuuccuc

SEQ ID NO: 550813 - RNA, 22 nt, Human
aucuccagcaauggggagcucu

SEQ ID NO: 550814 - RNA, 22 nt, Human
ccuggccacucagguguggggc

SEQ ID NO: 550815 - RNA, 22 nt, Human
acauguuuggcucuaugcuaua

SEQ ID NO: 550816 - RNA, 22 nt, Human
gugcagagcaagggcugagggc

SEQ ID NO: 550817 - RNA, 19 nt, Human
ugggaaaguaacauacaaa

SEQ ID NO: 550818 - RNA, 22 nt, Human
uagaugaccuuguguuaggcaa

SEQ ID NO: 550819 - RNA, 22 nt, Human
aaaugguauaaugucauguauu

SEQ ID NO: 550820 - RNA, 22 nt, Human
agggccugggauguccuccuag

SEQ ID NO: 550821 - RNA, 22 nt, Human
guuacauuacuugugcaguugu

SEQ ID NO: 550822 - RNA, 22 nt, Human
uagcauuagagauagaaauagu

SEQ ID NO: 550823 - RNA, 22 nt, Human
ccagaggacuugggggcugaau

SEQ ID NO: 550824 - RNA, 22 nt, Human
cucccagggccaucgagucacu

SEQ ID NO: 550825 - RNA, 22 nt, Human
aaguucaauggaaaagcuuuag

SEQ ID NO: 550826 - RNA, 22 nt, Human
ucuguggccuguguccaagugc

SEQ ID NO: 550827 - RNA, 17 nt, Human
uggcucugaggcugaau

SEQ ID NO: 550828 - RNA, 22 nt, Human
caauguuucuuguaaccaguga

SEQ ID NO: 550829 - RNA, 22 nt, Human
caggcugggaacgccacccgcu

SEQ ID NO: 550830 - RNA, 22 nt, Human
ucaggcugccuaucagacugug

SEQ ID NO: 550831 - RNA, 22 nt, Human
ccaggguggcguagaugcuggg

SEQ ID NO: 550832 - RNA, 22 nt, Human
ucucaguguuaucuaucugccu

SEQ ID NO: 550833 - RNA, 22 nt, Human
gucucuuuuauggugaguugau

SEQ ID NO: 550834 - RNA, 22 nt, Human
ugcuugagacacauaugaauuu

SEQ ID NO: 550835 - RNA, 22 nt, Human
cagcuugcaguacuuguuuuug

SEQ ID NO: 550836 - RNA, 22 nt, Human
ggagccaguauuuaguggucuu

SEQ ID NO: 550837 - RNA, 22 nt, Human
agcaggcuaaauaauaauacau

SEQ ID NO: 550838 - RNA, 19 nt, Human
caucuggaugauucuccug

SEQ ID NO: 550839 - RNA, 22 nt, Human
ucugccugaaauucacauguaa

SEQ ID NO: 550840 - RNA, 22 nt, Human
cugccguccaucuacgucucag

SEQ ID NO: 550841 - RNA, 22 nt, Human
ggccuuuuguguccuugcccgu

SEQ ID NO: 550842 - RNA, 22 nt, Human
aggcaucugaguuugcaagcuu

SEQ ID NO: 550843 - RNA, 22 nt, Human
uucaacauuuaucaguuuauca

SEQ ID NO: 550844 - RNA, 22 nt, Human
gaggcugacggcaccaucuucu

SEQ ID NO: 550845 - RNA, 22 nt, Human
gccaggggugcccacccaagga

SEQ ID NO: 550846 - RNA, 22 nt, Human
agcuuuaugggagcuuagauaa

SEQ ID NO: 550847 - RNA, 22 nt, Human
aacagaacccgagugugaaucu

SEQ ID NO: 550848 - RNA, 22 nt, Human
ucuuuagaaacuuuucuucaug

SEQ ID NO: 550849 - RNA, 22 nt, Human
uccagagugcugacgcagaccc

SEQ ID NO: 550850 - RNA, 22 nt, Human
acagauauccucagucuccaac

SEQ ID NO: 550851 - RNA, 22 nt, Human
uggcacauagaaaaggaucaau

SEQ ID NO: 550852 - RNA, 22 nt, Human
aaaugugcuugugaucagcugu

SEQ ID NO: 550853 - RNA, 22 nt, Human
uuuacacugugaaacagguauc

SEQ ID NO: 550854 - RNA, 22 nt, Human
gguggaguaauucgcagagguu

SEQ ID NO: 550855 - RNA, 22 nt, Human
augugacuccaggcaguuuugu

SEQ ID NO: 550856 - RNA, 18 nt, Human
gacccagcagaugggcuu

SEQ ID NO: 550857 - RNA, 22 nt, Human
ucuucuuccuccacagggccca

SEQ ID NO: 550858 - RNA, 22 nt, Human
uaccugagcccagugcagcaua

SEQ ID NO: 550859 - RNA, 22 nt, Human
cccugccuacaggguuuucuuu

SEQ ID NO: 550860 - RNA, 22 nt, Human
ucugcaggaaaaaagugccugg

SEQ ID NO: 550861 - RNA, 22 nt, Human
gcaaagcaagcugucagccuca

SEQ ID NO: 550862 - RNA, 22 nt, Human
ugagauaauacuucuuagcugg

SEQ ID NO: 550863 - RNA, 22 nt, Human
accauguuggccaagcuggucu

SEQ ID NO: 550864 - RNA, 22 nt, Human
cacauacugagaaucacaccca

SEQ ID NO: 550865 - RNA, 22 nt, Human
uaauuuuuccacguacacuggg

SEQ ID NO: 550866 - RNA, 22 nt, Human
aaggugucacugggacaggaaa

SEQ ID NO: 550867 - RNA, 22 nt, Human
ccuuucagaugggcauggaccg

SEQ ID NO: 550868 - RNA, 22 nt, Human
ugccucugugugcaggugagca

SEQ ID NO: 550869 - RNA, 22 nt, Human
cugaggucucuuuccauaguga

SEQ ID NO: 550870 - RNA, 22 nt, Human
uuccagcuaacucacaucccuu

SEQ ID NO: 550871 - RNA, 23 nt, Human
ggagccuggcauaugagacgcau

SEQ ID NO: 550872 - RNA, 22 nt, Human
cuggagcuaauaauccaucuga

SEQ ID NO: 550873 - RNA, 22 nt, Human
cuggccugaucucaugcugucc

SEQ ID NO: 550874 - RNA, 22 nt, Human
ugagauuuuccuaaauauaaug

SEQ ID NO: 550875 - RNA, 22 nt, Human
ggucccuggggaacuaggcugu

SEQ ID NO: 550876 - RNA, 22 nt, Human
guucuuaagaccacaauaaaaa

SEQ ID NO: 550877 - RNA, 22 nt, Human
acaguggaugacauccuuuugc

SEQ ID NO: 550878 - RNA, 22 nt, Human
aagucauugguagcuugauagg

SEQ ID NO: 550879 - RNA, 22 nt, Human
uccaagcuguauguuccuagag

SEQ ID NO: 550880 - RNA, 23 nt, Human
ugcauggggcuauacugcuguuc

SEQ ID NO: 550881 - RNA, 22 nt, Human
gccagccugugggggcucugug

SEQ ID NO: 550882 - RNA, 22 nt, Human
agcaccuguggcucaugcucgu

SEQ ID NO: 550883 - RNA, 22 nt, Human
agagccugaggaugucccagcu

SEQ ID NO: 550884 - RNA, 22 nt, Human
guuucuuagacauaugccauga

SEQ ID NO: 550885 - RNA, 22 nt, Human
acaaagauucauuugcauuauu

SEQ ID NO: 550886 - RNA, 22 nt, Human
caaggcaguuccccagagggcu

SEQ ID NO: 550887 - RNA, 22 nt, Human
uguaugaaucucauuuguuuaa

SEQ ID NO: 550888 - RNA, 21 nt, Human
cagcagaguaaugcauucgua

SEQ ID NO: 550889 - RNA, 22 nt, Human
ucaaauuuuaacaugcauuaga

SEQ ID NO: 550890 - RNA, 22 nt, Human
uauuucugaggcccaggaagug

SEQ ID NO: 550891 - RNA, 22 nt, Human
aaaugugucaguuucauucucu

SEQ ID NO: 550892 - RNA, 22 nt, Human
aagcagaguccccuucccaugg

SEQ ID NO: 550893 - RNA, 22 nt, Human
cagucacuggaauagcugagga

SEQ ID NO: 550894 - RNA, 22 nt, Human
ggggaaggauugaguugaccca

SEQ ID NO: 550895 - RNA, 22 nt, Human
auagcaaaggacaauagucagu

SEQ ID NO: 550896 - RNA, 22 nt, Human
agaagagaaauagugccacugu

SEQ ID NO: 550897 - RNA, 22 nt, Human
ccagcugcugugcagggaggcu

SEQ ID NO: 550898 - RNA, 22 nt, Human
guggccuggcuggcaccaccuc

SEQ ID NO: 550899 - RNA, 22 nt, Human
gaagcacugccauaauucagac

SEQ ID NO: 550900 - RNA, 22 nt, Human
auuucauguuucaucuaccuaa

SEQ ID NO: 550901 - RNA, 22 nt, Human
ccagggugagaaaaggcuggau

SEQ ID NO: 550902 - RNA, 22 nt, Human
uggcagagcaaaaagauagaau

SEQ ID NO: 550903 - RNA, 19 nt, Human
aggccugggguuuugcacu

SEQ ID NO: 550904 - RNA, 22 nt, Human
cuuauguauaauguuccacaua

SEQ ID NO: 550905 - RNA, 22 nt, Human
cauaucccauuggccaggacau

SEQ ID NO: 550906 - RNA, 22 nt, Human
cagggcuccccagagagccucu

SEQ ID NO: 550907 - RNA, 22 nt, Human
gggccugacugagagcuccuca

SEQ ID NO: 550908 - RNA, 22 nt, Human
uucaaaagcgguccaggaagau

SEQ ID NO: 550909 - RNA, 22 nt, Human
uucuuucuuggggaacacacuc

SEQ ID NO: 550910 - RNA, 22 nt, Human
uguggcaguauaagagcuagaa

SEQ ID NO: 550911 - RNA, 22 nt, Human
ccugagaggcccucucacuguc

SEQ ID NO: 550912 - RNA, 22 nt, Human
cuauuuauguccaaguguuuua

SEQ ID NO: 550913 - RNA, 22 nt, Human
gaggaagagcauggccaguuuc

SEQ ID NO: 550914 - RNA, 22 nt, Human
ugauuuccugugcgcccuuagg

SEQ ID NO: 550915 - RNA, 23 nt, Human
agaguccacaagauuuuccagug

SEQ ID NO: 550916 - RNA, 22 nt, Human
caggaaaugaaagcuagcuaau

SEQ ID NO: 550917 - RNA, 22 nt, Human
aauuuuauuaacuggauguagc

SEQ ID NO: 550918 - RNA, 19 nt, Human
auuuacugccuaaaaucuc

SEQ ID NO: 550919 - RNA, 20 nt, Human
ccuuuagaaacucauaugua

SEQ ID NO: 550920 - RNA, 22 nt, Human
ccugagagcagcuuccugcuua

SEQ ID NO: 550921 - RNA, 22 nt, Human
ucauccaguuguggagagggaa

SEQ ID NO: 550922 - RNA, 22 nt, Human
cagcaucuaaucuucaugccgg

SEQ ID NO: 550923 - RNA, 21 nt, Human
uuucuaagugcuugguuuggg

SEQ ID NO: 550924 - RNA, 19 nt, Human
ucaaaggcaaggaggaacu

SEQ ID NO: 550925 - RNA, 22 nt, Human
gcuauuuagugagucacauccu

SEQ ID NO: 550926 - RNA, 18 nt, Human
ggccugaggauuucagca

SEQ ID NO: 550927 - RNA, 22 nt, Human
acagugauauuuuuacucaaau

SEQ ID NO: 550928 - RNA, 22 nt, Human
gguggccuccagggcauaggug

SEQ ID NO: 550929 - RNA, 21 nt, Human
gggcucugcccuccuggagcu

SEQ ID NO: 550930 - RNA, 22 nt, Human
agaaaauuuauucauguuaguu

SEQ ID NO: 550931 - RNA, 22 nt, Human
agggccaguaccaggugggugg

SEQ ID NO: 550932 - RNA, 19 nt, Human
agcagguggguaagaaaau

SEQ ID NO: 550933 - RNA, 22 nt, Human
uccugugugcuuucuuuagguu

SEQ ID NO: 550934 - RNA, 22 nt, Human
uuggcaguagucucggcuaccc

SEQ ID NO: 550935 - RNA, 22 nt, Human
ugcuucaaguugaaauauucuu

SEQ ID NO: 550936 - RNA, 22 nt, Human
cuggcagguuuggugucuggug

SEQ ID NO: 550937 - RNA, 22 nt, Human
caaugacauggauaaucauauu

SEQ ID NO: 550938 - RNA, 22 nt, Human
caguuucuucaucaguuaagca

SEQ ID NO: 550939 - RNA, 22 nt, Human
acagaaauugcuaauagcucau

SEQ ID NO: 550940 - RNA, 22 nt, Human
agagccugcuguguaagucaca

SEQ ID NO: 550941 - RNA, 22 nt, Human
caugacacccaggcauagcacc

SEQ ID NO: 550942 - RNA, 19 nt, Human
ccagcagacacagcugccc

SEQ ID NO: 550943 - RNA, 22 nt, Human
cagacaugauguaagcagaggc

SEQ ID NO: 550944 - RNA, 22 nt, Human
cuggagccacugggucuuguau

SEQ ID NO: 550945 - RNA, 22 nt, Human
aacaagaacaccuacaguucua

SEQ ID NO: 550946 - RNA, 22 nt, Human
cagacagcaaaucugcuugcau

SEQ ID NO: 550947 - RNA, 22 nt, Human
guuuggggucugcagagcggcg

SEQ ID NO: 550948 - RNA, 22 nt, Human
ugaggcagggagaguggauaug

SEQ ID NO: 550949 - RNA, 22 nt, Human
ugcaugcagcuggugauaagaa

SEQ ID NO: 550950 - RNA, 22 nt, Human
ccucugagucucacuguaaccu

SEQ ID NO: 550951 - RNA, 22 nt, Human
caggagcuacucagguuggguu

SEQ ID NO: 550952 - RNA, 22 nt, Human
auucugucuuuuuaaaauaaua

SEQ ID NO: 550953 - RNA, 22 nt, Human
uuauaucagaaggugagauuga

SEQ ID NO: 550954 - RNA, 22 nt, Human
aggaggccccuccuggguugcu

SEQ ID NO: 550955 - RNA, 22 nt, Human
uuggaauuucauguaagugacu

SEQ ID NO: 550956 - RNA, 22 nt, Human
ucagaagguggagguugcagug

SEQ ID NO: 550957 - RNA, 22 nt, Human
cacagguggcuccaaguuagag

SEQ ID NO: 550958 - RNA, 17 nt, Human
acaagcaguggccaugg

SEQ ID NO: 550959 - RNA, 22 nt, Human
agcaaagaagacacaggcuuca

SEQ ID NO: 550960 - RNA, 22 nt, Human
aacaagugauauauaauggaag

SEQ ID NO: 550961 - RNA, 22 nt, Human
gagcaguggucacagggaggga

SEQ ID NO: 550962 - RNA, 22 nt, Human
gggggacuggaccguccugggu

SEQ ID NO: 550963 - RNA, 22 nt, Human
cacuggugucugagcaggguga

SEQ ID NO: 550964 - RNA, 22 nt, Human
aguuacaaccaugacacaagca

SEQ ID NO: 550965 - RNA, 22 nt, Human
aguuuccuuggauucaauuugg

SEQ ID NO: 550966 - RNA, 23 nt, Human
gcaggugguucgaacagaaguuu

SEQ ID NO: 550967 - RNA, 22 nt, Human
aagggcucgguagcaguccuga

SEQ ID NO: 550968 - RNA, 22 nt, Human
ucaagagauugaauaauaacug

SEQ ID NO: 550969 - RNA, 20 nt, Human
ugggcagcacugcuggcugg

SEQ ID NO: 550970 - RNA, 22 nt, Human
aggccucuggagguggcagugu

SEQ ID NO: 550971 - RNA, 22 nt, Human
gaacaaauucucaucaacuugu

SEQ ID NO: 550972 - RNA, 22 nt, Human
caaggauagguacuauguaaua

SEQ ID NO: 550973 - RNA, 22 nt, Human
aggcugcuggcaggcguggacg

SEQ ID NO: 550974 - RNA, 22 nt, Human
auguuuaaaggguugagaaaua

SEQ ID NO: 550975 - RNA, 22 nt, Human
uccaaauucuagggccuugguu

SEQ ID NO: 550976 - RNA, 22 nt, Human
ucccagagcucuggagguugga

SEQ ID NO: 550977 - RNA, 22 nt, Human
ucucugaguucuccuccagccc

SEQ ID NO: 550978 - RNA, 22 nt, Human
gggguggauuccuacaggucca

SEQ ID NO: 550979 - RNA, 22 nt, Human
cuccagcucgcgagcucugcuc

SEQ ID NO: 550980 - RNA, 22 nt, Human
auuuuacuacuccaauuaauga

SEQ ID NO: 550981 - RNA, 22 nt, Human
cuacaaauauaaaacacagaua

SEQ ID NO: 550982 - RNA, 22 nt, Human
gcucagaaaagugaggcucagu

SEQ ID NO: 550983 - RNA, 22 nt, Human
caaaugugguuucucagcauuc

SEQ ID NO: 550984 - RNA, 22 nt, Human
ucccugcacagccgagccaugc

SEQ ID NO: 550985 - RNA, 22 nt, Human
gcaaaugaguuguaacauaaaa

SEQ ID NO: 550986 - RNA, 22 nt, Human
acuggcagcuguaggaugcaug

SEQ ID NO: 550987 - RNA, 22 nt, Human
agagaugaaaaguggagacugg

SEQ ID NO: 550988 - RNA, 22 nt, Human
uacaggaagcacucaagaaaug

SEQ ID NO: 550989 - RNA, 22 nt, Human
uggccuggggaccugugagacc

SEQ ID NO: 550990 - RNA, 22 nt, Human
gcaggccugcccagcaggaugg

SEQ ID NO: 550991 - RNA, 22 nt, Human
ugugggguagcaguuuccgugu

SEQ ID NO: 550992 - RNA, 22 nt, Human
ggcaggugcaccugagccaucu

SEQ ID NO: 550993 - RNA, 22 nt, Human
gcuggcagagacaagaagacua

SEQ ID NO: 550994 - RNA, 22 nt, Human
cuucugugaccaccagcagccc

SEQ ID NO: 550995 - RNA, 22 nt, Human
acacacagaguuuauacaggca

SEQ ID NO: 550996 - RNA, 20 nt, Human
agugccagggcaggugagag

SEQ ID NO: 550997 - RNA, 22 nt, Human
ggcuggcuggcugguagacaag

SEQ ID NO: 550998 - RNA, 22 nt, Human
acacauaugccauuacagcaaa

SEQ ID NO: 550999 - RNA, 22 nt, Human
ucaauucuaguggagagaguuu

SEQ ID NO: 551000 - RNA, 22 nt, Human
uucuuucccagaagauauguuu

SEQ ID NO: 551001 - RNA, 22 nt, Human
uacaagaaauuucugcauauau

SEQ ID NO: 551002 - RNA, 16 nt, Human
cuuuuucuccccucuu

SEQ ID NO: 551003 - RNA, 22 nt, Human
auacauucaaaggaaggauaga

SEQ ID NO: 551004 - RNA, 22 nt, Human
ucacaauuuggauacagcuaug

SEQ ID NO: 551005 - RNA, 22 nt, Human
acauguuugauaaauauuuggg

SEQ ID NO: 551006 - RNA, 22 nt, Human
ucacacagcuccuuuccuuagu

SEQ ID NO: 551007 - RNA, 22 nt, Human
ugucuguacaaauuuucugugu

SEQ ID NO: 551008 - RNA, 22 nt, Human
uucuguguggguagcuccuguu

SEQ ID NO: 551009 - RNA, 22 nt, Human
auguccuuccauuuugaucugu

SEQ ID NO: 551010 - RNA, 22 nt, Human
auuagaauuaugcuugcuaaug

SEQ ID NO: 551011 - RNA, 21 nt, Human
gugguuauuuucauuagcauc

SEQ ID NO: 551012 - RNA, 22 nt, Human
aucauacagaaccugagcacuu

SEQ ID NO: 551013 - RNA, 22 nt, Human
uuccucagccaaggcugggauc

SEQ ID NO: 551014 - RNA, 20 nt, Human
ggucccugcccucugucauc

SEQ ID NO: 551015 - RNA, 22 nt, Human
acagcuaggucuucagcacuuu

SEQ ID NO: 551016 - RNA, 22 nt, Human
aaugaagccagcugggaugcga

SEQ ID NO: 551017 - RNA, 22 nt, Human
aguggagaagaggauggucucc

SEQ ID NO: 551018 - RNA, 18 nt, Human
gccaggcaggguggggaa

SEQ ID NO: 551019 - RNA, 22 nt, Human
auucugcauugcucacaaagau

SEQ ID NO: 551020 - RNA, 22 nt, Human
acccaggggcagccuugcugug

SEQ ID NO: 551021 - RNA, 22 nt, Human
auguccagaguaaagcacauuc

SEQ ID NO: 551022 - RNA, 22 nt, Human
aaucaggaugacugucauuuca

SEQ ID NO: 551023 - RNA, 22 nt, Human
aggccacaguacuuugcagacc

SEQ ID NO: 551024 - RNA, 22 nt, Human
ggcuuuauuaagcaggguaagu

SEQ ID NO: 551025 - RNA, 22 nt, Human
ucuuuccauggccacacagucu

SEQ ID NO: 551026 - RNA, 22 nt, Human
augagaauaugauuuacuauug

SEQ ID NO: 551027 - RNA, 23 nt, Human
gggaccagcuagggcugugaccu

SEQ ID NO: 551028 - RNA, 20 nt, Human
accccacagaguccauugca

SEQ ID NO: 551029 - RNA, 22 nt, Human
auauucuuccaaaacaucauuu

SEQ ID NO: 551030 - RNA, 22 nt, Human
guuuaagaggguuucauuccca

SEQ ID NO: 551031 - RNA, 22 nt, Human
uuagugauaggacuuuaaagcc

SEQ ID NO: 551032 - RNA, 22 nt, Human
gcagaggucuagcaccaagaau

SEQ ID NO: 551033 - RNA, 22 nt, Human
ugauuuccuggcuuuggaguuc

SEQ ID NO: 551034 - RNA, 22 nt, Human
gcuguggcuugcagcuggggcu

SEQ ID NO: 551035 - RNA, 22 nt, Human
ucaaaugcaccucucauuuguu

SEQ ID NO: 551036 - RNA, 22 nt, Human
aagaugauaggacuugcuuaag

SEQ ID NO: 551037 - RNA, 23 nt, Human
uuguuucuuuguauugucucuau

SEQ ID NO: 551038 - RNA, 22 nt, Human
agcagggcuguguagguaauga

SEQ ID NO: 551039 - RNA, 16 nt, Human
gagcagagcgguucca

SEQ ID NO: 551040 - RNA, 22 nt, Human
augauuuuucagcagaggaucu

SEQ ID NO: 551041 - RNA, 22 nt, Human
uaagacuuccaggaaaaggugg

SEQ ID NO: 551042 - RNA, 20 nt, Human
gcauugaguauagacagaug

SEQ ID NO: 551043 - RNA, 22 nt, Human
uuuacauggaauauugucuugu

SEQ ID NO: 551044 - RNA, 22 nt, Human
ugcaggcucugugugugccugg

SEQ ID NO: 551045 - RNA, 22 nt, Human
ugaagagauuaaguugguuuug

SEQ ID NO: 551046 - RNA, 22 nt, Human
caggaagaggacaggcuucccc

SEQ ID NO: 551047 - RNA, 22 nt, Human
agcaggaaguagucuguaagca

SEQ ID NO: 551048 - RNA, 22 nt, Human
aagcagacaucccauacuuuug

SEQ ID NO: 551049 - RNA, 22 nt, Human
cugugggcugaaagugcucccg

SEQ ID NO: 551050 - RNA, 22 nt, Human
caauauucaguggaaaagccau

SEQ ID NO: 551051 - RNA, 22 nt, Human
gggacagaaggaagugagcaca

SEQ ID NO: 551052 - RNA, 22 nt, Human
uacuuccuguuuccaugucugu

SEQ ID NO: 551053 - RNA, 22 nt, Human
ucuggcugcugcgugagugcuu

SEQ ID NO: 551054 - RNA, 22 nt, Human
uuguaacucugaauacauccua

SEQ ID NO: 551055 - RNA, 22 nt, Human
aagcagaugcguuggagcaguu

SEQ ID NO: 551056 - RNA, 22 nt, Human
ugagagugguucagcucagaag

SEQ ID NO: 551057 - RNA, 22 nt, Human
agaacuauacauuacucauuga

SEQ ID NO: 551058 - RNA, 22 nt, Human
acccacaccuccguauaucacu

SEQ ID NO: 551059 - RNA, 22 nt, Human
aagacaggaaaagcuccaggcc

SEQ ID NO: 551060 - RNA, 22 nt, Human
aagacagagacucugcaacagg

SEQ ID NO: 551061 - RNA, 22 nt, Human
gagcaggccagcaauggaaggg

SEQ ID NO: 551062 - RNA, 22 nt, Human
acaaaugcagcauaaagugaac

SEQ ID NO: 551063 - RNA, 22 nt, Human
ccaggcagaugggccggcuuca

SEQ ID NO: 551064 - RNA, 22 nt, Human
agaaaaggauugauggaucaga

SEQ ID NO: 551065 - RNA, 22 nt, Human
aguauuugaucagaugauagua

SEQ ID NO: 551066 - RNA, 22 nt, Human
uagaaaugcccagauucugcua

SEQ ID NO: 551067 - RNA, 22 nt, Human
caguguuuaaucauugugaauu

SEQ ID NO: 551068 - RNA, 22 nt, Human
agcaguccaacugagguggcau

SEQ ID NO: 551069 - RNA, 21 nt, Human
agcuuacauuaccauuguugc

SEQ ID NO: 551070 - RNA, 22 nt, Human
agccucugcuuaugcaaaggua

SEQ ID NO: 551071 - RNA, 19 nt, Human
caggagagcaugcacuuug

SEQ ID NO: 551072 - RNA, 22 nt, Human
agccacagugcaagagagaaaa

SEQ ID NO: 551073 - RNA, 22 nt, Human
gagaggcugacuggcuguccug

SEQ ID NO: 551074 - RNA, 22 nt, Human
ucagacagcuugcagggaggug

SEQ ID NO: 551075 - RNA, 22 nt, Human
aaggaaauacuucugcagagca

SEQ ID NO: 551076 - RNA, 22 nt, Human
acuugguugaugucauaagguu

SEQ ID NO: 551077 - RNA, 22 nt, Human
cuauuauuaauguggggcuuug

SEQ ID NO: 551078 - RNA, 22 nt, Human
gcaguggggcgcugggaguugg

SEQ ID NO: 551079 - RNA, 22 nt, Human
cagggccacccucugcugggug

SEQ ID NO: 551080 - RNA, 19 nt, Human
ccugugagaggacaggugu

SEQ ID NO: 551081 - RNA, 22 nt, Human
uaagauaaguggguugagaugg

SEQ ID NO: 551082 - RNA, 22 nt, Human
gcagagaaaguuuuguccucag

SEQ ID NO: 551083 - RNA, 20 nt, Human
ucccugccuuuuacugcugg

SEQ ID NO: 551084 - RNA, 22 nt, Human
cgcauacauagaaacacacaga

SEQ ID NO: 551085 - RNA, 22 nt, Human
augggguggaguccgggcagcg

SEQ ID NO: 551086 - RNA, 20 nt, Human
cagauaaacgggaaagaagc

SEQ ID NO: 551087 - RNA, 22 nt, Human
ccugcagagccacgugccagcg

SEQ ID NO: 551088 - RNA, 22 nt, Human
gccauaaauugcuggucaaaau

SEQ ID NO: 551089 - RNA, 22 nt, Human
aggcagguguuaacccucugag

SEQ ID NO: 551090 - RNA, 22 nt, Human
gaggcucacuuucauccucuuc

SEQ ID NO: 551091 - RNA, 22 nt, Human
aguuuauguagaauuggcaaua

SEQ ID NO: 551092 - RNA, 22 nt, Human
gagaaucucuuugacaagcaga

SEQ ID NO: 551093 - RNA, 22 nt, Human
uacauuuucuaggggaccaaga

SEQ ID NO: 551094 - RNA, 19 nt, Human
uuucuuuuccccucagcac

SEQ ID NO: 551095 - RNA, 22 nt, Human
uuucuucaguaacacaaaccau

SEQ ID NO: 551096 - RNA, 22 nt, Human
cuuugcuaauguugcauuuuca

SEQ ID NO: 551097 - RNA, 18 nt, Human
cauuccccaucucugagc

SEQ ID NO: 551098 - RNA, 22 nt, Human
gaggcugccccuuccucagcug

SEQ ID NO: 551099 - RNA, 22 nt, Human
ucucucagaggaagaggcagug

SEQ ID NO: 551100 - RNA, 22 nt, Human
augcuguguuugagaaccuagg

SEQ ID NO: 551101 - RNA, 17 nt, Human
gcaguggagggguaguu

SEQ ID NO: 551102 - RNA, 21 nt, Human
gcugcugccccuagugaggcc

SEQ ID NO: 551103 - RNA, 22 nt, Human
ugcagaagcagagaguugccaa

SEQ ID NO: 551104 - RNA, 22 nt, Human
auugaaagauaggcuacugugg

SEQ ID NO: 551105 - RNA, 22 nt, Human
uggcccugugugcaggcugcac

SEQ ID NO: 551106 - RNA, 22 nt, Human
acagagcuuaggaugacuccca

SEQ ID NO: 551107 - RNA, 22 nt, Human
auauuauuuucccuggaguugu

SEQ ID NO: 551108 - RNA, 22 nt, Human
aucagcugaaaaacaggcagca

SEQ ID NO: 551109 - RNA, 22 nt, Human
guccucagcaccagaacuaggg

SEQ ID NO: 551110 - RNA, 22 nt, Human
cccagggagguagcaggagaaa

SEQ ID NO: 551111 - RNA, 22 nt, Human
agggacagaugaaugacugagu

SEQ ID NO: 551112 - RNA, 21 nt, Human
ugcucaugcaaugcaugucca

SEQ ID NO: 551113 - RNA, 22 nt, Human
ccagaaaaggagcugcaggaug

SEQ ID NO: 551114 - RNA, 22 nt, Human
gcuggcagcauuagacccuggg

SEQ ID NO: 551115 - RNA, 22 nt, Human
caaggaagacccacgcagauau

SEQ ID NO: 551116 - RNA, 22 nt, Human
cuucucucccuggcacucagac

SEQ ID NO: 551117 - RNA, 21 nt, Human
agcuggugucagagcucuggg

SEQ ID NO: 551118 - RNA, 23 nt, Human
acagugugguggacaaggagcag

SEQ ID NO: 551119 - RNA, 22 nt, Human
gccugggagcacaucggggucc

SEQ ID NO: 551120 - RNA, 19 nt, Human
caguggccuggaggucucu

SEQ ID NO: 551121 - RNA, 22 nt, Human
auaauuuaauuuucacaguggu

SEQ ID NO: 551122 - RNA, 22 nt, Human
ugaaagcucugucaucauuccu

SEQ ID NO: 551123 - RNA, 22 nt, Human
ugggccaggauuucaagacccu

SEQ ID NO: 551124 - RNA, 22 nt, Human
uauuucugauugcucaugaggc

SEQ ID NO: 551125 - RNA, 22 nt, Human
cuuccugcaggacagccaucug

SEQ ID NO: 551126 - RNA, 22 nt, Human
ccagucccagcucugccaugcu

SEQ ID NO: 551127 - RNA, 22 nt, Human
ucuguggaaauuuccugaggca

SEQ ID NO: 551128 - RNA, 22 nt, Human
uugaagagucuuucuuuccccc

SEQ ID NO: 551129 - RNA, 22 nt, Human
cugggccuugcaucccagagcc

SEQ ID NO: 551130 - RNA, 22 nt, Human
gaaaggccagcucacagaugag

SEQ ID NO: 551131 - RNA, 19 nt, Human
gccaggagggcucuggcug

SEQ ID NO: 551132 - RNA, 21 nt, Human
uuagaguagagaacaugaucc

SEQ ID NO: 551133 - RNA, 21 nt, Human
uccugcagggcagcagagugg

SEQ ID NO: 551134 - RNA, 22 nt, Human
agagauucauguuuacuguagg

SEQ ID NO: 551135 - RNA, 22 nt, Human
gagagcugucagcguagcaccg

SEQ ID NO: 551136 - RNA, 22 nt, Human
uguaaagguaggugcaaaauga

SEQ ID NO: 551137 - RNA, 19 nt, Human
caagugaagccugggaugg

SEQ ID NO: 551138 - RNA, 22 nt, Human
cacaagacuuauuuguguagaa

SEQ ID NO: 551139 - RNA, 22 nt, Human
agcuggcuccagaaggagucgu

SEQ ID NO: 551140 - RNA, 22 nt, Human
augcugaauugaugcgagggag

SEQ ID NO: 551141 - RNA, 22 nt, Human
cagcagaagcaacauucaggcu

SEQ ID NO: 551142 - RNA, 22 nt, Human
cagcuacacaccagaacuauua

SEQ ID NO: 551143 - RNA, 22 nt, Human
cuuucugaucccugcaacccuc

SEQ ID NO: 551144 - RNA, 22 nt, Human
agagagaggggcgagcaaacac

SEQ ID NO: 551145 - RNA, 22 nt, Human
gaagaauauggcucucagcaau

SEQ ID NO: 551146 - RNA, 22 nt, Human
agagaacaaauuaaaggugguu

SEQ ID NO: 551147 - RNA, 22 nt, Human
ucuggggaugagugaugucgua

SEQ ID NO: 551148 - RNA, 22 nt, Human
aagccacuuggggaaagaugga

SEQ ID NO: 551149 - RNA, 22 nt, Human
gggacuggaacuacuggugcag

SEQ ID NO: 551150 - RNA, 17 nt, Human
agcuuguuuuugaaagc

SEQ ID NO: 551151 - RNA, 22 nt, Human
ccagcuggcccagcugugcucc

SEQ ID NO: 551152 - RNA, 22 nt, Human
cuagcaucagaugagaagcugu

SEQ ID NO: 551153 - RNA, 23 nt, Human
ugcaggcuaggaagagagccuuc

SEQ ID NO: 551154 - RNA, 19 nt, Human
acucuuuuccuuuugaauc

SEQ ID NO: 551155 - RNA, 22 nt, Human
uucuuuuacauuaagauuucag

SEQ ID NO: 551156 - RNA, 22 nt, Human
cuucuggguguggagugaggac

SEQ ID NO: 551157 - RNA, 22 nt, Human
aaccuuuauuugguacuauucu

SEQ ID NO: 551158 - RNA, 22 nt, Human
uugaccuauguuucuucaucug

SEQ ID NO: 551159 - RNA, 22 nt, Human
uggcagcaauuugugauguuga

SEQ ID NO: 551160 - RNA, 22 nt, Human
gucccuaguggaaagacaugau

SEQ ID NO: 551161 - RNA, 22 nt, Human
agaaaguucacugguauauuuu

SEQ ID NO: 551162 - RNA, 22 nt, Human
ugauucuauggaaggcauaagg

SEQ ID NO: 551163 - RNA, 22 nt, Human
gugaaguucaagcuugccaucu

SEQ ID NO: 551164 - RNA, 22 nt, Human
uguacuuccccaaugacagcac

SEQ ID NO: 551165 - RNA, 21 nt, Human
ugggcacugagggugcugcuc

SEQ ID NO: 551166 - RNA, 23 nt, Human
aaagcaaggaauuggcaacagag

SEQ ID NO: 551167 - RNA, 22 nt, Human
aaagccagggacagugugcaug

SEQ ID NO: 551168 - RNA, 22 nt, Human
cuuucuggcacagccgcgggau

SEQ ID NO: 551169 - RNA, 22 nt, Human
cuggggaaggcggugacugcgc

SEQ ID NO: 551170 - RNA, 17 nt, Human
uccuggauccauggugg

SEQ ID NO: 551171 - RNA, 22 nt, Human
augcaaauugccauaaaguggg

SEQ ID NO: 551172 - RNA, 22 nt, Human
ugcaaauggagcauguauaaga

SEQ ID NO: 551173 - RNA, 22 nt, Human
aucagcaagauguaauuucuau

SEQ ID NO: 551174 - RNA, 22 nt, Human
agaaauuccuaagguacacaag

SEQ ID NO: 551175 - RNA, 22 nt, Human
cuucccuucugugcagggcaga

SEQ ID NO: 551176 - RNA, 22 nt, Human
ugcaauaaagugcuauaaaucc

SEQ ID NO: 551177 - RNA, 22 nt, Human
cuuuuucaagucaaagagggua

SEQ ID NO: 551178 - RNA, 22 nt, Human
gagcccuggcagucugggaugg

SEQ ID NO: 551179 - RNA, 22 nt, Human
aacaucuuuuuguuugcugaaa

SEQ ID NO: 551180 - RNA, 22 nt, Human
auaaggcauauagucacuuuuu

SEQ ID NO: 551181 - RNA, 22 nt, Human
auugaaaaaugacuauugcuua

SEQ ID NO: 551182 - RNA, 22 nt, Human
guauuugauacaugaaauggug

SEQ ID NO: 551183 - RNA, 22 nt, Human
gccuugcuuugcuucuggacag

SEQ ID NO: 551184 - RNA, 22 nt, Human
ucuggggagucaaagagaccug

SEQ ID NO: 551185 - RNA, 22 nt, Human
agacaaagaaaccguagaagca

SEQ ID NO: 551186 - RNA, 22 nt, Human
caguuacaugcucaugucauca

SEQ ID NO: 551187 - RNA, 22 nt, Human
gacccauauaggacccuccaaa

SEQ ID NO: 551188 - RNA, 22 nt, Human
guaagcaucugucucuucugca

SEQ ID NO: 551189 - RNA, 22 nt, Human
gggacaggccccucgcuagcuu

SEQ ID NO: 551190 - RNA, 22 nt, Human
ccagaggugcugggagaggucu

SEQ ID NO: 551191 - RNA, 19 nt, Human
augucccaccgccccugag

SEQ ID NO: 551192 - RNA, 22 nt, Human
ugggcuuccuggagccugugcu

SEQ ID NO: 551193 - RNA, 22 nt, Human
ggaagggcaaaagagaugaacu

SEQ ID NO: 551194 - RNA, 17 nt, Human
gaacagcagaggggaca

SEQ ID NO: 551195 - RNA, 23 nt, Human
uucuggauguucuagucugagag

SEQ ID NO: 551196 - RNA, 22 nt, Human
uggagcagccaugaugacagag

SEQ ID NO: 551197 - RNA, 22 nt, Human
ugcacuacugugauacacagcc

SEQ ID NO: 551198 - RNA, 22 nt, Human
aaacuucaguaggagccaaccu

SEQ ID NO: 551199 - RNA, 22 nt, Human
agggagaagguuuagcugugag

SEQ ID NO: 551200 - RNA, 22 nt, Human
gggaaggagguggcuugaagug

SEQ ID NO: 551201 - RNA, 22 nt, Human
aaagacuaagaagaguauuauu

SEQ ID NO: 551202 - RNA, 22 nt, Human
ucaggaagugcugaggcugcuu

SEQ ID NO: 551203 - RNA, 22 nt, Human
uuagccauuaaauuacaaggug

SEQ ID NO: 551204 - RNA, 22 nt, Human
uaauacugaaagggaaaugucc

SEQ ID NO: 551205 - RNA, 22 nt, Human
ccucagaguuggccacgagagc

SEQ ID NO: 551206 - RNA, 22 nt, Human
cagcagguccugggcguggccu

SEQ ID NO: 551207 - RNA, 22 nt, Human
ucacaagagcuggacugucuuu

SEQ ID NO: 551208 - RNA, 22 nt, Human
ugggccucaguuuccuuaggau

SEQ ID NO: 551209 - RNA, 21 nt, Human
ccuggcacuggccugcugagc

SEQ ID NO: 551210 - RNA, 17 nt, Human
gagaguguauuggaugc

SEQ ID NO: 551211 - RNA, 22 nt, Human
cccugaggggaguggugaggug

SEQ ID NO: 551212 - RNA, 22 nt, Human
ugcaagagcccaaacuauauac

SEQ ID NO: 551213 - RNA, 22 nt, Human
uguguuccuucgucuucccuuc

SEQ ID NO: 551214 - RNA, 22 nt, Human
agaggagugggaagcagugcaa

SEQ ID NO: 551215 - RNA, 22 nt, Human
uacauuugcuuugauuuucagc

SEQ ID NO: 551216 - RNA, 22 nt, Human
caucagaacgugagcuccuugu

SEQ ID NO: 551217 - RNA, 22 nt, Human
cuggccuggcagggagggcaug

SEQ ID NO: 551218 - RNA, 19 nt, Human
ucaaaugccaaugucacag

SEQ ID NO: 551219 - RNA, 19 nt, Human
uuucuaagcuaaaugcuuc

SEQ ID NO: 551220 - RNA, 22 nt, Human
agcccagcaaagggagguucag

SEQ ID NO: 551221 - RNA, 22 nt, Human
acagcugggugcugcucagagc

SEQ ID NO: 551222 - RNA, 22 nt, Human
agauuucucuuucccuggcuga

SEQ ID NO: 551223 - RNA, 22 nt, Human
cagcccagcacuaaguagauuu

SEQ ID NO: 551224 - RNA, 22 nt, Human
gccuuggcugaugugcgaauga

SEQ ID NO: 551225 - RNA, 22 nt, Human
gugcuguauaugcaagaggaag

SEQ ID NO: 551226 - RNA, 22 nt, Human
gcugagccccccugcguggguc

SEQ ID NO: 551227 - RNA, 22 nt, Human
aucaagaauguucauucuucua

SEQ ID NO: 551228 - RNA, 22 nt, Human
uaagcucuccaggugaucauga

SEQ ID NO: 551229 - RNA, 22 nt, Human
cagguucccagguccagggcuu

SEQ ID NO: 551230 - RNA, 22 nt, Human
gugaagagcuguugcagagauu

SEQ ID NO: 551231 - RNA, 22 nt, Human
ucagagcagacuuugaaggagg

SEQ ID NO: 551232 - RNA, 20 nt, Human
acacauauagcagcauaaac

SEQ ID NO: 551233 - RNA, 22 nt, Human
ugcagugguguccagguguacu

SEQ ID NO: 551234 - RNA, 22 nt, Human
uacugccuggagcauuggugcu

SEQ ID NO: 551235 - RNA, 22 nt, Human
caggcagcauuuacucugauga

SEQ ID NO: 551236 - RNA, 22 nt, Human
augauuuucugauaaagaacug

SEQ ID NO: 551237 - RNA, 22 nt, Human
acuugaauuauauuucuagaga

SEQ ID NO: 551238 - RNA, 22 nt, Human
agccucucuuuauucccagcua

SEQ ID NO: 551239 - RNA, 22 nt, Human
ucacacagguuugcaaugauuu

SEQ ID NO: 551240 - RNA, 22 nt, Human
gcucaggaaacagcagggcuug

SEQ ID NO: 551241 - RNA, 22 nt, Human
uagacagagugaagacaagugg

SEQ ID NO: 551242 - RNA, 22 nt, Human
uuuuacaccuguuaacucuaag

SEQ ID NO: 551243 - RNA, 22 nt, Human
cuguuuauuacacuggauagca

SEQ ID NO: 551244 - RNA, 22 nt, Human
uagcagagcagggaucagagcc

SEQ ID NO: 551245 - RNA, 22 nt, Human
ugaagcaaacgcuucuguuccu

SEQ ID NO: 551246 - RNA, 22 nt, Human
gauauuuuugcagacaccuggg

SEQ ID NO: 551247 - RNA, 22 nt, Human
gaguucaguaguuauagucuag

SEQ ID NO: 551248 - RNA, 22 nt, Human
auaguuuucuaugcacuguuau

SEQ ID NO: 551249 - RNA, 22 nt, Human
uaaggcagaaauaugagcaggg

SEQ ID NO: 551250 - RNA, 22 nt, Human
cucagcaacagcgacuuaaggg

SEQ ID NO: 551251 - RNA, 22 nt, Human
uuucaaguguccugauuaaugg

SEQ ID NO: 551252 - RNA, 22 nt, Human
gcacagggaggcuggccuggcc

SEQ ID NO: 551253 - RNA, 22 nt, Human
cuggcucauccagguguugcuc

SEQ ID NO: 551254 - RNA, 23 nt, Human
aguuccagaaaaaugcucaagca

SEQ ID NO: 551255 - RNA, 22 nt, Human
ggcccaaacggguccagugaaa

SEQ ID NO: 551256 - RNA, 22 nt, Human
aaacuugagcagucagaugaag

SEQ ID NO: 551257 - RNA, 22 nt, Human
gccagguggagguugcagugag

SEQ ID NO: 551258 - RNA, 18 nt, Human
agaguguucucagugaaa

SEQ ID NO: 551259 - RNA, 22 nt, Human
cagccugggcuccagagucccu

SEQ ID NO: 551260 - RNA, 22 nt, Human
uucuuaagcguaugauaaugaa

SEQ ID NO: 551261 - RNA, 22 nt, Human
cagagacuggagugcaguggcg

SEQ ID NO: 551262 - RNA, 22 nt, Human
ucccagccuuccagucugguuu

SEQ ID NO: 551263 - RNA, 22 nt, Human
gugggcuuuugacagugccugg

SEQ ID NO: 551264 - RNA, 22 nt, Human
ccccucuugugggcucagguca

SEQ ID NO: 551265 - RNA, 22 nt, Human
gcuggccucuggagaagggcuu

SEQ ID NO: 551266 - RNA, 22 nt, Human
aacaggcaggagaauucugccu

SEQ ID NO: 551267 - RNA, 18 nt, Human
gggaucaggcugccuagg

SEQ ID NO: 551268 - RNA, 22 nt, Human
auuaaaagcuucccaagaguua

SEQ ID NO: 551269 - RNA, 22 nt, Human
uggcagaguuauggguauuuau

SEQ ID NO: 551270 - RNA, 22 nt, Human
uuucuaaaggguagauuuggcc

SEQ ID NO: 551271 - RNA, 22 nt, Human
auguacaggauggugcucaucu

SEQ ID NO: 551272 - RNA, 22 nt, Human
agcuggcuucucugcagacauu

SEQ ID NO: 551273 - RNA, 22 nt, Human
gcugggcuggaaggccaaggca

SEQ ID NO: 551274 - RNA, 23 nt, Human
agcuuugugaaagcagacauggg

SEQ ID NO: 551275 - RNA, 22 nt, Human
uuuccuaaucccaaugacauuu

SEQ ID NO: 551276 - RNA, 17 nt, Human
ucagggaaugagguugu

SEQ ID NO: 551277 - RNA, 22 nt, Human
ugaaggaaaugacggcagaaga

SEQ ID NO: 551278 - RNA, 22 nt, Human
aauuucaagucuugaagaagua

SEQ ID NO: 551279 - RNA, 21 nt, Human
aucugcuuagguuuguucaga

SEQ ID NO: 551280 - RNA, 22 nt, Human
auacaagugauauaauuguuuc

SEQ ID NO: 551281 - RNA, 22 nt, Human
aaauauacuagaugaugaccca

SEQ ID NO: 551282 - RNA, 23 nt, Human
ucaucaaacagcugcucaagaaa

SEQ ID NO: 551283 - RNA, 22 nt, Human
agauacaacuguuuaaacauua

SEQ ID NO: 551284 - RNA, 22 nt, Human
gcaggagagccagcaggcuucc

SEQ ID NO: 551285 - RNA, 22 nt, Human
aaugugaacuuugucauguaac

SEQ ID NO: 551286 - RNA, 22 nt, Human
uauuuaaaauaagccccagugg

SEQ ID NO: 551287 - RNA, 22 nt, Human
gcaauacaguugaagagauuga

SEQ ID NO: 551288 - RNA, 22 nt, Human
aagacaauguuucugauagaua

SEQ ID NO: 551289 - RNA, 22 nt, Human
ucuucaaaaaauauccaucagu

SEQ ID NO: 551290 - RNA, 22 nt, Human
augggaagugaagucagggagg

SEQ ID NO: 551291 - RNA, 22 nt, Human
ccacagaaaguugucuagagua

SEQ ID NO: 551292 - RNA, 22 nt, Human
aggccuguuggcgugggcucua

SEQ ID NO: 551293 - RNA, 19 nt, Human
ugagaaggcaguggggagc

SEQ ID NO: 551294 - RNA, 22 nt, Human
cacagggcuucucauggggugc

SEQ ID NO: 551295 - RNA, 22 nt, Human
gcagggcuguucaggagggugg

SEQ ID NO: 551296 - RNA, 22 nt, Human
agcucaggucucaggagguguc

SEQ ID NO: 551297 - RNA, 22 nt, Human
acgaauaagagauaaagcaagg

SEQ ID NO: 551298 - RNA, 22 nt, Human
accaguccgcggagcuccgggg

SEQ ID NO: 551299 - RNA, 22 nt, Human
caacagcuggaggcuuggcccg

SEQ ID NO: 551300 - RNA, 22 nt, Human
uuacacagugguuaagucuggg

SEQ ID NO: 551301 - RNA, 22 nt, Human
aacacagcuaauuucugucaau

SEQ ID NO: 551302 - RNA, 22 nt, Human
cccaggaguuugaguucagcau

SEQ ID NO: 551303 - RNA, 22 nt, Human
ccagcugauucgguggugguug

SEQ ID NO: 551304 - RNA, 22 nt, Human
cagggccagcgucucgggcuau

SEQ ID NO: 551305 - RNA, 22 nt, Human
uucaacuuuaugcauauguauu

SEQ ID NO: 551306 - RNA, 22 nt, Human
uacaagaaggaaaacuagcaau

SEQ ID NO: 551307 - RNA, 22 nt, Human
gggggcaguaaggauauggaaa

SEQ ID NO: 551308 - RNA, 22 nt, Human
gcacagggccuggcacauaaga

SEQ ID NO: 551309 - RNA, 22 nt, Human
aggggcuguggaaaccaacucu

SEQ ID NO: 551310 - RNA, 22 nt, Human
gauauugccagauguccccgga

SEQ ID NO: 551311 - RNA, 22 nt, Human
gugagcagcucaggguggucuc

SEQ ID NO: 551312 - RNA, 22 nt, Human
auguauguuaguguauuaucua

SEQ ID NO: 551313 - RNA, 22 nt, Human
cugagauggaguuucgcucuuc

SEQ ID NO: 551314 - RNA, 22 nt, Human
uguaaauaaugcauguaaauca

SEQ ID NO: 551315 - RNA, 22 nt, Human
uuagagaaauucugguaaugua

SEQ ID NO: 551316 - RNA, 22 nt, Human
ucuggcagguucccauguuaug

SEQ ID NO: 551317 - RNA, 18 nt, Human
uggcuucugcuagcugga

SEQ ID NO: 551318 - RNA, 22 nt, Human
caggauggccccggggcugugc

SEQ ID NO: 551319 - RNA, 22 nt, Human
gaggcuggaauauuagaaaugu

SEQ ID NO: 551320 - RNA, 22 nt, Human
caguggaagcuggcugugaaga

SEQ ID NO: 551321 - RNA, 21 nt, Human
aaagugguaaggauuauuuug

SEQ ID NO: 551322 - RNA, 22 nt, Human
ccuggcuuccuucaugaccugg

SEQ ID NO: 551323 - RNA, 22 nt, Human
gcagagaggaaugaagccaucc

SEQ ID NO: 551324 - RNA, 22 nt, Human
uuagauaauguuauuguaauuu

SEQ ID NO: 551325 - RNA, 22 nt, Human
cccaggacucuucacugcagcc

SEQ ID NO: 551326 - RNA, 22 nt, Human
gacacaaaguuugucagaaauu

SEQ ID NO: 551327 - RNA, 22 nt, Human
gauccucuuuuccuaggaaggu

SEQ ID NO: 551328 - RNA, 22 nt, Human
cacauaauacauguuccacuua

SEQ ID NO: 551329 - RNA, 22 nt, Human
agggagcucaguuggaagcggu

SEQ ID NO: 551330 - RNA, 22 nt, Human
caggguugcaugcaucuguggg

SEQ ID NO: 551331 - RNA, 22 nt, Human
cuggccugaggccgccuucaga

SEQ ID NO: 551332 - RNA, 22 nt, Human
aaacucaaggauuuagacgaag

SEQ ID NO: 551333 - RNA, 22 nt, Human
ucucagagggaaacaugaguga

SEQ ID NO: 551334 - RNA, 22 nt, Human
cucaggguaaugaaagacgaau

SEQ ID NO: 551335 - RNA, 22 nt, Human
gcagguggauauugcuacuuga

SEQ ID NO: 551336 - RNA, 22 nt, Human
gacagcagacagaacuaccugc

SEQ ID NO: 551337 - RNA, 22 nt, Human
aauauaguucugguauuguuaa

SEQ ID NO: 551338 - RNA, 22 nt, Human
cagggcuagugacaccccaguc

SEQ ID NO: 551339 - RNA, 22 nt, Human
auggcagagaaagcgagccaca

SEQ ID NO: 551340 - RNA, 22 nt, Human
caccagguggaaaugucacagc

SEQ ID NO: 551341 - RNA, 22 nt, Human
auacauacguacauacguaugu

SEQ ID NO: 551342 - RNA, 22 nt, Human
cugggcuacguguugacagcau

SEQ ID NO: 551343 - RNA, 20 nt, Human
auaauuuacccugcaccacu

SEQ ID NO: 551344 - RNA, 21 nt, Human
acucaagugggcaugcgcaga

SEQ ID NO: 551345 - RNA, 22 nt, Human
guggugcauccuugaguaagcu

SEQ ID NO: 551346 - RNA, 21 nt, Human
gaacauuuggguuguuucuac

SEQ ID NO: 551347 - RNA, 20 nt, Human
cuuggccuacuuagcuuugu

SEQ ID NO: 551348 - RNA, 22 nt, Human
cuuacacuucaucucauccagg

SEQ ID NO: 551349 - RNA, 22 nt, Human
gcucccugcagcugagaguucc

SEQ ID NO: 551350 - RNA, 22 nt, Human
gcacugugcuagguaucaggga

SEQ ID NO: 551351 - RNA, 22 nt, Human
uaaugcacagaauugacauggg

SEQ ID NO: 551352 - RNA, 22 nt, Human
uuacaucugcacuccaggacag

SEQ ID NO: 551353 - RNA, 22 nt, Human
uuacaauugagucuauuguaug

SEQ ID NO: 551354 - RNA, 22 nt, Human
ugugaagauuuggcaugcagaa

SEQ ID NO: 551355 - RNA, 22 nt, Human
caagggugguauugggagcaua

SEQ ID NO: 551356 - RNA, 22 nt, Human
gcuuggcauuugcugggagcug

SEQ ID NO: 551357 - RNA, 22 nt, Human
aaccugcauguuucuaaaagca

SEQ ID NO: 551358 - RNA, 22 nt, Human
uagaggcagaagaaauugacaa

SEQ ID NO: 551359 - RNA, 22 nt, Human
ccagguguagcacugcucacag

SEQ ID NO: 551360 - RNA, 22 nt, Human
uugcaucagcaggcauaauugg

SEQ ID NO: 551361 - RNA, 22 nt, Human
caugugggaagaggccagcugg

SEQ ID NO: 551362 - RNA, 22 nt, Human
ugcagaaggccugacauugcac

SEQ ID NO: 551363 - RNA, 19 nt, Human
cugaagucuuuucagcugg

SEQ ID NO: 551364 - RNA, 22 nt, Human
uuagcugucaagguggcugcag

SEQ ID NO: 551365 - RNA, 22 nt, Human
uagaggggaaucugccuccucu

SEQ ID NO: 551366 - RNA, 22 nt, Human
ucaaagcaucagucaauuuagg

SEQ ID NO: 551367 - RNA, 22 nt, Human
aucuggcugacuuugugggaca

SEQ ID NO: 551368 - RNA, 22 nt, Human
acuaaacugaagcaugaaaagg

SEQ ID NO: 551369 - RNA, 22 nt, Human
agauacacagagcaucuucaga

SEQ ID NO: 551370 - RNA, 22 nt, Human
uuuauaagaagcaaugucugag

SEQ ID NO: 551371 - RNA, 22 nt, Human
agggcugcugaggaagccuugc

SEQ ID NO: 551372 - RNA, 22 nt, Human
uggcucuguucgccaucaggag

SEQ ID NO: 551373 - RNA, 17 nt, Human
ucaggcugggugcagug

SEQ ID NO: 551374 - RNA, 22 nt, Human
uacccaggagaaacagcagggc

SEQ ID NO: 551375 - RNA, 22 nt, Human
gccugggauucccagaggggca

SEQ ID NO: 551376 - RNA, 22 nt, Human
ucgugaggcucugcaucgcaca

SEQ ID NO: 551377 - RNA, 22 nt, Human
ugcuggcugggcugcuggagac

SEQ ID NO: 551378 - RNA, 19 nt, Human
agcuggcagcuuccacuuc

SEQ ID NO: 551379 - RNA, 21 nt, Human
gcauuaaaagcaguuguuggu

SEQ ID NO: 551380 - RNA, 22 nt, Human
cugggcucugcggugucgcucu

SEQ ID NO: 551381 - RNA, 21 nt, Human
acauggacugugaauggggac

SEQ ID NO: 551382 - RNA, 22 nt, Human
ggaaaagaaagggacugauugg

SEQ ID NO: 551383 - RNA, 22 nt, Human
acucuaaaaugcuaugagaucu

SEQ ID NO: 551384 - RNA, 22 nt, Human
ucagacagggcuucucaaacuu

SEQ ID NO: 551385 - RNA, 19 nt, Human
gcuggcagauguggccgug

SEQ ID NO: 551386 - RNA, 22 nt, Human
aaagucauugcuguuaucaaug

SEQ ID NO: 551387 - RNA, 22 nt, Human
ggaaccacagcccccagcaggc

SEQ ID NO: 551388 - RNA, 22 nt, Human
aggcaggcuagucgcuugagcc

SEQ ID NO: 551389 - RNA, 23 nt, Human
uggaaacauucugaauguccauc

SEQ ID NO: 551390 - RNA, 22 nt, Human
ucacuugccuagcccaguucag

SEQ ID NO: 551391 - RNA, 22 nt, Human
aggcugaggugugcugugaucg

SEQ ID NO: 551392 - RNA, 22 nt, Human
uuccuucucagcccucgaggau

SEQ ID NO: 551393 - RNA, 22 nt, Human
acagccauagaugcuuauguaa

SEQ ID NO: 551394 - RNA, 22 nt, Human
cacaggaggaggccagagcgua

SEQ ID NO: 551395 - RNA, 18 nt, Human
agugugugcccuuucagg

SEQ ID NO: 551396 - RNA, 18 nt, Human
cacaggcaggugauaggu

SEQ ID NO: 551397 - RNA, 23 nt, Human
uccagcagccaagaaggguagaa

SEQ ID NO: 551398 - RNA, 22 nt, Human
aaaauuaagugucugggaagcc

SEQ ID NO: 551399 - RNA, 22 nt, Human
gcugaaaugcagaucccucacu

SEQ ID NO: 551400 - RNA, 18 nt, Human
ccagguggugacagagau

SEQ ID NO: 551401 - RNA, 22 nt, Human
ggaggaaggguagcauaaugua

SEQ ID NO: 551402 - RNA, 22 nt, Human
uggcagaaguucacuaguagcu

SEQ ID NO: 551403 - RNA, 22 nt, Human
acaacugucaguaaagaauauu

SEQ ID NO: 551404 - RNA, 21 nt, Human
uuugcauuuuacaugugggga

SEQ ID NO: 551405 - RNA, 22 nt, Human
agucaggguuguaggcucaccc

SEQ ID NO: 551406 - RNA, 22 nt, Human
guggcagguggagccuccugca

SEQ ID NO: 551407 - RNA, 22 nt, Human
cuugggaggagaacaaagcucc

SEQ ID NO: 551408 - RNA, 22 nt, Human
uauuuguauguguguacauaua

SEQ ID NO: 551409 - RNA, 22 nt, Human
uggcuaggaauccaugacucuc

SEQ ID NO: 551410 - RNA, 22 nt, Human
agagacaggguuuugccauguu

SEQ ID NO: 551411 - RNA, 22 nt, Human
acugccugugucccuucagugc

SEQ ID NO: 551412 - RNA, 21 nt, Human
caguuacacaaguguuaccag

SEQ ID NO: 551413 - RNA, 21 nt, Human
uaucuacuggugucuuucaga

SEQ ID NO: 551414 - RNA, 22 nt, Human
gugcuuccccaagccacagccu

SEQ ID NO: 551415 - RNA, 22 nt, Human
gaggcuguguuucagugaggcc

SEQ ID NO: 551416 - RNA, 22 nt, Human
uucaaaacagcuagauauugga

SEQ ID NO: 551417 - RNA, 22 nt, Human
cuugggcucugugggccuuagu

SEQ ID NO: 551418 - RNA, 22 nt, Human
ggugggcagcucuuggcaggca

SEQ ID NO: 551419 - RNA, 22 nt, Human
aguggcaguagaugagcugguu

SEQ ID NO: 551420 - RNA, 16 nt, Human
cauauugcugaaagag

SEQ ID NO: 551421 - RNA, 22 nt, Human
uccaauuuucugauuucacuug

SEQ ID NO: 551422 - RNA, 22 nt, Human
aaugaugguuaaacacuggagg

SEQ ID NO: 551423 - RNA, 22 nt, Human
cccaggcacacugaagugacau

SEQ ID NO: 551424 - RNA, 22 nt, Human
uccugcagcucugagaagcauc

SEQ ID NO: 551425 - RNA, 22 nt, Human
uuauggaaaacuccagagagua

SEQ ID NO: 551426 - RNA, 22 nt, Human
augcugagaaaccugucuggca

SEQ ID NO: 551427 - RNA, 22 nt, Human
ugucauuuauuuugcugucugu

SEQ ID NO: 551428 - RNA, 22 nt, Human
cagauuuugaugaauguggaaa

SEQ ID NO: 551429 - RNA, 22 nt, Human
agcaggcuccuuccuucucugg

SEQ ID NO: 551430 - RNA, 22 nt, Human
auucacaugugcuucuuaucac

SEQ ID NO: 551431 - RNA, 22 nt, Human
cacagaauaaauugguaucaga

SEQ ID NO: 551432 - RNA, 22 nt, Human
gggcucugugguugugcuuugu

SEQ ID NO: 551433 - RNA, 22 nt, Human
ccagggcauguccaagacuuag

SEQ ID NO: 551434 - RNA, 22 nt, Human
caggggcugugggcggagccuc

SEQ ID NO: 551435 - RNA, 22 nt, Human
caacagcucagacacgggaccu

SEQ ID NO: 551436 - RNA, 19 nt, Human
uccuucagucagaucuggg

SEQ ID NO: 551437 - RNA, 22 nt, Human
aaguucaaggaagccuccaguu

SEQ ID NO: 551438 - RNA, 22 nt, Human
uucaaagauuagcauacgcaau

SEQ ID NO: 551439 - RNA, 22 nt, Human
cccacagguccccaugaacucg

SEQ ID NO: 551440 - RNA, 22 nt, Human
aguugaauaauuagacauaucu

SEQ ID NO: 551441 - RNA, 22 nt, Human
agccugguuuaagcauuuuaua

SEQ ID NO: 551442 - RNA, 22 nt, Human
acuucaugcuuuagagagauga

SEQ ID NO: 551443 - RNA, 22 nt, Human
aauccagguggcggagguugug

SEQ ID NO: 551444 - RNA, 19 nt, Human
ucugugcugggaggcagca

SEQ ID NO: 551445 - RNA, 22 nt, Human
cacuguuuuauuccaacauagg

SEQ ID NO: 551446 - RNA, 19 nt, Human
aaaggcaguggguggcgug

SEQ ID NO: 551447 - RNA, 22 nt, Human
uaucacaggugugauuuacauu

SEQ ID NO: 551448 - RNA, 22 nt, Human
uuuaucacagaauaagaaguca

SEQ ID NO: 551449 - RNA, 22 nt, Human
cauaauaucuccgauuacuugc

SEQ ID NO: 551450 - RNA, 22 nt, Human
uguguauuaccauuuuacagcu

SEQ ID NO: 551451 - RNA, 22 nt, Human
gaacagcugcuagagaucugug

SEQ ID NO: 551452 - RNA, 19 nt, Human
cgcaggagccgaggugacc

SEQ ID NO: 551453 - RNA, 22 nt, Human
caguuuugguccuuucuaggua

SEQ ID NO: 551454 - RNA, 22 nt, Human
ucaguguccggagccugagugc

SEQ ID NO: 551455 - RNA, 22 nt, Human
uuauuuucagcuaggaaagcca

SEQ ID NO: 551456 - RNA, 22 nt, Human
guugaaaguggagaaccugguu

SEQ ID NO: 551457 - RNA, 22 nt, Human
gugccuggcaugcgccggugcu

SEQ ID NO: 551458 - RNA, 22 nt, Human
cacauacaaugguguuauuugg

SEQ ID NO: 551459 - RNA, 22 nt, Human
aagaaguuaauaauggugagaa

SEQ ID NO: 551460 - RNA, 22 nt, Human
cauuugaaaccuggaaucuacc

SEQ ID NO: 551461 - RNA, 22 nt, Human
uuucuggacccuucugugagug

SEQ ID NO: 551462 - RNA, 22 nt, Human
uucacaaaacacuauuuucugg

SEQ ID NO: 551463 - RNA, 22 nt, Human
guggcaggagacuggaagaugg

SEQ ID NO: 551464 - RNA, 22 nt, Human
ggaaggaggaugcucuggccuu

SEQ ID NO: 551465 - RNA, 17 nt, Human
aggcuggcucacaggga

SEQ ID NO: 551466 - RNA, 22 nt, Human
cugagccagagggagucggguc

SEQ ID NO: 551467 - RNA, 22 nt, Human
caaucaugguauaauuccuuuu

SEQ ID NO: 551468 - RNA, 22 nt, Human
augcccugggagugcuguacca

SEQ ID NO: 551469 - RNA, 22 nt, Human
uccuugagccucccagacucag

SEQ ID NO: 551470 - RNA, 22 nt, Human
uugugugugagccuucaccaca

SEQ ID NO: 551471 - RNA, 22 nt, Human
uugcugaaaacaguggguauug

SEQ ID NO: 551472 - RNA, 22 nt, Human
uuaugacauaugaguacaagua

SEQ ID NO: 551473 - RNA, 22 nt, Human
agggugggcuagacucuucccc

SEQ ID NO: 551474 - RNA, 22 nt, Human
ugccugucuuuccucccucgua

SEQ ID NO: 551475 - RNA, 22 nt, Human
agugcaaagaaaucagcuuugu

SEQ ID NO: 551476 - RNA, 22 nt, Human
cuuucucaaugccggaaggcac

SEQ ID NO: 551477 - RNA, 22 nt, Human
auauacacauguguauacauuu

SEQ ID NO: 551478 - RNA, 22 nt, Human
gcagcuuggugaaaggugaugg

SEQ ID NO: 551479 - RNA, 22 nt, Human
ugugaaggcagagccagugaaa

SEQ ID NO: 551480 - RNA, 22 nt, Human
cugggcagugguggcaucuuug

SEQ ID NO: 551481 - RNA, 22 nt, Human
guuucuuauuucaacuggaaca

SEQ ID NO: 551482 - RNA, 22 nt, Human
agugaaaaccuaaucaugcagu

SEQ ID NO: 551483 - RNA, 22 nt, Human
cuggggucucaauucuagcggg

SEQ ID NO: 551484 - RNA, 22 nt, Human
acuuucuuaggcuguauaaaug

SEQ ID NO: 551485 - RNA, 22 nt, Human
uuugaaagcaggugugggaggg

SEQ ID NO: 551486 - RNA, 22 nt, Human
cagaagaggacuggguagcuca

SEQ ID NO: 551487 - RNA, 22 nt, Human
cacauacauacguauguauaca

SEQ ID NO: 551488 - RNA, 21 nt, Human
caaagccaggcaacucucucc

SEQ ID NO: 551489 - RNA, 22 nt, Human
acauaucuuucccucuccugaa

SEQ ID NO: 551490 - RNA, 22 nt, Human
gucccacugggcaacuagaaaa

SEQ ID NO: 551491 - RNA, 17 nt, Human
ugaaggaaggaugaugu

SEQ ID NO: 551492 - RNA, 22 nt, Human
auuaagacuauugauauuuaca

SEQ ID NO: 551493 - RNA, 22 nt, Human
ucacuguauuugcugaugcaua

SEQ ID NO: 551494 - RNA, 22 nt, Human
gagcuggcuaauacugacuuau

SEQ ID NO: 551495 - RNA, 22 nt, Human
cuucugcaauaaguuuuggucc

SEQ ID NO: 551496 - RNA, 22 nt, Human
cagcagcuguuuacggaacacc

SEQ ID NO: 551497 - RNA, 22 nt, Human
aggcaggaaaaucgcuugaacc

SEQ ID NO: 551498 - RNA, 22 nt, Human
ugaggaagcaaaggcuugugug

SEQ ID NO: 551499 - RNA, 22 nt, Human
aaagcugcugccaaucaggcuu

SEQ ID NO: 551500 - RNA, 22 nt, Human
acauuugauaauuauaaagaca

SEQ ID NO: 551501 - RNA, 20 nt, Human
gcuggcagaugucuugagau

SEQ ID NO: 551502 - RNA, 22 nt, Human
cccagaguggacgguggccccu

SEQ ID NO: 551503 - RNA, 22 nt, Human
gagaggugaaggcugcccuggg

SEQ ID NO: 551504 - RNA, 22 nt, Human
ugaggccugaagccuggagccu

SEQ ID NO: 551505 - RNA, 19 nt, Human
gcugccugucuuagccagu

SEQ ID NO: 551506 - RNA, 22 nt, Human
auagacauauggcuuuguuucu

SEQ ID NO: 551507 - RNA, 22 nt, Human
gccagaggaacgcugcgcgccc

SEQ ID NO: 551508 - RNA, 22 nt, Human
uggccagucuguggaagccagg

SEQ ID NO: 551509 - RNA, 22 nt, Human
aggaagagguagcugucaaggg

SEQ ID NO: 551510 - RNA, 22 nt, Human
ucuggagcgaggucccugucug

SEQ ID NO: 551511 - RNA, 22 nt, Human
acuucaaacaauuaacagagaa

SEQ ID NO: 551512 - RNA, 22 nt, Human
ucccaagacuauguucugugug

SEQ ID NO: 551513 - RNA, 22 nt, Human
uucaagaaagaguggcuauucc

SEQ ID NO: 551514 - RNA, 22 nt, Human
cuucugggagagcuuuugcuuc

SEQ ID NO: 551515 - RNA, 22 nt, Human
aagugauuuuccuacuugcuaa

SEQ ID NO: 551516 - RNA, 22 nt, Human
uggcugagaaaaugguuuuagg

SEQ ID NO: 551517 - RNA, 22 nt, Human
agaaaauauucauugagaggcu

SEQ ID NO: 551518 - RNA, 22 nt, Human
cuucuuaaauuggauugcuauu

SEQ ID NO: 551519 - RNA, 22 nt, Human
auuaauuuccaggcacugugcu

SEQ ID NO: 551520 - RNA, 22 nt, Human
augggcaguguauuggaaggaa

SEQ ID NO: 551521 - RNA, 22 nt, Human
caguaugucuacuggacaaagu

SEQ ID NO: 551522 - RNA, 22 nt, Human
caauguuuucaacugacaagua

SEQ ID NO: 551523 - RNA, 22 nt, Human
uacauacaagcauucaauuuua

SEQ ID NO: 551524 - RNA, 22 nt, Human
ucaauuucauucuauuaguuaa

SEQ ID NO: 551525 - RNA, 22 nt, Human
uggcccugugacugaguucuag

SEQ ID NO: 551526 - RNA, 22 nt, Human
cucaggaggugguagaggcccu

SEQ ID NO: 551527 - RNA, 22 nt, Human
uauugcaaguggcauaaaauuu

SEQ ID NO: 551528 - RNA, 22 nt, Human
aauuauuuaacuccuuuggaga

SEQ ID NO: 551529 - RNA, 22 nt, Human
ccagagucuuuauauuccugaa

SEQ ID NO: 551530 - RNA, 22 nt, Human
guuuucaugucuauugggcaua

SEQ ID NO: 551531 - RNA, 22 nt, Human
agcagcucaaagccugcaagga

SEQ ID NO: 551532 - RNA, 22 nt, Human
cggagccugcuuguugcagcug

SEQ ID NO: 551533 - RNA, 22 nt, Human
gaaaguauuagccuagaaguca

SEQ ID NO: 551534 - RNA, 22 nt, Human
ucugucacuauuggccagaaca

SEQ ID NO: 551535 - RNA, 22 nt, Human
uaacaguguggacuugagaucu

SEQ ID NO: 551536 - RNA, 22 nt, Human
cuguuguuccgggagcugcagc

SEQ ID NO: 551537 - RNA, 22 nt, Human
gccauggcccauaccaggugca

SEQ ID NO: 551538 - RNA, 22 nt, Human
gggauggcuuuguggcugacuc

SEQ ID NO: 551539 - RNA, 17 nt, Human
ugcccugugccuggugu

SEQ ID NO: 551540 - RNA, 20 nt, Human
ugccuuuuauaccuuuaaac

SEQ ID NO: 551541 - RNA, 22 nt, Human
uaacaugucccugauucuuugu

SEQ ID NO: 551542 - RNA, 22 nt, Human
aacauacauauuucagugucca

SEQ ID NO: 551543 - RNA, 22 nt, Human
caaaugcuaugauuuugaguuu

SEQ ID NO: 551544 - RNA, 22 nt, Human
cagaugaggcaaccucauugcu

SEQ ID NO: 551545 - RNA, 22 nt, Human
uucaacaaauauuuauugagcu

SEQ ID NO: 551546 - RNA, 22 nt, Human
uugcuuugguagcagcuauaga

SEQ ID NO: 551547 - RNA, 22 nt, Human
ucaggagcagcaugggugagag

SEQ ID NO: 551548 - RNA, 22 nt, Human
gcugcagcccggcgcgccugag

SEQ ID NO: 551549 - RNA, 22 nt, Human
ggcugccucugaugugcagacg

SEQ ID NO: 551550 - RNA, 22 nt, Human
ugggugcaugugagcacgugca

SEQ ID NO: 551551 - RNA, 22 nt, Human
ggcugagcacuuuaggcaggag

SEQ ID NO: 551552 - RNA, 22 nt, Human
aauaagauccugaagauauguu

SEQ ID NO: 551553 - RNA, 22 nt, Human
acacauuucuaaauuuuuaccg

SEQ ID NO: 551554 - RNA, 22 nt, Human
ggcucugaccucccaggcaguu

SEQ ID NO: 551555 - RNA, 22 nt, Human
uggagagguuuaaacaaaaguu

SEQ ID NO: 551556 - RNA, 22 nt, Human
gggcugcuuuuuucuuagcaga

SEQ ID NO: 551557 - RNA, 22 nt, Human
cugggccugucagggcuuuuug

SEQ ID NO: 551558 - RNA, 22 nt, Human
gccagcaguccugcugugugcc

SEQ ID NO: 551559 - RNA, 22 nt, Human
uccuggcuaguuuugcugaaau

SEQ ID NO: 551560 - RNA, 22 nt, Human
cagccagagaaagggcacugcc

SEQ ID NO: 551561 - RNA, 22 nt, Human
augcaagacccagaaaucauua

SEQ ID NO: 551562 - RNA, 22 nt, Human
ucucagguuucaagacaggaaa

SEQ ID NO: 551563 - RNA, 17 nt, Human
aggccucccuccaggcc

SEQ ID NO: 551564 - RNA, 23 nt, Human
uccagcagagccuuccaggaggg

SEQ ID NO: 551565 - RNA, 22 nt, Human
uguuauauaacuuacaaccugu

SEQ ID NO: 551566 - RNA, 22 nt, Human
uguggccucaaggcugcccuca

SEQ ID NO: 551567 - RNA, 22 nt, Human
auuugcauuuagaaagaucacu

SEQ ID NO: 551568 - RNA, 22 nt, Human
auacagauguuaaagcaauuuc

SEQ ID NO: 551569 - RNA, 18 nt, Human
gggcaucauucacaaagu

SEQ ID NO: 551570 - RNA, 22 nt, Human
uugcuuccucgaggccagcgug

SEQ ID NO: 551571 - RNA, 22 nt, Human
aaagauuucagaagccugugcc

SEQ ID NO: 551572 - RNA, 21 nt, Human
gaguuaauuugaccccugccu

SEQ ID NO: 551573 - RNA, 22 nt, Human
ucuugcacuucaugaauauguu

SEQ ID NO: 551574 - RNA, 22 nt, Human
ggccuggccuccagaugugggc

SEQ ID NO: 551575 - RNA, 22 nt, Human
cugaguggaacauaggaugaua

SEQ ID NO: 551576 - RNA, 22 nt, Human
cacugccuccccaggcuccaca

SEQ ID NO: 551577 - RNA, 20 nt, Human
uuucagauuuacagaaaugu

SEQ ID NO: 551578 - RNA, 21 nt, Human
gacaaagugaagcaggcagga

SEQ ID NO: 551579 - RNA, 22 nt, Human
augcugaggacaaagagaucaa

SEQ ID NO: 551580 - RNA, 22 nt, Human
auaugugugaugcauggacuaa

SEQ ID NO: 551581 - RNA, 22 nt, Human
uaaauguauaggcacuaaaccu

SEQ ID NO: 551582 - RNA, 22 nt, Human
aggagcaaaugaugagacagca

SEQ ID NO: 551583 - RNA, 22 nt, Human
uuuaauuuucugggcccagcag

SEQ ID NO: 551584 - RNA, 22 nt, Human
uuccauauuagacuaugugggg

SEQ ID NO: 551585 - RNA, 22 nt, Human
accagggcccgggagagcucuc

SEQ ID NO: 551586 - RNA, 22 nt, Human
ggcuuccccacaaagcacacaa

SEQ ID NO: 551587 - RNA, 22 nt, Human
agaugcagaaaaacuaagugau

SEQ ID NO: 551588 - RNA, 22 nt, Human
gcuguauuccugcacuguauag

SEQ ID NO: 551589 - RNA, 22 nt, Human
uaacauuccucaaaguuuucag

SEQ ID NO: 551590 - RNA, 22 nt, Human
agggugcagucacaggaaaugu

SEQ ID NO: 551591 - RNA, 22 nt, Human
cagcauuuuccauagaaagaag

SEQ ID NO: 551592 - RNA, 17 nt, Human
aaacagugaguguuaug

SEQ ID NO: 551593 - RNA, 22 nt, Human
ccuggcagacagcacugaagcu

SEQ ID NO: 551594 - RNA, 22 nt, Human
cagagguauugcaaaagccuag

SEQ ID NO: 551595 - RNA, 22 nt, Human
auauuaggaguuaaauguauua

SEQ ID NO: 551596 - RNA, 22 nt, Human
aguguuauuuauuguuucauaa

SEQ ID NO: 551597 - RNA, 22 nt, Human
acaguguucuugauauuacagu

SEQ ID NO: 551598 - RNA, 22 nt, Human
uggacucagugcugccauuccc

SEQ ID NO: 551599 - RNA, 22 nt, Human
uuugcauuuuagauuuaggccu

SEQ ID NO: 551600 - RNA, 18 nt, Human
agagaugggaguuggaaa

SEQ ID NO: 551601 - RNA, 22 nt, Human
uaggaaaaauacagaauuauau

SEQ ID NO: 551602 - RNA, 22 nt, Human
caggauccccaggucgccgucc

SEQ ID NO: 551603 - RNA, 22 nt, Human
aguuuuaugcaguguucugaua

SEQ ID NO: 551604 - RNA, 19 nt, Human
cugagcagcggcagcacuu

SEQ ID NO: 551605 - RNA, 22 nt, Human
ugggccugauucuugaauccug

SEQ ID NO: 551606 - RNA, 22 nt, Human
gugcauuuggugacucucaccc

SEQ ID NO: 551607 - RNA, 22 nt, Human
ugagcaggauucgccucuugca

SEQ ID NO: 551608 - RNA, 22 nt, Human
ugucccaguucccaggguugcu

SEQ ID NO: 551609 - RNA, 22 nt, Human
uccaguggugguuugaagggca

SEQ ID NO: 551610 - RNA, 22 nt, Human
ucaaaggaauuugauuuugaug

SEQ ID NO: 551611 - RNA, 22 nt, Human
cucagacuuucaggguaggcca

SEQ ID NO: 551612 - RNA, 22 nt, Human
gaacauuuauauuagauagcua

SEQ ID NO: 551613 - RNA, 22 nt, Human
agccuggauccuaggcucagcu

SEQ ID NO: 551614 - RNA, 22 nt, Human
agcuggaggauaacucacuucu

SEQ ID NO: 551615 - RNA, 22 nt, Human
auggcaggcccagguguucauu

SEQ ID NO: 551616 - RNA, 22 nt, Human
uucauuaguucugaagaugucu

SEQ ID NO: 551617 - RNA, 20 nt, Human
augcaaacucacaaaauacc

SEQ ID NO: 551618 - RNA, 22 nt, Human
ugaagcaggaucguuugcuuca

SEQ ID NO: 551619 - RNA, 22 nt, Human
uuucacagcuagugagcuucua

SEQ ID NO: 551620 - RNA, 22 nt, Human
uaguccauuuucacacugcuga

SEQ ID NO: 551621 - RNA, 22 nt, Human
agucuuuagagucuuaguguuu

SEQ ID NO: 551622 - RNA, 22 nt, Human
agaaucuaaguacacagacaga

SEQ ID NO: 551623 - RNA, 22 nt, Human
cagcugccacaggacuuucuga

SEQ ID NO: 551624 - RNA, 22 nt, Human
guggaggguuugcaaugugcag

SEQ ID NO: 551625 - RNA, 22 nt, Human
aauguucagaggacaauauaaa

SEQ ID NO: 551626 - RNA, 22 nt, Human
aggcucagccccugggaggaga

SEQ ID NO: 551627 - RNA, 22 nt, Human
aaagcaaacagaaccccaagcu

SEQ ID NO: 551628 - RNA, 22 nt, Human
guccucugucccuggggcacgg

SEQ ID NO: 551629 - RNA, 22 nt, Human
acuuugaaggggaacauuuuaa

SEQ ID NO: 551630 - RNA, 22 nt, Human
uaccucaugcuguacagcacgu

SEQ ID NO: 551631 - RNA, 22 nt, Human
aacugaaacggugaucuuuuaa

SEQ ID NO: 551632 - RNA, 22 nt, Human
agggcagcagcggcccaggccu

SEQ ID NO: 551633 - RNA, 18 nt, Human
ggaaaccacaggguucug

SEQ ID NO: 551634 - RNA, 22 nt, Human
cuccuuccugccccagugauaa

SEQ ID NO: 551635 - RNA, 22 nt, Human
ccugcucagccccagcucaccc

SEQ ID NO: 551636 - RNA, 22 nt, Human
uugcagcuucgagucuaucugu

SEQ ID NO: 551637 - RNA, 22 nt, Human
gaauucuaaccauuaagccaag

SEQ ID NO: 551638 - RNA, 21 nt, Human
caagccagaccaauagcagcc

SEQ ID NO: 551639 - RNA, 22 nt, Human
gacccaggguauccagagcugc

SEQ ID NO: 551640 - RNA, 22 nt, Human
aggccugaaggaagaugagcug

SEQ ID NO: 551641 - RNA, 20 nt, Human
gagauuuccaaucaugccca

SEQ ID NO: 551642 - RNA, 23 nt, Human
cccuuuaagauuugaauagucag

SEQ ID NO: 551643 - RNA, 22 nt, Human
ucuuugaaguaucuuaaauggu

SEQ ID NO: 551644 - RNA, 21 nt, Human
uggcagggguaguaguacagc

SEQ ID NO: 551645 - RNA, 22 nt, Human
acaggcugcugggcuccgugcu

SEQ ID NO: 551646 - RNA, 22 nt, Human
cuugaaagucacaugcagcccu

SEQ ID NO: 551647 - RNA, 22 nt, Human
uauuucuguuuauuuguacauc

SEQ ID NO: 551648 - RNA, 22 nt, Human
cugccugcacugccuggcucca

SEQ ID NO: 551649 - RNA, 22 nt, Human
aggcagcaaagaaaugaugcug

SEQ ID NO: 551650 - RNA, 22 nt, Human
gcacagccacguaaugugguca

SEQ ID NO: 551651 - RNA, 22 nt, Human
gaggguggaaaggguguaccug

SEQ ID NO: 551652 - RNA, 22 nt, Human
augggcuggccuuucccgcucu

SEQ ID NO: 551653 - RNA, 22 nt, Human
cagagccaacgccaccugccca

SEQ ID NO: 551654 - RNA, 22 nt, Human
aacugcuuuuugaucucaggag

SEQ ID NO: 551655 - RNA, 20 nt, Human
caucagugccugacaggucc

SEQ ID NO: 551656 - RNA, 22 nt, Human
caagagcugcaaauagcgugac

SEQ ID NO: 551657 - RNA, 22 nt, Human
cagagcacacaugcauagagug

SEQ ID NO: 551658 - RNA, 22 nt, Human
uccaaacgggagccaaaugagc

SEQ ID NO: 551659 - RNA, 22 nt, Human
caguggagugggacuggucuga

SEQ ID NO: 551660 - RNA, 22 nt, Human
gggcucugggauucagagcaag

SEQ ID NO: 551661 - RNA, 22 nt, Human
uucuugauuucaugcaguuaag

SEQ ID NO: 551662 - RNA, 22 nt, Human
uggcauuuuguucaguauaugg

SEQ ID NO: 551663 - RNA, 22 nt, Human
aggaagcuccaugaaggcagag

SEQ ID NO: 551664 - RNA, 22 nt, Human
acuauaaccuguuagaauagau

SEQ ID NO: 551665 - RNA, 22 nt, Human
ccucuuugugccugcaggcugc

SEQ ID NO: 551666 - RNA, 22 nt, Human
ucaaucacguguuccauguucu

SEQ ID NO: 551667 - RNA, 22 nt, Human
gaaaauuuagaacugaacuucu

SEQ ID NO: 551668 - RNA, 22 nt, Human
auccugggcagugugucacucu

SEQ ID NO: 551669 - RNA, 22 nt, Human
ccaggccucuggcugcuuaguc

SEQ ID NO: 551670 - RNA, 22 nt, Human
acacucugcucugagcuucagg

SEQ ID NO: 551671 - RNA, 23 nt, Human
gcccaugcuguugggcccgagca

SEQ ID NO: 551672 - RNA, 22 nt, Human
aaggcacugcuuugcugcgccc

SEQ ID NO: 551673 - RNA, 22 nt, Human
guugugaauagugccgcaauaa

SEQ ID NO: 551674 - RNA, 22 nt, Human
ucaaaguuacuugugguuuucu

SEQ ID NO: 551675 - RNA, 22 nt, Human
gccagagcugagacacgagucc

SEQ ID NO: 551676 - RNA, 20 nt, Human
uauuucacucuccagauggc

SEQ ID NO: 551677 - RNA, 22 nt, Human
accagggcuuacagcaguagcu

SEQ ID NO: 551678 - RNA, 22 nt, Human
ggaugcccacuaucugcuggcu

SEQ ID NO: 551679 - RNA, 22 nt, Human
ugcagguguagaguugggcucc

SEQ ID NO: 551680 - RNA, 22 nt, Human
guuuauaauccaacucugcucc

SEQ ID NO: 551681 - RNA, 20 nt, Human
aggcucugccugcaggccca

SEQ ID NO: 551682 - RNA, 22 nt, Human
uauuugucacugcacuugaaau

SEQ ID NO: 551683 - RNA, 22 nt, Human
aaaaccuucuagacuuuauauu

SEQ ID NO: 551684 - RNA, 22 nt, Human
uugaucaucuaagaguaauagu

SEQ ID NO: 551685 - RNA, 22 nt, Human
gagaaugggaaugaaaguagca

SEQ ID NO: 551686 - RNA, 19 nt, Human
gccugccuggguuucugag

SEQ ID NO: 551687 - RNA, 22 nt, Human
agggcagacuaggauggaagug

SEQ ID NO: 551688 - RNA, 22 nt, Human
ugaggcucagaagugccaagug

SEQ ID NO: 551689 - RNA, 22 nt, Human
guugugcagaagugccucagua

SEQ ID NO: 551690 - RNA, 22 nt, Human
uuguuacagcacuuaaccuuuu

SEQ ID NO: 551691 - RNA, 22 nt, Human
auuucucacucacaguccaugu

SEQ ID NO: 551692 - RNA, 22 nt, Human
uaggaaccuacugugguuuuaa

SEQ ID NO: 551693 - RNA, 18 nt, Human
agcagguggauuuauugg

SEQ ID NO: 551694 - RNA, 22 nt, Human
uguucauuauucuucaucugcc

SEQ ID NO: 551695 - RNA, 22 nt, Human
agggcucauaauuccugacuuc

SEQ ID NO: 551696 - RNA, 19 nt, Human
gcacacauacacccuuugg

SEQ ID NO: 551697 - RNA, 22 nt, Human
acaaagauguuuaaagcauuua

SEQ ID NO: 551698 - RNA, 22 nt, Human
cccccuggcaggcuggccucuc

SEQ ID NO: 551699 - RNA, 22 nt, Human
agcgggugcugugucagcccuc

SEQ ID NO: 551700 - RNA, 22 nt, Human
cucuguuucucagccuauuucc

SEQ ID NO: 551701 - RNA, 22 nt, Human
ccugggcucaagugauccuccu

SEQ ID NO: 551702 - RNA, 22 nt, Human
aacaguuacccuuaagaucuuu

SEQ ID NO: 551703 - RNA, 22 nt, Human
ucuggcuccugaguccaugcuc

SEQ ID NO: 551704 - RNA, 22 nt, Human
agggcucuguccccagaggccc

SEQ ID NO: 551705 - RNA, 22 nt, Human
agcugucagugcugugccugua

SEQ ID NO: 551706 - RNA, 22 nt, Human
gagauuucuuuugaugccuguc

SEQ ID NO: 551707 - RNA, 22 nt, Human
uguaggccuauguccagcaauu

SEQ ID NO: 551708 - RNA, 22 nt, Human
agcuggcccucgagagccaauu

SEQ ID NO: 551709 - RNA, 22 nt, Human
ugguuuaccccuguccuauauc

SEQ ID NO: 551710 - RNA, 22 nt, Human
ggucccagaauugguuagcaca

SEQ ID NO: 551711 - RNA, 22 nt, Human
ugccuggcaacuguggugggcu

SEQ ID NO: 551712 - RNA, 22 nt, Human
caaaugcauagaaagaugaaac

SEQ ID NO: 551713 - RNA, 22 nt, Human
ccugcaggggagagacuucuag

SEQ ID NO: 551714 - RNA, 22 nt, Human
agcugaggcucugagagggaag

SEQ ID NO: 551715 - RNA, 22 nt, Human
gaaggcacugaacuccuucugg

SEQ ID NO: 551716 - RNA, 21 nt, Human
agugaaauugcaucagaggga

SEQ ID NO: 551717 - RNA, 22 nt, Human
gccugcagcaugcuaggucuug

SEQ ID NO: 551718 - RNA, 22 nt, Human
uccgagaagcauaaagcaggaa

SEQ ID NO: 551719 - RNA, 22 nt, Human
ggcucaggaccugggauugcca

SEQ ID NO: 551720 - RNA, 22 nt, Human
cccuucccuucugggagaucca

SEQ ID NO: 551721 - RNA, 22 nt, Human
ugggcuccuugggagcaaguga

SEQ ID NO: 551722 - RNA, 22 nt, Human
ugcauaaacagauacuucaugu

SEQ ID NO: 551723 - RNA, 22 nt, Human
ugggcucugugccagguuggug

SEQ ID NO: 551724 - RNA, 22 nt, Human
ucagagguaguagcagaguuga

SEQ ID NO: 551725 - RNA, 22 nt, Human
ggcaagaaggcuucagguagcu

SEQ ID NO: 551726 - RNA, 22 nt, Human
agggcaugcuggaggagagaca

SEQ ID NO: 551727 - RNA, 22 nt, Human
gggagcugaauggcaauggaga

SEQ ID NO: 551728 - RNA, 22 nt, Human
agauggggcugaaaguuccaau

SEQ ID NO: 551729 - RNA, 22 nt, Human
ggaguggccucuccugugcagg

SEQ ID NO: 551730 - RNA, 22 nt, Human
auuauuaaagcuuaggucuuau

SEQ ID NO: 551731 - RNA, 22 nt, Human
uggcuuggcuaagaucuaagcu

SEQ ID NO: 551732 - RNA, 21 nt, Human
aaguggagaagaaaagcugga

SEQ ID NO: 551733 - RNA, 22 nt, Human
aagauacacguuguauugaaua

SEQ ID NO: 551734 - RNA, 22 nt, Human
cucugagaugcuugaagaggau

SEQ ID NO: 551735 - RNA, 22 nt, Human
guccucuuagccacuuaauuau

SEQ ID NO: 551736 - RNA, 22 nt, Human
gucauuccuuauguugauucag

SEQ ID NO: 551737 - RNA, 22 nt, Human
ccuggcaggcuggggacagugc

SEQ ID NO: 551738 - RNA, 22 nt, Human
gcugccuguugaagggucugug

SEQ ID NO: 551739 - RNA, 22 nt, Human
gagggcugcaaugagacagaga

SEQ ID NO: 551740 - RNA, 22 nt, Human
ugcccauggcaggauuucugaa

SEQ ID NO: 551741 - RNA, 22 nt, Human
uucuucuugucugcccucacau

SEQ ID NO: 551742 - RNA, 22 nt, Human
ccucuggggguccucagagucu

SEQ ID NO: 551743 - RNA, 22 nt, Human
ucauacaucuguccuggagcuc

SEQ ID NO: 551744 - RNA, 22 nt, Human
cuuucuucaaccucauucugca

SEQ ID NO: 551745 - RNA, 22 nt, Human
agcacugugauuuauaacauuu

SEQ ID NO: 551746 - RNA, 22 nt, Human
ucucuuaauucagaggcaguua

SEQ ID NO: 551747 - RNA, 22 nt, Human
uuuacauugcauuagguauuau

SEQ ID NO: 551748 - RNA, 22 nt, Human
gggccuguguguucaggagccu

SEQ ID NO: 551749 - RNA, 22 nt, Human
uacauguaauuuucauaguaag

SEQ ID NO: 551750 - RNA, 22 nt, Human
ggaguucacugugcaggcucug

SEQ ID NO: 551751 - RNA, 22 nt, Human
ucaggaucggccuuuuuuuaag

SEQ ID NO: 551752 - RNA, 22 nt, Human
ucagagaugcagugccaccuac

SEQ ID NO: 551753 - RNA, 22 nt, Human
ucucccaggugggugccuggag

SEQ ID NO: 551754 - RNA, 22 nt, Human
auuuccaguccuaaugaucugg

SEQ ID NO: 551755 - RNA, 22 nt, Human
uccaggagagguguggggacug

SEQ ID NO: 551756 - RNA, 22 nt, Human
auuuaugauuagccuauuguug

SEQ ID NO: 551757 - RNA, 22 nt, Human
ucaaguaugacaucaaguuucu

SEQ ID NO: 551758 - RNA, 19 nt, Human
ccuuccccuucagccucug

SEQ ID NO: 551759 - RNA, 22 nt, Human
auuucacagcugucaguguuac

SEQ ID NO: 551760 - RNA, 22 nt, Human
ucccaagagggguuauuaugcc

SEQ ID NO: 551761 - RNA, 22 nt, Human
uauuacagcuuugauuaucugg

SEQ ID NO: 551762 - RNA, 22 nt, Human
gccuggagaagauggaacuagc

SEQ ID NO: 551763 - RNA, 22 nt, Human
ggcagagacaccgaaugacucu

SEQ ID NO: 551764 - RNA, 22 nt, Human
cugggcugucaguuuuguuuua

SEQ ID NO: 551765 - RNA, 22 nt, Human
augaccccuaaaauuuacuguc

SEQ ID NO: 551766 - RNA, 22 nt, Human
uuucaagucaguagcuaaucau

SEQ ID NO: 551767 - RNA, 22 nt, Human
guguccucuuauugcucuuggc

SEQ ID NO: 551768 - RNA, 18 nt, Human
ugucucugaauuccagug

SEQ ID NO: 551769 - RNA, 22 nt, Human
ggcuccugaaagacuaugggaa

SEQ ID NO: 551770 - RNA, 22 nt, Human
caguuucuacgaaggucaaccc

SEQ ID NO: 551771 - RNA, 22 nt, Human
ucagguguuagaagaaauuuca

SEQ ID NO: 551772 - RNA, 22 nt, Human
guccaggaaucaaaagauggaa

SEQ ID NO: 551773 - RNA, 22 nt, Human
uguggcagcugcugcaggagcu

SEQ ID NO: 551774 - RNA, 22 nt, Human
agccaagcaccacuggcacucg

SEQ ID NO: 551775 - RNA, 22 nt, Human
cagcaaucgggugauaugcaau

SEQ ID NO: 551776 - RNA, 22 nt, Human
gccaaaguaccuagcccucugc

SEQ ID NO: 551777 - RNA, 22 nt, Human
aggcaguguguagcuggaagag

SEQ ID NO: 551778 - RNA, 22 nt, Human
uuuaucaucuuguuuuuaaagc

SEQ ID NO: 551779 - RNA, 22 nt, Human
uucuuuugggaauuacguaugc

SEQ ID NO: 551780 - RNA, 22 nt, Human
acugccuggccuggccucacug

SEQ ID NO: 551781 - RNA, 22 nt, Human
acuucaugaacauguggccugu

SEQ ID NO: 551782 - RNA, 22 nt, Human
uaaacaucugucauguguuuau

SEQ ID NO: 551783 - RNA, 23 nt, Human
uucaacauuuauugagcguccgu

SEQ ID NO: 551784 - RNA, 22 nt, Human
cuagaaauacaggcacgugcca

SEQ ID NO: 551785 - RNA, 22 nt, Human
cucugugagggucuguacagaa

SEQ ID NO: 551786 - RNA, 18 nt, Human
gagcccugagucugcaca

SEQ ID NO: 551787 - RNA, 22 nt, Human
ucugggcuggugcucaugaauu

SEQ ID NO: 551788 - RNA, 22 nt, Human
uagcagagcgggugcgaggcgg

SEQ ID NO: 551789 - RNA, 22 nt, Human
aggacccugaggucuccuguga

SEQ ID NO: 551790 - RNA, 22 nt, Human
uuuguuagagugugggaggcug

SEQ ID NO: 551791 - RNA, 22 nt, Human
ucagcuuucuauguugcuaaac

SEQ ID NO: 551792 - RNA, 22 nt, Human
acuuggcaaguaucuauaaagu

SEQ ID NO: 551793 - RNA, 22 nt, Human
auuuuuccaauuaggauaaaga

SEQ ID NO: 551794 - RNA, 22 nt, Human
cccuccagagcuugaccugcug

SEQ ID NO: 551795 - RNA, 22 nt, Human
uggagaagauuggucaccauuc

SEQ ID NO: 551796 - RNA, 22 nt, Human
gcaacaaguguaaacaugcauu

SEQ ID NO: 551797 - RNA, 22 nt, Human
agccugcaggaugggcagcacc

SEQ ID NO: 551798 - RNA, 22 nt, Human
ccugggcucugucagaauuggg

SEQ ID NO: 551799 - RNA, 22 nt, Human
aagagucagcuucuguaugggu

SEQ ID NO: 551800 - RNA, 22 nt, Human
uacacaucucugucaguaguga

SEQ ID NO: 551801 - RNA, 22 nt, Human
ccagaggaugcuggucagccuc

SEQ ID NO: 551802 - RNA, 22 nt, Human
ucacauuuucuacuacuguacg

SEQ ID NO: 551803 - RNA, 18 nt, Human
aguuuuuaggaagaaaug

SEQ ID NO: 551804 - RNA, 19 nt, Human
aggcaggugcagagguccc

SEQ ID NO: 551805 - RNA, 22 nt, Human
cagguccuggcaucaggcaggu

SEQ ID NO: 551806 - RNA, 22 nt, Human
ugcugggcuaggguggagcucu

SEQ ID NO: 551807 - RNA, 21 nt, Human
ucacaugcccauuacuggagc

SEQ ID NO: 551808 - RNA, 22 nt, Human
cagcuguggagauggggugcau

SEQ ID NO: 551809 - RNA, 22 nt, Human
agugcacagcgugauguauugg

SEQ ID NO: 551810 - RNA, 22 nt, Human
guaugaaggcgagagcccacua

SEQ ID NO: 551811 - RNA, 22 nt, Human
uauguacacauacacuuguaau

SEQ ID NO: 551812 - RNA, 22 nt, Human
caaagacacgggaaacaacguu

SEQ ID NO: 551813 - RNA, 22 nt, Human
gaagcagaacccacuccccaac

SEQ ID NO: 551814 - RNA, 20 nt, Human
gugccuggagaagaggcugu

SEQ ID NO: 551815 - RNA, 22 nt, Human
uggggccagguggcugcagguc

SEQ ID NO: 551816 - RNA, 17 nt, Human
ucuucgggcgcuaggua

SEQ ID NO: 551817 - RNA, 22 nt, Human
aguuaaagucugaaauagagaa

SEQ ID NO: 551818 - RNA, 22 nt, Human
uucccaguauuaccuucaggaa

SEQ ID NO: 551819 - RNA, 22 nt, Human
auuucucuuagcaagacauuac

SEQ ID NO: 551820 - RNA, 22 nt, Human
cuggccuguccugacccagccu

SEQ ID NO: 551821 - RNA, 22 nt, Human
uggaaggagacugggaagugug

SEQ ID NO: 551822 - RNA, 22 nt, Human
ugggccugggucuuugcugcca

SEQ ID NO: 551823 - RNA, 18 nt, Human
uggugaaggguggaggag

SEQ ID NO: 551824 - RNA, 22 nt, Human
auguuacacauaggcauaaaug

SEQ ID NO: 551825 - RNA, 22 nt, Human
cuggccagacuacacaugugug

SEQ ID NO: 551826 - RNA, 22 nt, Human
ugugagacguguuagaacagug

SEQ ID NO: 551827 - RNA, 22 nt, Human
uccugcagcugcagaccugggg

SEQ ID NO: 551828 - RNA, 22 nt, Human
cagcuuugugcaaugcagucuc

SEQ ID NO: 551829 - RNA, 22 nt, Human
ggcugcagaggcgaucugaggu

SEQ ID NO: 551830 - RNA, 22 nt, Human
uucacagucacccuucuccaug

SEQ ID NO: 551831 - RNA, 22 nt, Human
ucuggccuauuucugucagauc

SEQ ID NO: 551832 - RNA, 22 nt, Human
uaugaagaaaccuauccucuag

SEQ ID NO: 551833 - RNA, 22 nt, Human
ggcaagcauaaccuguacagcc

SEQ ID NO: 551834 - RNA, 22 nt, Human
ucauuuuuagcgcgcaaaaguu

SEQ ID NO: 551835 - RNA, 22 nt, Human
uacagaguggugagaucuuuug

SEQ ID NO: 551836 - RNA, 22 nt, Human
ccuggaaggugaugguacagca

SEQ ID NO: 551837 - RNA, 22 nt, Human
ccugaccuaccugaagucuaca

SEQ ID NO: 551838 - RNA, 22 nt, Human
ucugcgcugccuugauccuugg

SEQ ID NO: 551839 - RNA, 22 nt, Human
ucacagaauagcacuguaagcg

SEQ ID NO: 551840 - RNA, 22 nt, Human
gggcugacaccacccaggcgca

SEQ ID NO: 551841 - RNA, 22 nt, Human
uaguuucauaugcaaaauagua

SEQ ID NO: 551842 - RNA, 22 nt, Human
uacaaguuucaaagagaucaug

SEQ ID NO: 551843 - RNA, 22 nt, Human
gcacugggaaugugagcagcug

SEQ ID NO: 551844 - RNA, 22 nt, Human
aucagaauacuaucaacaguga

SEQ ID NO: 551845 - RNA, 22 nt, Human
guugaaaguagaugcuauuugg

SEQ ID NO: 551846 - RNA, 22 nt, Human
caaaggagguaaugggugugag

SEQ ID NO: 551847 - RNA, 22 nt, Human
cacauugcagcuucuuuuggcu

SEQ ID NO: 551848 - RNA, 22 nt, Human
ucccaggaaaacacucgaggac

SEQ ID NO: 551849 - RNA, 20 nt, Human
cuuccacacaagaagcacag

SEQ ID NO: 551850 - RNA, 23 nt, Human
aguaugaauucauuguuuuaguu

SEQ ID NO: 551851 - RNA, 22 nt, Human
gcuggccugaccagccacaggc

SEQ ID NO: 551852 - RNA, 22 nt, Human
gcaccuggacagugacccuagc

SEQ ID NO: 551853 - RNA, 22 nt, Human
cuugcuuuaucugguuucucau

SEQ ID NO: 551854 - RNA, 22 nt, Human
agcacauucuugccuuaaccuc

SEQ ID NO: 551855 - RNA, 22 nt, Human
agaaugcuccagagcugaaaga

SEQ ID NO: 551856 - RNA, 23 nt, Human
uaugugcauauguguaagaauac

SEQ ID NO: 551857 - RNA, 22 nt, Human
ugggcugcccaagguggccaug

SEQ ID NO: 551858 - RNA, 22 nt, Human
uaaaguucuggugagagguaag

SEQ ID NO: 551859 - RNA, 22 nt, Human
uaacacuaagaaucuaaauuua

SEQ ID NO: 551860 - RNA, 22 nt, Human
ggaggggaugguuugacccugg

SEQ ID NO: 551861 - RNA, 22 nt, Human
acacaagugaauauuuuaagga

SEQ ID NO: 551862 - RNA, 22 nt, Human
cuuucuucaucaagugccacgu

SEQ ID NO: 551863 - RNA, 22 nt, Human
ccuagagucucucugcaggagu

SEQ ID NO: 551864 - RNA, 22 nt, Human
acauuucugcuagaauagguga

SEQ ID NO: 551865 - RNA, 22 nt, Human
uuucuucucgacaccuuauccc

SEQ ID NO: 551866 - RNA, 22 nt, Human
gaagagaagcaucaauagguaa

SEQ ID NO: 551867 - RNA, 22 nt, Human
acugagaggugauagugacauu

SEQ ID NO: 551868 - RNA, 22 nt, Human
uaugcaguguacgauguuuagu

SEQ ID NO: 551869 - RNA, 22 nt, Human
ggagacucucauugucaagcuu

SEQ ID NO: 551870 - RNA, 22 nt, Human
gaagucuggcugacgagaguua

SEQ ID NO: 551871 - RNA, 22 nt, Human
ggaaguauuuguuuuugcaucc

SEQ ID NO: 551872 - RNA, 22 nt, Human
aggcccugggcaguucuguagc

SEQ ID NO: 551873 - RNA, 22 nt, Human
ugcagaggaccauuguccugga

SEQ ID NO: 551874 - RNA, 22 nt, Human
accugaggccuccccagcagac

SEQ ID NO: 551875 - RNA, 22 nt, Human
cuggagagggagcccuggcagu

SEQ ID NO: 551876 - RNA, 22 nt, Human
agccugagccccauccagcuga

SEQ ID NO: 551877 - RNA, 22 nt, Human
uugacagcuauuuugcuuugau

SEQ ID NO: 551878 - RNA, 22 nt, Human
aauuaggcaaauuaauuucucu

SEQ ID NO: 551879 - RNA, 22 nt, Human
aaagcuggccucucaggcuuua

SEQ ID NO: 551880 - RNA, 22 nt, Human
uuaaguccuugguaauuuucuu

SEQ ID NO: 551881 - RNA, 21 nt, Human
uuauuucacauggacuuccag

SEQ ID NO: 551882 - RNA, 22 nt, Human
cagggacaugacuggucucugu

SEQ ID NO: 551883 - RNA, 20 nt, Human
gcugaggucauuaugccuca

SEQ ID NO: 551884 - RNA, 22 nt, Human
cuggccugggagcugcuagcgu

SEQ ID NO: 551885 - RNA, 22 nt, Human
agaguuaagacguacaugagug

SEQ ID NO: 551886 - RNA, 20 nt, Human
aagggcagagggaacagacu

SEQ ID NO: 551887 - RNA, 22 nt, Human
cugggagaggaaccucgagggu

SEQ ID NO: 551888 - RNA, 22 nt, Human
aggggcuggcuuaucugagagu

SEQ ID NO: 551889 - RNA, 22 nt, Human
uuccaggaauucagcucucagu

SEQ ID NO: 551890 - RNA, 20 nt, Human
uagauguuuccugucauaaa

SEQ ID NO: 551891 - RNA, 22 nt, Human
ccagggcaggagaaagacucac

SEQ ID NO: 551892 - RNA, 22 nt, Human
uauuucuguaacucagggucug

SEQ ID NO: 551893 - RNA, 22 nt, Human
cagucccaugagcccagaacau

SEQ ID NO: 551894 - RNA, 22 nt, Human
gaggaguguauuccacaccacu

SEQ ID NO: 551895 - RNA, 22 nt, Human
uggcuagcccuuguggggagag

SEQ ID NO: 551896 - RNA, 22 nt, Human
cugauuccaaagccaaagcuau

SEQ ID NO: 551897 - RNA, 22 nt, Human
ugucagagagcaggcaguagaa

SEQ ID NO: 551898 - RNA, 22 nt, Human
ggguggaggagaacaggcccca

SEQ ID NO: 551899 - RNA, 21 nt, Human
agcuccaggcuccugggguuc

SEQ ID NO: 551900 - RNA, 22 nt, Human
uccauugucuuugguccuagcc

SEQ ID NO: 551901 - RNA, 19 nt, Human
gggagcaggaaagcugugg

SEQ ID NO: 551902 - RNA, 23 nt, Human
acuuuucaauuagcuaugcuuaa

SEQ ID NO: 551903 - RNA, 22 nt, Human
aguguuugucccguuagaaaug

SEQ ID NO: 551904 - RNA, 18 nt, Human
aaaaugcaggcgacaugg

SEQ ID NO: 551905 - RNA, 22 nt, Human
caaaaugugagucccaccucaa

SEQ ID NO: 551906 - RNA, 22 nt, Human
gcagagucagguccaaggacug

SEQ ID NO: 551907 - RNA, 22 nt, Human
uugacaagaaucguugccuugg

SEQ ID NO: 551908 - RNA, 20 nt, Human
uccuuuggccuuagagcugu

SEQ ID NO: 551909 - RNA, 22 nt, Human
uaaaggcuuuuacaggagugca

SEQ ID NO: 551910 - RNA, 22 nt, Human
aucugggaauggaagccuucug

SEQ ID NO: 551911 - RNA, 22 nt, Human
gcucuggaagcaucugagagga

SEQ ID NO: 551912 - RNA, 18 nt, Human
uauauuucacacauauuc

SEQ ID NO: 551913 - RNA, 22 nt, Human
auccuugagccaaugacugauu

SEQ ID NO: 551914 - RNA, 22 nt, Human
aggugcagcugguggagucugg

SEQ ID NO: 551915 - RNA, 22 nt, Human
caaggaaaaagcgagcucgggg

SEQ ID NO: 551916 - RNA, 22 nt, Human
uaacauuuaaauuuuucacaua

SEQ ID NO: 551917 - RNA, 22 nt, Human
acuuagaacaggcagaauucca

SEQ ID NO: 551918 - RNA, 22 nt, Human
ugagagcacacagaaauauuuu

SEQ ID NO: 551919 - RNA, 19 nt, Human
agagucugugcucuuccua

SEQ ID NO: 551920 - RNA, 22 nt, Human
ccaucccuccuccaccagcuag

SEQ ID NO: 551921 - RNA, 22 nt, Human
uaagauaauaaguaugucuaug

SEQ ID NO: 551922 - RNA, 22 nt, Human
augagcuguaagguggcuuccu

SEQ ID NO: 551923 - RNA, 22 nt, Human
aagagcuggagcugcuacagga

SEQ ID NO: 551924 - RNA, 22 nt, Human
cuucuugcaauuuucaucuuau

SEQ ID NO: 551925 - RNA, 22 nt, Human
aagcugcccaagacugaagcau

SEQ ID NO: 551926 - RNA, 22 nt, Human
cagcuccccaugguuccugaag

SEQ ID NO: 551927 - RNA, 22 nt, Human
ugcccugugccagacuuccugg

SEQ ID NO: 551928 - RNA, 22 nt, Human
agguucccaggaucugucuggg

SEQ ID NO: 551929 - RNA, 22 nt, Human
aggcugcuucagcugcagggag

SEQ ID NO: 551930 - RNA, 16 nt, Human
aaagaaacaggugucc

SEQ ID NO: 551931 - RNA, 21 nt, Human
cacuggaauuuucugugacau

SEQ ID NO: 551932 - RNA, 18 nt, Human
gguggcaggucagaugcc

SEQ ID NO: 551933 - RNA, 22 nt, Human
ugaaucaaagcugaaguuuuca

SEQ ID NO: 551934 - RNA, 22 nt, Human
uuuaugaaccacucuacaccuu

SEQ ID NO: 551935 - RNA, 22 nt, Human
ccuccugggacaggcuggcaca

SEQ ID NO: 551936 - RNA, 22 nt, Human
ucugcccacagccuccugucca

SEQ ID NO: 551937 - RNA, 22 nt, Human
ugcuuuauucagucucugccau

SEQ ID NO: 551938 - RNA, 22 nt, Human
ugcaggaguccaaucaggagac

SEQ ID NO: 551939 - RNA, 22 nt, Human
ucuucaaaauugauuggagaag

SEQ ID NO: 551940 - RNA, 22 nt, Human
aaggcccuaauagagcacauau

SEQ ID NO: 551941 - RNA, 21 nt, Human
ggagcugcaggagccgaaggc

SEQ ID NO: 551942 - RNA, 22 nt, Human
gguguagcucugugucccacug

SEQ ID NO: 551943 - RNA, 22 nt, Human
acauucuguuuccccaaagaga

SEQ ID NO: 551944 - RNA, 22 nt, Human
uuguaacaaagacacuccaaaa

SEQ ID NO: 551945 - RNA, 22 nt, Human
gaagcccagcaaacugugauca

SEQ ID NO: 551946 - RNA, 22 nt, Human
gagugugguaugcucugaggcu

SEQ ID NO: 551947 - RNA, 19 nt, Human
ugagcaugcgagcugagaa

SEQ ID NO: 551948 - RNA, 22 nt, Human
cccccaggcucugacacaggag

SEQ ID NO: 551949 - RNA, 22 nt, Human
gcagcugcaggcaggcuugcug

SEQ ID NO: 551950 - RNA, 22 nt, Human
cagagcagaagcgguccucaca

SEQ ID NO: 551951 - RNA, 22 nt, Human
aaugcaaagaguugcuuaucaa

SEQ ID NO: 551952 - RNA, 22 nt, Human
uccagccaugcaugacaaucac

SEQ ID NO: 551953 - RNA, 20 nt, Human
acaguggaaauugaugucug

SEQ ID NO: 551954 - RNA, 19 nt, Human
uacauuuguguacacuugu

SEQ ID NO: 551955 - RNA, 22 nt, Human
auacagaauucacuacaguuuc

SEQ ID NO: 551956 - RNA, 22 nt, Human
ccaagauaagagacaagauuua

SEQ ID NO: 551957 - RNA, 20 nt, Human
ugaggcucagagagguugag

SEQ ID NO: 551958 - RNA, 22 nt, Human
uugcaggggaaggagcagagcu

SEQ ID NO: 551959 - RNA, 22 nt, Human
ugcagggaacuuggacagcuag

SEQ ID NO: 551960 - RNA, 22 nt, Human
ugugugugacaaccuaguucag

SEQ ID NO: 551961 - RNA, 22 nt, Human
cccucagucuggcugggaagac

SEQ ID NO: 551962 - RNA, 22 nt, Human
cacacacuggagcaaggagaug

SEQ ID NO: 551963 - RNA, 22 nt, Human
ucagaggcuucuggccagucug

SEQ ID NO: 551964 - RNA, 22 nt, Human
agcucccagucuccucuccaug

SEQ ID NO: 551965 - RNA, 22 nt, Human
gguuucaacuucaaccucucca

SEQ ID NO: 551966 - RNA, 22 nt, Human
ccacugucagaggggcugugcc

SEQ ID NO: 551967 - RNA, 22 nt, Human
augaaggcuguguggagccccc

SEQ ID NO: 551968 - RNA, 22 nt, Human
ugcuucuguuucauugaucuua

SEQ ID NO: 551969 - RNA, 22 nt, Human
gccuggcacucaaucaucugcu

SEQ ID NO: 551970 - RNA, 22 nt, Human
auuauuagugauguuguuacug

SEQ ID NO: 551971 - RNA, 22 nt, Human
cagauggcagggcagcucugca

SEQ ID NO: 551972 - RNA, 22 nt, Human
cuguguccugucuccuaaggug

SEQ ID NO: 551973 - RNA, 22 nt, Human
cauuucaaugccuucaacauag

SEQ ID NO: 551974 - RNA, 22 nt, Human
aggccucucuccuuggcuugua

SEQ ID NO: 551975 - RNA, 22 nt, Human
cugcuguguuccuccugcaucu

SEQ ID NO: 551976 - RNA, 22 nt, Human
auuaaauuggaucugcauaguu

SEQ ID NO: 551977 - RNA, 22 nt, Human
ucaaugauaguacaaucagccu

SEQ ID NO: 551978 - RNA, 22 nt, Human
ucuggcuuucauuuguuuaaag

SEQ ID NO: 551979 - RNA, 22 nt, Human
accuggccauccagcuggcauc

SEQ ID NO: 551980 - RNA, 22 nt, Human
gccaccagccccaugcgcugug

SEQ ID NO: 551981 - RNA, 22 nt, Human
uucuucaauuauuggaaagaaa

SEQ ID NO: 551982 - RNA, 22 nt, Human
agccaacuuagaagaaauuuga

SEQ ID NO: 551983 - RNA, 22 nt, Human
aacuauuuuuggagcuaacucu

SEQ ID NO: 551984 - RNA, 22 nt, Human
uuagcauucucauuugcauaaa

SEQ ID NO: 551985 - RNA, 22 nt, Human
gggcuagaaauucugcagugga

SEQ ID NO: 551986 - RNA, 22 nt, Human
ugccaggccaauucuauuugac

SEQ ID NO: 551987 - RNA, 22 nt, Human
ugggaccucucuugagagagca

SEQ ID NO: 551988 - RNA, 22 nt, Human
uccaggccacauggauggcgau

SEQ ID NO: 551989 - RNA, 22 nt, Human
uggcugaguucuccaggaguag

SEQ ID NO: 551990 - RNA, 22 nt, Human
cugucccucaucaccucugggu

SEQ ID NO: 551991 - RNA, 22 nt, Human
ugcagaagaccuuccagggcug

SEQ ID NO: 551992 - RNA, 22 nt, Human
acauguuagaaaugcagaaucu

SEQ ID NO: 551993 - RNA, 22 nt, Human
uuaacaauagaguuucuucagg

SEQ ID NO: 551994 - RNA, 22 nt, Human
uaaaaguuuuaguuguacauaa

SEQ ID NO: 551995 - RNA, 20 nt, Human
ucaggcuccgcauuaacuua

SEQ ID NO: 551996 - RNA, 22 nt, Human
ccuggcacaugcaguacucaag

SEQ ID NO: 551997 - RNA, 22 nt, Human
uguaaggacaacaggagaaaaa

SEQ ID NO: 551998 - RNA, 22 nt, Human
cccaaggccucuccuuggcuug

SEQ ID NO: 551999 - RNA, 22 nt, Human
auguguuuguaccuuuaaauau

SEQ ID NO: 552000 - RNA, 22 nt, Human
gagagaggccuccauguacuga

SEQ ID NO: 552001 - RNA, 23 nt, Human
cauaugaauuuuagaggcaguuu

SEQ ID NO: 552002 - RNA, 22 nt, Human
ugggcacauaguuuuaugguca

SEQ ID NO: 552003 - RNA, 22 nt, Human
gucauaaaaggaccaccuauug

SEQ ID NO: 552004 - RNA, 22 nt, Human
caaugugugcuuacaggccagu

SEQ ID NO: 552005 - RNA, 22 nt, Human
acacucuucucacagucaguuu

SEQ ID NO: 552006 - RNA, 22 nt, Human
cuguccuguggaccugaggacg

SEQ ID NO: 552007 - RNA, 22 nt, Human
aguagaaaguugcaggaggaau

SEQ ID NO: 552008 - RNA, 22 nt, Human
ccuggggagccgccugagcccc

SEQ ID NO: 552009 - RNA, 22 nt, Human
agcagagaagacacaggcuuca

SEQ ID NO: 552010 - RNA, 22 nt, Human
aacaaaugauaccaguucucaa

SEQ ID NO: 552011 - RNA, 22 nt, Human
ugagccugaguucaaggcugca

SEQ ID NO: 552012 - RNA, 22 nt, Human
gggaugucguggguggcagcug

SEQ ID NO: 552013 - RNA, 22 nt, Human
aagagcaguguuuuacucagcu

SEQ ID NO: 552014 - RNA, 22 nt, Human
cauuuucaugaguuucuguuca

SEQ ID NO: 552015 - RNA, 22 nt, Human
caggcagagaggagcauuuaau

SEQ ID NO: 552016 - RNA, 22 nt, Human
ucauguuuuaaugccuuuuucu

SEQ ID NO: 552017 - RNA, 22 nt, Human
aauguguguauuucuaggcgag

SEQ ID NO: 552018 - RNA, 22 nt, Human
ccagggccaguaagauuggcau

SEQ ID NO: 552019 - RNA, 22 nt, Human
acauucuugaagugaaguuuau

SEQ ID NO: 552020 - RNA, 20 nt, Human
uuucacaaugaacaugucuc

SEQ ID NO: 552021 - RNA, 22 nt, Human
uuuaaauaggacuccugggggu

SEQ ID NO: 552022 - RNA, 22 nt, Human
aggccucuguuccccauguuuu

SEQ ID NO: 552023 - RNA, 22 nt, Human
ucaggcucugccaccuagauua

SEQ ID NO: 552024 - RNA, 22 nt, Human
ugagcuggcacuuuuccuggga

SEQ ID NO: 552025 - RNA, 22 nt, Human
uuuagaggucuguuucacauca

SEQ ID NO: 552026 - RNA, 22 nt, Human
cugagcgcaugguugcugggga

SEQ ID NO: 552027 - RNA, 20 nt, Human
acagauggcaguuauuacau

SEQ ID NO: 552028 - RNA, 23 nt, Human
aacaccaaggcucagagagauaa

SEQ ID NO: 552029 - RNA, 22 nt, Human
cagggcucugccuugagggaug

SEQ ID NO: 552030 - RNA, 22 nt, Human
ucugaaggugcuagagaaagcu

SEQ ID NO: 552031 - RNA, 22 nt, Human
aagagcaucaaugacucgcagu

SEQ ID NO: 552032 - RNA, 22 nt, Human
uauuuagaugcauuuggauugc

SEQ ID NO: 552033 - RNA, 22 nt, Human
uaugaagcugauaaucacugau

SEQ ID NO: 552034 - RNA, 22 nt, Human
ugaguagcggcuauguguaacu

SEQ ID NO: 552035 - RNA, 22 nt, Human
gaggcucagagacuuuaaguuu

SEQ ID NO: 552036 - RNA, 22 nt, Human
uggaagcagugauucuugucug

SEQ ID NO: 552037 - RNA, 22 nt, Human
ucaccaggauuccuaucaguag

SEQ ID NO: 552038 - RNA, 22 nt, Human
caauacaucaggucaaaaugug

SEQ ID NO: 552039 - RNA, 22 nt, Human
accagaguuggaauaauuuuga

SEQ ID NO: 552040 - RNA, 21 nt, Human
ugauuuccaucuuaaaauaaa

SEQ ID NO: 552041 - RNA, 16 nt, Human
gcacacacaucaauga

SEQ ID NO: 552042 - RNA, 22 nt, Human
uaugacaugugaucucaagagg

SEQ ID NO: 552043 - RNA, 23 nt, Human
gacagagugagaccuugucuuac

SEQ ID NO: 552044 - RNA, 22 nt, Human
aagcuagauuggcauucauuuc

SEQ ID NO: 552045 - RNA, 22 nt, Human
acauguuuaaguuuaaugaaaa

SEQ ID NO: 552046 - RNA, 22 nt, Human
gagguggcugggaguagggaau

SEQ ID NO: 552047 - RNA, 22 nt, Human
ugagcuuccucccugcauccau

SEQ ID NO: 552048 - RNA, 22 nt, Human
agggaguguaaauggugcucag

SEQ ID NO: 552049 - RNA, 22 nt, Human
cuggcagcagcuucuggaucga

SEQ ID NO: 552050 - RNA, 22 nt, Human
uggcuggcgccgggcuagccac

SEQ ID NO: 552051 - RNA, 19 nt, Human
auguaugaggucuucugcu

SEQ ID NO: 552052 - RNA, 18 nt, Human
ugagagaauguucaugcu

SEQ ID NO: 552053 - RNA, 22 nt, Human
gcaacagcccagguucugugug

SEQ ID NO: 552054 - RNA, 22 nt, Human
cuuuacauuaauuucuacugau

SEQ ID NO: 552055 - RNA, 22 nt, Human
gcuuuguguagaaggaggaugg

SEQ ID NO: 552056 - RNA, 22 nt, Human
gcccucagcuccuggacacaug

SEQ ID NO: 552057 - RNA, 22 nt, Human
ggcacagggagccgcaguugca

SEQ ID NO: 552058 - RNA, 22 nt, Human
caugaaaaauuuacuguuaaca

SEQ ID NO: 552059 - RNA, 22 nt, Human
ugucugugcccaaggcucccgg

SEQ ID NO: 552060 - RNA, 22 nt, Human
accugcagguguuuccacacuu

SEQ ID NO: 552061 - RNA, 22 nt, Human
ggcugagcggacuggggucccu

SEQ ID NO: 552062 - RNA, 22 nt, Human
guccaaguacauguguguacau

SEQ ID NO: 552063 - RNA, 22 nt, Human
aggugccuaucuggucucugca

SEQ ID NO: 552064 - RNA, 22 nt, Human
caggaaggggcucacucuggcc

SEQ ID NO: 552065 - RNA, 22 nt, Human
cagcuggggcagccacgugcgg

SEQ ID NO: 552066 - RNA, 19 nt, Human
ggccaccucucuucccagg

SEQ ID NO: 552067 - RNA, 22 nt, Human
accagagcuggcagaguaucaa

SEQ ID NO: 552068 - RNA, 21 nt, Human
agaaggcaccagcaaggacug

SEQ ID NO: 552069 - RNA, 22 nt, Human
ugguggccuugauggcaucugc

SEQ ID NO: 552070 - RNA, 22 nt, Human
gcaccugggguacacagcuaca

SEQ ID NO: 552071 - RNA, 23 nt, Human
gcuucugccauuugcuagcugug

SEQ ID NO: 552072 - RNA, 22 nt, Human
cugcugcauuccucuuuaugag

SEQ ID NO: 552073 - RNA, 22 nt, Human
uucuccagcucaucagggaggg

SEQ ID NO: 552074 - RNA, 19 nt, Human
agauuauugcacauucaug

SEQ ID NO: 552075 - RNA, 22 nt, Human
aggaccaacauagcagcagugg

SEQ ID NO: 552076 - RNA, 20 nt, Human
ucucagcauaagaacccuuc

SEQ ID NO: 552077 - RNA, 22 nt, Human
agauggagaaugacaauuaagg

SEQ ID NO: 552078 - RNA, 23 nt, Human
uuuuaauuuggacauaagaagau

SEQ ID NO: 552079 - RNA, 22 nt, Human
aaucuggcauuugagaguagga

SEQ ID NO: 552080 - RNA, 22 nt, Human
ugggcuucugauguugagugcu

SEQ ID NO: 552081 - RNA, 22 nt, Human
aggguauaaagagcaagcagaa

SEQ ID NO: 552082 - RNA, 22 nt, Human
agagccaggacugugucucacu

SEQ ID NO: 552083 - RNA, 22 nt, Human
uuccauauuguacucuuuggag

SEQ ID NO: 552084 - RNA, 22 nt, Human
gaacccaguccaggugcagccu

SEQ ID NO: 552085 - RNA, 22 nt, Human
aggcugaggcgggaggaucacu

SEQ ID NO: 552086 - RNA, 22 nt, Human
ggggccuuuucugaauguggaa

SEQ ID NO: 552087 - RNA, 22 nt, Human
gagcuuggugaugccuccuggu

SEQ ID NO: 552088 - RNA, 22 nt, Human
acaaggcuguuggucacaaacc

SEQ ID NO: 552089 - RNA, 22 nt, Human
uaagucauaagucaugauguua

SEQ ID NO: 552090 - RNA, 22 nt, Human
uccuucagggcugaccacaggc

SEQ ID NO: 552091 - RNA, 22 nt, Human
accuucauauucucugauaccu

SEQ ID NO: 552092 - RNA, 22 nt, Human
agaaguuuguuauguaaacaaa

SEQ ID NO: 552093 - RNA, 22 nt, Human
ggccagggggcuucagacucca

SEQ ID NO: 552094 - RNA, 22 nt, Human
cugccugggccggccacccucu

SEQ ID NO: 552095 - RNA, 21 nt, Human
gagccuucccucugcccuuuc

SEQ ID NO: 552096 - RNA, 22 nt, Human
ucucacaggugcacguggcugu

SEQ ID NO: 552097 - RNA, 22 nt, Human
ucucugaggacuugggguugcc

SEQ ID NO: 552098 - RNA, 22 nt, Human
gagucgagcagaaagccgucgg

SEQ ID NO: 552099 - RNA, 22 nt, Human
gcacccagagggcagggucucc

SEQ ID NO: 552100 - RNA, 22 nt, Human
ccaagcagucugcuaggaguuu

SEQ ID NO: 552101 - RNA, 22 nt, Human
ucuguucauuugccucggcucu

SEQ ID NO: 552102 - RNA, 22 nt, Human
uugcaccauuucacuuccauua

SEQ ID NO: 552103 - RNA, 22 nt, Human
ggcaaaaaguucccaucagugu

SEQ ID NO: 552104 - RNA, 22 nt, Human
auuaaucauuucugcauuaucu

SEQ ID NO: 552105 - RNA, 22 nt, Human
guuuacauugcuguuugugucu

SEQ ID NO: 552106 - RNA, 22 nt, Human
acacuuaaucuuacugaggauc

SEQ ID NO: 552107 - RNA, 22 nt, Human
ucaggagauggucuuuauaggc

SEQ ID NO: 552108 - RNA, 22 nt, Human
uggaaagacauucagccgcugg

SEQ ID NO: 552109 - RNA, 22 nt, Human
ucucuggcugauauuccucugc

SEQ ID NO: 552110 - RNA, 22 nt, Human
ccagcuuucauaucaugaggua

SEQ ID NO: 552111 - RNA, 22 nt, Human
gcagguggaagcagcagacuca

SEQ ID NO: 552112 - RNA, 21 nt, Human
uacagcaacggagguuuucua

SEQ ID NO: 552113 - RNA, 22 nt, Human
agggacugagcuaggaucuagu

SEQ ID NO: 552114 - RNA, 22 nt, Human
ucacagcuaagcuuggucacug

SEQ ID NO: 552115 - RNA, 18 nt, Human
cuucaguggcugcucugc

SEQ ID NO: 552116 - RNA, 22 nt, Human
agacaauggaccaagcaccuuc

SEQ ID NO: 552117 - RNA, 22 nt, Human
ccagcuuucugggugguuucug

SEQ ID NO: 552118 - RNA, 22 nt, Human
aagaaagauaagguuugcuugg

SEQ ID NO: 552119 - RNA, 22 nt, Human
augcugaauaguucacucuucu

SEQ ID NO: 552120 - RNA, 22 nt, Human
aaugugagccaaugcccguggg

SEQ ID NO: 552121 - RNA, 22 nt, Human
aaguaaauguuggagcucaaau

SEQ ID NO: 552122 - RNA, 22 nt, Human
ugagccagauaagggcucacgc

SEQ ID NO: 552123 - RNA, 22 nt, Human
augggcugaggaagcuccugag

SEQ ID NO: 552124 - RNA, 22 nt, Human
ccagggucucugcugccugaga

SEQ ID NO: 552125 - RNA, 22 nt, Human
aggaggcccuagagcucuagag

SEQ ID NO: 552126 - RNA, 22 nt, Human
aggcucagagagcuguguccau

SEQ ID NO: 552127 - RNA, 22 nt, Human
gccugggagggcagcagugugg

SEQ ID NO: 552128 - RNA, 22 nt, Human
agugugcugcuuaaacaguugu

SEQ ID NO: 552129 - RNA, 22 nt, Human
acagguggagugguuagcaggc

SEQ ID NO: 552130 - RNA, 22 nt, Human
cagcucugugggagcguaugug

SEQ ID NO: 552131 - RNA, 22 nt, Human
gcuuuuucaaaugaaagcuggu

SEQ ID NO: 552132 - RNA, 18 nt, Human
acaggccucaguccugca

SEQ ID NO: 552133 - RNA, 21 nt, Human
guggccugauuaugaaugggu

SEQ ID NO: 552134 - RNA, 22 nt, Human
aggcugucaucuuugcaggcag

SEQ ID NO: 552135 - RNA, 22 nt, Human
acagaacugggaaaugcacaua

SEQ ID NO: 552136 - RNA, 22 nt, Human
agaguccagaaaacagugugcu

SEQ ID NO: 552137 - RNA, 22 nt, Human
auagaaauggcagcuggugcua

SEQ ID NO: 552138 - RNA, 22 nt, Human
caagggcagcagccucaagcgg

SEQ ID NO: 552139 - RNA, 22 nt, Human
gaggagcacaugaggcugaggg

SEQ ID NO: 552140 - RNA, 22 nt, Human
guuuuucugugagcgguaaagg

SEQ ID NO: 552141 - RNA, 22 nt, Human
auugaauagaugcauuauacua

SEQ ID NO: 552142 - RNA, 22 nt, Human
aggagucauugagagggguccu

SEQ ID NO: 552143 - RNA, 22 nt, Human
guacauucagcuuagcacuucu

SEQ ID NO: 552144 - RNA, 22 nt, Human
aagguacagaaauuaacaagga

SEQ ID NO: 552145 - RNA, 22 nt, Human
ccaggcugcucacaagcugccc

SEQ ID NO: 552146 - RNA, 22 nt, Human
ccuggcacgaagggcugagguu

SEQ ID NO: 552147 - RNA, 22 nt, Human
caagaugggcaccccagcaccu

SEQ ID NO: 552148 - RNA, 23 nt, Human
uucaaagaucuucugaaaucugu

SEQ ID NO: 552149 - RNA, 21 nt, Human
ugaaugaggaggauggcauuu

SEQ ID NO: 552150 - RNA, 22 nt, Human
aggccucaggaagguaaagaag

SEQ ID NO: 552151 - RNA, 22 nt, Human
caugagcugcugggagccuguc

SEQ ID NO: 552152 - RNA, 22 nt, Human
gggaugucacugugccuggcac

SEQ ID NO: 552153 - RNA, 22 nt, Human
cagccagguaugggcgugcggg

SEQ ID NO: 552154 - RNA, 22 nt, Human
agggaggcaggaaaguugucug

SEQ ID NO: 552155 - RNA, 22 nt, Human
uguuuuauuucuccaagaggga

SEQ ID NO: 552156 - RNA, 18 nt, Human
uuguuuuaagacucuguc

SEQ ID NO: 552157 - RNA, 20 nt, Human
uuucagugguuugugccuag

SEQ ID NO: 552158 - RNA, 22 nt, Human
ucuucaugaaugaaucuuugac

SEQ ID NO: 552159 - RNA, 22 nt, Human
ucuuaacaagcuccucagugcu

SEQ ID NO: 552160 - RNA, 22 nt, Human
ccaggacccugcaaacccuguu

SEQ ID NO: 552161 - RNA, 22 nt, Human
ucagaggacuaccuucuccagu

SEQ ID NO: 552162 - RNA, 22 nt, Human
uagcagaaccagcagucaauuu

SEQ ID NO: 552163 - RNA, 22 nt, Human
uguauuuucuucuggaagcuua

SEQ ID NO: 552164 - RNA, 22 nt, Human
auauuucuggggguguguuucu

SEQ ID NO: 552165 - RNA, 22 nt, Human
aggagggugauccgggcugguc

SEQ ID NO: 552166 - RNA, 20 nt, Human
ugcccagcaagagugcaguu

SEQ ID NO: 552167 - RNA, 22 nt, Human
aggcagcauuugaauccagguc

SEQ ID NO: 552168 - RNA, 22 nt, Human
uuaaaggcgauaaggcaguguu

SEQ ID NO: 552169 - RNA, 22 nt, Human
ggugcccaccugucuuccugga

SEQ ID NO: 552170 - RNA, 22 nt, Human
aacagaaugcaggggaugcugc

SEQ ID NO: 552171 - RNA, 20 nt, Human
uggagcugugguaaggagca

SEQ ID NO: 552172 - RNA, 22 nt, Human
cauaggaaaagcauucuucuug

SEQ ID NO: 552173 - RNA, 22 nt, Human
gaacacagcagggauaaccacu

SEQ ID NO: 552174 - RNA, 22 nt, Human
gcaggugguccccguggagugg

SEQ ID NO: 552175 - RNA, 21 nt, Human
uggcugcuggcccucucucca

SEQ ID NO: 552176 - RNA, 22 nt, Human
ccugccugcagaaaguaucucc

SEQ ID NO: 552177 - RNA, 22 nt, Human
ggccuuggugccauggccaguu

SEQ ID NO: 552178 - RNA, 22 nt, Human
caugaaugcuggguucauguaa

SEQ ID NO: 552179 - RNA, 22 nt, Human
ugcagggaaagggcacugggcu

SEQ ID NO: 552180 - RNA, 22 nt, Human
aucuguuguuuguuugcuaaag

SEQ ID NO: 552181 - RNA, 22 nt, Human
ucugggcacugcugagccugua

SEQ ID NO: 552182 - RNA, 22 nt, Human
uggcaagaauauuggaccagaa

SEQ ID NO: 552183 - RNA, 17 nt, Human
ccagagaguaguuagga

SEQ ID NO: 552184 - RNA, 22 nt, Human
uguaaacaugcugaggcuggag

SEQ ID NO: 552185 - RNA, 22 nt, Human
aagcuuuagagaugaguuccuu

SEQ ID NO: 552186 - RNA, 19 nt, Human
acuguucuaacuugcagcu

SEQ ID NO: 552187 - RNA, 22 nt, Human
acagucuugcuguauggucagg

SEQ ID NO: 552188 - RNA, 19 nt, Human
auuuuucuuccucugugca

SEQ ID NO: 552189 - RNA, 19 nt, Human
ucaguggaugaacauguuu

SEQ ID NO: 552190 - RNA, 22 nt, Human
aauguguuuucacugaagauuc

SEQ ID NO: 552191 - RNA, 22 nt, Human
auauuuguugaguucuuaugau

SEQ ID NO: 552192 - RNA, 22 nt, Human
agcccuucaaccugccuacucc

SEQ ID NO: 552193 - RNA, 22 nt, Human
cuguucuuaucgucuuaauauc

SEQ ID NO: 552194 - RNA, 22 nt, Human
uaacuguaauauaaauaugagu

SEQ ID NO: 552195 - RNA, 22 nt, Human
ccaaaucaggggccacaagcau

SEQ ID NO: 552196 - RNA, 22 nt, Human
gccucugcaacuccgccuuggu

SEQ ID NO: 552197 - RNA, 21 nt, Human
ccagcagcucaaggaucucuu

SEQ ID NO: 552198 - RNA, 22 nt, Human
ucugagagucucugaggcagau

SEQ ID NO: 552199 - RNA, 22 nt, Human
cuuccuguugucacagucugcg

SEQ ID NO: 552200 - RNA, 22 nt, Human
uaaauguggagacucaggaguc

SEQ ID NO: 552201 - RNA, 22 nt, Human
gcagcccaauggacugagacag

SEQ ID NO: 552202 - RNA, 22 nt, Human
cagcuggcccuuugguagccuu

SEQ ID NO: 552203 - RNA, 22 nt, Human
gcagggccagggcucaggcugu

SEQ ID NO: 552204 - RNA, 22 nt, Human
aagacauuuauuugaaucaauu

SEQ ID NO: 552205 - RNA, 22 nt, Human
ucuuugcaaauguuauuaucuu

SEQ ID NO: 552206 - RNA, 22 nt, Human
caaaugugacuuuugggcuucu

SEQ ID NO: 552207 - RNA, 20 nt, Human
uuggcucaugcaacaccuac

SEQ ID NO: 552208 - RNA, 22 nt, Human
ugaaagaugcucaaugaauggu

SEQ ID NO: 552209 - RNA, 22 nt, Human
ugcuggcccuggcucagggaac

SEQ ID NO: 552210 - RNA, 22 nt, Human
gccucccuguagaggccagccu

SEQ ID NO: 552211 - RNA, 22 nt, Human
cgcagguguguuuucaggacua

SEQ ID NO: 552212 - RNA, 22 nt, Human
aagccucuggggccucaucugu

SEQ ID NO: 552213 - RNA, 22 nt, Human
acuucacauuagcuaaaaggga

SEQ ID NO: 552214 - RNA, 22 nt, Human
agcagccagaaauccagaggug

SEQ ID NO: 552215 - RNA, 22 nt, Human
uuccaagugcccauauuucauc

SEQ ID NO: 552216 - RNA, 22 nt, Human
cccauuuaucccaagguuacuc

SEQ ID NO: 552217 - RNA, 22 nt, Human
aacaguaaagacagaauuuauc

SEQ ID NO: 552218 - RNA, 22 nt, Human
uagcugccaaaagggugggcua

SEQ ID NO: 552219 - RNA, 22 nt, Human
cauguuauuuauccauuaaaca

SEQ ID NO: 552220 - RNA, 22 nt, Human
cggcuggggcuguccccaugac

SEQ ID NO: 552221 - RNA, 22 nt, Human
ggcagcugugaagugccucaca

SEQ ID NO: 552222 - RNA, 21 nt, Human
uuagcuuucuagaaucuuugu

SEQ ID NO: 552223 - RNA, 20 nt, Human
gggaguggugguagccugug

SEQ ID NO: 552224 - RNA, 22 nt, Human
cuuuucauuguuuguacaugca

SEQ ID NO: 552225 - RNA, 22 nt, Human
uauuguacugaggaauaaagcu

SEQ ID NO: 552226 - RNA, 22 nt, Human
ugggcagacugagcccuguccc

SEQ ID NO: 552227 - RNA, 22 nt, Human
ggcagcaaauauugucagcugu

SEQ ID NO: 552228 - RNA, 22 nt, Human
auaugucgcuacaucauuagau

SEQ ID NO: 552229 - RNA, 22 nt, Human
gucacuguuuccuauuauauuu

SEQ ID NO: 552230 - RNA, 22 nt, Human
uugcaaaugugaguuuagacug

SEQ ID NO: 552231 - RNA, 22 nt, Human
cauccugcggggagcagagggc

SEQ ID NO: 552232 - RNA, 22 nt, Human
ucuauauuccagauacagauua

SEQ ID NO: 552233 - RNA, 22 nt, Human
gaaagagaggggcugagaugca

SEQ ID NO: 552234 - RNA, 22 nt, Human
ucugagugggaacucucaugac

SEQ ID NO: 552235 - RNA, 22 nt, Human
gggagccuugggagugccagcc

SEQ ID NO: 552236 - RNA, 22 nt, Human
uucaagaagguacauuuacauc

SEQ ID NO: 552237 - RNA, 22 nt, Human
uacacagauaugugaucaauca

SEQ ID NO: 552238 - RNA, 22 nt, Human
ugggaaaguguugaggugucuu

SEQ ID NO: 552239 - RNA, 22 nt, Human
guuuuauaugucucugcugaca

SEQ ID NO: 552240 - RNA, 22 nt, Human
ccuguguguaggccaggggagu

SEQ ID NO: 552241 - RNA, 22 nt, Human
gcauucaucuuccuccaugcag

SEQ ID NO: 552242 - RNA, 22 nt, Human
uacuguucaugccuucauaaag

SEQ ID NO: 552243 - RNA, 22 nt, Human
gcagggcaguaagagcuagagu

SEQ ID NO: 552244 - RNA, 22 nt, Human
ucacugaauacuugucucaucc

SEQ ID NO: 552245 - RNA, 19 nt, Human
cagcaauaaugccagaugg

SEQ ID NO: 552246 - RNA, 22 nt, Human
uuugaaaguguuuacuugggaa

SEQ ID NO: 552247 - RNA, 22 nt, Human
ggaaagagcuaaaagggugaga

SEQ ID NO: 552248 - RNA, 22 nt, Human
gaaacuuuuaaaccucaugagu

SEQ ID NO: 552249 - RNA, 22 nt, Human
ucaaaugcuucuacuccuaaga

SEQ ID NO: 552250 - RNA, 21 nt, Human
cauuagggcagaagcaggaag

SEQ ID NO: 552251 - RNA, 22 nt, Human
aauguugccccaggacaaagga

SEQ ID NO: 552252 - RNA, 22 nt, Human
cucucccccacagcagccuucu

SEQ ID NO: 552253 - RNA, 22 nt, Human
ccuuuucuggccaccaagcgcu

SEQ ID NO: 552254 - RNA, 22 nt, Human
caguacuuguccucagguguua

SEQ ID NO: 552255 - RNA, 22 nt, Human
acagauggccauauuacuauau

SEQ ID NO: 552256 - RNA, 22 nt, Human
agcagggcuucugugccugugc

SEQ ID NO: 552257 - RNA, 23 nt, Human
ugagcagcuaaaggugaugcggg

SEQ ID NO: 552258 - RNA, 22 nt, Human
cuugaaagucagcagaguggau

SEQ ID NO: 552259 - RNA, 22 nt, Human
ugggcccaagagagucuccaac

SEQ ID NO: 552260 - RNA, 22 nt, Human
cccagggaaugacucuggccuu

SEQ ID NO: 552261 - RNA, 22 nt, Human
cacugcuuucacaguuuguucc

SEQ ID NO: 552262 - RNA, 22 nt, Human
ccaggcugcagucaaggggcau

SEQ ID NO: 552263 - RNA, 22 nt, Human
aaugggagguaguaugggaggu

SEQ ID NO: 552264 - RNA, 21 nt, Human
ucuggagcccuaagcugagaa

SEQ ID NO: 552265 - RNA, 22 nt, Human
uccaggcuaauuuugcauuguu

SEQ ID NO: 552266 - RNA, 22 nt, Human
uucauacaugagacuagaugca

SEQ ID NO: 552267 - RNA, 22 nt, Human
acaaagaucuugcuuuccuacu

SEQ ID NO: 552268 - RNA, 22 nt, Human
agcuggaggggccagcaggugu

SEQ ID NO: 552269 - RNA, 22 nt, Human
ugcacagcgggugucugucagg

SEQ ID NO: 552270 - RNA, 22 nt, Human
agggcagcuggaagguggcuuc

SEQ ID NO: 552271 - RNA, 22 nt, Human
uuuuccuacugauaaacaguua

SEQ ID NO: 552272 - RNA, 22 nt, Human
cagagcagugaggaguugugua

SEQ ID NO: 552273 - RNA, 22 nt, Human
agagacugcgugucagcgcugg

SEQ ID NO: 552274 - RNA, 22 nt, Human
uuccucuuucucugugcuaugu

SEQ ID NO: 552275 - RNA, 22 nt, Human
ugggccacaagccaugggacca

SEQ ID NO: 552276 - RNA, 22 nt, Human
aagagagaacucccuucgccag

SEQ ID NO: 552277 - RNA, 22 nt, Human
uuacaaagaguguucuuuucca

SEQ ID NO: 552278 - RNA, 22 nt, Human
acacugugagcugaagggcugc

SEQ ID NO: 552279 - RNA, 22 nt, Human
uguggggcagcuagccggccug

SEQ ID NO: 552280 - RNA, 22 nt, Human
uguaugcuuguguauaauauaa

SEQ ID NO: 552281 - RNA, 22 nt, Human
agaggaggcucugggaucgucc

SEQ ID NO: 552282 - RNA, 22 nt, Human
accucugcucaagaccccuccg

SEQ ID NO: 552283 - RNA, 18 nt, Human
aagcugggaaggagacag

SEQ ID NO: 552284 - RNA, 22 nt, Human
aaccccgcucaggcugggugag

SEQ ID NO: 552285 - RNA, 22 nt, Human
gcuggccuugugucugaggaag

SEQ ID NO: 552286 - RNA, 22 nt, Human
agauacaugucaagagacuuau

SEQ ID NO: 552287 - RNA, 22 nt, Human
cuggggggcuacugacagagga

SEQ ID NO: 552288 - RNA, 22 nt, Human
cccaguuguugccggcucugga

SEQ ID NO: 552289 - RNA, 19 nt, Human
uuacaucugcaacacuggu

SEQ ID NO: 552290 - RNA, 22 nt, Human
aauuucacagcuggucuauggg

SEQ ID NO: 552291 - RNA, 16 nt, Human
caggaaccugucuggc

SEQ ID NO: 552292 - RNA, 22 nt, Human
uucagcuauaacauugagacuu

SEQ ID NO: 552293 - RNA, 22 nt, Human
cuggagcauuuucugcuucugc

SEQ ID NO: 552294 - RNA, 22 nt, Human
gccagggagucugggccacaga

SEQ ID NO: 552295 - RNA, 22 nt, Human
acagggcauuuccucuaugugu

SEQ ID NO: 552296 - RNA, 22 nt, Human
aagugugggaaguagguggcga

SEQ ID NO: 552297 - RNA, 18 nt, Human
gguggccuugacuucucu

SEQ ID NO: 552298 - RNA, 21 nt, Human
gagcucucaggcaagaagcag

SEQ ID NO: 552299 - RNA, 22 nt, Human
agcaggagacauggggguggug

SEQ ID NO: 552300 - RNA, 22 nt, Human
ucagaaauuuucucaguaguuc

SEQ ID NO: 552301 - RNA, 18 nt, Human
ucaagacaucaugaaaua

SEQ ID NO: 552302 - RNA, 22 nt, Human
acuuucucaaaucagacuuuaa

SEQ ID NO: 552303 - RNA, 22 nt, Human
agagcaggcauaaagcuuugaa

SEQ ID NO: 552304 - RNA, 22 nt, Human
ggagaguggauuccagcuguau

SEQ ID NO: 552305 - RNA, 22 nt, Human
cuucacuguuugguucacagca

SEQ ID NO: 552306 - RNA, 22 nt, Human
uucacaguggcugugccauuug

SEQ ID NO: 552307 - RNA, 22 nt, Human
uuucaaacauagaucugaauau

SEQ ID NO: 552308 - RNA, 22 nt, Human
ugcuucugcauucaauguugga

SEQ ID NO: 552309 - RNA, 22 nt, Human
uccaagggcagccauagaacuu

SEQ ID NO: 552310 - RNA, 22 nt, Human
agcuguucccucacugcaguca

SEQ ID NO: 552311 - RNA, 22 nt, Human
aaagacuuggcuuaugauuugc

SEQ ID NO: 552312 - RNA, 22 nt, Human
gggcugaccccaccccucacuc

SEQ ID NO: 552313 - RNA, 22 nt, Human
cuucuucagcacaauauugaug

SEQ ID NO: 552314 - RNA, 22 nt, Human
acauaauggacaauaaugcauc

SEQ ID NO: 552315 - RNA, 22 nt, Human
agugcagcaacaaacugcccuc

SEQ ID NO: 552316 - RNA, 22 nt, Human
uggccugggccugccggugcaa

SEQ ID NO: 552317 - RNA, 22 nt, Human
gggccuccggggugagcugugg

SEQ ID NO: 552318 - RNA, 22 nt, Human
ucagagugcagcgggaggcugg

SEQ ID NO: 552319 - RNA, 22 nt, Human
caucaaacaaaugcuuuuagau

SEQ ID NO: 552320 - RNA, 22 nt, Human
cagggcuguggcuuugugcugu

SEQ ID NO: 552321 - RNA, 20 nt, Human
caccacagaauuggggacag

SEQ ID NO: 552322 - RNA, 22 nt, Human
gagugaugucuguagugaagaa

SEQ ID NO: 552323 - RNA, 22 nt, Human
gaguucuucuauauaguaugag

SEQ ID NO: 552324 - RNA, 22 nt, Human
aguagcaauguuugagaagcac

SEQ ID NO: 552325 - RNA, 19 nt, Human
aggaaggaaccugagucug

SEQ ID NO: 552326 - RNA, 22 nt, Human
ggaucauuaacacauccaucac

SEQ ID NO: 552327 - RNA, 22 nt, Human
cuguucaauuuguuucaguuau

SEQ ID NO: 552328 - RNA, 22 nt, Human
acagcuugcaauggcuuucaac

SEQ ID NO: 552329 - RNA, 22 nt, Human
gccuggagccucagcaaggagg

SEQ ID NO: 552330 - RNA, 22 nt, Human
ccucccugcgcuccugcggcgg

SEQ ID NO: 552331 - RNA, 22 nt, Human
ucuuuacauaguguggacuacu

SEQ ID NO: 552332 - RNA, 22 nt, Human
uguaacauauagcauguucuug

SEQ ID NO: 552333 - RNA, 22 nt, Human
aaucucuuuggcucaaggaucc

SEQ ID NO: 552334 - RNA, 17 nt, Human
uuccucucacauuuuuu

SEQ ID NO: 552335 - RNA, 22 nt, Human
acuguuuucuaaagaacagaug

SEQ ID NO: 552336 - RNA, 22 nt, Human
uuuccucacacagaagaucuug

SEQ ID NO: 552337 - RNA, 22 nt, Human
acagcuuuguguuaaugggaag

SEQ ID NO: 552338 - RNA, 20 nt, Human
ucucccaggcucagggaaga

SEQ ID NO: 552339 - RNA, 22 nt, Human
cccagcuugcaaauggguugcu

SEQ ID NO: 552340 - RNA, 22 nt, Human
gcagugaaucuggcaagaauuu

SEQ ID NO: 552341 - RNA, 22 nt, Human
cugucccagauguucucagcac

SEQ ID NO: 552342 - RNA, 22 nt, Human
cggcagagcggcgagccccucc

SEQ ID NO: 552343 - RNA, 22 nt, Human
uggugaagucagcggagcccgg

SEQ ID NO: 552344 - RNA, 22 nt, Human
aagcugccagauucagucugcu

SEQ ID NO: 552345 - RNA, 22 nt, Human
uucuuugaguuaguacagucca

SEQ ID NO: 552346 - RNA, 22 nt, Human
cuuauuuugcugaugacccagg

SEQ ID NO: 552347 - RNA, 22 nt, Human
uuggagagcaguaaaccacacu

SEQ ID NO: 552348 - RNA, 22 nt, Human
uccugcagcugaagcucaugug

SEQ ID NO: 552349 - RNA, 22 nt, Human
agcugccagcaucccggaaggg

SEQ ID NO: 552350 - RNA, 22 nt, Human
uuccauaauaggcuuaagugaa

SEQ ID NO: 552351 - RNA, 22 nt, Human
ucagggcaucaucaugaauaua

SEQ ID NO: 552352 - RNA, 22 nt, Human
cacauggggcgcugcauuggcc

SEQ ID NO: 552353 - RNA, 22 nt, Human
cgaaaucagcaucuugaggcaa

SEQ ID NO: 552354 - RNA, 19 nt, Human
cuggcagccugucuguguc

SEQ ID NO: 552355 - RNA, 22 nt, Human
aaguguuucaauaauuuggacc

SEQ ID NO: 552356 - RNA, 23 nt, Human
acugggcuuaugaggaggcuugu

SEQ ID NO: 552357 - RNA, 22 nt, Human
ucagauggguuuugaaggaugu

SEQ ID NO: 552358 - RNA, 22 nt, Human
ugcugggcacugucuagguacu

SEQ ID NO: 552359 - RNA, 22 nt, Human
uucaagaucuuccaaaggauac

SEQ ID NO: 552360 - RNA, 22 nt, Human
cugaaacuggaguccuuauauc

SEQ ID NO: 552361 - RNA, 22 nt, Human
augcagguugggcaaguguggg

SEQ ID NO: 552362 - RNA, 22 nt, Human
aaugugguuaacccauuuaaga

SEQ ID NO: 552363 - RNA, 22 nt, Human
cuggcccuucucuugcuuccug

SEQ ID NO: 552364 - RNA, 22 nt, Human
ggccugcucuggcuguggucag

SEQ ID NO: 552365 - RNA, 22 nt, Human
aucaacaugugagagcaccagu

SEQ ID NO: 552366 - RNA, 17 nt, Human
uagagcugguucaggag

SEQ ID NO: 552367 - RNA, 21 nt, Human
agcaauuucauuugguuuaac

SEQ ID NO: 552368 - RNA, 22 nt, Human
uaggcugagcuaagagagcuua

SEQ ID NO: 552369 - RNA, 22 nt, Human
cacagcagagggagccauugaa

SEQ ID NO: 552370 - RNA, 22 nt, Human
aacuagaaaucacuacagguau

SEQ ID NO: 552371 - RNA, 22 nt, Human
ugauuacacagcaguaauuuca

SEQ ID NO: 552372 - RNA, 19 nt, Human
uuuaguaugagcuccaggg

SEQ ID NO: 552373 - RNA, 22 nt, Human
agggagguccaucccugcagag

SEQ ID NO: 552374 - RNA, 22 nt, Human
gccucugcccauccaccaucag

SEQ ID NO: 552375 - RNA, 21 nt, Human
uguauacacacauauauguac

SEQ ID NO: 552376 - RNA, 22 nt, Human
cugggcucagcaggccaaggcc

SEQ ID NO: 552377 - RNA, 22 nt, Human
aagagcaacuuggaaacacuca

SEQ ID NO: 552378 - RNA, 22 nt, Human
acagaagauaacugggaccaga

SEQ ID NO: 552379 - RNA, 22 nt, Human
aaggcugauuagacugauagcu

SEQ ID NO: 552380 - RNA, 22 nt, Human
gaggcagaaguugcagugagca

SEQ ID NO: 552381 - RNA, 22 nt, Human
ugcuucuguucuuucaccuacg

SEQ ID NO: 552382 - RNA, 22 nt, Human
aagaugcacaauguggcaauua

SEQ ID NO: 552383 - RNA, 22 nt, Human
aaucuuuuaggggauccugagg

SEQ ID NO: 552384 - RNA, 22 nt, Human
gcauuacaggaauuuguuacug

SEQ ID NO: 552385 - RNA, 22 nt, Human
caugaagcccucaucagucuga

SEQ ID NO: 552386 - RNA, 22 nt, Human
cauaccuuucucaagcacaugu

SEQ ID NO: 552387 - RNA, 22 nt, Human
ccaggaugacccccacuuuccu

SEQ ID NO: 552388 - RNA, 22 nt, Human
gggccuggggugacguaccccu

SEQ ID NO: 552389 - RNA, 22 nt, Human
gcuggagccuucugcucuguug

SEQ ID NO: 552390 - RNA, 22 nt, Human
auccaaagcccuaaguuaacug

SEQ ID NO: 552391 - RNA, 22 nt, Human
auagauguacguauguaaauca

SEQ ID NO: 552392 - RNA, 22 nt, Human
cccuggaggcggauguugcagu

SEQ ID NO: 552393 - RNA, 22 nt, Human
gcucugaggcugggagcacucu

SEQ ID NO: 552394 - RNA, 22 nt, Human
uggcaggguuggccaccuuacc

SEQ ID NO: 552395 - RNA, 18 nt, Human
caguuacaccuucauuca

SEQ ID NO: 552396 - RNA, 22 nt, Human
caugacaauauguucuuucauu

SEQ ID NO: 552397 - RNA, 22 nt, Human
cugagggucaacuugauuguau

SEQ ID NO: 552398 - RNA, 22 nt, Human
gcaaaacagucgaugccuccca

SEQ ID NO: 552399 - RNA, 22 nt, Human
uggagcaggacugcugcccuca

SEQ ID NO: 552400 - RNA, 22 nt, Human
ugagccuggccugcagagacca

SEQ ID NO: 552401 - RNA, 22 nt, Human
uucuuuuuaucuucccauaaga

SEQ ID NO: 552402 - RNA, 22 nt, Human
gaaaugucucuggauuugcuuu

SEQ ID NO: 552403 - RNA, 22 nt, Human
cauaugaaguucaacagagaug

SEQ ID NO: 552404 - RNA, 22 nt, Human
cucagugaauuggaggauggcc

SEQ ID NO: 552405 - RNA, 22 nt, Human
uggagaagucaaagugaacagg

SEQ ID NO: 552406 - RNA, 17 nt, Human
gcuucuggagcuucugu

SEQ ID NO: 552407 - RNA, 22 nt, Human
augucuuuuaugauuacgggau

SEQ ID NO: 552408 - RNA, 22 nt, Human
ugggacuugccucgagggcugc

SEQ ID NO: 552409 - RNA, 22 nt, Human
ugacaauacagagagagcaaaa

SEQ ID NO: 552410 - RNA, 22 nt, Human
uuaacagacauauauauuugua

SEQ ID NO: 552411 - RNA, 22 nt, Human
aaauguacaacauccauauaua

SEQ ID NO: 552412 - RNA, 22 nt, Human
ucaaaucagcaagcagcuuccc

SEQ ID NO: 552413 - RNA, 22 nt, Human
ggccucgcggcuucugguggcu

SEQ ID NO: 552414 - RNA, 22 nt, Human
uuucuaaguguguuucauagga

SEQ ID NO: 552415 - RNA, 22 nt, Human
ucagaauuguggagaaagggga

SEQ ID NO: 552416 - RNA, 22 nt, Human
ugucccuggaacuauggcucca

SEQ ID NO: 552417 - RNA, 22 nt, Human
ugcaggugaaaauuaugaggau

SEQ ID NO: 552418 - RNA, 20 nt, Human
ggcugugcccuuccguggcc

SEQ ID NO: 552419 - RNA, 22 nt, Human
aaguugagaugucauaggagac

SEQ ID NO: 552420 - RNA, 22 nt, Human
acaaggaggucuggggggcccu

SEQ ID NO: 552421 - RNA, 22 nt, Human
caucaguguggcaguucacugu

SEQ ID NO: 552422 - RNA, 21 nt, Human
gggugcuguggucaugcagga

SEQ ID NO: 552423 - RNA, 22 nt, Human
auuucaguguugguuagcaagc

SEQ ID NO: 552424 - RNA, 22 nt, Human
augcacagcagugaguucagug

SEQ ID NO: 552425 - RNA, 22 nt, Human
cagaggccauauuucuucacuc

SEQ ID NO: 552426 - RNA, 22 nt, Human
aaucaguuagaaggaagagaau

SEQ ID NO: 552427 - RNA, 22 nt, Human
uuaauaaacaggugcagcugaa

SEQ ID NO: 552428 - RNA, 22 nt, Human
cccucugcucaggugcauaggc

SEQ ID NO: 552429 - RNA, 18 nt, Human
agaugaaagcaaaugaca

SEQ ID NO: 552430 - RNA, 22 nt, Human
uguguggcaagcuguaugcuag

SEQ ID NO: 552431 - RNA, 22 nt, Human
gagaaguuucugguuugcauag

SEQ ID NO: 552432 - RNA, 22 nt, Human
cuauuuuucuguacccuaauuu

SEQ ID NO: 552433 - RNA, 22 nt, Human
guaaaauugcaauuacuuuugc

SEQ ID NO: 552434 - RNA, 22 nt, Human
acuuuaaaacugaucaucagag

SEQ ID NO: 552435 - RNA, 22 nt, Human
ugaguccaagagccagugggaa

SEQ ID NO: 552436 - RNA, 22 nt, Human
cuggcucacuagcccugcccug

SEQ ID NO: 552437 - RNA, 22 nt, Human
uuucuucuguuuguaguuacac

SEQ ID NO: 552438 - RNA, 22 nt, Human
augucaaaucaguuuuaucaga

SEQ ID NO: 552439 - RNA, 22 nt, Human
caggugccucaggaugagacaa

SEQ ID NO: 552440 - RNA, 20 nt, Human
uggccuuggggagcucacac

SEQ ID NO: 552441 - RNA, 22 nt, Human
uggcugaaggaagauucuucua

SEQ ID NO: 552442 - RNA, 22 nt, Human
ucucugaagauauuuauuauua

SEQ ID NO: 552443 - RNA, 22 nt, Human
agaggcaccaucuggaacagcc

SEQ ID NO: 552444 - RNA, 22 nt, Human
agaauaaaauagucugaagaug

SEQ ID NO: 552445 - RNA, 22 nt, Human
agacccagaaagcagcugcauu

SEQ ID NO: 552446 - RNA, 22 nt, Human
uaacagaaguuguucauugugg

SEQ ID NO: 552447 - RNA, 22 nt, Human
ugcccugcccaucuacccuguc

SEQ ID NO: 552448 - RNA, 22 nt, Human
caguucuggaguuucauucuuu

SEQ ID NO: 552449 - RNA, 22 nt, Human
gccaagcucuuuaaaggccaaa

SEQ ID NO: 552450 - RNA, 22 nt, Human
gucugggcaagggagauggcgc

SEQ ID NO: 552451 - RNA, 22 nt, Human
gccaggaggcuuaacuggacag

SEQ ID NO: 552452 - RNA, 22 nt, Human
uagggcuauaagagaauaagac

SEQ ID NO: 552453 - RNA, 21 nt, Human
cccuguguuccacagcagaca

SEQ ID NO: 552454 - RNA, 22 nt, Human
augcccaggcccauaccuagau

SEQ ID NO: 552455 - RNA, 22 nt, Human
uaugaaacauucauacaaauaa

SEQ ID NO: 552456 - RNA, 22 nt, Human
gggauggggggaagcguccaug

SEQ ID NO: 552457 - RNA, 22 nt, Human
gcugcuuccuuuccugcugacc

SEQ ID NO: 552458 - RNA, 22 nt, Human
gcuuuucauagauaaaauucua

SEQ ID NO: 552459 - RNA, 22 nt, Human
gagaaagauuguccuucagggg

SEQ ID NO: 552460 - RNA, 22 nt, Human
cacaauaaauguuugcugauga

SEQ ID NO: 552461 - RNA, 22 nt, Human
acaguguguucugggaccucca

SEQ ID NO: 552462 - RNA, 22 nt, Human
ccagcugcccaagaggcauccu

SEQ ID NO: 552463 - RNA, 22 nt, Human
ucauuugugugagugauuugac

SEQ ID NO: 552464 - RNA, 22 nt, Human
ugcagugauuaaaguguuaaau

SEQ ID NO: 552465 - RNA, 22 nt, Human
gggcagcacagacagugaaggc

SEQ ID NO: 552466 - RNA, 22 nt, Human
aggccaaguagcuagcauugaa

SEQ ID NO: 552467 - RNA, 22 nt, Human
caguggugaagagcaggggcuc

SEQ ID NO: 552468 - RNA, 22 nt, Human
gccagcuguucagacauucuuu

SEQ ID NO: 552469 - RNA, 22 nt, Human
gcagggcacacaagaaugauaa

SEQ ID NO: 552470 - RNA, 22 nt, Human
ccugucagaugaaguaauugug

SEQ ID NO: 552471 - RNA, 22 nt, Human
gaaacacaugcagcuccauaga

SEQ ID NO: 552472 - RNA, 22 nt, Human
aagcagaaguugaucuaccaua

SEQ ID NO: 552473 - RNA, 22 nt, Human
uugcccagagcugccuguuaca

SEQ ID NO: 552474 - RNA, 22 nt, Human
ugaagcugugggcaguggagcc

SEQ ID NO: 552475 - RNA, 22 nt, Human
gcccugccugccgguguggguc

SEQ ID NO: 552476 - RNA, 21 nt, Human
auaucuucuucaaaccacuca

SEQ ID NO: 552477 - RNA, 22 nt, Human
ccucugggugggaggccgggcg

SEQ ID NO: 552478 - RNA, 17 nt, Human
acucaggaucugggagu

SEQ ID NO: 552479 - RNA, 22 nt, Human
ucuguucagacacuuuacaugu

SEQ ID NO: 552480 - RNA, 22 nt, Human
uuauaaagguuugugcauauuu

SEQ ID NO: 552481 - RNA, 22 nt, Human
ccuccugcacuugcuuuccuuc

SEQ ID NO: 552482 - RNA, 22 nt, Human
cucugcccccagcuggugcuug

SEQ ID NO: 552483 - RNA, 22 nt, Human
acccuggagcuuuucuggcccu

SEQ ID NO: 552484 - RNA, 22 nt, Human
cagacagagcucacaagucuuu

SEQ ID NO: 552485 - RNA, 21 nt, Human
acaguuuauuagaguaagugc

SEQ ID NO: 552486 - RNA, 22 nt, Human
aaaaaugcuuggacuuaauaaa

SEQ ID NO: 552487 - RNA, 20 nt, Human
ugccaggcacggagugcaug

SEQ ID NO: 552488 - RNA, 22 nt, Human
gaaauacaaaugccuagauccu

SEQ ID NO: 552489 - RNA, 22 nt, Human
uuucacagaggaggaagcugag

SEQ ID NO: 552490 - RNA, 22 nt, Human
guuauguaugggggccuuauga

SEQ ID NO: 552491 - RNA, 22 nt, Human
uuucacaggccuuuuguagccc

SEQ ID NO: 552492 - RNA, 22 nt, Human
gcagagcacccugcagugguau

SEQ ID NO: 552493 - RNA, 22 nt, Human
ggagccuguggcugcuugaagc

SEQ ID NO: 552494 - RNA, 22 nt, Human
gggcugcugccaccagguggau

SEQ ID NO: 552495 - RNA, 22 nt, Human
caggguacagaguuuucuaaac

SEQ ID NO: 552496 - RNA, 17 nt, Human
gcccuggagccaggcua

SEQ ID NO: 552497 - RNA, 22 nt, Human
ggagcugcacgcucugaagccu

SEQ ID NO: 552498 - RNA, 21 nt, Human
ugggggugaggccuaggaauc

SEQ ID NO: 552499 - RNA, 22 nt, Human
cugggccugagcucugaagagu

SEQ ID NO: 552500 - RNA, 22 nt, Human
agccucugcuggcccuggcacu

SEQ ID NO: 552501 - RNA, 21 nt, Human
uuucuaaguaacuggcagcau

SEQ ID NO: 552502 - RNA, 22 nt, Human
ugugacaugugucaucuuuucu

SEQ ID NO: 552503 - RNA, 22 nt, Human
cugaaggauguguggugggagu

SEQ ID NO: 552504 - RNA, 22 nt, Human
ccaggauggggagcagauagaa

SEQ ID NO: 552505 - RNA, 22 nt, Human
uguggcaggcaagauguacaga

SEQ ID NO: 552506 - RNA, 22 nt, Human
cagcugugaauugucuuaucua

SEQ ID NO: 552507 - RNA, 22 nt, Human
cauuuauugguuaggccagcag

SEQ ID NO: 552508 - RNA, 22 nt, Human
uggcccucugcaagauucugga

SEQ ID NO: 552509 - RNA, 22 nt, Human
gcuggcuugacagaggccuggg

SEQ ID NO: 552510 - RNA, 22 nt, Human
ucacagggauggaauagaaaua

SEQ ID NO: 552511 - RNA, 22 nt, Human
cuggaguguaaagagcauagaa

SEQ ID NO: 552512 - RNA, 22 nt, Human
gagaaggcuggucuuaagucga

SEQ ID NO: 552513 - RNA, 22 nt, Human
uuggcacuuugaaugagcucag

SEQ ID NO: 552514 - RNA, 17 nt, Human
aauagcugcucagagag

SEQ ID NO: 552515 - RNA, 22 nt, Human
cugcagcugugagugcuggaug

SEQ ID NO: 552516 - RNA, 22 nt, Human
uugaaauauuugggaguguuug

SEQ ID NO: 552517 - RNA, 22 nt, Human
ucauuuaauagcuuuugucuuu

SEQ ID NO: 552518 - RNA, 20 nt, Human
uaaaugcaucuguucaacug

SEQ ID NO: 552519 - RNA, 22 nt, Human
ucacugcaaccucugccuuccg

SEQ ID NO: 552520 - RNA, 22 nt, Human
gagaagguggaccugaaggagc

SEQ ID NO: 552521 - RNA, 22 nt, Human
aaaggaaugagcuucuguuagg

SEQ ID NO: 552522 - RNA, 22 nt, Human
gggccggagcugggucccgcgc

SEQ ID NO: 552523 - RNA, 22 nt, Human
gccagaagacuggagucagcug

SEQ ID NO: 552524 - RNA, 19 nt, Human
auuugaaagcugugcuugc

SEQ ID NO: 552525 - RNA, 22 nt, Human
aucacaauguacguuaaaaugu

SEQ ID NO: 552526 - RNA, 22 nt, Human
ccacacugaaccucagugucuu

SEQ ID NO: 552527 - RNA, 22 nt, Human
ucuggggaugaggaccuagaug

SEQ ID NO: 552528 - RNA, 22 nt, Human
uuuccuguugccaucaagaaug

SEQ ID NO: 552529 - RNA, 22 nt, Human
aagcagagccaccagcuuugga

SEQ ID NO: 552530 - RNA, 22 nt, Human
aaaugucagaagcuuuacuucu

SEQ ID NO: 552531 - RNA, 23 nt, Human
auggaaauagcaugugucauuua

SEQ ID NO: 552532 - RNA, 22 nt, Human
acaacaguagccuuuacaaggc

SEQ ID NO: 552533 - RNA, 22 nt, Human
ggcagcagcaagguuggagcug

SEQ ID NO: 552534 - RNA, 22 nt, Human
ccugucugcaugaucccugcca

SEQ ID NO: 552535 - RNA, 22 nt, Human
ucaauguucaaguaugacaaug

SEQ ID NO: 552536 - RNA, 22 nt, Human
aacaugaugugaagcaugaacu

SEQ ID NO: 552537 - RNA, 22 nt, Human
agcaugcugguguucauggcag

SEQ ID NO: 552538 - RNA, 22 nt, Human
agagacaccgcgcaucauggcu

SEQ ID NO: 552539 - RNA, 22 nt, Human
caaagugcuaggauuacaggcc

SEQ ID NO: 552540 - RNA, 22 nt, Human
gccuggugcuaugagggccagc

SEQ ID NO: 552541 - RNA, 18 nt, Human
agcagggcauuuugccau

SEQ ID NO: 552542 - RNA, 22 nt, Human
aggguggcaguuacuggagcaa

SEQ ID NO: 552543 - RNA, 22 nt, Human
aggugaggauagguggccaagg

SEQ ID NO: 552544 - RNA, 22 nt, Human
auauuugugguaaagguaagaa

SEQ ID NO: 552545 - RNA, 22 nt, Human
uuccaggaggcacugacagagg

SEQ ID NO: 552546 - RNA, 22 nt, Human
ccugggagagucuguggucucc

SEQ ID NO: 552547 - RNA, 22 nt, Human
ggucauuguucuuuucugugau

SEQ ID NO: 552548 - RNA, 22 nt, Human
ucuggaugacagaauggucaua

SEQ ID NO: 552549 - RNA, 22 nt, Human
augcccugugacucuccuggac

SEQ ID NO: 552550 - RNA, 22 nt, Human
cacugcagcaccaugcagggcu

SEQ ID NO: 552551 - RNA, 22 nt, Human
uugcccugaagaacgucccaga

SEQ ID NO: 552552 - RNA, 22 nt, Human
uuaagacauucagauauuucua

SEQ ID NO: 552553 - RNA, 22 nt, Human
gaaauauuucucuugagccccu

SEQ ID NO: 552554 - RNA, 22 nt, Human
ccauccuaucugaccuacuugu

SEQ ID NO: 552555 - RNA, 18 nt, Human
aggaaagacgaagagggc

SEQ ID NO: 552556 - RNA, 22 nt, Human
gcuguguccucacacagccuuu

SEQ ID NO: 552557 - RNA, 22 nt, Human
ugggagcaggugugcuagggaa

SEQ ID NO: 552558 - RNA, 22 nt, Human
aguugacauccauaacaggaag

SEQ ID NO: 552559 - RNA, 22 nt, Human
uaagaacauaaauucauacggg

SEQ ID NO: 552560 - RNA, 22 nt, Human
gcuauuuauuaaaauagugaag

SEQ ID NO: 552561 - RNA, 22 nt, Human
aggcugucucaccucaggaggg

SEQ ID NO: 552562 - RNA, 21 nt, Human
uggcugagccaggugugugga

SEQ ID NO: 552563 - RNA, 22 nt, Human
gcugggagugggcaagaugaga

SEQ ID NO: 552564 - RNA, 22 nt, Human
aaaaaaucagaucuuugguuaa

SEQ ID NO: 552565 - RNA, 22 nt, Human
aguggaccagaagacugaagcu

SEQ ID NO: 552566 - RNA, 22 nt, Human
gugucuggaacgggugguacuc

SEQ ID NO: 552567 - RNA, 22 nt, Human
ugcccugccaagacugaguggu

SEQ ID NO: 552568 - RNA, 22 nt, Human
cacauuucugugagucaauauu

SEQ ID NO: 552569 - RNA, 22 nt, Human
cuucugggccauggccuuccuc

SEQ ID NO: 552570 - RNA, 22 nt, Human
ugaacacauaaggcuuuccugu

SEQ ID NO: 552571 - RNA, 20 nt, Human
uggcuccucuuggcuguggc

SEQ ID NO: 552572 - RNA, 22 nt, Human
ucauaaaaugcuccugauauug

SEQ ID NO: 552573 - RNA, 22 nt, Human
aaaggcuggauucagagaggug

SEQ ID NO: 552574 - RNA, 22 nt, Human
ugcaggugguccuuccucugcu

SEQ ID NO: 552575 - RNA, 22 nt, Human
gaauucuaccagggcaagaggg

SEQ ID NO: 552576 - RNA, 22 nt, Human
cuacauuuuaauaagcugcuua

SEQ ID NO: 552577 - RNA, 22 nt, Human
ggagggcucaauugacuccuga

SEQ ID NO: 552578 - RNA, 22 nt, Human
cuucaaacccagauuaaaugca

SEQ ID NO: 552579 - RNA, 22 nt, Human
gggaguguugagcgcccugcca

SEQ ID NO: 552580 - RNA, 22 nt, Human
uuaagcuagugaagucccucaa

SEQ ID NO: 552581 - RNA, 22 nt, Human
ugaaaucaugaacaagguaggu

SEQ ID NO: 552582 - RNA, 22 nt, Human
aaaggaggaauggagagaugcu

SEQ ID NO: 552583 - RNA, 22 nt, Human
cagaggcugccagccaugugca

SEQ ID NO: 552584 - RNA, 22 nt, Human
gcagggacaacugugcaccuga

SEQ ID NO: 552585 - RNA, 22 nt, Human
gcaguaggagaagaggaugcuu

SEQ ID NO: 552586 - RNA, 22 nt, Human
gccaggcuggaaagaacagaca

SEQ ID NO: 552587 - RNA, 22 nt, Human
cucuuccuacagucugcuaugc

SEQ ID NO: 552588 - RNA, 22 nt, Human
cuggccugugggcugucuccgg

SEQ ID NO: 552589 - RNA, 22 nt, Human
uuaaauucauuccaacuuuuga

SEQ ID NO: 552590 - RNA, 22 nt, Human
agaacuuacauuauagagcugu

SEQ ID NO: 552591 - RNA, 22 nt, Human
ugaauacaggaaaauauacuga

SEQ ID NO: 552592 - RNA, 22 nt, Human
gcaggaguuaggcgucguggau

SEQ ID NO: 552593 - RNA, 22 nt, Human
ucagaaagcugauucuugauac

SEQ ID NO: 552594 - RNA, 22 nt, Human
ggaaggaagugaccaggauauc

SEQ ID NO: 552595 - RNA, 22 nt, Human
ugcagcagggcccaggcacaga

SEQ ID NO: 552596 - RNA, 22 nt, Human
agcucuggcuaagcugauaaau

SEQ ID NO: 552597 - RNA, 18 nt, Human
uaggcugggggcuguagu

SEQ ID NO: 552598 - RNA, 22 nt, Human
cugagagaugauauagcuuaau

SEQ ID NO: 552599 - RNA, 22 nt, Human
uggccucaagucugagggccuu

SEQ ID NO: 552600 - RNA, 23 nt, Human
uguugaaguaacuguuacauaga

SEQ ID NO: 552601 - RNA, 22 nt, Human
cccauuuagauaacaguucaaa

SEQ ID NO: 552602 - RNA, 21 nt, Human
agucccaggggugagugaugu

SEQ ID NO: 552603 - RNA, 20 nt, Human
gcugccuguuucuguaagua

SEQ ID NO: 552604 - RNA, 22 nt, Human
ggcagaggugaaguucacaagg

SEQ ID NO: 552605 - RNA, 22 nt, Human
gggaccuggggacuccuuguuc

SEQ ID NO: 552606 - RNA, 22 nt, Human
aucaaaguccaucagaagguag

SEQ ID NO: 552607 - RNA, 22 nt, Human
uugaagcauuguggcuuguauu

SEQ ID NO: 552608 - RNA, 22 nt, Human
acccagcuguuucccgugucau

SEQ ID NO: 552609 - RNA, 22 nt, Human
uauugcaagcaauuccaaaagg

SEQ ID NO: 552610 - RNA, 22 nt, Human
guccucugaaguugugcaaugc

SEQ ID NO: 552611 - RNA, 22 nt, Human
ugaaauuauucuuaccaaggug

SEQ ID NO: 552612 - RNA, 22 nt, Human
aaacacauuuuaggaaaaucua

SEQ ID NO: 552613 - RNA, 22 nt, Human
cagaggcaaaagagguggaggu

SEQ ID NO: 552614 - RNA, 22 nt, Human
ugcuccaggcaagcugagaguu

SEQ ID NO: 552615 - RNA, 22 nt, Human
uucagcuacccuuggcuuaaua

SEQ ID NO: 552616 - RNA, 22 nt, Human
uaagcauucaaugcuuagcacu

SEQ ID NO: 552617 - RNA, 22 nt, Human
uggacaacauagugagaccuca

SEQ ID NO: 552618 - RNA, 22 nt, Human
gcucccugacucaguuccugag

SEQ ID NO: 552619 - RNA, 22 nt, Human
ggcaugggccgaggugccuccu

SEQ ID NO: 552620 - RNA, 22 nt, Human
aaggcagcccuggcucagccug

SEQ ID NO: 552621 - RNA, 22 nt, Human
gcacacagcuagauuaccauuc

SEQ ID NO: 552622 - RNA, 22 nt, Human
agucaaacaaauguuuauugag

SEQ ID NO: 552623 - RNA, 22 nt, Human
gcugggccuuccgauucucaag

SEQ ID NO: 552624 - RNA, 22 nt, Human
cagcaggcccaggugcugguga

SEQ ID NO: 552625 - RNA, 22 nt, Human
uuugacaggacuaacauauggc

SEQ ID NO: 552626 - RNA, 22 nt, Human
agggccugugaauucucccugc

SEQ ID NO: 552627 - RNA, 22 nt, Human
cuucagagugcagaagauuggg

SEQ ID NO: 552628 - RNA, 22 nt, Human
cagacagaaggcuccuugaggu

SEQ ID NO: 552629 - RNA, 22 nt, Human
aauguauucucuuuauaagaua

SEQ ID NO: 552630 - RNA, 22 nt, Human
gcugugcccauauucugcugac

SEQ ID NO: 552631 - RNA, 22 nt, Human
gagaggcuaugagguucugugu

SEQ ID NO: 552632 - RNA, 22 nt, Human
ggaagguuuuucuccugguggg

SEQ ID NO: 552633 - RNA, 22 nt, Human
gccaugccugugucuccaggcc

SEQ ID NO: 552634 - RNA, 22 nt, Human
aaugaagcaguuuucaucaagu

SEQ ID NO: 552635 - RNA, 22 nt, Human
gcaggagcagucaggggcagcu

SEQ ID NO: 552636 - RNA, 22 nt, Human
augggcagcugcagcaguggug

SEQ ID NO: 552637 - RNA, 22 nt, Human
gccagagccacuuuugggugau

SEQ ID NO: 552638 - RNA, 22 nt, Human
ggaaaucaucugauuggcuuuc

SEQ ID NO: 552639 - RNA, 19 nt, Human
agaggcugucaccuguagc

SEQ ID NO: 552640 - RNA, 22 nt, Human
agcuuguuuuguugaauacuua

SEQ ID NO: 552641 - RNA, 23 nt, Human
ccucagagaggcagagccacaug

SEQ ID NO: 552642 - RNA, 22 nt, Human
ggcugcaguugugugaaggccg

SEQ ID NO: 552643 - RNA, 19 nt, Human
ucuaauaucuacuucccug

SEQ ID NO: 552644 - RNA, 22 nt, Human
ucucuggagcugcagauccagg

SEQ ID NO: 552645 - RNA, 22 nt, Human
ugaggcaggagaauggcgggaa

SEQ ID NO: 552646 - RNA, 22 nt, Human
agcagcugguaggaguggccac

SEQ ID NO: 552647 - RNA, 22 nt, Human
ggucccaggaagugcggcggcg

SEQ ID NO: 552648 - RNA, 22 nt, Human
aggucacacaacugucagaggc

SEQ ID NO: 552649 - RNA, 22 nt, Human
augggaugcauggcuguggcca

SEQ ID NO: 552650 - RNA, 22 nt, Human
guggcaugacagugaaugggca

SEQ ID NO: 552651 - RNA, 20 nt, Human
ccaauguuuacagauuacuu

SEQ ID NO: 552652 - RNA, 22 nt, Human
gacagcagaugaagccugcaga

SEQ ID NO: 552653 - RNA, 20 nt, Human
cuucaggacccauccucccc

SEQ ID NO: 552654 - RNA, 22 nt, Human
ucaguguuuuuaaagcaauaua

SEQ ID NO: 552655 - RNA, 22 nt, Human
uguaaacauauguauguaugua

SEQ ID NO: 552656 - RNA, 16 nt, Human
gcuggucaagcagcag

SEQ ID NO: 552657 - RNA, 22 nt, Human
gaggaaacauuguagaagcagu

SEQ ID NO: 552658 - RNA, 22 nt, Human
aagauuaaaggggagacaagcu

SEQ ID NO: 552659 - RNA, 22 nt, Human
aggcugugcaauuaggguaaga

SEQ ID NO: 552660 - RNA, 22 nt, Human
ccaggagcauuaagagaacaua

SEQ ID NO: 552661 - RNA, 22 nt, Human
uuccaaagaaauugaccaagac

SEQ ID NO: 552662 - RNA, 23 nt, Human
gccauggcugccccacaggccuc

SEQ ID NO: 552663 - RNA, 18 nt, Human
ucagacaaguuagacagg

SEQ ID NO: 552664 - RNA, 20 nt, Human
aaagucuguuuaucucugga

SEQ ID NO: 552665 - RNA, 22 nt, Human
gaggucaggcuugcagcagggu

SEQ ID NO: 552666 - RNA, 22 nt, Human
agcagaugaaucccagauaaag

SEQ ID NO: 552667 - RNA, 22 nt, Human
ucucccacagccgugcuucaag

SEQ ID NO: 552668 - RNA, 22 nt, Human
auauuuauaagcaagcaggacu

SEQ ID NO: 552669 - RNA, 22 nt, Human
gacauaaaccuugagauauuaa

SEQ ID NO: 552670 - RNA, 22 nt, Human
gcacacagauuaggaaacagaa

SEQ ID NO: 552671 - RNA, 20 nt, Human
ucuuuguuaauuuuaucucc

SEQ ID NO: 552672 - RNA, 22 nt, Human
ucagaggacaagcucccuggug

SEQ ID NO: 552673 - RNA, 22 nt, Human
uacauuuacagagccuucucug

SEQ ID NO: 552674 - RNA, 22 nt, Human
ucugccuggccuggagggcaca

SEQ ID NO: 552675 - RNA, 22 nt, Human
ccuguucaugaaacugcuuucc

SEQ ID NO: 552676 - RNA, 20 nt, Human
aaaugccagugauucugcuu

SEQ ID NO: 552677 - RNA, 22 nt, Human
agcugccucccugugcuugucc

SEQ ID NO: 552678 - RNA, 22 nt, Human
gaggacaggagacucacuguuu

SEQ ID NO: 552679 - RNA, 18 nt, Human
caggaugagugaugggga

SEQ ID NO: 552680 - RNA, 20 nt, Human
gcucccagccugcagucccc

SEQ ID NO: 552681 - RNA, 22 nt, Human
uguggcucucagauccuccaau

SEQ ID NO: 552682 - RNA, 22 nt, Human
ggcccagaagccagaagccucc

SEQ ID NO: 552683 - RNA, 22 nt, Human
uuaaaucaggcaucauuucagu

SEQ ID NO: 552684 - RNA, 22 nt, Human
uaaggccaaguucauauacaac

SEQ ID NO: 552685 - RNA, 22 nt, Human
uguucuuuggcuuccuuuccgu

SEQ ID NO: 552686 - RNA, 22 nt, Human
gaaguuaguaccugguauacuu

SEQ ID NO: 552687 - RNA, 22 nt, Human
cucuuacaagcucccgauauaa

SEQ ID NO: 552688 - RNA, 22 nt, Human
auaaauuuauaauuguuuccug

SEQ ID NO: 552689 - RNA, 22 nt, Human
ugcagggaaugcuugcagcaug

SEQ ID NO: 552690 - RNA, 22 nt, Human
cugagcagaccauggcagaggu

SEQ ID NO: 552691 - RNA, 22 nt, Human
uugucccauugcgaaugugagu

SEQ ID NO: 552692 - RNA, 22 nt, Human
ucccaagauacgcuguaagaag

SEQ ID NO: 552693 - RNA, 22 nt, Human
ugacauuuuaucaauaucacag

SEQ ID NO: 552694 - RNA, 22 nt, Human
aguaugaaccuggguucuggau

SEQ ID NO: 552695 - RNA, 22 nt, Human
guucauucaaucuauuugcuuc

SEQ ID NO: 552696 - RNA, 22 nt, Human
ccaggugucuguggccagcccu

SEQ ID NO: 552697 - RNA, 22 nt, Human
gggcuucuagaccagcagugag

SEQ ID NO: 552698 - RNA, 22 nt, Human
cuggggcugcgguggaggagcc

SEQ ID NO: 552699 - RNA, 22 nt, Human
guuguauucuucaauaucagag

SEQ ID NO: 552700 - RNA, 22 nt, Human
agguuuucacaggaaguauguu

SEQ ID NO: 552701 - RNA, 22 nt, Human
aggugaguuacaggaggagguc

SEQ ID NO: 552702 - RNA, 22 nt, Human
aagcacagaccagaucuccagg

SEQ ID NO: 552703 - RNA, 22 nt, Human
augcacccagugucuggacuau

SEQ ID NO: 552704 - RNA, 22 nt, Human
cguggggcggguggacacuugc

SEQ ID NO: 552705 - RNA, 22 nt, Human
ugcagccaauucauucauucuu

SEQ ID NO: 552706 - RNA, 22 nt, Human
agaaaucaugucuuauuucuau

SEQ ID NO: 552707 - RNA, 22 nt, Human
ccagggcaggggcuggaguuca

SEQ ID NO: 552708 - RNA, 22 nt, Human
uccaaguucuaggaacugcugc

SEQ ID NO: 552709 - RNA, 22 nt, Human
cagcaggguagguuguaucagu

SEQ ID NO: 552710 - RNA, 20 nt, Human
aucaggauucuugcuuuguu

SEQ ID NO: 552711 - RNA, 22 nt, Human
gucucagggacugcuucugggg

SEQ ID NO: 552712 - RNA, 22 nt, Human
uccuuccuggggucucugcugc

SEQ ID NO: 552713 - RNA, 22 nt, Human
cagcagaagugcauuugugauu

SEQ ID NO: 552714 - RNA, 22 nt, Human
gggcuggaggccugccugguua

SEQ ID NO: 552715 - RNA, 22 nt, Human
ugaaauguggagaugguaagua

SEQ ID NO: 552716 - RNA, 22 nt, Human
guggcugcaucggggugaccag

SEQ ID NO: 552717 - RNA, 22 nt, Human
uagaaacauucaguugcagucc

SEQ ID NO: 552718 - RNA, 22 nt, Human
agaggguugaaccuauaaacua

SEQ ID NO: 552719 - RNA, 22 nt, Human
agcuggccuuagugagcaccug

SEQ ID NO: 552720 - RNA, 22 nt, Human
cacccagcagcacuuaagacua

SEQ ID NO: 552721 - RNA, 22 nt, Human
ccuggagguggagguugcagug

SEQ ID NO: 552722 - RNA, 22 nt, Human
uucccugcaaccuuucccuggg

SEQ ID NO: 552723 - RNA, 22 nt, Human
cucccagguuacaucugagccu

SEQ ID NO: 552724 - RNA, 22 nt, Human
cagaacugggcucgcucugguu

SEQ ID NO: 552725 - RNA, 22 nt, Human
uuuaugcaucucuaggaagggc

SEQ ID NO: 552726 - RNA, 22 nt, Human
gugcauacuuuauuuuaauacu

SEQ ID NO: 552727 - RNA, 22 nt, Human
aauauauuugaaucaggaacaa

SEQ ID NO: 552728 - RNA, 22 nt, Human
uguacaguguagucaugagguu

SEQ ID NO: 552729 - RNA, 22 nt, Human
uuuauguuauggguaggaucaa

SEQ ID NO: 552730 - RNA, 22 nt, Human
uugcaaggcuagguucacccac

SEQ ID NO: 552731 - RNA, 22 nt, Human
gggccuggggacaccaccauga

SEQ ID NO: 552732 - RNA, 22 nt, Human
acacacuuuaaauuaaaccucu

SEQ ID NO: 552733 - RNA, 22 nt, Human
gggccuugccauggagccugag

SEQ ID NO: 552734 - RNA, 22 nt, Human
guggcagggcuuugcuguucuu

SEQ ID NO: 552735 - RNA, 22 nt, Human
aaugucugagucucuguauccc

SEQ ID NO: 552736 - RNA, 22 nt, Human
agcugguucauucauucauggu

SEQ ID NO: 552737 - RNA, 22 nt, Human
uagcuuaucccacagugcccag

SEQ ID NO: 552738 - RNA, 21 nt, Human
acagccugucaucucaugguc

SEQ ID NO: 552739 - RNA, 22 nt, Human
augcaacagagaaaauauugag

SEQ ID NO: 552740 - RNA, 22 nt, Human
uccugccugagcguggaggagg

SEQ ID NO: 552741 - RNA, 22 nt, Human
ggcugggcaggucugcacaggg

SEQ ID NO: 552742 - RNA, 22 nt, Human
auuuaccauauguacugaguau

SEQ ID NO: 552743 - RNA, 22 nt, Human
uccagaaaguacaugggauuca

SEQ ID NO: 552744 - RNA, 22 nt, Human
uccacgugagcuucgugugcag

SEQ ID NO: 552745 - RNA, 22 nt, Human
acuuuagauauuccucuguaca

SEQ ID NO: 552746 - RNA, 22 nt, Human
ucugggagagcugcugucagag

SEQ ID NO: 552747 - RNA, 22 nt, Human
gcaccaggaggcccuucucauc

SEQ ID NO: 552748 - RNA, 22 nt, Human
ucacaggaaccaucagagaaau

SEQ ID NO: 552749 - RNA, 22 nt, Human
cacuguguaagaagaugggcuu

SEQ ID NO: 552750 - RNA, 22 nt, Human
cacuggaauauggcguugaacc

SEQ ID NO: 552751 - RNA, 22 nt, Human
aaauaucauucuggugcacaga

SEQ ID NO: 552752 - RNA, 22 nt, Human
cugggcacagcguugggcucuu

SEQ ID NO: 552753 - RNA, 22 nt, Human
uccccacacuuucacuccuggc

SEQ ID NO: 552754 - RNA, 22 nt, Human
cauuuccacuucugaaaacugg

SEQ ID NO: 552755 - RNA, 22 nt, Human
ggcucaagcagucugccugccu

SEQ ID NO: 552756 - RNA, 17 nt, Human
gcuuccugugcugggga

SEQ ID NO: 552757 - RNA, 22 nt, Human
gcuccuggagagauugagaaag

SEQ ID NO: 552758 - RNA, 22 nt, Human
ggauccuuaacuaucacaguga

SEQ ID NO: 552759 - RNA, 22 nt, Human
auacaacagaaaaugauuauuc

SEQ ID NO: 552760 - RNA, 22 nt, Human
gcaccaugauggagccucauua

SEQ ID NO: 552761 - RNA, 22 nt, Human
ugaaaucuuauacuuugguagu

SEQ ID NO: 552762 - RNA, 22 nt, Human
caugccuguauuucugaucuau

SEQ ID NO: 552763 - RNA, 22 nt, Human
gugcauauaugcacauaugugu

SEQ ID NO: 552764 - RNA, 22 nt, Human
uuauuccaauuucuccuacaaa

SEQ ID NO: 552765 - RNA, 22 nt, Human
aucacaaaggcugcuucaugau

SEQ ID NO: 552766 - RNA, 22 nt, Human
ccuggcagcuccguggccuucc

SEQ ID NO: 552767 - RNA, 22 nt, Human
gcagaggccaggccaccagcaa

SEQ ID NO: 552768 - RNA, 22 nt, Human
caggacaguuugcuuugcccug

SEQ ID NO: 552769 - RNA, 22 nt, Human
caucuuuaacaauuuacaaugu

SEQ ID NO: 552770 - RNA, 21 nt, Human
ugacugaggcuucuucacaca

SEQ ID NO: 552771 - RNA, 22 nt, Human
uuaaacaguauaucugagcaag

SEQ ID NO: 552772 - RNA, 22 nt, Human
cugcuccacaccuccauuuccu

SEQ ID NO: 552773 - RNA, 22 nt, Human
gugcuugggggaaguaacagac

SEQ ID NO: 552774 - RNA, 22 nt, Human
ucuguucagaagaggugaaagu

SEQ ID NO: 552775 - RNA, 23 nt, Human
ugcagcugccucuggcgggccgg

SEQ ID NO: 552776 - RNA, 22 nt, Human
agggucuguggaugcaucuggg

SEQ ID NO: 552777 - RNA, 22 nt, Human
gagcugcuucugugugccgggu

SEQ ID NO: 552778 - RNA, 22 nt, Human
cacagggcagugcugcccacuc

SEQ ID NO: 552779 - RNA, 22 nt, Human
ugugaaggagaugaagggagug

SEQ ID NO: 552780 - RNA, 20 nt, Human
cccugagacgacugagcucc

SEQ ID NO: 552781 - RNA, 23 nt, Human
gcagagucaaguagucaugagug

SEQ ID NO: 552782 - RNA, 22 nt, Human
ucaaaggcaccaaggucacugc

SEQ ID NO: 552783 - RNA, 22 nt, Human
auuguucuaaggguuuaauuaa

SEQ ID NO: 552784 - RNA, 22 nt, Human
gggcuccaccuagggacacugg

SEQ ID NO: 552785 - RNA, 19 nt, Human
cugcagggaugugcagagu

SEQ ID NO: 552786 - RNA, 22 nt, Human
uccuugaagcuuguaucuaaua

SEQ ID NO: 552787 - RNA, 18 nt, Human
cccacggugcuguagggc

SEQ ID NO: 552788 - RNA, 22 nt, Human
aaaugcaaggccaugugaagga

SEQ ID NO: 552789 - RNA, 19 nt, Human
ccaggccuggcgucuccgc

SEQ ID NO: 552790 - RNA, 22 nt, Human
acugagagaacgggcugcuccc

SEQ ID NO: 552791 - RNA, 22 nt, Human
uaauuuacuugcaaauaacaau

SEQ ID NO: 552792 - RNA, 22 nt, Human
augaggcucucaggggagcugu

SEQ ID NO: 552793 - RNA, 22 nt, Human
gauuucaaggauguuagaggug

SEQ ID NO: 552794 - RNA, 22 nt, Human
uuucagagccuuuaucucucua

SEQ ID NO: 552795 - RNA, 22 nt, Human
cagaaguaagauuacugugaga

SEQ ID NO: 552796 - RNA, 22 nt, Human
gggcacaguacuccaaucaacu

SEQ ID NO: 552797 - RNA, 22 nt, Human
guuuguaauuacugcagcaugg

SEQ ID NO: 552798 - RNA, 22 nt, Human
ggcccugcugaguggaguggag

SEQ ID NO: 552799 - RNA, 22 nt, Human
aucacuaugggcauuauauuua

SEQ ID NO: 552800 - RNA, 23 nt, Human
ugggaccuguuugcccacagaug

SEQ ID NO: 552801 - RNA, 22 nt, Human
gagggagcuugauggauguuug

SEQ ID NO: 552802 - RNA, 22 nt, Human
cugagggccuuggcuccugccc

SEQ ID NO: 552803 - RNA, 21 nt, Human
ugcaugcuauguuuuuauuuc

SEQ ID NO: 552804 - RNA, 22 nt, Human
auauaauaguuucauaaaggcu

SEQ ID NO: 552805 - RNA, 22 nt, Human
ugccugaguuuaacccucagag

SEQ ID NO: 552806 - RNA, 22 nt, Human
ucagauggaggcaauguuaccu

SEQ ID NO: 552807 - RNA, 22 nt, Human
uccaugucuucaugugucuaac

SEQ ID NO: 552808 - RNA, 22 nt, Human
caguguuucugaguuccagcuc

SEQ ID NO: 552809 - RNA, 22 nt, Human
cccucugaccuccugccacagu

SEQ ID NO: 552810 - RNA, 22 nt, Human
ggaggucaaauggagggcuggg

SEQ ID NO: 552811 - RNA, 22 nt, Human
gugauuccuauuaguacaugca

SEQ ID NO: 552812 - RNA, 22 nt, Human
acaacauucuuaaauacacuga

SEQ ID NO: 552813 - RNA, 22 nt, Human
ugaggccugggcacauaaccuc

SEQ ID NO: 552814 - RNA, 22 nt, Human
auuaaaagagauaauguguguu

SEQ ID NO: 552815 - RNA, 22 nt, Human
auuuucagugaucauagcacac

SEQ ID NO: 552816 - RNA, 22 nt, Human
aucagcaaaaaugccuucagaa

SEQ ID NO: 552817 - RNA, 22 nt, Human
ucuaaacauaacuuugugugau

SEQ ID NO: 552818 - RNA, 22 nt, Human
gaauuuuucuggaagcaauuau

SEQ ID NO: 552819 - RNA, 20 nt, Human
uugggccugucagcacuccc

SEQ ID NO: 552820 - RNA, 22 nt, Human
cucuucaacugccaggcagucu

SEQ ID NO: 552821 - RNA, 22 nt, Human
ucugaagccaccucugcuuguc

SEQ ID NO: 552822 - RNA, 22 nt, Human
accugcaguggccacuccuaau

SEQ ID NO: 552823 - RNA, 22 nt, Human
aacaguaauggcauugccauga

SEQ ID NO: 552824 - RNA, 22 nt, Human
gggcccugggauucagagcaag

SEQ ID NO: 552825 - RNA, 22 nt, Human
cagcuuguuuuauuuggggacc

SEQ ID NO: 552826 - RNA, 22 nt, Human
gugagcaggauaggggcucccu

SEQ ID NO: 552827 - RNA, 22 nt, Human
uccuguggucuggaaggaaugg

SEQ ID NO: 552828 - RNA, 22 nt, Human
uuuauuccaugugucuaugacc

SEQ ID NO: 552829 - RNA, 19 nt, Human
uagaaugcccacuuaaaaa

SEQ ID NO: 552830 - RNA, 22 nt, Human
ggccucucuggcauggcugccc

SEQ ID NO: 552831 - RNA, 22 nt, Human
auuguaucuugucauuaugcau

SEQ ID NO: 552832 - RNA, 22 nt, Human
aggagucagauuguuugaaugu

SEQ ID NO: 552833 - RNA, 22 nt, Human
gaauuagguaauagaacuagua

SEQ ID NO: 552834 - RNA, 22 nt, Human
cuucaguguucccaucuguaaa

SEQ ID NO: 552835 - RNA, 22 nt, Human
uagcauuaaagguaagacauua

SEQ ID NO: 552836 - RNA, 22 nt, Human
uggggagaaaugucuuuguucc

SEQ ID NO: 552837 - RNA, 22 nt, Human
ccaguccagugccaugcauggc

SEQ ID NO: 552838 - RNA, 20 nt, Human
acucuaccagggcagcagca

SEQ ID NO: 552839 - RNA, 22 nt, Human
agcugggagcagagccacagcc

SEQ ID NO: 552840 - RNA, 22 nt, Human
auccuugacacacuccaguacu

SEQ ID NO: 552841 - RNA, 22 nt, Human
auguauaugaagcuaguauuuu

SEQ ID NO: 552842 - RNA, 22 nt, Human
agccaggcagggcucucgcucu

SEQ ID NO: 552843 - RNA, 22 nt, Human
ccaccaggacagcccugagggg

SEQ ID NO: 552844 - RNA, 22 nt, Human
ugcccaagauucuuacaucaug

SEQ ID NO: 552845 - RNA, 22 nt, Human
agccagcaugaagacagaggcc

SEQ ID NO: 552846 - RNA, 22 nt, Human
ugcagaguccucuggagggacu

SEQ ID NO: 552847 - RNA, 22 nt, Human
gagggaagauuccccauauggg

SEQ ID NO: 552848 - RNA, 22 nt, Human
agcucuggaccugacaucuggu

SEQ ID NO: 552849 - RNA, 22 nt, Human
uggcugaguuacgaacagagca

SEQ ID NO: 552850 - RNA, 22 nt, Human
caaauucucuuacuguuugaca

SEQ ID NO: 552851 - RNA, 22 nt, Human
aggcuggagggcaauggcaaga

SEQ ID NO: 552852 - RNA, 22 nt, Human
cagagccuuccuagcagacucu

SEQ ID NO: 552853 - RNA, 22 nt, Human
guauuucuagaaccaaaagcca

SEQ ID NO: 552854 - RNA, 22 nt, Human
gggagcuguaagggacagguag

SEQ ID NO: 552855 - RNA, 22 nt, Human
aggcuggcuuugguagcauggu

SEQ ID NO: 552856 - RNA, 22 nt, Human
ccugcugucccucugggcucca

SEQ ID NO: 552857 - RNA, 22 nt, Human
ugggcacagaauagauggccca

SEQ ID NO: 552858 - RNA, 22 nt, Human
gcacagaagagcuuuggaauga

SEQ ID NO: 552859 - RNA, 22 nt, Human
gcaaauauuucuaauuccugaa

SEQ ID NO: 552860 - RNA, 22 nt, Human
acaauauacacauccuaauggg

SEQ ID NO: 552861 - RNA, 22 nt, Human
ugaauaaauugagagcgaaugu

SEQ ID NO: 552862 - RNA, 22 nt, Human
agggaccugucaaugacaguua

SEQ ID NO: 552863 - RNA, 22 nt, Human
gcggggacagaaggcgguucuc

SEQ ID NO: 552864 - RNA, 22 nt, Human
uacuguuuuaaaagguacuugu

SEQ ID NO: 552865 - RNA, 22 nt, Human
ucacaucaggugucuccccaag

SEQ ID NO: 552866 - RNA, 22 nt, Human
auuuuuaggcucuacccucaga

SEQ ID NO: 552867 - RNA, 22 nt, Human
accuggcuuccaaucuaggagc

SEQ ID NO: 552868 - RNA, 22 nt, Human
gaaaaguacacagcccaaacau

SEQ ID NO: 552869 - RNA, 22 nt, Human
caguuaaagugcuuaucacaga

SEQ ID NO: 552870 - RNA, 22 nt, Human
aguguuuuauuucagcacuuug

SEQ ID NO: 552871 - RNA, 22 nt, Human
cggcugugucuucacaggagcc

SEQ ID NO: 552872 - RNA, 22 nt, Human
agaguaaaguacuuggaauacc

SEQ ID NO: 552873 - RNA, 22 nt, Human
aauuuugugugggaucaaagga

SEQ ID NO: 552874 - RNA, 22 nt, Human
ucuucaauauguguuuaauauu

SEQ ID NO: 552875 - RNA, 22 nt, Human
aagaaguuggaaaugauugaga

SEQ ID NO: 552876 - RNA, 22 nt, Human
gagugugucggucagcguggcg

SEQ ID NO: 552877 - RNA, 22 nt, Human
ucugugacuugcgggaggagaa

SEQ ID NO: 552878 - RNA, 22 nt, Human
agucagagcaaacuggacagac

SEQ ID NO: 552879 - RNA, 22 nt, Human
acagaaaugauguuuggcaaua

SEQ ID NO: 552880 - RNA, 22 nt, Human
cugucaccuguucacugcagca

SEQ ID NO: 552881 - RNA, 22 nt, Human
ccacagagacaggguccuugcu

SEQ ID NO: 552882 - RNA, 22 nt, Human
gccucaggacuggcauacucau

SEQ ID NO: 552883 - RNA, 20 nt, Human
acaauuuccucacuauaugc

SEQ ID NO: 552884 - RNA, 22 nt, Human
ggcugggcugcugggucagagc

SEQ ID NO: 552885 - RNA, 22 nt, Human
ccugucugaaggcagggggaug

SEQ ID NO: 552886 - RNA, 22 nt, Human
ucaauucagacugagaaaugau

SEQ ID NO: 552887 - RNA, 22 nt, Human
ucccagacaaucauuggccacc

SEQ ID NO: 552888 - RNA, 22 nt, Human
gaguucugugauuauuugggac

SEQ ID NO: 552889 - RNA, 22 nt, Human
acccugagucagacagccugac

SEQ ID NO: 552890 - RNA, 22 nt, Human
uguucuguuuuaugguagggaa

SEQ ID NO: 552891 - RNA, 22 nt, Human
uaguggagaaguggagucugug

SEQ ID NO: 552892 - RNA, 22 nt, Human
agcagcagauucagcaggaaug

SEQ ID NO: 552893 - RNA, 22 nt, Human
ucacauuucugauuauaccaaa

SEQ ID NO: 552894 - RNA, 22 nt, Human
gacaugcaugaaugcaggucuc

SEQ ID NO: 552895 - RNA, 22 nt, Human
gaggguggcuccucccugggcc

SEQ ID NO: 552896 - RNA, 22 nt, Human
uucaaacaacucauuuaugcaa

SEQ ID NO: 552897 - RNA, 22 nt, Human
agaggucagaacaggaaagugu

SEQ ID NO: 552898 - RNA, 22 nt, Human
uauagcaagcaggacagucuca

SEQ ID NO: 552899 - RNA, 22 nt, Human
guuuucuuccugcaauuggcau

SEQ ID NO: 552900 - RNA, 22 nt, Human
gcccauggaaaaccuguccucu

SEQ ID NO: 552901 - RNA, 22 nt, Human
uacaugaauguuucaauauugu

SEQ ID NO: 552902 - RNA, 22 nt, Human
uggaggaugccauccaggauac

SEQ ID NO: 552903 - RNA, 23 nt, Human
aggggcagcaaguuuugguguua

SEQ ID NO: 552904 - RNA, 21 nt, Human
gccagggaagagaguuggcug

SEQ ID NO: 552905 - RNA, 22 nt, Human
agcagagcggggccuccggaag

SEQ ID NO: 552906 - RNA, 22 nt, Human
agggaggaaggauguuccaaag

SEQ ID NO: 552907 - RNA, 22 nt, Human
ucacacaugaguaaauacaggg

SEQ ID NO: 552908 - RNA, 22 nt, Human
gcuucuggcagugcagccacca

SEQ ID NO: 552909 - RNA, 22 nt, Human
ccuggacucaggcugugggcac

SEQ ID NO: 552910 - RNA, 22 nt, Human
cagcagagggagccauugaaau

SEQ ID NO: 552911 - RNA, 22 nt, Human
uggcuucuugggaugggucauu

SEQ ID NO: 552912 - RNA, 22 nt, Human
ugcucuggaauaguccuaggca

SEQ ID NO: 552913 - RNA, 22 nt, Human
gaaggaagauucuguuggaauc

SEQ ID NO: 552914 - RNA, 22 nt, Human
cagguucccuugcagcuaagug

SEQ ID NO: 552915 - RNA, 22 nt, Human
ucugccuugagguccucagcuc

SEQ ID NO: 552916 - RNA, 22 nt, Human
uuugugcacuucuguagcugcc

SEQ ID NO: 552917 - RNA, 22 nt, Human
agcuggguucagaggcacaugg

SEQ ID NO: 552918 - RNA, 22 nt, Human
ccugccuggaucagccauccug

SEQ ID NO: 552919 - RNA, 22 nt, Human
agcucugguuuagaaggggaaa

SEQ ID NO: 552920 - RNA, 22 nt, Human
acuggcagccacaacuggcagg

SEQ ID NO: 552921 - RNA, 22 nt, Human
aaguuacuggcaagggcugcag

SEQ ID NO: 552922 - RNA, 22 nt, Human
acacaucagccucagcuuuggg

SEQ ID NO: 552923 - RNA, 22 nt, Human
cucaguagaaaauacauggacu

SEQ ID NO: 552924 - RNA, 22 nt, Human
ggugggcacauucagucucugu

SEQ ID NO: 552925 - RNA, 21 nt, Human
acuguucaucuguucagaagc

SEQ ID NO: 552926 - RNA, 22 nt, Human
uucuuuccaaccagauauuggu

SEQ ID NO: 552927 - RNA, 22 nt, Human
agggcugaaguuauggcugagc

SEQ ID NO: 552928 - RNA, 22 nt, Human
ccugugcuggcuuuauucucag

SEQ ID NO: 552929 - RNA, 22 nt, Human
gccugcagggugaugggcugcc

SEQ ID NO: 552930 - RNA, 22 nt, Human
gccuuugccugcgacguggcug

SEQ ID NO: 552931 - RNA, 22 nt, Human
uggcucugggaaucuguugcuu

SEQ ID NO: 552932 - RNA, 22 nt, Human
gccaagcuuggaaggaucaugg

SEQ ID NO: 552933 - RNA, 22 nt, Human
gaaggagacccugaagaugcug

SEQ ID NO: 552934 - RNA, 22 nt, Human
aggcucugugacaaucaagcug

SEQ ID NO: 552935 - RNA, 22 nt, Human
uagaugcuugucaguuucuguc

SEQ ID NO: 552936 - RNA, 22 nt, Human
agacacagugaguuucuuuccc

SEQ ID NO: 552937 - RNA, 22 nt, Human
ugaauggucacugagcaucugu

SEQ ID NO: 552938 - RNA, 20 nt, Human
ccacaggaguccagucgacc

SEQ ID NO: 552939 - RNA, 22 nt, Human
ucaggcugcaucuguaagggug

SEQ ID NO: 552940 - RNA, 22 nt, Human
cagagcaguaaaucuggggcac

SEQ ID NO: 552941 - RNA, 22 nt, Human
agauaacauguugcagauucug

SEQ ID NO: 552942 - RNA, 22 nt, Human
ucccagccuccugacaguuuug

SEQ ID NO: 552943 - RNA, 22 nt, Human
cugagcugcggcaggcaccugg

SEQ ID NO: 552944 - RNA, 19 nt, Human
guagggacagugguucuga

SEQ ID NO: 552945 - RNA, 18 nt, Human
uccagagguguuggagcc

SEQ ID NO: 552946 - RNA, 22 nt, Human
uuuuuccuuagggguuacucac

SEQ ID NO: 552947 - RNA, 22 nt, Human
ucugaaauaaaugcacuguuag

SEQ ID NO: 552948 - RNA, 16 nt, Human
gcagguggggcgcgca

SEQ ID NO: 552949 - RNA, 23 nt, Human
agucagagagugugagacaacug

SEQ ID NO: 552950 - RNA, 22 nt, Human
uggcucagagccuugagagcug

SEQ ID NO: 552951 - RNA, 22 nt, Human
aaguuacauaaauguccucuag

SEQ ID NO: 552952 - RNA, 22 nt, Human
ccaugcccuugucaucuccagg

SEQ ID NO: 552953 - RNA, 20 nt, Human
ugcagguguuggagaaggua

SEQ ID NO: 552954 - RNA, 20 nt, Human
uggcagaguugucccaccca

SEQ ID NO: 552955 - RNA, 22 nt, Human
uacaguauauacuguguguaga

SEQ ID NO: 552956 - RNA, 22 nt, Human
uaugaucuuuauaaccuaucuu

SEQ ID NO: 552957 - RNA, 22 nt, Human
cccugcagagaccacugaccuu

SEQ ID NO: 552958 - RNA, 23 nt, Human
cagaagacagucucaagacaagg

SEQ ID NO: 552959 - RNA, 22 nt, Human
agucccagcuacucaagaggcu

SEQ ID NO: 552960 - RNA, 22 nt, Human
agccuggcuaaauucucccaug

SEQ ID NO: 552961 - RNA, 22 nt, Human
aaguccagacuccuuugcgugg

SEQ ID NO: 552962 - RNA, 22 nt, Human
gcuucugaguucuugcuuaaua

SEQ ID NO: 552963 - RNA, 22 nt, Human
ccagggugaggaggcucccacg

SEQ ID NO: 552964 - RNA, 22 nt, Human
caagaauuaagaauuuugaugu

SEQ ID NO: 552965 - RNA, 22 nt, Human
uggcacugaagcuggaaagccu

SEQ ID NO: 552966 - RNA, 19 nt, Human
ggccuugaugaguggggag

SEQ ID NO: 552967 - RNA, 22 nt, Human
gaugaagcuaaaucuaagguuu

SEQ ID NO: 552968 - RNA, 22 nt, Human
aacauuuuuaagaccaagugcu

SEQ ID NO: 552969 - RNA, 22 nt, Human
uaacaucugggcugcguccuga

SEQ ID NO: 552970 - RNA, 22 nt, Human
ucagaagcauguggggagccug

SEQ ID NO: 552971 - RNA, 22 nt, Human
cauacuuugggauaagagugga

SEQ ID NO: 552972 - RNA, 22 nt, Human
ucugccugugguggaggaaguu

SEQ ID NO: 552973 - RNA, 22 nt, Human
cugaggcucccucgggucugcu

SEQ ID NO: 552974 - RNA, 22 nt, Human
gucuggaguggggccugagaau

SEQ ID NO: 552975 - RNA, 22 nt, Human
caagccucagaaucuucuccau

SEQ ID NO: 552976 - RNA, 23 nt, Human
ugaaacagaugccaaugaucaag

SEQ ID NO: 552977 - RNA, 22 nt, Human
ucucaauauuauaugucauaaa

SEQ ID NO: 552978 - RNA, 22 nt, Human
gugucccagccccacaggccug

SEQ ID NO: 552979 - RNA, 22 nt, Human
uacauaguuccauuuacaggaa

SEQ ID NO: 552980 - RNA, 19 nt, Human
uccugcagaccagaccugu

SEQ ID NO: 552981 - RNA, 22 nt, Human
augcuguguccuagugaaagaa

SEQ ID NO: 552982 - RNA, 21 nt, Human
ucuggcagcaguuuguugagu

SEQ ID NO: 552983 - RNA, 20 nt, Human
uccugagccuccaccauguc

SEQ ID NO: 552984 - RNA, 22 nt, Human
ucaaagauggguuuuguuugau

SEQ ID NO: 552985 - RNA, 22 nt, Human
guauccuccccgcuggccuuca

SEQ ID NO: 552986 - RNA, 22 nt, Human
ugggcucauguuucuuugagga

SEQ ID NO: 552987 - RNA, 22 nt, Human
gacacaugaccauaaaugcuaa

SEQ ID NO: 552988 - RNA, 23 nt, Human
ugccaaaguuuaccuaacacugg

SEQ ID NO: 552989 - RNA, 22 nt, Human
ggcacugggagaggugagacgg

SEQ ID NO: 552990 - RNA, 22 nt, Human
uugguuuagagagugugguuac

SEQ ID NO: 552991 - RNA, 22 nt, Human
ucagauuuuccagccuuucucu

SEQ ID NO: 552992 - RNA, 22 nt, Human
ucugagcuuuuauuaucaaccu

SEQ ID NO: 552993 - RNA, 22 nt, Human
aacccaggagacagguugcagu

SEQ ID NO: 552994 - RNA, 22 nt, Human
ugucuuuagagucacaaaacca

SEQ ID NO: 552995 - RNA, 20 nt, Human
acaauagauuugagcaaagu

SEQ ID NO: 552996 - RNA, 22 nt, Human
uaaagcaaggcaaauuguuggu

SEQ ID NO: 552997 - RNA, 22 nt, Human
uggggcuggcuauugucucccu

SEQ ID NO: 552998 - RNA, 21 nt, Human
ggcaggugggucucuguugcu

SEQ ID NO: 552999 - RNA, 20 nt, Human
cccaggugucugaagcucug

SEQ ID NO: 553000 - RNA, 22 nt, Human
cuguuauuuagaacauggaauc

SEQ ID NO: 553001 - RNA, 22 nt, Human
aaaaaauuccauucugugccuu

SEQ ID NO: 553002 - RNA, 22 nt, Human
augcccuggggcuaccucugag

SEQ ID NO: 553003 - RNA, 22 nt, Human
cuucaggauuuaggaagaugaa

SEQ ID NO: 553004 - RNA, 19 nt, Human
acacagggaucagaggguu

SEQ ID NO: 553005 - RNA, 22 nt, Human
cucucccucauuggguuccauu

SEQ ID NO: 553006 - RNA, 23 nt, Human
ccagccucugggucuucauccag

SEQ ID NO: 553007 - RNA, 22 nt, Human
ucugucugcucauuuaccucag

SEQ ID NO: 553008 - RNA, 22 nt, Human
cagggcagccaggccccguggg

SEQ ID NO: 553009 - RNA, 18 nt, Human
cccagcuuagcgccccuc

SEQ ID NO: 553010 - RNA, 22 nt, Human
caugcacagugauaucugaaga

SEQ ID NO: 553011 - RNA, 22 nt, Human
uugcacuccagcccgagcaaca

SEQ ID NO: 553012 - RNA, 22 nt, Human
auccuugagccuuaucuuuugu

SEQ ID NO: 553013 - RNA, 22 nt, Human
gccagcuggagacuggcagggg

SEQ ID NO: 553014 - RNA, 22 nt, Human
ccugcagguccccggaugcgca

SEQ ID NO: 553015 - RNA, 22 nt, Human
ucuuugcaugugcuucuuggcc

SEQ ID NO: 553016 - RNA, 22 nt, Human
gggccaugagagguucaucaac

SEQ ID NO: 553017 - RNA, 22 nt, Human
ccuguucauuuuuugacucugc

SEQ ID NO: 553018 - RNA, 22 nt, Human
uccuucaacuuuuuacuugccc

SEQ ID NO: 553019 - RNA, 22 nt, Human
cugggcgugucuuccagcuggc

SEQ ID NO: 553020 - RNA, 22 nt, Human
gccuggagaaaggaagguggga

SEQ ID NO: 553021 - RNA, 22 nt, Human
gucuggggaagucagggcauca

SEQ ID NO: 553022 - RNA, 20 nt, Human
cacuacuuguuuuugucaau

SEQ ID NO: 553023 - RNA, 22 nt, Human
guccucagaugcugcugaaaug

SEQ ID NO: 553024 - RNA, 22 nt, Human
gacauaauccuccucaccuacu

SEQ ID NO: 553025 - RNA, 22 nt, Human
agcuuuauauguuguuucucca

SEQ ID NO: 553026 - RNA, 22 nt, Human
aacaaauguguuuuguaauuaa

SEQ ID NO: 553027 - RNA, 20 nt, Human
cugcugugauucccuccucc

SEQ ID NO: 553028 - RNA, 22 nt, Human
gcacacccucucaccagcacug

SEQ ID NO: 553029 - RNA, 22 nt, Human
ucuguaucuaauuuuacaguag

SEQ ID NO: 553030 - RNA, 22 nt, Human
gaagauuuucuccuuuaaauga

SEQ ID NO: 553031 - RNA, 22 nt, Human
aguucagcuucccaggucacug

SEQ ID NO: 553032 - RNA, 23 nt, Human
ucuggcucuaugugacagcucuc

SEQ ID NO: 553033 - RNA, 22 nt, Human
gcucugagacaguagagauggc

SEQ ID NO: 553034 - RNA, 22 nt, Human
uugcaucuaccauaucaaagau

SEQ ID NO: 553035 - RNA, 19 nt, Human
aggcugugagggaggacuc

SEQ ID NO: 553036 - RNA, 22 nt, Human
ccagaagaggacacagugugga

SEQ ID NO: 553037 - RNA, 22 nt, Human
gggcugcacagaucuucaaggg

SEQ ID NO: 553038 - RNA, 21 nt, Human
uccuccuguagaggguccugg

SEQ ID NO: 553039 - RNA, 22 nt, Human
uauacacauuuuuaccuauagu

SEQ ID NO: 553040 - RNA, 20 nt, Human
ggccucaguguccuuguuug

SEQ ID NO: 553041 - RNA, 22 nt, Human
ucaaaauuagugaccaaaggca

SEQ ID NO: 553042 - RNA, 22 nt, Human
acacacagguaaaggagccugg

SEQ ID NO: 553043 - RNA, 22 nt, Human
ucugaaauuuuaguuauagaaa

SEQ ID NO: 553044 - RNA, 22 nt, Human
gaccuggaagaacugaggccuu

SEQ ID NO: 553045 - RNA, 22 nt, Human
ugguccuggggugcaggcugac

SEQ ID NO: 553046 - RNA, 22 nt, Human
aacauuucugagaauaucaguu

SEQ ID NO: 553047 - RNA, 22 nt, Human
acuuucuccagaaaaccaagga

SEQ ID NO: 553048 - RNA, 22 nt, Human
ugcaagaggguguucaguuugu

SEQ ID NO: 553049 - RNA, 22 nt, Human
gacugaaagcuuggaauguucc

SEQ ID NO: 553050 - RNA, 22 nt, Human
caugggcaccuuaaaaugaggc

SEQ ID NO: 553051 - RNA, 22 nt, Human
ucuuugauuuuguuacuaagac

SEQ ID NO: 553052 - RNA, 22 nt, Human
uggccuggaagagaggucgagg

SEQ ID NO: 553053 - RNA, 22 nt, Human
aacuauacauauuuacauagac

SEQ ID NO: 553054 - RNA, 23 nt, Human
ucacacagcuggucagguacaga

SEQ ID NO: 553055 - RNA, 22 nt, Human
aagagggaggugcgggugcaga

SEQ ID NO: 553056 - RNA, 22 nt, Human
acaguguauaaaaucuuaaaga

SEQ ID NO: 553057 - RNA, 22 nt, Human
uccuggguccauggcagccgaa

SEQ ID NO: 553058 - RNA, 22 nt, Human
acaguggaagaagcacugaacu

SEQ ID NO: 553059 - RNA, 20 nt, Human
uugcauuggaugugcaggug

SEQ ID NO: 553060 - RNA, 22 nt, Human
ugagauuuggguuguuuaacau

SEQ ID NO: 553061 - RNA, 22 nt, Human
aguggcugccaagagcaaugcu

SEQ ID NO: 553062 - RNA, 22 nt, Human
cagcagagcugggaauaaaauu

SEQ ID NO: 553063 - RNA, 22 nt, Human
agccuggaggaggaguugagca

SEQ ID NO: 553064 - RNA, 22 nt, Human
ucagauggucauucacuagggu

SEQ ID NO: 553065 - RNA, 19 nt, Human
ccuggaggugaagguucuc

SEQ ID NO: 553066 - RNA, 23 nt, Human
uggcccugaaucuguccuggagg

SEQ ID NO: 553067 - RNA, 22 nt, Human
acaaugaguuugauguaguuug

SEQ ID NO: 553068 - RNA, 22 nt, Human
uaguuaggaauagcagcgacuc

SEQ ID NO: 553069 - RNA, 21 nt, Human
guuuucaugauagagucugua

SEQ ID NO: 553070 - RNA, 22 nt, Human
gggcucugguacuuccuggcuc

SEQ ID NO: 553071 - RNA, 22 nt, Human
ugaagccagucaauguuaaguu

SEQ ID NO: 553072 - RNA, 22 nt, Human
gcugggaggaucucucccuguc

SEQ ID NO: 553073 - RNA, 20 nt, Human
ggcuuucugugauccucagu

SEQ ID NO: 553074 - RNA, 22 nt, Human
auuuggaaaugcaucucuugag

SEQ ID NO: 553075 - RNA, 22 nt, Human
ggccugagcucuggggaggcaa

SEQ ID NO: 553076 - RNA, 22 nt, Human
augggcugugagguccggcagg

SEQ ID NO: 553077 - RNA, 22 nt, Human
cccagagcuccgguccugccca

SEQ ID NO: 553078 - RNA, 22 nt, Human
auuuagcaagaguacaaaauaa

SEQ ID NO: 553079 - RNA, 22 nt, Human
cccuggaggcggagcuugcagu

SEQ ID NO: 553080 - RNA, 22 nt, Human
ugguuuugcuccaguauaaaua

SEQ ID NO: 553081 - RNA, 22 nt, Human
uguguuuuccagaaugguguuu

SEQ ID NO: 553082 - RNA, 22 nt, Human
uggcaggagguuuucuccagga

SEQ ID NO: 553083 - RNA, 20 nt, Human
acuuucucgguuucucaccu

SEQ ID NO: 553084 - RNA, 22 nt, Human
gccacguugccacccgggugac

SEQ ID NO: 553085 - RNA, 22 nt, Human
gcucugggcugcccucuggaca

SEQ ID NO: 553086 - RNA, 22 nt, Human
gcucccugcacucugcagcccu

SEQ ID NO: 553087 - RNA, 22 nt, Human
cagcacagugaccagacccacu

SEQ ID NO: 553088 - RNA, 20 nt, Human
agggaggugcugggccugag

SEQ ID NO: 553089 - RNA, 22 nt, Human
caaguccaggugggcaaauaaa

SEQ ID NO: 553090 - RNA, 22 nt, Human
uccuagucacaggaaaauuuca

SEQ ID NO: 553091 - RNA, 22 nt, Human
uccuugaauugugccacuuacc

SEQ ID NO: 553092 - RNA, 22 nt, Human
uugaggagucaggggcacggaa

SEQ ID NO: 553093 - RNA, 22 nt, Human
ccuggccuccuggccuucucau

SEQ ID NO: 553094 - RNA, 22 nt, Human
aaugaacauggacaaguuaaua

SEQ ID NO: 553095 - RNA, 22 nt, Human
agccagccaguucacuaggaaa

SEQ ID NO: 553096 - RNA, 22 nt, Human
gagaugcuuuguguauagacaa

SEQ ID NO: 553097 - RNA, 22 nt, Human
cagggagaucuuggcuccuggu

SEQ ID NO: 553098 - RNA, 19 nt, Human
aggacucuggaggcaugag

SEQ ID NO: 553099 - RNA, 22 nt, Human
gaggguccccaugcagagcuca

SEQ ID NO: 553100 - RNA, 22 nt, Human
uguguucauguauguauacaua

SEQ ID NO: 553101 - RNA, 22 nt, Human
agccccugggaguagcugcugc

SEQ ID NO: 553102 - RNA, 22 nt, Human
cccagcucucugcucuuagccu

SEQ ID NO: 553103 - RNA, 18 nt, Human
gcucugcccaggcugccc

SEQ ID NO: 553104 - RNA, 20 nt, Human
acaaaauagguacuggguag

SEQ ID NO: 553105 - RNA, 22 nt, Human
ucacuguaauagguuugaagau

SEQ ID NO: 553106 - RNA, 22 nt, Human
ucuggcucugaauucacuucug

SEQ ID NO: 553107 - RNA, 22 nt, Human
uuccuaaucacgaacauuauuu

SEQ ID NO: 553108 - RNA, 22 nt, Human
auguccuuugcuucucuggucc

SEQ ID NO: 553109 - RNA, 23 nt, Human
aaaugacauaugguuucugaagg

SEQ ID NO: 553110 - RNA, 22 nt, Human
uucagugugugauaccugcugu

SEQ ID NO: 553111 - RNA, 22 nt, Human
agcaccuucacaggcucucagg

SEQ ID NO: 553112 - RNA, 22 nt, Human
aggugaaguugaggaggcagaa

SEQ ID NO: 553113 - RNA, 22 nt, Human
uuggugggagaagacucugguu

SEQ ID NO: 553114 - RNA, 22 nt, Human
aagcagcauagcucccuuaguu

SEQ ID NO: 553115 - RNA, 22 nt, Human
uugagaguagagauggcagggc

SEQ ID NO: 553116 - RNA, 22 nt, Human
uuucacaaaugucuuuaacuug

SEQ ID NO: 553117 - RNA, 22 nt, Human
aaauuagaucaguggauuuucu

SEQ ID NO: 553118 - RNA, 18 nt, Human
ucuuuguuuccuucuugc

SEQ ID NO: 553119 - RNA, 22 nt, Human
ucugagcugggcacagaaggcg

SEQ ID NO: 553120 - RNA, 22 nt, Human
caaauaucuuuggcaaagagaa

SEQ ID NO: 553121 - RNA, 20 nt, Human
ugcugcaguuucaugggacu

SEQ ID NO: 553122 - RNA, 22 nt, Human
aagauuuaccacuuuauucaag

SEQ ID NO: 553123 - RNA, 23 nt, Human
uuugaacauuucuagauuacaua

SEQ ID NO: 553124 - RNA, 22 nt, Human
caggcuccucacucaugcuccc

SEQ ID NO: 553125 - RNA, 22 nt, Human
cugggccaggaccaggguugaa

SEQ ID NO: 553126 - RNA, 22 nt, Human
acugcuuacaaaaggaaagaau

SEQ ID NO: 553127 - RNA, 22 nt, Human
ggggcugagaauucagucucgg

SEQ ID NO: 553128 - RNA, 22 nt, Human
acccaggacucucuuccaguag

SEQ ID NO: 553129 - RNA, 22 nt, Human
ucuuaaaugacugauaagagga

SEQ ID NO: 553130 - RNA, 22 nt, Human
aguuacauaaucugugaauuuu

SEQ ID NO: 553131 - RNA, 22 nt, Human
uggagccaggagccugggaguc

SEQ ID NO: 553132 - RNA, 22 nt, Human
uugcaggacaaugauggucccu

SEQ ID NO: 553133 - RNA, 17 nt, Human
cagugaggccuuuccuc

SEQ ID NO: 553134 - RNA, 22 nt, Human
ucauuucuccgaccugcugucc

SEQ ID NO: 553135 - RNA, 22 nt, Human
uucuccagagguggcuagaguu

SEQ ID NO: 553136 - RNA, 22 nt, Human
ucagagaguuuucacuagggug

SEQ ID NO: 553137 - RNA, 22 nt, Human
accugagcaugccaggagagug

SEQ ID NO: 553138 - RNA, 22 nt, Human
cucuccucugaaguggugaccc

SEQ ID NO: 553139 - RNA, 22 nt, Human
gagauggggaauaggagcaagc

SEQ ID NO: 553140 - RNA, 22 nt, Human
aaacagcaggaacaucuugcca

SEQ ID NO: 553141 - RNA, 22 nt, Human
cagagagaggccacugcuauua

SEQ ID NO: 553142 - RNA, 22 nt, Human
aauuucuguaugaauagagaaa

SEQ ID NO: 553143 - RNA, 22 nt, Human
cacaucagggcugcuugggggu

SEQ ID NO: 553144 - RNA, 22 nt, Human
gguuuuggaaguauaaagaugu

SEQ ID NO: 553145 - RNA, 22 nt, Human
uggaacacuguggaugagaaga

SEQ ID NO: 553146 - RNA, 22 nt, Human
agaaagaggaugcagaucucau

SEQ ID NO: 553147 - RNA, 22 nt, Human
ccacugccagcuuuguccuccc

SEQ ID NO: 553148 - RNA, 22 nt, Human
uuuucaucucugcuuuguaccu

SEQ ID NO: 553149 - RNA, 22 nt, Human
aggcugccaaagcuucugucuc

SEQ ID NO: 553150 - RNA, 20 nt, Human
ugagugauggaggcggguca

SEQ ID NO: 553151 - RNA, 22 nt, Human
cugccuguauugucugcuuggg

SEQ ID NO: 553152 - RNA, 22 nt, Human
aggggcaggugcugcacuuaga

SEQ ID NO: 553153 - RNA, 22 nt, Human
ugccaucacugaacuucugaaa

SEQ ID NO: 553154 - RNA, 22 nt, Human
cagaggccucacuuccagccag

SEQ ID NO: 553155 - RNA, 22 nt, Human
cuggccuucagacucggacuga

SEQ ID NO: 553156 - RNA, 22 nt, Human
ugcugcacucaccaacagauaa

SEQ ID NO: 553157 - RNA, 22 nt, Human
ccugggcucuauccugacccag

SEQ ID NO: 553158 - RNA, 22 nt, Human
aacuuucuaaagucaaauuggu

SEQ ID NO: 553159 - RNA, 22 nt, Human
ucuugaagucacacagaaagug

SEQ ID NO: 553160 - RNA, 22 nt, Human
uuucauaauacuguacaugaaa

SEQ ID NO: 553161 - RNA, 22 nt, Human
ucagaaaugaucguuauucauu

SEQ ID NO: 553162 - RNA, 22 nt, Human
cauugucacccaaagcucauag

SEQ ID NO: 553163 - RNA, 22 nt, Human
gcugccugugcacuuucucgua

SEQ ID NO: 553164 - RNA, 22 nt, Human
gaggaggguuggccuuagguag

SEQ ID NO: 553165 - RNA, 22 nt, Human
gcuguucccauguggggcucag

SEQ ID NO: 553166 - RNA, 22 nt, Human
agcucccauuaucuucugaaac

SEQ ID NO: 553167 - RNA, 22 nt, Human
caggggcucuaaugcaugauca

SEQ ID NO: 553168 - RNA, 22 nt, Human
ccaggagcaggagcuggacaga

SEQ ID NO: 553169 - RNA, 22 nt, Human
gcugucugggaggccuccacuu

SEQ ID NO: 553170 - RNA, 22 nt, Human
ucccaggcugggggccugaagu

SEQ ID NO: 553171 - RNA, 22 nt, Human
uugaggagcaggaugggaggcu

SEQ ID NO: 553172 - RNA, 22 nt, Human
gcagaagcccggucagcgcacg

SEQ ID NO: 553173 - RNA, 22 nt, Human
uugaaacugcuuauugaauuug

SEQ ID NO: 553174 - RNA, 22 nt, Human
gcuguucuagcuucaguuucgc

SEQ ID NO: 553175 - RNA, 22 nt, Human
ucuccuuuaagauuuccucagg

SEQ ID NO: 553176 - RNA, 22 nt, Human
uuggaagaccagaggccuuguc

SEQ ID NO: 553177 - RNA, 22 nt, Human
auuauucaauguuauuucagug

SEQ ID NO: 553178 - RNA, 22 nt, Human
gaggcucagagggacuuucaag

SEQ ID NO: 553179 - RNA, 22 nt, Human
gcagacagacugcagugauuuu

SEQ ID NO: 553180 - RNA, 19 nt, Human
gcaggcacagcccugggug

SEQ ID NO: 553181 - RNA, 22 nt, Human
caaauucacaugauugcuucug

SEQ ID NO: 553182 - RNA, 22 nt, Human
accaaucuccuauuuuguuuca

SEQ ID NO: 553183 - RNA, 22 nt, Human
auggccugggcccgcuucagau

SEQ ID NO: 553184 - RNA, 22 nt, Human
ugccucugugggccuuccuggc

SEQ ID NO: 553185 - RNA, 22 nt, Human
aaauacagaguuauggaccuca

SEQ ID NO: 553186 - RNA, 22 nt, Human
agcugccacauggugucacugu

SEQ ID NO: 553187 - RNA, 22 nt, Human
cacaucuauagggacagcaaca

SEQ ID NO: 553188 - RNA, 23 nt, Human
uggcucagcuaguuuuccauuuc

SEQ ID NO: 553189 - RNA, 22 nt, Human
auguggcugguaguugacaacu

SEQ ID NO: 553190 - RNA, 22 nt, Human
ccacugcccaccccgacgucua

SEQ ID NO: 553191 - RNA, 22 nt, Human
ugacaggcagugcugggcaugu

SEQ ID NO: 553192 - RNA, 22 nt, Human
gcaguggggaaugcuggggaga

SEQ ID NO: 553193 - RNA, 22 nt, Human
gaggguggggaauagacugcua

SEQ ID NO: 553194 - RNA, 22 nt, Human
ucagaaagguugagucaugugc

SEQ ID NO: 553195 - RNA, 22 nt, Human
cgugggcugcgcccaguucuuc

SEQ ID NO: 553196 - RNA, 22 nt, Human
agcaggcuuguuaugucugaga

SEQ ID NO: 553197 - RNA, 22 nt, Human
aggauuucugugccuggaaaau

SEQ ID NO: 553198 - RNA, 22 nt, Human
auuauacauuuuguguagagau

SEQ ID NO: 553199 - RNA, 22 nt, Human
uuaauuuauacauaaucacagg

SEQ ID NO: 553200 - RNA, 22 nt, Human
uugcagcuucuaccacuguuuc

SEQ ID NO: 553201 - RNA, 22 nt, Human
aggcagugugggccaagcuucc

SEQ ID NO: 553202 - RNA, 22 nt, Human
acccuuucuuacucacacgcuc

SEQ ID NO: 553203 - RNA, 22 nt, Human
uagucagugaucaguggaguug

SEQ ID NO: 553204 - RNA, 22 nt, Human
uggcccugcuaugauccugcaa

SEQ ID NO: 553205 - RNA, 22 nt, Human
ccagucugugugccagccugcg

SEQ ID NO: 553206 - RNA, 19 nt, Human
ucucucaauugcuucaauu

SEQ ID NO: 553207 - RNA, 22 nt, Human
uggaaggcaacggagugagcug

SEQ ID NO: 553208 - RNA, 22 nt, Human
uuucacagcugucuuccgucuc

SEQ ID NO: 553209 - RNA, 22 nt, Human
aacagcuguauacuguagcugu

SEQ ID NO: 553210 - RNA, 22 nt, Human
aaggaagauauaucaagcuuaa

SEQ ID NO: 553211 - RNA, 22 nt, Human
aaacaugcauucaagaaaaucu

SEQ ID NO: 553212 - RNA, 22 nt, Human
cccaggcagagagcuggugagc

SEQ ID NO: 553213 - RNA, 22 nt, Human
uaguuaauucuuuaagaacaag

SEQ ID NO: 553214 - RNA, 22 nt, Human
uuaaggcacagagagguuaagu

SEQ ID NO: 553215 - RNA, 22 nt, Human
caaagguauucucauuuuggaa

SEQ ID NO: 553216 - RNA, 17 nt, Human
cccugccaccaggaagc

SEQ ID NO: 553217 - RNA, 22 nt, Human
cacaugggcguaauguccaugg

SEQ ID NO: 553218 - RNA, 22 nt, Human
uggcuucaucugcagcacugcc

SEQ ID NO: 553219 - RNA, 22 nt, Human
uauacacauccuccaaagauag

SEQ ID NO: 553220 - RNA, 22 nt, Human
uaaaaugacuuccuccaacauc

SEQ ID NO: 553221 - RNA, 22 nt, Human
uacauacauauucauacaggug

SEQ ID NO: 553222 - RNA, 22 nt, Human
uuacaaagagaaguuguagaau

SEQ ID NO: 553223 - RNA, 22 nt, Human
ucugagagccucuagccuaagu

SEQ ID NO: 553224 - RNA, 22 nt, Human
acauacacaugaauauauuuuu

SEQ ID NO: 553225 - RNA, 22 nt, Human
guuacaaaggaagcuucacugc

SEQ ID NO: 553226 - RNA, 22 nt, Human
cgcuggggcuuuuugcuugaga

SEQ ID NO: 553227 - RNA, 17 nt, Human
ugagacagggcaggccc

SEQ ID NO: 553228 - RNA, 22 nt, Human
auuguguaauuuucagcucaua

SEQ ID NO: 553229 - RNA, 22 nt, Human
gccugccccuuccugggcaggg

SEQ ID NO: 553230 - RNA, 22 nt, Human
uggaagcuguggcauaacugag

SEQ ID NO: 553231 - RNA, 22 nt, Human
agcauggggcuccgcaaugaac

SEQ ID NO: 553232 - RNA, 22 nt, Human
uuuccucuaaacgcauuugcuu

SEQ ID NO: 553233 - RNA, 22 nt, Human
uacaaaugaguuguaugaacca

SEQ ID NO: 553234 - RNA, 22 nt, Human
ugcagggccaugguggcggcug

SEQ ID NO: 553235 - RNA, 22 nt, Human
ugggacuuguguggcaguauuu

SEQ ID NO: 553236 - RNA, 22 nt, Human
auguuucaagagaaaaagagac

SEQ ID NO: 553237 - RNA, 22 nt, Human
auauuugugguuuuuggcuccu

SEQ ID NO: 553238 - RNA, 22 nt, Human
uucuaguguccuuggacuugcu

SEQ ID NO: 553239 - RNA, 22 nt, Human
aaauaugagauguucucuuucg

SEQ ID NO: 553240 - RNA, 21 nt, Human
ggguccugggaugggauccag

SEQ ID NO: 553241 - RNA, 22 nt, Human
ucuucagacuguuguucuuuug

SEQ ID NO: 553242 - RNA, 22 nt, Human
uguccucuuccagugcuccuuc

SEQ ID NO: 553243 - RNA, 22 nt, Human
aggcagccuauggggagcucag

SEQ ID NO: 553244 - RNA, 22 nt, Human
aauagcaccugagguaguuugu

SEQ ID NO: 553245 - RNA, 22 nt, Human
ccauggccaggaaagccaaggu

SEQ ID NO: 553246 - RNA, 22 nt, Human
ugaagcacaggcauacacaacc

SEQ ID NO: 553247 - RNA, 22 nt, Human
gugaggacuaguggguuugugc

SEQ ID NO: 553248 - RNA, 22 nt, Human
agaaaagaggcuuucuaagcau

SEQ ID NO: 553249 - RNA, 22 nt, Human
ucaaaucucauugccuaaaacu

SEQ ID NO: 553250 - RNA, 22 nt, Human
uuuaauuuguauuucuagaggg

SEQ ID NO: 553251 - RNA, 22 nt, Human
auaauacaugguuaaccucuuu

SEQ ID NO: 553252 - RNA, 23 nt, Human
gggugggccaaauuagguagccu

SEQ ID NO: 553253 - RNA, 22 nt, Human
uccaggcauaaugcccaguggu

SEQ ID NO: 553254 - RNA, 21 nt, Human
uuugaaagugggugauucuuu

SEQ ID NO: 553255 - RNA, 22 nt, Human
cucagggagguccugugcugaa

SEQ ID NO: 553256 - RNA, 15 nt, Human
gcagguggaucacuu

SEQ ID NO: 553257 - RNA, 19 nt, Human
acugccugaggcucacagg

SEQ ID NO: 553258 - RNA, 22 nt, Human
guauacaugugguaaaaugcac

SEQ ID NO: 553259 - RNA, 22 nt, Human
aggagcugaagucucugcacuc

SEQ ID NO: 553260 - RNA, 22 nt, Human
uggcagagaacacggcugaucu

SEQ ID NO: 553261 - RNA, 22 nt, Human
gagguggcugcuugcugggaaa

SEQ ID NO: 553262 - RNA, 22 nt, Human
cucagagagggcaccagggcca

SEQ ID NO: 553263 - RNA, 22 nt, Human
auucaacuagugauuguguuau

SEQ ID NO: 553264 - RNA, 18 nt, Human
ugaacuggcaucagaauc

SEQ ID NO: 553265 - RNA, 22 nt, Human
uccaggcaucccccaggacaga

SEQ ID NO: 553266 - RNA, 22 nt, Human
ucccagagccucugccacucug

SEQ ID NO: 553267 - RNA, 22 nt, Human
agccucucuuucugguggcuaa

SEQ ID NO: 553268 - RNA, 22 nt, Human
uggucgaccaguuggaaaguaa

SEQ ID NO: 553269 - RNA, 22 nt, Human
gcccagaaagacugccuaacag

SEQ ID NO: 553270 - RNA, 21 nt, Human
ucccagggccaggugccauca

SEQ ID NO: 553271 - RNA, 23 nt, Human
aagcugccagucugaagccuggg

SEQ ID NO: 553272 - RNA, 22 nt, Human
ucagcuuugaucucaggcaauc

SEQ ID NO: 553273 - RNA, 22 nt, Human
agcuggcagucggccuugaugc

SEQ ID NO: 553274 - RNA, 22 nt, Human
uaggcucagggcugggugacgg

SEQ ID NO: 553275 - RNA, 22 nt, Human
uagauuuccucuuccucauucc

SEQ ID NO: 553276 - RNA, 22 nt, Human
ugcugagugggauuccugugcu

SEQ ID NO: 553277 - RNA, 22 nt, Human
augacagaggagugcaggugau

SEQ ID NO: 553278 - RNA, 22 nt, Human
ucuuugcagaauuuaacuuugc

SEQ ID NO: 553279 - RNA, 19 nt, Human
ucugaaguccagggcauac

SEQ ID NO: 553280 - RNA, 22 nt, Human
uagcuuuaaaaaucaucaaagc

SEQ ID NO: 553281 - RNA, 22 nt, Human
aguucuggcccaggguuucuug

SEQ ID NO: 553282 - RNA, 22 nt, Human
ccuguguggccaggcuggaguc

SEQ ID NO: 553283 - RNA, 22 nt, Human
gaaguggaagccaucggcaguc

SEQ ID NO: 553284 - RNA, 22 nt, Human
aguaugaacggaaggccuggga

SEQ ID NO: 553285 - RNA, 22 nt, Human
uuucaaguuguuuauauccaga

SEQ ID NO: 553286 - RNA, 22 nt, Human
uuucaaagaccauuaacuauca

SEQ ID NO: 553287 - RNA, 22 nt, Human
ccaaugauggugcccacgauga

SEQ ID NO: 553288 - RNA, 22 nt, Human
cgcagcagccccgugguaggug

SEQ ID NO: 553289 - RNA, 22 nt, Human
aaugcacauauauguguauaca

SEQ ID NO: 553290 - RNA, 22 nt, Human
ugcaggugacaccacucuuccu

SEQ ID NO: 553291 - RNA, 22 nt, Human
gagaggagucccuaucacaguu

SEQ ID NO: 553292 - RNA, 22 nt, Human
uaaagguaacaugaacugcuuu

SEQ ID NO: 553293 - RNA, 23 nt, Human
uggccucuccccaccuggcagaa

SEQ ID NO: 553294 - RNA, 22 nt, Human
ugucaaauuuuuauugcaguau

SEQ ID NO: 553295 - RNA, 23 nt, Human
gcagcuugugguuuaguagaggg

SEQ ID NO: 553296 - RNA, 22 nt, Human
ugcaauuuuaauacauuagagg

SEQ ID NO: 553297 - RNA, 22 nt, Human
uaaagacaaaugacauuacggc

SEQ ID NO: 553298 - RNA, 22 nt, Human
uguuuauaccuugguauaacca

SEQ ID NO: 553299 - RNA, 22 nt, Human
cagcaauaacucaaagccauuu

SEQ ID NO: 553300 - RNA, 22 nt, Human
aacaguaugugagauuuacaca

SEQ ID NO: 553301 - RNA, 22 nt, Human
cacuuugauuugugaugugaga

SEQ ID NO: 553302 - RNA, 22 nt, Human
ucuggcucauacaagccugcaa

SEQ ID NO: 553303 - RNA, 22 nt, Human
caggaaauaucuccuggcagag

SEQ ID NO: 553304 - RNA, 22 nt, Human
ucaaugauuagaguuuagugug

SEQ ID NO: 553305 - RNA, 22 nt, Human
uuaggaagagcuuucaaucacu

SEQ ID NO: 553306 - RNA, 22 nt, Human
caggacagagcccagacugugu

SEQ ID NO: 553307 - RNA, 22 nt, Human
agcucucaagauaagaaagaac

SEQ ID NO: 553308 - RNA, 18 nt, Human
uggcagagugucuguucu

SEQ ID NO: 553309 - RNA, 22 nt, Human
aggucaggguauucacgucugu

SEQ ID NO: 553310 - RNA, 22 nt, Human
uccuucagcucucuauuuagau

SEQ ID NO: 553311 - RNA, 19 nt, Human
ugagacagggauucaggug

SEQ ID NO: 553312 - RNA, 22 nt, Human
gaggccaaucaauagggcaaua

SEQ ID NO: 553313 - RNA, 22 nt, Human
ucaggcugaggucaucugcauc

SEQ ID NO: 553314 - RNA, 22 nt, Human
gagagggcucuguguggguacu

SEQ ID NO: 553315 - RNA, 22 nt, Human
ccagcccuucccaacuggccag

SEQ ID NO: 553316 - RNA, 22 nt, Human
ucccaguguggcaggccaugga

SEQ ID NO: 553317 - RNA, 20 nt, Human
aaggagaaugacacggcugc

SEQ ID NO: 553318 - RNA, 22 nt, Human
aggcaggcugcuauggaguaga

SEQ ID NO: 553319 - RNA, 22 nt, Human
gacccagcuaaccaggugggga

SEQ ID NO: 553320 - RNA, 22 nt, Human
ugcuggcuggccuggccuggac

SEQ ID NO: 553321 - RNA, 22 nt, Human
cauauacacuuccaccucugug

SEQ ID NO: 553322 - RNA, 22 nt, Human
uaauacagggcacuuugaguga

SEQ ID NO: 553323 - RNA, 22 nt, Human
uaaauaagucacugaccauuua

SEQ ID NO: 553324 - RNA, 19 nt, Human
cuucauucuucagcuuuug

SEQ ID NO: 553325 - RNA, 19 nt, Human
agcauuuggaauucuacac

SEQ ID NO: 553326 - RNA, 22 nt, Human
aggaaauguaguccucaucucc

SEQ ID NO: 553327 - RNA, 22 nt, Human
acuuugcaauacuuaauacaaa

SEQ ID NO: 553328 - RNA, 22 nt, Human
guccacauaggaacccagcuuc

SEQ ID NO: 553329 - RNA, 22 nt, Human
gugacaggcauggggucaugca

SEQ ID NO: 553330 - RNA, 22 nt, Human
aaaagcagagacucuggagcua

SEQ ID NO: 553331 - RNA, 20 nt, Human
ggguggaguugcggucugug

SEQ ID NO: 553332 - RNA, 23 nt, Human
uuccugugguauauuuuauaggg

SEQ ID NO: 553333 - RNA, 22 nt, Human
agcugguaugaacaggauagga

SEQ ID NO: 553334 - RNA, 22 nt, Human
gcugagcuagcuaucucagucu

SEQ ID NO: 553335 - RNA, 21 nt, Human
ccagccucagaucagggagcu

SEQ ID NO: 553336 - RNA, 21 nt, Human
uggcaggcagcuggaagcuug

SEQ ID NO: 553337 - RNA, 22 nt, Human
aagacagcucaggacagauuca

SEQ ID NO: 553338 - RNA, 22 nt, Human
aggauccuuuuucugcuguuug

SEQ ID NO: 553339 - RNA, 22 nt, Human
uauaaaguuucgaaagauguau

SEQ ID NO: 553340 - RNA, 22 nt, Human
gcucagagcuugaaguuccacu

SEQ ID NO: 553341 - RNA, 22 nt, Human
caucuugccugcuauucuguug

SEQ ID NO: 553342 - RNA, 22 nt, Human
ccugcagcuccggauuucuggg

SEQ ID NO: 553343 - RNA, 22 nt, Human
cgucccaguuccagccgcgcug

SEQ ID NO: 553344 - RNA, 22 nt, Human
cuuggcugucuauaggaaagag

SEQ ID NO: 553345 - RNA, 22 nt, Human
cugcugggccuggucucugagg

SEQ ID NO: 553346 - RNA, 19 nt, Human
cugagagaugcuucacaca

SEQ ID NO: 553347 - RNA, 22 nt, Human
cccagccagccucuucccauau

SEQ ID NO: 553348 - RNA, 22 nt, Human
agcagguggaaaauucuuauca

SEQ ID NO: 553349 - RNA, 22 nt, Human
auuuccaaucucugcauauggg

SEQ ID NO: 553350 - RNA, 22 nt, Human
ggauacaacuagaagauggcag

SEQ ID NO: 553351 - RNA, 22 nt, Human
uucaccacuuugcaccaggccu

SEQ ID NO: 553352 - RNA, 22 nt, Human
ugccagccagguucugaggcua

SEQ ID NO: 553353 - RNA, 22 nt, Human
gauuauauaauggaagcucuug

SEQ ID NO: 553354 - RNA, 22 nt, Human
ggcugcugguagggguaggaag

SEQ ID NO: 553355 - RNA, 22 nt, Human
ccuuuucuguguggguaauuua

SEQ ID NO: 553356 - RNA, 22 nt, Human
uuuuguguccuucacaucaugu

SEQ ID NO: 553357 - RNA, 23 nt, Human
agggcacugaagcuggaauuggg

SEQ ID NO: 553358 - RNA, 22 nt, Human
ucuauuuaggagacccugguuc

SEQ ID NO: 553359 - RNA, 22 nt, Human
uucaagugaggcugucuuuaga

SEQ ID NO: 553360 - RNA, 22 nt, Human
agcugccagcaaguuucaaaca

SEQ ID NO: 553361 - RNA, 22 nt, Human
cugccacuagcuuucacaucuu

SEQ ID NO: 553362 - RNA, 18 nt, Human
aaguaacagaagagcaca

SEQ ID NO: 553363 - RNA, 22 nt, Human
agggagagguugaaaccucagu

SEQ ID NO: 553364 - RNA, 22 nt, Human
agugcuggcccauagcugcugg

SEQ ID NO: 553365 - RNA, 22 nt, Human
ucauggcacuuagcacaguccu

SEQ ID NO: 553366 - RNA, 22 nt, Human
ucaaaggcccauugucccguug

SEQ ID NO: 553367 - RNA, 22 nt, Human
cagccaggagcucccccugcuc

SEQ ID NO: 553368 - RNA, 22 nt, Human
gcugccaguaguuggagcucca

SEQ ID NO: 553369 - RNA, 22 nt, Human
gcccuggccuggcgcguuguca

SEQ ID NO: 553370 - RNA, 22 nt, Human
gggaagaguaacuagcccaugu

SEQ ID NO: 553371 - RNA, 22 nt, Human
ggcucuggguucugcaaugcgu

SEQ ID NO: 553372 - RNA, 22 nt, Human
cugcccuggucccauggcugau

SEQ ID NO: 553373 - RNA, 22 nt, Human
ccucacagcuuuucaaagugga

SEQ ID NO: 553374 - RNA, 22 nt, Human
aggccagggucccacacucgca

SEQ ID NO: 553375 - RNA, 22 nt, Human
caaaagcaguucuaucugaguu

SEQ ID NO: 553376 - RNA, 22 nt, Human
aguaaucaaauuaagcuaauug

SEQ ID NO: 553377 - RNA, 21 nt, Human
ugugaaauagcuaugcuacau

SEQ ID NO: 553378 - RNA, 22 nt, Human
acagaaauauagaagguaggaa

SEQ ID NO: 553379 - RNA, 22 nt, Human
uuuaaugugagucccuuucaag

SEQ ID NO: 553380 - RNA, 22 nt, Human
cagagccuaaaacgacuccacu

SEQ ID NO: 553381 - RNA, 22 nt, Human
ucuauuuacagaaagcagaauu

SEQ ID NO: 553382 - RNA, 22 nt, Human
cuuaacagagagaaguguugcu

SEQ ID NO: 553383 - RNA, 22 nt, Human
aggcacaggaaugucauccagu

SEQ ID NO: 553384 - RNA, 22 nt, Human
cccagccucagcuuuacuucca

SEQ ID NO: 553385 - RNA, 22 nt, Human
ugcuggcuacugauggcaggcc

SEQ ID NO: 553386 - RNA, 22 nt, Human
gcacagggcugccaggcggcuu

SEQ ID NO: 553387 - RNA, 22 nt, Human
ugcuggggcucugaccacucca

SEQ ID NO: 553388 - RNA, 22 nt, Human
uuuuucuugugcuggaucuaau

SEQ ID NO: 553389 - RNA, 22 nt, Human
uuuuucaagacaaccugcaugu

SEQ ID NO: 553390 - RNA, 22 nt, Human
gaggggcuggcacgauggcugc

SEQ ID NO: 553391 - RNA, 22 nt, Human
guucugggaagguggaccuguu

SEQ ID NO: 553392 - RNA, 21 nt, Human
cagaggcugagagggcaaucu

SEQ ID NO: 553393 - RNA, 22 nt, Human
aguaacagagcauggguucaga

SEQ ID NO: 553394 - RNA, 22 nt, Human
uuuacagcuacuguccuauuuc

SEQ ID NO: 553395 - RNA, 22 nt, Human
agugucugcuuugagucaggug

SEQ ID NO: 553396 - RNA, 22 nt, Human
ucagacagucaucagagcuugu

SEQ ID NO: 553397 - RNA, 22 nt, Human
uuucuggcagcgggacaggggu

SEQ ID NO: 553398 - RNA, 22 nt, Human
auguuguagcauaugaaauaua

SEQ ID NO: 553399 - RNA, 22 nt, Human
aucuacaggcugaggugggagg

SEQ ID NO: 553400 - RNA, 22 nt, Human
acugggcugcuugagugccuuc

SEQ ID NO: 553401 - RNA, 22 nt, Human
agaaagcuuaugaaugggcaag

SEQ ID NO: 553402 - RNA, 22 nt, Human
uuccagagcaguuuucagauca

SEQ ID NO: 553403 - RNA, 22 nt, Human
augaaaaguucgaucuagaagg

SEQ ID NO: 553404 - RNA, 22 nt, Human
agccagcuggagaccacuguuu

SEQ ID NO: 553405 - RNA, 22 nt, Human
aauucacaaaaguuagauccau

SEQ ID NO: 553406 - RNA, 22 nt, Human
gguucacauauugagaguauuc

SEQ ID NO: 553407 - RNA, 22 nt, Human
ggagaaagcuguaguggaaugu

SEQ ID NO: 553408 - RNA, 22 nt, Human
aaaaggcuagcuaguaacagaa

SEQ ID NO: 553409 - RNA, 22 nt, Human
uuccucagcuguguccuggcga

SEQ ID NO: 553410 - RNA, 18 nt, Human
uauaaccuguuuugaugg

SEQ ID NO: 553411 - RNA, 16 nt, Human
gcagaggaaaggggag

SEQ ID NO: 553412 - RNA, 22 nt, Human
caggcugggcuccggagauaaa

SEQ ID NO: 553413 - RNA, 22 nt, Human
aagaguuucuuuauuaaccuuu

SEQ ID NO: 553414 - RNA, 22 nt, Human
ucugccugaaucucuuagaaca

SEQ ID NO: 553415 - RNA, 22 nt, Human
gaaucauuggaaccacauccaa

SEQ ID NO: 553416 - RNA, 22 nt, Human
acaaggcuguggggagaacuga

SEQ ID NO: 553417 - RNA, 23 nt, Human
cccagagcacagccuccagaugc

SEQ ID NO: 553418 - RNA, 22 nt, Human
augcugaagagagaacuacuca

SEQ ID NO: 553419 - RNA, 22 nt, Human
guccucugggagccuugagccu

SEQ ID NO: 553420 - RNA, 19 nt, Human
uggggucaagagaggcuuc

SEQ ID NO: 553421 - RNA, 22 nt, Human
uggcucagaacuacuucuaguu

SEQ ID NO: 553422 - RNA, 22 nt, Human
gggcuggucuggcuuagucagg

SEQ ID NO: 553423 - RNA, 22 nt, Human
uuaaacauuuauggaggcagca

SEQ ID NO: 553424 - RNA, 22 nt, Human
uugcuugaacccaggaagugga

SEQ ID NO: 553425 - RNA, 20 nt, Human
cagagaccaggccagguguc

SEQ ID NO: 553426 - RNA, 22 nt, Human
ggccucugccccagccacaccu

SEQ ID NO: 553427 - RNA, 22 nt, Human
uggguggaauaaaucaguucug

SEQ ID NO: 553428 - RNA, 22 nt, Human
caaggagaaaacggcuucugaa

SEQ ID NO: 553429 - RNA, 22 nt, Human
uaucuuuaaugcuuggagguua

SEQ ID NO: 553430 - RNA, 22 nt, Human
ugcagcauucuuggccacuacu

SEQ ID NO: 553431 - RNA, 22 nt, Human
cauuuauucagcucagucgguu

SEQ ID NO: 553432 - RNA, 23 nt, Human
uuguaaaacagugugacgguucc

SEQ ID NO: 553433 - RNA, 22 nt, Human
guggagcccugccuugcucaug

SEQ ID NO: 553434 - RNA, 22 nt, Human
aucuucccaggcuggggagagg

SEQ ID NO: 553435 - RNA, 22 nt, Human
cagcugugagcagccaguugcc

SEQ ID NO: 553436 - RNA, 20 nt, Human
cuggcaggagcgagucuacc

SEQ ID NO: 553437 - RNA, 22 nt, Human
ugcaggagcugugcggugaggg

SEQ ID NO: 553438 - RNA, 22 nt, Human
aggccugagcagaggaguggac

SEQ ID NO: 553439 - RNA, 22 nt, Human
aucuguuguuuucucauauguu

SEQ ID NO: 553440 - RNA, 22 nt, Human
agggcagaaaccaccuugaugg

SEQ ID NO: 553441 - RNA, 22 nt, Human
uagaugcauagagcacagcaca

SEQ ID NO: 553442 - RNA, 22 nt, Human
caacuuuugacacgugugcuaa

SEQ ID NO: 553443 - RNA, 22 nt, Human
caaagcaggcuugucaaauugc

SEQ ID NO: 553444 - RNA, 22 nt, Human
agggcugagcccaggcauguag

SEQ ID NO: 553445 - RNA, 22 nt, Human
gcugauccuuuuaugucuagcu

SEQ ID NO: 553446 - RNA, 22 nt, Human
cugaaauucugccucugcacaa

SEQ ID NO: 553447 - RNA, 22 nt, Human
agggauggaagcucgucugcaa

SEQ ID NO: 553448 - RNA, 22 nt, Human
ccuggggaaaagcaggcauuua

SEQ ID NO: 553449 - RNA, 21 nt, Human
ucuggcccuagguugggccuc

SEQ ID NO: 553450 - RNA, 22 nt, Human
aauguuugaccaaaaaacugca

SEQ ID NO: 553451 - RNA, 17 nt, Human
aaacaaugcagacaagc

SEQ ID NO: 553452 - RNA, 22 nt, Human
ugcugccauggucgcugguguc

SEQ ID NO: 553453 - RNA, 22 nt, Human
gcagcagaaguagaaguacagg

SEQ ID NO: 553454 - RNA, 22 nt, Human
ugggaccuguuacauugaguua

SEQ ID NO: 553455 - RNA, 22 nt, Human
agaaaguucugugaguuguuca

SEQ ID NO: 553456 - RNA, 22 nt, Human
uaugaagugucuguuguaucug

SEQ ID NO: 553457 - RNA, 20 nt, Human
cagcagagacccauggggag

SEQ ID NO: 553458 - RNA, 22 nt, Human
acauguguauagccuguauaga

SEQ ID NO: 553459 - RNA, 22 nt, Human
ggccuugggaggagggucagaa

SEQ ID NO: 553460 - RNA, 22 nt, Human
gagaaaugagugauucacuuuu

SEQ ID NO: 553461 - RNA, 22 nt, Human
cagaauaaagguacaauugagu

SEQ ID NO: 553462 - RNA, 22 nt, Human
caggccagugugcuucccaggc

SEQ ID NO: 553463 - RNA, 22 nt, Human
uucugggccuccuaggacaggc

SEQ ID NO: 553464 - RNA, 22 nt, Human
aagaacuagucuuacagccuca

SEQ ID NO: 553465 - RNA, 22 nt, Human
gcugucugggaugucacugcug

SEQ ID NO: 553466 - RNA, 21 nt, Human
aagaugguuaugugcuaaaga

SEQ ID NO: 553467 - RNA, 19 nt, Human
uucacauuggaagaaguag

SEQ ID NO: 553468 - RNA, 22 nt, Human
cagugcagucaaggaagaacca

SEQ ID NO: 553469 - RNA, 22 nt, Human
ugcagagagaccccugggccag

SEQ ID NO: 553470 - RNA, 22 nt, Human
aacccagccguguagcugccgc

SEQ ID NO: 553471 - RNA, 22 nt, Human
gggccucagcucugcucugcaa

SEQ ID NO: 553472 - RNA, 22 nt, Human
aauucaaauuacaauaguuguu

SEQ ID NO: 553473 - RNA, 22 nt, Human
gggcuggaggagauccagaggc

SEQ ID NO: 553474 - RNA, 23 nt, Human
uccuccugacacagccugaguga

SEQ ID NO: 553475 - RNA, 22 nt, Human
acagagaucagaggcauaagca

SEQ ID NO: 553476 - RNA, 22 nt, Human
caaaggcuuccacugcauccuu

SEQ ID NO: 553477 - RNA, 22 nt, Human
aggcaguccccagggguguugc

SEQ ID NO: 553478 - RNA, 20 nt, Human
cugggcucaagugagccucc

SEQ ID NO: 553479 - RNA, 23 nt, Human
ugcucugggaggcccuggagagc

SEQ ID NO: 553480 - RNA, 22 nt, Human
aagggcaggagaagacggauau

SEQ ID NO: 553481 - RNA, 22 nt, Human
agagcaucuaacacauaagccu

SEQ ID NO: 553482 - RNA, 22 nt, Human
cagauuuagaguggggcuugga

SEQ ID NO: 553483 - RNA, 22 nt, Human
guaacagaaagucaugcucauu

SEQ ID NO: 553484 - RNA, 19 nt, Human
ccaggccaucccaguuccc

SEQ ID NO: 553485 - RNA, 17 nt, Human
uuugaaaggaugucagu

SEQ ID NO: 553486 - RNA, 22 nt, Human
cagguccucgggggaggccggc

SEQ ID NO: 553487 - RNA, 22 nt, Human
augcaagagcaauaugguaugc

SEQ ID NO: 553488 - RNA, 22 nt, Human
uugccauuaucauuuaugauac

SEQ ID NO: 553489 - RNA, 22 nt, Human
caggcagccugcggucugcaca

SEQ ID NO: 553490 - RNA, 19 nt, Human
ccugugugggguagagauc

SEQ ID NO: 553491 - RNA, 22 nt, Human
ccugggcagggcuggacucuca

SEQ ID NO: 553492 - RNA, 22 nt, Human
ggagucagccugucagagugua

SEQ ID NO: 553493 - RNA, 22 nt, Human
caggguggggcuggcuaucaaa

SEQ ID NO: 553494 - RNA, 22 nt, Human
acauuucucuugaugucucuau

SEQ ID NO: 553495 - RNA, 22 nt, Human
acacugugacaaaggcuguucu

SEQ ID NO: 553496 - RNA, 22 nt, Human
aggcugaugcuggcugaggcug

SEQ ID NO: 553497 - RNA, 21 nt, Human
acaggcuuuagaaaaugacuc

SEQ ID NO: 553498 - RNA, 22 nt, Human
uaaaucacaaauuuucucauuu

SEQ ID NO: 553499 - RNA, 22 nt, Human
gcagagucugggcagccuccau

SEQ ID NO: 553500 - RNA, 22 nt, Human
ccugagagcauuccacacugaa

SEQ ID NO: 553501 - RNA, 22 nt, Human
ugaggccugaagccugaaguga

SEQ ID NO: 553502 - RNA, 22 nt, Human
caggaaagagcugccaggcagg

SEQ ID NO: 553503 - RNA, 22 nt, Human
gcuaggaaucggacccaggaag

SEQ ID NO: 553504 - RNA, 22 nt, Human
ccucuggcuguaccacuggcac

SEQ ID NO: 553505 - RNA, 22 nt, Human
cuggccuuuagccccagugucu

SEQ ID NO: 553506 - RNA, 22 nt, Human
gugggggacccaggugcugucc

SEQ ID NO: 553507 - RNA, 22 nt, Human
uugauacaggccuucuagauga

SEQ ID NO: 553508 - RNA, 22 nt, Human
aaaguuugaaugauauauuagu

SEQ ID NO: 553509 - RNA, 18 nt, Human
uggaggcagaguucuggc

SEQ ID NO: 553510 - RNA, 22 nt, Human
cuggugcuggagccuagucccu

SEQ ID NO: 553511 - RNA, 22 nt, Human
auauaacucuuguucuuauagu

SEQ ID NO: 553512 - RNA, 22 nt, Human
acaaaggcagagaauucaacau

SEQ ID NO: 553513 - RNA, 22 nt, Human
agaugaaaauacgugacuuuaa

SEQ ID NO: 553514 - RNA, 22 nt, Human
gugggccaggacccgcuguccg

SEQ ID NO: 553515 - RNA, 22 nt, Human
caguuucuuaucuucaaaauug

SEQ ID NO: 553516 - RNA, 22 nt, Human
gugcucacugugagacguccug

SEQ ID NO: 553517 - RNA, 22 nt, Human
uggcugagaaugggaugaugcc

SEQ ID NO: 553518 - RNA, 22 nt, Human
uucaagaucgaguuuaaaguga

SEQ ID NO: 553519 - RNA, 22 nt, Human
acugccugcucauaacauugcu

SEQ ID NO: 553520 - RNA, 20 nt, Human
ugaggcaggagaauggcaug

SEQ ID NO: 553521 - RNA, 22 nt, Human
cagcuuauucaguaagcacaua

SEQ ID NO: 553522 - RNA, 22 nt, Human
guuuuucuuugugugaagacaa

SEQ ID NO: 553523 - RNA, 22 nt, Human
augaaagaugauuuaaaguacu

SEQ ID NO: 553524 - RNA, 22 nt, Human
agcucccagggcugggcaaguu

SEQ ID NO: 553525 - RNA, 22 nt, Human
uaagucaucccauaacagugcu

SEQ ID NO: 553526 - RNA, 22 nt, Human
cagagcagacguugagauuaag

SEQ ID NO: 553527 - RNA, 22 nt, Human
aggugcugccccgagaaggaug

SEQ ID NO: 553528 - RNA, 22 nt, Human
caagaauaaaauacauguugau

SEQ ID NO: 553529 - RNA, 22 nt, Human
ugucucaguucccuucucugga

SEQ ID NO: 553530 - RNA, 22 nt, Human
cuagggaaugagagacuggauc

SEQ ID NO: 553531 - RNA, 22 nt, Human
ucaaagauugaaacuaaggaga

SEQ ID NO: 553532 - RNA, 22 nt, Human
uuaugcuaguauaguccuuaga

SEQ ID NO: 553533 - RNA, 22 nt, Human
uaggaacaguccuagaaaucug

SEQ ID NO: 553534 - RNA, 18 nt, Human
auggucucauacugggag

SEQ ID NO: 553535 - RNA, 20 nt, Human
cagagcuguuauggaugaug

SEQ ID NO: 553536 - RNA, 22 nt, Human
cugcagagaauuguggggcuuc

SEQ ID NO: 553537 - RNA, 22 nt, Human
acugugcacaauucuaaguccu

SEQ ID NO: 553538 - RNA, 22 nt, Human
uggaaacaucucugccuuuauu

SEQ ID NO: 553539 - RNA, 22 nt, Human
gaggggcugggcagucccugga

SEQ ID NO: 553540 - RNA, 22 nt, Human
caguccagagcccaccagagga

SEQ ID NO: 553541 - RNA, 22 nt, Human
gagcagagaauccagcuaagug

SEQ ID NO: 553542 - RNA, 21 nt, Human
agaagccuggguggagguggg

SEQ ID NO: 553543 - RNA, 22 nt, Human
cccaggcagggacgugcucugg

SEQ ID NO: 553544 - RNA, 22 nt, Human
auccccagaaaauaggugccua

SEQ ID NO: 553545 - RNA, 21 nt, Human
ugaaacuaccuacaagcuacc

SEQ ID NO: 553546 - RNA, 20 nt, Human
ugcuuccuggccacugcggg

SEQ ID NO: 553547 - RNA, 22 nt, Human
uucacaaagcugguuccuucug

SEQ ID NO: 553548 - RNA, 22 nt, Human
ugcagggaagcaaggguggcuc

SEQ ID NO: 553549 - RNA, 22 nt, Human
uuacaaagcgcuuuaccucuga

SEQ ID NO: 553550 - RNA, 22 nt, Human
gccaagcucaccuucugaugga

SEQ ID NO: 553551 - RNA, 22 nt, Human
aagaacaacugcuuuaaaagca

SEQ ID NO: 553552 - RNA, 22 nt, Human
ccuguucauuuguauuugucuu

SEQ ID NO: 553553 - RNA, 22 nt, Human
gagcgggaggaacggcucgggc

SEQ ID NO: 553554 - RNA, 22 nt, Human
agaucacagucaauugcaaguu

SEQ ID NO: 553555 - RNA, 22 nt, Human
uauucugugugauauguaaaug

SEQ ID NO: 553556 - RNA, 22 nt, Human
agggcagagauuaauuaagaca

SEQ ID NO: 553557 - RNA, 22 nt, Human
agaagccagucgcucucccgca

SEQ ID NO: 553558 - RNA, 22 nt, Human
caaauacaaauacgggcagcuu

SEQ ID NO: 553559 - RNA, 22 nt, Human
ccuaggaacccccaggcuucug

SEQ ID NO: 553560 - RNA, 22 nt, Human
ucuggcugauucccugggacug

SEQ ID NO: 553561 - RNA, 22 nt, Human
aaaggccacacugcucuuucuc

SEQ ID NO: 553562 - RNA, 22 nt, Human
aucagcaagcauuuauugagug

SEQ ID NO: 553563 - RNA, 22 nt, Human
aauuccagucucugcucuauuu

SEQ ID NO: 553564 - RNA, 22 nt, Human
ugggaagccuagcagacagcug

SEQ ID NO: 553565 - RNA, 22 nt, Human
uccaauuugaaaugguauaugu

SEQ ID NO: 553566 - RNA, 22 nt, Human
gggaaacuggggacugaaucug

SEQ ID NO: 553567 - RNA, 19 nt, Human
ucaggacugacuugaaguc

SEQ ID NO: 553568 - RNA, 22 nt, Human
uacaaagugauuuuggaauuga

SEQ ID NO: 553569 - RNA, 20 nt, Human
ccagcuuucccugcagcauc

SEQ ID NO: 553570 - RNA, 22 nt, Human
gcaggggcugagcaccagcggg

SEQ ID NO: 553571 - RNA, 22 nt, Human
cugagagguaagcagcgcagug

SEQ ID NO: 553572 - RNA, 19 nt, Human
gagggcucauuugaacaau

SEQ ID NO: 553573 - RNA, 22 nt, Human
cuucugggauuaauuuuuccug

SEQ ID NO: 553574 - RNA, 22 nt, Human
auaucuuucaaagccaaaagua

SEQ ID NO: 553575 - RNA, 22 nt, Human
aauauaacacagauggccuguu

SEQ ID NO: 553576 - RNA, 22 nt, Human
aaacagcaauuacuuuugcacc

SEQ ID NO: 553577 - RNA, 22 nt, Human
ugcccugguuacacuggagucc

SEQ ID NO: 553578 - RNA, 23 nt, Human
ucuggcuuugcuggaaguuuuga

SEQ ID NO: 553579 - RNA, 23 nt, Human
ugugggaauguuggagaggaaac

SEQ ID NO: 553580 - RNA, 18 nt, Human
aucuuuccauagcauguu

SEQ ID NO: 553581 - RNA, 23 nt, Human
ccugugugcccuuaauucacagc

SEQ ID NO: 553582 - RNA, 22 nt, Human
gcuuccuggagggagagagcug

SEQ ID NO: 553583 - RNA, 22 nt, Human
ucaaaauuaaaccaacguccag

SEQ ID NO: 553584 - RNA, 20 nt, Human
uucuuuguuccuuacauuug

SEQ ID NO: 553585 - RNA, 22 nt, Human
uggccuggcucacagugagauu

SEQ ID NO: 553586 - RNA, 22 nt, Human
ugagcuggucacuccuucugaa

SEQ ID NO: 553587 - RNA, 22 nt, Human
uguagaaauuaguaagaucaac

SEQ ID NO: 553588 - RNA, 22 nt, Human
guggcccucugauagggucagg

SEQ ID NO: 553589 - RNA, 22 nt, Human
uggaagauaugcugauucucug

SEQ ID NO: 553590 - RNA, 22 nt, Human
caggaaaaaugccaggagucag

SEQ ID NO: 553591 - RNA, 22 nt, Human
ugcagcugcuugauucaucuug

SEQ ID NO: 553592 - RNA, 22 nt, Human
cccaaccagaaauugacagaca

SEQ ID NO: 553593 - RNA, 22 nt, Human
aaacacugcgugguggcaacuc

SEQ ID NO: 553594 - RNA, 20 nt, Human
guuaaaagaguaauuugagg

SEQ ID NO: 553595 - RNA, 22 nt, Human
uccaagcuacugaagguuuggg

SEQ ID NO: 553596 - RNA, 22 nt, Human
gaagagcuuaguuguccuagaa

SEQ ID NO: 553597 - RNA, 22 nt, Human
ccagaccacccuggccaugcac

SEQ ID NO: 553598 - RNA, 22 nt, Human
aaagacauuagauuaacguaca

SEQ ID NO: 553599 - RNA, 22 nt, Human
aguaugaauacagauuuucucu

SEQ ID NO: 553600 - RNA, 22 nt, Human
uuucacagauauaagauuucac

SEQ ID NO: 553601 - RNA, 22 nt, Human
uuuagaaauugcagagugggug

SEQ ID NO: 553602 - RNA, 22 nt, Human
cucucccagucaggcucaggau

SEQ ID NO: 553603 - RNA, 22 nt, Human
ugugcaggugcaggaagggggc

SEQ ID NO: 553604 - RNA, 22 nt, Human
aaagucacauagcaucacuucu

SEQ ID NO: 553605 - RNA, 22 nt, Human
ugagguggcacacacuuccugc

SEQ ID NO: 553606 - RNA, 22 nt, Human
gcugccuuugugagccaagggg

SEQ ID NO: 553607 - RNA, 22 nt, Human
gccugagagucuccagaccuug

SEQ ID NO: 553608 - RNA, 22 nt, Human
cuuucaaaacgcucuguaugca

SEQ ID NO: 553609 - RNA, 22 nt, Human
aggcuuaaaugcucauaucagu

SEQ ID NO: 553610 - RNA, 22 nt, Human
gccacuguuccaccaucuugau

SEQ ID NO: 553611 - RNA, 22 nt, Human
gaggagagaugguagauugggu

SEQ ID NO: 553612 - RNA, 22 nt, Human
ucugccugagcagagggaggcc

SEQ ID NO: 553613 - RNA, 22 nt, Human
acugcacuucacccugggugac

SEQ ID NO: 553614 - RNA, 22 nt, Human
agcuuuauuaacucuccaggug

SEQ ID NO: 553615 - RNA, 22 nt, Human
agagccugcaucaggcuugggg

SEQ ID NO: 553616 - RNA, 23 nt, Human
gccucagagaaacagcugcacac

SEQ ID NO: 553617 - RNA, 20 nt, Human
uucuggaggcuacaagucug

SEQ ID NO: 553618 - RNA, 22 nt, Human
aucaggaaugaauacuuuugga

SEQ ID NO: 553619 - RNA, 20 nt, Human
ggaagccagcauccuugagg

SEQ ID NO: 553620 - RNA, 23 nt, Human
uggggcucuggcaggccugaggu

SEQ ID NO: 553621 - RNA, 22 nt, Human
ggucaggggcugcucuacagag

SEQ ID NO: 553622 - RNA, 22 nt, Human
ugccuuuuccaguuucuagggg

SEQ ID NO: 553623 - RNA, 22 nt, Human
cugggccuaacccacagcguuu

SEQ ID NO: 553624 - RNA, 21 nt, Human
cagcuucuucugugaccuggu

SEQ ID NO: 553625 - RNA, 22 nt, Human
ccuggcugcccauggacccucu

SEQ ID NO: 553626 - RNA, 22 nt, Human
acacuuuaucaauauucaaaaa

SEQ ID NO: 553627 - RNA, 22 nt, Human
agggugccuggaagccacucac

SEQ ID NO: 553628 - RNA, 22 nt, Human
ccuggcaguucaucaaauggca

SEQ ID NO: 553629 - RNA, 22 nt, Human
cacagggccuugugugacugca

SEQ ID NO: 553630 - RNA, 22 nt, Human
acagaccaaaaaaggauauugg

SEQ ID NO: 553631 - RNA, 22 nt, Human
guauuagggccaaaggcaggaa

SEQ ID NO: 553632 - RNA, 22 nt, Human
cugcaggggcuggaguuggcuu

SEQ ID NO: 553633 - RNA, 22 nt, Human
uaacacauuuuccucauacgga

SEQ ID NO: 553634 - RNA, 22 nt, Human
gaugccugcauuucaggagagu

SEQ ID NO: 553635 - RNA, 22 nt, Human
uacaguuuuuauucaugacaag

SEQ ID NO: 553636 - RNA, 22 nt, Human
acagcuuuaguguggguggugc

SEQ ID NO: 553637 - RNA, 22 nt, Human
uacaaagucaccagcuucuugc

SEQ ID NO: 553638 - RNA, 22 nt, Human
uauuuguccagguaaauuucag

SEQ ID NO: 553639 - RNA, 22 nt, Human
aggcgugggaggaucugaggcc

SEQ ID NO: 553640 - RNA, 23 nt, Human
auuccugaggcuccuuaugcacc

SEQ ID NO: 553641 - RNA, 22 nt, Human
caggccugguugagcccugaga

SEQ ID NO: 553642 - RNA, 22 nt, Human
aacauacagugagcaguggacu

SEQ ID NO: 553643 - RNA, 22 nt, Human
gaauguuuaaaaggugcaguuu

SEQ ID NO: 553644 - RNA, 22 nt, Human
ccaggccuggccaggggaugcc

SEQ ID NO: 553645 - RNA, 22 nt, Human
ugaaagaaggguggaaaaugua

SEQ ID NO: 553646 - RNA, 22 nt, Human
aguacaaacuguuucaaaguag

SEQ ID NO: 553647 - RNA, 22 nt, Human
ucccaaggauaagagagucuga

SEQ ID NO: 553648 - RNA, 22 nt, Human
aaaugcacagaaaggaugugga

SEQ ID NO: 553649 - RNA, 22 nt, Human
gucacccugcuguuuguccauu

SEQ ID NO: 553650 - RNA, 22 nt, Human
aaagaugucacaagaugugaug

SEQ ID NO: 553651 - RNA, 22 nt, Human
auuuguucagcauugaauuugg

SEQ ID NO: 553652 - RNA, 22 nt, Human
ucaaauacauggucaaucaacu

SEQ ID NO: 553653 - RNA, 22 nt, Human
aaguuuaucccucucacaguua

SEQ ID NO: 553654 - RNA, 21 nt, Human
ugggagagcguugcuguccuc

SEQ ID NO: 553655 - RNA, 22 nt, Human
ucugauuagcuccauuugcuaa

SEQ ID NO: 553656 - RNA, 22 nt, Human
uagcuaucuguguccagaucca

SEQ ID NO: 553657 - RNA, 22 nt, Human
agaggcugugcccaccaggcaa

SEQ ID NO: 553658 - RNA, 22 nt, Human
aagauaauauucauuaacuaga

SEQ ID NO: 553659 - RNA, 22 nt, Human
ugcugugguucccagaguggau

SEQ ID NO: 553660 - RNA, 22 nt, Human
ggugugccuggggcuuagcugc

SEQ ID NO: 553661 - RNA, 22 nt, Human
ugggcugaguggcagccagagu

SEQ ID NO: 553662 - RNA, 22 nt, Human
ggccagaaguuggaaaagagcc

SEQ ID NO: 553663 - RNA, 22 nt, Human
ccagcucucuuugaagcauaaa

SEQ ID NO: 553664 - RNA, 19 nt, Human
agcagccaucgaccaugga

SEQ ID NO: 553665 - RNA, 22 nt, Human
agugcccuuuacaacuucuuga

SEQ ID NO: 553666 - RNA, 22 nt, Human
agggccagcccauaaugccaaa

SEQ ID NO: 553667 - RNA, 22 nt, Human
gaauguuuuucauuggugacuc

SEQ ID NO: 553668 - RNA, 22 nt, Human
cugaggaggggccugagugaga

SEQ ID NO: 553669 - RNA, 22 nt, Human
caggugucaaaauacuaagugg

SEQ ID NO: 553670 - RNA, 22 nt, Human
uggugcaggaguuggcagggac

SEQ ID NO: 553671 - RNA, 22 nt, Human
ccaggaggcucugacuggaccc

SEQ ID NO: 553672 - RNA, 22 nt, Human
aagccucaccuuuuagaagcua

SEQ ID NO: 553673 - RNA, 22 nt, Human
gcucaggacccaggugugaccu

SEQ ID NO: 553674 - RNA, 22 nt, Human
gcagguguggaguggggugagc

SEQ ID NO: 553675 - RNA, 22 nt, Human
caugauuauguguuagaguuug

SEQ ID NO: 553676 - RNA, 22 nt, Human
uccagaauauuugggaaagaug

SEQ ID NO: 553677 - RNA, 22 nt, Human
guguacaugagaaaucaacuuu

SEQ ID NO: 553678 - RNA, 22 nt, Human
aaaagggacuacucucagcucc

SEQ ID NO: 553679 - RNA, 22 nt, Human
ucuuuucugccacagccugagc

SEQ ID NO: 553680 - RNA, 22 nt, Human
cuggcagcgugagcagcaucca

SEQ ID NO: 553681 - RNA, 22 nt, Human
gcacagcaugaagagaggaagc

SEQ ID NO: 553682 - RNA, 22 nt, Human
gcuccuggcucucugagggcug

SEQ ID NO: 553683 - RNA, 22 nt, Human
ugcauugauagaaaaacaugga

SEQ ID NO: 553684 - RNA, 22 nt, Human
acccacacaucucuaauucagu

SEQ ID NO: 553685 - RNA, 21 nt, Human
aacauuaguaauuugacuuuu

SEQ ID NO: 553686 - RNA, 22 nt, Human
augaaacaguguguauagcaaa

SEQ ID NO: 553687 - RNA, 22 nt, Human
ugggcugcugucugcacaugcu

SEQ ID NO: 553688 - RNA, 22 nt, Human
uuuccucugcugccauugcccc

SEQ ID NO: 553689 - RNA, 22 nt, Human
gccuggaguacuccuugaagug

SEQ ID NO: 553690 - RNA, 22 nt, Human
gagucugagaacugggcucagu

SEQ ID NO: 553691 - RNA, 22 nt, Human
auagacacauguuauuauacuu

SEQ ID NO: 553692 - RNA, 17 nt, Human
acacagacaggcagaca

SEQ ID NO: 553693 - RNA, 18 nt, Human
cuuuaugugcagagcuuu

SEQ ID NO: 553694 - RNA, 22 nt, Human
cucacauuccacuugugccaac

SEQ ID NO: 553695 - RNA, 22 nt, Human
auuucucucauuguuagcuagg

SEQ ID NO: 553696 - RNA, 22 nt, Human
uggugagagcugaccgugcgag

SEQ ID NO: 553697 - RNA, 22 nt, Human
cucuggggaagcagccagcugg

SEQ ID NO: 553698 - RNA, 22 nt, Human
aagaacaguugggaggugagcc

SEQ ID NO: 553699 - RNA, 22 nt, Human
gcacacaguagggauucaauga

SEQ ID NO: 553700 - RNA, 22 nt, Human
guauuaggagguggagccuuug

SEQ ID NO: 553701 - RNA, 22 nt, Human
agggccuugcugucugaagcug

SEQ ID NO: 553702 - RNA, 22 nt, Human
cccaggcuggagugcaauggca

SEQ ID NO: 553703 - RNA, 22 nt, Human
gaauguuugugcagagucaucu

SEQ ID NO: 553704 - RNA, 22 nt, Human
agcugucuaccugcagaguccu

SEQ ID NO: 553705 - RNA, 22 nt, Human
cagaccagcucuaugaacccaa

SEQ ID NO: 553706 - RNA, 22 nt, Human
uugaguguaaggaauguggggc

SEQ ID NO: 553707 - RNA, 22 nt, Human
uuaaagcaaccaucaauuugga

SEQ ID NO: 553708 - RNA, 22 nt, Human
aggcccuguuaugagccacugu

SEQ ID NO: 553709 - RNA, 17 nt, Human
ugggggcccuguguaga

SEQ ID NO: 553710 - RNA, 22 nt, Human
gcccaucaucacuguggaggcu

SEQ ID NO: 553711 - RNA, 19 nt, Human
gccucugcuggggacaggc

SEQ ID NO: 553712 - RNA, 22 nt, Human
gcaagcugcuuaagcucauugu

SEQ ID NO: 553713 - RNA, 22 nt, Human
aaacuacuggauuaguaacuua

SEQ ID NO: 553714 - RNA, 22 nt, Human
augacagaaggccucccugaca

SEQ ID NO: 553715 - RNA, 22 nt, Human
ugggcugaggggccuugaugac

SEQ ID NO: 553716 - RNA, 22 nt, Human
ugaacacauuugggaaaaucuu

SEQ ID NO: 553717 - RNA, 22 nt, Human
gcccucucuucugcagccucca

SEQ ID NO: 553718 - RNA, 22 nt, Human
ugcugcucuucaccauggccuc

SEQ ID NO: 553719 - RNA, 22 nt, Human
agggcacaggcuggcaggaucu

SEQ ID NO: 553720 - RNA, 22 nt, Human
accaucagucauugucaguggg

SEQ ID NO: 553721 - RNA, 22 nt, Human
gagcucaggagcaucagaagaa

SEQ ID NO: 553722 - RNA, 22 nt, Human
ggucucagcuggaguccuuggu

SEQ ID NO: 553723 - RNA, 22 nt, Human
gugcugggugcugcagacaggu

SEQ ID NO: 553724 - RNA, 22 nt, Human
ucauugcaccccagucccagcu

SEQ ID NO: 553725 - RNA, 22 nt, Human
cugcccugucugcagccuggcu

SEQ ID NO: 553726 - RNA, 22 nt, Human
ugccugcagcgucuccagcagg

SEQ ID NO: 553727 - RNA, 22 nt, Human
uguggccagagguacuauuuua

SEQ ID NO: 553728 - RNA, 22 nt, Human
uaguuaaagagauccacauucc

SEQ ID NO: 553729 - RNA, 22 nt, Human
gacauuuaaggcagucacuuaa

SEQ ID NO: 553730 - RNA, 22 nt, Human
caguggguaggaaaggcucuuc

SEQ ID NO: 553731 - RNA, 18 nt, Human
cuguccaguagacucugc

SEQ ID NO: 553732 - RNA, 23 nt, Human
uccaggcacgcauuucuucuagc

SEQ ID NO: 553733 - RNA, 22 nt, Human
ggcagugaaucugagagccugg

SEQ ID NO: 553734 - RNA, 22 nt, Human
cagcucucuaaggucuugcuuu

SEQ ID NO: 553735 - RNA, 22 nt, Human
uuucuggaaagcaagauacauu

SEQ ID NO: 553736 - RNA, 22 nt, Human
cuugccuuugucuucaaaggcu

SEQ ID NO: 553737 - RNA, 22 nt, Human
gugcaugugucuuuauaguaga

SEQ ID NO: 553738 - RNA, 22 nt, Human
caguuacuguaugucaaagacu

SEQ ID NO: 553739 - RNA, 22 nt, Human
cagcagaaacccagcaaagcca

SEQ ID NO: 553740 - RNA, 22 nt, Human
cugggccugguagggcuugaaa

SEQ ID NO: 553741 - RNA, 22 nt, Human
cuggagccauguauagccuaug

SEQ ID NO: 553742 - RNA, 22 nt, Human
agcaggaggagagccuggcggu

SEQ ID NO: 553743 - RNA, 22 nt, Human
cauuccuacaugauaagaauua

SEQ ID NO: 553744 - RNA, 22 nt, Human
acguguucaauuuccaucugac

SEQ ID NO: 553745 - RNA, 22 nt, Human
gcaggaguucaauugcccauga

SEQ ID NO: 553746 - RNA, 22 nt, Human
gacaggguacgggcuaggcaca

SEQ ID NO: 553747 - RNA, 22 nt, Human
gagcuguccuaccaggaguccu

SEQ ID NO: 553748 - RNA, 22 nt, Human
ggcugcagggcagcuggugugg

SEQ ID NO: 553749 - RNA, 22 nt, Human
uuuggaaauuucaucaauagcc

SEQ ID NO: 553750 - RNA, 22 nt, Human
cugaaggagaaggccacuguuc

SEQ ID NO: 553751 - RNA, 22 nt, Human
cuccagggagcuguggagguuu

SEQ ID NO: 553752 - RNA, 22 nt, Human
cacauguuuggcaugucaccaa

SEQ ID NO: 553753 - RNA, 22 nt, Human
uagcuuuccuuguugccugugc

SEQ ID NO: 553754 - RNA, 17 nt, Human
gcagaaaagucaaggga

SEQ ID NO: 553755 - RNA, 22 nt, Human
auacaaguuaaugagaaugaca

SEQ ID NO: 553756 - RNA, 22 nt, Human
ccagugcaggugagcaccaggu

SEQ ID NO: 553757 - RNA, 22 nt, Human
ggagagugggagcaacuguugc

SEQ ID NO: 553758 - RNA, 22 nt, Human
gccugccuguuggcugaggugc

SEQ ID NO: 553759 - RNA, 22 nt, Human
gccaggcagcuagcaaccccug

SEQ ID NO: 553760 - RNA, 22 nt, Human
uagugcauaacauuuaaagguc

SEQ ID NO: 553761 - RNA, 20 nt, Human
aagauucugauuuguagcgu

SEQ ID NO: 553762 - RNA, 22 nt, Human
ggagugaaguggcgcgaucucg

SEQ ID NO: 553763 - RNA, 22 nt, Human
ugaagcagcaaaugaugggaga

SEQ ID NO: 553764 - RNA, 22 nt, Human
gcagugcuuuagucuguccuuu

SEQ ID NO: 553765 - RNA, 22 nt, Human
uuuaggaaauacuguccuauga

SEQ ID NO: 553766 - RNA, 17 nt, Human
agccgggcauggaccag

SEQ ID NO: 553767 - RNA, 22 nt, Human
uugauuuucaauucauugacaa

SEQ ID NO: 553768 - RNA, 22 nt, Human
uugagucaguaauuccauuucu

SEQ ID NO: 553769 - RNA, 22 nt, Human
ccucugagagaaggccuucagc

SEQ ID NO: 553770 - RNA, 22 nt, Human
uagagaaauaagcuuugccuug

SEQ ID NO: 553771 - RNA, 22 nt, Human
caucuguaaaguaggaauauug

SEQ ID NO: 553772 - RNA, 22 nt, Human
gaccauuugcuaguaaauugca

SEQ ID NO: 553773 - RNA, 22 nt, Human
ccauuucacucuuccugaagga

SEQ ID NO: 553774 - RNA, 22 nt, Human
caggggccaggcugucugcugu

SEQ ID NO: 553775 - RNA, 22 nt, Human
ugucucuggcccaugagcagag

SEQ ID NO: 553776 - RNA, 22 nt, Human
gcugccaugccacagcacucac

SEQ ID NO: 553777 - RNA, 22 nt, Human
gggccugugcacaguucuguua

SEQ ID NO: 553778 - RNA, 21 nt, Human
aguuugaugcaauuucugaga

SEQ ID NO: 553779 - RNA, 22 nt, Human
ggugaaggaggaagcugaugga

SEQ ID NO: 553780 - RNA, 21 nt, Human
ucagaagagcugccucuuggu

SEQ ID NO: 553781 - RNA, 22 nt, Human
auucuaggcuugaaacaugaag

SEQ ID NO: 553782 - RNA, 22 nt, Human
aucaggccagcaaucccugggc

SEQ ID NO: 553783 - RNA, 22 nt, Human
gcagugauggggaucucacugg

SEQ ID NO: 553784 - RNA, 22 nt, Human
ucaggagcuugguagugugauu

SEQ ID NO: 553785 - RNA, 22 nt, Human
uagcuuuagaaauauucucaga

SEQ ID NO: 553786 - RNA, 22 nt, Human
ucucaggggccuggaguccugg

SEQ ID NO: 553787 - RNA, 22 nt, Human
auugguggugaggacaugccag

SEQ ID NO: 553788 - RNA, 22 nt, Human
auugcauaugcagcacaucagg

SEQ ID NO: 553789 - RNA, 22 nt, Human
cuauuuaugugcuauuuuguau

SEQ ID NO: 553790 - RNA, 18 nt, Human
uuuuacucauagcaggcc

SEQ ID NO: 553791 - RNA, 22 nt, Human
gcucuguguccacagcuggaaa

SEQ ID NO: 553792 - RNA, 22 nt, Human
uguuugaauaacuuggauauau

SEQ ID NO: 553793 - RNA, 22 nt, Human
ucuacuguagugaugcugcagu

SEQ ID NO: 553794 - RNA, 22 nt, Human
aagugaguggccuggagaggug

SEQ ID NO: 553795 - RNA, 22 nt, Human
aaacaguaaguucuaguauuau

SEQ ID NO: 553796 - RNA, 22 nt, Human
ugcccugcuucucuugggacag

SEQ ID NO: 553797 - RNA, 22 nt, Human
aguguacaucagaacauaucaa

SEQ ID NO: 553798 - RNA, 22 nt, Human
gcagugggcaacaagagcugga

SEQ ID NO: 553799 - RNA, 22 nt, Human
gcaggagcuggaaagugauguu

SEQ ID NO: 553800 - RNA, 22 nt, Human
agcugccagggacugggcaugg

SEQ ID NO: 553801 - RNA, 22 nt, Human
uuaaauuauugagggauuguca

SEQ ID NO: 553802 - RNA, 22 nt, Human
ccaggaguuggagguugcagug

SEQ ID NO: 553803 - RNA, 21 nt, Human
ggcaggauggcaguggacccc

SEQ ID NO: 553804 - RNA, 22 nt, Human
aaaguucagugccuucuauaca

SEQ ID NO: 553805 - RNA, 22 nt, Human
caggccucccggugcacacuga

SEQ ID NO: 553806 - RNA, 22 nt, Human
uuacaguagauacaaugaguaa

SEQ ID NO: 553807 - RNA, 22 nt, Human
uauugacagagggucagaagag

SEQ ID NO: 553808 - RNA, 22 nt, Human
acauacuaugaauacauguguc

SEQ ID NO: 553809 - RNA, 22 nt, Human
gggaaggacauucugggcucag

SEQ ID NO: 553810 - RNA, 19 nt, Human
ggaaggugacaguggugaa

SEQ ID NO: 553811 - RNA, 22 nt, Human
cucaggccugaguggcaguccc

SEQ ID NO: 553812 - RNA, 20 nt, Human
uuucuggguacucucccucu

SEQ ID NO: 553813 - RNA, 22 nt, Human
cugccuccugccgugcagcuuc

SEQ ID NO: 553814 - RNA, 22 nt, Human
ucaggagaaucagggcuguccu

SEQ ID NO: 553815 - RNA, 22 nt, Human
agaagccauaguaucucagggu

SEQ ID NO: 553816 - RNA, 22 nt, Human
aaagcagguugcaauuacagug

SEQ ID NO: 553817 - RNA, 22 nt, Human
gucaccaggucugaugcagcca

SEQ ID NO: 553818 - RNA, 22 nt, Human
gacagccaacuggggagggcau

SEQ ID NO: 553819 - RNA, 22 nt, Human
ggagccagagucugcaguguaa

SEQ ID NO: 553820 - RNA, 22 nt, Human
agccacagggggugagggacaa

SEQ ID NO: 553821 - RNA, 19 nt, Human
uguagcaguuuaaaacaac

SEQ ID NO: 553822 - RNA, 21 nt, Human
aauaaaacaguuggugucaau

SEQ ID NO: 553823 - RNA, 22 nt, Human
aggccucacauugggcuucaag

SEQ ID NO: 553824 - RNA, 22 nt, Human
acuuuucuaagcaauggucuug

SEQ ID NO: 553825 - RNA, 22 nt, Human
agggagcaugggugaagcaggc

SEQ ID NO: 553826 - RNA, 22 nt, Human
ccaguggccaugcacgagcagc

SEQ ID NO: 553827 - RNA, 22 nt, Human
uauggaaagcucuuuuugauug

SEQ ID NO: 553828 - RNA, 22 nt, Human
gcacaugguaggcauuugaugu

SEQ ID NO: 553829 - RNA, 22 nt, Human
auuauuucucacucacauaaua

SEQ ID NO: 553830 - RNA, 22 nt, Human
acaucuuuuuucucuaauugug

SEQ ID NO: 553831 - RNA, 22 nt, Human
cugggagucuggccucuggucc

SEQ ID NO: 553832 - RNA, 22 nt, Human
ccugggugucaugggcagcugg

SEQ ID NO: 553833 - RNA, 22 nt, Human
uggcccugguggcacagccugc

SEQ ID NO: 553834 - RNA, 22 nt, Human
ucagcagggcugugguguggcu

SEQ ID NO: 553835 - RNA, 22 nt, Human
caaagcagagaacugucucauu

SEQ ID NO: 553836 - RNA, 22 nt, Human
agagacaagggaccucuggaga

SEQ ID NO: 553837 - RNA, 22 nt, Human
caggcuggagugcaauggugcu

SEQ ID NO: 553838 - RNA, 23 nt, Human
ccacagagcugccaauuccugug

SEQ ID NO: 553839 - RNA, 22 nt, Human
gcuguucuuucagcccagggcu

SEQ ID NO: 553840 - RNA, 22 nt, Human
ggaacugaaugucucgguauaa

SEQ ID NO: 553841 - RNA, 22 nt, Human
gugcucugaucugucugacauc

SEQ ID NO: 553842 - RNA, 22 nt, Human
ugguuaaguccagaaaggaagc

SEQ ID NO: 553843 - RNA, 22 nt, Human
uguccaggucagcagcagggac

SEQ ID NO: 553844 - RNA, 22 nt, Human
aggggagcaacauagucacucu

SEQ ID NO: 553845 - RNA, 19 nt, Human
ucccagagucuagagguug

SEQ ID NO: 553846 - RNA, 22 nt, Human
uagcuuuaaugaguugguaaga

SEQ ID NO: 553847 - RNA, 22 nt, Human
ucccugugaaucagaagcaggu

SEQ ID NO: 553848 - RNA, 22 nt, Human
agugucugccagcugccaggug

SEQ ID NO: 553849 - RNA, 22 nt, Human
ucaggcugugggcacuggccau

SEQ ID NO: 553850 - RNA, 22 nt, Human
ugcuccagaaccugaccaugcu

SEQ ID NO: 553851 - RNA, 20 nt, Human
cuguagggugcagcaggcuc

SEQ ID NO: 553852 - RNA, 21 nt, Human
uggagcugaauuuuuggcauc

SEQ ID NO: 553853 - RNA, 22 nt, Human
augaaacaaaccucuauggagu

SEQ ID NO: 553854 - RNA, 22 nt, Human
auuaaauuagcaaacugugaaa

SEQ ID NO: 553855 - RNA, 22 nt, Human
gcagauaggguauuaggaguaa

SEQ ID NO: 553856 - RNA, 22 nt, Human
gcccucuggggcacacagagga

SEQ ID NO: 553857 - RNA, 19 nt, Human
ucaaagucugagucacuuu

SEQ ID NO: 553858 - RNA, 22 nt, Human
agacaucaaugaucagagguag

SEQ ID NO: 553859 - RNA, 22 nt, Human
ucagcuuugcaaguuagaaaau

SEQ ID NO: 553860 - RNA, 22 nt, Human
uuucacacuagucagaauacca

SEQ ID NO: 553861 - RNA, 22 nt, Human
gcagguggucacucauccccag

SEQ ID NO: 553862 - RNA, 22 nt, Human
gccuccugagaagccacaggcu

SEQ ID NO: 553863 - RNA, 22 nt, Human
agguaggguuaauggagauaua

SEQ ID NO: 553864 - RNA, 22 nt, Human
gaaaauguuuccuguuauuugc

SEQ ID NO: 553865 - RNA, 22 nt, Human
cucccacuccuggcucaccaca

SEQ ID NO: 553866 - RNA, 22 nt, Human
ggccagagucuauaugcagaca

SEQ ID NO: 553867 - RNA, 22 nt, Human
cagaaacagacaugacgcagua

SEQ ID NO: 553868 - RNA, 22 nt, Human
agcuuuauauuuaaugaauucu

SEQ ID NO: 553869 - RNA, 22 nt, Human
uucaguaugacagacgcauugg

SEQ ID NO: 553870 - RNA, 22 nt, Human
ugauuuccaaaaggcuucuaag

SEQ ID NO: 553871 - RNA, 22 nt, Human
auguccaggaucuauccccaga

SEQ ID NO: 553872 - RNA, 22 nt, Human
uuggucuuuucuauuaaauaua

SEQ ID NO: 553873 - RNA, 21 nt, Human
gcugccaccgcgugcuccagg

SEQ ID NO: 553874 - RNA, 22 nt, Human
gggcacugaacacccucuucgc

SEQ ID NO: 553875 - RNA, 22 nt, Human
aucaaagugaaaagugcugaug

SEQ ID NO: 553876 - RNA, 22 nt, Human
uuacaguagauuuugaaugugg

SEQ ID NO: 553877 - RNA, 22 nt, Human
caggacagaaauaaggaauaua

SEQ ID NO: 553878 - RNA, 22 nt, Human
ccauuguaaagaguauacuuug

SEQ ID NO: 553879 - RNA, 22 nt, Human
uacacaacugacaaccauucug

SEQ ID NO: 553880 - RNA, 17 nt, Human
uuuaaacuacuacaagg

SEQ ID NO: 553881 - RNA, 22 nt, Human
aguugaaauuagaguccuggcu

SEQ ID NO: 553882 - RNA, 22 nt, Human
caguuaaugugggccaaguucu

SEQ ID NO: 553883 - RNA, 22 nt, Human
gcuuucuugguucugcaggggc

SEQ ID NO: 553884 - RNA, 20 nt, Human
gucuuauuuaacacaugacu

SEQ ID NO: 553885 - RNA, 22 nt, Human
cugaggcuuugugugcaugccu

SEQ ID NO: 553886 - RNA, 22 nt, Human
gcaggugagggugucugaauag

SEQ ID NO: 553887 - RNA, 23 nt, Human
acaugggagggacauggaggcug

SEQ ID NO: 553888 - RNA, 17 nt, Human
cucacggaggaugaauc

SEQ ID NO: 553889 - RNA, 22 nt, Human
uucuucaaccaucuacauaaac

SEQ ID NO: 553890 - RNA, 22 nt, Human
uuacagauguaggaacugaagu

SEQ ID NO: 553891 - RNA, 22 nt, Human
uguggagacuauagccauaaca

SEQ ID NO: 553892 - RNA, 19 nt, Human
cucuggagcagacacugga

SEQ ID NO: 553893 - RNA, 22 nt, Human
aaacaugaauagauauuaaaca

SEQ ID NO: 553894 - RNA, 22 nt, Human
aacuuuacuugaaagaacaugu

SEQ ID NO: 553895 - RNA, 19 nt, Human
uugguggugguuuugguuc

SEQ ID NO: 553896 - RNA, 22 nt, Human
cugcagugcaagcccagaugga

SEQ ID NO: 553897 - RNA, 22 nt, Human
uggaagaauaggauagaagaac

SEQ ID NO: 553898 - RNA, 22 nt, Human
uucaaugaggauagaacuggau

SEQ ID NO: 553899 - RNA, 22 nt, Human
cauuaagauuuuuuucuacugg

SEQ ID NO: 553900 - RNA, 22 nt, Human
acagcuguggucuccuuagugu

SEQ ID NO: 553901 - RNA, 22 nt, Human
acaguggaugugauguccaggu

SEQ ID NO: 553902 - RNA, 22 nt, Human
ugaacauauucaccucuaaaua

SEQ ID NO: 553903 - RNA, 22 nt, Human
ugcugucccccgugucugggcu

SEQ ID NO: 553904 - RNA, 23 nt, Human
guccucuggagagaaaggcagua

SEQ ID NO: 553905 - RNA, 22 nt, Human
gcuaggagauugagcucugaag

SEQ ID NO: 553906 - RNA, 19 nt, Human
cucagagaggggcagugcc

SEQ ID NO: 553907 - RNA, 22 nt, Human
cccucugccugggaccaagucc

SEQ ID NO: 553908 - RNA, 22 nt, Human
aguucacauuccgagguacugg

SEQ ID NO: 553909 - RNA, 20 nt, Human
ccucugccuuucuagucuga

SEQ ID NO: 553910 - RNA, 22 nt, Human
aggggcuggaguucgagguuac

SEQ ID NO: 553911 - RNA, 22 nt, Human
uguguacuugaaagggcagguc

SEQ ID NO: 553912 - RNA, 22 nt, Human
ccuggcugaaccaaugaagugg

SEQ ID NO: 553913 - RNA, 22 nt, Human
acucagagaauaucuagaagga

SEQ ID NO: 553914 - RNA, 22 nt, Human
aauuucaguugcuaauaaguuc

SEQ ID NO: 553915 - RNA, 22 nt, Human
uagcuuuaagacauggugaaug

SEQ ID NO: 553916 - RNA, 22 nt, Human
cacaggagaacccacagauucu

SEQ ID NO: 553917 - RNA, 22 nt, Human
agaaaugugagccccuuaucaa

SEQ ID NO: 553918 - RNA, 22 nt, Human
agguggcaugccugagacauaa

SEQ ID NO: 553919 - RNA, 22 nt, Human
gaggggucacaugggcuggcuu

SEQ ID NO: 553920 - RNA, 22 nt, Human
aaggcuuuuaacuacuguuuua

SEQ ID NO: 553921 - RNA, 22 nt, Human
cuggcucauuuuagcaucaggu

SEQ ID NO: 553922 - RNA, 22 nt, Human
agcacuuugggagauaaagcug

SEQ ID NO: 553923 - RNA, 22 nt, Human
gugcugccggcauagcagugaa

SEQ ID NO: 553924 - RNA, 22 nt, Human
cugcaggggccucgagcacagg

SEQ ID NO: 553925 - RNA, 22 nt, Human
agaugguugucgcaaaugaaug

SEQ ID NO: 553926 - RNA, 22 nt, Human
agcaggcuaagggaccuguuua

SEQ ID NO: 553927 - RNA, 22 nt, Human
cauucacucagcgaugccagua

SEQ ID NO: 553928 - RNA, 22 nt, Human
agcucccagaagccagagucgg

SEQ ID NO: 553929 - RNA, 22 nt, Human
gcagaggagugauuaugccgug

SEQ ID NO: 553930 - RNA, 22 nt, Human
ggaggggauuuaguagaugcua

SEQ ID NO: 553931 - RNA, 22 nt, Human
gagagcugggggacuguggaug

SEQ ID NO: 553932 - RNA, 22 nt, Human
ggcuguggcauuaggugaggcc

SEQ ID NO: 553933 - RNA, 22 nt, Human
ggcagucuuucccuugagcucu

SEQ ID NO: 553934 - RNA, 22 nt, Human
uucccaguuagucauuuuuaca

SEQ ID NO: 553935 - RNA, 22 nt, Human
gaaacuuuggcuaaaagccaga

SEQ ID NO: 553936 - RNA, 22 nt, Human
uuugucauaucacacaauuuug

SEQ ID NO: 553937 - RNA, 22 nt, Human
uagguaagauguuaacagcuga

SEQ ID NO: 553938 - RNA, 20 nt, Human
cagagccaagagcagcaucu

SEQ ID NO: 553939 - RNA, 22 nt, Human
agcagguguaucggucaccuac

SEQ ID NO: 553940 - RNA, 22 nt, Human
uuuccucuccggggccuccagg

SEQ ID NO: 553941 - RNA, 22 nt, Human
gaaguuaguuggggcccaagaa

SEQ ID NO: 553942 - RNA, 22 nt, Human
ugcuggcuuccugugcacagca

SEQ ID NO: 553943 - RNA, 22 nt, Human
ccccagcucagugcagggacau

SEQ ID NO: 553944 - RNA, 22 nt, Human
ugggcugcagagcccggccuuc

SEQ ID NO: 553945 - RNA, 22 nt, Human
uacauggugguggcacuugacu

SEQ ID NO: 553946 - RNA, 22 nt, Human
ccagcugcagguguuccagaug

SEQ ID NO: 553947 - RNA, 22 nt, Human
uuuauucuugagagugagaaga

SEQ ID NO: 553948 - RNA, 22 nt, Human
gcugggcagccccuacagagag

SEQ ID NO: 553949 - RNA, 22 nt, Human
gugaggcagcaggagccucugu

SEQ ID NO: 553950 - RNA, 22 nt, Human
aggagcugugaaugggaggggu

SEQ ID NO: 553951 - RNA, 22 nt, Human
ucccagagccaagcuauggaug

SEQ ID NO: 553952 - RNA, 22 nt, Human
ucaaugaaagagcaugcauuuu

SEQ ID NO: 553953 - RNA, 22 nt, Human
guaggcagauaggagugcagcc

SEQ ID NO: 553954 - RNA, 22 nt, Human
uuuccaaaaugaaucuaaugca

SEQ ID NO: 553955 - RNA, 22 nt, Human
uuucccaucuuagcagauuaaa

SEQ ID NO: 553956 - RNA, 17 nt, Human
aaucuguuuacagucag

SEQ ID NO: 553957 - RNA, 22 nt, Human
gcuguggucugugagcuccaaa

SEQ ID NO: 553958 - RNA, 22 nt, Human
gggcaguugauggaggucugga

SEQ ID NO: 553959 - RNA, 22 nt, Human
gggggcucugacucccucagcu

SEQ ID NO: 553960 - RNA, 22 nt, Human
ccagcccugccucucagggccc

SEQ ID NO: 553961 - RNA, 22 nt, Human
ucuguuuucauuugucuugaga

SEQ ID NO: 553962 - RNA, 22 nt, Human
caccagguuccgggcagagcug

SEQ ID NO: 553963 - RNA, 22 nt, Human
uccaggcacuauauauacuuuu

SEQ ID NO: 553964 - RNA, 22 nt, Human
ccaggaguuugaggcugcagug

SEQ ID NO: 553965 - RNA, 22 nt, Human
ucugccuuggcaaccacagcuu

SEQ ID NO: 553966 - RNA, 22 nt, Human
agcugcucugggaaacagaagu

SEQ ID NO: 553967 - RNA, 22 nt, Human
uccaguggcaccuuggcccuca

SEQ ID NO: 553968 - RNA, 22 nt, Human
agacuuugagcucuuagagaag

SEQ ID NO: 553969 - RNA, 22 nt, Human
cagaaggagcgcuaagguccca

SEQ ID NO: 553970 - RNA, 22 nt, Human
uuguaauuuguucccaagcaga

SEQ ID NO: 553971 - RNA, 22 nt, Human
cucuggaguucucaugaggaac

SEQ ID NO: 553972 - RNA, 19 nt, Human
cucuuaaauugucucuugc

SEQ ID NO: 553973 - RNA, 22 nt, Human
ucaucgccucgugcaucuuggc

SEQ ID NO: 553974 - RNA, 22 nt, Human
aaaggauucucuugauuucagu

SEQ ID NO: 553975 - RNA, 22 nt, Human
acaaacuaccuacagauguuca

SEQ ID NO: 553976 - RNA, 18 nt, Human
gggaagccgggaagccgg

SEQ ID NO: 553977 - RNA, 22 nt, Human
ugucauuuucuaaucuguuguc

SEQ ID NO: 553978 - RNA, 22 nt, Human
cagggccaagccccuuuggcug

SEQ ID NO: 553979 - RNA, 22 nt, Human
uggcucagagcagggacucugg

SEQ ID NO: 553980 - RNA, 22 nt, Human
ugagagugauugguucgaaugu

SEQ ID NO: 553981 - RNA, 22 nt, Human
ggaguugauuuuggauauauua

SEQ ID NO: 553982 - RNA, 22 nt, Human
aaaucaguucacguucugaggu

SEQ ID NO: 553983 - RNA, 22 nt, Human
aacauuucagcaccugauuccu

SEQ ID NO: 553984 - RNA, 22 nt, Human
ggcaaaaacagcaaugacuuuu

SEQ ID NO: 553985 - RNA, 22 nt, Human
cccaaggccuucaagccagcuc

SEQ ID NO: 553986 - RNA, 22 nt, Human
uuugcuauaaaagggucacacg

SEQ ID NO: 553987 - RNA, 22 nt, Human
uuuuccacuuuagugcaauaac

SEQ ID NO: 553988 - RNA, 22 nt, Human
aauguuguguuucaguucaaga

SEQ ID NO: 553989 - RNA, 17 nt, Human
agguggcugcugcgccu

SEQ ID NO: 553990 - RNA, 22 nt, Human
cacauuuagagguuagcauggu

SEQ ID NO: 553991 - RNA, 22 nt, Human
uccaggaggguuuucugccuuc

SEQ ID NO: 553992 - RNA, 22 nt, Human
gcugucagugaggugagacaug

SEQ ID NO: 553993 - RNA, 22 nt, Human
uccagcuugccuggucuuuugg

SEQ ID NO: 553994 - RNA, 22 nt, Human
caucagcacuaugauuaaagua

SEQ ID NO: 553995 - RNA, 22 nt, Human
ggugucuguugccuccugguua

SEQ ID NO: 553996 - RNA, 22 nt, Human
ugcacacagaugguacaugcau

SEQ ID NO: 553997 - RNA, 22 nt, Human
aaacaugcuggauuuagaauau

SEQ ID NO: 553998 - RNA, 22 nt, Human
uuauguauggauggcugaaagu

SEQ ID NO: 553999 - RNA, 22 nt, Human
auuucuguugcuuauaaauuac

SEQ ID NO: 554000 - RNA, 22 nt, Human
aagauauagauaaaacuaugca

SEQ ID NO: 554001 - RNA, 22 nt, Human
uuucaaagacagccauauuugu

SEQ ID NO: 554002 - RNA, 23 nt, Human
ucagaggaucaucaaacguuuuc

SEQ ID NO: 554003 - RNA, 22 nt, Human
gcaccuggcugcccagguggag

SEQ ID NO: 554004 - RNA, 22 nt, Human
acuuuguuuggcuauuagaguc

SEQ ID NO: 554005 - RNA, 22 nt, Human
uuuuuggguccaggcuguaucu

SEQ ID NO: 554006 - RNA, 22 nt, Human
ugcaggugguacuucuuuuucu

SEQ ID NO: 554007 - RNA, 22 nt, Human
ugggagugaggcagagucuauc

SEQ ID NO: 554008 - RNA, 22 nt, Human
ugcucuggguccugggccuccu

SEQ ID NO: 554009 - RNA, 22 nt, Human
aaagcuauagggucaagcauuu

SEQ ID NO: 554010 - RNA, 22 nt, Human
agcugaaggcuagaacagcugg

SEQ ID NO: 554011 - RNA, 20 nt, Human
ugucaugcauuagaugaaga

SEQ ID NO: 554012 - RNA, 21 nt, Human
uaaauaauaaguugcugagau

SEQ ID NO: 554013 - RNA, 22 nt, Human
gcuaggagccgcugcacuaggu

SEQ ID NO: 554014 - RNA, 22 nt, Human
caaaagcagcaaguuuauaugu

SEQ ID NO: 554015 - RNA, 22 nt, Human
cagcauggagacaaagugggca

SEQ ID NO: 554016 - RNA, 22 nt, Human
caguuacacaccauugugaaca

SEQ ID NO: 554017 - RNA, 22 nt, Human
aagagacagagccauguuucua

SEQ ID NO: 554018 - RNA, 22 nt, Human
auuuauuaccucggaguuucug

SEQ ID NO: 554019 - RNA, 23 nt, Human
ccagcucccaggucugaggacug

SEQ ID NO: 554020 - RNA, 22 nt, Human
agcagguguuagggauccaaug

SEQ ID NO: 554021 - RNA, 22 nt, Human
acagaagcucaagagagcagug

SEQ ID NO: 554022 - RNA, 20 nt, Human
ggggggcuucagggccugug

SEQ ID NO: 554023 - RNA, 23 nt, Human
gagugcagaauagacaugcagug

SEQ ID NO: 554024 - RNA, 22 nt, Human
acaaaguaggcagugggcugga

SEQ ID NO: 554025 - RNA, 21 nt, Human
uaacaaagacuucuggucagg

SEQ ID NO: 554026 - RNA, 22 nt, Human
gacccuguuucuacaaauaauu

SEQ ID NO: 554027 - RNA, 22 nt, Human
gaaggcuguggcuggucucagu

SEQ ID NO: 554028 - RNA, 22 nt, Human
cagagccucagaauccugugga

SEQ ID NO: 554029 - RNA, 22 nt, Human
uuuaauuguuguggguacauag

SEQ ID NO: 554030 - RNA, 22 nt, Human
cccuguacagucucuguggcac

SEQ ID NO: 554031 - RNA, 22 nt, Human
ccugccugauuccaggauggcu

SEQ ID NO: 554032 - RNA, 19 nt, Human
ggaugagggucaggcauag

SEQ ID NO: 554033 - RNA, 22 nt, Human
gcagcugagcgugaggaagagu

SEQ ID NO: 554034 - RNA, 20 nt, Human
aauuauauaacuccaacauu

SEQ ID NO: 554035 - RNA, 22 nt, Human
cuuuugcagccauuauugcugc

SEQ ID NO: 554036 - RNA, 22 nt, Human
cccuggcauaaaacuucuccag

SEQ ID NO: 554037 - RNA, 19 nt, Human
gcaggguguugacuguccc

SEQ ID NO: 554038 - RNA, 21 nt, Human
gcccagaagacuggcucugcc

SEQ ID NO: 554039 - RNA, 22 nt, Human
ccccugccagcuaucccugaac

SEQ ID NO: 554040 - RNA, 22 nt, Human
caaagcagagccagagcuuguc

SEQ ID NO: 554041 - RNA, 21 nt, Human
ugaggcuguuguaccagggag

SEQ ID NO: 554042 - RNA, 22 nt, Human
ugugcagggaagggcaugcuau

SEQ ID NO: 554043 - RNA, 22 nt, Human
ugcagggagcucuggggugcag

SEQ ID NO: 554044 - RNA, 22 nt, Human
ccagcucuagccccauguggcu

SEQ ID NO: 554045 - RNA, 19 nt, Human
gaucuuugccaauuuaagc

SEQ ID NO: 554046 - RNA, 22 nt, Human
caggagcucucaucgucagggc

SEQ ID NO: 554047 - RNA, 22 nt, Human
uugaaaggaauacagaggccua

SEQ ID NO: 554048 - RNA, 22 nt, Human
auccugugcaaugacugcaucu

SEQ ID NO: 554049 - RNA, 22 nt, Human
agcuucuggaagccuggcagca

SEQ ID NO: 554050 - RNA, 18 nt, Human
uuauuuguuacagcacau

SEQ ID NO: 554051 - RNA, 22 nt, Human
cugucucugucuuaacucccag

SEQ ID NO: 554052 - RNA, 22 nt, Human
cuguggcugcagccuugguccu

SEQ ID NO: 554053 - RNA, 22 nt, Human
ggaaggaauuccaagacuaaag

SEQ ID NO: 554054 - RNA, 22 nt, Human
ggcacugagaacaggcugacuu

SEQ ID NO: 554055 - RNA, 16 nt, Human
agccaggcugccucgg

SEQ ID NO: 554056 - RNA, 22 nt, Human
aggaaggguucuuucuguuuau

SEQ ID NO: 554057 - RNA, 17 nt, Human
ccagagcuacugagacu

SEQ ID NO: 554058 - RNA, 22 nt, Human
cugggaggacaacuuggagcuc

SEQ ID NO: 554059 - RNA, 22 nt, Human
uuucuucagccacuccaaacug

SEQ ID NO: 554060 - RNA, 22 nt, Human
ugguuccucaagcgcuggcggc

SEQ ID NO: 554061 - RNA, 22 nt, Human
ugggaagcacgcucagcagaaa

SEQ ID NO: 554062 - RNA, 22 nt, Human
guggcuugaccaucccugcuac

SEQ ID NO: 554063 - RNA, 22 nt, Human
ucaggaugagcucauaacuaug

SEQ ID NO: 554064 - RNA, 22 nt, Human
uuuaaauuuagaagaaacacug

SEQ ID NO: 554065 - RNA, 22 nt, Human
gucaagucaugacucaaaggaa

SEQ ID NO: 554066 - RNA, 22 nt, Human
uuuccuuaaaucuguuucuagu

SEQ ID NO: 554067 - RNA, 22 nt, Human
gccuggaggggacagucucugg

SEQ ID NO: 554068 - RNA, 22 nt, Human
uagcugugagcacccaggcugu

SEQ ID NO: 554069 - RNA, 22 nt, Human
uuucaaauagaaucuuuccaaa

SEQ ID NO: 554070 - RNA, 22 nt, Human
gugcugugcgcuuuuucuguau

SEQ ID NO: 554071 - RNA, 22 nt, Human
uggguaggaccagaaaugcacu

SEQ ID NO: 554072 - RNA, 22 nt, Human
aaaguguaaggaauuuaaguaa

SEQ ID NO: 554073 - RNA, 21 nt, Human
cacacagugaucuauccacau

SEQ ID NO: 554074 - RNA, 22 nt, Human
ucucuuaauuuuggaauagugu

SEQ ID NO: 554075 - RNA, 22 nt, Human
ccagggcuggugggagaugcug

SEQ ID NO: 554076 - RNA, 22 nt, Human
ggggaagggaguccaaguguua

SEQ ID NO: 554077 - RNA, 22 nt, Human
aggcuaauauggcacaugaaca

SEQ ID NO: 554078 - RNA, 22 nt, Human
uccuggcccggccgggccugcu

SEQ ID NO: 554079 - RNA, 22 nt, Human
ggagacagugacuuagagacug

SEQ ID NO: 554080 - RNA, 22 nt, Human
caaggcaggaagccugucuuau

SEQ ID NO: 554081 - RNA, 17 nt, Human
gcugccugcaacugacu

SEQ ID NO: 554082 - RNA, 22 nt, Human
auuuauuaugggauuuggcuca

SEQ ID NO: 554083 - RNA, 22 nt, Human
ucucucagggggaaggcugaag

SEQ ID NO: 554084 - RNA, 22 nt, Human
aucuguucuucaaaauauuaca

SEQ ID NO: 554085 - RNA, 22 nt, Human
caagaugccccugguagggauc

SEQ ID NO: 554086 - RNA, 22 nt, Human
ugggagagugcucaaugugcaa

SEQ ID NO: 554087 - RNA, 22 nt, Human
gccaagcuuugcaggaguguug

SEQ ID NO: 554088 - RNA, 22 nt, Human
cacugaagaugcgacuagugcu

SEQ ID NO: 554089 - RNA, 22 nt, Human
cugugcuuucgagaugugaucu

SEQ ID NO: 554090 - RNA, 22 nt, Human
uaacaauuugcuucauuuguuu

SEQ ID NO: 554091 - RNA, 22 nt, Human
aggcugaggggcgagggacccu

SEQ ID NO: 554092 - RNA, 20 nt, Human
uuuauucacagagaagaguu

SEQ ID NO: 554093 - RNA, 22 nt, Human
uccugcagucugcacucugccu

SEQ ID NO: 554094 - RNA, 22 nt, Human
acauacuuuuuaaaagauugcu

SEQ ID NO: 554095 - RNA, 18 nt, Human
ugaggaaggggaaguauu

SEQ ID NO: 554096 - RNA, 22 nt, Human
acacuaauuaagcugcuuuacu

SEQ ID NO: 554097 - RNA, 22 nt, Human
uccagcuuauagguagauuuaa

SEQ ID NO: 554098 - RNA, 22 nt, Human
auuuaaugucgagcuauuguag

SEQ ID NO: 554099 - RNA, 22 nt, Human
ucuucaguagguccucagaauc

SEQ ID NO: 554100 - RNA, 22 nt, Human
ccugagcugaacuaagcaguuu

SEQ ID NO: 554101 - RNA, 22 nt, Human
gccuggccugaacuaggaggug

SEQ ID NO: 554102 - RNA, 22 nt, Human
ugcucuggaguggcuugugcac

SEQ ID NO: 554103 - RNA, 22 nt, Human
agucucugcaugccugcugugc

SEQ ID NO: 554104 - RNA, 22 nt, Human
gagcuuaggccagggacaggga

SEQ ID NO: 554105 - RNA, 22 nt, Human
uugcauaaagauuuuauugcau

SEQ ID NO: 554106 - RNA, 22 nt, Human
cuuucuuucgaagacgugauua

SEQ ID NO: 554107 - RNA, 22 nt, Human
ggcuucugcucagccugcacgc

SEQ ID NO: 554108 - RNA, 22 nt, Human
ugguggcaucacucagccuccc

SEQ ID NO: 554109 - RNA, 22 nt, Human
guuagaauaaaaggucagagag

SEQ ID NO: 554110 - RNA, 22 nt, Human
uuuaauauccaguggauacaaa

SEQ ID NO: 554111 - RNA, 22 nt, Human
aaggccugaacaugaggagaug

SEQ ID NO: 554112 - RNA, 22 nt, Human
gaucauuuacuuguucuggacu

SEQ ID NO: 554113 - RNA, 22 nt, Human
gcugggaaugauuuuggagagg

SEQ ID NO: 554114 - RNA, 22 nt, Human
agcucccaggcagucaugagga

SEQ ID NO: 554115 - RNA, 22 nt, Human
cugaggcaugggaaguugggug

SEQ ID NO: 554116 - RNA, 21 nt, Human
uggcacugcuuagcagguucc

SEQ ID NO: 554117 - RNA, 22 nt, Human
ccagggcagcgccccuccacgc

SEQ ID NO: 554118 - RNA, 23 nt, Human
uccuucagagccucccuccaagc

SEQ ID NO: 554119 - RNA, 22 nt, Human
gacagcagacaaaccauguuuu

SEQ ID NO: 554120 - RNA, 22 nt, Human
cgcagagggcaggcagugcugg

SEQ ID NO: 554121 - RNA, 22 nt, Human
agugcagccgagaucaggugcu

SEQ ID NO: 554122 - RNA, 22 nt, Human
acaaagucugaaaccugaggca

SEQ ID NO: 554123 - RNA, 22 nt, Human
auuuagaaauuccaaaaguauu

SEQ ID NO: 554124 - RNA, 22 nt, Human
aaggcagcagugcacgacugau

SEQ ID NO: 554125 - RNA, 22 nt, Human
aaucuaacuucauagcugauuu

SEQ ID NO: 554126 - RNA, 22 nt, Human
accaggcagcaccaaagccggu

SEQ ID NO: 554127 - RNA, 22 nt, Human
gcugaaauucagauuccuaggc

SEQ ID NO: 554128 - RNA, 22 nt, Human
gggagagaugcugauugccaau

SEQ ID NO: 554129 - RNA, 22 nt, Human
uacuugccaucagaguuuauua

SEQ ID NO: 554130 - RNA, 22 nt, Human
cagccaggggcuggcguguuga

SEQ ID NO: 554131 - RNA, 22 nt, Human
ggagccugacagugcccagcau

SEQ ID NO: 554132 - RNA, 22 nt, Human
ggggcccagcaccccuccucgc

SEQ ID NO: 554133 - RNA, 22 nt, Human
cccagagcugagucugauauau

SEQ ID NO: 554134 - RNA, 22 nt, Human
augauucagcccaauuuuucua

SEQ ID NO: 554135 - RNA, 22 nt, Human
gagaaaugcuagcuuaggaauc

SEQ ID NO: 554136 - RNA, 22 nt, Human
agggugcagaaggagccuagga

SEQ ID NO: 554137 - RNA, 22 nt, Human
uaaggcagugagaagaaacagg

SEQ ID NO: 554138 - RNA, 22 nt, Human
ucugggcagagggucuuaguca

SEQ ID NO: 554139 - RNA, 22 nt, Human
augauguaacauaaagaugucu

SEQ ID NO: 554140 - RNA, 22 nt, Human
auuucuagaggcagcuucuagg

SEQ ID NO: 554141 - RNA, 23 nt, Human
agggcugaaugcagagaagcaga

SEQ ID NO: 554142 - RNA, 22 nt, Human
uugucuguccaggcaccccaag

SEQ ID NO: 554143 - RNA, 23 nt, Human
auucuucauuaucuucuagaaaa

SEQ ID NO: 554144 - RNA, 22 nt, Human
ccugggaaucggugcguugagg

SEQ ID NO: 554145 - RNA, 22 nt, Human
cagcugugggccugacguggca

SEQ ID NO: 554146 - RNA, 22 nt, Human
ucaaaugcuguauuguaguaau

SEQ ID NO: 554147 - RNA, 22 nt, Human
ucaaagaagugcaaaccucauc

SEQ ID NO: 554148 - RNA, 22 nt, Human
auaauuuacuaagcucuaccuu

SEQ ID NO: 554149 - RNA, 22 nt, Human
cuuuuuuccuaaggcaacauga

SEQ ID NO: 554150 - RNA, 22 nt, Human
cagagccugcugccuucugaag

SEQ ID NO: 554151 - RNA, 22 nt, Human
gcaauaaauaacauggaagaca

SEQ ID NO: 554152 - RNA, 22 nt, Human
ggagaaagggacugaucugcuc

SEQ ID NO: 554153 - RNA, 22 nt, Human
aaagcagagaucauggcuugua

SEQ ID NO: 554154 - RNA, 22 nt, Human
cccagggcuuuucucacuagac

SEQ ID NO: 554155 - RNA, 22 nt, Human
uuagccauuuuauacaagugua

SEQ ID NO: 554156 - RNA, 22 nt, Human
ccacagaguuacaaaacaguca

SEQ ID NO: 554157 - RNA, 22 nt, Human
uauuuguuucuaguggcagcaa

SEQ ID NO: 554158 - RNA, 22 nt, Human
cacaggcucuucucacuugauu

SEQ ID NO: 554159 - RNA, 22 nt, Human
gcugugaguggaggaggcugag

SEQ ID NO: 554160 - RNA, 22 nt, Human
uguuccaauaaggaguugaaau

SEQ ID NO: 554161 - RNA, 22 nt, Human
uuucaaagguggaagagugaau

SEQ ID NO: 554162 - RNA, 22 nt, Human
ugucacauaauuuaucuguagg

SEQ ID NO: 554163 - RNA, 22 nt, Human
caggaacccccacucucagcuc

SEQ ID NO: 554164 - RNA, 22 nt, Human
uguuacaguggcuuuuuaaaca

SEQ ID NO: 554165 - RNA, 22 nt, Human
ccucccaccguaucucaguggc

SEQ ID NO: 554166 - RNA, 22 nt, Human
ugggccuggacaucuguauuuu

SEQ ID NO: 554167 - RNA, 19 nt, Human
gggcaaagugaucguccug

SEQ ID NO: 554168 - RNA, 22 nt, Human
augaagucuagcaagcauugaa

SEQ ID NO: 554169 - RNA, 22 nt, Human
gggugagagucaggcagagauu

SEQ ID NO: 554170 - RNA, 22 nt, Human
auacagaaguuuuccacuuauu

SEQ ID NO: 554171 - RNA, 22 nt, Human
gaaggccauugcguccugggau

SEQ ID NO: 554172 - RNA, 22 nt, Human
ccacacugucuaacaaggcaua

SEQ ID NO: 554173 - RNA, 22 nt, Human
gcaggggaguggaugauggauu

SEQ ID NO: 554174 - RNA, 22 nt, Human
aagccacuauggugauucucaa

SEQ ID NO: 554175 - RNA, 20 nt, Human
ccugucuggagacaaagaga

SEQ ID NO: 554176 - RNA, 22 nt, Human
aagaugauagaucugucaaugu

SEQ ID NO: 554177 - RNA, 22 nt, Human
caacuuuaugauugguuuguca

SEQ ID NO: 554178 - RNA, 22 nt, Human
cccugcagagccagcccugacc

SEQ ID NO: 554179 - RNA, 22 nt, Human
aaaguauuugugauuuuuacca

SEQ ID NO: 554180 - RNA, 22 nt, Human
aguggucuagucugaggauuau

SEQ ID NO: 554181 - RNA, 22 nt, Human
uucuuguucugguucuguuagc

SEQ ID NO: 554182 - RNA, 22 nt, Human
auuucucaucaagugccaacuc

SEQ ID NO: 554183 - RNA, 22 nt, Human
gcuggaguccagugguaugauc

SEQ ID NO: 554184 - RNA, 23 nt, Human
gggagaauaugaggaugauggug

SEQ ID NO: 554185 - RNA, 22 nt, Human
guccaggcuaagucccuucugc

SEQ ID NO: 554186 - RNA, 22 nt, Human
cagguggagcugacugagggca

SEQ ID NO: 554187 - RNA, 22 nt, Human
uuagaaaggaaucuucauuuca

SEQ ID NO: 554188 - RNA, 23 nt, Human
cagcuuucagggcuuuagggaag

SEQ ID NO: 554189 - RNA, 22 nt, Human
acauaccauacauggugagaug

SEQ ID NO: 554190 - RNA, 22 nt, Human
uauuauuauaguuauugggaag

SEQ ID NO: 554191 - RNA, 17 nt, Human
auguauauuaacucuga

SEQ ID NO: 554192 - RNA, 22 nt, Human
auacaaaaauuagccgggagua

SEQ ID NO: 554193 - RNA, 22 nt, Human
ugcccugggaggcuuuccuguu

SEQ ID NO: 554194 - RNA, 22 nt, Human
uugcauugcuuggucuucaaga

SEQ ID NO: 554195 - RNA, 22 nt, Human
uucuaaacuucaauucuaaauu

SEQ ID NO: 554196 - RNA, 22 nt, Human
aggaccagaggccagagucagc

SEQ ID NO: 554197 - RNA, 22 nt, Human
agugucugccugggaggagcau

SEQ ID NO: 554198 - RNA, 22 nt, Human
agcugccaucagccuuuggaug

SEQ ID NO: 554199 - RNA, 22 nt, Human
caggauuucauacaucuuuacu

SEQ ID NO: 554200 - RNA, 22 nt, Human
uggaugaaaaaugagaauuuuc

SEQ ID NO: 554201 - RNA, 22 nt, Human
cagcuggcauaccugggcccgg

SEQ ID NO: 554202 - RNA, 22 nt, Human
cugagaguaauuuucuacuuga

SEQ ID NO: 554203 - RNA, 22 nt, Human
uuagggacaaauuugcagaacc

SEQ ID NO: 554204 - RNA, 20 nt, Human
ucucugagcuucucuugggg

SEQ ID NO: 554205 - RNA, 22 nt, Human
uguccucacaggaaugaacuuu

SEQ ID NO: 554206 - RNA, 22 nt, Human
cuggugccauucuguggccuag

SEQ ID NO: 554207 - RNA, 22 nt, Human
aagcacauuauagcuaucuagg

SEQ ID NO: 554208 - RNA, 22 nt, Human
uugcagggcaggaccauggaca

SEQ ID NO: 554209 - RNA, 22 nt, Human
cugcugugcuuguggccacccg

SEQ ID NO: 554210 - RNA, 22 nt, Human
acacagggucuagaguuaggcc

SEQ ID NO: 554211 - RNA, 22 nt, Human
uuucacaauuuuaaggagcaaa

SEQ ID NO: 554212 - RNA, 22 nt, Human
uaggaaccagagcacucugggc

SEQ ID NO: 554213 - RNA, 21 nt, Human
cucaggaucuuauauauuagu

SEQ ID NO: 554214 - RNA, 20 nt, Human
ggccauggguugccugaggu

SEQ ID NO: 554215 - RNA, 22 nt, Human
auauuuauaaggcaggcaagua

SEQ ID NO: 554216 - RNA, 19 nt, Human
guaacaguggacauuuuag

SEQ ID NO: 554217 - RNA, 22 nt, Human
aguuucuucauccaaaaaaugg

SEQ ID NO: 554218 - RNA, 22 nt, Human
ugcugugagguugagaaggaag

SEQ ID NO: 554219 - RNA, 22 nt, Human
ccuccuggcccugggccuggaa

SEQ ID NO: 554220 - RNA, 22 nt, Human
aaagcuuuguaaauaaacaggu

SEQ ID NO: 554221 - RNA, 22 nt, Human
ggaaagauguaauauuaucuaa

SEQ ID NO: 554222 - RNA, 22 nt, Human
aagagcuggcucuugcagcagc

SEQ ID NO: 554223 - RNA, 22 nt, Human
ggaaaaggccacagggacacau

SEQ ID NO: 554224 - RNA, 22 nt, Human
uaaauguaccuucugccuuacu

SEQ ID NO: 554225 - RNA, 22 nt, Human
auacauuauuguuaaagaacau

SEQ ID NO: 554226 - RNA, 22 nt, Human
aacaaaugaccugauuucuucc

SEQ ID NO: 554227 - RNA, 22 nt, Human
aaguagauagugcuacggaguu

SEQ ID NO: 554228 - RNA, 22 nt, Human
cagggcucgcugccagcuucag

SEQ ID NO: 554229 - RNA, 22 nt, Human
cuauuauuauguuaacuggacu

SEQ ID NO: 554230 - RNA, 22 nt, Human
aagauaaacucuugauuucuga

SEQ ID NO: 554231 - RNA, 22 nt, Human
cucuuucaguucugauagucuc

SEQ ID NO: 554232 - RNA, 22 nt, Human
ucccugcccugccuucaugguu

SEQ ID NO: 554233 - RNA, 22 nt, Human
cagguggggggcuuccgagccu

SEQ ID NO: 554234 - RNA, 22 nt, Human
acacauauucauauguacuuac

SEQ ID NO: 554235 - RNA, 22 nt, Human
uucaaaguugcaugacagcuua

SEQ ID NO: 554236 - RNA, 22 nt, Human
uucaggauaugugauaucugaa

SEQ ID NO: 554237 - RNA, 22 nt, Human
uuuauuuaaagucguguguuaa

SEQ ID NO: 554238 - RNA, 22 nt, Human
gaaaggagggaaacagagcggu

SEQ ID NO: 554239 - RNA, 22 nt, Human
ucacagacaccuuggccacagu

SEQ ID NO: 554240 - RNA, 22 nt, Human
aucuucagcgagguuuccuuuc

SEQ ID NO: 554241 - RNA, 22 nt, Human
guucauuuaugauguaacaugu

SEQ ID NO: 554242 - RNA, 22 nt, Human
acagaagauaaugcugccuugg

SEQ ID NO: 554243 - RNA, 22 nt, Human
cccuggaguccuggcaguugau

SEQ ID NO: 554244 - RNA, 22 nt, Human
uuucuaagacauuugucaucuu

SEQ ID NO: 554245 - RNA, 17 nt, Human
ccuuucucuuucaucuc

SEQ ID NO: 554246 - RNA, 22 nt, Human
ucaggccugcaaaugaauggua

SEQ ID NO: 554247 - RNA, 22 nt, Human
cuccagucuaguagagccugcu

SEQ ID NO: 554248 - RNA, 22 nt, Human
aaacagaaauuuccucaugcuc

SEQ ID NO: 554249 - RNA, 19 nt, Human
uaaaaugucuguggucagu

SEQ ID NO: 554250 - RNA, 22 nt, Human
uguuguagcuugacagcagcca

SEQ ID NO: 554251 - RNA, 22 nt, Human
cugucuggugucccugucuaca

SEQ ID NO: 554252 - RNA, 22 nt, Human
aggcagcagccacaaggccuga

SEQ ID NO: 554253 - RNA, 22 nt, Human
uuuucauuguuccucgagcauu

SEQ ID NO: 554254 - RNA, 20 nt, Human
aaucagaaagugugagcucu

SEQ ID NO: 554255 - RNA, 22 nt, Human
cugcucuguuucuuagcugggu

SEQ ID NO: 554256 - RNA, 22 nt, Human
agaggggagagcuaagcaauuc

SEQ ID NO: 554257 - RNA, 22 nt, Human
aaagucacaguuuaggggauau

SEQ ID NO: 554258 - RNA, 22 nt, Human
uugugcaagaagccagcaccaa

SEQ ID NO: 554259 - RNA, 22 nt, Human
acucugaaugugcauguaaauc

SEQ ID NO: 554260 - RNA, 22 nt, Human
uugaaaucaccacuagcauuug

SEQ ID NO: 554261 - RNA, 22 nt, Human
ugcuggcucaguuugcagacuc

SEQ ID NO: 554262 - RNA, 18 nt, Human
ggcaugugagugcugagg

SEQ ID NO: 554263 - RNA, 22 nt, Human
uucaaagauggagggauagauu

SEQ ID NO: 554264 - RNA, 22 nt, Human
cagaguccuggacacagagaca

SEQ ID NO: 554265 - RNA, 22 nt, Human
agggcagugggaaagccugcuc

SEQ ID NO: 554266 - RNA, 23 nt, Human
uaaauuucuugauucuuauguga

SEQ ID NO: 554267 - RNA, 22 nt, Human
acuuucaagcccucuagagaca

SEQ ID NO: 554268 - RNA, 22 nt, Human
ucagcuuuggucacauugaguu

SEQ ID NO: 554269 - RNA, 21 nt, Human
ccacuguagacucauucugag

SEQ ID NO: 554270 - RNA, 22 nt, Human
caugggcugugaacccaggcug

SEQ ID NO: 554271 - RNA, 22 nt, Human
ucacaggacccugaggguggcg

SEQ ID NO: 554272 - RNA, 22 nt, Human
aagagcaaguggguagugaagc

SEQ ID NO: 554273 - RNA, 22 nt, Human
caagcaacgacuuucaagcugu

SEQ ID NO: 554274 - RNA, 22 nt, Human
uucaacaucuuggagcuggaac

SEQ ID NO: 554275 - RNA, 22 nt, Human
ugaaagcuguccacuaggcugu

SEQ ID NO: 554276 - RNA, 22 nt, Human
aaugaaugaaccacauauaaca

SEQ ID NO: 554277 - RNA, 22 nt, Human
uaguggagaggauguggagaaa

SEQ ID NO: 554278 - RNA, 22 nt, Human
ggagugaguacuggaguagcug

SEQ ID NO: 554279 - RNA, 22 nt, Human
ucagcuggcaguucagaggcug

SEQ ID NO: 554280 - RNA, 22 nt, Human
guggccucaugucuauaaagag

SEQ ID NO: 554281 - RNA, 22 nt, Human
acaguucugcaagauauuuuuu

SEQ ID NO: 554282 - RNA, 22 nt, Human
caagagcuagacuuugucagga

SEQ ID NO: 554283 - RNA, 22 nt, Human
aaaugugugcacaaagacagcu

SEQ ID NO: 554284 - RNA, 22 nt, Human
ccugagagugcgugccuccuua

SEQ ID NO: 554285 - RNA, 22 nt, Human
gugucaugggguuuguuauaca

SEQ ID NO: 554286 - RNA, 22 nt, Human
gccugcuucacggacaggccuc

SEQ ID NO: 554287 - RNA, 22 nt, Human
ugugggccugggaaggugacac

SEQ ID NO: 554288 - RNA, 22 nt, Human
caugaguucaucugcuucucuu

SEQ ID NO: 554289 - RNA, 22 nt, Human
gccugcuuugccuacaagcaga

SEQ ID NO: 554290 - RNA, 22 nt, Human
aucaacauagccacuccuuaga

SEQ ID NO: 554291 - RNA, 22 nt, Human
aaacagcugggagguagaggcg

SEQ ID NO: 554292 - RNA, 22 nt, Human
ggcuguggacacugagcucaga

SEQ ID NO: 554293 - RNA, 22 nt, Human
cugccccuggcuggugaagcag

SEQ ID NO: 554294 - RNA, 22 nt, Human
ccuggccagggucugggcugcu

SEQ ID NO: 554295 - RNA, 20 nt, Human
uaugaguauuacuuucagga

SEQ ID NO: 554296 - RNA, 22 nt, Human
guuggaagaagacuguaaauua

SEQ ID NO: 554297 - RNA, 22 nt, Human
ggucccaggagaauaggugcaa

SEQ ID NO: 554298 - RNA, 22 nt, Human
cuguggcucauucuugguggca

SEQ ID NO: 554299 - RNA, 22 nt, Human
cccagggacagcuagguggggc

SEQ ID NO: 554300 - RNA, 22 nt, Human
ugaaaucauguaguuauugcaa

SEQ ID NO: 554301 - RNA, 22 nt, Human
cucagucaugacgcucaggacc

SEQ ID NO: 554302 - RNA, 18 nt, Human
aagccagagaccacugcc

SEQ ID NO: 554303 - RNA, 22 nt, Human
cuagaaauauuuuacagucaag

SEQ ID NO: 554304 - RNA, 23 nt, Human
uggcucucucagugcugcagagg

SEQ ID NO: 554305 - RNA, 22 nt, Human
auguacaaaaugccacugaauu

SEQ ID NO: 554306 - RNA, 22 nt, Human
ucaccaggcuccuguuaagaug

SEQ ID NO: 554307 - RNA, 22 nt, Human
uuuccuuccaaaugcccgggag

SEQ ID NO: 554308 - RNA, 22 nt, Human
aggggagaaaaaugccuucugu

SEQ ID NO: 554309 - RNA, 22 nt, Human
cuauaucaucauuaccugcacc

SEQ ID NO: 554310 - RNA, 22 nt, Human
agccccacacucucucugagaa

SEQ ID NO: 554311 - RNA, 22 nt, Human
uugcugaagaaaaaauauguua

SEQ ID NO: 554312 - RNA, 23 nt, Human
ccuggaguacuaaggggauggaa

SEQ ID NO: 554313 - RNA, 21 nt, Human
ugaggcucaucuuauguggcu

SEQ ID NO: 554314 - RNA, 22 nt, Human
gcccaagacuguacaguuaaag

SEQ ID NO: 554315 - RNA, 22 nt, Human
agcuggugaaccugaggcacag

SEQ ID NO: 554316 - RNA, 22 nt, Human
gagcugccugugugccaugaug

SEQ ID NO: 554317 - RNA, 22 nt, Human
uaucacacuguuuuaauuacuu

SEQ ID NO: 554318 - RNA, 22 nt, Human
aaaugaguuugccucuagauag

SEQ ID NO: 554319 - RNA, 22 nt, Human
gaauaacauuuuuuccuuuaca

SEQ ID NO: 554320 - RNA, 22 nt, Human
gggggcuguccugugcauugua

SEQ ID NO: 554321 - RNA, 22 nt, Human
aauguuucauucuugcccauug

SEQ ID NO: 554322 - RNA, 22 nt, Human
gugcagauccugauugcaguuc

SEQ ID NO: 554323 - RNA, 22 nt, Human
aggaguggaauuacuggguucu

SEQ ID NO: 554324 - RNA, 22 nt, Human
uuaacauuugugaagcauuuag

SEQ ID NO: 554325 - RNA, 22 nt, Human
uguacaaagaguauagcuuuga

SEQ ID NO: 554326 - RNA, 22 nt, Human
ugaaaucaucugccaauaaguu

SEQ ID NO: 554327 - RNA, 22 nt, Human
guguuuccucuagaagccaugg

SEQ ID NO: 554328 - RNA, 22 nt, Human
aagggcuccaagagguagcugg

SEQ ID NO: 554329 - RNA, 22 nt, Human
gacucugcuacaggccgagguu

SEQ ID NO: 554330 - RNA, 22 nt, Human
ugggaaagcugcagaaauucuc

SEQ ID NO: 554331 - RNA, 22 nt, Human
uccugcuuccuugucuuuagac

SEQ ID NO: 554332 - RNA, 22 nt, Human
gugcaaauguaauugcaguuuu

SEQ ID NO: 554333 - RNA, 23 nt, Human
ccucagggucuagcagagagaag

SEQ ID NO: 554334 - RNA, 20 nt, Human
agagagcacaggcaggaaag

SEQ ID NO: 554335 - RNA, 22 nt, Human
cgacccuacagacagugcugag

SEQ ID NO: 554336 - RNA, 22 nt, Human
ugauuuccacagucaggggugc

SEQ ID NO: 554337 - RNA, 23 nt, Human
ucuccagugucucuucauugagu

SEQ ID NO: 554338 - RNA, 22 nt, Human
caaacugagcaucagaaaguuu

SEQ ID NO: 554339 - RNA, 22 nt, Human
gccagggcugugcagguuuguu

SEQ ID NO: 554340 - RNA, 19 nt, Human
aggcuuggcuagauuuacu

SEQ ID NO: 554341 - RNA, 22 nt, Human
gggcccuggacguggcggcaga

SEQ ID NO: 554342 - RNA, 22 nt, Human
cucuggagagguucccauggga

SEQ ID NO: 554343 - RNA, 22 nt, Human
gccuggagggauagaaugcaag

SEQ ID NO: 554344 - RNA, 22 nt, Human
ugaccuauuagauuuccuugcc

SEQ ID NO: 554345 - RNA, 22 nt, Human
acauuuuuauucaucaaagcag

SEQ ID NO: 554346 - RNA, 22 nt, Human
ucuucacacacaguccucuuuc

SEQ ID NO: 554347 - RNA, 22 nt, Human
gugggagaagauuuggucaucu

SEQ ID NO: 554348 - RNA, 22 nt, Human
uggcucagagagggagugugga

SEQ ID NO: 554349 - RNA, 22 nt, Human
agucucagaguaccugagggac

SEQ ID NO: 554350 - RNA, 22 nt, Human
cuagaacagaaaguacaggaaa

SEQ ID NO: 554351 - RNA, 22 nt, Human
ucugagggugggagaaggagcu

SEQ ID NO: 554352 - RNA, 22 nt, Human
uugugaauagugcugcaauaaa

SEQ ID NO: 554353 - RNA, 22 nt, Human
aggaacaauugauaaacucaca

SEQ ID NO: 554354 - RNA, 22 nt, Human
agugucauaugccacugcaucc

SEQ ID NO: 554355 - RNA, 22 nt, Human
gaggggcagagguagagaacaa

SEQ ID NO: 554356 - RNA, 22 nt, Human
agaaaaacuaagaguggguggu

SEQ ID NO: 554357 - RNA, 22 nt, Human
caugggcugaaaaucugcaaac

SEQ ID NO: 554358 - RNA, 22 nt, Human
ccaguugguuucaaugggacag

SEQ ID NO: 554359 - RNA, 22 nt, Human
caggguggaauggaaugcuggc

SEQ ID NO: 554360 - RNA, 23 nt, Human
gcugucaguuguuuuugucucua

SEQ ID NO: 554361 - RNA, 22 nt, Human
gauuucuuuguacccacaaucc

SEQ ID NO: 554362 - RNA, 22 nt, Human
uugggcucaggaguuugagacc

SEQ ID NO: 554363 - RNA, 22 nt, Human
uucaguaucugcaaaaugggga

SEQ ID NO: 554364 - RNA, 22 nt, Human
uucuucuuuccaauuacauggu

SEQ ID NO: 554365 - RNA, 22 nt, Human
ccuauugacaauucucuucucc

SEQ ID NO: 554366 - RNA, 22 nt, Human
uugaaacuuuucuuggagaaac

SEQ ID NO: 554367 - RNA, 20 nt, Human
guauuagguguuccucuuuc

SEQ ID NO: 554368 - RNA, 22 nt, Human
ucccugugagaaaugaagcagg

SEQ ID NO: 554369 - RNA, 22 nt, Human
ggcagcaggagccaucugguag

SEQ ID NO: 554370 - RNA, 22 nt, Human
aggcaugugacccuggacucag

SEQ ID NO: 554371 - RNA, 22 nt, Human
cucuccccacacccucugcaug

SEQ ID NO: 554372 - RNA, 23 nt, Human
gagguacagcaccagugaauagg

SEQ ID NO: 554373 - RNA, 22 nt, Human
cuggcagcugugugaagaacug

SEQ ID NO: 554374 - RNA, 22 nt, Human
aaaaaguuucaacugccaacuc

SEQ ID NO: 554375 - RNA, 22 nt, Human
auaaacaucuguuucucuucug

SEQ ID NO: 554376 - RNA, 22 nt, Human
ggccucggcccacugcugcggu

SEQ ID NO: 554377 - RNA, 22 nt, Human
acaguuacaugauucuugugag

SEQ ID NO: 554378 - RNA, 22 nt, Human
gccucuguggcucagccuugcu

SEQ ID NO: 554379 - RNA, 22 nt, Human
ggaggcugcugccucacguggg

SEQ ID NO: 554380 - RNA, 22 nt, Human
ccagcuccccucagcagguaau

SEQ ID NO: 554381 - RNA, 22 nt, Human
acaggacagggaauucgaaauu

SEQ ID NO: 554382 - RNA, 22 nt, Human
uuuacagcaacagugcagaggu

SEQ ID NO: 554383 - RNA, 22 nt, Human
cuaaaucaggccuuacagcuuc

SEQ ID NO: 554384 - RNA, 22 nt, Human
cuccuguauguugggcuucaca

SEQ ID NO: 554385 - RNA, 22 nt, Human
gagcuggguauauggcuuuaug

SEQ ID NO: 554386 - RNA, 22 nt, Human
cagccuggauugcagaaugcua

SEQ ID NO: 554387 - RNA, 21 nt, Human
guauaucagcagugaauucaa

SEQ ID NO: 554388 - RNA, 22 nt, Human
uggaaggagcuaaggaccuggg

SEQ ID NO: 554389 - RNA, 22 nt, Human
aguaaaacagagaaaucacuca

SEQ ID NO: 554390 - RNA, 22 nt, Human
agcugccacaugcccaagggca

SEQ ID NO: 554391 - RNA, 22 nt, Human
uaaaguauccaguuauucuucu

SEQ ID NO: 554392 - RNA, 22 nt, Human
uguauuaacauuaauaaaaugg

SEQ ID NO: 554393 - RNA, 22 nt, Human
agaaauuaugcaguaguuuuau

SEQ ID NO: 554394 - RNA, 22 nt, Human
gaaucauuuauuuuugacagca

SEQ ID NO: 554395 - RNA, 22 nt, Human
ucugugaacaucacauugacag

SEQ ID NO: 554396 - RNA, 22 nt, Human
gcugcuaagcguuucuguucca

SEQ ID NO: 554397 - RNA, 22 nt, Human
uagcagaagaacaacaugaucu

SEQ ID NO: 554398 - RNA, 22 nt, Human
gcaaggacucccugggucauuc

SEQ ID NO: 554399 - RNA, 22 nt, Human
gcugagaggcagccagacccuc

SEQ ID NO: 554400 - RNA, 22 nt, Human
cagaggcacagcuucuuuuaau

SEQ ID NO: 554401 - RNA, 22 nt, Human
cagagccugccaccuuucuccc

SEQ ID NO: 554402 - RNA, 22 nt, Human
aauucuuaaucccauaaaguga

SEQ ID NO: 554403 - RNA, 22 nt, Human
cagcagaggcacgucugugaau

SEQ ID NO: 554404 - RNA, 22 nt, Human
aacaaucaaguuucuaaaugac

SEQ ID NO: 554405 - RNA, 18 nt, Human
agcagguggcgucugcag

SEQ ID NO: 554406 - RNA, 22 nt, Human
uaaugcacauagaaguacuuag

SEQ ID NO: 554407 - RNA, 22 nt, Human
aggcagguuggugagaagacug

SEQ ID NO: 554408 - RNA, 23 nt, Human
uccugagaugagacagugcugcc

SEQ ID NO: 554409 - RNA, 22 nt, Human
cauuucaaguaacagauugcuu

SEQ ID NO: 554410 - RNA, 22 nt, Human
ucuggggaauguucauuucuga

SEQ ID NO: 554411 - RNA, 22 nt, Human
cucugagagagcuggugagcac

SEQ ID NO: 554412 - RNA, 22 nt, Human
ggaugcugcuaucaggcuucga

SEQ ID NO: 554413 - RNA, 22 nt, Human
agaaaugggccuugggacacaa

SEQ ID NO: 554414 - RNA, 18 nt, Human
cuacauucauaggaaagg

SEQ ID NO: 554415 - RNA, 22 nt, Human
gcugccugugcgggucgcuagg

SEQ ID NO: 554416 - RNA, 20 nt, Human
acuccagguggcaugaggac

SEQ ID NO: 554417 - RNA, 22 nt, Human
ggagaggcuuggcccagccugg

SEQ ID NO: 554418 - RNA, 22 nt, Human
aaaacuuagcuaggcaaguuuu

SEQ ID NO: 554419 - RNA, 22 nt, Human
ucugccuguugcuagaauguca

SEQ ID NO: 554420 - RNA, 22 nt, Human
ccagcugguaagugauggagcc

SEQ ID NO: 554421 - RNA, 22 nt, Human
uuaaagcaucacacuauuaauu

SEQ ID NO: 554422 - RNA, 22 nt, Human
ggccuucacgugaccuggcgug

SEQ ID NO: 554423 - RNA, 22 nt, Human
gcacuaaaccaacauguaauaa

SEQ ID NO: 554424 - RNA, 22 nt, Human
gugccugugccaggggugugcu

SEQ ID NO: 554425 - RNA, 22 nt, Human
uuucagauggagguuuaggaca

SEQ ID NO: 554426 - RNA, 22 nt, Human
agcuucuggaaggcaaggcuug

SEQ ID NO: 554427 - RNA, 22 nt, Human
caaggccugacugcuugucuaa

SEQ ID NO: 554428 - RNA, 22 nt, Human
ccuuccaggugcaggcaagccu

SEQ ID NO: 554429 - RNA, 22 nt, Human
cauugaaaaacguugacugagu

SEQ ID NO: 554430 - RNA, 22 nt, Human
caugggcuuuggaggcuggagg

SEQ ID NO: 554431 - RNA, 22 nt, Human
ugccaggcccugugcuggaugc

SEQ ID NO: 554432 - RNA, 18 nt, Human
acauuucuaugcuucugg

SEQ ID NO: 554433 - RNA, 22 nt, Human
ccgaggacauugggcuucuguu

SEQ ID NO: 554434 - RNA, 22 nt, Human
caggaaauucuuuuuaacagaa

SEQ ID NO: 554435 - RNA, 22 nt, Human
uagaggugucacuuugggaagu

SEQ ID NO: 554436 - RNA, 22 nt, Human
caccugcaaggagcuuucauuu

SEQ ID NO: 554437 - RNA, 22 nt, Human
gcuuccaaaucuguucaaaaug

SEQ ID NO: 554438 - RNA, 22 nt, Human
caugggagcuaucuccaucacu

SEQ ID NO: 554439 - RNA, 18 nt, Human
cuccuuucccuacaccuc

SEQ ID NO: 554440 - RNA, 22 nt, Human
cugcccugggaguaccuguccu

SEQ ID NO: 554441 - RNA, 22 nt, Human
auagucuuagucuauaguuuug

SEQ ID NO: 554442 - RNA, 22 nt, Human
agugcauacccuucuaaaaagu

SEQ ID NO: 554443 - RNA, 22 nt, Human
ggccuuccuguuguguccaccg

SEQ ID NO: 554444 - RNA, 22 nt, Human
ugcauaaagugccauaguauua

SEQ ID NO: 554445 - RNA, 22 nt, Human
ggcacagcaagaagggaaauga

SEQ ID NO: 554446 - RNA, 21 nt, Human
ucaggaagagccaguucaugc

SEQ ID NO: 554447 - RNA, 22 nt, Human
gcaaagcagucuucugugccua

SEQ ID NO: 554448 - RNA, 22 nt, Human
acauaaugagcucuuuauaaau

SEQ ID NO: 554449 - RNA, 22 nt, Human
ccagcuccagguagaugggcag

SEQ ID NO: 554450 - RNA, 22 nt, Human
acaugcuuugauguauuuugca

SEQ ID NO: 554451 - RNA, 20 nt, Human
ggaaggcuugaaguuuacau

SEQ ID NO: 554452 - RNA, 22 nt, Human
aggcgcaggguuuggacccagg

SEQ ID NO: 554453 - RNA, 19 nt, Human
ugcauauaucuaugaaaga

SEQ ID NO: 554454 - RNA, 22 nt, Human
ucagaggguggcugggagcauc

SEQ ID NO: 554455 - RNA, 22 nt, Human
ugccagagaagacccagucacu

SEQ ID NO: 554456 - RNA, 22 nt, Human
uggugccaucauagcucacugc

SEQ ID NO: 554457 - RNA, 22 nt, Human
uccauucauucauugaugaaca

SEQ ID NO: 554458 - RNA, 22 nt, Human
ucuggaguugaaguucuucccc

SEQ ID NO: 554459 - RNA, 22 nt, Human
acacauauauuugcauauacac

SEQ ID NO: 554460 - RNA, 22 nt, Human
gcagcuggagccagccagacac

SEQ ID NO: 554461 - RNA, 22 nt, Human
ugcauuguugaauauuucauag

SEQ ID NO: 554462 - RNA, 22 nt, Human
uagaacuuauuuggcauuauuu

SEQ ID NO: 554463 - RNA, 22 nt, Human
aaaguucuggagaaaauaauga

SEQ ID NO: 554464 - RNA, 22 nt, Human
ucugccugagaaguggggugcc

SEQ ID NO: 554465 - RNA, 21 nt, Human
uccuuccuugagguccuuucc

SEQ ID NO: 554466 - RNA, 23 nt, Human
acagagaucuugacuuguaugga

SEQ ID NO: 554467 - RNA, 21 nt, Human
acaguauauuagauauuugaa

SEQ ID NO: 554468 - RNA, 22 nt, Human
caucagaccugccagacuaggu

SEQ ID NO: 554469 - RNA, 22 nt, Human
cacagcagaaauaugaaggcag

SEQ ID NO: 554470 - RNA, 22 nt, Human
cagagccauccaggugccuguu

SEQ ID NO: 554471 - RNA, 22 nt, Human
agagccagcaacucuagcccug

SEQ ID NO: 554472 - RNA, 22 nt, Human
gccaagcuggaugaagagguug

SEQ ID NO: 554473 - RNA, 23 nt, Human
cucccuggaguuucuggaagaug

SEQ ID NO: 554474 - RNA, 22 nt, Human
agaaaguuuguuuuuauccaua

SEQ ID NO: 554475 - RNA, 22 nt, Human
caguguaagcucuagacuagaa

SEQ ID NO: 554476 - RNA, 22 nt, Human
acaggucagauaaaggcuggug

SEQ ID NO: 554477 - RNA, 22 nt, Human
ucagggcauggcugcacuuggc

SEQ ID NO: 554478 - RNA, 22 nt, Human
ccagggggcuuggugaggccau

SEQ ID NO: 554479 - RNA, 22 nt, Human
uuugcauugcauuaaguauucu

SEQ ID NO: 554480 - RNA, 21 nt, Human
uaaagaagaugaaugugauca

SEQ ID NO: 554481 - RNA, 22 nt, Human
cucagaauuuagggcucugagg

SEQ ID NO: 554482 - RNA, 22 nt, Human
auauuauaaguuauuucaaguu

SEQ ID NO: 554483 - RNA, 22 nt, Human
cugggcugagccugggcugugu

SEQ ID NO: 554484 - RNA, 22 nt, Human
cucaucugauaaaucacucuua

SEQ ID NO: 554485 - RNA, 22 nt, Human
ugcuucuggcuuaucucgugcc

SEQ ID NO: 554486 - RNA, 22 nt, Human
ugcagcagcagggaggaggcuc

SEQ ID NO: 554487 - RNA, 22 nt, Human
gaaagguugggugaauggugga

SEQ ID NO: 554488 - RNA, 22 nt, Human
aggcagugagaaauagcaagau

SEQ ID NO: 554489 - RNA, 20 nt, Human
ugcagggcucugcuucucuc

SEQ ID NO: 554490 - RNA, 22 nt, Human
gaggcagaggaagguggucucu

SEQ ID NO: 554491 - RNA, 22 nt, Human
augcuauacucaaagaaauuca

SEQ ID NO: 554492 - RNA, 22 nt, Human
cuuccuugcugucugcuccagg

SEQ ID NO: 554493 - RNA, 22 nt, Human
agggggcaggagagaccugcug

SEQ ID NO: 554494 - RNA, 22 nt, Human
augaggcuaugaauggggagau

SEQ ID NO: 554495 - RNA, 22 nt, Human
ucuuccugaaacccuguuccag

SEQ ID NO: 554496 - RNA, 18 nt, Human
uugauaaacaauuucauu

SEQ ID NO: 554497 - RNA, 22 nt, Human
cuccaguggcaaguccgggcgg

SEQ ID NO: 554498 - RNA, 22 nt, Human
ggagcugggguuggcaucuucc

SEQ ID NO: 554499 - RNA, 22 nt, Human
gucauaaagacagaaacauucc

SEQ ID NO: 554500 - RNA, 22 nt, Human
ccuggcaguggugaagaagagg

SEQ ID NO: 554501 - RNA, 22 nt, Human
gguggcagaauaauugaagguc

SEQ ID NO: 554502 - RNA, 22 nt, Human
aguuauuacucuuuaacauauu

SEQ ID NO: 554503 - RNA, 22 nt, Human
ugccuguguggggucugccgcc

SEQ ID NO: 554504 - RNA, 22 nt, Human
cucagagaaccuaagcggagga

SEQ ID NO: 554505 - RNA, 22 nt, Human
ucaggaauccagacagggcaca

SEQ ID NO: 554506 - RNA, 22 nt, Human
ccuggggaauagagucaagggg

SEQ ID NO: 554507 - RNA, 22 nt, Human
ucuggagcuggcagggcccugg

SEQ ID NO: 554508 - RNA, 22 nt, Human
cuggcagcuuagcacucugguu

SEQ ID NO: 554509 - RNA, 22 nt, Human
aggggagaguuaaugugaaugu

SEQ ID NO: 554510 - RNA, 22 nt, Human
gcccugcccuguugaaacuaga

SEQ ID NO: 554511 - RNA, 22 nt, Human
cuaaauacuagccuucagauuu

SEQ ID NO: 554512 - RNA, 22 nt, Human
uggccugguccuugucaaggca

SEQ ID NO: 554513 - RNA, 21 nt, Human
acauuuucuguuuuaggaagu

SEQ ID NO: 554514 - RNA, 22 nt, Human
cacagaacauuuuuagaugcag

SEQ ID NO: 554515 - RNA, 22 nt, Human
ugaaagaacuagcaucuucaag

SEQ ID NO: 554516 - RNA, 22 nt, Human
gagauuggauuuaauggccaaa

SEQ ID NO: 554517 - RNA, 22 nt, Human
gcucuguacgcaggaugagggg

SEQ ID NO: 554518 - RNA, 22 nt, Human
uggcucagcaagacauugaccu

SEQ ID NO: 554519 - RNA, 22 nt, Human
aaucaguuguucacucugaaaa

SEQ ID NO: 554520 - RNA, 22 nt, Human
uacuguauuugauaagugaagu

SEQ ID NO: 554521 - RNA, 20 nt, Human
cagauggcacgucagggcau

SEQ ID NO: 554522 - RNA, 22 nt, Human
gcagggcagggcaagaacuggg

SEQ ID NO: 554523 - RNA, 22 nt, Human
gccuguccacuaaacagccaag

SEQ ID NO: 554524 - RNA, 22 nt, Human
uagaggcacccuggaggagacu

SEQ ID NO: 554525 - RNA, 23 nt, Human
caguacuuaguguagcguuaauu

SEQ ID NO: 554526 - RNA, 22 nt, Human
auuucacaaagaacagaugcag

SEQ ID NO: 554527 - RNA, 22 nt, Human
cugaaaugggcaaaaguagauu

SEQ ID NO: 554528 - RNA, 22 nt, Human
ggcuuucuagaucuagcucugu

SEQ ID NO: 554529 - RNA, 22 nt, Human
ggcagagcucuggacugagaac

SEQ ID NO: 554530 - RNA, 22 nt, Human
aaugaacaaaauaugcuuugca

SEQ ID NO: 554531 - RNA, 22 nt, Human
cuguggugagcaacugacugaa

SEQ ID NO: 554532 - RNA, 22 nt, Human
auacacauauguguguauaugu

SEQ ID NO: 554533 - RNA, 22 nt, Human
ucugcugcugagcacacuccua

SEQ ID NO: 554534 - RNA, 22 nt, Human
uauaauuuuagaagagauggaa

SEQ ID NO: 554535 - RNA, 21 nt, Human
ccaggguccagcugccauggu

SEQ ID NO: 554536 - RNA, 19 nt, Human
uguguguuuauauauguau

SEQ ID NO: 554537 - RNA, 22 nt, Human
ugaaaauggccugaagaagcaa

SEQ ID NO: 554538 - RNA, 20 nt, Human
aucuggcucagauccugcag

SEQ ID NO: 554539 - RNA, 22 nt, Human
uucucuagguuuuagaugaaga

SEQ ID NO: 554540 - RNA, 22 nt, Human
guauuuuucauuccaagugaga

SEQ ID NO: 554541 - RNA, 22 nt, Human
gugggcaggaggcccugcccug

SEQ ID NO: 554542 - RNA, 22 nt, Human
ucugggcuuuaguuuguuaucu

SEQ ID NO: 554543 - RNA, 22 nt, Human
cuguuuaucccuuuggucagca

SEQ ID NO: 554544 - RNA, 22 nt, Human
ucccaagugucuuggaccaggg

SEQ ID NO: 554545 - RNA, 22 nt, Human
uacugaaaguggucaacagugg

SEQ ID NO: 554546 - RNA, 22 nt, Human
gcagcccagagcgcaggacccc

SEQ ID NO: 554547 - RNA, 20 nt, Human
cacaagagaauacacacugg

SEQ ID NO: 554548 - RNA, 22 nt, Human
cucaggauagcugcgcagccug

SEQ ID NO: 554549 - RNA, 22 nt, Human
agagccaaucuucagagcagag

SEQ ID NO: 554550 - RNA, 22 nt, Human
gcaggcuccaacuggaggaguu

SEQ ID NO: 554551 - RNA, 22 nt, Human
uuuacuuucucaaguauauagg

SEQ ID NO: 554552 - RNA, 22 nt, Human
uuucacauuuuauacuuaagcc

SEQ ID NO: 554553 - RNA, 21 nt, Human
ccagggaagaaaugagggcag

SEQ ID NO: 554554 - RNA, 22 nt, Human
auagaauaaggcacagauucuu

SEQ ID NO: 554555 - RNA, 22 nt, Human
ugaaaucaaugucuucugucuc

SEQ ID NO: 554556 - RNA, 22 nt, Human
agucccagugacuuggccagaa

SEQ ID NO: 554557 - RNA, 22 nt, Human
ucccagcagucagagcuaugug

SEQ ID NO: 554558 - RNA, 22 nt, Human
ucccugggcaucacguugcuuc

SEQ ID NO: 554559 - RNA, 22 nt, Human
auauauaaccuggauaaggcuu

SEQ ID NO: 554560 - RNA, 22 nt, Human
aggcuggaaagggaccagagug

SEQ ID NO: 554561 - RNA, 20 nt, Human
uaacacuugcuuuuugacuu

SEQ ID NO: 554562 - RNA, 22 nt, Human
cccagccugucuuucccaauga

SEQ ID NO: 554563 - RNA, 22 nt, Human
uucuggaucagcaucaugagau

SEQ ID NO: 554564 - RNA, 20 nt, Human
agcugguuaucuuaauucuu

SEQ ID NO: 554565 - RNA, 22 nt, Human
aucuacaacggguggaguaggg

SEQ ID NO: 554566 - RNA, 22 nt, Human
ggcugagcaauuuugaugacau

SEQ ID NO: 554567 - RNA, 22 nt, Human
uguaugaauauguauuuucaua

SEQ ID NO: 554568 - RNA, 22 nt, Human
cacugaguucccugacauuuca

SEQ ID NO: 554569 - RNA, 22 nt, Human
cauucauuagaauagauaugua

SEQ ID NO: 554570 - RNA, 22 nt, Human
uauuucuggcuuugagggugau

SEQ ID NO: 554571 - RNA, 22 nt, Human
gaaaucugaacaacagcuguca

SEQ ID NO: 554572 - RNA, 21 nt, Human
ggcagugaugugaagugcauc

SEQ ID NO: 554573 - RNA, 22 nt, Human
uaagucaggaggucuccugaca

SEQ ID NO: 554574 - RNA, 22 nt, Human
acugccugccucugauucugca

SEQ ID NO: 554575 - RNA, 22 nt, Human
guacacacuauuuaaaguguuu

SEQ ID NO: 554576 - RNA, 22 nt, Human
agcagccauuuaaaaugaauug

SEQ ID NO: 554577 - RNA, 18 nt, Human
gacacauccccaggccuc

SEQ ID NO: 554578 - RNA, 22 nt, Human
guauuuuauggccuggggccua

SEQ ID NO: 554579 - RNA, 21 nt, Human
uuagaagcuaaugcagcuggu

SEQ ID NO: 554580 - RNA, 22 nt, Human
cagcaagacaguuuccuaagug

SEQ ID NO: 554581 - RNA, 22 nt, Human
uaaugcuucaauuuccuugauu

SEQ ID NO: 554582 - RNA, 22 nt, Human
auuacacaggcuggcucuuuga

SEQ ID NO: 554583 - RNA, 22 nt, Human
uaaaagcucuucuguugaguua

SEQ ID NO: 554584 - RNA, 22 nt, Human
ugcaggugcuacaagaacucac

SEQ ID NO: 554585 - RNA, 22 nt, Human
aguacagauuuagacacgauag

SEQ ID NO: 554586 - RNA, 22 nt, Human
uccacacacauuucuaugugca

SEQ ID NO: 554587 - RNA, 22 nt, Human
uaggaagauaaacauuuguaug

SEQ ID NO: 554588 - RNA, 22 nt, Human
cugucucagcaggaagucauca

SEQ ID NO: 554589 - RNA, 21 nt, Human
agaauaaugguaucauuugcu

SEQ ID NO: 554590 - RNA, 22 nt, Human
caaggcaggucugaggagguug

SEQ ID NO: 554591 - RNA, 20 nt, Human
aaacacagccucucuuuaca

SEQ ID NO: 554592 - RNA, 22 nt, Human
caguuuuugccauuaagaguaa

SEQ ID NO: 554593 - RNA, 22 nt, Human
ggcuggucacaccacugcaggg

SEQ ID NO: 554594 - RNA, 22 nt, Human
ccuguucuguggcucucaaagg

SEQ ID NO: 554595 - RNA, 22 nt, Human
aguggcaaagucuucagaaguu

SEQ ID NO: 554596 - RNA, 22 nt, Human
aauuucagauauuaaagaauga

SEQ ID NO: 554597 - RNA, 22 nt, Human
cuuuuuaucucuuaaugauguu

SEQ ID NO: 554598 - RNA, 22 nt, Human
cccugccucugaagcugcucag

SEQ ID NO: 554599 - RNA, 22 nt, Human
gcagcuuucuuuuugcaugucu

SEQ ID NO: 554600 - RNA, 22 nt, Human
ccuuccuggagcccaugcagau

SEQ ID NO: 554601 - RNA, 20 nt, Human
cugggcucgguggcccuggc

SEQ ID NO: 554602 - RNA, 22 nt, Human
uuucacaugugcuguugucaau

SEQ ID NO: 554603 - RNA, 22 nt, Human
agaagccagauuguagugggac

SEQ ID NO: 554604 - RNA, 22 nt, Human
ugguuuuauuuauguugaguca

SEQ ID NO: 554605 - RNA, 22 nt, Human
cauccaauguccuauuaagacu

SEQ ID NO: 554606 - RNA, 22 nt, Human
gaggguggguuucuugcacguc

SEQ ID NO: 554607 - RNA, 23 nt, Human
uuucaacaaugcuuagagaaaac

SEQ ID NO: 554608 - RNA, 22 nt, Human
aucuucaaagggauguccaugg

SEQ ID NO: 554609 - RNA, 22 nt, Human
gucuuuggaaagacaaaguuca

SEQ ID NO: 554610 - RNA, 22 nt, Human
ugcaaauuugagcagacuguuc

SEQ ID NO: 554611 - RNA, 22 nt, Human
aggcucaggaggagcugccgga

SEQ ID NO: 554612 - RNA, 22 nt, Human
cuuucagagguuacucaggaaa

SEQ ID NO: 554613 - RNA, 22 nt, Human
ucuucagagugaaagucuguga

SEQ ID NO: 554614 - RNA, 21 nt, Human
aggcucucauccagggaccca

SEQ ID NO: 554615 - RNA, 22 nt, Human
gcucugccucuuugcugcguca

SEQ ID NO: 554616 - RNA, 22 nt, Human
ugcuaccuuuuuuauuaaauga

SEQ ID NO: 554617 - RNA, 22 nt, Human
cacagaacauccuuagcucaug

SEQ ID NO: 554618 - RNA, 22 nt, Human
ugcaggugccaucgcugcucau

SEQ ID NO: 554619 - RNA, 21 nt, Human
ggagucauuagucauuuccuu

SEQ ID NO: 554620 - RNA, 22 nt, Human
aauauuucguugcguggcuaga

SEQ ID NO: 554621 - RNA, 22 nt, Human
uaggcugacuuguuucauaaag

SEQ ID NO: 554622 - RNA, 22 nt, Human
uggugcaagucucugaggaggg

SEQ ID NO: 554623 - RNA, 22 nt, Human
uaagcagaugcugucugcacaa

SEQ ID NO: 554624 - RNA, 22 nt, Human
ucuuuaaugugauuguaauuau

SEQ ID NO: 554625 - RNA, 22 nt, Human
aguuuucuguucuacaauuuga

SEQ ID NO: 554626 - RNA, 22 nt, Human
augucacagucugacucaguga

SEQ ID NO: 554627 - RNA, 22 nt, Human
aucuacagccagucugguuugu

SEQ ID NO: 554628 - RNA, 22 nt, Human
uacauaaugagcuaguuaaguu

SEQ ID NO: 554629 - RNA, 22 nt, Human
gccaguggucacugaggaagaa

SEQ ID NO: 554630 - RNA, 22 nt, Human
gggcagcugccccucucugggc

SEQ ID NO: 554631 - RNA, 22 nt, Human
accugcagcuaaagauguaggg

SEQ ID NO: 554632 - RNA, 21 nt, Human
caccugugagacucucagacc

SEQ ID NO: 554633 - RNA, 22 nt, Human
cauuuuauccucugggaagcua

SEQ ID NO: 554634 - RNA, 22 nt, Human
auucuaauuaguucuacauguu

SEQ ID NO: 554635 - RNA, 22 nt, Human
uucugaaaugagauauaaggua

SEQ ID NO: 554636 - RNA, 22 nt, Human
uuucagugcacguaguuuauuu

SEQ ID NO: 554637 - RNA, 20 nt, Human
gugaccagaagacagugggu

SEQ ID NO: 554638 - RNA, 22 nt, Human
aagugguagacaaagauaauug

SEQ ID NO: 554639 - RNA, 22 nt, Human
gucagugucuuaacagagauua

SEQ ID NO: 554640 - RNA, 19 nt, Human
guggccagggcaggggcug

SEQ ID NO: 554641 - RNA, 20 nt, Human
aacuuuagacauaaucucuu

SEQ ID NO: 554642 - RNA, 22 nt, Human
gaggagguggaauuccaggaau

SEQ ID NO: 554643 - RNA, 18 nt, Human
ucaguauuaccucaggca

SEQ ID NO: 554644 - RNA, 22 nt, Human
ccugggcagguguggcuucccc

SEQ ID NO: 554645 - RNA, 18 nt, Human
ugacagaaccuggagccu

SEQ ID NO: 554646 - RNA, 22 nt, Human
uacacaaaggcacucuguuguu

SEQ ID NO: 554647 - RNA, 20 nt, Human
ugaaaggugggaauuguggg

SEQ ID NO: 554648 - RNA, 22 nt, Human
uacaugcaugucacagaaugaa

SEQ ID NO: 554649 - RNA, 22 nt, Human
uagggacacugcucaugaguuc

SEQ ID NO: 554650 - RNA, 22 nt, Human
cggggccuagucuaccucggca

SEQ ID NO: 554651 - RNA, 22 nt, Human
uagugaaacaguuaucaaucug

SEQ ID NO: 554652 - RNA, 22 nt, Human
uugggccucggccaaggacggg

SEQ ID NO: 554653 - RNA, 19 nt, Human
ugucccagacuccgugucu

SEQ ID NO: 554654 - RNA, 22 nt, Human
ugggggugaaagucuggacagu

SEQ ID NO: 554655 - RNA, 22 nt, Human
cagagguacaagcuaaguuggg

SEQ ID NO: 554656 - RNA, 21 nt, Human
gagauggcccaguagcgggcc

SEQ ID NO: 554657 - RNA, 22 nt, Human
agggcagagaaauguaguugag

SEQ ID NO: 554658 - RNA, 22 nt, Human
uucuggggccccaguguccucg

SEQ ID NO: 554659 - RNA, 22 nt, Human
uggccuggaaaaaugcagaugg

SEQ ID NO: 554660 - RNA, 22 nt, Human
cgcagaagagguugucuagucc

SEQ ID NO: 554661 - RNA, 22 nt, Human
gcuccugucuuggggcacuggc

SEQ ID NO: 554662 - RNA, 22 nt, Human
agccaauaaauuuacaacuaga

SEQ ID NO: 554663 - RNA, 22 nt, Human
gcauguguggaggagaugugcu

SEQ ID NO: 554664 - RNA, 21 nt, Human
uuugagaauuggucagagugc

SEQ ID NO: 554665 - RNA, 22 nt, Human
uccuaagauagaagauagugaa

SEQ ID NO: 554666 - RNA, 22 nt, Human
cagggcuggcuguggcaaucuc

SEQ ID NO: 554667 - RNA, 22 nt, Human
gcccacacagcagauccuuugg

SEQ ID NO: 554668 - RNA, 22 nt, Human
gcuggcuggaggugaggaagaa

SEQ ID NO: 554669 - RNA, 22 nt, Human
cacugaaggcuaggauuagaug

SEQ ID NO: 554670 - RNA, 18 nt, Human
ugugguggagcugccuuc

SEQ ID NO: 554671 - RNA, 22 nt, Human
ggguagcaugugucagaguuug

SEQ ID NO: 554672 - RNA, 22 nt, Human
cccauuuaaacacaagcuuuca

SEQ ID NO: 554673 - RNA, 22 nt, Human
uucauucauuacgugccaggca

SEQ ID NO: 554674 - RNA, 22 nt, Human
gcagaaggucuggcacuucagg

SEQ ID NO: 554675 - RNA, 22 nt, Human
cccaaggcugcagugagcauga

SEQ ID NO: 554676 - RNA, 23 nt, Human
ucauuucacagugagcuuccuag

SEQ ID NO: 554677 - RNA, 22 nt, Human
cugccugugcaugcagucagaa

SEQ ID NO: 554678 - RNA, 22 nt, Human
gaaauaacagcucuggaagagu

SEQ ID NO: 554679 - RNA, 22 nt, Human
aucaggaucaugcuggguggga

SEQ ID NO: 554680 - RNA, 22 nt, Human
caaaggcaacauauacuuguuu

SEQ ID NO: 554681 - RNA, 22 nt, Human
ugagccaguggaagauggcagu

SEQ ID NO: 554682 - RNA, 22 nt, Human
caucagaagauggcucuggaaa

SEQ ID NO: 554683 - RNA, 22 nt, Human
uugaagacuaauuuagauaaug

SEQ ID NO: 554684 - RNA, 22 nt, Human
acacaggggcucggcugggugc

SEQ ID NO: 554685 - RNA, 22 nt, Human
cccuguccuuggcugugaggcu

SEQ ID NO: 554686 - RNA, 22 nt, Human
aaucauaauucaaauaagcuua

SEQ ID NO: 554687 - RNA, 22 nt, Human
uauuauuaaauggcagaauuuu

SEQ ID NO: 554688 - RNA, 22 nt, Human
guuacauuaggauaauuugcug

SEQ ID NO: 554689 - RNA, 22 nt, Human
gcccugcuucuggcaugcagaa

SEQ ID NO: 554690 - RNA, 22 nt, Human
uuucggccgcgugaaguuuucu

SEQ ID NO: 554691 - RNA, 22 nt, Human
cugggcuggcgcauccgacacg

SEQ ID NO: 554692 - RNA, 22 nt, Human
aaggcagccgugugacugcaug

SEQ ID NO: 554693 - RNA, 22 nt, Human
aagcagcugauuucacagcuca

SEQ ID NO: 554694 - RNA, 22 nt, Human
ugcccugguagacacagacugu

SEQ ID NO: 554695 - RNA, 22 nt, Human
gggaaacugcaacucagagagg

SEQ ID NO: 554696 - RNA, 22 nt, Human
ucaggcaguagaauugcuugaa

SEQ ID NO: 554697 - RNA, 22 nt, Human
acagaguuaauggauaggcagg

SEQ ID NO: 554698 - RNA, 22 nt, Human
cugcagcuuucgcuccaucagc

SEQ ID NO: 554699 - RNA, 19 nt, Human
acucaggcuuccucugagg

SEQ ID NO: 554700 - RNA, 22 nt, Human
gcauuguccugcuucugagugu

SEQ ID NO: 554701 - RNA, 22 nt, Human
acacuuuacagcuuccuuugca

SEQ ID NO: 554702 - RNA, 22 nt, Human
uuuccuuuccaaaauucugccu

SEQ ID NO: 554703 - RNA, 22 nt, Human
cuggcagguccagcuggacuca

SEQ ID NO: 554704 - RNA, 18 nt, Human
cagaaguccuucaaggcc

SEQ ID NO: 554705 - RNA, 22 nt, Human
ccaggugggaggaaagcagaga

SEQ ID NO: 554706 - RNA, 21 nt, Human
agaugcugugcuccaggagca

SEQ ID NO: 554707 - RNA, 22 nt, Human
agugugaccuuauuuggaaaca

SEQ ID NO: 554708 - RNA, 22 nt, Human
auuaagaugugggaaaauuuaa

SEQ ID NO: 554709 - RNA, 23 nt, Human
agcacagacuagaaaggucuuuc

SEQ ID NO: 554710 - RNA, 22 nt, Human
gagccugagugcugccuccccu

SEQ ID NO: 554711 - RNA, 22 nt, Human
ugcaagguccaguauaacuuaa

SEQ ID NO: 554712 - RNA, 22 nt, Human
cuucucucugcauaggcauggg

SEQ ID NO: 554713 - RNA, 22 nt, Human
agaccccauaccucagcaggua

SEQ ID NO: 554714 - RNA, 22 nt, Human
ggucaugcugugaaucagugcu

SEQ ID NO: 554715 - RNA, 22 nt, Human
augaaauuugaccaauuauuua

SEQ ID NO: 554716 - RNA, 22 nt, Human
uccugggagagugggacuguau

SEQ ID NO: 554717 - RNA, 22 nt, Human
gcugguuagaaaacagagcuca

SEQ ID NO: 554718 - RNA, 22 nt, Human
gcugccaguguggcaugaugca

SEQ ID NO: 554719 - RNA, 22 nt, Human
gacagugauuaguuacuauaaa

SEQ ID NO: 554720 - RNA, 22 nt, Human
uacuauuuauggagugguuauu

SEQ ID NO: 554721 - RNA, 22 nt, Human
agccugugacucugugaaacca

SEQ ID NO: 554722 - RNA, 22 nt, Human
caagcugggugcgggcaguaua

SEQ ID NO: 554723 - RNA, 22 nt, Human
cugguggagagugggcucugga

SEQ ID NO: 554724 - RNA, 22 nt, Human
ucacaguaguuguucucuguuu

SEQ ID NO: 554725 - RNA, 22 nt, Human
gugcccaguugaggccaggacu

SEQ ID NO: 554726 - RNA, 22 nt, Human
uuggcauuuauucuaaggucaa

SEQ ID NO: 554727 - RNA, 22 nt, Human
guauuauuggguaguaugguaa

SEQ ID NO: 554728 - RNA, 22 nt, Human
acaguuaaucaaauggcauaug

SEQ ID NO: 554729 - RNA, 22 nt, Human
aaaugugucauauucaaaguca

SEQ ID NO: 554730 - RNA, 22 nt, Human
ucaaguauuauuacagauguag

SEQ ID NO: 554731 - RNA, 22 nt, Human
ggcagaggaagcuggaaguggg

SEQ ID NO: 554732 - RNA, 21 nt, Human
aauacagugaagaauuucuuu

SEQ ID NO: 554733 - RNA, 22 nt, Human
ugaagaacgugagauccagaaa

SEQ ID NO: 554734 - RNA, 22 nt, Human
cuguuuaucauguacauuucca

SEQ ID NO: 554735 - RNA, 22 nt, Human
ggcaggugcucugugggccugg

SEQ ID NO: 554736 - RNA, 22 nt, Human
cccaggugcugcgugaagccuc

SEQ ID NO: 554737 - RNA, 22 nt, Human
acugaaaaagacaucuugguaa

SEQ ID NO: 554738 - RNA, 20 nt, Human
cuggguggcaagcaaggggg

SEQ ID NO: 554739 - RNA, 22 nt, Human
ucauagaaugaguuaaugaacu

SEQ ID NO: 554740 - RNA, 22 nt, Human
ugauuuuuaaaauucuccuugc

SEQ ID NO: 554741 - RNA, 22 nt, Human
cugcuguggaugcaggaccuca

SEQ ID NO: 554742 - RNA, 22 nt, Human
aggcacugauucuguuuuccau

SEQ ID NO: 554743 - RNA, 22 nt, Human
caucaucaaaagugacagagaa

SEQ ID NO: 554744 - RNA, 22 nt, Human
gaggaagaauugguuauuggag

SEQ ID NO: 554745 - RNA, 22 nt, Human
caccagggacaaugcuaggggu

SEQ ID NO: 554746 - RNA, 22 nt, Human
cccuggcugcuaccagguagcu

SEQ ID NO: 554747 - RNA, 22 nt, Human
ucagagaguuagugucuuagcu

SEQ ID NO: 554748 - RNA, 22 nt, Human
agugaaauacugucguuuuuag

SEQ ID NO: 554749 - RNA, 22 nt, Human
gagagggccgggggccagcucc

SEQ ID NO: 554750 - RNA, 22 nt, Human
uugugccaugaacuguaugaag

SEQ ID NO: 554751 - RNA, 21 nt, Human
cccaagggaggcaggauaagg

SEQ ID NO: 554752 - RNA, 22 nt, Human
gucccagggaagaaggcagcac

SEQ ID NO: 554753 - RNA, 23 nt, Human
caggcaggaugaggacuacacuc

SEQ ID NO: 554754 - RNA, 22 nt, Human
agauuugcggcuuuacuuugca

SEQ ID NO: 554755 - RNA, 22 nt, Human
gccacaggcacuuaagggcugg

SEQ ID NO: 554756 - RNA, 22 nt, Human
ucugucacccgagcaggcgaga

SEQ ID NO: 554757 - RNA, 22 nt, Human
guccagggaaauagcgacaggg

SEQ ID NO: 554758 - RNA, 22 nt, Human
ccaggccuuucuucuuggucug

SEQ ID NO: 554759 - RNA, 22 nt, Human
acugccuguuuggcauggcccc

SEQ ID NO: 554760 - RNA, 22 nt, Human
agaauaaaugcuaccuaucaca

SEQ ID NO: 554761 - RNA, 22 nt, Human
acuuccugggcaugcagagucc

SEQ ID NO: 554762 - RNA, 22 nt, Human
gcauuucaugcuccuuggaacc

SEQ ID NO: 554763 - RNA, 20 nt, Human
uuuuagcagaaagaaagcuc

SEQ ID NO: 554764 - RNA, 18 nt, Human
aacuucaacuacaaugga

SEQ ID NO: 554765 - RNA, 22 nt, Human
gcuucaaacugagcuucaagug

SEQ ID NO: 554766 - RNA, 22 nt, Human
uagucucugcuuugcccuuggc

SEQ ID NO: 554767 - RNA, 22 nt, Human
cccagccucuggguucugccgg

SEQ ID NO: 554768 - RNA, 22 nt, Human
uucacaaaaaugcugaacaguu

SEQ ID NO: 554769 - RNA, 22 nt, Human
ucucagagcucacaccuccugg

SEQ ID NO: 554770 - RNA, 22 nt, Human
uggccgggccgggcgccuccac

SEQ ID NO: 554771 - RNA, 21 nt, Human
ggacucuacacaggccaucuu

SEQ ID NO: 554772 - RNA, 19 nt, Human
ugaggggaggagaggccug

SEQ ID NO: 554773 - RNA, 22 nt, Human
uaaagguaguuuuaaaggugcu

SEQ ID NO: 554774 - RNA, 22 nt, Human
ggagaggguagggguccugccc

SEQ ID NO: 554775 - RNA, 22 nt, Human
gugaagcaguugcguggguucc

SEQ ID NO: 554776 - RNA, 22 nt, Human
cacacaggagagugcuggaggu

SEQ ID NO: 554777 - RNA, 22 nt, Human
agcuccugcacccagccuugag

SEQ ID NO: 554778 - RNA, 22 nt, Human
ggcuucauggaggaggugaguc

SEQ ID NO: 554779 - RNA, 22 nt, Human
aaauuccaguucuuuuaccugc

SEQ ID NO: 554780 - RNA, 22 nt, Human
agaauaaacugcuuuagggcag

SEQ ID NO: 554781 - RNA, 22 nt, Human
uauugaggaucuccugcuaauu

SEQ ID NO: 554782 - RNA, 22 nt, Human
cagcccuguccagcagagggug

SEQ ID NO: 554783 - RNA, 22 nt, Human
agaagugagugugacucagcag

SEQ ID NO: 554784 - RNA, 22 nt, Human
ggaggugggcuaaggacucucu

SEQ ID NO: 554785 - RNA, 22 nt, Human
ugagccaggaguuugaggcugu

SEQ ID NO: 554786 - RNA, 22 nt, Human
gaauauuuguaauuacuguuga

SEQ ID NO: 554787 - RNA, 19 nt, Human
cugagcaggcagguaggau

SEQ ID NO: 554788 - RNA, 22 nt, Human
uucuaauagcugccuauguauu

SEQ ID NO: 554789 - RNA, 22 nt, Human
uccaucaccacagaggacagag

SEQ ID NO: 554790 - RNA, 22 nt, Human
agcugccagaugacagugcuau

SEQ ID NO: 554791 - RNA, 22 nt, Human
ccagcugacgaugccuggucuc

SEQ ID NO: 554792 - RNA, 22 nt, Human
uucauguguauggaacauuuuu

SEQ ID NO: 554793 - RNA, 22 nt, Human
ugucagggcaugcgguccagcc

SEQ ID NO: 554794 - RNA, 22 nt, Human
accaguuuguaaccuguuuuca

SEQ ID NO: 554795 - RNA, 22 nt, Human
uucuggcucuccccugcugggu

SEQ ID NO: 554796 - RNA, 22 nt, Human
caugaacuccaagcuuccuucc

SEQ ID NO: 554797 - RNA, 22 nt, Human
cagucucucugaaguauuaaga

SEQ ID NO: 554798 - RNA, 22 nt, Human
cagagccucaucauccacucca

SEQ ID NO: 554799 - RNA, 22 nt, Human
aaguuuaacuugaauucuuucu

SEQ ID NO: 554800 - RNA, 22 nt, Human
ucuggcuccacucugugcaugc

SEQ ID NO: 554801 - RNA, 22 nt, Human
ugcagggcuauaacuccauucu

SEQ ID NO: 554802 - RNA, 22 nt, Human
agccagaggccagccugccuca

SEQ ID NO: 554803 - RNA, 22 nt, Human
ugcuucugggcaaaugugugug

SEQ ID NO: 554804 - RNA, 22 nt, Human
guugaaagaugucuugguuccc

SEQ ID NO: 554805 - RNA, 22 nt, Human
gacagggaggaaagagacugcu

SEQ ID NO: 554806 - RNA, 22 nt, Human
uggcacaggaucucagcggcca

SEQ ID NO: 554807 - RNA, 22 nt, Human
ccuaugccugucacucugcgcu

SEQ ID NO: 554808 - RNA, 22 nt, Human
aauuacuuaagagaaacuuuga

SEQ ID NO: 554809 - RNA, 22 nt, Human
ugagaaaauuacuauaauuguc

SEQ ID NO: 554810 - RNA, 22 nt, Human
gucagcuaauaggguguguguc

SEQ ID NO: 554811 - RNA, 22 nt, Human
guucuuaaagauucaucaagca

SEQ ID NO: 554812 - RNA, 20 nt, Human
cuccagggaacagacuggag

SEQ ID NO: 554813 - RNA, 19 nt, Human
agcuguggaugugggauuu

SEQ ID NO: 554814 - RNA, 21 nt, Human
agcagcagaucuggugagggc

SEQ ID NO: 554815 - RNA, 22 nt, Human
cagaaauggaauuuuccaucac

SEQ ID NO: 554816 - RNA, 22 nt, Human
cauuuguaggaugcuucuuguu

SEQ ID NO: 554817 - RNA, 22 nt, Human
uggagcagagaugggagcccaa

SEQ ID NO: 554818 - RNA, 22 nt, Human
uuuuagauugggaaauguaaag

SEQ ID NO: 554819 - RNA, 22 nt, Human
uggcacugccaaccugcuaggu

SEQ ID NO: 554820 - RNA, 22 nt, Human
acagaaugcguagugcauguug

SEQ ID NO: 554821 - RNA, 22 nt, Human
gacagcauggugucuguucagg

SEQ ID NO: 554822 - RNA, 22 nt, Human
auaaggcagucacuggaauguu

SEQ ID NO: 554823 - RNA, 22 nt, Human
auauuaauuauuuacacaugag

SEQ ID NO: 554824 - RNA, 22 nt, Human
agccuuuuggaguuauucuggg

SEQ ID NO: 554825 - RNA, 22 nt, Human
uuauuagguuauucucuguacu

SEQ ID NO: 554826 - RNA, 22 nt, Human
auggggugaccaugagcauuua

SEQ ID NO: 554827 - RNA, 22 nt, Human
gugaaaugaaucuggaaauauu

SEQ ID NO: 554828 - RNA, 22 nt, Human
ccaggcuuucccagccucucca

SEQ ID NO: 554829 - RNA, 22 nt, Human
ugucuucaucuccaugcacaga

SEQ ID NO: 554830 - RNA, 22 nt, Human
acucugaggagugacuagaggu

SEQ ID NO: 554831 - RNA, 22 nt, Human
aacaguguuuuucuucagcacu

SEQ ID NO: 554832 - RNA, 22 nt, Human
ucuaaacauugugauagaccuu

SEQ ID NO: 554833 - RNA, 22 nt, Human
gcuccagguauuugcccuuuua

SEQ ID NO: 554834 - RNA, 22 nt, Human
uggcauggcaacccugcaggga

SEQ ID NO: 554835 - RNA, 22 nt, Human
uauuuuaucugccagaguggag

SEQ ID NO: 554836 - RNA, 22 nt, Human
ucaagauaccaccauuauaugu

SEQ ID NO: 554837 - RNA, 22 nt, Human
ucuuacaccauucaaauauuuu

SEQ ID NO: 554838 - RNA, 22 nt, Human
uacuuucuaagacauacaacuu

SEQ ID NO: 554839 - RNA, 20 nt, Human
auuaaugaauacauuuugau

SEQ ID NO: 554840 - RNA, 17 nt, Human
aggcuggccuucacagu

SEQ ID NO: 554841 - RNA, 22 nt, Human
aguauuuguugauugauaugaa

SEQ ID NO: 554842 - RNA, 22 nt, Human
gaguccaguguuuaccaggggu

SEQ ID NO: 554843 - RNA, 22 nt, Human
agagcagcacguuguccccaca

SEQ ID NO: 554844 - RNA, 22 nt, Human
aggccugcuguguagccuguug

SEQ ID NO: 554845 - RNA, 22 nt, Human
aagggaaaucauauggugcagu

SEQ ID NO: 554846 - RNA, 22 nt, Human
aggcaagaacagacaugggagu

SEQ ID NO: 554847 - RNA, 22 nt, Human
cagcugaguuacucugaggucu

SEQ ID NO: 554848 - RNA, 22 nt, Human
auagaauuugcacuaaaucugc

SEQ ID NO: 554849 - RNA, 22 nt, Human
cagguggggcgcccucaggcag

SEQ ID NO: 554850 - RNA, 22 nt, Human
acugccugcuccuggcuccaca

SEQ ID NO: 554851 - RNA, 22 nt, Human
gggcucucaugaguguguggua

SEQ ID NO: 554852 - RNA, 22 nt, Human
cucaggauugugccuagggaga

SEQ ID NO: 554853 - RNA, 22 nt, Human
aagggcaggcacccacccucac

SEQ ID NO: 554854 - RNA, 22 nt, Human
uuaaggcuguggggauuacugc

SEQ ID NO: 554855 - RNA, 21 nt, Human
cuuaacauuuuaaaugaaagg

SEQ ID NO: 554856 - RNA, 22 nt, Human
aguuauucauuuauucuguaca

SEQ ID NO: 554857 - RNA, 22 nt, Human
uaguaaaaguuuaguugaaagu

SEQ ID NO: 554858 - RNA, 22 nt, Human
ugagcccaggaguuggagaccg

SEQ ID NO: 554859 - RNA, 22 nt, Human
uagucccauuuugagguauuug

SEQ ID NO: 554860 - RNA, 22 nt, Human
aacaguuaucucacauauggaa

SEQ ID NO: 554861 - RNA, 22 nt, Human
uaaagacaauuucgagcuguag

SEQ ID NO: 554862 - RNA, 22 nt, Human
cugcagggaugugaggcccguu

SEQ ID NO: 554863 - RNA, 22 nt, Human
ugagaguuccuccucuuuccac

SEQ ID NO: 554864 - RNA, 22 nt, Human
auugacuuccauagcuaccugg

SEQ ID NO: 554865 - RNA, 18 nt, Human
cucaccauucugcccaau

SEQ ID NO: 554866 - RNA, 22 nt, Human
agaugagggguagaaaggacuu

SEQ ID NO: 554867 - RNA, 22 nt, Human
ggcugcugcccaccccugcaug

SEQ ID NO: 554868 - RNA, 22 nt, Human
ucuuugaugcuucugaaggugu

SEQ ID NO: 554869 - RNA, 22 nt, Human
aggcucagauucacauuugguu

SEQ ID NO: 554870 - RNA, 22 nt, Human
uuugucaucccuuuugaaacug

SEQ ID NO: 554871 - RNA, 22 nt, Human
cagagcaggcccacugcccucc

SEQ ID NO: 554872 - RNA, 22 nt, Human
agggagaguuugauguuuccuc

SEQ ID NO: 554873 - RNA, 22 nt, Human
ugcccaggguggagugcagcgg

SEQ ID NO: 554874 - RNA, 22 nt, Human
ccagggugggaggcugaaggcg

SEQ ID NO: 554875 - RNA, 22 nt, Human
cuggccagcauuuuugcuuuag

SEQ ID NO: 554876 - RNA, 22 nt, Human
ccucucaucauuaucgcuuugu

SEQ ID NO: 554877 - RNA, 22 nt, Human
ugagcaguaacagcucacaggg

SEQ ID NO: 554878 - RNA, 22 nt, Human
auguacauuuagaucauuucug

SEQ ID NO: 554879 - RNA, 22 nt, Human
acugggccugauugggucggag

SEQ ID NO: 554880 - RNA, 22 nt, Human
agaggcaggagguugacuugag

SEQ ID NO: 554881 - RNA, 22 nt, Human
uauucccauuccacuuaucaag

SEQ ID NO: 554882 - RNA, 22 nt, Human
aaguuucaaauauaaaauuaca

SEQ ID NO: 554883 - RNA, 22 nt, Human
ggcccagcgaggccaccuacag

SEQ ID NO: 554884 - RNA, 22 nt, Human
uuuuaaaggcuguaugaccaag

SEQ ID NO: 554885 - RNA, 22 nt, Human
gcugccugcaguguuuucccag

SEQ ID NO: 554886 - RNA, 22 nt, Human
cugccgaguacagccauagaaa

SEQ ID NO: 554887 - RNA, 22 nt, Human
cuucagagaacuugaucgcugc

SEQ ID NO: 554888 - RNA, 22 nt, Human
gaacuacaggugcagcaaguga

SEQ ID NO: 554889 - RNA, 18 nt, Human
ugcaggcugggguuccuc

SEQ ID NO: 554890 - RNA, 22 nt, Human
acugugugaaacaucaaugugu

SEQ ID NO: 554891 - RNA, 22 nt, Human
ggcacacagcuuggcaggagau

SEQ ID NO: 554892 - RNA, 21 nt, Human
ggaagggguccucccaacagu

SEQ ID NO: 554893 - RNA, 22 nt, Human
caugcacaaagguaagaugcgu

SEQ ID NO: 554894 - RNA, 21 nt, Human
ccaggaaggacugagcucccu

SEQ ID NO: 554895 - RNA, 22 nt, Human
cugggcugcaggaguggggcaa

SEQ ID NO: 554896 - RNA, 22 nt, Human
uacagaaaucacaucgcuuuga

SEQ ID NO: 554897 - RNA, 22 nt, Human
uguuuuuaucucuguguacaac

SEQ ID NO: 554898 - RNA, 17 nt, Human
caggcagacauguaagc

SEQ ID NO: 554899 - RNA, 22 nt, Human
cagugcagaggugcaagcaugu

SEQ ID NO: 554900 - RNA, 23 nt, Human
gaagcagaugucugaguaggcag

SEQ ID NO: 554901 - RNA, 22 nt, Human
gcacccagccagcaucucagag

SEQ ID NO: 554902 - RNA, 23 nt, Human
agcuggaggcugucuacucccaa

SEQ ID NO: 554903 - RNA, 22 nt, Human
agcaggggcuccuccacagcca

SEQ ID NO: 554904 - RNA, 22 nt, Human
ugucagaggcucagggucucag

SEQ ID NO: 554905 - RNA, 20 nt, Human
gugggcagaugugugcaugg

SEQ ID NO: 554906 - RNA, 22 nt, Human
gagggaccuuuacacagacauu

SEQ ID NO: 554907 - RNA, 22 nt, Human
aauaguacaaucuacagacaua

SEQ ID NO: 554908 - RNA, 22 nt, Human
acagaauuuaaagcucuagacu

SEQ ID NO: 554909 - RNA, 22 nt, Human
uguucuugagccuuuagaccua

SEQ ID NO: 554910 - RNA, 22 nt, Human
ugugggcccagauucugaggcu

SEQ ID NO: 554911 - RNA, 22 nt, Human
ugugugcauucacaugcaugcc

SEQ ID NO: 554912 - RNA, 22 nt, Human
ucaggaugguguggaggaaaua

SEQ ID NO: 554913 - RNA, 22 nt, Human
ucuagaacuucucuaaaaugaa

SEQ ID NO: 554914 - RNA, 22 nt, Human
acagggcccuugccagcacaag

SEQ ID NO: 554915 - RNA, 22 nt, Human
gaagaaggugcuacacagggca

SEQ ID NO: 554916 - RNA, 22 nt, Human
auuuuguuauagaacucuguga

SEQ ID NO: 554917 - RNA, 22 nt, Human
gcuacugauugaccuuggagag

SEQ ID NO: 554918 - RNA, 22 nt, Human
ucucugggugauggcagggcac

SEQ ID NO: 554919 - RNA, 22 nt, Human
acaugcaaaugugcaugcaugu

SEQ ID NO: 554920 - RNA, 22 nt, Human
cuuauacacgaacacaaggugu

SEQ ID NO: 554921 - RNA, 22 nt, Human
cuagagugaagggucuugaggc

SEQ ID NO: 554922 - RNA, 22 nt, Human
cagaggcauauaauugcugggg

SEQ ID NO: 554923 - RNA, 22 nt, Human
ucugugacugauggaggcuuuu

SEQ ID NO: 554924 - RNA, 22 nt, Human
cccuuccuugugacuggugggg

SEQ ID NO: 554925 - RNA, 20 nt, Human
caugguggaggagcagggcc

SEQ ID NO: 554926 - RNA, 21 nt, Human
uucucuccauaugcccagccc

SEQ ID NO: 554927 - RNA, 22 nt, Human
gugucaugcacacucaguguug

SEQ ID NO: 554928 - RNA, 22 nt, Human
ucugucaccauucagcuugaau

SEQ ID NO: 554929 - RNA, 22 nt, Human
ggggagaguccuuuccaguucc

SEQ ID NO: 554930 - RNA, 22 nt, Human
ggcaggcucuuggccuuaugag

SEQ ID NO: 554931 - RNA, 22 nt, Human
uauuucuuguuauucucguuga

SEQ ID NO: 554932 - RNA, 22 nt, Human
auauaauuaauuuagcugccuc

SEQ ID NO: 554933 - RNA, 22 nt, Human
aggaccugacuggcuccugcuu

SEQ ID NO: 554934 - RNA, 22 nt, Human
agccagugggauuagagccucu

SEQ ID NO: 554935 - RNA, 22 nt, Human
acagccuggccugaguuaaggc

SEQ ID NO: 554936 - RNA, 22 nt, Human
agucugucucugcuaaucacua

SEQ ID NO: 554937 - RNA, 20 nt, Human
ggagaugcagcccaggugcc

SEQ ID NO: 554938 - RNA, 22 nt, Human
agcugugcacacugugaaguag

SEQ ID NO: 554939 - RNA, 19 nt, Human
agagaggcugugugaggga

SEQ ID NO: 554940 - RNA, 22 nt, Human
ugaggcuugucucagauggggg

SEQ ID NO: 554941 - RNA, 22 nt, Human
gaggggagacagggaaaucagu

SEQ ID NO: 554942 - RNA, 16 nt, Human
acaaauacaacugcug

SEQ ID NO: 554943 - RNA, 22 nt, Human
cuuucauccgcagaugagccuc

SEQ ID NO: 554944 - RNA, 22 nt, Human
ucugcagaaggaaucagcugag

SEQ ID NO: 554945 - RNA, 22 nt, Human
ccaaguacucucaccaaagcuu

SEQ ID NO: 554946 - RNA, 22 nt, Human
cugaggcuggggaagggaagug

SEQ ID NO: 554947 - RNA, 22 nt, Human
uuaaagcaccuccuuggaugug

SEQ ID NO: 554948 - RNA, 22 nt, Human
ugggcugcacccucagccucug

SEQ ID NO: 554949 - RNA, 22 nt, Human
agagcccucuucacugccccuu

SEQ ID NO: 554950 - RNA, 22 nt, Human
aaagaaaccuaucagccacaug

SEQ ID NO: 554951 - RNA, 22 nt, Human
ccagaagggcuauugcagugac

SEQ ID NO: 554952 - RNA, 19 nt, Human
acuuugcaugugugucuaa

SEQ ID NO: 554953 - RNA, 22 nt, Human
agucagcugcugcacacagcag

SEQ ID NO: 554954 - RNA, 22 nt, Human
caaacauagugaagcaaugaca

SEQ ID NO: 554955 - RNA, 22 nt, Human
uacauaugaacuuuauaacuug

SEQ ID NO: 554956 - RNA, 22 nt, Human
ugggcagacauugaguuuguuc

SEQ ID NO: 554957 - RNA, 22 nt, Human
gcagcugcagguggucccaugc

SEQ ID NO: 554958 - RNA, 22 nt, Human
agagagcccgggccagggcaca

SEQ ID NO: 554959 - RNA, 22 nt, Human
auaugcuuacagcuuaaaaucc

SEQ ID NO: 554960 - RNA, 22 nt, Human
caggcagcaggagcccugcucg

SEQ ID NO: 554961 - RNA, 22 nt, Human
agucccagcccaguccuguaag

SEQ ID NO: 554962 - RNA, 22 nt, Human
caggaacagcaccaggagcuag

SEQ ID NO: 554963 - RNA, 22 nt, Human
aagagcuggauugugcugcaga

SEQ ID NO: 554964 - RNA, 22 nt, Human
cguagguggcucagcaccuggg

SEQ ID NO: 554965 - RNA, 22 nt, Human
guucacaguucagccuguaaca

SEQ ID NO: 554966 - RNA, 22 nt, Human
gcagguggugggggagccguuc

SEQ ID NO: 554967 - RNA, 22 nt, Human
agugggcuuacugagggagugu

SEQ ID NO: 554968 - RNA, 22 nt, Human
cagaacugggcagggagcagag

SEQ ID NO: 554969 - RNA, 22 nt, Human
cuggcaggaucuaaccagggaa

SEQ ID NO: 554970 - RNA, 22 nt, Human
ucccagaguauuagcaauugcu

SEQ ID NO: 554971 - RNA, 22 nt, Human
uaaggucauggugaauaauaag

SEQ ID NO: 554972 - RNA, 22 nt, Human
uggagcaggacggggaguggua

SEQ ID NO: 554973 - RNA, 23 nt, Human
cacugggcccaggguguggaggc

SEQ ID NO: 554974 - RNA, 23 nt, Human
uggcagcuguguaagagaaagca

SEQ ID NO: 554975 - RNA, 19 nt, Human
aaagcagaggagcaucuga

SEQ ID NO: 554976 - RNA, 22 nt, Human
uucuucaauuuuccauauacug

SEQ ID NO: 554977 - RNA, 22 nt, Human
ugggcugagaguaccuuauaaa

SEQ ID NO: 554978 - RNA, 22 nt, Human
auugcagcuggucaggguaauu

SEQ ID NO: 554979 - RNA, 22 nt, Human
cuggaaguauaggggagaugau

SEQ ID NO: 554980 - RNA, 22 nt, Human
acggcuucuugacuguggguug

SEQ ID NO: 554981 - RNA, 22 nt, Human
cccuuuaaggucugauuuucag

SEQ ID NO: 554982 - RNA, 22 nt, Human
cucagcaagauuaagcagcuug

SEQ ID NO: 554983 - RNA, 22 nt, Human
cugcuuccauggucuggagacu

SEQ ID NO: 554984 - RNA, 22 nt, Human
gaauuaguguugaaaucagggc

SEQ ID NO: 554985 - RNA, 22 nt, Human
aucuauuaugcugagaaacugu

SEQ ID NO: 554986 - RNA, 23 nt, Human
gagcagagcgggcggggguccug

SEQ ID NO: 554987 - RNA, 22 nt, Human
cuaaaugcccuacaaugacugg

SEQ ID NO: 554988 - RNA, 22 nt, Human
ugugcauguauugauuuguacc

SEQ ID NO: 554989 - RNA, 22 nt, Human
ccucagggaaugggaggcuggg

SEQ ID NO: 554990 - RNA, 22 nt, Human
augggcugacaagacaugcaua

SEQ ID NO: 554991 - RNA, 22 nt, Human
cuuuacaaccuaaguugaagcu

SEQ ID NO: 554992 - RNA, 20 nt, Human
gucuccacuggggguuaacc

SEQ ID NO: 554993 - RNA, 21 nt, Human
auacuacauuucucugacuuu

SEQ ID NO: 554994 - RNA, 22 nt, Human
agcagcauagaagcugggagga

SEQ ID NO: 554995 - RNA, 22 nt, Human
uucaacaugcaaacauguuugu

SEQ ID NO: 554996 - RNA, 22 nt, Human
ucucugucugagccuggcagac

SEQ ID NO: 554997 - RNA, 22 nt, Human
uugcuugcuucuauuuuauaca

SEQ ID NO: 554998 - RNA, 22 nt, Human
aggagcugcuuaaaugguuggu

SEQ ID NO: 554999 - RNA, 22 nt, Human
ucuaaggccuucaugucaguau

SEQ ID NO: 555000 - RNA, 22 nt, Human
uucucuucaucucaguaaaugu

SEQ ID NO: 555001 - RNA, 22 nt, Human
uauguacauguuaaagggcaaa

SEQ ID NO: 555002 - RNA, 22 nt, Human
gaucaacauguauuuaagaguu

SEQ ID NO: 555003 - RNA, 22 nt, Human
aucuuaccucuuccucugcauu

SEQ ID NO: 555004 - RNA, 22 nt, Human
cccagcuccagagccagaaaca

SEQ ID NO: 555005 - RNA, 22 nt, Human
auguuucaggcgaacuaacaug

SEQ ID NO: 555006 - RNA, 22 nt, Human
accuggagucauuugaggagua

SEQ ID NO: 555007 - RNA, 22 nt, Human
gcaggggaguccacucuaugca

SEQ ID NO: 555008 - RNA, 22 nt, Human
uggcagcugauuagauggugcc

SEQ ID NO: 555009 - RNA, 22 nt, Human
uccagaaaugcaagccaggugu

SEQ ID NO: 555010 - RNA, 22 nt, Human
uuuccucuucuucccaugucau

SEQ ID NO: 555011 - RNA, 18 nt, Human
gucuuuucucccuuccuc

SEQ ID NO: 555012 - RNA, 18 nt, Human
ccuggcuuuucuacuugc

SEQ ID NO: 555013 - RNA, 22 nt, Human
cuggagagaaaugacaaagcua

SEQ ID NO: 555014 - RNA, 22 nt, Human
cagaggguugucaggcgccuug

SEQ ID NO: 555015 - RNA, 22 nt, Human
ucugccuguagucccacaccuc

SEQ ID NO: 555016 - RNA, 19 nt, Human
cucucacucgccacauccu

SEQ ID NO: 555017 - RNA, 22 nt, Human
aucaguuugagugcugugucaa

SEQ ID NO: 555018 - RNA, 22 nt, Human
uacagaauuagauuauuagaga

SEQ ID NO: 555019 - RNA, 23 nt, Human
agggaaaguaguaauggccuuug

SEQ ID NO: 555020 - RNA, 22 nt, Human
cagucacauggaugauggauag

SEQ ID NO: 555021 - RNA, 22 nt, Human
gagcagcuuaugucaagccaga

SEQ ID NO: 555022 - RNA, 22 nt, Human
cuguggagugcuuggcucagug

SEQ ID NO: 555023 - RNA, 22 nt, Human
ggcagagcugcaugagcacuca

SEQ ID NO: 555024 - RNA, 22 nt, Human
uggcuuccaaaggaaugggccu

SEQ ID NO: 555025 - RNA, 22 nt, Human
caacacagggguuaugccaugg

SEQ ID NO: 555026 - RNA, 22 nt, Human
uuuuuguucccagagaauuugu

SEQ ID NO: 555027 - RNA, 22 nt, Human
caaggaaacaugaaaugcauug

SEQ ID NO: 555028 - RNA, 20 nt, Human
accaggaaucuuuucugagc

SEQ ID NO: 555029 - RNA, 21 nt, Human
gccagccuguuuaccuguggu

SEQ ID NO: 555030 - RNA, 22 nt, Human
ccugcugucaguggggcaggca

SEQ ID NO: 555031 - RNA, 22 nt, Human
aagcugccugggaggaagggcu

SEQ ID NO: 555032 - RNA, 22 nt, Human
ccagcagagucuaggaaggagg

SEQ ID NO: 555033 - RNA, 22 nt, Human
aauauguucaaaauagaucacu

SEQ ID NO: 555034 - RNA, 22 nt, Human
gagggugggcuuuguuccucca

SEQ ID NO: 555035 - RNA, 22 nt, Human
ucaauucugccucuaaauauuu

SEQ ID NO: 555036 - RNA, 22 nt, Human
ccugggcuuuggaacaguacuu

SEQ ID NO: 555037 - RNA, 22 nt, Human
guggucaggggcugaggugccc

SEQ ID NO: 555038 - RNA, 22 nt, Human
ggagcagagcugggcuuggcug

SEQ ID NO: 555039 - RNA, 22 nt, Human
guuuacauaugucugucugcac

SEQ ID NO: 555040 - RNA, 22 nt, Human
uucagcuaaaggaaacucagau

SEQ ID NO: 555041 - RNA, 22 nt, Human
gucccuggagcugagcagugcu

SEQ ID NO: 555042 - RNA, 22 nt, Human
ccucagggucugaggagaccgu

SEQ ID NO: 555043 - RNA, 22 nt, Human
uuuugagauggugucucgcucc

SEQ ID NO: 555044 - RNA, 22 nt, Human
ucuucagcucugaggcucuggc

SEQ ID NO: 555045 - RNA, 22 nt, Human
auccagaacaccuguaucacca

SEQ ID NO: 555046 - RNA, 22 nt, Human
cuggagccaugucuugacugcu

SEQ ID NO: 555047 - RNA, 23 nt, Human
ccaggccucucagagggugugcc

SEQ ID NO: 555048 - RNA, 22 nt, Human
auuauuaugguugcucuuuucc

SEQ ID NO: 555049 - RNA, 22 nt, Human
auuuugcugcuaugccuugcaa

SEQ ID NO: 555050 - RNA, 22 nt, Human
gagaggaagccaggggguguug

SEQ ID NO: 555051 - RNA, 22 nt, Human
ugaguaggugguuaagcaugga

SEQ ID NO: 555052 - RNA, 23 nt, Human
augugcaaagugcuacaguauag

SEQ ID NO: 555053 - RNA, 22 nt, Human
cagggugccuguccucagcaaa

SEQ ID NO: 555054 - RNA, 22 nt, Human
gcauguuuugcaacaagugacc

SEQ ID NO: 555055 - RNA, 22 nt, Human
ccaguguucccucggguucaug

SEQ ID NO: 555056 - RNA, 22 nt, Human
gcugccuuuuaaagccucgcuu

SEQ ID NO: 555057 - RNA, 22 nt, Human
auucuucauggcugugaguccu

SEQ ID NO: 555058 - RNA, 22 nt, Human
acacagauauuguacuugaucc

SEQ ID NO: 555059 - RNA, 22 nt, Human
uaaggcuucagcauucaaaaca

SEQ ID NO: 555060 - RNA, 16 nt, Human
gcagggguggguggag

SEQ ID NO: 555061 - RNA, 22 nt, Human
uuacaguaauguauuauuuaac

SEQ ID NO: 555062 - RNA, 22 nt, Human
ucaaaugcugccuuugugugcc

SEQ ID NO: 555063 - RNA, 20 nt, Human
gggcuggcgcauggggaaag

SEQ ID NO: 555064 - RNA, 22 nt, Human
ucagaggucccuagcaggagug

SEQ ID NO: 555065 - RNA, 22 nt, Human
caaaacauucagagagcucacu

SEQ ID NO: 555066 - RNA, 22 nt, Human
uccuccuucgggacugcuugac

SEQ ID NO: 555067 - RNA, 22 nt, Human
agaagaaaugaggccguucugc

SEQ ID NO: 555068 - RNA, 22 nt, Human
gcacacaugcaugcacaggagu

SEQ ID NO: 555069 - RNA, 22 nt, Human
gucuccugagacugcagucacc

SEQ ID NO: 555070 - RNA, 22 nt, Human
gaggccugaggcugccuggagc

SEQ ID NO: 555071 - RNA, 22 nt, Human
aaguauuucuggccugugaaag

SEQ ID NO: 555072 - RNA, 22 nt, Human
aauaacuucauguaacauuuaa

SEQ ID NO: 555073 - RNA, 22 nt, Human
cagauggcugccuucuugcugu

SEQ ID NO: 555074 - RNA, 22 nt, Human
ccacacagucaguuuccaagaa

SEQ ID NO: 555075 - RNA, 22 nt, Human
caggcagggagcuggaaaggau

SEQ ID NO: 555076 - RNA, 22 nt, Human
uacagagagagggguuaccagg

SEQ ID NO: 555077 - RNA, 22 nt, Human
aagucauuaucucuucuaaucu

SEQ ID NO: 555078 - RNA, 22 nt, Human
ucuugauuuauucuacccagaa

SEQ ID NO: 555079 - RNA, 22 nt, Human
gacaggcuuugagucccagaac

SEQ ID NO: 555080 - RNA, 22 nt, Human
auacaucuuccuuuuaaaaugc

SEQ ID NO: 555081 - RNA, 22 nt, Human
ucaggggcugugcauuucccag

SEQ ID NO: 555082 - RNA, 22 nt, Human
ugcaaagaagccuuugccuucu

SEQ ID NO: 555083 - RNA, 22 nt, Human
caaagagcuguucagugucgcu

SEQ ID NO: 555084 - RNA, 22 nt, Human
aucacugucgucaucugagauu

SEQ ID NO: 555085 - RNA, 22 nt, Human
gcugggcuguaguuugcugacc

SEQ ID NO: 555086 - RNA, 22 nt, Human
uucuccagacccuccugcagac

SEQ ID NO: 555087 - RNA, 22 nt, Human
auauugaacccuacagacugua

SEQ ID NO: 555088 - RNA, 22 nt, Human
uuacaguugcuacaaaggauaa

SEQ ID NO: 555089 - RNA, 22 nt, Human
guuuuauaggcuguugcuauau

SEQ ID NO: 555090 - RNA, 22 nt, Human
aaaguuucaauagaggaagugg

SEQ ID NO: 555091 - RNA, 22 nt, Human
ugggcacaggggaauggaugaa

SEQ ID NO: 555092 - RNA, 22 nt, Human
gcugugcaucuucauucuggac

SEQ ID NO: 555093 - RNA, 22 nt, Human
ucuugauuguuuucugaccuua

SEQ ID NO: 555094 - RNA, 22 nt, Human
gagggcucuacucaccacccug

SEQ ID NO: 555095 - RNA, 22 nt, Human
ugcuccugaacacagcccuaug

SEQ ID NO: 555096 - RNA, 22 nt, Human
aucauaaagugcuaucugauug

SEQ ID NO: 555097 - RNA, 22 nt, Human
aggcaagcauugggaacagggc

SEQ ID NO: 555098 - RNA, 22 nt, Human
uuuaagaugguauuuuauaaag

SEQ ID NO: 555099 - RNA, 22 nt, Human
cucagacuagccuguaccgaca

SEQ ID NO: 555100 - RNA, 22 nt, Human
caggaacacaaugagucucaaa

SEQ ID NO: 555101 - RNA, 22 nt, Human
uggaggagaauuuauggucgaa

SEQ ID NO: 555102 - RNA, 22 nt, Human
gccucccuguucuuccacaaua

SEQ ID NO: 555103 - RNA, 22 nt, Human
aaguggagucccuacaaccagc

SEQ ID NO: 555104 - RNA, 21 nt, Human
caguuacagccaggacaaggc

SEQ ID NO: 555105 - RNA, 22 nt, Human
uuucauaauagugcaguuuguu

SEQ ID NO: 555106 - RNA, 22 nt, Human
uccugaaaauaauuucacaaga

SEQ ID NO: 555107 - RNA, 22 nt, Human
guuuuuccuugcugaggacccg

SEQ ID NO: 555108 - RNA, 22 nt, Human
auccuugaacuuagacacuagg

SEQ ID NO: 555109 - RNA, 22 nt, Human
aaaccagugauagacuagacac

SEQ ID NO: 555110 - RNA, 22 nt, Human
auaaauggcuuucauuccuagg

SEQ ID NO: 555111 - RNA, 22 nt, Human
uaugaacuuuaagcucuguguc

SEQ ID NO: 555112 - RNA, 22 nt, Human
guggcucucgccagccugcggg

SEQ ID NO: 555113 - RNA, 22 nt, Human
ugugggcaggcccgggucugag

SEQ ID NO: 555114 - RNA, 22 nt, Human
uuucacagauguuuuggagucu

SEQ ID NO: 555115 - RNA, 22 nt, Human
cuguggcuguauuuggccagag

SEQ ID NO: 555116 - RNA, 22 nt, Human
aggaccugaaauucuugcuuuu

SEQ ID NO: 555117 - RNA, 22 nt, Human
cuccagaaauuuggaugcagca

SEQ ID NO: 555118 - RNA, 22 nt, Human
caguaggaaggaugcagaaaaa

SEQ ID NO: 555119 - RNA, 22 nt, Human
cuucugaagagguuaucauaga

SEQ ID NO: 555120 - RNA, 22 nt, Human
cagggccagcgcccaggcccag

SEQ ID NO: 555121 - RNA, 22 nt, Human
ggcaugugccugaggucacaca

SEQ ID NO: 555122 - RNA, 22 nt, Human
cagagcauuaaaaccagcucug

SEQ ID NO: 555123 - RNA, 22 nt, Human
auaaggcagaaauagggaaagu

SEQ ID NO: 555124 - RNA, 22 nt, Human
aaaaauagcuucucuugucccu

SEQ ID NO: 555125 - RNA, 22 nt, Human
aauaauguugacgauagucuua

SEQ ID NO: 555126 - RNA, 19 nt, Human
ucucagagcccuagaggcc

SEQ ID NO: 555127 - RNA, 22 nt, Human
uggacaguauugugaagcaggc

SEQ ID NO: 555128 - RNA, 22 nt, Human
caggcacuggggaugcugggau

SEQ ID NO: 555129 - RNA, 22 nt, Human
gccugcuguuaacugcaggaau

SEQ ID NO: 555130 - RNA, 22 nt, Human
ugaacacacaccuauguacaaa

SEQ ID NO: 555131 - RNA, 22 nt, Human
ggcaggagaaaggucucuucuu

SEQ ID NO: 555132 - RNA, 22 nt, Human
aaacacugauggauauuuuucc

SEQ ID NO: 555133 - RNA, 22 nt, Human
gauuuuauuagcccaaacuuug

SEQ ID NO: 555134 - RNA, 22 nt, Human
gagaggucaucucccaucagca

SEQ ID NO: 555135 - RNA, 21 nt, Human
aaggggcaaacccaggacacc

SEQ ID NO: 555136 - RNA, 22 nt, Human
uggcgucucucauaaguaugug

SEQ ID NO: 555137 - RNA, 22 nt, Human
ggcccagccggcgagucucgcg

SEQ ID NO: 555138 - RNA, 22 nt, Human
ucucuggccgagagucccuggg

SEQ ID NO: 555139 - RNA, 22 nt, Human
aggaaaaaagucugugauuaua

SEQ ID NO: 555140 - RNA, 22 nt, Human
agggaggagaauggacuccuuc

SEQ ID NO: 555141 - RNA, 22 nt, Human
gcacagaggaagcacagacucu

SEQ ID NO: 555142 - RNA, 22 nt, Human
cccaggcaucccauuaaggagc

SEQ ID NO: 555143 - RNA, 22 nt, Human
gagcagcucugggugacccagu

SEQ ID NO: 555144 - RNA, 22 nt, Human
ucuagaaaaacaaaguaucuga

SEQ ID NO: 555145 - RNA, 22 nt, Human
cagaggcucaccagccuuucac

SEQ ID NO: 555146 - RNA, 22 nt, Human
agaaaguuaaacagugauaaga

SEQ ID NO: 555147 - RNA, 22 nt, Human
uuucaaaauuuugcagugguaa

SEQ ID NO: 555148 - RNA, 22 nt, Human
cugguucacaucuguuuaucug

SEQ ID NO: 555149 - RNA, 21 nt, Human
ucucuguguucaaggugccag

SEQ ID NO: 555150 - RNA, 19 nt, Human
ucuaaacacagggacaagc

SEQ ID NO: 555151 - RNA, 22 nt, Human
uagggcaggggaggaaucugaa

SEQ ID NO: 555152 - RNA, 22 nt, Human
uagggcuccacucccagagauu

SEQ ID NO: 555153 - RNA, 22 nt, Human
ggcacugagaggcucuuccuaa

SEQ ID NO: 555154 - RNA, 22 nt, Human
ucuuuguuuguacuguuagaau

SEQ ID NO: 555155 - RNA, 22 nt, Human
ggcuccugauaggagaaugcgg

SEQ ID NO: 555156 - RNA, 23 nt, Human
uggacgccgacuuuggaggcgcu

SEQ ID NO: 555157 - RNA, 22 nt, Human
cucugggcuuguugaccugcac

SEQ ID NO: 555158 - RNA, 22 nt, Human
ugcuuaaacccugaucaugugu

SEQ ID NO: 555159 - RNA, 22 nt, Human
ggccuugggcuggcugcaguau

SEQ ID NO: 555160 - RNA, 23 nt, Human
agggcugaugccauugcagcucu

SEQ ID NO: 555161 - RNA, 22 nt, Human
ucaguguagcagacuuguagcc

SEQ ID NO: 555162 - RNA, 22 nt, Human
aaugauugcaaacauugagaac

SEQ ID NO: 555163 - RNA, 19 nt, Human
cucugcuugguccauaugc

SEQ ID NO: 555164 - RNA, 22 nt, Human
gcagauggugggggaggaguac

SEQ ID NO: 555165 - RNA, 22 nt, Human
ccauccugcauugcuauucaga

SEQ ID NO: 555166 - RNA, 22 nt, Human
gucuaaacuuuacagagucaag

SEQ ID NO: 555167 - RNA, 22 nt, Human
acauugaugaaaagguaucauu

SEQ ID NO: 555168 - RNA, 18 nt, Human
gucuggaggucaggagcu

SEQ ID NO: 555169 - RNA, 22 nt, Human
ccucugccugcacaucauccug

SEQ ID NO: 555170 - RNA, 22 nt, Human
agcccuagagcuggaggucagu

SEQ ID NO: 555171 - RNA, 22 nt, Human
uucaaagugcuguucaaaguag

SEQ ID NO: 555172 - RNA, 22 nt, Human
cuggccuggggggacacauccc

SEQ ID NO: 555173 - RNA, 22 nt, Human
auuuucaucgcuagguuggccu

SEQ ID NO: 555174 - RNA, 22 nt, Human
ggcucccaggagggccuggagg

SEQ ID NO: 555175 - RNA, 22 nt, Human
gaugcagaaaguagacaccauc

SEQ ID NO: 555176 - RNA, 22 nt, Human
gcuaucuuucugcaccauaauu

SEQ ID NO: 555177 - RNA, 22 nt, Human
ucauuuacacuucacaaaugga

SEQ ID NO: 555178 - RNA, 22 nt, Human
agccaugcaccuuacucuugcu

SEQ ID NO: 555179 - RNA, 22 nt, Human
cccagagucaagcuuaccauua

SEQ ID NO: 555180 - RNA, 22 nt, Human
caggaggcaucauggagcggac

SEQ ID NO: 555181 - RNA, 22 nt, Human
auacauuagaaucugguacuca

SEQ ID NO: 555182 - RNA, 22 nt, Human
ccagggccaagagaccucgagg

SEQ ID NO: 555183 - RNA, 22 nt, Human
ugaaaaacugaauaguugagua

SEQ ID NO: 555184 - RNA, 22 nt, Human
cuuggaggagguggugcuugau

SEQ ID NO: 555185 - RNA, 22 nt, Human
agcuuuauggugccucacuuga

SEQ ID NO: 555186 - RNA, 22 nt, Human
cauuuguaguaucuguuuauau

SEQ ID NO: 555187 - RNA, 22 nt, Human
uuucuuuaucauagcaucuuug

SEQ ID NO: 555188 - RNA, 22 nt, Human
uauaucuuauaugugcagguac

SEQ ID NO: 555189 - RNA, 22 nt, Human
acacaguaguguggaaaaacau

SEQ ID NO: 555190 - RNA, 22 nt, Human
gcaaagcacacuggagaugucg

SEQ ID NO: 555191 - RNA, 22 nt, Human
acacuugauaggucaaaucagu

SEQ ID NO: 555192 - RNA, 22 nt, Human
ccacugaaggucaacauagagc

SEQ ID NO: 555193 - RNA, 22 nt, Human
auugcuuuagaaagaaaaauau

SEQ ID NO: 555194 - RNA, 22 nt, Human
cacaguggauugggugaugccc

SEQ ID NO: 555195 - RNA, 22 nt, Human
uuucauaugggcauuggcaaua

SEQ ID NO: 555196 - RNA, 19 nt, Human
cgcagguggaaggagccgc

SEQ ID NO: 555197 - RNA, 22 nt, Human
ucaguguaaguuauguagaugu

SEQ ID NO: 555198 - RNA, 22 nt, Human
cuggagccggaccagggacggu

SEQ ID NO: 555199 - RNA, 22 nt, Human
uagcagcuuaaguaauuagaau

SEQ ID NO: 555200 - RNA, 22 nt, Human
ugaggccagugacauauauuaa

SEQ ID NO: 555201 - RNA, 22 nt, Human
accagagcucuucagcacagga

SEQ ID NO: 555202 - RNA, 22 nt, Human
auauucuugaaagauccuggua

SEQ ID NO: 555203 - RNA, 22 nt, Human
agcccugcgcucacguucugca

SEQ ID NO: 555204 - RNA, 22 nt, Human
uauguaagugagaucauggagu

SEQ ID NO: 555205 - RNA, 22 nt, Human
ugaagacacauacaagggaaug

SEQ ID NO: 555206 - RNA, 22 nt, Human
cugugggcgccugucagccuca

SEQ ID NO: 555207 - RNA, 22 nt, Human
augaaugcugggacaaauauau

SEQ ID NO: 555208 - RNA, 22 nt, Human
cauugcacuuuggguccaggac

SEQ ID NO: 555209 - RNA, 22 nt, Human
gaguuaauaggguucuuuguga

SEQ ID NO: 555210 - RNA, 22 nt, Human
gucauuuuaugggaacagauuu

SEQ ID NO: 555211 - RNA, 22 nt, Human
gcugccugucugcugacccagg

SEQ ID NO: 555212 - RNA, 23 nt, Human
auuuccuaaaagauaaucauuac

SEQ ID NO: 555213 - RNA, 22 nt, Human
agagccuggagguucugcugaa

SEQ ID NO: 555214 - RNA, 22 nt, Human
acaggcauauuucuagauuaca

SEQ ID NO: 555215 - RNA, 22 nt, Human
uuucacaggaguuguaccauuu

SEQ ID NO: 555216 - RNA, 22 nt, Human
gaugagugaggacaggguggca

SEQ ID NO: 555217 - RNA, 22 nt, Human
gcagcuggggccacacuuaggc

SEQ ID NO: 555218 - RNA, 22 nt, Human
agaaaugucaaguguucuuguu

SEQ ID NO: 555219 - RNA, 22 nt, Human
gcucagccgaacuucagagcag

SEQ ID NO: 555220 - RNA, 21 nt, Human
aguggggucucuguggaggcc

SEQ ID NO: 555221 - RNA, 23 nt, Human
cugggcugcuugagucccuggcu

SEQ ID NO: 555222 - RNA, 22 nt, Human
gcagagugggagcccagggcug

SEQ ID NO: 555223 - RNA, 22 nt, Human
ugcucccaggcucuguggucug

SEQ ID NO: 555224 - RNA, 22 nt, Human
aaugaagcaguccaucugcucu

SEQ ID NO: 555225 - RNA, 22 nt, Human
cagggcugugcccaucuucccc

SEQ ID NO: 555226 - RNA, 22 nt, Human
uucuccucuguuggccuucccu

SEQ ID NO: 555227 - RNA, 22 nt, Human
aucuuuaggcaaguuacuuaac

SEQ ID NO: 555228 - RNA, 22 nt, Human
cuguccauuuucgugccuccuu

SEQ ID NO: 555229 - RNA, 22 nt, Human
caugcacaacauacucaagagg

SEQ ID NO: 555230 - RNA, 22 nt, Human
ugggcugcccugaugguccuca

SEQ ID NO: 555231 - RNA, 22 nt, Human
gugcaggguagcgacggcagga

SEQ ID NO: 555232 - RNA, 22 nt, Human
uaugaacugugagugugauggg

SEQ ID NO: 555233 - RNA, 22 nt, Human
aucaacaugucauaaagugaaa

SEQ ID NO: 555234 - RNA, 22 nt, Human
cuggucaggggauggggcucag

SEQ ID NO: 555235 - RNA, 22 nt, Human
uucuuucuuuguaguccugaac

SEQ ID NO: 555236 - RNA, 22 nt, Human
cuauucuagauuacaguauaaa

SEQ ID NO: 555237 - RNA, 22 nt, Human
aguggcagccgagcaggagaug

SEQ ID NO: 555238 - RNA, 22 nt, Human
ugcugucugcaacaguacuaca

SEQ ID NO: 555239 - RNA, 22 nt, Human
cuggcucauagagcagcuccaa

SEQ ID NO: 555240 - RNA, 22 nt, Human
guuuuccuucucagccauugcc

SEQ ID NO: 555241 - RNA, 22 nt, Human
ugggccagggcacccaguccag

SEQ ID NO: 555242 - RNA, 22 nt, Human
ugugaaaucugaugaauugacc

SEQ ID NO: 555243 - RNA, 22 nt, Human
gaggcagcucuucugaaugggg

SEQ ID NO: 555244 - RNA, 22 nt, Human
cagacacagauaugcauauggc

SEQ ID NO: 555245 - RNA, 21 nt, Human
ugguuugcggccaaaguuaaa

SEQ ID NO: 555246 - RNA, 22 nt, Human
ccugggucuugguucaugcucu

SEQ ID NO: 555247 - RNA, 22 nt, Human
agaggccuuucuguugagugaa

SEQ ID NO: 555248 - RNA, 22 nt, Human
uguccugcaacugaaggagaag

SEQ ID NO: 555249 - RNA, 22 nt, Human
ccacauuuuugauacucucacu

SEQ ID NO: 555250 - RNA, 22 nt, Human
agugucugaaccaccggggcau

SEQ ID NO: 555251 - RNA, 22 nt, Human
caaggccauauugccuguaugu

SEQ ID NO: 555252 - RNA, 22 nt, Human
cuucuuccaguuauaagagcuu

SEQ ID NO: 555253 - RNA, 22 nt, Human
gaagucuguggguucaaaggca

SEQ ID NO: 555254 - RNA, 22 nt, Human
accuggagaaagccucucccug

SEQ ID NO: 555255 - RNA, 22 nt, Human
uaaaggcuucugcagggacuga

SEQ ID NO: 555256 - RNA, 22 nt, Human
gaaugcacacgugugugcaugc

SEQ ID NO: 555257 - RNA, 22 nt, Human
ggagcugggaauuggaucaucu

SEQ ID NO: 555258 - RNA, 22 nt, Human
gcuuaauucuggcucaguuucc

SEQ ID NO: 555259 - RNA, 22 nt, Human
aaacucaaauuaaacuagcuua

SEQ ID NO: 555260 - RNA, 22 nt, Human
ugucucagauacgccaucaagg

SEQ ID NO: 555261 - RNA, 22 nt, Human
uaagacagggucuauucuuagu

SEQ ID NO: 555262 - RNA, 22 nt, Human
ggccuuggugcucuguguugca

SEQ ID NO: 555263 - RNA, 20 nt, Human
gaggaaaagcugccaggccu

SEQ ID NO: 555264 - RNA, 22 nt, Human
uuuagggaaauugaggguuaag

SEQ ID NO: 555265 - RNA, 22 nt, Human
uuuaggaauauuuucuuucagg

SEQ ID NO: 555266 - RNA, 22 nt, Human
guucaagguuuuacagagugua

SEQ ID NO: 555267 - RNA, 23 nt, Human
acuucauggcacugucuuagagg

SEQ ID NO: 555268 - RNA, 22 nt, Human
cagggacaauggcagagccuga

SEQ ID NO: 555269 - RNA, 22 nt, Human
gggaagccaugcucagagguac

SEQ ID NO: 555270 - RNA, 22 nt, Human
ggccucugguucguggugaccu

SEQ ID NO: 555271 - RNA, 22 nt, Human
ggcaggcaagucugcucuguga

SEQ ID NO: 555272 - RNA, 22 nt, Human
acaggcagagaacucagccaga

SEQ ID NO: 555273 - RNA, 22 nt, Human
ggcccagccucagacaugcccu

SEQ ID NO: 555274 - RNA, 19 nt, Human
gcaggcagcugggguaucc

SEQ ID NO: 555275 - RNA, 22 nt, Human
uucaaugauuuuuagggaucau

SEQ ID NO: 555276 - RNA, 21 nt, Human
cucuugucuuugcucaguagc

SEQ ID NO: 555277 - RNA, 22 nt, Human
uccuguggcguuaucaugugau

SEQ ID NO: 555278 - RNA, 22 nt, Human
ucucugcugagaagggcuggca

SEQ ID NO: 555279 - RNA, 21 nt, Human
gucaggcccauagcagugccu

SEQ ID NO: 555280 - RNA, 23 nt, Human
acucagagaccccgggaagugac

SEQ ID NO: 555281 - RNA, 22 nt, Human
aucugggggagcugcucaugga

SEQ ID NO: 555282 - RNA, 22 nt, Human
ugauuucccuguagccucugaa

SEQ ID NO: 555283 - RNA, 22 nt, Human
uuauggcuuaaauacuacaggg

SEQ ID NO: 555284 - RNA, 22 nt, Human
cuuagggaauugggaggaugcc

SEQ ID NO: 555285 - RNA, 22 nt, Human
ucagguggccaaaugggagcgc

SEQ ID NO: 555286 - RNA, 22 nt, Human
gcuuccugucccucagccauga

SEQ ID NO: 555287 - RNA, 22 nt, Human
caucuuuauuuauauagacagg

SEQ ID NO: 555288 - RNA, 22 nt, Human
ugggccagcugaagugccgccc

SEQ ID NO: 555289 - RNA, 22 nt, Human
uagccgcuuaauuauuugguga

SEQ ID NO: 555290 - RNA, 22 nt, Human
ggucucagaucuuuauuaaggc

SEQ ID NO: 555291 - RNA, 22 nt, Human
gaaaaugugccuuuggguauug

SEQ ID NO: 555292 - RNA, 22 nt, Human
cugcugagcauuugcagggaca

SEQ ID NO: 555293 - RNA, 21 nt, Human
ggagucagggucuggcugggg

SEQ ID NO: 555294 - RNA, 22 nt, Human
ccagggcuggguuugucggugu

SEQ ID NO: 555295 - RNA, 22 nt, Human
agggcagagggugccucaccug

SEQ ID NO: 555296 - RNA, 22 nt, Human
gcaggcucaaaagcugguagga

SEQ ID NO: 555297 - RNA, 22 nt, Human
ccauuuguaccauuucuuugua

SEQ ID NO: 555298 - RNA, 22 nt, Human
ccugaagcaaggguaggcaggu

SEQ ID NO: 555299 - RNA, 23 nt, Human
gucagggcuggggucagagugac

SEQ ID NO: 555300 - RNA, 22 nt, Human
acaauucugaugguuucccagu

SEQ ID NO: 555301 - RNA, 22 nt, Human
agaaggcagaugggacggagca

SEQ ID NO: 555302 - RNA, 21 nt, Human
cuacagaaucgagcauucugg

SEQ ID NO: 555303 - RNA, 22 nt, Human
aacugugaggaugugcaaauuc

SEQ ID NO: 555304 - RNA, 22 nt, Human
uauuucaugugcaccauaauuc

SEQ ID NO: 555305 - RNA, 22 nt, Human
ucuucuccagugcuucugcaca

SEQ ID NO: 555306 - RNA, 17 nt, Human
gguggccugcaguggcu

SEQ ID NO: 555307 - RNA, 22 nt, Human
agucucagggccacccggggaa

SEQ ID NO: 555308 - RNA, 22 nt, Human
auaauuuaaauuaguaugugau

SEQ ID NO: 555309 - RNA, 22 nt, Human
uauagcauauacagauaagcug

SEQ ID NO: 555310 - RNA, 22 nt, Human
aacugagacacgaacuaugauu

SEQ ID NO: 555311 - RNA, 22 nt, Human
gucaggauuuacaaacuucagu

SEQ ID NO: 555312 - RNA, 22 nt, Human
uuugaaagggaaauaaacuccu

SEQ ID NO: 555313 - RNA, 22 nt, Human
guaaaguucuacuagaaucaac

SEQ ID NO: 555314 - RNA, 22 nt, Human
ccugucaguugcugucagggau

SEQ ID NO: 555315 - RNA, 22 nt, Human
gcugugagggcuucugaggcau

SEQ ID NO: 555316 - RNA, 22 nt, Human
auuucaugugaagaagagauaa

SEQ ID NO: 555317 - RNA, 22 nt, Human
gucuuauuuaaggacaagaaga

SEQ ID NO: 555318 - RNA, 22 nt, Human
gagaaacuguuggaauuuuaau

SEQ ID NO: 555319 - RNA, 22 nt, Human
aguuugaagauuaugccagagu

SEQ ID NO: 555320 - RNA, 22 nt, Human
uucuuuguuguacuuuccuaca

SEQ ID NO: 555321 - RNA, 22 nt, Human
gauguaauagauauagauugcu

SEQ ID NO: 555322 - RNA, 22 nt, Human
agggcugaguggugcagucaaa

SEQ ID NO: 555323 - RNA, 18 nt, Human
gcagauggagauucaggg

SEQ ID NO: 555324 - RNA, 22 nt, Human
aagccaacaugauuacuauaau

SEQ ID NO: 555325 - RNA, 22 nt, Human
ugcagggccuugggaugugucc

SEQ ID NO: 555326 - RNA, 21 nt, Human
uagggcucucugugucaggug

SEQ ID NO: 555327 - RNA, 22 nt, Human
uccuuacaugcuuccuuauaca

SEQ ID NO: 555328 - RNA, 22 nt, Human
uugauacacaauggaacaaugu

SEQ ID NO: 555329 - RNA, 22 nt, Human
ggcagccuccagggcacuggug

SEQ ID NO: 555330 - RNA, 22 nt, Human
ugugccaagacuauauugugcu

SEQ ID NO: 555331 - RNA, 22 nt, Human
uuucacaaucaaauggugaaau

SEQ ID NO: 555332 - RNA, 22 nt, Human
gcagccuguuguaccagccugu

SEQ ID NO: 555333 - RNA, 22 nt, Human
ucccugccaaugauuggagcaa

SEQ ID NO: 555334 - RNA, 20 nt, Human
uacagaaacaggacuuuugg

SEQ ID NO: 555335 - RNA, 22 nt, Human
cucuggacagcaggugcugugg

SEQ ID NO: 555336 - RNA, 22 nt, Human
acacaugugauucuaagacagc

SEQ ID NO: 555337 - RNA, 22 nt, Human
uuccuauuuccaugaaacacaa

SEQ ID NO: 555338 - RNA, 22 nt, Human
ugccucuguugagccuuggcug

SEQ ID NO: 555339 - RNA, 22 nt, Human
aaauucuaugucaauguuuauu

SEQ ID NO: 555340 - RNA, 22 nt, Human
cacaguggcagguguggguugu

SEQ ID NO: 555341 - RNA, 22 nt, Human
uguuuucauuugauguaacaaa

SEQ ID NO: 555342 - RNA, 22 nt, Human
cugaauuaagcauuacauacau

SEQ ID NO: 555343 - RNA, 22 nt, Human
aagauuucagaguuugggggaa

SEQ ID NO: 555344 - RNA, 20 nt, Human
agaagucagcucagaaguga

SEQ ID NO: 555345 - RNA, 22 nt, Human
uucagcagucguccaggaaaag

SEQ ID NO: 555346 - RNA, 19 nt, Human
auacagauguauccaugau

SEQ ID NO: 555347 - RNA, 22 nt, Human
ugcuggagaucauuaauguuca

SEQ ID NO: 555348 - RNA, 22 nt, Human
cagucacauagguauacacaua

SEQ ID NO: 555349 - RNA, 18 nt, Human
auauauugacaagaggga

SEQ ID NO: 555350 - RNA, 22 nt, Human
cccagcccaucucaaaggucua

SEQ ID NO: 555351 - RNA, 19 nt, Human
uggcuuccaucucucucau

SEQ ID NO: 555352 - RNA, 22 nt, Human
aaucuugaguaucagaccaaga

SEQ ID NO: 555353 - RNA, 22 nt, Human
aggagcuggaaugguccuuuug

SEQ ID NO: 555354 - RNA, 22 nt, Human
ccuggcagcagcacaugccuuc

SEQ ID NO: 555355 - RNA, 22 nt, Human
gcacaggaaucuucauuuuuua

SEQ ID NO: 555356 - RNA, 21 nt, Human
aaagagacaaauggcauauac

SEQ ID NO: 555357 - RNA, 22 nt, Human
cagggccauaucuugugcacca

SEQ ID NO: 555358 - RNA, 21 nt, Human
cugugcuuuuuaagugugaug

SEQ ID NO: 555359 - RNA, 22 nt, Human
agagccaggugcugcuguuuga

SEQ ID NO: 555360 - RNA, 22 nt, Human
ucucagagauuuuguuucccuu

SEQ ID NO: 555361 - RNA, 22 nt, Human
cacccagcacagagggaggcga

SEQ ID NO: 555362 - RNA, 22 nt, Human
ucccagagugugggcaucaagg

SEQ ID NO: 555363 - RNA, 22 nt, Human
uccucacaagcaagcacaggua

SEQ ID NO: 555364 - RNA, 22 nt, Human
uccucaugccgggucucacgcu

SEQ ID NO: 555365 - RNA, 22 nt, Human
caccuggcuggaagugcuccgg

SEQ ID NO: 555366 - RNA, 22 nt, Human
auuguauuuccagcuugaaugu

SEQ ID NO: 555367 - RNA, 22 nt, Human
auugucuguacuuuaaaaaugu

SEQ ID NO: 555368 - RNA, 22 nt, Human
gaaaugcauggaucuuggcaga

SEQ ID NO: 555369 - RNA, 22 nt, Human
gcagcacauauaaacaaagaga

SEQ ID NO: 555370 - RNA, 22 nt, Human
acagccugcugccugcuucuug

SEQ ID NO: 555371 - RNA, 22 nt, Human
caucagaaugaauguucuggag

SEQ ID NO: 555372 - RNA, 22 nt, Human
ugggaccugcccuggccccauc

SEQ ID NO: 555373 - RNA, 22 nt, Human
uuuccuuccuugcuagccugag

SEQ ID NO: 555374 - RNA, 22 nt, Human
cagugcaguggcugagcuggag

SEQ ID NO: 555375 - RNA, 22 nt, Human
gggcagcagaggaucccuuaau

SEQ ID NO: 555376 - RNA, 22 nt, Human
aucacuguguauguauaugcag

SEQ ID NO: 555377 - RNA, 22 nt, Human
uuucacaaugcaauccuacuuc

SEQ ID NO: 555378 - RNA, 22 nt, Human
ccauggcauuuuaugugucuua

SEQ ID NO: 555379 - RNA, 22 nt, Human
gcugggcugcccaaccucugac

SEQ ID NO: 555380 - RNA, 22 nt, Human
gaggcccaggucaagcagccac

SEQ ID NO: 555381 - RNA, 22 nt, Human
ccucugcaaagaauuugucucc

SEQ ID NO: 555382 - RNA, 19 nt, Human
agucucaguguacagaggc

SEQ ID NO: 555383 - RNA, 22 nt, Human
caguuucuacgacuuaagcaca

SEQ ID NO: 555384 - RNA, 22 nt, Human
aucagaauuagccagugaggcu

SEQ ID NO: 555385 - RNA, 22 nt, Human
aaagucacuuccuucugucagc

SEQ ID NO: 555386 - RNA, 22 nt, Human
cuguugucuucauugucauauc

SEQ ID NO: 555387 - RNA, 23 nt, Human
cugaaauucagaugcuaaagaua

SEQ ID NO: 555388 - RNA, 22 nt, Human
ugcauuaucuuuaauguucuca

SEQ ID NO: 555389 - RNA, 22 nt, Human
ccucugaguuagagaucuagau

SEQ ID NO: 555390 - RNA, 22 nt, Human
ggcagcucaccucugguccagg

SEQ ID NO: 555391 - RNA, 22 nt, Human
gcccaggaguugaaugcagcag

SEQ ID NO: 555392 - RNA, 22 nt, Human
accaugaugcauccuuaaggaa

SEQ ID NO: 555393 - RNA, 22 nt, Human
ggaaagagggacccagcuuggu

SEQ ID NO: 555394 - RNA, 22 nt, Human
uccuuggcagcagggagcauga

SEQ ID NO: 555395 - RNA, 22 nt, Human
accaugaucugcucugguguuu

SEQ ID NO: 555396 - RNA, 22 nt, Human
cacagcuggugacagagcccag

SEQ ID NO: 555397 - RNA, 22 nt, Human
uucauaaugagguccuagaggc

SEQ ID NO: 555398 - RNA, 22 nt, Human
ugaugcccccaaaucuggcuca

SEQ ID NO: 555399 - RNA, 22 nt, Human
ucuaacuugugaguauagauga

SEQ ID NO: 555400 - RNA, 22 nt, Human
cugagguggaacagaggugaag

SEQ ID NO: 555401 - RNA, 22 nt, Human
gggcagugguuacacagcugag

SEQ ID NO: 555402 - RNA, 22 nt, Human
aggaagcccaagucucaucuuc

SEQ ID NO: 555403 - RNA, 22 nt, Human
aggcuuuggggcauucuguguu

SEQ ID NO: 555404 - RNA, 22 nt, Human
gcccaugggcuccagaccuggg

SEQ ID NO: 555405 - RNA, 22 nt, Human
agcuuuauucaugauuucaggg

SEQ ID NO: 555406 - RNA, 22 nt, Human
augaggcaaucaugguccaguu

SEQ ID NO: 555407 - RNA, 22 nt, Human
ccugggaggcugugggucugcu

SEQ ID NO: 555408 - RNA, 22 nt, Human
cagggcaggaugcugugauuau

SEQ ID NO: 555409 - RNA, 22 nt, Human
cagcaacuuggacagcagucuu

SEQ ID NO: 555410 - RNA, 22 nt, Human
uggagggcucuuucaccuggua

SEQ ID NO: 555411 - RNA, 22 nt, Human
acagcucuguguauugucaucu

SEQ ID NO: 555412 - RNA, 22 nt, Human
cccagcucccauguucuccaau

SEQ ID NO: 555413 - RNA, 22 nt, Human
aaaugcauuaagucagaacaau

SEQ ID NO: 555414 - RNA, 22 nt, Human
aaugaaaauuggacccuagaac

SEQ ID NO: 555415 - RNA, 22 nt, Human
ucuguucuauuggucuaugugu

SEQ ID NO: 555416 - RNA, 22 nt, Human
cagcaggguuaagugacucacc

SEQ ID NO: 555417 - RNA, 21 nt, Human
caaaacuuaggugacuuagga

SEQ ID NO: 555418 - RNA, 22 nt, Human
gcaaagucugcaucuggaucag

SEQ ID NO: 555419 - RNA, 22 nt, Human
aauaagaaagagucagcuucag

SEQ ID NO: 555420 - RNA, 22 nt, Human
caucacagaaauaaacauaccu

SEQ ID NO: 555421 - RNA, 19 nt, Human
gccaggccuggaccugcag

SEQ ID NO: 555422 - RNA, 22 nt, Human
ccugccugcaaaaugggacaag

SEQ ID NO: 555423 - RNA, 22 nt, Human
aaggcacaacacaagaggguga

SEQ ID NO: 555424 - RNA, 22 nt, Human
cagugcugagagccuggccagg

SEQ ID NO: 555425 - RNA, 22 nt, Human
ucugcccucauugcugccugga

SEQ ID NO: 555426 - RNA, 22 nt, Human
uugguuuucuaauguauuaagg

SEQ ID NO: 555427 - RNA, 19 nt, Human
uuugugaagaaaaugaugc

SEQ ID NO: 555428 - RNA, 22 nt, Human
auauuccugacuuaauuuuuga

SEQ ID NO: 555429 - RNA, 22 nt, Human
ugcaggcugcagucucaggugg

SEQ ID NO: 555430 - RNA, 14 nt, Human
gcagguggaucacc

SEQ ID NO: 555431 - RNA, 22 nt, Human
gucuucuuuucagucugcuugu

SEQ ID NO: 555432 - RNA, 22 nt, Human
uugaacauuaacuucagucuau

SEQ ID NO: 555433 - RNA, 22 nt, Human
ccagcagacacacaggcguggg

SEQ ID NO: 555434 - RNA, 22 nt, Human
ucucugagcaugccauauugcu

SEQ ID NO: 555435 - RNA, 22 nt, Human
cugugcuucagagucagugcug

SEQ ID NO: 555436 - RNA, 22 nt, Human
aucaauucuuaggaaaauagcu

SEQ ID NO: 555437 - RNA, 22 nt, Human
gcugccugcucggcuccuggga

SEQ ID NO: 555438 - RNA, 22 nt, Human
uggagcugaacuuugaggccag

SEQ ID NO: 555439 - RNA, 22 nt, Human
gaagccccaaacccucgccauc

SEQ ID NO: 555440 - RNA, 22 nt, Human
aggaaggguucuuugugaaaga

SEQ ID NO: 555441 - RNA, 22 nt, Human
guuccaauuccaaauuccaagg

SEQ ID NO: 555442 - RNA, 22 nt, Human
uaaagacagauggaccagccau

SEQ ID NO: 555443 - RNA, 22 nt, Human
cuggagaggcugggaacagguu

SEQ ID NO: 555444 - RNA, 22 nt, Human
ugcugcauuuaucuucucaaac

SEQ ID NO: 555445 - RNA, 22 nt, Human
gacuggaaagccuguccucaga

SEQ ID NO: 555446 - RNA, 22 nt, Human
cuggggugugcucagagcaggg

SEQ ID NO: 555447 - RNA, 22 nt, Human
acucuucaucccuuuaucagga

SEQ ID NO: 555448 - RNA, 22 nt, Human
ccagagccuggcaucugcauaa

SEQ ID NO: 555449 - RNA, 22 nt, Human
cggcagcaaaggaagccagguc

SEQ ID NO: 555450 - RNA, 22 nt, Human
caggcacuggccagucagcaca

SEQ ID NO: 555451 - RNA, 22 nt, Human
aaauguguauaugaaacaugau

SEQ ID NO: 555452 - RNA, 22 nt, Human
gcacugaaaauguuggauucca

SEQ ID NO: 555453 - RNA, 22 nt, Human
agcuuuaccugccuuggggcac

SEQ ID NO: 555454 - RNA, 22 nt, Human
aauuugauuuucuuaaaccaua

SEQ ID NO: 555455 - RNA, 22 nt, Human
cugcagggcccaaggucaacgg

SEQ ID NO: 555456 - RNA, 22 nt, Human
cagucccaguuugagacucugg

SEQ ID NO: 555457 - RNA, 22 nt, Human
guuaaccaaggcaccaagugua

SEQ ID NO: 555458 - RNA, 22 nt, Human
accaggcagcugggggugaugu

SEQ ID NO: 555459 - RNA, 20 nt, Human
ccugcuguuuccauggggcc

SEQ ID NO: 555460 - RNA, 22 nt, Human
ugaggugaccgcagaugggaag

SEQ ID NO: 555461 - RNA, 22 nt, Human
ucugccugaaccacucuuggag

SEQ ID NO: 555462 - RNA, 22 nt, Human
uuguaugaucccauuuagugaa

SEQ ID NO: 555463 - RNA, 22 nt, Human
acuugaaaggaagcucuaaaac

SEQ ID NO: 555464 - RNA, 22 nt, Human
cucaaguaagaaacagaauugg

SEQ ID NO: 555465 - RNA, 22 nt, Human
gaaaacuuggaucucuagaaug

SEQ ID NO: 555466 - RNA, 23 nt, Human
aaucuggcugauguuuuuucucu

SEQ ID NO: 555467 - RNA, 22 nt, Human
ugggcucaugcuggagaugaga

SEQ ID NO: 555468 - RNA, 22 nt, Human
auuaggcauucaugcagcuccu

SEQ ID NO: 555469 - RNA, 22 nt, Human
uuuugcaaaguacauuaucagg

SEQ ID NO: 555470 - RNA, 22 nt, Human
gaagaaggaagaucaugcuuga

SEQ ID NO: 555471 - RNA, 22 nt, Human
guggagccaggaucuccgcaca

SEQ ID NO: 555472 - RNA, 22 nt, Human
ucugaagaacugaguaaacaug

SEQ ID NO: 555473 - RNA, 22 nt, Human
gacacagggggauguguggacg

SEQ ID NO: 555474 - RNA, 22 nt, Human
aaagccagcucugagcugcacc

SEQ ID NO: 555475 - RNA, 22 nt, Human
ucuguuuucucuguauuuugac

SEQ ID NO: 555476 - RNA, 22 nt, Human
cuuugaauuccaguacaauaac

SEQ ID NO: 555477 - RNA, 22 nt, Human
accaggagccacaggaggagcc

SEQ ID NO: 555478 - RNA, 22 nt, Human
gaggaccacagaugagccugca

SEQ ID NO: 555479 - RNA, 22 nt, Human
ugaggcucagugagcccugcag

SEQ ID NO: 555480 - RNA, 19 nt, Human
uccaggcauccuucaggcu

SEQ ID NO: 555481 - RNA, 22 nt, Human
uucuuacuaguauguuucagca

SEQ ID NO: 555482 - RNA, 22 nt, Human
cuuggccucuucucaggguggg

SEQ ID NO: 555483 - RNA, 22 nt, Human
ccagggaaaggagguugacuug

SEQ ID NO: 555484 - RNA, 22 nt, Human
gcuccuggucuggagcuucaag

SEQ ID NO: 555485 - RNA, 22 nt, Human
cugcugugugaccauggacagg

SEQ ID NO: 555486 - RNA, 22 nt, Human
gggacuguccucugugucugug

SEQ ID NO: 555487 - RNA, 22 nt, Human
ucagaguccaugguacuuaauu

SEQ ID NO: 555488 - RNA, 22 nt, Human
cgguccuggcacuugcggcucc

SEQ ID NO: 555489 - RNA, 21 nt, Human
ucucacaauaugaugccagau

SEQ ID NO: 555490 - RNA, 22 nt, Human
uaucuauuccaaauaucagcgu

SEQ ID NO: 555491 - RNA, 19 nt, Human
agacaaguuuccagaagcc

SEQ ID NO: 555492 - RNA, 21 nt, Human
caguguggugaccagggucuc

SEQ ID NO: 555493 - RNA, 22 nt, Human
ggcaggcaacggaccacuaguc

SEQ ID NO: 555494 - RNA, 22 nt, Human
gggcuguggagccgcgagggcu

SEQ ID NO: 555495 - RNA, 22 nt, Human
auguggaggaaaugaguguaca

SEQ ID NO: 555496 - RNA, 22 nt, Human
ggcugccuugacccuggcuccg

SEQ ID NO: 555497 - RNA, 22 nt, Human
guucacagucuacauaguaaag

SEQ ID NO: 555498 - RNA, 22 nt, Human
uggagcugggauuugaacugca

SEQ ID NO: 555499 - RNA, 22 nt, Human
ucaauacuuaagcuuaauucua

SEQ ID NO: 555500 - RNA, 22 nt, Human
ucugcccuggggucagccucca

SEQ ID NO: 555501 - RNA, 22 nt, Human
uuccaggauagcuuucaggaau

SEQ ID NO: 555502 - RNA, 22 nt, Human
cagaggguugaugugaggcuua

SEQ ID NO: 555503 - RNA, 22 nt, Human
cugugucccaguaccuugggua

SEQ ID NO: 555504 - RNA, 18 nt, Human
gcagagugcgucucugug

SEQ ID NO: 555505 - RNA, 22 nt, Human
ucuuuucuagcaaauccaggag

SEQ ID NO: 555506 - RNA, 22 nt, Human
cuggagggggaaauguucauug

SEQ ID NO: 555507 - RNA, 22 nt, Human
aaaugcuugcucuugauuauuu

SEQ ID NO: 555508 - RNA, 22 nt, Human
agauauauuuaagguaauaagu

SEQ ID NO: 555509 - RNA, 22 nt, Human
cagggcucaccacugggauccu

SEQ ID NO: 555510 - RNA, 22 nt, Human
aacaggcaacaguugacucuga

SEQ ID NO: 555511 - RNA, 22 nt, Human
gcugucucggggcuuucuccug

SEQ ID NO: 555512 - RNA, 22 nt, Human
caaggcuguguuagcugcccuc

SEQ ID NO: 555513 - RNA, 22 nt, Human
accuggacaccugcugucaucu

SEQ ID NO: 555514 - RNA, 22 nt, Human
cugggcacugcaggguguugag

SEQ ID NO: 555515 - RNA, 22 nt, Human
auguucuuugaaauauuuuaga

SEQ ID NO: 555516 - RNA, 22 nt, Human
ugagccuggggccugggcagcg

SEQ ID NO: 555517 - RNA, 18 nt, Human
aaauuauucuuccuuuuc

SEQ ID NO: 555518 - RNA, 22 nt, Human
aggcaggcucaggcccaugcuu

SEQ ID NO: 555519 - RNA, 21 nt, Human
uggaccuguccuucucgcugu

SEQ ID NO: 555520 - RNA, 22 nt, Human
cuccugcaagccuccccaagca

SEQ ID NO: 555521 - RNA, 22 nt, Human
cuugccuguggcuaguuggcuc

SEQ ID NO: 555522 - RNA, 22 nt, Human
aucuagauuagguauaagagcu

SEQ ID NO: 555523 - RNA, 23 nt, Human
cagcugaagcagccugggcugga

SEQ ID NO: 555524 - RNA, 21 nt, Human
gcaggaugcaucuuggugucu

SEQ ID NO: 555525 - RNA, 22 nt, Human
uggcagaggaaaaagucacugg

SEQ ID NO: 555526 - RNA, 22 nt, Human
gucccaggcuuauguggagcuu

SEQ ID NO: 555527 - RNA, 22 nt, Human
cuccugggcucaagugauccuc

SEQ ID NO: 555528 - RNA, 19 nt, Human
ccugccugagcugucccuc

SEQ ID NO: 555529 - RNA, 22 nt, Human
gcucaggaccgaggggugggaa

SEQ ID NO: 555530 - RNA, 22 nt, Human
uuugaacaagagcuucacauua

SEQ ID NO: 555531 - RNA, 22 nt, Human
ggccucuggucaagacaagcau

SEQ ID NO: 555532 - RNA, 22 nt, Human
uacaguauuacuguguuguuuu

SEQ ID NO: 555533 - RNA, 22 nt, Human
gcugagagugugagaucagauu

SEQ ID NO: 555534 - RNA, 22 nt, Human
cccaaggcauggcaugguggca

SEQ ID NO: 555535 - RNA, 22 nt, Human
aagauugucaggcuugcuguau

SEQ ID NO: 555536 - RNA, 22 nt, Human
guuuaauaauguugaauuacua

SEQ ID NO: 555537 - RNA, 22 nt, Human
aggaaaaucgagucuggaggca

SEQ ID NO: 555538 - RNA, 22 nt, Human
auauuuacugcuguggugaagg

SEQ ID NO: 555539 - RNA, 22 nt, Human
uuugcuuguucaagauuucugu

SEQ ID NO: 555540 - RNA, 22 nt, Human
gcuucauuacugacagucugug

SEQ ID NO: 555541 - RNA, 22 nt, Human
aaagaauacccugggucauaaa

SEQ ID NO: 555542 - RNA, 22 nt, Human
guccuggguccccgcaggucag

SEQ ID NO: 555543 - RNA, 22 nt, Human
cuucacaaaauauuucauuaua

SEQ ID NO: 555544 - RNA, 22 nt, Human
ggcugccugcucaggugcggcg

SEQ ID NO: 555545 - RNA, 22 nt, Human
cuucccacagaauucaaucagu

SEQ ID NO: 555546 - RNA, 22 nt, Human
uuucaaguaagauacauuucag

SEQ ID NO: 555547 - RNA, 22 nt, Human
uguuccaugucuuuguaggacu

SEQ ID NO: 555548 - RNA, 22 nt, Human
auuucuaaagagggugguuugg

SEQ ID NO: 555549 - RNA, 20 nt, Human
ggggaagaaaaggaugugau

SEQ ID NO: 555550 - RNA, 22 nt, Human
aaggaggcacucgcucucaggg

SEQ ID NO: 555551 - RNA, 22 nt, Human
uucuugcaggucacucacugag

SEQ ID NO: 555552 - RNA, 22 nt, Human
gcacccaggcuugggcagcaac

SEQ ID NO: 555553 - RNA, 22 nt, Human
auauaaguuaguggucauguuu

SEQ ID NO: 555554 - RNA, 22 nt, Human
ggcaggaaguagcagucugagc

SEQ ID NO: 555555 - RNA, 22 nt, Human
aggugcuuggcucgugcacaca

SEQ ID NO: 555556 - RNA, 22 nt, Human
gccaggcaguucaaguacacca

SEQ ID NO: 555557 - RNA, 23 nt, Human
agggccacugggaaggauuacug

SEQ ID NO: 555558 - RNA, 22 nt, Human
uggugcugacaguucugagugc

SEQ ID NO: 555559 - RNA, 22 nt, Human
uuuucuuacugucugugauccu

SEQ ID NO: 555560 - RNA, 22 nt, Human
aguggggacaaugagagcaggu

SEQ ID NO: 555561 - RNA, 22 nt, Human
agucucugucguagaucagcgu

SEQ ID NO: 555562 - RNA, 22 nt, Human
cuggccuagcucucugcuugaa

SEQ ID NO: 555563 - RNA, 22 nt, Human
ggcugcagguugguuggcagcu

SEQ ID NO: 555564 - RNA, 22 nt, Human
ugagaauuacaaaugagucaca

SEQ ID NO: 555565 - RNA, 22 nt, Human
ugcagggcagcuagggagcuuu

SEQ ID NO: 555566 - RNA, 22 nt, Human
uuguuuugcuaaagggucauca

SEQ ID NO: 555567 - RNA, 22 nt, Human
gcugugagaaacagggaguguc

SEQ ID NO: 555568 - RNA, 22 nt, Human
uccaggccacugcagaggcucu

SEQ ID NO: 555569 - RNA, 18 nt, Human
ugaaauugcauccaugag

SEQ ID NO: 555570 - RNA, 22 nt, Human
aguccauaggcaguucauaaca

SEQ ID NO: 555571 - RNA, 22 nt, Human
ugcuucugcugauauuuuguga

SEQ ID NO: 555572 - RNA, 22 nt, Human
aaugggcuuucuuggacaggag

SEQ ID NO: 555573 - RNA, 22 nt, Human
gucuuuuuauuauagaguggag

SEQ ID NO: 555574 - RNA, 22 nt, Human
cccugggagaaguugagggcug

SEQ ID NO: 555575 - RNA, 22 nt, Human
cuuauguaugcuacuuuguggu

SEQ ID NO: 555576 - RNA, 22 nt, Human
ggagcuguaacgagccauugcu

SEQ ID NO: 555577 - RNA, 22 nt, Human
cugcugggaaggucugcucagu

SEQ ID NO: 555578 - RNA, 22 nt, Human
gucagcauaguucacacacagu

SEQ ID NO: 555579 - RNA, 22 nt, Human
acaaaguagucaaaguagauga

SEQ ID NO: 555580 - RNA, 22 nt, Human
guaaacaucgacccaacagggg

SEQ ID NO: 555581 - RNA, 22 nt, Human
ggcuggcacucuguccaguguc

SEQ ID NO: 555582 - RNA, 22 nt, Human
augggugugaaaauggucaucu

SEQ ID NO: 555583 - RNA, 22 nt, Human
aucuuucaggccuaguguuuaa

SEQ ID NO: 555584 - RNA, 22 nt, Human
aaaagauuguuagggagaaugu

SEQ ID NO: 555585 - RNA, 22 nt, Human
aaugggaaagagacuagaugcu

SEQ ID NO: 555586 - RNA, 22 nt, Human
gcagcuggucuggccuagagua

SEQ ID NO: 555587 - RNA, 20 nt, Human
ucacaggagggaaggcaggu

SEQ ID NO: 555588 - RNA, 22 nt, Human
ugaaugaugcaguauaaugaua

SEQ ID NO: 555589 - RNA, 22 nt, Human
aacaugaaguuuucuauaguga

SEQ ID NO: 555590 - RNA, 22 nt, Human
gagguggcauuaagauucuggu

SEQ ID NO: 555591 - RNA, 22 nt, Human
ucuucaaaugcuaguaauauca

SEQ ID NO: 555592 - RNA, 22 nt, Human
uacauugaauuuuuuagcaugu

SEQ ID NO: 555593 - RNA, 22 nt, Human
ucuuuuguugccuacuuauuaa

SEQ ID NO: 555594 - RNA, 22 nt, Human
uggccaaucacugacaaaaugc

SEQ ID NO: 555595 - RNA, 22 nt, Human
gcugggccgaccugggcugcag

SEQ ID NO: 555596 - RNA, 22 nt, Human
uguaacaguaagccugugagcu

SEQ ID NO: 555597 - RNA, 22 nt, Human
ucauacaucuuguauaucuauc

SEQ ID NO: 555598 - RNA, 22 nt, Human
accacugcccauggugaaaacu

SEQ ID NO: 555599 - RNA, 22 nt, Human
acugccugcauccuuaggguag

SEQ ID NO: 555600 - RNA, 22 nt, Human
ugguggcuucugaggauggcga

SEQ ID NO: 555601 - RNA, 22 nt, Human
acuuauuucauggaucauaaug

SEQ ID NO: 555602 - RNA, 22 nt, Human
uuucugaagguuaaggaauuag

SEQ ID NO: 555603 - RNA, 19 nt, Human
ccagagagcuagguacaga

SEQ ID NO: 555604 - RNA, 22 nt, Human
uauguuucuuccuuuucauaca

SEQ ID NO: 555605 - RNA, 17 nt, Human
ucuaggagagcagagcu

SEQ ID NO: 555606 - RNA, 22 nt, Human
ucugucaauuauucacauaggc

SEQ ID NO: 555607 - RNA, 22 nt, Human
cauuugcucugugucaguggca

SEQ ID NO: 555608 - RNA, 22 nt, Human
ugucucugggugauucaguccu

SEQ ID NO: 555609 - RNA, 22 nt, Human
cacagaaguuucauagucucga

SEQ ID NO: 555610 - RNA, 22 nt, Human
gagucacauacuauguaauaga

SEQ ID NO: 555611 - RNA, 21 nt, Human
aaaguucaugcuuuaauauuc

SEQ ID NO: 555612 - RNA, 22 nt, Human
ccacaaguuucagcacccagag

SEQ ID NO: 555613 - RNA, 19 nt, Human
ggccaggcugacugugguc

SEQ ID NO: 555614 - RNA, 22 nt, Human
ugcucacagcccagaacauaau

SEQ ID NO: 555615 - RNA, 22 nt, Human
ucugacauuuugagaaugacau

SEQ ID NO: 555616 - RNA, 18 nt, Human
ccaaggccccugcugggg

SEQ ID NO: 555617 - RNA, 22 nt, Human
ccucaggauacaggagccacag

SEQ ID NO: 555618 - RNA, 22 nt, Human
caaaaccaagaacauucauuuc

SEQ ID NO: 555619 - RNA, 22 nt, Human
ugcuccagugagcuggccaucc

SEQ ID NO: 555620 - RNA, 22 nt, Human
ugcuucugcuuuacuugguuca

SEQ ID NO: 555621 - RNA, 22 nt, Human
aaauccuaagcagaggaauuua

SEQ ID NO: 555622 - RNA, 22 nt, Human
agcuggcucagccggguggucu

SEQ ID NO: 555623 - RNA, 22 nt, Human
ccuuugggugaauuccucucuu

SEQ ID NO: 555624 - RNA, 22 nt, Human
aacauugauugcaucuguucac

SEQ ID NO: 555625 - RNA, 22 nt, Human
gagcugcccugagcuuugcaug

SEQ ID NO: 555626 - RNA, 22 nt, Human
agagaauuuuaaaagccuugaa

SEQ ID NO: 555627 - RNA, 22 nt, Human
gcaagcaguuacccaggauucg

SEQ ID NO: 555628 - RNA, 22 nt, Human
ugguaaagugcucuaacuucau

SEQ ID NO: 555629 - RNA, 22 nt, Human
gcugcugguccucagagcucau

SEQ ID NO: 555630 - RNA, 22 nt, Human
gcagccacuuugcaaccaagag

SEQ ID NO: 555631 - RNA, 22 nt, Human
accauuugacucucuaaggaua

SEQ ID NO: 555632 - RNA, 22 nt, Human
caauuucagaccuuuccuugga

SEQ ID NO: 555633 - RNA, 22 nt, Human
acaaggauuuguuccuaauguu

SEQ ID NO: 555634 - RNA, 22 nt, Human
cagucccagacauaguaaggga

SEQ ID NO: 555635 - RNA, 22 nt, Human
aaauacauaaagguuguaccag

SEQ ID NO: 555636 - RNA, 22 nt, Human
auuucagcccaguaugagcccc

SEQ ID NO: 555637 - RNA, 22 nt, Human
acaggccugagauuuugcauuu

SEQ ID NO: 555638 - RNA, 22 nt, Human
ccaagaugaucuuuacaguguu

SEQ ID NO: 555639 - RNA, 22 nt, Human
ucaguuuucucauuuaugagau

SEQ ID NO: 555640 - RNA, 22 nt, Human
ugggcucugguuuccuggcugg

SEQ ID NO: 555641 - RNA, 22 nt, Human
agcaaagcucaugacauuacag

SEQ ID NO: 555642 - RNA, 22 nt, Human
ccuggaaguuggagguugcagu

SEQ ID NO: 555643 - RNA, 22 nt, Human
ugucacauaggcaaaauguuuu

SEQ ID NO: 555644 - RNA, 22 nt, Human
aaggaagaugcuggccugggga

SEQ ID NO: 555645 - RNA, 22 nt, Human
auucuuuuuuaaggaauagaac

SEQ ID NO: 555646 - RNA, 22 nt, Human
auauacuuggagacuaucauug

SEQ ID NO: 555647 - RNA, 22 nt, Human
cagguuuagguggacgugcagg

SEQ ID NO: 555648 - RNA, 22 nt, Human
gggaccuggcgagggucacaca

SEQ ID NO: 555649 - RNA, 22 nt, Human
aggcuggcccuacuggcugccu

SEQ ID NO: 555650 - RNA, 22 nt, Human
ucgagucauguucucccauuaa

SEQ ID NO: 555651 - RNA, 22 nt, Human
augugguugaagaauuacaucu

SEQ ID NO: 555652 - RNA, 22 nt, Human
uauuucuuguucccuccaaguu

SEQ ID NO: 555653 - RNA, 22 nt, Human
cugagggaguuccugagcccac

SEQ ID NO: 555654 - RNA, 22 nt, Human
ucccagagguugagucacuuau

SEQ ID NO: 555655 - RNA, 22 nt, Human
cuugaaagaagggucuuuuaau

SEQ ID NO: 555656 - RNA, 22 nt, Human
ccacaggacggaggucuggccg

SEQ ID NO: 555657 - RNA, 22 nt, Human
caagaaauguuuacugagcauc

SEQ ID NO: 555658 - RNA, 22 nt, Human
uagaaacagaaaacuguaauag

SEQ ID NO: 555659 - RNA, 22 nt, Human
cuuauaaaguccaucugaacaa

SEQ ID NO: 555660 - RNA, 22 nt, Human
caucaaaauuagacauuguuga

SEQ ID NO: 555661 - RNA, 22 nt, Human
aaaguuacacgacuauuuaugu

SEQ ID NO: 555662 - RNA, 22 nt, Human
uggcccugggcaucuuucguga

SEQ ID NO: 555663 - RNA, 22 nt, Human
caggggcuagcacuuaauguuu

SEQ ID NO: 555664 - RNA, 22 nt, Human
uuucuucucuaaucucaaugau

SEQ ID NO: 555665 - RNA, 22 nt, Human
ucccuguggaagacugccagag

SEQ ID NO: 555666 - RNA, 19 nt, Human
gaaaggcugcugcuaccug

SEQ ID NO: 555667 - RNA, 22 nt, Human
uauuccaguccuauccucuuuu

SEQ ID NO: 555668 - RNA, 22 nt, Human
cugccuagcgccaucugccucu

SEQ ID NO: 555669 - RNA, 22 nt, Human
ggggugugucugacaaugguau

SEQ ID NO: 555670 - RNA, 18 nt, Human
gccugggaggaggaaaug

SEQ ID NO: 555671 - RNA, 22 nt, Human
uuuccuaagggaugcggcucaa

SEQ ID NO: 555672 - RNA, 23 nt, Human
ugaaggccuggaggacgcguugu

SEQ ID NO: 555673 - RNA, 22 nt, Human
agagauguucauucagcauguu

SEQ ID NO: 555674 - RNA, 22 nt, Human
gcugccaccguggagaugagug

SEQ ID NO: 555675 - RNA, 22 nt, Human
aauguuuuagauuacugcuggg

SEQ ID NO: 555676 - RNA, 22 nt, Human
aaaucagugcucauuugaaagg

SEQ ID NO: 555677 - RNA, 22 nt, Human
acugccauuggucaaaugagug

SEQ ID NO: 555678 - RNA, 22 nt, Human
ugcaggcugcuggcaguagcuu

SEQ ID NO: 555679 - RNA, 20 nt, Human
cucagcuaaacaacacugac

SEQ ID NO: 555680 - RNA, 22 nt, Human
cccuuuaaaguuuuaccagcag

SEQ ID NO: 555681 - RNA, 22 nt, Human
gcuggggagaauuggguuaucu

SEQ ID NO: 555682 - RNA, 22 nt, Human
uuggcuucucuuaacccuaaag

SEQ ID NO: 555683 - RNA, 22 nt, Human
cgaggcagaggcugaaacggcu

SEQ ID NO: 555684 - RNA, 22 nt, Human
cagggccuggagcugggccugc

SEQ ID NO: 555685 - RNA, 22 nt, Human
uuucaaagguuuugucaugucu

SEQ ID NO: 555686 - RNA, 22 nt, Human
acacaggagauauguaauggcu

SEQ ID NO: 555687 - RNA, 22 nt, Human
aauguauuugauguauuagccu

SEQ ID NO: 555688 - RNA, 22 nt, Human
uggcuucagacuucugcuacgu

SEQ ID NO: 555689 - RNA, 22 nt, Human
ggucccugcccaccugggagcu

SEQ ID NO: 555690 - RNA, 22 nt, Human
agcacuuaugugauuaggacag

SEQ ID NO: 555691 - RNA, 22 nt, Human
agccauuagucauuuuagaaua

SEQ ID NO: 555692 - RNA, 23 nt, Human
auuuuuugucuuuguaacuagau

SEQ ID NO: 555693 - RNA, 22 nt, Human
uggaaaaugugacuauucuaaa

SEQ ID NO: 555694 - RNA, 22 nt, Human
gaggguggguacaccagcccuc

SEQ ID NO: 555695 - RNA, 22 nt, Human
gccugccuggagcuugagguga

SEQ ID NO: 555696 - RNA, 22 nt, Human
ccaggcucugacauagauggga

SEQ ID NO: 555697 - RNA, 22 nt, Human
ucaauauagcaguguacuugag

SEQ ID NO: 555698 - RNA, 22 nt, Human
ccugggaccucgcgggaagcgg

SEQ ID NO: 555699 - RNA, 21 nt, Human
aaaaugugagcgugaugcuua

SEQ ID NO: 555700 - RNA, 22 nt, Human
uagaaacaaugacaugcuugua

SEQ ID NO: 555701 - RNA, 22 nt, Human
ucagcagggccuccuugugcag

SEQ ID NO: 555702 - RNA, 17 nt, Human
acaacagaaauguauuc

SEQ ID NO: 555703 - RNA, 22 nt, Human
cugugucuucaauguacuggga

SEQ ID NO: 555704 - RNA, 22 nt, Human
uucaaguagaaaguauugauga

SEQ ID NO: 555705 - RNA, 22 nt, Human
ucagaccauccugcuguuagug

SEQ ID NO: 555706 - RNA, 22 nt, Human
agcagggccucuggcacugguc

SEQ ID NO: 555707 - RNA, 22 nt, Human
uagcuagaagguugaaagcagg

SEQ ID NO: 555708 - RNA, 22 nt, Human
aggcccaguagugcugccuuua

SEQ ID NO: 555709 - RNA, 22 nt, Human
cauuucauaguugucacaauaa

SEQ ID NO: 555710 - RNA, 22 nt, Human
aguggcagagcaggugcuggaa

SEQ ID NO: 555711 - RNA, 22 nt, Human
gguacaaggagugaagguuugg

SEQ ID NO: 555712 - RNA, 22 nt, Human
aggucacuugguguuauucagc

SEQ ID NO: 555713 - RNA, 22 nt, Human
aaucagaaagaggucauguugc

SEQ ID NO: 555714 - RNA, 22 nt, Human
agugaaaucagguuuugacugc

SEQ ID NO: 555715 - RNA, 22 nt, Human
uuaaagaugcagcuuuagagaa

SEQ ID NO: 555716 - RNA, 22 nt, Human
cacugcucgcugcagcauggcc

SEQ ID NO: 555717 - RNA, 22 nt, Human
cugggcuucucccccuggcaga

SEQ ID NO: 555718 - RNA, 22 nt, Human
gcucacuggccugaagaggacg

SEQ ID NO: 555719 - RNA, 22 nt, Human
agggagcuguggucagcucagu

SEQ ID NO: 555720 - RNA, 22 nt, Human
uacuacuuucccccacauauuu

SEQ ID NO: 555721 - RNA, 22 nt, Human
auggaauauagucuuauaucuc

SEQ ID NO: 555722 - RNA, 22 nt, Human
cugugagggucacagccaugcc

SEQ ID NO: 555723 - RNA, 22 nt, Human
uccucacagaguggcaggcaau

SEQ ID NO: 555724 - RNA, 22 nt, Human
cucugcccacgucuugcccaga

SEQ ID NO: 555725 - RNA, 22 nt, Human
caaaggcugccacuguggcugu

SEQ ID NO: 555726 - RNA, 22 nt, Human
agccacagcaacaagugcaauu

SEQ ID NO: 555727 - RNA, 22 nt, Human
uaccuugaaccccaagcuuugc

SEQ ID NO: 555728 - RNA, 22 nt, Human
ugaguggacaccugcuucuuua

SEQ ID NO: 555729 - RNA, 22 nt, Human
uuuguaaugauaauguuaaauu

SEQ ID NO: 555730 - RNA, 22 nt, Human
ccccacaacucauguugaaacu

SEQ ID NO: 555731 - RNA, 22 nt, Human
gcccugcugucuucagaguaua

SEQ ID NO: 555732 - RNA, 22 nt, Human
aaacuuuuccugcucuuguccu

SEQ ID NO: 555733 - RNA, 22 nt, Human
uuugauuuacuggauauucuca

SEQ ID NO: 555734 - RNA, 22 nt, Human
acagcagagugugagauagcca

SEQ ID NO: 555735 - RNA, 22 nt, Human
ggcacugaaguggguguugggu

SEQ ID NO: 555736 - RNA, 22 nt, Human
uaguggauguucagagauuuga

SEQ ID NO: 555737 - RNA, 22 nt, Human
caaaagucuguccuuuaacuuc

SEQ ID NO: 555738 - RNA, 22 nt, Human
cacacagugggaaaaccugaag

SEQ ID NO: 555739 - RNA, 22 nt, Human
augauucagcaauuuuauaucu

SEQ ID NO: 555740 - RNA, 22 nt, Human
agagcagauggccagggggccu

SEQ ID NO: 555741 - RNA, 22 nt, Human
caggguggcacucagcgcaucu

SEQ ID NO: 555742 - RNA, 22 nt, Human
caguacuucuuggaaacuggau

SEQ ID NO: 555743 - RNA, 22 nt, Human
acauagaguucaauuuucaguc

SEQ ID NO: 555744 - RNA, 22 nt, Human
augaggcaguacacacaaagcc

SEQ ID NO: 555745 - RNA, 22 nt, Human
caggauggugugagugugagga

SEQ ID NO: 555746 - RNA, 22 nt, Human
augcuuuuccaggagaaauaua

SEQ ID NO: 555747 - RNA, 22 nt, Human
ucugggcuuuuccaugccugug

SEQ ID NO: 555748 - RNA, 22 nt, Human
uaacacauauuugcaguaagca

SEQ ID NO: 555749 - RNA, 22 nt, Human
ugccagggcugcuacuggcuga

SEQ ID NO: 555750 - RNA, 21 nt, Human
gaggccacuaauaggggcaga

SEQ ID NO: 555751 - RNA, 22 nt, Human
ggccuuggggaggauggugucc

SEQ ID NO: 555752 - RNA, 21 nt, Human
gcagacugcccugcugucccc

SEQ ID NO: 555753 - RNA, 18 nt, Human
ucagaggagauaccuaaa

SEQ ID NO: 555754 - RNA, 22 nt, Human
ugcacacacaugcagagggaga

SEQ ID NO: 555755 - RNA, 22 nt, Human
ugaagggggagauauaugugug

SEQ ID NO: 555756 - RNA, 22 nt, Human
gcaaaggcuucuuuuauucucc

SEQ ID NO: 555757 - RNA, 22 nt, Human
ucaucucagggcgacaucaugu

SEQ ID NO: 555758 - RNA, 22 nt, Human
aauauuucaaaaggaaacacag

SEQ ID NO: 555759 - RNA, 22 nt, Human
ugccuagaacuuuauucuuuau

SEQ ID NO: 555760 - RNA, 22 nt, Human
aguuacauucugagcugaguag

SEQ ID NO: 555761 - RNA, 22 nt, Human
uagagaaaagcagggaucagga

SEQ ID NO: 555762 - RNA, 22 nt, Human
gcacugaaugccaaaguguagg

SEQ ID NO: 555763 - RNA, 22 nt, Human
cccagcucucgcacuuacuagc

SEQ ID NO: 555764 - RNA, 22 nt, Human
aguaauaauuuauauuagggag

SEQ ID NO: 555765 - RNA, 22 nt, Human
ucccauauauguuuauauugga

SEQ ID NO: 555766 - RNA, 22 nt, Human
gugaagguagacugggcuuccu

SEQ ID NO: 555767 - RNA, 22 nt, Human
uugaaauauggauugaccuuga

SEQ ID NO: 555768 - RNA, 23 nt, Human
gggggcugguugacucucugcag

SEQ ID NO: 555769 - RNA, 22 nt, Human
gagcucagcacuaaaaucaugu

SEQ ID NO: 555770 - RNA, 22 nt, Human
caaggccaguuucuccuaguca

SEQ ID NO: 555771 - RNA, 18 nt, Human
aggccagcccugcuacug

SEQ ID NO: 555772 - RNA, 22 nt, Human
uggcucagcgcggccuggucuu

SEQ ID NO: 555773 - RNA, 22 nt, Human
cugucaaauggaaacuuauccu

SEQ ID NO: 555774 - RNA, 22 nt, Human
agaggcugggaaggguccccgg

SEQ ID NO: 555775 - RNA, 21 nt, Human
uacagaugaggagaccaaggc

SEQ ID NO: 555776 - RNA, 22 nt, Human
aaggaggaauuucagggugaau

SEQ ID NO: 555777 - RNA, 22 nt, Human
aucagagaaguuucacuggcau

SEQ ID NO: 555778 - RNA, 22 nt, Human
uuauuacuguauuaauccagag

SEQ ID NO: 555779 - RNA, 22 nt, Human
uggagcugauacagcuggcuuu

SEQ ID NO: 555780 - RNA, 22 nt, Human
ugcugccagagagacagggacu

SEQ ID NO: 555781 - RNA, 22 nt, Human
gcugcagcccugcggaucacuu

SEQ ID NO: 555782 - RNA, 18 nt, Human
aguguuaaguaaguagca

SEQ ID NO: 555783 - RNA, 22 nt, Human
ccaccagcagugugcaaggauu

SEQ ID NO: 555784 - RNA, 22 nt, Human
cacuggggugggccugguagag

SEQ ID NO: 555785 - RNA, 22 nt, Human
ucucugagacaguagccucugc

SEQ ID NO: 555786 - RNA, 22 nt, Human
cauuugaaauucuuagaacaaa

SEQ ID NO: 555787 - RNA, 22 nt, Human
uggcaggcaaguucagcuccac

SEQ ID NO: 555788 - RNA, 22 nt, Human
acauaugcucaucugcauuccc

SEQ ID NO: 555789 - RNA, 22 nt, Human
gcugcccaggguggagccggcu

SEQ ID NO: 555790 - RNA, 22 nt, Human
ucagagucuuaacuauucagag

SEQ ID NO: 555791 - RNA, 22 nt, Human
gaauucugggagagaucugaca

SEQ ID NO: 555792 - RNA, 22 nt, Human
gagcagagacaguacaacuggc

SEQ ID NO: 555793 - RNA, 22 nt, Human
caauuuuauugguccaaauaca

SEQ ID NO: 555794 - RNA, 22 nt, Human
aucacccaagcuggagugcagu

SEQ ID NO: 555795 - RNA, 22 nt, Human
gcuggagguuucaccugaguuu

SEQ ID NO: 555796 - RNA, 22 nt, Human
acuucuugggacccuggcaccg

SEQ ID NO: 555797 - RNA, 22 nt, Human
agaagcugacagaugcagcagg

SEQ ID NO: 555798 - RNA, 22 nt, Human
acugagagcguguacaaacuua

SEQ ID NO: 555799 - RNA, 22 nt, Human
acuuccuguguuggucuugcug

SEQ ID NO: 555800 - RNA, 22 nt, Human
gaguagguugucagacuccaaa

SEQ ID NO: 555801 - RNA, 22 nt, Human
uguggcuuaagaaugccuuuaa

SEQ ID NO: 555802 - RNA, 22 nt, Human
ugacacauuaaaugcucacaaa

SEQ ID NO: 555803 - RNA, 22 nt, Human
guuugcauaaaguggaugcagg

SEQ ID NO: 555804 - RNA, 22 nt, Human
agcagcugggcucagagcuggg

SEQ ID NO: 555805 - RNA, 22 nt, Human
aaaguuacuaucacaaugaaau

SEQ ID NO: 555806 - RNA, 22 nt, Human
gacucuuucaaacagaaagcca

SEQ ID NO: 555807 - RNA, 22 nt, Human
uuauuuauggcacuguuggugg

SEQ ID NO: 555808 - RNA, 22 nt, Human
aucaguuuauacuuauaaaucu

SEQ ID NO: 555809 - RNA, 22 nt, Human
uucuuccucagcagggcugccu

SEQ ID NO: 555810 - RNA, 22 nt, Human
cuguagccaguuuggccucacc

SEQ ID NO: 555811 - RNA, 20 nt, Human
gcccaagguccagaaggggg

SEQ ID NO: 555812 - RNA, 22 nt, Human
agccuggccugggcaggcacau

SEQ ID NO: 555813 - RNA, 22 nt, Human
uggggugggcaugcgcuguccu

SEQ ID NO: 555814 - RNA, 22 nt, Human
uuuuuauaugaaggauagugcg

SEQ ID NO: 555815 - RNA, 22 nt, Human
aagaauguucauuaaacuguug

SEQ ID NO: 555816 - RNA, 23 nt, Human
ugcugggguaguuuguggcacag

SEQ ID NO: 555817 - RNA, 22 nt, Human
aagcccagaugagaucccugga

SEQ ID NO: 555818 - RNA, 22 nt, Human
acauucauggguuuuacauuau

SEQ ID NO: 555819 - RNA, 22 nt, Human
cugaggcacagugaacuucucc

SEQ ID NO: 555820 - RNA, 22 nt, Human
guguccuuauaagaagagaugc

SEQ ID NO: 555821 - RNA, 22 nt, Human
cagagcugcacauucuaugaug

SEQ ID NO: 555822 - RNA, 22 nt, Human
aagcuggaacaucuugaggaag

SEQ ID NO: 555823 - RNA, 22 nt, Human
cuguaugaaauugucauuuuua

SEQ ID NO: 555824 - RNA, 17 nt, Human
auccccagcaucuagaa

SEQ ID NO: 555825 - RNA, 22 nt, Human
ucagauggaaugaugccacugc

SEQ ID NO: 555826 - RNA, 21 nt, Human
ucucugggcccuccugugggg

SEQ ID NO: 555827 - RNA, 22 nt, Human
uuguguaagaugcaauauggua

SEQ ID NO: 555828 - RNA, 22 nt, Human
uggggaccagauuagaccaugg

SEQ ID NO: 555829 - RNA, 22 nt, Human
ccaguuaguuaaaggcgcagua

SEQ ID NO: 555830 - RNA, 22 nt, Human
acauuucuucccuuuagcagaa

SEQ ID NO: 555831 - RNA, 19 nt, Human
caaggccaccauuucuccg

SEQ ID NO: 555832 - RNA, 22 nt, Human
uuuaccaaauagauuaugucag

SEQ ID NO: 555833 - RNA, 22 nt, Human
acagugugaugggccugccuga

SEQ ID NO: 555834 - RNA, 22 nt, Human
gcugggcucugucaugccuucc

SEQ ID NO: 555835 - RNA, 22 nt, Human
agucucuugcacauuguauuaa

SEQ ID NO: 555836 - RNA, 22 nt, Human
uauuugaaggcauacauuuuga

SEQ ID NO: 555837 - RNA, 20 nt, Human
gccugagcuauugccaggau

SEQ ID NO: 555838 - RNA, 22 nt, Human
ccccaggcagggccuaacagag

SEQ ID NO: 555839 - RNA, 22 nt, Human
agcugggaggugggcagugaga

SEQ ID NO: 555840 - RNA, 22 nt, Human
aaauuaucaugggggagaaaca

SEQ ID NO: 555841 - RNA, 22 nt, Human
cuuauuuuaagucaguuugggu

SEQ ID NO: 555842 - RNA, 22 nt, Human
cagucucuugcuucauuaguug

SEQ ID NO: 555843 - RNA, 20 nt, Human
agaaucugacccagagagac

SEQ ID NO: 555844 - RNA, 22 nt, Human
ucaguuuuguauguuguaaguc

SEQ ID NO: 555845 - RNA, 22 nt, Human
gcugcucugugacagccuccgg

SEQ ID NO: 555846 - RNA, 22 nt, Human
gaggagcuggcagcgucuccgc

SEQ ID NO: 555847 - RNA, 22 nt, Human
aaggcaguuaauuuggcuagaa

SEQ ID NO: 555848 - RNA, 22 nt, Human
cagacuugacggcagcugcuuu

SEQ ID NO: 555849 - RNA, 22 nt, Human
uuguaagauggauaggaacagc

SEQ ID NO: 555850 - RNA, 22 nt, Human
auuuuuccauucucuguuagua

SEQ ID NO: 555851 - RNA, 22 nt, Human
cuuucacaguccugacugagcg

SEQ ID NO: 555852 - RNA, 22 nt, Human
acagaagugucuuuuucauuca

SEQ ID NO: 555853 - RNA, 22 nt, Human
caaauucucacccuguuugauu

SEQ ID NO: 555854 - RNA, 22 nt, Human
agccagggcugcgagcagacag

SEQ ID NO: 555855 - RNA, 22 nt, Human
guuugaaugcaguaugcauuuu

SEQ ID NO: 555856 - RNA, 22 nt, Human
uuaaagcaguuuguauacaugg

SEQ ID NO: 555857 - RNA, 22 nt, Human
auucaguguaguuauuaucuuu

SEQ ID NO: 555858 - RNA, 22 nt, Human
uacuguuuucuuuauaguacag

SEQ ID NO: 555859 - RNA, 22 nt, Human
acucaguacaucuggaguuggc

SEQ ID NO: 555860 - RNA, 22 nt, Human
aggccucacucucagagcuucu

SEQ ID NO: 555861 - RNA, 22 nt, Human
aggugacugguuuaucuggcag

SEQ ID NO: 555862 - RNA, 22 nt, Human
agggacuuguguccuauguaug

SEQ ID NO: 555863 - RNA, 21 nt, Human
auuugcauuaaaauauuacgc

SEQ ID NO: 555864 - RNA, 22 nt, Human
uccuuucccuuuccauccuggc

SEQ ID NO: 555865 - RNA, 19 nt, Human
ugucacugucauggcccag

SEQ ID NO: 555866 - RNA, 19 nt, Human
gggguggcuggggcuccag

SEQ ID NO: 555867 - RNA, 22 nt, Human
auguccagccaaccacuggauu

SEQ ID NO: 555868 - RNA, 20 nt, Human
gcagggcaagggauaugaaa

SEQ ID NO: 555869 - RNA, 22 nt, Human
aguggcagagguugacugcagu

SEQ ID NO: 555870 - RNA, 22 nt, Human
auuugcuuuaagguauaaaagg

SEQ ID NO: 555871 - RNA, 22 nt, Human
aguuuuucuccccuggcuucau

SEQ ID NO: 555872 - RNA, 22 nt, Human
acuuucaauucacugagauaua

SEQ ID NO: 555873 - RNA, 22 nt, Human
agcaguggugugaggagggcuc

SEQ ID NO: 555874 - RNA, 22 nt, Human
ccagugcauaaucaauacagcc

SEQ ID NO: 555875 - RNA, 22 nt, Human
gaguaagagcuggcuuuggugu

SEQ ID NO: 555876 - RNA, 22 nt, Human
agucucuuuaaucacagugucu

SEQ ID NO: 555877 - RNA, 22 nt, Human
uuaaagcacuaaaugaugaggg

SEQ ID NO: 555878 - RNA, 22 nt, Human
uaccaaaaagugagccccagag

SEQ ID NO: 555879 - RNA, 22 nt, Human
gcaggggcuacucugagcuucc

SEQ ID NO: 555880 - RNA, 22 nt, Human
aggcucaguuugguuuccauug

SEQ ID NO: 555881 - RNA, 22 nt, Human
aaugaacaacuugauuuuugcc

SEQ ID NO: 555882 - RNA, 22 nt, Human
ucuguuuuggucaccuuuauau

SEQ ID NO: 555883 - RNA, 22 nt, Human
gauacaaaauauaaauggagag

SEQ ID NO: 555884 - RNA, 20 nt, Human
aguaccuuuuguauguuacc

SEQ ID NO: 555885 - RNA, 22 nt, Human
cuagagggauguuaggauagca

SEQ ID NO: 555886 - RNA, 22 nt, Human
cagaaacagagaaauauuggcu

SEQ ID NO: 555887 - RNA, 22 nt, Human
uuugagaaaggggauuuaauuc

SEQ ID NO: 555888 - RNA, 22 nt, Human
agccucucagagugcugggauu

SEQ ID NO: 555889 - RNA, 22 nt, Human
ugccuggaugugcuggccucac

SEQ ID NO: 555890 - RNA, 22 nt, Human
acacaguggugagucuggaccu

SEQ ID NO: 555891 - RNA, 22 nt, Human
gagaagcagguuuagcagacaa

SEQ ID NO: 555892 - RNA, 22 nt, Human
uguuucaaaacagugauaauuu

SEQ ID NO: 555893 - RNA, 22 nt, Human
acuugaaaccuuggcaaacaau

SEQ ID NO: 555894 - RNA, 19 nt, Human
aucuuuagcaacuuucaaa

SEQ ID NO: 555895 - RNA, 22 nt, Human
uuacaaagcguugagacaagua

SEQ ID NO: 555896 - RNA, 22 nt, Human
gcuggcugguccagcaggggcu

SEQ ID NO: 555897 - RNA, 22 nt, Human
ugccugcugcuaagcucuuugu

SEQ ID NO: 555898 - RNA, 22 nt, Human
ccugagcuggaagagcuugugc

SEQ ID NO: 555899 - RNA, 22 nt, Human
agccucaguuucaggccuccuc

SEQ ID NO: 555900 - RNA, 22 nt, Human
uaccaaaagcuuguuucauaca

SEQ ID NO: 555901 - RNA, 22 nt, Human
uagcagagauaugggcauagau

SEQ ID NO: 555902 - RNA, 21 nt, Human
ucagggaagugugcagaaggg

SEQ ID NO: 555903 - RNA, 22 nt, Human
gcuggcagguccaagauagagc

SEQ ID NO: 555904 - RNA, 22 nt, Human
uuuaaauuauaguuaaugucug

SEQ ID NO: 555905 - RNA, 22 nt, Human
acacugugucuagcauuuuaca

SEQ ID NO: 555906 - RNA, 22 nt, Human
ggcucugcuggauugaggccag

SEQ ID NO: 555907 - RNA, 17 nt, Human
cagggcugucugccuag

SEQ ID NO: 555908 - RNA, 22 nt, Human
aggcagcaagauuauuuaaucc

SEQ ID NO: 555909 - RNA, 22 nt, Human
cagcucuuugaguauuccauuu

SEQ ID NO: 555910 - RNA, 22 nt, Human
cugcagccacgagucacagccc

SEQ ID NO: 555911 - RNA, 19 nt, Human
acucaagucuaaugaaauc

SEQ ID NO: 555912 - RNA, 22 nt, Human
agugaggucaggaucucaggga

SEQ ID NO: 555913 - RNA, 22 nt, Human
cagcugccuaugaccuagccuc

SEQ ID NO: 555914 - RNA, 22 nt, Human
cccucugccucugaguaggaca

SEQ ID NO: 555915 - RNA, 22 nt, Human
acauuugagaugccuuuuaggu

SEQ ID NO: 555916 - RNA, 22 nt, Human
auuuccaagguaauuuugagua

SEQ ID NO: 555917 - RNA, 19 nt, Human
gcugugggacagcagggug

SEQ ID NO: 555918 - RNA, 22 nt, Human
cccuggaggagcuuagagcuug

SEQ ID NO: 555919 - RNA, 22 nt, Human
ugacauuucgguguaugugaug

SEQ ID NO: 555920 - RNA, 22 nt, Human
uuucagagguaugcugcuuauc

SEQ ID NO: 555921 - RNA, 22 nt, Human
uugugucugggggagugacauc

SEQ ID NO: 555922 - RNA, 22 nt, Human
agggcuguuuuuggcaccuggg

SEQ ID NO: 555923 - RNA, 22 nt, Human
cacuucaauuaacuucagcauu

SEQ ID NO: 555924 - RNA, 22 nt, Human
gagcagggagacaacucuggug

SEQ ID NO: 555925 - RNA, 22 nt, Human
cauguaaagcacuucauaacag

SEQ ID NO: 555926 - RNA, 19 nt, Human
acuugaaagcagagaguuu

SEQ ID NO: 555927 - RNA, 22 nt, Human
acagcagugcacagagaacccu

SEQ ID NO: 555928 - RNA, 20 nt, Human
acauuugaagucgcauuucu

SEQ ID NO: 555929 - RNA, 22 nt, Human
gggagcugagaaacaacauucu

SEQ ID NO: 555930 - RNA, 22 nt, Human
gcaccugcaggaugagccaggg

SEQ ID NO: 555931 - RNA, 22 nt, Human
gcccuggauguacaggcauguu

SEQ ID NO: 555932 - RNA, 22 nt, Human
ccugggcuuacgaccucugacu

SEQ ID NO: 555933 - RNA, 22 nt, Human
ugccuuuuguuagggcugccag

SEQ ID NO: 555934 - RNA, 22 nt, Human
agcagggcuuugucucugugaa

SEQ ID NO: 555935 - RNA, 22 nt, Human
cagggcagaacauauagauagu

SEQ ID NO: 555936 - RNA, 22 nt, Human
uuuccuaaggcucauuuuaaaa

SEQ ID NO: 555937 - RNA, 17 nt, Human
gagaugcuaaucugauc

SEQ ID NO: 555938 - RNA, 22 nt, Human
ugguccaggguguaguacagag

SEQ ID NO: 555939 - RNA, 22 nt, Human
ggccaggcugcccugggagcag

SEQ ID NO: 555940 - RNA, 21 nt, Human
ucucugugucuuuaagcugga

SEQ ID NO: 555941 - RNA, 22 nt, Human
aauaagaauuuacuugucaaga

SEQ ID NO: 555942 - RNA, 18 nt, Human
cugaggcccagagagggc

SEQ ID NO: 555943 - RNA, 22 nt, Human
ucagagagcuggugggcagagg

SEQ ID NO: 555944 - RNA, 22 nt, Human
aguacaaaugcagccagaguag

SEQ ID NO: 555945 - RNA, 22 nt, Human
acagcuguauucaaguugcaag

SEQ ID NO: 555946 - RNA, 19 nt, Human
ugcacacagauaaguaucu

SEQ ID NO: 555947 - RNA, 22 nt, Human
uuucuacagcuggugcaacuuu

SEQ ID NO: 555948 - RNA, 22 nt, Human
aaacaguauuaucaauauauuu

SEQ ID NO: 555949 - RNA, 22 nt, Human
acaaauccagugaacuccagug

SEQ ID NO: 555950 - RNA, 22 nt, Human
cccaggagagaggccaguuggc

SEQ ID NO: 555951 - RNA, 22 nt, Human
aagugugggaaguugcuaaaau

SEQ ID NO: 555952 - RNA, 22 nt, Human
cugcagagguugguucuaagau

SEQ ID NO: 555953 - RNA, 22 nt, Human
cagcugagcaucacuagucugg

SEQ ID NO: 555954 - RNA, 22 nt, Human
gccuucccuggcuaggcaagca

SEQ ID NO: 555955 - RNA, 22 nt, Human
gcugccuucccggaaugucauc

SEQ ID NO: 555956 - RNA, 22 nt, Human
caguuacauuaauaaugcacau

SEQ ID NO: 555957 - RNA, 22 nt, Human
ccacucugcugugcuccaugau

SEQ ID NO: 555958 - RNA, 20 nt, Human
agaaauauugaguucagagg

SEQ ID NO: 555959 - RNA, 22 nt, Human
aacaagaagagagggacguaau

SEQ ID NO: 555960 - RNA, 23 nt, Human
aggcagagccaaggucaaaaccc

SEQ ID NO: 555961 - RNA, 22 nt, Human
agcugcccccagggcugugcuu

SEQ ID NO: 555962 - RNA, 19 nt, Human
ugcagaggguaggaaggcc

SEQ ID NO: 555963 - RNA, 22 nt, Human
acaagaguaucuuugacuuuag

SEQ ID NO: 555964 - RNA, 22 nt, Human
ugcaggcuggcagauaucucau

SEQ ID NO: 555965 - RNA, 22 nt, Human
gccuuggccaacaccuugcaaa

SEQ ID NO: 555966 - RNA, 22 nt, Human
cuauuauuuccucaucuauaaa

SEQ ID NO: 555967 - RNA, 22 nt, Human
caaauauuccagguacaucccu

SEQ ID NO: 555968 - RNA, 18 nt, Human
ugagaggcuauuuuuugc

SEQ ID NO: 555969 - RNA, 22 nt, Human
agggagaacaguugcagcagac

SEQ ID NO: 555970 - RNA, 21 nt, Human
gccugcagaccccaccaggcu

SEQ ID NO: 555971 - RNA, 22 nt, Human
cagcagugugcaggugugcugg

SEQ ID NO: 555972 - RNA, 22 nt, Human
cagcaggcagccauuucacugu

SEQ ID NO: 555973 - RNA, 22 nt, Human
auugacaagugagcugggcugc

SEQ ID NO: 555974 - RNA, 22 nt, Human
aacaucaggaucuuguuacagu

SEQ ID NO: 555975 - RNA, 22 nt, Human
gauuuuuauauaaagugagaaa

SEQ ID NO: 555976 - RNA, 22 nt, Human
ucacugucugaaagaaauggcc

SEQ ID NO: 555977 - RNA, 22 nt, Human
aagucauagucuaacccagcca

SEQ ID NO: 555978 - RNA, 22 nt, Human
gccugggugaauuugauccuaa

SEQ ID NO: 555979 - RNA, 22 nt, Human
ugggcucuggagggccuaggau

SEQ ID NO: 555980 - RNA, 22 nt, Human
ucagcuuucucaaagaagcugg

SEQ ID NO: 555981 - RNA, 22 nt, Human
aaaaagagaaaugcucuagucc

SEQ ID NO: 555982 - RNA, 22 nt, Human
uggcugcucaagggaggaggcu

SEQ ID NO: 555983 - RNA, 23 nt, Human
gccugcugucacagcgggcccag

SEQ ID NO: 555984 - RNA, 21 nt, Human
agcagguguaaaggaggaaau

SEQ ID NO: 555985 - RNA, 22 nt, Human
cagagcagcagagcuuccaugg

SEQ ID NO: 555986 - RNA, 21 nt, Human
uuagcaaagcaaacacaugcu

SEQ ID NO: 555987 - RNA, 22 nt, Human
aaaguaacaauaagguucuauu

SEQ ID NO: 555988 - RNA, 22 nt, Human
acagagcacauagauuggaguu

SEQ ID NO: 555989 - RNA, 22 nt, Human
cagacagcugcuuucuugcugu

SEQ ID NO: 555990 - RNA, 22 nt, Human
ccagggugcucuguggcgucgc

SEQ ID NO: 555991 - RNA, 22 nt, Human
ugcaggugcugugucaagagag

SEQ ID NO: 555992 - RNA, 22 nt, Human
uucuuucccuuccagcagcucc

SEQ ID NO: 555993 - RNA, 17 nt, Human
uuccccugaccaagccu

SEQ ID NO: 555994 - RNA, 22 nt, Human
guggcaguugcuguggcaauaa

SEQ ID NO: 555995 - RNA, 22 nt, Human
ggcagaagugaugggauauaac

SEQ ID NO: 555996 - RNA, 22 nt, Human
acugaaggcuuucccaagguca

SEQ ID NO: 555997 - RNA, 22 nt, Human
ccugccuggguucaaaucccag

SEQ ID NO: 555998 - RNA, 22 nt, Human
gugccugcugcagcugagcagu

SEQ ID NO: 555999 - RNA, 22 nt, Human
ugcuuaauauugugauguaaua

SEQ ID NO: 556000 - RNA, 20 nt, Human
augaaauuccuguuuucuga

SEQ ID NO: 556001 - RNA, 22 nt, Human
uaauccaggguauucuaguuuc

SEQ ID NO: 556002 - RNA, 22 nt, Human
aagcacaucucaaacuucaucu

SEQ ID NO: 556003 - RNA, 22 nt, Human
ugggccaggugcagugcuuuag

SEQ ID NO: 556004 - RNA, 17 nt, Human
ggcaggugcggggccgc

SEQ ID NO: 556005 - RNA, 22 nt, Human
cuggcugcuggccugaggaugc

SEQ ID NO: 556006 - RNA, 20 nt, Human
gaggcugaaguguuuuugcu

SEQ ID NO: 556007 - RNA, 22 nt, Human
auccuuaauuuccugggccuca

SEQ ID NO: 556008 - RNA, 22 nt, Human
cugcucuguuaauuaaacuuug

SEQ ID NO: 556009 - RNA, 22 nt, Human
ugucuguggcaauuguggguaa

SEQ ID NO: 556010 - RNA, 22 nt, Human
gggagcugguuccugcccucca

SEQ ID NO: 556011 - RNA, 22 nt, Human
agcacccucagccuuauccaga

SEQ ID NO: 556012 - RNA, 22 nt, Human
gcuucuggaagcauaugcaaga

SEQ ID NO: 556013 - RNA, 22 nt, Human
aaaggcuaugagauagaagaua

SEQ ID NO: 556014 - RNA, 22 nt, Human
gggcugcuguagagaacauguu

SEQ ID NO: 556015 - RNA, 22 nt, Human
ggccccuggcaccaggcugauu

SEQ ID NO: 556016 - RNA, 22 nt, Human
caggcuggagugaguguagugg

SEQ ID NO: 556017 - RNA, 22 nt, Human
acaaugcaccuauuuuaaaacu

SEQ ID NO: 556018 - RNA, 20 nt, Human
gcacugaagguuccagggga

SEQ ID NO: 556019 - RNA, 22 nt, Human
aaauauaguaaaugcauaguuc

SEQ ID NO: 556020 - RNA, 22 nt, Human
aaugucacauacaauggcaagu

SEQ ID NO: 556021 - RNA, 22 nt, Human
acauaauagguaccugaauaau

SEQ ID NO: 556022 - RNA, 22 nt, Human
gcagggacaaggcagguguucu

SEQ ID NO: 556023 - RNA, 22 nt, Human
cagaguguugaccauaagccca

SEQ ID NO: 556024 - RNA, 23 nt, Human
cagggcccugcucaauuucucca

SEQ ID NO: 556025 - RNA, 22 nt, Human
ucaggaggccaccaggaccugu

SEQ ID NO: 556026 - RNA, 22 nt, Human
gagcugcaugcaacuguuuaaa

SEQ ID NO: 556027 - RNA, 22 nt, Human
aggaggugcuguuuguccugga

SEQ ID NO: 556028 - RNA, 22 nt, Human
uuccaagucuaaguuauaaauc

SEQ ID NO: 556029 - RNA, 22 nt, Human
gagaucgguaaagagcaugcac

SEQ ID NO: 556030 - RNA, 22 nt, Human
gcugggagaggcccugaaguga

SEQ ID NO: 556031 - RNA, 22 nt, Human
gcugccuccugaaagcgcucug

SEQ ID NO: 556032 - RNA, 22 nt, Human
uuucuucuuucccagugauggg

SEQ ID NO: 556033 - RNA, 22 nt, Human
uccuugaaugaauguucucucc

SEQ ID NO: 556034 - RNA, 22 nt, Human
ggaggccaucagggagggcauu

SEQ ID NO: 556035 - RNA, 22 nt, Human
cagcugugcuguauuaagcucu

SEQ ID NO: 556036 - RNA, 22 nt, Human
cagagcauaauugacaugaggu

SEQ ID NO: 556037 - RNA, 22 nt, Human
gcucugagauugagccuuuggu

SEQ ID NO: 556038 - RNA, 22 nt, Human
aucuagaacuuaaagucaguca

SEQ ID NO: 556039 - RNA, 22 nt, Human
ccuggcagcuguuuggcuuggc

SEQ ID NO: 556040 - RNA, 22 nt, Human
cuggaaagagauggcaggguuu

SEQ ID NO: 556041 - RNA, 22 nt, Human
auaacagacuuagaguuacaag

SEQ ID NO: 556042 - RNA, 22 nt, Human
cuuuccaaugcauuuccaaugu

SEQ ID NO: 556043 - RNA, 22 nt, Human
uggcacagggcuuggucgcuca

SEQ ID NO: 556044 - RNA, 22 nt, Human
ugaagaauguugcagugagcau

SEQ ID NO: 556045 - RNA, 22 nt, Human
cuugggcucagacuugaggaca

SEQ ID NO: 556046 - RNA, 22 nt, Human
gugugcagggcugccugugccg

SEQ ID NO: 556047 - RNA, 18 nt, Human
uuuauauggauagagacc

SEQ ID NO: 556048 - RNA, 22 nt, Human
ucuggggagggagccacagguc

SEQ ID NO: 556049 - RNA, 22 nt, Human
uggcucucagcucccagcagcc

SEQ ID NO: 556050 - RNA, 22 nt, Human
guaaaucagugucauuuuagaa

SEQ ID NO: 556051 - RNA, 22 nt, Human
ugauccuauuucaguguauguu

SEQ ID NO: 556052 - RNA, 22 nt, Human
uagagcuauuuagagcauuuua

SEQ ID NO: 556053 - RNA, 21 nt, Human
auaugaguuucagauguugcu

SEQ ID NO: 556054 - RNA, 22 nt, Human
ucccagagacagagccuccucc

SEQ ID NO: 556055 - RNA, 22 nt, Human
uuuuuguucugauuauacuggu

SEQ ID NO: 556056 - RNA, 22 nt, Human
cagggcaguaacgggaacaucu

SEQ ID NO: 556057 - RNA, 22 nt, Human
agaaaucacuuagaggaaguga

SEQ ID NO: 556058 - RNA, 22 nt, Human
cacagugcaugaugggcagaag

SEQ ID NO: 556059 - RNA, 19 nt, Human
ggcuggaguggccaucugu

SEQ ID NO: 556060 - RNA, 22 nt, Human
guaaauuauuucaagaucaucu

SEQ ID NO: 556061 - RNA, 22 nt, Human
ucugggcugguugugcuugcuu

SEQ ID NO: 556062 - RNA, 22 nt, Human
uauuaggguuuugaagguuugu

SEQ ID NO: 556063 - RNA, 22 nt, Human
caggagcccguugcuccggcgg

SEQ ID NO: 556064 - RNA, 22 nt, Human
ccugcuggaccucaacacauuu

SEQ ID NO: 556065 - RNA, 22 nt, Human
acagggcagaaauguugcaucu

SEQ ID NO: 556066 - RNA, 22 nt, Human
cggggcuggcacaggugaccac

SEQ ID NO: 556067 - RNA, 22 nt, Human
agagguagagguugcagugagc

SEQ ID NO: 556068 - RNA, 22 nt, Human
ucugagagucuuucuucaagug

SEQ ID NO: 556069 - RNA, 22 nt, Human
acacucacccucccacugccug

SEQ ID NO: 556070 - RNA, 19 nt, Human
acagaguccagaggaaagg

SEQ ID NO: 556071 - RNA, 22 nt, Human
caguagaauuauuauaaaacau

SEQ ID NO: 556072 - RNA, 18 nt, Human
cugccccuucucugagau

SEQ ID NO: 556073 - RNA, 22 nt, Human
ccagcugucugguuccagagcc

SEQ ID NO: 556074 - RNA, 22 nt, Human
ugcuuaaaaugaugauuauuuu

SEQ ID NO: 556075 - RNA, 22 nt, Human
ugugucagagguagagauggca

SEQ ID NO: 556076 - RNA, 21 nt, Human
aggucagcccagcucuggaag

SEQ ID NO: 556077 - RNA, 22 nt, Human
aacaggaggccuuccaguccag

SEQ ID NO: 556078 - RNA, 22 nt, Human
uccaggcacgaggcccugugca

SEQ ID NO: 556079 - RNA, 22 nt, Human
guucagcuuacaaaauacaccu

SEQ ID NO: 556080 - RNA, 22 nt, Human
agugaaauuccuggucuuuguu

SEQ ID NO: 556081 - RNA, 22 nt, Human
ccagcucugcagggccuggggu

SEQ ID NO: 556082 - RNA, 23 nt, Human
auaaggcauaaagguacauugga

SEQ ID NO: 556083 - RNA, 22 nt, Human
cagccagguucaaguccuuaua

SEQ ID NO: 556084 - RNA, 22 nt, Human
auaugaagaauuccaauuugga

SEQ ID NO: 556085 - RNA, 22 nt, Human
ucagcuuauauuuuuaguguaa

SEQ ID NO: 556086 - RNA, 22 nt, Human
gggaucagaaacauagcccuga

SEQ ID NO: 556087 - RNA, 22 nt, Human
ggacuggguaggagcccagggc

SEQ ID NO: 556088 - RNA, 22 nt, Human
cuggagcagguuuaggaguccc

SEQ ID NO: 556089 - RNA, 20 nt, Human
cugagcugagcuccaugggu

SEQ ID NO: 556090 - RNA, 22 nt, Human
cucauacauaugccauuccugc

SEQ ID NO: 556091 - RNA, 22 nt, Human
gcuccugcccucuugcaauucc

SEQ ID NO: 556092 - RNA, 22 nt, Human
aaguccagguccucauuccauc

SEQ ID NO: 556093 - RNA, 22 nt, Human
uauuggugggggcagagagaga

SEQ ID NO: 556094 - RNA, 22 nt, Human
gcccagcacuccucucugacau

SEQ ID NO: 556095 - RNA, 22 nt, Human
auguuuguugaacaucuacugc

SEQ ID NO: 556096 - RNA, 22 nt, Human
auucccaucgucaacuucacug

SEQ ID NO: 556097 - RNA, 22 nt, Human
aggccagaugucgggcuagaag

SEQ ID NO: 556098 - RNA, 22 nt, Human
ccagagaggggaagggcuugcc

SEQ ID NO: 556099 - RNA, 22 nt, Human
uaggauuucucuuuuugcaacu

SEQ ID NO: 556100 - RNA, 22 nt, Human
gacagcagacagccuggccccu

SEQ ID NO: 556101 - RNA, 22 nt, Human
uaggaaaaagaggcuggcaagg

SEQ ID NO: 556102 - RNA, 22 nt, Human
auacaaaauauauacuggagac

SEQ ID NO: 556103 - RNA, 22 nt, Human
uagaaauguuagauguauugag

SEQ ID NO: 556104 - RNA, 22 nt, Human
uaugugcaaauuaauugcuaga

SEQ ID NO: 556105 - RNA, 22 nt, Human
acaguuuaggaugagagaacac

SEQ ID NO: 556106 - RNA, 22 nt, Human
uccaggcuggaaaugucaaacu

SEQ ID NO: 556107 - RNA, 22 nt, Human
uuuuccucugcagagcaguuag

SEQ ID NO: 556108 - RNA, 22 nt, Human
accucugcaacccuggaauggg

SEQ ID NO: 556109 - RNA, 22 nt, Human
ucaggauccauagacucccaaa

SEQ ID NO: 556110 - RNA, 22 nt, Human
acuguucugcauguaccugagg

SEQ ID NO: 556111 - RNA, 23 nt, Human
gaggccacauuccccugcuugag

SEQ ID NO: 556112 - RNA, 22 nt, Human
gcacauaacugaccacaucuaa

SEQ ID NO: 556113 - RNA, 22 nt, Human
uaauaauuggcaauguugagca

SEQ ID NO: 556114 - RNA, 22 nt, Human
ucagggaaaacaucccgccuaa

SEQ ID NO: 556115 - RNA, 22 nt, Human
agcaagaaaucuucaguguucu

SEQ ID NO: 556116 - RNA, 22 nt, Human
augggaggaucacuugaggcca

SEQ ID NO: 556117 - RNA, 22 nt, Human
ugaguccaauaggggccuggaa

SEQ ID NO: 556118 - RNA, 22 nt, Human
uacuuuuuaugauaagaacuga

SEQ ID NO: 556119 - RNA, 22 nt, Human
cugggcaugaaaaggaugccag

SEQ ID NO: 556120 - RNA, 21 nt, Human
acugccugucuccauagucua

SEQ ID NO: 556121 - RNA, 20 nt, Human
cauauauaccuagaagugga

SEQ ID NO: 556122 - RNA, 22 nt, Human
aggcugagguaggaggaucgcu

SEQ ID NO: 556123 - RNA, 22 nt, Human
cgggcagauugggaagguucau

SEQ ID NO: 556124 - RNA, 22 nt, Human
agagccagcaagugaauaguga

SEQ ID NO: 556125 - RNA, 22 nt, Human
uagaaacccauguuuauucagu

SEQ ID NO: 556126 - RNA, 22 nt, Human
gaggcucagagggagcaugguc

SEQ ID NO: 556127 - RNA, 22 nt, Human
auucaaagcccaguaaacauug

SEQ ID NO: 556128 - RNA, 22 nt, Human
aggaggggcauagaaauguaau

SEQ ID NO: 556129 - RNA, 22 nt, Human
ggggaccuggccacccauccuu

SEQ ID NO: 556130 - RNA, 22 nt, Human
uguagcauguaaauugguuauu

SEQ ID NO: 556131 - RNA, 22 nt, Human
aggcucaggcaggaauggcgga

SEQ ID NO: 556132 - RNA, 22 nt, Human
ugcaggugccucuugagcuugu

SEQ ID NO: 556133 - RNA, 22 nt, Human
aaaauuauucauggcuuuugga

SEQ ID NO: 556134 - RNA, 22 nt, Human
gccugugccucagccugcagcc

SEQ ID NO: 556135 - RNA, 22 nt, Human
gcagcagaguuugggagauggu

SEQ ID NO: 556136 - RNA, 22 nt, Human
ugacauuuaucaaagaaauggu

SEQ ID NO: 556137 - RNA, 23 nt, Human
ugucauugugacuacagaaccag

SEQ ID NO: 556138 - RNA, 20 nt, Human
cuuuggcaaugagaacaggg

SEQ ID NO: 556139 - RNA, 18 nt, Human
gcugucugaggucugagg

SEQ ID NO: 556140 - RNA, 22 nt, Human
cuucaguguccucucuaguaga

SEQ ID NO: 556141 - RNA, 22 nt, Human
ggggcccuuguggcugcaggcc

SEQ ID NO: 556142 - RNA, 20 nt, Human
ccugggguacacuggcaugu

SEQ ID NO: 556143 - RNA, 22 nt, Human
aucauacacucacauaaacaga

SEQ ID NO: 556144 - RNA, 22 nt, Human
ucugaaauaggcuucuuuuggu

SEQ ID NO: 556145 - RNA, 22 nt, Human
aaggcagccucugccagccggg

SEQ ID NO: 556146 - RNA, 22 nt, Human
aucuggcuggauucuuagcguu

SEQ ID NO: 556147 - RNA, 23 nt, Human
cuguaugauguuaaguggaaagc

SEQ ID NO: 556148 - RNA, 22 nt, Human
aagauuauggcagauaacaauu

SEQ ID NO: 556149 - RNA, 22 nt, Human
uuauuccauagaagucaaggaa

SEQ ID NO: 556150 - RNA, 22 nt, Human
gccaggugcuaucccugcgcug

SEQ ID NO: 556151 - RNA, 22 nt, Human
cucuggaggccuaaggaagugg

SEQ ID NO: 556152 - RNA, 22 nt, Human
uaacacaugguuaguacacaau

SEQ ID NO: 556153 - RNA, 22 nt, Human
acuuuguugaagaauauguuag

SEQ ID NO: 556154 - RNA, 22 nt, Human
cccuggagggcagacagaugcc

SEQ ID NO: 556155 - RNA, 22 nt, Human
acagaggccgccucucucacgg

SEQ ID NO: 556156 - RNA, 22 nt, Human
aaucuggcucagaagaagauga

SEQ ID NO: 556157 - RNA, 22 nt, Human
ggcacacauggugguuggugaa

SEQ ID NO: 556158 - RNA, 22 nt, Human
uaccuugagccguugcugauga

SEQ ID NO: 556159 - RNA, 22 nt, Human
gcugccuguccugaggaguccg

SEQ ID NO: 556160 - RNA, 22 nt, Human
agcaucuggugagggccuaguu

SEQ ID NO: 556161 - RNA, 22 nt, Human
agugcaggcucgcuugugaggc

SEQ ID NO: 556162 - RNA, 22 nt, Human
cuauuauuagcaaaagguggau

SEQ ID NO: 556163 - RNA, 22 nt, Human
gccuggugugcgccgcgcagcu

SEQ ID NO: 556164 - RNA, 22 nt, Human
ccauacacacaccaaauuugua

SEQ ID NO: 556165 - RNA, 22 nt, Human
agugggcaugaucuggugucug

SEQ ID NO: 556166 - RNA, 22 nt, Human
cagcuuguuaccgagggagggu

SEQ ID NO: 556167 - RNA, 22 nt, Human
gaggcagcagaacauggaagag

SEQ ID NO: 556168 - RNA, 22 nt, Human
aaaggccacugcaagggaaggu

SEQ ID NO: 556169 - RNA, 22 nt, Human
uuuuuaagcuccuuugauguca

SEQ ID NO: 556170 - RNA, 22 nt, Human
aaucuguuuaguucugcguaug

SEQ ID NO: 556171 - RNA, 20 nt, Human
gcagugaucucaucggucug

SEQ ID NO: 556172 - RNA, 22 nt, Human
aaacuguaaacacagcaguaca

SEQ ID NO: 556173 - RNA, 22 nt, Human
gagcugccugaacaagcagcag

SEQ ID NO: 556174 - RNA, 22 nt, Human
uauuuuugccucucagauaaaa

SEQ ID NO: 556175 - RNA, 22 nt, Human
guccagaaagggcagugauuug

SEQ ID NO: 556176 - RNA, 22 nt, Human
auguuucaaauauauagaguug

SEQ ID NO: 556177 - RNA, 22 nt, Human
uauuuguuccagagauaaaaau

SEQ ID NO: 556178 - RNA, 22 nt, Human
guggcugcagagccagcaagcu

SEQ ID NO: 556179 - RNA, 22 nt, Human
aguggggagguccaggccaccc

SEQ ID NO: 556180 - RNA, 21 nt, Human
auacagaagguggcaaaguac

SEQ ID NO: 556181 - RNA, 22 nt, Human
uaguaacugguugaacaacugu

SEQ ID NO: 556182 - RNA, 22 nt, Human
cuggaaaggguccucauucugu

SEQ ID NO: 556183 - RNA, 22 nt, Human
aagugauucuagucaugauucu

SEQ ID NO: 556184 - RNA, 22 nt, Human
uaggaagagcuauaggucccca

SEQ ID NO: 556185 - RNA, 22 nt, Human
ccaggaggcagagguuacagug

SEQ ID NO: 556186 - RNA, 22 nt, Human
gagaaagcuucuuucccacagg

SEQ ID NO: 556187 - RNA, 23 nt, Human
aagaacuuugguccugcagaguc

SEQ ID NO: 556188 - RNA, 20 nt, Human
ucaggaugugcugagugaag

SEQ ID NO: 556189 - RNA, 23 nt, Human
gccaggaguggguagacuaaugc

SEQ ID NO: 556190 - RNA, 22 nt, Human
aacacuuuuuaguaaagauuga

SEQ ID NO: 556191 - RNA, 22 nt, Human
ucuaaagugagucauuucgacu

SEQ ID NO: 556192 - RNA, 22 nt, Human
cuguuucacguguuuaagccca

SEQ ID NO: 556193 - RNA, 20 nt, Human
cacaggccuugugagcagac

SEQ ID NO: 556194 - RNA, 22 nt, Human
ggcucuggugcccuggcuccca

SEQ ID NO: 556195 - RNA, 22 nt, Human
caggccuuaaggacucggagaa

SEQ ID NO: 556196 - RNA, 20 nt, Human
cugcucugcuuugcaggugg

SEQ ID NO: 556197 - RNA, 22 nt, Human
uccucacagucaacacuuugag

SEQ ID NO: 556198 - RNA, 22 nt, Human
uccugggauucugcauuucuaa

SEQ ID NO: 556199 - RNA, 22 nt, Human
gcccagccuccaagcuccaagg

SEQ ID NO: 556200 - RNA, 22 nt, Human
uggccugcccagagcagcucug

SEQ ID NO: 556201 - RNA, 22 nt, Human
uggacucaaguccaaguucacg

SEQ ID NO: 556202 - RNA, 22 nt, Human
ucucaggcuaccuugcacaagg

SEQ ID NO: 556203 - RNA, 22 nt, Human
uagaaaugcaguguacuguguc

SEQ ID NO: 556204 - RNA, 22 nt, Human
agacagcaggggagucugguuu

SEQ ID NO: 556205 - RNA, 22 nt, Human
accucagagaccucucaggugc

SEQ ID NO: 556206 - RNA, 18 nt, Human
cagaaaucacaccagcac

SEQ ID NO: 556207 - RNA, 22 nt, Human
gaauacauuggaaaucagaaua

SEQ ID NO: 556208 - RNA, 22 nt, Human
aucacaaaggucucagagcaca

SEQ ID NO: 556209 - RNA, 22 nt, Human
uucugggggaauacagcuauga

SEQ ID NO: 556210 - RNA, 20 nt, Human
acauuugaguaucaucuacu

SEQ ID NO: 556211 - RNA, 22 nt, Human
agcugugggauuugggugugcc

SEQ ID NO: 556212 - RNA, 20 nt, Human
acaaaugcauucugugacau

SEQ ID NO: 556213 - RNA, 22 nt, Human
ugcacacacucugcauauacuu

SEQ ID NO: 556214 - RNA, 22 nt, Human
uucuggagagaaaccuuacaaa

SEQ ID NO: 556215 - RNA, 22 nt, Human
ggcagcaguaggagcuaaucuu

SEQ ID NO: 556216 - RNA, 22 nt, Human
uggcugaggcacagcugccgcc

SEQ ID NO: 556217 - RNA, 22 nt, Human
gcuugaaaauucauagguauuu

SEQ ID NO: 556218 - RNA, 22 nt, Human
cuggcagcuucaggacacucgg

SEQ ID NO: 556219 - RNA, 22 nt, Human
uggagugaaguaaagaggacaa

SEQ ID NO: 556220 - RNA, 22 nt, Human
acagguggcacugcuguuacuc

SEQ ID NO: 556221 - RNA, 22 nt, Human
uuuuggucagguuggucucgaa

SEQ ID NO: 556222 - RNA, 22 nt, Human
agucugggagggaugccagugu

SEQ ID NO: 556223 - RNA, 22 nt, Human
uauucacagguucuggggauca

SEQ ID NO: 556224 - RNA, 22 nt, Human
aauuugacccaucuuggaauuu

SEQ ID NO: 556225 - RNA, 17 nt, Human
uggggaugguucaugag

SEQ ID NO: 556226 - RNA, 22 nt, Human
gcugggagucgcgucuguggcc

SEQ ID NO: 556227 - RNA, 22 nt, Human
gacuuucucuccucccaggugu

SEQ ID NO: 556228 - RNA, 22 nt, Human
cauuucaagcauugacuucuau

SEQ ID NO: 556229 - RNA, 22 nt, Human
agcccuuuccaauuugauuuau

SEQ ID NO: 556230 - RNA, 22 nt, Human
uuacagauggcaguuucuugag

SEQ ID NO: 556231 - RNA, 22 nt, Human
uacuuucaugucuauacauauu

SEQ ID NO: 556232 - RNA, 22 nt, Human
cgaggcucagagagggugacuu

SEQ ID NO: 556233 - RNA, 22 nt, Human
uacugugaauacaaaauaaauu

SEQ ID NO: 556234 - RNA, 23 nt, Human
auguuauuauuagcagucuugcc

SEQ ID NO: 556235 - RNA, 22 nt, Human
uccuggcucugcugccuccuag

SEQ ID NO: 556236 - RNA, 22 nt, Human
auguaguauuuggaaauguaaa

SEQ ID NO: 556237 - RNA, 22 nt, Human
cugucaguaggcucccaucauu

SEQ ID NO: 556238 - RNA, 22 nt, Human
aaggaagaggcagguuuugcug

SEQ ID NO: 556239 - RNA, 22 nt, Human
ggcaggugcuugucgaaggccu

SEQ ID NO: 556240 - RNA, 22 nt, Human
gcauuucauguagauugagaac

SEQ ID NO: 556241 - RNA, 20 nt, Human
aggccacugaaugccaauca

SEQ ID NO: 556242 - RNA, 22 nt, Human
ggaggcagaacuucccgucagu

SEQ ID NO: 556243 - RNA, 22 nt, Human
ugcaccauguaaguggccacgu

SEQ ID NO: 556244 - RNA, 22 nt, Human
cuugccuucuguuccuauagaa

SEQ ID NO: 556245 - RNA, 21 nt, Human
guauugcagaguuaugugcuc

SEQ ID NO: 556246 - RNA, 22 nt, Human
cauuguauugaggauacuuaag

SEQ ID NO: 556247 - RNA, 16 nt, Human
agcagggcgggaagga

SEQ ID NO: 556248 - RNA, 22 nt, Human
cuaaaauuaccuaccaguuuag

SEQ ID NO: 556249 - RNA, 22 nt, Human
uauuucagacacugaucuugca

SEQ ID NO: 556250 - RNA, 22 nt, Human
auucuucacuguuucagaauga

SEQ ID NO: 556251 - RNA, 22 nt, Human
gaaugcagauggcugguguaug

SEQ ID NO: 556252 - RNA, 22 nt, Human
gcugucaccaaagcaggcacug

SEQ ID NO: 556253 - RNA, 22 nt, Human
ucugggcuugguuagggcuguu

SEQ ID NO: 556254 - RNA, 22 nt, Human
uugcaaauucgucacuguuaaa

SEQ ID NO: 556255 - RNA, 22 nt, Human
aggcacugguccauuuucugca

SEQ ID NO: 556256 - RNA, 22 nt, Human
ugaaagcacaaguucuaacagg

SEQ ID NO: 556257 - RNA, 22 nt, Human
ucagugucuugaccugggugug

SEQ ID NO: 556258 - RNA, 22 nt, Human
ugccaggcauauggccucuuug

SEQ ID NO: 556259 - RNA, 22 nt, Human
ucuucaugucaugguauauuga

SEQ ID NO: 556260 - RNA, 22 nt, Human
cagaggcugggaccucaggcau

SEQ ID NO: 556261 - RNA, 21 nt, Human
aaugugugcuauuuaucuuuu

SEQ ID NO: 556262 - RNA, 22 nt, Human
agcauuuauuucuuagaaauug

SEQ ID NO: 556263 - RNA, 22 nt, Human
aaagucaucagaaccuuccaga

SEQ ID NO: 556264 - RNA, 22 nt, Human
guagggacaugccauuaucuca

SEQ ID NO: 556265 - RNA, 22 nt, Human
aguaaugucccuuaaauguggu

SEQ ID NO: 556266 - RNA, 22 nt, Human
cagcagagcugggcuuugaauu

SEQ ID NO: 556267 - RNA, 22 nt, Human
ggcugcuugcuguuucuuggau

SEQ ID NO: 556268 - RNA, 22 nt, Human
aaaacucaaacauuuuggcaua

SEQ ID NO: 556269 - RNA, 21 nt, Human
gccugggauaguggccuccgg

SEQ ID NO: 556270 - RNA, 22 nt, Human
auuuguaaagugcuuaaaagua

SEQ ID NO: 556271 - RNA, 22 nt, Human
gccuugcugauuaccuuccuuu

SEQ ID NO: 556272 - RNA, 22 nt, Human
ccaggccugcaucugcugcgca

SEQ ID NO: 556273 - RNA, 22 nt, Human
acuugcauguguaaaucuuccu

SEQ ID NO: 556274 - RNA, 23 nt, Human
uguggcugagaaauugacaacuu

SEQ ID NO: 556275 - RNA, 20 nt, Human
gccagcacagggagcaguuc

SEQ ID NO: 556276 - RNA, 19 nt, Human
ucccgcccacugagcgugc

SEQ ID NO: 556277 - RNA, 22 nt, Human
uaaggcacccauguucauacag

SEQ ID NO: 556278 - RNA, 22 nt, Human
aaggccaucuacuuacggaauu

SEQ ID NO: 556279 - RNA, 22 nt, Human
caguauguuugggagacaugac

SEQ ID NO: 556280 - RNA, 22 nt, Human
ccagcagagcauggggaggaag

SEQ ID NO: 556281 - RNA, 22 nt, Human
ucaucacucauuggacaacaga

SEQ ID NO: 556282 - RNA, 22 nt, Human
gcauuauuaauagcugcaugag

SEQ ID NO: 556283 - RNA, 22 nt, Human
cagggcagagccaggauuucaa

SEQ ID NO: 556284 - RNA, 22 nt, Human
cucugcugcccaggccugcuag

SEQ ID NO: 556285 - RNA, 19 nt, Human
ggaaggagagaaaugcaug

SEQ ID NO: 556286 - RNA, 20 nt, Human
gccuguccugagugucaugg

SEQ ID NO: 556287 - RNA, 22 nt, Human
ucugggagggagccucagaauc

SEQ ID NO: 556288 - RNA, 22 nt, Human
uuccaguugguagaauguaagg

SEQ ID NO: 556289 - RNA, 22 nt, Human
ucacaggguguacaucaccuau

SEQ ID NO: 556290 - RNA, 22 nt, Human
agaaauacaaaguacuaagaua

SEQ ID NO: 556291 - RNA, 22 nt, Human
aggaucaaguugguugagcuuu

SEQ ID NO: 556292 - RNA, 22 nt, Human
ucagaggagggacucagaccca

SEQ ID NO: 556293 - RNA, 22 nt, Human
uuauaauucuggcauaggcugu

SEQ ID NO: 556294 - RNA, 22 nt, Human
ccagguggauaagguuucugga

SEQ ID NO: 556295 - RNA, 22 nt, Human
gggcagugucggggcccaggga

SEQ ID NO: 556296 - RNA, 19 nt, Human
ccugcagggaugagagguu

SEQ ID NO: 556297 - RNA, 22 nt, Human
ccuuucucuuugcugaucaugu

SEQ ID NO: 556298 - RNA, 22 nt, Human
ugccagaagauucucuaucaga

SEQ ID NO: 556299 - RNA, 22 nt, Human
ugucccagauacuggacauaga

SEQ ID NO: 556300 - RNA, 22 nt, Human
aggggugugcauccuggaggau

SEQ ID NO: 556301 - RNA, 20 nt, Human
ucagugauuuugaagaggaa

SEQ ID NO: 556302 - RNA, 22 nt, Human
ggggcucaguucggacagccug

SEQ ID NO: 556303 - RNA, 22 nt, Human
gagaaggggugauguggguaau

SEQ ID NO: 556304 - RNA, 22 nt, Human
gcagcacacgguggugcccugg

SEQ ID NO: 556305 - RNA, 22 nt, Human
uuuaugagcaaugcugagggga

SEQ ID NO: 556306 - RNA, 22 nt, Human
agaagccagaggcaguggguac

SEQ ID NO: 556307 - RNA, 22 nt, Human
uuagaaguaaggucagauuucu

SEQ ID NO: 556308 - RNA, 22 nt, Human
uuaguacauugauucauuaugu

SEQ ID NO: 556309 - RNA, 22 nt, Human
gugggcuggacccuccugcucc

SEQ ID NO: 556310 - RNA, 23 nt, Human
ggagacaagguaccacguuaaca

SEQ ID NO: 556311 - RNA, 21 nt, Human
gagugggcugagauggggcug

SEQ ID NO: 556312 - RNA, 22 nt, Human
ugucaguucagugauuacaaaa

SEQ ID NO: 556313 - RNA, 22 nt, Human
guggcaggucccauuggagcag

SEQ ID NO: 556314 - RNA, 22 nt, Human
ugcugagaggaaggugcacugg

SEQ ID NO: 556315 - RNA, 22 nt, Human
ccugggcauaaaucacuccaag

SEQ ID NO: 556316 - RNA, 22 nt, Human
augugacaauauuuggucuuau

SEQ ID NO: 556317 - RNA, 22 nt, Human
cuuuauguccaccagacugcaa

SEQ ID NO: 556318 - RNA, 18 nt, Human
aaggcacaggagaacauu

SEQ ID NO: 556319 - RNA, 22 nt, Human
ucagcaggcgguuccuuguggg

SEQ ID NO: 556320 - RNA, 22 nt, Human
cacaguuuuaucuuauacugau

SEQ ID NO: 556321 - RNA, 22 nt, Human
aaucuguauugcucauacuuga

SEQ ID NO: 556322 - RNA, 22 nt, Human
cacagguguucuugcagugaaa

SEQ ID NO: 556323 - RNA, 22 nt, Human
auucugaggacagagucuagca

SEQ ID NO: 556324 - RNA, 22 nt, Human
aguggagcaggcggcgcucacu

SEQ ID NO: 556325 - RNA, 23 nt, Human
agugaucuguguuugaagaaugc

SEQ ID NO: 556326 - RNA, 22 nt, Human
agggguggagaguguugccagu

SEQ ID NO: 556327 - RNA, 22 nt, Human
cuuuccuagaaauauauacuua

SEQ ID NO: 556328 - RNA, 22 nt, Human
cacuggaauucaagauacugag

SEQ ID NO: 556329 - RNA, 22 nt, Human
augcaguguuuggaagcuuaag

SEQ ID NO: 556330 - RNA, 22 nt, Human
cccaggucuaugccagcucuga

SEQ ID NO: 556331 - RNA, 22 nt, Human
agcucuguguucacagcacuaa

SEQ ID NO: 556332 - RNA, 20 nt, Human
acugccuugguucaguaggu

SEQ ID NO: 556333 - RNA, 22 nt, Human
uaaguuagcccuauuaaauuaa

SEQ ID NO: 556334 - RNA, 22 nt, Human
uggcugcagacaccuauggcag

SEQ ID NO: 556335 - RNA, 22 nt, Human
guuuaagaaaauucauguuguu

SEQ ID NO: 556336 - RNA, 21 nt, Human
ucauuucagggccuuggcuuc

SEQ ID NO: 556337 - RNA, 22 nt, Human
acagaggucauggagaguucuc

SEQ ID NO: 556338 - RNA, 22 nt, Human
ucugagagcaggaggagcugcu

SEQ ID NO: 556339 - RNA, 20 nt, Human
gacaggagaguuagguaggu

SEQ ID NO: 556340 - RNA, 22 nt, Human
gagcugggaguuauagcauguu

SEQ ID NO: 556341 - RNA, 22 nt, Human
aggagaggucucccuuccccag

SEQ ID NO: 556342 - RNA, 22 nt, Human
ucacaugcuacugagccagacc

SEQ ID NO: 556343 - RNA, 22 nt, Human
aguaugaagauuauaauuuuuc

SEQ ID NO: 556344 - RNA, 22 nt, Human
ggccaggagauggacaccacau

SEQ ID NO: 556345 - RNA, 18 nt, Human
agcagagcccaugcauuc

SEQ ID NO: 556346 - RNA, 22 nt, Human
cuucaaaugugauuuuaauaac

SEQ ID NO: 556347 - RNA, 22 nt, Human
caggggaaggagccuugaaacu

SEQ ID NO: 556348 - RNA, 22 nt, Human
ucagaggauagaaauacuuauu

SEQ ID NO: 556349 - RNA, 22 nt, Human
cacagugucugugcuucagugu

SEQ ID NO: 556350 - RNA, 22 nt, Human
uccaggcccacucagcugaaau

SEQ ID NO: 556351 - RNA, 23 nt, Human
gcugcagcuguggauguucucag

SEQ ID NO: 556352 - RNA, 22 nt, Human
acacaugcauaagccuucccuu

SEQ ID NO: 556353 - RNA, 22 nt, Human
cccagcucuuuuagcggcaucu

SEQ ID NO: 556354 - RNA, 22 nt, Human
gccccacagccugcggucucag

SEQ ID NO: 556355 - RNA, 22 nt, Human
uccuugaaaaucuugguuuaga

SEQ ID NO: 556356 - RNA, 22 nt, Human
uauauaauuuguaaaagcaccu

SEQ ID NO: 556357 - RNA, 22 nt, Human
agggccugcucuaucacucuca

SEQ ID NO: 556358 - RNA, 22 nt, Human
cagggcuccccgcaccgcagcc

SEQ ID NO: 556359 - RNA, 22 nt, Human
aaagugaugaacucugugaccu

SEQ ID NO: 556360 - RNA, 22 nt, Human
auaacuucagggcugugacaga

SEQ ID NO: 556361 - RNA, 22 nt, Human
cuaggaggcgggggcugcagua

SEQ ID NO: 556362 - RNA, 22 nt, Human
ccugggaagagcugacaggagg

SEQ ID NO: 556363 - RNA, 22 nt, Human
gaaggaagcugucuggaugugu

SEQ ID NO: 556364 - RNA, 22 nt, Human
gccuuucaguuccaucaaagga

SEQ ID NO: 556365 - RNA, 22 nt, Human
acuucaugaacuaagggaucgg

SEQ ID NO: 556366 - RNA, 22 nt, Human
cagagcugucauuugccaguga

SEQ ID NO: 556367 - RNA, 22 nt, Human
ccugggagugugccaucucugu

SEQ ID NO: 556368 - RNA, 22 nt, Human
cuuccuaaaagcuucaagagaa

SEQ ID NO: 556369 - RNA, 22 nt, Human
ucauuaaauguuuguugugcca

SEQ ID NO: 556370 - RNA, 22 nt, Human
cucaaauauaagcuaaaugugg

SEQ ID NO: 556371 - RNA, 22 nt, Human
ugaaaauuuccaucaguuauau

SEQ ID NO: 556372 - RNA, 22 nt, Human
auaugcauuuaccuggcauaua

SEQ ID NO: 556373 - RNA, 22 nt, Human
uaacagcaguccucuucucaug

SEQ ID NO: 556374 - RNA, 22 nt, Human
uaauuuuacuuccugagcaccu

SEQ ID NO: 556375 - RNA, 22 nt, Human
ggacaggaugcugaagaugaag

SEQ ID NO: 556376 - RNA, 22 nt, Human
gguggguauugaauacaggugu

SEQ ID NO: 556377 - RNA, 22 nt, Human
gcaggcucagagcagauuagca

SEQ ID NO: 556378 - RNA, 22 nt, Human
acagagguaggacaugagauau

SEQ ID NO: 556379 - RNA, 22 nt, Human
aauagcaaacagacaugcacaa

SEQ ID NO: 556380 - RNA, 22 nt, Human
gaacuuaguagucuacuucuua

SEQ ID NO: 556381 - RNA, 22 nt, Human
acauucuauagcaagcugaucu

SEQ ID NO: 556382 - RNA, 22 nt, Human
uucaguauacauuaucuaauug

SEQ ID NO: 556383 - RNA, 22 nt, Human
agcuguccuggcucaggcugug

SEQ ID NO: 556384 - RNA, 22 nt, Human
ccuggggagaagagcuuccccc

SEQ ID NO: 556385 - RNA, 22 nt, Human
ucuuucuuaaauagguggauug

SEQ ID NO: 556386 - RNA, 23 nt, Human
acaggcucuuaaucagugcuccu

SEQ ID NO: 556387 - RNA, 22 nt, Human
aaaucaguuaagaugaggccau

SEQ ID NO: 556388 - RNA, 22 nt, Human
aaaguuagucagaaccagccau

SEQ ID NO: 556389 - RNA, 22 nt, Human
cugggggcaagcagacagcugu

SEQ ID NO: 556390 - RNA, 22 nt, Human
gccuucccucucauccugcugg

SEQ ID NO: 556391 - RNA, 22 nt, Human
cacugccuggaaggagagacau

SEQ ID NO: 556392 - RNA, 22 nt, Human
ggagccagaggcugcugcugug

SEQ ID NO: 556393 - RNA, 22 nt, Human
cacagaguggaggcuuggccug

SEQ ID NO: 556394 - RNA, 22 nt, Human
uuaauaaaguaugaauuggaaa

SEQ ID NO: 556395 - RNA, 20 nt, Human
guuugaaaugauugguuggu

SEQ ID NO: 556396 - RNA, 22 nt, Human
auucuucaccauggauaauuug

SEQ ID NO: 556397 - RNA, 22 nt, Human
agggccagcugcagaauuagca

SEQ ID NO: 556398 - RNA, 22 nt, Human
acccgggaggcaggagucauag

SEQ ID NO: 556399 - RNA, 22 nt, Human
cuggggcugcagcgaucuucau

SEQ ID NO: 556400 - RNA, 22 nt, Human
uagaaagugaagguuaauuaau

SEQ ID NO: 556401 - RNA, 22 nt, Human
aggcaggagugacccugacagg

SEQ ID NO: 556402 - RNA, 22 nt, Human
gccaggcaaauuaaggaaugca

SEQ ID NO: 556403 - RNA, 22 nt, Human
uggccagguugggcuuugcagc

SEQ ID NO: 556404 - RNA, 22 nt, Human
agaaaguuuauuccuaucuagc

SEQ ID NO: 556405 - RNA, 22 nt, Human
agcacagccucugguuucugac

SEQ ID NO: 556406 - RNA, 19 nt, Human
ggccuugcucuguggcagc

SEQ ID NO: 556407 - RNA, 22 nt, Human
ucuagauuccuccugcauccug

SEQ ID NO: 556408 - RNA, 22 nt, Human
uggcucugccacuaacuuggua

SEQ ID NO: 556409 - RNA, 22 nt, Human
cggggcuguagcacagcugagc

SEQ ID NO: 556410 - RNA, 22 nt, Human
acugugcaaugaguaauaaacu

SEQ ID NO: 556411 - RNA, 22 nt, Human
ugucccauggauaccaggcuau

SEQ ID NO: 556412 - RNA, 22 nt, Human
uaaacauuuguuauucuuguuu

SEQ ID NO: 556413 - RNA, 22 nt, Human
acccucccauuuccauguagca

SEQ ID NO: 556414 - RNA, 22 nt, Human
agaaauguauagugaauuuuuc

SEQ ID NO: 556415 - RNA, 22 nt, Human
gagaaggacuacacaucuggcc

SEQ ID NO: 556416 - RNA, 22 nt, Human
uuacagugagggugacauuuac

SEQ ID NO: 556417 - RNA, 22 nt, Human
ucuggcucucucaucacccaau

SEQ ID NO: 556418 - RNA, 22 nt, Human
uaucaaauugaggcagcugggg

SEQ ID NO: 556419 - RNA, 22 nt, Human
agcccugccucuccaaugccca

SEQ ID NO: 556420 - RNA, 22 nt, Human
ucaggugggcaguggguugagc

SEQ ID NO: 556421 - RNA, 22 nt, Human
auacuuuuaauuccuucugagu

SEQ ID NO: 556422 - RNA, 22 nt, Human
uugaaacucccuuuugucuagu

SEQ ID NO: 556423 - RNA, 22 nt, Human
cagucagucaauacucuuugag

SEQ ID NO: 556424 - RNA, 22 nt, Human
ugaguucucacccauucuucuu

SEQ ID NO: 556425 - RNA, 22 nt, Human
cugccuggagcauucugaaggu

SEQ ID NO: 556426 - RNA, 22 nt, Human
cuggcgagcaggaggcgacggc

SEQ ID NO: 556427 - RNA, 22 nt, Human
gugauucugccuggaagguccu

SEQ ID NO: 556428 - RNA, 22 nt, Human
uucauaguguuuccuuccagug

SEQ ID NO: 556429 - RNA, 22 nt, Human
gucagcaccucuuuggggagcu

SEQ ID NO: 556430 - RNA, 21 nt, Human
cacaccaaacaggaacaggga

SEQ ID NO: 556431 - RNA, 22 nt, Human
gcagcaugagcuauacaaagua

SEQ ID NO: 556432 - RNA, 22 nt, Human
gaaguuagauguggucacugac

SEQ ID NO: 556433 - RNA, 22 nt, Human
ugaaugaguuuggcugcuguuc

SEQ ID NO: 556434 - RNA, 22 nt, Human
accuccuggugcccaaguguuu

SEQ ID NO: 556435 - RNA, 22 nt, Human
agggccugaggcugacggggag

SEQ ID NO: 556436 - RNA, 22 nt, Human
acacagaagcuuuuucuauucc

SEQ ID NO: 556437 - RNA, 22 nt, Human
gagguacaugaggauacacagg

SEQ ID NO: 556438 - RNA, 22 nt, Human
ucaaaugcaggucuggucuugg

SEQ ID NO: 556439 - RNA, 18 nt, Human
gcagggcugcacacgcau

SEQ ID NO: 556440 - RNA, 22 nt, Human
cuacauaaucuggauuugucug

SEQ ID NO: 556441 - RNA, 22 nt, Human
gacagacauuuccugauccaau

SEQ ID NO: 556442 - RNA, 19 nt, Human
ucugaggguccagaugcau

SEQ ID NO: 556443 - RNA, 22 nt, Human
aggcagcagcuugcugguugcc

SEQ ID NO: 556444 - RNA, 22 nt, Human
ugggaaggcguggaaguagaag

SEQ ID NO: 556445 - RNA, 22 nt, Human
ggccagggccaaggcuuuccca

SEQ ID NO: 556446 - RNA, 22 nt, Human
augaagauaagaccaggcugga

SEQ ID NO: 556447 - RNA, 22 nt, Human
aggaaaagugugaaguauggag

SEQ ID NO: 556448 - RNA, 22 nt, Human
uuauguaauuuguuugcucuuc

SEQ ID NO: 556449 - RNA, 22 nt, Human
gauguacuugccuuaucuaucc

SEQ ID NO: 556450 - RNA, 22 nt, Human
gcuuucucuucacugauguuca

SEQ ID NO: 556451 - RNA, 22 nt, Human
uucuagaaacacaugcaaacag

SEQ ID NO: 556452 - RNA, 22 nt, Human
cuacagaaaaucagccacaggc

SEQ ID NO: 556453 - RNA, 22 nt, Human
cagcauggcuugaguguuuccu

SEQ ID NO: 556454 - RNA, 22 nt, Human
uauucacaugaaaacaaauuuu

SEQ ID NO: 556455 - RNA, 22 nt, Human
ggccacugaccuacaucugggg

SEQ ID NO: 556456 - RNA, 22 nt, Human
ucagggaaugugauacaggaag

SEQ ID NO: 556457 - RNA, 22 nt, Human
uuguuaaauggaugcagaauaa

SEQ ID NO: 556458 - RNA, 22 nt, Human
augucagagcuuccacaauagu

SEQ ID NO: 556459 - RNA, 19 nt, Human
uggaagaggaagggaaaua

SEQ ID NO: 556460 - RNA, 22 nt, Human
agagcuggccagggaucacucu

SEQ ID NO: 556461 - RNA, 22 nt, Human
cugccaaguaaugccugggcuc

SEQ ID NO: 556462 - RNA, 22 nt, Human
aaagcagcuuucggcccucggg

SEQ ID NO: 556463 - RNA, 22 nt, Human
ucuuuccacauucucuguuuag

SEQ ID NO: 556464 - RNA, 20 nt, Human
agcaggugacggggccugcu

SEQ ID NO: 556465 - RNA, 22 nt, Human
uucaagucagagcaagccaagu

SEQ ID NO: 556466 - RNA, 22 nt, Human
aaggcuuuuguuccuauuuagu

SEQ ID NO: 556467 - RNA, 22 nt, Human
ccugggaacagcagaguccugg

SEQ ID NO: 556468 - RNA, 22 nt, Human
gaaaugcauaaucuuaguagau

SEQ ID NO: 556469 - RNA, 22 nt, Human
aucaguuuggugcuuucaguga

SEQ ID NO: 556470 - RNA, 22 nt, Human
uauacaauggcugaaucaucca

SEQ ID NO: 556471 - RNA, 22 nt, Human
ucagcaggguuugacuucuaau

SEQ ID NO: 556472 - RNA, 22 nt, Human
caggaaggcccaccuguccugu

SEQ ID NO: 556473 - RNA, 22 nt, Human
ccagcagcuuuauuggcucucc

SEQ ID NO: 556474 - RNA, 22 nt, Human
guuagguagaaguuuacuuuga

SEQ ID NO: 556475 - RNA, 22 nt, Human
ggucccagcugcucaagaggcu

SEQ ID NO: 556476 - RNA, 22 nt, Human
ccucugccaccucccacgaggc

SEQ ID NO: 556477 - RNA, 22 nt, Human
gcagagaacccagcagauuggc

SEQ ID NO: 556478 - RNA, 21 nt, Human
acagugugcuucucucccucc

SEQ ID NO: 556479 - RNA, 22 nt, Human
ucagagugaggcccagcaaucu

SEQ ID NO: 556480 - RNA, 22 nt, Human
ccugcugugaaacuggcauaug

SEQ ID NO: 556481 - RNA, 23 nt, Human
uucaugaguuggacaagacuggg

SEQ ID NO: 556482 - RNA, 22 nt, Human
ucacugggagaugugggaaggg

SEQ ID NO: 556483 - RNA, 22 nt, Human
uucacauaauccuccaguggca

SEQ ID NO: 556484 - RNA, 22 nt, Human
aggaaggggagaaguuaaagcu

SEQ ID NO: 556485 - RNA, 22 nt, Human
ggaggugaggccguagggugug

SEQ ID NO: 556486 - RNA, 22 nt, Human
uggccuggggaagaccaugggc

SEQ ID NO: 556487 - RNA, 22 nt, Human
agguggggugagcugcagacua

SEQ ID NO: 556488 - RNA, 22 nt, Human
ucucaguguguuuucucucaga

SEQ ID NO: 556489 - RNA, 22 nt, Human
uaggaguaggaguggccauccc

SEQ ID NO: 556490 - RNA, 22 nt, Human
auugucuucuggucuuaucuuu

SEQ ID NO: 556491 - RNA, 22 nt, Human
caugacauuuuaaaaagaacau

SEQ ID NO: 556492 - RNA, 22 nt, Human
uugcucugcaguccagacagua

SEQ ID NO: 556493 - RNA, 22 nt, Human
guucauuuuacuguaaauagca

SEQ ID NO: 556494 - RNA, 22 nt, Human
cugaaggagcauagucaguuuu

SEQ ID NO: 556495 - RNA, 22 nt, Human
cauacaagcgugcaugugcuug

SEQ ID NO: 556496 - RNA, 22 nt, Human
aaaugucuguaugagaaagaga

SEQ ID NO: 556497 - RNA, 22 nt, Human
ucaccaauaauaacuugagaau

SEQ ID NO: 556498 - RNA, 22 nt, Human
ucaaagagcucuaucuucaaaa

SEQ ID NO: 556499 - RNA, 22 nt, Human
gccuggcaggccugggccagca

SEQ ID NO: 556500 - RNA, 22 nt, Human
aaagcauguucugggaauagua

SEQ ID NO: 556501 - RNA, 22 nt, Human
acauuugaaaugccaugugagg

SEQ ID NO: 556502 - RNA, 19 nt, Human
cccuggcaggcaagccugg

SEQ ID NO: 556503 - RNA, 22 nt, Human
acauuucagauucaugaaguga

SEQ ID NO: 556504 - RNA, 22 nt, Human
uucauugucucuguuugccuuc

SEQ ID NO: 556505 - RNA, 22 nt, Human
cauugcuguuaauugucucuag

SEQ ID NO: 556506 - RNA, 22 nt, Human
cugggagggguagccaauccua

SEQ ID NO: 556507 - RNA, 22 nt, Human
aggcccugcccagagcuccucg

SEQ ID NO: 556508 - RNA, 22 nt, Human
ggcugcugaguuggccaggaga

SEQ ID NO: 556509 - RNA, 22 nt, Human
ggcucuggaaaguguccuugau

SEQ ID NO: 556510 - RNA, 22 nt, Human
ccaggcucuaucccuccuucuu

SEQ ID NO: 556511 - RNA, 22 nt, Human
agaagccaauccuugucucucu

SEQ ID NO: 556512 - RNA, 21 nt, Human
cucuggagucaagagcuucca

SEQ ID NO: 556513 - RNA, 22 nt, Human
gggcugcaaugcuucaguuguu

SEQ ID NO: 556514 - RNA, 22 nt, Human
aaaagucugcucucauuucaga

SEQ ID NO: 556515 - RNA, 22 nt, Human
gccuggguuccaugaucuccag

SEQ ID NO: 556516 - RNA, 22 nt, Human
agcagcugagccccagcuguga

SEQ ID NO: 556517 - RNA, 22 nt, Human
ugggagcugggguuggacgucu

SEQ ID NO: 556518 - RNA, 22 nt, Human
cugaaccacuaauauuuugauu

SEQ ID NO: 556519 - RNA, 22 nt, Human
gccaggcauuuguuaggugcug

SEQ ID NO: 556520 - RNA, 22 nt, Human
ugaagaauaagauagauggagc

SEQ ID NO: 556521 - RNA, 20 nt, Human
uaacauaguccagagaacga

SEQ ID NO: 556522 - RNA, 19 nt, Human
gaggcaguagucaaagcuu

SEQ ID NO: 556523 - RNA, 22 nt, Human
ucagcucacucugcuuccuggg

SEQ ID NO: 556524 - RNA, 22 nt, Human
caaaugaagggagcugaagucu

SEQ ID NO: 556525 - RNA, 22 nt, Human
uuuauucacuggggucugcccg

SEQ ID NO: 556526 - RNA, 22 nt, Human
caacuacauccacacuuuguua

SEQ ID NO: 556527 - RNA, 22 nt, Human
aggcccuggcacugccugggag

SEQ ID NO: 556528 - RNA, 22 nt, Human
auuucacucucccugccacuua

SEQ ID NO: 556529 - RNA, 21 nt, Human
acacauuaugagcauagacuc

SEQ ID NO: 556530 - RNA, 22 nt, Human
ucaaaguagccggauggaauuu

SEQ ID NO: 556531 - RNA, 22 nt, Human
uccguauuugacuauugcaccg

SEQ ID NO: 556532 - RNA, 22 nt, Human
cccuggaguagcacugggucgc

SEQ ID NO: 556533 - RNA, 22 nt, Human
ucccuggacagccuugccuggg

SEQ ID NO: 556534 - RNA, 22 nt, Human
cagggcaguaccgcccucuggc

SEQ ID NO: 556535 - RNA, 22 nt, Human
ccugagagagugagcccugaca

SEQ ID NO: 556536 - RNA, 22 nt, Human
caccagcuacagacuacugugu

SEQ ID NO: 556537 - RNA, 22 nt, Human
uaucagaaaugccuuaaauugg

SEQ ID NO: 556538 - RNA, 22 nt, Human
uggcagcaguagccaccccagc

SEQ ID NO: 556539 - RNA, 21 nt, Human
uccaaaucccauucuguaguc

SEQ ID NO: 556540 - RNA, 22 nt, Human
ccucagaguaggucucagcugu

SEQ ID NO: 556541 - RNA, 22 nt, Human
ccuugaaauguucucacugggg

SEQ ID NO: 556542 - RNA, 22 nt, Human
caguauuuaggauuaggagaga

SEQ ID NO: 556543 - RNA, 22 nt, Human
agggcacccucucugcaguacc

SEQ ID NO: 556544 - RNA, 22 nt, Human
ucagcucggccuaggcccacgg

SEQ ID NO: 556545 - RNA, 22 nt, Human
uugggcuggcagagguggucuu

SEQ ID NO: 556546 - RNA, 22 nt, Human
ugucaugcuuauguuacauacu

SEQ ID NO: 556547 - RNA, 22 nt, Human
cuugcaggcagggccuccugga

SEQ ID NO: 556548 - RNA, 22 nt, Human
gcagagugauggaaugugggug

SEQ ID NO: 556549 - RNA, 22 nt, Human
ccaaaguccauaguuuacuuua

SEQ ID NO: 556550 - RNA, 22 nt, Human
agcccaugcaacaggccuagcg

SEQ ID NO: 556551 - RNA, 22 nt, Human
gacucugugggaggaggcucag

SEQ ID NO: 556552 - RNA, 17 nt, Human
gcuuccucaugcaguuc

SEQ ID NO: 556553 - RNA, 22 nt, Human
acaucuuuauacuaguccuuga

SEQ ID NO: 556554 - RNA, 22 nt, Human
uccuggccugucuggaguagcu

SEQ ID NO: 556555 - RNA, 22 nt, Human
caugggaggccugcugcuggug

SEQ ID NO: 556556 - RNA, 22 nt, Human
gcucugggguuggaaagugauc

SEQ ID NO: 556557 - RNA, 20 nt, Human
gugcuucagaagccauugcu

SEQ ID NO: 556558 - RNA, 22 nt, Human
auccagagacuggggcugggau

SEQ ID NO: 556559 - RNA, 20 nt, Human
gcugaagauucccaugcaag

SEQ ID NO: 556560 - RNA, 22 nt, Human
uuacacaaacacauuccagaua

SEQ ID NO: 556561 - RNA, 22 nt, Human
accuucaagauugugggucaau

SEQ ID NO: 556562 - RNA, 22 nt, Human
gagcaggauggcacuucuguga

SEQ ID NO: 556563 - RNA, 22 nt, Human
agucaguguagaaagcccaggc

SEQ ID NO: 556564 - RNA, 22 nt, Human
caggcuccuucccagggauggu

SEQ ID NO: 556565 - RNA, 22 nt, Human
gaggagaaauuuggggaccuga

SEQ ID NO: 556566 - RNA, 22 nt, Human
uuucauuacguguuugacuugu

SEQ ID NO: 556567 - RNA, 22 nt, Human
caaacuauuguucacaagacaa

SEQ ID NO: 556568 - RNA, 22 nt, Human
agcucuggaagcccugguaguu

SEQ ID NO: 556569 - RNA, 22 nt, Human
ucagggcaccaaaaaagaugcc

SEQ ID NO: 556570 - RNA, 18 nt, Human
cagcugugcccuguuugg

SEQ ID NO: 556571 - RNA, 20 nt, Human
agagccuugaggaagaugau

SEQ ID NO: 556572 - RNA, 22 nt, Human
ccuggagggcgccgcacagucc

SEQ ID NO: 556573 - RNA, 18 nt, Human
cccagcuccacuucccuc

SEQ ID NO: 556574 - RNA, 22 nt, Human
cucugagcugaaacaugagcau

SEQ ID NO: 556575 - RNA, 22 nt, Human
uguucccauggauaucugcaua

SEQ ID NO: 556576 - RNA, 22 nt, Human
ucauugcaggcauuccccugcc

SEQ ID NO: 556577 - RNA, 22 nt, Human
cccagcacucagcaggcucaua

SEQ ID NO: 556578 - RNA, 22 nt, Human
acagaacauauugcuucucuca

SEQ ID NO: 556579 - RNA, 22 nt, Human
gggugaggagcugccagucaug

SEQ ID NO: 556580 - RNA, 22 nt, Human
ucacgagaggcacagaauagag

SEQ ID NO: 556581 - RNA, 20 nt, Human
ccugucucacguuccgcccc

SEQ ID NO: 556582 - RNA, 19 nt, Human
uuagggacaugaauucuag

SEQ ID NO: 556583 - RNA, 22 nt, Human
ggcugucucugugacugccacc

SEQ ID NO: 556584 - RNA, 22 nt, Human
uacuuucuguccuucuguuaaa

SEQ ID NO: 556585 - RNA, 22 nt, Human
agcuugauuucucugcagugug

SEQ ID NO: 556586 - RNA, 22 nt, Human
auaauguacaacugcuuuuaau

SEQ ID NO: 556587 - RNA, 22 nt, Human
uuggugggcacaggggagaagu

SEQ ID NO: 556588 - RNA, 22 nt, Human
uguguacaggccuugcuagacu

SEQ ID NO: 556589 - RNA, 22 nt, Human
guccuuccccagccagcucugg

SEQ ID NO: 556590 - RNA, 22 nt, Human
uggccagccuugucaucgcuuu

SEQ ID NO: 556591 - RNA, 22 nt, Human
cacagaauuuucucuuuacaau

SEQ ID NO: 556592 - RNA, 22 nt, Human
agcugggccugauuugcagggg

SEQ ID NO: 556593 - RNA, 18 nt, Human
ucagggaaucuuggccuu

SEQ ID NO: 556594 - RNA, 22 nt, Human
cagggccugucacgacgcucau

SEQ ID NO: 556595 - RNA, 17 nt, Human
ucugcagaggcaaaccu

SEQ ID NO: 556596 - RNA, 22 nt, Human
uucuuaagaggguuaagugaag

SEQ ID NO: 556597 - RNA, 22 nt, Human
uggggcucuccacagugucuca

SEQ ID NO: 556598 - RNA, 19 nt, Human
agggccugcagcucaagcu

SEQ ID NO: 556599 - RNA, 22 nt, Human
gaugggcugucugagcgcugug

SEQ ID NO: 556600 - RNA, 22 nt, Human
gugcccugaugcaauugucuca

SEQ ID NO: 556601 - RNA, 23 nt, Human
ugagggacaugguggcuucugag

SEQ ID NO: 556602 - RNA, 22 nt, Human
cuggaaugccucccugucagag

SEQ ID NO: 556603 - RNA, 22 nt, Human
uaaggcacuucaauguuuagaa

SEQ ID NO: 556604 - RNA, 22 nt, Human
gaauguuuuucaaaccuguggc

SEQ ID NO: 556605 - RNA, 22 nt, Human
uggcacugccuggcagggcccc

SEQ ID NO: 556606 - RNA, 22 nt, Human
ccuguguggaaaccgcaugacg

SEQ ID NO: 556607 - RNA, 22 nt, Human
aaaguuuuauucaagcauuagu

SEQ ID NO: 556608 - RNA, 22 nt, Human
agugaguggacccugcaaggaa

SEQ ID NO: 556609 - RNA, 22 nt, Human
uggcugagugaacauguccauu

SEQ ID NO: 556610 - RNA, 22 nt, Human
guauguguaaguaugccaccuu

SEQ ID NO: 556611 - RNA, 22 nt, Human
aggccugaggaccuucuggagg

SEQ ID NO: 556612 - RNA, 22 nt, Human
ucuucaugaccucuguguuuua

SEQ ID NO: 556613 - RNA, 22 nt, Human
ugaaacuuauaagaauaugaau

SEQ ID NO: 556614 - RNA, 22 nt, Human
cagccucuguggcugccacacc

SEQ ID NO: 556615 - RNA, 22 nt, Human
uccagccacucagcagggauug

SEQ ID NO: 556616 - RNA, 22 nt, Human
uguggggcugucaggcaacugg

SEQ ID NO: 556617 - RNA, 22 nt, Human
cugagcugggaguagagacucu

SEQ ID NO: 556618 - RNA, 22 nt, Human
gagguuccccauuguacuggcu

SEQ ID NO: 556619 - RNA, 22 nt, Human
uaaaggguagguuuuacuguaa

SEQ ID NO: 556620 - RNA, 22 nt, Human
ucugggugcccuuugcucuguu

SEQ ID NO: 556621 - RNA, 22 nt, Human
uugugaauagugccgcaauaaa

SEQ ID NO: 556622 - RNA, 22 nt, Human
ccaggcagcaaauuuucugaau

SEQ ID NO: 556623 - RNA, 22 nt, Human
acaaguaccaaaugcucaagua

SEQ ID NO: 556624 - RNA, 18 nt, Human
ccugccagucuggagcag

SEQ ID NO: 556625 - RNA, 22 nt, Human
guauacauagaugaugaacaag

SEQ ID NO: 556626 - RNA, 22 nt, Human
ugcagcaggcacaggacggaag

SEQ ID NO: 556627 - RNA, 22 nt, Human
uggaacacugaucauugccuuu

SEQ ID NO: 556628 - RNA, 22 nt, Human
auuucuuaucugaggucuacau

SEQ ID NO: 556629 - RNA, 22 nt, Human
uggaggaaguugcuggaaguca

SEQ ID NO: 556630 - RNA, 22 nt, Human
cauuuugugcuagacacuaugg

SEQ ID NO: 556631 - RNA, 20 nt, Human
ggcugcaggacucauuggcu

SEQ ID NO: 556632 - RNA, 22 nt, Human
cgcuaggauuaggauuaauccu

SEQ ID NO: 556633 - RNA, 21 nt, Human
ugcugccauagaccugaggga

SEQ ID NO: 556634 - RNA, 22 nt, Human
uagaacagaguuccagugauca

SEQ ID NO: 556635 - RNA, 22 nt, Human
ccugccugaaggucagccaccc

SEQ ID NO: 556636 - RNA, 22 nt, Human
acaugauuggacuccuuccccu

SEQ ID NO: 556637 - RNA, 22 nt, Human
ggccaggcgaugaccccuccac

SEQ ID NO: 556638 - RNA, 22 nt, Human
uuggugggagagaugaggguug

SEQ ID NO: 556639 - RNA, 22 nt, Human
guguccuuauuucugucucuca

SEQ ID NO: 556640 - RNA, 22 nt, Human
ucucuuaaaagauuuuaaugac

SEQ ID NO: 556641 - RNA, 22 nt, Human
agugccaggagcaaggagcucc

SEQ ID NO: 556642 - RNA, 22 nt, Human
cucugggcuccuucagcccuuu

SEQ ID NO: 556643 - RNA, 22 nt, Human
gcugugcccagcuccagcucug

SEQ ID NO: 556644 - RNA, 22 nt, Human
gaacuauucauucucauuagcg

SEQ ID NO: 556645 - RNA, 22 nt, Human
acagaauuaaaguguuugugga

SEQ ID NO: 556646 - RNA, 22 nt, Human
caguacuugggggguucuaagu

SEQ ID NO: 556647 - RNA, 20 nt, Human
gcaaauggaucccacaagcc

SEQ ID NO: 556648 - RNA, 23 nt, Human
gcccugcuacucacaagcugugu

SEQ ID NO: 556649 - RNA, 22 nt, Human
uguuucuuuguagauauucuuu

SEQ ID NO: 556650 - RNA, 22 nt, Human
uucaggaucauuuguuuuaucu

SEQ ID NO: 556651 - RNA, 22 nt, Human
acaggcucucuauugagugcag

SEQ ID NO: 556652 - RNA, 22 nt, Human
uguacauugucacucaucaagu

SEQ ID NO: 556653 - RNA, 19 nt, Human
agaaguuagacauugcaau

SEQ ID NO: 556654 - RNA, 22 nt, Human
gcucccaguucccaaagugacc

SEQ ID NO: 556655 - RNA, 22 nt, Human
ucaggaaguuuugaaucaacug

SEQ ID NO: 556656 - RNA, 22 nt, Human
cuggcagggugggcuuugcuuu

SEQ ID NO: 556657 - RNA, 22 nt, Human
gccugcagcugcuuccacacac

SEQ ID NO: 556658 - RNA, 21 nt, Human
ugggagagggcucagcuaccc

SEQ ID NO: 556659 - RNA, 22 nt, Human
uaauccacaauagagauuaucu

SEQ ID NO: 556660 - RNA, 22 nt, Human
augggaggcaggcucagaaccg

SEQ ID NO: 556661 - RNA, 22 nt, Human
gcuggggucugugaggagggcu

SEQ ID NO: 556662 - RNA, 22 nt, Human
agagccaggaucuguuuugggg

SEQ ID NO: 556663 - RNA, 22 nt, Human
agccaccaccacugaaagguua

SEQ ID NO: 556664 - RNA, 22 nt, Human
ugcccccuuuucuuguuacacu

SEQ ID NO: 556665 - RNA, 22 nt, Human
gcagauggagacgagguuccgc

SEQ ID NO: 556666 - RNA, 22 nt, Human
gagcccaggcagagguugcagu

SEQ ID NO: 556667 - RNA, 22 nt, Human
aacaacuugcguucagagaugu

SEQ ID NO: 556668 - RNA, 22 nt, Human
uaagacaauucuucagucacaa

SEQ ID NO: 556669 - RNA, 21 nt, Human
ugggcgcuugaccucugcacu

SEQ ID NO: 556670 - RNA, 22 nt, Human
gaagacuuuaagccgagauuag

SEQ ID NO: 556671 - RNA, 22 nt, Human
agcugguguccuccuggagcug

SEQ ID NO: 556672 - RNA, 22 nt, Human
aggaagaugugcaaaguuggaa

SEQ ID NO: 556673 - RNA, 22 nt, Human
uuucacauggaagcucucgaga

SEQ ID NO: 556674 - RNA, 22 nt, Human
auacuguuucucuucuacauga

SEQ ID NO: 556675 - RNA, 22 nt, Human
agcagaacauuuucagggcugu

SEQ ID NO: 556676 - RNA, 22 nt, Human
aaagagcuucauuuccauuuau

SEQ ID NO: 556677 - RNA, 22 nt, Human
ccagcuggcacuguggcugccc

SEQ ID NO: 556678 - RNA, 22 nt, Human
acaguguuccuuuguugugacu

SEQ ID NO: 556679 - RNA, 23 nt, Human
ggaaagagaggaguugugcauag

SEQ ID NO: 556680 - RNA, 22 nt, Human
augugaaaaauuucuuauuaca

SEQ ID NO: 556681 - RNA, 22 nt, Human
acauaaauagauuauugggagg

SEQ ID NO: 556682 - RNA, 22 nt, Human
cccugucuguaccgugaugagc

SEQ ID NO: 556683 - RNA, 22 nt, Human
gaggaagccccauugaagccag

SEQ ID NO: 556684 - RNA, 20 nt, Human
agauggugggcuggaacacc

SEQ ID NO: 556685 - RNA, 22 nt, Human
aggcagaaaauagucauccaaa

SEQ ID NO: 556686 - RNA, 22 nt, Human
ugcagaugccugggcugcacca

SEQ ID NO: 556687 - RNA, 22 nt, Human
uacauggguagguuaagucaua

SEQ ID NO: 556688 - RNA, 22 nt, Human
auugucgcuuauuuaggugcuu

SEQ ID NO: 556689 - RNA, 22 nt, Human
cagagccacugucugccaggca

SEQ ID NO: 556690 - RNA, 22 nt, Human
agagcugaggauccagcugagc

SEQ ID NO: 556691 - RNA, 22 nt, Human
gccugcaguucugugcuaggca

SEQ ID NO: 556692 - RNA, 22 nt, Human
ggcagugaacagaaaugcagaa

SEQ ID NO: 556693 - RNA, 22 nt, Human
aauacuggcugucaaagaugga

SEQ ID NO: 556694 - RNA, 22 nt, Human
uggcugaguuccuggcacacgg

SEQ ID NO: 556695 - RNA, 22 nt, Human
uuuaguaaguucacugcaaagc

SEQ ID NO: 556696 - RNA, 22 nt, Human
aguuuuucugggaggcacugcu

SEQ ID NO: 556697 - RNA, 22 nt, Human
caguuauuaugaggucauuagg

SEQ ID NO: 556698 - RNA, 22 nt, Human
uggcucaguuccaucaucugga

SEQ ID NO: 556699 - RNA, 22 nt, Human
uggacuaaagaggaaagaugua

SEQ ID NO: 556700 - RNA, 23 nt, Human
agaggccaacuucuugccccucc

SEQ ID NO: 556701 - RNA, 22 nt, Human
cucugagagugcucagagggua

SEQ ID NO: 556702 - RNA, 22 nt, Human
gccuggcuccuaaggacuggcu

SEQ ID NO: 556703 - RNA, 21 nt, Human
aaaugcuuuguauauaucugu

SEQ ID NO: 556704 - RNA, 22 nt, Human
acuguucuucauuuagcaaaga

SEQ ID NO: 556705 - RNA, 18 nt, Human
aaaggcugaauauagaag

SEQ ID NO: 556706 - RNA, 22 nt, Human
aauagacuuuguauaauuuccc

SEQ ID NO: 556707 - RNA, 22 nt, Human
agaaacuauccugaguagcaaa

SEQ ID NO: 556708 - RNA, 23 nt, Human
ucaguuuuggcuguucaguguug

SEQ ID NO: 556709 - RNA, 22 nt, Human
gccacaugucaugugcucagua

SEQ ID NO: 556710 - RNA, 21 nt, Human
gccucugcugucuuauuguga

SEQ ID NO: 556711 - RNA, 22 nt, Human
ugguccuggaagguccugaggg

SEQ ID NO: 556712 - RNA, 18 nt, Human
gcucaggcccuagucagu

SEQ ID NO: 556713 - RNA, 22 nt, Human
caggauggagaguuguugguug

SEQ ID NO: 556714 - RNA, 22 nt, Human
uguggggacugaguggaggcuu

SEQ ID NO: 556715 - RNA, 22 nt, Human
cuauuagguaugugguugcuau

SEQ ID NO: 556716 - RNA, 22 nt, Human
uaucuuguuuaggugcacaggu

SEQ ID NO: 556717 - RNA, 22 nt, Human
uucaaagugcauguuccucaga

SEQ ID NO: 556718 - RNA, 22 nt, Human
guucauuuuuagaaugcuagua

SEQ ID NO: 556719 - RNA, 22 nt, Human
ugcaugcacuaucuagaugaug

SEQ ID NO: 556720 - RNA, 22 nt, Human
cugagaggggaccaggguguuu

SEQ ID NO: 556721 - RNA, 22 nt, Human
acagacaguaaauaguguggcu

SEQ ID NO: 556722 - RNA, 22 nt, Human
aaagagcuaacauugccgagau

SEQ ID NO: 556723 - RNA, 22 nt, Human
ggaggccaggaaggcucggaga

SEQ ID NO: 556724 - RNA, 22 nt, Human
cacacaugagucuccccauugg

SEQ ID NO: 556725 - RNA, 22 nt, Human
auuaggcagacaacguagccgg

SEQ ID NO: 556726 - RNA, 17 nt, Human
gaaaggaggcaacacug

SEQ ID NO: 556727 - RNA, 22 nt, Human
agcuggggcugcagagaacagg

SEQ ID NO: 556728 - RNA, 19 nt, Human
ccuccugcuagauaugcaa

SEQ ID NO: 556729 - RNA, 22 nt, Human
uccucugcuccaucuuuacugu

SEQ ID NO: 556730 - RNA, 22 nt, Human
ucauuuucaaguuugaacagga

SEQ ID NO: 556731 - RNA, 22 nt, Human
ucagaaaauaacuguuaguuug

SEQ ID NO: 556732 - RNA, 21 nt, Human
gggcgaggccugauguggcuc

SEQ ID NO: 556733 - RNA, 22 nt, Human
gcugagagcaaggacaaagcau

SEQ ID NO: 556734 - RNA, 18 nt, Human
acagacaaaauggaaaug

SEQ ID NO: 556735 - RNA, 22 nt, Human
acugucacuccaacugagucgu

SEQ ID NO: 556736 - RNA, 22 nt, Human
ugggccccagcacgucugggga

SEQ ID NO: 556737 - RNA, 22 nt, Human
uuucuagaaugacucaucugag

SEQ ID NO: 556738 - RNA, 22 nt, Human
auuuccaccggcucaggaaguu

SEQ ID NO: 556739 - RNA, 22 nt, Human
agacuucuuugugagcauuuuc

SEQ ID NO: 556740 - RNA, 20 nt, Human
uaacagaaguagaagugggu

SEQ ID NO: 556741 - RNA, 22 nt, Human
ucaauaaaauuguuuuccuauc

SEQ ID NO: 556742 - RNA, 22 nt, Human
ucagaagccggaagugcuccuc

SEQ ID NO: 556743 - RNA, 22 nt, Human
ccugcaguuuguugugaccccg

SEQ ID NO: 556744 - RNA, 22 nt, Human
agcagggcugcagugugucuuu

SEQ ID NO: 556745 - RNA, 22 nt, Human
uguguucaguaugacauucaca

SEQ ID NO: 556746 - RNA, 22 nt, Human
aucuaauuuucacucauuugcu

SEQ ID NO: 556747 - RNA, 22 nt, Human
cugggcagagcuaacaccugag

SEQ ID NO: 556748 - RNA, 22 nt, Human
ccagagacgucggucagggcgc

SEQ ID NO: 556749 - RNA, 22 nt, Human
guucuucaucauuaacacucug

SEQ ID NO: 556750 - RNA, 22 nt, Human
aacauuucuucugaaacugagu

SEQ ID NO: 556751 - RNA, 22 nt, Human
acugcagccuuugggcucauaa

SEQ ID NO: 556752 - RNA, 22 nt, Human
caggcugcagugcaguggcuau

SEQ ID NO: 556753 - RNA, 22 nt, Human
cauggcccucuucuggagcaau

SEQ ID NO: 556754 - RNA, 22 nt, Human
aacucaguucuuuccacaaugc

SEQ ID NO: 556755 - RNA, 21 nt, Human
ugggccugucccucuuggagg

SEQ ID NO: 556756 - RNA, 22 nt, Human
uuccagaaaaaaauguauaucu

SEQ ID NO: 556757 - RNA, 22 nt, Human
ucugguaaccuuuaucccuccu

SEQ ID NO: 556758 - RNA, 22 nt, Human
gaguuaauguguacacaaaggg

SEQ ID NO: 556759 - RNA, 22 nt, Human
ccugggaggcuguuuccagccu

SEQ ID NO: 556760 - RNA, 22 nt, Human
ugcaggcuggcagugcugaaau

SEQ ID NO: 556761 - RNA, 19 nt, Human
agacagagcucaguggguu

SEQ ID NO: 556762 - RNA, 22 nt, Human
cugagcugggcucucuugaggg

SEQ ID NO: 556763 - RNA, 22 nt, Human
aaggcuuucagcuaacuugauu

SEQ ID NO: 556764 - RNA, 22 nt, Human
aaagacugguguguuacauaua

SEQ ID NO: 556765 - RNA, 22 nt, Human
uuuaguagaaugauacagggca

SEQ ID NO: 556766 - RNA, 22 nt, Human
ggguuggggcccagcagucugc

SEQ ID NO: 556767 - RNA, 22 nt, Human
ccagggcaucacauccaguguu

SEQ ID NO: 556768 - RNA, 22 nt, Human
aauagcucacugauuucucuuu

SEQ ID NO: 556769 - RNA, 22 nt, Human
caggcugacaacugagcauuuu

SEQ ID NO: 556770 - RNA, 22 nt, Human
acuuaaaaacagauccagcagg

SEQ ID NO: 556771 - RNA, 18 nt, Human
uggagcugagugcugugc

SEQ ID NO: 556772 - RNA, 21 nt, Human
aaucaaaugucauauccccag

SEQ ID NO: 556773 - RNA, 22 nt, Human
gcaggggcuaaggacacagaga

SEQ ID NO: 556774 - RNA, 22 nt, Human
caguggaaacuaugcugcugga

SEQ ID NO: 556775 - RNA, 22 nt, Human
ucccagaggucucugcugguuc

SEQ ID NO: 556776 - RNA, 22 nt, Human
cuucuuuuacaggucuuggguu

SEQ ID NO: 556777 - RNA, 22 nt, Human
ugugggcucuaauggcagcaga

SEQ ID NO: 556778 - RNA, 22 nt, Human
cagccuccugggacacucaccg

SEQ ID NO: 556779 - RNA, 22 nt, Human
aaagcagucucagacuuaagca

SEQ ID NO: 556780 - RNA, 17 nt, Human
agaguuuuaagaaauuu

SEQ ID NO: 556781 - RNA, 23 nt, Human
acugggaaguuuggagagacgca

SEQ ID NO: 556782 - RNA, 22 nt, Human
uuuuccucuguauuugaaaugc

SEQ ID NO: 556783 - RNA, 22 nt, Human
ugacauuucuuguugauauaaa

SEQ ID NO: 556784 - RNA, 22 nt, Human
agggcaaggguugaagauaaga

SEQ ID NO: 556785 - RNA, 22 nt, Human
ggagaugcuuuccaguggggau

SEQ ID NO: 556786 - RNA, 22 nt, Human
agagaagggccuguauguaauc

SEQ ID NO: 556787 - RNA, 22 nt, Human
ucuucaaagaauuuuaguaauu

SEQ ID NO: 556788 - RNA, 22 nt, Human
uggcagggugggcuucagcccc

SEQ ID NO: 556789 - RNA, 22 nt, Human
cuggcucugggccucagacacu

SEQ ID NO: 556790 - RNA, 22 nt, Human
acuuuguuuccauauuuguagc

SEQ ID NO: 556791 - RNA, 22 nt, Human
gcagggccuuagcagcggcugc

SEQ ID NO: 556792 - RNA, 20 nt, Human
cagggcacacugcagccucg

SEQ ID NO: 556793 - RNA, 22 nt, Human
ucucagggccccaaaggcuagu

SEQ ID NO: 556794 - RNA, 22 nt, Human
ccagcuucucucugaugcagcu

SEQ ID NO: 556795 - RNA, 22 nt, Human
cuggggcucacuccagcccugg

SEQ ID NO: 556796 - RNA, 22 nt, Human
acauauaagggaucagugacag

SEQ ID NO: 556797 - RNA, 22 nt, Human
caacaguuuauaguguuaucuu

SEQ ID NO: 556798 - RNA, 22 nt, Human
uucuuauuucccccuucaucau

SEQ ID NO: 556799 - RNA, 22 nt, Human
aaaaucacacaaguagaugggg

SEQ ID NO: 556800 - RNA, 22 nt, Human
gccaggcucagcagucaaccug

SEQ ID NO: 556801 - RNA, 22 nt, Human
ccaaaguccacaguuuacauua

SEQ ID NO: 556802 - RNA, 22 nt, Human
agucucaggcagaggaaggcua

SEQ ID NO: 556803 - RNA, 22 nt, Human
aaagguaaaguaucugcccaag

SEQ ID NO: 556804 - RNA, 22 nt, Human
cagcaaagguagaagcacagga

SEQ ID NO: 556805 - RNA, 22 nt, Human
cuggucugagggcucuugaggc

SEQ ID NO: 556806 - RNA, 22 nt, Human
ggcuggcacugaggagagcucu

SEQ ID NO: 556807 - RNA, 22 nt, Human
ggccuuccuucccagccuacug

SEQ ID NO: 556808 - RNA, 22 nt, Human
uuagaaaacauaagugguaaag

SEQ ID NO: 556809 - RNA, 22 nt, Human
caagauggacauaaggagagaa

SEQ ID NO: 556810 - RNA, 22 nt, Human
agggccuggcgcguggccgccg

SEQ ID NO: 556811 - RNA, 22 nt, Human
ucacauuuuccuugguaucugu

SEQ ID NO: 556812 - RNA, 22 nt, Human
agauuucaaugugagcauuagu

SEQ ID NO: 556813 - RNA, 22 nt, Human
acuuuucugcagaugaucucuu

SEQ ID NO: 556814 - RNA, 22 nt, Human
uaacagaagaugaaacuucuuu

SEQ ID NO: 556815 - RNA, 22 nt, Human
uacacauuagugagguauuuug

SEQ ID NO: 556816 - RNA, 18 nt, Human
ccgggcuuuggugacaca

SEQ ID NO: 556817 - RNA, 22 nt, Human
uuuccuaagguagugauaauuu

SEQ ID NO: 556818 - RNA, 20 nt, Human
gagccugggaagucuaaggu

SEQ ID NO: 556819 - RNA, 19 nt, Human
ucuguucacauuguuucgc

SEQ ID NO: 556820 - RNA, 22 nt, Human
caucaaauacuacauggguugg

SEQ ID NO: 556821 - RNA, 22 nt, Human
cugcccugaccugccucagagu

SEQ ID NO: 556822 - RNA, 22 nt, Human
agggccagagucuguguagaua

SEQ ID NO: 556823 - RNA, 22 nt, Human
cagguaggcagccggucucugg

SEQ ID NO: 556824 - RNA, 22 nt, Human
gcacaaacugcaauuacuuuug

SEQ ID NO: 556825 - RNA, 22 nt, Human
aagaucaaguguacuuuaugua

SEQ ID NO: 556826 - RNA, 22 nt, Human
acugccugccuuccagguacug

SEQ ID NO: 556827 - RNA, 22 nt, Human
aacagugauaucaagacagaca

SEQ ID NO: 556828 - RNA, 22 nt, Human
caggaggcuccuagggcucugu

SEQ ID NO: 556829 - RNA, 22 nt, Human
ucagagccaaucauggugcauu

SEQ ID NO: 556830 - RNA, 22 nt, Human
cuggagccacuuuuuauccuuu

SEQ ID NO: 556831 - RNA, 22 nt, Human
uugauuuuuuucuacuaugcgc

SEQ ID NO: 556832 - RNA, 18 nt, Human
aguuccuuaaauuggugu

SEQ ID NO: 556833 - RNA, 23 nt, Human
gccucugcagccuaguuaguguc

SEQ ID NO: 556834 - RNA, 22 nt, Human
auaauauaauccuacuucccau

SEQ ID NO: 556835 - RNA, 22 nt, Human
gugccugugcggacucagggaa

SEQ ID NO: 556836 - RNA, 22 nt, Human
agguggcucugacagcucuggu

SEQ ID NO: 556837 - RNA, 22 nt, Human
cuuuucuuauguggacguaccu

SEQ ID NO: 556838 - RNA, 22 nt, Human
cucuggccugcuuccucaggua

SEQ ID NO: 556839 - RNA, 22 nt, Human
aaugauguauguauaaggcagg

SEQ ID NO: 556840 - RNA, 22 nt, Human
guaaaucccauccuuucucugg

SEQ ID NO: 556841 - RNA, 22 nt, Human
ugauuacaguauuugagaucca

SEQ ID NO: 556842 - RNA, 22 nt, Human
ugcucuguauucuauggcaguu

SEQ ID NO: 556843 - RNA, 22 nt, Human
uuucaguguaagguuuccagga

SEQ ID NO: 556844 - RNA, 22 nt, Human
ugcugaguacucuccuguguag

SEQ ID NO: 556845 - RNA, 22 nt, Human
ucuguuucuccaacauugugag

SEQ ID NO: 556846 - RNA, 22 nt, Human
acagaaguguguguguaggaau

SEQ ID NO: 556847 - RNA, 21 nt, Human
aggguggcucugggucagaac

SEQ ID NO: 556848 - RNA, 22 nt, Human
gcugucuguggugucagcugac

SEQ ID NO: 556849 - RNA, 21 nt, Human
agcagaggcugccuggugacu

SEQ ID NO: 556850 - RNA, 23 nt, Human
ucucaagaggaagcagggcucau

SEQ ID NO: 556851 - RNA, 22 nt, Human
cuaaaugacuuccagugguuau

SEQ ID NO: 556852 - RNA, 22 nt, Human
acagccaggaauucuggagaag

SEQ ID NO: 556853 - RNA, 22 nt, Human
aauguguacaugacagauagaa

SEQ ID NO: 556854 - RNA, 22 nt, Human
gaaaugcagaaccugagaccau

SEQ ID NO: 556855 - RNA, 22 nt, Human
cagaagcauuccagcaaauagu

SEQ ID NO: 556856 - RNA, 22 nt, Human
ccagggcauccucacaucgcag

SEQ ID NO: 556857 - RNA, 22 nt, Human
uugaaagucacaauggcauuaa

SEQ ID NO: 556858 - RNA, 22 nt, Human
caagaaggcuauaugggccagg

SEQ ID NO: 556859 - RNA, 17 nt, Human
accaggcaacacgccca

SEQ ID NO: 556860 - RNA, 22 nt, Human
ggcucagcacagggcuggcauc

SEQ ID NO: 556861 - RNA, 22 nt, Human
uggcucuggggacaguaagucc

SEQ ID NO: 556862 - RNA, 22 nt, Human
aagggcuggaucucucugagca

SEQ ID NO: 556863 - RNA, 22 nt, Human
cugugcuuccaggauggcagcu

SEQ ID NO: 556864 - RNA, 22 nt, Human
cucagggccaaggaugcuguug

SEQ ID NO: 556865 - RNA, 22 nt, Human
ggccugagucccaccuggcugu

SEQ ID NO: 556866 - RNA, 22 nt, Human
cacauuuuuacugccaacuuaa

SEQ ID NO: 556867 - RNA, 22 nt, Human
ucugccugcgcucacggggccg

SEQ ID NO: 556868 - RNA, 22 nt, Human
guccugcuggcuucaggagauu

SEQ ID NO: 556869 - RNA, 22 nt, Human
ggaaaucaaggggacaaauugu

SEQ ID NO: 556870 - RNA, 22 nt, Human
gcagggaagacccggagcagcg

SEQ ID NO: 556871 - RNA, 22 nt, Human
uucuucaaaguccuuauuccuu

SEQ ID NO: 556872 - RNA, 22 nt, Human
aaguacaacgcauacagagaaa

SEQ ID NO: 556873 - RNA, 22 nt, Human
aggcagucagcccugcuagggu

SEQ ID NO: 556874 - RNA, 22 nt, Human
gggcaggggucaguggccccaa

SEQ ID NO: 556875 - RNA, 22 nt, Human
uccccugcagaugagggcagug

SEQ ID NO: 556876 - RNA, 22 nt, Human
gagauggcuugcucucacgugg

SEQ ID NO: 556877 - RNA, 22 nt, Human
gcugggaagagaugcacaugau

SEQ ID NO: 556878 - RNA, 22 nt, Human
cuucagaggggacucaaaguca

SEQ ID NO: 556879 - RNA, 23 nt, Human
cccuggccuuggggcacaggcug

SEQ ID NO: 556880 - RNA, 21 nt, Human
ccagaggccucucuuggccac

SEQ ID NO: 556881 - RNA, 22 nt, Human
uucauugugaacacauucugcc

SEQ ID NO: 556882 - RNA, 22 nt, Human
ccagggguuggagguugcagug

SEQ ID NO: 556883 - RNA, 22 nt, Human
acuaaauaguuuugacagaaca

SEQ ID NO: 556884 - RNA, 22 nt, Human
uccuggaggggacagcaugggc

SEQ ID NO: 556885 - RNA, 22 nt, Human
aaaugucagaaaacauggagug

SEQ ID NO: 556886 - RNA, 23 nt, Human
gcaguggaaugucucuguuugga

SEQ ID NO: 556887 - RNA, 22 nt, Human
gaccagagaaaggcacuggaag

SEQ ID NO: 556888 - RNA, 22 nt, Human
acugccuugaaagauuguugag

SEQ ID NO: 556889 - RNA, 22 nt, Human
gucaaauauuaugcagcuugga

SEQ ID NO: 556890 - RNA, 22 nt, Human
aaagaaggaugggagaaauccu

SEQ ID NO: 556891 - RNA, 22 nt, Human
caaagcuuggagaagcagcugg

SEQ ID NO: 556892 - RNA, 22 nt, Human
acaagagacaagagguucuucu

SEQ ID NO: 556893 - RNA, 22 nt, Human
gucucugccuggggggaucaga

SEQ ID NO: 556894 - RNA, 22 nt, Human
caguggguccuaaguacaguuc

SEQ ID NO: 556895 - RNA, 19 nt, Human
aauguaguguuaugucaac

SEQ ID NO: 556896 - RNA, 22 nt, Human
ccuggagcccaaggcagugaga

SEQ ID NO: 556897 - RNA, 22 nt, Human
cuuggaggaaaggcagggagac

SEQ ID NO: 556898 - RNA, 21 nt, Human
uccuccuggccaggcggcccc

SEQ ID NO: 556899 - RNA, 22 nt, Human
guggagaccuccuaggaugugu

SEQ ID NO: 556900 - RNA, 22 nt, Human
auccaaaucaugucagaagaac

SEQ ID NO: 556901 - RNA, 22 nt, Human
auggagacgcaagggaccuagg

SEQ ID NO: 556902 - RNA, 22 nt, Human
auuuguaauuucuuaucugugu

SEQ ID NO: 556903 - RNA, 22 nt, Human
cucaggaugucggugacuauug

SEQ ID NO: 556904 - RNA, 22 nt, Human
uaaagcagugguucucaaacuu

SEQ ID NO: 556905 - RNA, 22 nt, Human
uuuauaugugaagguuugcaga

SEQ ID NO: 556906 - RNA, 22 nt, Human
aagcacagggacucaggaccgg

SEQ ID NO: 556907 - RNA, 22 nt, Human
acaguaauaaguguuggugagg

SEQ ID NO: 556908 - RNA, 19 nt, Human
ucucaauucuccccacugc

SEQ ID NO: 556909 - RNA, 22 nt, Human
cuugcaggauuuugcugcugua

SEQ ID NO: 556910 - RNA, 22 nt, Human
caggugcccagcuccugcugug

SEQ ID NO: 556911 - RNA, 21 nt, Human
uugcaccaugauaaauucaga

SEQ ID NO: 556912 - RNA, 22 nt, Human
acccagaggugucuagcaagcu

SEQ ID NO: 556913 - RNA, 22 nt, Human
cagcaaaauuugaggauugccu

SEQ ID NO: 556914 - RNA, 22 nt, Human
aaggcagaaauucaacuacugg

SEQ ID NO: 556915 - RNA, 22 nt, Human
gugucaggcagucagcauggag

SEQ ID NO: 556916 - RNA, 22 nt, Human
acacauauguaugcaucaugug

SEQ ID NO: 556917 - RNA, 22 nt, Human
ugagccccggaguuucaggcug

SEQ ID NO: 556918 - RNA, 22 nt, Human
gaaugugugacucuauugagca

SEQ ID NO: 556919 - RNA, 22 nt, Human
ucuuuucuugcauuauugcacu

SEQ ID NO: 556920 - RNA, 22 nt, Human
caaauagaacucacagacaaga

SEQ ID NO: 556921 - RNA, 22 nt, Human
ucuccugcucagaacagccuca

SEQ ID NO: 556922 - RNA, 22 nt, Human
gcaccugggcaaggauucagag

SEQ ID NO: 556923 - RNA, 22 nt, Human
aauauaugaccaggaaguucug

SEQ ID NO: 556924 - RNA, 22 nt, Human
ggcugcaggaugcccagccgug

SEQ ID NO: 556925 - RNA, 22 nt, Human
uguugagacugagggagucagc

SEQ ID NO: 556926 - RNA, 22 nt, Human
gcuggcugcgucaucacagggc

SEQ ID NO: 556927 - RNA, 22 nt, Human
agaguggggaagguguugagaa

SEQ ID NO: 556928 - RNA, 22 nt, Human
gaaauagaggacagcuggauca

SEQ ID NO: 556929 - RNA, 22 nt, Human
gaccucagugaauggucaugua

SEQ ID NO: 556930 - RNA, 22 nt, Human
aagccaagaguuaacuauuugu

SEQ ID NO: 556931 - RNA, 22 nt, Human
caaugugguggcagaugucagu

SEQ ID NO: 556932 - RNA, 22 nt, Human
aagagcuggaguuugcagcccu

SEQ ID NO: 556933 - RNA, 22 nt, Human
gcagcuuuggagguggaacucu

SEQ ID NO: 556934 - RNA, 22 nt, Human
uuccagaaaacgcuuuauuuag

SEQ ID NO: 556935 - RNA, 22 nt, Human
gaugggggccagggccugcuuu

SEQ ID NO: 556936 - RNA, 22 nt, Human
agaaacagaagggaaagcuuuu

SEQ ID NO: 556937 - RNA, 22 nt, Human
ugggcucuggguggccugagca

SEQ ID NO: 556938 - RNA, 22 nt, Human
cauacauuuauacacaucuaug

SEQ ID NO: 556939 - RNA, 22 nt, Human
uaagaagcuucugcuaaugccu

SEQ ID NO: 556940 - RNA, 22 nt, Human
agggcacaggcuccggguccag

SEQ ID NO: 556941 - RNA, 22 nt, Human
auccucuguggauuacaccuag

SEQ ID NO: 556942 - RNA, 22 nt, Human
uggacagguuugggugccuguu

SEQ ID NO: 556943 - RNA, 22 nt, Human
accugggauggggccagguuua

SEQ ID NO: 556944 - RNA, 22 nt, Human
ggggcagagaauaaaaaccuaa

SEQ ID NO: 556945 - RNA, 22 nt, Human
ggcaguagccagggacuggcag

SEQ ID NO: 556946 - RNA, 22 nt, Human
uaagaaguguugccuaaugcaa

SEQ ID NO: 556947 - RNA, 22 nt, Human
cagguuggagaucugucuaugg

SEQ ID NO: 556948 - RNA, 22 nt, Human
auuacacauagacauucguuca

SEQ ID NO: 556949 - RNA, 22 nt, Human
acagaauuuacacaucucuaaa

SEQ ID NO: 556950 - RNA, 22 nt, Human
cugccuguuuucugauagauuu

SEQ ID NO: 556951 - RNA, 18 nt, Human
uguggcaggggugggaga

SEQ ID NO: 556952 - RNA, 22 nt, Human
guggcaggaucacggcucacug

SEQ ID NO: 556953 - RNA, 22 nt, Human
gggcugggcaugguguucccuc

SEQ ID NO: 556954 - RNA, 22 nt, Human
gaaggcuggcuuucugagagca

SEQ ID NO: 556955 - RNA, 22 nt, Human
uuaacaugucuugacuucaucu

SEQ ID NO: 556956 - RNA, 18 nt, Human
uaacauguuuucauuaag

SEQ ID NO: 556957 - RNA, 23 nt, Human
agaggggagcaucugcuggcuga

SEQ ID NO: 556958 - RNA, 22 nt, Human
uaucaaaguuguccugugaagu

SEQ ID NO: 556959 - RNA, 22 nt, Human
uggaccugcuggaugggcaggu

SEQ ID NO: 556960 - RNA, 22 nt, Human
caccugccugguccuuagggcu

SEQ ID NO: 556961 - RNA, 22 nt, Human
uaggcagaaaggaaggcaaguu

SEQ ID NO: 556962 - RNA, 22 nt, Human
cuauacacuuuuugaaaauaga

SEQ ID NO: 556963 - RNA, 22 nt, Human
uuccauuuauucuuguccagau

SEQ ID NO: 556964 - RNA, 22 nt, Human
ucucaguguggugcuuaggaua

SEQ ID NO: 556965 - RNA, 22 nt, Human
ggugggguauuugguacuugua

SEQ ID NO: 556966 - RNA, 22 nt, Human
uguuaaaaauucagcucuagau

SEQ ID NO: 556967 - RNA, 22 nt, Human
cugccuguggacacccuggagg

SEQ ID NO: 556968 - RNA, 22 nt, Human
cauugcacuccacccuaggcaa

SEQ ID NO: 556969 - RNA, 22 nt, Human
gugcauguuaaugguguacaaa

SEQ ID NO: 556970 - RNA, 21 nt, Human
uggagcugccacuugagcugc

SEQ ID NO: 556971 - RNA, 20 nt, Human
uccuugaaagugggguauau

SEQ ID NO: 556972 - RNA, 19 nt, Human
acagggcagcaauaggaua

SEQ ID NO: 556973 - RNA, 22 nt, Human
gcagccccaggagacgcccagg

SEQ ID NO: 556974 - RNA, 22 nt, Human
aucaaaaugcuccagugauggu

SEQ ID NO: 556975 - RNA, 22 nt, Human
aggccuggguguucaccagaag

SEQ ID NO: 556976 - RNA, 22 nt, Human
ugcuggccaacaaggcuccaag

SEQ ID NO: 556977 - RNA, 22 nt, Human
gagggcugauguugccaccuca

SEQ ID NO: 556978 - RNA, 22 nt, Human
uggagcugagagccaggcuggc

SEQ ID NO: 556979 - RNA, 22 nt, Human
cacugaagcuuucauucucuug

SEQ ID NO: 556980 - RNA, 22 nt, Human
agcuucuuaaguuccugcagca

SEQ ID NO: 556981 - RNA, 22 nt, Human
ugcuucuguuacauaccagaac

SEQ ID NO: 556982 - RNA, 22 nt, Human
uugagaagaggcuuuguaggaa

SEQ ID NO: 556983 - RNA, 22 nt, Human
cggcagagugugugcgugcaug

SEQ ID NO: 556984 - RNA, 22 nt, Human
auguagcaugaggcacugugcc

SEQ ID NO: 556985 - RNA, 22 nt, Human
uuugucuuauccaaucucucag

SEQ ID NO: 556986 - RNA, 22 nt, Human
ugauugacuuuagaauagcacu

SEQ ID NO: 556987 - RNA, 22 nt, Human
aaggcaguaaaaucuaccuugc

SEQ ID NO: 556988 - RNA, 22 nt, Human
aguacauuuaguuuaugaacau

SEQ ID NO: 556989 - RNA, 22 nt, Human
uaauacuuaccuugcagagucu

SEQ ID NO: 556990 - RNA, 22 nt, Human
gaagcagcaaaucugcaguauc

SEQ ID NO: 556991 - RNA, 22 nt, Human
ucaccagggcuccagccagccu

SEQ ID NO: 556992 - RNA, 22 nt, Human
aguauuucugcucaugaaagag

SEQ ID NO: 556993 - RNA, 20 nt, Human
ucagaugggagugagccauc

SEQ ID NO: 556994 - RNA, 21 nt, Human
uuucugucucugccacuaguu

SEQ ID NO: 556995 - RNA, 23 nt, Human
ggggaaguggcagugagugaggc

SEQ ID NO: 556996 - RNA, 22 nt, Human
cuuuaagacucugcucuuggug

SEQ ID NO: 556997 - RNA, 22 nt, Human
uacagguaaaauuaucagaaac

SEQ ID NO: 556998 - RNA, 22 nt, Human
agaggcagccguauuucaaagg

SEQ ID NO: 556999 - RNA, 22 nt, Human
gcagagugaggaagagcuucca

SEQ ID NO: 557000 - RNA, 22 nt, Human
aguggggcggacaggaccagga

SEQ ID NO: 557001 - RNA, 22 nt, Human
cccaggagguggagguugcagc

SEQ ID NO: 557002 - RNA, 22 nt, Human
ggcugaaguguaguggcucacu

SEQ ID NO: 557003 - RNA, 22 nt, Human
ugaagccagcuuuggaagacac

SEQ ID NO: 557004 - RNA, 22 nt, Human
ucuucagauugcacugagcaag

SEQ ID NO: 557005 - RNA, 22 nt, Human
cagcugccaugacauguccugc

SEQ ID NO: 557006 - RNA, 22 nt, Human
agucccaggcagccgagccggu

SEQ ID NO: 557007 - RNA, 22 nt, Human
ggaaaucagcagaugcugguga

SEQ ID NO: 557008 - RNA, 22 nt, Human
gcuggcagggugguugagagag

SEQ ID NO: 557009 - RNA, 22 nt, Human
ccagacuguggaguuccuggug

SEQ ID NO: 557010 - RNA, 22 nt, Human
ugcaggcugcucaagacuuagu

SEQ ID NO: 557011 - RNA, 22 nt, Human
ucaggaaggcgccccaucagga

SEQ ID NO: 557012 - RNA, 22 nt, Human
cagaaacuguggauucauuaaa

SEQ ID NO: 557013 - RNA, 22 nt, Human
uucuggcaaggcaagccuggcu

SEQ ID NO: 557014 - RNA, 22 nt, Human
ucaggcucaggaauguguuuau

SEQ ID NO: 557015 - RNA, 22 nt, Human
aucaggaugacuauaaggcugc

SEQ ID NO: 557016 - RNA, 22 nt, Human
ggggacugccuuccacagacac

SEQ ID NO: 557017 - RNA, 22 nt, Human
aggugcagcaugaguccaacgg

SEQ ID NO: 557018 - RNA, 22 nt, Human
caggaagggggauccuuggaag

SEQ ID NO: 557019 - RNA, 21 nt, Human
ccugggagaucagcugccuuc

SEQ ID NO: 557020 - RNA, 22 nt, Human
gcugggagcccuggucugcucc

SEQ ID NO: 557021 - RNA, 22 nt, Human
uagaaaagaauuuuauuugaua

SEQ ID NO: 557022 - RNA, 22 nt, Human
uggaacacaagucauugagggg

SEQ ID NO: 557023 - RNA, 22 nt, Human
aaagacauuagcuuagauguca

SEQ ID NO: 557024 - RNA, 18 nt, Human
ucucugaauauuuuaugu

SEQ ID NO: 557025 - RNA, 22 nt, Human
ggaggcacuucccgucucagcc

SEQ ID NO: 557026 - RNA, 22 nt, Human
uggccaguugaagacaaugcuc

SEQ ID NO: 557027 - RNA, 22 nt, Human
cucacugucuguacuagcugau

SEQ ID NO: 557028 - RNA, 22 nt, Human
gaaaugugggucaugacccauu

SEQ ID NO: 557029 - RNA, 22 nt, Human
uuaaggcauucuccuacuaaua

SEQ ID NO: 557030 - RNA, 22 nt, Human
ucuuucucucuaaucaagcaca

SEQ ID NO: 557031 - RNA, 22 nt, Human
ggcacugacugugcagcgcacc

SEQ ID NO: 557032 - RNA, 22 nt, Human
gugaagcagaguguggaagcaa

SEQ ID NO: 557033 - RNA, 21 nt, Human
gccuggcuagaagcuccuagc

SEQ ID NO: 557034 - RNA, 22 nt, Human
cucuucaggaauaugucaguca

SEQ ID NO: 557035 - RNA, 22 nt, Human
aggcugggaagguaaaguugua

SEQ ID NO: 557036 - RNA, 22 nt, Human
ugugaugguucacugggcauga

SEQ ID NO: 557037 - RNA, 22 nt, Human
gucaggauuaaugggaguaugc

SEQ ID NO: 557038 - RNA, 20 nt, Human
gagauggcuaagugcugaac

SEQ ID NO: 557039 - RNA, 22 nt, Human
agccauugaguuuuaugugcua

SEQ ID NO: 557040 - RNA, 22 nt, Human
uugaagaccuuuagugcuaugu

SEQ ID NO: 557041 - RNA, 22 nt, Human
ucagcaggcccauccuccaggc

SEQ ID NO: 557042 - RNA, 22 nt, Human
gaccauuuuuacagagcauuca

SEQ ID NO: 557043 - RNA, 18 nt, Human
agucucagcggaggagua

SEQ ID NO: 557044 - RNA, 22 nt, Human
ucccuuaaccguaggacagucu

SEQ ID NO: 557045 - RNA, 19 nt, Human
aagauuuggucauugauaa

SEQ ID NO: 557046 - RNA, 19 nt, Human
ugcauaaauuauauacuuu

SEQ ID NO: 557047 - RNA, 22 nt, Human
agggcucagccuccuccucagc

SEQ ID NO: 557048 - RNA, 22 nt, Human
gcugccuggagcucagccugcc

SEQ ID NO: 557049 - RNA, 22 nt, Human
ucaaagcacacuuagugguaga

SEQ ID NO: 557050 - RNA, 22 nt, Human
aaagcaaucagauucagauguc

SEQ ID NO: 557051 - RNA, 22 nt, Human
cugggaggcaccgcgucgugcu

SEQ ID NO: 557052 - RNA, 22 nt, Human
agaaacucuaggucaauugagg

SEQ ID NO: 557053 - RNA, 22 nt, Human
uuacaguaugaucaacuuuuca

SEQ ID NO: 557054 - RNA, 22 nt, Human
ucagguucuggugagggcccuu

SEQ ID NO: 557055 - RNA, 22 nt, Human
ccuggccugugaaucugagagc

SEQ ID NO: 557056 - RNA, 22 nt, Human
auucauucugaccucaagagaa

SEQ ID NO: 557057 - RNA, 22 nt, Human
aaauucagauggcuuucuuuuc

SEQ ID NO: 557058 - RNA, 22 nt, Human
acugggccgcgcugcagagggc

SEQ ID NO: 557059 - RNA, 20 nt, Human
ccugugcuuaucacuugcug

SEQ ID NO: 557060 - RNA, 22 nt, Human
gaggcuggacgugcauuucuac

SEQ ID NO: 557061 - RNA, 22 nt, Human
cuggagugcaguggcaugauca

SEQ ID NO: 557062 - RNA, 22 nt, Human
gaaaaaggauaaauacaguguu

SEQ ID NO: 557063 - RNA, 22 nt, Human
aucugaaacucugacauugucu

SEQ ID NO: 557064 - RNA, 22 nt, Human
agaggccggccgagcccauggg

SEQ ID NO: 557065 - RNA, 22 nt, Human
guuacaaaggacugggggccac

SEQ ID NO: 557066 - RNA, 21 nt, Human
cuuugcaucuauauguucuca

SEQ ID NO: 557067 - RNA, 22 nt, Human
aaggcccuggcaggaagcagga

SEQ ID NO: 557068 - RNA, 22 nt, Human
agcuguggcagcagccguggca

SEQ ID NO: 557069 - RNA, 22 nt, Human
ucucucagucagaugcuaaaga

SEQ ID NO: 557070 - RNA, 22 nt, Human
uaaagcaguaugauggaaggau

SEQ ID NO: 557071 - RNA, 22 nt, Human
ugccuguguggucugcgcauua

SEQ ID NO: 557072 - RNA, 22 nt, Human
acuauacaagauuagggauuug

SEQ ID NO: 557073 - RNA, 22 nt, Human
cucugggcaaguuucuucauga

SEQ ID NO: 557074 - RNA, 22 nt, Human
gaaaugacaaggacauuccugu

SEQ ID NO: 557075 - RNA, 22 nt, Human
acagaaauugggcaaauggaag

SEQ ID NO: 557076 - RNA, 20 nt, Human
ugcagcugguuucacaggga

SEQ ID NO: 557077 - RNA, 22 nt, Human
ccagucagagcagcgcucgcau

SEQ ID NO: 557078 - RNA, 22 nt, Human
ucccuguccugggcaaucccag

SEQ ID NO: 557079 - RNA, 22 nt, Human
uccugugauggcuugcgaugug

SEQ ID NO: 557080 - RNA, 22 nt, Human
cuguggcuaugguguacauacu

SEQ ID NO: 557081 - RNA, 22 nt, Human
ucuuuauugcuacugguuuguc

SEQ ID NO: 557082 - RNA, 22 nt, Human
uuccucagacccucauugugag

SEQ ID NO: 557083 - RNA, 22 nt, Human
acaaaggcauagugaauguuuu

SEQ ID NO: 557084 - RNA, 22 nt, Human
gauuuguuucaaguuagcaucu

SEQ ID NO: 557085 - RNA, 22 nt, Human
ccucccagugccuccagagcag

SEQ ID NO: 557086 - RNA, 22 nt, Human
guccagggcuaaaucagguucc

SEQ ID NO: 557087 - RNA, 22 nt, Human
guuuguguaacaugaugaugau

SEQ ID NO: 557088 - RNA, 22 nt, Human
cugagcagucuagccagguguu

SEQ ID NO: 557089 - RNA, 21 nt, Human
cugguguagcacucaggugcu

SEQ ID NO: 557090 - RNA, 21 nt, Human
aggugccaaggagaagcaggc

SEQ ID NO: 557091 - RNA, 22 nt, Human
gggauuugugggauggccagug

SEQ ID NO: 557092 - RNA, 22 nt, Human
ugaauaguucuacuacuugaca

SEQ ID NO: 557093 - RNA, 19 nt, Human
agagaaggauccuaugguu

SEQ ID NO: 557094 - RNA, 22 nt, Human
acacauuuucuaacagggauca

SEQ ID NO: 557095 - RNA, 22 nt, Human
gccuggcccagggcucuuguug

SEQ ID NO: 557096 - RNA, 22 nt, Human
ugccuggcaaugccagaagcca

SEQ ID NO: 557097 - RNA, 20 nt, Human
gucagaggacccuagagcga

SEQ ID NO: 557098 - RNA, 19 nt, Human
ggccuggauuuagggcucc

SEQ ID NO: 557099 - RNA, 22 nt, Human
uaggccagcccuuaguccuguc

SEQ ID NO: 557100 - RNA, 22 nt, Human
ugaaaucuacccuauucagggu

SEQ ID NO: 557101 - RNA, 22 nt, Human
agggucaaaugggcaggaagag

SEQ ID NO: 557102 - RNA, 22 nt, Human
agggccagaguacaucagggcu

SEQ ID NO: 557103 - RNA, 22 nt, Human
uugagagucauuuaagguguug

SEQ ID NO: 557104 - RNA, 22 nt, Human
uggcacugggaugcuacuguua

SEQ ID NO: 557105 - RNA, 22 nt, Human
uggcagcauguuauguaaggaa

SEQ ID NO: 557106 - RNA, 22 nt, Human
acaaaggcaggauugacuuagu

SEQ ID NO: 557107 - RNA, 22 nt, Human
ugguggcagucuccuggcugug

SEQ ID NO: 557108 - RNA, 22 nt, Human
ggcucuggugaggguaggagau

SEQ ID NO: 557109 - RNA, 22 nt, Human
aucaggauggguuuggcuuagg

SEQ ID NO: 557110 - RNA, 20 nt, Human
auaauuauuuacuuuugugc

SEQ ID NO: 557111 - RNA, 22 nt, Human
caccuggcagcuguuggccacg

SEQ ID NO: 557112 - RNA, 22 nt, Human
gguucuuuggcagucugauuga

SEQ ID NO: 557113 - RNA, 23 nt, Human
cagaggcaucggauucaacauca

SEQ ID NO: 557114 - RNA, 22 nt, Human
uugccuugauucuucucaugug

SEQ ID NO: 557115 - RNA, 17 nt, Human
ggagcagauccaccauu

SEQ ID NO: 557116 - RNA, 22 nt, Human
gcagccaggaaagcuggacccu

SEQ ID NO: 557117 - RNA, 22 nt, Human
ccagagagggcgccaccuggag

SEQ ID NO: 557118 - RNA, 23 nt, Human
cauaugaaaguagacacuuucca

SEQ ID NO: 557119 - RNA, 22 nt, Human
aagccagguguugugguaagag

SEQ ID NO: 557120 - RNA, 18 nt, Human
guccugagcucugcugua

SEQ ID NO: 557121 - RNA, 22 nt, Human
agcugucuccagauacaggauu

SEQ ID NO: 557122 - RNA, 22 nt, Human
gcagggcagccacaggcccccu

SEQ ID NO: 557123 - RNA, 22 nt, Human
uuugcauuuauaaguuggugga

SEQ ID NO: 557124 - RNA, 17 nt, Human
uucagaagcauuuuggc

SEQ ID NO: 557125 - RNA, 22 nt, Human
gcuggcuguuggagguaccugc

SEQ ID NO: 557126 - RNA, 22 nt, Human
gggacugggagauccuccuggc

SEQ ID NO: 557127 - RNA, 22 nt, Human
gcuggccucaucacugacuucu

SEQ ID NO: 557128 - RNA, 22 nt, Human
uacugaaauggcagauauauaa

SEQ ID NO: 557129 - RNA, 22 nt, Human
cccugcugugccugacugccau

SEQ ID NO: 557130 - RNA, 22 nt, Human
agaaaucauuuuaggcuugaug

SEQ ID NO: 557131 - RNA, 19 nt, Human
uguuuuguuaaagcagucc

SEQ ID NO: 557132 - RNA, 22 nt, Human
cauguuaaugaauuuuugcagu

SEQ ID NO: 557133 - RNA, 22 nt, Human
accugcaagcauuacacuucua

SEQ ID NO: 557134 - RNA, 22 nt, Human
cucucugcuguauccuuaggcu

SEQ ID NO: 557135 - RNA, 22 nt, Human
gaaauucaaauaagauauguag

SEQ ID NO: 557136 - RNA, 22 nt, Human
acuuggagagcauugcugggga

SEQ ID NO: 557137 - RNA, 22 nt, Human
ucccuggguccugcuugcucuc

SEQ ID NO: 557138 - RNA, 22 nt, Human
ggcaggugcccagagagcacga

SEQ ID NO: 557139 - RNA, 22 nt, Human
auuauguagguuaggugguugu

SEQ ID NO: 557140 - RNA, 22 nt, Human
gacauuuaauaguauuguggga

SEQ ID NO: 557141 - RNA, 22 nt, Human
uagaacaugcucauguauaaau

SEQ ID NO: 557142 - RNA, 22 nt, Human
cccagccuuccacccuggacua

SEQ ID NO: 557143 - RNA, 21 nt, Human
cugcuuccucucuucauggca

SEQ ID NO: 557144 - RNA, 22 nt, Human
ucacaggagggagagacaccca

SEQ ID NO: 557145 - RNA, 22 nt, Human
uuacacaguauccaagguucuu

SEQ ID NO: 557146 - RNA, 22 nt, Human
ccucagccuuggccccaggcag

SEQ ID NO: 557147 - RNA, 22 nt, Human
ucacauuuguucuugaaucuaa

SEQ ID NO: 557148 - RNA, 22 nt, Human
uuucagaauaucgauucaguga

SEQ ID NO: 557149 - RNA, 22 nt, Human
cugggcucaaauccuggcccug

SEQ ID NO: 557150 - RNA, 22 nt, Human
ucugaaauccuuuaucuuggcu

SEQ ID NO: 557151 - RNA, 22 nt, Human
uaaaugcagcaguuucuguucu

SEQ ID NO: 557152 - RNA, 21 nt, Human
uccaauuuuuaagacuauggc

SEQ ID NO: 557153 - RNA, 22 nt, Human
cacacagaugguaagggaggga

SEQ ID NO: 557154 - RNA, 22 nt, Human
caacagaaggaagcagggucag

SEQ ID NO: 557155 - RNA, 22 nt, Human
ucagaaucugcauuuaacaaaa

SEQ ID NO: 557156 - RNA, 21 nt, Human
gcagagccugagguucuugag

SEQ ID NO: 557157 - RNA, 22 nt, Human
ugcuuugugauaugcugugucu

SEQ ID NO: 557158 - RNA, 22 nt, Human
gaaaucaauuucuugguugaua

SEQ ID NO: 557159 - RNA, 22 nt, Human
ggcaggcaggucuucauggccc

SEQ ID NO: 557160 - RNA, 22 nt, Human
gucauuucuguuucuucagugc

SEQ ID NO: 557161 - RNA, 22 nt, Human
aggccugggacgggagccguga

SEQ ID NO: 557162 - RNA, 22 nt, Human
gggcccuggauuuaagcaugga

SEQ ID NO: 557163 - RNA, 22 nt, Human
uccagggguaccggccaggcag

SEQ ID NO: 557164 - RNA, 21 nt, Human
uuuuuucuugcgugaggccug

SEQ ID NO: 557165 - RNA, 22 nt, Human
uuacagagguauguaugucucu

SEQ ID NO: 557166 - RNA, 21 nt, Human
acauuauaauucauauuccac

SEQ ID NO: 557167 - RNA, 22 nt, Human
cacagggcuuugauggcugagu

SEQ ID NO: 557168 - RNA, 22 nt, Human
guuuauuaacugucaagugauu

SEQ ID NO: 557169 - RNA, 19 nt, Human
ccucccacggauuccuucc

SEQ ID NO: 557170 - RNA, 19 nt, Human
cuugguuaugguaugaugc

SEQ ID NO: 557171 - RNA, 22 nt, Human
acagaacugcagacagugccaa

SEQ ID NO: 557172 - RNA, 22 nt, Human
guccagggccccgagcaccagg

SEQ ID NO: 557173 - RNA, 22 nt, Human
ugcugccucugcugauauggcc

SEQ ID NO: 557174 - RNA, 22 nt, Human
aagugacaaaaggguauccaaa

SEQ ID NO: 557175 - RNA, 21 nt, Human
gcugcucgagauccagugcuu

SEQ ID NO: 557176 - RNA, 22 nt, Human
ucauuuucacacauaaauagca

SEQ ID NO: 557177 - RNA, 22 nt, Human
ccuaagaucugguaugugacag

SEQ ID NO: 557178 - RNA, 22 nt, Human
uuuucaggccagaagauagacc

SEQ ID NO: 557179 - RNA, 22 nt, Human
auagucuuagaucagauaaagu

SEQ ID NO: 557180 - RNA, 22 nt, Human
cuccaggggccagaagccuggc

SEQ ID NO: 557181 - RNA, 22 nt, Human
gagcucauccccaugguccguc

SEQ ID NO: 557182 - RNA, 22 nt, Human
guucccauacaguaucagugcu

SEQ ID NO: 557183 - RNA, 22 nt, Human
cagucucuaaaucaaucugaau

SEQ ID NO: 557184 - RNA, 22 nt, Human
uggcucucaggccugcugcguu

SEQ ID NO: 557185 - RNA, 22 nt, Human
caaacuuucaguuauaacauga

SEQ ID NO: 557186 - RNA, 22 nt, Human
aagggaggggauguaagccugg

SEQ ID NO: 557187 - RNA, 22 nt, Human
acuuuuaaggggccuugauuua

SEQ ID NO: 557188 - RNA, 22 nt, Human
ugguggggcuuuccuucugcuu

SEQ ID NO: 557189 - RNA, 22 nt, Human
ggccugcuucucagugagcuug

SEQ ID NO: 557190 - RNA, 22 nt, Human
acuuucaagaacuucuuuaaug

SEQ ID NO: 557191 - RNA, 22 nt, Human
aacugcauuugcauaaguccau

SEQ ID NO: 557192 - RNA, 22 nt, Human
ucagggacuuacaaaccagaag

SEQ ID NO: 557193 - RNA, 22 nt, Human
auaacagauacucucugugagg

SEQ ID NO: 557194 - RNA, 22 nt, Human
uaaguucaccaguuguaauaag

SEQ ID NO: 557195 - RNA, 22 nt, Human
agaaugcaguuugaaauaaggu

SEQ ID NO: 557196 - RNA, 22 nt, Human
ucucccacuggccuuguaugau

SEQ ID NO: 557197 - RNA, 22 nt, Human
cucuggagggaggcugagcugg

SEQ ID NO: 557198 - RNA, 22 nt, Human
ucaugcaaggcugaaacauggu

SEQ ID NO: 557199 - RNA, 22 nt, Human
agcagcaggagccgugggguga

SEQ ID NO: 557200 - RNA, 22 nt, Human
ugaggcagaaaauagcaguuca

SEQ ID NO: 557201 - RNA, 22 nt, Human
aaagucauuggaauauuaauga

SEQ ID NO: 557202 - RNA, 23 nt, Human
uggcucugugucacauacaggau

SEQ ID NO: 557203 - RNA, 21 nt, Human
auucagaaagggaauaaacuc

SEQ ID NO: 557204 - RNA, 22 nt, Human
agccuggcuguaaccucauggu

SEQ ID NO: 557205 - RNA, 22 nt, Human
uccugagggcgauucagcaggu

SEQ ID NO: 557206 - RNA, 22 nt, Human
aauuaacuaaaauucacuuuau

SEQ ID NO: 557207 - RNA, 22 nt, Human
cauugcacgggcgucugucugu

SEQ ID NO: 557208 - RNA, 22 nt, Human
gcugaaaugccuuguaaauauu

SEQ ID NO: 557209 - RNA, 22 nt, Human
gaggaggaaguucucuguaggc

SEQ ID NO: 557210 - RNA, 22 nt, Human
ggaccugcccuggcucagaugc

SEQ ID NO: 557211 - RNA, 22 nt, Human
aggcacuuaaccuacuaacuga

SEQ ID NO: 557212 - RNA, 22 nt, Human
uggaacacagugauugauagcg

SEQ ID NO: 557213 - RNA, 22 nt, Human
uuugaaaauuuaagugcuacac

SEQ ID NO: 557214 - RNA, 22 nt, Human
agggggcccuugcaggugagcg

SEQ ID NO: 557215 - RNA, 22 nt, Human
ccaggugggcgugucuucaccu

SEQ ID NO: 557216 - RNA, 22 nt, Human
ggagccagagggaugcaguuga

SEQ ID NO: 557217 - RNA, 22 nt, Human
guucacagguucucuuucuaag

SEQ ID NO: 557218 - RNA, 22 nt, Human
agccacgucccugucaggguca

SEQ ID NO: 557219 - RNA, 21 nt, Human
agggaaagaaaaugagcuaau

SEQ ID NO: 557220 - RNA, 22 nt, Human
cauucuaaaguguuuuauaccu

SEQ ID NO: 557221 - RNA, 22 nt, Human
ggagugaaucacuagaugcaga

SEQ ID NO: 557222 - RNA, 22 nt, Human
aacaguaagagauguuuuaucu

SEQ ID NO: 557223 - RNA, 22 nt, Human
acugucaggauggcagcuuguu

SEQ ID NO: 557224 - RNA, 22 nt, Human
ucuccugggaggacaaggaagg

SEQ ID NO: 557225 - RNA, 17 nt, Human
auuuccucagggcugag

SEQ ID NO: 557226 - RNA, 22 nt, Human
cuggcagcgguuugcagccugg

SEQ ID NO: 557227 - RNA, 22 nt, Human
ugcuugggaauguggagucaga

SEQ ID NO: 557228 - RNA, 22 nt, Human
ccugcagaggucaggccagaaa

SEQ ID NO: 557229 - RNA, 22 nt, Human
cugcugggcuccucaugugacu

SEQ ID NO: 557230 - RNA, 22 nt, Human
ugucagcagcugguuugcuguu

SEQ ID NO: 557231 - RNA, 22 nt, Human
gccacuggcaucuaguugguag

SEQ ID NO: 557232 - RNA, 22 nt, Human
caguauuuguucccuaucaaug

SEQ ID NO: 557233 - RNA, 22 nt, Human
aacaucuuugccaaauugcuau

SEQ ID NO: 557234 - RNA, 22 nt, Human
uucacaggaggguggaugcaug

SEQ ID NO: 557235 - RNA, 22 nt, Human
uuaagacaguguauuuguuuuc

SEQ ID NO: 557236 - RNA, 22 nt, Human
acauucaagaugcauucacuua

SEQ ID NO: 557237 - RNA, 22 nt, Human
agaaagggaacuggcaaagcca

SEQ ID NO: 557238 - RNA, 20 nt, Human
cacaacuguccacaugcucc

SEQ ID NO: 557239 - RNA, 22 nt, Human
ugcagguggauaucucaucaga

SEQ ID NO: 557240 - RNA, 22 nt, Human
caagagcugaggcuggagaggu

SEQ ID NO: 557241 - RNA, 22 nt, Human
uuaggaaguguguccagaagcg

SEQ ID NO: 557242 - RNA, 22 nt, Human
aauguucaguagaauaggaaug

SEQ ID NO: 557243 - RNA, 22 nt, Human
aaagaauaguuaaguuuagggc

SEQ ID NO: 557244 - RNA, 22 nt, Human
uuucuuuugcugagaggggcac

SEQ ID NO: 557245 - RNA, 22 nt, Human
augauugaaaaugacauugcca

SEQ ID NO: 557246 - RNA, 22 nt, Human
agguguguauaaacauacauau

SEQ ID NO: 557247 - RNA, 22 nt, Human
cagcacugcugcuguacacaca

SEQ ID NO: 557248 - RNA, 21 nt, Human
cugcuuuacuucagaggaucu

SEQ ID NO: 557249 - RNA, 22 nt, Human
aggcugaggaucccuguguucu

SEQ ID NO: 557250 - RNA, 22 nt, Human
auuuucucucaaaccuuaaaau

SEQ ID NO: 557251 - RNA, 22 nt, Human
ggcuguggggccggguacagug

SEQ ID NO: 557252 - RNA, 22 nt, Human
acuuucuucuuaugcauuaagg

SEQ ID NO: 557253 - RNA, 22 nt, Human
ucacauuuguuccucugcacuu

SEQ ID NO: 557254 - RNA, 22 nt, Human
ggcagugagucccggagaggcc

SEQ ID NO: 557255 - RNA, 22 nt, Human
gaaggccacggaauggagcugg

SEQ ID NO: 557256 - RNA, 22 nt, Human
aauauuucuccuucguuauagc

SEQ ID NO: 557257 - RNA, 22 nt, Human
uucaguauguuggacguuaugu

SEQ ID NO: 557258 - RNA, 22 nt, Human
ggaggccaaggcagguggaucg

SEQ ID NO: 557259 - RNA, 22 nt, Human
agcuguggaguaggggguugga

SEQ ID NO: 557260 - RNA, 20 nt, Human
ucccuggaggugguggcauc

SEQ ID NO: 557261 - RNA, 22 nt, Human
ggugaaggucagagcaggaaaa

SEQ ID NO: 557262 - RNA, 23 nt, Human
ucccagggaaggugagcgaggcu

SEQ ID NO: 557263 - RNA, 22 nt, Human
aguguguguuugggcgguuuau

SEQ ID NO: 557264 - RNA, 22 nt, Human
cagucacacaaguggacuuggg

SEQ ID NO: 557265 - RNA, 22 nt, Human
cagaaacugcuuguggucaucu

SEQ ID NO: 557266 - RNA, 22 nt, Human
auccaguuuaugucauauucuu

SEQ ID NO: 557267 - RNA, 22 nt, Human
auccacagucuuagccaucaaa

SEQ ID NO: 557268 - RNA, 22 nt, Human
ccagagccagagaggugccugc

SEQ ID NO: 557269 - RNA, 18 nt, Human
ucucuuuuccccucauug

SEQ ID NO: 557270 - RNA, 22 nt, Human
uagauacauacauuuuaaaaug

SEQ ID NO: 557271 - RNA, 22 nt, Human
ucccaggauguuggcggcaggu

SEQ ID NO: 557272 - RNA, 22 nt, Human
cggccuugacaagcuuagcagc

SEQ ID NO: 557273 - RNA, 22 nt, Human
uaauuucuucaucucugcagcu

SEQ ID NO: 557274 - RNA, 22 nt, Human
ccaguguuggaggauggcuugc

SEQ ID NO: 557275 - RNA, 22 nt, Human
ccuggaaggcaggcauggauug

SEQ ID NO: 557276 - RNA, 22 nt, Human
uuuggcaagcgaguacuuucug

SEQ ID NO: 557277 - RNA, 22 nt, Human
auaaaaguucaagagaguacag

SEQ ID NO: 557278 - RNA, 17 nt, Human
uuccuggaagucauucc

SEQ ID NO: 557279 - RNA, 22 nt, Human
gcagaggccuagguggaaggcc

SEQ ID NO: 557280 - RNA, 22 nt, Human
uuucccaagaaaaauaauugga

SEQ ID NO: 557281 - RNA, 22 nt, Human
uucacagccucugccccaggca

SEQ ID NO: 557282 - RNA, 22 nt, Human
aagcagaguuagcuugucaccu

SEQ ID NO: 557283 - RNA, 22 nt, Human
ccucagaugucuuaaggcacug

SEQ ID NO: 557284 - RNA, 22 nt, Human
uagcuuuaccauagaagaguau

SEQ ID NO: 557285 - RNA, 22 nt, Human
ggcugccugaggcugaggcccg

SEQ ID NO: 557286 - RNA, 22 nt, Human
ucuaggaguugauaaaagggcu

SEQ ID NO: 557287 - RNA, 16 nt, Human
uuuguucacuccaugg

SEQ ID NO: 557288 - RNA, 22 nt, Human
ggcaguuuuaacagagguagua

SEQ ID NO: 557289 - RNA, 22 nt, Human
guuauuuuaacuucucaguaau

SEQ ID NO: 557290 - RNA, 22 nt, Human
uccucagggaagaugagccuca

SEQ ID NO: 557291 - RNA, 22 nt, Human
aaucuucauguccucucuaauu

SEQ ID NO: 557292 - RNA, 22 nt, Human
caaauguaauaaggaguuuccc

SEQ ID NO: 557293 - RNA, 20 nt, Human
ggggcccaagcccucuugcc

SEQ ID NO: 557294 - RNA, 22 nt, Human
uugcucugaaccacaccaucac

SEQ ID NO: 557295 - RNA, 22 nt, Human
acuggauugggaaaguacuuca

SEQ ID NO: 557296 - RNA, 22 nt, Human
caaauguguuuuuucuucuaca

SEQ ID NO: 557297 - RNA, 20 nt, Human
uuucuguaaggcauuaaucu

SEQ ID NO: 557298 - RNA, 22 nt, Human
aaguguuuccgggagacuuggu

SEQ ID NO: 557299 - RNA, 22 nt, Human
cugggaaguggugagggccuga

SEQ ID NO: 557300 - RNA, 22 nt, Human
gugaaauauuuuguuuauguca

SEQ ID NO: 557301 - RNA, 22 nt, Human
acacaggaagucagcacugaug

SEQ ID NO: 557302 - RNA, 22 nt, Human
aaaacaggugucagcaaacuau

SEQ ID NO: 557303 - RNA, 22 nt, Human
aaagcaagucucuacaaaguac

SEQ ID NO: 557304 - RNA, 22 nt, Human
uggcccagaucucugaccuuga

SEQ ID NO: 557305 - RNA, 22 nt, Human
aacauaauguggccaaagucac

SEQ ID NO: 557306 - RNA, 22 nt, Human
uccauuaaaccuggauggaguu

SEQ ID NO: 557307 - RNA, 22 nt, Human
uggccacagccucugccaguuc

SEQ ID NO: 557308 - RNA, 22 nt, Human
gcugagagugggugcagugcuu

SEQ ID NO: 557309 - RNA, 22 nt, Human
cagagcauuuggaagccacgug

SEQ ID NO: 557310 - RNA, 22 nt, Human
accagagcgcucaagccuuccc

SEQ ID NO: 557311 - RNA, 22 nt, Human
gugaccaucagagaauaacaaa

SEQ ID NO: 557312 - RNA, 23 nt, Human
ucaauaacucggguuaaaauaga

SEQ ID NO: 557313 - RNA, 22 nt, Human
gcagcuuuaaaggaggcucuga

SEQ ID NO: 557314 - RNA, 22 nt, Human
cucuuccucucaugcggucaua

SEQ ID NO: 557315 - RNA, 22 nt, Human
gaaggagaggauugugaggcug

SEQ ID NO: 557316 - RNA, 22 nt, Human
ggugaccucaccuggucccacc

SEQ ID NO: 557317 - RNA, 22 nt, Human
acagaugguacuaaacccauau

SEQ ID NO: 557318 - RNA, 22 nt, Human
gaacuuaacggcaacuauuuaa

SEQ ID NO: 557319 - RNA, 22 nt, Human
aauauaugagggagcuauuuga

SEQ ID NO: 557320 - RNA, 22 nt, Human
uguuccaagcugcuggauaagc

SEQ ID NO: 557321 - RNA, 22 nt, Human
ucuggagccuuggaugggaaag

SEQ ID NO: 557322 - RNA, 22 nt, Human
aaggcaggaugcggacccaucu

SEQ ID NO: 557323 - RNA, 20 nt, Human
gccaggcacuguucucaaua

SEQ ID NO: 557324 - RNA, 22 nt, Human
uuucaaagucaauaucauuacc

SEQ ID NO: 557325 - RNA, 22 nt, Human
ucaaaacaacacucagguguaa

SEQ ID NO: 557326 - RNA, 22 nt, Human
uugugaauagugccgcuauaaa

SEQ ID NO: 557327 - RNA, 22 nt, Human
uccuggaggcaaaugaagacuc

SEQ ID NO: 557328 - RNA, 22 nt, Human
gaggcagccucaguggaccucg

SEQ ID NO: 557329 - RNA, 22 nt, Human
ucagggcaaagggcagaguuug

SEQ ID NO: 557330 - RNA, 22 nt, Human
cuguaaaacacuguaguaucug

SEQ ID NO: 557331 - RNA, 22 nt, Human
cuggagcuccagggucuccucu

SEQ ID NO: 557332 - RNA, 22 nt, Human
cagaggcugaugugggaugggc

SEQ ID NO: 557333 - RNA, 22 nt, Human
uauucacagcugccgcacucag

SEQ ID NO: 557334 - RNA, 22 nt, Human
gccagguggucuggcuccagag

SEQ ID NO: 557335 - RNA, 22 nt, Human
guggcugcuacagagcuggagg

SEQ ID NO: 557336 - RNA, 22 nt, Human
ucccagaagugaaauuucuaga

SEQ ID NO: 557337 - RNA, 20 nt, Human
uggagccaaggugugucugg

SEQ ID NO: 557338 - RNA, 22 nt, Human
uccucaggagagcuccuaugcc

SEQ ID NO: 557339 - RNA, 22 nt, Human
gauauuuucauucggaugcuca

SEQ ID NO: 557340 - RNA, 22 nt, Human
ugcaagaggauuguaucaauaa

SEQ ID NO: 557341 - RNA, 22 nt, Human
uuccaaaggaauggggagcuau

SEQ ID NO: 557342 - RNA, 22 nt, Human
gagagguccauuccccugucag

SEQ ID NO: 557343 - RNA, 22 nt, Human
gcucugggauuaccagccuuag

SEQ ID NO: 557344 - RNA, 20 nt, Human
cccuggagagaagcuccacg

SEQ ID NO: 557345 - RNA, 22 nt, Human
gcagggcuauuggaaggagaug

SEQ ID NO: 557346 - RNA, 22 nt, Human
agaauuuuugcaguuuagccau

SEQ ID NO: 557347 - RNA, 22 nt, Human
caguaacugaugugaucaaacg

SEQ ID NO: 557348 - RNA, 22 nt, Human
gagcagggccacuucuguaccu

SEQ ID NO: 557349 - RNA, 22 nt, Human
gaguaaaaguuggauuacaaag

SEQ ID NO: 557350 - RNA, 22 nt, Human
agcugggcugaugacucauguu

SEQ ID NO: 557351 - RNA, 22 nt, Human
uaacagaauccuguuauugcca

SEQ ID NO: 557352 - RNA, 22 nt, Human
cagcagcaaaucuagaagagga

SEQ ID NO: 557353 - RNA, 22 nt, Human
acaauguucucugaguugugug

SEQ ID NO: 557354 - RNA, 22 nt, Human
auggauauuggccaaacucauu

SEQ ID NO: 557355 - RNA, 22 nt, Human
auagacuugaggauauaaugaa

SEQ ID NO: 557356 - RNA, 22 nt, Human
uuguaaauaguaguaagaugcc

SEQ ID NO: 557357 - RNA, 22 nt, Human
ggcuuugggcccucaagucucc

SEQ ID NO: 557358 - RNA, 22 nt, Human
ugaaauuccaggagaguuaaaa

SEQ ID NO: 557359 - RNA, 22 nt, Human
uugcacagaugagggugaugcu

SEQ ID NO: 557360 - RNA, 18 nt, Human
gcagcugcaguuguagcu

SEQ ID NO: 557361 - RNA, 21 nt, Human
ggccuuccccugcagucuccg

SEQ ID NO: 557362 - RNA, 22 nt, Human
uucuucuugaaacuuuagguug

SEQ ID NO: 557363 - RNA, 23 nt, Human
guguguggaaagugcaugggccu

SEQ ID NO: 557364 - RNA, 22 nt, Human
gagggugcaggcaagagcaaaa

SEQ ID NO: 557365 - RNA, 22 nt, Human
auagugggaauuacgauauacu

SEQ ID NO: 557366 - RNA, 22 nt, Human
uauagagguggaaacugagguu

SEQ ID NO: 557367 - RNA, 22 nt, Human
uuuuccuuucaucaggacaaag

SEQ ID NO: 557368 - RNA, 22 nt, Human
gccagagugccaucagugccau

SEQ ID NO: 557369 - RNA, 22 nt, Human
acagguccucaagucagcuggg

SEQ ID NO: 557370 - RNA, 22 nt, Human
aauucagcacagaggaaccagu

SEQ ID NO: 557371 - RNA, 22 nt, Human
aaggccagacaggaccacaucu

SEQ ID NO: 557372 - RNA, 22 nt, Human
uguaaaagacauuucuaagcaa

SEQ ID NO: 557373 - RNA, 17 nt, Human
aaguccagccugcagcu

SEQ ID NO: 557374 - RNA, 22 nt, Human
agggcugacagugaggagucaa

SEQ ID NO: 557375 - RNA, 22 nt, Human
gggcaggaggcuaauucugcau

SEQ ID NO: 557376 - RNA, 22 nt, Human
aagugguguguuggaagaaauc

SEQ ID NO: 557377 - RNA, 22 nt, Human
agggaaagguagugaggucaca

SEQ ID NO: 557378 - RNA, 17 nt, Human
uccuucagugccucugc

SEQ ID NO: 557379 - RNA, 22 nt, Human
uuucuucuuaauacuggcugcu

SEQ ID NO: 557380 - RNA, 22 nt, Human
uaaacugaagcucaacucaaau

SEQ ID NO: 557381 - RNA, 22 nt, Human
gggcauggaggucugucugcag

SEQ ID NO: 557382 - RNA, 22 nt, Human
ugaguggacgugaggcugagua

SEQ ID NO: 557383 - RNA, 22 nt, Human
uauugucuguccgggucaaagc

SEQ ID NO: 557384 - RNA, 22 nt, Human
cugaagagcucuccuguccccu

SEQ ID NO: 557385 - RNA, 22 nt, Human
cacagcuaauggaaguggaauc

SEQ ID NO: 557386 - RNA, 22 nt, Human
uuucacagcagaauuucugagg

SEQ ID NO: 557387 - RNA, 22 nt, Human
uaugagaaucugcaguaugcuu

SEQ ID NO: 557388 - RNA, 21 nt, Human
aaucaagaguacugguguggc

SEQ ID NO: 557389 - RNA, 22 nt, Human
ugcaggugcguuuucaagccuc

SEQ ID NO: 557390 - RNA, 22 nt, Human
ucugggagguguuuugagaacu

SEQ ID NO: 557391 - RNA, 22 nt, Human
cugcuuuguggaaucacacugg

SEQ ID NO: 557392 - RNA, 22 nt, Human
uuagcuuucuuggagaauuaca

SEQ ID NO: 557393 - RNA, 22 nt, Human
uuacaacagacacauauucuaa

SEQ ID NO: 557394 - RNA, 22 nt, Human
uggaagcaacaacuauggacca

SEQ ID NO: 557395 - RNA, 22 nt, Human
uaauuucaauagcuugcauaau

SEQ ID NO: 557396 - RNA, 23 nt, Human
cagcuucuuugggauucuuuaua

SEQ ID NO: 557397 - RNA, 22 nt, Human
gggcugagagugacuguucugu

SEQ ID NO: 557398 - RNA, 22 nt, Human
uccuggauuaauagggagcugu

SEQ ID NO: 557399 - RNA, 22 nt, Human
uacagcauguccuuagcaaggc

SEQ ID NO: 557400 - RNA, 22 nt, Human
uauacacaggaaucugugaaaa

SEQ ID NO: 557401 - RNA, 22 nt, Human
aacaaauggaacacaaaucuuu

SEQ ID NO: 557402 - RNA, 22 nt, Human
uaagucauuuggagccacugga

SEQ ID NO: 557403 - RNA, 22 nt, Human
auuucaucccaggcucuggaag

SEQ ID NO: 557404 - RNA, 22 nt, Human
gccagaaagaggaggaccuggg

SEQ ID NO: 557405 - RNA, 22 nt, Human
ggggagcuuagggucucugaau

SEQ ID NO: 557406 - RNA, 22 nt, Human
gcuguucagggcacucaugggc

SEQ ID NO: 557407 - RNA, 22 nt, Human
uccuguaguugcuaaguuuguu

SEQ ID NO: 557408 - RNA, 22 nt, Human
acaaaguaggucaucaaagcuc

SEQ ID NO: 557409 - RNA, 22 nt, Human
cacauacaaggcacacuggagg

SEQ ID NO: 557410 - RNA, 22 nt, Human
ggugacaguuccggagguacag

SEQ ID NO: 557411 - RNA, 22 nt, Human
uaugagaaauugcugauauuug

SEQ ID NO: 557412 - RNA, 22 nt, Human
acauuuauauaacucacuagga

SEQ ID NO: 557413 - RNA, 22 nt, Human
ugcuuuaucaaagcuauaguga

SEQ ID NO: 557414 - RNA, 18 nt, Human
uagggcucuagggaguga

SEQ ID NO: 557415 - RNA, 22 nt, Human
uuucagugucaguaaugcagca

SEQ ID NO: 557416 - RNA, 20 nt, Human
uucaugggagcaaagaggcc

SEQ ID NO: 557417 - RNA, 22 nt, Human
gaaugcacuuccaacaucuauu

SEQ ID NO: 557418 - RNA, 21 nt, Human
gagugucuaauccaggcuguc

SEQ ID NO: 557419 - RNA, 22 nt, Human
ccuggccucuccgaguaaccug

SEQ ID NO: 557420 - RNA, 22 nt, Human
uuuccaauguagaugucucugg

SEQ ID NO: 557421 - RNA, 22 nt, Human
uccagggaugguaaugagcagu

SEQ ID NO: 557422 - RNA, 22 nt, Human
acucaggaaaugaagacugguu

SEQ ID NO: 557423 - RNA, 22 nt, Human
cuccaaguccgagggcucucaa

SEQ ID NO: 557424 - RNA, 22 nt, Human
cuuauucagauacagacucuug

SEQ ID NO: 557425 - RNA, 22 nt, Human
ccacagaggacaacugccuggc

SEQ ID NO: 557426 - RNA, 22 nt, Human
aggccagaaaugucagggagug

SEQ ID NO: 557427 - RNA, 22 nt, Human
gcagagcucaagguguucagcu

SEQ ID NO: 557428 - RNA, 22 nt, Human
gccugugugugaggacuggcug

SEQ ID NO: 557429 - RNA, 22 nt, Human
cugagccauaagggaggcuggg

SEQ ID NO: 557430 - RNA, 22 nt, Human
aggacaguccgggguccuccac

SEQ ID NO: 557431 - RNA, 22 nt, Human
aauuuauuuccugccaguacac

SEQ ID NO: 557432 - RNA, 22 nt, Human
cagcuagaaagucuguuaggga

SEQ ID NO: 557433 - RNA, 22 nt, Human
ugacaguugagcauguaagaga

SEQ ID NO: 557434 - RNA, 23 nt, Human
ugggcaucuccucugugccaggc

SEQ ID NO: 557435 - RNA, 22 nt, Human
caggccuuuuuuccugcagugu

SEQ ID NO: 557436 - RNA, 22 nt, Human
acagugauugguuuggggguga

SEQ ID NO: 557437 - RNA, 22 nt, Human
acccaggccugagagacaggag

SEQ ID NO: 557438 - RNA, 22 nt, Human
ucagagagguuaaauaucuugu

SEQ ID NO: 557439 - RNA, 22 nt, Human
acaggcacucucauuaaaauag

SEQ ID NO: 557440 - RNA, 23 nt, Human
guucauuuuauugucugauugcu

SEQ ID NO: 557441 - RNA, 22 nt, Human
cagcagcuucuguugaucagaa

SEQ ID NO: 557442 - RNA, 22 nt, Human
uaguuacagcaggcaggauaua

SEQ ID NO: 557443 - RNA, 22 nt, Human
uacuuagagcgauaauuuauac

SEQ ID NO: 557444 - RNA, 22 nt, Human
auacauuagcucauaugauuaa

SEQ ID NO: 557445 - RNA, 22 nt, Human
aggagaggaaucauuauuacaa

SEQ ID NO: 557446 - RNA, 22 nt, Human
aacuuucagcaaguaauucugg

SEQ ID NO: 557447 - RNA, 22 nt, Human
gguuccuucugaggucccugua

SEQ ID NO: 557448 - RNA, 22 nt, Human
uaaaaguggauaagcuguagga

SEQ ID NO: 557449 - RNA, 22 nt, Human
ggucauugaaaucagaaggguu

SEQ ID NO: 557450 - RNA, 22 nt, Human
agcuuuaugcuuccuacaagcu

SEQ ID NO: 557451 - RNA, 22 nt, Human
ccugcagcuguaggagaaggcg

SEQ ID NO: 557452 - RNA, 22 nt, Human
gggcuggcaucgguugcugaga

SEQ ID NO: 557453 - RNA, 22 nt, Human
ggaagaggcugaggccaugcug

SEQ ID NO: 557454 - RNA, 22 nt, Human
acuguucauauucuuagaaauu

SEQ ID NO: 557455 - RNA, 22 nt, Human
ucagaggaucaugucccuacuc

SEQ ID NO: 557456 - RNA, 22 nt, Human
gcugagggcuggucacauuugu

SEQ ID NO: 557457 - RNA, 22 nt, Human
accagagcuggcucugagcacc

SEQ ID NO: 557458 - RNA, 22 nt, Human
auaaaaguuuccaaucaugccu

SEQ ID NO: 557459 - RNA, 22 nt, Human
aaacacagggauauauauucca

SEQ ID NO: 557460 - RNA, 22 nt, Human
ugacugaagaagccacauugga

SEQ ID NO: 557461 - RNA, 22 nt, Human
uuuauuuggcauccagggagaa

SEQ ID NO: 557462 - RNA, 22 nt, Human
cagacuuucaaggagugaaggc

SEQ ID NO: 557463 - RNA, 22 nt, Human
ucucccagaaguccucaguaca

SEQ ID NO: 557464 - RNA, 18 nt, Human
caugucugcgccacaagg

SEQ ID NO: 557465 - RNA, 22 nt, Human
aagguacaaaguauuauuuaaa

SEQ ID NO: 557466 - RNA, 22 nt, Human
augggcucuaugucuaggagau

SEQ ID NO: 557467 - RNA, 22 nt, Human
uuaugugccacuuuuugaagau

SEQ ID NO: 557468 - RNA, 22 nt, Human
gaggaaagaaccccagucaaua

SEQ ID NO: 557469 - RNA, 22 nt, Human
uggcagggccuaccccaauauc

SEQ ID NO: 557470 - RNA, 22 nt, Human
cugagaguguggcuuccaggcc

SEQ ID NO: 557471 - RNA, 22 nt, Human
cacagaggcaaccuucuggggu

SEQ ID NO: 557472 - RNA, 22 nt, Human
acaaaucuguuuuauagacuuu

SEQ ID NO: 557473 - RNA, 22 nt, Human
agcccagaaaugaaaggaugau

SEQ ID NO: 557474 - RNA, 22 nt, Human
ggccuggcucuugcccagccug

SEQ ID NO: 557475 - RNA, 22 nt, Human
ggcuguggucauuaggagguug

SEQ ID NO: 557476 - RNA, 22 nt, Human
cacauaaguggguuccauugca

SEQ ID NO: 557477 - RNA, 22 nt, Human
augggaggcagcagagcccagc

SEQ ID NO: 557478 - RNA, 22 nt, Human
ucuaaacauugguauggagcag

SEQ ID NO: 557479 - RNA, 22 nt, Human
uucugaaaccuucaguaugaag

SEQ ID NO: 557480 - RNA, 22 nt, Human
uaaguuagcaaggccaagguaa

SEQ ID NO: 557481 - RNA, 21 nt, Human
aacauuucugggagaacucac

SEQ ID NO: 557482 - RNA, 22 nt, Human
uguacagacuuugcagugugca

SEQ ID NO: 557483 - RNA, 22 nt, Human
ugcuggggagugauugaccauc

SEQ ID NO: 557484 - RNA, 22 nt, Human
gcaaagcugggugugaaugcac

SEQ ID NO: 557485 - RNA, 21 nt, Human
uuucaauguguucuuuguagu

SEQ ID NO: 557486 - RNA, 22 nt, Human
cagguacacucccuugugcuga

SEQ ID NO: 557487 - RNA, 22 nt, Human
uaccugcacagccagccaugug

SEQ ID NO: 557488 - RNA, 22 nt, Human
ucaauuuuaugaaacaaaguga

SEQ ID NO: 557489 - RNA, 22 nt, Human
aaacaaauagugcaugggaauu

SEQ ID NO: 557490 - RNA, 22 nt, Human
agggcagagcugucuaaauggc

SEQ ID NO: 557491 - RNA, 22 nt, Human
ucuuuacaguccucugucaauc

SEQ ID NO: 557492 - RNA, 22 nt, Human
aggagccaagcagaacuaagga

SEQ ID NO: 557493 - RNA, 22 nt, Human
ugcagguggauucaauguggga

SEQ ID NO: 557494 - RNA, 22 nt, Human
auuccagaauaccggcaagaug

SEQ ID NO: 557495 - RNA, 22 nt, Human
acacauuaaccuuugaaauucu

SEQ ID NO: 557496 - RNA, 22 nt, Human
cugcccugagucaugccagaug

SEQ ID NO: 557497 - RNA, 22 nt, Human
gcaggcagucaucuuucauauu

SEQ ID NO: 557498 - RNA, 22 nt, Human
auuguaaguagaaauguuaugg

SEQ ID NO: 557499 - RNA, 19 nt, Human
uaguggagugacaaguucu

SEQ ID NO: 557500 - RNA, 20 nt, Human
cucucuggaaggugggagcc

SEQ ID NO: 557501 - RNA, 22 nt, Human
guccucugagggggcugcacgc

SEQ ID NO: 557502 - RNA, 22 nt, Human
cugugcaguggcagcguguggg

SEQ ID NO: 557503 - RNA, 22 nt, Human
aggagaaggaggccccucacac

SEQ ID NO: 557504 - RNA, 22 nt, Human
gccaggagaaugcuagcagagg

SEQ ID NO: 557505 - RNA, 22 nt, Human
uuaccaccuguaucacauuuuu

SEQ ID NO: 557506 - RNA, 22 nt, Human
uguaacaguaguuacuauucuu

SEQ ID NO: 557507 - RNA, 22 nt, Human
ccaggagguggagauugcagug

SEQ ID NO: 557508 - RNA, 22 nt, Human
gggcacuguguucagagugcag

SEQ ID NO: 557509 - RNA, 22 nt, Human
ucuagaaaaaaacugcugugga

SEQ ID NO: 557510 - RNA, 22 nt, Human
uguggccuccccacuucugggg

SEQ ID NO: 557511 - RNA, 22 nt, Human
uaacacuucagaugauuuuguu

SEQ ID NO: 557512 - RNA, 22 nt, Human
auuuuucucuuuccacugagau

SEQ ID NO: 557513 - RNA, 21 nt, Human
ugccaggccugagcugggguc

SEQ ID NO: 557514 - RNA, 22 nt, Human
ucuaggaaccugacaucucuca

SEQ ID NO: 557515 - RNA, 22 nt, Human
gcagagacuccacugucuugug

SEQ ID NO: 557516 - RNA, 22 nt, Human
aaaguacagccacauccaagua

SEQ ID NO: 557517 - RNA, 19 nt, Human
gguggcucucccucaggga

SEQ ID NO: 557518 - RNA, 22 nt, Human
uuaacagagaacauagaaguag

SEQ ID NO: 557519 - RNA, 22 nt, Human
agugugugcaugcauucgugca

SEQ ID NO: 557520 - RNA, 22 nt, Human
agaggcaccgucugcagcgugc

SEQ ID NO: 557521 - RNA, 23 nt, Human
augaaacucaagccagauccaag

SEQ ID NO: 557522 - RNA, 22 nt, Human
agcuccugauacaugcaggaau

SEQ ID NO: 557523 - RNA, 22 nt, Human
aaaugccucauuuucucucacu

SEQ ID NO: 557524 - RNA, 22 nt, Human
ggcagaagauaggacagggaau

SEQ ID NO: 557525 - RNA, 22 nt, Human
gccaggcuggugcaaggauauu

SEQ ID NO: 557526 - RNA, 22 nt, Human
guaacaaaguuucuaggugcug

SEQ ID NO: 557527 - RNA, 22 nt, Human
uggggccucaggccuuuuccua

SEQ ID NO: 557528 - RNA, 22 nt, Human
auagaaacagggaagcaaagca

SEQ ID NO: 557529 - RNA, 22 nt, Human
ccagaagauggcucaaaccaug

SEQ ID NO: 557530 - RNA, 22 nt, Human
gggcagguguugucaaucuaau

SEQ ID NO: 557531 - RNA, 22 nt, Human
ccuuuucuagaaagggaggcaa

SEQ ID NO: 557532 - RNA, 22 nt, Human
uuuaagcacagggauaaaguua

SEQ ID NO: 557533 - RNA, 18 nt, Human
augcccuguugacuucag

SEQ ID NO: 557534 - RNA, 22 nt, Human
aguucucagcuuaguaugcugu

SEQ ID NO: 557535 - RNA, 22 nt, Human
cagcagccuacaaugcacagaa

SEQ ID NO: 557536 - RNA, 23 nt, Human
ucugagaagguuucagccagacu

SEQ ID NO: 557537 - RNA, 22 nt, Human
uucauaaacaaauuaaggccug

SEQ ID NO: 557538 - RNA, 22 nt, Human
gcauggcaagaucaggagacca

SEQ ID NO: 557539 - RNA, 22 nt, Human
auccucagaccucagcaaagcc

SEQ ID NO: 557540 - RNA, 22 nt, Human
cagagcugacccaaggauugaa

SEQ ID NO: 557541 - RNA, 22 nt, Human
aaggcugagagucacaguccua

SEQ ID NO: 557542 - RNA, 22 nt, Human
gccaguggaggacccauggaga

SEQ ID NO: 557543 - RNA, 22 nt, Human
auucacauuuacaaagcacuca

SEQ ID NO: 557544 - RNA, 22 nt, Human
uauuaauaagugacuacuagcu

SEQ ID NO: 557545 - RNA, 22 nt, Human
acacagccgugaaucugcuucu

SEQ ID NO: 557546 - RNA, 22 nt, Human
gcucagaggagcaucauaagga

SEQ ID NO: 557547 - RNA, 22 nt, Human
auugacaaggaaacuauaccag

SEQ ID NO: 557548 - RNA, 22 nt, Human
uccucagaaaccccugugaggu

SEQ ID NO: 557549 - RNA, 22 nt, Human
ccugagcaucagcgccuccuua

SEQ ID NO: 557550 - RNA, 22 nt, Human
gagguggccucaagcagucuuc

SEQ ID NO: 557551 - RNA, 22 nt, Human
ucacagccuggacaguugccug

SEQ ID NO: 557552 - RNA, 22 nt, Human
aucagcaaggcaaucacugcag

SEQ ID NO: 557553 - RNA, 22 nt, Human
ccacugggcguuucuguccaau

SEQ ID NO: 557554 - RNA, 22 nt, Human
ggccugcugacccaaguccugu

SEQ ID NO: 557555 - RNA, 22 nt, Human
uucuuuuuggauagcugaugaa

SEQ ID NO: 557556 - RNA, 22 nt, Human
caugcuuugggucagaaaugcc

SEQ ID NO: 557557 - RNA, 22 nt, Human
ucauccaguaugacuggugucu

SEQ ID NO: 557558 - RNA, 22 nt, Human
aaggcaguacuuuauguccaua

SEQ ID NO: 557559 - RNA, 22 nt, Human
acuaaauacacacauuuguuca

SEQ ID NO: 557560 - RNA, 22 nt, Human
uugucuguaaagacggccacca

SEQ ID NO: 557561 - RNA, 22 nt, Human
uuaacauuucuuuuccacucau

SEQ ID NO: 557562 - RNA, 22 nt, Human
cauuguuaauugguaucuuaca

SEQ ID NO: 557563 - RNA, 22 nt, Human
gaaagcaguaaaugggucccau

SEQ ID NO: 557564 - RNA, 22 nt, Human
uguucuuuagcagaccauguug

SEQ ID NO: 557565 - RNA, 18 nt, Human
gagacacaagggccugga

SEQ ID NO: 557566 - RNA, 22 nt, Human
agcugccuguccuaggccauca

SEQ ID NO: 557567 - RNA, 22 nt, Human
gagcuucccucugcagucccug

SEQ ID NO: 557568 - RNA, 22 nt, Human
gccacagggcagaugcgcagag

SEQ ID NO: 557569 - RNA, 22 nt, Human
auaagguaugaaaaguaaaugg

SEQ ID NO: 557570 - RNA, 22 nt, Human
agguuuauguuuggugcaggag

SEQ ID NO: 557571 - RNA, 22 nt, Human
uagcagggguagauagagugug

SEQ ID NO: 557572 - RNA, 22 nt, Human
ggcagauggaagaggcuggguc

SEQ ID NO: 557573 - RNA, 22 nt, Human
aacagacauauuuuuaauaugc

SEQ ID NO: 557574 - RNA, 22 nt, Human
aaaggucagacuuaggcugggc

SEQ ID NO: 557575 - RNA, 22 nt, Human
ugcguugcgcuccugcagcagg

SEQ ID NO: 557576 - RNA, 22 nt, Human
ugaggggagacagaguggacuc

SEQ ID NO: 557577 - RNA, 22 nt, Human
agaaaccucacagcaauucuga

SEQ ID NO: 557578 - RNA, 22 nt, Human
aauguugauguuuucagugagc

SEQ ID NO: 557579 - RNA, 22 nt, Human
gaaaaugugucaucccuacugu

SEQ ID NO: 557580 - RNA, 22 nt, Human
uguauuucgcuagguacucccu

SEQ ID NO: 557581 - RNA, 22 nt, Human
acuguacuguguauuguagaau

SEQ ID NO: 557582 - RNA, 22 nt, Human
gaaacaacuacuauugauuucu

SEQ ID NO: 557583 - RNA, 22 nt, Human
ccugucauacuaacguaguggg

SEQ ID NO: 557584 - RNA, 22 nt, Human
cauguggcuuuggcaugugccc

SEQ ID NO: 557585 - RNA, 22 nt, Human
acuaaacacaugagauuccugc

SEQ ID NO: 557586 - RNA, 22 nt, Human
cacagcugcccuacuccaugug

SEQ ID NO: 557587 - RNA, 22 nt, Human
gucucaguaagaaaggcuccug

SEQ ID NO: 557588 - RNA, 22 nt, Human
augggcuggcagccugaacagc

SEQ ID NO: 557589 - RNA, 19 nt, Human
gcucucccucucaguugag

SEQ ID NO: 557590 - RNA, 22 nt, Human
gugggaugcaguggugaguggc

SEQ ID NO: 557591 - RNA, 22 nt, Human
uaacacugguauuucauuuagu

SEQ ID NO: 557592 - RNA, 22 nt, Human
cuuccucugcggcgccgggcgc

SEQ ID NO: 557593 - RNA, 22 nt, Human
cagcugaguguuggcauguuca

SEQ ID NO: 557594 - RNA, 22 nt, Human
aagaagugguuggaagaagcau

SEQ ID NO: 557595 - RNA, 22 nt, Human
acucugaaauagaggcuggugg

SEQ ID NO: 557596 - RNA, 22 nt, Human
cagaggggauaacagguguaga

SEQ ID NO: 557597 - RNA, 22 nt, Human
ugaguggaguagugaaugcauu

SEQ ID NO: 557598 - RNA, 22 nt, Human
uuucucucagccuguagaaacu

SEQ ID NO: 557599 - RNA, 22 nt, Human
ucagagaguccuggucauuugc

SEQ ID NO: 557600 - RNA, 20 nt, Human
ucagacagucgcaguucugg

SEQ ID NO: 557601 - RNA, 22 nt, Human
ggucccugaagaugccugagga

SEQ ID NO: 557602 - RNA, 22 nt, Human
cucaggagaugacagaagguau

SEQ ID NO: 557603 - RNA, 17 nt, Human
ggcuggaggggacccgg

SEQ ID NO: 557604 - RNA, 22 nt, Human
ugggcuccucgucacucgcugu

SEQ ID NO: 557605 - RNA, 22 nt, Human
ugaaggccuaacuuccagugcu

SEQ ID NO: 557606 - RNA, 22 nt, Human
uccuucagugucccgcucaggu

SEQ ID NO: 557607 - RNA, 22 nt, Human
caaagcaaggcucaguuugaac

SEQ ID NO: 557608 - RNA, 22 nt, Human
ugccacuggcucaauggugcag

SEQ ID NO: 557609 - RNA, 22 nt, Human
agaugguuaucuaagugaaaaa

SEQ ID NO: 557610 - RNA, 22 nt, Human
uuauuuguggcauaugagacga

SEQ ID NO: 557611 - RNA, 22 nt, Human
gaguccaguuguucacagaggc

SEQ ID NO: 557612 - RNA, 22 nt, Human
uguuuucuguguagagaucaca

SEQ ID NO: 557613 - RNA, 22 nt, Human
cuguacaggugaggagggggcu

SEQ ID NO: 557614 - RNA, 22 nt, Human
acagagauguggaugagggauu

SEQ ID NO: 557615 - RNA, 21 nt, Human
guucuggaggcugcaagucca

SEQ ID NO: 557616 - RNA, 22 nt, Human
uggcacauaguaggugcucaau

SEQ ID NO: 557617 - RNA, 22 nt, Human
uaaguucaagucuuggauauaa

SEQ ID NO: 557618 - RNA, 20 nt, Human
guuuuucuugggcgagcuau

SEQ ID NO: 557619 - RNA, 22 nt, Human
gacugggcuccaagagggagag

SEQ ID NO: 557620 - RNA, 22 nt, Human
aucuggcuugacuuugcgacuu

SEQ ID NO: 557621 - RNA, 22 nt, Human
uucuuuccucccagccuuugga

SEQ ID NO: 557622 - RNA, 21 nt, Human
gccugcuguucacccugccac

SEQ ID NO: 557623 - RNA, 22 nt, Human
augcaaaaguaguugcaguuuu

SEQ ID NO: 557624 - RNA, 22 nt, Human
ggccugcacagagguggcucua

SEQ ID NO: 557625 - RNA, 22 nt, Human
guuugucuuaauuaggcaucga

SEQ ID NO: 557626 - RNA, 22 nt, Human
uccuggagagugggcgagcaca

SEQ ID NO: 557627 - RNA, 22 nt, Human
uggcaggggaggugcuugcuua

SEQ ID NO: 557628 - RNA, 22 nt, Human
uuccagaguugggggagugguu

SEQ ID NO: 557629 - RNA, 22 nt, Human
ggcuggguuauuuauggccaag

SEQ ID NO: 557630 - RNA, 22 nt, Human
gcuaucuucauggaaauacagg

SEQ ID NO: 557631 - RNA, 20 nt, Human
cugaacacagaauaagcaca

SEQ ID NO: 557632 - RNA, 22 nt, Human
gcagauggaucaccugaggucg

SEQ ID NO: 557633 - RNA, 20 nt, Human
uguuaaaggacacuugcuuu

SEQ ID NO: 557634 - RNA, 18 nt, Human
agggucagugucacuggc

SEQ ID NO: 557635 - RNA, 22 nt, Human
ggcuagaacuuuacacuuugca

SEQ ID NO: 557636 - RNA, 22 nt, Human
uguaugaauauguuggggaggu

SEQ ID NO: 557637 - RNA, 22 nt, Human
uccauuuuagagaugaagaaac

SEQ ID NO: 557638 - RNA, 22 nt, Human
caguggcuguuucuggaaggca

SEQ ID NO: 557639 - RNA, 22 nt, Human
uguguacagcaggauuucucaa

SEQ ID NO: 557640 - RNA, 22 nt, Human
cagcauuggguuaccuuuguuu

SEQ ID NO: 557641 - RNA, 22 nt, Human
agccaggccagcugucuugagu

SEQ ID NO: 557642 - RNA, 22 nt, Human
aggcuuuccugucacucaugcu

SEQ ID NO: 557643 - RNA, 22 nt, Human
agcuuaaaguauuuaaauuuca

SEQ ID NO: 557644 - RNA, 22 nt, Human
aguggcagaucucuggucugga

SEQ ID NO: 557645 - RNA, 22 nt, Human
ucauuuaauugguuuugcucgu

SEQ ID NO: 557646 - RNA, 22 nt, Human
ucaggggaaaucucucagcgaa

SEQ ID NO: 557647 - RNA, 22 nt, Human
uuccaaauuaaaauguacaaug

SEQ ID NO: 557648 - RNA, 22 nt, Human
cacaauuagcagcucuuuauuu

SEQ ID NO: 557649 - RNA, 22 nt, Human
uggcuggggagccccgacuccc

SEQ ID NO: 557650 - RNA, 22 nt, Human
acagaguacauucagagacuau

SEQ ID NO: 557651 - RNA, 22 nt, Human
uucaagaugucuucacaauagu

SEQ ID NO: 557652 - RNA, 22 nt, Human
aauggcacuuuauaaauguuaa

SEQ ID NO: 557653 - RNA, 22 nt, Human
ugggcucugaagggucccggau

SEQ ID NO: 557654 - RNA, 22 nt, Human
uggcuggcuuguucacugacug

SEQ ID NO: 557655 - RNA, 23 nt, Human
cggacaaccauuguuuuaguauc

SEQ ID NO: 557656 - RNA, 16 nt, Human
gggcugggggauucug

SEQ ID NO: 557657 - RNA, 21 nt, Human
gauuuuaaagagacugccaca

SEQ ID NO: 557658 - RNA, 22 nt, Human
uggcagagacuccuccugggag

SEQ ID NO: 557659 - RNA, 22 nt, Human
uggcuggcaguaggcuaguggc

SEQ ID NO: 557660 - RNA, 23 nt, Human
gcucugagggcuuaucccuccca

SEQ ID NO: 557661 - RNA, 23 nt, Human
agcaggaaaccgagggugauguu

SEQ ID NO: 557662 - RNA, 19 nt, Human
gccagcagaaugaugaggc

SEQ ID NO: 557663 - RNA, 22 nt, Human
aaaguguugauaugugacaucc

SEQ ID NO: 557664 - RNA, 22 nt, Human
ccuggagccccucuggccagcc

SEQ ID NO: 557665 - RNA, 22 nt, Human
gauuuccuugcauauugguaau

SEQ ID NO: 557666 - RNA, 22 nt, Human
cuguccuugcuggccagguaug

SEQ ID NO: 557667 - RNA, 22 nt, Human
gagcacugauuuauuuuugucu

SEQ ID NO: 557668 - RNA, 22 nt, Human
ugagucagccagagcugccaug

SEQ ID NO: 557669 - RNA, 22 nt, Human
gaacaucagucauaauuuaacg

SEQ ID NO: 557670 - RNA, 22 nt, Human
aggucaagggagcugagggcca

SEQ ID NO: 557671 - RNA, 22 nt, Human
aggagcagaauuuaaugugcag

SEQ ID NO: 557672 - RNA, 22 nt, Human
ggcuucaagucguauauuuggg

SEQ ID NO: 557673 - RNA, 22 nt, Human
acacuucaaaugguuggaaaau

SEQ ID NO: 557674 - RNA, 22 nt, Human
cuggcucagugccuucagaagu

SEQ ID NO: 557675 - RNA, 22 nt, Human
ccugagacaugaaccaggcucc

SEQ ID NO: 557676 - RNA, 22 nt, Human
ccuccaaguuugacucaggaca

SEQ ID NO: 557677 - RNA, 22 nt, Human
aaacauuguuaugauaaauuac

SEQ ID NO: 557678 - RNA, 22 nt, Human
ugaggggagaagcagcagccug

SEQ ID NO: 557679 - RNA, 22 nt, Human
gauuaguauccuuauuaagaga

SEQ ID NO: 557680 - RNA, 19 nt, Human
ucagaggauuuggcuauga

SEQ ID NO: 557681 - RNA, 22 nt, Human
aggcagggcugggauuagacuc

SEQ ID NO: 557682 - RNA, 17 nt, Human
acagagcacaucaagau

SEQ ID NO: 557683 - RNA, 22 nt, Human
cacagggcagugauuguccaca

SEQ ID NO: 557684 - RNA, 22 nt, Human
acauuucugcauguaggguaau

SEQ ID NO: 557685 - RNA, 22 nt, Human
aaaucugguucaguaaguccuc

SEQ ID NO: 557686 - RNA, 22 nt, Human
uggugcaguccaaagggagcag

SEQ ID NO: 557687 - RNA, 22 nt, Human
gaaggcuggaaggcaaguagga

SEQ ID NO: 557688 - RNA, 22 nt, Human
cugaagcacagcauauaaauaa

SEQ ID NO: 557689 - RNA, 22 nt, Human
ggcaccugcucaucuggacuca

SEQ ID NO: 557690 - RNA, 22 nt, Human
acugggcucaagugauuguccu

SEQ ID NO: 557691 - RNA, 22 nt, Human
uacugaaagacugaauauuuag

SEQ ID NO: 557692 - RNA, 22 nt, Human
gagccaccuucaacucaggaau

SEQ ID NO: 557693 - RNA, 22 nt, Human
uacuuucauggguuuucuuuau

SEQ ID NO: 557694 - RNA, 22 nt, Human
cccaaccagaaauugacagaga

SEQ ID NO: 557695 - RNA, 22 nt, Human
gccugcagggccugggccuacc

SEQ ID NO: 557696 - RNA, 22 nt, Human
ucaggaugguccuuuaugagaa

SEQ ID NO: 557697 - RNA, 22 nt, Human
gcacccagcccagggcgugaug

SEQ ID NO: 557698 - RNA, 22 nt, Human
cucaggcugugccaccugugug

SEQ ID NO: 557699 - RNA, 22 nt, Human
agagcugcgucuauucacaauc

SEQ ID NO: 557700 - RNA, 22 nt, Human
uagcacaucuggcgcuuauagg

SEQ ID NO: 557701 - RNA, 22 nt, Human
aggaaacaguugguaaugcaua

SEQ ID NO: 557702 - RNA, 22 nt, Human
agcaggcugagcacccaggggg

SEQ ID NO: 557703 - RNA, 20 nt, Human
gcagagcuguucugugggga

SEQ ID NO: 557704 - RNA, 22 nt, Human
agugggggccaacgagggcagc

SEQ ID NO: 557705 - RNA, 19 nt, Human
ugcuuugcaucugauuguu

SEQ ID NO: 557706 - RNA, 22 nt, Human
agcacuuuauucaggaacucca

SEQ ID NO: 557707 - RNA, 22 nt, Human
gcucacagccggcuggcagggg

SEQ ID NO: 557708 - RNA, 21 nt, Human
gcaggguccuuuccauuccua

SEQ ID NO: 557709 - RNA, 22 nt, Human
uugcuuuguggugguucuucca

SEQ ID NO: 557710 - RNA, 20 nt, Human
gcuuuuucuaauagcagucc

SEQ ID NO: 557711 - RNA, 18 nt, Human
uaugugcauaugugugua

SEQ ID NO: 557712 - RNA, 22 nt, Human
cagcagguggacacacucaccu

SEQ ID NO: 557713 - RNA, 22 nt, Human
gccucuguaggagugagagcau

SEQ ID NO: 557714 - RNA, 22 nt, Human
guuugcauggaagacagugagu

SEQ ID NO: 557715 - RNA, 22 nt, Human
aauuucaaugcacucaugguug

SEQ ID NO: 557716 - RNA, 22 nt, Human
cuccagggggcauccacacagc

SEQ ID NO: 557717 - RNA, 22 nt, Human
agcagccacagucugggacagg

SEQ ID NO: 557718 - RNA, 22 nt, Human
agaccaagugcaggugccacua

SEQ ID NO: 557719 - RNA, 22 nt, Human
cucuuaaauaacaucauugcuu

SEQ ID NO: 557720 - RNA, 23 nt, Human
ugcaggugauuaauccaguuuca

SEQ ID NO: 557721 - RNA, 22 nt, Human
cuucuggaaacuuuuccaauuu

SEQ ID NO: 557722 - RNA, 22 nt, Human
uugugcagagaaaucuuucuug

SEQ ID NO: 557723 - RNA, 22 nt, Human
cuauaauuaugcucaaaaugua

SEQ ID NO: 557724 - RNA, 22 nt, Human
ugaggcucagagcaccugcucc

SEQ ID NO: 557725 - RNA, 22 nt, Human
aaagucacauauaacaagggca

SEQ ID NO: 557726 - RNA, 20 nt, Human
ccuggcuuugcaucugugau

SEQ ID NO: 557727 - RNA, 22 nt, Human
uuugugugaaaauauuuaaguu

SEQ ID NO: 557728 - RNA, 22 nt, Human
agugggcuuuuuuccguuccau

SEQ ID NO: 557729 - RNA, 22 nt, Human
cauuuuguagcaaugacuguug

SEQ ID NO: 557730 - RNA, 22 nt, Human
auucuccaucaccacuggcacu

SEQ ID NO: 557731 - RNA, 22 nt, Human
aaugcaaacagcccagaaucca

SEQ ID NO: 557732 - RNA, 22 nt, Human
ugggggagauuagagcuucuua

SEQ ID NO: 557733 - RNA, 22 nt, Human
gggaagggagggccuccaguca

SEQ ID NO: 557734 - RNA, 22 nt, Human
gcaggauggugcccuuucugcc

SEQ ID NO: 557735 - RNA, 21 nt, Human
uggaaagauucaaagaccagg

SEQ ID NO: 557736 - RNA, 22 nt, Human
ucugggcucuuaguguacccuc

SEQ ID NO: 557737 - RNA, 22 nt, Human
cagggcugcuggccgugcccuc

SEQ ID NO: 557738 - RNA, 22 nt, Human
ccugaggacacacgcugcagga

SEQ ID NO: 557739 - RNA, 22 nt, Human
ccucugggagacugcuacugag

SEQ ID NO: 557740 - RNA, 22 nt, Human
agaggaggcagcuuaacucagu

SEQ ID NO: 557741 - RNA, 21 nt, Human
gaugaagcaaucuuucuguug

SEQ ID NO: 557742 - RNA, 22 nt, Human
ugaaggucaugguaauauuuuu

SEQ ID NO: 557743 - RNA, 22 nt, Human
augugcaauuauuaagaagaga

SEQ ID NO: 557744 - RNA, 22 nt, Human
aagaugguuucuguagguuuau

SEQ ID NO: 557745 - RNA, 22 nt, Human
aggcugcucugcgaagucagcu

SEQ ID NO: 557746 - RNA, 22 nt, Human
cccucucucaggcugacagccu

SEQ ID NO: 557747 - RNA, 22 nt, Human
guuacaaagcacuucaagugaa

SEQ ID NO: 557748 - RNA, 22 nt, Human
gcugagucuugagcacugagca

SEQ ID NO: 557749 - RNA, 22 nt, Human
uaccuuuugcuuauuaugacac

SEQ ID NO: 557750 - RNA, 23 nt, Human
ccugccuguucuaacuccauuuc

SEQ ID NO: 557751 - RNA, 22 nt, Human
cacagaaucugugacuccaaga

SEQ ID NO: 557752 - RNA, 22 nt, Human
uucaacaaggcugucaaaaguu

SEQ ID NO: 557753 - RNA, 22 nt, Human
ccuugaggaguccauaguauca

SEQ ID NO: 557754 - RNA, 22 nt, Human
ugggcagaaugugggauccaga

SEQ ID NO: 557755 - RNA, 22 nt, Human
cuguaauucacuagggucagcg

SEQ ID NO: 557756 - RNA, 22 nt, Human
ggaaacuuggcauaauuuuaag

SEQ ID NO: 557757 - RNA, 22 nt, Human
agcagggcagcuuuuuucagaa

SEQ ID NO: 557758 - RNA, 22 nt, Human
auacaaagcuaaauaugguuuc

SEQ ID NO: 557759 - RNA, 22 nt, Human
uuugaucagcaagauaaauaga

SEQ ID NO: 557760 - RNA, 22 nt, Human
ggagcagagcucuucaucugca

SEQ ID NO: 557761 - RNA, 19 nt, Human
uucagaauugggaggugau

SEQ ID NO: 557762 - RNA, 22 nt, Human
cagaaacacuuguagagaaguu

SEQ ID NO: 557763 - RNA, 22 nt, Human
ugaguccaccuuaguauauggg

SEQ ID NO: 557764 - RNA, 22 nt, Human
agucaaagcuacaggcauuuga

SEQ ID NO: 557765 - RNA, 21 nt, Human
ucagagagucacagugaacug

SEQ ID NO: 557766 - RNA, 22 nt, Human
aaaacaguuuaggcaucacagu

SEQ ID NO: 557767 - RNA, 22 nt, Human
aguuuuaucuguaagcuguuca

SEQ ID NO: 557768 - RNA, 22 nt, Human
ucugccuggagaguucuucucu

SEQ ID NO: 557769 - RNA, 22 nt, Human
caggcccaugagggcagccaca

SEQ ID NO: 557770 - RNA, 22 nt, Human
auucagugugagguuuucaagu

SEQ ID NO: 557771 - RNA, 22 nt, Human
agaugcugugaggaagcuagga

SEQ ID NO: 557772 - RNA, 22 nt, Human
agucaccaacaugguucccagg

SEQ ID NO: 557773 - RNA, 22 nt, Human
ggcucuggagacauguggagag

SEQ ID NO: 557774 - RNA, 22 nt, Human
gaacaguaaauuuaugcagcac

SEQ ID NO: 557775 - RNA, 22 nt, Human
ugaaacaaauuuggaaaaucua

SEQ ID NO: 557776 - RNA, 22 nt, Human
uacaaagucuuggguucuaggc

SEQ ID NO: 557777 - RNA, 22 nt, Human
auuccaaagacagaagcagcug

SEQ ID NO: 557778 - RNA, 22 nt, Human
caaggccagggaauuuuucugg

SEQ ID NO: 557779 - RNA, 22 nt, Human
gggcagguguuuccaaggugag

SEQ ID NO: 557780 - RNA, 22 nt, Human
uucuaagugauucuagcuggac

SEQ ID NO: 557781 - RNA, 22 nt, Human
agagggugggcacgugauggau

SEQ ID NO: 557782 - RNA, 22 nt, Human
acagucaaucagaacagcaugu

SEQ ID NO: 557783 - RNA, 20 nt, Human
aaaggaauauaugaaguaua

SEQ ID NO: 557784 - RNA, 22 nt, Human
gaauguaauagucaguagaaca

SEQ ID NO: 557785 - RNA, 22 nt, Human
gugaauauucuuugugcaguau

SEQ ID NO: 557786 - RNA, 22 nt, Human
cuggcaggcucucuggucgguu

SEQ ID NO: 557787 - RNA, 22 nt, Human
ucuucuuugaaucauagugacc

SEQ ID NO: 557788 - RNA, 22 nt, Human
aaugaagccacugaagacaauc

SEQ ID NO: 557789 - RNA, 22 nt, Human
aagggcagggaguuugugucua

SEQ ID NO: 557790 - RNA, 22 nt, Human
ucaaagaacaucaucugaaaug

SEQ ID NO: 557791 - RNA, 22 nt, Human
uagcaaguggcaccacauuucu

SEQ ID NO: 557792 - RNA, 22 nt, Human
uccuccuguuucucaggccugg

SEQ ID NO: 557793 - RNA, 22 nt, Human
cacugggcgccagcugcugagc

SEQ ID NO: 557794 - RNA, 22 nt, Human
gcagguggauuaucagaagugc

SEQ ID NO: 557795 - RNA, 22 nt, Human
auaugugugccauuucagcagu

SEQ ID NO: 557796 - RNA, 22 nt, Human
ucugagggcuugaggggaagua

SEQ ID NO: 557797 - RNA, 22 nt, Human
ucacagcuuugagcagagacca

SEQ ID NO: 557798 - RNA, 22 nt, Human
gaggagguuccggguggagaag

SEQ ID NO: 557799 - RNA, 22 nt, Human
ggcugugaguuuguccuccaug

SEQ ID NO: 557800 - RNA, 22 nt, Human
ugagguguguccccagggaggu

SEQ ID NO: 557801 - RNA, 22 nt, Human
caggcauggugagaacucagcc

SEQ ID NO: 557802 - RNA, 22 nt, Human
uuuuaaguuaauauaauugagg

SEQ ID NO: 557803 - RNA, 22 nt, Human
augugagaauaacucaaaacaa

SEQ ID NO: 557804 - RNA, 22 nt, Human
uauaacaccauguucuacagau

SEQ ID NO: 557805 - RNA, 22 nt, Human
cagcagagguuggaacaguucu

SEQ ID NO: 557806 - RNA, 22 nt, Human
auggaauaauuguuucacagaa

SEQ ID NO: 557807 - RNA, 22 nt, Human
ucccagggacucucugccuucc

SEQ ID NO: 557808 - RNA, 20 nt, Human
gcuguugccaguacagaugg

SEQ ID NO: 557809 - RNA, 20 nt, Human
ggcugccuccuuccuuuccu

SEQ ID NO: 557810 - RNA, 22 nt, Human
ucuggcucucauacucgccagu

SEQ ID NO: 557811 - RNA, 22 nt, Human
uccagccaagccuugguagcug

SEQ ID NO: 557812 - RNA, 22 nt, Human
ccagagagguagcuuacccucu

SEQ ID NO: 557813 - RNA, 20 nt, Human
ggggcaguggcucaugccug

SEQ ID NO: 557814 - RNA, 22 nt, Human
agcccugcugcuucuuguauuu

SEQ ID NO: 557815 - RNA, 18 nt, Human
ggcaggcucucuggguca

SEQ ID NO: 557816 - RNA, 22 nt, Human
guggagaggaacccagcucugu

SEQ ID NO: 557817 - RNA, 22 nt, Human
ccuggcagaauauuaaagugca

SEQ ID NO: 557818 - RNA, 22 nt, Human
ucuggagcuuguuucagauggu

SEQ ID NO: 557819 - RNA, 22 nt, Human
gcuugcuggugccugcaggcuc

SEQ ID NO: 557820 - RNA, 22 nt, Human
acacauuuuggcuagguggaga

SEQ ID NO: 557821 - RNA, 22 nt, Human
acaugaacauuauaucagcaag

SEQ ID NO: 557822 - RNA, 22 nt, Human
ugucaccagcugcuccucagga

SEQ ID NO: 557823 - RNA, 23 nt, Human
aaaguugauuugcaguuuaagag

SEQ ID NO: 557824 - RNA, 22 nt, Human
cuccuuaaagggagcagcagcu

SEQ ID NO: 557825 - RNA, 22 nt, Human
gcuuggccagcagccgggaugc

SEQ ID NO: 557826 - RNA, 22 nt, Human
agucucagcuacuugggaggcu

SEQ ID NO: 557827 - RNA, 23 nt, Human
ggucccaguggagaggccucacc

SEQ ID NO: 557828 - RNA, 21 nt, Human
gccugggaagagaaagguaag

SEQ ID NO: 557829 - RNA, 22 nt, Human
aauuaggggaggacguaucaua

SEQ ID NO: 557830 - RNA, 22 nt, Human
uaagaacagauaaaguuucccc

SEQ ID NO: 557831 - RNA, 22 nt, Human
caacacauugaagcuaugauga

SEQ ID NO: 557832 - RNA, 22 nt, Human
cuuuauggagugacacaauggg

SEQ ID NO: 557833 - RNA, 22 nt, Human
auuucuuucuggccacgguuuu

SEQ ID NO: 557834 - RNA, 22 nt, Human
aggggaaggccagccuguagag

SEQ ID NO: 557835 - RNA, 22 nt, Human
cucuuuucaaaauuucacugca

SEQ ID NO: 557836 - RNA, 22 nt, Human
auauauaagcugaugagccaca

SEQ ID NO: 557837 - RNA, 22 nt, Human
auggaaagccaguguuccauca

SEQ ID NO: 557838 - RNA, 22 nt, Human
cuggcucaugugaugagggcaa

SEQ ID NO: 557839 - RNA, 22 nt, Human
ggccugcugcuaugacuuccug

SEQ ID NO: 557840 - RNA, 22 nt, Human
gcugcaggcggccgugguggcg

SEQ ID NO: 557841 - RNA, 22 nt, Human
uaguuuuagcagcaaugggaug

SEQ ID NO: 557842 - RNA, 22 nt, Human
ccaggcccugcuccucacacca

SEQ ID NO: 557843 - RNA, 16 nt, Human
aggcgaagguucauuu

SEQ ID NO: 557844 - RNA, 22 nt, Human
gcuggccauggggagugaggag

SEQ ID NO: 557845 - RNA, 22 nt, Human
cauguacaaaaggcaaaugccu

SEQ ID NO: 557846 - RNA, 22 nt, Human
ucccagaacccugccagguccu

SEQ ID NO: 557847 - RNA, 22 nt, Human
ucucagagccuaacuaaccuaa

SEQ ID NO: 557848 - RNA, 22 nt, Human
ucuuugcaacucccauuuccau

SEQ ID NO: 557849 - RNA, 21 nt, Human
cugcugcuggggucugggcag

SEQ ID NO: 557850 - RNA, 22 nt, Human
uggcucaguaaucgagucuccu

SEQ ID NO: 557851 - RNA, 22 nt, Human
aagucagacagcugagcugccu

SEQ ID NO: 557852 - RNA, 22 nt, Human
ccguggaguugugcugaguaug

SEQ ID NO: 557853 - RNA, 22 nt, Human
ugcaagagguuggauuuuaaga

SEQ ID NO: 557854 - RNA, 22 nt, Human
ugggcugcuguuacaggggcug

SEQ ID NO: 557855 - RNA, 22 nt, Human
cucagcagagaccagggaggaa

SEQ ID NO: 557856 - RNA, 22 nt, Human
gcauggcauuugaagguagaag

SEQ ID NO: 557857 - RNA, 22 nt, Human
aggagaaagacuggacagccaa

SEQ ID NO: 557858 - RNA, 22 nt, Human
auucaagagcccauguuuccug

SEQ ID NO: 557859 - RNA, 18 nt, Human
gcuggcugcacuucugcu

SEQ ID NO: 557860 - RNA, 22 nt, Human
uuaggcauauggcacaugauag

SEQ ID NO: 557861 - RNA, 22 nt, Human
uuacaagcagcuacauaucaca

SEQ ID NO: 557862 - RNA, 22 nt, Human
uggccuggcccugaggcccugu

SEQ ID NO: 557863 - RNA, 22 nt, Human
aauucugaugaauaaaucaucc

SEQ ID NO: 557864 - RNA, 22 nt, Human
ucuaggaguaaugagcuagcac

SEQ ID NO: 557865 - RNA, 22 nt, Human
caaugauucugcaacugugugc

SEQ ID NO: 557866 - RNA, 22 nt, Human
gcuuccuucuaccacaucaugc

SEQ ID NO: 557867 - RNA, 22 nt, Human
augaggcaugugaggagaaggg

SEQ ID NO: 557868 - RNA, 22 nt, Human
guccucagggaauguggcgggu

SEQ ID NO: 557869 - RNA, 22 nt, Human
aagcucuuugaccugggccugg

SEQ ID NO: 557870 - RNA, 19 nt, Human
acauggcaucccaggaggu

SEQ ID NO: 557871 - RNA, 22 nt, Human
ucaggauggcuucugcaucaaa

SEQ ID NO: 557872 - RNA, 22 nt, Human
aauaauuuccagccaacuggaa

SEQ ID NO: 557873 - RNA, 22 nt, Human
uggccaggccucuuggugccca

SEQ ID NO: 557874 - RNA, 22 nt, Human
auauuuguaaaauucugugucu

SEQ ID NO: 557875 - RNA, 22 nt, Human
cuugugcauuucauuccucagg

SEQ ID NO: 557876 - RNA, 22 nt, Human
aaaauaucagcaaagggugaca

SEQ ID NO: 557877 - RNA, 22 nt, Human
uuuguucaaauuuuccuaucug

SEQ ID NO: 557878 - RNA, 22 nt, Human
cagcucuguucauagauggugc

SEQ ID NO: 557879 - RNA, 22 nt, Human
gccuggauuacaaacagccaac

SEQ ID NO: 557880 - RNA, 22 nt, Human
uggcugagagaagacggggaag

SEQ ID NO: 557881 - RNA, 22 nt, Human
auguaauuuagaaaugaacaca

SEQ ID NO: 557882 - RNA, 22 nt, Human
ugaaacauuauagaauauuuau

SEQ ID NO: 557883 - RNA, 22 nt, Human
aaguuauuuccucgugacugaa

SEQ ID NO: 557884 - RNA, 22 nt, Human
agaguaugcuacaaagccagcc

SEQ ID NO: 557885 - RNA, 22 nt, Human
uugcagagccaugaggcuggcu

SEQ ID NO: 557886 - RNA, 22 nt, Human
aagugauucugauguguuucuu

SEQ ID NO: 557887 - RNA, 22 nt, Human
agcucugacauugauucucagc

SEQ ID NO: 557888 - RNA, 22 nt, Human
cucugugccucaguuuucuucu

SEQ ID NO: 557889 - RNA, 22 nt, Human
uggcuaggaccucugcggagca

SEQ ID NO: 557890 - RNA, 22 nt, Human
aagcaugcaaucugugauaagg

SEQ ID NO: 557891 - RNA, 22 nt, Human
uuaaugaaacauugacuaugau

SEQ ID NO: 557892 - RNA, 22 nt, Human
cucugagaugauaccuucugga

SEQ ID NO: 557893 - RNA, 22 nt, Human
uuagaaaggggugaaucaaugg

SEQ ID NO: 557894 - RNA, 22 nt, Human
agggacagucuacuguucacug

SEQ ID NO: 557895 - RNA, 22 nt, Human
accuuuuuguucuguucucagc

SEQ ID NO: 557896 - RNA, 22 nt, Human
gagagaagggggauaugagccu

SEQ ID NO: 557897 - RNA, 23 nt, Human
agaccugcaucugauaggcccug

SEQ ID NO: 557898 - RNA, 22 nt, Human
agagauauauauuuguuuacca

SEQ ID NO: 557899 - RNA, 22 nt, Human
uaaaugucaaugugauuuauaa

SEQ ID NO: 557900 - RNA, 22 nt, Human
ucugaggcuauguucaggcuaa

SEQ ID NO: 557901 - RNA, 18 nt, Human
aaacuguauuucuuucua

SEQ ID NO: 557902 - RNA, 22 nt, Human
gggagccacaguuuauagugau

SEQ ID NO: 557903 - RNA, 22 nt, Human
gcacacacaugugaguacaugc

SEQ ID NO: 557904 - RNA, 22 nt, Human
ggcucugcuucagaaggcucau

SEQ ID NO: 557905 - RNA, 22 nt, Human
ucagagucucccccaguuuggg

SEQ ID NO: 557906 - RNA, 22 nt, Human
ugaagaugucagcagggguggu

SEQ ID NO: 557907 - RNA, 22 nt, Human
agccuggaguucccaggagaag

SEQ ID NO: 557908 - RNA, 22 nt, Human
aauauaguucuagaaauauuuu

SEQ ID NO: 557909 - RNA, 22 nt, Human
uugugaaauguuucaaaauagu

SEQ ID NO: 557910 - RNA, 19 nt, Human
uucugcccucucuucuagc

SEQ ID NO: 557911 - RNA, 21 nt, Human
auucagaguaauucaucuuua

SEQ ID NO: 557912 - RNA, 22 nt, Human
caaagucagcugccagucccaa

SEQ ID NO: 557913 - RNA, 22 nt, Human
aaagaccugugguagcucuaaa

SEQ ID NO: 557914 - RNA, 22 nt, Human
acgcagaagggccuggcgugcc

SEQ ID NO: 557915 - RNA, 22 nt, Human
cagcaacucuccugugcucaaa

SEQ ID NO: 557916 - RNA, 22 nt, Human
ccagcugagaaguguaaaguga

SEQ ID NO: 557917 - RNA, 22 nt, Human
aaaaucugcacaggucaguuuu

SEQ ID NO: 557918 - RNA, 22 nt, Human
gucccaggucccagcacaucug

SEQ ID NO: 557919 - RNA, 22 nt, Human
gaagaaggugccagaggcuuac

SEQ ID NO: 557920 - RNA, 22 nt, Human
augaaauggugguuuuccauuu

SEQ ID NO: 557921 - RNA, 17 nt, Human
cauguguaugugggagu

SEQ ID NO: 557922 - RNA, 22 nt, Human
gaaauacuguaaaguuauuauu

SEQ ID NO: 557923 - RNA, 22 nt, Human
aaaggugacugcagcagcuauu

SEQ ID NO: 557924 - RNA, 22 nt, Human
ccauuaaacuuguggacccagu

SEQ ID NO: 557925 - RNA, 20 nt, Human
uauuucugggcaaccauuua

SEQ ID NO: 557926 - RNA, 22 nt, Human
cuggcagcuggaggcuagaggc

SEQ ID NO: 557927 - RNA, 22 nt, Human
caagauggguguugugaugguu

SEQ ID NO: 557928 - RNA, 22 nt, Human
acagccaggagccaugggcagg

SEQ ID NO: 557929 - RNA, 22 nt, Human
cugaggucuagacaccccaggg

SEQ ID NO: 557930 - RNA, 19 nt, Human
acccucucagugccugagg

SEQ ID NO: 557931 - RNA, 22 nt, Human
cuggaagcgucggaggaagggc

SEQ ID NO: 557932 - RNA, 22 nt, Human
ucuaaacauuaugauaguagag

SEQ ID NO: 557933 - RNA, 22 nt, Human
auauucacugagcauaaagcca

SEQ ID NO: 557934 - RNA, 22 nt, Human
ucagcaaugugauacugugcaa

SEQ ID NO: 557935 - RNA, 22 nt, Human
uacagauauguaugcacuuuuu

SEQ ID NO: 557936 - RNA, 22 nt, Human
ugccaggcgugguggugcgcac

SEQ ID NO: 557937 - RNA, 22 nt, Human
acacauguacagauuaguauuu

SEQ ID NO: 557938 - RNA, 22 nt, Human
uuagggaaggcugcugucagcu

SEQ ID NO: 557939 - RNA, 22 nt, Human
ucucccaguggugcagaaagca

SEQ ID NO: 557940 - RNA, 22 nt, Human
auggcagggaccaagcugucau

SEQ ID NO: 557941 - RNA, 22 nt, Human
aaucaacaggaugugcauugua

SEQ ID NO: 557942 - RNA, 22 nt, Human
agcuuuaucagaggagucucua

SEQ ID NO: 557943 - RNA, 20 nt, Human
aggcucagcugagcucuugg

SEQ ID NO: 557944 - RNA, 23 nt, Human
uuucacauuaauguuuagcagga

SEQ ID NO: 557945 - RNA, 22 nt, Human
ggcagcugggucacaccgaucu

SEQ ID NO: 557946 - RNA, 22 nt, Human
ucccugcagacguccugcgggu

SEQ ID NO: 557947 - RNA, 22 nt, Human
auacaaagacaaaucucaaucu

SEQ ID NO: 557948 - RNA, 22 nt, Human
ucaggcugaaaggacuccaguu

SEQ ID NO: 557949 - RNA, 22 nt, Human
ccagcuggucugugcucauguu

SEQ ID NO: 557950 - RNA, 22 nt, Human
aggcagagcuggguuuugaaau

SEQ ID NO: 557951 - RNA, 22 nt, Human
cagcuucuucaguccuggagcu

SEQ ID NO: 557952 - RNA, 22 nt, Human
cagaguuuugugaacaacuugg

SEQ ID NO: 557953 - RNA, 22 nt, Human
ccuguucaccauggucacgugc

SEQ ID NO: 557954 - RNA, 19 nt, Human
uggcaggcccaggauggac

SEQ ID NO: 557955 - RNA, 22 nt, Human
ugcugagagccagggcuggcau

SEQ ID NO: 557956 - RNA, 22 nt, Human
aagcugccauagaacgagaggu

SEQ ID NO: 557957 - RNA, 22 nt, Human
gagggaaagguuaauacaugau

SEQ ID NO: 557958 - RNA, 22 nt, Human
ucagggaagaaaugggacuuua

SEQ ID NO: 557959 - RNA, 22 nt, Human
ugcagagugaggaagaacugca

SEQ ID NO: 557960 - RNA, 22 nt, Human
gcuccugggcccugggcuaacu

SEQ ID NO: 557961 - RNA, 22 nt, Human
ucggagcuguagaugaaacccu

SEQ ID NO: 557962 - RNA, 22 nt, Human
agaaggaguguacaggucaugc

SEQ ID NO: 557963 - RNA, 22 nt, Human
uugcauugugauuacagaggug

SEQ ID NO: 557964 - RNA, 22 nt, Human
uucaagguaugguagcugguca

SEQ ID NO: 557965 - RNA, 22 nt, Human
uaaagcagcguggguggggcag

SEQ ID NO: 557966 - RNA, 22 nt, Human
uugcaacauuguaaguuuauau

SEQ ID NO: 557967 - RNA, 22 nt, Human
acaccaaaguagaauuaaugua

SEQ ID NO: 557968 - RNA, 22 nt, Human
gaagcagacuuuugcuuauuug

SEQ ID NO: 557969 - RNA, 22 nt, Human
cuauuuuaacuugauuaccucu

SEQ ID NO: 557970 - RNA, 22 nt, Human
gccagacacuccccugggcagg

SEQ ID NO: 557971 - RNA, 22 nt, Human
ccucacagggccaggccccuca

SEQ ID NO: 557972 - RNA, 22 nt, Human
ucauuuaauaauuuuugaguag

SEQ ID NO: 557973 - RNA, 22 nt, Human
agucaguagauccaaacuuuug

SEQ ID NO: 557974 - RNA, 23 nt, Human
uccuuuaaugcuggaauggcuag

SEQ ID NO: 557975 - RNA, 22 nt, Human
aauuuuauuagaaggcaagggg

SEQ ID NO: 557976 - RNA, 22 nt, Human
cucugaggcuccaugcaggcuu

SEQ ID NO: 557977 - RNA, 22 nt, Human
gagcacccuuugcacaucaguc

SEQ ID NO: 557978 - RNA, 22 nt, Human
aaaguucuaaaacucuuuguga

SEQ ID NO: 557979 - RNA, 22 nt, Human
cgaggcagacaaaaguuggaag

SEQ ID NO: 557980 - RNA, 22 nt, Human
aucaugcuuggauuauguuugg

SEQ ID NO: 557981 - RNA, 22 nt, Human
gagccaggucgggccgcggcga

SEQ ID NO: 557982 - RNA, 22 nt, Human
aaaguguacuaugucaugaaca

SEQ ID NO: 557983 - RNA, 22 nt, Human
gaacuucagaaucagcauaucu

SEQ ID NO: 557984 - RNA, 22 nt, Human
aaggagcucccggcagaccagg

SEQ ID NO: 557985 - RNA, 22 nt, Human
acaugccagaacuuguaccaau

SEQ ID NO: 557986 - RNA, 19 nt, Human
cccucuugcacaaagcaaa

SEQ ID NO: 557987 - RNA, 22 nt, Human
ucagaguggugguuuugccuuc

SEQ ID NO: 557988 - RNA, 22 nt, Human
aacacaguuuuccaaaauagag

SEQ ID NO: 557989 - RNA, 22 nt, Human
ggggcagagucuggacuguugu

SEQ ID NO: 557990 - RNA, 22 nt, Human
gacagccaugcacuucugcugu

SEQ ID NO: 557991 - RNA, 22 nt, Human
gaagcuggggugcugagggcaa

SEQ ID NO: 557992 - RNA, 22 nt, Human
gcagcguggggcugagucagcu

SEQ ID NO: 557993 - RNA, 22 nt, Human
auacaucaugcuccauauauuu

SEQ ID NO: 557994 - RNA, 22 nt, Human
aaggcacuagcagaauuaguga

SEQ ID NO: 557995 - RNA, 22 nt, Human
augggcugacuaaugguaaacu

SEQ ID NO: 557996 - RNA, 22 nt, Human
acagaauauugguuacuguugc

SEQ ID NO: 557997 - RNA, 22 nt, Human
aagaacauuuuguagaaugaca

SEQ ID NO: 557998 - RNA, 22 nt, Human
ggcagugacuguucagacgucc

SEQ ID NO: 557999 - RNA, 22 nt, Human
cccugcagaaccacagacaaac

SEQ ID NO: 558000 - RNA, 22 nt, Human
aggggcugccuggcuuggcacu

SEQ ID NO: 558001 - RNA, 22 nt, Human
ucaggaagcuacugccagcagc

SEQ ID NO: 558002 - RNA, 22 nt, Human
cugacucuccucaagcauaaau

SEQ ID NO: 558003 - RNA, 22 nt, Human
acagaguaucuaucaggaguau

SEQ ID NO: 558004 - RNA, 22 nt, Human
ucagaggaauaaugcugcauuu

SEQ ID NO: 558005 - RNA, 22 nt, Human
aguuaaaucauuacugacagag

SEQ ID NO: 558006 - RNA, 22 nt, Human
uucuuaagcaccuaaaaagugg

SEQ ID NO: 558007 - RNA, 22 nt, Human
cuccugggagcagggauggaug

SEQ ID NO: 558008 - RNA, 22 nt, Human
uuguacaaguauuaugugaaca

SEQ ID NO: 558009 - RNA, 20 nt, Human
gggagcuggaauugucuuag

SEQ ID NO: 558010 - RNA, 22 nt, Human
agcaccaucacagcuguauguc

SEQ ID NO: 558011 - RNA, 21 nt, Human
acugcaaacagcagagacuga

SEQ ID NO: 558012 - RNA, 22 nt, Human
cagugcugggcagaggagagcg

SEQ ID NO: 558013 - RNA, 22 nt, Human
ucugaggcauacccaggccccc

SEQ ID NO: 558014 - RNA, 22 nt, Human
uggccugaauuauggcagaucu

SEQ ID NO: 558015 - RNA, 22 nt, Human
accaggcugugaagugagacua

SEQ ID NO: 558016 - RNA, 22 nt, Human
gggaccuggacaugugugugcu

SEQ ID NO: 558017 - RNA, 22 nt, Human
ggcaggagaauggcgugaacuc

SEQ ID NO: 558018 - RNA, 22 nt, Human
ccuccaagcugguccucugugu

SEQ ID NO: 558019 - RNA, 22 nt, Human
uuucacauuuaggcgugaauug

SEQ ID NO: 558020 - RNA, 22 nt, Human
ggguccugcgugggcccaggac

SEQ ID NO: 558021 - RNA, 22 nt, Human
gagaggaaagaaccaaugaccc

SEQ ID NO: 558022 - RNA, 22 nt, Human
uaguacuuaucucugucauugu

SEQ ID NO: 558023 - RNA, 22 nt, Human
gacacauaugcguauaguuuag

SEQ ID NO: 558024 - RNA, 22 nt, Human
aggagaggcaucaagaaaaucg

SEQ ID NO: 558025 - RNA, 22 nt, Human
gccccagguugccugucccagg

SEQ ID NO: 558026 - RNA, 22 nt, Human
ggcuucagugagcugagcucac

SEQ ID NO: 558027 - RNA, 23 nt, Human
aaacaugcagcacaugaaugcua

SEQ ID NO: 558028 - RNA, 22 nt, Human
augcacaagaggcuagaaaaga

SEQ ID NO: 558029 - RNA, 22 nt, Human
gcuuagucaauuauaaauaggc

SEQ ID NO: 558030 - RNA, 22 nt, Human
ggcaggguggcccuccagugag

SEQ ID NO: 558031 - RNA, 22 nt, Human
ucucagugagcuuuucuauguu

SEQ ID NO: 558032 - RNA, 22 nt, Human
gagggcugaagauuguggcccc

SEQ ID NO: 558033 - RNA, 22 nt, Human
ugggcagacgcuguuggaaggc

SEQ ID NO: 558034 - RNA, 22 nt, Human
uuugugugcaacgcauggaguc

SEQ ID NO: 558035 - RNA, 22 nt, Human
gugggcaaggucccugccagcu

SEQ ID NO: 558036 - RNA, 22 nt, Human
auguaucaacaaauuguacagu

SEQ ID NO: 558037 - RNA, 22 nt, Human
caggaggcagaggaugcccagu

SEQ ID NO: 558038 - RNA, 22 nt, Human
cuuucugauuuuaagcucuaau

SEQ ID NO: 558039 - RNA, 22 nt, Human
ugucuguuauugguguauaaga

SEQ ID NO: 558040 - RNA, 22 nt, Human
caggccugagacaucugagaua

SEQ ID NO: 558041 - RNA, 22 nt, Human
uuuauuguuguuagucauaagu

SEQ ID NO: 558042 - RNA, 22 nt, Human
cagcucuggcgucagggagcga

SEQ ID NO: 558043 - RNA, 22 nt, Human
cuuuaauuaggaaguauaauga

SEQ ID NO: 558044 - RNA, 22 nt, Human
ucaccuuagcuagaggaagaga

SEQ ID NO: 558045 - RNA, 22 nt, Human
gcuuucuuaguguguuaauugg

SEQ ID NO: 558046 - RNA, 22 nt, Human
agcugcuccuuuccugcaggcg

SEQ ID NO: 558047 - RNA, 22 nt, Human
cuggggcccaucgagggcugag

SEQ ID NO: 558048 - RNA, 22 nt, Human
ugucauuuaaagcuuuccagau

SEQ ID NO: 558049 - RNA, 22 nt, Human
agaauauucaucuguauucuua

SEQ ID NO: 558050 - RNA, 22 nt, Human
uucagcuaaaaaugcccacuug

SEQ ID NO: 558051 - RNA, 22 nt, Human
ggaggaugccaagcugugcaca

SEQ ID NO: 558052 - RNA, 22 nt, Human
uucaacaaacuguucacgaaug

SEQ ID NO: 558053 - RNA, 22 nt, Human
ccaggcucagcuauuaagaaac

SEQ ID NO: 558054 - RNA, 22 nt, Human
ggcugcaggcaggguauccacu

SEQ ID NO: 558055 - RNA, 22 nt, Human
uaauauuucuacccugcugccu

SEQ ID NO: 558056 - RNA, 22 nt, Human
agcccugcgaucgugauuucuu

SEQ ID NO: 558057 - RNA, 22 nt, Human
uagugucugaaugcaccuguuu

SEQ ID NO: 558058 - RNA, 22 nt, Human
aacagcuuugcuucuggagaca

SEQ ID NO: 558059 - RNA, 22 nt, Human
uucuggcucauaugcuaagaag

SEQ ID NO: 558060 - RNA, 22 nt, Human
uggcucugaucagauguccagu

SEQ ID NO: 558061 - RNA, 22 nt, Human
auucuauagacagaaggucaau

SEQ ID NO: 558062 - RNA, 22 nt, Human
ugguaucaaacaauuaauuaga

SEQ ID NO: 558063 - RNA, 22 nt, Human
cagaugcuuuugauucuggggu

SEQ ID NO: 558064 - RNA, 20 nt, Human
aggaagauccuuucuuuuaa

SEQ ID NO: 558065 - RNA, 22 nt, Human
cuggaguuagaguagacacuga

SEQ ID NO: 558066 - RNA, 22 nt, Human
uccucagucguuugagccaaaa

SEQ ID NO: 558067 - RNA, 22 nt, Human
cuugccuucuuuuccuauagaa

SEQ ID NO: 558068 - RNA, 20 nt, Human
cugcccagccacugagggau

SEQ ID NO: 558069 - RNA, 22 nt, Human
aggaagaaccuaagaaagucuc

SEQ ID NO: 558070 - RNA, 22 nt, Human
cauacaaauguguccaggcucu

SEQ ID NO: 558071 - RNA, 21 nt, Human
cagugcucaaucugacagugg

SEQ ID NO: 558072 - RNA, 22 nt, Human
aaguuuaagguggaaguggugg

SEQ ID NO: 558073 - RNA, 22 nt, Human
ucaaggugcugugcugugcuag

SEQ ID NO: 558074 - RNA, 22 nt, Human
cgccaggcuugguagcucaugc

SEQ ID NO: 558075 - RNA, 22 nt, Human
ugcaggagcccuugggcucugg

SEQ ID NO: 558076 - RNA, 22 nt, Human
ugcuuuuuaguacugucuuauu

SEQ ID NO: 558077 - RNA, 22 nt, Human
gggaccuggucuagcacugagc

SEQ ID NO: 558078 - RNA, 22 nt, Human
acauuguauaaugauuaucaca

SEQ ID NO: 558079 - RNA, 21 nt, Human
gcugggcuccagucugccgcu

SEQ ID NO: 558080 - RNA, 22 nt, Human
gagagggguuugccauccuaug

SEQ ID NO: 558081 - RNA, 22 nt, Human
acuguucauccuuuuugaacaa

SEQ ID NO: 558082 - RNA, 22 nt, Human
uucugagaaggcuguggacaca

SEQ ID NO: 558083 - RNA, 22 nt, Human
aggcucagaggugagcaucugc

SEQ ID NO: 558084 - RNA, 22 nt, Human
aaaacaguuauaaacagaguca

SEQ ID NO: 558085 - RNA, 16 nt, Human
cuuccucuucacuggc

SEQ ID NO: 558086 - RNA, 21 nt, Human
ggccagcucggaaggucccau

SEQ ID NO: 558087 - RNA, 22 nt, Human
uguaaaauaauucuccauguuu

SEQ ID NO: 558088 - RNA, 22 nt, Human
ucuucacaugaccuucaugucu

SEQ ID NO: 558089 - RNA, 20 nt, Human
ccaauaaagcucuauaggga

SEQ ID NO: 558090 - RNA, 22 nt, Human
cagcagggcccccgggugcgcc

SEQ ID NO: 558091 - RNA, 22 nt, Human
cugucuguuucugauucaaccu

SEQ ID NO: 558092 - RNA, 22 nt, Human
aggggcugcuggguccgccccu

SEQ ID NO: 558093 - RNA, 22 nt, Human
auacauguaacugcauuguaau

SEQ ID NO: 558094 - RNA, 22 nt, Human
auugucuuuggugcuuccagga

SEQ ID NO: 558095 - RNA, 22 nt, Human
uccaggccgcaggggcagcccc

SEQ ID NO: 558096 - RNA, 22 nt, Human
gcaucuaaauaaacgugggagu

SEQ ID NO: 558097 - RNA, 22 nt, Human
aaguuacagucagagguuaaca

SEQ ID NO: 558098 - RNA, 22 nt, Human
ccagcucaucucagugaaaugc

SEQ ID NO: 558099 - RNA, 22 nt, Human
agcacagauucugaagaguccu

SEQ ID NO: 558100 - RNA, 22 nt, Human
uguuagcugugcuuuagccuuc

SEQ ID NO: 558101 - RNA, 22 nt, Human
aaaucacagggucucuaaguau

SEQ ID NO: 558102 - RNA, 22 nt, Human
gcugagugaggcugucaaaaug

SEQ ID NO: 558103 - RNA, 22 nt, Human
gaaaucugcuucuugcauagua

SEQ ID NO: 558104 - RNA, 22 nt, Human
uaagauuuuuaaaauguccuca

SEQ ID NO: 558105 - RNA, 23 nt, Human
cguuuuuuccucagauguucugg

SEQ ID NO: 558106 - RNA, 22 nt, Human
gagcuggacuuucagauacauc

SEQ ID NO: 558107 - RNA, 22 nt, Human
uacuauuuuugcaacguauaca

SEQ ID NO: 558108 - RNA, 22 nt, Human
guugaaagcuuuucauuuaguu

SEQ ID NO: 558109 - RNA, 22 nt, Human
aagccagggguugguaugcuau

SEQ ID NO: 558110 - RNA, 22 nt, Human
gcagagcucaugccugcaccuc

SEQ ID NO: 558111 - RNA, 22 nt, Human
ccugcuggcgcuugucugggag

SEQ ID NO: 558112 - RNA, 22 nt, Human
cucaguuucugacauuaaaauc

SEQ ID NO: 558113 - RNA, 22 nt, Human
ccaggccuguguuguguggagg

SEQ ID NO: 558114 - RNA, 17 nt, Human
ugguggcuggagucagg

SEQ ID NO: 558115 - RNA, 22 nt, Human
ucugcucagugcuuaucucuaa

SEQ ID NO: 558116 - RNA, 22 nt, Human
cuggggaccagugucuguuugu

SEQ ID NO: 558117 - RNA, 22 nt, Human
aggucacccguuugacuaucca

SEQ ID NO: 558118 - RNA, 22 nt, Human
uuaacacauauuuaucaauugc

SEQ ID NO: 558119 - RNA, 22 nt, Human
uuggugucuuuuuuauacaugu

SEQ ID NO: 558120 - RNA, 22 nt, Human
uaggaauuuuuguaaugguacu

SEQ ID NO: 558121 - RNA, 22 nt, Human
uaggggaacuggcacagggcag

SEQ ID NO: 558122 - RNA, 22 nt, Human
uauuucugagaaccaacuuacc

SEQ ID NO: 558123 - RNA, 22 nt, Human
agaacuuaggaacaacagcuua

SEQ ID NO: 558124 - RNA, 18 nt, Human
ugaggcucagcuccuggu

SEQ ID NO: 558125 - RNA, 22 nt, Human
ggacacagauaaucacacagau

SEQ ID NO: 558126 - RNA, 23 nt, Human
cauggaaaacugaaagcugaccu

SEQ ID NO: 558127 - RNA, 22 nt, Human
gcaugcugcugaggcuggaaua

SEQ ID NO: 558128 - RNA, 22 nt, Human
caugcuuuaccaaagcagugau

SEQ ID NO: 558129 - RNA, 22 nt, Human
aauuauacauugaacaaucuag

SEQ ID NO: 558130 - RNA, 22 nt, Human
aaauguaagucuuuguuucuua

SEQ ID NO: 558131 - RNA, 23 nt, Human
uauuacaauuggucuuauuaaga

SEQ ID NO: 558132 - RNA, 22 nt, Human
cauuuagaaacuguuuuuaaca

SEQ ID NO: 558133 - RNA, 22 nt, Human
uacacagacucuucaauucaga

SEQ ID NO: 558134 - RNA, 22 nt, Human
cagcagggggcagcgcagauca

SEQ ID NO: 558135 - RNA, 22 nt, Human
uugaagcauuugcuauagcauu

SEQ ID NO: 558136 - RNA, 22 nt, Human
aaauguguuugauaggaauauu

SEQ ID NO: 558137 - RNA, 22 nt, Human
aaucaugugggauagucugcuc

SEQ ID NO: 558138 - RNA, 20 nt, Human
agggucaguagcacagagcu

SEQ ID NO: 558139 - RNA, 22 nt, Human
ugacauuuaagccucugauuuc

SEQ ID NO: 558140 - RNA, 22 nt, Human
ggucucuguugccuccaucaag

SEQ ID NO: 558141 - RNA, 22 nt, Human
ccuuuacaaaguucuucauggg

SEQ ID NO: 558142 - RNA, 22 nt, Human
ccucacaguuuggcuaacugug

SEQ ID NO: 558143 - RNA, 22 nt, Human
gcauuuuaauaagauucauagg

SEQ ID NO: 558144 - RNA, 22 nt, Human
ggcugagcccccucugcguagg

SEQ ID NO: 558145 - RNA, 22 nt, Human
ggcuuuauuugcagccauuguu

SEQ ID NO: 558146 - RNA, 22 nt, Human
guuaaugugucugacacaaugg

SEQ ID NO: 558147 - RNA, 22 nt, Human
guaucuuuuacaccaggaaauu

SEQ ID NO: 558148 - RNA, 22 nt, Human
agaguguuauuugcucuguauu

SEQ ID NO: 558149 - RNA, 22 nt, Human
gggaggugaaagguugcugcag

SEQ ID NO: 558150 - RNA, 23 nt, Human
cugcuguguuggucucgauggga

SEQ ID NO: 558151 - RNA, 22 nt, Human
aggcagggugaugauaaugauu

SEQ ID NO: 558152 - RNA, 22 nt, Human
ugagagugaaaugucacauguc

SEQ ID NO: 558153 - RNA, 22 nt, Human
auuguaaaaguauucuaagauu

SEQ ID NO: 558154 - RNA, 22 nt, Human
ucuaaacacuaagucuugaugc

SEQ ID NO: 558155 - RNA, 22 nt, Human
augaguaaaaccacuauuuaca

SEQ ID NO: 558156 - RNA, 20 nt, Human
acagaauaugcugguugugg

SEQ ID NO: 558157 - RNA, 22 nt, Human
cugccuggucucaggcaugggg

SEQ ID NO: 558158 - RNA, 22 nt, Human
gcacuuaacuggaaaagaauuu

SEQ ID NO: 558159 - RNA, 22 nt, Human
aggaggaauacaauccagcagc

SEQ ID NO: 558160 - RNA, 22 nt, Human
caggcccaucugcucccaggcu

SEQ ID NO: 558161 - RNA, 22 nt, Human
ugcagcugccuagggcuggcuu

SEQ ID NO: 558162 - RNA, 20 nt, Human
aagagcugacucacaguggu

SEQ ID NO: 558163 - RNA, 22 nt, Human
gugauuucaaauauagagugag

SEQ ID NO: 558164 - RNA, 22 nt, Human
cagcagaggaaagcaaaucuaa

SEQ ID NO: 558165 - RNA, 22 nt, Human
cuggagugacuuuguuccuuuu

SEQ ID NO: 558166 - RNA, 22 nt, Human
ucuuucagcucuucaggaccca

SEQ ID NO: 558167 - RNA, 22 nt, Human
ucagauuuccuugcaguuugga

SEQ ID NO: 558168 - RNA, 22 nt, Human
uggaaggcaugggaacuguucu

SEQ ID NO: 558169 - RNA, 22 nt, Human
ugcaguggaaucuggagagcag

SEQ ID NO: 558170 - RNA, 20 nt, Human
ugccugggaaggcguggagg

SEQ ID NO: 558171 - RNA, 20 nt, Human
cccucugcacauggcugugg

SEQ ID NO: 558172 - RNA, 22 nt, Human
ucagaaauguaagcugaugacu

SEQ ID NO: 558173 - RNA, 22 nt, Human
gcugagcuagaaaaggaccaca

SEQ ID NO: 558174 - RNA, 22 nt, Human
uugugcauuucucugagugugu

SEQ ID NO: 558175 - RNA, 22 nt, Human
agaaaagggcaggagggauaca

SEQ ID NO: 558176 - RNA, 22 nt, Human
agcagaaccugcagaccugucu

SEQ ID NO: 558177 - RNA, 22 nt, Human
ccugucuggggacucccugggu

SEQ ID NO: 558178 - RNA, 22 nt, Human
uaauuuauuucaacugccaagg

SEQ ID NO: 558179 - RNA, 22 nt, Human
uagcacauaacuuagaauaguu

SEQ ID NO: 558180 - RNA, 22 nt, Human
gaguccaguuagugaggcuggg

SEQ ID NO: 558181 - RNA, 21 nt, Human
uauacaugugugcauacgugu

SEQ ID NO: 558182 - RNA, 22 nt, Human
ccuuuucuauccuucuagguuc

SEQ ID NO: 558183 - RNA, 22 nt, Human
gccaggcuccccggaucccugg

SEQ ID NO: 558184 - RNA, 22 nt, Human
cagcccugagagaaccaucuau

SEQ ID NO: 558185 - RNA, 22 nt, Human
uuuauuauagugguggggacug

SEQ ID NO: 558186 - RNA, 22 nt, Human
aucuucaucaaguucacagugg

SEQ ID NO: 558187 - RNA, 22 nt, Human
ucagguggcugguugcuggcua

SEQ ID NO: 558188 - RNA, 22 nt, Human
uaaaaucaccaaaagcaggugg

SEQ ID NO: 558189 - RNA, 22 nt, Human
agccaaggagugcagguggcuu

SEQ ID NO: 558190 - RNA, 22 nt, Human
uggcugcuagccagagcuucag

SEQ ID NO: 558191 - RNA, 22 nt, Human
cagugaggaguccagggcagag

SEQ ID NO: 558192 - RNA, 22 nt, Human
cagcaugcaaguccagaugugg

SEQ ID NO: 558193 - RNA, 22 nt, Human
cugcugcucgaccagucccagg

SEQ ID NO: 558194 - RNA, 22 nt, Human
cagaaauggucuguucagcuua

SEQ ID NO: 558195 - RNA, 22 nt, Human
uguacacaaugauaaauuauua

SEQ ID NO: 558196 - RNA, 22 nt, Human
aaacaucuucucuugauucuuu

SEQ ID NO: 558197 - RNA, 22 nt, Human
acaacacagcaaaaccccaucu

SEQ ID NO: 558198 - RNA, 22 nt, Human
ucaguguugugcacauacaaaa

SEQ ID NO: 558199 - RNA, 21 nt, Human
agggagcuauuuauaguaagc

SEQ ID NO: 558200 - RNA, 22 nt, Human
ugcucuucggggccacugcuug

SEQ ID NO: 558201 - RNA, 17 nt, Human
gguguauggggagggaa

SEQ ID NO: 558202 - RNA, 22 nt, Human
cagucuuugacaagcccuuuca

SEQ ID NO: 558203 - RNA, 22 nt, Human
aggcaggcaaccaccugggaag

SEQ ID NO: 558204 - RNA, 22 nt, Human
uagaaaguaaaucaguuuuauu

SEQ ID NO: 558205 - RNA, 22 nt, Human
caguucugagcuuucccagaag

SEQ ID NO: 558206 - RNA, 22 nt, Human
ccagaaagaaugaacugaaccc

SEQ ID NO: 558207 - RNA, 22 nt, Human
aaauaacagucagggacaacau

SEQ ID NO: 558208 - RNA, 22 nt, Human
cugucacacuaaaacaagaagu

SEQ ID NO: 558209 - RNA, 22 nt, Human
guauuaggugguggaauuguag

SEQ ID NO: 558210 - RNA, 22 nt, Human
ugcugaaauauuuaugggucaa

SEQ ID NO: 558211 - RNA, 22 nt, Human
ugcugucccuaagucucuucaa

SEQ ID NO: 558212 - RNA, 22 nt, Human
auaguaacuggcauguuuauga

SEQ ID NO: 558213 - RNA, 23 nt, Human
aggaagagagagugccucuuucu

SEQ ID NO: 558214 - RNA, 22 nt, Human
gaccuucaagcaccauauuuau

SEQ ID NO: 558215 - RNA, 22 nt, Human
aaauuagaaauacuuucaaagc

SEQ ID NO: 558216 - RNA, 22 nt, Human
agcugcaggcgccggggccgau

SEQ ID NO: 558217 - RNA, 22 nt, Human
gccugaccucuucugcccuggg

SEQ ID NO: 558218 - RNA, 22 nt, Human
aucauuuugugacaaugccugu

SEQ ID NO: 558219 - RNA, 22 nt, Human
gagccugggacugggggucaug

SEQ ID NO: 558220 - RNA, 22 nt, Human
acagaaguuggaauuagauacu

SEQ ID NO: 558221 - RNA, 23 nt, Human
auauuagggagauuagcccucua

SEQ ID NO: 558222 - RNA, 22 nt, Human
cugggcagguauacaaaaaaug

SEQ ID NO: 558223 - RNA, 22 nt, Human
aacuauaaugggguuaggaaau

SEQ ID NO: 558224 - RNA, 22 nt, Human
aucugcuucagugauaugugaa

SEQ ID NO: 558225 - RNA, 22 nt, Human
gcugccagucuaaugggaaaca

SEQ ID NO: 558226 - RNA, 22 nt, Human
acauucuucagcuuugucaggc

SEQ ID NO: 558227 - RNA, 22 nt, Human
ccaaagucugcauuuuaacaug

SEQ ID NO: 558228 - RNA, 22 nt, Human
ugguggccaauucacagggcuc

SEQ ID NO: 558229 - RNA, 22 nt, Human
aagaaauauugggccuuauaaa

SEQ ID NO: 558230 - RNA, 22 nt, Human
acagagccuccaggagugcugg

SEQ ID NO: 558231 - RNA, 22 nt, Human
ugcuagaaaucugaaacuagca

SEQ ID NO: 558232 - RNA, 22 nt, Human
agaaaaaucuuggcgcuugucu

SEQ ID NO: 558233 - RNA, 22 nt, Human
accugcaggcacaggugugcgc

SEQ ID NO: 558234 - RNA, 22 nt, Human
cauaaaagguagcaguuugaaa

SEQ ID NO: 558235 - RNA, 22 nt, Human
ggaggccuugaggccaggagcu

SEQ ID NO: 558236 - RNA, 22 nt, Human
cuguacaggagacgucugugca

SEQ ID NO: 558237 - RNA, 20 nt, Human
agguuccuuuguggagaauu

SEQ ID NO: 558238 - RNA, 22 nt, Human
gaaaauaguucaucacaaugau

SEQ ID NO: 558239 - RNA, 22 nt, Human
agucaccaucuguggcagccug

SEQ ID NO: 558240 - RNA, 22 nt, Human
gccgugcgugcgcaggugcugu

SEQ ID NO: 558241 - RNA, 18 nt, Human
caguuuuuauaucuggca

SEQ ID NO: 558242 - RNA, 22 nt, Human
uuugaauaugugcuuguuaaau

SEQ ID NO: 558243 - RNA, 22 nt, Human
ggcagcucacugauuagcaauu

SEQ ID NO: 558244 - RNA, 22 nt, Human
gcuggccugucuagagccuuac

SEQ ID NO: 558245 - RNA, 22 nt, Human
agaauguagucuuggagauuua

SEQ ID NO: 558246 - RNA, 22 nt, Human
augggagugacagggccacugg

SEQ ID NO: 558247 - RNA, 22 nt, Human
ggaggggaacuaaucccgugac

SEQ ID NO: 558248 - RNA, 22 nt, Human
ugugccugauggucacguggcc

SEQ ID NO: 558249 - RNA, 22 nt, Human
gcagaggagcaagcuggacacc

SEQ ID NO: 558250 - RNA, 22 nt, Human
aauuucaauuacuuuugcacca

SEQ ID NO: 558251 - RNA, 22 nt, Human
auggcagccugagcagaggaau

SEQ ID NO: 558252 - RNA, 22 nt, Human
aggugucuggauggguguccuu

SEQ ID NO: 558253 - RNA, 22 nt, Human
cugucucuguugccuguaggug

SEQ ID NO: 558254 - RNA, 22 nt, Human
agccucucugaugugacagcua

SEQ ID NO: 558255 - RNA, 22 nt, Human
ucuuuugugauucuucaguuac

SEQ ID NO: 558256 - RNA, 22 nt, Human
accaaggagccacauacaaccu

SEQ ID NO: 558257 - RNA, 22 nt, Human
gaagccacagagauuguggggg

SEQ ID NO: 558258 - RNA, 22 nt, Human
ggcagcuccuccuagucugccc

SEQ ID NO: 558259 - RNA, 22 nt, Human
aauguuugccugacuagagugg

SEQ ID NO: 558260 - RNA, 22 nt, Human
ucugucaccgagggcauccaaa

SEQ ID NO: 558261 - RNA, 22 nt, Human
gaagagaugacaaaggagcaug

SEQ ID NO: 558262 - RNA, 20 nt, Human
cauuugaaucuccauucugc

SEQ ID NO: 558263 - RNA, 22 nt, Human
gcaggcagagguggaggagaca

SEQ ID NO: 558264 - RNA, 22 nt, Human
ucacagaaguugaauuugcaug

SEQ ID NO: 558265 - RNA, 16 nt, Human
gcuaggcaacaggcug

SEQ ID NO: 558266 - RNA, 22 nt, Human
gggcucagacaucccuccugga

SEQ ID NO: 558267 - RNA, 22 nt, Human
uggcugccuuucaccucaucuc

SEQ ID NO: 558268 - RNA, 22 nt, Human
gggcagcagagcccugccgagu

SEQ ID NO: 558269 - RNA, 19 nt, Human
cuggccaggccaggggccc

SEQ ID NO: 558270 - RNA, 22 nt, Human
uucaaacuaugacuucagcuac

SEQ ID NO: 558271 - RNA, 22 nt, Human
uucacauuguuuuaaugugaau

SEQ ID NO: 558272 - RNA, 22 nt, Human
ugggcucucucaccuggaggcu

SEQ ID NO: 558273 - RNA, 22 nt, Human
acagaagugacaauuucuuggg

SEQ ID NO: 558274 - RNA, 22 nt, Human
guaacugaggcagcuuuuaaga

SEQ ID NO: 558275 - RNA, 22 nt, Human
ucugaaauggggcugaagcacu

SEQ ID NO: 558276 - RNA, 20 nt, Human
ccagacagcaccugccuggu

SEQ ID NO: 558277 - RNA, 22 nt, Human
acaguucuuuguuuauagcuug

SEQ ID NO: 558278 - RNA, 22 nt, Human
uccuuaaaugaacucugcauga

SEQ ID NO: 558279 - RNA, 22 nt, Human
aaauaauguuaggccuuugcuc

SEQ ID NO: 558280 - RNA, 22 nt, Human
acagcuguggggacucuugccc

SEQ ID NO: 558281 - RNA, 21 nt, Human
agcugcuuucagcuccuagag

SEQ ID NO: 558282 - RNA, 22 nt, Human
ucaucccuaaggacagcucugc

SEQ ID NO: 558283 - RNA, 22 nt, Human
agggaggaccaaugugugguua

SEQ ID NO: 558284 - RNA, 22 nt, Human
ugccuuuuccagcuuccagagg

SEQ ID NO: 558285 - RNA, 19 nt, Human
ugacaggcuguugccuuga

SEQ ID NO: 558286 - RNA, 22 nt, Human
auguaucaauuaucugucugca

SEQ ID NO: 558287 - RNA, 22 nt, Human
aaaugcuguaacugauauucug

SEQ ID NO: 558288 - RNA, 22 nt, Human
aaagauuauggcauugaaauac

SEQ ID NO: 558289 - RNA, 19 nt, Human
aaaaggaauauucuuuggg

SEQ ID NO: 558290 - RNA, 22 nt, Human
cauugcugugggcauuugcugc

SEQ ID NO: 558291 - RNA, 22 nt, Human
aggcugggcaccguuuugaucc

SEQ ID NO: 558292 - RNA, 22 nt, Human
auuccaguucuccucucuaaag

SEQ ID NO: 558293 - RNA, 20 nt, Human
gccagcccugacacaggagc

SEQ ID NO: 558294 - RNA, 22 nt, Human
uuugcuuugggagguugucugg

SEQ ID NO: 558295 - RNA, 22 nt, Human
ccucugugucuugguuucaaga

SEQ ID NO: 558296 - RNA, 22 nt, Human
ccaaauauuaacaaaguaauuu

SEQ ID NO: 558297 - RNA, 22 nt, Human
aagaaagcugaauauucugugu

SEQ ID NO: 558298 - RNA, 22 nt, Human
ggcugcucuucuuggcgaccuc

SEQ ID NO: 558299 - RNA, 22 nt, Human
cugagggagcugcuggccuugg

SEQ ID NO: 558300 - RNA, 22 nt, Human
uagaaucugaauauucuuauuu

SEQ ID NO: 558301 - RNA, 18 nt, Human
acauuucuaggugaaagc

SEQ ID NO: 558302 - RNA, 22 nt, Human
uguaggacauguacuuguaaca

SEQ ID NO: 558303 - RNA, 22 nt, Human
agccacagucaaccuguccaua

SEQ ID NO: 558304 - RNA, 22 nt, Human
uuacauuuuaguuaaccuguga

SEQ ID NO: 558305 - RNA, 22 nt, Human
agaauccugaugaaaaggagag

SEQ ID NO: 558306 - RNA, 22 nt, Human
gucuuuauauuuacuaaagaau

SEQ ID NO: 558307 - RNA, 23 nt, Human
ccagggccccuacaccacugucc

SEQ ID NO: 558308 - RNA, 22 nt, Human
ccagggaaggcugcuggcugug

SEQ ID NO: 558309 - RNA, 22 nt, Human
ugcauuguugaugaguugaaua

SEQ ID NO: 558310 - RNA, 22 nt, Human
ugagggagucaugauuaaggaa

SEQ ID NO: 558311 - RNA, 22 nt, Human
uucacaaagcuggagcauuucc

SEQ ID NO: 558312 - RNA, 22 nt, Human
caggccaggcugcauuugcccc

SEQ ID NO: 558313 - RNA, 22 nt, Human
uacaaaaaauugauacugacga

SEQ ID NO: 558314 - RNA, 22 nt, Human
gagaaagauguaggcugggagg

SEQ ID NO: 558315 - RNA, 22 nt, Human
aauucacauauacauuauuccu

SEQ ID NO: 558316 - RNA, 22 nt, Human
cccauucauccucgcuuccuuc

SEQ ID NO: 558317 - RNA, 22 nt, Human
auugaaagcacaaagaacaagu

SEQ ID NO: 558318 - RNA, 22 nt, Human
gcagaggcuccauuuuacagau

SEQ ID NO: 558319 - RNA, 22 nt, Human
ugcuguagcccugcacagugca

SEQ ID NO: 558320 - RNA, 22 nt, Human
ucucuucuagcuucuugugguu

SEQ ID NO: 558321 - RNA, 22 nt, Human
ccucagggaggccucuguggcu

SEQ ID NO: 558322 - RNA, 22 nt, Human
aaauauagcaauuaugccuacu

SEQ ID NO: 558323 - RNA, 22 nt, Human
uccugcaggggcugaggaacca

SEQ ID NO: 558324 - RNA, 17 nt, Human
acacagggagagggagc

SEQ ID NO: 558325 - RNA, 22 nt, Human
auuauucaaauucccacuauac

SEQ ID NO: 558326 - RNA, 22 nt, Human
agggcugaccuaagcuccacuu

SEQ ID NO: 558327 - RNA, 22 nt, Human
ucugaaaugcaggcaauuugcu

SEQ ID NO: 558328 - RNA, 22 nt, Human
guguccagggccguguugucuu

SEQ ID NO: 558329 - RNA, 22 nt, Human
gagugagggccaacauccagcu

SEQ ID NO: 558330 - RNA, 22 nt, Human
uuauagaucuaaaugugaaggg

SEQ ID NO: 558331 - RNA, 22 nt, Human
caaagucccagcugcuuagaga

SEQ ID NO: 558332 - RNA, 22 nt, Human
aucagcaaguccuguuaauucu

SEQ ID NO: 558333 - RNA, 22 nt, Human
aggcucagauccuuguguccug

SEQ ID NO: 558334 - RNA, 22 nt, Human
aagacagaccacgugacagggc

SEQ ID NO: 558335 - RNA, 22 nt, Human
cagacagacagccguggccacc

SEQ ID NO: 558336 - RNA, 22 nt, Human
ggauuucuuccuuccucagaag

SEQ ID NO: 558337 - RNA, 22 nt, Human
gauuucaccugaucuugucauc

SEQ ID NO: 558338 - RNA, 21 nt, Human
acuagcuuucuggagaagugu

SEQ ID NO: 558339 - RNA, 21 nt, Human
uccccacauuucuaaacagac

SEQ ID NO: 558340 - RNA, 22 nt, Human
ucaguuuuuaagaguuaugcga

SEQ ID NO: 558341 - RNA, 22 nt, Human
uucaaagaguugggugucuggg

SEQ ID NO: 558342 - RNA, 21 nt, Human
uugaaaguaaauucagcagcu

SEQ ID NO: 558343 - RNA, 22 nt, Human
uguggcagaacugggacucaaa

SEQ ID NO: 558344 - RNA, 22 nt, Human
agggcucccgugaggugacugc

SEQ ID NO: 558345 - RNA, 22 nt, Human
agcugcugugugcucaggcagg

SEQ ID NO: 558346 - RNA, 22 nt, Human
gcuggagccauuggcuuggccu

SEQ ID NO: 558347 - RNA, 22 nt, Human
cugcucuguucccccaucaucu

SEQ ID NO: 558348 - RNA, 22 nt, Human
ggccucugguucacagggagga

SEQ ID NO: 558349 - RNA, 22 nt, Human
acccagggaccccgcugacgcc

SEQ ID NO: 558350 - RNA, 22 nt, Human
cuccuuccugguuagcaccuua

SEQ ID NO: 558351 - RNA, 22 nt, Human
ugaagcaggugaauggaugucg

SEQ ID NO: 558352 - RNA, 22 nt, Human
acucacuuuccauucaagcacc

SEQ ID NO: 558353 - RNA, 22 nt, Human
gagcccucucuguaggcaagua

SEQ ID NO: 558354 - RNA, 22 nt, Human
ucagagaguuggaaagaauuaa

SEQ ID NO: 558355 - RNA, 22 nt, Human
uaugacaagguggaguaugagu

SEQ ID NO: 558356 - RNA, 22 nt, Human
uccugaaaaauuacauguucag

SEQ ID NO: 558357 - RNA, 22 nt, Human
cugaaaucaauuuugauuaucu

SEQ ID NO: 558358 - RNA, 18 nt, Human
ugaccugcgcuucacggu

SEQ ID NO: 558359 - RNA, 22 nt, Human
gccagcucccaagugagccccu

SEQ ID NO: 558360 - RNA, 22 nt, Human
uggcuggggccugaauccugca

SEQ ID NO: 558361 - RNA, 20 nt, Human
uuauaucauaaugugccaau

SEQ ID NO: 558362 - RNA, 22 nt, Human
auuuaagggauuuggagaccaa

SEQ ID NO: 558363 - RNA, 22 nt, Human
cgucuuuauugauuccuucaag

SEQ ID NO: 558364 - RNA, 22 nt, Human
cuaagaaaauagaagcaugcua

SEQ ID NO: 558365 - RNA, 22 nt, Human
cagaagagaugaaauaguauua

SEQ ID NO: 558366 - RNA, 22 nt, Human
agaaaguuguuggaggaaauga

SEQ ID NO: 558367 - RNA, 22 nt, Human
aagagccuggcugcuaggcuca

SEQ ID NO: 558368 - RNA, 22 nt, Human
gacacagaauuuacucccgaua

SEQ ID NO: 558369 - RNA, 22 nt, Human
ucucaagcuuguugguauguuu

SEQ ID NO: 558370 - RNA, 22 nt, Human
auguccaguuucuacacacaua

SEQ ID NO: 558371 - RNA, 22 nt, Human
ccauuuaguaaggaagaacagc

SEQ ID NO: 558372 - RNA, 22 nt, Human
cugccuuggaaaaugugguaau

SEQ ID NO: 558373 - RNA, 22 nt, Human
uaacaagucauuuuaaauuaug

SEQ ID NO: 558374 - RNA, 22 nt, Human
ugcuuuuaagaacaaugcugcu

SEQ ID NO: 558375 - RNA, 22 nt, Human
auaaggcuuaaaccuuguugcc

SEQ ID NO: 558376 - RNA, 21 nt, Human
auucuaaccaggagaggcuga

SEQ ID NO: 558377 - RNA, 18 nt, Human
aggcacagagcauacaua

SEQ ID NO: 558378 - RNA, 22 nt, Human
uccgccaggacugagggcccau

SEQ ID NO: 558379 - RNA, 22 nt, Human
cccagcaucuccaggcauggcc

SEQ ID NO: 558380 - RNA, 22 nt, Human
auuguucuggauauuuacauug

SEQ ID NO: 558381 - RNA, 22 nt, Human
uggcccucagucuugcuccugc

SEQ ID NO: 558382 - RNA, 22 nt, Human
ugcccuguuaucuuggaagagu

SEQ ID NO: 558383 - RNA, 22 nt, Human
aagccagauagaagaacucauu

SEQ ID NO: 558384 - RNA, 22 nt, Human
aaaugcacagagccuuagagau

SEQ ID NO: 558385 - RNA, 22 nt, Human
ucugaaauauauuuugaguguu

SEQ ID NO: 558386 - RNA, 22 nt, Human
agcuggcauacuuugcuaggaa

SEQ ID NO: 558387 - RNA, 22 nt, Human
caggaaccugcuccaagaggca

SEQ ID NO: 558388 - RNA, 22 nt, Human
aaggggucaagcggcagcuaca

SEQ ID NO: 558389 - RNA, 22 nt, Human
acccacgaagaugagcggcaug

SEQ ID NO: 558390 - RNA, 23 nt, Human
acacaauagaguacuauucagcc

SEQ ID NO: 558391 - RNA, 22 nt, Human
ggcaggguuuacaauagcaaua

SEQ ID NO: 558392 - RNA, 22 nt, Human
aguauggggcugugugugcaca

SEQ ID NO: 558393 - RNA, 22 nt, Human
agcugaggaggaaugaugggua

SEQ ID NO: 558394 - RNA, 22 nt, Human
uuucuacagaagauacacugcu

SEQ ID NO: 558395 - RNA, 22 nt, Human
aaguguguugacugaauugggg

SEQ ID NO: 558396 - RNA, 22 nt, Human
gauuucaauccagcuuucuucu

SEQ ID NO: 558397 - RNA, 22 nt, Human
uucaaagauaauguagcauuuu

SEQ ID NO: 558398 - RNA, 23 nt, Human
ugggcagcuucugcaugcccacc

SEQ ID NO: 558399 - RNA, 22 nt, Human
cagcagcucccauccgcugagc

SEQ ID NO: 558400 - RNA, 22 nt, Human
ccagagucccuguucucggccu

SEQ ID NO: 558401 - RNA, 22 nt, Human
gagcugccaagauuacaaucag

SEQ ID NO: 558402 - RNA, 22 nt, Human
uguacauuuagagcucaauaga

SEQ ID NO: 558403 - RNA, 22 nt, Human
agaugguguuuccccaggugga

SEQ ID NO: 558404 - RNA, 22 nt, Human
aauguauaaaguguuaauaacu

SEQ ID NO: 558405 - RNA, 22 nt, Human
gagggcucugucuggaagggaa

SEQ ID NO: 558406 - RNA, 22 nt, Human
acuuucuauuguuuagauucug

SEQ ID NO: 558407 - RNA, 22 nt, Human
gggagcaggagccugccugcca

SEQ ID NO: 558408 - RNA, 22 nt, Human
aguggcaggaaaguggaagaga

SEQ ID NO: 558409 - RNA, 22 nt, Human
aucagaggaaauuaacucucuc

SEQ ID NO: 558410 - RNA, 22 nt, Human
uucuuuuccuguggcucaucca

SEQ ID NO: 558411 - RNA, 22 nt, Human
uccugagagucaagaaugcagg

SEQ ID NO: 558412 - RNA, 21 nt, Human
agaaaauggcguuuuagauuu

SEQ ID NO: 558413 - RNA, 22 nt, Human
acugagcugcuugaagugaacu

SEQ ID NO: 558414 - RNA, 22 nt, Human
agcugcagauucuaucuagaag

SEQ ID NO: 558415 - RNA, 22 nt, Human
ugcugucuuccaggauggugaa

SEQ ID NO: 558416 - RNA, 22 nt, Human
ucacauuucuuuauguagucuu

SEQ ID NO: 558417 - RNA, 22 nt, Human
uaugcacauuaucuaauccauu

SEQ ID NO: 558418 - RNA, 22 nt, Human
aaagcauuguuucaagauuaac

SEQ ID NO: 558419 - RNA, 22 nt, Human
auuuucuucucucccuggcugc

SEQ ID NO: 558420 - RNA, 22 nt, Human
ccaggacuuauuacaguauaac

SEQ ID NO: 558421 - RNA, 22 nt, Human
aaggaguuuggguagucauaca

SEQ ID NO: 558422 - RNA, 22 nt, Human
ugaaaugauaucugauaacaaa

SEQ ID NO: 558423 - RNA, 22 nt, Human
gaauacaaagcagaacucauac

SEQ ID NO: 558424 - RNA, 18 nt, Human
agcagcuuugugcuugau

SEQ ID NO: 558425 - RNA, 22 nt, Human
aggaaauaagggcacuucagau

SEQ ID NO: 558426 - RNA, 22 nt, Human
uauuugcugaaucugauucaga

SEQ ID NO: 558427 - RNA, 22 nt, Human
ggcccugcaugagauuaagguu

SEQ ID NO: 558428 - RNA, 22 nt, Human
ugggccagcaauugcugcucag

SEQ ID NO: 558429 - RNA, 22 nt, Human
auaaacaguagagaaagguggu

SEQ ID NO: 558430 - RNA, 21 nt, Human
agccugggaggcggagguugc

SEQ ID NO: 558431 - RNA, 20 nt, Human
ccugccuggccauuccuugg

SEQ ID NO: 558432 - RNA, 22 nt, Human
aguacauuuauuaaugguaaaa

SEQ ID NO: 558433 - RNA, 22 nt, Human
ucuguaaaacuucuuuguaaau

SEQ ID NO: 558434 - RNA, 22 nt, Human
ucagaagcugguguccuuugaa

SEQ ID NO: 558435 - RNA, 22 nt, Human
acaaauaugguacucggagaaa

SEQ ID NO: 558436 - RNA, 22 nt, Human
guuugcauuucuugaacuauau

SEQ ID NO: 558437 - RNA, 22 nt, Human
gagccugaaauacaggucacug

SEQ ID NO: 558438 - RNA, 22 nt, Human
ccacuuucugagggaacagcag

SEQ ID NO: 558439 - RNA, 22 nt, Human
uccagggacagcgcuggagcua

SEQ ID NO: 558440 - RNA, 22 nt, Human
ucagccagugccuugaucuugc

SEQ ID NO: 558441 - RNA, 21 nt, Human
uuguuuccucccaaaaugcca

SEQ ID NO: 558442 - RNA, 20 nt, Human
ugggauuguuuuuuagcuuc

SEQ ID NO: 558443 - RNA, 22 nt, Human
gucaggcugccagucuuuauug

SEQ ID NO: 558444 - RNA, 22 nt, Human
guggcacagugggagagcccca

SEQ ID NO: 558445 - RNA, 22 nt, Human
guucacaggguuaggaaucacu

SEQ ID NO: 558446 - RNA, 22 nt, Human
gcagagucugguaggugcuggu

SEQ ID NO: 558447 - RNA, 22 nt, Human
ggaccagagcucgggcuucuca

SEQ ID NO: 558448 - RNA, 17 nt, Human
ccucccacaccgcccug

SEQ ID NO: 558449 - RNA, 22 nt, Human
cagccagggucaggcagcuucu

SEQ ID NO: 558450 - RNA, 22 nt, Human
acaucacacgccuuccaggagg

SEQ ID NO: 558451 - RNA, 22 nt, Human
gccuggugaaaggcagagagcg

SEQ ID NO: 558452 - RNA, 22 nt, Human
cagagccagaacuagaccuugu

SEQ ID NO: 558453 - RNA, 22 nt, Human
caaauccagaucccagucguag

SEQ ID NO: 558454 - RNA, 22 nt, Human
uuguuuucuccacugcaucuua

SEQ ID NO: 558455 - RNA, 22 nt, Human
cuccagaauuguccauuggaaa

SEQ ID NO: 558456 - RNA, 22 nt, Human
uagccgggugugguggaacucc

SEQ ID NO: 558457 - RNA, 22 nt, Human
uauucaaaguaccuucauugcc

SEQ ID NO: 558458 - RNA, 22 nt, Human
cucagacugguggguaaaaccu

SEQ ID NO: 558459 - RNA, 22 nt, Human
gugugagcaucaaagccuguca

SEQ ID NO: 558460 - RNA, 22 nt, Human
cuuguaauuauaauguacuguu

SEQ ID NO: 558461 - RNA, 22 nt, Human
ccaguggaauuaaaaauaagug

SEQ ID NO: 558462 - RNA, 22 nt, Human
guuugauucaagaacaaagagu

SEQ ID NO: 558463 - RNA, 22 nt, Human
uagaaacacagaucugguguca

SEQ ID NO: 558464 - RNA, 22 nt, Human
uggcuuccuccagagcaggagg

SEQ ID NO: 558465 - RNA, 22 nt, Human
uuuugccugagagugaaaauaa

SEQ ID NO: 558466 - RNA, 22 nt, Human
gccaguggcccucuggagaagg

SEQ ID NO: 558467 - RNA, 22 nt, Human
acaguuaagcaguaugaucaca

SEQ ID NO: 558468 - RNA, 20 nt, Human
cugagccaacucucuucuug

SEQ ID NO: 558469 - RNA, 22 nt, Human
ugcugcacgauaaauaauuucu

SEQ ID NO: 558470 - RNA, 22 nt, Human
auucacaguuuccucauauucu

SEQ ID NO: 558471 - RNA, 22 nt, Human
auugacaagacaauggcucuua

SEQ ID NO: 558472 - RNA, 22 nt, Human
aagauggcaggaaucauaagcu

SEQ ID NO: 558473 - RNA, 22 nt, Human
acagugucugacacauuguagc

SEQ ID NO: 558474 - RNA, 22 nt, Human
uggcucaguuuagcagcucagu

SEQ ID NO: 558475 - RNA, 22 nt, Human
cgcccagggcaggaggccgcuc

SEQ ID NO: 558476 - RNA, 22 nt, Human
ucacuguagugagcagaauaua

SEQ ID NO: 558477 - RNA, 22 nt, Human
gcccagugguaaaagcaggccu

SEQ ID NO: 558478 - RNA, 22 nt, Human
agguggagaagagaugggcagu

SEQ ID NO: 558479 - RNA, 22 nt, Human
uagaaggaggacuggcaguguu

SEQ ID NO: 558480 - RNA, 23 nt, Human
aggauguaggauguauggcagag

SEQ ID NO: 558481 - RNA, 22 nt, Human
gaacacuugcuguuaauaagug

SEQ ID NO: 558482 - RNA, 22 nt, Human
cuggugcaggaaggagcuggca

SEQ ID NO: 558483 - RNA, 22 nt, Human
uuugaacagacacuuucuacag

SEQ ID NO: 558484 - RNA, 22 nt, Human
ugcaggcucacccuggagcuga

SEQ ID NO: 558485 - RNA, 19 nt, Human
ucucugcuucucuuggcau

SEQ ID NO: 558486 - RNA, 22 nt, Human
aguccagugucaaggugccauu

SEQ ID NO: 558487 - RNA, 22 nt, Human
agauguuuguaaacacacugcu

SEQ ID NO: 558488 - RNA, 22 nt, Human
ugccuggguucccaccccaaag

SEQ ID NO: 558489 - RNA, 22 nt, Human
caggcacuagcagaaugaggcu

SEQ ID NO: 558490 - RNA, 22 nt, Human
agcugccaucugaagaacugca

SEQ ID NO: 558491 - RNA, 23 nt, Human
gagauggcugguuguccucugaa

SEQ ID NO: 558492 - RNA, 18 nt, Human
gccauguucuaugcuuac

SEQ ID NO: 558493 - RNA, 22 nt, Human
uccaggccccacugaagccccu

SEQ ID NO: 558494 - RNA, 22 nt, Human
aaaaguguccagauuaugaaga

SEQ ID NO: 558495 - RNA, 22 nt, Human
uuuuagauaguuuaacugcacu

SEQ ID NO: 558496 - RNA, 22 nt, Human
uccaggcccacucgguggggcu

SEQ ID NO: 558497 - RNA, 18 nt, Human
augugcaauuuuguauuu

SEQ ID NO: 558498 - RNA, 22 nt, Human
aggaagaauguuuacauaucaa

SEQ ID NO: 558499 - RNA, 19 nt, Human
ugguggcaaugucagcuaa

SEQ ID NO: 558500 - RNA, 22 nt, Human
cccagggacagaugggcagcua

SEQ ID NO: 558501 - RNA, 19 nt, Human
uguuucuuccuccaucuga

SEQ ID NO: 558502 - RNA, 22 nt, Human
agggccagggaaacgaucagca

SEQ ID NO: 558503 - RNA, 22 nt, Human
gagaaggagcucaaauauggcu

SEQ ID NO: 558504 - RNA, 22 nt, Human
ugcugccuucuaggcgugcccu

SEQ ID NO: 558505 - RNA, 22 nt, Human
caaauuaaugugucucaaaaua

SEQ ID NO: 558506 - RNA, 22 nt, Human
aaggcuuuaugugaccaaaaga

SEQ ID NO: 558507 - RNA, 22 nt, Human
aaugcacaugccacauguggua

SEQ ID NO: 558508 - RNA, 20 nt, Human
gccugagcuccgccuccugu

SEQ ID NO: 558509 - RNA, 22 nt, Human
uucagcuaaggaguuucacugu

SEQ ID NO: 558510 - RNA, 19 nt, Human
caguuacaggcacuguggg

SEQ ID NO: 558511 - RNA, 18 nt, Human
agcugguggggagacagc

SEQ ID NO: 558512 - RNA, 22 nt, Human
uguggccuuucaaggauggaau

SEQ ID NO: 558513 - RNA, 22 nt, Human
ucuggcucggauuugucuagca

SEQ ID NO: 558514 - RNA, 22 nt, Human
uggggcuucuccuguaggcuca

SEQ ID NO: 558515 - RNA, 22 nt, Human
ugcagaagcagagccgguggcc

SEQ ID NO: 558516 - RNA, 22 nt, Human
gugggggcaggcagugcuagga

SEQ ID NO: 558517 - RNA, 22 nt, Human
gccuggugguauccuggcaaga

SEQ ID NO: 558518 - RNA, 20 nt, Human
gggcucuuagguagcagggg

SEQ ID NO: 558519 - RNA, 22 nt, Human
uugauuuuaaaauagugacacu

SEQ ID NO: 558520 - RNA, 23 nt, Human
gugcucugcggucugcuagucug

SEQ ID NO: 558521 - RNA, 20 nt, Human
caccuucaaauuuccuggca

SEQ ID NO: 558522 - RNA, 20 nt, Human
ucuuggagaggguggacuua

SEQ ID NO: 558523 - RNA, 22 nt, Human
ggcacagagcuuugucccaguu

SEQ ID NO: 558524 - RNA, 22 nt, Human
ggugggcaggucacucugccuc

SEQ ID NO: 558525 - RNA, 22 nt, Human
gugcccugggccuucagggcca

SEQ ID NO: 558526 - RNA, 22 nt, Human
cagcaggcucugaguggcugcc

SEQ ID NO: 558527 - RNA, 20 nt, Human
ugccaugguaacagagugug

SEQ ID NO: 558528 - RNA, 22 nt, Human
gaggaaccuccugaaaaguaua

SEQ ID NO: 558529 - RNA, 22 nt, Human
gcagcuuucugcaaugucaucc

SEQ ID NO: 558530 - RNA, 22 nt, Human
caucuucacauauuuccaauga

SEQ ID NO: 558531 - RNA, 22 nt, Human
aaaaaucuaugacugcuucucc

SEQ ID NO: 558532 - RNA, 22 nt, Human
ucauuucagccauuuuuaaaug

SEQ ID NO: 558533 - RNA, 22 nt, Human
caagagcugugaccucauucac

SEQ ID NO: 558534 - RNA, 22 nt, Human
aagaaaugugaauauugaauag

SEQ ID NO: 558535 - RNA, 22 nt, Human
aguggagacaggacagucgaua

SEQ ID NO: 558536 - RNA, 22 nt, Human
uggugugggcguggcaggcaag

SEQ ID NO: 558537 - RNA, 22 nt, Human
ucagcugagcuccagcucauag

SEQ ID NO: 558538 - RNA, 22 nt, Human
ugaggcagcauucuucaagaca

SEQ ID NO: 558539 - RNA, 22 nt, Human
gcugaaggcccggaggacaggg

SEQ ID NO: 558540 - RNA, 22 nt, Human
ucuagggaacaugggucaagcu

SEQ ID NO: 558541 - RNA, 19 nt, Human
ccuuuuuuaacuucagcaa

SEQ ID NO: 558542 - RNA, 22 nt, Human
ccucugagaccagcucugcacc

SEQ ID NO: 558543 - RNA, 17 nt, Human
ggcuucagggagcuggg

SEQ ID NO: 558544 - RNA, 22 nt, Human
aagaacuaucucuggcuguagg

SEQ ID NO: 558545 - RNA, 22 nt, Human
caaagaaugagugaguacauaa

SEQ ID NO: 558546 - RNA, 22 nt, Human
ccugcccuaugaccagcuucac

SEQ ID NO: 558547 - RNA, 22 nt, Human
caggaugcacuaggaaccaggg

SEQ ID NO: 558548 - RNA, 22 nt, Human
uggcugccuagucccucagccu

SEQ ID NO: 558549 - RNA, 22 nt, Human
aggaagcaaaaggcagggucua

SEQ ID NO: 558550 - RNA, 22 nt, Human
agcagagucuucaagggcaggc

SEQ ID NO: 558551 - RNA, 22 nt, Human
uacaacauaacgggcauucagu

SEQ ID NO: 558552 - RNA, 22 nt, Human
ggcagggagagcaugcugauaa

SEQ ID NO: 558553 - RNA, 19 nt, Human
ugcuucuggggcuucucca

SEQ ID NO: 558554 - RNA, 22 nt, Human
cuggccaggcucucacgugguc

SEQ ID NO: 558555 - RNA, 22 nt, Human
gcugccugucuguuucuuuuau

SEQ ID NO: 558556 - RNA, 23 nt, Human
uagagcagggaaaucugucagag

SEQ ID NO: 558557 - RNA, 22 nt, Human
gagcuggcuccgccaugcugcu

SEQ ID NO: 558558 - RNA, 22 nt, Human
caaugucaugauuuuccauuag

SEQ ID NO: 558559 - RNA, 22 nt, Human
cccaaguuaauuuguagcugaa

SEQ ID NO: 558560 - RNA, 22 nt, Human
aucucagacauguuguccauga

SEQ ID NO: 558561 - RNA, 21 nt, Human
cacagcaggguuccugggcuc

SEQ ID NO: 558562 - RNA, 22 nt, Human
ugggccucaucuucaaugaguc

SEQ ID NO: 558563 - RNA, 22 nt, Human
auucucugaagucaauggaaau

SEQ ID NO: 558564 - RNA, 22 nt, Human
acuucaguaggugauaugugca

SEQ ID NO: 558565 - RNA, 22 nt, Human
aggacuuagaacauuauguacu

SEQ ID NO: 558566 - RNA, 21 nt, Human
uucaggguuucacaauacuaa

SEQ ID NO: 558567 - RNA, 22 nt, Human
uacaauauguggccuuuuguga

SEQ ID NO: 558568 - RNA, 22 nt, Human
guguauaacuaucuaucuagua

SEQ ID NO: 558569 - RNA, 22 nt, Human
acucaggaaaaauguagugaua

SEQ ID NO: 558570 - RNA, 22 nt, Human
aaaaucugguaauuugaaugug

SEQ ID NO: 558571 - RNA, 22 nt, Human
guuuuuccugcugacuuggguc

SEQ ID NO: 558572 - RNA, 15 nt, Human
ccaggcucugcacuc

SEQ ID NO: 558573 - RNA, 22 nt, Human
cugguggaggugccaggauuug

SEQ ID NO: 558574 - RNA, 22 nt, Human
aagcagcuuaaauuagagccug

SEQ ID NO: 558575 - RNA, 22 nt, Human
uagacagauuucuuguuagaca

SEQ ID NO: 558576 - RNA, 22 nt, Human
guugggaagcagauggaugagc

SEQ ID NO: 558577 - RNA, 22 nt, Human
gguucacacuuucaugauuuca

SEQ ID NO: 558578 - RNA, 22 nt, Human
aggccuguuccuuccugggcac

SEQ ID NO: 558579 - RNA, 22 nt, Human
gcuccuggcaggcagugugugu

SEQ ID NO: 558580 - RNA, 22 nt, Human
ugagcuucaaaauaugugaauc

SEQ ID NO: 558581 - RNA, 22 nt, Human
ccaggaagcggugagggcugcc

SEQ ID NO: 558582 - RNA, 22 nt, Human
uuccaaauuccaauccccugaa

SEQ ID NO: 558583 - RNA, 22 nt, Human
gaugauggacaaagcauuggug

SEQ ID NO: 558584 - RNA, 22 nt, Human
agcagcagaagggagacccagg

SEQ ID NO: 558585 - RNA, 22 nt, Human
aaucaacauuguuuuaagucaa

SEQ ID NO: 558586 - RNA, 23 nt, Human
agggguggucaguacccgcagug

SEQ ID NO: 558587 - RNA, 22 nt, Human
auguucuguuuuguaauucaua

SEQ ID NO: 558588 - RNA, 22 nt, Human
agcugagcauuugauccaccuc

SEQ ID NO: 558589 - RNA, 22 nt, Human
auugacaaauggauguugacau

SEQ ID NO: 558590 - RNA, 22 nt, Human
caggcagcugcgacaagagagc

SEQ ID NO: 558591 - RNA, 22 nt, Human
acauuuaaccuuugaggaacug

SEQ ID NO: 558592 - RNA, 22 nt, Human
acauuaaacuugcuuggcugua

SEQ ID NO: 558593 - RNA, 22 nt, Human
augaaaauucuaugcaggccag

SEQ ID NO: 558594 - RNA, 22 nt, Human
gccugcagugagugcagaaggu

SEQ ID NO: 558595 - RNA, 22 nt, Human
auugugaauagugccgcaguaa

SEQ ID NO: 558596 - RNA, 22 nt, Human
gggcugggauugcuugcuguga

SEQ ID NO: 558597 - RNA, 22 nt, Human
gaggcucaguuauuuuagccug

SEQ ID NO: 558598 - RNA, 22 nt, Human
ggaagaggaggagccaggcuuu

SEQ ID NO: 558599 - RNA, 22 nt, Human
agucuucucauuucacaugcuu

SEQ ID NO: 558600 - RNA, 22 nt, Human
gucuagagaggaaggaagugug

SEQ ID NO: 558601 - RNA, 22 nt, Human
auugcacaaacacagucagacu

SEQ ID NO: 558602 - RNA, 22 nt, Human
agcagcuaaguagcgcaguuaa

SEQ ID NO: 558603 - RNA, 22 nt, Human
gggcugccuuucuucugggagc

SEQ ID NO: 558604 - RNA, 22 nt, Human
acagcuuuaucucagggaucag

SEQ ID NO: 558605 - RNA, 22 nt, Human
aaauggaucuguggaauacauu

SEQ ID NO: 558606 - RNA, 22 nt, Human
ucugucugcaccuaagcacagu

SEQ ID NO: 558607 - RNA, 22 nt, Human
agggacccugaugacugaggag

SEQ ID NO: 558608 - RNA, 22 nt, Human
ucccaggugaugcugaggccac

SEQ ID NO: 558609 - RNA, 22 nt, Human
acugagcucuugacugggaguu

SEQ ID NO: 558610 - RNA, 22 nt, Human
ccugggaguggcacucacagca

SEQ ID NO: 558611 - RNA, 22 nt, Human
uuccagccaugguuucccuaug

SEQ ID NO: 558612 - RNA, 22 nt, Human
uaucagaaggcacauggagucu

SEQ ID NO: 558613 - RNA, 22 nt, Human
aacaaguguauuaauggaaaua

SEQ ID NO: 558614 - RNA, 22 nt, Human
agccugucugucuccaaagcug

SEQ ID NO: 558615 - RNA, 22 nt, Human
ugggccucccaugucuuaggga

SEQ ID NO: 558616 - RNA, 22 nt, Human
gaaguauaggagacaaacaaga

SEQ ID NO: 558617 - RNA, 22 nt, Human
caucuacacugauuaggugaac

SEQ ID NO: 558618 - RNA, 21 nt, Human
agcucagccgggcacaguggc

SEQ ID NO: 558619 - RNA, 20 nt, Human
cuucuucaguaguuuguucu

SEQ ID NO: 558620 - RNA, 22 nt, Human
cucuuuccaggguaccccaggu

SEQ ID NO: 558621 - RNA, 22 nt, Human
uugcuaaaucccuauaauauuc

SEQ ID NO: 558622 - RNA, 23 nt, Human
agugcugaauugaaagcuccagg

SEQ ID NO: 558623 - RNA, 22 nt, Human
agaccauagggaccucagguug

SEQ ID NO: 558624 - RNA, 22 nt, Human
augcagaaagagaauguaaugu

SEQ ID NO: 558625 - RNA, 22 nt, Human
gaugcugagagguggagggaac

SEQ ID NO: 558626 - RNA, 22 nt, Human
gagagcacaugaacauggagga

SEQ ID NO: 558627 - RNA, 22 nt, Human
caguggcacccacgggcugggc

SEQ ID NO: 558628 - RNA, 22 nt, Human
aggaggcucucagguccucccc

SEQ ID NO: 558629 - RNA, 22 nt, Human
ucuuuacaucacaauuguaugg

SEQ ID NO: 558630 - RNA, 22 nt, Human
cuucuuuaauguauacaaaaga

SEQ ID NO: 558631 - RNA, 22 nt, Human
aaggcacugaacuuaaauucug

SEQ ID NO: 558632 - RNA, 22 nt, Human
cagugguggaaugaggaauugu

SEQ ID NO: 558633 - RNA, 22 nt, Human
auccccacgauauagccaaagc

SEQ ID NO: 558634 - RNA, 22 nt, Human
auggaaaugauggaacauuaaa

SEQ ID NO: 558635 - RNA, 22 nt, Human
cugggccugucccugauugagg

SEQ ID NO: 558636 - RNA, 22 nt, Human
uugcagagaucagcagguuuga

SEQ ID NO: 558637 - RNA, 22 nt, Human
uaugagaagaacaggugacuuu

SEQ ID NO: 558638 - RNA, 22 nt, Human
uccaggacuagcauuucugaua

SEQ ID NO: 558639 - RNA, 22 nt, Human
ccagagagauugcuucuaaaga

SEQ ID NO: 558640 - RNA, 19 nt, Human
cagcugccuuuucuuugca

SEQ ID NO: 558641 - RNA, 22 nt, Human
aucacagagcucccuuccacug

SEQ ID NO: 558642 - RNA, 22 nt, Human
gcugggcuucaccuccagaguu

SEQ ID NO: 558643 - RNA, 22 nt, Human
augugcucacccuauuuaugga

SEQ ID NO: 558644 - RNA, 22 nt, Human
uucaguuuguuugacuguuaga

SEQ ID NO: 558645 - RNA, 22 nt, Human
aaauaugaaugauaagaguuau

SEQ ID NO: 558646 - RNA, 20 nt, Human
aggcugagggugauuguguc

SEQ ID NO: 558647 - RNA, 22 nt, Human
cauuguuauagcauuacacacc

SEQ ID NO: 558648 - RNA, 22 nt, Human
ugcccaaguguuuggcugaguc

SEQ ID NO: 558649 - RNA, 22 nt, Human
gggcagagacucagaaacagaa

SEQ ID NO: 558650 - RNA, 22 nt, Human
cuguggagcagggcagggucac

SEQ ID NO: 558651 - RNA, 22 nt, Human
uugggcaaaguguuucuggagc

SEQ ID NO: 558652 - RNA, 22 nt, Human
uuggaaagcaagcuggacauac

SEQ ID NO: 558653 - RNA, 22 nt, Human
uuaggaaaaucaugagagauga

SEQ ID NO: 558654 - RNA, 22 nt, Human
cagggccugagggcugcucugc

SEQ ID NO: 558655 - RNA, 22 nt, Human
cuguaaauaugaagaauauaug

SEQ ID NO: 558656 - RNA, 22 nt, Human
cauuucaauuauuugcucuucu

SEQ ID NO: 558657 - RNA, 22 nt, Human
guugcacaguuccucaagcagg

SEQ ID NO: 558658 - RNA, 22 nt, Human
uggcugcaguucacaggagcaa

SEQ ID NO: 558659 - RNA, 22 nt, Human
gauuucuucauucauuagaugg

SEQ ID NO: 558660 - RNA, 22 nt, Human
cagcugguagguagcagauuug

SEQ ID NO: 558661 - RNA, 22 nt, Human
aaauuuaagaagugugugcgug

SEQ ID NO: 558662 - RNA, 22 nt, Human
ccucucuguguggccucuccau

SEQ ID NO: 558663 - RNA, 20 nt, Human
agaggccaguuaggagucua

SEQ ID NO: 558664 - RNA, 22 nt, Human
gaaacuuacuuacucacauuuc

SEQ ID NO: 558665 - RNA, 22 nt, Human
uaauucuagauugacauuuuga

SEQ ID NO: 558666 - RNA, 22 nt, Human
aacaaagcaccacugagucagu

SEQ ID NO: 558667 - RNA, 22 nt, Human
gugagagggcugggcucaugau

SEQ ID NO: 558668 - RNA, 18 nt, Human
aaagaaggauuggagagc

SEQ ID NO: 558669 - RNA, 22 nt, Human
guacauuucucuuguucuuauu

SEQ ID NO: 558670 - RNA, 17 nt, Human
aaguccagaguugagca

SEQ ID NO: 558671 - RNA, 22 nt, Human
ugagaaagugggugccuagcaa

SEQ ID NO: 558672 - RNA, 22 nt, Human
cgcaggcuuuagaaucugcuac

SEQ ID NO: 558673 - RNA, 22 nt, Human
acaguggagaagcaaaugcagu

SEQ ID NO: 558674 - RNA, 22 nt, Human
aggagugcaaauaguccagaga

SEQ ID NO: 558675 - RNA, 22 nt, Human
ugcacuguugcuuuauaugauu

SEQ ID NO: 558676 - RNA, 22 nt, Human
agcaggcugaugggcaugcuug

SEQ ID NO: 558677 - RNA, 22 nt, Human
gacuauuuauaaugcugcagaa

SEQ ID NO: 558678 - RNA, 22 nt, Human
auaucuuuuagagcaagcuugu

SEQ ID NO: 558679 - RNA, 22 nt, Human
ggcagaagaaaggcuaagucuc

SEQ ID NO: 558680 - RNA, 22 nt, Human
agaagugccauacuguggucca

SEQ ID NO: 558681 - RNA, 22 nt, Human
gccagcucagaugcaggaagga

SEQ ID NO: 558682 - RNA, 22 nt, Human
agcagguggugggccagauuug

SEQ ID NO: 558683 - RNA, 22 nt, Human
agauaacuuuuggguauucaug

SEQ ID NO: 558684 - RNA, 22 nt, Human
uucuuaaguaugaucuuaacgg

SEQ ID NO: 558685 - RNA, 22 nt, Human
ugggcugcuuccucagcugaga

SEQ ID NO: 558686 - RNA, 22 nt, Human
ggcccugggcagaggagugggc

SEQ ID NO: 558687 - RNA, 21 nt, Human
ccugagggugguugugaagau

SEQ ID NO: 558688 - RNA, 22 nt, Human
cuggucccuggaccucccugga

SEQ ID NO: 558689 - RNA, 22 nt, Human
cugacucccaaagaggacgcgu

SEQ ID NO: 558690 - RNA, 22 nt, Human
gagcuagacugggcucugaugu

SEQ ID NO: 558691 - RNA, 22 nt, Human
ccacaggggcccacgagccgcu

SEQ ID NO: 558692 - RNA, 22 nt, Human
guggccugucagaagccguggg

SEQ ID NO: 558693 - RNA, 22 nt, Human
ugucucaguacacuccgauguu

SEQ ID NO: 558694 - RNA, 22 nt, Human
aagcugaaucugaaauagaauu

SEQ ID NO: 558695 - RNA, 22 nt, Human
aagcagccuggacuugggcugg

SEQ ID NO: 558696 - RNA, 22 nt, Human
uaaauucugaucaaguuccuuc

SEQ ID NO: 558697 - RNA, 22 nt, Human
agcuguggcaaccuugucagac

SEQ ID NO: 558698 - RNA, 22 nt, Human
ugagucagucugcccuggcuuc

SEQ ID NO: 558699 - RNA, 22 nt, Human
auguauaugugaaagauguuua

SEQ ID NO: 558700 - RNA, 22 nt, Human
ggagagcagggaggcugcucug

SEQ ID NO: 558701 - RNA, 22 nt, Human
ucaggaaggagcuggccugcca

SEQ ID NO: 558702 - RNA, 22 nt, Human
uuuaccaguguuaaacaccagc

SEQ ID NO: 558703 - RNA, 22 nt, Human
uaauagaaagguauuuuuugca

SEQ ID NO: 558704 - RNA, 22 nt, Human
uccucaggugacuagguaucuu

SEQ ID NO: 558705 - RNA, 22 nt, Human
cuuugcaagggauuucaugucu

SEQ ID NO: 558706 - RNA, 22 nt, Human
gugaaggcuacaagagaucaag

SEQ ID NO: 558707 - RNA, 17 nt, Human
gcagcagagagacccuc

SEQ ID NO: 558708 - RNA, 22 nt, Human
ggguggcuccuaugggcauagc

SEQ ID NO: 558709 - RNA, 22 nt, Human
uuucacagaaagacaacagaua

SEQ ID NO: 558710 - RNA, 22 nt, Human
aaacaagguacacaguaauggu

SEQ ID NO: 558711 - RNA, 23 nt, Human
gccuggagaaaagcugcaguuca

SEQ ID NO: 558712 - RNA, 22 nt, Human
gaucaaagccagugaggaguga

SEQ ID NO: 558713 - RNA, 22 nt, Human
ccucccacauugaggacaugcu

SEQ ID NO: 558714 - RNA, 22 nt, Human
uggcugaggagagggcggaagu

SEQ ID NO: 558715 - RNA, 22 nt, Human
cagaggcagacccuccagggcg

SEQ ID NO: 558716 - RNA, 22 nt, Human
cauguguagugaaauaagcagu

SEQ ID NO: 558717 - RNA, 22 nt, Human
ugguaauuaauuugauagguuc

SEQ ID NO: 558718 - RNA, 22 nt, Human
agucuucacucuucacuacuau

SEQ ID NO: 558719 - RNA, 19 nt, Human
uggaccugugcccauggcu

SEQ ID NO: 558720 - RNA, 22 nt, Human
cccagcagaaucugaugagggc

SEQ ID NO: 558721 - RNA, 22 nt, Human
gucggccacgcaggugcgguag

SEQ ID NO: 558722 - RNA, 22 nt, Human
agauguaguagugggucuuuua

SEQ ID NO: 558723 - RNA, 22 nt, Human
agccuccaucucccaucuguga

SEQ ID NO: 558724 - RNA, 22 nt, Human
uuaaaauagccagugccccucu

SEQ ID NO: 558725 - RNA, 22 nt, Human
acacaaaaucaaaguccuaggc

SEQ ID NO: 558726 - RNA, 22 nt, Human
uuacaggggacauuggggacau

SEQ ID NO: 558727 - RNA, 22 nt, Human
acagcagcuaaccccugggcca

SEQ ID NO: 558728 - RNA, 22 nt, Human
uuagccauuaauguccugugca

SEQ ID NO: 558729 - RNA, 22 nt, Human
cccaggcugaguuagagguguc

SEQ ID NO: 558730 - RNA, 22 nt, Human
acagcagcaauagcagugacau

SEQ ID NO: 558731 - RNA, 22 nt, Human
gggcagcagaauuggacagaaa

SEQ ID NO: 558732 - RNA, 22 nt, Human
agugcugaagacuggcuaggga

SEQ ID NO: 558733 - RNA, 21 nt, Human
acauacauaccuuaccaccuu

SEQ ID NO: 558734 - RNA, 22 nt, Human
uaaggcaaaggggaaguuauca

SEQ ID NO: 558735 - RNA, 22 nt, Human
ccagaaggcggagauugcagug

SEQ ID NO: 558736 - RNA, 22 nt, Human
uuagaaaggagcuuauuucuuu

SEQ ID NO: 558737 - RNA, 22 nt, Human
uuuuaguuguacugucaacagu

SEQ ID NO: 558738 - RNA, 22 nt, Human
ccuuuucugaaccacuuaaaua

SEQ ID NO: 558739 - RNA, 22 nt, Human
ugaggcuccagccaggccagca

SEQ ID NO: 558740 - RNA, 22 nt, Human
uccugcagccauuagaggucaa

SEQ ID NO: 558741 - RNA, 22 nt, Human
aauggcugggaguguauuuugg

SEQ ID NO: 558742 - RNA, 22 nt, Human
ggcagaguugguggagucaguu

SEQ ID NO: 558743 - RNA, 22 nt, Human
auugaggcagcauaguucaggg

SEQ ID NO: 558744 - RNA, 22 nt, Human
cagccagcugaauguaccauga

SEQ ID NO: 558745 - RNA, 22 nt, Human
gcagggcagagggagaaucucu

SEQ ID NO: 558746 - RNA, 22 nt, Human
ccugggcucaagcgaucuuguc

SEQ ID NO: 558747 - RNA, 22 nt, Human
augagcugugggauuccagagg

SEQ ID NO: 558748 - RNA, 22 nt, Human
agcugugaauuuuaugcuagug

SEQ ID NO: 558749 - RNA, 22 nt, Human
cugcccugcccaggccuugggc

SEQ ID NO: 558750 - RNA, 22 nt, Human
uuuucuaacaucuaguaauuug

SEQ ID NO: 558751 - RNA, 22 nt, Human
agccagggacgcugcaggcuac

SEQ ID NO: 558752 - RNA, 22 nt, Human
acaacacagcuuuccucaaguu

SEQ ID NO: 558753 - RNA, 22 nt, Human
ugggcagggagcuggaaccaca

SEQ ID NO: 558754 - RNA, 22 nt, Human
aggcuucagaaagaguaauugg

SEQ ID NO: 558755 - RNA, 22 nt, Human
aucuuuuuugucuuggucacug

SEQ ID NO: 558756 - RNA, 18 nt, Human
cuggagucacagugggga

SEQ ID NO: 558757 - RNA, 22 nt, Human
uggucucugacucugaagaccc

SEQ ID NO: 558758 - RNA, 22 nt, Human
acccuggaggucuacagugcag

SEQ ID NO: 558759 - RNA, 22 nt, Human
caguggcaaugggacagagcac

SEQ ID NO: 558760 - RNA, 22 nt, Human
ggaagaaaaugggcaacaggug

SEQ ID NO: 558761 - RNA, 22 nt, Human
aaggaggguucccagguccugg

SEQ ID NO: 558762 - RNA, 22 nt, Human
uuugugaauaagagaaugacag

SEQ ID NO: 558763 - RNA, 22 nt, Human
ugauuuccucuacuagcaauua

SEQ ID NO: 558764 - RNA, 22 nt, Human
cugggccuggacgggcagaucu

SEQ ID NO: 558765 - RNA, 22 nt, Human
cagcagugucuccagcaucaca

SEQ ID NO: 558766 - RNA, 22 nt, Human
gcccuggaaucucuccauggga

SEQ ID NO: 558767 - RNA, 22 nt, Human
agugacugggcagggcagggcc

SEQ ID NO: 558768 - RNA, 22 nt, Human
ccagguucaaauagcuguguga

SEQ ID NO: 558769 - RNA, 22 nt, Human
cuguccagcuuggcuccugggg

SEQ ID NO: 558770 - RNA, 22 nt, Human
aggugccaacaguauuucugcc

SEQ ID NO: 558771 - RNA, 19 nt, Human
cugaaaaacauucucagga

SEQ ID NO: 558772 - RNA, 22 nt, Human
ccagggcagcagaauuggggca

SEQ ID NO: 558773 - RNA, 22 nt, Human
aggcuccuaucgcuuucagcaa

SEQ ID NO: 558774 - RNA, 22 nt, Human
auguacaguuucuagacucaaa

SEQ ID NO: 558775 - RNA, 22 nt, Human
aagagcugcaucuaagccauga

SEQ ID NO: 558776 - RNA, 22 nt, Human
auuugucucugcacuuuacuca

SEQ ID NO: 558777 - RNA, 22 nt, Human
uacccagcuccucagaagacca

SEQ ID NO: 558778 - RNA, 22 nt, Human
uuagccaugcccuagaagagga

SEQ ID NO: 558779 - RNA, 22 nt, Human
guuucuuaaauguagcaggacc

SEQ ID NO: 558780 - RNA, 22 nt, Human
cacccaggcagguggcugagaa

SEQ ID NO: 558781 - RNA, 22 nt, Human
ugucacaaggccaugaaaagaa

SEQ ID NO: 558782 - RNA, 22 nt, Human
uguauauucugccuaaaagcuu

SEQ ID NO: 558783 - RNA, 22 nt, Human
cugucauugagccugucagggc

SEQ ID NO: 558784 - RNA, 22 nt, Human
ugggaaggauaccuuggaacau

SEQ ID NO: 558785 - RNA, 22 nt, Human
aggaagcuccuggagagccagu

SEQ ID NO: 558786 - RNA, 22 nt, Human
gagaggaguaggcugauggugc

SEQ ID NO: 558787 - RNA, 22 nt, Human
ugccaggcuuagagcaggggcu

SEQ ID NO: 558788 - RNA, 20 nt, Human
cucuuauugcauuaguuucu

SEQ ID NO: 558789 - RNA, 22 nt, Human
gccuaggagacaagcgugaaag

SEQ ID NO: 558790 - RNA, 22 nt, Human
ccagcucuuggugcacuuacau

SEQ ID NO: 558791 - RNA, 22 nt, Human
gugcccaggcccaaggcaccac

SEQ ID NO: 558792 - RNA, 22 nt, Human
gccacagcggggccgcuagagc

SEQ ID NO: 558793 - RNA, 22 nt, Human
acugcuggaaacccagaauggu

SEQ ID NO: 558794 - RNA, 20 nt, Human
ccuguucacugcgcaguuuc

SEQ ID NO: 558795 - RNA, 22 nt, Human
uccagcuuugagauuuuaugga

SEQ ID NO: 558796 - RNA, 22 nt, Human
cugauuuacauauacaaaagau

SEQ ID NO: 558797 - RNA, 22 nt, Human
gauucugagcugguguuuuacg

SEQ ID NO: 558798 - RNA, 22 nt, Human
gccuggagcucaugugggcauu

SEQ ID NO: 558799 - RNA, 22 nt, Human
gccucugcucggacuuugccuc

SEQ ID NO: 558800 - RNA, 22 nt, Human
uucaugcugugucuacaacuua

SEQ ID NO: 558801 - RNA, 22 nt, Human
cuuguugcuaacauaugcuucu

SEQ ID NO: 558802 - RNA, 22 nt, Human
guucuugccagcauccucaggu

SEQ ID NO: 558803 - RNA, 22 nt, Human
auaaguucagguaaagaaauca

SEQ ID NO: 558804 - RNA, 20 nt, Human
ugcagggccuaaaaagggaa

SEQ ID NO: 558805 - RNA, 22 nt, Human
cugugucccuugucccagagcc

SEQ ID NO: 558806 - RNA, 22 nt, Human
uuguuuuggagaugagcuaaaa

SEQ ID NO: 558807 - RNA, 22 nt, Human
uuauuuucuccucagaaagugg

SEQ ID NO: 558808 - RNA, 22 nt, Human
gggacaauggaggccucucucc

SEQ ID NO: 558809 - RNA, 22 nt, Human
auucuuuucccaacugcuuuaa

SEQ ID NO: 558810 - RNA, 22 nt, Human
aucaacauggcaaugcccaucu

SEQ ID NO: 558811 - RNA, 18 nt, Human
uggcucugcagccagaug

SEQ ID NO: 558812 - RNA, 22 nt, Human
agagugaagguugacacuucac

SEQ ID NO: 558813 - RNA, 22 nt, Human
ugaggaagggugugacggcacc

SEQ ID NO: 558814 - RNA, 22 nt, Human
uauucuugucuuuuccagaaau

SEQ ID NO: 558815 - RNA, 22 nt, Human
uggcccugaaggccuugagcau

SEQ ID NO: 558816 - RNA, 22 nt, Human
uuccucucucuugccagaaugu

SEQ ID NO: 558817 - RNA, 22 nt, Human
cugagcauggccgguccauggu

SEQ ID NO: 558818 - RNA, 20 nt, Human
uagauuucauacuucucuuu

SEQ ID NO: 558819 - RNA, 22 nt, Human
uuuuuaugccuacgcugaaaag

SEQ ID NO: 558820 - RNA, 22 nt, Human
cugggcugcgggcgccccucca

SEQ ID NO: 558821 - RNA, 22 nt, Human
ucugccugcggcugcagguggc

SEQ ID NO: 558822 - RNA, 22 nt, Human
gcagagccagaauggccaggac

SEQ ID NO: 558823 - RNA, 22 nt, Human
agggugcauguuugcaagagug

SEQ ID NO: 558824 - RNA, 22 nt, Human
aagggcagagggaaucccacau

SEQ ID NO: 558825 - RNA, 22 nt, Human
caucuagaaaaaagaccuguug

SEQ ID NO: 558826 - RNA, 22 nt, Human
cuucugaaaugugagcaaaauc

SEQ ID NO: 558827 - RNA, 22 nt, Human
aaaauucucuugaucuugacag

SEQ ID NO: 558828 - RNA, 22 nt, Human
cuucacagccaacaugggcaca

SEQ ID NO: 558829 - RNA, 22 nt, Human
ccugaguggagggauucugcag

SEQ ID NO: 558830 - RNA, 22 nt, Human
gacauuuagaagucuaauggcc

SEQ ID NO: 558831 - RNA, 22 nt, Human
cauguacacucauguaacuaua

SEQ ID NO: 558832 - RNA, 22 nt, Human
auuaguaaaacauuguauaugu

SEQ ID NO: 558833 - RNA, 22 nt, Human
cagcaauaagccagguuagaca

SEQ ID NO: 558834 - RNA, 18 nt, Human
gcugagguggugucagag

SEQ ID NO: 558835 - RNA, 22 nt, Human
ucagaggauuggacuuuuaugu

SEQ ID NO: 558836 - RNA, 22 nt, Human
ggcaggaggugaguggcgggug

SEQ ID NO: 558837 - RNA, 22 nt, Human
ugauuuccaugaagcugaaggc

SEQ ID NO: 558838 - RNA, 22 nt, Human
caggauggagggagggcuguua

SEQ ID NO: 558839 - RNA, 22 nt, Human
auauaauacaaccugcuaagug

SEQ ID NO: 558840 - RNA, 21 nt, Human
ugcuccuuagcugccccugcc

SEQ ID NO: 558841 - RNA, 22 nt, Human
uugcagaggcaaaaaugaacuc

SEQ ID NO: 558842 - RNA, 20 nt, Human
acauugauuauguuuguaga

SEQ ID NO: 558843 - RNA, 19 nt, Human
gcauuucaggcauguuugc

SEQ ID NO: 558844 - RNA, 22 nt, Human
auuuacauuccauggugguuac

SEQ ID NO: 558845 - RNA, 22 nt, Human
cuucacaaauggccuagaguuc

SEQ ID NO: 558846 - RNA, 22 nt, Human
ugggcagauuaaugcaguggcu

SEQ ID NO: 558847 - RNA, 22 nt, Human
gcccuggccuucaucucagaca

SEQ ID NO: 558848 - RNA, 22 nt, Human
ucuggagcaacagagcaggaca

SEQ ID NO: 558849 - RNA, 23 nt, Human
ucagagaaguuguaggcugggga

SEQ ID NO: 558850 - RNA, 22 nt, Human
gcaggaguguauuugcauguaa

SEQ ID NO: 558851 - RNA, 22 nt, Human
agggucugacuccucuggcaag

SEQ ID NO: 558852 - RNA, 21 nt, Human
ggcagcacuaccugaagcaua

SEQ ID NO: 558853 - RNA, 22 nt, Human
aacacauauuuauauaugcaca

SEQ ID NO: 558854 - RNA, 22 nt, Human
uccacuuuagcaaugauugaau

SEQ ID NO: 558855 - RNA, 22 nt, Human
ugaggaaacuuacaaggcagaa

SEQ ID NO: 558856 - RNA, 22 nt, Human
acauguggucaaucuguguagg

SEQ ID NO: 558857 - RNA, 22 nt, Human
agaaauguuguggguuuuguua

SEQ ID NO: 558858 - RNA, 22 nt, Human
aucaguuuaaaugggcuguugg

SEQ ID NO: 558859 - RNA, 22 nt, Human
ugcugaaggcaggggagguggc

SEQ ID NO: 558860 - RNA, 22 nt, Human
acauuuaggauguuuugagaga

SEQ ID NO: 558861 - RNA, 22 nt, Human
agcuggguggagggcccacggu

SEQ ID NO: 558862 - RNA, 22 nt, Human
cugcccuggguuuuaugggagu

SEQ ID NO: 558863 - RNA, 22 nt, Human
auagccuugguccuugcuccac

SEQ ID NO: 558864 - RNA, 22 nt, Human
uugcaauugcuauggagagcgu

SEQ ID NO: 558865 - RNA, 22 nt, Human
agggcuccuaugaugcucugcc

SEQ ID NO: 558866 - RNA, 19 nt, Human
auuuccaagaauuggagag

SEQ ID NO: 558867 - RNA, 22 nt, Human
uagccuucucaagacaaaguug

SEQ ID NO: 558868 - RNA, 22 nt, Human
ugcucuggggagcuccucugcg

SEQ ID NO: 558869 - RNA, 22 nt, Human
gugcagcuuccuggucucagcc

SEQ ID NO: 558870 - RNA, 20 nt, Human
uguacacaguacuuuacaau

SEQ ID NO: 558871 - RNA, 22 nt, Human
acuucauguugcucuuggcuau

SEQ ID NO: 558872 - RNA, 23 nt, Human
auuugagaaaguauuuuuaagac

SEQ ID NO: 558873 - RNA, 22 nt, Human
uuagaaacccagacucuuaggu

SEQ ID NO: 558874 - RNA, 22 nt, Human
aagcagccagccaucaugcccg

SEQ ID NO: 558875 - RNA, 22 nt, Human
gggcuguaggagcuggaauggg

SEQ ID NO: 558876 - RNA, 22 nt, Human
agcugacaggauggcauuauua

SEQ ID NO: 558877 - RNA, 22 nt, Human
auauaacauacauacagaaaag

SEQ ID NO: 558878 - RNA, 22 nt, Human
aaauguguuucuuugugaaugg

SEQ ID NO: 558879 - RNA, 22 nt, Human
guauuagguuggugcaaaagua

SEQ ID NO: 558880 - RNA, 21 nt, Human
ucuugauuauuggccucacac

SEQ ID NO: 558881 - RNA, 22 nt, Human
ucugggcagccaugugccuggc

SEQ ID NO: 558882 - RNA, 22 nt, Human
ugucuuuuggagcaucuuucuu

SEQ ID NO: 558883 - RNA, 22 nt, Human
agcaggugacagggcuguggug

SEQ ID NO: 558884 - RNA, 22 nt, Human
gccuccuggaagucacauguuu

SEQ ID NO: 558885 - RNA, 22 nt, Human
ucuuugucugaacagggacauu

SEQ ID NO: 558886 - RNA, 21 nt, Human
agcagcugggcaacauggagg

SEQ ID NO: 558887 - RNA, 22 nt, Human
cagaguucaaagccugcuggga

SEQ ID NO: 558888 - RNA, 22 nt, Human
uugcuaaaaauggaauuauagg

SEQ ID NO: 558889 - RNA, 22 nt, Human
gacagggaaacauugaaguguc

SEQ ID NO: 558890 - RNA, 22 nt, Human
uauuugcaaagaacuacacuag

SEQ ID NO: 558891 - RNA, 22 nt, Human
uuuggaacaagacaaaacauua

SEQ ID NO: 558892 - RNA, 22 nt, Human
cagcugaggucaaagaagcagg

SEQ ID NO: 558893 - RNA, 22 nt, Human
agcugggcugggcugagcugag

SEQ ID NO: 558894 - RNA, 22 nt, Human
cuucuaggcuucucagggggca

SEQ ID NO: 558895 - RNA, 22 nt, Human
cugggaagaagugggcuacauu

SEQ ID NO: 558896 - RNA, 22 nt, Human
ccccacaccugccgggcagcag

SEQ ID NO: 558897 - RNA, 22 nt, Human
uuauguacucugcaauguuuga

SEQ ID NO: 558898 - RNA, 22 nt, Human
uucaauucugcucugaucuuag

SEQ ID NO: 558899 - RNA, 22 nt, Human
uuugcaaauauguguuucuauu

SEQ ID NO: 558900 - RNA, 22 nt, Human
gcuguccaugucuggccucagu

SEQ ID NO: 558901 - RNA, 22 nt, Human
cagcagcuggugagacacagcc

SEQ ID NO: 558902 - RNA, 22 nt, Human
uccagcagguuggucaggugca

SEQ ID NO: 558903 - RNA, 22 nt, Human
caauuucacuaauaauauuuac

SEQ ID NO: 558904 - RNA, 22 nt, Human
aagaagcaugagaagauuuuau

SEQ ID NO: 558905 - RNA, 22 nt, Human
gcaggagcccuggcauguucuu

SEQ ID NO: 558906 - RNA, 22 nt, Human
ugggacacccucacgccugcac

SEQ ID NO: 558907 - RNA, 22 nt, Human
uuccagaacuuuuguuaauuuc

SEQ ID NO: 558908 - RNA, 22 nt, Human
ucuucagagacucugagccccu

SEQ ID NO: 558909 - RNA, 22 nt, Human
agcagggggcauccuugcccuu

SEQ ID NO: 558910 - RNA, 22 nt, Human
cagcugugcugauugcucagua

SEQ ID NO: 558911 - RNA, 22 nt, Human
cuacaaaguaccacagacuggg

SEQ ID NO: 558912 - RNA, 21 nt, Human
gucuuuaaaaaaggcugauac

SEQ ID NO: 558913 - RNA, 19 nt, Human
ucgagucaagacacuaggc

SEQ ID NO: 558914 - RNA, 22 nt, Human
aguggcugcuggaguggagaug

SEQ ID NO: 558915 - RNA, 22 nt, Human
aaagucacuuacagcucuuuug

SEQ ID NO: 558916 - RNA, 22 nt, Human
ucucacugauuugagaccaagg

SEQ ID NO: 558917 - RNA, 22 nt, Human
gcaaggcuuugugaauuuuaaa

SEQ ID NO: 558918 - RNA, 22 nt, Human
aguucccaggugaugcugaugu

SEQ ID NO: 558919 - RNA, 22 nt, Human
ucagaacaauugggaaccauua

SEQ ID NO: 558920 - RNA, 22 nt, Human
gggcagaggcucuggcccaucc

SEQ ID NO: 558921 - RNA, 22 nt, Human
uggaagaauauggggguacaga

SEQ ID NO: 558922 - RNA, 22 nt, Human
aaagaacaauguggaaucuccu

SEQ ID NO: 558923 - RNA, 23 nt, Human
cuuuccuuucuuugacacccagc

SEQ ID NO: 558924 - RNA, 22 nt, Human
aagccagggucaggggccuccu

SEQ ID NO: 558925 - RNA, 22 nt, Human
auagcaaaaaugaacaaagcuu

SEQ ID NO: 558926 - RNA, 22 nt, Human
gcucugcugcuuacuagauggu

SEQ ID NO: 558927 - RNA, 22 nt, Human
ucucagagagaugaaacuucca

SEQ ID NO: 558928 - RNA, 22 nt, Human
ugggaccugaagcagguuggca

SEQ ID NO: 558929 - RNA, 22 nt, Human
uagggcagccuuauagcuccca

SEQ ID NO: 558930 - RNA, 22 nt, Human
agggcucaguaaacgguggauu

SEQ ID NO: 558931 - RNA, 22 nt, Human
cucugcagaggcccaaggcuga

SEQ ID NO: 558932 - RNA, 22 nt, Human
gcagacaggcccaguggaggga

SEQ ID NO: 558933 - RNA, 22 nt, Human
uuaggaaauuaugguuucagau

SEQ ID NO: 558934 - RNA, 21 nt, Human
aaggcugagacaacucaggag

SEQ ID NO: 558935 - RNA, 22 nt, Human
cuguguccuccccaucacuucu

SEQ ID NO: 558936 - RNA, 22 nt, Human
agaaauguauucuguauguuuu

SEQ ID NO: 558937 - RNA, 22 nt, Human
gggagggacacaaagaguuccc

SEQ ID NO: 558938 - RNA, 21 nt, Human
guauucuuuaugaagugaaaa

SEQ ID NO: 558939 - RNA, 22 nt, Human
ucagaacauuuaaaaagugguu

SEQ ID NO: 558940 - RNA, 18 nt, Human
ccugcagcccaggaggcc

SEQ ID NO: 558941 - RNA, 22 nt, Human
ugcaagggcuuagggggcugug

SEQ ID NO: 558942 - RNA, 22 nt, Human
aggcuuccuggaggaagaggua

SEQ ID NO: 558943 - RNA, 22 nt, Human
guggcuucuggcugggccucag

SEQ ID NO: 558944 - RNA, 22 nt, Human
agacagaacagaauaauuguug

SEQ ID NO: 558945 - RNA, 22 nt, Human
ccagaagaaaaagcugguauua

SEQ ID NO: 558946 - RNA, 22 nt, Human
cuggaggaccacagaagcuggu

SEQ ID NO: 558947 - RNA, 22 nt, Human
agaggccuaaccaagauguccu

SEQ ID NO: 558948 - RNA, 22 nt, Human
gcuaggaggaagaaugugaauu

SEQ ID NO: 558949 - RNA, 22 nt, Human
ggcauggcuggguucuggugag

SEQ ID NO: 558950 - RNA, 21 nt, Human
acacugugucauaaugcuuaa

SEQ ID NO: 558951 - RNA, 22 nt, Human
ggugagaggcagaggacagcuu

SEQ ID NO: 558952 - RNA, 22 nt, Human
uucugaggcacuggcucuccca

SEQ ID NO: 558953 - RNA, 22 nt, Human
ggugcagcugcagccugggagc

SEQ ID NO: 558954 - RNA, 22 nt, Human
uuuaauguuaaauuuguagaug

SEQ ID NO: 558955 - RNA, 22 nt, Human
ugauugaacugagcuucaagau

SEQ ID NO: 558956 - RNA, 22 nt, Human
gaggaaccaaaucagcuugcac

SEQ ID NO: 558957 - RNA, 22 nt, Human
ucacuguaucauguugcacuua

SEQ ID NO: 558958 - RNA, 22 nt, Human
uacaguguauguauuuguaggu

SEQ ID NO: 558959 - RNA, 22 nt, Human
agugacaggggaggcaggugug

SEQ ID NO: 558960 - RNA, 22 nt, Human
cucacugcaaguuccaccuacc

SEQ ID NO: 558961 - RNA, 22 nt, Human
gugugcagggaugagugcaggu

SEQ ID NO: 558962 - RNA, 22 nt, Human
uuauuagggugguuuauguucu

SEQ ID NO: 558963 - RNA, 21 nt, Human
ugcauucuuguguaagguagu

SEQ ID NO: 558964 - RNA, 22 nt, Human
acagaaauucugggacagaaaa

SEQ ID NO: 558965 - RNA, 22 nt, Human
caagcagaagccucaggggcau

SEQ ID NO: 558966 - RNA, 22 nt, Human
cucugugcgggccauggucagg

SEQ ID NO: 558967 - RNA, 19 nt, Human
ccacagagcaugcugaggc

SEQ ID NO: 558968 - RNA, 22 nt, Human
cucccuggaggcccagaccugg

SEQ ID NO: 558969 - RNA, 22 nt, Human
cugggcugcggugguagguugu

SEQ ID NO: 558970 - RNA, 20 nt, Human
acaguguuagguuuuuccuu

SEQ ID NO: 558971 - RNA, 22 nt, Human
ugagcaucuuuuuacagguuua

SEQ ID NO: 558972 - RNA, 19 nt, Human
ggagaggcuggagggaugc

SEQ ID NO: 558973 - RNA, 23 nt, Human
uugaaggagaaagcuuucuuggu

SEQ ID NO: 558974 - RNA, 22 nt, Human
gggagaagaaugugucaauugu

SEQ ID NO: 558975 - RNA, 22 nt, Human
ggcacugaaccaggacacaagc

SEQ ID NO: 558976 - RNA, 22 nt, Human
caggaaaggugugucaugaugg

SEQ ID NO: 558977 - RNA, 22 nt, Human
ccagcugcuugggaaaaugucu

SEQ ID NO: 558978 - RNA, 22 nt, Human
cgcugccaggucaccaggggua

SEQ ID NO: 558979 - RNA, 22 nt, Human
uuugcuuuguuuaaaaguggua

SEQ ID NO: 558980 - RNA, 22 nt, Human
aaugccucuuggaagaagacuu

SEQ ID NO: 558981 - RNA, 22 nt, Human
uuccacagguuucagacuguuc

SEQ ID NO: 558982 - RNA, 22 nt, Human
aaaauacuguggaguguugaaa

SEQ ID NO: 558983 - RNA, 22 nt, Human
aaacaaccuaaaguuacugauc

SEQ ID NO: 558984 - RNA, 22 nt, Human
uucaggaugcucagaguagucu

SEQ ID NO: 558985 - RNA, 22 nt, Human
ucacauuuuuuacuggacuuaa

SEQ ID NO: 558986 - RNA, 22 nt, Human
cacacagacagcucucugaaga

SEQ ID NO: 558987 - RNA, 22 nt, Human
uuggucuuguggcaucuuucca

SEQ ID NO: 558988 - RNA, 22 nt, Human
ugcuggcugcagugcugucaaa

SEQ ID NO: 558989 - RNA, 22 nt, Human
gcuguggcugaagaugcaggga

SEQ ID NO: 558990 - RNA, 22 nt, Human
augcacgccccacacuggugug

SEQ ID NO: 558991 - RNA, 22 nt, Human
auuuauuauugugguuacuucu

SEQ ID NO: 558992 - RNA, 23 nt, Human
uugcaaauuucaguuaguucaug

SEQ ID NO: 558993 - RNA, 23 nt, Human
uuucugaaguugagauggacuuu

SEQ ID NO: 558994 - RNA, 22 nt, Human
uggccucuggcugaggacuaac

SEQ ID NO: 558995 - RNA, 22 nt, Human
uucauacucacuccaauaacug

SEQ ID NO: 558996 - RNA, 16 nt, Human
uggcugagagaggguu

SEQ ID NO: 558997 - RNA, 22 nt, Human
ggcugagaacaggcccagccuc

SEQ ID NO: 558998 - RNA, 22 nt, Human
cagcagcuccucugcggcuaug

SEQ ID NO: 558999 - RNA, 22 nt, Human
uuuucauuagaaugacugagaa

SEQ ID NO: 559000 - RNA, 20 nt, Human
cagcaguggaugagaguuuu

SEQ ID NO: 559001 - RNA, 22 nt, Human
gcccugccugucugcugggagg

SEQ ID NO: 559002 - RNA, 22 nt, Human
gaagauuuaagcacaauagucu

SEQ ID NO: 559003 - RNA, 23 nt, Human
cacuccuguuucuaagccagcau

SEQ ID NO: 559004 - RNA, 22 nt, Human
caggcagcaucagucugcugua

SEQ ID NO: 559005 - RNA, 22 nt, Human
ucuuuacaaucuaagcauaguu

SEQ ID NO: 559006 - RNA, 19 nt, Human
gcacugaagaguuggucac

SEQ ID NO: 559007 - RNA, 22 nt, Human
cuggcaggcaaauuggugggag

SEQ ID NO: 559008 - RNA, 22 nt, Human
uuuaacaugugaauuuuggaag

SEQ ID NO: 559009 - RNA, 22 nt, Human
aacuuucucuacggcauuuguu

SEQ ID NO: 559010 - RNA, 22 nt, Human
gacuguguccaugugcuggauu

SEQ ID NO: 559011 - RNA, 22 nt, Human
ugcccugcuugguuuauuuuca

SEQ ID NO: 559012 - RNA, 22 nt, Human
ggcugugcuugguguccuugga

SEQ ID NO: 559013 - RNA, 22 nt, Human
uauuuccaagcugaauccaaug

SEQ ID NO: 559014 - RNA, 22 nt, Human
cagcucugagacugaggcuaug

SEQ ID NO: 559015 - RNA, 22 nt, Human
agcuccagcccaucugcucgug

SEQ ID NO: 559016 - RNA, 21 nt, Human
ggcuuuaugcucacccagccu

SEQ ID NO: 559017 - RNA, 22 nt, Human
ccaaaggccaagcucagguaaa

SEQ ID NO: 559018 - RNA, 20 nt, Human
auguacuccccacaagcaac

SEQ ID NO: 559019 - RNA, 22 nt, Human
ggccugucucacccccgggugc

SEQ ID NO: 559020 - RNA, 22 nt, Human
gcugaguggagcagucagcgcu

SEQ ID NO: 559021 - RNA, 18 nt, Human
uccaggccugaagugucc

SEQ ID NO: 559022 - RNA, 22 nt, Human
cuuuacuucucaaaauaaagca

SEQ ID NO: 559023 - RNA, 22 nt, Human
gagaaagacguaggcugggagg

SEQ ID NO: 559024 - RNA, 22 nt, Human
ucacauacugaaaguccaguga

SEQ ID NO: 559025 - RNA, 22 nt, Human
gggcaaaaccugggcaucauga

SEQ ID NO: 559026 - RNA, 22 nt, Human
gagcucccaggccccagcaagg

SEQ ID NO: 559027 - RNA, 22 nt, Human
aaaggagacuucagaucuccuu

SEQ ID NO: 559028 - RNA, 22 nt, Human
ggcucagacucccaggcccucu

SEQ ID NO: 559029 - RNA, 22 nt, Human
caggagugucuccacacagcaa

SEQ ID NO: 559030 - RNA, 22 nt, Human
uaacugauauugaaaaacauca

SEQ ID NO: 559031 - RNA, 22 nt, Human
ucugucugcgcuugcccuggug

SEQ ID NO: 559032 - RNA, 22 nt, Human
gcaggcugggguagccccacuu

SEQ ID NO: 559033 - RNA, 22 nt, Human
agggcagcccuucugggagggc

SEQ ID NO: 559034 - RNA, 22 nt, Human
agggccugguucuguguaggga

SEQ ID NO: 559035 - RNA, 22 nt, Human
agaaaagugcucuagugagagc

SEQ ID NO: 559036 - RNA, 22 nt, Human
ggcugucaauucauaggucaga

SEQ ID NO: 559037 - RNA, 22 nt, Human
caauuucugggccucacacaag

SEQ ID NO: 559038 - RNA, 22 nt, Human
ggcucagagaccugcgaucuga

SEQ ID NO: 559039 - RNA, 22 nt, Human
agcugcucaggagagccagguc

SEQ ID NO: 559040 - RNA, 22 nt, Human
aggcugugagcaagaacaccua

SEQ ID NO: 559041 - RNA, 21 nt, Human
ucuugaaaaguuagauucucu

SEQ ID NO: 559042 - RNA, 22 nt, Human
gucaacauaggccucagugagg

SEQ ID NO: 559043 - RNA, 22 nt, Human
ccauggagcgggugagugagug

SEQ ID NO: 559044 - RNA, 22 nt, Human
uggccagaaccugcaguaggcc

SEQ ID NO: 559045 - RNA, 22 nt, Human
caggggacaguaugguggauga

SEQ ID NO: 559046 - RNA, 22 nt, Human
ucacaggcuugugaacauugca

SEQ ID NO: 559047 - RNA, 22 nt, Human
acaugcuuccaaauuauguugg

SEQ ID NO: 559048 - RNA, 22 nt, Human
gcacugaacuuuaaucauuucu

SEQ ID NO: 559049 - RNA, 22 nt, Human
gaggggccggcaugugccucuc

SEQ ID NO: 559050 - RNA, 22 nt, Human
aauaacagugccaugaaauuga

SEQ ID NO: 559051 - RNA, 22 nt, Human
uagacacaagagaaggguauaa

SEQ ID NO: 559052 - RNA, 22 nt, Human
gggcaggucugggucagccuga

SEQ ID NO: 559053 - RNA, 22 nt, Human
gcacagaacuucucuuaguagg

SEQ ID NO: 559054 - RNA, 22 nt, Human
gggcugaguuccugccucacuc

SEQ ID NO: 559055 - RNA, 22 nt, Human
cugggccuagcaacagaggagu

SEQ ID NO: 559056 - RNA, 22 nt, Human
gggggcagaauguacucuuguc

SEQ ID NO: 559057 - RNA, 22 nt, Human
ccagagaguaggaggcauuauu

SEQ ID NO: 559058 - RNA, 22 nt, Human
cugccuggcauggagaagagaa

SEQ ID NO: 559059 - RNA, 22 nt, Human
ugcaggcugaggcuggcucaac

SEQ ID NO: 559060 - RNA, 22 nt, Human
cuggugggaggcaagguggaag

SEQ ID NO: 559061 - RNA, 22 nt, Human
uugccuauguaacuuuauauuu

SEQ ID NO: 559062 - RNA, 22 nt, Human
aaauugucagaauucagaaagu

SEQ ID NO: 559063 - RNA, 22 nt, Human
cuuuucuuguauuggaugcccc

SEQ ID NO: 559064 - RNA, 22 nt, Human
aagccagggauuccugagggag

SEQ ID NO: 559065 - RNA, 22 nt, Human
ggcugccucuggaagcuggaga

SEQ ID NO: 559066 - RNA, 22 nt, Human
cauggccuugagugacugcacu

SEQ ID NO: 559067 - RNA, 22 nt, Human
uaaguuagagguuaggcacuua

SEQ ID NO: 559068 - RNA, 22 nt, Human
aucaaaguucguaacugauaac

SEQ ID NO: 559069 - RNA, 22 nt, Human
augcucugaugcuguuaaaugu

SEQ ID NO: 559070 - RNA, 22 nt, Human
cuguacaaguccuucaucaggg

SEQ ID NO: 559071 - RNA, 22 nt, Human
aggcagaggaaggguggauuug

SEQ ID NO: 559072 - RNA, 22 nt, Human
uuauacauguguuuugagauga

SEQ ID NO: 559073 - RNA, 22 nt, Human
gucaaauauaugcaaaacuauu

SEQ ID NO: 559074 - RNA, 19 nt, Human
aggagaaguagcagaaauu

SEQ ID NO: 559075 - RNA, 22 nt, Human
aacuacauuuuacagaagauga

SEQ ID NO: 559076 - RNA, 22 nt, Human
gacuauuucccucaucaucuuc

SEQ ID NO: 559077 - RNA, 22 nt, Human
caguguggugugcacagcuuag

SEQ ID NO: 559078 - RNA, 20 nt, Human
caggcaguuugugguuaggg

SEQ ID NO: 559079 - RNA, 22 nt, Human
cugaaggacuuggugauaguug

SEQ ID NO: 559080 - RNA, 22 nt, Human
cacagugaccucuuuaaaaggg

SEQ ID NO: 559081 - RNA, 22 nt, Human
uacauguaggugacauuuuaau

SEQ ID NO: 559082 - RNA, 22 nt, Human
aaggccacacuugcuggccagc

SEQ ID NO: 559083 - RNA, 22 nt, Human
acauucugugagucauguuuua

SEQ ID NO: 559084 - RNA, 22 nt, Human
ucaggcaggcagagggcaaaug

SEQ ID NO: 559085 - RNA, 22 nt, Human
ugugaaauuacuuaaaggaaau

SEQ ID NO: 559086 - RNA, 22 nt, Human
gacauuuagcuguuuugcauuu

SEQ ID NO: 559087 - RNA, 22 nt, Human
ugcccacauucaaaaggugaug

SEQ ID NO: 559088 - RNA, 21 nt, Human
uguaugcacgcacaugcacac

SEQ ID NO: 559089 - RNA, 22 nt, Human
aagucuuucauaagucucuuau

SEQ ID NO: 559090 - RNA, 22 nt, Human
uccugagcaccuaugccauggc

SEQ ID NO: 559091 - RNA, 22 nt, Human
gaagucugacucuuuguaagcu

SEQ ID NO: 559092 - RNA, 22 nt, Human
uuuagacauuugugguuugcaa

SEQ ID NO: 559093 - RNA, 21 nt, Human
aggcuguccuuugccagcccu

SEQ ID NO: 559094 - RNA, 22 nt, Human
cagugguauuugagagaaugga

SEQ ID NO: 559095 - RNA, 22 nt, Human
agccauggcgccacuagaggga

SEQ ID NO: 559096 - RNA, 22 nt, Human
aagcugccagcugagcugaggc

SEQ ID NO: 559097 - RNA, 22 nt, Human
ccugccugccugcuggccggga

SEQ ID NO: 559098 - RNA, 22 nt, Human
gccagcugaauuuccaacuguu

SEQ ID NO: 559099 - RNA, 22 nt, Human
caaggccauaagagauacaaaa

SEQ ID NO: 559100 - RNA, 22 nt, Human
cccaggaggcagagcuugcagu

SEQ ID NO: 559101 - RNA, 22 nt, Human
ucagcuuugggggucucaggag

SEQ ID NO: 559102 - RNA, 22 nt, Human
aagcacugagcacaguggcuga

SEQ ID NO: 559103 - RNA, 22 nt, Human
aaggcugccucugccagaggag

SEQ ID NO: 559104 - RNA, 22 nt, Human
uccugagagguuuauaacgcag

SEQ ID NO: 559105 - RNA, 22 nt, Human
agaaagacgugaugaagaagua

SEQ ID NO: 559106 - RNA, 22 nt, Human
cugugacuagaccugcaggaga

SEQ ID NO: 559107 - RNA, 22 nt, Human
aaauccuaccaagaaauucccu

SEQ ID NO: 559108 - RNA, 22 nt, Human
gccaggcauucuagaaguagug

SEQ ID NO: 559109 - RNA, 22 nt, Human
uccagggagagccgcugcucca

SEQ ID NO: 559110 - RNA, 22 nt, Human
ugcagcagacugaguaugagaa

SEQ ID NO: 559111 - RNA, 22 nt, Human
ccaggugguucaggucaccaua

SEQ ID NO: 559112 - RNA, 19 nt, Human
ccucugcgcuguccugcuc

SEQ ID NO: 559113 - RNA, 19 nt, Human
cuuuuucaccuucuagaag

SEQ ID NO: 559114 - RNA, 22 nt, Human
acagaauuaaugaaaauuacaa

SEQ ID NO: 559115 - RNA, 22 nt, Human
gugcccaggggccagcugccgg

SEQ ID NO: 559116 - RNA, 23 nt, Human
uccaagggcuacaaacacagacc

SEQ ID NO: 559117 - RNA, 22 nt, Human
gccuggagcucuccacuugggg

SEQ ID NO: 559118 - RNA, 22 nt, Human
cccaggcacucuuggucauuuu

SEQ ID NO: 559119 - RNA, 22 nt, Human
gaugccucuuuuggcugaauua

SEQ ID NO: 559120 - RNA, 22 nt, Human
ccugggagguggagguugcagu

SEQ ID NO: 559121 - RNA, 22 nt, Human
gagcucugggaaacaaagugua

SEQ ID NO: 559122 - RNA, 22 nt, Human
caggcagcuagauuuauaacaa

SEQ ID NO: 559123 - RNA, 22 nt, Human
acuuugaaacuaaaauucauua

SEQ ID NO: 559124 - RNA, 22 nt, Human
ccaggcucugagaggaauguga

SEQ ID NO: 559125 - RNA, 22 nt, Human
aggucaccauggcaugcuccac

SEQ ID NO: 559126 - RNA, 22 nt, Human
uggaacacaucuaaggaagcag

SEQ ID NO: 559127 - RNA, 22 nt, Human
auucuggccuuggcucugucac

SEQ ID NO: 559128 - RNA, 22 nt, Human
gaagcagcugccagagaugucu

SEQ ID NO: 559129 - RNA, 22 nt, Human
uguauuuugaguccaaucuccu

SEQ ID NO: 559130 - RNA, 22 nt, Human
caggaacauuuaaccacagggu

SEQ ID NO: 559131 - RNA, 22 nt, Human
gauauuuuuaggugaugcaggc

SEQ ID NO: 559132 - RNA, 22 nt, Human
augaugaaauuuucuaucaugu

SEQ ID NO: 559133 - RNA, 22 nt, Human
aguuacaacuguuugaauguca

SEQ ID NO: 559134 - RNA, 22 nt, Human
cugcccugcuaaugaguuccaa

SEQ ID NO: 559135 - RNA, 22 nt, Human
cugcuuccugcugggauacuga

SEQ ID NO: 559136 - RNA, 22 nt, Human
aauugcuaaagauuauguuuuc

SEQ ID NO: 559137 - RNA, 22 nt, Human
caggaaccuaaagagacauuac

SEQ ID NO: 559138 - RNA, 22 nt, Human
uagaggggaaaaugcguauuaa

SEQ ID NO: 559139 - RNA, 22 nt, Human
auuccauuguguaaggauaucg

SEQ ID NO: 559140 - RNA, 22 nt, Human
aauucuucaagugcuuuggaga

SEQ ID NO: 559141 - RNA, 22 nt, Human
aaugaaaugaagauaugaucag

SEQ ID NO: 559142 - RNA, 22 nt, Human
agaggaggccaggcccacaccu

SEQ ID NO: 559143 - RNA, 22 nt, Human
uaugcacacaucgcagcaggaa

SEQ ID NO: 559144 - RNA, 22 nt, Human
ugccugcauuuuguggcuggcu

SEQ ID NO: 559145 - RNA, 22 nt, Human
cugcugcccagugugcauuggg

SEQ ID NO: 559146 - RNA, 22 nt, Human
agggcaaguugagugugcgugg

SEQ ID NO: 559147 - RNA, 22 nt, Human
gcaggcagaucaccugucagga

SEQ ID NO: 559148 - RNA, 22 nt, Human
acuugaaacccugagaugauaa

SEQ ID NO: 559149 - RNA, 22 nt, Human
ggccucaggguugggcccauua

SEQ ID NO: 559150 - RNA, 22 nt, Human
acacagggauauuucagguggu

SEQ ID NO: 559151 - RNA, 22 nt, Human
auacagaugagaucaggcauaa

SEQ ID NO: 559152 - RNA, 22 nt, Human
auuugugccaaauuauuucuaa

SEQ ID NO: 559153 - RNA, 21 nt, Human
acacaacaggcagucauuuuc

SEQ ID NO: 559154 - RNA, 22 nt, Human
aggagguguagauuuccuguca

SEQ ID NO: 559155 - RNA, 22 nt, Human
aaugugguuaaaauuugguugu

SEQ ID NO: 559156 - RNA, 21 nt, Human
gcaaguacuaucaucauuauc

SEQ ID NO: 559157 - RNA, 22 nt, Human
gccugggauagaggcaaugcau

SEQ ID NO: 559158 - RNA, 22 nt, Human
cuguguggccucaagccagccu

SEQ ID NO: 559159 - RNA, 22 nt, Human
aacugaaacuuaggaaguaauc

SEQ ID NO: 559160 - RNA, 22 nt, Human
guuauguauugggaaauccaag

SEQ ID NO: 559161 - RNA, 22 nt, Human
agaaagggagcguggaucaauu

SEQ ID NO: 559162 - RNA, 22 nt, Human
acagggcagugucuugaaaaau

SEQ ID NO: 559163 - RNA, 22 nt, Human
auucacacacauuuagagcaga

SEQ ID NO: 559164 - RNA, 22 nt, Human
uugaaaggcacaggcaccuggg

SEQ ID NO: 559165 - RNA, 22 nt, Human
guuucuuaccacuuggaccucu

SEQ ID NO: 559166 - RNA, 22 nt, Human
gggcugacagcacgccuucugu

SEQ ID NO: 559167 - RNA, 22 nt, Human
cccagcaguuguuggugcacau

SEQ ID NO: 559168 - RNA, 22 nt, Human
ugaaaucaugagauagugucac

SEQ ID NO: 559169 - RNA, 22 nt, Human
uuguuugcccacaacuauuaag

SEQ ID NO: 559170 - RNA, 22 nt, Human
cccuggcuuaaaaaccucauau

SEQ ID NO: 559171 - RNA, 23 nt, Human
gcucagagguuuuucucuggaug

SEQ ID NO: 559172 - RNA, 22 nt, Human
gcacacauucggauucuuaacc

SEQ ID NO: 559173 - RNA, 22 nt, Human
aaauuauucaaaaagcuguguu

SEQ ID NO: 559174 - RNA, 22 nt, Human
uagcagaggaaauccagaguaa

SEQ ID NO: 559175 - RNA, 22 nt, Human
uggcucaggaucuaagcagaau

SEQ ID NO: 559176 - RNA, 23 nt, Human
acagcuuccuacuuugcugcugc

SEQ ID NO: 559177 - RNA, 22 nt, Human
gcucuugucaaaaauuaguuga

SEQ ID NO: 559178 - RNA, 22 nt, Human
cuuggagauacaagugguaccu

SEQ ID NO: 559179 - RNA, 22 nt, Human
cagugcccuuccaggacugcag

SEQ ID NO: 559180 - RNA, 22 nt, Human
ugggcacagggguaggaaugag

SEQ ID NO: 559181 - RNA, 22 nt, Human
aaacucuggagauguuuaugca

SEQ ID NO: 559182 - RNA, 22 nt, Human
ggauggcaggacaaggacccag

SEQ ID NO: 559183 - RNA, 22 nt, Human
uccugcagaucaaagccuuuga

SEQ ID NO: 559184 - RNA, 22 nt, Human
ccucagaggcagaugguaagaa

SEQ ID NO: 559185 - RNA, 22 nt, Human
uccaguggguugcugagggagg

SEQ ID NO: 559186 - RNA, 22 nt, Human
ugugccuggaucucugugacaa

SEQ ID NO: 559187 - RNA, 22 nt, Human
ugaaggcccagccacagaaugg

SEQ ID NO: 559188 - RNA, 22 nt, Human
agaugggcgcccuggacugagg

SEQ ID NO: 559189 - RNA, 22 nt, Human
gguccccagcaguggcugcuuc

SEQ ID NO: 559190 - RNA, 22 nt, Human
cagagucaguauugaauugaaa

SEQ ID NO: 559191 - RNA, 22 nt, Human
agggcuggcaagggauugaaau

SEQ ID NO: 559192 - RNA, 21 nt, Human
gccaaggggguagcuauuccu

SEQ ID NO: 559193 - RNA, 21 nt, Human
acagcagacaggcuuaggacc

SEQ ID NO: 559194 - RNA, 22 nt, Human
gaggccuggaccagccacagag

SEQ ID NO: 559195 - RNA, 22 nt, Human
gccugggagauuaauuaggaag

SEQ ID NO: 559196 - RNA, 22 nt, Human
cagccucuaagcacagccucuc

SEQ ID NO: 559197 - RNA, 20 nt, Human
uuucacagucccuguuuccu

SEQ ID NO: 559198 - RNA, 22 nt, Human
aagugggaauagaaaugaaggu

SEQ ID NO: 559199 - RNA, 22 nt, Human
auugagaauccauuugagauga

SEQ ID NO: 559200 - RNA, 17 nt, Human
accagaguuuuccaugc

SEQ ID NO: 559201 - RNA, 21 nt, Human
uggcagagugcagucuauaca

SEQ ID NO: 559202 - RNA, 22 nt, Human
aagucaggacuuaugcuaccug

SEQ ID NO: 559203 - RNA, 22 nt, Human
ucagggcugacugcuacucucc

SEQ ID NO: 559204 - RNA, 22 nt, Human
uaaaggaggaguuaaugagacu

SEQ ID NO: 559205 - RNA, 22 nt, Human
ugggggucaggaugaggccuug

SEQ ID NO: 559206 - RNA, 22 nt, Human
uugggcuugacaagcugucaag

SEQ ID NO: 559207 - RNA, 22 nt, Human
ugucuuuaaaauuaaacacauc

SEQ ID NO: 559208 - RNA, 22 nt, Human
aaauuauuaugccccucuauaa

SEQ ID NO: 559209 - RNA, 22 nt, Human
aguuacaugugaauagaaagua

SEQ ID NO: 559210 - RNA, 21 nt, Human
aagggagauaggaaucaggcc

SEQ ID NO: 559211 - RNA, 18 nt, Human
cuccagggaacucaguca

SEQ ID NO: 559212 - RNA, 20 nt, Human
augguucaggccagcugucu

SEQ ID NO: 559213 - RNA, 22 nt, Human
agggcagccaugagccuucagg

SEQ ID NO: 559214 - RNA, 22 nt, Human
ccagcagcccucuuccaagacu

SEQ ID NO: 559215 - RNA, 22 nt, Human
aguuagcaaauaccacaaucug

SEQ ID NO: 559216 - RNA, 18 nt, Human
aggggcagcuugugugga

SEQ ID NO: 559217 - RNA, 22 nt, Human
ucuauacaugugcacacacauc

SEQ ID NO: 559218 - RNA, 22 nt, Human
aaagauuugaguucugcuuaua

SEQ ID NO: 559219 - RNA, 22 nt, Human
ugcaaaagaauauagauauugu

SEQ ID NO: 559220 - RNA, 22 nt, Human
ugggcagauguccucugaagug

SEQ ID NO: 559221 - RNA, 22 nt, Human
augaggcauucacagaaggcac

SEQ ID NO: 559222 - RNA, 22 nt, Human
aggaaggaagagacaccauuug

SEQ ID NO: 559223 - RNA, 22 nt, Human
gcccuuccaacccagagggcaa

SEQ ID NO: 559224 - RNA, 22 nt, Human
uuccuguaugucagugaagagc

SEQ ID NO: 559225 - RNA, 22 nt, Human
ggaccugccagaacucaggcua

SEQ ID NO: 559226 - RNA, 22 nt, Human
uacuuucuagcucuccccaguu

SEQ ID NO: 559227 - RNA, 22 nt, Human
ucucagaguuugaaucuggagu

SEQ ID NO: 559228 - RNA, 22 nt, Human
uccaggccuaggccaagugauu

SEQ ID NO: 559229 - RNA, 22 nt, Human
ggaugcaggggcagcagagccu

SEQ ID NO: 559230 - RNA, 22 nt, Human
auguccagaguguccuggaaag

SEQ ID NO: 559231 - RNA, 22 nt, Human
ugggaagcuacucaugcaggca

SEQ ID NO: 559232 - RNA, 22 nt, Human
aaagaagacagacauuucuuuc

SEQ ID NO: 559233 - RNA, 22 nt, Human
agggcuccuccccggccuccac

SEQ ID NO: 559234 - RNA, 22 nt, Human
guaacauaguuugugcuucauc

SEQ ID NO: 559235 - RNA, 22 nt, Human
agcagggcugcggccccaccac

SEQ ID NO: 559236 - RNA, 22 nt, Human
uucaacaaaauauauuuuucca

SEQ ID NO: 559237 - RNA, 22 nt, Human
ccugucuguauugguuugcuau

SEQ ID NO: 559238 - RNA, 22 nt, Human
uaaacaugugagugugcauaua

SEQ ID NO: 559239 - RNA, 22 nt, Human
uuguuuuuaugaacauccagga

SEQ ID NO: 559240 - RNA, 22 nt, Human
agcugcccugggucuugcugcu

SEQ ID NO: 559241 - RNA, 22 nt, Human
uggggagagguaucauugagau

SEQ ID NO: 559242 - RNA, 22 nt, Human
augggaugaacuugaucugcuu

SEQ ID NO: 559243 - RNA, 18 nt, Human
uaagucauuuugccagca

SEQ ID NO: 559244 - RNA, 22 nt, Human
agaagugccgaaaggaagacag

SEQ ID NO: 559245 - RNA, 22 nt, Human
uaauacuguauacugcaaauuu

SEQ ID NO: 559246 - RNA, 22 nt, Human
cauaaaguguauaagugaagaa

SEQ ID NO: 559247 - RNA, 22 nt, Human
ccaggcaggcagcguucucagg

SEQ ID NO: 559248 - RNA, 22 nt, Human
gaguuaaugaggccaagggcag

SEQ ID NO: 559249 - RNA, 22 nt, Human
ucugggcugcugugcagugacc

SEQ ID NO: 559250 - RNA, 22 nt, Human
cagauggcugccaagaugggcu

SEQ ID NO: 559251 - RNA, 22 nt, Human
gcaaauguuuuugaguguuuac

SEQ ID NO: 559252 - RNA, 22 nt, Human
ccugggcaaaugccagagacaa

SEQ ID NO: 559253 - RNA, 22 nt, Human
gagggcugugaaggagcggguu

SEQ ID NO: 559254 - RNA, 22 nt, Human
ucugagcuacgaugccugucac

SEQ ID NO: 559255 - RNA, 22 nt, Human
agcucagcuuccucuccaugcu

SEQ ID NO: 559256 - RNA, 22 nt, Human
cuguagcagugugcucuuuuuc

SEQ ID NO: 559257 - RNA, 22 nt, Human
aggaagggugucaugagcccuu

SEQ ID NO: 559258 - RNA, 22 nt, Human
ucugccuggguguggagcagag

SEQ ID NO: 559259 - RNA, 22 nt, Human
acacauauaccacuguaaauga

SEQ ID NO: 559260 - RNA, 22 nt, Human
ggaguaggccccgggagagagu

SEQ ID NO: 559261 - RNA, 22 nt, Human
uaagugcaauguuuuacuuaaa

SEQ ID NO: 559262 - RNA, 22 nt, Human
gggagucugggcuagacuccuu

SEQ ID NO: 559263 - RNA, 22 nt, Human
auuacaauaauacaugcucauu

SEQ ID NO: 559264 - RNA, 22 nt, Human
cuuugcuacugugaauagugcc

SEQ ID NO: 559265 - RNA, 22 nt, Human
gccugggagagggauagugcag

SEQ ID NO: 559266 - RNA, 22 nt, Human
gagguuggagggcuggccugca

SEQ ID NO: 559267 - RNA, 22 nt, Human
caggccuccacuccacgcagac

SEQ ID NO: 559268 - RNA, 22 nt, Human
ucagcccugaggacagaggcag

SEQ ID NO: 559269 - RNA, 21 nt, Human
ucacuuauaauguauuugcug

SEQ ID NO: 559270 - RNA, 22 nt, Human
uauguuaagugggauaaucaaa

SEQ ID NO: 559271 - RNA, 22 nt, Human
guggguggaucaccugagguca

SEQ ID NO: 559272 - RNA, 22 nt, Human
agagcccugaagcagagcuaaa

SEQ ID NO: 559273 - RNA, 20 nt, Human
ggcaggcaggagguuuccag

SEQ ID NO: 559274 - RNA, 22 nt, Human
cugauuccugauucaugcucuu

SEQ ID NO: 559275 - RNA, 22 nt, Human
gugcaggagguaacauagcaaa

SEQ ID NO: 559276 - RNA, 22 nt, Human
guauacauacuucuagauuaaa

SEQ ID NO: 559277 - RNA, 22 nt, Human
caguaggagguucugagguucu

SEQ ID NO: 559278 - RNA, 22 nt, Human
agcaggcuaggaaccucacugc

SEQ ID NO: 559279 - RNA, 22 nt, Human
caguggguggcuaaguggcuga

SEQ ID NO: 559280 - RNA, 22 nt, Human
uugaaauuuuaggccuugcaau

SEQ ID NO: 559281 - RNA, 22 nt, Human
ugaagauuuucggguacuugau

SEQ ID NO: 559282 - RNA, 22 nt, Human
ugcuccauucucuagccagugc

SEQ ID NO: 559283 - RNA, 22 nt, Human
uggcgugcccuccagacuuggc

SEQ ID NO: 559284 - RNA, 22 nt, Human
agagcugugaaaaugagguuug

SEQ ID NO: 559285 - RNA, 22 nt, Human
ccuggcacaagagcagcauugg

SEQ ID NO: 559286 - RNA, 22 nt, Human
agcugggcuuggccaggucgcu

SEQ ID NO: 559287 - RNA, 22 nt, Human
ugaggcaggacuugcauaaagu

SEQ ID NO: 559288 - RNA, 22 nt, Human
augcaugauccugagcaaccca

SEQ ID NO: 559289 - RNA, 22 nt, Human
uagauggcuuucugagguauuu

SEQ ID NO: 559290 - RNA, 22 nt, Human
uguggccuggaaggggcugcuc

SEQ ID NO: 559291 - RNA, 22 nt, Human
uggaggcaguuuaagucugaga

SEQ ID NO: 559292 - RNA, 22 nt, Human
uuucugaagggcagcagacucu

SEQ ID NO: 559293 - RNA, 22 nt, Human
ggcuuugguagacacagauuga

SEQ ID NO: 559294 - RNA, 22 nt, Human
ucugggcugucuacagguuggc

SEQ ID NO: 559295 - RNA, 22 nt, Human
ccacaggggucucuguagcuga

SEQ ID NO: 559296 - RNA, 22 nt, Human
aggagcugagucagcccgacag

SEQ ID NO: 559297 - RNA, 22 nt, Human
gacccagcuuaagucacauguu

SEQ ID NO: 559298 - RNA, 22 nt, Human
cugcccugggauggucugugcg

SEQ ID NO: 559299 - RNA, 22 nt, Human
gagggggcgugcaaggcuccgc

SEQ ID NO: 559300 - RNA, 22 nt, Human
acugaaaugaaaucuaucaucu

SEQ ID NO: 559301 - RNA, 22 nt, Human
ggaggaagagguuguucucuca

SEQ ID NO: 559302 - RNA, 22 nt, Human
cacauuuaucucucuccgguga

SEQ ID NO: 559303 - RNA, 21 nt, Human
aggcagccagucaugcucccu

SEQ ID NO: 559304 - RNA, 22 nt, Human
auaaggaaaugaaacucuaaua

SEQ ID NO: 559305 - RNA, 22 nt, Human
uagcuguuuuuugugaggaaau

SEQ ID NO: 559306 - RNA, 22 nt, Human
gguuucaaaguggacaguuagu

SEQ ID NO: 559307 - RNA, 22 nt, Human
acagauuugaucugagaacaaa

SEQ ID NO: 559308 - RNA, 22 nt, Human
agcagugaguaacacagaccag

SEQ ID NO: 559309 - RNA, 21 nt, Human
cccacggaaugaugaggcacu

SEQ ID NO: 559310 - RNA, 22 nt, Human
uaacagaagaaaacauauugga

SEQ ID NO: 559311 - RNA, 22 nt, Human
gcagugauaacuuuacucuuuu

SEQ ID NO: 559312 - RNA, 22 nt, Human
auauuaaauggauuuugggagc

SEQ ID NO: 559313 - RNA, 22 nt, Human
auggagggugucagagagcgaa

SEQ ID NO: 559314 - RNA, 22 nt, Human
cagcuagaaaugggauugguau

SEQ ID NO: 559315 - RNA, 22 nt, Human
agaaguaggcagggcuguauca

SEQ ID NO: 559316 - RNA, 22 nt, Human
guggccagugggaaugggcuca

SEQ ID NO: 559317 - RNA, 22 nt, Human
uuguaugaguaugguguauagg

SEQ ID NO: 559318 - RNA, 22 nt, Human
ucacaacucuuuccauuuaaua

SEQ ID NO: 559319 - RNA, 22 nt, Human
gcagcucuuuucuuaaagagau

SEQ ID NO: 559320 - RNA, 22 nt, Human
aauagcacuuccugaacacauu

SEQ ID NO: 559321 - RNA, 22 nt, Human
agcuucuccaucugcccagaga

SEQ ID NO: 559322 - RNA, 22 nt, Human
uauuucaucuggaacaagguaa

SEQ ID NO: 559323 - RNA, 22 nt, Human
aguuucauauuaccaugucacc

SEQ ID NO: 559324 - RNA, 22 nt, Human
gacccggcuccaggcccagcag

SEQ ID NO: 559325 - RNA, 22 nt, Human
caggugaccuuuguccuaaguu

SEQ ID NO: 559326 - RNA, 22 nt, Human
aaggcucccucuucucgagugu

SEQ ID NO: 559327 - RNA, 22 nt, Human
aguggcaggcggagauguagga

SEQ ID NO: 559328 - RNA, 19 nt, Human
ggcugggucuggcagguuc

SEQ ID NO: 559329 - RNA, 19 nt, Human
ugcucaggccaaggagccc

SEQ ID NO: 559330 - RNA, 22 nt, Human
gcucugcuguguuuguucagca

SEQ ID NO: 559331 - RNA, 22 nt, Human
uuucacauacaguguauaguag

SEQ ID NO: 559332 - RNA, 22 nt, Human
ugucaguagauuauuacaauaa

SEQ ID NO: 559333 - RNA, 22 nt, Human
aggcacuguucccaguuauccu

SEQ ID NO: 559334 - RNA, 22 nt, Human
ucuggggacggggcccagcaau

SEQ ID NO: 559335 - RNA, 22 nt, Human
aaaccauggcucauuggagaug

SEQ ID NO: 559336 - RNA, 22 nt, Human
ucucagucagccuugauguccc

SEQ ID NO: 559337 - RNA, 22 nt, Human
acauuucuuccacaugcugcug

SEQ ID NO: 559338 - RNA, 22 nt, Human
uuuccuaugauauucuaugugu

SEQ ID NO: 559339 - RNA, 22 nt, Human
gacagaagaggaacuuggacag

SEQ ID NO: 559340 - RNA, 22 nt, Human
gcugcugugugggagacaggcg

SEQ ID NO: 559341 - RNA, 22 nt, Human
ugcuggggucauggggcgcccg

SEQ ID NO: 559342 - RNA, 22 nt, Human
gcauccagucuuggcuccugga

SEQ ID NO: 559343 - RNA, 22 nt, Human
gggagccaaggagagaggccuu

SEQ ID NO: 559344 - RNA, 22 nt, Human
caacuucagggaaacaugaagc

SEQ ID NO: 559345 - RNA, 22 nt, Human
ggugcccuucagacagugggca

SEQ ID NO: 559346 - RNA, 22 nt, Human
guuccugggccugcauucacca

SEQ ID NO: 559347 - RNA, 22 nt, Human
agagucugugcuuucaucagga

SEQ ID NO: 559348 - RNA, 22 nt, Human
augcuuuuccuaaaaugaugcc

SEQ ID NO: 559349 - RNA, 22 nt, Human
caagcagagacuagauagcugu

SEQ ID NO: 559350 - RNA, 22 nt, Human
agaaauacuaggaauauucaua

SEQ ID NO: 559351 - RNA, 22 nt, Human
cagccucuuuccacaucaggca

SEQ ID NO: 559352 - RNA, 22 nt, Human
cagcuugggucaggugccugcu

SEQ ID NO: 559353 - RNA, 22 nt, Human
cagcuggguuuaguggggugug

SEQ ID NO: 559354 - RNA, 22 nt, Human
ucccaaagguccgagcgggaau

SEQ ID NO: 559355 - RNA, 20 nt, Human
accaggagauggaggcaggg

SEQ ID NO: 559356 - RNA, 19 nt, Human
uccaggccauucccagagc

SEQ ID NO: 559357 - RNA, 22 nt, Human
agccuggagaggcgccauacac

SEQ ID NO: 559358 - RNA, 22 nt, Human
ugagagucuguuccucuugcag

SEQ ID NO: 559359 - RNA, 22 nt, Human
gucuaaacuuagggaucgaaca

SEQ ID NO: 559360 - RNA, 22 nt, Human
acagaaagaccuuguaacacuu

SEQ ID NO: 559361 - RNA, 22 nt, Human
ggacuggacucucaggcucaca

SEQ ID NO: 559362 - RNA, 22 nt, Human
agggcagagacaugcuuccuga

SEQ ID NO: 559363 - RNA, 22 nt, Human
aaaggcaauuucuucuuccuga

SEQ ID NO: 559364 - RNA, 22 nt, Human
uucacaaaaugguuuguugaug

SEQ ID NO: 559365 - RNA, 20 nt, Human
aagagcauaguacaggaaga

SEQ ID NO: 559366 - RNA, 22 nt, Human
gggcacugugcuaggugcugag

SEQ ID NO: 559367 - RNA, 22 nt, Human
aaucuggcauguaagcuuagag

SEQ ID NO: 559368 - RNA, 22 nt, Human
uagaaagaacuucauguaaaac

SEQ ID NO: 559369 - RNA, 22 nt, Human
aggugggguguuggauguuuau

SEQ ID NO: 559370 - RNA, 22 nt, Human
ucauuucaguucagaggccuuu

SEQ ID NO: 559371 - RNA, 22 nt, Human
cugcucuggcuguguacuucag

SEQ ID NO: 559372 - RNA, 22 nt, Human
cugucagaggcucucuguugcc

SEQ ID NO: 559373 - RNA, 22 nt, Human
aggaagaaaacuaauuagaugg

SEQ ID NO: 559374 - RNA, 22 nt, Human
uuacagcacagugcuuuuacug

SEQ ID NO: 559375 - RNA, 22 nt, Human
aucuccaggauuuucacacuca

SEQ ID NO: 559376 - RNA, 19 nt, Human
cucugccucccuccugggu

SEQ ID NO: 559377 - RNA, 22 nt, Human
uuuauugucuaugaacugcuug

SEQ ID NO: 559378 - RNA, 22 nt, Human
ugacacaguaucaaacaugauu

SEQ ID NO: 559379 - RNA, 18 nt, Human
ccucugccauagccagca

SEQ ID NO: 559380 - RNA, 22 nt, Human
acacauuuacauguuuacguau

SEQ ID NO: 559381 - RNA, 22 nt, Human
gaagcagcucagauugacugaa

SEQ ID NO: 559382 - RNA, 22 nt, Human
cacauuuacauauaaaacuuuc

SEQ ID NO: 559383 - RNA, 22 nt, Human
ggccucucuccuuggcuugcag

SEQ ID NO: 559384 - RNA, 22 nt, Human
cccugggcaagcccuauuuucc

SEQ ID NO: 559385 - RNA, 20 nt, Human
auauuucuuaagaacuuuca

SEQ ID NO: 559386 - RNA, 22 nt, Human
acuggagcugagagcaugggua

SEQ ID NO: 559387 - RNA, 22 nt, Human
caggagugaaaugaggcccagg

SEQ ID NO: 559388 - RNA, 22 nt, Human
accaaugugaugauauuaggag

SEQ ID NO: 559389 - RNA, 22 nt, Human
ucacacagauugguagagcuga

SEQ ID NO: 559390 - RNA, 22 nt, Human
uguuauuugggaaaguuguaca

SEQ ID NO: 559391 - RNA, 22 nt, Human
agcagugggggaguguuaguuu

SEQ ID NO: 559392 - RNA, 22 nt, Human
gauguuucugggaaggaaaagu

SEQ ID NO: 559393 - RNA, 19 nt, Human
ucagaacucagaaugugua

SEQ ID NO: 559394 - RNA, 22 nt, Human
aaacuucaaggauuugcaaauc

SEQ ID NO: 559395 - RNA, 22 nt, Human
cuaaaugccuuuccuaccuaac

SEQ ID NO: 559396 - RNA, 22 nt, Human
acauagcaagugcucaauaaau

SEQ ID NO: 559397 - RNA, 22 nt, Human
acauuuuaauaugcuuagugug

SEQ ID NO: 559398 - RNA, 22 nt, Human
auggcagauggcuggagcaggu

SEQ ID NO: 559399 - RNA, 22 nt, Human
ggcucuugggagcucagaguug

SEQ ID NO: 559400 - RNA, 22 nt, Human
gccaagcuguuuuucagagacg

SEQ ID NO: 559401 - RNA, 22 nt, Human
caucaguguuggcuucucagag

SEQ ID NO: 559402 - RNA, 22 nt, Human
aaauggcaacagaagggaguuc

SEQ ID NO: 559403 - RNA, 19 nt, Human
gucacauuugucucccagg

SEQ ID NO: 559404 - RNA, 22 nt, Human
acacucuugcauuaccugaaua

SEQ ID NO: 559405 - RNA, 20 nt, Human
uccugguggauacugcuuaa

SEQ ID NO: 559406 - RNA, 22 nt, Human
aguacuuugcacuuugcucaga

SEQ ID NO: 559407 - RNA, 22 nt, Human
agucucugagguucagaugccu

SEQ ID NO: 559408 - RNA, 20 nt, Human
uacuugaauguugcagcagu

SEQ ID NO: 559409 - RNA, 22 nt, Human
uauuuccauguuagaacuaagu

SEQ ID NO: 559410 - RNA, 22 nt, Human
agauacaaaagauaagauuuag

SEQ ID NO: 559411 - RNA, 22 nt, Human
acuggaagccaguugacaauca

SEQ ID NO: 559412 - RNA, 22 nt, Human
ggcaguggcuccucucuacucc

SEQ ID NO: 559413 - RNA, 22 nt, Human
uccaucaccauuucugcgagcu

SEQ ID NO: 559414 - RNA, 22 nt, Human
ggcacagcacuguaggccuggg

SEQ ID NO: 559415 - RNA, 22 nt, Human
uccaggcaaaaaccaacuacag

SEQ ID NO: 559416 - RNA, 22 nt, Human
ucucagaguuuagagcugagcc

SEQ ID NO: 559417 - RNA, 23 nt, Human
gagcugggauacaggcuuacugc

SEQ ID NO: 559418 - RNA, 22 nt, Human
aaugaugguuucaucacuugaa

SEQ ID NO: 559419 - RNA, 22 nt, Human
aaaccuguuaauagagcgaugc

SEQ ID NO: 559420 - RNA, 23 nt, Human
ucuguuuugcaacaugugacaag

SEQ ID NO: 559421 - RNA, 22 nt, Human
gagcuccaccaccuucaggcag

SEQ ID NO: 559422 - RNA, 22 nt, Human
gcagaaguuaaucgaaggccau

SEQ ID NO: 559423 - RNA, 22 nt, Human
uuguuuuaaccuaguguuuaug

SEQ ID NO: 559424 - RNA, 22 nt, Human
ggcagguggaaguuggcagagc

SEQ ID NO: 559425 - RNA, 22 nt, Human
aggccuuaccauagcuguagca

SEQ ID NO: 559426 - RNA, 22 nt, Human
uuacaaaguucugaguucaaac

SEQ ID NO: 559427 - RNA, 22 nt, Human
gaggagggagcuggaagcucuu

SEQ ID NO: 559428 - RNA, 22 nt, Human
aucuuguuaaaaugcagaaacu

SEQ ID NO: 559429 - RNA, 22 nt, Human
uucuggggccaauugccacugc

SEQ ID NO: 559430 - RNA, 20 nt, Human
ucccaggcugggcuccagcu

SEQ ID NO: 559431 - RNA, 22 nt, Human
uuuaauuugaaaugaguaaccc

SEQ ID NO: 559432 - RNA, 22 nt, Human
ucuccgaucacagguuuucaau

SEQ ID NO: 559433 - RNA, 22 nt, Human
cucagaaguucagccuagagua

SEQ ID NO: 559434 - RNA, 22 nt, Human
cugcugagagccccagcugaga

SEQ ID NO: 559435 - RNA, 17 nt, Human
cucagagcaggacagaa

SEQ ID NO: 559436 - RNA, 22 nt, Human
agggccugggccagcacccuuu

SEQ ID NO: 559437 - RNA, 22 nt, Human
uaaaauuugucccugaguguug

SEQ ID NO: 559438 - RNA, 22 nt, Human
gcuuuucuccuuagugucccug

SEQ ID NO: 559439 - RNA, 16 nt, Human
ccuuucucugccuucc

SEQ ID NO: 559440 - RNA, 22 nt, Human
acauuaaaaaauguugcaugaa

SEQ ID NO: 559441 - RNA, 22 nt, Human
ucacagggcauuauggcuccag

SEQ ID NO: 559442 - RNA, 22 nt, Human
uagcuagaaagugaagaucaca

SEQ ID NO: 559443 - RNA, 22 nt, Human
cagcaggucccacugagggccc

SEQ ID NO: 559444 - RNA, 22 nt, Human
cauggccugccuccuccuggug

SEQ ID NO: 559445 - RNA, 22 nt, Human
ugccugugcccuucuuggcauu

SEQ ID NO: 559446 - RNA, 22 nt, Human
gccauuuucugucuuguuuauu

SEQ ID NO: 559447 - RNA, 22 nt, Human
cugaagauagugucugaucaug

SEQ ID NO: 559448 - RNA, 22 nt, Human
ucagagugcagggaguagcagc

SEQ ID NO: 559449 - RNA, 22 nt, Human
ucagggcacauucugcaguggc

SEQ ID NO: 559450 - RNA, 22 nt, Human
agcugggcaaaaugugagguug

SEQ ID NO: 559451 - RNA, 22 nt, Human
uuugggaaacuuaggggucaga

SEQ ID NO: 559452 - RNA, 22 nt, Human
aggcagguuucccggcugucaa

SEQ ID NO: 559453 - RNA, 22 nt, Human
cuguacaucucugaggacagua

SEQ ID NO: 559454 - RNA, 22 nt, Human
cccugcagaucuaggguccuuc

SEQ ID NO: 559455 - RNA, 22 nt, Human
ucauacaauucaaucucugauu

SEQ ID NO: 559456 - RNA, 17 nt, Human
ggcaccagacggagagu

SEQ ID NO: 559457 - RNA, 22 nt, Human
ggcacagccacuuuggagaacu

SEQ ID NO: 559458 - RNA, 22 nt, Human
ugaaugaauccuaacaaagaca

SEQ ID NO: 559459 - RNA, 22 nt, Human
gcuucccacagcuggacugggg

SEQ ID NO: 559460 - RNA, 22 nt, Human
ucagaggucacacagcaaguuu

SEQ ID NO: 559461 - RNA, 22 nt, Human
uauguauaugguagaaguaugu

SEQ ID NO: 559462 - RNA, 22 nt, Human
ccucacugcuauguguuugcuc

SEQ ID NO: 559463 - RNA, 18 nt, Human
ggccucagccuggccgga

SEQ ID NO: 559464 - RNA, 22 nt, Human
agugacaaggugguaaugaagc

SEQ ID NO: 559465 - RNA, 22 nt, Human
agagcuuagaauuucagaugau

SEQ ID NO: 559466 - RNA, 22 nt, Human
uauuugcaacauaaaacucuga

SEQ ID NO: 559467 - RNA, 21 nt, Human
ucugagagcaacugcccuuua

SEQ ID NO: 559468 - RNA, 22 nt, Human
cauuuuaaaugauuuaagccaa

SEQ ID NO: 559469 - RNA, 22 nt, Human
uaguggaguagaaaccaaagaa

SEQ ID NO: 559470 - RNA, 22 nt, Human
ggugacugguuuaucuggcagu

SEQ ID NO: 559471 - RNA, 21 nt, Human
aaauccaaacacuaguccaca

SEQ ID NO: 559472 - RNA, 22 nt, Human
uuccauaaugagauucccagcc

SEQ ID NO: 559473 - RNA, 20 nt, Human
uaaauuagccuugaagauua

SEQ ID NO: 559474 - RNA, 22 nt, Human
aacauguaucgcuuuuuaauau

SEQ ID NO: 559475 - RNA, 22 nt, Human
cucagaguccauaguuuacagu

SEQ ID NO: 559476 - RNA, 22 nt, Human
uaauuauuugaagacauuagag

SEQ ID NO: 559477 - RNA, 22 nt, Human
agucaucaucugcccucacugg

SEQ ID NO: 559478 - RNA, 23 nt, Human
auaauaacgucugucuugucucu

SEQ ID NO: 559479 - RNA, 22 nt, Human
ggcaggugcgcauguugcauua

SEQ ID NO: 559480 - RNA, 22 nt, Human
uuagauaaauugcaacuugauu

SEQ ID NO: 559481 - RNA, 22 nt, Human
cuggaagggucuacuuagcaga

SEQ ID NO: 559482 - RNA, 22 nt, Human
accaagcucucuucccggcucu

SEQ ID NO: 559483 - RNA, 22 nt, Human
uacaguaucuucuggcaagcau

SEQ ID NO: 559484 - RNA, 22 nt, Human
ugcuucugacauguucuugguu

SEQ ID NO: 559485 - RNA, 22 nt, Human
uuaaagcugagcccucagaagc

SEQ ID NO: 559486 - RNA, 22 nt, Human
ccucucauagucuguauccuuu

SEQ ID NO: 559487 - RNA, 22 nt, Human
ugggccucugccacgcuccccc

SEQ ID NO: 559488 - RNA, 22 nt, Human
ucccagcagggccgaccagccu

SEQ ID NO: 559489 - RNA, 22 nt, Human
uaggaagcugagcagcauuccu

SEQ ID NO: 559490 - RNA, 22 nt, Human
cugcccagaaucacucacucga

SEQ ID NO: 559491 - RNA, 22 nt, Human
agcuuuauagaaaggaucagug

SEQ ID NO: 559492 - RNA, 22 nt, Human
cugggcucagcccaugcugucc

SEQ ID NO: 559493 - RNA, 22 nt, Human
ucccuggaacagagagacaacg

SEQ ID NO: 559494 - RNA, 22 nt, Human
uuucacagugcucuguaaguau

SEQ ID NO: 559495 - RNA, 22 nt, Human
gcagagcugucuaagucacuuc

SEQ ID NO: 559496 - RNA, 22 nt, Human
gcccagcaggacagagugguuu

SEQ ID NO: 559497 - RNA, 22 nt, Human
aaauguauugcauaggauauuu

SEQ ID NO: 559498 - RNA, 22 nt, Human
gcugcccauuccacuggauggu

SEQ ID NO: 559499 - RNA, 22 nt, Human
uuuuugucaucuauuucuggug

SEQ ID NO: 559500 - RNA, 22 nt, Human
cugauuuucaaaauguguuaaa

SEQ ID NO: 559501 - RNA, 22 nt, Human
uccagacccaugacccugggga

SEQ ID NO: 559502 - RNA, 22 nt, Human
ugcccugugugugcaagcacug

SEQ ID NO: 559503 - RNA, 22 nt, Human
auucaaauuaaguuaauucagc

SEQ ID NO: 559504 - RNA, 22 nt, Human
ugguccugagcaccagccugac

SEQ ID NO: 559505 - RNA, 22 nt, Human
gaggcugggaaguccaagacca

SEQ ID NO: 559506 - RNA, 19 nt, Human
ggccugugcagagcccguc

SEQ ID NO: 559507 - RNA, 22 nt, Human
gcccaugguggcguucggugca

SEQ ID NO: 559508 - RNA, 22 nt, Human
ccaggcaggcgauggugcagug

SEQ ID NO: 559509 - RNA, 22 nt, Human
cagagcugcucaugguggccag

SEQ ID NO: 559510 - RNA, 22 nt, Human
guuucaaaagucaggcuauucu

SEQ ID NO: 559511 - RNA, 21 nt, Human
agagaagggacucuuccaguc

SEQ ID NO: 559512 - RNA, 22 nt, Human
gaaaucugaaucuucuguuggu

SEQ ID NO: 559513 - RNA, 22 nt, Human
uggguacuccuauuaguucagu

SEQ ID NO: 559514 - RNA, 22 nt, Human
gcuguucaagacuaggaaauuu

SEQ ID NO: 559515 - RNA, 22 nt, Human
acugaaggucucagcaaggaug

SEQ ID NO: 559516 - RNA, 22 nt, Human
aguuuguaugccaacagcaaag

SEQ ID NO: 559517 - RNA, 22 nt, Human
uggggggauacuugcuacuggc

SEQ ID NO: 559518 - RNA, 22 nt, Human
cucucagacugaagggccugug

SEQ ID NO: 559519 - RNA, 22 nt, Human
uugugcagaguugccuuuauuu

SEQ ID NO: 559520 - RNA, 22 nt, Human
gaguggcuuuggagaaguaggg

SEQ ID NO: 559521 - RNA, 22 nt, Human
gacccaggguggucaccugaaa

SEQ ID NO: 559522 - RNA, 22 nt, Human
gacuucucccaaccaucagagg

SEQ ID NO: 559523 - RNA, 22 nt, Human
ggcagguguggaguguuauuuu

SEQ ID NO: 559524 - RNA, 22 nt, Human
aaaacugaaccuugagaucuuu

SEQ ID NO: 559525 - RNA, 22 nt, Human
uguuucaugauugcugucauuu

SEQ ID NO: 559526 - RNA, 22 nt, Human
uaaauucagugaguaauuucug

SEQ ID NO: 559527 - RNA, 22 nt, Human
ccuguucaagggaugauugacc

SEQ ID NO: 559528 - RNA, 17 nt, Human
ugcugccaagucccaac

SEQ ID NO: 559529 - RNA, 22 nt, Human
auuugaaaaccugagccucccg

SEQ ID NO: 559530 - RNA, 22 nt, Human
cagcuguuucaguagcguuacu

SEQ ID NO: 559531 - RNA, 22 nt, Human
gagagcugcaagguagggcggg

SEQ ID NO: 559532 - RNA, 22 nt, Human
guucauuuuuacuuugaucuac

SEQ ID NO: 559533 - RNA, 22 nt, Human
caguucuggaggcuccacaucu

SEQ ID NO: 559534 - RNA, 22 nt, Human
cacuggaauggauagagcagag

SEQ ID NO: 559535 - RNA, 22 nt, Human
acaggugggcuuaagagucggc

SEQ ID NO: 559536 - RNA, 22 nt, Human
aggagccuccuucucaugugca

SEQ ID NO: 559537 - RNA, 22 nt, Human
uucacaggcuuggagguggggg

SEQ ID NO: 559538 - RNA, 21 nt, Human
cgacaggagaggcagccagcc

SEQ ID NO: 559539 - RNA, 22 nt, Human
uccuucaguuaucacaguacug

SEQ ID NO: 559540 - RNA, 22 nt, Human
ucugaaaugcaaauuugacuga

SEQ ID NO: 559541 - RNA, 22 nt, Human
ugggcaaguaucggacucugag

SEQ ID NO: 559542 - RNA, 22 nt, Human
cuugggagacacaagaagacau

SEQ ID NO: 559543 - RNA, 22 nt, Human
agggcagauggaacuuccccga

SEQ ID NO: 559544 - RNA, 22 nt, Human
gccaggcagagccccgugcagc

SEQ ID NO: 559545 - RNA, 22 nt, Human
caacugcuuggaggaauacugc

SEQ ID NO: 559546 - RNA, 22 nt, Human
acagggcaccugagguaggaag

SEQ ID NO: 559547 - RNA, 22 nt, Human
uuaucacuuaugagcuuuuugc

SEQ ID NO: 559548 - RNA, 22 nt, Human
uuugaaaggguuaugagacuga

SEQ ID NO: 559549 - RNA, 22 nt, Human
uuaauaaguaguaguuauuguu

SEQ ID NO: 559550 - RNA, 23 nt, Human
ccugggcauuggcugcagcuucu

SEQ ID NO: 559551 - RNA, 22 nt, Human
cugggaggauucauugagguga

SEQ ID NO: 559552 - RNA, 22 nt, Human
ggcaaaaaccgcaauaacuucu

SEQ ID NO: 559553 - RNA, 22 nt, Human
ucccacaugugaauccucaggu

SEQ ID NO: 559554 - RNA, 22 nt, Human
uggcaggcgggagccauagagg

SEQ ID NO: 559555 - RNA, 22 nt, Human
accuccuggcugcucauggaac

SEQ ID NO: 559556 - RNA, 22 nt, Human
ugggcuccggcggccucaggcu

SEQ ID NO: 559557 - RNA, 22 nt, Human
uagaaacagagcagguggccca

SEQ ID NO: 559558 - RNA, 22 nt, Human
augguuauuucauggaaaaauu

SEQ ID NO: 559559 - RNA, 22 nt, Human
accuuucaaaguggcuaucacu

SEQ ID NO: 559560 - RNA, 19 nt, Human
aaaagucuauucaauuaca

SEQ ID NO: 559561 - RNA, 22 nt, Human
gccgaagcugccgucugguccu

SEQ ID NO: 559562 - RNA, 22 nt, Human
ugcagagguuuccaggcaaguu

SEQ ID NO: 559563 - RNA, 18 nt, Human
agaaggagcuaugggcag

SEQ ID NO: 559564 - RNA, 22 nt, Human
cggcccugcugagcuugucugg

SEQ ID NO: 559565 - RNA, 23 nt, Human
cuggcucuguagguggcauccuu

SEQ ID NO: 559566 - RNA, 22 nt, Human
aacuccagcaggaaggugagaa

SEQ ID NO: 559567 - RNA, 22 nt, Human
uacauacaguggaugcuuuagg

SEQ ID NO: 559568 - RNA, 22 nt, Human
augggaggaaggaggcccuuga

SEQ ID NO: 559569 - RNA, 22 nt, Human
ucauucagguugggcaaguguc

SEQ ID NO: 559570 - RNA, 17 nt, Human
gcugagaggcagcacag

SEQ ID NO: 559571 - RNA, 22 nt, Human
agauuuaaauuugcuacaauuc

SEQ ID NO: 559572 - RNA, 22 nt, Human
aaaauaguuaacguucagagua

SEQ ID NO: 559573 - RNA, 22 nt, Human
gguggcagagaggagguaguuu

SEQ ID NO: 559574 - RNA, 22 nt, Human
ggcagggucuggacugaaagcu

SEQ ID NO: 559575 - RNA, 22 nt, Human
ugcagggaugcuagagguaaga

SEQ ID NO: 559576 - RNA, 22 nt, Human
auuacagaaagcaauauugagu

SEQ ID NO: 559577 - RNA, 22 nt, Human
uggagcaagcuggagagaacau

SEQ ID NO: 559578 - RNA, 22 nt, Human
aagacuuucugggguguaaagg

SEQ ID NO: 559579 - RNA, 22 nt, Human
uccugggguuuuggccgcagcu

SEQ ID NO: 559580 - RNA, 23 nt, Human
ucccuggaggcagguccagggcc

SEQ ID NO: 559581 - RNA, 22 nt, Human
uggcucagcuuuccccaucugg

SEQ ID NO: 559582 - RNA, 22 nt, Human
gggcugggauggcuugaagauu

SEQ ID NO: 559583 - RNA, 22 nt, Human
ggaugcugucuaagcugaggac

SEQ ID NO: 559584 - RNA, 22 nt, Human
caggcacuguguuaggcacugu

SEQ ID NO: 559585 - RNA, 22 nt, Human
aauuaaaggucauguuaaaggg

SEQ ID NO: 559586 - RNA, 22 nt, Human
uucuacauauauuuuucucacu

SEQ ID NO: 559587 - RNA, 22 nt, Human
ggcagguggacgugcuaaagcu

SEQ ID NO: 559588 - RNA, 22 nt, Human
uggggcaguuaauaaacauucu

SEQ ID NO: 559589 - RNA, 22 nt, Human
cuguggcuaggaagcuguggga

SEQ ID NO: 559590 - RNA, 22 nt, Human
cuuauacauaaaauggguguag

SEQ ID NO: 559591 - RNA, 22 nt, Human
uugacacagaucaauauucaac

SEQ ID NO: 559592 - RNA, 22 nt, Human
cuggcagguggagguugcagug

SEQ ID NO: 559593 - RNA, 22 nt, Human
agcaggugucacuuucacucca

SEQ ID NO: 559594 - RNA, 22 nt, Human
uucuuguauauaaaaaucauuu

SEQ ID NO: 559595 - RNA, 22 nt, Human
aucaguuuuguucacuacuaua

SEQ ID NO: 559596 - RNA, 22 nt, Human
ucccucuguguugggcaugccu

SEQ ID NO: 559597 - RNA, 22 nt, Human
auuuuuccaugauacuuaucug

SEQ ID NO: 559598 - RNA, 22 nt, Human
ucuacaaagccauucaggaucu

SEQ ID NO: 559599 - RNA, 22 nt, Human
uuugugaacuuaggcaauuagg

SEQ ID NO: 559600 - RNA, 22 nt, Human
acagaaaaguuuacuuuugcuc

SEQ ID NO: 559601 - RNA, 22 nt, Human
uucagaaggauuuuaacacaug

SEQ ID NO: 559602 - RNA, 22 nt, Human
acugaaagauaaaucaguuagc

SEQ ID NO: 559603 - RNA, 22 nt, Human
ucacagaaagcuguguccugac

SEQ ID NO: 559604 - RNA, 22 nt, Human
aauagauacuacuuagauguag

SEQ ID NO: 559605 - RNA, 22 nt, Human
uacaaaguagaaauucaguaaa

SEQ ID NO: 559606 - RNA, 22 nt, Human
cugcugcugcuaucuacccagg

SEQ ID NO: 559607 - RNA, 22 nt, Human
uuugaaucugauauggcagcau

SEQ ID NO: 559608 - RNA, 23 nt, Human
cugcauguccacugguguaaaug

SEQ ID NO: 559609 - RNA, 22 nt, Human
aaaagguaguugccaaauaagg

SEQ ID NO: 559610 - RNA, 22 nt, Human
acaaauguuggauuugucuucc

SEQ ID NO: 559611 - RNA, 22 nt, Human
cugccuguuuccucuugcuccc

SEQ ID NO: 559612 - RNA, 22 nt, Human
uuuauuagauuaucaaagaggu

SEQ ID NO: 559613 - RNA, 22 nt, Human
gaggccugguuugcaugagaau

SEQ ID NO: 559614 - RNA, 22 nt, Human
ggugaaggucuacugugugcca

SEQ ID NO: 559615 - RNA, 22 nt, Human
auauuuuggggugaugugcauc

SEQ ID NO: 559616 - RNA, 22 nt, Human
uaguuauuauuguuacuaucag

SEQ ID NO: 559617 - RNA, 22 nt, Human
cauucugagcuaauaugcuuau

SEQ ID NO: 559618 - RNA, 21 nt, Human
ggccucugucauccugggaag

SEQ ID NO: 559619 - RNA, 22 nt, Human
uuucaguguaucuuccaaaagc

SEQ ID NO: 559620 - RNA, 22 nt, Human
uggaggaugccuggggaggccu

SEQ ID NO: 559621 - RNA, 22 nt, Human
uuucagaaagcaucaucaaagu

SEQ ID NO: 559622 - RNA, 22 nt, Human
acacaucuuagacugaaauaug

SEQ ID NO: 559623 - RNA, 22 nt, Human
ugaugcugucaaggaggugaac

SEQ ID NO: 559624 - RNA, 22 nt, Human
gucagcacuuuuccgaggcaga

SEQ ID NO: 559625 - RNA, 22 nt, Human
uuuacagaugaggaaacugaga

SEQ ID NO: 559626 - RNA, 22 nt, Human
ugaggcucaagaaucugcauuu

SEQ ID NO: 559627 - RNA, 22 nt, Human
auauuuugaaguuaauaaugug

SEQ ID NO: 559628 - RNA, 22 nt, Human
gagcugggaggacugggaacuu

SEQ ID NO: 559629 - RNA, 22 nt, Human
ggaggcugagaaguccaagauc

SEQ ID NO: 559630 - RNA, 22 nt, Human
cagcucccuauggugaggcgac

SEQ ID NO: 559631 - RNA, 22 nt, Human
gaaugaauucagcacauggaau

SEQ ID NO: 559632 - RNA, 17 nt, Human
cacaacuggcugauuga

SEQ ID NO: 559633 - RNA, 22 nt, Human
cucuguccuccaccugcuuuca

SEQ ID NO: 559634 - RNA, 22 nt, Human
uaaaggauaacuuucaagaauu

SEQ ID NO: 559635 - RNA, 22 nt, Human
uggcucagaguucaucuuuuag

SEQ ID NO: 559636 - RNA, 22 nt, Human
cuucacaguauaggucccugag

SEQ ID NO: 559637 - RNA, 22 nt, Human
gugcaauccaguugauuuuuac

SEQ ID NO: 559638 - RNA, 22 nt, Human
gugacagaguuuuagaucucau

SEQ ID NO: 559639 - RNA, 22 nt, Human
uguggggccucgugcuagcugg

SEQ ID NO: 559640 - RNA, 22 nt, Human
agcuccuguggcugaaagagga

SEQ ID NO: 559641 - RNA, 22 nt, Human
cuguucucuggcgguggcuguu

SEQ ID NO: 559642 - RNA, 22 nt, Human
cuuccucuagccuaguaaugcc

SEQ ID NO: 559643 - RNA, 22 nt, Human
aaacuucagggaauaaaagagu

SEQ ID NO: 559644 - RNA, 18 nt, Human
acauuucucucugcguga

SEQ ID NO: 559645 - RNA, 22 nt, Human
augaggcaucugcagucacuag

SEQ ID NO: 559646 - RNA, 22 nt, Human
cugcuuccaugcaauggcaguc

SEQ ID NO: 559647 - RNA, 22 nt, Human
aaucagaaccuugggucauaac

SEQ ID NO: 559648 - RNA, 22 nt, Human
uuagaaaaaacgucuucuagug

SEQ ID NO: 559649 - RNA, 22 nt, Human
ggcacagcccucucuguggaca

SEQ ID NO: 559650 - RNA, 22 nt, Human
ucuggaguguccaguucuacuc

SEQ ID NO: 559651 - RNA, 22 nt, Human
uguggccuugcagccuggaggu

SEQ ID NO: 559652 - RNA, 22 nt, Human
ggaaaucagggguguugcuuuc

SEQ ID NO: 559653 - RNA, 22 nt, Human
ccagccacagcuuccagcuccu

SEQ ID NO: 559654 - RNA, 22 nt, Human
gagggagugccagagggccagc

SEQ ID NO: 559655 - RNA, 22 nt, Human
ugggcucacuggggcagggacc

SEQ ID NO: 559656 - RNA, 22 nt, Human
caugaacauuuguuuacaucug

SEQ ID NO: 559657 - RNA, 17 nt, Human
ucagagggaugagcagg

SEQ ID NO: 559658 - RNA, 22 nt, Human
uuuaccuuuugcuaugguggaa

SEQ ID NO: 559659 - RNA, 22 nt, Human
ggcuuccuggagaaggucugag

SEQ ID NO: 559660 - RNA, 22 nt, Human
cagcacaguacaaggcacggau

SEQ ID NO: 559661 - RNA, 18 nt, Human
gggcuguguucaugccca

SEQ ID NO: 559662 - RNA, 22 nt, Human
cagcucccagaacugaccaugu

SEQ ID NO: 559663 - RNA, 22 nt, Human
ugaaaucaacuaggagacacca

SEQ ID NO: 559664 - RNA, 22 nt, Human
cuucaguguugccagggccuag

SEQ ID NO: 559665 - RNA, 22 nt, Human
cauaaaauggcuuguucuuuaa

SEQ ID NO: 559666 - RNA, 20 nt, Human
agguggcuccugcugggggu

SEQ ID NO: 559667 - RNA, 22 nt, Human
ugcccugcuaaccuugguucca

SEQ ID NO: 559668 - RNA, 22 nt, Human
gagcugcugguugcuggugccu

SEQ ID NO: 559669 - RNA, 23 nt, Human
acaaaugcccauacaucuaguuc

SEQ ID NO: 559670 - RNA, 20 nt, Human
uuuuuccuucucuacaggca

SEQ ID NO: 559671 - RNA, 22 nt, Human
uggcagggccugaaucuuauac

SEQ ID NO: 559672 - RNA, 22 nt, Human
cuggcagcauggagccugugcu

SEQ ID NO: 559673 - RNA, 22 nt, Human
agauguaaacucucaugucauu

SEQ ID NO: 559674 - RNA, 22 nt, Human
agccuggaggccaggagacagu

SEQ ID NO: 559675 - RNA, 22 nt, Human
aagggcuccacuugaaucacac

SEQ ID NO: 559676 - RNA, 22 nt, Human
cugcucuccccaggccagucug

SEQ ID NO: 559677 - RNA, 22 nt, Human
uuccaagugaaaguagcuuugu

SEQ ID NO: 559678 - RNA, 22 nt, Human
ucacugcucuccaauguggagu

SEQ ID NO: 559679 - RNA, 22 nt, Human
uuguaacagcuguuuauauagu

SEQ ID NO: 559680 - RNA, 17 nt, Human
gcagugaaaagagauca

SEQ ID NO: 559681 - RNA, 22 nt, Human
agaauuacauaaauacaugaau

SEQ ID NO: 559682 - RNA, 19 nt, Human
uuaacagucaccaaggaga

SEQ ID NO: 559683 - RNA, 22 nt, Human
caaagcaguuuuaaucaaguag

SEQ ID NO: 559684 - RNA, 22 nt, Human
aagcaaguagguauuugacaaa

SEQ ID NO: 559685 - RNA, 22 nt, Human
aacaaacauuaccuggugcugg

SEQ ID NO: 559686 - RNA, 22 nt, Human
ucugccagugguuuggcccuga

SEQ ID NO: 559687 - RNA, 22 nt, Human
agcagcucaacagugucucuau

SEQ ID NO: 559688 - RNA, 22 nt, Human
gcagcugggacacugaggccag

SEQ ID NO: 559689 - RNA, 22 nt, Human
ccagcgcuucccaucagggagg

SEQ ID NO: 559690 - RNA, 19 nt, Human
ccugccugaccccggcuac

SEQ ID NO: 559691 - RNA, 22 nt, Human
gcugcuggcuuccugcuguuuu

SEQ ID NO: 559692 - RNA, 22 nt, Human
cacuguaucuuuuccaaagucu

SEQ ID NO: 559693 - RNA, 22 nt, Human
ccagucagggcaggagccuggu

SEQ ID NO: 559694 - RNA, 22 nt, Human
uuguuuuggaagaacuuacucu

SEQ ID NO: 559695 - RNA, 22 nt, Human
ugggcagaaggaagagccaccu

SEQ ID NO: 559696 - RNA, 22 nt, Human
auuuaugacuggugaauagaac

SEQ ID NO: 559697 - RNA, 22 nt, Human
aggaaagguagcgugccagcag

SEQ ID NO: 559698 - RNA, 22 nt, Human
gggcagcaguugcccuaaucaa

SEQ ID NO: 559699 - RNA, 22 nt, Human
uggagcuggaagaauguagacg

SEQ ID NO: 559700 - RNA, 23 nt, Human
cuggccuccgacacuggccaaga

SEQ ID NO: 559701 - RNA, 22 nt, Human
acagcaguuuagaggacagcca

SEQ ID NO: 559702 - RNA, 22 nt, Human
agaguccacccuggggucaggc

SEQ ID NO: 559703 - RNA, 22 nt, Human
ugaaagacaagguuuuuucaga

SEQ ID NO: 559704 - RNA, 22 nt, Human
gagggcagagucuaaugaugca

SEQ ID NO: 559705 - RNA, 22 nt, Human
cagcagagcauuugguaggagg

SEQ ID NO: 559706 - RNA, 22 nt, Human
gcacccaggccggcgacugcag

SEQ ID NO: 559707 - RNA, 22 nt, Human
ccagggcaugggaagaacugaa

SEQ ID NO: 559708 - RNA, 22 nt, Human
ucagauggaaagguuacugucc

SEQ ID NO: 559709 - RNA, 22 nt, Human
gcaggaugggagcuucacuuug

SEQ ID NO: 559710 - RNA, 22 nt, Human
cugagaauuacucugaugagua

SEQ ID NO: 559711 - RNA, 22 nt, Human
uucaggcccagcacagcgcgug

SEQ ID NO: 559712 - RNA, 22 nt, Human
agcagaagaaagccacaugacu

SEQ ID NO: 559713 - RNA, 22 nt, Human
cagagagggcggcccuggcuuc

SEQ ID NO: 559714 - RNA, 22 nt, Human
caguguacuuggaauguaacag

SEQ ID NO: 559715 - RNA, 17 nt, Human
ggcuggagcagcucccc

SEQ ID NO: 559716 - RNA, 22 nt, Human
uggcccagugcuuaugcucuga

SEQ ID NO: 559717 - RNA, 22 nt, Human
uuucuccuugugucuccuuuga

SEQ ID NO: 559718 - RNA, 22 nt, Human
ucuaugaaaagucuauucauuc

SEQ ID NO: 559719 - RNA, 22 nt, Human
cauuuauuggcauguaguaggu

SEQ ID NO: 559720 - RNA, 22 nt, Human
ucagcaauaugauaggcuuugu

SEQ ID NO: 559721 - RNA, 22 nt, Human
agugcaaagggcuguugagaag

SEQ ID NO: 559722 - RNA, 23 nt, Human
cuggaacauaguagauggucaga

SEQ ID NO: 559723 - RNA, 23 nt, Human
gggaccugguaggaggugauugg

SEQ ID NO: 559724 - RNA, 19 nt, Human
uggcugggugccaauggcc

SEQ ID NO: 559725 - RNA, 22 nt, Human
uucuaaagugcaaucugacaga

SEQ ID NO: 559726 - RNA, 23 nt, Human
ugaaauauucuuuugcaugagcu

SEQ ID NO: 559727 - RNA, 23 nt, Human
uccaaacucaagacauuaauaag

SEQ ID NO: 559728 - RNA, 22 nt, Human
uuucccuuguuccuuccucuga

SEQ ID NO: 559729 - RNA, 19 nt, Human
gagugauggaucuccuugc

SEQ ID NO: 559730 - RNA, 22 nt, Human
uuucagaaagcugaacauauga

SEQ ID NO: 559731 - RNA, 22 nt, Human
ggcccugcugaagccgggucua

SEQ ID NO: 559732 - RNA, 19 nt, Human
cacagggcaggucucaugu

SEQ ID NO: 559733 - RNA, 22 nt, Human
aggcagacucaauggcuagaua

SEQ ID NO: 559734 - RNA, 22 nt, Human
gcucuuccauuucucuugaacu

SEQ ID NO: 559735 - RNA, 22 nt, Human
aaguucagccugguuuuaaugc

SEQ ID NO: 559736 - RNA, 22 nt, Human
cacauuuaaaaaauccacgauc

SEQ ID NO: 559737 - RNA, 22 nt, Human
ucaucucaaaauuaugcugcac

SEQ ID NO: 559738 - RNA, 22 nt, Human
gggcucaguucugcuucaugcu

SEQ ID NO: 559739 - RNA, 22 nt, Human
gucaggauuugaacucaggucu

SEQ ID NO: 559740 - RNA, 22 nt, Human
ucacauucucagcaucuauaca

SEQ ID NO: 559741 - RNA, 17 nt, Human
gugcagggaugaaggau

SEQ ID NO: 559742 - RNA, 21 nt, Human
gagacagcccagugccagggc

SEQ ID NO: 559743 - RNA, 22 nt, Human
agagccaggaugucuucugggg

SEQ ID NO: 559744 - RNA, 22 nt, Human
gagaggaacucccagugccugg

SEQ ID NO: 559745 - RNA, 22 nt, Human
gcugugcuggaaggggaccugc

SEQ ID NO: 559746 - RNA, 22 nt, Human
cacagcuggugcacuagcucug

SEQ ID NO: 559747 - RNA, 22 nt, Human
uggcagcuguguccagguagaa

SEQ ID NO: 559748 - RNA, 22 nt, Human
uacuauuuugacaugaaauuga

SEQ ID NO: 559749 - RNA, 22 nt, Human
gcccagagagaugcuguagacc

SEQ ID NO: 559750 - RNA, 22 nt, Human
cucaaggaaagucuggagaaga

SEQ ID NO: 559751 - RNA, 22 nt, Human
agaugugggagaugcuucugca

SEQ ID NO: 559752 - RNA, 22 nt, Human
aucuucaaagcacaucguuugu

SEQ ID NO: 559753 - RNA, 22 nt, Human
auuguggugucaguuauaggca

SEQ ID NO: 559754 - RNA, 22 nt, Human
aggugcaggagcugugcaggga

SEQ ID NO: 559755 - RNA, 22 nt, Human
agaaagacaaaaugcaguggcu

SEQ ID NO: 559756 - RNA, 22 nt, Human
gcccagcugucuggcagggaug

SEQ ID NO: 559757 - RNA, 22 nt, Human
cacagugacuggcacauaguaa

SEQ ID NO: 559758 - RNA, 22 nt, Human
aaucaguucuacaucuuaucca

SEQ ID NO: 559759 - RNA, 19 nt, Human
ugggcagcucccucugucc

SEQ ID NO: 559760 - RNA, 22 nt, Human
gccaccagggggcuccagugag

SEQ ID NO: 559761 - RNA, 22 nt, Human
uggcccugagggcucggagcca

SEQ ID NO: 559762 - RNA, 22 nt, Human
gcagggcuugcagcagcuagac

SEQ ID NO: 559763 - RNA, 22 nt, Human
cugcuuuggcucagugacauca

SEQ ID NO: 559764 - RNA, 18 nt, Human
ugaggccucugcugggcc

SEQ ID NO: 559765 - RNA, 22 nt, Human
cugucuccuccacugcauggga

SEQ ID NO: 559766 - RNA, 22 nt, Human
ucugggcucugucagcaccucu

SEQ ID NO: 559767 - RNA, 19 nt, Human
gcuggggccugaccagaca

SEQ ID NO: 559768 - RNA, 22 nt, Human
aggcuggcugagcugcagccug

SEQ ID NO: 559769 - RNA, 22 nt, Human
acugcaucugaaacauggguca

SEQ ID NO: 559770 - RNA, 22 nt, Human
uucacauugugcagauuauggu

SEQ ID NO: 559771 - RNA, 22 nt, Human
ccugggcaacauagugagaccu

SEQ ID NO: 559772 - RNA, 23 nt, Human
uggcucugagcuuccugguggcc

SEQ ID NO: 559773 - RNA, 22 nt, Human
ccuggggagagaaagcccagcc

SEQ ID NO: 559774 - RNA, 22 nt, Human
uugaagcaaggcgaaucuugug

SEQ ID NO: 559775 - RNA, 22 nt, Human
ccauccugcaggaccuccauau

SEQ ID NO: 559776 - RNA, 22 nt, Human
caggaggaggugagguagaacu

SEQ ID NO: 559777 - RNA, 22 nt, Human
ucaggggagguugaaucgucuc

SEQ ID NO: 559778 - RNA, 22 nt, Human
ucacucucuaagcaugacagac

SEQ ID NO: 559779 - RNA, 22 nt, Human
uuuguuaauucuuauguuagag

SEQ ID NO: 559780 - RNA, 22 nt, Human
aaagaacucagagaggauuuua

SEQ ID NO: 559781 - RNA, 22 nt, Human
ucaaaguaaaaguauagaguuu

SEQ ID NO: 559782 - RNA, 22 nt, Human
uauuaaagggaaguuaugcaug

SEQ ID NO: 559783 - RNA, 22 nt, Human
agccaacuuggaaagucagauu

SEQ ID NO: 559784 - RNA, 22 nt, Human
aggaggcugguucaggccauau

SEQ ID NO: 559785 - RNA, 22 nt, Human
uaacaaguucugacagcauugu

SEQ ID NO: 559786 - RNA, 22 nt, Human
uaaggaaaauggacaucaaaca

SEQ ID NO: 559787 - RNA, 22 nt, Human
gugauugcccagcaccauuguu

SEQ ID NO: 559788 - RNA, 23 nt, Human
uggcuucugccccauucucucca

SEQ ID NO: 559789 - RNA, 22 nt, Human
ugccaaggagcuggaucagggc

SEQ ID NO: 559790 - RNA, 22 nt, Human
uccuuuuuaagucguuguggua

SEQ ID NO: 559791 - RNA, 22 nt, Human
agucacuucuauucuauuaagu

SEQ ID NO: 559792 - RNA, 22 nt, Human
cagugcaugaaacaauaugcag

SEQ ID NO: 559793 - RNA, 22 nt, Human
acagcaacuccugcuucugagu

SEQ ID NO: 559794 - RNA, 22 nt, Human
agggccuggugaccuggguccu

SEQ ID NO: 559795 - RNA, 22 nt, Human
ggcugccugaggcagugagaga

SEQ ID NO: 559796 - RNA, 22 nt, Human
cuuuauguccuugaagaguugu

SEQ ID NO: 559797 - RNA, 22 nt, Human
aggucaaaccacagcucuaggc

SEQ ID NO: 559798 - RNA, 22 nt, Human
uauacuuuccugcaacuuugau

SEQ ID NO: 559799 - RNA, 22 nt, Human
cagaguggcagucccaggccca

SEQ ID NO: 559800 - RNA, 22 nt, Human
gcugccuuuugcuccucccacc

SEQ ID NO: 559801 - RNA, 22 nt, Human
caggaagcugagcugcacugca

SEQ ID NO: 559802 - RNA, 19 nt, Human
gcagagugggguggagggu

SEQ ID NO: 559803 - RNA, 22 nt, Human
ugcaaacaggagaguaaguaua

SEQ ID NO: 559804 - RNA, 22 nt, Human
agcuuguuagaaauguagacuc

SEQ ID NO: 559805 - RNA, 22 nt, Human
uucuuugcccuuaaugaaauaa

SEQ ID NO: 559806 - RNA, 20 nt, Human
cugugccuaaaccuccgggu

SEQ ID NO: 559807 - RNA, 22 nt, Human
gcugugagccgcugcugagcau

SEQ ID NO: 559808 - RNA, 22 nt, Human
uccagucaggcugaauucaagg

SEQ ID NO: 559809 - RNA, 22 nt, Human
ucuggggcaguuacuggggccu

SEQ ID NO: 559810 - RNA, 22 nt, Human
agucagucaccauuuaagaaca

SEQ ID NO: 559811 - RNA, 22 nt, Human
aacauucuuaagauuugugucu

SEQ ID NO: 559812 - RNA, 22 nt, Human
aagcacaaugaacaucuuagau

SEQ ID NO: 559813 - RNA, 17 nt, Human
uccuucagggccucaca

SEQ ID NO: 559814 - RNA, 18 nt, Human
cagaugagaugcaaucuc

SEQ ID NO: 559815 - RNA, 22 nt, Human
gaagcagcuaggaucuucauuu

SEQ ID NO: 559816 - RNA, 22 nt, Human
ugcagggauccuagcugaagag

SEQ ID NO: 559817 - RNA, 22 nt, Human
cuuggcaggguggaggaugcag

SEQ ID NO: 559818 - RNA, 22 nt, Human
agagggaacggaucccagcgcg

SEQ ID NO: 559819 - RNA, 22 nt, Human
aauagaauuuguacuguguuuu

SEQ ID NO: 559820 - RNA, 22 nt, Human
auucucaaacaagugguuugau

SEQ ID NO: 559821 - RNA, 21 nt, Human
uucuccccagcgaauccucgg

SEQ ID NO: 559822 - RNA, 22 nt, Human
caggugggaccaugauagggca

SEQ ID NO: 559823 - RNA, 22 nt, Human
ggagcagccacgucucagggca

SEQ ID NO: 559824 - RNA, 22 nt, Human
aaucagaaucaguugacacagc

SEQ ID NO: 559825 - RNA, 22 nt, Human
ccagauggaaaugauguucuca

SEQ ID NO: 559826 - RNA, 22 nt, Human
ucugcccaguuugugcucaggu

SEQ ID NO: 559827 - RNA, 22 nt, Human
aggagcagaccguaguccugca

SEQ ID NO: 559828 - RNA, 22 nt, Human
ugcagaaguauuccaggcccca

SEQ ID NO: 559829 - RNA, 19 nt, Human
agccacagaacuugcagga

SEQ ID NO: 559830 - RNA, 22 nt, Human
gagcuggcaagucuguccuugg

SEQ ID NO: 559831 - RNA, 22 nt, Human
uuauauaucuugauuuguucca

SEQ ID NO: 559832 - RNA, 19 nt, Human
aggucugcagcugcaguuu

SEQ ID NO: 559833 - RNA, 22 nt, Human
cuuccucccccacacacucacu

SEQ ID NO: 559834 - RNA, 22 nt, Human
gcacagagggcagugagccucu

SEQ ID NO: 559835 - RNA, 22 nt, Human
uuuguauuccauaucaugccau

SEQ ID NO: 559836 - RNA, 22 nt, Human
ucccaagaccuggcauccaagu

SEQ ID NO: 559837 - RNA, 22 nt, Human
acuucauguaguccaucagguu

SEQ ID NO: 559838 - RNA, 21 nt, Human
acugggcuagccugacuucug

SEQ ID NO: 559839 - RNA, 20 nt, Human
auguaaaauuauaaggcuga

SEQ ID NO: 559840 - RNA, 22 nt, Human
aaacugaauucccaagggcaug

SEQ ID NO: 559841 - RNA, 22 nt, Human
ucacaucauuaagacuucuccu

SEQ ID NO: 559842 - RNA, 22 nt, Human
uugaaucucuugaaucucuguu

SEQ ID NO: 559843 - RNA, 22 nt, Human
cuucaguucuaaaguagaaugu

SEQ ID NO: 559844 - RNA, 22 nt, Human
acagaacugcaggaggaaaagc

SEQ ID NO: 559845 - RNA, 22 nt, Human
uguucauucgcuauugucuaug

SEQ ID NO: 559846 - RNA, 22 nt, Human
ggaagagggaaccacgacugua

SEQ ID NO: 559847 - RNA, 22 nt, Human
ugaaauguaaauaggacuagaa

SEQ ID NO: 559848 - RNA, 22 nt, Human
caugagugugccagucugauau

SEQ ID NO: 559849 - RNA, 22 nt, Human
cacaugaaggcuggggucguga

SEQ ID NO: 559850 - RNA, 22 nt, Human
augcaaaaguaauugcaauuuu

SEQ ID NO: 559851 - RNA, 22 nt, Human
uuucaaugacacaaaagagaaa

SEQ ID NO: 559852 - RNA, 21 nt, Human
uauugcauaacaaauuacccu

SEQ ID NO: 559853 - RNA, 22 nt, Human
acugccucuuggugcugagaga

SEQ ID NO: 559854 - RNA, 21 nt, Human
uuucccagcugaaaauaaaug

SEQ ID NO: 559855 - RNA, 22 nt, Human
auaguauuuaauaguuagcuca

SEQ ID NO: 559856 - RNA, 22 nt, Human
uggagcagcauucauccagcag

SEQ ID NO: 559857 - RNA, 21 nt, Human
ccagagagagggaaguggguu

SEQ ID NO: 559858 - RNA, 22 nt, Human
cucuuucuggaaggcagagugg

SEQ ID NO: 559859 - RNA, 18 nt, Human
gugcaaugaauagcagag

SEQ ID NO: 559860 - RNA, 22 nt, Human
cagugagggcccccuuccaggu

SEQ ID NO: 559861 - RNA, 22 nt, Human
gcaggagccacuucagggaugc

SEQ ID NO: 559862 - RNA, 22 nt, Human
aaaugcuguguuuuaacauaga

SEQ ID NO: 559863 - RNA, 22 nt, Human
ucucugguuauuaacuaacucc

SEQ ID NO: 559864 - RNA, 22 nt, Human
agauauauuuccugcccaaggc

SEQ ID NO: 559865 - RNA, 22 nt, Human
aaagccuugagauccuauaguu

SEQ ID NO: 559866 - RNA, 22 nt, Human
uuucuucuaugugugauauuuu

SEQ ID NO: 559867 - RNA, 22 nt, Human
uaagcugugggagauuggcaua

SEQ ID NO: 559868 - RNA, 18 nt, Human
gggcaagcggcugucacc

SEQ ID NO: 559869 - RNA, 22 nt, Human
aguucuuugucaucucuggagu

SEQ ID NO: 559870 - RNA, 22 nt, Human
gcauuucagagaaaaucugcuu

SEQ ID NO: 559871 - RNA, 18 nt, Human
auuuuucccagauggaua

SEQ ID NO: 559872 - RNA, 21 nt, Human
ucuuugauuaagcuugacuag

SEQ ID NO: 559873 - RNA, 22 nt, Human
agaggccagguccagaguuugu

SEQ ID NO: 559874 - RNA, 22 nt, Human
aauuuagaauucgcuagcuaau

SEQ ID NO: 559875 - RNA, 22 nt, Human
gugucauguagaaauugaugaa

SEQ ID NO: 559876 - RNA, 22 nt, Human
aguuuccaaagcauguucacac

SEQ ID NO: 559877 - RNA, 20 nt, Human
ugcacacagaaauuugcauu

SEQ ID NO: 559878 - RNA, 22 nt, Human
gcugcucugcuguguaagcagg

SEQ ID NO: 559879 - RNA, 22 nt, Human
gaggcagugucgguggcaggau

SEQ ID NO: 559880 - RNA, 22 nt, Human
gcuuuauguaaguccaaaggca

SEQ ID NO: 559881 - RNA, 22 nt, Human
gcugagcucccagcaguaucug

SEQ ID NO: 559882 - RNA, 22 nt, Human
aagggcuggcccugggaagagu

SEQ ID NO: 559883 - RNA, 22 nt, Human
caacuauuaccauguuauuguc

SEQ ID NO: 559884 - RNA, 22 nt, Human
gagaaggcugauccuuggaguu

SEQ ID NO: 559885 - RNA, 22 nt, Human
uggagcaggccggaaguggcuu

SEQ ID NO: 559886 - RNA, 22 nt, Human
agagaagcugacaggggcgugc

SEQ ID NO: 559887 - RNA, 22 nt, Human
aggagagucuugagucacuggu

SEQ ID NO: 559888 - RNA, 22 nt, Human
ucagggcauucaagaggccugg

SEQ ID NO: 559889 - RNA, 22 nt, Human
aaaagucuugucaagguuccca

SEQ ID NO: 559890 - RNA, 22 nt, Human
caaaguaugaaccaguuucucu

SEQ ID NO: 559891 - RNA, 22 nt, Human
ggccucagaccggagcuggcca

SEQ ID NO: 559892 - RNA, 22 nt, Human
gggcuggugaggcugcccugca

SEQ ID NO: 559893 - RNA, 22 nt, Human
acaggaagugggaagaaacagg

SEQ ID NO: 559894 - RNA, 22 nt, Human
ccugagagugagugccaccuua

SEQ ID NO: 559895 - RNA, 20 nt, Human
ucugcucagcccucaguggc

SEQ ID NO: 559896 - RNA, 22 nt, Human
cugugucccccucagccaggug

SEQ ID NO: 559897 - RNA, 22 nt, Human
caucagcagucacaugaugcug

SEQ ID NO: 559898 - RNA, 18 nt, Human
uuaucucuggcaugugcc

SEQ ID NO: 559899 - RNA, 18 nt, Human
gucauugcaacauacugu

SEQ ID NO: 559900 - RNA, 22 nt, Human
acacacaugguauuguucagaa

SEQ ID NO: 559901 - RNA, 22 nt, Human
ccugcagggugcugccacagau

SEQ ID NO: 559902 - RNA, 22 nt, Human
aguguuaauaucuggcccuagg

SEQ ID NO: 559903 - RNA, 20 nt, Human
ucugcuggccaaaacuucac

SEQ ID NO: 559904 - RNA, 22 nt, Human
cuggcucaauuuguacugcugu

SEQ ID NO: 559905 - RNA, 22 nt, Human
aagagcagauuccuaguggagc

SEQ ID NO: 559906 - RNA, 22 nt, Human
cacaggcagccuuguagaagaa

SEQ ID NO: 559907 - RNA, 22 nt, Human
uaagucaugauucuguguuacu

SEQ ID NO: 559908 - RNA, 22 nt, Human
cagagggagcccuccaggagca

SEQ ID NO: 559909 - RNA, 22 nt, Human
gggcaugguggcaggcaccugu

SEQ ID NO: 559910 - RNA, 22 nt, Human
uguaucaaggguuuauguaagc

SEQ ID NO: 559911 - RNA, 22 nt, Human
ucagagucugugcauucugcua

SEQ ID NO: 559912 - RNA, 22 nt, Human
ugcaauuuuuaucaauucagca

SEQ ID NO: 559913 - RNA, 22 nt, Human
agagagguuaaggagcucuugu

SEQ ID NO: 559914 - RNA, 22 nt, Human
aggaccauccuaagguaggcaa

SEQ ID NO: 559915 - RNA, 22 nt, Human
agggagcugcucugcuuccgug

SEQ ID NO: 559916 - RNA, 22 nt, Human
gaagaccauauucagcaggcau

SEQ ID NO: 559917 - RNA, 22 nt, Human
uuucaagaacagcagcauucca

SEQ ID NO: 559918 - RNA, 22 nt, Human
cacucaggcugugucaggagga

SEQ ID NO: 559919 - RNA, 23 nt, Human
uggcucuguggaucccucaggag

SEQ ID NO: 559920 - RNA, 22 nt, Human
gagcagugaagacagaaguaca

SEQ ID NO: 559921 - RNA, 22 nt, Human
agucccaguucgguucuuccuc

SEQ ID NO: 559922 - RNA, 22 nt, Human
ugcagggaaucuguggcuggac

SEQ ID NO: 559923 - RNA, 22 nt, Human
uagaugaauuagcaauuaucuu

SEQ ID NO: 559924 - RNA, 22 nt, Human
caugaagauccuguauguuuuu

SEQ ID NO: 559925 - RNA, 22 nt, Human
ucaggcuaagggagaggcgcuc

SEQ ID NO: 559926 - RNA, 22 nt, Human
aauguuugucaucacacagaua

SEQ ID NO: 559927 - RNA, 22 nt, Human
ccucacucugcacccugcagca

SEQ ID NO: 559928 - RNA, 22 nt, Human
uuucuacauucaaaaacuacca

SEQ ID NO: 559929 - RNA, 22 nt, Human
aagcagcauaauugcuauuuua

SEQ ID NO: 559930 - RNA, 22 nt, Human
uugccugugaacgcugaguccu

SEQ ID NO: 559931 - RNA, 22 nt, Human
cugcagggcagaagggcauaga

SEQ ID NO: 559932 - RNA, 22 nt, Human
uucuuaaagaggcaaaacacag

SEQ ID NO: 559933 - RNA, 22 nt, Human
aaggcagcaacuaauggaucuc

SEQ ID NO: 559934 - RNA, 22 nt, Human
gauggcagucaaccaggugagg

SEQ ID NO: 559935 - RNA, 23 nt, Human
ugggggugcacgggccacaucuu

SEQ ID NO: 559936 - RNA, 22 nt, Human
ucuguucagaauuguaacacuc

SEQ ID NO: 559937 - RNA, 22 nt, Human
cagggcucgcucgcucgcucgc

SEQ ID NO: 559938 - RNA, 22 nt, Human
ggugcucaagagggcauccucu

SEQ ID NO: 559939 - RNA, 22 nt, Human
ugaauaaucuuggguauuaaua

SEQ ID NO: 559940 - RNA, 22 nt, Human
ccucugagucaugcgcauagga

SEQ ID NO: 559941 - RNA, 22 nt, Human
aagagccauauaugcagcuaga

SEQ ID NO: 559942 - RNA, 22 nt, Human
uuaaaaugcagauucugauuca

SEQ ID NO: 559943 - RNA, 22 nt, Human
agcagcuguggaaaaguaacua

SEQ ID NO: 559944 - RNA, 22 nt, Human
cacaggagagcugggaggugcc

SEQ ID NO: 559945 - RNA, 22 nt, Human
uacaaaggaaacuucuuuuccc

SEQ ID NO: 559946 - RNA, 22 nt, Human
cuggaaagaccugcuugcuuuu

SEQ ID NO: 559947 - RNA, 20 nt, Human
gcagagccucacugcaaggg

SEQ ID NO: 559948 - RNA, 22 nt, Human
ugccugcuaggcccugcugggu

SEQ ID NO: 559949 - RNA, 22 nt, Human
gcagagccaggagcccaggauc

SEQ ID NO: 559950 - RNA, 23 nt, Human
uuucacagaaggauuguagggcc

SEQ ID NO: 559951 - RNA, 22 nt, Human
uuucugaaacauggucuuugua

SEQ ID NO: 559952 - RNA, 22 nt, Human
ugacaguuuaguguaauaguua

SEQ ID NO: 559953 - RNA, 22 nt, Human
aggaaaaugaaacagcaacugu

SEQ ID NO: 559954 - RNA, 22 nt, Human
ucugcuggucaaggcugggucc

SEQ ID NO: 559955 - RNA, 22 nt, Human
uucaaauuaccacauuugcuua

SEQ ID NO: 559956 - RNA, 22 nt, Human
agauauuuguaucuugcuauug

SEQ ID NO: 559957 - RNA, 23 nt, Human
uggagaugccccacucccugucu

SEQ ID NO: 559958 - RNA, 17 nt, Human
gcucccugaggacagcu

SEQ ID NO: 559959 - RNA, 22 nt, Human
acuguccaagcaugccuggcuu

SEQ ID NO: 559960 - RNA, 19 nt, Human
uuuggcacucugaaguguu

SEQ ID NO: 559961 - RNA, 23 nt, Human
gaggaaagaauauagaugcaauc

SEQ ID NO: 559962 - RNA, 22 nt, Human
gaggagguugacggcacuguga

SEQ ID NO: 559963 - RNA, 22 nt, Human
agucccagcucagaaccacuag

SEQ ID NO: 559964 - RNA, 22 nt, Human
guggcugggcuccgagcggcuu

SEQ ID NO: 559965 - RNA, 22 nt, Human
gacgccucuucccugcugcacu

SEQ ID NO: 559966 - RNA, 22 nt, Human
aguaacaguaacaucuuccuag

SEQ ID NO: 559967 - RNA, 22 nt, Human
caguccuugcucugggaugaug

SEQ ID NO: 559968 - RNA, 22 nt, Human
gccuaggaguggggauggcggu

SEQ ID NO: 559969 - RNA, 22 nt, Human
aacaucuuaucugcaugauccc

SEQ ID NO: 559970 - RNA, 22 nt, Human
cagcugcccaagccccagaugu

SEQ ID NO: 559971 - RNA, 22 nt, Human
aaacauucucagcccugcuugc

SEQ ID NO: 559972 - RNA, 22 nt, Human
ucagcuuucucagaggccuaac

SEQ ID NO: 559973 - RNA, 22 nt, Human
caaaggcuucaucucagagcag

SEQ ID NO: 559974 - RNA, 19 nt, Human
uguuggugcggauguggag

SEQ ID NO: 559975 - RNA, 22 nt, Human
gaaccauuguugaaaagaauag

SEQ ID NO: 559976 - RNA, 22 nt, Human
gaaacuguauguaguuuuuggg

SEQ ID NO: 559977 - RNA, 22 nt, Human
cauugcacucuggcuggaacgg

SEQ ID NO: 559978 - RNA, 22 nt, Human
uuuguguuuucccauacuauug

SEQ ID NO: 559979 - RNA, 22 nt, Human
ugcccaggaucuggcgaugcuc

SEQ ID NO: 559980 - RNA, 22 nt, Human
gggcugcuuauacugaugauaa

SEQ ID NO: 559981 - RNA, 22 nt, Human
uugcccuagggucuuauccucc

SEQ ID NO: 559982 - RNA, 22 nt, Human
gaaagagaaccugggccuagau

SEQ ID NO: 559983 - RNA, 22 nt, Human
uccuccagaaacugaggcagaa

SEQ ID NO: 559984 - RNA, 18 nt, Human
aguggucuguuauaucau

SEQ ID NO: 559985 - RNA, 22 nt, Human
ugagccuguccugugcauguga

SEQ ID NO: 559986 - RNA, 19 nt, Human
acaggcagaauugggugug

SEQ ID NO: 559987 - RNA, 19 nt, Human
cagaguccuugaccagucc

SEQ ID NO: 559988 - RNA, 22 nt, Human
uuuaaaauuuagaccucuccac

SEQ ID NO: 559989 - RNA, 23 nt, Human
uauuagggccaggacuggcaaau

SEQ ID NO: 559990 - RNA, 22 nt, Human
gcucugggugaacuuggagcaa

SEQ ID NO: 559991 - RNA, 22 nt, Human
ggcaaggccuugcccagcauuc

SEQ ID NO: 559992 - RNA, 22 nt, Human
ucaggcucuggguacaccugac

SEQ ID NO: 559993 - RNA, 22 nt, Human
aaggaagacacagaugaaguga

SEQ ID NO: 559994 - RNA, 22 nt, Human
cugccuggcccagggaugggcc

SEQ ID NO: 559995 - RNA, 22 nt, Human
gcaggccaggcuaggggcuguc

SEQ ID NO: 559996 - RNA, 22 nt, Human
ggcacuuuccagucuauagagc

SEQ ID NO: 559997 - RNA, 22 nt, Human
cagcuugggaguuugguuuuau

SEQ ID NO: 559998 - RNA, 22 nt, Human
gccugccuuugugaggaagcgg

SEQ ID NO: 559999 - RNA, 22 nt, Human
ucagacagagaaguacaaugag

SEQ ID NO: 560000 - RNA, 22 nt, Human
ugggagcacccugaggagcuuc

SEQ ID NO: 560001 - RNA, 22 nt, Human
cugaggcaggauggccuggcug

SEQ ID NO: 560002 - RNA, 22 nt, Human
auggaauauuugacacauaggg

SEQ ID NO: 560003 - RNA, 22 nt, Human
ccugccuguaagauggguacaa

SEQ ID NO: 560004 - RNA, 22 nt, Human
acucucccacguucgacucuaa

SEQ ID NO: 560005 - RNA, 22 nt, Human
cguuggagacacuugaggacuu

SEQ ID NO: 560006 - RNA, 22 nt, Human
ugucacaaacauacauuauaga

SEQ ID NO: 560007 - RNA, 22 nt, Human
aucaacauuccaaugugguaga

SEQ ID NO: 560008 - RNA, 22 nt, Human
uaagaagguaauacauuuuugc

SEQ ID NO: 560009 - RNA, 22 nt, Human
cccaggcucccaggugggacaa

SEQ ID NO: 560010 - RNA, 22 nt, Human
cagagcugguguuacaagucca

SEQ ID NO: 560011 - RNA, 22 nt, Human
agaccaagaaaggaugaggauc

SEQ ID NO: 560012 - RNA, 22 nt, Human
cagccaucccagccugugguuc

SEQ ID NO: 560013 - RNA, 22 nt, Human
ggaggccaaggcaggcggauca

SEQ ID NO: 560014 - RNA, 22 nt, Human
ccugagccugaguggugcaggg

SEQ ID NO: 560015 - RNA, 18 nt, Human
gugccaggaggcgcagcc

SEQ ID NO: 560016 - RNA, 22 nt, Human
gggcuccugccuccuggcaccu

SEQ ID NO: 560017 - RNA, 22 nt, Human
uacagggguaacaguggggaau

SEQ ID NO: 560018 - RNA, 22 nt, Human
aaagagcaagcugagauuugaa

SEQ ID NO: 560019 - RNA, 22 nt, Human
uaaauuguuuucuagaaguugu

SEQ ID NO: 560020 - RNA, 22 nt, Human
gcacagaacagagaaauagcca

SEQ ID NO: 560021 - RNA, 22 nt, Human
cuggaagugggguuggcuugaa

SEQ ID NO: 560022 - RNA, 22 nt, Human
uauguuaaauguuugauguuua

SEQ ID NO: 560023 - RNA, 22 nt, Human
gugcuggccucagagggucaug

SEQ ID NO: 560024 - RNA, 22 nt, Human
ggccuuugcguccacgccgcuu

SEQ ID NO: 560025 - RNA, 22 nt, Human
uccagaguuugagucuccuucc

SEQ ID NO: 560026 - RNA, 22 nt, Human
uccaaguccauuaugguggucu

SEQ ID NO: 560027 - RNA, 22 nt, Human
caggaagagguggggcuaaagu

SEQ ID NO: 560028 - RNA, 22 nt, Human
cauuacauuucaaaauguuucc

SEQ ID NO: 560029 - RNA, 22 nt, Human
ggcaggcuuucagcaucaaguc

SEQ ID NO: 560030 - RNA, 22 nt, Human
uaguuuuacaucagccauuguu

SEQ ID NO: 560031 - RNA, 22 nt, Human
ucucuccuuaucauuguguuua

SEQ ID NO: 560032 - RNA, 22 nt, Human
aaauuaguacauugcaaagucc

SEQ ID NO: 560033 - RNA, 22 nt, Human
augggcaguuaggaggccagga

SEQ ID NO: 560034 - RNA, 22 nt, Human
ugccacccagccaggaguggga

SEQ ID NO: 560035 - RNA, 22 nt, Human
uuuguccagaugcacagauaau

SEQ ID NO: 560036 - RNA, 22 nt, Human
ggacuucuaagugccagacacu

SEQ ID NO: 560037 - RNA, 22 nt, Human
gggcagcucucacagcagccaa

SEQ ID NO: 560038 - RNA, 22 nt, Human
ccagcuuuugcacuggacuggg

SEQ ID NO: 560039 - RNA, 21 nt, Human
agcuuccugcagugggagguc

SEQ ID NO: 560040 - RNA, 22 nt, Human
uucaaaucucuccuaauccacu

SEQ ID NO: 560041 - RNA, 22 nt, Human
ugaaaugcuguagagacuguau

SEQ ID NO: 560042 - RNA, 22 nt, Human
aggaccuguaccucagcaucua

SEQ ID NO: 560043 - RNA, 22 nt, Human
cccuggcugccagucaccagac

SEQ ID NO: 560044 - RNA, 22 nt, Human
uucuccagaccuugugacuaug

SEQ ID NO: 560045 - RNA, 22 nt, Human
ucaccaggcuggaaugcagugg

SEQ ID NO: 560046 - RNA, 22 nt, Human
gagguuccagacagcuuaggga

SEQ ID NO: 560047 - RNA, 22 nt, Human
acacaguaccccaaggcugggc

SEQ ID NO: 560048 - RNA, 22 nt, Human
ucucucagcuuugagaccugcu

SEQ ID NO: 560049 - RNA, 22 nt, Human
gggcaguggguggcugcagccu

SEQ ID NO: 560050 - RNA, 22 nt, Human
ugggugggagcgcccugucugg

SEQ ID NO: 560051 - RNA, 22 nt, Human
auuuauugaagcuuauuacguu

SEQ ID NO: 560052 - RNA, 22 nt, Human
guggcaggagagacacagccau

SEQ ID NO: 560053 - RNA, 22 nt, Human
ucagcugccuuucccaugcuag

SEQ ID NO: 560054 - RNA, 22 nt, Human
ccugccaggacauugcuugaag

SEQ ID NO: 560055 - RNA, 22 nt, Human
guuaccauugucuaggucauug

SEQ ID NO: 560056 - RNA, 22 nt, Human
aagggccuccuggggagccugg

SEQ ID NO: 560057 - RNA, 22 nt, Human
cugccuugaaaaugaagcuuua

SEQ ID NO: 560058 - RNA, 18 nt, Human
uggguggcuagggaguuu

SEQ ID NO: 560059 - RNA, 22 nt, Human
ugcugccaagcccgugcuccug

SEQ ID NO: 560060 - RNA, 22 nt, Human
cauacagaaaauauauuuugau

SEQ ID NO: 560061 - RNA, 22 nt, Human
cugggagauugcuagagaugca

SEQ ID NO: 560062 - RNA, 22 nt, Human
cagggccaagcugcagcaucug

SEQ ID NO: 560063 - RNA, 22 nt, Human
gacauucacagguaaacauucc

SEQ ID NO: 560064 - RNA, 22 nt, Human
cccaggaaccuaccagcucgag

SEQ ID NO: 560065 - RNA, 22 nt, Human
cuguaugaaauuaaguaaacag

SEQ ID NO: 560066 - RNA, 22 nt, Human
gccagagcugagugagguucuu

SEQ ID NO: 560067 - RNA, 22 nt, Human
ugggaggagcccucugggaagg

SEQ ID NO: 560068 - RNA, 21 nt, Human
ugucagcaacaauacuuucuc

SEQ ID NO: 560069 - RNA, 22 nt, Human
agccacaccuguccugccagcu

SEQ ID NO: 560070 - RNA, 22 nt, Human
ugcauuucagaagaaaauucgg

SEQ ID NO: 560071 - RNA, 22 nt, Human
ccuuuuuucuaugccaacucug

SEQ ID NO: 560072 - RNA, 22 nt, Human
aagggacuuugucagcuuucca

SEQ ID NO: 560073 - RNA, 22 nt, Human
acagcuaggaaauggaagaacu

SEQ ID NO: 560074 - RNA, 22 nt, Human
augcuuugauuugguuucucua

SEQ ID NO: 560075 - RNA, 22 nt, Human
cuucuuaaugacagauuaaaau

SEQ ID NO: 560076 - RNA, 22 nt, Human
aucuccagguugugccugcguc

SEQ ID NO: 560077 - RNA, 22 nt, Human
aaagucugagcagaauuucuca

SEQ ID NO: 560078 - RNA, 22 nt, Human
cccagcuugcgggcggcaggag

SEQ ID NO: 560079 - RNA, 22 nt, Human
agccugccuugggcugcuugag

SEQ ID NO: 560080 - RNA, 22 nt, Human
ucaguggagcuaagcaugagau

SEQ ID NO: 560081 - RNA, 20 nt, Human
uuggaugugcauggccgugc

SEQ ID NO: 560082 - RNA, 22 nt, Human
aaguucaagcucugccuaaaau

SEQ ID NO: 560083 - RNA, 22 nt, Human
aaggagaaggguaaucaacaca

SEQ ID NO: 560084 - RNA, 22 nt, Human
auuccugauuaacgaccuuuca

SEQ ID NO: 560085 - RNA, 19 nt, Human
ugggcucauucaggugguu

SEQ ID NO: 560086 - RNA, 22 nt, Human
cccugcagagagugcuuuugug

SEQ ID NO: 560087 - RNA, 17 nt, Human
uuuguacaacauuuuaa

SEQ ID NO: 560088 - RNA, 20 nt, Human
agccaauacagcaaaauuug

SEQ ID NO: 560089 - RNA, 22 nt, Human
uguggcuguguccaccugcugc

SEQ ID NO: 560090 - RNA, 22 nt, Human
auauuagcagugaucaaaaugg

SEQ ID NO: 560091 - RNA, 22 nt, Human
gcagggcaaacccagguguuca

SEQ ID NO: 560092 - RNA, 22 nt, Human
agcagcaggcuguguggacuga

SEQ ID NO: 560093 - RNA, 22 nt, Human
cuggagcuggcuuccuuccacu

SEQ ID NO: 560094 - RNA, 22 nt, Human
ugguugccucucagagauuccg

SEQ ID NO: 560095 - RNA, 17 nt, Human
ggugaguguccaggugg

SEQ ID NO: 560096 - RNA, 22 nt, Human
aaaugcagauuuugaugcagca

SEQ ID NO: 560097 - RNA, 23 nt, Human
ugucccagagggagggauaggcu

SEQ ID NO: 560098 - RNA, 22 nt, Human
ugaggugguucaagagccuugu

SEQ ID NO: 560099 - RNA, 22 nt, Human
cccagcuugcccaggacugagg

SEQ ID NO: 560100 - RNA, 22 nt, Human
ucuguucagaaauggaagugcc

SEQ ID NO: 560101 - RNA, 22 nt, Human
acaguauuugcgauacugauga

SEQ ID NO: 560102 - RNA, 22 nt, Human
gagagcugggcuuugggugaag

SEQ ID NO: 560103 - RNA, 22 nt, Human
cuguuuauaaauagaggggagu

SEQ ID NO: 560104 - RNA, 22 nt, Human
cagaaugagauaacccagauug

SEQ ID NO: 560105 - RNA, 19 nt, Human
agaggccucagcagcuggc

SEQ ID NO: 560106 - RNA, 20 nt, Human
ucaauuuucuacaacauuug

SEQ ID NO: 560107 - RNA, 22 nt, Human
auauccuuuguguaggcaauuu

SEQ ID NO: 560108 - RNA, 22 nt, Human
aagcacaggaucuugaggagcg

SEQ ID NO: 560109 - RNA, 22 nt, Human
ucuucaugaaauugauugcuua

SEQ ID NO: 560110 - RNA, 22 nt, Human
gaugcccaggcccaaccaugga

SEQ ID NO: 560111 - RNA, 22 nt, Human
gcuggagccaagcugcucuugg

SEQ ID NO: 560112 - RNA, 22 nt, Human
ucugugucugcagaaguucagc

SEQ ID NO: 560113 - RNA, 22 nt, Human
auucauuccaggucagucagac

SEQ ID NO: 560114 - RNA, 22 nt, Human
ggcugggagcuggacaggccgg

SEQ ID NO: 560115 - RNA, 22 nt, Human
uggcagcauuuuuuccagaaca

SEQ ID NO: 560116 - RNA, 22 nt, Human
aggugagggugccagugcaugg

SEQ ID NO: 560117 - RNA, 23 nt, Human
gggaaguggggauuugaagucau

SEQ ID NO: 560118 - RNA, 22 nt, Human
acagggaccugugagcuccaua

SEQ ID NO: 560119 - RNA, 22 nt, Human
gguugccggggcaggacuggaa

SEQ ID NO: 560120 - RNA, 22 nt, Human
uagaacagaggguugcccagau

SEQ ID NO: 560121 - RNA, 22 nt, Human
uaccuuggaaaugcuagaguaa

SEQ ID NO: 560122 - RNA, 22 nt, Human
ccuguggcacaugcagggauuc

SEQ ID NO: 560123 - RNA, 22 nt, Human
guuuuauaauugcuucauaaga

SEQ ID NO: 560124 - RNA, 22 nt, Human
uuugaaauaugaggcauuauga

SEQ ID NO: 560125 - RNA, 22 nt, Human
ucucagugacacucuucauaca

SEQ ID NO: 560126 - RNA, 22 nt, Human
agcagaaccacagcacuguuga

SEQ ID NO: 560127 - RNA, 22 nt, Human
cagugggugaugaguccugggg

SEQ ID NO: 560128 - RNA, 21 nt, Human
ggugucaguuuuggucauuag

SEQ ID NO: 560129 - RNA, 22 nt, Human
caggcagcugaggacuuugcua

SEQ ID NO: 560130 - RNA, 22 nt, Human
gaagcagagccuaaggcagaca

SEQ ID NO: 560131 - RNA, 17 nt, Human
uagcuagaccgagucuc

SEQ ID NO: 560132 - RNA, 22 nt, Human
acuucucucauucagacauagc

SEQ ID NO: 560133 - RNA, 23 nt, Human
uaaagucacauauuagagugagc

SEQ ID NO: 560134 - RNA, 22 nt, Human
ccuggaagauucaccacuacca

SEQ ID NO: 560135 - RNA, 22 nt, Human
acauauguguuguacaugcaug

SEQ ID NO: 560136 - RNA, 21 nt, Human
aauuagggugccucuuauaau

SEQ ID NO: 560137 - RNA, 22 nt, Human
cugggccucauccccagaguuu

SEQ ID NO: 560138 - RNA, 22 nt, Human
gguuucaaugagaagugcuugu

SEQ ID NO: 560139 - RNA, 22 nt, Human
uaaaguguccuagcuaggaggc

SEQ ID NO: 560140 - RNA, 22 nt, Human
aagaucagcucccgagucugag

SEQ ID NO: 560141 - RNA, 22 nt, Human
aucuaagauuuugcuaagauca

SEQ ID NO: 560142 - RNA, 22 nt, Human
aagaggaaaugauugacuauau

SEQ ID NO: 560143 - RNA, 22 nt, Human
gcugcuggccccacaugcucca

SEQ ID NO: 560144 - RNA, 22 nt, Human
ugcugcuccccagcacacagca

SEQ ID NO: 560145 - RNA, 22 nt, Human
agccacagcauguguguaugua

SEQ ID NO: 560146 - RNA, 22 nt, Human
gugggcucaggccucugugggg

SEQ ID NO: 560147 - RNA, 22 nt, Human
aaugcaaugcagcaccuccuug

SEQ ID NO: 560148 - RNA, 22 nt, Human
caggaacacaaguucagggaug

SEQ ID NO: 560149 - RNA, 22 nt, Human
uuccaauugcagaucagauaca

SEQ ID NO: 560150 - RNA, 22 nt, Human
caauuucaucuugugcuucaau

SEQ ID NO: 560151 - RNA, 19 nt, Human
uuaugaaggcuggggggag

SEQ ID NO: 560152 - RNA, 22 nt, Human
caggagaugacagggaagaacc

SEQ ID NO: 560153 - RNA, 22 nt, Human
uucuuaagaaaccaucacauuc

SEQ ID NO: 560154 - RNA, 22 nt, Human
ucaaaucuuuaacaugugcaaa

SEQ ID NO: 560155 - RNA, 22 nt, Human
acagcuguguuuuauaaucagc

SEQ ID NO: 560156 - RNA, 22 nt, Human
ucuaaacucucuuugaauuaug

SEQ ID NO: 560157 - RNA, 22 nt, Human
ucccagaaaaaggaggcuauga

SEQ ID NO: 560158 - RNA, 19 nt, Human
agccuggagggcuggucac

SEQ ID NO: 560159 - RNA, 21 nt, Human
ucacaucuauguuaagcaaac

SEQ ID NO: 560160 - RNA, 22 nt, Human
uucagagagaaaccagugggaa

SEQ ID NO: 560161 - RNA, 22 nt, Human
auauacagggagaaacagcuua

SEQ ID NO: 560162 - RNA, 22 nt, Human
gaagcccauuuguacagcacau

SEQ ID NO: 560163 - RNA, 22 nt, Human
cagaaggcuuuguggaguagac

SEQ ID NO: 560164 - RNA, 22 nt, Human
uauuuuagguaauauccauugu

SEQ ID NO: 560165 - RNA, 22 nt, Human
cuuugaaagcucccaggacuua

SEQ ID NO: 560166 - RNA, 22 nt, Human
acugggccaggugugggugagu

SEQ ID NO: 560167 - RNA, 22 nt, Human
ucacagcaacccugaggcgagu

SEQ ID NO: 560168 - RNA, 22 nt, Human
uaaacaucuguagccuucaguc

SEQ ID NO: 560169 - RNA, 22 nt, Human
uuccaaguguugagauuagagg

SEQ ID NO: 560170 - RNA, 22 nt, Human
gaggcaggguguugauuacaga

SEQ ID NO: 560171 - RNA, 22 nt, Human
ccacagggaacaugacagccuu

SEQ ID NO: 560172 - RNA, 22 nt, Human
ccagguggcuucugcccgaugu

SEQ ID NO: 560173 - RNA, 22 nt, Human
ugcucccagggacucuggcugg

SEQ ID NO: 560174 - RNA, 22 nt, Human
acaauguuuuuguucaaagagu

SEQ ID NO: 560175 - RNA, 22 nt, Human
accaaggaguuugguauuuuag

SEQ ID NO: 560176 - RNA, 22 nt, Human
aacacaugccuuaagaauaagu

SEQ ID NO: 560177 - RNA, 22 nt, Human
aaaaguucccugguuagaaaag

SEQ ID NO: 560178 - RNA, 20 nt, Human
uccaggccuuguucucagau

SEQ ID NO: 560179 - RNA, 22 nt, Human
ugcaugucaaggcacucaggau

SEQ ID NO: 560180 - RNA, 22 nt, Human
uugcauugaaugcacauuuuua

SEQ ID NO: 560181 - RNA, 22 nt, Human
acaggcagguaauuuacauauu

SEQ ID NO: 560182 - RNA, 22 nt, Human
ggcccugcucaggcugcgauga

SEQ ID NO: 560183 - RNA, 22 nt, Human
cagagccaaaugcugugguuau

SEQ ID NO: 560184 - RNA, 22 nt, Human
cugcucugagaggcucuuccua

SEQ ID NO: 560185 - RNA, 22 nt, Human
ucugccugcaguguggcagggc

SEQ ID NO: 560186 - RNA, 22 nt, Human
gugggggagaugcuuagguccg

SEQ ID NO: 560187 - RNA, 22 nt, Human
caucacagguccugaugacauu

SEQ ID NO: 560188 - RNA, 22 nt, Human
caguguucccugaacauauguu

SEQ ID NO: 560189 - RNA, 22 nt, Human
gaaaaaugcuccaaaucugugg

SEQ ID NO: 560190 - RNA, 22 nt, Human
ugcucagggacaauggagaggg

SEQ ID NO: 560191 - RNA, 19 nt, Human
ugaagcaggcagagaagau

SEQ ID NO: 560192 - RNA, 22 nt, Human
aggguccaucaaggacugcaca

SEQ ID NO: 560193 - RNA, 20 nt, Human
acaggggcagcacaauaaug

SEQ ID NO: 560194 - RNA, 22 nt, Human
acacugaagagcacuuucaaag

SEQ ID NO: 560195 - RNA, 22 nt, Human
acagacagauuuugucugaugu

SEQ ID NO: 560196 - RNA, 22 nt, Human
uuucucugaggcuggccucccu

SEQ ID NO: 560197 - RNA, 19 nt, Human
gucucugcuccagggucuc

SEQ ID NO: 560198 - RNA, 22 nt, Human
cagaaguggccucagagggagu

SEQ ID NO: 560199 - RNA, 22 nt, Human
acugagcugcaagucagggagg

SEQ ID NO: 560200 - RNA, 22 nt, Human
uugcaaggucaucaugcauugg

SEQ ID NO: 560201 - RNA, 22 nt, Human
uaguccagccuuggguguagcc

SEQ ID NO: 560202 - RNA, 22 nt, Human
aacaucagcacacaauagcaag

SEQ ID NO: 560203 - RNA, 22 nt, Human
cugauacaaugcuaauaaauuu

SEQ ID NO: 560204 - RNA, 22 nt, Human
agggaagaagcugguaguaggu

SEQ ID NO: 560205 - RNA, 22 nt, Human
aggaaccagagguugagcaacu

SEQ ID NO: 560206 - RNA, 19 nt, Human
gccuaugucuucaaaucau

SEQ ID NO: 560207 - RNA, 22 nt, Human
augguggaagagcaucagaaag

SEQ ID NO: 560208 - RNA, 22 nt, Human
uuugcauuguuucaaaagugaa

SEQ ID NO: 560209 - RNA, 22 nt, Human
cccagcccugaccuauuggaaa

SEQ ID NO: 560210 - RNA, 22 nt, Human
uagggcugcugcagaugacagg

SEQ ID NO: 560211 - RNA, 22 nt, Human
caaugauuuuuccauugcagga

SEQ ID NO: 560212 - RNA, 22 nt, Human
auucagcaaugagcuuggauuu

SEQ ID NO: 560213 - RNA, 22 nt, Human
ccuccacaggagcugcagugcu

SEQ ID NO: 560214 - RNA, 19 nt, Human
gugggacagacauuacaua

SEQ ID NO: 560215 - RNA, 22 nt, Human
uugaaaggugcugugugcugau

SEQ ID NO: 560216 - RNA, 22 nt, Human
uggaagugcucuucugaccaac

SEQ ID NO: 560217 - RNA, 22 nt, Human
uggcugagggggcaguucagga

SEQ ID NO: 560218 - RNA, 21 nt, Human
acagagccgggcacaaagcug

SEQ ID NO: 560219 - RNA, 22 nt, Human
guggcagggugcucaucaugca

SEQ ID NO: 560220 - RNA, 22 nt, Human
ucccuccuggugagcaggggcu

SEQ ID NO: 560221 - RNA, 22 nt, Human
gcuguccugggaacaggcacua

SEQ ID NO: 560222 - RNA, 18 nt, Human
ugguuccuugaaggggca

SEQ ID NO: 560223 - RNA, 22 nt, Human
aucauguuccagaaacagugau

SEQ ID NO: 560224 - RNA, 19 nt, Human
ccuuccuccccagggccau

SEQ ID NO: 560225 - RNA, 22 nt, Human
gcaguguucuaaauugggugug

SEQ ID NO: 560226 - RNA, 22 nt, Human
caggcacugugcugagcucugc

SEQ ID NO: 560227 - RNA, 22 nt, Human
ugcacagagggaggcauaaaau

SEQ ID NO: 560228 - RNA, 22 nt, Human
uagggcugugucuccaggacca

SEQ ID NO: 560229 - RNA, 22 nt, Human
aacaacaacggagaaaggguug

SEQ ID NO: 560230 - RNA, 22 nt, Human
augcuguagaucuuagccucua

SEQ ID NO: 560231 - RNA, 16 nt, Human
ccugggcucuguugga

SEQ ID NO: 560232 - RNA, 22 nt, Human
aaauacaauuucaggcuguaau

SEQ ID NO: 560233 - RNA, 22 nt, Human
caggugcugcguggcggagcug

SEQ ID NO: 560234 - RNA, 22 nt, Human
cccucugcaggcuggaccugcc

SEQ ID NO: 560235 - RNA, 22 nt, Human
cugcucugaagccaggauucug

SEQ ID NO: 560236 - RNA, 22 nt, Human
auacagaucccacagcauguga

SEQ ID NO: 560237 - RNA, 19 nt, Human
gcagguggauguggucagc

SEQ ID NO: 560238 - RNA, 22 nt, Human
cucuccaggacuuuggcccaau

SEQ ID NO: 560239 - RNA, 22 nt, Human
ugaagcaggcauugacugauga

SEQ ID NO: 560240 - RNA, 22 nt, Human
cuuggcagauccaaaaaugaca

SEQ ID NO: 560241 - RNA, 22 nt, Human
gcugaguguaaugauggcagag

SEQ ID NO: 560242 - RNA, 22 nt, Human
gcagagccuugcgucaugugcc

SEQ ID NO: 560243 - RNA, 20 nt, Human
uccaggcagcucagaguguc

SEQ ID NO: 560244 - RNA, 18 nt, Human
uggagccauugccaccau

SEQ ID NO: 560245 - RNA, 22 nt, Human
uuucccaagaccauagauggaa

SEQ ID NO: 560246 - RNA, 22 nt, Human
auuucuuacauaacaaauuguu

SEQ ID NO: 560247 - RNA, 22 nt, Human
ugcagaggagcuggaaggcugg

SEQ ID NO: 560248 - RNA, 21 nt, Human
ugcacagccauacccuccuug

SEQ ID NO: 560249 - RNA, 22 nt, Human
cucugcauuuuaacagaugauu

SEQ ID NO: 560250 - RNA, 22 nt, Human
uccuggcccgaucccugugaag

SEQ ID NO: 560251 - RNA, 22 nt, Human
ccagagagaguacugggcucug

SEQ ID NO: 560252 - RNA, 22 nt, Human
aaggcagcaugaaucccuguac

SEQ ID NO: 560253 - RNA, 22 nt, Human
guuucaaauagguuucagcaaa

SEQ ID NO: 560254 - RNA, 22 nt, Human
guggaaggugcuagaacaagga

SEQ ID NO: 560255 - RNA, 21 nt, Human
cuugggcuuguagauggugga

SEQ ID NO: 560256 - RNA, 22 nt, Human
caauuucaauacaaaauacauu

SEQ ID NO: 560257 - RNA, 22 nt, Human
aggcugcagugcagguaggauu

SEQ ID NO: 560258 - RNA, 22 nt, Human
ccucagagguuuucauucugua

SEQ ID NO: 560259 - RNA, 22 nt, Human
aggcccagacucagcggggcgg

SEQ ID NO: 560260 - RNA, 20 nt, Human
aguagcagugugacauugac

SEQ ID NO: 560261 - RNA, 22 nt, Human
gugcugcucacaucuggaggua

SEQ ID NO: 560262 - RNA, 22 nt, Human
gucugcccuuggcucagccaua

SEQ ID NO: 560263 - RNA, 22 nt, Human
caguuucuguuuuaaauagcag

SEQ ID NO: 560264 - RNA, 22 nt, Human
aguuuuuccugauuuuacagaa

SEQ ID NO: 560265 - RNA, 22 nt, Human
caggaaccaugaagacauauac

SEQ ID NO: 560266 - RNA, 22 nt, Human
ucugggcuuuacacugugcuua

SEQ ID NO: 560267 - RNA, 21 nt, Human
ugaaacacucuuuccaugaga

SEQ ID NO: 560268 - RNA, 22 nt, Human
cuggcccucggaguccagcugc

SEQ ID NO: 560269 - RNA, 22 nt, Human
gucacaggccuggaugaggggc

SEQ ID NO: 560270 - RNA, 22 nt, Human
aaguucaagucugcaucuuuuu

SEQ ID NO: 560271 - RNA, 22 nt, Human
uuucccaagugaagugaagcca

SEQ ID NO: 560272 - RNA, 22 nt, Human
uaggccaggacagagcuuccag

SEQ ID NO: 560273 - RNA, 22 nt, Human
cugccuuggcccuaguucaugg

SEQ ID NO: 560274 - RNA, 22 nt, Human
ggccccugcggacugccuagag

SEQ ID NO: 560275 - RNA, 22 nt, Human
ugcugccaugcagagcaacaga

SEQ ID NO: 560276 - RNA, 22 nt, Human
gccuggcugagguggggaggca

SEQ ID NO: 560277 - RNA, 22 nt, Human
auagaauagcauagaaaauuga

SEQ ID NO: 560278 - RNA, 22 nt, Human
ucacagcuauucucauguauuu

SEQ ID NO: 560279 - RNA, 22 nt, Human
augggcuguccuaguccagccc

SEQ ID NO: 560280 - RNA, 22 nt, Human
gcacugugacccagagcaggug

SEQ ID NO: 560281 - RNA, 22 nt, Human
gcacugggaaugcugaugggcu

SEQ ID NO: 560282 - RNA, 22 nt, Human
gaaggcugaugacagauucugc

SEQ ID NO: 560283 - RNA, 22 nt, Human
augcaguacauacaaacacuga

SEQ ID NO: 560284 - RNA, 22 nt, Human
agcuaugguaaucauccaccaa

SEQ ID NO: 560285 - RNA, 22 nt, Human
gggcucagagcauuuggguugg

SEQ ID NO: 560286 - RNA, 22 nt, Human
ugggaguagaugaggagugggc

SEQ ID NO: 560287 - RNA, 22 nt, Human
uggagguggaguuggaaacuga

SEQ ID NO: 560288 - RNA, 22 nt, Human
ugccuuccuaauggugggguuu

SEQ ID NO: 560289 - RNA, 22 nt, Human
ccagacaguuccuugagguuca

SEQ ID NO: 560290 - RNA, 22 nt, Human
aagcagagugauauaaacaugg

SEQ ID NO: 560291 - RNA, 22 nt, Human
ccagaaaacucuacaugcuugu

SEQ ID NO: 560292 - RNA, 22 nt, Human
uaguggaggggaugcaaagcuu

SEQ ID NO: 560293 - RNA, 22 nt, Human
uuccagugaugggcaauuuggu

SEQ ID NO: 560294 - RNA, 21 nt, Human
ggucagggggugccuccaggu

SEQ ID NO: 560295 - RNA, 19 nt, Human
auuucaagagguuuauugg

SEQ ID NO: 560296 - RNA, 22 nt, Human
ucucagagggaggauuacugcc

SEQ ID NO: 560297 - RNA, 22 nt, Human
ucaggccacggcucacugagac

SEQ ID NO: 560298 - RNA, 22 nt, Human
ugaggcagggaguuuaauuguc

SEQ ID NO: 560299 - RNA, 20 nt, Human
uguucacaguaguugcugcu

SEQ ID NO: 560300 - RNA, 22 nt, Human
aggccuggccuuuauguucaag

SEQ ID NO: 560301 - RNA, 22 nt, Human
auuauccaacacccaguuacau

SEQ ID NO: 560302 - RNA, 22 nt, Human
cugggaagaagggacaacagcg

SEQ ID NO: 560303 - RNA, 22 nt, Human
cugggccaucuccuuugugugg

SEQ ID NO: 560304 - RNA, 22 nt, Human
uggagguggggcucaggaaucu

SEQ ID NO: 560305 - RNA, 22 nt, Human
uuauuaggaaaaggucagaugu

SEQ ID NO: 560306 - RNA, 20 nt, Human
ucucacaggggcuuuucucu

SEQ ID NO: 560307 - RNA, 22 nt, Human
uggcugaggucuggggcuucug

SEQ ID NO: 560308 - RNA, 22 nt, Human
ggcacacaaaggcagcauuuga

SEQ ID NO: 560309 - RNA, 22 nt, Human
uuagauaaauuaagacuuuaca

SEQ ID NO: 560310 - RNA, 22 nt, Human
auuauucauugguaggcaagcu

SEQ ID NO: 560311 - RNA, 22 nt, Human
ccagggaagucacauugucuag

SEQ ID NO: 560312 - RNA, 22 nt, Human
ggcuuuauuaacucauccguaa

SEQ ID NO: 560313 - RNA, 22 nt, Human
acaaagucucuaauaaucuucu

SEQ ID NO: 560314 - RNA, 22 nt, Human
uguaaggaggaaaauuaguggu

SEQ ID NO: 560315 - RNA, 22 nt, Human
ggcuggaaaagacaaagcuauu

SEQ ID NO: 560316 - RNA, 23 nt, Human
cauguacagaguuugauaaagug

SEQ ID NO: 560317 - RNA, 22 nt, Human
gcuuuacagagaaaguuugccu

SEQ ID NO: 560318 - RNA, 21 nt, Human
uaagaacauuaucuucuuccu

SEQ ID NO: 560319 - RNA, 22 nt, Human
gcagggacugugaucucacaga

SEQ ID NO: 560320 - RNA, 22 nt, Human
uuauguuugaguauaugacuca

SEQ ID NO: 560321 - RNA, 22 nt, Human
aaugugaaaccgcacagaauaa

SEQ ID NO: 560322 - RNA, 22 nt, Human
ucuuccaaugguuucuagauuu

SEQ ID NO: 560323 - RNA, 23 nt, Human
aggcccugccugucccucuuuuu

SEQ ID NO: 560324 - RNA, 22 nt, Human
uggccaggcuggucuggaacgc

SEQ ID NO: 560325 - RNA, 22 nt, Human
aauaagauugacacaaguaccu

SEQ ID NO: 560326 - RNA, 18 nt, Human
cacauuuaccuggcuccc

SEQ ID NO: 560327 - RNA, 22 nt, Human
aaagacuagcauuuauauguac

SEQ ID NO: 560328 - RNA, 22 nt, Human
ucugcuggugaugaccucauaa

SEQ ID NO: 560329 - RNA, 22 nt, Human
aaauuucuugaggcucucuagc

SEQ ID NO: 560330 - RNA, 22 nt, Human
acaggccugacacacagagggc

SEQ ID NO: 560331 - RNA, 22 nt, Human
auuucuacugugagaaacauga

SEQ ID NO: 560332 - RNA, 22 nt, Human
uagaauaugugguaggaucugg

SEQ ID NO: 560333 - RNA, 22 nt, Human
cuggcagcaguuaugaaacaau

SEQ ID NO: 560334 - RNA, 22 nt, Human
uccuggccuugcuccugaugcc

SEQ ID NO: 560335 - RNA, 22 nt, Human
ucugggcugggagcguguggac

SEQ ID NO: 560336 - RNA, 22 nt, Human
gcugcccugcaucugugccuuc

SEQ ID NO: 560337 - RNA, 17 nt, Human
aagucccagcuaacaca

SEQ ID NO: 560338 - RNA, 22 nt, Human
ucuuggagacucuuguauauuu

SEQ ID NO: 560339 - RNA, 22 nt, Human
cuggccaacuugcuuguuggca

SEQ ID NO: 560340 - RNA, 22 nt, Human
ugcugugcuggcggcagaggcc

SEQ ID NO: 560341 - RNA, 22 nt, Human
uaaacuaucuguguuugaaguu

SEQ ID NO: 560342 - RNA, 22 nt, Human
acagauggcaccuuuuugcugu

SEQ ID NO: 560343 - RNA, 22 nt, Human
ccagcuggcaggagagucaggg

SEQ ID NO: 560344 - RNA, 22 nt, Human
acaggcaaggccagugagaaau

SEQ ID NO: 560345 - RNA, 22 nt, Human
ucaaaucuuugaccacuuaugu

SEQ ID NO: 560346 - RNA, 22 nt, Human
aacaguaaaaaucauuuaguug

SEQ ID NO: 560347 - RNA, 22 nt, Human
acauuucugagcagggagcugu

SEQ ID NO: 560348 - RNA, 22 nt, Human
agcugaagggaggauauguaca

SEQ ID NO: 560349 - RNA, 22 nt, Human
cuccugaguaguagcauuguca

SEQ ID NO: 560350 - RNA, 22 nt, Human
agcagccagagucugaacauua

SEQ ID NO: 560351 - RNA, 22 nt, Human
guggccuggaguuugauguagg

SEQ ID NO: 560352 - RNA, 22 nt, Human
uggccugguuauauugcuauca

SEQ ID NO: 560353 - RNA, 22 nt, Human
auaucaaagcuaguggaaauuu

SEQ ID NO: 560354 - RNA, 22 nt, Human
ggcugggcucgcugauuggcug

SEQ ID NO: 560355 - RNA, 22 nt, Human
accaggcuugaugauuugcuua

SEQ ID NO: 560356 - RNA, 22 nt, Human
agaccagggguugaguccuagc

SEQ ID NO: 560357 - RNA, 22 nt, Human
aguacauacuucaaauguacuu

SEQ ID NO: 560358 - RNA, 22 nt, Human
uuuuccucugcaauaaaagcag

SEQ ID NO: 560359 - RNA, 17 nt, Human
gccucugcuugugucau

SEQ ID NO: 560360 - RNA, 22 nt, Human
cuucaucaacucuaacaaaugu

SEQ ID NO: 560361 - RNA, 23 nt, Human
aggaaggagguccuaacaguauc

SEQ ID NO: 560362 - RNA, 22 nt, Human
aagacaugcaguuuguuccauu

SEQ ID NO: 560363 - RNA, 22 nt, Human
cugaggcagagggcagaccaga

SEQ ID NO: 560364 - RNA, 22 nt, Human
ggcucagcuuaucugggcaggc

SEQ ID NO: 560365 - RNA, 21 nt, Human
uggagcugccacuuguccucc

SEQ ID NO: 560366 - RNA, 22 nt, Human
ugggcacuguagcuggugcugg

SEQ ID NO: 560367 - RNA, 22 nt, Human
gccaggcugcuccagggaggcc

SEQ ID NO: 560368 - RNA, 20 nt, Human
agucugucaauuuacagugg

SEQ ID NO: 560369 - RNA, 22 nt, Human
uccugcagagccgcccucaggu

SEQ ID NO: 560370 - RNA, 22 nt, Human
cagguaagagacggauuggccc

SEQ ID NO: 560371 - RNA, 20 nt, Human
gaacauuuggccauacugag

SEQ ID NO: 560372 - RNA, 22 nt, Human
uacauuguguuaaaacagaaga

SEQ ID NO: 560373 - RNA, 22 nt, Human
ucuggaguuacugcuggcuuug

SEQ ID NO: 560374 - RNA, 20 nt, Human
ucacauccucucccaacaug

SEQ ID NO: 560375 - RNA, 22 nt, Human
cuuucucugugugguaaagggc

SEQ ID NO: 560376 - RNA, 22 nt, Human
gaagaagggagugacaaaugca

SEQ ID NO: 560377 - RNA, 22 nt, Human
gaggcugcugagagcccuguuu

SEQ ID NO: 560378 - RNA, 22 nt, Human
uuucucuaaauagggaggcuua

SEQ ID NO: 560379 - RNA, 22 nt, Human
ggagucagaggaaggcuugcuc

SEQ ID NO: 560380 - RNA, 22 nt, Human
aaagccuuuucuguuuaacaca

SEQ ID NO: 560381 - RNA, 22 nt, Human
gcugaggaagucagguggccca

SEQ ID NO: 560382 - RNA, 22 nt, Human
gaagccacuauagauauucuaa

SEQ ID NO: 560383 - RNA, 22 nt, Human
augaagaaacuguucugggugg

SEQ ID NO: 560384 - RNA, 22 nt, Human
cauugaaaccuaacauaggcug

SEQ ID NO: 560385 - RNA, 22 nt, Human
aaauaaagguccacuuuagggc

SEQ ID NO: 560386 - RNA, 23 nt, Human
ugcaauaugucagugcaaagugg

SEQ ID NO: 560387 - RNA, 22 nt, Human
acagagagcugugauugaguua

SEQ ID NO: 560388 - RNA, 22 nt, Human
ugcaagagauucaaaccauaaa

SEQ ID NO: 560389 - RNA, 22 nt, Human
aggcagcaaaugucuggaacag

SEQ ID NO: 560390 - RNA, 22 nt, Human
gaguguggugaacaggagcacc

SEQ ID NO: 560391 - RNA, 22 nt, Human
gauuuccucacuaacauccauc

SEQ ID NO: 560392 - RNA, 22 nt, Human
ugcuggggguagcucugcguag

SEQ ID NO: 560393 - RNA, 17 nt, Human
gcagccagugcagcagg

SEQ ID NO: 560394 - RNA, 22 nt, Human
aggcagccuuuagacagucugc

SEQ ID NO: 560395 - RNA, 22 nt, Human
ucaguuucacagucugugcaga

SEQ ID NO: 560396 - RNA, 16 nt, Human
gaagaaggaaaacuac

SEQ ID NO: 560397 - RNA, 22 nt, Human
uuguguccugauuugacacaau

SEQ ID NO: 560398 - RNA, 22 nt, Human
aaaugguauuuacucuguauua

SEQ ID NO: 560399 - RNA, 20 nt, Human
cccacacccuucccacuugg

SEQ ID NO: 560400 - RNA, 22 nt, Human
gcauuuauuucuuuacugcauc

SEQ ID NO: 560401 - RNA, 22 nt, Human
gggcaugccugcgcagugcaug

SEQ ID NO: 560402 - RNA, 22 nt, Human
cugggagguggagguugcauug

SEQ ID NO: 560403 - RNA, 20 nt, Human
ggccugagcauggcuggcag

SEQ ID NO: 560404 - RNA, 22 nt, Human
gggaccugccaaggccacccag

SEQ ID NO: 560405 - RNA, 22 nt, Human
guuuuucuagacugggaguuug

SEQ ID NO: 560406 - RNA, 22 nt, Human
agugaccauuuucagcuagagg

SEQ ID NO: 560407 - RNA, 22 nt, Human
gucaacauguucugggugaaug

SEQ ID NO: 560408 - RNA, 22 nt, Human
aaagucacaauauuggaaggug

SEQ ID NO: 560409 - RNA, 22 nt, Human
gggcagaggggcgcuucccucu

SEQ ID NO: 560410 - RNA, 22 nt, Human
aucuacagugcacaggacagcc

SEQ ID NO: 560411 - RNA, 22 nt, Human
acccagaggcggagguugcagu

SEQ ID NO: 560412 - RNA, 22 nt, Human
cugggagcugucaggagcgugu

SEQ ID NO: 560413 - RNA, 22 nt, Human
gaagaauauucuugaucuuaga

SEQ ID NO: 560414 - RNA, 22 nt, Human
aaaucgcuugaacccaggaagu

SEQ ID NO: 560415 - RNA, 22 nt, Human
cuuucaaagaccuuggcauggg

SEQ ID NO: 560416 - RNA, 22 nt, Human
caggguggcaggcaccauggcc

SEQ ID NO: 560417 - RNA, 23 nt, Human
caugccaguuugugcaggcagau

SEQ ID NO: 560418 - RNA, 22 nt, Human
ggggaaaggccauggcaagaac

SEQ ID NO: 560419 - RNA, 20 nt, Human
aggcacuggggauagguaag

SEQ ID NO: 560420 - RNA, 22 nt, Human
guauuucaucuugaaaaccagu

SEQ ID NO: 560421 - RNA, 19 nt, Human
gcagaugaugaggcugguc

SEQ ID NO: 560422 - RNA, 22 nt, Human
aggagugagcuuuggggucaga

SEQ ID NO: 560423 - RNA, 22 nt, Human
ugauauuuuaugagcuuucaua

SEQ ID NO: 560424 - RNA, 22 nt, Human
gcugcagcaagcccuccagggg

SEQ ID NO: 560425 - RNA, 22 nt, Human
gccaguggcuugccaggcagga

SEQ ID NO: 560426 - RNA, 20 nt, Human
guuuuucucucuugccacua

SEQ ID NO: 560427 - RNA, 22 nt, Human
ugcuuuauuuauaaaauagcaa

SEQ ID NO: 560428 - RNA, 22 nt, Human
ggccugcucugcagccucuaca

SEQ ID NO: 560429 - RNA, 22 nt, Human
aucaaagagcuugacaauccua

SEQ ID NO: 560430 - RNA, 19 nt, Human
uggcagaggacaaggacuu

SEQ ID NO: 560431 - RNA, 22 nt, Human
aaaguucugggggagaagaacg

SEQ ID NO: 560432 - RNA, 22 nt, Human
gaggaguggaguugcuggguug

SEQ ID NO: 560433 - RNA, 22 nt, Human
ggagccagagcacuggggagcc

SEQ ID NO: 560434 - RNA, 19 nt, Human
uugugugucagucagaguu

SEQ ID NO: 560435 - RNA, 22 nt, Human
agcccagccggauucccaguuc

SEQ ID NO: 560436 - RNA, 22 nt, Human
cagucucuggugaguugacagu

SEQ ID NO: 560437 - RNA, 22 nt, Human
agcugcugcgccucacccuggc

SEQ ID NO: 560438 - RNA, 22 nt, Human
uaggugucugcucuuauuuaac

SEQ ID NO: 560439 - RNA, 21 nt, Human
gagugcagcaagguagagucu

SEQ ID NO: 560440 - RNA, 22 nt, Human
caguauguacucuuaucaugua

SEQ ID NO: 560441 - RNA, 22 nt, Human
ggaagagaaaugagucaagacu

SEQ ID NO: 560442 - RNA, 22 nt, Human
uguacaaagguacuuugauguu

SEQ ID NO: 560443 - RNA, 22 nt, Human
acugucuuguguuaaagaacca

SEQ ID NO: 560444 - RNA, 22 nt, Human
uucaagauggcugcaaauacuu

SEQ ID NO: 560445 - RNA, 22 nt, Human
guucacagaaggccagauggua

SEQ ID NO: 560446 - RNA, 23 nt, Human
augcccuguagaggcugcugacc

SEQ ID NO: 560447 - RNA, 22 nt, Human
aguuacaucuguuauguguguu

SEQ ID NO: 560448 - RNA, 18 nt, Human
auugcuuuuguaccaacc

SEQ ID NO: 560449 - RNA, 22 nt, Human
ggcagagaugugggucagaauc

SEQ ID NO: 560450 - RNA, 22 nt, Human
uaguucuucaugaauucagcuu

SEQ ID NO: 560451 - RNA, 22 nt, Human
gcuggcucagggacuagaguuu

SEQ ID NO: 560452 - RNA, 22 nt, Human
gcaggugggggucggugcaucu

SEQ ID NO: 560453 - RNA, 22 nt, Human
cucaggauucucgacacucaca

SEQ ID NO: 560454 - RNA, 22 nt, Human
uuucugcucgcucucaaucagg

SEQ ID NO: 560455 - RNA, 23 nt, Human
augcccugugcagaaauguggaa

SEQ ID NO: 560456 - RNA, 22 nt, Human
aguggcagagcugugucuugaa

SEQ ID NO: 560457 - RNA, 22 nt, Human
cuggcccucgucaguuucacug

SEQ ID NO: 560458 - RNA, 22 nt, Human
gcagacuguaucaaugucagua

SEQ ID NO: 560459 - RNA, 22 nt, Human
uaauaccuggccuugauacagu

SEQ ID NO: 560460 - RNA, 22 nt, Human
agucacuuucuacuugguuucu

SEQ ID NO: 560461 - RNA, 22 nt, Human
auaauuaauuucaguaaucucc

SEQ ID NO: 560462 - RNA, 22 nt, Human
guuauucugcacaccuuuaaaa

SEQ ID NO: 560463 - RNA, 22 nt, Human
uggacccuggacugcccuggcc

SEQ ID NO: 560464 - RNA, 22 nt, Human
ugggcuuaggucggaggcggcc

SEQ ID NO: 560465 - RNA, 22 nt, Human
ucucaaacuaacaaugauuaua

SEQ ID NO: 560466 - RNA, 22 nt, Human
ccacugugcccagccucauggg

SEQ ID NO: 560467 - RNA, 22 nt, Human
caagcagagguuuauguauuag

SEQ ID NO: 560468 - RNA, 22 nt, Human
uguuuauagggucugucacuug

SEQ ID NO: 560469 - RNA, 22 nt, Human
uauuuucuggacagucuugcuu

SEQ ID NO: 560470 - RNA, 22 nt, Human
uacagaauguguaucauuacca

SEQ ID NO: 560471 - RNA, 20 nt, Human
gucagugucuucaguaguga

SEQ ID NO: 560472 - RNA, 18 nt, Human
cauaauuuucuuucuuua

SEQ ID NO: 560473 - RNA, 22 nt, Human
gcagccucagggcacucagaug

SEQ ID NO: 560474 - RNA, 20 nt, Human
ucccaggcuccacccuagac

SEQ ID NO: 560475 - RNA, 22 nt, Human
ucaaauguucccuguacuggcc

SEQ ID NO: 560476 - RNA, 22 nt, Human
gcugccaugguccaggcuccag

SEQ ID NO: 560477 - RNA, 17 nt, Human
aggccagaugaggcaag

SEQ ID NO: 560478 - RNA, 22 nt, Human
ggcgcaggccuuggauccuggu

SEQ ID NO: 560479 - RNA, 22 nt, Human
gcaggcuggaggcuguucuggg

SEQ ID NO: 560480 - RNA, 22 nt, Human
uugugguuaaccgcacauuuuu

SEQ ID NO: 560481 - RNA, 22 nt, Human
uuucccaggcuggaaugcagug

SEQ ID NO: 560482 - RNA, 22 nt, Human
auguuugucccugacauccucu

SEQ ID NO: 560483 - RNA, 22 nt, Human
aaguuuuauuggcuauagcacu

SEQ ID NO: 560484 - RNA, 20 nt, Human
ugucauuuauuuaucaaaug

SEQ ID NO: 560485 - RNA, 22 nt, Human
caauguuuuguugaaugaauag

SEQ ID NO: 560486 - RNA, 22 nt, Human
ucuguucaugaaauaucuuuuu

SEQ ID NO: 560487 - RNA, 22 nt, Human
guggaggagaggcgccuugcgg

SEQ ID NO: 560488 - RNA, 22 nt, Human
uccuggcagagagcaugaggcc

SEQ ID NO: 560489 - RNA, 22 nt, Human
ccaagggaaaccgagaggcugg

SEQ ID NO: 560490 - RNA, 22 nt, Human
ccaguggacaauuucugaggaa

SEQ ID NO: 560491 - RNA, 22 nt, Human
aggaaugacuuguagcucugag

SEQ ID NO: 560492 - RNA, 22 nt, Human
ucugccuggcucauggcaguga

SEQ ID NO: 560493 - RNA, 22 nt, Human
cugugcaagcccaagauaaaac

SEQ ID NO: 560494 - RNA, 22 nt, Human
aaguguuuggggaucauuuuaa

SEQ ID NO: 560495 - RNA, 22 nt, Human
ugagcuguagcagaugcuguug

SEQ ID NO: 560496 - RNA, 22 nt, Human
aacaaagucguugccuagaaga

SEQ ID NO: 560497 - RNA, 22 nt, Human
cugcugagaugccaggagcucu

SEQ ID NO: 560498 - RNA, 22 nt, Human
guccagaagcagugcacaucac

SEQ ID NO: 560499 - RNA, 22 nt, Human
aguaacuaugcuugagaaucag

SEQ ID NO: 560500 - RNA, 22 nt, Human
aaguggaggccgaguucacgca

SEQ ID NO: 560501 - RNA, 21 nt, Human
ggucuuccaaauaaggagaaa

SEQ ID NO: 560502 - RNA, 22 nt, Human
uuaaaacugcaaauccuacuga

SEQ ID NO: 560503 - RNA, 22 nt, Human
uggcugggggugcuauagcugc

SEQ ID NO: 560504 - RNA, 22 nt, Human
gcacugcaucuacuggcaagua

SEQ ID NO: 560505 - RNA, 21 nt, Human
ugacauaauccauaguacaaa

SEQ ID NO: 560506 - RNA, 22 nt, Human
aguaaaucagaccucauuaugu

SEQ ID NO: 560507 - RNA, 22 nt, Human
caauuauauuuagaaugauaca

SEQ ID NO: 560508 - RNA, 22 nt, Human
ucauugucuugauaugauuguc

SEQ ID NO: 560509 - RNA, 22 nt, Human
caagggaccugagauggucucu

SEQ ID NO: 560510 - RNA, 22 nt, Human
uacagugacccuauuuccaaau

SEQ ID NO: 560511 - RNA, 22 nt, Human
cagguggaucucuaaggacuga

SEQ ID NO: 560512 - RNA, 22 nt, Human
gcaaacaagcugccugaagauu

SEQ ID NO: 560513 - RNA, 22 nt, Human
cucaggaugaaagucaugguga

SEQ ID NO: 560514 - RNA, 22 nt, Human
ucucaagaucucaagauggccc

SEQ ID NO: 560515 - RNA, 22 nt, Human
guauauaucggcacuauuuuaa

SEQ ID NO: 560516 - RNA, 22 nt, Human
ugaggggaacugaugcccauug

SEQ ID NO: 560517 - RNA, 22 nt, Human
ugcuccuuccucauccugugca

SEQ ID NO: 560518 - RNA, 22 nt, Human
ucagagguaagggcugagagga

SEQ ID NO: 560519 - RNA, 22 nt, Human
ucuuugaacuuuuuguaaguua

SEQ ID NO: 560520 - RNA, 22 nt, Human
uucuuuaugcuucuguuuaggc

SEQ ID NO: 560521 - RNA, 22 nt, Human
ccugccugcggcccgcggggag

SEQ ID NO: 560522 - RNA, 22 nt, Human
ucauuucaugucucaggcacug

SEQ ID NO: 560523 - RNA, 22 nt, Human
ucuggcugccaccauccucccc

SEQ ID NO: 560524 - RNA, 22 nt, Human
cgcugggggaacagcgagggug

SEQ ID NO: 560525 - RNA, 22 nt, Human
agggccugcaucaggagcuugg

SEQ ID NO: 560526 - RNA, 19 nt, Human
uggcagcauugguaccuug

SEQ ID NO: 560527 - RNA, 22 nt, Human
uugaucuugugauaguucaacu

SEQ ID NO: 560528 - RNA, 22 nt, Human
gccaggcagcagcgaggauggu

SEQ ID NO: 560529 - RNA, 22 nt, Human
gggaccugcgccacucacuguc

SEQ ID NO: 560530 - RNA, 22 nt, Human
ggaggaccccagcagcucccca

SEQ ID NO: 560531 - RNA, 22 nt, Human
ucaggggcccuucccucagcag

SEQ ID NO: 560532 - RNA, 22 nt, Human
ccuuuacaucugacuucuuuca

SEQ ID NO: 560533 - RNA, 22 nt, Human
ugcaggugguuuggacacugcu

SEQ ID NO: 560534 - RNA, 22 nt, Human
ggauggagguucucagaugcuc

SEQ ID NO: 560535 - RNA, 22 nt, Human
uuuauucauuguuucgucgcag

SEQ ID NO: 560536 - RNA, 22 nt, Human
guccuggggauuauagaguguu

SEQ ID NO: 560537 - RNA, 22 nt, Human
cagagagagugggguguggauu

SEQ ID NO: 560538 - RNA, 22 nt, Human
aagagcaggcugucaauggggc

SEQ ID NO: 560539 - RNA, 20 nt, Human
cugcaggguuagaggcucca

SEQ ID NO: 560540 - RNA, 22 nt, Human
ucucuguggugggaggcugagu

SEQ ID NO: 560541 - RNA, 19 nt, Human
uggcaucuguaaaauggug

SEQ ID NO: 560542 - RNA, 22 nt, Human
cagcuguugucucucacauauu

SEQ ID NO: 560543 - RNA, 22 nt, Human
uagacacaucaaguauaguuaa

SEQ ID NO: 560544 - RNA, 22 nt, Human
uagguuccaugagggaggcaaa

SEQ ID NO: 560545 - RNA, 22 nt, Human
aggacccugcucaagcaucucc

SEQ ID NO: 560546 - RNA, 22 nt, Human
gggcuggaccgcucgccucccu

SEQ ID NO: 560547 - RNA, 22 nt, Human
cucucuguuaugcuuucaugaa

SEQ ID NO: 560548 - RNA, 22 nt, Human
auccuuuaucuuuccuaggaau

SEQ ID NO: 560549 - RNA, 22 nt, Human
cauagagugauguaagguaugu

SEQ ID NO: 560550 - RNA, 22 nt, Human
ugacauaaguugguagaaagga

SEQ ID NO: 560551 - RNA, 22 nt, Human
ucugggggcgaccagggacugc

SEQ ID NO: 560552 - RNA, 22 nt, Human
cccagcucucucaguucugcuu

SEQ ID NO: 560553 - RNA, 22 nt, Human
ucagaaauacuaucagcuuuug

SEQ ID NO: 560554 - RNA, 17 nt, Human
cagucgaggaggaccug

SEQ ID NO: 560555 - RNA, 23 nt, Human
agggcaugaagcagaggacgugg

SEQ ID NO: 560556 - RNA, 22 nt, Human
aaguucuacuguggguaaaaug

SEQ ID NO: 560557 - RNA, 22 nt, Human
aggagcucugggcagggccucc

SEQ ID NO: 560558 - RNA, 18 nt, Human
ugagaggcagguagagga

SEQ ID NO: 560559 - RNA, 22 nt, Human
ugcagaagcugcaggucagugg

SEQ ID NO: 560560 - RNA, 22 nt, Human
uuaaauuccagccucauaauag

SEQ ID NO: 560561 - RNA, 22 nt, Human
gcagagccccauugcuggcggg

SEQ ID NO: 560562 - RNA, 22 nt, Human
acauucuaacauuguacagaua

SEQ ID NO: 560563 - RNA, 18 nt, Human
cuucagugacagucuggc

SEQ ID NO: 560564 - RNA, 22 nt, Human
ccuggcugcaguuuuugcagaa

SEQ ID NO: 560565 - RNA, 22 nt, Human
auuuugcuuuauguaaauaugu

SEQ ID NO: 560566 - RNA, 22 nt, Human
agugcccuggcccagcuggacc

SEQ ID NO: 560567 - RNA, 22 nt, Human
ucaauucuagagccuuacauug

SEQ ID NO: 560568 - RNA, 22 nt, Human
gauuucaaguaucuugggcgag

SEQ ID NO: 560569 - RNA, 22 nt, Human
aucaaagauguuucagggugua

SEQ ID NO: 560570 - RNA, 22 nt, Human
ccaggcagccaagugugugugu

SEQ ID NO: 560571 - RNA, 20 nt, Human
aaagagaagccucaccuugu

SEQ ID NO: 560572 - RNA, 22 nt, Human
cagaauuuagcacaauguaugg

SEQ ID NO: 560573 - RNA, 22 nt, Human
auuuaagauugcguauucaugu

SEQ ID NO: 560574 - RNA, 22 nt, Human
ggcagguguggugaccagagau

SEQ ID NO: 560575 - RNA, 22 nt, Human
auaauucagguuuucuggcaca

SEQ ID NO: 560576 - RNA, 22 nt, Human
ccagguguaggacaccaaggga

SEQ ID NO: 560577 - RNA, 22 nt, Human
agcccugcugccugaauuagcu

SEQ ID NO: 560578 - RNA, 22 nt, Human
uaccagggaacagggauauuaa

SEQ ID NO: 560579 - RNA, 22 nt, Human
ccuuuaaagacugcauaacuuc

SEQ ID NO: 560580 - RNA, 22 nt, Human
gcuggccauauauuuugcuguu

SEQ ID NO: 560581 - RNA, 22 nt, Human
agaugcugccucuccucacaag

SEQ ID NO: 560582 - RNA, 20 nt, Human
gaguuccccauuucuccugg

SEQ ID NO: 560583 - RNA, 22 nt, Human
gaggacagugugaucugccagc

SEQ ID NO: 560584 - RNA, 22 nt, Human
aaggagggaaagcagugcuucu

SEQ ID NO: 560585 - RNA, 22 nt, Human
gagucacaaagccuuucuuauu

SEQ ID NO: 560586 - RNA, 22 nt, Human
uuuguagaacuauacuuacauu

SEQ ID NO: 560587 - RNA, 22 nt, Human
ccccauccuauucauguuucug

SEQ ID NO: 560588 - RNA, 21 nt, Human
agagccugagaucuuccagca

SEQ ID NO: 560589 - RNA, 22 nt, Human
cugagaggugcugguggcugca

SEQ ID NO: 560590 - RNA, 22 nt, Human
cagcuuuauugagguauaauug

SEQ ID NO: 560591 - RNA, 22 nt, Human
aaauccuaauaaugcacuagug

SEQ ID NO: 560592 - RNA, 22 nt, Human
gggucuggacggcugcaggaag

SEQ ID NO: 560593 - RNA, 22 nt, Human
ugccagggugucaggagagcua

SEQ ID NO: 560594 - RNA, 22 nt, Human
aaugauuuggcaaaggaaucca

SEQ ID NO: 560595 - RNA, 22 nt, Human
uuccagaggcuugaggaaaauu

SEQ ID NO: 560596 - RNA, 19 nt, Human
agcuccaggccuggaugcu

SEQ ID NO: 560597 - RNA, 22 nt, Human
gcucugagaggugcagcaguaa

SEQ ID NO: 560598 - RNA, 22 nt, Human
cugcugagguccuugcucagac

SEQ ID NO: 560599 - RNA, 17 nt, Human
uggaugugggaucugga

SEQ ID NO: 560600 - RNA, 22 nt, Human
aaaugcaggaaauuaugcuuuu

SEQ ID NO: 560601 - RNA, 22 nt, Human
ugcagggauuauguagggguug

SEQ ID NO: 560602 - RNA, 22 nt, Human
aacaugcuugcuuagaaucagc

SEQ ID NO: 560603 - RNA, 22 nt, Human
cagaaacauguauaaaguugua

SEQ ID NO: 560604 - RNA, 22 nt, Human
uuucuaagugugauuuuagauu

SEQ ID NO: 560605 - RNA, 22 nt, Human
aaucacaauuacuuuugcacca

SEQ ID NO: 560606 - RNA, 22 nt, Human
gccuccugaagugcugggauua

SEQ ID NO: 560607 - RNA, 22 nt, Human
caaugauugcuauuuacauaaa

SEQ ID NO: 560608 - RNA, 22 nt, Human
ucaagcaggguagcaagcuggu

SEQ ID NO: 560609 - RNA, 22 nt, Human
cagccccucacagagcuguccu

SEQ ID NO: 560610 - RNA, 22 nt, Human
auaaggaaguugcagaagugga

SEQ ID NO: 560611 - RNA, 22 nt, Human
ccagggcacuuaggcccagccc

SEQ ID NO: 560612 - RNA, 22 nt, Human
agggcucaauggugggcaugua

SEQ ID NO: 560613 - RNA, 22 nt, Human
gcagcugccuauucagggcuug

SEQ ID NO: 560614 - RNA, 21 nt, Human
uuucacaaaaguaugugacaa

SEQ ID NO: 560615 - RNA, 21 nt, Human
ugcaggagucugugagucagg

SEQ ID NO: 560616 - RNA, 20 nt, Human
uccaguggccugaaucugga

SEQ ID NO: 560617 - RNA, 22 nt, Human
aaggccaacuaggaugagcuag

SEQ ID NO: 560618 - RNA, 19 nt, Human
agcuccugggcucugggcc

SEQ ID NO: 560619 - RNA, 22 nt, Human
ucacuuuugaucccuaugcagu

SEQ ID NO: 560620 - RNA, 22 nt, Human
ggcaggcaggagcgugcuuggg

SEQ ID NO: 560621 - RNA, 22 nt, Human
ccuggacuguguccugugguca

SEQ ID NO: 560622 - RNA, 22 nt, Human
ugucaccaugccagcuucugcc

SEQ ID NO: 560623 - RNA, 22 nt, Human
uaggaguaacucucgucaucau

SEQ ID NO: 560624 - RNA, 19 nt, Human
gaauguuucugucucuucu

SEQ ID NO: 560625 - RNA, 22 nt, Human
guggcugguuuccugcaugcaa

SEQ ID NO: 560626 - RNA, 22 nt, Human
gagucccaugaugauagccaca

SEQ ID NO: 560627 - RNA, 22 nt, Human
cugggccuugagaaucauguuu

SEQ ID NO: 560628 - RNA, 22 nt, Human
ggaggggccggcugccugccac

SEQ ID NO: 560629 - RNA, 22 nt, Human
ggcacugaucugauuucccucc

SEQ ID NO: 560630 - RNA, 22 nt, Human
uugaaaguccuucuugaguuac

SEQ ID NO: 560631 - RNA, 22 nt, Human
acagagagaaacaaucagcagc

SEQ ID NO: 560632 - RNA, 22 nt, Human
cagucccagcugcucagaaggc

SEQ ID NO: 560633 - RNA, 22 nt, Human
auuagaaugaaguauaggauuu

SEQ ID NO: 560634 - RNA, 19 nt, Human
acagagcucucugcuucug

SEQ ID NO: 560635 - RNA, 20 nt, Human
ugcagagcuggcuggcuccu

SEQ ID NO: 560636 - RNA, 22 nt, Human
gaagcccaggcuuccuuggcuu

SEQ ID NO: 560637 - RNA, 22 nt, Human
uagaaaucuacuuagacuuucu

SEQ ID NO: 560638 - RNA, 20 nt, Human
accagguggcugaugacacc

SEQ ID NO: 560639 - RNA, 22 nt, Human
uuuuuagaguguuaccaguaua

SEQ ID NO: 560640 - RNA, 22 nt, Human
uucaaacaguugcacaacuuau

SEQ ID NO: 560641 - RNA, 22 nt, Human
gcuugggauaugcugauguaaa

SEQ ID NO: 560642 - RNA, 21 nt, Human
uggcucuguucaauauaugga

SEQ ID NO: 560643 - RNA, 22 nt, Human
agugaucagcuugaaguaguuu

SEQ ID NO: 560644 - RNA, 22 nt, Human
agggcagagcacugaauuggga

SEQ ID NO: 560645 - RNA, 22 nt, Human
ucucaaguuauguaacagcugu

SEQ ID NO: 560646 - RNA, 22 nt, Human
ugcugccucagcuuccugggcu

SEQ ID NO: 560647 - RNA, 22 nt, Human
ugccucagcugaggccgcucca

SEQ ID NO: 560648 - RNA, 23 nt, Human
gaguguucauagcaggcucuugc

SEQ ID NO: 560649 - RNA, 22 nt, Human
gccucugggcucugccccuggc

SEQ ID NO: 560650 - RNA, 22 nt, Human
ugauuauauuaacuauguuccu

SEQ ID NO: 560651 - RNA, 22 nt, Human
ucagggcauguauguuucuuua

SEQ ID NO: 560652 - RNA, 22 nt, Human
ucuggcagcaagauaacaaugg

SEQ ID NO: 560653 - RNA, 22 nt, Human
acagcuggcaggggggcaugaa

SEQ ID NO: 560654 - RNA, 22 nt, Human
ugcuucugaugugagcagcccc

SEQ ID NO: 560655 - RNA, 22 nt, Human
agcuagaggugaaacaugccaa

SEQ ID NO: 560656 - RNA, 21 nt, Human
ccaugucagaugugggcugug

SEQ ID NO: 560657 - RNA, 22 nt, Human
uuacagaagagaaagaauucag

SEQ ID NO: 560658 - RNA, 22 nt, Human
ucaugcuaguuaagaacacaau

SEQ ID NO: 560659 - RNA, 22 nt, Human
ugcagggccuucuagaccaugg

SEQ ID NO: 560660 - RNA, 18 nt, Human
ugacucacccugucagug

SEQ ID NO: 560661 - RNA, 22 nt, Human
agggagccagaguugggagcuc

SEQ ID NO: 560662 - RNA, 22 nt, Human
guggcagcugguaugcagacag

SEQ ID NO: 560663 - RNA, 22 nt, Human
agagcagagggcucugggacaa

SEQ ID NO: 560664 - RNA, 22 nt, Human
aaguccaucucugccccacaca

SEQ ID NO: 560665 - RNA, 22 nt, Human
auggaauugaagacagcauagg

SEQ ID NO: 560666 - RNA, 22 nt, Human
gauccuugcaacucugugaggu

SEQ ID NO: 560667 - RNA, 22 nt, Human
uucaacaauuaaguaucagccu

SEQ ID NO: 560668 - RNA, 22 nt, Human
gucuugaucuccugaccuugug

SEQ ID NO: 560669 - RNA, 23 nt, Human
uucaucaguugcuguugcagaac

SEQ ID NO: 560670 - RNA, 23 nt, Human
cauguacacacagcuguacagug

SEQ ID NO: 560671 - RNA, 22 nt, Human
ucaaauguaauuuauuguuuua

SEQ ID NO: 560672 - RNA, 19 nt, Human
aggcagcaggccagggaug

SEQ ID NO: 560673 - RNA, 22 nt, Human
auuguuaaaguaauaaccaugg

SEQ ID NO: 560674 - RNA, 22 nt, Human
ccuccaggauaagucagggccu

SEQ ID NO: 560675 - RNA, 22 nt, Human
acuggcucagaguuccuagaga

SEQ ID NO: 560676 - RNA, 22 nt, Human
gcugugcagccaagugccucug

SEQ ID NO: 560677 - RNA, 21 nt, Human
uggcucaguugcugggcacag

SEQ ID NO: 560678 - RNA, 22 nt, Human
agggucagagucaggugcagua

SEQ ID NO: 560679 - RNA, 22 nt, Human
uggcucagugaagagauaacuu

SEQ ID NO: 560680 - RNA, 22 nt, Human
uuucuucuugauuuaaacaggg

SEQ ID NO: 560681 - RNA, 22 nt, Human
uagaauguaaauuccaagggca

SEQ ID NO: 560682 - RNA, 22 nt, Human
cagaccuggaaaacaggcuugc

SEQ ID NO: 560683 - RNA, 22 nt, Human
uauucacaggcuggagugaugu

SEQ ID NO: 560684 - RNA, 20 nt, Human
ugggcugaggaucaggugcc

SEQ ID NO: 560685 - RNA, 22 nt, Human
ucagaagacuacuaggacacau

SEQ ID NO: 560686 - RNA, 22 nt, Human
uaaauuaaagauuggagaagga

SEQ ID NO: 560687 - RNA, 22 nt, Human
aaguuugagagccuuuaguaua

SEQ ID NO: 560688 - RNA, 21 nt, Human
gggcagcacgucauuccugug

SEQ ID NO: 560689 - RNA, 22 nt, Human
agaagcagcuuucaaggugauu

SEQ ID NO: 560690 - RNA, 19 nt, Human
accugcaguaauaauuccu

SEQ ID NO: 560691 - RNA, 22 nt, Human
ugcagcucauugguguccuggu

SEQ ID NO: 560692 - RNA, 22 nt, Human
uaaugcaacgugagauaauuaa

SEQ ID NO: 560693 - RNA, 21 nt, Human
aaaaggaggcaggugaacagc

SEQ ID NO: 560694 - RNA, 22 nt, Human
gccugcuucucagucagcuugg

SEQ ID NO: 560695 - RNA, 22 nt, Human
ggucagccuuggauuugguagc

SEQ ID NO: 560696 - RNA, 22 nt, Human
ugaaaaacuuuaauccauaaag

SEQ ID NO: 560697 - RNA, 22 nt, Human
acaauguaggauauguacuugu

SEQ ID NO: 560698 - RNA, 22 nt, Human
uuucaauguaacauuuccaggc

SEQ ID NO: 560699 - RNA, 22 nt, Human
cagguuggggacuuaggaugac

SEQ ID NO: 560700 - RNA, 22 nt, Human
uacauagcaaggaaaugacaga

SEQ ID NO: 560701 - RNA, 22 nt, Human
uccaaagggaagcgcuuucugu

SEQ ID NO: 560702 - RNA, 22 nt, Human
gaccagguccaaagcuacuguc

SEQ ID NO: 560703 - RNA, 22 nt, Human
guugaaugaaucauucuaugua

SEQ ID NO: 560704 - RNA, 22 nt, Human
ucuucauacaauuucagacauc

SEQ ID NO: 560705 - RNA, 22 nt, Human
cccugagaugccucacccuagu

SEQ ID NO: 560706 - RNA, 22 nt, Human
uccugagaugagacagugcugc

SEQ ID NO: 560707 - RNA, 22 nt, Human
cacuauuuuucacuuaggcuua

SEQ ID NO: 560708 - RNA, 22 nt, Human
ucugccuucgcugcucccugaa

SEQ ID NO: 560709 - RNA, 22 nt, Human
uaaggccaaggggccauagucu

SEQ ID NO: 560710 - RNA, 22 nt, Human
ucucagagaaaugugucaccau

SEQ ID NO: 560711 - RNA, 22 nt, Human
uauuuuaaagugaagggucuug

SEQ ID NO: 560712 - RNA, 22 nt, Human
uagggcuauucugaguaauaau

SEQ ID NO: 560713 - RNA, 22 nt, Human
aguggccagugcugcucugggg

SEQ ID NO: 560714 - RNA, 22 nt, Human
caaaauuagggagugagcugga

SEQ ID NO: 560715 - RNA, 22 nt, Human
aguuuacaacaguagcuaugga

SEQ ID NO: 560716 - RNA, 22 nt, Human
ggccuugagagccagugcaggc

SEQ ID NO: 560717 - RNA, 22 nt, Human
uacacacuuacuggagaugaag

SEQ ID NO: 560718 - RNA, 22 nt, Human
uuguaaagcuuugagacuacau

SEQ ID NO: 560719 - RNA, 22 nt, Human
aaagcucuuuuccaaguauuga

SEQ ID NO: 560720 - RNA, 22 nt, Human
ugcauccuuaaccagcaucacu

SEQ ID NO: 560721 - RNA, 22 nt, Human
acagaaaaugccagaagggugg

SEQ ID NO: 560722 - RNA, 22 nt, Human
auuauuagauucuuaauuguaa

SEQ ID NO: 560723 - RNA, 22 nt, Human
ugagccugguugcagugucugg

SEQ ID NO: 560724 - RNA, 22 nt, Human
aggcaggugcuuaugacuugcu

SEQ ID NO: 560725 - RNA, 22 nt, Human
uaacaacuggacaauguugcuc

SEQ ID NO: 560726 - RNA, 22 nt, Human
cuguauaucaugguuuugcagu

SEQ ID NO: 560727 - RNA, 22 nt, Human
gucagcagugucagcucugggg

SEQ ID NO: 560728 - RNA, 22 nt, Human
gagcagcuggacaggccucccu

SEQ ID NO: 560729 - RNA, 22 nt, Human
ucuuuguaagacauguaagucc

SEQ ID NO: 560730 - RNA, 21 nt, Human
uuuucccacugaaagcuccca

SEQ ID NO: 560731 - RNA, 22 nt, Human
uguguacauaucuauccuagau

SEQ ID NO: 560732 - RNA, 22 nt, Human
gaggcccaguccugcaagcacg

SEQ ID NO: 560733 - RNA, 22 nt, Human
ucaaggagcccacagucuaaug

SEQ ID NO: 560734 - RNA, 22 nt, Human
uacuacaaggccgaagcucuca

SEQ ID NO: 560735 - RNA, 22 nt, Human
gaaaagggcaagagagagggca

SEQ ID NO: 560736 - RNA, 22 nt, Human
guucuccauucagcuuccugug

SEQ ID NO: 560737 - RNA, 22 nt, Human
agcccuuaguacauuucucaag

SEQ ID NO: 560738 - RNA, 22 nt, Human
gagauucuguagucaggcaucu

SEQ ID NO: 560739 - RNA, 22 nt, Human
uccuggaguugugcagugcaca

SEQ ID NO: 560740 - RNA, 22 nt, Human
aagccacugagauuucacugca

SEQ ID NO: 560741 - RNA, 22 nt, Human
uauuuagaacagacaauagaaa

SEQ ID NO: 560742 - RNA, 19 nt, Human
ccagagcccgccagauggg

SEQ ID NO: 560743 - RNA, 22 nt, Human
cagcaauaguguguuuguuuca

SEQ ID NO: 560744 - RNA, 22 nt, Human
auaaagauuucuuuuucucuac

SEQ ID NO: 560745 - RNA, 22 nt, Human
uuuuguguagagauggggucuu

SEQ ID NO: 560746 - RNA, 22 nt, Human
augaggcauuccacucaaacuc

SEQ ID NO: 560747 - RNA, 22 nt, Human
acagucuugagcaucagccaga

SEQ ID NO: 560748 - RNA, 22 nt, Human
ugcaaggugcuuuuugguguca

SEQ ID NO: 560749 - RNA, 22 nt, Human
uguuugcauuaauuagaaggua

SEQ ID NO: 560750 - RNA, 22 nt, Human
cuccaggccagggaaguggaca

SEQ ID NO: 560751 - RNA, 22 nt, Human
cuguguagccucaugugggcuu

SEQ ID NO: 560752 - RNA, 22 nt, Human
ugcucugguccucccucggcgc

SEQ ID NO: 560753 - RNA, 22 nt, Human
uucauguuuugagccauucuga

SEQ ID NO: 560754 - RNA, 22 nt, Human
uucauuccuucuguaccuugcc

SEQ ID NO: 560755 - RNA, 21 nt, Human
cauuucaugauuauagaaaug

SEQ ID NO: 560756 - RNA, 22 nt, Human
uuugcuauuuuucugugcagcu

SEQ ID NO: 560757 - RNA, 22 nt, Human
uaacacauauuucaagaguagu

SEQ ID NO: 560758 - RNA, 22 nt, Human
ucugucuccugccagugccucu

SEQ ID NO: 560759 - RNA, 22 nt, Human
cuuaauuuaagccuagaaugca

SEQ ID NO: 560760 - RNA, 21 nt, Human
aagagcuggaucaaggauaag

SEQ ID NO: 560761 - RNA, 22 nt, Human
caggaugguggcaugaucagaa

SEQ ID NO: 560762 - RNA, 22 nt, Human
ucuuuuuuuccugugcagagcu

SEQ ID NO: 560763 - RNA, 22 nt, Human
cucucagacacccauuuggaaa

SEQ ID NO: 560764 - RNA, 22 nt, Human
aucagaauagugggggacaguc

SEQ ID NO: 560765 - RNA, 22 nt, Human
cagucucuuuauccaccaagcc

SEQ ID NO: 560766 - RNA, 22 nt, Human
cugccagcucaaagcgcagcua

SEQ ID NO: 560767 - RNA, 23 nt, Human
cucugcaggagagugggcagggc

SEQ ID NO: 560768 - RNA, 22 nt, Human
agagccacggcaggccuaggaa

SEQ ID NO: 560769 - RNA, 22 nt, Human
aggcccugaagucggccccuca

SEQ ID NO: 560770 - RNA, 22 nt, Human
ucaaacuguuuacagugagaua

SEQ ID NO: 560771 - RNA, 18 nt, Human
acccucuggcuucugagc

SEQ ID NO: 560772 - RNA, 22 nt, Human
cagaguggcgacccccucagcu

SEQ ID NO: 560773 - RNA, 22 nt, Human
uccucuacucgcuugcccuuug

SEQ ID NO: 560774 - RNA, 22 nt, Human
uggcagaguggaccauacucaa

SEQ ID NO: 560775 - RNA, 22 nt, Human
uggacccuacccggcccucggc

SEQ ID NO: 560776 - RNA, 22 nt, Human
cagagggcucaguccugcugga

SEQ ID NO: 560777 - RNA, 22 nt, Human
gucagcugucuccccagagugg

SEQ ID NO: 560778 - RNA, 22 nt, Human
uccugggcugcagggaagagca

SEQ ID NO: 560779 - RNA, 22 nt, Human
gagacauggcaaaagcacuggu

SEQ ID NO: 560780 - RNA, 22 nt, Human
gaagcagcagcuggggacaguu

SEQ ID NO: 560781 - RNA, 22 nt, Human
agccucucuccagcuuggcaga

SEQ ID NO: 560782 - RNA, 22 nt, Human
cauuucugcagaauugcucuuc

SEQ ID NO: 560783 - RNA, 23 nt, Human
ucugagugauuagccucuggggu

SEQ ID NO: 560784 - RNA, 22 nt, Human
uuucuuauauucugucauuguu

SEQ ID NO: 560785 - RNA, 22 nt, Human
ccuggggaagucacuucucuuu

SEQ ID NO: 560786 - RNA, 18 nt, Human
cugucaccgccaccacac

SEQ ID NO: 560787 - RNA, 22 nt, Human
ugcaggcuuggaucacaucucc

SEQ ID NO: 560788 - RNA, 22 nt, Human
uaaaaucgcacugcuguuguua

SEQ ID NO: 560789 - RNA, 22 nt, Human
guuucuuauuugcagguugcuu

SEQ ID NO: 560790 - RNA, 20 nt, Human
uccagcugucuuucagagac

SEQ ID NO: 560791 - RNA, 22 nt, Human
aggagaguaccauugggccgca

SEQ ID NO: 560792 - RNA, 22 nt, Human
uaggaaccuugaucuuggauuu

SEQ ID NO: 560793 - RNA, 21 nt, Human
ugaggccugccagucucagaa

SEQ ID NO: 560794 - RNA, 22 nt, Human
ccagguggaggugugagguccu

SEQ ID NO: 560795 - RNA, 22 nt, Human
aucuccagaggagucauggucu

SEQ ID NO: 560796 - RNA, 22 nt, Human
uuccauaauuaaguggagagaa

SEQ ID NO: 560797 - RNA, 22 nt, Human
ucagcugccucucccuggaaga

SEQ ID NO: 560798 - RNA, 22 nt, Human
aggcugccucgugagcucgcug

SEQ ID NO: 560799 - RNA, 22 nt, Human
agagccaggaaguggcgugggg

SEQ ID NO: 560800 - RNA, 22 nt, Human
aaacucuagggcuccacauucc

SEQ ID NO: 560801 - RNA, 22 nt, Human
ucccaggagcaccuuuugagcc

SEQ ID NO: 560802 - RNA, 22 nt, Human
uuuaauuuuccucuuccuggag

SEQ ID NO: 560803 - RNA, 22 nt, Human
agggcugagacuaaggccagau

SEQ ID NO: 560804 - RNA, 22 nt, Human
ggcuggcaggggaugucagaug

SEQ ID NO: 560805 - RNA, 22 nt, Human
agcugaagaaaugggaagcauu

SEQ ID NO: 560806 - RNA, 22 nt, Human
aacuuuuacaaauugucaucau

SEQ ID NO: 560807 - RNA, 22 nt, Human
uauguacaguccuuaacuuaaa

SEQ ID NO: 560808 - RNA, 22 nt, Human
uggcucugcaccucaguguacc

SEQ ID NO: 560809 - RNA, 22 nt, Human
agagcagguggcaacucuggga

SEQ ID NO: 560810 - RNA, 22 nt, Human
uuucaaacuuuacucuugaauc

SEQ ID NO: 560811 - RNA, 21 nt, Human
gccucuccaaauccugccuuc

SEQ ID NO: 560812 - RNA, 22 nt, Human
acucagcuugcacacaucaaug

SEQ ID NO: 560813 - RNA, 22 nt, Human
ucucauucauccaaggauuuau

SEQ ID NO: 560814 - RNA, 22 nt, Human
augggcugcuuggcuuccaccc

SEQ ID NO: 560815 - RNA, 22 nt, Human
cucugguucagggcucccuggc

SEQ ID NO: 560816 - RNA, 22 nt, Human
auugaaagguuuugagcagaua

SEQ ID NO: 560817 - RNA, 22 nt, Human
aacauugaaauauuugcaauag

SEQ ID NO: 560818 - RNA, 22 nt, Human
gcugcaggcauuuuccugggca

SEQ ID NO: 560819 - RNA, 22 nt, Human
uuccaugugaguacacugugau

SEQ ID NO: 560820 - RNA, 22 nt, Human
uuggagguuugaaaauaugugu

SEQ ID NO: 560821 - RNA, 23 nt, Human
aguaacaugcaaauaacagucug

SEQ ID NO: 560822 - RNA, 22 nt, Human
gcuggcaggguucucacugaaa

SEQ ID NO: 560823 - RNA, 22 nt, Human
ucucacugcaaauauuauguau

SEQ ID NO: 560824 - RNA, 18 nt, Human
agccagguggaauggaac

SEQ ID NO: 560825 - RNA, 22 nt, Human
cuacauaaauuuaucacagacu

SEQ ID NO: 560826 - RNA, 22 nt, Human
ugccugggagugaccaagacuc

SEQ ID NO: 560827 - RNA, 22 nt, Human
agguaauaggguucagaauuau

SEQ ID NO: 560828 - RNA, 22 nt, Human
ucagacaggccucuccagccuc

SEQ ID NO: 560829 - RNA, 22 nt, Human
auucacaguuacugcugaacca

SEQ ID NO: 560830 - RNA, 22 nt, Human
cccagccaaggugcugguguug

SEQ ID NO: 560831 - RNA, 21 nt, Human
ugcugaaucugccauauuuuc

SEQ ID NO: 560832 - RNA, 22 nt, Human
cuguccccgcgaguccagagcu

SEQ ID NO: 560833 - RNA, 22 nt, Human
caggucuuuucuacugguggag

SEQ ID NO: 560834 - RNA, 22 nt, Human
aucaaaguaggcauauguuuuu

SEQ ID NO: 560835 - RNA, 22 nt, Human
acugaaaaaguaugauucacug

SEQ ID NO: 560836 - RNA, 22 nt, Human
gaaaucugcggugaggccugag

SEQ ID NO: 560837 - RNA, 22 nt, Human
gggcacagagaagguuuuagug

SEQ ID NO: 560838 - RNA, 22 nt, Human
uccugagauaaaucucauguga

SEQ ID NO: 560839 - RNA, 22 nt, Human
gacauuuagguagcuuccaguu

SEQ ID NO: 560840 - RNA, 22 nt, Human
accugcagcugagaaaaugacu

SEQ ID NO: 560841 - RNA, 22 nt, Human
ccauuuuauuagugacauuuag

SEQ ID NO: 560842 - RNA, 22 nt, Human
agggcagagaucugagugggca

SEQ ID NO: 560843 - RNA, 22 nt, Human
agagaacacgugcaucugcaau

SEQ ID NO: 560844 - RNA, 22 nt, Human
ucccagggacugggcuaggcuu

SEQ ID NO: 560845 - RNA, 19 nt, Human
ggcagaagguguaggggga

SEQ ID NO: 560846 - RNA, 22 nt, Human
cagaggcucuuccucacugccc

SEQ ID NO: 560847 - RNA, 22 nt, Human
acaagagucugcauuucuaaca

SEQ ID NO: 560848 - RNA, 22 nt, Human
uuucaugcucauggaacacagc

SEQ ID NO: 560849 - RNA, 22 nt, Human
uacuguuuuuuagacucauggu

SEQ ID NO: 560850 - RNA, 22 nt, Human
agcaggaguguccccuggcugu

SEQ ID NO: 560851 - RNA, 22 nt, Human
ggcucuggcguccaauggagcg

SEQ ID NO: 560852 - RNA, 22 nt, Human
ugagguggcuagggaggcacuc

SEQ ID NO: 560853 - RNA, 22 nt, Human
ccaggagucaauaaaggaagcu

SEQ ID NO: 560854 - RNA, 22 nt, Human
cuccugguucagagagcugaga

SEQ ID NO: 560855 - RNA, 22 nt, Human
aacacuuuuuauauauuguauc

SEQ ID NO: 560856 - RNA, 22 nt, Human
ggagguggcagggaacauaauu

SEQ ID NO: 560857 - RNA, 22 nt, Human
gagcugccggcccacaguacua

SEQ ID NO: 560858 - RNA, 21 nt, Human
aggcacuuaaccaauguuagc

SEQ ID NO: 560859 - RNA, 22 nt, Human
gaggcugagaguuuguucuacu

SEQ ID NO: 560860 - RNA, 22 nt, Human
aacuuucuaauuuuggcugagc

SEQ ID NO: 560861 - RNA, 22 nt, Human
gggacagacccaugggccaggu

SEQ ID NO: 560862 - RNA, 22 nt, Human
uucugaugaggaggucucuaag

SEQ ID NO: 560863 - RNA, 22 nt, Human
cagcccagcagggucuggcccu

SEQ ID NO: 560864 - RNA, 22 nt, Human
guauaucagacacucauaugua

SEQ ID NO: 560865 - RNA, 22 nt, Human
gggaagcagcauugugcuggcu

SEQ ID NO: 560866 - RNA, 22 nt, Human
gaggggcucuuuaauaguaaca

SEQ ID NO: 560867 - RNA, 22 nt, Human
cucaacauaugacuuugguggg

SEQ ID NO: 560868 - RNA, 22 nt, Human
acacauuuaaaaaggaacauau

SEQ ID NO: 560869 - RNA, 22 nt, Human
uccuugaagaaugauucuugga

SEQ ID NO: 560870 - RNA, 22 nt, Human
gcaggccuuggcaaugagccug

SEQ ID NO: 560871 - RNA, 22 nt, Human
ugcccugucuaagcugucagua

SEQ ID NO: 560872 - RNA, 22 nt, Human
uaugcacaccuggguccuuguc

SEQ ID NO: 560873 - RNA, 22 nt, Human
acagugauuuuuucgagcagaa

SEQ ID NO: 560874 - RNA, 22 nt, Human
cauugcacaucugagaagagau

SEQ ID NO: 560875 - RNA, 22 nt, Human
ugagggaggcccuuugagcaga

SEQ ID NO: 560876 - RNA, 22 nt, Human
cagaggaggccaccgcauaggc

SEQ ID NO: 560877 - RNA, 20 nt, Human
ccuccaggcacacccaugug

SEQ ID NO: 560878 - RNA, 22 nt, Human
aaacuacugaugccugggcccu

SEQ ID NO: 560879 - RNA, 22 nt, Human
acaaagucacaauaauuaaccu

SEQ ID NO: 560880 - RNA, 22 nt, Human
gccuggaggaauguagcugagg

SEQ ID NO: 560881 - RNA, 22 nt, Human
acagccugagaguggagcuggc

SEQ ID NO: 560882 - RNA, 22 nt, Human
ccugggcuguaccugugcgcgg

SEQ ID NO: 560883 - RNA, 22 nt, Human
auggcagccuguggacagucaa

SEQ ID NO: 560884 - RNA, 22 nt, Human
ugcuuuauggauuuguguccug

SEQ ID NO: 560885 - RNA, 22 nt, Human
uaccaaaaccaagccauuaucu

SEQ ID NO: 560886 - RNA, 22 nt, Human
gccugaugagcuuccagcugag

SEQ ID NO: 560887 - RNA, 22 nt, Human
cuccagugagcgcggggcaugg

SEQ ID NO: 560888 - RNA, 22 nt, Human
ugaggaagccaaacagcuacac

SEQ ID NO: 560889 - RNA, 22 nt, Human
cauuuguuaauuacuauuaucu

SEQ ID NO: 560890 - RNA, 22 nt, Human
gaguccaggcucagaaacccgu

SEQ ID NO: 560891 - RNA, 22 nt, Human
uggugcagucauuggcccaggg

SEQ ID NO: 560892 - RNA, 22 nt, Human
guucucucugcuuccaagaugg

SEQ ID NO: 560893 - RNA, 22 nt, Human
ucaacacuauccaggcaaucuu

SEQ ID NO: 560894 - RNA, 22 nt, Human
ugccuuggugcuucuucaugug

SEQ ID NO: 560895 - RNA, 22 nt, Human
gcaaugauauugaagugaugaa

SEQ ID NO: 560896 - RNA, 22 nt, Human
gugugccagacaugaugcuaug

SEQ ID NO: 560897 - RNA, 22 nt, Human
ugugaaaugaguauauuugaau

SEQ ID NO: 560898 - RNA, 22 nt, Human
aagagcuggucacagguccauu

SEQ ID NO: 560899 - RNA, 22 nt, Human
ggcugaggcucaugccaucuug

SEQ ID NO: 560900 - RNA, 19 nt, Human
ggggccugugauggucaca

SEQ ID NO: 560901 - RNA, 22 nt, Human
aauguaaacagcaagagaaggg

SEQ ID NO: 560902 - RNA, 22 nt, Human
uugucaaguaaggcugacauuu

SEQ ID NO: 560903 - RNA, 22 nt, Human
caggugggcugccucuccagcu

SEQ ID NO: 560904 - RNA, 22 nt, Human
ugcuucugggucccagccuggc

SEQ ID NO: 560905 - RNA, 22 nt, Human
uugccagugccagcccaggcag

SEQ ID NO: 560906 - RNA, 22 nt, Human
gguuucaacuuuugugaggaau

SEQ ID NO: 560907 - RNA, 22 nt, Human
aauacugcugccugcaaauuau

SEQ ID NO: 560908 - RNA, 22 nt, Human
acagauuuuauuauucagguau

SEQ ID NO: 560909 - RNA, 22 nt, Human
aaauaugauacucccuuuuagu

SEQ ID NO: 560910 - RNA, 22 nt, Human
acuucaugcagaagagagcugu

SEQ ID NO: 560911 - RNA, 22 nt, Human
uacaaacuguuauuauuauugu

SEQ ID NO: 560912 - RNA, 22 nt, Human
augauacaucuucaugucagug

SEQ ID NO: 560913 - RNA, 22 nt, Human
uuuaaauucugucugccgcuua

SEQ ID NO: 560914 - RNA, 22 nt, Human
aaagaugucauacacauuaaga

SEQ ID NO: 560915 - RNA, 22 nt, Human
ggagagcugacaucaugauguu

SEQ ID NO: 560916 - RNA, 22 nt, Human
uagagcuagcuucaaaaugcga

SEQ ID NO: 560917 - RNA, 22 nt, Human
uuugugugcgucuggccugggg

SEQ ID NO: 560918 - RNA, 22 nt, Human
uugauuucaaaauauaugcuug

SEQ ID NO: 560919 - RNA, 22 nt, Human
uccaugggaagauuuugagugg

SEQ ID NO: 560920 - RNA, 22 nt, Human
guauuauucucagcuuugggau

SEQ ID NO: 560921 - RNA, 22 nt, Human
ucucccaagccuggcaggggca

SEQ ID NO: 560922 - RNA, 22 nt, Human
ggaaagauuugucacaugaaug

SEQ ID NO: 560923 - RNA, 22 nt, Human
uuucuuuugcccuguggguuag

SEQ ID NO: 560924 - RNA, 22 nt, Human
augcacuugcguguuugcaaau

SEQ ID NO: 560925 - RNA, 22 nt, Human
auuuccugaucuguaaaauagc

SEQ ID NO: 560926 - RNA, 18 nt, Human
ggaaaaggagugucuagc

SEQ ID NO: 560927 - RNA, 22 nt, Human
gccugaagaacagcugugagga

SEQ ID NO: 560928 - RNA, 22 nt, Human
acauuuuuacugggcaucugca

SEQ ID NO: 560929 - RNA, 22 nt, Human
agagguggagcucuuggcauca

SEQ ID NO: 560930 - RNA, 22 nt, Human
gucugcccggccuuccuccacc

SEQ ID NO: 560931 - RNA, 22 nt, Human
uggcuggcuguccagcugggca

SEQ ID NO: 560932 - RNA, 20 nt, Human
ggcaggugcucgcuuggucu

SEQ ID NO: 560933 - RNA, 22 nt, Human
ucagccauggugagagugagag

SEQ ID NO: 560934 - RNA, 22 nt, Human
ccagaagagaucacaguucuug

SEQ ID NO: 560935 - RNA, 22 nt, Human
uggggcuagaauccugcaggaa

SEQ ID NO: 560936 - RNA, 22 nt, Human
gugggguagaucuuucucagga

SEQ ID NO: 560937 - RNA, 22 nt, Human
aggcuggaguacaguggcuauu

SEQ ID NO: 560938 - RNA, 22 nt, Human
acaggugauucaggcucuggga

SEQ ID NO: 560939 - RNA, 22 nt, Human
aagggcuguaagccaaguaaag

SEQ ID NO: 560940 - RNA, 22 nt, Human
uuguaaagcugauuagaaagcc

SEQ ID NO: 560941 - RNA, 22 nt, Human
gucugcccugcagacaugccuc

SEQ ID NO: 560942 - RNA, 22 nt, Human
gagauggcccuggcauguagcu

SEQ ID NO: 560943 - RNA, 22 nt, Human
cuguguccucccgcugcaccca

SEQ ID NO: 560944 - RNA, 22 nt, Human
gcuguucauuagaaauagaaug

SEQ ID NO: 560945 - RNA, 22 nt, Human
uuguacacaauucuuaacauac

SEQ ID NO: 560946 - RNA, 22 nt, Human
cacaggagauugaucuauuggu

SEQ ID NO: 560947 - RNA, 22 nt, Human
ccagucacuggaaaaugggaau

SEQ ID NO: 560948 - RNA, 22 nt, Human
ugauugauggaggugauuuacc

SEQ ID NO: 560949 - RNA, 22 nt, Human
agaauuagaggccauguacuug

SEQ ID NO: 560950 - RNA, 22 nt, Human
cccaugccuucugacucacagg

SEQ ID NO: 560951 - RNA, 22 nt, Human
gcucagagaugucugcugccuu

SEQ ID NO: 560952 - RNA, 22 nt, Human
agggaauucacuggaacgcccu

SEQ ID NO: 560953 - RNA, 22 nt, Human
gacccaggguuucugcacaggg

SEQ ID NO: 560954 - RNA, 22 nt, Human
aagcacagaaaaggagcaugga

SEQ ID NO: 560955 - RNA, 22 nt, Human
ugccugccaugcagaaagcuga

SEQ ID NO: 560956 - RNA, 22 nt, Human
ccagauagaaaagaaggcagga

SEQ ID NO: 560957 - RNA, 18 nt, Human
gguggcucagucaugggg

SEQ ID NO: 560958 - RNA, 19 nt, Human
aagcuccagcagauccuuu

SEQ ID NO: 560959 - RNA, 22 nt, Human
ggcuucugguaaagaccacacc

SEQ ID NO: 560960 - RNA, 22 nt, Human
uggcagcagacaaaaggccauu

SEQ ID NO: 560961 - RNA, 22 nt, Human
cacuuuuaacaggagaauuccc

SEQ ID NO: 560962 - RNA, 22 nt, Human
cagcugccccgcuggcugacca

SEQ ID NO: 560963 - RNA, 22 nt, Human
ggcaggcugcuugggucauguc

SEQ ID NO: 560964 - RNA, 22 nt, Human
cauauacuuuucuauagcuuuc

SEQ ID NO: 560965 - RNA, 22 nt, Human
gugcauuucucauacacuaaau

SEQ ID NO: 560966 - RNA, 22 nt, Human
cagaugaggggcauauaacaau

SEQ ID NO: 560967 - RNA, 22 nt, Human
acacacuggcccccaguacuga

SEQ ID NO: 560968 - RNA, 22 nt, Human
cucagccccaauucuccccauu

SEQ ID NO: 560969 - RNA, 22 nt, Human
cccucaggagaugucagcugga

SEQ ID NO: 560970 - RNA, 22 nt, Human
agucucugggcaugguugugac

SEQ ID NO: 560971 - RNA, 22 nt, Human
ucaguggauuggaugagaucug

SEQ ID NO: 560972 - RNA, 22 nt, Human
agcaggcugccuuccaaagccu

SEQ ID NO: 560973 - RNA, 22 nt, Human
auacaucuugucagauucaugu

SEQ ID NO: 560974 - RNA, 22 nt, Human
caacuauagggagagugguuaa

SEQ ID NO: 560975 - RNA, 22 nt, Human
cucccuggcagccgcacuccug

SEQ ID NO: 560976 - RNA, 22 nt, Human
gaucaauacuauuaagaucaua

SEQ ID NO: 560977 - RNA, 22 nt, Human
ucacacauuucucaaguguagg

SEQ ID NO: 560978 - RNA, 22 nt, Human
gaaaccucuuagccucucuuug

SEQ ID NO: 560979 - RNA, 22 nt, Human
uggcucagcuuacuuuugaggg

SEQ ID NO: 560980 - RNA, 22 nt, Human
ugcaugcauguuuuuacccaca

SEQ ID NO: 560981 - RNA, 21 nt, Human
gacaggggaagaagcaaggag

SEQ ID NO: 560982 - RNA, 22 nt, Human
agggagaaugaccaagguauau

SEQ ID NO: 560983 - RNA, 22 nt, Human
uucaggauggaguaccuuuuau

SEQ ID NO: 560984 - RNA, 22 nt, Human
cuuccucacggugcaacaggaa

SEQ ID NO: 560985 - RNA, 22 nt, Human
cauuuagacauuugauuugggg

SEQ ID NO: 560986 - RNA, 22 nt, Human
gaggggcuggguagggcaaccc

SEQ ID NO: 560987 - RNA, 22 nt, Human
agcacacaguauuagccauugu

SEQ ID NO: 560988 - RNA, 22 nt, Human
ucucccaaggcacagaaagagu

SEQ ID NO: 560989 - RNA, 22 nt, Human
aaucaagaggcgauggauggaa

SEQ ID NO: 560990 - RNA, 22 nt, Human
agcugugguucugggcagcgac

SEQ ID NO: 560991 - RNA, 22 nt, Human
uaaguucagaguucucauuugu

SEQ ID NO: 560992 - RNA, 22 nt, Human
ggacagagcccugguggccuaa

SEQ ID NO: 560993 - RNA, 22 nt, Human
ccaaggaguagagcaggaagcu

SEQ ID NO: 560994 - RNA, 22 nt, Human
uugcugaaaucuaugacauccu

SEQ ID NO: 560995 - RNA, 22 nt, Human
aaggcacuuuucuaaagaccuu

SEQ ID NO: 560996 - RNA, 22 nt, Human
ucucagagaacaguuggugcuu

SEQ ID NO: 560997 - RNA, 22 nt, Human
uccugcagugugucuccugcac

SEQ ID NO: 560998 - RNA, 22 nt, Human
gccuggcaguugacaguuugcu

SEQ ID NO: 560999 - RNA, 22 nt, Human
ucuuaugggaaagauguaauua

SEQ ID NO: 561000 - RNA, 22 nt, Human
ccagaggagggcucugaugagg

SEQ ID NO: 561001 - RNA, 22 nt, Human
agagcuggcugguagcccugau

SEQ ID NO: 561002 - RNA, 22 nt, Human
gccucugcugcaagccugguug

SEQ ID NO: 561003 - RNA, 22 nt, Human
aacaguuuaugagauaugcuau

SEQ ID NO: 561004 - RNA, 21 nt, Human
agaauuaaauuggauuugugu

SEQ ID NO: 561005 - RNA, 22 nt, Human
cccugcacacucgugucuugac

SEQ ID NO: 561006 - RNA, 22 nt, Human
uuucauuauucaugcuaguuau

SEQ ID NO: 561007 - RNA, 22 nt, Human
gugggcuccccuggcaugucca

SEQ ID NO: 561008 - RNA, 22 nt, Human
gaggagaaugcgcaccacauau

SEQ ID NO: 561009 - RNA, 22 nt, Human
aagcagagaaaagcuuagguuc

SEQ ID NO: 561010 - RNA, 22 nt, Human
agggaaaggcugaugcuguggg

SEQ ID NO: 561011 - RNA, 22 nt, Human
ggccucugccucaucugggcac

SEQ ID NO: 561012 - RNA, 22 nt, Human
aaaucaguaaauguucauuaac

SEQ ID NO: 561013 - RNA, 22 nt, Human
gacagccucaugaggagcaaaa

SEQ ID NO: 561014 - RNA, 22 nt, Human
agguuauaugucauacugaagu

SEQ ID NO: 561015 - RNA, 22 nt, Human
cuguuuguuggcuauugacagu

SEQ ID NO: 561016 - RNA, 22 nt, Human
ucacagacgccuccccucgccu

SEQ ID NO: 561017 - RNA, 22 nt, Human
cuugaauccaaaugggagauga

SEQ ID NO: 561018 - RNA, 22 nt, Human
auggaguucugccagcgcugcu

SEQ ID NO: 561019 - RNA, 22 nt, Human
uuauguacaauguuaauguaaa

SEQ ID NO: 561020 - RNA, 22 nt, Human
cacugcccagcgucuuaggcac

SEQ ID NO: 561021 - RNA, 22 nt, Human
gcugagggcagccuccuagguc

SEQ ID NO: 561022 - RNA, 22 nt, Human
aaagccacugcauguguaguau

SEQ ID NO: 561023 - RNA, 22 nt, Human
aacugcuugagauauguuuguc

SEQ ID NO: 561024 - RNA, 22 nt, Human
uagcagugccaggauuuugcug

SEQ ID NO: 561025 - RNA, 22 nt, Human
ucuuuccuuagaauaauucuuu

SEQ ID NO: 561026 - RNA, 20 nt, Human
aagauucauuguaauuaggg

SEQ ID NO: 561027 - RNA, 22 nt, Human
agugaaagguugagaauauucu

SEQ ID NO: 561028 - RNA, 22 nt, Human
cuguugauuagaauuucacauc

SEQ ID NO: 561029 - RNA, 22 nt, Human
aucuagcaguguuauaauugga

SEQ ID NO: 561030 - RNA, 21 nt, Human
gguggccuuggugagagaccu

SEQ ID NO: 561031 - RNA, 22 nt, Human
cacaauuuccaagucauguuau

SEQ ID NO: 561032 - RNA, 22 nt, Human
ucagaggaggcauuuaaacaga

SEQ ID NO: 561033 - RNA, 22 nt, Human
agucucuuaauuuuuucuaagu

SEQ ID NO: 561034 - RNA, 22 nt, Human
aagcuagaugacguuauuuuuu

SEQ ID NO: 561035 - RNA, 22 nt, Human
gacauuuauuagaaaacuauca

SEQ ID NO: 561036 - RNA, 22 nt, Human
gaggcugaggguuagagaguca

SEQ ID NO: 561037 - RNA, 22 nt, Human
uaaggcauucucaugcugugaa

SEQ ID NO: 561038 - RNA, 22 nt, Human
ugugggcucccccucacucugu

SEQ ID NO: 561039 - RNA, 22 nt, Human
cucuuuccucagccacagucua

SEQ ID NO: 561040 - RNA, 22 nt, Human
ugggcagaauugugguaguuaa

SEQ ID NO: 561041 - RNA, 22 nt, Human
ccugggcaggccggacgcuggg

SEQ ID NO: 561042 - RNA, 22 nt, Human
caccaggcuggagugcagaggu

SEQ ID NO: 561043 - RNA, 22 nt, Human
uggagccauaacccuuucguac

SEQ ID NO: 561044 - RNA, 22 nt, Human
augauuuccaguuguugcuaag

SEQ ID NO: 561045 - RNA, 22 nt, Human
aaggugucggcagagccgcuuc

SEQ ID NO: 561046 - RNA, 23 nt, Human
ugaguguguucccugugagauuu

SEQ ID NO: 561047 - RNA, 22 nt, Human
caguuacauaaaugauaaaaug

SEQ ID NO: 561048 - RNA, 22 nt, Human
uccuguggagaggacuggaggu

SEQ ID NO: 561049 - RNA, 22 nt, Human
uuugaacuucuccauucugaug

SEQ ID NO: 561050 - RNA, 22 nt, Human
cuuugaaaggaagccacacagc

SEQ ID NO: 561051 - RNA, 22 nt, Human
cuccaggagcugugucuuucuu

SEQ ID NO: 561052 - RNA, 22 nt, Human
aaaguguugggaagaaagugca

SEQ ID NO: 561053 - RNA, 22 nt, Human
agauguuuuggagacacuaacc

SEQ ID NO: 561054 - RNA, 22 nt, Human
cagugaguaaguagacagcuua

SEQ ID NO: 561055 - RNA, 22 nt, Human
gagcugcacaucugaggcuaau

SEQ ID NO: 561056 - RNA, 19 nt, Human
ucuggcuccugccaggcug

SEQ ID NO: 561057 - RNA, 22 nt, Human
gacauuucaaucucauuauggg

SEQ ID NO: 561058 - RNA, 22 nt, Human
uggucuucuuuguugcuauuau

SEQ ID NO: 561059 - RNA, 22 nt, Human
cagggccuccccggcagucuuu

SEQ ID NO: 561060 - RNA, 22 nt, Human
gaggcagcaauaaaaagaauuu

SEQ ID NO: 561061 - RNA, 22 nt, Human
aaggcuuuugggaauuuucaac

SEQ ID NO: 561062 - RNA, 22 nt, Human
augcugaugcugcuuuugcccu

SEQ ID NO: 561063 - RNA, 22 nt, Human
uggggcuggggaucuugagccu

SEQ ID NO: 561064 - RNA, 22 nt, Human
uagcugccuuugggcuccugcu

SEQ ID NO: 561065 - RNA, 22 nt, Human
ccagcucucaaggcucccuggg

SEQ ID NO: 561066 - RNA, 22 nt, Human
uccugggaagacugugaggaca

SEQ ID NO: 561067 - RNA, 22 nt, Human
cagagaaagggugaauuccuuc

SEQ ID NO: 561068 - RNA, 22 nt, Human
acucugagcaucccaagucuua

SEQ ID NO: 561069 - RNA, 22 nt, Human
uggagcagaggaagaaggcuuu

SEQ ID NO: 561070 - RNA, 22 nt, Human
uggcucuguuuguuaacuagac

SEQ ID NO: 561071 - RNA, 22 nt, Human
cauuccuuaacguggggagucu

SEQ ID NO: 561072 - RNA, 18 nt, Human
ugaguggaaugagggggc

SEQ ID NO: 561073 - RNA, 22 nt, Human
uaaguucauaagcuuauucuua

SEQ ID NO: 561074 - RNA, 22 nt, Human
guacauguugguuguuuccagu

SEQ ID NO: 561075 - RNA, 22 nt, Human
aaagaacuaccuguaugauauu

SEQ ID NO: 561076 - RNA, 17 nt, Human
gaauuucuuggucaaaa

SEQ ID NO: 561077 - RNA, 22 nt, Human
ucgggcucgcucuccuagcgga

SEQ ID NO: 561078 - RNA, 22 nt, Human
cucccaagggguaagggagcug

SEQ ID NO: 561079 - RNA, 22 nt, Human
aauuaugauuggucuaaaccag

SEQ ID NO: 561080 - RNA, 22 nt, Human
caaagaugcugauguuggauca

SEQ ID NO: 561081 - RNA, 22 nt, Human
cugcucugaguauuaacggagg

SEQ ID NO: 561082 - RNA, 22 nt, Human
ugcuucuggguaggccucagga

SEQ ID NO: 561083 - RNA, 22 nt, Human
ggucagagggugggcugccugu

SEQ ID NO: 561084 - RNA, 22 nt, Human
uuucacauuggcuucuauuucu

SEQ ID NO: 561085 - RNA, 22 nt, Human
auuuucauggcuucugcucagu

SEQ ID NO: 561086 - RNA, 22 nt, Human
ugaaaugauguacaagaaggca

SEQ ID NO: 561087 - RNA, 18 nt, Human
ugaacagaugaguugaag

SEQ ID NO: 561088 - RNA, 22 nt, Human
ggggagugacgcagggccauag

SEQ ID NO: 561089 - RNA, 22 nt, Human
acuuuuugcauaguaagugucu

SEQ ID NO: 561090 - RNA, 22 nt, Human
cugggcagugguggcccuuccc

SEQ ID NO: 561091 - RNA, 22 nt, Human
uaaacaagcugucugauauucu

SEQ ID NO: 561092 - RNA, 22 nt, Human
uggugagacaggaucaaccccu

SEQ ID NO: 561093 - RNA, 17 nt, Human
uguggccuucugagcuu

SEQ ID NO: 561094 - RNA, 22 nt, Human
aagaggggugugugucaaccca

SEQ ID NO: 561095 - RNA, 22 nt, Human
uuaacuauuauuagcaucuuug

SEQ ID NO: 561096 - RNA, 22 nt, Human
agcagguguuggcugggccauc

SEQ ID NO: 561097 - RNA, 20 nt, Human
ucacuaguaaccaucugcuu

SEQ ID NO: 561098 - RNA, 22 nt, Human
ccagucacagguguguuuauau

SEQ ID NO: 561099 - RNA, 22 nt, Human
gccugugcauagcagcggacuc

SEQ ID NO: 561100 - RNA, 22 nt, Human
cccaggaccgcgcggcugagcg

SEQ ID NO: 561101 - RNA, 22 nt, Human
ugagaggcagaauggugccugc

SEQ ID NO: 561102 - RNA, 22 nt, Human
cuguauuucccacauucucuau

SEQ ID NO: 561103 - RNA, 22 nt, Human
gugccuggcacacagaaggcaa

SEQ ID NO: 561104 - RNA, 21 nt, Human
ccugugugucugacugggcua

SEQ ID NO: 561105 - RNA, 22 nt, Human
caaagugcuggaauuacaggug

SEQ ID NO: 561106 - RNA, 22 nt, Human
accacuguaucuccagcacauu

SEQ ID NO: 561107 - RNA, 22 nt, Human
ugaaacaaugugaaguugcuga

SEQ ID NO: 561108 - RNA, 22 nt, Human
ugggccagcacugggugcucau

SEQ ID NO: 561109 - RNA, 22 nt, Human
aguggcaguggggcagggcccu

SEQ ID NO: 561110 - RNA, 22 nt, Human
aaguguguauuguuuaugcugc

SEQ ID NO: 561111 - RNA, 22 nt, Human
cacauaaucaccaaguccuuuc

SEQ ID NO: 561112 - RNA, 22 nt, Human
auguccuucuccucuuaccugc

SEQ ID NO: 561113 - RNA, 22 nt, Human
ugggggugacuaucucgggaau

SEQ ID NO: 561114 - RNA, 22 nt, Human
ucucagugcagagaggcuaucu

SEQ ID NO: 561115 - RNA, 22 nt, Human
uaaggcacccgugagcugccag

SEQ ID NO: 561116 - RNA, 22 nt, Human
uuguugucauuguagaggauuu

SEQ ID NO: 561117 - RNA, 22 nt, Human
uuacauauuauccaaaacugcu

SEQ ID NO: 561118 - RNA, 22 nt, Human
acucccagguugccuggcaggc

SEQ ID NO: 561119 - RNA, 22 nt, Human
aaccaggacaauuuugaaagua

SEQ ID NO: 561120 - RNA, 20 nt, Human
uggggccuguuucugugguu

SEQ ID NO: 561121 - RNA, 22 nt, Human
gggcacagaagucuaagacauc

SEQ ID NO: 561122 - RNA, 22 nt, Human
ugcaggcaggggaugagcagcc

SEQ ID NO: 561123 - RNA, 22 nt, Human
augacacauaaaacaaggacug

SEQ ID NO: 561124 - RNA, 21 nt, Human
uggccaaacuggagcauuuga

SEQ ID NO: 561125 - RNA, 22 nt, Human
ggguccuggaaucugcauuuua

SEQ ID NO: 561126 - RNA, 22 nt, Human
cacaccaaaguauuugguauuu

SEQ ID NO: 561127 - RNA, 22 nt, Human
gacaucaauucagcauuuuaag

SEQ ID NO: 561128 - RNA, 22 nt, Human
ggcagcuggccuccucgcccac

SEQ ID NO: 561129 - RNA, 22 nt, Human
aguggcagaagucacuggguag

SEQ ID NO: 561130 - RNA, 22 nt, Human
uucugaaagucuuuuuaaguua

SEQ ID NO: 561131 - RNA, 22 nt, Human
auucuacauuuggagugauguc

SEQ ID NO: 561132 - RNA, 22 nt, Human
acugagaguugaaaagggagga

SEQ ID NO: 561133 - RNA, 20 nt, Human
auacacaugcagacagaugc

SEQ ID NO: 561134 - RNA, 22 nt, Human
cuucuggguaauucuucuucau

SEQ ID NO: 561135 - RNA, 22 nt, Human
cuggcucccagcuuucagggag

SEQ ID NO: 561136 - RNA, 18 nt, Human
auccaacuaucgcucauu

SEQ ID NO: 561137 - RNA, 22 nt, Human
ccagagagaaaauggagggcca

SEQ ID NO: 561138 - RNA, 22 nt, Human
ucauuuguucaucugcucuucu

SEQ ID NO: 561139 - RNA, 22 nt, Human
ggaggaagcacacggcuuguau

SEQ ID NO: 561140 - RNA, 22 nt, Human
gaauacaaauaauaccaaggug

SEQ ID NO: 561141 - RNA, 22 nt, Human
accugggaggcggagguugcag

SEQ ID NO: 561142 - RNA, 22 nt, Human
auuguuaaacugaagcauuacu

SEQ ID NO: 561143 - RNA, 22 nt, Human
cugugcaagacuuacuuuaaua

SEQ ID NO: 561144 - RNA, 22 nt, Human
gcugagugagguccagagcuug

SEQ ID NO: 561145 - RNA, 22 nt, Human
uuaacagacuugggauuuucua

SEQ ID NO: 561146 - RNA, 17 nt, Human
caauuucauagguuuug

SEQ ID NO: 561147 - RNA, 22 nt, Human
uacauaauaaggggcauggugu

SEQ ID NO: 561148 - RNA, 22 nt, Human
uuccaacuucccaucccugcug

SEQ ID NO: 561149 - RNA, 22 nt, Human
guggauggauugaggcaguggg

SEQ ID NO: 561150 - RNA, 22 nt, Human
agaggggcucaagcaguggucu

SEQ ID NO: 561151 - RNA, 22 nt, Human
uuuucauuguaaaucaggaaac

SEQ ID NO: 561152 - RNA, 22 nt, Human
ucuuccaguguagacaucugcc

SEQ ID NO: 561153 - RNA, 22 nt, Human
acagggccagccugggaccugg

SEQ ID NO: 561154 - RNA, 22 nt, Human
agcaggcuuucaagagucuucu

SEQ ID NO: 561155 - RNA, 23 nt, Human
cugcagccgcguggggacgugga

SEQ ID NO: 561156 - RNA, 22 nt, Human
gauucagugggcuuugggacag

SEQ ID NO: 561157 - RNA, 23 nt, Human
aggauccugguacaggagcagag

SEQ ID NO: 561158 - RNA, 22 nt, Human
caggcuuuacuuucucucugaa

SEQ ID NO: 561159 - RNA, 22 nt, Human
gcuggccauagaagccaaagag

SEQ ID NO: 561160 - RNA, 20 nt, Human
auacacauauucuugcaacu

SEQ ID NO: 561161 - RNA, 22 nt, Human
ccucuucugagugagacucccu

SEQ ID NO: 561162 - RNA, 21 nt, Human
gcagaaaggaaucuuaggucc

SEQ ID NO: 561163 - RNA, 22 nt, Human
gcccaagcuggacugcaguggc

SEQ ID NO: 561164 - RNA, 22 nt, Human
cauucacaucuuguuccaucac

SEQ ID NO: 561165 - RNA, 22 nt, Human
aggugcuagguguguaguggag

SEQ ID NO: 561166 - RNA, 22 nt, Human
ccagugcccagucucccugguc

SEQ ID NO: 561167 - RNA, 22 nt, Human
gccaggcuggcaaaaggaaacc

SEQ ID NO: 561168 - RNA, 22 nt, Human
agggaaauuaaugugagcaaug

SEQ ID NO: 561169 - RNA, 22 nt, Human
ugcacgugggcucucugcucuu

SEQ ID NO: 561170 - RNA, 22 nt, Human
caguuuuucaaaauuacaugau

SEQ ID NO: 561171 - RNA, 22 nt, Human
gaggccaaguuggagaccaggu

SEQ ID NO: 561172 - RNA, 22 nt, Human
uucaagaugacccagucacacg

SEQ ID NO: 561173 - RNA, 23 nt, Human
ucaucaaaggaaguacgugucac

SEQ ID NO: 561174 - RNA, 22 nt, Human
uagaagagacauagccuguggu

SEQ ID NO: 561175 - RNA, 22 nt, Human
cuaucuuuuguucauuuugagu

SEQ ID NO: 561176 - RNA, 20 nt, Human
aggcucagauacccagggaa

SEQ ID NO: 561177 - RNA, 22 nt, Human
cucaccacagagccuguccagc

SEQ ID NO: 561178 - RNA, 22 nt, Human
cuucugggugccugugaguguu

SEQ ID NO: 561179 - RNA, 22 nt, Human
agcaaggauuauccugggaagg

SEQ ID NO: 561180 - RNA, 22 nt, Human
ugcuuuauagacaaggaaguag

SEQ ID NO: 561181 - RNA, 22 nt, Human
uuauccaaacuggugaaucauu

SEQ ID NO: 561182 - RNA, 23 nt, Human
uuguacagcccagauuccucuuc

SEQ ID NO: 561183 - RNA, 22 nt, Human
ugccuuuugaagccucacaggu

SEQ ID NO: 561184 - RNA, 22 nt, Human
ccucugaggugagcccagcugg

SEQ ID NO: 561185 - RNA, 22 nt, Human
ggugcccugccaggaugugcca

SEQ ID NO: 561186 - RNA, 22 nt, Human
cuguccuaugaguacucacuag

SEQ ID NO: 561187 - RNA, 22 nt, Human
gacagggcaagacucugucuaa

SEQ ID NO: 561188 - RNA, 22 nt, Human
auacaaaguauuaauccuggau

SEQ ID NO: 561189 - RNA, 22 nt, Human
ucccacugcuuugcucugcuca

SEQ ID NO: 561190 - RNA, 22 nt, Human
ggcuucccaaggagccaggaug

SEQ ID NO: 561191 - RNA, 22 nt, Human
ccacauuuggagaagauacuuu

SEQ ID NO: 561192 - RNA, 22 nt, Human
ccagagaguaucauggagagua

SEQ ID NO: 561193 - RNA, 22 nt, Human
uuuaaagugcugcuccuauccu

SEQ ID NO: 561194 - RNA, 22 nt, Human
acacauaagaaacuacaaagag

SEQ ID NO: 561195 - RNA, 22 nt, Human
guuaaauaaccucauguccguu

SEQ ID NO: 561196 - RNA, 22 nt, Human
uacacuauuuuacugauacaaa

SEQ ID NO: 561197 - RNA, 22 nt, Human
uaaaguucagugcaugaaugug

SEQ ID NO: 561198 - RNA, 22 nt, Human
ccuggcagcaggugggcccgug

SEQ ID NO: 561199 - RNA, 22 nt, Human
uauauagaaaagcagauguugg

SEQ ID NO: 561200 - RNA, 22 nt, Human
acaaauuucauaggcaaauuuu

SEQ ID NO: 561201 - RNA, 22 nt, Human
ucagaauuuuaaaccaaggaaa

SEQ ID NO: 561202 - RNA, 22 nt, Human
uuacauucaaggaacucauucu

SEQ ID NO: 561203 - RNA, 22 nt, Human
cugcagagcuaggcugagugaa

SEQ ID NO: 561204 - RNA, 22 nt, Human
aagggcugagcacagugagcca

SEQ ID NO: 561205 - RNA, 22 nt, Human
aacacaaagaagcugcaggauc

SEQ ID NO: 561206 - RNA, 22 nt, Human
cagcugccuguauuguccucau

SEQ ID NO: 561207 - RNA, 22 nt, Human
aaucagaaauucuacaucacaa

SEQ ID NO: 561208 - RNA, 22 nt, Human
aacuagaaaacaagaugcugau

SEQ ID NO: 561209 - RNA, 22 nt, Human
gccugagauucugcauuucuaa

SEQ ID NO: 561210 - RNA, 22 nt, Human
cuggauucucaucagagccaga

SEQ ID NO: 561211 - RNA, 22 nt, Human
ucucagggagggcgagucagcg

SEQ ID NO: 561212 - RNA, 22 nt, Human
agacccugcaccucucgugggc

SEQ ID NO: 561213 - RNA, 22 nt, Human
gaugguuugguaaaaguauguu

SEQ ID NO: 561214 - RNA, 22 nt, Human
aggucagcugcugauaggcagc

SEQ ID NO: 561215 - RNA, 22 nt, Human
agcagcuguacuuucaucuguu

SEQ ID NO: 561216 - RNA, 22 nt, Human
acaugcuuucuagguccuucug

SEQ ID NO: 561217 - RNA, 20 nt, Human
uccuucaggcagggccuagu

SEQ ID NO: 561218 - RNA, 22 nt, Human
gauaaaauauguggccuuuagu

SEQ ID NO: 561219 - RNA, 21 nt, Human
uggcauggagguagcagugug

SEQ ID NO: 561220 - RNA, 22 nt, Human
uucaagucuguuucauugcaug

SEQ ID NO: 561221 - RNA, 21 nt, Human
aagcaggacauaugaugcccu

SEQ ID NO: 561222 - RNA, 22 nt, Human
uuauuuauucauucugucuguc

SEQ ID NO: 561223 - RNA, 22 nt, Human
aacuagaacgucuaguugcugg

SEQ ID NO: 561224 - RNA, 22 nt, Human
uauuccagguuucuuguuguau

SEQ ID NO: 561225 - RNA, 22 nt, Human
cuacauuuguucaaauaagcug

SEQ ID NO: 561226 - RNA, 22 nt, Human
aacagcuuugagcaguucugua

SEQ ID NO: 561227 - RNA, 22 nt, Human
uuacuuuggauggucaagaaag

SEQ ID NO: 561228 - RNA, 20 nt, Human
aaggcacuaugucugcuagc

SEQ ID NO: 561229 - RNA, 22 nt, Human
ggcuccugaugcucagauuuca

SEQ ID NO: 561230 - RNA, 22 nt, Human
acuucauguuucuauuagcuca

SEQ ID NO: 561231 - RNA, 22 nt, Human
acuccuggggcugccaucacag

SEQ ID NO: 561232 - RNA, 22 nt, Human
acucuacagaaugaauaccugu

SEQ ID NO: 561233 - RNA, 22 nt, Human
ucccauauaugcaaaaauguaa

SEQ ID NO: 561234 - RNA, 22 nt, Human
gaaauauuguacuggagauguu

SEQ ID NO: 561235 - RNA, 22 nt, Human
acagagagguaaaauauauagu

SEQ ID NO: 561236 - RNA, 22 nt, Human
ucuggcucccagccugcucuca

SEQ ID NO: 561237 - RNA, 22 nt, Human
cagcuucccuuggcugagcaga

SEQ ID NO: 561238 - RNA, 22 nt, Human
cagucucagaggugggaguggg

SEQ ID NO: 561239 - RNA, 22 nt, Human
auucacaguauggacgaaauga

SEQ ID NO: 561240 - RNA, 22 nt, Human
uauucucagugcuauaaguaga

SEQ ID NO: 561241 - RNA, 22 nt, Human
gggugggaucuguggagccuca

SEQ ID NO: 561242 - RNA, 22 nt, Human
acacuuuuaagacuuuaaugaa

SEQ ID NO: 561243 - RNA, 22 nt, Human
agcauuuaugacuaauguaaaa

SEQ ID NO: 561244 - RNA, 22 nt, Human
ugcuuccuucccguucuucucc

SEQ ID NO: 561245 - RNA, 22 nt, Human
uuuguaaauagcaguacucaug

SEQ ID NO: 561246 - RNA, 22 nt, Human
ccccuggguccaggcuucucug

SEQ ID NO: 561247 - RNA, 22 nt, Human
uugccugugaggauucugguug

SEQ ID NO: 561248 - RNA, 22 nt, Human
agcaggugguaggcagucagca

SEQ ID NO: 561249 - RNA, 22 nt, Human
aaagccuugcccgucacuggga

SEQ ID NO: 561250 - RNA, 22 nt, Human
cagugucuccagaugcuccaau

SEQ ID NO: 561251 - RNA, 22 nt, Human
uagaaauccccagucucauagu

SEQ ID NO: 561252 - RNA, 22 nt, Human
caagaauaaccagacaauagca

SEQ ID NO: 561253 - RNA, 22 nt, Human
aagcuuuaugacuuggagacag

SEQ ID NO: 561254 - RNA, 22 nt, Human
gagaagaacuugggcaaaguca

SEQ ID NO: 561255 - RNA, 22 nt, Human
guuugaaaaaagcaguauguaa

SEQ ID NO: 561256 - RNA, 22 nt, Human
ucgccagggaugcuguaaggaa

SEQ ID NO: 561257 - RNA, 22 nt, Human
uauuuccaggccccacucuaga

SEQ ID NO: 561258 - RNA, 22 nt, Human
cuuaaaaguugcuucccuaacu

SEQ ID NO: 561259 - RNA, 22 nt, Human
aaacacaccuuuggaacuguga

SEQ ID NO: 561260 - RNA, 22 nt, Human
auaaacagaguaguugcuacug

SEQ ID NO: 561261 - RNA, 22 nt, Human
uucuuucagaacacaagugauu

SEQ ID NO: 561262 - RNA, 22 nt, Human
caguacuuuucuggcuuucuac

SEQ ID NO: 561263 - RNA, 23 nt, Human
accaugaugggagugcaaauaag

SEQ ID NO: 561264 - RNA, 22 nt, Human
uugugugucuucuucacugccc

SEQ ID NO: 561265 - RNA, 22 nt, Human
caggaugagaggcccagggaag

SEQ ID NO: 561266 - RNA, 22 nt, Human
caggcccugggcaggcacagag

SEQ ID NO: 561267 - RNA, 22 nt, Human
uaaagacaaacccacuaggguu

SEQ ID NO: 561268 - RNA, 22 nt, Human
ugcuccuggcuccuucccuaac

SEQ ID NO: 561269 - RNA, 22 nt, Human
uuccugugaagccgguggucuc

SEQ ID NO: 561270 - RNA, 22 nt, Human
uacccagcccaugccuaccuca

SEQ ID NO: 561271 - RNA, 22 nt, Human
ggagcugugcugggugaucagg

SEQ ID NO: 561272 - RNA, 22 nt, Human
agccaggggagucagcugcugg

SEQ ID NO: 561273 - RNA, 22 nt, Human
ucaguuuucaauuucaucagag

SEQ ID NO: 561274 - RNA, 22 nt, Human
agugugagccuacaggccaaag

SEQ ID NO: 561275 - RNA, 20 nt, Human
agcuugccccugucuuugcc

SEQ ID NO: 561276 - RNA, 22 nt, Human
ucagcuuuuaaaaacaagaagu

SEQ ID NO: 561277 - RNA, 22 nt, Human
acuggggagugguuuugggaag

SEQ ID NO: 561278 - RNA, 22 nt, Human
aggacugacuuuugccaugaaa

SEQ ID NO: 561279 - RNA, 22 nt, Human
agcucugguuauugaagcaggg

SEQ ID NO: 561280 - RNA, 22 nt, Human
ugucaucagcauauaagacagu

SEQ ID NO: 561281 - RNA, 23 nt, Human
aguguuccaguugguugagagug

SEQ ID NO: 561282 - RNA, 22 nt, Human
acuauaacccauggaauauaag

SEQ ID NO: 561283 - RNA, 22 nt, Human
gggaggaaaugugcagcgaauu

SEQ ID NO: 561284 - RNA, 22 nt, Human
uuagcaucugcuguaagcuuau

SEQ ID NO: 561285 - RNA, 22 nt, Human
agcugcaggcccaugcucaguc

SEQ ID NO: 561286 - RNA, 22 nt, Human
aggcacagagaaugcccuccau

SEQ ID NO: 561287 - RNA, 22 nt, Human
aauguuuggcuagauagaugga

SEQ ID NO: 561288 - RNA, 22 nt, Human
aacuagaacgagaaagcugaac

SEQ ID NO: 561289 - RNA, 22 nt, Human
ugcaguggaaagacucagacuu

SEQ ID NO: 561290 - RNA, 22 nt, Human
uguaugcagcaaaacaauuagu

SEQ ID NO: 561291 - RNA, 22 nt, Human
gggcucugggaugcucuuagag

SEQ ID NO: 561292 - RNA, 22 nt, Human
uucuuaagaggaacauuuuugu

SEQ ID NO: 561293 - RNA, 22 nt, Human
uuaaacagguuuuugaauggcc

SEQ ID NO: 561294 - RNA, 18 nt, Human
gagguccugcucuagccc

SEQ ID NO: 561295 - RNA, 22 nt, Human
ucccaagauuagguuggaaagg

SEQ ID NO: 561296 - RNA, 22 nt, Human
cagcuguucacauuuccaaaac

SEQ ID NO: 561297 - RNA, 22 nt, Human
gaggugggaugugugugcuacu

SEQ ID NO: 561298 - RNA, 22 nt, Human
cuaagauaaaugcuuugaugaa

SEQ ID NO: 561299 - RNA, 22 nt, Human
uaauacacugcuuuuuguaacu

SEQ ID NO: 561300 - RNA, 22 nt, Human
agagugcaaccgaaacaagcag

SEQ ID NO: 561301 - RNA, 22 nt, Human
cugccaaggcuggggaggacaa

SEQ ID NO: 561302 - RNA, 22 nt, Human
agcagcaacuuauuuuucuuau

SEQ ID NO: 561303 - RNA, 22 nt, Human
uguguccauucaggcacugacc

SEQ ID NO: 561304 - RNA, 22 nt, Human
aaguuaugaaauuuggacagcu

SEQ ID NO: 561305 - RNA, 16 nt, Human
uguaugaacgucucca

SEQ ID NO: 561306 - RNA, 16 nt, Human
ugguggggaggacagc

SEQ ID NO: 561307 - RNA, 22 nt, Human
gucccauuuucuacuauggaau

SEQ ID NO: 561308 - RNA, 22 nt, Human
aaaggucauugaaaaggaggaa

SEQ ID NO: 561309 - RNA, 22 nt, Human
uaguaaaucucagaaaaagauc

SEQ ID NO: 561310 - RNA, 22 nt, Human
uucaacaugcaaacuuugggag

SEQ ID NO: 561311 - RNA, 22 nt, Human
cacacaucaaccuagacauugu

SEQ ID NO: 561312 - RNA, 22 nt, Human
agguggggcccaccaauuugca

SEQ ID NO: 561313 - RNA, 22 nt, Human
gcugucuccauagcuguguguc

SEQ ID NO: 561314 - RNA, 22 nt, Human
agcagcuuuaagucacugguua

SEQ ID NO: 561315 - RNA, 22 nt, Human
aguuuauguaaaauuaguaaug

SEQ ID NO: 561316 - RNA, 22 nt, Human
ucagaauugucuggggaauguu

SEQ ID NO: 561317 - RNA, 22 nt, Human
gcugccucugcgacucugggcg

SEQ ID NO: 561318 - RNA, 22 nt, Human
aagcacauuaaggaacauugaa

SEQ ID NO: 561319 - RNA, 22 nt, Human
cccacacacauuuaugauagga

SEQ ID NO: 561320 - RNA, 22 nt, Human
cucacugacgaggaagcugaga

SEQ ID NO: 561321 - RNA, 22 nt, Human
aguguuaaggcugguugcuaua

SEQ ID NO: 561322 - RNA, 22 nt, Human
ucuuuguauguauguuucaaag

SEQ ID NO: 561323 - RNA, 21 nt, Human
uagcagagaucauuuucuccu

SEQ ID NO: 561324 - RNA, 22 nt, Human
uuugcaaagugcuugcagagua

SEQ ID NO: 561325 - RNA, 21 nt, Human
acugccuggggugcuggccaa

SEQ ID NO: 561326 - RNA, 22 nt, Human
uuggugaacacauacacauuuu

SEQ ID NO: 561327 - RNA, 22 nt, Human
gagacacacacaggagguggca

SEQ ID NO: 561328 - RNA, 22 nt, Human
uucaugaagggugaauauaguc

SEQ ID NO: 561329 - RNA, 20 nt, Human
ugugggccuucggcgugcuc

SEQ ID NO: 561330 - RNA, 22 nt, Human
uuacaaagugcugcaccauuuu

SEQ ID NO: 561331 - RNA, 20 nt, Human
uuugucuguuaaguguuucu

SEQ ID NO: 561332 - RNA, 22 nt, Human
ccuggcuguuugagcggggaau

SEQ ID NO: 561333 - RNA, 22 nt, Human
gcucugcuggaaguucucugga

SEQ ID NO: 561334 - RNA, 22 nt, Human
acccuggguucccgcagcacca

SEQ ID NO: 561335 - RNA, 22 nt, Human
acuacauuuccugaccccugug

SEQ ID NO: 561336 - RNA, 22 nt, Human
auaaggaaugauguaucaguuu

SEQ ID NO: 561337 - RNA, 22 nt, Human
gccugugcuguucccucugcca

SEQ ID NO: 561338 - RNA, 22 nt, Human
aggccugggcaagaaggggcgu

SEQ ID NO: 561339 - RNA, 22 nt, Human
ggcuuuauguuuuucauguggu

SEQ ID NO: 561340 - RNA, 22 nt, Human
aaagcagaacugagagagcugg

SEQ ID NO: 561341 - RNA, 22 nt, Human
auaugaaaauguuuuagcugua

SEQ ID NO: 561342 - RNA, 19 nt, Human
ggcugagcgccuuggcugc

SEQ ID NO: 561343 - RNA, 22 nt, Human
aacaugaagguaggaugguuuu

SEQ ID NO: 561344 - RNA, 22 nt, Human
caugccaguuuugagaugcacc

SEQ ID NO: 561345 - RNA, 22 nt, Human
guggccagcaagugcugccucu

SEQ ID NO: 561346 - RNA, 22 nt, Human
ccugccuggggacaaaggaggg

SEQ ID NO: 561347 - RNA, 22 nt, Human
aggacaggauugagcugaacug

SEQ ID NO: 561348 - RNA, 22 nt, Human
agcugcuguccuaggcacugua

SEQ ID NO: 561349 - RNA, 22 nt, Human
ggcuacagggccuggccaaggu

SEQ ID NO: 561350 - RNA, 22 nt, Human
aaaagguuuugaguacaaauau

SEQ ID NO: 561351 - RNA, 22 nt, Human
uccaucagauucccuccugaga

SEQ ID NO: 561352 - RNA, 22 nt, Human
acacagccaggguaguaaggcu

SEQ ID NO: 561353 - RNA, 22 nt, Human
uucugggcauguuacauucugu

SEQ ID NO: 561354 - RNA, 22 nt, Human
augcaagagauggacuuguguu

SEQ ID NO: 561355 - RNA, 22 nt, Human
aggcucugaucagguggcugug

SEQ ID NO: 561356 - RNA, 23 nt, Human
aggcuggcuucaggagccucucc

SEQ ID NO: 561357 - RNA, 22 nt, Human
ucucacagugcaggucugucuc

SEQ ID NO: 561358 - RNA, 22 nt, Human
uagagucagagaaucauuacag

SEQ ID NO: 561359 - RNA, 22 nt, Human
cagaggaaguuccuugaugaga

SEQ ID NO: 561360 - RNA, 22 nt, Human
gcuccagaugaaaggccagagg

SEQ ID NO: 561361 - RNA, 22 nt, Human
caguguccucagccagcagcua

SEQ ID NO: 561362 - RNA, 22 nt, Human
cagaggccuauccaguguccau

SEQ ID NO: 561363 - RNA, 22 nt, Human
ugagagagcgccugggaucauu

SEQ ID NO: 561364 - RNA, 22 nt, Human
uucuguuuugcacagacuugaa

SEQ ID NO: 561365 - RNA, 22 nt, Human
ugcagagguguugcugagauaa

SEQ ID NO: 561366 - RNA, 23 nt, Human
ggccauggagacuuagaaugggc

SEQ ID NO: 561367 - RNA, 22 nt, Human
cucugagauaguuucuaucaau

SEQ ID NO: 561368 - RNA, 22 nt, Human
ucucuggaagcgcagaucuguu

SEQ ID NO: 561369 - RNA, 21 nt, Human
ucuugaaaauuguagcaguuu

SEQ ID NO: 561370 - RNA, 22 nt, Human
gccuggcaccacagccuuucag

SEQ ID NO: 561371 - RNA, 22 nt, Human
augauugcagcccuacagcugu

SEQ ID NO: 561372 - RNA, 22 nt, Human
gugcucuggcuggucucccggu

SEQ ID NO: 561373 - RNA, 19 nt, Human
uuucccagcccuugcugug

SEQ ID NO: 561374 - RNA, 22 nt, Human
aaaaacuguaauuacuuuugca

SEQ ID NO: 561375 - RNA, 20 nt, Human
auugugcagcccuuggcaga

SEQ ID NO: 561376 - RNA, 22 nt, Human
ccauguggcuagcgugccugca

SEQ ID NO: 561377 - RNA, 22 nt, Human
aaggaagacuugagaagguucc

SEQ ID NO: 561378 - RNA, 22 nt, Human
auucuccagcucacuguccaua

SEQ ID NO: 561379 - RNA, 19 nt, Human
uggcagggagugauauuag

SEQ ID NO: 561380 - RNA, 22 nt, Human
uucauuugaguuuauaguugcu

SEQ ID NO: 561381 - RNA, 22 nt, Human
uccugcagccaagggucaucga

SEQ ID NO: 561382 - RNA, 22 nt, Human
ggccugagucacaucaggagag

SEQ ID NO: 561383 - RNA, 22 nt, Human
aaacaaugagcuuuuacacacu

SEQ ID NO: 561384 - RNA, 22 nt, Human
ucuggaugcucugagcccaagg

SEQ ID NO: 561385 - RNA, 22 nt, Human
uggaggaaucagggcuuaggcu

SEQ ID NO: 561386 - RNA, 22 nt, Human
caaaguccauaguuuacaauag

SEQ ID NO: 561387 - RNA, 22 nt, Human
uuccacauuccuuacauucaua

SEQ ID NO: 561388 - RNA, 22 nt, Human
ucagaggaacuggacuaaagcc

SEQ ID NO: 561389 - RNA, 22 nt, Human
uaauacauguauuccagagagu

SEQ ID NO: 561390 - RNA, 22 nt, Human
cugcugucuuuauuucacugcu

SEQ ID NO: 561391 - RNA, 22 nt, Human
ccagcugguuaaaauagagaaa

SEQ ID NO: 561392 - RNA, 22 nt, Human
ccugggcucugaggagggaguc

SEQ ID NO: 561393 - RNA, 22 nt, Human
cugccagcacugccuccugagg

SEQ ID NO: 561394 - RNA, 19 nt, Human
gcuggcuggaggagggaca

SEQ ID NO: 561395 - RNA, 22 nt, Human
gaggaagaagcaaaccagcuaa

SEQ ID NO: 561396 - RNA, 22 nt, Human
gcaggagccaggccgagcuggu

SEQ ID NO: 561397 - RNA, 22 nt, Human
aggaagccaugguggacgucua

SEQ ID NO: 561398 - RNA, 16 nt, Human
cagccugcagugguca

SEQ ID NO: 561399 - RNA, 22 nt, Human
uaacauucccuuugugccaagg

SEQ ID NO: 561400 - RNA, 23 nt, Human
uggcaccaggcauucuaggggua

SEQ ID NO: 561401 - RNA, 20 nt, Human
ggaagcagagaacuguuuuc

SEQ ID NO: 561402 - RNA, 23 nt, Human
ugagccuguuaauacuggcucug

SEQ ID NO: 561403 - RNA, 22 nt, Human
aguauucuggaauucuauguga

SEQ ID NO: 561404 - RNA, 22 nt, Human
gagacguggccuuugccugagc

SEQ ID NO: 561405 - RNA, 22 nt, Human
ugaaggagggaagaaggcucug

SEQ ID NO: 561406 - RNA, 22 nt, Human
gcauuucaaaauuccaggcaag

SEQ ID NO: 561407 - RNA, 22 nt, Human
ggcagccauggacacuggcuag

SEQ ID NO: 561408 - RNA, 19 nt, Human
uucaacaugcugaggcagc

SEQ ID NO: 561409 - RNA, 22 nt, Human
ggugaagcucuaccauucccag

SEQ ID NO: 561410 - RNA, 22 nt, Human
aaggcacuuuuccugagaugau

SEQ ID NO: 561411 - RNA, 22 nt, Human
ucagaggagaaguugggaaaau

SEQ ID NO: 561412 - RNA, 22 nt, Human
cacaugcuccauacagaauggg

SEQ ID NO: 561413 - RNA, 22 nt, Human
gugggagcuuuggcaucaggcu

SEQ ID NO: 561414 - RNA, 22 nt, Human
auuccuaaaguaauacacuaga

SEQ ID NO: 561415 - RNA, 22 nt, Human
cugccucuauaggaguccacca

SEQ ID NO: 561416 - RNA, 22 nt, Human
aggcccaaaagaaaccacuggg

SEQ ID NO: 561417 - RNA, 22 nt, Human
gaugcugggaccacagaguguu

SEQ ID NO: 561418 - RNA, 22 nt, Human
uaucuuuagaggaagagaaucu

SEQ ID NO: 561419 - RNA, 22 nt, Human
uuacaucauugagacauacaua

SEQ ID NO: 561420 - RNA, 22 nt, Human
cacaaugcguacauauaucaaa

SEQ ID NO: 561421 - RNA, 22 nt, Human
ucccucuaaacuguaagauucu

SEQ ID NO: 561422 - RNA, 22 nt, Human
agugcagaguacauuuguggca

SEQ ID NO: 561423 - RNA, 22 nt, Human
agcaggagcccuuaucaccagg

SEQ ID NO: 561424 - RNA, 22 nt, Human
guacaaguugccuaccuuaagu

SEQ ID NO: 561425 - RNA, 22 nt, Human
guuugcauguguacuuaauugg

SEQ ID NO: 561426 - RNA, 22 nt, Human
cagcugaacauguagagcaucu

SEQ ID NO: 561427 - RNA, 22 nt, Human
cacuauuugcuuugggcuagag

SEQ ID NO: 561428 - RNA, 22 nt, Human
cugggacagcugagacaggaga

SEQ ID NO: 561429 - RNA, 22 nt, Human
ugaggcaggacugagcgggaug

SEQ ID NO: 561430 - RNA, 22 nt, Human
uuuuuccuagcgauuugucagc

SEQ ID NO: 561431 - RNA, 22 nt, Human
uuuguuaaauauuuauugagug

SEQ ID NO: 561432 - RNA, 22 nt, Human
gagcugccuguugcauagcaac

SEQ ID NO: 561433 - RNA, 19 nt, Human
agucccaggcccgaaagag

SEQ ID NO: 561434 - RNA, 22 nt, Human
cacuuuaacucacauuucagcu

SEQ ID NO: 561435 - RNA, 23 nt, Human
uggcccugugcaugcugcuuccc

SEQ ID NO: 561436 - RNA, 19 nt, Human
gaggaggaaaacuagugua

SEQ ID NO: 561437 - RNA, 22 nt, Human
augaugguaaauucaguauccg

SEQ ID NO: 561438 - RNA, 22 nt, Human
gucaggggccaugggccaagga

SEQ ID NO: 561439 - RNA, 22 nt, Human
ucacuucuucccuugcacauau

SEQ ID NO: 561440 - RNA, 22 nt, Human
cuauuucugccuaaugaccugu

SEQ ID NO: 561441 - RNA, 22 nt, Human
cuccugggcuaugucugcuugg

SEQ ID NO: 561442 - RNA, 22 nt, Human
cuccaaguauguuaaaaucuaa

SEQ ID NO: 561443 - RNA, 22 nt, Human
cuguauauggcuuacuuuauau

SEQ ID NO: 561444 - RNA, 22 nt, Human
ucaccugggagggcugugguag

SEQ ID NO: 561445 - RNA, 22 nt, Human
ccugauggagcccugcugcaug

SEQ ID NO: 561446 - RNA, 22 nt, Human
aguaaauuauuuagcuuccaga

SEQ ID NO: 561447 - RNA, 22 nt, Human
gccuucucccuaaccaaauccu

SEQ ID NO: 561448 - RNA, 22 nt, Human
uuucugaacuugguacuggagc

SEQ ID NO: 561449 - RNA, 22 nt, Human
ccaauuguccuaauuaauuaga

SEQ ID NO: 561450 - RNA, 22 nt, Human
gccugccuagaauugcagcuuu

SEQ ID NO: 561451 - RNA, 22 nt, Human
cuggaaaguacagugugucaca

SEQ ID NO: 561452 - RNA, 22 nt, Human
gcacauccaaugauuguuuuga

SEQ ID NO: 561453 - RNA, 22 nt, Human
gccucccuggcccacagcagcg

SEQ ID NO: 561454 - RNA, 22 nt, Human
ggaaaaggccauuguuucucug

SEQ ID NO: 561455 - RNA, 22 nt, Human
ggccaggagcaagccaggcucu

SEQ ID NO: 561456 - RNA, 22 nt, Human
cugggccuggggcuguugagag

SEQ ID NO: 561457 - RNA, 19 nt, Human
uggcuguggggaaaugcuu

SEQ ID NO: 561458 - RNA, 22 nt, Human
agcuugaguuuuggaugaagug

SEQ ID NO: 561459 - RNA, 22 nt, Human
auagaauuacaguguguuugga

SEQ ID NO: 561460 - RNA, 22 nt, Human
ccugcccagcuucccgagugca

SEQ ID NO: 561461 - RNA, 22 nt, Human
uccuucaggguugaggccgacu

SEQ ID NO: 561462 - RNA, 20 nt, Human
uaucaaucagaaagaagacu

SEQ ID NO: 561463 - RNA, 22 nt, Human
ucuggcccagccccugagguca

SEQ ID NO: 561464 - RNA, 22 nt, Human
uauuccaguucaccuuuucauc

SEQ ID NO: 561465 - RNA, 22 nt, Human
aguggaaggucaggggacagug

SEQ ID NO: 561466 - RNA, 22 nt, Human
ggaagagauucuuuacauucau

SEQ ID NO: 561467 - RNA, 22 nt, Human
uccaggcccagacggggugagg

SEQ ID NO: 561468 - RNA, 19 nt, Human
ggaaacaggggccagagga

SEQ ID NO: 561469 - RNA, 22 nt, Human
cugggguggugcaggccucaug

SEQ ID NO: 561470 - RNA, 18 nt, Human
aagaggaggaaacccagg

SEQ ID NO: 561471 - RNA, 22 nt, Human
gaggcagcugaagcuucaaaga

SEQ ID NO: 561472 - RNA, 22 nt, Human
aaaauguguuuaugcauuucgu

SEQ ID NO: 561473 - RNA, 22 nt, Human
ugagccagaguggagugugccu

SEQ ID NO: 561474 - RNA, 22 nt, Human
ccugggagugucagacuugcuu

SEQ ID NO: 561475 - RNA, 18 nt, Human
ggccucuggacuggcagc

SEQ ID NO: 561476 - RNA, 22 nt, Human
gcucagugcaucauuccaggcu

SEQ ID NO: 561477 - RNA, 22 nt, Human
gcuggcagggacagcugcgugu

SEQ ID NO: 561478 - RNA, 22 nt, Human
auaugcauaugucaaaacuuau

SEQ ID NO: 561479 - RNA, 21 nt, Human
cauugucgacauuuuccccuc

SEQ ID NO: 561480 - RNA, 22 nt, Human
cugcaggucucugugugcauuc

SEQ ID NO: 561481 - RNA, 22 nt, Human
ugggcagcagcaaagccagacu

SEQ ID NO: 561482 - RNA, 22 nt, Human
uguagaaagcucuucugaaauc

SEQ ID NO: 561483 - RNA, 22 nt, Human
ugucagaacucuauugaugucc

SEQ ID NO: 561484 - RNA, 23 nt, Human
ggccucuguguucugcccacaug

SEQ ID NO: 561485 - RNA, 22 nt, Human
cagugagguagacagcuuuuuc

SEQ ID NO: 561486 - RNA, 22 nt, Human
uccugcuccaccgugggcugga

SEQ ID NO: 561487 - RNA, 22 nt, Human
cagggugccucccgcucgccgg

SEQ ID NO: 561488 - RNA, 22 nt, Human
agaggccacuuugccugugaug

SEQ ID NO: 561489 - RNA, 22 nt, Human
aaaucuguaagcaauugcucag

SEQ ID NO: 561490 - RNA, 22 nt, Human
uaagaccaaaguucuguaggga

SEQ ID NO: 561491 - RNA, 22 nt, Human
ugagcagaaaagaaugcugagc

SEQ ID NO: 561492 - RNA, 22 nt, Human
ucuugauuuugugaauaaguug

SEQ ID NO: 561493 - RNA, 22 nt, Human
ccugucuguucugacuggucag

SEQ ID NO: 561494 - RNA, 22 nt, Human
auugacaauuagcccuuaggug

SEQ ID NO: 561495 - RNA, 22 nt, Human
acauaauaggugccugaauauu

SEQ ID NO: 561496 - RNA, 22 nt, Human
cucccaggguagggagagacua

SEQ ID NO: 561497 - RNA, 22 nt, Human
aucuuuuuaucuguuuggaaca

SEQ ID NO: 561498 - RNA, 22 nt, Human
gcuuaaaagccacuuagucuau

SEQ ID NO: 561499 - RNA, 22 nt, Human
gcagaggacagggauuuagauu

SEQ ID NO: 561500 - RNA, 22 nt, Human
aucaguuuguauaugaaacacu

SEQ ID NO: 561501 - RNA, 22 nt, Human
gugcccugcaugccccggguau

SEQ ID NO: 561502 - RNA, 22 nt, Human
gcagugccuugcuucucugucu

SEQ ID NO: 561503 - RNA, 22 nt, Human
guguaugaggggagaauguuuu

SEQ ID NO: 561504 - RNA, 19 nt, Human
aguguguacugaaagcacu

SEQ ID NO: 561505 - RNA, 22 nt, Human
ccucuggggugagugggccacu

SEQ ID NO: 561506 - RNA, 22 nt, Human
ugccaggcgauugcuaucagca

SEQ ID NO: 561507 - RNA, 22 nt, Human
ucagaagucccagaauucacau

SEQ ID NO: 561508 - RNA, 19 nt, Human
cuuauacagauuuucucau

SEQ ID NO: 561509 - RNA, 22 nt, Human
augggcagcagcugccauucau

SEQ ID NO: 561510 - RNA, 22 nt, Human
gcaaagcaaaugccugaaggcg

SEQ ID NO: 561511 - RNA, 19 nt, Human
aggugcaggucacagggga

SEQ ID NO: 561512 - RNA, 22 nt, Human
ccaggguggggcaggcccacug

SEQ ID NO: 561513 - RNA, 22 nt, Human
aaagcaugguuaaagacagugg

SEQ ID NO: 561514 - RNA, 22 nt, Human
aaaacagacagccaguguagag

SEQ ID NO: 561515 - RNA, 22 nt, Human
aaggcacuugcccagagcugca

SEQ ID NO: 561516 - RNA, 22 nt, Human
aaucugauguuaaauguaaggu

SEQ ID NO: 561517 - RNA, 22 nt, Human
aggcugagccacggggcuggcu

SEQ ID NO: 561518 - RNA, 22 nt, Human
ggcugccacgucgaggguccaa

SEQ ID NO: 561519 - RNA, 22 nt, Human
gcuuuacagggcacaaagggag

SEQ ID NO: 561520 - RNA, 22 nt, Human
ucuggccacccgaggccccugc

SEQ ID NO: 561521 - RNA, 22 nt, Human
ggcccugggaugcucagcagug

SEQ ID NO: 561522 - RNA, 22 nt, Human
uaggcuggaggaagcagugccu

SEQ ID NO: 561523 - RNA, 22 nt, Human
gacagagugcagggcuagaaga

SEQ ID NO: 561524 - RNA, 22 nt, Human
caggugucuaauucucaccccc

SEQ ID NO: 561525 - RNA, 22 nt, Human
gacauaauaaucugaccuagau

SEQ ID NO: 561526 - RNA, 22 nt, Human
uuucuagaggcuccaggggagu

SEQ ID NO: 561527 - RNA, 22 nt, Human
agccagaaaggggcauuaucug

SEQ ID NO: 561528 - RNA, 22 nt, Human
gacaauuucucaauauagaaac

SEQ ID NO: 561529 - RNA, 22 nt, Human
guuguauagagggcaugaaucu

SEQ ID NO: 561530 - RNA, 22 nt, Human
gaggcccuccagcugucagcug

SEQ ID NO: 561531 - RNA, 22 nt, Human
acagcagccuuguugguuucga

SEQ ID NO: 561532 - RNA, 22 nt, Human
uucacagcuaagagcuaaguaa

SEQ ID NO: 561533 - RNA, 22 nt, Human
uggcucuguugagguauggauu

SEQ ID NO: 561534 - RNA, 22 nt, Human
augcccgauaccuaguuaacuc

SEQ ID NO: 561535 - RNA, 22 nt, Human
gugcuuccaucuagagggucac

SEQ ID NO: 561536 - RNA, 22 nt, Human
ugcucugguaacucacuuccau

SEQ ID NO: 561537 - RNA, 22 nt, Human
ucucagaggcccgacguucucc

SEQ ID NO: 561538 - RNA, 22 nt, Human
gcagggguagugucuuccugag

SEQ ID NO: 561539 - RNA, 22 nt, Human
ucacagacuggucagucaacuu

SEQ ID NO: 561540 - RNA, 22 nt, Human
gugucaugggagucagaaguga

SEQ ID NO: 561541 - RNA, 22 nt, Human
auuccaaacagugcugcagacu

SEQ ID NO: 561542 - RNA, 22 nt, Human
uucuggagccgggccugggcag

SEQ ID NO: 561543 - RNA, 19 nt, Human
ugugaaagcuaguguucuu

SEQ ID NO: 561544 - RNA, 22 nt, Human
gggguggaucaggcaggcccag

SEQ ID NO: 561545 - RNA, 22 nt, Human
aaaguguggagauugaacuaaa

SEQ ID NO: 561546 - RNA, 22 nt, Human
guucuucucuuguaauggaauc

SEQ ID NO: 561547 - RNA, 22 nt, Human
cacuggggaaaacaggcuucuu

SEQ ID NO: 561548 - RNA, 22 nt, Human
caugaguuuuuuaguucaugca

SEQ ID NO: 561549 - RNA, 20 nt, Human
agaauucuuacccuuugaug

SEQ ID NO: 561550 - RNA, 22 nt, Human
guuaauuugcagcuuucgagcu

SEQ ID NO: 561551 - RNA, 22 nt, Human
cagggcuggauccuccagacuc

SEQ ID NO: 561552 - RNA, 22 nt, Human
gugcuguaacaacagagugucu

SEQ ID NO: 561553 - RNA, 22 nt, Human
aguguuccuugcuuucccagag

SEQ ID NO: 561554 - RNA, 22 nt, Human
aaaucagucccucuuggaauuu

SEQ ID NO: 561555 - RNA, 22 nt, Human
ucuuggucuuucauccuucaac

SEQ ID NO: 561556 - RNA, 22 nt, Human
gacagcaggagaucaugauaga

SEQ ID NO: 561557 - RNA, 22 nt, Human
gaaggccuagggaugcucugcg

SEQ ID NO: 561558 - RNA, 19 nt, Human
ggucacagggguuacaagg

SEQ ID NO: 561559 - RNA, 22 nt, Human
ucgugucagaucagagguuccu

SEQ ID NO: 561560 - RNA, 22 nt, Human
gacacaggggggcgcuagaaga

SEQ ID NO: 561561 - RNA, 22 nt, Human
gccugcagacguguuuuccuca

SEQ ID NO: 561562 - RNA, 21 nt, Human
ccuucuccacagggucuccgg

SEQ ID NO: 561563 - RNA, 22 nt, Human
ugcuucauuuccuuauauugua

SEQ ID NO: 561564 - RNA, 22 nt, Human
gccugcccugaaagaggugaag

SEQ ID NO: 561565 - RNA, 22 nt, Human
agaugcuucaguguuuaauuua

SEQ ID NO: 561566 - RNA, 22 nt, Human
agcccagaggguagcagaagaa

SEQ ID NO: 561567 - RNA, 22 nt, Human
cuguggcucucagaggcugcug

SEQ ID NO: 561568 - RNA, 22 nt, Human
uugaagagugccuuccagacau

SEQ ID NO: 561569 - RNA, 22 nt, Human
cugugcaguaggucagggcugg

SEQ ID NO: 561570 - RNA, 22 nt, Human
auucacauuuuauuucacugga

SEQ ID NO: 561571 - RNA, 22 nt, Human
auucuuccucaucaaucuguag

SEQ ID NO: 561572 - RNA, 22 nt, Human
ucacuguaccuuccauuucauu

SEQ ID NO: 561573 - RNA, 20 nt, Human
ucauuguguugccaauuccc

SEQ ID NO: 561574 - RNA, 22 nt, Human
aggucccugcagcagacugcca

SEQ ID NO: 561575 - RNA, 22 nt, Human
caauacugaguuuacauucauc

SEQ ID NO: 561576 - RNA, 22 nt, Human
gcuggcagagcucugggcuggg

SEQ ID NO: 561577 - RNA, 22 nt, Human
agccccuuccaguucucagauc

SEQ ID NO: 561578 - RNA, 18 nt, Human
gggcucugauccuucacc

SEQ ID NO: 561579 - RNA, 22 nt, Human
uccagucaucucccuucacauu

SEQ ID NO: 561580 - RNA, 22 nt, Human
ggcuggcuugccaagcucaggg

SEQ ID NO: 561581 - RNA, 22 nt, Human
auaaacucaugccaagaaauga

SEQ ID NO: 561582 - RNA, 22 nt, Human
acucacauuucaucaggccaag

SEQ ID NO: 561583 - RNA, 22 nt, Human
cugcuccaggauuucaggccag

SEQ ID NO: 561584 - RNA, 22 nt, Human
gaggggcuugaggcccugaugg

SEQ ID NO: 561585 - RNA, 22 nt, Human
agggcugggcugcuuguuguca

SEQ ID NO: 561586 - RNA, 22 nt, Human
aaaugcuuagagguguucaaau

SEQ ID NO: 561587 - RNA, 22 nt, Human
cucagcccagcccaggaccagg

SEQ ID NO: 561588 - RNA, 22 nt, Human
gcugggcccagaucccaggauc

SEQ ID NO: 561589 - RNA, 22 nt, Human
gcagcgagugcggcugccacag

SEQ ID NO: 561590 - RNA, 22 nt, Human
cauuuauucauuugcuagggcu

SEQ ID NO: 561591 - RNA, 22 nt, Human
cuguggcaggaagggacuagca

SEQ ID NO: 561592 - RNA, 22 nt, Human
cacaaucauaauguauguacau

SEQ ID NO: 561593 - RNA, 22 nt, Human
aauacaaucaaauucacuagca

SEQ ID NO: 561594 - RNA, 22 nt, Human
uuuucauuguuacuaugagcua

SEQ ID NO: 561595 - RNA, 22 nt, Human
ugucccaggccucauguugcca

SEQ ID NO: 561596 - RNA, 22 nt, Human
aggaggccgcugaugggcuccc

SEQ ID NO: 561597 - RNA, 22 nt, Human
guccugagaauacuaggcacaa

SEQ ID NO: 561598 - RNA, 22 nt, Human
caguuuauuuccaagaugacaa

SEQ ID NO: 561599 - RNA, 22 nt, Human
acaggacauguaccaggugguc

SEQ ID NO: 561600 - RNA, 22 nt, Human
cccagaggugcuucagaggugc

SEQ ID NO: 561601 - RNA, 22 nt, Human
ggcucaggccagaccacgacuc

SEQ ID NO: 561602 - RNA, 22 nt, Human
ggagcugcuccuucagccaagu

SEQ ID NO: 561603 - RNA, 22 nt, Human
caaauuuaaguuagaaagcaau

SEQ ID NO: 561604 - RNA, 22 nt, Human
auacaguaaccacauucuauag

SEQ ID NO: 561605 - RNA, 22 nt, Human
gcagcuuucuacuuccuacagc

SEQ ID NO: 561606 - RNA, 22 nt, Human
uuggaaggcccugccuagcagg

SEQ ID NO: 561607 - RNA, 22 nt, Human
uugguucauuauugaaugugcu

SEQ ID NO: 561608 - RNA, 22 nt, Human
uggaagggagugacagucagag

SEQ ID NO: 561609 - RNA, 22 nt, Human
agguggggaggagugucucuuu

SEQ ID NO: 561610 - RNA, 22 nt, Human
acaggaagugcuggcacuuaca

SEQ ID NO: 561611 - RNA, 22 nt, Human
aacaucuugaagauugggaaag

SEQ ID NO: 561612 - RNA, 22 nt, Human
augaaaagggagugauauuugu

SEQ ID NO: 561613 - RNA, 21 nt, Human
ugaggccucuccugggcuggc

SEQ ID NO: 561614 - RNA, 22 nt, Human
ggggccagguccagcuuccaaa

SEQ ID NO: 561615 - RNA, 22 nt, Human
gcuuuucuucagcagccugaug

SEQ ID NO: 561616 - RNA, 22 nt, Human
cagcacagugcagaugcugacu

SEQ ID NO: 561617 - RNA, 19 nt, Human
guugaaaguaggugagggu

SEQ ID NO: 561618 - RNA, 22 nt, Human
agugcaaagcugcugcuguggu

SEQ ID NO: 561619 - RNA, 22 nt, Human
uuggauccaucucaggcauagg

SEQ ID NO: 561620 - RNA, 22 nt, Human
aaaugcagguaguauuuauuuu

SEQ ID NO: 561621 - RNA, 22 nt, Human
uaugagaagguauggugacuug

SEQ ID NO: 561622 - RNA, 19 nt, Human
acaagggcaggcaagguga

SEQ ID NO: 561623 - RNA, 22 nt, Human
gugggacucuucuuuggcagug

SEQ ID NO: 561624 - RNA, 22 nt, Human
gcucccugccuacacggaccuu

SEQ ID NO: 561625 - RNA, 22 nt, Human
gaaugaguauucuuuauaggau

SEQ ID NO: 561626 - RNA, 22 nt, Human
agaugaagauaucugcaggggc

SEQ ID NO: 561627 - RNA, 22 nt, Human
gaagcagaagguuuggacgugc

SEQ ID NO: 561628 - RNA, 22 nt, Human
cugagaggcacaaggcauuucg

SEQ ID NO: 561629 - RNA, 22 nt, Human
uauugcagaagaaaugaaugaa

SEQ ID NO: 561630 - RNA, 22 nt, Human
ugaggcucugcuucuguggcuc

SEQ ID NO: 561631 - RNA, 22 nt, Human
ccagccagcugcccuuggggcc

SEQ ID NO: 561632 - RNA, 22 nt, Human
ugcagccauuuucugccaaugc

SEQ ID NO: 561633 - RNA, 22 nt, Human
uucugcagcccaacaguaguuu

SEQ ID NO: 561634 - RNA, 20 nt, Human
auauaauaaauuuugguuac

SEQ ID NO: 561635 - RNA, 22 nt, Human
agucccagaucuccauucgguc

SEQ ID NO: 561636 - RNA, 22 nt, Human
ugggaaagucuuuauuucucuu

SEQ ID NO: 561637 - RNA, 20 nt, Human
ugugaaagcaguagaaugac

SEQ ID NO: 561638 - RNA, 22 nt, Human
aaauugagacuuuuuuccucca

SEQ ID NO: 561639 - RNA, 20 nt, Human
caggccucugggggcccugg

SEQ ID NO: 561640 - RNA, 22 nt, Human
acauuucacuguucacagcagg

SEQ ID NO: 561641 - RNA, 22 nt, Human
ugucucagggcagcagcagggg

SEQ ID NO: 561642 - RNA, 22 nt, Human
cagggcuggcucaugaaaaguu

SEQ ID NO: 561643 - RNA, 22 nt, Human
gugcccuguucauuucucuccc

SEQ ID NO: 561644 - RNA, 22 nt, Human
ggagugaguggccuugucacug

SEQ ID NO: 561645 - RNA, 22 nt, Human
agcuggcaauguaagucccugg

SEQ ID NO: 561646 - RNA, 20 nt, Human
ggaaaucaccaggcuccacc

SEQ ID NO: 561647 - RNA, 22 nt, Human
gcacacaguauaugcucauuaa

SEQ ID NO: 561648 - RNA, 22 nt, Human
agcagccagugggagugauaca

SEQ ID NO: 561649 - RNA, 22 nt, Human
uguuucauguggacauaguugu

SEQ ID NO: 561650 - RNA, 22 nt, Human
cugagauggccacugggucuca

SEQ ID NO: 561651 - RNA, 22 nt, Human
cuaagaaggaggaaaagugcca

SEQ ID NO: 561652 - RNA, 22 nt, Human
caucaguguucacuauuccuuc

SEQ ID NO: 561653 - RNA, 22 nt, Human
cagccugacaccagcuuugggc

SEQ ID NO: 561654 - RNA, 22 nt, Human
gcaaggcugagcacauuugcau

SEQ ID NO: 561655 - RNA, 22 nt, Human
ggccaggaagggaagaucagca

SEQ ID NO: 561656 - RNA, 22 nt, Human
uagaugaagcaacauguguaau

SEQ ID NO: 561657 - RNA, 22 nt, Human
gucaccauggauaagaaucacu

SEQ ID NO: 561658 - RNA, 22 nt, Human
agccucugugacucacagguca

SEQ ID NO: 561659 - RNA, 22 nt, Human
cacagaggacuguagcggggag

SEQ ID NO: 561660 - RNA, 22 nt, Human
aguggggacuuaugccagcauu

SEQ ID NO: 561661 - RNA, 22 nt, Human
aagcagcagaccugauuuugaa

SEQ ID NO: 561662 - RNA, 22 nt, Human
ugcagagaaaacuccuggguac

SEQ ID NO: 561663 - RNA, 22 nt, Human
acaauuuauccauuguauaguu

SEQ ID NO: 561664 - RNA, 20 nt, Human
acauuuguaucucccagugg

SEQ ID NO: 561665 - RNA, 20 nt, Human
ugucugugccacggcacucc

SEQ ID NO: 561666 - RNA, 20 nt, Human
uucauuugggaaaaucugcg

SEQ ID NO: 561667 - RNA, 22 nt, Human
gaggaugugucuggucugggca

SEQ ID NO: 561668 - RNA, 22 nt, Human
ucuggcuccaggaccgggcaca

SEQ ID NO: 561669 - RNA, 22 nt, Human
ggagggagcauccccuugcuga

SEQ ID NO: 561670 - RNA, 22 nt, Human
ucuggcucuguguccccaccca

SEQ ID NO: 561671 - RNA, 21 nt, Human
acaguucaugauaacuccauc

SEQ ID NO: 561672 - RNA, 22 nt, Human
uuuacacugcuugaacaaucuc

SEQ ID NO: 561673 - RNA, 22 nt, Human
uagaaacacagagagacccaug

SEQ ID NO: 561674 - RNA, 22 nt, Human
cagaacagagucaaaaguaugu

SEQ ID NO: 561675 - RNA, 22 nt, Human
ggucacaggggagaagagugau

SEQ ID NO: 561676 - RNA, 22 nt, Human
uagcagagcugggacuagauua

SEQ ID NO: 561677 - RNA, 22 nt, Human
uguaaagacgcuuauagcuugc

SEQ ID NO: 561678 - RNA, 21 nt, Human
uaacuuuugugccuaucuugu

SEQ ID NO: 561679 - RNA, 22 nt, Human
gcugagguggagauugcaguga

SEQ ID NO: 561680 - RNA, 22 nt, Human
ccucccauggagcucuguccau

SEQ ID NO: 561681 - RNA, 22 nt, Human
cagccugcuagggcaaugccuu

SEQ ID NO: 561682 - RNA, 21 nt, Human
uccaggaguggcugggcaggg

SEQ ID NO: 561683 - RNA, 22 nt, Human
gcucccaccaggcagaccuacc

SEQ ID NO: 561684 - RNA, 22 nt, Human
uagcagggaagaugaucagaau

SEQ ID NO: 561685 - RNA, 21 nt, Human
ucuccaguauccuucucugag

SEQ ID NO: 561686 - RNA, 22 nt, Human
ccacagcaugcaggccugacac

SEQ ID NO: 561687 - RNA, 22 nt, Human
aucagcaaucucguguauuagg

SEQ ID NO: 561688 - RNA, 22 nt, Human
uuuugcuugagugcacaaaaug

SEQ ID NO: 561689 - RNA, 22 nt, Human
agcuggccuccgggugccuggg

SEQ ID NO: 561690 - RNA, 18 nt, Human
uugcuuuguaagcuugca

SEQ ID NO: 561691 - RNA, 22 nt, Human
cucugcccgcggaugccacguc

SEQ ID NO: 561692 - RNA, 22 nt, Human
ccuguggcucucuuuggagguc

SEQ ID NO: 561693 - RNA, 22 nt, Human
agcccugcauagaagggaacac

SEQ ID NO: 561694 - RNA, 22 nt, Human
uccuugaaaagaaugucuccau

SEQ ID NO: 561695 - RNA, 22 nt, Human
gucaccagcaccaaugccacau

SEQ ID NO: 561696 - RNA, 22 nt, Human
cuguccagcugaccagagcagc

SEQ ID NO: 561697 - RNA, 22 nt, Human
uaacacacugaaggugagaugg

SEQ ID NO: 561698 - RNA, 22 nt, Human
ucaccgccuugcccggccgggc

SEQ ID NO: 561699 - RNA, 22 nt, Human
uuuuaacacucagcacuaucuc

SEQ ID NO: 561700 - RNA, 22 nt, Human
gagccagagcuacaagugucug

SEQ ID NO: 561701 - RNA, 22 nt, Human
ugcugggcuucaacugccugag

SEQ ID NO: 561702 - RNA, 22 nt, Human
cauuugaaauaguucauucuug

SEQ ID NO: 561703 - RNA, 22 nt, Human
ggcagcugagcauggcuaccuu

SEQ ID NO: 561704 - RNA, 22 nt, Human
uaaaauguguuucuguaugguu

SEQ ID NO: 561705 - RNA, 22 nt, Human
gauuuguagcuuuucagucugu

SEQ ID NO: 561706 - RNA, 22 nt, Human
cugcagggugacguugcccacc

SEQ ID NO: 561707 - RNA, 22 nt, Human
caggcagcugacugucagauau

SEQ ID NO: 561708 - RNA, 21 nt, Human
aggugcaggccucaagcccca

SEQ ID NO: 561709 - RNA, 22 nt, Human
cagggcucccugcagccucugu

SEQ ID NO: 561710 - RNA, 22 nt, Human
cucugggcaaagaugccucauc

SEQ ID NO: 561711 - RNA, 22 nt, Human
uuucuaaguguauugagcuugg

SEQ ID NO: 561712 - RNA, 22 nt, Human
gagggacagcuaaagagaaauu

SEQ ID NO: 561713 - RNA, 22 nt, Human
uguuugacaccucaguguuucu

SEQ ID NO: 561714 - RNA, 22 nt, Human
cuaggaauccuuuuagaguugg

SEQ ID NO: 561715 - RNA, 22 nt, Human
aagaaaugcagaaaugugcugg

SEQ ID NO: 561716 - RNA, 22 nt, Human
auguccagagccggccugcuga

SEQ ID NO: 561717 - RNA, 22 nt, Human
cugagccuuauucaccagcccu

SEQ ID NO: 561718 - RNA, 22 nt, Human
uugauacaggcucuauuucauc

SEQ ID NO: 561719 - RNA, 22 nt, Human
gcagagccugggggucugcgga

SEQ ID NO: 561720 - RNA, 22 nt, Human
cagcaggauagguuucuuugga

SEQ ID NO: 561721 - RNA, 22 nt, Human
uggcucaggcuugaaaauagau

SEQ ID NO: 561722 - RNA, 22 nt, Human
uaacagcauuugaaugaguaac

SEQ ID NO: 561723 - RNA, 22 nt, Human
uuguuucaaauauuucagaaua

SEQ ID NO: 561724 - RNA, 22 nt, Human
aagcucugcucagcagacuagg

SEQ ID NO: 561725 - RNA, 22 nt, Human
gcucccagggaccgcagggcag

SEQ ID NO: 561726 - RNA, 22 nt, Human
caaagaagagauuuacagagcu

SEQ ID NO: 561727 - RNA, 22 nt, Human
acucagaguuugcguuccauac

SEQ ID NO: 561728 - RNA, 22 nt, Human
uccauauuaacuaaaacuagaa

SEQ ID NO: 561729 - RNA, 22 nt, Human
agcuuuauuugucauucacggc

SEQ ID NO: 561730 - RNA, 22 nt, Human
uuccaaguugagcgauuuuccu

SEQ ID NO: 561731 - RNA, 22 nt, Human
acuaaagcucacagaguugaac

SEQ ID NO: 561732 - RNA, 22 nt, Human
cuggagcccaggccuggugucu

SEQ ID NO: 561733 - RNA, 22 nt, Human
ucacauauuuaagaaaguuaaa

SEQ ID NO: 561734 - RNA, 22 nt, Human
ugcagggccuugggucuuucuu

SEQ ID NO: 561735 - RNA, 17 nt, Human
aaacugaaaaauucacu

SEQ ID NO: 561736 - RNA, 19 nt, Human
uccauaagcuuguguucau

SEQ ID NO: 561737 - RNA, 22 nt, Human
auucuuuuaagccccagggauu

SEQ ID NO: 561738 - RNA, 22 nt, Human
aggccuggugugccggaugcag

SEQ ID NO: 561739 - RNA, 18 nt, Human
aagaaguuggccaaagag

SEQ ID NO: 561740 - RNA, 22 nt, Human
ucucccacagucucccauggcu

SEQ ID NO: 561741 - RNA, 22 nt, Human
ucaggcucucagaccaacagca

SEQ ID NO: 561742 - RNA, 22 nt, Human
uggagaaggacagccugagaaa

SEQ ID NO: 561743 - RNA, 22 nt, Human
gcguggugcugcccugcacaca

SEQ ID NO: 561744 - RNA, 22 nt, Human
caaaugcauaguuuauaagaag

SEQ ID NO: 561745 - RNA, 22 nt, Human
cagcccaaagccccaggcuaga

SEQ ID NO: 561746 - RNA, 22 nt, Human
cugggcuguuuguucuggucuc

SEQ ID NO: 561747 - RNA, 22 nt, Human
ucaauguuuguucaugaaaaua

SEQ ID NO: 561748 - RNA, 22 nt, Human
uuucaacauauaccauaaugcc

SEQ ID NO: 561749 - RNA, 22 nt, Human
gaaucucaguggaagcaggaag

SEQ ID NO: 561750 - RNA, 22 nt, Human
gccugugguuugauuaagcauu

SEQ ID NO: 561751 - RNA, 22 nt, Human
uuugcauucuagaaaaauuucu

SEQ ID NO: 561752 - RNA, 22 nt, Human
gcagggcacagacagugccaag

SEQ ID NO: 561753 - RNA, 22 nt, Human
auccuuggaugugucuuuuugu

SEQ ID NO: 561754 - RNA, 22 nt, Human
cuggaagguuccucccagcucc

SEQ ID NO: 561755 - RNA, 22 nt, Human
aagcugcagacccccugucuca

SEQ ID NO: 561756 - RNA, 22 nt, Human
gcagagcaccaaagugaaagau

SEQ ID NO: 561757 - RNA, 22 nt, Human
ucccagccuggacccugccagu

SEQ ID NO: 561758 - RNA, 22 nt, Human
uuuuaagaugcuaguauuucag

SEQ ID NO: 561759 - RNA, 22 nt, Human
uacuuuaaaaacugauaauuca

SEQ ID NO: 561760 - RNA, 22 nt, Human
uccagggaaggugugaggcugg

SEQ ID NO: 561761 - RNA, 22 nt, Human
acagaaauauucguggugcuug

SEQ ID NO: 561762 - RNA, 22 nt, Human
agaggggcucauauccugucau

SEQ ID NO: 561763 - RNA, 23 nt, Human
gggcugcuccaggccaaggcugg

SEQ ID NO: 561764 - RNA, 22 nt, Human
uuuaauauucugcauucuccuu

SEQ ID NO: 561765 - RNA, 22 nt, Human
cuuguggcccauggcuuccugc

SEQ ID NO: 561766 - RNA, 22 nt, Human
gcaaauguucuauauuugcugu

SEQ ID NO: 561767 - RNA, 22 nt, Human
uccuucagaaaaccucagucuu

SEQ ID NO: 561768 - RNA, 22 nt, Human
caaaugcaugagaaauaagagg

SEQ ID NO: 561769 - RNA, 22 nt, Human
agagcagaggcauggccguggg

SEQ ID NO: 561770 - RNA, 22 nt, Human
acauacuuauguguauaugugu

SEQ ID NO: 561771 - RNA, 22 nt, Human
cugcugggucuaugcaagugga

SEQ ID NO: 561772 - RNA, 22 nt, Human
ccaggcucugucuggucagaag

SEQ ID NO: 561773 - RNA, 22 nt, Human
acaaaggugagcagaagacaca

SEQ ID NO: 561774 - RNA, 22 nt, Human
ccugagagugagugccuccuua

SEQ ID NO: 561775 - RNA, 22 nt, Human
cucccuggcacagcgagagguu

SEQ ID NO: 561776 - RNA, 22 nt, Human
gggcugagauuggugcccuguc

SEQ ID NO: 561777 - RNA, 22 nt, Human
aucaggaaauacuuauuuauaa

SEQ ID NO: 561778 - RNA, 22 nt, Human
agagacugauggaucaccaaau

SEQ ID NO: 561779 - RNA, 22 nt, Human
uccauguggccagacacuggca

SEQ ID NO: 561780 - RNA, 22 nt, Human
cuggcuuucauuucaagcacgu

SEQ ID NO: 561781 - RNA, 22 nt, Human
ucucugugguuugagagccggg

SEQ ID NO: 561782 - RNA, 22 nt, Human
gaaaugucuuugacaagagagg

SEQ ID NO: 561783 - RNA, 18 nt, Human
uccugcagcuucuaugua

SEQ ID NO: 561784 - RNA, 22 nt, Human
uuccagaagauggcagcaaagg

SEQ ID NO: 561785 - RNA, 22 nt, Human
uacaaagugcuuuagaaaugaa

SEQ ID NO: 561786 - RNA, 17 nt, Human
aaauaugaccucaaagu

SEQ ID NO: 561787 - RNA, 22 nt, Human
caaauguguagagcuuuugggg

SEQ ID NO: 561788 - RNA, 22 nt, Human
augugaaacugaagcauccaua

SEQ ID NO: 561789 - RNA, 22 nt, Human
gggcugcuuccuggggaaugcu

SEQ ID NO: 561790 - RNA, 23 nt, Human
uucauuugucuacuucacuuguu

SEQ ID NO: 561791 - RNA, 22 nt, Human
uucuauauuggaagugagaaau

SEQ ID NO: 561792 - RNA, 22 nt, Human
aacuuuagaaaggaaggaagug

SEQ ID NO: 561793 - RNA, 22 nt, Human
aaagaugaccguaugucagagc

SEQ ID NO: 561794 - RNA, 22 nt, Human
gaaaucaugagaucucuuggac

SEQ ID NO: 561795 - RNA, 21 nt, Human
cagagguggccugaccucuga

SEQ ID NO: 561796 - RNA, 22 nt, Human
guucacauguguuaucuucuuu

SEQ ID NO: 561797 - RNA, 22 nt, Human
uuccaggaagauucaacaaaag

SEQ ID NO: 561798 - RNA, 22 nt, Human
gcagaugccagaucaugcaggg

SEQ ID NO: 561799 - RNA, 22 nt, Human
aaggcugaggcagugaggcaga

SEQ ID NO: 561800 - RNA, 22 nt, Human
gccugcugagggaaguugggca

SEQ ID NO: 561801 - RNA, 22 nt, Human
gcugcagcucgccuuccggccu

SEQ ID NO: 561802 - RNA, 22 nt, Human
acuuccuggcguagcugacauu

SEQ ID NO: 561803 - RNA, 22 nt, Human
ucacacgugagguucuauccug

SEQ ID NO: 561804 - RNA, 22 nt, Human
augcaguaaauguucuaguuug

SEQ ID NO: 561805 - RNA, 22 nt, Human
ugagugaggaagcgguggagga

SEQ ID NO: 561806 - RNA, 22 nt, Human
agggcuggcaucucuaaugcug

SEQ ID NO: 561807 - RNA, 22 nt, Human
ucaauucaguccaacaguaauu

SEQ ID NO: 561808 - RNA, 22 nt, Human
uaagagcauaggcuugaaaaua

SEQ ID NO: 561809 - RNA, 22 nt, Human
uaacaucuuuagcagcucgaac

SEQ ID NO: 561810 - RNA, 22 nt, Human
guccaggucuggacccugagcc

SEQ ID NO: 561811 - RNA, 22 nt, Human
cugcccugugaggguccuuggg

SEQ ID NO: 561812 - RNA, 22 nt, Human
gcugucugucuucacaucucgc

SEQ ID NO: 561813 - RNA, 22 nt, Human
ugcagggagggcccagcaaucu

SEQ ID NO: 561814 - RNA, 22 nt, Human
uugggcugaacccugcagcuga

SEQ ID NO: 561815 - RNA, 22 nt, Human
cagagaaagaagcccauucauu

SEQ ID NO: 561816 - RNA, 22 nt, Human
uauguacaaucagcaguucaua

SEQ ID NO: 561817 - RNA, 22 nt, Human
uccuccagcaggacugaggccc

SEQ ID NO: 561818 - RNA, 22 nt, Human
cauauuaaggucuguaaggggu

SEQ ID NO: 561819 - RNA, 22 nt, Human
cuuaacagauacaucugugguu

SEQ ID NO: 561820 - RNA, 22 nt, Human
ccagcuuuccugcgaguugauu

SEQ ID NO: 561821 - RNA, 22 nt, Human
aagauggcugcagcaauuccaa

SEQ ID NO: 561822 - RNA, 22 nt, Human
aagcuuucagagcagaauguga

SEQ ID NO: 561823 - RNA, 22 nt, Human
ugccccugaccucaggcgaagg

SEQ ID NO: 561824 - RNA, 22 nt, Human
gccaggcuccaggcccuccuga

SEQ ID NO: 561825 - RNA, 22 nt, Human
uucuuuucaagaggggcaagga

SEQ ID NO: 561826 - RNA, 19 nt, Human
gguggcagaacgugggucc

SEQ ID NO: 561827 - RNA, 22 nt, Human
ucauuuacuucuaugacaacau

SEQ ID NO: 561828 - RNA, 23 nt, Human
uugcauccugacgucuauuuucu

SEQ ID NO: 561829 - RNA, 22 nt, Human
gggagggauuaguucugccugg

SEQ ID NO: 561830 - RNA, 22 nt, Human
cccaggcagcccuucugacgca

SEQ ID NO: 561831 - RNA, 22 nt, Human
ucucagagugguggucccucug

SEQ ID NO: 561832 - RNA, 22 nt, Human
auucuacaacccaauaauaauu

SEQ ID NO: 561833 - RNA, 22 nt, Human
agggcugaugcaccauguagcc

SEQ ID NO: 561834 - RNA, 22 nt, Human
cugccugcaucccacagugggg

SEQ ID NO: 561835 - RNA, 22 nt, Human
auaaauucaaagcauuuaggac

SEQ ID NO: 561836 - RNA, 22 nt, Human
agagcagccugugaugaugcac

SEQ ID NO: 561837 - RNA, 22 nt, Human
ugaaggaaugagggaguggguc

SEQ ID NO: 561838 - RNA, 23 nt, Human
ucaaacauauugugagacacagg

SEQ ID NO: 561839 - RNA, 23 nt, Human
gcauugucuccccacuucugggc

SEQ ID NO: 561840 - RNA, 22 nt, Human
ggcaugggguguauguggcacg

SEQ ID NO: 561841 - RNA, 22 nt, Human
agaagccacuggagguugagau

SEQ ID NO: 561842 - RNA, 21 nt, Human
ucugggcagcccaguccugag

SEQ ID NO: 561843 - RNA, 22 nt, Human
uaugaagugaguuaugguugcu

SEQ ID NO: 561844 - RNA, 22 nt, Human
guggggcaugcacgcugcuccu

SEQ ID NO: 561845 - RNA, 23 nt, Human
acuuuagauaaauuaugugcaca

SEQ ID NO: 561846 - RNA, 22 nt, Human
gccagcucagugccaggccccu

SEQ ID NO: 561847 - RNA, 22 nt, Human
agauguuuuagaguuugacuug

SEQ ID NO: 561848 - RNA, 22 nt, Human
gggccagugaacaaugagggaa

SEQ ID NO: 561849 - RNA, 21 nt, Human
aagaagcaauuuauuggaagg

SEQ ID NO: 561850 - RNA, 22 nt, Human
gcuaacauugauucagugccug

SEQ ID NO: 561851 - RNA, 22 nt, Human
uacugacacaaagccaaucccu

SEQ ID NO: 561852 - RNA, 22 nt, Human
ugcagguggcuccagggacugc

SEQ ID NO: 561853 - RNA, 22 nt, Human
aucucccagccacagcauucuu

SEQ ID NO: 561854 - RNA, 22 nt, Human
cugaagcaggaacagcgagauu

SEQ ID NO: 561855 - RNA, 22 nt, Human
uucccuccgaaccucagugcug

SEQ ID NO: 561856 - RNA, 22 nt, Human
ucacaaauguuugcaugugucu

SEQ ID NO: 561857 - RNA, 22 nt, Human
ucaugaauauugaaugcuucau

SEQ ID NO: 561858 - RNA, 22 nt, Human
ugcaugugugacaaggacaguu

SEQ ID NO: 561859 - RNA, 22 nt, Human
aaggaagacucgcaggucuaug

SEQ ID NO: 561860 - RNA, 22 nt, Human
uagauuucaggcuggcuugcgg

SEQ ID NO: 561861 - RNA, 22 nt, Human
cccuccagccauggacccaggu

SEQ ID NO: 561862 - RNA, 22 nt, Human
auggggugagacuaggauuaaa

SEQ ID NO: 561863 - RNA, 22 nt, Human
gggcccuggcuuuccuguucuu

SEQ ID NO: 561864 - RNA, 22 nt, Human
aaagcaccuagcauagugcuua

SEQ ID NO: 561865 - RNA, 22 nt, Human
aauuagggaaaacauuugcuuu

SEQ ID NO: 561866 - RNA, 22 nt, Human
gagccuucaucgcagccuuguu

SEQ ID NO: 561867 - RNA, 22 nt, Human
gagguggcuuagucucuggaca

SEQ ID NO: 561868 - RNA, 22 nt, Human
ggcacugggcaccggcugaggg

SEQ ID NO: 561869 - RNA, 22 nt, Human
acuccaggcaucugcuucugcu

SEQ ID NO: 561870 - RNA, 22 nt, Human
auaaaugauucagcaggaaaua

SEQ ID NO: 561871 - RNA, 22 nt, Human
aucuccaggcauuucaagagac

SEQ ID NO: 561872 - RNA, 22 nt, Human
aacucacagcuguuuggauuag

SEQ ID NO: 561873 - RNA, 22 nt, Human
uuuacuuugugucaagucaaga

SEQ ID NO: 561874 - RNA, 22 nt, Human
uuucacagagaauauugccuug

SEQ ID NO: 561875 - RNA, 22 nt, Human
gccacugcacuccagcccaggc

SEQ ID NO: 561876 - RNA, 22 nt, Human
cgaugguucuggcugcuuguau

SEQ ID NO: 561877 - RNA, 22 nt, Human
gggagaaggaggacugugcugu

SEQ ID NO: 561878 - RNA, 22 nt, Human
cugcugugcaacauugcaccua

SEQ ID NO: 561879 - RNA, 22 nt, Human
uuucaaauggagucgugaaaug

SEQ ID NO: 561880 - RNA, 22 nt, Human
gggagaaggagcuaguucuuga

SEQ ID NO: 561881 - RNA, 22 nt, Human
ugugcagaguaaggcagcuguu

SEQ ID NO: 561882 - RNA, 22 nt, Human
gggcccugccccguggcucuga

SEQ ID NO: 561883 - RNA, 22 nt, Human
ccucaggguggcaucagaucuu

SEQ ID NO: 561884 - RNA, 22 nt, Human
gaggcagcaaaauauaucauaa

SEQ ID NO: 561885 - RNA, 22 nt, Human
uguucuuucaguuagacacagu

SEQ ID NO: 561886 - RNA, 22 nt, Human
uaucaacauuaauauuuucugg

SEQ ID NO: 561887 - RNA, 22 nt, Human
augcagaagcagaacuuacaca

SEQ ID NO: 561888 - RNA, 22 nt, Human
ugggcucucuggcaggaaggcu

SEQ ID NO: 561889 - RNA, 22 nt, Human
ccuuuucuaaucuuaagaaugu

SEQ ID NO: 561890 - RNA, 22 nt, Human
aaauacagaguugcuuaaaagc

SEQ ID NO: 561891 - RNA, 22 nt, Human
gcugcucuuuucagagaugaga

SEQ ID NO: 561892 - RNA, 22 nt, Human
ugcaggugugguuccucagcca

SEQ ID NO: 561893 - RNA, 20 nt, Human
gcagagugugagagggugaa

SEQ ID NO: 561894 - RNA, 22 nt, Human
gaaauuuacaacuuucucaugg

SEQ ID NO: 561895 - RNA, 22 nt, Human
aaaugacacuaggcuuuuugca

SEQ ID NO: 561896 - RNA, 22 nt, Human
ggccaggcugcugggaccccgc

SEQ ID NO: 561897 - RNA, 22 nt, Human
agaaugauacucuaugccaaau

SEQ ID NO: 561898 - RNA, 22 nt, Human
gagccagcgccuugccucuggg

SEQ ID NO: 561899 - RNA, 22 nt, Human
uggaggcaacugaagauguagu

SEQ ID NO: 561900 - RNA, 22 nt, Human
cugcagaggguuugagcauccu

SEQ ID NO: 561901 - RNA, 22 nt, Human
ugcuuuaucugacuuggcgcug

SEQ ID NO: 561902 - RNA, 22 nt, Human
cuggccaggcuugggacagaca

SEQ ID NO: 561903 - RNA, 21 nt, Human
gcugucucuggcuccugggaa

SEQ ID NO: 561904 - RNA, 22 nt, Human
ugugaaggagcaugcagagggg

SEQ ID NO: 561905 - RNA, 22 nt, Human
ggcugagccacugcgccuggcu

SEQ ID NO: 561906 - RNA, 22 nt, Human
aguuucuuauucuuaguuaugu

SEQ ID NO: 561907 - RNA, 22 nt, Human
ucuucaugucucugcuugaguc

SEQ ID NO: 561908 - RNA, 22 nt, Human
ccuuagagaguacugggcugcc

SEQ ID NO: 561909 - RNA, 22 nt, Human
uguggcucuccuccugcugccc

SEQ ID NO: 561910 - RNA, 22 nt, Human
uagagcaguuggcagcuguauu

SEQ ID NO: 561911 - RNA, 22 nt, Human
cagggguggcugcagcagaggu

SEQ ID NO: 561912 - RNA, 22 nt, Human
ucucuggguugagaacuaggac

SEQ ID NO: 561913 - RNA, 22 nt, Human
aguuacaaacacuaucaguucu

SEQ ID NO: 561914 - RNA, 22 nt, Human
gagccaggcaccuucuguguug

SEQ ID NO: 561915 - RNA, 22 nt, Human
ccagagucugugugugucaucc

SEQ ID NO: 561916 - RNA, 22 nt, Human
ccagagccucaacacagguccu

SEQ ID NO: 561917 - RNA, 22 nt, Human
uagggacccucccugcucuaac

SEQ ID NO: 561918 - RNA, 22 nt, Human
agauuuagugguggaauuuugg

SEQ ID NO: 561919 - RNA, 22 nt, Human
uuugcaaagugacuauuauaug

SEQ ID NO: 561920 - RNA, 20 nt, Human
uaagaacaagacuaggaagc

SEQ ID NO: 561921 - RNA, 22 nt, Human
ucccacauuacccugacugaca

SEQ ID NO: 561922 - RNA, 22 nt, Human
gcugcuggaagcaugcgaugaa

SEQ ID NO: 561923 - RNA, 22 nt, Human
aggaaggacuccaugguccguc

SEQ ID NO: 561924 - RNA, 22 nt, Human
gaggcugaugcugccucacaga

SEQ ID NO: 561925 - RNA, 22 nt, Human
auauuucucucagacauggaag

SEQ ID NO: 561926 - RNA, 22 nt, Human
ugcaaucucggcacuuugggag

SEQ ID NO: 561927 - RNA, 22 nt, Human
uaguauuuccuguaagcuauag

SEQ ID NO: 561928 - RNA, 22 nt, Human
aggaaucccgcaccagcugcug

SEQ ID NO: 561929 - RNA, 22 nt, Human
ugugaaauucuugaaaugcaca

SEQ ID NO: 561930 - RNA, 22 nt, Human
agcagcuucuuucacuccugga

SEQ ID NO: 561931 - RNA, 19 nt, Human
acagaaauguaagugagac

SEQ ID NO: 561932 - RNA, 22 nt, Human
uaaggcucauguaauuagagau

SEQ ID NO: 561933 - RNA, 22 nt, Human
aaggccagcuuguagggcuggu

SEQ ID NO: 561934 - RNA, 22 nt, Human
cacaaaaguaggaggcaggcgg

SEQ ID NO: 561935 - RNA, 22 nt, Human
agccugugacauugacuaugaa

SEQ ID NO: 561936 - RNA, 22 nt, Human
agugcagcucccucaccugcuu

SEQ ID NO: 561937 - RNA, 22 nt, Human
aagcuggacucugccauuuacu

SEQ ID NO: 561938 - RNA, 23 nt, Human
ucccaugggcucacugcccugca

SEQ ID NO: 561939 - RNA, 21 nt, Human
aggacaggaacuggcugaaua

SEQ ID NO: 561940 - RNA, 22 nt, Human
uuugaaauuggcucauugguuu

SEQ ID NO: 561941 - RNA, 19 nt, Human
uccuccuuacuuccucuug

SEQ ID NO: 561942 - RNA, 22 nt, Human
ugccagcacaaguuaagagauc

SEQ ID NO: 561943 - RNA, 22 nt, Human
ucuggcagugaagucaugaggu

SEQ ID NO: 561944 - RNA, 22 nt, Human
gaggccugguuuccagcauccu

SEQ ID NO: 561945 - RNA, 22 nt, Human
uaagaacauuuucggaaagaua

SEQ ID NO: 561946 - RNA, 22 nt, Human
gugggaguggggaagcagagug

SEQ ID NO: 561947 - RNA, 22 nt, Human
uuucucaaggugucauguauuu

SEQ ID NO: 561948 - RNA, 22 nt, Human
agggucugacugaauggaaaag

SEQ ID NO: 561949 - RNA, 22 nt, Human
cuuuuuuaagguagcuccuccu

SEQ ID NO: 561950 - RNA, 22 nt, Human
ccccugaagacaauggagaggu

SEQ ID NO: 561951 - RNA, 22 nt, Human
gguggccuuucaguggaucagg

SEQ ID NO: 561952 - RNA, 22 nt, Human
gaaggcuguaggcaaaguagga

SEQ ID NO: 561953 - RNA, 20 nt, Human
uagaggggacaaucauugcc

SEQ ID NO: 561954 - RNA, 22 nt, Human
caguguggcugagacagaggcu

SEQ ID NO: 561955 - RNA, 22 nt, Human
gacauguugaagaauauuugga

SEQ ID NO: 561956 - RNA, 22 nt, Human
ucuuuuauccuacauuuagcuc

SEQ ID NO: 561957 - RNA, 22 nt, Human
uuuacaaggcaguuauuuuccu

SEQ ID NO: 561958 - RNA, 22 nt, Human
ugugagagagugcauuugcaua

SEQ ID NO: 561959 - RNA, 22 nt, Human
cucaagucagaaauaaaagcau

SEQ ID NO: 561960 - RNA, 22 nt, Human
uuuauucaagaugagguucaug

SEQ ID NO: 561961 - RNA, 22 nt, Human
uugauuugauuguaauggcucu

SEQ ID NO: 561962 - RNA, 22 nt, Human
uggugcagauagugguguagua

SEQ ID NO: 561963 - RNA, 20 nt, Human
gaaggaagggggcaagguga

SEQ ID NO: 561964 - RNA, 18 nt, Human
ccucaggggaccuggcag

SEQ ID NO: 561965 - RNA, 22 nt, Human
aaauuauuauaggcagagcuga

SEQ ID NO: 561966 - RNA, 22 nt, Human
agaagccaaaugccagugaccu

SEQ ID NO: 561967 - RNA, 22 nt, Human
aagcaaggccggaaggaaacuc

SEQ ID NO: 561968 - RNA, 22 nt, Human
ugagaaagacagacauuccuaa

SEQ ID NO: 561969 - RNA, 18 nt, Human
uccccugcucuggugcuc

SEQ ID NO: 561970 - RNA, 22 nt, Human
ccagagcagggcagcagggcuc

SEQ ID NO: 561971 - RNA, 22 nt, Human
cuguuauuucugccaggugagu

SEQ ID NO: 561972 - RNA, 22 nt, Human
uacauuguucaugcaugagaaa

SEQ ID NO: 561973 - RNA, 22 nt, Human
aauguguauacuggcaauuaag

SEQ ID NO: 561974 - RNA, 21 nt, Human
gagagggcauuauaggaagug

SEQ ID NO: 561975 - RNA, 19 nt, Human
ggagaagcccaggaauccu

SEQ ID NO: 561976 - RNA, 22 nt, Human
uuguuuccauugcagacugugu

SEQ ID NO: 561977 - RNA, 22 nt, Human
gggcugucacgccccugcaccu

SEQ ID NO: 561978 - RNA, 22 nt, Human
uaggcagcugcaaacuucgguc

SEQ ID NO: 561979 - RNA, 23 nt, Human
uguaaacaucacccccuggaguu

SEQ ID NO: 561980 - RNA, 22 nt, Human
gacccugccaugagugacaggg

SEQ ID NO: 561981 - RNA, 22 nt, Human
cuccucacacccacugcaacca

SEQ ID NO: 561982 - RNA, 22 nt, Human
aggcaggggagcuggaagggua

SEQ ID NO: 561983 - RNA, 22 nt, Human
caggaagauuguggaggugguu

SEQ ID NO: 561984 - RNA, 22 nt, Human
acacuucagcaguaugcuuggg

SEQ ID NO: 561985 - RNA, 22 nt, Human
uguacagagguguacauaugau

SEQ ID NO: 561986 - RNA, 22 nt, Human
gugguccuuuagaggauguaau

SEQ ID NO: 561987 - RNA, 22 nt, Human
aaggcagcaagaauuccagguu

SEQ ID NO: 561988 - RNA, 22 nt, Human
agaggcugagaaacccucuucu

SEQ ID NO: 561989 - RNA, 22 nt, Human
auaugaagaaucuaggauaggc

SEQ ID NO: 561990 - RNA, 22 nt, Human
ccucaggaaccacauugcugcu

SEQ ID NO: 561991 - RNA, 22 nt, Human
gcacagccuugcccugugcccu

SEQ ID NO: 561992 - RNA, 22 nt, Human
ccuggcagguggagguugcagu

SEQ ID NO: 561993 - RNA, 18 nt, Human
aggcaggcuggagugacu

SEQ ID NO: 561994 - RNA, 22 nt, Human
uuauugccugauugaggucauu

SEQ ID NO: 561995 - RNA, 21 nt, Human
agcuuguguguaucacagugu

SEQ ID NO: 561996 - RNA, 18 nt, Human
aaacagugccuaaguguc

SEQ ID NO: 561997 - RNA, 22 nt, Human
auuuuugagcugugaacauagc

SEQ ID NO: 561998 - RNA, 22 nt, Human
ccuggccucgugcucacggcuc

SEQ ID NO: 561999 - RNA, 22 nt, Human
aggggugaaggcccgauaggag

SEQ ID NO: 562000 - RNA, 22 nt, Human
cuggccuggucuggccucucca

SEQ ID NO: 562001 - RNA, 22 nt, Human
aguauuucugaauauuaucaua

SEQ ID NO: 562002 - RNA, 22 nt, Human
aagaacagguucuagaaccauu

SEQ ID NO: 562003 - RNA, 22 nt, Human
gcuggcaggauagaagucuaau

SEQ ID NO: 562004 - RNA, 22 nt, Human
ugaggcaguauucuccauucca

SEQ ID NO: 562005 - RNA, 22 nt, Human
ugggcugagcagugaagcucau

SEQ ID NO: 562006 - RNA, 22 nt, Human
cuguggcucaaaaucccaugau

SEQ ID NO: 562007 - RNA, 22 nt, Human
ugcagggacacgaagacaaaua

SEQ ID NO: 562008 - RNA, 22 nt, Human
gcuggagucuggaggugugcca

SEQ ID NO: 562009 - RNA, 22 nt, Human
agaugguuuugucuuuaugauu

SEQ ID NO: 562010 - RNA, 22 nt, Human
cugggccuuuaccuacggaguu

SEQ ID NO: 562011 - RNA, 22 nt, Human
gagguacagaguguuccaaugu

SEQ ID NO: 562012 - RNA, 22 nt, Human
caggcacucauucagagaggug

SEQ ID NO: 562013 - RNA, 22 nt, Human
uggcuucauuauuguuuuuccu

SEQ ID NO: 562014 - RNA, 22 nt, Human
ucugagugauguugagucagaa

SEQ ID NO: 562015 - RNA, 22 nt, Human
agauuugucagcucagucuuua

SEQ ID NO: 562016 - RNA, 23 nt, Human
guccagaacccaggcuggggugg

SEQ ID NO: 562017 - RNA, 22 nt, Human
uuucacagcugggaagagauau

SEQ ID NO: 562018 - RNA, 22 nt, Human
cacaggaaugaacagggaaaga

SEQ ID NO: 562019 - RNA, 22 nt, Human
aaauuucaagcaaaguagcuau

SEQ ID NO: 562020 - RNA, 22 nt, Human
guuauucaacuugugucucuua

SEQ ID NO: 562021 - RNA, 22 nt, Human
caggucagaggcgcagccccca

SEQ ID NO: 562022 - RNA, 22 nt, Human
acuuucauuuguaauaaacuuc

SEQ ID NO: 562023 - RNA, 22 nt, Human
gcaaaugcuaaaguguagagac

SEQ ID NO: 562024 - RNA, 22 nt, Human
guuucuuuuaaaauauguagac

SEQ ID NO: 562025 - RNA, 21 nt, Human
uucaaugaaaacaaagugagg

SEQ ID NO: 562026 - RNA, 22 nt, Human
aguggugccggguggguuuugc

SEQ ID NO: 562027 - RNA, 22 nt, Human
uuccaaugacuaguggcauccu

SEQ ID NO: 562028 - RNA, 22 nt, Human
acugcacagaagaaacuaucaa

SEQ ID NO: 562029 - RNA, 22 nt, Human
gcugccuggagaggcagggaug

SEQ ID NO: 562030 - RNA, 22 nt, Human
acaggcagggaccuuggcuaag

SEQ ID NO: 562031 - RNA, 22 nt, Human
uaaauuaugucacaugacucug

SEQ ID NO: 562032 - RNA, 22 nt, Human
uaucuacauucuuguaucuucu

SEQ ID NO: 562033 - RNA, 22 nt, Human
aggaaagggguagguguggacg

SEQ ID NO: 562034 - RNA, 22 nt, Human
cagggagcuauuaggguuagug

SEQ ID NO: 562035 - RNA, 23 nt, Human
ccagcugugccuggcccaggagc

SEQ ID NO: 562036 - RNA, 22 nt, Human
aguguuccugcucucaggaagc

SEQ ID NO: 562037 - RNA, 22 nt, Human
acuguuuuccuaaugagcaaga

SEQ ID NO: 562038 - RNA, 22 nt, Human
cuuaggaacgcucugccuagug

SEQ ID NO: 562039 - RNA, 22 nt, Human
uugaaggacauccuauuucuag

SEQ ID NO: 562040 - RNA, 20 nt, Human
aggagcugaauuagaggguu

SEQ ID NO: 562041 - RNA, 22 nt, Human
ugagcuuacuucuguacacaga

SEQ ID NO: 562042 - RNA, 22 nt, Human
agccaggauuggcugagccuua

SEQ ID NO: 562043 - RNA, 22 nt, Human
augcauaagugcagcagauuug

SEQ ID NO: 562044 - RNA, 20 nt, Human
gauuacaaaaugaaaugcau

SEQ ID NO: 562045 - RNA, 22 nt, Human
ggcugggccagggccuguggac

SEQ ID NO: 562046 - RNA, 22 nt, Human
agcccugcaggaggugggagag

SEQ ID NO: 562047 - RNA, 22 nt, Human
cagcagcuuugccaagucagcc

SEQ ID NO: 562048 - RNA, 22 nt, Human
uuaacacagggggagacaaagu

SEQ ID NO: 562049 - RNA, 22 nt, Human
gcaaaauuuacacuccuucuuc

SEQ ID NO: 562050 - RNA, 22 nt, Human
aaugaacaucaaaugccuacca

SEQ ID NO: 562051 - RNA, 22 nt, Human
agggagguaggagcuucuagcu

SEQ ID NO: 562052 - RNA, 22 nt, Human
uucaaacuguguaauuuauaaa

SEQ ID NO: 562053 - RNA, 22 nt, Human
ucagagucuaaauagaagaaua

SEQ ID NO: 562054 - RNA, 22 nt, Human
cccaggcaguagaaagaagagg

SEQ ID NO: 562055 - RNA, 22 nt, Human
agcgagguuuguucuauucagu

SEQ ID NO: 562056 - RNA, 22 nt, Human
uacauacauguauguguguauu

SEQ ID NO: 562057 - RNA, 22 nt, Human
agaaaucucaguaucucaggga

SEQ ID NO: 562058 - RNA, 22 nt, Human
aagggccauaacuugcaguguu

SEQ ID NO: 562059 - RNA, 22 nt, Human
uaccacaguuuaucuauucagc

SEQ ID NO: 562060 - RNA, 23 nt, Human
ucuucaugcccaggccuuggugc

SEQ ID NO: 562061 - RNA, 22 nt, Human
gcagcaggcuuuucauaccuug

SEQ ID NO: 562062 - RNA, 20 nt, Human
uggagguggucugcuguccu

SEQ ID NO: 562063 - RNA, 18 nt, Human
ccucagggagagagacgc

SEQ ID NO: 562064 - RNA, 22 nt, Human
cugggaugauagugcuaguauu

SEQ ID NO: 562065 - RNA, 22 nt, Human
agcugaagcaacaacaggaugg

SEQ ID NO: 562066 - RNA, 22 nt, Human
cacaggagguuaggaagugguc

SEQ ID NO: 562067 - RNA, 22 nt, Human
uuccagaaaccugaaaguuucu

SEQ ID NO: 562068 - RNA, 22 nt, Human
auuguugggucucacuccuaga

SEQ ID NO: 562069 - RNA, 22 nt, Human
cacugcuucuggaggaauuugg

SEQ ID NO: 562070 - RNA, 22 nt, Human
ggcaggcuccagagcccucucc

SEQ ID NO: 562071 - RNA, 22 nt, Human
uuucuaaaauagauuuuauggu

SEQ ID NO: 562072 - RNA, 22 nt, Human
agcuagagaaugacagagucug

SEQ ID NO: 562073 - RNA, 22 nt, Human
acccaggaugauaauguucaca

SEQ ID NO: 562074 - RNA, 22 nt, Human
uuugcagcaaggagagagcauu

SEQ ID NO: 562075 - RNA, 22 nt, Human
uuugaaacccgucacuuugagu

SEQ ID NO: 562076 - RNA, 20 nt, Human
uacugggcaagcccacagac

SEQ ID NO: 562077 - RNA, 18 nt, Human
cccagcuggugggucagu

SEQ ID NO: 562078 - RNA, 22 nt, Human
cacaugcaucugucauguuugg

SEQ ID NO: 562079 - RNA, 21 nt, Human
ucagagucucaggagcaaggg

SEQ ID NO: 562080 - RNA, 21 nt, Human
aggucccagguuugggcagca

SEQ ID NO: 562081 - RNA, 22 nt, Human
cugccucuauucacugaggcag

SEQ ID NO: 562082 - RNA, 22 nt, Human
aggcucuucuuuuauuaacuga

SEQ ID NO: 562083 - RNA, 22 nt, Human
agugcaaagcagccuguacacc

SEQ ID NO: 562084 - RNA, 22 nt, Human
ucaaagaagauuacccucccau

SEQ ID NO: 562085 - RNA, 21 nt, Human
uuucugaaggcaacaucuauc

SEQ ID NO: 562086 - RNA, 22 nt, Human
ccagagaggccaaggucguggu

SEQ ID NO: 562087 - RNA, 22 nt, Human
uggggccagagauggggcgcag

SEQ ID NO: 562088 - RNA, 22 nt, Human
accuuucacgguaucagacauc

SEQ ID NO: 562089 - RNA, 22 nt, Human
gcagggcauagaggcacggagg

SEQ ID NO: 562090 - RNA, 20 nt, Human
uuuauucagccuacccucuu

SEQ ID NO: 562091 - RNA, 22 nt, Human
agcaagcuaccuagauagucua

SEQ ID NO: 562092 - RNA, 22 nt, Human
uagagcuggaauuugcagcaag

SEQ ID NO: 562093 - RNA, 22 nt, Human
cacugccugugagcugugugcc

SEQ ID NO: 562094 - RNA, 23 nt, Human
uuucauaugguguggaugaagaa

SEQ ID NO: 562095 - RNA, 22 nt, Human
gccagaaacauacacaucacuu

SEQ ID NO: 562096 - RNA, 22 nt, Human
gggcuguguacuaugaggaggg

SEQ ID NO: 562097 - RNA, 23 nt, Human
cagcagagagcagaccuuugugu

SEQ ID NO: 562098 - RNA, 22 nt, Human
cuguugucuccucucagauuau

SEQ ID NO: 562099 - RNA, 22 nt, Human
gggcagccucggugccugcugc

SEQ ID NO: 562100 - RNA, 22 nt, Human
ugcagggcagauaugacuguag

SEQ ID NO: 562101 - RNA, 22 nt, Human
ccacagggcacagacaggaagc

SEQ ID NO: 562102 - RNA, 22 nt, Human
ccuggcugcuauagcagcaugu

SEQ ID NO: 562103 - RNA, 23 nt, Human
uggccaggguacuacacccaccc

SEQ ID NO: 562104 - RNA, 22 nt, Human
gaggagagagggacugucugca

SEQ ID NO: 562105 - RNA, 22 nt, Human
acauuaaagaguaagguuaguu

SEQ ID NO: 562106 - RNA, 22 nt, Human
ccccuuccaggaagcagaaucg

SEQ ID NO: 562107 - RNA, 22 nt, Human
cagacacugcagcagucuccca

SEQ ID NO: 562108 - RNA, 22 nt, Human
guauuucuaguuucuuccacag

SEQ ID NO: 562109 - RNA, 22 nt, Human
uggcugagccuuuggggcuuuc

SEQ ID NO: 562110 - RNA, 22 nt, Human
agcuccugggccaagcccaugc

SEQ ID NO: 562111 - RNA, 22 nt, Human
agcuuguuaaggaugcauauua

SEQ ID NO: 562112 - RNA, 22 nt, Human
uaaauaucaccuggaauuguua

SEQ ID NO: 562113 - RNA, 22 nt, Human
ggcagguggauuuucuacucua

SEQ ID NO: 562114 - RNA, 22 nt, Human
agauaaaaugauuuucuggauc

SEQ ID NO: 562115 - RNA, 22 nt, Human
agcagcaaagaauaggcccucu

SEQ ID NO: 562116 - RNA, 22 nt, Human
gggcugagccauuugaaccuug

SEQ ID NO: 562117 - RNA, 22 nt, Human
cuggcugcuuguagacucgacu

SEQ ID NO: 562118 - RNA, 21 nt, Human
uucaagauauuuaaaaggugg

SEQ ID NO: 562119 - RNA, 22 nt, Human
uacagauauuguacaguuauag

SEQ ID NO: 562120 - RNA, 22 nt, Human
uacauuaucuuguuaucuuuca

SEQ ID NO: 562121 - RNA, 22 nt, Human
uauuucaggggguacaagaaga

SEQ ID NO: 562122 - RNA, 22 nt, Human
gagagucuaggaaccucauaua

SEQ ID NO: 562123 - RNA, 22 nt, Human
acugggaggcaaagagcaagga

SEQ ID NO: 562124 - RNA, 23 nt, Human
gccucuggagccccagugcucag

SEQ ID NO: 562125 - RNA, 22 nt, Human
aaugcaauaccuuuuuaugcug

SEQ ID NO: 562126 - RNA, 22 nt, Human
ggcugcaggcagaggcugucug

SEQ ID NO: 562127 - RNA, 22 nt, Human
cuuauguaaaacggaaagggaa

SEQ ID NO: 562128 - RNA, 22 nt, Human
cacacacaguuuuguauucugu

SEQ ID NO: 562129 - RNA, 20 nt, Human
cagcuuuagaucuuugauua

SEQ ID NO: 562130 - RNA, 22 nt, Human
uugcugaaguuaaugcuugcaa

SEQ ID NO: 562131 - RNA, 22 nt, Human
acugaaggaaacuuuuguguuu

SEQ ID NO: 562132 - RNA, 22 nt, Human
cagcuauggugacaaggucagg

SEQ ID NO: 562133 - RNA, 22 nt, Human
gguggguuuggaagagcaggcu

SEQ ID NO: 562134 - RNA, 22 nt, Human
ccucauggaccucagacugucc

SEQ ID NO: 562135 - RNA, 22 nt, Human
cacaggcuugucagcaugaggc

SEQ ID NO: 562136 - RNA, 22 nt, Human
accaagcuguauauuauugguu

SEQ ID NO: 562137 - RNA, 17 nt, Human
uucaaagcuuaucaagg

SEQ ID NO: 562138 - RNA, 21 nt, Human
acagacaguccagagaaaaga

SEQ ID NO: 562139 - RNA, 22 nt, Human
accccaagacaguagaagagaa

SEQ ID NO: 562140 - RNA, 22 nt, Human
cuauuuuaagaggccauuaggu

SEQ ID NO: 562141 - RNA, 22 nt, Human
gaugcugaagugaagugaucuu

SEQ ID NO: 562142 - RNA, 22 nt, Human
aagcagccucauuugugguaag

SEQ ID NO: 562143 - RNA, 22 nt, Human
ucucuucacaugcuugcuccaa

SEQ ID NO: 562144 - RNA, 18 nt, Human
ugcccagaaaagcaggga

SEQ ID NO: 562145 - RNA, 22 nt, Human
uggcagagcccagacuccaguc

SEQ ID NO: 562146 - RNA, 22 nt, Human
cagcuguggagggaggaaaugc

SEQ ID NO: 562147 - RNA, 22 nt, Human
gauuguaaaacagaucauuauc

SEQ ID NO: 562148 - RNA, 19 nt, Human
uuuauucaccuuuaccuug

SEQ ID NO: 562149 - RNA, 22 nt, Human
uugcauguguaauuuuucuaaa

SEQ ID NO: 562150 - RNA, 22 nt, Human
gcagccugaugaucuggguugu

SEQ ID NO: 562151 - RNA, 22 nt, Human
gcccagcuuuuugaggcaggca

SEQ ID NO: 562152 - RNA, 22 nt, Human
gucuuugugguaguccucagcc

SEQ ID NO: 562153 - RNA, 22 nt, Human
ugcagagaagaggacaguucua

SEQ ID NO: 562154 - RNA, 21 nt, Human
agugugugauaggcaggaaga

SEQ ID NO: 562155 - RNA, 19 nt, Human
ucucccagcugagaagggc

SEQ ID NO: 562156 - RNA, 22 nt, Human
uccucaggcggugaggaggggc

SEQ ID NO: 562157 - RNA, 22 nt, Human
agacaggcagaggcugcagagg

SEQ ID NO: 562158 - RNA, 22 nt, Human
ugagccaggcucaagugauccu

SEQ ID NO: 562159 - RNA, 22 nt, Human
acagccuugcuuauuugucucu

SEQ ID NO: 562160 - RNA, 22 nt, Human
aauguguuuaguuaaugaguug

SEQ ID NO: 562161 - RNA, 20 nt, Human
ccuuccccacccgcugaggu

SEQ ID NO: 562162 - RNA, 22 nt, Human
uguuuacuagccaacauggaga

SEQ ID NO: 562163 - RNA, 22 nt, Human
ucgcauuuguuaaagcauguug

SEQ ID NO: 562164 - RNA, 22 nt, Human
cccaggaauuggaggcugcagu

SEQ ID NO: 562165 - RNA, 22 nt, Human
auucuacaaucauguagauccu

SEQ ID NO: 562166 - RNA, 22 nt, Human
ucuuauaccccuaaacugcagc

SEQ ID NO: 562167 - RNA, 22 nt, Human
gccuggcagccuccaaccuuca

SEQ ID NO: 562168 - RNA, 18 nt, Human
agggaucaucacugcagc

SEQ ID NO: 562169 - RNA, 22 nt, Human
caggggcuuuuccucuauaagg

SEQ ID NO: 562170 - RNA, 22 nt, Human
uggagggcaugcuguccauggg

SEQ ID NO: 562171 - RNA, 22 nt, Human
uauuuuguuaauaauccagucc

SEQ ID NO: 562172 - RNA, 22 nt, Human
cccuggagggauuucucaauca

SEQ ID NO: 562173 - RNA, 22 nt, Human
ccaugggcuggcugccuuauca

SEQ ID NO: 562174 - RNA, 22 nt, Human
gacuauuuaaaaagaacuacug

SEQ ID NO: 562175 - RNA, 22 nt, Human
gaugaaaaaagacgagcauaua

SEQ ID NO: 562176 - RNA, 22 nt, Human
aagaugcagcaaacuacuuuuu

SEQ ID NO: 562177 - RNA, 22 nt, Human
acagaugaggaauuuauuuggu

SEQ ID NO: 562178 - RNA, 22 nt, Human
uccucaggaugugggguagaau

SEQ ID NO: 562179 - RNA, 23 nt, Human
aggcugcagaagaauagggucau

SEQ ID NO: 562180 - RNA, 22 nt, Human
agcaacuauauugaaagccacc

SEQ ID NO: 562181 - RNA, 22 nt, Human
aguauguauuuuauacuuacag

SEQ ID NO: 562182 - RNA, 20 nt, Human
ugggaaagucuaagugccuc

SEQ ID NO: 562183 - RNA, 22 nt, Human
aaagcauggcaugaagaacaug

SEQ ID NO: 562184 - RNA, 22 nt, Human
uugaaaaguuuugaaacacucu

SEQ ID NO: 562185 - RNA, 22 nt, Human
cucagugguugagagccugggc

SEQ ID NO: 562186 - RNA, 22 nt, Human
cucucugguuucagcgaagggg

SEQ ID NO: 562187 - RNA, 22 nt, Human
gcaggcugauagaggauuccau

SEQ ID NO: 562188 - RNA, 22 nt, Human
gucuuuuucuacgauagcgccu

SEQ ID NO: 562189 - RNA, 22 nt, Human
agugggcugguggcagggagaa

SEQ ID NO: 562190 - RNA, 22 nt, Human
ggaagccagagugcugggcagg

SEQ ID NO: 562191 - RNA, 22 nt, Human
gcacagguugcaaaaguucaca

SEQ ID NO: 562192 - RNA, 22 nt, Human
cuuuaagagaucaccaaucaca

SEQ ID NO: 562193 - RNA, 20 nt, Human
agccaggguucuggaugcac

SEQ ID NO: 562194 - RNA, 22 nt, Human
cccuuuaaguagaauauauuau

SEQ ID NO: 562195 - RNA, 22 nt, Human
accuuaaaacugacacauggag

SEQ ID NO: 562196 - RNA, 22 nt, Human
cagucccacuagugccaauacc

SEQ ID NO: 562197 - RNA, 20 nt, Human
gacauucauaguuauuacca

SEQ ID NO: 562198 - RNA, 22 nt, Human
uauuccuuggcaaaaaauauau

SEQ ID NO: 562199 - RNA, 22 nt, Human
uaauuauaacaguuacaucuua

SEQ ID NO: 562200 - RNA, 22 nt, Human
agagccuggcucccagcuaccg

SEQ ID NO: 562201 - RNA, 22 nt, Human
acuggaaaguugauuaugucca

SEQ ID NO: 562202 - RNA, 22 nt, Human
aggcugagucaaguuaggguga

SEQ ID NO: 562203 - RNA, 22 nt, Human
uauuauuauauuggaugagacu

SEQ ID NO: 562204 - RNA, 22 nt, Human
agacucuuggagaagagcuaua

SEQ ID NO: 562205 - RNA, 22 nt, Human
auuaauuuuucugacagccaca

SEQ ID NO: 562206 - RNA, 22 nt, Human
caauguacuacaaagauuguca

SEQ ID NO: 562207 - RNA, 18 nt, Human
cucucuuuccacucuuug

SEQ ID NO: 562208 - RNA, 22 nt, Human
gucccaggaguugcugggccuu

SEQ ID NO: 562209 - RNA, 22 nt, Human
ggaugcuggggaccaaucucug

SEQ ID NO: 562210 - RNA, 22 nt, Human
ccugggcaggaugggcccggug

SEQ ID NO: 562211 - RNA, 22 nt, Human
ugggcucagccucagucugugg

SEQ ID NO: 562212 - RNA, 22 nt, Human
uguugagacacagacacaagcc

SEQ ID NO: 562213 - RNA, 22 nt, Human
gagccccaggacagcucuaguu

SEQ ID NO: 562214 - RNA, 22 nt, Human
ugcagugccucggcagugcagc

SEQ ID NO: 562215 - RNA, 22 nt, Human
agcaguuuuuauaacacuggaa

SEQ ID NO: 562216 - RNA, 22 nt, Human
aaaggccacuugaaggauuuuu

SEQ ID NO: 562217 - RNA, 22 nt, Human
gagcagugggaaggaacagggu

SEQ ID NO: 562218 - RNA, 22 nt, Human
uccugcagccacugcaggcaga

SEQ ID NO: 562219 - RNA, 19 nt, Human
gcuguuaaggacccucgga

SEQ ID NO: 562220 - RNA, 22 nt, Human
ugggccuguugccugaguccau

SEQ ID NO: 562221 - RNA, 22 nt, Human
gcugccuggauuugcaauccuc

SEQ ID NO: 562222 - RNA, 22 nt, Human
agcagagccaggucucucugua

SEQ ID NO: 562223 - RNA, 23 nt, Human
ucuucauggccaucugguucuuc

SEQ ID NO: 562224 - RNA, 23 nt, Human
ucagugauguugaaccuagcagu

SEQ ID NO: 562225 - RNA, 22 nt, Human
gaggcagcagggcugguuccuu

SEQ ID NO: 562226 - RNA, 22 nt, Human
aaagcaauugugguuuuugcca

SEQ ID NO: 562227 - RNA, 22 nt, Human
uuuuauaagcaagaaagggaaa

SEQ ID NO: 562228 - RNA, 22 nt, Human
uugggguacgcaggucugggag

SEQ ID NO: 562229 - RNA, 22 nt, Human
uguaaaagguuguucuuucguu

SEQ ID NO: 562230 - RNA, 22 nt, Human
cugugggagggugagagaacca

SEQ ID NO: 562231 - RNA, 22 nt, Human
ucuguccucuuugaagcugcuc

SEQ ID NO: 562232 - RNA, 22 nt, Human
cccagcccccgagugucuggaa

SEQ ID NO: 562233 - RNA, 22 nt, Human
gaggcacaauacaugucucaag

SEQ ID NO: 562234 - RNA, 22 nt, Human
aaugauggauuuagacaagcug

SEQ ID NO: 562235 - RNA, 22 nt, Human
ucaccagggagcuuguccucug

SEQ ID NO: 562236 - RNA, 22 nt, Human
gcaggggcaggagaucucaggc

SEQ ID NO: 562237 - RNA, 19 nt, Human
cugguccugacugaggggu

SEQ ID NO: 562238 - RNA, 22 nt, Human
caaaucuaggaugcauguagug

SEQ ID NO: 562239 - RNA, 22 nt, Human
ccaaaauuauuacauuuguagg

SEQ ID NO: 562240 - RNA, 22 nt, Human
caguggggaggccaggauagaa

SEQ ID NO: 562241 - RNA, 22 nt, Human
aguaaacauuuucauauuuucu

SEQ ID NO: 562242 - RNA, 22 nt, Human
uguaugcuuuccaaaaaugcug

SEQ ID NO: 562243 - RNA, 22 nt, Human
augaggcaaggcuggccguguu

SEQ ID NO: 562244 - RNA, 22 nt, Human
gccuggagggucccucucugga

SEQ ID NO: 562245 - RNA, 22 nt, Human
gaagaagcauucugcuguuuug

SEQ ID NO: 562246 - RNA, 22 nt, Human
ggccugcuccgggggcugagcu

SEQ ID NO: 562247 - RNA, 22 nt, Human
uccauaaaccagaaaaucaaga

SEQ ID NO: 562248 - RNA, 22 nt, Human
aauaugugagguauguucagug

SEQ ID NO: 562249 - RNA, 22 nt, Human
ugggaaagacucaggacaggag

SEQ ID NO: 562250 - RNA, 22 nt, Human
uuugaaauaugugaugagagag

SEQ ID NO: 562251 - RNA, 22 nt, Human
uuacuacauuguaacacaguac

SEQ ID NO: 562252 - RNA, 22 nt, Human
guucaaaggccuguggaaaggg

SEQ ID NO: 562253 - RNA, 22 nt, Human
uucagagcaucucuaaagccag

SEQ ID NO: 562254 - RNA, 22 nt, Human
cugugcuuaccugcccagguga

SEQ ID NO: 562255 - RNA, 22 nt, Human
uggcaggaaaguaacagagcac

SEQ ID NO: 562256 - RNA, 21 nt, Human
augaagucuaugcuucugugu

SEQ ID NO: 562257 - RNA, 22 nt, Human
ggcuagaguggaacuggagcgg

SEQ ID NO: 562258 - RNA, 22 nt, Human
uuuguguuuguacaaugcacua

SEQ ID NO: 562259 - RNA, 22 nt, Human
uucuuuauguuaaugaaucuau

SEQ ID NO: 562260 - RNA, 22 nt, Human
aaucuuaaagaauauucuacca

SEQ ID NO: 562261 - RNA, 22 nt, Human
uacaagaaggauggagcccacu

SEQ ID NO: 562262 - RNA, 22 nt, Human
cugggacuuuacccuguggccc

SEQ ID NO: 562263 - RNA, 22 nt, Human
ugcgcaggagcucugccaggag

SEQ ID NO: 562264 - RNA, 22 nt, Human
aauaauaagauacuaagggagu

SEQ ID NO: 562265 - RNA, 22 nt, Human
uucuuaaguauuucagagacug

SEQ ID NO: 562266 - RNA, 22 nt, Human
aucaggaucacugggagucuug

SEQ ID NO: 562267 - RNA, 22 nt, Human
ucccaagagcuacucaauggaa

SEQ ID NO: 562268 - RNA, 22 nt, Human
acaggccuuggcaggcauguga

SEQ ID NO: 562269 - RNA, 22 nt, Human
ugggaugggaucucgcuguguc

SEQ ID NO: 562270 - RNA, 22 nt, Human
uauuucuugaguggucaguuuc

SEQ ID NO: 562271 - RNA, 22 nt, Human
acugccuugucucuugccuguu

SEQ ID NO: 562272 - RNA, 22 nt, Human
uuacagauguuucaggaauacu

SEQ ID NO: 562273 - RNA, 22 nt, Human
aaaguucuauguaauguuuuuu

SEQ ID NO: 562274 - RNA, 22 nt, Human
ucuaaagcuccuuccacuaaaa

SEQ ID NO: 562275 - RNA, 22 nt, Human
ggcagaagacaggcaaaucaug

SEQ ID NO: 562276 - RNA, 22 nt, Human
cggcagagcccugagucagccu

SEQ ID NO: 562277 - RNA, 22 nt, Human
ccucaggaaaugaauaaauggc

SEQ ID NO: 562278 - RNA, 22 nt, Human
aggugcagaaaaaaguccuuua

SEQ ID NO: 562279 - RNA, 22 nt, Human
acuggacagguucaugguuuua

SEQ ID NO: 562280 - RNA, 22 nt, Human
caugugacaggagcagcucuaa

SEQ ID NO: 562281 - RNA, 22 nt, Human
aaauuucaguuaccuuuacguu

SEQ ID NO: 562282 - RNA, 19 nt, Human
cuccagaauacauguuccu

SEQ ID NO: 562283 - RNA, 22 nt, Human
ugagaagauugggcagagugga

SEQ ID NO: 562284 - RNA, 22 nt, Human
gagaggccauggcugugcagug

SEQ ID NO: 562285 - RNA, 22 nt, Human
aggggagaggugagcaacuucu

SEQ ID NO: 562286 - RNA, 22 nt, Human
cugugccuaagaugcaugucuc

SEQ ID NO: 562287 - RNA, 22 nt, Human
ugaagaagccaauugguaggcu

SEQ ID NO: 562288 - RNA, 22 nt, Human
gaggaggaggaaguggaaccca

SEQ ID NO: 562289 - RNA, 22 nt, Human
uggcauuuccucagugcucaga

SEQ ID NO: 562290 - RNA, 22 nt, Human
cagagugaacagugggaugugc

SEQ ID NO: 562291 - RNA, 22 nt, Human
uuucacauuagauaugucauuu

SEQ ID NO: 562292 - RNA, 22 nt, Human
auuucuuaugaauauugacugu

SEQ ID NO: 562293 - RNA, 22 nt, Human
gaaggcuaaaggggcagagguu

SEQ ID NO: 562294 - RNA, 22 nt, Human
acaguguagaauccuguacuua

SEQ ID NO: 562295 - RNA, 22 nt, Human
gggccacacagaaccuccuggu

SEQ ID NO: 562296 - RNA, 22 nt, Human
aagggcagaauagagaagaugg

SEQ ID NO: 562297 - RNA, 22 nt, Human
agaaauguggaggaacagggcu

SEQ ID NO: 562298 - RNA, 22 nt, Human
uggcauuucaccuuucauuucc

SEQ ID NO: 562299 - RNA, 19 nt, Human
ggugaccaccuggucagug

SEQ ID NO: 562300 - RNA, 22 nt, Human
cagccaccauacagcagaagcu

SEQ ID NO: 562301 - RNA, 22 nt, Human
uacacuuucguuuguggauuag

SEQ ID NO: 562302 - RNA, 21 nt, Human
ucagcagcuuuugcagucccu

SEQ ID NO: 562303 - RNA, 19 nt, Human
uuagaaacuguugacacug

SEQ ID NO: 562304 - RNA, 19 nt, Human
cuggcucuuggguggagga

SEQ ID NO: 562305 - RNA, 20 nt, Human
acagccagaggaggcagaca

SEQ ID NO: 562306 - RNA, 22 nt, Human
cuguccuuacugcuucuggcuu

SEQ ID NO: 562307 - RNA, 22 nt, Human
gaaaguauuuacauuaacaucu

SEQ ID NO: 562308 - RNA, 22 nt, Human
uagcagaguuugguaccugggg

SEQ ID NO: 562309 - RNA, 22 nt, Human
augcagcugugggcaagaaaug

SEQ ID NO: 562310 - RNA, 22 nt, Human
caguauuuauggcuugaguauu

SEQ ID NO: 562311 - RNA, 22 nt, Human
ccuggcagcauugguagagauu

SEQ ID NO: 562312 - RNA, 22 nt, Human
cucucugggcccaguuggcacc

SEQ ID NO: 562313 - RNA, 22 nt, Human
ugggaccaagucauuucuuuag

SEQ ID NO: 562314 - RNA, 22 nt, Human
gcugaggacaucauggaaggaa

SEQ ID NO: 562315 - RNA, 22 nt, Human
caauuucagugcuguggagagg

SEQ ID NO: 562316 - RNA, 22 nt, Human
ugugagcaagauucagagauuc

SEQ ID NO: 562317 - RNA, 22 nt, Human
uguggccagcagguggcugugu

SEQ ID NO: 562318 - RNA, 22 nt, Human
uggaggaaaauuacuggggucu

SEQ ID NO: 562319 - RNA, 22 nt, Human
cccaguggcuuuugcccagguu

SEQ ID NO: 562320 - RNA, 23 nt, Human
cuggaagugcuuuuauagcuuug

SEQ ID NO: 562321 - RNA, 22 nt, Human
ucccugccucucagacuuccuu

SEQ ID NO: 562322 - RNA, 22 nt, Human
agcagaacugaugagacuugag

SEQ ID NO: 562323 - RNA, 22 nt, Human
auuuacacauucauaagauuuc

SEQ ID NO: 562324 - RNA, 22 nt, Human
uagcugccuagacagcuauagc

SEQ ID NO: 562325 - RNA, 22 nt, Human
uucuacaugagaaaauguauuu

SEQ ID NO: 562326 - RNA, 22 nt, Human
ucuggcucauaggaaggccauu

SEQ ID NO: 562327 - RNA, 22 nt, Human
gugggccuugcagggugcaggg

SEQ ID NO: 562328 - RNA, 22 nt, Human
cuguccagaaagggggcaacaa

SEQ ID NO: 562329 - RNA, 22 nt, Human
ugggaaggugauuuuccaaaag

SEQ ID NO: 562330 - RNA, 22 nt, Human
cuccagaaggugggggagccac

SEQ ID NO: 562331 - RNA, 22 nt, Human
uuuuaccugaaccacacaguau

SEQ ID NO: 562332 - RNA, 22 nt, Human
guaggaagcucugaggcuaguu

SEQ ID NO: 562333 - RNA, 22 nt, Human
guggggcuaaaaacugugcagu

SEQ ID NO: 562334 - RNA, 22 nt, Human
uucagaaaugucagccaucaga

SEQ ID NO: 562335 - RNA, 22 nt, Human
aggcaggucacaugcuuggcga

SEQ ID NO: 562336 - RNA, 22 nt, Human
cuuauuagaguuguguucuguu

SEQ ID NO: 562337 - RNA, 22 nt, Human
cugcagccuccuccagcuacgu

SEQ ID NO: 562338 - RNA, 22 nt, Human
caggggcaagaaugcugucagc

SEQ ID NO: 562339 - RNA, 22 nt, Human
gucucccaauccgggacagccu

SEQ ID NO: 562340 - RNA, 22 nt, Human
gcaccaugacagugaggagaac

SEQ ID NO: 562341 - RNA, 22 nt, Human
aagcugaggcccauggcaaggu

SEQ ID NO: 562342 - RNA, 22 nt, Human
uuuauugcauacacaaauguca

SEQ ID NO: 562343 - RNA, 22 nt, Human
ugggccuccuuuccauucagag

SEQ ID NO: 562344 - RNA, 22 nt, Human
uuuguuuugaacuagcucagaa

SEQ ID NO: 562345 - RNA, 22 nt, Human
gccugucugcagggcugucauu

SEQ ID NO: 562346 - RNA, 22 nt, Human
aaacucaagucuaugaacaagg

SEQ ID NO: 562347 - RNA, 22 nt, Human
acuggcaguggcagcagaaaga

SEQ ID NO: 562348 - RNA, 23 nt, Human
gugcucuucaguuuuagggucau

SEQ ID NO: 562349 - RNA, 22 nt, Human
cuggccuggagccucugggugg

SEQ ID NO: 562350 - RNA, 22 nt, Human
aguggguggcgcagaggaggaa

SEQ ID NO: 562351 - RNA, 22 nt, Human
uuaaagucccugccuuaauucc

SEQ ID NO: 562352 - RNA, 22 nt, Human
ucccagcccagacuucuccagu

SEQ ID NO: 562353 - RNA, 22 nt, Human
uuugugugcuugguauugaaga

SEQ ID NO: 562354 - RNA, 21 nt, Human
cucuugugucagagccagagg

SEQ ID NO: 562355 - RNA, 22 nt, Human
aggcuuuguaccuggggucuua

SEQ ID NO: 562356 - RNA, 20 nt, Human
cagaggcaaggagacuugga

SEQ ID NO: 562357 - RNA, 22 nt, Human
cuuauucauauauucucgguag

SEQ ID NO: 562358 - RNA, 22 nt, Human
cuccucuuuggggauuuacaca

SEQ ID NO: 562359 - RNA, 18 nt, Human
aggagccuuugcacugga

SEQ ID NO: 562360 - RNA, 22 nt, Human
ggugcccuguaaaagccaugca

SEQ ID NO: 562361 - RNA, 19 nt, Human
gccugcagaaaaggcaggg

SEQ ID NO: 562362 - RNA, 22 nt, Human
uuauuauagauuaugcaagauu

SEQ ID NO: 562363 - RNA, 22 nt, Human
gagaauaucuuggcagucucug

SEQ ID NO: 562364 - RNA, 22 nt, Human
acucucccugcuauccacuucc

SEQ ID NO: 562365 - RNA, 22 nt, Human
cugcagaggccucgccuccucu

SEQ ID NO: 562366 - RNA, 22 nt, Human
ucugcugcacaaauucaucucu

SEQ ID NO: 562367 - RNA, 22 nt, Human
gucacccugcuggcuguucagc

SEQ ID NO: 562368 - RNA, 22 nt, Human
auuguucauguaugaauaaaua

SEQ ID NO: 562369 - RNA, 22 nt, Human
caggccagguggcaggcaaaac

SEQ ID NO: 562370 - RNA, 22 nt, Human
guccuggggauacagaagugaa

SEQ ID NO: 562371 - RNA, 23 nt, Human
ucucccaagccuggcaggggcac

SEQ ID NO: 562372 - RNA, 21 nt, Human
cuacuuaaguaggggauuagg

SEQ ID NO: 562373 - RNA, 22 nt, Human
cuagggacugggaccuuaguua

SEQ ID NO: 562374 - RNA, 22 nt, Human
ugaaauguugguaauuuuauau

SEQ ID NO: 562375 - RNA, 22 nt, Human
ccagagaggcaaaacuccuucc

SEQ ID NO: 562376 - RNA, 22 nt, Human
ucugggagcagcucagcagauu

SEQ ID NO: 562377 - RNA, 22 nt, Human
ucuuuucacagacaaauggaga

SEQ ID NO: 562378 - RNA, 22 nt, Human
guaucgguuuauuuuugggaua

SEQ ID NO: 562379 - RNA, 22 nt, Human
cagcugcaguucaaugcuugcu

SEQ ID NO: 562380 - RNA, 22 nt, Human
ucuuugaaguugaaguaguugg

SEQ ID NO: 562381 - RNA, 22 nt, Human
uguacuugaacuugacuguaga

SEQ ID NO: 562382 - RNA, 22 nt, Human
cuuuauuagauguagacuuucu

SEQ ID NO: 562383 - RNA, 22 nt, Human
uaccauuucaguaaaaacuuag

SEQ ID NO: 562384 - RNA, 22 nt, Human
ggccucagggucacucuguaga

SEQ ID NO: 562385 - RNA, 22 nt, Human
ugaggccugucauugucuuguu

SEQ ID NO: 562386 - RNA, 22 nt, Human
cccacacacuggcugcugccaa

SEQ ID NO: 562387 - RNA, 22 nt, Human
agaaaucuaagaugcucaagga

SEQ ID NO: 562388 - RNA, 22 nt, Human
uugcugagucucuagguaugau

SEQ ID NO: 562389 - RNA, 22 nt, Human
ucuucaaacugaaaauuuagaa

SEQ ID NO: 562390 - RNA, 22 nt, Human
ccagggcagccaacccagaugc

SEQ ID NO: 562391 - RNA, 22 nt, Human
caggugggcguggcgagaaggc

SEQ ID NO: 562392 - RNA, 22 nt, Human
cccugggcagucugcacuucag

SEQ ID NO: 562393 - RNA, 22 nt, Human
agggugcaaaagcaaggacagu

SEQ ID NO: 562394 - RNA, 22 nt, Human
gcuguucaaaagccacaguuac

SEQ ID NO: 562395 - RNA, 22 nt, Human
aggggcucaaagugugcaggga

SEQ ID NO: 562396 - RNA, 22 nt, Human
agguuuucagcuguauccugag

SEQ ID NO: 562397 - RNA, 22 nt, Human
caggcagauauguucgcuuuaa

SEQ ID NO: 562398 - RNA, 22 nt, Human
ucugugcucaaguucugccucu

SEQ ID NO: 562399 - RNA, 22 nt, Human
aggccuguuccaggccccuuuu

SEQ ID NO: 562400 - RNA, 22 nt, Human
gucacacagguugaaaugcagu

SEQ ID NO: 562401 - RNA, 22 nt, Human
aguuuguaucaauuugcuuuau

SEQ ID NO: 562402 - RNA, 22 nt, Human
cacugggcuuuguaguuagcau

SEQ ID NO: 562403 - RNA, 22 nt, Human
acagugaugagggaauuuugug

SEQ ID NO: 562404 - RNA, 22 nt, Human
aaggagaagucuguugagauug

SEQ ID NO: 562405 - RNA, 22 nt, Human
ucaguauuucuaaacauuggcu

SEQ ID NO: 562406 - RNA, 22 nt, Human
uccuuuguggaaauacuugugg

SEQ ID NO: 562407 - RNA, 22 nt, Human
agcaucugcuuaauggcuuaac

SEQ ID NO: 562408 - RNA, 22 nt, Human
uacacauucuagggcacaguua

SEQ ID NO: 562409 - RNA, 22 nt, Human
uaggccauucuuggagcuuacu

SEQ ID NO: 562410 - RNA, 22 nt, Human
uggagcuggaagacagugauau

SEQ ID NO: 562411 - RNA, 21 nt, Human
aaggcagaagcauggaaugag

SEQ ID NO: 562412 - RNA, 22 nt, Human
guuuacauguacucauuauacu

SEQ ID NO: 562413 - RNA, 21 nt, Human
ugaaaucugaugggacaaaug

SEQ ID NO: 562414 - RNA, 22 nt, Human
ggccacugccuccgccauggcu

SEQ ID NO: 562415 - RNA, 23 nt, Human
agaugaggcuucuccauguuggu

SEQ ID NO: 562416 - RNA, 22 nt, Human
ugaagcagcuucuuucugucaa

SEQ ID NO: 562417 - RNA, 22 nt, Human
gggagggaaggaccuuaugaau

SEQ ID NO: 562418 - RNA, 22 nt, Human
gcugggcccugggugcccuagc

SEQ ID NO: 562419 - RNA, 22 nt, Human
aaaugccucccauucuacugac

SEQ ID NO: 562420 - RNA, 22 nt, Human
acuguguccucauguggcagaa

SEQ ID NO: 562421 - RNA, 22 nt, Human
ucagaaaagacucaggggcuga

SEQ ID NO: 562422 - RNA, 22 nt, Human
agggcugagugggagagaguug

SEQ ID NO: 562423 - RNA, 22 nt, Human
cuguauuuucaugccuacguac

SEQ ID NO: 562424 - RNA, 22 nt, Human
ggaaaucaagaagcagaugagu

SEQ ID NO: 562425 - RNA, 20 nt, Human
uggugagagcaccugauggg

SEQ ID NO: 562426 - RNA, 22 nt, Human
agauacauuguucuaagcauug

SEQ ID NO: 562427 - RNA, 22 nt, Human
cacacaguaggcacucauuaau

SEQ ID NO: 562428 - RNA, 21 nt, Human
aguuuucugaguuauaaaaua

SEQ ID NO: 562429 - RNA, 22 nt, Human
cuuguucaguugccucuccugc

SEQ ID NO: 562430 - RNA, 22 nt, Human
ggaggcugaggccccucacagg

SEQ ID NO: 562431 - RNA, 22 nt, Human
aagauauuuuagaacauucacu

SEQ ID NO: 562432 - RNA, 22 nt, Human
uauauuaaccauaggguucuag

SEQ ID NO: 562433 - RNA, 22 nt, Human
augaugguuguccuaggugcau

SEQ ID NO: 562434 - RNA, 22 nt, Human
cuucccaagcuuuaguuauuuu

SEQ ID NO: 562435 - RNA, 22 nt, Human
aacaugauuuaguauaaugcag

SEQ ID NO: 562436 - RNA, 22 nt, Human
accagagcagacuacuggaggu

SEQ ID NO: 562437 - RNA, 22 nt, Human
uggcagggccugcucaucaucc

SEQ ID NO: 562438 - RNA, 22 nt, Human
gggcugagugucccaggccgaa

SEQ ID NO: 562439 - RNA, 21 nt, Human
ugaagccugaggcauagcccc

SEQ ID NO: 562440 - RNA, 22 nt, Human
aagugacaccucuucccuuucc

SEQ ID NO: 562441 - RNA, 22 nt, Human
uauuuccacccucaguaaggaa

SEQ ID NO: 562442 - RNA, 22 nt, Human
gcuuccugauauucauacuguu

SEQ ID NO: 562443 - RNA, 20 nt, Human
ugggccuguggcagaagucu

SEQ ID NO: 562444 - RNA, 22 nt, Human
aagaacagauucagccugaacu

SEQ ID NO: 562445 - RNA, 22 nt, Human
ugucucugccagcuagcagaau

SEQ ID NO: 562446 - RNA, 22 nt, Human
aauguuuuacagaucccauuag

SEQ ID NO: 562447 - RNA, 22 nt, Human
ugcugagguuucugacuaugga

SEQ ID NO: 562448 - RNA, 19 nt, Human
ugcauacauguuaacaugu

SEQ ID NO: 562449 - RNA, 22 nt, Human
acagaguaggugcugucgacug

SEQ ID NO: 562450 - RNA, 22 nt, Human
ugccaggcauuugacagacacu

SEQ ID NO: 562451 - RNA, 23 nt, Human
uuucuaagguuuuuaucugcuac

SEQ ID NO: 562452 - RNA, 22 nt, Human
ugcaccaagucuggcacugaau

SEQ ID NO: 562453 - RNA, 22 nt, Human
agcaguggccuggggcucugug

SEQ ID NO: 562454 - RNA, 22 nt, Human
cugggcuugaguuccugcucgu

SEQ ID NO: 562455 - RNA, 19 nt, Human
aaaguuuuauucucauuug

SEQ ID NO: 562456 - RNA, 22 nt, Human
uauuauuaucuuugaaugggac

SEQ ID NO: 562457 - RNA, 22 nt, Human
cugcuuugaggggcucuguaua

SEQ ID NO: 562458 - RNA, 22 nt, Human
cagcagagcugugugggaaggg

SEQ ID NO: 562459 - RNA, 22 nt, Human
accagccaccaccaggagaucg

SEQ ID NO: 562460 - RNA, 22 nt, Human
uccuggagggaggcggugcuac

SEQ ID NO: 562461 - RNA, 22 nt, Human
aaagagaaacuuagaagccuga

SEQ ID NO: 562462 - RNA, 22 nt, Human
cagucccuaguggagcucacag

SEQ ID NO: 562463 - RNA, 22 nt, Human
aacauuuauugagcaccuacug

SEQ ID NO: 562464 - RNA, 22 nt, Human
cagcuggcguggagugauugca

SEQ ID NO: 562465 - RNA, 22 nt, Human
uuccaaauguuggacaacugua

SEQ ID NO: 562466 - RNA, 22 nt, Human
auuuccauuuucagccauuacu

SEQ ID NO: 562467 - RNA, 22 nt, Human
caggaaagggaugggcugccac

SEQ ID NO: 562468 - RNA, 22 nt, Human
acaagaauuauuucuaguuaac

SEQ ID NO: 562469 - RNA, 18 nt, Human
agagaugguguagaguuu

SEQ ID NO: 562470 - RNA, 22 nt, Human
cugggcuggagugcaauggcgc

SEQ ID NO: 562471 - RNA, 22 nt, Human
ucaaaguccuugcuuuuucugu

SEQ ID NO: 562472 - RNA, 22 nt, Human
acucuucacacuugucuccagg

SEQ ID NO: 562473 - RNA, 22 nt, Human
ccuagaugggauggcggccggg

SEQ ID NO: 562474 - RNA, 22 nt, Human
ugagaaaacaguuuguaauaau

SEQ ID NO: 562475 - RNA, 22 nt, Human
gguggcugguuuuauaagaggu

SEQ ID NO: 562476 - RNA, 22 nt, Human
gcagccacuaguuuuccuguuu

SEQ ID NO: 562477 - RNA, 22 nt, Human
guguaaggccccagguucuuua

SEQ ID NO: 562478 - RNA, 22 nt, Human
cuucuucaauagcaagcgcaua

SEQ ID NO: 562479 - RNA, 22 nt, Human
uuucuuccuaaauaugauuucc

SEQ ID NO: 562480 - RNA, 22 nt, Human
gccaggcacaguucuaggugcu

SEQ ID NO: 562481 - RNA, 22 nt, Human
ugcuggccgugagcucucggga

SEQ ID NO: 562482 - RNA, 22 nt, Human
uggagcaggcaucuuucucucu

SEQ ID NO: 562483 - RNA, 22 nt, Human
aggugggcaccaggcuuguggu

SEQ ID NO: 562484 - RNA, 22 nt, Human
cagggcucuucaucacacagua

SEQ ID NO: 562485 - RNA, 22 nt, Human
gccaggcuggucuugaacuccu

SEQ ID NO: 562486 - RNA, 22 nt, Human
auuucauccauuaagaguacuc

SEQ ID NO: 562487 - RNA, 22 nt, Human
cugagcugcucccgcugcagcg

SEQ ID NO: 562488 - RNA, 22 nt, Human
aauggccuggagggaauacaga

SEQ ID NO: 562489 - RNA, 22 nt, Human
ugcagggaaaacccaggaugcu

SEQ ID NO: 562490 - RNA, 22 nt, Human
uguguccuuuggaggaucagcg

SEQ ID NO: 562491 - RNA, 22 nt, Human
gaggcugcuguuagcccugggc

SEQ ID NO: 562492 - RNA, 22 nt, Human
uggagcagcaucacuuugagcu

SEQ ID NO: 562493 - RNA, 23 nt, Human
aggagccaggaaccagcuucccc

SEQ ID NO: 562494 - RNA, 22 nt, Human
gacagaggagaagaugcugugg

SEQ ID NO: 562495 - RNA, 22 nt, Human
uagggcagauucgguggaguuu

SEQ ID NO: 562496 - RNA, 22 nt, Human
uccuuuaaagaacugugcuuuu

SEQ ID NO: 562497 - RNA, 22 nt, Human
auguucaaacuuuuuacacacc

SEQ ID NO: 562498 - RNA, 19 nt, Human
acacagggcuagaguuaca

SEQ ID NO: 562499 - RNA, 22 nt, Human
ucagccuggcaggauggccugg

SEQ ID NO: 562500 - RNA, 17 nt, Human
agcagaagucagaggga

SEQ ID NO: 562501 - RNA, 18 nt, Human
uuucugaaugucuauuuc

SEQ ID NO: 562502 - RNA, 22 nt, Human
uguggugagaaacugguagauu

SEQ ID NO: 562503 - RNA, 22 nt, Human
cagccugacuauggcugcaggu

SEQ ID NO: 562504 - RNA, 22 nt, Human
uuagccauauagaaaaagagcu

SEQ ID NO: 562505 - RNA, 22 nt, Human
uuaaugcuugucuagaucuucu

SEQ ID NO: 562506 - RNA, 22 nt, Human
aucagagacaaaaccagcacuu

SEQ ID NO: 562507 - RNA, 22 nt, Human
gaggcagcgggucaggaccgug

SEQ ID NO: 562508 - RNA, 22 nt, Human
uugcagcugcaguaaauguuca

SEQ ID NO: 562509 - RNA, 22 nt, Human
caguucuggaggauagaagucu

SEQ ID NO: 562510 - RNA, 22 nt, Human
uuguuucuuugaaguuucuaga

SEQ ID NO: 562511 - RNA, 22 nt, Human
ccuacagagcagcaggaccaga

SEQ ID NO: 562512 - RNA, 22 nt, Human
cugaaaauguuacacaggaaga

SEQ ID NO: 562513 - RNA, 22 nt, Human
ggaaagcauccaggugccccca

SEQ ID NO: 562514 - RNA, 22 nt, Human
guccaguguguuuaucuuggau

SEQ ID NO: 562515 - RNA, 22 nt, Human
gcauuaaaugcuagggaccuaa

SEQ ID NO: 562516 - RNA, 22 nt, Human
agucucugcaugaugcagcaca

SEQ ID NO: 562517 - RNA, 22 nt, Human
aauuuacaguugcugaugguac

SEQ ID NO: 562518 - RNA, 22 nt, Human
ggggauggauuccgggucccug

SEQ ID NO: 562519 - RNA, 22 nt, Human
cugaaugucgaucagcuugggu

SEQ ID NO: 562520 - RNA, 22 nt, Human
agcauccaacaggagggaaggg

SEQ ID NO: 562521 - RNA, 22 nt, Human
gcagacaggauuggguuaauag

SEQ ID NO: 562522 - RNA, 22 nt, Human
auuucauguuaacugaacagaa

SEQ ID NO: 562523 - RNA, 22 nt, Human
ggcugcuuuaucggcugcugaa

SEQ ID NO: 562524 - RNA, 22 nt, Human
cuauuaggcuuccauuucaugc

SEQ ID NO: 562525 - RNA, 23 nt, Human
ucuuuuuaagagaucuagugacg

SEQ ID NO: 562526 - RNA, 22 nt, Human
aaaggccaagcaugagguggac

SEQ ID NO: 562527 - RNA, 22 nt, Human
uacauauuugucuuuguacugu

SEQ ID NO: 562528 - RNA, 22 nt, Human
uauagcauggcuauauuguugc

SEQ ID NO: 562529 - RNA, 22 nt, Human
aaacacuucaaggacuucuguc

SEQ ID NO: 562530 - RNA, 22 nt, Human
gcuuugccuugaacucucaugu

SEQ ID NO: 562531 - RNA, 20 nt, Human
cugcacugaacaugucugag

SEQ ID NO: 562532 - RNA, 22 nt, Human
uccuccaguggcccaguccuuc

SEQ ID NO: 562533 - RNA, 22 nt, Human
gggcagguuggcaucccgggca

SEQ ID NO: 562534 - RNA, 22 nt, Human
aacacuuugggcauggccuucc

SEQ ID NO: 562535 - RNA, 22 nt, Human
agccauccucccaccucagccu

SEQ ID NO: 562536 - RNA, 22 nt, Human
ugucagcucauugaaggcacaa

SEQ ID NO: 562537 - RNA, 22 nt, Human
agagccacugggagacagagca

SEQ ID NO: 562538 - RNA, 22 nt, Human
acauuucuuugcuagacagcag

SEQ ID NO: 562539 - RNA, 22 nt, Human
aaacaagcugcagacaagccau

SEQ ID NO: 562540 - RNA, 22 nt, Human
agcccugcccugccauguggca

SEQ ID NO: 562541 - RNA, 22 nt, Human
uauuagguaaaggacuugcagg

SEQ ID NO: 562542 - RNA, 20 nt, Human
uuccuguauacaaagaguuc

SEQ ID NO: 562543 - RNA, 22 nt, Human
gugcagcugugugagagcucca

SEQ ID NO: 562544 - RNA, 20 nt, Human
aagcaauauagugcaaaugu

SEQ ID NO: 562545 - RNA, 22 nt, Human
aaaucucaggccucuauuuacu

SEQ ID NO: 562546 - RNA, 22 nt, Human
ggccuagggaguggccaugccu

SEQ ID NO: 562547 - RNA, 22 nt, Human
ugacccugcuucuuggugcagg

SEQ ID NO: 562548 - RNA, 22 nt, Human
agcccugcucaucuggaucccg

SEQ ID NO: 562549 - RNA, 22 nt, Human
cauucugacccuaugauuuaag

SEQ ID NO: 562550 - RNA, 22 nt, Human
uaaacauggauucugaucacag

SEQ ID NO: 562551 - RNA, 22 nt, Human
ccaggcuccccaggaggcccuu

SEQ ID NO: 562552 - RNA, 22 nt, Human
cugcugagcccuggcacaggug

SEQ ID NO: 562553 - RNA, 22 nt, Human
auaugagaauuggaaaauauca

SEQ ID NO: 562554 - RNA, 22 nt, Human
uuaugacaggaaaaucacagaa

SEQ ID NO: 562555 - RNA, 22 nt, Human
agugcugucccgacaacugagg

SEQ ID NO: 562556 - RNA, 22 nt, Human
cggcugagcagugcugauggaa

SEQ ID NO: 562557 - RNA, 22 nt, Human
cuggucaggaagguggggacag

SEQ ID NO: 562558 - RNA, 22 nt, Human
cuucuggguauuccagauaccu

SEQ ID NO: 562559 - RNA, 22 nt, Human
cagguccccuccccuaccaggc

SEQ ID NO: 562560 - RNA, 22 nt, Human
cagugggaagggcagaggcuuu

SEQ ID NO: 562561 - RNA, 22 nt, Human
cagcccaggccgacaguuccuc

SEQ ID NO: 562562 - RNA, 22 nt, Human
ucucugagcccaauguagcaau

SEQ ID NO: 562563 - RNA, 22 nt, Human
gguaacaguuacaguaacagua

SEQ ID NO: 562564 - RNA, 21 nt, Human
gaggcugucugcugcuggccu

SEQ ID NO: 562565 - RNA, 22 nt, Human
auuacagauuauaaauuugagc

SEQ ID NO: 562566 - RNA, 22 nt, Human
uuuuggaauuuauacaguaaug

SEQ ID NO: 562567 - RNA, 22 nt, Human
gagaggccaaaaucccugcccc

SEQ ID NO: 562568 - RNA, 22 nt, Human
ugacagaaauaguucuuaauuu

SEQ ID NO: 562569 - RNA, 22 nt, Human
cuguccugauggugccacuggu

SEQ ID NO: 562570 - RNA, 22 nt, Human
acauuugacauuuaguaucagc

SEQ ID NO: 562571 - RNA, 22 nt, Human
cuguguccaauggccuuagcag

SEQ ID NO: 562572 - RNA, 22 nt, Human
cugggccagaccuuguggucuu

SEQ ID NO: 562573 - RNA, 22 nt, Human
caaguaaagaaucacauuucuu

SEQ ID NO: 562574 - RNA, 20 nt, Human
gggcagcaagacauuugaca

SEQ ID NO: 562575 - RNA, 22 nt, Human
aaauuucuggaagugucagagu

SEQ ID NO: 562576 - RNA, 23 nt, Human
uaagaacagacaagcauuuacau

SEQ ID NO: 562577 - RNA, 23 nt, Human
ugugaagguggguccaagggcug

SEQ ID NO: 562578 - RNA, 22 nt, Human
uaaaguauauuuuuucucaaua

SEQ ID NO: 562579 - RNA, 21 nt, Human
guuauacauucuauggauuug

SEQ ID NO: 562580 - RNA, 22 nt, Human
ggagcugaaggggugggcucag

SEQ ID NO: 562581 - RNA, 22 nt, Human
ggcugcuggcauugagguaggu

SEQ ID NO: 562582 - RNA, 22 nt, Human
aagcgccacgagaagcuggacc

SEQ ID NO: 562583 - RNA, 20 nt, Human
uuucaagucagcaauucuca

SEQ ID NO: 562584 - RNA, 22 nt, Human
ucugaaaguaucuggaucuuuu

SEQ ID NO: 562585 - RNA, 23 nt, Human
auuuuuagccucucugagcugag

SEQ ID NO: 562586 - RNA, 22 nt, Human
augugaggaagaaagagguaag

SEQ ID NO: 562587 - RNA, 23 nt, Human
ccaggcaguagcuauugaaguga

SEQ ID NO: 562588 - RNA, 18 nt, Human
gcagugaagaaagagcuu

SEQ ID NO: 562589 - RNA, 22 nt, Human
caagaacauugugaucacuuca

SEQ ID NO: 562590 - RNA, 21 nt, Human
acagaacuguauagugauaaa

SEQ ID NO: 562591 - RNA, 22 nt, Human
ugcauuaugcuugugcuguaua

SEQ ID NO: 562592 - RNA, 23 nt, Human
uuucacauuuacuguuagauggc

SEQ ID NO: 562593 - RNA, 22 nt, Human
gugaggugggcuggccagagac

SEQ ID NO: 562594 - RNA, 22 nt, Human
gguggggccagggcuccaaccu

SEQ ID NO: 562595 - RNA, 22 nt, Human
gcuguccucuuggacucagggc

SEQ ID NO: 562596 - RNA, 22 nt, Human
acaugacuuuucucuuccagag

SEQ ID NO: 562597 - RNA, 22 nt, Human
uggccugggucacaccaggguc

SEQ ID NO: 562598 - RNA, 22 nt, Human
caguggagagacuuuuacucuu

SEQ ID NO: 562599 - RNA, 22 nt, Human
auccaaagauggaaagaacuuu

SEQ ID NO: 562600 - RNA, 22 nt, Human
aaagaauacuccuuuugccuug

SEQ ID NO: 562601 - RNA, 22 nt, Human
ugaauucaccugaaagucugga

SEQ ID NO: 562602 - RNA, 22 nt, Human
uuuagggacaagggucuggggu

SEQ ID NO: 562603 - RNA, 22 nt, Human
ggcaggguccacaccugggaaa

SEQ ID NO: 562604 - RNA, 22 nt, Human
agggccagggaagcuguauuuu

SEQ ID NO: 562605 - RNA, 22 nt, Human
ugggccuguggcuuggcucuag

SEQ ID NO: 562606 - RNA, 22 nt, Human
ucagccucagguguucagauuu

SEQ ID NO: 562607 - RNA, 23 nt, Human
ugguucaagugagaaguaauguu

SEQ ID NO: 562608 - RNA, 22 nt, Human
uucaggauuauacucucuuccc

SEQ ID NO: 562609 - RNA, 22 nt, Human
aauagcauagaguuaaaaugca

SEQ ID NO: 562610 - RNA, 22 nt, Human
cuguccugcccacccugcaggg

SEQ ID NO: 562611 - RNA, 22 nt, Human
aaggccaugaccacuugcugug

SEQ ID NO: 562612 - RNA, 22 nt, Human
uucuuaagacugcaaaucaacc

SEQ ID NO: 562613 - RNA, 20 nt, Human
aggagccauugacugcagca

SEQ ID NO: 562614 - RNA, 22 nt, Human
uuguauuucuccacuuucuguu

SEQ ID NO: 562615 - RNA, 22 nt, Human
uaaaugcaagggaaaggcaaga

SEQ ID NO: 562616 - RNA, 22 nt, Human
ucccuggccauuccucuaggcc

SEQ ID NO: 562617 - RNA, 22 nt, Human
cugguggguagagggcaucagg

SEQ ID NO: 562618 - RNA, 19 nt, Human
gcaggcaguggcauucgga

SEQ ID NO: 562619 - RNA, 22 nt, Human
uaacugcucagugaguauuuuu

SEQ ID NO: 562620 - RNA, 21 nt, Human
gcucagaguauugcacuguuu

SEQ ID NO: 562621 - RNA, 22 nt, Human
uguacaguauauuucaaagcca

SEQ ID NO: 562622 - RNA, 22 nt, Human
gagagcuggguucaaguagcug

SEQ ID NO: 562623 - RNA, 22 nt, Human
gggcaggaugcaguuucagaga

SEQ ID NO: 562624 - RNA, 22 nt, Human
aggucauugaaguuauuuucuu

SEQ ID NO: 562625 - RNA, 22 nt, Human
gauuaaguggaaugaguauuug

SEQ ID NO: 562626 - RNA, 22 nt, Human
gggaagggacuuguuuaagguc

SEQ ID NO: 562627 - RNA, 22 nt, Human
caucacuguccaaaguucaguu

SEQ ID NO: 562628 - RNA, 23 nt, Human
cuucaugagagcccugaggaaaa

SEQ ID NO: 562629 - RNA, 19 nt, Human
ucuggcuccgccucuuagu

SEQ ID NO: 562630 - RNA, 22 nt, Human
uguauacaggcauaagagauac

SEQ ID NO: 562631 - RNA, 22 nt, Human
ugccaggcacgugagaguggcc

SEQ ID NO: 562632 - RNA, 20 nt, Human
ccugccugccucggcucauu

SEQ ID NO: 562633 - RNA, 19 nt, Human
agcagccauagacaauaug

SEQ ID NO: 562634 - RNA, 22 nt, Human
gaggagaagcuaagaaacacag

SEQ ID NO: 562635 - RNA, 22 nt, Human
cccugugagcggcuggaugccu

SEQ ID NO: 562636 - RNA, 22 nt, Human
cacaucagguagaccuacagag

SEQ ID NO: 562637 - RNA, 23 nt, Human
acugccugcuacuaugcccacgg

SEQ ID NO: 562638 - RNA, 22 nt, Human
gagcugggcacacgccacuuga

SEQ ID NO: 562639 - RNA, 22 nt, Human
cugugcuggagaugggccagag

SEQ ID NO: 562640 - RNA, 22 nt, Human
acuucucuucauagguggcaau

SEQ ID NO: 562641 - RNA, 22 nt, Human
gaggucaaggucaagagacaga

SEQ ID NO: 562642 - RNA, 22 nt, Human
guuguacagcauccagugcaga

SEQ ID NO: 562643 - RNA, 22 nt, Human
ggcagaggagcuggaaacaugg

SEQ ID NO: 562644 - RNA, 22 nt, Human
uucaaauuugguaugcaagcca

SEQ ID NO: 562645 - RNA, 21 nt, Human
cauauuaaaucggugccuuua

SEQ ID NO: 562646 - RNA, 22 nt, Human
aauguguacuuuuucaugcuca

SEQ ID NO: 562647 - RNA, 22 nt, Human
auggagcacacgccaucacaua

SEQ ID NO: 562648 - RNA, 22 nt, Human
acaacuuugacccuuguucuua

SEQ ID NO: 562649 - RNA, 22 nt, Human
guggcagggcaaugcucccucu

SEQ ID NO: 562650 - RNA, 22 nt, Human
ugaauccagagcuauuucgucc

SEQ ID NO: 562651 - RNA, 22 nt, Human
ccacagggcucuaggcgcuucc

SEQ ID NO: 562652 - RNA, 22 nt, Human
aaauacuggcaagugcuaauuc

SEQ ID NO: 562653 - RNA, 22 nt, Human
cacugggcguguccugggugag

SEQ ID NO: 562654 - RNA, 22 nt, Human
gucauuuucuagaauuauuuga

SEQ ID NO: 562655 - RNA, 22 nt, Human
ccaucccuucaccacagcagua

SEQ ID NO: 562656 - RNA, 21 nt, Human
aggugggagaccauguagguc

SEQ ID NO: 562657 - RNA, 22 nt, Human
cagcuuuaguaacccacugcuc

SEQ ID NO: 562658 - RNA, 22 nt, Human
uauaagaaacaaggcaaauuuu

SEQ ID NO: 562659 - RNA, 22 nt, Human
ggcccacacugacagcugagcu

SEQ ID NO: 562660 - RNA, 19 nt, Human
aguuaaugagcuuuugauc

SEQ ID NO: 562661 - RNA, 22 nt, Human
ugaggcaggagguugagaacug

SEQ ID NO: 562662 - RNA, 22 nt, Human
gugcacaucgugcagguuuguu

SEQ ID NO: 562663 - RNA, 22 nt, Human
cauuugcuggggucuugggagu

SEQ ID NO: 562664 - RNA, 22 nt, Human
gucuguaucagaggagugaaug

SEQ ID NO: 562665 - RNA, 21 nt, Human
ccacauucucauucugacugc

SEQ ID NO: 562666 - RNA, 22 nt, Human
ugguaugaccguggugcaagca

SEQ ID NO: 562667 - RNA, 22 nt, Human
ucauuucaguuguucccugguu

SEQ ID NO: 562668 - RNA, 22 nt, Human
gcagagcauguccucaggacag

SEQ ID NO: 562669 - RNA, 22 nt, Human
aaagcagcagcaccugcauuuc

SEQ ID NO: 562670 - RNA, 22 nt, Human
ucuagaaaguacuagagcuggu

SEQ ID NO: 562671 - RNA, 22 nt, Human
uuugcauuauauuuauagaaga

SEQ ID NO: 562672 - RNA, 22 nt, Human
cagcuguugcagcacugagaga

SEQ ID NO: 562673 - RNA, 22 nt, Human
cucagcuggcaauucuggcucc

SEQ ID NO: 562674 - RNA, 23 nt, Human
cacacccaucacuaagagcuccu

SEQ ID NO: 562675 - RNA, 22 nt, Human
caaacauucaaguacaagucuu

SEQ ID NO: 562676 - RNA, 22 nt, Human
caggagccagcugucccaacca

SEQ ID NO: 562677 - RNA, 22 nt, Human
uauauuaaagugcuuugcagug

SEQ ID NO: 562678 - RNA, 22 nt, Human
caaaugcaaaauauaacccugu

SEQ ID NO: 562679 - RNA, 22 nt, Human
acagagcaguucuggagcuggc

SEQ ID NO: 562680 - RNA, 22 nt, Human
ugguccagacauuucugaggua

SEQ ID NO: 562681 - RNA, 22 nt, Human
aguaauagugaaucgacuauga

SEQ ID NO: 562682 - RNA, 22 nt, Human
aguuaacuaaacugugaguaaa

SEQ ID NO: 562683 - RNA, 22 nt, Human
agcugguggauuaugcuguaca

SEQ ID NO: 562684 - RNA, 22 nt, Human
cggggacacacuggcagcuccu

SEQ ID NO: 562685 - RNA, 22 nt, Human
cauauucuuuaagcaaugcucu

SEQ ID NO: 562686 - RNA, 22 nt, Human
auucacagaauaguuuuaccag

SEQ ID NO: 562687 - RNA, 22 nt, Human
gcuggaguacaucuuuggcggc

SEQ ID NO: 562688 - RNA, 22 nt, Human
aagccaggccauucucugguuc

SEQ ID NO: 562689 - RNA, 22 nt, Human
cagguggcuucucugcagccuu

SEQ ID NO: 562690 - RNA, 22 nt, Human
gucaacauuuacugcccuggcc

SEQ ID NO: 562691 - RNA, 22 nt, Human
ccacccagccagaugcaggaag

SEQ ID NO: 562692 - RNA, 22 nt, Human
ucaguaacuuacuuauucaccu

SEQ ID NO: 562693 - RNA, 23 nt, Human
gaauucuuaaggucacuaaaguc

SEQ ID NO: 562694 - RNA, 22 nt, Human
acagauauaaacuauaguagug

SEQ ID NO: 562695 - RNA, 22 nt, Human
aagaaucauccugcaagagucu

SEQ ID NO: 562696 - RNA, 22 nt, Human
ggcuggcacccuuggggauagg

SEQ ID NO: 562697 - RNA, 22 nt, Human
cuauucagguguccauuaaucc

SEQ ID NO: 562698 - RNA, 22 nt, Human
ucuacauuccuuuuauaauauc

SEQ ID NO: 562699 - RNA, 22 nt, Human
cugagucucccggcaguggagg

SEQ ID NO: 562700 - RNA, 22 nt, Human
ucuggaguugagagugugcgag

SEQ ID NO: 562701 - RNA, 22 nt, Human
gggcagugaauauuggugggaa

SEQ ID NO: 562702 - RNA, 22 nt, Human
uggauggggcagcuuaggugug

SEQ ID NO: 562703 - RNA, 22 nt, Human
gccaaaucacagggccaaaagc

SEQ ID NO: 562704 - RNA, 22 nt, Human
gcagcuguguaaugagcccaca

SEQ ID NO: 562705 - RNA, 22 nt, Human
uauugacaauaggcaacugagg

SEQ ID NO: 562706 - RNA, 22 nt, Human
cuccagggaggucugcaggacu

SEQ ID NO: 562707 - RNA, 21 nt, Human
uccaggccaugguggggaggc

SEQ ID NO: 562708 - RNA, 21 nt, Human
uagaauacagguauuuuggau

SEQ ID NO: 562709 - RNA, 22 nt, Human
ugcaaauuuaaugaaacuaugu

SEQ ID NO: 562710 - RNA, 22 nt, Human
ccagagagagaggucaauggca

SEQ ID NO: 562711 - RNA, 22 nt, Human
aaucaguuaaauauugaguaca

SEQ ID NO: 562712 - RNA, 22 nt, Human
uuuuaauccucuugguaucuua

SEQ ID NO: 562713 - RNA, 22 nt, Human
ccaggcuggauuuugcaguuca

SEQ ID NO: 562714 - RNA, 22 nt, Human
ucugagcauugaauuuucuucc

SEQ ID NO: 562715 - RNA, 22 nt, Human
uuuggaauguaguuuaaucauc

SEQ ID NO: 562716 - RNA, 20 nt, Human
aacagggggcugcagagggc

SEQ ID NO: 562717 - RNA, 22 nt, Human
aacagccacugauacugaauag

SEQ ID NO: 562718 - RNA, 22 nt, Human
uuugacuucuaucuaguaagaa

SEQ ID NO: 562719 - RNA, 22 nt, Human
agcuggguguguaucagauaaa

SEQ ID NO: 562720 - RNA, 22 nt, Human
agccaggaaugcaugcucugcu

SEQ ID NO: 562721 - RNA, 18 nt, Human
uguagagccagguuugcc

SEQ ID NO: 562722 - RNA, 22 nt, Human
uaauaaaugaaagugcuggcau

SEQ ID NO: 562723 - RNA, 22 nt, Human
aaauucuuuggccuacuuugaa

SEQ ID NO: 562724 - RNA, 22 nt, Human
uagaaacauguucuguucuguu

SEQ ID NO: 562725 - RNA, 22 nt, Human
agucaauucuuuucaacucaag

SEQ ID NO: 562726 - RNA, 22 nt, Human
cuacagacccaccuuggaagaa

SEQ ID NO: 562727 - RNA, 22 nt, Human
uauaagaagugaagaagaguua

SEQ ID NO: 562728 - RNA, 22 nt, Human
auauaaaguguuuagaaagcug

SEQ ID NO: 562729 - RNA, 22 nt, Human
ggaaggcuuuguagaagugcca

SEQ ID NO: 562730 - RNA, 21 nt, Human
agaaaaacacgauauaagccc

SEQ ID NO: 562731 - RNA, 22 nt, Human
aaagaacaucggagugggcggg

SEQ ID NO: 562732 - RNA, 21 nt, Human
agcuggcucucucuggagaga

SEQ ID NO: 562733 - RNA, 22 nt, Human
cgagcagaagccugguggucug

SEQ ID NO: 562734 - RNA, 22 nt, Human
ccucucccagggagagccugag

SEQ ID NO: 562735 - RNA, 22 nt, Human
aggaaaugcugaugcuccugga

SEQ ID NO: 562736 - RNA, 22 nt, Human
auauagaucaaaugaugcuaau

SEQ ID NO: 562737 - RNA, 21 nt, Human
gacacaaaggguaguaauggu

SEQ ID NO: 562738 - RNA, 22 nt, Human
aacacucuacgugcagcuccua

SEQ ID NO: 562739 - RNA, 22 nt, Human
guacagauuaauaauauacuga

SEQ ID NO: 562740 - RNA, 22 nt, Human
aauguacaccguggguuuuuua

SEQ ID NO: 562741 - RNA, 21 nt, Human
accagcaggagaucagaagga

SEQ ID NO: 562742 - RNA, 21 nt, Human
cagcccagcuucuuccccagu

SEQ ID NO: 562743 - RNA, 22 nt, Human
gaagucuucauucucucugaga

SEQ ID NO: 562744 - RNA, 22 nt, Human
cugagaguagcuggagaacauu

SEQ ID NO: 562745 - RNA, 22 nt, Human
acacauuucucccagucuccau

SEQ ID NO: 562746 - RNA, 17 nt, Human
agugaaauuuacauugc

SEQ ID NO: 562747 - RNA, 22 nt, Human
ggggaccuaggcucugucucuu

SEQ ID NO: 562748 - RNA, 22 nt, Human
gcaggucucaaucugagcaggc

SEQ ID NO: 562749 - RNA, 22 nt, Human
ugagaggccccagcucuuggcc

SEQ ID NO: 562750 - RNA, 22 nt, Human
gccugcuuccuuuucauagaug

SEQ ID NO: 562751 - RNA, 22 nt, Human
uucaguuucguuaucuaugaga

SEQ ID NO: 562752 - RNA, 22 nt, Human
uaacagcaaccacagugcuggu

SEQ ID NO: 562753 - RNA, 23 nt, Human
gcagacagagcagacuaagacaa

SEQ ID NO: 562754 - RNA, 22 nt, Human
uugggguguuggauggagcaag

SEQ ID NO: 562755 - RNA, 22 nt, Human
augggcucggcgcugcugggau

SEQ ID NO: 562756 - RNA, 22 nt, Human
ggagaaggugcuggucacugug

SEQ ID NO: 562757 - RNA, 22 nt, Human
gugugcaggugucagugcagcu

SEQ ID NO: 562758 - RNA, 23 nt, Human
gccuggccaccccagggcugcuu

SEQ ID NO: 562759 - RNA, 22 nt, Human
uaagccacuagucuguuaugaa

SEQ ID NO: 562760 - RNA, 22 nt, Human
ucaaagcacuggggaaagccug

SEQ ID NO: 562761 - RNA, 22 nt, Human
ccugggcuugcaucugugcugg

SEQ ID NO: 562762 - RNA, 22 nt, Human
cugcuuuaucugagacaaguca

SEQ ID NO: 562763 - RNA, 22 nt, Human
ggcuucugagugcucugcuguu

SEQ ID NO: 562764 - RNA, 22 nt, Human
gaauuucuggacccuuugagaa

SEQ ID NO: 562765 - RNA, 22 nt, Human
uugucuuuggaaauuuaauguu

SEQ ID NO: 562766 - RNA, 22 nt, Human
gaauccaggguuguuugagcua

SEQ ID NO: 562767 - RNA, 22 nt, Human
aaaugcaccuugcugugagacu

SEQ ID NO: 562768 - RNA, 22 nt, Human
uacaaaugaaccaacuuugaug

SEQ ID NO: 562769 - RNA, 19 nt, Human
agccagugagccucugggu

SEQ ID NO: 562770 - RNA, 22 nt, Human
cugucuccagggcaggugcagg

SEQ ID NO: 562771 - RNA, 22 nt, Human
cccugccuuguuggagccuaug

SEQ ID NO: 562772 - RNA, 22 nt, Human
aggggugauuugggacaggaca

SEQ ID NO: 562773 - RNA, 22 nt, Human
cagcuguuacugaaguaaaaug

SEQ ID NO: 562774 - RNA, 22 nt, Human
ggagaugcuauguaguuugguu

SEQ ID NO: 562775 - RNA, 22 nt, Human
acauuaaaauggagaauuuuga

SEQ ID NO: 562776 - RNA, 22 nt, Human
aaguguagauuauggagugucu

SEQ ID NO: 562777 - RNA, 22 nt, Human
uuuuuaccuggaggauaaaugu

SEQ ID NO: 562778 - RNA, 23 nt, Human
cacauauagcagccacuaagguc

SEQ ID NO: 562779 - RNA, 20 nt, Human
ucuggggaugaggucuagga

SEQ ID NO: 562780 - RNA, 22 nt, Human
guggcugcagcccagcggcacg

SEQ ID NO: 562781 - RNA, 22 nt, Human
ccagggcacguugggacaguac

SEQ ID NO: 562782 - RNA, 22 nt, Human
uauuugaugaagguaaagucuu

SEQ ID NO: 562783 - RNA, 22 nt, Human
uuuccucuccaccaggaggucu

SEQ ID NO: 562784 - RNA, 22 nt, Human
ugucacauugaauaugauuuau

SEQ ID NO: 562785 - RNA, 22 nt, Human
agugaguauuuguugagugcua

SEQ ID NO: 562786 - RNA, 22 nt, Human
uuacacaacaucuguauuauua

SEQ ID NO: 562787 - RNA, 19 nt, Human
gaacacuuacuauauuucu

SEQ ID NO: 562788 - RNA, 20 nt, Human
auucuacaagaauaagcaug

SEQ ID NO: 562789 - RNA, 22 nt, Human
ugcagguguaaauuuucaagag

SEQ ID NO: 562790 - RNA, 22 nt, Human
guuauguaugagggaaugauua

SEQ ID NO: 562791 - RNA, 22 nt, Human
ucaggagcugcacugggcccac

SEQ ID NO: 562792 - RNA, 22 nt, Human
acuguugaagugccagcuugau

SEQ ID NO: 562793 - RNA, 22 nt, Human
gcagggcagcucacugugguuc

SEQ ID NO: 562794 - RNA, 19 nt, Human
ucuuucauuucuagcucug

SEQ ID NO: 562795 - RNA, 20 nt, Human
cugagcgucuaagaggugag

SEQ ID NO: 562796 - RNA, 22 nt, Human
acaguguccuuguggucccugu

SEQ ID NO: 562797 - RNA, 22 nt, Human
ccagguggugccucuguucgca

SEQ ID NO: 562798 - RNA, 22 nt, Human
aaggucauuuaacaauuuauga

SEQ ID NO: 562799 - RNA, 17 nt, Human
uccuggcucugccacug

SEQ ID NO: 562800 - RNA, 22 nt, Human
guucagauuugacugguuucuc

SEQ ID NO: 562801 - RNA, 22 nt, Human
gaugaagcuuugaagucuaauc

SEQ ID NO: 562802 - RNA, 22 nt, Human
ccagggcugguggcugcagagg

SEQ ID NO: 562803 - RNA, 22 nt, Human
guacucucuugaaggccuuucu

SEQ ID NO: 562804 - RNA, 22 nt, Human
ucaaugaugcugaagguagcgu

SEQ ID NO: 562805 - RNA, 22 nt, Human
guuugugucaaugacuucugca

SEQ ID NO: 562806 - RNA, 22 nt, Human
agguccaguugccagaauggcc

SEQ ID NO: 562807 - RNA, 22 nt, Human
cacacauuucagaugcuacaau

SEQ ID NO: 562808 - RNA, 22 nt, Human
uacuuccagcaaucugcauauu

SEQ ID NO: 562809 - RNA, 22 nt, Human
agcaauaugacauugcuacauc

SEQ ID NO: 562810 - RNA, 22 nt, Human
uaacaagauuuguaaaauugua

SEQ ID NO: 562811 - RNA, 22 nt, Human
ugaagaaccugaugagcugugu

SEQ ID NO: 562812 - RNA, 22 nt, Human
ccaggguaccccaagggcaggu

SEQ ID NO: 562813 - RNA, 22 nt, Human
caggguggaaaagcuaguugga

SEQ ID NO: 562814 - RNA, 22 nt, Human
ggcagaccucuccagccccaca

SEQ ID NO: 562815 - RNA, 22 nt, Human
aagcuagauaacuuuuauauuu

SEQ ID NO: 562816 - RNA, 22 nt, Human
uggaccugaagaauaggaagua

SEQ ID NO: 562817 - RNA, 22 nt, Human
uccucuuuaaaugcuuuuaucu

SEQ ID NO: 562818 - RNA, 22 nt, Human
aguuguaacagauucuaacaua

SEQ ID NO: 562819 - RNA, 22 nt, Human
agcuuuaucccuugcccaucga

SEQ ID NO: 562820 - RNA, 22 nt, Human
aguugcacuuucuagauacugu

SEQ ID NO: 562821 - RNA, 22 nt, Human
aggggagccgaggggcaucugu

SEQ ID NO: 562822 - RNA, 22 nt, Human
ugaaccagagucuccagugguu

SEQ ID NO: 562823 - RNA, 22 nt, Human
uuacaaguacugaauaugauuu

SEQ ID NO: 562824 - RNA, 22 nt, Human
guauuauuaaguguauuugacc

SEQ ID NO: 562825 - RNA, 22 nt, Human
aggaagcuuggggcagggcuac

SEQ ID NO: 562826 - RNA, 22 nt, Human
cugccuggaugaauggcgccuu

SEQ ID NO: 562827 - RNA, 22 nt, Human
aggggccauuguucugcccgcu

SEQ ID NO: 562828 - RNA, 22 nt, Human
ggugaagggugucauggcauuu

SEQ ID NO: 562829 - RNA, 22 nt, Human
ucuggucuccaggagugguggu

SEQ ID NO: 562830 - RNA, 22 nt, Human
ggcuucucucuucacauggcuu

SEQ ID NO: 562831 - RNA, 22 nt, Human
acagguggggaggcugagguuc

SEQ ID NO: 562832 - RNA, 22 nt, Human
uacagagacccacaagagacug

SEQ ID NO: 562833 - RNA, 22 nt, Human
ccacagcugaccgcaggugagc

SEQ ID NO: 562834 - RNA, 22 nt, Human
agaugaaaagauaagcagcaau

SEQ ID NO: 562835 - RNA, 22 nt, Human
gcuccucugucaaaugagagug

SEQ ID NO: 562836 - RNA, 22 nt, Human
uaaugugugucaucaguagagu

SEQ ID NO: 562837 - RNA, 22 nt, Human
ggaggcuccacugcucuuccug

SEQ ID NO: 562838 - RNA, 22 nt, Human
acauucuuccagcuggcuguug

SEQ ID NO: 562839 - RNA, 22 nt, Human
caguacuuaacuuauaggagag

SEQ ID NO: 562840 - RNA, 22 nt, Human
ugcaggcuauaucuuauuugac

SEQ ID NO: 562841 - RNA, 22 nt, Human
gccugggacccuuagcucuugg

SEQ ID NO: 562842 - RNA, 22 nt, Human
auucuuuauugcugaugguuau

SEQ ID NO: 562843 - RNA, 22 nt, Human
cugcccagaagccagaugggca

SEQ ID NO: 562844 - RNA, 22 nt, Human
guggcagguuccguagacagca

SEQ ID NO: 562845 - RNA, 22 nt, Human
caguagcauguaauaaagacag

SEQ ID NO: 562846 - RNA, 22 nt, Human
aacucagcauccugcacagaga

SEQ ID NO: 562847 - RNA, 21 nt, Human
cacugcagccuugaccugggc

SEQ ID NO: 562848 - RNA, 22 nt, Human
gcccagcuccucugcagacccu

SEQ ID NO: 562849 - RNA, 19 nt, Human
ucuuuucacgcauuuugaa

SEQ ID NO: 562850 - RNA, 22 nt, Human
auaucuuuguaugguucagcag

SEQ ID NO: 562851 - RNA, 22 nt, Human
acagugaucuuuuaguuggaac

SEQ ID NO: 562852 - RNA, 16 nt, Human
cagcuuuaugucagug

SEQ ID NO: 562853 - RNA, 22 nt, Human
cagcugaagaaagagugguuag

SEQ ID NO: 562854 - RNA, 22 nt, Human
agcuuagucacucuuaaauuua

SEQ ID NO: 562855 - RNA, 22 nt, Human
aguccaggaguugggugacauu

SEQ ID NO: 562856 - RNA, 22 nt, Human
uggcagcagcaaauggcauauc

SEQ ID NO: 562857 - RNA, 16 nt, Human
ccagguggggcuguga

SEQ ID NO: 562858 - RNA, 23 nt, Human
augacaaacaggacaucuugugc

SEQ ID NO: 562859 - RNA, 22 nt, Human
gccaguuccuguggagucagag

SEQ ID NO: 562860 - RNA, 22 nt, Human
gucaggccaauacucuccagca

SEQ ID NO: 562861 - RNA, 22 nt, Human
caguaauagauuugagaguggu

SEQ ID NO: 562862 - RNA, 22 nt, Human
uagcagggaaggugugcugagc

SEQ ID NO: 562863 - RNA, 22 nt, Human
gccucccugagucacccaagca

SEQ ID NO: 562864 - RNA, 22 nt, Human
aagaagagaacuggcauccuaa

SEQ ID NO: 562865 - RNA, 22 nt, Human
caucagcucuucauucuugauu

SEQ ID NO: 562866 - RNA, 22 nt, Human
guuuuggcucuggcauguggaa

SEQ ID NO: 562867 - RNA, 22 nt, Human
uauuugauagagauaaaugaua

SEQ ID NO: 562868 - RNA, 22 nt, Human
uucuaaguccuaccugaaagca

SEQ ID NO: 562869 - RNA, 22 nt, Human
gaacaacuccaagggacaucau

SEQ ID NO: 562870 - RNA, 22 nt, Human
gccuggcugccggccuuggcaa

SEQ ID NO: 562871 - RNA, 23 nt, Human
uacuauaacgcugugucagcucc

SEQ ID NO: 562872 - RNA, 22 nt, Human
uccucagggggccaacccagcc

SEQ ID NO: 562873 - RNA, 22 nt, Human
gccguccuacgccaucauagcg

SEQ ID NO: 562874 - RNA, 22 nt, Human
ugggcagggagcuggaaccaca

SEQ ID NO: 562875 - RNA, 22 nt, Human
auagucuuagaaucuugagugu

SEQ ID NO: 562876 - RNA, 22 nt, Human
cccacucccugcacgccugccg

SEQ ID NO: 562877 - RNA, 22 nt, Human
ggcugagcuuuucaugaugguu

SEQ ID NO: 562878 - RNA, 22 nt, Human
cugagggccuucuaugcugagc

SEQ ID NO: 562879 - RNA, 22 nt, Human
gcacugagcuuuggaggagcag

SEQ ID NO: 562880 - RNA, 22 nt, Human
gcuuccaaugcuucuaucacau

SEQ ID NO: 562881 - RNA, 22 nt, Human
uguacacauuaagcucuuuaga

SEQ ID NO: 562882 - RNA, 22 nt, Human
aguguucuagcgcugugcuugu

SEQ ID NO: 562883 - RNA, 22 nt, Human
uuacccagugaagccgaggcag

SEQ ID NO: 562884 - RNA, 22 nt, Human
agugccucugcagguccgaguu

SEQ ID NO: 562885 - RNA, 22 nt, Human
gcaggccugucuugcucgcccu

SEQ ID NO: 562886 - RNA, 22 nt, Human
acuuaccagagaggauccgccc

SEQ ID NO: 562887 - RNA, 22 nt, Human
auuucagagugagagugcucaa

SEQ ID NO: 562888 - RNA, 22 nt, Human
acagugucuccugguacccagu

SEQ ID NO: 562889 - RNA, 22 nt, Human
uuuguaguuguggaugcugaag

SEQ ID NO: 562890 - RNA, 22 nt, Human
augaacaguacaaagcacagac

SEQ ID NO: 562891 - RNA, 22 nt, Human
cagacucuugagcugauuguau

SEQ ID NO: 562892 - RNA, 16 nt, Human
aggagcuggguaggag

SEQ ID NO: 562893 - RNA, 22 nt, Human
cagaccagccauuugccucuuc

SEQ ID NO: 562894 - RNA, 22 nt, Human
uguauuucugcuuucucuagua

SEQ ID NO: 562895 - RNA, 22 nt, Human
uccagugguggcucccggaccu

SEQ ID NO: 562896 - RNA, 22 nt, Human
ucuggcuucaguaggguucacu

SEQ ID NO: 562897 - RNA, 22 nt, Human
cgcacuggagcuggaacgaguc

SEQ ID NO: 562898 - RNA, 22 nt, Human
uucuuuuaauagagauccugug

SEQ ID NO: 562899 - RNA, 22 nt, Human
gucuguggaguugcuugcugga

SEQ ID NO: 562900 - RNA, 17 nt, Human
aggucugagaguaucug

SEQ ID NO: 562901 - RNA, 22 nt, Human
auguuguugaacucuuugcaug

SEQ ID NO: 562902 - RNA, 17 nt, Human
gcccgugggcuacggua

SEQ ID NO: 562903 - RNA, 22 nt, Human
caggccuugaaggccugcggga

SEQ ID NO: 562904 - RNA, 22 nt, Human
ccaggaggaaagaccagcccau

SEQ ID NO: 562905 - RNA, 21 nt, Human
uccugccuuaguccagagcag

SEQ ID NO: 562906 - RNA, 22 nt, Human
ccgaggcuggccucagggcugu

SEQ ID NO: 562907 - RNA, 22 nt, Human
agacgcgguggugcaugccugu

SEQ ID NO: 562908 - RNA, 22 nt, Human
acuggaaaguauucuuucacug

SEQ ID NO: 562909 - RNA, 18 nt, Human
cgauguguaugugauuug

SEQ ID NO: 562910 - RNA, 22 nt, Human
acccggagucggagguugcagu

SEQ ID NO: 562911 - RNA, 22 nt, Human
ugugcugcucucagugacagcc

SEQ ID NO: 562912 - RNA, 22 nt, Human
uauuaugguuguagguuaacaa

SEQ ID NO: 562913 - RNA, 22 nt, Human
ucgucugugaaauugggauaag

SEQ ID NO: 562914 - RNA, 22 nt, Human
uucucacguuauuggcugagag

SEQ ID NO: 562915 - RNA, 22 nt, Human
cuuuggucuccgucaucaauca

SEQ ID NO: 562916 - RNA, 22 nt, Human
ucaccccuugugaaugcugcuc

SEQ ID NO: 562917 - RNA, 22 nt, Human
gccacaggucggcuagaggguc

SEQ ID NO: 562918 - RNA, 17 nt, Human
agccugcugaucucaca

SEQ ID NO: 562919 - RNA, 22 nt, Human
gugucccaaagauuagaaauca

SEQ ID NO: 562920 - RNA, 21 nt, Human
ugcuccaggagggggcagucc

SEQ ID NO: 562921 - RNA, 22 nt, Human
gugugcgccgacacagccaggu

SEQ ID NO: 562922 - RNA, 22 nt, Human
augcaauaguaauucuagucug

SEQ ID NO: 562923 - RNA, 22 nt, Human
uagcugucagcaaucaaguggu

SEQ ID NO: 562924 - RNA, 22 nt, Human
ccagucagccaagcugcagcgg

SEQ ID NO: 562925 - RNA, 21 nt, Human
uguguucuucuaggucagcua

SEQ ID NO: 562926 - RNA, 19 nt, Human
agacaaguuuccagaagcc

SEQ ID NO: 562927 - RNA, 22 nt, Human
aaaagagccacuuaugaccuca

SEQ ID NO: 562928 - RNA, 22 nt, Human
uccaaggacauuguucuaguug

SEQ ID NO: 562929 - RNA, 22 nt, Human
aggcugagguaggaggaucgcu

SEQ ID NO: 562930 - RNA, 22 nt, Human
gugcaugucuuuggaggccucc

SEQ ID NO: 562931 - RNA, 22 nt, Human
uuuguguuggaagaaaugcuac

SEQ ID NO: 562932 - RNA, 21 nt, Human
ugugacagaggcggugccuac

SEQ ID NO: 562933 - RNA, 22 nt, Human
gagcugagggucuaggaggguu

SEQ ID NO: 562934 - RNA, 22 nt, Human
ccacugugcccagccucauggg

SEQ ID NO: 562935 - RNA, 22 nt, Human
gcugucugcugggucgcucagg

SEQ ID NO: 562936 - RNA, 22 nt, Human
ucguuagccucgagaucuuugu

SEQ ID NO: 562937 - RNA, 22 nt, Human
ggggaagaaauagaacauuuug

SEQ ID NO: 562938 - RNA, 22 nt, Human
uccagcucugcugugcgccggu

SEQ ID NO: 562939 - RNA, 22 nt, Human
uccaggagcucauccacgucaa

SEQ ID NO: 562940 - RNA, 22 nt, Human
cuugccaguguugcagaagcuc

SEQ ID NO: 562941 - RNA, 22 nt, Human
ucagccaggccaggcauucaca

SEQ ID NO: 562942 - RNA, 22 nt, Human
uccugccaccggggguggcgau

SEQ ID NO: 562943 - RNA, 22 nt, Human
aguacaagugaugugguaaaaa

SEQ ID NO: 562944 - RNA, 22 nt, Human
ccucguccacaauccuugcaca

SEQ ID NO: 562945 - RNA, 22 nt, Human
uugaacaguccuaagagacccu

SEQ ID NO: 562946 - RNA, 22 nt, Human
cagaguccugcaccagcuccag

SEQ ID NO: 562947 - RNA, 22 nt, Human
gauguaucugagcugcuuaggu

SEQ ID NO: 562948 - RNA, 22 nt, Human
uuuccuguccugguacuuggca

SEQ ID NO: 562949 - RNA, 22 nt, Human
gcaguugcaggauuuguguugu

SEQ ID NO: 562950 - RNA, 22 nt, Human
uucuuuccucccagccuuugga

SEQ ID NO: 562951 - RNA, 22 nt, Human
aagugcaggucucagcuacucu

SEQ ID NO: 562952 - RNA, 22 nt, Human
ugauuuacaguagugucuaaac

SEQ ID NO: 562953 - RNA, 22 nt, Human
auccaggcgaaugcagaaggcc

SEQ ID NO: 562954 - RNA, 22 nt, Human
cagcccuugcgacacccuggcu

SEQ ID NO: 562955 - RNA, 20 nt, Human
ucucccugcccaucucagau

SEQ ID NO: 562956 - RNA, 22 nt, Human
guuucuccucugugucuuguuu

SEQ ID NO: 562957 - RNA, 22 nt, Human
ccaagaggggcagagggcugca

SEQ ID NO: 562958 - RNA, 22 nt, Human
cuccagaggcgacuugcaucac

SEQ ID NO: 562959 - RNA, 22 nt, Human
uaaagcaaugaaaguuuugcag

SEQ ID NO: 562960 - RNA, 22 nt, Human
gggggcgccgccgcucaucuca

SEQ ID NO: 562961 - RNA, 22 nt, Human
agggcagagauuaauuaagaca

SEQ ID NO: 562962 - RNA, 22 nt, Human
acugagaacuuggggacagagg

SEQ ID NO: 562963 - RNA, 22 nt, Human
aggacugggugcagagggcauc

SEQ ID NO: 562964 - RNA, 22 nt, Human
uaaagugaaguucagaauggcu

SEQ ID NO: 562965 - RNA, 22 nt, Human
aaggcagcaugaaucccuguac

SEQ ID NO: 562966 - RNA, 22 nt, Human
ucaugcaccucuccaugucccc

SEQ ID NO: 562967 - RNA, 22 nt, Human
ccggcucggcgaccaggcugaa

SEQ ID NO: 562968 - RNA, 22 nt, Human
agcagugugggcugcacgcugg

SEQ ID NO: 562969 - RNA, 22 nt, Human
gccugagauucccggagccgug

SEQ ID NO: 562970 - RNA, 22 nt, Human
uuccaaggagagcucgaccuca

SEQ ID NO: 562971 - RNA, 22 nt, Human
uuaaguauauccauuugacugg

SEQ ID NO: 562972 - RNA, 22 nt, Human
gaggagagaagcuaacggugcu

SEQ ID NO: 562973 - RNA, 22 nt, Human
accagagucaauuauuuugcca

SEQ ID NO: 562974 - RNA, 22 nt, Human
gcggcgccugggacccgccagc

SEQ ID NO: 562975 - RNA, 22 nt, Human
ugauucaguacuuucucuaacu

SEQ ID NO: 562976 - RNA, 22 nt, Human
uggcugaggcacagcugccgcc

SEQ ID NO: 562977 - RNA, 22 nt, Human
uucagaaaggcugugccagcca

SEQ ID NO: 562978 - RNA, 23 nt, Human
gggcagcuuaagcuuguuuuucu

SEQ ID NO: 562979 - RNA, 22 nt, Human
ucuccccaguauggauucucug

SEQ ID NO: 562980 - RNA, 20 nt, Human
uggcccagcacgacgaggac

SEQ ID NO: 562981 - RNA, 23 nt, Human
uaucauuucagcucucugccugg

SEQ ID NO: 562982 - RNA, 22 nt, Human
caggaggaaaguuccacucaac

SEQ ID NO: 562983 - RNA, 22 nt, Human
cacaguuuuaucuuauacugau

SEQ ID NO: 562984 - RNA, 22 nt, Human
ucuuccagauacuuccugacuu

SEQ ID NO: 562985 - RNA, 22 nt, Human
ggaccugaacauaaaacgaggc

SEQ ID NO: 562986 - RNA, 22 nt, Human
acagccaggaauucuggagaag

SEQ ID NO: 562987 - RNA, 22 nt, Human
gcacguguucuguggcaugggu

SEQ ID NO: 562988 - RNA, 22 nt, Human
uccucuucaaaauagcucugaa

SEQ ID NO: 562989 - RNA, 22 nt, Human
caggccacacggcggcucccug

SEQ ID NO: 562990 - RNA, 19 nt, Human
uccuggggaggggcauggc

SEQ ID NO: 562991 - RNA, 22 nt, Human
gggggcuggacuuucccacaca

SEQ ID NO: 562992 - RNA, 19 nt, Human
agcaguggagccaugccug

SEQ ID NO: 562993 - RNA, 22 nt, Human
cagcuugcacacauauuagacg

SEQ ID NO: 562994 - RNA, 19 nt, Human
augggaagcggccagcgga

SEQ ID NO: 562995 - RNA, 22 nt, Human
ggcggugguugagaggacggcg

SEQ ID NO: 562996 - RNA, 18 nt, Human
cagaaaguuauuuacucu

SEQ ID NO: 562997 - RNA, 22 nt, Human
auuuacucgugcuucauugaau

SEQ ID NO: 562998 - RNA, 22 nt, Human
augauugaaaaugacauugcca

SEQ ID NO: 562999 - RNA, 22 nt, Human
caggcacaaugagcgccaucuu

SEQ ID NO: 563000 - RNA, 22 nt, Human
auuuacagacguggauuagugc

SEQ ID NO: 563001 - RNA, 22 nt, Human
gagcuccuauggucgguggcuc

SEQ ID NO: 563002 - RNA, 22 nt, Human
gaaacuguauguaguuuuuggg

SEQ ID NO: 563003 - RNA, 22 nt, Human
acagcagguuauuguuauggca

SEQ ID NO: 563004 - RNA, 22 nt, Human
aucaugcagcaacaagcaaggc

SEQ ID NO: 563005 - RNA, 22 nt, Human
ugcaugguuauauacuacuagu

SEQ ID NO: 563006 - RNA, 22 nt, Human
ugguccucacccuacccagcug

SEQ ID NO: 563007 - RNA, 22 nt, Human
uggggugugcucagagcagggg

SEQ ID NO: 563008 - RNA, 18 nt, Human
gccagcccuccaaccucc

SEQ ID NO: 563009 - RNA, 18 nt, Human
cugccuguugcugagagg

SEQ ID NO: 563010 - RNA, 22 nt, Human
uccuggccucugagucaagaac

SEQ ID NO: 563011 - RNA, 22 nt, Human
gccugagccgccugagcggcgg

SEQ ID NO: 563012 - RNA, 22 nt, Human
uugacccgaguccuucuugggg

SEQ ID NO: 563013 - RNA, 22 nt, Human
aggacagcagugcuggcacuug

SEQ ID NO: 563014 - RNA, 22 nt, Human
ucccagucuagagccggauugg

SEQ ID NO: 563015 - RNA, 22 nt, Human
ugggaugggaucucgcuguguc

SEQ ID NO: 563016 - RNA, 17 nt, Human
agcuuggagcagcauga

SEQ ID NO: 563017 - RNA, 22 nt, Human
gcaggccuccccugcuggagcu

SEQ ID NO: 563018 - RNA, 22 nt, Human
acauuugauauggaguugugua

SEQ ID NO: 563019 - RNA, 22 nt, Human
guuuauuggguauuguggagcc

SEQ ID NO: 563020 - RNA, 22 nt, Human
cacccucaagcaguggcacgug

SEQ ID NO: 563021 - RNA, 22 nt, Human
guugggcugaagugugugcuua

SEQ ID NO: 563022 - RNA, 22 nt, Human
ugaggaggugggcacacagagu

SEQ ID NO: 563023 - RNA, 22 nt, Human
acagaguaucuaucaggaguau

SEQ ID NO: 563024 - RNA, 23 nt, Human
acacauguuuaugcuugggggca

SEQ ID NO: 563025 - RNA, 22 nt, Human
cauaaauuguacccauuccaac

SEQ ID NO: 563026 - RNA, 22 nt, Human
agggccacgugcaccgcggucu

SEQ ID NO: 563027 - RNA, 22 nt, Human
caucaggaauaaaugaggcugu

SEQ ID NO: 563028 - RNA, 22 nt, Human
agagaccuuccugacuccagag

SEQ ID NO: 563029 - RNA, 22 nt, Human
ccacugcuaacuugcugcagcu

SEQ ID NO: 563030 - RNA, 22 nt, Human
gcugcuggcuuccugcuguuuu

SEQ ID NO: 563031 - RNA, 22 nt, Human
gcggggacagaaggcgguucuc

SEQ ID NO: 563032 - RNA, 22 nt, Human
caacagcuggaggcuuggcccg

SEQ ID NO: 563033 - RNA, 22 nt, Human
ugcagcaucuccuugugccaug

SEQ ID NO: 563034 - RNA, 22 nt, Human
gcagcugccgugagcucacgcc

SEQ ID NO: 563035 - RNA, 22 nt, Human
uggaaagaggaagugcccagca

SEQ ID NO: 563036 - RNA, 22 nt, Human
uacuuugagaugaugcugaucg

SEQ ID NO: 563037 - RNA, 23 nt, Human
acagaagccaggagccgcugggc

SEQ ID NO: 563038 - RNA, 22 nt, Human
gcggggggcaggcaguacguug

SEQ ID NO: 563039 - RNA, 22 nt, Human
caggaacagcaccaggagcuag

SEQ ID NO: 563040 - RNA, 22 nt, Human
cagguuagcaacaugguuagag

SEQ ID NO: 563041 - RNA, 22 nt, Human
uaguguguggucucucccuugu

SEQ ID NO: 563042 - RNA, 22 nt, Human
gcagauggauguggacggcgcc

SEQ ID NO: 563043 - RNA, 21 nt, Human
ucacuagugccuucugucauu

SEQ ID NO: 563044 - RNA, 22 nt, Human
cccacugcaugaguugguauua

SEQ ID NO: 563045 - RNA, 22 nt, Human
acggugcuggguauugggguuc

SEQ ID NO: 563046 - RNA, 22 nt, Human
ugucuuaugcugcauagacuau

SEQ ID NO: 563047 - RNA, 19 nt, Human
ugcuccaggccuugccgca

SEQ ID NO: 563048 - RNA, 22 nt, Human
cgggaagguggagguugcagug

SEQ ID NO: 563049 - RNA, 22 nt, Human
uuugacucugggugcuuuuucg

SEQ ID NO: 563050 - RNA, 22 nt, Human
aaagugacaaccauuuauuaag

SEQ ID NO: 563051 - RNA, 22 nt, Human
gaaaacacuuugaucugaaagu

SEQ ID NO: 563052 - RNA, 22 nt, Human
caggcacaagaucggcuagaua

SEQ ID NO: 563053 - RNA, 22 nt, Human
aagcccgguugggaacguggug

SEQ ID NO: 563054 - RNA, 22 nt, Human
aaagugcugggauuacaggugu

SEQ ID NO: 563055 - RNA, 22 nt, Human
uuuacuuuugguaaggucauuu

SEQ ID NO: 563056 - RNA, 22 nt, Human
ggcuuucugucugcgucugugu

SEQ ID NO: 563057 - RNA, 18 nt, Human
ucuuccaacacugacacc

SEQ ID NO: 563058 - RNA, 22 nt, Human
gggaaacuuucacaauguccag

SEQ ID NO: 563059 - RNA, 22 nt, Human
gcucugugccccugccguggac

SEQ ID NO: 563060 - RNA, 22 nt, Human
gcccagccccuggguggacgug

SEQ ID NO: 563061 - RNA, 22 nt, Human
ggagucugugucuugaagcagu

SEQ ID NO: 563062 - RNA, 22 nt, Human
guacuuucaggcuuucccuuaa

SEQ ID NO: 563063 - RNA, 22 nt, Human
uugcauauccuccaacacaugg

SEQ ID NO: 563064 - RNA, 22 nt, Human
aguuauugagugcagagcaggg

SEQ ID NO: 563065 - RNA, 22 nt, Human
cagcgguggcaaggugacugug

SEQ ID NO: 563066 - RNA, 22 nt, Human
agcugaacgugcuucugcagca

SEQ ID NO: 563067 - RNA, 22 nt, Human
ugucauuggugaucugaugccu

SEQ ID NO: 563068 - RNA, 22 nt, Human
agccagucggggccaugcuggg

SEQ ID NO: 563069 - RNA, 22 nt, Human
guuuccaggcuuugguaugguu

SEQ ID NO: 563070 - RNA, 22 nt, Human
gaaagcagaugaaauugcaaca

SEQ ID NO: 563071 - RNA, 22 nt, Human
cagcugcucugguggucucucc

SEQ ID NO: 563072 - RNA, 22 nt, Human
guccuuucgagggugagugaaa

SEQ ID NO: 563073 - RNA, 19 nt, Human
acacaccagugccugugac

SEQ ID NO: 563074 - RNA, 22 nt, Human
gaagcgcggcgucggcgugggu

SEQ ID NO: 563075 - RNA, 22 nt, Human
cagcagcaacaacggaagccuu

SEQ ID NO: 563076 - RNA, 22 nt, Human
cuccgcuuguguauaccuccaa

SEQ ID NO: 563077 - RNA, 22 nt, Human
agaaggcaucagaaguguguag

SEQ ID NO: 563078 - RNA, 22 nt, Human
accuuuaugaaacagcugucgu

SEQ ID NO: 563079 - RNA, 22 nt, Human
cggcgcaggcagaccgcgggcu

SEQ ID NO: 563080 - RNA, 22 nt, Human
cacgcacgcuggguggaggcgc

SEQ ID NO: 563081 - RNA, 22 nt, Human
cugagcagaagggugcacgugc

SEQ ID NO: 563082 - RNA, 22 nt, Human
caggcuugaugugucuauacuu

SEQ ID NO: 563083 - RNA, 22 nt, Human
gagaugggcgagaagguggacu

SEQ ID NO: 563084 - RNA, 22 nt, Human
aggagggagcuuaagccaggca

SEQ ID NO: 563085 - RNA, 22 nt, Human
ccacccuuccauucuuccucuu

SEQ ID NO: 563086 - RNA, 22 nt, Human
agaagagccacuguugacggca

SEQ ID NO: 563087 - RNA, 22 nt, Human
gugcugagugcagagugcagag

SEQ ID NO: 563088 - RNA, 22 nt, Human
uugaggucuggcaguagcguug

SEQ ID NO: 563089 - RNA, 22 nt, Human
guuuccagccuccuggguaaag

SEQ ID NO: 563090 - RNA, 22 nt, Human
cucuggagggaggcugagcugg

SEQ ID NO: 563091 - RNA, 22 nt, Human
aaauugaauuugggaaacauug

SEQ ID NO: 563092 - RNA, 22 nt, Human
aacaggcuaaauuguccauuuc

SEQ ID NO: 563093 - RNA, 22 nt, Human
uuucuucucacccaggacagag

SEQ ID NO: 563094 - RNA, 22 nt, Human
auggugguagaagcacuaugug

SEQ ID NO: 563095 - RNA, 22 nt, Human
ggcagccuccagggcacuggug

SEQ ID NO: 563096 - RNA, 22 nt, Human
caggugggagccacagcguaca

SEQ ID NO: 563097 - RNA, 22 nt, Human
gucugugcaguuacuagcuggu

SEQ ID NO: 563098 - RNA, 22 nt, Human
acuuccagaaaugauuuaauuu

SEQ ID NO: 563099 - RNA, 22 nt, Human
gagaugaagaggcccuuggagu

SEQ ID NO: 563100 - RNA, 22 nt, Human
cugcugccuuccaaaggccagg

SEQ ID NO: 563101 - RNA, 22 nt, Human
uucuuuuaauuucugucugcag

SEQ ID NO: 563102 - RNA, 22 nt, Human
uuggccguuucacugggcaguu

SEQ ID NO: 563103 - RNA, 20 nt, Human
gccaagaauaugcccgacuc

SEQ ID NO: 563104 - RNA, 22 nt, Human
agccagcauauauauaguugaa

SEQ ID NO: 563105 - RNA, 22 nt, Human
ccugcagacacuuguccagcaa

SEQ ID NO: 563106 - RNA, 22 nt, Human
cauaacauccuugcuacuuuga

SEQ ID NO: 563107 - RNA, 22 nt, Human
ugaacaugcuguugauggccug

SEQ ID NO: 563108 - RNA, 22 nt, Human
uccaaggucagcgagagucacu

SEQ ID NO: 563109 - RNA, 22 nt, Human
cauuccgcuccccuuccuugcg

SEQ ID NO: 563110 - RNA, 22 nt, Human
gcugccauggcugggggccgug

SEQ ID NO: 563111 - RNA, 22 nt, Human
cuugugaaaugccagauaaucu

SEQ ID NO: 563112 - RNA, 22 nt, Human
cuggaaggagcccgggcggauc

SEQ ID NO: 563113 - RNA, 22 nt, Human
aguucugacucugaaucuggga

SEQ ID NO: 563114 - RNA, 22 nt, Human
gggggaaaguggagguucguga

SEQ ID NO: 563115 - RNA, 22 nt, Human
cagcuuugccaaguaaggucuu

SEQ ID NO: 563116 - RNA, 22 nt, Human
gucccaggggagcucucugauu

SEQ ID NO: 563117 - RNA, 22 nt, Human
cagagggagcccuccaggagca

SEQ ID NO: 563118 - RNA, 22 nt, Human
guuggcuaugagagcuuuagug

SEQ ID NO: 563119 - RNA, 22 nt, Human
gcagcugcgcugguguggggca

SEQ ID NO: 563120 - RNA, 19 nt, Human
acccagcccaggaguggca

SEQ ID NO: 563121 - RNA, 22 nt, Human
uucagaacugucuguccuuuuc

SEQ ID NO: 563122 - RNA, 22 nt, Human
ggcuucaguggccagagaugau

SEQ ID NO: 563123 - RNA, 22 nt, Human
guggccaaggcagagaaagagc

SEQ ID NO: 563124 - RNA, 22 nt, Human
agugggagcggcagucggggac

SEQ ID NO: 563125 - RNA, 22 nt, Human
aggcauuacaucuaaauauuua

SEQ ID NO: 563126 - RNA, 20 nt, Human
acaacuuaguugagagacua

SEQ ID NO: 563127 - RNA, 22 nt, Human
gcguggcuuagagugggguacc

SEQ ID NO: 563128 - RNA, 22 nt, Human
uuuacagcuacuguccuauuuc

SEQ ID NO: 563129 - RNA, 22 nt, Human
gccaaaguaccuagcccucugc

SEQ ID NO: 563130 - RNA, 22 nt, Human
uucuggagacccagcaacaggg

SEQ ID NO: 563131 - RNA, 22 nt, Human
uuccugcaggccauagagccug

SEQ ID NO: 563132 - RNA, 22 nt, Human
cggagaggugggggcagcaucu

SEQ ID NO: 563133 - RNA, 22 nt, Human
aucccugugacgagcaucccua

SEQ ID NO: 563134 - RNA, 21 nt, Human
uugcuguuuucccaaugcagu

SEQ ID NO: 563135 - RNA, 22 nt, Human
aaacccaggguuuugucuuccc

SEQ ID NO: 563136 - RNA, 22 nt, Human
guccuggugccaccugcgggau

SEQ ID NO: 563137 - RNA, 22 nt, Human
aucauuaacccuugaugcuggg

SEQ ID NO: 563138 - RNA, 23 nt, Human
ugaaagcaaugggucuauaguau

SEQ ID NO: 563139 - RNA, 21 nt, Human
gacauugagcgugucgcagug

SEQ ID NO: 563140 - RNA, 19 nt, Human
uccugcccaccagccaggg

SEQ ID NO: 563141 - RNA, 22 nt, Human
ggcggcgcguagccggagacuu

SEQ ID NO: 563142 - RNA, 22 nt, Human
ggcaguggugggaggcucgcuc

SEQ ID NO: 563143 - RNA, 22 nt, Human
cuucuuaaaguugucacagcug

SEQ ID NO: 563144 - RNA, 20 nt, Human
uuuuccacuccucaaaacag

SEQ ID NO: 563145 - RNA, 22 nt, Human
aucagagcuaguacuugcaggu

SEQ ID NO: 563146 - RNA, 22 nt, Human
gcagcagugugggcugaaccua

SEQ ID NO: 563147 - RNA, 22 nt, Human
ccagcugggucccugcuggggc

SEQ ID NO: 563148 - RNA, 22 nt, Human
aacacugagaggggaguggcac

SEQ ID NO: 563149 - RNA, 20 nt, Human
cugcuccacccggcucucag

SEQ ID NO: 563150 - RNA, 22 nt, Human
ggccuuccugcugcuccgggcc

SEQ ID NO: 563151 - RNA, 22 nt, Human
ucaucuguuaugggaguuuuug

SEQ ID NO: 563152 - RNA, 22 nt, Human
gaugggcaucaaacaugacgug

SEQ ID NO: 563153 - RNA, 22 nt, Human
agacacuguguacagaaaaaga

SEQ ID NO: 563154 - RNA, 22 nt, Human
cugcaucacagcaggaggcaca

SEQ ID NO: 563155 - RNA, 22 nt, Human
ugagcagacuugaugaggcagc

SEQ ID NO: 563156 - RNA, 22 nt, Human
uaucuguauucugacagucacu

SEQ ID NO: 563157 - RNA, 18 nt, Human
gguccugggccuggcuca

SEQ ID NO: 563158 - RNA, 22 nt, Human
aagguggugaucaucuugaagg

SEQ ID NO: 563159 - RNA, 22 nt, Human
uugagcugccuggcuguggcuc

SEQ ID NO: 563160 - RNA, 22 nt, Human
uuucaugauuaacuuagugaau

SEQ ID NO: 563161 - RNA, 22 nt, Human
ggugcggagacuccaugaggcc

SEQ ID NO: 563162 - RNA, 22 nt, Human
aggaagagcuggaccagaggac

SEQ ID NO: 563163 - RNA, 22 nt, Human
gugcgccagcucaaggggaggc

SEQ ID NO: 563164 - RNA, 22 nt, Human
ccuuugugaauaugcagaaaau

SEQ ID NO: 563165 - RNA, 22 nt, Human
aagagucccaaaaugauucuua

SEQ ID NO: 563166 - RNA, 22 nt, Human
gaccacaguccagucaucaugg

SEQ ID NO: 563167 - RNA, 22 nt, Human
ugggcccaucauugcugugggc

SEQ ID NO: 563168 - RNA, 22 nt, Human
agccagugucgugugacaugag

SEQ ID NO: 563169 - RNA, 22 nt, Human
uuuggcgucucucaggagcuca

SEQ ID NO: 563170 - RNA, 22 nt, Human
ggccagccuggggcucccagac

SEQ ID NO: 563171 - RNA, 22 nt, Human
cccugcacagccuggcucucuu

SEQ ID NO: 563172 - RNA, 22 nt, Human
acaggacagucuaguaacagua

SEQ ID NO: 563173 - RNA, 22 nt, Human
ccugugggcgcagcuggaguca

SEQ ID NO: 563174 - RNA, 22 nt, Human
guacauauccuuuacguuuugu

SEQ ID NO: 563175 - RNA, 22 nt, Human
cugguuuuccaauguuuugacu

SEQ ID NO: 563176 - RNA, 22 nt, Human
aaauacaguggcagcagauaau

SEQ ID NO: 563177 - RNA, 22 nt, Human
uggcggugacggcggcgccugg

SEQ ID NO: 563178 - RNA, 22 nt, Human
ggggaggaagcuggaacacggg

SEQ ID NO: 563179 - RNA, 22 nt, Human
cagagccuuaguucuccuagaa

SEQ ID NO: 563180 - RNA, 20 nt, Human
cucuuuucacucucaguggu

SEQ ID NO: 563181 - RNA, 22 nt, Human
gagcaacacauugaaugaggau

SEQ ID NO: 563182 - RNA, 22 nt, Human
ggcacugggugagggucacugg

SEQ ID NO: 563183 - RNA, 22 nt, Human
cauggggcccaugugcuccaag

SEQ ID NO: 563184 - RNA, 22 nt, Human
ucuguuauaaaucacacugcau

SEQ ID NO: 563185 - RNA, 22 nt, Human
uacuggacacguauauauagau

SEQ ID NO: 563186 - RNA, 22 nt, Human
uguccagcugaaggcagccuca

SEQ ID NO: 563187 - RNA, 22 nt, Human
cugagaggcacaaggcauuucg

SEQ ID NO: 563188 - RNA, 22 nt, Human
acagcugggaacucacacagca

SEQ ID NO: 563189 - RNA, 22 nt, Human
gccagcagcgagaguuuaaccu

SEQ ID NO: 563190 - RNA, 22 nt, Human
ggagaggguguggaaaguuauc

SEQ ID NO: 563191 - RNA, 22 nt, Human
uggccagucuuagcugugccug

SEQ ID NO: 563192 - RNA, 21 nt, Human
cuagaaagaauguugucgucu

SEQ ID NO: 563193 - RNA, 22 nt, Human
ugccaggccucaggagucucca

SEQ ID NO: 563194 - RNA, 20 nt, Human
cagagcagugcccaggcggc

SEQ ID NO: 563195 - RNA, 22 nt, Human
acuagaaacuaauggauuauua

SEQ ID NO: 563196 - RNA, 22 nt, Human
cuggccagccucccagguaccc

SEQ ID NO: 563197 - RNA, 22 nt, Human
uagaggaugauccuuccuugcc

SEQ ID NO: 563198 - RNA, 22 nt, Human
caacuguaauauuggaagauca

SEQ ID NO: 563199 - RNA, 19 nt, Human
agcagggagugguuguggg

SEQ ID NO: 563200 - RNA, 22 nt, Human
cugcagggcccaaggucaacgg

SEQ ID NO: 563201 - RNA, 21 nt, Human
gcaaccagaccacagggcagu

SEQ ID NO: 563202 - RNA, 22 nt, Human
acuugguggcgaacgaggguca

SEQ ID NO: 563203 - RNA, 22 nt, Human
ugcugcacuuauggcucugagg

SEQ ID NO: 563204 - RNA, 22 nt, Human
agugaauuagccuauuuguaaa

SEQ ID NO: 563205 - RNA, 22 nt, Human
aaggaucauguauauguuuaag

SEQ ID NO: 563206 - RNA, 21 nt, Human
gcaggguuugugcugugaguu

SEQ ID NO: 563207 - RNA, 22 nt, Human
uccuggguccauggcagccgaa

SEQ ID NO: 563208 - RNA, 22 nt, Human
guguaucaaagcacagacuuca

SEQ ID NO: 563209 - RNA, 22 nt, Human
caguguuuagcacagugcuugg

SEQ ID NO: 563210 - RNA, 22 nt, Human
uccaggcuccccugcgugcucc

SEQ ID NO: 563211 - RNA, 19 nt, Human
uggcagcauugguaccuug

SEQ ID NO: 563212 - RNA, 22 nt, Human
uugucgggcuuacgcagggcca

SEQ ID NO: 563213 - RNA, 22 nt, Human
uucagcacuggacagcgagucu

SEQ ID NO: 563214 - RNA, 22 nt, Human
aacagaaaucauuuagggcucu

SEQ ID NO: 563215 - RNA, 22 nt, Human
cucugugaaccccuccuuucuu

SEQ ID NO: 563216 - RNA, 22 nt, Human
cuggagcagcagguggccaggg

SEQ ID NO: 563217 - RNA, 22 nt, Human
agacagcacuuuuguauggggg

SEQ ID NO: 563218 - RNA, 22 nt, Human
cuggcuccauccuugagcucug

SEQ ID NO: 563219 - RNA, 22 nt, Human
acugggcaaggauaugaugggu

SEQ ID NO: 563220 - RNA, 22 nt, Human
agcuuugcugcuggagaagggu

SEQ ID NO: 563221 - RNA, 22 nt, Human
uagugucucuuccuguuugaaa

SEQ ID NO: 563222 - RNA, 22 nt, Human
aguccgcgcuccaugggagucc

SEQ ID NO: 563223 - RNA, 22 nt, Human
agcugugaccuucaagagcuac

SEQ ID NO: 563224 - RNA, 22 nt, Human
uggagcagccuuuucuaagcaa

SEQ ID NO: 563225 - RNA, 20 nt, Human
ucagugggaaagugagagug

SEQ ID NO: 563226 - RNA, 22 nt, Human
auaaugacauucuuagacugga

SEQ ID NO: 563227 - RNA, 22 nt, Human
uaaagacaauuucgagcuguag

SEQ ID NO: 563228 - RNA, 21 nt, Human
ucugugcuuuuuuggcuccua

SEQ ID NO: 563229 - RNA, 22 nt, Human
aguggcagggacuucauauaaa

SEQ ID NO: 563230 - RNA, 23 nt, Human
uccugcagauaagcugguugaca

SEQ ID NO: 563231 - RNA, 22 nt, Human
agacauauuggcuugcuuuaau

SEQ ID NO: 563232 - RNA, 22 nt, Human
ucggugcgcgaggcgcgguccc

SEQ ID NO: 563233 - RNA, 20 nt, Human
gcugugccaugacccucgag

SEQ ID NO: 563234 - RNA, 22 nt, Human
uuggcgcccaggacgccgccgc

SEQ ID NO: 563235 - RNA, 22 nt, Human
ucugcuggaaaaccagggaauu

SEQ ID NO: 563236 - RNA, 22 nt, Human
agccaccaccacugaaagguua

SEQ ID NO: 563237 - RNA, 22 nt, Human
ccucugagcuggccuguggggc

SEQ ID NO: 563238 - RNA, 22 nt, Human
uuccaggaagcucucggccucu

SEQ ID NO: 563239 - RNA, 19 nt, Human
ccgucauggagaguggggu

SEQ ID NO: 563240 - RNA, 22 nt, Human
uaugcgugccucugucugucug

SEQ ID NO: 563241 - RNA, 21 nt, Human
uccaggagcacgggacuagga

SEQ ID NO: 563242 - RNA, 22 nt, Human
caggccagcagggccuccgugg

SEQ ID NO: 563243 - RNA, 22 nt, Human
cuggcuuucauggcgcaguuga

SEQ ID NO: 563244 - RNA, 22 nt, Human
gcaagcagcccagaacagcucu

SEQ ID NO: 563245 - RNA, 22 nt, Human
cagugacguaaacugcaugugc

SEQ ID NO: 563246 - RNA, 21 nt, Human
uaaagcucguucaggaaaguc

SEQ ID NO: 563247 - RNA, 22 nt, Human
gcgagucgccgcugcagcccua

SEQ ID NO: 563248 - RNA, 22 nt, Human
gcucuagcuggcgcugaccugg

SEQ ID NO: 563249 - RNA, 22 nt, Human
gggaagugagcuggaaucaagg

SEQ ID NO: 563250 - RNA, 22 nt, Human
caggccugugacaccgugucug

SEQ ID NO: 563251 - RNA, 22 nt, Human
acaccacaaguaacucuuuucc

SEQ ID NO: 563252 - RNA, 22 nt, Human
uacuguauacuacugcuguucu

SEQ ID NO: 563253 - RNA, 22 nt, Human
ugucuguccaucugucugggac

SEQ ID NO: 563254 - RNA, 22 nt, Human
uggccuugcccagcgccuaggu

SEQ ID NO: 563255 - RNA, 22 nt, Human
agccuuacauaaacagccuuau

SEQ ID NO: 563256 - RNA, 22 nt, Human
acuuuggugcgaagucacuuua

SEQ ID NO: 563257 - RNA, 21 nt, Human
uggcccuggccacggcugcca

SEQ ID NO: 563258 - RNA, 22 nt, Human
uggagugcaguugggaggacac

SEQ ID NO: 563259 - RNA, 22 nt, Human
ucguggaugcgcagggcggccu

SEQ ID NO: 563260 - RNA, 18 nt, Human
gaucgggggcgccccaag

SEQ ID NO: 563261 - RNA, 21 nt, Human
gcuggcugucucuuacacggu

SEQ ID NO: 563262 - RNA, 22 nt, Human
ccuaggccgcccggugcguggg

SEQ ID NO: 563263 - RNA, 22 nt, Human
caugaccagagaggacggccag

SEQ ID NO: 563264 - RNA, 22 nt, Human
ucuuugcagaauuuaacuuugc

SEQ ID NO: 563265 - RNA, 22 nt, Human
uuguugcugcucaaccucuaua

SEQ ID NO: 563266 - RNA, 22 nt, Human
guggcauuuuagaacagcugac

SEQ ID NO: 563267 - RNA, 22 nt, Human
gcgagaaacuaagugcccuuug

SEQ ID NO: 563268 - RNA, 22 nt, Human
agcauucuguggucuucuaugg

SEQ ID NO: 563269 - RNA, 22 nt, Human
auucagaaauagaaaauuugau

SEQ ID NO: 563270 - RNA, 22 nt, Human
ccuggccgacauggugaaacgc

SEQ ID NO: 563271 - RNA, 22 nt, Human
ggucagugccuaucaugugggc

SEQ ID NO: 563272 - RNA, 22 nt, Human
gaggucaggggagaggcugaug

SEQ ID NO: 563273 - RNA, 22 nt, Human
gggagagcgcgcuagggccgag

SEQ ID NO: 563274 - RNA, 22 nt, Human
acacauggucuacuucuucuca

SEQ ID NO: 563275 - RNA, 21 nt, Human
agggccagaucaccaaggagc

SEQ ID NO: 563276 - RNA, 22 nt, Human
ccuguaccgcgaucugcugcgc

SEQ ID NO: 563277 - RNA, 22 nt, Human
gacaaagcgccugcucgcgggc

SEQ ID NO: 563278 - RNA, 22 nt, Human
agccccaguucccuggaagucu

SEQ ID NO: 563279 - RNA, 22 nt, Human
gagucgagcagaaagccgucgg

SEQ ID NO: 563280 - RNA, 22 nt, Human
cagguugaaaguggaggagcua

SEQ ID NO: 563281 - RNA, 22 nt, Human
uguccagaucaaugcccacaug

SEQ ID NO: 563282 - RNA, 22 nt, Human
gggcagcaaaucugagucuggu

SEQ ID NO: 563283 - RNA, 21 nt, Human
ccuuugaguguguuugaagua

SEQ ID NO: 563284 - RNA, 22 nt, Human
ugagaagcauuaggaagaacau

SEQ ID NO: 563285 - RNA, 22 nt, Human
aggcucaguauagcuggcaagu

SEQ ID NO: 563286 - RNA, 22 nt, Human
gguccagcacaacacuggcaug

SEQ ID NO: 563287 - RNA, 22 nt, Human
ccugggcaaaugccagagacaa

SEQ ID NO: 563288 - RNA, 22 nt, Human
ugaaaacacuuuaguuuagguc

SEQ ID NO: 563289 - RNA, 22 nt, Human
ucggagcgucacuggcuggagg

SEQ ID NO: 563290 - RNA, 22 nt, Human
cauggccaaagaauuauauuuu

SEQ ID NO: 563291 - RNA, 22 nt, Human
gcagacaucaagcacaggccca

SEQ ID NO: 563292 - RNA, 22 nt, Human
ggcuguggucauuaggagguug

SEQ ID NO: 563293 - RNA, 17 nt, Human
gccuggcccagccuggc

SEQ ID NO: 563294 - RNA, 22 nt, Human
gccaaucaggaggcuguacauc

SEQ ID NO: 563295 - RNA, 22 nt, Human
ucacccagacugucugacucuu

SEQ ID NO: 563296 - RNA, 22 nt, Human
ugccgcugucgccaccauggcu

SEQ ID NO: 563297 - RNA, 22 nt, Human
agcuccagggaaagaguggauc

SEQ ID NO: 563298 - RNA, 22 nt, Human
gaagcgugcagguccguauacu

SEQ ID NO: 563299 - RNA, 22 nt, Human
uugcuauuuugagagucauagu

SEQ ID NO: 563300 - RNA, 22 nt, Human
ggcagcugaagaggaacuuugg

SEQ ID NO: 563301 - RNA, 22 nt, Human
uuaugcaaaggggccucuuccu

SEQ ID NO: 563302 - RNA, 22 nt, Human
auuaauaucccccgccguucug

SEQ ID NO: 563303 - RNA, 22 nt, Human
gagcagcagcugggccagguuc

SEQ ID NO: 563304 - RNA, 22 nt, Human
gagcugcagcggcugacgcaac

SEQ ID NO: 563305 - RNA, 22 nt, Human
acagauccugguuacagccauu

SEQ ID NO: 563306 - RNA, 22 nt, Human
ccaggaugacccccacuuuccu

SEQ ID NO: 563307 - RNA, 17 nt, Human
acuuguauugugcuuua

SEQ ID NO: 563308 - RNA, 18 nt, Human
uucggcagauacgcuugg

SEQ ID NO: 563309 - RNA, 22 nt, Human
gacggggcagccagcugguggc

SEQ ID NO: 563310 - RNA, 22 nt, Human
auguggcuuucugcguuuucuc

SEQ ID NO: 563311 - RNA, 22 nt, Human
gcucccuggaauguuggcugcc

SEQ ID NO: 563312 - RNA, 20 nt, Human
ccagguggugccuggagagg

SEQ ID NO: 563313 - RNA, 22 nt, Human
gggcugacaccacccaggcgca

SEQ ID NO: 563314 - RNA, 22 nt, Human
uagcccuugaugcugcggccag

SEQ ID NO: 563315 - RNA, 22 nt, Human
guggccuuuucaaguaggguau

SEQ ID NO: 563316 - RNA, 20 nt, Human
uccagccacuuccgcugguc

SEQ ID NO: 563317 - RNA, 22 nt, Human
cccagguaaggaugcuccucau

SEQ ID NO: 563318 - RNA, 22 nt, Human
ccgcuguccuggagcugcugcu

SEQ ID NO: 563319 - RNA, 22 nt, Human
gacuguggacucucaugauaga

SEQ ID NO: 563320 - RNA, 22 nt, Human
ccucuugauugguuggaagcgg

SEQ ID NO: 563321 - RNA, 22 nt, Human
cuccacagccccuccaguggca

SEQ ID NO: 563322 - RNA, 22 nt, Human
uaugccuaccuccaaaauauau

SEQ ID NO: 563323 - RNA, 22 nt, Human
caagagcuuuagaaaugcucau

SEQ ID NO: 563324 - RNA, 22 nt, Human
cgggcagugcccagcggggcag

SEQ ID NO: 563325 - RNA, 22 nt, Human
uuuucaguugugcucucuaguu

SEQ ID NO: 563326 - RNA, 22 nt, Human
ugccaggcugcccuccagucug

SEQ ID NO: 563327 - RNA, 22 nt, Human
ugcaggccuggacugauguggu

SEQ ID NO: 563328 - RNA, 22 nt, Human
cggagcagagccacucgggccg

SEQ ID NO: 563329 - RNA, 22 nt, Human
ggcaauuacguauuagucaugu

SEQ ID NO: 563330 - RNA, 22 nt, Human
auggccuuucucaguggugcuu

SEQ ID NO: 563331 - RNA, 22 nt, Human
aacuuucugaaaagcuugauca

SEQ ID NO: 563332 - RNA, 22 nt, Human
cgcagcuucagggccaggaggg

SEQ ID NO: 563333 - RNA, 22 nt, Human
uuacuaguggagaaacugaggc

SEQ ID NO: 563334 - RNA, 22 nt, Human
acuggcuuugagggaauagcua

SEQ ID NO: 563335 - RNA, 22 nt, Human
aagcgcagacacagagagugga

SEQ ID NO: 563336 - RNA, 22 nt, Human
gaacaguuucccuguagaaaau

SEQ ID NO: 563337 - RNA, 20 nt, Human
augcacccucagggucccug

SEQ ID NO: 563338 - RNA, 22 nt, Human
ugcuggaguggcacuguguggc

SEQ ID NO: 563339 - RNA, 22 nt, Human
ucccaaguagaugggaauacag

SEQ ID NO: 563340 - RNA, 22 nt, Human
caggguggcaggcaccauggcc

SEQ ID NO: 563341 - RNA, 22 nt, Human
acuuuucuuaucagaaaggcca

SEQ ID NO: 563342 - RNA, 22 nt, Human
agcugcugcaaguggugcuaac

SEQ ID NO: 563343 - RNA, 22 nt, Human
ucugcgcccugucgccugcucc

SEQ ID NO: 563344 - RNA, 22 nt, Human
caugcuggucagccaguggaug

SEQ ID NO: 563345 - RNA, 22 nt, Human
auuuuguaucuuacggggacua

SEQ ID NO: 563346 - RNA, 22 nt, Human
gagcagcaggccagguugcagg

SEQ ID NO: 563347 - RNA, 20 nt, Human
ugugguuuuugccaguugaa

SEQ ID NO: 563348 - RNA, 22 nt, Human
uugcaggucuggggguccuggu

SEQ ID NO: 563349 - RNA, 22 nt, Human
uccuucccaggugucgccgccu

SEQ ID NO: 563350 - RNA, 22 nt, Human
ucauugacuugaagaaaacaau

SEQ ID NO: 563351 - RNA, 22 nt, Human
uccuggccaaguagauguggcg

SEQ ID NO: 563352 - RNA, 22 nt, Human
uugcuucacuacuucuaggcuc

SEQ ID NO: 563353 - RNA, 22 nt, Human
ggcagccagagggcagcuggau

SEQ ID NO: 563354 - RNA, 22 nt, Human
uccagcaguccaugugagacac

SEQ ID NO: 563355 - RNA, 22 nt, Human
ggcagguguggugaccagagau

SEQ ID NO: 563356 - RNA, 22 nt, Human
aaagcagaacugagagagcugg

SEQ ID NO: 563357 - RNA, 21 nt, Human
gcugcucgagauccagugcuu

SEQ ID NO: 563358 - RNA, 22 nt, Human
ucuguggcaugguaucuggagg

SEQ ID NO: 563359 - RNA, 22 nt, Human
ugcuuguauucauaucacagcu

SEQ ID NO: 563360 - RNA, 22 nt, Human
ggagaugccuuguuucaggaac

SEQ ID NO: 563361 - RNA, 22 nt, Human
agcaccauugcaaauauggcag

SEQ ID NO: 563362 - RNA, 22 nt, Human
gaaaggcucagauucccccagg

SEQ ID NO: 563363 - RNA, 22 nt, Human
gcagcccucuuggucacuaggc

SEQ ID NO: 563364 - RNA, 22 nt, Human
caagaaguugacagccagguga

SEQ ID NO: 563365 - RNA, 22 nt, Human
uuccaauaaaauguuauuugca

SEQ ID NO: 563366 - RNA, 22 nt, Human
ucagguagugguuaaguucugu

SEQ ID NO: 563367 - RNA, 22 nt, Human
gagggaaacagauggguugugg

SEQ ID NO: 563368 - RNA, 22 nt, Human
ggacauggaaguauggagugga

SEQ ID NO: 563369 - RNA, 22 nt, Human
ugccagcaguagcaguaggcca

SEQ ID NO: 563370 - RNA, 22 nt, Human
ugucaccuugcucauccucgga

SEQ ID NO: 563371 - RNA, 22 nt, Human
ugaguggacgugaggcugagua

SEQ ID NO: 563372 - RNA, 22 nt, Human
aagaggaggacgguucccagaa

SEQ ID NO: 563373 - RNA, 20 nt, Human
gggcucugcauccaucagcc

SEQ ID NO: 563374 - RNA, 22 nt, Human
uggggugccgacagggagggca

SEQ ID NO: 563375 - RNA, 22 nt, Human
gccaggucgucuccauguccaa

SEQ ID NO: 563376 - RNA, 22 nt, Human
uccgguccggguacuccucucu

SEQ ID NO: 563377 - RNA, 22 nt, Human
uuuucuuggaguggcuguccuu

SEQ ID NO: 563378 - RNA, 22 nt, Human
ucaccucucuggccgucuaccu

SEQ ID NO: 563379 - RNA, 22 nt, Human
aggggagccagggcugcgaguu

SEQ ID NO: 563380 - RNA, 22 nt, Human
cugcucaauuccggcacgcugg

SEQ ID NO: 563381 - RNA, 22 nt, Human
ugcuccguucuucugcuucuug

SEQ ID NO: 563382 - RNA, 22 nt, Human
cagaaacacuguauuuagggaa

SEQ ID NO: 563383 - RNA, 21 nt, Human
ugcuuugcagguggauuuagu

SEQ ID NO: 563384 - RNA, 22 nt, Human
aacacuaaaggucaguuagaag

SEQ ID NO: 563385 - RNA, 22 nt, Human
gcacuuguuuuauguuccugag

SEQ ID NO: 563386 - RNA, 22 nt, Human
gcuggccugaccugaggcuggg

SEQ ID NO: 563387 - RNA, 22 nt, Human
auuuugacauugcggcauugcu

SEQ ID NO: 563388 - RNA, 22 nt, Human
auugugcaccuacugugugcag

SEQ ID NO: 563389 - RNA, 22 nt, Human
agacacauuuucagcucugcca

SEQ ID NO: 563390 - RNA, 22 nt, Human
gcaguggccacauggaggagga

SEQ ID NO: 563391 - RNA, 22 nt, Human
guuucgucaggcuuauucuauc

SEQ ID NO: 563392 - RNA, 22 nt, Human
agcuccacucccugccuguuuc

SEQ ID NO: 563393 - RNA, 22 nt, Human
uuguagucuaggauagauuuuu

SEQ ID NO: 563394 - RNA, 23 nt, Human
aggcagguuugggcucuucuugu

SEQ ID NO: 563395 - RNA, 22 nt, Human
ucagcccggguucgcaaacacu

SEQ ID NO: 563396 - RNA, 22 nt, Human
ccugugcuucacucaacaagcc

SEQ ID NO: 563397 - RNA, 22 nt, Human
ccauuuguaccauuucuuugua

SEQ ID NO: 563398 - RNA, 22 nt, Human
uagaaaagccccagcuggaggg

SEQ ID NO: 563399 - RNA, 22 nt, Human
gcugccaccguggagaugagug

SEQ ID NO: 563400 - RNA, 22 nt, Human
uauagugucucuagaucaaaga

SEQ ID NO: 563401 - RNA, 22 nt, Human
cugcugucuuuauuucacugcu

SEQ ID NO: 563402 - RNA, 22 nt, Human
gaggagaggcuggacgcgguga

SEQ ID NO: 563403 - RNA, 22 nt, Human
guggcgcagaggguggcagaga

SEQ ID NO: 563404 - RNA, 22 nt, Human
uccagguccuacuggcccauag

SEQ ID NO: 563405 - RNA, 22 nt, Human
gcagccuccgcacugcgagucc

SEQ ID NO: 563406 - RNA, 22 nt, Human
gugcauauguguguauacaaac

SEQ ID NO: 563407 - RNA, 22 nt, Human
uaaguugauuauaaccacugga

SEQ ID NO: 563408 - RNA, 22 nt, Human
cuucauguacaguuauuggaga

SEQ ID NO: 563409 - RNA, 22 nt, Human
uuggaggacuaguuaagagacc

SEQ ID NO: 563410 - RNA, 22 nt, Human
cuacauuauguuuauugggacu

SEQ ID NO: 563411 - RNA, 22 nt, Human
guagcccaccuggggagggcga

SEQ ID NO: 563412 - RNA, 22 nt, Human
cgagagauggguuggcaggggc

SEQ ID NO: 563413 - RNA, 22 nt, Human
cugguuuuuagugcuuaggagu

SEQ ID NO: 563414 - RNA, 22 nt, Human
acaaaugcuuaguucaccaaaa

SEQ ID NO: 563415 - RNA, 22 nt, Human
uuguaacaguagcugucagcuc

SEQ ID NO: 563416 - RNA, 22 nt, Human
uucuuucugggguccuucggcu

SEQ ID NO: 563417 - RNA, 22 nt, Human
gugggcaucuccuuggaagcca

SEQ ID NO: 563418 - RNA, 22 nt, Human
ccucuuccuucucacuguggaa

SEQ ID NO: 563419 - RNA, 22 nt, Human
ugucugccugcgggccggcaca

SEQ ID NO: 563420 - RNA, 22 nt, Human
augguuuuguccucuuugguuc

SEQ ID NO: 563421 - RNA, 22 nt, Human
aggcugcagaggugcugccaga

SEQ ID NO: 563422 - RNA, 22 nt, Human
agaaacaucgcuuaguccucau

SEQ ID NO: 563423 - RNA, 22 nt, Human
ccugugggagggagcggcugga

SEQ ID NO: 563424 - RNA, 22 nt, Human
uucuccacccacucuuuuguug

SEQ ID NO: 563425 - RNA, 22 nt, Human
ugggugaagaggcuaugcuacu

SEQ ID NO: 563426 - RNA, 22 nt, Human
cucacucaguuuuuaguucauc

SEQ ID NO: 563427 - RNA, 22 nt, Human
gcugaagagagaugcguccagc

SEQ ID NO: 563428 - RNA, 22 nt, Human
uggcagcauuuuuuccagaaca

SEQ ID NO: 563429 - RNA, 22 nt, Human
gccuucugauugcuggacugac

SEQ ID NO: 563430 - RNA, 22 nt, Human
acuggauucucuuacacagaug

SEQ ID NO: 563431 - RNA, 22 nt, Human
ugagcugcuucuuauaaugugu

SEQ ID NO: 563432 - RNA, 22 nt, Human
ucccugagugggcugguaguau

SEQ ID NO: 563433 - RNA, 22 nt, Human
uggaauguuaaaccucaaugau

SEQ ID NO: 563434 - RNA, 22 nt, Human
cacagauaaggcuuugucccca

SEQ ID NO: 563435 - RNA, 22 nt, Human
accuccuccaaggagccauagg

SEQ ID NO: 563436 - RNA, 22 nt, Human
uaucuguagucucaugguuccu

SEQ ID NO: 563437 - RNA, 22 nt, Human
gccauguucuugaaucuggguc

SEQ ID NO: 563438 - RNA, 23 nt, Human
uggugggcccugcuugcucacug

SEQ ID NO: 563439 - RNA, 22 nt, Human
uccuuacacuggggaaggugua

SEQ ID NO: 563440 - RNA, 20 nt, Human
ggccggggagcucuccaggg

SEQ ID NO: 563441 - RNA, 23 nt, Human
ggacaugucucuggguauuuuga

SEQ ID NO: 563442 - RNA, 22 nt, Human
aguguuugaguuugcggcauug

SEQ ID NO: 563443 - RNA, 22 nt, Human
ugucuacaagccuuguucggca

SEQ ID NO: 563444 - RNA, 22 nt, Human
agcaggggcaggguuuugugcu

SEQ ID NO: 563445 - RNA, 22 nt, Human
acaagcgggccacagugcuggu

SEQ ID NO: 563446 - RNA, 22 nt, Human
uggaagguguggcaggucuagu

SEQ ID NO: 563447 - RNA, 22 nt, Human
uggcccagcucagggugggcgg

SEQ ID NO: 563448 - RNA, 22 nt, Human
ggacagacuuuacagccccggg

SEQ ID NO: 563449 - RNA, 22 nt, Human
ugagaugaagugauguaaaaca

SEQ ID NO: 563450 - RNA, 22 nt, Human
gcagcagcaggcgcucggccgu

SEQ ID NO: 563451 - RNA, 22 nt, Human
cggcuucucgggucggauuccg

SEQ ID NO: 563452 - RNA, 22 nt, Human
gcuguggcuccaauggugagcc

SEQ ID NO: 563453 - RNA, 22 nt, Human
ggcgcggugacucagccucgcu

SEQ ID NO: 563454 - RNA, 22 nt, Human
gcugcagugagccaagaucgug

SEQ ID NO: 563455 - RNA, 22 nt, Human
ucuguggcauguugcacuugua

SEQ ID NO: 563456 - RNA, 22 nt, Human
gaggcugaacagguucucauga

SEQ ID NO: 563457 - RNA, 22 nt, Human
ccaggcccugcuccucacacca

SEQ ID NO: 563458 - RNA, 22 nt, Human
guugcagcaucacugcugagug

SEQ ID NO: 563459 - RNA, 20 nt, Human
ccuggagccuggaaggaguc

SEQ ID NO: 563460 - RNA, 22 nt, Human
auuucagaguagaucguuauuu

SEQ ID NO: 563461 - RNA, 22 nt, Human
gcucguacaccagcguggaggu

SEQ ID NO: 563462 - RNA, 22 nt, Human
agguggcagacuaacagaagga

SEQ ID NO: 563463 - RNA, 22 nt, Human
uggugcugccaccuccucugcu

SEQ ID NO: 563464 - RNA, 22 nt, Human
agguggaguuaagugugaacug

SEQ ID NO: 563465 - RNA, 22 nt, Human
aauucagguuauauuugcaacu

SEQ ID NO: 563466 - RNA, 22 nt, Human
acauuuaaugauccuacuguga

SEQ ID NO: 563467 - RNA, 22 nt, Human
gcggccugcgcugcucccgacg

SEQ ID NO: 563468 - RNA, 22 nt, Human
uuguauuaaaauguguuucugu

SEQ ID NO: 563469 - RNA, 22 nt, Human
ggcagugaugucaaacagugaa

SEQ ID NO: 563470 - RNA, 22 nt, Human
gagcugcuggccuccugcggga

SEQ ID NO: 563471 - RNA, 22 nt, Human
ggccauggcgggagccggcguc

SEQ ID NO: 563472 - RNA, 22 nt, Human
cccacugcugcucuccauggca

SEQ ID NO: 563473 - RNA, 22 nt, Human
acauucaugcaccuuccuaucc

SEQ ID NO: 563474 - RNA, 22 nt, Human
cuggccgcaguguggaguugug

SEQ ID NO: 563475 - RNA, 22 nt, Human
gcugucucauacaaggcccugc

SEQ ID NO: 563476 - RNA, 22 nt, Human
ucacacuuuauuuauuucaugc

SEQ ID NO: 563477 - RNA, 22 nt, Human
cuugcuacuaugccuggcuaau

SEQ ID NO: 563478 - RNA, 22 nt, Human
gggaggaaggcuugggugagua

SEQ ID NO: 563479 - RNA, 22 nt, Human
gggcauuucuugucaauguagg

SEQ ID NO: 563480 - RNA, 22 nt, Human
ucgggguagacgccagcucgga

SEQ ID NO: 563481 - RNA, 22 nt, Human
gauacuugaggagaucaccaca

SEQ ID NO: 563482 - RNA, 19 nt, Human
cacuguccuagucgaggcc

SEQ ID NO: 563483 - RNA, 22 nt, Human
ugacagugugcccggagguuag

SEQ ID NO: 563484 - RNA, 22 nt, Human
agaaguaucaggaagauucuca

SEQ ID NO: 563485 - RNA, 22 nt, Human
uucacagaauugucuugacugg

SEQ ID NO: 563486 - RNA, 22 nt, Human
agcagccuugugacuccggggu

SEQ ID NO: 563487 - RNA, 22 nt, Human
uuuauacuccacucugcaagcg

SEQ ID NO: 563488 - RNA, 22 nt, Human
caccgagugacaguagccauca

SEQ ID NO: 563489 - RNA, 22 nt, Human
acagacuccccagguuaucuca

SEQ ID NO: 563490 - RNA, 22 nt, Human
uuaaccagguccuuugaaaaca

SEQ ID NO: 563491 - RNA, 22 nt, Human
agaaaagaggcuuucuaagcau

SEQ ID NO: 563492 - RNA, 22 nt, Human
ugcacauggccugagugccuga

SEQ ID NO: 563493 - RNA, 22 nt, Human
gcugacugguucaggucccgcu

SEQ ID NO: 563494 - RNA, 22 nt, Human
guaguucuuucucaauguucaa

SEQ ID NO: 563495 - RNA, 22 nt, Human
gcccagcccagaaagguucgga

SEQ ID NO: 563496 - RNA, 22 nt, Human
agcaggaggagagccuggcggu

SEQ ID NO: 563497 - RNA, 22 nt, Human
gcugcagggagcuggaaggcuc

SEQ ID NO: 563498 - RNA, 21 nt, Human
agaugcagugacccacugggg

SEQ ID NO: 563499 - RNA, 22 nt, Human
uggugcaggccaagcugcgagc

SEQ ID NO: 563500 - RNA, 22 nt, Human
ggccgugcuccaaagucaucgu

SEQ ID NO: 563501 - RNA, 22 nt, Human
acccggaggcgggggaugcagu

SEQ ID NO: 563502 - RNA, 22 nt, Human
uugugcccucaaagggugcguc

SEQ ID NO: 563503 - RNA, 22 nt, Human
ucauggaugauagcuucauugc

SEQ ID NO: 563504 - RNA, 22 nt, Human
ggauguuuauccuaucuuaguu

SEQ ID NO: 563505 - RNA, 22 nt, Human
ugagucaccucucagaagccac

SEQ ID NO: 563506 - RNA, 22 nt, Human
ucugggccggagccgacggcag

SEQ ID NO: 563507 - RNA, 22 nt, Human
gcaggggcugagcaccagcggg

SEQ ID NO: 563508 - RNA, 19 nt, Human
cugggacaaugaaagcauc

SEQ ID NO: 563509 - RNA, 22 nt, Human
uagcuucccugcuggaucauaa

SEQ ID NO: 563510 - RNA, 22 nt, Human
agcauggccucccgggccuggc

SEQ ID NO: 563511 - RNA, 22 nt, Human
ggcgaggugucugccaucaagc

SEQ ID NO: 563512 - RNA, 22 nt, Human
cccguguggaugcgcuggugcu

SEQ ID NO: 563513 - RNA, 22 nt, Human
caaccugaugugcaugccacgg

SEQ ID NO: 563514 - RNA, 21 nt, Human
gcuccuggugcugcguggcgc

SEQ ID NO: 563515 - RNA, 22 nt, Human
ccucuuccacugggccccaucc

SEQ ID NO: 563516 - RNA, 22 nt, Human
gcccagcaccucucucaggguu

SEQ ID NO: 563517 - RNA, 22 nt, Human
auacacauguuauuguggaagc

SEQ ID NO: 563518 - RNA, 22 nt, Human
agguggcuaugaggaugcaguc

SEQ ID NO: 563519 - RNA, 23 nt, Human
agugaugucacccacagacaagg

SEQ ID NO: 563520 - RNA, 22 nt, Human
ucucagucuuugcaaggaugcu

SEQ ID NO: 563521 - RNA, 22 nt, Human
caucucccacuuccuugggggu

SEQ ID NO: 563522 - RNA, 22 nt, Human
ccugugguuuacucuguggcua

SEQ ID NO: 563523 - RNA, 22 nt, Human
gcccagcgagcagagguggacg

SEQ ID NO: 563524 - RNA, 22 nt, Human
gacagucccccagcagcaaacc

SEQ ID NO: 563525 - RNA, 22 nt, Human
ucucugguuauuaacuaacucc

SEQ ID NO: 563526 - RNA, 22 nt, Human
cagaaccaggaacugauggaga

SEQ ID NO: 563527 - RNA, 21 nt, Human
acugaacuuguguucuagagg

SEQ ID NO: 563528 - RNA, 22 nt, Human
caugucaagacugaagauccag

SEQ ID NO: 563529 - RNA, 22 nt, Human
gugcacagaaacauacaaugug

SEQ ID NO: 563530 - RNA, 22 nt, Human
cugcggcuggggacagcuguug

SEQ ID NO: 563531 - RNA, 22 nt, Human
accuggaccugccaccuaugag

SEQ ID NO: 563532 - RNA, 22 nt, Human
agugauguagguggauucuggc

SEQ ID NO: 563533 - RNA, 19 nt, Human
aacuacagcgcacuguccu

SEQ ID NO: 563534 - RNA, 22 nt, Human
gagacagagagguacucaacau

SEQ ID NO: 563535 - RNA, 22 nt, Human
ggggcccagcaccccuccucgc

SEQ ID NO: 563536 - RNA, 22 nt, Human
uggcaggaaaaagggccagagg

SEQ ID NO: 563537 - RNA, 22 nt, Human
uguggccaccagagcugcuauu

SEQ ID NO: 563538 - RNA, 22 nt, Human
auagacgcggccgcugaugcag

SEQ ID NO: 563539 - RNA, 22 nt, Human
auggcuucugucuuggaaauuu

SEQ ID NO: 563540 - RNA, 22 nt, Human
cuguuuauucucaucuaaaaug

SEQ ID NO: 563541 - RNA, 22 nt, Human
acggagcccgugucagguggga

SEQ ID NO: 563542 - RNA, 22 nt, Human
ggcuuccuccuuccugcuguca

SEQ ID NO: 563543 - RNA, 22 nt, Human
uuuccagggaggaauguggggu

SEQ ID NO: 563544 - RNA, 22 nt, Human
uacugcauuaucaaggggaagg

SEQ ID NO: 563545 - RNA, 22 nt, Human
ggaguagcugcauuccgagcac

SEQ ID NO: 563546 - RNA, 22 nt, Human
cccaccacgugcuuugcuggag

SEQ ID NO: 563547 - RNA, 22 nt, Human
agcacauucccaccuguacuuc

SEQ ID NO: 563548 - RNA, 22 nt, Human
gcagcagcggggccccugcgcg

SEQ ID NO: 563549 - RNA, 22 nt, Human
uuccuggugguggugacagcac

SEQ ID NO: 563550 - RNA, 18 nt, Human
cugccagugugcucuccg

SEQ ID NO: 563551 - RNA, 16 nt, Human
ucucccuugucaccug

SEQ ID NO: 563552 - RNA, 22 nt, Human
cuuccucuguggccagagugua

SEQ ID NO: 563553 - RNA, 23 nt, Human
uggcucuguggaucccucaggag

SEQ ID NO: 563554 - RNA, 18 nt, Human
gugacugccccaaaaggc

SEQ ID NO: 563555 - RNA, 22 nt, Human
uguauauacacacucccauguu

SEQ ID NO: 563556 - RNA, 20 nt, Human
uugagcagcagugcuguguc

SEQ ID NO: 563557 - RNA, 21 nt, Human
uccuccuguagaggguccugg

SEQ ID NO: 563558 - RNA, 22 nt, Human
gggcuggagagucccacguggg

SEQ ID NO: 563559 - RNA, 22 nt, Human
gcucaugggcccagagcagccc

SEQ ID NO: 563560 - RNA, 22 nt, Human
cauguguauuauucuuguggaa

SEQ ID NO: 563561 - RNA, 23 nt, Human
agacagaggcugaggcuggccgc

SEQ ID NO: 563562 - RNA, 22 nt, Human
cuugggcaggggaaacagcugc

SEQ ID NO: 563563 - RNA, 22 nt, Human
uccguggggccuguggcuuccg

SEQ ID NO: 563564 - RNA, 22 nt, Human
ugcaaggcacccacucugcuuu

SEQ ID NO: 563565 - RNA, 18 nt, Human
ucaguccuccauagagcu

SEQ ID NO: 563566 - RNA, 22 nt, Human
cccugaaaguacacugggacgg

SEQ ID NO: 563567 - RNA, 23 nt, Human
aaacuacauuuauaguuuuucuc

SEQ ID NO: 563568 - RNA, 22 nt, Human
ugcugggauuacagucaugagc

SEQ ID NO: 563569 - RNA, 23 nt, Human
cucaccaagcgccgccgcugugu

SEQ ID NO: 563570 - RNA, 22 nt, Human
cugaaagcaaaguaauucuuaa

SEQ ID NO: 563571 - RNA, 21 nt, Human
gugugucuaauguaguggaaa

SEQ ID NO: 563572 - RNA, 22 nt, Human
aggcaguguggagggcuguugc

SEQ ID NO: 563573 - RNA, 22 nt, Human
uuccugguaacaaucucaaagu

SEQ ID NO: 563574 - RNA, 22 nt, Human
cugacagcgagagaguugcccc

SEQ ID NO: 563575 - RNA, 22 nt, Human
cucagucucuugggcugugaag

SEQ ID NO: 563576 - RNA, 22 nt, Human
cacagcuaccugcaugccugcu

SEQ ID NO: 563577 - RNA, 22 nt, Human
ccagguaggagagucaacaugu

SEQ ID NO: 563578 - RNA, 22 nt, Human
cagagccacugucugccaggca

SEQ ID NO: 563579 - RNA, 22 nt, Human
agaugcugccaggccccucagu

SEQ ID NO: 563580 - RNA, 21 nt, Human
ccuguggugccagaucgccag

SEQ ID NO: 563581 - RNA, 22 nt, Human
auacaccaccuuggaucuuuca

SEQ ID NO: 563582 - RNA, 22 nt, Human
agccagcuaccggggcuccugg

SEQ ID NO: 563583 - RNA, 22 nt, Human
cugcauaucaaauuacuccugg

SEQ ID NO: 563584 - RNA, 22 nt, Human
caucaguuccugccccugcccc

SEQ ID NO: 563585 - RNA, 22 nt, Human
cagggagcuggugccagccgac

SEQ ID NO: 563586 - RNA, 22 nt, Human
gauugcugccagcguguccgug

SEQ ID NO: 563587 - RNA, 22 nt, Human
cuguguccaauggccuuagcag

SEQ ID NO: 563588 - RNA, 19 nt, Human
ccuggcccugcugcgcggg

SEQ ID NO: 563589 - RNA, 22 nt, Human
ugguggggccagacuucagcuc

SEQ ID NO: 563590 - RNA, 23 nt, Human
aaauugucguaagguggagaugu

SEQ ID NO: 563591 - RNA, 22 nt, Human
accgugucugacacuuugggcg

SEQ ID NO: 563592 - RNA, 22 nt, Human
cgcccacgaaguagguggcauu

SEQ ID NO: 563593 - RNA, 22 nt, Human
gggagacaaaggugagguucuu

SEQ ID NO: 563594 - RNA, 22 nt, Human
cucuccaggcgagguccuacug

SEQ ID NO: 563595 - RNA, 22 nt, Human
agauguuuauaacucaugagug

SEQ ID NO: 563596 - RNA, 22 nt, Human
cugagccagcgggcucacuuuu

SEQ ID NO: 563597 - RNA, 22 nt, Human
gacacugcacuuggggcccaca

SEQ ID NO: 563598 - RNA, 22 nt, Human
uacagcgaaaauuuagcuugau

SEQ ID NO: 563599 - RNA, 22 nt, Human
uccgcgcucucacccgcucccg

SEQ ID NO: 563600 - RNA, 22 nt, Human
ggcagcagaacuggcccuguau

SEQ ID NO: 563601 - RNA, 22 nt, Human
cugccguugugaagcucuuaga

SEQ ID NO: 563602 - RNA, 22 nt, Human
acccugccucugcuuccuguag

SEQ ID NO: 563603 - RNA, 22 nt, Human
uucaaacaguguagaauauaug

SEQ ID NO: 563604 - RNA, 22 nt, Human
gcaccagccugagccucuugca

SEQ ID NO: 563605 - RNA, 22 nt, Human
uuuacaaggcaguuauuuuccu

SEQ ID NO: 563606 - RNA, 23 nt, Human
uggccucuccccaccuggcagaa

SEQ ID NO: 563607 - RNA, 22 nt, Human
ugcaugcagcuggucgggcgcc

SEQ ID NO: 563608 - RNA, 22 nt, Human
ucauccugaagaaccugcuucc

SEQ ID NO: 563609 - RNA, 22 nt, Human
gagcagcuguucugacuugucu

SEQ ID NO: 563610 - RNA, 22 nt, Human
gaucuguccuggcaguuaacac

SEQ ID NO: 563611 - RNA, 22 nt, Human
uagggcuguuaguaauucucag

SEQ ID NO: 563612 - RNA, 22 nt, Human
cugcuuuaaaacugauacauga

SEQ ID NO: 563613 - RNA, 22 nt, Human
ggcugcccucggggucgcaggc

SEQ ID NO: 563614 - RNA, 22 nt, Human
cacagcuucuccccgcugcggc

SEQ ID NO: 563615 - RNA, 22 nt, Human
ccugugucaucagcuguggcua

SEQ ID NO: 563616 - RNA, 22 nt, Human
cuccaaaggauaaaagcagagu

SEQ ID NO: 563617 - RNA, 22 nt, Human
cugucaccucugcccuuugccc

SEQ ID NO: 563618 - RNA, 22 nt, Human
gcagcucacagucuccgccauc

SEQ ID NO: 563619 - RNA, 22 nt, Human
ugcagcuucucugcaacaggag

SEQ ID NO: 563620 - RNA, 22 nt, Human
cucaguggggcgacagggugcu

SEQ ID NO: 563621 - RNA, 22 nt, Human
agugacagauuaccggcagagc

SEQ ID NO: 563622 - RNA, 22 nt, Human
gcuugcugaacaggaaccuggc

SEQ ID NO: 563623 - RNA, 22 nt, Human
uugcugccagcgcccugcaggg

SEQ ID NO: 563624 - RNA, 22 nt, Human
caaagccaggcuuucuaaugua

SEQ ID NO: 563625 - RNA, 22 nt, Human
uucagaagguaggaaugucccu

SEQ ID NO: 563626 - RNA, 22 nt, Human
cccaggucgucagcaguguggu

SEQ ID NO: 563627 - RNA, 22 nt, Human
ucauacauguuguguucaaaug

SEQ ID NO: 563628 - RNA, 22 nt, Human
uucuuugcccauguuuccuaag

SEQ ID NO: 563629 - RNA, 22 nt, Human
cgccaguggcagcuggaacagg

SEQ ID NO: 563630 - RNA, 22 nt, Human
gguggcaagggcagccaguaac

SEQ ID NO: 563631 - RNA, 22 nt, Human
cagaguggugcaagggcagugu

SEQ ID NO: 563632 - RNA, 21 nt, Human
agcgucaauaucgucaacagg

SEQ ID NO: 563633 - RNA, 22 nt, Human
gucacccguuugacuauccacc

SEQ ID NO: 563634 - RNA, 22 nt, Human
uggcagugugggaggaagguac

SEQ ID NO: 563635 - RNA, 22 nt, Human
cuggcccagguggucguugagg

SEQ ID NO: 563636 - RNA, 22 nt, Human
agcggcgccgagcuuggccagg

SEQ ID NO: 563637 - RNA, 22 nt, Human
cagaaagugauuugcuauucca

SEQ ID NO: 563638 - RNA, 22 nt, Human
ucuugggcaauuucucuagagg

SEQ ID NO: 563639 - RNA, 19 nt, Human
agcagccaucgaccaugga

SEQ ID NO: 563640 - RNA, 22 nt, Human
ccaucuucucuugaaccuccuu

SEQ ID NO: 563641 - RNA, 22 nt, Human
ugggggagccuucacaguagcu

SEQ ID NO: 563642 - RNA, 21 nt, Human
uagaccagcugugcuccucgg

SEQ ID NO: 563643 - RNA, 22 nt, Human
caccugagcaacccugugcggg

SEQ ID NO: 563644 - RNA, 22 nt, Human
gggacaaccaacuuagcauuac

SEQ ID NO: 563645 - RNA, 22 nt, Human
aggccagugguucucugugucc

SEQ ID NO: 563646 - RNA, 22 nt, Human
cccaugacucucauucacaguc

SEQ ID NO: 563647 - RNA, 22 nt, Human
uacaccagauuauuuauaacau

SEQ ID NO: 563648 - RNA, 22 nt, Human
cacggccacugcagcaccccag

SEQ ID NO: 563649 - RNA, 22 nt, Human
uuucucuuucaaucugcaguac

SEQ ID NO: 563650 - RNA, 22 nt, Human
ugaccguuuuggcacccaugcu

SEQ ID NO: 563651 - RNA, 22 nt, Human
cuggaucaugggaaagggauca

SEQ ID NO: 563652 - RNA, 22 nt, Human
cucugcaaggcccuccaguagc

SEQ ID NO: 563653 - RNA, 22 nt, Human
gggcagcaucaggaggggcuuu

SEQ ID NO: 563654 - RNA, 21 nt, Human
cccgugccuucagcaguccug

SEQ ID NO: 563655 - RNA, 22 nt, Human
gagcagcaucuccggcuuaaag

SEQ ID NO: 563656 - RNA, 22 nt, Human
cugucaaauggaaacuuauccu

SEQ ID NO: 563657 - RNA, 22 nt, Human
ugacauuugagagagauauaca

SEQ ID NO: 563658 - RNA, 22 nt, Human
ggagguggagcuggaaguucca

SEQ ID NO: 563659 - RNA, 22 nt, Human
cagggacucgcuggacauaccg

SEQ ID NO: 563660 - RNA, 22 nt, Human
ggagggaaccuuggcuggauug

SEQ ID NO: 563661 - RNA, 22 nt, Human
gagcuguucugugauugaucua

SEQ ID NO: 563662 - RNA, 22 nt, Human
gguguugcaguugaagacuggu

SEQ ID NO: 563663 - RNA, 22 nt, Human
gaagaccccagagcgagguaag

SEQ ID NO: 563664 - RNA, 22 nt, Human
ugggaaggggagcuggaaagga

SEQ ID NO: 563665 - RNA, 22 nt, Human
acagcuggaggucugugagcac

SEQ ID NO: 563666 - RNA, 21 nt, Human
ugcauauauaagugcauacac

SEQ ID NO: 563667 - RNA, 22 nt, Human
uccuuucugucuuuacucugga

SEQ ID NO: 563668 - RNA, 22 nt, Human
aagcagggugucuugacccaug

SEQ ID NO: 563669 - RNA, 22 nt, Human
aaagaggcucaaggugggccag

SEQ ID NO: 563670 - RNA, 22 nt, Human
gcuagaaacuguuuaaucucuu

SEQ ID NO: 563671 - RNA, 22 nt, Human
gccuggaucccagggagucagg

SEQ ID NO: 563672 - RNA, 22 nt, Human
gggucugcuccaccugcagccc

SEQ ID NO: 563673 - RNA, 22 nt, Human
guuaacaacacugugagugcug

SEQ ID NO: 563674 - RNA, 22 nt, Human
gagugugucggucagcguggcg

SEQ ID NO: 563675 - RNA, 22 nt, Human
uuauuccauagaagucaaggaa

SEQ ID NO: 563676 - RNA, 22 nt, Human
uuccagaacaauguggacguau

SEQ ID NO: 563677 - RNA, 22 nt, Human
cagucccaguuugagacucugg

SEQ ID NO: 563678 - RNA, 22 nt, Human
agcccuugguauuuuccgaucc

SEQ ID NO: 563679 - RNA, 22 nt, Human
gcagcagaaggccaaggggagc

SEQ ID NO: 563680 - RNA, 22 nt, Human
aggcuuuugcucuggcuccucu

SEQ ID NO: 563681 - RNA, 22 nt, Human
acaugcacagcaagggugagag

SEQ ID NO: 563682 - RNA, 19 nt, Human
cacuaagaagcaggggagc

SEQ ID NO: 563683 - RNA, 22 nt, Human
gcugccaauccagcugugggag

SEQ ID NO: 563684 - RNA, 22 nt, Human
ccugcgggcugugcugaagccu

SEQ ID NO: 563685 - RNA, 22 nt, Human
aguaccaucucugccucugccu

SEQ ID NO: 563686 - RNA, 23 nt, Human
uguguucagucaaggaucagagu

SEQ ID NO: 563687 - RNA, 22 nt, Human
ugcauaaacuucucugguguga

SEQ ID NO: 563688 - RNA, 22 nt, Human
cggcagagcccugagucagccu

SEQ ID NO: 563689 - RNA, 22 nt, Human
gccacaggaaagcacccuggag

SEQ ID NO: 563690 - RNA, 22 nt, Human
ugcugcgggacccacugugggc

SEQ ID NO: 563691 - RNA, 18 nt, Human
gagaggagccagaauuuu

SEQ ID NO: 563692 - RNA, 22 nt, Human
cuggagggcugcagcgaggcug

SEQ ID NO: 563693 - RNA, 18 nt, Human
agcugaggggacugaaga

SEQ ID NO: 563694 - RNA, 17 nt, Human
aaaugguccuagggauu

SEQ ID NO: 563695 - RNA, 22 nt, Human
cuccuucacgcaggcugccaug

SEQ ID NO: 563696 - RNA, 21 nt, Human
acagaagcggcgaguggcccc

SEQ ID NO: 563697 - RNA, 22 nt, Human
guccguaguggcugaugcuuug

SEQ ID NO: 563698 - RNA, 22 nt, Human
ugccagagaggagaaagcauuu

SEQ ID NO: 563699 - RNA, 22 nt, Human
cugccaggauucugugaacccc

SEQ ID NO: 563700 - RNA, 21 nt, Human
agaugcaguuugcaggugggu

SEQ ID NO: 563701 - RNA, 22 nt, Human
gugcagcugugguggagccagg

SEQ ID NO: 563702 - RNA, 17 nt, Human
ugcaugcgucugugaua

SEQ ID NO: 563703 - RNA, 22 nt, Human
uggcacugaagcuggaaagccu

SEQ ID NO: 563704 - RNA, 19 nt, Human
auacacguguauacauaca

SEQ ID NO: 563705 - RNA, 22 nt, Human
ggugauuuccuuuugcaaaguc

SEQ ID NO: 563706 - RNA, 22 nt, Human
gcggcccgagcaggacgggugg

SEQ ID NO: 563707 - RNA, 22 nt, Human
auaggcauaacacugauguccu

SEQ ID NO: 563708 - RNA, 22 nt, Human
guggccuccuccguccgccucu

SEQ ID NO: 563709 - RNA, 22 nt, Human
cccugccuacaggguuuucuuu

SEQ ID NO: 563710 - RNA, 22 nt, Human
gaugcgggcccgcuccacugcc

SEQ ID NO: 563711 - RNA, 22 nt, Human
ugugucuaaugacuauuucuuc

SEQ ID NO: 563712 - RNA, 22 nt, Human
ugccauagcaaugguaagcuga

SEQ ID NO: 563713 - RNA, 22 nt, Human
uagaaagagcuuugcuuccuuu

SEQ ID NO: 563714 - RNA, 22 nt, Human
agaggagguccuuuucugaugu

SEQ ID NO: 563715 - RNA, 22 nt, Human
agaguuuacagaaauaagcugu

SEQ ID NO: 563716 - RNA, 22 nt, Human
cagcugccuaugaccuagccuc

SEQ ID NO: 563717 - RNA, 22 nt, Human
cugcaguucuucuccucaaggc

SEQ ID NO: 563718 - RNA, 22 nt, Human
acgugcaggaucugguuggcga

SEQ ID NO: 563719 - RNA, 21 nt, Human
cagaggggcuagccuggcugc

SEQ ID NO: 563720 - RNA, 22 nt, Human
gucccuggucuaccguggcuuc

SEQ ID NO: 563721 - RNA, 22 nt, Human
cguggcucugggcuccuuugcc

SEQ ID NO: 563722 - RNA, 22 nt, Human
gccugcuggcuggaaauucucc

SEQ ID NO: 563723 - RNA, 22 nt, Human
gcaggguaggugacagguaguc

SEQ ID NO: 563724 - RNA, 18 nt, Human
ggugagggagcuggaagc

SEQ ID NO: 563725 - RNA, 22 nt, Human
agcagggagaccaucucuuccu

SEQ ID NO: 563726 - RNA, 22 nt, Human
uuccuuggaaagagacgucgcu

SEQ ID NO: 563727 - RNA, 22 nt, Human
uccagcugugcuccaggaggug

SEQ ID NO: 563728 - RNA, 22 nt, Human
cuucucaaaguugugaaucagg

SEQ ID NO: 563729 - RNA, 20 nt, Human
aucggcuugccuggaaacaa

SEQ ID NO: 563730 - RNA, 22 nt, Human
ugggguccucucacuuggaggg

SEQ ID NO: 563731 - RNA, 22 nt, Human
ccaggcccugccugugguuccu

SEQ ID NO: 563732 - RNA, 22 nt, Human
gcugcccauugcucucccacuc

SEQ ID NO: 563733 - RNA, 22 nt, Human
acaguguuacuugauaguguau

SEQ ID NO: 563734 - RNA, 22 nt, Human
cuccagagagaaaggaggccgc

SEQ ID NO: 563735 - RNA, 22 nt, Human
ggccuuccauugcucuuuucua

SEQ ID NO: 563736 - RNA, 22 nt, Human
ucagccuggcaggauggccugg

SEQ ID NO: 563737 - RNA, 22 nt, Human
ugguggcacugacaucagacac

SEQ ID NO: 563738 - RNA, 21 nt, Human
agggccucuguguacuggggg

SEQ ID NO: 563739 - RNA, 16 nt, Human
gcagguggggcgcgca

SEQ ID NO: 563740 - RNA, 22 nt, Human
aggccagggcacugcucuuuag

SEQ ID NO: 563741 - RNA, 22 nt, Human
agcuuucuauauaugaguugcu

SEQ ID NO: 563742 - RNA, 22 nt, Human
ggcuggaacuucuucuggcauu

SEQ ID NO: 563743 - RNA, 22 nt, Human
gcugccgacccacagggguuaa

SEQ ID NO: 563744 - RNA, 20 nt, Human
ucauaugugguuguauacaa

SEQ ID NO: 563745 - RNA, 22 nt, Human
gcacccagggcaggaagugagg

SEQ ID NO: 563746 - RNA, 22 nt, Human
cagugccaaggauggccuggga

SEQ ID NO: 563747 - RNA, 21 nt, Human
auacaagaagauggcagucug

SEQ ID NO: 563748 - RNA, 22 nt, Human
cagcugcuguucaguuuuguuu

SEQ ID NO: 563749 - RNA, 22 nt, Human
ggaguugacggccgacacccag

SEQ ID NO: 563750 - RNA, 22 nt, Human
aaagcuauuuuauugcagcucu

SEQ ID NO: 563751 - RNA, 22 nt, Human
ucacccuucccagcuguccgcc

SEQ ID NO: 563752 - RNA, 22 nt, Human
uacauguuauuucacuauuggu

SEQ ID NO: 563753 - RNA, 22 nt, Human
ggcagguguuuuuauauuaaag

SEQ ID NO: 563754 - RNA, 22 nt, Human
uuuuuugucuugaagaaauggu

SEQ ID NO: 563755 - RNA, 22 nt, Human
uuugacuccuguguuucuggaa

SEQ ID NO: 563756 - RNA, 22 nt, Human
gagagaagggggauaugagccu

SEQ ID NO: 563757 - RNA, 22 nt, Human
cuagcagcauucuucuaguuag

SEQ ID NO: 563758 - RNA, 22 nt, Human
agaagcagaaggaagcagggcc

SEQ ID NO: 563759 - RNA, 22 nt, Human
ucucugguuaugucauuaagca

SEQ ID NO: 563760 - RNA, 22 nt, Human
agagcgagucuggggcucggau

SEQ ID NO: 563761 - RNA, 22 nt, Human
cagggcuccccagagagccucu

SEQ ID NO: 563762 - RNA, 22 nt, Human
acaaaggugagcagaagacaca

SEQ ID NO: 563763 - RNA, 22 nt, Human
guguggcuaggauggcuuugcu

SEQ ID NO: 563764 - RNA, 22 nt, Human
uacauuccaaaggaaacuggcu

SEQ ID NO: 563765 - RNA, 20 nt, Human
ugcuggaggcgccggcgcuc

SEQ ID NO: 563766 - RNA, 22 nt, Human
aguaucagaugugauuaaaggg

SEQ ID NO: 563767 - RNA, 22 nt, Human
uguagggaggaaggguuggaaa

SEQ ID NO: 563768 - RNA, 22 nt, Human
uguuucaggcuucugggauuuu

SEQ ID NO: 563769 - RNA, 22 nt, Human
auggcucugcugggcaaagcaa

SEQ ID NO: 563770 - RNA, 22 nt, Human
uccggcggccggccugagcccg

SEQ ID NO: 563771 - RNA, 21 nt, Human
aggcagcgauuuucauauugc

SEQ ID NO: 563772 - RNA, 22 nt, Human
gaggugggaugugugugcuacu

SEQ ID NO: 563773 - RNA, 22 nt, Human
gaaggacccucuggggucucag

SEQ ID NO: 563774 - RNA, 22 nt, Human
agcgcuugccgcacuccaagca

SEQ ID NO: 563775 - RNA, 22 nt, Human
uguguuuuggaaggaacaugca

SEQ ID NO: 563776 - RNA, 22 nt, Human
accaggaguuuugaccaggggc

SEQ ID NO: 563777 - RNA, 22 nt, Human
ggcugcugcccaccccugcaug

SEQ ID NO: 563778 - RNA, 20 nt, Human
ggccugagcauggcuggcag

SEQ ID NO: 563779 - RNA, 22 nt, Human
ccacuguuuccuuucugcuggc

SEQ ID NO: 563780 - RNA, 22 nt, Human
aggcagccuauggggagcucag

SEQ ID NO: 563781 - RNA, 22 nt, Human
ugcugcucuucaccauggccuc

SEQ ID NO: 563782 - RNA, 22 nt, Human
uuauugagcacauaguaugugg

SEQ ID NO: 563783 - RNA, 22 nt, Human
aaaccggguccagaucuucagg

SEQ ID NO: 563784 - RNA, 21 nt, Human
ggcagcucagcagauggggac

SEQ ID NO: 563785 - RNA, 22 nt, Human
agagaugcuguggguagaggca

SEQ ID NO: 563786 - RNA, 20 nt, Human
uuacagaaaugauguuauuu

SEQ ID NO: 563787 - RNA, 22 nt, Human
gcucccugguauugcugccacu

SEQ ID NO: 563788 - RNA, 22 nt, Human
cugagcaugcuacaugcagcac

SEQ ID NO: 563789 - RNA, 22 nt, Human
ugugacguuguucuggauuccc

SEQ ID NO: 563790 - RNA, 22 nt, Human
aggccgugugagcaugugugag

SEQ ID NO: 563791 - RNA, 22 nt, Human
uauaagaaacaaggcaaauuuu

SEQ ID NO: 563792 - RNA, 22 nt, Human
ccucaaaggccuggcaccagaa

SEQ ID NO: 563793 - RNA, 22 nt, Human
aaagcacauuacaagcucaguc

SEQ ID NO: 563794 - RNA, 22 nt, Human
aagcuggccuguaccugcugag

SEQ ID NO: 563795 - RNA, 22 nt, Human
cuggccuggcaggggaccucua

SEQ ID NO: 563796 - RNA, 23 nt, Human
uagacugcaggcuccuugagggc

SEQ ID NO: 563797 - RNA, 22 nt, Human
caagucugaccucugggugaag

SEQ ID NO: 563798 - RNA, 22 nt, Human
uuuuccuuaacagagggagaaa

SEQ ID NO: 563799 - RNA, 22 nt, Human
cuggucaauaaucauguaguac

SEQ ID NO: 563800 - RNA, 22 nt, Human
agcuaauguauguugaaagcac

SEQ ID NO: 563801 - RNA, 22 nt, Human
aguucugggaggugcacgucca

SEQ ID NO: 563802 - RNA, 22 nt, Human
ucaagaaagggcuucaccagga

SEQ ID NO: 563803 - RNA, 22 nt, Human
ucaugucccguugcuggcugcc

SEQ ID NO: 563804 - RNA, 22 nt, Human
guggggacgggauggcucacug

SEQ ID NO: 563805 - RNA, 17 nt, Human
gcccucagcuuuaacca

SEQ ID NO: 563806 - RNA, 22 nt, Human
gcaaaacagucgaugccuccca

SEQ ID NO: 563807 - RNA, 22 nt, Human
cgugaugcucaggaggucauag

SEQ ID NO: 563808 - RNA, 22 nt, Human
cguggggcggguggacacuugc

SEQ ID NO: 563809 - RNA, 22 nt, Human
gggcucuguuuagaccagagau

SEQ ID NO: 563810 - RNA, 22 nt, Human
ugcagguggcagcggggcacca

SEQ ID NO: 563811 - RNA, 22 nt, Human
gcggggccauguccaacggccu

SEQ ID NO: 563812 - RNA, 22 nt, Human
accagagcuggcagaguaucaa

SEQ ID NO: 563813 - RNA, 22 nt, Human
aggcagaugggagcuggaaguu

SEQ ID NO: 563814 - RNA, 19 nt, Human
ugguggaggccccauguuc

SEQ ID NO: 563815 - RNA, 22 nt, Human
gauguucgagcagaagaccagg

SEQ ID NO: 563816 - RNA, 22 nt, Human
uccuggcccuguggccugcagu

SEQ ID NO: 563817 - RNA, 22 nt, Human
cccaggaggcagaaguugcagu

SEQ ID NO: 563818 - RNA, 22 nt, Human
gaagccaaguccucgaguuuca

SEQ ID NO: 563819 - RNA, 17 nt, Human
ucuccuggcucuaucag

SEQ ID NO: 563820 - RNA, 22 nt, Human
gagucacauacuauguaauaga

SEQ ID NO: 563821 - RNA, 22 nt, Human
agcaccaggucgcuggcacgcu

SEQ ID NO: 563822 - RNA, 22 nt, Human
auacaacagaaaaugauuauuc

SEQ ID NO: 563823 - RNA, 22 nt, Human
uauaaacuccucuugcauuccu

SEQ ID NO: 563824 - RNA, 22 nt, Human
ccagguggacggcgaguacagg

SEQ ID NO: 563825 - RNA, 22 nt, Human
agcucaguggcuggggcgcugc

SEQ ID NO: 563826 - RNA, 22 nt, Human
cgugcagcggagcuggucacug

SEQ ID NO: 563827 - RNA, 22 nt, Human
augcugccuccucuucagccgc

SEQ ID NO: 563828 - RNA, 22 nt, Human
cacagagagcuacgugcagcgu

SEQ ID NO: 563829 - RNA, 22 nt, Human
aggcugagccugggcguggugg

SEQ ID NO: 563830 - RNA, 22 nt, Human
uaaaaucaugacagauugacau

SEQ ID NO: 563831 - RNA, 22 nt, Human
acacacagaaggaagccccacu

SEQ ID NO: 563832 - RNA, 22 nt, Human
ccaggcauccauugcuuccucu

SEQ ID NO: 563833 - RNA, 22 nt, Human
cuugccagggacucagucaggg

SEQ ID NO: 563834 - RNA, 22 nt, Human
caccucucauuucuacagauuc

SEQ ID NO: 563835 - RNA, 22 nt, Human
gccaaaguccuccagccaugca

SEQ ID NO: 563836 - RNA, 22 nt, Human
uguguacauguaucaacuaucg

SEQ ID NO: 563837 - RNA, 22 nt, Human
ggcacagcugaugcagacacac

SEQ ID NO: 563838 - RNA, 22 nt, Human
cccagaaugauucagcgacagu

SEQ ID NO: 563839 - RNA, 15 nt, Human
gccccaggaaucaaa

SEQ ID NO: 563840 - RNA, 22 nt, Human
ugugaggaccucagcagagucu

SEQ ID NO: 563841 - RNA, 22 nt, Human
acagagccuccaggagugcugg

SEQ ID NO: 563842 - RNA, 19 nt, Human
gaugcucauucagguggaa

SEQ ID NO: 563843 - RNA, 22 nt, Human
ccauggccaggaaagccaaggu

SEQ ID NO: 563844 - RNA, 22 nt, Human
auacaugugugugcauacaugu

SEQ ID NO: 563845 - RNA, 22 nt, Human
augaagcauuacaggaugacag

SEQ ID NO: 563846 - RNA, 22 nt, Human
uccguuuucacacugcuauaaa

SEQ ID NO: 563847 - RNA, 22 nt, Human
gugcuggggagauaggaagaga

SEQ ID NO: 563848 - RNA, 20 nt, Human
aggaaggagaaucugagcaa

SEQ ID NO: 563849 - RNA, 22 nt, Human
gucaucaucaggcagaugcugc

SEQ ID NO: 563850 - RNA, 22 nt, Human
caggcgggcaggugcggccccu

SEQ ID NO: 563851 - RNA, 22 nt, Human
aggucacguccugugaugucau

SEQ ID NO: 563852 - RNA, 22 nt, Human
cagcacauggauggaguuagga

SEQ ID NO: 563853 - RNA, 22 nt, Human
caggcgaccccuaggagcaaca

SEQ ID NO: 563854 - RNA, 22 nt, Human
gggagggcuuggacccagaugu

SEQ ID NO: 563855 - RNA, 22 nt, Human
gagccaagauugugucccugca

SEQ ID NO: 563856 - RNA, 22 nt, Human
cugaugcucuggauguagucaa

SEQ ID NO: 563857 - RNA, 22 nt, Human
acccacagccgcugugcguccc

SEQ ID NO: 563858 - RNA, 22 nt, Human
cucucugggcccaguuggcacc

SEQ ID NO: 563859 - RNA, 22 nt, Human
gcugguggcagagcuccgcggc

SEQ ID NO: 563860 - RNA, 22 nt, Human
aaacuggauuaccaggcuggug

SEQ ID NO: 563861 - RNA, 22 nt, Human
aacaugaugacauuguaagcuu

SEQ ID NO: 563862 - RNA, 22 nt, Human
uacauguacaugcauagguaga

SEQ ID NO: 563863 - RNA, 22 nt, Human
cuggugcuguagccugauugag

SEQ ID NO: 563864 - RNA, 22 nt, Human
aaggcuguuugagcacuggagc

SEQ ID NO: 563865 - RNA, 22 nt, Human
cgcaggugccggcagauggggu

SEQ ID NO: 563866 - RNA, 22 nt, Human
uuuuccuucugauacuccauuu

SEQ ID NO: 563867 - RNA, 22 nt, Human
uuuugguaauuaaguagauauu

SEQ ID NO: 563868 - RNA, 22 nt, Human
cuccagcagaaagggcgagugg

SEQ ID NO: 563869 - RNA, 22 nt, Human
cuucucuuggguguggugucuu

SEQ ID NO: 563870 - RNA, 22 nt, Human
ugucuuggccacuaggagugcc

SEQ ID NO: 563871 - RNA, 22 nt, Human
cccaggacucugacacccccaa

SEQ ID NO: 563872 - RNA, 22 nt, Human
gagggccaaugugucccugagc

SEQ ID NO: 563873 - RNA, 22 nt, Human
aaccagacucuccaaaggcaaa

SEQ ID NO: 563874 - RNA, 22 nt, Human
ugcagggcagcuagggagcuuu

SEQ ID NO: 563875 - RNA, 22 nt, Human
guccagaguagucgaguauucu

SEQ ID NO: 563876 - RNA, 22 nt, Human
aaugacaguggcacagucacuu

SEQ ID NO: 563877 - RNA, 22 nt, Human
ggugggucuuguggggcagcuu

SEQ ID NO: 563878 - RNA, 22 nt, Human
cagcuccagcccaggcagcucc

SEQ ID NO: 563879 - RNA, 22 nt, Human
ugcugugagaccauuuguugag

SEQ ID NO: 563880 - RNA, 22 nt, Human
uuggggaagcuuugaaauacuu

SEQ ID NO: 563881 - RNA, 22 nt, Human
uaaucuuagacauguauuuuuc

SEQ ID NO: 563882 - RNA, 22 nt, Human
agaauccuggagaagcuguacc

SEQ ID NO: 563883 - RNA, 22 nt, Human
uccugaccacuaggaccaggcu

SEQ ID NO: 563884 - RNA, 22 nt, Human
cugaggagauccccccagaagu

SEQ ID NO: 563885 - RNA, 22 nt, Human
cagcuggcgacucuccucgaug

SEQ ID NO: 563886 - RNA, 22 nt, Human
ccuuugagccugggcgcggacc

SEQ ID NO: 563887 - RNA, 22 nt, Human
ggccugcuucucugggcuuucu

SEQ ID NO: 563888 - RNA, 22 nt, Human
gucuuaagaaugaaugcugaga

SEQ ID NO: 563889 - RNA, 22 nt, Human
uuccuuucucuggacugcagcc

SEQ ID NO: 563890 - RNA, 22 nt, Human
aacacugugcccacccuagucc

SEQ ID NO: 563891 - RNA, 22 nt, Human
gaugucuggcuaccacucgcac

SEQ ID NO: 563892 - RNA, 22 nt, Human
uccagaugcugcacauuccuga

SEQ ID NO: 563893 - RNA, 18 nt, Human
gccugccagccgagggac

SEQ ID NO: 563894 - RNA, 22 nt, Human
ccugcgcgucugggucugucuc

SEQ ID NO: 563895 - RNA, 22 nt, Human
auguaguauuuggaaauguaaa

SEQ ID NO: 563896 - RNA, 22 nt, Human
gucaccuugaacaggcuacuca

SEQ ID NO: 563897 - RNA, 18 nt, Human
cccacggugcuguagggc

SEQ ID NO: 563898 - RNA, 22 nt, Human
cucccagggucuaggcugcugg

SEQ ID NO: 563899 - RNA, 22 nt, Human
ucccuguccugggcaaucccag

SEQ ID NO: 563900 - RNA, 22 nt, Human
ccucugcccuuuuccuguauca

SEQ ID NO: 563901 - RNA, 22 nt, Human
ugaggauggaaugcugugcaag

SEQ ID NO: 563902 - RNA, 22 nt, Human
cauggccagauucuuucuucuc

SEQ ID NO: 563903 - RNA, 22 nt, Human
gcagacccugaacugggcaugg

SEQ ID NO: 563904 - RNA, 22 nt, Human
aucugccuggcuccaggugagc

SEQ ID NO: 563905 - RNA, 22 nt, Human
ucacuacaaccgcuaccugaca

SEQ ID NO: 563906 - RNA, 22 nt, Human
gccuggcgccgggcugccuguc

SEQ ID NO: 563907 - RNA, 22 nt, Human
cacagaggaugcccaagcgauc

SEQ ID NO: 563908 - RNA, 22 nt, Human
guggcauuugggagaugcgugg

SEQ ID NO: 563909 - RNA, 21 nt, Human
ucccacuggcccagggcucca

SEQ ID NO: 563910 - RNA, 22 nt, Human
cagcucugguuccugggcccag

SEQ ID NO: 563911 - RNA, 22 nt, Human
ucuccauggauuuggaaaugau

SEQ ID NO: 563912 - RNA, 22 nt, Human
ucuuuuaucuguuguguaacaa

SEQ ID NO: 563913 - RNA, 22 nt, Human
augcuacauuuugguuuauaaa

SEQ ID NO: 563914 - RNA, 22 nt, Human
agagcagaggcauggccguggg

SEQ ID NO: 563915 - RNA, 22 nt, Human
gacaggugcuaagggaccuggc

SEQ ID NO: 563916 - RNA, 22 nt, Human
auauacacuguuucaguugaag

SEQ ID NO: 563917 - RNA, 22 nt, Human
caagccaggaaggauccagcac

SEQ ID NO: 563918 - RNA, 22 nt, Human
auuuccuauacaguuguccaua

SEQ ID NO: 563919 - RNA, 22 nt, Human
ucuacaacgugguuuuguugua

SEQ ID NO: 563920 - RNA, 22 nt, Human
aucauugaguaaaaugaauaca

SEQ ID NO: 563921 - RNA, 23 nt, Human
uuguccucuggaucgguuugguu

SEQ ID NO: 563922 - RNA, 22 nt, Human
ugggaagaguuagagacagcug

SEQ ID NO: 563923 - RNA, 22 nt, Human
caggcccuuuccugggcauagg

SEQ ID NO: 563924 - RNA, 22 nt, Human
uugcugugucauuuguuuaauc

SEQ ID NO: 563925 - RNA, 22 nt, Human
uuccagagaguuauuccccugg

SEQ ID NO: 563926 - RNA, 22 nt, Human
gaggcagagacuccaccuucag

SEQ ID NO: 563927 - RNA, 22 nt, Human
caggccacagcuaaagaggauu

SEQ ID NO: 563928 - RNA, 22 nt, Human
aggggcacgaguagagcucuag

SEQ ID NO: 563929 - RNA, 22 nt, Human
ggcggccugugggucggccuca

SEQ ID NO: 563930 - RNA, 22 nt, Human
aagcaauucacaguucacuuaa

SEQ ID NO: 563931 - RNA, 22 nt, Human
uagcgggucacccugcugugaa

SEQ ID NO: 563932 - RNA, 22 nt, Human
ugggagagauaggcuucuggac

SEQ ID NO: 563933 - RNA, 22 nt, Human
ccugaggcccuggcugugcuga

SEQ ID NO: 563934 - RNA, 19 nt, Human
uuugauagggcauaauaua

SEQ ID NO: 563935 - RNA, 22 nt, Human
cucugcguggcugggcccaggg

SEQ ID NO: 563936 - RNA, 22 nt, Human
gugagguccucccugcugggag

SEQ ID NO: 563937 - RNA, 22 nt, Human
cgaggaggaaacgcggagaacu

SEQ ID NO: 563938 - RNA, 22 nt, Human
gcuuuugagguccugcucagcc

SEQ ID NO: 563939 - RNA, 20 nt, Human
agugauuuguuaguacauug

SEQ ID NO: 563940 - RNA, 22 nt, Human
uguaagcuucaaauaucuguga

SEQ ID NO: 563941 - RNA, 20 nt, Human
ggggcccaagcccucuugcc

SEQ ID NO: 563942 - RNA, 20 nt, Human
aggggcaccugcgacggggc

SEQ ID NO: 563943 - RNA, 22 nt, Human
uacagugaguggcagagccaga

SEQ ID NO: 563944 - RNA, 22 nt, Human
uccagagaacgaugaaagcugg

SEQ ID NO: 563945 - RNA, 22 nt, Human
ugcugcucaagcugcagcaaaa

SEQ ID NO: 563946 - RNA, 22 nt, Human
gggcagcaggcuccacguuccu

SEQ ID NO: 563947 - RNA, 22 nt, Human
ucuucaugucaugguauauuga

SEQ ID NO: 563948 - RNA, 22 nt, Human
uguguggcaagcuguaugcuag

SEQ ID NO: 563949 - RNA, 22 nt, Human
gccagaggggcucgaaggcgcg

SEQ ID NO: 563950 - RNA, 22 nt, Human
aaaccuguuaauagagcgaugc

SEQ ID NO: 563951 - RNA, 22 nt, Human
gugcugccuccauauccgucag

SEQ ID NO: 563952 - RNA, 22 nt, Human
auguaugagagauucuuuuauu

SEQ ID NO: 563953 - RNA, 22 nt, Human
guguggucgaaguucucccgga

SEQ ID NO: 563954 - RNA, 22 nt, Human
uaaggcuguuaggaggauuaaa

SEQ ID NO: 563955 - RNA, 22 nt, Human
ugggcagacgggagcuugccuu

SEQ ID NO: 563956 - RNA, 22 nt, Human
ucccggcgcugggagguggguc

SEQ ID NO: 563957 - RNA, 22 nt, Human
uuaguguccagaguuuuuauua

SEQ ID NO: 563958 - RNA, 22 nt, Human
gaugaaggggcuggugcccucu

SEQ ID NO: 563959 - RNA, 22 nt, Human
aagcaaaagguuacacuucugg

SEQ ID NO: 563960 - RNA, 18 nt, Human
ggaaaaggagugucuagc

SEQ ID NO: 563961 - RNA, 18 nt, Human
ggcggguguuuuauucac

SEQ ID NO: 563962 - RNA, 22 nt, Human
ugcuggaagggucggcgugggc

SEQ ID NO: 563963 - RNA, 22 nt, Human
cucccagccuucgccagucuga

SEQ ID NO: 563964 - RNA, 22 nt, Human
aaugucaacacaagagaaaugc

SEQ ID NO: 563965 - RNA, 22 nt, Human
gcugucccgaaccccugguaau

SEQ ID NO: 563966 - RNA, 22 nt, Human
ggaggugacuggaucaugggca

SEQ ID NO: 563967 - RNA, 20 nt, Human
aaaaacaguaaugcugaaga

SEQ ID NO: 563968 - RNA, 22 nt, Human
gcgguauuugugugggugucga

SEQ ID NO: 563969 - RNA, 22 nt, Human
ccagaacagaccugccugaccu

SEQ ID NO: 563970 - RNA, 21 nt, Human
agccugcaauguagguaccgg

SEQ ID NO: 563971 - RNA, 21 nt, Human
gcagcaugagaaagccccaaa

SEQ ID NO: 563972 - RNA, 22 nt, Human
uagcagcacuauuuguuguagu

SEQ ID NO: 563973 - RNA, 23 nt, Human
gcugccaaggaggcaggggugcc

SEQ ID NO: 563974 - RNA, 22 nt, Human
ugcacccacuuagcugaaguuc

SEQ ID NO: 563975 - RNA, 22 nt, Human
cugcccaucuggccacacacag

SEQ ID NO: 563976 - RNA, 21 nt, Human
acaaauuguuuauauaggaag

SEQ ID NO: 563977 - RNA, 22 nt, Human
gucugcccuuggccugggacuu

SEQ ID NO: 563978 - RNA, 22 nt, Human
cuuccagcugauuggcauccag

SEQ ID NO: 563979 - RNA, 22 nt, Human
gauacuuuguggaauccuggau

SEQ ID NO: 563980 - RNA, 22 nt, Human
ggucuccugaccuuuagucccu

SEQ ID NO: 563981 - RNA, 22 nt, Human
acccagcucuuugauggucuug

SEQ ID NO: 563982 - RNA, 22 nt, Human
auguccagaguaaagcacauuc

SEQ ID NO: 563983 - RNA, 22 nt, Human
cugagguagaggaaauguagcu

SEQ ID NO: 563984 - RNA, 22 nt, Human
ugcccuccacaguggcuccacc

SEQ ID NO: 563985 - RNA, 22 nt, Human
ccuggaaaaugccacuuucaca

SEQ ID NO: 563986 - RNA, 22 nt, Human
gcuaagggauaggcugccuccu

SEQ ID NO: 563987 - RNA, 22 nt, Human
cagguuccaguugcagggacuu

SEQ ID NO: 563988 - RNA, 20 nt, Human
aucagguguucagccacugc

SEQ ID NO: 563989 - RNA, 22 nt, Human
guggccaucuuuggcccugacu

SEQ ID NO: 563990 - RNA, 20 nt, Human
gcagcagacagacaggggac

SEQ ID NO: 563991 - RNA, 22 nt, Human
uggcuguagaaucagagacuug

SEQ ID NO: 563992 - RNA, 22 nt, Human
uggcuccaggggacacgcagua

SEQ ID NO: 563993 - RNA, 22 nt, Human
acacucaugcucagcuggugcu

SEQ ID NO: 563994 - RNA, 22 nt, Human
ccagcaggagacuagcaacaua

SEQ ID NO: 563995 - RNA, 22 nt, Human
uaacaaaguauuguuuguguau

SEQ ID NO: 563996 - RNA, 22 nt, Human
aguggcugugaaauacauggga

SEQ ID NO: 563997 - RNA, 22 nt, Human
caugugaccgcugggugagcga

SEQ ID NO: 563998 - RNA, 22 nt, Human
cagccggaccugagggauuccu

SEQ ID NO: 563999 - RNA, 22 nt, Human
uuccagcuaacucacaucccuu

SEQ ID NO: 564000 - RNA, 21 nt, Human
ugcuggguuugcccaucaggc

SEQ ID NO: 564001 - RNA, 22 nt, Human
ugaguguuguaaccauaugauu

SEQ ID NO: 564002 - RNA, 22 nt, Human
gcacagagagcagugggggaca

SEQ ID NO: 564003 - RNA, 22 nt, Human
uguaccgccuugugggguuggg

SEQ ID NO: 564004 - RNA, 22 nt, Human
uggcacguuggauugggaguuc

SEQ ID NO: 564005 - RNA, 22 nt, Human
ggcuagcuuagagucaugcuag

SEQ ID NO: 564006 - RNA, 22 nt, Human
uguuugcucugacuaucuugcg

SEQ ID NO: 564007 - RNA, 22 nt, Human
ccagagaggccuuggcaagaca

SEQ ID NO: 564008 - RNA, 19 nt, Human
ggcugccuucugcucaucu

SEQ ID NO: 564009 - RNA, 22 nt, Human
gcuguagguaaggauggcaaag

SEQ ID NO: 564010 - RNA, 22 nt, Human
gcacuagauucugaagcagcag

SEQ ID NO: 564011 - RNA, 22 nt, Human
cagcuggaggagcagcuuccag

SEQ ID NO: 564012 - RNA, 22 nt, Human
gccugccuucggugcgcagcgg

SEQ ID NO: 564013 - RNA, 18 nt, Human
agguguguuucuaggagc

SEQ ID NO: 564014 - RNA, 18 nt, Human
cuggucucccuucgcuuu

SEQ ID NO: 564015 - RNA, 22 nt, Human
cuccugcagcccucagcagcca

SEQ ID NO: 564016 - RNA, 22 nt, Human
ugagcaccaggcaccacagcuc

SEQ ID NO: 564017 - RNA, 22 nt, Human
agcugcaccggcuggaccacug

SEQ ID NO: 564018 - RNA, 22 nt, Human
gcccagaguuugaagauacagu

SEQ ID NO: 564019 - RNA, 22 nt, Human
uucaacaacuugguucaaaugg

SEQ ID NO: 564020 - RNA, 22 nt, Human
ucagagccccuccgcuguccca

SEQ ID NO: 564021 - RNA, 23 nt, Human
aucauagucuuugugacuggccc

SEQ ID NO: 564022 - RNA, 22 nt, Human
uacugucuuuuccuaaaugggu

SEQ ID NO: 564023 - RNA, 22 nt, Human
ugugugaacucucugauguaca

SEQ ID NO: 564024 - RNA, 22 nt, Human
gcggcccggguccccagcagca

SEQ ID NO: 564025 - RNA, 22 nt, Human
uuugaagauaaauauggagaaa

SEQ ID NO: 564026 - RNA, 22 nt, Human
ugacuuuggacuagugauuuaa

SEQ ID NO: 564027 - RNA, 22 nt, Human
uuggaaauguagaaaagcagau

SEQ ID NO: 564028 - RNA, 22 nt, Human
cagacugaaaaucccugguagu

SEQ ID NO: 564029 - RNA, 22 nt, Human
uugcuggaagguggcuggaauc

SEQ ID NO: 564030 - RNA, 21 nt, Human
cugugauguugccgggguagg

SEQ ID NO: 564031 - RNA, 22 nt, Human
cuccagcucgcgagcucugcuc

SEQ ID NO: 564032 - RNA, 22 nt, Human
uucaccugugacagguagaguu

SEQ ID NO: 564033 - RNA, 22 nt, Human
uuuguagauuuucucuccagua

SEQ ID NO: 564034 - RNA, 22 nt, Human
ccuccccacagcccaggagacu

SEQ ID NO: 564035 - RNA, 19 nt, Human
ugcagcuguaugagcuuaa

SEQ ID NO: 564036 - RNA, 22 nt, Human
ugcuggccucggcgcugggccu

SEQ ID NO: 564037 - RNA, 22 nt, Human
cccaggcacacugaagugacau

SEQ ID NO: 564038 - RNA, 22 nt, Human
ucggggauggugucugagggag

SEQ ID NO: 564039 - RNA, 22 nt, Human
cagaugaggcaaccucauugcu

SEQ ID NO: 564040 - RNA, 22 nt, Human
accaagaguccaagugagguug

SEQ ID NO: 564041 - RNA, 22 nt, Human
acaugcauaaacuacuucuuau

SEQ ID NO: 564042 - RNA, 23 nt, Human
cagcugguugugggaguggcugc

SEQ ID NO: 564043 - RNA, 22 nt, Human
ggagcugugcugggugaucagg

SEQ ID NO: 564044 - RNA, 22 nt, Human
gucagcaggguccccuugagug

SEQ ID NO: 564045 - RNA, 22 nt, Human
ugucccuggacuccaggagcca

SEQ ID NO: 564046 - RNA, 20 nt, Human
gaacagucuucugagccaca

SEQ ID NO: 564047 - RNA, 22 nt, Human
ccuggguccaauucuggcuugu

SEQ ID NO: 564048 - RNA, 22 nt, Human
cagcaugaauguguucguaggg

SEQ ID NO: 564049 - RNA, 22 nt, Human
gcggcuccgaagccaggccgcg

SEQ ID NO: 564050 - RNA, 22 nt, Human
uucuguaauucuguuaguuuca

SEQ ID NO: 564051 - RNA, 20 nt, Human
gggugugugcagggccuggu

SEQ ID NO: 564052 - RNA, 23 nt, Human
ggaagcucacguaguccugcacu

SEQ ID NO: 564053 - RNA, 22 nt, Human
cacagaggacuguagcggggag

SEQ ID NO: 564054 - RNA, 22 nt, Human
aagccagguguuuaggccagcg

SEQ ID NO: 564055 - RNA, 19 nt, Human
cuucuggauccgcagggcc

SEQ ID NO: 564056 - RNA, 23 nt, Human
uuguucuuggaucuuccugaagc

SEQ ID NO: 564057 - RNA, 22 nt, Human
gccaggaugacuauacaacagc

SEQ ID NO: 564058 - RNA, 22 nt, Human
ccugcacuaccuggggcugcug

SEQ ID NO: 564059 - RNA, 22 nt, Human
ucagaagcauccauuucaccac

SEQ ID NO: 564060 - RNA, 22 nt, Human
aggcagagaaaaaccagauaug

SEQ ID NO: 564061 - RNA, 22 nt, Human
ccagagagggcgccaccuggag

SEQ ID NO: 564062 - RNA, 22 nt, Human
cucggaauggaacaacagcggu

SEQ ID NO: 564063 - RNA, 22 nt, Human
gagguccacugaggcaacaggg

SEQ ID NO: 564064 - RNA, 22 nt, Human
ccaggcagccaagugugugugu

SEQ ID NO: 564065 - RNA, 22 nt, Human
uaaaguuggaccugauuuuauu

SEQ ID NO: 564066 - RNA, 22 nt, Human
aggagccgggccugggcccugc

SEQ ID NO: 564067 - RNA, 22 nt, Human
caagagcuggguggcaagcuag

SEQ ID NO: 564068 - RNA, 22 nt, Human
gcagaggggaagcugaggaauu

SEQ ID NO: 564069 - RNA, 22 nt, Human
acuggcccuggcugcuaggcug

SEQ ID NO: 564070 - RNA, 22 nt, Human
gccugcacucaaacacucucuu

SEQ ID NO: 564071 - RNA, 22 nt, Human
ggagcugcucagagccaguccc

SEQ ID NO: 564072 - RNA, 22 nt, Human
uuugcacuuaaauuuacaacac

SEQ ID NO: 564073 - RNA, 22 nt, Human
ggagugggaacaaugacauggu

SEQ ID NO: 564074 - RNA, 17 nt, Human
uagauuaaacacggcca

SEQ ID NO: 564075 - RNA, 22 nt, Human
ccaggaagaaacagucuuuaua

SEQ ID NO: 564076 - RNA, 22 nt, Human
agcggcgccggagggaggugcg

SEQ ID NO: 564077 - RNA, 22 nt, Human
ucaccggcagacguggccugau

SEQ ID NO: 564078 - RNA, 22 nt, Human
uucaguaagcacuucuagagcu

SEQ ID NO: 564079 - RNA, 22 nt, Human
ggugucagugaagguagaguuu

SEQ ID NO: 564080 - RNA, 22 nt, Human
uugcacagaugcacaugguugc

SEQ ID NO: 564081 - RNA, 20 nt, Human
uggccucugagaugccacgg

SEQ ID NO: 564082 - RNA, 21 nt, Human
caaaagagacugauucuugga

SEQ ID NO: 564083 - RNA, 22 nt, Human
cucaugucggcaggacucgccc

SEQ ID NO: 564084 - RNA, 21 nt, Human
uugauuuagcagaucuagcug

SEQ ID NO: 564085 - RNA, 22 nt, Human
aagcagcauaugacagcaucca

SEQ ID NO: 564086 - RNA, 22 nt, Human
gccuucugaucgcuggacugac

SEQ ID NO: 564087 - RNA, 22 nt, Human
augaaacaacagacuuggucaa

SEQ ID NO: 564088 - RNA, 22 nt, Human
ugcagcugccuagggcuggcuu

SEQ ID NO: 564089 - RNA, 22 nt, Human
caagcagauauuuuagucaaga

SEQ ID NO: 564090 - RNA, 22 nt, Human
cacugguugccucuuucuguuc

SEQ ID NO: 564091 - RNA, 22 nt, Human
cucugaguagauagggaaccug

SEQ ID NO: 564092 - RNA, 20 nt, Human
ucugccacuuuuucugucac

SEQ ID NO: 564093 - RNA, 22 nt, Human
aggggagguguccccaaaucuc

SEQ ID NO: 564094 - RNA, 22 nt, Human
gguuccaggcauggcaggaugu

SEQ ID NO: 564095 - RNA, 22 nt, Human
ucagaagcauguggggagccug

SEQ ID NO: 564096 - RNA, 22 nt, Human
gcccucugccacaggacgccag

SEQ ID NO: 564097 - RNA, 22 nt, Human
ugcugaggagguggcugugcuu

SEQ ID NO: 564098 - RNA, 22 nt, Human
ccagcugcugcaccgugcaugg

SEQ ID NO: 564099 - RNA, 22 nt, Human
gccagugccugcugcucagggc

SEQ ID NO: 564100 - RNA, 22 nt, Human
ggaaacugcuuacacuagaggg

SEQ ID NO: 564101 - RNA, 22 nt, Human
agcaggaacucagggaguucuc

SEQ ID NO: 564102 - RNA, 22 nt, Human
gagguggcugcuugcugggaaa

SEQ ID NO: 564103 - RNA, 22 nt, Human
gcgacuguacagaauugccccu

SEQ ID NO: 564104 - RNA, 22 nt, Human
acaguuaguugaggaguguuug

SEQ ID NO: 564105 - RNA, 22 nt, Human
cugagggagcugcuggccuugg

SEQ ID NO: 564106 - RNA, 22 nt, Human
aggcuguagaucuagacaugua

SEQ ID NO: 564107 - RNA, 22 nt, Human
agccccaguccgcugcgggcgg

SEQ ID NO: 564108 - RNA, 16 nt, Human
ucauugaagacaguac

SEQ ID NO: 564109 - RNA, 22 nt, Human
guccaggccugccucugaggag

SEQ ID NO: 564110 - RNA, 22 nt, Human
gucuggagccacugcugcugcu

SEQ ID NO: 564111 - RNA, 22 nt, Human
aacccagaaacgcaggcgguca

SEQ ID NO: 564112 - RNA, 20 nt, Human
caucaacaccuugucagccu

SEQ ID NO: 564113 - RNA, 22 nt, Human
ggcucagaggagcuggaacggu

SEQ ID NO: 564114 - RNA, 22 nt, Human
guucuuaaagauucaucaagca

SEQ ID NO: 564115 - RNA, 22 nt, Human
uagcuguucucuguaaauugga

SEQ ID NO: 564116 - RNA, 22 nt, Human
ggaacaguugcgucaugggccu

SEQ ID NO: 564117 - RNA, 22 nt, Human
ggaaggcuuuaagcaccaaagc

SEQ ID NO: 564118 - RNA, 22 nt, Human
cuguccauggcaaugaugcaga

SEQ ID NO: 564119 - RNA, 22 nt, Human
uacagcagcccaccuucuucug

SEQ ID NO: 564120 - RNA, 22 nt, Human
aggccuuccucggagacaggga

SEQ ID NO: 564121 - RNA, 22 nt, Human
accacaucgggcggacacuggg

SEQ ID NO: 564122 - RNA, 22 nt, Human
ucaucaucauucucccccacuu

SEQ ID NO: 564123 - RNA, 22 nt, Human
uugacguccucgauggggaacu

SEQ ID NO: 564124 - RNA, 22 nt, Human
aagcccagcaucccugcaccag

SEQ ID NO: 564125 - RNA, 22 nt, Human
auccgcuuaucucagcuggcag

SEQ ID NO: 564126 - RNA, 22 nt, Human
uagcauuuagaacaccuugaga

SEQ ID NO: 564127 - RNA, 22 nt, Human
uagcagaacaauagucaaugau

SEQ ID NO: 564128 - RNA, 22 nt, Human
cugaccaguccuuagcaccugg

SEQ ID NO: 564129 - RNA, 22 nt, Human
aaagagcucggaaaguguugaa

SEQ ID NO: 564130 - RNA, 19 nt, Human
gcacacccugcaccaccau

SEQ ID NO: 564131 - RNA, 22 nt, Human
cuuauuggucccaggaggagaa

SEQ ID NO: 564132 - RNA, 22 nt, Human
cuggcuaaagagcaagaagaug

SEQ ID NO: 564133 - RNA, 22 nt, Human
ccaggugugcucugcaguggau

SEQ ID NO: 564134 - RNA, 22 nt, Human
ggccucugccccgcggggcucg

SEQ ID NO: 564135 - RNA, 22 nt, Human
cgucaggguugagcagguagau

SEQ ID NO: 564136 - RNA, 22 nt, Human
acugccaggauggcacuagagg

SEQ ID NO: 564137 - RNA, 22 nt, Human
augcccugggagugcuguacca

SEQ ID NO: 564138 - RNA, 17 nt, Human
ucugcagggggccgugu

SEQ ID NO: 564139 - RNA, 22 nt, Human
uucccuggugggugagaaccug

SEQ ID NO: 564140 - RNA, 22 nt, Human
uggcacugucaccaaugcuguc

SEQ ID NO: 564141 - RNA, 22 nt, Human
uuuacagagaauguacauaaag

SEQ ID NO: 564142 - RNA, 22 nt, Human
uucaaacacugcuuugagaggg

SEQ ID NO: 564143 - RNA, 22 nt, Human
cagagcagcagagcuuccaugg

SEQ ID NO: 564144 - RNA, 18 nt, Human
uccaccgcgugcaccucu

SEQ ID NO: 564145 - RNA, 22 nt, Human
uccagcagguccgagacaaguu

SEQ ID NO: 564146 - RNA, 22 nt, Human
gugaagcacaugggcguugggu

SEQ ID NO: 564147 - RNA, 22 nt, Human
aguccggggucuggacaccugg

SEQ ID NO: 564148 - RNA, 22 nt, Human
uaccaggagcccccuucugguc

SEQ ID NO: 564149 - RNA, 23 nt, Human
ugucuccaucucauuacuugggg

SEQ ID NO: 564150 - RNA, 22 nt, Human
ugaauagagcugcaguggacau

SEQ ID NO: 564151 - RNA, 22 nt, Human
ucucaguccaaaugagagguug

SEQ ID NO: 564152 - RNA, 22 nt, Human
ggaaggguuuaagcaggagagu

SEQ ID NO: 564153 - RNA, 22 nt, Human
gucugcccugcagacaugccuc

SEQ ID NO: 564154 - RNA, 22 nt, Human
uggggcuccuccuggcaggagg

SEQ ID NO: 564155 - RNA, 22 nt, Human
ucaguccuuaucugguguucag

SEQ ID NO: 564156 - RNA, 22 nt, Human
augaaaacagccuccugugaua

SEQ ID NO: 564157 - RNA, 22 nt, Human
cugagauggaguuucgcucuuc

SEQ ID NO: 564158 - RNA, 22 nt, Human
aggugggacccguggggugcga

SEQ ID NO: 564159 - RNA, 22 nt, Human
guggaaauuuuaggaucaucuu

SEQ ID NO: 564160 - RNA, 22 nt, Human
cgccguccccuaggaaagagcu

SEQ ID NO: 564161 - RNA, 22 nt, Human
auucaugcaggauugucuccaa

SEQ ID NO: 564162 - RNA, 22 nt, Human
ccaugcagugcuggagcugauu

SEQ ID NO: 564163 - RNA, 22 nt, Human
caggcuacauuugcucugagaa

SEQ ID NO: 564164 - RNA, 19 nt, Human
gggaaugauggaagacuuc

SEQ ID NO: 564165 - RNA, 22 nt, Human
gccagcuagaggcugcagugca

SEQ ID NO: 564166 - RNA, 22 nt, Human
uagugucuuccaggacauggua

SEQ ID NO: 564167 - RNA, 22 nt, Human
gaugugugugcccugggccugc

SEQ ID NO: 564168 - RNA, 22 nt, Human
cugccguguuuuucauguuaaa

SEQ ID NO: 564169 - RNA, 22 nt, Human
guucuccaggggcuguucaucu

SEQ ID NO: 564170 - RNA, 17 nt, Human
ugagcaguagaagaugc

SEQ ID NO: 564171 - RNA, 22 nt, Human
caggcucgguccaguggcaccc

SEQ ID NO: 564172 - RNA, 22 nt, Human
aggagccauugcaggauggcag

SEQ ID NO: 564173 - RNA, 22 nt, Human
uuucaaguagagggaucgcuag

SEQ ID NO: 564174 - RNA, 22 nt, Human
gcugggucucucccugguccug

SEQ ID NO: 564175 - RNA, 19 nt, Human
acccucuccccacuggguc

SEQ ID NO: 564176 - RNA, 22 nt, Human
gcucgguggccagccugaggcc

SEQ ID NO: 564177 - RNA, 22 nt, Human
gacagcagccacagggagaggg

SEQ ID NO: 564178 - RNA, 22 nt, Human
uagcugcacaggaaguaagauu

SEQ ID NO: 564179 - RNA, 23 nt, Human
gguucugccgcuuacugcugugc

SEQ ID NO: 564180 - RNA, 22 nt, Human
gagcuguguaugcaucauucug

SEQ ID NO: 564181 - RNA, 21 nt, Human
uuggaacaagcagcaguuugc

SEQ ID NO: 564182 - RNA, 22 nt, Human
cugagcacguaguuagggucca

SEQ ID NO: 564183 - RNA, 22 nt, Human
agauuucaauggauauugcaag

SEQ ID NO: 564184 - RNA, 22 nt, Human
ucucugucucccguguguccgg

SEQ ID NO: 564185 - RNA, 22 nt, Human
agcaugucuaacucuucagggu

SEQ ID NO: 564186 - RNA, 22 nt, Human
ccagagacaaggagcuggaguc

SEQ ID NO: 564187 - RNA, 22 nt, Human
ggcagagcuugcagugagccga

SEQ ID NO: 564188 - RNA, 20 nt, Human
guggcagugguggcagcagu

SEQ ID NO: 564189 - RNA, 22 nt, Human
gugauuucaaauauagagugag

SEQ ID NO: 564190 - RNA, 23 nt, Human
gccagagcugccugcccuugcug

SEQ ID NO: 564191 - RNA, 22 nt, Human
gaggcuggcagaaaagcacagg

SEQ ID NO: 564192 - RNA, 22 nt, Human
ggagcggagggagggccacugu

SEQ ID NO: 564193 - RNA, 22 nt, Human
acagcuggccgaggcucaggga

SEQ ID NO: 564194 - RNA, 17 nt, Human
gcguguccccgcgucuc

SEQ ID NO: 564195 - RNA, 22 nt, Human
aaaggagacuucagaucuccuu

SEQ ID NO: 564196 - RNA, 22 nt, Human
ccccacaccugccgggcagcag

SEQ ID NO: 564197 - RNA, 22 nt, Human
ucuccaggcuuaaucucagcuu

SEQ ID NO: 564198 - RNA, 21 nt, Human
aggcaugagcccugcauggac

SEQ ID NO: 564199 - RNA, 17 nt, Human
agcagcuggguugaucu

SEQ ID NO: 564200 - RNA, 22 nt, Human
agcuuuauuugucauucacggc

SEQ ID NO: 564201 - RNA, 22 nt, Human
auggccugcagugcugccacag

SEQ ID NO: 564202 - RNA, 22 nt, Human
cuccguggcuguggacgcagcc

SEQ ID NO: 564203 - RNA, 22 nt, Human
guggcagcggcccaggccgucu

SEQ ID NO: 564204 - RNA, 18 nt, Human
ucagacaaguuagacagg

SEQ ID NO: 564205 - RNA, 22 nt, Human
aaguuauugguggagagcacug

SEQ ID NO: 564206 - RNA, 23 nt, Human
agcccagcagagaaccuaggucc

SEQ ID NO: 564207 - RNA, 22 nt, Human
uuccuggggacuuaccgucauu

SEQ ID NO: 564208 - RNA, 22 nt, Human
ccaggcagccugcuccauucug

SEQ ID NO: 564209 - RNA, 21 nt, Human
gcuguucggcggcccucgcgc

SEQ ID NO: 564210 - RNA, 22 nt, Human
gcggccuuguggcggagcaggc

SEQ ID NO: 564211 - RNA, 22 nt, Human
cacgugcaggucuuaggagaca

SEQ ID NO: 564212 - RNA, 22 nt, Human
ugaggucuguccugucuuugga

SEQ ID NO: 564213 - RNA, 22 nt, Human
ucuggcuucaacuuuacugaaa

SEQ ID NO: 564214 - RNA, 22 nt, Human
ccacccagccagaugcaggaag

SEQ ID NO: 564215 - RNA, 22 nt, Human
uccccaguaagccugcacugug

SEQ ID NO: 564216 - RNA, 19 nt, Human
gcuuccagcacugcaggag

SEQ ID NO: 564217 - RNA, 22 nt, Human
agucaacauuugagaugcaaug

SEQ ID NO: 564218 - RNA, 22 nt, Human
gggcacagucugcagcccccca

SEQ ID NO: 564219 - RNA, 22 nt, Human
gaaagagaaccugggccuagau

SEQ ID NO: 564220 - RNA, 22 nt, Human
ugcauuucccauuguguggcuc

SEQ ID NO: 564221 - RNA, 19 nt, Human
ggguccauggugucaagga

SEQ ID NO: 564222 - RNA, 22 nt, Human
uaaaucccuacaucuguguuuu

SEQ ID NO: 564223 - RNA, 22 nt, Human
agcaguuuauccucauaaugga

SEQ ID NO: 564224 - RNA, 22 nt, Human
gccacguagaagugccgcgaga

SEQ ID NO: 564225 - RNA, 21 nt, Human
gccaccucaaucuucuagcgc

SEQ ID NO: 564226 - RNA, 22 nt, Human
ccgggagguggagauugcggug

SEQ ID NO: 564227 - RNA, 22 nt, Human
ccuccugggccuugcucuguga

SEQ ID NO: 564228 - RNA, 21 nt, Human
uaggugggagccccaguaugc

SEQ ID NO: 564229 - RNA, 22 nt, Human
agccacagucuguagccagcuu

SEQ ID NO: 564230 - RNA, 22 nt, Human
uuucucagccuccuugcuggag

SEQ ID NO: 564231 - RNA, 22 nt, Human
ugcagaauauucuggugacaau

SEQ ID NO: 564232 - RNA, 22 nt, Human
gcuuuuauuucuucacaaaagu

SEQ ID NO: 564233 - RNA, 22 nt, Human
gcagagcacccugcagugguau

SEQ ID NO: 564234 - RNA, 22 nt, Human
aucucuguaaaccauaaauuga

SEQ ID NO: 564235 - RNA, 22 nt, Human
cccuguccugcuaggcccuggu

SEQ ID NO: 564236 - RNA, 22 nt, Human
ugcucagaauugcgcuggugga

SEQ ID NO: 564237 - RNA, 22 nt, Human
cagaaagcaguugucaaugggc

SEQ ID NO: 564238 - RNA, 22 nt, Human
uccaggaguccuggguggcccc

SEQ ID NO: 564239 - RNA, 22 nt, Human
gagaugugucagguccuggggg

SEQ ID NO: 564240 - RNA, 22 nt, Human
uguaauguuagaaacaauugcu

SEQ ID NO: 564241 - RNA, 22 nt, Human
aaggagucugggccauucagag

SEQ ID NO: 564242 - RNA, 22 nt, Human
aguuuccacuggagacacugug

SEQ ID NO: 564243 - RNA, 19 nt, Human
gggugaggaagagcguugc

SEQ ID NO: 564244 - RNA, 22 nt, Human
uaugcuguauucuguauguuag

SEQ ID NO: 564245 - RNA, 22 nt, Human
caugggaauaaaguuauuucaa

SEQ ID NO: 564246 - RNA, 22 nt, Human
ugacagcccaccucacaggauu

SEQ ID NO: 564247 - RNA, 17 nt, Human
cagucacaggucuuuuc

SEQ ID NO: 564248 - RNA, 22 nt, Human
ugaggcuggaugggaugccucc

SEQ ID NO: 564249 - RNA, 22 nt, Human
cugagcagucuagccagguguu

SEQ ID NO: 564250 - RNA, 22 nt, Human
agcacguucuucauuacuucac

SEQ ID NO: 564251 - RNA, 22 nt, Human
aguggcaguagaugagcugguu

SEQ ID NO: 564252 - RNA, 22 nt, Human
guuucuuauuucaacuggaaca

SEQ ID NO: 564253 - RNA, 18 nt, Human
ggccucagccuggccgga

SEQ ID NO: 564254 - RNA, 22 nt, Human
cuuccagugcauagguagauca

SEQ ID NO: 564255 - RNA, 22 nt, Human
gguuguaguuggagguuguaua

SEQ ID NO: 564256 - RNA, 22 nt, Human
ggugacgaauccauagcaucga

SEQ ID NO: 564257 - RNA, 22 nt, Human
uggcuccuuccgcagcaugccu

SEQ ID NO: 564258 - RNA, 22 nt, Human
agacagcgaggacagaggggug

SEQ ID NO: 564259 - RNA, 19 nt, Human
ugguucuccuuccacaguc

SEQ ID NO: 564260 - RNA, 22 nt, Human
caggacccaucagccaggcacu

SEQ ID NO: 564261 - RNA, 22 nt, Human
aaacacaucauucaugucguca

SEQ ID NO: 564262 - RNA, 22 nt, Human
cagugcagccaaggacaggcac

SEQ ID NO: 564263 - RNA, 22 nt, Human
acucgcggcggacggcggccag

SEQ ID NO: 564264 - RNA, 22 nt, Human
ugaguccagaugggccagcagg

SEQ ID NO: 564265 - RNA, 22 nt, Human
ugggaagauaugagugaccaac

SEQ ID NO: 564266 - RNA, 22 nt, Human
auguaacauaugugaucgcauu

SEQ ID NO: 564267 - RNA, 22 nt, Human
gcccaguggcaucuucacugcu

SEQ ID NO: 564268 - RNA, 22 nt, Human
ugcauguuucuguauguuaaug

SEQ ID NO: 564269 - RNA, 22 nt, Human
ucaccuguucaacagcaauaau

SEQ ID NO: 564270 - RNA, 22 nt, Human
ucaccgccuugcccggccgggc

SEQ ID NO: 564271 - RNA, 22 nt, Human
uguggagcccccaggagugggg

SEQ ID NO: 564272 - RNA, 22 nt, Human
gccagcagcucuugggcgggca

SEQ ID NO: 564273 - RNA, 22 nt, Human
uuuauucucuaguuggucagau

SEQ ID NO: 564274 - RNA, 22 nt, Human
ugcuugucacccugccugagug

SEQ ID NO: 564275 - RNA, 22 nt, Human
cagacguuggaggaaauauacc

SEQ ID NO: 564276 - RNA, 22 nt, Human
gccagagaggccuuagaaucca

SEQ ID NO: 564277 - RNA, 21 nt, Human
uccaaaggagacugagugugu

SEQ ID NO: 564278 - RNA, 22 nt, Human
cagggagaucuuggcuccuggu

SEQ ID NO: 564279 - RNA, 23 nt, Human
acucguggaauucucugcgaucg

SEQ ID NO: 564280 - RNA, 22 nt, Human
gacagcaggaugugaggggaug

SEQ ID NO: 564281 - RNA, 20 nt, Human
ucaggguuucccauucuugg

SEQ ID NO: 564282 - RNA, 22 nt, Human
gaggcuguaacuugggcacugg

SEQ ID NO: 564283 - RNA, 22 nt, Human
uggaaauacaagaaguauguca

SEQ ID NO: 564284 - RNA, 19 nt, Human
ccugugucccacguagaug

SEQ ID NO: 564285 - RNA, 22 nt, Human
acgucuucguuggcagagauuu

SEQ ID NO: 564286 - RNA, 22 nt, Human
gccggggcuggggagagacaug

SEQ ID NO: 564287 - RNA, 22 nt, Human
aaggcuuugugcugaguugucg

SEQ ID NO: 564288 - RNA, 22 nt, Human
cgugcggccucggggcccggcu

SEQ ID NO: 564289 - RNA, 22 nt, Human
cuguuccuccaccucaacaaac

SEQ ID NO: 564290 - RNA, 22 nt, Human
agggugcccaccgcuucugccc

SEQ ID NO: 564291 - RNA, 22 nt, Human
caggagcucaagaccacccugg

SEQ ID NO: 564292 - RNA, 22 nt, Human
cagcccacugccucugugguag

SEQ ID NO: 564293 - RNA, 22 nt, Human
augcauaucuccuaucuccuca

SEQ ID NO: 564294 - RNA, 22 nt, Human
gugccgcuggagcuggaauuga

SEQ ID NO: 564295 - RNA, 22 nt, Human
ugcaaaaagagcgaggagcccu

SEQ ID NO: 564296 - RNA, 22 nt, Human
gcaugagacuagcucaugagca

SEQ ID NO: 564297 - RNA, 22 nt, Human
acacggcacuuuaggaaggggc

SEQ ID NO: 564298 - RNA, 22 nt, Human
cccagcauuucugggcugcacu

SEQ ID NO: 564299 - RNA, 22 nt, Human
auauaugaagaagucuugauua

SEQ ID NO: 564300 - RNA, 23 nt, Human
agguggagcugugcagccggggc

SEQ ID NO: 564301 - RNA, 21 nt, Human
ccaccaggucuucugcucggg

SEQ ID NO: 564302 - RNA, 22 nt, Human
gccagcuggcugcaggucccag

SEQ ID NO: 564303 - RNA, 22 nt, Human
gguggcugugagcauuauguga

SEQ ID NO: 564304 - RNA, 22 nt, Human
uccuucagaggacggcagccag

SEQ ID NO: 564305 - RNA, 22 nt, Human
gcccagcugagaagcgcggggc

SEQ ID NO: 564306 - RNA, 22 nt, Human
gagcugggaagauagcuugagc

SEQ ID NO: 564307 - RNA, 22 nt, Human
uugaccacugaaugguucugaa

SEQ ID NO: 564308 - RNA, 22 nt, Human
gccaugaacucgggcauggaga

SEQ ID NO: 564309 - RNA, 22 nt, Human
ucugcuguuuacugugugauau

SEQ ID NO: 564310 - RNA, 22 nt, Human
caucccugauuccuaguacagu

SEQ ID NO: 564311 - RNA, 22 nt, Human
accuuguuguagguacaaaaga

SEQ ID NO: 564312 - RNA, 22 nt, Human
agagaagcagggagucaucugu

SEQ ID NO: 564313 - RNA, 22 nt, Human
cagcauggagacaaagugggca

SEQ ID NO: 564314 - RNA, 22 nt, Human
gggucagggaggccccaccaug

SEQ ID NO: 564315 - RNA, 22 nt, Human
augaucaagaauuuuguauucc

SEQ ID NO: 564316 - RNA, 22 nt, Human
cugcgugguaggacucaguucu

SEQ ID NO: 564317 - RNA, 22 nt, Human
ugggcaaggcuggagccugcag

SEQ ID NO: 564318 - RNA, 19 nt, Human
uccuugacuguauucagag

SEQ ID NO: 564319 - RNA, 22 nt, Human
acuucagugugguauaaaacgu

SEQ ID NO: 564320 - RNA, 23 nt, Human
agugggcucaguccuccaacccc

SEQ ID NO: 564321 - RNA, 22 nt, Human
ggcagcaggguagccauuucuc

SEQ ID NO: 564322 - RNA, 18 nt, Human
uggcaugcuuugauacau

SEQ ID NO: 564323 - RNA, 22 nt, Human
gaugugucccuuucaacucaga

SEQ ID NO: 564324 - RNA, 22 nt, Human
auuguugacuugauuacucaac

SEQ ID NO: 564325 - RNA, 22 nt, Human
ccaagcuggacagcagcaagga

SEQ ID NO: 564326 - RNA, 22 nt, Human
ugucggccacgagggagccgcg

SEQ ID NO: 564327 - RNA, 22 nt, Human
uuucuuggucuucccgaccugg

SEQ ID NO: 564328 - RNA, 19 nt, Human
cuggcuucaagcaguccuc

SEQ ID NO: 564329 - RNA, 22 nt, Human
cuggcagcugcccgagaugccc

SEQ ID NO: 564330 - RNA, 22 nt, Human
gcgacgcaggcacgacguguug

SEQ ID NO: 564331 - RNA, 22 nt, Human
gcucguugaaccuguccccgag

SEQ ID NO: 564332 - RNA, 22 nt, Human
gucccagaggacagggucacau

SEQ ID NO: 564333 - RNA, 22 nt, Human
cucguugcugaagccaaaguca

SEQ ID NO: 564334 - RNA, 22 nt, Human
ucacugaauuucaagcuagugg

SEQ ID NO: 564335 - RNA, 22 nt, Human
uggcauuggaauuuguguugca

SEQ ID NO: 564336 - RNA, 22 nt, Human
gagguauaguucuauuagauga

SEQ ID NO: 564337 - RNA, 22 nt, Human
gccuggggaacuugauccuguc

SEQ ID NO: 564338 - RNA, 23 nt, Human
cagcacaguacauuuccugucuc

SEQ ID NO: 564339 - RNA, 22 nt, Human
agggagcauugugacauaucac

SEQ ID NO: 564340 - RNA, 22 nt, Human
uaucugucgggagucuuccgga

SEQ ID NO: 564341 - RNA, 22 nt, Human
aaggcacauauuuuagagucac

SEQ ID NO: 564342 - RNA, 22 nt, Human
uagaagaugccuuaaaguugaa

SEQ ID NO: 564343 - RNA, 22 nt, Human
ggaauccugguguuuucugccu

SEQ ID NO: 564344 - RNA, 22 nt, Human
gccggucuuaagcugacuguga

SEQ ID NO: 564345 - RNA, 22 nt, Human
ucaggccaggagaucagauuga

SEQ ID NO: 564346 - RNA, 22 nt, Human
cccugauguuuucucugccuuu

SEQ ID NO: 564347 - RNA, 22 nt, Human
guauuaugaaugccgaggcggc

SEQ ID NO: 564348 - RNA, 22 nt, Human
uagcccauggacuggucagcug

SEQ ID NO: 564349 - RNA, 22 nt, Human
cugggcccaggcggcucucgga

SEQ ID NO: 564350 - RNA, 22 nt, Human
gugcuccaggucgcucagagag

SEQ ID NO: 564351 - RNA, 22 nt, Human
agacuucucuaacuugaggacc

SEQ ID NO: 564352 - RNA, 22 nt, Human
gaggcugugugucccucuggac

SEQ ID NO: 564353 - RNA, 22 nt, Human
uucaaaccuaucuaagaaauag

SEQ ID NO: 564354 - RNA, 22 nt, Human
ugcccagucuccgggccagccc

SEQ ID NO: 564355 - RNA, 22 nt, Human
ugccgcgcgcccagguuaggug

SEQ ID NO: 564356 - RNA, 21 nt, Human
agggaaaaggcugagugaggg

SEQ ID NO: 564357 - RNA, 22 nt, Human
guuguuuuugaacggugguggc

SEQ ID NO: 564358 - RNA, 22 nt, Human
gcagcaaucuucacagugucau

SEQ ID NO: 564359 - RNA, 22 nt, Human
uuccggacgcccgucuuccagc

SEQ ID NO: 564360 - RNA, 22 nt, Human
cagcccaggacugcagguguuu

SEQ ID NO: 564361 - RNA, 21 nt, Human
ucucugacccaggaagagggc

SEQ ID NO: 564362 - RNA, 22 nt, Human
gucuuuuuuacaccuuacauca

SEQ ID NO: 564363 - RNA, 22 nt, Human
gccugaucagguccucggcaua

SEQ ID NO: 564364 - RNA, 22 nt, Human
gguccccguggaggcuggagcg

SEQ ID NO: 564365 - RNA, 22 nt, Human
aggaaagcucccaguagggcuc

SEQ ID NO: 564366 - RNA, 22 nt, Human
aguuggaagacacccugaaauc

SEQ ID NO: 564367 - RNA, 22 nt, Human
cagcuccaucuugcuuauacca

SEQ ID NO: 564368 - RNA, 22 nt, Human
gaguaaaagaugaggcaguaga

SEQ ID NO: 564369 - RNA, 22 nt, Human
ggcggcacgcaggcugcugucg

SEQ ID NO: 564370 - RNA, 22 nt, Human
gcagaagucagaccaucugaau

SEQ ID NO: 564371 - RNA, 22 nt, Human
cgcgcugcagacagcggaggcc

SEQ ID NO: 564372 - RNA, 22 nt, Human
agcacugugagcaccagcacgc

SEQ ID NO: 564373 - RNA, 22 nt, Human
gaugauuacacuuuuaaaacag

SEQ ID NO: 564374 - RNA, 22 nt, Human
gcaaggaagcagaguugcuauc

SEQ ID NO: 564375 - RNA, 21 nt, Human
gcccacagugaggaggauccc

SEQ ID NO: 564376 - RNA, 21 nt, Human
ggucaggcaugugcccugagc

SEQ ID NO: 564377 - RNA, 22 nt, Human
auucuggacaaggcaagcuccu

SEQ ID NO: 564378 - RNA, 22 nt, Human
cccaggaacagcacagaacagc

SEQ ID NO: 564379 - RNA, 22 nt, Human
agcaccagcucaaggugcaccu

SEQ ID NO: 564380 - RNA, 22 nt, Human
acaguucuguccuagacuucgu

SEQ ID NO: 564381 - RNA, 22 nt, Human
ccagcuggaacggcagcccagc

SEQ ID NO: 564382 - RNA, 19 nt, Human
cuccacagggauugugauu

SEQ ID NO: 564383 - RNA, 22 nt, Human
agggccagcagcuuggccaacc

SEQ ID NO: 564384 - RNA, 18 nt, Human
uggggggcuugucugaag

SEQ ID NO: 564385 - RNA, 18 nt, Human
gccuggcuucggagccgc

SEQ ID NO: 564386 - RNA, 22 nt, Human
ugcaugguguaauucuaaugcu

SEQ ID NO: 564387 - RNA, 22 nt, Human
uuuggaaaugagaagccaccuu

SEQ ID NO: 564388 - RNA, 22 nt, Human
gaagauuaccugagaccacuug

SEQ ID NO: 564389 - RNA, 22 nt, Human
auggaggaugugcagcaugggc

SEQ ID NO: 564390 - RNA, 22 nt, Human
agaggaaguaaucaggaccugc

SEQ ID NO: 564391 - RNA, 22 nt, Human
acacugagcuuccaagaugggg

SEQ ID NO: 564392 - RNA, 22 nt, Human
gccuggcaaggcccuguugacu

SEQ ID NO: 564393 - RNA, 22 nt, Human
auuccucagcaggccuuuuguu

SEQ ID NO: 564394 - RNA, 19 nt, Human
gagcagcuuccuaucuggu

SEQ ID NO: 564395 - RNA, 19 nt, Human
agugagcauggcuugacug

SEQ ID NO: 564396 - RNA, 22 nt, Human
caggcuguguuccuggaacccc

SEQ ID NO: 564397 - RNA, 22 nt, Human
auggguggccccgugugcaguc

SEQ ID NO: 564398 - RNA, 22 nt, Human
agauaaaguccaaacuguguag

SEQ ID NO: 564399 - RNA, 22 nt, Human
uggcuggcuguccagcugggca

SEQ ID NO: 564400 - RNA, 22 nt, Human
ggacauugaagcuggaaaggga

SEQ ID NO: 564401 - RNA, 22 nt, Human
guuagguagaaguuuacuuuga

SEQ ID NO: 564402 - RNA, 22 nt, Human
augaugaagcaugguuacacug

SEQ ID NO: 564403 - RNA, 22 nt, Human
agccacugugugaccagcuguc

SEQ ID NO: 564404 - RNA, 22 nt, Human
gacuuugccacuugcuccagcu

SEQ ID NO: 564405 - RNA, 22 nt, Human
cuacagaauucaacaaaugguu

SEQ ID NO: 564406 - RNA, 22 nt, Human
ggcgcaguugagcgugcuguuc

SEQ ID NO: 564407 - RNA, 22 nt, Human
uggccucuccuggcagcaucca

SEQ ID NO: 564408 - RNA, 22 nt, Human
acaugcacccaguuacacucuc

SEQ ID NO: 564409 - RNA, 22 nt, Human
ucaagcggacugagauacucug

SEQ ID NO: 564410 - RNA, 22 nt, Human
gcagcccaggaggcgggagccc

SEQ ID NO: 564411 - RNA, 22 nt, Human
gcuguccugggaacaggcacua

SEQ ID NO: 564412 - RNA, 22 nt, Human
gaauguuaaugcacuucuagcu

SEQ ID NO: 564413 - RNA, 18 nt, Human
ggaaggugcuggagugca

SEQ ID NO: 564414 - RNA, 22 nt, Human
gugcagcugggcgcugaccuuc

SEQ ID NO: 564415 - RNA, 22 nt, Human
aagaaaagguaaccgcuuaucu

SEQ ID NO: 564416 - RNA, 22 nt, Human
aacccaggaguuggaggcugug

SEQ ID NO: 564417 - RNA, 22 nt, Human
cagggagccccaauuccaugcc

SEQ ID NO: 564418 - RNA, 22 nt, Human
accagucauagaaagcaguggu

SEQ ID NO: 564419 - RNA, 22 nt, Human
gugcuaaugaauuggagugccu

SEQ ID NO: 564420 - RNA, 16 nt, Human
ggcagcagcuccgugc

SEQ ID NO: 564421 - RNA, 22 nt, Human
cagcaguacuucucagagguau

SEQ ID NO: 564422 - RNA, 22 nt, Human
aaggaggaauguagccagcucc

SEQ ID NO: 564423 - RNA, 22 nt, Human
augugaaagagguguucagugg

SEQ ID NO: 564424 - RNA, 22 nt, Human
ugagaacaaaguugaaaguuug

SEQ ID NO: 564425 - RNA, 22 nt, Human
gcugauggcuugcuggcugaca

SEQ ID NO: 564426 - RNA, 17 nt, Human
gcaggcacugcugccug

SEQ ID NO: 564427 - RNA, 22 nt, Human
ugugguuuugguucagaaacaa

SEQ ID NO: 564428 - RNA, 21 nt, Human
aacaggucccccacgggcuuu

SEQ ID NO: 564429 - RNA, 22 nt, Human
uguguuucugagaaucccaccu

SEQ ID NO: 564430 - RNA, 18 nt, Human
gaaggcauucaguggcuu

SEQ ID NO: 564431 - RNA, 22 nt, Human
agaaaucugacugcugugcaca

SEQ ID NO: 564432 - RNA, 20 nt, Human
ggcagagcuaugucuguugc

SEQ ID NO: 564433 - RNA, 22 nt, Human
gcaccgagaaggaagcaugccu

SEQ ID NO: 564434 - RNA, 22 nt, Human
guugugcaaacacuggggucug

SEQ ID NO: 564435 - RNA, 22 nt, Human
cuggcaguguccagcucgugau

SEQ ID NO: 564436 - RNA, 22 nt, Human
ccccuuucucccgcgucuggcc

SEQ ID NO: 564437 - RNA, 22 nt, Human
uuugaacuucuaccugucauau

SEQ ID NO: 564438 - RNA, 22 nt, Human
ccucuggccuaggccgggagag

SEQ ID NO: 564439 - RNA, 23 nt, Human
uggaaacauucugaauguccauc

SEQ ID NO: 564440 - RNA, 22 nt, Human
aggccagaacagcucugcacca

SEQ ID NO: 564441 - RNA, 22 nt, Human
caggaugccuuugaacucugga

SEQ ID NO: 564442 - RNA, 22 nt, Human
uugcucuauguuuguaaacaga

SEQ ID NO: 564443 - RNA, 22 nt, Human
uaaauacuuuuacuccacugau

SEQ ID NO: 564444 - RNA, 19 nt, Human
aggaaggcggcggcugccc

SEQ ID NO: 564445 - RNA, 22 nt, Human
gcagcugcgaagaagucuaucu

SEQ ID NO: 564446 - RNA, 20 nt, Human
cgggacacucaagcucuggg

SEQ ID NO: 564447 - RNA, 22 nt, Human
cagcuccagccaccggggggug

SEQ ID NO: 564448 - RNA, 22 nt, Human
uuugcaaaguccauugaaguua

SEQ ID NO: 564449 - RNA, 22 nt, Human
aguggcuguuccaggugaggac

SEQ ID NO: 564450 - RNA, 22 nt, Human
caggucuucuucagcacuugga

SEQ ID NO: 564451 - RNA, 22 nt, Human
caaagcccagaggccucacuuu

SEQ ID NO: 564452 - RNA, 22 nt, Human
ggucuuucuuugauaguggaga

SEQ ID NO: 564453 - RNA, 22 nt, Human
gucugcacgugccagggagggg

SEQ ID NO: 564454 - RNA, 22 nt, Human
uagaugaacagaaagccacugu

SEQ ID NO: 564455 - RNA, 22 nt, Human
aggugccugucgucucugguua

SEQ ID NO: 564456 - RNA, 22 nt, Human
aggacaaaggaccagaucugga

SEQ ID NO: 564457 - RNA, 22 nt, Human
cugcgggcugucaggcgugcca

SEQ ID NO: 564458 - RNA, 22 nt, Human
uggccaggcagguagaacggcc

SEQ ID NO: 564459 - RNA, 23 nt, Human
uggggcugauggagacggaccag

SEQ ID NO: 564460 - RNA, 22 nt, Human
uggcugggagcuggaacugggc

SEQ ID NO: 564461 - RNA, 22 nt, Human
aagcagaaaaacugagcuccaa

SEQ ID NO: 564462 - RNA, 22 nt, Human
aggaggguggggucugccuguc

SEQ ID NO: 564463 - RNA, 22 nt, Human
ugcuggcugggcugcuggagac

SEQ ID NO: 564464 - RNA, 22 nt, Human
aaccccgcucaggcugggugag

SEQ ID NO: 564465 - RNA, 22 nt, Human
gggcggggcuuccguccuccac

SEQ ID NO: 564466 - RNA, 22 nt, Human
agaagugaguugugacuauggg

SEQ ID NO: 564467 - RNA, 21 nt, Human
gcacuucugcagggcugcugg

SEQ ID NO: 564468 - RNA, 22 nt, Human
acuguagucuaaauauagucuu

SEQ ID NO: 564469 - RNA, 22 nt, Human
cuuguauuaggaagaaugcuuu

SEQ ID NO: 564470 - RNA, 22 nt, Human
gaggagcuucagaggaaucuua

SEQ ID NO: 564471 - RNA, 22 nt, Human
agcugccgaugcccagcugcau

SEQ ID NO: 564472 - RNA, 22 nt, Human
aggugugcaggaugaaccccuc

SEQ ID NO: 564473 - RNA, 22 nt, Human
ugcaggaacucgaaaacuauag

SEQ ID NO: 564474 - RNA, 22 nt, Human
cuuucuuucgaagacgugauua

SEQ ID NO: 564475 - RNA, 22 nt, Human
gggacagcuguagugcuuggcu

SEQ ID NO: 564476 - RNA, 22 nt, Human
ggaagaggcugaggccaugcug

SEQ ID NO: 564477 - RNA, 22 nt, Human
aagcacagggacucaggaccgg

SEQ ID NO: 564478 - RNA, 22 nt, Human
gccagguaugaauuacgcacga

SEQ ID NO: 564479 - RNA, 22 nt, Human
uggcugagcugcagcguggcuu

SEQ ID NO: 564480 - RNA, 22 nt, Human
cgcagcugcugcucugaaacag

SEQ ID NO: 564481 - RNA, 22 nt, Human
agauguuuuuccaggucuaauu

SEQ ID NO: 564482 - RNA, 22 nt, Human
ccagcagcgauagggugagugc

SEQ ID NO: 564483 - RNA, 22 nt, Human
gccaccagccccaugcgcugug

SEQ ID NO: 564484 - RNA, 22 nt, Human
gcccagcugcacccuggugggu

SEQ ID NO: 564485 - RNA, 22 nt, Human
gcauuacuucuuucauagguca

SEQ ID NO: 564486 - RNA, 22 nt, Human
ugggugguugcugaggcuccuu

SEQ ID NO: 564487 - RNA, 22 nt, Human
cucacaggguucuaucgaagag

SEQ ID NO: 564488 - RNA, 22 nt, Human
gcugcugcuugaaggcucggag

SEQ ID NO: 564489 - RNA, 19 nt, Human
ucuuucauuucuagcucug

SEQ ID NO: 564490 - RNA, 22 nt, Human
gcaggcuuauggggagacagag

SEQ ID NO: 564491 - RNA, 22 nt, Human
gggcugagggguaucucauggg

SEQ ID NO: 564492 - RNA, 18 nt, Human
uauaaacacacuuagguu

SEQ ID NO: 564493 - RNA, 22 nt, Human
cgccccagccaguugagcggcg

SEQ ID NO: 564494 - RNA, 22 nt, Human
ggaagcuguuaucaucuguauc

SEQ ID NO: 564495 - RNA, 22 nt, Human
uucaguaugcugaaugauuuuu

SEQ ID NO: 564496 - RNA, 22 nt, Human
uggccagaacucagacaugugg

SEQ ID NO: 564497 - RNA, 22 nt, Human
auuuacugagguaaauaaacug

SEQ ID NO: 564498 - RNA, 22 nt, Human
gugcaggacagcacaucuccug

SEQ ID NO: 564499 - RNA, 22 nt, Human
cggcagcgguuggagguuguag

SEQ ID NO: 564500 - RNA, 22 nt, Human
acugugugccaggcgcuggucu

SEQ ID NO: 564501 - RNA, 22 nt, Human
ggcuuuuguuucagcucugcua

SEQ ID NO: 564502 - RNA, 22 nt, Human
cagggccugccugguuccugga

SEQ ID NO: 564503 - RNA, 22 nt, Human
auagacacagcuaugauuugag

SEQ ID NO: 564504 - RNA, 22 nt, Human
aacuagaaagaacauauuucca

SEQ ID NO: 564505 - RNA, 22 nt, Human
agggggcuccuuggugugcaga

SEQ ID NO: 564506 - RNA, 22 nt, Human
gcugccuggaauaacggcuggc

SEQ ID NO: 564507 - RNA, 22 nt, Human
ugcccguggccuggggcagcuu

SEQ ID NO: 564508 - RNA, 22 nt, Human
gggcuccagccaggugucccca

SEQ ID NO: 564509 - RNA, 22 nt, Human
cagacaggguccuguccgucac

SEQ ID NO: 564510 - RNA, 22 nt, Human
gagcucauccccaugguccguc

SEQ ID NO: 564511 - RNA, 22 nt, Human
gugcagcugguggagucugggg

SEQ ID NO: 564512 - RNA, 22 nt, Human
uggcagcagggccccuggagga

SEQ ID NO: 564513 - RNA, 22 nt, Human
gagcaccgccuccacgaugccc

SEQ ID NO: 564514 - RNA, 22 nt, Human
cugcaccgugucucgggcugcc

SEQ ID NO: 564515 - RNA, 22 nt, Human
uagucaccuguugugugaugcc

SEQ ID NO: 564516 - RNA, 22 nt, Human
acaguguuucacuuaaccguuu

SEQ ID NO: 564517 - RNA, 22 nt, Human
cagggccagggcuauggugaag

SEQ ID NO: 564518 - RNA, 22 nt, Human
uguuccucugaacuucuuccaa

SEQ ID NO: 564519 - RNA, 22 nt, Human
cccaccagaccugcaccggcac

SEQ ID NO: 564520 - RNA, 22 nt, Human
caauaaaguggaggcccgggcu

SEQ ID NO: 564521 - RNA, 22 nt, Human
cagagccaaaccucagggcccg

SEQ ID NO: 564522 - RNA, 22 nt, Human
ucagaacauccugguuuaaaau

SEQ ID NO: 564523 - RNA, 22 nt, Human
gugcucuagaaauugucagugg

SEQ ID NO: 564524 - RNA, 22 nt, Human
uggugcagacaggagccccgcu

SEQ ID NO: 564525 - RNA, 22 nt, Human
ccaagagcuucccauagcuucu

SEQ ID NO: 564526 - RNA, 22 nt, Human
caggaacacaaugagucucaaa

SEQ ID NO: 564527 - RNA, 22 nt, Human
ucccagccugacagugcaucaa

SEQ ID NO: 564528 - RNA, 22 nt, Human
guccuguguaaguacuugcuca

SEQ ID NO: 564529 - RNA, 20 nt, Human
acuagaaagucacugggggg

SEQ ID NO: 564530 - RNA, 22 nt, Human
ugcacagagggaggcauaaaau

SEQ ID NO: 564531 - RNA, 22 nt, Human
auuccaaagccugaauaaugga

SEQ ID NO: 564532 - RNA, 22 nt, Human
cagaggccuggcuuggacaccu

SEQ ID NO: 564533 - RNA, 22 nt, Human
guguguggaaugcucauuuauu

SEQ ID NO: 564534 - RNA, 22 nt, Human
cuguucccgguggccgggccag

SEQ ID NO: 564535 - RNA, 22 nt, Human
ugacucacuuaauuuacaaguc

SEQ ID NO: 564536 - RNA, 22 nt, Human
uuccaaguuaggcgagcuggug

SEQ ID NO: 564537 - RNA, 20 nt, Human
uuugauugccccucugacuu

SEQ ID NO: 564538 - RNA, 22 nt, Human
gggcuccagaggcucacccugg

SEQ ID NO: 564539 - RNA, 20 nt, Human
ggaaaaguacuccuccuuaa

SEQ ID NO: 564540 - RNA, 22 nt, Human
uaagaaacauuuuuaugacagu

SEQ ID NO: 564541 - RNA, 22 nt, Human
aacuugccaagagcuuugcuag

SEQ ID NO: 564542 - RNA, 22 nt, Human
ucccugagcucacauggcagga

SEQ ID NO: 564543 - RNA, 22 nt, Human
agcugaaacuucccauuaauug

SEQ ID NO: 564544 - RNA, 21 nt, Human
caggaacauucuuuacauuua

SEQ ID NO: 564545 - RNA, 22 nt, Human
uaagccugcaugaaccaugaga

SEQ ID NO: 564546 - RNA, 22 nt, Human
cgcugccuucaucccacgccua

SEQ ID NO: 564547 - RNA, 22 nt, Human
auuagccuguugcauuuucacu

SEQ ID NO: 564548 - RNA, 22 nt, Human
gacaagaugacaucauggcuuc

SEQ ID NO: 564549 - RNA, 22 nt, Human
cagaugaaguaggugacgagca

SEQ ID NO: 564550 - RNA, 22 nt, Human
gccaagaaugcgacagccguca

SEQ ID NO: 564551 - RNA, 22 nt, Human
gccaggcaggccacgcuguguu

SEQ ID NO: 564552 - RNA, 22 nt, Human
uccaguggugguuugaagggca

SEQ ID NO: 564553 - RNA, 22 nt, Human
agcagcaggugaccucgaugcc

SEQ ID NO: 564554 - RNA, 18 nt, Human
gaggcacauaguuggggc

SEQ ID NO: 564555 - RNA, 22 nt, Human
cugggagaugacucagagcagg

SEQ ID NO: 564556 - RNA, 22 nt, Human
gaaaccuuugccgauggggucc

SEQ ID NO: 564557 - RNA, 21 nt, Human
agccaggcaagcacccccacu

SEQ ID NO: 564558 - RNA, 22 nt, Human
cugggguccuugccauguguca

SEQ ID NO: 564559 - RNA, 22 nt, Human
gugcuuccuguauugauuccau

SEQ ID NO: 564560 - RNA, 22 nt, Human
uugaugcugucuuucagaauca

SEQ ID NO: 564561 - RNA, 22 nt, Human
agcuaugaagccacuuuuaaca

SEQ ID NO: 564562 - RNA, 21 nt, Human
agcugugguuuuacaucuuuu

SEQ ID NO: 564563 - RNA, 22 nt, Human
aagccuucaguccguugcagag

SEQ ID NO: 564564 - RNA, 22 nt, Human
acgugcuggagaagagcucgcc

SEQ ID NO: 564565 - RNA, 22 nt, Human
ucggaaccgaccugggagcugg

SEQ ID NO: 564566 - RNA, 22 nt, Human
gcugcaggcucugcaggaauug

SEQ ID NO: 564567 - RNA, 22 nt, Human
cuguauaugugcauacacacac

SEQ ID NO: 564568 - RNA, 22 nt, Human
cagguagaggcugccaucagcu

SEQ ID NO: 564569 - RNA, 22 nt, Human
aggugcaucucguagcucuucu

SEQ ID NO: 564570 - RNA, 22 nt, Human
uugauguaauacuuugcaacca

SEQ ID NO: 564571 - RNA, 22 nt, Human
acaugaggaacucaggagucac

SEQ ID NO: 564572 - RNA, 22 nt, Human
cugcuguguggauucaauggcu

SEQ ID NO: 564573 - RNA, 22 nt, Human
cacucacccgguccuucccagu

SEQ ID NO: 564574 - RNA, 22 nt, Human
cugggccacaagccugugugau

SEQ ID NO: 564575 - RNA, 22 nt, Human
ccugugacucugucugaugguc

SEQ ID NO: 564576 - RNA, 22 nt, Human
gguguggcaguggaccugugaa

SEQ ID NO: 564577 - RNA, 22 nt, Human
aagggccagggcucuagagaua

SEQ ID NO: 564578 - RNA, 22 nt, Human
ggcuggccuguguggccgccac

SEQ ID NO: 564579 - RNA, 16 nt, Human
guagccguggccgcug

SEQ ID NO: 564580 - RNA, 22 nt, Human
uguccugugaccuggcaccaca

SEQ ID NO: 564581 - RNA, 18 nt, Human
aguaaauguuaaauauug

SEQ ID NO: 564582 - RNA, 22 nt, Human
cuccccacgccuggacuaagag

SEQ ID NO: 564583 - RNA, 22 nt, Human
gagcugcauagcugggauccuc

SEQ ID NO: 564584 - RNA, 22 nt, Human
uacaaagugauuuuggaauuga

SEQ ID NO: 564585 - RNA, 22 nt, Human
augacagcucuagcacacagua

SEQ ID NO: 564586 - RNA, 22 nt, Human
uaguauuuccuguaagcuauag

SEQ ID NO: 564587 - RNA, 20 nt, Human
cauuccugaggaauucaugu

SEQ ID NO: 564588 - RNA, 22 nt, Human
ucccacacagcccgcucaccgg

SEQ ID NO: 564589 - RNA, 19 nt, Human
cgcacagccugccaggcgc

SEQ ID NO: 564590 - RNA, 22 nt, Human
gauguauagcuuuaacugaccc

SEQ ID NO: 564591 - RNA, 22 nt, Human
gccagccccagacauccuaucg

SEQ ID NO: 564592 - RNA, 22 nt, Human
uuggaggaagcucaugggggau

SEQ ID NO: 564593 - RNA, 22 nt, Human
ugucauauagaauguucuauga

SEQ ID NO: 564594 - RNA, 22 nt, Human
gaccuccguguacaccucccag

SEQ ID NO: 564595 - RNA, 22 nt, Human
auuuccaggaguugaggucuga

SEQ ID NO: 564596 - RNA, 22 nt, Human
agggaagcagcagccgccuguc

SEQ ID NO: 564597 - RNA, 16 nt, Human
uugccgcacaggucgc

SEQ ID NO: 564598 - RNA, 19 nt, Human
gcagcugugggaagagcca

SEQ ID NO: 564599 - RNA, 22 nt, Human
ccucagucuauuuccagcaggu

SEQ ID NO: 564600 - RNA, 22 nt, Human
aggcuuuaauuaucuacaggag

SEQ ID NO: 564601 - RNA, 22 nt, Human
caugcauuucuaccaaggaaua

SEQ ID NO: 564602 - RNA, 22 nt, Human
cuucuccgacaaccgacgccgg

SEQ ID NO: 564603 - RNA, 22 nt, Human
cucucuccuuagcugcagacca

SEQ ID NO: 564604 - RNA, 22 nt, Human
aagagcuggcucuugcagcagc

SEQ ID NO: 564605 - RNA, 22 nt, Human
agcauggcuuuggaggauagca

SEQ ID NO: 564606 - RNA, 22 nt, Human
guguuucccuggcacaagaacc

SEQ ID NO: 564607 - RNA, 22 nt, Human
ugcuccaucuagagcucugcag

SEQ ID NO: 564608 - RNA, 22 nt, Human
ugguacauggguagguaucucu

SEQ ID NO: 564609 - RNA, 16 nt, Human
ugcggcaacuugcggc

SEQ ID NO: 564610 - RNA, 22 nt, Human
cccagcugaacuugcauuccaa

SEQ ID NO: 564611 - RNA, 19 nt, Human
ugguggaggugcaccugac

SEQ ID NO: 564612 - RNA, 22 nt, Human
agugacauuauuuuguguacua

SEQ ID NO: 564613 - RNA, 22 nt, Human
ugagaauacugcauuguuagga

SEQ ID NO: 564614 - RNA, 22 nt, Human
ggugggugagcccugggagcug

SEQ ID NO: 564615 - RNA, 19 nt, Human
augagcuggcauuucaggu

SEQ ID NO: 564616 - RNA, 22 nt, Human
uuucagacaggcucagagccgu

SEQ ID NO: 564617 - RNA, 22 nt, Human
acugccaguuguuuuguccagu

SEQ ID NO: 564618 - RNA, 22 nt, Human
ggcgagcaugagucacucuggg

SEQ ID NO: 564619 - RNA, 22 nt, Human
gccuggagcucggcugagggcg

SEQ ID NO: 564620 - RNA, 22 nt, Human
cagcagcucaggcuccuuccca

SEQ ID NO: 564621 - RNA, 22 nt, Human
gggaagugcccucuucaggaga

SEQ ID NO: 564622 - RNA, 17 nt, Human
gugcuggccuggggcuc

SEQ ID NO: 564623 - RNA, 22 nt, Human
aagggccacaugccauuuaaaa

SEQ ID NO: 564624 - RNA, 23 nt, Human
acauuacacgcaguaauugcccc

SEQ ID NO: 564625 - RNA, 22 nt, Human
ugguaccagcuguguguucacu

SEQ ID NO: 564626 - RNA, 22 nt, Human
ggaaugugcugacacgcgagag

SEQ ID NO: 564627 - RNA, 22 nt, Human
uuuccaaagguggcaggaacaa

SEQ ID NO: 564628 - RNA, 19 nt, Human
ggggcccggggucugcgag

SEQ ID NO: 564629 - RNA, 22 nt, Human
uucuccccgucucucugaggcc

SEQ ID NO: 564630 - RNA, 22 nt, Human
accccagaggcggaggcugcag

SEQ ID NO: 564631 - RNA, 22 nt, Human
gcagugacagacaacuguuuga

SEQ ID NO: 564632 - RNA, 22 nt, Human
auauggcuguugcacaucuaag

SEQ ID NO: 564633 - RNA, 22 nt, Human
gcagcccaggcucgcucacugc

SEQ ID NO: 564634 - RNA, 22 nt, Human
aucugucccuccucacagccuc

SEQ ID NO: 564635 - RNA, 22 nt, Human
uucccagauuggagggcagggg

SEQ ID NO: 564636 - RNA, 22 nt, Human
cagcugccuguauuguccucau

SEQ ID NO: 564637 - RNA, 22 nt, Human
uccgggagcugaacgucuugcg

SEQ ID NO: 564638 - RNA, 22 nt, Human
cgggagccucugggucacacug

SEQ ID NO: 564639 - RNA, 22 nt, Human
ccagcagccaccuucucgaaau

SEQ ID NO: 564640 - RNA, 22 nt, Human
ucagagaaguaggcuaauggug

SEQ ID NO: 564641 - RNA, 21 nt, Human
cacuccacuuagaacaggguu

SEQ ID NO: 564642 - RNA, 22 nt, Human
gagccaggcccguacuugcugu

SEQ ID NO: 564643 - RNA, 22 nt, Human
gucugcugacagagcauggacc

SEQ ID NO: 564644 - RNA, 20 nt, Human
uaugauaauuacaaaauagu

SEQ ID NO: 564645 - RNA, 22 nt, Human
uucuccucagcaaggcagcuuu

SEQ ID NO: 564646 - RNA, 22 nt, Human
aaggggaguuagugauaaaacc

SEQ ID NO: 564647 - RNA, 22 nt, Human
ccuuuuauauggcucaucacag

SEQ ID NO: 564648 - RNA, 22 nt, Human
cagggacugagauccagacugu

SEQ ID NO: 564649 - RNA, 22 nt, Human
cagcagcaggcgcacggccguc

SEQ ID NO: 564650 - RNA, 22 nt, Human
gcgcuccucccggcccuggugg

SEQ ID NO: 564651 - RNA, 22 nt, Human
ugugacagugccagcuucauag

SEQ ID NO: 564652 - RNA, 22 nt, Human
gugggaguggagcucagcaugu

SEQ ID NO: 564653 - RNA, 22 nt, Human
ccagcagcucccucaggguccg

SEQ ID NO: 564654 - RNA, 22 nt, Human
auucuugauauagauaguuaau

SEQ ID NO: 564655 - RNA, 22 nt, Human
uccuuucuucuucugcccaugg

SEQ ID NO: 564656 - RNA, 22 nt, Human
cugucuacagaugaaauaagca

SEQ ID NO: 564657 - RNA, 22 nt, Human
agccccaggcccggacgccucu

SEQ ID NO: 564658 - RNA, 22 nt, Human
uccaggagggggagccgugccg

SEQ ID NO: 564659 - RNA, 22 nt, Human
ucccgggcaggucgagcgagcc

SEQ ID NO: 564660 - RNA, 22 nt, Human
gccugagauuggacauuauuua

SEQ ID NO: 564661 - RNA, 22 nt, Human
cucaguguuaaagacuuuccag

SEQ ID NO: 564662 - RNA, 22 nt, Human
aaugugcugguaacugcuuugc

SEQ ID NO: 564663 - RNA, 22 nt, Human
gguggcagaggugcaucagccc

SEQ ID NO: 564664 - RNA, 23 nt, Human
uggcucugagcuuccugguggcc

SEQ ID NO: 564665 - RNA, 22 nt, Human
gauggugcaggugaagugcugg

SEQ ID NO: 564666 - RNA, 22 nt, Human
agaggcucuuugagcugggaga

SEQ ID NO: 564667 - RNA, 22 nt, Human
augcugugccuggaaagcggcu

SEQ ID NO: 564668 - RNA, 22 nt, Human
uguguuucucugaggggucccu

SEQ ID NO: 564669 - RNA, 22 nt, Human
cuaccugguacauagaaauguu

SEQ ID NO: 564670 - RNA, 22 nt, Human
cucagagagacaaugugggaca

SEQ ID NO: 564671 - RNA, 22 nt, Human
ccggcgucucuuccacuuccua

SEQ ID NO: 564672 - RNA, 22 nt, Human
aaaacuuucagggauacagaaa

SEQ ID NO: 564673 - RNA, 22 nt, Human
cucucuguuaugcuuucaugaa

SEQ ID NO: 564674 - RNA, 23 nt, Human
ugagagccuggcagccuggguuc

SEQ ID NO: 564675 - RNA, 22 nt, Human
gaggaggcuuccgggaggcacg

SEQ ID NO: 564676 - RNA, 22 nt, Human
ggcucugcugguaagaugccuc

SEQ ID NO: 564677 - RNA, 22 nt, Human
uguuuuaagggucaacugucac

SEQ ID NO: 564678 - RNA, 22 nt, Human
cagagcagaaaccugggugauu

SEQ ID NO: 564679 - RNA, 22 nt, Human
uggcugaggagagggcggaagu

SEQ ID NO: 564680 - RNA, 22 nt, Human
uggaaacacccacgcaugcaua

SEQ ID NO: 564681 - RNA, 22 nt, Human
gaggcuggacgugcauuucuac

SEQ ID NO: 564682 - RNA, 22 nt, Human
agggcccaccuuggugcugagg

SEQ ID NO: 564683 - RNA, 22 nt, Human
gugcgggccuggggguuucucu

SEQ ID NO: 564684 - RNA, 22 nt, Human
cuggcacaggauccgagaccuu

SEQ ID NO: 564685 - RNA, 22 nt, Human
ggcagaggaagcuggaaguggg

SEQ ID NO: 564686 - RNA, 22 nt, Human
acaggcgcacaugagggccgug

SEQ ID NO: 564687 - RNA, 23 nt, Human
gggugcugccuguagucaugcug

SEQ ID NO: 564688 - RNA, 22 nt, Human
uguccuguccuuccuggaaguc

SEQ ID NO: 564689 - RNA, 22 nt, Human
agcagcaccuguccucgcugcu

SEQ ID NO: 564690 - RNA, 22 nt, Human
accaggcccuccagcugcgugg

SEQ ID NO: 564691 - RNA, 22 nt, Human
ggucuggccuccgggcaggugg

SEQ ID NO: 564692 - RNA, 22 nt, Human
gagcuuuucccgucuuucucgu

SEQ ID NO: 564693 - RNA, 21 nt, Human
uccagcacagaugaccucccc

SEQ ID NO: 564694 - RNA, 22 nt, Human
ugucuucuaccuugacagcauu

SEQ ID NO: 564695 - RNA, 22 nt, Human
auggucacuucacccaugagcu

SEQ ID NO: 564696 - RNA, 22 nt, Human
agaaagcacccugcacuuucug

SEQ ID NO: 564697 - RNA, 22 nt, Human
accaugucauuuauuggccaaa

SEQ ID NO: 564698 - RNA, 22 nt, Human
gguuuguugggguccaggccca

SEQ ID NO: 564699 - RNA, 23 nt, Human
aguguucagcauguaguaaauac

SEQ ID NO: 564700 - RNA, 22 nt, Human
gcugugaaagcugccacacugu

SEQ ID NO: 564701 - RNA, 22 nt, Human
ggagcagggaauuacagcgcag

SEQ ID NO: 564702 - RNA, 21 nt, Human
aauuucagacccauuuugccu

SEQ ID NO: 564703 - RNA, 22 nt, Human
gcuucugcagagccguccugag

SEQ ID NO: 564704 - RNA, 22 nt, Human
ugaaacagucuccagacuugga

SEQ ID NO: 564705 - RNA, 22 nt, Human
ggggaccuuuccauuucugaga

SEQ ID NO: 564706 - RNA, 20 nt, Human
aggcccuccccacuguugcu

SEQ ID NO: 564707 - RNA, 22 nt, Human
gccgugcgugcgcaggugcugu

SEQ ID NO: 564708 - RNA, 22 nt, Human
gggaggugauuaggaccaugua

SEQ ID NO: 564709 - RNA, 22 nt, Human
aguaauggguugaaauuuaguu

SEQ ID NO: 564710 - RNA, 22 nt, Human
ccuggggaccugccucagcccu

SEQ ID NO: 564711 - RNA, 22 nt, Human
acagugcuaucaauagcuagaa

SEQ ID NO: 564712 - RNA, 22 nt, Human
auuuccagcagcauauuugucu

SEQ ID NO: 564713 - RNA, 22 nt, Human
aacaguaugugagauuuacaca

SEQ ID NO: 564714 - RNA, 22 nt, Human
cccaggcuggggcuccuccagc

SEQ ID NO: 564715 - RNA, 22 nt, Human
aagggugguguaggagaucaaa

SEQ ID NO: 564716 - RNA, 22 nt, Human
gcuuucagggucacugucaaca

SEQ ID NO: 564717 - RNA, 19 nt, Human
ugggcagugccagggcuua

SEQ ID NO: 564718 - RNA, 22 nt, Human
agccaggucaggaaagguccca

SEQ ID NO: 564719 - RNA, 22 nt, Human
cgcggucucuuuaaggcggguc

SEQ ID NO: 564720 - RNA, 22 nt, Human
guggcccaggcuuggcgcuggc

SEQ ID NO: 564721 - RNA, 22 nt, Human
gagaggaagccuucuguacuug

SEQ ID NO: 564722 - RNA, 22 nt, Human
gcugcuccgcagagugugugug

SEQ ID NO: 564723 - RNA, 22 nt, Human
uuccugagucgccgagucuaug

SEQ ID NO: 564724 - RNA, 22 nt, Human
gugaagaugccucaggugaccc

SEQ ID NO: 564725 - RNA, 22 nt, Human
gcagcuuuggagguggaacucu

SEQ ID NO: 564726 - RNA, 18 nt, Human
ucugugggaucagugagg

SEQ ID NO: 564727 - RNA, 22 nt, Human
uuugagaaacagacgaaagaca

SEQ ID NO: 564728 - RNA, 22 nt, Human
ccugucugaaggcagggggaug

SEQ ID NO: 564729 - RNA, 22 nt, Human
gaccaggagauuugagcuaggc

SEQ ID NO: 564730 - RNA, 22 nt, Human
cuggccagggugcgaucguggu

SEQ ID NO: 564731 - RNA, 22 nt, Human
uguccugugcacuguagcaugu

SEQ ID NO: 564732 - RNA, 22 nt, Human
gucgaucaccucguccuccgug

SEQ ID NO: 564733 - RNA, 22 nt, Human
ccagcugcgggcaucgagaguu

SEQ ID NO: 564734 - RNA, 22 nt, Human
uggcaauguggaaugguccagg

SEQ ID NO: 564735 - RNA, 22 nt, Human
gcagagcuggaacugguacuca

SEQ ID NO: 564736 - RNA, 22 nt, Human
ucugugggcauuuauaaucugg

SEQ ID NO: 564737 - RNA, 22 nt, Human
cucacagcugcuucaggaucca

SEQ ID NO: 564738 - RNA, 22 nt, Human
aggcggguuuaggacaaugcuu

SEQ ID NO: 564739 - RNA, 22 nt, Human
gcccucugguggccgccucggc

SEQ ID NO: 564740 - RNA, 22 nt, Human
gucuggaggaggaagaaggcac

SEQ ID NO: 564741 - RNA, 22 nt, Human
agguagcuggugcugggcuccu

SEQ ID NO: 564742 - RNA, 22 nt, Human
gcuggccugcgagggcaggcug

SEQ ID NO: 564743 - RNA, 22 nt, Human
agccacauggaccugaugcuag

SEQ ID NO: 564744 - RNA, 22 nt, Human
gggcucggcaucuguggacucu

SEQ ID NO: 564745 - RNA, 22 nt, Human
ucucuuaauuguaaugguuccu

SEQ ID NO: 564746 - RNA, 22 nt, Human
augaauaaaacauuuuaaucag

SEQ ID NO: 564747 - RNA, 22 nt, Human
uugggauacaucuugcugagcc

SEQ ID NO: 564748 - RNA, 22 nt, Human
uggcugaguuacgaacagagca

SEQ ID NO: 564749 - RNA, 22 nt, Human
guguacacuugaacugacgguu

SEQ ID NO: 564750 - RNA, 23 nt, Human
cugagggcuggucugaagucugc

SEQ ID NO: 564751 - RNA, 22 nt, Human
ucucucugcagcccgggacacu

SEQ ID NO: 564752 - RNA, 22 nt, Human
aagcagccagccaucaugcccg

SEQ ID NO: 564753 - RNA, 22 nt, Human
guuuuguucaugaacauugggu

SEQ ID NO: 564754 - RNA, 22 nt, Human
gcugucaggaacaugccuuggu

SEQ ID NO: 564755 - RNA, 22 nt, Human
ucaggggcuugaggugcauguc

SEQ ID NO: 564756 - RNA, 20 nt, Human
auacuuguuuucaggcuuuu

SEQ ID NO: 564757 - RNA, 22 nt, Human
cgaggagugugaaggcuugucg

SEQ ID NO: 564758 - RNA, 22 nt, Human
gugcaggugguuggcccagccg

SEQ ID NO: 564759 - RNA, 22 nt, Human
acaugacagugacuuuauaaga

SEQ ID NO: 564760 - RNA, 22 nt, Human
ggccgcggauuuucccgcuggc

SEQ ID NO: 564761 - RNA, 22 nt, Human
cauagacauugauagguuauau

SEQ ID NO: 564762 - RNA, 22 nt, Human
uccuggggaggucgaggcugag

SEQ ID NO: 564763 - RNA, 22 nt, Human
uuccaaggcugcuauuuguuuc

SEQ ID NO: 564764 - RNA, 22 nt, Human
uccugucucaguguauuugcag

SEQ ID NO: 564765 - RNA, 22 nt, Human
ugagucacuggcaaggcuuuga

SEQ ID NO: 564766 - RNA, 22 nt, Human
ggaagcaaauuccagaaccaca

SEQ ID NO: 564767 - RNA, 22 nt, Human
agcaggccugccaccucggggu

SEQ ID NO: 564768 - RNA, 22 nt, Human
ugaggagcaggguggcuuacuc

SEQ ID NO: 564769 - RNA, 22 nt, Human
ccgcguggcacccuccuggagg

SEQ ID NO: 564770 - RNA, 22 nt, Human
acucaucuuugaauuuucagua

SEQ ID NO: 564771 - RNA, 22 nt, Human
gcucuggcuacuguggcuaccg

SEQ ID NO: 564772 - RNA, 22 nt, Human
acggccgaugacuccagcaugg

SEQ ID NO: 564773 - RNA, 17 nt, Human
gcuccagaauucuaguc

SEQ ID NO: 564774 - RNA, 22 nt, Human
cccagaggcugaguugggagca

SEQ ID NO: 564775 - RNA, 22 nt, Human
gacggagcugguugcugcggcu

SEQ ID NO: 564776 - RNA, 23 nt, Human
ggucccaguggagaggccucacc

SEQ ID NO: 564777 - RNA, 21 nt, Human
ucagagggcccuggaggcuca

SEQ ID NO: 564778 - RNA, 22 nt, Human
ccagcaggaaagugacguuuga

SEQ ID NO: 564779 - RNA, 22 nt, Human
ggcgcucaguguugccccagag

SEQ ID NO: 564780 - RNA, 22 nt, Human
gagccucguggcggccacugcg

SEQ ID NO: 564781 - RNA, 22 nt, Human
gcgcugccucugcucuccccac

SEQ ID NO: 564782 - RNA, 22 nt, Human
aacccaggguggagguugcagu

SEQ ID NO: 564783 - RNA, 22 nt, Human
uccacagggaugccugcggcuu

SEQ ID NO: 564784 - RNA, 22 nt, Human
uuccuggccucuuccaccacca

SEQ ID NO: 564785 - RNA, 22 nt, Human
cucgcggcgcccgaagcccuug

SEQ ID NO: 564786 - RNA, 22 nt, Human
aaggcaguuaauuuggcuagaa

SEQ ID NO: 564787 - RNA, 21 nt, Human
uggcaggcagcuggaagcuug

SEQ ID NO: 564788 - RNA, 22 nt, Human
ccagugugcauuaucauguguc

SEQ ID NO: 564789 - RNA, 22 nt, Human
aaccagcacugcuggggccugc

SEQ ID NO: 564790 - RNA, 21 nt, Human
uggacauuuacccuucaggga

SEQ ID NO: 564791 - RNA, 22 nt, Human
ccagccagcugcccuuggggcc

SEQ ID NO: 564792 - RNA, 22 nt, Human
uggccgggaagggacagugugg

SEQ ID NO: 564793 - RNA, 22 nt, Human
gcgaguccacuggggggcgcag

SEQ ID NO: 564794 - RNA, 22 nt, Human
ugguccugagcaccagccugac

SEQ ID NO: 564795 - RNA, 22 nt, Human
ccagcagaagcucccgcugggu

SEQ ID NO: 564796 - RNA, 19 nt, Human
auagaguagaguaucuguu

SEQ ID NO: 564797 - RNA, 22 nt, Human
gauggaggagauggcagggugc

SEQ ID NO: 564798 - RNA, 22 nt, Human
agccucucuguuagucacuggg

SEQ ID NO: 564799 - RNA, 18 nt, Human
ucugagggugcgggagcu

SEQ ID NO: 564800 - RNA, 22 nt, Human
cuagcagaagcuccuugagggu

SEQ ID NO: 564801 - RNA, 22 nt, Human
ucaucuccauacggucucgcag

SEQ ID NO: 564802 - RNA, 22 nt, Human
ucccagugggaagcagcacgcu

SEQ ID NO: 564803 - RNA, 22 nt, Human
uugggcccugcucugaguugcu

SEQ ID NO: 564804 - RNA, 22 nt, Human
uucacguuguugaagaaaauac

SEQ ID NO: 564805 - RNA, 22 nt, Human
ccugaguucuuauuuccaguca

SEQ ID NO: 564806 - RNA, 22 nt, Human
aaaugcaugugcuauagaugug

SEQ ID NO: 564807 - RNA, 22 nt, Human
gggcccuggacguggcggcaga

SEQ ID NO: 564808 - RNA, 22 nt, Human
gugggggcaggcagugcuagga

SEQ ID NO: 564809 - RNA, 22 nt, Human
ugguuuacucuguaaaccagga

SEQ ID NO: 564810 - RNA, 22 nt, Human
uggagccagcaggacucagagg

SEQ ID NO: 564811 - RNA, 22 nt, Human
agacugugagaagauggcugcg

SEQ ID NO: 564812 - RNA, 22 nt, Human
uaggcagggauuaggguugauu

SEQ ID NO: 564813 - RNA, 22 nt, Human
cccgaccucgcaaagcgcacuc

SEQ ID NO: 564814 - RNA, 22 nt, Human
guagagcagggagcaggaagcu

SEQ ID NO: 564815 - RNA, 22 nt, Human
acccaggucucucgacuucugg

SEQ ID NO: 564816 - RNA, 22 nt, Human
cagcaguguacaaggugucaga

SEQ ID NO: 564817 - RNA, 22 nt, Human
cagacagagucuucccaucagu

SEQ ID NO: 564818 - RNA, 22 nt, Human
ugucuuacagcaaucuguucug

SEQ ID NO: 564819 - RNA, 22 nt, Human
cacuuuuaacaggagaauuccc

SEQ ID NO: 564820 - RNA, 22 nt, Human
gcuguaacuuuuucauuuucaa

SEQ ID NO: 564821 - RNA, 22 nt, Human
uaaaguucuuagaacaaggccu

SEQ ID NO: 564822 - RNA, 22 nt, Human herpesvirus 5
auagccuccggcugucaugggu

SEQ ID NO: 564823 - RNA, 22 nt, Human herpesvirus 5
auggagugagaggccggaccac

SEQ ID NO: 564824 - RNA, 22 nt, Human herpesvirus 5
auguggacauggccuaugccug

SEQ ID NO: 564825 - RNA, 22 nt, Human herpesvirus 5
aucaccaugguaauagcgauga

SEQ ID NO: 564826 - RNA, 21 nt, Human herpesvirus 5
aucuccucucgcucggcggcg

SEQ ID NO: 564827 - RNA, 22 nt, Human herpesvirus 5
aaagcaaggcacguucauaaug

SEQ ID NO: 564828 - RNA, 22 nt, Human herpesvirus 5
aaaggcuaagucggaaaacucg

SEQ ID NO: 564829 - RNA, 22 nt, Human herpesvirus 5
gagcagccggagcccgcacacu

SEQ ID NO: 564830 - RNA, 22 nt, Human herpesvirus 5
gagccgcagauccgagagccuc

SEQ ID NO: 564831 - RNA, 22 nt, Human herpesvirus 5
acgccgggucgcaccgaggugg

SEQ ID NO: 564832 - RNA, 21 nt, Human herpesvirus 5
aaugugaagaugguggaccgc

SEQ ID NO: 564833 - RNA, 22 nt, Human herpesvirus 5
augucgcagccggucuagcagg

SEQ ID NO: 564834 - RNA, 23 nt, Human herpesvirus 5
auuugaguauacgguuaauguau

SEQ ID NO: 564835 - RNA, 22 nt, Human herpesvirus 5
caaaacugucagcggcgcucag

SEQ ID NO: 564836 - RNA, 22 nt, Human herpesvirus 5
caaagagaccccgcugugccgc

SEQ ID NO: 564837 - RNA, 22 nt, Human herpesvirus 5
caaguauguggaacagcucgug

SEQ ID NO: 564838 - RNA, 22 nt, Human herpesvirus 5
caaguucaccugguggaaacga

SEQ ID NO: 564839 - RNA, 22 nt, Human herpesvirus 5
agguggagauucuaaagccacg

SEQ ID NO: 564840 - RNA, 22 nt, Human herpesvirus 5
agguugaaaaaccgcguaucug

SEQ ID NO: 564841 - RNA, 22 nt, Human herpesvirus 5
aguggcaggcccggguucgcga

SEQ ID NO: 564842 - RNA, 22 nt, Human herpesvirus 5
auagauucaacgugaugagacc

SEQ ID NO: 564843 - RNA, 22 nt, Human herpesvirus 5
augaaaaacacgacgaaagcgu

SEQ ID NO: 564844 - RNA, 22 nt, Human herpesvirus 5
agccgugcugggccucaacgcg

SEQ ID NO: 564845 - RNA, 22 nt, Human herpesvirus 5
acuuggaacgccgcggcgcaca

SEQ ID NO: 564846 - RNA, 22 nt, Human herpesvirus 5
agacgcagugguccgucggugu

SEQ ID NO: 564847 - RNA, 22 nt, Human herpesvirus 5
cagggcgcuuuggcaaaaggcg

SEQ ID NO: 564848 - RNA, 22 nt, Human herpesvirus 5
caguugacugagauugagaucc

SEQ ID NO: 564849 - RNA, 22 nt, Human herpesvirus 5
ccauguuguccaaggguaucau

SEQ ID NO: 564850 - RNA, 21 nt, Human herpesvirus 5
cccaacaggaucaucgaccuc

SEQ ID NO: 564851 - RNA, 22 nt, Human herpesvirus 5
ccagagcugcuaggaaccgguc

SEQ ID NO: 564852 - RNA, 22 nt, Human herpesvirus 5
cggcgguuucgccaccgcugac

SEQ ID NO: 564853 - RNA, 22 nt, Human herpesvirus 5
cggugggggcgugccccgcaga

SEQ ID NO: 564854 - RNA, 22 nt, Human herpesvirus 5
cguggaugagaucguagagggc

SEQ ID NO: 564855 - RNA, 23 nt, Human herpesvirus 5
cucaguugucaaguccgagugcc

SEQ ID NO: 564856 - RNA, 22 nt, Human herpesvirus 5
cuccccaacuacuacuaccgug

SEQ ID NO: 564857 - RNA, 22 nt, Human herpesvirus 5
cugcaggaaccaguugugcgga

SEQ ID NO: 564858 - RNA, 22 nt, Human herpesvirus 5
cugcgccuccagccgcuccgag

SEQ ID NO: 564859 - RNA, 22 nt, Human herpesvirus 5
cuggaaauggacuuuugcucuc

SEQ ID NO: 564860 - RNA, 18 nt, Human herpesvirus 5
cgagaacgcgcccuuucc

SEQ ID NO: 564861 - RNA, 22 nt, Human herpesvirus 5
cugggaaaauugaaagacacgc

SEQ ID NO: 564862 - RNA, 22 nt, Human herpesvirus 5
ccaacgcaacagaccuaggcac

SEQ ID NO: 564863 - RNA, 22 nt, Human herpesvirus 5
gacggguguauaccagaugugg

SEQ ID NO: 564864 - RNA, 22 nt, Human herpesvirus 5
acguucaaccccauguuuuuca

SEQ ID NO: 564865 - RNA, 22 nt, Human herpesvirus 5
aaucauccuguacgaagaggaa

SEQ ID NO: 564866 - RNA, 22 nt, Human herpesvirus 5
agaggggacgucggggcccucc

SEQ ID NO: 564867 - RNA, 22 nt, Human herpesvirus 5
agaggucacucgcggcgugccg

SEQ ID NO: 564868 - RNA, 21 nt, Human herpesvirus 5
acuggcccgacaagcggugca

SEQ ID NO: 564869 - RNA, 22 nt, Human herpesvirus 5
aggaacuaucuucaucgggccg

SEQ ID NO: 564870 - RNA, 22 nt, Human herpesvirus 5
agcagacaguguaguucuugcc

SEQ ID NO: 564871 - RNA, 22 nt, Human herpesvirus 5
agcagcgugugcaguucggcgu

SEQ ID NO: 564872 - RNA, 22 nt, Human herpesvirus 5
agccgcgcaugacgcaggugag

SEQ ID NO: 564873 - RNA, 22 nt, Human herpesvirus 5
aacgcuuucgucguguuuuuca

SEQ ID NO: 564874 - RNA, 22 nt, Human herpesvirus 5
aaucacagguaccguaucuauu

SEQ ID NO: 564875 - RNA, 22 nt, Human herpesvirus 5
acaccuccguuuugagcguguu

SEQ ID NO: 564876 - RNA, 22 nt, Human herpesvirus 5
acagggaaugggaaaaacacgc

SEQ ID NO: 564877 - RNA, 22 nt, Human herpesvirus 5
aggccagaggcuaagccgaaac

SEQ ID NO: 564878 - RNA, 21 nt, Human herpesvirus 5
aguggcaggcccggguucgcg

SEQ ID NO: 564879 - RNA, 22 nt, Human herpesvirus 5
agugugagcacuacccuaguuu

SEQ ID NO: 564880 - RNA, 22 nt, Human herpesvirus 5
aggcggacgagguagagguuug

SEQ ID NO: 564881 - RNA, 22 nt, Human herpesvirus 5
agggcauucaguugaugggugg

SEQ ID NO: 564882 - RNA, 22 nt, Human herpesvirus 5
acuucuuucgcucccucgaccc

SEQ ID NO: 564883 - RNA, 22 nt, Human herpesvirus 5
accagccguagccaaucccgau

SEQ ID NO: 564884 - RNA, 22 nt, Human herpesvirus 5
agccguguuuuuugcacaauuu

SEQ ID NO: 564885 - RNA, 22 nt, Human herpesvirus 5
gguccgagacacccagguuguu

SEQ ID NO: 564886 - RNA, 22 nt, Human herpesvirus 5
ggucugcgcgacauuuuggguc

SEQ ID NO: 564887 - RNA, 22 nt, Human herpesvirus 5
guacuuuccgcuguuuuccguc

SEQ ID NO: 564888 - RNA, 22 nt, Human herpesvirus 5
uuuuuccacugggcggccgcac

SEQ ID NO: 564889 - RNA, 22 nt, Human herpesvirus 5
uuuuugugcuggaacuucccuc

SEQ ID NO: 564890 - RNA, 22 nt, Human herpesvirus 5
uucagcgucucauuugucuuua

SEQ ID NO: 564891 - RNA, 22 nt, Human herpesvirus 5
ugucggagcugucggcgcuggg

SEQ ID NO: 564892 - RNA, 22 nt, Human herpesvirus 5
gccgaggacgccgugggcggcg

SEQ ID NO: 564893 - RNA, 22 nt, Human herpesvirus 5
uuucugauacuggaucgucugu

SEQ ID NO: 564894 - RNA, 22 nt, Human herpesvirus 5
gcaguugcaguagagcaauuua

SEQ ID NO: 564895 - RNA, 22 nt, Human herpesvirus 5
gcgcugaucugcagcugcacgg

SEQ ID NO: 564896 - RNA, 22 nt, Human herpesvirus 5
gcgcuggaggaccugcugccca

SEQ ID NO: 564897 - RNA, 22 nt, Human herpesvirus 5
gggccacgucgggcugcugccg

SEQ ID NO: 564898 - RNA, 23 nt, Human herpesvirus 5
gcgggcacugggucugcacgacg

SEQ ID NO: 564899 - RNA, 22 nt, Human herpesvirus 5
gcggggucguggcggcuguguc

SEQ ID NO: 564900 - RNA, 22 nt, Human herpesvirus 5
uccaaggaucggaaaguagcgu

SEQ ID NO: 564901 - RNA, 22 nt, Human herpesvirus 5
guggguucaugcugccuaucua

SEQ ID NO: 564902 - RNA, 20 nt, Human herpesvirus 5
ucuccacggaucaggccucg

SEQ ID NO: 564903 - RNA, 22 nt, Human herpesvirus 5
ucuuuccagguguuuucaacgu

SEQ ID NO: 564904 - RNA, 22 nt, Human herpesvirus 5
ugauccugagaacgucaucuau

SEQ ID NO: 564905 - RNA, 22 nt, Human herpesvirus 5
uguaaggaagcuuuuaucgugc

SEQ ID NO: 564906 - RNA, 22 nt, Human herpesvirus 5
uguggcgccagcgaaccggcgg

SEQ ID NO: 564907 - RNA, 22 nt, Human herpesvirus 5
uguucgaugaucguauguuaca

SEQ ID NO: 564908 - RNA, 22 nt, Human herpesvirus 5
ugguccuuuuguuggugccgcc

SEQ ID NO: 564909 - RNA, 22 nt, Human herpesvirus 5
ugguuugggguggcauccaaac

SEQ ID NO: 564910 - RNA, 22 nt, Human herpesvirus 5
ugaggcucucggaucugcggcu

SEQ ID NO: 564911 - RNA, 22 nt, Human herpesvirus 5
ugcgcuguuacacggaauccag

SEQ ID NO: 564912 - RNA, 22 nt, Human herpesvirus 5
ugcuggagcgcgacgacgaggc

SEQ ID NO: 564913 - RNA, 22 nt, Human herpesvirus 5
uuccuuuccuguuuuguacucg

SEQ ID NO: 564914 - RNA, 22 nt, Human herpesvirus 5
uugaccagcagcuugcagcgcu

SEQ ID NO: 564915 - RNA, 22 nt, Human herpesvirus 5
uucagcuucauaagaugucugc

SEQ ID NO: 564916 - RNA, 22 nt, Human herpesvirus 5
ucuagagggaagguggggaaug

SEQ ID NO: 564917 - RNA, 22 nt, Human herpesvirus 5
ucucaccagaaugcuaguuugu

SEQ ID NO: 564918 - RNA, 22 nt, Human herpesvirus 5
ucugcagcucgucggccggcgu

SEQ ID NO: 564919 - RNA, 23 nt, Human herpesvirus 5
ucugcggaggaacagcaacggcg

SEQ ID NO: 564920 - RNA, 22 nt, Human herpesvirus 5
gcgaggacacgcagacggcgga

SEQ ID NO: 564921 - RNA, 22 nt, Human herpesvirus 5
gggcgagacggugcaggagucc

SEQ ID NO: 564922 - RNA, 22 nt, Human herpesvirus 5
ggcguuggccuguggauagauu

SEQ ID NO: 564923 - RNA, 22 nt, Human herpesvirus 5
ggcccucgcucgucgugccucu

SEQ ID NO: 564924 - RNA, 22 nt, Human herpesvirus 5
gucacagagcgugcugacgugg

SEQ ID NO: 564925 - RNA, 22 nt, Human herpesvirus 5
guggccgcuaaauauggcgacg

SEQ ID NO: 564926 - RNA, 22 nt, Human herpesvirus 5
guggcgcuucgcuacgcgguga

SEQ ID NO: 564927 - RNA, 22 nt, Human herpesvirus 5
guaaagacaaaugagacgcuga

SEQ ID NO: 564928 - RNA, 22 nt, Human herpesvirus 5
cugcgcacgcucucggucacgg

SEQ ID NO: 564929 - RNA, 21 nt, Human herpesvirus 5
gaacaugaugccguugcagac

SEQ ID NO: 564930 - RNA, 22 nt, Human herpesvirus 5
gacuaggucgucuuggaagccg

SEQ ID NO: 564931 - RNA, 22 nt, Human herpesvirus 5
gacuucuacggaguuuucccuc

SEQ ID NO: 564932 - RNA, 22 nt, Human herpesvirus 5
gagacgcacgacaguauacgug

SEQ ID NO: 564933 - RNA, 22 nt, Human herpesvirus 5
caaaauaucgaacucuucgcgg

SEQ ID NO: 564934 - RNA, 22 nt, Human herpesvirus 5
caaguaagaaacaggaugaggc

SEQ ID NO: 564935 - RNA, 22 nt, Human herpesvirus 5
auguccaccucgaaggugucgg

SEQ ID NO: 564936 - RNA, 22 nt, Human herpesvirus 5
augucucccuuggagaacgucg

SEQ ID NO: 564937 - RNA, 22 nt, Human herpesvirus 5
aucugcuguagauaucauaacg

SEQ ID NO: 564938 - RNA, 22 nt, Human herpesvirus 5
cuccuccuccgacugcgguggu

SEQ ID NO: 564939 - RNA, 22 nt, Human herpesvirus 5
cugagagucgccuguacgacgc

SEQ ID NO: 564940 - RNA, 22 nt, Human herpesvirus 5
cuggagaacgccggggcagcag

SEQ ID NO: 564941 - RNA, 22 nt, Human herpesvirus 5
cgagcugcugaugugccgucgc

SEQ ID NO: 564942 - RNA, 22 nt, Human herpesvirus 5
cgagcugucggaauccucgucg

SEQ ID NO: 564943 - RNA, 22 nt, Human herpesvirus 5
cucaccuggaccggugguacug

SEQ ID NO: 564944 - RNA, 20 nt, Human herpesvirus 5
cgucaagcgguuauaggugc

SEQ ID NO: 564945 - RNA, 22 nt, Human herpesvirus 5
cguccucccgcccaggaccugu

SEQ ID NO: 564946 - RNA, 22 nt, Human herpesvirus 5
cguuguaaacaagcuauugcug

SEQ ID NO: 564947 - RNA, 22 nt, Human herpesvirus 5
cgccugugcuuuguuacgacgg

SEQ ID NO: 564948 - RNA, 19 nt, Human herpesvirus 5
cgcgagcggcggacuuggc

SEQ ID NO: 564949 - RNA, 22 nt, Human herpesvirus 5
cgcgcaggggcuccgacguggc

SEQ ID NO: 564950 - RNA, 22 nt, Human herpesvirus 5
cggagacugggcugcaggcggc

SEQ ID NO: 564951 - RNA, 22 nt, Human herpesvirus 5
cggcggcgcccgagcgggacau

SEQ ID NO: 564952 - RNA, 22 nt, Human herpesvirus 5
ccccucuuucugcgucguggcu

SEQ ID NO: 564953 - RNA, 22 nt, Human herpesvirus 5
ccugccgcgucaccgugugucc

SEQ ID NO: 564954 - RNA, 22 nt, Human herpesvirus 5
ccagcaguaugacgugcgaugg

SEQ ID NO: 564955 - RNA, 22 nt, Human herpesvirus 5
uuucucaucaaccugucgaugg

SEQ ID NO: 564956 - RNA, 22 nt, Human herpesvirus 5
ugcguuccagccuggccgcgcg

SEQ ID NO: 564957 - RNA, 22 nt, Human herpesvirus 5
ugcuuuuauugcugauaacugu

SEQ ID NO: 564958 - RNA, 22 nt, Human herpesvirus 5
uggaacaccaaauuguacgugg

SEQ ID NO: 564959 - RNA, 22 nt, Human herpesvirus 5
uggacgccgccucugccggcuc

SEQ ID NO: 564960 - RNA, 22 nt, Human herpesvirus 5
uggagcgucagacccagggcgc

SEQ ID NO: 564961 - RNA, 22 nt, Human herpesvirus 5
uggcggguuccgagggcggucc

SEQ ID NO: 564962 - RNA, 22 nt, Human herpesvirus 5
uggcguggcgcacgcagcgacc

SEQ ID NO: 564963 - RNA, 22 nt, Human herpesvirus 5
uguuguugcgggauguucaagg

SEQ ID NO: 564964 - RNA, 22 nt, Human herpesvirus 5
uuaaagcaaaaagucuggugag

SEQ ID NO: 564965 - RNA, 22 nt, Human herpesvirus 5
ugucugcucauucuggcggcgc

SEQ ID NO: 564966 - RNA, 23 nt, Human herpesvirus 5
ugagcagcaaaacgaccagaauc

SEQ ID NO: 564967 - RNA, 21 nt, Human herpesvirus 5
ucuauacauuguaguucauca

SEQ ID NO: 564968 - RNA, 20 nt, Human herpesvirus 5
ucuccaggcugucggccucg

SEQ ID NO: 564969 - RNA, 22 nt, Human herpesvirus 5
uccagucucuaacugccguguu

SEQ ID NO: 564970 - RNA, 22 nt, Human herpesvirus 5
ucccuagccagcgugccgugua

SEQ ID NO: 564971 - RNA, 22 nt, Human herpesvirus 5
uaggcgcacgauggccaugcgc

SEQ ID NO: 564972 - RNA, 22 nt, Human herpesvirus 5
uagaagaagcaccggcggccgc

SEQ ID NO: 564973 - RNA, 22 nt, Human herpesvirus 5
gaugagcagcuccaacagcgug

SEQ ID NO: 564974 - RNA, 22 nt, Human herpesvirus 5
gcaggugguucaccacguccgu

SEQ ID NO: 564975 - RNA, 23 nt, Human herpesvirus 5
gccggcaaaauguagguggcguu

SEQ ID NO: 564976 - RNA, 22 nt, Human herpesvirus 5
gccuccggaucacaugguuacu

SEQ ID NO: 564977 - RNA, 20 nt, Human herpesvirus 5
gcgcaggauauggcagccug

SEQ ID NO: 564978 - RNA, 22 nt, Human herpesvirus 5
gcgccuggacguugcacgcggc

SEQ ID NO: 564979 - RNA, 21 nt, Human herpesvirus 5
uacgacaucaccgaggcggag

SEQ ID NO: 564980 - RNA, 22 nt, Human herpesvirus 5
uacgauuucaaaaugugcaauc

SEQ ID NO: 564981 - RNA, 22 nt, Human herpesvirus 5
guucccaggccgagaacgcgca

SEQ ID NO: 564982 - RNA, 18 nt, Human herpesvirus 5
guucuccaauggauacgu

SEQ ID NO: 564983 - RNA, 22 nt, Human herpesvirus 5
guuguccuccucguccucgugg

SEQ ID NO: 564984 - RNA, 20 nt, Human herpesvirus 5
guuuaacgugagguugaaga

SEQ ID NO: 564985 - RNA, 22 nt, Human herpesvirus 5
gcucgcaguaguggcgcagcug

SEQ ID NO: 564986 - RNA, 22 nt, Human herpesvirus 5
gucucuggccggcgccagaccg

SEQ ID NO: 564987 - RNA, 19 nt, Human herpesvirus 5
guauuaaggccugaacgcc

SEQ ID NO: 564988 - RNA, 22 nt, Human herpesvirus 5
caccgcccauggguuccugcug

SEQ ID NO: 564989 - RNA, 22 nt, Human herpesvirus 5
cacggccagcgccuugucgcgg

SEQ ID NO: 564990 - RNA, 22 nt, Human herpesvirus 5
augaagggccagacgccuuuga

SEQ ID NO: 564991 - RNA, 22 nt, Human herpesvirus 5
augucacaggcgcccgaggcgu

SEQ ID NO: 564992 - RNA, 22 nt, Human herpesvirus 5
cuaccugaccguagcgguuagc

SEQ ID NO: 564993 - RNA, 22 nt, Human herpesvirus 5
cugcaggaaacguuggcgacgg

SEQ ID NO: 564994 - RNA, 22 nt, Human herpesvirus 5
gagaggaguggcugcuguguug

SEQ ID NO: 564995 - RNA, 22 nt, Human herpesvirus 5
cuucagccaucaucccgaguuc

SEQ ID NO: 564996 - RNA, 22 nt, Human herpesvirus 5
cccagguuucuggagauuguac

SEQ ID NO: 564997 - RNA, 19 nt, Human herpesvirus 5
cgcggagccaggcugcggc

SEQ ID NO: 564998 - RNA, 22 nt, Human herpesvirus 5
cgacgcagaaccacgcgcaguu

SEQ ID NO: 564999 - RNA, 22 nt, Human herpesvirus 5
ccugcgugccagucuguccguc

SEQ ID NO: 565000 - RNA, 22 nt, Human herpesvirus 5
cagugucagcgccgagccgcgg

SEQ ID NO: 565001 - RNA, 22 nt, Human herpesvirus 5
ccaggagcucaucauguucggg

SEQ ID NO: 565002 - RNA, 22 nt, Human herpesvirus 5
cggcgaccgcggacucgccucg

SEQ ID NO: 565003 - RNA, 22 nt, Human herpesvirus 5
cgggccaguagcagagguggac

SEQ ID NO: 565004 - RNA, 23 nt, Human herpesvirus 5
cucgggcgccugugacaugaggc

SEQ ID NO: 565005 - RNA, 22 nt, Human herpesvirus 5
cugagcaagaucaguuggcugg

SEQ ID NO: 565006 - RNA, 22 nt, Human herpesvirus 5
cugcugugaaaacgggcacggu

SEQ ID NO: 565007 - RNA, 22 nt, Human herpesvirus 5
ccugaugcuggucaugguauau

SEQ ID NO: 565008 - RNA, 23 nt, Human herpesvirus 5
ccuucgguaucaucgucuuugcu

SEQ ID NO: 565009 - RNA, 22 nt, Human herpesvirus 5
cgaggccgacagccuggagaug

SEQ ID NO: 565010 - RNA, 22 nt, Human herpesvirus 5
cgaggccugauccguggagaac

SEQ ID NO: 565011 - RNA, 21 nt, Human herpesvirus 5
cgccugucuccugggcgagca

SEQ ID NO: 565012 - RNA, 22 nt, Human herpesvirus 5
cggcagcugcagcacguggaga

SEQ ID NO: 565013 - RNA, 22 nt, Human herpesvirus 5
gaccucuggccagucgugcgcg

SEQ ID NO: 565014 - RNA, 22 nt, Human herpesvirus 5
cuucuugaccguuaucacggug

SEQ ID NO: 565015 - RNA, 22 nt, Human herpesvirus 5
gcaagugcuucagcagcagcuu

SEQ ID NO: 565016 - RNA, 22 nt, Human herpesvirus 5
gccaugucguuucgcgucggca

SEQ ID NO: 565017 - RNA, 22 nt, Human herpesvirus 5
aaacucaacggggugcagcgcu

SEQ ID NO: 565018 - RNA, 19 nt, Human herpesvirus 5
aagaguucgauauuuugcg

SEQ ID NO: 565019 - RNA, 22 nt, Human herpesvirus 5
aaggauggcaacuuggacacgu

SEQ ID NO: 565020 - RNA, 22 nt, Human herpesvirus 5
acacggcaguuagagacuggag

SEQ ID NO: 565021 - RNA, 22 nt, Human herpesvirus 5
acgcggccccgcaccggcggug

SEQ ID NO: 565022 - RNA, 22 nt, Human herpesvirus 5
agguggugugcgaucccuucca

SEQ ID NO: 565023 - RNA, 20 nt, Human herpesvirus 5
agguugagccacccgccgca

SEQ ID NO: 565024 - RNA, 22 nt, Human herpesvirus 5
ucgugcagccgcaugagacgug

SEQ ID NO: 565025 - RNA, 22 nt, Human herpesvirus 5
ucgcggcggcucccucucggcg

SEQ ID NO: 565026 - RNA, 22 nt, Human herpesvirus 5
guccgcacagagguaacaacgu

SEQ ID NO: 565027 - RNA, 19 nt, Human herpesvirus 5
gaucucuggcaucaugaga

SEQ ID NO: 565028 - RNA, 22 nt, Human herpesvirus 5
gccacgcgauuggccgucggcg

SEQ ID NO: 565029 - RNA, 22 nt, Human herpesvirus 5
gccgugugggaaugacggugau

SEQ ID NO: 565030 - RNA, 22 nt, Human herpesvirus 5
gcugggaucguugcgguugucg

SEQ ID NO: 565031 - RNA, 22 nt, Human herpesvirus 5
gcugugccugucauccacuugg

SEQ ID NO: 565032 - RNA, 22 nt, Human herpesvirus 5
ggcgaccagaagcccggugccg

SEQ ID NO: 565033 - RNA, 22 nt, Human herpesvirus 5
ggcgugaccacgucaccgugcc

SEQ ID NO: 565034 - RNA, 22 nt, Human herpesvirus 5
ggcgugcgcgaccccuagucgg

SEQ ID NO: 565035 - RNA, 22 nt, Human herpesvirus 5
gguacuugacgcgggugcgcgu

SEQ ID NO: 565036 - RNA, 22 nt, Human herpesvirus 5
ggaggcuuucgccacaccuauc

SEQ ID NO: 565037 - RNA, 22 nt, Human herpesvirus 5
ggcaagccgagcgggaggcggu

SEQ ID NO: 565038 - RNA, 22 nt, Human herpesvirus 5
guggcgguaggguaugugucug

SEQ ID NO: 565039 - RNA, 23 nt, Human herpesvirus 5
uggggcaguuugagcagcccacc

SEQ ID NO: 565040 - RNA, 22 nt, Human herpesvirus 5
uucuggucguuuugcugcucau

SEQ ID NO: 565041 - RNA, 22 nt, Human herpesvirus 5
ugugaagcagcaacccgaacgc

SEQ ID NO: 565042 - RNA, 22 nt, Human herpesvirus 5
ugugaucugggcagcggcugcg

SEQ ID NO: 565043 - RNA, 22 nt, Human herpesvirus 5
gaggagcgcauguucguggggu

SEQ ID NO: 565044 - RNA, 22 nt, Human herpesvirus 5
ugcugauaacuguuguacugua

SEQ ID NO: 565045 - RNA, 22 nt, Human herpesvirus 5
ugccugugucuaggcugcucuc

SEQ ID NO: 565046 - RNA, 20 nt, Human herpesvirus 5
ugcgccagguaguaaagcac

SEQ ID NO: 565047 - RNA, 22 nt, Human herpesvirus 5
ucuuuccaggugucuucaacga

SEQ ID NO: 565048 - RNA, 22 nt, Human herpesvirus 5
ucuuuuuucaauacgucaaggu

SEQ ID NO: 565049 - RNA, 22 nt, Human herpesvirus 5
ugaagcggagugcaucucgagu

SEQ ID NO: 565050 - RNA, 22 nt, Human herpesvirus 5
ugcagaucaucaugucgcugcu

SEQ ID NO: 565051 - RNA, 22 nt, Human herpesvirus 5
ggagcggggcguccgaaggcga

SEQ ID NO: 565052 - RNA, 22 nt, Human herpesvirus 5
ggagugacggacggccaguacg

SEQ ID NO: 565053 - RNA, 22 nt, Human herpesvirus 5
ggcacggucucgcacgccaccu

SEQ ID NO: 565054 - RNA, 22 nt, Human herpesvirus 5
gguuugcuuccuauauagugga

SEQ ID NO: 565055 - RNA, 22 nt, Human herpesvirus 5
gggucccggcacgggccgagga

SEQ ID NO: 565056 - RNA, 20 nt, Human herpesvirus 5
gggauuguugccggccaggu

SEQ ID NO: 565057 - RNA, 22 nt, Human herpesvirus 5
gucugcaggacggcgcucguuc

SEQ ID NO: 565058 - RNA, 22 nt, Human herpesvirus 5
gugcacgcgcugcuuucgcacg

SEQ ID NO: 565059 - RNA, 22 nt, Human herpesvirus 5
guggaugagggcucuucacggu

SEQ ID NO: 565060 - RNA, 17 nt, Human herpesvirus 5
uaguggggcccuugugu

SEQ ID NO: 565061 - RNA, 22 nt, Human herpesvirus 5
ucggaggcgugcucguaucccg

SEQ ID NO: 565062 - RNA, 20 nt, Human herpesvirus 5
uaugcuggaucaagaucagc

SEQ ID NO: 565063 - RNA, 22 nt, Human herpesvirus 5
ugcagaucaucaugucgcugcu

SEQ ID NO: 565064 - RNA, 22 nt, Human herpesvirus 5
ugaugcugugcaauaaaauuuu

SEQ ID NO: 565065 - RNA, 23 nt, Human herpesvirus 5
ugagcagcaaaacgaccagaauc

SEQ ID NO: 565066 - RNA, 22 nt, Human herpesvirus 5
ugacaagccugacgagagcguu

SEQ ID NO: 565067 - RNA, 22 nt, Human herpesvirus 5
ugauagaacuguuguauacgaa

SEQ ID NO: 565068 - RNA, 22 nt, Human herpesvirus 5
uaggcgcacgauggccaugcgc

SEQ ID NO: 565069 - RNA, 20 nt, Human herpesvirus 5
uauccguguccaccaucggg

SEQ ID NO: 565070 - RNA, 22 nt, Human herpesvirus 5
uccccguagccggccuacggcg

SEQ ID NO: 565071 - RNA, 22 nt, Human herpesvirus 5
ucaucguuugggguguagaauu

SEQ ID NO: 565072 - RNA, 22 nt, Human herpesvirus 5
uccaaggaucggaaaguagcgu

SEQ ID NO: 565073 - RNA, 22 nt, Human herpesvirus 5
uccgccacucgucagcucgccg

SEQ ID NO: 565074 - RNA, 22 nt, Human herpesvirus 5
uccgccguguuucucggcguac

SEQ ID NO: 565075 - RNA, 22 nt, Human herpesvirus 5
ucguuuccaccaggugaacuug

SEQ ID NO: 565076 - RNA, 22 nt, Human herpesvirus 5
ucguuuucagcaggaacccaug

SEQ ID NO: 565077 - RNA, 22 nt, Human herpesvirus 5
uccgcguguaaugcacgcggug

SEQ ID NO: 565078 - RNA, 22 nt, Human herpesvirus 5
ucucaccagaaugcuaguuugu

SEQ ID NO: 565079 - RNA, 22 nt, Human herpesvirus 5
ucucacgggaaggcuaguuaga

SEQ ID NO: 565080 - RNA, 22 nt, Human herpesvirus 5
ucuaacuagccuucccgugaga

SEQ ID NO: 565081 - RNA, 22 nt, Human herpesvirus 5
ucuagagggaagguggggaaug

SEQ ID NO: 565082 - RNA, 20 nt, Human herpesvirus 5
ucuccaggcugucggccucg

SEQ ID NO: 565083 - RNA, 22 nt, Human herpesvirus 5
ucugcagcucgucggccggcgu

SEQ ID NO: 565084 - RNA, 21 nt, Human herpesvirus 5
ucugcgcgacauuuuggguca

SEQ ID NO: 565085 - RNA, 22 nt, Human herpesvirus 5
ucugcgcggcgacagcugcuuu

SEQ ID NO: 565086 - RNA, 23 nt, Human herpesvirus 5
ucugcggaggaacagcaacggcg

SEQ ID NO: 565087 - RNA, 22 nt, Human herpesvirus 5
ucuuuccaggugucuucaacga

SEQ ID NO: 565088 - RNA, 22 nt, Human herpesvirus 5
ucuuuccagguguuuucaacgu

SEQ ID NO: 565089 - RNA, 22 nt, Human herpesvirus 5
ucuuuuuucaauacgucaaggu

SEQ ID NO: 565090 - RNA, 20 nt, Human herpesvirus 5
gauuugaugcgcuagcguca

SEQ ID NO: 565091 - RNA, 22 nt, Human herpesvirus 5
gaugagcagcuccaacagcgug

SEQ ID NO: 565092 - RNA, 22 nt, Human herpesvirus 5
gauaggugugacgaugucuuua

SEQ ID NO: 565093 - RNA, 22 nt, Human herpesvirus 5
gagcucgccggcggcgaaacaa

SEQ ID NO: 565094 - RNA, 22 nt, Human herpesvirus 5
gagccgcagauccgagagccuc

SEQ ID NO: 565095 - RNA, 22 nt, Human herpesvirus 5
gaggagcgcauguucguggggu

SEQ ID NO: 565096 - RNA, 22 nt, Human herpesvirus 5
gaggcgcggaccgugaguuaua

SEQ ID NO: 565097 - RNA, 22 nt, Human herpesvirus 5
gaguaucgggccgucgcuugcc

SEQ ID NO: 565098 - RNA, 19 nt, Human herpesvirus 5
gagaugcgggguggugcuc

SEQ ID NO: 565099 - RNA, 22 nt, Human herpesvirus 5
gagacgcacgacaguauacgug

SEQ ID NO: 565100 - RNA, 22 nt, Human herpesvirus 5
gagaggaguggcugcuguguug

SEQ ID NO: 565101 - RNA, 22 nt, Human herpesvirus 5
gagcagccggagcccgcacacu

SEQ ID NO: 565102 - RNA, 22 nt, Human herpesvirus 5
gacuucuacggaguuuucccuc

SEQ ID NO: 565103 - RNA, 22 nt, Human herpesvirus 5
gacguugaccguuguggggauu

SEQ ID NO: 565104 - RNA, 22 nt, Human herpesvirus 5
gacguuugugcugcuggucaua

SEQ ID NO: 565105 - RNA, 22 nt, Human herpesvirus 5
gacguccgcccgacgguggugg

SEQ ID NO: 565106 - RNA, 22 nt, Human herpesvirus 5
cguggaugagaucguagagggc

SEQ ID NO: 565107 - RNA, 22 nt, Human herpesvirus 5
gacggguguauaccagaugugg

SEQ ID NO: 565108 - RNA, 22 nt, Human herpesvirus 5
cgugaugcgcaccuucggcggu

SEQ ID NO: 565109 - RNA, 22 nt, Human herpesvirus 5
cgugcacgccgucgccgaggau

SEQ ID NO: 565110 - RNA, 22 nt, Human herpesvirus 5
cgucguguagccacacggucuc

SEQ ID NO: 565111 - RNA, 17 nt, Human herpesvirus 5
cgucucuuuauuuuuau

SEQ ID NO: 565112 - RNA, 22 nt, Human herpesvirus 5
cgucgcagugugagguguucac

SEQ ID NO: 565113 - RNA, 22 nt, Human herpesvirus 5
cguccucccgcccaggaccugu

SEQ ID NO: 565114 - RNA, 22 nt, Human herpesvirus 5
cgguuucggcuuagccucuggc

SEQ ID NO: 565115 - RNA, 17 nt, Human herpesvirus 5
cgguuucucauacgcgc

SEQ ID NO: 565116 - RNA, 22 nt, Human herpesvirus 5
cgguuauuaucaacgucucugu

SEQ ID NO: 565117 - RNA, 23 nt, Human herpesvirus 5
cgccucgucugagccggggugcc

SEQ ID NO: 565118 - RNA, 21 nt, Human herpesvirus 5
cgccugucuccugggcgagca

SEQ ID NO: 565119 - RNA, 22 nt, Human herpesvirus 5
cgccugugcuuuguuacgacgg

SEQ ID NO: 565120 - RNA, 22 nt, Human herpesvirus 5
cgcgacggccucgcugacugga

SEQ ID NO: 565121 - RNA, 22 nt, Human herpesvirus 5
cgcgcccacgguccgggcacaa

SEQ ID NO: 565122 - RNA, 22 nt, Human herpesvirus 5
cgcgcccagguaggccguuacu

SEQ ID NO: 565123 - RNA, 22 nt, Human herpesvirus 5
cgcgcaggggcuccgacguggc

SEQ ID NO: 565124 - RNA, 19 nt, Human herpesvirus 5
cgcgagcggcggacuuggc

SEQ ID NO: 565125 - RNA, 22 nt, Human herpesvirus 5
cgcggccgggugggugugugcc

SEQ ID NO: 565126 - RNA, 19 nt, Human herpesvirus 5
cgcggagccaggcugcggc

SEQ ID NO: 565127 - RNA, 19 nt, Human herpesvirus 5
cgcggcacaggcuuucgcg

SEQ ID NO: 565128 - RNA, 22 nt, Human herpesvirus 5
cggcgguuucgccaccgcugac

SEQ ID NO: 565129 - RNA, 22 nt, Human herpesvirus 5
cgguagauguccaggugcuuac

SEQ ID NO: 565130 - RNA, 18 nt, Human herpesvirus 5
cgguagcucucgucgcuc

SEQ ID NO: 565131 - RNA, 22 nt, Human herpesvirus 5
cgguaguaguaguuggggagga

SEQ ID NO: 565132 - RNA, 22 nt, Human herpesvirus 5
cggucgacguuggcugcgcacc

SEQ ID NO: 565133 - RNA, 22 nt, Human herpesvirus 5
cggugggggcgugccccgcaga

SEQ ID NO: 565134 - RNA, 22 nt, Human herpesvirus 5
cgggaagaggagggugguucau

SEQ ID NO: 565135 - RNA, 22 nt, Human herpesvirus 5
cgggccaguagcagagguggac

SEQ ID NO: 565136 - RNA, 22 nt, Human herpesvirus 5
cggcggcgcccgagcgggacau

SEQ ID NO: 565137 - RNA, 22 nt, Human herpesvirus 5
cgggcguacuaccccacgucaa

SEQ ID NO: 565138 - RNA, 22 nt, Human herpesvirus 5
cggcgaccgcggacucgccucg

SEQ ID NO: 565139 - RNA, 22 nt, Human herpesvirus 5
cgcguaaccguuguccguuaua

SEQ ID NO: 565140 - RNA, 22 nt, Human herpesvirus 5
cgcguucuggacugcauccguc

SEQ ID NO: 565141 - RNA, 22 nt, Human herpesvirus 5
cgcguugcgaacggugucguua

SEQ ID NO: 565142 - RNA, 22 nt, Human herpesvirus 5
cgcuaaccuucggggcuguugc

SEQ ID NO: 565143 - RNA, 22 nt, Human herpesvirus 5
cggcagcugcagcacguggaga

SEQ ID NO: 565144 - RNA, 22 nt, Human herpesvirus 5
cggagaauggccggcgcugcgc

SEQ ID NO: 565145 - RNA, 22 nt, Human herpesvirus 5
cggagacugggcugcaggcggc

SEQ ID NO: 565146 - RNA, 22 nt, Human herpesvirus 5
cggaggucacgccacaugaagc

SEQ ID NO: 565147 - RNA, 22 nt, Human herpesvirus 5
cgcuguuggagcugcucaucga

SEQ ID NO: 565148 - RNA, 22 nt, Human herpesvirus 5
cggacgugucaucucgcccgga

SEQ ID NO: 565149 - RNA, 22 nt, Human herpesvirus 5
uggaacaccaaauuguacgugg

SEQ ID NO: 565150 - RNA, 22 nt, Human herpesvirus 5
ugcuuuuauugcugauaacugu

SEQ ID NO: 565151 - RNA, 22 nt, Human herpesvirus 5
uggacgccgccucugccggcuc

SEQ ID NO: 565152 - RNA, 22 nt, Human herpesvirus 5
ugcugauaacuguuguacugua

SEQ ID NO: 565153 - RNA, 22 nt, Human herpesvirus 5
ugcuggagcgcgacgacgaggc

SEQ ID NO: 565154 - RNA, 22 nt, Human herpesvirus 5
ugcgcuguuacacggaauccag

SEQ ID NO: 565155 - RNA, 22 nt, Human herpesvirus 5
ugcgggaacuggccuggcggcg

SEQ ID NO: 565156 - RNA, 22 nt, Human herpesvirus 5
ugcguuccagccuggccgcgcg

SEQ ID NO: 565157 - RNA, 22 nt, Human herpesvirus 5
ugcucacggccacgggcugcug

SEQ ID NO: 565158 - RNA, 22 nt, Human herpesvirus 5
ugcuccgacugucggggcgcag

SEQ ID NO: 565159 - RNA, 22 nt, Human herpesvirus 5
ugcucgcaguaguggcgcagcu

SEQ ID NO: 565160 - RNA, 22 nt, Human herpesvirus 5
ugcccgggccaugcaucgccuc

SEQ ID NO: 565161 - RNA, 22 nt, Human herpesvirus 5
ugcccgucuacgcgguccacgg

SEQ ID NO: 565162 - RNA, 22 nt, Human herpesvirus 5
accucgucaaucuugacgcgac

SEQ ID NO: 565163 - RNA, 20 nt, Human herpesvirus 5
ugcgccagguaguaaagcac

SEQ ID NO: 565164 - RNA, 22 nt, Human herpesvirus 5
ugcgccgguacgccgggaaggu

SEQ ID NO: 565165 - RNA, 19 nt, Human herpesvirus 5
acgaggcuggugagcgcga

SEQ ID NO: 565166 - RNA, 20 nt, Human herpesvirus 5
acgcaccgagagacugaggc

SEQ ID NO: 565167 - RNA, 21 nt, Human herpesvirus 5
acgcacgucgccguccauguc

SEQ ID NO: 565168 - RNA, 21 nt, Human herpesvirus 5
acgcacgugaggcaaucuccg

SEQ ID NO: 565169 - RNA, 22 nt, Human herpesvirus 5
acgcaggagcgucugacuagca

SEQ ID NO: 565170 - RNA, 22 nt, Human herpesvirus 5
accgcuauccacgcccauugau

SEQ ID NO: 565171 - RNA, 22 nt, Human herpesvirus 5
acgcuguuuccgaauaccggga

SEQ ID NO: 565172 - RNA, 22 nt, Human herpesvirus 5
acgcuguuuuacuuuugucggg

SEQ ID NO: 565173 - RNA, 22 nt, Human herpesvirus 5
acgcggccccgcaccggcggug

SEQ ID NO: 565174 - RNA, 22 nt, Human herpesvirus 5
acgccgggucgcaccgaggugg

SEQ ID NO: 565175 - RNA, 22 nt, Human herpesvirus 5
acgcaggggcuggacgugguua

SEQ ID NO: 565176 - RNA, 22 nt, Human herpesvirus 5
acacggcaguuagagacuggag

SEQ ID NO: 565177 - RNA, 22 nt, Human herpesvirus 5
acagggaaugggaaaaacacgc

SEQ ID NO: 565178 - RNA, 22 nt, Human herpesvirus 5
accaguucugcccucggugcau

SEQ ID NO: 565179 - RNA, 22 nt, Human herpesvirus 5
accagacgcgauggcccgcuau

SEQ ID NO: 565180 - RNA, 22 nt, Human herpesvirus 5
accagccguagccaaucccgau

SEQ ID NO: 565181 - RNA, 22 nt, Human herpesvirus 5
accaguccaagcacguccgguc

SEQ ID NO: 565182 - RNA, 22 nt, Human herpesvirus 5
acaaacuagcauucuggugaga

SEQ ID NO: 565183 - RNA, 22 nt, Human herpesvirus 5
acaccuccguuuugagcguguu

SEQ ID NO: 565184 - RNA, 22 nt, Human herpesvirus 5
aaucauccuguacgaagaggaa

SEQ ID NO: 565185 - RNA, 22 nt, Human herpesvirus 5
uacugcugaaugagcaucugaa

SEQ ID NO: 565186 - RNA, 22 nt, Human herpesvirus 5
uagcuccggcauggugcugccg

SEQ ID NO: 565187 - RNA, 22 nt, Human herpesvirus 5
uagaagaagcaccggcggccgc

SEQ ID NO: 565188 - RNA, 17 nt, Human herpesvirus 5
uacgccgcgacgcgugc

SEQ ID NO: 565189 - RNA, 16 nt, Human herpesvirus 5
uacggaguuuucccuc

SEQ ID NO: 565190 - RNA, 21 nt, Human herpesvirus 5
uacgacaucaccgaggcggag

SEQ ID NO: 565191 - RNA, 22 nt, Human herpesvirus 5
uacgaugcgagccacggcuugg

SEQ ID NO: 565192 - RNA, 22 nt, Human herpesvirus 5
uaauauuccuuugaacgcugag

SEQ ID NO: 565193 - RNA, 22 nt, Human herpesvirus 5
uaccgccgcgucgucucguauu

SEQ ID NO: 565194 - RNA, 22 nt, Human herpesvirus 5
uaccgcgagauccucuuucguu

SEQ ID NO: 565195 - RNA, 22 nt, Human herpesvirus 5
uacgucggccaacaaccacggc

SEQ ID NO: 565196 - RNA, 22 nt, Human herpesvirus 5
uacguggcuauguuugccaguu

SEQ ID NO: 565197 - RNA, 22 nt, Human herpesvirus 5
uacuaguggaauaguuaacggu

SEQ ID NO: 565198 - RNA, 22 nt, Human herpesvirus 5
guucccaggccgagaacgcgca

SEQ ID NO: 565199 - RNA, 22 nt, Human herpesvirus 5
guugagguaaaugaugauauag

SEQ ID NO: 565200 - RNA, 22 nt, Human herpesvirus 5
guugcacgcgucgcggcguaug

SEQ ID NO: 565201 - RNA, 22 nt, Human herpesvirus 5
guugcacgggcucgggugacgg

SEQ ID NO: 565202 - RNA, 22 nt, Human herpesvirus 5
guuugucuuugagcgcgcgaca

SEQ ID NO: 565203 - RNA, 22 nt, Human herpesvirus 5
guuuuccgacuuagccuuuggu

SEQ ID NO: 565204 - RNA, 22 nt, Human herpesvirus 5
uaaccacguccagccccugcgu

SEQ ID NO: 565205 - RNA, 22 nt, Human herpesvirus 5
guucaucguaacguuguugcug

SEQ ID NO: 565206 - RNA, 22 nt, Human herpesvirus 5
guucaugcugccuaucuacgag

SEQ ID NO: 565207 - RNA, 18 nt, Human herpesvirus 5
guucuccaauggauacgu

SEQ ID NO: 565208 - RNA, 22 nt, Human herpesvirus 5
guuguccuccucguccucgugg

SEQ ID NO: 565209 - RNA, 21 nt, Human herpesvirus 5
guuguuggccgacguagcgcc

SEQ ID NO: 565210 - RNA, 20 nt, Human herpesvirus 5
guuuaacgugagguugaaga

SEQ ID NO: 565211 - RNA, 21 nt, Human herpesvirus 5
guuuaacgugagguugaagau

SEQ ID NO: 565212 - RNA, 22 nt, Human herpesvirus 5
guuucgcggcagcgcaagccgu

SEQ ID NO: 565213 - RNA, 22 nt, Human herpesvirus 5
gugcucuuugucgacgacgugg

SEQ ID NO: 565214 - RNA, 22 nt, Human herpesvirus 5
gugcacgcgcugcuuucgcacg

SEQ ID NO: 565215 - RNA, 22 nt, Human herpesvirus 5
gugcaacagcccgugucgcgca

SEQ ID NO: 565216 - RNA, 22 nt, Human herpesvirus 5
guggccgcuaaauauggcgacg

SEQ ID NO: 565217 - RNA, 22 nt, Human herpesvirus 5
guggcgcuucgcuacgcgguga

SEQ ID NO: 565218 - RNA, 22 nt, Human herpesvirus 5
guggcgguaggguaugugucug

SEQ ID NO: 565219 - RNA, 22 nt, Human herpesvirus 5
guggcgguuguuucuccgucgc

SEQ ID NO: 565220 - RNA, 22 nt, Human herpesvirus 5
guggguucaugcugccuaucua

SEQ ID NO: 565221 - RNA, 22 nt, Human herpesvirus 5
gucucgagcgccccccgaugua

SEQ ID NO: 565222 - RNA, 22 nt, Human herpesvirus 5
guguucguggacgcguacggcg

SEQ ID NO: 565223 - RNA, 22 nt, Human herpesvirus 5
guccgcacagagguaacaacgu

SEQ ID NO: 565224 - RNA, 18 nt, Human herpesvirus 5
guccgccgccgccgcggu

SEQ ID NO: 565225 - RNA, 22 nt, Human herpesvirus 5
gucugcaggacggcgcucguuc

SEQ ID NO: 565226 - RNA, 22 nt, Human herpesvirus 5
gucucuggccggcgccagaccg

SEQ ID NO: 565227 - RNA, 22 nt, Human herpesvirus 5
gucguaacgauucacggagcac

SEQ ID NO: 565228 - RNA, 22 nt, Human herpesvirus 5
gugauccgccgaucgaugacca

SEQ ID NO: 565229 - RNA, 22 nt, Human herpesvirus 5
gugaucuacgaacugguguagg

SEQ ID NO: 565230 - RNA, 22 nt, Human herpesvirus 5
gugacguagcaauuaucguauu

SEQ ID NO: 565231 - RNA, 22 nt, Human herpesvirus 5
gucgcagucagacccacuaccu

SEQ ID NO: 565232 - RNA, 22 nt, Human herpesvirus 5
uuguuucgccgccggcgagcuc

SEQ ID NO: 565233 - RNA, 22 nt, Human herpesvirus 5
uugccgucguccgucacccggg

SEQ ID NO: 565234 - RNA, 22 nt, Human herpesvirus 5
uugcgauagcgggccaucgcgu

SEQ ID NO: 565235 - RNA, 22 nt, Human herpesvirus 5
uugcgcguuaaguugcaauuuu

SEQ ID NO: 565236 - RNA, 22 nt, Human herpesvirus 5
uucuggucguuuugcugcucau

SEQ ID NO: 565237 - RNA, 22 nt, Human herpesvirus 5
uugaccagcagcuugcagcgcu

SEQ ID NO: 565238 - RNA, 22 nt, Human herpesvirus 5
uuccuuuccuguuuuguacucg

SEQ ID NO: 565239 - RNA, 22 nt, Human herpesvirus 5
uucgccguugcuguuccuccgc

SEQ ID NO: 565240 - RNA, 23 nt, Human herpesvirus 5
uucguagagaacgauggaggacg

SEQ ID NO: 565241 - RNA, 21 nt, Human herpesvirus 5
uuacgaggucugcauguuggu

SEQ ID NO: 565242 - RNA, 22 nt, Human herpesvirus 5
uuaaagcaaaaagucuggugag

SEQ ID NO: 565243 - RNA, 22 nt, Human herpesvirus 5
uucaccgucgcugugcaacgcg

SEQ ID NO: 565244 - RNA, 22 nt, Human herpesvirus 5
uucagcgucucauuugucuuua

SEQ ID NO: 565245 - RNA, 22 nt, Human herpesvirus 5
uucagcuucauaagaugucugc

SEQ ID NO: 565246 - RNA, 22 nt, Human herpesvirus 5
uuccaccgugguguaaccgcga

SEQ ID NO: 565247 - RNA, 22 nt, Human herpesvirus 5
uguuguugcgggauguucaagg

SEQ ID NO: 565248 - RNA, 17 nt, Human herpesvirus 5
ccgugaagacgaccugu

SEQ ID NO: 565249 - RNA, 22 nt, Human herpesvirus 5
ccgugaugagcacgguguucug

SEQ ID NO: 565250 - RNA, 21 nt, Human herpesvirus 5
cccaacaggaucaucgaccuc

SEQ ID NO: 565251 - RNA, 22 nt, Human herpesvirus 5
ccccucuuucugcgucguggcu

SEQ ID NO: 565252 - RNA, 22 nt, Human herpesvirus 5
ccaucgagggccugcgcgccug

SEQ ID NO: 565253 - RNA, 22 nt, Human herpesvirus 5
aucugcuguagauaucauaacg

SEQ ID NO: 565254 - RNA, 21 nt, Human herpesvirus 5
aucuccucucgcucggcggcg

SEQ ID NO: 565255 - RNA, 22 nt, Human herpesvirus 5
aguauacuaauaugaagcgucg

SEQ ID NO: 565256 - RNA, 22 nt, Human herpesvirus 5
aucggcuuccaagacgaccuag

SEQ ID NO: 565257 - RNA, 22 nt, Human herpesvirus 5
augaaaaacacgacgaaagcgu

SEQ ID NO: 565258 - RNA, 22 nt, Human herpesvirus 5
aucuugagcggcagcgcguaca

SEQ ID NO: 565259 - RNA, 22 nt, Human herpesvirus 5
ccgcgugucuaaaccgcgugcu

SEQ ID NO: 565260 - RNA, 22 nt, Human herpesvirus 5
ccgguauucggaaacagcgucc

SEQ ID NO: 565261 - RNA, 22 nt, Human herpesvirus 5
ccggcgagcugacgaguggcgg

SEQ ID NO: 565262 - RNA, 22 nt, Human herpesvirus 5
ccgggaaagagcugcgacagcg

SEQ ID NO: 565263 - RNA, 22 nt, Human herpesvirus 5
ccgaucaccagaaggcggacau

SEQ ID NO: 565264 - RNA, 22 nt, Human herpesvirus 5
ccgccuccucgaguauuguucc

SEQ ID NO: 565265 - RNA, 22 nt, Human herpesvirus 5
ccgccucgcccauguguacgca

SEQ ID NO: 565266 - RNA, 22 nt, Human herpesvirus 5
ccgacugugggaagcuguccac

SEQ ID NO: 565267 - RNA, 22 nt, Human herpesvirus 5
agugacggugagauccaggcug

SEQ ID NO: 565268 - RNA, 20 nt, Human herpesvirus 5
agugcgccgagcggccguug

SEQ ID NO: 565269 - RNA, 22 nt, Human herpesvirus 5
aguggcaggcccggguucgcga

SEQ ID NO: 565270 - RNA, 22 nt, Human herpesvirus 5
aucaccaugguaauagcgauga

SEQ ID NO: 565271 - RNA, 22 nt, Human herpesvirus 5
aucagcggcgugaugguaagca

SEQ ID NO: 565272 - RNA, 22 nt, Human herpesvirus 5
agguggugugcgaucccuucca

SEQ ID NO: 565273 - RNA, 22 nt, Human herpesvirus 5
agguugcuguugcggcgcgagc

SEQ ID NO: 565274 - RNA, 22 nt, Human herpesvirus 5
ucggcgucagguaggcgcgcag

SEQ ID NO: 565275 - RNA, 22 nt, Human herpesvirus 5
ucguacgugagcgagucgaguc

SEQ ID NO: 565276 - RNA, 22 nt, Human herpesvirus 5
ucgucacgcucaaggacaucga

SEQ ID NO: 565277 - RNA, 22 nt, Human herpesvirus 5
ucgugcagccgcaugagacgug

SEQ ID NO: 565278 - RNA, 19 nt, Human herpesvirus 5
ucggcccgugccgggaccc

SEQ ID NO: 565279 - RNA, 22 nt, Human herpesvirus 5
ucggccuacggagugcugacga

SEQ ID NO: 565280 - RNA, 22 nt, Human herpesvirus 5
ucggccuuaaggcggccgcgug

SEQ ID NO: 565281 - RNA, 22 nt, Human herpesvirus 5
ucgcaacagcagcucucggugc

SEQ ID NO: 565282 - RNA, 22 nt, Human herpesvirus 5
ucgcggcggcucccucucggcg

SEQ ID NO: 565283 - RNA, 22 nt, Human herpesvirus 5
ucggaggcgugcucguaucccg

SEQ ID NO: 565284 - RNA, 22 nt, Human herpesvirus 5
ucgccgcgauaacgacagguca

SEQ ID NO: 565285 - RNA, 22 nt, Human herpesvirus 5
ucgccgucgaguacgugcugau

SEQ ID NO: 565286 - RNA, 22 nt, Human herpesvirus 5
ucgcgaucuccgagaggaggag

SEQ ID NO: 565287 - RNA, 22 nt, Human herpesvirus 5
ucgcgcaccauaaacucgccua

SEQ ID NO: 565288 - RNA, 22 nt, Human herpesvirus 5
ucgcgcguacggacgaguggaa

SEQ ID NO: 565289 - RNA, 22 nt, Human herpesvirus 5
gucaacgguggcgacaccguac

SEQ ID NO: 565290 - RNA, 18 nt, Human herpesvirus 5
ucgacucguccgagaccc

SEQ ID NO: 565291 - RNA, 22 nt, Human herpesvirus 5
gguuugcuuccuauauagugga

SEQ ID NO: 565292 - RNA, 22 nt, Human herpesvirus 5
guaaagacaaaugagacgcuga

SEQ ID NO: 565293 - RNA, 22 nt, Human herpesvirus 5
guacuuuccgcuguuuuccguc

SEQ ID NO: 565294 - RNA, 22 nt, Human herpesvirus 5
guaucggggcuccgacgccuua

SEQ ID NO: 565295 - RNA, 22 nt, Human herpesvirus 5
gucacagagcgugcugacgugg

SEQ ID NO: 565296 - RNA, 22 nt, Human herpesvirus 5
gguacuugacgcgggugcgcgu

SEQ ID NO: 565297 - RNA, 22 nt, Human herpesvirus 5
gguccgcgucgcguagcgcuuc

SEQ ID NO: 565298 - RNA, 22 nt, Human herpesvirus 5
gggucccggcacgggccgagga

SEQ ID NO: 565299 - RNA, 22 nt, Human herpesvirus 5
gggucucggacgagucgacacg

SEQ ID NO: 565300 - RNA, 22 nt, Human herpesvirus 5
ggucgcgcugcuuuccccgagc

SEQ ID NO: 565301 - RNA, 22 nt, Human herpesvirus 5
ggucugcgcgacauuuuggguc

SEQ ID NO: 565302 - RNA, 22 nt, Human herpesvirus 5
ggugaaguggagggccacggug

SEQ ID NO: 565303 - RNA, 22 nt, Human herpesvirus 5
ggugguaaaacuucggcccgca

SEQ ID NO: 565304 - RNA, 22 nt, Human herpesvirus 5
ggugcacguugaugcuggggau

SEQ ID NO: 565305 - RNA, 22 nt, Human herpesvirus 5
ggagaacuauuuucuuugucaa

SEQ ID NO: 565306 - RNA, 22 nt, Human herpesvirus 5
ggagccguagcggcgggaaccg

SEQ ID NO: 565307 - RNA, 22 nt, Human herpesvirus 5
ggagcggggcguccgaaggcga

SEQ ID NO: 565308 - RNA, 22 nt, Human herpesvirus 5
ggaggcuuucgccacaccuauc

SEQ ID NO: 565309 - RNA, 22 nt, Human herpesvirus 5
ggagugacggacggccaguacg

SEQ ID NO: 565310 - RNA, 22 nt, Human herpesvirus 5
ggcaagccgagcgggaggcggu

SEQ ID NO: 565311 - RNA, 22 nt, Human herpesvirus 5
ggccgccuagcgcuuccagcug

SEQ ID NO: 565312 - RNA, 22 nt, Human herpesvirus 5
ggcacggaccgcaacgugcugc

SEQ ID NO: 565313 - RNA, 22 nt, Human herpesvirus 5
ggcacggucucgcacgccaccu

SEQ ID NO: 565314 - RNA, 22 nt, Human herpesvirus 5
ggcgaccagaagcccggugccg

SEQ ID NO: 565315 - RNA, 23 nt, Human herpesvirus 5
ggcgauucgccgccgccgauacc

SEQ ID NO: 565316 - RNA, 22 nt, Human herpesvirus 5
gcgccggcacgaugcagcuggc

SEQ ID NO: 565317 - RNA, 22 nt, Human herpesvirus 5
gcgccuggacguugcacgcggc

SEQ ID NO: 565318 - RNA, 22 nt, Human herpesvirus 5
gcgcucacggccgaguucggcc

SEQ ID NO: 565319 - RNA, 22 nt, Human herpesvirus 5
gcgcucguuaaucugaacgaag

SEQ ID NO: 565320 - RNA, 22 nt, Human herpesvirus 5
gcgcugaucugcagcugcacgg

SEQ ID NO: 565321 - RNA, 23 nt, Human herpesvirus 5
gcgggcacugggucugcacgacg

SEQ ID NO: 565322 - RNA, 22 nt, Human herpesvirus 5
gcggcgucgaauuaccgggcgg

SEQ ID NO: 565323 - RNA, 22 nt, Human herpesvirus 5
gcggccuuggcggucgggucug

SEQ ID NO: 565324 - RNA, 21 nt, Human herpesvirus 5
gcggcgaaucgcccgggcugc

SEQ ID NO: 565325 - RNA, 22 nt, Human herpesvirus 5
gcggagcagggagcgcaaggcc

SEQ ID NO: 565326 - RNA, 22 nt, Human herpesvirus 5
gcggaucggacaucauacugac

SEQ ID NO: 565327 - RNA, 22 nt, Human herpesvirus 5
gcgcuggaggaccugcugccca

SEQ ID NO: 565328 - RNA, 22 nt, Human herpesvirus 5
aacucgcgugccgacggggucu

SEQ ID NO: 565329 - RNA, 21 nt, Human herpesvirus 5
aacgcggcacaugggcggcgg

SEQ ID NO: 565330 - RNA, 22 nt, Human herpesvirus 5
aacgcuuucgucguguuuuuca

SEQ ID NO: 565331 - RNA, 22 nt, Human herpesvirus 5
aacgacguggacuuuugguuac

SEQ ID NO: 565332 - RNA, 22 nt, Human herpesvirus 5
aacgagcgcuguguggccgucu

SEQ ID NO: 565333 - RNA, 22 nt, Human herpesvirus 5
aaacgacguagacgaugaaccg

SEQ ID NO: 565334 - RNA, 22 nt, Human herpesvirus 5
aaagcaaggcacguucauaaug

SEQ ID NO: 565335 - RNA, 22 nt, Human herpesvirus 5
aaaguuggcugcgcccguuggu

SEQ ID NO: 565336 - RNA, 22 nt, Human herpesvirus 5
aaauaacgguacagagcgcgaa

SEQ ID NO: 565337 - RNA, 22 nt, Human herpesvirus 5
aaaggcuaagucggaaaacucg

SEQ ID NO: 565338 - RNA, 22 nt, Human herpesvirus 5
aaggauggcaacuuggacacgu

SEQ ID NO: 565339 - RNA, 22 nt, Human herpesvirus 5
gcgacauggacggcgacgugcg

SEQ ID NO: 565340 - RNA, 22 nt, Human herpesvirus 5
gcgacggucuuuuuugccuggg

SEQ ID NO: 565341 - RNA, 22 nt, Human herpesvirus 5
gccuucuuuggacucugcggcc

SEQ ID NO: 565342 - RNA, 22 nt, Human herpesvirus 5
gcgcagccaacuuucauacuug

SEQ ID NO: 565343 - RNA, 20 nt, Human herpesvirus 5
gcgcaggauauggcagccug

SEQ ID NO: 565344 - RNA, 22 nt, Human herpesvirus 5
gcgcaugaaggguugcggguug

SEQ ID NO: 565345 - RNA, 22 nt, Human herpesvirus 5
gcgaggacacgcagacggcgga

SEQ ID NO: 565346 - RNA, 22 nt, Human herpesvirus 5
uguggcgccagcgaaccggcgg

SEQ ID NO: 565347 - RNA, 22 nt, Human herpesvirus 5
ugugcucggaccgugacggugg

SEQ ID NO: 565348 - RNA, 22 nt, Human herpesvirus 5
ugucggagcugucggcgcuggg

SEQ ID NO: 565349 - RNA, 22 nt, Human herpesvirus 5
ugucgguaggcgccuacggccg

SEQ ID NO: 565350 - RNA, 22 nt, Human herpesvirus 5
ugucugcucauucuggcggcgc

SEQ ID NO: 565351 - RNA, 22 nt, Human herpesvirus 5
uguacucaagagagcgauuggu

SEQ ID NO: 565352 - RNA, 23 nt, Human herpesvirus 5
uggggcaguuugagcagcccacc

SEQ ID NO: 565353 - RNA, 22 nt, Human herpesvirus 5
ccaggagcucaucauguucggg

SEQ ID NO: 565354 - RNA, 22 nt, Human herpesvirus 5
ccaccgauccgcacgaccgcga

SEQ ID NO: 565355 - RNA, 22 nt, Human herpesvirus 5
ccacggaaaacgguaguuuugu

SEQ ID NO: 565356 - RNA, 22 nt, Human herpesvirus 5
ccagcaguaugacgugcgaugg

SEQ ID NO: 565357 - RNA, 22 nt, Human herpesvirus 5
uggcguggcgcacgcagcgacc

SEQ ID NO: 565358 - RNA, 22 nt, Human herpesvirus 5
caguaucguguugugcuucaac

SEQ ID NO: 565359 - RNA, 22 nt, Human herpesvirus 5
caggucgcggauuuguuaucgg

SEQ ID NO: 565360 - RNA, 22 nt, Human herpesvirus 5
cauacguuuuugggaaaguugg

SEQ ID NO: 565361 - RNA, 22 nt, Human herpesvirus 5
caucacguccuuuaagagcugu

SEQ ID NO: 565362 - RNA, 22 nt, Human herpesvirus 5
cagggcgcuuuggcaaaaggcg

SEQ ID NO: 565363 - RNA, 22 nt, Human herpesvirus 5
cagcucgucuuuuuagccguga

SEQ ID NO: 565364 - RNA, 22 nt, Human herpesvirus 5
cagcgggucgcucuugauaaac

SEQ ID NO: 565365 - RNA, 21 nt, Human herpesvirus 5
ccaaccgucaagauccgcguu

SEQ ID NO: 565366 - RNA, 22 nt, Human herpesvirus 5
ccaacgcaacagaccuaggcac

SEQ ID NO: 565367 - RNA, 22 nt, Human herpesvirus 5
ccaagucagagcagcgucgguc

SEQ ID NO: 565368 - RNA, 22 nt, Human herpesvirus 5
cagugucagcgccgagccgcgg

SEQ ID NO: 565369 - RNA, 22 nt, Human herpesvirus 5
caguugacugagauugagaucc

SEQ ID NO: 565370 - RNA, 22 nt, Human herpesvirus 5
caccgcccauggguuccugcug

SEQ ID NO: 565371 - RNA, 22 nt, Human herpesvirus 5
cagccgccgucgcuggugggca

SEQ ID NO: 565372 - RNA, 22 nt, Human herpesvirus 5
cacugcgagggccagcccagcg

SEQ ID NO: 565373 - RNA, 22 nt, Human herpesvirus 5
cacguuaaugcgcgagacggcg

SEQ ID NO: 565374 - RNA, 21 nt, Human herpesvirus 5
cacguugcgguccgugcccgc

SEQ ID NO: 565375 - RNA, 22 nt, Human herpesvirus 5
cacggccagcgccuugucgcgg

SEQ ID NO: 565376 - RNA, 22 nt, Human herpesvirus 5
cacgccguccuugacgacgcag

SEQ ID NO: 565377 - RNA, 22 nt, Human herpesvirus 5
cacgaacguguccucggugaag

SEQ ID NO: 565378 - RNA, 22 nt, Human herpesvirus 5
caccaccgcagucggaggagga

SEQ ID NO: 565379 - RNA, 22 nt, Human herpesvirus 5
cacccguuucugccgcucgcga

SEQ ID NO: 565380 - RNA, 22 nt, Human herpesvirus 5
caacgacuggacgacgucguuu

SEQ ID NO: 565381 - RNA, 22 nt, Human herpesvirus 5
caaaauaucgaacucuucgcgg

SEQ ID NO: 565382 - RNA, 22 nt, Human herpesvirus 5
caacaccguaaagccguugcgc

SEQ ID NO: 565383 - RNA, 21 nt, Human herpesvirus 5
augucgcugaaauugcggauc

SEQ ID NO: 565384 - RNA, 22 nt, Human herpesvirus 5
augucucccuuggagaacgucg

SEQ ID NO: 565385 - RNA, 22 nt, Human herpesvirus 5
uuuuuccacugggcggccgcac

SEQ ID NO: 565386 - RNA, 22 nt, Human herpesvirus 5
cgccgcaggcccucauagucgc

SEQ ID NO: 565387 - RNA, 22 nt, Human herpesvirus 5
cgccgccagcggguacacgugc

SEQ ID NO: 565388 - RNA, 22 nt, Human herpesvirus 5
cgccgcccaugugccgcguucc

SEQ ID NO: 565389 - RNA, 22 nt, Human herpesvirus 5
uuucucaucaaccugucgaugg

SEQ ID NO: 565390 - RNA, 22 nt, Human herpesvirus 5
uuuguuggcggggcucacggug

SEQ ID NO: 565391 - RNA, 17 nt, Human herpesvirus 5
uuuggcuacgguggugu

SEQ ID NO: 565392 - RNA, 22 nt, Human herpesvirus 5
ccugccgcgucaccgugugucc

SEQ ID NO: 565393 - RNA, 22 nt, Human herpesvirus 5
ccugcgugccagucuguccguc

SEQ ID NO: 565394 - RNA, 23 nt, Human herpesvirus 5
ccuucgguaucaucgucuuugcu

SEQ ID NO: 565395 - RNA, 22 nt, Human herpesvirus 5
aggcggacgagguagagguuug

SEQ ID NO: 565396 - RNA, 22 nt, Human herpesvirus 5
aggcgugccggcgcccauggcc

SEQ ID NO: 565397 - RNA, 22 nt, Human herpesvirus 5
aggacgccguauuggugcgcga

SEQ ID NO: 565398 - RNA, 22 nt, Human herpesvirus 5
aggagagccuacagacgggacg

SEQ ID NO: 565399 - RNA, 22 nt, Human herpesvirus 5
agcggucguuuuaaccgcaggu

SEQ ID NO: 565400 - RNA, 22 nt, Human herpesvirus 5
aggccagaggcuaagccgaaac

SEQ ID NO: 565401 - RNA, 22 nt, Human herpesvirus 5
aggcgaguccgcggucgccgcc

SEQ ID NO: 565402 - RNA, 22 nt, Human herpesvirus 5
cgcacgaccuaugguguugcug

SEQ ID NO: 565403 - RNA, 22 nt, Human herpesvirus 5
cgcacgauggccaugcgcguca

SEQ ID NO: 565404 - RNA, 22 nt, Human herpesvirus 5
cgaggccgacagccuggagaug

SEQ ID NO: 565405 - RNA, 22 nt, Human herpesvirus 5
cgaggcggugcccgcgacucgc

SEQ ID NO: 565406 - RNA, 18 nt, Human herpesvirus 5
cgagaacgcgcccuuucc

SEQ ID NO: 565407 - RNA, 22 nt, Human herpesvirus 5
cgagcugcugaugugccgucgc

SEQ ID NO: 565408 - RNA, 22 nt, Human herpesvirus 5
cgagcugucggaauccucgucg

SEQ ID NO: 565409 - RNA, 22 nt, Human herpesvirus 5
cgacgcagaaccacgcgcaguu

SEQ ID NO: 565410 - RNA, 22 nt, Human herpesvirus 5
agguggagauucuaaagccacg

SEQ ID NO: 565411 - RNA, 22 nt, Human herpesvirus 5
cgacgaagaugcgucgaaucgc

SEQ ID NO: 565412 - RNA, 22 nt, Human herpesvirus 5
cgacgacgaugcagccugccgc

SEQ ID NO: 565413 - RNA, 22 nt, Human herpesvirus 5
agcaccgagagcugcuguugcg

SEQ ID NO: 565414 - RNA, 22 nt, Human herpesvirus 5
agcagacaguguaguucuugcc

SEQ ID NO: 565415 - RNA, 22 nt, Human herpesvirus 5
agcagcgugugcaguucggcgu

SEQ ID NO: 565416 - RNA, 22 nt, Human herpesvirus 5
agacggguacggcgcgccgcau

SEQ ID NO: 565417 - RNA, 22 nt, Human herpesvirus 5
agaggggacgucggggcccucc

SEQ ID NO: 565418 - RNA, 22 nt, Human herpesvirus 5
agacgcagugguccgucggugu

SEQ ID NO: 565419 - RNA, 22 nt, Human herpesvirus 5
agcggcgugaugauacggagcg

SEQ ID NO: 565420 - RNA, 22 nt, Human herpesvirus 5
agcggguaaguucuaagaaaca

SEQ ID NO: 565421 - RNA, 22 nt, Human herpesvirus 5
agccgugcugggccucaacgcg

SEQ ID NO: 565422 - RNA, 22 nt, Human herpesvirus 5
agccguguuuuuugcacaauuu

SEQ ID NO: 565423 - RNA, 22 nt, Human herpesvirus 5
agcgcgugcuucggcgguugcu

SEQ ID NO: 565424 - RNA, 22 nt, Human herpesvirus 5
agccgcgcaugacgcaggugag

SEQ ID NO: 565425 - RNA, 22 nt, Human herpesvirus 5
agcgcgaggcgucggagcucgg

SEQ ID NO: 565426 - RNA, 22 nt, Human herpesvirus 5
acgugguuuuugcuuccgagcu

SEQ ID NO: 565427 - RNA, 22 nt, Human herpesvirus 5
acuguugcagcgcuugggucag

SEQ ID NO: 565428 - RNA, 22 nt, Human herpesvirus 5
acuuccccgucguacuggcggc

SEQ ID NO: 565429 - RNA, 22 nt, Human herpesvirus 5
acuucuuucgcucccucgaccc

SEQ ID NO: 565430 - RNA, 22 nt, Human herpesvirus 5
acuuggaacgccgcggcgcaca

SEQ ID NO: 565431 - RNA, 22 nt, Human herpesvirus 5
acggcggacgaccggcauggcg

SEQ ID NO: 565432 - RNA, 22 nt, Human herpesvirus 5
acggcgugauugagcaccugcg

SEQ ID NO: 565433 - RNA, 22 nt, Human herpesvirus 5
acgucagcgguggcgaaaccgc

SEQ ID NO: 565434 - RNA, 22 nt, Human herpesvirus 5
acgucgcgagaccugguguuug

SEQ ID NO: 565435 - RNA, 22 nt, Human herpesvirus 5
acgucugagcgccgcugacagu

SEQ ID NO: 565436 - RNA, 22 nt, Human herpesvirus 5
acggguaucugcagcuggaccu

SEQ ID NO: 565437 - RNA, 22 nt, Human herpesvirus 5
acggugucgccaccguugacgu

SEQ ID NO: 565438 - RNA, 22 nt, Human herpesvirus 5
ggcguuggccuguggauagauu

SEQ ID NO: 565439 - RNA, 22 nt, Human herpesvirus 5
gggccacgucgggcugcugccg

SEQ ID NO: 565440 - RNA, 22 nt, Human herpesvirus 5
gggcgagacggugcaggagucc

SEQ ID NO: 565441 - RNA, 22 nt, Human herpesvirus 5
gggcgagucgcgggcaccgccu

SEQ ID NO: 565442 - RNA, 22 nt, Human herpesvirus 5
ggcgcgcacagccuccugucga

SEQ ID NO: 565443 - RNA, 22 nt, Human herpesvirus 5
ggcgcguucucgcccuugaggc

SEQ ID NO: 565444 - RNA, 22 nt, Human herpesvirus 5
ggcgucggagccccgauacaug

SEQ ID NO: 565445 - RNA, 22 nt, Human herpesvirus 5
ggcgugcgcgaccccuagucgg

SEQ ID NO: 565446 - RNA, 19 nt, Human herpesvirus 5
ggcugucggguacgugacg

SEQ ID NO: 565447 - RNA, 22 nt, Human herpesvirus 5
gggaucauuuucuuggccgugg

SEQ ID NO: 565448 - RNA, 22 nt, Human herpesvirus 5
gcgugcugauuguaguuuuugc

SEQ ID NO: 565449 - RNA, 22 nt, Human herpesvirus 5
gcguuucgguccacguguccug

SEQ ID NO: 565450 - RNA, 22 nt, Human herpesvirus 5
gcgguccaacugcagccgcuuc

SEQ ID NO: 565451 - RNA, 23 nt, Human herpesvirus 5
gcgguucgccgucaucguugucg

SEQ ID NO: 565452 - RNA, 22 nt, Human herpesvirus 5
gcgucaaacuggugacgacgga

SEQ ID NO: 565453 - RNA, 22 nt, Human herpesvirus 5
gcuuggucuucacguccagcag

SEQ ID NO: 565454 - RNA, 22 nt, Human herpesvirus 5
gcucgucuuuuuagccgugacc

SEQ ID NO: 565455 - RNA, 22 nt, Human herpesvirus 5
gcucgcaguaguggcgcagcug

SEQ ID NO: 565456 - RNA, 22 nt, Human herpesvirus 5
gcaguacccgaacacggcgccc

SEQ ID NO: 565457 - RNA, 22 nt, Human herpesvirus 5
gcaggugguucaccacguccgu

SEQ ID NO: 565458 - RNA, 22 nt, Human herpesvirus 5
gcagcgagccgcguaacgucug

SEQ ID NO: 565459 - RNA, 22 nt, Human herpesvirus 5
gcagcucgggcguguuuucguc

SEQ ID NO: 565460 - RNA, 22 nt, Human herpesvirus 5
gaccgaccgccgcuuuggucgg

SEQ ID NO: 565461 - RNA, 22 nt, Human herpesvirus 5
gacggcgucuucggucucgagc

SEQ ID NO: 565462 - RNA, 22 nt, Human herpesvirus 5
gcaagugcuucagcagcagcuu

SEQ ID NO: 565463 - RNA, 22 nt, Human herpesvirus 5
gcacuccgggcgagaugacacg

SEQ ID NO: 565464 - RNA, 22 nt, Human herpesvirus 5
gccacgcgauuggccgucggcg

SEQ ID NO: 565465 - RNA, 22 nt, Human herpesvirus 5
gcaguugcaguagagcaauuua

SEQ ID NO: 565466 - RNA, 22 nt, Human herpesvirus 5
gccaugucguuucgcgucggca

SEQ ID NO: 565467 - RNA, 22 nt, Human herpesvirus 5
gccgaggacgccgugggcggcg

SEQ ID NO: 565468 - RNA, 22 nt, Human herpesvirus 5
gcggggucguggcggcuguguc

SEQ ID NO: 565469 - RNA, 23 nt, Human herpesvirus 5
gccggcaaaauguagguggcguu

SEQ ID NO: 565470 - RNA, 22 nt, Human herpesvirus 5
gccgugugggaaugacggugau

SEQ ID NO: 565471 - RNA, 22 nt, Human herpesvirus 5
gccgucugcagcucgucggccg

SEQ ID NO: 565472 - RNA, 22 nt, Human herpesvirus 5
gccgucugcguguccucgcugg

SEQ ID NO: 565473 - RNA, 22 nt, Human herpesvirus 5
gacaacgugguccaguacgucc

SEQ ID NO: 565474 - RNA, 22 nt, Human herpesvirus 5
gacagcaacaggcgcuccgggc

SEQ ID NO: 565475 - RNA, 22 nt, Human herpesvirus 5
gaccguggcgguggcgggcaug

SEQ ID NO: 565476 - RNA, 22 nt, Human herpesvirus 5
gaccucuggccagucgugcgcg

SEQ ID NO: 565477 - RNA, 21 nt, Human herpesvirus 5
gaacaugaugccguugcagac

SEQ ID NO: 565478 - RNA, 22 nt, Human herpesvirus 5
cugucguuaucgcggcgaaugc

SEQ ID NO: 565479 - RNA, 22 nt, Human herpesvirus 5
cugcgugcacggccaagacauu

SEQ ID NO: 565480 - RNA, 22 nt, Human herpesvirus 5
cuguggcgggucgcgacgacga

SEQ ID NO: 565481 - RNA, 22 nt, Human herpesvirus 5
cuggacacguuguuaagcggcg

SEQ ID NO: 565482 - RNA, 22 nt, Human herpesvirus 5
cuggagaacgccggggcagcag

SEQ ID NO: 565483 - RNA, 22 nt, Human herpesvirus 5
cugcugugaaaacgggcacggu

SEQ ID NO: 565484 - RNA, 22 nt, Human herpesvirus 5
cuucagaucguggacguguuug

SEQ ID NO: 565485 - RNA, 22 nt, Human herpesvirus 5
cuucgaggcccaugguucucug

SEQ ID NO: 565486 - RNA, 17 nt, Human herpesvirus 5
cuuugcgggcauguacg

SEQ ID NO: 565487 - RNA, 22 nt, Human herpesvirus 5
cuugugguuaaguuguagauag

SEQ ID NO: 565488 - RNA, 22 nt, Human herpesvirus 5
cuuggcguggcgcacgcagcga

SEQ ID NO: 565489 - RNA, 22 nt, Human herpesvirus 5
cuucuugaccguuaucacggug

SEQ ID NO: 565490 - RNA, 22 nt, Human herpesvirus 5
cguuccggcgggugguugacgu

SEQ ID NO: 565491 - RNA, 22 nt, Human herpesvirus 5
cgugucgaugcgcuggugccag

SEQ ID NO: 565492 - RNA, 22 nt, Human herpesvirus 5
cguguacgaucaccggcuggcu

SEQ ID NO: 565493 - RNA, 22 nt, Human herpesvirus 5
cucaccuggaccggugguacug

SEQ ID NO: 565494 - RNA, 22 nt, Human herpesvirus 5
cucgguuucgcuguagcugugg

SEQ ID NO: 565495 - RNA, 22 nt, Human herpesvirus 5
cugccuacgcgaucggcggccg

SEQ ID NO: 565496 - RNA, 22 nt, Human herpesvirus 5
cugcgcacgcucucggucacgg

SEQ ID NO: 565497 - RNA, 22 nt, Human herpesvirus 5
cugcaggaaacguuggcgacgg

SEQ ID NO: 565498 - RNA, 22 nt, Human herpesvirus 5
cugcaggaaccaguugugcgga

SEQ ID NO: 565499 - RNA, 22 nt, Human herpesvirus 5
cuccuccuccgacugcgguggu

SEQ ID NO: 565500 - RNA, 22 nt, Human herpesvirus 5
cucggcgcgucacaugagcgau

SEQ ID NO: 565501 - RNA, 23 nt, Human herpesvirus 5
cucgggcgccugugacaugaggc

SEQ ID NO: 565502 - RNA, 22 nt, Human herpesvirus 5
cucgagaccgaagacgccguca

SEQ ID NO: 565503 - RNA, 22 nt, Human herpesvirus 5
cucgagaugcacuccgcuucag

SEQ ID NO: 565504 - RNA, 22 nt, Human
aaacucuuuccacgauuacuuu

SEQ ID NO: 565505 - RNA, 22 nt, Human
ugagcugggaguggugaugagg

SEQ ID NO: 565506 - RNA, 22 nt, Human
acauuucuaguuguucaucucc

SEQ ID NO: 565507 - RNA, 22 nt, Human
uauuucuauuccccaggcaagu

SEQ ID NO: 565508 - RNA, 22 nt, Human
uucuaccauugggaaaacagcc

SEQ ID NO: 565509 - RNA, 22 nt, Human
acugauacaucuguggaagugg

SEQ ID NO: 565510 - RNA, 22 nt, Human
uucuaguuuagggcucuucaac

SEQ ID NO: 565511 - RNA, 22 nt, Human
cagguccuggcaucaggcaggu

SEQ ID NO: 565512 - RNA, 22 nt, Human
cuguuauuuagaacauggaauc

SEQ ID NO: 565513 - RNA, 22 nt, Human
uucuaguucccucuggaaugua

SEQ ID NO: 565514 - RNA, 22 nt, Human
guuucuuuugugaucaccaacc

SEQ ID NO: 565515 - RNA, 22 nt, Human
auguaacacccacuuuuauagc

SEQ ID NO: 565516 - RNA, 22 nt, Human
acuguacaacugcugagcagaa

SEQ ID NO: 565517 - RNA, 22 nt, Human
uagcauuucacugaucuucacu

SEQ ID NO: 565518 - RNA, 22 nt, Human
uaggaaaaauacagaauuauau

SEQ ID NO: 565519 - RNA, 23 nt, Human
cuacaagagcaagcauggacaag

SEQ ID NO: 565520 - RNA, 22 nt, Human
ucucugaguaagugacaguuca

SEQ ID NO: 565521 - RNA, 22 nt, Human
acaggccucaagacacccaggu

SEQ ID NO: 565522 - RNA, 22 nt, Human
ucuuauuauuguuguaaaagca

SEQ ID NO: 565523 - RNA, 22 nt, Human
uauggaaaguguuuucuucugu

SEQ ID NO: 565524 - RNA, 22 nt, Human
cucaggaggaggaaguucauug

SEQ ID NO: 565525 - RNA, 22 nt, Human
gaaaaagugaccuugguagcua

SEQ ID NO: 565526 - RNA, 22 nt, Human
uaccacuacauuugcuaauggc

SEQ ID NO: 565527 - RNA, 22 nt, Human
ugagacaguucugcagcugggu

SEQ ID NO: 565528 - RNA, 22 nt, Human
acauuucugucuuagggacugu

SEQ ID NO: 565529 - RNA, 22 nt, Human
acuaagaccuagauacuagggg

SEQ ID NO: 565530 - RNA, 22 nt, Human
uaucugcaucugcauguguauu

SEQ ID NO: 565531 - RNA, 22 nt, Human
uuccagcuaacucacaucccuu

SEQ ID NO: 565532 - RNA, 22 nt, Human
aaacacuagcaggaagcacuga

SEQ ID NO: 565533 - RNA, 23 nt, Human
ucuguacacaucagcaucuccca

SEQ ID NO: 565534 - RNA, 22 nt, Human
ucaagucuggagaucuggaacu

SEQ ID NO: 565535 - RNA, 22 nt, Human
uuuccuuugcccaauacauguc

SEQ ID NO: 565536 - RNA, 22 nt, Human
ggcaggagcucuccaguuugcc

SEQ ID NO: 565537 - RNA, 22 nt, Human
cuuggucauuuggggcugcuau

SEQ ID NO: 565538 - RNA, 22 nt, Human
ugaaggaaaugacggcagaaga

SEQ ID NO: 565539 - RNA, 22 nt, Human
aaacuguaaauacuaguaagug

SEQ ID NO: 565540 - RNA, 22 nt, Human
gacaagacaccucucuccaucc

SEQ ID NO: 565541 - RNA, 22 nt, Human
ugggaaugugagcauucauuca

SEQ ID NO: 565542 - RNA, 22 nt, Human
uuuaccauccucuuuuagaauu

SEQ ID NO: 565543 - RNA, 17 nt, Human
gacaagacagaauucau

SEQ ID NO: 565544 - RNA, 23 nt, Human
agaaaaguucauaccuuuuuaac

SEQ ID NO: 565545 - RNA, 22 nt, Human
gguucaguuuacauuaaaaucu

SEQ ID NO: 565546 - RNA, 22 nt, Human
aagacuguacauuuuccagucu

SEQ ID NO: 565547 - RNA, 22 nt, Human
uuauuuauucauucugucuguc

SEQ ID NO: 565548 - RNA, 22 nt, Human
gaaauugucagcuucuuucagu

SEQ ID NO: 565549 - RNA, 22 nt, Human
gacuguacgucauugaaggcca

SEQ ID NO: 565550 - RNA, 22 nt, Human
aacaugaaaaccuccacagcaa

SEQ ID NO: 565551 - RNA, 22 nt, Human
uucuacacucacccagcuguaa

SEQ ID NO: 565552 - RNA, 22 nt, Human
ucuuugcauggacauguguuuu

SEQ ID NO: 565553 - RNA, 22 nt, Human
uaauccaauggcacaauguaug

SEQ ID NO: 565554 - RNA, 22 nt, Human
aggcugugacagggucauggag

SEQ ID NO: 565555 - RNA, 22 nt, Human
cugcuuccauggucuggagacu

SEQ ID NO: 565556 - RNA, 22 nt, Human
uauuucuaagcuguaagucuga

SEQ ID NO: 565557 - RNA, 22 nt, Human
aaaguucucuaugguguaaaaa

SEQ ID NO: 565558 - RNA, 22 nt, Human
uaauccaaaacugaaucugugg

SEQ ID NO: 565559 - RNA, 20 nt, Human
uacagucagggcacaggcag

SEQ ID NO: 565560 - RNA, 22 nt, Human
acaacugucaguaaagaauauu

SEQ ID NO: 565561 - RNA, 22 nt, Human
guccaagagucaagaagggggc

SEQ ID NO: 565562 - RNA, 22 nt, Human
aaauauguaagauuagcacuag

SEQ ID NO: 565563 - RNA, 22 nt, Human
cauuucuauggcaaugggaaaa

SEQ ID NO: 565564 - RNA, 22 nt, Human
ucuguacacuucagcaugcauc

SEQ ID NO: 565565 - RNA, 22 nt, Human
uucuggaaguguuagaaucugg

SEQ ID NO: 565566 - RNA, 22 nt, Human
uaacagcuggcguuauaggaau

SEQ ID NO: 565567 - RNA, 22 nt, Human
acagcaaaggacgaacacucug

SEQ ID NO: 565568 - RNA, 22 nt, Human
gcuguacaggguuauccuuucc

SEQ ID NO: 565569 - RNA, 22 nt, Human
cugcuuccaugcaauggcaguc

SEQ ID NO: 565570 - RNA, 22 nt, Human
cuccagcuuuuucccaguuggc

SEQ ID NO: 565571 - RNA, 22 nt, Human
aaaauccacaacgcucauuuca

SEQ ID NO: 565572 - RNA, 22 nt, Human
aaaaaccuuucccauacuaaga

SEQ ID NO: 565573 - RNA, 22 nt, Human
uuuugauaucaugaugaacaga

SEQ ID NO: 565574 - RNA, 22 nt, Human
accaucuuaguggccagcucuc

SEQ ID NO: 565575 - RNA, 22 nt, Human
caauaguaaauuacggaggaga

SEQ ID NO: 565576 - RNA, 22 nt, Human
acagacuguuugguucaugucu

SEQ ID NO: 565577 - RNA, 22 nt, Human
agcuuuuaguacguuaaaauug

SEQ ID NO: 565578 - RNA, 22 nt, Human
uuuccacuguagagauguugaa

SEQ ID NO: 565579 - RNA, 22 nt, Human
gcuguacauucugcacaggccc

SEQ ID NO: 565580 - RNA, 22 nt, Human
aaaaacugcaauuacuuuuguc

SEQ ID NO: 565581 - RNA, 22 nt, Human
ggcagaggaggggugaauuugc

SEQ ID NO: 565582 - RNA, 22 nt, Human
gcgguagcucaagcuuguaauc

SEQ ID NO: 565583 - RNA, 22 nt, Human
cugagcugguucucuugugaaa

SEQ ID NO: 565584 - RNA, 22 nt, Human
caaaagaagcucuuggggcuag

SEQ ID NO: 565585 - RNA, 22 nt, Human
uguuuuuccaugugcagaacaa

SEQ ID NO: 565586 - RNA, 22 nt, Human
acauuucucauucuccccuaac

SEQ ID NO: 565587 - RNA, 22 nt, Human
aagaagaaguguuauuuuuaga

SEQ ID NO: 565588 - RNA, 22 nt, Human
acauaaaggugacuaacaucuu

SEQ ID NO: 565589 - RNA, 22 nt, Human
uaaacaagcugucugauauucu

SEQ ID NO: 565590 - RNA, 22 nt, Human
cacuuggaggaaggccuauuca

SEQ ID NO: 565591 - RNA, 22 nt, Human
ucaggagacuuaugucacagug

SEQ ID NO: 565592 - RNA, 22 nt, Human
gaaauucaggacaaagacucuu

SEQ ID NO: 565593 - RNA, 22 nt, Human
ucagaaugaaauuucuuucaga

SEQ ID NO: 565594 - RNA, 22 nt, Human
ggcagagguagcuggaaccagg

SEQ ID NO: 565595 - RNA, 22 nt, Human
ucuuuuaucuguuguguaacaa

SEQ ID NO: 565596 - RNA, 22 nt, Human
ggaggcucgcuggucgcacagc

SEQ ID NO: 565597 - RNA, 22 nt, Human
aagaauuuuccagcaugucagu

SEQ ID NO: 565598 - RNA, 22 nt, Human
acauuucuucccuuuagcagaa

SEQ ID NO: 565599 - RNA, 22 nt, Human
aagucaaucacaugcacacuga

SEQ ID NO: 565600 - RNA, 22 nt, Human
cuccagcuucccucagcugugg

SEQ ID NO: 565601 - RNA, 22 nt, Human
acaguucccgucuugcacagcu

SEQ ID NO: 565602 - RNA, 22 nt, Human
ccuguacuagggucucauugcc

SEQ ID NO: 565603 - RNA, 22 nt, Human
uucuaguucauauucucaaaga

SEQ ID NO: 565604 - RNA, 22 nt, Human
acuguaaauuuugguugcaggu

SEQ ID NO: 565605 - RNA, 22 nt, Human
auaaacugaagggaacacugag

SEQ ID NO: 565606 - RNA, 21 nt, Human
aaacugaagagacaggaacuu

SEQ ID NO: 565607 - RNA, 22 nt, Human
acuguacaugcaucuugucuau

SEQ ID NO: 565608 - RNA, 22 nt, Human
gguuccacgguguuuggaggca

SEQ ID NO: 565609 - RNA, 22 nt, Human
cuacagcagagcuacacuaacu

SEQ ID NO: 565610 - RNA, 22 nt, Human
guuauauauaguauuucucuga

SEQ ID NO: 565611 - RNA, 22 nt, Human
uucugucugauggugccagaac

SEQ ID NO: 565612 - RNA, 22 nt, Human
cuauuuaucuauuucugaauga

SEQ ID NO: 565613 - RNA, 22 nt, Human
uucucuugugccaaguuguugc

SEQ ID NO: 565614 - RNA, 22 nt, Human
gguuccccaggcggcccuugga

SEQ ID NO: 565615 - RNA, 22 nt, Human
cucaggaguuggaggcuacagu

SEQ ID NO: 565616 - RNA, 20 nt, Human
uuuuauauguaggguauaug

SEQ ID NO: 565617 - RNA, 22 nt, Human
aauaagaauuuacuugucaaga

SEQ ID NO: 565618 - RNA, 22 nt, Human
ucuccacucugagugccuuuca

SEQ ID NO: 565619 - RNA, 22 nt, Human
auuucuacaguacacaugcauu

SEQ ID NO: 565620 - RNA, 22 nt, Human
augcagaaggagccaugcuugc

SEQ ID NO: 565621 - RNA, 18 nt, Human
acauuucuaggugaaagc

SEQ ID NO: 565622 - RNA, 22 nt, Human
aauguuacgaucaacaacacau

SEQ ID NO: 565623 - RNA, 22 nt, Human
gcuguacaguuuacuagguggg

SEQ ID NO: 565624 - RNA, 22 nt, Human
uuccacuuaguggaagggcaug

SEQ ID NO: 565625 - RNA, 21 nt, Human
uguuuauggaaaagagacaaa

SEQ ID NO: 565626 - RNA, 22 nt, Human
caaaacugucuagagagagaag

SEQ ID NO: 565627 - RNA, 22 nt, Human
auuuauuauugugguuacuucu

SEQ ID NO: 565628 - RNA, 22 nt, Human
guguuaaccagcuaaacuuugc

SEQ ID NO: 565629 - RNA, 22 nt, Human
gcaaaaacugcaauuacuuuug

SEQ ID NO: 565630 - RNA, 23 nt, Human
aggagaagagauuuccacaugca

SEQ ID NO: 565631 - RNA, 22 nt, Human
acuuucuuaggcuguauaaaug

SEQ ID NO: 565632 - RNA, 22 nt, Human
acaagaauuauuucuaguuaac

SEQ ID NO: 565633 - RNA, 22 nt, Human
uaaaacugcuugguauggucua

SEQ ID NO: 565634 - RNA, 22 nt, Human
uccagcucaggguuggcucaag

SEQ ID NO: 565635 - RNA, 22 nt, Human
augucuuucuuauggucuguug

SEQ ID NO: 565636 - RNA, 22 nt, Human
acuuuuuuauaaggaagaagau

SEQ ID NO: 565637 - RNA, 22 nt, Human
uuucuauuuacagugcuaggua

SEQ ID NO: 565638 - RNA, 22 nt, Human
aacauuucuucugaaacugagu

SEQ ID NO: 565639 - RNA, 21 nt, Human
uuuguucaggggcaaaguuaa

SEQ ID NO: 565640 - RNA, 18 nt, Human
aagaacugagguccuaga

SEQ ID NO: 565641 - RNA, 22 nt, Human
ggaggcuccuaagcugacuuga

SEQ ID NO: 565642 - RNA, 22 nt, Human
aggcagagagcaguggccgucu

SEQ ID NO: 565643 - RNA, 22 nt, Human
aaauguucuacuuugauaauua

SEQ ID NO: 565644 - RNA, 22 nt, Human
aguuucuguuaccauauuugac

SEQ ID NO: 565645 - RNA, 22 nt, Human
acagacaaguaguucagacaag

SEQ ID NO: 565646 - RNA, 22 nt, Human
aagacuguaugagacaauauaa

SEQ ID NO: 565647 - RNA, 22 nt, Human
acauuucucagguaagucauuu

SEQ ID NO: 565648 - RNA, 22 nt, Human
uauugaaauccauuacguucuu

SEQ ID NO: 565649 - RNA, 22 nt, Human
acuguccauaauauuggugaac

SEQ ID NO: 565650 - RNA, 22 nt, Human
cacuguacugugaauaaggagg

SEQ ID NO: 565651 - RNA, 16 nt, Human
aggcagagauuuaccc

SEQ ID NO: 565652 - RNA, 22 nt, Human
ucagaaauagucuuuaaaauga

SEQ ID NO: 565653 - RNA, 22 nt, Human
aaacuguaaagcaggugaguag

SEQ ID NO: 565654 - RNA, 22 nt, Human
aguuucuaacauauagcauugg

SEQ ID NO: 565655 - RNA, 22 nt, Human
ucugucuuuagaggccugugcu

SEQ ID NO: 565656 - RNA, 21 nt, Human
agaaaaacacgauauaagccc

SEQ ID NO: 565657 - RNA, 19 nt, Human
agacucugugugagacuuu

SEQ ID NO: 565658 - RNA, 22 nt, Human
cacuguacagcauuaacaaggc

SEQ ID NO: 565659 - RNA, 22 nt, Human
uugucuuuggaaauuuaauguu

SEQ ID NO: 565660 - RNA, 22 nt, Human
ccuguauuagguagacaacuau

SEQ ID NO: 565661 - RNA, 20 nt, Human
acuggacacugaggugagcu

SEQ ID NO: 565662 - RNA, 22 nt, Human
uucuaguuuucaguccaccagg

SEQ ID NO: 565663 - RNA, 22 nt, Human
ucagucuccuuuccucuagaca

SEQ ID NO: 565664 - RNA, 21 nt, Human
uuuauuaacaacuguggacgu

SEQ ID NO: 565665 - RNA, 22 nt, Human
acuauacauugaauguuaaggu

SEQ ID NO: 565666 - RNA, 22 nt, Human
uacaagacgagggaaguucuuu

SEQ ID NO: 565667 - RNA, 23 nt, Human
aaagacugcugagaauuuuagga

SEQ ID NO: 565668 - RNA, 22 nt, Human
uuucuacagguugauggguuug

SEQ ID NO: 565669 - RNA, 22 nt, Human
gacccuguuucuacaaauaauu

SEQ ID NO: 565670 - RNA, 22 nt, Human
auucagaaauagaaaauuugau

SEQ ID NO: 565671 - RNA, 22 nt, Human
acauuucucagggaguuuugcu

SEQ ID NO: 565672 - RNA, 19 nt, Human
cuggaaugauagagaccuc

SEQ ID NO: 565673 - RNA, 22 nt, Human
acauuucugagcagggagcugu

SEQ ID NO: 565674 - RNA, 22 nt, Human
aagaaaguggguaauaugauuu

SEQ ID NO: 565675 - RNA, 22 nt, Human
cuacaagauuuuuaaaacugua

SEQ ID NO: 565676 - RNA, 23 nt, Human
uuuuccagaaucgacucuguaga

SEQ ID NO: 565677 - RNA, 22 nt, Human
aaaaacuguaauuacuuuugca

SEQ ID NO: 565678 - RNA, 22 nt, Human
uucuaguucccacauaguugcc

SEQ ID NO: 565679 - RNA, 22 nt, Human
cuuuggaacauacugcugagcu

SEQ ID NO: 565680 - RNA, 22 nt, Human
gcugugagcugccugugucaca

SEQ ID NO: 565681 - RNA, 22 nt, Human
auggcagagggauugaacagcu

SEQ ID NO: 565682 - RNA, 22 nt, Human
gcagaggccaucaacuuugcca

SEQ ID NO: 565683 - RNA, 22 nt, Human
cagcugaguuuccaagucugcc

SEQ ID NO: 565684 - RNA, 22 nt, Human
gaaagacauaguugcaagaugg

SEQ ID NO: 565685 - RNA, 22 nt, Human
cuguacaggucaaugauaagau

SEQ ID NO: 565686 - RNA, 22 nt, Human
uaaggaaacaacuuguauuuuu

SEQ ID NO: 565687 - RNA, 22 nt, Human
acauuucugcauguaggguaau

SEQ ID NO: 565688 - RNA, 22 nt, Human
guacaaaaguuauugcgguuuu

SEQ ID NO: 565689 - RNA, 22 nt, Human
cucaggagguuuccugucuagg

SEQ ID NO: 565690 - RNA, 22 nt, Human
caguuucucucauacauauuug

SEQ ID NO: 565691 - RNA, 22 nt, Human
uagcauuuggacauugucaccu

SEQ ID NO: 565692 - RNA, 22 nt, Human
aaagacugggacugcagcaggc

SEQ ID NO: 565693 - RNA, 22 nt, Human
gcuguacauuuguguacacuug

SEQ ID NO: 565694 - RNA, 21 nt, Human
ggcuguggagccaugacucac

SEQ ID NO: 565695 - RNA, 22 nt, Human
gcuuuaaauggcuugcccaagu

SEQ ID NO: 565696 - RNA, 22 nt, Human
agaggaaaaugaguuccagaau

SEQ ID NO: 565697 - RNA, 22 nt, Human
auaaaaaugagggcgguagcua

SEQ ID NO: 565698 - RNA, 22 nt, Human
aaaguucagugccuucuauaca

SEQ ID NO: 565699 - RNA, 22 nt, Human
ccuguacacggucuaugccucc

SEQ ID NO: 565700 - RNA, 22 nt, Human
cuguacagaguucugaguguac

SEQ ID NO: 565701 - RNA, 22 nt, Human
ugaaacaagggaccguccuuuc

SEQ ID NO: 565702 - RNA, 22 nt, Human
uuuguucacugagcaaugauua

SEQ ID NO: 565703 - RNA, 22 nt, Human
uucuacuuuggacauaaaggac

SEQ ID NO: 565704 - RNA, 22 nt, Human
gcuguacaaggccucugccauc

SEQ ID NO: 565705 - RNA, 22 nt, Human
gguuccaccuggcgagggguau

SEQ ID NO: 565706 - RNA, 22 nt, Human
caauuucuaacauuccauggau

SEQ ID NO: 565707 - RNA, 22 nt, Human
aacauuucagcaaauaagaaca

SEQ ID NO: 565708 - RNA, 22 nt, Human
caaacuguucucugugggauuc

SEQ ID NO: 565709 - RNA, 22 nt, Human
acauuucuuucuauucaguagc

SEQ ID NO: 565710 - RNA, 22 nt, Human
uuucuacaugucaauccaaacc

SEQ ID NO: 565711 - RNA, 21 nt, Human
uaaaacuguaacuuuguccug

SEQ ID NO: 565712 - RNA, 22 nt, Human
caaaauucugcauuucuaauaa

SEQ ID NO: 565713 - RNA, 22 nt, Human
acauuguauaaugauuaucaca

SEQ ID NO: 565714 - RNA, 22 nt, Human
gcuguacaaauuccacaagaga

SEQ ID NO: 565715 - RNA, 22 nt, Human
uuggccacacucacuagagccc

SEQ ID NO: 565716 - RNA, 22 nt, Human
ucuguacauuuggggaccccag

SEQ ID NO: 565717 - RNA, 22 nt, Human
gagaaaauagcauguguaguau

SEQ ID NO: 565718 - RNA, 22 nt, Human
auccacccugugguggcuuucu

SEQ ID NO: 565719 - RNA, 22 nt, Human
gcagaauguaggccuucagugu

SEQ ID NO: 565720 - RNA, 22 nt, Human
ucacaagauacaguuagaagca

SEQ ID NO: 565721 - RNA, 22 nt, Human
ccuguacauggccaucuuuacc

SEQ ID NO: 565722 - RNA, 22 nt, Human
acacuguagcugagggcaugcg

SEQ ID NO: 565723 - RNA, 22 nt, Human
uaggaaaagcacaggauguucu

SEQ ID NO: 565724 - RNA, 20 nt, Human
aacacugugcgugguaggug

SEQ ID NO: 565725 - RNA, 22 nt, Human
agaacugguggugaucaguuau

SEQ ID NO: 565726 - RNA, 22 nt, Human
gaaaacugugauuagaaugccu

SEQ ID NO: 565727 - RNA, 22 nt, Human
cuguaaaacugcuuaaguaugc

SEQ ID NO: 565728 - RNA, 22 nt, Human
ugcucagugagucugugacagg

SEQ ID NO: 565729 - RNA, 22 nt, Human
aagacugucugggacaagauga

SEQ ID NO: 565730 - RNA, 22 nt, Human
caguuccuaugggcaaaacaca

SEQ ID NO: 565731 - RNA, 22 nt, Human
caguucuaauuaauaggaguaa

SEQ ID NO: 565732 - RNA, 22 nt, Human
cucuccagaucugcugagccag

SEQ ID NO: 565733 - RNA, 22 nt, Human
caggagacuauggcccaaggcc

SEQ ID NO: 565734 - RNA, 17 nt, Human
ucugucuugacugucac

SEQ ID NO: 565735 - RNA, 22 nt, Human
uuuacacauaccucuuuaaagu

SEQ ID NO: 565736 - RNA, 22 nt, Human
uggaaacuaagacuagagagac

SEQ ID NO: 565737 - RNA, 22 nt, Human
uucaaguucauguguagucagu

SEQ ID NO: 565738 - RNA, 23 nt, Human
cagaggcaucggauucaacauca

SEQ ID NO: 565739 - RNA, 22 nt, Human
uaaggaaagugccaugauuucu

SEQ ID NO: 565740 - RNA, 22 nt, Human
uacuguacugcaguucugcaaa

SEQ ID NO: 565741 - RNA, 22 nt, Human
auuuaacaagacagagaacugg

SEQ ID NO: 565742 - RNA, 22 nt, Human
auucuacaacccaauaauaauu

SEQ ID NO: 565743 - RNA, 22 nt, Human
caaagacugcauaacacaugaa

SEQ ID NO: 565744 - RNA, 22 nt, Human
aacauguagcagaaacgacuaa

SEQ ID NO: 565745 - RNA, 22 nt, Human
auacaaagcuuucugucuggua

SEQ ID NO: 565746 - RNA, 22 nt, Human
ggaaacagagggcaccugagcc

SEQ ID NO: 565747 - RNA, 22 nt, Human
gacaaaacacauuaguuuaaaa

SEQ ID NO: 565748 - RNA, 23 nt, Human
ucuguacaauugagaagagaaca

SEQ ID NO: 565749 - RNA, 19 nt, Human
gcuguacaguaaggagaca

SEQ ID NO: 565750 - RNA, 22 nt, Human
ucaggagauguaaccuuagcug

SEQ ID NO: 565751 - RNA, 22 nt, Human
ucuaccacuuauuagcucugug

SEQ ID NO: 565752 - RNA, 22 nt, Human
acuguaaccaguguggugagag

SEQ ID NO: 565753 - RNA, 22 nt, Human
ucccuagucgcaucuguggaga

SEQ ID NO: 565754 - RNA, 22 nt, Human
aaacaguagaaguguauuuuau

SEQ ID NO: 565755 - RNA, 22 nt, Human
cucccacuccuggcucaccaca

SEQ ID NO: 565756 - RNA, 22 nt, Human
aggcugugauuccaccacucuc

SEQ ID NO: 565757 - RNA, 22 nt, Human
ugaaacaaauuuggaaaaucua

SEQ ID NO: 565758 - RNA, 22 nt, Human
agacuguacuuucugcagcucu

SEQ ID NO: 565759 - RNA, 22 nt, Human
auuguacagaugagguaaguga

SEQ ID NO: 565760 - RNA, 22 nt, Human
agugcaauguguacagaaaaau

SEQ ID NO: 565761 - RNA, 22 nt, Human
aagauuuaccacuuuauucaag

SEQ ID NO: 565762 - RNA, 22 nt, Human
caugaaaaauuuacuguuaaca

SEQ ID NO: 565763 - RNA, 22 nt, Human
cugucuuugguccugucuguua

SEQ ID NO: 565764 - RNA, 22 nt, Human
cugugacagagcuugagugaga

SEQ ID NO: 565765 - RNA, 19 nt, Human
acaaacugaguacacuugu

SEQ ID NO: 565766 - RNA, 22 nt, Human
aauacagauauucagugguacu

SEQ ID NO: 565767 - RNA, 22 nt, Human
cucaggaggccauucucaaggu

SEQ ID NO: 565768 - RNA, 22 nt, Human
ggcagaggaaggaugaauucac

SEQ ID NO: 565769 - RNA, 17 nt, Human
gguucaguucugcauuc

SEQ ID NO: 565770 - RNA, 22 nt, Human
uucuacuuuagcaugcucauuc

SEQ ID NO: 565771 - RNA, 22 nt, Human
guucaaguucauaucucuuaac

SEQ ID NO: 565772 - RNA, 22 nt, Human
aacuguaauuuuuacauaguaa

SEQ ID NO: 565773 - RNA, 22 nt, Human
aggcagaggaaggguggauuug

SEQ ID NO: 565774 - RNA, 22 nt, Human
aacuuucuuucacagaaguauc

SEQ ID NO: 565775 - RNA, 22 nt, Human
acuguauaaggcauagguaagc

SEQ ID NO: 565776 - RNA, 22 nt, Human
acauuucuaauuuaauguaaca

SEQ ID NO: 565777 - RNA, 22 nt, Human
agccaggauggucucgaucggc

SEQ ID NO: 565778 - RNA, 22 nt, Human
uugacaaaggaccuugcuauuu

SEQ ID NO: 565779 - RNA, 22 nt, Human
agcauaaaggucaacguuuuag

SEQ ID NO: 565780 - RNA, 22 nt, Human
aagcuuuaaggaauuuuaugga

SEQ ID NO: 565781 - RNA, 22 nt, Human
uuucuacauucaaaaacuacca

SEQ ID NO: 565782 - RNA, 22 nt, Human
aacuguaaggcuuagaacagca

SEQ ID NO: 565783 - RNA, 22 nt, Human
ugucucaucucuuaaccccacu

SEQ ID NO: 565784 - RNA, 22 nt, Human
aaaaguuaccucuguaauauaa

SEQ ID NO: 565785 - RNA, 22 nt, Human
auucuucugccuacuuucaucc

SEQ ID NO: 565786 - RNA, 22 nt, Human
gacauaaaauucaauaauuugu

SEQ ID NO: 565787 - RNA, 22 nt, Human
ucauuucucugagucugauaau

SEQ ID NO: 565788 - RNA, 22 nt, Human
gcuuuuauugucuuuacgacga

SEQ ID NO: 565789 - RNA, 22 nt, Human
auaccuguguauccacaagcgu

SEQ ID NO: 565790 - RNA, 22 nt, Human
cuuggucauuucuuguccuguu

SEQ ID NO: 565791 - RNA, 22 nt, Human
acauuucucuuagaguuggacu

SEQ ID NO: 565792 - RNA, 22 nt, Human
aggcaagaacagacaugggagu

SEQ ID NO: 565793 - RNA, 22 nt, Human
cugguuccaggauggaucuuuc

SEQ ID NO: 565794 - RNA, 22 nt, Human
auagcagaaaccaagcuucuuc

SEQ ID NO: 565795 - RNA, 22 nt, Human
caggaaugacccaacaguuuca

SEQ ID NO: 565796 - RNA, 22 nt, Human
acuguacacagugguguacugu

SEQ ID NO: 565797 - RNA, 22 nt, Human
ccaguucugacacaagcacagu

SEQ ID NO: 565798 - RNA, 22 nt, Human
auacuguaucacuugugaguga

SEQ ID NO: 565799 - RNA, 22 nt, Human
caguauuuucaggauuuggaag

SEQ ID NO: 565800 - RNA, 19 nt, Human
aaaaggaauauucuuuggg

SEQ ID NO: 565801 - RNA, 22 nt, Human
aggcagagcugauguucuguga

SEQ ID NO: 565802 - RNA, 22 nt, Human
ggcaggaggaagaguuagcacc

SEQ ID NO: 565803 - RNA, 20 nt, Human
ucuguacacucaucuucugc

SEQ ID NO: 565804 - RNA, 22 nt, Human
gacaagacagcuugcagacaac

SEQ ID NO: 565805 - RNA, 22 nt, Human
aaagacugcaaaaacgcacaga

SEQ ID NO: 565806 - RNA, 22 nt, Human
agcaauaacagaaaacuuuccu

SEQ ID NO: 565807 - RNA, 22 nt, Human
uggacaacauagugagaccuca

SEQ ID NO: 565808 - RNA, 22 nt, Human
acuguacuuuucuuggcuagau

SEQ ID NO: 565809 - RNA, 22 nt, Human
cuguacauaaaggaauaggugu

SEQ ID NO: 565810 - RNA, 22 nt, Human
uugaaaaaauugguagaggaug

SEQ ID NO: 565811 - RNA, 22 nt, Human
cugucugucaccaaaacagacu

SEQ ID NO: 565812 - RNA, 22 nt, Human
uucauaguguuuccuuccagug

SEQ ID NO: 565813 - RNA, 22 nt, Human
aaacuguaggagggaaaggaag

SEQ ID NO: 565814 - RNA, 22 nt, Human
uaggaaaagucuagauugauga

SEQ ID NO: 565815 - RNA, 22 nt, Human
uuucuauucuggaucuguggca

SEQ ID NO: 565816 - RNA, 23 nt, Human
uggcuccaugaaaauuacgagga

SEQ ID NO: 565817 - RNA, 22 nt, Human
ucuguacauuuguguugugaau

SEQ ID NO: 565818 - RNA, 22 nt, Human
acuguacauauggauucuaaga

SEQ ID NO: 565819 - RNA, 22 nt, Human
aagaaacuguugcgugacagcg

SEQ ID NO: 565820 - RNA, 22 nt, Human
uaaagccacuucauucuagucu

SEQ ID NO: 565821 - RNA, 22 nt, Human
agaaaauuagauuuuacugugu

SEQ ID NO: 565822 - RNA, 22 nt, Human
ugaguccaccuuaguauauggg

SEQ ID NO: 565823 - RNA, 22 nt, Human
aagaaaacguuuugaggaguuu

SEQ ID NO: 565824 - RNA, 22 nt, Human
uccaucuguuuacuauaaagau

SEQ ID NO: 565825 - RNA, 22 nt, Human
gugcaaugugcuucgugccaug

SEQ ID NO: 565826 - RNA, 22 nt, Human
ugagcuggucacuccuucugaa

SEQ ID NO: 565827 - RNA, 20 nt, Human
uuucauugucagaaucuuau

SEQ ID NO: 565828 - RNA, 22 nt, Human
ucauuucuauugcuacugucug

SEQ ID NO: 565829 - RNA, 22 nt, Human
ccuguacauuagcugugaauug

SEQ ID NO: 565830 - RNA, 22 nt, Human
ggcagagacuggguuggcagag

SEQ ID NO: 565831 - RNA, 22 nt, Human
cugagcugagccaaaucugucu

SEQ ID NO: 565832 - RNA, 22 nt, Human
auacaagaucacuccagaaaau

SEQ ID NO: 565833 - RNA, 22 nt, Human
agggaaauuaaugugagcaaug

SEQ ID NO: 565834 - RNA, 19 nt, Human
gcuuuaguuuacucaucua

SEQ ID NO: 565835 - RNA, 22 nt, Human
aacuguucuucauuuucaguau

SEQ ID NO: 565836 - RNA, 22 nt, Human
uuuuaucagcagggauaacaag

SEQ ID NO: 565837 - RNA, 22 nt, Human
acauuucuuuucaucucuauau

SEQ ID NO: 565838 - RNA, 22 nt, Human
uggcuccaucauccaugcaaga

SEQ ID NO: 565839 - RNA, 22 nt, Human
acuuuggguaagccaggugcua

SEQ ID NO: 565840 - RNA, 22 nt, Human
augaaacaaaccucuauggagu

SEQ ID NO: 565841 - RNA, 22 nt, Human
cucaggaggaugacugccuugg

SEQ ID NO: 565842 - RNA, 22 nt, Human
caagucaaagacuagaacuagu

SEQ ID NO: 565843 - RNA, 19 nt, Human
caaguucuggagauuaggg

SEQ ID NO: 565844 - RNA, 22 nt, Human
uucaggaggugagcaagaaggg

SEQ ID NO: 565845 - RNA, 21 nt, Human
agaauucuuaaguauucuaau

SEQ ID NO: 565846 - RNA, 23 nt, Human
gcuguacaggaaccaguuuggag

SEQ ID NO: 565847 - RNA, 17 nt, Human
aucuggaagcuagcuga

SEQ ID NO: 565848 - RNA, 22 nt, Human
acagaacugagaauucucuauc

SEQ ID NO: 565849 - RNA, 22 nt, Human
ugaguccaagagccagugggaa

SEQ ID NO: 565850 - RNA, 22 nt, Human
acugaguguaggacuuugaguu

SEQ ID NO: 565851 - RNA, 22 nt, Human
agacuguagggauagaggucuu

SEQ ID NO: 565852 - RNA, 22 nt, Human
acuguucauuuguccuguaucu

SEQ ID NO: 565853 - RNA, 22 nt, Human
cucaggagcuuccucagcccau

SEQ ID NO: 565854 - RNA, 22 nt, Human
uaaggaaaguacauguuuugac

SEQ ID NO: 565855 - RNA, 22 nt, Human
uuucuacaguacugauuucaua

SEQ ID NO: 565856 - RNA, 22 nt, Human
ggcagaggugacagugucuuuu

SEQ ID NO: 565857 - RNA, 22 nt, Human
aggcugugcacagggcaccugc

SEQ ID NO: 565858 - RNA, 22 nt, Human
aaacucuuccuuucuuuaaagu

SEQ ID NO: 565859 - RNA, 22 nt, Human
gcuguacauucuguggguuugg

SEQ ID NO: 565860 - RNA, 22 nt, Human
gagauuuccauauuuuguaaca

SEQ ID NO: 565861 - RNA, 22 nt, Human
caguccugagccaaucaugaug

SEQ ID NO: 565862 - RNA, 22 nt, Human
gacauaaaccuugagauauuaa

SEQ ID NO: 565863 - RNA, 22 nt, Human
aagacugugucuauggcuacuc

SEQ ID NO: 565864 - RNA, 22 nt, Human
ugaaacaaaccaguaauuuugu

SEQ ID NO: 565865 - RNA, 22 nt, Human
aauguacaucucaguguaguac

SEQ ID NO: 565866 - RNA, 22 nt, Human
cagucucugugccagauccugg

SEQ ID NO: 565867 - RNA, 22 nt, Human
uagcauuucccaaaugcauuug

SEQ ID NO: 565868 - RNA, 22 nt, Human
aaauguucccaauaugaagcug

SEQ ID NO: 565869 - RNA, 22 nt, Human
caccugagcacuggggccgccc

SEQ ID NO: 565870 - RNA, 22 nt, Human
ucuauuugcugguugcuucugu

SEQ ID NO: 565871 - RNA, 22 nt, Human
uccagcuggggacaugggcuuc

SEQ ID NO: 565872 - RNA, 22 nt, Human
cagcugaguuacucugaggucu

SEQ ID NO: 565873 - RNA, 22 nt, Human
ucuuacagaaaauagauaacau

SEQ ID NO: 565874 - RNA, 22 nt, Human
aguuucuagccucacuguuuag

SEQ ID NO: 565875 - RNA, 22 nt, Human
gaaauccaguucccuacucuua

SEQ ID NO: 565876 - RNA, 22 nt, Human
agacucugugcuccuugcuuuc

SEQ ID NO: 565877 - RNA, 22 nt, Human
aacauuaauuacagucaaacau

SEQ ID NO: 565878 - RNA, 22 nt, Human
ggcagcagggucuagauugaug

SEQ ID NO: 565879 - RNA, 21 nt, Human
ugcaggagucugugagucagg

SEQ ID NO: 565880 - RNA, 22 nt, Human
uguaacaaaauaccuuggauug

SEQ ID NO: 565881 - RNA, 22 nt, Human
uucuaguugagggagacaaaua

SEQ ID NO: 565882 - RNA, 22 nt, Human
gccagccugugcuuggccaggc

SEQ ID NO: 565883 - RNA, 22 nt, Human
cucuggagggaggcugagcugg

SEQ ID NO: 565884 - RNA, 21 nt, Human
uccuguaagcuuggguggcuc

SEQ ID NO: 565885 - RNA, 22 nt, Human
gaacaaacacaucccagcagug

SEQ ID NO: 565886 - RNA, 22 nt, Human
uggucaacaggcagggaugaaa

SEQ ID NO: 565887 - RNA, 18 nt, Human
cugucuuuuuucucucca

SEQ ID NO: 565888 - RNA, 22 nt, Human
ccuguacacaauuccgaggaua

SEQ ID NO: 565889 - RNA, 22 nt, Human
aacacuguggucuuuucaguaa

SEQ ID NO: 565890 - RNA, 22 nt, Human
uacaggaagcacucaagaaaug

SEQ ID NO: 565891 - RNA, 22 nt, Human
gaacauuuaugaugcaauaccu

SEQ ID NO: 565892 - RNA, 22 nt, Human
uuuccacugggcacggggccag

SEQ ID NO: 565893 - RNA, 22 nt, Human
aggcagagcuggguuuugaaau

SEQ ID NO: 565894 - RNA, 22 nt, Human
uucuaauuguguuugcauaucu

SEQ ID NO: 565895 - RNA, 22 nt, Human
uucaggagaaaguucaguacuu

SEQ ID NO: 565896 - RNA, 22 nt, Human
acauuucuuccacaugcugcug

SEQ ID NO: 565897 - RNA, 22 nt, Human
ucaggaaagaguguauccauca

SEQ ID NO: 565898 - RNA, 19 nt, Human
ccuguacauuauucucccc

SEQ ID NO: 565899 - RNA, 19 nt, Human
uaaaaacugaaggaagcag

SEQ ID NO: 565900 - RNA, 22 nt, Human
cucaggaguaguucagcagcug

SEQ ID NO: 565901 - RNA, 22 nt, Human
ucugaaauguucucuuguuuug

SEQ ID NO: 565902 - RNA, 22 nt, Human
ugagaugaauaacuccugcuaa

SEQ ID NO: 565903 - RNA, 22 nt, Human
acugaaaaugaauuagaaacag

SEQ ID NO: 565904 - RNA, 22 nt, Human
acccucaacaaauucacucuau

SEQ ID NO: 565905 - RNA, 22 nt, Human
ucuuuugagggccagaggaaga

SEQ ID NO: 565906 - RNA, 22 nt, Human
ccagucugaggccuggugaggg

SEQ ID NO: 565907 - RNA, 22 nt, Human
acuguacacacuucucugucuu

SEQ ID NO: 565908 - RNA, 22 nt, Human
uucuaccagcuacucacugaua

SEQ ID NO: 565909 - RNA, 22 nt, Human
guaaucucagcuacuugggagg

SEQ ID NO: 565910 - RNA, 22 nt, Human
uccauauuaacuaaaacuagaa

SEQ ID NO: 565911 - RNA, 22 nt, Human
ccuuggagcggucagcacuggu

SEQ ID NO: 565912 - RNA, 22 nt, Human
aacaugaaacccaaacagaaua

SEQ ID NO: 565913 - RNA, 22 nt, Human
aauaacaggcucaucagaugcu

SEQ ID NO: 565914 - RNA, 22 nt, Human
uuuuucugccauucaaagagga

SEQ ID NO: 565915 - RNA, 22 nt, Human
ucuguacaaaggcuauuuggag

SEQ ID NO: 565916 - RNA, 19 nt, Human
ggcagacacaguugacaug

SEQ ID NO: 565917 - RNA, 22 nt, Human
gcuuuuauuucuucacaaaagu

SEQ ID NO: 565918 - RNA, 22 nt, Human
caaaguucucggcucaaguccu

SEQ ID NO: 565919 - RNA, 22 nt, Human
cuguaaaacacuguaguaucug

SEQ ID NO: 565920 - RNA, 22 nt, Human
cacuguacuggguugaaggacg

SEQ ID NO: 565921 - RNA, 22 nt, Human
acaucacagagcccagauaaag

SEQ ID NO: 565922 - RNA, 22 nt, Human
gacuguacuugagagaggaacu

SEQ ID NO: 565923 - RNA, 22 nt, Human
aaacaguauuaucaauauauuu

SEQ ID NO: 565924 - RNA, 22 nt, Human
ucuaccacuaagugugcuuuga

SEQ ID NO: 565925 - RNA, 20 nt, Human
gugcaauggcgcaaucucgg

SEQ ID NO: 565926 - RNA, 22 nt, Human
cuggcuuuuagugugaagacuu

SEQ ID NO: 565927 - RNA, 22 nt, Human
acauuucucaucuaguagagua

SEQ ID NO: 565928 - RNA, 22 nt, Human
uucugucuucccacugaggagc

SEQ ID NO: 565929 - RNA, 23 nt, Human
aaaaaaccauguaggcacucagu

SEQ ID NO: 565930 - RNA, 22 nt, Human
uuuauauagagauuugugcaug

SEQ ID NO: 565931 - RNA, 22 nt, Human
acuuuuaugauaaucaauguuc

SEQ ID NO: 565932 - RNA, 21 nt, Human
ucugagaacuucugcugcagc

SEQ ID NO: 565933 - RNA, 22 nt, Human
cugagggagggacuuugagacu

SEQ ID NO: 565934 - RNA, 22 nt, Human
acauuucuuagccuaguuccag

SEQ ID NO: 565935 - RNA, 22 nt, Human
aauguacaaaccuucuuuguag

SEQ ID NO: 565936 - RNA, 22 nt, Human
agugcaauagcaaagaacaaca

SEQ ID NO: 565937 - RNA, 22 nt, Human
ugcacaucuuucagcaucauac

SEQ ID NO: 565938 - RNA, 22 nt, Human
cuuuggaaaaauaccuggcaua

SEQ ID NO: 565939 - RNA, 22 nt, Human
aacuguaaagguugagugguaa

SEQ ID NO: 565940 - RNA, 22 nt, Human
ccagguggaaggucugugcucu

SEQ ID NO: 565941 - RNA, 22 nt, Human
aagagcugugggugguaguccu

SEQ ID NO: 565942 - RNA, 22 nt, Human
cacaguccagacuccuggaguu

SEQ ID NO: 565943 - RNA, 22 nt, Human
cuuagaugaagucacagaaccc

SEQ ID NO: 565944 - RNA, 22 nt, Human
accaucuuaaggggacuucuua

SEQ ID NO: 565945 - RNA, 23 nt, Human
aaauauucuuuuuuaguaagugc

SEQ ID NO: 565946 - RNA, 22 nt, Human
caauuucuuguuaauucucagg

SEQ ID NO: 565947 - RNA, 22 nt, Human
acauuucuuugcuagacagcag

SEQ ID NO: 565948 - RNA, 22 nt, Human
ucuguaaucaagauauuugaga

SEQ ID NO: 565949 - RNA, 22 nt, Human
acuguacacgugucauuuacag

SEQ ID NO: 565950 - RNA, 22 nt, Human
cugagcugcuuugcuuuugggg

SEQ ID NO: 565951 - RNA, 22 nt, Human
auaauacaugguugaucuuuuc

SEQ ID NO: 565952 - RNA, 22 nt, Human
cuuuggaauaauuuccuggagu

SEQ ID NO: 565953 - RNA, 22 nt, Human
acuguacauguaaacauuguca

SEQ ID NO: 565954 - RNA, 22 nt, Human
cagcugagcaucacuagucugg

SEQ ID NO: 565955 - RNA, 22 nt, Human
gaaaguuugccucucucuugag

SEQ ID NO: 565956 - RNA, 22 nt, Human
cauguacauucuguagauggag

SEQ ID NO: 565957 - RNA, 21 nt, Human
aucuggaagaacugguaagug

SEQ ID NO: 565958 - RNA, 22 nt, Human
agggagaagguuuagcugugag

SEQ ID NO: 565959 - RNA, 20 nt, Human
ucauuucuugggguuccaag

SEQ ID NO: 565960 - RNA, 22 nt, Human
aaauucuaugucaauguuuauu

SEQ ID NO: 565961 - RNA, 22 nt, Human
uuucuauugaucuaauaaacau

SEQ ID NO: 565962 - RNA, 22 nt, Human
cucaggagacaguguccacaug

SEQ ID NO: 565963 - RNA, 22 nt, Human
agacucugauaagcaacucuug

SEQ ID NO: 565964 - RNA, 22 nt, Human
ucuguacaguaccagauaguaa

SEQ ID NO: 565965 - RNA, 22 nt, Human
ucuguacaugaguugagaauca

SEQ ID NO: 565966 - RNA, 22 nt, Human
ugaucaguguugguucuaucua

SEQ ID NO: 565967 - RNA, 22 nt, Human
cugagcugacaucuuccucuuu

SEQ ID NO: 565968 - RNA, 22 nt, Human
acuguacaaccucugccccugu

SEQ ID NO: 565969 - RNA, 22 nt, Human
uuuguucaugccuauauucuca

SEQ ID NO: 565970 - RNA, 22 nt, Human
acaggccugugugcacacgagg

SEQ ID NO: 565971 - RNA, 22 nt, Human
aaaaacugguaacuauucccca

SEQ ID NO: 565972 - RNA, 22 nt, Human
aaacaacuucugcacuaugggu

SEQ ID NO: 565973 - RNA, 22 nt, Human
uucuaccagaccccagacuugu

SEQ ID NO: 565974 - RNA, 22 nt, Human
aauuuguuacacagcaauauaa

SEQ ID NO: 565975 - RNA, 22 nt, Human
acaaaaagcuccauuacugucc

SEQ ID NO: 565976 - RNA, 22 nt, Human
cauuucuagacaaguccuggag

SEQ ID NO: 565977 - RNA, 22 nt, Human
gguuugguuuuggccaucuucc

SEQ ID NO: 565978 - RNA, 22 nt, Human
auuuuuuagaaccuggccugau

SEQ ID NO: 565979 - RNA, 22 nt, Human
cugaaacauugcaauaacaaag

SEQ ID NO: 565980 - RNA, 22 nt, Human
aacacuguacuggaagauggac

SEQ ID NO: 565981 - RNA, 22 nt, Human
auggcagaauuaggauuucaag

SEQ ID NO: 565982 - RNA, 22 nt, Human
uaaaaaguagugagaauggcgc

SEQ ID NO: 565983 - RNA, 20 nt, Human
acuuuggggucuuucucaga

SEQ ID NO: 565984 - RNA, 22 nt, Human
cagugcuguuguaagcucauug

SEQ ID NO: 565985 - RNA, 22 nt, Human
cagcuccuauuagacacugaau

SEQ ID NO: 565986 - RNA, 19 nt, Human
ugaaacaaacuuaaaagga

SEQ ID NO: 565987 - RNA, 22 nt, Human
ucaggaaaauacugcuuaucca

SEQ ID NO: 565988 - RNA, 22 nt, Human
aacuguacgauaauaaauuugu

SEQ ID NO: 565989 - RNA, 22 nt, Human
ccagcuuuucuuaucauuauaa

SEQ ID NO: 565990 - RNA, 22 nt, Human
uucuucauggguucuuuuagga

SEQ ID NO: 565991 - RNA, 22 nt, Human
aaaauuuccaccaucuuugugu

SEQ ID NO: 565992 - RNA, 22 nt, Human
acacuacaaucucagaacuaua

SEQ ID NO: 565993 - RNA, 22 nt, Human
auguucuaaucccugcuaugua

SEQ ID NO: 565994 - RNA, 22 nt, Human
auaaaagaaguuuugguacuug

SEQ ID NO: 565995 - RNA, 22 nt, Human
uucagucuccucauuuuacaaa

SEQ ID NO: 565996 - RNA, 22 nt, Human
cacaguccuacagagaucagag

SEQ ID NO: 565997 - RNA, 22 nt, Human
cucaggagagucuuauaucucc

SEQ ID NO: 565998 - RNA, 22 nt, Human
gaacuguauaggagcaguguuu

SEQ ID NO: 565999 - RNA, 22 nt, Human
aaagacugguguguuacauaua

SEQ ID NO: 566000 - RNA, 22 nt, Human
uuucauugucaauaaacuguau

SEQ ID NO: 566001 - RNA, 22 nt, Human
gucccacugggcaacuagaaaa

SEQ ID NO: 566002 - RNA, 22 nt, Human
cuaguucuuaacuguuaugauu

SEQ ID NO: 566003 - RNA, 22 nt, Human
agucucuuggcauucugaaaca

SEQ ID NO: 566004 - RNA, 22 nt, Human
uaagacaauucuucagucacaa

SEQ ID NO: 566005 - RNA, 22 nt, Human
cacuguacccauuuaaauaaau

SEQ ID NO: 566006 - RNA, 22 nt, Human
aagaauguucauuaaacuguug

SEQ ID NO: 566007 - RNA, 22 nt, Human
aagucaauuaguaaacuuggaa

SEQ ID NO: 566008 - RNA, 22 nt, Human
augaaacugggauaacuauagc

SEQ ID NO: 566009 - RNA, 18 nt, Human
acaguaaagaaaggaauu

SEQ ID NO: 566010 - RNA, 22 nt, Human
gaacauuuccagaaaggaacua

SEQ ID NO: 566011 - RNA, 22 nt, Human
acuguacaaauauugcaaaaua

SEQ ID NO: 566012 - RNA, 22 nt, Human
aaagucaaugauuucuccugga

SEQ ID NO: 566013 - RNA, 22 nt, Human
accagacacugugaagacaggc

SEQ ID NO: 566014 - RNA, 20 nt, Human
acaugaaaggaaacaggaaa

SEQ ID NO: 566015 - RNA, 22 nt, Human
gacaagacaugugaugacauca

SEQ ID NO: 566016 - RNA, 22 nt, Human
ugaaacaaaaguauguagcuug

SEQ ID NO: 566017 - RNA, 22 nt, Human
uacaaaaaauugauacugacga

SEQ ID NO: 566018 - RNA, 23 nt, Human
aucaagucaucagcaaaauacau

SEQ ID NO: 566019 - RNA, 22 nt, Human
uauccaauucaccauugauggg

SEQ ID NO: 566020 - RNA, 22 nt, Human
aggcucuggcaacagcuggugu

SEQ ID NO: 566021 - RNA, 22 nt, Human
uucugaaaggcagguuguuugc

SEQ ID NO: 566022 - RNA, 22 nt, Human
uuagaucuuaggcaaauguguu

SEQ ID NO: 566023 - RNA, 22 nt, Human
uguauuccaaaaugcugaggau

SEQ ID NO: 566024 - RNA, 17 nt, Human
ccugucuuguuucugcc

SEQ ID NO: 566025 - RNA, 22 nt, Human
gcagaggcucuuuaaugcuuag

SEQ ID NO: 566026 - RNA, 23 nt, Human
uucuuauuuacuuuggaaucucc

SEQ ID NO: 566027 - RNA, 22 nt, Human
acaguccuguacaggccauauc

SEQ ID NO: 566028 - RNA, 20 nt, Human
auucuacaagaauaagcaug

SEQ ID NO: 566029 - RNA, 22 nt, Human
acauguguggacaugaaucuac

SEQ ID NO: 566030 - RNA, 22 nt, Human
aacaacuugcguucagagaugu

SEQ ID NO: 566031 - RNA, 22 nt, Human
aaagucaaaaugcucuccuguc

SEQ ID NO: 566032 - RNA, 22 nt, Human
agacuguaauuuguggccuccu

SEQ ID NO: 566033 - RNA, 22 nt, Human
cugucuuuucauacuuucccuc

SEQ ID NO: 566034 - RNA, 21 nt, Human
accaucuuccaugcauuauau

SEQ ID NO: 566035 - RNA, 22 nt, Human
aggcagaggagaaugaucuucc

SEQ ID NO: 566036 - RNA, 22 nt, Human
uaaacaaggguuacugagcaug

SEQ ID NO: 566037 - RNA, 22 nt, Human
aacuguaagacaaaugacuucu

SEQ ID NO: 566038 - RNA, 22 nt, Human
aaauuuucucucuaagacuuaa

SEQ ID NO: 566039 - RNA, 22 nt, Human
aaacugaaacaucaucauguug

SEQ ID NO: 566040 - RNA, 22 nt, Human
ccuguacaucugcucucauugc

SEQ ID NO: 566041 - RNA, 22 nt, Human
acuguacacauucgucaagacu

SEQ ID NO: 566042 - RNA, 22 nt, Human
acuaaaaacuacugccaauagc

SEQ ID NO: 566043 - RNA, 22 nt, Human
uguaaguaguaauggaaggaca

SEQ ID NO: 566044 - RNA, 22 nt, Human
uagcauuuggcaccaguuauuu

SEQ ID NO: 566045 - RNA, 21 nt, Human
acagcagagaucaagacuaag

SEQ ID NO: 566046 - RNA, 22 nt, Human
gacaagacugguuuauuuaagg

SEQ ID NO: 566047 - RNA, 22 nt, Human
gacaagacauugguaaagauau

SEQ ID NO: 566048 - RNA, 22 nt, Human
agacuguaauugacaugucagc

SEQ ID NO: 566049 - RNA, 19 nt, Human
aggcagaggcuuggcuagc

SEQ ID NO: 566050 - RNA, 22 nt, Human
uucuaguuaaaguauguauuag

SEQ ID NO: 566051 - RNA, 22 nt, Human
ccuguacagugaaugaauguga

SEQ ID NO: 566052 - RNA, 22 nt, Human
ugacaaaacugcaauuacuuuu

SEQ ID NO: 566053 - RNA, 20 nt, Human
agggcagagggauuacaggc

SEQ ID NO: 566054 - RNA, 22 nt, Human
gcuuuaaaccucuacucugucc

SEQ ID NO: 566055 - RNA, 22 nt, Human
acuuuggggaacuuuucuccuc

SEQ ID NO: 566056 - RNA, 22 nt, Human
ccuggcuuuuguuuauaaauuc

SEQ ID NO: 566057 - RNA, 21 nt, Human
acuuugggcacuuuccugccc

SEQ ID NO: 566058 - RNA, 22 nt, Human
aauucuauaggcaagcuauuuu

SEQ ID NO: 566059 - RNA, 22 nt, Human
ucagucuucccuccagugcaac

SEQ ID NO: 566060 - RNA, 22 nt, Human
gaagaacugugacagaagcagu

SEQ ID NO: 566061 - RNA, 21 nt, Human
ucuguacaucauugagucccc

SEQ ID NO: 566062 - RNA, 22 nt, Human
acauuucuccuugcaggaguca

SEQ ID NO: 566063 - RNA, 22 nt, Human
cucaggaggugguagaggcccu

SEQ ID NO: 566064 - RNA, 22 nt, Human
caguccuggggaccaggcugag

SEQ ID NO: 566065 - RNA, 22 nt, Human
ggagugacucacagcugggaca

SEQ ID NO: 566066 - RNA, 22 nt, Human
gaaauucacuguauuucuuggg

SEQ ID NO: 566067 - RNA, 22 nt, Human
aaacuagagcaugugaguggga

SEQ ID NO: 566068 - RNA, 22 nt, Human
cauuuacuuaaaucuuuacaag

SEQ ID NO: 566069 - RNA, 22 nt, Human
uccaauaacaucuaaaaacuua

SEQ ID NO: 566070 - RNA, 22 nt, Human
aacuguaaugaauuguucauga

SEQ ID NO: 566071 - RNA, 22 nt, Human
uuucuccaauguaucagcacac

SEQ ID NO: 566072 - RNA, 22 nt, Human
aaacuugauuuagaacuaaggc

SEQ ID NO: 566073 - RNA, 22 nt, Human
auaacagaugugaagugcuaau

SEQ ID NO: 566074 - RNA, 22 nt, Human
cuauuaaacacuacugugcacu

SEQ ID NO: 566075 - RNA, 22 nt, Human
aguuucuauguaagcuacguga

SEQ ID NO: 566076 - RNA, 22 nt, Human
gaaaucuuuauggaaauaacaa

SEQ ID NO: 566077 - RNA, 21 nt, Human
aagaacuauugagguacacag

SEQ ID NO: 566078 - RNA, 22 nt, Human
ucuuuuauuaggcugaaauggg

SEQ ID NO: 566079 - RNA, 22 nt, Human
cagcugagaagugauagcugca

SEQ ID NO: 566080 - RNA, 22 nt, Human
cucaggagaugacagaagguau

SEQ ID NO: 566081 - RNA, 22 nt, Human
uccauuuuagagaugaagaaac

SEQ ID NO: 566082 - RNA, 22 nt, Human
uucucaggugaggcugaggcug

SEQ ID NO: 566083 - RNA, 22 nt, Human
cauuucuagggaucauaaagua

SEQ ID NO: 566084 - RNA, 22 nt, Human
uccagcuggggcaguggcuggg

SEQ ID NO: 566085 - RNA, 18 nt, Human
acauuucuaugcuucugg

SEQ ID NO: 566086 - RNA, 19 nt, Human
cucuccagcuccaguagcu

SEQ ID NO: 566087 - RNA, 22 nt, Human
uacaagaugacaggugcaugau

SEQ ID NO: 566088 - RNA, 22 nt, Human
uccacauucucuguuacagaua

SEQ ID NO: 566089 - RNA, 22 nt, Human
aacaaguaaguuuauauauauu

SEQ ID NO: 566090 - RNA, 22 nt, Human
aaacuguaagagaauaaacuac

SEQ ID NO: 566091 - RNA, 22 nt, Human
cuauuacaauucugcaaggagu

SEQ ID NO: 566092 - RNA, 21 nt, Human
ucagcuuugcaacugcacauc

SEQ ID NO: 566093 - RNA, 22 nt, Human
aaagaacuuauccuagaauuug

SEQ ID NO: 566094 - RNA, 22 nt, Human
aucuggaagccagauacucagu

SEQ ID NO: 566095 - RNA, 22 nt, Human
acugcagacucuacaguuauaa

SEQ ID NO: 566096 - RNA, 22 nt, Human
auacaagacucagcacagacgg

SEQ ID NO: 566097 - RNA, 22 nt, Human
gaaacuuuuaaaccucaugagu

SEQ ID NO: 566098 - RNA, 22 nt, Human
cuacagaaaaucagccacaggc

SEQ ID NO: 566099 - RNA, 22 nt, Human
cuggaauguagagacagcuuag

SEQ ID NO: 566100 - RNA, 22 nt, Human
cagaaacuucuggugucaaaua

SEQ ID NO: 566101 - RNA, 20 nt, Human
aagaaacuugaaaguacaag

SEQ ID NO: 566102 - RNA, 22 nt, Human
aaaacuguaggaauugggugcc

SEQ ID NO: 566103 - RNA, 22 nt, Human
aucuuaaucgaguccaugaaaa

SEQ ID NO: 566104 - RNA, 22 nt, Human
cacuuggaggcccccugugccc

SEQ ID NO: 566105 - RNA, 22 nt, Human
acacuguaaauugagugcguga

SEQ ID NO: 566106 - RNA, 20 nt, Human
gaaauucucguauuaguuua

SEQ ID NO: 566107 - RNA, 22 nt, Human
aauacagaggggucacaauuca

SEQ ID NO: 566108 - RNA, 22 nt, Human
ccacugagaccuuuuggaggag

SEQ ID NO: 566109 - RNA, 22 nt, Human
guuuaauuuuagguugucaagc

SEQ ID NO: 566110 - RNA, 22 nt, Human
uggcacauagcagguacucagu

SEQ ID NO: 566111 - RNA, 22 nt, Human
uuauacuaaaacgcauugaauu

SEQ ID NO: 566112 - RNA, 22 nt, Human
ucugucuuagcaucuuugcuca

SEQ ID NO: 566113 - RNA, 22 nt, Human
ucccagcacgucugcuguuucu

SEQ ID NO: 566114 - RNA, 22 nt, Human
cugggcaggagggcucuaugga

SEQ ID NO: 566115 - RNA, 22 nt, Human
aaguucuacagcuucgcaggca

SEQ ID NO: 566116 - RNA, 22 nt, Human
ugugccuacugauagagccaag

SEQ ID NO: 566117 - RNA, 22 nt, Human
ugguuacacagcauguggacuu

SEQ ID NO: 566118 - RNA, 22 nt, Human
aaauguuccuuuggauuaaacu

SEQ ID NO: 566119 - RNA, 22 nt, Human
acagauccugguuacagccauu

SEQ ID NO: 566120 - RNA, 22 nt, Human
caguccuguguuaaacaagagc

SEQ ID NO: 566121 - RNA, 22 nt, Human
uauauguguggauucuuguaga

SEQ ID NO: 566122 - RNA, 22 nt, Human
ucuguacaacaaagggaugaga

SEQ ID NO: 566123 - RNA, 22 nt, Human
uucaucuugauggcuuccuaau

SEQ ID NO: 566124 - RNA, 22 nt, Human
uacuguacucaacaugugaguu

SEQ ID NO: 566125 - RNA, 22 nt, Human
gacaagacuauguagaaaguau

SEQ ID NO: 566126 - RNA, 22 nt, Human
acauuucugcuagaauagguga

SEQ ID NO: 566127 - RNA, 22 nt, Human
uacuguacauuccguuuguugc

SEQ ID NO: 566128 - RNA, 22 nt, Human
cagguccugcagggagaguaaa

SEQ ID NO: 566129 - RNA, 22 nt, Human
uccagucucuacucugagauaa

SEQ ID NO: 566130 - RNA, 22 nt, Human
uuguauauauucuuaaagaugu

SEQ ID NO: 566131 - RNA, 22 nt, Human
aucuggaauccuuguggacaau

SEQ ID NO: 566132 - RNA, 22 nt, Human
acauuucucccugcaugccugc

SEQ ID NO: 566133 - RNA, 22 nt, Human
cauuucuaagaaggcugcacau

SEQ ID NO: 566134 - RNA, 22 nt, Human
ucugucuuugagaucucagccu

SEQ ID NO: 566135 - RNA, 22 nt, Human
cauuucuacagcuucuucagaa

SEQ ID NO: 566136 - RNA, 22 nt, Human
auguaacaaaugguauacaugu

SEQ ID NO: 566137 - RNA, 22 nt, Human
cugagaaaggaccucaaacagg

SEQ ID NO: 566138 - RNA, 21 nt, Human
uacaagaccggauucgggccc

SEQ ID NO: 566139 - RNA, 22 nt, Human
uuuguucauuuugagcucauca

SEQ ID NO: 566140 - RNA, 22 nt, Human
auguaacauugaauuauauagu

SEQ ID NO: 566141 - RNA, 22 nt, Human
uucuaguuuugccuuaucaaca

SEQ ID NO: 566142 - RNA, 22 nt, Human
ucugaaaugcaggcaauuugcu

SEQ ID NO: 566143 - RNA, 23 nt, Human
uugcuuagagaccuccucaucag

SEQ ID NO: 566144 - RNA, 22 nt, Human
ucauuucuaucuaugcagcuuc

SEQ ID NO: 566145 - RNA, 22 nt, Human
uuaguaauguguuaauaugaau

SEQ ID NO: 566146 - RNA, 22 nt, Human
ugcuuccagcucucuguaaggu

SEQ ID NO: 566147 - RNA, 22 nt, Human
acagguccuuauaagagcacuc

SEQ ID NO: 566148 - RNA, 22 nt, Human
uuucuauuggcgucacuguugu

SEQ ID NO: 566149 - RNA, 22 nt, Human
uaacagcucuguguggcuguaa

SEQ ID NO: 566150 - RNA, 22 nt, Human
uucaggagaauuccaagaagua

SEQ ID NO: 566151 - RNA, 22 nt, Human
uacuguacugucuuuuuugcug

SEQ ID NO: 566152 - RNA, 20 nt, Human
gugcaauggcucagucucag

SEQ ID NO: 566153 - RNA, 22 nt, Human
ccugcuuaacauugccaugaca

SEQ ID NO: 566154 - RNA, 22 nt, Human
gcaaaaaccacaauuacuuuug

SEQ ID NO: 566155 - RNA, 23 nt, Human
cauguacacacagcuguacagug

SEQ ID NO: 566156 - RNA, 20 nt, Human
ucagguagaucuuugagguc

SEQ ID NO: 566157 - RNA, 22 nt, Human
uuuuauucucaagacaauggga

SEQ ID NO: 566158 - RNA, 22 nt, Human
ucaagucuugaugagacaaacc

SEQ ID NO: 566159 - RNA, 22 nt, Human
aaauguuccauuauuguguaau

SEQ ID NO: 566160 - RNA, 22 nt, Human
cuacaggucaguaagaccuaga

SEQ ID NO: 566161 - RNA, 22 nt, Human
uuuauauccaucuuugaaguaa

SEQ ID NO: 566162 - RNA, 22 nt, Human
auuaaacaauguaaaguucuug

SEQ ID NO: 566163 - RNA, 21 nt, Human
uuuauuuauauaggacacaug

SEQ ID NO: 566164 - RNA, 19 nt, Human
agacucugccacucuucuc

SEQ ID NO: 566165 - RNA, 22 nt, Human
acagaacugcaggaggaaaagc

SEQ ID NO: 566166 - RNA, 22 nt, Human
cacaagacuuauuuguguagaa

SEQ ID NO: 566167 - RNA, 22 nt, Human
aaaacuguaucuucuugggacu

SEQ ID NO: 566168 - RNA, 22 nt, Human
aguuucuauuuucaugucuguu

SEQ ID NO: 566169 - RNA, 22 nt, Human
acaagauuuuaugacucuuuuu

SEQ ID NO: 566170 - RNA, 22 nt, Human
augucuuucaaauucugccuag

SEQ ID NO: 566171 - RNA, 20 nt, Human
acagcagauaccacaacuau

SEQ ID NO: 566172 - RNA, 21 nt, Human
ccugucuuggacugaggcacc

SEQ ID NO: 566173 - RNA, 22 nt, Human
aggaccugagaguuggaaaucc

SEQ ID NO: 566174 - RNA, 22 nt, Human
uuucuacauuuguaaccagauu

SEQ ID NO: 566175 - RNA, 22 nt, Human
uucgaguuggcuuuauuaaacu

SEQ ID NO: 566176 - RNA, 22 nt, Human
cagagcuguauuuaucuuucca

SEQ ID NO: 566177 - RNA, 22 nt, Human
uuucuaguucucugccaaaaaa

SEQ ID NO: 566178 - RNA, 22 nt, Human
auacuaagcucauuacauuuug

SEQ ID NO: 566179 - RNA, 22 nt, Human
aaaaguguucaggaagaauaau

SEQ ID NO: 566180 - RNA, 22 nt, Human
ucugaaaauguugacuuuguuu

SEQ ID NO: 566181 - RNA, 19 nt, Human
aggcugugagggaggacuc

SEQ ID NO: 566182 - RNA, 22 nt, Human
uuucuaguccucaugcaucauu

SEQ ID NO: 566183 - RNA, 22 nt, Human
aggaaacagugaacuuggcagg

SEQ ID NO: 566184 - RNA, 22 nt, Human
auugauaucaguuugcugauug

SEQ ID NO: 566185 - RNA, 22 nt, Human
cuauugcauuugcaucuucauc

SEQ ID NO: 566186 - RNA, 22 nt, Human
ggagagcugguagcuggcucca

SEQ ID NO: 566187 - RNA, 22 nt, Human
aagaaacugaaaguggcuucau

SEQ ID NO: 566188 - RNA, 22 nt, Human
cuacagguaugugcaugacauc

SEQ ID NO: 566189 - RNA, 22 nt, Human
guggaaguagauuugagaaggu

SEQ ID NO: 566190 - RNA, 22 nt, Human
gcuguacaucacaauuugcugu

SEQ ID NO: 566191 - RNA, 22 nt, Human
auacaaaguauuaauccuggau

SEQ ID NO: 566192 - RNA, 22 nt, Human
uguugauuugugggcugcaaaa

SEQ ID NO: 566193 - RNA, 22 nt, Human
ccuguacaagagccaucuggau

SEQ ID NO: 566194 - RNA, 22 nt, Human
agcaaacagugugcuaagaaau

SEQ ID NO: 566195 - RNA, 21 nt, Human
cauuucuauugaugagaaaag

SEQ ID NO: 566196 - RNA, 21 nt, Human
uucuacaggaugaaugaaaac

SEQ ID NO: 566197 - RNA, 22 nt, Human
aaaacauguccauacagaaacu

SEQ ID NO: 566198 - RNA, 22 nt, Human
auuaagacugcccauguuuuua

SEQ ID NO: 566199 - RNA, 22 nt, Human
ccuguacaagcucuuggugaca

SEQ ID NO: 566200 - RNA, 22 nt, Human
ugcagcugaggccagcuaugcc

SEQ ID NO: 566201 - RNA, 22 nt, Human
uucugucucccugauguagagc

SEQ ID NO: 566202 - RNA, 22 nt, Human
cagaaacuauguaagaaaguga

SEQ ID NO: 566203 - RNA, 22 nt, Human
ucuguacaccaggggccauucu

SEQ ID NO: 566204 - RNA, 22 nt, Human
cacagcauaaugaaauauacuu

SEQ ID NO: 566205 - RNA, 20 nt, Human
gucuccacuggggguuaacc

SEQ ID NO: 566206 - RNA, 22 nt, Human
ccaguccuggccaguaacauga

SEQ ID NO: 566207 - RNA, 22 nt, Human
cuccagcugccaccagauguuu

SEQ ID NO: 566208 - RNA, 22 nt, Human
ucugaaaugcaaauuugacuga

SEQ ID NO: 566209 - RNA, 17 nt, Human
agcacuaaaaugcuucc

SEQ ID NO: 566210 - RNA, 22 nt, Human
acuuugcugcagguuuaaagag

SEQ ID NO: 566211 - RNA, 22 nt, Human
ccagucuggcaggagggggaac

SEQ ID NO: 566212 - RNA, 22 nt, Human
aaacagacugaagaguugaagc

SEQ ID NO: 566213 - RNA, 20 nt, Human
ccugucuggagacaaagaga

SEQ ID NO: 566214 - RNA, 22 nt, Human
acaugaaaagacuaucugauua

SEQ ID NO: 566215 - RNA, 22 nt, Human
acauuucucuugaugucucuau

SEQ ID NO: 566216 - RNA, 22 nt, Human
ucuuucuacaucauuugcuucu

SEQ ID NO: 566217 - RNA, 20 nt, Human
aggcagagcgcacuuuuaga

SEQ ID NO: 566218 - RNA, 22 nt, Human
acuguucauuuggauuucucug

SEQ ID NO: 566219 - RNA, 22 nt, Human
aucuggaacaaagcuuaggaau

SEQ ID NO: 566220 - RNA, 22 nt, Human
caguccugcccaggcugacaga

SEQ ID NO: 566221 - RNA, 22 nt, Human
cuggaaugagcagggcuuaugg

SEQ ID NO: 566222 - RNA, 22 nt, Human
ucauuucuccgaccugcugucc

SEQ ID NO: 566223 - RNA, 22 nt, Human
auguuacaauucaaaaugcugc

SEQ ID NO: 566224 - RNA, 22 nt, Human
aucagucuguguuagaaaagag

SEQ ID NO: 566225 - RNA, 22 nt, Human
ucuauuucgcauauaaguuuug

SEQ ID NO: 566226 - RNA, 21 nt, Human
cacaagacacauaggguguuu

SEQ ID NO: 566227 - RNA, 22 nt, Human
caaaaacugcaauuacuuuuac

SEQ ID NO: 566228 - RNA, 22 nt, Human
aucuggaaaacacaguguagac

SEQ ID NO: 566229 - RNA, 22 nt, Human
uaaucacagaaacagacuguuu

SEQ ID NO: 566230 - RNA, 22 nt, Human
ccuacacaucucaccucacagg

SEQ ID NO: 566231 - RNA, 22 nt, Human
cuccagucuaguagagccugcu

SEQ ID NO: 566232 - RNA, 22 nt, Human
uaaaacugaauacauacugagg

SEQ ID NO: 566233 - RNA, 22 nt, Human
ugagcuggaaucuucuugacug

SEQ ID NO: 566234 - RNA, 22 nt, Human
uuauuauagauuaugcaagauu

SEQ ID NO: 566235 - RNA, 22 nt, Human
agacucugauucccucauguca

SEQ ID NO: 566236 - RNA, 22 nt, Human
aggcagagcuaggaagaauugu

SEQ ID NO: 566237 - RNA, 18 nt, Human
agugucuggauauuuggg

SEQ ID NO: 566238 - RNA, 22 nt, Human
gcaaaaaccacaauuacuuuua

SEQ ID NO: 566239 - RNA, 22 nt, Human
ucaugaaaauagaucagaaauu

SEQ ID NO: 566240 - RNA, 22 nt, Human
cauuuguacagaacagcuuuau

SEQ ID NO: 566241 - RNA, 22 nt, Human
uggcuugucauguaucugaggc

SEQ ID NO: 566242 - RNA, 22 nt, Human
guccagcugaucuugacccagc

SEQ ID NO: 566243 - RNA, 22 nt, Human
caauuuuuaaacuaugaaguug

SEQ ID NO: 566244 - RNA, 22 nt, Human
augcaauaguaauucuagucug

SEQ ID NO: 566245 - RNA, 22 nt, Human
ugugguuuugguucagaaacaa

SEQ ID NO: 566246 - RNA, 22 nt, Human
gcugcaggcucugcaggaauug

SEQ ID NO: 566247 - RNA, 20 nt, Human
aucaggcuuucuguugcgau

SEQ ID NO: 566248 - RNA, 22 nt, Human
cacaggaagcaagccuggggcc

SEQ ID NO: 566249 - RNA, 22 nt, Human
gcggggggcagcagucgcucag

SEQ ID NO: 566250 - RNA, 23 nt, Human
uggagaauucagucuuuguuuug

SEQ ID NO: 566251 - RNA, 23 nt, Human
augccaggcugccuggccagccu

SEQ ID NO: 566252 - RNA, 22 nt, Human
uuauuugcccauguuuagcaga

SEQ ID NO: 566253 - RNA, 22 nt, Human
uaaaacuagugguugggacuaa

SEQ ID NO: 566254 - RNA, 21 nt, Human
gacauugagcgugucgcagug

SEQ ID NO: 566255 - RNA, 22 nt, Human
ccugugggagggagcggcugga

SEQ ID NO: 566256 - RNA, 22 nt, Human
guccacauaggaacccagcuuc

SEQ ID NO: 566257 - RNA, 17 nt, Human
aggucugagaguaucug

SEQ ID NO: 566258 - RNA, 22 nt, Human
gaucgauucagugugccuaccc

SEQ ID NO: 566259 - RNA, 22 nt, Human
ucaucuguuaugggaguuuuug

SEQ ID NO: 566260 - RNA, 22 nt, Human
acaaaggugagcagaagacaca

SEQ ID NO: 566261 - RNA, 22 nt, Human
ccugcgcgucugggucugucuc

SEQ ID NO: 566262 - RNA, 22 nt, Human
acugggcaaggauaugaugggu

SEQ ID NO: 566263 - RNA, 22 nt, Human
uugagacacaaggcacaguaag

SEQ ID NO: 566264 - RNA, 22 nt, Human
acauuuuuggguugaugucuga

SEQ ID NO: 566265 - RNA, 22 nt, Human
guggcagcggcccaggccgucu

SEQ ID NO: 566266 - RNA, 22 nt, Human
agaacaggaggaagccagcucc

SEQ ID NO: 566267 - RNA, 22 nt, Human
ucucagcucauggcagccuuga

SEQ ID NO: 566268 - RNA, 22 nt, Human
uugcuauuuugagagucauagu

SEQ ID NO: 566269 - RNA, 22 nt, Human
uuucugaggaauuaauacagaa

SEQ ID NO: 566270 - RNA, 22 nt, Human
gucccugauaagagccaucgau

SEQ ID NO: 566271 - RNA, 22 nt, Human
aauguuaaguuuagauuauaac

SEQ ID NO: 566272 - RNA, 22 nt, Human
ucggagcgucacuggcuggagg

SEQ ID NO: 566273 - RNA, 22 nt, Human
uaaaucccuacaucuguguuuu

SEQ ID NO: 566274 - RNA, 22 nt, Human
aggaaaugccgcggcucucuuu

SEQ ID NO: 566275 - RNA, 22 nt, Human
aagaauaagaggauuuagaaca

SEQ ID NO: 566276 - RNA, 22 nt, Human
uggguguguccauauuuugacu

SEQ ID NO: 566277 - RNA, 22 nt, Human
aaagucuuaauguaaguuuagu

SEQ ID NO: 566278 - RNA, 22 nt, Human
uugcaguuuugacagaccaaau

SEQ ID NO: 566279 - RNA, 22 nt, Human
aaugcuuuuugcgaaaugugca

SEQ ID NO: 566280 - RNA, 22 nt, Human
aauacagugaaagugagcaagg

SEQ ID NO: 566281 - RNA, 22 nt, Human
uuuacagagaauguacauaaag

SEQ ID NO: 566282 - RNA, 22 nt, Human
augaacaguacaaagcacagac

SEQ ID NO: 566283 - RNA, 22 nt, Human
cugagccagcgggcucacuuuu

SEQ ID NO: 566284 - RNA, 23 nt, Human
caaaaugcuaugugcccaaugca

SEQ ID NO: 566285 - RNA, 22 nt, Human
cuggcucgcauuauauuuuggg

SEQ ID NO: 566286 - RNA, 21 nt, Human
cccgugccuucagcaguccug

SEQ ID NO: 566287 - RNA, 22 nt, Human
ucacuaugcccagaauacaguu

SEQ ID NO: 566288 - RNA, 22 nt, Human
uuuggauugcuuggaugcuucg

SEQ ID NO: 566289 - RNA, 22 nt, Human
ggcaguggugggaggcucgcuc

SEQ ID NO: 566290 - RNA, 19 nt, Human
auacacguguauacauaca

SEQ ID NO: 566291 - RNA, 22 nt, Human
ccaggcuccccaggaggcccuu

SEQ ID NO: 566292 - RNA, 22 nt, Human
augaaaacagccuccugugaua

SEQ ID NO: 566293 - RNA, 22 nt, Human
uuucccaggcuggaaugcagug

SEQ ID NO: 566294 - RNA, 22 nt, Human
uuucugugauaggcugcgacgc

SEQ ID NO: 566295 - RNA, 22 nt, Human
aaguuacacauuuucauuguaa

SEQ ID NO: 566296 - RNA, 22 nt, Human
aggauaauaauaaucucguuua

SEQ ID NO: 566297 - RNA, 22 nt, Human
cuaguuuuaagcuccuugaggu

SEQ ID NO: 566298 - RNA, 22 nt, Human
uaucacauacuucucauccagg

SEQ ID NO: 566299 - RNA, 22 nt, Human
ucucauuuacuuccacaggcug

SEQ ID NO: 566300 - RNA, 22 nt, Human
gcugcuuugucuguaaaaugga

SEQ ID NO: 566301 - RNA, 22 nt, Human
cagagggagcccuccaggagca

SEQ ID NO: 566302 - RNA, 22 nt, Human
gagguggcugcuugcugggaaa

SEQ ID NO: 566303 - RNA, 22 nt, Human
ugacucauauuucauggauacg

SEQ ID NO: 566304 - RNA, 22 nt, Human
cagaggauauaugguuuguaug

SEQ ID NO: 566305 - RNA, 22 nt, Human
ggugucagugaagguagaguuu

SEQ ID NO: 566306 - RNA, 22 nt, Human
uuuggucuggaaucuucagggu

SEQ ID NO: 566307 - RNA, 17 nt, Human
uguguaaguugcauaga

SEQ ID NO: 566308 - RNA, 22 nt, Human
ggccaaggcucuugagggcuga

SEQ ID NO: 566309 - RNA, 22 nt, Human
cagcuugcacacauauuagacg

SEQ ID NO: 566310 - RNA, 22 nt, Human
augauugaaaaugacauugcca

SEQ ID NO: 566311 - RNA, 20 nt, Human
ccacccuguccggggcggag

SEQ ID NO: 566312 - RNA, 22 nt, Human
uuaggauuugaaaaggggcaga

SEQ ID NO: 566313 - RNA, 18 nt, Human
cuacauucauaggaaagg

SEQ ID NO: 566314 - RNA, 22 nt, Human
gauuugucuauauucaaauaug

SEQ ID NO: 566315 - RNA, 22 nt, Human
aaauugaauuugggaaacauug

SEQ ID NO: 566316 - RNA, 22 nt, Human
uagaaagagcuuugcuuccuuu

SEQ ID NO: 566317 - RNA, 22 nt, Human
agcugggugcccgaagccacgu

SEQ ID NO: 566318 - RNA, 22 nt, Human
gcccucugguggccgccucggc

SEQ ID NO: 566319 - RNA, 22 nt, Human
auuauguagcuaaaaauugugu

SEQ ID NO: 566320 - RNA, 22 nt, Human
ugccugugggugaugauuugau

SEQ ID NO: 566321 - RNA, 22 nt, Human
ccgcuguccuggagcugcugcu

SEQ ID NO: 566322 - RNA, 22 nt, Human
uaugaaggauacaccucugauu

SEQ ID NO: 566323 - RNA, 22 nt, Human
ucuccagaguaaccuuggagca

SEQ ID NO: 566324 - RNA, 22 nt, Human
gcucgguggccagccugaggcc

SEQ ID NO: 566325 - RNA, 22 nt, Human
ggucccagucccuuuccaccgu

SEQ ID NO: 566326 - RNA, 22 nt, Human
uucuuucugggguccuucggcu

SEQ ID NO: 566327 - RNA, 22 nt, Human
guguggucgaaguucucccgga

SEQ ID NO: 566328 - RNA, 22 nt, Human
guucugucugagcaccacagga

SEQ ID NO: 566329 - RNA, 22 nt, Human
uauaugcagauuuucaucaucg

SEQ ID NO: 566330 - RNA, 22 nt, Human
ugcaaaaagagcgaggagcccu

SEQ ID NO: 566331 - RNA, 22 nt, Human
ucugcuguuuacugugugauau

SEQ ID NO: 566332 - RNA, 22 nt, Human
gcuacaggggucaguccuuugc

SEQ ID NO: 566333 - RNA, 22 nt, Human
uuuguagauuuucucuccagua

SEQ ID NO: 566334 - RNA, 22 nt, Human
uggcagaaugaagacuggggcc

SEQ ID NO: 566335 - RNA, 18 nt, Human
auuugcaggcaugcaggc

SEQ ID NO: 566336 - RNA, 22 nt, Human
gguagccaauuuaaacauuucc

SEQ ID NO: 566337 - RNA, 22 nt, Human
aucauugaguaaaaugaauaca

SEQ ID NO: 566338 - RNA, 22 nt, Human
ucacccagacugucugacucuu

SEQ ID NO: 566339 - RNA, 22 nt, Human
uaggccacagagaggagauuuc

SEQ ID NO: 566340 - RNA, 22 nt, Human
cagagguagccgagugcaaucg

SEQ ID NO: 566341 - RNA, 22 nt, Human
uacguuuuaaacacggagccag

SEQ ID NO: 566342 - RNA, 22 nt, Human
aaaacauuuuacugccaucuca

SEQ ID NO: 566343 - RNA, 22 nt, Human
cugcuguguggauucaauggcu

SEQ ID NO: 566344 - RNA, 22 nt, Human
augcuugcccauguuucugaag

SEQ ID NO: 566345 - RNA, 22 nt, Human
ugugucuuuggcgaugucugga

SEQ ID NO: 566346 - RNA, 17 nt, Human
gcguguccccgcgucuc

SEQ ID NO: 566347 - RNA, 22 nt, Human
cucucuguuaugcuuucaugaa

SEQ ID NO: 566348 - RNA, 22 nt, Human
ggcaaucauuggcauucucugg

SEQ ID NO: 566349 - RNA, 22 nt, Human
aaaacuuucagggauacagaaa

SEQ ID NO: 566350 - RNA, 23 nt, Human
aaaguacuuaaucugcaaaccac

SEQ ID NO: 566351 - RNA, 22 nt, Human
ggagggaaccuuggcuggauug

SEQ ID NO: 566352 - RNA, 22 nt, Human
uguauuucugcuuucucuagua

SEQ ID NO: 566353 - RNA, 22 nt, Human
auugcacaucugcacuacagcc

SEQ ID NO: 566354 - RNA, 22 nt, Human
ugccaggcugcccuccagucug

SEQ ID NO: 566355 - RNA, 20 nt, Human
uaugauaauuacaaaauagu

SEQ ID NO: 566356 - RNA, 22 nt, Human
gcacaaaagguacuucauguag

SEQ ID NO: 566357 - RNA, 22 nt, Human
ugguaaaugucuaacaaucacu

SEQ ID NO: 566358 - RNA, 22 nt, Human
cagcuuuugcagacuucuugcc

SEQ ID NO: 566359 - RNA, 22 nt, Human
uucugagguccaugcaguacug

SEQ ID NO: 566360 - RNA, 22 nt, Human
ccaggcccugccugugguuccu

SEQ ID NO: 566361 - RNA, 22 nt, Human
gaagaccccagagcgagguaag

SEQ ID NO: 566362 - RNA, 22 nt, Human
aaaggagacuucagaucuccuu

SEQ ID NO: 566363 - RNA, 22 nt, Human
auguuuguguuucccauucagg

SEQ ID NO: 566364 - RNA, 22 nt, Human
ccugugggcgcagcuggaguca

SEQ ID NO: 566365 - RNA, 22 nt, Human
uugaguuuccugacagcgaagg

SEQ ID NO: 566366 - RNA, 22 nt, Human
agccugugcuguguuugcucca

SEQ ID NO: 566367 - RNA, 22 nt, Human
cauaacauccuugcuacuuuga

SEQ ID NO: 566368 - RNA, 22 nt, Human
ccugggcaaaugccagagacaa

SEQ ID NO: 566369 - RNA, 22 nt, Human
uuguuuguaaggcucuuagaau

SEQ ID NO: 566370 - RNA, 22 nt, Human
ggcggcgcguagccggagacuu

SEQ ID NO: 566371 - RNA, 22 nt, Human
gagaauacaaccagaagcugag

SEQ ID NO: 566372 - RNA, 22 nt, Human
uuaugcaaaggggccucuuccu

SEQ ID NO: 566373 - RNA, 22 nt, Human
uguuccucugaacuucuuccaa

SEQ ID NO: 566374 - RNA, 22 nt, Human
uuucaugauuaacuuagugaau

SEQ ID NO: 566375 - RNA, 22 nt, Human
aaauuaacuaucacuuuuguga

SEQ ID NO: 566376 - RNA, 22 nt, Human
uggcuguagaaucagagacuug

SEQ ID NO: 566377 - RNA, 22 nt, Human
uuucuuggucuucccgaccugg

SEQ ID NO: 566378 - RNA, 22 nt, Human
ucacugaauuucaagcuagugg

SEQ ID NO: 566379 - RNA, 22 nt, Human
ugguggcacugacaucagacac

SEQ ID NO: 566380 - RNA, 22 nt, Human
gaaauguuggacacuugaaauu

SEQ ID NO: 566381 - RNA, 22 nt, Human
uugauggacagggaccacuguc

SEQ ID NO: 566382 - RNA, 22 nt, Human
uuccuuuucuucuaccacaugu

SEQ ID NO: 566383 - RNA, 21 nt, Human
ccacaauucuaguuacauaug

SEQ ID NO: 566384 - RNA, 22 nt, Human
uuuccuacugcccuauacacac

SEQ ID NO: 566385 - RNA, 22 nt, Human
acauucucuuuuagaaagcugu

SEQ ID NO: 566386 - RNA, 22 nt, Human
aggcaguguggagggcuguugc

SEQ ID NO: 566387 - RNA, 22 nt, Human
gcuucugcagagccguccugag

SEQ ID NO: 566388 - RNA, 22 nt, Human
gauggaggagauggcagggugc

SEQ ID NO: 566389 - RNA, 22 nt, Human
auguaagagcuuugcagggaaa

SEQ ID NO: 566390 - RNA, 22 nt, Human
ggucuaaaaugagucuuccuag

SEQ ID NO: 566391 - RNA, 18 nt, Human
uuugggauccucuuuucu

SEQ ID NO: 566392 - RNA, 22 nt, Human
uuauguauggauggcugaaagu

SEQ ID NO: 566393 - RNA, 22 nt, Human
cuuuggaaaaauaccuggcaua

SEQ ID NO: 566394 - RNA, 22 nt, Human
ggacucucaggcugucggcuuc

SEQ ID NO: 566395 - RNA, 22 nt, Human
aacaguaugugagauuuacaca

SEQ ID NO: 566396 - RNA, 22 nt, Human
ucagccagaggcuucuugguuu

SEQ ID NO: 566397 - RNA, 22 nt, Human
gccacaggucggcuagaggguc

SEQ ID NO: 566398 - RNA, 22 nt, Human
auucugcugccuaguuuaugaa

SEQ ID NO: 566399 - RNA, 17 nt, Human
gcccgugggcuacggua

SEQ ID NO: 566400 - RNA, 22 nt, Human
agcaauguuggccuauauaccu

SEQ ID NO: 566401 - RNA, 22 nt, Human
ugcugcgggacccacugugggc

SEQ ID NO: 566402 - RNA, 18 nt, Human
ucagacaaguuagacagg

SEQ ID NO: 566403 - RNA, 22 nt, Human
cauugcuguuaauugucucuag

SEQ ID NO: 566404 - RNA, 22 nt, Human
ccacuuaagagaacagcuauag

SEQ ID NO: 566405 - RNA, 22 nt, Human
gaccuccguguacaccucccag

SEQ ID NO: 566406 - RNA, 22 nt, Human
uuaagagaagaguaucuagaac

SEQ ID NO: 566407 - RNA, 22 nt, Human
aucuaugugggaaucauaauag

SEQ ID NO: 566408 - RNA, 22 nt, Human
gagagagacauguaaacgcggu

SEQ ID NO: 566409 - RNA, 22 nt, Human
ugcugugagaccauuuguugag

SEQ ID NO: 566410 - RNA, 22 nt, Human
gccguccuacgccaucauagcg

SEQ ID NO: 566411 - RNA, 22 nt, Human
agugaauuagccuauuuguaaa

SEQ ID NO: 566412 - RNA, 22 nt, Human
ucugggugucacuccugccugc

SEQ ID NO: 566413 - RNA, 22 nt, Human
gccucugcaccaguacugugcc

SEQ ID NO: 566414 - RNA, 22 nt, Human
ccaaaauauuagugcuuaagua

SEQ ID NO: 566415 - RNA, 22 nt, Human
ucugcuugugucuguccagccu

SEQ ID NO: 566416 - RNA, 22 nt, Human
gaaaggagaggguuaaggagcu

SEQ ID NO: 566417 - RNA, 17 nt, Human
uagauuaaacacggcca

SEQ ID NO: 566418 - RNA, 22 nt, Human
cauuucaaacaguuacagcugc

SEQ ID NO: 566419 - RNA, 22 nt, Human
ugucuucauuccccaugaaguc

SEQ ID NO: 566420 - RNA, 22 nt, Human
gugauugugaaaacauuaagaa

SEQ ID NO: 566421 - RNA, 22 nt, Human
ugucauauagaauguucuauga

SEQ ID NO: 566422 - RNA, 22 nt, Human
ugggaaggggagcuggaaagga

SEQ ID NO: 566423 - RNA, 22 nt, Human
auugaagacuugguauccgugg

SEQ ID NO: 566424 - RNA, 22 nt, Human
cggagaggugggggcagcaucu

SEQ ID NO: 566425 - RNA, 22 nt, Human
gccaggucgucuccauguccaa

SEQ ID NO: 566426 - RNA, 22 nt, Human
acuguagucuaaauauagucuu

SEQ ID NO: 566427 - RNA, 22 nt, Human
cucaucuggcuucaguaacagu

SEQ ID NO: 566428 - RNA, 22 nt, Human
augagcuaagcagaaagcacac

SEQ ID NO: 566429 - RNA, 21 nt, Human
uuuaaggccagcaggagguga

SEQ ID NO: 566430 - RNA, 22 nt, Human
ucacacuuuauuuauuucaugc

SEQ ID NO: 566431 - RNA, 22 nt, Human
caaacauuuguuggaaccccug

SEQ ID NO: 566432 - RNA, 22 nt, Human
cagagaauaaaagggcauuccu

SEQ ID NO: 566433 - RNA, 22 nt, Human
agccugugagggaugcugcagu

SEQ ID NO: 566434 - RNA, 22 nt, Human
aggguugaagucugguccucau

SEQ ID NO: 566435 - RNA, 22 nt, Human
cacauuuaugggcugggaggca

SEQ ID NO: 566436 - RNA, 19 nt, Human
caggauuguuuaaagcuuu

SEQ ID NO: 566437 - RNA, 22 nt, Human
cagagcagcagagcuuccaugg

SEQ ID NO: 566438 - RNA, 22 nt, Human
ggcggcacgcaggcugcugucg

SEQ ID NO: 566439 - RNA, 22 nt, Human
uuuuccuucugauacuccauuu

SEQ ID NO: 566440 - RNA, 22 nt, Human
guuugcaaauuguguuaaagcu

SEQ ID NO: 566441 - RNA, 22 nt, Human
guguaucaacauguuuuuugug

SEQ ID NO: 566442 - RNA, 22 nt, Human
gauccacaggaaccaaaacgca

SEQ ID NO: 566443 - RNA, 22 nt, Human
uuauugcuaugaugauguguag

SEQ ID NO: 566444 - RNA, 22 nt, Human
ugcaggaacucgaaaacuauag

SEQ ID NO: 566445 - RNA, 22 nt, Human
agacaagagcugaggacauauu

SEQ ID NO: 566446 - RNA, 22 nt, Human
guugcagcaucacugcugagug

SEQ ID NO: 566447 - RNA, 22 nt, Human
caaauguuugguggcauuuugu

SEQ ID NO: 566448 - RNA, 22 nt, Human
agaaguaucaggaagauucuca

SEQ ID NO: 566449 - RNA, 22 nt, Human
ugcauuaagaauuucugaggau

SEQ ID NO: 566450 - RNA, 22 nt, Human
gguggcaccuuacccugcgcag

SEQ ID NO: 566451 - RNA, 22 nt, Human
uuaaguauauccauuugacugg

SEQ ID NO: 566452 - RNA, 22 nt, Human
uggugcagacaggagccccgcu

SEQ ID NO: 566453 - RNA, 22 nt, Human
cucugaauggacacuccagugu

SEQ ID NO: 566454 - RNA, 22 nt, Human
gcacguguucuguggcaugggu

SEQ ID NO: 566455 - RNA, 22 nt, Human
cagacagagucuucccaucagu

SEQ ID NO: 566456 - RNA, 22 nt, Human
auuucagaguagaucguuauuu

SEQ ID NO: 566457 - RNA, 22 nt, Human
ucauuguuucugcuuuucauga

SEQ ID NO: 566458 - RNA, 22 nt, Human
aaauugcaaaaguacuuuuagg

SEQ ID NO: 566459 - RNA, 22 nt, Human
ccacugcuguuacuuacgcaaa

SEQ ID NO: 566460 - RNA, 22 nt, Human
uccucuccaggugagccgaaau

SEQ ID NO: 566461 - RNA, 22 nt, Human
cuacuguaguuaaaguuuugua

SEQ ID NO: 566462 - RNA, 22 nt, Human
acauucuacaguuaaccauuag

SEQ ID NO: 566463 - RNA, 22 nt, Human
uaaagacaauuucgagcuguag

SEQ ID NO: 566464 - RNA, 22 nt, Human
uuguuuaaagaacuucugacuu

SEQ ID NO: 566465 - RNA, 22 nt, Human
cugcuuuaaaacugauacauga

SEQ ID NO: 566466 - RNA, 22 nt, Human
uauucauguguuggaaaggaac

SEQ ID NO: 566467 - RNA, 22 nt, Human
gaggagagaagcuaacggugcu

SEQ ID NO: 566468 - RNA, 22 nt, Human
aaaucugagaaauauuguccag

SEQ ID NO: 566469 - RNA, 22 nt, Human
ccaggcccugcuccucacacca

SEQ ID NO: 566470 - RNA, 22 nt, Human
caugcauuucuaccaaggaaua

SEQ ID NO: 566471 - RNA, 22 nt, Human
uaggcagggauuaggguugauu

SEQ ID NO: 566472 - RNA, 22 nt, Human
ugugaggaccucagcagagucu

SEQ ID NO: 566473 - RNA, 22 nt, Human
uuuauccaccuuacccuguucc

SEQ ID NO: 566474 - RNA, 22 nt, Human
uucguuuaguccacaaaugcau

SEQ ID NO: 566475 - RNA, 22 nt, Human
agagaauuaacauuccauggcu

SEQ ID NO: 566476 - RNA, 21 nt, Human
agaaggcaaaagcagacaucu

SEQ ID NO: 566477 - RNA, 19 nt, Human
cucugccauuugcugccug

SEQ ID NO: 566478 - RNA, 22 nt, Human
uucucugguuugcuguuucuga

SEQ ID NO: 566479 - RNA, 22 nt, Human
aucauuuaguggggcauuggaa

SEQ ID NO: 566480 - RNA, 22 nt, Human
ggccagccuggggcucccagac

SEQ ID NO: 566481 - RNA, 22 nt, Human
auugaacauuguucuaggaggc

SEQ ID NO: 566482 - RNA, 22 nt, Human
aagugcuuccauguuugagugu

SEQ ID NO: 566483 - RNA, 22 nt, Human
ccuugcagcauauagagucccu

SEQ ID NO: 566484 - RNA, 22 nt, Human
augugauacuccuucuagugga

SEQ ID NO: 566485 - RNA, 18 nt, Human
uggggggcuugucugaag

SEQ ID NO: 566486 - RNA, 22 nt, Human
uccgcgcucucacccgcucccg

SEQ ID NO: 566487 - RNA, 22 nt, Human
uggguccuggaaggcgacaggu

SEQ ID NO: 566488 - RNA, 19 nt, Human
ucuuucauuucuagcucug

SEQ ID NO: 566489 - RNA, 22 nt, Human
ccaagagcuucccauagcuucu

SEQ ID NO: 566490 - RNA, 22 nt, Human
ggacauggaaguauggagugga

SEQ ID NO: 566491 - RNA, 22 nt, Human
ugaaucaaugaauugcacuuca

SEQ ID NO: 566492 - RNA, 22 nt, Human
ccccacaccugccgggcagcag

SEQ ID NO: 566493 - RNA, 22 nt, Human
cugguuaauccauaaacagaga

SEQ ID NO: 566494 - RNA, 21 nt, Human
uugauuuagcagaucuagcug

SEQ ID NO: 566495 - RNA, 22 nt, Human
aggcagagaaaaaccagauaug

SEQ ID NO: 566496 - RNA, 22 nt, Human
uauaagaaacaaggcaaauuuu

SEQ ID NO: 566497 - RNA, 22 nt, Human
aaggccaucuacuuacggaauu

SEQ ID NO: 566498 - RNA, 22 nt, Human
aaagugacaaccauuuauuaag

SEQ ID NO: 566499 - RNA, 22 nt, Human
aacaggcuaaauuguccauuuc

SEQ ID NO: 566500 - RNA, 20 nt, Human
acagagauccucucuuuauc

SEQ ID NO: 566501 - RNA, 22 nt, Human
auuguacagacaugggaaacaa

SEQ ID NO: 566502 - RNA, 22 nt, Human
ugcuggaguggcacuguguggc

SEQ ID NO: 566503 - RNA, 22 nt, Human
uuuaauuuucugggcccagcag

SEQ ID NO: 566504 - RNA, 22 nt, Human
ucuccucuauuucuguauguau

SEQ ID NO: 566505 - RNA, 22 nt, Human
ucuuagaaacuguaucgauuag

SEQ ID NO: 566506 - RNA, 22 nt, Human
ucacaauacucacucaauggcu

SEQ ID NO: 566507 - RNA, 22 nt, Human
auuuacagacguggauuagugc

SEQ ID NO: 566508 - RNA, 22 nt, Human
gcagacccugaacugggcaugg

SEQ ID NO: 566509 - RNA, 22 nt, Human
uagaagaugccuuaaaguugaa

SEQ ID NO: 566510 - RNA, 22 nt, Human
uaucauuuuacugugacauuuu

SEQ ID NO: 566511 - RNA, 22 nt, Human
caugugaauuccaaagcuaggu

SEQ ID NO: 566512 - RNA, 22 nt, Human
gguguugcaguugaagacuggu

SEQ ID NO: 566513 - RNA, 18 nt, Human
agguauaugaaucucuuu

SEQ ID NO: 566514 - RNA, 22 nt, Human
acuguucacccagcacuagcag

SEQ ID NO: 566515 - RNA, 22 nt, Human
uuacuaguggagaaacugaggc

SEQ ID NO: 566516 - RNA, 22 nt, Human
ugugagauuuuauuugauaugc

SEQ ID NO: 566517 - RNA, 22 nt, Human
uucccuucuaguuuugagagac

SEQ ID NO: 566518 - RNA, 20 nt, Human
uugcaaagugaauagcaauu

SEQ ID NO: 566519 - RNA, 22 nt, Human
gcuuucuuuucaagaauguauu

SEQ ID NO: 566520 - RNA, 22 nt, Human
gacggagcugguugcugcggcu

SEQ ID NO: 566521 - RNA, 22 nt, Human
cugggucccggcuucuauccac

SEQ ID NO: 566522 - RNA, 22 nt, Human
uucugugcucaaaacuuuccaa

SEQ ID NO: 566523 - RNA, 20 nt, Human
uauuucugggcaaccauuua

SEQ ID NO: 566524 - RNA, 22 nt, Human
uuauuuuguagcucugaucuuu

SEQ ID NO: 566525 - RNA, 23 nt, Human
uaucauuucagcucucugccugg

SEQ ID NO: 566526 - RNA, 22 nt, Human
uucuguucccuaggaccugggg

SEQ ID NO: 566527 - RNA, 22 nt, Human
acacaagcagcuuuugagcgga

SEQ ID NO: 566528 - RNA, 22 nt, Human
cucugagguuccuuugcccucg

SEQ ID NO: 566529 - RNA, 22 nt, Human
ggagcagggaauuacagcgcag

SEQ ID NO: 566530 - RNA, 22 nt, Human
ccauuuguaccauuucuuugua

SEQ ID NO: 566531 - RNA, 22 nt, Human
uucaaacaguguagaauauaug

SEQ ID NO: 566532 - RNA, 21 nt, Human
acauguccccuaugcuuaagg

SEQ ID NO: 566533 - RNA, 22 nt, Human
aguucaugugguuuaacuuaau

SEQ ID NO: 566534 - RNA, 22 nt, Human
ugauuuacaguagugucuaaac

SEQ ID NO: 566535 - RNA, 22 nt, Human
cgaggagugugaaggcuugucg

SEQ ID NO: 566536 - RNA, 22 nt, Human
aguggcagggacuucauauaaa

SEQ ID NO: 566537 - RNA, 22 nt, Human
agccugugaaaucucugccacu

SEQ ID NO: 566538 - RNA, 20 nt, Human
cuuguuaaauaugcagguag

SEQ ID NO: 566539 - RNA, 22 nt, Human
augcggagccccaagcuugaag

SEQ ID NO: 566540 - RNA, 22 nt, Human
aaguuugucucauuugaucuuc

SEQ ID NO: 566541 - RNA, 22 nt, Human
uagaggaugauccuuccuugcc

SEQ ID NO: 566542 - RNA, 22 nt, Human
agauuauuuaagacaggaacca

SEQ ID NO: 566543 - RNA, 22 nt, Human
ucuuauugugaugaugaagaac

SEQ ID NO: 566544 - RNA, 22 nt, Human
aaggauuuuuggaaugagaugg

SEQ ID NO: 566545 - RNA, 22 nt, Human
gagcugcuggccuccugcggga

SEQ ID NO: 566546 - RNA, 22 nt, Human
acaugcuuucuagguccuucug

SEQ ID NO: 566547 - RNA, 22 nt, Human
ggugggugagcccugggagcug

SEQ ID NO: 566548 - RNA, 21 nt, Human
gucuuuuuaauugcgauuucc

SEQ ID NO: 566549 - RNA, 22 nt, Human
cuggcuccucaggacugcggga

SEQ ID NO: 566550 - RNA, 22 nt, Human
cgcugcgaggcgcccuuguugc

SEQ ID NO: 566551 - RNA, 22 nt, Human
uggcacaguuaaaguuguagaa

SEQ ID NO: 566552 - RNA, 22 nt, Human
gggagagcgcgcuagggccgag

SEQ ID NO: 566553 - RNA, 17 nt, Human
ucuggaugucauggaag

SEQ ID NO: 566554 - RNA, 22 nt, Human
uuacaguuuacauaagaauugu

SEQ ID NO: 566555 - RNA, 22 nt, Human
cugggagggguagccaauccua

SEQ ID NO: 566556 - RNA, 22 nt, Human
uugcauauccuccaacacaugg

SEQ ID NO: 566557 - RNA, 22 nt, Human
ugguuacccagucgcuggaguu

SEQ ID NO: 566558 - RNA, 22 nt, Human
uacuggacacguauauauagau

SEQ ID NO: 566559 - RNA, 22 nt, Human
ucuccuggcauuugguugagua

SEQ ID NO: 566560 - RNA, 21 nt, Human
aggucccagguuugggcagca

SEQ ID NO: 566561 - RNA, 22 nt, Human
caggccacacggcggcucccug

SEQ ID NO: 566562 - RNA, 22 nt, Human
ucugagaaugguggauguggug

SEQ ID NO: 566563 - RNA, 22 nt, Human
ccugaaaugaguucugcucacu

SEQ ID NO: 566564 - RNA, 22 nt, Human
cacucucacaugcccugucagu

SEQ ID NO: 566565 - RNA, 22 nt, Human
ugagcugcuucuuauaaugugu

SEQ ID NO: 566566 - RNA, 22 nt, Human
uaacauuucggugacaguggga

SEQ ID NO: 566567 - RNA, 22 nt, Human
gcugaagagagaugcguccagc

SEQ ID NO: 566568 - RNA, 18 nt, Human
ucaugcaaacgcuucaua

SEQ ID NO: 566569 - RNA, 22 nt, Human
acaaacuucccagacaagcucc

SEQ ID NO: 566570 - RNA, 22 nt, Human
cugucuggaaugcaguacauag

SEQ ID NO: 566571 - RNA, 22 nt, Human
ugugcuauuuuugcauaugugu

SEQ ID NO: 566572 - RNA, 22 nt, Human
uuucuucucacccaggacagag

SEQ ID NO: 566573 - RNA, 22 nt, Human
caauguacaaaauaauuacaca

SEQ ID NO: 566574 - RNA, 22 nt, Human
ugcccguucauucauacuuaac

SEQ ID NO: 566575 - RNA, 22 nt, Human
ccuaggccgcccggugcguggg

SEQ ID NO: 566576 - RNA, 20 nt, Human
uucacagaggacucagguca

SEQ ID NO: 566577 - RNA, 22 nt, Human
ugagaagcaguuucaguaagaa

SEQ ID NO: 566578 - RNA, 17 nt, Human
uuucugcaugauuggac

SEQ ID NO: 566579 - RNA, 22 nt, Human
cugcaucacagcaggaggcaca

SEQ ID NO: 566580 - RNA, 22 nt, Human
auauacacuguuucaguugaag

SEQ ID NO: 566581 - RNA, 18 nt, Human
uggcagccagcugcuccu

SEQ ID NO: 566582 - RNA, 22 nt, Human
uauccaaaggaacaaucacagc

SEQ ID NO: 566583 - RNA, 22 nt, Human
ccuuuguucacuggagagugga

SEQ ID NO: 566584 - RNA, 22 nt, Human
ggggucccugcaccagcauguc

SEQ ID NO: 566585 - RNA, 22 nt, Human
agacuucucuaacuugaggacc

SEQ ID NO: 566586 - RNA, 22 nt, Human
cugcggcuggggacagcuguug

SEQ ID NO: 566587 - RNA, 22 nt, Human
uuugacaacugugcaguuugua

SEQ ID NO: 566588 - RNA, 22 nt, Human
ggagaugccuuguuucaggaac

SEQ ID NO: 566589 - RNA, 22 nt, Human
uacuacauacagaauuuagaga

SEQ ID NO: 566590 - RNA, 22 nt, Human
gcggcuccgaagccaggccgcg

SEQ ID NO: 566591 - RNA, 22 nt, Human
guuuugaauacuacuagaacuu

SEQ ID NO: 566592 - RNA, 22 nt, Human
ggccgcggauuuucccgcuggc

SEQ ID NO: 566593 - RNA, 22 nt, Human
agcacauucccaccuguacuuc

SEQ ID NO: 566594 - RNA, 22 nt, Human
aaaugcaugugcuauagaugug

SEQ ID NO: 566595 - RNA, 22 nt, Human
uagaagaacaugucaaacuaua

SEQ ID NO: 566596 - RNA, 22 nt, Human
agauuucaauggauauugcaag

SEQ ID NO: 566597 - RNA, 22 nt, Human
auuuuagagaaacaaacguagg

SEQ ID NO: 566598 - RNA, 22 nt, Human
uuaauggauuggagguuucaau

SEQ ID NO: 566599 - RNA, 22 nt, Human
uaccugggcccaccagugccug

SEQ ID NO: 566600 - RNA, 21 nt, Human
aguuagcagauuucugucucc

SEQ ID NO: 566601 - RNA, 22 nt, Human
aagacagugacagucacaauug

SEQ ID NO: 566602 - RNA, 22 nt, Human
cagaugaaguaggugacgagca

SEQ ID NO: 566603 - RNA, 22 nt, Human
cugggcuccuaaccauccaggu

SEQ ID NO: 566604 - RNA, 22 nt, Human
ucuccauggauuuggaaaugau

SEQ ID NO: 566605 - RNA, 22 nt, Human
caucugcaggggaagccaguuu

SEQ ID NO: 566606 - RNA, 22 nt, Human
gagcaccgccuccacgaugccc

SEQ ID NO: 566607 - RNA, 22 nt, Human
aacaucuagguucucaucgaua

SEQ ID NO: 566608 - RNA, 21 nt, Human
aaagugguaaggauuauuuug

SEQ ID NO: 566609 - RNA, 22 nt, Human
aggggagguguccccaaaucuc

SEQ ID NO: 566610 - RNA, 22 nt, Human
aggacaaaggaccagaucugga

SEQ ID NO: 566611 - RNA, 22 nt, Human
auguacauuauucgagugaugg

SEQ ID NO: 566612 - RNA, 22 nt, Human
aguuuacccacuguugaaauua

SEQ ID NO: 566613 - RNA, 22 nt, Human
aaacaucuucucuugauucuuu

SEQ ID NO: 566614 - RNA, 22 nt, Human
aggugggacccguggggugcga

SEQ ID NO: 566615 - RNA, 22 nt, Human
uccacagggaugccugcggcuu

SEQ ID NO: 566616 - RNA, 22 nt, Human
augcauaucuccuaucuccuca

SEQ ID NO: 566617 - RNA, 22 nt, Human
cccacaggcaggugcaugggcu

SEQ ID NO: 566618 - RNA, 22 nt, Human
aagggaaacuuucacaaugucc

SEQ ID NO: 566619 - RNA, 22 nt, Human
cuugggcuuagaagguaaguga

SEQ ID NO: 566620 - RNA, 22 nt, Human
gucccagaggacagggucacau

SEQ ID NO: 566621 - RNA, 20 nt, Human
cucuuuucacucucaguggu

SEQ ID NO: 566622 - RNA, 22 nt, Human
ugcauguuuuauaccaaagcuu

SEQ ID NO: 566623 - RNA, 22 nt, Human
ggaaugcacuagacugugaaac

SEQ ID NO: 566624 - RNA, 22 nt, Human
gaaacauuuguugaguacuugc

SEQ ID NO: 566625 - RNA, 22 nt, Human
aggccgugugagcaugugugag

SEQ ID NO: 566626 - RNA, 22 nt, Human
ugucuuacagcaaucuguucug

SEQ ID NO: 566627 - RNA, 23 nt, Human
augcaacauugccaguaugggca

SEQ ID NO: 566628 - RNA, 22 nt, Human
agaguuauccuguccuagggga

SEQ ID NO: 566629 - RNA, 22 nt, Human
uauuucagcucuuuggauuauc

SEQ ID NO: 566630 - RNA, 22 nt, Human
uuaagguucagaaaucaauacc

SEQ ID NO: 566631 - RNA, 19 nt, Human
gggugaggaagagcguugc

SEQ ID NO: 566632 - RNA, 22 nt, Human
ggaaggggagcuggaaagggua

SEQ ID NO: 566633 - RNA, 22 nt, Human
guucucucagcgauagugaugg

SEQ ID NO: 566634 - RNA, 22 nt, Human
uuuuguguugccauguuaagca

SEQ ID NO: 566635 - RNA, 22 nt, Human
gagugcucgggccucugccugc

SEQ ID NO: 566636 - RNA, 22 nt, Human
uugcuggaagguggcuggaauc

SEQ ID NO: 566637 - RNA, 22 nt, Human
auuaguagcacacagagaucag

SEQ ID NO: 566638 - RNA, 21 nt, Human
agccaggcaagcacccccacu

SEQ ID NO: 566639 - RNA, 22 nt, Human
guuuuaguggguggccacugau

SEQ ID NO: 566640 - RNA, 22 nt, Human
uggcuccguuguacaggcugga

SEQ ID NO: 566641 - RNA, 22 nt, Human
uaaaaguuagcuaggacaaagu

SEQ ID NO: 566642 - RNA, 20 nt, Human
cagagccaggguuuuguuuu

SEQ ID NO: 566643 - RNA, 22 nt, Human
ccugguuuaaugcucacuguug

SEQ ID NO: 566644 - RNA, 22 nt, Human
gaaaauaguucaucacaaugau

SEQ ID NO: 566645 - RNA, 22 nt, Human
ugucacagugcacagcuaagaa

SEQ ID NO: 566646 - RNA, 22 nt, Human
agaaacaucgcuuaguccucau

SEQ ID NO: 566647 - RNA, 22 nt, Human
aagcaacuaaggcaaggaaaug

SEQ ID NO: 566648 - RNA, 22 nt, Human
aucccaggcggcacagguugca

SEQ ID NO: 566649 - RNA, 22 nt, Human
auuaaauuggacgcugggggaa

SEQ ID NO: 566650 - RNA, 22 nt, Human
uacugcaaaccauuuacaguag

SEQ ID NO: 566651 - RNA, 22 nt, Human
auauaaguguguggcuguuagu

SEQ ID NO: 566652 - RNA, 22 nt, Human
acaauuucuaauauagaucuua

SEQ ID NO: 566653 - RNA, 22 nt, Human
ucucuguaagcugccuucucgu

SEQ ID NO: 566654 - RNA, 22 nt, Human
aacugcuaacugguuugauacu

SEQ ID NO: 566655 - RNA, 22 nt, Human
agacagcgaggacagaggggug

SEQ ID NO: 566656 - RNA, 20 nt, Human
uuugauugccccucugacuu

SEQ ID NO: 566657 - RNA, 22 nt, Human
gcagcugcgcugguguggggca

SEQ ID NO: 566658 - RNA, 22 nt, Human
uguccagcugaaggcagccuca

SEQ ID NO: 566659 - RNA, 22 nt, Human
uccaaauagcuggaugauggug

SEQ ID NO: 566660 - RNA, 22 nt, Human
cugagcugguucucuugugaaa

SEQ ID NO: 566661 - RNA, 21 nt, Human
cuagaaagaauguugucgucu

SEQ ID NO: 566662 - RNA, 22 nt, Human
gccgugcgugcgcaggugcugu

SEQ ID NO: 566663 - RNA, 18 nt, Human
gaggcacauaguuggggc

SEQ ID NO: 566664 - RNA, 22 nt, Human
uccugggcccuccggaucaggu

SEQ ID NO: 566665 - RNA, 22 nt, Human
aauuauguuugcuuuagaugga

SEQ ID NO: 566666 - RNA, 22 nt, Human
ugaaaugccuaugaagucagga

SEQ ID NO: 566667 - RNA, 22 nt, Human
acucaucuuugaauuuucagua

SEQ ID NO: 566668 - RNA, 22 nt, Human
gcugggcaggccucgugagggc

SEQ ID NO: 566669 - RNA, 22 nt, Human
uucuuuuaauagagauccugug

SEQ ID NO: 566670 - RNA, 22 nt, Human
ggaagcaaauuccagaaccaca

SEQ ID NO: 566671 - RNA, 22 nt, Human
caaacugaacacgaaagucuuu

SEQ ID NO: 566672 - RNA, 22 nt, Human
acaucucacuucuuugaaggcu

SEQ ID NO: 566673 - RNA, 22 nt, Human
agauguuuauaacucaugagug

SEQ ID NO: 566674 - RNA, 22 nt, Human
ugaaaacacuuuaguuuagguc

SEQ ID NO: 566675 - RNA, 22 nt, Human
uccacagugguggaauuguuca

SEQ ID NO: 566676 - RNA, 22 nt, Human
cacuguuuuacauguuauuuaa

SEQ ID NO: 566677 - RNA, 22 nt, Human
guaauucugugugaaucuauua

SEQ ID NO: 566678 - RNA, 22 nt, Human
uaauucuagauugacauuuuga

SEQ ID NO: 566679 - RNA, 22 nt, Human
agucaacauuugagaugcaaug

SEQ ID NO: 566680 - RNA, 22 nt, Human
gguccccguggaggcuggagcg

SEQ ID NO: 566681 - RNA, 22 nt, Human
uucagaaagugaaucuuguuau

SEQ ID NO: 566682 - RNA, 22 nt, Human
aaauugcuugagauuagucucc

SEQ ID NO: 566683 - RNA, 22 nt, Human
uacuuugagaugaugcugaucg

SEQ ID NO: 566684 - RNA, 22 nt, Human
ugguuaaaugcuccgaucuugg

SEQ ID NO: 566685 - RNA, 22 nt, Human
uaucuguauucugacagucacu

SEQ ID NO: 566686 - RNA, 22 nt, Human
ggcagagcuugcagugagccga

SEQ ID NO: 566687 - RNA, 23 nt, Human
aucuguguguggguagggaugau

SEQ ID NO: 566688 - RNA, 21 nt, Human
ugcauauauaagugcauacac

SEQ ID NO: 566689 - RNA, 22 nt, Human
cagccuuugggucagaagauuc

SEQ ID NO: 566690 - RNA, 23 nt, Human
cuuuccuuucuuugacacccagc

SEQ ID NO: 566691 - RNA, 22 nt, Human
cugccaucugagccaaaagugc

SEQ ID NO: 566692 - RNA, 22 nt, Human
uuguaagacuguagaaugcaaa

SEQ ID NO: 566693 - RNA, 22 nt, Human
ggacaucuguugugguagagga

SEQ ID NO: 566694 - RNA, 22 nt, Human
cugccguugugaagcucuuaga

SEQ ID NO: 566695 - RNA, 22 nt, Human
cagaaccaggaacugauggaga

SEQ ID NO: 566696 - RNA, 22 nt, Human
augcacaagguagauuauuauu

SEQ ID NO: 566697 - RNA, 22 nt, Human
uccaagaagcuuacaaucuaau

SEQ ID NO: 566698 - RNA, 22 nt, Human
uagcgggucacccugcugugaa

SEQ ID NO: 566699 - RNA, 22 nt, Human
agagaccuuuugccuucuaguu

SEQ ID NO: 566700 - RNA, 22 nt, Human
ugcacagagggaggcauaaaau

SEQ ID NO: 566701 - RNA, 23 nt, Human
ggucccaguggagaggccucacc

SEQ ID NO: 566702 - RNA, 22 nt, Human
uuucaaguagagggaucgcuag

SEQ ID NO: 566703 - RNA, 22 nt, Human
gugacagguauacucaccauug

SEQ ID NO: 566704 - RNA, 22 nt, Human
cugggaggcccacguugggaag

SEQ ID NO: 566705 - RNA, 22 nt, Human
augaugaagcaugguuacacug

SEQ ID NO: 566706 - RNA, 21 nt, Human
ugcuaagugucacaugucugc

SEQ ID NO: 566707 - RNA, 23 nt, Human
aacugcaagguugcugggaagua

SEQ ID NO: 566708 - RNA, 22 nt, Human
ugcaugacaauugccgucaagu

SEQ ID NO: 566709 - RNA, 22 nt, Human
auguaacauaugugaucgcauu

SEQ ID NO: 566710 - RNA, 22 nt, Human
cgccguccccuaggaaagagcu

SEQ ID NO: 566711 - RNA, 22 nt, Human
uuguugcugcucaaccucuaua

SEQ ID NO: 566712 - RNA, 17 nt, Human
ccuuucuucccagaggg

SEQ ID NO: 566713 - RNA, 22 nt, Human
gcaguggccacauggaggagga

SEQ ID NO: 566714 - RNA, 17 nt, Human
aguuuuuggaccugugu

SEQ ID NO: 566715 - RNA, 22 nt, Human
ccaaacauuucaaauuuagaga

SEQ ID NO: 566716 - RNA, 22 nt, Human
ucagccaggccaggcauucaca

SEQ ID NO: 566717 - RNA, 22 nt, Human
agguaagguuuggaggcagugg

SEQ ID NO: 566718 - RNA, 22 nt, Human
cauuuagaagucuuagaacuau

SEQ ID NO: 566719 - RNA, 22 nt, Human
cuuucugaggagacgggcuuug

SEQ ID NO: 566720 - RNA, 22 nt, Human
ccaugcccuugucaucuccagg

SEQ ID NO: 566721 - RNA, 22 nt, Human
uauacuacgcaccaaacaaagg

SEQ ID NO: 566722 - RNA, 22 nt, Human
agccagcuaccggggcuccugg

SEQ ID NO: 566723 - RNA, 22 nt, Human
uguucaguuugcuaucauaauc

SEQ ID NO: 566724 - RNA, 22 nt, Human
uuggaggaagcucaugggggau

SEQ ID NO: 566725 - RNA, 22 nt, Human
acugcuuacccggccugacuuc

SEQ ID NO: 566726 - RNA, 18 nt, Human
acccauuauauuuguagc

SEQ ID NO: 566727 - RNA, 22 nt, Human
ugcagcaucuccuugugccaug

SEQ ID NO: 566728 - RNA, 21 nt, Human
ugagcaccagcugcaugcccc

SEQ ID NO: 566729 - RNA, 22 nt, Human
aaugaguuuguucuauuauuug

SEQ ID NO: 566730 - RNA, 22 nt, Human
uuuccaaagguggcaggaacaa

SEQ ID NO: 566731 - RNA, 22 nt, Human
ggugccuaauaauucuauugca

SEQ ID NO: 566732 - RNA, 21 nt, Human
ucccacuggcccagggcucca

SEQ ID NO: 566733 - RNA, 22 nt, Human
ugcacacaguucucaggaaaga

SEQ ID NO: 566734 - RNA, 22 nt, Human
uuucuacauuuguaaccagauu

SEQ ID NO: 566735 - RNA, 22 nt, Human
acaagauagcuuagaagauuca

SEQ ID NO: 566736 - RNA, 22 nt, Human
auauaguuggguuucauucuac

SEQ ID NO: 566737 - RNA, 22 nt, Human
accgugucugacacuuugggcg

SEQ ID NO: 566738 - RNA, 22 nt, Human
ugcagcuucucugcaacaggag

SEQ ID NO: 566739 - RNA, 22 nt, Human
agcuuuggcaucugacuagccg

SEQ ID NO: 566740 - RNA, 22 nt, Human
agcugucuaccugcagaguccu

SEQ ID NO: 566741 - RNA, 22 nt, Human
ucagaagucuggacugcuucuc

SEQ ID NO: 566742 - RNA, 22 nt, Human
ggugggucuuguggggcagcuu

SEQ ID NO: 566743 - RNA, 22 nt, Human
ugugaagaauuaaugugaauca

SEQ ID NO: 566744 - RNA, 22 nt, Human
cuacauuuacacaguuaggcuu

SEQ ID NO: 566745 - RNA, 22 nt, Human
ucccagaacccugccagguccu

SEQ ID NO: 566746 - RNA, 22 nt, Human
aacuuucugaaaagcuugauca

SEQ ID NO: 566747 - RNA, 22 nt, Human
uuugccaguauuuuauugauga

SEQ ID NO: 566748 - RNA, 22 nt, Human
auucucuguacagaagguaccg

SEQ ID NO: 566749 - RNA, 19 nt, Human
ugcagcuguaugagcuuaa

SEQ ID NO: 566750 - RNA, 22 nt, Human
caaagaagagauuuacagagcu

SEQ ID NO: 566751 - RNA, 22 nt, Human
cgccaguggcagcuggaacagg

SEQ ID NO: 566752 - RNA, 22 nt, Human
ucguggaugcgcagggcggccu

SEQ ID NO: 566753 - RNA, 22 nt, Human
accugccagaaugcuaguccug

SEQ ID NO: 566754 - RNA, 22 nt, Human
uuucucuuucaaucugcaguac

SEQ ID NO: 566755 - RNA, 21 nt, Human
cuguccccagugagcaccccc

SEQ ID NO: 566756 - RNA, 22 nt, Human
aucuuacaauuacaagacacuc

SEQ ID NO: 566757 - RNA, 22 nt, Human
uuuuucaagacaaccugcaugu

SEQ ID NO: 566758 - RNA, 20 nt, Human
uacaauauucccacuuugcu

SEQ ID NO: 566759 - RNA, 22 nt, Human
auuugcuuguucaccaguacuu

SEQ ID NO: 566760 - RNA, 22 nt, Human
acuugcaucuuagagacucacc

SEQ ID NO: 566761 - RNA, 22 nt, Human
uaguuacuuuugcucuucauua

SEQ ID NO: 566762 - RNA, 22 nt, Human
cuguggguggcugugccccagg

SEQ ID NO: 566763 - RNA, 22 nt, Human
cagaaagcaguugucaaugggc

SEQ ID NO: 566764 - RNA, 22 nt, Human
cuucucaaaguugugaaucagg

SEQ ID NO: 566765 - RNA, 22 nt, Human
gaugucuggcuaccacucgcac

SEQ ID NO: 566766 - RNA, 22 nt, Human
cagcccacugccucugugguag

SEQ ID NO: 566767 - RNA, 22 nt, Human
ggaguucaaaucuuuuggaucu

SEQ ID NO: 566768 - RNA, 22 nt, Human
aagucauugguagcuugauagg

SEQ ID NO: 566769 - RNA, 22 nt, Human
gccggacugcugcagcugcuag

SEQ ID NO: 566770 - RNA, 22 nt, Human
aagucaauuaguaaacuuggaa

SEQ ID NO: 566771 - RNA, 22 nt, Human
gaugaguucuuucuauucuauu

SEQ ID NO: 566772 - RNA, 22 nt, Human
cagacguuggaggaaauauacc

SEQ ID NO: 566773 - RNA, 22 nt, Human
uuccuucuucauuguguuacag

SEQ ID NO: 566774 - RNA, 22 nt, Human
ucagguagugguuaaguucugu

SEQ ID NO: 566775 - RNA, 22 nt, Human
acaaagugaaaagcaucgaauu

SEQ ID NO: 566776 - RNA, 22 nt, Human
cacaucucagggcuacaggcag

SEQ ID NO: 566777 - RNA, 22 nt, Human
uggaaauaguugugagucaggc

SEQ ID NO: 566778 - RNA, 22 nt, Human
aaucuguuuuaaaguuugugcc

SEQ ID NO: 566779 - RNA, 22 nt, Human
cugugaauguuauaucucaaug

SEQ ID NO: 566780 - RNA, 21 nt, Human
uaaacauaaccuuguauggcu

SEQ ID NO: 566781 - RNA, 22 nt, Human
uuugaaaggagcuuuauccaga

SEQ ID NO: 566782 - RNA, 22 nt, Human
uuuugaauaauucagaaacagc

SEQ ID NO: 566783 - RNA, 19 nt, Human
aguguuuauguagugccua

SEQ ID NO: 566784 - RNA, 22 nt, Human
uuguaacaguagcugucagcuc

SEQ ID NO: 566785 - RNA, 22 nt, Human
cuuuacuucagcaagcuuuccu

SEQ ID NO: 566786 - RNA, 22 nt, Human
ugccuguguccccuucuuggca

SEQ ID NO: 566787 - RNA, 22 nt, Human
cuuguauuaggaagaaugcuuu

SEQ ID NO: 566788 - RNA, 22 nt, Human
ccuuuuggccaggucagugcag

SEQ ID NO: 566789 - RNA, 21 nt, Human
auacaagaagauggcagucug

SEQ ID NO: 566790 - RNA, 22 nt, Human
ugcugcucaagcugcagcaaaa

SEQ ID NO: 566791 - RNA, 22 nt, Human
agugcuuuauguuguugugcaa

SEQ ID NO: 566792 - RNA, 22 nt, Human
gccaggcaggccacgcuguguu

SEQ ID NO: 566793 - RNA, 19 nt, Human
cugggacaaugaaagcauc

SEQ ID NO: 566794 - RNA, 22 nt, Human
ccaggccuguguuguguggagg

SEQ ID NO: 566795 - RNA, 22 nt, Human
uugcacgcuugcgguuccugcc

SEQ ID NO: 566796 - RNA, 22 nt, Human
uaccauuucaguaaaaacuuag

SEQ ID NO: 566797 - RNA, 22 nt, Human
auacagguucucuagggaacag

SEQ ID NO: 566798 - RNA, 22 nt, Human
gcacugggggcagcagugaggg

SEQ ID NO: 566799 - RNA, 22 nt, Human
auguaguauuuggaaauguaaa

SEQ ID NO: 566800 - RNA, 22 nt, Human
aacaugaugacauuguaagcuu

SEQ ID NO: 566801 - RNA, 22 nt, Human
ucagucucuggggcuucuguuu

SEQ ID NO: 566802 - RNA, 22 nt, Human
augcuacauuuugguuuauaaa

SEQ ID NO: 566803 - RNA, 19 nt, Human
ugcuccaggccuugccgca

SEQ ID NO: 566804 - RNA, 22 nt, Human
agcagcaggugaccucgaugcc

SEQ ID NO: 566805 - RNA, 22 nt, Human
aaggagcuuucauuacagccuu

SEQ ID NO: 566806 - RNA, 22 nt, Human
uuguccagcgaccaggcucugu

SEQ ID NO: 566807 - RNA, 22 nt, Human
acugaaauuuauauuuugggca

SEQ ID NO: 566808 - RNA, 22 nt, Human
cagcgguggcaaggugacugug

SEQ ID NO: 566809 - RNA, 22 nt, Human
gagauuuccauauuuuguaaca

SEQ ID NO: 566810 - RNA, 23 nt, Human
uggaaacauucugaauguccauc

SEQ ID NO: 566811 - RNA, 23 nt, Human
caccccacccugaggaggaggga

SEQ ID NO: 566812 - RNA, 22 nt, Human
caauaauugcuuuccagaguua

SEQ ID NO: 566813 - RNA, 20 nt, Human
uuucacuggcuugauaaggu

SEQ ID NO: 566814 - RNA, 22 nt, Human
auguuugaaauuguaaguauau

SEQ ID NO: 566815 - RNA, 22 nt, Human
ggagugggaacaaugacauggu

SEQ ID NO: 566816 - RNA, 22 nt, Human
uuuucuuggaguggcuguccuu

SEQ ID NO: 566817 - RNA, 22 nt, Human
aaccagacucuccaaaggcaaa

SEQ ID NO: 566818 - RNA, 22 nt, Human
cuguuuauucucaucuaaaaug

SEQ ID NO: 566819 - RNA, 22 nt, Human
aaacucuacauggucgcaaaaa

SEQ ID NO: 566820 - RNA, 22 nt, Human
uauuuggauagacagggagaug

SEQ ID NO: 566821 - RNA, 18 nt, Human
ucaguccuccauagagcu

SEQ ID NO: 566822 - RNA, 23 nt, Human
uugguuacuggauuugaggggcc

SEQ ID NO: 566823 - RNA, 22 nt, Human
cuccagauuccguuuauucagg

SEQ ID NO: 566824 - RNA, 22 nt, Human
gaugcugauuuuacuguuuucu

SEQ ID NO: 566825 - RNA, 22 nt, Human
uggaauuaucugaagugauuug

SEQ ID NO: 566826 - RNA, 22 nt, Human
caagccaggaaggauccagcac

SEQ ID NO: 566827 - RNA, 22 nt, Human
ucuuuugagggccagaggaaga

SEQ ID NO: 566828 - RNA, 22 nt, Human
ucaggggacagccagcuggagg

SEQ ID NO: 566829 - RNA, 22 nt, Human
augggucccuggccgcccucgg

SEQ ID NO: 566830 - RNA, 22 nt, Human
agacauauuggcuugcuuuaau

SEQ ID NO: 566831 - RNA, 22 nt, Human
aacccaggaguuggaggcugug

SEQ ID NO: 566832 - RNA, 20 nt, Human
cgggacacucaagcucuggg

SEQ ID NO: 566833 - RNA, 20 nt, Human
ucauaugugguuguauacaa

SEQ ID NO: 566834 - RNA, 22 nt, Human
gaagaaguguaagucuguuuca

SEQ ID NO: 566835 - RNA, 22 nt, Human
acaguguuacuugauaguguau

SEQ ID NO: 566836 - RNA, 22 nt, Human
agcaccauugcaaauauggcag

SEQ ID NO: 566837 - RNA, 22 nt, Human
aucuucaaggaaaaaauacagu

SEQ ID NO: 566838 - RNA, 22 nt, Human
augauuuguuaacagacuuaau

SEQ ID NO: 566839 - RNA, 22 nt, Human
uaucaguccaggguuuugugac

SEQ ID NO: 566840 - RNA, 22 nt, Human
gaacuuuaauuagcuuuugucu

SEQ ID NO: 566841 - RNA, 22 nt, Human
uuacaguuaaugugacuaacca

SEQ ID NO: 566842 - RNA, 22 nt, Human
acgccucugcagcugccgggcc

SEQ ID NO: 566843 - RNA, 22 nt, Human
uuucucggcagagaugaugggc

SEQ ID NO: 566844 - RNA, 22 nt, Human
gcagcugcgaagaagucuaucu

SEQ ID NO: 566845 - RNA, 22 nt, Human
uaucuguagucucaugguuccu

SEQ ID NO: 566846 - RNA, 22 nt, Human
uuaguuuccuguggugugaagu

SEQ ID NO: 566847 - RNA, 23 nt, Human
acauuacacgcaguaauugcccc

SEQ ID NO: 566848 - RNA, 20 nt, Human
gggugugugcagggccuggu

SEQ ID NO: 566849 - RNA, 22 nt, Human
uuuggaaaugagaagccaccuu

SEQ ID NO: 566850 - RNA, 22 nt, Human
cuuauguaaacuacagauaaua

SEQ ID NO: 566851 - RNA, 22 nt, Human
uacuguauacuacugcuguucu

SEQ ID NO: 566852 - RNA, 22 nt, Human
cauuuuccucugcugguguuca

SEQ ID NO: 566853 - RNA, 22 nt, Human
uauuacaguucgaguuucuagg

SEQ ID NO: 566854 - RNA, 22 nt, Human
uuucgagggauuagcuaggacu

SEQ ID NO: 566855 - RNA, 23 nt, Human
aguacauuugacccaaauaagcu

SEQ ID NO: 566856 - RNA, 22 nt, Human
aauacagauggcaugugaagau

SEQ ID NO: 566857 - RNA, 22 nt, Human
guuguuuuugaacggugguggc

SEQ ID NO: 566858 - RNA, 22 nt, Human
uaaaaucaugacagauugacau

SEQ ID NO: 566859 - RNA, 22 nt, Human
ggucuggccuccgggcaggugg

SEQ ID NO: 566860 - RNA, 22 nt, Human
gaccacugaaugcacuucuaau

SEQ ID NO: 566861 - RNA, 21 nt, Human
caaaagagacugauucuugga

SEQ ID NO: 566862 - RNA, 22 nt, Human
uacccacugucauauucagggu

SEQ ID NO: 566863 - RNA, 22 nt, Human
acgcggugcggcaaguucaugg

SEQ ID NO: 566864 - RNA, 22 nt, Human
cgugaugcucaggaggucauag

SEQ ID NO: 566865 - RNA, 22 nt, Human
aaaugcacaauaaaguaaaggc

SEQ ID NO: 566866 - RNA, 19 nt, Human
gagcagcuuccuaucuggu

SEQ ID NO: 566867 - RNA, 22 nt, Human
ggugauuuccuuuugcaaaguc

SEQ ID NO: 566868 - RNA, 19 nt, Human
ugcucucuggugcuucaug

SEQ ID NO: 566869 - RNA, 22 nt, Human
uuguacuuaaauaugcaaauag

SEQ ID NO: 566870 - RNA, 20 nt, Human
ugugguuuuugccaguugaa

SEQ ID NO: 566871 - RNA, 21 nt, Human
gcuggcugucucuuacacggu

SEQ ID NO: 566872 - RNA, 22 nt, Human
cagaggccccauuggcugugcg

SEQ ID NO: 566873 - RNA, 22 nt, Human
uuggcagugacugcgggccccg

SEQ ID NO: 566874 - RNA, 22 nt, Human
agcaggaaggggaugaugggca

SEQ ID NO: 566875 - RNA, 22 nt, Human
uguucugcaaugcugccuccuu

SEQ ID NO: 566876 - RNA, 22 nt, Human
agaauguaagaaugcaaagauu

SEQ ID NO: 566877 - RNA, 22 nt, Human
ugugucuaaugacuauuucuuc

SEQ ID NO: 566878 - RNA, 22 nt, Human
gauguaucugagcugcuuaggu

SEQ ID NO: 566879 - RNA, 22 nt, Human
gcgcuccucccggcccuggugg

SEQ ID NO: 566880 - RNA, 22 nt, Human
guucuccaggggcuguucaucu

SEQ ID NO: 566881 - RNA, 22 nt, Human
agagcagaggcauggccguggg

SEQ ID NO: 566882 - RNA, 22 nt, Human
ggaagcuguuaucaucuguauc

SEQ ID NO: 566883 - RNA, 22 nt, Human
cauuaacacuuuggauuuagac

SEQ ID NO: 566884 - RNA, 22 nt, Human
uaauccaaaacugaaucugugg

SEQ ID NO: 566885 - RNA, 22 nt, Human
ucagaagcauccauuucaccac

SEQ ID NO: 566886 - RNA, 22 nt, Human
gauuguacuuauugagcuaaac

SEQ ID NO: 566887 - RNA, 22 nt, Human
cccaggaggcagaaguugcagu

SEQ ID NO: 566888 - RNA, 22 nt, Human
uuguacaaauaggaaccucuga

SEQ ID NO: 566889 - RNA, 22 nt, Human
aagcauuucagguagagauauu

SEQ ID NO: 566890 - RNA, 22 nt, Human
guauuucuuuacauaugcucau

SEQ ID NO: 566891 - RNA, 22 nt, Human
ucaauuuauguggcuauucauu

SEQ ID NO: 566892 - RNA, 22 nt, Human
uuaaaagaauccuguuauccuc

SEQ ID NO: 566893 - RNA, 22 nt, Human
uugcaaucagcaguguuuucac

SEQ ID NO: 566894 - RNA, 22 nt, Human
agcuuugcugcuggagaagggu

SEQ ID NO: 566895 - RNA, 22 nt, Human
uuacuguagcuugacauauguc

SEQ ID NO: 566896 - RNA, 22 nt, Human
auuaauaucccccgccguucug

SEQ ID NO: 566897 - RNA, 22 nt, Human
ggcaagaaccucaauuaccuuu

SEQ ID NO: 566898 - RNA, 22 nt, Human
ugccuguggaaaggcuggugcu

SEQ ID NO: 566899 - RNA, 22 nt, Human
cucucugggcccaguuggcacc

SEQ ID NO: 566900 - RNA, 22 nt, Human
aaaagagccacuuaugaccuca

SEQ ID NO: 566901 - RNA, 22 nt, Human
gaacaguuucccuguagaaaau

SEQ ID NO: 566902 - RNA, 22 nt, Human
uccucauucuuggugcaucaaa

SEQ ID NO: 566903 - RNA, 22 nt, Human
ucugcuggaaaaccagggaauu

SEQ ID NO: 566904 - RNA, 22 nt, Human
guuucuuauuucaacuggaaca

SEQ ID NO: 566905 - RNA, 21 nt, Human
ccuguggugccagaucgccag

SEQ ID NO: 566906 - RNA, 22 nt, Human
ugcccguggccuggggcagcuu

SEQ ID NO: 566907 - RNA, 22 nt, Human
cuaaauguuuuaucuuccuggc

SEQ ID NO: 566908 - RNA, 22 nt, Human
uaucuguuuuuacagugucuuu

SEQ ID NO: 566909 - RNA, 22 nt, Human
ugaauaaucuuggguauuaaua

SEQ ID NO: 566910 - RNA, 22 nt, Human
cuaguauuaagugugaguaaaa

SEQ ID NO: 566911 - RNA, 22 nt, Human
aacacaguuucugcauugguag

SEQ ID NO: 566912 - RNA, 20 nt, Human
gcugugccaugacccucgag

SEQ ID NO: 566913 - RNA, 22 nt, Human
auuaguguuguggcuucauggc

SEQ ID NO: 566914 - RNA, 22 nt, Human
ugacauuugagagagauauaca

SEQ ID NO: 566915 - RNA, 22 nt, Human
aauucauacucuauauugcuuu

SEQ ID NO: 566916 - RNA, 22 nt, Human
auuuccaggaguugaggucuga

SEQ ID NO: 566917 - RNA, 22 nt, Human
uagcugcacaggaaguaagauu

SEQ ID NO: 566918 - RNA, 22 nt, Human
acauauuuugaaagcuuucuaa

SEQ ID NO: 566919 - RNA, 23 nt, Human
cguuuuuuccucagauguucugg

SEQ ID NO: 566920 - RNA, 22 nt, Human
ccuuuuaagggagacuagagau

SEQ ID NO: 566921 - RNA, 22 nt, Human
ggcagcagaacuggcccuguau

SEQ ID NO: 566922 - RNA, 22 nt, Human
guguuuugugaggccuucuuuc

SEQ ID NO: 566923 - RNA, 22 nt, Human
gcugucucauacaaggcccugc

SEQ ID NO: 566924 - RNA, 22 nt, Human
cauaaauuguacccauuccaac

SEQ ID NO: 566925 - RNA, 22 nt, Human
gagagaagggggauaugagccu

SEQ ID NO: 566926 - RNA, 22 nt, Human
ugcucccaggcauucucuguug

SEQ ID NO: 566927 - RNA, 22 nt, Human
augauccagauuuugggcaguu

SEQ ID NO: 566928 - RNA, 22 nt, Human
uugcuugaacccaggaagugga

SEQ ID NO: 566929 - RNA, 22 nt, Human
ucuuuuccuugaugguuaaaua

SEQ ID NO: 566930 - RNA, 22 nt, Human
cagaaacacuguauuuagggaa

SEQ ID NO: 566931 - RNA, 22 nt, Human
gucuuuuuuacaccuuacauca

SEQ ID NO: 566932 - RNA, 22 nt, Human
uagcaucuguacugacauaauc

SEQ ID NO: 566933 - RNA, 22 nt, Human
uauuaugguuguagguuaacaa

SEQ ID NO: 566934 - RNA, 21 nt, Human
guucaauagcucuuugaaugc

SEQ ID NO: 566935 - RNA, 22 nt, Human
auagcuuugagggcuccuuagg

SEQ ID NO: 566936 - RNA, 22 nt, Human
aauuauugagcaucuacugugu

SEQ ID NO: 566937 - RNA, 22 nt, Human
ucuucacaguccuggucagugg

SEQ ID NO: 566938 - RNA, 22 nt, Human
gagacagagagguacucaacau

SEQ ID NO: 566939 - RNA, 22 nt, Human
acaaaugcuuaguucaccaaaa

SEQ ID NO: 566940 - RNA, 18 nt, Human
uucggcagauacgcuugg

SEQ ID NO: 566941 - RNA, 22 nt, Human
ggucucugcagcucccggcccc

SEQ ID NO: 566942 - RNA, 22 nt, Human
uggaauguuaaaccucaaugau

SEQ ID NO: 566943 - RNA, 22 nt, Human
gauacuuuguggaauccuggau

SEQ ID NO: 566944 - RNA, 22 nt, Human
aguguauuugccuauaaaaaug

SEQ ID NO: 566945 - RNA, 22 nt, Human
aguguucuagcgcugugcuugu

SEQ ID NO: 566946 - RNA, 22 nt, Human
aucuggcucccuuggaauccgu

SEQ ID NO: 566947 - RNA, 22 nt, Human
uucucugaguacguuucagugu

SEQ ID NO: 566948 - RNA, 22 nt, Human
uuggaaauguagaaaagcagau

SEQ ID NO: 566949 - RNA, 22 nt, Human
cuagcagcauucuucuaguuag

SEQ ID NO: 566950 - RNA, 22 nt, Human
agacacauuuucagcucugcca

SEQ ID NO: 566951 - RNA, 22 nt, Human
guccaggccugccucugaggag

SEQ ID NO: 566952 - RNA, 22 nt, Human
ccucauucucgcguguguuucu

SEQ ID NO: 566953 - RNA, 22 nt, Human
agauguuuuuccaggucuaauu

SEQ ID NO: 566954 - RNA, 22 nt, Human
cucuauucuaauggauucuggg

SEQ ID NO: 566955 - RNA, 22 nt, Human
auacaugacucacacauucugc

SEQ ID NO: 566956 - RNA, 22 nt, Human
ucuaguuagugguugauacugu

SEQ ID NO: 566957 - RNA, 18 nt, Human
agguguguuucuaggagc

SEQ ID NO: 566958 - RNA, 22 nt, Human
cucacucaguuuuuaguucauc

SEQ ID NO: 566959 - RNA, 22 nt, Human
ugugugaacucucugauguaca

SEQ ID NO: 566960 - RNA, 21 nt, Human
auucugaguugucagucuuca

SEQ ID NO: 566961 - RNA, 21 nt, Human
uggagagugauuucagugugg

SEQ ID NO: 566962 - RNA, 22 nt, Human
gugauuucaaauauagagugag

SEQ ID NO: 566963 - RNA, 21 nt, Human
ucauccagguccugcuucuuc

SEQ ID NO: 566964 - RNA, 22 nt, Human
aauggagugguucuugcccucu

SEQ ID NO: 566965 - RNA, 22 nt, Human
uggaaggggccaggcgcggagu

SEQ ID NO: 566966 - RNA, 22 nt, Human
gggcuguuugcauauguuuaua

SEQ ID NO: 566967 - RNA, 22 nt, Human
ugaggucuguccugucuuugga

SEQ ID NO: 566968 - RNA, 23 nt, Human
uggggcugauggagacggaccag

SEQ ID NO: 566969 - RNA, 22 nt, Human
uucucaaagugugcucccugga

SEQ ID NO: 566970 - RNA, 22 nt, Human
ucaccuguuggauguauacugu

SEQ ID NO: 566971 - RNA, 20 nt, Human
gugcccaguuggugacagac

SEQ ID NO: 566972 - RNA, 22 nt, Human
ugugaagaucaggguccuagag

SEQ ID NO: 566973 - RNA, 22 nt, Human
ugucuucuaccuugacagcauu

SEQ ID NO: 566974 - RNA, 22 nt, Human
agugauguagguggauucuggc

SEQ ID NO: 566975 - RNA, 23 nt, Human
cauuugauccucacaauaaaugg

SEQ ID NO: 566976 - RNA, 22 nt, Human
uuuuuaagagucuggaaauagu

SEQ ID NO: 566977 - RNA, 22 nt, Human
acagacacaggcguggagucgc

SEQ ID NO: 566978 - RNA, 22 nt, Human
gugauuuucuccuccuagaagu

SEQ ID NO: 566979 - RNA, 22 nt, Human
caugucacaauucuuaauggga

SEQ ID NO: 566980 - RNA, 22 nt, Human
uccacagguccucuuugcaaag

SEQ ID NO: 566981 - RNA, 22 nt, Human
gacaguggagccacguugggag

SEQ ID NO: 566982 - RNA, 22 nt, Human
aagcccuuggcgcacaccgggc

SEQ ID NO: 566983 - RNA, 22 nt, Human
uugaugcugucuuucagaauca

SEQ ID NO: 566984 - RNA, 22 nt, Human
gccggggcuggggagagacaug

SEQ ID NO: 566985 - RNA, 22 nt, Human
cuccagcucgcgagcucugcuc

SEQ ID NO: 566986 - RNA, 22 nt, Human
uagauucugacccucuuuuuac

SEQ ID NO: 566987 - RNA, 22 nt, Human
uuugcaaaguccauugaaguua

SEQ ID NO: 566988 - RNA, 22 nt, Human
uuuguguuguacuucugugcau

SEQ ID NO: 566989 - RNA, 22 nt, Human
ucagcacaggucuugcaaaaca

SEQ ID NO: 566990 - RNA, 22 nt, Human
auagcaaaggacaauagucagu

SEQ ID NO: 566991 - RNA, 22 nt, Human
auuuagacaacaagccuucucc

SEQ ID NO: 566992 - RNA, 22 nt, Human
guuugagauggguuauugcucu

SEQ ID NO: 566993 - RNA, 22 nt, Human
augcuuuauuggagacagucau

SEQ ID NO: 566994 - RNA, 23 nt, Human
cagcacaguacauuuccugucuc

SEQ ID NO: 566995 - RNA, 22 nt, Human
ugggcccaucauugcugugggc

SEQ ID NO: 566996 - RNA, 22 nt, Human
ggcugagucugugacccaugcg

SEQ ID NO: 566997 - RNA, 22 nt, Human
ugcauuucccauuguguggcuc

SEQ ID NO: 566998 - RNA, 22 nt, Human
augcaacuacccccaggauuuu

SEQ ID NO: 566999 - RNA, 22 nt, Human
gcagcuuuggagguggaacucu

SEQ ID NO: 567000 - RNA, 22 nt, Human
caacuuuagaccccaaguagcu

SEQ ID NO: 567001 - RNA, 22 nt, Human
cuuguuuucuucugcagucuau

SEQ ID NO: 567002 - RNA, 22 nt, Human
ugcauguuucuguauguuaaug

SEQ ID NO: 567003 - RNA, 19 nt, Human
auucuucucuuccugcugu

SEQ ID NO: 567004 - RNA, 22 nt, Human
uuugacaugugcuuauaacuuu

SEQ ID NO: 567005 - RNA, 16 nt, Human
ucauugaagacaguac

SEQ ID NO: 567006 - RNA, 22 nt, Human
agccuugcaugauuucauucau

SEQ ID NO: 567007 - RNA, 22 nt, Human
acaggcgcacaugagggccgug

SEQ ID NO: 567008 - RNA, 23 nt, Human
uguguucagucaaggaucagagu

SEQ ID NO: 567009 - RNA, 22 nt, Human
cugacagcgagagaguugcccc

SEQ ID NO: 567010 - RNA, 22 nt, Human
ugaauaugugacuuugauuuca

SEQ ID NO: 567011 - RNA, 22 nt, Human
gucauuuuugacuuugaaguga

SEQ ID NO: 567012 - RNA, 22 nt, Human
acauuuguuucucuagaguagg

SEQ ID NO: 567013 - RNA, 20 nt, Human
ucacuguaacauuugggggg

SEQ ID NO: 567014 - RNA, 22 nt, Human
aaaucaugguggaagaaacaga

SEQ ID NO: 567015 - RNA, 20 nt, Human
cugggcagguguuugaucuc

SEQ ID NO: 567016 - RNA, 22 nt, Human
uuugggcuguacaauuucugua

SEQ ID NO: 567017 - RNA, 22 nt, Human
auacacauguuauuguggaagc

SEQ ID NO: 567018 - RNA, 22 nt, Human
aaaugcacugaauauuccaaau

SEQ ID NO: 567019 - RNA, 23 nt, Human
auaugucaugcaccagcacuuua

SEQ ID NO: 567020 - RNA, 22 nt, Human
cccacucccugcacgccugccg

SEQ ID NO: 567021 - RNA, 22 nt, Human
uuuguguuggaagaaaugcuac

SEQ ID NO: 567022 - RNA, 22 nt, Human
uuucacaugguacugccuguuu

SEQ ID NO: 567023 - RNA, 22 nt, Human
cagacucuugagcugauuguau

SEQ ID NO: 567024 - RNA, 22 nt, Human
gacaggugcuaagggaccuggc

SEQ ID NO: 567025 - RNA, 22 nt, Human
aguguauucugcaugggagacu

SEQ ID NO: 567026 - RNA, 22 nt, Human
ccugugguuuacucuguggcua

SEQ ID NO: 567027 - RNA, 22 nt, Human
ggccgugcuccaaagucaucgu

SEQ ID NO: 567028 - RNA, 22 nt, Human
ugacaagagaccccuccgcagg

SEQ ID NO: 567029 - RNA, 22 nt, Human
augaaacucuagcuuucagcac

SEQ ID NO: 567030 - RNA, 17 nt, Human
cauucuguaaucuuucu

SEQ ID NO: 567031 - RNA, 22 nt, Human
gguuauuguggagaaguuccgg

SEQ ID NO: 567032 - RNA, 20 nt, Human
gggugugggcccggccaggc

SEQ ID NO: 567033 - RNA, 22 nt, Human
cuacauuauguuuauugggacu

SEQ ID NO: 567034 - RNA, 22 nt, Human
aagcugccugggaggaagggcu

SEQ ID NO: 567035 - RNA, 22 nt, Human
cugucuacagaugaaauaagca

SEQ ID NO: 567036 - RNA, 22 nt, Human
auuuccuauacaguuguccaua

SEQ ID NO: 567037 - RNA, 22 nt, Human
ccaagcuggacagcagcaagga

SEQ ID NO: 567038 - RNA, 21 nt, Human
auccauccaucuuggccuaac

SEQ ID NO: 567039 - RNA, 22 nt, Human
cugcugucuuuauuucacugcu

SEQ ID NO: 567040 - RNA, 22 nt, Human
caguauuucauucagaauuguu

SEQ ID NO: 567041 - RNA, 22 nt, Human
ggagcugcucagagccaguccc

SEQ ID NO: 567042 - RNA, 22 nt, Human
agggcuccuaugccccauggac

SEQ ID NO: 567043 - RNA, 22 nt, Human
ucguuauagaacauucuugggu

SEQ ID NO: 567044 - RNA, 22 nt, Human
caagucuagcuuggucacuugg

SEQ ID NO: 567045 - RNA, 22 nt, Human
caguuaaacagauugaguguua

SEQ ID NO: 567046 - RNA, 22 nt, Human
ucucugccacagcuucugccuu

SEQ ID NO: 567047 - RNA, 22 nt, Human
guuguacauaugaggauaaguu

SEQ ID NO: 567048 - RNA, 22 nt, Human
accuuguuguagguacaaaaga

SEQ ID NO: 567049 - RNA, 23 nt, Human
aggcagguuugggcucuucuugu

SEQ ID NO: 567050 - RNA, 22 nt, Human
uaaauacuuuuacuccacugau

SEQ ID NO: 567051 - RNA, 22 nt, Human
acaucguguaucacugaaccuu

SEQ ID NO: 567052 - RNA, 22 nt, Human
ucuuauugguaaugauggcauu

SEQ ID NO: 567053 - RNA, 22 nt, Human
ucauggaugauagcuucauugc

SEQ ID NO: 567054 - RNA, 22 nt, Human
ucgucugugaaauugggauaag

SEQ ID NO: 567055 - RNA, 22 nt, Human
guuuacaacaucuuguccuuca

SEQ ID NO: 567056 - RNA, 22 nt, Human
ucugugggcauuuauaaucugg

SEQ ID NO: 567057 - RNA, 22 nt, Human
uccguggggccuguggcuuccg

SEQ ID NO: 567058 - RNA, 22 nt, Human
aaagcagaacugagagagcugg

SEQ ID NO: 567059 - RNA, 22 nt, Human
uuagaaaucaccucugaagauc

SEQ ID NO: 567060 - RNA, 22 nt, Human
aucauuugaacagaauuuguuu

SEQ ID NO: 567061 - RNA, 20 nt, Human
agugauuuguuaguacauug

SEQ ID NO: 567062 - RNA, 22 nt, Human
acuggaaaguauucuuucacug

SEQ ID NO: 567063 - RNA, 22 nt, Human
cgcagcugcugcucugaaacag

SEQ ID NO: 567064 - RNA, 22 nt, Human
aggccacucagggggccaagau

SEQ ID NO: 567065 - RNA, 20 nt, Human
ucauccaguugguuuauggu

SEQ ID NO: 567066 - RNA, 18 nt, Human
cuuuagcugucaucuuug

SEQ ID NO: 567067 - RNA, 22 nt, Human
ugaagccagggacugacacuuc

SEQ ID NO: 567068 - RNA, 22 nt, Human
cuugucugcuauaaaaauccag

SEQ ID NO: 567069 - RNA, 22 nt, Human
gaugaaggggcuggugcccucu

SEQ ID NO: 567070 - RNA, 22 nt, Human
cauuguguauuucuguaguacu

SEQ ID NO: 567071 - RNA, 22 nt, Human
uguacacauuaagcucuuuaga

SEQ ID NO: 567072 - RNA, 22 nt, Human
aaucuguugucaggaauccaca

SEQ ID NO: 567073 - RNA, 22 nt, Human
gggcucggcaucuguggacucu

SEQ ID NO: 567074 - RNA, 22 nt, Human
aaggaucauguauauguuuaag

SEQ ID NO: 567075 - RNA, 22 nt, Human
acaggaaaugaaaugguaucua

SEQ ID NO: 567076 - RNA, 20 nt, Human
gugugaccuccuguggaugc

SEQ ID NO: 567077 - RNA, 22 nt, Human
gucuggaggaggaagaaggcac

SEQ ID NO: 567078 - RNA, 22 nt, Human
gcucugugccccugccguggac

SEQ ID NO: 567079 - RNA, 22 nt, Human
uucuccccgucucucugaggcc

SEQ ID NO: 567080 - RNA, 22 nt, Human
ggagagagaccuccaugcccag

SEQ ID NO: 567081 - RNA, 21 nt, Human
aucuuaaaaggucuuaacuuu

SEQ ID NO: 567082 - RNA, 23 nt, Human
agcaacagugggugaguguugcu

SEQ ID NO: 567083 - RNA, 22 nt, Human
aauagcaaaugcucauuugaaa

SEQ ID NO: 567084 - RNA, 22 nt, Human
acaaguuucauuguuuagaacc

SEQ ID NO: 567085 - RNA, 21 nt, Human
uaagaacauuaucuucuuccu

SEQ ID NO: 567086 - RNA, 22 nt, Human
cagagccacugucugccaggca

SEQ ID NO: 567087 - RNA, 22 nt, Human
agacacuguguacagaaaaaga

SEQ ID NO: 567088 - RNA, 22 nt, Human
uagcuguucucuguaaauugga

SEQ ID NO: 567089 - RNA, 22 nt, Human
caggaacagcaccaggagcuag

SEQ ID NO: 567090 - RNA, 22 nt, Human
uguaauguuagaaacaauugcu

SEQ ID NO: 567091 - RNA, 22 nt, Human
ucugaaauuuuaguuauagaaa

SEQ ID NO: 567092 - RNA, 22 nt, Human
ucauugaggaaagguaguggcu

SEQ ID NO: 567093 - RNA, 22 nt, Human
cagacaggguccuguccgucac

SEQ ID NO: 567094 - RNA, 22 nt, Human
caguauuuaggauuaggagaga

SEQ ID NO: 567095 - RNA, 19 nt, Human
cacuaagaagcaggggagc

SEQ ID NO: 567096 - RNA, 22 nt, Human
uuuacaaggcaguuauuuuccu

SEQ ID NO: 567097 - RNA, 22 nt, Human
uguuuuaagggucaacugucac

SEQ ID NO: 567098 - RNA, 22 nt, Human
acaaucagcacugaguuuaucu

SEQ ID NO: 567099 - RNA, 22 nt, Human
aagugauuucugccugcauguu

SEQ ID NO: 567100 - RNA, 22 nt, Human
cugaacaucccgcagugcacga

SEQ ID NO: 567101 - RNA, 22 nt, Human
uuuguaguuguggaugcugaag

SEQ ID NO: 567102 - RNA, 22 nt, Human
ucucuuaauuguaaugguuccu

SEQ ID NO: 567103 - RNA, 22 nt, Human
gaggcagagacuccaccuucag

SEQ ID NO: 567104 - RNA, 22 nt, Human
caggaacacaaugagucucaaa

SEQ ID NO: 567105 - RNA, 22 nt, Human
guuauucuauuaaugugauugu

SEQ ID NO: 567106 - RNA, 23 nt, Human
cguguccuucagggagagugugg

SEQ ID NO: 567107 - RNA, 22 nt, Human
auuuggcauaggcagaggccca

SEQ ID NO: 567108 - RNA, 22 nt, Human
agcaggaacucagggaguucuc

SEQ ID NO: 567109 - RNA, 22 nt, Human
ucuacugagugcugagauuuug

SEQ ID NO: 567110 - RNA, 22 nt, Human
cucucuccuuagcugcagacca

SEQ ID NO: 567111 - RNA, 22 nt, Human
uuucauuauaaaaaguuggcuu

SEQ ID NO: 567112 - RNA, 20 nt, Human
gaccagaucccuuaccagcu

SEQ ID NO: 567113 - RNA, 22 nt, Human
agagcuauuucuuaaaagcugu

SEQ ID NO: 567114 - RNA, 22 nt, Human
cccaccacgugcuuugcuggag

SEQ ID NO: 567115 - RNA, 22 nt, Human
ucaccuguucaacagcaauaau

SEQ ID NO: 567116 - RNA, 22 nt, Human
ugcuccaggcugcugaagaucu

SEQ ID NO: 567117 - RNA, 22 nt, Human
cucaaaauccauaaaaucaggu

SEQ ID NO: 567118 - RNA, 22 nt, Human
ccagaacagaccugccugaccu

SEQ ID NO: 567119 - RNA, 22 nt, Human
aaauucuguccugaaugccauu

SEQ ID NO: 567120 - RNA, 22 nt, Human
uccuugcagcaggaacccacuu

SEQ ID NO: 567121 - RNA, 22 nt, Human
cgcacuggagcuggaacgaguc

SEQ ID NO: 567122 - RNA, 22 nt, Human
gauugcugggucccacucccag

SEQ ID NO: 567123 - RNA, 22 nt, Human
uccgggagcugaacgucuugcg

SEQ ID NO: 567124 - RNA, 22 nt, Human
uaaacagagaugccugggucug

SEQ ID NO: 567125 - RNA, 22 nt, Human
gaggaggcuuccgggaggcacg

SEQ ID NO: 567126 - RNA, 22 nt, Human
gcgacuguacagaauugccccu

SEQ ID NO: 567127 - RNA, 22 nt, Human
ugucuuaugcugcauagacuau

SEQ ID NO: 567128 - RNA, 22 nt, Human
ggucuuucuuugauaguggaga

SEQ ID NO: 567129 - RNA, 22 nt, Human
guggcaggagggcaucacuugg

SEQ ID NO: 567130 - RNA, 22 nt, Human
ucaguaaaugagcaaaaauuuc

SEQ ID NO: 567131 - RNA, 22 nt, Human
gaagcgcggcgucggcgugggu

SEQ ID NO: 567132 - RNA, 22 nt, Human
ggaaggaucuggcugaaaucca

SEQ ID NO: 567133 - RNA, 19 nt, Human
gaacugaggucugaggcuu

SEQ ID NO: 567134 - RNA, 22 nt, Human
auacuaagcucauuacauuuug

SEQ ID NO: 567135 - RNA, 22 nt, Human
ugcccuguuccugccuccagcu

SEQ ID NO: 567136 - RNA, 20 nt, Human
uuucacaaugaacaugucuc

SEQ ID NO: 567137 - RNA, 22 nt, Human
uuggaggacuaguuaagagacc

SEQ ID NO: 567138 - RNA, 22 nt, Human
agaguguggaaauguucagagu

SEQ ID NO: 567139 - RNA, 22 nt, Human
agccaggucaggaaagguccca

SEQ ID NO: 567140 - RNA, 20 nt, Human
agcuuugguuaagccagugg

SEQ ID NO: 567141 - RNA, 22 nt, Human
ucauuuacacuucacaaaugga

SEQ ID NO: 567142 - RNA, 22 nt, Human
gcauaaaggacuauaaggauca

SEQ ID NO: 567143 - RNA, 22 nt, Human
auugucgucaauggacacauag

SEQ ID NO: 567144 - RNA, 22 nt, Human
aaugcauacguguuuguggcaa

SEQ ID NO: 567145 - RNA, 22 nt, Human
uugcaucagcaggcauaauugg

SEQ ID NO: 567146 - RNA, 22 nt, Human
ugaaagcucugucaucauuccu

SEQ ID NO: 567147 - RNA, 22 nt, Human
ucauugacuugaagaaaacaau

SEQ ID NO: 567148 - RNA, 22 nt, Human
cuggaucaugggaaagggauca

SEQ ID NO: 567149 - RNA, 22 nt, Human
acuuuuaaggggccuugauuua

SEQ ID NO: 567150 - RNA, 22 nt, Human
gucuugcacuuaccuaagaacu

SEQ ID NO: 567151 - RNA, 22 nt, Human
cagcuauuguucuguauaauga

SEQ ID NO: 567152 - RNA, 22 nt, Human
augcauugaggaugacaugagu

SEQ ID NO: 567153 - RNA, 22 nt, Human
uggaaacacccacgcaugcaua

SEQ ID NO: 567154 - RNA, 22 nt, Human
cuacagaauucaacaaaugguu

SEQ ID NO: 567155 - RNA, 22 nt, Human
cccuguccugcuaggcccuggu

SEQ ID NO: 567156 - RNA, 22 nt, Human
gagugugucggucagcguggcg

SEQ ID NO: 567157 - RNA, 22 nt, Human
aauaucuagccuuuagcagcuu

SEQ ID NO: 567158 - RNA, 22 nt, Human
gacggggcagccagcugguggc

SEQ ID NO: 567159 - RNA, 22 nt, Human
cacaguuuuaucuuauacugau

SEQ ID NO: 567160 - RNA, 22 nt, Human
acucauguccuaggaguaaagc

SEQ ID NO: 567161 - RNA, 23 nt, Human
cagcugguugugggaguggcugc

SEQ ID NO: 567162 - RNA, 22 nt, Human
ccaggagagcucucguucagug

SEQ ID NO: 567163 - RNA, 16 nt, Human
gcagguggggcgcgca

SEQ ID NO: 567164 - RNA, 22 nt, Human
agguuaggaaugggagguaaug

SEQ ID NO: 567165 - RNA, 22 nt, Human
gcaguuaccuauuuuguagaaa

SEQ ID NO: 567166 - RNA, 22 nt, Human
gguuguaguuggagguuguaua

SEQ ID NO: 567167 - RNA, 22 nt, Human
ugaagacaguuuuacucaugag

SEQ ID NO: 567168 - RNA, 21 nt, Human
uuuguucaggggcaaaguuaa

SEQ ID NO: 567169 - RNA, 22 nt, Human
gcuguaacuuuuucauuuucaa

SEQ ID NO: 567170 - RNA, 22 nt, Human
uacauguacaugcauagguaga

SEQ ID NO: 567171 - RNA, 22 nt, Human
acucuguuugcagguagcucag

SEQ ID NO: 567172 - RNA, 21 nt, Human
uuccuggaggcagaaacguga

SEQ ID NO: 567173 - RNA, 22 nt, Human
ucuguaaacacccguaagcuuu

SEQ ID NO: 567174 - RNA, 22 nt, Human
uuagacaucaagaagccaaugu

SEQ ID NO: 567175 - RNA, 22 nt, Human
guugguccuuugagcaagaucc

SEQ ID NO: 567176 - RNA, 22 nt, Human
uucuguuuauaauuugcaguug

SEQ ID NO: 567177 - RNA, 22 nt, Human
augugaaagagguguucagugg

SEQ ID NO: 567178 - RNA, 22 nt, Human
uguacauacauagauauacaca

SEQ ID NO: 567179 - RNA, 22 nt, Human
ucuuugcagaauuuaacuuugc

SEQ ID NO: 567180 - RNA, 22 nt, Human
gcugugcagaggugagaaucca

SEQ ID NO: 567181 - RNA, 22 nt, Human
acaggaucgcccuguugcccag

SEQ ID NO: 567182 - RNA, 22 nt, Human
aagcauuuuagauaaagcauca

SEQ ID NO: 567183 - RNA, 22 nt, Human
aauugguuugaauaaauaaaga

SEQ ID NO: 567184 - RNA, 22 nt, Human
cacaauuuccauugagcagcag

SEQ ID NO: 567185 - RNA, 22 nt, Human
accaaucuccuauuuuguuuca

SEQ ID NO: 567186 - RNA, 22 nt, Human
cacuuuuaacaggagaauuccc

SEQ ID NO: 567187 - RNA, 22 nt, Human
gagucacuucccgaauaaaccc

SEQ ID NO: 567188 - RNA, 22 nt, Human
aguuuccacuggagacacugug

SEQ ID NO: 567189 - RNA, 22 nt, Human
gagucgagcagaaagccgucgg

SEQ ID NO: 567190 - RNA, 22 nt, Human
uggaaagaggaagugcccagca

SEQ ID NO: 567191 - RNA, 22 nt, Human
acucauuugcaugaugugcuau

SEQ ID NO: 567192 - RNA, 22 nt, Human
aagaaaagguaaccgcuuaucu

SEQ ID NO: 567193 - RNA, 22 nt, Human
uauagcagcaugauuuauaguc

SEQ ID NO: 567194 - RNA, 22 nt, Human
aggaagagcuggaccagaggac

SEQ ID NO: 567195 - RNA, 22 nt, Human
aguucugacucugaaucuggga

SEQ ID NO: 567196 - RNA, 18 nt, Human
uauaaacacacuuagguu

SEQ ID NO: 567197 - RNA, 22 nt, Human
agcagggagaccaucucuuccu

SEQ ID NO: 567198 - RNA, 22 nt, Human
ucguuagccucgagaucuuugu

SEQ ID NO: 567199 - RNA, 22 nt, Human
ucuggcuucaacuuuacugaaa

SEQ ID NO: 567200 - RNA, 22 nt, Human
gggaggaaggcuugggugagua

SEQ ID NO: 567201 - RNA, 22 nt, Human
aucaugcagcaacaagcaaggc

SEQ ID NO: 567202 - RNA, 16 nt, Human
ucucuggguugcacag

SEQ ID NO: 567203 - RNA, 22 nt, Human
cuucauuuggcaggcuggccuc

SEQ ID NO: 567204 - RNA, 22 nt, Human
gagcagcuguucugacuugucu

SEQ ID NO: 567205 - RNA, 23 nt, Human
aauagcugguaaugauagcacaa

SEQ ID NO: 567206 - RNA, 22 nt, Human
auuuacucgugcuucauugaau

SEQ ID NO: 567207 - RNA, 22 nt, Human
auuucauccauuaagaguacuc

SEQ ID NO: 567208 - RNA, 22 nt, Human
uaguauuuccuguaagcuauag

SEQ ID NO: 567209 - RNA, 22 nt, Human
guggaaauuuuaggaucaucuu

SEQ ID NO: 567210 - RNA, 22 nt, Human
cugcagaugguauuguucuggu

SEQ ID NO: 567211 - RNA, 22 nt, Human
ccuaugaaagacaggagaugcg

SEQ ID NO: 567212 - RNA, 22 nt, Human
uggguaggaccagaaaugcacu

SEQ ID NO: 567213 - RNA, 22 nt, Human
ucuugggcaauuucucuagagg

SEQ ID NO: 567214 - RNA, 22 nt, Human
ucuccacaccagaaggagcuga

SEQ ID NO: 567215 - RNA, 22 nt, Human
auuuacugagguaaauaaacug

SEQ ID NO: 567216 - RNA, 21 nt, Human
uaaagcucguucaggaaaguc

SEQ ID NO: 567217 - RNA, 22 nt, Human
guucuucagcccucagguccua

SEQ ID NO: 567218 - RNA, 22 nt, Human
gagguuggagggcuggccugca

SEQ ID NO: 567219 - RNA, 22 nt, Human
uucacagcuaagagcuaaguaa

SEQ ID NO: 567220 - RNA, 22 nt, Human
uggcacguuggauugggaguuc

SEQ ID NO: 567221 - RNA, 22 nt, Human
uacaggcucuugucagacguau

SEQ ID NO: 567222 - RNA, 22 nt, Human
ugauaguaucugauuauuucac

SEQ ID NO: 567223 - RNA, 22 nt, Human
agcuuugggcagaagaggauuc

SEQ ID NO: 567224 - RNA, 22 nt, Human
ccucugcccuuuuccuguauca

SEQ ID NO: 567225 - RNA, 22 nt, Human
cccaggucgucagcaguguggu

SEQ ID NO: 567226 - RNA, 22 nt, Human
ggcuggaacuucuucuggcauu

SEQ ID NO: 567227 - RNA, 22 nt, Human
uugaggucuggcaguagcguug

SEQ ID NO: 567228 - RNA, 22 nt, Human
cacauuuaaagguugaagcuga

SEQ ID NO: 567229 - RNA, 22 nt, Human
cuggagaggcugggaacagguu

SEQ ID NO: 567230 - RNA, 22 nt, Human
uccugccaccggggguggcgau

SEQ ID NO: 567231 - RNA, 22 nt, Human
cauagacauugauagguuauau

SEQ ID NO: 567232 - RNA, 22 nt, Human
auuuuguaucuuacggggacua

SEQ ID NO: 567233 - RNA, 22 nt, Human
acagaauugggguucuugggga

SEQ ID NO: 567234 - RNA, 22 nt, Human
ucuggauggucagcucuuccug

SEQ ID NO: 567235 - RNA, 22 nt, Human
ugacucacuuaauuuacaaguc

SEQ ID NO: 567236 - RNA, 22 nt, Human
ccagucagccaagcugcagcgg

SEQ ID NO: 567237 - RNA, 22 nt, Human
guuuccagccuccuggguaaag

SEQ ID NO: 567238 - RNA, 22 nt, Human
gaauacaaauaauaccaaggug

SEQ ID NO: 567239 - RNA, 22 nt, Human
cagcuccaucuugcuuauacca

SEQ ID NO: 567240 - RNA, 22 nt, Human
cucaggaaaauauugaagaagu

SEQ ID NO: 567241 - RNA, 22 nt, Human
gaaacuguauguaguuuuuggg

SEQ ID NO: 567242 - RNA, 22 nt, Human
ggaagaggcugaggccaugcug

SEQ ID NO: 567243 - RNA, 22 nt, Human
gucacucaggcuggaguucagu

SEQ ID NO: 567244 - RNA, 22 nt, Human
ucugaauucuuagaauuaaagg

SEQ ID NO: 567245 - RNA, 22 nt, Human
auuccaaagccugaauaaugga

SEQ ID NO: 567246 - RNA, 22 nt, Human
acaugcauaaacuacuucuuau

SEQ ID NO: 567247 - RNA, 22 nt, Human
auuuacagccuugccaucuaua

SEQ ID NO: 567248 - RNA, 22 nt, Human
gguguuguacauucuguggauu

SEQ ID NO: 567249 - RNA, 22 nt, Human
gguuccaggcauggcaggaugu

SEQ ID NO: 567250 - RNA, 20 nt, Human
cugcuccacccggcucucag

SEQ ID NO: 567251 - RNA, 22 nt, Human
caggaggaaaguuccacucaac

SEQ ID NO: 567252 - RNA, 22 nt, Human
gucugcccugcagacaugccuc

SEQ ID NO: 567253 - RNA, 22 nt, Human
auuaaugaaacuuugguuaagc

SEQ ID NO: 567254 - RNA, 22 nt, Human
gaggagaggcuggacgcgguga

SEQ ID NO: 567255 - RNA, 22 nt, Human
cccugcacagccuggcucucuu

SEQ ID NO: 567256 - RNA, 20 nt, Human
aauagcacagcucaaacauu

SEQ ID NO: 567257 - RNA, 22 nt, Human
auggaguucugccagcgcugcu

SEQ ID NO: 567258 - RNA, 22 nt, Human
uuuauucucuaguuggucagau

SEQ ID NO: 567259 - RNA, 22 nt, Human
acuucacagauauuuauuuggu

SEQ ID NO: 567260 - RNA, 22 nt, Human
uccugaaaauaauuucacaaga

SEQ ID NO: 567261 - RNA, 22 nt, Human
uuccugguaacaaucucaaagu

SEQ ID NO: 567262 - RNA, 22 nt, Human
aggcaguggcuuuuguuguguu

SEQ ID NO: 567263 - RNA, 22 nt, Human
ggcacagcugaugcagacacac

SEQ ID NO: 567264 - RNA, 22 nt, Human
ucaccucucuggccgucuaccu

SEQ ID NO: 567265 - RNA, 21 nt, Human
aauuucagacccauuuugccu

SEQ ID NO: 567266 - RNA, 22 nt, Human
cgggcuccgggucuuugcaguc

SEQ ID NO: 567267 - RNA, 22 nt, Human
uaccuugugagcuuucuaacau

SEQ ID NO: 567268 - RNA, 22 nt, Human
uccugugccuccaccugcuccg

SEQ ID NO: 567269 - RNA, 22 nt, Human
augcaggaagagcccuggagcu

SEQ ID NO: 567270 - RNA, 22 nt, Human
guuauguaaucuaacacucagu

SEQ ID NO: 567271 - RNA, 22 nt, Human
cggagcagagccacucgggccg

SEQ ID NO: 567272 - RNA, 20 nt, Human
ucugccacuuuuucugucac

SEQ ID NO: 567273 - RNA, 17 nt, Human
ucugagaaugcuggagg

SEQ ID NO: 567274 - RNA, 22 nt, Human
cucucuuuuucgugugccgaag

SEQ ID NO: 567275 - RNA, 22 nt, Human
uuauggcauucauuggggcuuu

SEQ ID NO: 567276 - RNA, 22 nt, Human
uucacauaaucugcagcaagcg

SEQ ID NO: 567277 - RNA, 22 nt, Human
gcggggggcaggcaguacguug

SEQ ID NO: 567278 - RNA, 22 nt, Human
gggcuccagaggcucacccugg

SEQ ID NO: 567279 - RNA, 22 nt, Human
auauaugaagaagucuugauua

SEQ ID NO: 567280 - RNA, 22 nt, Human
caguuuuaugaaugcuuauuag

SEQ ID NO: 567281 - RNA, 22 nt, Human
uuccccuugcacuaucacccug

SEQ ID NO: 567282 - RNA, 22 nt, Human
auguacaaucuaucacaagaag

SEQ ID NO: 567283 - RNA, 22 nt, Human
guuucuccucugugucuuguuu

SEQ ID NO: 567284 - RNA, 22 nt, Human
agcugccgaugcccagcugcau

SEQ ID NO: 567285 - RNA, 22 nt, Human
uucacguuguugaagaaaauac

SEQ ID NO: 567286 - RNA, 23 nt, Human
aaacuacauuuauaguuuuucuc

SEQ ID NO: 567287 - RNA, 22 nt, Human
gagggaaacagauggguugugg

SEQ ID NO: 567288 - RNA, 22 nt, Human
agcuggguguagggcuggacaa

SEQ ID NO: 567289 - RNA, 22 nt, Human
ccucuucuaggacguccuugug

SEQ ID NO: 567290 - RNA, 22 nt, Human
uucacagaauugucuugacugg

SEQ ID NO: 567291 - RNA, 22 nt, Human
ucccagccugacagugcaucaa

SEQ ID NO: 567292 - RNA, 22 nt, Human
gcccucugccacaggacgccag

SEQ ID NO: 567293 - RNA, 22 nt, Human
aaggcuauaucucaauacuauu

SEQ ID NO: 567294 - RNA, 22 nt, Human
agcaggugucacuuucacucca

SEQ ID NO: 567295 - RNA, 22 nt, Human
ggcagaggaagcuggaaguggg

SEQ ID NO: 567296 - RNA, 22 nt, Human
agauaaaguccaaacuguguag

SEQ ID NO: 567297 - RNA, 22 nt, Human
acaugacagugacuuuauaaga

SEQ ID NO: 567298 - RNA, 22 nt, Human
agucagcuugucucuaggguug

SEQ ID NO: 567299 - RNA, 22 nt, Human
cagcagcucaggcuccuuccca

SEQ ID NO: 567300 - RNA, 22 nt, Human
uucagauaagucaaguuaguau

SEQ ID NO: 567301 - RNA, 22 nt, Human
acggccgaugacuccagcaugg

SEQ ID NO: 567302 - RNA, 22 nt, Human
uaucuagagccuggaagucuug

SEQ ID NO: 567303 - RNA, 22 nt, Human
ucaauucugccucuaaauauuu

SEQ ID NO: 567304 - RNA, 22 nt, Human
aggaauuugggguuacaugaug

SEQ ID NO: 567305 - RNA, 22 nt, Human
aacagaaaucauuuagggcucu

SEQ ID NO: 567306 - RNA, 22 nt, Human
cucagcuucuaccuccugagug

SEQ ID NO: 567307 - RNA, 22 nt, Human
ccugucucugcagggcccugcc

SEQ ID NO: 567308 - RNA, 22 nt, Human
uccgguccggguacuccucucu

SEQ ID NO: 567309 - RNA, 22 nt, Human
uuuacuuuugguaaggucauuu

SEQ ID NO: 567310 - RNA, 22 nt, Human
gcccagcgagcagagguggacg

SEQ ID NO: 567311 - RNA, 22 nt, Human
gucaggggccaugggccaagga

SEQ ID NO: 567312 - RNA, 22 nt, Human
ucuuauaccccuaaacugcagc

SEQ ID NO: 567313 - RNA, 22 nt, Human
agauugucauugacgaugagca

SEQ ID NO: 567314 - RNA, 18 nt, Human
ccucuggguuuuguuccc

SEQ ID NO: 567315 - RNA, 22 nt, Human
cacaguuuugucuugguuucca

SEQ ID NO: 567316 - RNA, 22 nt, Human
gugauuucagguuuuucauacu

SEQ ID NO: 567317 - RNA, 22 nt, Human
uucuaguuacagaagccuugcu

SEQ ID NO: 567318 - RNA, 22 nt, Human
ucugagagcuguagaagccuau

SEQ ID NO: 567319 - RNA, 20 nt, Human
ccacaguggagacuggagac

SEQ ID NO: 567320 - RNA, 22 nt, Human
auucuugauauagauaguuaau

SEQ ID NO: 567321 - RNA, 22 nt, Human
ggaaacauuccaagaguugaaa

SEQ ID NO: 567322 - RNA, 22 nt, Human
uagaucuuucacuacuguguag

SEQ ID NO: 567323 - RNA, 22 nt, Human
uuuccuguccugguacuuggca

SEQ ID NO: 567324 - RNA, 22 nt, Human
gaaggaagcugucuggaugugu

SEQ ID NO: 567325 - RNA, 22 nt, Human
aacagguagggacucuaacuug

SEQ ID NO: 567326 - RNA, 22 nt, Human
cauuguccucugaugccuuccc

SEQ ID NO: 567327 - RNA, 22 nt, Human
cggcagcgguuggagguuguag

SEQ ID NO: 567328 - RNA, 22 nt, Human
ggcuagggaucuagaccaggac

SEQ ID NO: 567329 - RNA, 20 nt, Human
gcucagggccugggucugga

SEQ ID NO: 567330 - RNA, 22 nt, Human
uggaaauacaagaaguauguca

SEQ ID NO: 567331 - RNA, 22 nt, Human
uaacuucucugagccucauucc

SEQ ID NO: 567332 - RNA, 22 nt, Human
aacuuucuuugcaucuaaguuu

SEQ ID NO: 567333 - RNA, 22 nt, Human
uuuaaaccuaucuaagaaauag

SEQ ID NO: 567334 - RNA, 22 nt, Human
gcacagucaacacuuauucacc

SEQ ID NO: 567335 - RNA, 22 nt, Human
acaccuuuuauucgccaggcac

SEQ ID NO: 567336 - RNA, 22 nt, Human
gucgaucaccucguccuccgug

SEQ ID NO: 567337 - RNA, 22 nt, Human
cuugggcaggggaaacagcugc

SEQ ID NO: 567338 - RNA, 22 nt, Human
aucauuaacccuugaugcuggg

SEQ ID NO: 567339 - RNA, 21 nt, Human
aaacugaccuugccugagaca

SEQ ID NO: 567340 - RNA, 22 nt, Human
aguaaaaucaccaucucuuugu

SEQ ID NO: 567341 - RNA, 22 nt, Human
ugaaguuguuaagguugccauu

SEQ ID NO: 567342 - RNA, 22 nt, Human
uagcuucccugcuggaucauaa

SEQ ID NO: 567343 - RNA, 22 nt, Human
gauauucauaggcagguauuua

SEQ ID NO: 567344 - RNA, 22 nt, Human
uaacacauagauauuuuaacuu

SEQ ID NO: 567345 - RNA, 22 nt, Human
uugccaggagacaucuggagcc

SEQ ID NO: 567346 - RNA, 16 nt, Human
aggagcuggguaggag

SEQ ID NO: 567347 - RNA, 22 nt, Human
uccuucccaggugucgccgccu

SEQ ID NO: 567348 - RNA, 22 nt, Human
ugcacauggccugagugccuga

SEQ ID NO: 567349 - RNA, 22 nt, Human
uguguuuuggaaggaacaugca

SEQ ID NO: 567350 - RNA, 22 nt, Human
gcauuuaaauuugaacuucaga

SEQ ID NO: 567351 - RNA, 22 nt, Human
uuuccacacucacugcacucau

SEQ ID NO: 567352 - RNA, 22 nt, Human
gauccacagcugcgguaggaga

SEQ ID NO: 567353 - RNA, 22 nt, Human
cgcagcuucagggccaggaggg

SEQ ID NO: 567354 - RNA, 22 nt, Human
accaguuaaagaauaugaggcc

SEQ ID NO: 567355 - RNA, 22 nt, Human
uaucuuugguagcuuuccuaag

SEQ ID NO: 567356 - RNA, 21 nt, Human
uuggccgugcagaugaacagc

SEQ ID NO: 567357 - RNA, 22 nt, Human
uuuugguaauuaaguagauauu

SEQ ID NO: 567358 - RNA, 22 nt, Human
gcggcgccugggacccgccagc

SEQ ID NO: 567359 - RNA, 22 nt, Human
uugcaguugcuguauuuaagga

SEQ ID NO: 567360 - RNA, 19 nt, Human
aaauccaagcucaggccuc

SEQ ID NO: 567361 - RNA, 22 nt, Human
aaugaaacuauauuuagagagg

SEQ ID NO: 567362 - RNA, 22 nt, Human
aagucuucagacuggagagauu

SEQ ID NO: 567363 - RNA, 22 nt, Human
gauuccugcuauucacagggcu

SEQ ID NO: 567364 - RNA, 22 nt, Human
auguauacgugcaggucacagg

SEQ ID NO: 567365 - RNA, 22 nt, Human
uuuuuugucuugaagaaauggu

SEQ ID NO: 567366 - RNA, 22 nt, Human
gugcuuccuguauugauuccau

SEQ ID NO: 567367 - RNA, 22 nt, Human
uugccaggggacaucuggagcc

SEQ ID NO: 567368 - RNA, 22 nt, Human
auucccuuugacgaucccuagg

SEQ ID NO: 567369 - RNA, 22 nt, Human
gagccaagauugugucccugca

SEQ ID NO: 567370 - RNA, 22 nt, Human
auuguuacuggguuaauuugga

SEQ ID NO: 567371 - RNA, 22 nt, Human
gcucugugcaguucagggacac

SEQ ID NO: 567372 - RNA, 22 nt, Human
ggcuuuggggguguccaagaaa

SEQ ID NO: 567373 - RNA, 22 nt, Human
ccuguggccgcgucgggcggcg

SEQ ID NO: 567374 - RNA, 22 nt, Human
ccugugcaugccaggguacacc

SEQ ID NO: 567375 - RNA, 22 nt, Human
acagugauuggcacugauucag

SEQ ID NO: 567376 - RNA, 22 nt, Human
auucagaaauagaaaauuugau

SEQ ID NO: 567377 - RNA, 22 nt, Human
cuccguggcuguggacgcagcc

SEQ ID NO: 567378 - RNA, 22 nt, Human
agagugaaguaauuguuaggau

SEQ ID NO: 567379 - RNA, 22 nt, Human
cagagccaaaccucagggcccg

SEQ ID NO: 567380 - RNA, 22 nt, Human
aaggcacauauuuuagagucac

SEQ ID NO: 567381 - RNA, 22 nt, Human
gucuguggaguugcuugcugga

SEQ ID NO: 567382 - RNA, 22 nt, Human
gagcuuuucccgucuuucucgu

SEQ ID NO: 567383 - RNA, 23 nt, Human
gggaaaucaaaagauauuucuuc

SEQ ID NO: 567384 - RNA, 22 nt, Human
ugcucuguucaguguaucuugu

SEQ ID NO: 567385 - RNA, 22 nt, Human
gagccugagcaaugugauguuu

SEQ ID NO: 567386 - RNA, 22 nt, Human
cacagcuaccugcaugccugcu

SEQ ID NO: 567387 - RNA, 22 nt, Human
ggacagacuuuacagccccggg

SEQ ID NO: 567388 - RNA, 22 nt, Human
guuuuguucaugaacauugggu

SEQ ID NO: 567389 - RNA, 19 nt, Human
gggucccacugcccgucug

SEQ ID NO: 567390 - RNA, 22 nt, Human
ugggcagggagcuggaaccaca

SEQ ID NO: 567391 - RNA, 17 nt, Human
agcuuggagcagcauga

SEQ ID NO: 567392 - RNA, 22 nt, Human
uucucuucacagggaucauccu

SEQ ID NO: 567393 - RNA, 22 nt, Human
aggcuuaacuacaauuuuugcc

SEQ ID NO: 567394 - RNA, 22 nt, Human
caggcucgguccaguggcaccc

SEQ ID NO: 567395 - RNA, 22 nt, Human
uccucuucaaaauagcucugaa

SEQ ID NO: 567396 - RNA, 22 nt, Human
gcugcuccgcagagugugugug

SEQ ID NO: 567397 - RNA, 22 nt, Human
gagcugcagcggcugacgcaac

SEQ ID NO: 567398 - RNA, 22 nt, Human
aauuagaagcuguuagcaaaau

SEQ ID NO: 567399 - RNA, 22 nt, Human
uguuugcucugacuaucuugcg

SEQ ID NO: 567400 - RNA, 22 nt, Human
auguuguugaacucuuugcaug

SEQ ID NO: 567401 - RNA, 18 nt, Human
ucugaaggaaugauucca

SEQ ID NO: 567402 - RNA, 22 nt, Human
uugucgggcuuacgcagggcca

SEQ ID NO: 567403 - RNA, 22 nt, Human
cgaggaggaaacgcggagaacu

SEQ ID NO: 567404 - RNA, 22 nt, Human
aguacuuuuuguucaauugugc

SEQ ID NO: 567405 - RNA, 22 nt, Human
acguagcacugagagaugcagg

SEQ ID NO: 567406 - RNA, 22 nt, Human
ggugcggagacuccaugaggcc

SEQ ID NO: 567407 - RNA, 22 nt, Human
acuaauugaaaugagacuggug

SEQ ID NO: 567408 - RNA, 22 nt, Human
caguuuuucaaaauuacaugau

SEQ ID NO: 567409 - RNA, 22 nt, Human
uuuggcaagcgaguacuuucug

SEQ ID NO: 567410 - RNA, 22 nt, Human
caguuuuacccaagcuuauuuu

SEQ ID NO: 567411 - RNA, 22 nt, Human
gugggugucaguaucuuuaacg

SEQ ID NO: 567412 - RNA, 22 nt, Human
gggacuggaguagaggccggug

SEQ ID NO: 567413 - RNA, 22 nt, Human
caaacuuacuguguuuaaagag

SEQ ID NO: 567414 - RNA, 22 nt, Human
ucaccggcagacguggccugau

SEQ ID NO: 567415 - RNA, 22 nt, Human
cugccuuggcccuaguucaugg

SEQ ID NO: 567416 - RNA, 22 nt, Human
caggccacagcuaaagaggauu

SEQ ID NO: 567417 - RNA, 22 nt, Human
aucucuguaaaccauaaauuga

SEQ ID NO: 567418 - RNA, 22 nt, Human
agcuggguacacguugucacaa

SEQ ID NO: 567419 - RNA, 22 nt, Human
cugucaccucugcccuuugccc

SEQ ID NO: 567420 - RNA, 22 nt, Human
gaguuucuucauggugcagagg

SEQ ID NO: 567421 - RNA, 22 nt, Human
acagagacacggaagcuaaaga

SEQ ID NO: 567422 - RNA, 22 nt, Human
uaaaccuuauuugaauaccaac

SEQ ID NO: 567423 - RNA, 22 nt, Human
uugacuauacucuggcggaaaa

SEQ ID NO: 567424 - RNA, 22 nt, Human
ccaggacaagccagagggacag

SEQ ID NO: 567425 - RNA, 22 nt, Human
uggauguuugaaguugcaugug

SEQ ID NO: 567426 - RNA, 22 nt, Human
uuuuccuuaacagagggagaaa

SEQ ID NO: 567427 - RNA, 22 nt, Human
aacagauuguaaccugauagcc

SEQ ID NO: 567428 - RNA, 20 nt, Human
aaaaacaguaaugcugaaga

SEQ ID NO: 567429 - RNA, 22 nt, Human
cugagggagcugcuggccuugg

SEQ ID NO: 567430 - RNA, 22 nt, Human
cugcauaucaaauuacuccugg

SEQ ID NO: 567431 - RNA, 22 nt, Human
uuggaaaugcauuuguuauuau

SEQ ID NO: 567432 - RNA, 22 nt, Human
acugauuucagggaugagaaga

SEQ ID NO: 567433 - RNA, 22 nt, Human
cuuccucuguggccagagugua

SEQ ID NO: 567434 - RNA, 22 nt, Human
uacaucucaucugugcucuccg

SEQ ID NO: 567435 - RNA, 22 nt, Human
gaauguuaaugcacuucuagcu

SEQ ID NO: 567436 - RNA, 22 nt, Human
gaaacacucaauuuaguaauuc

SEQ ID NO: 567437 - RNA, 22 nt, Human
cuauuuucccauaugguugaca

SEQ ID NO: 567438 - RNA, 22 nt, Human
uuuucuaacaucuaguaauuug

SEQ ID NO: 567439 - RNA, 22 nt, Human
agaaaagaggcuuucuaagcau

SEQ ID NO: 567440 - RNA, 22 nt, Human
agaacagaggccuuauguuuca

SEQ ID NO: 567441 - RNA, 19 nt, Human
uuacaugacauaugaagga

SEQ ID NO: 567442 - RNA, 22 nt, Human
ucugaggcugaauggacuccgu

SEQ ID NO: 567443 - RNA, 17 nt, Human
auucaugaacauguccu

SEQ ID NO: 567444 - RNA, 22 nt, Human
uguguccuucugggagucccag

SEQ ID NO: 567445 - RNA, 22 nt, Human
gauguauagcuuuaacugaccc

SEQ ID NO: 567446 - RNA, 22 nt, Human
gagcaaggaugggucuauagua

SEQ ID NO: 567447 - RNA, 22 nt, Human
ucauuacuuauuaaaagccuug

SEQ ID NO: 567448 - RNA, 22 nt, Human
gccugugcuuaacugacgugag

SEQ ID NO: 567449 - RNA, 22 nt, Human
uaaaguauaagcauuggaguau

SEQ ID NO: 567450 - RNA, 23 nt, Human
uuguucuuggaucuuccugaagc

SEQ ID NO: 567451 - RNA, 19 nt, Human
uccugcccaccagccaggg

SEQ ID NO: 567452 - RNA, 22 nt, Human
uggaaaauauuuaggugaauga

SEQ ID NO: 567453 - RNA, 22 nt, Human
uggcaggaaaaagggccagagg

SEQ ID NO: 567454 - RNA, 20 nt, Human
ucugugugccaucaccuaac

SEQ ID NO: 567455 - RNA, 22 nt, Human
uucaguuuugcuuuuaaucaug

SEQ ID NO: 567456 - RNA, 22 nt, Human
ucuguuauaaaucacacugcau

SEQ ID NO: 567457 - RNA, 22 nt, Human
agcaguuuauccucauaaugga

SEQ ID NO: 567458 - RNA, 22 nt, Human
uaacaaaguauuguuuguguau

SEQ ID NO: 567459 - RNA, 22 nt, Human
aaucgguugaacccaggaagug

SEQ ID NO: 567460 - RNA, 22 nt, Human
uaagaaacauuuuuaugacagu

SEQ ID NO: 567461 - RNA, 22 nt, Human
ugcacgugugagcauucacaug

SEQ ID NO: 567462 - RNA, 23 nt, Human
auaauaacgucugucuugucucu

SEQ ID NO: 567463 - RNA, 22 nt, Human
uucugauugcugaugaggccca

SEQ ID NO: 567464 - RNA, 22 nt, Human
auguaugagagauucuuuuauu

SEQ ID NO: 567465 - RNA, 22 nt, Human
uuugcagagugcagaagcaucu

SEQ ID NO: 567466 - RNA, 22 nt, Human
agaauaagccugacgaaaccua

SEQ ID NO: 567467 - RNA, 22 nt, Human
uuugugcaagagggccaccuua

SEQ ID NO: 567468 - RNA, 22 nt, Human
guaugucuuaggguucaguaac

SEQ ID NO: 567469 - RNA, 22 nt, Human
uucagucuuguugaaaacuugg

SEQ ID NO: 567470 - RNA, 22 nt, Human
ucuaauuuuggcauuuuaaccu

SEQ ID NO: 567471 - RNA, 22 nt, Human
cggcagagcccugagucagccu

SEQ ID NO: 567472 - RNA, 20 nt, Human
ucucuggcaagaagcugcag

SEQ ID NO: 567473 - RNA, 22 nt, Human
ucuaaagcuccuuccacuaaaa

SEQ ID NO: 567474 - RNA, 22 nt, Human
aucauccauggcugaucauaaa

SEQ ID NO: 567475 - RNA, 22 nt, Human
ugagcaccaggcaccacagcuc

SEQ ID NO: 567476 - RNA, 19 nt, Human
uuugauagggcauaauaua

SEQ ID NO: 567477 - RNA, 22 nt, Human
gcgacgcaggcacgacguguug

SEQ ID NO: 567478 - RNA, 18 nt, Human
aaacauggcuuaaaggcu

SEQ ID NO: 567479 - RNA, 22 nt, Human
uugucaggaacuaugauuaugc

SEQ ID NO: 567480 - RNA, 22 nt, Human
cuccaaaggauaaaagcagagu

SEQ ID NO: 567481 - RNA, 22 nt, Human
agaaaucugacugcugugcaca

SEQ ID NO: 567482 - RNA, 22 nt, Human
cuguauaugugcauacacacac

SEQ ID NO: 567483 - RNA, 22 nt, Human
uuauuuaaaagugguaagauuc

SEQ ID NO: 567484 - RNA, 22 nt, Human
agggugugcuguugggucuuuc

SEQ ID NO: 567485 - RNA, 22 nt, Human
aauugcuuuacaagccguuuaa

SEQ ID NO: 567486 - RNA, 22 nt, Human
cuccaggacaugacuuucuugc

SEQ ID NO: 567487 - RNA, 22 nt, Human
aaagccauaucuauucuauucu

SEQ ID NO: 567488 - RNA, 22 nt, Human
gugcauauguguguauacaaac

SEQ ID NO: 567489 - RNA, 22 nt, Human
acagccaggaauucuggagaag

SEQ ID NO: 567490 - RNA, 19 nt, Human
cuucuggauccgcagggcc

SEQ ID NO: 567491 - RNA, 20 nt, Human
uguauuuaaugaaggcuuuu

SEQ ID NO: 567492 - RNA, 22 nt, Human
ggcagaggagcuggaaacaugg

SEQ ID NO: 567493 - RNA, 22 nt, Human
gacauuuauuggauuuuacgag

SEQ ID NO: 567494 - RNA, 22 nt, Human
aggacagcagugcuggcacuug

SEQ ID NO: 567495 - RNA, 22 nt, Human
aacagaaugcaggggaugcugc

SEQ ID NO: 567496 - RNA, 22 nt, Human
uuuaauuauaucugggcaguua

SEQ ID NO: 567497 - RNA, 21 nt, Human
gccaucaccaagcucuucccc

SEQ ID NO: 567498 - RNA, 22 nt, Human
ucuugccgcgcaggcgcaguuc

SEQ ID NO: 567499 - RNA, 22 nt, Human
uaaaguuggaccugauuuuauu

SEQ ID NO: 567500 - RNA, 22 nt, Human
cucgccccggcacaguguccgu

SEQ ID NO: 567501 - RNA, 22 nt, Human
acauuucuccuacuuguuauuu

SEQ ID NO: 567502 - RNA, 22 nt, Human
acagauccugguuacagccauu

SEQ ID NO: 567503 - RNA, 22 nt, Human
gaacugcauugugguauauguu

SEQ ID NO: 567504 - RNA, 21 nt, Human
ugcuggguuugcccaucaggc

SEQ ID NO: 567505 - RNA, 22 nt, Human
acugcacuccagcccgagcaac

SEQ ID NO: 567506 - RNA, 22 nt, Human
cgggaagguggagguugcagug

SEQ ID NO: 567507 - RNA, 22 nt, Human
gucaaaacaaaguuaagaauuc

SEQ ID NO: 567508 - RNA, 22 nt, Human
ggaaugugcugacacgcgagag

SEQ ID NO: 567509 - RNA, 22 nt, Human
cgauuuccgcuugaucugaucu

SEQ ID NO: 567510 - RNA, 22 nt, Human
ugcuuucaaugaauuguauacu

SEQ ID NO: 567511 - RNA, 22 nt, Human
acagagacaauauuuguaaagu

SEQ ID NO: 567512 - RNA, 22 nt, Human
uccagagaacgaugaaagcugg

SEQ ID NO: 567513 - RNA, 23 nt, Human
ucugaccucguuugcuguguucu

SEQ ID NO: 567514 - RNA, 22 nt, Human
uucagguuuuuaaguucugccu

SEQ ID NO: 567515 - RNA, 22 nt, Human
cugggaguugacgaggcuugua

SEQ ID NO: 567516 - RNA, 18 nt, Human
augggcagguaagaucca

SEQ ID NO: 567517 - RNA, 22 nt, Human
ccucuuccacugggccccaucc

SEQ ID NO: 567518 - RNA, 22 nt, Human
augggaggcagacacuaaguuc

SEQ ID NO: 567519 - RNA, 22 nt, Human
aaagcuauuuuauugcagcucu

SEQ ID NO: 567520 - RNA, 22 nt, Human
ucuauuaaugauucaauagugu

SEQ ID NO: 567521 - RNA, 22 nt, Human
agaauaaccaguguuucacagu

SEQ ID NO: 567522 - RNA, 22 nt, Human
auggcuucugucuuggaaauuu

SEQ ID NO: 567523 - RNA, 22 nt, Human
gauggugcaggugaagugcugg

SEQ ID NO: 567524 - RNA, 22 nt, Human
gcagacaucaagcacaggccca

SEQ ID NO: 567525 - RNA, 22 nt, Human
uucaaaccuaucuaagaaauag

SEQ ID NO: 567526 - RNA, 22 nt, Human
aucagugacuucuuccaaaguu

SEQ ID NO: 567527 - RNA, 19 nt, Human
cagcaaacacuguaaaugg

SEQ ID NO: 567528 - RNA, 22 nt, Human
cagguagaggcugccaucagcu

SEQ ID NO: 567529 - RNA, 22 nt, Human
uguaaagaaagacgcagaguua

SEQ ID NO: 567530 - RNA, 19 nt, Human
cauaauacaguggaucuga

SEQ ID NO: 567531 - RNA, 22 nt, Human
cccaggaacagcacagaacagc

SEQ ID NO: 567532 - RNA, 22 nt, Human
ccggcgucucuuccacuuccua

SEQ ID NO: 567533 - RNA, 22 nt, Human
auuguauacaagcuuaauuguu

SEQ ID NO: 567534 - RNA, 22 nt, Human
aaacccaggguuuugucuuccc

SEQ ID NO: 567535 - RNA, 22 nt, Human
cucuguccugguuuauacuggc

SEQ ID NO: 567536 - RNA, 22 nt, Human
gagcagcagcugggccagguuc

SEQ ID NO: 567537 - RNA, 22 nt, Human
cuugucuaguuccuggugaugu

SEQ ID NO: 567538 - RNA, 22 nt, Human
cuuucuuucgaagacgugauua

SEQ ID NO: 567539 - RNA, 22 nt, Human
ucaggccaggagaucagauuga

SEQ ID NO: 567540 - RNA, 22 nt, Human
ucacacaucucagguguuuaau

SEQ ID NO: 567541 - RNA, 22 nt, Human
cagaggccuggcuuggacaccu

SEQ ID NO: 567542 - RNA, 22 nt, Human
agcaaauaauugucuuugaggg

SEQ ID NO: 567543 - RNA, 22 nt, Human
uuuacagcuacuguccuauuuc

SEQ ID NO: 567544 - RNA, 22 nt, Human
caacauuucaaggucuuuagga

SEQ ID NO: 567545 - RNA, 22 nt, Human
aagcaccuggguuauaucuuag

SEQ ID NO: 567546 - RNA, 22 nt, Human
uggcuuccagaacugagcaaca

SEQ ID NO: 567547 - RNA, 22 nt, Human
aagcaaaagguuacacuucugg

SEQ ID NO: 567548 - RNA, 23 nt, Human
gacagguaaggguugggagaauc

SEQ ID NO: 567549 - RNA, 22 nt, Human
uuuugucagugagaacagaguu

SEQ ID NO: 567550 - RNA, 22 nt, Human
acaacuuuaauggguuucagcu

SEQ ID NO: 567551 - RNA, 22 nt, Human
uguucuuagguauuugacaguc

SEQ ID NO: 567552 - RNA, 20 nt, Human
ugagccugcuguaggaggcc

SEQ ID NO: 567553 - RNA, 22 nt, Human
aggacagagggaccagagccca

SEQ ID NO: 567554 - RNA, 22 nt, Human
uuccuguucaggaaaguugugu

SEQ ID NO: 567555 - RNA, 22 nt, Human
uuugaaauguaucaguauaggu

SEQ ID NO: 567556 - RNA, 22 nt, Human
ccgcguggcacccuccuggagg

SEQ ID NO: 567557 - RNA, 22 nt, Human
uacauguuauuucacuauuggu

SEQ ID NO: 567558 - RNA, 22 nt, Human
gagguccacugaggcaacaggg

SEQ ID NO: 567559 - RNA, 22 nt, Human
aucaacuuguccuugauguuaa

SEQ ID NO: 567560 - RNA, 18 nt, Human
gaacagcaauuucauguu

SEQ ID NO: 567561 - RNA, 22 nt, Human
acaugcacccaguuacacucuc

SEQ ID NO: 567562 - RNA, 22 nt, Human
acaaacugggauaggauccugu

SEQ ID NO: 567563 - RNA, 22 nt, Human
agguggcagacuaacagaagga

SEQ ID NO: 567564 - RNA, 22 nt, Human
agaugacuaacauaguauugcu

SEQ ID NO: 567565 - RNA, 22 nt, Human
uucacagcucauacuguucuca

SEQ ID NO: 567566 - RNA, 18 nt, Human
cugccuguugcugagagg

SEQ ID NO: 567567 - RNA, 22 nt, Human
uguggguccuccugugugcccg

SEQ ID NO: 567568 - RNA, 22 nt, Human
ucaucuccauacggucucgcag

SEQ ID NO: 567569 - RNA, 22 nt, Human
uggggugugcucagagcagggg

SEQ ID NO: 567570 - RNA, 21 nt, Human
acuguauuguuuucaaggauc

SEQ ID NO: 567571 - RNA, 22 nt, Human
gaucuguccuggcaguuaacac

SEQ ID NO: 567572 - RNA, 21 nt, Human
uuccuccucuggagaagaaga

SEQ ID NO: 567573 - RNA, 22 nt, Human
ugggugccaaccucugguggcc

SEQ ID NO: 567574 - RNA, 22 nt, Human
uuggaauuugagaccaagaaaa

SEQ ID NO: 567575 - RNA, 22 nt, Human
ugauuccugugcuuauuccagu

SEQ ID NO: 567576 - RNA, 22 nt, Human
ggccucugccccgcggggcucg

SEQ ID NO: 567577 - RNA, 22 nt, Human
uuuaaacuaacaguacacguug

SEQ ID NO: 567578 - RNA, 22 nt, Human
cuuauuggucccaggaggagaa

SEQ ID NO: 567579 - RNA, 22 nt, Human
cauuuacauuuaagguuaauau

SEQ ID NO: 567580 - RNA, 21 nt, Human
acaaauuguuuauauaggaag

SEQ ID NO: 567581 - RNA, 22 nt, Human
caagcagauauuuuagucaaga

SEQ ID NO: 567582 - RNA, 22 nt, Human
ucccacugcuuugcucugcuca

SEQ ID NO: 567583 - RNA, 22 nt, Human
ucccuguccugggcaaucccag

SEQ ID NO: 567584 - RNA, 22 nt, Human
ucggugcgcgaggcgcgguccc

SEQ ID NO: 567585 - RNA, 22 nt, Human
ccugcagacacuuguccagcaa

SEQ ID NO: 567586 - RNA, 22 nt, Human
uuguauuaaaauguguuucugu

SEQ ID NO: 567587 - RNA, 22 nt, Human
gcaguaaauugagagucauguu

SEQ ID NO: 567588 - RNA, 22 nt, Human
ucugccaucaagaugcucuggc

SEQ ID NO: 567589 - RNA, 18 nt, Human
cagaaaguuauuuacucu

SEQ ID NO: 567590 - RNA, 22 nt, Human
gcuuacagauaaugaggagacu

SEQ ID NO: 567591 - RNA, 22 nt, Human
gacagguaaagaugguggcagg

SEQ ID NO: 567592 - RNA, 22 nt, Human
ucuuuuaucuguuguguaacaa

SEQ ID NO: 567593 - RNA, 22 nt, Human
acuucccacugcagugacugag

SEQ ID NO: 567594 - RNA, 22 nt, Human
uugguuaccuucagaaaugagu

SEQ ID NO: 567595 - RNA, 22 nt, Human
auacaggaugcugaacaucucu

SEQ ID NO: 567596 - RNA, 22 nt, Human
uucaccugugacagguagaguu

SEQ ID NO: 567597 - RNA, 22 nt, Human
uucaaacacugcuuugagaggg

SEQ ID NO: 567598 - RNA, 22 nt, Human
auugaagcauggagaugaggca

SEQ ID NO: 567599 - RNA, 18 nt, Human
agcucacagaucuguuuu

SEQ ID NO: 567600 - RNA, 22 nt, Human
guuaaaugcagauucugacuca

SEQ ID NO: 567601 - RNA, 22 nt, Human
gugcaggacagcacaucuccug

SEQ ID NO: 567602 - RNA, 22 nt, Human
uuagaaaaaggcuguggucuua

SEQ ID NO: 567603 - RNA, 22 nt, Human
aauaguguauuuuucaaaauua

SEQ ID NO: 567604 - RNA, 22 nt, Human
cagcagcaacaacggaagccuu

SEQ ID NO: 567605 - RNA, 22 nt, Human
ucauacauguuguguucaaaug

SEQ ID NO: 567606 - RNA, 20 nt, Human
ucacuguaauugccuacauu

SEQ ID NO: 567607 - RNA, 22 nt, Human
cuguggccagagcgccguugac

SEQ ID NO: 567608 - RNA, 22 nt, Human
uuccggaauggcaggguagcuc

SEQ ID NO: 567609 - RNA, 23 nt, Human
auuuccuaaaagauaaucauuac

SEQ ID NO: 567610 - RNA, 22 nt, Human
cagugcagccaaggacaggcac

SEQ ID NO: 567611 - RNA, 22 nt, Human
gagggugguggcuuaaggugcu

SEQ ID NO: 567612 - RNA, 22 nt, Human
auggcuguguuguuccucugaa

SEQ ID NO: 567613 - RNA, 22 nt, Human
gcagagucagguccaaggacug

SEQ ID NO: 567614 - RNA, 22 nt, Human
gcuuuuauuucuucacaaaagu

SEQ ID NO: 567615 - RNA, 22 nt, Human
gcgagaaacuaagugcccuuug

SEQ ID NO: 567616 - RNA, 22 nt, Human
uagauuaucccugauuugucca

SEQ ID NO: 567617 - RNA, 22 nt, Human
guucuucaaagugacaacuaaa

SEQ ID NO: 567618 - RNA, 22 nt, Human
uuucauguuggauacuguuuca

SEQ ID NO: 567619 - RNA, 22 nt, Human
agugugaguuacaaagugugaa

SEQ ID NO: 567620 - RNA, 22 nt, Human
auacaacagaaaaugauuauuc

SEQ ID NO: 567621 - RNA, 22 nt, Human
uucauuacauucaaaaggcauu

SEQ ID NO: 567622 - RNA, 22 nt, Human
aaccccgcucaggcugggugag

SEQ ID NO: 567623 - RNA, 22 nt, Human
uguucauucugugaccugguuc

SEQ ID NO: 567624 - RNA, 22 nt, Human
uacauuuauaaggcuucucugu

SEQ ID NO: 567625 - RNA, 22 nt, Human
uucuuuuaauuucugucugcag

SEQ ID NO: 567626 - RNA, 22 nt, Human
ugcaaauucuuuacucugugau

SEQ ID NO: 567627 - RNA, 22 nt, Human
ucuucagacuguuguucuuuug

SEQ ID NO: 567628 - RNA, 18 nt, Human
gcugaaauucuaaacaaa

SEQ ID NO: 567629 - RNA, 22 nt, Human
gucaggaugagggaugaggagu

SEQ ID NO: 567630 - RNA, 22 nt, Human
uaugcgugccucugucugucug

SEQ ID NO: 567631 - RNA, 22 nt, Human
ccacuguuuccuuucugcuggc

SEQ ID NO: 567632 - RNA, 22 nt, Human
accaggcccuccagcugcgugg

SEQ ID NO: 567633 - RNA, 22 nt, Human
ucauugagcgguucuuaaccca

SEQ ID NO: 567634 - RNA, 22 nt, Human
uucccagauuggagggcagggg

SEQ ID NO: 567635 - RNA, 22 nt, Human
caucuuuguuuuggauauaauc

SEQ ID NO: 567636 - RNA, 22 nt, Human
agcuuucuauauaugaguugcu

SEQ ID NO: 567637 - RNA, 20 nt, Human
ucuggggaugaggucuagga

SEQ ID NO: 567638 - RNA, 22 nt, Human
ugagacaaagcagcugacagaa

SEQ ID NO: 567639 - RNA, 22 nt, Human
uauuuguuucuaguggcagcaa

SEQ ID NO: 567640 - RNA, 22 nt, Human
ugcagcaccuauggacacuugu

SEQ ID NO: 567641 - RNA, 22 nt, Human
cuuuaguucuagaaagugaaac

SEQ ID NO: 567642 - RNA, 22 nt, Human
ucacuguuaauaaauagcaaag

SEQ ID NO: 567643 - RNA, 22 nt, Human
cacgcacgcuggguggaggcgc

SEQ ID NO: 567644 - RNA, 22 nt, Human
uuugcuugauuaggauauggaa

SEQ ID NO: 567645 - RNA, 22 nt, Human
uacagugaguggcagagccaga

SEQ ID NO: 567646 - RNA, 22 nt, Human
uucucaggaacucagugucagc

SEQ ID NO: 567647 - RNA, 22 nt, Human
cugcaccgugucucgggcugcc

SEQ ID NO: 567648 - RNA, 22 nt, Human
ucugcucagccgaucugcuccg

SEQ ID NO: 567649 - RNA, 22 nt, Human
cugaaacuauggggaggggagc

SEQ ID NO: 567650 - RNA, 22 nt, Human
cugccaggauucugugaacccc

SEQ ID NO: 567651 - RNA, 22 nt, Human
ugcgcaugcguggcucuccggc

SEQ ID NO: 567652 - RNA, 22 nt, Human
cuucauuaaugucuauaaguuu

SEQ ID NO: 567653 - RNA, 22 nt, Human
ccucuaaauuguuugaaguugg

SEQ ID NO: 567654 - RNA, 22 nt, Human
uagucaccuguugugugaugcc

SEQ ID NO: 567655 - RNA, 20 nt, Human
gaacagucuucugagccaca

SEQ ID NO: 567656 - RNA, 22 nt, Human
acauuuaaugauccuacuguga

SEQ ID NO: 567657 - RNA, 22 nt, Human
aaauacaguggcagcagauaau

SEQ ID NO: 567658 - RNA, 22 nt, Human
uuugaagauaaauauggagaaa

SEQ ID NO: 567659 - RNA, 22 nt, Human
cugguggaauggcagagggaac

SEQ ID NO: 567660 - RNA, 22 nt, Human
uccguuuucacacugcuauaaa

SEQ ID NO: 567661 - RNA, 22 nt, Human
ccagcuggcccagcugugcucc

SEQ ID NO: 567662 - RNA, 22 nt, Human
guaaaucagugucauuuuagaa

SEQ ID NO: 567663 - RNA, 22 nt, Human
aucuaaagugucauaaguagcu

SEQ ID NO: 567664 - RNA, 22 nt, Human
aaugacaguggcacagucacuu

SEQ ID NO: 567665 - RNA, 22 nt, Human
uugauguaauacuuugcaacca

SEQ ID NO: 567666 - RNA, 22 nt, Human
ggugcaauaaaguuguagaacc

SEQ ID NO: 567667 - RNA, 22 nt, Human
aagcaauucacaguucacuuaa

SEQ ID NO: 567668 - RNA, 22 nt, Human
ucucauaauuguuucccagcua

SEQ ID NO: 567669 - RNA, 22 nt, Human
ccacugugcccagccucauggg

SEQ ID NO: 567670 - RNA, 18 nt, Human
ucuuccaacacugacacc

SEQ ID NO: 567671 - RNA, 19 nt, Human
guuggcacugaaaauggcu

SEQ ID NO: 567672 - RNA, 20 nt, Human
uuacagaaaugauguuauuu

SEQ ID NO: 567673 - RNA, 22 nt, Human
ggcuucaguggccagagaugau

SEQ ID NO: 567674 - RNA, 22 nt, Human
ugucggccacgagggagccgcg

SEQ ID NO: 567675 - RNA, 22 nt, Human
gccagcuggcugcaggucccag

SEQ ID NO: 567676 - RNA, 22 nt, Human
auuguugacuugauuacucaac

SEQ ID NO: 567677 - RNA, 22 nt, Human
aaguuacaggagaaagagauca

SEQ ID NO: 567678 - RNA, 22 nt, Human
uagcauuucacugaucuucacu

SEQ ID NO: 567679 - RNA, 22 nt, Human
ugcauaaacuucucugguguga

SEQ ID NO: 567680 - RNA, 22 nt, Human
ugcaaauauuccaugcuguuca

SEQ ID NO: 567681 - RNA, 22 nt, Human
cauugcaacuucaaacuccugg

SEQ ID NO: 567682 - RNA, 22 nt, Human
aaugaacacuuagccuuucuau

SEQ ID NO: 567683 - RNA, 22 nt, Human
auuacugaggcaaaguaguuuu

SEQ ID NO: 567684 - RNA, 22 nt, Human
auauuuguuuggcagaguucag

SEQ ID NO: 567685 - RNA, 22 nt, Human
ugcuccguucuucugcuucuug

SEQ ID NO: 567686 - RNA, 22 nt, Human
ccucucauagucuguauccuuu

SEQ ID NO: 567687 - RNA, 22 nt, Human
guggcagagagcaagugucuga

SEQ ID NO: 567688 - RNA, 17 nt, Human
ucugccaguuuuagaau

SEQ ID NO: 567689 - RNA, 22 nt, Human
ucaguguagcagacuuguagcc

SEQ ID NO: 567690 - RNA, 18 nt, Human
gacaaaaguacagacaga

SEQ ID NO: 567691 - RNA, 22 nt, Human
aucuguucuucaaaauauuaca

SEQ ID NO: 567692 - RNA, 22 nt, Human
uauagugucucuagaucaaaga

SEQ ID NO: 567693 - RNA, 22 nt, Human
acaaacagaguugaaaaauagg

SEQ ID NO: 567694 - RNA, 22 nt, Human
ucaagaaagggcuucaccagga

SEQ ID NO: 567695 - RNA, 22 nt, Human
guuuauuggguauuguggagcc

SEQ ID NO: 567696 - RNA, 22 nt, Human
augcacacguacccuacaaggc

SEQ ID NO: 567697 - RNA, 22 nt, Human
uaauuuugucacagugacaugc

SEQ ID NO: 567698 - RNA, 22 nt, Human
guuuccuuuuggaauuagagcu

SEQ ID NO: 567699 - RNA, 22 nt, Human
gagucacauacuauguaauaga

SEQ ID NO: 567700 - RNA, 22 nt, Human
uuggcgcccaggacgccgccgc

SEQ ID NO: 567701 - RNA, 21 nt, Human
guuaagccuugaggugauugu

SEQ ID NO: 567702 - RNA, 22 nt, Human
cuugcuuuaucugguuucucau

SEQ ID NO: 567703 - RNA, 22 nt, Human
aaacacaucauucaugucguca

SEQ ID NO: 567704 - RNA, 22 nt, Human
uuuguucaccuagcaaacuuuu

SEQ ID NO: 567705 - RNA, 22 nt, Human
gacagucccccagcagcaaacc

SEQ ID NO: 567706 - RNA, 22 nt, Human
cuguuccuccaccucaacaaac

SEQ ID NO: 567707 - RNA, 22 nt, Human
ucacauguguggcagugcaagu

SEQ ID NO: 567708 - RNA, 22 nt, Human
ucgcuuuaauggucuucacagc

SEQ ID NO: 567709 - RNA, 22 nt, Human
auccucagagaacgaacacaau

SEQ ID NO: 567710 - RNA, 18 nt, Human
ucugugggaucagugagg

SEQ ID NO: 567711 - RNA, 22 nt, Human
ugucuuuagccacuugccucuu

SEQ ID NO: 567712 - RNA, 22 nt, Human
gaagagguucaacguggucauc

SEQ ID NO: 567713 - RNA, 21 nt, Human
ugcuccaggagggggcagucc

SEQ ID NO: 567714 - RNA, 22 nt, Human
ggaaacugcuuacacuagaggg

SEQ ID NO: 567715 - RNA, 22 nt, Human
gcacagcuaugagcugaauugu

SEQ ID NO: 567716 - RNA, 22 nt, Human
aucuucaaagcacaucguuugu

SEQ ID NO: 567717 - RNA, 22 nt, Human
cauggcaggugcagauucugug

SEQ ID NO: 567718 - RNA, 22 nt, Human
uccagguccuacuggcccauag

SEQ ID NO: 567719 - RNA, 22 nt, Human
gccacaggaaagcacccuggag

SEQ ID NO: 567720 - RNA, 22 nt, Human
ucuuugcauggacauguguuuu

SEQ ID NO: 567721 - RNA, 22 nt, Human
uucaacaacuugguucaaaugg

SEQ ID NO: 567722 - RNA, 22 nt, Human
uagaugaacagaaagccacugu

SEQ ID NO: 567723 - RNA, 22 nt, Human
ugcuuuggcccaacauugaugc

SEQ ID NO: 567724 - RNA, 22 nt, Human
uaaugccuuucuguacuauaug

SEQ ID NO: 567725 - RNA, 22 nt, Human
uugcacagaugcacaugguugc

SEQ ID NO: 567726 - RNA, 22 nt, Human
uguuaccauaggucagaacguu

SEQ ID NO: 567727 - RNA, 18 nt, Human
cgauguguaugugauuug

SEQ ID NO: 567728 - RNA, 22 nt, Human
gaguuugugggaauggaguauu

SEQ ID NO: 567729 - RNA, 22 nt, Human
gagaauguuaauguugaaguau

SEQ ID NO: 567730 - RNA, 22 nt, Human
ggaggugacuggaucaugggca

SEQ ID NO: 567731 - RNA, 22 nt, Human
uaagccugcaugaaccaugaga

SEQ ID NO: 567732 - RNA, 22 nt, Human
aaugcugugauuuauuaaguau

SEQ ID NO: 567733 - RNA, 22 nt, Human
ggugcccaaggaagguugccgu

SEQ ID NO: 567734 - RNA, 22 nt, Human
ugcuuguauucauaucacagcu

SEQ ID NO: 567735 - RNA, 22 nt, Human
cuucauuucaggcugaagaaua

SEQ ID NO: 567736 - RNA, 22 nt, Human
ugugaacuggcagguggacggg

SEQ ID NO: 567737 - RNA, 21 nt, Human
gcucuguguuacaaguugggg

SEQ ID NO: 567738 - RNA, 22 nt, Human
augguuuuguccucuuugguuc

SEQ ID NO: 567739 - RNA, 22 nt, Human
ugauuugaauuuuaaaacacug

SEQ ID NO: 567740 - RNA, 19 nt, Human
uucacuaggucacaagguc

SEQ ID NO: 567741 - RNA, 22 nt, Human
ucccacugucuucucgugcucg

SEQ ID NO: 567742 - RNA, 22 nt, Human
uuacaauuacuugaucucagcu

SEQ ID NO: 567743 - RNA, 22 nt, Human
cucugccagccaaagucaucac

SEQ ID NO: 567744 - RNA, 22 nt, Human
aucaucaucuaaauugugucgc

SEQ ID NO: 567745 - RNA, 22 nt, Human
caaauacaaauacgggcagcuu

SEQ ID NO: 567746 - RNA, 22 nt, Human
ucugagagccacugaacagcaa

SEQ ID NO: 567747 - RNA, 22 nt, Human
agugucugcgggcagaggagcg

SEQ ID NO: 567748 - RNA, 23 nt, Human
ugcaaaauuugcagaguucgaug

SEQ ID NO: 567749 - RNA, 22 nt, Human
cuuugcagagggggugggagcu

SEQ ID NO: 567750 - RNA, 22 nt, Human
cugaaggacacgugaggagcca

SEQ ID NO: 567751 - RNA, 21 nt, Human
cuuuggcaagggagaagucac

SEQ ID NO: 567752 - RNA, 21 nt, Human
acugaacuuguguucuagagg

SEQ ID NO: 567753 - RNA, 22 nt, Human
cauugcugugggcauuugcugc

SEQ ID NO: 567754 - RNA, 22 nt, Human
guuuccaagucucucaacaccc

SEQ ID NO: 567755 - RNA, 22 nt, Human
uugcucuauguuuguaaacaga

SEQ ID NO: 567756 - RNA, 22 nt, Human
aauucaaggaucuguuaaaucu

SEQ ID NO: 567757 - RNA, 22 nt, Human
uaauuucagugcaagcucacgg

SEQ ID NO: 567758 - RNA, 22 nt, Human
uugcugugucauuuguuuaauc

SEQ ID NO: 567759 - RNA, 22 nt, Human
ccuggccauagggcccaggaaa

SEQ ID NO: 567760 - RNA, 22 nt, Human
agugaaaaccuaaucaugcagu

SEQ ID NO: 567761 - RNA, 22 nt, Human
aauguuacgaucaacaacacau

SEQ ID NO: 567762 - RNA, 22 nt, Human
uguuggcagugcuacagucagu

SEQ ID NO: 567763 - RNA, 22 nt, Human
auguucaaguaccuuugugucu

SEQ ID NO: 567764 - RNA, 22 nt, Human
cucggaauggaacaacagcggu

SEQ ID NO: 567765 - RNA, 22 nt, Human
aacacuaaaggucaguuagaag

SEQ ID NO: 567766 - RNA, 22 nt, Human herpesvirus 6
agacugggaaccgcggcagcau

SEQ ID NO: 567767 - RNA, 22 nt, Human herpesvirus 6
acauuuaaucacgagucuccuu

SEQ ID NO: 567768 - RNA, 22 nt, Human herpesvirus 6
uuucaacagccugucuagaaau

SEQ ID NO: 567769 - RNA, 22 nt, Human herpesvirus 6
uaucagaugacgcaucaacuuu

SEQ ID NO: 567770 - RNA, 22 nt, Human herpesvirus 6
gaagaucacuuuguuucugaac

SEQ ID NO: 567771 - RNA, 22 nt, Human herpesvirus 6
auuuacuacaggauaaaacuuc

SEQ ID NO: 567772 - RNA, 22 nt, Human herpesvirus 6
gauuuucucagcaauuuggaaa

SEQ ID NO: 567773 - RNA, 22 nt, Human herpesvirus 6
ucuacaaaauagaauuuaacga

SEQ ID NO: 567774 - RNA, 22 nt, Human herpesvirus 6
ugagacaucgagauucuuuaaa

SEQ ID NO: 567775 - RNA, 22 nt, Human herpesvirus 6
ugcagaauaucaaaaacucaug

SEQ ID NO: 567776 - RNA, 22 nt, Human herpesvirus 6
ucuacaaaauagaauuuaacga

SEQ ID NO: 567777 - RNA, 22 nt, Human herpesvirus 6
ucucaucguaaucuuuguaggc

SEQ ID NO: 567778 - RNA, 22 nt, Human herpesvirus 6
ucuauuagauggcgauuugaag

SEQ ID NO: 567779 - RNA, 22 nt, Human herpesvirus 6
uccgagaacucgagccauaguu

SEQ ID NO: 567780 - RNA, 22 nt, Human herpesvirus 6
ucaguuuauaucuucguaaugg

SEQ ID NO: 567781 - RNA, 22 nt, Human herpesvirus 6
uauaucgaauuaucuuugaagc

SEQ ID NO: 567782 - RNA, 22 nt, Human herpesvirus 6
uaugacuagggguauggcuagg

SEQ ID NO: 567783 - RNA, 23 nt, Human herpesvirus 6
gagaaaaguaacacaggucuccc

SEQ ID NO: 567784 - RNA, 22 nt, Human herpesvirus 6
gaggugugauuuuagaagguag

SEQ ID NO: 567785 - RNA, 22 nt, Human herpesvirus 6
gaguaaaucgaacgauacuuac

SEQ ID NO: 567786 - RNA, 22 nt, Human herpesvirus 6
gauucucauuauaacgcagaca

SEQ ID NO: 567787 - RNA, 22 nt, Human herpesvirus 6
gauugauaaguuuccgacaugc

SEQ ID NO: 567788 - RNA, 22 nt, Human herpesvirus 6
gauuuucucagcaauuuggaaa

SEQ ID NO: 567789 - RNA, 20 nt, Human herpesvirus 6
cgcguguuugcaucagugac

SEQ ID NO: 567790 - RNA, 22 nt, Human herpesvirus 6
cgcguuucucuccacaucuccg

SEQ ID NO: 567791 - RNA, 22 nt, Human herpesvirus 6
cggcgaggcggccggagagccg

SEQ ID NO: 567792 - RNA, 22 nt, Human herpesvirus 6
cggcggauggagcccgcucggu

SEQ ID NO: 567793 - RNA, 22 nt, Human herpesvirus 6
cggcgguugccuguauaggcag

SEQ ID NO: 567794 - RNA, 22 nt, Human herpesvirus 6
cggugguuaguuuuuggguaga

SEQ ID NO: 567795 - RNA, 22 nt, Human herpesvirus 6
cggugugucauuggagaaauac

SEQ ID NO: 567796 - RNA, 22 nt, Human herpesvirus 6
ugcgagaccgagcgggcuccau

SEQ ID NO: 567797 - RNA, 22 nt, Human herpesvirus 6
ugcuuugccaguauaacuguuu

SEQ ID NO: 567798 - RNA, 22 nt, Human herpesvirus 6
uggaaugaugaacgguaagcga

SEQ ID NO: 567799 - RNA, 22 nt, Human herpesvirus 6
aaucuggguuccugcuuaguua

SEQ ID NO: 567800 - RNA, 22 nt, Human herpesvirus 6
acaaauucgguguuuuuaaugu

SEQ ID NO: 567801 - RNA, 22 nt, Human herpesvirus 6
aauguuaugaagaaguuaacua

SEQ ID NO: 567802 - RNA, 22 nt, Human herpesvirus 6
acauuuaaucacgagucuccuu

SEQ ID NO: 567803 - RNA, 22 nt, Human herpesvirus 6
acacgucgugcguuuugucuuc

SEQ ID NO: 567804 - RNA, 22 nt, Human herpesvirus 6
ugccaauuuugagcaauauaag

SEQ ID NO: 567805 - RNA, 22 nt, Human herpesvirus 6
accguuucguugcaaaugacuu

SEQ ID NO: 567806 - RNA, 22 nt, Human herpesvirus 6
uuuaaaucuaauauucaucggc

SEQ ID NO: 567807 - RNA, 22 nt, Human herpesvirus 6
uuuaagucguugugucaugauu

SEQ ID NO: 567808 - RNA, 22 nt, Human herpesvirus 6
uuuaccgguaauuggcaguuuu

SEQ ID NO: 567809 - RNA, 22 nt, Human herpesvirus 6
uuuagaauuaaggaauugguau

SEQ ID NO: 567810 - RNA, 18 nt, Human herpesvirus 6
uuucaacagccugucuag

SEQ ID NO: 567811 - RNA, 22 nt, Human herpesvirus 6
ccguggugcgucucuccgauag

SEQ ID NO: 567812 - RNA, 22 nt, Human herpesvirus 6
uguuguuuagcguggagauguu

SEQ ID NO: 567813 - RNA, 22 nt, Human herpesvirus 6
uuccgauagggaaacucuauuc

SEQ ID NO: 567814 - RNA, 19 nt, Human herpesvirus 6
uucauuucugacgucugaa

SEQ ID NO: 567815 - RNA, 22 nt, Human herpesvirus 6
uuaggauucuauguggagccgu

SEQ ID NO: 567816 - RNA, 22 nt, Human herpesvirus 6
uuaucguugguguuagaguuag

SEQ ID NO: 567817 - RNA, 22 nt, Human herpesvirus 6
uuccuggacauggugaaacuug

SEQ ID NO: 567818 - RNA, 22 nt, Human herpesvirus 6
uucguuaacaauaauacgcagu

SEQ ID NO: 567819 - RNA, 22 nt, Human herpesvirus 6
uuccuuuucaguauagacauuu

SEQ ID NO: 567820 - RNA, 22 nt, Human herpesvirus 6
uucucgguaaaaauuuggucca

SEQ ID NO: 567821 - RNA, 22 nt, Human herpesvirus 6
aucgagucuuuauauuuucggu

SEQ ID NO: 567822 - RNA, 22 nt, Human herpesvirus 6
aucgauaauccucgggccaggg

SEQ ID NO: 567823 - RNA, 18 nt, Human herpesvirus 6
aucgcaaaauugauacaa

SEQ ID NO: 567824 - RNA, 21 nt, Human herpesvirus 6
aucgcaaaauugauacaaacg

SEQ ID NO: 567825 - RNA, 22 nt, Human herpesvirus 6
aucgcaaaauugauacaaacgu

SEQ ID NO: 567826 - RNA, 22 nt, Human herpesvirus 6
aguaaauauuuaucugcaugua

SEQ ID NO: 567827 - RNA, 21 nt, Human herpesvirus 6
auggugucguuuaauuucaca

SEQ ID NO: 567828 - RNA, 22 nt, Human herpesvirus 6
augcuuuaccucuuuagugacu

SEQ ID NO: 567829 - RNA, 22 nt, Human herpesvirus 6
gucgcucaugcggacagucaaa

SEQ ID NO: 567830 - RNA, 22 nt, Human herpesvirus 6
gugacggugcuccgaucagggg

SEQ ID NO: 567831 - RNA, 22 nt, Human herpesvirus 6
guccgugugaacuggcacgagu

SEQ ID NO: 567832 - RNA, 22 nt, Human herpesvirus 6
gugccuauugcugcuaugccug

SEQ ID NO: 567833 - RNA, 21 nt, Human herpesvirus 6
guuucgugucaguucuguggu

SEQ ID NO: 567834 - RNA, 18 nt, Human herpesvirus 6
guuauggaacguauguag

SEQ ID NO: 567835 - RNA, 22 nt, Human herpesvirus 6
uaagcagccgcgaacucguuaa

SEQ ID NO: 567836 - RNA, 22 nt, Human herpesvirus 6
uaccuuuguuuugcagagaaaa

SEQ ID NO: 567837 - RNA, 22 nt, Human herpesvirus 6
uagcuguguguuauaaggaaga

SEQ ID NO: 567838 - RNA, 23 nt, Human herpesvirus 6
gguggcacgucgcgcgcgauguc

SEQ ID NO: 567839 - RNA, 22 nt, Human herpesvirus 6
gggugucuaaacgagucuggag

SEQ ID NO: 567840 - RNA, 22 nt, Human herpesvirus 6
guacaaaugauuuaauuucgcu

SEQ ID NO: 567841 - RNA, 22 nt, Human herpesvirus 6
uccguccucgucuguuaaugua

SEQ ID NO: 567842 - RNA, 22 nt, Human herpesvirus 6
ucgccguuuacuauuguaaaau

SEQ ID NO: 567843 - RNA, 23 nt, Human herpesvirus 6
ucgaaaucgcggaugaauugcgg

SEQ ID NO: 567844 - RNA, 22 nt, Human herpesvirus 6
ggcaccgugccaggccaccgug

SEQ ID NO: 567845 - RNA, 22 nt, Human herpesvirus 6
gcgagcauaguuuaguggguau

SEQ ID NO: 567846 - RNA, 22 nt, Human herpesvirus 6
aaggacuaucugagacagucca

SEQ ID NO: 567847 - RNA, 22 nt, Human herpesvirus 6
aagcuguuaaauguaaauggaa

SEQ ID NO: 567848 - RNA, 23 nt, Human herpesvirus 6
aaagucaccuguauagauuuauu

SEQ ID NO: 567849 - RNA, 23 nt, Human herpesvirus 6
aagaaaaacaggaacugcgguug

SEQ ID NO: 567850 - RNA, 22 nt, Human herpesvirus 6
aaccgcgguacccacugaucuu

SEQ ID NO: 567851 - RNA, 22 nt, Human herpesvirus 6
aacugauacuguucaaguccuu

SEQ ID NO: 567852 - RNA, 22 nt, Human herpesvirus 6
gcgcgugggccagucucgccuc

SEQ ID NO: 567853 - RNA, 22 nt, Human herpesvirus 6
aaaaauaaggcaacgcccacca

SEQ ID NO: 567854 - RNA, 22 nt, Human herpesvirus 6
uguccauuucguaucgaaugaa

SEQ ID NO: 567855 - RNA, 22 nt, Human herpesvirus 6
caaauaguuguguuauaaaagg

SEQ ID NO: 567856 - RNA, 22 nt, Human herpesvirus 6
auuuacuacaggauaaaacuuc

SEQ ID NO: 567857 - RNA, 22 nt, Human herpesvirus 6
auuacuagaugguaaagcguug

SEQ ID NO: 567858 - RNA, 22 nt, Human herpesvirus 6
auuccguuugcguggcuagauc

SEQ ID NO: 567859 - RNA, 22 nt, Human herpesvirus 6
auucucauuugaaagcgauaga

SEQ ID NO: 567860 - RNA, 21 nt, Human herpesvirus 6
auucucucacagcaugaugac

SEQ ID NO: 567861 - RNA, 22 nt, Human herpesvirus 6
auugcgaggagacggagacgga

SEQ ID NO: 567862 - RNA, 22 nt, Human herpesvirus 6
cacacacggcgugagacgccgc

SEQ ID NO: 567863 - RNA, 22 nt, Human herpesvirus 6
cagcgacaguaacggcggcggc

SEQ ID NO: 567864 - RNA, 22 nt, Human herpesvirus 6
caggucggcaggguguacgcgg

SEQ ID NO: 567865 - RNA, 22 nt, Human herpesvirus 6
cgacagaugugugucuuccgau

SEQ ID NO: 567866 - RNA, 22 nt, Human herpesvirus 6
cgacgcggcgucuccgacgagu

SEQ ID NO: 567867 - RNA, 16 nt, Human herpesvirus 6
ccuggcgauuuucgau

SEQ ID NO: 567868 - RNA, 22 nt, Human herpesvirus 6
ccuuuuuaauuucgaguauugu

SEQ ID NO: 567869 - RNA, 22 nt, Human herpesvirus 6
uuucaacagccugucuagaaau

SEQ ID NO: 567870 - RNA, 22 nt, Human herpesvirus 6
uuucacgugcacgagaucuguu

SEQ ID NO: 567871 - RNA, 22 nt, Human herpesvirus 6
uuuggcgacuguuugaaauauu

SEQ ID NO: 567872 - RNA, 22 nt, Human herpesvirus 6
acggcaccauuaauauguucgc

SEQ ID NO: 567873 - RNA, 23 nt, Human herpesvirus 6
acuuguuuuuaucggggcggauc

SEQ ID NO: 567874 - RNA, 21 nt, Human herpesvirus 6
acuuagcagauauucuagauu

SEQ ID NO: 567875 - RNA, 22 nt, Human herpesvirus 6
acggagcccgcuggguaucgcg

SEQ ID NO: 567876 - RNA, 22 nt, Human herpesvirus 6
agccgaugacggccuccggccc

SEQ ID NO: 567877 - RNA, 22 nt, Human herpesvirus 6
agcggaaacuguaacggccacg

SEQ ID NO: 567878 - RNA, 22 nt, Human herpesvirus 6
agcugggugucgauacauauau

SEQ ID NO: 567879 - RNA, 22 nt, Human herpesvirus 6
acuuuuuguccgaucacaucuu

SEQ ID NO: 567880 - RNA, 22 nt, Human herpesvirus 6
acguagaaaaucgucaauggug

SEQ ID NO: 567881 - RNA, 22 nt, Human herpesvirus 6
gggcggauaguaggaguggguc

SEQ ID NO: 567882 - RNA, 22 nt, Human herpesvirus 6
gccgcagaguugcaagaaaugu

SEQ ID NO: 567883 - RNA, 22 nt, Human herpesvirus 6
gcauucgacacauggaauuuac

SEQ ID NO: 567884 - RNA, 22 nt, Human herpesvirus 6
gcuucccaacacuuuaagauaa

SEQ ID NO: 567885 - RNA, 22 nt, Human herpesvirus 6
gcuaauaauuccauaaauguca

SEQ ID NO: 567886 - RNA, 22 nt, Human herpesvirus 6
gcuaucuucggcaaaaaguuuu

SEQ ID NO: 567887 - RNA, 22 nt, Human herpesvirus 6
cugauguagauauuuuaaaaau

SEQ ID NO: 567888 - RNA, 22 nt, Human herpesvirus 6
cucuguuuggagacauacugua

SEQ ID NO: 567889 - RNA, 22 nt, Human herpesvirus 6
cuauauaugcaagccaugacaa

SEQ ID NO: 567890 - RNA, 22 nt, Human herpesvirus 6
cgugugcgugcgccggacucug

SEQ ID NO: 567891 - RNA, 22 nt, Human herpesvirus 6
gaauaucaucccuaccgaugaa

SEQ ID NO: 567892 - RNA, 22 nt, Human herpesvirus 6
gaauguuugggagaacugagga

SEQ ID NO: 567893 - RNA, 22 nt, Human herpesvirus 6
ggcgucucacgccgugugugcg

SEQ ID NO: 567894 - RNA, 22 nt, Human
aaacugaaacaucaucauguug

SEQ ID NO: 567895 - RNA, 22 nt, Human
gacccuguuucuacaaauaauu

SEQ ID NO: 567896 - RNA, 22 nt, Human
cuuuggaauaauuuccuggagu

SEQ ID NO: 567897 - RNA, 22 nt, Human
acaggccucaagacacccaggu

SEQ ID NO: 567898 - RNA, 22 nt, Human
uuucuauucuggaucuguggca

SEQ ID NO: 567899 - RNA, 22 nt, Human
agacucugauaagcaacucuug

SEQ ID NO: 567900 - RNA, 22 nt, Human
auacuaagcucauuacauuuug

SEQ ID NO: 567901 - RNA, 22 nt, Human
acuguacacgugucauuuacag

SEQ ID NO: 567902 - RNA, 22 nt, Human
ccagguggaaggucugugcucu

SEQ ID NO: 567903 - RNA, 21 nt, Human
uuuguucaggggcaaaguuaa

SEQ ID NO: 567904 - RNA, 22 nt, Human
uggacaacauagugagaccuca

SEQ ID NO: 567905 - RNA, 19 nt, Human
uaaaaacugaaggaagcag

SEQ ID NO: 567906 - RNA, 22 nt, Human
ucuuuuauuaggcugaaauggg

SEQ ID NO: 567907 - RNA, 22 nt, Human
acacuacaaucucagaacuaua

SEQ ID NO: 567908 - RNA, 22 nt, Human
cacuuggaggcccccugugccc

SEQ ID NO: 567909 - RNA, 22 nt, Human
uuuugauaucaugaugaacaga

SEQ ID NO: 567910 - RNA, 22 nt, Human
gaaauccaguucccuacucuua

SEQ ID NO: 567911 - RNA, 22 nt, Human
uaaggaaagugccaugauuucu

SEQ ID NO: 567912 - RNA, 22 nt, Human
acauuucucauucuccccuaac

SEQ ID NO: 567913 - RNA, 22 nt, Human
agacuguaauuuguggccuccu

SEQ ID NO: 567914 - RNA, 22 nt, Human
uuucuauuggcgucacuguugu

SEQ ID NO: 567915 - RNA, 22 nt, Human
gguuccaccuggcgagggguau

SEQ ID NO: 567916 - RNA, 22 nt, Human
uccauuuuagagaugaagaaac

SEQ ID NO: 567917 - RNA, 22 nt, Human
cuaguucuuaacuguuaugauu

SEQ ID NO: 567918 - RNA, 22 nt, Human
ucaugaaaauagaucagaaauu

SEQ ID NO: 567919 - RNA, 22 nt, Human
augcagaaggagccaugcuugc

SEQ ID NO: 567920 - RNA, 22 nt, Human
aggcagaggagaaugaucuucc

SEQ ID NO: 567921 - RNA, 22 nt, Human
cuccagcuuuuucccaguuggc

SEQ ID NO: 567922 - RNA, 22 nt, Human
acauuucuuccacaugcugcug

SEQ ID NO: 567923 - RNA, 18 nt, Human
aagaacugagguccuaga

SEQ ID NO: 567924 - RNA, 22 nt, Human
agucucuuggcauucugaaaca

SEQ ID NO: 567925 - RNA, 22 nt, Human
cagguccugcagggagaguaaa

SEQ ID NO: 567926 - RNA, 22 nt, Human
acauuucugcauguaggguaau

SEQ ID NO: 567927 - RNA, 22 nt, Human
uuucuacauuuguaaccagauu

SEQ ID NO: 567928 - RNA, 22 nt, Human
uucaucuugauggcuuccuaau

SEQ ID NO: 567929 - RNA, 22 nt, Human
guccaagagucaagaagggggc

SEQ ID NO: 567930 - RNA, 20 nt, Human
acuggacacugaggugagcu

SEQ ID NO: 567931 - RNA, 22 nt, Human
uaauccaauggcacaauguaug

SEQ ID NO: 567932 - RNA, 22 nt, Human
acuguucauuuguccuguaucu

SEQ ID NO: 567933 - RNA, 22 nt, Human
caguuucucucauacauauuug

SEQ ID NO: 567934 - RNA, 22 nt, Human
cuauuuaucuauuucugaauga

SEQ ID NO: 567935 - RNA, 22 nt, Human
caaagacugcauaacacaugaa

SEQ ID NO: 567936 - RNA, 22 nt, Human
uacuguacugucuuuuuugcug

SEQ ID NO: 567937 - RNA, 22 nt, Human
acaaaaagcuccauuacugucc

SEQ ID NO: 567938 - RNA, 22 nt, Human
auagcagaaaccaagcuucuuc

SEQ ID NO: 567939 - RNA, 22 nt, Human
agcauaaaggucaacguuuuag

SEQ ID NO: 567940 - RNA, 22 nt, Human
cauuucuagggaucauaaagua

SEQ ID NO: 567941 - RNA, 22 nt, Human
agugcaauagcaaagaacaaca

SEQ ID NO: 567942 - RNA, 22 nt, Human
uauggaaaguguuuucuucugu

SEQ ID NO: 567943 - RNA, 22 nt, Human
auaccuguguauccacaagcgu

SEQ ID NO: 567944 - RNA, 22 nt, Human
aauacagauauucagugguacu

SEQ ID NO: 567945 - RNA, 22 nt, Human
auuucuacaguacacaugcauu

SEQ ID NO: 567946 - RNA, 22 nt, Human
aauguacaucucaguguaguac

SEQ ID NO: 567947 - RNA, 22 nt, Human
acagguccuuauaagagcacuc

SEQ ID NO: 567948 - RNA, 22 nt, Human
gccagccugugcuuggccaggc

SEQ ID NO: 567949 - RNA, 22 nt, Human
ucauuucuccgaccugcugucc

SEQ ID NO: 567950 - RNA, 22 nt, Human
aaauauguaagauuagcacuag

SEQ ID NO: 567951 - RNA, 22 nt, Human
cucaggagagucuuauaucucc

SEQ ID NO: 567952 - RNA, 22 nt, Human
uccagcucaggguuggcucaag

SEQ ID NO: 567953 - RNA, 22 nt, Human
accagacacugugaagacaggc

SEQ ID NO: 567954 - RNA, 22 nt, Human
acauuucuccuugcaggaguca

SEQ ID NO: 567955 - RNA, 22 nt, Human
acauguguggacaugaaucuac

SEQ ID NO: 567956 - RNA, 22 nt, Human
acuuuggggaacuuuucuccuc

SEQ ID NO: 567957 - RNA, 22 nt, Human
cugugacagagcuugagugaga

SEQ ID NO: 567958 - RNA, 22 nt, Human
ucccagcacgucugcuguuucu

SEQ ID NO: 567959 - RNA, 22 nt, Human
uauauguguggauucuuguaga

SEQ ID NO: 567960 - RNA, 22 nt, Human
agggaaauuaaugugagcaaug

SEQ ID NO: 567961 - RNA, 22 nt, Human
acauuguauaaugauuaucaca

SEQ ID NO: 567962 - RNA, 22 nt, Human
cugucuuuucauacuuucccuc

SEQ ID NO: 567963 - RNA, 22 nt, Human
agcaaacagugugcuaagaaau

SEQ ID NO: 567964 - RNA, 22 nt, Human
cacaguccuacagagaucagag

SEQ ID NO: 567965 - RNA, 22 nt, Human
cucccacuccuggcucaccaca

SEQ ID NO: 567966 - RNA, 20 nt, Human
gaaauucucguauuaguuua

SEQ ID NO: 567967 - RNA, 22 nt, Human
aaaaaccuuucccauacuaaga

SEQ ID NO: 567968 - RNA, 22 nt, Human
uacaagacgagggaaguucuuu

SEQ ID NO: 567969 - RNA, 22 nt, Human
uaggaaaagcacaggauguucu

SEQ ID NO: 567970 - RNA, 22 nt, Human
aaacacuagcaggaagcacuga

SEQ ID NO: 567971 - RNA, 22 nt, Human
cuguuauuuagaacauggaauc

SEQ ID NO: 567972 - RNA, 22 nt, Human
aaaauuuccaccaucuuugugu

SEQ ID NO: 567973 - RNA, 22 nt, Human
caauaguaaauuacggaggaga

SEQ ID NO: 567974 - RNA, 22 nt, Human
aaagacugggacugcagcaggc

SEQ ID NO: 567975 - RNA, 22 nt, Human
cacuguacagcauuaacaaggc

SEQ ID NO: 567976 - RNA, 22 nt, Human
aaacaacuucugcacuaugggu

SEQ ID NO: 567977 - RNA, 22 nt, Human
auacaagaucacuccagaaaau

SEQ ID NO: 567978 - RNA, 22 nt, Human
uaacagcuggcguuauaggaau

SEQ ID NO: 567979 - RNA, 22 nt, Human
aacuguacgauaauaaauuugu

SEQ ID NO: 567980 - RNA, 22 nt, Human
ugagaugaauaacuccugcuaa

SEQ ID NO: 567981 - RNA, 22 nt, Human
acugaguguaggacuuugaguu

SEQ ID NO: 567982 - RNA, 22 nt, Human
uuuuucugccauucaaagagga

SEQ ID NO: 567983 - RNA, 22 nt, Human
aggcagagcuggguuuugaaau

SEQ ID NO: 567984 - RNA, 22 nt, Human
uucuaguugagggagacaaaua

SEQ ID NO: 567985 - RNA, 22 nt, Human
caagucaaagacuagaacuagu

SEQ ID NO: 567986 - RNA, 22 nt, Human
aucuggaagccagauacucagu

SEQ ID NO: 567987 - RNA, 22 nt, Human
uuauuauagauuaugcaagauu

SEQ ID NO: 567988 - RNA, 22 nt, Human
acugcagacucuacaguuauaa

SEQ ID NO: 567989 - RNA, 22 nt, Human
cauuuacuuaaaucuuuacaag

SEQ ID NO: 567990 - RNA, 22 nt, Human
aggaaacagugaacuuggcagg

SEQ ID NO: 567991 - RNA, 22 nt, Human
uccaauaacaucuaaaaacuua

SEQ ID NO: 567992 - RNA, 22 nt, Human
ggcagaggaggggugaauuugc

SEQ ID NO: 567993 - RNA, 22 nt, Human
augucuuucuuauggucuguug

SEQ ID NO: 567994 - RNA, 22 nt, Human
aaauucuaugucaauguuuauu

SEQ ID NO: 567995 - RNA, 22 nt, Human
acauuucuuagccuaguuccag

SEQ ID NO: 567996 - RNA, 22 nt, Human
uuuguucauuuugagcucauca

SEQ ID NO: 567997 - RNA, 22 nt, Human
cuguacagaguucugaguguac

SEQ ID NO: 567998 - RNA, 22 nt, Human
acauuucucuugaugucucuau

SEQ ID NO: 567999 - RNA, 22 nt, Human
uuauacuaaaacgcauugaauu

SEQ ID NO: 568000 - RNA, 22 nt, Human
cagaaacuauguaagaaaguga

SEQ ID NO: 568001 - RNA, 22 nt, Human
auguaacaaaugguauacaugu

SEQ ID NO: 568002 - RNA, 20 nt, Human
ccugucuggagacaaagaga

SEQ ID NO: 568003 - RNA, 22 nt, Human
ggcagaggugacagugucuuuu

SEQ ID NO: 568004 - RNA, 22 nt, Human
gagauuuccauauuuuguaaca

SEQ ID NO: 568005 - RNA, 22 nt, Human
gaaaucuuuauggaaauaacaa

SEQ ID NO: 568006 - RNA, 22 nt, Human
ucuguacauuuggggaccccag

SEQ ID NO: 568007 - RNA, 22 nt, Human
ccugcuuaacauugccaugaca

SEQ ID NO: 568008 - RNA, 22 nt, Human
accaucuuaguggccagcucuc

SEQ ID NO: 568009 - RNA, 22 nt, Human
gacaagacugguuuauuuaagg

SEQ ID NO: 568010 - RNA, 22 nt, Human
acauuucucaucuaguagagua

SEQ ID NO: 568011 - RNA, 22 nt, Human
gcuguacauucugcacaggccc

SEQ ID NO: 568012 - RNA, 22 nt, Human
aagaaacuguugcgugacagcg

SEQ ID NO: 568013 - RNA, 22 nt, Human
cugagaaaggaccucaaacagg

SEQ ID NO: 568014 - RNA, 22 nt, Human
aacaugaaacccaaacagaaua

SEQ ID NO: 568015 - RNA, 22 nt, Human
ucugucuuuagaggccugugcu

SEQ ID NO: 568016 - RNA, 22 nt, Human
cagcuccuauuagacacugaau

SEQ ID NO: 568017 - RNA, 22 nt, Human
aacauuaauuacagucaaacau

SEQ ID NO: 568018 - RNA, 23 nt, Human
aucaagucaucagcaaaauacau

SEQ ID NO: 568019 - RNA, 22 nt, Human
aucuggaauccuuguggacaau

SEQ ID NO: 568020 - RNA, 23 nt, Human
ucuguacacaucagcaucuccca

SEQ ID NO: 568021 - RNA, 22 nt, Human
ucuauuugcugguugcuucugu

SEQ ID NO: 568022 - RNA, 22 nt, Human
uucucaggugaggcugaggcug

SEQ ID NO: 568023 - RNA, 22 nt, Human
ucagucuucccuccagugcaac

SEQ ID NO: 568024 - RNA, 22 nt, Human
uguugauuugugggcugcaaaa

SEQ ID NO: 568025 - RNA, 22 nt, Human
uggucaacaggcagggaugaaa

SEQ ID NO: 568026 - RNA, 22 nt, Human
uugucuuuggaaauuuaauguu

SEQ ID NO: 568027 - RNA, 22 nt, Human
aaagaacuuauccuagaauuug

SEQ ID NO: 568028 - RNA, 17 nt, Human
ucugucuugacugucac

SEQ ID NO: 568029 - RNA, 22 nt, Human
acauuucuuucuauucaguagc

SEQ ID NO: 568030 - RNA, 22 nt, Human
aggaccugagaguuggaaaucc

SEQ ID NO: 568031 - RNA, 22 nt, Human
uccagcuggggacaugggcuuc

SEQ ID NO: 568032 - RNA, 22 nt, Human
ucuguacaacaaagggaugaga

SEQ ID NO: 568033 - RNA, 23 nt, Human
uggcuccaugaaaauuacgagga

SEQ ID NO: 568034 - RNA, 22 nt, Human
uuucuacaugucaauccaaacc

SEQ ID NO: 568035 - RNA, 22 nt, Human
acuuucuuaggcuguauaaaug

SEQ ID NO: 568036 - RNA, 22 nt, Human
aagacugugucuauggcuacuc

SEQ ID NO: 568037 - RNA, 22 nt, Human
acagcaaaggacgaacacucug

SEQ ID NO: 568038 - RNA, 23 nt, Human
uucuuauuuacuuuggaaucucc

SEQ ID NO: 568039 - RNA, 22 nt, Human
acauuucuuugcuagacagcag

SEQ ID NO: 568040 - RNA, 22 nt, Human
aaauguuccuuuggauuaaacu

SEQ ID NO: 568041 - RNA, 22 nt, Human
gacaaaacacauuaguuuaaaa

SEQ ID NO: 568042 - RNA, 22 nt, Human
gacaagacagcuugcagacaac

SEQ ID NO: 568043 - RNA, 22 nt, Human
uccaucuguuuacuauaaagau

SEQ ID NO: 568044 - RNA, 20 nt, Human
acaugaaaggaaacaggaaa

SEQ ID NO: 568045 - RNA, 22 nt, Human
acaguucccgucuugcacagcu

SEQ ID NO: 568046 - RNA, 22 nt, Human
aucuggaacaaagcuuaggaau

SEQ ID NO: 568047 - RNA, 22 nt, Human
aaaaguguucaggaagaauaau

SEQ ID NO: 568048 - RNA, 22 nt, Human
uagcauuuggcaccaguuauuu

SEQ ID NO: 568049 - RNA, 22 nt, Human
cagcugagaagugauagcugca

SEQ ID NO: 568050 - RNA, 22 nt, Human
cauguacauucuguagauggag

SEQ ID NO: 568051 - RNA, 22 nt, Human
uuucuacaguacugauuucaua

SEQ ID NO: 568052 - RNA, 22 nt, Human
cuuagaugaagucacagaaccc

SEQ ID NO: 568053 - RNA, 22 nt, Human
caaacuguucucugugggauuc

SEQ ID NO: 568054 - RNA, 20 nt, Human
ucuguacacucaucuucugc

SEQ ID NO: 568055 - RNA, 22 nt, Human
augaaacugggauaacuauagc

SEQ ID NO: 568056 - RNA, 19 nt, Human
ccuguacauuauucucccc

SEQ ID NO: 568057 - RNA, 22 nt, Human
aaaauccacaacgcucauuuca

SEQ ID NO: 568058 - RNA, 22 nt, Human
ucuuugcauggacauguguuuu

SEQ ID NO: 568059 - RNA, 21 nt, Human
aagaacuauugagguacacag

SEQ ID NO: 568060 - RNA, 22 nt, Human
acauuucucagguaagucauuu

SEQ ID NO: 568061 - RNA, 22 nt, Human
agcuuuuaguacguuaaaauug

SEQ ID NO: 568062 - RNA, 22 nt, Human
aaagacugguguguuacauaua

SEQ ID NO: 568063 - RNA, 22 nt, Human
gcuuuaaaccucuacucugucc

SEQ ID NO: 568064 - RNA, 22 nt, Human
auguuacaauucaaaaugcugc

SEQ ID NO: 568065 - RNA, 21 nt, Human
ggcuguggagccaugacucac

SEQ ID NO: 568066 - RNA, 22 nt, Human
ccuggcuuuuguuuauaaauuc

SEQ ID NO: 568067 - RNA, 22 nt, Human
aagaaacugaaaguggcuucau

SEQ ID NO: 568068 - RNA, 22 nt, Human
caguccuggggaccaggcugag

SEQ ID NO: 568069 - RNA, 22 nt, Human
auuaagacugcccauguuuuua

SEQ ID NO: 568070 - RNA, 22 nt, Human
cagaaacuucuggugucaaaua

SEQ ID NO: 568071 - RNA, 22 nt, Human
ccacugagaccuuuuggaggag

SEQ ID NO: 568072 - RNA, 19 nt, Human
aggcagaggcuuggcuagc

SEQ ID NO: 568073 - RNA, 22 nt, Human
aggcugugcacagggcaccugc

SEQ ID NO: 568074 - RNA, 22 nt, Human
uucucuugugccaaguuguugc

SEQ ID NO: 568075 - RNA, 21 nt, Human
uucuacaggaugaaugaaaac

SEQ ID NO: 568076 - RNA, 22 nt, Human
uucauaguguuuccuuccagug

SEQ ID NO: 568077 - RNA, 22 nt, Human
aacauguagcagaaacgacuaa

SEQ ID NO: 568078 - RNA, 22 nt, Human
aacuuucuuucacagaaguauc

SEQ ID NO: 568079 - RNA, 22 nt, Human
ccuguacacggucuaugccucc

SEQ ID NO: 568080 - RNA, 22 nt, Human
cucaggagcuuccucagcccau

SEQ ID NO: 568081 - RNA, 22 nt, Human
uuuacacauaccucuuuaaagu

SEQ ID NO: 568082 - RNA, 22 nt, Human
aaaacuguaggaauugggugcc

SEQ ID NO: 568083 - RNA, 22 nt, Human
auuuauuauugugguuacuucu

SEQ ID NO: 568084 - RNA, 22 nt, Human
aucuggaaaacacaguguagac

SEQ ID NO: 568085 - RNA, 22 nt, Human
aacaacuugcguucagagaugu

SEQ ID NO: 568086 - RNA, 22 nt, Human
acuguacacagugguguacugu

SEQ ID NO: 568087 - RNA, 19 nt, Human
agacucugugugagacuuu

SEQ ID NO: 568088 - RNA, 23 nt, Human
cagaggcaucggauucaacauca

SEQ ID NO: 568089 - RNA, 21 nt, Human
agaaaaacacgauauaagccc

SEQ ID NO: 568090 - RNA, 22 nt, Human
auucuacaacccaauaauaauu

SEQ ID NO: 568091 - RNA, 22 nt, Human
uuucuauuuacagugcuaggua

SEQ ID NO: 568092 - RNA, 22 nt, Human
acauuucuaguuguucaucucc

SEQ ID NO: 568093 - RNA, 22 nt, Human
acauuucugucuuagggacugu

SEQ ID NO: 568094 - RNA, 22 nt, Human
ucaagucuugaugagacaaacc

SEQ ID NO: 568095 - RNA, 22 nt, Human
uucuucauggguucuuuuagga

SEQ ID NO: 568096 - RNA, 22 nt, Human
ggcagagguagcuggaaccagg

SEQ ID NO: 568097 - RNA, 22 nt, Human
aguuucuaacauauagcauugg

SEQ ID NO: 568098 - RNA, 22 nt, Human
acuguacauguaaacauuguca

SEQ ID NO: 568099 - RNA, 22 nt, Human
cuacaagauuuuuaaaacugua

SEQ ID NO: 568100 - RNA, 22 nt, Human
ucuguacaugaguugagaauca

SEQ ID NO: 568101 - RNA, 22 nt, Human
uucaaguucauguguagucagu

SEQ ID NO: 568102 - RNA, 21 nt, Human
uaaaacuguaacuuuguccug

SEQ ID NO: 568103 - RNA, 22 nt, Human
cauuucuagacaaguccuggag

SEQ ID NO: 568104 - RNA, 22 nt, Human
ucaggagacuuaugucacagug

SEQ ID NO: 568105 - RNA, 22 nt, Human
ugugccuacugauagagccaag

SEQ ID NO: 568106 - RNA, 22 nt, Human
uaaacaagcugucugauauucu

SEQ ID NO: 568107 - RNA, 22 nt, Human
auugauaucaguuugcugauug

SEQ ID NO: 568108 - RNA, 22 nt, Human
acuguacacauucgucaagacu

SEQ ID NO: 568109 - RNA, 22 nt, Human
ccuguacaucugcucucauugc

SEQ ID NO: 568110 - RNA, 17 nt, Human
gguucaguucugcauuc

SEQ ID NO: 568111 - RNA, 22 nt, Human
cagcugaguuuccaagucugcc

SEQ ID NO: 568112 - RNA, 22 nt, Human
ccuguacauggccaucuuuacc

SEQ ID NO: 568113 - RNA, 22 nt, Human
uaauccaaaacugaaucugugg

SEQ ID NO: 568114 - RNA, 22 nt, Human
cuccagcugccaccagauguuu

SEQ ID NO: 568115 - RNA, 22 nt, Human
auucagaaauagaaaauuugau

SEQ ID NO: 568116 - RNA, 22 nt, Human
uuguauauauucuuaaagaugu

SEQ ID NO: 568117 - RNA, 22 nt, Human
cuacagcagagcuacacuaacu

SEQ ID NO: 568118 - RNA, 22 nt, Human
ugagcuggucacuccuucugaa

SEQ ID NO: 568119 - RNA, 22 nt, Human
uuucauugucaauaaacuguau

SEQ ID NO: 568120 - RNA, 22 nt, Human
gacuguacuugagagaggaacu

SEQ ID NO: 568121 - RNA, 22 nt, Human
auucuucugccuacuuucaucc

SEQ ID NO: 568122 - RNA, 22 nt, Human
aggcagagcugauguucuguga

SEQ ID NO: 568123 - RNA, 22 nt, Human
uccagcuggggcaguggcuggg

SEQ ID NO: 568124 - RNA, 22 nt, Human
cacagcauaaugaaauauacuu

SEQ ID NO: 568125 - RNA, 21 nt, Human
aaacugaagagacaggaacuu

SEQ ID NO: 568126 - RNA, 19 nt, Human
aaaaggaauauucuuuggg

SEQ ID NO: 568127 - RNA, 22 nt, Human
acauuucuuuucaucucuauau

SEQ ID NO: 568128 - RNA, 22 nt, Human
uucugucuucccacugaggagc

SEQ ID NO: 568129 - RNA, 22 nt, Human
acuguacacacuucucugucuu

SEQ ID NO: 568130 - RNA, 21 nt, Human
uuuauuaacaacuguggacgu

SEQ ID NO: 568131 - RNA, 22 nt, Human
aauucuauaggcaagcuauuuu

SEQ ID NO: 568132 - RNA, 22 nt, Human
acauuucugcuagaauagguga

SEQ ID NO: 568133 - RNA, 22 nt, Human
aagauuuaccacuuuauucaag

SEQ ID NO: 568134 - RNA, 22 nt, Human
ucuguacacuucagcaugcauc

SEQ ID NO: 568135 - RNA, 22 nt, Human
uacuguacucaacaugugaguu

SEQ ID NO: 568136 - RNA, 22 nt, Human
ggaggcucgcuggucgcacagc

SEQ ID NO: 568137 - RNA, 22 nt, Human
acaagaauuauuucuaguuaac

SEQ ID NO: 568138 - RNA, 22 nt, Human
ugagcugggaguggugaugagg

SEQ ID NO: 568139 - RNA, 22 nt, Human
gcuguacaguuuacuagguggg

SEQ ID NO: 568140 - RNA, 22 nt, Human
uaaggaaacaacuuguauuuuu

SEQ ID NO: 568141 - RNA, 22 nt, Human
gaaauucaggacaaagacucuu

SEQ ID NO: 568142 - RNA, 21 nt, Human
accaucuuccaugcauuauau

SEQ ID NO: 568143 - RNA, 22 nt, Human
gacaagacauugguaaagauau

SEQ ID NO: 568144 - RNA, 22 nt, Human
ugguuacacagcauguggacuu

SEQ ID NO: 568145 - RNA, 22 nt, Human
uacaggaagcacucaagaaaug

SEQ ID NO: 568146 - RNA, 22 nt, Human
uaaaaaguagugagaauggcgc

SEQ ID NO: 568147 - RNA, 23 nt, Human
gcuguacaggaaccaguuuggag

SEQ ID NO: 568148 - RNA, 22 nt, Human
agccaggauggucucgaucggc

SEQ ID NO: 568149 - RNA, 22 nt, Human
aaacaguagaaguguauuuuau

SEQ ID NO: 568150 - RNA, 21 nt, Human
uccuguaagcuuggguggcuc

SEQ ID NO: 568151 - RNA, 22 nt, Human
ucuuucuacaucauuugcuucu

SEQ ID NO: 568152 - RNA, 22 nt, Human
uuucuaguucucugccaaaaaa

SEQ ID NO: 568153 - RNA, 19 nt, Human
cuggaaugauagagaccuc

SEQ ID NO: 568154 - RNA, 22 nt, Human
aauaacaggcucaucagaugcu

SEQ ID NO: 568155 - RNA, 23 nt, Human
aaaaaaccauguaggcacucagu

SEQ ID NO: 568156 - RNA, 22 nt, Human
ucuuacagaaaauagauaacau

SEQ ID NO: 568157 - RNA, 22 nt, Human
acacuguaaauugagugcguga

SEQ ID NO: 568158 - RNA, 22 nt, Human
guccagcugaucuugacccagc

SEQ ID NO: 568159 - RNA, 22 nt, Human
caguccugcccaggcugacaga

SEQ ID NO: 568160 - RNA, 22 nt, Human
uucaggagaauuccaagaagua

SEQ ID NO: 568161 - RNA, 22 nt, Human
uuucuacagguugauggguuug

SEQ ID NO: 568162 - RNA, 22 nt, Human
aacuguaaugaauuguucauga

SEQ ID NO: 568163 - RNA, 22 nt, Human
ucugaaaauguugacuuuguuu

SEQ ID NO: 568164 - RNA, 20 nt, Human
aagaaacuugaaaguacaag

SEQ ID NO: 568165 - RNA, 19 nt, Human
acaaacugaguacacuugu

SEQ ID NO: 568166 - RNA, 17 nt, Human
gacaagacagaauucau

SEQ ID NO: 568167 - RNA, 22 nt, Human
uacuguacugcaguucugcaaa

SEQ ID NO: 568168 - RNA, 22 nt, Human
aggcagaggaaggguggauuug

SEQ ID NO: 568169 - RNA, 22 nt, Human
uuucuccaauguaucagcacac

SEQ ID NO: 568170 - RNA, 22 nt, Human
gacauaaaauucaauaauuugu

SEQ ID NO: 568171 - RNA, 22 nt, Human
acuguccauaauauuggugaac

SEQ ID NO: 568172 - RNA, 22 nt, Human
ccuuggagcggucagcacuggu

SEQ ID NO: 568173 - RNA, 22 nt, Human
gaaaaagugaccuugguagcua

SEQ ID NO: 568174 - RNA, 20 nt, Human
acagcagauaccacaacuau

SEQ ID NO: 568175 - RNA, 22 nt, Human
uuuccuuugcccaauacauguc

SEQ ID NO: 568176 - RNA, 22 nt, Human
uucaggagaaaguucaguacuu

SEQ ID NO: 568177 - RNA, 22 nt, Human
caaaguucucggcucaaguccu

SEQ ID NO: 568178 - RNA, 22 nt, Human
cucaggaguaguucagcagcug

SEQ ID NO: 568179 - RNA, 23 nt, Human
cuacaagagcaagcauggacaag

SEQ ID NO: 568180 - RNA, 22 nt, Human
cuacagaaaaucagccacaggc

SEQ ID NO: 568181 - RNA, 22 nt, Human
ccuacacaucucaccucacagg

SEQ ID NO: 568182 - RNA, 22 nt, Human
uucgaguuggcuuuauuaaacu

SEQ ID NO: 568183 - RNA, 22 nt, Human
caauuucuaacauuccauggau

SEQ ID NO: 568184 - RNA, 22 nt, Human
aaacagacugaagaguugaagc

SEQ ID NO: 568185 - RNA, 22 nt, Human
gacaagacaugugaugacauca

SEQ ID NO: 568186 - RNA, 22 nt, Human
ugaguccaccuuaguauauggg

SEQ ID NO: 568187 - RNA, 20 nt, Human
uacagucagggcacaggcag

SEQ ID NO: 568188 - RNA, 22 nt, Human
aaacucuuuccacgauuacuuu

SEQ ID NO: 568189 - RNA, 22 nt, Human
uucuaguuuagggcucuucaac

SEQ ID NO: 568190 - RNA, 22 nt, Human
ucucugaguaagugacaguuca

SEQ ID NO: 568191 - RNA, 22 nt, Human
uucuaguuaaaguauguauuag

SEQ ID NO: 568192 - RNA, 22 nt, Human
gcuguacauuuguguacacuug

SEQ ID NO: 568193 - RNA, 22 nt, Human
gaaacuuuuaaaccucaugagu

SEQ ID NO: 568194 - RNA, 22 nt, Human
aggcugugacagggucauggag

SEQ ID NO: 568195 - RNA, 22 nt, Human
cuuuggaacauacugcugagcu

SEQ ID NO: 568196 - RNA, 22 nt, Human
ccuguacaagagccaucuggau

SEQ ID NO: 568197 - RNA, 22 nt, Human
cuccagucuaguagagccugcu

SEQ ID NO: 568198 - RNA, 22 nt, Human
ccagcuuuucuuaucauuauaa

SEQ ID NO: 568199 - RNA, 22 nt, Human
aacauuucagcaaauaagaaca

SEQ ID NO: 568200 - RNA, 22 nt, Human
cauuucuauggcaaugggaaaa

SEQ ID NO: 568201 - RNA, 22 nt, Human
uuuccacugggcacggggccag

SEQ ID NO: 568202 - RNA, 22 nt, Human
gcuuuuauugucuuuacgacga

SEQ ID NO: 568203 - RNA, 21 nt, Human
ucagcuuugcaacugcacauc

SEQ ID NO: 568204 - RNA, 22 nt, Human
aacuguucuucauuuucaguau

SEQ ID NO: 568205 - RNA, 21 nt, Human
cacaagacacauaggguguuu

SEQ ID NO: 568206 - RNA, 22 nt, Human
cacuuggaggaaggccuauuca

SEQ ID NO: 568207 - RNA, 22 nt, Human
gcuuuaaauggcuugcccaagu

SEQ ID NO: 568208 - RNA, 22 nt, Human
acaucacagagcccagauaaag

SEQ ID NO: 568209 - RNA, 22 nt, Human
cuguaaaacugcuuaaguaugc

SEQ ID NO: 568210 - RNA, 22 nt, Human
aagaaaguggguaauaugauuu

SEQ ID NO: 568211 - RNA, 22 nt, Human
cuguacauaaaggaauaggugu

SEQ ID NO: 568212 - RNA, 22 nt, Human
acagacuguuugguucaugucu

SEQ ID NO: 568213 - RNA, 22 nt, Human
uggcuccaucauccaugcaaga

SEQ ID NO: 568214 - RNA, 22 nt, Human
ucaagucuggagaucuggaacu

SEQ ID NO: 568215 - RNA, 22 nt, Human
ucuccacucugagugccuuuca

SEQ ID NO: 568216 - RNA, 22 nt, Human
auaacagaugugaagugcuaau

SEQ ID NO: 568217 - RNA, 22 nt, Human
aaauguucuacuuugauaauua

SEQ ID NO: 568218 - RNA, 22 nt, Human
ucccuagucgcaucuguggaga

SEQ ID NO: 568219 - RNA, 22 nt, Human
agcaauaacagaaaacuuuccu

SEQ ID NO: 568220 - RNA, 21 nt, Human
ucuguacaucauugagucccc

SEQ ID NO: 568221 - RNA, 22 nt, Human
accaucuuaaggggacuucuua

SEQ ID NO: 568222 - RNA, 22 nt, Human
aucuuaaucgaguccaugaaaa

SEQ ID NO: 568223 - RNA, 22 nt, Human
uccacauucucuguuacagaua

SEQ ID NO: 568224 - RNA, 22 nt, Human
ucuguacaaaggcuauuuggag

SEQ ID NO: 568225 - RNA, 22 nt, Human
agaacugguggugaucaguuau

SEQ ID NO: 568226 - RNA, 22 nt, Human
acuguacauauggauucuaaga

SEQ ID NO: 568227 - RNA, 22 nt, Human
uagcauuuggacauugucaccu

SEQ ID NO: 568228 - RNA, 22 nt, Human
gcaaaaaccacaauuacuuuua

SEQ ID NO: 568229 - RNA, 22 nt, Human
auaaaaaugagggcgguagcua

SEQ ID NO: 568230 - RNA, 22 nt, Human
uuuguucacugagcaaugauua

SEQ ID NO: 568231 - RNA, 22 nt, Human
gaaaguuugccucucucuugag

SEQ ID NO: 568232 - RNA, 22 nt, Human
acauuucucuuagaguuggacu

SEQ ID NO: 568233 - RNA, 22 nt, Human
cuuggucauuucuuguccuguu

SEQ ID NO: 568234 - RNA, 22 nt, Human
uucuacuuuggacauaaaggac

SEQ ID NO: 568235 - RNA, 22 nt, Human
ucaggagauguaaccuuagcug

SEQ ID NO: 568236 - RNA, 22 nt, Human
aggcugugauuccaccacucuc

SEQ ID NO: 568237 - RNA, 22 nt, Human
uguaacaaaauaccuuggauug

SEQ ID NO: 568238 - RNA, 22 nt, Human
ccaguccuggccaguaacauga

SEQ ID NO: 568239 - RNA, 22 nt, Human
uucuaguuuugccuuaucaaca

SEQ ID NO: 568240 - RNA, 22 nt, Human
caguccuguguuaaacaagagc

SEQ ID NO: 568241 - RNA, 22 nt, Human
ggaggcuccuaagcugacuuga

SEQ ID NO: 568242 - RNA, 22 nt, Human
aaguucuacagcuucgcaggca

SEQ ID NO: 568243 - RNA, 18 nt, Human
agugucuggauauuuggg

SEQ ID NO: 568244 - RNA, 22 nt, Human
cugaaacauugcaauaacaaag

SEQ ID NO: 568245 - RNA, 22 nt, Human
cuauuaaacacuacugugcacu

SEQ ID NO: 568246 - RNA, 22 nt, Human
gucccacugggcaacuagaaaa

SEQ ID NO: 568247 - RNA, 22 nt, Human
cucuggagggaggcugagcugg

SEQ ID NO: 568248 - RNA, 22 nt, Human
aaaacauguccauacagaaacu

SEQ ID NO: 568249 - RNA, 22 nt, Human
cuguacaggucaaugauaagau

SEQ ID NO: 568250 - RNA, 22 nt, Human
cuggcuuuuagugugaagacuu

SEQ ID NO: 568251 - RNA, 19 nt, Human
agacucugccacucuucuc

SEQ ID NO: 568252 - RNA, 22 nt, Human
uccauauuaacuaaaacuagaa

SEQ ID NO: 568253 - RNA, 22 nt, Human
cauuucuaagaaggcugcacau

SEQ ID NO: 568254 - RNA, 22 nt, Human
aaaacuguaucuucuugggacu

SEQ ID NO: 568255 - RNA, 22 nt, Human
acugauacaucuguggaagugg

SEQ ID NO: 568256 - RNA, 22 nt, Human
aagaauuuuccagcaugucagu

SEQ ID NO: 568257 - RNA, 22 nt, Human
acuguaaauuuugguugcaggu

SEQ ID NO: 568258 - RNA, 22 nt, Human
acugaaaaugaauuagaaacag

SEQ ID NO: 568259 - RNA, 22 nt, Human
guucaaguucauaucucuuaac

SEQ ID NO: 568260 - RNA, 22 nt, Human
auaaaagaaguuuugguacuug

SEQ ID NO: 568261 - RNA, 22 nt, Human
ucacaagauacaguuagaagca

SEQ ID NO: 568262 - RNA, 22 nt, Human
uaggaaaagucuagauugauga

SEQ ID NO: 568263 - RNA, 22 nt, Human
uguaaguaguaauggaaggaca

SEQ ID NO: 568264 - RNA, 22 nt, Human
cacaguccagacuccuggaguu

SEQ ID NO: 568265 - RNA, 22 nt, Human
acaacugucaguaaagaauauu

SEQ ID NO: 568266 - RNA, 22 nt, Human
ugaaacaaaaguauguagcuug

SEQ ID NO: 568267 - RNA, 22 nt, Human
uaaacaaggguuacugagcaug

SEQ ID NO: 568268 - RNA, 20 nt, Human
ucagguagaucuuugagguc

SEQ ID NO: 568269 - RNA, 22 nt, Human
guaaucucagcuacuugggagg

SEQ ID NO: 568270 - RNA, 22 nt, Human
aguuucuguuaccauauuugac

SEQ ID NO: 568271 - RNA, 22 nt, Human
acuuuuuuauaaggaagaagau

SEQ ID NO: 568272 - RNA, 21 nt, Human
aucuggaagaacugguaagug

SEQ ID NO: 568273 - RNA, 22 nt, Human
ggcagcagggucuagauugaug

SEQ ID NO: 568274 - RNA, 22 nt, Human
uucuaccagaccccagacuugu

SEQ ID NO: 568275 - RNA, 17 nt, Human
agcacuaaaaugcuucc

SEQ ID NO: 568276 - RNA, 22 nt, Human
agacuguaauugacaugucagc

SEQ ID NO: 568277 - RNA, 22 nt, Human
uuuauauccaucuuugaaguaa

SEQ ID NO: 568278 - RNA, 22 nt, Human
caaaagaagcucuuggggcuag

SEQ ID NO: 568279 - RNA, 22 nt, Human
cuuuggaaaaauaccuggcaua

SEQ ID NO: 568280 - RNA, 21 nt, Human
agaauucuuaaguauucuaau

SEQ ID NO: 568281 - RNA, 22 nt, Human
gcagaggcucuuuaaugcuuag

SEQ ID NO: 568282 - RNA, 22 nt, Human
uucagucuccucauuuuacaaa

SEQ ID NO: 568283 - RNA, 22 nt, Human
ccuguacacaauuccgaggaua

SEQ ID NO: 568284 - RNA, 22 nt, Human
aauacagaggggucacaauuca

SEQ ID NO: 568285 - RNA, 22 nt, Human
aacuguaaggcuuagaacagca

SEQ ID NO: 568286 - RNA, 22 nt, Human
acuguauaaggcauagguaagc

SEQ ID NO: 568287 - RNA, 22 nt, Human
uuccacuuaguggaagggcaug

SEQ ID NO: 568288 - RNA, 22 nt, Human
aaauguuccauuauuguguaau

SEQ ID NO: 568289 - RNA, 22 nt, Human
uuuuaucagcagggauaacaag

SEQ ID NO: 568290 - RNA, 22 nt, Human
acuauacauugaauguuaaggu

SEQ ID NO: 568291 - RNA, 22 nt, Human
aggcaagaacagacaugggagu

SEQ ID NO: 568292 - RNA, 22 nt, Human
acauuucuaauuuaauguaaca

SEQ ID NO: 568293 - RNA, 22 nt, Human
uuuaccauccucuuuuagaauu

SEQ ID NO: 568294 - RNA, 19 nt, Human
aggcugugagggaggacuc

SEQ ID NO: 568295 - RNA, 22 nt, Human
aaaaacugcaauuacuuuuguc

SEQ ID NO: 568296 - RNA, 22 nt, Human
uuucuacauucaaaaacuacca

SEQ ID NO: 568297 - RNA, 22 nt, Human
ucagaaauagucuuuaaaauga

SEQ ID NO: 568298 - RNA, 22 nt, Human
acauuucuucccuuuagcagaa

SEQ ID NO: 568299 - RNA, 22 nt, Human
ucuauuucgcauauaaguuuug

SEQ ID NO: 568300 - RNA, 23 nt, Human
ucuguacaauugagaagagaaca

SEQ ID NO: 568301 - RNA, 22 nt, Human
gagaaaauagcauguguaguau

SEQ ID NO: 568302 - RNA, 22 nt, Human
aaaaacugguaacuauucccca

SEQ ID NO: 568303 - RNA, 22 nt, Human
uguuuuuccaugugcagaacaa

SEQ ID NO: 568304 - RNA, 22 nt, Human
ucagucuccuuuccucuagaca

SEQ ID NO: 568305 - RNA, 22 nt, Human
guacaaaaguuauugcgguuuu

SEQ ID NO: 568306 - RNA, 22 nt, Human
cuauugcauuugcaucuucauc

SEQ ID NO: 568307 - RNA, 22 nt, Human
ucaggaaaauacugcuuaucca

SEQ ID NO: 568308 - RNA, 22 nt, Human
cuggaaugagcagggcuuaugg

SEQ ID NO: 568309 - RNA, 22 nt, Human
cucaggaggccauucucaaggu

SEQ ID NO: 568310 - RNA, 22 nt, Human
cucaggaggaugacugccuugg

SEQ ID NO: 568311 - RNA, 16 nt, Human
aggcagagauuuaccc

SEQ ID NO: 568312 - RNA, 22 nt, Human
auaaacugaagggaacacugag

SEQ ID NO: 568313 - RNA, 22 nt, Human
acagaacugagaauucucuauc

SEQ ID NO: 568314 - RNA, 22 nt, Human
cugguuccaggauggaucuuuc

SEQ ID NO: 568315 - RNA, 22 nt, Human
acagacaaguaguucagacaag

SEQ ID NO: 568316 - RNA, 22 nt, Human
uacaaaaaauugauacugacga

SEQ ID NO: 568317 - RNA, 22 nt, Human
agacucugugcuccuugcuuuc

SEQ ID NO: 568318 - RNA, 22 nt, Human
aaauguucccaauaugaagcug

SEQ ID NO: 568319 - RNA, 22 nt, Human
guuuaauuuuagguugucaagc

SEQ ID NO: 568320 - RNA, 22 nt, Human
ucuuuugagggccagaggaaga

SEQ ID NO: 568321 - RNA, 19 nt, Human
gcuuuaguuuacucaucua

SEQ ID NO: 568322 - RNA, 22 nt, Human
acuguacaacugcugagcagaa

SEQ ID NO: 568323 - RNA, 22 nt, Human
ugaucaguguugguucuaucua

SEQ ID NO: 568324 - RNA, 22 nt, Human
ugaguccaagagccagugggaa

SEQ ID NO: 568325 - RNA, 21 nt, Human
uacaagaccggauucgggccc

SEQ ID NO: 568326 - RNA, 22 nt, Human
aaacuguaggagggaaaggaag

SEQ ID NO: 568327 - RNA, 22 nt, Human
cucaggagaugacagaagguau

SEQ ID NO: 568328 - RNA, 18 nt, Human
acaguaaagaaaggaauu

SEQ ID NO: 568329 - RNA, 22 nt, Human
uagcauuucccaaaugcauuug

SEQ ID NO: 568330 - RNA, 22 nt, Human
auguaacacccacuuuuauagc

SEQ ID NO: 568331 - RNA, 22 nt, Human
cucaggaggugguagaggcccu

SEQ ID NO: 568332 - RNA, 22 nt, Human
ugcacaucuuucagcaucauac

SEQ ID NO: 568333 - RNA, 22 nt, Human
uucaggaggugagcaagaaggg

SEQ ID NO: 568334 - RNA, 22 nt, Human
aagaauguucauuaaacuguug

SEQ ID NO: 568335 - RNA, 22 nt, Human
caccugagcacuggggccgccc

SEQ ID NO: 568336 - RNA, 22 nt, Human
gaaauucacuguauuucuuggg

SEQ ID NO: 568337 - RNA, 20 nt, Human
uuuuauauguaggguauaug

SEQ ID NO: 568338 - RNA, 22 nt, Human
gaagaacugugacagaagcagu

SEQ ID NO: 568339 - RNA, 22 nt, Human
uaagacaauucuucagucacaa

SEQ ID NO: 568340 - RNA, 20 nt, Human
auucuacaagaauaagcaug

SEQ ID NO: 568341 - RNA, 22 nt, Human
ggaaacagagggcaccugagcc

SEQ ID NO: 568342 - RNA, 22 nt, Human
agacucugauucccucauguca

SEQ ID NO: 568343 - RNA, 22 nt, Human
uaggaaaaauacagaauuauau

SEQ ID NO: 568344 - RNA, 22 nt, Human
caaaauucugcauuucuaauaa

SEQ ID NO: 568345 - RNA, 17 nt, Human
aucuggaagcuagcuga

SEQ ID NO: 568346 - RNA, 21 nt, Human
ccugucuuggacugaggcacc

SEQ ID NO: 568347 - RNA, 21 nt, Human
ucugagaacuucugcugcagc

SEQ ID NO: 568348 - RNA, 22 nt, Human
caggagacuauggcccaaggcc

SEQ ID NO: 568349 - RNA, 21 nt, Human
acuuugggcacuuuccugccc

SEQ ID NO: 568350 - RNA, 22 nt, Human
acagaacugcaggaggaaaagc

SEQ ID NO: 568351 - RNA, 22 nt, Human
ugucucaucucuuaaccccacu

SEQ ID NO: 568352 - RNA, 22 nt, Human
ccagucugaggccuggugaggg

SEQ ID NO: 568353 - RNA, 22 nt, Human
cugagcugcuuugcuuuugggg

SEQ ID NO: 568354 - RNA, 21 nt, Human
uguuuauggaaaagagacaaa

SEQ ID NO: 568355 - RNA, 22 nt, Human
cuacaggucaguaagaccuaga

SEQ ID NO: 568356 - RNA, 22 nt, Human
ugaaggaaaugacggcagaaga

SEQ ID NO: 568357 - RNA, 23 nt, Human
cauguacacacagcuguacagug

SEQ ID NO: 568358 - RNA, 22 nt, Human
aacuguaagacaaaugacuucu

SEQ ID NO: 568359 - RNA, 22 nt, Human
aaaaacuguaauuacuuuugca

SEQ ID NO: 568360 - RNA, 22 nt, Human
ccaguucugacacaagcacagu

SEQ ID NO: 568361 - RNA, 22 nt, Human
uauuucuaagcuguaagucuga

SEQ ID NO: 568362 - RNA, 22 nt, Human
uucuaguucccucuggaaugua

SEQ ID NO: 568363 - RNA, 22 nt, Human
guggaaguagauuugagaaggu

SEQ ID NO: 568364 - RNA, 22 nt, Human
acauaaaggugacuaacaucuu

SEQ ID NO: 568365 - RNA, 22 nt, Human
aagacuguacauuuuccagucu

SEQ ID NO: 568366 - RNA, 22 nt, Human
aaacuagagcaugugaguggga

SEQ ID NO: 568367 - RNA, 22 nt, Human
auacuguaucacuugugaguga

SEQ ID NO: 568368 - RNA, 22 nt, Human
ucugaaaugcaggcaauuugcu

SEQ ID NO: 568369 - RNA, 22 nt, Human
gaaaacugugauuagaaugccu

SEQ ID NO: 568370 - RNA, 22 nt, Human
uggcuugucauguaucugaggc

SEQ ID NO: 568371 - RNA, 21 nt, Human
uuuauuuauauaggacacaug

SEQ ID NO: 568372 - RNA, 23 nt, Human
uuuuccagaaucgacucuguaga

SEQ ID NO: 568373 - RNA, 22 nt, Human
agacuguacuuucugcagcucu

SEQ ID NO: 568374 - RNA, 22 nt, Human
uuuccacuguagagauguugaa

SEQ ID NO: 568375 - RNA, 22 nt, Human
ggagugacucacagcugggaca

SEQ ID NO: 568376 - RNA, 22 nt, Human
ugagacaguucugcagcugggu

SEQ ID NO: 568377 - RNA, 22 nt, Human
ucuuauuauuguuguaaaagca

SEQ ID NO: 568378 - RNA, 22 nt, Human
guuucuuuugugaucaccaacc

SEQ ID NO: 568379 - RNA, 22 nt, Human
caaaaacugcaauuacuuuuac

SEQ ID NO: 568380 - RNA, 22 nt, Human
uuggccacacucacuagagccc

SEQ ID NO: 568381 - RNA, 22 nt, Human
gcuuuuauuucuucacaaaagu

SEQ ID NO: 568382 - RNA, 22 nt, Human
cucuccagaucugcugagccag

SEQ ID NO: 568383 - RNA, 22 nt, Human
aguuucuauuuucaugucuguu

SEQ ID NO: 568384 - RNA, 22 nt, Human
cugagcugguucucuugugaaa

SEQ ID NO: 568385 - RNA, 22 nt, Human
cauuuguacagaacagcuuuau

SEQ ID NO: 568386 - RNA, 22 nt, Human
acuguaaccaguguggugagag

SEQ ID NO: 568387 - RNA, 22 nt, Human
aauguacaaaccuucuuuguag

SEQ ID NO: 568388 - RNA, 22 nt, Human
ugacaaaacugcaauuacuuuu

SEQ ID NO: 568389 - RNA, 22 nt, Human
cagcugaguuacucugaggucu

SEQ ID NO: 568390 - RNA, 18 nt, Human
cugucuuuuuucucucca

SEQ ID NO: 568391 - RNA, 22 nt, Human
aacaugaaaaccuccacagcaa

SEQ ID NO: 568392 - RNA, 22 nt, Human
aaagacugcaaaaacgcacaga

SEQ ID NO: 568393 - RNA, 22 nt, Human
ucugaaaugcaaauuugacuga

SEQ ID NO: 568394 - RNA, 22 nt, Human
ucuguaaucaagauauuugaga

SEQ ID NO: 568395 - RNA, 22 nt, Human
cacuguacugugaauaaggagg

SEQ ID NO: 568396 - RNA, 22 nt, Human
gcuguacaucacaauuugcugu

SEQ ID NO: 568397 - RNA, 22 nt, Human
cugagcugagccaaaucugucu

SEQ ID NO: 568398 - RNA, 22 nt, Human
uauugaaauccauuacguucuu

SEQ ID NO: 568399 - RNA, 22 nt, Human
cucaggaguuggaggcuacagu

SEQ ID NO: 568400 - RNA, 22 nt, Human
auacaaagcuuucugucuggua

SEQ ID NO: 568401 - RNA, 22 nt, Human
uucuaauuguguuugcauaucu

SEQ ID NO: 568402 - RNA, 22 nt, Human
uccagucucuacucugagauaa

SEQ ID NO: 568403 - RNA, 22 nt, Human
aacauuucuucugaaacugagu

SEQ ID NO: 568404 - RNA, 22 nt, Human
acauuucucccugcaugccugc

SEQ ID NO: 568405 - RNA, 23 nt, Human
agaaaaguucauaccuuuuuaac

SEQ ID NO: 568406 - RNA, 22 nt, Human
gacauaaaccuugagauauuaa

SEQ ID NO: 568407 - RNA, 22 nt, Human
uauccaauucaccauugauggg

SEQ ID NO: 568408 - RNA, 22 nt, Human
uucuacacucacccagcuguaa

SEQ ID NO: 568409 - RNA, 22 nt, Human
aagcuuuaaggaauuuuaugga

SEQ ID NO: 568410 - RNA, 22 nt, Human
aggcucuggcaacagcuggugu

SEQ ID NO: 568411 - RNA, 22 nt, Human
ucuaccacuaagugugcuuuga

SEQ ID NO: 568412 - RNA, 22 nt, Human
acauuucugagcagggagcugu

SEQ ID NO: 568413 - RNA, 22 nt, Human
caugaaaaauuuacuguuaaca

SEQ ID NO: 568414 - RNA, 22 nt, Human
cacuguacuggguugaaggacg

SEQ ID NO: 568415 - RNA, 22 nt, Human
aagucaaucacaugcacacuga

SEQ ID NO: 568416 - RNA, 22 nt, Human
agggagaagguuuagcugugag

SEQ ID NO: 568417 - RNA, 22 nt, Human
augucuuucaaauucugccuag

SEQ ID NO: 568418 - RNA, 22 nt, Human
gcuguacaaauuccacaagaga

SEQ ID NO: 568419 - RNA, 22 nt, Human
aagacugucugggacaagauga

SEQ ID NO: 568420 - RNA, 22 nt, Human
ggcagaggaaggaugaauucac

SEQ ID NO: 568421 - RNA, 22 nt, Human
aaacuguaaauacuaguaagug

SEQ ID NO: 568422 - RNA, 22 nt, Human
cagagcuguauuuaucuuucca

SEQ ID NO: 568423 - RNA, 22 nt, Human
ugcuuccagcucucuguaaggu

SEQ ID NO: 568424 - RNA, 22 nt, Human
gaacuguauaggagcaguguuu

SEQ ID NO: 568425 - RNA, 22 nt, Human
aauaagaauuuacuugucaaga

SEQ ID NO: 568426 - RNA, 22 nt, Human
aguuucuauguaagcuacguga

SEQ ID NO: 568427 - RNA, 20 nt, Human
ucauuucuugggguuccaag

SEQ ID NO: 568428 - RNA, 22 nt, Human
aaacuugauuuagaacuaaggc

SEQ ID NO: 568429 - RNA, 22 nt, Human
acauuucucagggaguuuugcu

SEQ ID NO: 568430 - RNA, 22 nt, Human
aucagucuguguuagaaaagag

SEQ ID NO: 568431 - RNA, 22 nt, Human
acuguacuuuucuuggcuagau

SEQ ID NO: 568432 - RNA, 21 nt, Human
ugcaggagucugugagucagg

SEQ ID NO: 568433 - RNA, 22 nt, Human
acccucaacaaauucacucuau

SEQ ID NO: 568434 - RNA, 22 nt, Human
uguauuccaaaaugcugaggau

SEQ ID NO: 568435 - RNA, 22 nt, Human
uggaaacuaagacuagagagac

SEQ ID NO: 568436 - RNA, 22 nt, Human
cagugcuguuguaagcucauug

SEQ ID NO: 568437 - RNA, 19 nt, Human
caaguucuggagauuaggg

SEQ ID NO: 568438 - RNA, 22 nt, Human
aagucaauuaguaaacuuggaa

SEQ ID NO: 568439 - RNA, 22 nt, Human
acaugaaaagacuaucugauua

SEQ ID NO: 568440 - RNA, 22 nt, Human
ucaggaaagaguguauccauca

SEQ ID NO: 568441 - RNA, 22 nt, Human
cucaggaggaggaaguucauug

SEQ ID NO: 568442 - RNA, 22 nt, Human
uaaagccacuucauucuagucu

SEQ ID NO: 568443 - RNA, 22 nt, Human
acaggccugugugcacacgagg

SEQ ID NO: 568444 - RNA, 22 nt, Human
auuguacagaugagguaaguga

SEQ ID NO: 568445 - RNA, 22 nt, Human
agugcaauguguacagaaaaau

SEQ ID NO: 568446 - RNA, 22 nt, Human
uaccacuacauuugcuaauggc

SEQ ID NO: 568447 - RNA, 22 nt, Human
ucuguacaccaggggccauucu

SEQ ID NO: 568448 - RNA, 22 nt, Human
gguuccccaggcggcccuugga

SEQ ID NO: 568449 - RNA, 22 nt, Human
uuccagcuaacucacaucccuu

SEQ ID NO: 568450 - RNA, 22 nt, Human
ucuguacauuuguguugugaau

SEQ ID NO: 568451 - RNA, 22 nt, Human
cugucuuugguccugucuguua

SEQ ID NO: 568452 - RNA, 20 nt, Human
gugcaauggcgcaaucucgg

SEQ ID NO: 568453 - RNA, 22 nt, Human
cucaggagguuuccugucuagg

SEQ ID NO: 568454 - RNA, 22 nt, Human
uuuuauucucaagacaauggga

SEQ ID NO: 568455 - RNA, 22 nt, Human
ucugucuuugagaucucagccu

SEQ ID NO: 568456 - RNA, 22 nt, Human
gacaagacuauguagaaaguau

SEQ ID NO: 568457 - RNA, 22 nt, Human
gcagaggccaucaacuuugcca

SEQ ID NO: 568458 - RNA, 22 nt, Human
ggcagagacuggguuggcagag

SEQ ID NO: 568459 - RNA, 23 nt, Human
aggagaagagauuuccacaugca

SEQ ID NO: 568460 - RNA, 20 nt, Human
uuucauugucagaaucuuau

SEQ ID NO: 568461 - RNA, 22 nt, Human
uaucugcaucugcauguguauu

SEQ ID NO: 568462 - RNA, 22 nt, Human
aagagcugugggugguaguccu

SEQ ID NO: 568463 - RNA, 22 nt, Human
aaacaguauuaucaauauauuu

SEQ ID NO: 568464 - RNA, 22 nt, Human
aaaaguuaccucuguaauauaa

SEQ ID NO: 568465 - RNA, 22 nt, Human
uaaaacugaauacauacugagg

SEQ ID NO: 568466 - RNA, 22 nt, Human
aauuuguuacacagcaauauaa

SEQ ID NO: 568467 - RNA, 22 nt, Human
gguucaguuuacauuaaaaucu

SEQ ID NO: 568468 - RNA, 20 nt, Human
agggcagagggauuacaggc

SEQ ID NO: 568469 - RNA, 22 nt, Human
auguucuaaucccugcuaugua

SEQ ID NO: 568470 - RNA, 22 nt, Human
aaaguucucuaugguguaaaaa

SEQ ID NO: 568471 - RNA, 22 nt, Human
ggcaggagcucuccaguuugcc

SEQ ID NO: 568472 - RNA, 22 nt, Human
cauuucuacagcuucuucagaa

SEQ ID NO: 568473 - RNA, 22 nt, Human
aagaaaacguuuugaggaguuu

SEQ ID NO: 568474 - RNA, 22 nt, Human
aagaagaaguguuauuuuuaga

SEQ ID NO: 568475 - RNA, 22 nt, Human
uugaaaaaauugguagaggaug

SEQ ID NO: 568476 - RNA, 22 nt, Human
gcgguagcucaagcuuguaauc

SEQ ID NO: 568477 - RNA, 22 nt, Human
acaguccuguacaggccauauc

SEQ ID NO: 568478 - RNA, 22 nt, Human
auuuaacaagacagagaacugg

SEQ ID NO: 568479 - RNA, 22 nt, Human
gcagaauguaggccuucagugu

SEQ ID NO: 568480 - RNA, 22 nt, Human
uaacagcucuguguggcuguaa

SEQ ID NO: 568481 - RNA, 22 nt, Human
uucugucugauggugccagaac

SEQ ID NO: 568482 - RNA, 22 nt, Human
acuguacaaccucugccccugu

SEQ ID NO: 568483 - RNA, 22 nt, Human
ucuuuuaucuguuguguaacaa

SEQ ID NO: 568484 - RNA, 22 nt, Human
aaacuguaagagaauaaacuac

SEQ ID NO: 568485 - RNA, 22 nt, Human
gugcaaugugcuucgugccaug

SEQ ID NO: 568486 - RNA, 20 nt, Human
aacacugugcgugguaggug

SEQ ID NO: 568487 - RNA, 22 nt, Human
agaggaaaaugaguuccagaau

SEQ ID NO: 568488 - RNA, 22 nt, Human
gaacauuuaugaugcaauaccu

SEQ ID NO: 568489 - RNA, 22 nt, Human
guguuaaccagcuaaacuuugc

SEQ ID NO: 568490 - RNA, 22 nt, Human
agaaaauuagauuuuacugugu

SEQ ID NO: 568491 - RNA, 21 nt, Human
cauuucuauugaugagaaaag

SEQ ID NO: 568492 - RNA, 19 nt, Human
gcuguacaguaaggagaca

SEQ ID NO: 568493 - RNA, 22 nt, Human
acuaagaccuagauacuagggg

SEQ ID NO: 568494 - RNA, 22 nt, Human
aggcagagcuaggaagaauugu

SEQ ID NO: 568495 - RNA, 22 nt, Human
auacaaaguauuaauccuggau

SEQ ID NO: 568496 - RNA, 22 nt, Human
uuucuaguccucaugcaucauu

SEQ ID NO: 568497 - RNA, 22 nt, Human
auccacccugugguggcuuucu

SEQ ID NO: 568498 - RNA, 22 nt, Human
auggcagagggauugaacagcu

SEQ ID NO: 568499 - RNA, 22 nt, Human
ugagcuggaaucuucuugacug

SEQ ID NO: 568500 - RNA, 22 nt, Human
gcuguacaaggccucugccauc

SEQ ID NO: 568501 - RNA, 22 nt, Human
ugggaaugugagcauucauuca

SEQ ID NO: 568502 - RNA, 20 nt, Human
acuuuggggucuuucucaga

SEQ ID NO: 568503 - RNA, 22 nt, Human
ccuguauuagguagacaacuau

SEQ ID NO: 568504 - RNA, 22 nt, Human
ccuguacagugaaugaauguga

SEQ ID NO: 568505 - RNA, 22 nt, Human
cuuggucauuuggggcugcuau

SEQ ID NO: 568506 - RNA, 22 nt, Human
uuuguucaugccuauauucuca

SEQ ID NO: 568507 - RNA, 22 nt, Human
aaagucaaaaugcucuccuguc

SEQ ID NO: 568508 - RNA, 23 nt, Human
aaagacugcugagaauuuuagga

SEQ ID NO: 568509 - RNA, 22 nt, Human
acuguucauuuggauuucucug

SEQ ID NO: 568510 - RNA, 22 nt, Human
ugaaacaagggaccguccuuuc

SEQ ID NO: 568511 - RNA, 22 nt, Human
uacuguacauuccguuuguugc

SEQ ID NO: 568512 - RNA, 22 nt, Human
caauuucuuguuaauucucagg

SEQ ID NO: 568513 - RNA, 22 nt, Human
cuguaaaacacuguaguaucug

SEQ ID NO: 568514 - RNA, 22 nt, Human
uuauuuauucauucugucuguc

SEQ ID NO: 568515 - RNA, 22 nt, Human
ggagagcugguagcuggcucca

SEQ ID NO: 568516 - RNA, 22 nt, Human
ccagucuggcaggagggggaac

SEQ ID NO: 568517 - RNA, 22 nt, Human
aacuguaaagguugagugguaa

SEQ ID NO: 568518 - RNA, 18 nt, Human
acauuucuaugcuucugg

SEQ ID NO: 568519 - RNA, 22 nt, Human
cugggcaggagggcucuaugga

SEQ ID NO: 568520 - RNA, 22 nt, Human
cugagggagggacuuugagacu

SEQ ID NO: 568521 - RNA, 22 nt, Human
caguauuuucaggauuuggaag

SEQ ID NO: 568522 - RNA, 22 nt, Human
uuuauauagagauuugugcaug

SEQ ID NO: 568523 - RNA, 22 nt, Human
gacaagacaccucucuccaucc

SEQ ID NO: 568524 - RNA, 22 nt, Human
aauguuacgaucaacaacacau

SEQ ID NO: 568525 - RNA, 22 nt, Human
acuguacaaauauugcaaaaua

SEQ ID NO: 568526 - RNA, 22 nt, Human
ccuguacauuagcugugaauug

SEQ ID NO: 568527 - RNA, 22 nt, Human
gcugugagcugccugugucaca

SEQ ID NO: 568528 - RNA, 18 nt, Human
acauuucuaggugaaagc

SEQ ID NO: 568529 - RNA, 22 nt, Human
aggcagagagcaguggccgucu

SEQ ID NO: 568530 - RNA, 22 nt, Human
cugcuuccaugcaauggcaguc

SEQ ID NO: 568531 - RNA, 22 nt, Human
acacuguagcugagggcaugcg

SEQ ID NO: 568532 - RNA, 22 nt, Human
cucaggagacaguguccacaug

SEQ ID NO: 568533 - RNA, 22 nt, Human
aaaguucagugccuucuauaca

SEQ ID NO: 568534 - RNA, 22 nt, Human
uucugucucccugauguagagc

SEQ ID NO: 568535 - RNA, 22 nt, Human
ugcagcugaggccagcuaugcc

SEQ ID NO: 568536 - RNA, 22 nt, Human
ucuguacaguaccagauaguaa

SEQ ID NO: 568537 - RNA, 22 nt, Human
cugcuuccauggucuggagacu

SEQ ID NO: 568538 - RNA, 22 nt, Human
ucagaaugaaauuucuuucaga

SEQ ID NO: 568539 - RNA, 22 nt, Human
acaagauuuuaugacucuuuuu

SEQ ID NO: 568540 - RNA, 22 nt, Human
uaaucacagaaacagacuguuu

SEQ ID NO: 568541 - RNA, 22 nt, Human
cagcugagcaucacuagucugg

SEQ ID NO: 568542 - RNA, 19 nt, Human
ugaaacaaacuuaaaagga

SEQ ID NO: 568543 - RNA, 22 nt, Human
agacuguagggauagaggucuu

SEQ ID NO: 568544 - RNA, 22 nt, Human
ucugaaauguucucuuguuuug

SEQ ID NO: 568545 - RNA, 22 nt, Human
cacaagacuuauuuguguagaa

SEQ ID NO: 568546 - RNA, 22 nt, Human
caaaacugucuagagagagaag

SEQ ID NO: 568547 - RNA, 22 nt, Human
uagcauuucacugaucuucacu

SEQ ID NO: 568548 - RNA, 22 nt, Human
gguuccacgguguuuggaggca

SEQ ID NO: 568549 - RNA, 22 nt, Human
cuauuacaauucugcaaggagu

SEQ ID NO: 568550 - RNA, 22 nt, Human
gcaaaaaccacaauuacuuuug

SEQ ID NO: 568551 - RNA, 22 nt, Human
guuauauauaguauuucucuga

SEQ ID NO: 568552 - RNA, 22 nt, Human
uucuaguucauauucucaaaga

SEQ ID NO: 568553 - RNA, 22 nt, Human
aacuguaauuuuuacauaguaa

SEQ ID NO: 568554 - RNA, 22 nt, Human
auggcagaauuaggauuucaag

SEQ ID NO: 568555 - RNA, 22 nt, Human
uucuaguuuucaguccaccagg

SEQ ID NO: 568556 - RNA, 22 nt, Human
cuggaauguagagacagcuuag

SEQ ID NO: 568557 - RNA, 22 nt, Human
gguuugguuuuggccaucuucc

SEQ ID NO: 568558 - RNA, 17 nt, Human
ccugucuuguuucugcc

SEQ ID NO: 568559 - RNA, 22 nt, Human
uucuaccagcuacucacugaua

SEQ ID NO: 568560 - RNA, 22 nt, Human
auuuuuuagaaccuggccugau

SEQ ID NO: 568561 - RNA, 22 nt, Human
caggaaugacccaacaguuuca

SEQ ID NO: 568562 - RNA, 22 nt, Human
ucauuucuaucuaugcagcuuc

SEQ ID NO: 568563 - RNA, 22 nt, Human
cagguccuggcaucaggcaggu

SEQ ID NO: 568564 - RNA, 22 nt, Human
acagauccugguuacagccauu

SEQ ID NO: 568565 - RNA, 22 nt, Human
gacuguacgucauugaaggcca

SEQ ID NO: 568566 - RNA, 22 nt, Human
aaacuguaaagcaggugaguag

SEQ ID NO: 568567 - RNA, 22 nt, Human
uuaguaauguguuaauaugaau

SEQ ID NO: 568568 - RNA, 22 nt, Human
cuacagguaugugcaugacauc

SEQ ID NO: 568569 - RNA, 22 nt, Human
aacacuguggucuuuucaguaa

SEQ ID NO: 568570 - RNA, 22 nt, Human
gaacauuuccagaaaggaacua

SEQ ID NO: 568571 - RNA, 22 nt, Human
aguuucuagccucacuguuuag

SEQ ID NO: 568572 - RNA, 22 nt, Human
ugcucagugagucugugacagg

SEQ ID NO: 568573 - RNA, 22 nt, Human
ccuguacuagggucucauugcc

SEQ ID NO: 568574 - RNA, 20 nt, Human
aggcagagcgcacuuuuaga

SEQ ID NO: 568575 - RNA, 22 nt, Human
uucugaaaggcagguuguuugc

SEQ ID NO: 568576 - RNA, 23 nt, Human
uugcuuagagaccuccucaucag

SEQ ID NO: 568577 - RNA, 22 nt, Human
ccuguacaagcucuuggugaca

SEQ ID NO: 568578 - RNA, 19 nt, Human
ggcagacacaguugacaug

SEQ ID NO: 568579 - RNA, 19 nt, Human
cucuccagcuccaguagcu

SEQ ID NO: 568580 - RNA, 22 nt, Human
auaauacaugguugaucuuuuc

SEQ ID NO: 568581 - RNA, 22 nt, Human
acuuuggguaagccaggugcua

SEQ ID NO: 568582 - RNA, 22 nt, Human
uuagaucuuaggcaaauguguu

SEQ ID NO: 568583 - RNA, 22 nt, Human
gcuguacaggguuauccuuucc

SEQ ID NO: 568584 - RNA, 22 nt, Human
cugucugucaccaaaacagacu

SEQ ID NO: 568585 - RNA, 20 nt, Human
gucuccacuggggguuaacc

SEQ ID NO: 568586 - RNA, 22 nt, Human
aacacuguacuggaagauggac

SEQ ID NO: 568587 - RNA, 20 nt, Human
gugcaauggcucagucucag

SEQ ID NO: 568588 - RNA, 22 nt, Human
ucuaccacuuauuagcucugug

SEQ ID NO: 568589 - RNA, 22 nt, Human
gaaagacauaguugcaagaugg

SEQ ID NO: 568590 - RNA, 21 nt, Human
acagcagagaucaagacuaag

SEQ ID NO: 568591 - RNA, 22 nt, Human
gcaaaaacugcaauuacuuuug

SEQ ID NO: 568592 - RNA, 22 nt, Human
uucuaccauugggaaaacagcc

SEQ ID NO: 568593 - RNA, 22 nt, Human
gaaauugucagcuucuuucagu

SEQ ID NO: 568594 - RNA, 22 nt, Human
uucuaguucccacauaguugcc

SEQ ID NO: 568595 - RNA, 22 nt, Human
augaaacaaaccucuauggagu

SEQ ID NO: 568596 - RNA, 22 nt, Human
caguuccuaugggcaaaacaca

SEQ ID NO: 568597 - RNA, 22 nt, Human
ggcaggaggaagaguuagcacc

SEQ ID NO: 568598 - RNA, 22 nt, Human
uugacaaaggaccuugcuauuu

SEQ ID NO: 568599 - RNA, 22 nt, Human
ucugucuuagcaucuuugcuca

SEQ ID NO: 568600 - RNA, 22 nt, Human
uucuacuuuagcaugcucauuc

SEQ ID NO: 568601 - RNA, 22 nt, Human
aaacucuuccuuucuuuaaagu

SEQ ID NO: 568602 - RNA, 22 nt, Human
uucuggaaguguuagaaucugg

SEQ ID NO: 568603 - RNA, 22 nt, Human
caguccugagccaaucaugaug

SEQ ID NO: 568604 - RNA, 22 nt, Human
auguaacauugaauuauauagu

SEQ ID NO: 568605 - RNA, 22 nt, Human
cuccagcuucccucagcugugg

SEQ ID NO: 568606 - RNA, 22 nt, Human
cugagcugacaucuuccucuuu

SEQ ID NO: 568607 - RNA, 22 nt, Human
uacaagaugacaggugcaugau

SEQ ID NO: 568608 - RNA, 22 nt, Human
caguucuaauuaauaggaguaa

SEQ ID NO: 568609 - RNA, 22 nt, Human
aagacuguaugagacaauauaa

SEQ ID NO: 568610 - RNA, 22 nt, Human
gaacaaacacaucccagcagug

SEQ ID NO: 568611 - RNA, 22 nt, Human
uaaggaaaguacauguuuugac

SEQ ID NO: 568612 - RNA, 22 nt, Human
ugaaacaaaccaguaauuuugu

SEQ ID NO: 568613 - RNA, 22 nt, Human
uaaaacugcuugguauggucua

SEQ ID NO: 568614 - RNA, 22 nt, Human
auacaagacucagcacagacgg

SEQ ID NO: 568615 - RNA, 22 nt, Human
cacuguacccauuuaaauaaau

SEQ ID NO: 568616 - RNA, 22 nt, Human
uggcacauagcagguacucagu

SEQ ID NO: 568617 - RNA, 22 nt, Human
cagucucugugccagauccugg

SEQ ID NO: 568618 - RNA, 22 nt, Human
acuuugcugcagguuuaaagag

SEQ ID NO: 568619 - RNA, 22 nt, Human
ucauuucuauugcuacugucug

SEQ ID NO: 568620 - RNA, 22 nt, Human
ucauuucucugagucugauaau

SEQ ID NO: 568621 - RNA, 23 nt, Human
aaauauucuuuuuuaguaagugc

SEQ ID NO: 568622 - RNA, 22 nt, Human
gcuguacauucuguggguuugg

SEQ ID NO: 568623 - RNA, 22 nt, Human
uauuucuauuccccaggcaagu

SEQ ID NO: 568624 - RNA, 22 nt, Human
acuaaaaacuacugccaauagc

SEQ ID NO: 568625 - RNA, 22 nt, Human
aaagucaaugauuucuccugga

SEQ ID NO: 568626 - RNA, 22 nt, Human
auuaaacaauguaaaguucuug

SEQ ID NO: 568627 - RNA, 22 nt, Human
aaauuuucucucuaagacuuaa

SEQ ID NO: 568628 - RNA, 22 nt, Human
uuucuauugaucuaauaaacau

SEQ ID NO: 568629 - RNA, 22 nt, Human
ugaaacaaauuuggaaaaucua

SEQ ID NO: 568630 - RNA, 22 nt, Human
aacaaguaaguuuauauauauu

SEQ ID NO: 568631 - RNA, 22 nt, Human
acuguacaugcaucuugucuau

SEQ ID NO: 568632 - RNA, 22 nt, Human
acuuuuaugauaaucaauguuc

SEQ ID NO: 568633 - RNA, 22 nt, Human
aagcaauucacaguucacuuaa

SEQ ID NO: 568634 - RNA, 22 nt, Human
ugacauuugagagagauauaca

SEQ ID NO: 568635 - RNA, 22 nt, Human
ucauccagccucaucaggagcu

SEQ ID NO: 568636 - RNA, 22 nt, Human
auguaacauaugugaucgcauu

SEQ ID NO: 568637 - RNA, 22 nt, Human
uuuggaaaugagaagccaccuu

SEQ ID NO: 568638 - RNA, 20 nt, Human
gcugugccaugacccucgag

SEQ ID NO: 568639 - RNA, 22 nt, Human
uugcaggguugacacugccugc

SEQ ID NO: 568640 - RNA, 22 nt, Human
gaaugcacacgugugugcaugc

SEQ ID NO: 568641 - RNA, 22 nt, Human
uaauccaaaacugaaucugugg

SEQ ID NO: 568642 - RNA, 22 nt, Human
acucgcggcggacggcggccag

SEQ ID NO: 568643 - RNA, 20 nt, Human
caucaacaccuugucagccu

SEQ ID NO: 568644 - RNA, 22 nt, Human
aauuauguuugcuuuagaugga

SEQ ID NO: 568645 - RNA, 22 nt, Human
auguuuguguuucccauucagg

SEQ ID NO: 568646 - RNA, 22 nt, Human
ccucucauagucuguauccuuu

SEQ ID NO: 568647 - RNA, 22 nt, Human
gaguaauuuucuuaaaacauca

SEQ ID NO: 568648 - RNA, 22 nt, Human
auacagaagaccccuccgucau

SEQ ID NO: 568649 - RNA, 22 nt, Human
ugcccacaggaagacaccagcg

SEQ ID NO: 568650 - RNA, 22 nt, Human
cauugcuuugugcauauuuaaa

SEQ ID NO: 568651 - RNA, 22 nt, Human
ugugagauuuuauuugauaugc

SEQ ID NO: 568652 - RNA, 22 nt, Human
auggcuucugucuuggaaauuu

SEQ ID NO: 568653 - RNA, 22 nt, Human
gaggagagaagcuaacggugcu

SEQ ID NO: 568654 - RNA, 22 nt, Human
cccgaccucgcaaagcgcacuc

SEQ ID NO: 568655 - RNA, 22 nt, Human
cugcagaugguauuguucuggu

SEQ ID NO: 568656 - RNA, 22 nt, Human
accagaagcuggagcacaagga

SEQ ID NO: 568657 - RNA, 22 nt, Human
caagcagauauuuuagucaaga

SEQ ID NO: 568658 - RNA, 22 nt, Human
cauccauagauugagagauggu

SEQ ID NO: 568659 - RNA, 22 nt, Human
uuauuuaaaauguagguuggga

SEQ ID NO: 568660 - RNA, 22 nt, Human
aucugucccuccucacagccuc

SEQ ID NO: 568661 - RNA, 22 nt, Human
uggcauuuuguagcuguguauc

SEQ ID NO: 568662 - RNA, 23 nt, Human
ugagagccuggcagccuggguuc

SEQ ID NO: 568663 - RNA, 22 nt, Human
uuugugcaagagggccaccuua

SEQ ID NO: 568664 - RNA, 22 nt, Human
cagccggaccugagggauuccu

SEQ ID NO: 568665 - RNA, 19 nt, Human
ucucccaugccugugucua

SEQ ID NO: 568666 - RNA, 22 nt, Human
ucuguccauucagaauggcccu

SEQ ID NO: 568667 - RNA, 22 nt, Human
ggcuguggucauuaggagguug

SEQ ID NO: 568668 - RNA, 22 nt, Human
acaggacagucuaguaacagua

SEQ ID NO: 568669 - RNA, 22 nt, Human
gaugugugugcccugggccugc

SEQ ID NO: 568670 - RNA, 22 nt, Human
ucugagagccacugaacagcaa

SEQ ID NO: 568671 - RNA, 22 nt, Human
agagcgagucuggggcucggau

SEQ ID NO: 568672 - RNA, 22 nt, Human
augaggagucaaggagucggag

SEQ ID NO: 568673 - RNA, 22 nt, Human
gaaggaagcugucuggaugugu

SEQ ID NO: 568674 - RNA, 22 nt, Human
uuaaguauauccauuugacugg

SEQ ID NO: 568675 - RNA, 22 nt, Human
aucaucaucuaaauugugucgc

SEQ ID NO: 568676 - RNA, 22 nt, Human
uacuuugagaugaugcugaucg

SEQ ID NO: 568677 - RNA, 22 nt, Human
cuagagaaaaagcuuagguacg

SEQ ID NO: 568678 - RNA, 22 nt, Human
ccugugucaucagcuguggcua

SEQ ID NO: 568679 - RNA, 22 nt, Human
gcagaggggaagcugaggaauu

SEQ ID NO: 568680 - RNA, 22 nt, Human
uuugcagagugcagaagcaucu

SEQ ID NO: 568681 - RNA, 22 nt, Human
uaaaccuuauuugaauaccaac

SEQ ID NO: 568682 - RNA, 22 nt, Human
cuaguuuuaagcuccuugaggu

SEQ ID NO: 568683 - RNA, 21 nt, Human
gcaaccagaccacagggcagu

SEQ ID NO: 568684 - RNA, 22 nt, Human
augauugaaaaugacauugcca

SEQ ID NO: 568685 - RNA, 22 nt, Human
cagagcagcagagcuuccaugg

SEQ ID NO: 568686 - RNA, 22 nt, Human
gcggggacagaaggcgguucuc

SEQ ID NO: 568687 - RNA, 22 nt, Human
uuagacagagcuccuugagggc

SEQ ID NO: 568688 - RNA, 22 nt, Human
aaaucccacucacgaguuuugc

SEQ ID NO: 568689 - RNA, 20 nt, Human
gaacagucuucugagccaca

SEQ ID NO: 568690 - RNA, 22 nt, Human
uacugcugagcuggguagaagg

SEQ ID NO: 568691 - RNA, 22 nt, Human
aggacaaaggaccagaucugga

SEQ ID NO: 568692 - RNA, 22 nt, Human
auucagaaauagaaaauuugau

SEQ ID NO: 568693 - RNA, 22 nt, Human
auccauuuuuucagaaugcucu

SEQ ID NO: 568694 - RNA, 22 nt, Human
augauuuguuaacagacuuaau

SEQ ID NO: 568695 - RNA, 22 nt, Human
uucaguuuugcuuuuaaucaug

SEQ ID NO: 568696 - RNA, 22 nt, Human
uguuccucugaacuucuuccaa

SEQ ID NO: 568697 - RNA, 21 nt, Human
cugugauguugccgggguagg

SEQ ID NO: 568698 - RNA, 22 nt, Human
uuguacacacaggaacaaacgu

SEQ ID NO: 568699 - RNA, 22 nt, Human
acagacacaggcguggagucgc

SEQ ID NO: 568700 - RNA, 22 nt, Human
gagaugugucagguccuggggg

SEQ ID NO: 568701 - RNA, 22 nt, Human
cagaguccugcaccagcuccag

SEQ ID NO: 568702 - RNA, 22 nt, Human
agacagcacuuuuguauggggg

SEQ ID NO: 568703 - RNA, 22 nt, Human
uugaacaguccuaagagacccu

SEQ ID NO: 568704 - RNA, 22 nt, Human
cagaggaccauuguauguauug

SEQ ID NO: 568705 - RNA, 22 nt, Human
gaaauguuggacacuugaaauu

SEQ ID NO: 568706 - RNA, 22 nt, Human
uucucuucacagggaucauccu

SEQ ID NO: 568707 - RNA, 22 nt, Human
gggagggcuuggacccagaugu

SEQ ID NO: 568708 - RNA, 22 nt, Human
gucuguccacuuggaagcuccc

SEQ ID NO: 568709 - RNA, 22 nt, Human
ccugucugaaggcagggggaug

SEQ ID NO: 568710 - RNA, 22 nt, Human
agcaggaggagagccuggcggu

SEQ ID NO: 568711 - RNA, 22 nt, Human
ugucuagaaaugcugagucuca

SEQ ID NO: 568712 - RNA, 22 nt, Human
gaaacauuuguugaguacuugc

SEQ ID NO: 568713 - RNA, 20 nt, Human
ggucacuguggcugcaggau

SEQ ID NO: 568714 - RNA, 22 nt, Human
caugugaauuccaaagcuaggu

SEQ ID NO: 568715 - RNA, 22 nt, Human
aggcaguggcuuuuguuguguu

SEQ ID NO: 568716 - RNA, 22 nt, Human
aucacuagaguuacauugccag

SEQ ID NO: 568717 - RNA, 20 nt, Human
aaaaacaguaaugcugaaga

SEQ ID NO: 568718 - RNA, 22 nt, Human
uggcggugacggcggcgccugg

SEQ ID NO: 568719 - RNA, 22 nt, Human
cugacagcgagagaguugcccc

SEQ ID NO: 568720 - RNA, 22 nt, Human
ccacuguuuccuuucugcuggc

SEQ ID NO: 568721 - RNA, 23 nt, Human
cagcacaguacauuuccugucuc

SEQ ID NO: 568722 - RNA, 22 nt, Human
gcagagcacccugcagugguau

SEQ ID NO: 568723 - RNA, 22 nt, Human
ucugagugggaacucucaugac

SEQ ID NO: 568724 - RNA, 22 nt, Human
agagcagaggcauggccguggg

SEQ ID NO: 568725 - RNA, 22 nt, Human
uuccuuuucuucuaccacaugu

SEQ ID NO: 568726 - RNA, 22 nt, Human
auugucgucaauggacacauag

SEQ ID NO: 568727 - RNA, 22 nt, Human
aaacccaggguuuugucuuccc

SEQ ID NO: 568728 - RNA, 22 nt, Human
aaucuguuuuaaaguuugugcc

SEQ ID NO: 568729 - RNA, 22 nt, Human
cuccacagccccuccaguggca

SEQ ID NO: 568730 - RNA, 22 nt, Human
ggcagcaggguagccauuucuc

SEQ ID NO: 568731 - RNA, 19 nt, Human
ugcucucuggugcuucaug

SEQ ID NO: 568732 - RNA, 22 nt, Human
uguagggaggaaggguuggaaa

SEQ ID NO: 568733 - RNA, 22 nt, Human
guuugagauggguuauugcucu

SEQ ID NO: 568734 - RNA, 22 nt, Human
ucuuuuccuugaugguuaaaua

SEQ ID NO: 568735 - RNA, 22 nt, Human
ugcucagaauugcgcuggugga

SEQ ID NO: 568736 - RNA, 22 nt, Human
uuagaaaaaggcuguggucuua

SEQ ID NO: 568737 - RNA, 22 nt, Human
gugggaguggagcucagcaugu

SEQ ID NO: 568738 - RNA, 22 nt, Human
agcacguucuucauuacuucac

SEQ ID NO: 568739 - RNA, 22 nt, Human
uuacaauuacuugaucucagcu

SEQ ID NO: 568740 - RNA, 22 nt, Human
agacacuguguacagaaaaaga

SEQ ID NO: 568741 - RNA, 22 nt, Human
ucucugguuauuaacuaacucc

SEQ ID NO: 568742 - RNA, 22 nt, Human
ccaggcuccccaggaggcccuu

SEQ ID NO: 568743 - RNA, 22 nt, Human
ggcagaggagcuggaaacaugg

SEQ ID NO: 568744 - RNA, 22 nt, Human
gcucagguagaugggguugucc

SEQ ID NO: 568745 - RNA, 22 nt, Human
ugcuugucacccugccugagug

SEQ ID NO: 568746 - RNA, 22 nt, Human
ggccuugggauguggcugcagc

SEQ ID NO: 568747 - RNA, 22 nt, Human
ccaaggcuggagggcuuaugua

SEQ ID NO: 568748 - RNA, 22 nt, Human
aagcagaaaaacugagcuccaa

SEQ ID NO: 568749 - RNA, 22 nt, Human
caauguuuuuccuuccuuaaua

SEQ ID NO: 568750 - RNA, 22 nt, Human
gcggggccauguccaacggccu

SEQ ID NO: 568751 - RNA, 22 nt, Human
ccuccugggccuugcucuguga

SEQ ID NO: 568752 - RNA, 19 nt, Human
gggaaugauggaagacuuc

SEQ ID NO: 568753 - RNA, 22 nt, Human
gcagggaaguuguaauguaaug

SEQ ID NO: 568754 - RNA, 22 nt, Human
caagccaggaaggauccagcac

SEQ ID NO: 568755 - RNA, 20 nt, Human
cuuguuaaauaugcagguag

SEQ ID NO: 568756 - RNA, 22 nt, Human
gcgagucgccgcugcagcccua

SEQ ID NO: 568757 - RNA, 22 nt, Human
gcccuguguguuugcacugauu

SEQ ID NO: 568758 - RNA, 22 nt, Human
ugccuggauggcucugagcagg

SEQ ID NO: 568759 - RNA, 22 nt, Human
uuucuacauuuguaaccagauu

SEQ ID NO: 568760 - RNA, 22 nt, Human
agugcuuuauguuguugugcaa

SEQ ID NO: 568761 - RNA, 22 nt, Human
auucaugcaggauugucuccaa

SEQ ID NO: 568762 - RNA, 19 nt, Human
ugcagcuguaugagcuuaa

SEQ ID NO: 568763 - RNA, 22 nt, Human
guggcauuugggagaugcgugg

SEQ ID NO: 568764 - RNA, 23 nt, Human
ugaaagcaaugggucuauaguau

SEQ ID NO: 568765 - RNA, 22 nt, Human
ucuucacaguccuggucagugg

SEQ ID NO: 568766 - RNA, 22 nt, Human
uaacuucucugagccucauucc

SEQ ID NO: 568767 - RNA, 22 nt, Human
cagagaauaaaagggcauuccu

SEQ ID NO: 568768 - RNA, 22 nt, Human
gcucgguggccagccugaggcc

SEQ ID NO: 568769 - RNA, 22 nt, Human
ucagagccccuccgcuguccca

SEQ ID NO: 568770 - RNA, 22 nt, Human
ugcacauggccugagugccuga

SEQ ID NO: 568771 - RNA, 22 nt, Human
caaauguuugguggcauuuugu

SEQ ID NO: 568772 - RNA, 22 nt, Human
gauggaggagauggcagggugc

SEQ ID NO: 568773 - RNA, 22 nt, Human
ucuccccaguauggauucucug

SEQ ID NO: 568774 - RNA, 22 nt, Human
uaaagcaaugaaaguuuugcag

SEQ ID NO: 568775 - RNA, 22 nt, Human
uuucucagccuccuugcuggag

SEQ ID NO: 568776 - RNA, 22 nt, Human
gagcugcuggccuccugcggga

SEQ ID NO: 568777 - RNA, 22 nt, Human
aacagauuguaaccugauagcc

SEQ ID NO: 568778 - RNA, 22 nt, Human
ugcacacaguucucaggaaaga

SEQ ID NO: 568779 - RNA, 22 nt, Human
ggacagacuuuacagccccggg

SEQ ID NO: 568780 - RNA, 22 nt, Human
uguuugcucugacuaucuugcg

SEQ ID NO: 568781 - RNA, 22 nt, Human
ucauuuacacuucacaaaugga

SEQ ID NO: 568782 - RNA, 22 nt, Human
cuuuacagauggauaauuguuu

SEQ ID NO: 568783 - RNA, 20 nt, Human
gcuccccuucucugggccuc

SEQ ID NO: 568784 - RNA, 22 nt, Human
cccugacccuaucagagggcca

SEQ ID NO: 568785 - RNA, 22 nt, Human
aagcauuucagguagagauauu

SEQ ID NO: 568786 - RNA, 22 nt, Human
ucguuagccucgagaucuuugu

SEQ ID NO: 568787 - RNA, 22 nt, Human
acauuuaaugauccuacuguga

SEQ ID NO: 568788 - RNA, 22 nt, Human
agaaaucugacugcugugcaca

SEQ ID NO: 568789 - RNA, 22 nt, Human
uccuucagaggacggcagccag

SEQ ID NO: 568790 - RNA, 22 nt, Human
ggggugaagguuuucugaaagc

SEQ ID NO: 568791 - RNA, 22 nt, Human
uaucauuuuacugugacauuuu

SEQ ID NO: 568792 - RNA, 22 nt, Human
gaaacacucaauuuaguaauuc

SEQ ID NO: 568793 - RNA, 22 nt, Human
gaagaaguguaagucuguuuca

SEQ ID NO: 568794 - RNA, 22 nt, Human
gcuuggccagcagccgggaugc

SEQ ID NO: 568795 - RNA, 21 nt, Human
uaagcuaaacauucaguuaac

SEQ ID NO: 568796 - RNA, 22 nt, Human
uaguggggaaggaggacaagaa

SEQ ID NO: 568797 - RNA, 22 nt, Human
auguucaaguaccuuugugucu

SEQ ID NO: 568798 - RNA, 22 nt, Human
aauguuaaguuuagauuauaac

SEQ ID NO: 568799 - RNA, 22 nt, Human
uuuacuuuugguaaggucauuu

SEQ ID NO: 568800 - RNA, 22 nt, Human
cagcuauuguucuguauaauga

SEQ ID NO: 568801 - RNA, 22 nt, Human
aucaugugacuagguuuggcca

SEQ ID NO: 568802 - RNA, 22 nt, Human
cucaucuggcuucaguaacagu

SEQ ID NO: 568803 - RNA, 22 nt, Human
auucuugauauagauaguuaau

SEQ ID NO: 568804 - RNA, 22 nt, Human
cucucagugccugcccuaggcu

SEQ ID NO: 568805 - RNA, 22 nt, Human
uuuacaaggcaguuauuuuccu

SEQ ID NO: 568806 - RNA, 22 nt, Human
cccacugcaugaguugguauua

SEQ ID NO: 568807 - RNA, 22 nt, Human
gccuggggaacuugauccuguc

SEQ ID NO: 568808 - RNA, 22 nt, Human
ccugcagacacuuguccagcaa

SEQ ID NO: 568809 - RNA, 22 nt, Human
uuauuuaaaagugguaagauuc

SEQ ID NO: 568810 - RNA, 17 nt, Human
gcguguccccgcgucuc

SEQ ID NO: 568811 - RNA, 22 nt, Human
aggaagagcuggaccagaggac

SEQ ID NO: 568812 - RNA, 22 nt, Human
aaucuguugucaggaauccaca

SEQ ID NO: 568813 - RNA, 22 nt, Human
aucauugaguaaaaugaauaca

SEQ ID NO: 568814 - RNA, 22 nt, Human
acaugcuuucuagguccuucug

SEQ ID NO: 568815 - RNA, 22 nt, Human
aagggaaacuuucacaaugucc

SEQ ID NO: 568816 - RNA, 22 nt, Human
ugugucuuuggcgaugucugga

SEQ ID NO: 568817 - RNA, 22 nt, Human
cgcagcugcugcucugaaacag

SEQ ID NO: 568818 - RNA, 22 nt, Human
ugaagcuagaauguccauauuu

SEQ ID NO: 568819 - RNA, 22 nt, Human
ugcagcugccuagggcuggcuu

SEQ ID NO: 568820 - RNA, 18 nt, Human
guagauccuugagcuacc

SEQ ID NO: 568821 - RNA, 22 nt, Human
caggaacagcaccaggagcuag

SEQ ID NO: 568822 - RNA, 22 nt, Human
aaauugcaaaaguacuuuuagg

SEQ ID NO: 568823 - RNA, 22 nt, Human
uauaagaaacaaggcaaauuuu

SEQ ID NO: 568824 - RNA, 22 nt, Human
gccggacugcugcagcugcuag

SEQ ID NO: 568825 - RNA, 22 nt, Human
aaagucuuaauguaaguuuagu

SEQ ID NO: 568826 - RNA, 22 nt, Human
ucccgggcaggucgagcgagcc

SEQ ID NO: 568827 - RNA, 22 nt, Human
gagcuguucugugauugaucua

SEQ ID NO: 568828 - RNA, 22 nt, Human
aggcagaugggagcuggaaguu

SEQ ID NO: 568829 - RNA, 22 nt, Human
uuaagguucagaaaucaauacc

SEQ ID NO: 568830 - RNA, 22 nt, Human
ugugacagugccagcuucauag

SEQ ID NO: 568831 - RNA, 22 nt, Human
ccacuguuggcccgaagggguc

SEQ ID NO: 568832 - RNA, 23 nt, Human
uuguucuuggaucuuccugaagc

SEQ ID NO: 568833 - RNA, 19 nt, Human
acacaccagugccugugac

SEQ ID NO: 568834 - RNA, 20 nt, Human
agugauuuguuaguacauug

SEQ ID NO: 568835 - RNA, 22 nt, Human
ucaucuccauacggucucgcag

SEQ ID NO: 568836 - RNA, 22 nt, Human
agugaaauaugcccauugcugu

SEQ ID NO: 568837 - RNA, 22 nt, Human
uucagaaagugaaucuuguuau

SEQ ID NO: 568838 - RNA, 22 nt, Human
accaaucuccuauuuuguuuca

SEQ ID NO: 568839 - RNA, 22 nt, Human
cggagccugcuuguugcagcug

SEQ ID NO: 568840 - RNA, 22 nt, Human
cagaaacacuguauuuagggaa

SEQ ID NO: 568841 - RNA, 22 nt, Human
gauacuugaggagaucaccaca

SEQ ID NO: 568842 - RNA, 22 nt, Human
ggucccugcccaaagcccuugg

SEQ ID NO: 568843 - RNA, 22 nt, Human
cucaugucggcaggacucgccc

SEQ ID NO: 568844 - RNA, 22 nt, Human
auagucuuagaaucuugagugu

SEQ ID NO: 568845 - RNA, 22 nt, Human
uuuacgaauggggugacaacuu

SEQ ID NO: 568846 - RNA, 22 nt, Human
gggagagcgcgcuagggccgag

SEQ ID NO: 568847 - RNA, 22 nt, Human
gagcaacacauugaaugaggau

SEQ ID NO: 568848 - RNA, 22 nt, Human
cccguguggaugcgcuggugcu

SEQ ID NO: 568849 - RNA, 22 nt, Human
agugagaguauuaaugugaacu

SEQ ID NO: 568850 - RNA, 22 nt, Human
uugaguuuccugacagcgaagg

SEQ ID NO: 568851 - RNA, 22 nt, Human
gcagcuuuggagguggaacucu

SEQ ID NO: 568852 - RNA, 23 nt, Human
uuaacaggaucucgggcaagagg

SEQ ID NO: 568853 - RNA, 23 nt, Human
uagauccuuccaacuacucuuac

SEQ ID NO: 568854 - RNA, 22 nt, Human
cagcucugguuccugggcccag

SEQ ID NO: 568855 - RNA, 22 nt, Human
ugaaaacacuuuaguuuagguc

SEQ ID NO: 568856 - RNA, 22 nt, Human
cuacauuauguuuauugggacu

SEQ ID NO: 568857 - RNA, 22 nt, Human
gucaucaucaggcagaugcugc

SEQ ID NO: 568858 - RNA, 22 nt, Human
gaucucaaagcaguguggguug

SEQ ID NO: 568859 - RNA, 22 nt, Human
agucauguguucaucuuucauu

SEQ ID NO: 568860 - RNA, 22 nt, Human
gggagcugaaggagccggcggg

SEQ ID NO: 568861 - RNA, 22 nt, Human
uccucagcaaacacuucacucu

SEQ ID NO: 568862 - RNA, 22 nt, Human
ccaccagaccaccaagagcaac

SEQ ID NO: 568863 - RNA, 22 nt, Human
gaaacuguauguaguuuuuggg

SEQ ID NO: 568864 - RNA, 22 nt, Human
gcaggggcugagcaccagcggg

SEQ ID NO: 568865 - RNA, 22 nt, Human
cucuguccugguuuauacuggc

SEQ ID NO: 568866 - RNA, 22 nt, Human
uuaguuuccuguggugugaagu

SEQ ID NO: 568867 - RNA, 22 nt, Human
auuuggcauaggcagaggccca

SEQ ID NO: 568868 - RNA, 22 nt, Human
uucucuaguuuugacgaggauu

SEQ ID NO: 568869 - RNA, 18 nt, Human
agguauaugaaucucuuu

SEQ ID NO: 568870 - RNA, 22 nt, Human
ccaagaggggaagggccgcagc

SEQ ID NO: 568871 - RNA, 22 nt, Human
cuggagcucuguguguuccuga

SEQ ID NO: 568872 - RNA, 22 nt, Human
auugaagacuugguauccgugg

SEQ ID NO: 568873 - RNA, 22 nt, Human
gcacagagagcagugggggaca

SEQ ID NO: 568874 - RNA, 22 nt, Human
uguuaccauaggucagaacguu

SEQ ID NO: 568875 - RNA, 22 nt, Human
uuauuccauagaagucaaggaa

SEQ ID NO: 568876 - RNA, 22 nt, Human
uuuuaauccucuugguaucuua

SEQ ID NO: 568877 - RNA, 22 nt, Human
uagcaggaggcaguuccucgcu

SEQ ID NO: 568878 - RNA, 22 nt, Human
gggagcugagcuggaagagaau

SEQ ID NO: 568879 - RNA, 22 nt, Human
uccuuggcaugccgucuucucc

SEQ ID NO: 568880 - RNA, 22 nt, Human
ucccuguccugggcaaucccag

SEQ ID NO: 568881 - RNA, 22 nt, Human
cuuugcuaauguugcauuuuca

SEQ ID NO: 568882 - RNA, 22 nt, Human
caggaugccuuugaacucugga

SEQ ID NO: 568883 - RNA, 20 nt, Human
aauagcacagcucaaacauu

SEQ ID NO: 568884 - RNA, 21 nt, Human
cuguccccagugagcaccccc

SEQ ID NO: 568885 - RNA, 22 nt, Human
ugcacagagggaggcauaaaau

SEQ ID NO: 568886 - RNA, 17 nt, Human
acuuguauugugcuuua

SEQ ID NO: 568887 - RNA, 22 nt, Human
ccugguccccaucggcccagcg

SEQ ID NO: 568888 - RNA, 22 nt, Human
cuucuccgacaaccgacgccgg

SEQ ID NO: 568889 - RNA, 22 nt, Human
aaugaacacuuagccuuucuau

SEQ ID NO: 568890 - RNA, 22 nt, Human
auaucuaggcugaauguaaaau

SEQ ID NO: 568891 - RNA, 22 nt, Human
agaauguaagaaugcaaagauu

SEQ ID NO: 568892 - RNA, 22 nt, Human
uggcuuccagaacugagcaaca

SEQ ID NO: 568893 - RNA, 22 nt, Human
agacuucucuaacuugaggacc

SEQ ID NO: 568894 - RNA, 22 nt, Human
cuguccagcgacuaggggaugg

SEQ ID NO: 568895 - RNA, 22 nt, Human
agcuuucuauauaugaguugcu

SEQ ID NO: 568896 - RNA, 22 nt, Human
auucuagaguuucaauccaagg

SEQ ID NO: 568897 - RNA, 22 nt, Human
uagcaucuguacugacauaauc

SEQ ID NO: 568898 - RNA, 22 nt, Human
cucuaaauguggucugcagaua

SEQ ID NO: 568899 - RNA, 22 nt, Human
uagcaggagagaaguuuuaagu

SEQ ID NO: 568900 - RNA, 22 nt, Human
cugagcagaagggugcacgugc

SEQ ID NO: 568901 - RNA, 22 nt, Human
uuuccaaagguggcaggaacaa

SEQ ID NO: 568902 - RNA, 17 nt, Human
aguuuuuggaccugugu

SEQ ID NO: 568903 - RNA, 22 nt, Human
auuauguagcuaaaaauugugu

SEQ ID NO: 568904 - RNA, 22 nt, Human
uccgcgcucucacccgcucccg

SEQ ID NO: 568905 - RNA, 22 nt, Human
gggaugagagcugggacagaag

SEQ ID NO: 568906 - RNA, 22 nt, Human
auggaguguggccaggcaguaa

SEQ ID NO: 568907 - RNA, 17 nt, Human
uaaguccuaguuauuuu

SEQ ID NO: 568908 - RNA, 22 nt, Human
uuacccagugaagccgaggcag

SEQ ID NO: 568909 - RNA, 22 nt, Human
gugcucuagaaauugucagugg

SEQ ID NO: 568910 - RNA, 18 nt, Human
auuugcaggcaugcaggc

SEQ ID NO: 568911 - RNA, 22 nt, Human
agauguuuauaacucaugagug

SEQ ID NO: 568912 - RNA, 22 nt, Human
auugcacaucugcacuacagcc

SEQ ID NO: 568913 - RNA, 22 nt, Human
guuuccuuuuggaauuagagcu

SEQ ID NO: 568914 - RNA, 22 nt, Human
uuauuuuguagcucugaucuuu

SEQ ID NO: 568915 - RNA, 22 nt, Human
gguggcagaggugcaucagccc

SEQ ID NO: 568916 - RNA, 22 nt, Human
agagaagagucuugucaaauua

SEQ ID NO: 568917 - RNA, 18 nt, Human
uauaaacacacuuagguu

SEQ ID NO: 568918 - RNA, 23 nt, Human
aucauagucuuugugacuggccc

SEQ ID NO: 568919 - RNA, 22 nt, Human
aagaaaagguaaccgcuuaucu

SEQ ID NO: 568920 - RNA, 22 nt, Human
agcaggggcaggguuuugugcu

SEQ ID NO: 568921 - RNA, 22 nt, Human
ucugaauucuuagaauuaaagg

SEQ ID NO: 568922 - RNA, 22 nt, Human
auucugcugccuaguuuaugaa

SEQ ID NO: 568923 - RNA, 22 nt, Human
cuccuuagugccucugcacgag

SEQ ID NO: 568924 - RNA, 22 nt, Human
cugguuuuuagugcuuaggagu

SEQ ID NO: 568925 - RNA, 22 nt, Human
cuugucugcuauaaaaauccag

SEQ ID NO: 568926 - RNA, 22 nt, Human
auacaugacucacacauucugc

SEQ ID NO: 568927 - RNA, 22 nt, Human
cuggagaggcugggaacagguu

SEQ ID NO: 568928 - RNA, 22 nt, Human
ugcaaauauuccaugcuguuca

SEQ ID NO: 568929 - RNA, 22 nt, Human
aguguauucugcaugggagacu

SEQ ID NO: 568930 - RNA, 22 nt, Human
uaagaaacauuuuuaugacagu

SEQ ID NO: 568931 - RNA, 20 nt, Human
aucggcuugccuggaaacaa

SEQ ID NO: 568932 - RNA, 22 nt, Human
ucugaaauuuuaguuauagaaa

SEQ ID NO: 568933 - RNA, 22 nt, Human
gcagccuccgcacugcgagucc

SEQ ID NO: 568934 - RNA, 22 nt, Human
uaucugucgggagucuuccgga

SEQ ID NO: 568935 - RNA, 17 nt, Human
gccuggcccagccuggc

SEQ ID NO: 568936 - RNA, 22 nt, Human
uuugaacuucuaccugucauau

SEQ ID NO: 568937 - RNA, 22 nt, Human
gagugcucgggccucugccugc

SEQ ID NO: 568938 - RNA, 22 nt, Human
uuggaaaugcauuuguuauuau

SEQ ID NO: 568939 - RNA, 22 nt, Human
aggggagccagggcugcgaguu

SEQ ID NO: 568940 - RNA, 22 nt, Human
cuagaaguuuggguccauuaag

SEQ ID NO: 568941 - RNA, 22 nt, Human
aacacauggcaagagcaggaaa

SEQ ID NO: 568942 - RNA, 22 nt, Human
gcgcuccucccggcccuggugg

SEQ ID NO: 568943 - RNA, 22 nt, Human
ugagauucuguucagaaaaaug

SEQ ID NO: 568944 - RNA, 22 nt, Human
aaaugcaugugcuauagaugug

SEQ ID NO: 568945 - RNA, 23 nt, Human
aacugcaagguugcugggaagua

SEQ ID NO: 568946 - RNA, 21 nt, Human
uuuguucaggggcaaaguuaa

SEQ ID NO: 568947 - RNA, 22 nt, Human
ggggagaguauuuuauucaagu

SEQ ID NO: 568948 - RNA, 22 nt, Human
cagcccuugcgacacccuggcu

SEQ ID NO: 568949 - RNA, 22 nt, Human
cagaguggugcaagggcagugu

SEQ ID NO: 568950 - RNA, 22 nt, Human
ccuguacuuguauuaaaggucc

SEQ ID NO: 568951 - RNA, 22 nt, Human
uaucuuugguagcuuuccuaag

SEQ ID NO: 568952 - RNA, 22 nt, Human
cgggaagguggagguugcagug

SEQ ID NO: 568953 - RNA, 22 nt, Human
cucaaaauccauaaaaucaggu

SEQ ID NO: 568954 - RNA, 22 nt, Human
caggccagcagggccuccgugg

SEQ ID NO: 568955 - RNA, 22 nt, Human
ugggaugggaucucgcuguguc

SEQ ID NO: 568956 - RNA, 22 nt, Human
uuuugguaauuaaguagauauu

SEQ ID NO: 568957 - RNA, 22 nt, Human
caggacccaaccucccugcucu

SEQ ID NO: 568958 - RNA, 22 nt, Human
cucagaguccauaguuuacagu

SEQ ID NO: 568959 - RNA, 22 nt, Human
auauaguuggguuucauucuac

SEQ ID NO: 568960 - RNA, 23 nt, Human
guguggccccagggccuccucgc

SEQ ID NO: 568961 - RNA, 22 nt, Human
uuuagcaaaaaagcucugcgua

SEQ ID NO: 568962 - RNA, 22 nt, Human
aauguuugaacuuugcauauuu

SEQ ID NO: 568963 - RNA, 22 nt, Human
uugcaaucagcaguguuuucac

SEQ ID NO: 568964 - RNA, 22 nt, Human
cugacucccaaagaggacgcgu

SEQ ID NO: 568965 - RNA, 22 nt, Human
gcggggggcagcagucgcucag

SEQ ID NO: 568966 - RNA, 22 nt, Human
guuuacaacaucuuguccuuca

SEQ ID NO: 568967 - RNA, 22 nt, Human
uggccugauuuugcuaagagaa

SEQ ID NO: 568968 - RNA, 22 nt, Human
cugcuguguggauucaauggcu

SEQ ID NO: 568969 - RNA, 22 nt, Human
acucccuugguggagaaugcaa

SEQ ID NO: 568970 - RNA, 22 nt, Human
ggaaccuuaguguucuuuuacc

SEQ ID NO: 568971 - RNA, 22 nt, Human
gaagcgugcagguccguauacu

SEQ ID NO: 568972 - RNA, 22 nt, Human
uauucauguguuggaaaggaac

SEQ ID NO: 568973 - RNA, 22 nt, Human
gcuucugcagagccguccugag

SEQ ID NO: 568974 - RNA, 23 nt, Human
agugaugucacccacagacaagg

SEQ ID NO: 568975 - RNA, 22 nt, Human
uucccuucuaguuuugagagac

SEQ ID NO: 568976 - RNA, 22 nt, Human
ggauguuuauccuaucuuaguu

SEQ ID NO: 568977 - RNA, 22 nt, Human
augaauuguccgauguugugca

SEQ ID NO: 568978 - RNA, 22 nt, Human
cugcacagccugucugggggcc

SEQ ID NO: 568979 - RNA, 22 nt, Human
aauguuacgaucaacaacacau

SEQ ID NO: 568980 - RNA, 20 nt, Human
auuugcuuaccuuguuucua

SEQ ID NO: 568981 - RNA, 22 nt, Human
ggcagguguggugaccagagau

SEQ ID NO: 568982 - RNA, 19 nt, Human
ugguggaggugcaccugac

SEQ ID NO: 568983 - RNA, 22 nt, Human
aguucacagcaaaguggggacc

SEQ ID NO: 568984 - RNA, 22 nt, Human
acagugcugaucuagacugacc

SEQ ID NO: 568985 - RNA, 22 nt, Human
uuaaaagaauccuguuauccuc

SEQ ID NO: 568986 - RNA, 22 nt, Human
uacucuggaguugagaugcgag

SEQ ID NO: 568987 - RNA, 22 nt, Human
guggauggagcuggaagccauu

SEQ ID NO: 568988 - RNA, 22 nt, Human
aaaucaugguggaagaaacaga

SEQ ID NO: 568989 - RNA, 22 nt, Human
uggaaggggccaggcgcggagu

SEQ ID NO: 568990 - RNA, 22 nt, Human
cuucagggguguuaguuuugug

SEQ ID NO: 568991 - RNA, 22 nt, Human
cggagaggugggggcagcaucu

SEQ ID NO: 568992 - RNA, 22 nt, Human
uaccuugugagcuuucuaacau

SEQ ID NO: 568993 - RNA, 22 nt, Human
uuacuguagcuugacauauguc

SEQ ID NO: 568994 - RNA, 22 nt, Human
aucauuuaguggggcauuggaa

SEQ ID NO: 568995 - RNA, 22 nt, Human
aaugcugugauuuauuaaguau

SEQ ID NO: 568996 - RNA, 22 nt, Human
ugcaaauucuuuacucugugau

SEQ ID NO: 568997 - RNA, 18 nt, Human
uacagcuugaguugacug

SEQ ID NO: 568998 - RNA, 22 nt, Human
uucaaacacugcuuugagaggg

SEQ ID NO: 568999 - RNA, 22 nt, Human
ugaaagcucugucaucauuccu

SEQ ID NO: 569000 - RNA, 20 nt, Human
uuacagaaaugauguuauuu

SEQ ID NO: 569001 - RNA, 22 nt, Human
agcugccgaugcccagcugcau

SEQ ID NO: 569002 - RNA, 22 nt, Human
agggaugcaguaaaaacuguag

SEQ ID NO: 569003 - RNA, 22 nt, Human
gccugaucagguccucggcaua

SEQ ID NO: 569004 - RNA, 23 nt, Human
ugacacccucauugugugucgca

SEQ ID NO: 569005 - RNA, 22 nt, Human
aagcacagggacucaggaccgg

SEQ ID NO: 569006 - RNA, 22 nt, Human
accuccuccaaggagccauagg

SEQ ID NO: 569007 - RNA, 22 nt, Human
ggaaacugcuuacacuagaggg

SEQ ID NO: 569008 - RNA, 22 nt, Human
caugucaagacugaagauccag

SEQ ID NO: 569009 - RNA, 17 nt, Human
agccugcugaucucaca

SEQ ID NO: 569010 - RNA, 22 nt, Human
cuugcuacuaugccuggcuaau

SEQ ID NO: 569011 - RNA, 22 nt, Human
cucuggcaauugcugcugacuc

SEQ ID NO: 569012 - RNA, 22 nt, Human
guuuccaagucucucaacaccc

SEQ ID NO: 569013 - RNA, 22 nt, Human
cuucauuaaugucuauaaguuu

SEQ ID NO: 569014 - RNA, 22 nt, Human
ggcucucuuaacuggccauccu

SEQ ID NO: 569015 - RNA, 18 nt, Human
aaacauggcuuaaaggcu

SEQ ID NO: 569016 - RNA, 22 nt, Human
cagacagagucuucccaucagu

SEQ ID NO: 569017 - RNA, 22 nt, Human
caucucccacuuccuugggggu

SEQ ID NO: 569018 - RNA, 22 nt, Human
uuccuuaguuauuugguccccu

SEQ ID NO: 569019 - RNA, 22 nt, Human
aacacuaaaggucaguuagaag

SEQ ID NO: 569020 - RNA, 22 nt, Human
cucccucaggccuuagcccugc

SEQ ID NO: 569021 - RNA, 22 nt, Human
caugaaaugauauuuggguggg

SEQ ID NO: 569022 - RNA, 21 nt, Human
cugcacugugauuuaaaaugu

SEQ ID NO: 569023 - RNA, 22 nt, Human
guucucucagcgauagugaugg

SEQ ID NO: 569024 - RNA, 22 nt, Human
gugauuucaaauauagagugag

SEQ ID NO: 569025 - RNA, 22 nt, Human
acaugacagugacuuuauaaga

SEQ ID NO: 569026 - RNA, 22 nt, Human
guaauucugugugaaucuauua

SEQ ID NO: 569027 - RNA, 22 nt, Human
acagaauugggguucuugggga

SEQ ID NO: 569028 - RNA, 19 nt, Human
uuugauagggcauaauaua

SEQ ID NO: 569029 - RNA, 22 nt, Human
ugugugcucgauggcccugcag

SEQ ID NO: 569030 - RNA, 22 nt, Human
gagccauacaaccuauaaagug

SEQ ID NO: 569031 - RNA, 22 nt, Human
gaauguuuaaaaggugcaguuu

SEQ ID NO: 569032 - RNA, 22 nt, Human
aguaucagaugugauuaaaggg

SEQ ID NO: 569033 - RNA, 21 nt, Human
uaaacauaaccuuguauggcu

SEQ ID NO: 569034 - RNA, 22 nt, Human
uccaaauagcuggaugauggug

SEQ ID NO: 569035 - RNA, 22 nt, Human
aggauugugccuccagucagaa

SEQ ID NO: 569036 - RNA, 22 nt, Human
agaaacaucgcuuaguccucau

SEQ ID NO: 569037 - RNA, 22 nt, Human
gcuugcugaacaggaaccuggc

SEQ ID NO: 569038 - RNA, 22 nt, Human
caauaauugcuuuccagaguua

SEQ ID NO: 569039 - RNA, 22 nt, Human
ucacuacaaccgcuaccugaca

SEQ ID NO: 569040 - RNA, 22 nt, Human
guuaacaacacugugagugcug

SEQ ID NO: 569041 - RNA, 22 nt, Human
acaauuucuaauauagaucuua

SEQ ID NO: 569042 - RNA, 22 nt, Human
ucaggccaggagaucagauuga

SEQ ID NO: 569043 - RNA, 22 nt, Human
ucugcgcccugucgccugcucc

SEQ ID NO: 569044 - RNA, 22 nt, Human
uucacugugauguuuaagagaa

SEQ ID NO: 569045 - RNA, 22 nt, Human
ugcaugguuauauacuacuagu

SEQ ID NO: 569046 - RNA, 22 nt, Human
uucagucuuguugaaaacuugg

SEQ ID NO: 569047 - RNA, 22 nt, Human
aggaaauuuugaaucagugucu

SEQ ID NO: 569048 - RNA, 22 nt, Human
ucccacagcuucgugcuucccc

SEQ ID NO: 569049 - RNA, 22 nt, Human
augaaaacagccuccugugaua

SEQ ID NO: 569050 - RNA, 22 nt, Human
uuuaauuuucugggcccagcag

SEQ ID NO: 569051 - RNA, 22 nt, Human
auuacugaggcaaaguaguuuu

SEQ ID NO: 569052 - RNA, 22 nt, Human
caggaacacaaugagucucaaa

SEQ ID NO: 569053 - RNA, 22 nt, Human
acaggaaaugaaaugguaucua

SEQ ID NO: 569054 - RNA, 22 nt, Human
acacaagcagcuuuugagcgga

SEQ ID NO: 569055 - RNA, 22 nt, Human
guauuucuuuacauaugcucau

SEQ ID NO: 569056 - RNA, 22 nt, Human
uauaaacuccucuugcauuccu

SEQ ID NO: 569057 - RNA, 22 nt, Human
caugcaugccgggcugacagag

SEQ ID NO: 569058 - RNA, 17 nt, Human
uuagagcuacauguuga

SEQ ID NO: 569059 - RNA, 22 nt, Human
ucaggaugagucaucaagcugc

SEQ ID NO: 569060 - RNA, 22 nt, Human
acucacagggccucaguuuucc

SEQ ID NO: 569061 - RNA, 22 nt, Human
uaaguauuggccuauagcuaga

SEQ ID NO: 569062 - RNA, 22 nt, Human
cuaaauguuuuaucuuccuggc

SEQ ID NO: 569063 - RNA, 17 nt, Human
aacaguuaaugggggaa

SEQ ID NO: 569064 - RNA, 22 nt, Human
cugcggcuggggacagcuguug

SEQ ID NO: 569065 - RNA, 22 nt, Human
guucuucaaagugacaacuaaa

SEQ ID NO: 569066 - RNA, 17 nt, Human
ucugccaguuuuagaau

SEQ ID NO: 569067 - RNA, 22 nt, Human
gcggcgccugggacccgccagc

SEQ ID NO: 569068 - RNA, 22 nt, Human
gcugucucauacaaggcccugc

SEQ ID NO: 569069 - RNA, 22 nt, Human
uauagcagcaugauuuauaguc

SEQ ID NO: 569070 - RNA, 22 nt, Human
aucuucccaggcuggggagagg

SEQ ID NO: 569071 - RNA, 22 nt, Human
cagguagaggcugccaucagcu

SEQ ID NO: 569072 - RNA, 22 nt, Human
ugaagcuaguauuaacucagau

SEQ ID NO: 569073 - RNA, 22 nt, Human
aacagaaugcaggggaugcugc

SEQ ID NO: 569074 - RNA, 21 nt, Human
auucaaagaagaggaaggccc

SEQ ID NO: 569075 - RNA, 22 nt, Human
uaguggauguucagagauuuga

SEQ ID NO: 569076 - RNA, 22 nt, Human
uuuaauuauaucugggcaguua

SEQ ID NO: 569077 - RNA, 22 nt, Human
gauccacaggaaccaaaacgca

SEQ ID NO: 569078 - RNA, 22 nt, Human
aaauugaauuugggaaacauug

SEQ ID NO: 569079 - RNA, 22 nt, Human
uugcacagaugcacaugguugc

SEQ ID NO: 569080 - RNA, 17 nt, Human
ucugcagggggccgugu

SEQ ID NO: 569081 - RNA, 22 nt, Human
aaaacuuucagggauacagaaa

SEQ ID NO: 569082 - RNA, 22 nt, Human
uuagaaaucaccucugaagauc

SEQ ID NO: 569083 - RNA, 22 nt, Human
aagcagggugucuugacccaug

SEQ ID NO: 569084 - RNA, 22 nt, Human
ucuguucagaagaggugaaagu

SEQ ID NO: 569085 - RNA, 22 nt, Human
ugagcuucuuuauuuggccaga

SEQ ID NO: 569086 - RNA, 22 nt, Human
gaggagaggcuggacgcgguga

SEQ ID NO: 569087 - RNA, 21 nt, Human
agggaaaaggcugagugaggg

SEQ ID NO: 569088 - RNA, 22 nt, Human
guggccuccuccguccgccucu

SEQ ID NO: 569089 - RNA, 22 nt, Human
ggugcggagacuccaugaggcc

SEQ ID NO: 569090 - RNA, 23 nt, Human
gggugcugccuguagucaugcug

SEQ ID NO: 569091 - RNA, 22 nt, Human
aucuuacaauuacaagacacuc

SEQ ID NO: 569092 - RNA, 22 nt, Human
gcuaggaguggugggucaagga

SEQ ID NO: 569093 - RNA, 22 nt, Human
agcugacagugcauggagggac

SEQ ID NO: 569094 - RNA, 22 nt, Human
aacuagaaagaacauauuucca

SEQ ID NO: 569095 - RNA, 22 nt, Human
aaacacaucauucaugucguca

SEQ ID NO: 569096 - RNA, 22 nt, Human
uguucuuagguauuugacaguc

SEQ ID NO: 569097 - RNA, 22 nt, Human
gcucuaugaaccugaaucucac

SEQ ID NO: 569098 - RNA, 22 nt, Human
gaaagagaaccugggccuagau

SEQ ID NO: 569099 - RNA, 22 nt, Human
aaugaguuuguucuauuauuug

SEQ ID NO: 569100 - RNA, 22 nt, Human
cugagcugguucucuugugaaa

SEQ ID NO: 569101 - RNA, 22 nt, Human
uggccgggaagggacagugugg

SEQ ID NO: 569102 - RNA, 22 nt, Human
cuuucugaggagacgggcuuug

SEQ ID NO: 569103 - RNA, 18 nt, Human
ccucagggagagagacgc

SEQ ID NO: 569104 - RNA, 22 nt, Human
ggccgcggauuuucccgcuggc

SEQ ID NO: 569105 - RNA, 22 nt, Human
aaaccuguuaauagagcgaugc

SEQ ID NO: 569106 - RNA, 22 nt, Human
aauucauacucuauauugcuuu

SEQ ID NO: 569107 - RNA, 22 nt, Human
ugagccuggccugcagagacca

SEQ ID NO: 569108 - RNA, 21 nt, Human
gcuccuggugcugcguggcgc

SEQ ID NO: 569109 - RNA, 22 nt, Human
ucuuuugagggccagaggaaga

SEQ ID NO: 569110 - RNA, 22 nt, Human
auuccaaagccugaauaaugga

SEQ ID NO: 569111 - RNA, 22 nt, Human
gcuuccaaugcuucuaucacau

SEQ ID NO: 569112 - RNA, 22 nt, Human
gacggagcugguugcugcggcu

SEQ ID NO: 569113 - RNA, 22 nt, Human
ugguccugagcaccagccugac

SEQ ID NO: 569114 - RNA, 18 nt, Human
uccauccucugcucuuca

SEQ ID NO: 569115 - RNA, 21 nt, Human
cccuugccugcacuccucggc

SEQ ID NO: 569116 - RNA, 22 nt, Human
gaguggggcccacugcugggug

SEQ ID NO: 569117 - RNA, 21 nt, Human
uugauuuagcagaucuagcug

SEQ ID NO: 569118 - RNA, 22 nt, Human
uauccaaaggaacaaucacagc

SEQ ID NO: 569119 - RNA, 22 nt, Human
uagaggaugauccuuccuugcc

SEQ ID NO: 569120 - RNA, 17 nt, Human
auucaugaacauguccu

SEQ ID NO: 569121 - RNA, 22 nt, Human
auguggcuuucugcguuuucuc

SEQ ID NO: 569122 - RNA, 22 nt, Human
cacggccacugcagcaccccag

SEQ ID NO: 569123 - RNA, 22 nt, Human
gggagccccaccucggugcccg

SEQ ID NO: 569124 - RNA, 22 nt, Human
gcagcugccgugagcucacgcc

SEQ ID NO: 569125 - RNA, 22 nt, Human
uacagccuggcacuacccuggg

SEQ ID NO: 569126 - RNA, 20 nt, Human
uuucacuggcuugauaaggu

SEQ ID NO: 569127 - RNA, 22 nt, Human
uuggccguuucacugggcaguu

SEQ ID NO: 569128 - RNA, 22 nt, Human
ugugaagaauuaaugugaauca

SEQ ID NO: 569129 - RNA, 22 nt, Human
augcuacauuuugguuuauaaa

SEQ ID NO: 569130 - RNA, 22 nt, Human
uccucauucuuggugcaucaaa

SEQ ID NO: 569131 - RNA, 22 nt, Human
uuuucuuggaguggcuguccuu

SEQ ID NO: 569132 - RNA, 23 nt, Human
aacucuggcuagcauagaauaga

SEQ ID NO: 569133 - RNA, 22 nt, Human
ugcccguggccuggggcagcuu

SEQ ID NO: 569134 - RNA, 22 nt, Human
caguguuuagcacagugcuugg

SEQ ID NO: 569135 - RNA, 22 nt, Human
ccgcuguccuggagcugcugcu

SEQ ID NO: 569136 - RNA, 22 nt, Human
ccuguggcacaugcagggauuc

SEQ ID NO: 569137 - RNA, 22 nt, Human
ucauuguuucugcuuuucauga

SEQ ID NO: 569138 - RNA, 22 nt, Human
cugucucugauaagcucgaggg

SEQ ID NO: 569139 - RNA, 22 nt, Human
guucaaccaugauuaggaacug

SEQ ID NO: 569140 - RNA, 22 nt, Human
uucaaugcaagggaggucugaa

SEQ ID NO: 569141 - RNA, 22 nt, Human
uaucuguauucugacagucacu

SEQ ID NO: 569142 - RNA, 21 nt, Human
agaaggcaaaagcagacaucu

SEQ ID NO: 569143 - RNA, 22 nt, Human
ucuuauugugaugaugaagaac

SEQ ID NO: 569144 - RNA, 22 nt, Human
uuggcagugacugcgggccccg

SEQ ID NO: 569145 - RNA, 22 nt, Human
cuuuacagugaacuugcuuguc

SEQ ID NO: 569146 - RNA, 22 nt, Human
uucacguuguugaagaaaauac

SEQ ID NO: 569147 - RNA, 22 nt, Human
ucaguaaaugagcaaaaauuuc

SEQ ID NO: 569148 - RNA, 22 nt, Human
agaugguucagaauuauaaaga

SEQ ID NO: 569149 - RNA, 22 nt, Human
guagcagagggcccagguaacu

SEQ ID NO: 569150 - RNA, 22 nt, Human
uuguuuguaaggcucuuagaau

SEQ ID NO: 569151 - RNA, 22 nt, Human
augcuugcccauguuucugaag

SEQ ID NO: 569152 - RNA, 22 nt, Human
cuucucuuggguguggugucuu

SEQ ID NO: 569153 - RNA, 19 nt, Human
ccuggcccugcugcgcggg

SEQ ID NO: 569154 - RNA, 18 nt, Human
cuacauucauaggaaagg

SEQ ID NO: 569155 - RNA, 22 nt, Human
uuucgggaaaaacugguaagac

SEQ ID NO: 569156 - RNA, 22 nt, Human
ucaugcagauaagaauaaguaa

SEQ ID NO: 569157 - RNA, 22 nt, Human
uguguuucugagaaucccaccu

SEQ ID NO: 569158 - RNA, 22 nt, Human
cucucuccuuagcugcagacca

SEQ ID NO: 569159 - RNA, 22 nt, Human
cccaggucgucagcaguguggu

SEQ ID NO: 569160 - RNA, 22 nt, Human
ucuacaacgugguuuuguugua

SEQ ID NO: 569161 - RNA, 22 nt, Human
uugagauagguggaaucucuuu

SEQ ID NO: 569162 - RNA, 22 nt, Human
cacaauuuccauugagcagcag

SEQ ID NO: 569163 - RNA, 22 nt, Human
cugcuucacccugccugagaac

SEQ ID NO: 569164 - RNA, 22 nt, Human
agaauaaccaguguuucacagu

SEQ ID NO: 569165 - RNA, 22 nt, Human
uuccggacgcccgucuuccagc

SEQ ID NO: 569166 - RNA, 22 nt, Human
uagauucugacccucuuuuuac

SEQ ID NO: 569167 - RNA, 21 nt, Human
acauguccccuaugcuuaagg

SEQ ID NO: 569168 - RNA, 22 nt, Human
gauuugucuauauucaaauaug

SEQ ID NO: 569169 - RNA, 22 nt, Human
agauuucaauggauauugcaag

SEQ ID NO: 569170 - RNA, 22 nt, Human
uuugaauauacuucaaacaaag

SEQ ID NO: 569171 - RNA, 22 nt, Human
uugcucuauguuuguaaacaga

SEQ ID NO: 569172 - RNA, 22 nt, Human
gugcagcugugguggagccagg

SEQ ID NO: 569173 - RNA, 22 nt, Human
cugcucucuguuccccuggauc

SEQ ID NO: 569174 - RNA, 22 nt, Human
acaguucuguccuagacuucgu

SEQ ID NO: 569175 - RNA, 22 nt, Human
uaggugucuggacaacuuugua

SEQ ID NO: 569176 - RNA, 22 nt, Human
ugcuggcugggcugcuggagac

SEQ ID NO: 569177 - RNA, 19 nt, Human
ugguucuccuuccacaguc

SEQ ID NO: 569178 - RNA, 22 nt, Human
gagcugcauagcugggauccuc

SEQ ID NO: 569179 - RNA, 22 nt, Human
guugguccuuugagcaagaucc

SEQ ID NO: 569180 - RNA, 22 nt, Human
aagucuucagacuggagagauu

SEQ ID NO: 569181 - RNA, 22 nt, Human
ucucaggcuuccuggugcugug

SEQ ID NO: 569182 - RNA, 23 nt, Human
cucaccaagcgccgccgcugugu

SEQ ID NO: 569183 - RNA, 22 nt, Human
aaggggggcaccugcaugcccg

SEQ ID NO: 569184 - RNA, 22 nt, Human
cacacuguccccuucuccccag

SEQ ID NO: 569185 - RNA, 22 nt, Human
gccacguagaagugccgcgaga

SEQ ID NO: 569186 - RNA, 22 nt, Human
uccaagaagcuuacaaucuaau

SEQ ID NO: 569187 - RNA, 22 nt, Human
gagccacaguggauugauucca

SEQ ID NO: 569188 - RNA, 22 nt, Human
uccuuucugucuuuacucugga

SEQ ID NO: 569189 - RNA, 22 nt, Human
agagcuauuucuuaaaagcugu

SEQ ID NO: 569190 - RNA, 22 nt, Human
acagacuccccagguuaucuca

SEQ ID NO: 569191 - RNA, 22 nt, Human
ucugcuguuuacugugugauau

SEQ ID NO: 569192 - RNA, 21 nt, Human
acucugaaaauuaauaguuau

SEQ ID NO: 569193 - RNA, 22 nt, Human
uuuuuugucuugaagaaauggu

SEQ ID NO: 569194 - RNA, 22 nt, Human
gaggugggaugugugugcuacu

SEQ ID NO: 569195 - RNA, 22 nt, Human
augguuuuguccucuuugguuc

SEQ ID NO: 569196 - RNA, 22 nt, Human
ugcagugaugcuucuggcucag

SEQ ID NO: 569197 - RNA, 22 nt, Human
aggugcugccccgagaaggaug

SEQ ID NO: 569198 - RNA, 22 nt, Human
uaacaaaguauuguuuguguau

SEQ ID NO: 569199 - RNA, 22 nt, Human
uggcaggaaaaagggccagagg

SEQ ID NO: 569200 - RNA, 21 nt, Human
cuuuggcaagggagaagucac

SEQ ID NO: 569201 - RNA, 22 nt, Human
gccagugccugcugcucagggc

SEQ ID NO: 569202 - RNA, 22 nt, Human
cgucauuuguaaaugaucaaga

SEQ ID NO: 569203 - RNA, 22 nt, Human
cauaaauuguacccauuccaac

SEQ ID NO: 569204 - RNA, 22 nt, Human
cucacagcugcuucaggaucca

SEQ ID NO: 569205 - RNA, 22 nt, Human
cugccguugugaagcucuuaga

SEQ ID NO: 569206 - RNA, 22 nt, Human
uucucugaguacguuucagugu

SEQ ID NO: 569207 - RNA, 20 nt, Human
gacuucaauuucuaucuuuu

SEQ ID NO: 569208 - RNA, 22 nt, Human
uacuuugucauucuaaccuucc

SEQ ID NO: 569209 - RNA, 22 nt, Human
uuucugugauaggcugcgacgc

SEQ ID NO: 569210 - RNA, 22 nt, Human
agcugcugcaaguggugcuaac

SEQ ID NO: 569211 - RNA, 22 nt, Human
uuggggaagcuuugaaauacuu

SEQ ID NO: 569212 - RNA, 22 nt, Human
uaauuuugucacagugacaugc

SEQ ID NO: 569213 - RNA, 22 nt, Human
caggaggaaaguuccacucaac

SEQ ID NO: 569214 - RNA, 22 nt, Human
gccuuugcugugacaaugcugg

SEQ ID NO: 569215 - RNA, 22 nt, Human
ucccugccuccuggcagugcca

SEQ ID NO: 569216 - RNA, 22 nt, Human
guuuauuggguauuguggagcc

SEQ ID NO: 569217 - RNA, 22 nt, Human
ucuggauggucagcucuuccug

SEQ ID NO: 569218 - RNA, 22 nt, Human
gccgugcgugcgcaggugcugu

SEQ ID NO: 569219 - RNA, 22 nt, Human
aacuuucugaaaagcuugauca

SEQ ID NO: 569220 - RNA, 22 nt, Human
agguggucuuguggaugccgca

SEQ ID NO: 569221 - RNA, 18 nt, Human
ggugagggagcuggaagc

SEQ ID NO: 569222 - RNA, 22 nt, Human
uucaaacaguguagaauauaug

SEQ ID NO: 569223 - RNA, 22 nt, Human
uuuuccuucugauacuccauuu

SEQ ID NO: 569224 - RNA, 22 nt, Human
auuuccagcagcauauuugucu

SEQ ID NO: 569225 - RNA, 22 nt, Human
uugcugugucauuuguuuaauc

SEQ ID NO: 569226 - RNA, 22 nt, Human
ugagcauuaccugaggccacug

SEQ ID NO: 569227 - RNA, 22 nt, Human
caagagcuuuagaaaugcucau

SEQ ID NO: 569228 - RNA, 22 nt, Human
auuauugcaagcagugaaggga

SEQ ID NO: 569229 - RNA, 22 nt, Human
acagggcugaggcuggcuucuu

SEQ ID NO: 569230 - RNA, 22 nt, Human
auccuucaaaaggaauagcagg

SEQ ID NO: 569231 - RNA, 22 nt, Human
aaugacaguggcacagucacuu

SEQ ID NO: 569232 - RNA, 22 nt, Human
uaauuucagugcaagcucacgg

SEQ ID NO: 569233 - RNA, 22 nt, Human
ucuguggcaaacacagugacca

SEQ ID NO: 569234 - RNA, 22 nt, Human
acuggaaaguauucuuucacug

SEQ ID NO: 569235 - RNA, 20 nt, Human
cagagccaggguuuuguuuu

SEQ ID NO: 569236 - RNA, 22 nt, Human
acagcagguuauuguuauggca

SEQ ID NO: 569237 - RNA, 22 nt, Human
acaccacaaguaacucuuuucc

SEQ ID NO: 569238 - RNA, 22 nt, Human
gagcccuuuuccuagauacugu

SEQ ID NO: 569239 - RNA, 22 nt, Human
uguuggcagugcuacagucagu

SEQ ID NO: 569240 - RNA, 21 nt, Human
ugagcaccagcugcaugcccc

SEQ ID NO: 569241 - RNA, 22 nt, Human
agccuugcaugauuucauucau

SEQ ID NO: 569242 - RNA, 22 nt, Human
gaauguuaaugcacuucuagcu

SEQ ID NO: 569243 - RNA, 22 nt, Human
ugcauaaauauuguugggagua

SEQ ID NO: 569244 - RNA, 22 nt, Human
guucuucagauuccauuucagu

SEQ ID NO: 569245 - RNA, 22 nt, Human
uucagaaaggcugugccagcca

SEQ ID NO: 569246 - RNA, 22 nt, Human
cuaguagcccauuuuggauacc

SEQ ID NO: 569247 - RNA, 22 nt, Human
guggaaauuuuaggaucaucuu

SEQ ID NO: 569248 - RNA, 22 nt, Human
aaacucuacauggucgcaaaaa

SEQ ID NO: 569249 - RNA, 22 nt, Human
aauaucuagccuuuagcagcuu

SEQ ID NO: 569250 - RNA, 23 nt, Human
cauuugauccucacaauaaaugg

SEQ ID NO: 569251 - RNA, 22 nt, Human
ugagacaaagcagcugacagaa

SEQ ID NO: 569252 - RNA, 22 nt, Human
uuuguguuguacuucugugcau

SEQ ID NO: 569253 - RNA, 22 nt, Human
uggagcugguucuggggaagcu

SEQ ID NO: 569254 - RNA, 22 nt, Human
cacugguugccucuuucuguuc

SEQ ID NO: 569255 - RNA, 21 nt, Human
uggcccuggccacggcugcca

SEQ ID NO: 569256 - RNA, 22 nt, Human
ccgggagguggagauugcggug

SEQ ID NO: 569257 - RNA, 22 nt, Human
ccugaggcccuggcugugcuga

SEQ ID NO: 569258 - RNA, 22 nt, Human
gcuucauagcauucauugccug

SEQ ID NO: 569259 - RNA, 23 nt, Human
ugcaaaauuugcagaguucgaug

SEQ ID NO: 569260 - RNA, 22 nt, Human
ucuggcuucaacuuuacugaaa

SEQ ID NO: 569261 - RNA, 22 nt, Human
aagucaauuaguaaacuuggaa

SEQ ID NO: 569262 - RNA, 22 nt, Human
acauucucuuuuagaaagcugu

SEQ ID NO: 569263 - RNA, 22 nt, Human
agacauauuggcuugcuuuaau

SEQ ID NO: 569264 - RNA, 22 nt, Human
agguagcuggugcugggcuccu

SEQ ID NO: 569265 - RNA, 22 nt, Human
uaacuugagcucucagugcuau

SEQ ID NO: 569266 - RNA, 22 nt, Human
acaccuuuuauucgccaggcac

SEQ ID NO: 569267 - RNA, 22 nt, Human
agaacagaggccuuauguuuca

SEQ ID NO: 569268 - RNA, 19 nt, Human
aggucuaaucauaagacaa

SEQ ID NO: 569269 - RNA, 22 nt, Human
cugccaucugagccaaaagugc

SEQ ID NO: 569270 - RNA, 22 nt, Human
cagcaguacuucucagagguau

SEQ ID NO: 569271 - RNA, 22 nt, Human
agccccaguucccuggaagucu

SEQ ID NO: 569272 - RNA, 22 nt, Human
ucaaagaucagaugguuguagg

SEQ ID NO: 569273 - RNA, 22 nt, Human
augacagcucuagcacacagua

SEQ ID NO: 569274 - RNA, 22 nt, Human
caaagaagagauuuacagagcu

SEQ ID NO: 569275 - RNA, 22 nt, Human
ccuggaaaaugccacuuucaca

SEQ ID NO: 569276 - RNA, 22 nt, Human
uucucacguuauuggcugagag

SEQ ID NO: 569277 - RNA, 22 nt, Human
aauuauugagcaucuacugugu

SEQ ID NO: 569278 - RNA, 22 nt, Human
gcugccuggaauaacggcuggc

SEQ ID NO: 569279 - RNA, 22 nt, Human
ucaauucugccucuaaauauuu

SEQ ID NO: 569280 - RNA, 22 nt, Human
aauaucaucucucuuuucugca

SEQ ID NO: 569281 - RNA, 22 nt, Human
acgccucugcagcugccgggcc

SEQ ID NO: 569282 - RNA, 22 nt, Human
aaaauuaagugucugggaagcc

SEQ ID NO: 569283 - RNA, 22 nt, Human
caggcgaccccuaggagcaaca

SEQ ID NO: 569284 - RNA, 23 nt, Human
agcaacagugggugaguguugcu

SEQ ID NO: 569285 - RNA, 22 nt, Human
gagcuguguaugcaucauucug

SEQ ID NO: 569286 - RNA, 18 nt, Human
ucuuccaacacugacacc

SEQ ID NO: 569287 - RNA, 22 nt, Human
gagugugucggucagcguggcg

SEQ ID NO: 569288 - RNA, 22 nt, Human
gcuggccugcgagggcaggcug

SEQ ID NO: 569289 - RNA, 22 nt, Human
cugucaaauggaaacuuauccu

SEQ ID NO: 569290 - RNA, 22 nt, Human
cucugguuucgcaggaaauaga

SEQ ID NO: 569291 - RNA, 21 nt, Human
ugcuaagugucacaugucugc

SEQ ID NO: 569292 - RNA, 22 nt, Human
uuuugaauaauucagaaacagc

SEQ ID NO: 569293 - RNA, 22 nt, Human
uucaccugugacagguagaguu

SEQ ID NO: 569294 - RNA, 22 nt, Human
acggccgaugacuccagcaugg

SEQ ID NO: 569295 - RNA, 22 nt, Human
agacaagagcugaggacauauu

SEQ ID NO: 569296 - RNA, 21 nt, Human
aaguccaauaccuaaggcucc

SEQ ID NO: 569297 - RNA, 22 nt, Human
aucuaugugggaaucauaauag

SEQ ID NO: 569298 - RNA, 22 nt, Human
ugucuggauagagccuaggccc

SEQ ID NO: 569299 - RNA, 22 nt, Human
cgggagccucugggucacacug

SEQ ID NO: 569300 - RNA, 22 nt, Human
ucucagggaugggaggccccag

SEQ ID NO: 569301 - RNA, 22 nt, Human
aggaauuugggguuacaugaug

SEQ ID NO: 569302 - RNA, 22 nt, Human
cuagcagaagcuccuugagggu

SEQ ID NO: 569303 - RNA, 22 nt, Human
guuauucuauuaaugugauugu

SEQ ID NO: 569304 - RNA, 22 nt, Human
agcuuuggcaucugacuagccg

SEQ ID NO: 569305 - RNA, 22 nt, Human
aguuuccacuggagacacugug

SEQ ID NO: 569306 - RNA, 22 nt, Human
gcgcugccucugcucuccccac

SEQ ID NO: 569307 - RNA, 22 nt, Human
agacgcgguggugcaugccugu

SEQ ID NO: 569308 - RNA, 22 nt, Human
cugaaggacacgugaggagcca

SEQ ID NO: 569309 - RNA, 22 nt, Human
uggcacuugauauuugauuugc

SEQ ID NO: 569310 - RNA, 23 nt, Human
agacagaggcugaggcuggccgc

SEQ ID NO: 569311 - RNA, 22 nt, Human
auuucagagugagagugcucaa

SEQ ID NO: 569312 - RNA, 22 nt, Human
uuuaaaccuaucuaagaaauag

SEQ ID NO: 569313 - RNA, 23 nt, Human
aggcagguuugggcucuucuugu

SEQ ID NO: 569314 - RNA, 22 nt, Human
ugcauguuuuauaccaaagcuu

SEQ ID NO: 569315 - RNA, 22 nt, Human
cauuaacacuuuggauuuagac

SEQ ID NO: 569316 - RNA, 22 nt, Human
cuacagaauucaacaaaugguu

SEQ ID NO: 569317 - RNA, 22 nt, Human
uuuguucaccuagcaaacuuuu

SEQ ID NO: 569318 - RNA, 22 nt, Human
caauuuuuaaacuaugaaguug

SEQ ID NO: 569319 - RNA, 19 nt, Human
acucaggcuuccucugagg

SEQ ID NO: 569320 - RNA, 20 nt, Human
caauaauuuacuucccuauu

SEQ ID NO: 569321 - RNA, 22 nt, Human
uaaaaucaugacagauugacau

SEQ ID NO: 569322 - RNA, 22 nt, Human
uacaaagugauuuuggaauuga

SEQ ID NO: 569323 - RNA, 22 nt, Human
uuucgagggauuagcuaggacu

SEQ ID NO: 569324 - RNA, 22 nt, Human
uugcaaauaauagccugaaacu

SEQ ID NO: 569325 - RNA, 22 nt, Human
cagcugccuaugaccuagccuc

SEQ ID NO: 569326 - RNA, 22 nt, Human
caaaugaugcauggcuagugag

SEQ ID NO: 569327 - RNA, 22 nt, Human
aggcuuaacuacaauuuuugcc

SEQ ID NO: 569328 - RNA, 22 nt, Human
ccuaugaaagacaggagaugcg

SEQ ID NO: 569329 - RNA, 22 nt, Human
uacaguaaccagucuacuuaga

SEQ ID NO: 569330 - RNA, 22 nt, Human
agaagugaguugugacuauggg

SEQ ID NO: 569331 - RNA, 20 nt, Human
uugcaaagugaauagcaauu

SEQ ID NO: 569332 - RNA, 22 nt, Human
gcucccugguauugcugccacu

SEQ ID NO: 569333 - RNA, 22 nt, Human
ucuguggcauguugcacuugua

SEQ ID NO: 569334 - RNA, 22 nt, Human
uagaagaugccuuaaaguugaa

SEQ ID NO: 569335 - RNA, 22 nt, Human
cuguuuauucucaucuaaaaug

SEQ ID NO: 569336 - RNA, 22 nt, Human
gcggggggcaggcaguacguug

SEQ ID NO: 569337 - RNA, 22 nt, Human
uauaugcagauuuucaucaucg

SEQ ID NO: 569338 - RNA, 22 nt, Human
ggcuuccuccuuccugcuguca

SEQ ID NO: 569339 - RNA, 22 nt, Human
acucauuugcaugaugugcuau

SEQ ID NO: 569340 - RNA, 22 nt, Human
uggguaaacugggucuggagag

SEQ ID NO: 569341 - RNA, 22 nt, Human
gagauuuccauauuuuguaaca

SEQ ID NO: 569342 - RNA, 23 nt, Human
ccccacuaccgugaugugcgagg

SEQ ID NO: 569343 - RNA, 22 nt, Human
aaguguguauuuuucuucagug

SEQ ID NO: 569344 - RNA, 22 nt, Human
aggccagggcacugcucuuuag

SEQ ID NO: 569345 - RNA, 22 nt, Human
gccuggcgccgggcugccuguc

SEQ ID NO: 569346 - RNA, 22 nt, Human
ucuguggcaugguaucuggagg

SEQ ID NO: 569347 - RNA, 22 nt, Human
aaauugcuugagauuagucucc

SEQ ID NO: 569348 - RNA, 22 nt, Human
uaucuguuuuuacagugucuuu

SEQ ID NO: 569349 - RNA, 22 nt, Human
aaugaaacuaguagaaucuuug

SEQ ID NO: 569350 - RNA, 17 nt, Human
aaaugguccuagggauu

SEQ ID NO: 569351 - RNA, 21 nt, Human
ugucagcaacaauacuuucuc

SEQ ID NO: 569352 - RNA, 22 nt, Human
guuaaaugcagauucugacuca

SEQ ID NO: 569353 - RNA, 22 nt, Human
gccuggcucugaguuucucucc

SEQ ID NO: 569354 - RNA, 19 nt, Human
ugccuggcaccagcuccac

SEQ ID NO: 569355 - RNA, 22 nt, Human
uggaaacacccacgcaugcaua

SEQ ID NO: 569356 - RNA, 22 nt, Human
uuuccagaaauaccauuuggug

SEQ ID NO: 569357 - RNA, 22 nt, Human
gucagaggggcagcugccaggc

SEQ ID NO: 569358 - RNA, 22 nt, Human
cacuuuuaacaggagaauuccc

SEQ ID NO: 569359 - RNA, 22 nt, Human
cauuuuacgacauagggcaggc

SEQ ID NO: 569360 - RNA, 22 nt, Human
caugcauuucuaccaaggaaua

SEQ ID NO: 569361 - RNA, 22 nt, Human
uugggagaaauaguugauccgc

SEQ ID NO: 569362 - RNA, 22 nt, Human
gccagcuggcugcaggucccag

SEQ ID NO: 569363 - RNA, 22 nt, Human
cuuguuuucuucugcagucuau

SEQ ID NO: 569364 - RNA, 22 nt, Human
agcuuugggcagaagaggauuc

SEQ ID NO: 569365 - RNA, 22 nt, Human
uuucccaggcuggaaugcagug

SEQ ID NO: 569366 - RNA, 22 nt, Human
uuuuccuuaacagagggagaaa

SEQ ID NO: 569367 - RNA, 22 nt, Human
ucaaaaugccgagugcccaggu

SEQ ID NO: 569368 - RNA, 22 nt, Human
agauaaaguccaaacuguguag

SEQ ID NO: 569369 - RNA, 22 nt, Human
ccucuaaauuguuugaaguugg

SEQ ID NO: 569370 - RNA, 22 nt, Human
gucuccuuguggaucucaagga

SEQ ID NO: 569371 - RNA, 22 nt, Human
acugguuuuggaaaucaguaca

SEQ ID NO: 569372 - RNA, 22 nt, Human
uacccacugucauauucagggu

SEQ ID NO: 569373 - RNA, 22 nt, Human
ugaauaaucuuggguauuaaua

SEQ ID NO: 569374 - RNA, 22 nt, Human
aggcuguagaucuagacaugua

SEQ ID NO: 569375 - RNA, 22 nt, Human
uacauguacaugcauagguaga

SEQ ID NO: 569376 - RNA, 22 nt, Human
uuuugucagugagaacagaguu

SEQ ID NO: 569377 - RNA, 22 nt, Human
augugaaagagguguucagugg

SEQ ID NO: 569378 - RNA, 22 nt, Human
aagugauuucugccugcauguu

SEQ ID NO: 569379 - RNA, 22 nt, Human
uuuaaacuaacaguacacguug

SEQ ID NO: 569380 - RNA, 22 nt, Human
ggcuuucugucugcgucugugu

SEQ ID NO: 569381 - RNA, 20 nt, Human
uaugauaauuacaaaauagu

SEQ ID NO: 569382 - RNA, 21 nt, Human
uggagagugauuucagugugg

SEQ ID NO: 569383 - RNA, 22 nt, Human
caaugcagauaccuuccagaga

SEQ ID NO: 569384 - RNA, 22 nt, Human
ugcccuccacaguggcuccacc

SEQ ID NO: 569385 - RNA, 22 nt, Human
cauuuuccucugcugguguuca

SEQ ID NO: 569386 - RNA, 22 nt, Human
uaucaguccaggguuuugugac

SEQ ID NO: 569387 - RNA, 22 nt, Human
guguaucaacauguuuuuugug

SEQ ID NO: 569388 - RNA, 22 nt, Human
acaaguuucauuguuuagaacc

SEQ ID NO: 569389 - RNA, 22 nt, Human
agcuccugaaaagcgcuugcuu

SEQ ID NO: 569390 - RNA, 22 nt, Human
caggugggagccacagcguaca

SEQ ID NO: 569391 - RNA, 22 nt, Human
ccaaacauuucaaauuuagaga

SEQ ID NO: 569392 - RNA, 22 nt, Human
cacaguuuuaucuuauacugau

SEQ ID NO: 569393 - RNA, 22 nt, Human
agccacagucuguagccagcuu

SEQ ID NO: 569394 - RNA, 22 nt, Human
caucuuuguuuuggauauaauc

SEQ ID NO: 569395 - RNA, 22 nt, Human
caaucaaugcugcuaguuccuu

SEQ ID NO: 569396 - RNA, 22 nt, Human
aacuuucuuugcaucuaaguuu

SEQ ID NO: 569397 - RNA, 22 nt, Human
ugcuuuggcccaacauugaugc

SEQ ID NO: 569398 - RNA, 22 nt, Human
uuucaugauuaacuuagugaau

SEQ ID NO: 569399 - RNA, 22 nt, Human
cuccuucacgcaggcugccaug

SEQ ID NO: 569400 - RNA, 22 nt, Human
cugacagaucuggaucugaacu

SEQ ID NO: 569401 - RNA, 22 nt, Human
cacaucauguuaauucauuaca

SEQ ID NO: 569402 - RNA, 22 nt, Human
aggcuuuugcucuggcuccucu

SEQ ID NO: 569403 - RNA, 22 nt, Human
augcuuuauuggagacagucau

SEQ ID NO: 569404 - RNA, 22 nt, Human
cuucauuucaggcugaagaaua

SEQ ID NO: 569405 - RNA, 22 nt, Human
gucucuaucauagcugaacccu

SEQ ID NO: 569406 - RNA, 22 nt, Human
ggcuuuggggguguccaagaaa

SEQ ID NO: 569407 - RNA, 22 nt, Human
gcagcagugugggcugaaccua

SEQ ID NO: 569408 - RNA, 22 nt, Human
ccagcagcucccucaggguccg

SEQ ID NO: 569409 - RNA, 22 nt, Human
gcacaaaagguacuucauguag

SEQ ID NO: 569410 - RNA, 21 nt, Human
cuuuucuagucccagccccgc

SEQ ID NO: 569411 - RNA, 22 nt, Human
ggacaucuguugugguagagga

SEQ ID NO: 569412 - RNA, 22 nt, Human
uccagccauaucuuguagcccu

SEQ ID NO: 569413 - RNA, 22 nt, Human
aaaugcacaauaaaguaaaggc

SEQ ID NO: 569414 - RNA, 22 nt, Human
gugcaggacagcacaucuccug

SEQ ID NO: 569415 - RNA, 21 nt, Human
gcugcucgagauccagugcuu

SEQ ID NO: 569416 - RNA, 22 nt, Human
uucuccacccacucuuuuguug

SEQ ID NO: 569417 - RNA, 22 nt, Human
ggacauugaagcuggaaaggga

SEQ ID NO: 569418 - RNA, 22 nt, Human
gugcaugucuuuggaggccucc

SEQ ID NO: 569419 - RNA, 22 nt, Human
uggaucugcucuaugaacugcu

SEQ ID NO: 569420 - RNA, 22 nt, Human
uaaugccuuucuguacuauaug

SEQ ID NO: 569421 - RNA, 22 nt, Human
cgaguaauuggaaauuugcuau

SEQ ID NO: 569422 - RNA, 22 nt, Human
acugugugccaggcgcuggucu

SEQ ID NO: 569423 - RNA, 22 nt, Human
cucucugggcccaguuggcacc

SEQ ID NO: 569424 - RNA, 22 nt, Human
uucuucauucccuuacuuccga

SEQ ID NO: 569425 - RNA, 22 nt, Human
uauacuacgcaccaaacaaagg

SEQ ID NO: 569426 - RNA, 22 nt, Human
cucugcguggcugggcccaggg

SEQ ID NO: 569427 - RNA, 22 nt, Human
aagucauugguagcuugauagg

SEQ ID NO: 569428 - RNA, 22 nt, Human
ugagcagacuugaugaggcagc

SEQ ID NO: 569429 - RNA, 22 nt, Human
uugaggagucaggggcacggaa

SEQ ID NO: 569430 - RNA, 22 nt, Human
uccaggcugacgcagcuauuua

SEQ ID NO: 569431 - RNA, 22 nt, Human
agagauuccuuuggggaaagca

SEQ ID NO: 569432 - RNA, 22 nt, Human
cuuccucuguggccagagugua

SEQ ID NO: 569433 - RNA, 22 nt, Human
agcugaacgugcuucugcagca

SEQ ID NO: 569434 - RNA, 22 nt, Human
uagaagaacaugucaaacuaua

SEQ ID NO: 569435 - RNA, 22 nt, Human
ucucagcucauggcagccuuga

SEQ ID NO: 569436 - RNA, 22 nt, Human
acauauuuugaaagcuuucuaa

SEQ ID NO: 569437 - RNA, 22 nt, Human
gaucuguccuggcaguuaacac

SEQ ID NO: 569438 - RNA, 22 nt, Human
uagcugcacaggaaguaagauu

SEQ ID NO: 569439 - RNA, 22 nt, Human
ugaaauguggagaugguaagua

SEQ ID NO: 569440 - RNA, 22 nt, Human
ucucugucucccguguguccgg

SEQ ID NO: 569441 - RNA, 19 nt, Human
uuuaaugugugcugcaauc

SEQ ID NO: 569442 - RNA, 22 nt, Human
acaagucuguuaugcaccugga

SEQ ID NO: 569443 - RNA, 20 nt, Human
aaagauacuuuuuguaaugg

SEQ ID NO: 569444 - RNA, 22 nt, Human
uuuguaguuguggaugcugaag

SEQ ID NO: 569445 - RNA, 22 nt, Human
caagggcagaggcagggccccg

SEQ ID NO: 569446 - RNA, 22 nt, Human
uggauaaaaugacauuaccuga

SEQ ID NO: 569447 - RNA, 22 nt, Human
gaugcgggcccgcuccacugcc

SEQ ID NO: 569448 - RNA, 22 nt, Human
uccucuccaggugagccgaaau

SEQ ID NO: 569449 - RNA, 22 nt, Human
ccugucucugcagggcccugcc

SEQ ID NO: 569450 - RNA, 18 nt, Human
cgauguguaugugauuug

SEQ ID NO: 569451 - RNA, 22 nt, Human
agcaggaacucagggaguucuc

SEQ ID NO: 569452 - RNA, 22 nt, Human
uuagcaaacaucuucgugugag

SEQ ID NO: 569453 - RNA, 22 nt, Human
uccucuucaaaauagcucugaa

SEQ ID NO: 569454 - RNA, 22 nt, Human
ucagucucuggggcuucuguuu

SEQ ID NO: 569455 - RNA, 22 nt, Human
uuucuuggucuucccgaccugg

SEQ ID NO: 569456 - RNA, 22 nt, Human
uucucaaagugugcucccugga

SEQ ID NO: 569457 - RNA, 22 nt, Human
uacauguuauuucacuauuggu

SEQ ID NO: 569458 - RNA, 22 nt, Human
cggcgcaggcagaccgcgggcu

SEQ ID NO: 569459 - RNA, 22 nt, Human
gaccaaggaagaggggagccag

SEQ ID NO: 569460 - RNA, 22 nt, Human
ugcugcuuguuuuguaaauaaa

SEQ ID NO: 569461 - RNA, 22 nt, Human
agcaaauaauugucuuugaggg

SEQ ID NO: 569462 - RNA, 22 nt, Human
cacucucacaugcccugucagu

SEQ ID NO: 569463 - RNA, 22 nt, Human
uugcauauccuccaacacaugg

SEQ ID NO: 569464 - RNA, 22 nt, Human
uccaggagugauaaggccacug

SEQ ID NO: 569465 - RNA, 22 nt, Human
gucccugauaagagccaucgau

SEQ ID NO: 569466 - RNA, 22 nt, Human
ucugcucagccgaucugcuccg

SEQ ID NO: 569467 - RNA, 22 nt, Human
uaacacauagauauuuuaacuu

SEQ ID NO: 569468 - RNA, 22 nt, Human
acucuguuugcagguagcucag

SEQ ID NO: 569469 - RNA, 23 nt, Human
uggaaacauucugaauguccauc

SEQ ID NO: 569470 - RNA, 22 nt, Human
uucucugguuugcuguuucuga

SEQ ID NO: 569471 - RNA, 22 nt, Human
cagcuuugccaaguaaggucuu

SEQ ID NO: 569472 - RNA, 22 nt, Human
augcggagccccaagcuugaag

SEQ ID NO: 569473 - RNA, 22 nt, Human
auuguugacuugauuacucaac

SEQ ID NO: 569474 - RNA, 22 nt, Human
ccugaggaugccagcaugggug

SEQ ID NO: 569475 - RNA, 22 nt, Human
ccaagaggggcagagggcugca

SEQ ID NO: 569476 - RNA, 22 nt, Human
cccacugcugcucuccauggca

SEQ ID NO: 569477 - RNA, 22 nt, Human
aguaacagguguacagacuauc

SEQ ID NO: 569478 - RNA, 21 nt, Human
auucugaguugucagucuuca

SEQ ID NO: 569479 - RNA, 22 nt, Human
ggagacagugacuuagagacug

SEQ ID NO: 569480 - RNA, 22 nt, Human
ccaguucuuucugugugcaaca

SEQ ID NO: 569481 - RNA, 22 nt, Human
agccacugugugaccagcuguc

SEQ ID NO: 569482 - RNA, 22 nt, Human
uuucauguuggauacuguuuca

SEQ ID NO: 569483 - RNA, 22 nt, Human
ccuuuuaagggagacuagagau

SEQ ID NO: 569484 - RNA, 18 nt, Human
uccaccgcgugcaccucu

SEQ ID NO: 569485 - RNA, 22 nt, Human
augcacacguacccuacaaggc

SEQ ID NO: 569486 - RNA, 18 nt, Human
ucaugcaaacgcuucaua

SEQ ID NO: 569487 - RNA, 22 nt, Human
auguuugaaauuguaaguauau

SEQ ID NO: 569488 - RNA, 21 nt, Human
ucucugacccaggaagagggc

SEQ ID NO: 569489 - RNA, 22 nt, Human
augcaggaagagcccuggagcu

SEQ ID NO: 569490 - RNA, 22 nt, Human
gaaguauuucugaguugcccag

SEQ ID NO: 569491 - RNA, 22 nt, Human
cucucuguuaugcuuucaugaa

SEQ ID NO: 569492 - RNA, 22 nt, Human
aagcaaaagguuacacuucugg

SEQ ID NO: 569493 - RNA, 22 nt, Human
gcugccgacccacagggguuaa

SEQ ID NO: 569494 - RNA, 22 nt, Human
auauaaguguguggcuguuagu

SEQ ID NO: 569495 - RNA, 22 nt, Human
aaauccaucaaaucuucuagaa

SEQ ID NO: 569496 - RNA, 22 nt, Human
gccucugcaccaguacugugcc

SEQ ID NO: 569497 - RNA, 22 nt, Human
gaagaccccagagcgagguaag

SEQ ID NO: 569498 - RNA, 20 nt, Human
ucagugggaaagugagagug

SEQ ID NO: 569499 - RNA, 22 nt, Human
uaaagcauguuucaguaagguu

SEQ ID NO: 569500 - RNA, 22 nt, Human
cgccguccccuaggaaagagcu

SEQ ID NO: 569501 - RNA, 22 nt, Human
gaguuucuucauggugcagagg

SEQ ID NO: 569502 - RNA, 22 nt, Human
caagucuagcuuggucacuugg

SEQ ID NO: 569503 - RNA, 22 nt, Human
ccagcaugcucagucuaaauug

SEQ ID NO: 569504 - RNA, 22 nt, Human
caugagaucugcagggaugggc

SEQ ID NO: 569505 - RNA, 22 nt, Human
ugagaugaagugauguaaaaca

SEQ ID NO: 569506 - RNA, 22 nt, Human
uuuacagcuacuguccuauuuc

SEQ ID NO: 569507 - RNA, 20 nt, Human
cucuuuucacucucaguggu

SEQ ID NO: 569508 - RNA, 22 nt, Human
gcccagcgagcagagguggacg

SEQ ID NO: 569509 - RNA, 22 nt, Human
uuagacaucaagaagccaaugu

SEQ ID NO: 569510 - RNA, 22 nt, Human
ucacaugcucaccuaagccaca

SEQ ID NO: 569511 - RNA, 22 nt, Human
aaauugcauuuuaaagguagau

SEQ ID NO: 569512 - RNA, 22 nt, Human
ggggaagaaauagaacauuuug

SEQ ID NO: 569513 - RNA, 22 nt, Human
uuucugaggaauuaauacagaa

SEQ ID NO: 569514 - RNA, 22 nt, Human
gccaggucgucuccauguccaa

SEQ ID NO: 569515 - RNA, 22 nt, Human
ugcucuguucaguguaucuugu

SEQ ID NO: 569516 - RNA, 22 nt, Human
ugcagguggcagcggggcacca

SEQ ID NO: 569517 - RNA, 22 nt, Human
gaacugcauugugguauauguu

SEQ ID NO: 569518 - RNA, 22 nt, Human
uucacauaaucugcagcaagcg

SEQ ID NO: 569519 - RNA, 22 nt, Human
gcaguaaauugagagucauguu

SEQ ID NO: 569520 - RNA, 22 nt, Human
aucccugugacgagcaucccua

SEQ ID NO: 569521 - RNA, 18 nt, Human
ucagacaaguuagacagg

SEQ ID NO: 569522 - RNA, 23 nt, Human
ggaggcacuuaggcagagcagag

SEQ ID NO: 569523 - RNA, 22 nt, Human
gucugcccugcagacaugccuc

SEQ ID NO: 569524 - RNA, 22 nt, Human
accccagaggcggaggcugcag

SEQ ID NO: 569525 - RNA, 21 nt, Human
aaacugaccuugccugagaca

SEQ ID NO: 569526 - RNA, 22 nt, Human
ucggugcgcgaggcgcgguccc

SEQ ID NO: 569527 - RNA, 22 nt, Human
uuucauuauaaaaaguuggcuu

SEQ ID NO: 569528 - RNA, 22 nt, Human
aacaucuagguucucaucgaua

SEQ ID NO: 569529 - RNA, 22 nt, Human
cacuguuuuacauguuauuuaa

SEQ ID NO: 569530 - RNA, 19 nt, Human
augggaagcggccagcgga

SEQ ID NO: 569531 - RNA, 22 nt, Human
gugcugucguggaacugggcug

SEQ ID NO: 569532 - RNA, 22 nt, Human
uccuuggagaaucuuguuuuac

SEQ ID NO: 569533 - RNA, 22 nt, Human
acaagucaguggaauuaauauu

SEQ ID NO: 569534 - RNA, 22 nt, Human
ccaagagcuucccauagcuucu

SEQ ID NO: 569535 - RNA, 22 nt, Human
gucaaaacaaaguuaagaauuc

SEQ ID NO: 569536 - RNA, 22 nt, Human
ugcucccaggcauucucuguug

SEQ ID NO: 569537 - RNA, 22 nt, Human
auuuacugagguaaauaaacug

SEQ ID NO: 569538 - RNA, 22 nt, Human
aagcaccuggguuauaucuuag

SEQ ID NO: 569539 - RNA, 22 nt, Human
gguucaguggaauguguugacc

SEQ ID NO: 569540 - RNA, 22 nt, Human
ggcaagagggcagauggagugc

SEQ ID NO: 569541 - RNA, 22 nt, Human
cuugaaagucagcagaguggau

SEQ ID NO: 569542 - RNA, 22 nt, Human
aucauccauggcugaucauaaa

SEQ ID NO: 569543 - RNA, 22 nt, Human
cacauuuaaagguugaagcuga

SEQ ID NO: 569544 - RNA, 22 nt, Human
uauuuguuucuaguggcagcaa

SEQ ID NO: 569545 - RNA, 22 nt, Human
caggccgggcacugcgcuaggu

SEQ ID NO: 569546 - RNA, 20 nt, Human
uuuuccacuccucaaaacag

SEQ ID NO: 569547 - RNA, 22 nt, Human
acaguguuucacuuaaccguuu

SEQ ID NO: 569548 - RNA, 22 nt, Human
cccacucccugcacgccugccg

SEQ ID NO: 569549 - RNA, 22 nt, Human
cuucuucagaggccagccucug

SEQ ID NO: 569550 - RNA, 22 nt, Human
gcuuucuuuucaagaauguauu

SEQ ID NO: 569551 - RNA, 22 nt, Human
guauuaugaaugccgaggcggc

SEQ ID NO: 569552 - RNA, 22 nt, Human
uaucuagagccuggaagucuug

SEQ ID NO: 569553 - RNA, 22 nt, Human
ugggugaagaggcuaugcuacu

SEQ ID NO: 569554 - RNA, 22 nt, Human
uguccagcugaaggcagccuca

SEQ ID NO: 569555 - RNA, 22 nt, Human
cuccuuaaagggagcagcagcu

SEQ ID NO: 569556 - RNA, 22 nt, Human
gucccucugccugugguucucu

SEQ ID NO: 569557 - RNA, 22 nt, Human
ccuguauggcuauuccuuggac

SEQ ID NO: 569558 - RNA, 22 nt, Human
aguggcaguagaugagcugguu

SEQ ID NO: 569559 - RNA, 22 nt, Human
uguccugugcacuguagcaugu

SEQ ID NO: 569560 - RNA, 22 nt, Human
cuuauuagaaagaaaagacaug

SEQ ID NO: 569561 - RNA, 21 nt, Human
aggcaugagcccugcauggac

SEQ ID NO: 569562 - RNA, 22 nt, Human
cagugcagccaaggacaggcac

SEQ ID NO: 569563 - RNA, 22 nt, Human
uaguauuuccuguaagcuauag

SEQ ID NO: 569564 - RNA, 22 nt, Human
aaagcuauuuuauugcagcucu

SEQ ID NO: 569565 - RNA, 22 nt, Human
gauuuucauuauagcuaguuuc

SEQ ID NO: 569566 - RNA, 22 nt, Human
gcugaaguugccuauuuuaaua

SEQ ID NO: 569567 - RNA, 22 nt, Human
gcacagucaacacuuauucacc

SEQ ID NO: 569568 - RNA, 22 nt, Human
ucucugguuaugucauuaagca

SEQ ID NO: 569569 - RNA, 22 nt, Human
uuguagucuaggauagauuuuu

SEQ ID NO: 569570 - RNA, 22 nt, Human
acauuguugagccucuuguuca

SEQ ID NO: 569571 - RNA, 22 nt, Human
uaguguguggucucucccuugu

SEQ ID NO: 569572 - RNA, 22 nt, Human
cagacguuggaggaaauauacc

SEQ ID NO: 569573 - RNA, 22 nt, Human
uccugugccuccaccugcuccg

SEQ ID NO: 569574 - RNA, 22 nt, Human
auuucagaguagaucguuauuu

SEQ ID NO: 569575 - RNA, 21 nt, Human
uaggugggagccccaguaugc

SEQ ID NO: 569576 - RNA, 22 nt, Human
cugcaucaguggauaugauggu

SEQ ID NO: 569577 - RNA, 22 nt, Human
uggaaagaggaagugcccagca

SEQ ID NO: 569578 - RNA, 22 nt, Human
uguuuuaagggucaacugucac

SEQ ID NO: 569579 - RNA, 22 nt, Human
cuucucaaaguugugaaucagg

SEQ ID NO: 569580 - RNA, 22 nt, Human
agaaagcacccugcacuuucug

SEQ ID NO: 569581 - RNA, 22 nt, Human
uacugaaagagugguggacucu

SEQ ID NO: 569582 - RNA, 22 nt, Human
guagcccaccuggggagggcga

SEQ ID NO: 569583 - RNA, 22 nt, Human
gccuggaaugcaaugugacgaa

SEQ ID NO: 569584 - RNA, 22 nt, Human
ggugagagaaaagaaacacugu

SEQ ID NO: 569585 - RNA, 22 nt, Human
ugggugcucugcgaccguaggg

SEQ ID NO: 569586 - RNA, 22 nt, Human
ccaggcccugccugugguuccu

SEQ ID NO: 569587 - RNA, 22 nt, Human
ggcaaucauuggcauucucugg

SEQ ID NO: 569588 - RNA, 22 nt, Human
acagcuucgaggaucucauccc

SEQ ID NO: 569589 - RNA, 22 nt, Human
auucauucugaccucaagagaa

SEQ ID NO: 569590 - RNA, 22 nt, Human
uucucaggaacucagugucagc

SEQ ID NO: 569591 - RNA, 22 nt, Human
caacuuuagaccccaaguagcu

SEQ ID NO: 569592 - RNA, 22 nt, Human
cucacaggguucuaucgaagag

SEQ ID NO: 569593 - RNA, 22 nt, Human
uuugcacuuaaauuuacaacac

SEQ ID NO: 569594 - RNA, 22 nt, Human
auacaggaugcugaacaucucu

SEQ ID NO: 569595 - RNA, 22 nt, Human
caacauuucaaggucuuuagga

SEQ ID NO: 569596 - RNA, 22 nt, Human
cagaaagcaguugucaaugggc

SEQ ID NO: 569597 - RNA, 22 nt, Human
gugauuucagguuuuucauacu

SEQ ID NO: 569598 - RNA, 21 nt, Human
agagacugucacugcaguacc

SEQ ID NO: 569599 - RNA, 22 nt, Human
uucucucaguuaaacuuuguga

SEQ ID NO: 569600 - RNA, 22 nt, Human
cuguuccuccaccucaacaaac

SEQ ID NO: 569601 - RNA, 17 nt, Human
ucugagaacuugaagca

SEQ ID NO: 569602 - RNA, 22 nt, Human
ucaucagcuccaugagguacuc

SEQ ID NO: 569603 - RNA, 23 nt, Human
aacauuuguaaggugauuuuguu

SEQ ID NO: 569604 - RNA, 22 nt, Human
uuaccacagugccugucuaaug

SEQ ID NO: 569605 - RNA, 21 nt, Human
gccaucaccaagcucuucccc

SEQ ID NO: 569606 - RNA, 22 nt, Human
ccuguggccgcgucgggcggcg

SEQ ID NO: 569607 - RNA, 21 nt, Human
aauuucagacccauuuugccu

SEQ ID NO: 569608 - RNA, 21 nt, Human
cccgugccuucagcaguccug

SEQ ID NO: 569609 - RNA, 17 nt, Human
cauucuguaaucuuucu

SEQ ID NO: 569610 - RNA, 22 nt, Human
ucacuguuaauaaauagcaaag

SEQ ID NO: 569611 - RNA, 22 nt, Human
cugugcuggcagaccuggaguu

SEQ ID NO: 569612 - RNA, 22 nt, Human
uucuguaauucuguuaguuuca

SEQ ID NO: 569613 - RNA, 22 nt, Human
ggaggaggggugacugaaugcu

SEQ ID NO: 569614 - RNA, 20 nt, Human
ccuguucacugcgcaguuuc

SEQ ID NO: 569615 - RNA, 22 nt, Human
gaaaccuuugccgauggggucc

SEQ ID NO: 569616 - RNA, 22 nt, Human
ggacucucaggcugucggcuuc

SEQ ID NO: 569617 - RNA, 22 nt, Human
uaaucuuagacauguauuuuuc

SEQ ID NO: 569618 - RNA, 23 nt, Human
auuuccuaaaagauaaucauuac

SEQ ID NO: 569619 - RNA, 22 nt, Human
aggcuuucgaugaacgcuugcu

SEQ ID NO: 569620 - RNA, 19 nt, Human
gggugaggaagagcguugc

SEQ ID NO: 569621 - RNA, 22 nt, Human
gcccagccccuggguggacgug

SEQ ID NO: 569622 - RNA, 22 nt, Human
ggcuggacuugguccuguuuug

SEQ ID NO: 569623 - RNA, 22 nt, Human
uaaaugcaguacaaauuguucu

SEQ ID NO: 569624 - RNA, 22 nt, Human
cuuauuggucccaggaggagaa

SEQ ID NO: 569625 - RNA, 20 nt, Human
uugaggagauauugaauacu

SEQ ID NO: 569626 - RNA, 22 nt, Human
ucuccacaccagaaggagcuga

SEQ ID NO: 569627 - RNA, 18 nt, Human
ggaggcucugugguuucc

SEQ ID NO: 569628 - RNA, 22 nt, Human
cacagaaucugugacuccaaga

SEQ ID NO: 569629 - RNA, 22 nt, Human
aaucugagggaacuugaacucc

SEQ ID NO: 569630 - RNA, 22 nt, Human
ggaagaggcugaggccaugcug

SEQ ID NO: 569631 - RNA, 22 nt, Human
gugcgccagcucaaggggaggc

SEQ ID NO: 569632 - RNA, 18 nt, Human
uccaggcuccaggcuaac

SEQ ID NO: 569633 - RNA, 17 nt, Human
ucugagaaugcuggagg

SEQ ID NO: 569634 - RNA, 19 nt, Human
gaacugaggucugaggcuu

SEQ ID NO: 569635 - RNA, 22 nt, Human
ggagggaguuucauuccugccc

SEQ ID NO: 569636 - RNA, 22 nt, Human
guguuuugugaggccuucuuuc

SEQ ID NO: 569637 - RNA, 18 nt, Human
agggagagaccgcggguc

SEQ ID NO: 569638 - RNA, 22 nt, Human
aauucagguuauauuugcaacu

SEQ ID NO: 569639 - RNA, 22 nt, Human
gagguggcugcuugcugggaaa

SEQ ID NO: 569640 - RNA, 22 nt, Human
agcaauguuggccuauauaccu

SEQ ID NO: 569641 - RNA, 22 nt, Human
ggucccagucccuuuccaccgu

SEQ ID NO: 569642 - RNA, 22 nt, Human
cauuuacauuuaagguuaauau

SEQ ID NO: 569643 - RNA, 22 nt, Human
uuggaauuugagaccaagaaaa

SEQ ID NO: 569644 - RNA, 22 nt, Human
cccucucccugcagaauguggc

SEQ ID NO: 569645 - RNA, 20 nt, Human
cagagcagugcccaggcggc

SEQ ID NO: 569646 - RNA, 22 nt, Human
uccucacagcugguucauucag

SEQ ID NO: 569647 - RNA, 22 nt, Human
auuaauaucccccgccguucug

SEQ ID NO: 569648 - RNA, 22 nt, Human
ucacaauacucacucaauggcu

SEQ ID NO: 569649 - RNA, 22 nt, Human
gcugucugcugggucgcucagg

SEQ ID NO: 569650 - RNA, 19 nt, Human
ucaaagucugagucacuuu

SEQ ID NO: 569651 - RNA, 22 nt, Human
cucacucaguuuuuaguucauc

SEQ ID NO: 569652 - RNA, 22 nt, Human
gcugccaccguggagaugagug

SEQ ID NO: 569653 - RNA, 22 nt, Human
uggcuccguuguacaggcugga

SEQ ID NO: 569654 - RNA, 22 nt, Human
gagccugagcaaugugauguuu

SEQ ID NO: 569655 - RNA, 22 nt, Human
acagugugcaagaaauggggga

SEQ ID NO: 569656 - RNA, 22 nt, Human
uucguuuaguccacaaaugcau

SEQ ID NO: 569657 - RNA, 22 nt, Human
cauggccagauucuuucuucuc

SEQ ID NO: 569658 - RNA, 22 nt, Human
uugaagcauuugcuauagcauu

SEQ ID NO: 569659 - RNA, 22 nt, Human
aaugucaacacaagagaaaugc

SEQ ID NO: 569660 - RNA, 22 nt, Human
auccuugaaugacucugcccuc

SEQ ID NO: 569661 - RNA, 22 nt, Human
uuuauacuccacucugcaagcg

SEQ ID NO: 569662 - RNA, 22 nt, Human
aaauucuguccugaaugccauu

SEQ ID NO: 569663 - RNA, 22 nt, Human
acaggcgcacaugagggccgug

SEQ ID NO: 569664 - RNA, 22 nt, Human
cagcuugcacacauauuagacg

SEQ ID NO: 569665 - RNA, 22 nt, Human
uugcuggaagguggcuggaauc

SEQ ID NO: 569666 - RNA, 22 nt, Human
cuguggccagagcgccguugac

SEQ ID NO: 569667 - RNA, 22 nt, Human
aucacaguuuuaccauuuggua

SEQ ID NO: 569668 - RNA, 22 nt, Human
uuugacaugugcuuauaacuuu

SEQ ID NO: 569669 - RNA, 22 nt, Human
uuguacuuaaauaugcaaauag

SEQ ID NO: 569670 - RNA, 19 nt, Human
uaugaaguugauaaaaguu

SEQ ID NO: 569671 - RNA, 22 nt, Human
acuguucacccagcacuagcag

SEQ ID NO: 569672 - RNA, 22 nt, Human
guguggucgaaguucucccgga

SEQ ID NO: 569673 - RNA, 23 nt, Human
aauagcugguaaugauagcacaa

SEQ ID NO: 569674 - RNA, 22 nt, Human
auuagccuguugcauuuucacu

SEQ ID NO: 569675 - RNA, 22 nt, Human
uuuuuaagagucuggaaauagu

SEQ ID NO: 569676 - RNA, 22 nt, Human
ugcgcaugcguggcucuccggc

SEQ ID NO: 569677 - RNA, 22 nt, Human
ucaccgccuugcccggccgggc

SEQ ID NO: 569678 - RNA, 22 nt, Human
ucugagaaugguggauguggug

SEQ ID NO: 569679 - RNA, 22 nt, Human
aucuguucuucaaaauauuaca

SEQ ID NO: 569680 - RNA, 22 nt, Human
auacuucuuuagcauauugaac

SEQ ID NO: 569681 - RNA, 22 nt, Human
ugggagagauaggcuucuggac

SEQ ID NO: 569682 - RNA, 22 nt, Human
ggaaacauuccaagaguugaaa

SEQ ID NO: 569683 - RNA, 22 nt, Human
acauucaugcaccuuccuaucc

SEQ ID NO: 569684 - RNA, 22 nt, Human
uguguuuuggaaggaacaugca

SEQ ID NO: 569685 - RNA, 22 nt, Human
guucuucagcccucagguccua

SEQ ID NO: 569686 - RNA, 22 nt, Human
ucucuacagcacccgcaugcua

SEQ ID NO: 569687 - RNA, 22 nt, Human
gcagcucucuggccugcccugg

SEQ ID NO: 569688 - RNA, 22 nt, Human
acagagacacggaagcuaaaga

SEQ ID NO: 569689 - RNA, 22 nt, Human
gauguaucugagcugcuuaggu

SEQ ID NO: 569690 - RNA, 22 nt, Human
acgucuucguuggcagagauuu

SEQ ID NO: 569691 - RNA, 22 nt, Human
auauacacuguuucaguugaag

SEQ ID NO: 569692 - RNA, 22 nt, Human
aacaguaugugagauuuacaca

SEQ ID NO: 569693 - RNA, 22 nt, Human
uauuacaguucgaguuucuagg

SEQ ID NO: 569694 - RNA, 22 nt, Human
aaaucugagaaauauuguccag

SEQ ID NO: 569695 - RNA, 22 nt, Human
ugaagacaguuuuacucaugag

SEQ ID NO: 569696 - RNA, 21 nt, Human
uucugagacucauuugaacuc

SEQ ID NO: 569697 - RNA, 22 nt, Human
gcugcuuugucuguaaaaugga

SEQ ID NO: 569698 - RNA, 22 nt, Human
cacgugcaggucuuaggagaca

SEQ ID NO: 569699 - RNA, 22 nt, Human
gggggcuggacuuucccacaca

SEQ ID NO: 569700 - RNA, 22 nt, Human
ccaggagaaugggauuacccua

SEQ ID NO: 569701 - RNA, 22 nt, Human
guuguacauaugaggauaaguu

SEQ ID NO: 569702 - RNA, 16 nt, Human
ucucugcuucauaggu

SEQ ID NO: 569703 - RNA, 22 nt, Human
uccuucccaggugucgccgccu

SEQ ID NO: 569704 - RNA, 22 nt, Human
cugcucaauuccggcacgcugg

SEQ ID NO: 569705 - RNA, 22 nt, Human
agucaacauuugagaugcaaug

SEQ ID NO: 569706 - RNA, 22 nt, Human
uguucugcaaugcugccuccuu

SEQ ID NO: 569707 - RNA, 22 nt, Human
cuccaaaggauaaaagcagagu

SEQ ID NO: 569708 - RNA, 22 nt, Human
uaaagacaauuucgagcuguag

SEQ ID NO: 569709 - RNA, 22 nt, Human
aggcaguguggagggcuguugc

SEQ ID NO: 569710 - RNA, 21 nt, Human
acaaauuguuuauauaggaag

SEQ ID NO: 569711 - RNA, 22 nt, Human
auuucagcagcccauguuugga

SEQ ID NO: 569712 - RNA, 22 nt, Human
uuccaggcgcacgucggccuua

SEQ ID NO: 569713 - RNA, 22 nt, Human
ggaguugacggccgacacccag

SEQ ID NO: 569714 - RNA, 22 nt, Human
ugaggaaugugacaaaaccaag

SEQ ID NO: 569715 - RNA, 22 nt, Human
aucaacuuguccuugauguuaa

SEQ ID NO: 569716 - RNA, 22 nt, Human
cucucuuuuucgugugccgaag

SEQ ID NO: 569717 - RNA, 22 nt, Human
gcggagaggcagagacuccgcg

SEQ ID NO: 569718 - RNA, 21 nt, Human
cagaggggcuagccuggcugc

SEQ ID NO: 569719 - RNA, 18 nt, Human
cagaaaguuauuuacucu

SEQ ID NO: 569720 - RNA, 22 nt, Human
gucuuuuuuacaccuuacauca

SEQ ID NO: 569721 - RNA, 21 nt, Human
uucacaguggauaacuuucug

SEQ ID NO: 569722 - RNA, 22 nt, Human
ucacccagacugucugacucuu

SEQ ID NO: 569723 - RNA, 22 nt, Human
cugcugucuuuauuucacugcu

SEQ ID NO: 569724 - RNA, 22 nt, Human
gaacaguuucccuguagaaaau

SEQ ID NO: 569725 - RNA, 22 nt, Human
gaacuuuaauuagcuuuugucu

SEQ ID NO: 569726 - RNA, 22 nt, Human
agucaguaugacuuauaguucu

SEQ ID NO: 569727 - RNA, 21 nt, Human
agcgucaauaucgucaacagg

SEQ ID NO: 569728 - RNA, 22 nt, Human
gccuucugaucgcuggacugac

SEQ ID NO: 569729 - RNA, 22 nt, Human
agugaauuagccuauuuguaaa

SEQ ID NO: 569730 - RNA, 22 nt, Human
uaucuguagucucaugguuccu

SEQ ID NO: 569731 - RNA, 22 nt, Human
agcuaauguauguugaaagcac

SEQ ID NO: 569732 - RNA, 22 nt, Human
gccaugaacucgggcauggaga

SEQ ID NO: 569733 - RNA, 22 nt, Human
gccuucugauugcuggacugac

SEQ ID NO: 569734 - RNA, 22 nt, Human
ccaggagagcucucguucagug

SEQ ID NO: 569735 - RNA, 22 nt, Human
ucaauuuauguggcuauucauu

SEQ ID NO: 569736 - RNA, 22 nt, Human
ucucuguaagcugccuucucgu

SEQ ID NO: 569737 - RNA, 19 nt, Human
acugcagggaggaggugug

SEQ ID NO: 569738 - RNA, 22 nt, Human
acaguguuacuugauaguguau

SEQ ID NO: 569739 - RNA, 23 nt, Human
uggagaauucagucuuuguuuug

SEQ ID NO: 569740 - RNA, 22 nt, Human
uuccaggaagcucucggccucu

SEQ ID NO: 569741 - RNA, 22 nt, Human
gcgagaaacuaagugcccuuug

SEQ ID NO: 569742 - RNA, 22 nt, Human
uccaagacaagcacauuccugc

SEQ ID NO: 569743 - RNA, 22 nt, Human
gucauggaggauugugaguggu

SEQ ID NO: 569744 - RNA, 22 nt, Human
uggcuuuugaaaaggugaugua

SEQ ID NO: 569745 - RNA, 22 nt, Human
uucagauaagucaaguuaguau

SEQ ID NO: 569746 - RNA, 22 nt, Human
gcacguguucuguggcaugggu

SEQ ID NO: 569747 - RNA, 22 nt, Human
gggacagcuguagugcuuggcu

SEQ ID NO: 569748 - RNA, 22 nt, Human
uccagcucugcugugcgccggu

SEQ ID NO: 569749 - RNA, 22 nt, Human
cccuggaacccauggccagugu

SEQ ID NO: 569750 - RNA, 19 nt, Human
aaauccaagcucaggccuc

SEQ ID NO: 569751 - RNA, 22 nt, Human
ugcccauggcaggauuucugaa

SEQ ID NO: 569752 - RNA, 22 nt, Human
gcaagcagcccagaacagcucu

SEQ ID NO: 569753 - RNA, 22 nt, Human
guucugucugagcaccacagga

SEQ ID NO: 569754 - RNA, 22 nt, Human
ugcugcucuucaccauggccuc

SEQ ID NO: 569755 - RNA, 22 nt, Human
gagacagagagguacucaacau

SEQ ID NO: 569756 - RNA, 22 nt, Human
uagcccuugaugcugcggccag

SEQ ID NO: 569757 - RNA, 22 nt, Human
caguuaaacagauugaguguua

SEQ ID NO: 569758 - RNA, 22 nt, Human
agagaauuaacauuccauggcu

SEQ ID NO: 569759 - RNA, 22 nt, Human
gagaauguuaauguugaaguau

SEQ ID NO: 569760 - RNA, 22 nt, Human
gcagagucagguccaaggacug

SEQ ID NO: 569761 - RNA, 22 nt, Human
ucacuaugcccagaauacaguu

SEQ ID NO: 569762 - RNA, 22 nt, Human
gacuacaggugugugccaccau

SEQ ID NO: 569763 - RNA, 23 nt, Human
aaauugucguaagguggagaugu

SEQ ID NO: 569764 - RNA, 22 nt, Human
gaaggagaggauugugaggcug

SEQ ID NO: 569765 - RNA, 22 nt, Human
gggcugagggguaucucauggg

SEQ ID NO: 569766 - RNA, 22 nt, Human
uuccaauaaaauguuauuugca

SEQ ID NO: 569767 - RNA, 22 nt, Human
uuucuucucacccaggacagag

SEQ ID NO: 569768 - RNA, 22 nt, Human
uuugacaacugugcaguuugua

SEQ ID NO: 569769 - RNA, 20 nt, Human
agcuuugguuaagccagugg

SEQ ID NO: 569770 - RNA, 22 nt, Human
augaucaagaauuuuguauucc

SEQ ID NO: 569771 - RNA, 22 nt, Human
gaaccuguccugagugaggagu

SEQ ID NO: 569772 - RNA, 22 nt, Human
auuggccagacuuauccuucag

SEQ ID NO: 569773 - RNA, 22 nt, Human
cugcccugcagcuccacggacu

SEQ ID NO: 569774 - RNA, 17 nt, Human
gugcuggccuggggcuc

SEQ ID NO: 569775 - RNA, 22 nt, Human
uuguuuaaagaacuucugacuu

SEQ ID NO: 569776 - RNA, 22 nt, Human
cuccagcagaaagggcgagugg

SEQ ID NO: 569777 - RNA, 22 nt, Human
cuucacaaaauauuucauuaua

SEQ ID NO: 569778 - RNA, 22 nt, Human
caaacugaacacgaaagucuuu

SEQ ID NO: 569779 - RNA, 22 nt, Human
cuacuguaguuaaaguuuugua

SEQ ID NO: 569780 - RNA, 22 nt, Human
ugugucuaaugacuauuucuuc

SEQ ID NO: 569781 - RNA, 22 nt, Human
aaguuacaggagaaagagauca

SEQ ID NO: 569782 - RNA, 22 nt, Human
gcuuccuucuaccacaucaugc

SEQ ID NO: 569783 - RNA, 22 nt, Human
ugcaagagcccaaacuauauac

SEQ ID NO: 569784 - RNA, 22 nt, Human
ucuccucuccuuucauguuguu

SEQ ID NO: 569785 - RNA, 22 nt, Human
cucagcaacagcgacuuaaggg

SEQ ID NO: 569786 - RNA, 22 nt, Human
uccuggggaggucgaggcugag

SEQ ID NO: 569787 - RNA, 22 nt, Human
aaaagagccacuuaugaccuca

SEQ ID NO: 569788 - RNA, 22 nt, Human
gugcuaugauuggacagaauag

SEQ ID NO: 569789 - RNA, 22 nt, Human
ggagggaaccuuggcuggauug

SEQ ID NO: 569790 - RNA, 22 nt, Human
auacaccaccuuggaucuuuca

SEQ ID NO: 569791 - RNA, 18 nt, Human
ucaguccuccauagagcu

SEQ ID NO: 569792 - RNA, 22 nt, Human
cggucguaguucuucagcaggu

SEQ ID NO: 569793 - RNA, 22 nt, Human
auagcaaaggacaauagucagu

SEQ ID NO: 569794 - RNA, 22 nt, Human
aucucccaaauuagccucuuga

SEQ ID NO: 569795 - RNA, 22 nt, Human
cauaacauccuugcuacuuuga

SEQ ID NO: 569796 - RNA, 22 nt, Human
ucuuuuaucuguuguguaacaa

SEQ ID NO: 569797 - RNA, 22 nt, Human
agaguguggaaauguucagagu

SEQ ID NO: 569798 - RNA, 22 nt, Human
aauuagaagcuguuagcaaaau

SEQ ID NO: 569799 - RNA, 22 nt, Human
uaccaaaaccaagccauuaucu

SEQ ID NO: 569800 - RNA, 22 nt, Human
ucacuugaaccugggaggcaga

SEQ ID NO: 569801 - RNA, 22 nt, Human
acacacagaaggaagccccacu

SEQ ID NO: 569802 - RNA, 22 nt, Human
gagcagcaggccagguugcagg

SEQ ID NO: 569803 - RNA, 22 nt, Human
auuuacagccuugccaucuaua

SEQ ID NO: 569804 - RNA, 22 nt, Human
cacaggaagcaagccuggggcc

SEQ ID NO: 569805 - RNA, 22 nt, Human
uaucacauacuucucauccagg

SEQ ID NO: 569806 - RNA, 22 nt, Human
cugcaguucuucuccucaaggc

SEQ ID NO: 569807 - RNA, 22 nt, Human
cauuucaaacaguuacagcugc

SEQ ID NO: 569808 - RNA, 22 nt, Human
gcugucccgaaccccugguaau

SEQ ID NO: 569809 - RNA, 22 nt, Human
ugcacccacuuagcugaaguuc

SEQ ID NO: 569810 - RNA, 22 nt, Human
gcugcuggcuuccugcuguuuu

SEQ ID NO: 569811 - RNA, 22 nt, Human
cugaaacuauggggaggggagc

SEQ ID NO: 569812 - RNA, 22 nt, Human
aacugguucuggaggcugcagg

SEQ ID NO: 569813 - RNA, 22 nt, Human
ucaaagcacuggggaaagccug

SEQ ID NO: 569814 - RNA, 22 nt, Human
ggaaggggagcuggaaagggua

SEQ ID NO: 569815 - RNA, 22 nt, Human
cccucuggcucuucucaggccg

SEQ ID NO: 569816 - RNA, 22 nt, Human
uaacauuucggugacaguggga

SEQ ID NO: 569817 - RNA, 22 nt, Human
guccacauaggaacccagcuuc

SEQ ID NO: 569818 - RNA, 22 nt, Human
ugacuuuggacuagugauuuaa

SEQ ID NO: 569819 - RNA, 22 nt, Human
agaguguguggggcugagguca

SEQ ID NO: 569820 - RNA, 22 nt, Human
acaaucagcacugaguuuaucu

SEQ ID NO: 569821 - RNA, 20 nt, Human
ccuggagccuggaaggaguc

SEQ ID NO: 569822 - RNA, 18 nt, Human
ucugugggaucagugagg

SEQ ID NO: 569823 - RNA, 22 nt, Human
cuuuaguucuagaaagugaaac

SEQ ID NO: 569824 - RNA, 22 nt, Human
agaaguaucaggaagauucuca

SEQ ID NO: 569825 - RNA, 22 nt, Human
ugaaacagucuccagacuugga

SEQ ID NO: 569826 - RNA, 22 nt, Human
aggagggagcuuaagccaggca

SEQ ID NO: 569827 - RNA, 17 nt, Human
ucuggaugucauggaag

SEQ ID NO: 569828 - RNA, 22 nt, Human
agcuccugaaaauccagacugg

SEQ ID NO: 569829 - RNA, 22 nt, Human
caucugcaggggaagccaguuu

SEQ ID NO: 569830 - RNA, 22 nt, Human
augaugaagcaugguuacacug

SEQ ID NO: 569831 - RNA, 22 nt, Human
uuugaagauaaauauggagaaa

SEQ ID NO: 569832 - RNA, 19 nt, Human
cuccacagggauugugauu

SEQ ID NO: 569833 - RNA, 22 nt, Human
ucuccucuauuucuguauguau

SEQ ID NO: 569834 - RNA, 22 nt, Human
ucuuugcauggacauguguuuu

SEQ ID NO: 569835 - RNA, 22 nt, Human
cuccgcuuguguauaccuccaa

SEQ ID NO: 569836 - RNA, 22 nt, Human
uccacagugguggaauuguuca

SEQ ID NO: 569837 - RNA, 22 nt, Human
cgcuuuggagucccugcuuuac

SEQ ID NO: 569838 - RNA, 22 nt, Human
uuuacagagaauguacauaaag

SEQ ID NO: 569839 - RNA, 19 nt, Human
uggugcgcuguuccugagc

SEQ ID NO: 569840 - RNA, 22 nt, Human
uagcagaacaauagucaaugau

SEQ ID NO: 569841 - RNA, 22 nt, Human
gugugcgccgacacagccaggu

SEQ ID NO: 569842 - RNA, 22 nt, Human
cuauuuucccauaugguugaca

SEQ ID NO: 569843 - RNA, 22 nt, Human
gucuccugaggcauccauugaa

SEQ ID NO: 569844 - RNA, 22 nt, Human
uggcuggcuguccagcugggca

SEQ ID NO: 569845 - RNA, 22 nt, Human
aaggcuauaucucaauacuauu

SEQ ID NO: 569846 - RNA, 22 nt, Human
cauugcaacuucaaacuccugg

SEQ ID NO: 569847 - RNA, 22 nt, Human
gcacuagauucugaagcagcag

SEQ ID NO: 569848 - RNA, 22 nt, Human
ggcggcgcguagccggagacuu

SEQ ID NO: 569849 - RNA, 22 nt, Human
acagcaucccugaagauaacca

SEQ ID NO: 569850 - RNA, 22 nt, Human
aggccaagcucccagagaagcu

SEQ ID NO: 569851 - RNA, 22 nt, Human
ucaggagaguguucaguggagg

SEQ ID NO: 569852 - RNA, 22 nt, Human
gucuugcacuuaccuaagaacu

SEQ ID NO: 569853 - RNA, 22 nt, Human
ucuugccgcgcaggcgcaguuc

SEQ ID NO: 569854 - RNA, 22 nt, Human
acugagaacuuggggacagagg

SEQ ID NO: 569855 - RNA, 22 nt, Human
caagacuucaccgcucugugcu

SEQ ID NO: 569856 - RNA, 22 nt, Human
aaauacaguggcagcagauaau

SEQ ID NO: 569857 - RNA, 22 nt, Human
uguaucauauggggaagcuuca

SEQ ID NO: 569858 - RNA, 22 nt, Human
gaaaugucaagauauguuugga

SEQ ID NO: 569859 - RNA, 22 nt, Human
gcauucuugguggagugcuaaa

SEQ ID NO: 569860 - RNA, 22 nt, Human
ccugugggagggagcggcugga

SEQ ID NO: 569861 - RNA, 22 nt, Human
guaaagcaaaauguagagauug

SEQ ID NO: 569862 - RNA, 22 nt, Human
ucagccagaggcuucuugguuu

SEQ ID NO: 569863 - RNA, 22 nt, Human
aaacaucuucucuugauucuuu

SEQ ID NO: 569864 - RNA, 22 nt, Human
gagcagcagcugggccagguuc

SEQ ID NO: 569865 - RNA, 22 nt, Human
gcagaagucagaccaucugaau

SEQ ID NO: 569866 - RNA, 23 nt, Human
auaauaacgucugucuugucucu

SEQ ID NO: 569867 - RNA, 22 nt, Human
agcugcaaguccaaaggaauua

SEQ ID NO: 569868 - RNA, 22 nt, Human
gagaauacaaccagaagcugag

SEQ ID NO: 569869 - RNA, 22 nt, Human
ucucgugcaggccuugcucgga

SEQ ID NO: 569870 - RNA, 22 nt, Human
cucuagcucccagggagcgucu

SEQ ID NO: 569871 - RNA, 22 nt, Human
uuccuucuucauuguguuacag

SEQ ID NO: 569872 - RNA, 22 nt, Human
auugagaaggagauuggcaucu

SEQ ID NO: 569873 - RNA, 22 nt, Human
ggagugggaacaaugacauggu

SEQ ID NO: 569874 - RNA, 22 nt, Human
uuguaacaguagcugucagcuc

SEQ ID NO: 569875 - RNA, 21 nt, Human
aguuagcagauuucugucucc

SEQ ID NO: 569876 - RNA, 21 nt, Human
guucaauagcucuuugaaugc

SEQ ID NO: 569877 - RNA, 23 nt, Human
ucucaggguggcugggcccaucc

SEQ ID NO: 569878 - RNA, 22 nt, Human
agugggagcggcagucggggac

SEQ ID NO: 569879 - RNA, 22 nt, Human
agccugugcuguguuugcucca

SEQ ID NO: 569880 - RNA, 22 nt, Human
aaucccuccccaggcaaguccu

SEQ ID NO: 569881 - RNA, 23 nt, Human
gcacagagcaguuaggggaagau

SEQ ID NO: 569882 - RNA, 22 nt, Human
ggucuuucuuugauaguggaga

SEQ ID NO: 569883 - RNA, 22 nt, Human
uucuaagaaauggaaaacgauu

SEQ ID NO: 569884 - RNA, 22 nt, Human
agugggaauuuucucccaggga

SEQ ID NO: 569885 - RNA, 22 nt, Human
aaagaugucauacacauuaaga

SEQ ID NO: 569886 - RNA, 22 nt, Human
uacugcaaaccauuuacaguag

SEQ ID NO: 569887 - RNA, 19 nt, Human
cuggcuucaagcaguccuc

SEQ ID NO: 569888 - RNA, 18 nt, Human
augcucuagucuuuccug

SEQ ID NO: 569889 - RNA, 22 nt, Human
ccaaaauauuagugcuuaagua

SEQ ID NO: 569890 - RNA, 22 nt, Human
ugggggagccuucacaguagcu

SEQ ID NO: 569891 - RNA, 22 nt, Human
gggacuggaguagaggccggug

SEQ ID NO: 569892 - RNA, 22 nt, Human
uuguccagcgaccaggcucugu

SEQ ID NO: 569893 - RNA, 18 nt, Human
uucggcagauacgcuugg

SEQ ID NO: 569894 - RNA, 22 nt, Human
caggccacacggcggcucccug

SEQ ID NO: 569895 - RNA, 22 nt, Human
caguuuuucaaaauuacaugau

SEQ ID NO: 569896 - RNA, 22 nt, Human
uugaaguccuagccccugguaa

SEQ ID NO: 569897 - RNA, 21 nt, Human
ucuuggggaggagggcugcac

SEQ ID NO: 569898 - RNA, 22 nt, Human
ucuauuaaugauucaauagugu

SEQ ID NO: 569899 - RNA, 22 nt, Human
ugcaauuagcguauuaguuuau

SEQ ID NO: 569900 - RNA, 22 nt, Human
auguacaaucuaucacaagaag

SEQ ID NO: 569901 - RNA, 22 nt, Human
aacagaaaucauuuagggcucu

SEQ ID NO: 569902 - RNA, 22 nt, Human
gccucugcacuguggcacacca

SEQ ID NO: 569903 - RNA, 22 nt, Human
uucuccccgucucucugaggcc

SEQ ID NO: 569904 - RNA, 22 nt, Human
augcacaagguagauuauuauu

SEQ ID NO: 569905 - RNA, 22 nt, Human
gcugcaagugcauguugcaacu

SEQ ID NO: 569906 - RNA, 22 nt, Human
uccaggagcucauccacgucaa

SEQ ID NO: 569907 - RNA, 22 nt, Human
ccuuuuggccaggucagugcag

SEQ ID NO: 569908 - RNA, 22 nt, Human
uacauuuauaaggcuucucugu

SEQ ID NO: 569909 - RNA, 21 nt, Human
uuggccgugcagaugaacagc

SEQ ID NO: 569910 - RNA, 22 nt, Human
cccuguccugcuaggcccuggu

SEQ ID NO: 569911 - RNA, 22 nt, Human
acccugccucugcuuccuguag

SEQ ID NO: 569912 - RNA, 22 nt, Human
uaaaugaaaggguuuaauuuau

SEQ ID NO: 569913 - RNA, 22 nt, Human
auacacauguuauuguggaagc

SEQ ID NO: 569914 - RNA, 21 nt, Human
ucacuagugccuucugucauu

SEQ ID NO: 569915 - RNA, 22 nt, Human
gggccccaagaaccuccuccug

SEQ ID NO: 569916 - RNA, 22 nt, Human
ugcaucauuaagguacaguugg

SEQ ID NO: 569917 - RNA, 22 nt, Human
cugaacaucccgcagugcacga

SEQ ID NO: 569918 - RNA, 22 nt, Human
aagcacuaauauuuuggcaccu

SEQ ID NO: 569919 - RNA, 20 nt, Human
gggugugugcagggccuggu

SEQ ID NO: 569920 - RNA, 22 nt, Human
caauguacaaaauaauuacaca

SEQ ID NO: 569921 - RNA, 22 nt, Human
uugcaucagcaggcauaauugg

SEQ ID NO: 569922 - RNA, 22 nt, Human
aguuuacccacuguugaaauua

SEQ ID NO: 569923 - RNA, 22 nt, Human
uuuccaguuguucuagaaagcu

SEQ ID NO: 569924 - RNA, 22 nt, Human
auuuccuauacaguuguccaua

SEQ ID NO: 569925 - RNA, 22 nt, Human
aucuucaaggaaaaaauacagu

SEQ ID NO: 569926 - RNA, 22 nt, Human
guugcaaaugggaagaugguua

SEQ ID NO: 569927 - RNA, 22 nt, Human
gucugcugacagagcauggacc

SEQ ID NO: 569928 - RNA, 22 nt, Human
gugcauauguguguauacaaac

SEQ ID NO: 569929 - RNA, 22 nt, Human
accaagaguccaagugagguug

SEQ ID NO: 569930 - RNA, 22 nt, Human
ggcagaggaagcuggaaguggg

SEQ ID NO: 569931 - RNA, 22 nt, Human
auucucuguacagaagguaccg

SEQ ID NO: 569932 - RNA, 20 nt, Human
uuucacaaugaacaugucuc

SEQ ID NO: 569933 - RNA, 22 nt, Human
gcugcugcuugaaggcucggag

SEQ ID NO: 569934 - RNA, 22 nt, Human
aacugcuaacugguuugauacu

SEQ ID NO: 569935 - RNA, 22 nt, Human
acugcauuaucaccaagaugua

SEQ ID NO: 569936 - RNA, 22 nt, Human
ggagccuggaguuucugauggg

SEQ ID NO: 569937 - RNA, 22 nt, Human
aggggcuuguggaguugcuggu

SEQ ID NO: 569938 - RNA, 22 nt, Human
cuucuuaaaguugucacagcug

SEQ ID NO: 569939 - RNA, 22 nt, Human
ucuccagaguaaccuuggagca

SEQ ID NO: 569940 - RNA, 22 nt, Human
ucaucuguuaugggaguuuuug

SEQ ID NO: 569941 - RNA, 22 nt, Human
agggaaauuaaugugagcaaug

SEQ ID NO: 569942 - RNA, 22 nt, Human
auauuuguuuggcagaguucag

SEQ ID NO: 569943 - RNA, 22 nt, Human
gcgacgcaggcacgacguguug

SEQ ID NO: 569944 - RNA, 22 nt, Human
ugcaaaaagagcgaggagcccu

SEQ ID NO: 569945 - RNA, 22 nt, Human
uuuacuucugcauuuccccuag

SEQ ID NO: 569946 - RNA, 22 nt, Human
gagcucauccccaugguccguc

SEQ ID NO: 569947 - RNA, 16 nt, Human
ucauugaagacaguac

SEQ ID NO: 569948 - RNA, 22 nt, Human
ucgcagcacuagcccugcauug

SEQ ID NO: 569949 - RNA, 22 nt, Human
gccaggaugacuauacaacagc

SEQ ID NO: 569950 - RNA, 22 nt, Human
augccaucaaugacagaguuag

SEQ ID NO: 569951 - RNA, 22 nt, Human
gggcggggcuuccguccuccac

SEQ ID NO: 569952 - RNA, 22 nt, Human
ucagaacauccugguuuaaaau

SEQ ID NO: 569953 - RNA, 22 nt, Human
ugagucauguaauaaugcugcu

SEQ ID NO: 569954 - RNA, 22 nt, Human
cagggccucugugggcucucuc

SEQ ID NO: 569955 - RNA, 22 nt, Human
uaaggagagaauuuagagguuu

SEQ ID NO: 569956 - RNA, 23 nt, Human
uggcucuguggaucccucaggag

SEQ ID NO: 569957 - RNA, 22 nt, Human
acaggauuaauaaaaaauugua

SEQ ID NO: 569958 - RNA, 22 nt, Human
acaaaugcuuaguucaccaaaa

SEQ ID NO: 569959 - RNA, 22 nt, Human
cggcagagcccugagucagccu

SEQ ID NO: 569960 - RNA, 23 nt, Human
uguguucagucaaggaucagagu

SEQ ID NO: 569961 - RNA, 22 nt, Human
agaguuuacagaaauaagcugu

SEQ ID NO: 569962 - RNA, 22 nt, Human
uacugucuuuuccuaaaugggu

SEQ ID NO: 569963 - RNA, 22 nt, Human
ccuggccugugaaucugagagc

SEQ ID NO: 569964 - RNA, 22 nt, Human
ucuguaaacacccguaagcuuu

SEQ ID NO: 569965 - RNA, 22 nt, Human
uuuucuaacaucuaguaauuug

SEQ ID NO: 569966 - RNA, 22 nt, Human
uggcacugucaccaaugcuguc

SEQ ID NO: 569967 - RNA, 22 nt, Human
uugaacaguuuugucagguuca

SEQ ID NO: 569968 - RNA, 22 nt, Human
ccugcgcgucugggucugucuc

SEQ ID NO: 569969 - RNA, 18 nt, Human
ggaaaaggagugucuagc

SEQ ID NO: 569970 - RNA, 22 nt, Human
aucuucaaagcacaucguuugu

SEQ ID NO: 569971 - RNA, 22 nt, Human
gguccccguggaggcuggagcg

SEQ ID NO: 569972 - RNA, 22 nt, Human
ggaaugcacuagacugugaaac

SEQ ID NO: 569973 - RNA, 20 nt, Human
cccuuuucacgaaaaggaga

SEQ ID NO: 569974 - RNA, 22 nt, Human
ugcagaauauucuggugacaau

SEQ ID NO: 569975 - RNA, 21 nt, Human
uaagaacauuaucuucuuccu

SEQ ID NO: 569976 - RNA, 22 nt, Human
uacagcgaaaauuuagcuugau

SEQ ID NO: 569977 - RNA, 17 nt, Human
ccuuucuucccagaggg

SEQ ID NO: 569978 - RNA, 22 nt, Human
agugaaaaccuaaucaugcagu

SEQ ID NO: 569979 - RNA, 22 nt, Human
auuucauccauuaagaguacuc

SEQ ID NO: 569980 - RNA, 22 nt, Human
uuucucggcagagaugaugggc

SEQ ID NO: 569981 - RNA, 22 nt, Human
ucuguuauaaaucacacugcau

SEQ ID NO: 569982 - RNA, 22 nt, Human
aguguauuugccuauaaaaaug

SEQ ID NO: 569983 - RNA, 22 nt, Human
ugaguguuguaaccauaugauu

SEQ ID NO: 569984 - RNA, 22 nt, Human
ugcuuucaaugaauuguauacu

SEQ ID NO: 569985 - RNA, 22 nt, Human
ugcccugcagacccugcagugu

SEQ ID NO: 569986 - RNA, 22 nt, Human
aacuuucagaauccuaugcauu

SEQ ID NO: 569987 - RNA, 22 nt, Human
uaaguauguuagaaaaucaagu

SEQ ID NO: 569988 - RNA, 22 nt, Human
acuagaaacuaauggauuauua

SEQ ID NO: 569989 - RNA, 22 nt, Human
ugcauuaagaauuucugaggau

SEQ ID NO: 569990 - RNA, 22 nt, Human
ugucuucauuccccaugaaguc

SEQ ID NO: 569991 - RNA, 22 nt, Human
ucaagaaagggcuucaccagga

SEQ ID NO: 569992 - RNA, 22 nt, Human
guuucuccucugugucuuguuu

SEQ ID NO: 569993 - RNA, 22 nt, Human
gagcugagggucuaggaggguu

SEQ ID NO: 569994 - RNA, 22 nt, Human
aagacacuuucuaaauagaagu

SEQ ID NO: 569995 - RNA, 22 nt, Human
cugugaauguuauaucucaaug

SEQ ID NO: 569996 - RNA, 22 nt, Human
aggugggacccguggggugcga

SEQ ID NO: 569997 - RNA, 22 nt, Human
guucuccaggggcuguucaucu

SEQ ID NO: 569998 - RNA, 22 nt, Human
agcaaggcagcuuucacugcuu

SEQ ID NO: 569999 - RNA, 22 nt, Human
cacagcuucuccccgcugcggc

SEQ ID NO: 570000 - RNA, 22 nt, Human
gggaggugauuaggaccaugua

SEQ ID NO: 570001 - RNA, 22 nt, Human
aggccgugugagcaugugugag

SEQ ID NO: 570002 - RNA, 22 nt, Human
guguuucccuggcacaagaacc

SEQ ID NO: 570003 - RNA, 22 nt, Human
cuaguucugccauucaguguca

SEQ ID NO: 570004 - RNA, 22 nt, Human
uucuuucugggguccuucggcu

SEQ ID NO: 570005 - RNA, 22 nt, Human
cagguugaaaguggaggagcua

SEQ ID NO: 570006 - RNA, 22 nt, Human
uaucaguagaacaauggacauu

SEQ ID NO: 570007 - RNA, 22 nt, Human
aauacagugaaagugagcaagg

SEQ ID NO: 570008 - RNA, 22 nt, Human
ugcugcgggacccacugugggc

SEQ ID NO: 570009 - RNA, 22 nt, Human
cuugucuaguuccuggugaugu

SEQ ID NO: 570010 - RNA, 22 nt, Human
auacaacagaaaaugauuauuc

SEQ ID NO: 570011 - RNA, 22 nt, Human
uaaggacagcagcuacuuuucc

SEQ ID NO: 570012 - RNA, 22 nt, Human
aaagcacauuacaagcucaguc

SEQ ID NO: 570013 - RNA, 22 nt, Human
aagauuuaccacuuuauucaag

SEQ ID NO: 570014 - RNA, 22 nt, Human
aaugagaauguaagugaagaga

SEQ ID NO: 570015 - RNA, 23 nt, Human
augcaacauugccaguaugggca

SEQ ID NO: 570016 - RNA, 19 nt, Human
auucuucucuuccugcugu

SEQ ID NO: 570017 - RNA, 22 nt, Human
aguguucuagcgcugugcuugu

SEQ ID NO: 570018 - RNA, 22 nt, Human
ugucuuaugcugcauagacuau

SEQ ID NO: 570019 - RNA, 22 nt, Human
uuuggagagaugaaguucugug

SEQ ID NO: 570020 - RNA, 17 nt, Human
caguuucuucccccucu

SEQ ID NO: 570021 - RNA, 22 nt, Human
ucaaaggcuugugguucuggga

SEQ ID NO: 570022 - RNA, 22 nt, Human
auacaugugugugcauacaugu

SEQ ID NO: 570023 - RNA, 22 nt, Human
uggucccugaagagagaccuug

SEQ ID NO: 570024 - RNA, 22 nt, Human
ugcuccugaacacagcccuaug

SEQ ID NO: 570025 - RNA, 22 nt, Human
aaugguaauauuucauaguugu

SEQ ID NO: 570026 - RNA, 22 nt, Human
ugcauggacgugacuuggccaa

SEQ ID NO: 570027 - RNA, 22 nt, Human
uucauuacauucaaaaggcauu

SEQ ID NO: 570028 - RNA, 22 nt, Human
auggggagcucaccaccuguuu

SEQ ID NO: 570029 - RNA, 22 nt, Human
agugacagauuaccggcagagc

SEQ ID NO: 570030 - RNA, 22 nt, Human
uggcccugccgccacgacgucu

SEQ ID NO: 570031 - RNA, 22 nt, Human
uucuguuuauaauuugcaguug

SEQ ID NO: 570032 - RNA, 18 nt, Human
gacaaaaguacagacaga

SEQ ID NO: 570033 - RNA, 22 nt, Human
ucuuugcagaauuuaacuuugc

SEQ ID NO: 570034 - RNA, 20 nt, Human
ucaggguuucccauucuugg

SEQ ID NO: 570035 - RNA, 22 nt, Human
cagucauuaugggaguuaaucc

SEQ ID NO: 570036 - RNA, 22 nt, Human
auuuuagagaaacaaacguagg

SEQ ID NO: 570037 - RNA, 22 nt, Human
aaaacauuuuacugccaucuca

SEQ ID NO: 570038 - RNA, 22 nt, Human
ggggaggaagcuggaacacggg

SEQ ID NO: 570039 - RNA, 22 nt, Human
ccucuucagcaaaguucggccc

SEQ ID NO: 570040 - RNA, 22 nt, Human
guuaaugcaaagcagagggcaa

SEQ ID NO: 570041 - RNA, 22 nt, Human
uuugcuugauuaggauauggaa

SEQ ID NO: 570042 - RNA, 22 nt, Human
acagugucuccugguacccagu

SEQ ID NO: 570043 - RNA, 22 nt, Human
augaauaaaacauuuuaaucag

SEQ ID NO: 570044 - RNA, 22 nt, Human
gaggaggcuuccgggaggcacg

SEQ ID NO: 570045 - RNA, 22 nt, Human
aagcccuuggcgcacaccgggc

SEQ ID NO: 570046 - RNA, 22 nt, Human
gacauuuauuggauuuuacgag

SEQ ID NO: 570047 - RNA, 22 nt, Human
gcucguacaccagcguggaggu

SEQ ID NO: 570048 - RNA, 22 nt, Human
augcacuaugaugagcuagucu

SEQ ID NO: 570049 - RNA, 22 nt, Human
acaaaggugagcagaagacaca

SEQ ID NO: 570050 - RNA, 22 nt, Human
gugaagaugccucaggugaccc

SEQ ID NO: 570051 - RNA, 22 nt, Human
auguaguauuuggaaauguaaa

SEQ ID NO: 570052 - RNA, 22 nt, Human
cacaccuuaggccugagcgcuu

SEQ ID NO: 570053 - RNA, 22 nt, Human
cugggaggcccacguugggaag

SEQ ID NO: 570054 - RNA, 22 nt, Human
cugggguaucugccacaacucu

SEQ ID NO: 570055 - RNA, 22 nt, Human
auuaaauuggacgcugggggaa

SEQ ID NO: 570056 - RNA, 22 nt, Human
cagacucuugagcugauuguau

SEQ ID NO: 570057 - RNA, 22 nt, Human
ggagcugcucagagccaguccc

SEQ ID NO: 570058 - RNA, 22 nt, Human
uagcauuucacugaucuucacu

SEQ ID NO: 570059 - RNA, 22 nt, Human
acaguaaucugggaacuuguua

SEQ ID NO: 570060 - RNA, 22 nt, Human
caauaguaaauuacggaggaga

SEQ ID NO: 570061 - RNA, 21 nt, Human
uuccuccucuggagaagaaga

SEQ ID NO: 570062 - RNA, 20 nt, Human
ugcuggaggcgccggcgcuc

SEQ ID NO: 570063 - RNA, 22 nt, Human
uucccuuucuuaaagaguuagg

SEQ ID NO: 570064 - RNA, 21 nt, Human
caggaacauucuuuacauuua

SEQ ID NO: 570065 - RNA, 22 nt, Human
ugccgcugucgccaccauggcu

SEQ ID NO: 570066 - RNA, 22 nt, Human
aaugaaacuauauuuagagagg

SEQ ID NO: 570067 - RNA, 22 nt, Human
uuguacaaauaggaaccucuga

SEQ ID NO: 570068 - RNA, 22 nt, Human
cuuugcagagggggugggagcu

SEQ ID NO: 570069 - RNA, 22 nt, Human
ggagugacucucggggccacua

SEQ ID NO: 570070 - RNA, 22 nt, Human
ccagcugcgggcaucgagaguu

SEQ ID NO: 570071 - RNA, 22 nt, Human
auuuacagacguggauuagugc

SEQ ID NO: 570072 - RNA, 22 nt, Human
gaugcugauuuuacuguuuucu

SEQ ID NO: 570073 - RNA, 22 nt, Human
gauguggcugcucuaaagccca

SEQ ID NO: 570074 - RNA, 22 nt, Human
ggccacuguuuccugggcaguu

SEQ ID NO: 570075 - RNA, 22 nt, Human
gaaaauaguucaucacaaugau

SEQ ID NO: 570076 - RNA, 22 nt, Human
ccaggaugacccccacuuuccu

SEQ ID NO: 570077 - RNA, 22 nt, Human
gcuucucauguuuauuuuuaca

SEQ ID NO: 570078 - RNA, 22 nt, Human
uuuuucaagacaaccugcaugu

SEQ ID NO: 570079 - RNA, 17 nt, Human
aggucugagaguaucug

SEQ ID NO: 570080 - RNA, 21 nt, Human
agcaucugaggcaguuuccua

SEQ ID NO: 570081 - RNA, 22 nt, Human
uaaaguauaagcauuggaguau

SEQ ID NO: 570082 - RNA, 22 nt, Human
ugucuuacagcaaucuguucug

SEQ ID NO: 570083 - RNA, 22 nt, Human
ugcauguuucuguauguuaaug

SEQ ID NO: 570084 - RNA, 22 nt, Human
uucuguucccuaggaccugggg

SEQ ID NO: 570085 - RNA, 22 nt, Human
acggagcccgugucagguggga

SEQ ID NO: 570086 - RNA, 22 nt, Human
augaaacucuagcuuucagcac

SEQ ID NO: 570087 - RNA, 22 nt, Human
gcggcccgagcaggacgggugg

SEQ ID NO: 570088 - RNA, 22 nt, Human
aaauuaacuaucacuuuuguga

SEQ ID NO: 570089 - RNA, 22 nt, Human
cgaggaggaaacgcggagaacu

SEQ ID NO: 570090 - RNA, 22 nt, Human
aguguuaaggcugguugcuaua

SEQ ID NO: 570091 - RNA, 22 nt, Human
auaguagcgagaucucagcuca

SEQ ID NO: 570092 - RNA, 22 nt, Human
ucacaggagcccaggggagcug

SEQ ID NO: 570093 - RNA, 22 nt, Human
uuuccacacucacugcacucau

SEQ ID NO: 570094 - RNA, 22 nt, Human
aagcauuuuagauaaagcauca

SEQ ID NO: 570095 - RNA, 22 nt, Human
caaacauuuguuggaaccccug

SEQ ID NO: 570096 - RNA, 22 nt, Human
uucaguaugcugaaugauuuuu

SEQ ID NO: 570097 - RNA, 22 nt, Human
ucuuauaccccuaaacugcagc

SEQ ID NO: 570098 - RNA, 22 nt, Human
ucguuauagaacauucuugggu

SEQ ID NO: 570099 - RNA, 22 nt, Human
cuucauuuggcaggcuggccuc

SEQ ID NO: 570100 - RNA, 22 nt, Human
uuggaggacuaguuaagagacc

SEQ ID NO: 570101 - RNA, 22 nt, Human
cgcgcugcagacagcggaggcc

SEQ ID NO: 570102 - RNA, 22 nt, Human
accuuguuguagguacaaaaga

SEQ ID NO: 570103 - RNA, 22 nt, Human
acguagcacugagagaugcagg

SEQ ID NO: 570104 - RNA, 22 nt, Human
gcagagcuggaacugguacuca

SEQ ID NO: 570105 - RNA, 22 nt, Human
cuuggcauguucaucugcuugg

SEQ ID NO: 570106 - RNA, 22 nt, Human
cauuuugugcuagacacuaugg

SEQ ID NO: 570107 - RNA, 22 nt, Human
uaggcagggauuaggguugauu

SEQ ID NO: 570108 - RNA, 22 nt, Human
aaaugcacugaauauuccaaau

SEQ ID NO: 570109 - RNA, 22 nt, Human
uuguaagacuguagaaugcaaa

SEQ ID NO: 570110 - RNA, 22 nt, Human
ucacacaucucagguguuuaau

SEQ ID NO: 570111 - RNA, 22 nt, Human
uaaaaguuagcuaggacaaagu

SEQ ID NO: 570112 - RNA, 23 nt, Human
guuauugcuggugcuggccagcc

SEQ ID NO: 570113 - RNA, 22 nt, Human
uuguauuaaaauguguuucugu

SEQ ID NO: 570114 - RNA, 23 nt, Human
uaucauuucagcucucugccugg

SEQ ID NO: 570115 - RNA, 22 nt, Human
cugagcaucauggcagaaucuu

SEQ ID NO: 570116 - RNA, 22 nt, Human
ucugccaucaagaugcucuggc

SEQ ID NO: 570117 - RNA, 22 nt, Human
agcaccauugcaaauauggcag

SEQ ID NO: 570118 - RNA, 22 nt, Human
cucugaauggacacuccagugu

SEQ ID NO: 570119 - RNA, 22 nt, Human
agcacauucccaccuguacuuc

SEQ ID NO: 570120 - RNA, 22 nt, Human
agcauucuguggucuucuaugg

SEQ ID NO: 570121 - RNA, 22 nt, Human
gacggggcagccagcugguggc

SEQ ID NO: 570122 - RNA, 22 nt, Human
ugcuccaucuagagcucugcag

SEQ ID NO: 570123 - RNA, 22 nt, Human
uuaccuuguaaaacauauuccu

SEQ ID NO: 570124 - RNA, 22 nt, Human
ucauaggaguagcagugagagg

SEQ ID NO: 570125 - RNA, 22 nt, Human
guucuucaggcugugcucuaga

SEQ ID NO: 570126 - RNA, 22 nt, Human
aacagguagggacucuaacuug

SEQ ID NO: 570127 - RNA, 22 nt, Human
ugcauaaacuucucugguguga

SEQ ID NO: 570128 - RNA, 22 nt, Human
acauuuuuggguugaugucuga

SEQ ID NO: 570129 - RNA, 22 nt, Human
ggagcggagggagggccacugu

SEQ ID NO: 570130 - RNA, 22 nt, Human
ggagaggguagggguccugccc

SEQ ID NO: 570131 - RNA, 22 nt, Human
ucaccggugacccucggcucgc

SEQ ID NO: 570132 - RNA, 22 nt, Human
ccucuuccacugggccccaucc

SEQ ID NO: 570133 - RNA, 22 nt, Human
uuuauucucuaguuggucagau

SEQ ID NO: 570134 - RNA, 22 nt, Human
ucauacauguuguguucaaaug

SEQ ID NO: 570135 - RNA, 22 nt, Human
ggugauuuccuuuugcaaaguc

SEQ ID NO: 570136 - RNA, 22 nt, Human
ugcucccaaaccugacaggcuc

SEQ ID NO: 570137 - RNA, 22 nt, Human
uuuucaguuccaucucugcucu

SEQ ID NO: 570138 - RNA, 22 nt, Human
auguaagagcuuugcagggaaa

SEQ ID NO: 570139 - RNA, 22 nt, Human
cuacauuuacacaguuaggcuu

SEQ ID NO: 570140 - RNA, 22 nt, Human
augaaacaacagacuuggucaa

SEQ ID NO: 570141 - RNA, 22 nt, Human
ucugagagcuguagaagccuau

SEQ ID NO: 570142 - RNA, 22 nt, Human
cuggccuggcaggggaccucua

SEQ ID NO: 570143 - RNA, 22 nt, Human
uggaauuaucugaagugauuug

SEQ ID NO: 570144 - RNA, 22 nt, Human
ggccgugcuccaaagucaucgu

SEQ ID NO: 570145 - RNA, 22 nt, Human
acuuuuaaggggccuugauuua

SEQ ID NO: 570146 - RNA, 22 nt, Human
uucuuugcccauguuuccuaag

SEQ ID NO: 570147 - RNA, 22 nt, Human
ggcaauuacguauuagucaugu

SEQ ID NO: 570148 - RNA, 22 nt, Human
uuauguauggauggcugaaagu

SEQ ID NO: 570149 - RNA, 22 nt, Human
aguacuuuuuguucaauugugc

SEQ ID NO: 570150 - RNA, 22 nt, Human
gugccuccaggcucgacuaguc

SEQ ID NO: 570151 - RNA, 22 nt, Human
gaauguuauugaacuacgagcu

SEQ ID NO: 570152 - RNA, 22 nt, Human
ugcuugucucucugugcccacu

SEQ ID NO: 570153 - RNA, 22 nt, Human
ggagaagggaacugaguuuuug

SEQ ID NO: 570154 - RNA, 22 nt, Human
ucuaaacuuguaaacaagcaua

SEQ ID NO: 570155 - RNA, 22 nt, Human
uaaacagagaugccugggucug

SEQ ID NO: 570156 - RNA, 22 nt, Human
uucacagugguaaggguuguga

SEQ ID NO: 570157 - RNA, 19 nt, Human
uaugacaaguacuaguucu

SEQ ID NO: 570158 - RNA, 23 nt, Human
aaacuacauuuauaguuuuucuc

SEQ ID NO: 570159 - RNA, 22 nt, Human
aguaaaaucaccaucucuuugu

SEQ ID NO: 570160 - RNA, 22 nt, Human
uagaucuuucacuacuguguag

SEQ ID NO: 570161 - RNA, 22 nt, Human
acugauuucagggaugagaaga

SEQ ID NO: 570162 - RNA, 21 nt, Human
ucucuccucaagcucgacccc

SEQ ID NO: 570163 - RNA, 22 nt, Human
uuauugagcacauaguaugugg

SEQ ID NO: 570164 - RNA, 22 nt, Human
cugaucuuaaguaacauuauuu

SEQ ID NO: 570165 - RNA, 22 nt, Human
gcuguaacuuuuucauuuucaa

SEQ ID NO: 570166 - RNA, 22 nt, Human
gcuguggcuccaauggugagcc

SEQ ID NO: 570167 - RNA, 21 nt, Human
ucuccucccggggagaggccg

SEQ ID NO: 570168 - RNA, 22 nt, Human
cacauuuaugggcugggaggca

SEQ ID NO: 570169 - RNA, 22 nt, Human
uagcagcacuauuuguuguagu

SEQ ID NO: 570170 - RNA, 22 nt, Human
auguccagaguaaagcacauuc

SEQ ID NO: 570171 - RNA, 22 nt, Human
gccccgucguggggccagggau

SEQ ID NO: 570172 - RNA, 22 nt, Human
cuucagagugacucagcaucuu

SEQ ID NO: 570173 - RNA, 22 nt, Human
cccaggaggcagaaguugcagu

SEQ ID NO: 570174 - RNA, 22 nt, Human
agacugugagaagauggcugcg

SEQ ID NO: 570175 - RNA, 22 nt, Human
uacuacauacagaauuuagaga

SEQ ID NO: 570176 - RNA, 22 nt, Human
uguaaagaaagacgcagaguua

SEQ ID NO: 570177 - RNA, 22 nt, Human
agauaucuuacacuuugaaguu

SEQ ID NO: 570178 - RNA, 22 nt, Human
gcaggaguguggugggacaucc

SEQ ID NO: 570179 - RNA, 19 nt, Human
auacacguguauacauaca

SEQ ID NO: 570180 - RNA, 22 nt, Human
caguaaauguccucgcagggaa

SEQ ID NO: 570181 - RNA, 22 nt, Human
gcucaugggcccagagcagccc

SEQ ID NO: 570182 - RNA, 22 nt, Human
accauccaaacugcuuucugug

SEQ ID NO: 570183 - RNA, 22 nt, Human
uuugaaauguaucaguauaggu

SEQ ID NO: 570184 - RNA, 20 nt, Human
ucauaugugguuguauacaa

SEQ ID NO: 570185 - RNA, 22 nt, Human
ugagaacaaaguugaaaguuug

SEQ ID NO: 570186 - RNA, 21 nt, Human
ugcaaugcauugacagcagca

SEQ ID NO: 570187 - RNA, 22 nt, Human
cuugcuuuaucugguuucucau

SEQ ID NO: 570188 - RNA, 22 nt, Human
uaccauuucaguaaaaacuuag

SEQ ID NO: 570189 - RNA, 22 nt, Human
cauucauaggaggagaugauua

SEQ ID NO: 570190 - RNA, 22 nt, Human
acaugcacccaguuacacucuc

SEQ ID NO: 570191 - RNA, 22 nt, Human
guaugucuuaggguucaguaac

SEQ ID NO: 570192 - RNA, 22 nt, Human
acauuucuccuacuuguuauuu

SEQ ID NO: 570193 - RNA, 22 nt, Human
uuaaccagguccuuugaaaaca

SEQ ID NO: 570194 - RNA, 22 nt, Human
gucauuuuugacuuugaaguga

SEQ ID NO: 570195 - RNA, 22 nt, Human
accaggcccuccagcugcgugg

SEQ ID NO: 570196 - RNA, 22 nt, Human
cugggagggguagccaauccua

SEQ ID NO: 570197 - RNA, 22 nt, Human
ggugagaggcagugcuguggaa

SEQ ID NO: 570198 - RNA, 22 nt, Human
guuuugaauacuacuagaacuu

SEQ ID NO: 570199 - RNA, 22 nt, Human
gagagaagggggauaugagccu

SEQ ID NO: 570200 - RNA, 22 nt, Human
agaaaagaggcuuucuaagcau

SEQ ID NO: 570201 - RNA, 22 nt, Human
uucuacauugugaaguucuuua

SEQ ID NO: 570202 - RNA, 22 nt, Human
cuggcuuugaucagagugaccu

SEQ ID NO: 570203 - RNA, 22 nt, Human
gcgaaucucagcuggugcugcg

SEQ ID NO: 570204 - RNA, 19 nt, Human
cagcaaacacuguaaaugg

SEQ ID NO: 570205 - RNA, 22 nt, Human
acugugacugugucuucugggc

SEQ ID NO: 570206 - RNA, 21 nt, Human
uccugccuuaguccagagcag

SEQ ID NO: 570207 - RNA, 22 nt, Human
guuauacuuaugugcaaaaaua

SEQ ID NO: 570208 - RNA, 21 nt, Human
acagaaguggcuuggucucag

SEQ ID NO: 570209 - RNA, 22 nt, Human
acaggaucgcccuguugcccag

SEQ ID NO: 570210 - RNA, 22 nt, Human
ggugggugagcccugggagcug

SEQ ID NO: 570211 - RNA, 22 nt, Human
gcggcccggguccccagcagca

SEQ ID NO: 570212 - RNA, 19 nt, Human
aacuacagcgcacuguccu

SEQ ID NO: 570213 - RNA, 22 nt, Human
uuucacauacaguguauaguag

SEQ ID NO: 570214 - RNA, 22 nt, Human
aucagaagaaauggaugugacu

SEQ ID NO: 570215 - RNA, 22 nt, Human
gagaggaagccuucuguacuug

SEQ ID NO: 570216 - RNA, 22 nt, Human
aucucaguucaggcuccacugu

SEQ ID NO: 570217 - RNA, 22 nt, Human
uguacacauuaagcucuuuaga

SEQ ID NO: 570218 - RNA, 22 nt, Human
ccccacaccugccgggcagcag

SEQ ID NO: 570219 - RNA, 22 nt, Human
auaggcauaacacugauguccu

SEQ ID NO: 570220 - RNA, 21 nt, Human
ugcauauauaagugcauacac

SEQ ID NO: 570221 - RNA, 22 nt, Human
aauacagauggcaugugaagau

SEQ ID NO: 570222 - RNA, 22 nt, Human
cuucagggaggagcauggguuc

SEQ ID NO: 570223 - RNA, 22 nt, Human
auuuacucgugcuucauugaau

SEQ ID NO: 570224 - RNA, 22 nt, Human
gggcuguuugcauauguuuaua

SEQ ID NO: 570225 - RNA, 22 nt, Human
ugaauaugugacuuugauuuca

SEQ ID NO: 570226 - RNA, 22 nt, Human
aagacagugacagucacaauug

SEQ ID NO: 570227 - RNA, 22 nt, Human
ggcggugguugagaggacggcg

SEQ ID NO: 570228 - RNA, 22 nt, Human herpesvirus 6B
aggcagggagggauacggucac

SEQ ID NO: 570229 - RNA, 22 nt, Human herpesvirus 6B
aaucuauuuugagaaaaguuac

SEQ ID NO: 570230 - RNA, 23 nt, Human herpesvirus 6B
agaaaaacaggaacugcgguugc

SEQ ID NO: 570231 - RNA, 22 nt, Human herpesvirus 6B
auguuauugggagcauuggaaa

SEQ ID NO: 570232 - RNA, 22 nt, Human herpesvirus 6B
acauuucugaagaugaucuccu

SEQ ID NO: 570233 - RNA, 22 nt, Human herpesvirus 6B
aaagaacuggaaagaagcaucc

SEQ ID NO: 570234 - RNA, 22 nt, Human herpesvirus 6B
gguggcgcgucgcgaagucccg

SEQ ID NO: 570235 - RNA, 19 nt, Human herpesvirus 6B
gguuccacuugugcacggu

SEQ ID NO: 570236 - RNA, 22 nt, Human herpesvirus 6B
uuuuuacaagucgaucuuuggu

SEQ ID NO: 570237 - RNA, 19 nt, Human herpesvirus 6B
auucucauuaguguuauuc

SEQ ID NO: 570238 - RNA, 22 nt, Human herpesvirus 6B
cuguaguucauggauuaccaau

SEQ ID NO: 570239 - RNA, 21 nt, Human herpesvirus 6B
cuaugcuuuuguacucgcuua

SEQ ID NO: 570240 - RNA, 22 nt, Human herpesvirus 6B
ucuuugaaggacuaucugagac

SEQ ID NO: 570241 - RNA, 22 nt, Human herpesvirus 6B
ugacuguguacauucgccgauu

SEQ ID NO: 570242 - RNA, 22 nt, Human herpesvirus 6B
uaugugugacguccgcaucaug

SEQ ID NO: 570243 - RNA, 22 nt, Human herpesvirus 6B
uaguaaacauuugauucagugg

SEQ ID NO: 570244 - RNA, 23 nt, Human herpesvirus 6B
ucagcggugguggcggaggcggu

SEQ ID NO: 570245 - RNA, 22 nt, Human herpesvirus 6B
ucccgcccucgucuguugcugu

SEQ ID NO: 570246 - RNA, 22 nt, Human herpesvirus 6B
ucugaauguuuucauguaauuu

SEQ ID NO: 570247 - RNA, 22 nt, Human herpesvirus 6B
ugaaaauggcugaauaauauua

SEQ ID NO: 570248 - RNA, 22 nt, Human herpesvirus 6B
ucuuugaaggacuaucugagac

SEQ ID NO: 570249 - RNA, 22 nt, Human herpesvirus 6B
ugaaugucaucgagauaaucgu

SEQ ID NO: 570250 - RNA, 22 nt, Human herpesvirus 6B
ucugcuggaggcucugcuggag

SEQ ID NO: 570251 - RNA, 22 nt, Human herpesvirus 6B
gaguggccaagcguccccgggg

SEQ ID NO: 570252 - RNA, 22 nt, Human herpesvirus 6B
gaucccgcucggagcucucuca

SEQ ID NO: 570253 - RNA, 22 nt, Human herpesvirus 6B
gagaagauuggaaaaauaucca

SEQ ID NO: 570254 - RNA, 22 nt, Human herpesvirus 6B
acaucuaucgccgcucagaauu

SEQ ID NO: 570255 - RNA, 22 nt, Human herpesvirus 6B
aauucucauuuaaaagcgauag

SEQ ID NO: 570256 - RNA, 22 nt, Human herpesvirus 6B
aaucuauuuugagaaaaguuac

SEQ ID NO: 570257 - RNA, 17 nt, Human herpesvirus 6B
uaaugaaugugcuuugg

SEQ ID NO: 570258 - RNA, 22 nt, Human herpesvirus 6B
uaagaauuggugucauucgugg

SEQ ID NO: 570259 - RNA, 22 nt, Human herpesvirus 6B
uaaccgcgguacacacugaccu

SEQ ID NO: 570260 - RNA, 22 nt, Human herpesvirus 6B
gucgaaaucgcggaugaauugc

SEQ ID NO: 570261 - RNA, 18 nt, Human herpesvirus 6B
uuuauggccacuuuaucu

SEQ ID NO: 570262 - RNA, 22 nt, Human herpesvirus 6B
uugaaacggagggcggaaagcg

SEQ ID NO: 570263 - RNA, 22 nt, Human herpesvirus 6B
uugcacagcagacaauguaaua

SEQ ID NO: 570264 - RNA, 22 nt, Human herpesvirus 6B
ccucuuccuucucguaccccgg

SEQ ID NO: 570265 - RNA, 22 nt, Human herpesvirus 6B
cccggagaucuaaugggggaga

SEQ ID NO: 570266 - RNA, 21 nt, Human herpesvirus 6B
aguuggccaaaggagggccgg

SEQ ID NO: 570267 - RNA, 22 nt, Human herpesvirus 6B
agugucguucuaucuacucggg

SEQ ID NO: 570268 - RNA, 21 nt, Human herpesvirus 6B
auacgucucccaguucguuaa

SEQ ID NO: 570269 - RNA, 22 nt, Human herpesvirus 6B
aguugcauggugauguguuagc

SEQ ID NO: 570270 - RNA, 22 nt, Human herpesvirus 6B
ucgaacaacgcguuggcgaaau

SEQ ID NO: 570271 - RNA, 20 nt, Human herpesvirus 6B
ucgcaaauaccgaucaguuc

SEQ ID NO: 570272 - RNA, 22 nt, Human herpesvirus 6B
ucgcguuggcaucgggcgcugc

SEQ ID NO: 570273 - RNA, 22 nt, Human herpesvirus 6B
ucguaauacaacagaagcaaau

SEQ ID NO: 570274 - RNA, 22 nt, Human herpesvirus 6B
guacaaaugauuuaauuucgcu

SEQ ID NO: 570275 - RNA, 22 nt, Human herpesvirus 6B
guaucacguaucucugguaaau

SEQ ID NO: 570276 - RNA, 22 nt, Human herpesvirus 6B
gggugucuaaaugagucuggag

SEQ ID NO: 570277 - RNA, 22 nt, Human herpesvirus 6B
ggaugacaccggcuauaaaagc

SEQ ID NO: 570278 - RNA, 22 nt, Human herpesvirus 6B
ggcauucgaggccgcccucuau

SEQ ID NO: 570279 - RNA, 22 nt, Human herpesvirus 6B
ggcgaacaauuggauuuucaga

SEQ ID NO: 570280 - RNA, 22 nt, Human herpesvirus 6B
ggagggauacggucacgcgcac

SEQ ID NO: 570281 - RNA, 22 nt, Human herpesvirus 6B
aaacgaucucgauucugugcag

SEQ ID NO: 570282 - RNA, 22 nt, Human herpesvirus 6B
aagcuguuaaauguaaauggaa

SEQ ID NO: 570283 - RNA, 22 nt, Human herpesvirus 6B
ugguuuuauaagcucaagaggg

SEQ ID NO: 570284 - RNA, 22 nt, Human herpesvirus 6B
cauguaugcauuaacucugggu

SEQ ID NO: 570285 - RNA, 21 nt, Human herpesvirus 6B
uggcgccgacccugccgcggc

SEQ ID NO: 570286 - RNA, 22 nt, Human herpesvirus 6B
uggcgccgacccugccgcggca

SEQ ID NO: 570287 - RNA, 22 nt, Human herpesvirus 6B
caacgcggcagagucggcgcca

SEQ ID NO: 570288 - RNA, 22 nt, Human herpesvirus 6B
caagcagucccgaucuaugcga

SEQ ID NO: 570289 - RNA, 19 nt, Human herpesvirus 6B
auucucauuaguguuauuc

SEQ ID NO: 570290 - RNA, 22 nt, Human herpesvirus 6B
auuugguuggcaaacacugagc

SEQ ID NO: 570291 - RNA, 22 nt, Human herpesvirus 6B
uuucggaaaaagaggaggguau

SEQ ID NO: 570292 - RNA, 18 nt, Human herpesvirus 6B
uuucaacagccugucuag

SEQ ID NO: 570293 - RNA, 22 nt, Human herpesvirus 6B
uuugcucggagucccggagauc

SEQ ID NO: 570294 - RNA, 19 nt, Human herpesvirus 6B
uuuugcguuuauguuucaa

SEQ ID NO: 570295 - RNA, 22 nt, Human herpesvirus 6B
uuuuuacaagucgaucuuuggu

SEQ ID NO: 570296 - RNA, 22 nt, Human herpesvirus 6B
aggcagggagggauacggucac

SEQ ID NO: 570297 - RNA, 22 nt, Human herpesvirus 6B
agcaucgguuguguuagcuucg

SEQ ID NO: 570298 - RNA, 23 nt, Human herpesvirus 6B
agaaaaacaggaacugcgguugc

SEQ ID NO: 570299 - RNA, 21 nt, Human herpesvirus 6B
acuuucacacgcauagauggg

SEQ ID NO: 570300 - RNA, 22 nt, Human herpesvirus 6B
acugcgaggacacguugcgcga

SEQ ID NO: 570301 - RNA, 22 nt, Human herpesvirus 6B
acggcuguuuuugcucucugua

SEQ ID NO: 570302 - RNA, 22 nt, Human herpesvirus 6B
gggcuccggcuuccucuccguc

SEQ ID NO: 570303 - RNA, 22 nt, Human herpesvirus 6B
gcuccgcuugguuuuccguguc

SEQ ID NO: 570304 - RNA, 21 nt, Human herpesvirus 6B
gcauucgacauauggaauuua

SEQ ID NO: 570305 - RNA, 22 nt, Human herpesvirus 6B
gcaggaagagggaguccaacaa

SEQ ID NO: 570306 - RNA, 22 nt, Human herpesvirus 6B
gaaguuuaccuagagauuacaa

SEQ ID NO: 570307 - RNA, 22 nt, Human herpesvirus 6B
gaaucugaagcguuuucacgau

SEQ ID NO: 570308 - RNA, 22 nt, Human herpesvirus 6B
gaagugcgggaguuucgccgag

SEQ ID NO: 570309 - RNA, 22 nt, Human herpesvirus 6B
cuuuauagaaaaugucucacga

SEQ ID NO: 570310 - RNA, 22 nt, Human herpesvirus 6B
cuucccuuugcguuucucacgg

SEQ ID NO: 570311 - RNA, 22 nt, Human herpesvirus 6B
cuguaguucauggauuaccaau

SEQ ID NO: 570312 - RNA, 22 nt, Human herpesvirus 6B
cugccaaaugcugaucugucuc

SEQ ID NO: 570313 - RNA, 22 nt, Human herpesvirus 6B
ggcuuuuuguucaguugauuau

SEQ ID NO: 570314 - RNA, 22 nt, Human
uguuuaugcaucguuaauacca

SEQ ID NO: 570315 - RNA, 17 nt, Human
gcuucuggagcuucugu

SEQ ID NO: 570316 - RNA, 22 nt, Human
agccuguggaaacugggugcag

SEQ ID NO: 570317 - RNA, 21 nt, Human
ucaaaucauguacugaccaca

SEQ ID NO: 570318 - RNA, 22 nt, Human
uaccagcucacacaaucuuugu

SEQ ID NO: 570319 - RNA, 22 nt, Human
uucaguuuauaccuguugauua

SEQ ID NO: 570320 - RNA, 22 nt, Human
guauuuuauggccuggggccua

SEQ ID NO: 570321 - RNA, 22 nt, Human
cuuucuuaauuuuuaaggacac

SEQ ID NO: 570322 - RNA, 22 nt, Human
ucucccaggcugcccuguggac

SEQ ID NO: 570323 - RNA, 22 nt, Human
gaucugaaaaugcucuucuucu

SEQ ID NO: 570324 - RNA, 22 nt, Human
ccagccucaucauauuccugcu

SEQ ID NO: 570325 - RNA, 22 nt, Human
acacauucaugagugcaugcac

SEQ ID NO: 570326 - RNA, 21 nt, Human
caggaacauucuuuacauuua

SEQ ID NO: 570327 - RNA, 22 nt, Human
ucccagagugagccaggggcag

SEQ ID NO: 570328 - RNA, 19 nt, Human
ucccaggaaccuuuuauuu

SEQ ID NO: 570329 - RNA, 22 nt, Human
ggugaggggcgccucugcccgg

SEQ ID NO: 570330 - RNA, 22 nt, Human
uggcacaggagcacugcccugg

SEQ ID NO: 570331 - RNA, 22 nt, Human
ucaaaacaacacucagguguaa

SEQ ID NO: 570332 - RNA, 22 nt, Human
caagucaaugauuauaagaguc

SEQ ID NO: 570333 - RNA, 22 nt, Human
auuccaauuguacuugcuuuua

SEQ ID NO: 570334 - RNA, 22 nt, Human
cugggccuggcguuccaggcug

SEQ ID NO: 570335 - RNA, 23 nt, Human
aggcacugaaugugucagugagu

SEQ ID NO: 570336 - RNA, 22 nt, Human
caggugagcucuaucuagggag

SEQ ID NO: 570337 - RNA, 23 nt, Human
auuauuaaggacauggacuuugu

SEQ ID NO: 570338 - RNA, 22 nt, Human
gugugcaguagagaaagagcag

SEQ ID NO: 570339 - RNA, 22 nt, Human
aaggaggaauaaagagguggug

SEQ ID NO: 570340 - RNA, 22 nt, Human
uagaagcacugacagaguuuga

SEQ ID NO: 570341 - RNA, 22 nt, Human
gcaggagcuggaaagugauguu

SEQ ID NO: 570342 - RNA, 22 nt, Human
uggguaggaaucgaguguaugg

SEQ ID NO: 570343 - RNA, 22 nt, Human
uucucucuguggucccauuuug

SEQ ID NO: 570344 - RNA, 22 nt, Human
cucccaagggguaagggagcug

SEQ ID NO: 570345 - RNA, 22 nt, Human
aaugagauuccaauagcuccug

SEQ ID NO: 570346 - RNA, 22 nt, Human
ccacuuuugggaacagugagua

SEQ ID NO: 570347 - RNA, 22 nt, Human
cugggcucagaugagaggaagg

SEQ ID NO: 570348 - RNA, 22 nt, Human
agcccaggcagagggaugcuug

SEQ ID NO: 570349 - RNA, 22 nt, Human
agaagccauauuuagggaggag

SEQ ID NO: 570350 - RNA, 22 nt, Human
uucagagaugacaccugguguu

SEQ ID NO: 570351 - RNA, 23 nt, Human
cccugcagucagggugagauggu

SEQ ID NO: 570352 - RNA, 22 nt, Human
ggucaacacugugaccaacagg

SEQ ID NO: 570353 - RNA, 22 nt, Human
uguuaugaacuucuagaaaaca

SEQ ID NO: 570354 - RNA, 22 nt, Human
gcaggcugagaguccaagaagg

SEQ ID NO: 570355 - RNA, 22 nt, Human
agacccugcaccucucgugggc

SEQ ID NO: 570356 - RNA, 22 nt, Human
uucaacagcuuccaaagugugu

SEQ ID NO: 570357 - RNA, 22 nt, Human
uuuggcucuaguaaauauaacc

SEQ ID NO: 570358 - RNA, 22 nt, Human
ugcagaggagucagccugggca

SEQ ID NO: 570359 - RNA, 22 nt, Human
gaaucuuaugugguguuuucua

SEQ ID NO: 570360 - RNA, 20 nt, Human
ugagccaggcuaggaagggc

SEQ ID NO: 570361 - RNA, 22 nt, Human
uuuggggagacauggccagcug

SEQ ID NO: 570362 - RNA, 22 nt, Human
auuagcuuauuguaaggugaaa

SEQ ID NO: 570363 - RNA, 21 nt, Human
uccuggcuuuaugcuaccucu

SEQ ID NO: 570364 - RNA, 17 nt, Human
ugcuccuguggcagccu

SEQ ID NO: 570365 - RNA, 22 nt, Human
ccuuugccaugacauggcacaa

SEQ ID NO: 570366 - RNA, 22 nt, Human
aaaaucugguaauuugaaugug

SEQ ID NO: 570367 - RNA, 22 nt, Human
aggcacugauucuguuuuccau

SEQ ID NO: 570368 - RNA, 22 nt, Human
auuauaaaccuuugaggguggg

SEQ ID NO: 570369 - RNA, 22 nt, Human
guuggcuaugagagcuuuagug

SEQ ID NO: 570370 - RNA, 22 nt, Human
cccagagaauuccacauagagg

SEQ ID NO: 570371 - RNA, 22 nt, Human
ugucuucaucuccaugcacaga

SEQ ID NO: 570372 - RNA, 22 nt, Human
cauacauacugaguggacugau

SEQ ID NO: 570373 - RNA, 22 nt, Human
cagacagcaggccuggaugugu

SEQ ID NO: 570374 - RNA, 22 nt, Human
cccagccucuguuugcuccucu

SEQ ID NO: 570375 - RNA, 22 nt, Human
gggcuccaggcaggcaggaaau

SEQ ID NO: 570376 - RNA, 22 nt, Human
uaauagcugugggaaauaaaag

SEQ ID NO: 570377 - RNA, 22 nt, Human
agcugcuugggaaccaucaauu

SEQ ID NO: 570378 - RNA, 22 nt, Human
cuggccucacagaggcuaagcc

SEQ ID NO: 570379 - RNA, 22 nt, Human
augaagauauucuuguuuucug

SEQ ID NO: 570380 - RNA, 22 nt, Human
aaauguauugcauaggauauuu

SEQ ID NO: 570381 - RNA, 22 nt, Human
uuuuuacacuuagcauugagcg

SEQ ID NO: 570382 - RNA, 22 nt, Human
cuccugugcaugcaucucccua

SEQ ID NO: 570383 - RNA, 22 nt, Human
acauauauguaaaguacuuugu

SEQ ID NO: 570384 - RNA, 22 nt, Human
gcaccugggacccagaggcacc

SEQ ID NO: 570385 - RNA, 23 nt, Human
uccaggagaauuccagggcccgg

SEQ ID NO: 570386 - RNA, 19 nt, Human
auuuuucuuccucugugca

SEQ ID NO: 570387 - RNA, 22 nt, Human
ccaggagcuauguacacacuau

SEQ ID NO: 570388 - RNA, 22 nt, Human
cuucagcccugagugccagcag

SEQ ID NO: 570389 - RNA, 22 nt, Human
cucuggaguucuucaagcuacu

SEQ ID NO: 570390 - RNA, 22 nt, Human
aaacaaagccagggaaguuaug

SEQ ID NO: 570391 - RNA, 22 nt, Human
guggcagagggugagcuggacu

SEQ ID NO: 570392 - RNA, 22 nt, Human
aguuuaacuuuggaaaacuaua

SEQ ID NO: 570393 - RNA, 22 nt, Human
uuaauaacauuguguaucaccc

SEQ ID NO: 570394 - RNA, 22 nt, Human
caggguggcacaucacagcauu

SEQ ID NO: 570395 - RNA, 22 nt, Human
agcugcuguuuggugagucuug

SEQ ID NO: 570396 - RNA, 22 nt, Human
cccugagcccauaguugacauu

SEQ ID NO: 570397 - RNA, 22 nt, Human
gcucucuggcuaguccaucggg

SEQ ID NO: 570398 - RNA, 22 nt, Human
agcuguuuguacuuagauagua

SEQ ID NO: 570399 - RNA, 22 nt, Human
gcugagccacaggcagugcacu

SEQ ID NO: 570400 - RNA, 22 nt, Human
augcuuuauuguuaggucaugu

SEQ ID NO: 570401 - RNA, 22 nt, Human
augggaucuugcccugagggcu

SEQ ID NO: 570402 - RNA, 22 nt, Human
ucccaaggcacagggcagggac

SEQ ID NO: 570403 - RNA, 22 nt, Human
aggaagaguguuaccuaugggu

SEQ ID NO: 570404 - RNA, 22 nt, Human
uuugggaaauaguagaaaaugu

SEQ ID NO: 570405 - RNA, 22 nt, Human
cauuucugcagaauugcucuuc

SEQ ID NO: 570406 - RNA, 22 nt, Human
gcuguuuccaguuacguggaua

SEQ ID NO: 570407 - RNA, 22 nt, Human
agccccuugcugcccucuagag

SEQ ID NO: 570408 - RNA, 22 nt, Human
uuaaaugaggcugauguagauu

SEQ ID NO: 570409 - RNA, 22 nt, Human
aguaacacuauuuucauaugua

SEQ ID NO: 570410 - RNA, 23 nt, Human
uuccagugagacugagaggucuu

SEQ ID NO: 570411 - RNA, 20 nt, Human
gggcaguggcgcuaucucag

SEQ ID NO: 570412 - RNA, 22 nt, Human
ucccugccaaugauuggagcaa

SEQ ID NO: 570413 - RNA, 22 nt, Human
gagugccaagagaagaggcugg

SEQ ID NO: 570414 - RNA, 22 nt, Human
gaggagagggcugcgggcccac

SEQ ID NO: 570415 - RNA, 18 nt, Human
uaaaggaagugggagagg

SEQ ID NO: 570416 - RNA, 22 nt, Human
uuugaaaggagcuuuauccaga

SEQ ID NO: 570417 - RNA, 22 nt, Human
cccaggguugccugccucugcu

SEQ ID NO: 570418 - RNA, 22 nt, Human
gagaggccugagaggcugcgga

SEQ ID NO: 570419 - RNA, 22 nt, Human
agcuggugcucaggggcaugga

SEQ ID NO: 570420 - RNA, 23 nt, Human
aguacauuugacccaaauaagcu

SEQ ID NO: 570421 - RNA, 19 nt, Human
acacauguguguuaugugc

SEQ ID NO: 570422 - RNA, 22 nt, Human
cuuuacaaccuaaguugaagcu

SEQ ID NO: 570423 - RNA, 22 nt, Human
ugaggggcggccugcagaggcc

SEQ ID NO: 570424 - RNA, 22 nt, Human
ugcagcaccacaccuggcuaau

SEQ ID NO: 570425 - RNA, 22 nt, Human
auuuccuugcaaguuucuguaa

SEQ ID NO: 570426 - RNA, 22 nt, Human
aguaaacaguuucuuagaagaa

SEQ ID NO: 570427 - RNA, 22 nt, Human
uugaaaggugaacaugaugcac

SEQ ID NO: 570428 - RNA, 22 nt, Human
uacagcuuuagcaaauuaccua

SEQ ID NO: 570429 - RNA, 22 nt, Human
aaaggcuccuucucccaugacc

SEQ ID NO: 570430 - RNA, 17 nt, Human
acaguaacuauguuaug

SEQ ID NO: 570431 - RNA, 22 nt, Human
gggugaggagcugccagucaug

SEQ ID NO: 570432 - RNA, 22 nt, Human
ccagugccugugggcauggugc

SEQ ID NO: 570433 - RNA, 22 nt, Human
ugauucugaucaucaucauggu

SEQ ID NO: 570434 - RNA, 22 nt, Human
agcucaggcucugcagggacua

SEQ ID NO: 570435 - RNA, 22 nt, Human
agggacccauagagagaccagu

SEQ ID NO: 570436 - RNA, 22 nt, Human
cagagcagaaaccugggugauu

SEQ ID NO: 570437 - RNA, 22 nt, Human
acuuucuauuguuuagauucug

SEQ ID NO: 570438 - RNA, 22 nt, Human
gcccaagguauaucagagacag

SEQ ID NO: 570439 - RNA, 22 nt, Human
aagcaagacagaaguuacugcc

SEQ ID NO: 570440 - RNA, 22 nt, Human
ggcugaguugagaggauuacuu

SEQ ID NO: 570441 - RNA, 22 nt, Human
ccagaggagcaggcuggcucca

SEQ ID NO: 570442 - RNA, 22 nt, Human
uucucagagcacugcugacaaa

SEQ ID NO: 570443 - RNA, 22 nt, Human
cugucuuuucauacuuucccuc

SEQ ID NO: 570444 - RNA, 22 nt, Human
auagcauauaaguuauaaaacu

SEQ ID NO: 570445 - RNA, 22 nt, Human
agaagcugccuacaugaccagc

SEQ ID NO: 570446 - RNA, 22 nt, Human
cauggcacugagcagguaugca

SEQ ID NO: 570447 - RNA, 22 nt, Human
aaucaggagugugcacuuugau

SEQ ID NO: 570448 - RNA, 22 nt, Human
uauuaaauauaucuguuaguug

SEQ ID NO: 570449 - RNA, 22 nt, Human
ucuuuggaaugcuagcauucua

SEQ ID NO: 570450 - RNA, 22 nt, Human
ggccacagugggaaauccuggg

SEQ ID NO: 570451 - RNA, 22 nt, Human
cagcagcaaaucuagaagagga

SEQ ID NO: 570452 - RNA, 22 nt, Human
cacaaaugguuguagacauuaa

SEQ ID NO: 570453 - RNA, 22 nt, Human
aacuucauuuauaaugucauua

SEQ ID NO: 570454 - RNA, 22 nt, Human
uuuucugaccuaucuacauuua

SEQ ID NO: 570455 - RNA, 22 nt, Human
cuucuucagaggccagccucug

SEQ ID NO: 570456 - RNA, 22 nt, Human
uuggagguuucccaacuguggg

SEQ ID NO: 570457 - RNA, 22 nt, Human
ccucacagcaaggauuucagug

SEQ ID NO: 570458 - RNA, 17 nt, Human
gagauuuucguccugaa

SEQ ID NO: 570459 - RNA, 22 nt, Human
uuguuuauguguugucuauggc

SEQ ID NO: 570460 - RNA, 22 nt, Human
ccagaggaauugggaaacaugu

SEQ ID NO: 570461 - RNA, 22 nt, Human
ccagcugggauuaagggaaaau

SEQ ID NO: 570462 - RNA, 22 nt, Human
uccauuauacuucugauucaaa

SEQ ID NO: 570463 - RNA, 22 nt, Human
ugguccugaucaccgcugggca

SEQ ID NO: 570464 - RNA, 22 nt, Human
cccaggaggcagagguugcagu

SEQ ID NO: 570465 - RNA, 22 nt, Human
cugaggcucugagaaagccaaa

SEQ ID NO: 570466 - RNA, 22 nt, Human
agcaggcaccagggcucguccu

SEQ ID NO: 570467 - RNA, 22 nt, Human
uacuuagagcgauaauuuauac

SEQ ID NO: 570468 - RNA, 22 nt, Human
ugaguccaccuuaguauauggg

SEQ ID NO: 570469 - RNA, 22 nt, Human
acagugucaugucguguucccc

SEQ ID NO: 570470 - RNA, 22 nt, Human
ccaggaggcucugacuggaccc

SEQ ID NO: 570471 - RNA, 22 nt, Human
aagucacagaacccauuguaac

SEQ ID NO: 570472 - RNA, 22 nt, Human
aaucagaaucaguugacacagc

SEQ ID NO: 570473 - RNA, 22 nt, Human
ucuuucaaaugcuugaauugga

SEQ ID NO: 570474 - RNA, 22 nt, Human
aauaacuggcacauaucacaua

SEQ ID NO: 570475 - RNA, 22 nt, Human
uuucucuguucucuaacuguaa

SEQ ID NO: 570476 - RNA, 23 nt, Human
gccagccagaauuucuccacugu

SEQ ID NO: 570477 - RNA, 22 nt, Human
aagcuguguaaguugcuugguu

SEQ ID NO: 570478 - RNA, 19 nt, Human
cccuggaggaguguuggcu

SEQ ID NO: 570479 - RNA, 23 nt, Human
uacaaugcaaacuuggcccaugg

SEQ ID NO: 570480 - RNA, 22 nt, Human
ugccugcugccacugcuguuac

SEQ ID NO: 570481 - RNA, 22 nt, Human
gcuaugaauauccaugaucagc

SEQ ID NO: 570482 - RNA, 22 nt, Human
ggcuguugacagacauagguuu

SEQ ID NO: 570483 - RNA, 22 nt, Human
cugggcaggagaggugguugga

SEQ ID NO: 570484 - RNA, 22 nt, Human
uguuuuguccuuuucuauauac

SEQ ID NO: 570485 - RNA, 22 nt, Human
gucauaaagcuuguugcauuua

SEQ ID NO: 570486 - RNA, 22 nt, Human
gagcagugguugaacagaggca

SEQ ID NO: 570487 - RNA, 22 nt, Human
cuucccaguucugcuugagggg

SEQ ID NO: 570488 - RNA, 22 nt, Human
guuaaagugagcuacuuuaggu

SEQ ID NO: 570489 - RNA, 22 nt, Human
gauuuccuagacauggggcaga

SEQ ID NO: 570490 - RNA, 22 nt, Human
ucgggguagacgccagcucgga

SEQ ID NO: 570491 - RNA, 21 nt, Human
aggaggggucuuucccacuga

SEQ ID NO: 570492 - RNA, 22 nt, Human
ggauacaacuagaagauggcag

SEQ ID NO: 570493 - RNA, 20 nt, Human
acagaauaugcugguugugg

SEQ ID NO: 570494 - RNA, 22 nt, Human
ggagauggcucugcaaggucua

SEQ ID NO: 570495 - RNA, 20 nt, Human
ugguggacuuuggcauggcu

SEQ ID NO: 570496 - RNA, 22 nt, Human
ucucuccuaauuucaggugcuu

SEQ ID NO: 570497 - RNA, 22 nt, Human
aaucuuaagcugaauucucucc

SEQ ID NO: 570498 - RNA, 22 nt, Human
ugggaacauuuugagcugagag

SEQ ID NO: 570499 - RNA, 22 nt, Human
uagucaccuuuggcaccugcaa

SEQ ID NO: 570500 - RNA, 22 nt, Human
ugaggcccaucugagauuuuga

SEQ ID NO: 570501 - RNA, 22 nt, Human
gccuuagccugcacuuccuguu

SEQ ID NO: 570502 - RNA, 22 nt, Human
cugggccagauccagccucaca

SEQ ID NO: 570503 - RNA, 20 nt, Human
ugggcagcacugcuggcugg

SEQ ID NO: 570504 - RNA, 17 nt, Human
ugggccaguagaaggga

SEQ ID NO: 570505 - RNA, 22 nt, Human
auguuuuccccaaaugaucuuc

SEQ ID NO: 570506 - RNA, 22 nt, Human
agugcagagaccuggucaggca

SEQ ID NO: 570507 - RNA, 22 nt, Human
uuuccuuccuaaggugaagcaa

SEQ ID NO: 570508 - RNA, 22 nt, Human
ucuugggcauguguuugauuuc

SEQ ID NO: 570509 - RNA, 22 nt, Human
uaguauuuauaaucaugcuuaa

SEQ ID NO: 570510 - RNA, 22 nt, Human
ugucacauugaauaugauuuau

SEQ ID NO: 570511 - RNA, 22 nt, Human
augccaguguuauaaauagaua

SEQ ID NO: 570512 - RNA, 22 nt, Human
uaaugaacucuuuacuuuggga

SEQ ID NO: 570513 - RNA, 22 nt, Human
ugaagcagcuucuuucugucaa

SEQ ID NO: 570514 - RNA, 22 nt, Human
ggucucuggccuuggagauuga

SEQ ID NO: 570515 - RNA, 22 nt, Human
ugcucuggggagcuccucugcg

SEQ ID NO: 570516 - RNA, 22 nt, Human
ucugucaccgagggcauccaaa

SEQ ID NO: 570517 - RNA, 19 nt, Human
gagaaaccccgucuuuagg

SEQ ID NO: 570518 - RNA, 20 nt, Human
cugagcugagcuccaugggu

SEQ ID NO: 570519 - RNA, 22 nt, Human
gagggccauucugaggggguga

SEQ ID NO: 570520 - RNA, 22 nt, Human
acacagaguauuuagaaggggu

SEQ ID NO: 570521 - RNA, 22 nt, Human
uauuuguauuucaugcaguaaa

SEQ ID NO: 570522 - RNA, 22 nt, Human
aagaacugugcuccaggcucca

SEQ ID NO: 570523 - RNA, 22 nt, Human
uuacaucauugagacauacaua

SEQ ID NO: 570524 - RNA, 22 nt, Human
agagccugucaauuguaaagag

SEQ ID NO: 570525 - RNA, 22 nt, Human
gaagauuuauaaggaccuuauu

SEQ ID NO: 570526 - RNA, 22 nt, Human
aaggcaauuggcuuguauaaga

SEQ ID NO: 570527 - RNA, 23 nt, Human
auaucacacccaguacagucucc

SEQ ID NO: 570528 - RNA, 22 nt, Human
ugacauuucgguguaugugaug

SEQ ID NO: 570529 - RNA, 22 nt, Human
uuucagagguaugcugcuuauc

SEQ ID NO: 570530 - RNA, 22 nt, Human
acccucaguaaucgugcaguuu

SEQ ID NO: 570531 - RNA, 22 nt, Human
gggcuggagagucccacguggg

SEQ ID NO: 570532 - RNA, 22 nt, Human
gcacacaguauaugcucauuaa

SEQ ID NO: 570533 - RNA, 22 nt, Human
ccaggagccacucaggcccaca

SEQ ID NO: 570534 - RNA, 21 nt, Human
ccagaggccucucuuggccac

SEQ ID NO: 570535 - RNA, 22 nt, Human
cccucccuuugucuuuaugaac

SEQ ID NO: 570536 - RNA, 22 nt, Human
ugugccuuucaucaugcuuuug

SEQ ID NO: 570537 - RNA, 22 nt, Human
caaaucugagucuacaauuuua

SEQ ID NO: 570538 - RNA, 22 nt, Human
caaagcuggaaaaggaggcugg

SEQ ID NO: 570539 - RNA, 22 nt, Human
ccagagagaaauggauuugagu

SEQ ID NO: 570540 - RNA, 22 nt, Human
uggguucuuucacuucucaguu

SEQ ID NO: 570541 - RNA, 22 nt, Human
uaguuuguaaugaggagaagua

SEQ ID NO: 570542 - RNA, 22 nt, Human
uuauggaauaaccuuucugaaa

SEQ ID NO: 570543 - RNA, 22 nt, Human
ucacuguuuugccugcacuucc

SEQ ID NO: 570544 - RNA, 22 nt, Human
guaggggugcugagaucuggaa

SEQ ID NO: 570545 - RNA, 22 nt, Human
aaacacuuuagaaagggacuug

SEQ ID NO: 570546 - RNA, 22 nt, Human
agcaucaacaaugaacauaaau

SEQ ID NO: 570547 - RNA, 18 nt, Human
gaaaggagagacaguagg

SEQ ID NO: 570548 - RNA, 22 nt, Human
ggccuugguucugucacagccg

SEQ ID NO: 570549 - RNA, 22 nt, Human
caucaaauggcaagugaaagcu

SEQ ID NO: 570550 - RNA, 22 nt, Human
uugcauaacagccauuaaagua

SEQ ID NO: 570551 - RNA, 22 nt, Human
uccagggaccucccugagagcu

SEQ ID NO: 570552 - RNA, 22 nt, Human
uaucuuuugaguucucaagaug

SEQ ID NO: 570553 - RNA, 19 nt, Human
cacagugcagccauuucuc

SEQ ID NO: 570554 - RNA, 22 nt, Human
cagcuacacaccagaacuauua

SEQ ID NO: 570555 - RNA, 22 nt, Human
cugagcugggacucaguagcaa

SEQ ID NO: 570556 - RNA, 22 nt, Human
auuguuuacacuaacuucauaa

SEQ ID NO: 570557 - RNA, 22 nt, Human
aagcuuuguucuucacagagug

SEQ ID NO: 570558 - RNA, 22 nt, Human
uggccagaaccugcaguaggcc

SEQ ID NO: 570559 - RNA, 22 nt, Human
cugcucuucccacucacuccca

SEQ ID NO: 570560 - RNA, 22 nt, Human
ucuuucuuauuagccauuguuc

SEQ ID NO: 570561 - RNA, 22 nt, Human
uuucucauagucaugccucuua

SEQ ID NO: 570562 - RNA, 22 nt, Human
ggacugggucacuaagauagua

SEQ ID NO: 570563 - RNA, 22 nt, Human
agcauaaacucagggacacaca

SEQ ID NO: 570564 - RNA, 22 nt, Human
agcagggggcauccuugcccuu

SEQ ID NO: 570565 - RNA, 22 nt, Human
gcugaaggcccggaggacaggg

SEQ ID NO: 570566 - RNA, 22 nt, Human
gcugucuucacuuccugguuuc

SEQ ID NO: 570567 - RNA, 19 nt, Human
aaugacugaguacauuguc

SEQ ID NO: 570568 - RNA, 22 nt, Human
uucagagucagggaucucagag

SEQ ID NO: 570569 - RNA, 22 nt, Human
uagcagcaauuacacaguccgu

SEQ ID NO: 570570 - RNA, 22 nt, Human
agccagggucucucgcucuguu

SEQ ID NO: 570571 - RNA, 22 nt, Human
cuaguauuaagugugaguaaaa

SEQ ID NO: 570572 - RNA, 22 nt, Human
uauucacaggcacgaaauauug

SEQ ID NO: 570573 - RNA, 22 nt, Human
uaaacuacccaugacaguuuca

SEQ ID NO: 570574 - RNA, 22 nt, Human
ugcaugcacccagccggguauu

SEQ ID NO: 570575 - RNA, 22 nt, Human
cugccuggaccggcagcccucc

SEQ ID NO: 570576 - RNA, 22 nt, Human
aaagauuuaagaauaauuugug

SEQ ID NO: 570577 - RNA, 22 nt, Human
uaaauccagcuucuaauuuaga

SEQ ID NO: 570578 - RNA, 22 nt, Human
ugugugaagugauuuuaagucu

SEQ ID NO: 570579 - RNA, 22 nt, Human
cagcagccuagaagcucuacca

SEQ ID NO: 570580 - RNA, 22 nt, Human
agcugcagguucagcauuccac

SEQ ID NO: 570581 - RNA, 22 nt, Human
ccagucuguacuuugcucuguu

SEQ ID NO: 570582 - RNA, 22 nt, Human
ucugagguugaacuuugcaaag

SEQ ID NO: 570583 - RNA, 22 nt, Human
ggggccagcuucgcgugcucuu

SEQ ID NO: 570584 - RNA, 22 nt, Human
agaugguagacuauggaacgua

SEQ ID NO: 570585 - RNA, 23 nt, Human
agaaaccacugaagagauccagu

SEQ ID NO: 570586 - RNA, 22 nt, Human
aguguucauuuauucauucacu

SEQ ID NO: 570587 - RNA, 22 nt, Human
uucaauuuugcagaggaaugca

SEQ ID NO: 570588 - RNA, 22 nt, Human
gcugucaggaacaugccuuggu

SEQ ID NO: 570589 - RNA, 22 nt, Human
aggguggagggagucccugagc

SEQ ID NO: 570590 - RNA, 22 nt, Human
auucuggggcugguuauuuuga

SEQ ID NO: 570591 - RNA, 22 nt, Human
gcagcaggcacggucucgacau

SEQ ID NO: 570592 - RNA, 22 nt, Human
cugccccaccccaaccugaggu

SEQ ID NO: 570593 - RNA, 22 nt, Human
guucaaauugagaugguauaaa

SEQ ID NO: 570594 - RNA, 22 nt, Human
cuuucuuucgaagacgugauua

SEQ ID NO: 570595 - RNA, 22 nt, Human
aggggauggagcuggaaggcag

SEQ ID NO: 570596 - RNA, 22 nt, Human
accucccagaaaguuuugcagg

SEQ ID NO: 570597 - RNA, 22 nt, Human
gagaggugaaggcugcccuggg

SEQ ID NO: 570598 - RNA, 22 nt, Human
gucccacugggcaacuagaaaa

SEQ ID NO: 570599 - RNA, 22 nt, Human
agaggcucuggugcagcaugca

SEQ ID NO: 570600 - RNA, 23 nt, Human
aagcaugguucacaguuaguacu

SEQ ID NO: 570601 - RNA, 22 nt, Human
aauguaaaauaucuuguacuug

SEQ ID NO: 570602 - RNA, 22 nt, Human
aagagucuauuggaacuagaca

SEQ ID NO: 570603 - RNA, 22 nt, Human
gagggcaguagccucguacccu

SEQ ID NO: 570604 - RNA, 22 nt, Human
aggcagcagaaaacaaaugguu

SEQ ID NO: 570605 - RNA, 22 nt, Human
ucagaggaugcuguucuuuaau

SEQ ID NO: 570606 - RNA, 22 nt, Human
agcugucuuucauuaccucauu

SEQ ID NO: 570607 - RNA, 22 nt, Human
gagggggaaagucccuggaguc

SEQ ID NO: 570608 - RNA, 22 nt, Human
uuucacauagaaagugauuuac

SEQ ID NO: 570609 - RNA, 22 nt, Human
caccagcuugggcuguggaaau

SEQ ID NO: 570610 - RNA, 22 nt, Human
cacauggaagagauacagugag

SEQ ID NO: 570611 - RNA, 22 nt, Human
gggcuccacagcagugagugga

SEQ ID NO: 570612 - RNA, 22 nt, Human
auucugagacaauugccgucag

SEQ ID NO: 570613 - RNA, 22 nt, Human
ucaagucuugagggacagcauu

SEQ ID NO: 570614 - RNA, 22 nt, Human
cauaacuagagugaaauguuga

SEQ ID NO: 570615 - RNA, 22 nt, Human
cuucaguguugccagggccuag

SEQ ID NO: 570616 - RNA, 22 nt, Human
gagagcaggaggcagcgggacg

SEQ ID NO: 570617 - RNA, 22 nt, Human
uugcagggcuuggggauuacag

SEQ ID NO: 570618 - RNA, 22 nt, Human
cuuagcagaagcuucagcuuca

SEQ ID NO: 570619 - RNA, 22 nt, Human
ugcuaaauaaguggaauagaca

SEQ ID NO: 570620 - RNA, 22 nt, Human
cugcugccccugagcucagccu

SEQ ID NO: 570621 - RNA, 22 nt, Human
cagcugcccauccugggaaaug

SEQ ID NO: 570622 - RNA, 22 nt, Human
cucuguccuccaccugcuuuca

SEQ ID NO: 570623 - RNA, 22 nt, Human
cccuggugcccugggucagccu

SEQ ID NO: 570624 - RNA, 21 nt, Human
ugcaguccuuugacaugauuc

SEQ ID NO: 570625 - RNA, 22 nt, Human
ucuggucaagacauccuaacau

SEQ ID NO: 570626 - RNA, 22 nt, Human
auuguaaauagugccacaauaa

SEQ ID NO: 570627 - RNA, 22 nt, Human
auuuuguugaugguggaguagc

SEQ ID NO: 570628 - RNA, 22 nt, Human
uuucugcagguauugcauaagu

SEQ ID NO: 570629 - RNA, 22 nt, Human
ugacccugagagcugaauggcu

SEQ ID NO: 570630 - RNA, 22 nt, Human
aguggagcuuuuccuaucagag

SEQ ID NO: 570631 - RNA, 22 nt, Human
cagcacaguacaaggcacggau

SEQ ID NO: 570632 - RNA, 22 nt, Human
gaaguuuagaagugacagguuu

SEQ ID NO: 570633 - RNA, 22 nt, Human
ucucugagcccaauguagcaau

SEQ ID NO: 570634 - RNA, 22 nt, Human
gccuggugugcgccgcgcagcu

SEQ ID NO: 570635 - RNA, 22 nt, Human
aggccugggucucgugccuacc

SEQ ID NO: 570636 - RNA, 22 nt, Human
gaaggaaaaauacucuguaagg

SEQ ID NO: 570637 - RNA, 22 nt, Human
ugaggggagguuggggcacauc

SEQ ID NO: 570638 - RNA, 22 nt, Human
uucuaaagugcaaucugacaga

SEQ ID NO: 570639 - RNA, 22 nt, Human
guuuuacacaccuaugaaagac

SEQ ID NO: 570640 - RNA, 22 nt, Human
aaaccaacccuggcuggccuag

SEQ ID NO: 570641 - RNA, 22 nt, Human
ucugugaaacagcucuggcaug

SEQ ID NO: 570642 - RNA, 22 nt, Human
agaagaaaugugaaggccacug

SEQ ID NO: 570643 - RNA, 22 nt, Human
uugcuuuaaugagauuuugcca

SEQ ID NO: 570644 - RNA, 22 nt, Human
aaagcagucuguuuuaaccuga

SEQ ID NO: 570645 - RNA, 23 nt, Human
agaaaagcuuggacacauggccu

SEQ ID NO: 570646 - RNA, 22 nt, Human
uccaggcucagcacuugcuacu

SEQ ID NO: 570647 - RNA, 22 nt, Human
ucacuggggccuuuggucagga

SEQ ID NO: 570648 - RNA, 22 nt, Human
guuauuguccagcacaguuggg

SEQ ID NO: 570649 - RNA, 22 nt, Human
ccuggcagcuguuuggcuuggc

SEQ ID NO: 570650 - RNA, 22 nt, Human
aguguucuucuucaaagcucug

SEQ ID NO: 570651 - RNA, 22 nt, Human
auucaaauuaaguuaauucagc

SEQ ID NO: 570652 - RNA, 18 nt, Human
uccugcagcuucuaugua

SEQ ID NO: 570653 - RNA, 22 nt, Human
uuugaucuaugcgugguuuccc

SEQ ID NO: 570654 - RNA, 22 nt, Human
uuucaucuaacacuacauaggg

SEQ ID NO: 570655 - RNA, 22 nt, Human
cugaaggacuuggugauaguug

SEQ ID NO: 570656 - RNA, 22 nt, Human
cagaggcuuauaccugauuagg

SEQ ID NO: 570657 - RNA, 22 nt, Human
gcugagugauugauauuuuagu

SEQ ID NO: 570658 - RNA, 22 nt, Human
caguaacaugaagagacaugga

SEQ ID NO: 570659 - RNA, 22 nt, Human
ccuggagcaggagcugcagagg

SEQ ID NO: 570660 - RNA, 22 nt, Human
gauaaguuauguaacuugcuca

SEQ ID NO: 570661 - RNA, 21 nt, Human
ugauucuguuuuaucaucagc

SEQ ID NO: 570662 - RNA, 22 nt, Human
gaaucuuagaaagguuaaggaa

SEQ ID NO: 570663 - RNA, 22 nt, Human
ggaggcaggaaagacagguuca

SEQ ID NO: 570664 - RNA, 22 nt, Human
cacugucugggacauguggucu

SEQ ID NO: 570665 - RNA, 22 nt, Human
aaaguuguuuccuaaggucuaa

SEQ ID NO: 570666 - RNA, 17 nt, Human
uggcaagacagcucagg

SEQ ID NO: 570667 - RNA, 23 nt, Human
cuucacagguucaggggauuaag

SEQ ID NO: 570668 - RNA, 22 nt, Human
uguagaugagucagggugcaug

SEQ ID NO: 570669 - RNA, 22 nt, Human
uccugaggacuaacaggaagga

SEQ ID NO: 570670 - RNA, 20 nt, Human
acauugauuauguuuguaga

SEQ ID NO: 570671 - RNA, 22 nt, Human
auucacaaaugcugccccauuc

SEQ ID NO: 570672 - RNA, 22 nt, Human
agcucagaagccuaugcauagu

SEQ ID NO: 570673 - RNA, 23 nt, Human
cugaggucugcaauucuaguagu

SEQ ID NO: 570674 - RNA, 22 nt, Human
gcugagcacaccuaggguagag

SEQ ID NO: 570675 - RNA, 22 nt, Human
uaguuagagaugaauuuugucu

SEQ ID NO: 570676 - RNA, 22 nt, Human
gugguccaucaugcagagcucc

SEQ ID NO: 570677 - RNA, 22 nt, Human
agagccugaggcccugagaggg

SEQ ID NO: 570678 - RNA, 22 nt, Human
cagucaggcugcgcuucucuga

SEQ ID NO: 570679 - RNA, 22 nt, Human
uuagucacuucuuccuucauca

SEQ ID NO: 570680 - RNA, 22 nt, Human
ucauuuuuugcauaccuguguc

SEQ ID NO: 570681 - RNA, 22 nt, Human
uagaaacaaugacaugcuugua

SEQ ID NO: 570682 - RNA, 22 nt, Human
uucauggaucaugccuuuugug

SEQ ID NO: 570683 - RNA, 22 nt, Human
ugaugauuucauuucuagcugu

SEQ ID NO: 570684 - RNA, 22 nt, Human
caguggccugagccaggcuucc

SEQ ID NO: 570685 - RNA, 22 nt, Human
aaacauguaaguucagaucacc

SEQ ID NO: 570686 - RNA, 22 nt, Human
gcaaggcuuugugaauuuuaaa

SEQ ID NO: 570687 - RNA, 22 nt, Human
agcucccaauugacuugaacua

SEQ ID NO: 570688 - RNA, 22 nt, Human
ucacuguagagucuguuuccac

SEQ ID NO: 570689 - RNA, 22 nt, Human
cauucaaaaugggcugaccugu

SEQ ID NO: 570690 - RNA, 20 nt, Human
uaucuuacuuuagucauuug

SEQ ID NO: 570691 - RNA, 22 nt, Human
gugcugagcaucaugaggcacu

SEQ ID NO: 570692 - RNA, 22 nt, Human
cacuaggcgccggguggcugug

SEQ ID NO: 570693 - RNA, 22 nt, Human
ucuccuaggcuggagugcagug

SEQ ID NO: 570694 - RNA, 22 nt, Human
ggacugggccagggguuggacu

SEQ ID NO: 570695 - RNA, 22 nt, Human
uuucaucucucuaaaagacagu

SEQ ID NO: 570696 - RNA, 22 nt, Human
uccugggaggaacauuuaccua

SEQ ID NO: 570697 - RNA, 22 nt, Human
guuuuccuucucagccauugcc

SEQ ID NO: 570698 - RNA, 22 nt, Human
gaacuuuaucaaaaguuguuua

SEQ ID NO: 570699 - RNA, 22 nt, Human
uccuucagucuucugagccaua

SEQ ID NO: 570700 - RNA, 22 nt, Human
gcaguuuuauuaugauggaaau

SEQ ID NO: 570701 - RNA, 22 nt, Human
ccagcuguuggaguuucacugc

SEQ ID NO: 570702 - RNA, 22 nt, Human
uggccaggcauucagauaagac

SEQ ID NO: 570703 - RNA, 22 nt, Human
agguguggcuggggcagaggcc

SEQ ID NO: 570704 - RNA, 22 nt, Human
gugugcagggaugagugcaggu

SEQ ID NO: 570705 - RNA, 22 nt, Human
uuuuuguggugugaguggacau

SEQ ID NO: 570706 - RNA, 22 nt, Human
aggcucugaucagguggcugug

SEQ ID NO: 570707 - RNA, 22 nt, Human
ggcagaggugacagugucuuuu

SEQ ID NO: 570708 - RNA, 22 nt, Human
uaccacuacauuugcuaauggc

SEQ ID NO: 570709 - RNA, 22 nt, Human
ugccaggcccucccacagauua

SEQ ID NO: 570710 - RNA, 22 nt, Human
ugggugagccacaggaguuguc

SEQ ID NO: 570711 - RNA, 22 nt, Human
gugaggcagggaaagaggauaa

SEQ ID NO: 570712 - RNA, 22 nt, Human
ugaagccacacuagcuuguccu

SEQ ID NO: 570713 - RNA, 22 nt, Human
uggcauccagccaugugauuuu

SEQ ID NO: 570714 - RNA, 22 nt, Human
ugcccaggcuggagugcagagg

SEQ ID NO: 570715 - RNA, 22 nt, Human
cugucaccuguucacugcagca

SEQ ID NO: 570716 - RNA, 22 nt, Human
cacagaggcaugacccugcccu

SEQ ID NO: 570717 - RNA, 22 nt, Human
aacagcugcaaaagguugccug

SEQ ID NO: 570718 - RNA, 23 nt, Human
ucugauguucucuuaugcuguag

SEQ ID NO: 570719 - RNA, 14 nt, Human
auugugcaugccau

SEQ ID NO: 570720 - RNA, 22 nt, Human
gguuuucaaagaggcauuucau

SEQ ID NO: 570721 - RNA, 22 nt, Human
gccuggguccacugaucaugcu

SEQ ID NO: 570722 - RNA, 22 nt, Human
cagcuucccuuggcugagcaga

SEQ ID NO: 570723 - RNA, 22 nt, Human
ugucaguuuaguugaagaaaga

SEQ ID NO: 570724 - RNA, 21 nt, Human
agcuguggcgaggggaacaug

SEQ ID NO: 570725 - RNA, 22 nt, Human
augauucucauuuuauaaacuu

SEQ ID NO: 570726 - RNA, 22 nt, Human
gcaccaggcagcugagcaggcc

SEQ ID NO: 570727 - RNA, 22 nt, Human
agcuguugucugcaggagaagc

SEQ ID NO: 570728 - RNA, 22 nt, Human
gcguggggcagcccagggcuuc

SEQ ID NO: 570729 - RNA, 22 nt, Human
ucaaaacacuauuaccuuuaau

SEQ ID NO: 570730 - RNA, 21 nt, Human
ugggagacacagccuugagcu

SEQ ID NO: 570731 - RNA, 22 nt, Human
gcucacagucugcugagugcag

SEQ ID NO: 570732 - RNA, 22 nt, Human
ugcaucuguucagagcugucga

SEQ ID NO: 570733 - RNA, 22 nt, Human
auuuuagagcuccaaguacagc

SEQ ID NO: 570734 - RNA, 16 nt, Human
uagcuuuguguugugg

SEQ ID NO: 570735 - RNA, 22 nt, Human
gcaggcugauagaggauuccau

SEQ ID NO: 570736 - RNA, 22 nt, Human
gguggguauugaauacaggugu

SEQ ID NO: 570737 - RNA, 22 nt, Human
aauaauuauuugagagcagacc

SEQ ID NO: 570738 - RNA, 22 nt, Human
uuuauugcccuguaguacagga

SEQ ID NO: 570739 - RNA, 22 nt, Human
gucugggauugggguaaagaag

SEQ ID NO: 570740 - RNA, 22 nt, Human
ucacagcaggguaacaggaaga

SEQ ID NO: 570741 - RNA, 22 nt, Human
gaggcccuccagcugucagcug

SEQ ID NO: 570742 - RNA, 22 nt, Human
uguucuuuucucuaaacugaua

SEQ ID NO: 570743 - RNA, 15 nt, Human
ggaacauuucuguuu

SEQ ID NO: 570744 - RNA, 22 nt, Human
cugugaauguugaauaaauccu

SEQ ID NO: 570745 - RNA, 22 nt, Human
guggauggcuaguugagaaggg

SEQ ID NO: 570746 - RNA, 22 nt, Human
uacacugugagguuuccaaggg

SEQ ID NO: 570747 - RNA, 22 nt, Human
gugccugguuuggggaguguuc

SEQ ID NO: 570748 - RNA, 22 nt, Human
acacccagcugggccaccucca

SEQ ID NO: 570749 - RNA, 22 nt, Human
caguggagagacuuuuacucuu

SEQ ID NO: 570750 - RNA, 22 nt, Human
uguggggaccuggcugccaccc

SEQ ID NO: 570751 - RNA, 22 nt, Human
ggacaggugugaggcuggcaca

SEQ ID NO: 570752 - RNA, 22 nt, Human
ugcuucugaugugagcagcccc

SEQ ID NO: 570753 - RNA, 22 nt, Human
aucucuggcaaugcagcaucgu

SEQ ID NO: 570754 - RNA, 22 nt, Human
uaauauauuucugcuaagcuca

SEQ ID NO: 570755 - RNA, 22 nt, Human
aucucagagaaauuugaaugca

SEQ ID NO: 570756 - RNA, 22 nt, Human
ucccagagccucugccacucug

SEQ ID NO: 570757 - RNA, 22 nt, Human
cgagaguuagcuaggagucaca

SEQ ID NO: 570758 - RNA, 22 nt, Human
uuauuucauguaaaauuuaugu

SEQ ID NO: 570759 - RNA, 22 nt, Human
cuuuuacacucaucugggaggg

SEQ ID NO: 570760 - RNA, 22 nt, Human
cagccaggagccucugcaacua

SEQ ID NO: 570761 - RNA, 22 nt, Human
ugucaguucaauuauaguaauu

SEQ ID NO: 570762 - RNA, 20 nt, Human
agcuggugaauuaaagacug

SEQ ID NO: 570763 - RNA, 20 nt, Human
aggaggggauagaaucaaag

SEQ ID NO: 570764 - RNA, 22 nt, Human
ucugccagaaguucugagagua

SEQ ID NO: 570765 - RNA, 22 nt, Human
ugccugggugcccucugcuccu

SEQ ID NO: 570766 - RNA, 22 nt, Human
acccagguggcucugacggggg

SEQ ID NO: 570767 - RNA, 18 nt, Human
cuguugagauguggcuga

SEQ ID NO: 570768 - RNA, 22 nt, Human
uaugcagugguaucauuuuaaa

SEQ ID NO: 570769 - RNA, 22 nt, Human
cuccagucuagguccuacuuau

SEQ ID NO: 570770 - RNA, 22 nt, Human
uacaacaauuuccacauuagaa

SEQ ID NO: 570771 - RNA, 22 nt, Human
aaggcccacagaacugucucca

SEQ ID NO: 570772 - RNA, 22 nt, Human
uacauuguguuaaaacagaaga

SEQ ID NO: 570773 - RNA, 22 nt, Human
aagcagagguagggugugcagu

SEQ ID NO: 570774 - RNA, 22 nt, Human
acuugucuuuaauccgaaugua

SEQ ID NO: 570775 - RNA, 22 nt, Human
gcuguacaggguuauccuuucc

SEQ ID NO: 570776 - RNA, 22 nt, Human
ggaaggggucaccuccugauga

SEQ ID NO: 570777 - RNA, 22 nt, Human
aguuagaauggauguugagagc

SEQ ID NO: 570778 - RNA, 22 nt, Human
guuucuuuugugaucaccaacc

SEQ ID NO: 570779 - RNA, 22 nt, Human
ccuuggguguuuaauagauaua

SEQ ID NO: 570780 - RNA, 23 nt, Human
ugauuuccagugagucaguggga

SEQ ID NO: 570781 - RNA, 22 nt, Human
ucaguguuacauuauauagaac

SEQ ID NO: 570782 - RNA, 22 nt, Human
ugugaagaauuaaugugaauca

SEQ ID NO: 570783 - RNA, 22 nt, Human
aggguggaagauggcacuaucu

SEQ ID NO: 570784 - RNA, 23 nt, Human
cagaggugucagugcccaguguc

SEQ ID NO: 570785 - RNA, 22 nt, Human
agcgcgcugucagacuggcucg

SEQ ID NO: 570786 - RNA, 22 nt, Human
gcugagggcauguguggcgacu

SEQ ID NO: 570787 - RNA, 22 nt, Human
ccucucucugcaucuggagggc

SEQ ID NO: 570788 - RNA, 22 nt, Human
acugucaucagaagaugaaaau

SEQ ID NO: 570789 - RNA, 22 nt, Human
uucagugucacaagagcaagcc

SEQ ID NO: 570790 - RNA, 22 nt, Human
ggcagccuccagggcacuggug

SEQ ID NO: 570791 - RNA, 22 nt, Human
ggagggccccuccagugggcag

SEQ ID NO: 570792 - RNA, 22 nt, Human
caggucuguuuucaaggucagu

SEQ ID NO: 570793 - RNA, 22 nt, Human
uggcccuggcugaguuagauuu

SEQ ID NO: 570794 - RNA, 22 nt, Human
ugccacacaauuacugcugcua

SEQ ID NO: 570795 - RNA, 22 nt, Human
uagcccagcaugagcagagcug

SEQ ID NO: 570796 - RNA, 22 nt, Human
ugcuuacaacuuuauugaggaa

SEQ ID NO: 570797 - RNA, 22 nt, Human
gugcaggggccuccccuugcug

SEQ ID NO: 570798 - RNA, 22 nt, Human
uucaguuucccuaaagccaauu

SEQ ID NO: 570799 - RNA, 22 nt, Human
ugaggccagacugaaaccaaca

SEQ ID NO: 570800 - RNA, 20 nt, Human
aggagaccaagccaagugga

SEQ ID NO: 570801 - RNA, 22 nt, Human
aacagaguggagccaaacuuug

SEQ ID NO: 570802 - RNA, 22 nt, Human
uaauacugaaagggaaaugucc

SEQ ID NO: 570803 - RNA, 22 nt, Human
uagcuauuuugcuuggaaauac

SEQ ID NO: 570804 - RNA, 19 nt, Human
ccagcccugucacuucuug

SEQ ID NO: 570805 - RNA, 22 nt, Human
aagaccaucacagagacacuug

SEQ ID NO: 570806 - RNA, 22 nt, Human
gcuggaauuggacccagggcuc

SEQ ID NO: 570807 - RNA, 22 nt, Human
ugucccuggaacuauggcucca

SEQ ID NO: 570808 - RNA, 22 nt, Human
aaauaugagaguaggaguuugg

SEQ ID NO: 570809 - RNA, 22 nt, Human
aaagagggacaggcgcagacac

SEQ ID NO: 570810 - RNA, 22 nt, Human
ucugagguucuguuuucaacug

SEQ ID NO: 570811 - RNA, 23 nt, Human
uugauacagaagaaucaguuugu

SEQ ID NO: 570812 - RNA, 22 nt, Human
ucuccuggucaccucagaaguc

SEQ ID NO: 570813 - RNA, 22 nt, Human
agggaugggaacuccuccagca

SEQ ID NO: 570814 - RNA, 22 nt, Human
gaauuucacaaggugaggauaa

SEQ ID NO: 570815 - RNA, 22 nt, Human
acaauguuucucuuuagucauu

SEQ ID NO: 570816 - RNA, 22 nt, Human
cccagcugcaccucuauggccu

SEQ ID NO: 570817 - RNA, 22 nt, Human
uaagauuacagugagaaauaaa

SEQ ID NO: 570818 - RNA, 22 nt, Human
cagaggucagguuggacauuau

SEQ ID NO: 570819 - RNA, 21 nt, Human
agaagccuggguggagguggg

SEQ ID NO: 570820 - RNA, 22 nt, Human
acagugaggacagggacugugu

SEQ ID NO: 570821 - RNA, 22 nt, Human
ccaguaaaaagcgacaggaagu

SEQ ID NO: 570822 - RNA, 22 nt, Human
ggcagugaaaaaguauguuucc

SEQ ID NO: 570823 - RNA, 22 nt, Human
gagggcugcugccagauaugcc

SEQ ID NO: 570824 - RNA, 22 nt, Human
gagcugccugugugccaugaug

SEQ ID NO: 570825 - RNA, 22 nt, Human
acaggugaaguauuacacuaag

SEQ ID NO: 570826 - RNA, 22 nt, Human
auggcagauggcuggagcaggu

SEQ ID NO: 570827 - RNA, 22 nt, Human
caaguucacguugcuuuuugag

SEQ ID NO: 570828 - RNA, 22 nt, Human
caggacagagcccagacugugu

SEQ ID NO: 570829 - RNA, 22 nt, Human
aaauuuaaggaggugcucacuu

SEQ ID NO: 570830 - RNA, 21 nt, Human
agagccugagaucuuccagca

SEQ ID NO: 570831 - RNA, 22 nt, Human
aggggagcaacauagucacucu

SEQ ID NO: 570832 - RNA, 22 nt, Human
cagaggcaaaagagguggaggu

SEQ ID NO: 570833 - RNA, 20 nt, Human
ggcugcugugggcagagagg

SEQ ID NO: 570834 - RNA, 22 nt, Human
ucuuucaaugugaaaccaugua

SEQ ID NO: 570835 - RNA, 22 nt, Human
ggccacagagggcgggaugcug

SEQ ID NO: 570836 - RNA, 22 nt, Human
uggcucucagcucccagcagcc

SEQ ID NO: 570837 - RNA, 22 nt, Human
gccagaggaacgcugcgcgccc

SEQ ID NO: 570838 - RNA, 21 nt, Human
acuuuaauauacaugaggagg

SEQ ID NO: 570839 - RNA, 22 nt, Human
caucuguaaaguaggaauauug

SEQ ID NO: 570840 - RNA, 22 nt, Human
gcuggggaggcagcagagaaca

SEQ ID NO: 570841 - RNA, 22 nt, Human
uggaggccgcguagucugagca

SEQ ID NO: 570842 - RNA, 22 nt, Human
cauagauagagguuccuaauag

SEQ ID NO: 570843 - RNA, 22 nt, Human
caagcugggugcgggcaguaua

SEQ ID NO: 570844 - RNA, 22 nt, Human
uaauuuaauuccauggauucua

SEQ ID NO: 570845 - RNA, 22 nt, Human
gagcucagcaaaggucugugug

SEQ ID NO: 570846 - RNA, 22 nt, Human
aucauucuagcuguuguguuga

SEQ ID NO: 570847 - RNA, 22 nt, Human
uagagaugcccuagcugaagua

SEQ ID NO: 570848 - RNA, 22 nt, Human
aaaaggaggacaugguuacaga

SEQ ID NO: 570849 - RNA, 22 nt, Human
ugccugucuucaggagugucac

SEQ ID NO: 570850 - RNA, 22 nt, Human
auuuugcacacuaugcagcuuu

SEQ ID NO: 570851 - RNA, 22 nt, Human
gggcaaggcagaagaguuggag

SEQ ID NO: 570852 - RNA, 22 nt, Human
cuagaauugcauucuaugaaua

SEQ ID NO: 570853 - RNA, 22 nt, Human
ucagccaagcagccaucaucug

SEQ ID NO: 570854 - RNA, 20 nt, Human
uucuucucuaguuaucuuca

SEQ ID NO: 570855 - RNA, 22 nt, Human
aaguccuuuaauaucacauagu

SEQ ID NO: 570856 - RNA, 22 nt, Human
uugaccuauguuucuucaucug

SEQ ID NO: 570857 - RNA, 22 nt, Human
augcagucuaagcauguaaggg

SEQ ID NO: 570858 - RNA, 22 nt, Human
gccaggcucucagugacugccc

SEQ ID NO: 570859 - RNA, 22 nt, Human
uuuauuauguacaggcacuaua

SEQ ID NO: 570860 - RNA, 22 nt, Human
cacagcugccauggcugcacuu

SEQ ID NO: 570861 - RNA, 22 nt, Human
cuggagcuccagggucuccucu

SEQ ID NO: 570862 - RNA, 22 nt, Human
aagcauguguauaagcugggca

SEQ ID NO: 570863 - RNA, 22 nt, Human
ccuccuggugacaaggcaaagc

SEQ ID NO: 570864 - RNA, 20 nt, Human
acuggacacugaggugagcu

SEQ ID NO: 570865 - RNA, 22 nt, Human
uaagcuucaaagaacauauugg

SEQ ID NO: 570866 - RNA, 22 nt, Human
uaucacuacacuaagauacaga

SEQ ID NO: 570867 - RNA, 22 nt, Human
gcucucugcaagucagcagccu

SEQ ID NO: 570868 - RNA, 22 nt, Human
uacccaggagaaacagcagggc

SEQ ID NO: 570869 - RNA, 22 nt, Human
ugcuauaagaauuauauuacuc

SEQ ID NO: 570870 - RNA, 21 nt, Human
agcugcuucaccuggacaaca

SEQ ID NO: 570871 - RNA, 22 nt, Human
auuuuaucugcuuacuuucagg

SEQ ID NO: 570872 - RNA, 22 nt, Human
ucucuggguucucacucagcac

SEQ ID NO: 570873 - RNA, 22 nt, Human
uagaaugaccuccucuuagcuu

SEQ ID NO: 570874 - RNA, 22 nt, Human
gaagccacccuccuuccagccc

SEQ ID NO: 570875 - RNA, 22 nt, Human
gcucuucucagauuguacacuc

SEQ ID NO: 570876 - RNA, 22 nt, Human
agggauggagcccagcuguucu

SEQ ID NO: 570877 - RNA, 22 nt, Human
uauuuuguuaauaauccagucc

SEQ ID NO: 570878 - RNA, 22 nt, Human
acuggccaggcagcaguagcuu

SEQ ID NO: 570879 - RNA, 22 nt, Human
acugccaccuggugguccugga

SEQ ID NO: 570880 - RNA, 22 nt, Human
acaguggcucaugccugucauc

SEQ ID NO: 570881 - RNA, 22 nt, Human
ggcuccaguuugugccuucagc

SEQ ID NO: 570882 - RNA, 22 nt, Human
cucugaggaagucaaguagcca

SEQ ID NO: 570883 - RNA, 22 nt, Human
ccagagcuugacgugcaacgga

SEQ ID NO: 570884 - RNA, 22 nt, Human
acuguuuugugccuuaguuucc

SEQ ID NO: 570885 - RNA, 22 nt, Human
gugagauuugaguggggauaca

SEQ ID NO: 570886 - RNA, 22 nt, Human
uucucauguaaaugccaucauc

SEQ ID NO: 570887 - RNA, 22 nt, Human
cucugggcaaagaugccucauc

SEQ ID NO: 570888 - RNA, 19 nt, Human
ggacagggggagcuuuuau

SEQ ID NO: 570889 - RNA, 22 nt, Human
cugcagggcauuguaacucuuu

SEQ ID NO: 570890 - RNA, 22 nt, Human
acaauguuuugaaacaucuagg

SEQ ID NO: 570891 - RNA, 22 nt, Human
uuccaugccucuauuuagaauu

SEQ ID NO: 570892 - RNA, 22 nt, Human
cugugggaugggaccucagcug

SEQ ID NO: 570893 - RNA, 22 nt, Human
aaugcucucugccauagcuaac

SEQ ID NO: 570894 - RNA, 22 nt, Human
gaaaucuuugccuuagcugugu

SEQ ID NO: 570895 - RNA, 22 nt, Human
uaaacauggauucugaucacag

SEQ ID NO: 570896 - RNA, 22 nt, Human
gcucccagcauugcuucccagg

SEQ ID NO: 570897 - RNA, 22 nt, Human
uacaauuacucagcucugcugu

SEQ ID NO: 570898 - RNA, 22 nt, Human
gguccaugauaggaaguuccga

SEQ ID NO: 570899 - RNA, 22 nt, Human
aaguguucuacacuuugaccuu

SEQ ID NO: 570900 - RNA, 22 nt, Human
uagcuuaaaaucucuagauucu

SEQ ID NO: 570901 - RNA, 22 nt, Human
acccgggaggcaggagucauag

SEQ ID NO: 570902 - RNA, 22 nt, Human
cuguuuguccaacuugucccga

SEQ ID NO: 570903 - RNA, 22 nt, Human
uuuucucagcugcacuguauua

SEQ ID NO: 570904 - RNA, 22 nt, Human
uggcacaguuaaaguuguagaa

SEQ ID NO: 570905 - RNA, 22 nt, Human
uagcuuuguguccugauuuagc

SEQ ID NO: 570906 - RNA, 22 nt, Human
uaggcagcugcaaacuucgguc

SEQ ID NO: 570907 - RNA, 22 nt, Human
cucagccaugucaugccuaccu

SEQ ID NO: 570908 - RNA, 22 nt, Human
ugaagugucauuuacauuucua

SEQ ID NO: 570909 - RNA, 22 nt, Human
cgaacacacuugggaguucuga

SEQ ID NO: 570910 - RNA, 22 nt, Human
uuaacaaagcucuguuccuuuu

SEQ ID NO: 570911 - RNA, 22 nt, Human
cuuuacauuaauuucuacugau

SEQ ID NO: 570912 - RNA, 22 nt, Human
ugauuuaugcauuauacuguug

SEQ ID NO: 570913 - RNA, 22 nt, Human
agcagguuaccauugauuuccu

SEQ ID NO: 570914 - RNA, 22 nt, Human
auguucuuguucaaaugucagu

SEQ ID NO: 570915 - RNA, 22 nt, Human
gcugaguauacagacuauguua

SEQ ID NO: 570916 - RNA, 22 nt, Human
ugggugguuuaugaguggguuu

SEQ ID NO: 570917 - RNA, 22 nt, Human
uggucuuagcuggaaggaggga

SEQ ID NO: 570918 - RNA, 22 nt, Human
agugcacuggcaccaucucagc

SEQ ID NO: 570919 - RNA, 22 nt, Human
ucaauuucuugguuugauaaua

SEQ ID NO: 570920 - RNA, 22 nt, Human
gcuguccaccuccagagccuua

SEQ ID NO: 570921 - RNA, 22 nt, Human
caugcagaguuuauuaccaucu

SEQ ID NO: 570922 - RNA, 22 nt, Human
gggcagcagcaggaggucucug

SEQ ID NO: 570923 - RNA, 22 nt, Human
aaggcuggaccuggaugaaucu

SEQ ID NO: 570924 - RNA, 22 nt, Human
aaagccagaauucguccagccu

SEQ ID NO: 570925 - RNA, 22 nt, Human
ggauaagaaaauuguaauaacu

SEQ ID NO: 570926 - RNA, 22 nt, Human
cugguuggaagugcagacucuc

SEQ ID NO: 570927 - RNA, 21 nt, Human
agcuccaggcuccugggguuc

SEQ ID NO: 570928 - RNA, 22 nt, Human
gugagaagauaaguauugcaaa

SEQ ID NO: 570929 - RNA, 19 nt, Human
uucuugaacauguuucuca

SEQ ID NO: 570930 - RNA, 22 nt, Human
gagcccagcccagagccauaug

SEQ ID NO: 570931 - RNA, 22 nt, Human
cacugacuccaaaaauaaagaa

SEQ ID NO: 570932 - RNA, 22 nt, Human
auugaaauugaugaaauucuug

SEQ ID NO: 570933 - RNA, 22 nt, Human
uccuuagcaacacuguuauaau

SEQ ID NO: 570934 - RNA, 22 nt, Human
guuuccuauggcugcugcagga

SEQ ID NO: 570935 - RNA, 22 nt, Human
gaggggaguguccuccgggccc

SEQ ID NO: 570936 - RNA, 22 nt, Human
ggcugugcagggcagagucuca

SEQ ID NO: 570937 - RNA, 22 nt, Human
uucucagauccaucagaagucc

SEQ ID NO: 570938 - RNA, 22 nt, Human
ugucagugguagacccagaggu

SEQ ID NO: 570939 - RNA, 21 nt, Human
ggccuuggcgggggccgaauu

SEQ ID NO: 570940 - RNA, 22 nt, Human
uuaacgaauugugcauaauucc

SEQ ID NO: 570941 - RNA, 22 nt, Human
ucaguguuaaucagugguaccu

SEQ ID NO: 570942 - RNA, 22 nt, Human
caggguggaaaagcuaguugga

SEQ ID NO: 570943 - RNA, 22 nt, Human
cagugcuguguuugcugccugg

SEQ ID NO: 570944 - RNA, 22 nt, Human
aaccuaggacuauagauaucau

SEQ ID NO: 570945 - RNA, 22 nt, Human
gcagacagggcuacagagguac

SEQ ID NO: 570946 - RNA, 22 nt, Human
ccagaggagggcucugaugagg

SEQ ID NO: 570947 - RNA, 20 nt, Human
agggcucugccuugcugaug

SEQ ID NO: 570948 - RNA, 22 nt, Human
ggccagcugccaccagcccuau

SEQ ID NO: 570949 - RNA, 22 nt, Human
ucacauuuguguuuuauuagag

SEQ ID NO: 570950 - RNA, 22 nt, Human
ucaucugaaauuguauauguag

SEQ ID NO: 570951 - RNA, 22 nt, Human
ugcaggaguuccccucugccug

SEQ ID NO: 570952 - RNA, 22 nt, Human
ccaggccuggacggguggccug

SEQ ID NO: 570953 - RNA, 22 nt, Human
aggagacccagaauguugcugu

SEQ ID NO: 570954 - RNA, 22 nt, Human
cagcuccccucuguggggcagu

SEQ ID NO: 570955 - RNA, 22 nt, Human
uaaguaaauuuauaaugugauu

SEQ ID NO: 570956 - RNA, 21 nt, Human
uucucagaucgaguagugaga

SEQ ID NO: 570957 - RNA, 22 nt, Human
agggggugcccagaugaaggau

SEQ ID NO: 570958 - RNA, 22 nt, Human
aauccauguugauguauauuuu

SEQ ID NO: 570959 - RNA, 22 nt, Human
cccucagcuucucccugcagcu

SEQ ID NO: 570960 - RNA, 21 nt, Human
ugcuuucagacucuuacagaa

SEQ ID NO: 570961 - RNA, 22 nt, Human
aggaguggaauuacuggguucu

SEQ ID NO: 570962 - RNA, 22 nt, Human
cugugucuucugcuuacagucu

SEQ ID NO: 570963 - RNA, 22 nt, Human
aagacauuggacaauccagagg

SEQ ID NO: 570964 - RNA, 22 nt, Human
uccugaggcacaauccuagaau

SEQ ID NO: 570965 - RNA, 19 nt, Human
ggugaccaccuggucagug

SEQ ID NO: 570966 - RNA, 22 nt, Human
gugcucuggcuggucucccggu

SEQ ID NO: 570967 - RNA, 22 nt, Human
cuggugcuggcaacagaguagg

SEQ ID NO: 570968 - RNA, 22 nt, Human
ucacccagccuuggcggguuug

SEQ ID NO: 570969 - RNA, 22 nt, Human
aacagcaucaccccauaacauu

SEQ ID NO: 570970 - RNA, 22 nt, Human
agcuuugaaucugguguuugca

SEQ ID NO: 570971 - RNA, 22 nt, Human
ggucugaauuccagccccucug

SEQ ID NO: 570972 - RNA, 22 nt, Human
ugaaaauuguuguacuugauaa

SEQ ID NO: 570973 - RNA, 22 nt, Human
uaaaucuucuacaucaucauaa

SEQ ID NO: 570974 - RNA, 22 nt, Human
ucagaaucuaaauaggcuccag

SEQ ID NO: 570975 - RNA, 22 nt, Human
aaggagucugggccauucagag

SEQ ID NO: 570976 - RNA, 22 nt, Human
gggcagcaaaucugagucuggu

SEQ ID NO: 570977 - RNA, 22 nt, Human
ucacaggaaggguaaauauuua

SEQ ID NO: 570978 - RNA, 22 nt, Human
aauagcauguucaugauaaaau

SEQ ID NO: 570979 - RNA, 22 nt, Human
cugcuuuagguggaauguucua

SEQ ID NO: 570980 - RNA, 22 nt, Human
acauccaucuuaugagauaggu

SEQ ID NO: 570981 - RNA, 22 nt, Human
uagaucugauacaauucaucug

SEQ ID NO: 570982 - RNA, 22 nt, Human
cucugcuugugucaggcaugcu

SEQ ID NO: 570983 - RNA, 22 nt, Human
aggcacuguacuagguacaggg

SEQ ID NO: 570984 - RNA, 22 nt, Human
aggagcugaaacuucucauaug

SEQ ID NO: 570985 - RNA, 22 nt, Human
aaucacacaaaggcaacuuuug

SEQ ID NO: 570986 - RNA, 23 nt, Human
ggccacugaauuuucugcaucuu

SEQ ID NO: 570987 - RNA, 22 nt, Human
uguuuacacaauagucucucuc

SEQ ID NO: 570988 - RNA, 22 nt, Human
uuguccugcaaccucacauggc

SEQ ID NO: 570989 - RNA, 22 nt, Human
gcuaaucaauguuaaggcugug

SEQ ID NO: 570990 - RNA, 22 nt, Human
ucuuuauuucugaaucccccau

SEQ ID NO: 570991 - RNA, 22 nt, Human
uuagcaaacucuguuagauucu

SEQ ID NO: 570992 - RNA, 20 nt, Human
ucuuacaaucguuacaucca

SEQ ID NO: 570993 - RNA, 22 nt, Human
gacuacagauagccaauuaagu

SEQ ID NO: 570994 - RNA, 22 nt, Human
uauuuuguuuuguauccacugu

SEQ ID NO: 570995 - RNA, 22 nt, Human
ugggccagcugaagugccgccc

SEQ ID NO: 570996 - RNA, 22 nt, Human
ggccucagagaaggcugugcgg

SEQ ID NO: 570997 - RNA, 22 nt, Human
ugcauuuggggcagacuagcag

SEQ ID NO: 570998 - RNA, 22 nt, Human
acacccagauuaugcacacaaa

SEQ ID NO: 570999 - RNA, 22 nt, Human
agagcuggcagcagcuucuccu

SEQ ID NO: 571000 - RNA, 23 nt, Human
ccugugugcccuuaauucacagc

SEQ ID NO: 571001 - RNA, 22 nt, Human
aaaaaauuccauucugugccuu

SEQ ID NO: 571002 - RNA, 22 nt, Human
uuucuucucgacaccuuauccc

SEQ ID NO: 571003 - RNA, 22 nt, Human
gcucagggucccuuggugcugg

SEQ ID NO: 571004 - RNA, 22 nt, Human
agccacaggccaugagauacca

SEQ ID NO: 571005 - RNA, 22 nt, Human
uuuaaucuauucccuaaacacc

SEQ ID NO: 571006 - RNA, 22 nt, Human
acagaccaaguuuccagcaggu

SEQ ID NO: 571007 - RNA, 22 nt, Human
caugaaauguuagaauuagaca

SEQ ID NO: 571008 - RNA, 22 nt, Human
agugucuuacaugaauugauuu

SEQ ID NO: 571009 - RNA, 22 nt, Human
uugugggauggcucuucccaaa

SEQ ID NO: 571010 - RNA, 18 nt, Human
cagcucuucuccaguaac

SEQ ID NO: 571011 - RNA, 22 nt, Human
ccuccaggaggaaauggaacac

SEQ ID NO: 571012 - RNA, 23 nt, Human
cugcagucgccggccugggugcc

SEQ ID NO: 571013 - RNA, 22 nt, Human
aaucugaauauuuauguguauu

SEQ ID NO: 571014 - RNA, 22 nt, Human
uuuagugccugggccaguucca

SEQ ID NO: 571015 - RNA, 20 nt, Human
gggaggcgagggcugagcag

SEQ ID NO: 571016 - RNA, 21 nt, Human
ucagaacaauuccaugccucc

SEQ ID NO: 571017 - RNA, 22 nt, Human
uacauaguuccauuuacaggaa

SEQ ID NO: 571018 - RNA, 20 nt, Human
cacagcuugccuuuuaugac

SEQ ID NO: 571019 - RNA, 22 nt, Human
uagaugugagcccaggcugcuu

SEQ ID NO: 571020 - RNA, 22 nt, Human
gggcagcuccuguggaauccac

SEQ ID NO: 571021 - RNA, 22 nt, Human
cauuuauucaugaucuguagcu

SEQ ID NO: 571022 - RNA, 22 nt, Human
uugacuguacaaccuuuuguag

SEQ ID NO: 571023 - RNA, 22 nt, Human
gcacacugcggugaugugaguc

SEQ ID NO: 571024 - RNA, 22 nt, Human
cugccugugccaccgccucauu

SEQ ID NO: 571025 - RNA, 22 nt, Human
agcgagugggucagcguugcag

SEQ ID NO: 571026 - RNA, 22 nt, Human
cugggagaucuguugggacugg

SEQ ID NO: 571027 - RNA, 22 nt, Human
aaggagacauuugcagagcacc

SEQ ID NO: 571028 - RNA, 22 nt, Human
uccaucuguuuacuauaaagau

SEQ ID NO: 571029 - RNA, 22 nt, Human
acuguaaauuuugguugcaggu

SEQ ID NO: 571030 - RNA, 22 nt, Human
uguuuuaagcucuagaagggga

SEQ ID NO: 571031 - RNA, 19 nt, Human
gcuuuaguuuacucaucua

SEQ ID NO: 571032 - RNA, 22 nt, Human
uugaucaagugggaaauaguaa

SEQ ID NO: 571033 - RNA, 22 nt, Human
ugcugaggcagaugucugugac

SEQ ID NO: 571034 - RNA, 18 nt, Human
agcaagcaguuuucaugu

SEQ ID NO: 571035 - RNA, 22 nt, Human
augagcaguagguucauggcug

SEQ ID NO: 571036 - RNA, 22 nt, Human
uugauauuuugcacgcuuggua

SEQ ID NO: 571037 - RNA, 22 nt, Human
gcuauuguuuauuuugaaucua

SEQ ID NO: 571038 - RNA, 22 nt, Human
uggcucaggcuugaaaauagau

SEQ ID NO: 571039 - RNA, 22 nt, Human
uccagccaagggagguuacuag

SEQ ID NO: 571040 - RNA, 22 nt, Human
ugcaguuuucucacccccacaa

SEQ ID NO: 571041 - RNA, 22 nt, Human
cagggauucagcugaaggaggc

SEQ ID NO: 571042 - RNA, 22 nt, Human
acuuccuguaaauagaauucca

SEQ ID NO: 571043 - RNA, 22 nt, Human
aaauuuaaaaagcagcauugca

SEQ ID NO: 571044 - RNA, 19 nt, Human
aaacucauagacucauauu

SEQ ID NO: 571045 - RNA, 22 nt, Human
gcuucuggcagugcagccacca

SEQ ID NO: 571046 - RNA, 22 nt, Human
ccagaugggccagggguuuguu

SEQ ID NO: 571047 - RNA, 22 nt, Human
ugauucuuugaccaaaaaauug

SEQ ID NO: 571048 - RNA, 22 nt, Human
gugcaaaaguaauuacaguuuu

SEQ ID NO: 571049 - RNA, 22 nt, Human
cccagcucccauguucuccaau

SEQ ID NO: 571050 - RNA, 22 nt, Human
ugccaggcccagcuccagagcu

SEQ ID NO: 571051 - RNA, 22 nt, Human
ccugagugccaugagagcaccc

SEQ ID NO: 571052 - RNA, 18 nt, Human
caggugggucuccugccc

SEQ ID NO: 571053 - RNA, 22 nt, Human
cuauucuagauuacaguauaaa

SEQ ID NO: 571054 - RNA, 22 nt, Human
cauucauuuaugaaauaucuau

SEQ ID NO: 571055 - RNA, 22 nt, Human
aagcugccuagaguugaauguc

SEQ ID NO: 571056 - RNA, 22 nt, Human
uguggcugacuccuggucccca

SEQ ID NO: 571057 - RNA, 22 nt, Human
ucuuccucccuacagagcucag

SEQ ID NO: 571058 - RNA, 22 nt, Human
uucuagaggggagauacuagua

SEQ ID NO: 571059 - RNA, 22 nt, Human
uaauuuuaauaguauguggcau

SEQ ID NO: 571060 - RNA, 21 nt, Human
ggcaacagauauuuugcuuag

SEQ ID NO: 571061 - RNA, 22 nt, Human
gacuuuauuuuaacggagauuc

SEQ ID NO: 571062 - RNA, 23 nt, Human
cagcccuggagaugugggaggca

SEQ ID NO: 571063 - RNA, 22 nt, Human
ucuggguucuugaugcuaccuu

SEQ ID NO: 571064 - RNA, 22 nt, Human
uuuuacaccucagaugagcaga

SEQ ID NO: 571065 - RNA, 22 nt, Human
uucuuaguucaacuaaaauuua

SEQ ID NO: 571066 - RNA, 22 nt, Human
cugaggccuaagacaugaauga

SEQ ID NO: 571067 - RNA, 22 nt, Human
cagcuucucagaaagcugaggu

SEQ ID NO: 571068 - RNA, 22 nt, Human
aggggcugacuggaaagugcca

SEQ ID NO: 571069 - RNA, 22 nt, Human
cuaagacaugcccugcaugaua

SEQ ID NO: 571070 - RNA, 22 nt, Human
uucuuuucuuggcaggaguaga

SEQ ID NO: 571071 - RNA, 22 nt, Human
aggugggcaaugaggccugagu

SEQ ID NO: 571072 - RNA, 22 nt, Human
uucucugaaggccaugcucacu

SEQ ID NO: 571073 - RNA, 18 nt, Human
aggcaggcggaucacaag

SEQ ID NO: 571074 - RNA, 22 nt, Human
auauccaagaaacaauuaauuc

SEQ ID NO: 571075 - RNA, 22 nt, Human
uuuucacacaaggugauaaguu

SEQ ID NO: 571076 - RNA, 22 nt, Human
cuggguggcagagccugcagug

SEQ ID NO: 571077 - RNA, 22 nt, Human
ggugugugguuuugauacaguc

SEQ ID NO: 571078 - RNA, 21 nt, Human
cagagggccggcauguggucu

SEQ ID NO: 571079 - RNA, 22 nt, Human
aagcuuacaguuccacguagca

SEQ ID NO: 571080 - RNA, 22 nt, Human
ccugagguggcugcagcacugc

SEQ ID NO: 571081 - RNA, 22 nt, Human
cugagccacugcuuguucagug

SEQ ID NO: 571082 - RNA, 23 nt, Human
aguucucauucaucacggccuau

SEQ ID NO: 571083 - RNA, 22 nt, Human
uaccagcuuccuucaagaugug

SEQ ID NO: 571084 - RNA, 22 nt, Human
agcaaagcuaccaauuauugag

SEQ ID NO: 571085 - RNA, 22 nt, Human
ggaaugauggugccuagauuau

SEQ ID NO: 571086 - RNA, 20 nt, Human
aucugcugagaaugaaaggc

SEQ ID NO: 571087 - RNA, 21 nt, Human
agauccuguggcugagaagua

SEQ ID NO: 571088 - RNA, 22 nt, Human
ucccuccagaauggugaggaag

SEQ ID NO: 571089 - RNA, 22 nt, Human
caaauugaucugucuuuaugaa

SEQ ID NO: 571090 - RNA, 22 nt, Human
ucccgauaggcagggcucuggc

SEQ ID NO: 571091 - RNA, 22 nt, Human
aaaucacuguuauugaucuuaa

SEQ ID NO: 571092 - RNA, 22 nt, Human
ccucugugugugcaugcaugcg

SEQ ID NO: 571093 - RNA, 22 nt, Human
ugugaacucuggaacaaaacua

SEQ ID NO: 571094 - RNA, 21 nt, Human
gccugagcaugucuucagguc

SEQ ID NO: 571095 - RNA, 22 nt, Human
ugcuccaggcugcugaagaucu

SEQ ID NO: 571096 - RNA, 22 nt, Human
ccagcucccauucuucaccugu

SEQ ID NO: 571097 - RNA, 22 nt, Human
uggaacacaucuaaggaagcag

SEQ ID NO: 571098 - RNA, 22 nt, Human
uuguaacaaucugucauaaaug

SEQ ID NO: 571099 - RNA, 22 nt, Human
ucuuuccucugagcuccuguag

SEQ ID NO: 571100 - RNA, 22 nt, Human
auagaauuugcacuaaaucugc

SEQ ID NO: 571101 - RNA, 22 nt, Human
ggcaaauuugucuuaagacacc

SEQ ID NO: 571102 - RNA, 22 nt, Human
ccaggaggucugaguguggaca

SEQ ID NO: 571103 - RNA, 22 nt, Human
uuuagaauuggcuagugggaau

SEQ ID NO: 571104 - RNA, 22 nt, Human
ugaccaaaggugguuuauuugg

SEQ ID NO: 571105 - RNA, 22 nt, Human
agaccacaggcaugcacagagc

SEQ ID NO: 571106 - RNA, 22 nt, Human
ucucuguguucccuguuuucuc

SEQ ID NO: 571107 - RNA, 20 nt, Human
aggcccugccagggacggag

SEQ ID NO: 571108 - RNA, 22 nt, Human
aaauuauaggugccaccuugga

SEQ ID NO: 571109 - RNA, 22 nt, Human
cagaggcagaggucaucucugg

SEQ ID NO: 571110 - RNA, 19 nt, Human
uggcagaggacaaggacuu

SEQ ID NO: 571111 - RNA, 20 nt, Human
aggacuuguuugggcagagu

SEQ ID NO: 571112 - RNA, 22 nt, Human
ccugccugguguaagucuaagg

SEQ ID NO: 571113 - RNA, 22 nt, Human
cugggcuuugguacugugauua

SEQ ID NO: 571114 - RNA, 22 nt, Human
guuacaaagcacuucaagugaa

SEQ ID NO: 571115 - RNA, 22 nt, Human
cagcccuugcgacacccuggcu

SEQ ID NO: 571116 - RNA, 22 nt, Human
uuucaaacauaucuucauuacu

SEQ ID NO: 571117 - RNA, 22 nt, Human
aggcuguggugcugaaggaggg

SEQ ID NO: 571118 - RNA, 22 nt, Human
gcagggcagcuuagucccuguc

SEQ ID NO: 571119 - RNA, 22 nt, Human
gcacugggagcugccugccggu

SEQ ID NO: 571120 - RNA, 22 nt, Human
uguuauugauaucuaaugcucu

SEQ ID NO: 571121 - RNA, 22 nt, Human
gacugaggcuccccuaggcuca

SEQ ID NO: 571122 - RNA, 22 nt, Human
caccuugcauucuuuuaauuua

SEQ ID NO: 571123 - RNA, 22 nt, Human
cccugcaggggaccugcagccu

SEQ ID NO: 571124 - RNA, 22 nt, Human
ucugacuuggcgcucuugucuu

SEQ ID NO: 571125 - RNA, 22 nt, Human
agcuggagaauguggaugaucc

SEQ ID NO: 571126 - RNA, 23 nt, Human
uugucugugcuuuuccaguugcu

SEQ ID NO: 571127 - RNA, 22 nt, Human
uaauaucuggcauucaaacaug

SEQ ID NO: 571128 - RNA, 22 nt, Human
gugcauuuggugacucucaccc

SEQ ID NO: 571129 - RNA, 22 nt, Human
gccucaggugcaucucucauuc

SEQ ID NO: 571130 - RNA, 22 nt, Human
auagcagcauuucuuccaagga

SEQ ID NO: 571131 - RNA, 22 nt, Human
uacuuugucauucuaaccuucc

SEQ ID NO: 571132 - RNA, 22 nt, Human
uuagccuuagaagcuuagcaaa

SEQ ID NO: 571133 - RNA, 22 nt, Human
uccuggguggugguaggagcag

SEQ ID NO: 571134 - RNA, 22 nt, Human
aguuguauuagagaacacaaac

SEQ ID NO: 571135 - RNA, 22 nt, Human
acaaagagaccaugagccaaac

SEQ ID NO: 571136 - RNA, 22 nt, Human
ccuccaguacuccaguccagcg

SEQ ID NO: 571137 - RNA, 22 nt, Human
cacccaggacaggccagaugug

SEQ ID NO: 571138 - RNA, 22 nt, Human
aagcuucacauugaacuugggu

SEQ ID NO: 571139 - RNA, 21 nt, Human
gcacucagucacuacucaaga

SEQ ID NO: 571140 - RNA, 22 nt, Human
uagggguggagcuaagaguccc

SEQ ID NO: 571141 - RNA, 22 nt, Human
cugcccacuauguugucauggg

SEQ ID NO: 571142 - RNA, 22 nt, Human
caguggcugguuagggacagga

SEQ ID NO: 571143 - RNA, 22 nt, Human
gagagcuguuuaucuucuucaa

SEQ ID NO: 571144 - RNA, 22 nt, Human
cucuggagaugguucucaauug

SEQ ID NO: 571145 - RNA, 22 nt, Human
uuaaaaucuaaagcaguugucu

SEQ ID NO: 571146 - RNA, 22 nt, Human
acacccaggcuggcgugcagug

SEQ ID NO: 571147 - RNA, 22 nt, Human
uaucuacuccucuuucagaugc

SEQ ID NO: 571148 - RNA, 22 nt, Human
cugaugauagugauuuauugag

SEQ ID NO: 571149 - RNA, 22 nt, Human
cugcugggucuaugcaagugga

SEQ ID NO: 571150 - RNA, 22 nt, Human
aggauccuccuuagaaaagacc

SEQ ID NO: 571151 - RNA, 22 nt, Human
uuugaugaugaugauaaaguuu

SEQ ID NO: 571152 - RNA, 22 nt, Human
agaaagcacccugcacuuucug

SEQ ID NO: 571153 - RNA, 22 nt, Human
ucuggauggucagcucuuccug

SEQ ID NO: 571154 - RNA, 22 nt, Human
ugugggagaaggaagcaagcug

SEQ ID NO: 571155 - RNA, 19 nt, Human
aggagaaguagcagaaauu

SEQ ID NO: 571156 - RNA, 22 nt, Human
aucauuuuuaagagacucuucu

SEQ ID NO: 571157 - RNA, 22 nt, Human
ucagaacauauauuuugugaug

SEQ ID NO: 571158 - RNA, 22 nt, Human
ucucugagcccagugucccccu

SEQ ID NO: 571159 - RNA, 22 nt, Human
agaguggggaagguguugagaa

SEQ ID NO: 571160 - RNA, 22 nt, Human
gcccaggacucagggugucgcg

SEQ ID NO: 571161 - RNA, 22 nt, Human
gagagucuagugcaccuaguuu

SEQ ID NO: 571162 - RNA, 21 nt, Human
gugugaguagcaugugucuca

SEQ ID NO: 571163 - RNA, 20 nt, Human
uccuggucauguggcugggc

SEQ ID NO: 571164 - RNA, 22 nt, Human
cugaggcuaguauaaagagcau

SEQ ID NO: 571165 - RNA, 22 nt, Human
agcacuagagccaaaauuuggg

SEQ ID NO: 571166 - RNA, 17 nt, Human
ugaaggccaugaccacg

SEQ ID NO: 571167 - RNA, 22 nt, Human
uaugaauauaccacaauuuagg

SEQ ID NO: 571168 - RNA, 22 nt, Human
ucugggcacacaccaugcccac

SEQ ID NO: 571169 - RNA, 22 nt, Human
cucuggaggcagcaccagccag

SEQ ID NO: 571170 - RNA, 22 nt, Human
uuuuauguaauccuuacugucg

SEQ ID NO: 571171 - RNA, 22 nt, Human
gcucuggcccaaacccuuucua

SEQ ID NO: 571172 - RNA, 22 nt, Human
ucugggaggucacauuggucuu

SEQ ID NO: 571173 - RNA, 22 nt, Human
augucuuucuugugucccaaga

SEQ ID NO: 571174 - RNA, 22 nt, Human
cccagagaucuuguccuuucca

SEQ ID NO: 571175 - RNA, 22 nt, Human
uccuuuuugguccaaggugacc

SEQ ID NO: 571176 - RNA, 22 nt, Human
cagauauaguggcuugccuggg

SEQ ID NO: 571177 - RNA, 21 nt, Human
cuccucaggaccagccacagg

SEQ ID NO: 571178 - RNA, 22 nt, Human
uucucagaugauucagauaaac

SEQ ID NO: 571179 - RNA, 22 nt, Human
uguguucauuuaacuguucuuu

SEQ ID NO: 571180 - RNA, 22 nt, Human
uucaugaagggugaauauaguc

SEQ ID NO: 571181 - RNA, 19 nt, Human
cucuuacagaauagacaca

SEQ ID NO: 571182 - RNA, 22 nt, Human
gcaggcugggguagccccacuu

SEQ ID NO: 571183 - RNA, 22 nt, Human
caugcuuauauggaaaggaaga

SEQ ID NO: 571184 - RNA, 22 nt, Human
ucuaugucagcaucuuucuacc

SEQ ID NO: 571185 - RNA, 22 nt, Human
aaagaagcuguggcucugggag

SEQ ID NO: 571186 - RNA, 20 nt, Human
agugucuggugcagggccuc

SEQ ID NO: 571187 - RNA, 22 nt, Human
acuguaaaacagguuucaucau

SEQ ID NO: 571188 - RNA, 22 nt, Human
uggcaacaccuggaagacaugg

SEQ ID NO: 571189 - RNA, 22 nt, Human
agagaaacccuucaguguuuug

SEQ ID NO: 571190 - RNA, 22 nt, Human
ucuuauuauuguuguaaaagca

SEQ ID NO: 571191 - RNA, 22 nt, Human
agaggccaccagagguggugcc

SEQ ID NO: 571192 - RNA, 22 nt, Human
aggcagcauuugaauccagguc

SEQ ID NO: 571193 - RNA, 22 nt, Human
ugacaagaggcagaaucagcug

SEQ ID NO: 571194 - RNA, 22 nt, Human
cagcuucuaccaucaggaaauu

SEQ ID NO: 571195 - RNA, 21 nt, Human
guggcccugccgcagugucca

SEQ ID NO: 571196 - RNA, 22 nt, Human
aagccagcauuuucccauuccu

SEQ ID NO: 571197 - RNA, 22 nt, Human
ugaagugaccuggggcagugua

SEQ ID NO: 571198 - RNA, 22 nt, Human
aaagauaauguuuccuuauucu

SEQ ID NO: 571199 - RNA, 22 nt, Human
cuggccccuguggcuaaaauca

SEQ ID NO: 571200 - RNA, 22 nt, Human
aaccuugagggaugagguagug

SEQ ID NO: 571201 - RNA, 22 nt, Human
auucuaaauguaauuuagaauu

SEQ ID NO: 571202 - RNA, 19 nt, Human
gcucagagacaccuguugc

SEQ ID NO: 571203 - RNA, 22 nt, Human
gcuuccagcaccagcagagggg

SEQ ID NO: 571204 - RNA, 19 nt, Human
auuucaagagguuuauugg

SEQ ID NO: 571205 - RNA, 22 nt, Human
cugaggccuggugaggugguga

SEQ ID NO: 571206 - RNA, 22 nt, Human
agaacaucugaagauacaaagu

SEQ ID NO: 571207 - RNA, 20 nt, Human
ucccuccugcagauagagaa

SEQ ID NO: 571208 - RNA, 22 nt, Human
uuuuguuuaaaauccuggaugg

SEQ ID NO: 571209 - RNA, 22 nt, Human
ggggcugguggugguuucucca

SEQ ID NO: 571210 - RNA, 22 nt, Human
caguggccuuuccugcugcuca

SEQ ID NO: 571211 - RNA, 22 nt, Human
gggcagcuguaucugagcuuau

SEQ ID NO: 571212 - RNA, 22 nt, Human
gucuauaagcaggggaaaacuu

SEQ ID NO: 571213 - RNA, 22 nt, Human
cccugcuuugcacccaggcugg

SEQ ID NO: 571214 - RNA, 18 nt, Human
uguacaguuaugagcauu

SEQ ID NO: 571215 - RNA, 22 nt, Human
uggggcuggggaucuugagccu

SEQ ID NO: 571216 - RNA, 22 nt, Human
uaucaguauggauucauggauu

SEQ ID NO: 571217 - RNA, 22 nt, Human
cugaaggagaaggccacuguuc

SEQ ID NO: 571218 - RNA, 22 nt, Human
ugaauaagaauuauuauaauga

SEQ ID NO: 571219 - RNA, 22 nt, Human
auaugaagaauuccaauuugga

SEQ ID NO: 571220 - RNA, 22 nt, Human
gcuaggcucggaagcagcaggg

SEQ ID NO: 571221 - RNA, 22 nt, Human
aggcuccaugcaaaggcuguuu

SEQ ID NO: 571222 - RNA, 22 nt, Human
cagauaaaauuaauauuaccaa

SEQ ID NO: 571223 - RNA, 20 nt, Human
gaaauguacacauuaccaca

SEQ ID NO: 571224 - RNA, 22 nt, Human
cagagccacugucugccaggca

SEQ ID NO: 571225 - RNA, 22 nt, Human
agauuccucagucaugaagccu

SEQ ID NO: 571226 - RNA, 19 nt, Human
aguggcagaucuggaagua

SEQ ID NO: 571227 - RNA, 21 nt, Human
ugaauuucgguauggcuauaa

SEQ ID NO: 571228 - RNA, 22 nt, Human
cagcaggcguugggagaaagac

SEQ ID NO: 571229 - RNA, 22 nt, Human
agaaagcaucuccauuguaggu

SEQ ID NO: 571230 - RNA, 22 nt, Human
ggccugucucacccccgggugc

SEQ ID NO: 571231 - RNA, 22 nt, Human
cugaggcuucucuaguucagcu

SEQ ID NO: 571232 - RNA, 22 nt, Human
uuuccuucaucaucugagagcu

SEQ ID NO: 571233 - RNA, 22 nt, Human
uuccagaggccugggcacacuc

SEQ ID NO: 571234 - RNA, 22 nt, Human
agggaagcugcuggguccaccu

SEQ ID NO: 571235 - RNA, 22 nt, Human
gguguaagaugucagcugagca

SEQ ID NO: 571236 - RNA, 22 nt, Human
gaaaguuucuucauuaagaugu

SEQ ID NO: 571237 - RNA, 18 nt, Human
ugggaagaaauucuucuc

SEQ ID NO: 571238 - RNA, 22 nt, Human
acugaaaaugaauuagaaacag

SEQ ID NO: 571239 - RNA, 22 nt, Human
cugagccccaucugaggugccc

SEQ ID NO: 571240 - RNA, 22 nt, Human
aagacagaccacgugacagggc

SEQ ID NO: 571241 - RNA, 22 nt, Human
guguggggccaggaucagggcu

SEQ ID NO: 571242 - RNA, 22 nt, Human
ccaguguuuucauccucccuug

SEQ ID NO: 571243 - RNA, 22 nt, Human
agggguggagaguguugccagu

SEQ ID NO: 571244 - RNA, 22 nt, Human
ccuccaggauaagucagggccu

SEQ ID NO: 571245 - RNA, 22 nt, Human
ugcugccagagagacagggacu

SEQ ID NO: 571246 - RNA, 22 nt, Human
gacagacacuguguccucacuu

SEQ ID NO: 571247 - RNA, 19 nt, Human
uuuuaaguccucucuauuc

SEQ ID NO: 571248 - RNA, 22 nt, Human
gccugucucuuggaacuuggua

SEQ ID NO: 571249 - RNA, 22 nt, Human
aagacugugucuauggcuacuc

SEQ ID NO: 571250 - RNA, 22 nt, Human
ugggaagaagcagagaacugga

SEQ ID NO: 571251 - RNA, 22 nt, Human
uauacaaguaaugcugaaugau

SEQ ID NO: 571252 - RNA, 22 nt, Human
gagaggcauggaacagauucuu

SEQ ID NO: 571253 - RNA, 22 nt, Human
uagaaacauauguuugagacau

SEQ ID NO: 571254 - RNA, 22 nt, Human
agaguuuagggcugagagcuug

SEQ ID NO: 571255 - RNA, 19 nt, Human
ucuaguuuugagagacuuc

SEQ ID NO: 571256 - RNA, 22 nt, Human
cuuaauuacccaaugugguagg

SEQ ID NO: 571257 - RNA, 22 nt, Human
cagcagaguuuggcuucuaaug

SEQ ID NO: 571258 - RNA, 22 nt, Human
cuuaagacaggcucaaagauua

SEQ ID NO: 571259 - RNA, 22 nt, Human
cggagggguuugaacagaggag

SEQ ID NO: 571260 - RNA, 22 nt, Human
ucauuuuugucuccgguuugug

SEQ ID NO: 571261 - RNA, 22 nt, Human
aagccuuauggggacaguuuug

SEQ ID NO: 571262 - RNA, 22 nt, Human
gauuuuauuagcccaaacuuug

SEQ ID NO: 571263 - RNA, 22 nt, Human
augaacuuucuuuacaguuuug

SEQ ID NO: 571264 - RNA, 22 nt, Human
ugagccagugugguaaagcuga

SEQ ID NO: 571265 - RNA, 22 nt, Human
gacuuuauucguuaacuguuaa

SEQ ID NO: 571266 - RNA, 22 nt, Human
guggcacagugggagagcccca

SEQ ID NO: 571267 - RNA, 22 nt, Human
ccagguggugaaagugggcccu

SEQ ID NO: 571268 - RNA, 22 nt, Human
acauucccuuggcuugaagcag

SEQ ID NO: 571269 - RNA, 22 nt, Human
aguauacuccccauccuagaaa

SEQ ID NO: 571270 - RNA, 21 nt, Human
ggcagagaagcuggaaguugg

SEQ ID NO: 571271 - RNA, 23 nt, Human
agcuugcuuuucccaguacugca

SEQ ID NO: 571272 - RNA, 22 nt, Human
uuauuguuagugagacuguaga

SEQ ID NO: 571273 - RNA, 23 nt, Human
uuguuaacuuuccugccccuaca

SEQ ID NO: 571274 - RNA, 21 nt, Human
ccuccaggagcagagcccuga

SEQ ID NO: 571275 - RNA, 22 nt, Human
ugauauuugcugacugcauugu

SEQ ID NO: 571276 - RNA, 22 nt, Human
caaauauuccagguacaucccu

SEQ ID NO: 571277 - RNA, 22 nt, Human
guggguggacggugcuuuuguu

SEQ ID NO: 571278 - RNA, 22 nt, Human
ggagggggacugacacugauuu

SEQ ID NO: 571279 - RNA, 22 nt, Human
uggagagcaagucgcagacaug

SEQ ID NO: 571280 - RNA, 22 nt, Human
auacauguugagaaaauaucug

SEQ ID NO: 571281 - RNA, 19 nt, Human
ccagucccauacaggagau

SEQ ID NO: 571282 - RNA, 22 nt, Human
ucuggaguugcauguuuuggcu

SEQ ID NO: 571283 - RNA, 22 nt, Human
cucucuccuuagcugcagacca

SEQ ID NO: 571284 - RNA, 22 nt, Human
aggaagaaaugugacuucaaac

SEQ ID NO: 571285 - RNA, 20 nt, Human
acagcagauaccacaacuau

SEQ ID NO: 571286 - RNA, 22 nt, Human
uguuuauugcugcaauugugcc

SEQ ID NO: 571287 - RNA, 18 nt, Human
aagcaggguccauugugc

SEQ ID NO: 571288 - RNA, 22 nt, Human
cagggcaguaccgcccucuggc

SEQ ID NO: 571289 - RNA, 21 nt, Human
aggggcccuugccaggacgcc

SEQ ID NO: 571290 - RNA, 22 nt, Human
acaacauucuuaaauacacuga

SEQ ID NO: 571291 - RNA, 22 nt, Human
gcuuccuccuggaggucacuca

SEQ ID NO: 571292 - RNA, 22 nt, Human
cugaggagggaaguccccaaag

SEQ ID NO: 571293 - RNA, 22 nt, Human
agaucaaggugucagcaggcuu

SEQ ID NO: 571294 - RNA, 22 nt, Human
caggaggagcuggccgccucau

SEQ ID NO: 571295 - RNA, 22 nt, Human
aggcacugacucaagggagcca

SEQ ID NO: 571296 - RNA, 22 nt, Human
caggagcuggaucuccuugcgg

SEQ ID NO: 571297 - RNA, 22 nt, Human
gccugagcccaggugugcagag

SEQ ID NO: 571298 - RNA, 22 nt, Human
uuuuaauugcaauuaugguccc

SEQ ID NO: 571299 - RNA, 22 nt, Human
uggcaggcugaguuggccuggu

SEQ ID NO: 571300 - RNA, 22 nt, Human
ucagcugccccgggcacugccc

SEQ ID NO: 571301 - RNA, 22 nt, Human
uagcuuugaacuucugggcuca

SEQ ID NO: 571302 - RNA, 22 nt, Human
gggaggaaaugugcagcgaauu

SEQ ID NO: 571303 - RNA, 22 nt, Human
ugaucccaaucuuuccugcucc

SEQ ID NO: 571304 - RNA, 22 nt, Human
auaagugauauuuagcuauaga

SEQ ID NO: 571305 - RNA, 22 nt, Human
aaugaagcaguccaucugcucu

SEQ ID NO: 571306 - RNA, 22 nt, Human
aauauuuuaggcuuuccaggcu

SEQ ID NO: 571307 - RNA, 22 nt, Human
ucucagcugccugcccugcucc

SEQ ID NO: 571308 - RNA, 22 nt, Human
gugggugcugucaggcagggaa

SEQ ID NO: 571309 - RNA, 22 nt, Human
ucugggaacauggcuuggaauc

SEQ ID NO: 571310 - RNA, 21 nt, Human
uuacaacauuuguguucuaug

SEQ ID NO: 571311 - RNA, 22 nt, Human
ggcuuccugggcauguguucua

SEQ ID NO: 571312 - RNA, 22 nt, Human
guuuccuuuuggaauuagagcu

SEQ ID NO: 571313 - RNA, 22 nt, Human
aagagcauuuggugagauuuga

SEQ ID NO: 571314 - RNA, 20 nt, Human
ugcauuaaguggcauugagc

SEQ ID NO: 571315 - RNA, 22 nt, Human
cacagagagcuacgugcagcgu

SEQ ID NO: 571316 - RNA, 22 nt, Human
auguacaaucuaucacaagaag

SEQ ID NO: 571317 - RNA, 22 nt, Human
aucuguaaagauaaucauaugu

SEQ ID NO: 571318 - RNA, 22 nt, Human
aaaagcaaguugccuagguuga

SEQ ID NO: 571319 - RNA, 22 nt, Human
ugaagccaucaggaagccagca

SEQ ID NO: 571320 - RNA, 22 nt, Human
acaguguuuucuuaaggagaaa

SEQ ID NO: 571321 - RNA, 22 nt, Human
cuggugucauuuuagccucagg

SEQ ID NO: 571322 - RNA, 22 nt, Human
gauaacauuauaaguucacugu

SEQ ID NO: 571323 - RNA, 22 nt, Human
uagagucuaguguauacaaagu

SEQ ID NO: 571324 - RNA, 22 nt, Human
ugugaauaccuugaauucauca

SEQ ID NO: 571325 - RNA, 22 nt, Human
ggaaggagggcggcaaugauga

SEQ ID NO: 571326 - RNA, 22 nt, Human
aaucagcuaaauaaacuaguca

SEQ ID NO: 571327 - RNA, 22 nt, Human
cuuauucagauacagacucuug

SEQ ID NO: 571328 - RNA, 22 nt, Human
accaucaagaccuuaucuaguu

SEQ ID NO: 571329 - RNA, 18 nt, Human
ggacaggagacaugggug

SEQ ID NO: 571330 - RNA, 22 nt, Human
uucagaauauuuguuuuacaug

SEQ ID NO: 571331 - RNA, 22 nt, Human
ugcaaauuuaaugaaacuaugu

SEQ ID NO: 571332 - RNA, 22 nt, Human
aaucagaacuccuaccacagag

SEQ ID NO: 571333 - RNA, 22 nt, Human
acacaguauuacaauaggugcu

SEQ ID NO: 571334 - RNA, 22 nt, Human
gaggccagcuacccaaggguca

SEQ ID NO: 571335 - RNA, 22 nt, Human
gucucauugguucugccagagu

SEQ ID NO: 571336 - RNA, 22 nt, Human
aaacuguaaacacagcaguaca

SEQ ID NO: 571337 - RNA, 21 nt, Human
aaggcugagacaacucaggag

SEQ ID NO: 571338 - RNA, 22 nt, Human
uccuucaggccucauucucaua

SEQ ID NO: 571339 - RNA, 17 nt, Human
agcacuaaaaugcuucc

SEQ ID NO: 571340 - RNA, 22 nt, Human
auguguucaguugacaggagca

SEQ ID NO: 571341 - RNA, 22 nt, Human
ugucuccucauacugucauauu

SEQ ID NO: 571342 - RNA, 22 nt, Human
aaucgcaauuacuuuugcacca

SEQ ID NO: 571343 - RNA, 22 nt, Human
cuggacagaaagggcugcugug

SEQ ID NO: 571344 - RNA, 22 nt, Human
agcagccagagaaugaugcagu

SEQ ID NO: 571345 - RNA, 22 nt, Human
ggcauccaaauaccaagaugua

SEQ ID NO: 571346 - RNA, 23 nt, Human
ugagaagccaggggagcgugagg

SEQ ID NO: 571347 - RNA, 22 nt, Human
ggagagcuagugccugccagua

SEQ ID NO: 571348 - RNA, 22 nt, Human
caguuacauauuuaguagguua

SEQ ID NO: 571349 - RNA, 22 nt, Human
augacauaaagcuaugcuaggu

SEQ ID NO: 571350 - RNA, 22 nt, Human
uugcccagaguccacagcguac

SEQ ID NO: 571351 - RNA, 22 nt, Human
cuucuccucugaguccugggag

SEQ ID NO: 571352 - RNA, 22 nt, Human
ccaggaagccugugucucugga

SEQ ID NO: 571353 - RNA, 22 nt, Human
caguuucucaggccucucccag

SEQ ID NO: 571354 - RNA, 22 nt, Human
uacuuacauaaaaacugaaugu

SEQ ID NO: 571355 - RNA, 22 nt, Human
ugcaggugcugugucaagagag

SEQ ID NO: 571356 - RNA, 22 nt, Human
gaggagggccuggugucccuuc

SEQ ID NO: 571357 - RNA, 22 nt, Human
cugggagcccgcguccuggugg

SEQ ID NO: 571358 - RNA, 22 nt, Human
cuuuggaaaaauaccuggcaua

SEQ ID NO: 571359 - RNA, 22 nt, Human
aucuuacacgauaacuguuagu

SEQ ID NO: 571360 - RNA, 22 nt, Human
auugacaaauggauguugacau

SEQ ID NO: 571361 - RNA, 22 nt, Human
ccuucagucccauguuucucuu

SEQ ID NO: 571362 - RNA, 19 nt, Human
uggaagaggaagggaaaua

SEQ ID NO: 571363 - RNA, 22 nt, Human
cugaggcaggagaauugcugga

SEQ ID NO: 571364 - RNA, 22 nt, Human
cuggcucaggaaaguugcugcu

SEQ ID NO: 571365 - RNA, 22 nt, Human
cuuuaaauaauacaagguccag

SEQ ID NO: 571366 - RNA, 19 nt, Human
ugaggcacuagucuggucc

SEQ ID NO: 571367 - RNA, 20 nt, Human
uuugacauauacaguucagg

SEQ ID NO: 571368 - RNA, 20 nt, Human
gggugaggauggagaauuug

SEQ ID NO: 571369 - RNA, 22 nt, Human
cagugcagguggcagaggacag

SEQ ID NO: 571370 - RNA, 22 nt, Human
uugacaaauacccauuagacca

SEQ ID NO: 571371 - RNA, 22 nt, Human
aggcugugauuccaccacucuc

SEQ ID NO: 571372 - RNA, 22 nt, Human
ucugaaauggcgauggccguug

SEQ ID NO: 571373 - RNA, 22 nt, Human
aagacauugcaugauaaugcug

SEQ ID NO: 571374 - RNA, 22 nt, Human
ucugggcagcagcagcuaguag

SEQ ID NO: 571375 - RNA, 23 nt, Human
ugggguugaauuguagcugugcc

SEQ ID NO: 571376 - RNA, 22 nt, Human
augauauauguguugagcuugc

SEQ ID NO: 571377 - RNA, 22 nt, Human
uauaauuuuagaagagauggaa

SEQ ID NO: 571378 - RNA, 22 nt, Human
cuaaacuucauauguugcuuua

SEQ ID NO: 571379 - RNA, 22 nt, Human
ucucauucauacccuacaugcu

SEQ ID NO: 571380 - RNA, 22 nt, Human
ucuaaaaugcagaucuacuggu

SEQ ID NO: 571381 - RNA, 22 nt, Human
ugccacagaggugaagcccacu

SEQ ID NO: 571382 - RNA, 23 nt, Human
ugugacagugacaauacugacuu

SEQ ID NO: 571383 - RNA, 22 nt, Human
ucaauacagaaaggauauuuug

SEQ ID NO: 571384 - RNA, 22 nt, Human
gagacugauggggcucccagaa

SEQ ID NO: 571385 - RNA, 22 nt, Human
ucugggagcacacgcagugauc

SEQ ID NO: 571386 - RNA, 22 nt, Human
aacaaacaaacauuuugucauc

SEQ ID NO: 571387 - RNA, 22 nt, Human
cccaggagguguagcugcgugg

SEQ ID NO: 571388 - RNA, 16 nt, Human
cagcuuugucuccucg

SEQ ID NO: 571389 - RNA, 21 nt, Human
auuguuaucauugugcugugu

SEQ ID NO: 571390 - RNA, 22 nt, Human
gauggcaaacugggaccagagg

SEQ ID NO: 571391 - RNA, 22 nt, Human
agcagaccaggagugcacaggu

SEQ ID NO: 571392 - RNA, 19 nt, Human
aguuuauuauaggugauuc

SEQ ID NO: 571393 - RNA, 22 nt, Human
gaggcacucucgacaagggugg

SEQ ID NO: 571394 - RNA, 22 nt, Human
ugcuccaggcaagcugagaguu

SEQ ID NO: 571395 - RNA, 22 nt, Human
aagagguuauuguucccagcuu

SEQ ID NO: 571396 - RNA, 22 nt, Human
uacugucuggaguugccaaagg

SEQ ID NO: 571397 - RNA, 22 nt, Human
acauucuaaagcaugcucagga

SEQ ID NO: 571398 - RNA, 22 nt, Human
agggcuggaggguacuaguuua

SEQ ID NO: 571399 - RNA, 20 nt, Human
uuuauugagcacguacugug

SEQ ID NO: 571400 - RNA, 22 nt, Human
aaacaauguacauuuauaaugc

SEQ ID NO: 571401 - RNA, 22 nt, Human
cagguggcuuauuagggucagu

SEQ ID NO: 571402 - RNA, 22 nt, Human
agcaggugggaucaagcuggca

SEQ ID NO: 571403 - RNA, 22 nt, Human
ugugacugagcugcagaguguc

SEQ ID NO: 571404 - RNA, 22 nt, Human
uaaaauagcuuaugucuuuuga

SEQ ID NO: 571405 - RNA, 22 nt, Human
agccuggcacugaggcagggcg

SEQ ID NO: 571406 - RNA, 22 nt, Human
gugcauuugugcaugcacaugu

SEQ ID NO: 571407 - RNA, 22 nt, Human
gaaugaacaaggauguucaucc

SEQ ID NO: 571408 - RNA, 22 nt, Human
ugcuugcaagagaugcaaugac

SEQ ID NO: 571409 - RNA, 22 nt, Human
ucucuccuuaucauuguguuua

SEQ ID NO: 571410 - RNA, 22 nt, Human
cagggcuggauuucauuucuag

SEQ ID NO: 571411 - RNA, 22 nt, Human
gaguuacagagaggauuauggu

SEQ ID NO: 571412 - RNA, 22 nt, Human
ugacuuccugcacucaggugau

SEQ ID NO: 571413 - RNA, 22 nt, Human
gagacacacccaagguuaugag

SEQ ID NO: 571414 - RNA, 22 nt, Human
agaaaggucaaaaucgugacau

SEQ ID NO: 571415 - RNA, 22 nt, Human
cacaguuugguuuugcuguaau

SEQ ID NO: 571416 - RNA, 22 nt, Human
augauggaugucacagucugua

SEQ ID NO: 571417 - RNA, 22 nt, Human
ugaagccacagagcaucugccu

SEQ ID NO: 571418 - RNA, 22 nt, Human
acucuuauuuugaaguaauaau

SEQ ID NO: 571419 - RNA, 22 nt, Human
agacaaauugggacauuguguu

SEQ ID NO: 571420 - RNA, 20 nt, Human
cagcugccuggcucugggau

SEQ ID NO: 571421 - RNA, 22 nt, Human
aagaugauguuguguuuucacu

SEQ ID NO: 571422 - RNA, 22 nt, Human
uuugugaacacugcgcagaacu

SEQ ID NO: 571423 - RNA, 22 nt, Human
auuuauuaugggauuuggcaca

SEQ ID NO: 571424 - RNA, 22 nt, Human
agcugcuuguugaaauccaaac

SEQ ID NO: 571425 - RNA, 22 nt, Human
ugaaugauuucuuaggcaauug

SEQ ID NO: 571426 - RNA, 22 nt, Human
ccagggcucuaugaggguggag

SEQ ID NO: 571427 - RNA, 22 nt, Human
auuuccauuaucaugacaaauu

SEQ ID NO: 571428 - RNA, 22 nt, Human
cccagagcucagugugcaaggu

SEQ ID NO: 571429 - RNA, 22 nt, Human
agccugccuugggcugcuugag

SEQ ID NO: 571430 - RNA, 22 nt, Human
gcugccaauccagcugugggag

SEQ ID NO: 571431 - RNA, 17 nt, Human
uaguaaaugaguagagc

SEQ ID NO: 571432 - RNA, 22 nt, Human
ugucaagugauuagccauaaug

SEQ ID NO: 571433 - RNA, 22 nt, Human
augcaucuuaucaaaaauuaua

SEQ ID NO: 571434 - RNA, 22 nt, Human
cacugcagaucagaggcugaga

SEQ ID NO: 571435 - RNA, 22 nt, Human
uuuaugcagccucaguaucaga

SEQ ID NO: 571436 - RNA, 22 nt, Human
ucccccucauuaccucauucaa

SEQ ID NO: 571437 - RNA, 22 nt, Human
aauguucauugauuaaaugaau

SEQ ID NO: 571438 - RNA, 19 nt, Human
aggcagcaggccagggaug

SEQ ID NO: 571439 - RNA, 22 nt, Human
gucugaggcgaggccugagaac

SEQ ID NO: 571440 - RNA, 22 nt, Human
cugggccauggaagucucugcc

SEQ ID NO: 571441 - RNA, 22 nt, Human
caagaaggcuauaugggccagg

SEQ ID NO: 571442 - RNA, 22 nt, Human
cauuuguucaaccauucucgcu

SEQ ID NO: 571443 - RNA, 22 nt, Human
gguuauuuuugauucuguggau

SEQ ID NO: 571444 - RNA, 22 nt, Human
aacaaauguguuuuguaauuaa

SEQ ID NO: 571445 - RNA, 22 nt, Human
ugaagcaggaaacuucuuguuu

SEQ ID NO: 571446 - RNA, 22 nt, Human
gcuggaguaucuggggaaggag

SEQ ID NO: 571447 - RNA, 22 nt, Human
cuuucccagaguaguugaugcu

SEQ ID NO: 571448 - RNA, 20 nt, Human
gcuacugugggaaaauugug

SEQ ID NO: 571449 - RNA, 22 nt, Human
agcuuuaugcuuccuacaagcu

SEQ ID NO: 571450 - RNA, 22 nt, Human
uguguguauaauaaugucugca

SEQ ID NO: 571451 - RNA, 23 nt, Human
aguacauucgaaaaauucuguga

SEQ ID NO: 571452 - RNA, 22 nt, Human
augauucuuuuggauagaugau

SEQ ID NO: 571453 - RNA, 22 nt, Human
agaacagcagcacgucaagcug

SEQ ID NO: 571454 - RNA, 21 nt, Human
uuggauguauuuauguuuuag

SEQ ID NO: 571455 - RNA, 22 nt, Human
ccaauuuuauucuucugcaagu

SEQ ID NO: 571456 - RNA, 22 nt, Human
gggcuggauguuugaugacgaa

SEQ ID NO: 571457 - RNA, 22 nt, Human
gaacaauacaggcuuuauuccu

SEQ ID NO: 571458 - RNA, 21 nt, Human
uuuguucaggcaaguuacagu

SEQ ID NO: 571459 - RNA, 22 nt, Human
aauguuguguuucaguucaaga

SEQ ID NO: 571460 - RNA, 22 nt, Human
uuugugcaagagggccaccuua

SEQ ID NO: 571461 - RNA, 22 nt, Human
acaggcugccacuugcauccaa

SEQ ID NO: 571462 - RNA, 17 nt, Human
agucagaggaguaucug

SEQ ID NO: 571463 - RNA, 22 nt, Human
uaaacaagcuggacugauaagu

SEQ ID NO: 571464 - RNA, 22 nt, Human
ccagggagccuggugugucagc

SEQ ID NO: 571465 - RNA, 22 nt, Human
ucaucaaagucaaagaaugacu

SEQ ID NO: 571466 - RNA, 22 nt, Human
gggcugagugggccucuuacuu

SEQ ID NO: 571467 - RNA, 22 nt, Human
uaaagguuauugcacuggaguu

SEQ ID NO: 571468 - RNA, 22 nt, Human
cccagcaguaaccaguggaaau

SEQ ID NO: 571469 - RNA, 22 nt, Human
auuagaagcgugaauccuuuca

SEQ ID NO: 571470 - RNA, 22 nt, Human
agaagagaaauagugccacugu

SEQ ID NO: 571471 - RNA, 22 nt, Human
ccaggaccuggagcucuaugaa

SEQ ID NO: 571472 - RNA, 22 nt, Human
augaagcaacagcccuccuauu

SEQ ID NO: 571473 - RNA, 22 nt, Human
ggucugaguggugcugacucag

SEQ ID NO: 571474 - RNA, 22 nt, Human
ugggaagguguagaaagaacaa

SEQ ID NO: 571475 - RNA, 22 nt, Human
auuuaauuuucucaacagugcu

SEQ ID NO: 571476 - RNA, 19 nt, Human
uagggcuggccgggcggug

SEQ ID NO: 571477 - RNA, 22 nt, Human
gcuggcagagagcuggugagga

SEQ ID NO: 571478 - RNA, 22 nt, Human
augaauaugagacugagagccu

SEQ ID NO: 571479 - RNA, 22 nt, Human
aagcaaaacgugcucuaggagg

SEQ ID NO: 571480 - RNA, 22 nt, Human
agugauggcauauauagaugug

SEQ ID NO: 571481 - RNA, 22 nt, Human
uuacauacuuacuagaucuaug

SEQ ID NO: 571482 - RNA, 22 nt, Human
uucagcagugcagacacccagu

SEQ ID NO: 571483 - RNA, 22 nt, Human
agcuucagggacuuguggcaga

SEQ ID NO: 571484 - RNA, 17 nt, Human
cagugaggccuuuccuc

SEQ ID NO: 571485 - RNA, 22 nt, Human
gcucugucaacagcuagcugug

SEQ ID NO: 571486 - RNA, 19 nt, Human
ccuguacauuauucucccc

SEQ ID NO: 571487 - RNA, 22 nt, Human
caagguuuacauugggcuauca

SEQ ID NO: 571488 - RNA, 22 nt, Human
ggcugguggggaaagaggacca

SEQ ID NO: 571489 - RNA, 22 nt, Human
aguuucuauguaagcuacguga

SEQ ID NO: 571490 - RNA, 22 nt, Human
acauggcuaaagcaagucuaga

SEQ ID NO: 571491 - RNA, 22 nt, Human
gcacccagcccagggcgugaug

SEQ ID NO: 571492 - RNA, 22 nt, Human
ucugagcucuaucugugggaau

SEQ ID NO: 571493 - RNA, 22 nt, Human
uuuaaauuuguguuuagagggu

SEQ ID NO: 571494 - RNA, 22 nt, Human
acaggggcaggcaggacccuuu

SEQ ID NO: 571495 - RNA, 20 nt, Human
aguaggggaaugcaagagca

SEQ ID NO: 571496 - RNA, 22 nt, Human
ucucaaauguaaagcaugauuu

SEQ ID NO: 571497 - RNA, 23 nt, Human
aguccccuacauaguuccugggg

SEQ ID NO: 571498 - RNA, 23 nt, Human
augcaggguuacagggcugacuu

SEQ ID NO: 571499 - RNA, 22 nt, Human
ucccugcagcaggugaucaaug

SEQ ID NO: 571500 - RNA, 22 nt, Human
aggcacugcuucuaaguaggaa

SEQ ID NO: 571501 - RNA, 18 nt, Human
auuguuaauagaguacuu

SEQ ID NO: 571502 - RNA, 22 nt, Human
uaguuaaugugaggcaccuagu

SEQ ID NO: 571503 - RNA, 22 nt, Human
cucugugucagcugggugugca

SEQ ID NO: 571504 - RNA, 19 nt, Human
aacaucauggcucuuucca

SEQ ID NO: 571505 - RNA, 22 nt, Human
gcacacaggcaguuuccagcca

SEQ ID NO: 571506 - RNA, 22 nt, Human
ucccaaagaacugaauaguaau

SEQ ID NO: 571507 - RNA, 22 nt, Human
ugugugaauggauuauucuauu

SEQ ID NO: 571508 - RNA, 22 nt, Human
ggcaggcauggggucugccauu

SEQ ID NO: 571509 - RNA, 21 nt, Human
gucugaugcuugaugcaguug

SEQ ID NO: 571510 - RNA, 22 nt, Human
agggcugcuccuccuucaggcc

SEQ ID NO: 571511 - RNA, 22 nt, Human
aaaucagaugcuuccuaguugg

SEQ ID NO: 571512 - RNA, 22 nt, Human
gaagaugugggaacugcugaaa

SEQ ID NO: 571513 - RNA, 22 nt, Human
ccaggcccugcuccucacacca

SEQ ID NO: 571514 - RNA, 22 nt, Human
cugaagcaggccuacuucauug

SEQ ID NO: 571515 - RNA, 22 nt, Human
uagcugccagaccauucuuacu

SEQ ID NO: 571516 - RNA, 22 nt, Human
cuuguacaggaauccaugguau

SEQ ID NO: 571517 - RNA, 22 nt, Human
aguaaaguaccaaagugugagu

SEQ ID NO: 571518 - RNA, 22 nt, Human
ucuggguacuugcaagauuuuc

SEQ ID NO: 571519 - RNA, 23 nt, Human
cuuuuaaccggcaugggagggca

SEQ ID NO: 571520 - RNA, 22 nt, Human
auauuaaaacuaugguuuucag

SEQ ID NO: 571521 - RNA, 22 nt, Human
uccuguguucuagguauggucu

SEQ ID NO: 571522 - RNA, 22 nt, Human
aguuuauuguauaugguaguuu

SEQ ID NO: 571523 - RNA, 22 nt, Human
agguggcagaugggggugcucg

SEQ ID NO: 571524 - RNA, 22 nt, Human
gucucugugucugagagagccc

SEQ ID NO: 571525 - RNA, 22 nt, Human
ugggaagcuacucaugcaggca

SEQ ID NO: 571526 - RNA, 22 nt, Human
ucugcaagcuaaggaagcaucu

SEQ ID NO: 571527 - RNA, 22 nt, Human
caauucuuccuguuggauaugc

SEQ ID NO: 571528 - RNA, 22 nt, Human
auuaggcauucaugcagcuccu

SEQ ID NO: 571529 - RNA, 22 nt, Human
uuacaggucaguuugacugaau

SEQ ID NO: 571530 - RNA, 22 nt, Human
aggaagcugggaaacugacauu

SEQ ID NO: 571531 - RNA, 22 nt, Human
gcuucucuggcuggucugccac

SEQ ID NO: 571532 - RNA, 22 nt, Human
gcucuugggggacagauggagu

SEQ ID NO: 571533 - RNA, 22 nt, Human
agauacuaagcauuuccagcac

SEQ ID NO: 571534 - RNA, 22 nt, Human
uuugggaagaaguugcaaauuu

SEQ ID NO: 571535 - RNA, 22 nt, Human
ggcugaggguuaagaucagaca

SEQ ID NO: 571536 - RNA, 22 nt, Human
gccagcugguaggcaccuagcc

SEQ ID NO: 571537 - RNA, 22 nt, Human
aguggcagagugcacucaggca

SEQ ID NO: 571538 - RNA, 22 nt, Human
ucuuuucuugcauuauugcacu

SEQ ID NO: 571539 - RNA, 22 nt, Human
agggcagcccuucugggagggc

SEQ ID NO: 571540 - RNA, 17 nt, Human
ucaggcugggugcagug

SEQ ID NO: 571541 - RNA, 22 nt, Human
ucccaggauuuuaggcucucag

SEQ ID NO: 571542 - RNA, 22 nt, Human
cugaggcaucauggagaacagu

SEQ ID NO: 571543 - RNA, 22 nt, Human
accacugcccauggugaaaacu

SEQ ID NO: 571544 - RNA, 20 nt, Human
aggagggaccuggauuggcg

SEQ ID NO: 571545 - RNA, 22 nt, Human
agccaagcaccacuggcacucg

SEQ ID NO: 571546 - RNA, 22 nt, Human
ugggcaugaagaaggaaguggg

SEQ ID NO: 571547 - RNA, 22 nt, Human
uuccugcuccauuugcugagcu

SEQ ID NO: 571548 - RNA, 21 nt, Human
guuuuaagggagaaaaccuag

SEQ ID NO: 571549 - RNA, 22 nt, Human
ccagcucucugcagaaaggacu

SEQ ID NO: 571550 - RNA, 22 nt, Human
aucugcuuuugagaauuuacuu

SEQ ID NO: 571551 - RNA, 22 nt, Human
uggcacugggaugcuacuguua

SEQ ID NO: 571552 - RNA, 22 nt, Human
ggcuggagguagaagaacacuu

SEQ ID NO: 571553 - RNA, 22 nt, Human
ucucugagcgcauuccuccggc

SEQ ID NO: 571554 - RNA, 22 nt, Human
uuauucugucaaacuuauacau

SEQ ID NO: 571555 - RNA, 22 nt, Human
caaauacuggguaaguuaauuu

SEQ ID NO: 571556 - RNA, 22 nt, Human
auaugagaguaaaugccgaucu

SEQ ID NO: 571557 - RNA, 22 nt, Human
ccaugcccuaaaggacuggcag

SEQ ID NO: 571558 - RNA, 22 nt, Human
acauggcaaaagggacuuuaca

SEQ ID NO: 571559 - RNA, 22 nt, Human
acauuuuacaccaagacuucuu

SEQ ID NO: 571560 - RNA, 22 nt, Human
aaguuauugcagcaauccaagu

SEQ ID NO: 571561 - RNA, 22 nt, Human
uuuucucuacaaaauaaccagc

SEQ ID NO: 571562 - RNA, 22 nt, Human
gaggcccugaagacagcugggg

SEQ ID NO: 571563 - RNA, 22 nt, Human
ucugggaagcaaauauguaaga

SEQ ID NO: 571564 - RNA, 22 nt, Human
uaauuuugcugugaccauugaa

SEQ ID NO: 571565 - RNA, 22 nt, Human
agaacauuaaugcgagguauua

SEQ ID NO: 571566 - RNA, 22 nt, Human
uaaaugguauccuugcugugcu

SEQ ID NO: 571567 - RNA, 22 nt, Human
aaguuccuuagccuuagggcuu

SEQ ID NO: 571568 - RNA, 22 nt, Human
gcuggaccaggugugcacaggc

SEQ ID NO: 571569 - RNA, 16 nt, Human
ccaggaacacacagcu

SEQ ID NO: 571570 - RNA, 22 nt, Human
ugcugccuucuaggcgugcccu

SEQ ID NO: 571571 - RNA, 22 nt, Human
cuguggaauugaugcuuagugu

SEQ ID NO: 571572 - RNA, 23 nt, Human
ccacuagcaccuguucaacuucu

SEQ ID NO: 571573 - RNA, 22 nt, Human
aaguuuuugguagagaaaagua

SEQ ID NO: 571574 - RNA, 22 nt, Human
uccgcuggagagggggcugcca

SEQ ID NO: 571575 - RNA, 22 nt, Human
ggcugccucccaggagaaucug

SEQ ID NO: 571576 - RNA, 22 nt, Human
gugaaugacauauuuuguacug

SEQ ID NO: 571577 - RNA, 23 nt, Human
acaugggagggacauggaggcug

SEQ ID NO: 571578 - RNA, 22 nt, Human
gcuccacuuccuucugcccuca

SEQ ID NO: 571579 - RNA, 23 nt, Human
agggaacaagcaagcugcuaguc

SEQ ID NO: 571580 - RNA, 19 nt, Human
agcuccugauugugccucg

SEQ ID NO: 571581 - RNA, 22 nt, Human
ccugucagaugaaguaauugug

SEQ ID NO: 571582 - RNA, 22 nt, Human
uuccucaggcuucccuuugucc

SEQ ID NO: 571583 - RNA, 22 nt, Human
caaaaguagugaaguuguacau

SEQ ID NO: 571584 - RNA, 22 nt, Human
gugacauuuacgaaucuuaucc

SEQ ID NO: 571585 - RNA, 22 nt, Human
gaacagcucugaagcaguaaau

SEQ ID NO: 571586 - RNA, 22 nt, Human
aacucuuaaaauuuuggcuugc

SEQ ID NO: 571587 - RNA, 22 nt, Human
gaggcugguucccuugaucuuu

SEQ ID NO: 571588 - RNA, 20 nt, Human
uggggccuguuucugugguu

SEQ ID NO: 571589 - RNA, 22 nt, Human
aaacucuuccuuucuuuaaagu

SEQ ID NO: 571590 - RNA, 22 nt, Human
agggagcaaagguuucaggguu

SEQ ID NO: 571591 - RNA, 22 nt, Human
ugggagcagcagggagaugcgg

SEQ ID NO: 571592 - RNA, 19 nt, Human
caagugaagccugggaugg

SEQ ID NO: 571593 - RNA, 22 nt, Human
uggauugauaagagacaaguga

SEQ ID NO: 571594 - RNA, 22 nt, Human
cccaggagguggagguugcggu

SEQ ID NO: 571595 - RNA, 22 nt, Human
uguagauauagaaaaagacuga

SEQ ID NO: 571596 - RNA, 22 nt, Human
agggucuucccaccauuccugc

SEQ ID NO: 571597 - RNA, 22 nt, Human
agagugcaaccgaaacaagcag

SEQ ID NO: 571598 - RNA, 22 nt, Human
gugucacaggcccagcucuuca

SEQ ID NO: 571599 - RNA, 22 nt, Human
gggcagguggcagggucucugg

SEQ ID NO: 571600 - RNA, 22 nt, Human
ucugaagagucuugcaagaaag

SEQ ID NO: 571601 - RNA, 22 nt, Human
uaguuacagagaaaugauuuga

SEQ ID NO: 571602 - RNA, 22 nt, Human
aucuuacacuguuggguuucuc

SEQ ID NO: 571603 - RNA, 22 nt, Human
aguggcuaugcaugacuggaau

SEQ ID NO: 571604 - RNA, 22 nt, Human
uuucucuuugacaggaaucaga

SEQ ID NO: 571605 - RNA, 22 nt, Human
acaaugcaccagcaucuucacc

SEQ ID NO: 571606 - RNA, 21 nt, Human
ucacugcaaugcuaggagaaa

SEQ ID NO: 571607 - RNA, 22 nt, Human
acuucccugugggcagguagug

SEQ ID NO: 571608 - RNA, 22 nt, Human
uccaagaggagacacugggaug

SEQ ID NO: 571609 - RNA, 21 nt, Human
ccagaagcugcuugcaggcua

SEQ ID NO: 571610 - RNA, 22 nt, Human
caggguggaacaggcaauacuu

SEQ ID NO: 571611 - RNA, 22 nt, Human
aaugcuuucuuauaaccacugc

SEQ ID NO: 571612 - RNA, 22 nt, Human
cacagcuucugucugacccaug

SEQ ID NO: 571613 - RNA, 22 nt, Human
aucacacuggacauuggauacu

SEQ ID NO: 571614 - RNA, 22 nt, Human
gagggccaaugugucccugagc

SEQ ID NO: 571615 - RNA, 20 nt, Human
ucuuuguuaauuuuaucucc

SEQ ID NO: 571616 - RNA, 22 nt, Human
uuagcauuucauuucaagagga

SEQ ID NO: 571617 - RNA, 22 nt, Human
ccaggucuuuggccuuggcacu

SEQ ID NO: 571618 - RNA, 22 nt, Human
ugcuuuauaacuuaguuuaugg

SEQ ID NO: 571619 - RNA, 22 nt, Human
gaggugguucagguagagccca

SEQ ID NO: 571620 - RNA, 22 nt, Human
auacuucccuguuuuuuccuga

SEQ ID NO: 571621 - RNA, 22 nt, Human
gagacagugguugcagaagcuc

SEQ ID NO: 571622 - RNA, 22 nt, Human
aaauuccaguucuuuuaccugc

SEQ ID NO: 571623 - RNA, 22 nt, Human
cccaaagaaaacaguaccucag

SEQ ID NO: 571624 - RNA, 22 nt, Human
aggugggggcuguguccuugac

SEQ ID NO: 571625 - RNA, 22 nt, Human
acauuucuaguuguucaucucc

SEQ ID NO: 571626 - RNA, 22 nt, Human
aggaauguuaaagauuaagagc

SEQ ID NO: 571627 - RNA, 22 nt, Human
gaggcauuaaagggaaucuucu

SEQ ID NO: 571628 - RNA, 21 nt, Human
uggauugaggugacagugugc

SEQ ID NO: 571629 - RNA, 17 nt, Human
uguuuucauucauugcu

SEQ ID NO: 571630 - RNA, 22 nt, Human
cuuucaaaacgcucuguaugca

SEQ ID NO: 571631 - RNA, 22 nt, Human
ugcauuuucuuccaccaauauc

SEQ ID NO: 571632 - RNA, 22 nt, Human
uggaacaaauuacaauuaacuu

SEQ ID NO: 571633 - RNA, 22 nt, Human
ggugaggguaaauauaggcaaa

SEQ ID NO: 571634 - RNA, 22 nt, Human
uccugagauccuuuuagggauc

SEQ ID NO: 571635 - RNA, 22 nt, Human
ucuucaguauuuggauaacauu

SEQ ID NO: 571636 - RNA, 22 nt, Human
ugucaaaaccuuggaggcaagg

SEQ ID NO: 571637 - RNA, 22 nt, Human
gaagauaauuccuacuuauaac

SEQ ID NO: 571638 - RNA, 22 nt, Human
augguauagagccacauguauu

SEQ ID NO: 571639 - RNA, 22 nt, Human
uugugccuggcuuguauucaca

SEQ ID NO: 571640 - RNA, 22 nt, Human
ggcucuggcaaggggaggcuac

SEQ ID NO: 571641 - RNA, 22 nt, Human
ugcccugcggcuaucuagauga

SEQ ID NO: 571642 - RNA, 22 nt, Human
uggcugcccucaugggccugau

SEQ ID NO: 571643 - RNA, 22 nt, Human
gcacagguugcaaaaguucaca

SEQ ID NO: 571644 - RNA, 22 nt, Human
ugaggcagguaagcaaguuuug

SEQ ID NO: 571645 - RNA, 22 nt, Human
ggcucuagagacucuagagaaa

SEQ ID NO: 571646 - RNA, 22 nt, Human
gcugccugauguccagcaggac

SEQ ID NO: 571647 - RNA, 22 nt, Human
ccacagaaagccugggaagugg

SEQ ID NO: 571648 - RNA, 22 nt, Human
aaugcuuugacuauaucuauaa

SEQ ID NO: 571649 - RNA, 22 nt, Human
ccaggagcgcgugaacaggcug

SEQ ID NO: 571650 - RNA, 22 nt, Human
ucagggcacguuucugcaaugc

SEQ ID NO: 571651 - RNA, 23 nt, Human
uaggcucuguagguagagauggg

SEQ ID NO: 571652 - RNA, 22 nt, Human
acccuccccaagaggucgugcc

SEQ ID NO: 571653 - RNA, 22 nt, Human
uggggaaggaucaccacaaucu

SEQ ID NO: 571654 - RNA, 22 nt, Human
aagcagaugcagcuaauaaagc

SEQ ID NO: 571655 - RNA, 21 nt, Human
uggcauuuguacagggacuuu

SEQ ID NO: 571656 - RNA, 22 nt, Human
gugguccuggcaaccaugguga

SEQ ID NO: 571657 - RNA, 22 nt, Human
gcaccugggcaaggauucagag

SEQ ID NO: 571658 - RNA, 22 nt, Human
uggcaggaaaaagggccagagg

SEQ ID NO: 571659 - RNA, 22 nt, Human
gggcaagcucuucagaagcucu

SEQ ID NO: 571660 - RNA, 22 nt, Human
uucagaaagguuaaucuggauu

SEQ ID NO: 571661 - RNA, 22 nt, Human
uggaagcucaaggcagggugag

SEQ ID NO: 571662 - RNA, 22 nt, Human
ucccuugguuaaauauguagga

SEQ ID NO: 571663 - RNA, 22 nt, Human
cagguuucauuggcagcuucau

SEQ ID NO: 571664 - RNA, 22 nt, Human
guggcagcaaaauccugcauuc

SEQ ID NO: 571665 - RNA, 22 nt, Human
ugacagaaagaauaugucaauc

SEQ ID NO: 571666 - RNA, 22 nt, Human
cagcaaaguaagcugacaugua

SEQ ID NO: 571667 - RNA, 22 nt, Human
ugauaauguucgagaaugaaga

SEQ ID NO: 571668 - RNA, 22 nt, Human
cugaggcugcccagggccaggu

SEQ ID NO: 571669 - RNA, 22 nt, Human
aucacaguguagaccuuuuaaa

SEQ ID NO: 571670 - RNA, 22 nt, Human
acagcaguggguugccaguggg

SEQ ID NO: 571671 - RNA, 22 nt, Human
gccuucaggugcugccaggcua

SEQ ID NO: 571672 - RNA, 22 nt, Human
aaaucagacuugaauuuucauc

SEQ ID NO: 571673 - RNA, 22 nt, Human
gcacacugugaauuugcauaug

SEQ ID NO: 571674 - RNA, 22 nt, Human
cugccugcgccaccaccacguc

SEQ ID NO: 571675 - RNA, 22 nt, Human
aaauggcacuuugacagccugc

SEQ ID NO: 571676 - RNA, 22 nt, Human
ucaggcuuggugcuccagugcc

SEQ ID NO: 571677 - RNA, 22 nt, Human
gaauuucaagcagugcaauguu

SEQ ID NO: 571678 - RNA, 22 nt, Human
cgcagcagccccgugguaggug

SEQ ID NO: 571679 - RNA, 22 nt, Human
uuccgcuguuuaguugaaguuu

SEQ ID NO: 571680 - RNA, 22 nt, Human
auuguaaaguacuguguacaau

SEQ ID NO: 571681 - RNA, 22 nt, Human
augccugccauuuagaagucuu

SEQ ID NO: 571682 - RNA, 22 nt, Human
uauggcaagaugacauguucuc

SEQ ID NO: 571683 - RNA, 22 nt, Human
uagguuuuccuaaaauucuggu

SEQ ID NO: 571684 - RNA, 17 nt, Human
aagaacacucaauagca

SEQ ID NO: 571685 - RNA, 21 nt, Human
gguuaaaagacacaucuguuu

SEQ ID NO: 571686 - RNA, 22 nt, Human
uggggagcacgguagggaaaug

SEQ ID NO: 571687 - RNA, 22 nt, Human
uagcaaaggaugacuauguacc

SEQ ID NO: 571688 - RNA, 22 nt, Human
uggcagagguaauucaaauccc

SEQ ID NO: 571689 - RNA, 22 nt, Human
gggccagagcacagaggauguu

SEQ ID NO: 571690 - RNA, 22 nt, Human
agggccagaguggcaaaagccu

SEQ ID NO: 571691 - RNA, 19 nt, Human
ccugcugcccacccucugc

SEQ ID NO: 571692 - RNA, 22 nt, Human
ggacagggcucuuggcacuccu

SEQ ID NO: 571693 - RNA, 22 nt, Human
uguauauauuucuuucauucua

SEQ ID NO: 571694 - RNA, 22 nt, Human
ucuguccaugcuuuucucucac

SEQ ID NO: 571695 - RNA, 16 nt, Human
gagcagccugggccuu

SEQ ID NO: 571696 - RNA, 22 nt, Human
cugcauccuggaaauagcuaag

SEQ ID NO: 571697 - RNA, 22 nt, Human
uucaggcuauagaccaauuugg

SEQ ID NO: 571698 - RNA, 22 nt, Human
aaugacuaauaaguuuuacugu

SEQ ID NO: 571699 - RNA, 22 nt, Human
gugacaaaaacacugauuauuu

SEQ ID NO: 571700 - RNA, 22 nt, Human
acaucuuuuuggaaacggcuga

SEQ ID NO: 571701 - RNA, 22 nt, Human
caggcugggacugaccccugcu

SEQ ID NO: 571702 - RNA, 22 nt, Human
gacaaaacacauuaguuuaaaa

SEQ ID NO: 571703 - RNA, 22 nt, Human
guggccuagaggugcaaggaac

SEQ ID NO: 571704 - RNA, 22 nt, Human
ggcucuggaaaguguccuugau

SEQ ID NO: 571705 - RNA, 22 nt, Human
uggccaccuuauggcuauugga

SEQ ID NO: 571706 - RNA, 22 nt, Human
ggcgagggagcagugcgguggg

SEQ ID NO: 571707 - RNA, 22 nt, Human
cuucagaggggacucaaaguca

SEQ ID NO: 571708 - RNA, 22 nt, Human
guguaauguugucagcaucauc

SEQ ID NO: 571709 - RNA, 22 nt, Human
aauugcauaaaauucaacucug

SEQ ID NO: 571710 - RNA, 22 nt, Human
ccagggcaucacauccaguguu

SEQ ID NO: 571711 - RNA, 22 nt, Human
ucccagcagagccagcaagccg

SEQ ID NO: 571712 - RNA, 22 nt, Human
agggaaauggagaguguaguuu

SEQ ID NO: 571713 - RNA, 22 nt, Human
uuaggaacuucugucucagugu

SEQ ID NO: 571714 - RNA, 22 nt, Human
gccaguggucacugaggaagaa

SEQ ID NO: 571715 - RNA, 22 nt, Human
uaaucuaucaagcaacaaagug

SEQ ID NO: 571716 - RNA, 22 nt, Human
acccagagcugggcuuggcaaa

SEQ ID NO: 571717 - RNA, 22 nt, Human
uucaagaagguacauuuacauc

SEQ ID NO: 571718 - RNA, 22 nt, Human
agcuccagaaagguacacacag

SEQ ID NO: 571719 - RNA, 22 nt, Human
caggcacccagcccagucgcac

SEQ ID NO: 571720 - RNA, 22 nt, Human
agacaauggagagcagaguacu

SEQ ID NO: 571721 - RNA, 22 nt, Human
ucagaagccuugauuaucuaga

SEQ ID NO: 571722 - RNA, 22 nt, Human
gaguaacaaauacuucaguagu

SEQ ID NO: 571723 - RNA, 22 nt, Human
auucaucuaugacucuaaugug

SEQ ID NO: 571724 - RNA, 23 nt, Human
cuucucugagcuaggaaugcucu

SEQ ID NO: 571725 - RNA, 22 nt, Human
auugugcaaaaccucaggccuc

SEQ ID NO: 571726 - RNA, 21 nt, Human
gggugcuguggucaugcagga

SEQ ID NO: 571727 - RNA, 22 nt, Human
aagagcuggaugaagaaaucaa

SEQ ID NO: 571728 - RNA, 22 nt, Human
gggcugggaauggcuaaguaug

SEQ ID NO: 571729 - RNA, 22 nt, Human
ugggcugaguguggaacuaguu

SEQ ID NO: 571730 - RNA, 22 nt, Human
uuuacuuucucaaguauauagg

SEQ ID NO: 571731 - RNA, 22 nt, Human
cugcccugagggccuguguguu

SEQ ID NO: 571732 - RNA, 22 nt, Human
gcugucacaucaaggcacuaaa

SEQ ID NO: 571733 - RNA, 22 nt, Human
auauuguacuaggguuacaugu

SEQ ID NO: 571734 - RNA, 22 nt, Human
ucauggcucuaaagacauagau

SEQ ID NO: 571735 - RNA, 20 nt, Human
uccagggcuagggagcucau

SEQ ID NO: 571736 - RNA, 22 nt, Human
acaguguuuugucuggcagggc

SEQ ID NO: 571737 - RNA, 23 nt, Human
cucaccaagcgccgccgcugugu

SEQ ID NO: 571738 - RNA, 22 nt, Human
uuccuggggggauagauuucac

SEQ ID NO: 571739 - RNA, 22 nt, Human
gcagaaggucuggcacuucagg

SEQ ID NO: 571740 - RNA, 22 nt, Human
gagcccugaacaacagcaggaa

SEQ ID NO: 571741 - RNA, 22 nt, Human
uauaugcuugggaaaugguaga

SEQ ID NO: 571742 - RNA, 22 nt, Human
uuggcucaggaccccugugacu

SEQ ID NO: 571743 - RNA, 18 nt, Human
gccagagguacuacugau

SEQ ID NO: 571744 - RNA, 22 nt, Human
gaaauauugggacucagagcuu

SEQ ID NO: 571745 - RNA, 22 nt, Human
ugccaggccaaugaaggcaggg

SEQ ID NO: 571746 - RNA, 22 nt, Human
ggaggcugaggccccucacagg

SEQ ID NO: 571747 - RNA, 22 nt, Human
caagccagucagcucaguagau

SEQ ID NO: 571748 - RNA, 22 nt, Human
agcagcugccacuggaauagga

SEQ ID NO: 571749 - RNA, 22 nt, Human
uuuguguuuaugaaguuauucu

SEQ ID NO: 571750 - RNA, 22 nt, Human
ucucuuggaacacuugcucuua

SEQ ID NO: 571751 - RNA, 22 nt, Human
ucuccagguaaauggcauccug

SEQ ID NO: 571752 - RNA, 22 nt, Human
cagccugccgucagccagguag

SEQ ID NO: 571753 - RNA, 22 nt, Human
agguuuguuuuggaaagaucau

SEQ ID NO: 571754 - RNA, 22 nt, Human
ccugcaagagcggagaagccag

SEQ ID NO: 571755 - RNA, 22 nt, Human
ucugccugagggagcugaggaa

SEQ ID NO: 571756 - RNA, 22 nt, Human
uggccuguggcuuaaggucugu

SEQ ID NO: 571757 - RNA, 22 nt, Human
gugacagaguuuuagaucucau

SEQ ID NO: 571758 - RNA, 22 nt, Human
ucuccugggcuugguugaaguu

SEQ ID NO: 571759 - RNA, 22 nt, Human
uaacuagaauggcuauuuugag

SEQ ID NO: 571760 - RNA, 22 nt, Human
caguuuauagcucuagcagcuu

SEQ ID NO: 571761 - RNA, 22 nt, Human
gagagacagcacacaguguggg

SEQ ID NO: 571762 - RNA, 22 nt, Human
ucaucaguccuuuucauuauga

SEQ ID NO: 571763 - RNA, 22 nt, Human
acugccugcauccuuaggguag

SEQ ID NO: 571764 - RNA, 22 nt, Human
agucaggauuuaaacucagaca

SEQ ID NO: 571765 - RNA, 22 nt, Human
uuuugcuuuuguaacacagugu

SEQ ID NO: 571766 - RNA, 22 nt, Human
ggcagcuucggacggcuuauaa

SEQ ID NO: 571767 - RNA, 22 nt, Human
ggcagguggaaguuggcagagc

SEQ ID NO: 571768 - RNA, 23 nt, Human
agccagggcacugguggagauug

SEQ ID NO: 571769 - RNA, 22 nt, Human
ugaggaaguuguuucucuucua

SEQ ID NO: 571770 - RNA, 22 nt, Human
uguuuacuugagguggaaacaa

SEQ ID NO: 571771 - RNA, 22 nt, Human
cccaggggagguccucagggaa

SEQ ID NO: 571772 - RNA, 15 nt, Human
aaucagaaguguggc

SEQ ID NO: 571773 - RNA, 22 nt, Human
guggccagggcccacaggauga

SEQ ID NO: 571774 - RNA, 22 nt, Human
ucuggaagugauguucauagug

SEQ ID NO: 571775 - RNA, 22 nt, Human
gcuuucucuucacugauguuca

SEQ ID NO: 571776 - RNA, 22 nt, Human
acugcaccuugcgguccugugg

SEQ ID NO: 571777 - RNA, 22 nt, Human
uggagauggccucaggcccuca

SEQ ID NO: 571778 - RNA, 19 nt, Human
ggaccuggcaaucugcauu

SEQ ID NO: 571779 - RNA, 23 nt, Human
aggaacugcuucauuuuugaaag

SEQ ID NO: 571780 - RNA, 22 nt, Human
cugguguggacuccgcgcggag

SEQ ID NO: 571781 - RNA, 22 nt, Human
uugaggucaaguaaccacugga

SEQ ID NO: 571782 - RNA, 22 nt, Human
ccagcuccgggaguugcugcug

SEQ ID NO: 571783 - RNA, 22 nt, Human
aaacagcucaagaaguuacucu

SEQ ID NO: 571784 - RNA, 22 nt, Human
cuccagggcagcauggcagugg

SEQ ID NO: 571785 - RNA, 19 nt, Human
uccugggcugcgucuugcc

SEQ ID NO: 571786 - RNA, 22 nt, Human
auugacaagcaguaugucuuag

SEQ ID NO: 571787 - RNA, 22 nt, Human
uagggcaggugaagaaaagcua

SEQ ID NO: 571788 - RNA, 22 nt, Human
aagguagguuaaccugcaggag

SEQ ID NO: 571789 - RNA, 22 nt, Human
acauuucuuagccuaguuccag

SEQ ID NO: 571790 - RNA, 22 nt, Human
ucauuuuugaccauggguagga

SEQ ID NO: 571791 - RNA, 22 nt, Human
gucuggagacuugggucaucaa

SEQ ID NO: 571792 - RNA, 22 nt, Human
uacagcuugacccauaaugucu

SEQ ID NO: 571793 - RNA, 22 nt, Human
ggcaaacuacauuuuugaaaua

SEQ ID NO: 571794 - RNA, 22 nt, Human
cugcagcuguagaggacagugg

SEQ ID NO: 571795 - RNA, 22 nt, Human
ccugggaggcugugggucugcu

SEQ ID NO: 571796 - RNA, 18 nt, Human
cagucccaaaccuuagga

SEQ ID NO: 571797 - RNA, 22 nt, Human
cagaggcuggauggacuugccu

SEQ ID NO: 571798 - RNA, 21 nt, Human
aaggcagaagcauggaaugag

SEQ ID NO: 571799 - RNA, 22 nt, Human
agaagccaaaugccagugaccu

SEQ ID NO: 571800 - RNA, 22 nt, Human
cagcuguugugcugggcaguua

SEQ ID NO: 571801 - RNA, 22 nt, Human
uguuaagagaagcucucucuga

SEQ ID NO: 571802 - RNA, 22 nt, Human
gauuauggauggacaguggagc

SEQ ID NO: 571803 - RNA, 22 nt, Human
aacaagaagagagggacguaau

SEQ ID NO: 571804 - RNA, 22 nt, Human
caccagcuucucauugcggguc

SEQ ID NO: 571805 - RNA, 22 nt, Human
cugaaccacuaauauuuugauu

SEQ ID NO: 571806 - RNA, 22 nt, Human
auuccagagagguucuggaggu

SEQ ID NO: 571807 - RNA, 22 nt, Human
acagagggggccuuggagugca

SEQ ID NO: 571808 - RNA, 21 nt, Human
ugggccagaucugaguuucua

SEQ ID NO: 571809 - RNA, 22 nt, Human
cacccuggaaagaaggucuggg

SEQ ID NO: 571810 - RNA, 22 nt, Human
ugggauggccuuugaaagccag

SEQ ID NO: 571811 - RNA, 22 nt, Human
caggguugauuccuucugaggg

SEQ ID NO: 571812 - RNA, 22 nt, Human
uucaaugcauauagauauagaa

SEQ ID NO: 571813 - RNA, 22 nt, Human
gaggccacgugcuuauguuucu

SEQ ID NO: 571814 - RNA, 22 nt, Human
uaaaagauuuuauaggaacaag

SEQ ID NO: 571815 - RNA, 22 nt, Human
gccagccaagauugagaaggua

SEQ ID NO: 571816 - RNA, 22 nt, Human
aggugcuggaguagaagaaaaa

SEQ ID NO: 571817 - RNA, 22 nt, Human
uacuaaaugauuaagcaggaau

SEQ ID NO: 571818 - RNA, 22 nt, Human
ugcauauuauguguaucugucu

SEQ ID NO: 571819 - RNA, 18 nt, Human
acaguaaagaaaggaauu

SEQ ID NO: 571820 - RNA, 20 nt, Human
uggagcugugguaaggagca

SEQ ID NO: 571821 - RNA, 22 nt, Human
aaacugaggaguuagacuaggg

SEQ ID NO: 571822 - RNA, 22 nt, Human
uaaaguguggacaguaucuaua

SEQ ID NO: 571823 - RNA, 22 nt, Human
ucugccugcgcucacggggccg

SEQ ID NO: 571824 - RNA, 22 nt, Human
gagcuggggcagcuuaggagug

SEQ ID NO: 571825 - RNA, 22 nt, Human
ccuggcuccugccucugcaggg

SEQ ID NO: 571826 - RNA, 22 nt, Human
ggaggcggagcuugcagugagc

SEQ ID NO: 571827 - RNA, 22 nt, Human
cuugccucugcuaaugguuucu

SEQ ID NO: 571828 - RNA, 22 nt, Human
gcuuccagggcucagucacugc

SEQ ID NO: 571829 - RNA, 23 nt, Human
ucacuuugauguaauugaaaagc

SEQ ID NO: 571830 - RNA, 22 nt, Human
agccaagcugaucuccugcuga

SEQ ID NO: 571831 - RNA, 22 nt, Human
uagacauuauuucuacccacaa

SEQ ID NO: 571832 - RNA, 22 nt, Human
gggaggcucugcucagcccccg

SEQ ID NO: 571833 - RNA, 22 nt, Human
gcagugcuuuagucuguccuuu

SEQ ID NO: 571834 - RNA, 23 nt, Human
ugcugaaguguuggcccugccca

SEQ ID NO: 571835 - RNA, 22 nt, Human
uccugaagaugaaaagagaggu

SEQ ID NO: 571836 - RNA, 22 nt, Human
cuggaagaggacacacgaauca

SEQ ID NO: 571837 - RNA, 18 nt, Human
aggggcagcuugugugga

SEQ ID NO: 571838 - RNA, 22 nt, Human
gcagaggcucuuuaaugcuuag

SEQ ID NO: 571839 - RNA, 22 nt, Human
uccugggagacccagcugugga

SEQ ID NO: 571840 - RNA, 22 nt, Human
ggucucagcuggaguccuuggu

SEQ ID NO: 571841 - RNA, 22 nt, Human
gagcuuugugcugguagguggu

SEQ ID NO: 571842 - RNA, 22 nt, Human
cagugcucccgcugccgcugug

SEQ ID NO: 571843 - RNA, 22 nt, Human
gugcauauguguguauacaaac

SEQ ID NO: 571844 - RNA, 22 nt, Human
uuuguucauuuugagcucauca

SEQ ID NO: 571845 - RNA, 22 nt, Human
agugcuggcccauagcugcugg

SEQ ID NO: 571846 - RNA, 23 nt, Human
acaguucucugauggguuuaaca

SEQ ID NO: 571847 - RNA, 22 nt, Human
ucugaaauggggcugaagcacu

SEQ ID NO: 571848 - RNA, 19 nt, Human
cagcugcaccgugaccauc

SEQ ID NO: 571849 - RNA, 22 nt, Human
aauauuaauagaagggguucua

SEQ ID NO: 571850 - RNA, 22 nt, Human
uaccugaaccaagcccagcucu

SEQ ID NO: 571851 - RNA, 20 nt, Human
ucccagucagccagagugag

SEQ ID NO: 571852 - RNA, 22 nt, Human
agugcuaaugugcaauauagag

SEQ ID NO: 571853 - RNA, 22 nt, Human
aggcucuguaugaagguuuggg

SEQ ID NO: 571854 - RNA, 22 nt, Human
aagcugugagcuggaugcucca

SEQ ID NO: 571855 - RNA, 22 nt, Human
cccuggaguagcacugggucgc

SEQ ID NO: 571856 - RNA, 21 nt, Human
cccuaacucuaaaggauccau

SEQ ID NO: 571857 - RNA, 22 nt, Human
uggaaacagaucauaacuaagc

SEQ ID NO: 571858 - RNA, 22 nt, Human
ugggauguggccaugguucucu

SEQ ID NO: 571859 - RNA, 22 nt, Human
cagaggccauauuucuucacuc

SEQ ID NO: 571860 - RNA, 22 nt, Human
gauuaguauccuuauuaagaga

SEQ ID NO: 571861 - RNA, 22 nt, Human
ucaugcaaaagacuugaacuuu

SEQ ID NO: 571862 - RNA, 22 nt, Human
uauuaguugcaaaacauugacu

SEQ ID NO: 571863 - RNA, 22 nt, Human
ucugggaaccauugguggggau

SEQ ID NO: 571864 - RNA, 22 nt, Human
aaacaaguguaaacuagucugu

SEQ ID NO: 571865 - RNA, 22 nt, Human
gaggcccaggguacaggccgcu

SEQ ID NO: 571866 - RNA, 22 nt, Human
auacaaugaaguauagaugaaa

SEQ ID NO: 571867 - RNA, 22 nt, Human
guuccuugggaacaacgcugaa

SEQ ID NO: 571868 - RNA, 22 nt, Human
acaccagggauaugaggaagga

SEQ ID NO: 571869 - RNA, 22 nt, Human
cagcucccaguggcagcuccuu

SEQ ID NO: 571870 - RNA, 22 nt, Human
acagccugagaguggagcuggc

SEQ ID NO: 571871 - RNA, 22 nt, Human
cuucccugagcuuucucaggcu

SEQ ID NO: 571872 - RNA, 22 nt, Human
aaugaucaccugguaaagagag

SEQ ID NO: 571873 - RNA, 22 nt, Human
cagacagguagggacagaacau

SEQ ID NO: 571874 - RNA, 22 nt, Human
gccaggagugucccacucauuu

SEQ ID NO: 571875 - RNA, 22 nt, Human
ggcagccuucucucauagguga

SEQ ID NO: 571876 - RNA, 22 nt, Human
uaaaccuuauuugaauaccaac

SEQ ID NO: 571877 - RNA, 19 nt, Human
cucuggagcagacacugga

SEQ ID NO: 571878 - RNA, 22 nt, Human
auuuuucucuccacuccauuaa

SEQ ID NO: 571879 - RNA, 20 nt, Human
ugaagauuuuguguuuagaa

SEQ ID NO: 571880 - RNA, 22 nt, Human
cucugcuuuuuagggagccuag

SEQ ID NO: 571881 - RNA, 22 nt, Human
guuaauuugcagcuuucgagcu

SEQ ID NO: 571882 - RNA, 22 nt, Human
uaauuauagccgcuauuuugcu

SEQ ID NO: 571883 - RNA, 22 nt, Human
ggcugagcaauuuugaugacau

SEQ ID NO: 571884 - RNA, 22 nt, Human
agcuuaaacucuuugaaguuau

SEQ ID NO: 571885 - RNA, 22 nt, Human
gucugucaucugagauggagug

SEQ ID NO: 571886 - RNA, 22 nt, Human
aggguucugccagugucuugag

SEQ ID NO: 571887 - RNA, 18 nt, Human
ggcaugugagugcugagg

SEQ ID NO: 571888 - RNA, 22 nt, Human
ugugaugguucacugggcauga

SEQ ID NO: 571889 - RNA, 22 nt, Human
aggccagcuuccagaggggcag

SEQ ID NO: 571890 - RNA, 22 nt, Human
aggacagguguagugggcucug

SEQ ID NO: 571891 - RNA, 22 nt, Human
gccagggcucgcggucccucgu

SEQ ID NO: 571892 - RNA, 22 nt, Human
aggauauuugcuuaagauagcu

SEQ ID NO: 571893 - RNA, 22 nt, Human
acaguaaaucaacagaauaucu

SEQ ID NO: 571894 - RNA, 20 nt, Human
ugucauuuauuuaucaaaug

SEQ ID NO: 571895 - RNA, 21 nt, Human
agcaggugaaccuccaguaca

SEQ ID NO: 571896 - RNA, 23 nt, Human
ucacacuggauacacaugcaaga

SEQ ID NO: 571897 - RNA, 22 nt, Human
gggugggagaaaugaguaucua

SEQ ID NO: 571898 - RNA, 21 nt, Human
acaguucugccggcaucuuuc

SEQ ID NO: 571899 - RNA, 23 nt, Human
caugugugacaguaucacuguuu

SEQ ID NO: 571900 - RNA, 22 nt, Human
gcagaggucuagcaccaagaau

SEQ ID NO: 571901 - RNA, 22 nt, Human
gggcgaggacugacucugggca

SEQ ID NO: 571902 - RNA, 22 nt, Human
agcuucaaagcuaggaagaucu

SEQ ID NO: 571903 - RNA, 22 nt, Human
ugcaggaauagcuacagagcug

SEQ ID NO: 571904 - RNA, 22 nt, Human
uuuauguaaguggaaugaugcc

SEQ ID NO: 571905 - RNA, 22 nt, Human
uccugagguauaugcuuugcag

SEQ ID NO: 571906 - RNA, 22 nt, Human
ggggaagaaugcucucuagaga

SEQ ID NO: 571907 - RNA, 22 nt, Human
aggcucagcccaagguggagag

SEQ ID NO: 571908 - RNA, 22 nt, Human
accugcccagacucagauccua

SEQ ID NO: 571909 - RNA, 22 nt, Human
cagaggccaccuguggccacug

SEQ ID NO: 571910 - RNA, 22 nt, Human
uguuauuuaucugagcauuuau

SEQ ID NO: 571911 - RNA, 19 nt, Human
aaguucucagaguucaaag

SEQ ID NO: 571912 - RNA, 22 nt, Human
gggaggaaggcuugggugagua

SEQ ID NO: 571913 - RNA, 22 nt, Human
cuacauuucccagcugccuucc

SEQ ID NO: 571914 - RNA, 22 nt, Human
cccaggagagaggggauaaagc

SEQ ID NO: 571915 - RNA, 22 nt, Human
guuguuuuaaaauacuccagaa

SEQ ID NO: 571916 - RNA, 22 nt, Human
acccaggacaugggcacccgug

SEQ ID NO: 571917 - RNA, 22 nt, Human
uaugaacauuauuuuugucuag

SEQ ID NO: 571918 - RNA, 22 nt, Human
ucacagcuaagcuuggucacug

SEQ ID NO: 571919 - RNA, 22 nt, Human
cagcccaggcucagauguuggg

SEQ ID NO: 571920 - RNA, 22 nt, Human
aaugucugaggcucaucugagg

SEQ ID NO: 571921 - RNA, 22 nt, Human
gccugagccgccugagcggcgg

SEQ ID NO: 571922 - RNA, 22 nt, Human
ucaucaaaggauugcaugauuu

SEQ ID NO: 571923 - RNA, 22 nt, Human
uagacacuguaugagcugggug

SEQ ID NO: 571924 - RNA, 22 nt, Human
aacaguuuaucaaguuuuuaca

SEQ ID NO: 571925 - RNA, 22 nt, Human
ggaguguggagaggacaugggu

SEQ ID NO: 571926 - RNA, 22 nt, Human
acaucuguuuaacgaaggcauu

SEQ ID NO: 571927 - RNA, 17 nt, Human
cuggccaguguacuugg

SEQ ID NO: 571928 - RNA, 22 nt, Human
uagcacuauauguuagcuauua

SEQ ID NO: 571929 - RNA, 22 nt, Human
ugcagagaagaggacaguucua

SEQ ID NO: 571930 - RNA, 22 nt, Human
gccagcucagugccaggccccu

SEQ ID NO: 571931 - RNA, 22 nt, Human
ugugcucacucuaaauuaagau

SEQ ID NO: 571932 - RNA, 22 nt, Human
acauaugucuauuucauguaaa

SEQ ID NO: 571933 - RNA, 22 nt, Human
ucacagcagaauuuaggaggca

SEQ ID NO: 571934 - RNA, 22 nt, Human
ucaguggauauuucuguggcug

SEQ ID NO: 571935 - RNA, 19 nt, Human
gcugaaaucaaauuuggaa

SEQ ID NO: 571936 - RNA, 22 nt, Human
ccugucccccaggccuguacca

SEQ ID NO: 571937 - RNA, 22 nt, Human
gggagccaaggagagaggccuu

SEQ ID NO: 571938 - RNA, 22 nt, Human
uuauguaccugaauuaguaaag

SEQ ID NO: 571939 - RNA, 22 nt, Human
ggaggguccacugugaggcaga

SEQ ID NO: 571940 - RNA, 22 nt, Human
guguucaaaauguagguagauu

SEQ ID NO: 571941 - RNA, 22 nt, Human
ggaaggggagcuggaaagggua

SEQ ID NO: 571942 - RNA, 22 nt, Human
agugggcugguggcagggagaa

SEQ ID NO: 571943 - RNA, 22 nt, Human
uuuaaggaugaugugauauaua

SEQ ID NO: 571944 - RNA, 17 nt, Human
gcugagaggcagcacag

SEQ ID NO: 571945 - RNA, 22 nt, Human
cugcugaaguuguuggucuuuu

SEQ ID NO: 571946 - RNA, 22 nt, Human
aaccagugaaacaccaggcaag

SEQ ID NO: 571947 - RNA, 22 nt, Human
cuccuguggucaagggugggac

SEQ ID NO: 571948 - RNA, 20 nt, Human
cugcugagagccuggcuugc

SEQ ID NO: 571949 - RNA, 22 nt, Human
cagagguagccgagugcaaucg

SEQ ID NO: 571950 - RNA, 22 nt, Human
acugcugauuaugaaagugaca

SEQ ID NO: 571951 - RNA, 22 nt, Human
ggggaagauggcccuccaugug

SEQ ID NO: 571952 - RNA, 21 nt, Human
agauucauaaucuguaaaaug

SEQ ID NO: 571953 - RNA, 22 nt, Human
uccuguaguugcuaaguuuguu

SEQ ID NO: 571954 - RNA, 22 nt, Human
gagcucagggcauugagcaaga

SEQ ID NO: 571955 - RNA, 22 nt, Human
cugggcagcugugcaaacaaua

SEQ ID NO: 571956 - RNA, 22 nt, Human
aaaucacuuaaauggcuuauuu

SEQ ID NO: 571957 - RNA, 22 nt, Human
aacacugaguaucagaguuggg

SEQ ID NO: 571958 - RNA, 20 nt, Human
auucuacaagaauaagcaug

SEQ ID NO: 571959 - RNA, 22 nt, Human
uuucuuccuaaauaugauuucc

SEQ ID NO: 571960 - RNA, 22 nt, Human
gacaggugaaacagcaagguaa

SEQ ID NO: 571961 - RNA, 22 nt, Human
gcaaggagccuggaggugagug

SEQ ID NO: 571962 - RNA, 22 nt, Human
cuagcaggucaaaccagcugau

SEQ ID NO: 571963 - RNA, 22 nt, Human
uaaauuauguuccauguccuuu

SEQ ID NO: 571964 - RNA, 22 nt, Human
aagcauguacaaugagugucuc

SEQ ID NO: 571965 - RNA, 20 nt, Human
aauaaacuacugagagaugu

SEQ ID NO: 571966 - RNA, 22 nt, Human
cugucucaagacugcaggcacu

SEQ ID NO: 571967 - RNA, 22 nt, Human
ugagaaaagguugagaugauaa

SEQ ID NO: 571968 - RNA, 22 nt, Human
aguucuuuguaaaaggucucua

SEQ ID NO: 571969 - RNA, 22 nt, Human
ccaggccuggccaggggaugcc

SEQ ID NO: 571970 - RNA, 17 nt, Human
gaggacagggaaguagg

SEQ ID NO: 571971 - RNA, 22 nt, Human
ugcugaggagguggcugugcuu

SEQ ID NO: 571972 - RNA, 22 nt, Human
uacuuuuagccuauuugauucu

SEQ ID NO: 571973 - RNA, 22 nt, Human
cuggguguagauggaaguuugg

SEQ ID NO: 571974 - RNA, 22 nt, Human
uaguuuugaggauuauauguga

SEQ ID NO: 571975 - RNA, 22 nt, Human
aggcaguguauugcuagcggcu

SEQ ID NO: 571976 - RNA, 22 nt, Human
ugagacuugugaguccuucuag

SEQ ID NO: 571977 - RNA, 22 nt, Human
agcaccagcgugggggccguug

SEQ ID NO: 571978 - RNA, 22 nt, Human
gagguaggcugugaaagggggu

SEQ ID NO: 571979 - RNA, 22 nt, Human
agcugggccugauuugcagggg

SEQ ID NO: 571980 - RNA, 22 nt, Human
ugagguaguagauuuuugucca

SEQ ID NO: 571981 - RNA, 22 nt, Human
gcugaagguguguggagagagg

SEQ ID NO: 571982 - RNA, 22 nt, Human
ggccuugagagccagugcaggc

SEQ ID NO: 571983 - RNA, 22 nt, Human
agcuucuguucaucuuccaggc

SEQ ID NO: 571984 - RNA, 22 nt, Human
gcagggaugcugaggcucagug

SEQ ID NO: 571985 - RNA, 22 nt, Human
gggaugagagcugggacagaag

SEQ ID NO: 571986 - RNA, 23 nt, Human
ucagccucuuaggacuucucacc

SEQ ID NO: 571987 - RNA, 22 nt, Human
agcugccccucauuuucaccac

SEQ ID NO: 571988 - RNA, 22 nt, Human
auucacaaagaagggaaguaca

SEQ ID NO: 571989 - RNA, 22 nt, Human
ggccauggucaugggugagcuu

SEQ ID NO: 571990 - RNA, 22 nt, Human
ggagguggccugaaaauguggc

SEQ ID NO: 571991 - RNA, 22 nt, Human
auauuuugguagcucucaauga

SEQ ID NO: 571992 - RNA, 22 nt, Human
uuguagaacaugcagcacaaug

SEQ ID NO: 571993 - RNA, 22 nt, Human
agcaccuugcucuuggccuucc

SEQ ID NO: 571994 - RNA, 22 nt, Human
guccccucagccacccaugggg

SEQ ID NO: 571995 - RNA, 18 nt, Human
cccagcccaccauuucuc

SEQ ID NO: 571996 - RNA, 22 nt, Human
ugcugugacccaaaaaagaccu

SEQ ID NO: 571997 - RNA, 19 nt, Human
uucuaugauuaacaugaga

SEQ ID NO: 571998 - RNA, 22 nt, Human
uuggccucauggacagcucauc

SEQ ID NO: 571999 - RNA, 19 nt, Human
ugugugcugacugccagag

SEQ ID NO: 572000 - RNA, 22 nt, Human
uacagcuugauguuuguguguu

SEQ ID NO: 572001 - RNA, 22 nt, Human
uugcaggguuaaaguaagguag

SEQ ID NO: 572002 - RNA, 22 nt, Human
ccacccagaccagggaucuggg

SEQ ID NO: 572003 - RNA, 22 nt, Human
uuauuauguggaugaaagaugu

SEQ ID NO: 572004 - RNA, 22 nt, Human
uuggcugccuucaccccuggcc

SEQ ID NO: 572005 - RNA, 22 nt, Human
agagggcuucccuaggagugag

SEQ ID NO: 572006 - RNA, 22 nt, Human
agcucucauuacuuuacagaug

SEQ ID NO: 572007 - RNA, 22 nt, Human
gcugaggcggaaggauugcuag

SEQ ID NO: 572008 - RNA, 22 nt, Human
ccccaaagccucagccugccug

SEQ ID NO: 572009 - RNA, 22 nt, Human
uuucuucucaucccugaaauca

SEQ ID NO: 572010 - RNA, 22 nt, Human
ugucuccugagagcuggacaga

SEQ ID NO: 572011 - RNA, 22 nt, Human
auuugccuuuuaaacucacaau

SEQ ID NO: 572012 - RNA, 22 nt, Human
aaauaauugaguuggucaauau

SEQ ID NO: 572013 - RNA, 22 nt, Human
ugugcucugccccugacuguuu

SEQ ID NO: 572014 - RNA, 22 nt, Human
ccaaggcuggagggcuuaugua

SEQ ID NO: 572015 - RNA, 22 nt, Human
ggacagcacagcucuugacaac

SEQ ID NO: 572016 - RNA, 22 nt, Human
acagcagguuacaguggcacag

SEQ ID NO: 572017 - RNA, 22 nt, Human
augaugaaacuaggaacuagag

SEQ ID NO: 572018 - RNA, 22 nt, Human
cuuagcuuuaaaagugagaucu

SEQ ID NO: 572019 - RNA, 22 nt, Human
cuguguccugucuccuaaggug

SEQ ID NO: 572020 - RNA, 22 nt, Human
ucucauuuacuuccacaggcug

SEQ ID NO: 572021 - RNA, 21 nt, Human
aacaaagggaugcucaucuuu

SEQ ID NO: 572022 - RNA, 22 nt, Human
uuuucaaagacuggaggcugau

SEQ ID NO: 572023 - RNA, 22 nt, Human
uggccugggugcugcugacauc

SEQ ID NO: 572024 - RNA, 22 nt, Human
cagcccagcagucuuagccugc

SEQ ID NO: 572025 - RNA, 22 nt, Human
cuacagucuggcaggaauguua

SEQ ID NO: 572026 - RNA, 22 nt, Human
aacgaauagggauuuuucuaac

SEQ ID NO: 572027 - RNA, 22 nt, Human
acauuuaaccaaacuguuuaau

SEQ ID NO: 572028 - RNA, 22 nt, Human
uagcagggauacaaggucgccu

SEQ ID NO: 572029 - RNA, 22 nt, Human
gagagcugcaagguagggcggg

SEQ ID NO: 572030 - RNA, 22 nt, Human
ucucacuggguauaaaugagua

SEQ ID NO: 572031 - RNA, 22 nt, Human
agcugaggaggaaugaugggua

SEQ ID NO: 572032 - RNA, 22 nt, Human
uucuaguuaauguagcaucuug

SEQ ID NO: 572033 - RNA, 22 nt, Human
agucugcaggcugugauuuuuu

SEQ ID NO: 572034 - RNA, 22 nt, Human
aaauaaguuaaacuagaaugau

SEQ ID NO: 572035 - RNA, 22 nt, Human
ggcagaggaagcuggaaguggg

SEQ ID NO: 572036 - RNA, 22 nt, Human
agaggacagguuuuccaugggc

SEQ ID NO: 572037 - RNA, 22 nt, Human
ugaauaauuaugggaguccuaa

SEQ ID NO: 572038 - RNA, 23 nt, Human
agaggccagccuuuggagacacc

SEQ ID NO: 572039 - RNA, 21 nt, Human
agcagaggggacauguuugau

SEQ ID NO: 572040 - RNA, 22 nt, Human
agaagccagauuguagugggac

SEQ ID NO: 572041 - RNA, 22 nt, Human
uagagguauuuuugauggucau

SEQ ID NO: 572042 - RNA, 22 nt, Human
ugccugcugauuggaguugaau

SEQ ID NO: 572043 - RNA, 22 nt, Human
ucuaaucuacaaaaggaaauuc

SEQ ID NO: 572044 - RNA, 22 nt, Human
acaggacaggcugggcuagacu

SEQ ID NO: 572045 - RNA, 22 nt, Human
augugcuugacuacucucuauu

SEQ ID NO: 572046 - RNA, 22 nt, Human
uggagcuggaauuucugggccu

SEQ ID NO: 572047 - RNA, 22 nt, Human
acaggauuaguggauuugucuu

SEQ ID NO: 572048 - RNA, 22 nt, Human
gaaggcaacaccaggaugcacu

SEQ ID NO: 572049 - RNA, 22 nt, Human
ggaggagcugcugugggggccc

SEQ ID NO: 572050 - RNA, 22 nt, Human
cuguggugagcaacugacugaa

SEQ ID NO: 572051 - RNA, 22 nt, Human
cugagagaucaagccacaggau

SEQ ID NO: 572052 - RNA, 22 nt, Human
agcuucuuuuacagcucaugcu

SEQ ID NO: 572053 - RNA, 22 nt, Human
gccagcugcuggaacagcgcga

SEQ ID NO: 572054 - RNA, 22 nt, Human
uuucaaagguggaagagugaau

SEQ ID NO: 572055 - RNA, 22 nt, Human
aaacagcuacuucuguauaaug

SEQ ID NO: 572056 - RNA, 22 nt, Human
aagcugccaccagcccagggca

SEQ ID NO: 572057 - RNA, 22 nt, Human
ggaacauucuagaguguuguga

SEQ ID NO: 572058 - RNA, 22 nt, Human
ucaguguagcagacuuguagcc

SEQ ID NO: 572059 - RNA, 22 nt, Human
agaugcugugaggaagcuagga

SEQ ID NO: 572060 - RNA, 22 nt, Human
cuucuaauucuuauguaagcuu

SEQ ID NO: 572061 - RNA, 22 nt, Human
gugucccagccccacaggccug

SEQ ID NO: 572062 - RNA, 22 nt, Human
aaacauugaugggaaguuuaau

SEQ ID NO: 572063 - RNA, 22 nt, Human
ucugggaaggcucugcagauau

SEQ ID NO: 572064 - RNA, 22 nt, Human
uuuguuaaaaugcagauucugu

SEQ ID NO: 572065 - RNA, 22 nt, Human
uuuccuucccuggaugagaagu

SEQ ID NO: 572066 - RNA, 22 nt, Human
ucauuuacaugucuuucucuga

SEQ ID NO: 572067 - RNA, 22 nt, Human
aaauacuguugaaugaaguaag

SEQ ID NO: 572068 - RNA, 22 nt, Human
cuuggguguuuuaaaacuagau

SEQ ID NO: 572069 - RNA, 22 nt, Human
caggaaaggugugucaugaugg

SEQ ID NO: 572070 - RNA, 22 nt, Human
gagaggcuccgccacugcucag

SEQ ID NO: 572071 - RNA, 22 nt, Human
cugucuccuccuuuguucuuaa

SEQ ID NO: 572072 - RNA, 22 nt, Human
guuacauuaggauaauuugcug

SEQ ID NO: 572073 - RNA, 22 nt, Human
ccuggagcucacugggagccgg

SEQ ID NO: 572074 - RNA, 22 nt, Human
uuugaagaagcugaccuauuuu

SEQ ID NO: 572075 - RNA, 19 nt, Human
ccucccacggauuccuucc

SEQ ID NO: 572076 - RNA, 22 nt, Human
ccuuccccaggugcucacuguc

SEQ ID NO: 572077 - RNA, 22 nt, Human
gggcagguuauuggaguaggga

SEQ ID NO: 572078 - RNA, 22 nt, Human
aggcccugcaggaguggggaca

SEQ ID NO: 572079 - RNA, 22 nt, Human
cugguauaguauaaauuaaugu

SEQ ID NO: 572080 - RNA, 22 nt, Human
ugaggcucagagaacagugacu

SEQ ID NO: 572081 - RNA, 18 nt, Human
ucagaggagauaccuaaa

SEQ ID NO: 572082 - RNA, 21 nt, Human
uauuucuuugacucucucccu

SEQ ID NO: 572083 - RNA, 22 nt, Human
ggaguugauuuuggauauauua

SEQ ID NO: 572084 - RNA, 23 nt, Human
cuggcucuguagguggcauccuu

SEQ ID NO: 572085 - RNA, 22 nt, Human
acaauauuugggggcaguuugu

SEQ ID NO: 572086 - RNA, 22 nt, Human
uucacagggccacuggcaggag

SEQ ID NO: 572087 - RNA, 22 nt, Human
ugccaggcugucaauucaccca

SEQ ID NO: 572088 - RNA, 22 nt, Human
aguacuuugcacuuugcucaga

SEQ ID NO: 572089 - RNA, 22 nt, Human
ucauuucacuucucuagggaga

SEQ ID NO: 572090 - RNA, 22 nt, Human
acugggcauuuugaacguucuu

SEQ ID NO: 572091 - RNA, 22 nt, Human
ucaucuaagagucuuacauuua

SEQ ID NO: 572092 - RNA, 22 nt, Human
cggggcagagggucuucuccag

SEQ ID NO: 572093 - RNA, 22 nt, Human
aaggaggagcggaggcuuguug

SEQ ID NO: 572094 - RNA, 20 nt, Human
uaugauaauuacaaaauagu

SEQ ID NO: 572095 - RNA, 23 nt, Human
ccaggcaguagcuauugaaguga

SEQ ID NO: 572096 - RNA, 22 nt, Human
ucaguguuggcuacaucugccu

SEQ ID NO: 572097 - RNA, 22 nt, Human
gagggcgcuucagagagaugaa

SEQ ID NO: 572098 - RNA, 22 nt, Human
uucaaaauccgggaggcgcccc

SEQ ID NO: 572099 - RNA, 22 nt, Human
uccuccagucuuggugagguug

SEQ ID NO: 572100 - RNA, 22 nt, Human
gagcucuggcagggcaggucug

SEQ ID NO: 572101 - RNA, 23 nt, Human
agcuccagggaacaggcaguagg

SEQ ID NO: 572102 - RNA, 22 nt, Human
auuucuuccucugucaguaacu

SEQ ID NO: 572103 - RNA, 19 nt, Human
cccaggggacccagcccua

SEQ ID NO: 572104 - RNA, 22 nt, Human
uauuauugacuauucagaaugu

SEQ ID NO: 572105 - RNA, 22 nt, Human
cagaagcauugacuccuugcuc

SEQ ID NO: 572106 - RNA, 22 nt, Human
cagcugcagaaagcaagcaggu

SEQ ID NO: 572107 - RNA, 23 nt, Human
cccagcugagacuuccugaacuc

SEQ ID NO: 572108 - RNA, 22 nt, Human
aagauacaucauucaggaguga

SEQ ID NO: 572109 - RNA, 22 nt, Human
gccuggggucccuuguuggcac

SEQ ID NO: 572110 - RNA, 22 nt, Human
gcaugugggagggucuucccac

SEQ ID NO: 572111 - RNA, 22 nt, Human
ucucacugauuugagaccaagg

SEQ ID NO: 572112 - RNA, 22 nt, Human
uguuaaauguuccuuuacugga

SEQ ID NO: 572113 - RNA, 22 nt, Human
uuuuuagccaagccauaggucu

SEQ ID NO: 572114 - RNA, 22 nt, Human
ccuuucucuuggauaccgauug

SEQ ID NO: 572115 - RNA, 22 nt, Human
ugcugcugacauuuggggcuug

SEQ ID NO: 572116 - RNA, 22 nt, Human
ugccucugguuaucugguaccu

SEQ ID NO: 572117 - RNA, 22 nt, Human
uuuuuuacagaaucauuaauca

SEQ ID NO: 572118 - RNA, 23 nt, Human
cagagcuggcucagagcugccug

SEQ ID NO: 572119 - RNA, 22 nt, Human
agucuucacucuucacuacuau

SEQ ID NO: 572120 - RNA, 22 nt, Human
ggccuugggcagacacgucaca

SEQ ID NO: 572121 - RNA, 23 nt, Human
gcagaggagcaagcuggacacca

SEQ ID NO: 572122 - RNA, 22 nt, Human
gacccaggguuucugcacaggg

SEQ ID NO: 572123 - RNA, 22 nt, Human
cuaguaaagcuaugauucugcc

SEQ ID NO: 572124 - RNA, 22 nt, Human
uagcagagaggggacaguggca

SEQ ID NO: 572125 - RNA, 22 nt, Human
uugcugaauugaauccuuuggu

SEQ ID NO: 572126 - RNA, 22 nt, Human
ucuggcuugagcuucgaccagu

SEQ ID NO: 572127 - RNA, 22 nt, Human
uucuccuugaaaagcugcaucu

SEQ ID NO: 572128 - RNA, 22 nt, Human
cagaggcugcucuggguggcau

SEQ ID NO: 572129 - RNA, 22 nt, Human
ugcuggcuuccugugcacagca

SEQ ID NO: 572130 - RNA, 22 nt, Human
ugucccaggcugaaguacagug

SEQ ID NO: 572131 - RNA, 22 nt, Human
gugcauauaugcacauaugugu

SEQ ID NO: 572132 - RNA, 22 nt, Human
aaaugucugagacuucugaacu

SEQ ID NO: 572133 - RNA, 19 nt, Human
uaagguuuaccagcaaaau

SEQ ID NO: 572134 - RNA, 22 nt, Human
cuuaaucucaccugcaaagucc

SEQ ID NO: 572135 - RNA, 22 nt, Human
ucacaagacagaaaacauuuag

SEQ ID NO: 572136 - RNA, 22 nt, Human
agacaggaugcauacucuuggu

SEQ ID NO: 572137 - RNA, 22 nt, Human
uacuuacauuagcaaacaaggu

SEQ ID NO: 572138 - RNA, 23 nt, Human
cccagcuggaaguuagaggacca

SEQ ID NO: 572139 - RNA, 22 nt, Human
aaaggugccucuuacaaggcuu

SEQ ID NO: 572140 - RNA, 22 nt, Human
ugagagcuguccaccuguggga

SEQ ID NO: 572141 - RNA, 22 nt, Human
acaguggagaaggcaugaggcu

SEQ ID NO: 572142 - RNA, 22 nt, Human
gagccaaucuuugggcucuugg

SEQ ID NO: 572143 - RNA, 22 nt, Human
ugcugaggucaccuugcugcua

SEQ ID NO: 572144 - RNA, 22 nt, Human
agcccccaaaagugcuuaugau

SEQ ID NO: 572145 - RNA, 22 nt, Human
agugcaugaaagcauacaaggc

SEQ ID NO: 572146 - RNA, 19 nt, Human
ugggcagguucaguaaugg

SEQ ID NO: 572147 - RNA, 22 nt, Human
acaggaacgaauguacauuguu

SEQ ID NO: 572148 - RNA, 22 nt, Human
cagaccucaaagcugcagugcu

SEQ ID NO: 572149 - RNA, 22 nt, Human
ugaggcccuagggcaugggaga

SEQ ID NO: 572150 - RNA, 22 nt, Human
ugugaaagcaagucuaguucuc

SEQ ID NO: 572151 - RNA, 22 nt, Human
ugagcaagagaaacugacugua

SEQ ID NO: 572152 - RNA, 22 nt, Human
cuacauuuugugauuaugaaau

SEQ ID NO: 572153 - RNA, 22 nt, Human
aaauggcauucagcaaccuuuc

SEQ ID NO: 572154 - RNA, 22 nt, Human
uagacauuuucucaacaucucu

SEQ ID NO: 572155 - RNA, 22 nt, Human
cugcugagagccccagcugaga

SEQ ID NO: 572156 - RNA, 22 nt, Human
ucuguggcauguugcacuugua

SEQ ID NO: 572157 - RNA, 22 nt, Human
cugggccagcaacugcaaugga

SEQ ID NO: 572158 - RNA, 22 nt, Human
acagugcuucugauaugaugcc

SEQ ID NO: 572159 - RNA, 21 nt, Human
acugggcuagccugacuucug

SEQ ID NO: 572160 - RNA, 22 nt, Human
uagggagaaacaccaauuuauu

SEQ ID NO: 572161 - RNA, 22 nt, Human
gcagcuuuggagguggaacucu

SEQ ID NO: 572162 - RNA, 21 nt, Human
uccugggaagcacuggggugg

SEQ ID NO: 572163 - RNA, 20 nt, Human
uguggcaggaugagggcgga

SEQ ID NO: 572164 - RNA, 22 nt, Human
aguacuuagaaaguuaauauaa

SEQ ID NO: 572165 - RNA, 22 nt, Human
uggaagcuguggcauaacugag

SEQ ID NO: 572166 - RNA, 20 nt, Human
uggcacagaacccuugccua

SEQ ID NO: 572167 - RNA, 22 nt, Human
gugcggaucgguguccuccaaa

SEQ ID NO: 572168 - RNA, 22 nt, Human
cacuuggaggaaggccuauuca

SEQ ID NO: 572169 - RNA, 22 nt, Human
ucuccgaucacagguuuucaau

SEQ ID NO: 572170 - RNA, 22 nt, Human
aagauuuacuagcauaauagcu

SEQ ID NO: 572171 - RNA, 22 nt, Human
aaacagcugucauuguuuuaaa

SEQ ID NO: 572172 - RNA, 22 nt, Human
guggcaaggagcaugaaaaguc

SEQ ID NO: 572173 - RNA, 21 nt, Human
uuacuuuugcaccaaccuaau

SEQ ID NO: 572174 - RNA, 22 nt, Human
cugccagcacugccuccugagg

SEQ ID NO: 572175 - RNA, 22 nt, Human
uugcugaaaacaguggguauug

SEQ ID NO: 572176 - RNA, 17 nt, Human
caguuucuucccccucu

SEQ ID NO: 572177 - RNA, 22 nt, Human
uaaguacauuugggaccaccug

SEQ ID NO: 572178 - RNA, 19 nt, Human
aaucagaaauaucgaggcc

SEQ ID NO: 572179 - RNA, 19 nt, Human
cucucagccugucuccuug

SEQ ID NO: 572180 - RNA, 17 nt, Human
gacaagacagaauucau

SEQ ID NO: 572181 - RNA, 22 nt, Human
ccuccuggcuuuucccauugaa

SEQ ID NO: 572182 - RNA, 22 nt, Human
cugaagagcaaaccaacuggac

SEQ ID NO: 572183 - RNA, 22 nt, Human
aacugcuuaucuuugguagaug

SEQ ID NO: 572184 - RNA, 22 nt, Human
cugcaggagcaagccugggaga

SEQ ID NO: 572185 - RNA, 22 nt, Human
uuucuucuugaguaaccagauu

SEQ ID NO: 572186 - RNA, 23 nt, Human
uuuuuaguuacaccucugccacc

SEQ ID NO: 572187 - RNA, 19 nt, Human
ugugggcaagggauggcag

SEQ ID NO: 572188 - RNA, 22 nt, Human
ggaaagagcccagcagugcuug

SEQ ID NO: 572189 - RNA, 20 nt, Human
cuccugggacugcugguuau

SEQ ID NO: 572190 - RNA, 22 nt, Human
aauguacaucucaguguaguac

SEQ ID NO: 572191 - RNA, 22 nt, Human
gaauagauccucauuuauugau

SEQ ID NO: 572192 - RNA, 22 nt, Human
cagcaacauauaugaaacugug

SEQ ID NO: 572193 - RNA, 22 nt, Human
uuggcagaggucucguuguggc

SEQ ID NO: 572194 - RNA, 22 nt, Human
ggagcuguguuauccauuccca

SEQ ID NO: 572195 - RNA, 17 nt, Human
ucaggcugugccuggua

SEQ ID NO: 572196 - RNA, 22 nt, Human
ucugagguccugugauuucucu

SEQ ID NO: 572197 - RNA, 20 nt, Human
gggugggagagucugagggu

SEQ ID NO: 572198 - RNA, 22 nt, Human
gagguggguguaucacagguca

SEQ ID NO: 572199 - RNA, 22 nt, Human
cgagcagaagccugguggucug

SEQ ID NO: 572200 - RNA, 22 nt, Human
cccagcuccuuguuugcaucuc

SEQ ID NO: 572201 - RNA, 22 nt, Human
agcugccagggacugggcaugg

SEQ ID NO: 572202 - RNA, 22 nt, Human
aucagcacaacguacagagaaa

SEQ ID NO: 572203 - RNA, 22 nt, Human
auguacaaaauguuuugaaaug

SEQ ID NO: 572204 - RNA, 22 nt, Human
agcagcauguugggaugugaaa

SEQ ID NO: 572205 - RNA, 22 nt, Human
guguuugucucuuggccuaccu

SEQ ID NO: 572206 - RNA, 22 nt, Human
ugggacagguuggagagaagca

SEQ ID NO: 572207 - RNA, 22 nt, Human
ucugggaacacuuugugagcuc

SEQ ID NO: 572208 - RNA, 22 nt, Human
uauuagaaaggcuauugcauag

SEQ ID NO: 572209 - RNA, 22 nt, Human
agauucauuauuaaugugaucu

SEQ ID NO: 572210 - RNA, 22 nt, Human
cuuccugcaggacagccaucug

SEQ ID NO: 572211 - RNA, 22 nt, Human
uuugaacaugcugcaugauaau

SEQ ID NO: 572212 - RNA, 22 nt, Human
uuauuuaaugugaucugaagag

SEQ ID NO: 572213 - RNA, 17 nt, Human
gcuuuccuugccccucc

SEQ ID NO: 572214 - RNA, 22 nt, Human
ugccccagaccuacugaauggg

SEQ ID NO: 572215 - RNA, 22 nt, Human
gccugggaacucugaucuccug

SEQ ID NO: 572216 - RNA, 22 nt, Human
cugggcuuucaggcccuaaggc

SEQ ID NO: 572217 - RNA, 22 nt, Human
agaaagguggaugcucuggaau

SEQ ID NO: 572218 - RNA, 22 nt, Human
gcaguccucauccuuuagcagu

SEQ ID NO: 572219 - RNA, 22 nt, Human
auugacaaaucugaacauacgg

SEQ ID NO: 572220 - RNA, 23 nt, Human
agcaggcaucuguggcacaaggc

SEQ ID NO: 572221 - RNA, 22 nt, Human
uuugauuuacuggauauucuca

SEQ ID NO: 572222 - RNA, 22 nt, Human
ccccagggaagcuuugcuuacu

SEQ ID NO: 572223 - RNA, 22 nt, Human
uggcacuguagccacuacugcc

SEQ ID NO: 572224 - RNA, 22 nt, Human
ccuuuuucaauauagaauugca

SEQ ID NO: 572225 - RNA, 22 nt, Human
cagggcucgcucgcucgcucgc

SEQ ID NO: 572226 - RNA, 22 nt, Human
acagagcaacuuuauuucaugg

SEQ ID NO: 572227 - RNA, 21 nt, Human
ugggugggcagagucucuuca

SEQ ID NO: 572228 - RNA, 22 nt, Human
aaaaguuuaagacucauucuag

SEQ ID NO: 572229 - RNA, 22 nt, Human
caugaacaauuugcucacugau

SEQ ID NO: 572230 - RNA, 19 nt, Human
caucuggaugauucuccug

SEQ ID NO: 572231 - RNA, 17 nt, Human
gcaguggagggguaguu

SEQ ID NO: 572232 - RNA, 22 nt, Human
guguggggcucagugggaaugu

SEQ ID NO: 572233 - RNA, 22 nt, Human
uaagguuucuucagauacuagu

SEQ ID NO: 572234 - RNA, 22 nt, Human
ucucagccucaccucuauggag

SEQ ID NO: 572235 - RNA, 22 nt, Human
ugaggcagggaguuuaauuguc

SEQ ID NO: 572236 - RNA, 22 nt, Human
uccuugagaggacagagccaua

SEQ ID NO: 572237 - RNA, 22 nt, Human
uucagaaacagagugagugagu

SEQ ID NO: 572238 - RNA, 22 nt, Human
acauacacaugaauauauuuuu

SEQ ID NO: 572239 - RNA, 22 nt, Human
ucuucuguauuguuaacucagg

SEQ ID NO: 572240 - RNA, 22 nt, Human
aaaucagagucugauuuuaagg

SEQ ID NO: 572241 - RNA, 22 nt, Human
ugaaaugucaguguuuuauaag

SEQ ID NO: 572242 - RNA, 22 nt, Human
cagaggcagugggguugcuccu

SEQ ID NO: 572243 - RNA, 22 nt, Human
aagacacuuucuaaauagaagu

SEQ ID NO: 572244 - RNA, 22 nt, Human
gugcagcugugguggagccagg

SEQ ID NO: 572245 - RNA, 22 nt, Human
cugggccuuaugaguaccugga

SEQ ID NO: 572246 - RNA, 22 nt, Human
gaaggcacugaacuccuucugg

SEQ ID NO: 572247 - RNA, 22 nt, Human
uguaaguaguaauggaaggaca

SEQ ID NO: 572248 - RNA, 22 nt, Human
aaacucaugccauuaauccuuu

SEQ ID NO: 572249 - RNA, 22 nt, Human
cacaagggagcuuagaaaacau

SEQ ID NO: 572250 - RNA, 22 nt, Human
ggugcucaagagggcauccucu

SEQ ID NO: 572251 - RNA, 22 nt, Human
ucaggcagaaaaaucacuaauu

SEQ ID NO: 572252 - RNA, 22 nt, Human
uugaggucuucaggaucaggcu

SEQ ID NO: 572253 - RNA, 22 nt, Human
uucuccucuacauagacugugc

SEQ ID NO: 572254 - RNA, 22 nt, Human
uuguuuuaaugagggagguuga

SEQ ID NO: 572255 - RNA, 22 nt, Human
guuucuccucugugucuuguuu

SEQ ID NO: 572256 - RNA, 22 nt, Human
uggggcagaguaggauuuuggc

SEQ ID NO: 572257 - RNA, 22 nt, Human
uaaggaggcagucauuaucagg

SEQ ID NO: 572258 - RNA, 19 nt, Human
acauggcaucccaggaggu

SEQ ID NO: 572259 - RNA, 22 nt, Human
uguuaaaaccacaggugaggac

SEQ ID NO: 572260 - RNA, 22 nt, Human
ugaaagcauuagucuaagguag

SEQ ID NO: 572261 - RNA, 22 nt, Human
agagccugugauugucaucacc

SEQ ID NO: 572262 - RNA, 18 nt, Human
cccagugcucacugccuc

SEQ ID NO: 572263 - RNA, 22 nt, Human
gagggagcuaugaauagaagaa

SEQ ID NO: 572264 - RNA, 22 nt, Human
acagagguaggacaugagauau

SEQ ID NO: 572265 - RNA, 23 nt, Human
acugcuuuauucaugaggcucuc

SEQ ID NO: 572266 - RNA, 22 nt, Human
cccaggaggcggagguuguggu

SEQ ID NO: 572267 - RNA, 22 nt, Human
agguuuguuuauguaucauugg

SEQ ID NO: 572268 - RNA, 22 nt, Human
agaagauguugcaguugaugcg

SEQ ID NO: 572269 - RNA, 22 nt, Human
ucagugcagaauagugaugcau

SEQ ID NO: 572270 - RNA, 22 nt, Human
agacucugaggagcccugagac

SEQ ID NO: 572271 - RNA, 22 nt, Human
gugguguaggucacaguuagga

SEQ ID NO: 572272 - RNA, 22 nt, Human
cugggccuagcaacagaggagu

SEQ ID NO: 572273 - RNA, 22 nt, Human
caaacuguucucugugggauuc

SEQ ID NO: 572274 - RNA, 22 nt, Human
uuucuagucagccauaucuagu

SEQ ID NO: 572275 - RNA, 20 nt, Human
gaugucuuggucacaguggc

SEQ ID NO: 572276 - RNA, 22 nt, Human
uugucugaauucuucuaggcag

SEQ ID NO: 572277 - RNA, 19 nt, Human
agccagaguggcccagggg

SEQ ID NO: 572278 - RNA, 22 nt, Human
ucaguaacuuacuuauucaccu

SEQ ID NO: 572279 - RNA, 22 nt, Human
aggccaggcaacauucugaagu

SEQ ID NO: 572280 - RNA, 19 nt, Human
aguguuucaugugcuuuua

SEQ ID NO: 572281 - RNA, 22 nt, Human
ucauauuaggguaaugauaaga

SEQ ID NO: 572282 - RNA, 22 nt, Human
ucuugggauugcccugcaguuc

SEQ ID NO: 572283 - RNA, 22 nt, Human
cacagcagaaaguguaggagga

SEQ ID NO: 572284 - RNA, 22 nt, Human
cacaugcccagaacuucucauu

SEQ ID NO: 572285 - RNA, 22 nt, Human
aaagucuuuauuuuguaucuuu

SEQ ID NO: 572286 - RNA, 22 nt, Human
uaucuauuccaaauaucagcgu

SEQ ID NO: 572287 - RNA, 22 nt, Human
cuauuaaacacuacugugcacu

SEQ ID NO: 572288 - RNA, 22 nt, Human
cagcauggggcuuggagucagc

SEQ ID NO: 572289 - RNA, 22 nt, Human
caaaugaagggagcugaagucu

SEQ ID NO: 572290 - RNA, 22 nt, Human
agcuuuuauuggcugucauuug

SEQ ID NO: 572291 - RNA, 22 nt, Human
guucuccuuguggcugcagcag

SEQ ID NO: 572292 - RNA, 22 nt, Human
aggaaggguucuuugugaaaga

SEQ ID NO: 572293 - RNA, 22 nt, Human
uauuucuuucagguauguguug

SEQ ID NO: 572294 - RNA, 22 nt, Human
ucugucacccagagugcagugg

SEQ ID NO: 572295 - RNA, 22 nt, Human
guccuuauuucacuuaaacgua

SEQ ID NO: 572296 - RNA, 22 nt, Human
agcuucuucuuggucuuuccca

SEQ ID NO: 572297 - RNA, 22 nt, Human
ggagugaaguggcgcgaucucg

SEQ ID NO: 572298 - RNA, 22 nt, Human
aagauucacagagugaaugaaa

SEQ ID NO: 572299 - RNA, 22 nt, Human
aagcuuuggagaggcgggcagg

SEQ ID NO: 572300 - RNA, 22 nt, Human
gaggaccacagaugagccugca

SEQ ID NO: 572301 - RNA, 22 nt, Human
gcccccuugaccuaaucaccuu

SEQ ID NO: 572302 - RNA, 22 nt, Human
caggagguuguaagagcaggcc

SEQ ID NO: 572303 - RNA, 20 nt, Human
aaaugcuuuugacacauauu

SEQ ID NO: 572304 - RNA, 22 nt, Human
uugcauagugcugagguucggg

SEQ ID NO: 572305 - RNA, 22 nt, Human
gcaggaagaugagcucagguaa

SEQ ID NO: 572306 - RNA, 22 nt, Human
ugggcuccuugggagcaaguga

SEQ ID NO: 572307 - RNA, 22 nt, Human
ggucccagaauugguuagcaca

SEQ ID NO: 572308 - RNA, 22 nt, Human
aggugcugggcagcagucauug

SEQ ID NO: 572309 - RNA, 22 nt, Human
uggagcagagaugguggccuuc

SEQ ID NO: 572310 - RNA, 22 nt, Human
gggccugcuccccaucgcugcu

SEQ ID NO: 572311 - RNA, 23 nt, Human
agacacuguaaagaauugcaguu

SEQ ID NO: 572312 - RNA, 19 nt, Human
gccugcagaaaaggcaggg

SEQ ID NO: 572313 - RNA, 22 nt, Human
aacagugucaggauuacagaua

SEQ ID NO: 572314 - RNA, 22 nt, Human
ucugaaauauugguaauacuuu

SEQ ID NO: 572315 - RNA, 22 nt, Human
uccccaggaaauucugauucuu

SEQ ID NO: 572316 - RNA, 22 nt, Human
ggcacauguaugugggagugug

SEQ ID NO: 572317 - RNA, 22 nt, Human
auuuuagcaguucucuaauuuc

SEQ ID NO: 572318 - RNA, 23 nt, Human
uggagggcagaauaacagacuac

SEQ ID NO: 572319 - RNA, 22 nt, Human
caggacaguauaggcuuuagga

SEQ ID NO: 572320 - RNA, 22 nt, Human
cugggacuugaugaaaugacug

SEQ ID NO: 572321 - RNA, 22 nt, Human
augcuaaauucagacaggguua

SEQ ID NO: 572322 - RNA, 22 nt, Human
aaggccuucucuugugucugug

SEQ ID NO: 572323 - RNA, 22 nt, Human
agaugcugcuccacaggccagg

SEQ ID NO: 572324 - RNA, 17 nt, Human
aaccagcuguccccucc

SEQ ID NO: 572325 - RNA, 17 nt, Human
cagaggagcuuuggggg

SEQ ID NO: 572326 - RNA, 22 nt, Human
acuggccaggagcuggaaauac

SEQ ID NO: 572327 - RNA, 22 nt, Human
ucagcagggagaggagaaugca

SEQ ID NO: 572328 - RNA, 22 nt, Human
cuggccaauauagggaaaucuu

SEQ ID NO: 572329 - RNA, 22 nt, Human
uaagacauccguugcuuauaau

SEQ ID NO: 572330 - RNA, 22 nt, Human
ggcuccuggaggcaccacuggu

SEQ ID NO: 572331 - RNA, 22 nt, Human
ucugcugaggugguuuuagaga

SEQ ID NO: 572332 - RNA, 22 nt, Human
ggagauggccaaaaacacaaau

SEQ ID NO: 572333 - RNA, 22 nt, Human
gcuugccuaucugguggucguu

SEQ ID NO: 572334 - RNA, 21 nt, Human
gagaaucuguuuucuugucuu

SEQ ID NO: 572335 - RNA, 22 nt, Human
agccuaggguucugaugucacu

SEQ ID NO: 572336 - RNA, 22 nt, Human
ucccaggaaaacacucgaggac

SEQ ID NO: 572337 - RNA, 22 nt, Human
ugcuccagcaccaagagcucca

SEQ ID NO: 572338 - RNA, 22 nt, Human
agggcuccgggcaggcgaugga

SEQ ID NO: 572339 - RNA, 22 nt, Human
ugugaagauuuggcaugcagaa

SEQ ID NO: 572340 - RNA, 22 nt, Human
gcuccuggcucuggccaaggga

SEQ ID NO: 572341 - RNA, 22 nt, Human
cccugcccaucggggcggccug

SEQ ID NO: 572342 - RNA, 22 nt, Human
cugggccagucucggccgcucu

SEQ ID NO: 572343 - RNA, 22 nt, Human
cagcaccucugggucuugucuu

SEQ ID NO: 572344 - RNA, 22 nt, Human
uucuuacuaguauguuucagca

SEQ ID NO: 572345 - RNA, 22 nt, Human
ggagccuggcccggcccuuggc

SEQ ID NO: 572346 - RNA, 22 nt, Human
acauuuaaauaugccuuauauu

SEQ ID NO: 572347 - RNA, 22 nt, Human
cucaggagguuuccugucuagg

SEQ ID NO: 572348 - RNA, 22 nt, Human
gaggagcuggcagcgucuccgc

SEQ ID NO: 572349 - RNA, 22 nt, Human
uccuggaggggacagcaugggc

SEQ ID NO: 572350 - RNA, 22 nt, Human
aaggccaggcagggagcuguga

SEQ ID NO: 572351 - RNA, 22 nt, Human
ccagcucaagcacugugugaag

SEQ ID NO: 572352 - RNA, 22 nt, Human
gucauugagucgucagagucuu

SEQ ID NO: 572353 - RNA, 22 nt, Human
uucacugugauggugcagaggc

SEQ ID NO: 572354 - RNA, 22 nt, Human
ucauaaagcuugccugcagugu

SEQ ID NO: 572355 - RNA, 22 nt, Human
ugggccugacucaccugccucc

SEQ ID NO: 572356 - RNA, 22 nt, Human
ugaucuccugaccuuguaaucc

SEQ ID NO: 572357 - RNA, 19 nt, Human
gccugccuggguuucugag

SEQ ID NO: 572358 - RNA, 22 nt, Human
cuggccugggagcugcuagcgu

SEQ ID NO: 572359 - RNA, 22 nt, Human
aaauucuaaggucacaauguug

SEQ ID NO: 572360 - RNA, 22 nt, Human
ugaaauguguccauguuauuuc

SEQ ID NO: 572361 - RNA, 22 nt, Human
acaucuuugcucuuauagagcu

SEQ ID NO: 572362 - RNA, 18 nt, Human
uuuauauggauagagacc

SEQ ID NO: 572363 - RNA, 22 nt, Human
cacagcagaaauaugaaggcag

SEQ ID NO: 572364 - RNA, 22 nt, Human
guucagcaagaauguuucuauu

SEQ ID NO: 572365 - RNA, 22 nt, Human
gaagacaauucuggguggagga

SEQ ID NO: 572366 - RNA, 22 nt, Human
ucuccugguacccuuccuagca

SEQ ID NO: 572367 - RNA, 22 nt, Human
cggggagggcagaggcucccuc

SEQ ID NO: 572368 - RNA, 22 nt, Human
ucagauggcacacagagccugc

SEQ ID NO: 572369 - RNA, 22 nt, Human
acagagucauucacugaugaag

SEQ ID NO: 572370 - RNA, 22 nt, Human
cauacauuaccuaacuuaaugc

SEQ ID NO: 572371 - RNA, 22 nt, Human
aggacacacuucugaggucuuu

SEQ ID NO: 572372 - RNA, 22 nt, Human
ugugaaaugcuauuuccaugag

SEQ ID NO: 572373 - RNA, 22 nt, Human
aagaaauuaaggaaugcaacga

SEQ ID NO: 572374 - RNA, 22 nt, Human
aucagaaucuucugaacagugg

SEQ ID NO: 572375 - RNA, 22 nt, Human
auuaggauguguauauuguguu

SEQ ID NO: 572376 - RNA, 23 nt, Human
cagcucagaguguguccuguuuc

SEQ ID NO: 572377 - RNA, 22 nt, Human
ucugcagacuugccuaagugug

SEQ ID NO: 572378 - RNA, 22 nt, Human
cuggagagggagcuguuggaag

SEQ ID NO: 572379 - RNA, 22 nt, Human
auuuauuaugggauuuggcuca

SEQ ID NO: 572380 - RNA, 21 nt, Human
uggcucugcucagagcagucc

SEQ ID NO: 572381 - RNA, 22 nt, Human
caguggcuucuuccuagagcca

SEQ ID NO: 572382 - RNA, 22 nt, Human
cagcugcacugaagcagguuug

SEQ ID NO: 572383 - RNA, 22 nt, Human
uaacaauggaguuuugagaaag

SEQ ID NO: 572384 - RNA, 22 nt, Human
uaaugcuuccuauauagcacuc

SEQ ID NO: 572385 - RNA, 22 nt, Human
ugcuuaaauuucagcagcuuaa

SEQ ID NO: 572386 - RNA, 22 nt, Human
caguuaaauucuccaguuacca

SEQ ID NO: 572387 - RNA, 22 nt, Human
ggccuuggaguccuccacugga

SEQ ID NO: 572388 - RNA, 22 nt, Human
uggggccugagguggagcugca

SEQ ID NO: 572389 - RNA, 22 nt, Human
aggaagccaugguggacgucua

SEQ ID NO: 572390 - RNA, 22 nt, Human
acccagggcuuaaggcggugca

SEQ ID NO: 572391 - RNA, 22 nt, Human
uccagcucuaacaugcugggcc

SEQ ID NO: 572392 - RNA, 22 nt, Human
ggaggggcaggucccaaguugu

SEQ ID NO: 572393 - RNA, 21 nt, Human
uguucacauggagcagaaugu

SEQ ID NO: 572394 - RNA, 22 nt, Human
uuacauucagaaagauuugagu

SEQ ID NO: 572395 - RNA, 22 nt, Human
gugcccugcaugccccggguau

SEQ ID NO: 572396 - RNA, 23 nt, Human
ugucccagagggagggauaggcu

SEQ ID NO: 572397 - RNA, 22 nt, Human
uuuuauacuuaagacagaguuu

SEQ ID NO: 572398 - RNA, 22 nt, Human
gcacuggaaauaccuagaugaa

SEQ ID NO: 572399 - RNA, 20 nt, Human
augggcugguuaggaagugu

SEQ ID NO: 572400 - RNA, 22 nt, Human
agagaagagcaaugauaaauuu

SEQ ID NO: 572401 - RNA, 22 nt, Human
agcagacaacccagaugaccca

SEQ ID NO: 572402 - RNA, 22 nt, Human
caggagugcagguggugaggca

SEQ ID NO: 572403 - RNA, 22 nt, Human
ccugugggagguucugugaguc

SEQ ID NO: 572404 - RNA, 22 nt, Human
ucagaggagggacucagaccca

SEQ ID NO: 572405 - RNA, 22 nt, Human
gccaggcagagccccgugcagc

SEQ ID NO: 572406 - RNA, 22 nt, Human
ggcugccauaacugauaccaua

SEQ ID NO: 572407 - RNA, 22 nt, Human
cugugcugagugaugugacuua

SEQ ID NO: 572408 - RNA, 22 nt, Human
ggccagugugcaggucagagau

SEQ ID NO: 572409 - RNA, 20 nt, Human
cugggaggucuuccaaauca

SEQ ID NO: 572410 - RNA, 22 nt, Human
cuggagggacaagguaugcauu

SEQ ID NO: 572411 - RNA, 22 nt, Human
ucucugcccaaguuucucaagu

SEQ ID NO: 572412 - RNA, 22 nt, Human
aaugucauugugaguuaggcuu

SEQ ID NO: 572413 - RNA, 22 nt, Human
cauaaucagauguguacauaag

SEQ ID NO: 572414 - RNA, 20 nt, Human
cccugcagccaugggagugg

SEQ ID NO: 572415 - RNA, 22 nt, Human
uuggcugagagcugcucugcag

SEQ ID NO: 572416 - RNA, 18 nt, Human
uagaggggaagaccuuua

SEQ ID NO: 572417 - RNA, 22 nt, Human
ugacauaaaucuaaaggaaagg

SEQ ID NO: 572418 - RNA, 23 nt, Human
gaggcagcuccugcagugcccug

SEQ ID NO: 572419 - RNA, 22 nt, Human
gcagagccaggcuggggcaggu

SEQ ID NO: 572420 - RNA, 22 nt, Human
cugugcccuggccaggccucuc

SEQ ID NO: 572421 - RNA, 22 nt, Human
ggcagcuguaagaugagugaau

SEQ ID NO: 572422 - RNA, 22 nt, Human
aaagcacuauagccaaauagcc

SEQ ID NO: 572423 - RNA, 22 nt, Human
uuucucaacagaguaugcccuu

SEQ ID NO: 572424 - RNA, 22 nt, Human
aagauguaucaguuaagucuuc

SEQ ID NO: 572425 - RNA, 22 nt, Human
agggcacagccuaaagccuaug

SEQ ID NO: 572426 - RNA, 22 nt, Human
auucugcaugguggugucucug

SEQ ID NO: 572427 - RNA, 22 nt, Human
agaagcauuggaccaggggccc

SEQ ID NO: 572428 - RNA, 22 nt, Human
cuguauaaacauauuuucaagu

SEQ ID NO: 572429 - RNA, 22 nt, Human
guguuuuauggagucauaacgu

SEQ ID NO: 572430 - RNA, 21 nt, Human
uagcuuccagcucaagcugag

SEQ ID NO: 572431 - RNA, 22 nt, Human
gcuguggcuccaauggugagcc

SEQ ID NO: 572432 - RNA, 22 nt, Human
aaacuguaaauacuaguaagug

SEQ ID NO: 572433 - RNA, 22 nt, Human
ccucccauggagcucuguccau

SEQ ID NO: 572434 - RNA, 20 nt, Human
auccaggauguugauuugaa

SEQ ID NO: 572435 - RNA, 22 nt, Human
agcaagcacacuucaugugaac

SEQ ID NO: 572436 - RNA, 22 nt, Human
uaaagcuaugcuuaauuuauca

SEQ ID NO: 572437 - RNA, 22 nt, Human
gggcuggucuggcuuagucagg

SEQ ID NO: 572438 - RNA, 22 nt, Human
uguauuuucugaagauaaucaa

SEQ ID NO: 572439 - RNA, 22 nt, Human
uguuccuguuucugcguaguuu

SEQ ID NO: 572440 - RNA, 22 nt, Human
ccucuggcaagugauuuaucau

SEQ ID NO: 572441 - RNA, 22 nt, Human
aggguagggccguagggccaug

SEQ ID NO: 572442 - RNA, 21 nt, Human
ccagugcuacagcugccugac

SEQ ID NO: 572443 - RNA, 22 nt, Human
aacacuguggucuuuucaguaa

SEQ ID NO: 572444 - RNA, 19 nt, Human
ugagacagaagaugagccu

SEQ ID NO: 572445 - RNA, 22 nt, Human
cagagguauugcaaaagccuag

SEQ ID NO: 572446 - RNA, 22 nt, Human
cuggcuuugaaaugcauuucag

SEQ ID NO: 572447 - RNA, 22 nt, Human
ucugaggaauucugcagugaga

SEQ ID NO: 572448 - RNA, 22 nt, Human
aauuacagucggagcagcacug

SEQ ID NO: 572449 - RNA, 22 nt, Human
agaaagacaaaaugcaguggcu

SEQ ID NO: 572450 - RNA, 22 nt, Human
aaaugacacuaggcuuuuugca

SEQ ID NO: 572451 - RNA, 22 nt, Human
gaugggauuuuuuauguguuca

SEQ ID NO: 572452 - RNA, 22 nt, Human
uacacugaaagagaggauugaa

SEQ ID NO: 572453 - RNA, 22 nt, Human
gucccuuccucauuccacuuua

SEQ ID NO: 572454 - RNA, 22 nt, Human
gagcaggacagcagcuuccugg

SEQ ID NO: 572455 - RNA, 22 nt, Human
uacaucauaauaauacuuagaa

SEQ ID NO: 572456 - RNA, 22 nt, Human
ucaugugucugccaguguuuau

SEQ ID NO: 572457 - RNA, 22 nt, Human
cugagaguguggcuuccaggcc

SEQ ID NO: 572458 - RNA, 22 nt, Human
ucuguggcugucuuuccagagg

SEQ ID NO: 572459 - RNA, 22 nt, Human
aggggagguguccccaaaucuc

SEQ ID NO: 572460 - RNA, 22 nt, Human
auagaauuacaguguguuugga

SEQ ID NO: 572461 - RNA, 22 nt, Human
cagcagcagagauacugguuuc

SEQ ID NO: 572462 - RNA, 20 nt, Human
acaaagacuggaaaagcaag

SEQ ID NO: 572463 - RNA, 22 nt, Human
cccacugagccuauacaaacag

SEQ ID NO: 572464 - RNA, 22 nt, Human
uguuuucauuugauguaacaaa

SEQ ID NO: 572465 - RNA, 22 nt, Human
uggagcugacucacaccagcua

SEQ ID NO: 572466 - RNA, 22 nt, Human
cacuguccaauagauacauaau

SEQ ID NO: 572467 - RNA, 22 nt, Human
ggagccuggccuggcucugugu

SEQ ID NO: 572468 - RNA, 22 nt, Human
uucuggaauauuugacacaauu

SEQ ID NO: 572469 - RNA, 22 nt, Human
ggaagccagagugcugggcagg

SEQ ID NO: 572470 - RNA, 22 nt, Human
aaugagcuagaccugcuuccuc

SEQ ID NO: 572471 - RNA, 23 nt, Human
uugggcucaguggcaggaagagu

SEQ ID NO: 572472 - RNA, 22 nt, Human
uggcucagagagggagugugga

SEQ ID NO: 572473 - RNA, 22 nt, Human
aaccagcuaacauguggaauga

SEQ ID NO: 572474 - RNA, 22 nt, Human
gcccaggaucugcucagaucau

SEQ ID NO: 572475 - RNA, 19 nt, Human
ccccaggguaggcuagggg

SEQ ID NO: 572476 - RNA, 17 nt, Human
ucugucuugacugucac

SEQ ID NO: 572477 - RNA, 22 nt, Human
uaguuucuagucaaucuucuuu

SEQ ID NO: 572478 - RNA, 22 nt, Human
aggcgcugcgcuggggccagaa

SEQ ID NO: 572479 - RNA, 22 nt, Human
cuuuaauucucaggugcacaua

SEQ ID NO: 572480 - RNA, 22 nt, Human
uguguucaguaugacauucaca

SEQ ID NO: 572481 - RNA, 22 nt, Human
augcacugggugaggaaggaga

SEQ ID NO: 572482 - RNA, 22 nt, Human
auuuuguuauagaacucuguga

SEQ ID NO: 572483 - RNA, 22 nt, Human
auuuccuugcaacuuaggcaug

SEQ ID NO: 572484 - RNA, 20 nt, Human
uccaggcuccuccacuuagu

SEQ ID NO: 572485 - RNA, 22 nt, Human
gggcagcugccccucucugggc

SEQ ID NO: 572486 - RNA, 22 nt, Human
aagucagagcaacugagacauu

SEQ ID NO: 572487 - RNA, 23 nt, Human
agcuucgccuuccuuucucugca

SEQ ID NO: 572488 - RNA, 22 nt, Human
ccugggcucaagugauccuccu

SEQ ID NO: 572489 - RNA, 22 nt, Human
gcuccuggauguucaagucggc

SEQ ID NO: 572490 - RNA, 22 nt, Human
caggcuggagugcaguugugca

SEQ ID NO: 572491 - RNA, 22 nt, Human
cccugaggaccaggaaggaggg

SEQ ID NO: 572492 - RNA, 22 nt, Human
cuccagguagcuaaguccuggg

SEQ ID NO: 572493 - RNA, 18 nt, Human
cucuuucuuuggcacaaa

SEQ ID NO: 572494 - RNA, 22 nt, Human
cccuggccccucacuccgaggc

SEQ ID NO: 572495 - RNA, 22 nt, Human
cuggccucagagggucauggug

SEQ ID NO: 572496 - RNA, 22 nt, Human
ucaggcucaggaauguguuuau

SEQ ID NO: 572497 - RNA, 22 nt, Human
cuauacaucccaauuucagaga

SEQ ID NO: 572498 - RNA, 22 nt, Human
uaaaugcaguuaguacuugcca

SEQ ID NO: 572499 - RNA, 22 nt, Human
aagcagaaaaacugagcuccaa

SEQ ID NO: 572500 - RNA, 22 nt, Human
auuagaaugaaguauaggauuu

SEQ ID NO: 572501 - RNA, 22 nt, Human
gugggcagguaggcaccagcua

SEQ ID NO: 572502 - RNA, 20 nt, Human
ugggcugaggaucaggugcc

SEQ ID NO: 572503 - RNA, 17 nt, Human
uuucuccuuccaucuca

SEQ ID NO: 572504 - RNA, 20 nt, Human
gaauuuuaugaacacuacca

SEQ ID NO: 572505 - RNA, 22 nt, Human
auguagauuugcuucuccugcc

SEQ ID NO: 572506 - RNA, 22 nt, Human
gagugggggguccgucucagug

SEQ ID NO: 572507 - RNA, 22 nt, Human
agcuccagaagccugcaaggua

SEQ ID NO: 572508 - RNA, 22 nt, Human
ucuggcuugcuggcuugguccc

SEQ ID NO: 572509 - RNA, 22 nt, Human
uaaagcuagaauuguuccagca

SEQ ID NO: 572510 - RNA, 22 nt, Human
uuaugggagcaauuggggaggu

SEQ ID NO: 572511 - RNA, 22 nt, Human
agcaggcuccuuccuucucugg

SEQ ID NO: 572512 - RNA, 22 nt, Human
acacuagcuaaaugcugauuaa

SEQ ID NO: 572513 - RNA, 22 nt, Human
ugccaggcuaaguggaggacuu

SEQ ID NO: 572514 - RNA, 18 nt, Human
auguauguacauauuuau

SEQ ID NO: 572515 - RNA, 18 nt, Human
auuuugaacugggaauau

SEQ ID NO: 572516 - RNA, 22 nt, Human
caggaccuaacucaccugucuc

SEQ ID NO: 572517 - RNA, 22 nt, Human
ccagcugcgggcaucgagaguu

SEQ ID NO: 572518 - RNA, 22 nt, Human
gaggaaagagucaaaucugaag

SEQ ID NO: 572519 - RNA, 22 nt, Human
uuauguuugaguauaugacuca

SEQ ID NO: 572520 - RNA, 22 nt, Human
ccaggaggcagagguuguagug

SEQ ID NO: 572521 - RNA, 22 nt, Human
auucucauuuuuauagaugaga

SEQ ID NO: 572522 - RNA, 22 nt, Human
gagaggcuggguuggagaucga

SEQ ID NO: 572523 - RNA, 22 nt, Human
uccuacaaugcacagaauagcc

SEQ ID NO: 572524 - RNA, 22 nt, Human
augcaugugugagagcaagagg

SEQ ID NO: 572525 - RNA, 22 nt, Human
caggccucuauggucagcugag

SEQ ID NO: 572526 - RNA, 22 nt, Human
auuugcaugaccuuugcaagug

SEQ ID NO: 572527 - RNA, 22 nt, Human
auucagcacaucuuuguacagc

SEQ ID NO: 572528 - RNA, 22 nt, Human
auaucauaaaucggugcaugaa

SEQ ID NO: 572529 - RNA, 22 nt, Human
gcuaaggccuuaacucauggag

SEQ ID NO: 572530 - RNA, 22 nt, Human
ucuggggaugagguccagugau

SEQ ID NO: 572531 - RNA, 22 nt, Human
ggugccagccuagugcaguggu

SEQ ID NO: 572532 - RNA, 22 nt, Human
aaggccacugaagaaaucacaa

SEQ ID NO: 572533 - RNA, 22 nt, Human
ccaggacagggagacgggagcc

SEQ ID NO: 572534 - RNA, 22 nt, Human
uuuggacaaguuacugguuucc

SEQ ID NO: 572535 - RNA, 22 nt, Human
acauuuuuauucaucaaagcag

SEQ ID NO: 572536 - RNA, 22 nt, Human
ccucugaggucauggacuuggc

SEQ ID NO: 572537 - RNA, 22 nt, Human
auguacaguggaaacuaacaaa

SEQ ID NO: 572538 - RNA, 20 nt, Human
gcuggaagggcuagagggcu

SEQ ID NO: 572539 - RNA, 22 nt, Human
ccagggcagcagaauuggggca

SEQ ID NO: 572540 - RNA, 22 nt, Human
gggucuccugagagaagaugcu

SEQ ID NO: 572541 - RNA, 22 nt, Human
uguguacaggccuugcuagacu

SEQ ID NO: 572542 - RNA, 22 nt, Human
uccacauucucuguuacagaua

SEQ ID NO: 572543 - RNA, 22 nt, Human
cugagcugcaguccuggcucug

SEQ ID NO: 572544 - RNA, 22 nt, Human
gguacagggcuuccuggacaag

SEQ ID NO: 572545 - RNA, 22 nt, Human
cccaagaucuuucgugcacuaa

SEQ ID NO: 572546 - RNA, 22 nt, Human
auuugcugaucaucuagcuaau

SEQ ID NO: 572547 - RNA, 22 nt, Human
uuucaaauggagucgugaaaug

SEQ ID NO: 572548 - RNA, 22 nt, Human
aagacaauccuggacagucagc

SEQ ID NO: 572549 - RNA, 22 nt, Human
aaguuuaacuugaauucuuucu

SEQ ID NO: 572550 - RNA, 22 nt, Human
cacaggcugcccgcagcuggga

SEQ ID NO: 572551 - RNA, 22 nt, Human
aguguuuccugaguguuaucau

SEQ ID NO: 572552 - RNA, 22 nt, Human
uggucaacaggcagggaugaaa

SEQ ID NO: 572553 - RNA, 22 nt, Human
ggccucagugggccgcugcagg

SEQ ID NO: 572554 - RNA, 22 nt, Human
ugcuuaaaguaguggauuguua

SEQ ID NO: 572555 - RNA, 22 nt, Human
cagcugugauaugccugccuga

SEQ ID NO: 572556 - RNA, 22 nt, Human
ccagcccuguaaggaugaggca

SEQ ID NO: 572557 - RNA, 22 nt, Human
gccuggcucugaguuucucucc

SEQ ID NO: 572558 - RNA, 22 nt, Human
cucagggaagcuauggugaggg

SEQ ID NO: 572559 - RNA, 21 nt, Human
cgcuccaccccacccacuggc

SEQ ID NO: 572560 - RNA, 22 nt, Human
aucuuuguugcucucauuucug

SEQ ID NO: 572561 - RNA, 23 nt, Human
uuucuucucgaagagggagcuua

SEQ ID NO: 572562 - RNA, 22 nt, Human
guuauugagguggagucucacu

SEQ ID NO: 572563 - RNA, 23 nt, Human
uccaggagcaugcuggcuggcga

SEQ ID NO: 572564 - RNA, 22 nt, Human
guccugggagaugggacccuga

SEQ ID NO: 572565 - RNA, 22 nt, Human
auuguacaugcagugagucauc

SEQ ID NO: 572566 - RNA, 22 nt, Human
augauauagagaguagauuaaa

SEQ ID NO: 572567 - RNA, 22 nt, Human
gacccugagcaaaagcaguucu

SEQ ID NO: 572568 - RNA, 22 nt, Human
gccugcagggccugggccuacc

SEQ ID NO: 572569 - RNA, 22 nt, Human
agcagcuauuucuuccagagag

SEQ ID NO: 572570 - RNA, 22 nt, Human
uagaauaguguuuucauuaugg

SEQ ID NO: 572571 - RNA, 22 nt, Human
ggagggccaucuugggugugau

SEQ ID NO: 572572 - RNA, 22 nt, Human
cccuggugguacggcacuggca

SEQ ID NO: 572573 - RNA, 22 nt, Human
agugucugaaccaccggggcau

SEQ ID NO: 572574 - RNA, 22 nt, Human
ucccagauuguugauggcuuaa

SEQ ID NO: 572575 - RNA, 22 nt, Human
aaauacuguuuuauuccaugau

SEQ ID NO: 572576 - RNA, 22 nt, Human
ugcacacauguuuacaagcauc

SEQ ID NO: 572577 - RNA, 22 nt, Human
cugagcugguggaagcaugcag

SEQ ID NO: 572578 - RNA, 22 nt, Human
uuuacucuugcuacacaacugu

SEQ ID NO: 572579 - RNA, 22 nt, Human
aacuaaaacugguuuguucucu

SEQ ID NO: 572580 - RNA, 22 nt, Human
ucuccugauaucugcagaccua

SEQ ID NO: 572581 - RNA, 23 nt, Human
gccugggacugguagugugaccu

SEQ ID NO: 572582 - RNA, 22 nt, Human
uuuuauauugagugagaguucc

SEQ ID NO: 572583 - RNA, 21 nt, Human
ucuggagcccuaagcugagaa

SEQ ID NO: 572584 - RNA, 22 nt, Human
augcauguuaagcucuuaaaau

SEQ ID NO: 572585 - RNA, 22 nt, Human
cggaggcaaacucaccuggcuc

SEQ ID NO: 572586 - RNA, 22 nt, Human
cugcugucaaaggaaauauuug

SEQ ID NO: 572587 - RNA, 22 nt, Human
guugugcagaagugccucagua

SEQ ID NO: 572588 - RNA, 22 nt, Human
cagcucuuaacacagcuuguau

SEQ ID NO: 572589 - RNA, 22 nt, Human
auauuacauaaacaugagugaa

SEQ ID NO: 572590 - RNA, 22 nt, Human
agguagaagagcaaggaauaac

SEQ ID NO: 572591 - RNA, 22 nt, Human
aggcccuguccauggugcugaa

SEQ ID NO: 572592 - RNA, 22 nt, Human
uccauccauguaggaagauggu

SEQ ID NO: 572593 - RNA, 22 nt, Human
uccgauaagcaauucuugugcu

SEQ ID NO: 572594 - RNA, 22 nt, Human
gccugccuggagcuugagguga

SEQ ID NO: 572595 - RNA, 22 nt, Human
cagaaaugacaaaguaagagga

SEQ ID NO: 572596 - RNA, 22 nt, Human
agcugcugagccaggcugaugu

SEQ ID NO: 572597 - RNA, 22 nt, Human
cugagcuguuacucuguccucg

SEQ ID NO: 572598 - RNA, 22 nt, Human
ucuuagaaacuguaucgauuag

SEQ ID NO: 572599 - RNA, 22 nt, Human
ucaggacagggaucacaucauc

SEQ ID NO: 572600 - RNA, 22 nt, Human
gucuuucugccaugugaagaga

SEQ ID NO: 572601 - RNA, 22 nt, Human
ugaguucucaugaaaucuaguu

SEQ ID NO: 572602 - RNA, 22 nt, Human
gcuggggccucugugagguuaa

SEQ ID NO: 572603 - RNA, 19 nt, Human
ugcauaaauuauauacuuu

SEQ ID NO: 572604 - RNA, 22 nt, Human
gucuccugaggcauccauugaa

SEQ ID NO: 572605 - RNA, 22 nt, Human
guccucuguagggcugggccac

SEQ ID NO: 572606 - RNA, 22 nt, Human
acuggacagaggaaauauggag

SEQ ID NO: 572607 - RNA, 22 nt, Human
acagcaaaagacaagaacuuaa

SEQ ID NO: 572608 - RNA, 22 nt, Human
ugagaauuuuuggcagaaacaa

SEQ ID NO: 572609 - RNA, 18 nt, Human
ccacagcagaguucuuac

SEQ ID NO: 572610 - RNA, 22 nt, Human
aagacauguuuuaagaauauuu

SEQ ID NO: 572611 - RNA, 18 nt, Human
cagaggagagacauucag

SEQ ID NO: 572612 - RNA, 22 nt, Human
ugugccuacugauagagccaag

SEQ ID NO: 572613 - RNA, 22 nt, Human
auaugcacauacauacauaggu

SEQ ID NO: 572614 - RNA, 22 nt, Human
ugggccaguuucucauugaaau

SEQ ID NO: 572615 - RNA, 23 nt, Human
gggagaugggaaaugaaggcucu

SEQ ID NO: 572616 - RNA, 22 nt, Human
auauacuuuucacuaauggcua

SEQ ID NO: 572617 - RNA, 22 nt, Human
aggcugaggaucguacuuucca

SEQ ID NO: 572618 - RNA, 22 nt, Human
gcaggaagaggcucgaagcccc

SEQ ID NO: 572619 - RNA, 22 nt, Human
aacuccuaugacccacugaacu

SEQ ID NO: 572620 - RNA, 22 nt, Human
ucccagccuuucuuuucugcug

SEQ ID NO: 572621 - RNA, 23 nt, Human
auuuccuacuauaaaagagguaa

SEQ ID NO: 572622 - RNA, 22 nt, Human
agagagcccgggccagggcaca

SEQ ID NO: 572623 - RNA, 22 nt, Human
uuaauuuauguccaaaccagau

SEQ ID NO: 572624 - RNA, 22 nt, Human
ugaaugauguauaauauugaga

SEQ ID NO: 572625 - RNA, 22 nt, Human
gaauucuucugucuuuaacuga

SEQ ID NO: 572626 - RNA, 22 nt, Human
auaaauagugugucauaaaguc

SEQ ID NO: 572627 - RNA, 21 nt, Human
ccuggagacaaagacagggug

SEQ ID NO: 572628 - RNA, 22 nt, Human
augcauauggcuugagggaaua

SEQ ID NO: 572629 - RNA, 22 nt, Human
acacuuuaguaugaagagguag

SEQ ID NO: 572630 - RNA, 22 nt, Human
cuggcuuugaaggucuuuccua

SEQ ID NO: 572631 - RNA, 22 nt, Human
cugugccuggggggcagagcug

SEQ ID NO: 572632 - RNA, 22 nt, Human
ccaggcugcagucaaggggcau

SEQ ID NO: 572633 - RNA, 22 nt, Human
ugcagggcacacgcacgggugu

SEQ ID NO: 572634 - RNA, 22 nt, Human
cagggccuuuuagcaucuucuc

SEQ ID NO: 572635 - RNA, 22 nt, Human
cuagggaguggcagagcuggga

SEQ ID NO: 572636 - RNA, 22 nt, Human
uuaugacagaaaugaaaagcug

SEQ ID NO: 572637 - RNA, 22 nt, Human
cugucccagauguucucagcac

SEQ ID NO: 572638 - RNA, 22 nt, Human
cucuuuguggaacggcaguguc

SEQ ID NO: 572639 - RNA, 22 nt, Human
aggucacacuuggaucauagaa

SEQ ID NO: 572640 - RNA, 22 nt, Human
cuggcagcauuaacagagagca

SEQ ID NO: 572641 - RNA, 22 nt, Human
ucucauaauuagguaagucaga

SEQ ID NO: 572642 - RNA, 22 nt, Human
uggaaugucagcuacaagaggg

SEQ ID NO: 572643 - RNA, 22 nt, Human
uggaggagaccauuccacucag

SEQ ID NO: 572644 - RNA, 22 nt, Human
cagagcugguaagugguagagg

SEQ ID NO: 572645 - RNA, 22 nt, Human
ucugagggaauagcuauuguag

SEQ ID NO: 572646 - RNA, 20 nt, Human
accuugaacccgccagccau

SEQ ID NO: 572647 - RNA, 22 nt, Human
ucucuuuaaaaauagugaaaua

SEQ ID NO: 572648 - RNA, 22 nt, Human
guuccuaaauuugaaggacuuu

SEQ ID NO: 572649 - RNA, 22 nt, Human
agcuccaggaucugaaaguucg

SEQ ID NO: 572650 - RNA, 22 nt, Human
gggcagguggccucuuguacua

SEQ ID NO: 572651 - RNA, 22 nt, Human
gccaggcauuuguuaggugcug

SEQ ID NO: 572652 - RNA, 22 nt, Human
ucaggcuguauaucuugcacuc

SEQ ID NO: 572653 - RNA, 22 nt, Human
gcccugggauuggguggaggcu

SEQ ID NO: 572654 - RNA, 22 nt, Human
guauaaacauggagugcauucu

SEQ ID NO: 572655 - RNA, 22 nt, Human
aagguacagggaaggagcaaga

SEQ ID NO: 572656 - RNA, 22 nt, Human
ucuccugguauguaugcaccug

SEQ ID NO: 572657 - RNA, 22 nt, Human
gucaccagcaccaaugccacau

SEQ ID NO: 572658 - RNA, 20 nt, Human
ugcagcugguuucacaggga

SEQ ID NO: 572659 - RNA, 22 nt, Human
aauaauagcagaguuuacaauc

SEQ ID NO: 572660 - RNA, 22 nt, Human
uagcagugcccuguggaauaag

SEQ ID NO: 572661 - RNA, 22 nt, Human
uccuccuuguuuugucucugcu

SEQ ID NO: 572662 - RNA, 22 nt, Human
ggaguucacugugcaggcucug

SEQ ID NO: 572663 - RNA, 20 nt, Human
agugugcauuuagagucugc

SEQ ID NO: 572664 - RNA, 22 nt, Human
aaauagacaggcuuaaauagga

SEQ ID NO: 572665 - RNA, 22 nt, Human
gcaguguuccuucuacuggggc

SEQ ID NO: 572666 - RNA, 22 nt, Human
aguccuuaugugguggagagag

SEQ ID NO: 572667 - RNA, 21 nt, Human
uaauacugaaagugacaucug

SEQ ID NO: 572668 - RNA, 21 nt, Human
gugaagacuuugccuuuaaga

SEQ ID NO: 572669 - RNA, 22 nt, Human
caggcccagugaucagggcucu

SEQ ID NO: 572670 - RNA, 22 nt, Human
ucauacauaacuuguacaguga

SEQ ID NO: 572671 - RNA, 22 nt, Human
aagccagaucaaaguguccagg

SEQ ID NO: 572672 - RNA, 22 nt, Human
uuauucuuuaaacauauauguu

SEQ ID NO: 572673 - RNA, 22 nt, Human
aucuucccaggcuggggagagg

SEQ ID NO: 572674 - RNA, 22 nt, Human
cauaauuauaaacgcaaguuca

SEQ ID NO: 572675 - RNA, 22 nt, Human
uaggaacauaugcagugcuuuu

SEQ ID NO: 572676 - RNA, 22 nt, Human
aacugguucucuuuugcuugug

SEQ ID NO: 572677 - RNA, 22 nt, Human
aauaaacaaaucuuuccugugg

SEQ ID NO: 572678 - RNA, 22 nt, Human
cucugugcuuaugcuccauggg

SEQ ID NO: 572679 - RNA, 22 nt, Human
cccagagccgguggugcucaca

SEQ ID NO: 572680 - RNA, 22 nt, Human
ccugccugucaucgccugcgcc

SEQ ID NO: 572681 - RNA, 22 nt, Human
ugucuccuacugccuguggauc

SEQ ID NO: 572682 - RNA, 22 nt, Human
uuccagugaccauagaguaugg

SEQ ID NO: 572683 - RNA, 22 nt, Human
aguuuuaugcaguguucugaua

SEQ ID NO: 572684 - RNA, 22 nt, Human
agugcagaguacauuuguggca

SEQ ID NO: 572685 - RNA, 22 nt, Human
ugggagcaccuugagggcagaa

SEQ ID NO: 572686 - RNA, 22 nt, Human
ggcugagaaggagugggugagg

SEQ ID NO: 572687 - RNA, 22 nt, Human
cagucucugugccagauccugg

SEQ ID NO: 572688 - RNA, 22 nt, Human
ucagcacugaaauucuucacau

SEQ ID NO: 572689 - RNA, 20 nt, Human
uggacaggggcauagguugc

SEQ ID NO: 572690 - RNA, 22 nt, Human
acuucccacacccuguuuucuc

SEQ ID NO: 572691 - RNA, 22 nt, Human
auaugugugcacauauguauuu

SEQ ID NO: 572692 - RNA, 22 nt, Human
cagcuuugucugauuccucuuu

SEQ ID NO: 572693 - RNA, 22 nt, Human
gaagauaacuuuaaaaaguggc

SEQ ID NO: 572694 - RNA, 22 nt, Human
uucugaaggcuccucaggaaag

SEQ ID NO: 572695 - RNA, 22 nt, Human
acauuucucauucuccccuaac

SEQ ID NO: 572696 - RNA, 22 nt, Human
guacuuuaagacuccaguagca

SEQ ID NO: 572697 - RNA, 22 nt, Human
gauuucuaaggaggcugaacuu

SEQ ID NO: 572698 - RNA, 22 nt, Human
cuuucucuucagcacccagccc

SEQ ID NO: 572699 - RNA, 22 nt, Human
gccuccugacuuacacugagcu

SEQ ID NO: 572700 - RNA, 22 nt, Human
ccuggagaggcgcugcagagga

SEQ ID NO: 572701 - RNA, 22 nt, Human
uugaugcacuauguaacuuaca

SEQ ID NO: 572702 - RNA, 22 nt, Human
auauguuuuucacagguuuaag

SEQ ID NO: 572703 - RNA, 22 nt, Human
uaaauuauggcuggcagagcag

SEQ ID NO: 572704 - RNA, 22 nt, Human
ggcucugggccagaguuggcuu

SEQ ID NO: 572705 - RNA, 22 nt, Human
gugccaggcccagggagcgggg

SEQ ID NO: 572706 - RNA, 22 nt, Human
uagcagggccaggcugggaacc

SEQ ID NO: 572707 - RNA, 22 nt, Human
aggaugugaguggacacagucc

SEQ ID NO: 572708 - RNA, 22 nt, Human
augaggccauggcugucacuaa

SEQ ID NO: 572709 - RNA, 22 nt, Human
ccugcagccguccuguuugucu

SEQ ID NO: 572710 - RNA, 22 nt, Human
gcagauggaaagugcuugaggg

SEQ ID NO: 572711 - RNA, 22 nt, Human
uuuuagaaauacugauuuagug

SEQ ID NO: 572712 - RNA, 22 nt, Human
uuccuaacuggccuuuauggau

SEQ ID NO: 572713 - RNA, 21 nt, Human
auuuacaaaacagucccuucc

SEQ ID NO: 572714 - RNA, 22 nt, Human
agcaagcauugcugguuagguc

SEQ ID NO: 572715 - RNA, 22 nt, Human
uaggccagcccuuaguccuguc

SEQ ID NO: 572716 - RNA, 22 nt, Human
aagcugccaaugguaagcugcu

SEQ ID NO: 572717 - RNA, 22 nt, Human
uagcuuaacagcaaaacuguug

SEQ ID NO: 572718 - RNA, 23 nt, Human
uugaaagguagcuggcagcuaga

SEQ ID NO: 572719 - RNA, 22 nt, Human
cagugcagaggccagggaggau

SEQ ID NO: 572720 - RNA, 22 nt, Human
agcuuacaguucaaugacaaag

SEQ ID NO: 572721 - RNA, 22 nt, Human
aagacaucagugaugacauuug

SEQ ID NO: 572722 - RNA, 22 nt, Human
ggacauuuuucuuccuacaaug

SEQ ID NO: 572723 - RNA, 22 nt, Human
ugagguagaaaaagcuuguagu

SEQ ID NO: 572724 - RNA, 19 nt, Human
ugaaggagggggauggcca

SEQ ID NO: 572725 - RNA, 22 nt, Human
ucccggcgcugggagguggguc

SEQ ID NO: 572726 - RNA, 22 nt, Human
cccagcucaucaggagccgccc

SEQ ID NO: 572727 - RNA, 22 nt, Human
uuucuuauacuauauugucauc

SEQ ID NO: 572728 - RNA, 22 nt, Human
gaaaaugagccucagcuacauu

SEQ ID NO: 572729 - RNA, 22 nt, Human
cugaggugcuauggaggauacg

SEQ ID NO: 572730 - RNA, 22 nt, Human
gcguggugcugcccugcacaca

SEQ ID NO: 572731 - RNA, 22 nt, Human
ggcugugcccucacauggggca

SEQ ID NO: 572732 - RNA, 22 nt, Human
agcccugggcuguagauaagca

SEQ ID NO: 572733 - RNA, 22 nt, Human
acagcagccugcagcccugugu

SEQ ID NO: 572734 - RNA, 20 nt, Human
uucugaaagcagcagaggga

SEQ ID NO: 572735 - RNA, 22 nt, Human
uaucauuuguuauuauuagugg

SEQ ID NO: 572736 - RNA, 22 nt, Human
agcaaacagugugcuaagaaau

SEQ ID NO: 572737 - RNA, 22 nt, Human
guuuguaagcagucugcuugug

SEQ ID NO: 572738 - RNA, 22 nt, Human
caaugauucugcaacugugugc

SEQ ID NO: 572739 - RNA, 22 nt, Human
uugaaaaaauugguagaggaug

SEQ ID NO: 572740 - RNA, 19 nt, Human
agagaaggauccuaugguu

SEQ ID NO: 572741 - RNA, 22 nt, Human
gugagcaguuguauaaagacuu

SEQ ID NO: 572742 - RNA, 19 nt, Human
uaguggagugacaaguucu

SEQ ID NO: 572743 - RNA, 22 nt, Human
gcagagcaccaaagugaaagau

SEQ ID NO: 572744 - RNA, 20 nt, Human
gcagcugaaaguaugacacc

SEQ ID NO: 572745 - RNA, 19 nt, Human
gcugugugaccuugggcaa

SEQ ID NO: 572746 - RNA, 22 nt, Human
aucaccaggcaaaaugucagag

SEQ ID NO: 572747 - RNA, 22 nt, Human
uauauuaaacccucucuguagg

SEQ ID NO: 572748 - RNA, 22 nt, Human
aaaguuacaguaauucagugua

SEQ ID NO: 572749 - RNA, 22 nt, Human
acacauguacagauuaguauuu

SEQ ID NO: 572750 - RNA, 22 nt, Human
aguucucuuggaaguuauguga

SEQ ID NO: 572751 - RNA, 22 nt, Human
ggagaaagaagacgaacauugu

SEQ ID NO: 572752 - RNA, 21 nt, Human
aggaauguguauauauacaau

SEQ ID NO: 572753 - RNA, 23 nt, Human
ucucagaaaggagaaguaauuug

SEQ ID NO: 572754 - RNA, 22 nt, Human
aauggcaccuucaagaagaaaa

SEQ ID NO: 572755 - RNA, 22 nt, Human
gggagcuguaagggacagguag

SEQ ID NO: 572756 - RNA, 22 nt, Human
gggaauguugacugagagcagg

SEQ ID NO: 572757 - RNA, 22 nt, Human
cucagggagguccugugcugaa

SEQ ID NO: 572758 - RNA, 23 nt, Human
uuacuuuugcaccaaccuaauau

SEQ ID NO: 572759 - RNA, 22 nt, Human
ggguccagacacuccagaggaa

SEQ ID NO: 572760 - RNA, 21 nt, Human
augauucugcaaaugaguagu

SEQ ID NO: 572761 - RNA, 22 nt, Human
auuaaauuagcaaacugugaaa

SEQ ID NO: 572762 - RNA, 20 nt, Human
auguuaaauagcauuuagag

SEQ ID NO: 572763 - RNA, 22 nt, Human
uggggcagcuccaucuauucca

SEQ ID NO: 572764 - RNA, 22 nt, Human
ucuuagaaaugaaguucuuucu

SEQ ID NO: 572765 - RNA, 22 nt, Human
ucagugcuaaaagagcuggugu

SEQ ID NO: 572766 - RNA, 22 nt, Human
uuuauucugugcuacaugaaga

SEQ ID NO: 572767 - RNA, 22 nt, Human
acuuaaaaagaaucuuuucacg

SEQ ID NO: 572768 - RNA, 22 nt, Human
uggcaaggaagagccuggugca

SEQ ID NO: 572769 - RNA, 23 nt, Human
uguaggcuguaguuuguaggucc

SEQ ID NO: 572770 - RNA, 22 nt, Human
uggcaggaaauacccugccuag

SEQ ID NO: 572771 - RNA, 22 nt, Human
aaaggaauauucaaaacaguca

SEQ ID NO: 572772 - RNA, 22 nt, Human
gaauaucugucugguugaggaa

SEQ ID NO: 572773 - RNA, 22 nt, Human
ugucccagcagcuggguucucu

SEQ ID NO: 572774 - RNA, 22 nt, Human
gcugucuccauagcuguguguc

SEQ ID NO: 572775 - RNA, 22 nt, Human
uacugugugauuccauuuacgu

SEQ ID NO: 572776 - RNA, 22 nt, Human
augggcuggcagccugaacagc

SEQ ID NO: 572777 - RNA, 22 nt, Human
agugacagcugggaaggugaaa

SEQ ID NO: 572778 - RNA, 22 nt, Human
ggaccaucucuagccagagcuu

SEQ ID NO: 572779 - RNA, 22 nt, Human
gcaguggcuaggagucuggcgu

SEQ ID NO: 572780 - RNA, 22 nt, Human
aaauauccucagggcagaggug

SEQ ID NO: 572781 - RNA, 22 nt, Human
uuauugaagcaagcuuuucuga

SEQ ID NO: 572782 - RNA, 21 nt, Human
acuccaaacaaguuaagcugu

SEQ ID NO: 572783 - RNA, 22 nt, Human
aaacaguauuaucaauauauuu

SEQ ID NO: 572784 - RNA, 22 nt, Human
uuucauaauacuguacaugaaa

SEQ ID NO: 572785 - RNA, 22 nt, Human
aagaaagugcuuuguaaauuau

SEQ ID NO: 572786 - RNA, 22 nt, Human
uucauuccuucuguaccuugcc

SEQ ID NO: 572787 - RNA, 22 nt, Human
caggagugucgggucacuaggu

SEQ ID NO: 572788 - RNA, 22 nt, Human
agaagccaaucagcucucugcu

SEQ ID NO: 572789 - RNA, 22 nt, Human
aagcaagaggaaauguggaccu

SEQ ID NO: 572790 - RNA, 22 nt, Human
agcaauuucccaucucuucugc

SEQ ID NO: 572791 - RNA, 22 nt, Human
gccagcagggcccaaaugcugg

SEQ ID NO: 572792 - RNA, 22 nt, Human
aaggcagcaccgccuccugaaa

SEQ ID NO: 572793 - RNA, 22 nt, Human
aacaaaguacuuuucagugcuu

SEQ ID NO: 572794 - RNA, 22 nt, Human
gcuguacauuuguguacacuug

SEQ ID NO: 572795 - RNA, 22 nt, Human
ucucaaacuaacaaugauuaua

SEQ ID NO: 572796 - RNA, 22 nt, Human
uggcccugugacugaguucuag

SEQ ID NO: 572797 - RNA, 22 nt, Human
uaugcuuugcaauuggaaaagg

SEQ ID NO: 572798 - RNA, 22 nt, Human
cccaggcuggccuccgcagugc

SEQ ID NO: 572799 - RNA, 22 nt, Human
augccaggagauggagcagagu

SEQ ID NO: 572800 - RNA, 22 nt, Human
cagucucuuuucagcuccaucc

SEQ ID NO: 572801 - RNA, 22 nt, Human
aaaaugaauaaguuaacccagg

SEQ ID NO: 572802 - RNA, 22 nt, Human
aggcugagccacggggcuggcu

SEQ ID NO: 572803 - RNA, 22 nt, Human
aucaauaucagaucagacagga

SEQ ID NO: 572804 - RNA, 22 nt, Human
agagcuuuucuguaauaacauc

SEQ ID NO: 572805 - RNA, 22 nt, Human
aggcacagggaugcggagccag

SEQ ID NO: 572806 - RNA, 22 nt, Human
cugauucuaggcguuccucuca

SEQ ID NO: 572807 - RNA, 22 nt, Human
uguucuuucaguuagacacagu

SEQ ID NO: 572808 - RNA, 22 nt, Human
aaugaacagugggugagguacc

SEQ ID NO: 572809 - RNA, 22 nt, Human
aagcagaggaccgacggaggga

SEQ ID NO: 572810 - RNA, 22 nt, Human
uacaaaacagugcucugguccu

SEQ ID NO: 572811 - RNA, 22 nt, Human
ggguaggaugguagaagggacc

SEQ ID NO: 572812 - RNA, 22 nt, Human
uguuacaauauuaucaacugag

SEQ ID NO: 572813 - RNA, 22 nt, Human
uccuugaaaaucuugguuuaga

SEQ ID NO: 572814 - RNA, 22 nt, Human
agcuaaggaacucuguaacacc

SEQ ID NO: 572815 - RNA, 22 nt, Human
gcagcaggcuuuucauaccuug

SEQ ID NO: 572816 - RNA, 21 nt, Human
agcccuuaggacauaagagag

SEQ ID NO: 572817 - RNA, 22 nt, Human
cugcaguugggugacccaauau

SEQ ID NO: 572818 - RNA, 22 nt, Human
aagccaggccauucucugguuc

SEQ ID NO: 572819 - RNA, 22 nt, Human
agcauuaagccuggcucagagg

SEQ ID NO: 572820 - RNA, 22 nt, Human
auuguuaauaacuauuacauug

SEQ ID NO: 572821 - RNA, 22 nt, Human
ucuguacauuuggggaccccag

SEQ ID NO: 572822 - RNA, 22 nt, Human
aauaaacuuccacuguguuuuu

SEQ ID NO: 572823 - RNA, 22 nt, Human
cagggucugaugguccucacuu

SEQ ID NO: 572824 - RNA, 20 nt, Human
aggaaaaggguggugguaga

SEQ ID NO: 572825 - RNA, 22 nt, Human
acagcaaugaguaacuccuugg

SEQ ID NO: 572826 - RNA, 22 nt, Human
aagcaacuguugaauuggacua

SEQ ID NO: 572827 - RNA, 22 nt, Human
cugggaugugaggagcgccucu

SEQ ID NO: 572828 - RNA, 22 nt, Human
ucccagagcaguacuccaggag

SEQ ID NO: 572829 - RNA, 22 nt, Human
gcaccaggcuuagagccccagg

SEQ ID NO: 572830 - RNA, 22 nt, Human
gcuguauuccugcacuguauag

SEQ ID NO: 572831 - RNA, 22 nt, Human
gccucugcaucaucacuccagc

SEQ ID NO: 572832 - RNA, 22 nt, Human
accaggcuguugggcccagugu

SEQ ID NO: 572833 - RNA, 22 nt, Human
ggaggaagcacacggcuuguau

SEQ ID NO: 572834 - RNA, 22 nt, Human
cucugugguuagacuauggcug

SEQ ID NO: 572835 - RNA, 22 nt, Human
accugucuauaaaagugaauac

SEQ ID NO: 572836 - RNA, 22 nt, Human
uugucugucccagcuugugcau

SEQ ID NO: 572837 - RNA, 22 nt, Human
gguggcagcauggucccagugu

SEQ ID NO: 572838 - RNA, 22 nt, Human
ggcuucucucuucacauggcuu

SEQ ID NO: 572839 - RNA, 21 nt, Human
uccagcuccugccacuccuua

SEQ ID NO: 572840 - RNA, 22 nt, Human
ucacauuugauaaugcccauug

SEQ ID NO: 572841 - RNA, 22 nt, Human
uuacaaguuucuggcuucaucc

SEQ ID NO: 572842 - RNA, 22 nt, Human
aagggagaggagggucuuguug

SEQ ID NO: 572843 - RNA, 22 nt, Human
gaauagauaagugacuauuugg

SEQ ID NO: 572844 - RNA, 22 nt, Human
agcuucucaggagucugaggca

SEQ ID NO: 572845 - RNA, 22 nt, Human
uguccccaagguucagcccaca

SEQ ID NO: 572846 - RNA, 22 nt, Human
aaacuagagcaugugaguggga

SEQ ID NO: 572847 - RNA, 22 nt, Human
uacuguacugcaguucugcaaa

SEQ ID NO: 572848 - RNA, 22 nt, Human
cuccugggaggaugcggacccg

SEQ ID NO: 572849 - RNA, 22 nt, Human
cucaaagacaaaaaucugaggu

SEQ ID NO: 572850 - RNA, 22 nt, Human
caguccuugcucaaagucuaca

SEQ ID NO: 572851 - RNA, 22 nt, Human
acuaaauaguuuugacagaaca

SEQ ID NO: 572852 - RNA, 22 nt, Human
ugggagcuccuggagggcagga

SEQ ID NO: 572853 - RNA, 22 nt, Human
ugcccugccaagaccaaguggu

SEQ ID NO: 572854 - RNA, 20 nt, Human
uccagcauauaaacuccucu

SEQ ID NO: 572855 - RNA, 22 nt, Human
aggaaugucgucauaaacauga

SEQ ID NO: 572856 - RNA, 22 nt, Human
cuggccagguuuugaacaguug

SEQ ID NO: 572857 - RNA, 22 nt, Human
ccaguguuccauggagugauua

SEQ ID NO: 572858 - RNA, 22 nt, Human
ucucucuucaugcuuuuagaau

SEQ ID NO: 572859 - RNA, 22 nt, Human
aacagcuuugugcucagauuug

SEQ ID NO: 572860 - RNA, 22 nt, Human
ucugggcuggugcucaugaauu

SEQ ID NO: 572861 - RNA, 22 nt, Human
uuauugacuuguuuguccuggu

SEQ ID NO: 572862 - RNA, 22 nt, Human
uaaagacacugguuuuaaucau

SEQ ID NO: 572863 - RNA, 22 nt, Human
auauuauucuaguaacagugau

SEQ ID NO: 572864 - RNA, 22 nt, Human
aaugguuacagaaaugaaagua

SEQ ID NO: 572865 - RNA, 22 nt, Human
agaauauugaaaguucuugaca

SEQ ID NO: 572866 - RNA, 19 nt, Human
cagugcccgacgcaggucu

SEQ ID NO: 572867 - RNA, 22 nt, Human
cucuuagcugcuguucuuugag

SEQ ID NO: 572868 - RNA, 22 nt, Human
ggugaaauguagucuugugaga

SEQ ID NO: 572869 - RNA, 22 nt, Human
gcauuccugagaaugcagagug

SEQ ID NO: 572870 - RNA, 22 nt, Human
cugggacuuguagucucggcgc

SEQ ID NO: 572871 - RNA, 22 nt, Human
aacaacagcugcuaaagaguug

SEQ ID NO: 572872 - RNA, 22 nt, Human
uggcgcaguuucucugcugccu

SEQ ID NO: 572873 - RNA, 22 nt, Human
augaaaacggaccagagcuauu

SEQ ID NO: 572874 - RNA, 22 nt, Human
augcugacagacuauuaacuau

SEQ ID NO: 572875 - RNA, 22 nt, Human
gagcugcagcggcugacgcaac

SEQ ID NO: 572876 - RNA, 22 nt, Human
cuucucccuggcuucugcacac

SEQ ID NO: 572877 - RNA, 22 nt, Human
ggcccacacugacagcugagcu

SEQ ID NO: 572878 - RNA, 22 nt, Human
agcagguguauauaaggcugag

SEQ ID NO: 572879 - RNA, 20 nt, Human
cugaaagacguaacagugca

SEQ ID NO: 572880 - RNA, 22 nt, Human
cagcagcugguuauaccugugg

SEQ ID NO: 572881 - RNA, 22 nt, Human
agauggcugggagcucuguuug

SEQ ID NO: 572882 - RNA, 22 nt, Human
aagggggcggcagccaguggaa

SEQ ID NO: 572883 - RNA, 22 nt, Human
ucugucaccccuguuucuggcu

SEQ ID NO: 572884 - RNA, 22 nt, Human
agcauguguggagaaauauuuu

SEQ ID NO: 572885 - RNA, 22 nt, Human
auguuugucaggauuguaauua

SEQ ID NO: 572886 - RNA, 22 nt, Human
uuauuguuuggguauaauuuga

SEQ ID NO: 572887 - RNA, 21 nt, Human
gaggacugcacacucugauug

SEQ ID NO: 572888 - RNA, 22 nt, Human
ugugcaaaguguacaaauuaau

SEQ ID NO: 572889 - RNA, 22 nt, Human
ggagacacuggaaaguauuaca

SEQ ID NO: 572890 - RNA, 22 nt, Human
gcccagagagaugaagugaugg

SEQ ID NO: 572891 - RNA, 22 nt, Human
ugacauaaguugguagaaagga

SEQ ID NO: 572892 - RNA, 22 nt, Human
cccuggagugugacgaggcauu

SEQ ID NO: 572893 - RNA, 22 nt, Human
ccaacagguguucuguuuuuca

SEQ ID NO: 572894 - RNA, 22 nt, Human
cuagguggugguggguugacau

SEQ ID NO: 572895 - RNA, 22 nt, Human
ggccccagcagugcuuguuuau

SEQ ID NO: 572896 - RNA, 22 nt, Human
uggagcagccaugaugacagag

SEQ ID NO: 572897 - RNA, 22 nt, Human
acagcuggcaggggggcaugaa

SEQ ID NO: 572898 - RNA, 22 nt, Human
gucccucacuggaccauaugaa

SEQ ID NO: 572899 - RNA, 19 nt, Human
cagaacaggaccaggggcc

SEQ ID NO: 572900 - RNA, 22 nt, Human
uaaagcaauuugagcaaguucu

SEQ ID NO: 572901 - RNA, 22 nt, Human
gcacuuuguggauuguauuucc

SEQ ID NO: 572902 - RNA, 22 nt, Human
uuacaaugggagcccuuggacu

SEQ ID NO: 572903 - RNA, 22 nt, Human
uuuauuguuuagaagggggcug

SEQ ID NO: 572904 - RNA, 22 nt, Human
gcuguggaguacagagcugguu

SEQ ID NO: 572905 - RNA, 22 nt, Human
uuccuaacacaguguaagcaag

SEQ ID NO: 572906 - RNA, 22 nt, Human
gcagcugauggaaguccuauug

SEQ ID NO: 572907 - RNA, 22 nt, Human
uucccagagauaagacgucuua

SEQ ID NO: 572908 - RNA, 23 nt, Human
uuauggagugccagacauuuggc

SEQ ID NO: 572909 - RNA, 22 nt, Human
gaaaugcauggaucuuggcaga

SEQ ID NO: 572910 - RNA, 22 nt, Human
ucugcaggaggcuggcugcagg

SEQ ID NO: 572911 - RNA, 22 nt, Human
ugcagaaggccugacauugcac

SEQ ID NO: 572912 - RNA, 22 nt, Human
agcacagguaauacagaguaac

SEQ ID NO: 572913 - RNA, 22 nt, Human
ucuaguucuagaucccugagga

SEQ ID NO: 572914 - RNA, 22 nt, Human
acaguguucacuuaacaaugga

SEQ ID NO: 572915 - RNA, 22 nt, Human
cauccacuagaaugacagaguu

SEQ ID NO: 572916 - RNA, 22 nt, Human
acaauauuguacccagaaguuu

SEQ ID NO: 572917 - RNA, 22 nt, Human
ucagacagugugaucagucucu

SEQ ID NO: 572918 - RNA, 22 nt, Human
cuccugggcucaagugauccuc

SEQ ID NO: 572919 - RNA, 22 nt, Human
uucuaguucauauucucaaaga

SEQ ID NO: 572920 - RNA, 20 nt, Human
auguaaaagacagggaguag

SEQ ID NO: 572921 - RNA, 22 nt, Human
uacagugcuugguaucuaguaa

SEQ ID NO: 572922 - RNA, 22 nt, Human
uaaugacugccgucucucuuca

SEQ ID NO: 572923 - RNA, 22 nt, Human
aaguuccuauauccaaauacag

SEQ ID NO: 572924 - RNA, 22 nt, Human
aguuuacaguucucaucgcaac

SEQ ID NO: 572925 - RNA, 22 nt, Human
ggguggcauagggugauggcuu

SEQ ID NO: 572926 - RNA, 22 nt, Human
agaaaacauaggagacaggaaa

SEQ ID NO: 572927 - RNA, 19 nt, Human
gauuuaaacguggcucuau

SEQ ID NO: 572928 - RNA, 22 nt, Human
uauaaaacagaaagcacuaccu

SEQ ID NO: 572929 - RNA, 22 nt, Human
ccugagguugaaguauaaauug

SEQ ID NO: 572930 - RNA, 22 nt, Human
agcuguccuggcucaggcugug

SEQ ID NO: 572931 - RNA, 22 nt, Human
ccugggagggcaagugcugaug

SEQ ID NO: 572932 - RNA, 22 nt, Human
uaugaagauugcggucuggaau

SEQ ID NO: 572933 - RNA, 22 nt, Human
uccccugagaccccucagcacu

SEQ ID NO: 572934 - RNA, 22 nt, Human
aaggagagagcuuugcuggaac

SEQ ID NO: 572935 - RNA, 22 nt, Human
aguggcagagccaagauaugau

SEQ ID NO: 572936 - RNA, 22 nt, Human
cacacuguugaggacgagaugu

SEQ ID NO: 572937 - RNA, 22 nt, Human
uuucaguuuuugcucgauguau

SEQ ID NO: 572938 - RNA, 22 nt, Human
gcuuccuguauccuccuguacc

SEQ ID NO: 572939 - RNA, 22 nt, Human
uccucacagcaugaccaggcag

SEQ ID NO: 572940 - RNA, 22 nt, Human
cgugcuaacguuuaagguuaug

SEQ ID NO: 572941 - RNA, 22 nt, Human
ugagggaguuggguguauagga

SEQ ID NO: 572942 - RNA, 22 nt, Human
uauacacauuuuuaccuauagu

SEQ ID NO: 572943 - RNA, 22 nt, Human
ucacccagacagcuugcacuga

SEQ ID NO: 572944 - RNA, 22 nt, Human
aaagucaggcuguguaccuaac

SEQ ID NO: 572945 - RNA, 22 nt, Human
acaggugguaaaauggacuguc

SEQ ID NO: 572946 - RNA, 22 nt, Human
gcaaggcaguccuggggcccug

SEQ ID NO: 572947 - RNA, 22 nt, Human
caaggcaggcaguucacuugag

SEQ ID NO: 572948 - RNA, 22 nt, Human
aagcugccagauucagucugcu

SEQ ID NO: 572949 - RNA, 22 nt, Human
cagagccucugcccugggcacu

SEQ ID NO: 572950 - RNA, 22 nt, Human
cuauuuuaacuugauuaccucu

SEQ ID NO: 572951 - RNA, 22 nt, Human
guaucuugacuccaugccucag

SEQ ID NO: 572952 - RNA, 22 nt, Human
augacuaauggaaaauacaaug

SEQ ID NO: 572953 - RNA, 22 nt, Human
agcuguguggugucugacagcu

SEQ ID NO: 572954 - RNA, 22 nt, Human
aaagacauggcaagagaugggg

SEQ ID NO: 572955 - RNA, 22 nt, Human
uuguucauaaagacaguucaga

SEQ ID NO: 572956 - RNA, 22 nt, Human
aggcagaaaauagucauccaaa

SEQ ID NO: 572957 - RNA, 22 nt, Human
ugccagucucacccuggguccu

SEQ ID NO: 572958 - RNA, 22 nt, Human
cagaggcugagcagucaguuug

SEQ ID NO: 572959 - RNA, 22 nt, Human
acagagguggaccucagcaggc

SEQ ID NO: 572960 - RNA, 22 nt, Human
uggagggcgcuuagauggaggg

SEQ ID NO: 572961 - RNA, 22 nt, Human
cucaggcucuguacucccuuug

SEQ ID NO: 572962 - RNA, 22 nt, Human
auacuguuggcagcagaccaga

SEQ ID NO: 572963 - RNA, 22 nt, Human
ugccucauaacacuccuggagu

SEQ ID NO: 572964 - RNA, 22 nt, Human
guguggaaacagagagggcaac

SEQ ID NO: 572965 - RNA, 18 nt, Human
ggcagccuggacaugcuc

SEQ ID NO: 572966 - RNA, 22 nt, Human
uaugcuaagugagaaaagacag

SEQ ID NO: 572967 - RNA, 22 nt, Human
cuauuauuauguuaacuggacu

SEQ ID NO: 572968 - RNA, 19 nt, Human
caggaugaucccaugacac

SEQ ID NO: 572969 - RNA, 22 nt, Human
aggcuucuccacauaaaguuac

SEQ ID NO: 572970 - RNA, 22 nt, Human
uuggccacacucacuagagccc

SEQ ID NO: 572971 - RNA, 23 nt, Human
acucguggaauucucugcgaucg

SEQ ID NO: 572972 - RNA, 21 nt, Human
ucugucugguuuuagaguggc

SEQ ID NO: 572973 - RNA, 22 nt, Human
uauugaagauuuugugguugcu

SEQ ID NO: 572974 - RNA, 22 nt, Human
uaugagaacaagaacaaucucc

SEQ ID NO: 572975 - RNA, 22 nt, Human
ggaaacugcuuacacuagaggg

SEQ ID NO: 572976 - RNA, 22 nt, Human
ugcaggagcaccagcucacccu

SEQ ID NO: 572977 - RNA, 22 nt, Human
cauuauauuuuacugcauggga

SEQ ID NO: 572978 - RNA, 22 nt, Human
guggcagagccaaggcuggagc

SEQ ID NO: 572979 - RNA, 22 nt, Human
cuuccagucuuuucaguggagu

SEQ ID NO: 572980 - RNA, 22 nt, Human
guuuggggucugcagagcggcg

SEQ ID NO: 572981 - RNA, 22 nt, Human
gagaauuucccagucugugcug

SEQ ID NO: 572982 - RNA, 22 nt, Human
uacugcuucacccuugagucuu

SEQ ID NO: 572983 - RNA, 22 nt, Human
ggaggcagaauagagugugggu

SEQ ID NO: 572984 - RNA, 22 nt, Human
cauguuaaugaauuuuugcagu

SEQ ID NO: 572985 - RNA, 22 nt, Human
gggcuggaggugagcaggacag

SEQ ID NO: 572986 - RNA, 22 nt, Human
uggcaucucaaacaggcagauu

SEQ ID NO: 572987 - RNA, 22 nt, Human
aagaguuuucuauaaucuuggc

SEQ ID NO: 572988 - RNA, 22 nt, Human
gcagacuggucuucagccuugg

SEQ ID NO: 572989 - RNA, 22 nt, Human
uggcagugugggaggaagguac

SEQ ID NO: 572990 - RNA, 22 nt, Human
uuauuaagugcguacuguaugc

SEQ ID NO: 572991 - RNA, 22 nt, Human
cauacuuugggauaagagugga

SEQ ID NO: 572992 - RNA, 22 nt, Human
cagcccagcagggucuggcccu

SEQ ID NO: 572993 - RNA, 22 nt, Human
aggccaggaauccuugucccag

SEQ ID NO: 572994 - RNA, 22 nt, Human
cuaggccaguuaggaagagaag

SEQ ID NO: 572995 - RNA, 22 nt, Human
agcugcagucaagcugggccac

SEQ ID NO: 572996 - RNA, 22 nt, Human
aucaugcagguuucuccuuucu

SEQ ID NO: 572997 - RNA, 22 nt, Human
ugaugucugccaggguccuggg

SEQ ID NO: 572998 - RNA, 22 nt, Human
cucuccagaucugcugagccag

SEQ ID NO: 572999 - RNA, 22 nt, Human
gaaauccaguucccuacucuua

SEQ ID NO: 573000 - RNA, 22 nt, Human
caaauggucauuucucuuuugu

SEQ ID NO: 573001 - RNA, 22 nt, Human
uguuuguggaauauucuuuaag

SEQ ID NO: 573002 - RNA, 22 nt, Human
aaugaauaacaauccucuggag

SEQ ID NO: 573003 - RNA, 22 nt, Human
caaaaguaauugcgguuuuugc

SEQ ID NO: 573004 - RNA, 22 nt, Human
uccuucaguucaauuaguccgu

SEQ ID NO: 573005 - RNA, 22 nt, Human
uggagcagaguucagcggggag

SEQ ID NO: 573006 - RNA, 22 nt, Human
uacuuccagcaaucugcauauu

SEQ ID NO: 573007 - RNA, 22 nt, Human
aggaggcagaugcuuggcugua

SEQ ID NO: 573008 - RNA, 22 nt, Human
aaugcaaccugcugaucugaca

SEQ ID NO: 573009 - RNA, 22 nt, Human
gcagugcuaaguagcuggccca

SEQ ID NO: 573010 - RNA, 22 nt, Human
ugcugaggcauuuggacagagu

SEQ ID NO: 573011 - RNA, 22 nt, Human
aagggcagcugacagaugcuua

SEQ ID NO: 573012 - RNA, 22 nt, Human
gcaucuaauccaguccagcauc

SEQ ID NO: 573013 - RNA, 22 nt, Human
uauugccaaaugucugcuggaa

SEQ ID NO: 573014 - RNA, 22 nt, Human
accagggcugggauaggucagg

SEQ ID NO: 573015 - RNA, 22 nt, Human
ugacagcagccaccucucaccc

SEQ ID NO: 573016 - RNA, 22 nt, Human
cuucugaggcagcuauucaguu

SEQ ID NO: 573017 - RNA, 22 nt, Human
acagaaugcguagugcauguug

SEQ ID NO: 573018 - RNA, 22 nt, Human
agugucugccagcugccaggug

SEQ ID NO: 573019 - RNA, 22 nt, Human
aguaaauggcccaggguuauca

SEQ ID NO: 573020 - RNA, 22 nt, Human
ccaguguuuaggaauaaaaugu

SEQ ID NO: 573021 - RNA, 22 nt, Human
uuuacagcuucuauacuaugug

SEQ ID NO: 573022 - RNA, 22 nt, Human
uuuacauguaauguuauacaaa

SEQ ID NO: 573023 - RNA, 22 nt, Human
gcacaauaacagccaagguuau

SEQ ID NO: 573024 - RNA, 22 nt, Human
ucccuguggauaucugcagcug

SEQ ID NO: 573025 - RNA, 22 nt, Human
ugcagggcaguggagguugagu

SEQ ID NO: 573026 - RNA, 22 nt, Human
uacuuacagagcuuauaaguua

SEQ ID NO: 573027 - RNA, 22 nt, Human
uauacacaaacaagggguuaag

SEQ ID NO: 573028 - RNA, 22 nt, Human
gcuucucucaggagcaucagcc

SEQ ID NO: 573029 - RNA, 22 nt, Human
gggcacugcuuugcucugucac

SEQ ID NO: 573030 - RNA, 22 nt, Human
aggcugagcggggucccagagc

SEQ ID NO: 573031 - RNA, 23 nt, Human
agaguuuguuucuaaugagugag

SEQ ID NO: 573032 - RNA, 22 nt, Human
acucacaggacucugcauauag

SEQ ID NO: 573033 - RNA, 22 nt, Human
ugcagcugacccacuccagucc

SEQ ID NO: 573034 - RNA, 22 nt, Human
ucauggaugauagcuucauugc

SEQ ID NO: 573035 - RNA, 22 nt, Human
ggcuuccagcugggccuuggag

SEQ ID NO: 573036 - RNA, 22 nt, Human
ugcucuguccagugcaccauca

SEQ ID NO: 573037 - RNA, 22 nt, Human
uggccaggcuggucuggaacgc

SEQ ID NO: 573038 - RNA, 22 nt, Human
cugaaagggagaacaccaagag

SEQ ID NO: 573039 - RNA, 22 nt, Human
ccuuggcccuagccucaggcaa

SEQ ID NO: 573040 - RNA, 19 nt, Human
acacugggagaagacugcu

SEQ ID NO: 573041 - RNA, 22 nt, Human
gacugaggagguaagguuugaa

SEQ ID NO: 573042 - RNA, 22 nt, Human
aauuuauuauauccuaggggaa

SEQ ID NO: 573043 - RNA, 22 nt, Human
aacauuuaugguagucauugca

SEQ ID NO: 573044 - RNA, 22 nt, Human
cagccugggcuccagagucccu

SEQ ID NO: 573045 - RNA, 21 nt, Human
agggagcauguuagcuuucga

SEQ ID NO: 573046 - RNA, 22 nt, Human
aagaaugagcucaaagaucuua

SEQ ID NO: 573047 - RNA, 22 nt, Human
cccucaggaugcaguggaagug

SEQ ID NO: 573048 - RNA, 22 nt, Human
ggagaaggaagaaagcuacuau

SEQ ID NO: 573049 - RNA, 22 nt, Human
uuacacagugguuaagucuggg

SEQ ID NO: 573050 - RNA, 22 nt, Human
accaguccgcggagcuccgggg

SEQ ID NO: 573051 - RNA, 22 nt, Human
gggcuucucugggaguccuggu

SEQ ID NO: 573052 - RNA, 20 nt, Human
uccaggcagacagcuauggg

SEQ ID NO: 573053 - RNA, 23 nt, Human
ugcccucccaaugcuucggucac

SEQ ID NO: 573054 - RNA, 22 nt, Human
ugcaaacuagcaucaacuagua

SEQ ID NO: 573055 - RNA, 22 nt, Human
aauauuaucaaaagcuuuuuca

SEQ ID NO: 573056 - RNA, 22 nt, Human
cugaagcaaaggaucgagcuaa

SEQ ID NO: 573057 - RNA, 23 nt, Human
gcccugcccuuagcacacucaca

SEQ ID NO: 573058 - RNA, 22 nt, Human
uguuuucacaaugaugucagau

SEQ ID NO: 573059 - RNA, 22 nt, Human
gucuuuaguugaaacauguggu

SEQ ID NO: 573060 - RNA, 22 nt, Human
gcagaggacacaggagggcaag

SEQ ID NO: 573061 - RNA, 22 nt, Human
acugagguaauugugaggauua

SEQ ID NO: 573062 - RNA, 22 nt, Human
ggaagccaggccaaugagaaca

SEQ ID NO: 573063 - RNA, 22 nt, Human
ucucuuuaaagacucagagauu

SEQ ID NO: 573064 - RNA, 22 nt, Human
ggcaggcaguguggugugaaac

SEQ ID NO: 573065 - RNA, 22 nt, Human
caggaaggcgcggcugugccug

SEQ ID NO: 573066 - RNA, 23 nt, Human
gcagagacagccccagcgcgaug

SEQ ID NO: 573067 - RNA, 21 nt, Human
gcuggcuggcugaccggccuu

SEQ ID NO: 573068 - RNA, 22 nt, Human
uaacacuaagaaucuaaauuua

SEQ ID NO: 573069 - RNA, 22 nt, Human
auguggcugaucgcagagcucu

SEQ ID NO: 573070 - RNA, 22 nt, Human
aagggcugggucugguuaaccc

SEQ ID NO: 573071 - RNA, 22 nt, Human
ucaggagcugcacugggcccac

SEQ ID NO: 573072 - RNA, 22 nt, Human
cugaauaauuuucuguuguaug

SEQ ID NO: 573073 - RNA, 22 nt, Human
ugaggugguuacuguggugcuc

SEQ ID NO: 573074 - RNA, 22 nt, Human
gucuccagggcugcuggcgccu

SEQ ID NO: 573075 - RNA, 22 nt, Human
guuuuauuggaacacagccaug

SEQ ID NO: 573076 - RNA, 22 nt, Human
ugucccaguucccaggguugcu

SEQ ID NO: 573077 - RNA, 22 nt, Human
auagaaacagggaagcaaagca

SEQ ID NO: 573078 - RNA, 20 nt, Human
cagaccugcacccacuucga

SEQ ID NO: 573079 - RNA, 22 nt, Human
agaguuugggguaugauuguuu

SEQ ID NO: 573080 - RNA, 22 nt, Human
acauuguuugagaauacagaug

SEQ ID NO: 573081 - RNA, 22 nt, Human
gcucugugagccacuugaugua

SEQ ID NO: 573082 - RNA, 22 nt, Human
uuagggaaacaaacauuuucuu

SEQ ID NO: 573083 - RNA, 22 nt, Human
ggcaagggacggccgugagaca

SEQ ID NO: 573084 - RNA, 21 nt, Human
ccagccucagaucagggagcu

SEQ ID NO: 573085 - RNA, 22 nt, Human
auuauuauaaagugcaugaccu

SEQ ID NO: 573086 - RNA, 22 nt, Human
gccucaguugaucugugugagc

SEQ ID NO: 573087 - RNA, 21 nt, Human
cagugcucaaucugacagugg

SEQ ID NO: 573088 - RNA, 22 nt, Human
acaugcauaagccuagccauca

SEQ ID NO: 573089 - RNA, 22 nt, Human
agcaagaugcaaacauccgucc

SEQ ID NO: 573090 - RNA, 22 nt, Human
ggcagagacaccgaaugacucu

SEQ ID NO: 573091 - RNA, 22 nt, Human
ucaccaggauuccuaucaguag

SEQ ID NO: 573092 - RNA, 22 nt, Human
auaccauuuccauguuacauua

SEQ ID NO: 573093 - RNA, 22 nt, Human
caggauuaaggugaggggagua

SEQ ID NO: 573094 - RNA, 23 nt, Human
gugagcagcccacuaggaaugcc

SEQ ID NO: 573095 - RNA, 22 nt, Human
cugaggcugggcugaggguaua

SEQ ID NO: 573096 - RNA, 20 nt, Human
caggaggcaaggucaagguc

SEQ ID NO: 573097 - RNA, 20 nt, Human
caggacagcgcaaucggagg

SEQ ID NO: 573098 - RNA, 22 nt, Human
agagcccucucauuggcuuauu

SEQ ID NO: 573099 - RNA, 22 nt, Human
gagaacacuuauggauuauucu

SEQ ID NO: 573100 - RNA, 22 nt, Human
uuuauuauagugguggggacug

SEQ ID NO: 573101 - RNA, 22 nt, Human
ugagggucuggaaucugggcuu

SEQ ID NO: 573102 - RNA, 22 nt, Human
ucagccaggcacaauggcagcu

SEQ ID NO: 573103 - RNA, 22 nt, Human
uacuuccuguuuccaugucugu

SEQ ID NO: 573104 - RNA, 22 nt, Human
uuucuucuugauuuaaacaggg

SEQ ID NO: 573105 - RNA, 22 nt, Human
guuccuaaaucuggaggaccuc

SEQ ID NO: 573106 - RNA, 22 nt, Human
auccauuuguaaauguuagagu

SEQ ID NO: 573107 - RNA, 22 nt, Human
cagaauuugaaguaauauucca

SEQ ID NO: 573108 - RNA, 22 nt, Human
uguuauccucagcucaccucua

SEQ ID NO: 573109 - RNA, 22 nt, Human
gagcaugguuccauagguuggu

SEQ ID NO: 573110 - RNA, 22 nt, Human
uuggauccaucucaggcauagg

SEQ ID NO: 573111 - RNA, 22 nt, Human
guguguguauauauacacacac

SEQ ID NO: 573112 - RNA, 17 nt, Human
cgagggcuugcuggcuc

SEQ ID NO: 573113 - RNA, 21 nt, Human
ucuaagaacaugauucucccu

SEQ ID NO: 573114 - RNA, 22 nt, Human
auggcacaggagaggagggcug

SEQ ID NO: 573115 - RNA, 22 nt, Human
agggaagagcuugcaagaaacc

SEQ ID NO: 573116 - RNA, 22 nt, Human
accagcaccugauaggcaguaa

SEQ ID NO: 573117 - RNA, 22 nt, Human
uuucaauugacuuuggaagaaa

SEQ ID NO: 573118 - RNA, 22 nt, Human
auucugaguccaugggggcagg

SEQ ID NO: 573119 - RNA, 22 nt, Human
gcugguccaauuaugaacuguu

SEQ ID NO: 573120 - RNA, 19 nt, Human
agcagccaucgaccaugga

SEQ ID NO: 573121 - RNA, 22 nt, Human
uuucuauaucuuaccuauugua

SEQ ID NO: 573122 - RNA, 20 nt, Human
ucucaguuucuagagucagg

SEQ ID NO: 573123 - RNA, 22 nt, Human
cauuuauugaguggccacagug

SEQ ID NO: 573124 - RNA, 22 nt, Human
uggucagacaaaggagaauguu

SEQ ID NO: 573125 - RNA, 22 nt, Human
cagucaggggugggaucaaggc

SEQ ID NO: 573126 - RNA, 19 nt, Human
aaagaacuuugggcuaggc

SEQ ID NO: 573127 - RNA, 19 nt, Human
aucagcaagguaggaugug

SEQ ID NO: 573128 - RNA, 23 nt, Human
ugcuacucaaaguguggucccag

SEQ ID NO: 573129 - RNA, 22 nt, Human
ggucagagaaaaguaggguguu

SEQ ID NO: 573130 - RNA, 22 nt, Human
uauuucuaagcuguaagucuga

SEQ ID NO: 573131 - RNA, 22 nt, Human
caaggaggcagugggacuugaa

SEQ ID NO: 573132 - RNA, 22 nt, Human
ugagguaggauaagacaaugag

SEQ ID NO: 573133 - RNA, 22 nt, Human
auuguuaugaaaauaagauguu

SEQ ID NO: 573134 - RNA, 18 nt, Human
acuucccagaugagggga

SEQ ID NO: 573135 - RNA, 22 nt, Human
uauuaaauguuauuuggguugu

SEQ ID NO: 573136 - RNA, 22 nt, Human
gagcuccugaaacguuccugcc

SEQ ID NO: 573137 - RNA, 22 nt, Human
uccuggggaggguucuggcucc

SEQ ID NO: 573138 - RNA, 23 nt, Human
ucuccuccuagauacagucaugg

SEQ ID NO: 573139 - RNA, 22 nt, Human
aggggcuccaaggaaguuuggg

SEQ ID NO: 573140 - RNA, 22 nt, Human
gcugaggucaggagcugugggg

SEQ ID NO: 573141 - RNA, 22 nt, Human
auucuuaauugccaugcuguau

SEQ ID NO: 573142 - RNA, 22 nt, Human
ggugcaggaaaauuaccuggag

SEQ ID NO: 573143 - RNA, 21 nt, Human
ucccucagacagggugccuau

SEQ ID NO: 573144 - RNA, 23 nt, Human
gcaggugguucgaacagaaguuu

SEQ ID NO: 573145 - RNA, 22 nt, Human
cuuuuauuuugaauuaagggcu

SEQ ID NO: 573146 - RNA, 22 nt, Human
cuguauaagauaccacacugaa

SEQ ID NO: 573147 - RNA, 22 nt, Human
aaugaagccagguagaagagaa

SEQ ID NO: 573148 - RNA, 22 nt, Human
ggagcuggcagcgcaacccaga

SEQ ID NO: 573149 - RNA, 23 nt, Human
ugcagccacucaggagcucagug

SEQ ID NO: 573150 - RNA, 22 nt, Human
gguuccacgguguuuggaggca

SEQ ID NO: 573151 - RNA, 21 nt, Human
aaaugcaggcucuuuguuuuc

SEQ ID NO: 573152 - RNA, 22 nt, Human
ccucuugccaaucagcuacaga

SEQ ID NO: 573153 - RNA, 22 nt, Human
uaaauucagugaguaauuucug

SEQ ID NO: 573154 - RNA, 22 nt, Human
ugcagaggcuggcucgccgggu

SEQ ID NO: 573155 - RNA, 22 nt, Human
uggagggaacccaggcugcucu

SEQ ID NO: 573156 - RNA, 22 nt, Human
cuggccaggcuugggacagaca

SEQ ID NO: 573157 - RNA, 22 nt, Human
uagagguauaccaaaaaggcau

SEQ ID NO: 573158 - RNA, 22 nt, Human
acaggccuggugcugcugacag

SEQ ID NO: 573159 - RNA, 22 nt, Human
ugagguaguaaagguguuaguu

SEQ ID NO: 573160 - RNA, 22 nt, Human
cuucagcaacuuuggaauguuu

SEQ ID NO: 573161 - RNA, 22 nt, Human
gcagaagcugggcagcgaggug

SEQ ID NO: 573162 - RNA, 22 nt, Human
cacaugcuucuuuugauuauga

SEQ ID NO: 573163 - RNA, 21 nt, Human
auuuucauuuccaggggagga

SEQ ID NO: 573164 - RNA, 22 nt, Human
ggaggugcugaucccagucaac

SEQ ID NO: 573165 - RNA, 22 nt, Human
ggcucugaagggugacagguuu

SEQ ID NO: 573166 - RNA, 22 nt, Human
ggguaugagauauaggugaaua

SEQ ID NO: 573167 - RNA, 22 nt, Human
auucuucucuggguuggguuca

SEQ ID NO: 573168 - RNA, 22 nt, Human
agcaggugggcaugaaagcuga

SEQ ID NO: 573169 - RNA, 22 nt, Human
ucauuauucucuuuaauguucu

SEQ ID NO: 573170 - RNA, 22 nt, Human
ggcuucagaagacuggacaggu

SEQ ID NO: 573171 - RNA, 22 nt, Human
aauucacaggagguauuugucc

SEQ ID NO: 573172 - RNA, 22 nt, Human
aaaugcucucuaauguaauaca

SEQ ID NO: 573173 - RNA, 22 nt, Human
cuggaagacguuugaagccaug

SEQ ID NO: 573174 - RNA, 22 nt, Human
uugugggcuugccuggcucuug

SEQ ID NO: 573175 - RNA, 22 nt, Human
ucucccaggugggugccuggag

SEQ ID NO: 573176 - RNA, 22 nt, Human
acacagaguuugacacauggga

SEQ ID NO: 573177 - RNA, 22 nt, Human
uagcuucccuagcuaaagaggu

SEQ ID NO: 573178 - RNA, 22 nt, Human
gagaggcuaugagguucugugu

SEQ ID NO: 573179 - RNA, 22 nt, Human
cuucugauuagcaaguuuguau

SEQ ID NO: 573180 - RNA, 23 nt, Human
auuguuuuuggcucucagggaau

SEQ ID NO: 573181 - RNA, 22 nt, Human
aggaugacuggaacccaaguga

SEQ ID NO: 573182 - RNA, 21 nt, Human
ucagagaauggccuacucuca

SEQ ID NO: 573183 - RNA, 20 nt, Human
uacagucagggcacaggcag

SEQ ID NO: 573184 - RNA, 22 nt, Human
uucagcacaguucaagauggua

SEQ ID NO: 573185 - RNA, 22 nt, Human
ugagugggauuaaaugagguga

SEQ ID NO: 573186 - RNA, 23 nt, Human
ugggcagcuucugcaugcccacc

SEQ ID NO: 573187 - RNA, 22 nt, Human
cacuggaggucaguggagcacu

SEQ ID NO: 573188 - RNA, 22 nt, Human
ggcuggaaugcaacuguguguu

SEQ ID NO: 573189 - RNA, 22 nt, Human
uccaggcuacuuggauuccugg

SEQ ID NO: 573190 - RNA, 17 nt, Human
ugcuucaucccgauccu

SEQ ID NO: 573191 - RNA, 22 nt, Human
ccaaggcuuccugaccuacaug

SEQ ID NO: 573192 - RNA, 22 nt, Human
uuugguaaccuugcauucuuua

SEQ ID NO: 573193 - RNA, 22 nt, Human
aagggaggaggauuuauuguac

SEQ ID NO: 573194 - RNA, 22 nt, Human
gacaggcuucaugauggcagga

SEQ ID NO: 573195 - RNA, 22 nt, Human
auuaagcucuccaggaaaugua

SEQ ID NO: 573196 - RNA, 22 nt, Human
uuuuuguugcagagaggccacu

SEQ ID NO: 573197 - RNA, 22 nt, Human
ccaggagacuguacugauauuu

SEQ ID NO: 573198 - RNA, 22 nt, Human
uuaaauuagucaagcuucucug

SEQ ID NO: 573199 - RNA, 22 nt, Human
ucaggaaaauacugcuuaucca

SEQ ID NO: 573200 - RNA, 22 nt, Human
cugggucuccggcagccucggg

SEQ ID NO: 573201 - RNA, 22 nt, Human
gugauuucaaauauagagugag

SEQ ID NO: 573202 - RNA, 22 nt, Human
ucacgugagggaccugugucug

SEQ ID NO: 573203 - RNA, 22 nt, Human
gucugugggccaaauacagccc

SEQ ID NO: 573204 - RNA, 22 nt, Human
uagccgggugugguggaacucc

SEQ ID NO: 573205 - RNA, 22 nt, Human
cugugaauguuauaucucaaug

SEQ ID NO: 573206 - RNA, 22 nt, Human
uccuugaaaagaaugucuccau

SEQ ID NO: 573207 - RNA, 22 nt, Human
ucaguguucgcucagggacucc

SEQ ID NO: 573208 - RNA, 22 nt, Human
auggcagacacaggcaggcaga

SEQ ID NO: 573209 - RNA, 21 nt, Human
cagcuucuucugugaccuggu

SEQ ID NO: 573210 - RNA, 22 nt, Human
cugucuuuuuagagaguaggau

SEQ ID NO: 573211 - RNA, 22 nt, Human
cagcccuggugccaagguuccc

SEQ ID NO: 573212 - RNA, 22 nt, Human
cccagcuccuuacagggccgaa

SEQ ID NO: 573213 - RNA, 22 nt, Human
uagauacacacacagucaugug

SEQ ID NO: 573214 - RNA, 20 nt, Human
gagggugggacuuccuaggc

SEQ ID NO: 573215 - RNA, 22 nt, Human
uuuaaccagaaagguacucauc

SEQ ID NO: 573216 - RNA, 22 nt, Human
gaaguuuauuucaaucuauuca

SEQ ID NO: 573217 - RNA, 22 nt, Human
agcaaggggcagugaaagugug

SEQ ID NO: 573218 - RNA, 22 nt, Human
uguuuucaagucaaggccaaau

SEQ ID NO: 573219 - RNA, 22 nt, Human
ccucagaagaaguggaauugau

SEQ ID NO: 573220 - RNA, 22 nt, Human
uauucacaggcuggagugaugu

SEQ ID NO: 573221 - RNA, 23 nt, Human
cccagguguggaggcgguggcag

SEQ ID NO: 573222 - RNA, 22 nt, Human
uauugacauuuuuauagcuuga

SEQ ID NO: 573223 - RNA, 22 nt, Human
ucauaguuauggagauuaagga

SEQ ID NO: 573224 - RNA, 23 nt, Human
gcaguggaaugucucuguuugga

SEQ ID NO: 573225 - RNA, 22 nt, Human
uacuagucuucugcuauucccu

SEQ ID NO: 573226 - RNA, 22 nt, Human
aaacaaguuuagaauaaugaau

SEQ ID NO: 573227 - RNA, 22 nt, Human
uccuccucacgcuguugcuugu

SEQ ID NO: 573228 - RNA, 20 nt, Human
gugcagcacuuggggguagg

SEQ ID NO: 573229 - RNA, 19 nt, Human
acaggggccuuuccagggu

SEQ ID NO: 573230 - RNA, 22 nt, Human
ccagagcaauucucacagaacu

SEQ ID NO: 573231 - RNA, 22 nt, Human
ccaugaguagcgauuucauuuu

SEQ ID NO: 573232 - RNA, 20 nt, Human
aacuuguuuuguuuucuaau

SEQ ID NO: 573233 - RNA, 22 nt, Human
aaauuuuaaggcuggaacuuaa

SEQ ID NO: 573234 - RNA, 22 nt, Human
acaugucuuuuaaagucuaaua

SEQ ID NO: 573235 - RNA, 22 nt, Human
aagauuuccuggauguaauucc

SEQ ID NO: 573236 - RNA, 21 nt, Human
aagcuuccaaacugcuggacu

SEQ ID NO: 573237 - RNA, 22 nt, Human
ccugucuggggacucccugggu

SEQ ID NO: 573238 - RNA, 22 nt, Human
ccagggcugccgcaucccuggu

SEQ ID NO: 573239 - RNA, 22 nt, Human
agcagccaggaaucugcagagc

SEQ ID NO: 573240 - RNA, 22 nt, Human
uuaggaaaagaagacauuucua

SEQ ID NO: 573241 - RNA, 18 nt, Human
uccugccugugccccagg

SEQ ID NO: 573242 - RNA, 22 nt, Human
guggcaggggcgggcuguuccg

SEQ ID NO: 573243 - RNA, 22 nt, Human
ugugaaaagcguguguucuagg

SEQ ID NO: 573244 - RNA, 22 nt, Human
agccuguguccucaucugcagc

SEQ ID NO: 573245 - RNA, 22 nt, Human
caggcugauuaggccucgucca

SEQ ID NO: 573246 - RNA, 21 nt, Human
aaugucuuuguccaugcucug

SEQ ID NO: 573247 - RNA, 22 nt, Human
uaaaucaguagauaugguauag

SEQ ID NO: 573248 - RNA, 22 nt, Human
aggcuggcaaggcagaugugug

SEQ ID NO: 573249 - RNA, 22 nt, Human
uuucauuauacagcuucauaaa

SEQ ID NO: 573250 - RNA, 19 nt, Human
acuucuuuucaacacagga

SEQ ID NO: 573251 - RNA, 22 nt, Human
ggcagaaggccucccagcuccu

SEQ ID NO: 573252 - RNA, 20 nt, Human
acauggcauucccacguggu

SEQ ID NO: 573253 - RNA, 22 nt, Human
uguuaaggagacacaugaaaaa

SEQ ID NO: 573254 - RNA, 22 nt, Human
uaaugccuagauuauucuguuu

SEQ ID NO: 573255 - RNA, 22 nt, Human
uuaggcuguucuuguguuguua

SEQ ID NO: 573256 - RNA, 22 nt, Human
uccaggcuggagugcaguggca

SEQ ID NO: 573257 - RNA, 22 nt, Human
gacaggaacauaaauguaggag

SEQ ID NO: 573258 - RNA, 22 nt, Human
uucucucccaugaagcuucuau

SEQ ID NO: 573259 - RNA, 18 nt, Human
cccuuagccuuuccucuc

SEQ ID NO: 573260 - RNA, 22 nt, Human
ugauuuuuagcuauucugaaga

SEQ ID NO: 573261 - RNA, 22 nt, Human
ugggcucugguuuccuggcugg

SEQ ID NO: 573262 - RNA, 22 nt, Human
ugcagagguguugcugagauaa

SEQ ID NO: 573263 - RNA, 22 nt, Human
ggucugugcucuggagccucug

SEQ ID NO: 573264 - RNA, 22 nt, Human
gcccaggagaggccagggcuga

SEQ ID NO: 573265 - RNA, 22 nt, Human
augcuuuuuaaacuuaauugga

SEQ ID NO: 573266 - RNA, 21 nt, Human
gguagggaagguucgcuggug

SEQ ID NO: 573267 - RNA, 22 nt, Human
aaaagcagagacucuggagcua

SEQ ID NO: 573268 - RNA, 22 nt, Human
uauaaaguuucgaaagauguau

SEQ ID NO: 573269 - RNA, 23 nt, Human
gaggucaaggcugcagugauugc

SEQ ID NO: 573270 - RNA, 19 nt, Human
uuuuaagugcccuuucuuc

SEQ ID NO: 573271 - RNA, 22 nt, Human
accccaggucaucugagagucc

SEQ ID NO: 573272 - RNA, 22 nt, Human
gcaguguuacuugguuugcaga

SEQ ID NO: 573273 - RNA, 22 nt, Human
gggggugaggacaggagcacug

SEQ ID NO: 573274 - RNA, 22 nt, Human
aaugugagccaaugcccguggg

SEQ ID NO: 573275 - RNA, 22 nt, Human
acccaggguuugagcucugcag

SEQ ID NO: 573276 - RNA, 22 nt, Human
ugaaggcauuugaguuggugag

SEQ ID NO: 573277 - RNA, 22 nt, Human
aggcagccaguucagguuucuu

SEQ ID NO: 573278 - RNA, 22 nt, Human
uuccccuugauaaugcaguaag

SEQ ID NO: 573279 - RNA, 20 nt, Human
uuguuuccuggcuguucugc

SEQ ID NO: 573280 - RNA, 22 nt, Human
ugacaagaucacagucaagugu

SEQ ID NO: 573281 - RNA, 22 nt, Human
cccugaggcaguaggagcuuuu

SEQ ID NO: 573282 - RNA, 19 nt, Human
cugcuuuaggccuuaaaag

SEQ ID NO: 573283 - RNA, 22 nt, Human
ggcaggaggaagaguuagcacc

SEQ ID NO: 573284 - RNA, 22 nt, Human
cucauaaugugacuguauuuga

SEQ ID NO: 573285 - RNA, 22 nt, Human
uuaucuugaguauugagauucu

SEQ ID NO: 573286 - RNA, 22 nt, Human
gcacagcaguggcauaaacaau

SEQ ID NO: 573287 - RNA, 22 nt, Human
uuacuuuauagaacacuggggg

SEQ ID NO: 573288 - RNA, 22 nt, Human
uggaaacacugcauguucaccc

SEQ ID NO: 573289 - RNA, 19 nt, Human
gagcugccuuuugaagacc

SEQ ID NO: 573290 - RNA, 22 nt, Human
gagggcugauaacaggaauaca

SEQ ID NO: 573291 - RNA, 22 nt, Human
cacagagaucggaacagaagua

SEQ ID NO: 573292 - RNA, 22 nt, Human
gcagagccaggagagacccuug

SEQ ID NO: 573293 - RNA, 22 nt, Human
agaggaggauuuguaaaggucu

SEQ ID NO: 573294 - RNA, 23 nt, Human
ucuccaggccuuacuccaggccu

SEQ ID NO: 573295 - RNA, 18 nt, Human
ggaagaaaaggaacucag

SEQ ID NO: 573296 - RNA, 22 nt, Human
aaugaugaacucagagggaacc

SEQ ID NO: 573297 - RNA, 22 nt, Human
cgggggcacccacaaaugagga

SEQ ID NO: 573298 - RNA, 22 nt, Human
aauacugugggaugcaguagga

SEQ ID NO: 573299 - RNA, 20 nt, Human
ggcagccaaucagcgugccg

SEQ ID NO: 573300 - RNA, 22 nt, Human
gagcccuguagcaagucauguc

SEQ ID NO: 573301 - RNA, 19 nt, Human
uuucucucccucaucccga

SEQ ID NO: 573302 - RNA, 22 nt, Human
cuuauugugauuccugccucuu

SEQ ID NO: 573303 - RNA, 22 nt, Human
uccagggcuggguuggcucagc

SEQ ID NO: 573304 - RNA, 22 nt, Human
uagaaauggagaacagauuaau

SEQ ID NO: 573305 - RNA, 18 nt, Human
gcugcaggcgccugcggu

SEQ ID NO: 573306 - RNA, 22 nt, Human
ucacaguuacuccuucagauga

SEQ ID NO: 573307 - RNA, 22 nt, Human
caaucuuacuuuugaaaaguga

SEQ ID NO: 573308 - RNA, 22 nt, Human
ugcuuuaacgcugagggucuca

SEQ ID NO: 573309 - RNA, 22 nt, Human
uccugucucaguguauuugcag

SEQ ID NO: 573310 - RNA, 19 nt, Human
gggcccagcauggaggguu

SEQ ID NO: 573311 - RNA, 22 nt, Human
cagcaggcccagaguuucaugg

SEQ ID NO: 573312 - RNA, 22 nt, Human
ucccagaggucucugcugguuc

SEQ ID NO: 573313 - RNA, 22 nt, Human
guuuguuuauacaaaagauccu

SEQ ID NO: 573314 - RNA, 22 nt, Human
gcaggcaccggguugcuccccu

SEQ ID NO: 573315 - RNA, 22 nt, Human
uuuccuaacacaaugcaugaga

SEQ ID NO: 573316 - RNA, 22 nt, Human
cugccuccucacguccacagug

SEQ ID NO: 573317 - RNA, 22 nt, Human
uccaggcucucaggugucagca

SEQ ID NO: 573318 - RNA, 22 nt, Human
accucagagauacaaaccaugg

SEQ ID NO: 573319 - RNA, 22 nt, Human
acagugcugucaaauauguuuu

SEQ ID NO: 573320 - RNA, 22 nt, Human
uacacauguuuggcaaguaugu

SEQ ID NO: 573321 - RNA, 22 nt, Human
auacuuacuuuucuucagacua

SEQ ID NO: 573322 - RNA, 22 nt, Human
agagcagugcugaagaguaggg

SEQ ID NO: 573323 - RNA, 22 nt, Human
cuuagcuuuguuuaacacaggg

SEQ ID NO: 573324 - RNA, 22 nt, Human
cacucugggcucuuguuucaga

SEQ ID NO: 573325 - RNA, 22 nt, Human
agccagagacuuuaccugugca

SEQ ID NO: 573326 - RNA, 22 nt, Human
ggaguggccucuccugugcagg

SEQ ID NO: 573327 - RNA, 22 nt, Human
cccaggccuggucugggccagu

SEQ ID NO: 573328 - RNA, 22 nt, Human
caaugacauggauaaucauauu

SEQ ID NO: 573329 - RNA, 22 nt, Human
ucacaauugagauccucccacc

SEQ ID NO: 573330 - RNA, 22 nt, Human
cacacaguaguaugaggcaaaa

SEQ ID NO: 573331 - RNA, 22 nt, Human
uucuuucugggaagaguucaga

SEQ ID NO: 573332 - RNA, 22 nt, Human
uaaaaucaugacagauugacau

SEQ ID NO: 573333 - RNA, 16 nt, Human
gcugggagggagaggu

SEQ ID NO: 573334 - RNA, 22 nt, Human
uccagcucuggcuuggcuagcu

SEQ ID NO: 573335 - RNA, 22 nt, Human
guuuucuaaguagguagcacca

SEQ ID NO: 573336 - RNA, 22 nt, Human
cagguucccagguccagggcuu

SEQ ID NO: 573337 - RNA, 22 nt, Human
uucuguuuauaauuugcaguug

SEQ ID NO: 573338 - RNA, 22 nt, Human
gaaccacaagauucaaaggggu

SEQ ID NO: 573339 - RNA, 22 nt, Human
acaauagguguccaauuaacaa

SEQ ID NO: 573340 - RNA, 22 nt, Human
gucuuugcugucuuugcucuca

SEQ ID NO: 573341 - RNA, 22 nt, Human
ggcggguguaaguaggacagcg

SEQ ID NO: 573342 - RNA, 22 nt, Human
gcaguguuacuuggaguacuaa

SEQ ID NO: 573343 - RNA, 22 nt, Human
uccagggagauacuggcugcca

SEQ ID NO: 573344 - RNA, 22 nt, Human
cuagagaaacgccgugggagga

SEQ ID NO: 573345 - RNA, 22 nt, Human
gcuccuggucuggagcuucaag

SEQ ID NO: 573346 - RNA, 22 nt, Human
ccugggcucugucagaauuggg

SEQ ID NO: 573347 - RNA, 23 nt, Human
uaaugccagcccugcaguuaagc

SEQ ID NO: 573348 - RNA, 21 nt, Human
ccaccaggucuucugcucggg

SEQ ID NO: 573349 - RNA, 22 nt, Human
gaagcaaucuggcucccagcca

SEQ ID NO: 573350 - RNA, 22 nt, Human
aaugaagauaaaaugggaugga

SEQ ID NO: 573351 - RNA, 22 nt, Human
cucagggaugggcagauguuaa

SEQ ID NO: 573352 - RNA, 22 nt, Human
ugggugguugcugaggcuccuu

SEQ ID NO: 573353 - RNA, 22 nt, Human
caggcagagugagaagcccuug

SEQ ID NO: 573354 - RNA, 22 nt, Human
agcauguugggaugagaaggaa

SEQ ID NO: 573355 - RNA, 22 nt, Human
cugggcagcuccauaccaccca

SEQ ID NO: 573356 - RNA, 22 nt, Human
agccacugugcaggagcagugu

SEQ ID NO: 573357 - RNA, 19 nt, Human
gauauaaagagauggugaa

SEQ ID NO: 573358 - RNA, 19 nt, Human
cucugggcaagucacuuaa

SEQ ID NO: 573359 - RNA, 22 nt, Human
uguccugugccaccuuccugag

SEQ ID NO: 573360 - RNA, 22 nt, Human
gagagaaagccccugcaucccu

SEQ ID NO: 573361 - RNA, 22 nt, Human
ucugaauaguucuauuuuaaag

SEQ ID NO: 573362 - RNA, 22 nt, Human
accaggagccacaggaggagcc

SEQ ID NO: 573363 - RNA, 22 nt, Human
aggacuggcagugugagggguc

SEQ ID NO: 573364 - RNA, 22 nt, Human
aacagcaggcaccaaggcuaug

SEQ ID NO: 573365 - RNA, 19 nt, Human
ucucuggcauagacucaau

SEQ ID NO: 573366 - RNA, 22 nt, Human
uccucccacauaggacaauggg

SEQ ID NO: 573367 - RNA, 22 nt, Human
aggcuuaaaugcucauaucagu

SEQ ID NO: 573368 - RNA, 22 nt, Human
agagcuggcugugggugacuuu

SEQ ID NO: 573369 - RNA, 23 nt, Human
gcugucaguuguuuuugucucua

SEQ ID NO: 573370 - RNA, 22 nt, Human
acugggcaauaaauucagagaa

SEQ ID NO: 573371 - RNA, 22 nt, Human
ugcuucaggaagaaacgccagg

SEQ ID NO: 573372 - RNA, 22 nt, Human
ugagauggguggggagcucagg

SEQ ID NO: 573373 - RNA, 22 nt, Human
gugccagggaguggaggagcuu

SEQ ID NO: 573374 - RNA, 22 nt, Human
aaggaaggaauugaucaugcgc

SEQ ID NO: 573375 - RNA, 22 nt, Human
uugugugucuucuucacugccc

SEQ ID NO: 573376 - RNA, 22 nt, Human
gcagggcuguggacacuuuggu

SEQ ID NO: 573377 - RNA, 22 nt, Human
agaggcucuugcccuucccaca

SEQ ID NO: 573378 - RNA, 22 nt, Human
guguguguaucugccuaucaca

SEQ ID NO: 573379 - RNA, 22 nt, Human
gggcuacauugugagagaaguu

SEQ ID NO: 573380 - RNA, 22 nt, Human
ggaguggcuguuucugccccca

SEQ ID NO: 573381 - RNA, 22 nt, Human
aguggugcugcgcgcggagcuc

SEQ ID NO: 573382 - RNA, 22 nt, Human
uuuucucuuguuaauguacuga

SEQ ID NO: 573383 - RNA, 21 nt, Human
gcagaugggaagagacgaggc

SEQ ID NO: 573384 - RNA, 22 nt, Human
ugagggggguaaucacuggguu

SEQ ID NO: 573385 - RNA, 22 nt, Human
cugggagcgcagcaggcacaac

SEQ ID NO: 573386 - RNA, 22 nt, Human
ugggcacaaacaucugccuguu

SEQ ID NO: 573387 - RNA, 19 nt, Human
ugagacagggauucaggug

SEQ ID NO: 573388 - RNA, 22 nt, Human
uuacaagauaaccugaugcugu

SEQ ID NO: 573389 - RNA, 22 nt, Human
auuugcuucugugaaaucaagu

SEQ ID NO: 573390 - RNA, 22 nt, Human
uagcagaggaaaagagaacauu

SEQ ID NO: 573391 - RNA, 22 nt, Human
aauuaagucacacaccuaaacc

SEQ ID NO: 573392 - RNA, 19 nt, Human
agcaggccacagggccagc

SEQ ID NO: 573393 - RNA, 22 nt, Human
auuauuagugauguuguuacug

SEQ ID NO: 573394 - RNA, 22 nt, Human
uaguuuaugauuuuuuggaagg

SEQ ID NO: 573395 - RNA, 22 nt, Human
cagguccucacgccucacccuu

SEQ ID NO: 573396 - RNA, 22 nt, Human
aacacugaaguagugaauacug

SEQ ID NO: 573397 - RNA, 22 nt, Human
gggcacugaacacccucuucgc

SEQ ID NO: 573398 - RNA, 22 nt, Human
uuucaacagaucugucuucagg

SEQ ID NO: 573399 - RNA, 22 nt, Human
acaauaaguauugggcuuuuga

SEQ ID NO: 573400 - RNA, 19 nt, Human
caugugcaugagcacagga

SEQ ID NO: 573401 - RNA, 22 nt, Human
caggggccuggcugucuaggaa

SEQ ID NO: 573402 - RNA, 22 nt, Human
caggaggaggguacaccaucag

SEQ ID NO: 573403 - RNA, 22 nt, Human
ucagagcuaaggggagagcaaa

SEQ ID NO: 573404 - RNA, 22 nt, Human
cauuaaguauuucaguuacugu

SEQ ID NO: 573405 - RNA, 22 nt, Human
agcagggccucuggcacugguc

SEQ ID NO: 573406 - RNA, 22 nt, Human
aucucuuugauggcuccuguga

SEQ ID NO: 573407 - RNA, 22 nt, Human
ucccagcauaacaaacugcccg

SEQ ID NO: 573408 - RNA, 22 nt, Human
cagcuuucuuccuucugucugu

SEQ ID NO: 573409 - RNA, 17 nt, Human
agcccccacucccaagu

SEQ ID NO: 573410 - RNA, 22 nt, Human
caccuggcccagcuccagugcu

SEQ ID NO: 573411 - RNA, 22 nt, Human
agaccuggugauagcuguccua

SEQ ID NO: 573412 - RNA, 17 nt, Human
ucucuuguucacugcug

SEQ ID NO: 573413 - RNA, 22 nt, Human
uugagaagguggucauuugcaa

SEQ ID NO: 573414 - RNA, 22 nt, Human
uggagaaggccggccaggagug

SEQ ID NO: 573415 - RNA, 22 nt, Human
ggcggagguugcaguaagccga

SEQ ID NO: 573416 - RNA, 22 nt, Human
ugaguccuggcuuugggaugua

SEQ ID NO: 573417 - RNA, 22 nt, Human
cccuggggagcaggcgaaggag

SEQ ID NO: 573418 - RNA, 22 nt, Human
agaacgaaugcuucagcucuag

SEQ ID NO: 573419 - RNA, 23 nt, Human
uggggagaguuacccuggaagcg

SEQ ID NO: 573420 - RNA, 22 nt, Human
uugacuuuacaguuuucuuagg

SEQ ID NO: 573421 - RNA, 22 nt, Human
acccacgaagaugagcggcaug

SEQ ID NO: 573422 - RNA, 22 nt, Human
agcccccacguuuccugggucc

SEQ ID NO: 573423 - RNA, 22 nt, Human
acuugucuaugguuacauccua

SEQ ID NO: 573424 - RNA, 22 nt, Human
gauuucuuugcaagcuguguuc

SEQ ID NO: 573425 - RNA, 22 nt, Human
uacagggacauggaacaggcuc

SEQ ID NO: 573426 - RNA, 22 nt, Human
caggaggcagcgcucucaggac

SEQ ID NO: 573427 - RNA, 20 nt, Human
agacaggagcccccauucag

SEQ ID NO: 573428 - RNA, 22 nt, Human
uugugcuagaaccaguacagaa

SEQ ID NO: 573429 - RNA, 22 nt, Human
agaaggggagaagcuaccagga

SEQ ID NO: 573430 - RNA, 22 nt, Human
acccaggaggugacacagggcu

SEQ ID NO: 573431 - RNA, 19 nt, Human
ugcuggagguugacagggu

SEQ ID NO: 573432 - RNA, 22 nt, Human
uuauuuucuccucagaaagugg

SEQ ID NO: 573433 - RNA, 22 nt, Human
cagcucugcugggaggaugcag

SEQ ID NO: 573434 - RNA, 22 nt, Human
ccugccaggacauugcuugaag

SEQ ID NO: 573435 - RNA, 22 nt, Human
auccuuuauaagacuuguauuc

SEQ ID NO: 573436 - RNA, 22 nt, Human
aaacagaguuugguaaauagcc

SEQ ID NO: 573437 - RNA, 22 nt, Human
auguuucaaugcacuuuagccu

SEQ ID NO: 573438 - RNA, 22 nt, Human
cugggggcaagcagacagcugu

SEQ ID NO: 573439 - RNA, 22 nt, Human
aagcucaggaaagagucugguu

SEQ ID NO: 573440 - RNA, 22 nt, Human
aaagcaguauaguggaagggcu

SEQ ID NO: 573441 - RNA, 22 nt, Human
cacccagcuuuugcauccuccg

SEQ ID NO: 573442 - RNA, 22 nt, Human
cagcuggcuuguuuguucuuga

SEQ ID NO: 573443 - RNA, 22 nt, Human
uagcagaaccagcagucaauuu

SEQ ID NO: 573444 - RNA, 22 nt, Human
cuccugggcugucggcgcucug

SEQ ID NO: 573445 - RNA, 22 nt, Human
cagggccauaucuugugcacca

SEQ ID NO: 573446 - RNA, 22 nt, Human
cuccccagguucaggagguggg

SEQ ID NO: 573447 - RNA, 22 nt, Human
ugaaguuuuacuaggugaauuu

SEQ ID NO: 573448 - RNA, 22 nt, Human
ucauugucucucuuuucauaua

SEQ ID NO: 573449 - RNA, 22 nt, Human
ugucauuuauuuugcugucugu

SEQ ID NO: 573450 - RNA, 22 nt, Human
acacauuaaccuuugaaauucu

SEQ ID NO: 573451 - RNA, 22 nt, Human
ugcagcugaggccagcuaugcc

SEQ ID NO: 573452 - RNA, 22 nt, Human
guccuguuaagaugcagagucc

SEQ ID NO: 573453 - RNA, 22 nt, Human
uuuuuuauaucaacugaagucu

SEQ ID NO: 573454 - RNA, 22 nt, Human
acacuagucucuucuugacuug

SEQ ID NO: 573455 - RNA, 22 nt, Human
uugggcacggacagguggggau

SEQ ID NO: 573456 - RNA, 21 nt, Human
uuacaugguuuaucauaugga

SEQ ID NO: 573457 - RNA, 22 nt, Human
guauacaauacacaaugcucug

SEQ ID NO: 573458 - RNA, 22 nt, Human
acacccagcuuuugaaugcccu

SEQ ID NO: 573459 - RNA, 22 nt, Human
uucuaguuaaaguauguauuag

SEQ ID NO: 573460 - RNA, 22 nt, Human
cacuuugugugggaucaggggu

SEQ ID NO: 573461 - RNA, 23 nt, Human
gcuuccauucuaguuugcugugc

SEQ ID NO: 573462 - RNA, 22 nt, Human
cauuuuaccuagaagcugaaag

SEQ ID NO: 573463 - RNA, 22 nt, Human
ucuuagaugaauaaaaaguuau

SEQ ID NO: 573464 - RNA, 22 nt, Human
agcugugugaccuagggcaagc

SEQ ID NO: 573465 - RNA, 22 nt, Human
aaauugcauucaggaugcagga

SEQ ID NO: 573466 - RNA, 21 nt, Human
caaauacuuagaaacuuaaga

SEQ ID NO: 573467 - RNA, 22 nt, Human
cacaggcagccuuguagaagaa

SEQ ID NO: 573468 - RNA, 22 nt, Human
augggcugcuucuccagcaccu

SEQ ID NO: 573469 - RNA, 23 nt, Human
cuuuuaacuugaucugagaccag

SEQ ID NO: 573470 - RNA, 22 nt, Human
cacaaaaucuuucucgauuauu

SEQ ID NO: 573471 - RNA, 22 nt, Human
ugcagccaucgcagagucugua

SEQ ID NO: 573472 - RNA, 22 nt, Human
gcaguccuguagcgacuuuuuu

SEQ ID NO: 573473 - RNA, 22 nt, Human
cugaggcacccaucuucuccug

SEQ ID NO: 573474 - RNA, 22 nt, Human
uguagcagaguaucucuguuuu

SEQ ID NO: 573475 - RNA, 22 nt, Human
cagcacagugcagaugcugacu

SEQ ID NO: 573476 - RNA, 22 nt, Human
agcugcagggcuuggguuuccc

SEQ ID NO: 573477 - RNA, 22 nt, Human
ucauccaguaugacuggugucu

SEQ ID NO: 573478 - RNA, 22 nt, Human
ugucauuuaucuuauaguaauc

SEQ ID NO: 573479 - RNA, 22 nt, Human
agacucugaaaucuaggugcaa

SEQ ID NO: 573480 - RNA, 22 nt, Human
cagcucuguugccaaagugggc

SEQ ID NO: 573481 - RNA, 22 nt, Human
uguacaaucuuggucccuuuau

SEQ ID NO: 573482 - RNA, 22 nt, Human
gauauucuauguagaaugagcu

SEQ ID NO: 573483 - RNA, 22 nt, Human
caggcucgguccaguggcaccc

SEQ ID NO: 573484 - RNA, 22 nt, Human
aaaguauauuuacuuacuguga

SEQ ID NO: 573485 - RNA, 19 nt, Human
gaaugggaaugggaaagcu

SEQ ID NO: 573486 - RNA, 22 nt, Human
auguuucaggaaaucagcuaga

SEQ ID NO: 573487 - RNA, 22 nt, Human
gauacuuuccauccaaaugcau

SEQ ID NO: 573488 - RNA, 22 nt, Human
cucagcacugacccaggagaug

SEQ ID NO: 573489 - RNA, 22 nt, Human
acacauguaaaacacuuagcaa

SEQ ID NO: 573490 - RNA, 22 nt, Human
uacaacaguaaucaagguuuuu

SEQ ID NO: 573491 - RNA, 22 nt, Human
aucagcugaaaaacaggcagca

SEQ ID NO: 573492 - RNA, 22 nt, Human
aaaauucugucauuaaauugug

SEQ ID NO: 573493 - RNA, 22 nt, Human
ugauaugugaagcuauuaguuc

SEQ ID NO: 573494 - RNA, 22 nt, Human
auugaauagaugcauuauacua

SEQ ID NO: 573495 - RNA, 22 nt, Human
guguguggggccuucggguccu

SEQ ID NO: 573496 - RNA, 22 nt, Human
gacaaaacugagaucacacugu

SEQ ID NO: 573497 - RNA, 22 nt, Human
ugacaggaugaugagcaggggg

SEQ ID NO: 573498 - RNA, 22 nt, Human
gcaggagacuggcugugguagu

SEQ ID NO: 573499 - RNA, 22 nt, Human
auguguuuugguaauuucugcu

SEQ ID NO: 573500 - RNA, 22 nt, Human
gccugccuucggugcgcagcgg

SEQ ID NO: 573501 - RNA, 22 nt, Human
cucugcuuuuaugugccggcgc

SEQ ID NO: 573502 - RNA, 22 nt, Human
ccugcugaggucagccacccaa

SEQ ID NO: 573503 - RNA, 22 nt, Human
cucaggaggaugacugccuugg

SEQ ID NO: 573504 - RNA, 22 nt, Human
acacagaguccuuacugaggua

SEQ ID NO: 573505 - RNA, 22 nt, Human
ugaagaggccaaacuaucauug

SEQ ID NO: 573506 - RNA, 22 nt, Human
cagcugccaagaaucuuuucua

SEQ ID NO: 573507 - RNA, 22 nt, Human
gcagccagguuugaggaccacu

SEQ ID NO: 573508 - RNA, 22 nt, Human
aaagggaauguguaggacaugu

SEQ ID NO: 573509 - RNA, 23 nt, Human
gcucccugugcuccaggagaugc

SEQ ID NO: 573510 - RNA, 22 nt, Human
cagaaauucccauuucagauuc

SEQ ID NO: 573511 - RNA, 22 nt, Human
gucccugcccuccugggacuca

SEQ ID NO: 573512 - RNA, 22 nt, Human
uuaauaaacaggugcagcugaa

SEQ ID NO: 573513 - RNA, 22 nt, Human
aaagcuauuuauuacagagaau

SEQ ID NO: 573514 - RNA, 22 nt, Human
ucugugucuguuacuucacugc

SEQ ID NO: 573515 - RNA, 22 nt, Human
gcuuccaucuaugucuucauca

SEQ ID NO: 573516 - RNA, 22 nt, Human
uggagcauacuaacccacucug

SEQ ID NO: 573517 - RNA, 22 nt, Human
ugcaguccaagagucuccuggu

SEQ ID NO: 573518 - RNA, 22 nt, Human
uguaugaaccuuuaauauagug

SEQ ID NO: 573519 - RNA, 22 nt, Human
caaagcaagggcugaagacucc

SEQ ID NO: 573520 - RNA, 23 nt, Human
ggggaaguggcagugagugaggc

SEQ ID NO: 573521 - RNA, 22 nt, Human
ggccaggagaggagggcacuga

SEQ ID NO: 573522 - RNA, 22 nt, Human
uucuccacccacucuuuuguug

SEQ ID NO: 573523 - RNA, 22 nt, Human
cagcucugggugacaggagggc

SEQ ID NO: 573524 - RNA, 17 nt, Human
uuuucucucuuggauuc

SEQ ID NO: 573525 - RNA, 22 nt, Human
caucugaaaucugccuacaagc

SEQ ID NO: 573526 - RNA, 22 nt, Human
aacauucuaugugcauucagaa

SEQ ID NO: 573527 - RNA, 22 nt, Human
gaaacagugagaacuuuuccug

SEQ ID NO: 573528 - RNA, 22 nt, Human
cccagcucuggaagguggggga

SEQ ID NO: 573529 - RNA, 22 nt, Human
ugcaugcagcauaugaggccuc

SEQ ID NO: 573530 - RNA, 22 nt, Human
agagggccauaggugcauaguu

SEQ ID NO: 573531 - RNA, 22 nt, Human
augcugaagaguucaugauuau

SEQ ID NO: 573532 - RNA, 22 nt, Human
ggcuuccuaauacucccuacac

SEQ ID NO: 573533 - RNA, 22 nt, Human
gggcugaggaacauauuuuguu

SEQ ID NO: 573534 - RNA, 22 nt, Human
aaagccaggggagggauuccca

SEQ ID NO: 573535 - RNA, 22 nt, Human
acuuccugggcaugcagagucc

SEQ ID NO: 573536 - RNA, 22 nt, Human
ggcagccagcaaugagaaguuu

SEQ ID NO: 573537 - RNA, 22 nt, Human
ccuccuggaaaaauucccuggc

SEQ ID NO: 573538 - RNA, 22 nt, Human
uagaaaugugauaauagcuuaa

SEQ ID NO: 573539 - RNA, 22 nt, Human
aaagaguuguuguauaacagga

SEQ ID NO: 573540 - RNA, 22 nt, Human
acuaaaaacuacugccaauagc

SEQ ID NO: 573541 - RNA, 22 nt, Human
cuuagaaaugcagauucucagg

SEQ ID NO: 573542 - RNA, 22 nt, Human
cuguggcauugugaggacugca

SEQ ID NO: 573543 - RNA, 22 nt, Human
ggcugugccucaaggcuacuca

SEQ ID NO: 573544 - RNA, 22 nt, Human
ccuuccagccccaucucaucgu

SEQ ID NO: 573545 - RNA, 22 nt, Human
gcucccugccuacacggaccuu

SEQ ID NO: 573546 - RNA, 22 nt, Human
uggcucagauaauucaaggggc

SEQ ID NO: 573547 - RNA, 22 nt, Human
gaguggagaucgugccacugca

SEQ ID NO: 573548 - RNA, 19 nt, Human
ucagcucuggggucagugg

SEQ ID NO: 573549 - RNA, 22 nt, Human
cucucuggucccagauuccaga

SEQ ID NO: 573550 - RNA, 22 nt, Human
uugcagagaucagcagguuuga

SEQ ID NO: 573551 - RNA, 22 nt, Human
cuuccuggaugaagcccagcau

SEQ ID NO: 573552 - RNA, 22 nt, Human
ggagugaggcauuuguagcuga

SEQ ID NO: 573553 - RNA, 22 nt, Human
ggcagccaggaggguguaguuu

SEQ ID NO: 573554 - RNA, 22 nt, Human
aauuucagaacuaucugggagu

SEQ ID NO: 573555 - RNA, 22 nt, Human
uuacagguggagaaguaaggcu

SEQ ID NO: 573556 - RNA, 23 nt, Human
ugcagaggcaugaucacugcuca

SEQ ID NO: 573557 - RNA, 22 nt, Human
cuuucaacuacauacaggcgau

SEQ ID NO: 573558 - RNA, 20 nt, Human
ggagaugcagcccaggugcc

SEQ ID NO: 573559 - RNA, 20 nt, Human
agcuccugaggguuacuuuc

SEQ ID NO: 573560 - RNA, 22 nt, Human
auuaaaagcuucccaagaguua

SEQ ID NO: 573561 - RNA, 22 nt, Human
aggccacaguugaggccagcaa

SEQ ID NO: 573562 - RNA, 22 nt, Human
uggccaggccggggacagaacu

SEQ ID NO: 573563 - RNA, 19 nt, Human
agucucugaggccuaaguu

SEQ ID NO: 573564 - RNA, 22 nt, Human
uucuaguuuucaguccaccagg

SEQ ID NO: 573565 - RNA, 22 nt, Human
ugauauguaacuacuccuuaua

SEQ ID NO: 573566 - RNA, 22 nt, Human
gcagggcuagauauuugcaagu

SEQ ID NO: 573567 - RNA, 22 nt, Human
aacaguacuggacaaggaguca

SEQ ID NO: 573568 - RNA, 22 nt, Human
acaguggaguugggguagcccu

SEQ ID NO: 573569 - RNA, 22 nt, Human
ucacagcuccagacugcaacuc

SEQ ID NO: 573570 - RNA, 22 nt, Human
auaauccaugucuagaguaaag

SEQ ID NO: 573571 - RNA, 22 nt, Human
uuguugcugcucaaccucuaua

SEQ ID NO: 573572 - RNA, 22 nt, Human
ucuagucauucaugcuaugauu

SEQ ID NO: 573573 - RNA, 20 nt, Human
uaacauaguccagagaacga

SEQ ID NO: 573574 - RNA, 22 nt, Human
aacacaaagaagcugcaggauc

SEQ ID NO: 573575 - RNA, 22 nt, Human
augugagggcucaggcugacug

SEQ ID NO: 573576 - RNA, 22 nt, Human
caggugucaaaauacuaagugg

SEQ ID NO: 573577 - RNA, 22 nt, Human
gaagcaugcuaaggauucucag

SEQ ID NO: 573578 - RNA, 22 nt, Human
uuauaaagugagaagugcuaug

SEQ ID NO: 573579 - RNA, 22 nt, Human
cuccagguugacuucagucaau

SEQ ID NO: 573580 - RNA, 22 nt, Human
ugcugagguaaccauauccugc

SEQ ID NO: 573581 - RNA, 22 nt, Human
uagaggugagauauuuuauuuu

SEQ ID NO: 573582 - RNA, 22 nt, Human
gugccugggcaugagcuuguug

SEQ ID NO: 573583 - RNA, 22 nt, Human
gacauugugguuauuaaauguu

SEQ ID NO: 573584 - RNA, 22 nt, Human
ugggccaggucugugucagcug

SEQ ID NO: 573585 - RNA, 22 nt, Human
agagcuggacgucugagcccua

SEQ ID NO: 573586 - RNA, 22 nt, Human
cccaggaguuugaguucagcau

SEQ ID NO: 573587 - RNA, 22 nt, Human
ugcuggagaugaaagggcccug

SEQ ID NO: 573588 - RNA, 22 nt, Human
ugacacaguaucaaacaugauu

SEQ ID NO: 573589 - RNA, 22 nt, Human
gcuggagaugcuaugcagaggg

SEQ ID NO: 573590 - RNA, 22 nt, Human
auucuucauguugaagcuguca

SEQ ID NO: 573591 - RNA, 22 nt, Human
augcagggagguaagaggugcc

SEQ ID NO: 573592 - RNA, 22 nt, Human
agacaacaccaaaugcuagugu

SEQ ID NO: 573593 - RNA, 22 nt, Human
gcuguggccaacaaaccacuuu

SEQ ID NO: 573594 - RNA, 22 nt, Human
caggggcaggugugagaucauc

SEQ ID NO: 573595 - RNA, 22 nt, Human
agguagaggccuccaggcagca

SEQ ID NO: 573596 - RNA, 22 nt, Human
acagucuuucuacauucugugc

SEQ ID NO: 573597 - RNA, 22 nt, Human
ugugaaagucaaauuaauugaa

SEQ ID NO: 573598 - RNA, 22 nt, Human
uaaaacugcuugguauggucua

SEQ ID NO: 573599 - RNA, 22 nt, Human
uaagacagggucuauucuuagu

SEQ ID NO: 573600 - RNA, 21 nt, Human
cugugacucccugggcaaucc

SEQ ID NO: 573601 - RNA, 22 nt, Human
agaauaaaucaaauguccugag

SEQ ID NO: 573602 - RNA, 22 nt, Human
ugcgcaggagcucugccaggag

SEQ ID NO: 573603 - RNA, 22 nt, Human
uugagucaguaauuccauuucu

SEQ ID NO: 573604 - RNA, 21 nt, Human
acacacugaguuuuccacugu

SEQ ID NO: 573605 - RNA, 22 nt, Human
gguuaaaaucuaaaaugugacu

SEQ ID NO: 573606 - RNA, 22 nt, Human
uuuuccuuaacagagggagaaa

SEQ ID NO: 573607 - RNA, 22 nt, Human
ucaauucugcauacauuucacu

SEQ ID NO: 573608 - RNA, 22 nt, Human
ccuuuugcucucccauccagaa

SEQ ID NO: 573609 - RNA, 19 nt, Human
uaaucuuauugggcagauu

SEQ ID NO: 573610 - RNA, 22 nt, Human
guuuguaugaauguuuuaugcu

SEQ ID NO: 573611 - RNA, 22 nt, Human
uaacugaacagccuaauucuuu

SEQ ID NO: 573612 - RNA, 21 nt, Human
ucagcuuugcaacugcacauc

SEQ ID NO: 573613 - RNA, 22 nt, Human
aggcccuggacacucaagccgg

SEQ ID NO: 573614 - RNA, 22 nt, Human
ugcuccuuucauccaauucuca

SEQ ID NO: 573615 - RNA, 22 nt, Human
cugcaguuugcuaagagacaaa

SEQ ID NO: 573616 - RNA, 22 nt, Human
guuauugacauguauuaagcac

SEQ ID NO: 573617 - RNA, 22 nt, Human
uuaccauuauuagguggacuug

SEQ ID NO: 573618 - RNA, 22 nt, Human
agcuccuguggcagcucuucug

SEQ ID NO: 573619 - RNA, 22 nt, Human
ccaggccuccugugaguggacc

SEQ ID NO: 573620 - RNA, 22 nt, Human
ucaggcaggaagccccugcaca

SEQ ID NO: 573621 - RNA, 22 nt, Human
cuuuuuguuguauaagcccuuu

SEQ ID NO: 573622 - RNA, 22 nt, Human
auauagguuaucauauuugccc

SEQ ID NO: 573623 - RNA, 19 nt, Human
agaguauugaauuugcccu

SEQ ID NO: 573624 - RNA, 22 nt, Human
caauuucucgaacucuaaucca

SEQ ID NO: 573625 - RNA, 22 nt, Human
uuuucucaggugcuuaucuaag

SEQ ID NO: 573626 - RNA, 22 nt, Human
uuguuuuuagagaagcccugaa

SEQ ID NO: 573627 - RNA, 22 nt, Human
aauuucaaagcucacuggcaua

SEQ ID NO: 573628 - RNA, 21 nt, Human
aaauuuucuuggcuguagugu

SEQ ID NO: 573629 - RNA, 22 nt, Human
uaggaaacuaauacagucugga

SEQ ID NO: 573630 - RNA, 22 nt, Human
gacaggugcuaagggaccuggc

SEQ ID NO: 573631 - RNA, 22 nt, Human
auguuuugauugguuaggucug

SEQ ID NO: 573632 - RNA, 22 nt, Human
ccuccugggacaggcuggcaca

SEQ ID NO: 573633 - RNA, 22 nt, Human
uccugaggccucugugauguga

SEQ ID NO: 573634 - RNA, 22 nt, Human
augcacaucuuacagaugcaga

SEQ ID NO: 573635 - RNA, 20 nt, Human
ucacauccucucccaacaug

SEQ ID NO: 573636 - RNA, 22 nt, Human
uucugccuucaguccucugacu

SEQ ID NO: 573637 - RNA, 22 nt, Human
uaaugaacacagaauuucacuu

SEQ ID NO: 573638 - RNA, 19 nt, Human
gcucucccucucaguugag

SEQ ID NO: 573639 - RNA, 22 nt, Human
aaugcauuagcuacauaugucu

SEQ ID NO: 573640 - RNA, 22 nt, Human
gguggcagagaggagguaguuu

SEQ ID NO: 573641 - RNA, 22 nt, Human
ugucuccauagaguagcuugau

SEQ ID NO: 573642 - RNA, 22 nt, Human
ggccacagcagaugcuucagau

SEQ ID NO: 573643 - RNA, 22 nt, Human
uggcagaguuggagguggaaga

SEQ ID NO: 573644 - RNA, 22 nt, Human
aaauauagcaauuaugccuacu

SEQ ID NO: 573645 - RNA, 22 nt, Human
gucacagaucucuugagucaag

SEQ ID NO: 573646 - RNA, 22 nt, Human
uugagcccaggaggccugggug

SEQ ID NO: 573647 - RNA, 22 nt, Human
gagcugugagggacacauugcu

SEQ ID NO: 573648 - RNA, 22 nt, Human
gagugcuccuggauggauuucc

SEQ ID NO: 573649 - RNA, 22 nt, Human
ucucagggcagcaaggaagcau

SEQ ID NO: 573650 - RNA, 22 nt, Human
uugggugguggggagaguucag

SEQ ID NO: 573651 - RNA, 22 nt, Human
gcagggcuggggcugcuccuga

SEQ ID NO: 573652 - RNA, 22 nt, Human
gcugcccuaauaucacauguua

SEQ ID NO: 573653 - RNA, 23 nt, Human
acagagguccaaacaguauaagc

SEQ ID NO: 573654 - RNA, 22 nt, Human
gaagagguucaacguggucauc

SEQ ID NO: 573655 - RNA, 22 nt, Human
uaacuucagcgaguucucuuaa

SEQ ID NO: 573656 - RNA, 20 nt, Human
ccucaagcagacugacagcu

SEQ ID NO: 573657 - RNA, 22 nt, Human
uugagggacagaggugcugucu

SEQ ID NO: 573658 - RNA, 23 nt, Human
aaauagagauaggccagcuuugc

SEQ ID NO: 573659 - RNA, 22 nt, Human
agcagugggugacagagcugag

SEQ ID NO: 573660 - RNA, 23 nt, Human
uucuuucaagaaguucacagugc

SEQ ID NO: 573661 - RNA, 22 nt, Human
aaugaacauggacaaguuaaua

SEQ ID NO: 573662 - RNA, 22 nt, Human
uauuuggaauagcuugcuaaug

SEQ ID NO: 573663 - RNA, 22 nt, Human
gucagcugucuccccagagugg

SEQ ID NO: 573664 - RNA, 22 nt, Human
agccacaccuguccugccagcu

SEQ ID NO: 573665 - RNA, 19 nt, Human
gcuucuguuugggcuuaga

SEQ ID NO: 573666 - RNA, 22 nt, Human
caaaggcaggugcugaauauuc

SEQ ID NO: 573667 - RNA, 22 nt, Human
uuugccuucucugaaccuauuu

SEQ ID NO: 573668 - RNA, 22 nt, Human
agcaaggauuauccugggaagg

SEQ ID NO: 573669 - RNA, 23 nt, Human
uggagcugacagucagagggagg

SEQ ID NO: 573670 - RNA, 22 nt, Human
aggcugugaugagccucaugga

SEQ ID NO: 573671 - RNA, 22 nt, Human
ccagccaggcuggcuguggagg

SEQ ID NO: 573672 - RNA, 22 nt, Human
uacagaaauugccaccagcucu

SEQ ID NO: 573673 - RNA, 22 nt, Human
gugggcagugccugacggauga

SEQ ID NO: 573674 - RNA, 22 nt, Human
aaaagggacuacucucagcucc

SEQ ID NO: 573675 - RNA, 22 nt, Human
auauuagcagugaucaaaaugg

SEQ ID NO: 573676 - RNA, 22 nt, Human
ucuaaggagcgcuccagaaaaa

SEQ ID NO: 573677 - RNA, 22 nt, Human
gcauggcaagaucaggagacca

SEQ ID NO: 573678 - RNA, 22 nt, Human
uuucuaagugugauuuuagauu

SEQ ID NO: 573679 - RNA, 22 nt, Human
acagucugcaggcaaguucuac

SEQ ID NO: 573680 - RNA, 22 nt, Human
ugagauggggucaugcuuuguc

SEQ ID NO: 573681 - RNA, 17 nt, Human
gccaaaggguuccaauc

SEQ ID NO: 573682 - RNA, 22 nt, Human
uucaagcaccaaauuaguaggc

SEQ ID NO: 573683 - RNA, 22 nt, Human
cugggcagcuaccaccacugcu

SEQ ID NO: 573684 - RNA, 22 nt, Human
ugggugagcggcugcacacccg

SEQ ID NO: 573685 - RNA, 22 nt, Human
ucuguacaguaccagauaguaa

SEQ ID NO: 573686 - RNA, 22 nt, Human
cagggagcuggcuggcgugagu

SEQ ID NO: 573687 - RNA, 22 nt, Human
gaucaguaagugaauaaugagu

SEQ ID NO: 573688 - RNA, 22 nt, Human
agcucccagcuccuuugagaga

SEQ ID NO: 573689 - RNA, 18 nt, Human
cagcagagacauucaaaa

SEQ ID NO: 573690 - RNA, 22 nt, Human
uauuuaaaauaagccccagugg

SEQ ID NO: 573691 - RNA, 22 nt, Human
cuucuaggcuucucagggggca

SEQ ID NO: 573692 - RNA, 22 nt, Human
uuuagaggggaaaguggcuggu

SEQ ID NO: 573693 - RNA, 22 nt, Human
ggugauuuauccauuuucuggu

SEQ ID NO: 573694 - RNA, 19 nt, Human
gguggcagaacgugggucc

SEQ ID NO: 573695 - RNA, 22 nt, Human
cuugcuuuugcugaugauuaag

SEQ ID NO: 573696 - RNA, 22 nt, Human
cuguggcauugccgaggcuggc

SEQ ID NO: 573697 - RNA, 22 nt, Human
aggcuggagugcuggagugcug

SEQ ID NO: 573698 - RNA, 22 nt, Human
caggugguugagagcuguaggc

SEQ ID NO: 573699 - RNA, 22 nt, Human
cuugugcaucauaguuugccaa

SEQ ID NO: 573700 - RNA, 22 nt, Human
uugcaguugcuuucuauauuga

SEQ ID NO: 573701 - RNA, 22 nt, Human
aaugaaacuauauuuagagagg

SEQ ID NO: 573702 - RNA, 22 nt, Human
ugcaggagcugcuguccugcuc

SEQ ID NO: 573703 - RNA, 22 nt, Human
uucuccagacccuccugcagac

SEQ ID NO: 573704 - RNA, 23 nt, Human
ggacagggcccugcccuauggcc

SEQ ID NO: 573705 - RNA, 22 nt, Human
ugguccuggucaucugggcugg

SEQ ID NO: 573706 - RNA, 18 nt, Human
acugaagaugcaagaccu

SEQ ID NO: 573707 - RNA, 22 nt, Human
gcaauaaauaacauggaagaca

SEQ ID NO: 573708 - RNA, 22 nt, Human
aaaucuguuucucauaggguag

SEQ ID NO: 573709 - RNA, 22 nt, Human
cuacacagagccuacuucugca

SEQ ID NO: 573710 - RNA, 22 nt, Human
acguuauaucugaaaaaaguga

SEQ ID NO: 573711 - RNA, 22 nt, Human
cacacuuugugcuaaucuauuu

SEQ ID NO: 573712 - RNA, 22 nt, Human
uaaaguuuauuggcaccaccau

SEQ ID NO: 573713 - RNA, 22 nt, Human
cuugcagggcugaugggaagug

SEQ ID NO: 573714 - RNA, 22 nt, Human
ugagccuguccugugcauguga

SEQ ID NO: 573715 - RNA, 22 nt, Human
gccugcuggaggagccucaggg

SEQ ID NO: 573716 - RNA, 22 nt, Human
aagcccagaugugagaacugag

SEQ ID NO: 573717 - RNA, 22 nt, Human
gggcagcaugaggacccucauc

SEQ ID NO: 573718 - RNA, 22 nt, Human
ccaggcucugucuggucagaag

SEQ ID NO: 573719 - RNA, 22 nt, Human
agcccuggcucccagcagcgcu

SEQ ID NO: 573720 - RNA, 22 nt, Human
uggcaguuggggaugaagugag

SEQ ID NO: 573721 - RNA, 16 nt, Human
aacaaugccaauccag

SEQ ID NO: 573722 - RNA, 22 nt, Human
agagcagaggcauggccguggg

SEQ ID NO: 573723 - RNA, 22 nt, Human
uucaguuucaaauccuggaugc

SEQ ID NO: 573724 - RNA, 22 nt, Human
acccaggagacagguugcagug

SEQ ID NO: 573725 - RNA, 21 nt, Human
uggcucaguugcugggcacag

SEQ ID NO: 573726 - RNA, 21 nt, Human
auggaaauuggcaaaugcuac

SEQ ID NO: 573727 - RNA, 22 nt, Human
agugaugugggagaguauagcu

SEQ ID NO: 573728 - RNA, 22 nt, Human
aacaggaaugaggagaaaaggu

SEQ ID NO: 573729 - RNA, 22 nt, Human
agcccagcagaaaguccagccu

SEQ ID NO: 573730 - RNA, 18 nt, Human
cccagcuccacuucccuc

SEQ ID NO: 573731 - RNA, 22 nt, Human
ugaccacacuugaucacucuga

SEQ ID NO: 573732 - RNA, 22 nt, Human
gcacccuagaguugccugagga

SEQ ID NO: 573733 - RNA, 22 nt, Human
agacauuuugcaauggguagcu

SEQ ID NO: 573734 - RNA, 22 nt, Human
aggcacugaagugguaaaugua

SEQ ID NO: 573735 - RNA, 22 nt, Human
cugugagggcagggaccagagg

SEQ ID NO: 573736 - RNA, 22 nt, Human
cauuguuuugagaacaaccuga

SEQ ID NO: 573737 - RNA, 22 nt, Human
ucagaggaucaugucccuacuc

SEQ ID NO: 573738 - RNA, 22 nt, Human
uuugacauuaaggaacauauau

SEQ ID NO: 573739 - RNA, 22 nt, Human
ugagcuggaaucuucuugacug

SEQ ID NO: 573740 - RNA, 22 nt, Human
acuguacacacuucucugucuu

SEQ ID NO: 573741 - RNA, 22 nt, Human
uuauuuccugacacagcugauu

SEQ ID NO: 573742 - RNA, 22 nt, Human
uuaaugcagcucuaccacacag

SEQ ID NO: 573743 - RNA, 22 nt, Human
ucuuccuuucauucauguguua

SEQ ID NO: 573744 - RNA, 22 nt, Human
ccuggccugcucggcucuuaag

SEQ ID NO: 573745 - RNA, 22 nt, Human
ucugugugguaguuucagugaa

SEQ ID NO: 573746 - RNA, 22 nt, Human
ugaacacauuuucuucaguaga

SEQ ID NO: 573747 - RNA, 22 nt, Human
uggaacacuguggaugagaaga

SEQ ID NO: 573748 - RNA, 22 nt, Human
guggggcuaaaaacugugcagu

SEQ ID NO: 573749 - RNA, 22 nt, Human
gcaggcuggaggcuguucuggg

SEQ ID NO: 573750 - RNA, 22 nt, Human
ccugcuggacagggguguucau

SEQ ID NO: 573751 - RNA, 22 nt, Human
cugcuguuuggugagugagaaa

SEQ ID NO: 573752 - RNA, 22 nt, Human
uuuagacaggggcaaaauaagg

SEQ ID NO: 573753 - RNA, 22 nt, Human
gcuguuucggguggagguggag

SEQ ID NO: 573754 - RNA, 22 nt, Human
gaaugaaagauuugcauucuau

SEQ ID NO: 573755 - RNA, 22 nt, Human
ggcugagccuggagcaucuggu

SEQ ID NO: 573756 - RNA, 22 nt, Human
cauugaauccuuccuucagaag

SEQ ID NO: 573757 - RNA, 22 nt, Human
ccugagugaauucccucacugu

SEQ ID NO: 573758 - RNA, 22 nt, Human
ucccagcuacucuagaggcuga

SEQ ID NO: 573759 - RNA, 22 nt, Human
aguuaaugagcauuuuggaaug

SEQ ID NO: 573760 - RNA, 22 nt, Human
uuccugguaacaaucucaaagu

SEQ ID NO: 573761 - RNA, 22 nt, Human
uaaacagccuaaaacuuucuuu

SEQ ID NO: 573762 - RNA, 21 nt, Human
gaaggagaaagcaagugcugc

SEQ ID NO: 573763 - RNA, 22 nt, Human
cugggcucccucaugugucugc

SEQ ID NO: 573764 - RNA, 22 nt, Human
cacuuuauauucuaagacggcc

SEQ ID NO: 573765 - RNA, 22 nt, Human
cugccucuuaaguggauggagu

SEQ ID NO: 573766 - RNA, 22 nt, Human
gggaggugaaaggucaugugug

SEQ ID NO: 573767 - RNA, 22 nt, Human
aucgagggugaguacagcggac

SEQ ID NO: 573768 - RNA, 22 nt, Human
ccuggcagcgccgaagcuggcc

SEQ ID NO: 573769 - RNA, 22 nt, Human
caccuuugcaaaccaaaucuga

SEQ ID NO: 573770 - RNA, 22 nt, Human
aaguaggaauccgaaugaguag

SEQ ID NO: 573771 - RNA, 22 nt, Human
aguggcuguuuauaggugggua

SEQ ID NO: 573772 - RNA, 16 nt, Human
agaugggugggucacu

SEQ ID NO: 573773 - RNA, 22 nt, Human
gugcaaaaguaauugcaguacu

SEQ ID NO: 573774 - RNA, 20 nt, Human
uggagcuguaaucuugucug

SEQ ID NO: 573775 - RNA, 20 nt, Human
agugaggcaguucagugggc

SEQ ID NO: 573776 - RNA, 22 nt, Human
agcugggcaccccgcugcgucu

SEQ ID NO: 573777 - RNA, 22 nt, Human
uugcauaaaagaguauaucuua

SEQ ID NO: 573778 - RNA, 21 nt, Human
gacaggggaagaagcaaggag

SEQ ID NO: 573779 - RNA, 19 nt, Human
cuauuagcuugggcaucau

SEQ ID NO: 573780 - RNA, 22 nt, Human
cuggagagggagcccuggcagu

SEQ ID NO: 573781 - RNA, 20 nt, Human
ucagcucuuagaggucgcuu

SEQ ID NO: 573782 - RNA, 22 nt, Human
ucucuuucuauugcaccaugcu

SEQ ID NO: 573783 - RNA, 22 nt, Human
aggugcaguggcucaugccugu

SEQ ID NO: 573784 - RNA, 16 nt, Human
ucaguguuccagaaua

SEQ ID NO: 573785 - RNA, 19 nt, Human
ucugcagaggaauucuuca

SEQ ID NO: 573786 - RNA, 22 nt, Human
caggcagccugcggucugcaca

SEQ ID NO: 573787 - RNA, 22 nt, Human
aaacauucccuaauguguccgu

SEQ ID NO: 573788 - RNA, 22 nt, Human
ccucccaccauuuagagagagc

SEQ ID NO: 573789 - RNA, 22 nt, Human
aggggaugccugaggaucugua

SEQ ID NO: 573790 - RNA, 22 nt, Human
acaggccugacacacagagggc

SEQ ID NO: 573791 - RNA, 22 nt, Human
uggcacagggcuuggucgcuca

SEQ ID NO: 573792 - RNA, 20 nt, Human
auuaggauuuuaggucauca

SEQ ID NO: 573793 - RNA, 22 nt, Human
uuucagcacuuuaggcagcagg

SEQ ID NO: 573794 - RNA, 22 nt, Human
uccccagauggccagcuacaug

SEQ ID NO: 573795 - RNA, 22 nt, Human
ugaaagcagauagcucuguugu

SEQ ID NO: 573796 - RNA, 22 nt, Human
aaagcagcugcucuggccuuga

SEQ ID NO: 573797 - RNA, 22 nt, Human
gcugugugaaaacugggccugg

SEQ ID NO: 573798 - RNA, 22 nt, Human
uucaguuugcuacaagcaacau

SEQ ID NO: 573799 - RNA, 19 nt, Human
uccuggugcuugacacuga

SEQ ID NO: 573800 - RNA, 19 nt, Human
cugaggcccauguaccaug

SEQ ID NO: 573801 - RNA, 22 nt, Human
aacacuuuggaauagagauagg

SEQ ID NO: 573802 - RNA, 22 nt, Human
gcuggccauggggagugaggag

SEQ ID NO: 573803 - RNA, 22 nt, Human
ccugcaggcugcaggccaguuc

SEQ ID NO: 573804 - RNA, 22 nt, Human
caggagaagucucuagggggug

SEQ ID NO: 573805 - RNA, 22 nt, Human
uuguuucauggggauguuuauu

SEQ ID NO: 573806 - RNA, 22 nt, Human
uuguucuuuauccuggaagccu

SEQ ID NO: 573807 - RNA, 22 nt, Human
aaaguauguuguggcuuuuaaa

SEQ ID NO: 573808 - RNA, 22 nt, Human
ucucccaguggugcagaaagca

SEQ ID NO: 573809 - RNA, 22 nt, Human
ccugaagagugaauguggcagu

SEQ ID NO: 573810 - RNA, 22 nt, Human
agccuggauccuaggcucagcu

SEQ ID NO: 573811 - RNA, 19 nt, Human
aggaauggaauuaauucug

SEQ ID NO: 573812 - RNA, 22 nt, Human
uuugacccuguuauucucccug

SEQ ID NO: 573813 - RNA, 22 nt, Human
auguuccugauccucguucuau

SEQ ID NO: 573814 - RNA, 22 nt, Human
cuuuugcaccuuuuaaguaaug

SEQ ID NO: 573815 - RNA, 22 nt, Human
augccuguaaucccagugcuuu

SEQ ID NO: 573816 - RNA, 22 nt, Human
uuaaagcaggcaucauuccuca

SEQ ID NO: 573817 - RNA, 22 nt, Human
ccagcuuuucuuaucauuauaa

SEQ ID NO: 573818 - RNA, 22 nt, Human
gagucacaaaagaugcccaggg

SEQ ID NO: 573819 - RNA, 22 nt, Human
cuuucucuguggugaggagggu

SEQ ID NO: 573820 - RNA, 22 nt, Human
uuuguacacaggauguuauaau

SEQ ID NO: 573821 - RNA, 22 nt, Human
ugucuccuauuuccugcuaagg

SEQ ID NO: 573822 - RNA, 22 nt, Human
gagaaagcuucuuucccacagg

SEQ ID NO: 573823 - RNA, 22 nt, Human
gaacagaugggcucagauccug

SEQ ID NO: 573824 - RNA, 22 nt, Human
auuaguguacaucucacacgca

SEQ ID NO: 573825 - RNA, 22 nt, Human
agauggcagcagaacaaacagg

SEQ ID NO: 573826 - RNA, 22 nt, Human
cuuguagaccccuggacucacg

SEQ ID NO: 573827 - RNA, 22 nt, Human
uugcauuugaucuuggguucuc

SEQ ID NO: 573828 - RNA, 22 nt, Human
uuuauuuauaagccacuugcug

SEQ ID NO: 573829 - RNA, 22 nt, Human
ucacagacucuugauugucuaa

SEQ ID NO: 573830 - RNA, 22 nt, Human
uggcaguguauagguggcuccu

SEQ ID NO: 573831 - RNA, 22 nt, Human
ccucagcuugauuucugcagag

SEQ ID NO: 573832 - RNA, 22 nt, Human
uuucuaguccucaugcaucauu

SEQ ID NO: 573833 - RNA, 22 nt, Human
uggcagcaaaaccagaaucaga

SEQ ID NO: 573834 - RNA, 22 nt, Human
agcccuggcccggcugugcuuu

SEQ ID NO: 573835 - RNA, 22 nt, Human
cacugaggcugggggagaaggu

SEQ ID NO: 573836 - RNA, 22 nt, Human
aaaaguaauugcaguuuugcca

SEQ ID NO: 573837 - RNA, 22 nt, Human
acaggagacccugcugguucug

SEQ ID NO: 573838 - RNA, 22 nt, Human
ggcagcugagcauggcuaccuu

SEQ ID NO: 573839 - RNA, 16 nt, Human
aagcauuggaauuagg

SEQ ID NO: 573840 - RNA, 22 nt, Human
ugcauuaaaaccaucgaccauc

SEQ ID NO: 573841 - RNA, 22 nt, Human
uccugggauucugcauuucuaa

SEQ ID NO: 573842 - RNA, 22 nt, Human
acugaaaaaguaugauucacug

SEQ ID NO: 573843 - RNA, 22 nt, Human
aucacaaaggcugcuucaugau

SEQ ID NO: 573844 - RNA, 22 nt, Human
guuucucuguaccucuguccca

SEQ ID NO: 573845 - RNA, 22 nt, Human
cugggucuggccacaggaagua

SEQ ID NO: 573846 - RNA, 22 nt, Human
aauauccauugggagcaaaugg

SEQ ID NO: 573847 - RNA, 22 nt, Human
aggcuaggggaacacuagaauc

SEQ ID NO: 573848 - RNA, 22 nt, Human
cacauuuagguuccuauagcca

SEQ ID NO: 573849 - RNA, 22 nt, Human
gagagguaauuugaagugcaaa

SEQ ID NO: 573850 - RNA, 22 nt, Human
uaauacuuugaaugagagcuaa

SEQ ID NO: 573851 - RNA, 22 nt, Human
uuauuacuguauuaauccagag

SEQ ID NO: 573852 - RNA, 22 nt, Human
ugaguucucacccauucuucuu

SEQ ID NO: 573853 - RNA, 22 nt, Human
acuucauuguaauauuauagca

SEQ ID NO: 573854 - RNA, 22 nt, Human
agggagaagguccaugccuguc

SEQ ID NO: 573855 - RNA, 22 nt, Human
ucagagaacugcagcccuuccu

SEQ ID NO: 573856 - RNA, 22 nt, Human
acugccagaggagguaucugaa

SEQ ID NO: 573857 - RNA, 22 nt, Human
uuccuggggcuccagcuaccag

SEQ ID NO: 573858 - RNA, 22 nt, Human
gcugggagccguaccugucacg

SEQ ID NO: 573859 - RNA, 22 nt, Human
auuugcagagcucugaauuuug

SEQ ID NO: 573860 - RNA, 22 nt, Human
uaccaugaucaggcucauccuu

SEQ ID NO: 573861 - RNA, 22 nt, Human
ccaggagccugggccaggcugg

SEQ ID NO: 573862 - RNA, 22 nt, Human
ugccugaaugaucagucagauu

SEQ ID NO: 573863 - RNA, 22 nt, Human
agcccuugguauuuuccgaucc

SEQ ID NO: 573864 - RNA, 23 nt, Human
gugcucugcggucugcuagucug

SEQ ID NO: 573865 - RNA, 22 nt, Human
ugagcucauagcucuuauuaug

SEQ ID NO: 573866 - RNA, 22 nt, Human
agcacagugcucuggacagagu

SEQ ID NO: 573867 - RNA, 22 nt, Human
agcaagcagugaaguugaaugu

SEQ ID NO: 573868 - RNA, 22 nt, Human
acaaaugugauuguuucugaaa

SEQ ID NO: 573869 - RNA, 22 nt, Human
agcuucaguuuucuauuguuaa

SEQ ID NO: 573870 - RNA, 22 nt, Human
uauacacauguguguauucaua

SEQ ID NO: 573871 - RNA, 22 nt, Human
auuucauauguaucaccuagcc

SEQ ID NO: 573872 - RNA, 22 nt, Human
cuuuuacugugaaaagaaacug

SEQ ID NO: 573873 - RNA, 22 nt, Human
uauugcuuaaaaaauaugugag

SEQ ID NO: 573874 - RNA, 22 nt, Human
gcucucagaaguaacuugucca

SEQ ID NO: 573875 - RNA, 22 nt, Human
uucaacauguucuacauaaggg

SEQ ID NO: 573876 - RNA, 22 nt, Human
ggagcugaaggggugggcucag

SEQ ID NO: 573877 - RNA, 22 nt, Human
ggaggcucgcuggucgcacagc

SEQ ID NO: 573878 - RNA, 22 nt, Human
auacagugcacaaccugugcag

SEQ ID NO: 573879 - RNA, 22 nt, Human
cagggccuuguucaggagugaa

SEQ ID NO: 573880 - RNA, 22 nt, Human
gaggaaacauuguagaagcagu

SEQ ID NO: 573881 - RNA, 22 nt, Human
ucccaggccauaaaacucagag

SEQ ID NO: 573882 - RNA, 22 nt, Human
gagcucagaggauucuggggag

SEQ ID NO: 573883 - RNA, 22 nt, Human
ugcugccaugcagagcaacaga

SEQ ID NO: 573884 - RNA, 22 nt, Human
uuuuugugaaaucuccagacau

SEQ ID NO: 573885 - RNA, 22 nt, Human
guguaaagaugccaggaaucuu

SEQ ID NO: 573886 - RNA, 22 nt, Human
ggcagauguugcagugagcaga

SEQ ID NO: 573887 - RNA, 22 nt, Human
agucauuucccauucuucauau

SEQ ID NO: 573888 - RNA, 22 nt, Human
aauaacagauuuucaagcugug

SEQ ID NO: 573889 - RNA, 22 nt, Human
uguuuucagucauauagcaggu

SEQ ID NO: 573890 - RNA, 22 nt, Human
ugugagagcagaagacacauag

SEQ ID NO: 573891 - RNA, 22 nt, Human
uuucccaauugagagguucugu

SEQ ID NO: 573892 - RNA, 22 nt, Human
cuggaaaggguccucauucugu

SEQ ID NO: 573893 - RNA, 22 nt, Human
ggccucggcccacugcugcggu

SEQ ID NO: 573894 - RNA, 22 nt, Human
cuuucucuuacccaaggaucug

SEQ ID NO: 573895 - RNA, 22 nt, Human
aaauacagaguugcuuaaaagc

SEQ ID NO: 573896 - RNA, 22 nt, Human
agagaaacugauguccuuugaa

SEQ ID NO: 573897 - RNA, 22 nt, Human
ucugcauuuuuacaagaucccc

SEQ ID NO: 573898 - RNA, 22 nt, Human
ccagagccucgcccggagccuc

SEQ ID NO: 573899 - RNA, 22 nt, Human
cuuuuacauuuguugaagagua

SEQ ID NO: 573900 - RNA, 22 nt, Human
gauucuuuacucagauuuuguu

SEQ ID NO: 573901 - RNA, 22 nt, Human
agacagcuguuccuucauguuu

SEQ ID NO: 573902 - RNA, 22 nt, Human
ucagccugcgucauggugacac

SEQ ID NO: 573903 - RNA, 22 nt, Human
ugaaaaggguagaucccuaagu

SEQ ID NO: 573904 - RNA, 22 nt, Human
gcuggaguuaggugggcuugaa

SEQ ID NO: 573905 - RNA, 22 nt, Human
uuugaagucaaagauugauucc

SEQ ID NO: 573906 - RNA, 22 nt, Human
uuucuuccccacugcaggcucu

SEQ ID NO: 573907 - RNA, 22 nt, Human
augugaaauauuaagccgagga

SEQ ID NO: 573908 - RNA, 22 nt, Human
augugcuugaagccucagagaa

SEQ ID NO: 573909 - RNA, 22 nt, Human
ggaggagggguuuacauuggaa

SEQ ID NO: 573910 - RNA, 22 nt, Human
uguccuguucuggcgugagugg

SEQ ID NO: 573911 - RNA, 22 nt, Human
auuucucugcaguguucggaau

SEQ ID NO: 573912 - RNA, 22 nt, Human
uccagagcucugggcauagcug

SEQ ID NO: 573913 - RNA, 19 nt, Human
ucuccaggcaggugagcga

SEQ ID NO: 573914 - RNA, 22 nt, Human
uuuauauguuuguacaauuaag

SEQ ID NO: 573915 - RNA, 22 nt, Human
acaggcugguuuguaaaagaug

SEQ ID NO: 573916 - RNA, 22 nt, Human
acugggaaggaaaggaauguaa

SEQ ID NO: 573917 - RNA, 22 nt, Human
auuccacugccgaaugauacau

SEQ ID NO: 573918 - RNA, 22 nt, Human
uuacaucagcaagaguguaugu

SEQ ID NO: 573919 - RNA, 22 nt, Human
ugggggugugccagggaccucc

SEQ ID NO: 573920 - RNA, 22 nt, Human
gggcccaggccuccuuccuucc

SEQ ID NO: 573921 - RNA, 22 nt, Human
ugggagaauauauuuaaaacuu

SEQ ID NO: 573922 - RNA, 22 nt, Human
uggaacaauucuugaagggaau

SEQ ID NO: 573923 - RNA, 22 nt, Human
ugucaccaugccagcuucugcc

SEQ ID NO: 573924 - RNA, 22 nt, Human
gagggugcaggcaagagcaaaa

SEQ ID NO: 573925 - RNA, 22 nt, Human
ccuggagccccucuggccagcc

SEQ ID NO: 573926 - RNA, 22 nt, Human
ucuggugucaguauucuuugaa

SEQ ID NO: 573927 - RNA, 22 nt, Human
agauaauuauuuacuucaaagu

SEQ ID NO: 573928 - RNA, 22 nt, Human
acaguaaaacauuuuuauuagg

SEQ ID NO: 573929 - RNA, 22 nt, Human
cauguaaaaagaagaaucugga

SEQ ID NO: 573930 - RNA, 22 nt, Human
uuaugauuugccacagauuggu

SEQ ID NO: 573931 - RNA, 22 nt, Human
guacauucuguggacuuggaca

SEQ ID NO: 573932 - RNA, 22 nt, Human
gccaggaggcugcuguguaggc

SEQ ID NO: 573933 - RNA, 22 nt, Human
agucaacaaaaauguggagccu

SEQ ID NO: 573934 - RNA, 21 nt, Human
aagcaggacauaugaugcccu

SEQ ID NO: 573935 - RNA, 19 nt, Human
acagagcucucugcuucug

SEQ ID NO: 573936 - RNA, 22 nt, Human
accuccaggaagcucuugguac

SEQ ID NO: 573937 - RNA, 22 nt, Human
uggcucaucuaucagaaagucc

SEQ ID NO: 573938 - RNA, 22 nt, Human
ugcucauuaggacugcaaauuc

SEQ ID NO: 573939 - RNA, 22 nt, Human
ucagggcaagauugguuaauaa

SEQ ID NO: 573940 - RNA, 23 nt, Human
aggcugcuuacugguaucagagc

SEQ ID NO: 573941 - RNA, 21 nt, Human
ggccuaggggcagauggugcu

SEQ ID NO: 573942 - RNA, 22 nt, Human
ugcccugcugugccuggagcca

SEQ ID NO: 573943 - RNA, 22 nt, Human
aaucagagaaguuuccuaugcc

SEQ ID NO: 573944 - RNA, 22 nt, Human
acagaguauuggaaaggcagug

SEQ ID NO: 573945 - RNA, 22 nt, Human
auaugggggggcgugcagagga

SEQ ID NO: 573946 - RNA, 22 nt, Human
auucacaauuagaaguagauaa

SEQ ID NO: 573947 - RNA, 22 nt, Human
ucccagaguuuccuguguccca

SEQ ID NO: 573948 - RNA, 22 nt, Human
uuggcuuccugcacuugaguuu

SEQ ID NO: 573949 - RNA, 22 nt, Human
cagaaguaagauuacugugaga

SEQ ID NO: 573950 - RNA, 19 nt, Human
aggauggagcaggcgguga

SEQ ID NO: 573951 - RNA, 22 nt, Human
ccacaggaccagaggagaucac

SEQ ID NO: 573952 - RNA, 22 nt, Human
ucugucaccauucagcuugaau

SEQ ID NO: 573953 - RNA, 22 nt, Human
agucaguguucuccggagaggc

SEQ ID NO: 573954 - RNA, 22 nt, Human
ucucugagguuguuuccagcac

SEQ ID NO: 573955 - RNA, 20 nt, Human
gggugugggcccggccaggc

SEQ ID NO: 573956 - RNA, 22 nt, Human
uuauucuuuucuccagaauccc

SEQ ID NO: 573957 - RNA, 22 nt, Human
uggggauguaaaugaggugaua

SEQ ID NO: 573958 - RNA, 20 nt, Human
gccuggaggcagagauaaag

SEQ ID NO: 573959 - RNA, 22 nt, Human
gucaggacauuuuaccauccug

SEQ ID NO: 573960 - RNA, 22 nt, Human
acaugcucuccuaaggcccugu

SEQ ID NO: 573961 - RNA, 22 nt, Human
agugacaggggaggcaggugug

SEQ ID NO: 573962 - RNA, 22 nt, Human
uuucauugugaugcuuuuauca

SEQ ID NO: 573963 - RNA, 17 nt, Human
uuccaguuuaguauugu

SEQ ID NO: 573964 - RNA, 22 nt, Human
cacaauuuuccuuuaaguguau

SEQ ID NO: 573965 - RNA, 21 nt, Human
gcagccagccgagaccaugcc

SEQ ID NO: 573966 - RNA, 23 nt, Human
ccagccucugggucuucauccag

SEQ ID NO: 573967 - RNA, 22 nt, Human
agcuucuggaaggcaaggcuug

SEQ ID NO: 573968 - RNA, 22 nt, Human
caaguuguacagauuguauuag

SEQ ID NO: 573969 - RNA, 22 nt, Human
ugucauuuaauagauaugaugg

SEQ ID NO: 573970 - RNA, 22 nt, Human
acacuucuauucccugcacaaa

SEQ ID NO: 573971 - RNA, 22 nt, Human
cauacauugcucauucaguauc

SEQ ID NO: 573972 - RNA, 22 nt, Human
uuucaugcacaaaugagcaagg

SEQ ID NO: 573973 - RNA, 20 nt, Human
cccaggagugagcagcuuua

SEQ ID NO: 573974 - RNA, 22 nt, Human
uuguguaaugaaguuaucaugu

SEQ ID NO: 573975 - RNA, 18 nt, Human
ucagccuguugucugccu

SEQ ID NO: 573976 - RNA, 22 nt, Human
ggagucugggaauuggagagaa

SEQ ID NO: 573977 - RNA, 22 nt, Human
gccacagucacugcugcagggg

SEQ ID NO: 573978 - RNA, 22 nt, Human
agaggccagaucaucauagaug

SEQ ID NO: 573979 - RNA, 22 nt, Human
aaaguguuuugauuuaguggua

SEQ ID NO: 573980 - RNA, 22 nt, Human
acauucuucuugugaauuuacu

SEQ ID NO: 573981 - RNA, 22 nt, Human
aguucucagcuuaguaugcugu

SEQ ID NO: 573982 - RNA, 20 nt, Human
agaaucugacccagagagac

SEQ ID NO: 573983 - RNA, 22 nt, Human
ugcugugggcaguacauaagcu

SEQ ID NO: 573984 - RNA, 22 nt, Human
ucugccugcuucuucauagucu

SEQ ID NO: 573985 - RNA, 22 nt, Human
cacuguucaucaaaacugcucu

SEQ ID NO: 573986 - RNA, 22 nt, Human
gccacagggcagaugcgcagag

SEQ ID NO: 573987 - RNA, 22 nt, Human
agucugggagaaggugagauua

SEQ ID NO: 573988 - RNA, 22 nt, Human
ugccacaguuguuugugcucua

SEQ ID NO: 573989 - RNA, 22 nt, Human
uuaagacuauuguaauagggga

SEQ ID NO: 573990 - RNA, 22 nt, Human
ccugggcaauauagugaggccc

SEQ ID NO: 573991 - RNA, 22 nt, Human
gggcugagugaccucaggccaa

SEQ ID NO: 573992 - RNA, 22 nt, Human
aguuucaauucuuuucacaaag

SEQ ID NO: 573993 - RNA, 22 nt, Human
ucaaagguuaacucuguuguuc

SEQ ID NO: 573994 - RNA, 22 nt, Human
ugugcccauuccacuugaguac

SEQ ID NO: 573995 - RNA, 22 nt, Human
caggguuucuguugagaagucc

SEQ ID NO: 573996 - RNA, 22 nt, Human
ggccagagaagucagacccuug

SEQ ID NO: 573997 - RNA, 22 nt, Human
cagcuuccgaccgggggcugca

SEQ ID NO: 573998 - RNA, 22 nt, Human
acaaggaacaagcauguaguuu

SEQ ID NO: 573999 - RNA, 22 nt, Human
gcucugucuucagcacacagua

SEQ ID NO: 574000 - RNA, 17 nt, Human
gagauggguggaucacc

SEQ ID NO: 574001 - RNA, 22 nt, Human
uuaguuuauaauucauuucugu

SEQ ID NO: 574002 - RNA, 22 nt, Human
uuuacacugacagcacauaagg

SEQ ID NO: 574003 - RNA, 22 nt, Human
agggacagaugaaugacugagu

SEQ ID NO: 574004 - RNA, 19 nt, Human
cuccaggauggcugggcga

SEQ ID NO: 574005 - RNA, 22 nt, Human
uguucauuuugaaguacuucaa

SEQ ID NO: 574006 - RNA, 22 nt, Human
ugcuuaaagcugcucaguugua

SEQ ID NO: 574007 - RNA, 20 nt, Human
ucauacacaugagcaugcag

SEQ ID NO: 574008 - RNA, 22 nt, Human
aguucccaggugaugcugaugu

SEQ ID NO: 574009 - RNA, 22 nt, Human
uaauaauuggcaauguugagca

SEQ ID NO: 574010 - RNA, 22 nt, Human
aggcaggcugcuauggaguaga

SEQ ID NO: 574011 - RNA, 22 nt, Human
uuuagcuucaguucuagcuucu

SEQ ID NO: 574012 - RNA, 22 nt, Human
acagcagcgugaaguguguuau

SEQ ID NO: 574013 - RNA, 22 nt, Human
agcuucucucaggguaucuuuc

SEQ ID NO: 574014 - RNA, 22 nt, Human
ucugcccuggggucagccucca

SEQ ID NO: 574015 - RNA, 19 nt, Human
ucuugaggaaaguaaggca

SEQ ID NO: 574016 - RNA, 22 nt, Human
acaguagacccuggauaaacau

SEQ ID NO: 574017 - RNA, 22 nt, Human
ccugggcuccacuccaagagca

SEQ ID NO: 574018 - RNA, 22 nt, Human
uccuguggucauucuucugccc

SEQ ID NO: 574019 - RNA, 22 nt, Human
ugcaggagauaauggugcuuag

SEQ ID NO: 574020 - RNA, 22 nt, Human
aagggugggcccuggcagccau

SEQ ID NO: 574021 - RNA, 22 nt, Human
uuguuuuaagccagucugccua

SEQ ID NO: 574022 - RNA, 22 nt, Human
uauuagcuuuagccuuuggaug

SEQ ID NO: 574023 - RNA, 22 nt, Human
uccagucucuacucugagauaa

SEQ ID NO: 574024 - RNA, 22 nt, Human
uuucaucuuccuuggcauaggu

SEQ ID NO: 574025 - RNA, 22 nt, Human
ucugggaauacacacugauuua

SEQ ID NO: 574026 - RNA, 19 nt, Human
caauauauagugaguggau

SEQ ID NO: 574027 - RNA, 22 nt, Human
uucauucugcaguucucagcuc

SEQ ID NO: 574028 - RNA, 22 nt, Human
augcagagacagauguggcaug

SEQ ID NO: 574029 - RNA, 22 nt, Human
uuugcugaccccauucugaguc

SEQ ID NO: 574030 - RNA, 22 nt, Human
cagucccagacccagaaggugg

SEQ ID NO: 574031 - RNA, 22 nt, Human
cauuuucaugaguuucuguuca

SEQ ID NO: 574032 - RNA, 22 nt, Human
aggguggcugugaagugcuugg

SEQ ID NO: 574033 - RNA, 22 nt, Human
ccaggugucaugcgugugaccc

SEQ ID NO: 574034 - RNA, 22 nt, Human
gggcagagacucagaaacagaa

SEQ ID NO: 574035 - RNA, 22 nt, Human
uuccugaggugauucuaaugug

SEQ ID NO: 574036 - RNA, 22 nt, Human
ugcccugcaugcagggagcugu

SEQ ID NO: 574037 - RNA, 18 nt, Human
uguugaaacuucagguaa

SEQ ID NO: 574038 - RNA, 21 nt, Human
uucaguuucuuccucaucuau

SEQ ID NO: 574039 - RNA, 22 nt, Human
ugugauuuccagccauuaaaaa

SEQ ID NO: 574040 - RNA, 22 nt, Human
uugcaggggagaggaacaaaca

SEQ ID NO: 574041 - RNA, 21 nt, Human
acaugucucuaaucucaguga

SEQ ID NO: 574042 - RNA, 22 nt, Human
agagccuggacuuuucugagcc

SEQ ID NO: 574043 - RNA, 22 nt, Human
ccuagcagggaagcagugagga

SEQ ID NO: 574044 - RNA, 22 nt, Human
aagcagagccaccagcuuugga

SEQ ID NO: 574045 - RNA, 22 nt, Human
aggccaaguagccgcuguccua

SEQ ID NO: 574046 - RNA, 22 nt, Human
ccacugggggcugcucccaggu

SEQ ID NO: 574047 - RNA, 22 nt, Human
auuagugucugugaauaauucu

SEQ ID NO: 574048 - RNA, 22 nt, Human
aaacaguuucuaaucauggaga

SEQ ID NO: 574049 - RNA, 22 nt, Human
ccacagggucagccacucugca

SEQ ID NO: 574050 - RNA, 22 nt, Human
agagccaggccaggccggggca

SEQ ID NO: 574051 - RNA, 22 nt, Human
aggcugccagaagccuucagga

SEQ ID NO: 574052 - RNA, 22 nt, Human
ucagcucucacagaucucaacc

SEQ ID NO: 574053 - RNA, 22 nt, Human
ucacagcaaaagugugcagagc

SEQ ID NO: 574054 - RNA, 22 nt, Human
uccagcuggggcaguggcuggg

SEQ ID NO: 574055 - RNA, 22 nt, Human
acuggaguaaaggucacuugug

SEQ ID NO: 574056 - RNA, 22 nt, Human
uuuuuaagagucuggaaauagu

SEQ ID NO: 574057 - RNA, 22 nt, Human
aggggagaguuaaugugaaugu

SEQ ID NO: 574058 - RNA, 22 nt, Human
aucacaaaggucucagagcaca

SEQ ID NO: 574059 - RNA, 22 nt, Human
ucaggaggccggcaggauuuga

SEQ ID NO: 574060 - RNA, 22 nt, Human
aguuuacagaugcuacaggagc

SEQ ID NO: 574061 - RNA, 22 nt, Human
cacccaguaagcaugaggcccu

SEQ ID NO: 574062 - RNA, 16 nt, Human
cacauauauuuauaug

SEQ ID NO: 574063 - RNA, 22 nt, Human
ugucugguggguugacaggcag

SEQ ID NO: 574064 - RNA, 22 nt, Human
ucucuuguaauuuaaaaaaucu

SEQ ID NO: 574065 - RNA, 22 nt, Human
ccagaggugguggugucuagaa

SEQ ID NO: 574066 - RNA, 22 nt, Human
uugcagaggcaaaaaugaacuc

SEQ ID NO: 574067 - RNA, 22 nt, Human
gcaaggaggcugguggaggaag

SEQ ID NO: 574068 - RNA, 22 nt, Human
aaucacauugaaucugcuaccu

SEQ ID NO: 574069 - RNA, 23 nt, Human
aacacauugcuaauuacauucaa

SEQ ID NO: 574070 - RNA, 22 nt, Human
ucauuucagccauuuuuaaaug

SEQ ID NO: 574071 - RNA, 22 nt, Human
guuuuccauggaggucugaccu

SEQ ID NO: 574072 - RNA, 22 nt, Human
uuucuguuguauggcuucugca

SEQ ID NO: 574073 - RNA, 22 nt, Human
uggcaggaagacguggggcacc

SEQ ID NO: 574074 - RNA, 22 nt, Human
uggcugagaccaucagggugua

SEQ ID NO: 574075 - RNA, 22 nt, Human
gaguguaaucugaaaacuugaa

SEQ ID NO: 574076 - RNA, 23 nt, Human
ugggauggauucaccagugugcu

SEQ ID NO: 574077 - RNA, 22 nt, Human
uccagaggcucugagggagagu

SEQ ID NO: 574078 - RNA, 22 nt, Human
ucugagaaaucaguggugaaua

SEQ ID NO: 574079 - RNA, 17 nt, Human
uuaagguggaucagcac

SEQ ID NO: 574080 - RNA, 22 nt, Human
cauacuuuuuagaucugccuuc

SEQ ID NO: 574081 - RNA, 22 nt, Human
guuucugauucuagaggcaggc

SEQ ID NO: 574082 - RNA, 22 nt, Human
cugaaaggaauaaggcucuuug

SEQ ID NO: 574083 - RNA, 22 nt, Human
agagcuguuuauugaugucaca

SEQ ID NO: 574084 - RNA, 22 nt, Human
agaauacaauuguucaguaaua

SEQ ID NO: 574085 - RNA, 22 nt, Human
aaacaaacauagguuugaaagu

SEQ ID NO: 574086 - RNA, 22 nt, Human
acuguuauuuguaauccauuau

SEQ ID NO: 574087 - RNA, 22 nt, Human
augcaguuaugugagggcauga

SEQ ID NO: 574088 - RNA, 23 nt, Human
uggggccaagugaggaagggucu

SEQ ID NO: 574089 - RNA, 22 nt, Human
aauggcuuugaguauuuucugg

SEQ ID NO: 574090 - RNA, 22 nt, Human
cccuuagcucacaagcuaaagc

SEQ ID NO: 574091 - RNA, 18 nt, Human
agcuccuggucucaggga

SEQ ID NO: 574092 - RNA, 22 nt, Human
uucugaaauaggagauagcugu

SEQ ID NO: 574093 - RNA, 22 nt, Human
acacaugugauucuaagacagc

SEQ ID NO: 574094 - RNA, 22 nt, Human
ggcaggugcccagagagcacga

SEQ ID NO: 574095 - RNA, 22 nt, Human
ugcaggacucaaggguagcagg

SEQ ID NO: 574096 - RNA, 22 nt, Human
uuuuccucugcagagcaguuag

SEQ ID NO: 574097 - RNA, 23 nt, Human
acuuccaguugcuucagcauaug

SEQ ID NO: 574098 - RNA, 18 nt, Human
caggucagccuggccuca

SEQ ID NO: 574099 - RNA, 22 nt, Human
ccaaguccugcugccacucuac

SEQ ID NO: 574100 - RNA, 22 nt, Human
gcaggcuggucugaccaucccu

SEQ ID NO: 574101 - RNA, 22 nt, Human
ucagaggaggcauuuaaacaga

SEQ ID NO: 574102 - RNA, 22 nt, Human
uucacuguuggcuuugcuuguc

SEQ ID NO: 574103 - RNA, 22 nt, Human
uuauuauggcaguuuucuaggu

SEQ ID NO: 574104 - RNA, 22 nt, Human
agaaagcagcauuuaugaucuc

SEQ ID NO: 574105 - RNA, 22 nt, Human
augaggccacaguuauagauuu

SEQ ID NO: 574106 - RNA, 22 nt, Human
ucugccaccaacugucacuaca

SEQ ID NO: 574107 - RNA, 22 nt, Human
ugcagggccuuguugaugugcu

SEQ ID NO: 574108 - RNA, 22 nt, Human
ccagccccgggccuuaccgugc

SEQ ID NO: 574109 - RNA, 22 nt, Human
auacaaaguauugauccugagu

SEQ ID NO: 574110 - RNA, 22 nt, Human
aacuacagugggcagaggcaau

SEQ ID NO: 574111 - RNA, 22 nt, Human
auggcagcaaaugucuggcugg

SEQ ID NO: 574112 - RNA, 22 nt, Human
agcagcuguuuguugaauuggu

SEQ ID NO: 574113 - RNA, 22 nt, Human
aaacaauguagauuaccauuua

SEQ ID NO: 574114 - RNA, 22 nt, Human
cauggaaggcaaaagacacaga

SEQ ID NO: 574115 - RNA, 22 nt, Human
aagcacuguacaaaugucacuu

SEQ ID NO: 574116 - RNA, 22 nt, Human
guaacauuuacaguuccuagag

SEQ ID NO: 574117 - RNA, 22 nt, Human
uacacuggacaggaguaggaag

SEQ ID NO: 574118 - RNA, 22 nt, Human
uuccaaagaaauugaccaagac

SEQ ID NO: 574119 - RNA, 22 nt, Human
ccagagggcaaaaugaagcuua

SEQ ID NO: 574120 - RNA, 23 nt, Human
acaagauagggauaaaaagauaa

SEQ ID NO: 574121 - RNA, 22 nt, Human
uuuacagaauguugaauuuggg

SEQ ID NO: 574122 - RNA, 22 nt, Human
agaaugauagcuaguauuuacu

SEQ ID NO: 574123 - RNA, 22 nt, Human
gaaacagcuuuaagugauacug

SEQ ID NO: 574124 - RNA, 23 nt, Human
acauuucauauaaaagggaucag

SEQ ID NO: 574125 - RNA, 22 nt, Human
uugaggucuugaguacugggga

SEQ ID NO: 574126 - RNA, 22 nt, Human
cugcuuuaacucugggaagcca

SEQ ID NO: 574127 - RNA, 22 nt, Human
aacaguguguacacaucauagg

SEQ ID NO: 574128 - RNA, 22 nt, Human
gucuggaggcccgucagcccua

SEQ ID NO: 574129 - RNA, 22 nt, Human
gaggagaaugcgcaccacauau

SEQ ID NO: 574130 - RNA, 19 nt, Human
ccuggcugugaagccugca

SEQ ID NO: 574131 - RNA, 22 nt, Human
uccuuagcccacuaauacuuau

SEQ ID NO: 574132 - RNA, 22 nt, Human
gaaugcugagacuaaagagcuu

SEQ ID NO: 574133 - RNA, 22 nt, Human
ugcuugaagauauacuacuucc

SEQ ID NO: 574134 - RNA, 22 nt, Human
aaaacuuucagggauacagaaa

SEQ ID NO: 574135 - RNA, 22 nt, Human
gaagaacaagcagugcuuuccu

SEQ ID NO: 574136 - RNA, 22 nt, Human
caggcugugggagucaggaccc

SEQ ID NO: 574137 - RNA, 22 nt, Human
aagcacaggagacgcacagcca

SEQ ID NO: 574138 - RNA, 22 nt, Human
ugugggcacuaaugacaugcag

SEQ ID NO: 574139 - RNA, 22 nt, Human
uagggcaggggaggaaucugaa

SEQ ID NO: 574140 - RNA, 22 nt, Human
gaguguguuauuaaagauggaa

SEQ ID NO: 574141 - RNA, 16 nt, Human
acuggaguggggaugc

SEQ ID NO: 574142 - RNA, 22 nt, Human
gcaaggagacuguagggccaag

SEQ ID NO: 574143 - RNA, 22 nt, Human
cauuauggaagacaguguggug

SEQ ID NO: 574144 - RNA, 22 nt, Human
uccagcuuuuaccaaaugagca

SEQ ID NO: 574145 - RNA, 16 nt, Human
ggggaaggcaagaggg

SEQ ID NO: 574146 - RNA, 22 nt, Human
uaagcauucaaugcuuagcacu

SEQ ID NO: 574147 - RNA, 22 nt, Human
cagcaguggaacuacccaggga

SEQ ID NO: 574148 - RNA, 22 nt, Human
gaugcugggaccacagaguguu

SEQ ID NO: 574149 - RNA, 22 nt, Human
uuagcaagaaagauugcagcac

SEQ ID NO: 574150 - RNA, 22 nt, Human
uuauuuauggcccucaccugau

SEQ ID NO: 574151 - RNA, 22 nt, Human
ccugggcaaauuauguuacuca

SEQ ID NO: 574152 - RNA, 22 nt, Human
aaauagaauuaacuagcuacug

SEQ ID NO: 574153 - RNA, 22 nt, Human
gccugggugaauuugauccuaa

SEQ ID NO: 574154 - RNA, 22 nt, Human
ccagggcagggaccacgugucu

SEQ ID NO: 574155 - RNA, 16 nt, Human
aaggagggaagagaau

SEQ ID NO: 574156 - RNA, 22 nt, Human
ggaggccaggaagagccgcccu

SEQ ID NO: 574157 - RNA, 22 nt, Human
uaaaugagauuuguucuuuugu

SEQ ID NO: 574158 - RNA, 22 nt, Human
cucaggaaaauauugaagaagu

SEQ ID NO: 574159 - RNA, 22 nt, Human
aaaauacuguggaguguugaaa

SEQ ID NO: 574160 - RNA, 22 nt, Human
aggcuccacccuacagagcucc

SEQ ID NO: 574161 - RNA, 22 nt, Human
cuucugugcaauuguggaggag

SEQ ID NO: 574162 - RNA, 22 nt, Human
ugaacacagggccaaacuugag

SEQ ID NO: 574163 - RNA, 22 nt, Human
ccuguacaagcucuuggugaca

SEQ ID NO: 574164 - RNA, 22 nt, Human
cuggggcugcgguggaggagcc

SEQ ID NO: 574165 - RNA, 18 nt, Human
ggggagcagacugaacuc

SEQ ID NO: 574166 - RNA, 22 nt, Human
aguaucauuuuggcauuaguau

SEQ ID NO: 574167 - RNA, 22 nt, Human
acguuaaacauuuagcauagua

SEQ ID NO: 574168 - RNA, 22 nt, Human
gaggacagugugaucugccagc

SEQ ID NO: 574169 - RNA, 22 nt, Human
ucauaaaaguacucauguucau

SEQ ID NO: 574170 - RNA, 22 nt, Human
auuuagagaauaagacauaaau

SEQ ID NO: 574171 - RNA, 22 nt, Human
caccagcuacuccagggccgug

SEQ ID NO: 574172 - RNA, 22 nt, Human
auauuucagcuuuacuuaggaa

SEQ ID NO: 574173 - RNA, 22 nt, Human
aacacugagggaaaagagauag

SEQ ID NO: 574174 - RNA, 23 nt, Human
ggcucugaggauggagcuggugg

SEQ ID NO: 574175 - RNA, 22 nt, Human
augcauugaggaugacaugagu

SEQ ID NO: 574176 - RNA, 22 nt, Human
gaaugauauuauuucgugcugg

SEQ ID NO: 574177 - RNA, 22 nt, Human
ugcccagcaauaaaccagaaga

SEQ ID NO: 574178 - RNA, 22 nt, Human
uguucauagcuaucauuguguc

SEQ ID NO: 574179 - RNA, 22 nt, Human
uuagaaagcuuuccauagucaa

SEQ ID NO: 574180 - RNA, 22 nt, Human
uauuaucauugguaauaugguc

SEQ ID NO: 574181 - RNA, 23 nt, Human
uuaugcaagcuuccuggucucag

SEQ ID NO: 574182 - RNA, 22 nt, Human
uuuaggauauuaauguucagag

SEQ ID NO: 574183 - RNA, 20 nt, Human
agccccacccuuguccuggc

SEQ ID NO: 574184 - RNA, 22 nt, Human
gcuggccaggugcuuugguucu

SEQ ID NO: 574185 - RNA, 22 nt, Human
acagccagugacugcagacccu

SEQ ID NO: 574186 - RNA, 22 nt, Human
uuacaugguuguuggaaaugcu

SEQ ID NO: 574187 - RNA, 22 nt, Human
aacagaauugcugcugccaaug

SEQ ID NO: 574188 - RNA, 22 nt, Human
cagggugcauacccaugcauac

SEQ ID NO: 574189 - RNA, 22 nt, Human
agcuuuaaagcauauuucuaag

SEQ ID NO: 574190 - RNA, 22 nt, Human
cggcagagugugugcgugcaug

SEQ ID NO: 574191 - RNA, 22 nt, Human
ucccagcuguguggaggagaug

SEQ ID NO: 574192 - RNA, 22 nt, Human
gugcagauucccgggccucucc

SEQ ID NO: 574193 - RNA, 22 nt, Human
uucuuacaaguauuccaggucc

SEQ ID NO: 574194 - RNA, 22 nt, Human
uggcagagugcggcauccccug

SEQ ID NO: 574195 - RNA, 18 nt, Human
ugcucuguuuaaugauuu

SEQ ID NO: 574196 - RNA, 22 nt, Human
cagggcccagucccugcuguca

SEQ ID NO: 574197 - RNA, 21 nt, Human
gccaggaguagauuacauuua

SEQ ID NO: 574198 - RNA, 22 nt, Human
ugcugaaugugcucccuuuuaa

SEQ ID NO: 574199 - RNA, 22 nt, Human
caugggcaccuuaaaaugaggc

SEQ ID NO: 574200 - RNA, 18 nt, Human
aggcagcagcaucuucuc

SEQ ID NO: 574201 - RNA, 22 nt, Human
ugggggcuccaggcuccaggga

SEQ ID NO: 574202 - RNA, 22 nt, Human
gcugcuuuucacagagacaaga

SEQ ID NO: 574203 - RNA, 22 nt, Human
ucccaggacaugggcucugcuc

SEQ ID NO: 574204 - RNA, 22 nt, Human
aucugcaguuuguuuucucuug

SEQ ID NO: 574205 - RNA, 22 nt, Human
cugcaguuucagccuuucuggc

SEQ ID NO: 574206 - RNA, 22 nt, Human
guaacacuagcucugucacuuu

SEQ ID NO: 574207 - RNA, 22 nt, Human
cagagcuggagggaacccuggc

SEQ ID NO: 574208 - RNA, 22 nt, Human
uuugaauagggcuuugcaggga

SEQ ID NO: 574209 - RNA, 22 nt, Human
gccagcugcucgcguaggguag

SEQ ID NO: 574210 - RNA, 22 nt, Human
cuauuucagcugccuuugacug

SEQ ID NO: 574211 - RNA, 22 nt, Human
uucaggagaauuccaagaagua

SEQ ID NO: 574212 - RNA, 22 nt, Human
cugaaucauggucauuaguuua

SEQ ID NO: 574213 - RNA, 18 nt, Human
acauacauucugucugca

SEQ ID NO: 574214 - RNA, 22 nt, Human
uccacuucauccagggucacca

SEQ ID NO: 574215 - RNA, 22 nt, Human
ucucugcuugguguaugugagu

SEQ ID NO: 574216 - RNA, 22 nt, Human
agcuuugaaguauuuggucucc

SEQ ID NO: 574217 - RNA, 22 nt, Human
acugaagaacgcaucagugguu

SEQ ID NO: 574218 - RNA, 22 nt, Human
gugggguguccagcagcgagcu

SEQ ID NO: 574219 - RNA, 22 nt, Human
cagcucucacacuuagcuucua

SEQ ID NO: 574220 - RNA, 23 nt, Human
guuccuucauguggucauugguu

SEQ ID NO: 574221 - RNA, 22 nt, Human
cagggcuguuagcugcugcucu

SEQ ID NO: 574222 - RNA, 22 nt, Human
aggcugcguuagccucacuccc

SEQ ID NO: 574223 - RNA, 22 nt, Human
aagggcuggagaggaaagguug

SEQ ID NO: 574224 - RNA, 22 nt, Human
cagggcugucuccaaaggcccc

SEQ ID NO: 574225 - RNA, 22 nt, Human
auggcucagcccauggaagaaa

SEQ ID NO: 574226 - RNA, 22 nt, Human
ugacaauugcagacacagaagu

SEQ ID NO: 574227 - RNA, 22 nt, Human
ugaaacaaauuuggaaaaucua

SEQ ID NO: 574228 - RNA, 22 nt, Human
gcugagguaggagguugcagug

SEQ ID NO: 574229 - RNA, 22 nt, Human
cuucaguuaguuucaugugagc

SEQ ID NO: 574230 - RNA, 22 nt, Human
cagaagcagaacacuagauuua

SEQ ID NO: 574231 - RNA, 21 nt, Human
gcagaugggagucaucaggcu

SEQ ID NO: 574232 - RNA, 22 nt, Human
ucccucagcuugucuccaugca

SEQ ID NO: 574233 - RNA, 22 nt, Human
uccaggcacgaggcccugugca

SEQ ID NO: 574234 - RNA, 21 nt, Human
ugcugggcugcaggggaugca

SEQ ID NO: 574235 - RNA, 22 nt, Human
uacaaaaaauugauacugacga

SEQ ID NO: 574236 - RNA, 22 nt, Human
uggugcaguagagcugucuggg

SEQ ID NO: 574237 - RNA, 21 nt, Human
gaaaaccauuugcaucaugag

SEQ ID NO: 574238 - RNA, 22 nt, Human
aguccaaggccauacaguugug

SEQ ID NO: 574239 - RNA, 22 nt, Human
uuccagagcaguuuucagauca

SEQ ID NO: 574240 - RNA, 22 nt, Human
caguuucuucuauuuugaacua

SEQ ID NO: 574241 - RNA, 20 nt, Human
uacaacaaguagagacauac

SEQ ID NO: 574242 - RNA, 17 nt, Human
gaugaaaugaugcacac

SEQ ID NO: 574243 - RNA, 22 nt, Human
cauaacuggggacacuucucua

SEQ ID NO: 574244 - RNA, 22 nt, Human
cuuuacuucucaaaauaaagca

SEQ ID NO: 574245 - RNA, 22 nt, Human
uggcucauggaauuagcuauua

SEQ ID NO: 574246 - RNA, 22 nt, Human
cuucuggggauggagcccagaa

SEQ ID NO: 574247 - RNA, 22 nt, Human
ccuuccuggcuguccgccugau

SEQ ID NO: 574248 - RNA, 22 nt, Human
aagaggaguagaugugguuggu

SEQ ID NO: 574249 - RNA, 22 nt, Human
auguauuaugguuuuccuuaag

SEQ ID NO: 574250 - RNA, 22 nt, Human
acagucaggccgagaugggccu

SEQ ID NO: 574251 - RNA, 21 nt, Human
aaguugucucuuuugguuccu

SEQ ID NO: 574252 - RNA, 22 nt, Human
ggaacuccugcuccaagcagcu

SEQ ID NO: 574253 - RNA, 22 nt, Human
acagcucuguguauugucaucu

SEQ ID NO: 574254 - RNA, 22 nt, Human
auuagcuucugaagcccuugaa

SEQ ID NO: 574255 - RNA, 22 nt, Human
agugcaugccuuccuguggaug

SEQ ID NO: 574256 - RNA, 18 nt, Human
uacagcuugaguugacug

SEQ ID NO: 574257 - RNA, 22 nt, Human
uucacaguggcugacaggcugg

SEQ ID NO: 574258 - RNA, 22 nt, Human
ucacaggagggagagacaccca

SEQ ID NO: 574259 - RNA, 22 nt, Human
aaaucucaaaggcuuagcaucu

SEQ ID NO: 574260 - RNA, 22 nt, Human
gggcuucugcucuuuuggugcu

SEQ ID NO: 574261 - RNA, 23 nt, Human
gcugaauguaauguucuuugggu

SEQ ID NO: 574262 - RNA, 22 nt, Human
acuggggcaggaaaguaugcug

SEQ ID NO: 574263 - RNA, 22 nt, Human
auugaaagguuuugagcagaua

SEQ ID NO: 574264 - RNA, 22 nt, Human
acagacauuuuaauuauuaaau

SEQ ID NO: 574265 - RNA, 22 nt, Human
cugaggcucagcgugaggaaag

SEQ ID NO: 574266 - RNA, 22 nt, Human
uggcagugggaagcuggaaguc

SEQ ID NO: 574267 - RNA, 22 nt, Human
accaucuuaguggccagcucuc

SEQ ID NO: 574268 - RNA, 22 nt, Human
gugaacaaggagacuacaacuu

SEQ ID NO: 574269 - RNA, 22 nt, Human
uaaaaagcagcugagauuuucu

SEQ ID NO: 574270 - RNA, 22 nt, Human
ccagggagcccacaggacaaug

SEQ ID NO: 574271 - RNA, 22 nt, Human
aagacuguacauuuuccagucu

SEQ ID NO: 574272 - RNA, 22 nt, Human
cuuauuaauggaauccuaauga

SEQ ID NO: 574273 - RNA, 22 nt, Human
cagugggaagggcagaggcuuu

SEQ ID NO: 574274 - RNA, 20 nt, Human
aggcucagagcaguaguaca

SEQ ID NO: 574275 - RNA, 22 nt, Human
ugcucaguuccaugaguggagu

SEQ ID NO: 574276 - RNA, 22 nt, Human
ccagagcugauuccugggacuu

SEQ ID NO: 574277 - RNA, 22 nt, Human
uccuggggcugcaaggccuguc

SEQ ID NO: 574278 - RNA, 22 nt, Human
uccuuuaucugcucagaaagua

SEQ ID NO: 574279 - RNA, 22 nt, Human
caccaggcugaaccagagggga

SEQ ID NO: 574280 - RNA, 22 nt, Human
caaaggcacacauaccuuucug

SEQ ID NO: 574281 - RNA, 22 nt, Human
agggaggagaauggacuccuuc

SEQ ID NO: 574282 - RNA, 22 nt, Human
uuuggcaagugggaaauuagua

SEQ ID NO: 574283 - RNA, 22 nt, Human
cugcuggggaggcgccucgacg

SEQ ID NO: 574284 - RNA, 22 nt, Human
cauucugggucuggcucaggga

SEQ ID NO: 574285 - RNA, 22 nt, Human
gcugcuguguuggagagggacu

SEQ ID NO: 574286 - RNA, 22 nt, Human
ucucuguggcaagcaugcugcu

SEQ ID NO: 574287 - RNA, 22 nt, Human
aguucucuggcuccuuuccaga

SEQ ID NO: 574288 - RNA, 22 nt, Human
cugaagcaggaacagcgagauu

SEQ ID NO: 574289 - RNA, 22 nt, Human
ccaggacaagccagagggacag

SEQ ID NO: 574290 - RNA, 22 nt, Human
cauugcaggagaguaaauaaaa

SEQ ID NO: 574291 - RNA, 22 nt, Human
uuucaagcugugguaacugaga

SEQ ID NO: 574292 - RNA, 22 nt, Human
ucacuguuucaucccuagcacu

SEQ ID NO: 574293 - RNA, 22 nt, Human
caggaagaaagaggugaggugu

SEQ ID NO: 574294 - RNA, 22 nt, Human
cagagacauuaagugccaugau

SEQ ID NO: 574295 - RNA, 22 nt, Human
ccaagagguugugaggcaggca

SEQ ID NO: 574296 - RNA, 22 nt, Human
uccuggugaucaaaauucauuu

SEQ ID NO: 574297 - RNA, 20 nt, Human
uauugaguaccuacuguaua

SEQ ID NO: 574298 - RNA, 17 nt, Human
uggggaagcucagauuu

SEQ ID NO: 574299 - RNA, 22 nt, Human
auacaaagcuuucugucuggua

SEQ ID NO: 574300 - RNA, 22 nt, Human
ugagaaaauccagaggcuaguu

SEQ ID NO: 574301 - RNA, 22 nt, Human
aaugagauggaauucccgccua

SEQ ID NO: 574302 - RNA, 22 nt, Human
gacccuuagaaugugaucuuau

SEQ ID NO: 574303 - RNA, 21 nt, Human
uuaauuuauucaugauagcua

SEQ ID NO: 574304 - RNA, 22 nt, Human
ggacaggcccggggagccugga

SEQ ID NO: 574305 - RNA, 22 nt, Human
uacuuuaaaaacugauaauuca

SEQ ID NO: 574306 - RNA, 22 nt, Human
cccuuucugggaccccugucuc

SEQ ID NO: 574307 - RNA, 22 nt, Human
ucugaggcuaagagacagaggc

SEQ ID NO: 574308 - RNA, 22 nt, Human
caggcagaguuagugauuuagg

SEQ ID NO: 574309 - RNA, 22 nt, Human
ggggcagcucccgagggcagga

SEQ ID NO: 574310 - RNA, 22 nt, Human
uggcucaucuuuuuagacuuau

SEQ ID NO: 574311 - RNA, 19 nt, Human
uauauuuguugaauaaaaa

SEQ ID NO: 574312 - RNA, 22 nt, Human
guauuucuuggaaauccuuuua

SEQ ID NO: 574313 - RNA, 22 nt, Human
ccagagccuaagaucugauccu

SEQ ID NO: 574314 - RNA, 22 nt, Human
cuuuggaauaauuuccuggagu

SEQ ID NO: 574315 - RNA, 22 nt, Human
ucaucugucugagagacuucug

SEQ ID NO: 574316 - RNA, 22 nt, Human
guccccucaaaauucauauguu

SEQ ID NO: 574317 - RNA, 22 nt, Human
uuguccuguuacuuguuuggau

SEQ ID NO: 574318 - RNA, 22 nt, Human
agaaggaaggaagcauucuguu

SEQ ID NO: 574319 - RNA, 22 nt, Human
cauauauucugguuuucacugg

SEQ ID NO: 574320 - RNA, 22 nt, Human
aagcuuugacuacugccucuug

SEQ ID NO: 574321 - RNA, 22 nt, Human
cauuccagagcugccucugcua

SEQ ID NO: 574322 - RNA, 22 nt, Human
caaauagaacucacagacaaga

SEQ ID NO: 574323 - RNA, 22 nt, Human
ggcugcaggcagaggcugucug

SEQ ID NO: 574324 - RNA, 22 nt, Human
ucauuuguuacagccacauacc

SEQ ID NO: 574325 - RNA, 22 nt, Human
aauguauuugauguauuagccu

SEQ ID NO: 574326 - RNA, 17 nt, Human
auggaggcagacagguc

SEQ ID NO: 574327 - RNA, 22 nt, Human
uucuccaagaugaagcugugua

SEQ ID NO: 574328 - RNA, 22 nt, Human
ucucuuggagguucuuccuguu

SEQ ID NO: 574329 - RNA, 22 nt, Human
uggcuucauucuguaguuaaaa

SEQ ID NO: 574330 - RNA, 22 nt, Human
agaauguuuucaugagaaugaa

SEQ ID NO: 574331 - RNA, 22 nt, Human
acacccagagcgccagugccga

SEQ ID NO: 574332 - RNA, 22 nt, Human
guuuuguucuuguccagggaaa

SEQ ID NO: 574333 - RNA, 22 nt, Human
ccagcucuuuuggcugagugag

SEQ ID NO: 574334 - RNA, 22 nt, Human
uauggaaaaauguaucuuguca

SEQ ID NO: 574335 - RNA, 22 nt, Human
ugaaaaaacaaguuggcccauu

SEQ ID NO: 574336 - RNA, 22 nt, Human
acuguguggaccacucugaggc

SEQ ID NO: 574337 - RNA, 22 nt, Human
gucacacaauaguaaguggucc

SEQ ID NO: 574338 - RNA, 18 nt, Human
ucugccugcagggcaucu

SEQ ID NO: 574339 - RNA, 22 nt, Human
aggcaggaggaucauggaugca

SEQ ID NO: 574340 - RNA, 22 nt, Human
cugggaggcccacguugggaag

SEQ ID NO: 574341 - RNA, 22 nt, Human
cagguggcuucucugcagccuu

SEQ ID NO: 574342 - RNA, 19 nt, Human
gcccugaguaagcuaggag

SEQ ID NO: 574343 - RNA, 22 nt, Human
ucuuuaauguacuuucuuucac

SEQ ID NO: 574344 - RNA, 22 nt, Human
auaagacacgcaaauagguacg

SEQ ID NO: 574345 - RNA, 22 nt, Human
ucuuagaaaaaugguauguuuu

SEQ ID NO: 574346 - RNA, 22 nt, Human
auuuguuucagggccuugguau

SEQ ID NO: 574347 - RNA, 22 nt, Human
gcccagcaggggauggcagcuc

SEQ ID NO: 574348 - RNA, 23 nt, Human
augggccaagcaagacccaugac

SEQ ID NO: 574349 - RNA, 22 nt, Human
acuggcccgggagcagaggccu

SEQ ID NO: 574350 - RNA, 22 nt, Human
ucauuguuucugcuuuucauga

SEQ ID NO: 574351 - RNA, 22 nt, Human
uuucucugugccauuuccauaa

SEQ ID NO: 574352 - RNA, 22 nt, Human
gcagcagaggcccuacucuuug

SEQ ID NO: 574353 - RNA, 22 nt, Human
agagcuggagaugcagguuucg

SEQ ID NO: 574354 - RNA, 22 nt, Human
cuuaucauaucauacauggcua

SEQ ID NO: 574355 - RNA, 22 nt, Human
auuucacuuaguguaaugucuu

SEQ ID NO: 574356 - RNA, 22 nt, Human
ugaggguauauauuguguggag

SEQ ID NO: 574357 - RNA, 23 nt, Human
ucuguggcuccuucaggcugcug

SEQ ID NO: 574358 - RNA, 22 nt, Human
aagugacuauuugaguacauca

SEQ ID NO: 574359 - RNA, 22 nt, Human
cugaagcaugcguuuguaaacu

SEQ ID NO: 574360 - RNA, 22 nt, Human
auacagaaaaugaugcagaguu

SEQ ID NO: 574361 - RNA, 22 nt, Human
uccucagacuucccuuugugua

SEQ ID NO: 574362 - RNA, 22 nt, Human
gccugagggcuccuagcaggcu

SEQ ID NO: 574363 - RNA, 22 nt, Human
ucucuucuauuugagacuauuu

SEQ ID NO: 574364 - RNA, 22 nt, Human
aggcauggggcugcagucaggu

SEQ ID NO: 574365 - RNA, 22 nt, Human
ucugccuggccuggagggcaca

SEQ ID NO: 574366 - RNA, 22 nt, Human
aggucugagcaggggagaacag

SEQ ID NO: 574367 - RNA, 22 nt, Human
accgggaaguccugcacugggc

SEQ ID NO: 574368 - RNA, 20 nt, Human
agaggauuuauguggaugug

SEQ ID NO: 574369 - RNA, 22 nt, Human
gagggguguggagccaucaguu

SEQ ID NO: 574370 - RNA, 22 nt, Human
cugguccuugcuacccagcaag

SEQ ID NO: 574371 - RNA, 22 nt, Human
agcagcucauggaguaggcacu

SEQ ID NO: 574372 - RNA, 22 nt, Human
auugggaugccggcugauaaga

SEQ ID NO: 574373 - RNA, 22 nt, Human
gacuccauccaaucuguguucu

SEQ ID NO: 574374 - RNA, 22 nt, Human
agcuggcuaugcccugugaacc

SEQ ID NO: 574375 - RNA, 22 nt, Human
gcugugagccgcugcugagcau

SEQ ID NO: 574376 - RNA, 22 nt, Human
guuaucuucccuuugaugauuu

SEQ ID NO: 574377 - RNA, 22 nt, Human
aauuaauucaguuuuuaaggga

SEQ ID NO: 574378 - RNA, 17 nt, Human
ugugacauugggacauu

SEQ ID NO: 574379 - RNA, 21 nt, Human
agcaagaaucaggaaggcucu

SEQ ID NO: 574380 - RNA, 22 nt, Human
aagaaaagauguuugguuuuca

SEQ ID NO: 574381 - RNA, 22 nt, Human
ugacacagggaaagcggaucca

SEQ ID NO: 574382 - RNA, 22 nt, Human
acaaugcugcagggaaauuagg

SEQ ID NO: 574383 - RNA, 22 nt, Human
auuguacagaugagguaaguga

SEQ ID NO: 574384 - RNA, 22 nt, Human
guagggacuuguuuuacuagua

SEQ ID NO: 574385 - RNA, 22 nt, Human
acauuuacagugcuagacaauc

SEQ ID NO: 574386 - RNA, 22 nt, Human
uggaauggggacuuugggacau

SEQ ID NO: 574387 - RNA, 22 nt, Human
cagaaacuauguaagaaaguga

SEQ ID NO: 574388 - RNA, 22 nt, Human
cagugggugccaucgugcccuu

SEQ ID NO: 574389 - RNA, 22 nt, Human
uaaauaaguucuucauuguuug

SEQ ID NO: 574390 - RNA, 22 nt, Human
ugugaugcauaguuuuuauugc

SEQ ID NO: 574391 - RNA, 22 nt, Human
ccagcucucagcgggagacuca

SEQ ID NO: 574392 - RNA, 22 nt, Human
ugcaaguaguccagccuuuggg

SEQ ID NO: 574393 - RNA, 22 nt, Human
uuuauacauggagaauuuuugc

SEQ ID NO: 574394 - RNA, 20 nt, Human
uguauuuaaugaaggcuuuu

SEQ ID NO: 574395 - RNA, 22 nt, Human
aauuauggucacuguuccuggg

SEQ ID NO: 574396 - RNA, 22 nt, Human
agguggaguuaagugugaacug

SEQ ID NO: 574397 - RNA, 22 nt, Human
aauucauagcaacaaagaccca

SEQ ID NO: 574398 - RNA, 22 nt, Human
gagguggugguggaggcauagc

SEQ ID NO: 574399 - RNA, 22 nt, Human
cuugagguuuugacucagcuuu

SEQ ID NO: 574400 - RNA, 22 nt, Human
uaugucaaaaaagauuauguuu

SEQ ID NO: 574401 - RNA, 22 nt, Human
cugcugccggcgagccucccuu

SEQ ID NO: 574402 - RNA, 22 nt, Human
ucuuucucucuaaucaagcaca

SEQ ID NO: 574403 - RNA, 22 nt, Human
acugaggucucagguggggaag

SEQ ID NO: 574404 - RNA, 22 nt, Human
accagaggcucugccaccucca

SEQ ID NO: 574405 - RNA, 22 nt, Human
uuacuugaugauguauaaaguc

SEQ ID NO: 574406 - RNA, 22 nt, Human
cuaugagaagaaaacaagauua

SEQ ID NO: 574407 - RNA, 22 nt, Human
ucaauucaauugcauuucugug

SEQ ID NO: 574408 - RNA, 22 nt, Human
cuucagcagaugugcuagagau

SEQ ID NO: 574409 - RNA, 22 nt, Human
gcugcugcuggucuggggccac

SEQ ID NO: 574410 - RNA, 22 nt, Human
aaauuggauuuuaaacuguugg

SEQ ID NO: 574411 - RNA, 22 nt, Human
auaguaacuggcauguuuauga

SEQ ID NO: 574412 - RNA, 22 nt, Human
caggcagaugcugacaagaguu

SEQ ID NO: 574413 - RNA, 22 nt, Human
gcauguggcccaaggaggcugu

SEQ ID NO: 574414 - RNA, 22 nt, Human
ugcucaacagauauguaacaug

SEQ ID NO: 574415 - RNA, 21 nt, Human
uagagaaaagaagcuguuccu

SEQ ID NO: 574416 - RNA, 22 nt, Human
aaucuugagggacucaugaggu

SEQ ID NO: 574417 - RNA, 22 nt, Human
aggcccagagcaggaaaggguu

SEQ ID NO: 574418 - RNA, 22 nt, Human
gguccaccuccaagcuggggac

SEQ ID NO: 574419 - RNA, 22 nt, Human
ucaaacagaggaacaauuguuu

SEQ ID NO: 574420 - RNA, 22 nt, Human
agggccaguucagaggacaugg

SEQ ID NO: 574421 - RNA, 22 nt, Human
gccaggcagcagcgaggauggu

SEQ ID NO: 574422 - RNA, 22 nt, Human
ggcaguggcuguagucucuugg

SEQ ID NO: 574423 - RNA, 22 nt, Human
ugugcaaauuaaguagauuuuc

SEQ ID NO: 574424 - RNA, 20 nt, Human
agaucugccugcacccucuc

SEQ ID NO: 574425 - RNA, 22 nt, Human
uggcagcugcaggccuccugag

SEQ ID NO: 574426 - RNA, 22 nt, Human
uagauuucaggagacaaaaugg

SEQ ID NO: 574427 - RNA, 20 nt, Human
agguggcuccugcugggggu

SEQ ID NO: 574428 - RNA, 22 nt, Human
ugaggccagccacagccacccu

SEQ ID NO: 574429 - RNA, 22 nt, Human
aagugugguuuaggcaucuuuu

SEQ ID NO: 574430 - RNA, 22 nt, Human
uuacuguuuugguaccucauug

SEQ ID NO: 574431 - RNA, 22 nt, Human
ggugggcacccgagacuggauc

SEQ ID NO: 574432 - RNA, 23 nt, Human
acagagacugccaagauauucuc

SEQ ID NO: 574433 - RNA, 22 nt, Human
uugaggucuucagcugacaccu

SEQ ID NO: 574434 - RNA, 22 nt, Human
gggccuggggacaccaccauga

SEQ ID NO: 574435 - RNA, 22 nt, Human
uccagcuuugagauuuuaugga

SEQ ID NO: 574436 - RNA, 22 nt, Human
uccugagagggguggguuuccc

SEQ ID NO: 574437 - RNA, 22 nt, Human
aucuagcaccaaacuagcuuuu

SEQ ID NO: 574438 - RNA, 22 nt, Human
ugugaaaugcuauugugacaaa

SEQ ID NO: 574439 - RNA, 22 nt, Human
cuguguuuugauuaaaaagcaa

SEQ ID NO: 574440 - RNA, 22 nt, Human
gcagaauagugacuuuccuuaa

SEQ ID NO: 574441 - RNA, 20 nt, Human
uccagccacuuccgcugguc

SEQ ID NO: 574442 - RNA, 22 nt, Human
agcuccagccucuucuggaggu

SEQ ID NO: 574443 - RNA, 22 nt, Human
aaugucauagcauuucuucaau

SEQ ID NO: 574444 - RNA, 22 nt, Human
cagugacacccagucuggccca

SEQ ID NO: 574445 - RNA, 22 nt, Human
gguuggacacuagguaggagcg

SEQ ID NO: 574446 - RNA, 22 nt, Human
uucugacauauccagucucagu

SEQ ID NO: 574447 - RNA, 22 nt, Human
uccaagaucuacagcaguuuag

SEQ ID NO: 574448 - RNA, 22 nt, Human
ugcacuuguguuuucagaaucu

SEQ ID NO: 574449 - RNA, 22 nt, Human
ggggccagauaucacuaagguu

SEQ ID NO: 574450 - RNA, 22 nt, Human
uugaaagggauauaucuuucug

SEQ ID NO: 574451 - RNA, 22 nt, Human
augcuuaagcucaguuauauau

SEQ ID NO: 574452 - RNA, 22 nt, Human
aaugccaacuuggauauacauu

SEQ ID NO: 574453 - RNA, 17 nt, Human
ggcaguggaggaagaga

SEQ ID NO: 574454 - RNA, 22 nt, Human
cuggugcaaggcuuuggaaucc

SEQ ID NO: 574455 - RNA, 20 nt, Human
cccugagaccagagagcagc

SEQ ID NO: 574456 - RNA, 22 nt, Human
uuuuauguuccucuuuaugcga

SEQ ID NO: 574457 - RNA, 22 nt, Human
cgugcgguuagacagguaccgg

SEQ ID NO: 574458 - RNA, 22 nt, Human
auacaugcgccauguuggugug

SEQ ID NO: 574459 - RNA, 22 nt, Human
auuauuuuaugugcggccugau

SEQ ID NO: 574460 - RNA, 22 nt, Human
cucuccuggggagcacacacac

SEQ ID NO: 574461 - RNA, 22 nt, Human
cugcagggcccgccugagcccu

SEQ ID NO: 574462 - RNA, 22 nt, Human
ucacugcucucuaagcaucgcc

SEQ ID NO: 574463 - RNA, 22 nt, Human
ugggcaggcaagugaauaccuu

SEQ ID NO: 574464 - RNA, 22 nt, Human
aucaucaucaacaagaaacauu

SEQ ID NO: 574465 - RNA, 22 nt, Human
accaaaaagauauguugaagcc

SEQ ID NO: 574466 - RNA, 23 nt, Human
cccagaggagcagggcgugagau

SEQ ID NO: 574467 - RNA, 22 nt, Human
auuucuccuccagauggugguu

SEQ ID NO: 574468 - RNA, 22 nt, Human
ucuguuauauguuuuuucuaaa

SEQ ID NO: 574469 - RNA, 22 nt, Human
agggagcagggcuccuuugggu

SEQ ID NO: 574470 - RNA, 22 nt, Human
uaccaggaauuauuuuacauuu

SEQ ID NO: 574471 - RNA, 22 nt, Human
ccagggugagaaaaggcuggau

SEQ ID NO: 574472 - RNA, 22 nt, Human
ugauuucucuccguuauuucag

SEQ ID NO: 574473 - RNA, 22 nt, Human
ucccacugugccuguuguaauc

SEQ ID NO: 574474 - RNA, 22 nt, Human
uguguaaauuauuuuuaaugau

SEQ ID NO: 574475 - RNA, 22 nt, Human
gccagugugcaagaggccacca

SEQ ID NO: 574476 - RNA, 22 nt, Human
guggggcaugcacgcugcuccu

SEQ ID NO: 574477 - RNA, 22 nt, Human
caaaugaagagggcaacuucug

SEQ ID NO: 574478 - RNA, 22 nt, Human
cuuccugcaacaccuguguugc

SEQ ID NO: 574479 - RNA, 22 nt, Human
uucagaauauuauuuuaaaggc

SEQ ID NO: 574480 - RNA, 22 nt, Human
aauauccacuucaauacaggca

SEQ ID NO: 574481 - RNA, 22 nt, Human
aagcagguaaauauguuucccu

SEQ ID NO: 574482 - RNA, 22 nt, Human
uauauucaacaggcuaauguca

SEQ ID NO: 574483 - RNA, 22 nt, Human
ugcugaaucauaugguaauucu

SEQ ID NO: 574484 - RNA, 22 nt, Human
gcagcagcucccuauccaggcu

SEQ ID NO: 574485 - RNA, 22 nt, Human
uaggaacaaagagccucacauu

SEQ ID NO: 574486 - RNA, 22 nt, Human
guaaacauuuucaucugugccc

SEQ ID NO: 574487 - RNA, 22 nt, Human
aaauggaaaaugcuguuuuggu

SEQ ID NO: 574488 - RNA, 22 nt, Human
cauuacaugguccaggauauau

SEQ ID NO: 574489 - RNA, 22 nt, Human
ucaggccaggagaucagauuga

SEQ ID NO: 574490 - RNA, 22 nt, Human
cuccagauuccguuuauucagg

SEQ ID NO: 574491 - RNA, 22 nt, Human
cuagagcuguucugugcacuca

SEQ ID NO: 574492 - RNA, 22 nt, Human
ggggugagcugggccugugccu

SEQ ID NO: 574493 - RNA, 22 nt, Human
agaaucugguagaaccaaggau

SEQ ID NO: 574494 - RNA, 22 nt, Human
acacacuuuugcuaaaaauugu

SEQ ID NO: 574495 - RNA, 22 nt, Human
acagaggaaggcugagcugccc

SEQ ID NO: 574496 - RNA, 22 nt, Human
uuaaagcaaccucagcccucuu

SEQ ID NO: 574497 - RNA, 22 nt, Human
gccagccccuccauccuguuca

SEQ ID NO: 574498 - RNA, 22 nt, Human
caggcagcagccacucugguau

SEQ ID NO: 574499 - RNA, 22 nt, Human
auguuuaaaggguugagaaaua

SEQ ID NO: 574500 - RNA, 21 nt, Human
uucucuggcuucuguagcugg

SEQ ID NO: 574501 - RNA, 22 nt, Human
cccuggaggaaaaucugaggcu

SEQ ID NO: 574502 - RNA, 22 nt, Human
uagagguagcaacaggacuaga

SEQ ID NO: 574503 - RNA, 21 nt, Human
cccaggagaagaaaagaugca

SEQ ID NO: 574504 - RNA, 22 nt, Human
uucuuauuucccccuucaucau

SEQ ID NO: 574505 - RNA, 22 nt, Human
cuccaggaaagccugaggcccg

SEQ ID NO: 574506 - RNA, 22 nt, Human
guaccauuguuugaaguacuca

SEQ ID NO: 574507 - RNA, 22 nt, Human
cagugcaggcugggggcccugc

SEQ ID NO: 574508 - RNA, 20 nt, Human
uggagguggucugcuguccu

SEQ ID NO: 574509 - RNA, 22 nt, Human
gaggcugggaaguccaagacca

SEQ ID NO: 574510 - RNA, 22 nt, Human
ggagaguggauuccagcuguau

SEQ ID NO: 574511 - RNA, 22 nt, Human
aaaguucuagaguugcaagaga

SEQ ID NO: 574512 - RNA, 22 nt, Human
uuggaauugaggauuuacauag

SEQ ID NO: 574513 - RNA, 22 nt, Human
auauugcuagccuaugaguuca

SEQ ID NO: 574514 - RNA, 22 nt, Human
cugccaggccucaucccagcca

SEQ ID NO: 574515 - RNA, 22 nt, Human
cugggugaguauaggaaaggga

SEQ ID NO: 574516 - RNA, 19 nt, Human
ggaguuuccaauggguaaa

SEQ ID NO: 574517 - RNA, 22 nt, Human
gucuguggucccugcuggggac

SEQ ID NO: 574518 - RNA, 22 nt, Human
cuguccuccggccaccuacagu

SEQ ID NO: 574519 - RNA, 22 nt, Human
gggcuccaaggaggccagccug

SEQ ID NO: 574520 - RNA, 22 nt, Human
uggcucauucuacucucccugg

SEQ ID NO: 574521 - RNA, 21 nt, Human
agacugccaucuuugggccac

SEQ ID NO: 574522 - RNA, 22 nt, Human
gcugggcuccacccucaacugu

SEQ ID NO: 574523 - RNA, 22 nt, Human
uuugagucugcuuccauuuuca

SEQ ID NO: 574524 - RNA, 22 nt, Human
guacacagagugguggaagaaa

SEQ ID NO: 574525 - RNA, 22 nt, Human
ccucaggcaagucacuuaacau

SEQ ID NO: 574526 - RNA, 22 nt, Human
cugagagaaucaugcugcaggu

SEQ ID NO: 574527 - RNA, 22 nt, Human
uaaaaguauacuuucaaaggag

SEQ ID NO: 574528 - RNA, 22 nt, Human
accagcucucuagcccuggucc

SEQ ID NO: 574529 - RNA, 22 nt, Human
uccugaggaugguugaagugca

SEQ ID NO: 574530 - RNA, 21 nt, Human
acccuuuguuuaugaaucagc

SEQ ID NO: 574531 - RNA, 22 nt, Human
ccugaggcaaggacuugguggc

SEQ ID NO: 574532 - RNA, 22 nt, Human
acccaggacucucuuccaguag

SEQ ID NO: 574533 - RNA, 22 nt, Human
agccucagugucaccaucuacc

SEQ ID NO: 574534 - RNA, 22 nt, Human
gcugucacaaauauuucucagc

SEQ ID NO: 574535 - RNA, 22 nt, Human
aggcacugagaggcuguguugc

SEQ ID NO: 574536 - RNA, 22 nt, Human
aaguguaaauucacagacuuca

SEQ ID NO: 574537 - RNA, 22 nt, Human
aaugauauagcagacauagccu

SEQ ID NO: 574538 - RNA, 22 nt, Human
ugcccugcagugagugcgucug

SEQ ID NO: 574539 - RNA, 22 nt, Human
gaagugggcuuuguggucagcu

SEQ ID NO: 574540 - RNA, 22 nt, Human
ggaguccaacgugcagccagga

SEQ ID NO: 574541 - RNA, 22 nt, Human
ucagaugcuuagagauuagacu

SEQ ID NO: 574542 - RNA, 22 nt, Human
uuugggaauuguagcugucuug

SEQ ID NO: 574543 - RNA, 22 nt, Human
ucucccucauuccugcuuccau

SEQ ID NO: 574544 - RNA, 22 nt, Human
gugccacaugguccauguauca

SEQ ID NO: 574545 - RNA, 22 nt, Human
cgggguggcacucuaaauagaa

SEQ ID NO: 574546 - RNA, 22 nt, Human
gcagaagaccaugguggaaaga

SEQ ID NO: 574547 - RNA, 22 nt, Human
gguguggaucaucugaggucag

SEQ ID NO: 574548 - RNA, 22 nt, Human
gcagaggcagggcccuccucca

SEQ ID NO: 574549 - RNA, 18 nt, Human
ugagcaggggcugaccuu

SEQ ID NO: 574550 - RNA, 22 nt, Human
uucauaaacaacugaugguaau

SEQ ID NO: 574551 - RNA, 22 nt, Human
gcugagggcuguaacagcagag

SEQ ID NO: 574552 - RNA, 22 nt, Human
gagagggcugccuggugugagg

SEQ ID NO: 574553 - RNA, 22 nt, Human
ccagcuugaagaugugcugguu

SEQ ID NO: 574554 - RNA, 22 nt, Human
agaggccauggggcauuuuuca

SEQ ID NO: 574555 - RNA, 22 nt, Human
ugugugugaguccuggcuuucc

SEQ ID NO: 574556 - RNA, 22 nt, Human
agucuucucauuucacaugcuu

SEQ ID NO: 574557 - RNA, 22 nt, Human
gggcuucaaaauuggcacucuu

SEQ ID NO: 574558 - RNA, 22 nt, Human
cagcccugccauggagccuccu

SEQ ID NO: 574559 - RNA, 22 nt, Human
aauuaguauugcgauucauuag

SEQ ID NO: 574560 - RNA, 22 nt, Human
guucuuaaagauucaucaagca

SEQ ID NO: 574561 - RNA, 22 nt, Human
uccagcucaaagugcuccuguc

SEQ ID NO: 574562 - RNA, 22 nt, Human
augcauucuggaaaguagcaau

SEQ ID NO: 574563 - RNA, 22 nt, Human
aaacucuuggucaacaugagga

SEQ ID NO: 574564 - RNA, 22 nt, Human
uguguuucucugaggggucccu

SEQ ID NO: 574565 - RNA, 19 nt, Human
cugcuuccuucccucacug

SEQ ID NO: 574566 - RNA, 22 nt, Human
cauuucaauuauuugcucuucu

SEQ ID NO: 574567 - RNA, 17 nt, Human
ggagcagauccaccauu

SEQ ID NO: 574568 - RNA, 22 nt, Human
agagcuguuugucuagagagug

SEQ ID NO: 574569 - RNA, 22 nt, Human
uccucaucuguaccuuggggua

SEQ ID NO: 574570 - RNA, 22 nt, Human
uuaauucagucaaagaaaccau

SEQ ID NO: 574571 - RNA, 22 nt, Human
gggaguggagagcaauggauga

SEQ ID NO: 574572 - RNA, 20 nt, Human
guuaggagguuggacaugga

SEQ ID NO: 574573 - RNA, 22 nt, Human
ugcuucaaggccaugucaagcu

SEQ ID NO: 574574 - RNA, 22 nt, Human
acacuauaagacagauacagca

SEQ ID NO: 574575 - RNA, 22 nt, Human
ggaaagaccugagauaggaaua

SEQ ID NO: 574576 - RNA, 22 nt, Human
agaagccaauucugugugaguc

SEQ ID NO: 574577 - RNA, 22 nt, Human
uuucuugagugaugcuuagugu

SEQ ID NO: 574578 - RNA, 20 nt, Human
uuugucuguuaaguguuucu

SEQ ID NO: 574579 - RNA, 22 nt, Human
auuguuuuguagaaugacccuu

SEQ ID NO: 574580 - RNA, 22 nt, Human
ucuguacaacaaagggaugaga

SEQ ID NO: 574581 - RNA, 22 nt, Human
uccuacaucagcucucaguagc

SEQ ID NO: 574582 - RNA, 22 nt, Human
guucucucugcuuccaagaugg

SEQ ID NO: 574583 - RNA, 22 nt, Human
uaacuucucugcuaucauagga

SEQ ID NO: 574584 - RNA, 22 nt, Human
uugcugaacccugcccucuaau

SEQ ID NO: 574585 - RNA, 22 nt, Human
aaauagcauaaaauaggaagcu

SEQ ID NO: 574586 - RNA, 22 nt, Human
agaacuauugcaauaacaagaa

SEQ ID NO: 574587 - RNA, 22 nt, Human
aauguuaauguguuugcuuaug

SEQ ID NO: 574588 - RNA, 22 nt, Human
acaguaaauaaugcauguugau

SEQ ID NO: 574589 - RNA, 22 nt, Human
guggaagguaaugcagcuuacu

SEQ ID NO: 574590 - RNA, 21 nt, Human
aaggcuggagaugcaggucug

SEQ ID NO: 574591 - RNA, 19 nt, Human
cugggcugaggucugccuu

SEQ ID NO: 574592 - RNA, 22 nt, Human
acagagcaguucuggagcuggc

SEQ ID NO: 574593 - RNA, 22 nt, Human
ucuguggcauagugcuugggaa

SEQ ID NO: 574594 - RNA, 22 nt, Human
ccacucugauuuuggcuccacu

SEQ ID NO: 574595 - RNA, 22 nt, Human
aggugcuguuugucagcaguuu

SEQ ID NO: 574596 - RNA, 16 nt, Human
caguuuuaaggcccaa

SEQ ID NO: 574597 - RNA, 22 nt, Human
gccagggugagggcugagaggu

SEQ ID NO: 574598 - RNA, 22 nt, Human
uacacuggagcccuuggggucu

SEQ ID NO: 574599 - RNA, 22 nt, Human
augcauaugccguagaauaagu

SEQ ID NO: 574600 - RNA, 22 nt, Human
uuuauugaauuguaacccuauu

SEQ ID NO: 574601 - RNA, 22 nt, Human
auauaauaguuucauaaaggcu

SEQ ID NO: 574602 - RNA, 22 nt, Human
cguguggucccggcaaggcaag

SEQ ID NO: 574603 - RNA, 22 nt, Human
gaggcuggcagaaaagcacagg

SEQ ID NO: 574604 - RNA, 22 nt, Human
cuguaaauaaugacaguugacu

SEQ ID NO: 574605 - RNA, 23 nt, Human
cccaagccugugcccucugacuc

SEQ ID NO: 574606 - RNA, 22 nt, Human
aggcugcagaacagucaggugc

SEQ ID NO: 574607 - RNA, 19 nt, Human
accaggcuuauggucagug

SEQ ID NO: 574608 - RNA, 21 nt, Human
ugcucagucugucuccagcuu

SEQ ID NO: 574609 - RNA, 22 nt, Human
accuuaaaacugacacauggag

SEQ ID NO: 574610 - RNA, 22 nt, Human
aaguguuuggggaucauuuuaa

SEQ ID NO: 574611 - RNA, 22 nt, Human
uauugacacuuuuuguguagcc

SEQ ID NO: 574612 - RNA, 22 nt, Human
uuuaauuuuccucuuccuggag

SEQ ID NO: 574613 - RNA, 22 nt, Human
uggcuucaaaaucuaguggucu

SEQ ID NO: 574614 - RNA, 22 nt, Human
gcuguucugcgucccaggcugg

SEQ ID NO: 574615 - RNA, 22 nt, Human
gagggcucacugagaaagcagu

SEQ ID NO: 574616 - RNA, 20 nt, Human
aggcucugcauuucugagug

SEQ ID NO: 574617 - RNA, 22 nt, Human
caggaacaggggagugaaccug

SEQ ID NO: 574618 - RNA, 22 nt, Human
ucacuuauaaaaugcaagaucu

SEQ ID NO: 574619 - RNA, 22 nt, Human
auguguguacacacgugacucu

SEQ ID NO: 574620 - RNA, 23 nt, Human
gggcagguuuuuauaggcuucag

SEQ ID NO: 574621 - RNA, 22 nt, Human
uggagagaagaggcagugugcu

SEQ ID NO: 574622 - RNA, 22 nt, Human
aacuacaguauguccaaagaau

SEQ ID NO: 574623 - RNA, 22 nt, Human
ucugagaggcaucugcacuucu

SEQ ID NO: 574624 - RNA, 22 nt, Human
uuguauuaguaagucagcugcu

SEQ ID NO: 574625 - RNA, 20 nt, Human
ucuggaguagagcacaggca

SEQ ID NO: 574626 - RNA, 22 nt, Human
ccacugggggcugcaggcacuc

SEQ ID NO: 574627 - RNA, 22 nt, Human
ccaugcucuggggaggucaagc

SEQ ID NO: 574628 - RNA, 22 nt, Human
ugggggagauugugcaucucua

SEQ ID NO: 574629 - RNA, 22 nt, Human
acuggccaggcgaaccacacug

SEQ ID NO: 574630 - RNA, 22 nt, Human
ucuguacaaaggcuauuuggag

SEQ ID NO: 574631 - RNA, 22 nt, Human
ucuuuucuucuuaaugguuaau

SEQ ID NO: 574632 - RNA, 22 nt, Human
agacauuuggaagauacacaua

SEQ ID NO: 574633 - RNA, 22 nt, Human
ggucugaguagagggcuggcga

SEQ ID NO: 574634 - RNA, 22 nt, Human
agcgugaaggcgggcagucggc

SEQ ID NO: 574635 - RNA, 22 nt, Human
uuccagcuaacucacaucccuu

SEQ ID NO: 574636 - RNA, 22 nt, Human
agagaccuuuguuauucuagga

SEQ ID NO: 574637 - RNA, 22 nt, Human
uccaaagaacauugcugagacc

SEQ ID NO: 574638 - RNA, 22 nt, Human
aucucugguccaaauguuaccu

SEQ ID NO: 574639 - RNA, 22 nt, Human
ugcggguugguggcauaugcag

SEQ ID NO: 574640 - RNA, 22 nt, Human
guaaaacugcagaacuuggagg

SEQ ID NO: 574641 - RNA, 22 nt, Human
gccuuagcaucuuaaagcugug

SEQ ID NO: 574642 - RNA, 22 nt, Human
ugcaaacaguuaagaugcaggc

SEQ ID NO: 574643 - RNA, 23 nt, Human
uaaauuucuugauucuuauguga

SEQ ID NO: 574644 - RNA, 22 nt, Human
ucuaagccuguguccucugcag

SEQ ID NO: 574645 - RNA, 22 nt, Human
uggcagcuguguccagguagaa

SEQ ID NO: 574646 - RNA, 22 nt, Human
aggggccucagccuccugguca

SEQ ID NO: 574647 - RNA, 22 nt, Human
gcuucugcuguugaagccacca

SEQ ID NO: 574648 - RNA, 22 nt, Human
ugcaggagggaggguuacaguu

SEQ ID NO: 574649 - RNA, 22 nt, Human
cauguacacucauguaacuaua

SEQ ID NO: 574650 - RNA, 22 nt, Human
gacuacaggugugugccaccau

SEQ ID NO: 574651 - RNA, 22 nt, Human
cccaagagaucgcauguaguug

SEQ ID NO: 574652 - RNA, 22 nt, Human
ggagcccagucgggguguaggu

SEQ ID NO: 574653 - RNA, 22 nt, Human
aagauuuucagcuaauggugca

SEQ ID NO: 574654 - RNA, 22 nt, Human
gacuuuauaaaugagaggcgga

SEQ ID NO: 574655 - RNA, 22 nt, Human
accaggcucugccaguguuuac

SEQ ID NO: 574656 - RNA, 22 nt, Human
auacaugugcuauguuggugua

SEQ ID NO: 574657 - RNA, 22 nt, Human
aguguuaagagaaaauucugcu

SEQ ID NO: 574658 - RNA, 22 nt, Human
uauacacauccuccaaagauag

SEQ ID NO: 574659 - RNA, 22 nt, Human
agguuucuggauuuauuauggc

SEQ ID NO: 574660 - RNA, 22 nt, Human
ccugacuuaagucuccuguugg

SEQ ID NO: 574661 - RNA, 22 nt, Human
ucacagaacacaaaugccacuu

SEQ ID NO: 574662 - RNA, 22 nt, Human
uuguauuaggcccuagggaguu

SEQ ID NO: 574663 - RNA, 22 nt, Human
agauuugauaaaaguagcaguu

SEQ ID NO: 574664 - RNA, 22 nt, Human
ccagagccggcucccucagcuu

SEQ ID NO: 574665 - RNA, 22 nt, Human
aggccaagcucccagagaagcu

SEQ ID NO: 574666 - RNA, 22 nt, Human
uguagugugacauaggugucca

SEQ ID NO: 574667 - RNA, 22 nt, Human
cugccugggccggccacccucu

SEQ ID NO: 574668 - RNA, 22 nt, Human
gcacugccuaugcaaauguacu

SEQ ID NO: 574669 - RNA, 22 nt, Human
ccacugcccaccccgacgucua

SEQ ID NO: 574670 - RNA, 22 nt, Human
caucuucagguucauggucaua

SEQ ID NO: 574671 - RNA, 22 nt, Human
aggugucuucagggugagacag

SEQ ID NO: 574672 - RNA, 22 nt, Human
aaaggcacuagaaguuaccuuu

SEQ ID NO: 574673 - RNA, 22 nt, Human
ugcauauucuccuuuauuuugu

SEQ ID NO: 574674 - RNA, 22 nt, Human
cagugaggugcccagccugccc

SEQ ID NO: 574675 - RNA, 22 nt, Human
cagcucuguugcccuggaaacg

SEQ ID NO: 574676 - RNA, 22 nt, Human
uugcauuuuuagaugcuucugu

SEQ ID NO: 574677 - RNA, 22 nt, Human
aucuguuauuuacccaucucug

SEQ ID NO: 574678 - RNA, 22 nt, Human
agauacaucuugaacuucuaga

SEQ ID NO: 574679 - RNA, 22 nt, Human
uaggccaccaggguuccauuua

SEQ ID NO: 574680 - RNA, 22 nt, Human
uucucuuuucaccaguugcuaa

SEQ ID NO: 574681 - RNA, 22 nt, Human
acaggaaccaggcaggucgauu

SEQ ID NO: 574682 - RNA, 22 nt, Human
aagggaaauccucagcccagga

SEQ ID NO: 574683 - RNA, 22 nt, Human
caguagauuugguaaacuagga

SEQ ID NO: 574684 - RNA, 23 nt, Human
uguguacacaauagaugagguuu

SEQ ID NO: 574685 - RNA, 22 nt, Human
cuacauuuacacaguuaggcuu

SEQ ID NO: 574686 - RNA, 23 nt, Human
uaggggaaaaaucuucugcaauu

SEQ ID NO: 574687 - RNA, 22 nt, Human
ggagggagagugacccuaccaa

SEQ ID NO: 574688 - RNA, 22 nt, Human
cccuugaagacuagaaugagga

SEQ ID NO: 574689 - RNA, 22 nt, Human
uugucauugggguuauuuguua

SEQ ID NO: 574690 - RNA, 22 nt, Human
cugaguggguuucugcuuguca

SEQ ID NO: 574691 - RNA, 22 nt, Human
gagagauuaccacgcuuccuga

SEQ ID NO: 574692 - RNA, 22 nt, Human
gcaggcaggcuuccuugaacug

SEQ ID NO: 574693 - RNA, 22 nt, Human
cccugcuuccgcuguuuucuca

SEQ ID NO: 574694 - RNA, 22 nt, Human
gcauggaucuaagaggucaagg

SEQ ID NO: 574695 - RNA, 22 nt, Human
cuacauuuguucaaauaagcug

SEQ ID NO: 574696 - RNA, 20 nt, Human
gauuucaaagcagaguggcc

SEQ ID NO: 574697 - RNA, 22 nt, Human
accuuuauaugaaagaugacau

SEQ ID NO: 574698 - RNA, 22 nt, Human
agugugggggcuuuggugucac

SEQ ID NO: 574699 - RNA, 22 nt, Human
cugaaugaaaucaaggacugag

SEQ ID NO: 574700 - RNA, 22 nt, Human
cuuggugcauuacucaaucugu

SEQ ID NO: 574701 - RNA, 22 nt, Human
gcuggguuuucuuccgggccua

SEQ ID NO: 574702 - RNA, 22 nt, Human
uuccaagagcuuuaauuguuga

SEQ ID NO: 574703 - RNA, 22 nt, Human
caguuucuacgacuuaagcaca

SEQ ID NO: 574704 - RNA, 20 nt, Human
agagaauucccuuuggagau

SEQ ID NO: 574705 - RNA, 22 nt, Human
cuccagcagaaagggcgagugg

SEQ ID NO: 574706 - RNA, 22 nt, Human
ugaagcuuuaggauggguucau

SEQ ID NO: 574707 - RNA, 22 nt, Human
gcacccaugcucuugucucagg

SEQ ID NO: 574708 - RNA, 22 nt, Human
accugccucagugcagcuggau

SEQ ID NO: 574709 - RNA, 22 nt, Human
gcagcucacagucuccgccauc

SEQ ID NO: 574710 - RNA, 22 nt, Human
cccaggaggguggccucugccc

SEQ ID NO: 574711 - RNA, 22 nt, Human
agcuccuggaggugcgcacucg

SEQ ID NO: 574712 - RNA, 22 nt, Human
uuggccagcgacgaccuucuua

SEQ ID NO: 574713 - RNA, 22 nt, Human
uuucuucuaggacuaauaagag

SEQ ID NO: 574714 - RNA, 22 nt, Human
ccugagggcgccgagcucccag

SEQ ID NO: 574715 - RNA, 22 nt, Human
gcugggaugcgucuucccaggc

SEQ ID NO: 574716 - RNA, 22 nt, Human
aagauucucacugcucaacuuu

SEQ ID NO: 574717 - RNA, 22 nt, Human
uagaaagcaguaucuccauuuu

SEQ ID NO: 574718 - RNA, 22 nt, Human
gccuggugaaaggcagagagcg

SEQ ID NO: 574719 - RNA, 22 nt, Human
augaggucauucuuggauuaca

SEQ ID NO: 574720 - RNA, 22 nt, Human
agcccagcugccugccugcugu

SEQ ID NO: 574721 - RNA, 22 nt, Human
cuggucaauaaucauguaguac

SEQ ID NO: 574722 - RNA, 22 nt, Human
guagaacucccagugguauugu

SEQ ID NO: 574723 - RNA, 22 nt, Human
agagccagcauuugggcccugc

SEQ ID NO: 574724 - RNA, 22 nt, Human
uauguguuugacacccugcaag

SEQ ID NO: 574725 - RNA, 23 nt, Human
ggcuagaguggaggggaacugca

SEQ ID NO: 574726 - RNA, 22 nt, Human
gauucaaaguuaaugaagaugc

SEQ ID NO: 574727 - RNA, 22 nt, Human
gugaggucauauagcgaacucc

SEQ ID NO: 574728 - RNA, 22 nt, Human
agaugcuucaguguuuaauuua

SEQ ID NO: 574729 - RNA, 19 nt, Human
gcaggcagcugggguaucc

SEQ ID NO: 574730 - RNA, 22 nt, Human
ugucacuacaucauaaauauau

SEQ ID NO: 574731 - RNA, 22 nt, Human
gagcuggcaggaggcuccccga

SEQ ID NO: 574732 - RNA, 18 nt, Human
ccagcugcgcugaaccga

SEQ ID NO: 574733 - RNA, 22 nt, Human
gccaggcuguuuuuauuacugu

SEQ ID NO: 574734 - RNA, 22 nt, Human
ucugggccucaccugcugcuca

SEQ ID NO: 574735 - RNA, 22 nt, Human
gagcagugaugggaggacguca

SEQ ID NO: 574736 - RNA, 20 nt, Human
uggaggcagagccagaggga

SEQ ID NO: 574737 - RNA, 22 nt, Human
acaauucugugguugucugugg

SEQ ID NO: 574738 - RNA, 22 nt, Human
ugaaagguguccaauauuucuc

SEQ ID NO: 574739 - RNA, 22 nt, Human
acuguauacuucuguauacaau

SEQ ID NO: 574740 - RNA, 22 nt, Human
agacuguacuuucugcagcucu

SEQ ID NO: 574741 - RNA, 22 nt, Human
uccuucagcugcuaggaaauga

SEQ ID NO: 574742 - RNA, 22 nt, Human
gagauucuuuccagaacuuuga

SEQ ID NO: 574743 - RNA, 22 nt, Human
ugaaagcacucacuucugcucu

SEQ ID NO: 574744 - RNA, 22 nt, Human
auuaguaaaacauuguauaugu

SEQ ID NO: 574745 - RNA, 22 nt, Human
uccugggcuugcuccuccagcu

SEQ ID NO: 574746 - RNA, 22 nt, Human
uccugaggaaaguucaugaaug

SEQ ID NO: 574747 - RNA, 22 nt, Human
gacagacaggaggcauucaggg

SEQ ID NO: 574748 - RNA, 23 nt, Human
agggccuggcguggagugugugc

SEQ ID NO: 574749 - RNA, 22 nt, Human
gugagagaaauuggagggaaug

SEQ ID NO: 574750 - RNA, 21 nt, Human
acaggauaggacaguguuccu

SEQ ID NO: 574751 - RNA, 22 nt, Human
auacauauaugguacuuccugg

SEQ ID NO: 574752 - RNA, 22 nt, Human
auagaauuuguacuuguagaac

SEQ ID NO: 574753 - RNA, 22 nt, Human
auccugggaagcugacauugaa

SEQ ID NO: 574754 - RNA, 22 nt, Human
auuuacagaaacuuaaucauag

SEQ ID NO: 574755 - RNA, 22 nt, Human
gaagagagccgcgggacaucag

SEQ ID NO: 574756 - RNA, 22 nt, Human
ucagggauugcaaaauucaucc

SEQ ID NO: 574757 - RNA, 22 nt, Human
ugggccagcucccugccccugg

SEQ ID NO: 574758 - RNA, 22 nt, Human
agggguuggacauaagacagaa

SEQ ID NO: 574759 - RNA, 22 nt, Human
auauuucuugagcaccugguau

SEQ ID NO: 574760 - RNA, 22 nt, Human
uuauuuccuagggaauuugccu

SEQ ID NO: 574761 - RNA, 22 nt, Human
uaugaaaagguggccaauguag

SEQ ID NO: 574762 - RNA, 22 nt, Human
aauacuugugaauucaaagucu

SEQ ID NO: 574763 - RNA, 22 nt, Human
augcuuuggccaaugagaagug

SEQ ID NO: 574764 - RNA, 21 nt, Human
ucugugccucaacccucaucu

SEQ ID NO: 574765 - RNA, 22 nt, Human
ugggcagaggcucugaagucca

SEQ ID NO: 574766 - RNA, 22 nt, Human
ugccuaggaaaccucaugcuuc

SEQ ID NO: 574767 - RNA, 22 nt, Human
gaaauacaaagccagccauuuu

SEQ ID NO: 574768 - RNA, 21 nt, Human
auaugaacuguggacuuugga

SEQ ID NO: 574769 - RNA, 22 nt, Human
agaggccagggacacugcucaa

SEQ ID NO: 574770 - RNA, 22 nt, Human
aggcuuuaaguggccuacagcu

SEQ ID NO: 574771 - RNA, 22 nt, Human
aggcaguguucuucuaagggca

SEQ ID NO: 574772 - RNA, 23 nt, Human
acagggaaaagucaucaguguga

SEQ ID NO: 574773 - RNA, 22 nt, Human
agcagaugaaucccagauaaag

SEQ ID NO: 574774 - RNA, 22 nt, Human
aaguucuuucauaucuuaauua

SEQ ID NO: 574775 - RNA, 18 nt, Human
agaaggagcuaugggcag

SEQ ID NO: 574776 - RNA, 22 nt, Human
ucugucacccaggcuggagugc

SEQ ID NO: 574777 - RNA, 22 nt, Human
caugaaauguguuaaucucuug

SEQ ID NO: 574778 - RNA, 22 nt, Human
caacagcugaucuuugaugaag

SEQ ID NO: 574779 - RNA, 22 nt, Human
aauagcugcauaaaguauagaa

SEQ ID NO: 574780 - RNA, 22 nt, Human
uccucacugcagugcuccgagc

SEQ ID NO: 574781 - RNA, 20 nt, Human
ucuguacacucaucuucugc

SEQ ID NO: 574782 - RNA, 23 nt, Human
ugagacccuaauuuagcaagugu

SEQ ID NO: 574783 - RNA, 22 nt, Human
ugcugcaguguuugcugaaguu

SEQ ID NO: 574784 - RNA, 22 nt, Human
acagcuuuugaaaaauuacugg

SEQ ID NO: 574785 - RNA, 18 nt, Human
gcaggagauggguggggu

SEQ ID NO: 574786 - RNA, 22 nt, Human
uggcagggccugaaucuuauac

SEQ ID NO: 574787 - RNA, 22 nt, Human
gugggcagauuaauuucucaau

SEQ ID NO: 574788 - RNA, 22 nt, Human
guuauacuuaugugcaaaaaua

SEQ ID NO: 574789 - RNA, 22 nt, Human
uguggcaggaagagcuucugag

SEQ ID NO: 574790 - RNA, 22 nt, Human
aucacauucuuucaaagcaguc

SEQ ID NO: 574791 - RNA, 22 nt, Human
cagucucuaaaucaaucugaau

SEQ ID NO: 574792 - RNA, 22 nt, Human
cagcagcaguggcugcagaaca

SEQ ID NO: 574793 - RNA, 22 nt, Human
uuucacauucuucugaaucuac

SEQ ID NO: 574794 - RNA, 21 nt, Human
cucuggaguuugaaggcuggg

SEQ ID NO: 574795 - RNA, 22 nt, Human
ugagacgaagucuugcucuguu

SEQ ID NO: 574796 - RNA, 22 nt, Human
caucacuuuuaaaggugaucga

SEQ ID NO: 574797 - RNA, 21 nt, Human
cagagagcuagaacuucauga

SEQ ID NO: 574798 - RNA, 22 nt, Human
aggaggaauugacacagaagcc

SEQ ID NO: 574799 - RNA, 22 nt, Human
gugggcaguggggucuucugcc

SEQ ID NO: 574800 - RNA, 22 nt, Human
agcucagggcgaucugucucgg

SEQ ID NO: 574801 - RNA, 22 nt, Human
aguaugaagaauacauagauga

SEQ ID NO: 574802 - RNA, 22 nt, Human
ucugugaaaucacccagguuua

SEQ ID NO: 574803 - RNA, 20 nt, Human
agauggugggcuggaacacc

SEQ ID NO: 574804 - RNA, 22 nt, Human
uuacaaagagugccagagugug

SEQ ID NO: 574805 - RNA, 22 nt, Human
auuugcugagcucaaagaaaag

SEQ ID NO: 574806 - RNA, 22 nt, Human
uugggcuggcagagguggucuu

SEQ ID NO: 574807 - RNA, 22 nt, Human
ggagcagcuugcaugcucaggg

SEQ ID NO: 574808 - RNA, 21 nt, Human
ccuggccaaucugauaggguu

SEQ ID NO: 574809 - RNA, 22 nt, Human
ccagucugugugccagccugcg

SEQ ID NO: 574810 - RNA, 22 nt, Human
cccagcuaccucugcuaggaga

SEQ ID NO: 574811 - RNA, 21 nt, Human
acagccaggaacaugaggggc

SEQ ID NO: 574812 - RNA, 22 nt, Human
agucagcagccuggccaggaga

SEQ ID NO: 574813 - RNA, 22 nt, Human
uuugaagacauauuguuacaua

SEQ ID NO: 574814 - RNA, 22 nt, Human
caguucuggaguuucauucuuu

SEQ ID NO: 574815 - RNA, 22 nt, Human
auuucagugucuucuucucccu

SEQ ID NO: 574816 - RNA, 22 nt, Human
ugcacacauguauguauaugug

SEQ ID NO: 574817 - RNA, 22 nt, Human
uuaccauucaaguucucuccuu

SEQ ID NO: 574818 - RNA, 22 nt, Human
auugcaguguugccuggggccu

SEQ ID NO: 574819 - RNA, 23 nt, Human
gggcuccagucucugcucaguug

SEQ ID NO: 574820 - RNA, 22 nt, Human
cucagaaauuacaaaagggaca

SEQ ID NO: 574821 - RNA, 22 nt, Human
agagccaggcucccauggggca

SEQ ID NO: 574822 - RNA, 22 nt, Human
gcugcuuuuuggauuuggcaca

SEQ ID NO: 574823 - RNA, 22 nt, Human
ucagaacaggacuggcugccau

SEQ ID NO: 574824 - RNA, 22 nt, Human
ucuauacacacaaagaaugcuu

SEQ ID NO: 574825 - RNA, 22 nt, Human
gagcuugguguuauuucugugg

SEQ ID NO: 574826 - RNA, 22 nt, Human
ucacauuuuaucuauuuuaagu

SEQ ID NO: 574827 - RNA, 22 nt, Human
agagcugugcuuugcaccacgu

SEQ ID NO: 574828 - RNA, 22 nt, Human
uuuaccaucugccacagauaug

SEQ ID NO: 574829 - RNA, 22 nt, Human
ccagcacuccugucucaagucu

SEQ ID NO: 574830 - RNA, 22 nt, Human
uuucuucuguuuguaguuacac

SEQ ID NO: 574831 - RNA, 22 nt, Human
agccauuuugguaaugauaaca

SEQ ID NO: 574832 - RNA, 22 nt, Human
ugcugggccucuucccuggaua

SEQ ID NO: 574833 - RNA, 22 nt, Human
agggaagcccuggcugagaccc

SEQ ID NO: 574834 - RNA, 22 nt, Human
acaggccuauguuccauugcag

SEQ ID NO: 574835 - RNA, 19 nt, Human
cugugagucuuguggccuc

SEQ ID NO: 574836 - RNA, 22 nt, Human
ggucacuggucucugcuuccau

SEQ ID NO: 574837 - RNA, 22 nt, Human
gaaguuuucugaggcuguagcu

SEQ ID NO: 574838 - RNA, 22 nt, Human
uagccaggucacacuguguguu

SEQ ID NO: 574839 - RNA, 22 nt, Human
aaggcaguuugggccaccaucu

SEQ ID NO: 574840 - RNA, 21 nt, Human
cucaaaugccaguuuuauuua

SEQ ID NO: 574841 - RNA, 20 nt, Human
gcugcuuucaaaugacacgu

SEQ ID NO: 574842 - RNA, 22 nt, Human
gagggcugcuggaaaaaugcag

SEQ ID NO: 574843 - RNA, 22 nt, Human
cuuaaaaucuggcaguuagcua

SEQ ID NO: 574844 - RNA, 22 nt, Human
augcauauuggauuagcagcca

SEQ ID NO: 574845 - RNA, 20 nt, Human
agagugggugucacaggcug

SEQ ID NO: 574846 - RNA, 17 nt, Human
ccucuuccucucagcug

SEQ ID NO: 574847 - RNA, 22 nt, Human
uccccacucucuccuggagcuu

SEQ ID NO: 574848 - RNA, 22 nt, Human
ccugucagcugauggcuaugua

SEQ ID NO: 574849 - RNA, 22 nt, Human
ccugaagaugcuguggccuggu

SEQ ID NO: 574850 - RNA, 21 nt, Human
ugucugccugcuucuucacuc

SEQ ID NO: 574851 - RNA, 22 nt, Human
gaggggggcgcccugcagugca

SEQ ID NO: 574852 - RNA, 22 nt, Human
caagagcugaggcuggagaggu

SEQ ID NO: 574853 - RNA, 22 nt, Human
ucugucugggugccucgaguac

SEQ ID NO: 574854 - RNA, 22 nt, Human
ugcuucagugcucugagccugu

SEQ ID NO: 574855 - RNA, 22 nt, Human
augcugaggacaaagagaucaa

SEQ ID NO: 574856 - RNA, 22 nt, Human
uagggcugccauuugcuuuucu

SEQ ID NO: 574857 - RNA, 22 nt, Human
ccagaggcuggggaaggauaca

SEQ ID NO: 574858 - RNA, 22 nt, Human
gugcacaucgugcagguuuguu

SEQ ID NO: 574859 - RNA, 22 nt, Human
gagcugagggucuaggaggguu

SEQ ID NO: 574860 - RNA, 22 nt, Human
uggccagccauaaaagaaccca

SEQ ID NO: 574861 - RNA, 22 nt, Human
aaucuuaaagaauauucuacca

SEQ ID NO: 574862 - RNA, 19 nt, Human
gcugugccucucuccugcu

SEQ ID NO: 574863 - RNA, 20 nt, Human
ggacuacaauuugcagugug

SEQ ID NO: 574864 - RNA, 22 nt, Human
uuguuaaaaugaggucauucug

SEQ ID NO: 574865 - RNA, 22 nt, Human
cuguuacuccuuuggcagauua

SEQ ID NO: 574866 - RNA, 22 nt, Human
uaacuucugaauagcaauagua

SEQ ID NO: 574867 - RNA, 22 nt, Human
ucaaggcuaaacuuucagagua

SEQ ID NO: 574868 - RNA, 22 nt, Human
uacauacauuaccucauuuagu

SEQ ID NO: 574869 - RNA, 20 nt, Human
acaguccugcacugguguuu

SEQ ID NO: 574870 - RNA, 22 nt, Human
aagggugggcaccgccagguca

SEQ ID NO: 574871 - RNA, 22 nt, Human
cagauagcaaauggguaagcua

SEQ ID NO: 574872 - RNA, 22 nt, Human
cuccucuagaagcugaccugga

SEQ ID NO: 574873 - RNA, 22 nt, Human
gcagugaauuuaacacucagau

SEQ ID NO: 574874 - RNA, 22 nt, Human
uuugcuucacaaguaugguucu

SEQ ID NO: 574875 - RNA, 22 nt, Human
uggaacaagggcguggcggucg

SEQ ID NO: 574876 - RNA, 22 nt, Human
gacugcuuaaauauaugauguu

SEQ ID NO: 574877 - RNA, 22 nt, Human
cagcucaggaaggaaggccggc

SEQ ID NO: 574878 - RNA, 22 nt, Human
uuucuccugcuagaacaaggag

SEQ ID NO: 574879 - RNA, 22 nt, Human
ucugauguguuuaagaaagaag

SEQ ID NO: 574880 - RNA, 22 nt, Human
cagcuauuuaucuuucaugaua

SEQ ID NO: 574881 - RNA, 22 nt, Human
guaaacauuacugugcuguaua

SEQ ID NO: 574882 - RNA, 22 nt, Human
aacuacauagaaauuaguauuu

SEQ ID NO: 574883 - RNA, 22 nt, Human
uauguuuuucagacguccuaca

SEQ ID NO: 574884 - RNA, 22 nt, Human
uacaaugcagugaccuccuuua

SEQ ID NO: 574885 - RNA, 21 nt, Human
gcucucagcugccugcugguu

SEQ ID NO: 574886 - RNA, 22 nt, Human
gagagcugggaaagccguggag

SEQ ID NO: 574887 - RNA, 22 nt, Human
uguagaaguucuucaggagaau

SEQ ID NO: 574888 - RNA, 22 nt, Human
ucucucuucaacccuuaacuag

SEQ ID NO: 574889 - RNA, 22 nt, Human
uuaggaggucuauggacauccu

SEQ ID NO: 574890 - RNA, 22 nt, Human
ccuucuccugccuuggguucau

SEQ ID NO: 574891 - RNA, 22 nt, Human
guagcuauuuaugauacucaug

SEQ ID NO: 574892 - RNA, 22 nt, Human
agcagcaaagaauaggcccucu

SEQ ID NO: 574893 - RNA, 22 nt, Human
agaaagcuuaugaaugggcaag

SEQ ID NO: 574894 - RNA, 22 nt, Human
cugggcucuaagggagcaccgu

SEQ ID NO: 574895 - RNA, 22 nt, Human
ccuggagggacccuggcccugu

SEQ ID NO: 574896 - RNA, 22 nt, Human
gagauuuccauauuuuguaaca

SEQ ID NO: 574897 - RNA, 22 nt, Human
cugucuucuaccuucaaccucc

SEQ ID NO: 574898 - RNA, 22 nt, Human
gagcugggauuugaaccuggga

SEQ ID NO: 574899 - RNA, 22 nt, Human
caugcuaagucauaaaagagua

SEQ ID NO: 574900 - RNA, 22 nt, Human
ggaccugccagaacucaggcua

SEQ ID NO: 574901 - RNA, 22 nt, Human
cuuccccaaguagagaggggag

SEQ ID NO: 574902 - RNA, 22 nt, Human
auauuucaugggguuccauacu

SEQ ID NO: 574903 - RNA, 22 nt, Human
uaaagguugaaaacugacugcc

SEQ ID NO: 574904 - RNA, 22 nt, Human
agcuugguguugccugcuugag

SEQ ID NO: 574905 - RNA, 22 nt, Human
ggcccugugauggauguauuag

SEQ ID NO: 574906 - RNA, 22 nt, Human
acuggaguugggucaagauucu

SEQ ID NO: 574907 - RNA, 22 nt, Human
auggcugggucaccaucagggu

SEQ ID NO: 574908 - RNA, 22 nt, Human
ucuguccuccggagcucccagu

SEQ ID NO: 574909 - RNA, 22 nt, Human
guggccugggguuuguucugag

SEQ ID NO: 574910 - RNA, 22 nt, Human
agcugcccuucucuugcccuug

SEQ ID NO: 574911 - RNA, 22 nt, Human
ucccagagcagaugugcuaaag

SEQ ID NO: 574912 - RNA, 22 nt, Human
aagaggaggacgguucccagaa

SEQ ID NO: 574913 - RNA, 22 nt, Human
auaagaauaauuaaguuagucc

SEQ ID NO: 574914 - RNA, 22 nt, Human
auauacaaagggcaaccucgcu

SEQ ID NO: 574915 - RNA, 22 nt, Human
acaggccagagguggggcagcc

SEQ ID NO: 574916 - RNA, 22 nt, Human
uaauacuugcuuuggauguaug

SEQ ID NO: 574917 - RNA, 23 nt, Human
ugugacagggucauugaaaaggg

SEQ ID NO: 574918 - RNA, 22 nt, Human
acacaguauugugacuauaacu

SEQ ID NO: 574919 - RNA, 22 nt, Human
ucuucugagacuucucuuuggu

SEQ ID NO: 574920 - RNA, 22 nt, Human
aggguggcuggaggaaucagaa

SEQ ID NO: 574921 - RNA, 22 nt, Human
cuccacagcucaggcucagagu

SEQ ID NO: 574922 - RNA, 22 nt, Human
aaagguaacaguuauaaccagg

SEQ ID NO: 574923 - RNA, 22 nt, Human
aagagcuggcucuugcagcagc

SEQ ID NO: 574924 - RNA, 22 nt, Human
agaaaccagggcuuaccagugc

SEQ ID NO: 574925 - RNA, 22 nt, Human
uagggcuggcgugcucagggaa

SEQ ID NO: 574926 - RNA, 22 nt, Human
guucucucagccuuuguuauua

SEQ ID NO: 574927 - RNA, 22 nt, Human
ggcagggucuggacugaaagcu

SEQ ID NO: 574928 - RNA, 18 nt, Human
auuuaaugaacugaaagc

SEQ ID NO: 574929 - RNA, 22 nt, Human
uccaggcuccugacuuuuuggg

SEQ ID NO: 574930 - RNA, 21 nt, Human
ugacauuuggauucauaguaa

SEQ ID NO: 574931 - RNA, 22 nt, Human
guguguguacucuguauauaaa

SEQ ID NO: 574932 - RNA, 22 nt, Human
acucugagcaucccaagucuua

SEQ ID NO: 574933 - RNA, 22 nt, Human
cuaaggaauucaaauaguuagu

SEQ ID NO: 574934 - RNA, 22 nt, Human
uaaagguagugugacauauugu

SEQ ID NO: 574935 - RNA, 22 nt, Human
gcacugugcuagaagccagggg

SEQ ID NO: 574936 - RNA, 22 nt, Human
uuguuucuccagucuaggaaaa

SEQ ID NO: 574937 - RNA, 22 nt, Human
ccagggccaguaagauuggcau

SEQ ID NO: 574938 - RNA, 22 nt, Human
gaccagcuggugaaaaccaauu

SEQ ID NO: 574939 - RNA, 22 nt, Human
guuuccuuuuucugcccucaau

SEQ ID NO: 574940 - RNA, 22 nt, Human
uaaacacugccuugguggguca

SEQ ID NO: 574941 - RNA, 23 nt, Human
cugucuccugggcuagguggaau

SEQ ID NO: 574942 - RNA, 22 nt, Human
gcagggcugcagagggcacugu

SEQ ID NO: 574943 - RNA, 22 nt, Human
auugcaaaggucccauucaaga

SEQ ID NO: 574944 - RNA, 22 nt, Human
uuaaaauagccagugccccucu

SEQ ID NO: 574945 - RNA, 22 nt, Human
cugaagcaggaggggaggcgcu

SEQ ID NO: 574946 - RNA, 22 nt, Human
caaagguuucacaguagcccau

SEQ ID NO: 574947 - RNA, 22 nt, Human
aauuuagauugauaaacaugga

SEQ ID NO: 574948 - RNA, 22 nt, Human
gccagccuucuguggccugcaa

SEQ ID NO: 574949 - RNA, 22 nt, Human
gacaggcuucauccucagaguu

SEQ ID NO: 574950 - RNA, 22 nt, Human
ugaaagcaggcgggcuacuuua

SEQ ID NO: 574951 - RNA, 22 nt, Human
cagaugcugcucaccugauuau

SEQ ID NO: 574952 - RNA, 22 nt, Human
ugagguagugauuguagaagug

SEQ ID NO: 574953 - RNA, 19 nt, Human
ggcucagggcgcugccgcc

SEQ ID NO: 574954 - RNA, 22 nt, Human
agagucagacuaagccauggug

SEQ ID NO: 574955 - RNA, 22 nt, Human
aguguucuuccuaucugcuguu

SEQ ID NO: 574956 - RNA, 22 nt, Human
ggcugcugcccaccccugcaug

SEQ ID NO: 574957 - RNA, 22 nt, Human
accccaggagcugugccuaguc

SEQ ID NO: 574958 - RNA, 22 nt, Human
augcuauuccagaauguaaauu

SEQ ID NO: 574959 - RNA, 17 nt, Human
aacugcuuuuuuuagcc

SEQ ID NO: 574960 - RNA, 22 nt, Human
ucuuagcauuucauaacaacug

SEQ ID NO: 574961 - RNA, 18 nt, Human
aaugugaauauuuacuuc

SEQ ID NO: 574962 - RNA, 22 nt, Human
agacagcucuggguuccacacu

SEQ ID NO: 574963 - RNA, 22 nt, Human
gaaagcaguaaaugggucccau

SEQ ID NO: 574964 - RNA, 22 nt, Human
ugcuagugcaggguuuucaguu

SEQ ID NO: 574965 - RNA, 22 nt, Human
uuuacacagaggacacugggcu

SEQ ID NO: 574966 - RNA, 22 nt, Human
aaaaguacuauuuuaacaaagu

SEQ ID NO: 574967 - RNA, 22 nt, Human
aagauucagccaaauuguucau

SEQ ID NO: 574968 - RNA, 22 nt, Human
gggucccuggaauuacuugaca

SEQ ID NO: 574969 - RNA, 22 nt, Human
ccuggagacccacuucugccaa

SEQ ID NO: 574970 - RNA, 22 nt, Human
uuaaagcauccugucagucugu

SEQ ID NO: 574971 - RNA, 22 nt, Human
auuuaauuuauagauguggaua

SEQ ID NO: 574972 - RNA, 22 nt, Human
ugagaguuccuccucuuuccac

SEQ ID NO: 574973 - RNA, 22 nt, Human
agagcugaaaaagcugacccgg

SEQ ID NO: 574974 - RNA, 22 nt, Human
caggaacagcugaccugacaau

SEQ ID NO: 574975 - RNA, 22 nt, Human
aggcugcuucagcugcagggag

SEQ ID NO: 574976 - RNA, 22 nt, Human
agagcucuuugauuugcuucuc

SEQ ID NO: 574977 - RNA, 22 nt, Human
auucuauuuuuuaagaaguagu

SEQ ID NO: 574978 - RNA, 22 nt, Human
cccagcucaagcagagagcuaa

SEQ ID NO: 574979 - RNA, 22 nt, Human
guuaaugugucugacacaaugg

SEQ ID NO: 574980 - RNA, 20 nt, Human
ggacacuguagauuucaaac

SEQ ID NO: 574981 - RNA, 22 nt, Human
uugugcauauuagguacaugcu

SEQ ID NO: 574982 - RNA, 22 nt, Human
guuauuguccauuuauuuagca

SEQ ID NO: 574983 - RNA, 22 nt, Human
guccaaaagagccagccgggcg

SEQ ID NO: 574984 - RNA, 22 nt, Human
acagcaggcccauacuggaagg

SEQ ID NO: 574985 - RNA, 22 nt, Human
gauacuuuguggaauccuggau

SEQ ID NO: 574986 - RNA, 20 nt, Human
ugcuuuuauaccuauaauga

SEQ ID NO: 574987 - RNA, 22 nt, Human
ccugccagcugugggccagccu

SEQ ID NO: 574988 - RNA, 22 nt, Human
gcauuuuucaucccucuugggu

SEQ ID NO: 574989 - RNA, 22 nt, Human
gcagaagggaauaaggagcuuu

SEQ ID NO: 574990 - RNA, 18 nt, Human
gcucuaauuuuagaaagg

SEQ ID NO: 574991 - RNA, 22 nt, Human
ucuuggccagguguggugccuc

SEQ ID NO: 574992 - RNA, 20 nt, Human
aggaugcagggagucugcag

SEQ ID NO: 574993 - RNA, 22 nt, Human
ugcaggagccuuggacuugaaa

SEQ ID NO: 574994 - RNA, 22 nt, Human
cccugggaaguauuccagcuau

SEQ ID NO: 574995 - RNA, 21 nt, Human
ugcagccauucagcccuaugc

SEQ ID NO: 574996 - RNA, 22 nt, Human
ugcuccagugagcuggccaucc

SEQ ID NO: 574997 - RNA, 22 nt, Human
cauagaaaucaggugagaaucu

SEQ ID NO: 574998 - RNA, 22 nt, Human
agagagcucuggcugggugacc

SEQ ID NO: 574999 - RNA, 21 nt, Human
uaacaaagacuucuggucagg

SEQ ID NO: 575000 - RNA, 20 nt, Human
cucucccagcacagcuuccu

SEQ ID NO: 575001 - RNA, 22 nt, Human
acacaucuaucucuacacaagg

SEQ ID NO: 575002 - RNA, 22 nt, Human
gacagaguuguugauguaugcu

SEQ ID NO: 575003 - RNA, 23 nt, Human
ugcaggguguuccugccuuugcu

SEQ ID NO: 575004 - RNA, 22 nt, Human
gcucuccaaacccuguggcuuu

SEQ ID NO: 575005 - RNA, 22 nt, Human
gagcagaacaggccggguggga

SEQ ID NO: 575006 - RNA, 22 nt, Human
aacuagucagugauucucagaa

SEQ ID NO: 575007 - RNA, 22 nt, Human
guuuggggaguuccuuuaggcc

SEQ ID NO: 575008 - RNA, 22 nt, Human
ugucuuuagaaagaagcagaca

SEQ ID NO: 575009 - RNA, 20 nt, Human
cuagucucacaucccuggca

SEQ ID NO: 575010 - RNA, 22 nt, Human
aggacaggauuccuugccuugc

SEQ ID NO: 575011 - RNA, 22 nt, Human
auaugcaagcacauagaauacu

SEQ ID NO: 575012 - RNA, 22 nt, Human
gcagagccccucaagccagccu

SEQ ID NO: 575013 - RNA, 22 nt, Human
gacaagacaugugaugacauca

SEQ ID NO: 575014 - RNA, 22 nt, Human
auaguguugauagcaguggagu

SEQ ID NO: 575015 - RNA, 22 nt, Human
auuggccauuugcauguauuau

SEQ ID NO: 575016 - RNA, 22 nt, Human
acagggcuuagaacuuggccuc

SEQ ID NO: 575017 - RNA, 22 nt, Human
aaggaccuauauugucagagga

SEQ ID NO: 575018 - RNA, 22 nt, Human
ccugggcaaaugccagagacaa

SEQ ID NO: 575019 - RNA, 22 nt, Human
accccagggcugccagccuccu

SEQ ID NO: 575020 - RNA, 22 nt, Human
uuuccucuccggggccuccagg

SEQ ID NO: 575021 - RNA, 22 nt, Human
gacaggcacgaaauugggcugg

SEQ ID NO: 575022 - RNA, 22 nt, Human
cuggugcauguggccuugcucu

SEQ ID NO: 575023 - RNA, 22 nt, Human
acauuguugugcaauuauaguu

SEQ ID NO: 575024 - RNA, 21 nt, Human
aguuuuauauuauaagcuaaa

SEQ ID NO: 575025 - RNA, 23 nt, Human
aucugaaaaggcauuuucuuccc

SEQ ID NO: 575026 - RNA, 22 nt, Human
cuggcagcgguuugcagccugg

SEQ ID NO: 575027 - RNA, 22 nt, Human
guuuuuuggguguauaucuucu

SEQ ID NO: 575028 - RNA, 22 nt, Human
uggaggugacggggccucguug

SEQ ID NO: 575029 - RNA, 22 nt, Human
gcugggaggcagcaccuuuagc

SEQ ID NO: 575030 - RNA, 23 nt, Human
gugugccaagcacugugccagga

SEQ ID NO: 575031 - RNA, 22 nt, Human
aaaucaucucugcauccuuagc

SEQ ID NO: 575032 - RNA, 22 nt, Human
gccacuggcgcugugcagagug

SEQ ID NO: 575033 - RNA, 22 nt, Human
auccccaggggcauucaagcuu

SEQ ID NO: 575034 - RNA, 22 nt, Human
gagcucuguucucguccugcug

SEQ ID NO: 575035 - RNA, 22 nt, Human
uuacagguacuugcugcugaaa

SEQ ID NO: 575036 - RNA, 22 nt, Human
gaacugggaaugcugucccauc

SEQ ID NO: 575037 - RNA, 22 nt, Human
gggagggaaggaggcgccgugu

SEQ ID NO: 575038 - RNA, 22 nt, Human
gugggcaggcccuaggcgauuu

SEQ ID NO: 575039 - RNA, 22 nt, Human
auguaauaggguaacauaacau

SEQ ID NO: 575040 - RNA, 22 nt, Human
uuuagcagagcauaugauaucc

SEQ ID NO: 575041 - RNA, 22 nt, Human
uucuaguuuagggcucuucaac

SEQ ID NO: 575042 - RNA, 17 nt, Human
aucuggaagcuagcuga

SEQ ID NO: 575043 - RNA, 22 nt, Human
uacuuuauauuguggcuggcca

SEQ ID NO: 575044 - RNA, 22 nt, Human
agcuccugggcaccucuuucac

SEQ ID NO: 575045 - RNA, 22 nt, Human
ucacccagguccaggcucuggc

SEQ ID NO: 575046 - RNA, 22 nt, Human
agaaucuucgguaacuggaaga

SEQ ID NO: 575047 - RNA, 22 nt, Human
gcauuucuuccuggugugagcc

SEQ ID NO: 575048 - RNA, 21 nt, Human
ucccugugagcagcucuuccu

SEQ ID NO: 575049 - RNA, 22 nt, Human
ucuggcugaagcuuuugcagcu

SEQ ID NO: 575050 - RNA, 22 nt, Human
gagacagaugcugcuggagcau

SEQ ID NO: 575051 - RNA, 22 nt, Human
ggagcugucuguagggcacagg

SEQ ID NO: 575052 - RNA, 22 nt, Human
gugcugagaauugauguccuug

SEQ ID NO: 575053 - RNA, 22 nt, Human
aucuggagaauaaauguccaag

SEQ ID NO: 575054 - RNA, 21 nt, Human
agaggcccucggacugggcgu

SEQ ID NO: 575055 - RNA, 22 nt, Human
uagaaaggaagcuacuuagggg

SEQ ID NO: 575056 - RNA, 22 nt, Human
agugaggggcagcugagugggc

SEQ ID NO: 575057 - RNA, 22 nt, Human
aguggcaggcggagauguagga

SEQ ID NO: 575058 - RNA, 21 nt, Human
ccagcucugccuccaguuggu

SEQ ID NO: 575059 - RNA, 22 nt, Human
ucucccucuuugucugcuuugg

SEQ ID NO: 575060 - RNA, 22 nt, Human
ccugcagguuucccccggacgg

SEQ ID NO: 575061 - RNA, 22 nt, Human
ugcaaacaauuuccuauaaagu

SEQ ID NO: 575062 - RNA, 18 nt, Human
auggcucaggaauggcuu

SEQ ID NO: 575063 - RNA, 22 nt, Human
gugcugaagugaaauucaucaa

SEQ ID NO: 575064 - RNA, 22 nt, Human
ccaggguguagggauuccagau

SEQ ID NO: 575065 - RNA, 22 nt, Human
aaugggauaauagaaguagaau

SEQ ID NO: 575066 - RNA, 22 nt, Human
gaggguggaagagcugcugaga

SEQ ID NO: 575067 - RNA, 22 nt, Human
ucuaagccaggacugagagacg

SEQ ID NO: 575068 - RNA, 22 nt, Human
cuggagauuaaguucucagcca

SEQ ID NO: 575069 - RNA, 22 nt, Human
ggaaccuuaguguucuuuuacc

SEQ ID NO: 575070 - RNA, 22 nt, Human
cacagcuucccgugcauggaga

SEQ ID NO: 575071 - RNA, 22 nt, Human
aggaaacugauguuuuuuacaa

SEQ ID NO: 575072 - RNA, 23 nt, Human
uuugaaaguaucaacucgccuga

SEQ ID NO: 575073 - RNA, 22 nt, Human
ugcauggagauauacuauuuga

SEQ ID NO: 575074 - RNA, 22 nt, Human
acaguaaauauuaagccugagu

SEQ ID NO: 575075 - RNA, 22 nt, Human
aggaaggacugcagcauuuggu

SEQ ID NO: 575076 - RNA, 22 nt, Human
agugcucuggguccacuccaga

SEQ ID NO: 575077 - RNA, 22 nt, Human
gcagccagggagagaaccaggg

SEQ ID NO: 575078 - RNA, 22 nt, Human
cauuuccuuccugcugcuccuc

SEQ ID NO: 575079 - RNA, 22 nt, Human
aauggcaccugcuauauacuga

SEQ ID NO: 575080 - RNA, 22 nt, Human
ucagaugcccuuuguuuuagac

SEQ ID NO: 575081 - RNA, 22 nt, Human
ggaaaucuuccuucacucuuuc

SEQ ID NO: 575082 - RNA, 22 nt, Human
gugggcugcccuugaggucagc

SEQ ID NO: 575083 - RNA, 22 nt, Human
cuggaggagaacuugaggaagg

SEQ ID NO: 575084 - RNA, 22 nt, Human
gcccauggcagaacugugagca

SEQ ID NO: 575085 - RNA, 22 nt, Human
cccugucuguaccgugaugagc

SEQ ID NO: 575086 - RNA, 22 nt, Human
cucagcaccccgacaggacauu

SEQ ID NO: 575087 - RNA, 22 nt, Human
uuugugaacuuaggcaauuagg

SEQ ID NO: 575088 - RNA, 22 nt, Human
gaacaaacagucaggacagucu

SEQ ID NO: 575089 - RNA, 22 nt, Human
uuccuuucccucacagccucgg

SEQ ID NO: 575090 - RNA, 22 nt, Human
ucugacuuauuuguccuuggug

SEQ ID NO: 575091 - RNA, 22 nt, Human
gggccaagggugcguggcagga

SEQ ID NO: 575092 - RNA, 22 nt, Human
ucucugaaggggagcuguuuaa

SEQ ID NO: 575093 - RNA, 22 nt, Human
gggcaggaggcuaauucugcau

SEQ ID NO: 575094 - RNA, 22 nt, Human
ugcuagauggagcagaauagcu

SEQ ID NO: 575095 - RNA, 22 nt, Human
auggcuuaugguaaauauuucu

SEQ ID NO: 575096 - RNA, 22 nt, Human
gauuucuugaccccugucucag

SEQ ID NO: 575097 - RNA, 22 nt, Human
caaccucauagaaagaaaaugu

SEQ ID NO: 575098 - RNA, 22 nt, Human
cugcaguuggcugagacccccc

SEQ ID NO: 575099 - RNA, 22 nt, Human
uaugugacaaaaguaaacugca

SEQ ID NO: 575100 - RNA, 20 nt, Human
gcacaugcaacuuuuauuua

SEQ ID NO: 575101 - RNA, 22 nt, Human
cacagaaauauugugucccuug

SEQ ID NO: 575102 - RNA, 22 nt, Human
auccuucagcugcccuguuacc

SEQ ID NO: 575103 - RNA, 23 nt, Human
ucugugccaguuuccaugucugu

SEQ ID NO: 575104 - RNA, 22 nt, Human
aagauccaggcaaaaguuggaa

SEQ ID NO: 575105 - RNA, 22 nt, Human
agggagugguuaagaaggugca

SEQ ID NO: 575106 - RNA, 22 nt, Human
gcugcucugggucugcccagcu

SEQ ID NO: 575107 - RNA, 22 nt, Human
aagaggagacuucagcaacuug

SEQ ID NO: 575108 - RNA, 19 nt, Human
gguguuucuucauuuucca

SEQ ID NO: 575109 - RNA, 18 nt, Human
ccugccagucuggagcag

SEQ ID NO: 575110 - RNA, 22 nt, Human
ugguuuguuuguucauguaaaa

SEQ ID NO: 575111 - RNA, 22 nt, Human
aguuucauuucuuaguaccagu

SEQ ID NO: 575112 - RNA, 22 nt, Human
gccaccaggagcccaguccaaa

SEQ ID NO: 575113 - RNA, 22 nt, Human
guaaauaacugguaauuggggu

SEQ ID NO: 575114 - RNA, 22 nt, Human
auuagagcaguguauuaugaua

SEQ ID NO: 575115 - RNA, 23 nt, Human
uucuuauuuacuuuggaaucucc

SEQ ID NO: 575116 - RNA, 22 nt, Human
caaagugcuaggauuacaggcc

SEQ ID NO: 575117 - RNA, 22 nt, Human
gggaacuguuuaacagggguuu

SEQ ID NO: 575118 - RNA, 22 nt, Human
caggaagggggauccuuggaag

SEQ ID NO: 575119 - RNA, 22 nt, Human
auggggaagagccagugagcug

SEQ ID NO: 575120 - RNA, 22 nt, Human
ugcuuuaaauaugaauuagcau

SEQ ID NO: 575121 - RNA, 22 nt, Human
ugucuauagaaucaugcaguuu

SEQ ID NO: 575122 - RNA, 22 nt, Human
aaggcugugucagaagcucccu

SEQ ID NO: 575123 - RNA, 22 nt, Human
ugggccagaggcauggagcuau

SEQ ID NO: 575124 - RNA, 22 nt, Human
gcugggagucgcgucuguggcc

SEQ ID NO: 575125 - RNA, 22 nt, Human
ucagcuuuugucagaaauugua

SEQ ID NO: 575126 - RNA, 22 nt, Human
gcucacaggcaguguugggaga

SEQ ID NO: 575127 - RNA, 22 nt, Human
uaagugaauauuuucuucugua

SEQ ID NO: 575128 - RNA, 22 nt, Human
ucugggucuaucccaugccuuu

SEQ ID NO: 575129 - RNA, 22 nt, Human
uuuaagaucauuuguauuaucc

SEQ ID NO: 575130 - RNA, 21 nt, Human
acauacauuaucuuuuuaaaa

SEQ ID NO: 575131 - RNA, 22 nt, Human
aaggccacagagccucagagag

SEQ ID NO: 575132 - RNA, 22 nt, Human
gcugcuccgucugagcucuggu

SEQ ID NO: 575133 - RNA, 22 nt, Human
uggcaguggcucagagugcaga

SEQ ID NO: 575134 - RNA, 20 nt, Human
caguccaggcugcagcaucu

SEQ ID NO: 575135 - RNA, 22 nt, Human
gugaggugacuagcaggugggg

SEQ ID NO: 575136 - RNA, 22 nt, Human
ucccagggugcgccugcccucg

SEQ ID NO: 575137 - RNA, 22 nt, Human
uuagauuuacaagcacuguuua

SEQ ID NO: 575138 - RNA, 22 nt, Human
cagaguacugggagaacagaag

SEQ ID NO: 575139 - RNA, 22 nt, Human
uucuucccuucauuccaccacc

SEQ ID NO: 575140 - RNA, 22 nt, Human
uacaaagagguaauugcauaua

SEQ ID NO: 575141 - RNA, 22 nt, Human
uccuuaaauauuuacuguuaac

SEQ ID NO: 575142 - RNA, 22 nt, Human
uccuggguccauggcagccgaa

SEQ ID NO: 575143 - RNA, 17 nt, Human
uuucaucugggaccacc

SEQ ID NO: 575144 - RNA, 22 nt, Human
ugaaguacccguuuuuauugca

SEQ ID NO: 575145 - RNA, 22 nt, Human
ggagcugggguuggcaucuucc

SEQ ID NO: 575146 - RNA, 22 nt, Human
cuguggagcuuguggcaguggg

SEQ ID NO: 575147 - RNA, 23 nt, Human
ccuggcagcaaacgaggagguua

SEQ ID NO: 575148 - RNA, 22 nt, Human
aucuaauuuucacucauuugcu

SEQ ID NO: 575149 - RNA, 22 nt, Human
uucucuaauggugaugauuaga

SEQ ID NO: 575150 - RNA, 22 nt, Human
ucucugaauucugaugcaagug

SEQ ID NO: 575151 - RNA, 22 nt, Human
cugaggccucguuggcuggaac

SEQ ID NO: 575152 - RNA, 22 nt, Human
uuaucugaaacuuuugggacca

SEQ ID NO: 575153 - RNA, 22 nt, Human
ugggugcucugcgaccguaggg

SEQ ID NO: 575154 - RNA, 22 nt, Human
aaacucuguugagauaauauuu

SEQ ID NO: 575155 - RNA, 22 nt, Human
cugucccacaagcagugugcac

SEQ ID NO: 575156 - RNA, 20 nt, Human
cacaggccccaagaccugua

SEQ ID NO: 575157 - RNA, 20 nt, Human
uguccuaauagacaagcaga

SEQ ID NO: 575158 - RNA, 22 nt, Human
gauauaaauuaaucaagugcaa

SEQ ID NO: 575159 - RNA, 22 nt, Human
cgcugccaggucaccaggggua

SEQ ID NO: 575160 - RNA, 22 nt, Human
agcaguggccuggggcucugug

SEQ ID NO: 575161 - RNA, 22 nt, Human
acagauugggaacugucuccuu

SEQ ID NO: 575162 - RNA, 20 nt, Human
uaaauggugcauuucuuaua

SEQ ID NO: 575163 - RNA, 22 nt, Human
cagggagcuuugucuucucauu

SEQ ID NO: 575164 - RNA, 22 nt, Human
ucugaaaucuaaugcucugugg

SEQ ID NO: 575165 - RNA, 22 nt, Human
gucucuuaugggcaggagcaca

SEQ ID NO: 575166 - RNA, 22 nt, Human
ggggaagaauggcagaaaacau

SEQ ID NO: 575167 - RNA, 22 nt, Human
cuuuaccacaaggacagaacuu

SEQ ID NO: 575168 - RNA, 22 nt, Human
aaaacacacuggaccaauuuaa

SEQ ID NO: 575169 - RNA, 22 nt, Human
uggcccaguauguauaaucuua

SEQ ID NO: 575170 - RNA, 22 nt, Human
caauaguaaauuacggaggaga

SEQ ID NO: 575171 - RNA, 22 nt, Human
acagacaucuauccauuuaauu

SEQ ID NO: 575172 - RNA, 22 nt, Human
gccaggagaaugcuagcagagg

SEQ ID NO: 575173 - RNA, 22 nt, Human
guggaaggugcuagaacaagga

SEQ ID NO: 575174 - RNA, 22 nt, Human
ccaggcaggcgauggugcagug

SEQ ID NO: 575175 - RNA, 22 nt, Human
augacacuguccuaguaaggaa

SEQ ID NO: 575176 - RNA, 22 nt, Human
guugcugaaauuaauauuggag

SEQ ID NO: 575177 - RNA, 22 nt, Human
caaugaacacagcaauuucaua

SEQ ID NO: 575178 - RNA, 22 nt, Human
acagcagacagucggcuuccug

SEQ ID NO: 575179 - RNA, 22 nt, Human
gcugguagaccucacugcacuc

SEQ ID NO: 575180 - RNA, 22 nt, Human
aaacaaauagugcaugggaauu

SEQ ID NO: 575181 - RNA, 22 nt, Human
ugagguagugcuugucauguuu

SEQ ID NO: 575182 - RNA, 22 nt, Human
cauuugcucugguuccuucugg

SEQ ID NO: 575183 - RNA, 22 nt, Human
ucaguaacuucaugaccaagca

SEQ ID NO: 575184 - RNA, 23 nt, Human
gccuucagcucgggaaggcuccc

SEQ ID NO: 575185 - RNA, 22 nt, Human
ggcuccuguggcaagacagcuu

SEQ ID NO: 575186 - RNA, 22 nt, Human
cugggcucuaggaaccauuccu

SEQ ID NO: 575187 - RNA, 22 nt, Human
ggcugcugguagggguaggaag

SEQ ID NO: 575188 - RNA, 22 nt, Human
uauguacauguuaaagggcaaa

SEQ ID NO: 575189 - RNA, 23 nt, Human
cagguggcuccacgagggguggg

SEQ ID NO: 575190 - RNA, 22 nt, Human
uucucuuuuagaggcuccauga

SEQ ID NO: 575191 - RNA, 22 nt, Human
auauguguaaaugcauuuguuu

SEQ ID NO: 575192 - RNA, 22 nt, Human
agccuggcggucgucggucagg

SEQ ID NO: 575193 - RNA, 22 nt, Human
gaagccaacauuccaaguagaa

SEQ ID NO: 575194 - RNA, 19 nt, Human
ugccagcauuaggcugaag

SEQ ID NO: 575195 - RNA, 22 nt, Human
cugggcuugaguuccugcucgu

SEQ ID NO: 575196 - RNA, 22 nt, Human
aagaguuuaugauauaacaugu

SEQ ID NO: 575197 - RNA, 23 nt, Human
uagcagcauuuuuagccucuguc

SEQ ID NO: 575198 - RNA, 22 nt, Human
ugcuccugcugcaugcaucucc

SEQ ID NO: 575199 - RNA, 22 nt, Human
cuuguuaaaaugccgauucuga

SEQ ID NO: 575200 - RNA, 22 nt, Human
gcagaggggaagcugaggaauu

SEQ ID NO: 575201 - RNA, 22 nt, Human
ucuggcuucaagucccagcucu

SEQ ID NO: 575202 - RNA, 22 nt, Human
uccagccacuugcacaguuaaa

SEQ ID NO: 575203 - RNA, 22 nt, Human
ggucugagugccagggagagaa

SEQ ID NO: 575204 - RNA, 21 nt, Human
ucugccagcugaagaggugga

SEQ ID NO: 575205 - RNA, 22 nt, Human
caaagcaggcuugucaaauugc

SEQ ID NO: 575206 - RNA, 22 nt, Human
uucagcacuguuauggauuugc

SEQ ID NO: 575207 - RNA, 22 nt, Human
uuauauguuucuguuuggaggc

SEQ ID NO: 575208 - RNA, 22 nt, Human
ccaaagagcuagaauuauaggc

SEQ ID NO: 575209 - RNA, 22 nt, Human
gaagaacacuucaugauucauu

SEQ ID NO: 575210 - RNA, 22 nt, Human
cugcagagcaaguaacauccuc

SEQ ID NO: 575211 - RNA, 22 nt, Human
gcagugaaaaagugcacccugu

SEQ ID NO: 575212 - RNA, 22 nt, Human
gccuagggguaagaguacuggc

SEQ ID NO: 575213 - RNA, 22 nt, Human
ccagggcuccccagaaguaccc

SEQ ID NO: 575214 - RNA, 22 nt, Human
aauucuaaauguaauuuagaau

SEQ ID NO: 575215 - RNA, 22 nt, Human
gaggagggcuuuguugauguua

SEQ ID NO: 575216 - RNA, 22 nt, Human
uuaagaaugugccuuuugguug

SEQ ID NO: 575217 - RNA, 22 nt, Human
uuacagguauuuuauugagcag

SEQ ID NO: 575218 - RNA, 21 nt, Human
uggcucuggguaggagagugc

SEQ ID NO: 575219 - RNA, 18 nt, Human
ugcccaccagaagaggga

SEQ ID NO: 575220 - RNA, 22 nt, Human
cuacauaaucuggauuugucug

SEQ ID NO: 575221 - RNA, 22 nt, Human
acaacagagcuggacugagagg

SEQ ID NO: 575222 - RNA, 19 nt, Human
gccagcagaaugaugaggc

SEQ ID NO: 575223 - RNA, 21 nt, Human
ugagcaaaauuuagagugaug

SEQ ID NO: 575224 - RNA, 22 nt, Human
acaugcacaccuauauacaugu

SEQ ID NO: 575225 - RNA, 22 nt, Human
ugaggccugaagccuggagccu

SEQ ID NO: 575226 - RNA, 22 nt, Human
uucaacauuugaaaugaaugaa

SEQ ID NO: 575227 - RNA, 22 nt, Human
ugcauggaggaagaugaaugca

SEQ ID NO: 575228 - RNA, 19 nt, Human
ugugucucuguguagccug

SEQ ID NO: 575229 - RNA, 22 nt, Human
aagacaggaaaagcuccaggcc

SEQ ID NO: 575230 - RNA, 22 nt, Human
gagcaggccagcaauggaaggg

SEQ ID NO: 575231 - RNA, 23 nt, Human
uguaaaaugggguaguguuacca

SEQ ID NO: 575232 - RNA, 23 nt, Human
uggcagugcccagggagaugauc

SEQ ID NO: 575233 - RNA, 20 nt, Human
aggaagcugagauguagagg

SEQ ID NO: 575234 - RNA, 22 nt, Human
ggcuguccaccuaccaugccgg

SEQ ID NO: 575235 - RNA, 22 nt, Human
ucacaugcccuaccuaaucuua

SEQ ID NO: 575236 - RNA, 19 nt, Human
cuucagcaucuccggagcu

SEQ ID NO: 575237 - RNA, 22 nt, Human
uuacacagaugguuaguagagg

SEQ ID NO: 575238 - RNA, 22 nt, Human
acacauuaugagcaguugucuu

SEQ ID NO: 575239 - RNA, 22 nt, Human
ugacauccugaguacauaagag

SEQ ID NO: 575240 - RNA, 16 nt, Human
gacaaguggaggggcc

SEQ ID NO: 575241 - RNA, 22 nt, Human
gugugccagacaugaugcuaug

SEQ ID NO: 575242 - RNA, 22 nt, Human
uggcaggaaaaacauuggagau

SEQ ID NO: 575243 - RNA, 22 nt, Human
agccaagagcucaccucgugug

SEQ ID NO: 575244 - RNA, 22 nt, Human
uuaaagaugcagcuuuagagaa

SEQ ID NO: 575245 - RNA, 22 nt, Human
ccagggcagugggagaaggugc

SEQ ID NO: 575246 - RNA, 22 nt, Human
aaauagaaaccaacaaggucag

SEQ ID NO: 575247 - RNA, 22 nt, Human
uauuaugauucggacguggcag

SEQ ID NO: 575248 - RNA, 22 nt, Human
gauuucuucaggagcagaggag

SEQ ID NO: 575249 - RNA, 22 nt, Human
ugaggcaguauuuuagugacuu

SEQ ID NO: 575250 - RNA, 22 nt, Human
gcauugaauccuaucaggcaaa

SEQ ID NO: 575251 - RNA, 18 nt, Human
gccagagcauaucuccag

SEQ ID NO: 575252 - RNA, 22 nt, Human
agcuccugcuugacagaagagg

SEQ ID NO: 575253 - RNA, 22 nt, Human
gcuuggcauuugcugggagcug

SEQ ID NO: 575254 - RNA, 22 nt, Human
agacagacauucuagagccacc

SEQ ID NO: 575255 - RNA, 21 nt, Human
agcagcugcaguuucuaucug

SEQ ID NO: 575256 - RNA, 22 nt, Human
uggcugaggcuuuucuuaaaga

SEQ ID NO: 575257 - RNA, 22 nt, Human
gauauacugucuguauuacaua

SEQ ID NO: 575258 - RNA, 22 nt, Human
gugccugguuuggggaauguuc

SEQ ID NO: 575259 - RNA, 22 nt, Human
gcucccaacucaggccuccucc

SEQ ID NO: 575260 - RNA, 22 nt, Human
ggagggcugagacuggggucug

SEQ ID NO: 575261 - RNA, 22 nt, Human
cucugcagaggcccaaggcuga

SEQ ID NO: 575262 - RNA, 22 nt, Human
uagcuucaguggcccuagacac

SEQ ID NO: 575263 - RNA, 22 nt, Human
ccaaaauguuugaaugcaugug

SEQ ID NO: 575264 - RNA, 22 nt, Human
gcaggugggagccgcugccuga

SEQ ID NO: 575265 - RNA, 22 nt, Human
aauguuauuucugcauaguagu

SEQ ID NO: 575266 - RNA, 22 nt, Human
cuggagccacugggucuuguau

SEQ ID NO: 575267 - RNA, 22 nt, Human
uccuggagaagaggggcuugga

SEQ ID NO: 575268 - RNA, 22 nt, Human
aauauuuccaaggccugucagg

SEQ ID NO: 575269 - RNA, 22 nt, Human
ggaggccaaggugggcggauca

SEQ ID NO: 575270 - RNA, 17 nt, Human
cuguggccaccuggaug

SEQ ID NO: 575271 - RNA, 22 nt, Human
aaagccagcaaggugaguuuca

SEQ ID NO: 575272 - RNA, 22 nt, Human
caggugggaccaugauagggca

SEQ ID NO: 575273 - RNA, 22 nt, Human
cagcuguuccuggaaggagacc

SEQ ID NO: 575274 - RNA, 22 nt, Human
cagucuggcacagcacacugaa

SEQ ID NO: 575275 - RNA, 22 nt, Human
uggcucagagcagggacucugg

SEQ ID NO: 575276 - RNA, 18 nt, Human
cagaugagaugcaaucuc

SEQ ID NO: 575277 - RNA, 22 nt, Human
uucuauugaaugauaaucuaua

SEQ ID NO: 575278 - RNA, 22 nt, Human
aucagaagcuuguagucucucu

SEQ ID NO: 575279 - RNA, 22 nt, Human
uagcauuaucugucuuaucauu

SEQ ID NO: 575280 - RNA, 22 nt, Human
guacacacaaucucuggucagu

SEQ ID NO: 575281 - RNA, 22 nt, Human
aaaacaguuauaaacagaguca

SEQ ID NO: 575282 - RNA, 19 nt, Human
gcagguggauguggucagc

SEQ ID NO: 575283 - RNA, 19 nt, Human
auucuucucaaauauccau

SEQ ID NO: 575284 - RNA, 22 nt, Human
caauuauauuuagaaugauaca

SEQ ID NO: 575285 - RNA, 22 nt, Human
gcuguggcuugcagcuggggcu

SEQ ID NO: 575286 - RNA, 22 nt, Human
aggaagcugcuaagaaacaaug

SEQ ID NO: 575287 - RNA, 22 nt, Human
gggcuggaucuccugcaggcag

SEQ ID NO: 575288 - RNA, 22 nt, Human
gggcacugugcuaggugcugag

SEQ ID NO: 575289 - RNA, 22 nt, Human
augcauaugcauggacacucag

SEQ ID NO: 575290 - RNA, 22 nt, Human
uuugaagaccuuaucucuaaau

SEQ ID NO: 575291 - RNA, 22 nt, Human
uguaaaguccaagaucaaagag

SEQ ID NO: 575292 - RNA, 22 nt, Human
acaguggauauauuaaaugaga

SEQ ID NO: 575293 - RNA, 19 nt, Human
gaaggggaagguggguacc

SEQ ID NO: 575294 - RNA, 22 nt, Human
aauuuaacugagaguacuuuua

SEQ ID NO: 575295 - RNA, 22 nt, Human
ggugggguuuuaggcugcugca

SEQ ID NO: 575296 - RNA, 22 nt, Human
augcauauaaggcacauguauu

SEQ ID NO: 575297 - RNA, 22 nt, Human
ccuggcaggcuggggacagugc

SEQ ID NO: 575298 - RNA, 22 nt, Human
aacaaacucaaauggaagagug

SEQ ID NO: 575299 - RNA, 22 nt, Human
ugccuggguugacucuuagcug

SEQ ID NO: 575300 - RNA, 22 nt, Human
cagcaggaggugaguagcaggu

SEQ ID NO: 575301 - RNA, 22 nt, Human
acuguuaacgguaugaugcucg

SEQ ID NO: 575302 - RNA, 22 nt, Human
gaagggugcauggagggaaguc

SEQ ID NO: 575303 - RNA, 22 nt, Human
ucuuaaugaaagugaaauauca

SEQ ID NO: 575304 - RNA, 22 nt, Human
agcuggugaaccugaggcacag

SEQ ID NO: 575305 - RNA, 22 nt, Human
ugggagccuggcaggccagagg

SEQ ID NO: 575306 - RNA, 22 nt, Human
accuugggcaaccugcuccugc

SEQ ID NO: 575307 - RNA, 22 nt, Human
ccaagaggcagaaugcagagaa

SEQ ID NO: 575308 - RNA, 21 nt, Human
agguggcugcauccucagaag

SEQ ID NO: 575309 - RNA, 20 nt, Human
auuagagcuacauggcuaca

SEQ ID NO: 575310 - RNA, 20 nt, Human
guucacaggcuuccuuucag

SEQ ID NO: 575311 - RNA, 19 nt, Human
cuggagauagggccuuuaa

SEQ ID NO: 575312 - RNA, 22 nt, Human
uacacagaaauuguguagggau

SEQ ID NO: 575313 - RNA, 22 nt, Human
gaacuacaguaagaauugaugu

SEQ ID NO: 575314 - RNA, 22 nt, Human
uaucaauacauguuaucagugu

SEQ ID NO: 575315 - RNA, 22 nt, Human
cuuauugugagguauugagauu

SEQ ID NO: 575316 - RNA, 22 nt, Human
cugggaggugcagcaaaaauca

SEQ ID NO: 575317 - RNA, 22 nt, Human
uuaaaguuucagaaacuugguc

SEQ ID NO: 575318 - RNA, 18 nt, Human
acuggcuuuagcaucaga

SEQ ID NO: 575319 - RNA, 23 nt, Human
aagcuuccuugacuggccccuag

SEQ ID NO: 575320 - RNA, 22 nt, Human
uguagaaagcucuucugaaauc

SEQ ID NO: 575321 - RNA, 22 nt, Human
gcaguggauccaaugguaucuu

SEQ ID NO: 575322 - RNA, 22 nt, Human
uuuuaucuucauuccuaucuac

SEQ ID NO: 575323 - RNA, 22 nt, Human
cauauaaauacaacauguguua

SEQ ID NO: 575324 - RNA, 22 nt, Human
cugucuccuccacugcauggga

SEQ ID NO: 575325 - RNA, 22 nt, Human
uccagagcugggucugugcuca

SEQ ID NO: 575326 - RNA, 22 nt, Human
aaagcacuuugagacugacagg

SEQ ID NO: 575327 - RNA, 22 nt, Human
uugaauaaaugagcagugaauu

SEQ ID NO: 575328 - RNA, 22 nt, Human
ccuguauuagguagacaacuau

SEQ ID NO: 575329 - RNA, 22 nt, Human
agagaauacaaagaagauaugu

SEQ ID NO: 575330 - RNA, 22 nt, Human
agugcagccgagaucaggugcu

SEQ ID NO: 575331 - RNA, 22 nt, Human
uccugaauuccucuuugcaucc

SEQ ID NO: 575332 - RNA, 22 nt, Human
ccaggguugguauucaccugga

SEQ ID NO: 575333 - RNA, 22 nt, Human
aucaacuuaaagaaaagauacu

SEQ ID NO: 575334 - RNA, 22 nt, Human
cuggccccaggcagccugcugg

SEQ ID NO: 575335 - RNA, 22 nt, Human
gacaauaagaaaagaggaggca

SEQ ID NO: 575336 - RNA, 22 nt, Human
cuggcucagugccuucagaagu

SEQ ID NO: 575337 - RNA, 22 nt, Human
gugcaggauguugggaaucagg

SEQ ID NO: 575338 - RNA, 22 nt, Human
cuucuccuguaagaagaucaaa

SEQ ID NO: 575339 - RNA, 22 nt, Human
ugcacugauguuuugccaagga

SEQ ID NO: 575340 - RNA, 22 nt, Human
gaaaaggauugguaaaauaucu

SEQ ID NO: 575341 - RNA, 22 nt, Human
ugacaagaaagcgucuucuuuu

SEQ ID NO: 575342 - RNA, 22 nt, Human
gauuucuugagcaaguugcuua

SEQ ID NO: 575343 - RNA, 22 nt, Human
uuuccagugagcaaauguagaa

SEQ ID NO: 575344 - RNA, 22 nt, Human
aacaucagaaguagaagacuca

SEQ ID NO: 575345 - RNA, 22 nt, Human
caaugacacucugcacagugcu

SEQ ID NO: 575346 - RNA, 22 nt, Human
aggccagaaaugucagggagug

SEQ ID NO: 575347 - RNA, 22 nt, Human
aggcucugugaugugccaggca

SEQ ID NO: 575348 - RNA, 21 nt, Human
ggccacaguuagggcucagga

SEQ ID NO: 575349 - RNA, 22 nt, Human
uuuucuccuuucaagauagcau

SEQ ID NO: 575350 - RNA, 22 nt, Human
uacaugucuacagccaugucug

SEQ ID NO: 575351 - RNA, 22 nt, Human
augcucacuucagagaagauga

SEQ ID NO: 575352 - RNA, 23 nt, Human
cucuccugaaggacaagcugccg

SEQ ID NO: 575353 - RNA, 22 nt, Human
ccucuggcuuacuguuggguuu

SEQ ID NO: 575354 - RNA, 22 nt, Human
auguguuuauaauuacucaauc

SEQ ID NO: 575355 - RNA, 22 nt, Human
ugaggcugagauaucagggagg

SEQ ID NO: 575356 - RNA, 17 nt, Human
uauacacagacagacug

SEQ ID NO: 575357 - RNA, 22 nt, Human
cuggggagaagcgacucggcug

SEQ ID NO: 575358 - RNA, 22 nt, Human
gugcccaggugucccugagaag

SEQ ID NO: 575359 - RNA, 22 nt, Human
auaucacagcucuuucauugcu

SEQ ID NO: 575360 - RNA, 22 nt, Human
uuugcugauauuuugcugauac

SEQ ID NO: 575361 - RNA, 22 nt, Human
aguuuuaaaugauggugguggu

SEQ ID NO: 575362 - RNA, 22 nt, Human
gugcagauccugauugcaguuc

SEQ ID NO: 575363 - RNA, 22 nt, Human
ugagauggcaacaccagcuuug

SEQ ID NO: 575364 - RNA, 22 nt, Human
uugcugaugguauuaugcuagu

SEQ ID NO: 575365 - RNA, 22 nt, Human
aauguguauacuggcaauuaag

SEQ ID NO: 575366 - RNA, 22 nt, Human
gucucuuuuauggugaguugau

SEQ ID NO: 575367 - RNA, 22 nt, Human
ggccagacugagugaggucaag

SEQ ID NO: 575368 - RNA, 19 nt, Human
agcuggggcgguguguguu

SEQ ID NO: 575369 - RNA, 22 nt, Human
agcugccaucagccuuuggaug

SEQ ID NO: 575370 - RNA, 22 nt, Human
uggccagauucaugcauguauc

SEQ ID NO: 575371 - RNA, 22 nt, Human
gcacccauugugugcagcucug

SEQ ID NO: 575372 - RNA, 22 nt, Human
acauguuugauaaauauuuggg

SEQ ID NO: 575373 - RNA, 22 nt, Human
ggaggagacggagugauuagug

SEQ ID NO: 575374 - RNA, 22 nt, Human
acaggaaaugaaaugguaucua

SEQ ID NO: 575375 - RNA, 22 nt, Human
auuagcuuccuauaguaagggg

SEQ ID NO: 575376 - RNA, 22 nt, Human
ucauagaugugcugugcacaaa

SEQ ID NO: 575377 - RNA, 22 nt, Human
uccuggaguuuguggugauaug

SEQ ID NO: 575378 - RNA, 22 nt, Human
gccacagcccgagcaccaugag

SEQ ID NO: 575379 - RNA, 22 nt, Human
cuucagugauauaggcuucucc

SEQ ID NO: 575380 - RNA, 22 nt, Human
gagcuggucaguuucaggagag

SEQ ID NO: 575381 - RNA, 23 nt, Human
ucugccagugugugccaggagcc

SEQ ID NO: 575382 - RNA, 22 nt, Human
ggacagagcagacgagcagcgg

SEQ ID NO: 575383 - RNA, 22 nt, Human
ccaggugcaaacucccagcagg

SEQ ID NO: 575384 - RNA, 22 nt, Human
cagcacaguagaguaguuguaa

SEQ ID NO: 575385 - RNA, 22 nt, Human
auccaggguguggagagagcuc

SEQ ID NO: 575386 - RNA, 22 nt, Human
acaaaacaguguuccugccccu

SEQ ID NO: 575387 - RNA, 22 nt, Human
ggcaugaguaacgugagugagg

SEQ ID NO: 575388 - RNA, 22 nt, Human
cucaacagacucugccaucccu

SEQ ID NO: 575389 - RNA, 21 nt, Human
ugucagaaauaagcaugugau

SEQ ID NO: 575390 - RNA, 22 nt, Human
cugaaacauugcaauaacaaag

SEQ ID NO: 575391 - RNA, 22 nt, Human
ucugagccguauggcuuggcua

SEQ ID NO: 575392 - RNA, 22 nt, Human
ccaggagaugggagcaucuaaa

SEQ ID NO: 575393 - RNA, 22 nt, Human
uaggauuuaggcuuuaacaucu

SEQ ID NO: 575394 - RNA, 22 nt, Human
uccuugaagcaacgugcagaca

SEQ ID NO: 575395 - RNA, 22 nt, Human
aauuaggaaauucagccauuuu

SEQ ID NO: 575396 - RNA, 22 nt, Human
uuguguguguaacuuuaugaga

SEQ ID NO: 575397 - RNA, 22 nt, Human
aggggucuugggaguccuggcu

SEQ ID NO: 575398 - RNA, 22 nt, Human
ugccaggcccugugcuggaugc

SEQ ID NO: 575399 - RNA, 22 nt, Human
ccagcccugccagagagagcug

SEQ ID NO: 575400 - RNA, 22 nt, Human
auggauaaugucucuguuuccc

SEQ ID NO: 575401 - RNA, 22 nt, Human
ucacaaacaaugcuuuggaauu

SEQ ID NO: 575402 - RNA, 22 nt, Human
guggcugggcuccgagcggcuu

SEQ ID NO: 575403 - RNA, 22 nt, Human
ucuccuggguaaaaggguugau

SEQ ID NO: 575404 - RNA, 22 nt, Human
caguggcaaugggacagagcac

SEQ ID NO: 575405 - RNA, 22 nt, Human
ggugguggucccgacuugggag

SEQ ID NO: 575406 - RNA, 17 nt, Human
ucagcaggggccaagcu

SEQ ID NO: 575407 - RNA, 22 nt, Human
aaugggauuaagaaagaucuug

SEQ ID NO: 575408 - RNA, 22 nt, Human
aggcacugaauauccaguaaaa

SEQ ID NO: 575409 - RNA, 22 nt, Human
guucaaaauucaaaugguauac

SEQ ID NO: 575410 - RNA, 22 nt, Human
acacacuggcaggagcuauaaa

SEQ ID NO: 575411 - RNA, 17 nt, Human
cucugcagugcauggcu

SEQ ID NO: 575412 - RNA, 22 nt, Human
uuacaaagcaggucagcugaaa

SEQ ID NO: 575413 - RNA, 22 nt, Human
uugcuuuauucacaucuauauu

SEQ ID NO: 575414 - RNA, 22 nt, Human
aggcugaggcagguggaucauu

SEQ ID NO: 575415 - RNA, 19 nt, Human
ugagcaugcgagcugagaa

SEQ ID NO: 575416 - RNA, 22 nt, Human
ugaaacauuauagaauauuuau

SEQ ID NO: 575417 - RNA, 22 nt, Human
uggcaggagguuuucuccagga

SEQ ID NO: 575418 - RNA, 22 nt, Human
uaaugaacaauauaucaauagc

SEQ ID NO: 575419 - RNA, 22 nt, Human
aagacacugauacucugugauu

SEQ ID NO: 575420 - RNA, 21 nt, Human
cccaggugggaugguugccuc

SEQ ID NO: 575421 - RNA, 22 nt, Human
gcccagcagaucucagugucuc

SEQ ID NO: 575422 - RNA, 22 nt, Human
guggcaugacagugaaugggca

SEQ ID NO: 575423 - RNA, 22 nt, Human
gcuucgggguccaagcgcgugu

SEQ ID NO: 575424 - RNA, 22 nt, Human
augcaguuagcacuacagaaga

SEQ ID NO: 575425 - RNA, 22 nt, Human
uccccaggagcaaugauucagu

SEQ ID NO: 575426 - RNA, 22 nt, Human
agcugguaugaacaggauagga

SEQ ID NO: 575427 - RNA, 22 nt, Human
uuugaagggcacgacaauaguu

SEQ ID NO: 575428 - RNA, 22 nt, Human
gaacauuuaugaugcaauaccu

SEQ ID NO: 575429 - RNA, 22 nt, Human
ugcuccagggcugccagacccu

SEQ ID NO: 575430 - RNA, 22 nt, Human
gaaguggaagccaucggcaguc

SEQ ID NO: 575431 - RNA, 22 nt, Human
uauguuuuaggaauuaauuguu

SEQ ID NO: 575432 - RNA, 22 nt, Human
agcaaugcuuauugcugacuau

SEQ ID NO: 575433 - RNA, 22 nt, Human
aucaucuucgaaaaaagucaga

SEQ ID NO: 575434 - RNA, 22 nt, Human
ggccaagguguucugauaugcc

SEQ ID NO: 575435 - RNA, 22 nt, Human
ucccugcacagccgagccaugc

SEQ ID NO: 575436 - RNA, 22 nt, Human
uccugaaaauaauuucacaaga

SEQ ID NO: 575437 - RNA, 22 nt, Human
gugaggcagcaggagccucugu

SEQ ID NO: 575438 - RNA, 22 nt, Human
auuucaguagaaaaucuugauu

SEQ ID NO: 575439 - RNA, 23 nt, Human
acagggcuggcagcugcaagacc

SEQ ID NO: 575440 - RNA, 19 nt, Human
uuucucugugcaccuuuuc

SEQ ID NO: 575441 - RNA, 22 nt, Human
caggauugaaugcuucucccug

SEQ ID NO: 575442 - RNA, 22 nt, Human
caugcaagacaaucuuuaaaau

SEQ ID NO: 575443 - RNA, 22 nt, Human
aaaugucuacuucccaucugua

SEQ ID NO: 575444 - RNA, 22 nt, Human
gcucagagauggggaaugaaaa

SEQ ID NO: 575445 - RNA, 22 nt, Human
agcugggucuugggccaggaga

SEQ ID NO: 575446 - RNA, 22 nt, Human
ucuggccauggcaagccgagug

SEQ ID NO: 575447 - RNA, 20 nt, Human
aagcauggucaaaacuuaug

SEQ ID NO: 575448 - RNA, 21 nt, Human
cagcaaaucauugggcagacu

SEQ ID NO: 575449 - RNA, 22 nt, Human
uggcugcagaucaagggcaggc

SEQ ID NO: 575450 - RNA, 22 nt, Human
gacaccagcaaggcugugagga

SEQ ID NO: 575451 - RNA, 22 nt, Human
guucuccuggcucccacccugc

SEQ ID NO: 575452 - RNA, 22 nt, Human
acaguguaauaugggagucagu

SEQ ID NO: 575453 - RNA, 22 nt, Human
ucugagccaccugagcccaugg

SEQ ID NO: 575454 - RNA, 22 nt, Human
ucaguaaaggggaggugauggg

SEQ ID NO: 575455 - RNA, 22 nt, Human
uacaugcuccuuaugagaaucu

SEQ ID NO: 575456 - RNA, 22 nt, Human
ucaagagaagugcuccacagua

SEQ ID NO: 575457 - RNA, 22 nt, Human
caccagcugcaacaccaucucc

SEQ ID NO: 575458 - RNA, 22 nt, Human
accuucagacaucaacuaucuc

SEQ ID NO: 575459 - RNA, 22 nt, Human
uuauggaauuugcaaaagguua

SEQ ID NO: 575460 - RNA, 21 nt, Human
gcucuggccuacuguucccuc

SEQ ID NO: 575461 - RNA, 22 nt, Human
cauucaaaugugccacuguccu

SEQ ID NO: 575462 - RNA, 22 nt, Human
gcuuuaaugaagucacgcaaag

SEQ ID NO: 575463 - RNA, 20 nt, Human
cccucccagaugcuucccaa

SEQ ID NO: 575464 - RNA, 22 nt, Human
uuaucaucuccugcugugguua

SEQ ID NO: 575465 - RNA, 22 nt, Human
cuccagugcgcaggacagcccc

SEQ ID NO: 575466 - RNA, 20 nt, Human
aggcucugccugcaggccca

SEQ ID NO: 575467 - RNA, 22 nt, Human
gugcaugugucuuuauaguagc

SEQ ID NO: 575468 - RNA, 22 nt, Human
accuccccucaccaaucugguu

SEQ ID NO: 575469 - RNA, 22 nt, Human
agagucugaggcagcugcagcc

SEQ ID NO: 575470 - RNA, 22 nt, Human
uucacaauagcuggcaucaucu

SEQ ID NO: 575471 - RNA, 22 nt, Human
caauacaauuaccaguuaauca

SEQ ID NO: 575472 - RNA, 17 nt, Human
aguguuuccuuaucauu

SEQ ID NO: 575473 - RNA, 22 nt, Human
gauuauggagaaauaauuagaa

SEQ ID NO: 575474 - RNA, 22 nt, Human
gaaggaggcuccccaaagucug

SEQ ID NO: 575475 - RNA, 22 nt, Human
uggggccuuggccucauuagau

SEQ ID NO: 575476 - RNA, 22 nt, Human
cuccugaguaguagcauuguca

SEQ ID NO: 575477 - RNA, 22 nt, Human
aggaguaucuaauaaucugaga

SEQ ID NO: 575478 - RNA, 22 nt, Human
cuccagagguccccgcggcacu

SEQ ID NO: 575479 - RNA, 22 nt, Human
cugcagaggguuugagcauccu

SEQ ID NO: 575480 - RNA, 23 nt, Human
uguguucucacacagaugcagua

SEQ ID NO: 575481 - RNA, 22 nt, Human
gaggguggggaauagacugcua

SEQ ID NO: 575482 - RNA, 22 nt, Human
cauguacauucuguagauggag

SEQ ID NO: 575483 - RNA, 22 nt, Human
gguguugggagagcugguuuug

SEQ ID NO: 575484 - RNA, 22 nt, Human
cuggaggcacccuuagagaggc

SEQ ID NO: 575485 - RNA, 22 nt, Human
uacauguuugguaaaugauggc

SEQ ID NO: 575486 - RNA, 22 nt, Human
uaacagcucuguguggcuguaa

SEQ ID NO: 575487 - RNA, 22 nt, Human
aaaaguguucaggaagaauaau

SEQ ID NO: 575488 - RNA, 22 nt, Human
uggcuuccuaaacugauuucca

SEQ ID NO: 575489 - RNA, 22 nt, Human
gcaggcaguuauuuaguagaau

SEQ ID NO: 575490 - RNA, 22 nt, Human
ugaggccaggaucccaggcucu

SEQ ID NO: 575491 - RNA, 22 nt, Human
acagagcuuaggaugacuccca

SEQ ID NO: 575492 - RNA, 22 nt, Human
ugaagcaggcauugacugauga

SEQ ID NO: 575493 - RNA, 22 nt, Human
ugucauuuucuaaucuguuguc

SEQ ID NO: 575494 - RNA, 22 nt, Human
acauucaaggccuucugacaca

SEQ ID NO: 575495 - RNA, 22 nt, Human
ucacccagacuugugaaugugu

SEQ ID NO: 575496 - RNA, 20 nt, Human
aauuauauaacuccaacauu

SEQ ID NO: 575497 - RNA, 22 nt, Human
gucuccugccacacucaguccc

SEQ ID NO: 575498 - RNA, 22 nt, Human
acaaugaugcagaugaguaaga

SEQ ID NO: 575499 - RNA, 22 nt, Human
ggcugugaaguagcaggggcag

SEQ ID NO: 575500 - RNA, 22 nt, Human
uggcuucuauugcuguggcauu

SEQ ID NO: 575501 - RNA, 21 nt, Human
cugcuuuacuucagaggaucu

SEQ ID NO: 575502 - RNA, 22 nt, Human
ggagggcugccagguggagcgg

SEQ ID NO: 575503 - RNA, 22 nt, Human
aagcuguucucuaaguuucaug

SEQ ID NO: 575504 - RNA, 22 nt, Human
uuucagaauaucgauucaguga

SEQ ID NO: 575505 - RNA, 23 nt, Human
acagugucugcugcaagauaucu

SEQ ID NO: 575506 - RNA, 18 nt, Human
aagggcuggccuuuggag

SEQ ID NO: 575507 - RNA, 22 nt, Human
guugagcaaggccagagaagcc

SEQ ID NO: 575508 - RNA, 22 nt, Human
agcacaggacguagagcuugga

SEQ ID NO: 575509 - RNA, 20 nt, Human
cagcagaaauggggugggaa

SEQ ID NO: 575510 - RNA, 22 nt, Human
acagggcagagugaaaugcuau

SEQ ID NO: 575511 - RNA, 22 nt, Human
cuggucaggaagguggggacag

SEQ ID NO: 575512 - RNA, 22 nt, Human
uugauuuuaaaauagugacacu

SEQ ID NO: 575513 - RNA, 18 nt, Human
auggaggcagagagcuga

SEQ ID NO: 575514 - RNA, 22 nt, Human
auuauggacguuaauuuuggaa

SEQ ID NO: 575515 - RNA, 22 nt, Human
uuauuuucagcuaggaaagcca

SEQ ID NO: 575516 - RNA, 21 nt, Human
uccuucaguucugcacuuucu

SEQ ID NO: 575517 - RNA, 22 nt, Human
gugggcagaggagagaacauua

SEQ ID NO: 575518 - RNA, 22 nt, Human
uucuuacaucaguuuauuuugu

SEQ ID NO: 575519 - RNA, 22 nt, Human
gacuccagguguccaggccucc

SEQ ID NO: 575520 - RNA, 22 nt, Human
cugaggcagagggcagaccaga

SEQ ID NO: 575521 - RNA, 22 nt, Human
uggggcuggcuauugucucccu

SEQ ID NO: 575522 - RNA, 22 nt, Human
aguaaaugaaagcaauuuuaga

SEQ ID NO: 575523 - RNA, 22 nt, Human
uuuuacuuuggauacaguacuu

SEQ ID NO: 575524 - RNA, 22 nt, Human
cccucucucaggcugacagccu

SEQ ID NO: 575525 - RNA, 22 nt, Human
ugugccuuuaaggggagcugag

SEQ ID NO: 575526 - RNA, 22 nt, Human
cugccaggacugacgucuucag

SEQ ID NO: 575527 - RNA, 21 nt, Human
aaaauguagacuuuucccuga

SEQ ID NO: 575528 - RNA, 22 nt, Human
agugaguugaacauugauaaug

SEQ ID NO: 575529 - RNA, 22 nt, Human
augaaaugugaaugcuuuucau

SEQ ID NO: 575530 - RNA, 22 nt, Human
gcuuccaccuacuaaaugccac

SEQ ID NO: 575531 - RNA, 22 nt, Human
caugcuaauucccaggccccaa

SEQ ID NO: 575532 - RNA, 22 nt, Human
cuuacauacugagaaaauaucc

SEQ ID NO: 575533 - RNA, 22 nt, Human
aaacaugagcauuucuguuuaa

SEQ ID NO: 575534 - RNA, 22 nt, Human
gagcagggagacaacucuggug

SEQ ID NO: 575535 - RNA, 22 nt, Human
ccacagugguuguggcaugugg

SEQ ID NO: 575536 - RNA, 19 nt, Human
caguaucauugcacauagu

SEQ ID NO: 575537 - RNA, 22 nt, Human
ucauuaauuugcuuagacuuau

SEQ ID NO: 575538 - RNA, 22 nt, Human
ccucucuguguggccucuccau

SEQ ID NO: 575539 - RNA, 22 nt, Human
uaguggaggccuguugugugca

SEQ ID NO: 575540 - RNA, 22 nt, Human
auuagcugaccucuaaggagcc

SEQ ID NO: 575541 - RNA, 22 nt, Human
agcucaggccggagcuacaggc

SEQ ID NO: 575542 - RNA, 22 nt, Human
gggagguucuguucgcacuuga

SEQ ID NO: 575543 - RNA, 22 nt, Human
aaaugacuaaugauccugggca

SEQ ID NO: 575544 - RNA, 22 nt, Human
gacagcagcauguuuacaggcc

SEQ ID NO: 575545 - RNA, 22 nt, Human
ugcuggcuggccuggccuggac

SEQ ID NO: 575546 - RNA, 22 nt, Human
ugggaagguacacgggaaagag

SEQ ID NO: 575547 - RNA, 19 nt, Human
cuggugcuugagugaguca

SEQ ID NO: 575548 - RNA, 22 nt, Human
uagguagcuuuggcguuucuug

SEQ ID NO: 575549 - RNA, 22 nt, Human
cucugggccaccgcugguguau

SEQ ID NO: 575550 - RNA, 22 nt, Human
uccuuagguauuuagcaugaau

SEQ ID NO: 575551 - RNA, 19 nt, Human
uccuggggauguggucacc

SEQ ID NO: 575552 - RNA, 22 nt, Human
cagaaguuugaaugagagccug

SEQ ID NO: 575553 - RNA, 22 nt, Human
auacaaugagugagugaauggg

SEQ ID NO: 575554 - RNA, 22 nt, Human
aauauugagaaccagcauguuu

SEQ ID NO: 575555 - RNA, 22 nt, Human
ucaguucuaacaguuuagaaca

SEQ ID NO: 575556 - RNA, 22 nt, Human
auuugcuuugggacagcuuaaa

SEQ ID NO: 575557 - RNA, 20 nt, Human
ugccagggccagcagaggcu

SEQ ID NO: 575558 - RNA, 22 nt, Human
cuauuacaauucugcaaggagu

SEQ ID NO: 575559 - RNA, 22 nt, Human
cuugccagcacuuggccagcug

SEQ ID NO: 575560 - RNA, 22 nt, Human
cuuaacauccugcauuuuucuu

SEQ ID NO: 575561 - RNA, 22 nt, Human
aguggguaggccucuggugccu

SEQ ID NO: 575562 - RNA, 19 nt, Human
cuuauuagagugagagcuu

SEQ ID NO: 575563 - RNA, 19 nt, Human
cucugccucccuccugggu

SEQ ID NO: 575564 - RNA, 22 nt, Human
ccaggguuauaaaugcaucugu

SEQ ID NO: 575565 - RNA, 22 nt, Human
ggcugaggcggcgaugcccuug

SEQ ID NO: 575566 - RNA, 22 nt, Human
uuccaguucuucuguaagcacu

SEQ ID NO: 575567 - RNA, 22 nt, Human
ccagcccucgguagucccauag

SEQ ID NO: 575568 - RNA, 22 nt, Human
uaugcuaacugggggaaaagag

SEQ ID NO: 575569 - RNA, 22 nt, Human
uuaaauagucaaaucaguggca

SEQ ID NO: 575570 - RNA, 22 nt, Human
acagugcucaugugacauggug

SEQ ID NO: 575571 - RNA, 22 nt, Human
agguacugaaaaaauguuugca

SEQ ID NO: 575572 - RNA, 22 nt, Human
guggccugucagaagccguggg

SEQ ID NO: 575573 - RNA, 22 nt, Human
ugagcccagucugucugacaug

SEQ ID NO: 575574 - RNA, 22 nt, Human
augacaaaggcugaaagggaaa

SEQ ID NO: 575575 - RNA, 22 nt, Human
cugccucuugacagaucguggc

SEQ ID NO: 575576 - RNA, 21 nt, Human
acacaggaguuucuucuuucu

SEQ ID NO: 575577 - RNA, 22 nt, Human
caguauaugcucuuucaucaaa

SEQ ID NO: 575578 - RNA, 22 nt, Human
ucugagguggggcuggagcauu

SEQ ID NO: 575579 - RNA, 22 nt, Human
cggcagugggcgccaggucucc

SEQ ID NO: 575580 - RNA, 22 nt, Human
guuacaaacucaggugccaaaa

SEQ ID NO: 575581 - RNA, 22 nt, Human
aggagcuguuuuguucagcaaa

SEQ ID NO: 575582 - RNA, 22 nt, Human
uggagaaaagguugaauccauc

SEQ ID NO: 575583 - RNA, 22 nt, Human
gaaaauaggcugcaucuccuuc

SEQ ID NO: 575584 - RNA, 22 nt, Human
ugaaaugcuugggaccagaagu

SEQ ID NO: 575585 - RNA, 22 nt, Human
auacuguagaggcauagcuagu

SEQ ID NO: 575586 - RNA, 22 nt, Human
uagccauuuuuauuaaugcugg

SEQ ID NO: 575587 - RNA, 22 nt, Human
uacauuauuucaucagucaucu

SEQ ID NO: 575588 - RNA, 22 nt, Human
aaguggcccuaggccaagggga

SEQ ID NO: 575589 - RNA, 19 nt, Human
ugauucaucuaacugccuc

SEQ ID NO: 575590 - RNA, 22 nt, Human
gccagccagagaggcaugguua

SEQ ID NO: 575591 - RNA, 22 nt, Human
uuccugggcucuggcuggccua

SEQ ID NO: 575592 - RNA, 20 nt, Human
agggugagacaugagccucc

SEQ ID NO: 575593 - RNA, 22 nt, Human
uugaaauaucaaguuauuagug

SEQ ID NO: 575594 - RNA, 22 nt, Human
uuccuuuugcaagguccucuag

SEQ ID NO: 575595 - RNA, 22 nt, Human
ggcuggccucaggguccucgcu

SEQ ID NO: 575596 - RNA, 22 nt, Human
ucagcucugcaaggucaccucc

SEQ ID NO: 575597 - RNA, 22 nt, Human
cagucucuggcagcugcuggcc

SEQ ID NO: 575598 - RNA, 22 nt, Human
uggcugccaugacgccugggga

SEQ ID NO: 575599 - RNA, 22 nt, Human
gccaggcagauaugugagcuua

SEQ ID NO: 575600 - RNA, 22 nt, Human
uucucuaggaguucugggauca

SEQ ID NO: 575601 - RNA, 22 nt, Human
ggcagguggaaggucuccauuc

SEQ ID NO: 575602 - RNA, 22 nt, Human
gcgcucaggugccaggccugcg

SEQ ID NO: 575603 - RNA, 22 nt, Human
ggcagggugccuggcuccuguu

SEQ ID NO: 575604 - RNA, 22 nt, Human
auggcagaauuaggauuucaag

SEQ ID NO: 575605 - RNA, 22 nt, Human
cucuuuagucacagggcuucau

SEQ ID NO: 575606 - RNA, 22 nt, Human
ccagggccugccacuuagcaag

SEQ ID NO: 575607 - RNA, 22 nt, Human
gggcccuucagcuuccucugca

SEQ ID NO: 575608 - RNA, 22 nt, Human
uggccugguuauauugcuauca

SEQ ID NO: 575609 - RNA, 22 nt, Human
aucauuuaugccccaauuagau

SEQ ID NO: 575610 - RNA, 22 nt, Human
aaccugagcgcguugcuuucua

SEQ ID NO: 575611 - RNA, 22 nt, Human
uggcaugaagucagcagcuggg

SEQ ID NO: 575612 - RNA, 22 nt, Human
cugcuuccauggucuggagacu

SEQ ID NO: 575613 - RNA, 22 nt, Human
cagugcaauuacaagcuaauuc

SEQ ID NO: 575614 - RNA, 22 nt, Human
ugugugauugcaggagaugugg

SEQ ID NO: 575615 - RNA, 22 nt, Human
agcaagauuuuccuugaauguu

SEQ ID NO: 575616 - RNA, 22 nt, Human
uccagccaugcaugacaaucac

SEQ ID NO: 575617 - RNA, 22 nt, Human
caucagagucagagcucuuucu

SEQ ID NO: 575618 - RNA, 22 nt, Human
aaaugcugggaaccauuggauc

SEQ ID NO: 575619 - RNA, 22 nt, Human
agaggccagcacugcagggaag

SEQ ID NO: 575620 - RNA, 22 nt, Human
uuccuccagccuggagcacuuc

SEQ ID NO: 575621 - RNA, 22 nt, Human
auaacucuguuuuuuucaugca

SEQ ID NO: 575622 - RNA, 22 nt, Human
cucuggagggaggcugagcugg

SEQ ID NO: 575623 - RNA, 22 nt, Human
uccugagauguggagcuccaug

SEQ ID NO: 575624 - RNA, 22 nt, Human
ucacccagauuacauccuguca

SEQ ID NO: 575625 - RNA, 22 nt, Human
aaaguugcagguggugagaggu

SEQ ID NO: 575626 - RNA, 22 nt, Human
ggcacagcccucucuguggaca

SEQ ID NO: 575627 - RNA, 22 nt, Human
cagggaugugaugagcugagcc

SEQ ID NO: 575628 - RNA, 22 nt, Human
gaaauauacauugcaggaagag

SEQ ID NO: 575629 - RNA, 23 nt, Human
cagcaggagggugccugggcugc

SEQ ID NO: 575630 - RNA, 22 nt, Human
aaaugugauacuguucuuuuua

SEQ ID NO: 575631 - RNA, 22 nt, Human
ccagcucuggcuucuugcuggg

SEQ ID NO: 575632 - RNA, 19 nt, Human
acugccugcagguguuggg

SEQ ID NO: 575633 - RNA, 22 nt, Human
ucucugcugagaagggcuggca

SEQ ID NO: 575634 - RNA, 22 nt, Human
gugccuccuuaaauucugcacc

SEQ ID NO: 575635 - RNA, 22 nt, Human
ugggacaguuguccuccacucu

SEQ ID NO: 575636 - RNA, 22 nt, Human
ucccagagcucugacaccagcu

SEQ ID NO: 575637 - RNA, 21 nt, Human
auggcucaggccaucaaugga

SEQ ID NO: 575638 - RNA, 22 nt, Human
agacuaaauugggauguguugu

SEQ ID NO: 575639 - RNA, 22 nt, Human
gaaaggaaauauucuaagcacu

SEQ ID NO: 575640 - RNA, 22 nt, Human
auauuuguaguggguaagaagu

SEQ ID NO: 575641 - RNA, 22 nt, Human
uuggaaggggcagaguggcugc

SEQ ID NO: 575642 - RNA, 22 nt, Human
ggccaagguggagaaggcacug

SEQ ID NO: 575643 - RNA, 22 nt, Human
ugucuuuuauaacugacauaua

SEQ ID NO: 575644 - RNA, 22 nt, Human
uccuuucuccagcuggcauugu

SEQ ID NO: 575645 - RNA, 22 nt, Human
gaaugcuuggaaccugaaguuc

SEQ ID NO: 575646 - RNA, 22 nt, Human
gaggccagaaugagcugaaugc

SEQ ID NO: 575647 - RNA, 22 nt, Human
uccaggaguccugggagugauu

SEQ ID NO: 575648 - RNA, 22 nt, Human
uaucagaaugcagccaugugca

SEQ ID NO: 575649 - RNA, 22 nt, Human
ggcccuuggagccuccacagug

SEQ ID NO: 575650 - RNA, 22 nt, Human
ucugcauuauuggaaaguccuu

SEQ ID NO: 575651 - RNA, 17 nt, Human
uauugaccuuuguaugu

SEQ ID NO: 575652 - RNA, 22 nt, Human
aacaaugcugaacugaggaaag

SEQ ID NO: 575653 - RNA, 22 nt, Human
agaggcuggauugagcauagac

SEQ ID NO: 575654 - RNA, 22 nt, Human
uugacugugaugggcucagcug

SEQ ID NO: 575655 - RNA, 22 nt, Human
cccacaggcaggugcaugggcu

SEQ ID NO: 575656 - RNA, 22 nt, Human
cuuagcuucauuauugguggcc

SEQ ID NO: 575657 - RNA, 22 nt, Human
cucagggaggcccugggacccu

SEQ ID NO: 575658 - RNA, 22 nt, Human
aucuucaaagcacaucguuugu

SEQ ID NO: 575659 - RNA, 20 nt, Human
ugucagugccugaggcacag

SEQ ID NO: 575660 - RNA, 20 nt, Human
agcuggccuguccuaggccu

SEQ ID NO: 575661 - RNA, 22 nt, Human
cagguucugaggauggugccug

SEQ ID NO: 575662 - RNA, 22 nt, Human
cugccugugauuuuucucuagu

SEQ ID NO: 575663 - RNA, 22 nt, Human
gucuuuuuuacaccuuacauca

SEQ ID NO: 575664 - RNA, 18 nt, Human
ggcaggagcaagaauagg

SEQ ID NO: 575665 - RNA, 22 nt, Human
cugaggcaugaaugugggcuuu

SEQ ID NO: 575666 - RNA, 22 nt, Human
auaauccauuaauuaaugacca

SEQ ID NO: 575667 - RNA, 22 nt, Human
ugguggcuguaagggagagaag

SEQ ID NO: 575668 - RNA, 22 nt, Human
aggguaggguaaaugaugcauc

SEQ ID NO: 575669 - RNA, 22 nt, Human
gaucuuggaauggcacagcuga

SEQ ID NO: 575670 - RNA, 22 nt, Human
ugcacuggggucccagcgcacg

SEQ ID NO: 575671 - RNA, 22 nt, Human
ucuaaagagaguggguacaugu

SEQ ID NO: 575672 - RNA, 22 nt, Human
agauuuauguggucacacucag

SEQ ID NO: 575673 - RNA, 22 nt, Human
uagcugucaccagaaauggcca

SEQ ID NO: 575674 - RNA, 22 nt, Human
acugggaggcaucuggagcuga

SEQ ID NO: 575675 - RNA, 20 nt, Human
agugcaagaaagcacagcug

SEQ ID NO: 575676 - RNA, 22 nt, Human
aaugguaauuugcagaaagucc

SEQ ID NO: 575677 - RNA, 22 nt, Human
agggaagggcagggucuaugca

SEQ ID NO: 575678 - RNA, 22 nt, Human
augagugugaaguuagcucagu

SEQ ID NO: 575679 - RNA, 22 nt, Human
cccuggaggcggagcuugcagu

SEQ ID NO: 575680 - RNA, 22 nt, Human
uuaaauuauugagggauuguca

SEQ ID NO: 575681 - RNA, 22 nt, Human
uccagcucugcuucacagucuc

SEQ ID NO: 575682 - RNA, 22 nt, Human
ccucaggugugggccagcuguc

SEQ ID NO: 575683 - RNA, 22 nt, Human
uaccaaguguauuaugcuuugu

SEQ ID NO: 575684 - RNA, 20 nt, Human
uguaaauaggcauuguaguu

SEQ ID NO: 575685 - RNA, 22 nt, Human
uuuugugacagaaagauuaagu

SEQ ID NO: 575686 - RNA, 22 nt, Human
agccucugggggagcugggagc

SEQ ID NO: 575687 - RNA, 22 nt, Human
ugggccagauccauggcaauaa

SEQ ID NO: 575688 - RNA, 22 nt, Human
auucuuacaaagcagagucugu

SEQ ID NO: 575689 - RNA, 22 nt, Human
uaaugcuuugucagccuaaggg

SEQ ID NO: 575690 - RNA, 22 nt, Human
gagugcagaugaacagaagauu

SEQ ID NO: 575691 - RNA, 22 nt, Human
ccaggcucugagaggaauguga

SEQ ID NO: 575692 - RNA, 22 nt, Human
uccagcuuuuauuggaugagga

SEQ ID NO: 575693 - RNA, 22 nt, Human
auuagugcccaggcugccucuu

SEQ ID NO: 575694 - RNA, 20 nt, Human
acaguguuaguuaucaucuc

SEQ ID NO: 575695 - RNA, 21 nt, Human
uuuauguacuucauagaguag

SEQ ID NO: 575696 - RNA, 22 nt, Human
aauggacaaacuugggaaguau

SEQ ID NO: 575697 - RNA, 22 nt, Human
aguauacauagagauggcuguu

SEQ ID NO: 575698 - RNA, 22 nt, Human
ggugcagugguguggcaaaggg

SEQ ID NO: 575699 - RNA, 22 nt, Human
caggcuugggagcagagccacu

SEQ ID NO: 575700 - RNA, 22 nt, Human
cagcccagccgagggccuggcu

SEQ ID NO: 575701 - RNA, 22 nt, Human
cuggcccagucucagaguguca

SEQ ID NO: 575702 - RNA, 22 nt, Human
aguauaaagugguuuucagcac

SEQ ID NO: 575703 - RNA, 21 nt, Human
gcuguugcccgccgccucuuc

SEQ ID NO: 575704 - RNA, 22 nt, Human
gaggcuggaggucaaagaugaa

SEQ ID NO: 575705 - RNA, 22 nt, Human
aucuuucuaugguacuuucucc

SEQ ID NO: 575706 - RNA, 22 nt, Human
gcucccagguucuugggccuug

SEQ ID NO: 575707 - RNA, 20 nt, Human
cuguuccugucccaugaagc

SEQ ID NO: 575708 - RNA, 19 nt, Human
uuucuguuagaaggauaca

SEQ ID NO: 575709 - RNA, 22 nt, Human
gaugauuucuccauucccuucu

SEQ ID NO: 575710 - RNA, 22 nt, Human
acauacauguaaaggaaauuau

SEQ ID NO: 575711 - RNA, 22 nt, Human
cugcucuucacacuacacccgu

SEQ ID NO: 575712 - RNA, 23 nt, Human
cccaggcuacaaauuaugcucug

SEQ ID NO: 575713 - RNA, 22 nt, Human
ugucccagacacaguaugcgcu

SEQ ID NO: 575714 - RNA, 22 nt, Human
ucaggcagcauuaaacuucagc

SEQ ID NO: 575715 - RNA, 22 nt, Human
gcaaacaugugcucauuuugug

SEQ ID NO: 575716 - RNA, 22 nt, Human
gagucagauugcagacagggcu

SEQ ID NO: 575717 - RNA, 22 nt, Human
gcaauaaacauguuugaugcgc

SEQ ID NO: 575718 - RNA, 17 nt, Human
agaggcagauacuugga

SEQ ID NO: 575719 - RNA, 18 nt, Human
aagauucugcuucucucu

SEQ ID NO: 575720 - RNA, 22 nt, Human
ugggcaggggcccugcuuccgu

SEQ ID NO: 575721 - RNA, 22 nt, Human
agcugugugugcuugggauuau

SEQ ID NO: 575722 - RNA, 22 nt, Human
cuucagcagccucuugcauaaa

SEQ ID NO: 575723 - RNA, 22 nt, Human
aggagguggcugaacuugaggg

SEQ ID NO: 575724 - RNA, 22 nt, Human
agcccaagcuaugaggugaccu

SEQ ID NO: 575725 - RNA, 22 nt, Human
ggcuggagaagggugguugaca

SEQ ID NO: 575726 - RNA, 22 nt, Human
cugugccuaagaugcaugucuc

SEQ ID NO: 575727 - RNA, 22 nt, Human
ugcuccagcaugacccucaaug

SEQ ID NO: 575728 - RNA, 22 nt, Human
ucugaaauguucucuuguuuug

SEQ ID NO: 575729 - RNA, 22 nt, Human
aauagcauguuaauaaccagag

SEQ ID NO: 575730 - RNA, 22 nt, Human
gggacgacaggcucugugguag

SEQ ID NO: 575731 - RNA, 17 nt, Human
aggcuggcucacaggga

SEQ ID NO: 575732 - RNA, 22 nt, Human
ggacaagccucagacaaaacuc

SEQ ID NO: 575733 - RNA, 22 nt, Human
cuguauguuucuaugaauguga

SEQ ID NO: 575734 - RNA, 22 nt, Human
augauacauuuaccuauggucu

SEQ ID NO: 575735 - RNA, 22 nt, Human
cucagccccaauuugcccucuu

SEQ ID NO: 575736 - RNA, 22 nt, Human
gcagacuguaucaaugucagua

SEQ ID NO: 575737 - RNA, 22 nt, Human
ucugggcuuggguagaaaucac

SEQ ID NO: 575738 - RNA, 22 nt, Human
ggccagaggaccucucauagcc

SEQ ID NO: 575739 - RNA, 22 nt, Human
acuauacaccaaaauauuaagg

SEQ ID NO: 575740 - RNA, 22 nt, Human
ucccagggugaaaugcaguagg

SEQ ID NO: 575741 - RNA, 22 nt, Human
uuucacagcauauagguguacu

SEQ ID NO: 575742 - RNA, 23 nt, Human
ccucccaccuauuucacuuucuu

SEQ ID NO: 575743 - RNA, 22 nt, Human
aacuggcauaugaacuuguucu

SEQ ID NO: 575744 - RNA, 18 nt, Human
uguuaaaugaagauuugc

SEQ ID NO: 575745 - RNA, 22 nt, Human
ugucugaaacuuaugauauacu

SEQ ID NO: 575746 - RNA, 22 nt, Human
cuuauuguucagauagagauga

SEQ ID NO: 575747 - RNA, 22 nt, Human
agcaugcugggucauuuuugcc

SEQ ID NO: 575748 - RNA, 22 nt, Human
acuuuaaagcagaauggcuaug

SEQ ID NO: 575749 - RNA, 22 nt, Human
ccugggcucgcgcacuucaccc

SEQ ID NO: 575750 - RNA, 22 nt, Human
cucuugguaagacauuagaggu

SEQ ID NO: 575751 - RNA, 22 nt, Human
uuauugacugaaaugagaguga

SEQ ID NO: 575752 - RNA, 22 nt, Human
cuuauuauggcauguaaguggg

SEQ ID NO: 575753 - RNA, 22 nt, Human
ucgcugaggcugcacggcugcc

SEQ ID NO: 575754 - RNA, 22 nt, Human
cacagcuaggaggaaagcagag

SEQ ID NO: 575755 - RNA, 22 nt, Human
aggggagaaaaaugccuucugu

SEQ ID NO: 575756 - RNA, 22 nt, Human
cacagucaccuuaucaggaugu

SEQ ID NO: 575757 - RNA, 22 nt, Human
gcaaggcugugcacuuugcauu

SEQ ID NO: 575758 - RNA, 22 nt, Human
auuacauauguuggcaacauuu

SEQ ID NO: 575759 - RNA, 22 nt, Human
aagacuuucugggguguaaagg

SEQ ID NO: 575760 - RNA, 22 nt, Human
cuuccuggcucggugccucacc

SEQ ID NO: 575761 - RNA, 22 nt, Human
uuccuaacaaacuucagugaau

SEQ ID NO: 575762 - RNA, 22 nt, Human
acagcagggaauaugggaauug

SEQ ID NO: 575763 - RNA, 22 nt, Human
gucuccacagcccagcugccac

SEQ ID NO: 575764 - RNA, 22 nt, Human
augaaucaaacuguacacugag

SEQ ID NO: 575765 - RNA, 22 nt, Human
auccagagacccaaggacagaa

SEQ ID NO: 575766 - RNA, 22 nt, Human
uccuggaggacagaggcaucuc

SEQ ID NO: 575767 - RNA, 22 nt, Human
gcuggggaccagcugucucuga

SEQ ID NO: 575768 - RNA, 22 nt, Human
agugcucccuagaguugugcaa

SEQ ID NO: 575769 - RNA, 22 nt, Human
aggugaguugguaggaaguuug

SEQ ID NO: 575770 - RNA, 22 nt, Human
gagcugagauuugaagcaaguu

SEQ ID NO: 575771 - RNA, 22 nt, Human
caucuuuaaaaugggaacaaca

SEQ ID NO: 575772 - RNA, 22 nt, Human
uuccuuggaguuaagacccugg

SEQ ID NO: 575773 - RNA, 22 nt, Human
uguggcuccacuccacauuaau

SEQ ID NO: 575774 - RNA, 22 nt, Human
acuguguccuauuuccuugaca

SEQ ID NO: 575775 - RNA, 22 nt, Human
uuuuuggguccaggcuguaucu

SEQ ID NO: 575776 - RNA, 22 nt, Human
ucaaggugcugugcugugcuag

SEQ ID NO: 575777 - RNA, 22 nt, Human
gucugaaaauaugauuuugccu

SEQ ID NO: 575778 - RNA, 22 nt, Human
ugaggcagaguaagauacauga

SEQ ID NO: 575779 - RNA, 22 nt, Human
gcccaggaguugguggcugcag

SEQ ID NO: 575780 - RNA, 22 nt, Human
uguuucauguggacauaguugu

SEQ ID NO: 575781 - RNA, 22 nt, Human
ugccuugacaguuguaagaccu

SEQ ID NO: 575782 - RNA, 22 nt, Human
ccuuccaagugcugcuuuuucc

SEQ ID NO: 575783 - RNA, 22 nt, Human
gcaggcaggagcccaacugccu

SEQ ID NO: 575784 - RNA, 22 nt, Human
acaaauucucuaggcaaggaag

SEQ ID NO: 575785 - RNA, 22 nt, Human
ucucacacuaaugcucuaucag

SEQ ID NO: 575786 - RNA, 22 nt, Human
ucauggggugaauuaguaugcu

SEQ ID NO: 575787 - RNA, 21 nt, Human
cuugucugcaguguuuauagc

SEQ ID NO: 575788 - RNA, 22 nt, Human
caugggcaguuggcagggcuca

SEQ ID NO: 575789 - RNA, 22 nt, Human
cuaucaaacagccauuaauaua

SEQ ID NO: 575790 - RNA, 18 nt, Human
gccuucagacugcaugcu

SEQ ID NO: 575791 - RNA, 22 nt, Human
ucccagaguucaaugggaaggu

SEQ ID NO: 575792 - RNA, 22 nt, Human
agcucugggaguaguuccaccu

SEQ ID NO: 575793 - RNA, 22 nt, Human
ccaggcuuuucucauggaguca

SEQ ID NO: 575794 - RNA, 22 nt, Human
acaaugaccaaaauguuuccag

SEQ ID NO: 575795 - RNA, 22 nt, Human
uaaauuaaagauuggagaagga

SEQ ID NO: 575796 - RNA, 22 nt, Human
cuggagggaggaggcugcuauu

SEQ ID NO: 575797 - RNA, 22 nt, Human
aagcauuguaagcagaagaugc

SEQ ID NO: 575798 - RNA, 22 nt, Human
uuccugggaggcuguguacuug

SEQ ID NO: 575799 - RNA, 22 nt, Human
acauaacaaucauaggacauag

SEQ ID NO: 575800 - RNA, 22 nt, Human
acaggccucaagacacccaggu

SEQ ID NO: 575801 - RNA, 22 nt, Human
gagguuguuucaacaguagucu

SEQ ID NO: 575802 - RNA, 22 nt, Human
ugcagauucaaaugaaaugcaa

SEQ ID NO: 575803 - RNA, 22 nt, Human
agguggggugagcugcagacua

SEQ ID NO: 575804 - RNA, 19 nt, Human
aaggcugguaccauagguu

SEQ ID NO: 575805 - RNA, 22 nt, Human
uuaauuuuuauguauagugugu

SEQ ID NO: 575806 - RNA, 22 nt, Human
agagguuucuuaggggcuuccu

SEQ ID NO: 575807 - RNA, 22 nt, Human
aauaacaggcucaucagaugcu

SEQ ID NO: 575808 - RNA, 22 nt, Human
uccugggaagagaccugagcau

SEQ ID NO: 575809 - RNA, 22 nt, Human
ggggcagauggaacagagcaca

SEQ ID NO: 575810 - RNA, 22 nt, Human
agacccaggauuggggcugccg

SEQ ID NO: 575811 - RNA, 22 nt, Human
ccagcuggcaggagagucaggg

SEQ ID NO: 575812 - RNA, 22 nt, Human
uuuauacuccacucugcaagcg

SEQ ID NO: 575813 - RNA, 23 nt, Human
cagaggcaucggauucaacauca

SEQ ID NO: 575814 - RNA, 22 nt, Human
uggaagggguuacgcagcagga

SEQ ID NO: 575815 - RNA, 22 nt, Human
aagcaaaggcaggagcuuguga

SEQ ID NO: 575816 - RNA, 22 nt, Human
agcucucuuccagauccacuug

SEQ ID NO: 575817 - RNA, 21 nt, Human
gggugggguuccagccuuuuc

SEQ ID NO: 575818 - RNA, 22 nt, Human
gcuuagcaucuuacaaugcuga

SEQ ID NO: 575819 - RNA, 22 nt, Human
agaauacaucaaucuauuuucu

SEQ ID NO: 575820 - RNA, 22 nt, Human
agcugaggcucugagagggaag

SEQ ID NO: 575821 - RNA, 22 nt, Human
cucaggaugcaggucacaggac

SEQ ID NO: 575822 - RNA, 21 nt, Human
ugcagaggcacaaacaagccc

SEQ ID NO: 575823 - RNA, 23 nt, Human
aucuccugagaacccacaguggu

SEQ ID NO: 575824 - RNA, 22 nt, Human
cucaucuguauauagugaauga

SEQ ID NO: 575825 - RNA, 22 nt, Human
ccucuggccagagaaaggccag

SEQ ID NO: 575826 - RNA, 18 nt, Human
cggcagagugcuucuagc

SEQ ID NO: 575827 - RNA, 22 nt, Human
ccuggagggcgccgcacagucc

SEQ ID NO: 575828 - RNA, 22 nt, Human
acauacauugccucauugguaa

SEQ ID NO: 575829 - RNA, 21 nt, Human
ggaggucccuucugguuucag

SEQ ID NO: 575830 - RNA, 18 nt, Human
uucaccagugugaugggu

SEQ ID NO: 575831 - RNA, 22 nt, Human
caauuugcccuguuaaauuuuc

SEQ ID NO: 575832 - RNA, 19 nt, Human
uuugaaagaguuuuauugg

SEQ ID NO: 575833 - RNA, 22 nt, Human
aaggccaccaccagcgaggggg

SEQ ID NO: 575834 - RNA, 22 nt, Human
gggccuguguguucaggagccu

SEQ ID NO: 575835 - RNA, 22 nt, Human
uuuguaugugauaagacuauuc

SEQ ID NO: 575836 - RNA, 22 nt, Human
cuuaguuuagguaaacccagca

SEQ ID NO: 575837 - RNA, 22 nt, Human
cucagcacuuuggaaggcugau

SEQ ID NO: 575838 - RNA, 22 nt, Human
ugcuccuguuucaucagcuaua

SEQ ID NO: 575839 - RNA, 22 nt, Human
aacagaaugcaggggaugcugc

SEQ ID NO: 575840 - RNA, 22 nt, Human
ucacugcuauauuggauacuga

SEQ ID NO: 575841 - RNA, 22 nt, Human
ugcaaggcugccucugaggacc

SEQ ID NO: 575842 - RNA, 22 nt, Human
uucuacaugagaaaauguauuu

SEQ ID NO: 575843 - RNA, 19 nt, Human
gacuucugauguccagaug

SEQ ID NO: 575844 - RNA, 22 nt, Human
ucugaacauccuacaacauuuu

SEQ ID NO: 575845 - RNA, 23 nt, Human
aggaggccugaaacugaggcuga

SEQ ID NO: 575846 - RNA, 22 nt, Human
aagcagaugccaagauuuacca

SEQ ID NO: 575847 - RNA, 22 nt, Human
ggagaugguggaagcuggugca

SEQ ID NO: 575848 - RNA, 22 nt, Human
uacauuguuuuuucuugccauc

SEQ ID NO: 575849 - RNA, 22 nt, Human
uuguccugugucuguuuggauu

SEQ ID NO: 575850 - RNA, 22 nt, Human
ugagcaggacucacugcagccu

SEQ ID NO: 575851 - RNA, 22 nt, Human
gaugaggaaaccaaggcucagg

SEQ ID NO: 575852 - RNA, 22 nt, Human
cagggcuccccgcaccgcagcc

SEQ ID NO: 575853 - RNA, 22 nt, Human
uccaggagagguguggggacug

SEQ ID NO: 575854 - RNA, 22 nt, Human
acuguucauuuggauuucucug

SEQ ID NO: 575855 - RNA, 22 nt, Human
ggucuggaagcgucccaaaggu

SEQ ID NO: 575856 - RNA, 22 nt, Human
uuucauaaugucacagucaaaa

SEQ ID NO: 575857 - RNA, 22 nt, Human
auuuguucagcauugaauuugg

SEQ ID NO: 575858 - RNA, 22 nt, Human
uugaggucuucauucuugggca

SEQ ID NO: 575859 - RNA, 21 nt, Human
cucuccagguaggauaaaugu

SEQ ID NO: 575860 - RNA, 19 nt, Human
aguggcugggcagaagcaa

SEQ ID NO: 575861 - RNA, 21 nt, Human
aagcaggcuguaaucaugugg

SEQ ID NO: 575862 - RNA, 22 nt, Human
auacauauccacaggagauaaa

SEQ ID NO: 575863 - RNA, 22 nt, Human
acaaagauaagucagaaaguca

SEQ ID NO: 575864 - RNA, 22 nt, Human
gcucugggaacugacugccuuc

SEQ ID NO: 575865 - RNA, 22 nt, Human
uggcccugaggacccagugugg

SEQ ID NO: 575866 - RNA, 22 nt, Human
ccaggagagcaggcgugcagcu

SEQ ID NO: 575867 - RNA, 22 nt, Human
ucuuaacugacaguuuaauggg

SEQ ID NO: 575868 - RNA, 22 nt, Human
ugcagaaauaacucauauugca

SEQ ID NO: 575869 - RNA, 22 nt, Human
aggcugaggcggguagaucacc

SEQ ID NO: 575870 - RNA, 22 nt, Human
ucuuaguuguuugcugucuaac

SEQ ID NO: 575871 - RNA, 20 nt, Human
acacaugucaagcuaaaggc

SEQ ID NO: 575872 - RNA, 21 nt, Human
ugauuucugccaaguucacua

SEQ ID NO: 575873 - RNA, 22 nt, Human
cugccuagauuugaauccuggc

SEQ ID NO: 575874 - RNA, 22 nt, Human
acccaggggcagccuugcugug

SEQ ID NO: 575875 - RNA, 22 nt, Human
cucuucauuaguuccuguccca

SEQ ID NO: 575876 - RNA, 22 nt, Human
gagcagcagguggggcuggcuu

SEQ ID NO: 575877 - RNA, 22 nt, Human
cacuuucuguguaucuuccauu

SEQ ID NO: 575878 - RNA, 22 nt, Human
ugugauuucaucugaggccagg

SEQ ID NO: 575879 - RNA, 22 nt, Human
auggcagaaagaauagaggcua

SEQ ID NO: 575880 - RNA, 19 nt, Human
auucucccuagaauuuuga

SEQ ID NO: 575881 - RNA, 22 nt, Human
cacaugcuagaauaaaucucca

SEQ ID NO: 575882 - RNA, 22 nt, Human
ucacaaauagcuauauuaagga

SEQ ID NO: 575883 - RNA, 22 nt, Human
aacauguaucgcuuuuuaauau

SEQ ID NO: 575884 - RNA, 22 nt, Human
cugcaggacugaaagaugaggu

SEQ ID NO: 575885 - RNA, 22 nt, Human
uuugugaauagguuggcuucca

SEQ ID NO: 575886 - RNA, 21 nt, Human
gaacaggaaaagcuggcuuca

SEQ ID NO: 575887 - RNA, 22 nt, Human
agcugcugggauacaguaguga

SEQ ID NO: 575888 - RNA, 22 nt, Human
ucucacagugagccugaggucg

SEQ ID NO: 575889 - RNA, 22 nt, Human
uguguucauguauguauacaua

SEQ ID NO: 575890 - RNA, 22 nt, Human
cugugccuuuguagcugugccu

SEQ ID NO: 575891 - RNA, 21 nt, Human
gccucuccaaauccugccuuc

SEQ ID NO: 575892 - RNA, 22 nt, Human
cauuagcagucauuacugugcu

SEQ ID NO: 575893 - RNA, 22 nt, Human
aggcuggaguacaguggcuauu

SEQ ID NO: 575894 - RNA, 19 nt, Human
aucugaaguaggugcagcu

SEQ ID NO: 575895 - RNA, 22 nt, Human
ugacugaaauugcauuuuaaaa

SEQ ID NO: 575896 - RNA, 22 nt, Human
gugcuuuuccuuauuuggugcu

SEQ ID NO: 575897 - RNA, 22 nt, Human
cagcagccuggagggggccacg

SEQ ID NO: 575898 - RNA, 22 nt, Human
uaaagauaagacaucaacugag

SEQ ID NO: 575899 - RNA, 22 nt, Human
auauucacugagcauaaagcca

SEQ ID NO: 575900 - RNA, 22 nt, Human
gcucccagaaccaaggcugggg

SEQ ID NO: 575901 - RNA, 22 nt, Human
cagguggagcugacugagggca

SEQ ID NO: 575902 - RNA, 22 nt, Human
cccaggagauggagguugcagu

SEQ ID NO: 575903 - RNA, 22 nt, Human
ugcagggacacgaagacaaaua

SEQ ID NO: 575904 - RNA, 22 nt, Human
guuuauaaggcccaauauuucu

SEQ ID NO: 575905 - RNA, 22 nt, Human
acugccuggcagagguuugcaa

SEQ ID NO: 575906 - RNA, 19 nt, Human
ucucuggcuugucugccug

SEQ ID NO: 575907 - RNA, 22 nt, Human
cugcugcucgaccagucccagg

SEQ ID NO: 575908 - RNA, 22 nt, Human
ucuguaaaacaauauuguauuc

SEQ ID NO: 575909 - RNA, 21 nt, Human
guucaaauggguagauucaca

SEQ ID NO: 575910 - RNA, 22 nt, Human
agcuccaggcagcauuaauaaa

SEQ ID NO: 575911 - RNA, 22 nt, Human
uucacagaugagaaaauugagg

SEQ ID NO: 575912 - RNA, 22 nt, Human
ccagcagagucuaggaaggagg

SEQ ID NO: 575913 - RNA, 22 nt, Human
gucuggaggggagauuuggguu

SEQ ID NO: 575914 - RNA, 22 nt, Human
aguguagacauaggucuggucu

SEQ ID NO: 575915 - RNA, 19 nt, Human
ccugaggugggguggaagg

SEQ ID NO: 575916 - RNA, 20 nt, Human
agggcccaggaagagaguua

SEQ ID NO: 575917 - RNA, 22 nt, Human
acaggucaacgagagcaggcaa

SEQ ID NO: 575918 - RNA, 22 nt, Human
augucucagaguggucacuggg

SEQ ID NO: 575919 - RNA, 22 nt, Human
cuggagcuaauaauccaucuga

SEQ ID NO: 575920 - RNA, 22 nt, Human
acacuuugauagauaaugcagg

SEQ ID NO: 575921 - RNA, 22 nt, Human
augaggcacguguuacuggccu

SEQ ID NO: 575922 - RNA, 22 nt, Human
ggagggaguuucauuccugccc

SEQ ID NO: 575923 - RNA, 22 nt, Human
uuguguguacugguuaugggca

SEQ ID NO: 575924 - RNA, 22 nt, Human
auagaauuauggaaagcaucuu

SEQ ID NO: 575925 - RNA, 22 nt, Human
acccagggcagccagcggggag

SEQ ID NO: 575926 - RNA, 22 nt, Human
acauucuuaacaguuaaaaacu

SEQ ID NO: 575927 - RNA, 22 nt, Human
ucagaggagaugguuaccaggg

SEQ ID NO: 575928 - RNA, 22 nt, Human
cacagagaaaauguuggugcuu

SEQ ID NO: 575929 - RNA, 22 nt, Human
gcugcaacuguugcucucugca

SEQ ID NO: 575930 - RNA, 22 nt, Human
guggaauugcuggauaauauca

SEQ ID NO: 575931 - RNA, 22 nt, Human
ugucuacuccugugcuagcucc

SEQ ID NO: 575932 - RNA, 22 nt, Human
ccaggagauaagcugaguuuau

SEQ ID NO: 575933 - RNA, 22 nt, Human
aauuuccugggauaaaaagcca

SEQ ID NO: 575934 - RNA, 22 nt, Human
cccaggacucuucacugcagcc

SEQ ID NO: 575935 - RNA, 22 nt, Human
ccuccauguaaagguccccuca

SEQ ID NO: 575936 - RNA, 22 nt, Human
ggcugaaguguaguggcucacu

SEQ ID NO: 575937 - RNA, 22 nt, Human
cccaaggcugcagugagcauga

SEQ ID NO: 575938 - RNA, 22 nt, Human
ccagcagguguagggcucaugg

SEQ ID NO: 575939 - RNA, 22 nt, Human
guugaggaggcacucacuguca

SEQ ID NO: 575940 - RNA, 22 nt, Human
cagggcuggcuguggcaaucuc

SEQ ID NO: 575941 - RNA, 22 nt, Human
ucaugcaggacuuacaagagau

SEQ ID NO: 575942 - RNA, 22 nt, Human
acaggaaauuggcauaucaguu

SEQ ID NO: 575943 - RNA, 22 nt, Human
augcugugucaccuuaggauuu

SEQ ID NO: 575944 - RNA, 22 nt, Human
gauuuuauagucaggaaaaaga

SEQ ID NO: 575945 - RNA, 17 nt, Human
ucuguuucuccuuucuu

SEQ ID NO: 575946 - RNA, 22 nt, Human
ucagcugaguucuagagcacuc

SEQ ID NO: 575947 - RNA, 22 nt, Human
cugauauucauuauggagcucc

SEQ ID NO: 575948 - RNA, 23 nt, Human
aaacuacauuuauaguuuuucuc

SEQ ID NO: 575949 - RNA, 22 nt, Human
cugggaguuucuagagaaagac

SEQ ID NO: 575950 - RNA, 22 nt, Human
aggcacagguggacuucacagu

SEQ ID NO: 575951 - RNA, 22 nt, Human
cucagaaacggagcugccauuu

SEQ ID NO: 575952 - RNA, 22 nt, Human
aucuacaggauaguuuaauauu

SEQ ID NO: 575953 - RNA, 22 nt, Human
augcauauagaacauuugacau

SEQ ID NO: 575954 - RNA, 22 nt, Human
uugcaaaucuuugccagaaggc

SEQ ID NO: 575955 - RNA, 18 nt, Human
agugugugcccuuucagg

SEQ ID NO: 575956 - RNA, 22 nt, Human
ccacaguccgggcuggcaggac

SEQ ID NO: 575957 - RNA, 22 nt, Human
uaugaacauguucauugacuua

SEQ ID NO: 575958 - RNA, 22 nt, Human
aguguugucaaacggcucagca

SEQ ID NO: 575959 - RNA, 22 nt, Human
gaaggaggucugcauucuacag

SEQ ID NO: 575960 - RNA, 22 nt, Human
uugccucaagauuuuuuauuga

SEQ ID NO: 575961 - RNA, 22 nt, Human
acacagguuaaaauaauuggga

SEQ ID NO: 575962 - RNA, 22 nt, Human
aguaaauaacagagaaaauggg

SEQ ID NO: 575963 - RNA, 22 nt, Human
cacucugagaaguacaagcucc

SEQ ID NO: 575964 - RNA, 22 nt, Human
cuucucuugguaguucuuguug

SEQ ID NO: 575965 - RNA, 22 nt, Human
uaguuucuagacaguaagaauu

SEQ ID NO: 575966 - RNA, 23 nt, Human
gccucuggagccccagugcucag

SEQ ID NO: 575967 - RNA, 22 nt, Human
cugaggcugaagagggccuacg

SEQ ID NO: 575968 - RNA, 20 nt, Human
acaugaaaggaaacaggaaa

SEQ ID NO: 575969 - RNA, 22 nt, Human
uccagcucuuguugcccacugc

SEQ ID NO: 575970 - RNA, 22 nt, Human
uaugcauauguguucauuggag

SEQ ID NO: 575971 - RNA, 22 nt, Human
gaagucuuuuagcaaaacgaac

SEQ ID NO: 575972 - RNA, 22 nt, Human
ugggaaaguguugaggugucuu

SEQ ID NO: 575973 - RNA, 22 nt, Human
acagaccaaaaaaggauauugg

SEQ ID NO: 575974 - RNA, 22 nt, Human
caagcuuguuucuccugggggu

SEQ ID NO: 575975 - RNA, 22 nt, Human
caggcagaaaguauucugugua

SEQ ID NO: 575976 - RNA, 20 nt, Human
agguccugguucucugggau

SEQ ID NO: 575977 - RNA, 22 nt, Human
aauuugcaugaugagaacaaua

SEQ ID NO: 575978 - RNA, 22 nt, Human
ucaggugggcaguggguugagc

SEQ ID NO: 575979 - RNA, 22 nt, Human
cuuuuacaguggaccugccauu

SEQ ID NO: 575980 - RNA, 22 nt, Human
ucuaguuagugguugauacugu

SEQ ID NO: 575981 - RNA, 22 nt, Human
aaucauucucaugccaguuucc

SEQ ID NO: 575982 - RNA, 22 nt, Human
aacacugaaacauugauugaca

SEQ ID NO: 575983 - RNA, 22 nt, Human
uacaguaagaugaaauagcaau

SEQ ID NO: 575984 - RNA, 22 nt, Human
ugagguaguucuaauauuaaag

SEQ ID NO: 575985 - RNA, 22 nt, Human
agucccaacagcuuacaaggaa

SEQ ID NO: 575986 - RNA, 20 nt, Human
ucaucagauagguuaguaca

SEQ ID NO: 575987 - RNA, 22 nt, Human
uaccaaaagcuuguuucauaca

SEQ ID NO: 575988 - RNA, 22 nt, Human
cugggcacuugcucacagcucu

SEQ ID NO: 575989 - RNA, 19 nt, Human
ucuuuucacgcauuuugaa

SEQ ID NO: 575990 - RNA, 22 nt, Human
aaggcuggguaaccuguccacu

SEQ ID NO: 575991 - RNA, 22 nt, Human
gcugccugcucacccggccugg

SEQ ID NO: 575992 - RNA, 22 nt, Human
agucucuuuaaucacagugucu

SEQ ID NO: 575993 - RNA, 22 nt, Human
agggcugggcugcuuguuguca

SEQ ID NO: 575994 - RNA, 22 nt, Human
ugagacaguucugcagcugggu

SEQ ID NO: 575995 - RNA, 22 nt, Human
agggccuggcuucacuuucuca

SEQ ID NO: 575996 - RNA, 22 nt, Human
cacacagcucaggggcacugcc

SEQ ID NO: 575997 - RNA, 22 nt, Human
cugguggggaguccuggucucc

SEQ ID NO: 575998 - RNA, 22 nt, Human
acaugaaaacugguuccuucag

SEQ ID NO: 575999 - RNA, 22 nt, Human
ugaucagacaguuaugugcaug

SEQ ID NO: 576000 - RNA, 22 nt, Human
ccccagggucaguguguggagg

SEQ ID NO: 576001 - RNA, 22 nt, Human
ucccccacucuaaaggagccuu

SEQ ID NO: 576002 - RNA, 20 nt, Human
caggugagcagaucugggug

SEQ ID NO: 576003 - RNA, 22 nt, Human
uuuccuucuuagcgguguucuu

SEQ ID NO: 576004 - RNA, 17 nt, Human
uggcaagaauggaaaug

SEQ ID NO: 576005 - RNA, 22 nt, Human
agaugcugucacacacacuguu

SEQ ID NO: 576006 - RNA, 22 nt, Human
agagcagauggagcuggaagag

SEQ ID NO: 576007 - RNA, 22 nt, Human
aaggaucaaguggauuuucuua

SEQ ID NO: 576008 - RNA, 22 nt, Human
ccuguuugguacaaucugccaa

SEQ ID NO: 576009 - RNA, 22 nt, Human
cuuuagguuuugccugagaucu

SEQ ID NO: 576010 - RNA, 20 nt, Human
aaacauaguggauaccacag

SEQ ID NO: 576011 - RNA, 22 nt, Human
aucacauuguuagcauagacug

SEQ ID NO: 576012 - RNA, 22 nt, Human
gugccugcugcagagucgcugu

SEQ ID NO: 576013 - RNA, 22 nt, Human
ucaaaauucuagggagaauggu

SEQ ID NO: 576014 - RNA, 22 nt, Human
ugaaagaugcucaaugaauggu

SEQ ID NO: 576015 - RNA, 19 nt, Human
auuuccaagaauuggagag

SEQ ID NO: 576016 - RNA, 22 nt, Human
cauucuuauauuuacucauuca

SEQ ID NO: 576017 - RNA, 22 nt, Human
gagugcuguaggacugagcccu

SEQ ID NO: 576018 - RNA, 23 nt, Human
agugcugaauugaaagcuccagg

SEQ ID NO: 576019 - RNA, 22 nt, Human
uagaaacagagagauaugcccc

SEQ ID NO: 576020 - RNA, 22 nt, Human
ucugggguggagcccuggaguc

SEQ ID NO: 576021 - RNA, 22 nt, Human
agagauugugcuacucacccaa

SEQ ID NO: 576022 - RNA, 22 nt, Human
uucaaaagacucagauguagcg

SEQ ID NO: 576023 - RNA, 22 nt, Human
gcuggccugagggccgaggcuc

SEQ ID NO: 576024 - RNA, 22 nt, Human
aucaggaagaagaauguguugg

SEQ ID NO: 576025 - RNA, 22 nt, Human
uagcaggguuuugaagaggguu

SEQ ID NO: 576026 - RNA, 22 nt, Human
uuuucuguuuacagagggaccu

SEQ ID NO: 576027 - RNA, 22 nt, Human
cugccagggcauccuguggugg

SEQ ID NO: 576028 - RNA, 22 nt, Human
ucuguucaugucuuuuuaagug

SEQ ID NO: 576029 - RNA, 19 nt, Human
aucacaugucaagagcagg

SEQ ID NO: 576030 - RNA, 22 nt, Human
aggaagugcuaagagaacauca

SEQ ID NO: 576031 - RNA, 22 nt, Human
caggggccaggcugucugcugu

SEQ ID NO: 576032 - RNA, 22 nt, Human
ugccuuuuccaguuucuagggg

SEQ ID NO: 576033 - RNA, 22 nt, Human
gccaggcucuuccauuuggguc

SEQ ID NO: 576034 - RNA, 22 nt, Human
gccaguggucagugggagggug

SEQ ID NO: 576035 - RNA, 19 nt, Human
aaugcuuaggacagugccu

SEQ ID NO: 576036 - RNA, 23 nt, Human
ucuuuccuaaugaaacagugaaa

SEQ ID NO: 576037 - RNA, 22 nt, Human
cagcacagcugaggggcugucu

SEQ ID NO: 576038 - RNA, 22 nt, Human
uccaggcaugguguaauuuugc

SEQ ID NO: 576039 - RNA, 22 nt, Human
gccucccugagucacccaagca

SEQ ID NO: 576040 - RNA, 22 nt, Human
cucaggagaugacagaagguau

SEQ ID NO: 576041 - RNA, 22 nt, Human
cacacugucagguaaauaacac

SEQ ID NO: 576042 - RNA, 18 nt, Human
ugcagcaagugcuaaaua

SEQ ID NO: 576043 - RNA, 22 nt, Human
ucugucacucuagagauggcag

SEQ ID NO: 576044 - RNA, 22 nt, Human
cagaugcuaaguuaucagcagg

SEQ ID NO: 576045 - RNA, 22 nt, Human
gacaaagcagacaagauaauuc

SEQ ID NO: 576046 - RNA, 22 nt, Human
gugagggguggcugagcaguuu

SEQ ID NO: 576047 - RNA, 22 nt, Human
gagaaggcuggucuuaagucga

SEQ ID NO: 576048 - RNA, 22 nt, Human
gacucucaagcacaaguccacc

SEQ ID NO: 576049 - RNA, 22 nt, Human
cauuguuaccaucuuuuaccua

SEQ ID NO: 576050 - RNA, 22 nt, Human
uucuuucaauagcuggcauaug

SEQ ID NO: 576051 - RNA, 22 nt, Human
agcuccuguaguacauauuauu

SEQ ID NO: 576052 - RNA, 22 nt, Human
ggugugccuggggcuuagcugc

SEQ ID NO: 576053 - RNA, 22 nt, Human
cucagaaaucccacucugugua

SEQ ID NO: 576054 - RNA, 22 nt, Human
acuguauaaggcauagguaagc

SEQ ID NO: 576055 - RNA, 22 nt, Human
ucacaauucagaaaccaaguag

SEQ ID NO: 576056 - RNA, 22 nt, Human
auucagcauuggcaccauggau

SEQ ID NO: 576057 - RNA, 22 nt, Human
ugucaauuaugugacacaucuu

SEQ ID NO: 576058 - RNA, 22 nt, Human
agucauuucuguagucauguuu

SEQ ID NO: 576059 - RNA, 22 nt, Human
agauucauugcuuuaggcauug

SEQ ID NO: 576060 - RNA, 22 nt, Human
ucacauuucugauuauaccaaa

SEQ ID NO: 576061 - RNA, 22 nt, Human
cuccagguuuuacaaggucuau

SEQ ID NO: 576062 - RNA, 22 nt, Human
uaagcuauuccugaagaagguu

SEQ ID NO: 576063 - RNA, 22 nt, Human
ccucugcugcuguugagcaccg

SEQ ID NO: 576064 - RNA, 22 nt, Human
ucuuauuguuuaaaaguacaca

SEQ ID NO: 576065 - RNA, 22 nt, Human
ucugggucuggcugcuggugca

SEQ ID NO: 576066 - RNA, 22 nt, Human
ugacacugcauauauugaaguu

SEQ ID NO: 576067 - RNA, 22 nt, Human
gaaggagggagcggcgcggauu

SEQ ID NO: 576068 - RNA, 22 nt, Human
ugcucuguucaguguaucuugu

SEQ ID NO: 576069 - RNA, 22 nt, Human
auuuacuuugcugagauccauc

SEQ ID NO: 576070 - RNA, 22 nt, Human
ugcugccacaaauucagcugcc

SEQ ID NO: 576071 - RNA, 22 nt, Human
uuuguacaccuaccuaauacag

SEQ ID NO: 576072 - RNA, 22 nt, Human
uacagcuuauccagcuugauag

SEQ ID NO: 576073 - RNA, 22 nt, Human
caggccucgaggagacagcuac

SEQ ID NO: 576074 - RNA, 17 nt, Human
gacaggcucagugacga

SEQ ID NO: 576075 - RNA, 22 nt, Human
accuugaacacaagaauuauug

SEQ ID NO: 576076 - RNA, 22 nt, Human
ccuuagcaacugucauagagca

SEQ ID NO: 576077 - RNA, 22 nt, Human
gagucaacaagucagaucucac

SEQ ID NO: 576078 - RNA, 19 nt, Human
caguggccuggaggucucu

SEQ ID NO: 576079 - RNA, 22 nt, Human
agggaugauuucagugucugcc

SEQ ID NO: 576080 - RNA, 22 nt, Human
gagacagaguuucacucuuguu

SEQ ID NO: 576081 - RNA, 22 nt, Human
uggcagcuuccugcucauagga

SEQ ID NO: 576082 - RNA, 22 nt, Human
cugcucugacccuuucaccuuc

SEQ ID NO: 576083 - RNA, 22 nt, Human
guacauguugguuguuuccagu

SEQ ID NO: 576084 - RNA, 23 nt, Human
aaugcuggaaauucaggcaugau

SEQ ID NO: 576085 - RNA, 22 nt, Human
cagcaggggaacugugggccag

SEQ ID NO: 576086 - RNA, 22 nt, Human
ggcccuguccuggcugucuccg

SEQ ID NO: 576087 - RNA, 22 nt, Human
agggcccuggggugcacugaca

SEQ ID NO: 576088 - RNA, 20 nt, Human
gcugccuguuucuguaagua

SEQ ID NO: 576089 - RNA, 22 nt, Human
uuuuuccuagcgauuugucagc

SEQ ID NO: 576090 - RNA, 22 nt, Human
agcugggcugggcugagcugag

SEQ ID NO: 576091 - RNA, 22 nt, Human
aggagguguugauagaagguuu

SEQ ID NO: 576092 - RNA, 22 nt, Human
ucaugcaggcagccuuuaguaa

SEQ ID NO: 576093 - RNA, 22 nt, Human
gacaggcaugcuuucaggacua

SEQ ID NO: 576094 - RNA, 22 nt, Human
gaguucugaacugugaaaugca

SEQ ID NO: 576095 - RNA, 22 nt, Human
caaauaguaugagcaaugauuc

SEQ ID NO: 576096 - RNA, 22 nt, Human
ccaggaggcaauaucaagucca

SEQ ID NO: 576097 - RNA, 22 nt, Human
aaacaagguccuucugugacau

SEQ ID NO: 576098 - RNA, 22 nt, Human
acgcccggucuccauaguuuuu

SEQ ID NO: 576099 - RNA, 22 nt, Human
gcaggagcugcucuccugacga

SEQ ID NO: 576100 - RNA, 22 nt, Human
uacaaugcauucauuuuugagg

SEQ ID NO: 576101 - RNA, 22 nt, Human
uuccuggggugaagauauuuuu

SEQ ID NO: 576102 - RNA, 21 nt, Human
gcucaugguggagaaaagcag

SEQ ID NO: 576103 - RNA, 22 nt, Human
cugugccuuggcgcugugccac

SEQ ID NO: 576104 - RNA, 22 nt, Human
acacuucuuugucaccugcuuc

SEQ ID NO: 576105 - RNA, 17 nt, Human
aauagcugcucagagag

SEQ ID NO: 576106 - RNA, 19 nt, Human
cuccucagucccagagguc

SEQ ID NO: 576107 - RNA, 22 nt, Human
ucuauuugcugguugcuucugu

SEQ ID NO: 576108 - RNA, 22 nt, Human
augagcccuggaggcauuuuuu

SEQ ID NO: 576109 - RNA, 18 nt, Human
uggugaaggguggaggag

SEQ ID NO: 576110 - RNA, 22 nt, Human
agcugcucucacuggacgccug

SEQ ID NO: 576111 - RNA, 22 nt, Human
uggcucagccagcccuaggaac

SEQ ID NO: 576112 - RNA, 22 nt, Human
aauaauauuugaagcuucaaag

SEQ ID NO: 576113 - RNA, 22 nt, Human
aggcucugguucaucaugaugg

SEQ ID NO: 576114 - RNA, 22 nt, Human
aaauaaguuagcagauuccagu

SEQ ID NO: 576115 - RNA, 22 nt, Human
ccaggcuggauuuugcaguuca

SEQ ID NO: 576116 - RNA, 22 nt, Human
uuucuauaacuggacuggauug

SEQ ID NO: 576117 - RNA, 22 nt, Human
cacugcccaggaccugccaccc

SEQ ID NO: 576118 - RNA, 22 nt, Human
agaaaugugagccccuuaucaa

SEQ ID NO: 576119 - RNA, 22 nt, Human
ugagccuggcggaagcagcgug

SEQ ID NO: 576120 - RNA, 23 nt, Human
gucuuuauaguggggcacuuugu

SEQ ID NO: 576121 - RNA, 22 nt, Human
agacagcauggagcugauaaca

SEQ ID NO: 576122 - RNA, 22 nt, Human
gaaauauucuugucuuguuuuc

SEQ ID NO: 576123 - RNA, 22 nt, Human
agacacugccacuucuguuccc

SEQ ID NO: 576124 - RNA, 22 nt, Human
ugucuccaggggcaggccagcc

SEQ ID NO: 576125 - RNA, 22 nt, Human
ggcuuugggauucagcaugaga

SEQ ID NO: 576126 - RNA, 22 nt, Human
aagggcagagggaaucccacau

SEQ ID NO: 576127 - RNA, 23 nt, Human
ugggaagauauguauguucaagg

SEQ ID NO: 576128 - RNA, 22 nt, Human
auugaagauuaaaugcuuccuu

SEQ ID NO: 576129 - RNA, 22 nt, Human
aaagcaugauuagauagaugau

SEQ ID NO: 576130 - RNA, 22 nt, Human
uagaaacauucaguugcagucc

SEQ ID NO: 576131 - RNA, 20 nt, Human
ugccuuuccuguuucaucuu

SEQ ID NO: 576132 - RNA, 19 nt, Human
aggaaagguggccuuagca

SEQ ID NO: 576133 - RNA, 22 nt, Human
uggcugaguaaguugugauaug

SEQ ID NO: 576134 - RNA, 22 nt, Human
gcuccacuugcagcuaggcuug

SEQ ID NO: 576135 - RNA, 22 nt, Human
acacugcuucucuggcagagcc

SEQ ID NO: 576136 - RNA, 21 nt, Human
ggggucaagugaaugguguug

SEQ ID NO: 576137 - RNA, 22 nt, Human
ugcugcugaugcauagucugcu

SEQ ID NO: 576138 - RNA, 22 nt, Human
acauaauagcauuucuaauuug

SEQ ID NO: 576139 - RNA, 22 nt, Human
caguuacauaaaugauaaaaug

SEQ ID NO: 576140 - RNA, 22 nt, Human
uggggugguaauacaccguucu

SEQ ID NO: 576141 - RNA, 22 nt, Human
ggacggggagcuggaaagggga

SEQ ID NO: 576142 - RNA, 22 nt, Human
acuuucuauucccacagagaua

SEQ ID NO: 576143 - RNA, 22 nt, Human
gcaucccucugaggggccaggc

SEQ ID NO: 576144 - RNA, 18 nt, Human
acacaggcugacagcacc

SEQ ID NO: 576145 - RNA, 22 nt, Human
caggcccuccugugaucugccu

SEQ ID NO: 576146 - RNA, 22 nt, Human
ccuggcugcugucacugaccau

SEQ ID NO: 576147 - RNA, 22 nt, Human
uccaggccacgaccuccuggau

SEQ ID NO: 576148 - RNA, 20 nt, Human
gcauugaguauagacagaug

SEQ ID NO: 576149 - RNA, 20 nt, Human
ugagccagucaagcuacauu

SEQ ID NO: 576150 - RNA, 22 nt, Human
ggaggccaguccuggccgggcu

SEQ ID NO: 576151 - RNA, 22 nt, Human
gucugagggguuucccaggaca

SEQ ID NO: 576152 - RNA, 22 nt, Human
ggcuccaggagggccuuggcca

SEQ ID NO: 576153 - RNA, 22 nt, Human
caggaacaugucuccaauuaga

SEQ ID NO: 576154 - RNA, 22 nt, Human
auuuagaagcuaauuuuucaga

SEQ ID NO: 576155 - RNA, 21 nt, Human
aggugggcagguggaguggcc

SEQ ID NO: 576156 - RNA, 22 nt, Human
uuuuaacuuaaaauacauagau

SEQ ID NO: 576157 - RNA, 22 nt, Human
ccccagcugcauacuugccaag

SEQ ID NO: 576158 - RNA, 20 nt, Human
ucuucuguugccuuguucug

SEQ ID NO: 576159 - RNA, 22 nt, Human
ccagcucucuguccuccccaca

SEQ ID NO: 576160 - RNA, 22 nt, Human
guggagcaggacuagcugagaa

SEQ ID NO: 576161 - RNA, 22 nt, Human
gcuuccuacaugugucugcgag

SEQ ID NO: 576162 - RNA, 22 nt, Human
uaagaugagguagguaagacuu

SEQ ID NO: 576163 - RNA, 22 nt, Human
uucuuuaaaugaauucucugua

SEQ ID NO: 576164 - RNA, 22 nt, Human
agaagggccagcuggacaccug

SEQ ID NO: 576165 - RNA, 22 nt, Human
ggaggggagguccagcugaucu

SEQ ID NO: 576166 - RNA, 22 nt, Human
agggaaauuaaugugagcaaug

SEQ ID NO: 576167 - RNA, 22 nt, Human
ugggcagaaugugggauccaga

SEQ ID NO: 576168 - RNA, 22 nt, Human
aaagacaucagaaccagcugag

SEQ ID NO: 576169 - RNA, 22 nt, Human
gcugcuuucuguuaggaauugg

SEQ ID NO: 576170 - RNA, 22 nt, Human
aaagcuuauuuguaugcauguu

SEQ ID NO: 576171 - RNA, 22 nt, Human
cccugggaggcuuccaggcaga

SEQ ID NO: 576172 - RNA, 22 nt, Human
gcagcuggggaggucgugggga

SEQ ID NO: 576173 - RNA, 18 nt, Human
gccucccuggcuacacuu

SEQ ID NO: 576174 - RNA, 22 nt, Human
cagcuucuauuuaucuuugugu

SEQ ID NO: 576175 - RNA, 22 nt, Human
ugugugaacucucugauguaca

SEQ ID NO: 576176 - RNA, 22 nt, Human
aaggagaagucuguugagauug

SEQ ID NO: 576177 - RNA, 21 nt, Human
uuucuuucuggcucucacagu

SEQ ID NO: 576178 - RNA, 22 nt, Human
ucagggcaucucuuaaguggug

SEQ ID NO: 576179 - RNA, 23 nt, Human
uuugugcagaagacaaaguggcc

SEQ ID NO: 576180 - RNA, 22 nt, Human
aaaugcagguaguauuuauuuu

SEQ ID NO: 576181 - RNA, 17 nt, Human
uccagagcacagagcuc

SEQ ID NO: 576182 - RNA, 22 nt, Human
uggcagccaucugagggugggg

SEQ ID NO: 576183 - RNA, 22 nt, Human
gaagaggacuguggcauccuag

SEQ ID NO: 576184 - RNA, 22 nt, Human
cccuccacagacaggacuuguc

SEQ ID NO: 576185 - RNA, 22 nt, Human
gccagcucaguuucaaaguagg

SEQ ID NO: 576186 - RNA, 22 nt, Human
auuucagcccaguaugagcccc

SEQ ID NO: 576187 - RNA, 22 nt, Human
gcuggcucuucaguggagauag

SEQ ID NO: 576188 - RNA, 22 nt, Human
agcagggggaguuagacuagau

SEQ ID NO: 576189 - RNA, 20 nt, Human
ggcagagggccugggagaag

SEQ ID NO: 576190 - RNA, 22 nt, Human
ucaguccuuggcauuuaggagc

SEQ ID NO: 576191 - RNA, 21 nt, Human
cucuacauucccagcaacucu

SEQ ID NO: 576192 - RNA, 22 nt, Human
cauacauaugcauguguguaua

SEQ ID NO: 576193 - RNA, 22 nt, Human
aaaguuaguuucuuauaugucu

SEQ ID NO: 576194 - RNA, 22 nt, Human
cugggcugucaauggcccucug

SEQ ID NO: 576195 - RNA, 22 nt, Human
uuuccucugggcccugccaccc

SEQ ID NO: 576196 - RNA, 22 nt, Human
gcuuccugauauucauacuguu

SEQ ID NO: 576197 - RNA, 22 nt, Human
ucugcagagguaauuuacagau

SEQ ID NO: 576198 - RNA, 22 nt, Human
guggugcauccuugaguaagcu

SEQ ID NO: 576199 - RNA, 22 nt, Human
ggaagagagggcugggccucaa

SEQ ID NO: 576200 - RNA, 22 nt, Human
caaaguauauuucauagucuca

SEQ ID NO: 576201 - RNA, 22 nt, Human
augaggcccaggaaucuguauu

SEQ ID NO: 576202 - RNA, 22 nt, Human
aauuagaaccagaagccauauu

SEQ ID NO: 576203 - RNA, 22 nt, Human
ucuccuggcucaccaggcugga

SEQ ID NO: 576204 - RNA, 22 nt, Human
cugcaggcucgaagacacggau

SEQ ID NO: 576205 - RNA, 22 nt, Human
uuguuuguaaggcucuuagaau

SEQ ID NO: 576206 - RNA, 22 nt, Human
uucuggaaugccuguucuaauu

SEQ ID NO: 576207 - RNA, 22 nt, Human
agcacaguaaagcagugucaca

SEQ ID NO: 576208 - RNA, 22 nt, Human
ccaagggcuauuuacagaacag

SEQ ID NO: 576209 - RNA, 23 nt, Human
aucaaaugauuggccauucagug

SEQ ID NO: 576210 - RNA, 22 nt, Human
agcaccaggauauuguuggaga

SEQ ID NO: 576211 - RNA, 21 nt, Human
ggcugccugggaagaagaaga

SEQ ID NO: 576212 - RNA, 22 nt, Human
cuucuugcaauuuucaucuuau

SEQ ID NO: 576213 - RNA, 22 nt, Human
auuucacauuaauuugaugcuc

SEQ ID NO: 576214 - RNA, 22 nt, Human
uggcccuguggaggucagugag

SEQ ID NO: 576215 - RNA, 22 nt, Human
ccaugcagugcuggagcugauu

SEQ ID NO: 576216 - RNA, 22 nt, Human
ccugucuggaacauggccuguu

SEQ ID NO: 576217 - RNA, 22 nt, Human
ccacaggcugcugcaggucccg

SEQ ID NO: 576218 - RNA, 22 nt, Human
aaaugcauguagaauaauagag

SEQ ID NO: 576219 - RNA, 22 nt, Human
cuugugcauuucauuccucagg

SEQ ID NO: 576220 - RNA, 22 nt, Human
ugcuucaaaaaguuguuagagg

SEQ ID NO: 576221 - RNA, 22 nt, Human
auggcagagaaagcgagccaca

SEQ ID NO: 576222 - RNA, 22 nt, Human
uaccauuuugaaacauuucauc

SEQ ID NO: 576223 - RNA, 22 nt, Human
accucccuggccuucugauucc

SEQ ID NO: 576224 - RNA, 22 nt, Human
cuggcugcgucugcucugacag

SEQ ID NO: 576225 - RNA, 22 nt, Human
uuaagcuaauuaguuccagcau

SEQ ID NO: 576226 - RNA, 22 nt, Human
accagcucuuucuuuucacuau

SEQ ID NO: 576227 - RNA, 22 nt, Human
guugccuucuaugauucucagu

SEQ ID NO: 576228 - RNA, 20 nt, Human
guuuccuauuuaccuccuca

SEQ ID NO: 576229 - RNA, 22 nt, Human
acccugagaugccacagcauga

SEQ ID NO: 576230 - RNA, 22 nt, Human
ugugaagagaguaauaaaguca

SEQ ID NO: 576231 - RNA, 23 nt, Human
aguguguauugcugagggcagcu

SEQ ID NO: 576232 - RNA, 17 nt, Human
agacacugagccaagua

SEQ ID NO: 576233 - RNA, 22 nt, Human
auguuucucacuguuucucuau

SEQ ID NO: 576234 - RNA, 22 nt, Human
uaugcuaaugacacucuagaaa

SEQ ID NO: 576235 - RNA, 22 nt, Human
uaguuucuaaagcuuccuaggu

SEQ ID NO: 576236 - RNA, 22 nt, Human
agacauaagcgagcaucacagg

SEQ ID NO: 576237 - RNA, 22 nt, Human
ccccaggagauuugggagcaca

SEQ ID NO: 576238 - RNA, 22 nt, Human
aacaucauccuuugaguauuua

SEQ ID NO: 576239 - RNA, 22 nt, Human
ugagaagcugcuugugcuguau

SEQ ID NO: 576240 - RNA, 22 nt, Human
ucugcguugcucacgcugggag

SEQ ID NO: 576241 - RNA, 22 nt, Human
cucugagcugaaacaugagcau

SEQ ID NO: 576242 - RNA, 21 nt, Human
caguguggugaccagggucuc

SEQ ID NO: 576243 - RNA, 22 nt, Human
ccagcugcuuuuugucacaugg

SEQ ID NO: 576244 - RNA, 22 nt, Human
agugucaaauuaaauaaucugg

SEQ ID NO: 576245 - RNA, 23 nt, Human
uuguccugccgaucucugagaau

SEQ ID NO: 576246 - RNA, 23 nt, Human
cagaggguuccauggagcauggu

SEQ ID NO: 576247 - RNA, 22 nt, Human
agcaggugacccaagcaggcug

SEQ ID NO: 576248 - RNA, 20 nt, Human
ggcaggugcucgcuuggucu

SEQ ID NO: 576249 - RNA, 22 nt, Human
aaauguggguaaugggacugga

SEQ ID NO: 576250 - RNA, 22 nt, Human
uggguauacaaauaaucucuuu

SEQ ID NO: 576251 - RNA, 22 nt, Human
cauguauagacacucauacagu

SEQ ID NO: 576252 - RNA, 22 nt, Human
acagacagauuuugucugaugu

SEQ ID NO: 576253 - RNA, 22 nt, Human
uuccuucuuccaaacccaucau

SEQ ID NO: 576254 - RNA, 22 nt, Human
uguccccuuucuuuccuucgua

SEQ ID NO: 576255 - RNA, 17 nt, Human
ggaacaaauacuaugca

SEQ ID NO: 576256 - RNA, 22 nt, Human
auggggugagacuaggauuaaa

SEQ ID NO: 576257 - RNA, 22 nt, Human
uguuuacaaggagaauuugagg

SEQ ID NO: 576258 - RNA, 22 nt, Human
uggcuuccuguguaaugaggug

SEQ ID NO: 576259 - RNA, 22 nt, Human
auuucuuucuggccacgguuuu

SEQ ID NO: 576260 - RNA, 20 nt, Human
cugcaggguuagaggcucca

SEQ ID NO: 576261 - RNA, 22 nt, Human
gcauggaugggaguggacagau

SEQ ID NO: 576262 - RNA, 22 nt, Human
cccugagccgccugccgugucc

SEQ ID NO: 576263 - RNA, 22 nt, Human
cacaaacaucaauccuguuuuc

SEQ ID NO: 576264 - RNA, 22 nt, Human
auauauacaacuagauuaaaag

SEQ ID NO: 576265 - RNA, 22 nt, Human
uucuuuucugcagcugguauuu

SEQ ID NO: 576266 - RNA, 22 nt, Human
uugugccauaaccacccugacu

SEQ ID NO: 576267 - RNA, 22 nt, Human
caaauacucuggauguguuugu

SEQ ID NO: 576268 - RNA, 22 nt, Human
gcagggcuaggucuucuagggc

SEQ ID NO: 576269 - RNA, 22 nt, Human
ugcucagacaagcugaacagua

SEQ ID NO: 576270 - RNA, 22 nt, Human
gagaggcuggcagugccagguu

SEQ ID NO: 576271 - RNA, 22 nt, Human
agaccacagucaggcuccuggu

SEQ ID NO: 576272 - RNA, 22 nt, Human
ugccucagaguugucccuacca

SEQ ID NO: 576273 - RNA, 21 nt, Human
uguggcagauguugggaggca

SEQ ID NO: 576274 - RNA, 20 nt, Human
acaggggcagcacaauaaug

SEQ ID NO: 576275 - RNA, 22 nt, Human
augagcugggccauccagugau

SEQ ID NO: 576276 - RNA, 22 nt, Human
cgcaggugaaagaggcugggca

SEQ ID NO: 576277 - RNA, 19 nt, Human
agggccaggauucuggaac

SEQ ID NO: 576278 - RNA, 22 nt, Human
cucuuucuggaaggcagagugg

SEQ ID NO: 576279 - RNA, 22 nt, Human
agaagccagaauauucauggau

SEQ ID NO: 576280 - RNA, 22 nt, Human
ccaggagacaaagaugacugcu

SEQ ID NO: 576281 - RNA, 22 nt, Human
cuguugcuccagggaacacaga

SEQ ID NO: 576282 - RNA, 22 nt, Human
uuuaaagaaauuccucaucuuu

SEQ ID NO: 576283 - RNA, 22 nt, Human
agauccaggguuggauuugcau

SEQ ID NO: 576284 - RNA, 22 nt, Human
uaaacuaucuguguuugaaguu

SEQ ID NO: 576285 - RNA, 21 nt, Human
accagcauuccacacuguccc

SEQ ID NO: 576286 - RNA, 22 nt, Human
uugaaaggcacaggcaccuggg

SEQ ID NO: 576287 - RNA, 22 nt, Human
aaauuaagggugagaagaguug

SEQ ID NO: 576288 - RNA, 22 nt, Human
auuucucaguuccuacuguuua

SEQ ID NO: 576289 - RNA, 22 nt, Human
auugacaauguauuuguaucug

SEQ ID NO: 576290 - RNA, 22 nt, Human
caugacacccaggcauagcacc

SEQ ID NO: 576291 - RNA, 22 nt, Human
cuguuaaguguagauaaugugg

SEQ ID NO: 576292 - RNA, 22 nt, Human
uggggaagcacuuugaacuuaa

SEQ ID NO: 576293 - RNA, 22 nt, Human
caguccucucugugucugcacc

SEQ ID NO: 576294 - RNA, 22 nt, Human
cccugcagggaggauucugaag

SEQ ID NO: 576295 - RNA, 22 nt, Human
uacagcuccaaaaaucacuguu

SEQ ID NO: 576296 - RNA, 22 nt, Human
uggaacaaacauggugauggcu

SEQ ID NO: 576297 - RNA, 22 nt, Human
auguuaggcaaucuuucuuguu

SEQ ID NO: 576298 - RNA, 23 nt, Human
gcaggaguuccuggacuccagga

SEQ ID NO: 576299 - RNA, 22 nt, Human
uucucagauuccccuuuuaaua

SEQ ID NO: 576300 - RNA, 22 nt, Human
cacaauuucaguugcaugcaac

SEQ ID NO: 576301 - RNA, 22 nt, Human
augggcaggcacuggcucucag

SEQ ID NO: 576302 - RNA, 22 nt, Human
uguacaaugccagggaacacca

SEQ ID NO: 576303 - RNA, 22 nt, Human
agcagggcagugcuucagcucu

SEQ ID NO: 576304 - RNA, 22 nt, Human
gguggaguaauucgcagagguu

SEQ ID NO: 576305 - RNA, 22 nt, Human
ucagucuuuaaaagcucaggaa

SEQ ID NO: 576306 - RNA, 22 nt, Human
cucugagguuuccucacaagcu

SEQ ID NO: 576307 - RNA, 22 nt, Human
ggcagaggagcuggaaacaugg

SEQ ID NO: 576308 - RNA, 22 nt, Human
auuucucugccucagcuucugc

SEQ ID NO: 576309 - RNA, 22 nt, Human
cagucaccaccagguggcagua

SEQ ID NO: 576310 - RNA, 22 nt, Human
uggaacaacucccucggagccu

SEQ ID NO: 576311 - RNA, 22 nt, Human
cucuuuggauagaauuacaaag

SEQ ID NO: 576312 - RNA, 22 nt, Human
ugucuuuuaccuaaugagcugg

SEQ ID NO: 576313 - RNA, 22 nt, Human
uuaugaaagacauuucuguugg

SEQ ID NO: 576314 - RNA, 22 nt, Human
ccagccuccauguagauagcug

SEQ ID NO: 576315 - RNA, 22 nt, Human
uggagggcaucuguggucaggc

SEQ ID NO: 576316 - RNA, 22 nt, Human
gucugcccaucuccgggcgggg

SEQ ID NO: 576317 - RNA, 22 nt, Human
uccucaggaugugggguagaau

SEQ ID NO: 576318 - RNA, 20 nt, Human
ggggcccaagcccucuugcc

SEQ ID NO: 576319 - RNA, 22 nt, Human
gugaccaucaucucagcuaguu

SEQ ID NO: 576320 - RNA, 22 nt, Human
aggaaccagagguugagcaacu

SEQ ID NO: 576321 - RNA, 22 nt, Human
aggaagagcccgggugacauaa

SEQ ID NO: 576322 - RNA, 22 nt, Human
agauguggcugcacccaccgcu

SEQ ID NO: 576323 - RNA, 22 nt, Human
ucaguguccuucguucuuguug

SEQ ID NO: 576324 - RNA, 22 nt, Human
augccuggacuguaucccagau

SEQ ID NO: 576325 - RNA, 22 nt, Human
cagcaggcccaggugcugguga

SEQ ID NO: 576326 - RNA, 22 nt, Human
agggagacaaaagcagcugcca

SEQ ID NO: 576327 - RNA, 22 nt, Human
ucuggaguaggaccugaaaaua

SEQ ID NO: 576328 - RNA, 22 nt, Human
ccaggcugggcuacaaguugag

SEQ ID NO: 576329 - RNA, 22 nt, Human
acuuucauuuguaauaaacuuc

SEQ ID NO: 576330 - RNA, 22 nt, Human
cccagcagugguucucaaacuu

SEQ ID NO: 576331 - RNA, 22 nt, Human
acccagagaacugugccuugag

SEQ ID NO: 576332 - RNA, 22 nt, Human
gcucccugcauuucccacccuu

SEQ ID NO: 576333 - RNA, 22 nt, Human
uccugguguuuaugucacauag

SEQ ID NO: 576334 - RNA, 22 nt, Human
uggagaaggacagccugagaaa

SEQ ID NO: 576335 - RNA, 22 nt, Human
cccugagaugccucacccuagu

SEQ ID NO: 576336 - RNA, 22 nt, Human
guuauuucagccacagagugca

SEQ ID NO: 576337 - RNA, 22 nt, Human
aggcagcauccagaggagaaug

SEQ ID NO: 576338 - RNA, 22 nt, Human
agaggcagcagucauacuacag

SEQ ID NO: 576339 - RNA, 22 nt, Human
auuuggaaaugcaucucuugag

SEQ ID NO: 576340 - RNA, 22 nt, Human
aagcuggagaguuaggugaaua

SEQ ID NO: 576341 - RNA, 22 nt, Human
gugaaacuucacauuuugauag

SEQ ID NO: 576342 - RNA, 22 nt, Human
cacuuucucaugaauuuggccc

SEQ ID NO: 576343 - RNA, 16 nt, Human
ucacacauuuguuggu

SEQ ID NO: 576344 - RNA, 16 nt, Human
uggcagagguucagcc

SEQ ID NO: 576345 - RNA, 22 nt, Human
uuauuuaaaauguagguuggga

SEQ ID NO: 576346 - RNA, 22 nt, Human
ggcugccaggagggaggccagu

SEQ ID NO: 576347 - RNA, 22 nt, Human
agcacacaggacuugauucaug

SEQ ID NO: 576348 - RNA, 22 nt, Human
aaccugaaacuacauucuugau

SEQ ID NO: 576349 - RNA, 22 nt, Human
uggaauggaaacaaacugagga

SEQ ID NO: 576350 - RNA, 23 nt, Human
caugcaaacacuauugcauuugg

SEQ ID NO: 576351 - RNA, 22 nt, Human
uguguuucugagaaucccaccu

SEQ ID NO: 576352 - RNA, 22 nt, Human
uaacaggaugacagcagacauu

SEQ ID NO: 576353 - RNA, 18 nt, Human
ugaggcugaauauggggc

SEQ ID NO: 576354 - RNA, 22 nt, Human
aaaaguaauugcaguuuuguca

SEQ ID NO: 576355 - RNA, 22 nt, Human
uaugcuuucauucauaugugag

SEQ ID NO: 576356 - RNA, 22 nt, Human
gcccagcaccucucucaggguu

SEQ ID NO: 576357 - RNA, 22 nt, Human
agagggaaugugauugcaccau

SEQ ID NO: 576358 - RNA, 22 nt, Human
caggagaggcuguacguuucuc

SEQ ID NO: 576359 - RNA, 22 nt, Human
uugggguaaguuugucaagcug

SEQ ID NO: 576360 - RNA, 22 nt, Human
agcagcugagccccagcuguga

SEQ ID NO: 576361 - RNA, 20 nt, Human
caucuccugccuccauguuc

SEQ ID NO: 576362 - RNA, 22 nt, Human
gagcugaggcugaggccucacu

SEQ ID NO: 576363 - RNA, 22 nt, Human
ggagggcucccugggaguggau

SEQ ID NO: 576364 - RNA, 22 nt, Human
ugcccuggcauuggguuggaua

SEQ ID NO: 576365 - RNA, 22 nt, Human
agaaggaguguacaggucaugc

SEQ ID NO: 576366 - RNA, 22 nt, Human
cuguccuguggaccugaggacg

SEQ ID NO: 576367 - RNA, 23 nt, Human
uccaggcugaaggagcagauuuu

SEQ ID NO: 576368 - RNA, 22 nt, Human
ucacccaggauauugaagucag

SEQ ID NO: 576369 - RNA, 22 nt, Human
uacuuuuugucucuuugaaugu

SEQ ID NO: 576370 - RNA, 22 nt, Human
agggccaccucucuggguuccc

SEQ ID NO: 576371 - RNA, 22 nt, Human
cacagggcuuugauggcugagu

SEQ ID NO: 576372 - RNA, 19 nt, Human
acaauagaaaagucuuuug

SEQ ID NO: 576373 - RNA, 21 nt, Human
uacaaugcacaggagagccuc

SEQ ID NO: 576374 - RNA, 22 nt, Human
ugggauagauugauggauagag

SEQ ID NO: 576375 - RNA, 22 nt, Human
uuaggaaaggguuuucuaacag

SEQ ID NO: 576376 - RNA, 22 nt, Human
gaggcaggcacuguuaucagca

SEQ ID NO: 576377 - RNA, 22 nt, Human
agcccuggggcuggucuuggaa

SEQ ID NO: 576378 - RNA, 22 nt, Human
ucucagguaagcuucuuugaug

SEQ ID NO: 576379 - RNA, 22 nt, Human
acaaugcaccuauuuuaaaacu

SEQ ID NO: 576380 - RNA, 21 nt, Human
auacagaacauugauccaaga

SEQ ID NO: 576381 - RNA, 22 nt, Human
cagaggcucaccagccuuucac

SEQ ID NO: 576382 - RNA, 21 nt, Human
ucugccugagacuuugcuggu

SEQ ID NO: 576383 - RNA, 22 nt, Human
ccagagaggccuuggcaagaca

SEQ ID NO: 576384 - RNA, 22 nt, Human
caauagcaggucuacagagaga

SEQ ID NO: 576385 - RNA, 22 nt, Human
acauaaugagcucuuuauaaau

SEQ ID NO: 576386 - RNA, 22 nt, Human
uggucucugcugcagcuucuca

SEQ ID NO: 576387 - RNA, 22 nt, Human
uggcuccagauuuccugcugca

SEQ ID NO: 576388 - RNA, 22 nt, Human
aagagcugcaucuaagccauga

SEQ ID NO: 576389 - RNA, 22 nt, Human
ugagguaguuuuucaaguauuu

SEQ ID NO: 576390 - RNA, 22 nt, Human
uuaguguccuuaugucacaagc

SEQ ID NO: 576391 - RNA, 22 nt, Human
ugguuuguauauguuugugaga

SEQ ID NO: 576392 - RNA, 22 nt, Human
guccucugcuucaugcccugau

SEQ ID NO: 576393 - RNA, 20 nt, Human
gcagagccucacugcaaggg

SEQ ID NO: 576394 - RNA, 22 nt, Human
auuucacucucccugccacuua

SEQ ID NO: 576395 - RNA, 22 nt, Human
cugggcugcaucaaagaggcau

SEQ ID NO: 576396 - RNA, 22 nt, Human
gcaggaugggagcuucacuuug

SEQ ID NO: 576397 - RNA, 22 nt, Human
uaucuaagguauaugaggaauc

SEQ ID NO: 576398 - RNA, 22 nt, Human
aagcugggagggagcccagagu

SEQ ID NO: 576399 - RNA, 22 nt, Human
uagcugguucuccaggagcuag

SEQ ID NO: 576400 - RNA, 19 nt, Human
ccuuccccuucagccucug

SEQ ID NO: 576401 - RNA, 22 nt, Human
uauuucagcaagaagaaugugg

SEQ ID NO: 576402 - RNA, 22 nt, Human
ggaugcaggaguugaagaagga

SEQ ID NO: 576403 - RNA, 22 nt, Human
ggcugaucaggugcaaaugcau

SEQ ID NO: 576404 - RNA, 22 nt, Human
ggcagugaacagaaaugcagaa

SEQ ID NO: 576405 - RNA, 22 nt, Human
ugaggcaggaggauugcaggau

SEQ ID NO: 576406 - RNA, 22 nt, Human
agugcaaaauucagaagcaauu

SEQ ID NO: 576407 - RNA, 22 nt, Human
cccugcccuggagacacuuaaa

SEQ ID NO: 576408 - RNA, 22 nt, Human
ucugcagacaggaagcugaggc

SEQ ID NO: 576409 - RNA, 22 nt, Human
cacaagagagugcgcguugcaa

SEQ ID NO: 576410 - RNA, 23 nt, Human
cuucucaguaguacacacacuau

SEQ ID NO: 576411 - RNA, 19 nt, Human
aagcauuagccaaagcauu

SEQ ID NO: 576412 - RNA, 22 nt, Human
uaagaaacaugauacuuuuccu

SEQ ID NO: 576413 - RNA, 23 nt, Human
acagcugcaccuggccgccuggc

SEQ ID NO: 576414 - RNA, 22 nt, Human
uccagcccuguggcuuccaccc

SEQ ID NO: 576415 - RNA, 22 nt, Human
ucuacagggucagaguuucaug

SEQ ID NO: 576416 - RNA, 22 nt, Human
ugggcagcauccuccacaguca

SEQ ID NO: 576417 - RNA, 22 nt, Human
uggggcacuuaugaugugccac

SEQ ID NO: 576418 - RNA, 22 nt, Human
uucugaaagccaauucauugaa

SEQ ID NO: 576419 - RNA, 22 nt, Human
ucucugguggcuccaucaguag

SEQ ID NO: 576420 - RNA, 22 nt, Human
aacaugauguauuuucuugucu

SEQ ID NO: 576421 - RNA, 22 nt, Human
ggcagccacccugggaggcaga

SEQ ID NO: 576422 - RNA, 18 nt, Human
gggcccuggcguccgccc

SEQ ID NO: 576423 - RNA, 22 nt, Human
caguggcugugaccagggaccu

SEQ ID NO: 576424 - RNA, 22 nt, Human
uuucuucugagaucagggagaa

SEQ ID NO: 576425 - RNA, 22 nt, Human
cccucaugccagacagcaugca

SEQ ID NO: 576426 - RNA, 22 nt, Human
aaggcugccucugccagaggag

SEQ ID NO: 576427 - RNA, 21 nt, Human
ugcaccuguucacugcaguuc

SEQ ID NO: 576428 - RNA, 22 nt, Human
gcucuggcuacuccacccuguu

SEQ ID NO: 576429 - RNA, 22 nt, Human
auugcuuuugagcuagaauuuu

SEQ ID NO: 576430 - RNA, 22 nt, Human
aaguauauuuuuugaagcauau

SEQ ID NO: 576431 - RNA, 22 nt, Human
caaagccauagaguagauaaga

SEQ ID NO: 576432 - RNA, 22 nt, Human
cuuuacagauaggaacuacuca

SEQ ID NO: 576433 - RNA, 22 nt, Human
gguguccucacuauagcaaguc

SEQ ID NO: 576434 - RNA, 22 nt, Human
uuguugcucuuguugccacaug

SEQ ID NO: 576435 - RNA, 22 nt, Human
uucaauaucucuaagaaugagg

SEQ ID NO: 576436 - RNA, 18 nt, Human
agugaguuguugaaagaa

SEQ ID NO: 576437 - RNA, 22 nt, Human
ggcugcuggccagccuaggagu

SEQ ID NO: 576438 - RNA, 22 nt, Human
ccugcccacuccaggagcaacu

SEQ ID NO: 576439 - RNA, 22 nt, Human
agcuggccuccgggugccuggg

SEQ ID NO: 576440 - RNA, 23 nt, Human
auggaaauagcaugugucauuua

SEQ ID NO: 576441 - RNA, 17 nt, Human
gcucccugaggacagcu

SEQ ID NO: 576442 - RNA, 22 nt, Human
aagagguggaacagcaauucgu

SEQ ID NO: 576443 - RNA, 22 nt, Human
ugggcuccggcggccucaggcu

SEQ ID NO: 576444 - RNA, 22 nt, Human
aguuucucuuugacaccaaaau

SEQ ID NO: 576445 - RNA, 22 nt, Human
aaggugugaagagaugggaaga

SEQ ID NO: 576446 - RNA, 22 nt, Human
augucaugaaaugcuacuaacu

SEQ ID NO: 576447 - RNA, 22 nt, Human
ccuuccuugagaagcaauuccu

SEQ ID NO: 576448 - RNA, 22 nt, Human
acaugcagaauucuuagagagc

SEQ ID NO: 576449 - RNA, 22 nt, Human
ucuuccuugcuccuugucacuu

SEQ ID NO: 576450 - RNA, 22 nt, Human
ugcaccagagcagggugcccaa

SEQ ID NO: 576451 - RNA, 22 nt, Human
uggauccugcacugaguggagu

SEQ ID NO: 576452 - RNA, 22 nt, Human
agcacagaaagcacauuugaaa

SEQ ID NO: 576453 - RNA, 22 nt, Human
cauacaaucaaguucuuuauua

SEQ ID NO: 576454 - RNA, 20 nt, Human
caggccagagguuugauggc

SEQ ID NO: 576455 - RNA, 22 nt, Human
guccuucuuuucaucccugguu

SEQ ID NO: 576456 - RNA, 22 nt, Human
uggcagcagggaggccaguguu

SEQ ID NO: 576457 - RNA, 22 nt, Human
guggcagagccgugcagguagg

SEQ ID NO: 576458 - RNA, 22 nt, Human
agaauguguuuuaacaugggaa

SEQ ID NO: 576459 - RNA, 22 nt, Human
uacuacaguauguguguuauac

SEQ ID NO: 576460 - RNA, 22 nt, Human
ccuggagcuuggucacgcugcg

SEQ ID NO: 576461 - RNA, 22 nt, Human
cuguggggccaaauucuccucu

SEQ ID NO: 576462 - RNA, 22 nt, Human
uggcacugucaccaaugcuguc

SEQ ID NO: 576463 - RNA, 22 nt, Human
ucuuaaaugacugauaagagga

SEQ ID NO: 576464 - RNA, 22 nt, Human
aggaugagauuccagggucaau

SEQ ID NO: 576465 - RNA, 22 nt, Human
ggggcugagaauucagucucgg

SEQ ID NO: 576466 - RNA, 22 nt, Human
aggugggcacuccgcucgaggu

SEQ ID NO: 576467 - RNA, 22 nt, Human
ucagcugcgacaggggccugag

SEQ ID NO: 576468 - RNA, 22 nt, Human
acuggccaggcacagcuguggg

SEQ ID NO: 576469 - RNA, 22 nt, Human
agagacagaucugagggaccuc

SEQ ID NO: 576470 - RNA, 22 nt, Human
uuggaaaacuuacacagagcug

SEQ ID NO: 576471 - RNA, 22 nt, Human
aagaagaaguguuauuuuuaga

SEQ ID NO: 576472 - RNA, 22 nt, Human
auggaacagauuaaagugaggg

SEQ ID NO: 576473 - RNA, 22 nt, Human
agucaggaagcuggagcugggg

SEQ ID NO: 576474 - RNA, 22 nt, Human
uaaggaaagugccaugauuucu

SEQ ID NO: 576475 - RNA, 22 nt, Human
aaacagcagcuguuuaauuugc

SEQ ID NO: 576476 - RNA, 18 nt, Human
gagcucugccucccaguc

SEQ ID NO: 576477 - RNA, 22 nt, Human
acccugggugagaggcaaacag

SEQ ID NO: 576478 - RNA, 22 nt, Human
gcugcccuacccgaggcacucu

SEQ ID NO: 576479 - RNA, 22 nt, Human
agccaggcagggcucucgcucu

SEQ ID NO: 576480 - RNA, 22 nt, Human
cucuguagaaacagggcagaag

SEQ ID NO: 576481 - RNA, 22 nt, Human
uuguuuccuuucuauacaggau

SEQ ID NO: 576482 - RNA, 22 nt, Human
augcuacauagauacaaaaaug

SEQ ID NO: 576483 - RNA, 22 nt, Human
gcugcuggggccuucccucggg

SEQ ID NO: 576484 - RNA, 22 nt, Human
auuuccuagccucucuugcagu

SEQ ID NO: 576485 - RNA, 21 nt, Human
guuuucaugauagagucugua

SEQ ID NO: 576486 - RNA, 22 nt, Human
ccuuucuacagaugccucuugc

SEQ ID NO: 576487 - RNA, 22 nt, Human
gggagaaggagcuaguucuuga

SEQ ID NO: 576488 - RNA, 22 nt, Human
acacacuggcccccaguacuga

SEQ ID NO: 576489 - RNA, 22 nt, Human
gagaggcugacuggcuguccug

SEQ ID NO: 576490 - RNA, 22 nt, Human
auguacauuuagaucauuucug

SEQ ID NO: 576491 - RNA, 22 nt, Human
uaaaguguguggguucuaaauu

SEQ ID NO: 576492 - RNA, 22 nt, Human
uugcauauccuccaacacaugg

SEQ ID NO: 576493 - RNA, 22 nt, Human
gcaauguuuuuccuuccauauu

SEQ ID NO: 576494 - RNA, 22 nt, Human
uuuauuuggcauccagggagaa

SEQ ID NO: 576495 - RNA, 21 nt, Human
gcugaagaacucuuuauuuuc

SEQ ID NO: 576496 - RNA, 19 nt, Human
aggcaggugcagagguccc

SEQ ID NO: 576497 - RNA, 22 nt, Human
augcuaaauggccaguaccaaa

SEQ ID NO: 576498 - RNA, 22 nt, Human
uuccucaucugugcaccucacu

SEQ ID NO: 576499 - RNA, 22 nt, Human
uucuacacucacccagcuguaa

SEQ ID NO: 576500 - RNA, 22 nt, Human
ugcaaggaagggacagcugaga

SEQ ID NO: 576501 - RNA, 22 nt, Human
acagagauggcacagagaaggu

SEQ ID NO: 576502 - RNA, 22 nt, Human
ugaagaaacgcagagagguagg

SEQ ID NO: 576503 - RNA, 22 nt, Human
agauggggcugaaaguuccaau

SEQ ID NO: 576504 - RNA, 22 nt, Human
uccugcagaccucagucagguc

SEQ ID NO: 576505 - RNA, 22 nt, Human
ucugggcagccucaggccaggg

SEQ ID NO: 576506 - RNA, 22 nt, Human
cugggcuccacucccacagugu

SEQ ID NO: 576507 - RNA, 22 nt, Human
ucaauguuuguucaugaaaaua

SEQ ID NO: 576508 - RNA, 22 nt, Human
aaaucucaauuugaauuguagc

SEQ ID NO: 576509 - RNA, 22 nt, Human
gcugccuggaauaacggcuggc

SEQ ID NO: 576510 - RNA, 23 nt, Human
cacugcagcguggucuggcagga

SEQ ID NO: 576511 - RNA, 22 nt, Human
cuggggaggaugcuacgaccug

SEQ ID NO: 576512 - RNA, 22 nt, Human
uguggaagaacuucuugcuugg

SEQ ID NO: 576513 - RNA, 22 nt, Human
ccacaggggucucuguagcuga

SEQ ID NO: 576514 - RNA, 22 nt, Human
uccugccuaccuugcggaggug

SEQ ID NO: 576515 - RNA, 22 nt, Human
uuacaaguauuuaagaugcugu

SEQ ID NO: 576516 - RNA, 22 nt, Human
ggcugccacgucgaggguccaa

SEQ ID NO: 576517 - RNA, 22 nt, Human
gcccuccaccuggucucucugg

SEQ ID NO: 576518 - RNA, 22 nt, Human
ugggcccagguccugggagaag

SEQ ID NO: 576519 - RNA, 22 nt, Human
aucuaaacccuacuuucuuucu

SEQ ID NO: 576520 - RNA, 22 nt, Human
aguccuuagaacagugccuggg

SEQ ID NO: 576521 - RNA, 22 nt, Human
uggcagaguuauggguauuuau

SEQ ID NO: 576522 - RNA, 22 nt, Human
ucugagguccuacuauaagugg

SEQ ID NO: 576523 - RNA, 22 nt, Human
agugguggagagaugaggacac

SEQ ID NO: 576524 - RNA, 22 nt, Human
gauaagcuaacccaagcccuuu

SEQ ID NO: 576525 - RNA, 22 nt, Human
uacuggcaauuucauauggugc

SEQ ID NO: 576526 - RNA, 20 nt, Human
ggcagcaggaguuuccucuu

SEQ ID NO: 576527 - RNA, 18 nt, Human
ccucacagacuuccaugu

SEQ ID NO: 576528 - RNA, 22 nt, Human
cucagagggucuccuccagaau

SEQ ID NO: 576529 - RNA, 22 nt, Human
caauuucaucuugugcuucaau

SEQ ID NO: 576530 - RNA, 22 nt, Human
agcuggaggauaacucacuucu

SEQ ID NO: 576531 - RNA, 22 nt, Human
uaaugucaaggucauucuagag

SEQ ID NO: 576532 - RNA, 22 nt, Human
cuguauucaagcuucugcccaa

SEQ ID NO: 576533 - RNA, 22 nt, Human
ugcaucugauucucaggcagaa

SEQ ID NO: 576534 - RNA, 22 nt, Human
ccagcaggagaugccugugucu

SEQ ID NO: 576535 - RNA, 22 nt, Human
ucuggaguccuggaaucagcua

SEQ ID NO: 576536 - RNA, 22 nt, Human
cccauucccuuuacuguugcau

SEQ ID NO: 576537 - RNA, 22 nt, Human
uuauugccugucauuauugaau

SEQ ID NO: 576538 - RNA, 22 nt, Human
gcagcagggugccagcuuugca

SEQ ID NO: 576539 - RNA, 22 nt, Human
ucuguugcaaugugcaugguga

SEQ ID NO: 576540 - RNA, 18 nt, Human
ggagcccagaggugaguu

SEQ ID NO: 576541 - RNA, 22 nt, Human
ucaagagagugcugcuuggggu

SEQ ID NO: 576542 - RNA, 22 nt, Human
uucaacaucuuggagcuggaac

SEQ ID NO: 576543 - RNA, 23 nt, Human
ggagaucuagguuggcauuuccu

SEQ ID NO: 576544 - RNA, 19 nt, Human
uuuuuacaaguagguguga

SEQ ID NO: 576545 - RNA, 22 nt, Human
uuuauuguuguuagucauaagu

SEQ ID NO: 576546 - RNA, 22 nt, Human
cugggcacagcguugggcucuu

SEQ ID NO: 576547 - RNA, 19 nt, Human
uggguuggaagggaaugaa

SEQ ID NO: 576548 - RNA, 22 nt, Human
ucuguuuugugucucucuggug

SEQ ID NO: 576549 - RNA, 22 nt, Human
uguguaaaagauuaguuuacua

SEQ ID NO: 576550 - RNA, 22 nt, Human
agauuuuaguguagaggacuug

SEQ ID NO: 576551 - RNA, 22 nt, Human
uugcagagcaguaggaauauag

SEQ ID NO: 576552 - RNA, 22 nt, Human
cagcuguguaugagagcaugcu

SEQ ID NO: 576553 - RNA, 22 nt, Human
gauauguauugaaugaucauuu

SEQ ID NO: 576554 - RNA, 19 nt, Human
ccagaggcagcuucuguaa

SEQ ID NO: 576555 - RNA, 22 nt, Human
aagagcaacuuggaaacacuca

SEQ ID NO: 576556 - RNA, 22 nt, Human
uguguguggggaggcagcagau

SEQ ID NO: 576557 - RNA, 22 nt, Human
aaacaaauuucaagcugugaca

SEQ ID NO: 576558 - RNA, 22 nt, Human
ugcaucuguucauucguuccca

SEQ ID NO: 576559 - RNA, 22 nt, Human
gagucacaaagccuuucuuauu

SEQ ID NO: 576560 - RNA, 22 nt, Human
uugcugaagcugccaaaccagu

SEQ ID NO: 576561 - RNA, 22 nt, Human
uauuuaaccaguuaaauuucca

SEQ ID NO: 576562 - RNA, 22 nt, Human
auguuacaguugaguaaauuaa

SEQ ID NO: 576563 - RNA, 22 nt, Human
aacauugccaugguuaauuuua

SEQ ID NO: 576564 - RNA, 22 nt, Human
caggucagcacuuggaggugca

SEQ ID NO: 576565 - RNA, 22 nt, Human
agagcacagccaccauuuacaa

SEQ ID NO: 576566 - RNA, 22 nt, Human
uccuuacaguuaaaaugggagu

SEQ ID NO: 576567 - RNA, 22 nt, Human
gccuuccuuacaccugcucagc

SEQ ID NO: 576568 - RNA, 22 nt, Human
ggaacacagugccuuacaaacu

SEQ ID NO: 576569 - RNA, 22 nt, Human
aggcuggagcaagggggcauau

SEQ ID NO: 576570 - RNA, 22 nt, Human
ucaguguugugcacauacaaaa

SEQ ID NO: 576571 - RNA, 22 nt, Human
agagcagauggccagggggccu

SEQ ID NO: 576572 - RNA, 22 nt, Human
auacaugauggguguauaguuu

SEQ ID NO: 576573 - RNA, 22 nt, Human
cccagacagugauuuacuuaau

SEQ ID NO: 576574 - RNA, 22 nt, Human
agcucuccacacauaggacuag

SEQ ID NO: 576575 - RNA, 22 nt, Human
ggacuuggggaaggcacaguua

SEQ ID NO: 576576 - RNA, 23 nt, Human
ggggacaguucccacuggggucu

SEQ ID NO: 576577 - RNA, 22 nt, Human
gccuggagaagauggaacuagc

SEQ ID NO: 576578 - RNA, 23 nt, Human
uccuaacugauucugcagucucu

SEQ ID NO: 576579 - RNA, 22 nt, Human
cagcuaguaaauggcaagacua

SEQ ID NO: 576580 - RNA, 22 nt, Human
gggcagcugccaagugcaucgc

SEQ ID NO: 576581 - RNA, 18 nt, Human
cuacauucauaggaaagg

SEQ ID NO: 576582 - RNA, 22 nt, Human
ucacaguaucuagaaaugaggg

SEQ ID NO: 576583 - RNA, 22 nt, Human
auguaacacccacuuuuauagc

SEQ ID NO: 576584 - RNA, 22 nt, Human
acagcuggaggucugugagcac

SEQ ID NO: 576585 - RNA, 22 nt, Human
ugcauauuuucugauucagaag

SEQ ID NO: 576586 - RNA, 22 nt, Human
gccuucugaucgcuggacugac

SEQ ID NO: 576587 - RNA, 22 nt, Human
gcugucaggccaugugggccuu

SEQ ID NO: 576588 - RNA, 22 nt, Human
gauuuugaauauuaaagaagag

SEQ ID NO: 576589 - RNA, 22 nt, Human
caggcagcucgaugccuuguug

SEQ ID NO: 576590 - RNA, 22 nt, Human
gacuggucuuuugugauggaug

SEQ ID NO: 576591 - RNA, 22 nt, Human
caguagcaggcaggugcuuuug

SEQ ID NO: 576592 - RNA, 22 nt, Human
ugagcuguggugggguagagga

SEQ ID NO: 576593 - RNA, 22 nt, Human
auuucucacccuaccucacucc

SEQ ID NO: 576594 - RNA, 22 nt, Human
ugaucuagguuggcuucaacug

SEQ ID NO: 576595 - RNA, 22 nt, Human
uuguauuuccuauaaccuuucu

SEQ ID NO: 576596 - RNA, 22 nt, Human
ugagccagucugucugggugaa

SEQ ID NO: 576597 - RNA, 22 nt, Human
ggaggagcacuucugagcucag

SEQ ID NO: 576598 - RNA, 22 nt, Human
ggugcaggagcggggugcucgg

SEQ ID NO: 576599 - RNA, 22 nt, Human
ucuuaaagccaagcauaaacca

SEQ ID NO: 576600 - RNA, 22 nt, Human
ggcaaggccuugcccagcauuc

SEQ ID NO: 576601 - RNA, 22 nt, Human
cccccagucugaacagcagcug

SEQ ID NO: 576602 - RNA, 20 nt, Human
cuuagcuaguaagaagcugu

SEQ ID NO: 576603 - RNA, 22 nt, Human
uguggaaugggagugagaagac

SEQ ID NO: 576604 - RNA, 22 nt, Human
gaaaucuuuuaaccauucauuu

SEQ ID NO: 576605 - RNA, 23 nt, Human
caacagcuguuagauaugggcuu

SEQ ID NO: 576606 - RNA, 22 nt, Human
ugccauggaaguggccagaccu

SEQ ID NO: 576607 - RNA, 22 nt, Human
aguggccagugcugcucugggg

SEQ ID NO: 576608 - RNA, 22 nt, Human
guggagagagauaagccugguc

SEQ ID NO: 576609 - RNA, 22 nt, Human
ggcugcaggaacgacggagggg

SEQ ID NO: 576610 - RNA, 22 nt, Human
gcaaagcugggugugaaugcac

SEQ ID NO: 576611 - RNA, 22 nt, Human
agaccuggaaguucaagagaaa

SEQ ID NO: 576612 - RNA, 22 nt, Human
agacccugucaguguuaggaaa

SEQ ID NO: 576613 - RNA, 22 nt, Human
caugcuuccuccaaacuacccu

SEQ ID NO: 576614 - RNA, 21 nt, Human
gucuucaaaggcagugggcag

SEQ ID NO: 576615 - RNA, 22 nt, Human
gcuuucugggcuauagaacggg

SEQ ID NO: 576616 - RNA, 22 nt, Human
uuaaaugagauguucagauauu

SEQ ID NO: 576617 - RNA, 22 nt, Human
ucacagcaacccugaggcgagu

SEQ ID NO: 576618 - RNA, 19 nt, Human
uagcugccuguuaccucca

SEQ ID NO: 576619 - RNA, 22 nt, Human
gcucccuguucucagccaugau

SEQ ID NO: 576620 - RNA, 22 nt, Human
cuccucccugcgauugcucugc

SEQ ID NO: 576621 - RNA, 22 nt, Human
ugagauggguggguagccaagg

SEQ ID NO: 576622 - RNA, 22 nt, Human
aauagacaagcacccugguaaa

SEQ ID NO: 576623 - RNA, 22 nt, Human
ugcugaaugggugauuuuggag

SEQ ID NO: 576624 - RNA, 22 nt, Human
ggccaggaggcaggggcucaau

SEQ ID NO: 576625 - RNA, 23 nt, Human
gaggaaagaauauagaugcaauc

SEQ ID NO: 576626 - RNA, 22 nt, Human
ucaauguucaaguaugacaaug

SEQ ID NO: 576627 - RNA, 22 nt, Human
gggccaaggggagcuggaaggg

SEQ ID NO: 576628 - RNA, 22 nt, Human
uuacaugcaggucagacugcau

SEQ ID NO: 576629 - RNA, 22 nt, Human
cuguacagaagcuagagcaaau

SEQ ID NO: 576630 - RNA, 22 nt, Human
aagaauuaucugaaagcugugu

SEQ ID NO: 576631 - RNA, 22 nt, Human
auucugaggacagagucuagca

SEQ ID NO: 576632 - RNA, 22 nt, Human
cuuggcuuuugcucccagauca

SEQ ID NO: 576633 - RNA, 22 nt, Human
uggaugcugagaacacugccug

SEQ ID NO: 576634 - RNA, 22 nt, Human
uaugugaauacagcaguggaug

SEQ ID NO: 576635 - RNA, 22 nt, Human
ucaggggaaaucucucagcgaa

SEQ ID NO: 576636 - RNA, 22 nt, Human
uguggccaggccccugauggug

SEQ ID NO: 576637 - RNA, 22 nt, Human
cugggugguuuugaugugaauu

SEQ ID NO: 576638 - RNA, 22 nt, Human
agagauuugucaaugauuucca

SEQ ID NO: 576639 - RNA, 23 nt, Human
agccagauuucuuugcagggcag

SEQ ID NO: 576640 - RNA, 22 nt, Human
auacugaaggcauucagauaac

SEQ ID NO: 576641 - RNA, 22 nt, Human
uguaaauaaugcauguaaauca

SEQ ID NO: 576642 - RNA, 22 nt, Human
ugggcagccaucccagccucuc

SEQ ID NO: 576643 - RNA, 22 nt, Human
gcaaauacauguugagcaccua

SEQ ID NO: 576644 - RNA, 22 nt, Human
cuggugccuccucccugugcuu

SEQ ID NO: 576645 - RNA, 22 nt, Human
aucuacaaccccucaaacugug

SEQ ID NO: 576646 - RNA, 22 nt, Human
uaggaaacucaaagggaagugg

SEQ ID NO: 576647 - RNA, 22 nt, Human
ccugggcaacauagugagaccu

SEQ ID NO: 576648 - RNA, 22 nt, Human
cacacagaugguaagggaggga

SEQ ID NO: 576649 - RNA, 19 nt, Human
uugagaaaguugauuuggg

SEQ ID NO: 576650 - RNA, 22 nt, Human
ccucuguggcccugacucucuu

SEQ ID NO: 576651 - RNA, 23 nt, Human
uauccuaaaggcaacaggaaguc

SEQ ID NO: 576652 - RNA, 22 nt, Human
guggcagagauagaacuggaau

SEQ ID NO: 576653 - RNA, 22 nt, Human
uggcagagccuugccaaacucc

SEQ ID NO: 576654 - RNA, 22 nt, Human
ugggccaggcaugugaucagca

SEQ ID NO: 576655 - RNA, 22 nt, Human
uuggcauucaugggacaacaaa

SEQ ID NO: 576656 - RNA, 22 nt, Human
ggugaaggcacaagagggcaag

SEQ ID NO: 576657 - RNA, 22 nt, Human
gccagcagggcggagccaucua

SEQ ID NO: 576658 - RNA, 22 nt, Human
gaggugagaagggggucagaug

SEQ ID NO: 576659 - RNA, 22 nt, Human
gcucuggggaugcuucugccgu

SEQ ID NO: 576660 - RNA, 22 nt, Human
ccugugguuuacaugacaguua

SEQ ID NO: 576661 - RNA, 22 nt, Human
ugccaggcgauugcuaucagca

SEQ ID NO: 576662 - RNA, 22 nt, Human
acaagucuuuuucaugucuucu

SEQ ID NO: 576663 - RNA, 19 nt, Human
ugagccagggaggccaugc

SEQ ID NO: 576664 - RNA, 22 nt, Human
gaaggaaguuuauuuuagaaga

SEQ ID NO: 576665 - RNA, 22 nt, Human
ccagcugagaaguguaaaguga

SEQ ID NO: 576666 - RNA, 22 nt, Human
aaucacaugcagggccuccacc

SEQ ID NO: 576667 - RNA, 22 nt, Human
uggagaagauuggucaccauuc

SEQ ID NO: 576668 - RNA, 22 nt, Human
uuguuacaucuuauguaagugg

SEQ ID NO: 576669 - RNA, 22 nt, Human
agagccacggcaggccuaggaa

SEQ ID NO: 576670 - RNA, 22 nt, Human
uaaaugugcacagguuagaagg

SEQ ID NO: 576671 - RNA, 22 nt, Human
uuuacaacguuccuggugcuaa

SEQ ID NO: 576672 - RNA, 22 nt, Human
aacucacagcuguuuggauuag

SEQ ID NO: 576673 - RNA, 22 nt, Human
uuaaaguauagaggacaaaaac

SEQ ID NO: 576674 - RNA, 22 nt, Human
cucucagacacccauuuggaaa

SEQ ID NO: 576675 - RNA, 22 nt, Human
aaagcuugugcuguaguauuua

SEQ ID NO: 576676 - RNA, 22 nt, Human
agccaugggcucccaguccuuu

SEQ ID NO: 576677 - RNA, 18 nt, Human
gagcccugagucugcaca

SEQ ID NO: 576678 - RNA, 22 nt, Human
ucuucauguugcuguagggaga

SEQ ID NO: 576679 - RNA, 18 nt, Human
uaaauauauuucccccuu

SEQ ID NO: 576680 - RNA, 17 nt, Human
ugggguccccgauggug

SEQ ID NO: 576681 - RNA, 22 nt, Human
gacugggacaggacagacaucu

SEQ ID NO: 576682 - RNA, 22 nt, Human
caggguucagugggcccucuug

SEQ ID NO: 576683 - RNA, 22 nt, Human
ccuggcugcuauagcagcaugu

SEQ ID NO: 576684 - RNA, 22 nt, Human
gaagagcauuugcccaggcugu

SEQ ID NO: 576685 - RNA, 22 nt, Human
uaguccuuuaucaaacauuuau

SEQ ID NO: 576686 - RNA, 22 nt, Human
gaccuucuugcuguguccuaac

SEQ ID NO: 576687 - RNA, 22 nt, Human
aggcuggcuggcaggggacaca

SEQ ID NO: 576688 - RNA, 22 nt, Human
cccaggcugugcaaacuucaaa

SEQ ID NO: 576689 - RNA, 22 nt, Human
aaaguugaguuuuauguguuac

SEQ ID NO: 576690 - RNA, 22 nt, Human
auugcugaacuuauaaaugaau

SEQ ID NO: 576691 - RNA, 22 nt, Human
acacagcuucaaagucuaauuc

SEQ ID NO: 576692 - RNA, 22 nt, Human
uuuacauggaauauugucuugu

SEQ ID NO: 576693 - RNA, 22 nt, Human
agucuccucuuuccuuguuauu

SEQ ID NO: 576694 - RNA, 23 nt, Human
uggcccugaaucuguccuggagg

SEQ ID NO: 576695 - RNA, 22 nt, Human
aagcacaucauguuguucagac

SEQ ID NO: 576696 - RNA, 22 nt, Human
uuacaguuuacauaagaauugu

SEQ ID NO: 576697 - RNA, 22 nt, Human
cuuuguuuuacucagaggcaug

SEQ ID NO: 576698 - RNA, 22 nt, Human
gggaggagcuuggagauucacu

SEQ ID NO: 576699 - RNA, 22 nt, Human
agcacuuuccuggcaaaugugg

SEQ ID NO: 576700 - RNA, 22 nt, Human
uggcugagccuuuggggcuuuc

SEQ ID NO: 576701 - RNA, 22 nt, Human
aguuaagagugugaaaauguua

SEQ ID NO: 576702 - RNA, 22 nt, Human
cugcucugagaggcucuuccua

SEQ ID NO: 576703 - RNA, 22 nt, Human
aaagcacuucaggagcaguuug

SEQ ID NO: 576704 - RNA, 22 nt, Human
gcuggaguaggaccaugcuuga

SEQ ID NO: 576705 - RNA, 22 nt, Human
augaggucacaguguuuggcau

SEQ ID NO: 576706 - RNA, 22 nt, Human
ggggcaggagcccuucuucagc

SEQ ID NO: 576707 - RNA, 22 nt, Human
ccagggcuggaccagugcuugg

SEQ ID NO: 576708 - RNA, 22 nt, Human
ggcugugcgggcagccguggga

SEQ ID NO: 576709 - RNA, 22 nt, Human
cuggcagugacauugcaggugc

SEQ ID NO: 576710 - RNA, 22 nt, Human
accagcucagagcaggcuccug

SEQ ID NO: 576711 - RNA, 22 nt, Human
gccaggagacuccauucauuug

SEQ ID NO: 576712 - RNA, 22 nt, Human
ugagcugguucuugaggcauga

SEQ ID NO: 576713 - RNA, 22 nt, Human
uguggccugauuuugcaucucu

SEQ ID NO: 576714 - RNA, 22 nt, Human
auucaccuguuaguaaaaaucu

SEQ ID NO: 576715 - RNA, 22 nt, Human
ggaagggccucgggcgugggac

SEQ ID NO: 576716 - RNA, 22 nt, Human
uagcuuugcccgugcuggauuu

SEQ ID NO: 576717 - RNA, 22 nt, Human
caagcaaugcuauacucauuau

SEQ ID NO: 576718 - RNA, 22 nt, Human
uucagugugugauaccugcugu

SEQ ID NO: 576719 - RNA, 22 nt, Human
acccaggguagaaccucagagc

SEQ ID NO: 576720 - RNA, 22 nt, Human
gcugcagguugggcaacagagu

SEQ ID NO: 576721 - RNA, 22 nt, Human
acauuucuugaugccucuguga

SEQ ID NO: 576722 - RNA, 22 nt, Human
ccagugcacagccaggcaggug

SEQ ID NO: 576723 - RNA, 22 nt, Human
cagcuucccagcucacucauaa

SEQ ID NO: 576724 - RNA, 22 nt, Human
uuucucaaccucaacacuauuu

SEQ ID NO: 576725 - RNA, 22 nt, Human
cccagggaaggcagauggagga

SEQ ID NO: 576726 - RNA, 22 nt, Human
acauggcacccagaucucaaaa

SEQ ID NO: 576727 - RNA, 22 nt, Human
cccaggaggcagagguuggagc

SEQ ID NO: 576728 - RNA, 22 nt, Human
aacacugcugcuggguucugug

SEQ ID NO: 576729 - RNA, 22 nt, Human
agcacacaguauuagccauugu

SEQ ID NO: 576730 - RNA, 22 nt, Human
caagauuuagccugcugccugu

SEQ ID NO: 576731 - RNA, 22 nt, Human
gcucaagggaugggagugggug

SEQ ID NO: 576732 - RNA, 22 nt, Human
uugccugugaacgcugaguccu

SEQ ID NO: 576733 - RNA, 22 nt, Human
cuggggcugugggagacaaggc

SEQ ID NO: 576734 - RNA, 22 nt, Human
agcaucccaugacucuggagga

SEQ ID NO: 576735 - RNA, 22 nt, Human
cagcuugggaguuugguuuuau

SEQ ID NO: 576736 - RNA, 22 nt, Human
ucagugaaguaauggugagaga

SEQ ID NO: 576737 - RNA, 22 nt, Human
ucaauagauuagguauuagauu

SEQ ID NO: 576738 - RNA, 22 nt, Human
cugccagcucaaagcgcagcua

SEQ ID NO: 576739 - RNA, 22 nt, Human
auccauuucuaucuugcugagg

SEQ ID NO: 576740 - RNA, 22 nt, Human
aagggaaacuuucacaaugucc

SEQ ID NO: 576741 - RNA, 22 nt, Human
ugcaggcucugugugugccugg

SEQ ID NO: 576742 - RNA, 22 nt, Human
aaagggaggggcgauaagccgg

SEQ ID NO: 576743 - RNA, 22 nt, Human
auauggaaguuaccugacuuca

SEQ ID NO: 576744 - RNA, 22 nt, Human
uccuuauaguugucuuugaacc

SEQ ID NO: 576745 - RNA, 22 nt, Human
agauugguguugcagaaccaug

SEQ ID NO: 576746 - RNA, 22 nt, Human
uaaggcagccgcucagagaggu

SEQ ID NO: 576747 - RNA, 22 nt, Human
gggagggaucugcuaggcaaug

SEQ ID NO: 576748 - RNA, 22 nt, Human
uuagggcuuuucugaauaggcc

SEQ ID NO: 576749 - RNA, 18 nt, Human
ccuggagcuccacagcaa

SEQ ID NO: 576750 - RNA, 23 nt, Human
augagguaaagaucagcuuuaaa

SEQ ID NO: 576751 - RNA, 22 nt, Human
uggcucugaucagauguccagu

SEQ ID NO: 576752 - RNA, 22 nt, Human
ccaggcuuccuaaugugugcag

SEQ ID NO: 576753 - RNA, 23 nt, Human
aagaggaggcccugcucccgucc

SEQ ID NO: 576754 - RNA, 22 nt, Human
cagggagcggagucccaugccu

SEQ ID NO: 576755 - RNA, 22 nt, Human
aggugagaaaacgaggguugca

SEQ ID NO: 576756 - RNA, 22 nt, Human
aaagguuuauuuaaucagggag

SEQ ID NO: 576757 - RNA, 22 nt, Human
guccucagagugggcagguccu

SEQ ID NO: 576758 - RNA, 22 nt, Human
cugauacaaugcuaauaaauuu

SEQ ID NO: 576759 - RNA, 22 nt, Human
gaagcaguuucuguaaugaaau

SEQ ID NO: 576760 - RNA, 22 nt, Human
cccugggauggauuggcaggaa

SEQ ID NO: 576761 - RNA, 22 nt, Human
uggcucaguuccaucaucugga

SEQ ID NO: 576762 - RNA, 22 nt, Human
acuuggagagcauugcugggga

SEQ ID NO: 576763 - RNA, 22 nt, Human
ugggugaggagaggcugucuaa

SEQ ID NO: 576764 - RNA, 22 nt, Human
cagcuuugugacuucggacaag

SEQ ID NO: 576765 - RNA, 18 nt, Human
ugcacuagaugcuggcag

SEQ ID NO: 576766 - RNA, 17 nt, Human
agcauuuguguuaacag

SEQ ID NO: 576767 - RNA, 22 nt, Human
gcaggauggugcccuuucugcc

SEQ ID NO: 576768 - RNA, 20 nt, Human
cugggcugcccagcuauggg

SEQ ID NO: 576769 - RNA, 23 nt, Human
aggaaugugcccacccaucuccu

SEQ ID NO: 576770 - RNA, 22 nt, Human
ugggagaagacguacuuuagac

SEQ ID NO: 576771 - RNA, 22 nt, Human
cugggccucaugcacagagaug

SEQ ID NO: 576772 - RNA, 22 nt, Human
auccaaagcccuaaguuaacug

SEQ ID NO: 576773 - RNA, 22 nt, Human
gcagagaaaguuuuguccucag

SEQ ID NO: 576774 - RNA, 20 nt, Human
uaaagacauaagcuacuauc

SEQ ID NO: 576775 - RNA, 22 nt, Human
ucacugcucuccaauguggagu

SEQ ID NO: 576776 - RNA, 22 nt, Human
uucuaugaagguaagauguacg

SEQ ID NO: 576777 - RNA, 22 nt, Human
ggcugggcaggucugcacaggg

SEQ ID NO: 576778 - RNA, 22 nt, Human
uggcacugggacagaugcucuc

SEQ ID NO: 576779 - RNA, 22 nt, Human
gugaagcacaugggcguugggu

SEQ ID NO: 576780 - RNA, 22 nt, Human
agggcagacuaggauggaagug

SEQ ID NO: 576781 - RNA, 16 nt, Human
acugcuuuucauaaga

SEQ ID NO: 576782 - RNA, 22 nt, Human
cagagcugagucuucaagguug

SEQ ID NO: 576783 - RNA, 22 nt, Human
uucuuuuaauguucugaaguuu

SEQ ID NO: 576784 - RNA, 22 nt, Human
uaauuacagguccaaaacaauc

SEQ ID NO: 576785 - RNA, 22 nt, Human
gugggccacaucccagggcucu

SEQ ID NO: 576786 - RNA, 22 nt, Human
uagcauuaaagguaagacauua

SEQ ID NO: 576787 - RNA, 22 nt, Human
cagagggagcccuccaggagca

SEQ ID NO: 576788 - RNA, 22 nt, Human
ucaacaaugggucuguaaugga

SEQ ID NO: 576789 - RNA, 22 nt, Human
acagcucugagauauuacuauu

SEQ ID NO: 576790 - RNA, 22 nt, Human
gcccugugccagucacgcugug

SEQ ID NO: 576791 - RNA, 22 nt, Human
auuauggagaaauauguacagg

SEQ ID NO: 576792 - RNA, 21 nt, Human
ucuaugcaagacccuaguccu

SEQ ID NO: 576793 - RNA, 20 nt, Human
uugaggucaaggacuaggcc

SEQ ID NO: 576794 - RNA, 22 nt, Human
auggcuaaaccugaacuggucu

SEQ ID NO: 576795 - RNA, 20 nt, Human
agaaacagcacaauucuguu

SEQ ID NO: 576796 - RNA, 22 nt, Human
uuagaaauacaagugagguuga

SEQ ID NO: 576797 - RNA, 22 nt, Human
auuuagaaguuggagggcaaga

SEQ ID NO: 576798 - RNA, 22 nt, Human
ucccaggacaggccacauggaa

SEQ ID NO: 576799 - RNA, 22 nt, Human
uuuauugagcacccguugugcg

SEQ ID NO: 576800 - RNA, 22 nt, Human
ucuccugcucccaacugcugca

SEQ ID NO: 576801 - RNA, 22 nt, Human
cacaguaugaucuaaaguaagu

SEQ ID NO: 576802 - RNA, 22 nt, Human
cagggccacccucugcugggug

SEQ ID NO: 576803 - RNA, 22 nt, Human
ugccugggaaccaauccuggcu

SEQ ID NO: 576804 - RNA, 22 nt, Human
ggagggagcauccccuugcuga

SEQ ID NO: 576805 - RNA, 22 nt, Human
uuuuuuauagcaaugaacccac

SEQ ID NO: 576806 - RNA, 22 nt, Human
cacaugcaguuuacgucacuga

SEQ ID NO: 576807 - RNA, 22 nt, Human
guccucuccaggaggcucugau

SEQ ID NO: 576808 - RNA, 22 nt, Human
uaggaucucaccauagaaggaa

SEQ ID NO: 576809 - RNA, 22 nt, Human
cagggcuugaucugcauccugc

SEQ ID NO: 576810 - RNA, 22 nt, Human
gugcccugacacaccuggugug

SEQ ID NO: 576811 - RNA, 22 nt, Human
auuuccuaauuuagggauagac

SEQ ID NO: 576812 - RNA, 19 nt, Human
aguaugucuaugagucuuu

SEQ ID NO: 576813 - RNA, 22 nt, Human
ugagcaagacccggccucugcc

SEQ ID NO: 576814 - RNA, 22 nt, Human
ugaggugguuuguaucacuggg

SEQ ID NO: 576815 - RNA, 22 nt, Human
acacagauauuguacuugaucc

SEQ ID NO: 576816 - RNA, 22 nt, Human
acaggcagguugagaaacauuu

SEQ ID NO: 576817 - RNA, 22 nt, Human
uccuuccuggggucucugcugc

SEQ ID NO: 576818 - RNA, 22 nt, Human
uaguuaaagcccuaaauugaua

SEQ ID NO: 576819 - RNA, 22 nt, Human
ugaagucucuguuuucucauuu

SEQ ID NO: 576820 - RNA, 22 nt, Human
ggcagccauggacacuggcuag

SEQ ID NO: 576821 - RNA, 22 nt, Human
ugaacacagcauauuuuguuac

SEQ ID NO: 576822 - RNA, 20 nt, Human
ugggagaagaacacuggaac

SEQ ID NO: 576823 - RNA, 22 nt, Human
ucaucacauguguagucauccc

SEQ ID NO: 576824 - RNA, 22 nt, Human
cuacaagauuuuuaaaacugua

SEQ ID NO: 576825 - RNA, 22 nt, Human
uacauuugcuuugauuuucagc

SEQ ID NO: 576826 - RNA, 22 nt, Human
ggagugaaucacuagaugcaga

SEQ ID NO: 576827 - RNA, 22 nt, Human
uggagcaggugggaugucguga

SEQ ID NO: 576828 - RNA, 22 nt, Human
ucacagcaaaugcugcuucuca

SEQ ID NO: 576829 - RNA, 22 nt, Human
gaccuggguaaggggcugacaa

SEQ ID NO: 576830 - RNA, 22 nt, Human
ugugaaggagcaugcagagggg

SEQ ID NO: 576831 - RNA, 22 nt, Human
acagcaguuacugaaauaaagu

SEQ ID NO: 576832 - RNA, 22 nt, Human
cuccuucuccucgggaggccag

SEQ ID NO: 576833 - RNA, 22 nt, Human
ugugaagaucaggguccuagag

SEQ ID NO: 576834 - RNA, 22 nt, Human
gaggcagcaucuauggugggaa

SEQ ID NO: 576835 - RNA, 21 nt, Human
aggaaaggccagcacguaggg

SEQ ID NO: 576836 - RNA, 22 nt, Human
aaaguaagauuugcauuucaga

SEQ ID NO: 576837 - RNA, 22 nt, Human
uuuacugaacugcuaguacagg

SEQ ID NO: 576838 - RNA, 22 nt, Human
aguaaagcggugucacagaaug

SEQ ID NO: 576839 - RNA, 22 nt, Human
ugcugaauauagagcaagaagu

SEQ ID NO: 576840 - RNA, 22 nt, Human
agugccuggaccccaugacaua

SEQ ID NO: 576841 - RNA, 22 nt, Human
uuggcagggcugcuugucuagg

SEQ ID NO: 576842 - RNA, 22 nt, Human
cugcuucauauuucauagugau

SEQ ID NO: 576843 - RNA, 19 nt, Human
cugugcaggccgggcugag

SEQ ID NO: 576844 - RNA, 22 nt, Human
auuguacaaugccuggaacauu

SEQ ID NO: 576845 - RNA, 22 nt, Human
aggagaccuuuugagugugaga

SEQ ID NO: 576846 - RNA, 22 nt, Human
uggcagagucugggcuugggca

SEQ ID NO: 576847 - RNA, 22 nt, Human
ucucaucuuuaaaugaaaauuu

SEQ ID NO: 576848 - RNA, 22 nt, Human
aaagggagcauggcugcaggga

SEQ ID NO: 576849 - RNA, 20 nt, Human
ucuccuggugacaguaccca

SEQ ID NO: 576850 - RNA, 22 nt, Human
cccagggauuauaaaggugaaa

SEQ ID NO: 576851 - RNA, 22 nt, Human
acuugguugaugucauaagguu

SEQ ID NO: 576852 - RNA, 22 nt, Human
cauggaacaaggaagauguuug

SEQ ID NO: 576853 - RNA, 22 nt, Human
ugggagaagagaaauuacugcc

SEQ ID NO: 576854 - RNA, 22 nt, Human
auauagcugagggguauuauaa

SEQ ID NO: 576855 - RNA, 22 nt, Human
ugcauuaguaaguaauuuuaau

SEQ ID NO: 576856 - RNA, 22 nt, Human
aaaggcacuggauagcugggga

SEQ ID NO: 576857 - RNA, 22 nt, Human
cacuuaaagucuuagcuuacag

SEQ ID NO: 576858 - RNA, 22 nt, Human
gugggaagaacuucaaguggcu

SEQ ID NO: 576859 - RNA, 22 nt, Human
aauagcugggaggcacauucau

SEQ ID NO: 576860 - RNA, 22 nt, Human
ggcagcaaauauugucagcugu

SEQ ID NO: 576861 - RNA, 22 nt, Human
caggaggcagaggaugcccagu

SEQ ID NO: 576862 - RNA, 22 nt, Human
gcugagguggagauugcaguga

SEQ ID NO: 576863 - RNA, 22 nt, Human
cucccagccuucgccagucuga

SEQ ID NO: 576864 - RNA, 22 nt, Human
gugaggagcucuuugacucacg

SEQ ID NO: 576865 - RNA, 21 nt, Human
ucuuuccugcccaguugcccu

SEQ ID NO: 576866 - RNA, 22 nt, Human
ugguuucucagacucuuugcag

SEQ ID NO: 576867 - RNA, 22 nt, Human
aaauaggagcuuaagcacuucu

SEQ ID NO: 576868 - RNA, 22 nt, Human
uccaguacaggucucucauuuc

SEQ ID NO: 576869 - RNA, 22 nt, Human
uaaauuguuuucuagaaguugu

SEQ ID NO: 576870 - RNA, 22 nt, Human
caggagccccaggcugacaaua

SEQ ID NO: 576871 - RNA, 22 nt, Human
agggcugaccuaagcuccacuu

SEQ ID NO: 576872 - RNA, 22 nt, Human
ucccagagcccaaguuggagag

SEQ ID NO: 576873 - RNA, 22 nt, Human
uccuuagcugugaaaugagaau

SEQ ID NO: 576874 - RNA, 22 nt, Human
guacaauaacuagucuuauagu

SEQ ID NO: 576875 - RNA, 22 nt, Human
uuauguuuuauggcuauaucau

SEQ ID NO: 576876 - RNA, 22 nt, Human
ugugucugaacuaguugcucuc

SEQ ID NO: 576877 - RNA, 22 nt, Human
ucagccucauuuucugcucugu

SEQ ID NO: 576878 - RNA, 22 nt, Human
agcuguguccugaagacacugc

SEQ ID NO: 576879 - RNA, 22 nt, Human
guuauauauaguauuucucuga

SEQ ID NO: 576880 - RNA, 22 nt, Human
aaaguacaaggaaaggaucuga

SEQ ID NO: 576881 - RNA, 22 nt, Human
aucaguuuguauaugaaacacu

SEQ ID NO: 576882 - RNA, 22 nt, Human
caggugggcugccucuccagcu

SEQ ID NO: 576883 - RNA, 22 nt, Human
ugccugcaagaguuggggcuac

SEQ ID NO: 576884 - RNA, 22 nt, Human
ugugucucuccuggaagcacgu

SEQ ID NO: 576885 - RNA, 22 nt, Human
cauuuacacacagaggugugcu

SEQ ID NO: 576886 - RNA, 22 nt, Human
ugagagugguucagcucagaag

SEQ ID NO: 576887 - RNA, 22 nt, Human
cagagaaacucagauagcugau

SEQ ID NO: 576888 - RNA, 22 nt, Human
guuccuaagcuguggcccugga

SEQ ID NO: 576889 - RNA, 21 nt, Human
acuuuacaauuuacauaguga

SEQ ID NO: 576890 - RNA, 17 nt, Human
agccugggaaggaguga

SEQ ID NO: 576891 - RNA, 22 nt, Human
gugaaggaggggccacagauau

SEQ ID NO: 576892 - RNA, 22 nt, Human
uuuaggaucucucuuguuacau

SEQ ID NO: 576893 - RNA, 22 nt, Human
uugcugaaguauugugaauccu

SEQ ID NO: 576894 - RNA, 22 nt, Human
aucugaaacucugacauugucu

SEQ ID NO: 576895 - RNA, 22 nt, Human
gacaaagccuaagaaguauuua

SEQ ID NO: 576896 - RNA, 22 nt, Human
gaguuagagccauagagcacgg

SEQ ID NO: 576897 - RNA, 17 nt, Human
uagcugccccgaaugcu

SEQ ID NO: 576898 - RNA, 22 nt, Human
ucuguauaaggacaaacauuua

SEQ ID NO: 576899 - RNA, 22 nt, Human
uauagaaguaagcauugugaug

SEQ ID NO: 576900 - RNA, 22 nt, Human
ggucagaacaaggguaaauaaa

SEQ ID NO: 576901 - RNA, 22 nt, Human
cugaggugaugucaaauggguu

SEQ ID NO: 576902 - RNA, 22 nt, Human
augcauucagcggaaugcuuag

SEQ ID NO: 576903 - RNA, 22 nt, Human
acauuucugcaucucagagcua

SEQ ID NO: 576904 - RNA, 22 nt, Human
ggcccuguuagagcucccacaa

SEQ ID NO: 576905 - RNA, 22 nt, Human
uagggaugagccaguggguagu

SEQ ID NO: 576906 - RNA, 22 nt, Human
ccaguguuuccgucaguacacg

SEQ ID NO: 576907 - RNA, 22 nt, Human
uccuggccaaguagauguggcg

SEQ ID NO: 576908 - RNA, 22 nt, Human
ucuggaguaauuacagugacug

SEQ ID NO: 576909 - RNA, 22 nt, Human
aaagcagcggugucuuuacugc

SEQ ID NO: 576910 - RNA, 22 nt, Human
cuuuuuccagcuucaggguggg

SEQ ID NO: 576911 - RNA, 22 nt, Human
acuuuguuuuauagcacauaag

SEQ ID NO: 576912 - RNA, 22 nt, Human
gagcccagguucugcuuccagc

SEQ ID NO: 576913 - RNA, 22 nt, Human
ucuucacugugaauuuguucuu

SEQ ID NO: 576914 - RNA, 22 nt, Human
ugccugaggagucagggcaggu

SEQ ID NO: 576915 - RNA, 22 nt, Human
uccugagaauagaguugcaugu

SEQ ID NO: 576916 - RNA, 22 nt, Human
cagagccaggccugcccucuuu

SEQ ID NO: 576917 - RNA, 22 nt, Human
acuuagcagguacuuucauauu

SEQ ID NO: 576918 - RNA, 23 nt, Human
uaguuacauuauugucagagcug

SEQ ID NO: 576919 - RNA, 22 nt, Human
aacaugugucuugcauuucuug

SEQ ID NO: 576920 - RNA, 22 nt, Human
cucuuucucgccgcccgcaguc

SEQ ID NO: 576921 - RNA, 22 nt, Human
gggcaugacuuuuggaguggga

SEQ ID NO: 576922 - RNA, 22 nt, Human
uccugaaaugugcacaugacau

SEQ ID NO: 576923 - RNA, 22 nt, Human
uugagguccaggugugggcagg

SEQ ID NO: 576924 - RNA, 22 nt, Human
cuuguauugcuguuuugcaucu

SEQ ID NO: 576925 - RNA, 22 nt, Human
uauugacagugacuauugguag

SEQ ID NO: 576926 - RNA, 22 nt, Human
caccagcuucccaucgcggguc

SEQ ID NO: 576927 - RNA, 22 nt, Human
gccuugaacucauguauauuga

SEQ ID NO: 576928 - RNA, 22 nt, Human
ggagaggaaaugccagcacuuc

SEQ ID NO: 576929 - RNA, 22 nt, Human
agaggccagguccagaguuugu

SEQ ID NO: 576930 - RNA, 22 nt, Human
guggcagaaacuggcagaggag

SEQ ID NO: 576931 - RNA, 22 nt, Human
ugagguggcuagggaggcacuc

SEQ ID NO: 576932 - RNA, 22 nt, Human
gaggcugagaguuuguucuacu

SEQ ID NO: 576933 - RNA, 22 nt, Human
gcaguguggccccaguaucacg

SEQ ID NO: 576934 - RNA, 21 nt, Human
ucaggaggcucagacuccugc

SEQ ID NO: 576935 - RNA, 22 nt, Human
uuuccacuccuauugcaucuca

SEQ ID NO: 576936 - RNA, 22 nt, Human
cugccugcugccuguggagggu

SEQ ID NO: 576937 - RNA, 22 nt, Human
gggugggauggcaggagccgcu

SEQ ID NO: 576938 - RNA, 19 nt, Human
uguguucauucaucagagg

SEQ ID NO: 576939 - RNA, 22 nt, Human
aggagccaaauuuuagacucug

SEQ ID NO: 576940 - RNA, 22 nt, Human
ggccaggagcugcacagggcuc

SEQ ID NO: 576941 - RNA, 23 nt, Human
guauuucagcauucucaguuaaa

SEQ ID NO: 576942 - RNA, 23 nt, Human
aaaaucuucugccuaugaagaaa

SEQ ID NO: 576943 - RNA, 22 nt, Human
gacuuuugaauaagguaggaua

SEQ ID NO: 576944 - RNA, 22 nt, Human
accugcccaugaaaauggggag

SEQ ID NO: 576945 - RNA, 22 nt, Human
uuuuccugggcuuucuguguaa

SEQ ID NO: 576946 - RNA, 21 nt, Human
aagauccaagcaggcacuugu

SEQ ID NO: 576947 - RNA, 22 nt, Human
gaagcugaggucaggugggugg

SEQ ID NO: 576948 - RNA, 22 nt, Human
uaaagugugcauggucaaauau

SEQ ID NO: 576949 - RNA, 22 nt, Human
auauacaguuuuacaggguuuc

SEQ ID NO: 576950 - RNA, 22 nt, Human
auuagaauuaugcuugcuaaug

SEQ ID NO: 576951 - RNA, 22 nt, Human
uccuaacugcccugggcaaggu

SEQ ID NO: 576952 - RNA, 22 nt, Human
uacaguauggaaaauguauagu

SEQ ID NO: 576953 - RNA, 22 nt, Human
ccugccugcagaaaguaucucc

SEQ ID NO: 576954 - RNA, 22 nt, Human
uucucuuacauuuucucagccu

SEQ ID NO: 576955 - RNA, 22 nt, Human
ccaggagagcucuaaauggcug

SEQ ID NO: 576956 - RNA, 22 nt, Human
uggccuggugucugcgaggccu

SEQ ID NO: 576957 - RNA, 23 nt, Human
cuuguauucacucauuugggaac

SEQ ID NO: 576958 - RNA, 21 nt, Human
aagggagauaggaaucaggcc

SEQ ID NO: 576959 - RNA, 22 nt, Human
agcucucugauaaauugauaaa

SEQ ID NO: 576960 - RNA, 22 nt, Human
aggggaaggccagccuguagag

SEQ ID NO: 576961 - RNA, 22 nt, Human
cugcagggcagggccuccuggc

SEQ ID NO: 576962 - RNA, 22 nt, Human
ugggagaacccagggucaggcu

SEQ ID NO: 576963 - RNA, 22 nt, Human
gcaggacuugaauccaggcagu

SEQ ID NO: 576964 - RNA, 22 nt, Human
caaaacauucagagagcucacu

SEQ ID NO: 576965 - RNA, 22 nt, Human
ccugggcaucaacaagcagaga

SEQ ID NO: 576966 - RNA, 22 nt, Human
uccaggucccagacugggcagc

SEQ ID NO: 576967 - RNA, 22 nt, Human
cagagcugagaauguugaugcu

SEQ ID NO: 576968 - RNA, 22 nt, Human
ucagccuccgaaagugcuggga

SEQ ID NO: 576969 - RNA, 22 nt, Human
aguguuucaagugaugcuuugg

SEQ ID NO: 576970 - RNA, 23 nt, Human
auuuuaaccuugacuaacaugca

SEQ ID NO: 576971 - RNA, 22 nt, Human
gcugcuucucugauggagucca

SEQ ID NO: 576972 - RNA, 22 nt, Human
cccaggcuggagugcaauggug

SEQ ID NO: 576973 - RNA, 22 nt, Human
uggccuggcccugaggcccugu

SEQ ID NO: 576974 - RNA, 22 nt, Human
ccacugccaugggcuaggcaug

SEQ ID NO: 576975 - RNA, 22 nt, Human
uucugucugauggugccagaac

SEQ ID NO: 576976 - RNA, 22 nt, Human
aauuuuauuaacuggauguagc

SEQ ID NO: 576977 - RNA, 22 nt, Human
uugauacaggcucuauuucauc

SEQ ID NO: 576978 - RNA, 23 nt, Human
gacagagugagaccuugucuuac

SEQ ID NO: 576979 - RNA, 22 nt, Human
auuacaauaauacaugcucauu

SEQ ID NO: 576980 - RNA, 22 nt, Human
cugucccucucacaccucacca

SEQ ID NO: 576981 - RNA, 22 nt, Human
auacaucuuccuuuuaaaaugc

SEQ ID NO: 576982 - RNA, 22 nt, Human
auuuuaauaagauccauuuggu

SEQ ID NO: 576983 - RNA, 22 nt, Human
ugggaugucuuuaggggaagag

SEQ ID NO: 576984 - RNA, 23 nt, Human
ggcagccucugacucugcuuugc

SEQ ID NO: 576985 - RNA, 22 nt, Human
ucucagaagugaucaggauguu

SEQ ID NO: 576986 - RNA, 21 nt, Human
agaccucuucccuucaugcac

SEQ ID NO: 576987 - RNA, 22 nt, Human
ucagggagaggugagagccugu

SEQ ID NO: 576988 - RNA, 22 nt, Human
ucccuggcuguguucaggugcg

SEQ ID NO: 576989 - RNA, 22 nt, Human
aucacuguggcccaaaaccuca

SEQ ID NO: 576990 - RNA, 22 nt, Human
ucuguggcacgauugcacugca

SEQ ID NO: 576991 - RNA, 22 nt, Human
ccaggcugugcuuuucauaaau

SEQ ID NO: 576992 - RNA, 22 nt, Human
ccacacugaaccucagugucuu

SEQ ID NO: 576993 - RNA, 22 nt, Human
cugauccuccuuuaaguagcug

SEQ ID NO: 576994 - RNA, 22 nt, Human
ucacacuggcagugcugaaggc

SEQ ID NO: 576995 - RNA, 19 nt, Human
gcauaaauacacuauuguc

SEQ ID NO: 576996 - RNA, 22 nt, Human
uagcauuuggcaccaguuauuu

SEQ ID NO: 576997 - RNA, 22 nt, Human
ucaggcugaccagguuuugcuc

SEQ ID NO: 576998 - RNA, 22 nt, Human
ucuucucuguggccugguggug

SEQ ID NO: 576999 - RNA, 22 nt, Human
uaacuucugcacagaaaauuug

SEQ ID NO: 577000 - RNA, 22 nt, Human
ccuccccugcucagaacucugg

SEQ ID NO: 577001 - RNA, 22 nt, Human
cauacuuuugcccugacauucu

SEQ ID NO: 577002 - RNA, 22 nt, Human
cucaggaguuggaggcuacagu

SEQ ID NO: 577003 - RNA, 22 nt, Human
gcaugcacgggcacauaugcua

SEQ ID NO: 577004 - RNA, 22 nt, Human
caucaaaucugacuuuucuucc

SEQ ID NO: 577005 - RNA, 22 nt, Human
agauccuuaauuuaaucacauc

SEQ ID NO: 577006 - RNA, 22 nt, Human
gaaggaggucugauacaauaug

SEQ ID NO: 577007 - RNA, 19 nt, Human
cuuauuucugguuuugggu

SEQ ID NO: 577008 - RNA, 22 nt, Human
agggaagccccgaggaggcacc

SEQ ID NO: 577009 - RNA, 22 nt, Human
cgugagcaaaauggacacuccc

SEQ ID NO: 577010 - RNA, 22 nt, Human
augaucucauucuuucaaaggg

SEQ ID NO: 577011 - RNA, 22 nt, Human
cagcucugugggagcguaugug

SEQ ID NO: 577012 - RNA, 22 nt, Human
aaagaguuuccauugacauuuc

SEQ ID NO: 577013 - RNA, 22 nt, Human
augaggcccaaacauuacaaau

SEQ ID NO: 577014 - RNA, 22 nt, Human
agcagcaggcuagggaacugcu

SEQ ID NO: 577015 - RNA, 22 nt, Human
uucuuaaucccacaaaucuuca

SEQ ID NO: 577016 - RNA, 21 nt, Human
cagagcugaaggguguagugu

SEQ ID NO: 577017 - RNA, 23 nt, Human
ucauucaaggcugguaucuuuca

SEQ ID NO: 577018 - RNA, 22 nt, Human
gaguuaaaggaaaauaacuuua

SEQ ID NO: 577019 - RNA, 22 nt, Human
ucacacuuagagcgaauuguuu

SEQ ID NO: 577020 - RNA, 22 nt, Human
caagauuugacuucgugguuug

SEQ ID NO: 577021 - RNA, 22 nt, Human
acuggcuucagggggaaagucc

SEQ ID NO: 577022 - RNA, 22 nt, Human
uaacaucaaacugcauuuucua

SEQ ID NO: 577023 - RNA, 22 nt, Human
cagcuuucugucucaugacuga

SEQ ID NO: 577024 - RNA, 22 nt, Human
aacagauaaguauaucuaugua

SEQ ID NO: 577025 - RNA, 22 nt, Human
ugucaaccagguauuuuggucu

SEQ ID NO: 577026 - RNA, 22 nt, Human
uaggggaggggaucaugugcug

SEQ ID NO: 577027 - RNA, 20 nt, Human
agggccuguugcaagcguuu

SEQ ID NO: 577028 - RNA, 18 nt, Human
cagagcaguaugaauguu

SEQ ID NO: 577029 - RNA, 21 nt, Human
uccagggaacuucucaggaau

SEQ ID NO: 577030 - RNA, 22 nt, Human
cugguccuaaagcccuacucca

SEQ ID NO: 577031 - RNA, 22 nt, Human
cuucagaauuccucagccucag

SEQ ID NO: 577032 - RNA, 22 nt, Human
ccacaguaagagauaguuuaug

SEQ ID NO: 577033 - RNA, 22 nt, Human
cuggcucaugugaugagggcaa

SEQ ID NO: 577034 - RNA, 22 nt, Human
cugugcccuguggcuggcaccu

SEQ ID NO: 577035 - RNA, 22 nt, Human
aaggacagaaacagauugcugg

SEQ ID NO: 577036 - RNA, 22 nt, Human
cuuuaugacugaguugucaauu

SEQ ID NO: 577037 - RNA, 18 nt, Human
acuggagcauuagcagcu

SEQ ID NO: 577038 - RNA, 22 nt, Human
uaugaguuuaaggcuaaaauag

SEQ ID NO: 577039 - RNA, 22 nt, Human
uucauacauuuuuacuaacagc

SEQ ID NO: 577040 - RNA, 22 nt, Human
uccuugagccguggccagggcc

SEQ ID NO: 577041 - RNA, 22 nt, Human
aucuuaaucgaguccaugaaaa

SEQ ID NO: 577042 - RNA, 22 nt, Human
caaggccacguucugcaugcgg

SEQ ID NO: 577043 - RNA, 22 nt, Human
aaauguuccggguaaggagaaa

SEQ ID NO: 577044 - RNA, 22 nt, Human
ggggaggaccuuuccaaggcuu

SEQ ID NO: 577045 - RNA, 22 nt, Human
ucagcuucaaauuuggugaagu

SEQ ID NO: 577046 - RNA, 22 nt, Human
ugaaagcagugccaugauuaug

SEQ ID NO: 577047 - RNA, 22 nt, Human
agagcuuagaauuucagaugau

SEQ ID NO: 577048 - RNA, 22 nt, Human
cagcucuggcgucagggagcga

SEQ ID NO: 577049 - RNA, 22 nt, Human
cuaaacaugaacuacauuuagg

SEQ ID NO: 577050 - RNA, 22 nt, Human
agccaaagaucagugugcaagu

SEQ ID NO: 577051 - RNA, 22 nt, Human
uucacagauguauuggaacucc

SEQ ID NO: 577052 - RNA, 22 nt, Human
gcaacaaguguaaacaugcauu

SEQ ID NO: 577053 - RNA, 22 nt, Human
uccugagggcucggggcucaug

SEQ ID NO: 577054 - RNA, 22 nt, Human
uuccuaacaagucuaucuuuga

SEQ ID NO: 577055 - RNA, 22 nt, Human
ggcugugggaugcauaggagcu

SEQ ID NO: 577056 - RNA, 22 nt, Human
gguuaaaaauaauuuacuuggc

SEQ ID NO: 577057 - RNA, 22 nt, Human
uccaggcuuuuucaugcugucu

SEQ ID NO: 577058 - RNA, 22 nt, Human
cacugucugagcuggugauuag

SEQ ID NO: 577059 - RNA, 22 nt, Human
guaagacaagcggacugccguu

SEQ ID NO: 577060 - RNA, 22 nt, Human
cugaaugagggauucugagggc

SEQ ID NO: 577061 - RNA, 22 nt, Human
ugcagugggccggaggccaggg

SEQ ID NO: 577062 - RNA, 22 nt, Human
cucuuaaugaccuuaauucaag

SEQ ID NO: 577063 - RNA, 21 nt, Human
aguuuuuacucuuaacugugg

SEQ ID NO: 577064 - RNA, 22 nt, Human
aucccugcccucauggagcuua

SEQ ID NO: 577065 - RNA, 22 nt, Human
aaagguuauuauuacuauuguc

SEQ ID NO: 577066 - RNA, 22 nt, Human
ucccuggggauguuggccugcc

SEQ ID NO: 577067 - RNA, 22 nt, Human
agucccagaugacccagcuacu

SEQ ID NO: 577068 - RNA, 21 nt, Human
cccaggaggcugagaagagca

SEQ ID NO: 577069 - RNA, 22 nt, Human
augauucuggcaaauuuauuau

SEQ ID NO: 577070 - RNA, 21 nt, Human
gacuggagagaggaagucugg

SEQ ID NO: 577071 - RNA, 22 nt, Human
agcaaauacuugaauaaaaaga

SEQ ID NO: 577072 - RNA, 17 nt, Human
auucucaguguacagug

SEQ ID NO: 577073 - RNA, 22 nt, Human
ggcuccugagaaugggccauca

SEQ ID NO: 577074 - RNA, 22 nt, Human
aguccaagaucaaggugucaac

SEQ ID NO: 577075 - RNA, 22 nt, Human
cucugagaugcuugaagaggau

SEQ ID NO: 577076 - RNA, 21 nt, Human
agauuacaggugugauccacc

SEQ ID NO: 577077 - RNA, 22 nt, Human
auaucacagguguuuaccugau

SEQ ID NO: 577078 - RNA, 22 nt, Human
acagucuaggccuaggucaaaa

SEQ ID NO: 577079 - RNA, 22 nt, Human
aaggccagcccuaaugaugcuc

SEQ ID NO: 577080 - RNA, 22 nt, Human
augaagacaaacgacguugcaa

SEQ ID NO: 577081 - RNA, 22 nt, Human
cagagccuggcgaugucaugga

SEQ ID NO: 577082 - RNA, 22 nt, Human
gacaggcaggccagggcugugg

SEQ ID NO: 577083 - RNA, 22 nt, Human
ugacccaucaggccacaugagg

SEQ ID NO: 577084 - RNA, 22 nt, Human
aaaauagccucacauaauugcu

SEQ ID NO: 577085 - RNA, 22 nt, Human
uuggaacagaaacagacaaaua

SEQ ID NO: 577086 - RNA, 21 nt, Human
cagcacaguacugggucuugc

SEQ ID NO: 577087 - RNA, 22 nt, Human
ggcaucuguccaucucuccagc

SEQ ID NO: 577088 - RNA, 22 nt, Human
ucacuguuaauaaauagcaaag

SEQ ID NO: 577089 - RNA, 22 nt, Human
uuauuuuaccuuccucugagcu

SEQ ID NO: 577090 - RNA, 22 nt, Human
ucuauuuacagaaagcagaauu

SEQ ID NO: 577091 - RNA, 22 nt, Human
cccagcucuuccugggagcuaa

SEQ ID NO: 577092 - RNA, 22 nt, Human
cacccagagccugagagggaua

SEQ ID NO: 577093 - RNA, 22 nt, Human
aucucauaaacacacauauaug

SEQ ID NO: 577094 - RNA, 22 nt, Human
ucucuuccauguuucagcccca

SEQ ID NO: 577095 - RNA, 22 nt, Human
cauuuuauccucugggaagcua

SEQ ID NO: 577096 - RNA, 18 nt, Human
auauccaauaaugaacac

SEQ ID NO: 577097 - RNA, 22 nt, Human
uggcagcugaggggaggcuuug

SEQ ID NO: 577098 - RNA, 22 nt, Human
cagaacuucauauugacguuag

SEQ ID NO: 577099 - RNA, 22 nt, Human
agagcagccugugaugaugcac

SEQ ID NO: 577100 - RNA, 20 nt, Human
cccaggagcugugccccauc

SEQ ID NO: 577101 - RNA, 20 nt, Human
acuuuggggucuuucucaga

SEQ ID NO: 577102 - RNA, 22 nt, Human
gagggaaacagauggguugugg

SEQ ID NO: 577103 - RNA, 18 nt, Human
gggugcaggcacugacug

SEQ ID NO: 577104 - RNA, 22 nt, Human
uucucuccuacccaguauccau

SEQ ID NO: 577105 - RNA, 22 nt, Human
uaggccaggacagagcuuccag

SEQ ID NO: 577106 - RNA, 22 nt, Human
aagcacccaauuuacagcaguu

SEQ ID NO: 577107 - RNA, 22 nt, Human
agagauguucauucagcauguu

SEQ ID NO: 577108 - RNA, 20 nt, Human
ucaaggacucccugggaaga

SEQ ID NO: 577109 - RNA, 23 nt, Human
acacauuuuucccguucugaggu

SEQ ID NO: 577110 - RNA, 22 nt, Human
uucuauuuuuguggaacuguag

SEQ ID NO: 577111 - RNA, 22 nt, Human
gauuauuuugugcaauaaucgg

SEQ ID NO: 577112 - RNA, 22 nt, Human
ucauacauaaauaagaguuuag

SEQ ID NO: 577113 - RNA, 22 nt, Human
uccuuggagguguucaucugcc

SEQ ID NO: 577114 - RNA, 17 nt, Human
ugaaacaccaagacugu

SEQ ID NO: 577115 - RNA, 22 nt, Human
uugacaaucccuguuagaagug

SEQ ID NO: 577116 - RNA, 22 nt, Human
agggcagccucucagccuaggu

SEQ ID NO: 577117 - RNA, 22 nt, Human
ggcuggaauguguggaugugau

SEQ ID NO: 577118 - RNA, 22 nt, Human
auggcagcauaguggcaaguua

SEQ ID NO: 577119 - RNA, 22 nt, Human
cuuccugggacaccuaacucua

SEQ ID NO: 577120 - RNA, 19 nt, Human
gggagcaggaaagcugugg

SEQ ID NO: 577121 - RNA, 22 nt, Human
cuguacaauguuaccuauuuau

SEQ ID NO: 577122 - RNA, 22 nt, Human
cauaacuugcuuuggagcccgg

SEQ ID NO: 577123 - RNA, 22 nt, Human
cuucaugagacuccacugccau

SEQ ID NO: 577124 - RNA, 22 nt, Human
ugcugagacaccuaagguaaau

SEQ ID NO: 577125 - RNA, 22 nt, Human
caggguuucaccauguuagcag

SEQ ID NO: 577126 - RNA, 22 nt, Human
uuccuucucagcccucgaggau

SEQ ID NO: 577127 - RNA, 22 nt, Human
gcagcugggccccagccucucc

SEQ ID NO: 577128 - RNA, 22 nt, Human
gcccagcccugaggucacagcu

SEQ ID NO: 577129 - RNA, 22 nt, Human
caggaaaucacucugauuuugg

SEQ ID NO: 577130 - RNA, 21 nt, Human
gggcagaggggccuccugggu

SEQ ID NO: 577131 - RNA, 21 nt, Human
guucaaauccugacacuacac

SEQ ID NO: 577132 - RNA, 22 nt, Human
ugcaugagcgaauguguccugu

SEQ ID NO: 577133 - RNA, 22 nt, Human
uccuuagcuuacaagucuucug

SEQ ID NO: 577134 - RNA, 22 nt, Human
ccagcucugcauguuucccuug

SEQ ID NO: 577135 - RNA, 22 nt, Human
augggcagaguggggacaggaa

SEQ ID NO: 577136 - RNA, 22 nt, Human
agcugcccuuaauaggcauuca

SEQ ID NO: 577137 - RNA, 22 nt, Human
acccaggagacggaggugcagu

SEQ ID NO: 577138 - RNA, 22 nt, Human
ucaguguuuuuaaagcaauaua

SEQ ID NO: 577139 - RNA, 22 nt, Human
aaauguaagucuuuguuucuua

SEQ ID NO: 577140 - RNA, 22 nt, Human
uaugaaaugauggggaaaauag

SEQ ID NO: 577141 - RNA, 22 nt, Human
uagcuucaugcuucaccacgcu

SEQ ID NO: 577142 - RNA, 22 nt, Human
uuuuauguuccugaagcuaucu

SEQ ID NO: 577143 - RNA, 22 nt, Human
gcugaggccccagggugauggg

SEQ ID NO: 577144 - RNA, 22 nt, Human
cagagguguacagagggaggcc

SEQ ID NO: 577145 - RNA, 22 nt, Human
agugaccauuuucagcuagagg

SEQ ID NO: 577146 - RNA, 22 nt, Human
ggcagagcuaguggcuucucuu

SEQ ID NO: 577147 - RNA, 22 nt, Human
cugaagcagggagugaugaagu

SEQ ID NO: 577148 - RNA, 22 nt, Human
ccugagguuuuuggauaguugu

SEQ ID NO: 577149 - RNA, 22 nt, Human
ugagccagccucagaagucacg

SEQ ID NO: 577150 - RNA, 22 nt, Human
uuugacagggugaugagguggu

SEQ ID NO: 577151 - RNA, 22 nt, Human
ucaggcuguaaauggugugggu

SEQ ID NO: 577152 - RNA, 22 nt, Human
ggagauggaauagauucugacu

SEQ ID NO: 577153 - RNA, 22 nt, Human
ucagcaagaagcugugggcuuc

SEQ ID NO: 577154 - RNA, 22 nt, Human
agaggcugcaggcuggaaauca

SEQ ID NO: 577155 - RNA, 22 nt, Human
cagcuggcagcccuggcccugc

SEQ ID NO: 577156 - RNA, 22 nt, Human
ugcucuaagaacucuaggaauu

SEQ ID NO: 577157 - RNA, 22 nt, Human
gcucugcuugcaucaugacugc

SEQ ID NO: 577158 - RNA, 22 nt, Human
ggaugggugacuuugggcaaug

SEQ ID NO: 577159 - RNA, 22 nt, Human
gcaguacuuuaagggaugaagc

SEQ ID NO: 577160 - RNA, 22 nt, Human
ucauauaacuggauauuuucaa

SEQ ID NO: 577161 - RNA, 22 nt, Human
ucacacaggguucuggucucau

SEQ ID NO: 577162 - RNA, 22 nt, Human
uguggggcuuacaaaggcagau

SEQ ID NO: 577163 - RNA, 19 nt, Human
ggcugcagagccccggcgc

SEQ ID NO: 577164 - RNA, 20 nt, Human
gaaaauaggccagccaggua

SEQ ID NO: 577165 - RNA, 22 nt, Human
uuaauuuugaugagguucaguu

SEQ ID NO: 577166 - RNA, 20 nt, Human
uuuuccuuguugccgcugcu

SEQ ID NO: 577167 - RNA, 22 nt, Human
gacacaggggggcgcuagaaga

SEQ ID NO: 577168 - RNA, 22 nt, Human
gcaaugcauauguggguagcau

SEQ ID NO: 577169 - RNA, 22 nt, Human
ucccaggaugugcgugccgccg

SEQ ID NO: 577170 - RNA, 22 nt, Human
aaaguucuucauuuuuauugga

SEQ ID NO: 577171 - RNA, 22 nt, Human
gcuggagccauuggcuuggccu

SEQ ID NO: 577172 - RNA, 22 nt, Human
ggagugaagcaaauaaugcugg

SEQ ID NO: 577173 - RNA, 22 nt, Human
aggcuggagugcaauggcguga

SEQ ID NO: 577174 - RNA, 22 nt, Human
gacaggccaggggcugaggugg

SEQ ID NO: 577175 - RNA, 19 nt, Human
ucugugcugggaggcagca

SEQ ID NO: 577176 - RNA, 22 nt, Human
ugggccacggggguggagagcu

SEQ ID NO: 577177 - RNA, 22 nt, Human
ccaugccagcugcuaggucaca

SEQ ID NO: 577178 - RNA, 22 nt, Human
aacuguaauuuuuacauaguaa

SEQ ID NO: 577179 - RNA, 22 nt, Human
uucaagucuggagaucuggaac

SEQ ID NO: 577180 - RNA, 22 nt, Human
ggccugaaugccugaguguggg

SEQ ID NO: 577181 - RNA, 20 nt, Human
cuccaggggaagagccuucc

SEQ ID NO: 577182 - RNA, 22 nt, Human
cccaggcuggaauuccaggccu

SEQ ID NO: 577183 - RNA, 22 nt, Human
ggggauggauuccgggucccug

SEQ ID NO: 577184 - RNA, 22 nt, Human
caugccaacaacaagcaaugag

SEQ ID NO: 577185 - RNA, 22 nt, Human
ucuggcagugauuucugugauc

SEQ ID NO: 577186 - RNA, 22 nt, Human
uguguucuccuacagauaagga

SEQ ID NO: 577187 - RNA, 22 nt, Human
gcucuggcuaguuaccucuuac

SEQ ID NO: 577188 - RNA, 22 nt, Human
acugggccuguacagagaaaac

SEQ ID NO: 577189 - RNA, 22 nt, Human
aagaccucugaaguaccuggug

SEQ ID NO: 577190 - RNA, 22 nt, Human
gugcccagugcaggcccgcagg

SEQ ID NO: 577191 - RNA, 22 nt, Human
cuggggcagagcccagcaauuu

SEQ ID NO: 577192 - RNA, 22 nt, Human
uuggccuccacauuuuccaggu

SEQ ID NO: 577193 - RNA, 22 nt, Human
gcaggcacaugggcgggucugg

SEQ ID NO: 577194 - RNA, 22 nt, Human
gccccacuguggaaccuaaguc

SEQ ID NO: 577195 - RNA, 23 nt, Human
gccagccuugcucuccugcagcc

SEQ ID NO: 577196 - RNA, 22 nt, Human
ccagccagccuugaucugagua

SEQ ID NO: 577197 - RNA, 22 nt, Human
agaugaaauuuguguugaguug

SEQ ID NO: 577198 - RNA, 22 nt, Human
agggcccucuggcaggccaggc

SEQ ID NO: 577199 - RNA, 22 nt, Human
gugcaaaaguaauugcaguuuu

SEQ ID NO: 577200 - RNA, 19 nt, Human
cagaguacaccagauagga

SEQ ID NO: 577201 - RNA, 22 nt, Human
ugcaggccggcccuaggccuca

SEQ ID NO: 577202 - RNA, 22 nt, Human
aggaaauugagaaucagaauaa

SEQ ID NO: 577203 - RNA, 22 nt, Human
ugcauuucagaagaaaauucgg

SEQ ID NO: 577204 - RNA, 22 nt, Human
cuuuaguuaguagauaauggca

SEQ ID NO: 577205 - RNA, 22 nt, Human
aucaaaauggaagaauuuggcu

SEQ ID NO: 577206 - RNA, 23 nt, Human
ucccucaggccuuaucuccaucu

SEQ ID NO: 577207 - RNA, 22 nt, Human
agcagcaggcuguguggacuga

SEQ ID NO: 577208 - RNA, 22 nt, Human
acauuuuucacauuuguagggu

SEQ ID NO: 577209 - RNA, 22 nt, Human
cuucauaaacucagaaggcagc

SEQ ID NO: 577210 - RNA, 22 nt, Human
auauuuguuagagucuaugugu

SEQ ID NO: 577211 - RNA, 21 nt, Human
gucauccaccucucgggcucu

SEQ ID NO: 577212 - RNA, 22 nt, Human
uuauggaaaacuccagagagua

SEQ ID NO: 577213 - RNA, 22 nt, Human
gugucccacucuggaggugaag

SEQ ID NO: 577214 - RNA, 22 nt, Human
uccugcagagccgcccucaggu

SEQ ID NO: 577215 - RNA, 22 nt, Human
acaggcaagaggaaagcaagua

SEQ ID NO: 577216 - RNA, 22 nt, Human
auuuuuuagaaccuggccugau

SEQ ID NO: 577217 - RNA, 18 nt, Human
acuaugcugaauaaaugg

SEQ ID NO: 577218 - RNA, 20 nt, Human
agauuauuccuaagauuucu

SEQ ID NO: 577219 - RNA, 22 nt, Human
cugggccuggggcuguugagag

SEQ ID NO: 577220 - RNA, 22 nt, Human
ucaagacagauggguaacuugg

SEQ ID NO: 577221 - RNA, 22 nt, Human
aucuuucaaucaggaaaaaucu

SEQ ID NO: 577222 - RNA, 23 nt, Human
ugcuggaguuuacucaggccagc

SEQ ID NO: 577223 - RNA, 21 nt, Human
uccugggagucugagauccug

SEQ ID NO: 577224 - RNA, 20 nt, Human
uuucaaaggcaccuaugaag

SEQ ID NO: 577225 - RNA, 22 nt, Human
ccccuccuggccacacugucag

SEQ ID NO: 577226 - RNA, 22 nt, Human
cuaggcacucacguggcuuuag

SEQ ID NO: 577227 - RNA, 22 nt, Human
agacuguaauugacaugucagc

SEQ ID NO: 577228 - RNA, 22 nt, Human
gcugaggccaguuuaaugagga

SEQ ID NO: 577229 - RNA, 22 nt, Human
cagaguggugcaagggcagugu

SEQ ID NO: 577230 - RNA, 22 nt, Human
aagcaacugccuucaauauuua

SEQ ID NO: 577231 - RNA, 22 nt, Human
acaauguagaguaaaauauguu

SEQ ID NO: 577232 - RNA, 22 nt, Human
aggcaucucucugcuucugagc

SEQ ID NO: 577233 - RNA, 22 nt, Human
gggacaggcugagacuugagcu

SEQ ID NO: 577234 - RNA, 22 nt, Human
agcauccagaaaacucucagaa

SEQ ID NO: 577235 - RNA, 22 nt, Human
cagagcugacccaaggauugaa

SEQ ID NO: 577236 - RNA, 22 nt, Human
cagagguagaacuggcccucac

SEQ ID NO: 577237 - RNA, 22 nt, Human
cuacagcagagcuacacuaacu

SEQ ID NO: 577238 - RNA, 22 nt, Human
ugcaguggaaucuggagagcag

SEQ ID NO: 577239 - RNA, 22 nt, Human
uggagguguauaagguagcuuc

SEQ ID NO: 577240 - RNA, 22 nt, Human
aauaguuugaauuuaucagaug

SEQ ID NO: 577241 - RNA, 22 nt, Human
guagaaaaagcaguaagucuca

SEQ ID NO: 577242 - RNA, 22 nt, Human
auuuuacuuaguguaaugucca

SEQ ID NO: 577243 - RNA, 21 nt, Human
uuagcuuucuagaaucuuugu

SEQ ID NO: 577244 - RNA, 22 nt, Human
ucuccagggugagcuaggccag

SEQ ID NO: 577245 - RNA, 22 nt, Human
accagagcuuacaugcuagaaa

SEQ ID NO: 577246 - RNA, 21 nt, Human
uuuauuaacaacuguggacgu

SEQ ID NO: 577247 - RNA, 22 nt, Human
uuggcugaugcaagagcuuccu

SEQ ID NO: 577248 - RNA, 22 nt, Human
uccagccaugacucggacagug

SEQ ID NO: 577249 - RNA, 22 nt, Human
auccaaaggugacacagaauac

SEQ ID NO: 577250 - RNA, 19 nt, Human
acacagggaucagaggguu

SEQ ID NO: 577251 - RNA, 22 nt, Human
uaagacauguccaggcugugag

SEQ ID NO: 577252 - RNA, 22 nt, Human
uucauuugggaugagucagaag

SEQ ID NO: 577253 - RNA, 22 nt, Human
gcagcagcucugaaugggcccc

SEQ ID NO: 577254 - RNA, 22 nt, Human
caguuuuaaauuguuagauaau

SEQ ID NO: 577255 - RNA, 22 nt, Human
uuucagagagaucaacauagcu

SEQ ID NO: 577256 - RNA, 22 nt, Human
gugguaggcacagagaacaaga

SEQ ID NO: 577257 - RNA, 22 nt, Human
cagccugcccuggaagcccagc

SEQ ID NO: 577258 - RNA, 22 nt, Human
agcagccacccagcugcucauu

SEQ ID NO: 577259 - RNA, 22 nt, Human
gcaguguuuuacagaccagcau

SEQ ID NO: 577260 - RNA, 22 nt, Human
uuuucucuauauugucugugaa

SEQ ID NO: 577261 - RNA, 22 nt, Human
cagguucagcaggaggcauccc

SEQ ID NO: 577262 - RNA, 20 nt, Human
aaguuacauuguauuguacc

SEQ ID NO: 577263 - RNA, 22 nt, Human
gacuuuccagguccugggcuau

SEQ ID NO: 577264 - RNA, 22 nt, Human
gaucuccuggacgucuuguuaa

SEQ ID NO: 577265 - RNA, 22 nt, Human
uuugugaagggaacagaagugu

SEQ ID NO: 577266 - RNA, 22 nt, Human
aagaugcgguugaccauggugu

SEQ ID NO: 577267 - RNA, 22 nt, Human
guuuguaauuaccucuuuugac

SEQ ID NO: 577268 - RNA, 18 nt, Human
ggauaggaccuuaggcag

SEQ ID NO: 577269 - RNA, 22 nt, Human
acaaaugauuuuccaagccagu

SEQ ID NO: 577270 - RNA, 22 nt, Human
cuggcuggccauguagagauga

SEQ ID NO: 577271 - RNA, 22 nt, Human
uuuuuugucuugaagaaauggu

SEQ ID NO: 577272 - RNA, 22 nt, Human
aguucuaauugcguuuucuugc

SEQ ID NO: 577273 - RNA, 22 nt, Human
auccuuaagaaaguuuucuaua

SEQ ID NO: 577274 - RNA, 22 nt, Human
cugccugcuuuucugggagccg

SEQ ID NO: 577275 - RNA, 22 nt, Human
gcucugagaggaugcugagcag

SEQ ID NO: 577276 - RNA, 22 nt, Human
caaugucagucaagcagcaaau

SEQ ID NO: 577277 - RNA, 22 nt, Human
cagccaggcccccgagucguug

SEQ ID NO: 577278 - RNA, 22 nt, Human
uugggcucaggaguuugagacc

SEQ ID NO: 577279 - RNA, 22 nt, Human
cagagcccagggccuacguccc

SEQ ID NO: 577280 - RNA, 22 nt, Human
ucagacagaaagaugaguaugg

SEQ ID NO: 577281 - RNA, 22 nt, Human
gcucugcuguguuuguucagca

SEQ ID NO: 577282 - RNA, 22 nt, Human
agagccccugggucacacagcc

SEQ ID NO: 577283 - RNA, 22 nt, Human
agugaaaacacuaguucuugcc

SEQ ID NO: 577284 - RNA, 22 nt, Human
ugggcccugacuucaagcaucc

SEQ ID NO: 577285 - RNA, 22 nt, Human
cugcuuaaaaugcagauucugu

SEQ ID NO: 577286 - RNA, 22 nt, Human
cuaaagaagcuagcaaucuaua

SEQ ID NO: 577287 - RNA, 22 nt, Human
aagcuucagugugagcauguaa

SEQ ID NO: 577288 - RNA, 22 nt, Human
aggcugcuucuuguccuuggca

SEQ ID NO: 577289 - RNA, 22 nt, Human
cuacuuuaauuuucugcagaga

SEQ ID NO: 577290 - RNA, 22 nt, Human
uggcagaguucgcuccuauuca

SEQ ID NO: 577291 - RNA, 22 nt, Human
aauauagcauuguaugacugug

SEQ ID NO: 577292 - RNA, 22 nt, Human
uaaaaaguagugagaauggcgc

SEQ ID NO: 577293 - RNA, 22 nt, Human
cccuguggaggcagcauccugc

SEQ ID NO: 577294 - RNA, 22 nt, Human
ucaaaaguggccuguaaaaucu

SEQ ID NO: 577295 - RNA, 22 nt, Human
cgugggaguggugggugcucag

SEQ ID NO: 577296 - RNA, 22 nt, Human
aggccuggccccaguugcuagg

SEQ ID NO: 577297 - RNA, 22 nt, Human
ugccaggcugaacagggucuua

SEQ ID NO: 577298 - RNA, 17 nt, Human
gcagaaaagucaaggga

SEQ ID NO: 577299 - RNA, 22 nt, Human
uccugggacucaacuuagaagg

SEQ ID NO: 577300 - RNA, 22 nt, Human
ucacugacguggggcuacuuga

SEQ ID NO: 577301 - RNA, 22 nt, Human
uauauacuaugcgauuccugcc

SEQ ID NO: 577302 - RNA, 22 nt, Human
uuacuuacagacaguagacucu

SEQ ID NO: 577303 - RNA, 22 nt, Human
auccaaagaaugcuuagaccug

SEQ ID NO: 577304 - RNA, 22 nt, Human
aagcagugcgcucaucuaaggg

SEQ ID NO: 577305 - RNA, 22 nt, Human
ucagcaggcugucagcaggggc

SEQ ID NO: 577306 - RNA, 22 nt, Human
gaagggugugugugagggacac

SEQ ID NO: 577307 - RNA, 22 nt, Human
cuuuuuguuguccacacuagga

SEQ ID NO: 577308 - RNA, 22 nt, Human
ugauagaaucagauaaaaggau

SEQ ID NO: 577309 - RNA, 22 nt, Human
augucuuuauuaauaucaugcc

SEQ ID NO: 577310 - RNA, 22 nt, Human
ccugggcuggaguacagcagug

SEQ ID NO: 577311 - RNA, 22 nt, Human
cagcuggccccacaguagaggc

SEQ ID NO: 577312 - RNA, 23 nt, Human
uucugaaaauagauaguggcucc

SEQ ID NO: 577313 - RNA, 20 nt, Human
ugcucuggaaauggucugag

SEQ ID NO: 577314 - RNA, 22 nt, Human
uuuuaucaaucauuaagacauu

SEQ ID NO: 577315 - RNA, 22 nt, Human
acacugaauauacaaugaauau

SEQ ID NO: 577316 - RNA, 22 nt, Human
uauauagaaaagcagauguugg

SEQ ID NO: 577317 - RNA, 22 nt, Human
gaaggggaaaguugagcaaaua

SEQ ID NO: 577318 - RNA, 23 nt, Human
cccagcuuucccacugccgagag

SEQ ID NO: 577319 - RNA, 22 nt, Human
uuucuucuccauggcagguccu

SEQ ID NO: 577320 - RNA, 22 nt, Human
gcuucaggaggucggucuccuu

SEQ ID NO: 577321 - RNA, 22 nt, Human
aagggcuggaauaucucuuaga

SEQ ID NO: 577322 - RNA, 22 nt, Human
aacacugugcuccccaggcugu

SEQ ID NO: 577323 - RNA, 22 nt, Human
gggagcgggacugcgcaggcuu

SEQ ID NO: 577324 - RNA, 20 nt, Human
aggcugagggugauuguguc

SEQ ID NO: 577325 - RNA, 22 nt, Human
gcucuaacuauuaagaggucau

SEQ ID NO: 577326 - RNA, 22 nt, Human
acaccagggccuagccagggcg

SEQ ID NO: 577327 - RNA, 22 nt, Human
caggcauggaaaagcccagagg

SEQ ID NO: 577328 - RNA, 22 nt, Human
cucuguguuccggguugcugcu

SEQ ID NO: 577329 - RNA, 22 nt, Human
aagacuuucuguaaagcuacag

SEQ ID NO: 577330 - RNA, 22 nt, Human
aggacuggugccagacaaggua

SEQ ID NO: 577331 - RNA, 22 nt, Human
uguagaaccuguuuauuauaga

SEQ ID NO: 577332 - RNA, 22 nt, Human
aacacaguuuuccaaaauagag

SEQ ID NO: 577333 - RNA, 23 nt, Human
uguauacacccugugcaucuggg

SEQ ID NO: 577334 - RNA, 22 nt, Human
gccaggaggcuuaacuggacag

SEQ ID NO: 577335 - RNA, 16 nt, Human
ugaggccagccauuuc

SEQ ID NO: 577336 - RNA, 22 nt, Human
auaugaauuuggcuggaaaggu

SEQ ID NO: 577337 - RNA, 22 nt, Human
auuccauuguauguguagacua

SEQ ID NO: 577338 - RNA, 22 nt, Human
ggagccagggaagcugcuuccu

SEQ ID NO: 577339 - RNA, 22 nt, Human
gcagugaagauggcagguuggg

SEQ ID NO: 577340 - RNA, 22 nt, Human
ucuguuauggaaguuuccuuuu

SEQ ID NO: 577341 - RNA, 22 nt, Human
gggaaacucaggcauuuccacu

SEQ ID NO: 577342 - RNA, 22 nt, Human
auguuucaccagcaaauuaccu

SEQ ID NO: 577343 - RNA, 19 nt, Human
caaguucuggagauuaggg

SEQ ID NO: 577344 - RNA, 22 nt, Human
agcagcugagaugguaagauuc

SEQ ID NO: 577345 - RNA, 22 nt, Human
uguuucaugaagucuggauauc

SEQ ID NO: 577346 - RNA, 22 nt, Human
cugaaaggguuacauaguaagu

SEQ ID NO: 577347 - RNA, 22 nt, Human
guccugugaccugcauccugag

SEQ ID NO: 577348 - RNA, 20 nt, Human
cuguggcaucugucauggug

SEQ ID NO: 577349 - RNA, 22 nt, Human
uuauguaaguggagucauauag

SEQ ID NO: 577350 - RNA, 22 nt, Human
cuccagguuacuuagccuagcu

SEQ ID NO: 577351 - RNA, 23 nt, Human
aaaaaaccauguaggcacucagu

SEQ ID NO: 577352 - RNA, 22 nt, Human
uuuaccaagcuuuaauuacaua

SEQ ID NO: 577353 - RNA, 22 nt, Human
uggacucuaagcagaggaucua

SEQ ID NO: 577354 - RNA, 22 nt, Human
gaacaaugagucauucagguga

SEQ ID NO: 577355 - RNA, 22 nt, Human
aacacagaucaaaauauuuccu

SEQ ID NO: 577356 - RNA, 22 nt, Human
ugcuggcugcagugcugucaaa

SEQ ID NO: 577357 - RNA, 22 nt, Human
caggcagcuagauuuauaacaa

SEQ ID NO: 577358 - RNA, 23 nt, Human
uuuagcuucccuuuaguuagggg

SEQ ID NO: 577359 - RNA, 22 nt, Human
gaagcugacccaggagcgugug

SEQ ID NO: 577360 - RNA, 22 nt, Human
aucugggcucgaauccuagcuc

SEQ ID NO: 577361 - RNA, 22 nt, Human
guggccagugggaaugggcuca

SEQ ID NO: 577362 - RNA, 22 nt, Human
cccagguccccaccugucugcu

SEQ ID NO: 577363 - RNA, 22 nt, Human
cacccuguacaaauggacaucu

SEQ ID NO: 577364 - RNA, 22 nt, Human
cacuuuaugggaagcaaaaauu

SEQ ID NO: 577365 - RNA, 22 nt, Human
caguuuuaucaucugugaaaug

SEQ ID NO: 577366 - RNA, 22 nt, Human
cccugccugugggcaucaacau

SEQ ID NO: 577367 - RNA, 22 nt, Human
uccagcagaccaucaaggcuca

SEQ ID NO: 577368 - RNA, 22 nt, Human
cgagcagagcagagacgucugg

SEQ ID NO: 577369 - RNA, 22 nt, Human
accccaggucuccaggcucugg

SEQ ID NO: 577370 - RNA, 22 nt, Human
aaacugugaagcaaguacaagg

SEQ ID NO: 577371 - RNA, 22 nt, Human
aggccagguggucaugcuugcu

SEQ ID NO: 577372 - RNA, 22 nt, Human
agucucuuggcauucugaaaca

SEQ ID NO: 577373 - RNA, 22 nt, Human
cccagccaaggugcugguguug

SEQ ID NO: 577374 - RNA, 22 nt, Human
ucugcucagugcuuaucucuaa

SEQ ID NO: 577375 - RNA, 22 nt, Human
cccuuagcucaauuucuugccc

SEQ ID NO: 577376 - RNA, 22 nt, Human
aggcaauccucuuacagauggg

SEQ ID NO: 577377 - RNA, 22 nt, Human
cagggcacaguuauggaggugg

SEQ ID NO: 577378 - RNA, 22 nt, Human
cugugccuccagucucgcuucu

SEQ ID NO: 577379 - RNA, 22 nt, Human
uuuacaagucagggacuguucu

SEQ ID NO: 577380 - RNA, 22 nt, Human
cagagguacagccauugaagau

SEQ ID NO: 577381 - RNA, 22 nt, Human
aagaacuaucucuggcuguagg

SEQ ID NO: 577382 - RNA, 22 nt, Human
agcauggggcuccgcaaugaac

SEQ ID NO: 577383 - RNA, 22 nt, Human
ugagcugucaagguacagugaa

SEQ ID NO: 577384 - RNA, 22 nt, Human
ggagcccucaccggcgagugcc

SEQ ID NO: 577385 - RNA, 22 nt, Human
gaaaggagggaaacagagcggu

SEQ ID NO: 577386 - RNA, 22 nt, Human
ucauuucuccuaagugaaauau

SEQ ID NO: 577387 - RNA, 22 nt, Human
cuguguagccucaugugggcuu

SEQ ID NO: 577388 - RNA, 22 nt, Human
auggcagccugaacacuuccug

SEQ ID NO: 577389 - RNA, 22 nt, Human
agcccagguggagugugugggg

SEQ ID NO: 577390 - RNA, 22 nt, Human
ugcagggaacuuggacagcuag

SEQ ID NO: 577391 - RNA, 22 nt, Human
cccuggaguccuggcaguugau

SEQ ID NO: 577392 - RNA, 22 nt, Human
agcugcuccuuuccugcaggcg

SEQ ID NO: 577393 - RNA, 22 nt, Human
aaaaaucuaugacugcuucucc

SEQ ID NO: 577394 - RNA, 22 nt, Human
uaaguguuucuccagugucuuu

SEQ ID NO: 577395 - RNA, 22 nt, Human
gcugccucaggcaccuccuggc

SEQ ID NO: 577396 - RNA, 22 nt, Human
aacuagagcuuccagcuucuug

SEQ ID NO: 577397 - RNA, 22 nt, Human
aucagcaagcauuuauugagug

SEQ ID NO: 577398 - RNA, 22 nt, Human
ccuggcuccagcugccuguccu

SEQ ID NO: 577399 - RNA, 22 nt, Human
gugugugugcaucucuuuuauu

SEQ ID NO: 577400 - RNA, 22 nt, Human
uuguuuucuuguauauagccuc

SEQ ID NO: 577401 - RNA, 22 nt, Human
auaacaugaccugugcuucaca

SEQ ID NO: 577402 - RNA, 22 nt, Human
ugggcagagucauacaggagac

SEQ ID NO: 577403 - RNA, 17 nt, Human
ggcagcugugugcaugc

SEQ ID NO: 577404 - RNA, 22 nt, Human
uggaauuuuguauuagcuuuga

SEQ ID NO: 577405 - RNA, 22 nt, Human
cacauuuagagguuagcauggu

SEQ ID NO: 577406 - RNA, 21 nt, Human
aaagagacaaauggcauauac

SEQ ID NO: 577407 - RNA, 22 nt, Human
aauucaaauuacaauaguuguu

SEQ ID NO: 577408 - RNA, 20 nt, Human
ccugugugguuugcacuaca

SEQ ID NO: 577409 - RNA, 22 nt, Human
ugguggcaugauagugugaaug

SEQ ID NO: 577410 - RNA, 22 nt, Human
gacagcuguggagaggcaugug

SEQ ID NO: 577411 - RNA, 22 nt, Human
gggaugcagacuacagggcuua

SEQ ID NO: 577412 - RNA, 21 nt, Human
gggcuggaggaugggaagccc

SEQ ID NO: 577413 - RNA, 22 nt, Human
uccccucucugcgcucccaggu

SEQ ID NO: 577414 - RNA, 22 nt, Human
aaauauguaagauuagcacuag

SEQ ID NO: 577415 - RNA, 20 nt, Human
aaguuugccccaggaaauug

SEQ ID NO: 577416 - RNA, 22 nt, Human
cagcugagaccagaaugcaggu

SEQ ID NO: 577417 - RNA, 22 nt, Human
guggaagggacugccuagagga

SEQ ID NO: 577418 - RNA, 23 nt, Human
ugugaagguggguccaagggcug

SEQ ID NO: 577419 - RNA, 22 nt, Human
ugagaacauugggaaagcuaug

SEQ ID NO: 577420 - RNA, 22 nt, Human
ucuggagucuaaagaaccaaaa

SEQ ID NO: 577421 - RNA, 22 nt, Human
guauggaaguauaaguuuugaa

SEQ ID NO: 577422 - RNA, 22 nt, Human
cccagggacucgggauucuagg

SEQ ID NO: 577423 - RNA, 22 nt, Human
aggcacuguggaagacaugguu

SEQ ID NO: 577424 - RNA, 22 nt, Human
auguuauuuuggaaaauacaaa

SEQ ID NO: 577425 - RNA, 22 nt, Human
gccaggagggaaaggacaauuu

SEQ ID NO: 577426 - RNA, 22 nt, Human
agggccagaggcaccuugcagc

SEQ ID NO: 577427 - RNA, 22 nt, Human
acugugugacuguuauuacugu

SEQ ID NO: 577428 - RNA, 22 nt, Human
uuauuugccagaauuucucuug

SEQ ID NO: 577429 - RNA, 22 nt, Human
uugggaaauauggauuguuauu

SEQ ID NO: 577430 - RNA, 17 nt, Human
cuccuggccaccccucu

SEQ ID NO: 577431 - RNA, 22 nt, Human
ucaggggcagcugugcuuugug

SEQ ID NO: 577432 - RNA, 22 nt, Human
ugguccaugcccacggaaugug

SEQ ID NO: 577433 - RNA, 22 nt, Human
gaauuucaaagagguuaagagg

SEQ ID NO: 577434 - RNA, 22 nt, Human
aggccaggccuuucuccauucc

SEQ ID NO: 577435 - RNA, 22 nt, Human
gggacagaggcaaacuagcaga

SEQ ID NO: 577436 - RNA, 22 nt, Human
acagggcuuuuaaucaguaguu

SEQ ID NO: 577437 - RNA, 21 nt, Human
cagugcucaggaauagagaga

SEQ ID NO: 577438 - RNA, 19 nt, Human
aguguucugaguacuccuc

SEQ ID NO: 577439 - RNA, 22 nt, Human
agggcuggagccacagcuggga

SEQ ID NO: 577440 - RNA, 22 nt, Human
gccuggcaaggcccuguugacu

SEQ ID NO: 577441 - RNA, 22 nt, Human
auguuacugugaucaugauacu

SEQ ID NO: 577442 - RNA, 22 nt, Human
aggaggccgggauucuggagau

SEQ ID NO: 577443 - RNA, 22 nt, Human
aaggcagauauaaagacuagag

SEQ ID NO: 577444 - RNA, 22 nt, Human
acucauuuuauaacacuguagu

SEQ ID NO: 577445 - RNA, 22 nt, Human
ugggccucccaugucuuaggga

SEQ ID NO: 577446 - RNA, 22 nt, Human
ugcccugggaguuggagcugcu

SEQ ID NO: 577447 - RNA, 22 nt, Human
uccugggcugcagggaagagca

SEQ ID NO: 577448 - RNA, 21 nt, Human
ggcugagauggcagaaucacc

SEQ ID NO: 577449 - RNA, 22 nt, Human
gcccugaguugagccuuccaaa

SEQ ID NO: 577450 - RNA, 22 nt, Human
guaaaauugcaauuacuuuugc

SEQ ID NO: 577451 - RNA, 22 nt, Human
uagcauuuggacauugucaccu

SEQ ID NO: 577452 - RNA, 22 nt, Human
caggugaggcugaacagaugaa

SEQ ID NO: 577453 - RNA, 22 nt, Human
auacaucauuuaugaugugugu

SEQ ID NO: 577454 - RNA, 21 nt, Human
ccaaagaacugccauuuguca

SEQ ID NO: 577455 - RNA, 22 nt, Human
cacagaggaaaugacuuucuua

SEQ ID NO: 577456 - RNA, 22 nt, Human
uucugugucuucuuguucugug

SEQ ID NO: 577457 - RNA, 22 nt, Human
gucugggguacuuucaucugau

SEQ ID NO: 577458 - RNA, 22 nt, Human
cagaaacuucuggugucaaaua

SEQ ID NO: 577459 - RNA, 20 nt, Human
gggagacagggccagugucc

SEQ ID NO: 577460 - RNA, 22 nt, Human
agaaaggaggaagaaugaccuc

SEQ ID NO: 577461 - RNA, 22 nt, Human
aaaugaacucuuccugcauccc

SEQ ID NO: 577462 - RNA, 22 nt, Human
cauuacauuucaaaauguuucc

SEQ ID NO: 577463 - RNA, 22 nt, Human
agcugcuuagaguccucaggau

SEQ ID NO: 577464 - RNA, 22 nt, Human
agagccuguuuugugggagaug

SEQ ID NO: 577465 - RNA, 22 nt, Human
gagcccuggcagucugggaugg

SEQ ID NO: 577466 - RNA, 22 nt, Human
acuucccaggugguguggaguu

SEQ ID NO: 577467 - RNA, 22 nt, Human
caggagcugggucuggaagcag

SEQ ID NO: 577468 - RNA, 22 nt, Human
cagaggcugacaaaauauugcu

SEQ ID NO: 577469 - RNA, 22 nt, Human
gggguggaucaggcaggcccag

SEQ ID NO: 577470 - RNA, 22 nt, Human
uuguuagcugaucuugagugca

SEQ ID NO: 577471 - RNA, 22 nt, Human
uuagcuguggaagcuucagcca

SEQ ID NO: 577472 - RNA, 22 nt, Human
uauuaacaugaacugacuuuuc

SEQ ID NO: 577473 - RNA, 22 nt, Human
caucuguagcuccaugacaauu

SEQ ID NO: 577474 - RNA, 18 nt, Human
aucaugcugaauuaaaga

SEQ ID NO: 577475 - RNA, 19 nt, Human
uggcaggcccaggauggac

SEQ ID NO: 577476 - RNA, 22 nt, Human
uuucaucuugauucuauauggc

SEQ ID NO: 577477 - RNA, 22 nt, Human
ggcugagaacaggcccagccuc

SEQ ID NO: 577478 - RNA, 22 nt, Human
accagcuccaggccccugcuga

SEQ ID NO: 577479 - RNA, 22 nt, Human
ugcugcagggauuucagagaca

SEQ ID NO: 577480 - RNA, 22 nt, Human
acuuacaaguucccuuucucag

SEQ ID NO: 577481 - RNA, 22 nt, Human
acaugcagugaggaucuuagaa

SEQ ID NO: 577482 - RNA, 22 nt, Human
uuugucaaucccuugaaaaccu

SEQ ID NO: 577483 - RNA, 20 nt, Human
uuucacuggcuugauaaggu

SEQ ID NO: 577484 - RNA, 22 nt, Human
aagacagcacuggcauuuucaa

SEQ ID NO: 577485 - RNA, 22 nt, Human
acaguucugccuguuugagaag

SEQ ID NO: 577486 - RNA, 22 nt, Human
aaacaaugacaacacagcugcg

SEQ ID NO: 577487 - RNA, 22 nt, Human
uuugugaacaaacaugaagaug

SEQ ID NO: 577488 - RNA, 22 nt, Human
uauucugugugauauguaaaug

SEQ ID NO: 577489 - RNA, 22 nt, Human
gcagagaccccgcagugaggcc

SEQ ID NO: 577490 - RNA, 22 nt, Human
uccaggagcucauccacgucaa

SEQ ID NO: 577491 - RNA, 22 nt, Human
agcuggccuuagugagcaccug

SEQ ID NO: 577492 - RNA, 21 nt, Human
ugcuccaggagggggcagucc

SEQ ID NO: 577493 - RNA, 22 nt, Human
gcugcccugacuccagcagccu

SEQ ID NO: 577494 - RNA, 22 nt, Human
uucucuucuguucagugcccaa

SEQ ID NO: 577495 - RNA, 23 nt, Human
ggagaggggugugggcaucuuua

SEQ ID NO: 577496 - RNA, 22 nt, Human
cuucauuucaggcugaagaaua

SEQ ID NO: 577497 - RNA, 22 nt, Human
cagccugcagggcugccuguug

SEQ ID NO: 577498 - RNA, 22 nt, Human
agaacauuugucgaucaauuug

SEQ ID NO: 577499 - RNA, 22 nt, Human
cagcgcaguguagguggggggc

SEQ ID NO: 577500 - RNA, 22 nt, Human
aggcuccagcagccagaggaag

SEQ ID NO: 577501 - RNA, 23 nt, Human
acuuaaaugguucuuuaucucag

SEQ ID NO: 577502 - RNA, 22 nt, Human
cuucacaguaaauccagaagaa

SEQ ID NO: 577503 - RNA, 22 nt, Human
gaagguggcgagcggauugcug

SEQ ID NO: 577504 - RNA, 22 nt, Human
ugccugucuuggaguccuggcc

SEQ ID NO: 577505 - RNA, 22 nt, Human
uuucugcucgcucucaaucagg

SEQ ID NO: 577506 - RNA, 22 nt, Human
agaaagcccacccagaagaugu

SEQ ID NO: 577507 - RNA, 22 nt, Human
uaucaagagucucuacauuaau

SEQ ID NO: 577508 - RNA, 22 nt, Human
gccagagguaucaaagauagua

SEQ ID NO: 577509 - RNA, 22 nt, Human
cugcccugcccaggccuugggc

SEQ ID NO: 577510 - RNA, 22 nt, Human
uggagauguaaagcaaggcuua

SEQ ID NO: 577511 - RNA, 22 nt, Human
uagucacaaccuucaaguuguc

SEQ ID NO: 577512 - RNA, 22 nt, Human
acacaaacugcuagaaaauugg

SEQ ID NO: 577513 - RNA, 22 nt, Human
ggaugacaaggaaagcaaacca

SEQ ID NO: 577514 - RNA, 22 nt, Human
ucuugaauuguacucccauaag

SEQ ID NO: 577515 - RNA, 22 nt, Human
gagggggucuaugagguagagc

SEQ ID NO: 577516 - RNA, 22 nt, Human
uggcagaguggaccauacucaa

SEQ ID NO: 577517 - RNA, 22 nt, Human
auuuacagaugaugcuauuuga

SEQ ID NO: 577518 - RNA, 22 nt, Human
gcuggcuuugucaagggcagca

SEQ ID NO: 577519 - RNA, 22 nt, Human
gcugcuggccgcccagcuucuc

SEQ ID NO: 577520 - RNA, 22 nt, Human
gcccaggaaaugccccguggug

SEQ ID NO: 577521 - RNA, 22 nt, Human
ucaggguugugaaggaaagggg

SEQ ID NO: 577522 - RNA, 22 nt, Human
agucuggcuuuuugaugagcuu

SEQ ID NO: 577523 - RNA, 22 nt, Human
uguggcugcaggcgauggagga

SEQ ID NO: 577524 - RNA, 22 nt, Human
gagagcugauagaugagcuacu

SEQ ID NO: 577525 - RNA, 22 nt, Human
uagaacuugaaugugaaaucag

SEQ ID NO: 577526 - RNA, 22 nt, Human
ggccagagguguccucaguucu

SEQ ID NO: 577527 - RNA, 22 nt, Human
aagcccagaugggagcauuuca

SEQ ID NO: 577528 - RNA, 22 nt, Human
aguaacacuuggaaugauagca

SEQ ID NO: 577529 - RNA, 22 nt, Human
ugggagacacuggugggagcuu

SEQ ID NO: 577530 - RNA, 22 nt, Human
gugaggagcugacacuggggug

SEQ ID NO: 577531 - RNA, 22 nt, Human
cagacagggaccucgcuccaga

SEQ ID NO: 577532 - RNA, 22 nt, Human
gcccucccuacagccuauuucu

SEQ ID NO: 577533 - RNA, 22 nt, Human
ucagggcauacucuucaagguc

SEQ ID NO: 577534 - RNA, 22 nt, Human
cuccuggcuuucccagaccagg

SEQ ID NO: 577535 - RNA, 22 nt, Human
gaagaaguauuuuuguccuguu

SEQ ID NO: 577536 - RNA, 22 nt, Human
uauggcaagagaaucaacugaa

SEQ ID NO: 577537 - RNA, 22 nt, Human
ggaggccaucagggagggcauu

SEQ ID NO: 577538 - RNA, 21 nt, Human
ccagcugccugcacuuuggac

SEQ ID NO: 577539 - RNA, 22 nt, Human
caauuucucuuuauaucucaca

SEQ ID NO: 577540 - RNA, 22 nt, Human
ucuguacauuuguguugugaau

SEQ ID NO: 577541 - RNA, 22 nt, Human
uggaagggaaaguuuggggucc

SEQ ID NO: 577542 - RNA, 22 nt, Human
gcagcagcucaguucugggagg

SEQ ID NO: 577543 - RNA, 22 nt, Human
auauaucugcaguacugaagaa

SEQ ID NO: 577544 - RNA, 22 nt, Human
ucgcccaggauggagugcagua

SEQ ID NO: 577545 - RNA, 22 nt, Human
guguuaaccagcuaaacuuugc

SEQ ID NO: 577546 - RNA, 22 nt, Human
uguuucaaguuugcucaaagga

SEQ ID NO: 577547 - RNA, 22 nt, Human
aaauugcagaugcuaaaugacu

SEQ ID NO: 577548 - RNA, 22 nt, Human
uaaauugaucguuugggaugaa

SEQ ID NO: 577549 - RNA, 22 nt, Human
aaauacuguagauaauagaguu

SEQ ID NO: 577550 - RNA, 22 nt, Human
uccagagcuacuugcucaacuu

SEQ ID NO: 577551 - RNA, 22 nt, Human
augaaaguguuuaaguuuaugu

SEQ ID NO: 577552 - RNA, 22 nt, Human
agcagggcaaagucaggcuaac

SEQ ID NO: 577553 - RNA, 20 nt, Human
aagaggugauaacaggugag

SEQ ID NO: 577554 - RNA, 22 nt, Human
uucauucuuauuugugaucugg

SEQ ID NO: 577555 - RNA, 22 nt, Human
gaggccuccucugagacaucug

SEQ ID NO: 577556 - RNA, 22 nt, Human
gugugaaaugguucucuuuguu

SEQ ID NO: 577557 - RNA, 22 nt, Human
ggcuguggccagcggggcugag

SEQ ID NO: 577558 - RNA, 22 nt, Human
gcuuugacacucgcccagcccu

SEQ ID NO: 577559 - RNA, 22 nt, Human
ucuugacaacuauacuacuuac

SEQ ID NO: 577560 - RNA, 22 nt, Human
cugagguggaacagaggugaag

SEQ ID NO: 577561 - RNA, 22 nt, Human
acagagacacggaagcuaaaga

SEQ ID NO: 577562 - RNA, 19 nt, Human
agccuggcuuugcucugcu

SEQ ID NO: 577563 - RNA, 22 nt, Human
cugaggaaaguauugccuggug

SEQ ID NO: 577564 - RNA, 22 nt, Human
ucucuguagagacagcacugug

SEQ ID NO: 577565 - RNA, 22 nt, Human
ucugccuggaugauggcagggc

SEQ ID NO: 577566 - RNA, 19 nt, Human
ugcuggaggguagugaguc

SEQ ID NO: 577567 - RNA, 22 nt, Human
cuucugcaggcccugucugacc

SEQ ID NO: 577568 - RNA, 20 nt, Human
acacacagagacaugcgcau

SEQ ID NO: 577569 - RNA, 22 nt, Human
guacauuuugagguuaaaacaa

SEQ ID NO: 577570 - RNA, 22 nt, Human
gagacacaguuaucaggcauac

SEQ ID NO: 577571 - RNA, 22 nt, Human
cucccagagaccaagcugagaa

SEQ ID NO: 577572 - RNA, 22 nt, Human
aucugaguguuggauuuauugu

SEQ ID NO: 577573 - RNA, 22 nt, Human
gcccuggggaaggugucuccaa

SEQ ID NO: 577574 - RNA, 22 nt, Human
ccucagaaggacaagagacaaa

SEQ ID NO: 577575 - RNA, 22 nt, Human
ccagaggaugcuggucagccuc

SEQ ID NO: 577576 - RNA, 22 nt, Human
acagaacagaggguuuuagaau

SEQ ID NO: 577577 - RNA, 22 nt, Human
uaaguuuaaauguacaugaagc

SEQ ID NO: 577578 - RNA, 17 nt, Human
ugggugguagggagagg

SEQ ID NO: 577579 - RNA, 22 nt, Human
uggccuggaaaaaugcagaugg

SEQ ID NO: 577580 - RNA, 22 nt, Human
ucccagcagcauagcucagaau

SEQ ID NO: 577581 - RNA, 22 nt, Human
aaucaggaugacugucauuuca

SEQ ID NO: 577582 - RNA, 22 nt, Human
uugcuaaauguguuauaucugu

SEQ ID NO: 577583 - RNA, 22 nt, Human
caaaauuagaaaugcagcuguu

SEQ ID NO: 577584 - RNA, 19 nt, Human
agcagcuggagguggagug

SEQ ID NO: 577585 - RNA, 22 nt, Human
augaaaugucuggaucuuuuuc

SEQ ID NO: 577586 - RNA, 22 nt, Human
gggugggacucuuuggccugag

SEQ ID NO: 577587 - RNA, 22 nt, Human
aagcugccuuccaugugaggaa

SEQ ID NO: 577588 - RNA, 22 nt, Human
gaucugaagaguuauuuucuga

SEQ ID NO: 577589 - RNA, 22 nt, Human
uggcccgaagauccgaggguca

SEQ ID NO: 577590 - RNA, 22 nt, Human
gguggacaaaugaaugacugaa

SEQ ID NO: 577591 - RNA, 22 nt, Human
caaacuuuugaggaguucagga

SEQ ID NO: 577592 - RNA, 22 nt, Human
gagccuggggacccuccugagu

SEQ ID NO: 577593 - RNA, 22 nt, Human
ucagaacagcucucagauaucc

SEQ ID NO: 577594 - RNA, 18 nt, Human
acuguuaucugauaaggc

SEQ ID NO: 577595 - RNA, 22 nt, Human
ccaggugcacucaagaccugcu

SEQ ID NO: 577596 - RNA, 22 nt, Human
ugccagugggugugcagagacu

SEQ ID NO: 577597 - RNA, 22 nt, Human
gcuggccauucucuuugagaug

SEQ ID NO: 577598 - RNA, 22 nt, Human
ugcuggcuccucgaggcuucgu

SEQ ID NO: 577599 - RNA, 22 nt, Human
uguguucuuaaaagcagugaua

SEQ ID NO: 577600 - RNA, 20 nt, Human
ucacagaguagccuugucug

SEQ ID NO: 577601 - RNA, 22 nt, Human
ucucagagagaugaaacuucca

SEQ ID NO: 577602 - RNA, 22 nt, Human
uccaaagagguuaagaacgaga

SEQ ID NO: 577603 - RNA, 22 nt, Human
cuggacuuuggcccaucugcca

SEQ ID NO: 577604 - RNA, 22 nt, Human
ucugucuccugccagugccucu

SEQ ID NO: 577605 - RNA, 22 nt, Human
guucacaguguuuucuuugcau

SEQ ID NO: 577606 - RNA, 22 nt, Human
agacacugcggaggucgggugg

SEQ ID NO: 577607 - RNA, 22 nt, Human
uugccugugucagcagguggaa

SEQ ID NO: 577608 - RNA, 22 nt, Human
uacugugaauacaaaauaaauu

SEQ ID NO: 577609 - RNA, 22 nt, Human
gcaagcaauggacggugacuuu

SEQ ID NO: 577610 - RNA, 22 nt, Human
agcccaggagccuuuggagggu

SEQ ID NO: 577611 - RNA, 22 nt, Human
ucucauuugccucaucuauaaa

SEQ ID NO: 577612 - RNA, 22 nt, Human
acagaggcagugugagauacug

SEQ ID NO: 577613 - RNA, 22 nt, Human
auauaacucuuguucuuauagu

SEQ ID NO: 577614 - RNA, 22 nt, Human
uuuucaguuacuguuuauguga

SEQ ID NO: 577615 - RNA, 22 nt, Human
gguggaugcugacuguucugcu

SEQ ID NO: 577616 - RNA, 22 nt, Human
ucuagaaagccaaauuaggaau

SEQ ID NO: 577617 - RNA, 22 nt, Human
caauauucaguggaaaagccau

SEQ ID NO: 577618 - RNA, 22 nt, Human
uucagucccuugcuuaaauuua

SEQ ID NO: 577619 - RNA, 22 nt, Human
ugucuccugggucccuuccacc

SEQ ID NO: 577620 - RNA, 20 nt, Human
cuguccccgaggucaccagg

SEQ ID NO: 577621 - RNA, 17 nt, Human
ggaagaaaaggaucauc

SEQ ID NO: 577622 - RNA, 22 nt, Human
uggggaagacagcagacacugu

SEQ ID NO: 577623 - RNA, 22 nt, Human
auaguguuacccuucuuaaagu

SEQ ID NO: 577624 - RNA, 22 nt, Human
aagauaaugugucugucuuugc

SEQ ID NO: 577625 - RNA, 22 nt, Human
ccaggccaaauucagucagcag

SEQ ID NO: 577626 - RNA, 22 nt, Human
aaugaugguuucaucacuugaa

SEQ ID NO: 577627 - RNA, 17 nt, Human
agauggcaggaggcaga

SEQ ID NO: 577628 - RNA, 22 nt, Human
ugucucuugagcugccugaugc

SEQ ID NO: 577629 - RNA, 22 nt, Human
aaagcagaggugauaugacuua

SEQ ID NO: 577630 - RNA, 22 nt, Human
gagcucugggaaacaaagugua

SEQ ID NO: 577631 - RNA, 22 nt, Human
ggcagcaggcgacuucccuauu

SEQ ID NO: 577632 - RNA, 22 nt, Human
cuccagugcacuggucuuuuca

SEQ ID NO: 577633 - RNA, 22 nt, Human
agcuaguucagagagauaugua

SEQ ID NO: 577634 - RNA, 22 nt, Human
uuucuguauuuugucauaaccu

SEQ ID NO: 577635 - RNA, 19 nt, Human
auacacauacguaaacuga

SEQ ID NO: 577636 - RNA, 22 nt, Human
cuucaaauacaaguagauuaug

SEQ ID NO: 577637 - RNA, 22 nt, Human
cccaggaaaguggaggcggcug

SEQ ID NO: 577638 - RNA, 22 nt, Human
uauuucuuguucccuccaaguu

SEQ ID NO: 577639 - RNA, 22 nt, Human
aauucauacucuauauugcuuu

SEQ ID NO: 577640 - RNA, 21 nt, Human
agugaaauugcaucagaggga

SEQ ID NO: 577641 - RNA, 22 nt, Human
aggaaugucauagaauaaucau

SEQ ID NO: 577642 - RNA, 22 nt, Human
cucagggagagccaagaguucc

SEQ ID NO: 577643 - RNA, 22 nt, Human
ccugccaggccagugagcuucc

SEQ ID NO: 577644 - RNA, 18 nt, Human
ucuuuuccuuccacuucc

SEQ ID NO: 577645 - RNA, 22 nt, Human
gcagcuggucuggccuagagua

SEQ ID NO: 577646 - RNA, 22 nt, Human
acugaaauacugcucuuggauu

SEQ ID NO: 577647 - RNA, 18 nt, Human
acaggccucaguccugca

SEQ ID NO: 577648 - RNA, 22 nt, Human
uaacaaaguaccauagacugga

SEQ ID NO: 577649 - RNA, 22 nt, Human
ucaugcagcuuuuccauucagc

SEQ ID NO: 577650 - RNA, 22 nt, Human
uucaugaauguuccaugugagu

SEQ ID NO: 577651 - RNA, 22 nt, Human
cuucacugcagucauggcucug

SEQ ID NO: 577652 - RNA, 22 nt, Human
cagaguggcaugaaugaagccu

SEQ ID NO: 577653 - RNA, 22 nt, Human
ggauuuuagaguaccuaagugu

SEQ ID NO: 577654 - RNA, 22 nt, Human
augcauaugcaaugcacaauuu

SEQ ID NO: 577655 - RNA, 22 nt, Human
cccaggaaauagccaggaggug

SEQ ID NO: 577656 - RNA, 22 nt, Human
ucccagggcucuagagugcugg

SEQ ID NO: 577657 - RNA, 22 nt, Human
cugggcuggcgcauccgacacg

SEQ ID NO: 577658 - RNA, 22 nt, Human
cagcccuguccagcagagggug

SEQ ID NO: 577659 - RNA, 21 nt, Human
uuauugaauguuuaccgugug

SEQ ID NO: 577660 - RNA, 22 nt, Human
uauaggaaguaauuguugccug

SEQ ID NO: 577661 - RNA, 22 nt, Human
augcauaucuccuaucuccuca

SEQ ID NO: 577662 - RNA, 22 nt, Human
ucuggucccuuuuccugcaguc

SEQ ID NO: 577663 - RNA, 20 nt, Human
auccaucauguccaugacuu

SEQ ID NO: 577664 - RNA, 22 nt, Human
cagagcugguguuacaagucca

SEQ ID NO: 577665 - RNA, 22 nt, Human
cagagcauaauugacaugaggu

SEQ ID NO: 577666 - RNA, 22 nt, Human
gagccuggacaucucaggccca

SEQ ID NO: 577667 - RNA, 22 nt, Human
aaacucuucauauacauaugcu

SEQ ID NO: 577668 - RNA, 22 nt, Human
gcuguggcugaccaccaggggg

SEQ ID NO: 577669 - RNA, 20 nt, Human
agcaguguggggagacugug

SEQ ID NO: 577670 - RNA, 22 nt, Human
aauagcaugcauccugcauaga

SEQ ID NO: 577671 - RNA, 22 nt, Human
agcaggcacgcucccugcgcga

SEQ ID NO: 577672 - RNA, 22 nt, Human
cagaaaauagaguuucucugag

SEQ ID NO: 577673 - RNA, 22 nt, Human
uagucucugcuuugcccuuggc

SEQ ID NO: 577674 - RNA, 22 nt, Human
ggacacuggccacauuucaaaa

SEQ ID NO: 577675 - RNA, 22 nt, Human
gagauacaguuggcugcaggcu

SEQ ID NO: 577676 - RNA, 22 nt, Human
acuuguuuacaagcaguucuga

SEQ ID NO: 577677 - RNA, 22 nt, Human
uucugcugguaacuauguuuca

SEQ ID NO: 577678 - RNA, 22 nt, Human
gaggagaaauuauccuuggugu

SEQ ID NO: 577679 - RNA, 22 nt, Human
gauuuuaucgucauccuucugg

SEQ ID NO: 577680 - RNA, 22 nt, Human
ggcugccuucagacuccagcuu

SEQ ID NO: 577681 - RNA, 22 nt, Human
ugaagaagccaauugguaggcu

SEQ ID NO: 577682 - RNA, 22 nt, Human
cauuuauugguuaggccagcag

SEQ ID NO: 577683 - RNA, 23 nt, Human
uacugccuggggccagagagcgg

SEQ ID NO: 577684 - RNA, 22 nt, Human
uucauuugucugcuauagaucc

SEQ ID NO: 577685 - RNA, 22 nt, Human
cccagggagagcgcggaggcgg

SEQ ID NO: 577686 - RNA, 22 nt, Human
agcuccugugugaagccucccu

SEQ ID NO: 577687 - RNA, 22 nt, Human
caggcugcagaggccuuucaug

SEQ ID NO: 577688 - RNA, 22 nt, Human
auuuccuauacaguuguccaua

SEQ ID NO: 577689 - RNA, 22 nt, Human
uguggcagcuggagguggagaa

SEQ ID NO: 577690 - RNA, 22 nt, Human
cugauuuagauuucacacguga

SEQ ID NO: 577691 - RNA, 22 nt, Human
agagacaggguuuugucguguu

SEQ ID NO: 577692 - RNA, 22 nt, Human
acucucugggcaugccccacca

SEQ ID NO: 577693 - RNA, 23 nt, Human
agcuccugaggccagccucuccu

SEQ ID NO: 577694 - RNA, 22 nt, Human
ugauucaacuuucauaacaaaa

SEQ ID NO: 577695 - RNA, 22 nt, Human
gcagggugugucucauacaguu

SEQ ID NO: 577696 - RNA, 22 nt, Human
cugcuuuugagcccagugcuca

SEQ ID NO: 577697 - RNA, 22 nt, Human
uuaugaaaacaaucaguaggca

SEQ ID NO: 577698 - RNA, 22 nt, Human
gccuggagggauagaaugcaag

SEQ ID NO: 577699 - RNA, 22 nt, Human
cuccugggucauugccagcaaa

SEQ ID NO: 577700 - RNA, 22 nt, Human
augucagaaucuacauucuacu

SEQ ID NO: 577701 - RNA, 21 nt, Human
uuuugguccuggcuuaggagc

SEQ ID NO: 577702 - RNA, 22 nt, Human
ucugauaacaaccaugucuggc

SEQ ID NO: 577703 - RNA, 21 nt, Human
cacagagauauuggugagccu

SEQ ID NO: 577704 - RNA, 22 nt, Human
caucauauauuucuacaagugc

SEQ ID NO: 577705 - RNA, 22 nt, Human
ggggucaagcucagaauccuag

SEQ ID NO: 577706 - RNA, 22 nt, Human
caguccuuggcuucauccgagu

SEQ ID NO: 577707 - RNA, 22 nt, Human
gcuggcccagggucaccuagga

SEQ ID NO: 577708 - RNA, 22 nt, Human
acacuacaaucucagaacuaua

SEQ ID NO: 577709 - RNA, 22 nt, Human
aaucuuacaccgaauuuaaacu

SEQ ID NO: 577710 - RNA, 22 nt, Human
ggccaguccccuaauccagggc

SEQ ID NO: 577711 - RNA, 22 nt, Human
gaucacaucuuuaugaguauuu

SEQ ID NO: 577712 - RNA, 22 nt, Human
uacacauaaaaugcucauggua

SEQ ID NO: 577713 - RNA, 22 nt, Human
gcucaaagaauauucagaauga

SEQ ID NO: 577714 - RNA, 22 nt, Human
uaaaaccauaaggcuggaagga

SEQ ID NO: 577715 - RNA, 22 nt, Human
aguuucaguucugucauuuaua

SEQ ID NO: 577716 - RNA, 22 nt, Human
ucuuuacaaucuaagcauaguu

SEQ ID NO: 577717 - RNA, 21 nt, Human
cuacacagcuuucuauaggaa

SEQ ID NO: 577718 - RNA, 22 nt, Human
cagcugugcuguauuaagcucu

SEQ ID NO: 577719 - RNA, 22 nt, Human
cuccagcugccaccagauguuu

SEQ ID NO: 577720 - RNA, 22 nt, Human
caagaauccuguucuugaagau

SEQ ID NO: 577721 - RNA, 22 nt, Human
ggaggccaaggcaggcggauca

SEQ ID NO: 577722 - RNA, 22 nt, Human
gugcauauaugugcagcaucaa

SEQ ID NO: 577723 - RNA, 22 nt, Human
auuugcauaauagugauuugua

SEQ ID NO: 577724 - RNA, 22 nt, Human
cagcucuuccuacccuaguugg

SEQ ID NO: 577725 - RNA, 22 nt, Human
gcgcaggagccgcggagggccg

SEQ ID NO: 577726 - RNA, 22 nt, Human
uuuaucuggacugugauauaaa

SEQ ID NO: 577727 - RNA, 22 nt, Human
uuugcaaagugacuauuauaug

SEQ ID NO: 577728 - RNA, 22 nt, Human
uguuucuucucacacaaacuca

SEQ ID NO: 577729 - RNA, 22 nt, Human
gccuggcugcuagccagaggca

SEQ ID NO: 577730 - RNA, 22 nt, Human
gcgucucaaggcccccaggcca

SEQ ID NO: 577731 - RNA, 20 nt, Human
uccuucagacgacaagcaag

SEQ ID NO: 577732 - RNA, 22 nt, Human
gucuggaggaggaagaaggcac

SEQ ID NO: 577733 - RNA, 22 nt, Human
cuuuucaugccagcccaucaca

SEQ ID NO: 577734 - RNA, 22 nt, Human
gugcugggcccugagaccaggg

SEQ ID NO: 577735 - RNA, 20 nt, Human
guaaagcauucuuggcauac

SEQ ID NO: 577736 - RNA, 22 nt, Human
ggugagaggcagaggacagcuu

SEQ ID NO: 577737 - RNA, 22 nt, Human
cccugggcagucugcacuucag

SEQ ID NO: 577738 - RNA, 22 nt, Human
cugggcucugcggugucgcucu

SEQ ID NO: 577739 - RNA, 22 nt, Human
acugugcuaucuacugaauuau

SEQ ID NO: 577740 - RNA, 22 nt, Human
gugcuucuccguucugcagcac

SEQ ID NO: 577741 - RNA, 18 nt, Human
ggagucucaggagaggaa

SEQ ID NO: 577742 - RNA, 22 nt, Human
gagguuuuaaguugaaggggga

SEQ ID NO: 577743 - RNA, 22 nt, Human
guauuuccucgcuugugggauu

SEQ ID NO: 577744 - RNA, 22 nt, Human
uguauagaguuggaagaugacu

SEQ ID NO: 577745 - RNA, 22 nt, Human
uucacaaaaaugcugaacaguu

SEQ ID NO: 577746 - RNA, 23 nt, Human
agagggagauguuuuucucaaga

SEQ ID NO: 577747 - RNA, 21 nt, Human
aaugugugcuauuuaucuuuu

SEQ ID NO: 577748 - RNA, 22 nt, Human
gaguuacacaaaauuucuauuu

SEQ ID NO: 577749 - RNA, 19 nt, Human
ccuaaguaacaacaguugu

SEQ ID NO: 577750 - RNA, 22 nt, Human
gaccagggucacucacagggcu

SEQ ID NO: 577751 - RNA, 22 nt, Human
uucaagauaauaggaaugaaaa

SEQ ID NO: 577752 - RNA, 22 nt, Human
gcuuugugaauuauuacucaca

SEQ ID NO: 577753 - RNA, 22 nt, Human
caugcacaaagguaagaugcgu

SEQ ID NO: 577754 - RNA, 19 nt, Human
caauucugcaacacugucc

SEQ ID NO: 577755 - RNA, 22 nt, Human
agcaugcugguguucauggcag

SEQ ID NO: 577756 - RNA, 22 nt, Human
ugagguaaauucuggcccaaac

SEQ ID NO: 577757 - RNA, 22 nt, Human
caggccacagcuaaagaggauu

SEQ ID NO: 577758 - RNA, 22 nt, Human
ugcccuggaaaugagaggugug

SEQ ID NO: 577759 - RNA, 22 nt, Human
uucuauguggcaucaagcucag

SEQ ID NO: 577760 - RNA, 22 nt, Human
gcaggaggaucacuugagccca

SEQ ID NO: 577761 - RNA, 22 nt, Human
aaggggugagcagaggcuucgc

SEQ ID NO: 577762 - RNA, 22 nt, Human
cuguagccaguuuggccucacc

SEQ ID NO: 577763 - RNA, 22 nt, Human
ccagccaggcauugcaaacuga

SEQ ID NO: 577764 - RNA, 22 nt, Human
cuguggcucaauugccuacuga

SEQ ID NO: 577765 - RNA, 22 nt, Human
cagucucucugaaguauuaaga

SEQ ID NO: 577766 - RNA, 22 nt, Human
acugcagcaaagcccgugucuu

SEQ ID NO: 577767 - RNA, 22 nt, Human
aaggagaauuuggcuugugaug

SEQ ID NO: 577768 - RNA, 18 nt, Human
caguuacaccuucauuca

SEQ ID NO: 577769 - RNA, 21 nt, Human
cucagagaaaugucugggagc

SEQ ID NO: 577770 - RNA, 22 nt, Human
gcugagugaggaaaagguuaua

SEQ ID NO: 577771 - RNA, 22 nt, Human
ccagugugccaauuuacagcug

SEQ ID NO: 577772 - RNA, 22 nt, Human
ugggggacugcacuggcgucag

SEQ ID NO: 577773 - RNA, 17 nt, Human
uuacacaggagagcucu

SEQ ID NO: 577774 - RNA, 20 nt, Human
agcagcagauguuggaggug

SEQ ID NO: 577775 - RNA, 22 nt, Human
cauuuucagcacccaucugaaa

SEQ ID NO: 577776 - RNA, 22 nt, Human
caucaucaaaacaaauggaguc

SEQ ID NO: 577777 - RNA, 22 nt, Human
ucauuacaguguuuauaugucu

SEQ ID NO: 577778 - RNA, 22 nt, Human
uccugacuuaacuacucucugg

SEQ ID NO: 577779 - RNA, 22 nt, Human
gcagcaguaggaaauaacacag

SEQ ID NO: 577780 - RNA, 22 nt, Human
gccuggggccagcuugggcuga

SEQ ID NO: 577781 - RNA, 22 nt, Human
augcaguccacaggccacagug

SEQ ID NO: 577782 - RNA, 22 nt, Human
cagcuuugucauuugauuuggg

SEQ ID NO: 577783 - RNA, 20 nt, Human
guuuuaaggcacaggccuuu

SEQ ID NO: 577784 - RNA, 22 nt, Human
ccuuucucuuugcugaucaugu

SEQ ID NO: 577785 - RNA, 22 nt, Human
ccucuccuugcacccgucccgc

SEQ ID NO: 577786 - RNA, 22 nt, Human
gcugggcuugguuucccugcuu

SEQ ID NO: 577787 - RNA, 22 nt, Human
cagcugccagcuucucuccauc

SEQ ID NO: 577788 - RNA, 22 nt, Human
aucacauggaaugauuuuagac

SEQ ID NO: 577789 - RNA, 22 nt, Human
aacaaauuaguugcaagacugg

SEQ ID NO: 577790 - RNA, 22 nt, Human
caggaacaaucuuacuacuauu

SEQ ID NO: 577791 - RNA, 22 nt, Human
acauauugagcucuaaaaguac

SEQ ID NO: 577792 - RNA, 22 nt, Human
auguuucuauaaagaaguuugg

SEQ ID NO: 577793 - RNA, 22 nt, Human
agaggugacauaggagaggcuc

SEQ ID NO: 577794 - RNA, 22 nt, Human
aaugcacaaaaauuguauguaa

SEQ ID NO: 577795 - RNA, 22 nt, Human
aaaguucagugccuucuauaca

SEQ ID NO: 577796 - RNA, 22 nt, Human
cucucucuuguguugcugcaga

SEQ ID NO: 577797 - RNA, 19 nt, Human
uguuucuuccuccaucuga

SEQ ID NO: 577798 - RNA, 22 nt, Human
ugagcugugugacauugagcca

SEQ ID NO: 577799 - RNA, 22 nt, Human
cagcauugaucccaggcugugg

SEQ ID NO: 577800 - RNA, 21 nt, Human
agaggccaagucaucauuucc

SEQ ID NO: 577801 - RNA, 22 nt, Human
uuauuuccuaaaucucuuuguu

SEQ ID NO: 577802 - RNA, 22 nt, Human
ucaauuaugccauugcaauauu

SEQ ID NO: 577803 - RNA, 22 nt, Human
accagggcaaauguuuguacuc

SEQ ID NO: 577804 - RNA, 22 nt, Human
gcuuuuggccagauggggaaac

SEQ ID NO: 577805 - RNA, 19 nt, Human
cuagcuugucauuugugug

SEQ ID NO: 577806 - RNA, 22 nt, Human
guuuccuauguccauugaggga

SEQ ID NO: 577807 - RNA, 18 nt, Human
uguuuauuuuucucuuac

SEQ ID NO: 577808 - RNA, 19 nt, Human
ugugccuccucgucuccua

SEQ ID NO: 577809 - RNA, 22 nt, Human
uagaggcauuaaugaauaaaca

SEQ ID NO: 577810 - RNA, 22 nt, Human
caaacauagugaagcaaugaca

SEQ ID NO: 577811 - RNA, 22 nt, Human
aaaacauuuuacugccaucuca

SEQ ID NO: 577812 - RNA, 22 nt, Human
ggggaggagccauguaacuagu

SEQ ID NO: 577813 - RNA, 22 nt, Human
gcagcugcaggcaggcuugcug

SEQ ID NO: 577814 - RNA, 22 nt, Human
ggcuuggcuacaagccaugggc

SEQ ID NO: 577815 - RNA, 22 nt, Human
agucccagcucagaaccacuag

SEQ ID NO: 577816 - RNA, 22 nt, Human
ugagucucccaaguaguuggaa

SEQ ID NO: 577817 - RNA, 22 nt, Human
ccaggccagggcugcagcgagc

SEQ ID NO: 577818 - RNA, 22 nt, Human
cuucccagaccuuagagugcag

SEQ ID NO: 577819 - RNA, 22 nt, Human
uguuugcucugacuaucuugcg

SEQ ID NO: 577820 - RNA, 22 nt, Human
ugacuggagaccucaguagggu

SEQ ID NO: 577821 - RNA, 19 nt, Human
acagacauuugcaauuagc

SEQ ID NO: 577822 - RNA, 22 nt, Human
ucauggaaacaaugcggaaaaa

SEQ ID NO: 577823 - RNA, 22 nt, Human
ccuacaggaaauuguaucaaaa

SEQ ID NO: 577824 - RNA, 22 nt, Human
uuaagacauucagauauuucua

SEQ ID NO: 577825 - RNA, 22 nt, Human
ugcugcucgccacggcccaggg

SEQ ID NO: 577826 - RNA, 22 nt, Human
acagaugcaaggaaaugauugc

SEQ ID NO: 577827 - RNA, 22 nt, Human
cagggcagggauguugcggcag

SEQ ID NO: 577828 - RNA, 22 nt, Human
gggcugagacgauggggucuuc

SEQ ID NO: 577829 - RNA, 22 nt, Human
uuuaagagcauuugcaauuuau

SEQ ID NO: 577830 - RNA, 22 nt, Human
auguuucuacagcguccacuga

SEQ ID NO: 577831 - RNA, 22 nt, Human
ugucauuauuugccuacugacu

SEQ ID NO: 577832 - RNA, 22 nt, Human
uccugccacugcacauauacuu

SEQ ID NO: 577833 - RNA, 22 nt, Human
ugcagcugguuuagaacuagau

SEQ ID NO: 577834 - RNA, 20 nt, Human
cugagagucugugcuuaguc

SEQ ID NO: 577835 - RNA, 22 nt, Human
cuucuggguguggagugaggac

SEQ ID NO: 577836 - RNA, 22 nt, Human
uauuugaaggcauacauuuuga

SEQ ID NO: 577837 - RNA, 19 nt, Human
aggcugcaagguggugggc

SEQ ID NO: 577838 - RNA, 22 nt, Human
cagccagggucaggcagcuucu

SEQ ID NO: 577839 - RNA, 22 nt, Human
uucugagaaugcuucuggaauc

SEQ ID NO: 577840 - RNA, 22 nt, Human
gcugccuccaaucugugccccg

SEQ ID NO: 577841 - RNA, 22 nt, Human
gugccucucauuggcugagccc

SEQ ID NO: 577842 - RNA, 22 nt, Human
cccccucugccgggguccuuca

SEQ ID NO: 577843 - RNA, 22 nt, Human
uuuucagugguaucuuuguaaa

SEQ ID NO: 577844 - RNA, 22 nt, Human
cagugcugugcuggaagcuguu

SEQ ID NO: 577845 - RNA, 22 nt, Human
aaacaggcacauaguaacauuu

SEQ ID NO: 577846 - RNA, 22 nt, Human
ccagggaugcagagguugcagu

SEQ ID NO: 577847 - RNA, 22 nt, Human
gggccacggaaggaccaguggg

SEQ ID NO: 577848 - RNA, 22 nt, Human
uuuuuaucuuguaugugucucu

SEQ ID NO: 577849 - RNA, 22 nt, Human
ucaggcuguagggccccuggag

SEQ ID NO: 577850 - RNA, 22 nt, Human
uggaacacuuuguugaaaugca

SEQ ID NO: 577851 - RNA, 21 nt, Human
agguuucucuuuuauggaggg

SEQ ID NO: 577852 - RNA, 22 nt, Human
gauggggaugagaagugagcag

SEQ ID NO: 577853 - RNA, 22 nt, Human
ugaaggaaugagggaguggguc

SEQ ID NO: 577854 - RNA, 19 nt, Human
uucuccagccugaccugag

SEQ ID NO: 577855 - RNA, 22 nt, Human
auggaucagaaucccgggaggg

SEQ ID NO: 577856 - RNA, 22 nt, Human
ugugaguugcucuuuugcuacu

SEQ ID NO: 577857 - RNA, 22 nt, Human
uugcaggguugacacugccugc

SEQ ID NO: 577858 - RNA, 20 nt, Human
aacaaacuacaaaauuaugu

SEQ ID NO: 577859 - RNA, 22 nt, Human
ggcaggcaucauguggucauua

SEQ ID NO: 577860 - RNA, 22 nt, Human
cagcugaguuuccaagucugcc

SEQ ID NO: 577861 - RNA, 21 nt, Human
acuggccaccacuggcagggg

SEQ ID NO: 577862 - RNA, 21 nt, Human
ugcauauucuucugguggcug

SEQ ID NO: 577863 - RNA, 22 nt, Human
aaaugcagauucaugagcccca

SEQ ID NO: 577864 - RNA, 21 nt, Human
uaucuacaguguccauucagu

SEQ ID NO: 577865 - RNA, 22 nt, Human
caggauggagggagggcuguua

SEQ ID NO: 577866 - RNA, 22 nt, Human
gaggcagcaugguaccuuggag

SEQ ID NO: 577867 - RNA, 22 nt, Human
gugugcaggccacaggccaggg

SEQ ID NO: 577868 - RNA, 22 nt, Human
ggucagaaggcaguuaaacaaa

SEQ ID NO: 577869 - RNA, 22 nt, Human
uuagcaagauaacaguaauuuu

SEQ ID NO: 577870 - RNA, 22 nt, Human
gcugaagggagugcugagucug

SEQ ID NO: 577871 - RNA, 22 nt, Human
uggcagcugucuguggggucuc

SEQ ID NO: 577872 - RNA, 22 nt, Human
ucugggcugaaaugaaggccuu

SEQ ID NO: 577873 - RNA, 22 nt, Human
acaguggaauuuguagaugugu

SEQ ID NO: 577874 - RNA, 22 nt, Human
aaggcaguaggaucuuccacag

SEQ ID NO: 577875 - RNA, 22 nt, Human
uauucaaaguaccuucauugcc

SEQ ID NO: 577876 - RNA, 22 nt, Human
ugccaucuuccuuccucugcac

SEQ ID NO: 577877 - RNA, 22 nt, Human
gggcagcucucacagcagccaa

SEQ ID NO: 577878 - RNA, 22 nt, Human
uugggcugaggagggcguggcc

SEQ ID NO: 577879 - RNA, 22 nt, Human
ccuuacaccuaaaaugagaguu

SEQ ID NO: 577880 - RNA, 22 nt, Human
aucuggaacaaagcuuaggaau

SEQ ID NO: 577881 - RNA, 18 nt, Human
uggcuucuauuuuacuca

SEQ ID NO: 577882 - RNA, 22 nt, Human
acauuucuuccacaugcugcug

SEQ ID NO: 577883 - RNA, 22 nt, Human
uacaagacgagggaaguucuuu

SEQ ID NO: 577884 - RNA, 22 nt, Human
ugaaaucaugagauagugucac

SEQ ID NO: 577885 - RNA, 17 nt, Human
ccuuccucaucuccuuc

SEQ ID NO: 577886 - RNA, 22 nt, Human
ccauguugucaaacuuagagua

SEQ ID NO: 577887 - RNA, 22 nt, Human
cucaaagaagggagguauuugg

SEQ ID NO: 577888 - RNA, 22 nt, Human
aauuuacaggugcacucgccau

SEQ ID NO: 577889 - RNA, 22 nt, Human
ggggcgccccgagggugcgcac

SEQ ID NO: 577890 - RNA, 22 nt, Human
cugggcugcaggaguggggcaa

SEQ ID NO: 577891 - RNA, 21 nt, Human
aggagcuguguuagcuggucg

SEQ ID NO: 577892 - RNA, 22 nt, Human
aaguuacauaaauguccucuag

SEQ ID NO: 577893 - RNA, 22 nt, Human
cugagguagcugugaauguucu

SEQ ID NO: 577894 - RNA, 22 nt, Human
uagggcagcugcaucaggcacu

SEQ ID NO: 577895 - RNA, 22 nt, Human
uggagaugcacgagcaggugga

SEQ ID NO: 577896 - RNA, 22 nt, Human
aaguuacaggagaaagagauca

SEQ ID NO: 577897 - RNA, 20 nt, Human
uggaccauaaacaccaggua

SEQ ID NO: 577898 - RNA, 22 nt, Human
ggagagcaggguccugagauac

SEQ ID NO: 577899 - RNA, 22 nt, Human
ucuuacaagucacccgcuuucu

SEQ ID NO: 577900 - RNA, 21 nt, Human
gauuaaauuuaagcuacaugc

SEQ ID NO: 577901 - RNA, 22 nt, Human
agagauggauguuauuaugggu

SEQ ID NO: 577902 - RNA, 22 nt, Human
agccaacacauguaaaugcacc

SEQ ID NO: 577903 - RNA, 22 nt, Human
aagauauuuuagaacauucacu

SEQ ID NO: 577904 - RNA, 21 nt, Human
aaggacgagguuuugauuaca

SEQ ID NO: 577905 - RNA, 22 nt, Human
auccugggaaugggagggucau

SEQ ID NO: 577906 - RNA, 22 nt, Human
ggcagcaggguagccauuucuc

SEQ ID NO: 577907 - RNA, 22 nt, Human
uacaaagcuguauagccugguc

SEQ ID NO: 577908 - RNA, 20 nt, Human
agccaggcucaagcuccccc

SEQ ID NO: 577909 - RNA, 22 nt, Human
caaguuacauuagaaaucaugc

SEQ ID NO: 577910 - RNA, 22 nt, Human
cagagcaguaaaucuggggcac

SEQ ID NO: 577911 - RNA, 22 nt, Human
uaacacaguucucuguugcaca

SEQ ID NO: 577912 - RNA, 22 nt, Human
agcugcaguuagccccagauga

SEQ ID NO: 577913 - RNA, 22 nt, Human
aguuauaccuuauacacauaug

SEQ ID NO: 577914 - RNA, 22 nt, Human
ggagcagcacugccacacagag

SEQ ID NO: 577915 - RNA, 22 nt, Human
guggcagggguauuccagcuga

SEQ ID NO: 577916 - RNA, 22 nt, Human
cacagagaaugaugagucacug

SEQ ID NO: 577917 - RNA, 22 nt, Human
uuguauuuuguuaugcuacugc

SEQ ID NO: 577918 - RNA, 22 nt, Human
uguauucuaaauacaucuuacc

SEQ ID NO: 577919 - RNA, 23 nt, Human
auuuccuaaaagauaaucauuac

SEQ ID NO: 577920 - RNA, 22 nt, Human
agccugugaaaucucugccacu

SEQ ID NO: 577921 - RNA, 22 nt, Human
auuauuagauucuuaauuguaa

SEQ ID NO: 577922 - RNA, 22 nt, Human
ugggaaauuguauuucuauuuc

SEQ ID NO: 577923 - RNA, 22 nt, Human
uuugggcaggcuuuucccuaga

SEQ ID NO: 577924 - RNA, 22 nt, Human
aagccaguccucuacugggcac

SEQ ID NO: 577925 - RNA, 22 nt, Human
cugccucacauuggcuguguga

SEQ ID NO: 577926 - RNA, 22 nt, Human
agagggagcccagucauagcug

SEQ ID NO: 577927 - RNA, 22 nt, Human
uaugaacuuuugaugugacaug

SEQ ID NO: 577928 - RNA, 22 nt, Human
aaagcucuuuuccaaguauuga

SEQ ID NO: 577929 - RNA, 22 nt, Human
gacagucccccagcagcaaacc

SEQ ID NO: 577930 - RNA, 22 nt, Human
cccagggguucugagcagcagc

SEQ ID NO: 577931 - RNA, 22 nt, Human
ugguuccuacgcacauugaauu

SEQ ID NO: 577932 - RNA, 22 nt, Human
ccaguuuugccaugguaacacu

SEQ ID NO: 577933 - RNA, 21 nt, Human
ucuccaguauccuucucugag

SEQ ID NO: 577934 - RNA, 22 nt, Human
aagaacuuccuaauauauuuuc

SEQ ID NO: 577935 - RNA, 19 nt, Human
cuggcagccugucuguguc

SEQ ID NO: 577936 - RNA, 22 nt, Human
aggcacugugcugaugucuuau

SEQ ID NO: 577937 - RNA, 22 nt, Human
cagggugcagugucgcugcuag

SEQ ID NO: 577938 - RNA, 22 nt, Human
aucuuacauucccucaccauuu

SEQ ID NO: 577939 - RNA, 22 nt, Human
uauaaaauggcaucagcuccaa

SEQ ID NO: 577940 - RNA, 22 nt, Human
uacaaauuaaugggcauguuua

SEQ ID NO: 577941 - RNA, 22 nt, Human
uugcccugucuuaagcuggcaa

SEQ ID NO: 577942 - RNA, 22 nt, Human
agacuuaauagaagcaugacau

SEQ ID NO: 577943 - RNA, 22 nt, Human
gcauuccuugguuuaaaacaag

SEQ ID NO: 577944 - RNA, 22 nt, Human
uaacuuuaggaauagguaaucu

SEQ ID NO: 577945 - RNA, 22 nt, Human
cugcuccagacaccugcagggg

SEQ ID NO: 577946 - RNA, 21 nt, Human
gaugauggcaggcagcacugg

SEQ ID NO: 577947 - RNA, 22 nt, Human
ugaugcauugccgacuuacugg

SEQ ID NO: 577948 - RNA, 22 nt, Human
gugggagcuuuggcaucaggcu

SEQ ID NO: 577949 - RNA, 20 nt, Human
acugggcauaccuguccugu

SEQ ID NO: 577950 - RNA, 22 nt, Human
ugaauaaacuaugaggaggaau

SEQ ID NO: 577951 - RNA, 21 nt, Human
ggcagccugacccccagagag

SEQ ID NO: 577952 - RNA, 23 nt, Human
agggaagaaacaugaagggcugu

SEQ ID NO: 577953 - RNA, 22 nt, Human
gacagcuucgaggaggugagcu

SEQ ID NO: 577954 - RNA, 22 nt, Human
ccacagcugaaagcagaggcuc

SEQ ID NO: 577955 - RNA, 22 nt, Human
uggcagaggaaaaagucacugg

SEQ ID NO: 577956 - RNA, 22 nt, Human
ggccugggccuuuguguuuuga

SEQ ID NO: 577957 - RNA, 22 nt, Human
ucaguggauuggaugagaucug

SEQ ID NO: 577958 - RNA, 22 nt, Human
acagcagugcacagagaacccu

SEQ ID NO: 577959 - RNA, 22 nt, Human
ggagguggcagagggacauucu

SEQ ID NO: 577960 - RNA, 22 nt, Human
ucagcucuguguacaguuagca

SEQ ID NO: 577961 - RNA, 22 nt, Human
ugcaauuucaggcauauauugu

SEQ ID NO: 577962 - RNA, 22 nt, Human
cccugccuucuuggccuuuaaa

SEQ ID NO: 577963 - RNA, 22 nt, Human
gccucuggguuggugacaggcu

SEQ ID NO: 577964 - RNA, 22 nt, Human
cagcccaggacugcagguguuu

SEQ ID NO: 577965 - RNA, 22 nt, Human
uccaggcuugagaccaggcucu

SEQ ID NO: 577966 - RNA, 22 nt, Human
caguccuucuccauuaaggcuc

SEQ ID NO: 577967 - RNA, 23 nt, Human
ugaaauauucuuuugcaugagcu

SEQ ID NO: 577968 - RNA, 22 nt, Human
cuccccuccuuaggucuucuag

SEQ ID NO: 577969 - RNA, 21 nt, Human
uggcucgauuuauagcauuuc

SEQ ID NO: 577970 - RNA, 22 nt, Human
caguaugugaugcaacggaaua

SEQ ID NO: 577971 - RNA, 22 nt, Human
acacagaagcuuuuucuauucc

SEQ ID NO: 577972 - RNA, 22 nt, Human
agggcaguucagccacaggcuc

SEQ ID NO: 577973 - RNA, 22 nt, Human
cucccaggcacagggaggagcc

SEQ ID NO: 577974 - RNA, 19 nt, Human
ucucugccgaucagggccc

SEQ ID NO: 577975 - RNA, 22 nt, Human
aguuacaaccaugacacaagca

SEQ ID NO: 577976 - RNA, 22 nt, Human
augcauauuuucuacuauaucg

SEQ ID NO: 577977 - RNA, 22 nt, Human
uguuaaacagcugucuucuuca

SEQ ID NO: 577978 - RNA, 23 nt, Human
cccagguagcccucuagagccug

SEQ ID NO: 577979 - RNA, 22 nt, Human
auuacaauaagguuuauuugua

SEQ ID NO: 577980 - RNA, 22 nt, Human
accccagguccagguuacagag

SEQ ID NO: 577981 - RNA, 22 nt, Human
agggaaaguaagcauuucauua

SEQ ID NO: 577982 - RNA, 22 nt, Human
uccucugcucagcauuccucac

SEQ ID NO: 577983 - RNA, 22 nt, Human
aagcagugaugcauacagcugu

SEQ ID NO: 577984 - RNA, 22 nt, Human
gcucagagaaaacuggggcuug

SEQ ID NO: 577985 - RNA, 22 nt, Human
ugucuccuaaugucuguuuccu

SEQ ID NO: 577986 - RNA, 22 nt, Human
ucugaagaacugucuagagaac

SEQ ID NO: 577987 - RNA, 22 nt, Human
gggguggagaugguggcccuuu

SEQ ID NO: 577988 - RNA, 22 nt, Human
caguccaggccuggaggagcca

SEQ ID NO: 577989 - RNA, 22 nt, Human
ucaggaacauaaugugagucag

SEQ ID NO: 577990 - RNA, 22 nt, Human
ucuugggggacuuuggcaugga

SEQ ID NO: 577991 - RNA, 22 nt, Human
acagagacaaauguuaguaguu

SEQ ID NO: 577992 - RNA, 19 nt, Human
uguggccaugguucagcug

SEQ ID NO: 577993 - RNA, 22 nt, Human
ggugaagguggaacgcagagca

SEQ ID NO: 577994 - RNA, 22 nt, Human
gaagccaagugcaaaugccuua

SEQ ID NO: 577995 - RNA, 22 nt, Human
aaaugugucauauucaaaguca

SEQ ID NO: 577996 - RNA, 22 nt, Human
aaguacagaaauagcaggugca

SEQ ID NO: 577997 - RNA, 22 nt, Human
agaauaagccugacgaaaccua

SEQ ID NO: 577998 - RNA, 22 nt, Human
uaggaaggccugucacuacuug

SEQ ID NO: 577999 - RNA, 22 nt, Human
uaguguucugggcugagagggg

SEQ ID NO: 578000 - RNA, 22 nt, Human
aagcaaaugugggugcagaauu

SEQ ID NO: 578001 - RNA, 22 nt, Human
uaacaguauugaagauaaacua

SEQ ID NO: 578002 - RNA, 22 nt, Human
uucugcuuuucucugucugagu

SEQ ID NO: 578003 - RNA, 22 nt, Human
uuccuucuggagcccggggagc

SEQ ID NO: 578004 - RNA, 22 nt, Human
gcagccacucucauuccacgug

SEQ ID NO: 578005 - RNA, 20 nt, Human
ggccugagcauggcuggcag

SEQ ID NO: 578006 - RNA, 22 nt, Human
uauuagcuuguuuggcaggaug

SEQ ID NO: 578007 - RNA, 22 nt, Human
cugcucuugagggacugcgguc

SEQ ID NO: 578008 - RNA, 22 nt, Human
caaggaaaagaaguauuucaga

SEQ ID NO: 578009 - RNA, 22 nt, Human
aauaaauguuaagauugucuca

SEQ ID NO: 578010 - RNA, 22 nt, Human
cagcuucaugacaaacaguuuu

SEQ ID NO: 578011 - RNA, 22 nt, Human
uugucaugauccuucuguuagg

SEQ ID NO: 578012 - RNA, 22 nt, Human
gucauucaaacuguaucacuug

SEQ ID NO: 578013 - RNA, 22 nt, Human
cccagguggcagaagcugcagu

SEQ ID NO: 578014 - RNA, 22 nt, Human
uccugagauaggaguugaaggc

SEQ ID NO: 578015 - RNA, 22 nt, Human
uuuaucuguuguacauuuaugc

SEQ ID NO: 578016 - RNA, 22 nt, Human
uacagucaagcauaagaaguca

SEQ ID NO: 578017 - RNA, 22 nt, Human
agcugcaggcccaugcucaguc

SEQ ID NO: 578018 - RNA, 22 nt, Human
cuuagaaugggacccaaugggu

SEQ ID NO: 578019 - RNA, 22 nt, Human
uccaguuugguucuguucucca

SEQ ID NO: 578020 - RNA, 22 nt, Human
acauggaaaacuaacugcuuuu

SEQ ID NO: 578021 - RNA, 22 nt, Human
uugucucucauuccugcaacuc

SEQ ID NO: 578022 - RNA, 22 nt, Human
guauuuccuauagugagggccu

SEQ ID NO: 578023 - RNA, 22 nt, Human
agcuggagccagugugaggcuu

SEQ ID NO: 578024 - RNA, 22 nt, Human
aaaguuuuguugauuguggaau

SEQ ID NO: 578025 - RNA, 22 nt, Human
gugcagugagcagugcagcacc

SEQ ID NO: 578026 - RNA, 22 nt, Human
aucauuauaaugguauaguugu

SEQ ID NO: 578027 - RNA, 22 nt, Human
aucuacaacaucacauggcauu

SEQ ID NO: 578028 - RNA, 22 nt, Human
acccaaagcaauauucaucagu

SEQ ID NO: 578029 - RNA, 22 nt, Human
aggcacaaaagcagggugacca

SEQ ID NO: 578030 - RNA, 22 nt, Human
ucaguguuuccuagagcauaua

SEQ ID NO: 578031 - RNA, 22 nt, Human
auucuacaacccaauaauaauu

SEQ ID NO: 578032 - RNA, 22 nt, Human
ccagcccucacugaggccucuc

SEQ ID NO: 578033 - RNA, 22 nt, Human
ucuaaagagaaccuuuucucau

SEQ ID NO: 578034 - RNA, 22 nt, Human
gggugcaggggacccuagggac

SEQ ID NO: 578035 - RNA, 20 nt, Human
auacaagaugaguaauuucu

SEQ ID NO: 578036 - RNA, 22 nt, Human
uucucacaggcuggaaugauga

SEQ ID NO: 578037 - RNA, 22 nt, Human
aacagcuuagaaauguugcuaa

SEQ ID NO: 578038 - RNA, 22 nt, Human
gccaggcuguggggaacuugaa

SEQ ID NO: 578039 - RNA, 22 nt, Human
agcugguugacguuauccagga

SEQ ID NO: 578040 - RNA, 22 nt, Human
ucaaauaugugauagaagcuaa

SEQ ID NO: 578041 - RNA, 22 nt, Human
uccugccuucauacugcuguau

SEQ ID NO: 578042 - RNA, 21 nt, Human
gaccccagaccagcagacaca

SEQ ID NO: 578043 - RNA, 22 nt, Human
uagcuauuuggaaaauuccaau

SEQ ID NO: 578044 - RNA, 22 nt, Human
ucaugcuuugguugcuguccuu

SEQ ID NO: 578045 - RNA, 22 nt, Human
accugagggcccaaacuuggua

SEQ ID NO: 578046 - RNA, 21 nt, Human
cucagagacaaaugccauccc

SEQ ID NO: 578047 - RNA, 22 nt, Human
ugcccuuaugaaagaggcccaa

SEQ ID NO: 578048 - RNA, 17 nt, Human
gaggagcuccaguaggu

SEQ ID NO: 578049 - RNA, 22 nt, Human
aacaggaaauacuuaugaggua

SEQ ID NO: 578050 - RNA, 22 nt, Human
uggcuccuaucaaggagugggu

SEQ ID NO: 578051 - RNA, 22 nt, Human
cagcucugccacuuccuagcua

SEQ ID NO: 578052 - RNA, 22 nt, Human
ugcacuuugcaggcauggaaac

SEQ ID NO: 578053 - RNA, 22 nt, Human
ucauuuucccacugaagcuguc

SEQ ID NO: 578054 - RNA, 22 nt, Human
cuucuucucuacauccuuugau

SEQ ID NO: 578055 - RNA, 22 nt, Human
uguccuggugcuccagguggcu

SEQ ID NO: 578056 - RNA, 22 nt, Human
agugcugggauuacaggcauaa

SEQ ID NO: 578057 - RNA, 22 nt, Human
agugcugggauugcaggcauga

SEQ ID NO: 578058 - RNA, 22 nt, Human
aagaucagaacuuuauacagga

SEQ ID NO: 578059 - RNA, 22 nt, Human
gagagccagcaguaaagacauu

SEQ ID NO: 578060 - RNA, 22 nt, Human
gcagggcugcugaaacuuguuu

SEQ ID NO: 578061 - RNA, 22 nt, Human
uccaggcuucacgucugcccuc

SEQ ID NO: 578062 - RNA, 22 nt, Human
acuuccuggauucccaagggcu

SEQ ID NO: 578063 - RNA, 22 nt, Human
gcugagucagauugcagucuug

SEQ ID NO: 578064 - RNA, 22 nt, Human
aggcaggccgugucccuccuca

SEQ ID NO: 578065 - RNA, 22 nt, Human
agugggaggcggcugacgggcg

SEQ ID NO: 578066 - RNA, 22 nt, Human
cccagcaguacccaagcccuug

SEQ ID NO: 578067 - RNA, 22 nt, Human
uuuuguguuguaaugucagcua

SEQ ID NO: 578068 - RNA, 22 nt, Human
ccaagagguugaggcugcagug

SEQ ID NO: 578069 - RNA, 22 nt, Human
gaggcagcuuaggguacugacu

SEQ ID NO: 578070 - RNA, 22 nt, Human
ccaggagcuggcauguggagag

SEQ ID NO: 578071 - RNA, 22 nt, Human
ccaggguggggcaggcccacug

SEQ ID NO: 578072 - RNA, 22 nt, Human
uugaggcagggcaugguggccc

SEQ ID NO: 578073 - RNA, 20 nt, Human
cugagcccccagccugcagg

SEQ ID NO: 578074 - RNA, 22 nt, Human
agcugaggcaugaugcuaucag

SEQ ID NO: 578075 - RNA, 22 nt, Human
aggaggccccuccuggguugcu

SEQ ID NO: 578076 - RNA, 22 nt, Human
ucauuucaaguucugacagcua

SEQ ID NO: 578077 - RNA, 22 nt, Human
ugugcuucucacaucacuguug

SEQ ID NO: 578078 - RNA, 22 nt, Human
ugacacugccgaaacuguagag

SEQ ID NO: 578079 - RNA, 19 nt, Human
acagugcuucugagugagg

SEQ ID NO: 578080 - RNA, 19 nt, Human
acugucacauaaaggaagg

SEQ ID NO: 578081 - RNA, 22 nt, Human
cccagcacuuugaauaugucac

SEQ ID NO: 578082 - RNA, 22 nt, Human
cuggagccuagguugaccuggg

SEQ ID NO: 578083 - RNA, 23 nt, Human
aaagaugugaguauucauauggc

SEQ ID NO: 578084 - RNA, 22 nt, Human
ugacagcauaacacuggucuug

SEQ ID NO: 578085 - RNA, 22 nt, Human
ugugaagguaaggaggggcaag

SEQ ID NO: 578086 - RNA, 22 nt, Human
uaguacaguacugggcucuagu

SEQ ID NO: 578087 - RNA, 23 nt, Human
uucugcauguuucagagcuggga

SEQ ID NO: 578088 - RNA, 22 nt, Human
ccugggcaucucaugcaccugc

SEQ ID NO: 578089 - RNA, 22 nt, Human
caggccagaguccaacuccaga

SEQ ID NO: 578090 - RNA, 22 nt, Human
cacagagauggccagggcacau

SEQ ID NO: 578091 - RNA, 22 nt, Human
auuauaggcuugagccaccgug

SEQ ID NO: 578092 - RNA, 21 nt, Human
uaagcuaaacauucaguuaac

SEQ ID NO: 578093 - RNA, 22 nt, Human
uccucccugcacucagugaagu

SEQ ID NO: 578094 - RNA, 22 nt, Human
auccucagagaacgaacacaau

SEQ ID NO: 578095 - RNA, 22 nt, Human
ugcagggcccuugggguugaac

SEQ ID NO: 578096 - RNA, 22 nt, Human
ccagugcuucuuugcuagcugg

SEQ ID NO: 578097 - RNA, 22 nt, Human
cagacacuauuguguauaaauc

SEQ ID NO: 578098 - RNA, 22 nt, Human
uuuucuauuaacucauuuugca

SEQ ID NO: 578099 - RNA, 22 nt, Human
ugcagagguuuccaggcaaguu

SEQ ID NO: 578100 - RNA, 22 nt, Human
guugaguggguuaggaugcuga

SEQ ID NO: 578101 - RNA, 22 nt, Human
uucagaaaggauaauuggaagg

SEQ ID NO: 578102 - RNA, 22 nt, Human
gcagggccagugcagagaggaa

SEQ ID NO: 578103 - RNA, 22 nt, Human
agccagcuggugggucagcugg

SEQ ID NO: 578104 - RNA, 22 nt, Human
gagugaguggccaggaggcaga

SEQ ID NO: 578105 - RNA, 22 nt, Human
ucaggcugcuggccagcaggcu

SEQ ID NO: 578106 - RNA, 22 nt, Human
gagcaaagcuuuuagggccuuu

SEQ ID NO: 578107 - RNA, 18 nt, Human
acaggcuauugcaggaga

SEQ ID NO: 578108 - RNA, 22 nt, Human
gacacucuccuccaguggauag

SEQ ID NO: 578109 - RNA, 22 nt, Human
ccuggcugaacaaagucccucc

SEQ ID NO: 578110 - RNA, 22 nt, Human
cauuucagugucuugugaugaa

SEQ ID NO: 578111 - RNA, 22 nt, Human
uguauuaugauuguuguucaug

SEQ ID NO: 578112 - RNA, 22 nt, Human
uagaaaccaucucacugcucag

SEQ ID NO: 578113 - RNA, 22 nt, Human
ucucacacuauuucaggugacu

SEQ ID NO: 578114 - RNA, 22 nt, Human
cacugucuuuugugaagacaau

SEQ ID NO: 578115 - RNA, 22 nt, Human
cuuaauuucaaacugcuaguga

SEQ ID NO: 578116 - RNA, 22 nt, Human
ucugccuguugagccuaaggcc

SEQ ID NO: 578117 - RNA, 22 nt, Human
uggagggcucuuucaccuggua

SEQ ID NO: 578118 - RNA, 22 nt, Human
cgagguaguggcggccgcggcc

SEQ ID NO: 578119 - RNA, 22 nt, Human
uaacaaugguuuugcugauaau

SEQ ID NO: 578120 - RNA, 22 nt, Human
uuagugauaggacuuuaaagcc

SEQ ID NO: 578121 - RNA, 22 nt, Human
gacagcuucuaugugacgagca

SEQ ID NO: 578122 - RNA, 22 nt, Human
caggagcucaagaccacccugg

SEQ ID NO: 578123 - RNA, 23 nt, Human
ucuguuuugcaacaugugacaag

SEQ ID NO: 578124 - RNA, 22 nt, Human
cagaggcugccagccaugugca

SEQ ID NO: 578125 - RNA, 22 nt, Human
cagagacaggcuugcccuccac

SEQ ID NO: 578126 - RNA, 22 nt, Human
ccagcucuuggugcacuuacau

SEQ ID NO: 578127 - RNA, 22 nt, Human
ugaagccacuuuccagaaucac

SEQ ID NO: 578128 - RNA, 22 nt, Human
cuacagugucgugugguuucug

SEQ ID NO: 578129 - RNA, 22 nt, Human
gcuggagauacugcucaguauc

SEQ ID NO: 578130 - RNA, 23 nt, Human
acagggcuagcugacagugguau

SEQ ID NO: 578131 - RNA, 22 nt, Human
auucuuguaaauuuugugugaa

SEQ ID NO: 578132 - RNA, 22 nt, Human
cagagagagugggguguggauu

SEQ ID NO: 578133 - RNA, 22 nt, Human
ggcuuccuccuuccugcuguca

SEQ ID NO: 578134 - RNA, 22 nt, Human
uggaaagagguagaggaucugg

SEQ ID NO: 578135 - RNA, 22 nt, Human
ucuggagaggaggauguggaca

SEQ ID NO: 578136 - RNA, 22 nt, Human
caaagaccauguggccugaaaa

SEQ ID NO: 578137 - RNA, 22 nt, Human
auaguuuccauugcugaccaaa

SEQ ID NO: 578138 - RNA, 22 nt, Human
cuucaaaucccccugaguuuga

SEQ ID NO: 578139 - RNA, 22 nt, Human
ucaaugaaagagcaugcauuuu

SEQ ID NO: 578140 - RNA, 22 nt, Human
aagggcuggcccugggaagagu

SEQ ID NO: 578141 - RNA, 22 nt, Human
accacuggccugguggggacca

SEQ ID NO: 578142 - RNA, 22 nt, Human
aggaaaaugaaacagcaacugu

SEQ ID NO: 578143 - RNA, 22 nt, Human
uauguacucuaauuugucucau

SEQ ID NO: 578144 - RNA, 22 nt, Human
acagcagguuuuaacuuugaag

SEQ ID NO: 578145 - RNA, 22 nt, Human
gagcuucuuguuucuucaucug

SEQ ID NO: 578146 - RNA, 22 nt, Human
uuaaagcaaaaacuaggaugga

SEQ ID NO: 578147 - RNA, 22 nt, Human
aacuucauuccuuuuuaugacu

SEQ ID NO: 578148 - RNA, 22 nt, Human
accucagaggaggcuccuggcu

SEQ ID NO: 578149 - RNA, 22 nt, Human
cugauuccugauucaugcucuu

SEQ ID NO: 578150 - RNA, 22 nt, Human
augauauuuuaguaaagugaua

SEQ ID NO: 578151 - RNA, 22 nt, Human
ugucccaggccucauguugcca

SEQ ID NO: 578152 - RNA, 22 nt, Human
caccagguuccgggcagagcug

SEQ ID NO: 578153 - RNA, 22 nt, Human
uuggccaaaggaaagacuacug

SEQ ID NO: 578154 - RNA, 22 nt, Human
ggaggccaggugggagucaucu

SEQ ID NO: 578155 - RNA, 22 nt, Human
ccaggcccaccuuggccacuua

SEQ ID NO: 578156 - RNA, 22 nt, Human
gauguucuagaagugugguguu

SEQ ID NO: 578157 - RNA, 22 nt, Human
ucagaacagaagaaggaacacg

SEQ ID NO: 578158 - RNA, 22 nt, Human
gggguggauuccuacaggucca

SEQ ID NO: 578159 - RNA, 22 nt, Human
ugugggaaucagccaggggggc

SEQ ID NO: 578160 - RNA, 22 nt, Human
uuuagacauagcugaaaucauu

SEQ ID NO: 578161 - RNA, 22 nt, Human
auugugcaguaaaguccuuuuc

SEQ ID NO: 578162 - RNA, 22 nt, Human
ugaaugaugaggggagaauaau

SEQ ID NO: 578163 - RNA, 22 nt, Human
ucugagaacauaaauugacuuc

SEQ ID NO: 578164 - RNA, 22 nt, Human
uuucugccaaccauuuaaacuc

SEQ ID NO: 578165 - RNA, 22 nt, Human
gcagggcugauguuauugacga

SEQ ID NO: 578166 - RNA, 22 nt, Human
aggccaaagcacagagcuggaa

SEQ ID NO: 578167 - RNA, 22 nt, Human
gagagugucgggggccccagga

SEQ ID NO: 578168 - RNA, 22 nt, Human
auucugauaucuuauucuagcu

SEQ ID NO: 578169 - RNA, 21 nt, Human
ggugacacguggccccgcucu

SEQ ID NO: 578170 - RNA, 22 nt, Human
agcacuagacauguaagugagc

SEQ ID NO: 578171 - RNA, 22 nt, Human
acccagggucaccccguagggu

SEQ ID NO: 578172 - RNA, 22 nt, Human
ugagaaagugggugccuagcaa

SEQ ID NO: 578173 - RNA, 22 nt, Human
aaagagcuaacauugccgagau

SEQ ID NO: 578174 - RNA, 22 nt, Human
gaugagacagaauagcccaagg

SEQ ID NO: 578175 - RNA, 22 nt, Human
gaaaauuuaauucucuucugug

SEQ ID NO: 578176 - RNA, 22 nt, Human
cugugggaauacugcgagugua

SEQ ID NO: 578177 - RNA, 19 nt, Human
ugagugaaggccguggugg

SEQ ID NO: 578178 - RNA, 22 nt, Human
gggcagugucggggcccaggga

SEQ ID NO: 578179 - RNA, 22 nt, Human
caggguggugaauagcuauagu

SEQ ID NO: 578180 - RNA, 22 nt, Human
acacauuaaaacgucuacaaug

SEQ ID NO: 578181 - RNA, 22 nt, Human
gaggcagagugcaccccaggag

SEQ ID NO: 578182 - RNA, 22 nt, Human
uacaggaagcacucaagaaaug

SEQ ID NO: 578183 - RNA, 22 nt, Human
ucacacagugagaaagugcgga

SEQ ID NO: 578184 - RNA, 22 nt, Human
acccaggcuggaaugcaguggu

SEQ ID NO: 578185 - RNA, 22 nt, Human
ucuuugaacucuguguauuaac

SEQ ID NO: 578186 - RNA, 22 nt, Human
aucauccuauugugccccaggu

SEQ ID NO: 578187 - RNA, 22 nt, Human
cugaggugcuagggucccugcu

SEQ ID NO: 578188 - RNA, 20 nt, Human
ucugggcagggcacauggaa

SEQ ID NO: 578189 - RNA, 22 nt, Human
cgcuggucaccauggcguccug

SEQ ID NO: 578190 - RNA, 18 nt, Human
uguuuccuccuggaggcu

SEQ ID NO: 578191 - RNA, 19 nt, Human
uaaugcacuuaacacaugg

SEQ ID NO: 578192 - RNA, 22 nt, Human
ggugaggaauuggggacugacc

SEQ ID NO: 578193 - RNA, 19 nt, Human
cacuuuauuucuguuuugu

SEQ ID NO: 578194 - RNA, 22 nt, Human
cugcccugugaggguccuuggg

SEQ ID NO: 578195 - RNA, 22 nt, Human
auggcagccugagcagaggaau

SEQ ID NO: 578196 - RNA, 22 nt, Human
auuuauuaagcaucugcuaugu

SEQ ID NO: 578197 - RNA, 22 nt, Human
uuguuuaaaagaaaucauagaa

SEQ ID NO: 578198 - RNA, 22 nt, Human
ugccaggcucaggaugucccug

SEQ ID NO: 578199 - RNA, 22 nt, Human
ggcugcugaaguguggcaaucu

SEQ ID NO: 578200 - RNA, 22 nt, Human
acacuucauagcaagguuggag

SEQ ID NO: 578201 - RNA, 22 nt, Human
ggcaaaggaaaacgucucagcu

SEQ ID NO: 578202 - RNA, 21 nt, Human
ucccagcugggucagugcugc

SEQ ID NO: 578203 - RNA, 22 nt, Human
gcucccaggaagagaagggcca

SEQ ID NO: 578204 - RNA, 22 nt, Human
gcccaggaguuggaggcugcag

SEQ ID NO: 578205 - RNA, 22 nt, Human
uaaugcuuuguuuugaucuaac

SEQ ID NO: 578206 - RNA, 22 nt, Human
ccaggagcauuaagagaacaua

SEQ ID NO: 578207 - RNA, 22 nt, Human
gcagagcucuguucuuaucucc

SEQ ID NO: 578208 - RNA, 21 nt, Human
augaagcaagggucacacgug

SEQ ID NO: 578209 - RNA, 18 nt, Human
agcaggugugcagaaugu

SEQ ID NO: 578210 - RNA, 22 nt, Human
gcuguucccauguggggcucag

SEQ ID NO: 578211 - RNA, 22 nt, Human
cuguguuuggacaacuuuucag

SEQ ID NO: 578212 - RNA, 22 nt, Human
gcugucugagaacaugguggaa

SEQ ID NO: 578213 - RNA, 22 nt, Human
acagccaaggaauuaggaaggg

SEQ ID NO: 578214 - RNA, 22 nt, Human
caaggaaggagagaugaugggu

SEQ ID NO: 578215 - RNA, 22 nt, Human
cacaugcuuagauuucagugga

SEQ ID NO: 578216 - RNA, 22 nt, Human
cauaucuucugacaugaucagg

SEQ ID NO: 578217 - RNA, 22 nt, Human
aaauucuguccugaaugccauu

SEQ ID NO: 578218 - RNA, 22 nt, Human
agcuccuguucugagagcagga

SEQ ID NO: 578219 - RNA, 22 nt, Human
uucuuggagauaaauucuuaca

SEQ ID NO: 578220 - RNA, 22 nt, Human
acagcagagccaguggcucuag

SEQ ID NO: 578221 - RNA, 20 nt, Human
uguuucugacgguaggagag

SEQ ID NO: 578222 - RNA, 22 nt, Human
uagacauuuggaguuuuaugac

SEQ ID NO: 578223 - RNA, 20 nt, Human
uuauuuccaguccagguccu

SEQ ID NO: 578224 - RNA, 22 nt, Human
ccuaccaguaggaggccagaga

SEQ ID NO: 578225 - RNA, 22 nt, Human
uggcugagugaacauguccauu

SEQ ID NO: 578226 - RNA, 22 nt, Human
gcuucugugagugcagaugcug

SEQ ID NO: 578227 - RNA, 22 nt, Human
uugagguauauucacauauauc

SEQ ID NO: 578228 - RNA, 22 nt, Human
aucugaagggaaguggaaggca

SEQ ID NO: 578229 - RNA, 22 nt, Human
caaacugaacacgaaagucuuu

SEQ ID NO: 578230 - RNA, 22 nt, Human
caugucaaccaguuguuugaau

SEQ ID NO: 578231 - RNA, 22 nt, Human
guauuuuucaguuaggagcuua

SEQ ID NO: 578232 - RNA, 22 nt, Human
ugagacagggucuugcucuguu

SEQ ID NO: 578233 - RNA, 22 nt, Human
uccaggcugcagucuugcccuc

SEQ ID NO: 578234 - RNA, 22 nt, Human
ugaucacaagucugaagaauga

SEQ ID NO: 578235 - RNA, 22 nt, Human
accuuuauggagaacuugggau

SEQ ID NO: 578236 - RNA, 22 nt, Human
uuuccucuuugugacacagcug

SEQ ID NO: 578237 - RNA, 19 nt, Human
cucagcuguagcucaugug

SEQ ID NO: 578238 - RNA, 22 nt, Human
ugcaguuuucaaaaguuuacag

SEQ ID NO: 578239 - RNA, 20 nt, Human
gugcauuucaccuguacugu

SEQ ID NO: 578240 - RNA, 18 nt, Human
aaagaaggauuggagagc

SEQ ID NO: 578241 - RNA, 22 nt, Human
gcccaggauaaugcugucccug

SEQ ID NO: 578242 - RNA, 22 nt, Human
cagcucuggcuauugaggacca

SEQ ID NO: 578243 - RNA, 22 nt, Human
uggcagugucuugcuggggcag

SEQ ID NO: 578244 - RNA, 22 nt, Human
ugccagggucagcugcagcucu

SEQ ID NO: 578245 - RNA, 22 nt, Human
ucugaaaugaccuuuccccacu

SEQ ID NO: 578246 - RNA, 22 nt, Human
aaagacauggaacuagagaugg

SEQ ID NO: 578247 - RNA, 20 nt, Human
agggcagagggauuacaggc

SEQ ID NO: 578248 - RNA, 22 nt, Human
uagcuuugggaaugcucuccug

SEQ ID NO: 578249 - RNA, 22 nt, Human
gacagacacaauugauccauga

SEQ ID NO: 578250 - RNA, 23 nt, Human
gaacauucauugguugcuuuaga

SEQ ID NO: 578251 - RNA, 22 nt, Human
cacccagcagcacuuaagacua

SEQ ID NO: 578252 - RNA, 22 nt, Human
ccucccugcuccucaacuggca

SEQ ID NO: 578253 - RNA, 22 nt, Human
aguuaagaauacacaucauaau

SEQ ID NO: 578254 - RNA, 22 nt, Human
ugugccugauggucacguggcc

SEQ ID NO: 578255 - RNA, 22 nt, Human
gagacugcauagauggccacaa

SEQ ID NO: 578256 - RNA, 22 nt, Human
ugaaggugucuuugugaacauc

SEQ ID NO: 578257 - RNA, 22 nt, Human
uggagaaggggcagggucucca

SEQ ID NO: 578258 - RNA, 22 nt, Human
aaguccaaggucaccauucaca

SEQ ID NO: 578259 - RNA, 22 nt, Human
ggccccacgggggaguccuagu

SEQ ID NO: 578260 - RNA, 22 nt, Human
augcauauguacccauguucug

SEQ ID NO: 578261 - RNA, 22 nt, Human
ugucaccucuuuggcugcagcu

SEQ ID NO: 578262 - RNA, 22 nt, Human
uucauauucaaauacucugcuu

SEQ ID NO: 578263 - RNA, 22 nt, Human
ugcuucuuuacuauaggcaauu

SEQ ID NO: 578264 - RNA, 22 nt, Human
guaggcugugugaggcuagaga

SEQ ID NO: 578265 - RNA, 22 nt, Human
cugagaaaugcauuuuuccagc

SEQ ID NO: 578266 - RNA, 21 nt, Human
ugcugccauagaccugaggga

SEQ ID NO: 578267 - RNA, 22 nt, Human
agugggcaggcagggugcgcag

SEQ ID NO: 578268 - RNA, 22 nt, Human
ggacacugaagaaucucagaug

SEQ ID NO: 578269 - RNA, 22 nt, Human
gcuuacaaacaacagaaauuaa

SEQ ID NO: 578270 - RNA, 22 nt, Human
cagcagggcccccgggugcgcc

SEQ ID NO: 578271 - RNA, 22 nt, Human
gccuggagcuacuggacacuga

SEQ ID NO: 578272 - RNA, 22 nt, Human
aauuucuugggagcucagagaa

SEQ ID NO: 578273 - RNA, 22 nt, Human
uucuauaaaugaauguguauau

SEQ ID NO: 578274 - RNA, 22 nt, Human
ccugaccauuugccacaugggu

SEQ ID NO: 578275 - RNA, 22 nt, Human
cugcccugcuggagaucacagu

SEQ ID NO: 578276 - RNA, 22 nt, Human
cuucauuuccauccaacuggga

SEQ ID NO: 578277 - RNA, 22 nt, Human
agagcagguggcaacucuggga

SEQ ID NO: 578278 - RNA, 22 nt, Human
auugcaaucuggugaaaacagu

SEQ ID NO: 578279 - RNA, 19 nt, Human
cucagcacuuuuacacagg

SEQ ID NO: 578280 - RNA, 22 nt, Human
uacaaaguaauguauaauaucg

SEQ ID NO: 578281 - RNA, 21 nt, Human
ccuaguguuaaaacaguuuaa

SEQ ID NO: 578282 - RNA, 22 nt, Human
gguuuuauagcaguacuaucag

SEQ ID NO: 578283 - RNA, 22 nt, Human
guccugugccgaggugggaagc

SEQ ID NO: 578284 - RNA, 22 nt, Human
uucuguguggguagcuccuguu

SEQ ID NO: 578285 - RNA, 22 nt, Human
uuauugcaacuccuaaauagag

SEQ ID NO: 578286 - RNA, 22 nt, Human
gacccugccaugagugacaggg

SEQ ID NO: 578287 - RNA, 21 nt, Human
acccaggggaagcagaaacug

SEQ ID NO: 578288 - RNA, 22 nt, Human
uaggaaauauugauuucaguca

SEQ ID NO: 578289 - RNA, 22 nt, Human
aauaagaauugccagauuugaa

SEQ ID NO: 578290 - RNA, 22 nt, Human
acaugcauacaagcacauguag

SEQ ID NO: 578291 - RNA, 22 nt, Human
ggcagccaugcuccaggugcag

SEQ ID NO: 578292 - RNA, 22 nt, Human
aggggcucaaagugugcaggga

SEQ ID NO: 578293 - RNA, 22 nt, Human
uccugggaaguugcaucaccgu

SEQ ID NO: 578294 - RNA, 22 nt, Human
gcuggcuuccaucagaggguga

SEQ ID NO: 578295 - RNA, 22 nt, Human
guggaugcuuaggcagccuggg

SEQ ID NO: 578296 - RNA, 22 nt, Human
ccugggcagugcuggaguugaa

SEQ ID NO: 578297 - RNA, 21 nt, Human
gccuccagccagauggccucc

SEQ ID NO: 578298 - RNA, 22 nt, Human
ugaggcuuggaggcuccagugg

SEQ ID NO: 578299 - RNA, 22 nt, Human
aggcagaugguaacugugauau

SEQ ID NO: 578300 - RNA, 22 nt, Human
gaggccuggagccgccuaggcg

SEQ ID NO: 578301 - RNA, 22 nt, Human
uccugagaggugugaggugcag

SEQ ID NO: 578302 - RNA, 22 nt, Human
gucacacagggccuccaaauca

SEQ ID NO: 578303 - RNA, 22 nt, Human
uguaguaagugcgcaauaaaua

SEQ ID NO: 578304 - RNA, 22 nt, Human
gcccacacaccagcucaggagg

SEQ ID NO: 578305 - RNA, 22 nt, Human
gaggguuggugcaaaugggaug

SEQ ID NO: 578306 - RNA, 22 nt, Human
ggcaaggggucaggcugagaca

SEQ ID NO: 578307 - RNA, 22 nt, Human
gugcugggauuacaggugugag

SEQ ID NO: 578308 - RNA, 22 nt, Human
cccugaggcugaggauaggugg

SEQ ID NO: 578309 - RNA, 22 nt, Human
uaguggaacugugucauacaaa

SEQ ID NO: 578310 - RNA, 22 nt, Human
auacaugugccauguuggugua

SEQ ID NO: 578311 - RNA, 22 nt, Human
auacacuuuagaaaaacgcugc

SEQ ID NO: 578312 - RNA, 22 nt, Human
agcauuuaauccuacauagauc

SEQ ID NO: 578313 - RNA, 22 nt, Human
ucuuuggggcaucugggagauu

SEQ ID NO: 578314 - RNA, 22 nt, Human
cuugagggacucuaugacuuag

SEQ ID NO: 578315 - RNA, 22 nt, Human
ccagaggggcugagcaggucac

SEQ ID NO: 578316 - RNA, 21 nt, Human
ugggagagcguugcuguccuc

SEQ ID NO: 578317 - RNA, 19 nt, Human
uccugggcguugacuuugg

SEQ ID NO: 578318 - RNA, 22 nt, Human
auugaggagcagagauggggua

SEQ ID NO: 578319 - RNA, 22 nt, Human
ggguggucuggcaggcuggaaa

SEQ ID NO: 578320 - RNA, 22 nt, Human
gcacaugguaggcauuugaugu

SEQ ID NO: 578321 - RNA, 19 nt, Human
gugaggucuuuccuuuugu

SEQ ID NO: 578322 - RNA, 22 nt, Human
ucaguguuuauugcggugugua

SEQ ID NO: 578323 - RNA, 18 nt, Human
gagaggcccggcugugcc

SEQ ID NO: 578324 - RNA, 22 nt, Human
cggggugggaauagaccugucu

SEQ ID NO: 578325 - RNA, 22 nt, Human
ggaaggagccauaucauaucca

SEQ ID NO: 578326 - RNA, 22 nt, Human
ccuccagcugccucagucucuu

SEQ ID NO: 578327 - RNA, 19 nt, Human
ccacuggggcuccacauua

SEQ ID NO: 578328 - RNA, 22 nt, Human
uuuauugucuucguggugccua

SEQ ID NO: 578329 - RNA, 22 nt, Human
gucucugugccuucuccccacc

SEQ ID NO: 578330 - RNA, 22 nt, Human
aguguaaacuuaagagaauauc

SEQ ID NO: 578331 - RNA, 22 nt, Human
auaguuaugcucuagacaagaa

SEQ ID NO: 578332 - RNA, 17 nt, Human
agccaggcauaugaagu

SEQ ID NO: 578333 - RNA, 22 nt, Human
caguuccucaaagguuaaaugu

SEQ ID NO: 578334 - RNA, 18 nt, Human
ccuggaguguguuaggcu

SEQ ID NO: 578335 - RNA, 22 nt, Human
aggcugagaaagugggaagaug

SEQ ID NO: 578336 - RNA, 22 nt, Human
cacaugugugcugaggacugug

SEQ ID NO: 578337 - RNA, 22 nt, Human
agagcccugacggggacagaug

SEQ ID NO: 578338 - RNA, 22 nt, Human
agugucacaaaccugccuugua

SEQ ID NO: 578339 - RNA, 22 nt, Human
gcugcuugauuagguugacacu

SEQ ID NO: 578340 - RNA, 22 nt, Human
agauucauuaucuucuuuguac

SEQ ID NO: 578341 - RNA, 20 nt, Human
cagagccaagagcagcaucu

SEQ ID NO: 578342 - RNA, 22 nt, Human
aaaccacaguucagugcuuuug

SEQ ID NO: 578343 - RNA, 22 nt, Human
uagcccagagucccaauuccag

SEQ ID NO: 578344 - RNA, 22 nt, Human
aacaguuugagcuuugaauuuc

SEQ ID NO: 578345 - RNA, 22 nt, Human
gggcugagggguaucucauggg

SEQ ID NO: 578346 - RNA, 22 nt, Human
uuccagaaaucuuucagcucaa

SEQ ID NO: 578347 - RNA, 22 nt, Human
aggugggcaccaggcuuguggu

SEQ ID NO: 578348 - RNA, 22 nt, Human
gcacggcuaauuuuuguauuuu

SEQ ID NO: 578349 - RNA, 22 nt, Human
ggcugaugggcaugagcuguca

SEQ ID NO: 578350 - RNA, 22 nt, Human
caaauggcuggcauccuucuac

SEQ ID NO: 578351 - RNA, 22 nt, Human
uagcauuagucagauauguuuu

SEQ ID NO: 578352 - RNA, 22 nt, Human
aauacuuuugaacugaaaggca

SEQ ID NO: 578353 - RNA, 22 nt, Human
agcuuugaaugagugcauugca

SEQ ID NO: 578354 - RNA, 22 nt, Human
uggucgaccaguuggaaaguaa

SEQ ID NO: 578355 - RNA, 22 nt, Human
ugugacuugauguuugcaccag

SEQ ID NO: 578356 - RNA, 22 nt, Human
ugaaguuagaacuaugaggaua

SEQ ID NO: 578357 - RNA, 22 nt, Human
cuggaacaguguuggagcuuga

SEQ ID NO: 578358 - RNA, 22 nt, Human
acaugaaaccugagucuaacuc

SEQ ID NO: 578359 - RNA, 22 nt, Human
accugccuaucagcugccugcu

SEQ ID NO: 578360 - RNA, 22 nt, Human
aaagagcucacaguccacugga

SEQ ID NO: 578361 - RNA, 22 nt, Human
ccuccuucuggggccuucugcu

SEQ ID NO: 578362 - RNA, 22 nt, Human
cugggaggcagucucucuagaa

SEQ ID NO: 578363 - RNA, 22 nt, Human
auagucuuagucuauaguuuug

SEQ ID NO: 578364 - RNA, 22 nt, Human
uuccagugaaacaugaggugug

SEQ ID NO: 578365 - RNA, 23 nt, Human
uauuugcuacugguaauucugga

SEQ ID NO: 578366 - RNA, 22 nt, Human
ugacagaaugugacucucagau

SEQ ID NO: 578367 - RNA, 22 nt, Human
uuccuucuuccagaggcugccc

SEQ ID NO: 578368 - RNA, 22 nt, Human
aaggcugagguagggccuaaaa

SEQ ID NO: 578369 - RNA, 22 nt, Human
uuuuaugugugaaaugcugucu

SEQ ID NO: 578370 - RNA, 22 nt, Human
cuuucucuucgaaaaccugccc

SEQ ID NO: 578371 - RNA, 22 nt, Human
augcuaaauguuaauguuaccu

SEQ ID NO: 578372 - RNA, 22 nt, Human
auauuucucucagacauggaag

SEQ ID NO: 578373 - RNA, 22 nt, Human
aaagaauacccugggucauaaa

SEQ ID NO: 578374 - RNA, 22 nt, Human
cugugaguucauugugccaccu

SEQ ID NO: 578375 - RNA, 22 nt, Human
ggugaaggucagagcaggaaaa

SEQ ID NO: 578376 - RNA, 22 nt, Human
gagcucagauucuggugucaga

SEQ ID NO: 578377 - RNA, 20 nt, Human
acugagcugcauggagagga

SEQ ID NO: 578378 - RNA, 22 nt, Human
auguauugucucuuuuccuuaa

SEQ ID NO: 578379 - RNA, 22 nt, Human
ggccaggccaagaggguuggaa

SEQ ID NO: 578380 - RNA, 22 nt, Human
acuggggcagugggcagugguu

SEQ ID NO: 578381 - RNA, 22 nt, Human
aaggcagaaagggaugugagug

SEQ ID NO: 578382 - RNA, 22 nt, Human
ucccaggacccaggcauucaca

SEQ ID NO: 578383 - RNA, 22 nt, Human
ucugcagcuucuugccagagag

SEQ ID NO: 578384 - RNA, 22 nt, Human
cauuacaucuuugaugcaguau

SEQ ID NO: 578385 - RNA, 22 nt, Human
uauaaagagucuaucugguggc

SEQ ID NO: 578386 - RNA, 21 nt, Human
gagacagacuuucguccccug

SEQ ID NO: 578387 - RNA, 22 nt, Human
uuccaggacucguucuggcuca

SEQ ID NO: 578388 - RNA, 22 nt, Human
uagcuguguagacacucagagc

SEQ ID NO: 578389 - RNA, 22 nt, Human
uaaauugagauuauuaggguaa

SEQ ID NO: 578390 - RNA, 22 nt, Human
ugggagccauuuuagaggcugc

SEQ ID NO: 578391 - RNA, 22 nt, Human
ggccagcagucacagggucaga

SEQ ID NO: 578392 - RNA, 22 nt, Human
uaacauuccauggaucugcaga

SEQ ID NO: 578393 - RNA, 20 nt, Human
aaucacuuuguacaggaagc

SEQ ID NO: 578394 - RNA, 22 nt, Human
uccuuucuucuucugcccaugg

SEQ ID NO: 578395 - RNA, 22 nt, Human
aaaguuguucaguaagaaacuc

SEQ ID NO: 578396 - RNA, 22 nt, Human
ucccugggcacaaucugcuggc

SEQ ID NO: 578397 - RNA, 17 nt, Human
gaacaguguaagacacu

SEQ ID NO: 578398 - RNA, 22 nt, Human
ccucacagaggggcagccaucu

SEQ ID NO: 578399 - RNA, 21 nt, Human
ggaagcaguggcggcaacucc

SEQ ID NO: 578400 - RNA, 22 nt, Human
ccagaggaguugaggcuuuggg

SEQ ID NO: 578401 - RNA, 22 nt, Human
gcaaaaaccacaauuacuuuua

SEQ ID NO: 578402 - RNA, 22 nt, Human
aggagcugagucagcccgacag

SEQ ID NO: 578403 - RNA, 21 nt, Human
ugccaggccugagcugggguc

SEQ ID NO: 578404 - RNA, 22 nt, Human
uagugauuauaaaacaguuuuu

SEQ ID NO: 578405 - RNA, 22 nt, Human
agcugaggccugauuucgccgu

SEQ ID NO: 578406 - RNA, 22 nt, Human
uccacugcagcuucugauggaa

SEQ ID NO: 578407 - RNA, 22 nt, Human
uucuguuucuggggucucugac

SEQ ID NO: 578408 - RNA, 22 nt, Human
ucccaaaguauuagcauuucaa

SEQ ID NO: 578409 - RNA, 22 nt, Human
cuggagggcuucugcagguuac

SEQ ID NO: 578410 - RNA, 22 nt, Human
caguuaauguccuauacaauag

SEQ ID NO: 578411 - RNA, 22 nt, Human
ucaggcugguggucagauggcu

SEQ ID NO: 578412 - RNA, 22 nt, Human
cauaacuugguguuggaaacug

SEQ ID NO: 578413 - RNA, 22 nt, Human
acacaugcugauaagaauauaa

SEQ ID NO: 578414 - RNA, 22 nt, Human
ugugaguuauuuucaggaguuu

SEQ ID NO: 578415 - RNA, 22 nt, Human
uauccaauucaccauugauggg

SEQ ID NO: 578416 - RNA, 20 nt, Human
agggccuggaguacagcagg

SEQ ID NO: 578417 - RNA, 22 nt, Human
gcuuggaaguaggauugggaga

SEQ ID NO: 578418 - RNA, 22 nt, Human
caguguuuagcacagugcuugg

SEQ ID NO: 578419 - RNA, 22 nt, Human
ugagguaggagggugaucagca

SEQ ID NO: 578420 - RNA, 22 nt, Human
agcugccaccucugccuuuggg

SEQ ID NO: 578421 - RNA, 22 nt, Human
gaaccacaaugugaagaaggag

SEQ ID NO: 578422 - RNA, 22 nt, Human
ucguuaaaugcuaaaacugaca

SEQ ID NO: 578423 - RNA, 21 nt, Human
agcaggcaaaggugaagucuu

SEQ ID NO: 578424 - RNA, 22 nt, Human
augcugagugagugaaacccag

SEQ ID NO: 578425 - RNA, 22 nt, Human
ugggggcauggaccagccuggc

SEQ ID NO: 578426 - RNA, 22 nt, Human
cuggaagaguccuaaacagaua

SEQ ID NO: 578427 - RNA, 22 nt, Human
ccagcccugaacccugcugcau

SEQ ID NO: 578428 - RNA, 22 nt, Human
ucaguaaaaccugcuuuuagug

SEQ ID NO: 578429 - RNA, 22 nt, Human
uggcacagccacugaaucggga

SEQ ID NO: 578430 - RNA, 22 nt, Human
uacacaugcauguacuccagga

SEQ ID NO: 578431 - RNA, 22 nt, Human
aauaaguugccuguugaaucau

SEQ ID NO: 578432 - RNA, 22 nt, Human
acaugcuuguuuuucacaaccu

SEQ ID NO: 578433 - RNA, 22 nt, Human
agccagcuaagggaagcaugau

SEQ ID NO: 578434 - RNA, 22 nt, Human
cugggcuccacuacuugcuaac

SEQ ID NO: 578435 - RNA, 22 nt, Human
gcuuccuugggaaaauuagaug

SEQ ID NO: 578436 - RNA, 22 nt, Human
ccacccacaaccagcuggcugu

SEQ ID NO: 578437 - RNA, 22 nt, Human
ucucacaggugcacguggcugu

SEQ ID NO: 578438 - RNA, 22 nt, Human
ugagauggagucucacucuguu

SEQ ID NO: 578439 - RNA, 22 nt, Human
uugucuguaaagacggccacca

SEQ ID NO: 578440 - RNA, 22 nt, Human
ggcagugaaucugagagccugg

SEQ ID NO: 578441 - RNA, 22 nt, Human
auucuuuucccaacugcuuuaa

SEQ ID NO: 578442 - RNA, 22 nt, Human
uucuuugaguuaguacagucca

SEQ ID NO: 578443 - RNA, 22 nt, Human
augcauauuuucuguuggugac

SEQ ID NO: 578444 - RNA, 22 nt, Human
uucugaaaacacacuuugcagc

SEQ ID NO: 578445 - RNA, 22 nt, Human
cucucuggcacuucauugcugu

SEQ ID NO: 578446 - RNA, 22 nt, Human
augcagauaagaaucagguuug

SEQ ID NO: 578447 - RNA, 22 nt, Human
cugggagauugaggccauggug

SEQ ID NO: 578448 - RNA, 22 nt, Human
uuguaacagcuguuuauauagu

SEQ ID NO: 578449 - RNA, 23 nt, Human
uccugaggaauggcaucucacau

SEQ ID NO: 578450 - RNA, 20 nt, Human
ugagagcugggcagggauac

SEQ ID NO: 578451 - RNA, 22 nt, Human
aauguaaaguugggcacaaaug

SEQ ID NO: 578452 - RNA, 20 nt, Human
auguuuuauaaaagaacggg

SEQ ID NO: 578453 - RNA, 22 nt, Human
ucagaagcuaaauuugauauuu

SEQ ID NO: 578454 - RNA, 22 nt, Human
gcaggguccauggaggcagccc

SEQ ID NO: 578455 - RNA, 23 nt, Human
acaaugucuguucauaaaauacc

SEQ ID NO: 578456 - RNA, 22 nt, Human
aggugcugugcuaugcacuugu

SEQ ID NO: 578457 - RNA, 22 nt, Human
ugaggcagccugcauuaaagag

SEQ ID NO: 578458 - RNA, 22 nt, Human
uucuuguucugguucuguuagc

SEQ ID NO: 578459 - RNA, 22 nt, Human
gcucagggaacuuuuugcaggc

SEQ ID NO: 578460 - RNA, 22 nt, Human
uccaaaggcaaaacuguggugu

SEQ ID NO: 578461 - RNA, 22 nt, Human
gggcagcacagacagugaaggc

SEQ ID NO: 578462 - RNA, 22 nt, Human
cuuuaugaaaaccagauugggg

SEQ ID NO: 578463 - RNA, 22 nt, Human
gaauuuuaucuuauuacuugca

SEQ ID NO: 578464 - RNA, 22 nt, Human
uacaaagugggaaacgaagguu

SEQ ID NO: 578465 - RNA, 22 nt, Human
ggaggccuugaggccaggagcu

SEQ ID NO: 578466 - RNA, 22 nt, Human
ccuugccucauugugcuucucc

SEQ ID NO: 578467 - RNA, 21 nt, Human
ugagggguuauaacagggugg

SEQ ID NO: 578468 - RNA, 22 nt, Human
agcaguggcugaagauguuccu

SEQ ID NO: 578469 - RNA, 22 nt, Human
gcuuucugugcagugaacacua

SEQ ID NO: 578470 - RNA, 21 nt, Human
gacaggacuagaccagagcuc

SEQ ID NO: 578471 - RNA, 20 nt, Human
ccagguggugccuggagagg

SEQ ID NO: 578472 - RNA, 22 nt, Human
auucugcugguaacucuauaaa

SEQ ID NO: 578473 - RNA, 22 nt, Human
uuugggcaauucagugggaccu

SEQ ID NO: 578474 - RNA, 22 nt, Human
agcagguguaucggucaccuac

SEQ ID NO: 578475 - RNA, 22 nt, Human
acuuuacuccccaacauaaaug

SEQ ID NO: 578476 - RNA, 22 nt, Human
gagcuuggugcacagugguuaa

SEQ ID NO: 578477 - RNA, 22 nt, Human
acugcccagaagagaugaaagu

SEQ ID NO: 578478 - RNA, 22 nt, Human
agcaggcuaagggaccuguuua

SEQ ID NO: 578479 - RNA, 22 nt, Human
agugggagccagcagcuugggg

SEQ ID NO: 578480 - RNA, 22 nt, Human
agggcuccaggggcugggugac

SEQ ID NO: 578481 - RNA, 22 nt, Human
guuauuguuuauccugcacccc

SEQ ID NO: 578482 - RNA, 16 nt, Human
gagggcagaggcggaa

SEQ ID NO: 578483 - RNA, 22 nt, Human
gagcuuuguuccgugguggcac

SEQ ID NO: 578484 - RNA, 22 nt, Human
aagggcugaucucacuuucuuu

SEQ ID NO: 578485 - RNA, 22 nt, Human
uaugcaaacaguucaggugaca

SEQ ID NO: 578486 - RNA, 22 nt, Human
uacuuugaccaccaucugauua

SEQ ID NO: 578487 - RNA, 22 nt, Human
uggcaaaggaaaugauuuaaga

SEQ ID NO: 578488 - RNA, 22 nt, Human
gacuggagugccuccaggaaag

SEQ ID NO: 578489 - RNA, 20 nt, Human
aaauuuaggaaauuuuacgc

SEQ ID NO: 578490 - RNA, 22 nt, Human
uaggggugggauccaggaauua

SEQ ID NO: 578491 - RNA, 22 nt, Human
cagcucagcuuccugggugugu

SEQ ID NO: 578492 - RNA, 22 nt, Human
cacaagauggucacauaagugc

SEQ ID NO: 578493 - RNA, 22 nt, Human
gcuugccuggcauuucuggggc

SEQ ID NO: 578494 - RNA, 18 nt, Human
acagggagggcgcugggg

SEQ ID NO: 578495 - RNA, 22 nt, Human
uguuuuguagcuaauagcuauu

SEQ ID NO: 578496 - RNA, 22 nt, Human
cucuccagggguagaugccuuc

SEQ ID NO: 578497 - RNA, 22 nt, Human
gcuuggcagggccugcuggagc

SEQ ID NO: 578498 - RNA, 22 nt, Human
cucaugucaggggugucaaugu

SEQ ID NO: 578499 - RNA, 22 nt, Human
cauacaguguggcauguagucu

SEQ ID NO: 578500 - RNA, 22 nt, Human
uccagggcauggggagagagug

SEQ ID NO: 578501 - RNA, 22 nt, Human
uaggcugagguugaugccaggg

SEQ ID NO: 578502 - RNA, 22 nt, Human
gagguagggcagaggcugaaug

SEQ ID NO: 578503 - RNA, 22 nt, Human
gcuggaguuagaacuagccugg

SEQ ID NO: 578504 - RNA, 22 nt, Human
uuccuucugaagccuuuguguu

SEQ ID NO: 578505 - RNA, 22 nt, Human
augggcugggaauacacagggg

SEQ ID NO: 578506 - RNA, 22 nt, Human
ggcuccaggaaccuccucuccu

SEQ ID NO: 578507 - RNA, 21 nt, Human
gccugccccauguuucuguug

SEQ ID NO: 578508 - RNA, 18 nt, Human
uggcagggaggaaauaua

SEQ ID NO: 578509 - RNA, 22 nt, Human
uaauuuuacuuccugagcaccu

SEQ ID NO: 578510 - RNA, 22 nt, Human
ccaggagcagggcuggcugcac

SEQ ID NO: 578511 - RNA, 22 nt, Human
uuucuccugaguuccacgcuac

SEQ ID NO: 578512 - RNA, 22 nt, Human
gagcucccuggagguucagaua

SEQ ID NO: 578513 - RNA, 22 nt, Human
acucagcuaaacucagucuaug

SEQ ID NO: 578514 - RNA, 22 nt, Human
aggggcagccucacaauccucu

SEQ ID NO: 578515 - RNA, 22 nt, Human
aggagaaggaggccccucacac

SEQ ID NO: 578516 - RNA, 22 nt, Human
cuugccuuugucuucaaaggcu

SEQ ID NO: 578517 - RNA, 22 nt, Human
ucuagaaacaugacauugaucu

SEQ ID NO: 578518 - RNA, 22 nt, Human
ccuagucuuccgcguccccacc

SEQ ID NO: 578519 - RNA, 23 nt, Human
aggugcccagggcagguuuacug

SEQ ID NO: 578520 - RNA, 23 nt, Human
aggauggguggcaauagaaagac

SEQ ID NO: 578521 - RNA, 22 nt, Human
auggacagugugaagcagauag

SEQ ID NO: 578522 - RNA, 22 nt, Human
acccagcucuuugauggucuug

SEQ ID NO: 578523 - RNA, 22 nt, Human
ggaugaggaagauuacugagaa

SEQ ID NO: 578524 - RNA, 22 nt, Human
ucacaguaguuguucucuguuu

SEQ ID NO: 578525 - RNA, 22 nt, Human
aucugcaggaaugugugcagag

SEQ ID NO: 578526 - RNA, 22 nt, Human
cagccaccauacagcagaagcu

SEQ ID NO: 578527 - RNA, 22 nt, Human
cugggaaauggcuucgagcuca

SEQ ID NO: 578528 - RNA, 22 nt, Human
uuagcaaacccuugcuggugag

SEQ ID NO: 578529 - RNA, 22 nt, Human
ugugcucuggaguugccuucac

SEQ ID NO: 578530 - RNA, 22 nt, Human
ucagccaggcagcccccugguc

SEQ ID NO: 578531 - RNA, 22 nt, Human
cuggagaggcugggaacagguu

SEQ ID NO: 578532 - RNA, 22 nt, Human
uccugcagcugcagaccugggg

SEQ ID NO: 578533 - RNA, 22 nt, Human
ccaggagcaggagcuggacaga

SEQ ID NO: 578534 - RNA, 22 nt, Human
ucagucuuucgaauucagccag

SEQ ID NO: 578535 - RNA, 22 nt, Human
ucugucugagggagugacauuu

SEQ ID NO: 578536 - RNA, 22 nt, Human
cagcugccccgcuggcugacca

SEQ ID NO: 578537 - RNA, 22 nt, Human
ggcuuggcagaggugggugcuu

SEQ ID NO: 578538 - RNA, 22 nt, Human
uuagauaacaguagaauaucaa

SEQ ID NO: 578539 - RNA, 22 nt, Human
augagguagcuguggcuggcug

SEQ ID NO: 578540 - RNA, 22 nt, Human
ucucugccaccaugagaugggc

SEQ ID NO: 578541 - RNA, 22 nt, Human
cagcugagaaauggggaaaggg

SEQ ID NO: 578542 - RNA, 22 nt, Human
aauaucagcucugucacuuacu

SEQ ID NO: 578543 - RNA, 22 nt, Human
aggcugaggcagguggaucacc

SEQ ID NO: 578544 - RNA, 22 nt, Human
ucacauugccgucugugcacuu

SEQ ID NO: 578545 - RNA, 22 nt, Human
uagcuacacaucuaaacagcaa

SEQ ID NO: 578546 - RNA, 22 nt, Human
gcugcccugucugcagcaggac

SEQ ID NO: 578547 - RNA, 22 nt, Human
uacauucuacuuuuucacuccc

SEQ ID NO: 578548 - RNA, 22 nt, Human
gugcaaaaauaauugugguuuu

SEQ ID NO: 578549 - RNA, 22 nt, Human
uuguuucuccuggugccugaua

SEQ ID NO: 578550 - RNA, 22 nt, Human
accagcuccaggccccugcugg

SEQ ID NO: 578551 - RNA, 22 nt, Human
ugcaccaguuucucagagaauc

SEQ ID NO: 578552 - RNA, 22 nt, Human
uucaaagauaauguagcauuuu

SEQ ID NO: 578553 - RNA, 22 nt, Human
uaacacugugguguucuuuguc

SEQ ID NO: 578554 - RNA, 22 nt, Human
auccuuaauuuacuugcaucuu

SEQ ID NO: 578555 - RNA, 22 nt, Human
uggauuuaacagaauaccaggu

SEQ ID NO: 578556 - RNA, 22 nt, Human
gaggagacauauuuuugaagca

SEQ ID NO: 578557 - RNA, 22 nt, Human
ccuguacacggucuaugccucc

SEQ ID NO: 578558 - RNA, 22 nt, Human
aacauucaccucuaccuccuuc

SEQ ID NO: 578559 - RNA, 22 nt, Human
ucccugggccacagcugugagc

SEQ ID NO: 578560 - RNA, 22 nt, Human
aaaguuuuauucaagcauuagu

SEQ ID NO: 578561 - RNA, 22 nt, Human
gcugcaggggggucuggacuug

SEQ ID NO: 578562 - RNA, 22 nt, Human
ugaaggcugggcucagccagcu

SEQ ID NO: 578563 - RNA, 22 nt, Human
uuacuugaaaaccaccaguauu

SEQ ID NO: 578564 - RNA, 22 nt, Human
uuaaaaugcagauucugauuca

SEQ ID NO: 578565 - RNA, 22 nt, Human
uuucauugagacuauagacauc

SEQ ID NO: 578566 - RNA, 22 nt, Human
gcauccagucuuggcuccugga

SEQ ID NO: 578567 - RNA, 22 nt, Human
agggcacaagacucugagcccc

SEQ ID NO: 578568 - RNA, 22 nt, Human
agaggcuaggaccauguaucau

SEQ ID NO: 578569 - RNA, 20 nt, Human
ggcaccaggcuaggauugga

SEQ ID NO: 578570 - RNA, 22 nt, Human
aaggugggcagaucacaagguc

SEQ ID NO: 578571 - RNA, 22 nt, Human
ugacaggugauugugaacuaag

SEQ ID NO: 578572 - RNA, 22 nt, Human
cuguugcagaggggcggagagg

SEQ ID NO: 578573 - RNA, 22 nt, Human
cacccaggcuggagugcauugg

SEQ ID NO: 578574 - RNA, 22 nt, Human
auuauggguauaacacaguuau

SEQ ID NO: 578575 - RNA, 18 nt, Human
uggcagcaggaagccauu

SEQ ID NO: 578576 - RNA, 22 nt, Human
gcuguuuccauuuaagugaauc

SEQ ID NO: 578577 - RNA, 22 nt, Human
auaguuuaccuuccagauggcu

SEQ ID NO: 578578 - RNA, 22 nt, Human
aguggcugauguaggcaguggg

SEQ ID NO: 578579 - RNA, 22 nt, Human
gugugucagagcucagagaagu

SEQ ID NO: 578580 - RNA, 22 nt, Human
caagcagacaguaggccuagaa

SEQ ID NO: 578581 - RNA, 22 nt, Human
cucuuuccucagccacagucua

SEQ ID NO: 578582 - RNA, 22 nt, Human
caaaugaagguggugggucauu

SEQ ID NO: 578583 - RNA, 22 nt, Human
aggaguuuauccgagggcauaa

SEQ ID NO: 578584 - RNA, 22 nt, Human
acauuugacauuuaguaucagc

SEQ ID NO: 578585 - RNA, 22 nt, Human
aauaauaguugcaaaguguuua

SEQ ID NO: 578586 - RNA, 22 nt, Human
gggugggccacugagcagcgug

SEQ ID NO: 578587 - RNA, 22 nt, Human
uagcugaagggcauuuaauaaa

SEQ ID NO: 578588 - RNA, 22 nt, Human
aggagcaaggaagcuacaguuu

SEQ ID NO: 578589 - RNA, 22 nt, Human
ucucagaauaaauuccuaacuu

SEQ ID NO: 578590 - RNA, 22 nt, Human
gcugccugucccaggaugagga

SEQ ID NO: 578591 - RNA, 22 nt, Human
gcuucagccucacacugauauc

SEQ ID NO: 578592 - RNA, 22 nt, Human
ccugagagagaagcgaccuggu

SEQ ID NO: 578593 - RNA, 22 nt, Human
gcugggcaacggaagagagaaa

SEQ ID NO: 578594 - RNA, 22 nt, Human
aaggugucacugggacaggaaa

SEQ ID NO: 578595 - RNA, 22 nt, Human
gcugaggcaguccacccuugug

SEQ ID NO: 578596 - RNA, 22 nt, Human
ccucugggggcuuccuuacccu

SEQ ID NO: 578597 - RNA, 22 nt, Human
gacauguuaucucuggcuucaa

SEQ ID NO: 578598 - RNA, 22 nt, Human
aaagccaguuucuggaaguacc

SEQ ID NO: 578599 - RNA, 22 nt, Human
ugcagcuccucuggcugccuga

SEQ ID NO: 578600 - RNA, 22 nt, Human
uucucuguaguugccuggugga

SEQ ID NO: 578601 - RNA, 22 nt, Human
ugaggcagugugagauaauaaa

SEQ ID NO: 578602 - RNA, 22 nt, Human
cucagcacacucccaucuaauu

SEQ ID NO: 578603 - RNA, 22 nt, Human
cuuugugcguagugagugguca

SEQ ID NO: 578604 - RNA, 21 nt, Human
ugaaugaugccccagaguugu

SEQ ID NO: 578605 - RNA, 22 nt, Human
ggcaccagccaccuauuucuag

SEQ ID NO: 578606 - RNA, 22 nt, Human
aagacacucauuaucacugguu

SEQ ID NO: 578607 - RNA, 22 nt, Human
agcagaaccugcagaccugucu

SEQ ID NO: 578608 - RNA, 18 nt, Human
uggagcugagugcugugc

SEQ ID NO: 578609 - RNA, 19 nt, Human
gcuccugggccucacucau

SEQ ID NO: 578610 - RNA, 22 nt, Human
ucucugagccccugccucuuuc

SEQ ID NO: 578611 - RNA, 17 nt, Human
gccuuccuuccuccaca

SEQ ID NO: 578612 - RNA, 22 nt, Human
agagcugggugguggugacuca

SEQ ID NO: 578613 - RNA, 22 nt, Human
caugcaaaugugcuaaucugaa

SEQ ID NO: 578614 - RNA, 22 nt, Human
auuugcuuuuacuauguuaaaa

SEQ ID NO: 578615 - RNA, 22 nt, Human
ucuguccagagguccuggagac

SEQ ID NO: 578616 - RNA, 20 nt, Human
agcaggaaaagugccagucu

SEQ ID NO: 578617 - RNA, 22 nt, Human
uggcucagcauucacuggucuu

SEQ ID NO: 578618 - RNA, 22 nt, Human
gugugcauguggaagcauguau

SEQ ID NO: 578619 - RNA, 22 nt, Human
cacaucuacugauauuccagga

SEQ ID NO: 578620 - RNA, 22 nt, Human
cugaacuuauugagugcuugcu

SEQ ID NO: 578621 - RNA, 22 nt, Human
gaccuucaagcaccauauuuau

SEQ ID NO: 578622 - RNA, 22 nt, Human
agucugcacucagguggagguc

SEQ ID NO: 578623 - RNA, 22 nt, Human
acccaggaugauaauguucaca

SEQ ID NO: 578624 - RNA, 23 nt, Human
augcagagaauaacaaaugccau

SEQ ID NO: 578625 - RNA, 22 nt, Human
gggagaguagcuggaagguucu

SEQ ID NO: 578626 - RNA, 22 nt, Human
caaaucauggaauaacuagaga

SEQ ID NO: 578627 - RNA, 22 nt, Human
ucucaaauauuuggagagagga

SEQ ID NO: 578628 - RNA, 22 nt, Human
acaaugucucauauucguguuc

SEQ ID NO: 578629 - RNA, 22 nt, Human
uugcaguuguuuagaauaugug

SEQ ID NO: 578630 - RNA, 22 nt, Human
gcagcaagagguuucuguugac

SEQ ID NO: 578631 - RNA, 22 nt, Human
uucaguucacauguaucauggc

SEQ ID NO: 578632 - RNA, 20 nt, Human
gggguuggcuggcacaggga

SEQ ID NO: 578633 - RNA, 22 nt, Human
ugcuggaggauuaaacaaguca

SEQ ID NO: 578634 - RNA, 22 nt, Human
auuuggaacaaauauuaguaaa

SEQ ID NO: 578635 - RNA, 22 nt, Human
cuuugcuucuccaaccugcuca

SEQ ID NO: 578636 - RNA, 22 nt, Human
ccuggcuggauggagccccugg

SEQ ID NO: 578637 - RNA, 22 nt, Human
ucucuggcagaggcccuauccc

SEQ ID NO: 578638 - RNA, 22 nt, Human
ugcuccugaacacagcccuaug

SEQ ID NO: 578639 - RNA, 22 nt, Human
uaugugcaaauuaauugcuaga

SEQ ID NO: 578640 - RNA, 22 nt, Human
uuguauuaauugaaaugaaugc

SEQ ID NO: 578641 - RNA, 23 nt, Human
uaaauugaugguauggguuaagc

SEQ ID NO: 578642 - RNA, 22 nt, Human
uauuaugaucgugacucaagga

SEQ ID NO: 578643 - RNA, 23 nt, Human
acugccugugccgaucucucuca

SEQ ID NO: 578644 - RNA, 17 nt, Human
cagacagauauccuggg

SEQ ID NO: 578645 - RNA, 22 nt, Human
cugcuuuagagcugagccucag

SEQ ID NO: 578646 - RNA, 22 nt, Human
cugcugacuuacacuguuuauu

SEQ ID NO: 578647 - RNA, 23 nt, Human
ugcagagugucacuugaaaacca

SEQ ID NO: 578648 - RNA, 22 nt, Human
ucacauuuuaguaccaugauuu

SEQ ID NO: 578649 - RNA, 22 nt, Human
ccaggcagucaggguugugugu

SEQ ID NO: 578650 - RNA, 17 nt, Human
ugcugccaagucccaac

SEQ ID NO: 578651 - RNA, 18 nt, Human
acaggugauaucuugaga

SEQ ID NO: 578652 - RNA, 22 nt, Human
agguacagaugaaagucuaguu

SEQ ID NO: 578653 - RNA, 22 nt, Human
uguggccaccagagcugcuauu

SEQ ID NO: 578654 - RNA, 22 nt, Human
acagcccgugucaucagcugcu

SEQ ID NO: 578655 - RNA, 22 nt, Human
gccaggcagccacccucugcga

SEQ ID NO: 578656 - RNA, 22 nt, Human
aaaugucuuucaauagagaaau

SEQ ID NO: 578657 - RNA, 21 nt, Human
cacuggaauuuucugugacau

SEQ ID NO: 578658 - RNA, 22 nt, Human
uacuccugcugauccugccagc

SEQ ID NO: 578659 - RNA, 22 nt, Human
ucagugcuugccucuggaggag

SEQ ID NO: 578660 - RNA, 22 nt, Human
ggccucucaugcccagagccaa

SEQ ID NO: 578661 - RNA, 22 nt, Human
uucagagggacauucaagggaa

SEQ ID NO: 578662 - RNA, 22 nt, Human
cucaggcccacagcagacccac

SEQ ID NO: 578663 - RNA, 22 nt, Human
acacagcugugcaguuuuuuca

SEQ ID NO: 578664 - RNA, 22 nt, Human
agaugcuggauggaaaaugauc

SEQ ID NO: 578665 - RNA, 22 nt, Human
ucacuuuaccaaaguacaggag

SEQ ID NO: 578666 - RNA, 22 nt, Human
aaguacauguuguucaaaagcc

SEQ ID NO: 578667 - RNA, 22 nt, Human
ugaauaaaucaaagacugcccu

SEQ ID NO: 578668 - RNA, 22 nt, Human
cuuguuuuaaacuguuguggcu

SEQ ID NO: 578669 - RNA, 22 nt, Human
gaaguucaacugccaugcuugg

SEQ ID NO: 578670 - RNA, 22 nt, Human
cugcaggggcaguccacuuccu

SEQ ID NO: 578671 - RNA, 22 nt, Human
gcugccugauuuacauagugaa

SEQ ID NO: 578672 - RNA, 22 nt, Human
acuguccugaauacugcaugac

SEQ ID NO: 578673 - RNA, 22 nt, Human
ggagaagcagcuucuugaugaa

SEQ ID NO: 578674 - RNA, 22 nt, Human
gucccagaugucuggaacuccc

SEQ ID NO: 578675 - RNA, 22 nt, Human
uccagggaguuggcuggauagu

SEQ ID NO: 578676 - RNA, 21 nt, Human
cuucagcaaauacuuggcagg

SEQ ID NO: 578677 - RNA, 22 nt, Human
aguguggagccacugaguggcu

SEQ ID NO: 578678 - RNA, 22 nt, Human
agcuggggcugcagagaacagg

SEQ ID NO: 578679 - RNA, 22 nt, Human
caaauagacuucaaucucuuga

SEQ ID NO: 578680 - RNA, 22 nt, Human
uuaugcaaagaaauagacuaau

SEQ ID NO: 578681 - RNA, 22 nt, Human
auguuuguugaacaucuacugc

SEQ ID NO: 578682 - RNA, 22 nt, Human
cuucagccucaucucagcccgu

SEQ ID NO: 578683 - RNA, 22 nt, Human
uugugaauagugccgcuauaaa

SEQ ID NO: 578684 - RNA, 22 nt, Human
ggcgagggaaguuuacugugag

SEQ ID NO: 578685 - RNA, 22 nt, Human
guuucuuagacagacauuaucu

SEQ ID NO: 578686 - RNA, 21 nt, Human
uauuuaguuuuacaaaugugg

SEQ ID NO: 578687 - RNA, 22 nt, Human
gaggaggguuggccuuagguag

SEQ ID NO: 578688 - RNA, 22 nt, Human
aagacuagaccagugaauagga

SEQ ID NO: 578689 - RNA, 22 nt, Human
acagaaguggcuucaaagagca

SEQ ID NO: 578690 - RNA, 22 nt, Human
cuugaucuacauagugaaaccc

SEQ ID NO: 578691 - RNA, 22 nt, Human
uaagacaauucuucagucacaa

SEQ ID NO: 578692 - RNA, 22 nt, Human
gaugaaauccagaucacaggug

SEQ ID NO: 578693 - RNA, 22 nt, Human
uggccugggccugccggugcaa

SEQ ID NO: 578694 - RNA, 22 nt, Human
aauauaaauuccugggcccagc

SEQ ID NO: 578695 - RNA, 22 nt, Human
ggagcuguugcgcaugcgcucg

SEQ ID NO: 578696 - RNA, 22 nt, Human
caggcucccugccagggccggc

SEQ ID NO: 578697 - RNA, 22 nt, Human
cugccuguauugucugcuuggg

SEQ ID NO: 578698 - RNA, 22 nt, Human
aagaguaaaugucuaauuagga

SEQ ID NO: 578699 - RNA, 22 nt, Human
gccuggcccagggcuccgcagg

SEQ ID NO: 578700 - RNA, 17 nt, Human
ggcaccagacggagagu

SEQ ID NO: 578701 - RNA, 22 nt, Human
cauguauaguuggaacuacauc

SEQ ID NO: 578702 - RNA, 18 nt, Human
agaagccacgaggagucc

SEQ ID NO: 578703 - RNA, 21 nt, Human
cccucaggaaacagaaugcac

SEQ ID NO: 578704 - RNA, 22 nt, Human
agaaguuaccacauacuucucu

SEQ ID NO: 578705 - RNA, 22 nt, Human
auucagugggugcucagcacaa

SEQ ID NO: 578706 - RNA, 22 nt, Human
agggucuugaggaucugaacug

SEQ ID NO: 578707 - RNA, 22 nt, Human
aaaugacaauaaaaguccaugc

SEQ ID NO: 578708 - RNA, 22 nt, Human
cagggugggcacccagccucca

SEQ ID NO: 578709 - RNA, 22 nt, Human
acagggcuccuugggcugacac

SEQ ID NO: 578710 - RNA, 22 nt, Human
uggaagaaggcagagaggcauu

SEQ ID NO: 578711 - RNA, 22 nt, Human
uagaaagaacuucauguaaaac

SEQ ID NO: 578712 - RNA, 22 nt, Human
cugucuguuuuaccuucuccag

SEQ ID NO: 578713 - RNA, 22 nt, Human
uucuccagucacugacuucgag

SEQ ID NO: 578714 - RNA, 22 nt, Human
caggagcucuuaaggaugugau

SEQ ID NO: 578715 - RNA, 20 nt, Human
aauuagcuuaagucaaucag

SEQ ID NO: 578716 - RNA, 15 nt, Human
aggcacugugggacc

SEQ ID NO: 578717 - RNA, 22 nt, Human
aaauucacuugccugcuuagcu

SEQ ID NO: 578718 - RNA, 22 nt, Human
ugcuggaggcaguggaggugcc

SEQ ID NO: 578719 - RNA, 20 nt, Human
gauaaauugucucuuaagug

SEQ ID NO: 578720 - RNA, 22 nt, Human
agacagcaugauacaugaugcu

SEQ ID NO: 578721 - RNA, 22 nt, Human
agaauaaaugcuaccuaucaca

SEQ ID NO: 578722 - RNA, 22 nt, Human
uccucuccaugucucacgccac

SEQ ID NO: 578723 - RNA, 22 nt, Human
augaggcaaggcuggccguguu

SEQ ID NO: 578724 - RNA, 22 nt, Human
ugcuucugcaacuugaauguac

SEQ ID NO: 578725 - RNA, 22 nt, Human
uguagcucuccagccagcaagg

SEQ ID NO: 578726 - RNA, 22 nt, Human
ucagaaugaaauuucuuucaga

SEQ ID NO: 578727 - RNA, 22 nt, Human
uaugagaaaggagaaugacuuu

SEQ ID NO: 578728 - RNA, 22 nt, Human
gagaggcuuaagggcugugaag

SEQ ID NO: 578729 - RNA, 22 nt, Human
ggccucgcggcuucugguggcu

SEQ ID NO: 578730 - RNA, 22 nt, Human
ucuccucuacugggucugcaga

SEQ ID NO: 578731 - RNA, 22 nt, Human
cucagccagacaugacccaguc

SEQ ID NO: 578732 - RNA, 22 nt, Human
gcacacaguagggauucaauga

SEQ ID NO: 578733 - RNA, 22 nt, Human
uucucaguaguuagcauuugug

SEQ ID NO: 578734 - RNA, 22 nt, Human
gcugccucuguagcuuuggacc

SEQ ID NO: 578735 - RNA, 22 nt, Human
ggcuccugcaccugucccucug

SEQ ID NO: 578736 - RNA, 22 nt, Human
agcuccugugugcccaccugcu

SEQ ID NO: 578737 - RNA, 22 nt, Human
cucuucuugucucugguuagaa

SEQ ID NO: 578738 - RNA, 22 nt, Human
uguguucuggcugugacagcug

SEQ ID NO: 578739 - RNA, 22 nt, Human
uugggguacgcaggucugggag

SEQ ID NO: 578740 - RNA, 22 nt, Human
auuacagaaagcaauauugagu

SEQ ID NO: 578741 - RNA, 22 nt, Human
agcugcccccagggcugugcuu

SEQ ID NO: 578742 - RNA, 22 nt, Human
cugagagacuguuuguaauauu

SEQ ID NO: 578743 - RNA, 22 nt, Human
ccaguguuauuuuagaguguga

SEQ ID NO: 578744 - RNA, 22 nt, Human
ggcucugaauuauuccugaguc

SEQ ID NO: 578745 - RNA, 22 nt, Human
aaggacaggagaaaacgggauc

SEQ ID NO: 578746 - RNA, 22 nt, Human
uggaauguguucuauuuuacag

SEQ ID NO: 578747 - RNA, 22 nt, Human
uagggaggaggguuuucaaauc

SEQ ID NO: 578748 - RNA, 22 nt, Human
auacauacauguacacauaaau

SEQ ID NO: 578749 - RNA, 22 nt, Human
acuugccauaaaugaaaauacu

SEQ ID NO: 578750 - RNA, 22 nt, Human
ucaauaauggcaggauaaauuu

SEQ ID NO: 578751 - RNA, 22 nt, Human
cucccucacacccuugcccaga

SEQ ID NO: 578752 - RNA, 22 nt, Human
caaggaggaagaugcaggggac

SEQ ID NO: 578753 - RNA, 21 nt, Human
ucaggcaggcgcagagggaag

SEQ ID NO: 578754 - RNA, 22 nt, Human
gcucccaccuccagccugaguu

SEQ ID NO: 578755 - RNA, 22 nt, Human
augacauugaauauguuaacua

SEQ ID NO: 578756 - RNA, 22 nt, Human
ucacaguaucagguggagugga

SEQ ID NO: 578757 - RNA, 22 nt, Human
caguccagagcccaccagagga

SEQ ID NO: 578758 - RNA, 22 nt, Human
aggaggguacaauggguggaaa

SEQ ID NO: 578759 - RNA, 22 nt, Human
ucuggaguguguguauucagcu

SEQ ID NO: 578760 - RNA, 22 nt, Human
cuuccucuagccuaguaaugcc

SEQ ID NO: 578761 - RNA, 22 nt, Human
ucacccagaaaagacagcagau

SEQ ID NO: 578762 - RNA, 22 nt, Human
auucuacaccucucucauuuag

SEQ ID NO: 578763 - RNA, 22 nt, Human
cccaggaagggaugccaaggaa

SEQ ID NO: 578764 - RNA, 22 nt, Human
uagagcaguuggcagcuguauu

SEQ ID NO: 578765 - RNA, 22 nt, Human
aggcucugggcucuagauuuug

SEQ ID NO: 578766 - RNA, 22 nt, Human
gcagggcagcucacugugguuc

SEQ ID NO: 578767 - RNA, 20 nt, Human
uuagcuuuggcaauagugac

SEQ ID NO: 578768 - RNA, 22 nt, Human
uugcauaaagauuuuauugcau

SEQ ID NO: 578769 - RNA, 22 nt, Human
uuaaagagggaaagacuucaga

SEQ ID NO: 578770 - RNA, 22 nt, Human
gaacuaaaugaaauuacuggug

SEQ ID NO: 578771 - RNA, 21 nt, Human
agcugcccagaguagggaagg

SEQ ID NO: 578772 - RNA, 21 nt, Human
ugaggcaggggugcuuuuguc

SEQ ID NO: 578773 - RNA, 22 nt, Human
aaugaacccuucaagcucugau

SEQ ID NO: 578774 - RNA, 22 nt, Human
gagguacaugaggauacacagg

SEQ ID NO: 578775 - RNA, 17 nt, Human
gcccugccugcugcccu

SEQ ID NO: 578776 - RNA, 22 nt, Human
cacacagaaccgcucgccacuu

SEQ ID NO: 578777 - RNA, 22 nt, Human
cucccagguugauucuuucccu

SEQ ID NO: 578778 - RNA, 22 nt, Human
acaauucucucauaucuuauua

SEQ ID NO: 578779 - RNA, 19 nt, Human
cuccagaauacauguuccu

SEQ ID NO: 578780 - RNA, 22 nt, Human
uccaggcucccucaggaugcac

SEQ ID NO: 578781 - RNA, 22 nt, Human
ccucuucucaacuccagccaga

SEQ ID NO: 578782 - RNA, 22 nt, Human
agcuuaaaguauuuaaauuuca

SEQ ID NO: 578783 - RNA, 22 nt, Human
ccugacucuggccaggccagcu

SEQ ID NO: 578784 - RNA, 22 nt, Human
augggauaacaagaaggcugag

SEQ ID NO: 578785 - RNA, 22 nt, Human
cuuaaacugaaagcuacaagau

SEQ ID NO: 578786 - RNA, 22 nt, Human
ucaguaaaguucuuucuugcug

SEQ ID NO: 578787 - RNA, 22 nt, Human
aggccaggggugagcacuucug

SEQ ID NO: 578788 - RNA, 22 nt, Human
gacugaggugaccuaggacuac

SEQ ID NO: 578789 - RNA, 22 nt, Human
ccaguaaauuacuugaugucau

SEQ ID NO: 578790 - RNA, 22 nt, Human
uauguacaucuugagcaaugaa

SEQ ID NO: 578791 - RNA, 22 nt, Human
guagagcaggacuugagauguu

SEQ ID NO: 578792 - RNA, 22 nt, Human
uugaagaccuuuagugcuaugu

SEQ ID NO: 578793 - RNA, 23 nt, Human
cuggaacauaguagauggucaga

SEQ ID NO: 578794 - RNA, 22 nt, Human
gcuccagggaacagaauguacu

SEQ ID NO: 578795 - RNA, 22 nt, Human
uuucacagcuggguggcagagu

SEQ ID NO: 578796 - RNA, 23 nt, Human
uagagcuucagcgaaugugcuca

SEQ ID NO: 578797 - RNA, 22 nt, Human
gcugccuuccaaagaguuuuau

SEQ ID NO: 578798 - RNA, 22 nt, Human
gaauucuuuucuuucugaaagu

SEQ ID NO: 578799 - RNA, 22 nt, Human
uugugcaauaguuuucucauga

SEQ ID NO: 578800 - RNA, 23 nt, Human
aaaguuugaagcaacaguaguug

SEQ ID NO: 578801 - RNA, 22 nt, Human
aaagguuagacagcucugcaua

SEQ ID NO: 578802 - RNA, 22 nt, Human
augaaauuugaccaauuauuua

SEQ ID NO: 578803 - RNA, 22 nt, Human
aaaaauugcugagaacggaauu

SEQ ID NO: 578804 - RNA, 21 nt, Human
uggcugagccaggugugugga

SEQ ID NO: 578805 - RNA, 22 nt, Human
auuaguuuggugcaaaaguaau

SEQ ID NO: 578806 - RNA, 22 nt, Human
cucacugcccugaaguuggguu

SEQ ID NO: 578807 - RNA, 22 nt, Human
ugccagagccaggcuuuaggaa

SEQ ID NO: 578808 - RNA, 22 nt, Human
gugugccaacaaaagacagugc

SEQ ID NO: 578809 - RNA, 22 nt, Human
caguucuacuuggaugucugca

SEQ ID NO: 578810 - RNA, 22 nt, Human
ugagagagcgccugggaucauu

SEQ ID NO: 578811 - RNA, 22 nt, Human
acuuuucaaaugggaaacucag

SEQ ID NO: 578812 - RNA, 20 nt, Human
caccuggcugacugucucca

SEQ ID NO: 578813 - RNA, 22 nt, Human
ucuggcccagccccugagguca

SEQ ID NO: 578814 - RNA, 22 nt, Human
gcugucuugcucacucuugcag

SEQ ID NO: 578815 - RNA, 22 nt, Human
auggagacgcaagggaccuagg

SEQ ID NO: 578816 - RNA, 22 nt, Human
gccacaggcuuaggagggaggu

SEQ ID NO: 578817 - RNA, 20 nt, Human
ccuggcugcauucaggacgg

SEQ ID NO: 578818 - RNA, 22 nt, Human
ggcguuucaccauguugaccag

SEQ ID NO: 578819 - RNA, 22 nt, Human
caggcugcagugcaguggcuau

SEQ ID NO: 578820 - RNA, 22 nt, Human
agaaaucaaugaagucugcuaa

SEQ ID NO: 578821 - RNA, 21 nt, Human
ucugagagcaacugcccuuua

SEQ ID NO: 578822 - RNA, 22 nt, Human
ugugccuggaucucugugacaa

SEQ ID NO: 578823 - RNA, 20 nt, Human
uaaauuagccuugaagauua

SEQ ID NO: 578824 - RNA, 22 nt, Human
uugauguugcucuuaacaguau

SEQ ID NO: 578825 - RNA, 22 nt, Human
uuaaaugugccuaaaccuguaa

SEQ ID NO: 578826 - RNA, 22 nt, Human
gugucccaaucuacuuuucccu

SEQ ID NO: 578827 - RNA, 22 nt, Human
uggagcugaacuuugaggccag

SEQ ID NO: 578828 - RNA, 20 nt, Human
guauauaaccauagugacua

SEQ ID NO: 578829 - RNA, 22 nt, Human
uacacuacacgaaggcauugca

SEQ ID NO: 578830 - RNA, 22 nt, Human
gaaggcagggaauguggugcua

SEQ ID NO: 578831 - RNA, 22 nt, Human
ccugcccuagagaugacacaau

SEQ ID NO: 578832 - RNA, 22 nt, Human
gacagaagaggaacuuggacag

SEQ ID NO: 578833 - RNA, 22 nt, Human
agaguguaauaagggcaagggc

SEQ ID NO: 578834 - RNA, 22 nt, Human
guaagaggagugggaagccuca

SEQ ID NO: 578835 - RNA, 22 nt, Human
agcuuucacgauuuggaacagg

SEQ ID NO: 578836 - RNA, 22 nt, Human
caguuacagagccaguuagaga

SEQ ID NO: 578837 - RNA, 22 nt, Human
ggaguggcagcgaggaucagau

SEQ ID NO: 578838 - RNA, 22 nt, Human
cccaggaguucgaggcuguagu

SEQ ID NO: 578839 - RNA, 22 nt, Human
ccucagcugcugcacagcuuuu

SEQ ID NO: 578840 - RNA, 21 nt, Human
uagguauuucuaucaugucuc

SEQ ID NO: 578841 - RNA, 17 nt, Human
cagguacauugcuacug

SEQ ID NO: 578842 - RNA, 22 nt, Human
uucuuuuccuacacagcgauuu

SEQ ID NO: 578843 - RNA, 22 nt, Human
uuuuagcacuaagugauaugcu

SEQ ID NO: 578844 - RNA, 22 nt, Human
ucugccgugcgaggucccacca

SEQ ID NO: 578845 - RNA, 22 nt, Human
acagugaggaagcagcugugcu

SEQ ID NO: 578846 - RNA, 22 nt, Human
uucauauauaugcacuacguac

SEQ ID NO: 578847 - RNA, 22 nt, Human
gagaaggcugauccuuggaguu

SEQ ID NO: 578848 - RNA, 21 nt, Human
uaauaauuccacuacagagua

SEQ ID NO: 578849 - RNA, 22 nt, Human
uggcaggguacaccuuaacacc

SEQ ID NO: 578850 - RNA, 22 nt, Human
uaaaucaguuucucuuauuggu

SEQ ID NO: 578851 - RNA, 22 nt, Human
uucugcauuuaaaauauuacua

SEQ ID NO: 578852 - RNA, 22 nt, Human
gaaguuaucaaagauguauucu

SEQ ID NO: 578853 - RNA, 22 nt, Human
gcaguguucuuguugcuuuuau

SEQ ID NO: 578854 - RNA, 22 nt, Human
cuuuuuuccuaaggcaacauga

SEQ ID NO: 578855 - RNA, 22 nt, Human
uagccaggcugcagcugauccg

SEQ ID NO: 578856 - RNA, 22 nt, Human
uccucacagaugggugcauagc

SEQ ID NO: 578857 - RNA, 22 nt, Human
uuacaguuuaagaggaaacaaa

SEQ ID NO: 578858 - RNA, 22 nt, Human
gcaggcugcugagauccuuagg

SEQ ID NO: 578859 - RNA, 22 nt, Human
uuacuguucauguuguacacuu

SEQ ID NO: 578860 - RNA, 22 nt, Human
ucugacuuccuccacaucuguu

SEQ ID NO: 578861 - RNA, 22 nt, Human
caccagcuuacagucucacccc

SEQ ID NO: 578862 - RNA, 22 nt, Human
ugcucccaggcucuguggucug

SEQ ID NO: 578863 - RNA, 22 nt, Human
ugaaccaggaggcagccagcac

SEQ ID NO: 578864 - RNA, 22 nt, Human
cugauugagaaggaaggggauc

SEQ ID NO: 578865 - RNA, 18 nt, Human
ggccucuggacuggcagc

SEQ ID NO: 578866 - RNA, 22 nt, Human
cagagccauccaggugccuguu

SEQ ID NO: 578867 - RNA, 22 nt, Human
ugguuucuggguuugucuagga

SEQ ID NO: 578868 - RNA, 22 nt, Human
agcaguaagcaacugagcuugc

SEQ ID NO: 578869 - RNA, 22 nt, Human
ugccagagaaucaccucuccuu

SEQ ID NO: 578870 - RNA, 23 nt, Human
uucugggcuguggaagccucggg

SEQ ID NO: 578871 - RNA, 22 nt, Human
acuucuguccuccaagccacgu

SEQ ID NO: 578872 - RNA, 22 nt, Human
gccuccugcccagaugagugau

SEQ ID NO: 578873 - RNA, 22 nt, Human
aucuguaaaugcaaauguagcu

SEQ ID NO: 578874 - RNA, 20 nt, Human
uuucacaucugucccuuuaa

SEQ ID NO: 578875 - RNA, 22 nt, Human
ggcaggugccaguuggcuuggg

SEQ ID NO: 578876 - RNA, 22 nt, Human
ggagcugaugacgucaccaugg

SEQ ID NO: 578877 - RNA, 22 nt, Human
uuuauauaacagagacugcuau

SEQ ID NO: 578878 - RNA, 22 nt, Human
uggaggccgaauuagagcguug

SEQ ID NO: 578879 - RNA, 22 nt, Human
caaggcugcaaaacuacauggg

SEQ ID NO: 578880 - RNA, 22 nt, Human
ccuucugcucccuggccagggc

SEQ ID NO: 578881 - RNA, 22 nt, Human
auuuaagacugacuucaccagu

SEQ ID NO: 578882 - RNA, 22 nt, Human
uuuccucugcugccauugcccc

SEQ ID NO: 578883 - RNA, 22 nt, Human
ucuacacauuuguaaaggcauu

SEQ ID NO: 578884 - RNA, 22 nt, Human
cuggggugugcucagagcaggg

SEQ ID NO: 578885 - RNA, 22 nt, Human
ugaggucuuuuauaguguguca

SEQ ID NO: 578886 - RNA, 22 nt, Human
uuucuugaccacuauguugaua

SEQ ID NO: 578887 - RNA, 22 nt, Human
ccuggcugguugucugauucua

SEQ ID NO: 578888 - RNA, 22 nt, Human
auuagaaugcaggguucauugu

SEQ ID NO: 578889 - RNA, 22 nt, Human
agggagguaggagcuucuagcu

SEQ ID NO: 578890 - RNA, 22 nt, Human
gccugggauucucaaaggggug

SEQ ID NO: 578891 - RNA, 22 nt, Human
ugcucuggcugggaugagugca

SEQ ID NO: 578892 - RNA, 22 nt, Human
gguggggagucaggcauucuug

SEQ ID NO: 578893 - RNA, 22 nt, Human
augcaaaauuaccauucuguuc

SEQ ID NO: 578894 - RNA, 22 nt, Human
ugcuauuuuuaucuugaucaaa

SEQ ID NO: 578895 - RNA, 21 nt, Human
gcaaggcuuuuguguuuccca

SEQ ID NO: 578896 - RNA, 22 nt, Human
ugcucuguaggggaaagagagc

SEQ ID NO: 578897 - RNA, 22 nt, Human
aguucuuugucaucucuggagu

SEQ ID NO: 578898 - RNA, 22 nt, Human
ggcaugagagguccuggggauu

SEQ ID NO: 578899 - RNA, 22 nt, Human
agcacauuuuauuuaagaaaau

SEQ ID NO: 578900 - RNA, 21 nt, Human
ugcucaguaaaugcugaguga

SEQ ID NO: 578901 - RNA, 22 nt, Human
gcagggcucaacaggacacccc

SEQ ID NO: 578902 - RNA, 22 nt, Human
ucagguccagcuccugugccuc

SEQ ID NO: 578903 - RNA, 21 nt, Human
ugucuuuggccucauucccag

SEQ ID NO: 578904 - RNA, 22 nt, Human
aguguggauuggcuggagcuau

SEQ ID NO: 578905 - RNA, 21 nt, Human
gccugccugcgugacccucuu

SEQ ID NO: 578906 - RNA, 22 nt, Human
agcaggcacuaugccaggaucu

SEQ ID NO: 578907 - RNA, 20 nt, Human
auuuuggugaacacagcuuc

SEQ ID NO: 578908 - RNA, 22 nt, Human
agggccugguucuguguaggga

SEQ ID NO: 578909 - RNA, 22 nt, Human
gaggccacccuaugggucccag

SEQ ID NO: 578910 - RNA, 22 nt, Human
ucuucagagacucugagccccu

SEQ ID NO: 578911 - RNA, 22 nt, Human
gagcugguucuguccagggaau

SEQ ID NO: 578912 - RNA, 22 nt, Human
auggccuggccagagcucugcu

SEQ ID NO: 578913 - RNA, 21 nt, Human
uccaggcugaugaugucaacu

SEQ ID NO: 578914 - RNA, 22 nt, Human
cagguccaagagauccuccuac

SEQ ID NO: 578915 - RNA, 22 nt, Human
aacagcuuacucaauggugauu

SEQ ID NO: 578916 - RNA, 22 nt, Human
gcugcccucccagggcaagcuu

SEQ ID NO: 578917 - RNA, 22 nt, Human
aggaggcccuagagcucuagag

SEQ ID NO: 578918 - RNA, 22 nt, Human
ggucccaguccucucccugcua

SEQ ID NO: 578919 - RNA, 22 nt, Human
ucccagagcucuggagguugga

SEQ ID NO: 578920 - RNA, 22 nt, Human
cugaaauauuuuaaucucagga

SEQ ID NO: 578921 - RNA, 22 nt, Human
uccaguuuacaggguugcuuuu

SEQ ID NO: 578922 - RNA, 22 nt, Human
gccagaagacuggagucagcug

SEQ ID NO: 578923 - RNA, 22 nt, Human
uaugcuuuuaaccuguaacuga

SEQ ID NO: 578924 - RNA, 22 nt, Human
aaguugagaugucauaggagac

SEQ ID NO: 578925 - RNA, 22 nt, Human
ccucaggcuucuaguucaguga

SEQ ID NO: 578926 - RNA, 22 nt, Human
uacaggcacugaaaugcuuauu

SEQ ID NO: 578927 - RNA, 22 nt, Human
agaggcugggcaggacccacag

SEQ ID NO: 578928 - RNA, 22 nt, Human
ucagccuccuaauuuccuguga

SEQ ID NO: 578929 - RNA, 22 nt, Human
aggugcagaaaaaaguccuuua

SEQ ID NO: 578930 - RNA, 23 nt, Human
uggcuucugccccauucucucca

SEQ ID NO: 578931 - RNA, 22 nt, Human
cagcugguuggaagggagcuga

SEQ ID NO: 578932 - RNA, 22 nt, Human
gcugaagcugacacauagugcu

SEQ ID NO: 578933 - RNA, 22 nt, Human
gugaggucuuugggaggugauu

SEQ ID NO: 578934 - RNA, 22 nt, Human
ggccuggaaugcuuuccuacca

SEQ ID NO: 578935 - RNA, 22 nt, Human
acccaggagcucugggguccuc

SEQ ID NO: 578936 - RNA, 22 nt, Human
caauuuuuaaacuaugaaguug

SEQ ID NO: 578937 - RNA, 22 nt, Human
agcaguuguagucauggaaaau

SEQ ID NO: 578938 - RNA, 22 nt, Human
augcuuuacaguuuuccaaaca

SEQ ID NO: 578939 - RNA, 22 nt, Human
gcucucccgcagccuggugggc

SEQ ID NO: 578940 - RNA, 22 nt, Human
ccugggcagggcuggacucuca

SEQ ID NO: 578941 - RNA, 22 nt, Human
gcucuccacugaccacggggca

SEQ ID NO: 578942 - RNA, 22 nt, Human
ugaaggagauuuuuagggaggc

SEQ ID NO: 578943 - RNA, 22 nt, Human
uccugggaguggccauguaaug

SEQ ID NO: 578944 - RNA, 22 nt, Human
ugaaugaugcaguauaaugaua

SEQ ID NO: 578945 - RNA, 22 nt, Human
aaacagauaaugcuauaaaugg

SEQ ID NO: 578946 - RNA, 22 nt, Human
gacagcuucuagaaauggucac

SEQ ID NO: 578947 - RNA, 22 nt, Human
gagaacacgaggaggcccagcg

SEQ ID NO: 578948 - RNA, 22 nt, Human
ggaggagauuccccucucacuu

SEQ ID NO: 578949 - RNA, 22 nt, Human
agcccaggaguccuuaaggacc

SEQ ID NO: 578950 - RNA, 21 nt, Human
auaagcaugcugauuacauuu

SEQ ID NO: 578951 - RNA, 22 nt, Human
caguguggagggagagagccug

SEQ ID NO: 578952 - RNA, 22 nt, Human
aacuaugguauucugauguuuc

SEQ ID NO: 578953 - RNA, 22 nt, Human
guccuuggagcuccccucugua

SEQ ID NO: 578954 - RNA, 22 nt, Human
uuacaucagaaggaaacagcgu

SEQ ID NO: 578955 - RNA, 22 nt, Human
gccugagaguugaaguucagug

SEQ ID NO: 578956 - RNA, 22 nt, Human
acugugccacaauucaccaggg

SEQ ID NO: 578957 - RNA, 22 nt, Human
acaggaagugggaagaaacagg

SEQ ID NO: 578958 - RNA, 21 nt, Human
aucccagcacccaggagugca

SEQ ID NO: 578959 - RNA, 22 nt, Human
gggauggaucuuggcugaggcu

SEQ ID NO: 578960 - RNA, 22 nt, Human
aggcacagauuuggggaaagca

SEQ ID NO: 578961 - RNA, 22 nt, Human
cugcagagaguaacugaaauau

SEQ ID NO: 578962 - RNA, 22 nt, Human
augaauccaaaguuuacuauua

SEQ ID NO: 578963 - RNA, 22 nt, Human
auaaaugaacauucacagagcu

SEQ ID NO: 578964 - RNA, 22 nt, Human
cuuccuuggcuucuggggugug

SEQ ID NO: 578965 - RNA, 22 nt, Human
uccagggaugccagccauguug

SEQ ID NO: 578966 - RNA, 22 nt, Human
ggcagggaguggagacucccua

SEQ ID NO: 578967 - RNA, 22 nt, Human
cugggccaggaccaggguugaa

SEQ ID NO: 578968 - RNA, 22 nt, Human
uccaggcugugcgcaccgugug

SEQ ID NO: 578969 - RNA, 22 nt, Human
aaagguuuuuauuuauccugga

SEQ ID NO: 578970 - RNA, 22 nt, Human
cuuuagugguauuuuagcaagu

SEQ ID NO: 578971 - RNA, 22 nt, Human
ucacugcaaggaggcuucucaa

SEQ ID NO: 578972 - RNA, 23 nt, Human
agcagcaaaaauuuaucuuucug

SEQ ID NO: 578973 - RNA, 22 nt, Human
augaucugauaaucauccacua

SEQ ID NO: 578974 - RNA, 22 nt, Human
aaacagcaauggagaagccagg

SEQ ID NO: 578975 - RNA, 22 nt, Human
ggucccuggaaggccaagcuug

SEQ ID NO: 578976 - RNA, 22 nt, Human
cuaguguuuauuaacauaauuc

SEQ ID NO: 578977 - RNA, 22 nt, Human
cagcaggcggcccgcgggcccg

SEQ ID NO: 578978 - RNA, 22 nt, Human
ugaagauugugcuuggccugua

SEQ ID NO: 578979 - RNA, 22 nt, Human
gccugagagaacugaccaagag

SEQ ID NO: 578980 - RNA, 22 nt, Human
gcucgguggccagccugaggcc

SEQ ID NO: 578981 - RNA, 22 nt, Human
gaguuauauuugcgauauugga

SEQ ID NO: 578982 - RNA, 19 nt, Human
ccagggcuuuaaguugagg

SEQ ID NO: 578983 - RNA, 22 nt, Human
ugagccagccuugcagcugugc

SEQ ID NO: 578984 - RNA, 20 nt, Human
uacaaauuuuccauguuucc

SEQ ID NO: 578985 - RNA, 23 nt, Human
ucugcucugaaguucggcugagc

SEQ ID NO: 578986 - RNA, 21 nt, Human
ucucacaauaugaugccagau

SEQ ID NO: 578987 - RNA, 22 nt, Human
uaaaugauuuauguaugugaaa

SEQ ID NO: 578988 - RNA, 22 nt, Human
caguggcaaguccgguauugaa

SEQ ID NO: 578989 - RNA, 22 nt, Human
uuuggggcucagcaggcuguuu

SEQ ID NO: 578990 - RNA, 22 nt, Human
augauguugauaaauuacuuua

SEQ ID NO: 578991 - RNA, 21 nt, Human
ucugucuuccucagccuaagg

SEQ ID NO: 578992 - RNA, 22 nt, Human
accuuuuuucagaacucuaaag

SEQ ID NO: 578993 - RNA, 22 nt, Human
ugcugagguuucugacuaugga

SEQ ID NO: 578994 - RNA, 22 nt, Human
acuguaauauuuuaagaugucu

SEQ ID NO: 578995 - RNA, 22 nt, Human
uaguuacagaagauaaggguau

SEQ ID NO: 578996 - RNA, 22 nt, Human
gcaccugguuuauauaaucaua

SEQ ID NO: 578997 - RNA, 22 nt, Human
gcuccuggcucucugagggcug

SEQ ID NO: 578998 - RNA, 17 nt, Human
ugaaaucagcacccagg

SEQ ID NO: 578999 - RNA, 22 nt, Human
ggcaggugcaccugagccaucu

SEQ ID NO: 579000 - RNA, 22 nt, Human
ugaaaagacugcaagagagcau

SEQ ID NO: 579001 - RNA, 22 nt, Human
ggaggggauuuaguagaugcua

SEQ ID NO: 579002 - RNA, 22 nt, Human
uucugucacagugcugguauca

SEQ ID NO: 579003 - RNA, 22 nt, Human
gaaaagagaacaucugaggauc

SEQ ID NO: 579004 - RNA, 22 nt, Human
gcagagugggagcccagggcug

SEQ ID NO: 579005 - RNA, 22 nt, Human
uugaaugaagucccuuuuuacu

SEQ ID NO: 579006 - RNA, 22 nt, Human
aggcugagauagguggaucauu

SEQ ID NO: 579007 - RNA, 16 nt, Human
ccuuucucugccuucc

SEQ ID NO: 579008 - RNA, 22 nt, Human
ugagguaguuuguuguacagua

SEQ ID NO: 579009 - RNA, 22 nt, Human
uguccuggggacaagaggcccu

SEQ ID NO: 579010 - RNA, 22 nt, Human
ccagcgcuucccaucagggagg

SEQ ID NO: 579011 - RNA, 22 nt, Human
uggugacacgaaguuugcuauc

SEQ ID NO: 579012 - RNA, 22 nt, Human
auuuuguuaaugucaccgugcu

SEQ ID NO: 579013 - RNA, 22 nt, Human
caaaucuaggaugcauguagug

SEQ ID NO: 579014 - RNA, 22 nt, Human
gcaagcugcuuaagcucauugu

SEQ ID NO: 579015 - RNA, 22 nt, Human
ugcauuccuuucuaggauagcu

SEQ ID NO: 579016 - RNA, 21 nt, Human
cuguccaaauuucauaacuuu

SEQ ID NO: 579017 - RNA, 22 nt, Human
ggccucugguucacagggagga

SEQ ID NO: 579018 - RNA, 22 nt, Human
gcacccaggccggcgacugcag

SEQ ID NO: 579019 - RNA, 22 nt, Human
agaggcuccucggugccucgug

SEQ ID NO: 579020 - RNA, 22 nt, Human
uuagcauuucaguacacauguu

SEQ ID NO: 579021 - RNA, 20 nt, Human
agaggaggauuauuuuauuc

SEQ ID NO: 579022 - RNA, 22 nt, Human
ugcaguccuaaauauauagcug

SEQ ID NO: 579023 - RNA, 22 nt, Human
ugaagcccugugucagcuucca

SEQ ID NO: 579024 - RNA, 22 nt, Human
ugcacuauuucgccaugguugu

SEQ ID NO: 579025 - RNA, 22 nt, Human
uauuuugagguauuuuugagcu

SEQ ID NO: 579026 - RNA, 22 nt, Human
ggggccuuuucugaauguggaa

SEQ ID NO: 579027 - RNA, 22 nt, Human
gauggccuuguuuucucccuuc

SEQ ID NO: 579028 - RNA, 22 nt, Human
ugggaggcuuccagaccuugcu

SEQ ID NO: 579029 - RNA, 22 nt, Human
uggauggguugaaaugugagcc

SEQ ID NO: 579030 - RNA, 22 nt, Human
gcccauggacacccaagugcca

SEQ ID NO: 579031 - RNA, 22 nt, Human
agcuccugaguagcuuuacuca

SEQ ID NO: 579032 - RNA, 22 nt, Human
aaaagcagguacucagcuuggg

SEQ ID NO: 579033 - RNA, 22 nt, Human
ggaacacucgucaaauagcggg

SEQ ID NO: 579034 - RNA, 20 nt, Human
agcaguuuccuaacucagcu

SEQ ID NO: 579035 - RNA, 22 nt, Human
ucuaaagauuuggauucauuug

SEQ ID NO: 579036 - RNA, 22 nt, Human
ugaggcaguugagcuuccugag

SEQ ID NO: 579037 - RNA, 23 nt, Human
ugacagagcacagugggggagau

SEQ ID NO: 579038 - RNA, 22 nt, Human
ucuguuuugcauaauguucuuu

SEQ ID NO: 579039 - RNA, 22 nt, Human
aauuucacuguggagcacauuu

SEQ ID NO: 579040 - RNA, 22 nt, Human
ucaggcugugucuuuaaacaau

SEQ ID NO: 579041 - RNA, 22 nt, Human
aaacaacaauccaaugggagcu

SEQ ID NO: 579042 - RNA, 22 nt, Human
aacuacaggggguggcaggcgg

SEQ ID NO: 579043 - RNA, 22 nt, Human
gggguagggugauugugaagua

SEQ ID NO: 579044 - RNA, 22 nt, Human
uuguuggugaauaggguggaau

SEQ ID NO: 579045 - RNA, 22 nt, Human
ugaugggaggugcugcaggacc

SEQ ID NO: 579046 - RNA, 22 nt, Human
cuggagugaggucugggagccu

SEQ ID NO: 579047 - RNA, 22 nt, Human
ggagccugaaaagucugcauuu

SEQ ID NO: 579048 - RNA, 20 nt, Human
uuuuucugggcuuccauagc

SEQ ID NO: 579049 - RNA, 22 nt, Human
gcucccucccaccagccugcag

SEQ ID NO: 579050 - RNA, 19 nt, Human
cagaaauagcgaaguguaa

SEQ ID NO: 579051 - RNA, 22 nt, Human
acauagaaggaagaguaguagg

SEQ ID NO: 579052 - RNA, 22 nt, Human
uucuucauggguucuuuuagga

SEQ ID NO: 579053 - RNA, 22 nt, Human
caaaugauagagccgauuauca

SEQ ID NO: 579054 - RNA, 22 nt, Human
uuagauuuauaugugagaaugg

SEQ ID NO: 579055 - RNA, 22 nt, Human
gggaagcugaagcuagagaaaa

SEQ ID NO: 579056 - RNA, 22 nt, Human
ccuggagcuuuuccauccugga

SEQ ID NO: 579057 - RNA, 22 nt, Human
uauauucauuuuaaagccaucu

SEQ ID NO: 579058 - RNA, 22 nt, Human
ugggccugccccaggcuucagc

SEQ ID NO: 579059 - RNA, 22 nt, Human
uuaaacaccugucuaguguagc

SEQ ID NO: 579060 - RNA, 22 nt, Human
cacaggaaucagcauuaauggc

SEQ ID NO: 579061 - RNA, 22 nt, Human
uauggagauucaaaagcaucuu

SEQ ID NO: 579062 - RNA, 18 nt, Human
ucucuugcaucuucugua

SEQ ID NO: 579063 - RNA, 22 nt, Human
agcagagcuauucuugugcaau

SEQ ID NO: 579064 - RNA, 22 nt, Human
ccucuuccucaccaucuacaac

SEQ ID NO: 579065 - RNA, 22 nt, Human
caggaacauguuggaaagaaau

SEQ ID NO: 579066 - RNA, 17 nt, Human
gcuugccuugucuuccu

SEQ ID NO: 579067 - RNA, 22 nt, Human
caggaaggggcucacucuggcc

SEQ ID NO: 579068 - RNA, 22 nt, Human
guccuggggaauacagaagccg

SEQ ID NO: 579069 - RNA, 22 nt, Human
cugaggagaaagaugguccaag

SEQ ID NO: 579070 - RNA, 22 nt, Human
gcaggggaguccacucuaugca

SEQ ID NO: 579071 - RNA, 22 nt, Human
cagcagagcugggaauaaaauu

SEQ ID NO: 579072 - RNA, 22 nt, Human
uuauugcaaccuuuucuggugu

SEQ ID NO: 579073 - RNA, 22 nt, Human
cagcuguucuugggacagacag

SEQ ID NO: 579074 - RNA, 22 nt, Human
uugauacagcagccugugaucc

SEQ ID NO: 579075 - RNA, 20 nt, Human
aucaaaauccuauugagguu

SEQ ID NO: 579076 - RNA, 22 nt, Human
acuugguuggucucacccuguu

SEQ ID NO: 579077 - RNA, 19 nt, Human
acaaugaauguguucucuu

SEQ ID NO: 579078 - RNA, 22 nt, Human
aauccaugcaugcaaggaaagg

SEQ ID NO: 579079 - RNA, 22 nt, Human
ccaggcuuucuccugacucaca

SEQ ID NO: 579080 - RNA, 22 nt, Human
aucagcuuuucucaucagaaau

SEQ ID NO: 579081 - RNA, 22 nt, Human
ccuggugccgguagacgcgcag

SEQ ID NO: 579082 - RNA, 22 nt, Human
gaugucuuucugugugccuaga

SEQ ID NO: 579083 - RNA, 22 nt, Human
cugccuggaugaauggcgccuu

SEQ ID NO: 579084 - RNA, 22 nt, Human
ucagagaauucucagaugacuc

SEQ ID NO: 579085 - RNA, 22 nt, Human
gggagguguuccaguguuggua

SEQ ID NO: 579086 - RNA, 22 nt, Human
gagaaguuucugguuugcauag

SEQ ID NO: 579087 - RNA, 22 nt, Human
uaagaauauugggaauggaugg

SEQ ID NO: 579088 - RNA, 22 nt, Human
gcuccuggguguggcugccccu

SEQ ID NO: 579089 - RNA, 22 nt, Human
ggccuuggugcucuguguugca

SEQ ID NO: 579090 - RNA, 22 nt, Human
gagggcuggggcuuaggcuuag

SEQ ID NO: 579091 - RNA, 22 nt, Human
agacauuuuacauucuuccauu

SEQ ID NO: 579092 - RNA, 22 nt, Human
acauccacuauccuugcuuguu

SEQ ID NO: 579093 - RNA, 22 nt, Human
uaacacugugcccagaguccca

SEQ ID NO: 579094 - RNA, 22 nt, Human
uucaagcagggauuggugaugg

SEQ ID NO: 579095 - RNA, 22 nt, Human
ucaaauuuuaacaugcauuaga

SEQ ID NO: 579096 - RNA, 22 nt, Human
gccucugucauagcucauguga

SEQ ID NO: 579097 - RNA, 22 nt, Human
uuucaacaggaugauaauaggc

SEQ ID NO: 579098 - RNA, 22 nt, Human
uagccaggcgaggucagugucg

SEQ ID NO: 579099 - RNA, 22 nt, Human
ugagguaggaauuuguauuggg

SEQ ID NO: 579100 - RNA, 22 nt, Human
uuccacagauguaugaaguggu

SEQ ID NO: 579101 - RNA, 23 nt, Human
gucucccauagcgcucccaggcu

SEQ ID NO: 579102 - RNA, 22 nt, Human
uccucuggucuucgguguggac

SEQ ID NO: 579103 - RNA, 18 nt, Human
ucauuagggauugcaaag

SEQ ID NO: 579104 - RNA, 22 nt, Human
aaauuguaggaucacaugaccu

SEQ ID NO: 579105 - RNA, 22 nt, Human
cugcaggguucggagaguuccc

SEQ ID NO: 579106 - RNA, 22 nt, Human
ugcuuccugaggccgucuucuc

SEQ ID NO: 579107 - RNA, 22 nt, Human
acaaagaaggaauuggucuuua

SEQ ID NO: 579108 - RNA, 22 nt, Human
agaggggguguuccagaagcau

SEQ ID NO: 579109 - RNA, 22 nt, Human
acagacagggcaccugccuccu

SEQ ID NO: 579110 - RNA, 22 nt, Human
cauggcagagccugcagguggg

SEQ ID NO: 579111 - RNA, 22 nt, Human
gccuggcagugaugucuuuugg

SEQ ID NO: 579112 - RNA, 22 nt, Human
uccugccucacaguugaaguuu

SEQ ID NO: 579113 - RNA, 22 nt, Human
aaagcucuuaaugagauuaucc

SEQ ID NO: 579114 - RNA, 22 nt, Human
uuucacauuggcuucuauuucu

SEQ ID NO: 579115 - RNA, 22 nt, Human
ucaggagauggucuuuauaggc

SEQ ID NO: 579116 - RNA, 22 nt, Human
gauaaauugcacuuuuucuuac

SEQ ID NO: 579117 - RNA, 22 nt, Human
aacuuucuugugacauuugggg

SEQ ID NO: 579118 - RNA, 22 nt, Human
agccaacuaggagauuaaggua

SEQ ID NO: 579119 - RNA, 22 nt, Human
ggaaagagcuaaaagggugaga

SEQ ID NO: 579120 - RNA, 22 nt, Human
ugguaaauuauuuuuauauccc

SEQ ID NO: 579121 - RNA, 22 nt, Human
uaucuuucuguccuagauucug

SEQ ID NO: 579122 - RNA, 22 nt, Human
gggcguggauggucagugcagg

SEQ ID NO: 579123 - RNA, 22 nt, Human
gcucauucagccagggcccggu

SEQ ID NO: 579124 - RNA, 22 nt, Human
ggaacacucagaaaugcucguc

SEQ ID NO: 579125 - RNA, 22 nt, Human
ggccauggcgggagccggcguc

SEQ ID NO: 579126 - RNA, 22 nt, Human
acacagugucuuagguaguguc

SEQ ID NO: 579127 - RNA, 22 nt, Human
uuccaaagucauguugcugaua

SEQ ID NO: 579128 - RNA, 19 nt, Human
cuggcucuuggguggagga

SEQ ID NO: 579129 - RNA, 19 nt, Human
ggggccugugauggucaca

SEQ ID NO: 579130 - RNA, 22 nt, Human
cuggccaguuguccuggcuugg

SEQ ID NO: 579131 - RNA, 22 nt, Human
ccaccacuucuggcuucuggug

SEQ ID NO: 579132 - RNA, 20 nt, Human
uuaguugaguagcuccugaa

SEQ ID NO: 579133 - RNA, 22 nt, Human
uucuugaaucacuuuagagaua

SEQ ID NO: 579134 - RNA, 22 nt, Human
gagcugaguaucccacugaagu

SEQ ID NO: 579135 - RNA, 22 nt, Human
augcucaguagcuggcugaccc

SEQ ID NO: 579136 - RNA, 22 nt, Human
auacaucauuuauggaauaagg

SEQ ID NO: 579137 - RNA, 23 nt, Human
ggcugagaagucccaugauaggu

SEQ ID NO: 579138 - RNA, 22 nt, Human
ugcaagaucacgguguugagag

SEQ ID NO: 579139 - RNA, 22 nt, Human
uaaaggcagccacugagcucaa

SEQ ID NO: 579140 - RNA, 22 nt, Human
aagacaauauugcugugaacgu

SEQ ID NO: 579141 - RNA, 22 nt, Human
aaugcuuaauucaauacugugu

SEQ ID NO: 579142 - RNA, 23 nt, Human
uuggcagcgggucaggcuguggg

SEQ ID NO: 579143 - RNA, 22 nt, Human
agcuacuggagaacacaaaacc

SEQ ID NO: 579144 - RNA, 22 nt, Human
augaggcauuccacucaaacuc

SEQ ID NO: 579145 - RNA, 22 nt, Human
cuacuuuaacaauucgcaagaa

SEQ ID NO: 579146 - RNA, 22 nt, Human
uuuagagucccuuucucaccac

SEQ ID NO: 579147 - RNA, 17 nt, Human
agcugagcuggccaggg

SEQ ID NO: 579148 - RNA, 22 nt, Human
uaguguuaauucaguuuauaau

SEQ ID NO: 579149 - RNA, 22 nt, Human
cccucugguuugcccuugggug

SEQ ID NO: 579150 - RNA, 22 nt, Human
auugugcagaauuggaauugca

SEQ ID NO: 579151 - RNA, 22 nt, Human
agcaguggcauacauuuugagu

SEQ ID NO: 579152 - RNA, 19 nt, Human
cugugcccuaugacuugua

SEQ ID NO: 579153 - RNA, 22 nt, Human
aaugagggggaugggaaagugu

SEQ ID NO: 579154 - RNA, 22 nt, Human
aacagcuuuguauacaguaacu

SEQ ID NO: 579155 - RNA, 22 nt, Human
caaaagcagcaaguuuauaugu

SEQ ID NO: 579156 - RNA, 20 nt, Human
cauuaugguugggcacagug

SEQ ID NO: 579157 - RNA, 22 nt, Human
acagcaagaccccuagcauggu

SEQ ID NO: 579158 - RNA, 22 nt, Human
ugagcuguuucucugguggcuu

SEQ ID NO: 579159 - RNA, 22 nt, Human
ccaucaaugacuaauaaaauag

SEQ ID NO: 579160 - RNA, 22 nt, Human
ugccugcuuguguaccugguga

SEQ ID NO: 579161 - RNA, 22 nt, Human
auacaaaauauauacuggagac

SEQ ID NO: 579162 - RNA, 22 nt, Human
guccugggggcagcugugucca

SEQ ID NO: 579163 - RNA, 22 nt, Human
cucagggaauuauuucuguccu

SEQ ID NO: 579164 - RNA, 22 nt, Human
ucugaaagaaagauuuuguuuc

SEQ ID NO: 579165 - RNA, 22 nt, Human
uugacaauguccuuugaauuuc

SEQ ID NO: 579166 - RNA, 18 nt, Human
aagcugggaaggagacag

SEQ ID NO: 579167 - RNA, 22 nt, Human
aaucaacaggaugugcauugua

SEQ ID NO: 579168 - RNA, 22 nt, Human
ugcugauauauucuaguuuucu

SEQ ID NO: 579169 - RNA, 22 nt, Human
cugaaugccugcagagccagag

SEQ ID NO: 579170 - RNA, 22 nt, Human
agacaauacauuuauucccuuu

SEQ ID NO: 579171 - RNA, 22 nt, Human
gggcuccaguuguccccaggau

SEQ ID NO: 579172 - RNA, 22 nt, Human
uaccauaacguaaugaacuuga

SEQ ID NO: 579173 - RNA, 22 nt, Human
gcccacaggggaccugguggcu

SEQ ID NO: 579174 - RNA, 20 nt, Human
accauuaauguaagcuuugu

SEQ ID NO: 579175 - RNA, 22 nt, Human
ugaaaugcuuaggaccagaagg

SEQ ID NO: 579176 - RNA, 22 nt, Human
gucuggaagaacuagggauguu

SEQ ID NO: 579177 - RNA, 22 nt, Human
uucuugaugaaugcuaagaacu

SEQ ID NO: 579178 - RNA, 20 nt, Human
cucaguaaaagcacaggguc

SEQ ID NO: 579179 - RNA, 22 nt, Human
acauuucugcuagaauagguga

SEQ ID NO: 579180 - RNA, 23 nt, Human
aagguguuuguuuucagaaagca

SEQ ID NO: 579181 - RNA, 23 nt, Human
aucaagucaucagcaaaauacau

SEQ ID NO: 579182 - RNA, 22 nt, Human
guggcccucugauagggucagg

SEQ ID NO: 579183 - RNA, 21 nt, Human
gcccucaggggaggauggccu

SEQ ID NO: 579184 - RNA, 22 nt, Human
ugcuuccuugagcucuccaauc

SEQ ID NO: 579185 - RNA, 22 nt, Human
aucaaaaccuugacuuuuaaug

SEQ ID NO: 579186 - RNA, 22 nt, Human
agggggcucagugacugaagug

SEQ ID NO: 579187 - RNA, 22 nt, Human
uaaugcucacccugcaucaggc

SEQ ID NO: 579188 - RNA, 22 nt, Human
agucccagaucuccauucgguc

SEQ ID NO: 579189 - RNA, 22 nt, Human
aauaauuuugagagccuggaaa

SEQ ID NO: 579190 - RNA, 22 nt, Human
uguuuucuuccuaauugcucau

SEQ ID NO: 579191 - RNA, 22 nt, Human
uguaaaugugaauuuccuuuuc

SEQ ID NO: 579192 - RNA, 22 nt, Human
augggcugaggaagcuccugag

SEQ ID NO: 579193 - RNA, 22 nt, Human
uagucaacuagugagcauaugg

SEQ ID NO: 579194 - RNA, 22 nt, Human
gucccagaggcuuuggccacag

SEQ ID NO: 579195 - RNA, 17 nt, Human
ucugcucugccaaucca

SEQ ID NO: 579196 - RNA, 22 nt, Human
aucugguucuucuuaggcauca

SEQ ID NO: 579197 - RNA, 22 nt, Human
ucagggagggaccugaggcugg

SEQ ID NO: 579198 - RNA, 22 nt, Human
uccuucagggggccgccugcac

SEQ ID NO: 579199 - RNA, 22 nt, Human
aggccuggugaaugaaguaucu

SEQ ID NO: 579200 - RNA, 22 nt, Human
uuguuagauauuucuuagaaga

SEQ ID NO: 579201 - RNA, 22 nt, Human
aagaagaugguuaacuuucagu

SEQ ID NO: 579202 - RNA, 22 nt, Human
uucauagugcuuaauuugauaa

SEQ ID NO: 579203 - RNA, 22 nt, Human
acagccagucaucucagcaggg

SEQ ID NO: 579204 - RNA, 22 nt, Human
aaagcaauugugguuuuugcca

SEQ ID NO: 579205 - RNA, 22 nt, Human
ugaauuuaucaaagauucuuaa

SEQ ID NO: 579206 - RNA, 22 nt, Human
auaagaggaauuacagaagagg

SEQ ID NO: 579207 - RNA, 21 nt, Human
aggcagcaggauccagggaca

SEQ ID NO: 579208 - RNA, 23 nt, Human
cggcugcucggccgaguccucgg

SEQ ID NO: 579209 - RNA, 22 nt, Human
ucugaaauauauuuugaguguu

SEQ ID NO: 579210 - RNA, 22 nt, Human
aggucaggaggccucugccauu

SEQ ID NO: 579211 - RNA, 22 nt, Human
uaacuugaccuguauaaaacac

SEQ ID NO: 579212 - RNA, 22 nt, Human
aaagcaaucuaguuccaauucu

SEQ ID NO: 579213 - RNA, 22 nt, Human
uugucugugaaauggaaauagu

SEQ ID NO: 579214 - RNA, 22 nt, Human
cggcugaggaucuccaggccug

SEQ ID NO: 579215 - RNA, 22 nt, Human
uggggugaaucuuuguuguccg

SEQ ID NO: 579216 - RNA, 22 nt, Human
uaucuacaggugucagguaaga

SEQ ID NO: 579217 - RNA, 22 nt, Human
ggcucagguuaccagucccucc

SEQ ID NO: 579218 - RNA, 22 nt, Human
cagugggauaugggggcagcau

SEQ ID NO: 579219 - RNA, 22 nt, Human
agcugcccugggucuugcugcu

SEQ ID NO: 579220 - RNA, 22 nt, Human
ugcaugcugcacacaugcguag

SEQ ID NO: 579221 - RNA, 22 nt, Human
gucugaaacgcauuguuaucga

SEQ ID NO: 579222 - RNA, 22 nt, Human
ggagcugugcugggugaucagg

SEQ ID NO: 579223 - RNA, 22 nt, Human
ccguggaguugugcugaguaug

SEQ ID NO: 579224 - RNA, 22 nt, Human
agaggcuccuucacucuggcac

SEQ ID NO: 579225 - RNA, 22 nt, Human
caaauuacccucaacaucuaga

SEQ ID NO: 579226 - RNA, 22 nt, Human
aggcacaggccucagcacccag

SEQ ID NO: 579227 - RNA, 19 nt, Human
gcuuccagcacugcaggag

SEQ ID NO: 579228 - RNA, 22 nt, Human
augaaggacaacaggggagcag

SEQ ID NO: 579229 - RNA, 22 nt, Human
agcuuuguggcuuugcaagacu

SEQ ID NO: 579230 - RNA, 21 nt, Human
aguguaggucauuagcuguug

SEQ ID NO: 579231 - RNA, 22 nt, Human
gaggagcugggcugagaggguc

SEQ ID NO: 579232 - RNA, 22 nt, Human
uuucuucucugauuaaggcuca

SEQ ID NO: 579233 - RNA, 22 nt, Human
ucugaggaccuacugaagaguu

SEQ ID NO: 579234 - RNA, 22 nt, Human
agaaggccuaacuugggggcaa

SEQ ID NO: 579235 - RNA, 22 nt, Human
agguccauggcagcggguacuu

SEQ ID NO: 579236 - RNA, 22 nt, Human
acuggaguucaugguaaaguca

SEQ ID NO: 579237 - RNA, 22 nt, Human
gggugggguucaggaaucuuca

SEQ ID NO: 579238 - RNA, 22 nt, Human
uucuucauucccuuacuuccga

SEQ ID NO: 579239 - RNA, 22 nt, Human
acuggaguacaguggcgugaac

SEQ ID NO: 579240 - RNA, 20 nt, Human
gaaggaagggggcaagguga

SEQ ID NO: 579241 - RNA, 22 nt, Human
ccaugccucgggaagagucugu

SEQ ID NO: 579242 - RNA, 22 nt, Human
uuacaacauauuuagcuugauu

SEQ ID NO: 579243 - RNA, 22 nt, Human
gugaggcaggcauucuccuuuc

SEQ ID NO: 579244 - RNA, 22 nt, Human
cucaggcugcccugacagcccc

SEQ ID NO: 579245 - RNA, 22 nt, Human
cagggcaggaauuugacauugc

SEQ ID NO: 579246 - RNA, 20 nt, Human
ugaggcaggagaauggcaug

SEQ ID NO: 579247 - RNA, 22 nt, Human
ucgccagggaugcuguaaggaa

SEQ ID NO: 579248 - RNA, 22 nt, Human
ccacagagagugucagccuuug

SEQ ID NO: 579249 - RNA, 22 nt, Human
aggcagccuauggggagcucag

SEQ ID NO: 579250 - RNA, 22 nt, Human
agagcugcaggguggacccagg

SEQ ID NO: 579251 - RNA, 21 nt, Human
cuuggaacggguagaacucac

SEQ ID NO: 579252 - RNA, 22 nt, Human
ucccaggcuaggccucugcguu

SEQ ID NO: 579253 - RNA, 22 nt, Human
uuuuauugggaguccucuacug

SEQ ID NO: 579254 - RNA, 22 nt, Human
uaucuucagcugaagcagaguc

SEQ ID NO: 579255 - RNA, 22 nt, Human
ggcagcuagaauugugaugcug

SEQ ID NO: 579256 - RNA, 22 nt, Human
uucuuaaaacuuauggacaggu

SEQ ID NO: 579257 - RNA, 22 nt, Human
ugaaggcacguggguggauacu

SEQ ID NO: 579258 - RNA, 23 nt, Human
ucugucaccuauggcugcucuuc

SEQ ID NO: 579259 - RNA, 22 nt, Human
aggcagccugguuugaauggaa

SEQ ID NO: 579260 - RNA, 22 nt, Human
gcauacagagaggauguggcau

SEQ ID NO: 579261 - RNA, 22 nt, Human
uucagggagagcgggacgggug

SEQ ID NO: 579262 - RNA, 22 nt, Human
aaaauugaggccaguaugccau

SEQ ID NO: 579263 - RNA, 22 nt, Human
ugaaacggaauguucuuuaucg

SEQ ID NO: 579264 - RNA, 17 nt, Human
ugcagcugcucccaggc

SEQ ID NO: 579265 - RNA, 22 nt, Human
uguagaacugacauuuuggacu

SEQ ID NO: 579266 - RNA, 22 nt, Human
ucaguaaaugagcaaaaauuuc

SEQ ID NO: 579267 - RNA, 22 nt, Human
cagcaguguacaaggugucaga

SEQ ID NO: 579268 - RNA, 22 nt, Human
guggcuugaccaucccugcuac

SEQ ID NO: 579269 - RNA, 20 nt, Human
ccuccuggucaggugugcag

SEQ ID NO: 579270 - RNA, 20 nt, Human
uucaugcuggaggggcuggc

SEQ ID NO: 579271 - RNA, 23 nt, Human
cagcucagcacauaggagguacu

SEQ ID NO: 579272 - RNA, 22 nt, Human
ggaggguggcagcguccugggc

SEQ ID NO: 579273 - RNA, 22 nt, Human
uauuacaaauuauaaugggaga

SEQ ID NO: 579274 - RNA, 22 nt, Human
agggcuggcuccguuaccuuga

SEQ ID NO: 579275 - RNA, 22 nt, Human
uccagggcaugcucagacucag

SEQ ID NO: 579276 - RNA, 22 nt, Human
gagagcuggccagcuucaguau

SEQ ID NO: 579277 - RNA, 22 nt, Human
gccugggaaagaguagggaaau

SEQ ID NO: 579278 - RNA, 22 nt, Human
uacuuacaguuacggcaagugg

SEQ ID NO: 579279 - RNA, 21 nt, Human
ugcuggaaaaagugguucuag

SEQ ID NO: 579280 - RNA, 22 nt, Human
uggccugguccuugucaaggca

SEQ ID NO: 579281 - RNA, 22 nt, Human
uacagugucuggauaucaaagg

SEQ ID NO: 579282 - RNA, 22 nt, Human
uucugaggcauagaggaugaga

SEQ ID NO: 579283 - RNA, 22 nt, Human
ccuguacagugaaugaauguga

SEQ ID NO: 579284 - RNA, 22 nt, Human
gcagggucugaggccacagagg

SEQ ID NO: 579285 - RNA, 22 nt, Human
acuccaaggccacaugcauucc

SEQ ID NO: 579286 - RNA, 22 nt, Human
uccuucagcucucuauuuagau

SEQ ID NO: 579287 - RNA, 22 nt, Human
uuuccuuccauguugggcaaaa

SEQ ID NO: 579288 - RNA, 22 nt, Human
cccuccccagggucauauugaa

SEQ ID NO: 579289 - RNA, 22 nt, Human
ucucugagaaguuccuuuguga

SEQ ID NO: 579290 - RNA, 22 nt, Human
uuuauuaauuagugacccaaug

SEQ ID NO: 579291 - RNA, 22 nt, Human
guaaugaauagaugguggcagg

SEQ ID NO: 579292 - RNA, 22 nt, Human
cagauuuaagagauaaacagug

SEQ ID NO: 579293 - RNA, 22 nt, Human
gcacccagccagcaucucagag

SEQ ID NO: 579294 - RNA, 22 nt, Human
gagguccacugaggcaacaggg

SEQ ID NO: 579295 - RNA, 22 nt, Human
ucauuucaaugauacuacuaag

SEQ ID NO: 579296 - RNA, 22 nt, Human
ucaaaaauguuuuauauuggua

SEQ ID NO: 579297 - RNA, 22 nt, Human
augcaguacugauacaugccac

SEQ ID NO: 579298 - RNA, 22 nt, Human
auucacaugcccaagcagcacc

SEQ ID NO: 579299 - RNA, 22 nt, Human
ccccagcugagauuugaggaga

SEQ ID NO: 579300 - RNA, 19 nt, Human
ggcuggaguggccaucugu

SEQ ID NO: 579301 - RNA, 20 nt, Human
ccuccacugucacugaccug

SEQ ID NO: 579302 - RNA, 22 nt, Human
ucuuccuuguaagggcuuuaga

SEQ ID NO: 579303 - RNA, 22 nt, Human
gggaggucagggugccugcugg

SEQ ID NO: 579304 - RNA, 23 nt, Human
uggagcugggcucagacccuggg

SEQ ID NO: 579305 - RNA, 22 nt, Human
ccugggucccagccaggcuuug

SEQ ID NO: 579306 - RNA, 22 nt, Human
gcugccacuuggucaugucaug

SEQ ID NO: 579307 - RNA, 22 nt, Human
gcuggagcuugagaggacaggg

SEQ ID NO: 579308 - RNA, 22 nt, Human
cccugccuacaggguuuucuuu

SEQ ID NO: 579309 - RNA, 23 nt, Human
ugucuggagccugagcaggugcu

SEQ ID NO: 579310 - RNA, 22 nt, Human
cagcugccaugacauguccugc

SEQ ID NO: 579311 - RNA, 22 nt, Human
agccagcuggagaccacuguuu

SEQ ID NO: 579312 - RNA, 22 nt, Human
aggcagggugaugauaaugauu

SEQ ID NO: 579313 - RNA, 22 nt, Human
ccuagacuagaggcagggagcc

SEQ ID NO: 579314 - RNA, 22 nt, Human
uccccagaggaauaugagauug

SEQ ID NO: 579315 - RNA, 22 nt, Human
cugggcaauaugcugggccugg

SEQ ID NO: 579316 - RNA, 23 nt, Human
ccagggccccuacaccacugucc

SEQ ID NO: 579317 - RNA, 22 nt, Human
gucuccagauauccuacacaac

SEQ ID NO: 579318 - RNA, 20 nt, Human
aagcacauuucuacaauaau

SEQ ID NO: 579319 - RNA, 22 nt, Human
gcugucccaugguugcaagaug

SEQ ID NO: 579320 - RNA, 22 nt, Human
ugaaugauacagaauuauguag

SEQ ID NO: 579321 - RNA, 18 nt, Human
agggcugaugaguuuggg

SEQ ID NO: 579322 - RNA, 22 nt, Human
uuuaaauguguucuuaguagcu

SEQ ID NO: 579323 - RNA, 22 nt, Human
caaauagugaaacagauggggg

SEQ ID NO: 579324 - RNA, 22 nt, Human
aaguuacagucugcuugcugac

SEQ ID NO: 579325 - RNA, 22 nt, Human
acagagcaugcucaguguguga

SEQ ID NO: 579326 - RNA, 22 nt, Human
agucacaguucugcugucugag

SEQ ID NO: 579327 - RNA, 22 nt, Human
gaggggcugcccuggugucagg

SEQ ID NO: 579328 - RNA, 23 nt, Human
uggccucuccccaccuggcagaa

SEQ ID NO: 579329 - RNA, 22 nt, Human
ugugaaaucugaugaauugacc

SEQ ID NO: 579330 - RNA, 22 nt, Human
ggccaccucugcccuacugagu

SEQ ID NO: 579331 - RNA, 22 nt, Human
gcuuccuggagggagagagcug

SEQ ID NO: 579332 - RNA, 22 nt, Human
uccagcauuagaugugaaauug

SEQ ID NO: 579333 - RNA, 22 nt, Human
agagaaacaggucagcugggag

SEQ ID NO: 579334 - RNA, 22 nt, Human
ugugaaaaaaguucuagaagga

SEQ ID NO: 579335 - RNA, 22 nt, Human
gcagagcugucuaagucacuuc

SEQ ID NO: 579336 - RNA, 22 nt, Human
ggcuccuguuauuuaaugagga

SEQ ID NO: 579337 - RNA, 22 nt, Human
caagauuuggcaacuuugucau

SEQ ID NO: 579338 - RNA, 21 nt, Human
uccacucguauucuguuggca

SEQ ID NO: 579339 - RNA, 22 nt, Human
ucagcugccucucccuggaaga

SEQ ID NO: 579340 - RNA, 22 nt, Human
ugauucaucagaauaggaguuu

SEQ ID NO: 579341 - RNA, 22 nt, Human
uguuuucuucuguaccgugcca

SEQ ID NO: 579342 - RNA, 22 nt, Human
cugaaacuacaguaaggagaac

SEQ ID NO: 579343 - RNA, 22 nt, Human
cccacuccuggagcuagggcuc

SEQ ID NO: 579344 - RNA, 22 nt, Human
gccuucaggaaaucaguccuug

SEQ ID NO: 579345 - RNA, 22 nt, Human
uuacaagugucagguacuggca

SEQ ID NO: 579346 - RNA, 22 nt, Human
caagcaaugcccugguauauua

SEQ ID NO: 579347 - RNA, 22 nt, Human
ugaauccuaauucuaucacuua

SEQ ID NO: 579348 - RNA, 22 nt, Human
uaaagcaaggaauagaguaguc

SEQ ID NO: 579349 - RNA, 22 nt, Human
agagguucagagaaggcgaucu

SEQ ID NO: 579350 - RNA, 22 nt, Human
ccuggcuuuuguuuauaaauuc

SEQ ID NO: 579351 - RNA, 22 nt, Human
uccaguuucauagcuaaggaac

SEQ ID NO: 579352 - RNA, 22 nt, Human
uuaagaggagaucauacuggag

SEQ ID NO: 579353 - RNA, 22 nt, Human
aaacuguagugcuucgaucuga

SEQ ID NO: 579354 - RNA, 22 nt, Human
auuuauugagagggaggggaau

SEQ ID NO: 579355 - RNA, 22 nt, Human
ccugaggagauuguggcugggg

SEQ ID NO: 579356 - RNA, 22 nt, Human
ucuccuggagcaggaagguggg

SEQ ID NO: 579357 - RNA, 22 nt, Human
guggagcccugccuugcucaug

SEQ ID NO: 579358 - RNA, 22 nt, Human
ucugaaagcuagaaaaugcucu

SEQ ID NO: 579359 - RNA, 22 nt, Human
ucccacagugaaguucaugaua

SEQ ID NO: 579360 - RNA, 22 nt, Human
cuuaaaaguugcuucccuaacu

SEQ ID NO: 579361 - RNA, 22 nt, Human
auggcuggaggccgggcuuccu

SEQ ID NO: 579362 - RNA, 22 nt, Human
uuucacaggauucugauguagu

SEQ ID NO: 579363 - RNA, 22 nt, Human
ugucuucacaaagcagaaggga

SEQ ID NO: 579364 - RNA, 22 nt, Human
uauuguaucuucuguuuagaag

SEQ ID NO: 579365 - RNA, 22 nt, Human
accuguggaucagauucuugua

SEQ ID NO: 579366 - RNA, 22 nt, Human
gugcaggagguaacauagcaaa

SEQ ID NO: 579367 - RNA, 22 nt, Human
gcaguuaaaaauaaaccuucau

SEQ ID NO: 579368 - RNA, 22 nt, Human
guccuauauucuuuuaaaauuu

SEQ ID NO: 579369 - RNA, 22 nt, Human
uccugcaggggcugaggaacca

SEQ ID NO: 579370 - RNA, 22 nt, Human
aauaguagucgccuuuuguaag

SEQ ID NO: 579371 - RNA, 22 nt, Human
acaguaaacaaugcagcaaauu

SEQ ID NO: 579372 - RNA, 22 nt, Human
uuuauguuugcauuuucaaaga

SEQ ID NO: 579373 - RNA, 22 nt, Human
uauuucuugaguggucaguuuc

SEQ ID NO: 579374 - RNA, 22 nt, Human
agccucugcacgggcacgggug

SEQ ID NO: 579375 - RNA, 22 nt, Human
gcuccuggugcuguagagauuu

SEQ ID NO: 579376 - RNA, 23 nt, Human
agggaaauacugcaauuuuugga

SEQ ID NO: 579377 - RNA, 22 nt, Human
auucuagcagauauuggaaauu

SEQ ID NO: 579378 - RNA, 22 nt, Human
caugugcuguagcagagaggaa

SEQ ID NO: 579379 - RNA, 20 nt, Human
ucugagacuuguagugugga

SEQ ID NO: 579380 - RNA, 22 nt, Human
aaaacauaaacugacagcccau

SEQ ID NO: 579381 - RNA, 22 nt, Human
aggaggugagcggucauguggu

SEQ ID NO: 579382 - RNA, 22 nt, Human
ggcagagguagcuggaaccagg

SEQ ID NO: 579383 - RNA, 22 nt, Human
aaaugguguuucuaaugcuaga

SEQ ID NO: 579384 - RNA, 22 nt, Human
gaggcucuucaauaggucaaug

SEQ ID NO: 579385 - RNA, 22 nt, Human
agcagaggaggauuuaguuagg

SEQ ID NO: 579386 - RNA, 22 nt, Human
accuggagauccauggugucga

SEQ ID NO: 579387 - RNA, 22 nt, Human
uuugugucgucacugucuucuc

SEQ ID NO: 579388 - RNA, 19 nt, Human
cagcucaggacucagcccc

SEQ ID NO: 579389 - RNA, 22 nt, Human
ugggcccaucauugcugugggc

SEQ ID NO: 579390 - RNA, 22 nt, Human
ugugggaggucuggaaggcucc

SEQ ID NO: 579391 - RNA, 22 nt, Human
cuucugugcuaaaugcaaaacc

SEQ ID NO: 579392 - RNA, 22 nt, Human
ccacugccgugggccuugggga

SEQ ID NO: 579393 - RNA, 22 nt, Human
gccugcccugaaagaggugaag

SEQ ID NO: 579394 - RNA, 22 nt, Human
cuauguucucggcacuauggau

SEQ ID NO: 579395 - RNA, 22 nt, Human
gcuccaggagagggaagcagau

SEQ ID NO: 579396 - RNA, 22 nt, Human
aagagacuaagaaagggcaaua

SEQ ID NO: 579397 - RNA, 22 nt, Human
aucugguuuuggcugugucccu

SEQ ID NO: 579398 - RNA, 22 nt, Human
agcuggagaauaggaauuagug

SEQ ID NO: 579399 - RNA, 22 nt, Human
uuugcaaauaaauaagugcucg

SEQ ID NO: 579400 - RNA, 22 nt, Human
uuggagggacagauggcuaggc

SEQ ID NO: 579401 - RNA, 22 nt, Human
cagagccugccucuggcugugg

SEQ ID NO: 579402 - RNA, 22 nt, Human
aggaccugagaguuggaaaucc

SEQ ID NO: 579403 - RNA, 22 nt, Human
gcuauguuagacauucucauuu

SEQ ID NO: 579404 - RNA, 22 nt, Human
ugcaugaggacucagagcuucu

SEQ ID NO: 579405 - RNA, 19 nt, Human
ggagcuugguggcuguggc

SEQ ID NO: 579406 - RNA, 22 nt, Human
uuugcugugaauccauuacugu

SEQ ID NO: 579407 - RNA, 22 nt, Human
guuguuuugcugucugucuuag

SEQ ID NO: 579408 - RNA, 22 nt, Human
cgagcaugaugacggcuguggc

SEQ ID NO: 579409 - RNA, 22 nt, Human
uggagcugagaaguggagcucu

SEQ ID NO: 579410 - RNA, 22 nt, Human
auugcacuuuccccugugagaa

SEQ ID NO: 579411 - RNA, 22 nt, Human
aaagcucacaguaauacaaggc

SEQ ID NO: 579412 - RNA, 22 nt, Human
uccuuuaugugaguuguuuccc

SEQ ID NO: 579413 - RNA, 22 nt, Human
uggcuucuagcaguguugauuu

SEQ ID NO: 579414 - RNA, 22 nt, Human
acauuucagugagcuauugaag

SEQ ID NO: 579415 - RNA, 22 nt, Human
gucccagaggacagggucacau

SEQ ID NO: 579416 - RNA, 22 nt, Human
agccagcacggcgccauggagu

SEQ ID NO: 579417 - RNA, 21 nt, Human
uccucuccaugaucuguuugu

SEQ ID NO: 579418 - RNA, 22 nt, Human
cuuaagagucuuucuguguuua

SEQ ID NO: 579419 - RNA, 22 nt, Human
uaacaugagagcuaagacauua

SEQ ID NO: 579420 - RNA, 22 nt, Human
uagggcuguuuaaaagugaggu

SEQ ID NO: 579421 - RNA, 18 nt, Human
ggccucagccuggccgga

SEQ ID NO: 579422 - RNA, 22 nt, Human
guuucuguugcucagauaaugc

SEQ ID NO: 579423 - RNA, 22 nt, Human
uccaggcucuaggcugcucucc

SEQ ID NO: 579424 - RNA, 22 nt, Human
gagaacaggcucuggagucaga

SEQ ID NO: 579425 - RNA, 22 nt, Human
agcuguaauauaagcaaugaaa

SEQ ID NO: 579426 - RNA, 22 nt, Human
ccugggaagucagccaaggacg

SEQ ID NO: 579427 - RNA, 22 nt, Human
auaagagucuuguuuucuuauu

SEQ ID NO: 579428 - RNA, 22 nt, Human
ucugacaauaacugaguuuaac

SEQ ID NO: 579429 - RNA, 22 nt, Human
aaggcaauguaaauuacagcuu

SEQ ID NO: 579430 - RNA, 22 nt, Human
ccugccugauuccaggauggcu

SEQ ID NO: 579431 - RNA, 22 nt, Human
uuaugagacuguuuuacacacu

SEQ ID NO: 579432 - RNA, 22 nt, Human
ggcagacaccuuuaugucuaau

SEQ ID NO: 579433 - RNA, 22 nt, Human
gcuggagaaacugcagcugagg

SEQ ID NO: 579434 - RNA, 19 nt, Human
ucugggcagggccagcacc

SEQ ID NO: 579435 - RNA, 22 nt, Human
ugggaagauaugagugaccaac

SEQ ID NO: 579436 - RNA, 22 nt, Human
cccuuagcuccaagggguuugg

SEQ ID NO: 579437 - RNA, 22 nt, Human
cugugcugcagacgcaguagcu

SEQ ID NO: 579438 - RNA, 22 nt, Human
cagggacaauggcagagccuga

SEQ ID NO: 579439 - RNA, 22 nt, Human
gcuggagagauaggcauggggu

SEQ ID NO: 579440 - RNA, 22 nt, Human
ugcucugguaacucacuuccau

SEQ ID NO: 579441 - RNA, 22 nt, Human
caaugguggugucagaagagau

SEQ ID NO: 579442 - RNA, 22 nt, Human
uucagaaaucgaguuucauguc

SEQ ID NO: 579443 - RNA, 22 nt, Human
guauuuuaagugacuacuaggu

SEQ ID NO: 579444 - RNA, 23 nt, Human
aauuacaaccaagaacuggaagg

SEQ ID NO: 579445 - RNA, 22 nt, Human
accucuuugaaccucaguguga

SEQ ID NO: 579446 - RNA, 22 nt, Human
auaaauguuuguugaaugaaua

SEQ ID NO: 579447 - RNA, 22 nt, Human
ucacugaauacuugucucaucc

SEQ ID NO: 579448 - RNA, 22 nt, Human
auuccauucuugcuuuugaucu

SEQ ID NO: 579449 - RNA, 22 nt, Human
ccuucuggaugugcuaaggaag

SEQ ID NO: 579450 - RNA, 22 nt, Human
ccaaguguuuuauaagggacag

SEQ ID NO: 579451 - RNA, 22 nt, Human
gcaguguuuuucaaugcuucca

SEQ ID NO: 579452 - RNA, 22 nt, Human
aaggccagcaguuugagaccag

SEQ ID NO: 579453 - RNA, 21 nt, Human
agccagcuaucacacagcauu

SEQ ID NO: 579454 - RNA, 22 nt, Human
gccugggagggcagcagugugg

SEQ ID NO: 579455 - RNA, 23 nt, Human
gaauucuuaaggucacuaaaguc

SEQ ID NO: 579456 - RNA, 22 nt, Human
ucuugaaaguaucuuauuuugu

SEQ ID NO: 579457 - RNA, 21 nt, Human
aaucauacaaaacaugucagg

SEQ ID NO: 579458 - RNA, 22 nt, Human
uuuaagaguuaaacuuugaccu

SEQ ID NO: 579459 - RNA, 22 nt, Human
augcauaaagaaagcuaucugg

SEQ ID NO: 579460 - RNA, 22 nt, Human
aagagcuggauugugcugcaga

SEQ ID NO: 579461 - RNA, 22 nt, Human
cuuaaggaaaagucucuuuuaa

SEQ ID NO: 579462 - RNA, 22 nt, Human
gggcagagaaauggacaguugg

SEQ ID NO: 579463 - RNA, 22 nt, Human
gaagaacugugacagaagcagu

SEQ ID NO: 579464 - RNA, 18 nt, Human
gggcaagcggcugucacc

SEQ ID NO: 579465 - RNA, 22 nt, Human
aauaaaguagcguuuaaggugc

SEQ ID NO: 579466 - RNA, 22 nt, Human
caugcaaaauguauuuuauuag

SEQ ID NO: 579467 - RNA, 16 nt, Human
cuuuuucuccccucuu

SEQ ID NO: 579468 - RNA, 22 nt, Human
cauuuacuuaaaucuuuacaag

SEQ ID NO: 579469 - RNA, 21 nt, Human
ggccugagcaccuguccaccu

SEQ ID NO: 579470 - RNA, 22 nt, Human
ggcuuaaaaggaaaaugagagu

SEQ ID NO: 579471 - RNA, 22 nt, Human
cauuacaaccccaaauuacaaa

SEQ ID NO: 579472 - RNA, 22 nt, Human
auguacauguuuaagugaagga

SEQ ID NO: 579473 - RNA, 21 nt, Human
gguugguguguccaguggcca

SEQ ID NO: 579474 - RNA, 22 nt, Human
ugcccucagcagcagcuccugc

SEQ ID NO: 579475 - RNA, 22 nt, Human
cucucccuaugccucccaggag

SEQ ID NO: 579476 - RNA, 22 nt, Human
aguccaggcggguauagaggcu

SEQ ID NO: 579477 - RNA, 22 nt, Human
acaggcugccuaccaaguauca

SEQ ID NO: 579478 - RNA, 22 nt, Human
agaggccaguggcugugcuguc

SEQ ID NO: 579479 - RNA, 21 nt, Human
ggcagcugaccgcgcggugca

SEQ ID NO: 579480 - RNA, 22 nt, Human
ugggguucuuuguuuccugccu

SEQ ID NO: 579481 - RNA, 22 nt, Human
gugcaguggcagauccuagcuc

SEQ ID NO: 579482 - RNA, 22 nt, Human
uuccugagaacauggcagcuua

SEQ ID NO: 579483 - RNA, 22 nt, Human
uacacagaggcugaugucuuag

SEQ ID NO: 579484 - RNA, 22 nt, Human
uuuggucuggaaucuucagggu

SEQ ID NO: 579485 - RNA, 22 nt, Human
gggacgggcaguccaagggguc

SEQ ID NO: 579486 - RNA, 22 nt, Human
augcuuaacuuccuagucuaua

SEQ ID NO: 579487 - RNA, 22 nt, Human
caacuuuugacacgugugcuaa

SEQ ID NO: 579488 - RNA, 22 nt, Human
agaguuuggugaagcaauuuga

SEQ ID NO: 579489 - RNA, 22 nt, Human
agaagcagacucugaggcaagg

SEQ ID NO: 579490 - RNA, 22 nt, Human
aggcacaggaaugucauccagu

SEQ ID NO: 579491 - RNA, 22 nt, Human
ccugggcuguugcaucauccuu

SEQ ID NO: 579492 - RNA, 22 nt, Human
ggucagcagugcagggcagagc

SEQ ID NO: 579493 - RNA, 22 nt, Human
gagggugggcuuuguuccucca

SEQ ID NO: 579494 - RNA, 20 nt, Human
agcuucaggcucaagagaac

SEQ ID NO: 579495 - RNA, 22 nt, Human
ccugggagcuguggaaaggcug

SEQ ID NO: 579496 - RNA, 22 nt, Human
cuuagcaugugguguccuugua

SEQ ID NO: 579497 - RNA, 22 nt, Human
agacaggacacaagcugcauaa

SEQ ID NO: 579498 - RNA, 22 nt, Human
ggggaagggaguccaaguguua

SEQ ID NO: 579499 - RNA, 22 nt, Human
ucauuuuuuuccgguaggaaua

SEQ ID NO: 579500 - RNA, 22 nt, Human
ucuagucauauuuuuucaguau

SEQ ID NO: 579501 - RNA, 22 nt, Human
cccaggcugucuguccuuugcu

SEQ ID NO: 579502 - RNA, 22 nt, Human
ggagauggaguggauucagcag

SEQ ID NO: 579503 - RNA, 22 nt, Human
gauaauuugauaccucaaucag

SEQ ID NO: 579504 - RNA, 22 nt, Human
guacccaggcacgccuugcuga

SEQ ID NO: 579505 - RNA, 22 nt, Human
cuccuuccugguuagcaccuua

SEQ ID NO: 579506 - RNA, 22 nt, Human
gcccaggggcagcgcauagugg

SEQ ID NO: 579507 - RNA, 20 nt, Human
ucuuccagguacagucugca

SEQ ID NO: 579508 - RNA, 22 nt, Human
uggcaggguuggccaccuuacc

SEQ ID NO: 579509 - RNA, 22 nt, Human
caggugaaaaagcaaccauauu

SEQ ID NO: 579510 - RNA, 22 nt, Human
ucuguugcauaugcugcugggu

SEQ ID NO: 579511 - RNA, 22 nt, Human
aaaguguugauuuuauagugca

SEQ ID NO: 579512 - RNA, 22 nt, Human
aggugcugccccgagaaggaug

SEQ ID NO: 579513 - RNA, 22 nt, Human
gagagaaaggauaacagcucaa

SEQ ID NO: 579514 - RNA, 22 nt, Human
uagaaaggauauugagaugaau

SEQ ID NO: 579515 - RNA, 22 nt, Human
aaguuacaguuaugaaacucac

SEQ ID NO: 579516 - RNA, 22 nt, Human
ugcuuucauauugccuaugacu

SEQ ID NO: 579517 - RNA, 19 nt, Human
uucucuauuaugucuucuc

SEQ ID NO: 579518 - RNA, 20 nt, Human
uguggaaaaacagaagcaga

SEQ ID NO: 579519 - RNA, 22 nt, Human
cccugagccacacagagcaggu

SEQ ID NO: 579520 - RNA, 22 nt, Human
gcccaagaucuggagcugcagg

SEQ ID NO: 579521 - RNA, 22 nt, Human
cagcugugaauugucuuaucua

SEQ ID NO: 579522 - RNA, 22 nt, Human
uguccuuuuucuuaggaaauau

SEQ ID NO: 579523 - RNA, 22 nt, Human
uccuggugaaugacuuuuuauu

SEQ ID NO: 579524 - RNA, 22 nt, Human
ugcugccugguuucuucuugcu

SEQ ID NO: 579525 - RNA, 22 nt, Human
cugcagagcuuucugaaugaag

SEQ ID NO: 579526 - RNA, 22 nt, Human
caggcuuuacuuucucucugaa

SEQ ID NO: 579527 - RNA, 22 nt, Human
cugggaugggaacugagaauca

SEQ ID NO: 579528 - RNA, 22 nt, Human
aguuaacuaaacugugaguaaa

SEQ ID NO: 579529 - RNA, 20 nt, Human
cagugaggaggugcuggggg

SEQ ID NO: 579530 - RNA, 22 nt, Human
uaaugccuuaugucaaauguaa

SEQ ID NO: 579531 - RNA, 20 nt, Human
aggggccuggaacaggccuu

SEQ ID NO: 579532 - RNA, 22 nt, Human
auuauauugaguauaaccagag

SEQ ID NO: 579533 - RNA, 22 nt, Human
cugcaggggccucgagcacagg

SEQ ID NO: 579534 - RNA, 23 nt, Human
cugaagcaguucccucucugccc

SEQ ID NO: 579535 - RNA, 22 nt, Human
gugccagcaguuauggugauuu

SEQ ID NO: 579536 - RNA, 22 nt, Human
agugcuggguacuguucccauu

SEQ ID NO: 579537 - RNA, 22 nt, Human
uccuuucugucuuuacucugga

SEQ ID NO: 579538 - RNA, 22 nt, Human
aguacaaacuguuucaaaguag

SEQ ID NO: 579539 - RNA, 22 nt, Human
aaaucucugaacuuaauaaugc

SEQ ID NO: 579540 - RNA, 22 nt, Human
aauguuuucccagugcagacga

SEQ ID NO: 579541 - RNA, 22 nt, Human
ucagaacauguuugaguaagac

SEQ ID NO: 579542 - RNA, 22 nt, Human
caggccacacggcggcucccug

SEQ ID NO: 579543 - RNA, 22 nt, Human
cacugccauguugauagaugug

SEQ ID NO: 579544 - RNA, 22 nt, Human
ggagcuggccgccuaugugcag

SEQ ID NO: 579545 - RNA, 19 nt, Human
gggaaauucacuugcuucc

SEQ ID NO: 579546 - RNA, 22 nt, Human
uacauauagacaguuacucuag

SEQ ID NO: 579547 - RNA, 22 nt, Human
gcugcaggcucugcaggaauug

SEQ ID NO: 579548 - RNA, 22 nt, Human
cauuaaacaaccuugaaucaau

SEQ ID NO: 579549 - RNA, 22 nt, Human
agacagacguagugugagagua

SEQ ID NO: 579550 - RNA, 22 nt, Human
ucauuuacacuucacaaaugga

SEQ ID NO: 579551 - RNA, 23 nt, Human
gcagacagagcagacuaagacaa

SEQ ID NO: 579552 - RNA, 22 nt, Human
aaaagcaguuaucugggaggaa

SEQ ID NO: 579553 - RNA, 22 nt, Human
ugggcucauggcccagcacugg

SEQ ID NO: 579554 - RNA, 18 nt, Human
ugaggcagucagugaugg

SEQ ID NO: 579555 - RNA, 22 nt, Human
aaucuucacagaaaaaugucug

SEQ ID NO: 579556 - RNA, 22 nt, Human
agaaaugaaaccaaagccuaga

SEQ ID NO: 579557 - RNA, 22 nt, Human
gccacaggcacuuaagggcugg

SEQ ID NO: 579558 - RNA, 22 nt, Human
aguguuauaaaggccaaguuuu

SEQ ID NO: 579559 - RNA, 22 nt, Human
gcaggccacugucuccucuggg

SEQ ID NO: 579560 - RNA, 22 nt, Human
aaucuucacucuuaacugugca

SEQ ID NO: 579561 - RNA, 22 nt, Human
aaagauacuuaauaguugucug

SEQ ID NO: 579562 - RNA, 22 nt, Human
caggcagaaauuuuguuucauu

SEQ ID NO: 579563 - RNA, 22 nt, Human
aagagcuggucacagguccauu

SEQ ID NO: 579564 - RNA, 22 nt, Human
cugugcccaggcuggagugcag

SEQ ID NO: 579565 - RNA, 20 nt, Human
uggcaggaauagggccagag

SEQ ID NO: 579566 - RNA, 19 nt, Human
ccuagagggaaggcaggac

SEQ ID NO: 579567 - RNA, 22 nt, Human
agugcucuaacagucaaaaaag

SEQ ID NO: 579568 - RNA, 21 nt, Human
uguucaaacguacacauuucu

SEQ ID NO: 579569 - RNA, 22 nt, Human
uucuugcucaaugucuguuuaa

SEQ ID NO: 579570 - RNA, 22 nt, Human
ugaggagaaaugcucagagcca

SEQ ID NO: 579571 - RNA, 22 nt, Human
aaucacuuuucucuaauguagc

SEQ ID NO: 579572 - RNA, 22 nt, Human
ccugggcagguguggcuucccc

SEQ ID NO: 579573 - RNA, 22 nt, Human
gcaggcugaaacucggggucua

SEQ ID NO: 579574 - RNA, 22 nt, Human
gacuuggggauuuaucucacag

SEQ ID NO: 579575 - RNA, 22 nt, Human
ucucuucuaacacuagaaauuc

SEQ ID NO: 579576 - RNA, 22 nt, Human
aaaggaagaugccaggacucug

SEQ ID NO: 579577 - RNA, 22 nt, Human
agucacugguucuguaauuaau

SEQ ID NO: 579578 - RNA, 19 nt, Human
gcagcaguggaaggaaaaa

SEQ ID NO: 579579 - RNA, 21 nt, Human
ucaggggcuguguuuuccauc

SEQ ID NO: 579580 - RNA, 19 nt, Human
agugagcauccagagaggu

SEQ ID NO: 579581 - RNA, 22 nt, Human
aggugaaguugaggaggcagaa

SEQ ID NO: 579582 - RNA, 22 nt, Human
uucucuuauucuggauaugcag

SEQ ID NO: 579583 - RNA, 22 nt, Human
cuggaguguaaagagcauagaa

SEQ ID NO: 579584 - RNA, 19 nt, Human
gaguuauugccagggcaug

SEQ ID NO: 579585 - RNA, 22 nt, Human
ccaaggcuccucagcuggucuu

SEQ ID NO: 579586 - RNA, 22 nt, Human
caccugagcacuggggccgccc

SEQ ID NO: 579587 - RNA, 22 nt, Human
ccaaggcuggagugcaguggcg

SEQ ID NO: 579588 - RNA, 22 nt, Human
uuguauuucuccacuuucuguu

SEQ ID NO: 579589 - RNA, 22 nt, Human
cuggagcugccagggcugccgc

SEQ ID NO: 579590 - RNA, 22 nt, Human
augaagcagaauuucccacucu

SEQ ID NO: 579591 - RNA, 19 nt, Human
caggauuguuuaaagcuuu

SEQ ID NO: 579592 - RNA, 22 nt, Human
uuuaucuguuguaccugcauug

SEQ ID NO: 579593 - RNA, 22 nt, Human
ugaggcacuccaggaugcuguu

SEQ ID NO: 579594 - RNA, 22 nt, Human
aauuuucacagugcugugagau

SEQ ID NO: 579595 - RNA, 22 nt, Human
uuugugcagcuaagaaaauggc

SEQ ID NO: 579596 - RNA, 22 nt, Human
uccauacauaaaauguuuaaug

SEQ ID NO: 579597 - RNA, 22 nt, Human
uuacucagucucccauacauug

SEQ ID NO: 579598 - RNA, 22 nt, Human
ugccucagagaccugacaguac

SEQ ID NO: 579599 - RNA, 22 nt, Human
uuuuauugucaaugaagacaga

SEQ ID NO: 579600 - RNA, 22 nt, Human
acuuucaagcccucuagagaca

SEQ ID NO: 579601 - RNA, 22 nt, Human
cccauuuugcuuaugcugcugu

SEQ ID NO: 579602 - RNA, 22 nt, Human
ccuguguguaggccaggggagu

SEQ ID NO: 579603 - RNA, 22 nt, Human
guuuccagccuagagaugguga

SEQ ID NO: 579604 - RNA, 22 nt, Human
aagcagcuuccccaaagugccu

SEQ ID NO: 579605 - RNA, 22 nt, Human
uggggguccuccucugcuuaag

SEQ ID NO: 579606 - RNA, 22 nt, Human
ugagcuguaaggcugucacuga

SEQ ID NO: 579607 - RNA, 22 nt, Human
uggaauacuguaaagaaaaauc

SEQ ID NO: 579608 - RNA, 22 nt, Human
acaggcaggcuucggccagagc

SEQ ID NO: 579609 - RNA, 22 nt, Human
gauauuuucagucuccuuucaa

SEQ ID NO: 579610 - RNA, 22 nt, Human
gaggccaaguuggagaccaggu

SEQ ID NO: 579611 - RNA, 22 nt, Human
agaggcugugcccaccaggcaa

SEQ ID NO: 579612 - RNA, 22 nt, Human
ccugggagagccaucuguggcc

SEQ ID NO: 579613 - RNA, 23 nt, Human
cagggccaggcagcagcugucac

SEQ ID NO: 579614 - RNA, 22 nt, Human
ucuggaguggaggugccuuggg

SEQ ID NO: 579615 - RNA, 22 nt, Human
cuuagaauaaaagggggcuaua

SEQ ID NO: 579616 - RNA, 22 nt, Human
cagacuggccacaucugcacug

SEQ ID NO: 579617 - RNA, 22 nt, Human
uguauuuucagaguggcauuuc

SEQ ID NO: 579618 - RNA, 22 nt, Human
gcagaggagugauuaugccgug

SEQ ID NO: 579619 - RNA, 22 nt, Human
uggcagcugagugcacccccuc

SEQ ID NO: 579620 - RNA, 22 nt, Human
cagugggcugugauggauucac

SEQ ID NO: 579621 - RNA, 17 nt, Human
uuguguguaguucugau

SEQ ID NO: 579622 - RNA, 22 nt, Human
gggcuucugggcaccacucccu

SEQ ID NO: 579623 - RNA, 21 nt, Human
agcuggcucucucuggagaga

SEQ ID NO: 579624 - RNA, 22 nt, Human
uuacaagauaugugagaacuag

SEQ ID NO: 579625 - RNA, 22 nt, Human
cucucuuucauuggucgccuug

SEQ ID NO: 579626 - RNA, 22 nt, Human
acacaguaaauauugucuccuc

SEQ ID NO: 579627 - RNA, 22 nt, Human
ugagaugggaugugcacuuggc

SEQ ID NO: 579628 - RNA, 22 nt, Human
agugaagcccauuuuuagcugu

SEQ ID NO: 579629 - RNA, 22 nt, Human
ugagguaggcuugagaugggag

SEQ ID NO: 579630 - RNA, 21 nt, Human
gggaaacucugcuuaacagag

SEQ ID NO: 579631 - RNA, 22 nt, Human
acacauguauaugcuugugugu

SEQ ID NO: 579632 - RNA, 22 nt, Human
agggugcauguuugcaagagug

SEQ ID NO: 579633 - RNA, 23 nt, Human
acugccugcuacuaugcccacgg

SEQ ID NO: 579634 - RNA, 22 nt, Human
ugagagcugcugagacuguccu

SEQ ID NO: 579635 - RNA, 22 nt, Human
ccccugccagcuaucccugaac

SEQ ID NO: 579636 - RNA, 22 nt, Human
gccagcucucauuguauaggcu

SEQ ID NO: 579637 - RNA, 22 nt, Human
agccagguuaaaccacagucaa

SEQ ID NO: 579638 - RNA, 22 nt, Human
cugccucaugcugccugcagcc

SEQ ID NO: 579639 - RNA, 22 nt, Human
gaguucucaagcaaucaaagag

SEQ ID NO: 579640 - RNA, 22 nt, Human
uagcuuugcuggcaagcauguc

SEQ ID NO: 579641 - RNA, 22 nt, Human
auaucauuauguuaugagcaca

SEQ ID NO: 579642 - RNA, 22 nt, Human
uagagcuauuuagagcauuuua

SEQ ID NO: 579643 - RNA, 22 nt, Human
cuggcuuugguccccugugccu

SEQ ID NO: 579644 - RNA, 23 nt, Human
cuuuaaugaaauucucugugaag

SEQ ID NO: 579645 - RNA, 22 nt, Human
gcaauaaaauguaaugauuggg

SEQ ID NO: 579646 - RNA, 22 nt, Human
aagccagauagaagaacucauu

SEQ ID NO: 579647 - RNA, 22 nt, Human
caguggguggcuaaguggcuga

SEQ ID NO: 579648 - RNA, 21 nt, Human
aacaugauauguguauggauu

SEQ ID NO: 579649 - RNA, 22 nt, Human
cuggcugacaccuugauagcag

SEQ ID NO: 579650 - RNA, 22 nt, Human
caucacugucaccaucuuuccu

SEQ ID NO: 579651 - RNA, 22 nt, Human
cucaggaggccauucucaaggu

SEQ ID NO: 579652 - RNA, 22 nt, Human
aauuauggugugugguuaaggg

SEQ ID NO: 579653 - RNA, 22 nt, Human
cauuuguugggacaaugaaaag

SEQ ID NO: 579654 - RNA, 22 nt, Human
aacugcuuagugauggaugacc

SEQ ID NO: 579655 - RNA, 22 nt, Human
ucugagcauaugcagcaccugg

SEQ ID NO: 579656 - RNA, 23 nt, Human
aggauguaggauguauggcagag

SEQ ID NO: 579657 - RNA, 22 nt, Human
gugucagaaacaggaaggggaa

SEQ ID NO: 579658 - RNA, 22 nt, Human
aaggcagucaaagcagacuucu

SEQ ID NO: 579659 - RNA, 22 nt, Human
ccuuccuggagcccaugcagau

SEQ ID NO: 579660 - RNA, 22 nt, Human
acuguguccucauguggcagaa

SEQ ID NO: 579661 - RNA, 22 nt, Human
caggcucuuccauccugcugag

SEQ ID NO: 579662 - RNA, 22 nt, Human
ugagaggugaggcaugaggcau

SEQ ID NO: 579663 - RNA, 22 nt, Human
aaaaagacagaggaugaggcag

SEQ ID NO: 579664 - RNA, 22 nt, Human
gccagccauaggccagcacugg

SEQ ID NO: 579665 - RNA, 22 nt, Human
aggggaagauuauacuuuugaa

SEQ ID NO: 579666 - RNA, 22 nt, Human
agagcauccauuuuugucacau

SEQ ID NO: 579667 - RNA, 22 nt, Human
ccagcucugccaagcgucagcu

SEQ ID NO: 579668 - RNA, 22 nt, Human
gagcugaauugaagcaaggagc

SEQ ID NO: 579669 - RNA, 22 nt, Human
uguccuuaucuccaaacaauca

SEQ ID NO: 579670 - RNA, 22 nt, Human
uuccugguccuauuauauacac

SEQ ID NO: 579671 - RNA, 22 nt, Human
ucugcaaacccccaucuaucau

SEQ ID NO: 579672 - RNA, 19 nt, Human
uucauaacuuuuauauccu

SEQ ID NO: 579673 - RNA, 22 nt, Human
gggccagcucugugauguaggg

SEQ ID NO: 579674 - RNA, 22 nt, Human
cugaggcaccggcaauguucug

SEQ ID NO: 579675 - RNA, 22 nt, Human
cucccugcuuguuucccuucag

SEQ ID NO: 579676 - RNA, 22 nt, Human
gugcaggugguuggcccagccg

SEQ ID NO: 579677 - RNA, 22 nt, Human
cugaggcagagaaugaguuugu

SEQ ID NO: 579678 - RNA, 22 nt, Human
cugagauggaguuuugcucuug

SEQ ID NO: 579679 - RNA, 22 nt, Human
cagugagcuccugucugucccu

SEQ ID NO: 579680 - RNA, 22 nt, Human
ugucuuuacuuaauaaauauac

SEQ ID NO: 579681 - RNA, 22 nt, Human
uuauaguuaugaaagacugagg

SEQ ID NO: 579682 - RNA, 22 nt, Human
auuucagugagaaagcaaucaa

SEQ ID NO: 579683 - RNA, 22 nt, Human
aggccagcucacccuggcuccu

SEQ ID NO: 579684 - RNA, 22 nt, Human
gucuuucuaugaugaacuguug

SEQ ID NO: 579685 - RNA, 22 nt, Human
cucucuggguccucuuuuauag

SEQ ID NO: 579686 - RNA, 22 nt, Human
ggaccccagagauaccaguuuu

SEQ ID NO: 579687 - RNA, 22 nt, Human
gagacacucaacaaagauauga

SEQ ID NO: 579688 - RNA, 22 nt, Human
gagacacacauucuggagagaa

SEQ ID NO: 579689 - RNA, 22 nt, Human
ucugaggcugcaucuaugugac

SEQ ID NO: 579690 - RNA, 22 nt, Human
agcuccagccgcugauggguuu

SEQ ID NO: 579691 - RNA, 22 nt, Human
uggagagcaaugaggggcaggc

SEQ ID NO: 579692 - RNA, 22 nt, Human
uucugggacauugcagguauuc

SEQ ID NO: 579693 - RNA, 22 nt, Human
uuucaacagaauaugaucagag

SEQ ID NO: 579694 - RNA, 17 nt, Human
agcugccagggagugug

SEQ ID NO: 579695 - RNA, 22 nt, Human
uauucaugagauaggcaguuuu

SEQ ID NO: 579696 - RNA, 22 nt, Human
uauuugcaaagaacuacacuag

SEQ ID NO: 579697 - RNA, 22 nt, Human
uucaaaaugcacaaagggcuag

SEQ ID NO: 579698 - RNA, 22 nt, Human
auuccuaaaguaauacacuaga

SEQ ID NO: 579699 - RNA, 16 nt, Human
caauacauggcauuuc

SEQ ID NO: 579700 - RNA, 22 nt, Human
ggcuagggaaaaugauuggaua

SEQ ID NO: 579701 - RNA, 22 nt, Human
cagcuguucggggcuggcaugu

SEQ ID NO: 579702 - RNA, 22 nt, Human
aagauauucaaagauuuauuag

SEQ ID NO: 579703 - RNA, 22 nt, Human
ugggagcaggugugcuagggaa

SEQ ID NO: 579704 - RNA, 22 nt, Human
uguccuuagggauauaaaauau

SEQ ID NO: 579705 - RNA, 22 nt, Human
uauguguauguacauacauaca

SEQ ID NO: 579706 - RNA, 22 nt, Human
gauguagacacuuggaggcuua

SEQ ID NO: 579707 - RNA, 22 nt, Human
caggcacacagcacauggccug

SEQ ID NO: 579708 - RNA, 20 nt, Human
agugucugggccucaggccc

SEQ ID NO: 579709 - RNA, 22 nt, Human
augaggcagagggcugugccag

SEQ ID NO: 579710 - RNA, 22 nt, Human
ugugaaaugaguauauuugaau

SEQ ID NO: 579711 - RNA, 22 nt, Human
aaaguuuuauaugcugcagcga

SEQ ID NO: 579712 - RNA, 22 nt, Human
acccagaguaacagauggauuc

SEQ ID NO: 579713 - RNA, 20 nt, Human
cugggcugggcuacaggguc

SEQ ID NO: 579714 - RNA, 22 nt, Human
uggcagaggcucugugauguug

SEQ ID NO: 579715 - RNA, 22 nt, Human
uugcagggcuggaacauggaau

SEQ ID NO: 579716 - RNA, 22 nt, Human
agggcagaaguacagacacuua

SEQ ID NO: 579717 - RNA, 22 nt, Human
agcuggcauacuuugcuaggaa

SEQ ID NO: 579718 - RNA, 22 nt, Human
cugcccugccuggccagugugg

SEQ ID NO: 579719 - RNA, 22 nt, Human
uuccaaauguuggacaacugua

SEQ ID NO: 579720 - RNA, 22 nt, Human
aguaaacauaauuuaccuguag

SEQ ID NO: 579721 - RNA, 22 nt, Human
gccagcaguccaguccuuagug

SEQ ID NO: 579722 - RNA, 22 nt, Human
ucuuugaacuuggcugaucucu

SEQ ID NO: 579723 - RNA, 22 nt, Human
augcccaaugucacaauuuuug

SEQ ID NO: 579724 - RNA, 22 nt, Human
agagagcucugaugggagguga

SEQ ID NO: 579725 - RNA, 22 nt, Human
gcagcagaaggccaaggggagc

SEQ ID NO: 579726 - RNA, 22 nt, Human
cagggccaaguuggugccuuuu

SEQ ID NO: 579727 - RNA, 22 nt, Human
ccugcccauacugaccucuaau

SEQ ID NO: 579728 - RNA, 22 nt, Human
ggguuggauuacuuagggagaa

SEQ ID NO: 579729 - RNA, 22 nt, Human
aauaucuguggccauacaauuu

SEQ ID NO: 579730 - RNA, 22 nt, Human
acuguacaacugcugagcagaa

SEQ ID NO: 579731 - RNA, 22 nt, Human
gaagggagaagguugggugacg

SEQ ID NO: 579732 - RNA, 20 nt, Human
uuccucaggagaggauguua

SEQ ID NO: 579733 - RNA, 22 nt, Human
auugugaauagugccgcaguaa

SEQ ID NO: 579734 - RNA, 20 nt, Human
ggaagccagcauccuugagg

SEQ ID NO: 579735 - RNA, 22 nt, Human
guucagauuucaugaguaauug

SEQ ID NO: 579736 - RNA, 22 nt, Human
uguguaaagcuuguuccagaaa

SEQ ID NO: 579737 - RNA, 22 nt, Human
cccaggcagucuggcucuaaag

SEQ ID NO: 579738 - RNA, 23 nt, Human
ugauucugcuuugagaaucaugg

SEQ ID NO: 579739 - RNA, 22 nt, Human
aagaacauguuaaaagauucac

SEQ ID NO: 579740 - RNA, 23 nt, Human
cugcuuucccacuccaugcucuu

SEQ ID NO: 579741 - RNA, 22 nt, Human
uucuccuuuguaauucucaucc

SEQ ID NO: 579742 - RNA, 22 nt, Human
uuccuguuguguuagagucaau

SEQ ID NO: 579743 - RNA, 22 nt, Human
caaauguaauggcagguuuugc

SEQ ID NO: 579744 - RNA, 22 nt, Human
ugcucacagcccagaacauaau

SEQ ID NO: 579745 - RNA, 22 nt, Human
uuaaaaauauguagggcccgau

SEQ ID NO: 579746 - RNA, 19 nt, Human
ggccaggcugacugugguc

SEQ ID NO: 579747 - RNA, 22 nt, Human
cacaggcuugucagcaugaggc

SEQ ID NO: 579748 - RNA, 22 nt, Human
agaggccaggcagcccaaggug

SEQ ID NO: 579749 - RNA, 22 nt, Human
aguaggaugcuuuauaugaaag

SEQ ID NO: 579750 - RNA, 22 nt, Human
ugcuucugaacucagcaugugg

SEQ ID NO: 579751 - RNA, 22 nt, Human
aaaugacagaguaagcuguuua

SEQ ID NO: 579752 - RNA, 22 nt, Human
ugccaucucuuccucgugcugc

SEQ ID NO: 579753 - RNA, 22 nt, Human
ggccucagggucacucuguaga

SEQ ID NO: 579754 - RNA, 22 nt, Human
uucagcacuuuguuuugcucau

SEQ ID NO: 579755 - RNA, 22 nt, Human
cucagaaaggugccauuuaugu

SEQ ID NO: 579756 - RNA, 22 nt, Human
cuccccagcucgcgggugacgg

SEQ ID NO: 579757 - RNA, 22 nt, Human
guuaagccugaaucacauuaau

SEQ ID NO: 579758 - RNA, 18 nt, Human
agguggccugggagcuuu

SEQ ID NO: 579759 - RNA, 22 nt, Human
uccaaaaaacguuugaauaguu

SEQ ID NO: 579760 - RNA, 22 nt, Human
cuggugcaggaaggagcuggca

SEQ ID NO: 579761 - RNA, 20 nt, Human
cuaagagguccuuccacauc

SEQ ID NO: 579762 - RNA, 22 nt, Human
acaauagucaaugcacgucauu

SEQ ID NO: 579763 - RNA, 22 nt, Human
auuccucauuauuuacugagga

SEQ ID NO: 579764 - RNA, 22 nt, Human
cagucuccugggggcuguuguu

SEQ ID NO: 579765 - RNA, 22 nt, Human
gcaggugggggagaaguuguga

SEQ ID NO: 579766 - RNA, 22 nt, Human
auauuucuggggguguguuucu

SEQ ID NO: 579767 - RNA, 22 nt, Human
acuguacuuuucuuggcuagau

SEQ ID NO: 579768 - RNA, 22 nt, Human
ggguugggacugucaucuggag

SEQ ID NO: 579769 - RNA, 22 nt, Human
agcugcaggagucgccuaggau

SEQ ID NO: 579770 - RNA, 22 nt, Human
cugaaaggagagcugcaaggau

SEQ ID NO: 579771 - RNA, 22 nt, Human
agauggaaaauauagacagaga

SEQ ID NO: 579772 - RNA, 22 nt, Human
cagggccaguucucgcagcagu

SEQ ID NO: 579773 - RNA, 22 nt, Human
aggugccagcucucaggcagga

SEQ ID NO: 579774 - RNA, 22 nt, Human
uuuuuaaccuaccuuaagagca

SEQ ID NO: 579775 - RNA, 22 nt, Human
cugggcucagcccaugcugucc

SEQ ID NO: 579776 - RNA, 22 nt, Human
ccaguguggccaggugcuggua

SEQ ID NO: 579777 - RNA, 22 nt, Human
uauguucucugcucuaggaugu

SEQ ID NO: 579778 - RNA, 22 nt, Human
uuaaagcugagcccucagaagc

SEQ ID NO: 579779 - RNA, 22 nt, Human
cuuauugugauaccaugcagua

SEQ ID NO: 579780 - RNA, 22 nt, Human
uagcagggucucaggagucagg

SEQ ID NO: 579781 - RNA, 22 nt, Human
aaggcugacucaacagggggcc

SEQ ID NO: 579782 - RNA, 22 nt, Human
ucagaacaugaagguuaauuug

SEQ ID NO: 579783 - RNA, 22 nt, Human
uggcuucccauagcuugcuagu

SEQ ID NO: 579784 - RNA, 22 nt, Human
agcagcagaucaaacaggcuug

SEQ ID NO: 579785 - RNA, 23 nt, Human
ggagccagccuguggggagcggg

SEQ ID NO: 579786 - RNA, 17 nt, Human
uccaggcagcaacugag

SEQ ID NO: 579787 - RNA, 22 nt, Human
cugggacagcugagacaggaga

SEQ ID NO: 579788 - RNA, 22 nt, Human
uuuaagagcuaguaugucauuu

SEQ ID NO: 579789 - RNA, 22 nt, Human
cuugccucccucagcucacagc

SEQ ID NO: 579790 - RNA, 22 nt, Human
uccaugccaggcagucgaugca

SEQ ID NO: 579791 - RNA, 22 nt, Human
uguggcuguguccaccugcugc

SEQ ID NO: 579792 - RNA, 22 nt, Human
uggccuggcugcccugucugga

SEQ ID NO: 579793 - RNA, 19 nt, Human
uggcagggagugauauuag

SEQ ID NO: 579794 - RNA, 22 nt, Human
uaugcauauagaugcacacaca

SEQ ID NO: 579795 - RNA, 22 nt, Human
aaacugggauucuucacaaggu

SEQ ID NO: 579796 - RNA, 22 nt, Human
gucuuuggagaggugccauuuc

SEQ ID NO: 579797 - RNA, 22 nt, Human
guuuauuggguauuguggagcc

SEQ ID NO: 579798 - RNA, 22 nt, Human
auggaagacagauaaggcagaa

SEQ ID NO: 579799 - RNA, 20 nt, Human
cuccugguccaggagccuga

SEQ ID NO: 579800 - RNA, 22 nt, Human
aguacuuuacuucuuacaguuu

SEQ ID NO: 579801 - RNA, 22 nt, Human
ugugccuuaugaauucuuucug

SEQ ID NO: 579802 - RNA, 22 nt, Human
cagugcagcugccccgcuggua

SEQ ID NO: 579803 - RNA, 22 nt, Human
ucccagcccagauuugugugac

SEQ ID NO: 579804 - RNA, 22 nt, Human
guggaacagccugugcaaaccu

SEQ ID NO: 579805 - RNA, 23 nt, Human
cucugcaggagagugggcagggc

SEQ ID NO: 579806 - RNA, 22 nt, Human
guuaaauucgaugauggauaaa

SEQ ID NO: 579807 - RNA, 22 nt, Human
aguauacugaaaguaaauauga

SEQ ID NO: 579808 - RNA, 22 nt, Human
gcugaaugaauguauuuuaaaa

SEQ ID NO: 579809 - RNA, 22 nt, Human
uugaagcagagaaauacuugaa

SEQ ID NO: 579810 - RNA, 22 nt, Human
ucacauuuuaucugagauugac

SEQ ID NO: 579811 - RNA, 19 nt, Human
ucugccucuggucaggcuc

SEQ ID NO: 579812 - RNA, 22 nt, Human
ucuugagguuauuaagcuguua

SEQ ID NO: 579813 - RNA, 22 nt, Human
ucuccagggcagagaauagcaa

SEQ ID NO: 579814 - RNA, 22 nt, Human
cucaguuuccucaacugcaaaa

SEQ ID NO: 579815 - RNA, 22 nt, Human
uuuauaaccaaguucugcuugu

SEQ ID NO: 579816 - RNA, 17 nt, Human
gagugcugguggagcuc

SEQ ID NO: 579817 - RNA, 22 nt, Human
gggagacuagugcuauguuuuc

SEQ ID NO: 579818 - RNA, 22 nt, Human
cuacaaagcucuucuacaggca

SEQ ID NO: 579819 - RNA, 22 nt, Human
gugggggcaggcagugcuagga

SEQ ID NO: 579820 - RNA, 22 nt, Human
ugugcacaggaagcuauucucu

SEQ ID NO: 579821 - RNA, 22 nt, Human
aaacaaacaauuaguugugugg

SEQ ID NO: 579822 - RNA, 22 nt, Human
cagagagagucugucccugaag

SEQ ID NO: 579823 - RNA, 22 nt, Human
agugcccuggcccagcuggacc

SEQ ID NO: 579824 - RNA, 23 nt, Human
ugagcccaggaggucaaggcugc

SEQ ID NO: 579825 - RNA, 18 nt, Human
agcugguggggagacagc

SEQ ID NO: 579826 - RNA, 22 nt, Human
gucccagggagguucagggcuu

SEQ ID NO: 579827 - RNA, 22 nt, Human
uuccucagcuggccugauuggg

SEQ ID NO: 579828 - RNA, 22 nt, Human
aggaggcucucagguccucccc

SEQ ID NO: 579829 - RNA, 22 nt, Human
cagggcugagaauuuagagaca

SEQ ID NO: 579830 - RNA, 22 nt, Human
aguguuuggggugauuguaacc

SEQ ID NO: 579831 - RNA, 22 nt, Human
uggggacugacagccaggccuc

SEQ ID NO: 579832 - RNA, 22 nt, Human
gagcccaggcagagguugcagu

SEQ ID NO: 579833 - RNA, 17 nt, Human
gcuuccucaugcaguuc

SEQ ID NO: 579834 - RNA, 22 nt, Human
auucauaucauagaguuauuga

SEQ ID NO: 579835 - RNA, 22 nt, Human
uguauauacauacacacaugaa

SEQ ID NO: 579836 - RNA, 22 nt, Human
ucagcugcucaaauuuauguca

SEQ ID NO: 579837 - RNA, 20 nt, Human
ccuuucuggagugcuguuca

SEQ ID NO: 579838 - RNA, 22 nt, Human
agagaaaguaaagauucuaccu

SEQ ID NO: 579839 - RNA, 22 nt, Human
guggcagcagguacucacgcac

SEQ ID NO: 579840 - RNA, 22 nt, Human
agggcugaguggugcagucaaa

SEQ ID NO: 579841 - RNA, 22 nt, Human
uaggcugggcauucuggccagg

SEQ ID NO: 579842 - RNA, 23 nt, Human
ugagaucgcccagcugguaggca

SEQ ID NO: 579843 - RNA, 22 nt, Human
uccacagaauguaagauccaca

SEQ ID NO: 579844 - RNA, 22 nt, Human
caccgcggagugauggagaaac

SEQ ID NO: 579845 - RNA, 22 nt, Human
ggugggcaggucacucugccuc

SEQ ID NO: 579846 - RNA, 22 nt, Human
cacaauaaauguuugcugauga

SEQ ID NO: 579847 - RNA, 22 nt, Human
ucuaagaaaucagaugaugagg

SEQ ID NO: 579848 - RNA, 22 nt, Human
caguguacuuggaauguaacag

SEQ ID NO: 579849 - RNA, 22 nt, Human
uccuaguucucugccagucgcu

SEQ ID NO: 579850 - RNA, 22 nt, Human
augaaacaaaccucuauggagu

SEQ ID NO: 579851 - RNA, 22 nt, Human
acuucuuuucaaaucaugcaaa

SEQ ID NO: 579852 - RNA, 22 nt, Human
guaugucaaaaucugcaugaua

SEQ ID NO: 579853 - RNA, 22 nt, Human
gugagcuguuggaguggcagag

SEQ ID NO: 579854 - RNA, 22 nt, Human
auuccacagcucagccucucuu

SEQ ID NO: 579855 - RNA, 22 nt, Human
acuguggcgucaggaagaaauu

SEQ ID NO: 579856 - RNA, 22 nt, Human
uggugcagaugcaggucacugg

SEQ ID NO: 579857 - RNA, 22 nt, Human
aacaguuuauguaaauguccag

SEQ ID NO: 579858 - RNA, 22 nt, Human
uggaggcauugugacugcugaa

SEQ ID NO: 579859 - RNA, 22 nt, Human
agaaaguuugagaacuguagau

SEQ ID NO: 579860 - RNA, 22 nt, Human
ucuggaguugaaguucuucccc

SEQ ID NO: 579861 - RNA, 20 nt, Human
cuguuaaaagguaugaauuc

SEQ ID NO: 579862 - RNA, 22 nt, Human
uucuaugauucauuuagaaguu

SEQ ID NO: 579863 - RNA, 22 nt, Human
gguuugcacgauauuuccaugg

SEQ ID NO: 579864 - RNA, 22 nt, Human
ggggcacuuccaggcugaggcu

SEQ ID NO: 579865 - RNA, 22 nt, Human
ucaugaacuuccuagccagacu

SEQ ID NO: 579866 - RNA, 22 nt, Human
acggguggcugaggaggccucu

SEQ ID NO: 579867 - RNA, 22 nt, Human
ucugugaacaucacauugacag

SEQ ID NO: 579868 - RNA, 22 nt, Human
gagcccugugaggaaagagggu

SEQ ID NO: 579869 - RNA, 22 nt, Human
augcugaaugaaagaaauuagu

SEQ ID NO: 579870 - RNA, 22 nt, Human
ucuuucuucagcccuguaagau

SEQ ID NO: 579871 - RNA, 19 nt, Human
gagaaagcaggcacagcac

SEQ ID NO: 579872 - RNA, 22 nt, Human
aggacaguggcaaggcaggaca

SEQ ID NO: 579873 - RNA, 21 nt, Human
accaucuuccaugcauuauau

SEQ ID NO: 579874 - RNA, 22 nt, Human
uguuuauucauggcuaaugaaa

SEQ ID NO: 579875 - RNA, 22 nt, Human
ccagcugcccaagaggcauccu

SEQ ID NO: 579876 - RNA, 22 nt, Human
uuuaauagggcccaaugagacu

SEQ ID NO: 579877 - RNA, 22 nt, Human
ggcagcacgacaggaguggaag

SEQ ID NO: 579878 - RNA, 22 nt, Human
uuaagagauuuaggaacauuau

SEQ ID NO: 579879 - RNA, 22 nt, Human
aggaagcccuugucauuucugu

SEQ ID NO: 579880 - RNA, 22 nt, Human
uagaggcuccuguguguagguu

SEQ ID NO: 579881 - RNA, 22 nt, Human
uugaaauacugcauuguucagu

SEQ ID NO: 579882 - RNA, 22 nt, Human
auuuugugaacccucaagcaau

SEQ ID NO: 579883 - RNA, 22 nt, Human
uucuacauuuaaaaggaaaauc

SEQ ID NO: 579884 - RNA, 20 nt, Human
cuagaagcagaauugcugau

SEQ ID NO: 579885 - RNA, 22 nt, Human
auacaugauacuuaguacguag

SEQ ID NO: 579886 - RNA, 22 nt, Human
accagagcagacuacuggaggu

SEQ ID NO: 579887 - RNA, 22 nt, Human
agagcugcaccuaugcagaccu

SEQ ID NO: 579888 - RNA, 22 nt, Human
ggcucuguaaagugacaccugc

SEQ ID NO: 579889 - RNA, 22 nt, Human
gggagggaaggaccuuaugaau

SEQ ID NO: 579890 - RNA, 22 nt, Human
agugcucucuccccagugcuac

SEQ ID NO: 579891 - RNA, 22 nt, Human
gguggcaggcccugagcauccc

SEQ ID NO: 579892 - RNA, 22 nt, Human
gcuggcuuccuucugcagcuag

SEQ ID NO: 579893 - RNA, 22 nt, Human
gcugccucccccauggcuggaa

SEQ ID NO: 579894 - RNA, 22 nt, Human
gugugcgccgacacagccaggu

SEQ ID NO: 579895 - RNA, 22 nt, Human
accagagcucuucagcacagga

SEQ ID NO: 579896 - RNA, 22 nt, Human
agggagaacaguugcagcagac

SEQ ID NO: 579897 - RNA, 22 nt, Human
cuaagaggaaguacucuguuau

SEQ ID NO: 579898 - RNA, 22 nt, Human
agagccuggucugagauaggac

SEQ ID NO: 579899 - RNA, 22 nt, Human
cugugcauugucuugucuguag

SEQ ID NO: 579900 - RNA, 22 nt, Human
ucccaggguuacagccagggca

SEQ ID NO: 579901 - RNA, 22 nt, Human
acacagcuuucagucauuaucu

SEQ ID NO: 579902 - RNA, 22 nt, Human
uggguagaguggagggauaaga

SEQ ID NO: 579903 - RNA, 22 nt, Human
gcccuccaccagagcccuucuc

SEQ ID NO: 579904 - RNA, 22 nt, Human
gugcaggauuuauagcccagcu

SEQ ID NO: 579905 - RNA, 22 nt, Human
aaauauuauugcuuaaggggag

SEQ ID NO: 579906 - RNA, 22 nt, Human
ugggcagggagcuggaaccaca

SEQ ID NO: 579907 - RNA, 22 nt, Human
acauacaugggauuaaaaaauu

SEQ ID NO: 579908 - RNA, 22 nt, Human
gagauucuguagucaggcaucu

SEQ ID NO: 579909 - RNA, 22 nt, Human
agaaacauauucagugaguaau

SEQ ID NO: 579910 - RNA, 22 nt, Human
agaaucuuucugaaugacugug

SEQ ID NO: 579911 - RNA, 22 nt, Human
ugcuuucucucuaccccacuuu

SEQ ID NO: 579912 - RNA, 22 nt, Human
uggagcagaggaagaaggcuuu

SEQ ID NO: 579913 - RNA, 22 nt, Human
cuuuucucugcgggucuuucau

SEQ ID NO: 579914 - RNA, 22 nt, Human
uccucaggcugccuggaagacu

SEQ ID NO: 579915 - RNA, 22 nt, Human
uuaugcuuuuagaauuuagcau

SEQ ID NO: 579916 - RNA, 22 nt, Human
agucaccuugaaaugucuugaa

SEQ ID NO: 579917 - RNA, 22 nt, Human
aggcucugugacaaucaagcug

SEQ ID NO: 579918 - RNA, 22 nt, Human
uauguucauagaaaucaugacc

SEQ ID NO: 579919 - RNA, 22 nt, Human
ccagcuggagcucgcagauagg

SEQ ID NO: 579920 - RNA, 22 nt, Human
ggcugcugaguuggccaggaga

SEQ ID NO: 579921 - RNA, 22 nt, Human
uuauuuacaacucuucucuucc

SEQ ID NO: 579922 - RNA, 22 nt, Human
caggcaacguccuuagagaugc

SEQ ID NO: 579923 - RNA, 22 nt, Human
aaacaacaugguggguguguag

SEQ ID NO: 579924 - RNA, 22 nt, Human
ggguaauuggggccuugcagug

SEQ ID NO: 579925 - RNA, 22 nt, Human
cugcaguucucaauuucuauug

SEQ ID NO: 579926 - RNA, 22 nt, Human
auuugccuuucgaaucaacagg

SEQ ID NO: 579927 - RNA, 22 nt, Human
ucugccugcggcugcagguggc

SEQ ID NO: 579928 - RNA, 22 nt, Human
auaaccuaggaggguagaggua

SEQ ID NO: 579929 - RNA, 22 nt, Human
gaggcugcccaacuggagugga

SEQ ID NO: 579930 - RNA, 22 nt, Human
ccaaaccauccaucuccaggcu

SEQ ID NO: 579931 - RNA, 22 nt, Human
ggcuaggcgggcacauggugga

SEQ ID NO: 579932 - RNA, 22 nt, Human
cugggcacaggggagcagaguc

SEQ ID NO: 579933 - RNA, 22 nt, Human
cccuuggaggaagcucuaggcu

SEQ ID NO: 579934 - RNA, 22 nt, Human
aaugggauaggucuucaggaau

SEQ ID NO: 579935 - RNA, 22 nt, Human
ucugggggaggaggcauggccc

SEQ ID NO: 579936 - RNA, 22 nt, Human
ccuggaggcucugggagggcag

SEQ ID NO: 579937 - RNA, 22 nt, Human
caugggcucuucuggacugcac

SEQ ID NO: 579938 - RNA, 22 nt, Human
agccagagaguguuggagaugu

SEQ ID NO: 579939 - RNA, 18 nt, Human
ggcuccaggaccuaccca

SEQ ID NO: 579940 - RNA, 22 nt, Human
acaggagccaaacacaugccag

SEQ ID NO: 579941 - RNA, 22 nt, Human
uauuucucucacgguugccugg

SEQ ID NO: 579942 - RNA, 22 nt, Human
uagacaguuaaacuacuggugg

SEQ ID NO: 579943 - RNA, 22 nt, Human
gcugcccagcaggccccagggg

SEQ ID NO: 579944 - RNA, 22 nt, Human
ggacaggaugcugaagaugaag

SEQ ID NO: 579945 - RNA, 22 nt, Human
ccucugugccucguguccucug

SEQ ID NO: 579946 - RNA, 22 nt, Human
gcuggccagggcugcucgcgga

SEQ ID NO: 579947 - RNA, 22 nt, Human
ucuacaggguaaggggcuugcc

SEQ ID NO: 579948 - RNA, 22 nt, Human
ggagacuuggcuuggaugcuuc

SEQ ID NO: 579949 - RNA, 22 nt, Human
uuucaugaggggcaaaaucuca

SEQ ID NO: 579950 - RNA, 22 nt, Human
agcuccuggcaaggucauggug

SEQ ID NO: 579951 - RNA, 22 nt, Human
ucauacaucuuguauaucuauc

SEQ ID NO: 579952 - RNA, 22 nt, Human
cugcagcuaaggaaugugguug

SEQ ID NO: 579953 - RNA, 22 nt, Human
gaggaaggcuaaggggcuuaga

SEQ ID NO: 579954 - RNA, 22 nt, Human
acacugaauguuuaagaacuug

SEQ ID NO: 579955 - RNA, 22 nt, Human
aagaggagaaaggcuggcuuug

SEQ ID NO: 579956 - RNA, 22 nt, Human
gauauuuuuaguauuucugccu

SEQ ID NO: 579957 - RNA, 22 nt, Human
ugcagccuugccuccucccagc

SEQ ID NO: 579958 - RNA, 22 nt, Human
auuuauugagacuuaacaaccc

SEQ ID NO: 579959 - RNA, 22 nt, Human
ccaaggcugucauucaguagcu

SEQ ID NO: 579960 - RNA, 22 nt, Human
uuucauugagaauauaagauuu

SEQ ID NO: 579961 - RNA, 22 nt, Human
ucuuggaacuuauuauuguaga

SEQ ID NO: 579962 - RNA, 22 nt, Human
agggaagaggaccagagucucu

SEQ ID NO: 579963 - RNA, 22 nt, Human
cuccuggugacucccagauaaa

SEQ ID NO: 579964 - RNA, 22 nt, Human
augacacauuugugcuguugaa

SEQ ID NO: 579965 - RNA, 22 nt, Human
uggagcuggcuuguggaaguug

SEQ ID NO: 579966 - RNA, 22 nt, Human
auuuuuuauauaccaagguggg

SEQ ID NO: 579967 - RNA, 22 nt, Human
agagcugcucagaugucacugc

SEQ ID NO: 579968 - RNA, 22 nt, Human
agggcuggcuaggugcguuccc

SEQ ID NO: 579969 - RNA, 22 nt, Human
caggaaauaggcguuuguccuc

SEQ ID NO: 579970 - RNA, 22 nt, Human
gggagcugaccugcagguuccc

SEQ ID NO: 579971 - RNA, 22 nt, Human
uguuuugcuucucuguuuccca

SEQ ID NO: 579972 - RNA, 22 nt, Human
ugggucagauugagccccuggu

SEQ ID NO: 579973 - RNA, 22 nt, Human
cugaauggaaucaucccugcuu

SEQ ID NO: 579974 - RNA, 22 nt, Human
caucuuucuuagaacuuucagu

SEQ ID NO: 579975 - RNA, 22 nt, Human
agcacaugcacagugcuacacu

SEQ ID NO: 579976 - RNA, 22 nt, Human
caguccugagccaaucaugaug

SEQ ID NO: 579977 - RNA, 22 nt, Human
aaacacuugcaaaaugguuccu

SEQ ID NO: 579978 - RNA, 22 nt, Human
acagcuggccgaggcucaggga

SEQ ID NO: 579979 - RNA, 22 nt, Human
gccuggugcuaugagggccagc

SEQ ID NO: 579980 - RNA, 22 nt, Human
ccugaagauccauuauagacac

SEQ ID NO: 579981 - RNA, 22 nt, Human
ugcagaagugagucaugaggaa

SEQ ID NO: 579982 - RNA, 22 nt, Human
guccugcacauggagggcaaug

SEQ ID NO: 579983 - RNA, 22 nt, Human
aaauucuaugucaauguuuauu

SEQ ID NO: 579984 - RNA, 22 nt, Human
agugagcauucguuuggaaccc

SEQ ID NO: 579985 - RNA, 22 nt, Human
aggccagugcagcuggaacaga

SEQ ID NO: 579986 - RNA, 22 nt, Human
cagaugcuuuugauucuggggu

SEQ ID NO: 579987 - RNA, 22 nt, Human
uacagcuggacugguagcugug

SEQ ID NO: 579988 - RNA, 22 nt, Human
ucagccagggcucuggccucag

SEQ ID NO: 579989 - RNA, 22 nt, Human
guccugggccugcugaggcuga

SEQ ID NO: 579990 - RNA, 22 nt, Human
uagauaaauuagaaaguuuacu

SEQ ID NO: 579991 - RNA, 22 nt, Human
uuuuaaaucuccaguugacccc

SEQ ID NO: 579992 - RNA, 22 nt, Human
augaauugaggaaaacagucgu

SEQ ID NO: 579993 - RNA, 22 nt, Human
acauuucagcgugcaugacaug

SEQ ID NO: 579994 - RNA, 22 nt, Human
cccaggagacagaaacagaggu

SEQ ID NO: 579995 - RNA, 22 nt, Human
cacacagcuagugacaggagaa

SEQ ID NO: 579996 - RNA, 22 nt, Human
agugaugccacacaaugcuuug

SEQ ID NO: 579997 - RNA, 22 nt, Human
aauaagauccugaagauauguu

SEQ ID NO: 579998 - RNA, 18 nt, Human
gcacuucacagggauagu

SEQ ID NO: 579999 - RNA, 22 nt, Human
gaagcaguauccugacagcacc

SEQ ID NO: 580000 - RNA, 22 nt, Human
auauagugagagauuacagaag

SEQ ID NO: 580001 - RNA, 22 nt, Human
cacauucacauuuuucccucua

SEQ ID NO: 580002 - RNA, 19 nt, Human
ggcuucagggaguuagcau

SEQ ID NO: 580003 - RNA, 22 nt, Human
ucucacugggucacagcagagg

SEQ ID NO: 580004 - RNA, 22 nt, Human
uuggccagugaaccaggccugg

SEQ ID NO: 580005 - RNA, 22 nt, Human
cuggcucacaggugagaugcau

SEQ ID NO: 580006 - RNA, 22 nt, Human
gcucccagacugaccagaggug

SEQ ID NO: 580007 - RNA, 22 nt, Human
uccugccucuugccuucuucac

SEQ ID NO: 580008 - RNA, 21 nt, Human
auuuucauuaauucagugugg

SEQ ID NO: 580009 - RNA, 22 nt, Human
ggugcagcaguuuguucagcuu

SEQ ID NO: 580010 - RNA, 20 nt, Human
cugccuggaggccucuaccu

SEQ ID NO: 580011 - RNA, 22 nt, Human
ucugguaaccuuuaucccuccu

SEQ ID NO: 580012 - RNA, 22 nt, Human
cugggacagagcagcagugggg

SEQ ID NO: 580013 - RNA, 22 nt, Human
ugggacagggaaucugaucccc

SEQ ID NO: 580014 - RNA, 22 nt, Human
gaagauuaaugagaaaccugcu

SEQ ID NO: 580015 - RNA, 22 nt, Human
gaagcaucagcaauggcuggaa

SEQ ID NO: 580016 - RNA, 22 nt, Human
uuuaaaauuuagaccucuccac

SEQ ID NO: 580017 - RNA, 22 nt, Human
guggccugccagcagauggcgc

SEQ ID NO: 580018 - RNA, 17 nt, Human
gggcuggauggccaugg

SEQ ID NO: 580019 - RNA, 22 nt, Human
cugggcuccuaaccauccaggu

SEQ ID NO: 580020 - RNA, 22 nt, Human
uacacauacauugcuuacaagg

SEQ ID NO: 580021 - RNA, 22 nt, Human
ggaaugggagcuauuaguggaa

SEQ ID NO: 580022 - RNA, 22 nt, Human
acuggaguagaucugacugagu

SEQ ID NO: 580023 - RNA, 22 nt, Human
gugcaaauuccacuggaaagcu

SEQ ID NO: 580024 - RNA, 22 nt, Human
gccccagcccuguggaccaugg

SEQ ID NO: 580025 - RNA, 23 nt, Human
aggcugagcucucccagcuucag

SEQ ID NO: 580026 - RNA, 22 nt, Human
aggugaguccugggcacaggua

SEQ ID NO: 580027 - RNA, 22 nt, Human
gcccuccuuugcuucuccuagu

SEQ ID NO: 580028 - RNA, 22 nt, Human
uuucuccaauguaucagcacac

SEQ ID NO: 580029 - RNA, 22 nt, Human
cugugaggccuuuggccagaua

SEQ ID NO: 580030 - RNA, 22 nt, Human
cugcucugcagcuuggacuccc

SEQ ID NO: 580031 - RNA, 22 nt, Human
ugcuugggcggccagcauggcg

SEQ ID NO: 580032 - RNA, 22 nt, Human
ccugccuauguaagugguuucu

SEQ ID NO: 580033 - RNA, 22 nt, Human
cagggcuucgugucucagugcu

SEQ ID NO: 580034 - RNA, 22 nt, Human
cagggacagccuugggguggcg

SEQ ID NO: 580035 - RNA, 22 nt, Human
acuguaauuggauugucugacu

SEQ ID NO: 580036 - RNA, 22 nt, Human
uuucuaaaauagauuuuauggu

SEQ ID NO: 580037 - RNA, 22 nt, Human
caaagaauagcauggcauuugu

SEQ ID NO: 580038 - RNA, 22 nt, Human
ggaggugaggccguagggugug

SEQ ID NO: 580039 - RNA, 22 nt, Human
ucaaauaggcuuguagugacug

SEQ ID NO: 580040 - RNA, 22 nt, Human
ggguggagguggguuuugagau

SEQ ID NO: 580041 - RNA, 22 nt, Human
gacacuggcuugucccgccauc

SEQ ID NO: 580042 - RNA, 22 nt, Human
uugccugcuacggucuucacug

SEQ ID NO: 580043 - RNA, 22 nt, Human
ucuguauauauuaaugaaauuc

SEQ ID NO: 580044 - RNA, 22 nt, Human
agcagcuuacauguggccuauc

SEQ ID NO: 580045 - RNA, 19 nt, Human
cuucuucuuggcagccaag

SEQ ID NO: 580046 - RNA, 22 nt, Human
ugauaaauccauguaaauggua

SEQ ID NO: 580047 - RNA, 22 nt, Human
gccaucuugagccaggaaguga

SEQ ID NO: 580048 - RNA, 22 nt, Human
ggaaaggagaugaauaggauua

SEQ ID NO: 580049 - RNA, 22 nt, Human
ugaaauuagugaaguuacaguu

SEQ ID NO: 580050 - RNA, 22 nt, Human
aauagauucaugguuaagagca

SEQ ID NO: 580051 - RNA, 22 nt, Human
acccaggagagagcuauaaaau

SEQ ID NO: 580052 - RNA, 22 nt, Human
cuuuaauucagauuugaaggga

SEQ ID NO: 580053 - RNA, 22 nt, Human
caccucaggcagcaaagucuca

SEQ ID NO: 580054 - RNA, 22 nt, Human
uuuauucacuggggucugcccg

SEQ ID NO: 580055 - RNA, 22 nt, Human
uuauacuaaaacgcauugaauu

SEQ ID NO: 580056 - RNA, 22 nt, Human
agcuguggcagcacuuuggagu

SEQ ID NO: 580057 - RNA, 22 nt, Human
cagcugaacauguagagcaucu

SEQ ID NO: 580058 - RNA, 20 nt, Human
ugggucugcuuggcuucagu

SEQ ID NO: 580059 - RNA, 22 nt, Human
aaacaguccucuuuauuuaguc

SEQ ID NO: 580060 - RNA, 22 nt, Human
ucaguucuuauuuucaugaaua

SEQ ID NO: 580061 - RNA, 22 nt, Human
aaugaacuucagugauuucugg

SEQ ID NO: 580062 - RNA, 22 nt, Human
guggcaacaaaagagccuagug

SEQ ID NO: 580063 - RNA, 22 nt, Human
ucccugaguguauguggugaac

SEQ ID NO: 580064 - RNA, 22 nt, Human
acacagcaacuugcaguaugga

SEQ ID NO: 580065 - RNA, 22 nt, Human
auuuucuguaacuauuucuaua

SEQ ID NO: 580066 - RNA, 22 nt, Human
ucuguuucuucuucuguuauau

SEQ ID NO: 580067 - RNA, 19 nt, Human
cccaacuugacuauuuucu

SEQ ID NO: 580068 - RNA, 22 nt, Human
uuuuauuaguggcuagaugggg

SEQ ID NO: 580069 - RNA, 22 nt, Human
ugacauaaugcuuugaaguugc

SEQ ID NO: 580070 - RNA, 21 nt, Human
agcagcuuugguugaagcaga

SEQ ID NO: 580071 - RNA, 22 nt, Human
uaaugaacaucuuaaucugaaa

SEQ ID NO: 580072 - RNA, 20 nt, Human
ucagagaaggagcuuuccug

SEQ ID NO: 580073 - RNA, 22 nt, Human
ccagaaaagcaucugguucuuu

SEQ ID NO: 580074 - RNA, 22 nt, Human
gugcaggagcuucuggccugac

SEQ ID NO: 580075 - RNA, 22 nt, Human
uuuauccauaucauuaaaaucu

SEQ ID NO: 580076 - RNA, 22 nt, Human
auaaaaugucuccacugggcuc

SEQ ID NO: 580077 - RNA, 22 nt, Human
ggggcggggcucugagaagcau

SEQ ID NO: 580078 - RNA, 19 nt, Human
ucuugcagccccagcaggc

SEQ ID NO: 580079 - RNA, 23 nt, Human
uuuauauuccuaaugucuugagc

SEQ ID NO: 580080 - RNA, 22 nt, Human
aacaugauuucaugcauuuaga

SEQ ID NO: 580081 - RNA, 22 nt, Human
uaugcacaguuacaagaauauc

SEQ ID NO: 580082 - RNA, 22 nt, Human
uaaguccaguguucucucugug

SEQ ID NO: 580083 - RNA, 22 nt, Human
cuugucugauaauggggccaac

SEQ ID NO: 580084 - RNA, 22 nt, Human
uucuaaauggggauccuuucug

SEQ ID NO: 580085 - RNA, 22 nt, Human
ggcagauggaagaggcuggguc

SEQ ID NO: 580086 - RNA, 22 nt, Human
uuuuaccacugggugacaugga

SEQ ID NO: 580087 - RNA, 22 nt, Human
gagaggagaagccugcgcuuca

SEQ ID NO: 580088 - RNA, 22 nt, Human
ucacacagugguaaaacccuga

SEQ ID NO: 580089 - RNA, 19 nt, Human
cuuuucaucaacagccaau

SEQ ID NO: 580090 - RNA, 22 nt, Human
ugaggucauggcugauauuucc

SEQ ID NO: 580091 - RNA, 22 nt, Human
agaggcagccguauuucaaagg

SEQ ID NO: 580092 - RNA, 22 nt, Human
agcuuccucaccucagaggucu

SEQ ID NO: 580093 - RNA, 22 nt, Human
cagcacuaugacauuuaauucu

SEQ ID NO: 580094 - RNA, 22 nt, Human
aaccaacaggaguggggauugg

SEQ ID NO: 580095 - RNA, 22 nt, Human
ugccacugggcaugcagauguc

SEQ ID NO: 580096 - RNA, 22 nt, Human
ucuauucauucaauuuagcucu

SEQ ID NO: 580097 - RNA, 23 nt, Human
agguacauauacuuggaggucag

SEQ ID NO: 580098 - RNA, 22 nt, Human
gacccuggugggcacuggcacc

SEQ ID NO: 580099 - RNA, 22 nt, Human
ccugcucuagacucugggaagg

SEQ ID NO: 580100 - RNA, 22 nt, Human
caggacugauguuccuccagcc

SEQ ID NO: 580101 - RNA, 22 nt, Human
augggcucuaugucuaggagau

SEQ ID NO: 580102 - RNA, 22 nt, Human
cagggugguaccagcaucuagu

SEQ ID NO: 580103 - RNA, 22 nt, Human
uucuuacaucuauaaaguuggg

SEQ ID NO: 580104 - RNA, 22 nt, Human
uggaaacuaagacuagagagac

SEQ ID NO: 580105 - RNA, 21 nt, Human
agagaagaggacuuucucaca

SEQ ID NO: 580106 - RNA, 22 nt, Human
ucauuucuguugugcaucacug

SEQ ID NO: 580107 - RNA, 22 nt, Human
cagguacacucccuugugcuga

SEQ ID NO: 580108 - RNA, 22 nt, Human
gcugcuccaguguucugucuag

SEQ ID NO: 580109 - RNA, 22 nt, Human
ggucccaguugcccaggucagg

SEQ ID NO: 580110 - RNA, 20 nt, Human
cuggggagcugcucccacga

SEQ ID NO: 580111 - RNA, 22 nt, Human
augaucagggcagaagcagaag

SEQ ID NO: 580112 - RNA, 22 nt, Human
cugcccuguggcucugagucau

SEQ ID NO: 580113 - RNA, 19 nt, Human
cacuaagaugagauauagc

SEQ ID NO: 580114 - RNA, 22 nt, Human
gacaggcuuagggagggugcuc

SEQ ID NO: 580115 - RNA, 22 nt, Human
ucucucugccaacucacagcca

SEQ ID NO: 580116 - RNA, 22 nt, Human
agaagaaacugucggggauauu

SEQ ID NO: 580117 - RNA, 22 nt, Human
ucaguguuuauucaauguuauu

SEQ ID NO: 580118 - RNA, 22 nt, Human
cacucccucuaguugcauucug

SEQ ID NO: 580119 - RNA, 21 nt, Human
gaggcccaugggacaggggcu

SEQ ID NO: 580120 - RNA, 22 nt, Human
cacauggcagaaucaugcaucu

SEQ ID NO: 580121 - RNA, 22 nt, Human
cuguaugauuccauuucuauaa

SEQ ID NO: 580122 - RNA, 23 nt, Human
ucagaacaaugccuuaggggcau

SEQ ID NO: 580123 - RNA, 22 nt, Human
uagaguguuuuguuaggcagca

SEQ ID NO: 580124 - RNA, 22 nt, Human
cagcaggccaugcugcuuuuca

SEQ ID NO: 580125 - RNA, 22 nt, Human
agaaucuuuccucauugcuguc

SEQ ID NO: 580126 - RNA, 22 nt, Human
gcuucucauguuuauuuuuaca

SEQ ID NO: 580127 - RNA, 22 nt, Human
uguacaaucugaugauguaugg

SEQ ID NO: 580128 - RNA, 21 nt, Human
cuggagucauuuucugaguag

SEQ ID NO: 580129 - RNA, 22 nt, Human
cuguggcaagucugccugucac

SEQ ID NO: 580130 - RNA, 22 nt, Human
agguuacagucaucucagaauc

SEQ ID NO: 580131 - RNA, 22 nt, Human
gcaugcugcagggaaugcuugu

SEQ ID NO: 580132 - RNA, 22 nt, Human
aaugauauuuauugaauagaug

SEQ ID NO: 580133 - RNA, 22 nt, Human
ccugugcuucagcuggaggagg

SEQ ID NO: 580134 - RNA, 22 nt, Human
guggcagcaaaugccuggacua

SEQ ID NO: 580135 - RNA, 22 nt, Human
ugagauaacauggaagaguagc

SEQ ID NO: 580136 - RNA, 22 nt, Human
gaugggggccagggccugcuuu

SEQ ID NO: 580137 - RNA, 22 nt, Human
aaguucaagcucugccuaaaau

SEQ ID NO: 580138 - RNA, 22 nt, Human
aaacaaagcaucuugcuaugca

SEQ ID NO: 580139 - RNA, 22 nt, Human
gggaggcuggcucuggccacag

SEQ ID NO: 580140 - RNA, 19 nt, Human
cuaaacuuaugugaccaca

SEQ ID NO: 580141 - RNA, 22 nt, Human
uuccauaaaggugauaguauac

SEQ ID NO: 580142 - RNA, 22 nt, Human
ucaguggagcuaagcaugagau

SEQ ID NO: 580143 - RNA, 22 nt, Human
agccuccuguagcccucaccca

SEQ ID NO: 580144 - RNA, 22 nt, Human
uccuggggcucuuugaugugau

SEQ ID NO: 580145 - RNA, 22 nt, Human
uggcaguccccugugccuggaa

SEQ ID NO: 580146 - RNA, 22 nt, Human
uaagaacagugucugucucaca

SEQ ID NO: 580147 - RNA, 22 nt, Human
acucugccuuucagcagaugaa

SEQ ID NO: 580148 - RNA, 18 nt, Human
gagaaaccugugaaugcu

SEQ ID NO: 580149 - RNA, 21 nt, Human
auuuccaaggguaccuaagau

SEQ ID NO: 580150 - RNA, 22 nt, Human
cuggagcuuauugggagcagaa

SEQ ID NO: 580151 - RNA, 22 nt, Human
ggaaauauuuugucuaauuugu

SEQ ID NO: 580152 - RNA, 22 nt, Human
aguuaccuuucugaaacuucgu

SEQ ID NO: 580153 - RNA, 22 nt, Human
acauauuuccaugcagcauguc

SEQ ID NO: 580154 - RNA, 22 nt, Human
agcauccaacuuugauuagaga

SEQ ID NO: 580155 - RNA, 19 nt, Human
ccaggagagcuuggagaag

SEQ ID NO: 580156 - RNA, 22 nt, Human
ucacuguuuccuguacuggaca

SEQ ID NO: 580157 - RNA, 22 nt, Human
aaggguggauuucugagcucua

SEQ ID NO: 580158 - RNA, 22 nt, Human
uuaaagcaccuccuuggaugug

SEQ ID NO: 580159 - RNA, 22 nt, Human
aggaugggccugggauaugcuu

SEQ ID NO: 580160 - RNA, 22 nt, Human
acauugaauucaaaauuacuga

SEQ ID NO: 580161 - RNA, 22 nt, Human
cucacugcaaguuccaccuacc

SEQ ID NO: 580162 - RNA, 22 nt, Human
accacaggaggauggcugcugg

SEQ ID NO: 580163 - RNA, 19 nt, Human
aaauaucagagagaugaua

SEQ ID NO: 580164 - RNA, 22 nt, Human
aagaaacugaaaguggcuucau

SEQ ID NO: 580165 - RNA, 22 nt, Human
ugagaguagagucuucaucugu

SEQ ID NO: 580166 - RNA, 22 nt, Human
caaucacaaagagacaaguguc

SEQ ID NO: 580167 - RNA, 22 nt, Human
agcagaaccacagcacuguuga

SEQ ID NO: 580168 - RNA, 22 nt, Human
cuuuccugaaaucucuucugca

SEQ ID NO: 580169 - RNA, 22 nt, Human
gagggccagccugccaagggcc

SEQ ID NO: 580170 - RNA, 22 nt, Human
gcagggcugaaggucccaggcc

SEQ ID NO: 580171 - RNA, 22 nt, Human
uccccaggggcaucucucugcu

SEQ ID NO: 580172 - RNA, 22 nt, Human
uuucauguuggauacuguuuca

SEQ ID NO: 580173 - RNA, 22 nt, Human
gcugggcuucucaaugcugccu

SEQ ID NO: 580174 - RNA, 22 nt, Human
gugauuucuaaucaucugaaug

SEQ ID NO: 580175 - RNA, 17 nt, Human
uuacauccuucugaauu

SEQ ID NO: 580176 - RNA, 21 nt, Human
ugcaggcuacuucugacucua

SEQ ID NO: 580177 - RNA, 22 nt, Human
gcccagcaggacagagugguuu

SEQ ID NO: 580178 - RNA, 22 nt, Human
uaaagcagucuguguaugugaa

SEQ ID NO: 580179 - RNA, 22 nt, Human
uuuagaauguuagcguuaaagg

SEQ ID NO: 580180 - RNA, 22 nt, Human
uuuccucuuuguaccuugacua

SEQ ID NO: 580181 - RNA, 22 nt, Human
ucuugcuaaagaccaacacauu

SEQ ID NO: 580182 - RNA, 22 nt, Human
caggcacugugcugagcucugc

SEQ ID NO: 580183 - RNA, 22 nt, Human
cugugucccaguaccuugggua

SEQ ID NO: 580184 - RNA, 22 nt, Human
agccaggcggggcagguuuccu

SEQ ID NO: 580185 - RNA, 22 nt, Human
ucuuuuaucuguuguguaacaa

SEQ ID NO: 580186 - RNA, 21 nt, Human
ggauuuuaaaaacugcaccug

SEQ ID NO: 580187 - RNA, 22 nt, Human
ggaaacuuggcauaauuuuaag

SEQ ID NO: 580188 - RNA, 22 nt, Human
caguccuucauuccuccuuuga

SEQ ID NO: 580189 - RNA, 22 nt, Human
caaaagaagcucuuggggcuag

SEQ ID NO: 580190 - RNA, 22 nt, Human
agugaaaggaaaaacugauauu

SEQ ID NO: 580191 - RNA, 22 nt, Human
cuuggucauuuggggcugcuau

SEQ ID NO: 580192 - RNA, 22 nt, Human
aucacuguggaaaacuguaugg

SEQ ID NO: 580193 - RNA, 22 nt, Human
caagauucagcccuccugaccu

SEQ ID NO: 580194 - RNA, 22 nt, Human
aaguuacaagacuaaauggaag

SEQ ID NO: 580195 - RNA, 22 nt, Human
accaggcuugaugauuugcuua

SEQ ID NO: 580196 - RNA, 22 nt, Human
cuccuccacagaguccuugcca

SEQ ID NO: 580197 - RNA, 22 nt, Human
ucucugcucaggcaccagcccu

SEQ ID NO: 580198 - RNA, 22 nt, Human
uucugaggccauuaccaauaaa

SEQ ID NO: 580199 - RNA, 22 nt, Human
cugccuguuuccucuugcuccc

SEQ ID NO: 580200 - RNA, 22 nt, Human
ccaaaggccaagcucagguaaa

SEQ ID NO: 580201 - RNA, 22 nt, Human
uaaauagaaucuaaacugcuca

SEQ ID NO: 580202 - RNA, 22 nt, Human
agcugagcugcagaugacugua

SEQ ID NO: 580203 - RNA, 22 nt, Human
gcugggcagcugaggccucuca

SEQ ID NO: 580204 - RNA, 22 nt, Human
cauugucauucuaugcuauuca

SEQ ID NO: 580205 - RNA, 22 nt, Human
ugcaggaggcuuuauucaggau

SEQ ID NO: 580206 - RNA, 22 nt, Human
acuucaugcuuuagagagauga

SEQ ID NO: 580207 - RNA, 22 nt, Human
uuuagaagacagaugcacagcc

SEQ ID NO: 580208 - RNA, 22 nt, Human
uucacaguggcccucucugagu

SEQ ID NO: 580209 - RNA, 22 nt, Human
cuuccuccgaagaaguugcugg

SEQ ID NO: 580210 - RNA, 22 nt, Human
gcauuuuugaucccacuaggau

SEQ ID NO: 580211 - RNA, 22 nt, Human
aaucuguauugcucauacuuga

SEQ ID NO: 580212 - RNA, 22 nt, Human
uagaauaugugguaggaucugg

SEQ ID NO: 580213 - RNA, 22 nt, Human
ugaaaauauaguuuuccagacu

SEQ ID NO: 580214 - RNA, 22 nt, Human
auuaaagaaacccagcauguga

SEQ ID NO: 580215 - RNA, 22 nt, Human
cauuacaaaguuauaaacaguu

SEQ ID NO: 580216 - RNA, 19 nt, Human
agacagagacugaaauaga

SEQ ID NO: 580217 - RNA, 22 nt, Human
cagagagaggggcugccuggcc

SEQ ID NO: 580218 - RNA, 22 nt, Human
uucagaaaugaauauugguauu

SEQ ID NO: 580219 - RNA, 22 nt, Human
auuucuucaggucagaaauaga

SEQ ID NO: 580220 - RNA, 22 nt, Human
ccaguguugaacaguauuugga

SEQ ID NO: 580221 - RNA, 22 nt, Human
aguuuacacuaugaaaagacua

SEQ ID NO: 580222 - RNA, 22 nt, Human
uacuuucuagcucuccccaguu

SEQ ID NO: 580223 - RNA, 22 nt, Human
gcucaggaaacagcagggcuug

SEQ ID NO: 580224 - RNA, 22 nt, Human
ugcuguguaaaaggugauugaa

SEQ ID NO: 580225 - RNA, 22 nt, Human
ccagaaagacuuuuuagguacg

SEQ ID NO: 580226 - RNA, 22 nt, Human
aauguuuucugacugcuaacuu

SEQ ID NO: 580227 - RNA, 22 nt, Human
uccaagaagcuuacaaucuaau

SEQ ID NO: 580228 - RNA, 22 nt, Human
ggaggccagccugaggcugagg

SEQ ID NO: 580229 - RNA, 22 nt, Human
cuguccucuguccucagcagga

SEQ ID NO: 580230 - RNA, 19 nt, Human
acugugcucgggaaccacu

SEQ ID NO: 580231 - RNA, 22 nt, Human
ucucaaauuuguuagauaaaau

SEQ ID NO: 580232 - RNA, 22 nt, Human
aacagcauauuucauauauuga

SEQ ID NO: 580233 - RNA, 22 nt, Human
gcugagguuuucugccugcuca

SEQ ID NO: 580234 - RNA, 22 nt, Human
uccugggcagcgggacgcucag

SEQ ID NO: 580235 - RNA, 22 nt, Human
uuuuauugguaaugauaaaagu

SEQ ID NO: 580236 - RNA, 22 nt, Human
ucuguuauacaacaaguaacag

SEQ ID NO: 580237 - RNA, 22 nt, Human
uuacuuuggauggucaagaaag

SEQ ID NO: 580238 - RNA, 22 nt, Human
ugcccagcacccagcaugaugc

SEQ ID NO: 580239 - RNA, 22 nt, Human
uggcaccugaacuuagaggugu

SEQ ID NO: 580240 - RNA, 22 nt, Human
ugcugaaugguaaagaaguaua

SEQ ID NO: 580241 - RNA, 22 nt, Human
auucaaaugucaaauccaccag

SEQ ID NO: 580242 - RNA, 22 nt, Human
acugaguguaggacuuugaguu

SEQ ID NO: 580243 - RNA, 22 nt, Human
caccuagccuucuugugccucu

SEQ ID NO: 580244 - RNA, 22 nt, Human
agacugagacuggggaaagaca

SEQ ID NO: 580245 - RNA, 22 nt, Human
aaaugcagguucuugagccaag

SEQ ID NO: 580246 - RNA, 22 nt, Human
ucuccaggagcaagucacccag

SEQ ID NO: 580247 - RNA, 22 nt, Human
uggggccaagaaggucucaugu

SEQ ID NO: 580248 - RNA, 22 nt, Human
ucauguugaauuaucguuccca

SEQ ID NO: 580249 - RNA, 22 nt, Human
ggcugggcuccgggagcaugcg

SEQ ID NO: 580250 - RNA, 22 nt, Human
uguuucuagagaaaauauuuac

SEQ ID NO: 580251 - RNA, 22 nt, Human
uccaaagggaagcgcuuucugu

SEQ ID NO: 580252 - RNA, 22 nt, Human
ucccaggguauccuguaguaaa

SEQ ID NO: 580253 - RNA, 22 nt, Human
cgcaccacugaauuccagccug

SEQ ID NO: 580254 - RNA, 22 nt, Human
ugagccagguuaagacaggagc

SEQ ID NO: 580255 - RNA, 22 nt, Human
acacuguaaauugagugcguga

SEQ ID NO: 580256 - RNA, 22 nt, Human
gaggccagcuaguccaggaagu

SEQ ID NO: 580257 - RNA, 22 nt, Human
aggaggcacucacucucagggu

SEQ ID NO: 580258 - RNA, 22 nt, Human
aacugcuuccuuggcaggcaug

SEQ ID NO: 580259 - RNA, 22 nt, Human
ugggggagauuagagcuucuua

SEQ ID NO: 580260 - RNA, 22 nt, Human
uagaacuuaaauauguuuuccc

SEQ ID NO: 580261 - RNA, 22 nt, Human
ucagggacuuacaaaccagaag

SEQ ID NO: 580262 - RNA, 22 nt, Human
gcagagaggaaugaagccaucc

SEQ ID NO: 580263 - RNA, 22 nt, Human
ccugcccagagccccuuucacu

SEQ ID NO: 580264 - RNA, 22 nt, Human
uguagaaagaauauguuucaua

SEQ ID NO: 580265 - RNA, 22 nt, Human
aaacuuuaggaaggaauuuaca

SEQ ID NO: 580266 - RNA, 22 nt, Human
cuucuucugguuuauguggcaa

SEQ ID NO: 580267 - RNA, 22 nt, Human
uccccuccaacuccaacuaugg

SEQ ID NO: 580268 - RNA, 18 nt, Human
cuccuccacagccccugc

SEQ ID NO: 580269 - RNA, 22 nt, Human
ucugccuggcucauggcaguga

SEQ ID NO: 580270 - RNA, 22 nt, Human
agggcugagacuaaggccagau

SEQ ID NO: 580271 - RNA, 22 nt, Human
ugaacauuccugaaugaagcau

SEQ ID NO: 580272 - RNA, 22 nt, Human
gccaagaagguggggacaugca

SEQ ID NO: 580273 - RNA, 22 nt, Human
gauuuccuugcauauugguaau

SEQ ID NO: 580274 - RNA, 22 nt, Human
cugucccucaucaccucugggu

SEQ ID NO: 580275 - RNA, 22 nt, Human
ugaguguauaugaagguuguaa

SEQ ID NO: 580276 - RNA, 22 nt, Human
uuagauaaagugauguaggcua

SEQ ID NO: 580277 - RNA, 22 nt, Human
agcucugugaagccagcaguuc

SEQ ID NO: 580278 - RNA, 23 nt, Human
ugagcugguauuguccaucucca

SEQ ID NO: 580279 - RNA, 16 nt, Human
gcccaggacgggaggc

SEQ ID NO: 580280 - RNA, 22 nt, Human
uggcucagcuuuccccaucugg

SEQ ID NO: 580281 - RNA, 22 nt, Human
gccaugugggcagaggaggcug

SEQ ID NO: 580282 - RNA, 22 nt, Human
gucugaggaagaugcaggggga

SEQ ID NO: 580283 - RNA, 22 nt, Human
gggagagguuacccgagcaacu

SEQ ID NO: 580284 - RNA, 22 nt, Human
ucaagcagcuuuuacagaagag

SEQ ID NO: 580285 - RNA, 22 nt, Human
agagaacagacagaugcaauga

SEQ ID NO: 580286 - RNA, 22 nt, Human
uggcugagguuaugcugguugu

SEQ ID NO: 580287 - RNA, 22 nt, Human
uccagccuaggggaacagcugc

SEQ ID NO: 580288 - RNA, 22 nt, Human
agaaacuucagcuauucuuuug

SEQ ID NO: 580289 - RNA, 22 nt, Human
gugccuuugugucuaaaacagc

SEQ ID NO: 580290 - RNA, 22 nt, Human
uggaugagggcugagcacuggg

SEQ ID NO: 580291 - RNA, 22 nt, Human
uugacacuaagauuuccaaaca

SEQ ID NO: 580292 - RNA, 22 nt, Human
gacaagacauugguaaagauau

SEQ ID NO: 580293 - RNA, 16 nt, Human
ccugggcucuguugga

SEQ ID NO: 580294 - RNA, 22 nt, Human
agaaggggcccaaggaugucag

SEQ ID NO: 580295 - RNA, 22 nt, Human
ccucaggcuugugagccuucag

SEQ ID NO: 580296 - RNA, 22 nt, Human
auauuguuaguaauauuucgaa

SEQ ID NO: 580297 - RNA, 22 nt, Human
acagacaguaaauaguguggcu

SEQ ID NO: 580298 - RNA, 22 nt, Human
uaaaugauaauaaugcuagugu

SEQ ID NO: 580299 - RNA, 22 nt, Human
ggcagcaguggcugcuauuguc

SEQ ID NO: 580300 - RNA, 22 nt, Human
uucucaugaugcaauucauccc

SEQ ID NO: 580301 - RNA, 22 nt, Human
agagguagaaaauaauggagag

SEQ ID NO: 580302 - RNA, 22 nt, Human
ugcccuggcuggagugcagugg

SEQ ID NO: 580303 - RNA, 22 nt, Human
uuuguucaccuagcaaacuuuu

SEQ ID NO: 580304 - RNA, 17 nt, Human
agagggcucaaggcauc

SEQ ID NO: 580305 - RNA, 22 nt, Human
auuuauugguuugcauggugaa

SEQ ID NO: 580306 - RNA, 22 nt, Human
gggaggagcugagugugugugc

SEQ ID NO: 580307 - RNA, 22 nt, Human
aauacaguagguaauaguucau

SEQ ID NO: 580308 - RNA, 22 nt, Human
uagaggcagaagaaauugacaa

SEQ ID NO: 580309 - RNA, 22 nt, Human
uaggggaacuggcacagggcag

SEQ ID NO: 580310 - RNA, 22 nt, Human
gcugaagguaugaguuuuaucu

SEQ ID NO: 580311 - RNA, 22 nt, Human
aagagguuuaacugacucacag

SEQ ID NO: 580312 - RNA, 22 nt, Human
aaugucauagcaaagagaguga

SEQ ID NO: 580313 - RNA, 22 nt, Human
cccaguuguugccggcucugga

SEQ ID NO: 580314 - RNA, 22 nt, Human
accuaacuuaccuagguccaca

SEQ ID NO: 580315 - RNA, 20 nt, Human
acaguuuauccaguuagcag

SEQ ID NO: 580316 - RNA, 22 nt, Human
ucugaggucauuccaaggacau

SEQ ID NO: 580317 - RNA, 22 nt, Human
uggaaggagacugggaagugug

SEQ ID NO: 580318 - RNA, 22 nt, Human
cagaacauucacucauaugugg

SEQ ID NO: 580319 - RNA, 22 nt, Human
agaaaacugggaggagagcuuc

SEQ ID NO: 580320 - RNA, 22 nt, Human
gauuaugguagaaacaagaagu

SEQ ID NO: 580321 - RNA, 22 nt, Human
ugucugccugcgggccggcaca

SEQ ID NO: 580322 - RNA, 22 nt, Human
acaguguuuggcaaugcaugca

SEQ ID NO: 580323 - RNA, 22 nt, Human
gcagggaagggaaacagagacc

SEQ ID NO: 580324 - RNA, 22 nt, Human
agacagggccacucauccucac

SEQ ID NO: 580325 - RNA, 22 nt, Human
cugagauggucucuuuguuacu

SEQ ID NO: 580326 - RNA, 22 nt, Human
gaaugugggcugugaagaggag

SEQ ID NO: 580327 - RNA, 22 nt, Human
cugggcagguauacaaaaaaug

SEQ ID NO: 580328 - RNA, 22 nt, Human
ggucagagcuggagagauaggg

SEQ ID NO: 580329 - RNA, 22 nt, Human
cccgacuagcugggauuacagg

SEQ ID NO: 580330 - RNA, 22 nt, Human
uauguuuacgcugguagaauua

SEQ ID NO: 580331 - RNA, 22 nt, Human
ugugacuuagggcaggugagau

SEQ ID NO: 580332 - RNA, 22 nt, Human
cuuauugaaagccccugugccu

SEQ ID NO: 580333 - RNA, 22 nt, Human
acaguguuguggcucuuaauag

SEQ ID NO: 580334 - RNA, 22 nt, Human
caggagacuauggcccaaggcc

SEQ ID NO: 580335 - RNA, 22 nt, Human
aaguuuuauuggcuauagcacu

SEQ ID NO: 580336 - RNA, 22 nt, Human
agagaacuacuuuuuauaugug

SEQ ID NO: 580337 - RNA, 22 nt, Human
ucagugcacccaauucucucca

SEQ ID NO: 580338 - RNA, 22 nt, Human
ccagucucaguucacguuggua

SEQ ID NO: 580339 - RNA, 22 nt, Human
gaauuucagagguaacaucauc

SEQ ID NO: 580340 - RNA, 22 nt, Human
uuggaagaaauaucaauagugu

SEQ ID NO: 580341 - RNA, 22 nt, Human
cccaggagaccugugaaaggac

SEQ ID NO: 580342 - RNA, 21 nt, Human
uccuucagucuagaugauugu

SEQ ID NO: 580343 - RNA, 22 nt, Human
uugugucauguuccauugaaaa

SEQ ID NO: 580344 - RNA, 22 nt, Human
ccuuccagaguucagucugccc

SEQ ID NO: 580345 - RNA, 22 nt, Human
cugcacaguuugauuucuugcu

SEQ ID NO: 580346 - RNA, 22 nt, Human
cuuauugugagaugcgauaauu

SEQ ID NO: 580347 - RNA, 22 nt, Human
ggcucaggagaggggcuaaaag

SEQ ID NO: 580348 - RNA, 22 nt, Human
uuucuaguucucugccaaaaaa

SEQ ID NO: 580349 - RNA, 22 nt, Human
caccaggcuggagugcagaggu

SEQ ID NO: 580350 - RNA, 20 nt, Human
ggaccagguggggcgguggc

SEQ ID NO: 580351 - RNA, 22 nt, Human
uccugagguuuuaaaacuauuc

SEQ ID NO: 580352 - RNA, 21 nt, Human
cugcaggaugcugaagccagg

SEQ ID NO: 580353 - RNA, 22 nt, Human
uaagacauagccaagagcaucc

SEQ ID NO: 580354 - RNA, 22 nt, Human
ugccugaguuuaacccucagag

SEQ ID NO: 580355 - RNA, 22 nt, Human
aucuacauguugauuuaaagaa

SEQ ID NO: 580356 - RNA, 22 nt, Human
caggaggaaaugugacccugcu

SEQ ID NO: 580357 - RNA, 22 nt, Human
aguacacagaauucuacuuguu

SEQ ID NO: 580358 - RNA, 22 nt, Human
gaggcacauauauacagagccc

SEQ ID NO: 580359 - RNA, 22 nt, Human
aauguuaaaaccuucagugcuu

SEQ ID NO: 580360 - RNA, 22 nt, Human
cuggagugcaaccucugccucc

SEQ ID NO: 580361 - RNA, 19 nt, Human
gcagaugaugaggcugguc

SEQ ID NO: 580362 - RNA, 22 nt, Human
ucccucagaaauucucucugaa

SEQ ID NO: 580363 - RNA, 22 nt, Human
cagccuccugggacacucaccg

SEQ ID NO: 580364 - RNA, 21 nt, Human
uucacagaugggaaaacugag

SEQ ID NO: 580365 - RNA, 22 nt, Human
uaggaagcugagcagcauuccu

SEQ ID NO: 580366 - RNA, 22 nt, Human
gugagcuggaauaguggagaaa

SEQ ID NO: 580367 - RNA, 22 nt, Human
uaguguuuaguacauaugcaua

SEQ ID NO: 580368 - RNA, 22 nt, Human
uuaguaauuagaaaguaauucu

SEQ ID NO: 580369 - RNA, 22 nt, Human
aaagcugcugccaaucaggcuu

SEQ ID NO: 580370 - RNA, 22 nt, Human
gauuaugguaacaaugauuaaa

SEQ ID NO: 580371 - RNA, 22 nt, Human
ugagccagguuuuccaucauuc

SEQ ID NO: 580372 - RNA, 22 nt, Human
gauuuagagaauguuuuguaag

SEQ ID NO: 580373 - RNA, 22 nt, Human
gaugcagugcuuaaaucauuug

SEQ ID NO: 580374 - RNA, 22 nt, Human
cugaagcacagcauauaaauaa

SEQ ID NO: 580375 - RNA, 22 nt, Human
cagcucuuccauuuccuucagc

SEQ ID NO: 580376 - RNA, 19 nt, Human
cagguggcgcucuacaggg

SEQ ID NO: 580377 - RNA, 22 nt, Human
cuaggaaagacacagagaguuu

SEQ ID NO: 580378 - RNA, 22 nt, Human
uuaggaaaucacuuugcucacc

SEQ ID NO: 580379 - RNA, 22 nt, Human
auuaauaaaauaccacuuuguu

SEQ ID NO: 580380 - RNA, 22 nt, Human
uguccuguuauauguuggguag

SEQ ID NO: 580381 - RNA, 22 nt, Human
gcuuccagugacuuuggucgug

SEQ ID NO: 580382 - RNA, 22 nt, Human
uaauuuacucagauguucaauc

SEQ ID NO: 580383 - RNA, 22 nt, Human
aguguugcaugaggcaguacca

SEQ ID NO: 580384 - RNA, 22 nt, Human
augcaguugcaauggaggacuc

SEQ ID NO: 580385 - RNA, 22 nt, Human
cagugcuccugauguacccuug

SEQ ID NO: 580386 - RNA, 23 nt, Human
uagauacugcauauagguggaau

SEQ ID NO: 580387 - RNA, 22 nt, Human
agauacagccugccagguucuu

SEQ ID NO: 580388 - RNA, 22 nt, Human
cugaagaaauaugauugcuuaa

SEQ ID NO: 580389 - RNA, 22 nt, Human
caugcuaaaauaucugaagauu

SEQ ID NO: 580390 - RNA, 22 nt, Human
agcagaacauuuucagggcugu

SEQ ID NO: 580391 - RNA, 22 nt, Human
gggcgcaucaccugaggucagg

SEQ ID NO: 580392 - RNA, 22 nt, Human
ugggccugauucuugaauccug

SEQ ID NO: 580393 - RNA, 22 nt, Human
cagcagcagauucagcgucugg

SEQ ID NO: 580394 - RNA, 22 nt, Human
agugaaaugauaguguaaauac

SEQ ID NO: 580395 - RNA, 22 nt, Human
aaguuuaucccucucacaguua

SEQ ID NO: 580396 - RNA, 22 nt, Human
cuggcccuaugagccuccugau

SEQ ID NO: 580397 - RNA, 19 nt, Human
aaggacacaacagagauag

SEQ ID NO: 580398 - RNA, 22 nt, Human
uauuuacuguauuugaaguuga

SEQ ID NO: 580399 - RNA, 22 nt, Human
gagcacaguccuuuuguuaaaa

SEQ ID NO: 580400 - RNA, 22 nt, Human
gagcuuccugcaggucacugug

SEQ ID NO: 580401 - RNA, 20 nt, Human
gucucaaguaucucacaguc

SEQ ID NO: 580402 - RNA, 22 nt, Human
auauuuuuccaugugggacucu

SEQ ID NO: 580403 - RNA, 22 nt, Human
ugagcagagcaauaggacucuc

SEQ ID NO: 580404 - RNA, 22 nt, Human
uaaggaaacaacuuguauuuuu

SEQ ID NO: 580405 - RNA, 22 nt, Human
uaugagaaaauaaauaucuguu

SEQ ID NO: 580406 - RNA, 22 nt, Human
ucucagagugacaaugagaauu

SEQ ID NO: 580407 - RNA, 22 nt, Human
gcugggucccaagccuggggag

SEQ ID NO: 580408 - RNA, 22 nt, Human
guggucagugguacaguuugaa

SEQ ID NO: 580409 - RNA, 22 nt, Human
aacauacauauuucagugucca

SEQ ID NO: 580410 - RNA, 22 nt, Human
cccagcaguuguuggugcacau

SEQ ID NO: 580411 - RNA, 22 nt, Human
cuagccagacucaagggccacc

SEQ ID NO: 580412 - RNA, 22 nt, Human
agaccuggaugugagggaagua

SEQ ID NO: 580413 - RNA, 22 nt, Human
agguaggaaagucuccuuguau

SEQ ID NO: 580414 - RNA, 22 nt, Human
uguguccacugaauguguauua

SEQ ID NO: 580415 - RNA, 22 nt, Human
cagaggcagaauggagauuugg

SEQ ID NO: 580416 - RNA, 22 nt, Human
uggaggacguguccaccaugaa

SEQ ID NO: 580417 - RNA, 22 nt, Human
caggugcccagcuccugcugug

SEQ ID NO: 580418 - RNA, 23 nt, Human
caucauuguuaugggugcuacua

SEQ ID NO: 580419 - RNA, 22 nt, Human
accagugcuuccugcuggagcu

SEQ ID NO: 580420 - RNA, 22 nt, Human
agguaggauggguggagaugau

SEQ ID NO: 580421 - RNA, 22 nt, Human
ccaguguucccucggguucaug

SEQ ID NO: 580422 - RNA, 22 nt, Human
uugagaagaggcuuuguaggaa

SEQ ID NO: 580423 - RNA, 22 nt, Human
uuagaaagguuuugcucugaaa

SEQ ID NO: 580424 - RNA, 20 nt, Human
auuuuguuuauguuccucuc

SEQ ID NO: 580425 - RNA, 23 nt, Human
ucaguuuuggcuguucaguguug

SEQ ID NO: 580426 - RNA, 22 nt, Human
cauucucucuacuuguuuucaa

SEQ ID NO: 580427 - RNA, 22 nt, Human
ugaauguugauaugaguacaga

SEQ ID NO: 580428 - RNA, 22 nt, Human
gccaagcucaccuucugaugga

SEQ ID NO: 580429 - RNA, 22 nt, Human
guaaaauagaauaacguggcua

SEQ ID NO: 580430 - RNA, 18 nt, Human
aagaggaggagcagguug

SEQ ID NO: 580431 - RNA, 22 nt, Human
ccaggcuuauuaucuucuccau

SEQ ID NO: 580432 - RNA, 22 nt, Human
aucuuucuccauauacaucuuu

SEQ ID NO: 580433 - RNA, 19 nt, Human
caggccagugucagggggc

SEQ ID NO: 580434 - RNA, 21 nt, Human
uaaaacuguaacuuuguccug

SEQ ID NO: 580435 - RNA, 22 nt, Human
uaagguuuguggggagcaaaag

SEQ ID NO: 580436 - RNA, 22 nt, Human
aaguaaaacacacaguccaccg

SEQ ID NO: 580437 - RNA, 22 nt, Human
aucagcucauuuugauggaaau

SEQ ID NO: 580438 - RNA, 22 nt, Human
guuuucauuacugcugugauuu

SEQ ID NO: 580439 - RNA, 22 nt, Human
ccugggcucaagugaugguccc

SEQ ID NO: 580440 - RNA, 22 nt, Human
aggcacugaaggaagcuugcgc

SEQ ID NO: 580441 - RNA, 20 nt, Human
auagauaucaucuuuagaag

SEQ ID NO: 580442 - RNA, 22 nt, Human
ucccagggccgcaaacgaguuu

SEQ ID NO: 580443 - RNA, 22 nt, Human
aaggguugcaaggucagaggaa

SEQ ID NO: 580444 - RNA, 22 nt, Human
uuguaaauaguaguaagaugcc

SEQ ID NO: 580445 - RNA, 22 nt, Human
aaaugcagaucccugaaucuca

SEQ ID NO: 580446 - RNA, 22 nt, Human
ugccucagagugggcuugcuau

SEQ ID NO: 580447 - RNA, 22 nt, Human
ucucugggugauggcagggcac

SEQ ID NO: 580448 - RNA, 22 nt, Human
uagaaagcagaaaccaucagag

SEQ ID NO: 580449 - RNA, 22 nt, Human
uagcuuugaaguuauuuaacag

SEQ ID NO: 580450 - RNA, 22 nt, Human
ugugguggggucugguauucca

SEQ ID NO: 580451 - RNA, 22 nt, Human
uccaggcaaaaaccaacuacag

SEQ ID NO: 580452 - RNA, 22 nt, Human
aggcugagcaaagggccuuacc

SEQ ID NO: 580453 - RNA, 22 nt, Human
ugcaugcacuaucuagaugaug

SEQ ID NO: 580454 - RNA, 22 nt, Human
acaggcuggaggaggaccaaga

SEQ ID NO: 580455 - RNA, 22 nt, Human
uaaguuuucuggaauaacuugg

SEQ ID NO: 580456 - RNA, 22 nt, Human
uucaggaggugagcaagaaggg

SEQ ID NO: 580457 - RNA, 22 nt, Human
agucuucccugugccagagugu

SEQ ID NO: 580458 - RNA, 22 nt, Human
gagcacagauccuggagccaca

SEQ ID NO: 580459 - RNA, 22 nt, Human
acagugcuuuuguuccucuccu

SEQ ID NO: 580460 - RNA, 22 nt, Human
acagggcagagaggcaggcuug

SEQ ID NO: 580461 - RNA, 22 nt, Human
ugggcagggucucuguuaucag

SEQ ID NO: 580462 - RNA, 22 nt, Human
cuggaaguauaggggagaugau

SEQ ID NO: 580463 - RNA, 22 nt, Human
acauucuguuuccccaaagaga

SEQ ID NO: 580464 - RNA, 22 nt, Human
uagcaaagcuccguaguuauuu

SEQ ID NO: 580465 - RNA, 22 nt, Human
cuccagugagcgcggggcaugg

SEQ ID NO: 580466 - RNA, 22 nt, Human
aacaaugccugaugaccuccug

SEQ ID NO: 580467 - RNA, 22 nt, Human
ggcuggugaguucagagaaccc

SEQ ID NO: 580468 - RNA, 22 nt, Human
auacauacauguaugcacauac

SEQ ID NO: 580469 - RNA, 22 nt, Human
gcuucuccagaccuucaucccc

SEQ ID NO: 580470 - RNA, 22 nt, Human
gagggccucugugggugcucac

SEQ ID NO: 580471 - RNA, 22 nt, Human
ucuguaaucuuccccagcucag

SEQ ID NO: 580472 - RNA, 22 nt, Human
cagcugcccaggccaccuggag

SEQ ID NO: 580473 - RNA, 22 nt, Human
acugggaaucucaggaacaugg

SEQ ID NO: 580474 - RNA, 21 nt, Human
ccagcuccaggaccuuggauc

SEQ ID NO: 580475 - RNA, 22 nt, Human
uagaugaccuuguguuaggcaa

SEQ ID NO: 580476 - RNA, 18 nt, Human
aaauggcacacagaccug

SEQ ID NO: 580477 - RNA, 22 nt, Human
ugucacaugacacaaauaucua

SEQ ID NO: 580478 - RNA, 22 nt, Human
cuggccuggggccucagcugcu

SEQ ID NO: 580479 - RNA, 22 nt, Human
caacaauaugcugaguuuuuca

SEQ ID NO: 580480 - RNA, 22 nt, Human
acaggcuguacuucuaaucauc

SEQ ID NO: 580481 - RNA, 22 nt, Human
ucaauuacagcaaugacuguac

SEQ ID NO: 580482 - RNA, 19 nt, Human
uauuucaaagugccgucua

SEQ ID NO: 580483 - RNA, 21 nt, Human
ccugccaggaaacugaguguc

SEQ ID NO: 580484 - RNA, 22 nt, Human
ucacaaaugaggaaaucgagca

SEQ ID NO: 580485 - RNA, 22 nt, Human
cuggaguuuuggaaaaaugcuu

SEQ ID NO: 580486 - RNA, 22 nt, Human
guggaggacaaaagaagccuuu

SEQ ID NO: 580487 - RNA, 22 nt, Human
gaagaggcuuuccuagggcaag

SEQ ID NO: 580488 - RNA, 22 nt, Human
aacacucucuguugguaaggcu

SEQ ID NO: 580489 - RNA, 22 nt, Human
ccugauggagcccugcugcaug

SEQ ID NO: 580490 - RNA, 22 nt, Human
cugggcugcaguuccugguccu

SEQ ID NO: 580491 - RNA, 22 nt, Human
gagcugcccugagcuuugcaug

SEQ ID NO: 580492 - RNA, 22 nt, Human
guagggagcccagagcccagug

SEQ ID NO: 580493 - RNA, 22 nt, Human
ggccaggcugcugggaccccgc

SEQ ID NO: 580494 - RNA, 22 nt, Human
aggucacccguuugacuaucca

SEQ ID NO: 580495 - RNA, 22 nt, Human
aucaaaguuucccagaaguugu

SEQ ID NO: 580496 - RNA, 22 nt, Human
uaagguuucuaguuucuaaacu

SEQ ID NO: 580497 - RNA, 22 nt, Human
ucagcacuggcgcugggcaggu

SEQ ID NO: 580498 - RNA, 22 nt, Human
cagcaagggauaaagaguuacu

SEQ ID NO: 580499 - RNA, 22 nt, Human
agccugguuuaagcauuuuaua

SEQ ID NO: 580500 - RNA, 22 nt, Human
uaaugcuuuuccuucaaauaag

SEQ ID NO: 580501 - RNA, 22 nt, Human
aggacaggauugagcugaacug

SEQ ID NO: 580502 - RNA, 22 nt, Human
uucaguauaaaaucaaagugau

SEQ ID NO: 580503 - RNA, 22 nt, Human
cacauacaaugguguuauuugg

SEQ ID NO: 580504 - RNA, 22 nt, Human
uuuuaagaggaggcuguuugaa

SEQ ID NO: 580505 - RNA, 22 nt, Human
cuggcucauagagcagcuccaa

SEQ ID NO: 580506 - RNA, 22 nt, Human
ggccaugggaagagguggagag

SEQ ID NO: 580507 - RNA, 22 nt, Human
uggcuccaucauccaugcaaga

SEQ ID NO: 580508 - RNA, 22 nt, Human
agacaauggcuaaguaaccugu

SEQ ID NO: 580509 - RNA, 22 nt, Human
ggcucaagcagucugccugccu

SEQ ID NO: 580510 - RNA, 22 nt, Human
agaagccauaguaucucagggu

SEQ ID NO: 580511 - RNA, 21 nt, Human
gcccagaagacuggcucugcc

SEQ ID NO: 580512 - RNA, 22 nt, Human
aaucagaacgcucgaucuucgg

SEQ ID NO: 580513 - RNA, 22 nt, Human
aguaaagcagaguugcaguaca

SEQ ID NO: 580514 - RNA, 22 nt, Human
cuguauaacaucuuuuguuucc

SEQ ID NO: 580515 - RNA, 22 nt, Human
aacuuuaaagaggaggcuuggg

SEQ ID NO: 580516 - RNA, 22 nt, Human
cagcucucuaaggucuugcuuu

SEQ ID NO: 580517 - RNA, 22 nt, Human
ucauguaaauguggaugcuucc

SEQ ID NO: 580518 - RNA, 22 nt, Human
aagggagguaaagcuauuuaaa

SEQ ID NO: 580519 - RNA, 22 nt, Human
gaauguuauuggacagcagugg

SEQ ID NO: 580520 - RNA, 23 nt, Human
cuaggcaggauuguaggcgggua

SEQ ID NO: 580521 - RNA, 22 nt, Human
ucgaauggcaaggaaagaggcu

SEQ ID NO: 580522 - RNA, 22 nt, Human
gggcagcaguugcccuaaucaa

SEQ ID NO: 580523 - RNA, 22 nt, Human
uacuucuagccugccccuugug

SEQ ID NO: 580524 - RNA, 22 nt, Human
gcagcuggcucagagagguggg

SEQ ID NO: 580525 - RNA, 22 nt, Human
ucauuaucuuggcucauuucug

SEQ ID NO: 580526 - RNA, 22 nt, Human
auuugccuguaagacaaggccu

SEQ ID NO: 580527 - RNA, 22 nt, Human
ugagaugguugaccagagagca

SEQ ID NO: 580528 - RNA, 22 nt, Human
uuuagaguugguccccugugag

SEQ ID NO: 580529 - RNA, 22 nt, Human
gaggcuggacgugcauuucuac

SEQ ID NO: 580530 - RNA, 22 nt, Human
uuaggauuugaaaaggggcaga

SEQ ID NO: 580531 - RNA, 22 nt, Human
ccugggugaaauaguccucaag

SEQ ID NO: 580532 - RNA, 22 nt, Human
ucagguggcuucggggaguggc

SEQ ID NO: 580533 - RNA, 22 nt, Human
aagaguuuuagacaaacugauu

SEQ ID NO: 580534 - RNA, 22 nt, Human
ucaguaaaagggugcuuuacuc

SEQ ID NO: 580535 - RNA, 22 nt, Human
uucuaauuauucccuuguccca

SEQ ID NO: 580536 - RNA, 22 nt, Human
cuauauuucuuggcuuuaaaca

SEQ ID NO: 580537 - RNA, 20 nt, Human
cucugcuuuaggagagucag

SEQ ID NO: 580538 - RNA, 22 nt, Human
caucucuguguccccagagcuu

SEQ ID NO: 580539 - RNA, 22 nt, Human
aauuucagaugucauaaauaua

SEQ ID NO: 580540 - RNA, 22 nt, Human
agguccugaugaucucugagag

SEQ ID NO: 580541 - RNA, 21 nt, Human
gagaugcuuuuuauucaaccc

SEQ ID NO: 580542 - RNA, 22 nt, Human
ucagugcuucggcgagcaccua

SEQ ID NO: 580543 - RNA, 22 nt, Human
cagaaacaggcaacgugugcac

SEQ ID NO: 580544 - RNA, 22 nt, Human
cacaugcauuggcaaaagugua

SEQ ID NO: 580545 - RNA, 22 nt, Human
gucugagggacagaguccuggc

SEQ ID NO: 580546 - RNA, 22 nt, Human
gccuggcacauugcaguggauu

SEQ ID NO: 580547 - RNA, 22 nt, Human
ugguggagggaacuauuuccag

SEQ ID NO: 580548 - RNA, 22 nt, Human
gcagauggcucagacacugggg

SEQ ID NO: 580549 - RNA, 22 nt, Human
cccagcagccagaaugaggagc

SEQ ID NO: 580550 - RNA, 22 nt, Human
ucugagaaggaagcucugugua

SEQ ID NO: 580551 - RNA, 22 nt, Human
gcaggcugugaggcucagaugg

SEQ ID NO: 580552 - RNA, 22 nt, Human
cccaggagaauauuuuuggguc

SEQ ID NO: 580553 - RNA, 22 nt, Human
ugcugcugauggcaccuaggca

SEQ ID NO: 580554 - RNA, 22 nt, Human
aucaggaaugaauacuuuugga

SEQ ID NO: 580555 - RNA, 22 nt, Human
ccagccagcugguuggacgccu

SEQ ID NO: 580556 - RNA, 22 nt, Human
ccugggaaagugaggucauuau

SEQ ID NO: 580557 - RNA, 22 nt, Human
acaguaauuaaggucugaaacg

SEQ ID NO: 580558 - RNA, 22 nt, Human
ucagaggagaaguugggaaaau

SEQ ID NO: 580559 - RNA, 22 nt, Human
guguggggaggagagagcccuu

SEQ ID NO: 580560 - RNA, 22 nt, Human
caguagcauguaauaaagacag

SEQ ID NO: 580561 - RNA, 22 nt, Human
ugagguagaagccuggguugag

SEQ ID NO: 580562 - RNA, 22 nt, Human
cccagggacagcuagguggggc

SEQ ID NO: 580563 - RNA, 22 nt, Human
ugagaggguucccagggguuuc

SEQ ID NO: 580564 - RNA, 22 nt, Human
ugagcagaggccagcaccuggg

SEQ ID NO: 580565 - RNA, 22 nt, Human
ucuguagcaagugagaggcauu

SEQ ID NO: 580566 - RNA, 22 nt, Human
uucacagucacccuucuccaug

SEQ ID NO: 580567 - RNA, 22 nt, Human
aggaaaggugagagcggccgcg

SEQ ID NO: 580568 - RNA, 22 nt, Human
uuacagucuggauuaggaaaca

SEQ ID NO: 580569 - RNA, 22 nt, Human
ugggccacaagccaugggacca

SEQ ID NO: 580570 - RNA, 22 nt, Human
agggcgugguggugcuggagca

SEQ ID NO: 580571 - RNA, 23 nt, Human
gagcugaguguagggagacuagg

SEQ ID NO: 580572 - RNA, 22 nt, Human
gugccucagcaccgccugcagc

SEQ ID NO: 580573 - RNA, 22 nt, Human
uagaaagacaaugggaagugcu

SEQ ID NO: 580574 - RNA, 22 nt, Human
uggcucaguagcagugugguca

SEQ ID NO: 580575 - RNA, 22 nt, Human
gggcuucuggcuacuguaugag

SEQ ID NO: 580576 - RNA, 22 nt, Human
ucuggccacccgaggccccugc

SEQ ID NO: 580577 - RNA, 22 nt, Human
cccagcucccaaguugcuaugg

SEQ ID NO: 580578 - RNA, 22 nt, Human
uauucacaugaaaacaaauuuu

SEQ ID NO: 580579 - RNA, 22 nt, Human
aagcaucuccucaucauuuggg

SEQ ID NO: 580580 - RNA, 22 nt, Human
uuacaguuuaccaagaauauug

SEQ ID NO: 580581 - RNA, 22 nt, Human
gagaaagacguaggcugggagg

SEQ ID NO: 580582 - RNA, 22 nt, Human
aaugauuacugaucgcauagga

SEQ ID NO: 580583 - RNA, 22 nt, Human
agcauuuaccucaaugcaucug

SEQ ID NO: 580584 - RNA, 22 nt, Human
cccaggagauggugcguggucu

SEQ ID NO: 580585 - RNA, 22 nt, Human
ucugaggccccugggcaggaug

SEQ ID NO: 580586 - RNA, 21 nt, Human
ucuuggcucugccacuuauua

SEQ ID NO: 580587 - RNA, 22 nt, Human
ugguuccucaagcgcuggcggc

SEQ ID NO: 580588 - RNA, 22 nt, Human
acagcuuuucaauucugcugag

SEQ ID NO: 580589 - RNA, 22 nt, Human
ucauuucugagccuuccaugau

SEQ ID NO: 580590 - RNA, 22 nt, Human
ggcuccugcuguccuuugaagc

SEQ ID NO: 580591 - RNA, 22 nt, Human
ucuagcuuugagaucaguagcc

SEQ ID NO: 580592 - RNA, 22 nt, Human
cauggaaugugaguuguuuagu

SEQ ID NO: 580593 - RNA, 22 nt, Human
caggggacauuaaagcuccaua

SEQ ID NO: 580594 - RNA, 22 nt, Human
cuuaucagauuaucugggcugu

SEQ ID NO: 580595 - RNA, 22 nt, Human
cuguacauaaaggaauaggugu

SEQ ID NO: 580596 - RNA, 23 nt, Human
agugugacuuuuuugacugucac

SEQ ID NO: 580597 - RNA, 22 nt, Human
uuggcucaaaacuuagauucca

SEQ ID NO: 580598 - RNA, 22 nt, Human
ucagcugcauaagucaccuugc

SEQ ID NO: 580599 - RNA, 22 nt, Human
cugucucagcaggaagucauca

SEQ ID NO: 580600 - RNA, 22 nt, Human
cugccuggagcauucugaaggu

SEQ ID NO: 580601 - RNA, 22 nt, Human
auggacagguacugcagugggu

SEQ ID NO: 580602 - RNA, 22 nt, Human
ugaauaugcuuugcaauccuaa

SEQ ID NO: 580603 - RNA, 22 nt, Human
agaggccucccucccagcuggu

SEQ ID NO: 580604 - RNA, 22 nt, Human
acagggcagugucuugaaaaau

SEQ ID NO: 580605 - RNA, 22 nt, Human
aggcucugggaacagacgggug

SEQ ID NO: 580606 - RNA, 22 nt, Human
uuuucugagcucagugacuuac

SEQ ID NO: 580607 - RNA, 22 nt, Human
ccaggagcaaagaucacuggga

SEQ ID NO: 580608 - RNA, 22 nt, Human
gacucuuucaaacagaaagcca

SEQ ID NO: 580609 - RNA, 22 nt, Human
aggacuccauguguccuggaga

SEQ ID NO: 580610 - RNA, 22 nt, Human
aaaugcagcugggcaugagagg

SEQ ID NO: 580611 - RNA, 19 nt, Human
ccagguggaacugagguag

SEQ ID NO: 580612 - RNA, 17 nt, Human
agcuccugcccauggcu

SEQ ID NO: 580613 - RNA, 22 nt, Human
auauuccaguuauaucaaauca

SEQ ID NO: 580614 - RNA, 22 nt, Human
uuccaguucagaugcaacaggg

SEQ ID NO: 580615 - RNA, 22 nt, Human
acuuggcaggucaggggauauu

SEQ ID NO: 580616 - RNA, 22 nt, Human
acucacagcaugagcuuggcag

SEQ ID NO: 580617 - RNA, 22 nt, Human
uuauuugugaaucauuuaucua

SEQ ID NO: 580618 - RNA, 22 nt, Human
aaggaagagaauccuucucaga

SEQ ID NO: 580619 - RNA, 22 nt, Human
ugcauauuguccuugauauuau

SEQ ID NO: 580620 - RNA, 22 nt, Human
cucugggcugaauggcugaacc

SEQ ID NO: 580621 - RNA, 22 nt, Human
agaccaggucuuuauggcucca

SEQ ID NO: 580622 - RNA, 22 nt, Human
uuuuauuggagugauaccaagc

SEQ ID NO: 580623 - RNA, 22 nt, Human
cugcaggguuucgccaguugug

SEQ ID NO: 580624 - RNA, 17 nt, Human
ggagagugggaauggcc

SEQ ID NO: 580625 - RNA, 22 nt, Human
gggccagaccucuucucaggga

SEQ ID NO: 580626 - RNA, 22 nt, Human
ccacauuuacuggaugcucagg

SEQ ID NO: 580627 - RNA, 19 nt, Human
cucuuaaauugucucuugc

SEQ ID NO: 580628 - RNA, 22 nt, Human
auacacacgugcacgugggaaa

SEQ ID NO: 580629 - RNA, 22 nt, Human
caaugaaaauuuaaguugcagc

SEQ ID NO: 580630 - RNA, 22 nt, Human
gaucaaaagcuggguucuaaaa

SEQ ID NO: 580631 - RNA, 22 nt, Human
cacucccuucaggagccuagga

SEQ ID NO: 580632 - RNA, 22 nt, Human
ucccagcagaugagcugaccua

SEQ ID NO: 580633 - RNA, 22 nt, Human
uuagggagcucaguccucagau

SEQ ID NO: 580634 - RNA, 22 nt, Human
uuggaauucaaguuguagcuua

SEQ ID NO: 580635 - RNA, 22 nt, Human
uuggccaaaaaagucauuagaa

SEQ ID NO: 580636 - RNA, 22 nt, Human
uuaaugucaacauuucugaaga

SEQ ID NO: 580637 - RNA, 22 nt, Human
aggccagacagcuagaaacagg

SEQ ID NO: 580638 - RNA, 22 nt, Human
gagcaacaguuuaugguuuuuc

SEQ ID NO: 580639 - RNA, 22 nt, Human
gcagaggucucuucaaaauaau

SEQ ID NO: 580640 - RNA, 22 nt, Human
aaugucauugguaaagauuagg

SEQ ID NO: 580641 - RNA, 16 nt, Human
ccaccugcagcucuca

SEQ ID NO: 580642 - RNA, 22 nt, Human
uggaggcagguggaggagugaa

SEQ ID NO: 580643 - RNA, 22 nt, Human
uacauggugguggcacuugacu

SEQ ID NO: 580644 - RNA, 22 nt, Human
aauuaacagagggcuuauuacu

SEQ ID NO: 580645 - RNA, 22 nt, Human
gccagaagcacaugagagguga

SEQ ID NO: 580646 - RNA, 22 nt, Human
aggaggaacucagaaagaaggu

SEQ ID NO: 580647 - RNA, 22 nt, Human
uucauaguguuuccuuccagug

SEQ ID NO: 580648 - RNA, 22 nt, Human
aagcacauuaaggaacauugaa

SEQ ID NO: 580649 - RNA, 22 nt, Human
ugugugccagauacaagcacug

SEQ ID NO: 580650 - RNA, 22 nt, Human
agcauggggcaaugcaugugcu

SEQ ID NO: 580651 - RNA, 22 nt, Human
gaggggcaaugagggaaagagu

SEQ ID NO: 580652 - RNA, 22 nt, Human
aaacaugagcaucucuucaagc

SEQ ID NO: 580653 - RNA, 22 nt, Human
aaggcugagacagcacaggucc

SEQ ID NO: 580654 - RNA, 22 nt, Human
aacagcuugaggaauaucauca

SEQ ID NO: 580655 - RNA, 18 nt, Human
ucccuccugccugcuucc

SEQ ID NO: 580656 - RNA, 22 nt, Human
gucccugcaucugcaggccaug

SEQ ID NO: 580657 - RNA, 22 nt, Human
gccagcaguauguccuggcagu

SEQ ID NO: 580658 - RNA, 22 nt, Human
aggcuccagucuccucuggcag

SEQ ID NO: 580659 - RNA, 22 nt, Human
uccuugaaaggggcugcagggc

SEQ ID NO: 580660 - RNA, 22 nt, Human
cggagcugccugccaagccugc

SEQ ID NO: 580661 - RNA, 22 nt, Human
agcugcccaauccugcagggcg

SEQ ID NO: 580662 - RNA, 22 nt, Human
uuggcagcagaguguggugcuc

SEQ ID NO: 580663 - RNA, 22 nt, Human
uccugggauuugcccuuuucuc

SEQ ID NO: 580664 - RNA, 22 nt, Human
uauagacuuggcaugcauguuc

SEQ ID NO: 580665 - RNA, 22 nt, Human
auugcaaagaaauacaugcuua

SEQ ID NO: 580666 - RNA, 22 nt, Human
gugugcagucugcuaggcaggg

SEQ ID NO: 580667 - RNA, 22 nt, Human
cuuuguuaucuguaaaugguua

SEQ ID NO: 580668 - RNA, 22 nt, Human
aaaucagaguagaauugagcca

SEQ ID NO: 580669 - RNA, 22 nt, Human
cagagcugcuucccaguuugug

SEQ ID NO: 580670 - RNA, 22 nt, Human
ucuggccaacaaaaacuaaguc

SEQ ID NO: 580671 - RNA, 22 nt, Human
gcuuuccuggcccugucccugc

SEQ ID NO: 580672 - RNA, 19 nt, Human
cagagcagugguuccugaa

SEQ ID NO: 580673 - RNA, 22 nt, Human
uuccuugaccacugcauaauga

SEQ ID NO: 580674 - RNA, 23 nt, Human
acucucagguucuuuccagcagg

SEQ ID NO: 580675 - RNA, 22 nt, Human
aagaacaugaaccucuucuaac

SEQ ID NO: 580676 - RNA, 22 nt, Human
uugcagggcaucgcguacuucu

SEQ ID NO: 580677 - RNA, 22 nt, Human
aaugcagauucuuauucuguag

SEQ ID NO: 580678 - RNA, 22 nt, Human
agaaagcacucugucuuuuacc

SEQ ID NO: 580679 - RNA, 22 nt, Human
guggccuggcgagcuggcgcgg

SEQ ID NO: 580680 - RNA, 22 nt, Human
uagguaguuacacagcaaugua

SEQ ID NO: 580681 - RNA, 22 nt, Human
uccauacacauugaauuuuagu

SEQ ID NO: 580682 - RNA, 21 nt, Human
cuacagaaucgagcauucugg

SEQ ID NO: 580683 - RNA, 22 nt, Human
aagcuuuaaggaauuuuaugga

SEQ ID NO: 580684 - RNA, 22 nt, Human
acagggaauggagggaucagua

SEQ ID NO: 580685 - RNA, 22 nt, Human
gauacacuggccaaguggagga

SEQ ID NO: 580686 - RNA, 22 nt, Human
caggcacucagucuggaucccu

SEQ ID NO: 580687 - RNA, 22 nt, Human
aaguacauauauuuaugauucu

SEQ ID NO: 580688 - RNA, 22 nt, Human
augaaaugauugaaaucuuuac

SEQ ID NO: 580689 - RNA, 22 nt, Human
aguuuauuuuugauaagucuug

SEQ ID NO: 580690 - RNA, 22 nt, Human
cccugggcaagcccuauuuucc

SEQ ID NO: 580691 - RNA, 22 nt, Human
ucauuauaaacauaugcuaaag

SEQ ID NO: 580692 - RNA, 22 nt, Human
uggcuucucuguuuuaguauuu

SEQ ID NO: 580693 - RNA, 22 nt, Human
cauguucaaauaaguaguuucu

SEQ ID NO: 580694 - RNA, 22 nt, Human
acaggcucucagccaguuggca

SEQ ID NO: 580695 - RNA, 23 nt, Human
auaaauuacuaucucccuagagc

SEQ ID NO: 580696 - RNA, 22 nt, Human
uccuggccgccgcguggggccg

SEQ ID NO: 580697 - RNA, 22 nt, Human
ugcagcuguaacagaggccuca

SEQ ID NO: 580698 - RNA, 22 nt, Human
uauaaccuuuucuuuauccucc

SEQ ID NO: 580699 - RNA, 22 nt, Human
uuauuuuuaaaaguucacacag

SEQ ID NO: 580700 - RNA, 22 nt, Human
cucguugcugaagccaaaguca

SEQ ID NO: 580701 - RNA, 22 nt, Human
agauaaauuccuaagauuucag

SEQ ID NO: 580702 - RNA, 18 nt, Human
uccagagguguuggagcc

SEQ ID NO: 580703 - RNA, 22 nt, Human
gugggcagcaccagggaagugu

SEQ ID NO: 580704 - RNA, 22 nt, Human
uuguuuuggaagaacuuacucu

SEQ ID NO: 580705 - RNA, 22 nt, Human
uaggaauccagaucuagacugu

SEQ ID NO: 580706 - RNA, 22 nt, Human
aaagguuuuauguuuuccacuu

SEQ ID NO: 580707 - RNA, 22 nt, Human
cugaggccagcugcagagcucu

SEQ ID NO: 580708 - RNA, 22 nt, Human
ccccagggacugguuucaugga

SEQ ID NO: 580709 - RNA, 22 nt, Human
uucagcaagugucucuacuguc

SEQ ID NO: 580710 - RNA, 22 nt, Human
ugcauucuaugauaucaaaaca

SEQ ID NO: 580711 - RNA, 22 nt, Human
uccugaagccugagugaugacu

SEQ ID NO: 580712 - RNA, 22 nt, Human
cagcuggucaacugaaugaaca

SEQ ID NO: 580713 - RNA, 22 nt, Human
ccagcuggugacauccccaacc

SEQ ID NO: 580714 - RNA, 22 nt, Human
uauaaguguaguuucaaauguu

SEQ ID NO: 580715 - RNA, 22 nt, Human
cccaggcucagacuggcuuguu

SEQ ID NO: 580716 - RNA, 22 nt, Human
ccugccuguacuagagacccag

SEQ ID NO: 580717 - RNA, 22 nt, Human
gaagguuuucaggagccuaguc

SEQ ID NO: 580718 - RNA, 19 nt, Human
accaggccucagaggcccu

SEQ ID NO: 580719 - RNA, 23 nt, Human
ugaaugauuguacugagcuuuua

SEQ ID NO: 580720 - RNA, 22 nt, Human
uuuuuaagcuccuuugauguca

SEQ ID NO: 580721 - RNA, 22 nt, Human
gcagagaaggauugaaaccaga

SEQ ID NO: 580722 - RNA, 22 nt, Human
aaggcugaggcagugaggcaga

SEQ ID NO: 580723 - RNA, 22 nt, Human
uuagauaggacucauagauugg

SEQ ID NO: 580724 - RNA, 22 nt, Human
ucugagcuaauccuguugccga

SEQ ID NO: 580725 - RNA, 22 nt, Human
cuggugaccuugccccagguca

SEQ ID NO: 580726 - RNA, 22 nt, Human
uuacaggucugugucaucaucu

SEQ ID NO: 580727 - RNA, 20 nt, Human
cucacagucaaugcagaggu

SEQ ID NO: 580728 - RNA, 22 nt, Human
aggcccaugugagucuuguccu

SEQ ID NO: 580729 - RNA, 22 nt, Human
ucacaccuguaaucccaggccu

SEQ ID NO: 580730 - RNA, 22 nt, Human
ugcucccaggcauucucuguug

SEQ ID NO: 580731 - RNA, 22 nt, Human
augaggcagcacaugggauugu

SEQ ID NO: 580732 - RNA, 22 nt, Human
uggugaggccaaagccaugaca

SEQ ID NO: 580733 - RNA, 22 nt, Human
uugcccuguggggccuccagcc

SEQ ID NO: 580734 - RNA, 22 nt, Human
agccuggaggccaggagacagu

SEQ ID NO: 580735 - RNA, 22 nt, Human
uucagcacaagacuagacaggu

SEQ ID NO: 580736 - RNA, 22 nt, Human
acagucugucccccaggugcua

SEQ ID NO: 580737 - RNA, 22 nt, Human
gggaagagaggaggugguuucg

SEQ ID NO: 580738 - RNA, 19 nt, Human
ggagccagcuguggaaggc

SEQ ID NO: 580739 - RNA, 22 nt, Human
acugacucuuguuaacuucagc

SEQ ID NO: 580740 - RNA, 22 nt, Human
gcagcugcagacccucagugcu

SEQ ID NO: 580741 - RNA, 22 nt, Human
gucacacagagcccugugcuca

SEQ ID NO: 580742 - RNA, 16 nt, Human
cucagcuaaggagagg

SEQ ID NO: 580743 - RNA, 22 nt, Human
uccucccuguaccauuccucug

SEQ ID NO: 580744 - RNA, 22 nt, Human
ugcugagguuguggagugcauu

SEQ ID NO: 580745 - RNA, 22 nt, Human
auguuaaaagugaggauggcca

SEQ ID NO: 580746 - RNA, 21 nt, Human
ucccagggucuuaugggaugu

SEQ ID NO: 580747 - RNA, 22 nt, Human
cugggccagaccuuguggucuu

SEQ ID NO: 580748 - RNA, 22 nt, Human
uggacagguugaguaggaggag

SEQ ID NO: 580749 - RNA, 22 nt, Human
gccaggcuggugucacaacucu

SEQ ID NO: 580750 - RNA, 18 nt, Human
cagggcuguggggucacu

SEQ ID NO: 580751 - RNA, 22 nt, Human
guuuuucugugagcgguaaagg

SEQ ID NO: 580752 - RNA, 22 nt, Human
gccuggagcccaguguggggcu

SEQ ID NO: 580753 - RNA, 22 nt, Human
aaaacaggaguuuugguaggcu

SEQ ID NO: 580754 - RNA, 22 nt, Human
uguaugaaugggaaaaggaaac

SEQ ID NO: 580755 - RNA, 22 nt, Human
gcaauaaaguagcagcucauca

SEQ ID NO: 580756 - RNA, 22 nt, Human
cugcaggcuuccagggcugugg

SEQ ID NO: 580757 - RNA, 22 nt, Human
uccucucugcacuggcccugcc

SEQ ID NO: 580758 - RNA, 22 nt, Human
acagagcucccagccaucuccu

SEQ ID NO: 580759 - RNA, 22 nt, Human
augcaugcacacacugcauugc

SEQ ID NO: 580760 - RNA, 22 nt, Human
ucugguggugggccacaagcau

SEQ ID NO: 580761 - RNA, 22 nt, Human
caggaggggguggaguuucgcc

SEQ ID NO: 580762 - RNA, 22 nt, Human
uugaaaggugacauuguuagag

SEQ ID NO: 580763 - RNA, 22 nt, Human
ugucaaaguaucagucucuggc

SEQ ID NO: 580764 - RNA, 23 nt, Human
uuuuauugauauguagcuguugu

SEQ ID NO: 580765 - RNA, 22 nt, Human
uucuccagaccuugugacuaug

SEQ ID NO: 580766 - RNA, 22 nt, Human
ucucuggcuggcaccccaggga

SEQ ID NO: 580767 - RNA, 22 nt, Human
uauguacaagcacacaugugac

SEQ ID NO: 580768 - RNA, 22 nt, Human
ucuauuuuuauaguugaagugc

SEQ ID NO: 580769 - RNA, 22 nt, Human
agugucuuucauauccuccauc

SEQ ID NO: 580770 - RNA, 22 nt, Human
cauggcagaaaccugagcugcu

SEQ ID NO: 580771 - RNA, 23 nt, Human
agcugggaauuuucugaagcuuu

SEQ ID NO: 580772 - RNA, 22 nt, Human
caugccaguuuugagaugcacc

SEQ ID NO: 580773 - RNA, 22 nt, Human
ccagcucugcagggccuggggu

SEQ ID NO: 580774 - RNA, 22 nt, Human
gagccugggacugggggucaug

SEQ ID NO: 580775 - RNA, 22 nt, Human
ccagcugcagguguuccagaug

SEQ ID NO: 580776 - RNA, 22 nt, Human
aacauacagugagcaguggacu

SEQ ID NO: 580777 - RNA, 22 nt, Human
acaaugaaccaaauuuaccaau

SEQ ID NO: 580778 - RNA, 22 nt, Human
cagagcugauuggauccagaga

SEQ ID NO: 580779 - RNA, 21 nt, Human
uuacagaauccaugggaaguc

SEQ ID NO: 580780 - RNA, 18 nt, Human
gagcagaggcucaacugg

SEQ ID NO: 580781 - RNA, 22 nt, Human
ugauuagcugaagaauaugcug

SEQ ID NO: 580782 - RNA, 22 nt, Human
aagauccaugggaauguuuggc

SEQ ID NO: 580783 - RNA, 22 nt, Human
agauacaucauuuauaccuuca

SEQ ID NO: 580784 - RNA, 23 nt, Human
uauuugucucuuaccacugcugu

SEQ ID NO: 580785 - RNA, 22 nt, Human
uuuacaaguuuacagaaugaug

SEQ ID NO: 580786 - RNA, 22 nt, Human
cagagcagacguugagauuaag

SEQ ID NO: 580787 - RNA, 20 nt, Human
acaguggaaauugaugucug

SEQ ID NO: 580788 - RNA, 22 nt, Human
cuggagcugcuguccuugggug

SEQ ID NO: 580789 - RNA, 18 nt, Human
agcagcugugccacacug

SEQ ID NO: 580790 - RNA, 22 nt, Human
gcuagaaaucgacuucagaauu

SEQ ID NO: 580791 - RNA, 22 nt, Human
uccugguggugccggugcccgg

SEQ ID NO: 580792 - RNA, 22 nt, Human
ggucagaacaagcaaauaauag

SEQ ID NO: 580793 - RNA, 17 nt, Human
ggcugcaguccaggagg

SEQ ID NO: 580794 - RNA, 22 nt, Human
cugcuucacguugugccuuguu

SEQ ID NO: 580795 - RNA, 22 nt, Human
cuggguuuuauuacagugagcu

SEQ ID NO: 580796 - RNA, 22 nt, Human
gagggagaauugcagccagcgu

SEQ ID NO: 580797 - RNA, 22 nt, Human
auuuugcuuuauguaaauaugu

SEQ ID NO: 580798 - RNA, 20 nt, Human
agucacaguaucagucuuag

SEQ ID NO: 580799 - RNA, 22 nt, Human
gaagaaggugccagaggcuuac

SEQ ID NO: 580800 - RNA, 22 nt, Human
ggcagguggcacugcugcuccc

SEQ ID NO: 580801 - RNA, 22 nt, Human
aagggcaggcacccacccucac

SEQ ID NO: 580802 - RNA, 22 nt, Human
uaaguccacaggaguuguguuc

SEQ ID NO: 580803 - RNA, 22 nt, Human
cuuccuaaaagcuucaagagaa

SEQ ID NO: 580804 - RNA, 22 nt, Human
gaggcagcauucgcauagacag

SEQ ID NO: 580805 - RNA, 22 nt, Human
aauuucagagguagagauucua

SEQ ID NO: 580806 - RNA, 22 nt, Human
auacaucaugcuccauauauuu

SEQ ID NO: 580807 - RNA, 22 nt, Human
cugcugcugagagcucagccug

SEQ ID NO: 580808 - RNA, 22 nt, Human
aguguuuuauuagaacacagcc

SEQ ID NO: 580809 - RNA, 21 nt, Human
acaaugcauggaacucauggc

SEQ ID NO: 580810 - RNA, 22 nt, Human
uugauuagugaaacaugccuag

SEQ ID NO: 580811 - RNA, 22 nt, Human
aggagccaggccccauggggcu

SEQ ID NO: 580812 - RNA, 22 nt, Human
uaggaaaacgugauuuucucac

SEQ ID NO: 580813 - RNA, 22 nt, Human
gugcaaaaguaauugcgguuuu

SEQ ID NO: 580814 - RNA, 22 nt, Human
uuauuuccaaacuggauauacc

SEQ ID NO: 580815 - RNA, 22 nt, Human
ucugacaggucauuuucuauag

SEQ ID NO: 580816 - RNA, 22 nt, Human
cauguuaaauugaguuugcaau

SEQ ID NO: 580817 - RNA, 22 nt, Human
auaaauuuauaauuguuuccug

SEQ ID NO: 580818 - RNA, 22 nt, Human
agugcuuuagaccuuuuggggu

SEQ ID NO: 580819 - RNA, 22 nt, Human
cauucagagcuuucuuaucaua

SEQ ID NO: 580820 - RNA, 21 nt, Human
uguuuucuaaagggcggauca

SEQ ID NO: 580821 - RNA, 22 nt, Human
guucugaaugugccuguacucu

SEQ ID NO: 580822 - RNA, 22 nt, Human
ggugagcagcugucuguaugga

SEQ ID NO: 580823 - RNA, 22 nt, Human
ggggaagaccuggcacuacagc

SEQ ID NO: 580824 - RNA, 22 nt, Human
ugagcagaguuguuucuccuga

SEQ ID NO: 580825 - RNA, 22 nt, Human
gccaggcugguuauuuaaugag

SEQ ID NO: 580826 - RNA, 22 nt, Human
ggcuguggcauuaggugaggcc

SEQ ID NO: 580827 - RNA, 22 nt, Human
agcagcugaucaaagcacuuau

SEQ ID NO: 580828 - RNA, 22 nt, Human
aaauuagaaauacuuucaaagc

SEQ ID NO: 580829 - RNA, 22 nt, Human
ugggaacaacaugcacugccac

SEQ ID NO: 580830 - RNA, 22 nt, Human
ggcuccaggguaccccuggaug

SEQ ID NO: 580831 - RNA, 22 nt, Human
ugacauuuuuauaagagucaaa

SEQ ID NO: 580832 - RNA, 22 nt, Human
uuccuucuggaggcuccagggg

SEQ ID NO: 580833 - RNA, 22 nt, Human
uacaaagauaguguuagaguaa

SEQ ID NO: 580834 - RNA, 16 nt, Human
agccaggcugccucgg

SEQ ID NO: 580835 - RNA, 22 nt, Human
aacauugauugcaucuguucac

SEQ ID NO: 580836 - RNA, 22 nt, Human
auuaugcucaccuggcaacuug

SEQ ID NO: 580837 - RNA, 22 nt, Human
aggccacauagcuugcauguag

SEQ ID NO: 580838 - RNA, 22 nt, Human
ucuuauaauguugaaggguugg

SEQ ID NO: 580839 - RNA, 22 nt, Human
ugagcagagcaggcugcgcccu

SEQ ID NO: 580840 - RNA, 22 nt, Human
gccugcuggcuguccauugcag

SEQ ID NO: 580841 - RNA, 22 nt, Human
ugcuucuggguaggccucagga

SEQ ID NO: 580842 - RNA, 22 nt, Human
aacucuuuggucucaggaaagg

SEQ ID NO: 580843 - RNA, 22 nt, Human
uaacacuguaaaccuagauguu

SEQ ID NO: 580844 - RNA, 22 nt, Human
ggcugaguggcugggucuaguu

SEQ ID NO: 580845 - RNA, 22 nt, Human
gaaaguuuucucacacaguaau

SEQ ID NO: 580846 - RNA, 22 nt, Human
uucagaaugacuuauguaaggc

SEQ ID NO: 580847 - RNA, 22 nt, Human
caggaacagcaccaggagcuag

SEQ ID NO: 580848 - RNA, 22 nt, Human
ccagggaugccaagcuuuacca

SEQ ID NO: 580849 - RNA, 22 nt, Human
uggagggcuaagcugagggaua

SEQ ID NO: 580850 - RNA, 22 nt, Human
uuuaaauuuagaagaaacacug

SEQ ID NO: 580851 - RNA, 22 nt, Human
ucucagaacacccuucuauggu

SEQ ID NO: 580852 - RNA, 22 nt, Human
aggcaagaacagacaugggagu

SEQ ID NO: 580853 - RNA, 22 nt, Human
ucaaacauaaaacuaaaucgag

SEQ ID NO: 580854 - RNA, 22 nt, Human
cagcucugagacugaggcuaug

SEQ ID NO: 580855 - RNA, 22 nt, Human
aagaggcuagccggcucacuaa

SEQ ID NO: 580856 - RNA, 22 nt, Human
aggaaaagugugaaguauggag

SEQ ID NO: 580857 - RNA, 22 nt, Human
auaauaaaccaggaugggucug

SEQ ID NO: 580858 - RNA, 22 nt, Human
ucuccuggccgggcuguccccu

SEQ ID NO: 580859 - RNA, 22 nt, Human
cuuccaggguccaggaagagcc

SEQ ID NO: 580860 - RNA, 19 nt, Human
uuuuccugccucauuguuu

SEQ ID NO: 580861 - RNA, 22 nt, Human
uauuagcuguguaacucugguu

SEQ ID NO: 580862 - RNA, 22 nt, Human
gcuccaggugucccagguaaaa

SEQ ID NO: 580863 - RNA, 23 nt, Human
acuggcuuugauccagauagauu

SEQ ID NO: 580864 - RNA, 22 nt, Human
cuguggcugcagccuugguccu

SEQ ID NO: 580865 - RNA, 22 nt, Human
agugucugcagugaugucucuu

SEQ ID NO: 580866 - RNA, 22 nt, Human
augaggccagggugccaugaaa

SEQ ID NO: 580867 - RNA, 22 nt, Human
gggagcucgugcgcccaggugc

SEQ ID NO: 580868 - RNA, 20 nt, Human
gagguagggcuuaaggcaag

SEQ ID NO: 580869 - RNA, 22 nt, Human
uuuugccugagagugaaaauaa

SEQ ID NO: 580870 - RNA, 22 nt, Human
acccugcagggcagaggcuggu

SEQ ID NO: 580871 - RNA, 22 nt, Human
gaggcccacagggaguaccaag

SEQ ID NO: 580872 - RNA, 22 nt, Human
gagcauccaugacuuuggcuuu

SEQ ID NO: 580873 - RNA, 22 nt, Human
cagcuggcguggagugauugca

SEQ ID NO: 580874 - RNA, 22 nt, Human
uggucagcguuugucagagcag

SEQ ID NO: 580875 - RNA, 22 nt, Human
acugucaaggaaacaaaauuac

SEQ ID NO: 580876 - RNA, 22 nt, Human
cucauauugcugguggucuaag

SEQ ID NO: 580877 - RNA, 22 nt, Human
cuuuuucugauguuccaugauu

SEQ ID NO: 580878 - RNA, 22 nt, Human
cacuaagauuuaaaguauuagu

SEQ ID NO: 580879 - RNA, 22 nt, Human
auacacacauaugugaguuuug

SEQ ID NO: 580880 - RNA, 22 nt, Human
aagucucucauggcugacagca

SEQ ID NO: 580881 - RNA, 22 nt, Human
ugaggccugcauugaacuagaa

SEQ ID NO: 580882 - RNA, 22 nt, Human
aaagcaaugcuuguggaaugua

SEQ ID NO: 580883 - RNA, 22 nt, Human
gcaggaguuaggcgucguggau

SEQ ID NO: 580884 - RNA, 23 nt, Human
agggaagggggcuuauuccacag

SEQ ID NO: 580885 - RNA, 22 nt, Human
cacagaguggaggcuuggccug

SEQ ID NO: 580886 - RNA, 22 nt, Human
ucaaaguagggguaagccaggc

SEQ ID NO: 580887 - RNA, 22 nt, Human
gcugggcuggccgccgagaucg

SEQ ID NO: 580888 - RNA, 21 nt, Human
ucuuucugaaaucucagucug

SEQ ID NO: 580889 - RNA, 22 nt, Human
agagcugggacuuggacucaau

SEQ ID NO: 580890 - RNA, 22 nt, Human
uggcaggaaccaggaggcucuc

SEQ ID NO: 580891 - RNA, 22 nt, Human
aucagaccugucuccucuugcc

SEQ ID NO: 580892 - RNA, 22 nt, Human
ccuacacaucucaccucacagg

SEQ ID NO: 580893 - RNA, 22 nt, Human
ugaaacuuauucaguuucuacc

SEQ ID NO: 580894 - RNA, 22 nt, Human
agcuuugugacuuugagcuagu

SEQ ID NO: 580895 - RNA, 22 nt, Human
aagcuuccugaaugcucauuua

SEQ ID NO: 580896 - RNA, 22 nt, Human
gguaacuugaguguguuguuca

SEQ ID NO: 580897 - RNA, 21 nt, Human
ggcuggucgcgugcaugucuc

SEQ ID NO: 580898 - RNA, 22 nt, Human
gagaaggggugauguggguaau

SEQ ID NO: 580899 - RNA, 22 nt, Human
gcugcuuccuuuccugcugacc

SEQ ID NO: 580900 - RNA, 22 nt, Human
cugagguaccuggagcaggucc

SEQ ID NO: 580901 - RNA, 22 nt, Human
aauguuuucucugugaacacau

SEQ ID NO: 580902 - RNA, 22 nt, Human
ugucucaucucuuaaccccacu

SEQ ID NO: 580903 - RNA, 21 nt, Human
agcugccacccuagcuucuga

SEQ ID NO: 580904 - RNA, 22 nt, Human
cugcucagcggaaggaagagcg

SEQ ID NO: 580905 - RNA, 22 nt, Human
uaguggagaaguggagucugug

SEQ ID NO: 580906 - RNA, 22 nt, Human
uuuccuuccuugcuagccugag

SEQ ID NO: 580907 - RNA, 22 nt, Human
cuuauucagaaggagaaaugga

SEQ ID NO: 580908 - RNA, 22 nt, Human
aaguaaaauguuuccuuuauua

SEQ ID NO: 580909 - RNA, 22 nt, Human
augucccagcugagagacaacu

SEQ ID NO: 580910 - RNA, 22 nt, Human
auuauuuauccucuuggucuau

SEQ ID NO: 580911 - RNA, 22 nt, Human
cagacacagauaugcauauggc

SEQ ID NO: 580912 - RNA, 22 nt, Human
gccuauggauuggagaaggagc

SEQ ID NO: 580913 - RNA, 22 nt, Human
uccugcagagucccacugauuu

SEQ ID NO: 580914 - RNA, 22 nt, Human
aagacuaaauguguucuaaagu

SEQ ID NO: 580915 - RNA, 22 nt, Human
ugagugccugaacauagaguag

SEQ ID NO: 580916 - RNA, 22 nt, Human
agagugcuuuauuagauguagc

SEQ ID NO: 580917 - RNA, 22 nt, Human
ugcaccuuguccauuuuuggcc

SEQ ID NO: 580918 - RNA, 22 nt, Human
gacaggcuuugagucccagaac

SEQ ID NO: 580919 - RNA, 22 nt, Human
uucccagaggagauuugcuuau

SEQ ID NO: 580920 - RNA, 22 nt, Human
auauaucaugaguaaaacuuga

SEQ ID NO: 580921 - RNA, 22 nt, Human
cuggcuuugaggauccccucuu

SEQ ID NO: 580922 - RNA, 22 nt, Human
acccccuucgcacacucuuuca

SEQ ID NO: 580923 - RNA, 22 nt, Human
accauacauuaaaugacuuuca

SEQ ID NO: 580924 - RNA, 17 nt, Human
agaaagaggauccacag

SEQ ID NO: 580925 - RNA, 22 nt, Human
aggcuggagacccgccaagaaa

SEQ ID NO: 580926 - RNA, 22 nt, Human
agcagcugggcucagagcuggg

SEQ ID NO: 580927 - RNA, 21 nt, Human
gcugcagggcccagggcaccc

SEQ ID NO: 580928 - RNA, 22 nt, Human
ucagggaaccucuccuguuucu

SEQ ID NO: 580929 - RNA, 22 nt, Human
auuuucuauucugcugguuuag

SEQ ID NO: 580930 - RNA, 22 nt, Human
uuuauugucaaucuauucccag

SEQ ID NO: 580931 - RNA, 22 nt, Human
ccaccaggacagcccugagggg

SEQ ID NO: 580932 - RNA, 22 nt, Human
agugcuggagggaggcagguuc

SEQ ID NO: 580933 - RNA, 22 nt, Human
acugggccuggauuggcguguc

SEQ ID NO: 580934 - RNA, 22 nt, Human
ggugaaauauuuuugauauguu

SEQ ID NO: 580935 - RNA, 19 nt, Human
uggggccuccugucccugg

SEQ ID NO: 580936 - RNA, 22 nt, Human
ccacagcaugcaggccugacac

SEQ ID NO: 580937 - RNA, 20 nt, Human
cugcaguccccucugaauca

SEQ ID NO: 580938 - RNA, 22 nt, Human
acaguccuguacaggccauauc

SEQ ID NO: 580939 - RNA, 22 nt, Human
agggaagcaggaauagcucuga

SEQ ID NO: 580940 - RNA, 22 nt, Human
gcacucaggacucucaucagua

SEQ ID NO: 580941 - RNA, 23 nt, Human
cagggcugguagggaagagcgug

SEQ ID NO: 580942 - RNA, 22 nt, Human
gggacugggagauccuccuggc

SEQ ID NO: 580943 - RNA, 22 nt, Human
gccccagcucugccacaacuag

SEQ ID NO: 580944 - RNA, 22 nt, Human
ccagggcuucccacgugcccug

SEQ ID NO: 580945 - RNA, 22 nt, Human
agacaaauaacuuuuuaugucc

SEQ ID NO: 580946 - RNA, 22 nt, Human
auuccacacaguaauacucaau

SEQ ID NO: 580947 - RNA, 22 nt, Human
uuacacaaacacauuccagaua

SEQ ID NO: 580948 - RNA, 19 nt, Human
ugcucucuggugcuucaug

SEQ ID NO: 580949 - RNA, 22 nt, Human
acauucauuccaggucagucag

SEQ ID NO: 580950 - RNA, 22 nt, Human
aacaugcuggguguuuuugaug

SEQ ID NO: 580951 - RNA, 22 nt, Human
uucugaaauuucuguagaucuu

SEQ ID NO: 580952 - RNA, 22 nt, Human
agguggagaagagaugggcagu

SEQ ID NO: 580953 - RNA, 22 nt, Human
gugauauuuuuaaagauuaagg

SEQ ID NO: 580954 - RNA, 22 nt, Human
cagcucagucuugaagcacugg

SEQ ID NO: 580955 - RNA, 22 nt, Human
uacccagcaaucccuagagguu

SEQ ID NO: 580956 - RNA, 22 nt, Human
cagcuggcaaguggagcagggu

SEQ ID NO: 580957 - RNA, 22 nt, Human
aggccagaaauuuggaguaugu

SEQ ID NO: 580958 - RNA, 22 nt, Human
agcagaggacaguucuuaggaa

SEQ ID NO: 580959 - RNA, 22 nt, Human
gcccaggaguugaagggcugac

SEQ ID NO: 580960 - RNA, 22 nt, Human
ucaggcugcagcugucagcagc

SEQ ID NO: 580961 - RNA, 20 nt, Human
uccugccacaccucaguugc

SEQ ID NO: 580962 - RNA, 22 nt, Human
augaacaauaaucaugucuaug

SEQ ID NO: 580963 - RNA, 22 nt, Human
aaggcauuggacuaguaucaga

SEQ ID NO: 580964 - RNA, 22 nt, Human
cagcuuuguggccuugaccucg

SEQ ID NO: 580965 - RNA, 22 nt, Human
aggauguguucauagcugacgc

SEQ ID NO: 580966 - RNA, 16 nt, Human
ggcuccagaauagcga

SEQ ID NO: 580967 - RNA, 22 nt, Human
aacauuuccggccuuuuguucu

SEQ ID NO: 580968 - RNA, 22 nt, Human
agaaauacugugagagcagccu

SEQ ID NO: 580969 - RNA, 22 nt, Human
agccaggcgggucuuugcuccu

SEQ ID NO: 580970 - RNA, 22 nt, Human
gccguuagauaauaacaagcau

SEQ ID NO: 580971 - RNA, 22 nt, Human
uguuuuuuuauauaccugaagu

SEQ ID NO: 580972 - RNA, 22 nt, Human
cucugagacucaagugaguggg

SEQ ID NO: 580973 - RNA, 22 nt, Human
uuucuccugcccagaugccugg

SEQ ID NO: 580974 - RNA, 22 nt, Human
cagcuuuguccugcaaaccuga

SEQ ID NO: 580975 - RNA, 22 nt, Human
ccugcacuaccuggggcugcug

SEQ ID NO: 580976 - RNA, 22 nt, Human
guggacaugcauacauauguuu

SEQ ID NO: 580977 - RNA, 22 nt, Human
uuaaagcauguugcuuaacagg

SEQ ID NO: 580978 - RNA, 22 nt, Human
uucauagugacaugcauucugg

SEQ ID NO: 580979 - RNA, 22 nt, Human
ucaguguuugguuucagaauug

SEQ ID NO: 580980 - RNA, 21 nt, Human
cccugguuccacugucaccgc

SEQ ID NO: 580981 - RNA, 22 nt, Human
uagcaaagaccaaagcuaguug

SEQ ID NO: 580982 - RNA, 22 nt, Human
gggauuugugggauggccagug

SEQ ID NO: 580983 - RNA, 23 nt, Human
augacaaacaggacaucuugugc

SEQ ID NO: 580984 - RNA, 22 nt, Human
aaaagcaguuuauagucaguug

SEQ ID NO: 580985 - RNA, 22 nt, Human
uaacagcaaccacagugcuggu

SEQ ID NO: 580986 - RNA, 22 nt, Human
agaggccagaaaguaugccacc

SEQ ID NO: 580987 - RNA, 22 nt, Human
ccagagaguaucauggagagua

SEQ ID NO: 580988 - RNA, 22 nt, Human
ggcagcaaguggugggagacuu

SEQ ID NO: 580989 - RNA, 22 nt, Human
ucaguaaaauuacagaucuaca

SEQ ID NO: 580990 - RNA, 22 nt, Human
cuguuuuaauggagacugaugu

SEQ ID NO: 580991 - RNA, 22 nt, Human
ggguuuuaugguucacuugcaa

SEQ ID NO: 580992 - RNA, 22 nt, Human
gaugcaggauagcuucacccag

SEQ ID NO: 580993 - RNA, 22 nt, Human
ccccaccauguagaaacugaga

SEQ ID NO: 580994 - RNA, 22 nt, Human
uuuaugacccaagaagauacca

SEQ ID NO: 580995 - RNA, 22 nt, Human
cccaggcucccaggugggacaa

SEQ ID NO: 580996 - RNA, 22 nt, Human
uaaaucucacuggguauauugg

SEQ ID NO: 580997 - RNA, 22 nt, Human
gggguggauuucaggcgguguc

SEQ ID NO: 580998 - RNA, 22 nt, Human
accuuauucuugcccuuagaug

SEQ ID NO: 580999 - RNA, 22 nt, Human
caggagacaaguuagcagcuga

SEQ ID NO: 581000 - RNA, 21 nt, Human
uaaauaauaaguugcugagau

SEQ ID NO: 581001 - RNA, 22 nt, Human
ggagagagaccuccaugcccag

SEQ ID NO: 581002 - RNA, 22 nt, Human
ugccuacauuccuugcuuaugg

SEQ ID NO: 581003 - RNA, 22 nt, Human
gguuaucauaguuguuaucagg

SEQ ID NO: 581004 - RNA, 22 nt, Human
gccugaaguuucaugccucuau

SEQ ID NO: 581005 - RNA, 22 nt, Human
cuuuguaaucauucccuugguu

SEQ ID NO: 581006 - RNA, 22 nt, Human
uuugcauuacuugacuuuaguu

SEQ ID NO: 581007 - RNA, 22 nt, Human
gcagauggugccaugucuugug

SEQ ID NO: 581008 - RNA, 22 nt, Human
aaggcagcaacuaauggaucuc

SEQ ID NO: 581009 - RNA, 22 nt, Human
uccuugggucagugagugaggu

SEQ ID NO: 581010 - RNA, 22 nt, Human
uugcaguuucuggaugccuucu

SEQ ID NO: 581011 - RNA, 22 nt, Human
acauagcucagcauaaucgugg

SEQ ID NO: 581012 - RNA, 22 nt, Human
ucccucucuggcuggggugcgg

SEQ ID NO: 581013 - RNA, 20 nt, Human
gcagugcuggugccucugcu

SEQ ID NO: 581014 - RNA, 22 nt, Human
agauggggcucaguguggaggc

SEQ ID NO: 581015 - RNA, 22 nt, Human
aaugcugucuuagcaugaaagc

SEQ ID NO: 581016 - RNA, 22 nt, Human
ggaggucaaauggagggcuggg

SEQ ID NO: 581017 - RNA, 22 nt, Human
ggcuccaguuuccccuuggggc

SEQ ID NO: 581018 - RNA, 22 nt, Human
uuacuaggccaguuuucacuuu

SEQ ID NO: 581019 - RNA, 22 nt, Human
cugucuuuuacuaucauuuacu

SEQ ID NO: 581020 - RNA, 22 nt, Human
ugccucugaggaagauuguguu

SEQ ID NO: 581021 - RNA, 22 nt, Human
uuuagauaaugcucaagcaauu

SEQ ID NO: 581022 - RNA, 22 nt, Human
caagucuagcuuggucacuugg

SEQ ID NO: 581023 - RNA, 22 nt, Human
augagcauccagaacagugccu

SEQ ID NO: 581024 - RNA, 22 nt, Human
acauuguuuggaggagugagag

SEQ ID NO: 581025 - RNA, 22 nt, Human
acaagcuccuuauucagcuggg

SEQ ID NO: 581026 - RNA, 20 nt, Human
cagccuccacucacucagcu

SEQ ID NO: 581027 - RNA, 22 nt, Human
gaggagagaacauuccuccaua

SEQ ID NO: 581028 - RNA, 22 nt, Human
uuuacagaugaggaaacugaga

SEQ ID NO: 581029 - RNA, 22 nt, Human
guucucucucuugccugggugg

SEQ ID NO: 581030 - RNA, 20 nt, Human
aaagugcacagauacagcuc

SEQ ID NO: 581031 - RNA, 19 nt, Human
cugaggugaggggcaucau

SEQ ID NO: 581032 - RNA, 17 nt, Human
agcagcuggcacaggag

SEQ ID NO: 581033 - RNA, 22 nt, Human
uacuguuuucuuuauaguacag

SEQ ID NO: 581034 - RNA, 22 nt, Human
cagugcaguuucccagaugcug

SEQ ID NO: 581035 - RNA, 22 nt, Human
gugcagggagcccagaaggucc

SEQ ID NO: 581036 - RNA, 22 nt, Human
aaaugguaugaaaagagauuuc

SEQ ID NO: 581037 - RNA, 22 nt, Human
uauuccaugccagaguuuauug

SEQ ID NO: 581038 - RNA, 22 nt, Human
aauagcuuaugggauagauguu

SEQ ID NO: 581039 - RNA, 22 nt, Human
gggagacccccaaugccagguc

SEQ ID NO: 581040 - RNA, 22 nt, Human
uggcaggaucuuugagagugaa

SEQ ID NO: 581041 - RNA, 22 nt, Human
ugaaauguuuggguccagaagu

SEQ ID NO: 581042 - RNA, 20 nt, Human
gcacccagcuucuuguucua

SEQ ID NO: 581043 - RNA, 22 nt, Human
uucaggagaaaguucaguacuu

SEQ ID NO: 581044 - RNA, 22 nt, Human
agcugugggccugggagagcug

SEQ ID NO: 581045 - RNA, 20 nt, Human
ucuagcuuagugccugccuc

SEQ ID NO: 581046 - RNA, 22 nt, Human
ucaacaaauacuuaaagcagag

SEQ ID NO: 581047 - RNA, 18 nt, Human
ccagcugugcagcaucug

SEQ ID NO: 581048 - RNA, 22 nt, Human
acaguaaagccuucugguugac

SEQ ID NO: 581049 - RNA, 22 nt, Human
caguccuuagucuggauggcuu

SEQ ID NO: 581050 - RNA, 22 nt, Human
cuguauaauucaugcucuuauu

SEQ ID NO: 581051 - RNA, 22 nt, Human
ggccugagcucuggggaggcaa

SEQ ID NO: 581052 - RNA, 22 nt, Human
cauagaauaugugugauuguua

SEQ ID NO: 581053 - RNA, 22 nt, Human
ccuguacuagggucucauugcc

SEQ ID NO: 581054 - RNA, 22 nt, Human
ucacacugugaagagacaagca

SEQ ID NO: 581055 - RNA, 22 nt, Human
gcauuuuauaaagaguuauuug

SEQ ID NO: 581056 - RNA, 22 nt, Human
aauucauugccagaaucuauga

SEQ ID NO: 581057 - RNA, 22 nt, Human
accacauuucugaauagcauaa

SEQ ID NO: 581058 - RNA, 22 nt, Human
aggugucugggcuuuggaguca

SEQ ID NO: 581059 - RNA, 22 nt, Human
aacucacacaaguauugccugc

SEQ ID NO: 581060 - RNA, 22 nt, Human
uccugccucuuuucuuauucca

SEQ ID NO: 581061 - RNA, 22 nt, Human
cagcuucugagcaagccagggg

SEQ ID NO: 581062 - RNA, 18 nt, Human
caauagaaacaguaggaa

SEQ ID NO: 581063 - RNA, 22 nt, Human
uggcuucucccucugccugauu

SEQ ID NO: 581064 - RNA, 22 nt, Human
ugcgauggcguagacaaauccc

SEQ ID NO: 581065 - RNA, 21 nt, Human
ccuggcugcacaguugcuggu

SEQ ID NO: 581066 - RNA, 22 nt, Human
gcugcaggaugaggcucugcuc

SEQ ID NO: 581067 - RNA, 22 nt, Human
auguaugucugcauacacauac

SEQ ID NO: 581068 - RNA, 22 nt, Human
cccaaagcagggucauugggcc

SEQ ID NO: 581069 - RNA, 22 nt, Human
gggcaucuucuguagccaucuc

SEQ ID NO: 581070 - RNA, 22 nt, Human
cuccugggcuucgaaggcuccc

SEQ ID NO: 581071 - RNA, 22 nt, Human
cuggccucaccucagacuuacu

SEQ ID NO: 581072 - RNA, 22 nt, Human
ugucucuuggcucuaucacuua

SEQ ID NO: 581073 - RNA, 22 nt, Human
agugggcagcccaggaggucuu

SEQ ID NO: 581074 - RNA, 22 nt, Human
uggccaagccacugcugggucu

SEQ ID NO: 581075 - RNA, 22 nt, Human
auuuuuaugacaaaccauccuc

SEQ ID NO: 581076 - RNA, 22 nt, Human
accacuguacagcagauauagu

SEQ ID NO: 581077 - RNA, 22 nt, Human
auaccauuguuucuaccagcug

SEQ ID NO: 581078 - RNA, 22 nt, Human
cagagugaacagugggaugugc

SEQ ID NO: 581079 - RNA, 22 nt, Human
ugcuggagaagcuccugggacu

SEQ ID NO: 581080 - RNA, 22 nt, Human
uggcagaggaggcucagauuga

SEQ ID NO: 581081 - RNA, 22 nt, Human
ggcucugcuuccuggaauugug

SEQ ID NO: 581082 - RNA, 22 nt, Human
cccaaggccucuccuuggcuug

SEQ ID NO: 581083 - RNA, 22 nt, Human
agccugggagacacuaaguugu

SEQ ID NO: 581084 - RNA, 22 nt, Human
aaggacaggcacagugguggag

SEQ ID NO: 581085 - RNA, 22 nt, Human
aagccuuuuccaccuaauagag

SEQ ID NO: 581086 - RNA, 22 nt, Human
cagcuuccaucuccacugcccu

SEQ ID NO: 581087 - RNA, 22 nt, Human
uuucaagaauugaagaggauuu

SEQ ID NO: 581088 - RNA, 22 nt, Human
gcacccagggacuuggcuggcc

SEQ ID NO: 581089 - RNA, 22 nt, Human
aagugugggaaguagguggcga

SEQ ID NO: 581090 - RNA, 22 nt, Human
uuuaucuguauaucucaagugu

SEQ ID NO: 581091 - RNA, 22 nt, Human
uuuagcuucuucagcuuguuca

SEQ ID NO: 581092 - RNA, 22 nt, Human
aggaguuuggggauuagucagg

SEQ ID NO: 581093 - RNA, 22 nt, Human
ugaggguaaccuggagcugcug

SEQ ID NO: 581094 - RNA, 22 nt, Human
aaacuacacuuugggaccagca

SEQ ID NO: 581095 - RNA, 22 nt, Human
uggcaguuauuaaucaagucuu

SEQ ID NO: 581096 - RNA, 22 nt, Human
ucugagcuucugcauuuccaac

SEQ ID NO: 581097 - RNA, 22 nt, Human
agcccucauggaacagcuccua

SEQ ID NO: 581098 - RNA, 22 nt, Human
auuuugauaaucauguuagaga

SEQ ID NO: 581099 - RNA, 20 nt, Human
gcagcugcccccagucccug

SEQ ID NO: 581100 - RNA, 22 nt, Human
aggaagcuccuggagagccagu

SEQ ID NO: 581101 - RNA, 22 nt, Human
uaaagguaugucuuaaucaaac

SEQ ID NO: 581102 - RNA, 22 nt, Human
gcuggugauugccucaggaggc

SEQ ID NO: 581103 - RNA, 22 nt, Human
ccuacagacaaaccagugacua

SEQ ID NO: 581104 - RNA, 17 nt, Human
ugugcucucucacucag

SEQ ID NO: 581105 - RNA, 22 nt, Human
aggucagaaaaggagagcauug

SEQ ID NO: 581106 - RNA, 22 nt, Human
caggcagccaggggaccugucc

SEQ ID NO: 581107 - RNA, 22 nt, Human
uauucauuaugaccaaaucuag

SEQ ID NO: 581108 - RNA, 18 nt, Human
gcccagaggucugggccc

SEQ ID NO: 581109 - RNA, 22 nt, Human
cggcugagcagugcugauggaa

SEQ ID NO: 581110 - RNA, 22 nt, Human
acagccaggaggaacucaguga

SEQ ID NO: 581111 - RNA, 22 nt, Human
ggaggaggggugacugaaugcu

SEQ ID NO: 581112 - RNA, 22 nt, Human
uuuguguuuucacuagcagugu

SEQ ID NO: 581113 - RNA, 22 nt, Human
gucuccuuguggaucucaagga

SEQ ID NO: 581114 - RNA, 17 nt, Human
ggcugugccaggugaga

SEQ ID NO: 581115 - RNA, 22 nt, Human
agcuguguagggaaucagagaa

SEQ ID NO: 581116 - RNA, 22 nt, Human
acaccuuugugaagugaugaug

SEQ ID NO: 581117 - RNA, 22 nt, Human
ugugcuucugcagagacuauuu

SEQ ID NO: 581118 - RNA, 23 nt, Human
acagaguacagugugcuuagugg

SEQ ID NO: 581119 - RNA, 22 nt, Human
gacccaggggcagggagaaagu

SEQ ID NO: 581120 - RNA, 21 nt, Human
acugugauaaugcuuuuucug

SEQ ID NO: 581121 - RNA, 22 nt, Human
guggcucaguuaacuuccaugu

SEQ ID NO: 581122 - RNA, 19 nt, Human
aggaaggaaccugagucug

SEQ ID NO: 581123 - RNA, 22 nt, Human
uuuggccuuguguucucuccau

SEQ ID NO: 581124 - RNA, 22 nt, Human
ccugaggcuuaaucugucccaa

SEQ ID NO: 581125 - RNA, 22 nt, Human
ucuuaugaaaagcacuuagaac

SEQ ID NO: 581126 - RNA, 22 nt, Human
uuucugcuuucagagugagaca

SEQ ID NO: 581127 - RNA, 22 nt, Human
gugcagggcagccgaaugggcu

SEQ ID NO: 581128 - RNA, 22 nt, Human
uucucuggagaguaucuucuua

SEQ ID NO: 581129 - RNA, 22 nt, Human
auugaaagcauggauuuggauu

SEQ ID NO: 581130 - RNA, 22 nt, Human
gggcugagcuaagcuggguuga

SEQ ID NO: 581131 - RNA, 22 nt, Human
aacaaguguauuaauggaaaua

SEQ ID NO: 581132 - RNA, 22 nt, Human
caugcagauauuuuuauugugg

SEQ ID NO: 581133 - RNA, 22 nt, Human
ucuuuagcuagaaauacucuaa

SEQ ID NO: 581134 - RNA, 22 nt, Human
gagagggccagggugagaacua

SEQ ID NO: 581135 - RNA, 22 nt, Human
auauaauucucagguuugacua

SEQ ID NO: 581136 - RNA, 19 nt, Human
aggaaaggaucaaaauagc

SEQ ID NO: 581137 - RNA, 22 nt, Human
cagcagucaggcaaaugggagg

SEQ ID NO: 581138 - RNA, 22 nt, Human
guuucaaagucagaaaaggagg

SEQ ID NO: 581139 - RNA, 22 nt, Human
aggcucugcaguccaucccgug

SEQ ID NO: 581140 - RNA, 22 nt, Human
aggcacugaagaacucuuuuug

SEQ ID NO: 581141 - RNA, 22 nt, Human
ggccucaguuucuucaacugua

SEQ ID NO: 581142 - RNA, 22 nt, Human
cuauauucuggaauguccauuu

SEQ ID NO: 581143 - RNA, 22 nt, Human
guuuccuuucuauugccuugau

SEQ ID NO: 581144 - RNA, 20 nt, Human
gccucagccaacccaugggg

SEQ ID NO: 581145 - RNA, 22 nt, Human
cccaggaggccaagguugcagu

SEQ ID NO: 581146 - RNA, 22 nt, Human
agcgcgcucgaugguuuccgcg

SEQ ID NO: 581147 - RNA, 22 nt, Human
ucagaagcauccauuucaccac

SEQ ID NO: 581148 - RNA, 22 nt, Human
uuagcaucugcuguaagcuuau

SEQ ID NO: 581149 - RNA, 22 nt, Human
uuauggaaaugaaauuuuauug

SEQ ID NO: 581150 - RNA, 22 nt, Human
ggagccagagcacuggggagcc

SEQ ID NO: 581151 - RNA, 22 nt, Human
uagaaagcccuguguucacugc

SEQ ID NO: 581152 - RNA, 22 nt, Human
gcagcugaaagggaucucuaca

SEQ ID NO: 581153 - RNA, 22 nt, Human
uacuucccacuggggucuacca

SEQ ID NO: 581154 - RNA, 22 nt, Human
aggcaucugcugcccuucugga

SEQ ID NO: 581155 - RNA, 22 nt, Human
acagguccuuauaagagcacuc

SEQ ID NO: 581156 - RNA, 20 nt, Human
caaggcagaccagagugagu

SEQ ID NO: 581157 - RNA, 22 nt, Human
aagcucagagucucggagggaa

SEQ ID NO: 581158 - RNA, 22 nt, Human
cccugagagugagugccaccuu

SEQ ID NO: 581159 - RNA, 22 nt, Human
uguuuuaucaagauggcauguc

SEQ ID NO: 581160 - RNA, 22 nt, Human
gagcugccaagauuacaaucag

SEQ ID NO: 581161 - RNA, 22 nt, Human
aaucacauuuacauugcuaauu

SEQ ID NO: 581162 - RNA, 22 nt, Human
agcagaagaaagccacaugacu

SEQ ID NO: 581163 - RNA, 22 nt, Human
gugcuaggauuacaggcauggg

SEQ ID NO: 581164 - RNA, 22 nt, Human
aggcagcuggcagcacccaggg

SEQ ID NO: 581165 - RNA, 22 nt, Human
gcucccagauuucagccuugug

SEQ ID NO: 581166 - RNA, 22 nt, Human
ggcucaggacacagugguuuag

SEQ ID NO: 581167 - RNA, 22 nt, Human
uuauuaauacaugcaccugcau

SEQ ID NO: 581168 - RNA, 22 nt, Human
uuaagagggugaugcuagcauu

SEQ ID NO: 581169 - RNA, 22 nt, Human
cuaacgaauauguaugcauguu

SEQ ID NO: 581170 - RNA, 22 nt, Human
uaauuuacuugcaaauaacaau

SEQ ID NO: 581171 - RNA, 22 nt, Human
cauaaaauggcuuguucuuuaa

SEQ ID NO: 581172 - RNA, 22 nt, Human
gaggcccagcagcgcaggucuu

SEQ ID NO: 581173 - RNA, 22 nt, Human
uauagugugugagagagugaaa

SEQ ID NO: 581174 - RNA, 22 nt, Human
ugcuuccagcucucuguaaggu

SEQ ID NO: 581175 - RNA, 22 nt, Human
cuuguuuuuaagagauguuuac

SEQ ID NO: 581176 - RNA, 22 nt, Human
augugcuugcagaugagccuca

SEQ ID NO: 581177 - RNA, 22 nt, Human
ggcuggucccggguccuccggc

SEQ ID NO: 581178 - RNA, 22 nt, Human
cagagucuuguguguucagccc

SEQ ID NO: 581179 - RNA, 22 nt, Human
augagcuguaagguggcuuccu

SEQ ID NO: 581180 - RNA, 22 nt, Human
uucuucugaaacauaaucaaua

SEQ ID NO: 581181 - RNA, 22 nt, Human
agcuuaggaggaugaugaacau

SEQ ID NO: 581182 - RNA, 22 nt, Human
aggcuucuugagccccacaggc

SEQ ID NO: 581183 - RNA, 22 nt, Human
guacaaaugcagguuuguuaca

SEQ ID NO: 581184 - RNA, 22 nt, Human
aacacuguaucagucuucaaua

SEQ ID NO: 581185 - RNA, 22 nt, Human
cagcuauucucugaaaugaaua

SEQ ID NO: 581186 - RNA, 22 nt, Human
aguggguggcgcagaggaggaa

SEQ ID NO: 581187 - RNA, 22 nt, Human
ugcucugucaagaaaagaugcc

SEQ ID NO: 581188 - RNA, 22 nt, Human
gugccagggggcacugaacaga

SEQ ID NO: 581189 - RNA, 22 nt, Human
gauggcccgcuagcuggccucu

SEQ ID NO: 581190 - RNA, 22 nt, Human
aggcaugcgccaauuuauuaga

SEQ ID NO: 581191 - RNA, 22 nt, Human
aggccaggacacuuaaguaaga

SEQ ID NO: 581192 - RNA, 23 nt, Human
ccacagcuauaggguagugcagu

SEQ ID NO: 581193 - RNA, 22 nt, Human
ccuccuggguucaagcgauucu

SEQ ID NO: 581194 - RNA, 22 nt, Human
agaauuugguaguuauuuuugg

SEQ ID NO: 581195 - RNA, 22 nt, Human
agugaaaagaugcauuucucug

SEQ ID NO: 581196 - RNA, 22 nt, Human
cagggcuguggaaaacuggugc

SEQ ID NO: 581197 - RNA, 22 nt, Human
cuggagcugggcuaggguagga

SEQ ID NO: 581198 - RNA, 22 nt, Human
gaggcacaguguuuggucagug

SEQ ID NO: 581199 - RNA, 22 nt, Human
acaggauuagcaaguaaucagg

SEQ ID NO: 581200 - RNA, 22 nt, Human
uacauauucaacguucaguauu

SEQ ID NO: 581201 - RNA, 19 nt, Human
gcauuucucuuuacagcca

SEQ ID NO: 581202 - RNA, 22 nt, Human
aagacuuucucccaaauccuca

SEQ ID NO: 581203 - RNA, 22 nt, Human
aagauuuacuuucuuuguaaua

SEQ ID NO: 581204 - RNA, 22 nt, Human
aguaccauuacucacuuauuuu

SEQ ID NO: 581205 - RNA, 20 nt, Human
cagaggcaaggagacuugga

SEQ ID NO: 581206 - RNA, 21 nt, Human
ggggccucuccacacagccgg

SEQ ID NO: 581207 - RNA, 22 nt, Human
aacuuuaaaaaauaugucuguu

SEQ ID NO: 581208 - RNA, 22 nt, Human
aaugaacaacacugaaggaaga

SEQ ID NO: 581209 - RNA, 22 nt, Human
agcaacauuuuucaauuaacau

SEQ ID NO: 581210 - RNA, 22 nt, Human
ucacuguuagagcaaacguaug

SEQ ID NO: 581211 - RNA, 22 nt, Human
ucuguccauucagaauggcccu

SEQ ID NO: 581212 - RNA, 22 nt, Human
ucuugaaggggggcaguguuga

SEQ ID NO: 581213 - RNA, 19 nt, Human
agggaaggauucugucauu

SEQ ID NO: 581214 - RNA, 20 nt, Human
ggggaagaaaaggaugugau

SEQ ID NO: 581215 - RNA, 22 nt, Human
agccccuuggaacacagggcug

SEQ ID NO: 581216 - RNA, 22 nt, Human
uaacaucuuuagcagcucgaac

SEQ ID NO: 581217 - RNA, 22 nt, Human
auaaaaguuuccaaucaugccu

SEQ ID NO: 581218 - RNA, 22 nt, Human
uggcccagugcuuaugcucuga

SEQ ID NO: 581219 - RNA, 22 nt, Human
aagaguuauaguugguaugugg

SEQ ID NO: 581220 - RNA, 22 nt, Human
uuuuaauuuugcaaaucuggug

SEQ ID NO: 581221 - RNA, 22 nt, Human
uuuguucacugagcaaugauua

SEQ ID NO: 581222 - RNA, 22 nt, Human
gccucuccgagccacugccucu

SEQ ID NO: 581223 - RNA, 22 nt, Human
augcagggaccuuugcuuuggu

SEQ ID NO: 581224 - RNA, 22 nt, Human
aggcuuuaauuaucuacaggag

SEQ ID NO: 581225 - RNA, 22 nt, Human
caguggcagaucaccaacugga

SEQ ID NO: 581226 - RNA, 22 nt, Human
uuccugggcugcagagagcacc

SEQ ID NO: 581227 - RNA, 22 nt, Human
agcaggaacucagggaguucuc

SEQ ID NO: 581228 - RNA, 22 nt, Human
uggugcaagucucugaggaggg

SEQ ID NO: 581229 - RNA, 22 nt, Human
uccuggugcugacacccauagc

SEQ ID NO: 581230 - RNA, 20 nt, Human
cauuucauugugucuucacu

SEQ ID NO: 581231 - RNA, 22 nt, Human
aauaaaguguauucuuugucau

SEQ ID NO: 581232 - RNA, 22 nt, Human
gccuaggagacaagcgugaaag

SEQ ID NO: 581233 - RNA, 22 nt, Human
uguguuggcugccggcacagga

SEQ ID NO: 581234 - RNA, 22 nt, Human
gcagaggugaguuucucagcug

SEQ ID NO: 581235 - RNA, 22 nt, Human
aauggcuuauguaaugcuguuu

SEQ ID NO: 581236 - RNA, 22 nt, Human
ggcccugagcugaaguacugug

SEQ ID NO: 581237 - RNA, 22 nt, Human
aauuaagagagaguugaagcaa

SEQ ID NO: 581238 - RNA, 22 nt, Human
augauucuggugagaaugagga

SEQ ID NO: 581239 - RNA, 18 nt, Human
acaggcugugggaauggu

SEQ ID NO: 581240 - RNA, 22 nt, Human
ucucugaauaaugcuauucuuu

SEQ ID NO: 581241 - RNA, 22 nt, Human
gguggggcucagcaaucugugu

SEQ ID NO: 581242 - RNA, 21 nt, Human
aggagggcacaaggccaggaa

SEQ ID NO: 581243 - RNA, 22 nt, Human
auugcaguguguguuccaugag

SEQ ID NO: 581244 - RNA, 22 nt, Human
ccccacaacucauguugaaacu

SEQ ID NO: 581245 - RNA, 22 nt, Human
aguaacauuuagcuucucacug

SEQ ID NO: 581246 - RNA, 22 nt, Human
gcuacaguagauaaggacgguc

SEQ ID NO: 581247 - RNA, 22 nt, Human
ccacagaaccucagcuuugagc

SEQ ID NO: 581248 - RNA, 22 nt, Human
caaauuaaugugucucaaaaua

SEQ ID NO: 581249 - RNA, 22 nt, Human
acccugagccaaaccaguuaga

SEQ ID NO: 581250 - RNA, 22 nt, Human
aagcccagcugaaagcauuuuu

SEQ ID NO: 581251 - RNA, 22 nt, Human
gagcuucagagaccacuuaacu

SEQ ID NO: 581252 - RNA, 22 nt, Human
guugaggagguucagggugguu

SEQ ID NO: 581253 - RNA, 22 nt, Human
ugggaagaugauaauucacagu

SEQ ID NO: 581254 - RNA, 22 nt, Human
ccagcccuugagauggaaggga

SEQ ID NO: 581255 - RNA, 22 nt, Human
uccuucagaaaaccucagucuu

SEQ ID NO: 581256 - RNA, 22 nt, Human
uggacaggaucugagacugaga

SEQ ID NO: 581257 - RNA, 22 nt, Human
ucuuagcacagcuauauaaguu

SEQ ID NO: 581258 - RNA, 22 nt, Human
augggcuguccuaguccagccc

SEQ ID NO: 581259 - RNA, 18 nt, Human
augcauauuuuaaguugu

SEQ ID NO: 581260 - RNA, 22 nt, Human
aguggcauuuuaauggauguca

SEQ ID NO: 581261 - RNA, 22 nt, Human
guggccauuuggaaggcaagua

SEQ ID NO: 581262 - RNA, 22 nt, Human
cugucucucuaggacacugggg

SEQ ID NO: 581263 - RNA, 15 nt, Human
uuucaaaaugaggcc

SEQ ID NO: 581264 - RNA, 22 nt, Human
ugugugugugcgcgcacgcaua

SEQ ID NO: 581265 - RNA, 22 nt, Human
uugugaaaagccgcaaguauag

SEQ ID NO: 581266 - RNA, 22 nt, Human
gccuggagugcaguggcgugau

SEQ ID NO: 581267 - RNA, 22 nt, Human
uaaacauuuguuauucuuguuu

SEQ ID NO: 581268 - RNA, 22 nt, Human
auaucacaguaguuguuuaguu

SEQ ID NO: 581269 - RNA, 22 nt, Human
agcgcaggaacacgucugccuu

SEQ ID NO: 581270 - RNA, 20 nt, Human
guggcaggcagugaaggagc

SEQ ID NO: 581271 - RNA, 17 nt, Human
gugcagggaugaaggau

SEQ ID NO: 581272 - RNA, 23 nt, Human
cccaggagccugaguccucucug

SEQ ID NO: 581273 - RNA, 22 nt, Human
agguauuuaugagagcacauau

SEQ ID NO: 581274 - RNA, 22 nt, Human
gaauuuuagaauaugugggcuu

SEQ ID NO: 581275 - RNA, 22 nt, Human
ggcucaccauggccucccugcu

SEQ ID NO: 581276 - RNA, 22 nt, Human
cucugacaccaucucaugacag

SEQ ID NO: 581277 - RNA, 22 nt, Human
ggcugagaagacaguggggugg

SEQ ID NO: 581278 - RNA, 22 nt, Human
ugggaaggcguggaaguagaag

SEQ ID NO: 581279 - RNA, 22 nt, Human
gcugccaccguggagaugagug

SEQ ID NO: 581280 - RNA, 22 nt, Human
ccugugggucacaugggugacu

SEQ ID NO: 581281 - RNA, 22 nt, Human
auuuaugacguguucggucaau

SEQ ID NO: 581282 - RNA, 22 nt, Human
uuuucuauucauugucuauggu

SEQ ID NO: 581283 - RNA, 22 nt, Human
uuuucaagggcagggaaaucau

SEQ ID NO: 581284 - RNA, 22 nt, Human
cacugccuggaaggagagacau

SEQ ID NO: 581285 - RNA, 18 nt, Human
ggcagugcagucucaggg

SEQ ID NO: 581286 - RNA, 22 nt, Human
aaauauaauuucugccucaaua

SEQ ID NO: 581287 - RNA, 22 nt, Human
uuugucuuaaaucuuguuacug

SEQ ID NO: 581288 - RNA, 22 nt, Human
gggccugagacugagggugagg

SEQ ID NO: 581289 - RNA, 22 nt, Human
uggcccugacuuggaggccuga

SEQ ID NO: 581290 - RNA, 18 nt, Human
aagcugcccucaggcagg

SEQ ID NO: 581291 - RNA, 22 nt, Human
aauacuuaugugaccucauuuu

SEQ ID NO: 581292 - RNA, 22 nt, Human
guuugaaaguggcaaguccuug

SEQ ID NO: 581293 - RNA, 22 nt, Human
acaaagcuuagaccuaagagau

SEQ ID NO: 581294 - RNA, 22 nt, Human
gauguuucaugcuagcaugugu

SEQ ID NO: 581295 - RNA, 22 nt, Human
ccuuugugaauaugcagaaaau

SEQ ID NO: 581296 - RNA, 22 nt, Human
aacaucuuguacugcacauuuu

SEQ ID NO: 581297 - RNA, 22 nt, Human
ugcugaggaauaauuguuccug

SEQ ID NO: 581298 - RNA, 22 nt, Human
acauucauggguuuuacauuau

SEQ ID NO: 581299 - RNA, 22 nt, Human
uuauuaugccauuaccucccug

SEQ ID NO: 581300 - RNA, 22 nt, Human
cccuggaggucagaggccuggg

SEQ ID NO: 581301 - RNA, 22 nt, Human
ugcuuaaacacauacauacaua

SEQ ID NO: 581302 - RNA, 22 nt, Human
cagaauacccuauagacagaau

SEQ ID NO: 581303 - RNA, 22 nt, Human
ucagaauauauucauguuguca

SEQ ID NO: 581304 - RNA, 22 nt, Human
uguugauuaguguuuagacuua

SEQ ID NO: 581305 - RNA, 22 nt, Human
aagcaauguguuaaugaaugag

SEQ ID NO: 581306 - RNA, 22 nt, Human
acugcucaaggaucugguaggg

SEQ ID NO: 581307 - RNA, 22 nt, Human
gagcugccaguguaugaauucu

SEQ ID NO: 581308 - RNA, 22 nt, Human
gcuggagcgugauccuugaucu

SEQ ID NO: 581309 - RNA, 22 nt, Human
cugagaaauucuuucuuucacu

SEQ ID NO: 581310 - RNA, 22 nt, Human
caauuaaagaagaccugccuca

SEQ ID NO: 581311 - RNA, 22 nt, Human
uucucauucugacucaguguag

SEQ ID NO: 581312 - RNA, 22 nt, Human
uaugaagacaaugauagcauga

SEQ ID NO: 581313 - RNA, 22 nt, Human
ugcagggcaucuuugaagugug

SEQ ID NO: 581314 - RNA, 22 nt, Human
ugaggcucaagaauagacagua

SEQ ID NO: 581315 - RNA, 17 nt, Human
cucuuuugucuucuucc

SEQ ID NO: 581316 - RNA, 22 nt, Human
caggaagauuagaccaagagcu

SEQ ID NO: 581317 - RNA, 22 nt, Human
guuucucaaauuauuucagcuu

SEQ ID NO: 581318 - RNA, 22 nt, Human
auguuuauggagcagguauuag

SEQ ID NO: 581319 - RNA, 22 nt, Human
uuucaauguaacauuuccaggc

SEQ ID NO: 581320 - RNA, 22 nt, Human
aaaugcuugcucuugauuauuu

SEQ ID NO: 581321 - RNA, 22 nt, Human
ucugggauuuuauagacaugcu

SEQ ID NO: 581322 - RNA, 22 nt, Human
auccacucccuaacaccauguu

SEQ ID NO: 581323 - RNA, 22 nt, Human
acuggcagccacaacuggcagg

SEQ ID NO: 581324 - RNA, 22 nt, Human
uauguacaucguugaauucaaa

SEQ ID NO: 581325 - RNA, 22 nt, Human
cuaugaccccagcaugaauaag

SEQ ID NO: 581326 - RNA, 22 nt, Human
auacacaggugcuaggucaaua

SEQ ID NO: 581327 - RNA, 22 nt, Human
gaaaauguuuccuguuauuugc

SEQ ID NO: 581328 - RNA, 22 nt, Human
aagggcuggucuagaaagggag

SEQ ID NO: 581329 - RNA, 22 nt, Human
aaauauuagggagaacagggac

SEQ ID NO: 581330 - RNA, 22 nt, Human
aauuccaaguagcaucccauca

SEQ ID NO: 581331 - RNA, 22 nt, Human
aagggcuguaagccaaguaaag

SEQ ID NO: 581332 - RNA, 22 nt, Human
ucugaaauuuuaguuauagaaa

SEQ ID NO: 581333 - RNA, 22 nt, Human
uguucuuacggaacuuaucuuu

SEQ ID NO: 581334 - RNA, 22 nt, Human
caguuuuaggacauguggaugu

SEQ ID NO: 581335 - RNA, 22 nt, Human
uggagugaaguaaagaggacaa

SEQ ID NO: 581336 - RNA, 22 nt, Human
cagcucuggcagagcccaaccc

SEQ ID NO: 581337 - RNA, 22 nt, Human
gcaugcugcaccagagccucuc

SEQ ID NO: 581338 - RNA, 22 nt, Human
acaggcuugcacuaggguggca

SEQ ID NO: 581339 - RNA, 22 nt, Human
agggcuggccacaugauuuggu

SEQ ID NO: 581340 - RNA, 22 nt, Human
auuugcauuuagaaagaucacu

SEQ ID NO: 581341 - RNA, 22 nt, Human
uuucagaaaacuuaucaucagu

SEQ ID NO: 581342 - RNA, 22 nt, Human
gaggagcacaugaggcugaggg

SEQ ID NO: 581343 - RNA, 22 nt, Human
auuucaguguugguuagcaagc

SEQ ID NO: 581344 - RNA, 22 nt, Human
uuuccacugggcacggggccag

SEQ ID NO: 581345 - RNA, 22 nt, Human
cagacagaaggcuccuugaggu

SEQ ID NO: 581346 - RNA, 22 nt, Human
acaguguuucacuuaaccguuu

SEQ ID NO: 581347 - RNA, 22 nt, Human
gggcucugggauucagagcaag

SEQ ID NO: 581348 - RNA, 22 nt, Human
ugucuccucaacucaugcucga

SEQ ID NO: 581349 - RNA, 22 nt, Human
agcuuuuaguacguuaaaauug

SEQ ID NO: 581350 - RNA, 22 nt, Human
accaggagucuagccuagucaa

SEQ ID NO: 581351 - RNA, 22 nt, Human
ccaggucuggaaccaccagggc

SEQ ID NO: 581352 - RNA, 21 nt, Human
gccugcccucugugauggcca

SEQ ID NO: 581353 - RNA, 22 nt, Human
cagguggaucucuaaggacuga

SEQ ID NO: 581354 - RNA, 22 nt, Human
aggcuaaggagugugaugcuca

SEQ ID NO: 581355 - RNA, 22 nt, Human
guugaggagcaagcaugugucu

SEQ ID NO: 581356 - RNA, 22 nt, Human
uccugaaauucugguugucacu

SEQ ID NO: 581357 - RNA, 22 nt, Human
gccagguggcugagcagcugca

SEQ ID NO: 581358 - RNA, 18 nt, Human
cugaggccaacuacacug

SEQ ID NO: 581359 - RNA, 22 nt, Human
uuucaaacuuuacucuugaauc

SEQ ID NO: 581360 - RNA, 22 nt, Human
agggcagcagcggcccaggccu

SEQ ID NO: 581361 - RNA, 22 nt, Human
aaagguuugcauggaauuuacc

SEQ ID NO: 581362 - RNA, 22 nt, Human
uuccuucucuguggggaaggca

SEQ ID NO: 581363 - RNA, 21 nt, Human
aggggaaguagaguuuugauu

SEQ ID NO: 581364 - RNA, 22 nt, Human
ucagaacauuaaggauuugaag

SEQ ID NO: 581365 - RNA, 21 nt, Human
uugauuuuaggaaguuuguca

SEQ ID NO: 581366 - RNA, 19 nt, Human
cagagcugcuggccucguc

SEQ ID NO: 581367 - RNA, 22 nt, Human
agcugcagauucuaucuagaag

SEQ ID NO: 581368 - RNA, 17 nt, Human
agcagaagucagaggga

SEQ ID NO: 581369 - RNA, 22 nt, Human
guugaaagaugucuugguuccc

SEQ ID NO: 581370 - RNA, 22 nt, Human
uugcauuugagaaaguucuccu

SEQ ID NO: 581371 - RNA, 22 nt, Human
uaguaucuuucuauauuuccca

SEQ ID NO: 581372 - RNA, 22 nt, Human
ccucagucuugaauuagccaga

SEQ ID NO: 581373 - RNA, 21 nt, Human
gauaaagcagcuugccuaagg

SEQ ID NO: 581374 - RNA, 20 nt, Human
aauguauaugugaccccaaa

SEQ ID NO: 581375 - RNA, 22 nt, Human
aggugggacccguggggugcga

SEQ ID NO: 581376 - RNA, 22 nt, Human
ccacaaaacugugugucaaaga

SEQ ID NO: 581377 - RNA, 23 nt, Human
agaagcaaugcuuuuuuuccucu

SEQ ID NO: 581378 - RNA, 22 nt, Human
uccuucuuugacaaguggcaga

SEQ ID NO: 581379 - RNA, 22 nt, Human
auuuguaucaaucucaauauau

SEQ ID NO: 581380 - RNA, 22 nt, Human
ccaguguucaucaagaaaaugu

SEQ ID NO: 581381 - RNA, 22 nt, Human
aguaacagaaggccugacuuaa

SEQ ID NO: 581382 - RNA, 22 nt, Human
gccuccaggguagaggaggaag

SEQ ID NO: 581383 - RNA, 22 nt, Human
gugggcaguuggugauucucgu

SEQ ID NO: 581384 - RNA, 23 nt, Human
uguguguguauucuacgcaaggu

SEQ ID NO: 581385 - RNA, 22 nt, Human
ggcaggcaggucuucauggccc

SEQ ID NO: 581386 - RNA, 22 nt, Human
aaguaugugauacauguuaauu

SEQ ID NO: 581387 - RNA, 22 nt, Human
cccaggcuggcacugcugaagu

SEQ ID NO: 581388 - RNA, 22 nt, Human
uguauuuuuaggaaugcgcuau

SEQ ID NO: 581389 - RNA, 22 nt, Human
aaagcaguaugaaaggcaauaa

SEQ ID NO: 581390 - RNA, 22 nt, Human
uaacagaaacagauaaguguaa

SEQ ID NO: 581391 - RNA, 22 nt, Human
cagaggccuggcuuggacaccu

SEQ ID NO: 581392 - RNA, 20 nt, Human
ugcugcugcuucacccccau

SEQ ID NO: 581393 - RNA, 22 nt, Human
gugggagaaauuagcucuaguu

SEQ ID NO: 581394 - RNA, 22 nt, Human
gagcaagauccuguuuuucuau

SEQ ID NO: 581395 - RNA, 22 nt, Human
cugucuuugguccugucuguua

SEQ ID NO: 581396 - RNA, 22 nt, Human
ugugguggcuauucuggucuca

SEQ ID NO: 581397 - RNA, 22 nt, Human
ggagccuguuaguugagugcuc

SEQ ID NO: 581398 - RNA, 22 nt, Human
gacacagaugaucaggugugga

SEQ ID NO: 581399 - RNA, 22 nt, Human
ccugucaggguuugccucagaa

SEQ ID NO: 581400 - RNA, 22 nt, Human
gagagaagaaagccaugguccu

SEQ ID NO: 581401 - RNA, 22 nt, Human
aaaugcuguaacugauauucug

SEQ ID NO: 581402 - RNA, 22 nt, Human
auauguuuugugcuucauuggu

SEQ ID NO: 581403 - RNA, 22 nt, Human
auuagcuauaugcuaugugcca

SEQ ID NO: 581404 - RNA, 22 nt, Human
ccauccugcaggaccuccauau

SEQ ID NO: 581405 - RNA, 22 nt, Human
augugcuucauaaucuucucau

SEQ ID NO: 581406 - RNA, 22 nt, Human
uaaguacaaauguauacauaag

SEQ ID NO: 581407 - RNA, 21 nt, Human
ccucuggcuugugcugugccc

SEQ ID NO: 581408 - RNA, 22 nt, Human
agguggcucugacagcucuggu

SEQ ID NO: 581409 - RNA, 22 nt, Human
caggugaguaacaaugggugau

SEQ ID NO: 581410 - RNA, 22 nt, Human
caguccugggcaggucaggcca

SEQ ID NO: 581411 - RNA, 22 nt, Human
acaguggaugacauccuuuugc

SEQ ID NO: 581412 - RNA, 22 nt, Human
caggggcuuuuccucuauaagg

SEQ ID NO: 581413 - RNA, 22 nt, Human
agagagggaauauuugggguau

SEQ ID NO: 581414 - RNA, 19 nt, Human
guguggcagagagugacca

SEQ ID NO: 581415 - RNA, 22 nt, Human
aagcuucaguucuggggcaaug

SEQ ID NO: 581416 - RNA, 22 nt, Human
agagggcugcugcacagugcuc

SEQ ID NO: 581417 - RNA, 22 nt, Human
uuuagcauuaagcuuuucaaau

SEQ ID NO: 581418 - RNA, 22 nt, Human
agccagcuguucuggggcagca

SEQ ID NO: 581419 - RNA, 22 nt, Human
uucugagagagccucucauguu

SEQ ID NO: 581420 - RNA, 22 nt, Human
aucuuauugcuguugccagaua

SEQ ID NO: 581421 - RNA, 21 nt, Human
uuagaagcuaaugcagcuggu

SEQ ID NO: 581422 - RNA, 22 nt, Human
ccaggcucugugugggcuagag

SEQ ID NO: 581423 - RNA, 22 nt, Human
uucuccauuuaacuuccuuaug

SEQ ID NO: 581424 - RNA, 22 nt, Human
ucaaaauuuuauuucucaagga

SEQ ID NO: 581425 - RNA, 22 nt, Human
ucuucuaguaggccaagaagcu

SEQ ID NO: 581426 - RNA, 20 nt, Human
cuccaguguucaggggagug

SEQ ID NO: 581427 - RNA, 22 nt, Human
agaguacugccucaguuaugaa

SEQ ID NO: 581428 - RNA, 19 nt, Human
cugcagggaugugcagagu

SEQ ID NO: 581429 - RNA, 22 nt, Human
ucucuggcagacaccucccuga

SEQ ID NO: 581430 - RNA, 22 nt, Human
ggagcccugcccuaggcagcuc

SEQ ID NO: 581431 - RNA, 22 nt, Human
cauuucaaaagaauugccagaa

SEQ ID NO: 581432 - RNA, 22 nt, Human
ucauucugcaucacucuugcuc

SEQ ID NO: 581433 - RNA, 22 nt, Human
uuucuugauuagcuguggcuca

SEQ ID NO: 581434 - RNA, 20 nt, Human
ccacaggaguccagucgacc

SEQ ID NO: 581435 - RNA, 22 nt, Human
guuauaaaugacugcaaaaguu

SEQ ID NO: 581436 - RNA, 22 nt, Human
ucaguaaaugcuugcaggccga

SEQ ID NO: 581437 - RNA, 22 nt, Human
guggucaggcagugggagagaa

SEQ ID NO: 581438 - RNA, 23 nt, Human
agggcaugaagcagaggacgugg

SEQ ID NO: 581439 - RNA, 22 nt, Human
agggguggccugccuuacuccc

SEQ ID NO: 581440 - RNA, 22 nt, Human
gugaggagggcuggucccaggc

SEQ ID NO: 581441 - RNA, 22 nt, Human
caugaaaaauuuacuguuaaca

SEQ ID NO: 581442 - RNA, 22 nt, Human
ugguauguaaauuguaacucaa

SEQ ID NO: 581443 - RNA, 22 nt, Human
agggcucuuccuuugccucuca

SEQ ID NO: 581444 - RNA, 22 nt, Human
ccucuucuaggacguccuugug

SEQ ID NO: 581445 - RNA, 22 nt, Human
cacauuuacauauaaaacuuuc

SEQ ID NO: 581446 - RNA, 22 nt, Human
aaguaaauguuggagcucaaau

SEQ ID NO: 581447 - RNA, 22 nt, Human
uguguggauucaucucaaagag

SEQ ID NO: 581448 - RNA, 22 nt, Human
cacccaggacaaaauauggaau

SEQ ID NO: 581449 - RNA, 22 nt, Human
aauggcacaagaguaaacuguu

SEQ ID NO: 581450 - RNA, 22 nt, Human
cagaaccaggaacugauggaga

SEQ ID NO: 581451 - RNA, 22 nt, Human
ggaggccuagaaaagugguucu

SEQ ID NO: 581452 - RNA, 22 nt, Human
uccugggacccugggugcagag

SEQ ID NO: 581453 - RNA, 22 nt, Human
ucauugucuugauaugauuguc

SEQ ID NO: 581454 - RNA, 22 nt, Human
gcagagugaggaagagcuucca

SEQ ID NO: 581455 - RNA, 22 nt, Human
ccagcuccucuucccaguguca

SEQ ID NO: 581456 - RNA, 22 nt, Human
uucauucuguuuggaaaggugg

SEQ ID NO: 581457 - RNA, 22 nt, Human
agguggucuuggcccacccagg

SEQ ID NO: 581458 - RNA, 22 nt, Human
ugggccacauuccaaaccagcu

SEQ ID NO: 581459 - RNA, 22 nt, Human
caguuucuuuccauuguuaccu

SEQ ID NO: 581460 - RNA, 22 nt, Human
agcagcacgaguccacaaaucc

SEQ ID NO: 581461 - RNA, 22 nt, Human
cacaggccaguaagacuguguu

SEQ ID NO: 581462 - RNA, 22 nt, Human
gccucagguaaaacuugaguuu

SEQ ID NO: 581463 - RNA, 22 nt, Human
caggaggcccaaagggcgcaga

SEQ ID NO: 581464 - RNA, 22 nt, Human
cagcaagauuuuuaaagcaagg

SEQ ID NO: 581465 - RNA, 22 nt, Human
uucccucccccagccuggcagg

SEQ ID NO: 581466 - RNA, 22 nt, Human
gaggaacuuaugauauucuacu

SEQ ID NO: 581467 - RNA, 22 nt, Human
ugccuggggauugcucugggcc

SEQ ID NO: 581468 - RNA, 22 nt, Human
caaacuuucaguuauaacauga

SEQ ID NO: 581469 - RNA, 22 nt, Human
aggcaccgcuccucaguccaga

SEQ ID NO: 581470 - RNA, 22 nt, Human
ucaguuuucaauuucaucagag

SEQ ID NO: 581471 - RNA, 22 nt, Human
cauggccaggccaagagaguac

SEQ ID NO: 581472 - RNA, 22 nt, Human
gacaggaggcagagcucaggug

SEQ ID NO: 581473 - RNA, 22 nt, Human
ggccagaggccacagcuguguc

SEQ ID NO: 581474 - RNA, 22 nt, Human
agcugccagaugacagugcuau

SEQ ID NO: 581475 - RNA, 22 nt, Human
cccaggcuuuuaaguuagacag

SEQ ID NO: 581476 - RNA, 22 nt, Human
aaauuagugcaccagguugaag

SEQ ID NO: 581477 - RNA, 22 nt, Human
ugagcuagggcuggugaggagc

SEQ ID NO: 581478 - RNA, 22 nt, Human
ccagggcauguaacuaauggug

SEQ ID NO: 581479 - RNA, 22 nt, Human
cacaaucauaauguauguacau

SEQ ID NO: 581480 - RNA, 22 nt, Human
gaagcacauggcugugagcaac

SEQ ID NO: 581481 - RNA, 22 nt, Human
uuacuuaaaaauucuaagcccc

SEQ ID NO: 581482 - RNA, 22 nt, Human
agaaagagcucgggauuaacag

SEQ ID NO: 581483 - RNA, 19 nt, Human
uccagccugcuguuucucu

SEQ ID NO: 581484 - RNA, 22 nt, Human
agccucucuuucugguggcuaa

SEQ ID NO: 581485 - RNA, 22 nt, Human
agggcuguuuuuggcaccuggg

SEQ ID NO: 581486 - RNA, 22 nt, Human
uccugggacucuuuaucagaga

SEQ ID NO: 581487 - RNA, 22 nt, Human
agagccuguacuuuucugugaa

SEQ ID NO: 581488 - RNA, 22 nt, Human
uacucacauucuguuucuugcu

SEQ ID NO: 581489 - RNA, 22 nt, Human
ugccccucuaggcccuguucua

SEQ ID NO: 581490 - RNA, 22 nt, Human
uaggauuuaauaaaagaauaga

SEQ ID NO: 581491 - RNA, 22 nt, Human
aaucuucauguccucucuaauu

SEQ ID NO: 581492 - RNA, 22 nt, Human
cugaggcucccucgggucugcu

SEQ ID NO: 581493 - RNA, 22 nt, Human
ugcugaggaaaaaugugacucu

SEQ ID NO: 581494 - RNA, 22 nt, Human
ugccugccucaggccgagugcu

SEQ ID NO: 581495 - RNA, 22 nt, Human
gggcauggugaugugcaccugu

SEQ ID NO: 581496 - RNA, 22 nt, Human
gauuaagauuacauauuuaagu

SEQ ID NO: 581497 - RNA, 22 nt, Human
guucacaagcugauugucuuuc

SEQ ID NO: 581498 - RNA, 22 nt, Human
ccagccuggagggcaguggugg

SEQ ID NO: 581499 - RNA, 22 nt, Human
cuguggaguggggaguacuggu

SEQ ID NO: 581500 - RNA, 22 nt, Human
agacaauggagggaaauacuuc

SEQ ID NO: 581501 - RNA, 22 nt, Human
cugggcacacucugcuccagcu

SEQ ID NO: 581502 - RNA, 19 nt, Human
cagcccucuuaccacugug

SEQ ID NO: 581503 - RNA, 22 nt, Human
uaauccaaaacugaaucugugg

SEQ ID NO: 581504 - RNA, 22 nt, Human
ccucccaggcauugccauuuuc

SEQ ID NO: 581505 - RNA, 22 nt, Human
gcuguguugggaaucauguggg

SEQ ID NO: 581506 - RNA, 22 nt, Human
aucacauuauguagugaaaagg

SEQ ID NO: 581507 - RNA, 22 nt, Human
acugaugugacagcugagcaga

SEQ ID NO: 581508 - RNA, 22 nt, Human
agagaaauuucccugccuucug

SEQ ID NO: 581509 - RNA, 18 nt, Human
gcagcugacacuggaguu

SEQ ID NO: 581510 - RNA, 23 nt, Human
guguguucccggaguagcucccg

SEQ ID NO: 581511 - RNA, 22 nt, Human
cuacccaggcuggagugcagua

SEQ ID NO: 581512 - RNA, 22 nt, Human
uuuuaaguuaauauaauugagg

SEQ ID NO: 581513 - RNA, 18 nt, Human
gccagagggcccaagguc

SEQ ID NO: 581514 - RNA, 22 nt, Human
agaggcaggagguugacuugag

SEQ ID NO: 581515 - RNA, 22 nt, Human
gcaggcagagguggaggagaca

SEQ ID NO: 581516 - RNA, 22 nt, Human
uugcaguugucuuuccuaauuu

SEQ ID NO: 581517 - RNA, 22 nt, Human
accuccagcuuuuuagagacau

SEQ ID NO: 581518 - RNA, 22 nt, Human
auacaguauaacuaauaaaccc

SEQ ID NO: 581519 - RNA, 22 nt, Human
acuuguuagauauaaaguuugu

SEQ ID NO: 581520 - RNA, 22 nt, Human
ugcucuucaccauuacaucaug

SEQ ID NO: 581521 - RNA, 22 nt, Human
caguccagccaguagggugugg

SEQ ID NO: 581522 - RNA, 22 nt, Human
aagagggcugcaaucuuauugc

SEQ ID NO: 581523 - RNA, 22 nt, Human
aaaaacacaaguggcuuggucu

SEQ ID NO: 581524 - RNA, 22 nt, Human
caggaaggaaaggguguggaga

SEQ ID NO: 581525 - RNA, 22 nt, Human
agcugccuuauggaguaugaaa

SEQ ID NO: 581526 - RNA, 22 nt, Human
caggaugggauguagugggccc

SEQ ID NO: 581527 - RNA, 22 nt, Human
uuucugauuugacuugaaguau

SEQ ID NO: 581528 - RNA, 22 nt, Human
auuuaagaggcugcuagaguau

SEQ ID NO: 581529 - RNA, 22 nt, Human
gcuccuggccagcacagggccc

SEQ ID NO: 581530 - RNA, 22 nt, Human
uuuuaccugaaccacacaguau

SEQ ID NO: 581531 - RNA, 22 nt, Human
uuuuccuauaugcaaagaaugc

SEQ ID NO: 581532 - RNA, 22 nt, Human
caggcuucaugaauuaugcacc

SEQ ID NO: 581533 - RNA, 22 nt, Human
accuacauggcuuuaaguaagu

SEQ ID NO: 581534 - RNA, 22 nt, Human
gaggagacaguggagccgcuac

SEQ ID NO: 581535 - RNA, 22 nt, Human
acacaaugucaucauaauguca

SEQ ID NO: 581536 - RNA, 21 nt, Human
ucaggcugucugcugguucca

SEQ ID NO: 581537 - RNA, 22 nt, Human
caggaacacaaugagucucaaa

SEQ ID NO: 581538 - RNA, 22 nt, Human
agcccaggaaguugaggcuugc

SEQ ID NO: 581539 - RNA, 20 nt, Human
gggaggccccagaguccagg

SEQ ID NO: 581540 - RNA, 22 nt, Human
cacuggcuugauggguaaugcc

SEQ ID NO: 581541 - RNA, 21 nt, Human
ucuuggccuaaguucacugaa

SEQ ID NO: 581542 - RNA, 22 nt, Human
gccccagccaaggugacacgaa

SEQ ID NO: 581543 - RNA, 22 nt, Human
gugcuucucuucacacccaacu

SEQ ID NO: 581544 - RNA, 22 nt, Human
cucccuggucuuucccaucauu

SEQ ID NO: 581545 - RNA, 22 nt, Human
aaaucagacacagugaaaguua

SEQ ID NO: 581546 - RNA, 22 nt, Human
aagauuuuuuuccacagacuca

SEQ ID NO: 581547 - RNA, 22 nt, Human
gagcacaggcugcugugaacug

SEQ ID NO: 581548 - RNA, 22 nt, Human
ucacugcagacaaccucaguca

SEQ ID NO: 581549 - RNA, 22 nt, Human
agagccagauggagccgugugu

SEQ ID NO: 581550 - RNA, 22 nt, Human
ugcaauaacuacuuuaauguug

SEQ ID NO: 581551 - RNA, 22 nt, Human
ucucagaauuguguccacuggg

SEQ ID NO: 581552 - RNA, 22 nt, Human
uucuuaauaccuauuuucuacc

SEQ ID NO: 581553 - RNA, 22 nt, Human
auccugaguucucagagucucc

SEQ ID NO: 581554 - RNA, 22 nt, Human
agaccaggaaggccuacagaua

SEQ ID NO: 581555 - RNA, 21 nt, Human
ucucugguuggaguugugcca

SEQ ID NO: 581556 - RNA, 22 nt, Human
ucucagaaccucaguuugcucu

SEQ ID NO: 581557 - RNA, 22 nt, Human
ccuccuuccugggacagagcug

SEQ ID NO: 581558 - RNA, 22 nt, Human
ggucccuggaagucccucuucu

SEQ ID NO: 581559 - RNA, 22 nt, Human
ugcagaagaccuuccagggcug

SEQ ID NO: 581560 - RNA, 22 nt, Human
gcacagcacagcaacauguuuu

SEQ ID NO: 581561 - RNA, 22 nt, Human
uuuuaaugugcucugcaaugau

SEQ ID NO: 581562 - RNA, 22 nt, Human
uuuaacauguucaagaaacaua

SEQ ID NO: 581563 - RNA, 20 nt, Human
cuacuuuaggcacugagaau

SEQ ID NO: 581564 - RNA, 22 nt, Human
uggccuauuucaucaguucaau

SEQ ID NO: 581565 - RNA, 22 nt, Human
ucccuuggaaaguagccucaca

SEQ ID NO: 581566 - RNA, 22 nt, Human
guuuacauguuuuucucuuaca

SEQ ID NO: 581567 - RNA, 18 nt, Human
uggggucucucagguaag

SEQ ID NO: 581568 - RNA, 22 nt, Human
uccgggggugguagauuuccuu

SEQ ID NO: 581569 - RNA, 22 nt, Human
guuccccuuguguuguugccca

SEQ ID NO: 581570 - RNA, 22 nt, Human
uauggacaucugaaguugcaga

SEQ ID NO: 581571 - RNA, 22 nt, Human
uccucagggaagaugagccuca

SEQ ID NO: 581572 - RNA, 19 nt, Human
aaggcuggagaaggccucu

SEQ ID NO: 581573 - RNA, 22 nt, Human
auguucuuucagccagugcauc

SEQ ID NO: 581574 - RNA, 22 nt, Human
uuuagacagcggcucugaacca

SEQ ID NO: 581575 - RNA, 22 nt, Human
uugaggagcaggaugggaggcu

SEQ ID NO: 581576 - RNA, 19 nt, Human
gcugagguggaggaaggag

SEQ ID NO: 581577 - RNA, 21 nt, Human
caguucucuuagauuuccagu

SEQ ID NO: 581578 - RNA, 22 nt, Human
ggguuaaaacaggaagaucagc

SEQ ID NO: 581579 - RNA, 22 nt, Human
aaaauugucagaaguugaucuu

SEQ ID NO: 581580 - RNA, 17 nt, Human
aggaagcgagcuggccu

SEQ ID NO: 581581 - RNA, 22 nt, Human
cauugcuuugugcauauuuaaa

SEQ ID NO: 581582 - RNA, 22 nt, Human
uagaggagaguugcuggaugga

SEQ ID NO: 581583 - RNA, 22 nt, Human
uuuugaaagaguccugcuacag

SEQ ID NO: 581584 - RNA, 22 nt, Human
cucuggaauugaccugggaggg

SEQ ID NO: 581585 - RNA, 19 nt, Human
agacaugagacacaggaug

SEQ ID NO: 581586 - RNA, 22 nt, Human
gccuucucugugagcuccuagg

SEQ ID NO: 581587 - RNA, 22 nt, Human
uagcaaugcuucauuauuuaaa

SEQ ID NO: 581588 - RNA, 22 nt, Human
cacauucaggauuuuccauguc

SEQ ID NO: 581589 - RNA, 22 nt, Human
gcuggcagccaagugaagaggg

SEQ ID NO: 581590 - RNA, 22 nt, Human
cugagccagcuggcaugugcua

SEQ ID NO: 581591 - RNA, 22 nt, Human
acacuaaucuuuuauuugguuu

SEQ ID NO: 581592 - RNA, 22 nt, Human
ggagaggcuuggcccagccugg

SEQ ID NO: 581593 - RNA, 22 nt, Human
ucauggcacuuagcacaguccu

SEQ ID NO: 581594 - RNA, 22 nt, Human
uggaaacuagagaguuuguauu

SEQ ID NO: 581595 - RNA, 22 nt, Human
agaggccggccgagcccauggg

SEQ ID NO: 581596 - RNA, 22 nt, Human
acuuauuucauggaucauaaug

SEQ ID NO: 581597 - RNA, 22 nt, Human
cagcagagacgguaagcagaac

SEQ ID NO: 581598 - RNA, 22 nt, Human
ggaugcaggggcagcagagccu

SEQ ID NO: 581599 - RNA, 22 nt, Human
ggccugagucccaccuggcugu

SEQ ID NO: 581600 - RNA, 22 nt, Human
gauugagucugaggaugcugca

SEQ ID NO: 581601 - RNA, 22 nt, Human
gaagaggcaauugaauaagcua

SEQ ID NO: 581602 - RNA, 22 nt, Human
gcagcugagcgugaggaagagu

SEQ ID NO: 581603 - RNA, 22 nt, Human
gagcucagguggucaaaacaau

SEQ ID NO: 581604 - RNA, 22 nt, Human
gcaguguuuggauccauagcga

SEQ ID NO: 581605 - RNA, 20 nt, Human
cccagaagcuuaacagagca

SEQ ID NO: 581606 - RNA, 18 nt, Human
ugucaguaaagugacaga

SEQ ID NO: 581607 - RNA, 23 nt, Human
uagaaucuguauuucugcaguuc

SEQ ID NO: 581608 - RNA, 22 nt, Human
agaguuuggagagggugaggca

SEQ ID NO: 581609 - RNA, 22 nt, Human
acauuugacucuguucauauua

SEQ ID NO: 581610 - RNA, 22 nt, Human
ucugcagggucccagccucagc

SEQ ID NO: 581611 - RNA, 22 nt, Human
aauuagagaagcuucuuccauu

SEQ ID NO: 581612 - RNA, 22 nt, Human
caggggcuuaagugacagaagg

SEQ ID NO: 581613 - RNA, 22 nt, Human
ccaggcaggcagcguucucagg

SEQ ID NO: 581614 - RNA, 22 nt, Human
acugugagugauuuccuucugg

SEQ ID NO: 581615 - RNA, 22 nt, Human
acaagagacaagagguucuucu

SEQ ID NO: 581616 - RNA, 22 nt, Human
caagggaauugugugugagagg

SEQ ID NO: 581617 - RNA, 22 nt, Human
cccaguggggaaauagcuagcu

SEQ ID NO: 581618 - RNA, 22 nt, Human
agcuguggaagacugucagggu

SEQ ID NO: 581619 - RNA, 22 nt, Human
cuaauguaaagcauuuguucag

SEQ ID NO: 581620 - RNA, 22 nt, Human
agaggcugggaaggguccccgg

SEQ ID NO: 581621 - RNA, 22 nt, Human
ugaauucuuaaugaaaucuacu

SEQ ID NO: 581622 - RNA, 22 nt, Human
gagugagggccaacauccagcu

SEQ ID NO: 581623 - RNA, 22 nt, Human
agggucaguucugugagguguu

SEQ ID NO: 581624 - RNA, 18 nt, Human
cugaggcuggcaggagcc

SEQ ID NO: 581625 - RNA, 22 nt, Human
ugcagaguggauucuguauacc

SEQ ID NO: 581626 - RNA, 22 nt, Human
aggggcacuagaaugggagacu

SEQ ID NO: 581627 - RNA, 22 nt, Human
cuggcuugaaguuaugcaccag

SEQ ID NO: 581628 - RNA, 22 nt, Human
uugcuaaaucccuauaauauuc

SEQ ID NO: 581629 - RNA, 22 nt, Human
augauuuguuaacagacuuaau

SEQ ID NO: 581630 - RNA, 22 nt, Human
acggugcuggguauugggguuc

SEQ ID NO: 581631 - RNA, 22 nt, Human
caugaugucacagagaagcaca

SEQ ID NO: 581632 - RNA, 20 nt, Human
uccugcagucgcuagcgccc

SEQ ID NO: 581633 - RNA, 22 nt, Human
acuguccauucacucauauuca

SEQ ID NO: 581634 - RNA, 21 nt, Human
auagugauagauaacugaguu

SEQ ID NO: 581635 - RNA, 22 nt, Human
gagagaaaaaugagcuucauug

SEQ ID NO: 581636 - RNA, 22 nt, Human
cagggcugagucauauagccuu

SEQ ID NO: 581637 - RNA, 22 nt, Human
uuggggagguugccacauucca

SEQ ID NO: 581638 - RNA, 22 nt, Human
gagcugggaagauagcuugagc

SEQ ID NO: 581639 - RNA, 22 nt, Human
agggguuggauuuggccuagag

SEQ ID NO: 581640 - RNA, 22 nt, Human
uagaauauacacuacagcuuaa

SEQ ID NO: 581641 - RNA, 22 nt, Human
gcugggcaacgggcagaaagau

SEQ ID NO: 581642 - RNA, 22 nt, Human
cccagggucccugcucucugug

SEQ ID NO: 581643 - RNA, 22 nt, Human
cacagcuuguuuagugacucac

SEQ ID NO: 581644 - RNA, 22 nt, Human
aguuaucccaaaugcaaaaugg

SEQ ID NO: 581645 - RNA, 22 nt, Human
agggaaaggcugaugcuguggg

SEQ ID NO: 581646 - RNA, 22 nt, Human
ccauccaggcugugggugagcu

SEQ ID NO: 581647 - RNA, 22 nt, Human
aaguucaucuuaccuagauuuu

SEQ ID NO: 581648 - RNA, 22 nt, Human
ugguccuggaagguccugaggg

SEQ ID NO: 581649 - RNA, 22 nt, Human
gagcugccggcccacaguacua

SEQ ID NO: 581650 - RNA, 22 nt, Human
auaaaguggaaguguuaaaggg

SEQ ID NO: 581651 - RNA, 22 nt, Human
uuuucuguuugcuucaagacau

SEQ ID NO: 581652 - RNA, 22 nt, Human
auguuauaaauagagacacugg

SEQ ID NO: 581653 - RNA, 22 nt, Human
aaaauucauuccucagacugcc

SEQ ID NO: 581654 - RNA, 22 nt, Human
uauuuccuugagacggagucuc

SEQ ID NO: 581655 - RNA, 22 nt, Human
ucucuuaauccggugcuuucug

SEQ ID NO: 581656 - RNA, 22 nt, Human
uuucccucugugccagcuucuc

SEQ ID NO: 581657 - RNA, 22 nt, Human
uaaacagagagugcaguuauag

SEQ ID NO: 581658 - RNA, 22 nt, Human
ccaggcuugguguguggucagg

SEQ ID NO: 581659 - RNA, 22 nt, Human
gucauaaaaggaccaccuauug

SEQ ID NO: 581660 - RNA, 22 nt, Human
gucuucuuuucagucugcuugu

SEQ ID NO: 581661 - RNA, 22 nt, Human
ucacaagauacaguuagaagca

SEQ ID NO: 581662 - RNA, 22 nt, Human
uuacacauuaacaggcagcuaa

SEQ ID NO: 581663 - RNA, 22 nt, Human
ugaagggggagauauaugugug

SEQ ID NO: 581664 - RNA, 22 nt, Human
ucacacacauuugcugucugau

SEQ ID NO: 581665 - RNA, 22 nt, Human
gauauuuauuaagugguuggua

SEQ ID NO: 581666 - RNA, 22 nt, Human
auuaaauuuucacuaggcuccc

SEQ ID NO: 581667 - RNA, 22 nt, Human
caagaccucaaaaugagagggg

SEQ ID NO: 581668 - RNA, 22 nt, Human
cuugagucauauaaagacagag

SEQ ID NO: 581669 - RNA, 22 nt, Human
cuguguacccacgugggcaccc

SEQ ID NO: 581670 - RNA, 22 nt, Human
aagcagccagccaucaugcccg

SEQ ID NO: 581671 - RNA, 22 nt, Human
auggaaaugauggaacauuaaa

SEQ ID NO: 581672 - RNA, 22 nt, Human
cugcuuugacuguuaagaacca

SEQ ID NO: 581673 - RNA, 22 nt, Human
cuggggcugcggacgggagccc

SEQ ID NO: 581674 - RNA, 22 nt, Human
gaaaacugugauuagaaugccu

SEQ ID NO: 581675 - RNA, 22 nt, Human
aggcucugacgucacacguggc

SEQ ID NO: 581676 - RNA, 22 nt, Human
uuucucucagccuguagaaacu

SEQ ID NO: 581677 - RNA, 22 nt, Human
uggaaacacucaagcuuauauu

SEQ ID NO: 581678 - RNA, 22 nt, Human
ggaagaggaggagccaggcuuu

SEQ ID NO: 581679 - RNA, 22 nt, Human
acauuucuucccuuuagcagaa

SEQ ID NO: 581680 - RNA, 22 nt, Human
ggcuguguccccaccugagcag

SEQ ID NO: 581681 - RNA, 22 nt, Human
gaauuauagguuugcaugcuaa

SEQ ID NO: 581682 - RNA, 22 nt, Human
cgugaaaugaguugaauuauug

SEQ ID NO: 581683 - RNA, 22 nt, Human
uaagcaaugcuguaguucaguc

SEQ ID NO: 581684 - RNA, 21 nt, Human
ggcagugaugugaagugcauc

SEQ ID NO: 581685 - RNA, 22 nt, Human
cugaggucaauuaaucaacaac

SEQ ID NO: 581686 - RNA, 17 nt, Human
guguacaagcagaaggc

SEQ ID NO: 581687 - RNA, 22 nt, Human
uuccuguucaggaaaguugugu

SEQ ID NO: 581688 - RNA, 22 nt, Human
ucuacauuuuaacaagaugccc

SEQ ID NO: 581689 - RNA, 22 nt, Human
gagcagagcuucucaaaguaaa

SEQ ID NO: 581690 - RNA, 22 nt, Human
ucugcugugaaaggugaauauu

SEQ ID NO: 581691 - RNA, 20 nt, Human
ucugcucagcccucaguggc

SEQ ID NO: 581692 - RNA, 22 nt, Human
cagaguguauucugcaguugca

SEQ ID NO: 581693 - RNA, 22 nt, Human
uugcagggccuuggcuucuucc

SEQ ID NO: 581694 - RNA, 22 nt, Human
ucccagagcugauaagccuuua

SEQ ID NO: 581695 - RNA, 21 nt, Human
ugcuuuaugggaaaaauguca

SEQ ID NO: 581696 - RNA, 22 nt, Human
caagacauugauuuuguacaga

SEQ ID NO: 581697 - RNA, 22 nt, Human
cacuuuauuauaaauuugagag

SEQ ID NO: 581698 - RNA, 22 nt, Human
agggugaaucucacaacucuua

SEQ ID NO: 581699 - RNA, 22 nt, Human
caaagaguccagcacccucucc

SEQ ID NO: 581700 - RNA, 22 nt, Human
uguguuuacuucuaugcaguuu

SEQ ID NO: 581701 - RNA, 22 nt, Human
cugagguuuacaagcuauugcu

SEQ ID NO: 581702 - RNA, 22 nt, Human
cccagcucuuuuagcggcaucu

SEQ ID NO: 581703 - RNA, 23 nt, Human
aguguugguugggaagccaagca

SEQ ID NO: 581704 - RNA, 22 nt, Human
ccuucugugugcccacguuuau

SEQ ID NO: 581705 - RNA, 22 nt, Human
uuccagauuucuacacaagacc

SEQ ID NO: 581706 - RNA, 21 nt, Human
aucugaaagguuaguguugag

SEQ ID NO: 581707 - RNA, 22 nt, Human
ugagcagaugucuaacuuuuac

SEQ ID NO: 581708 - RNA, 22 nt, Human
uucccagaaugaauggauggag

SEQ ID NO: 581709 - RNA, 22 nt, Human
cuuuacacuuggacccacacuu

SEQ ID NO: 581710 - RNA, 22 nt, Human
ccagggcauccucacaucgcag

SEQ ID NO: 581711 - RNA, 22 nt, Human
aagcagagaaucugggagcgag

SEQ ID NO: 581712 - RNA, 22 nt, Human
acuuaaaguuauaauuugcuaa

SEQ ID NO: 581713 - RNA, 22 nt, Human
agccuggcuguaaccucauggu

SEQ ID NO: 581714 - RNA, 22 nt, Human
guuuaugaguuacguagggguu

SEQ ID NO: 581715 - RNA, 22 nt, Human
agggugguauuuaacaacugga

SEQ ID NO: 581716 - RNA, 22 nt, Human
cagcuccagccugacaccaaga

SEQ ID NO: 581717 - RNA, 22 nt, Human
guggcagcagaggggugguaug

SEQ ID NO: 581718 - RNA, 22 nt, Human
aaaaggaggucacuuuauuccu

SEQ ID NO: 581719 - RNA, 22 nt, Human
gugauggguaacuguuuaggga

SEQ ID NO: 581720 - RNA, 20 nt, Human
acagcagccuugcuagaaac

SEQ ID NO: 581721 - RNA, 22 nt, Human
agcugggcuccaagagggaucu

SEQ ID NO: 581722 - RNA, 22 nt, Human
aaagcuaugaggcaugcauuuc

SEQ ID NO: 581723 - RNA, 22 nt, Human
ucugaacacugagugucaucac

SEQ ID NO: 581724 - RNA, 22 nt, Human
cugucugucaccaaaacagacu

SEQ ID NO: 581725 - RNA, 22 nt, Human
gcuuccaguccucagaggcugg

SEQ ID NO: 581726 - RNA, 22 nt, Human
cugugucuucaauguacuggga

SEQ ID NO: 581727 - RNA, 22 nt, Human
uuacagagcucauuucuaaggg

SEQ ID NO: 581728 - RNA, 22 nt, Human
aggggagcaaggccguggugua

SEQ ID NO: 581729 - RNA, 22 nt, Human
caaugcuucucauuagccaaug

SEQ ID NO: 581730 - RNA, 22 nt, Human
uuuguuuucaaugugucauuca

SEQ ID NO: 581731 - RNA, 22 nt, Human
ucuggccaggauggcaagacca

SEQ ID NO: 581732 - RNA, 23 nt, Human
ugcuucucugcuugacaguucug

SEQ ID NO: 581733 - RNA, 23 nt, Human
cuguuaaauuccuuaagagcagg

SEQ ID NO: 581734 - RNA, 22 nt, Human
aauaaagacaaacaggggagcc

SEQ ID NO: 581735 - RNA, 22 nt, Human
caguauuuuccuuguuaacuua

SEQ ID NO: 581736 - RNA, 22 nt, Human
gcagggaaacaggugcuaagga

SEQ ID NO: 581737 - RNA, 22 nt, Human
cugaggccucuuuccuuggcuu

SEQ ID NO: 581738 - RNA, 22 nt, Human
cuacuuuaacauggaggcacuu

SEQ ID NO: 581739 - RNA, 22 nt, Human
ccugugggagggagcggcugga

SEQ ID NO: 581740 - RNA, 22 nt, Human
gaggcuccgugcugcugcccug

SEQ ID NO: 581741 - RNA, 22 nt, Human
ccuccagcgcgauccacuccgg

SEQ ID NO: 581742 - RNA, 22 nt, Human
agacaaguaggaaugguugaag

SEQ ID NO: 581743 - RNA, 22 nt, Human
ucagaaguugauaaaguaguug

SEQ ID NO: 581744 - RNA, 22 nt, Human
ucacaggaggaaccuggccugg

SEQ ID NO: 581745 - RNA, 22 nt, Human
gcagcauguugaaagggccaca

SEQ ID NO: 581746 - RNA, 22 nt, Human
cagccucugagccuuggcagau

SEQ ID NO: 581747 - RNA, 17 nt, Human
ucugagaacuugaagca

SEQ ID NO: 581748 - RNA, 22 nt, Human
agcccagagacaaugcucagua

SEQ ID NO: 581749 - RNA, 22 nt, Human
aucauuagaccaaacuagagcu

SEQ ID NO: 581750 - RNA, 22 nt, Human
agcccagggaaccaggaagugg

SEQ ID NO: 581751 - RNA, 22 nt, Human
ggccuguccagccugccuggcu

SEQ ID NO: 581752 - RNA, 22 nt, Human
uguuuacuucaucgaguacuuc

SEQ ID NO: 581753 - RNA, 22 nt, Human
cugccugcugauuaguauuguc

SEQ ID NO: 581754 - RNA, 22 nt, Human
ggacagaggguugacagaguau

SEQ ID NO: 581755 - RNA, 22 nt, Human
gcuggccacauugugccguccu

SEQ ID NO: 581756 - RNA, 22 nt, Human
agugcugucccgacaacugagg

SEQ ID NO: 581757 - RNA, 22 nt, Human
agagauuagccuggauuaugca

SEQ ID NO: 581758 - RNA, 22 nt, Human
ugugaagguuuuuaugggauau

SEQ ID NO: 581759 - RNA, 20 nt, Human
uggcccaguggggcagggug

SEQ ID NO: 581760 - RNA, 22 nt, Human
cagucugaacacugggcuacuc

SEQ ID NO: 581761 - RNA, 22 nt, Human
agcagggcuuugucucugugaa

SEQ ID NO: 581762 - RNA, 22 nt, Human
uggcuccagcccugagcaagcu

SEQ ID NO: 581763 - RNA, 17 nt, Human
cucugggcagccugggg

SEQ ID NO: 581764 - RNA, 23 nt, Human
cccugcucaggggucugauucuc

SEQ ID NO: 581765 - RNA, 22 nt, Human
uccucagcauuagcacagacau

SEQ ID NO: 581766 - RNA, 20 nt, Human
acaguguaauauucacauuc

SEQ ID NO: 581767 - RNA, 22 nt, Human
gugccuuuucuucauaguuacu

SEQ ID NO: 581768 - RNA, 22 nt, Human
aaggggugggcauuagagcagu

SEQ ID NO: 581769 - RNA, 22 nt, Human
gccacaugucaugugcucagua

SEQ ID NO: 581770 - RNA, 22 nt, Human
cugucugggucuacauccucug

SEQ ID NO: 581771 - RNA, 22 nt, Human
gcagcgaggugaugaaauagcu

SEQ ID NO: 581772 - RNA, 18 nt, Human
gcucaggcccuagucagu

SEQ ID NO: 581773 - RNA, 22 nt, Human
aauguuaauuuacugucuucau

SEQ ID NO: 581774 - RNA, 22 nt, Human
uuacaaaguuuaagguggcacu

SEQ ID NO: 581775 - RNA, 22 nt, Human
ugucccucauugacgcugugcc

SEQ ID NO: 581776 - RNA, 22 nt, Human
gccagcuguaagcuggggugau

SEQ ID NO: 581777 - RNA, 22 nt, Human
uucugggaacaaaguggagugg

SEQ ID NO: 581778 - RNA, 22 nt, Human
caagcugcagcgccugcgccgg

SEQ ID NO: 581779 - RNA, 22 nt, Human
gcuggccuugugucugaggaag

SEQ ID NO: 581780 - RNA, 22 nt, Human
uugccacacaaguaaagaaaca

SEQ ID NO: 581781 - RNA, 22 nt, Human
ccaguggguaggccauggugag

SEQ ID NO: 581782 - RNA, 22 nt, Human
aacauguugcuuuaauaauauu

SEQ ID NO: 581783 - RNA, 22 nt, Human
ugucucaguucccuucucugga

SEQ ID NO: 581784 - RNA, 22 nt, Human
aggccaaguagcuagcauugaa

SEQ ID NO: 581785 - RNA, 22 nt, Human
auuagauuguaaauguuuucac

SEQ ID NO: 581786 - RNA, 22 nt, Human
agaagccagcuucagcugcccg

SEQ ID NO: 581787 - RNA, 22 nt, Human
uccugguguuacuaaauugaaa

SEQ ID NO: 581788 - RNA, 22 nt, Human
ugugugugcacgugcgcgcgag

SEQ ID NO: 581789 - RNA, 22 nt, Human
gaggggcuggguagggcaaccc

SEQ ID NO: 581790 - RNA, 22 nt, Human
cuccucaguugucccauggaga

SEQ ID NO: 581791 - RNA, 23 nt, Human
aagcugccuucgcaguuggucug

SEQ ID NO: 581792 - RNA, 22 nt, Human
aagauacaccaagagccuagua

SEQ ID NO: 581793 - RNA, 22 nt, Human
aggcucuggacagugaggaguu

SEQ ID NO: 581794 - RNA, 22 nt, Human
uauuaaauuauggauuuaggag

SEQ ID NO: 581795 - RNA, 22 nt, Human
gaugcagggcuggcaggagcuu

SEQ ID NO: 581796 - RNA, 22 nt, Human
gcaguggauggccagcaggggc

SEQ ID NO: 581797 - RNA, 22 nt, Human
ugggagugauacaguauggaau

SEQ ID NO: 581798 - RNA, 22 nt, Human
gcuguguguucaauaaugugau

SEQ ID NO: 581799 - RNA, 18 nt, Human
ucucucugaagaguuccc

SEQ ID NO: 581800 - RNA, 22 nt, Human
gccacagcucacguuccccauu

SEQ ID NO: 581801 - RNA, 22 nt, Human
auaaagcuauuuuuaauucugu

SEQ ID NO: 581802 - RNA, 22 nt, Human
cagggagaagucuggucagucc

SEQ ID NO: 581803 - RNA, 22 nt, Human
gcugauuuugagaagcacaguc

SEQ ID NO: 581804 - RNA, 22 nt, Human
gccuccggagucacagugucuu

SEQ ID NO: 581805 - RNA, 22 nt, Human
auuguauacaagcuuaauuguu

SEQ ID NO: 581806 - RNA, 22 nt, Human
gcccaggccggagagcagugcu

SEQ ID NO: 581807 - RNA, 19 nt, Human
ugcaggaggacugagcaga

SEQ ID NO: 581808 - RNA, 22 nt, Human
auguguaaaaagugcuuaauau

SEQ ID NO: 581809 - RNA, 17 nt, Human
gaaaguuucucucucuu

SEQ ID NO: 581810 - RNA, 22 nt, Human
ggagcuguaacgagccauugcu

SEQ ID NO: 581811 - RNA, 22 nt, Human
gcuacaggugacagccucugca

SEQ ID NO: 581812 - RNA, 18 nt, Human
gcucuggcucaccuccag

SEQ ID NO: 581813 - RNA, 22 nt, Human
uggaaguugaaucucagucaug

SEQ ID NO: 581814 - RNA, 22 nt, Human
gagcugaguaugaaggauguga

SEQ ID NO: 581815 - RNA, 22 nt, Human
gcugucacacauggccccagcu

SEQ ID NO: 581816 - RNA, 22 nt, Human
gggaccugcgccacucacuguc

SEQ ID NO: 581817 - RNA, 22 nt, Human
ugugccagaaaauaugcugagg

SEQ ID NO: 581818 - RNA, 22 nt, Human
uuccugagcaccagacacugca

SEQ ID NO: 581819 - RNA, 22 nt, Human
ccagguggugccucuguucgca

SEQ ID NO: 581820 - RNA, 22 nt, Human
cagggagaucuuggcuccuggu

SEQ ID NO: 581821 - RNA, 22 nt, Human
ccacugccagcuuuguccuccc

SEQ ID NO: 581822 - RNA, 22 nt, Human
ugguccacagggaguccgugcu

SEQ ID NO: 581823 - RNA, 22 nt, Human
cuggcagcuuauuagaaaugca

SEQ ID NO: 581824 - RNA, 22 nt, Human
aauguguuacuguguaagagca

SEQ ID NO: 581825 - RNA, 22 nt, Human
agacagggucuugaucagagcu

SEQ ID NO: 581826 - RNA, 22 nt, Human
caugacaauauguucuuucauu

SEQ ID NO: 581827 - RNA, 22 nt, Human
cacacuguccccuucuccccag

SEQ ID NO: 581828 - RNA, 22 nt, Human
gcaccuggcugcccagguggag

SEQ ID NO: 581829 - RNA, 22 nt, Human
cacacagguaagccucuuucaa

SEQ ID NO: 581830 - RNA, 22 nt, Human
cagugugacuucugagcugcca

SEQ ID NO: 581831 - RNA, 22 nt, Human
uggcuuccuaggagcccgugcu

SEQ ID NO: 581832 - RNA, 22 nt, Human
ggcugcuggaagacugaacaag

SEQ ID NO: 581833 - RNA, 22 nt, Human
ucucugucugagccuggcagac

SEQ ID NO: 581834 - RNA, 22 nt, Human
ugucacauguguggcauuuuuc

SEQ ID NO: 581835 - RNA, 22 nt, Human
cugccuuugugaucaguucuuu

SEQ ID NO: 581836 - RNA, 22 nt, Human
aauaacuucaguucuuacauua

SEQ ID NO: 581837 - RNA, 20 nt, Human
augugaaagaucaguugucu

SEQ ID NO: 581838 - RNA, 22 nt, Human
uaucuacauucuuguaucuucu

SEQ ID NO: 581839 - RNA, 22 nt, Human
caggggaguuuuaugcaacaga

SEQ ID NO: 581840 - RNA, 22 nt, Human
uccaggaggacugagggggcug

SEQ ID NO: 581841 - RNA, 22 nt, Human
agguuugugucuugcuuaaggu

SEQ ID NO: 581842 - RNA, 22 nt, Human
uucuauugacauucacuguaac

SEQ ID NO: 581843 - RNA, 22 nt, Human
cagguggcagugccugcauucu

SEQ ID NO: 581844 - RNA, 22 nt, Human
caaauguaauaaggaguuuccc

SEQ ID NO: 581845 - RNA, 19 nt, Human
uggaaacuccugauauuag

SEQ ID NO: 581846 - RNA, 22 nt, Human
caaauaucuuuggcaaagagaa

SEQ ID NO: 581847 - RNA, 22 nt, Human
agcaggagacauggggguggug

SEQ ID NO: 581848 - RNA, 22 nt, Human
gcuuacaagccagcuguaccac

SEQ ID NO: 581849 - RNA, 20 nt, Human
gcagagcuguucugugggga

SEQ ID NO: 581850 - RNA, 23 nt, Human
cugagguaaaauauucugaagga

SEQ ID NO: 581851 - RNA, 22 nt, Human
ucugaggcauacccaggccccc

SEQ ID NO: 581852 - RNA, 22 nt, Human
gugugugucuccgcggccguag

SEQ ID NO: 581853 - RNA, 22 nt, Human
gccagcucagaugcaggaagga

SEQ ID NO: 581854 - RNA, 22 nt, Human
gagagucuaggaaccucauaua

SEQ ID NO: 581855 - RNA, 22 nt, Human
ucuguuauaaaucacacugcau

SEQ ID NO: 581856 - RNA, 22 nt, Human
agaggccagcaaccacaguaaa

SEQ ID NO: 581857 - RNA, 22 nt, Human
auaugugugugugagaaaagcu

SEQ ID NO: 581858 - RNA, 22 nt, Human
uaacuggcuuaaauuuuaucaa

SEQ ID NO: 581859 - RNA, 22 nt, Human
cugcccaggcugaaggaacauc

SEQ ID NO: 581860 - RNA, 22 nt, Human
cuagaaauauuuuacagucaag

SEQ ID NO: 581861 - RNA, 22 nt, Human
aagauguaaaggcaauauaaag

SEQ ID NO: 581862 - RNA, 22 nt, Human
guggcgcagaggguggcagaga

SEQ ID NO: 581863 - RNA, 22 nt, Human
uuuguaugggcagaaauuagau

SEQ ID NO: 581864 - RNA, 22 nt, Human
cuggguuccauguagccaagag

SEQ ID NO: 581865 - RNA, 22 nt, Human
cagauacauuaaaaugaugauu

SEQ ID NO: 581866 - RNA, 22 nt, Human
aaagaaauagauggcauuuaaa

SEQ ID NO: 581867 - RNA, 22 nt, Human
cucagccagugaucuuuccuuu

SEQ ID NO: 581868 - RNA, 22 nt, Human
aggagacagccaggggccugag

SEQ ID NO: 581869 - RNA, 22 nt, Human
gaggcagccucaguggaccucg

SEQ ID NO: 581870 - RNA, 22 nt, Human
uuuucuguguauccaggcuucc

SEQ ID NO: 581871 - RNA, 22 nt, Human
cuguaaaacacuguaguaucug

SEQ ID NO: 581872 - RNA, 22 nt, Human
auaaaucucuuaagacucaaca

SEQ ID NO: 581873 - RNA, 22 nt, Human
cccaacuacucucaggcagcuu

SEQ ID NO: 581874 - RNA, 23 nt, Human
uccuucaaguuaggaagugaaca

SEQ ID NO: 581875 - RNA, 22 nt, Human
cucaguuuccucuucuguugaa

SEQ ID NO: 581876 - RNA, 22 nt, Human
gaggagcaugggaaggcucugg

SEQ ID NO: 581877 - RNA, 22 nt, Human
gcagacaugggaucuauucaca

SEQ ID NO: 581878 - RNA, 22 nt, Human
aagaagcacuuuccuacauguu

SEQ ID NO: 581879 - RNA, 22 nt, Human
cagcuguuguguaucaggcaga

SEQ ID NO: 581880 - RNA, 22 nt, Human
ccucccucccucuuaugguuua

SEQ ID NO: 581881 - RNA, 22 nt, Human
gaagagcugcaguuuccugggc

SEQ ID NO: 581882 - RNA, 22 nt, Human
uuugauccguugcuggugagga

SEQ ID NO: 581883 - RNA, 22 nt, Human
aaacacuagcaggaagcacuga

SEQ ID NO: 581884 - RNA, 22 nt, Human
gccagagcagaauagaguggcc

SEQ ID NO: 581885 - RNA, 22 nt, Human
agagguaugugucagugcuuau

SEQ ID NO: 581886 - RNA, 22 nt, Human
ugggcagagaguagaggcaacg

SEQ ID NO: 581887 - RNA, 20 nt, Human
ccacuccaggugauucugau

SEQ ID NO: 581888 - RNA, 22 nt, Human
caggguugguuucuccucaggc

SEQ ID NO: 581889 - RNA, 22 nt, Human
uuucauguacuuuuuugauaga

SEQ ID NO: 581890 - RNA, 22 nt, Human
aaauaagaaauucuucuuugca

SEQ ID NO: 581891 - RNA, 22 nt, Human
aucguuaaucuugugugucaac

SEQ ID NO: 581892 - RNA, 20 nt, Human
ucuaggcaggcaggcucgug

SEQ ID NO: 581893 - RNA, 22 nt, Human
ucacaguugauugaaacacagc

SEQ ID NO: 581894 - RNA, 21 nt, Human
ggucaggcaugugcccugagc

SEQ ID NO: 581895 - RNA, 18 nt, Human
aggcuucccaggcaggcc

SEQ ID NO: 581896 - RNA, 22 nt, Human
ucacaguauaaccucauauagg

SEQ ID NO: 581897 - RNA, 22 nt, Human
ggcagcuauuccaagcagcacu

SEQ ID NO: 581898 - RNA, 19 nt, Human
aggcuggagacaccaggcc

SEQ ID NO: 581899 - RNA, 22 nt, Human
cagcagagguuggaacaguucu

SEQ ID NO: 581900 - RNA, 22 nt, Human
gggaagaguaacuagcccaugu

SEQ ID NO: 581901 - RNA, 22 nt, Human
aucucugguuguuuugcuccca

SEQ ID NO: 581902 - RNA, 22 nt, Human
uacacuggccccagggcggggc

SEQ ID NO: 581903 - RNA, 22 nt, Human
uacacuggcuguuuugcagaaa

SEQ ID NO: 581904 - RNA, 22 nt, Human
ggucaggauccaagucugugcu

SEQ ID NO: 581905 - RNA, 22 nt, Human
ggucccagguugacagggagac

SEQ ID NO: 581906 - RNA, 22 nt, Human
aaugcuuuuacgacauguaccu

SEQ ID NO: 581907 - RNA, 23 nt, Human
ucuccagugucucuucauugagu

SEQ ID NO: 581908 - RNA, 22 nt, Human
uuaggaaaauggaguccuuuua

SEQ ID NO: 581909 - RNA, 22 nt, Human
auacuucuuugauguucacagg

SEQ ID NO: 581910 - RNA, 22 nt, Human
agccaggcucaaggccugcucc

SEQ ID NO: 581911 - RNA, 22 nt, Human
ggcuggucucagugcuggguuc

SEQ ID NO: 581912 - RNA, 22 nt, Human
gcaggauugggcagagggugaa

SEQ ID NO: 581913 - RNA, 22 nt, Human
acccaggaggcagagguugcag

SEQ ID NO: 581914 - RNA, 22 nt, Human
acacaggaagucagcacugaug

SEQ ID NO: 581915 - RNA, 22 nt, Human
ucugaaguucuuaaauuaguuu

SEQ ID NO: 581916 - RNA, 22 nt, Human
acugggacuguaugugcuggac

SEQ ID NO: 581917 - RNA, 22 nt, Human
cacaguacuuaauucucuaaau

SEQ ID NO: 581918 - RNA, 22 nt, Human
acagccaggaauucuggagaag

SEQ ID NO: 581919 - RNA, 22 nt, Human
uuggcugguuucaagaaggcau

SEQ ID NO: 581920 - RNA, 22 nt, Human
acuaaauauuugagagguguag

SEQ ID NO: 581921 - RNA, 23 nt, Human
agaagcagcuucuggaguaucgg

SEQ ID NO: 581922 - RNA, 22 nt, Human
cuuucagaagaggaccuuucca

SEQ ID NO: 581923 - RNA, 22 nt, Human
aguguacaaaaugauagauaaa

SEQ ID NO: 581924 - RNA, 22 nt, Human
augugggccgugcggguguccu

SEQ ID NO: 581925 - RNA, 22 nt, Human
gugcaugugcauccauguguac

SEQ ID NO: 581926 - RNA, 22 nt, Human
auccugggcaaaguaugcuguc

SEQ ID NO: 581927 - RNA, 22 nt, Human
ucccuggcagcuaagggugguc

SEQ ID NO: 581928 - RNA, 22 nt, Human
ggcugagucugugacccaugcg

SEQ ID NO: 581929 - RNA, 22 nt, Human
uaauaacaauuguaggacauga

SEQ ID NO: 581930 - RNA, 22 nt, Human
ggcugaagaacugggagucuca

SEQ ID NO: 581931 - RNA, 22 nt, Human
agucucuuccucaugcauaugu

SEQ ID NO: 581932 - RNA, 22 nt, Human
auagacagaaagauaauagaau

SEQ ID NO: 581933 - RNA, 22 nt, Human
cugccucugcgucccacagagu

SEQ ID NO: 581934 - RNA, 22 nt, Human
ggaacacagaagggcugaaaaa

SEQ ID NO: 581935 - RNA, 22 nt, Human
ugauuucuuccuugucauuaga

SEQ ID NO: 581936 - RNA, 22 nt, Human
gcuggagugcugaggugcagug

SEQ ID NO: 581937 - RNA, 22 nt, Human
uuuagcuuaaauggagaaagag

SEQ ID NO: 581938 - RNA, 22 nt, Human
aggacccaagcacaguuccugg

SEQ ID NO: 581939 - RNA, 22 nt, Human
cugaacaacuugucauuccaag

SEQ ID NO: 581940 - RNA, 17 nt, Human
ggcagggugcuggguau

SEQ ID NO: 581941 - RNA, 22 nt, Human
agaguuugaauuuugaaaagau

SEQ ID NO: 581942 - RNA, 22 nt, Human
guuuccuuuaauagugauauug

SEQ ID NO: 581943 - RNA, 22 nt, Human
aagcacagauaaaacaggauuc

SEQ ID NO: 581944 - RNA, 22 nt, Human
uccuccaggucuaggguggcuu

SEQ ID NO: 581945 - RNA, 22 nt, Human
ccucuggcuguaccacuggcac

SEQ ID NO: 581946 - RNA, 22 nt, Human
aggugacaggacaggagcuggu

SEQ ID NO: 581947 - RNA, 22 nt, Human
gguagggaaggucucccacauu

SEQ ID NO: 581948 - RNA, 22 nt, Human
gcagggggucauucacgcuggc

SEQ ID NO: 581949 - RNA, 22 nt, Human
gcccagcugagaagcgcggggc

SEQ ID NO: 581950 - RNA, 22 nt, Human
gccugugucauguaguagcuuc

SEQ ID NO: 581951 - RNA, 22 nt, Human
cagggcccauggcucagguagg

SEQ ID NO: 581952 - RNA, 22 nt, Human
uuauaagacuguagugaguauu

SEQ ID NO: 581953 - RNA, 22 nt, Human
uucuucuguuggcagagcauac

SEQ ID NO: 581954 - RNA, 22 nt, Human
aagcuuugauaauuggauuacu

SEQ ID NO: 581955 - RNA, 22 nt, Human
ucuccaggaaagacacuggacu

SEQ ID NO: 581956 - RNA, 22 nt, Human
uggaguggacuucaugaggcca

SEQ ID NO: 581957 - RNA, 22 nt, Human
auggcuuaugaauaacaguagg

SEQ ID NO: 581958 - RNA, 22 nt, Human
ggauuagaggugaugauuauaa

SEQ ID NO: 581959 - RNA, 21 nt, Human
uucucuggauaggccaguccu

SEQ ID NO: 581960 - RNA, 22 nt, Human
uugaagcaugguacuuguucaa

SEQ ID NO: 581961 - RNA, 22 nt, Human
cagagccugcugccuucugaag

SEQ ID NO: 581962 - RNA, 22 nt, Human
aguuuaugucuuuacuucagcu

SEQ ID NO: 581963 - RNA, 22 nt, Human
ggggccagcaauguugaggaau

SEQ ID NO: 581964 - RNA, 22 nt, Human
acucagcugaugaagcacaagu

SEQ ID NO: 581965 - RNA, 22 nt, Human
auugcuucaacuguucaauggg

SEQ ID NO: 581966 - RNA, 22 nt, Human
ugcccagcacugugccagucac

SEQ ID NO: 581967 - RNA, 22 nt, Human
auaguuauaagaaaacguugaa

SEQ ID NO: 581968 - RNA, 22 nt, Human
guugugcauuuaugaagaaguu

SEQ ID NO: 581969 - RNA, 22 nt, Human
aaagguuuucaucacagcaaga

SEQ ID NO: 581970 - RNA, 22 nt, Human
uaaaugagggcugacaugauug

SEQ ID NO: 581971 - RNA, 22 nt, Human
cucuuuuucaccucugucagcg

SEQ ID NO: 581972 - RNA, 22 nt, Human
uggaacaaggguucauuuaaau

SEQ ID NO: 581973 - RNA, 22 nt, Human
aaauugcucuuuaaaaguacug

SEQ ID NO: 581974 - RNA, 22 nt, Human
ggaggggaggauuaaugacaaa

SEQ ID NO: 581975 - RNA, 20 nt, Human
gacaacacagcuucaggucc

SEQ ID NO: 581976 - RNA, 22 nt, Human
cagggcuuugugugccugggga

SEQ ID NO: 581977 - RNA, 22 nt, Human
uucacaauaggagcaugcaaau

SEQ ID NO: 581978 - RNA, 22 nt, Human
uacaagaaggaaaacuagcaau

SEQ ID NO: 581979 - RNA, 22 nt, Human
uacaaaguagaaauucaguaaa

SEQ ID NO: 581980 - RNA, 22 nt, Human
ccuccaggcugaauaucuagaa

SEQ ID NO: 581981 - RNA, 22 nt, Human
cugcauaugauagaugccuugc

SEQ ID NO: 581982 - RNA, 22 nt, Human
cagggacccgcacagguagcau

SEQ ID NO: 581983 - RNA, 22 nt, Human
cuggcugcgcuaguccagaaga

SEQ ID NO: 581984 - RNA, 22 nt, Human
cccuaaugcagcugagaagggc

SEQ ID NO: 581985 - RNA, 22 nt, Human
gaaucuuauccccaguccuuaa

SEQ ID NO: 581986 - RNA, 22 nt, Human
uaaccauauuuuccauuaaguu

SEQ ID NO: 581987 - RNA, 22 nt, Human
uggguccacggaagacuuaggg

SEQ ID NO: 581988 - RNA, 22 nt, Human
aacacugugcccacccuagucc

SEQ ID NO: 581989 - RNA, 22 nt, Human
aagcaauguuagaggccuuagg

SEQ ID NO: 581990 - RNA, 22 nt, Human
uucugacacauuacuacaugga

SEQ ID NO: 581991 - RNA, 22 nt, Human
gcucuguccagcgugcacagaa

SEQ ID NO: 581992 - RNA, 22 nt, Human
cugagcuuaacccuguuagcaa

SEQ ID NO: 581993 - RNA, 22 nt, Human
ugaccacagacccaaugacuac

SEQ ID NO: 581994 - RNA, 22 nt, Human
uuuagcauauccuauaaaacua

SEQ ID NO: 581995 - RNA, 22 nt, Human
uauugaucuggauauuuagaca

SEQ ID NO: 581996 - RNA, 22 nt, Human
gcagcccucuuggucacuaggc

SEQ ID NO: 581997 - RNA, 22 nt, Human
ccaggaggcggaagguacagug

SEQ ID NO: 581998 - RNA, 22 nt, Human
augggaggaucacuugaggcca

SEQ ID NO: 581999 - RNA, 22 nt, Human
ugggccagcaauugcugcucag

SEQ ID NO: 582000 - RNA, 22 nt, Human
ggaaggggugucgcccauggau

SEQ ID NO: 582001 - RNA, 22 nt, Human
cuuuuucauuggcuuuaggaca

SEQ ID NO: 582002 - RNA, 22 nt, Human
gcuacagguauauagaugaaac

SEQ ID NO: 582003 - RNA, 22 nt, Human
acauuguauaaugauuaucaca

SEQ ID NO: 582004 - RNA, 22 nt, Human
accagcucauaauuuucaaaac

SEQ ID NO: 582005 - RNA, 22 nt, Human
gcuggaagaaugagugccucgu

SEQ ID NO: 582006 - RNA, 22 nt, Human
uugaggucccaaacccacugag

SEQ ID NO: 582007 - RNA, 22 nt, Human
caggcagcugcuggguucagcc

SEQ ID NO: 582008 - RNA, 22 nt, Human
gcugggcucugucaugccuucc

SEQ ID NO: 582009 - RNA, 22 nt, Human
cucugccaguuucuggccucag

SEQ ID NO: 582010 - RNA, 22 nt, Human
gauguagcggcagcuguuuuuc

SEQ ID NO: 582011 - RNA, 22 nt, Human
caguguggugugcacagcuuag

SEQ ID NO: 582012 - RNA, 22 nt, Human
cuucacuugcucaucaugcuau

SEQ ID NO: 582013 - RNA, 22 nt, Human
cuugggccagcccagggggcau

SEQ ID NO: 582014 - RNA, 23 nt, Human
uggggagggaagucauuucugua

SEQ ID NO: 582015 - RNA, 22 nt, Human
cuguuuuccuggguuccaugag

SEQ ID NO: 582016 - RNA, 22 nt, Human
ucugggcaauggaugcacucac

SEQ ID NO: 582017 - RNA, 19 nt, Human
gucuuacaggcaacaugag

SEQ ID NO: 582018 - RNA, 22 nt, Human
ugaacauauucaccucuaaaua

SEQ ID NO: 582019 - RNA, 22 nt, Human
agugucugcuagguucaucaac

SEQ ID NO: 582020 - RNA, 22 nt, Human
acaaauuaccauggaauuuggg

SEQ ID NO: 582021 - RNA, 22 nt, Human
uuagcacuuugauucaugcaga

SEQ ID NO: 582022 - RNA, 22 nt, Human
uagaaacaaagaccugggugcu

SEQ ID NO: 582023 - RNA, 22 nt, Human
ucacugcuucuuggagaauguc

SEQ ID NO: 582024 - RNA, 22 nt, Human
gcugauggcuugcuggcugaca

SEQ ID NO: 582025 - RNA, 22 nt, Human
ucuuuuauuaggcugaaauggg

SEQ ID NO: 582026 - RNA, 22 nt, Human
cagggguguuuuuggccaggag

SEQ ID NO: 582027 - RNA, 22 nt, Human
guuagagguucagucgcuauaa

SEQ ID NO: 582028 - RNA, 22 nt, Human
gaggggcuugaggcccugaugg

SEQ ID NO: 582029 - RNA, 22 nt, Human
ucagcuccucaugcaggggaua

SEQ ID NO: 582030 - RNA, 22 nt, Human
gcagcaggucugucaaugucau

SEQ ID NO: 582031 - RNA, 19 nt, Human
ucucugcuucucuuggcau

SEQ ID NO: 582032 - RNA, 22 nt, Human
uucauuacugcgguagucacac

SEQ ID NO: 582033 - RNA, 22 nt, Human
uguaugcuuuccuucuuucugg

SEQ ID NO: 582034 - RNA, 22 nt, Human
gacacugucccacagaauucga

SEQ ID NO: 582035 - RNA, 20 nt, Human
augcauauauguggugucug

SEQ ID NO: 582036 - RNA, 22 nt, Human
uagagcuggaaaacugcaggua

SEQ ID NO: 582037 - RNA, 22 nt, Human
cuguccagucuuuagcaagcug

SEQ ID NO: 582038 - RNA, 22 nt, Human
accagacacugugaagacaggc

SEQ ID NO: 582039 - RNA, 22 nt, Human
aauauauuugaaucaggaacaa

SEQ ID NO: 582040 - RNA, 19 nt, Human
ugaggccaaggucacagau

SEQ ID NO: 582041 - RNA, 22 nt, Human
gcagucaguaaggcagccagaa

SEQ ID NO: 582042 - RNA, 22 nt, Human
agggcaugugggagaggagccu

SEQ ID NO: 582043 - RNA, 22 nt, Human
cauggcugaaauucuucgcuug

SEQ ID NO: 582044 - RNA, 22 nt, Human
cuauuguaguaagggaaagcca

SEQ ID NO: 582045 - RNA, 22 nt, Human
uuuuccucuguuauuaguguga

SEQ ID NO: 582046 - RNA, 22 nt, Human
gcuauguguaucuguuagagag

SEQ ID NO: 582047 - RNA, 21 nt, Human
acagggcaugcagcuggcugu

SEQ ID NO: 582048 - RNA, 22 nt, Human
uuccagugacuaagcuucugcu

SEQ ID NO: 582049 - RNA, 22 nt, Human
aucuccaguccugguuuccugg

SEQ ID NO: 582050 - RNA, 22 nt, Human
uaggaaauggcucaguuacugc

SEQ ID NO: 582051 - RNA, 22 nt, Human
aauaugaguuugccuuuccugc

SEQ ID NO: 582052 - RNA, 21 nt, Human
ucuuuucucugcaggauuccu

SEQ ID NO: 582053 - RNA, 22 nt, Human
gaagccagcaguggagaaagga

SEQ ID NO: 582054 - RNA, 22 nt, Human
uggcaauguaaauugaacuaga

SEQ ID NO: 582055 - RNA, 22 nt, Human
aaauuaagaguaacucuguaga

SEQ ID NO: 582056 - RNA, 22 nt, Human
uggccuggggaagaccaugggc

SEQ ID NO: 582057 - RNA, 22 nt, Human
cagcuggcagaaccugcaucca

SEQ ID NO: 582058 - RNA, 22 nt, Human
gggcccugcguccggaagucug

SEQ ID NO: 582059 - RNA, 22 nt, Human
gguaacaacccuacaaauccac

SEQ ID NO: 582060 - RNA, 22 nt, Human
agaguggggacagggccugucc

SEQ ID NO: 582061 - RNA, 22 nt, Human
aacauuuacaaauccuucugca

SEQ ID NO: 582062 - RNA, 22 nt, Human
agccuccuggaguuucugggau

SEQ ID NO: 582063 - RNA, 22 nt, Human
ccagggcugccuggccgugugu

SEQ ID NO: 582064 - RNA, 22 nt, Human
uuggaagacagccgucuuuauu

SEQ ID NO: 582065 - RNA, 22 nt, Human
uggcuuccaguaaucaggauuu

SEQ ID NO: 582066 - RNA, 22 nt, Human
gagcuggccgcagagagggcag

SEQ ID NO: 582067 - RNA, 22 nt, Human
gugcaagguacauccuugaugu

SEQ ID NO: 582068 - RNA, 19 nt, Human
cugccuguuauggagagaa

SEQ ID NO: 582069 - RNA, 22 nt, Human
ugccaucugcacccaccugccc

SEQ ID NO: 582070 - RNA, 22 nt, Human
uaccugcacagccagccaugug

SEQ ID NO: 582071 - RNA, 22 nt, Human
ggagcuguugauuguuugagga

SEQ ID NO: 582072 - RNA, 22 nt, Human
ugcagucuggauguccucagau

SEQ ID NO: 582073 - RNA, 22 nt, Human
gaagaaggaagaucaugcuuga

SEQ ID NO: 582074 - RNA, 22 nt, Human
gucccucaguagugcacagugg

SEQ ID NO: 582075 - RNA, 22 nt, Human
uugugcuaagugcuaugaaggc

SEQ ID NO: 582076 - RNA, 22 nt, Human
cccucccucugcuggguguaga

SEQ ID NO: 582077 - RNA, 22 nt, Human
aguuuauucucuggucuuagua

SEQ ID NO: 582078 - RNA, 22 nt, Human
cuuguuaaauuauauaagcaga

SEQ ID NO: 582079 - RNA, 22 nt, Human
acaaugcuguugagacauucuu

SEQ ID NO: 582080 - RNA, 22 nt, Human
uuaaagcacuaaaugaugaggg

SEQ ID NO: 582081 - RNA, 22 nt, Human
cccaggaaugagcaggcagggg

SEQ ID NO: 582082 - RNA, 22 nt, Human
aaguauuucagcgguucuuugu

SEQ ID NO: 582083 - RNA, 22 nt, Human
agcauauaaauggacauauuug

SEQ ID NO: 582084 - RNA, 18 nt, Human
cuuccucaucgcucuccc

SEQ ID NO: 582085 - RNA, 22 nt, Human
uuacaauaccacaucaccucau

SEQ ID NO: 582086 - RNA, 22 nt, Human
ugagguaguguuuaguccaguc

SEQ ID NO: 582087 - RNA, 23 nt, Human
cagaagcaccuguugacugcugc

SEQ ID NO: 582088 - RNA, 22 nt, Human
aacuguaagagaauaaaugugu

SEQ ID NO: 582089 - RNA, 22 nt, Human
gagaaacuaacaucugaaggug

SEQ ID NO: 582090 - RNA, 22 nt, Human
ucaaagcaugguuuugaaagac

SEQ ID NO: 582091 - RNA, 22 nt, Human
cugccugcugacauucuuuaua

SEQ ID NO: 582092 - RNA, 22 nt, Human
auccaaaguagauuaagucaca

SEQ ID NO: 582093 - RNA, 22 nt, Human
acaaggcugugggagaaccucu

SEQ ID NO: 582094 - RNA, 22 nt, Human
gcaggccugacuguagggggca

SEQ ID NO: 582095 - RNA, 22 nt, Human
ccuuggcuuaccuucugugugg

SEQ ID NO: 582096 - RNA, 19 nt, Human
aggugaggggcaccauguc

SEQ ID NO: 582097 - RNA, 22 nt, Human
accugggcauuuuggaugauua

SEQ ID NO: 582098 - RNA, 22 nt, Human
ucucuuucucaaaauguaagca

SEQ ID NO: 582099 - RNA, 22 nt, Human
uuucuccuguguaagccgccca

SEQ ID NO: 582100 - RNA, 22 nt, Human
agcugaaggcuagaacagcugg

SEQ ID NO: 582101 - RNA, 18 nt, Human
gcugaaugucugcuuugc

SEQ ID NO: 582102 - RNA, 22 nt, Human
uuucuguuaggcaucauuuuaa

SEQ ID NO: 582103 - RNA, 22 nt, Human
cuguauuuaguuaaaaugcuaa

SEQ ID NO: 582104 - RNA, 22 nt, Human
gacacagaccaccaggcccugg

SEQ ID NO: 582105 - RNA, 22 nt, Human
gggcuccagggcccgagucguc

SEQ ID NO: 582106 - RNA, 22 nt, Human
gagaacuuucuguguuuuuauc

SEQ ID NO: 582107 - RNA, 22 nt, Human
ucccagccauuccuuuaggugu

SEQ ID NO: 582108 - RNA, 22 nt, Human
gggacuggauagauguggguga

SEQ ID NO: 582109 - RNA, 22 nt, Human
ucuguggcugugcugggccaga

SEQ ID NO: 582110 - RNA, 22 nt, Human
aagcagggugucuugacccaug

SEQ ID NO: 582111 - RNA, 22 nt, Human
uccugggagcccuugcuccacc

SEQ ID NO: 582112 - RNA, 22 nt, Human
aauaaugucuaugguuccaaaa

SEQ ID NO: 582113 - RNA, 22 nt, Human
uuacuguuugaaaaaugaaugu

SEQ ID NO: 582114 - RNA, 22 nt, Human
gugauaauugcagagaaaggag

SEQ ID NO: 582115 - RNA, 23 nt, Human
uucucuuuagauuuacauuacuc

SEQ ID NO: 582116 - RNA, 22 nt, Human
agaggccacaccagccucccgu

SEQ ID NO: 582117 - RNA, 22 nt, Human
agagcucugcagcuggccucag

SEQ ID NO: 582118 - RNA, 21 nt, Human
cccuguguuccacagcagaca

SEQ ID NO: 582119 - RNA, 22 nt, Human
gagguagguguaggaggccugc

SEQ ID NO: 582120 - RNA, 22 nt, Human
acccagagucauguuuauuccc

SEQ ID NO: 582121 - RNA, 22 nt, Human
cccagggaagccauuucugacu

SEQ ID NO: 582122 - RNA, 22 nt, Human
cagcuugggucaggugccugcu

SEQ ID NO: 582123 - RNA, 22 nt, Human
acacaugcagguauacauguuc

SEQ ID NO: 582124 - RNA, 22 nt, Human
caggggcugaaauguugggguu

SEQ ID NO: 582125 - RNA, 22 nt, Human
agccaguuggcuaugaggagga

SEQ ID NO: 582126 - RNA, 22 nt, Human
cacaggcuuccaguccccagcu

SEQ ID NO: 582127 - RNA, 22 nt, Human
gggagggcuuggacccagaugu

SEQ ID NO: 582128 - RNA, 22 nt, Human
ccagggcugcugugggacucca

SEQ ID NO: 582129 - RNA, 23 nt, Human
uggcacagcaggugugcuuuguu

SEQ ID NO: 582130 - RNA, 22 nt, Human
acuggcuugaaguagauucaaa

SEQ ID NO: 582131 - RNA, 22 nt, Human
cccaggcuaguaugauaucagu

SEQ ID NO: 582132 - RNA, 22 nt, Human
augcaguggcuucagugucagu

SEQ ID NO: 582133 - RNA, 21 nt, Human
caucacauuacucaaaguccu

SEQ ID NO: 582134 - RNA, 22 nt, Human
uaaaucuuguggcaaugcuucu

SEQ ID NO: 582135 - RNA, 22 nt, Human
auugcauucauugacauaugag

SEQ ID NO: 582136 - RNA, 22 nt, Human
gccuucugugcuccuggccuuu

SEQ ID NO: 582137 - RNA, 22 nt, Human
acagcaaaggacgaacacucug

SEQ ID NO: 582138 - RNA, 22 nt, Human
gagacaggccaggugguacuua

SEQ ID NO: 582139 - RNA, 22 nt, Human
ccugcagguugcagaggcggaa

SEQ ID NO: 582140 - RNA, 19 nt, Human
ccagagagcuagguacaga

SEQ ID NO: 582141 - RNA, 22 nt, Human
aaacuuuuucuuagguaugucu

SEQ ID NO: 582142 - RNA, 22 nt, Human
acauguauugacauuauauucu

SEQ ID NO: 582143 - RNA, 22 nt, Human
uuugaaaguucuucugacacua

SEQ ID NO: 582144 - RNA, 22 nt, Human
auggaaaucagguucauccaag

SEQ ID NO: 582145 - RNA, 22 nt, Human
aaggcacuagcagaauuaguga

SEQ ID NO: 582146 - RNA, 22 nt, Human
uagcacacgcauuagcaaauca

SEQ ID NO: 582147 - RNA, 22 nt, Human
aggaguggugcaggaccugcca

SEQ ID NO: 582148 - RNA, 22 nt, Human
ggaggggugcucagcugucacg

SEQ ID NO: 582149 - RNA, 22 nt, Human
uuucuguuguacuuaaacuagg

SEQ ID NO: 582150 - RNA, 22 nt, Human
accugcagccacuucucuccuu

SEQ ID NO: 582151 - RNA, 21 nt, Human
uuuaggaaguuuaaggcaggu

SEQ ID NO: 582152 - RNA, 22 nt, Human
ccagcccugucaccaacuggag

SEQ ID NO: 582153 - RNA, 22 nt, Human
cacaaaugacugaaacgacugu

SEQ ID NO: 582154 - RNA, 22 nt, Human
aauuggaaaaagacuuaauugc

SEQ ID NO: 582155 - RNA, 22 nt, Human
agcaggugucggcgagggucuu

SEQ ID NO: 582156 - RNA, 22 nt, Human
cuguagccagaagcagaaggcc

SEQ ID NO: 582157 - RNA, 22 nt, Human
ugcagcagguuccaaaggguua

SEQ ID NO: 582158 - RNA, 18 nt, Human
caaauacuguugucuuau

SEQ ID NO: 582159 - RNA, 23 nt, Human
ccacgucugcacuguagcuguug

SEQ ID NO: 582160 - RNA, 23 nt, Human
aauagcugguaaugauagcacaa

SEQ ID NO: 582161 - RNA, 22 nt, Human
gccaggcugacucccccggccu

SEQ ID NO: 582162 - RNA, 22 nt, Human
gaaaccucuuagccucucuuug

SEQ ID NO: 582163 - RNA, 22 nt, Human
caggaacaauguaagucucauu

SEQ ID NO: 582164 - RNA, 22 nt, Human
guuuugaaaugaaagaaccaag

SEQ ID NO: 582165 - RNA, 22 nt, Human
ucuguuccauguuuuguuccau

SEQ ID NO: 582166 - RNA, 22 nt, Human
acaguucugagcuauaauugcu

SEQ ID NO: 582167 - RNA, 22 nt, Human
uuaagacauuuuuggagauuau

SEQ ID NO: 582168 - RNA, 22 nt, Human
auuugacauugacacaccuaug

SEQ ID NO: 582169 - RNA, 22 nt, Human
cugugacagagcuugagugaga

SEQ ID NO: 582170 - RNA, 22 nt, Human
ucuuugaaaagauauuccuccu

SEQ ID NO: 582171 - RNA, 22 nt, Human
augcaguagauaggcacuuuua

SEQ ID NO: 582172 - RNA, 22 nt, Human
cugugaauuuuccaauauuccg

SEQ ID NO: 582173 - RNA, 22 nt, Human
aucaaugacaguugaauucuac

SEQ ID NO: 582174 - RNA, 18 nt, Human
uaggaagcuuaauguuuu

SEQ ID NO: 582175 - RNA, 22 nt, Human
gugauaaaggggaggaagugug

SEQ ID NO: 582176 - RNA, 22 nt, Human
gcauaucaugacuucuaucuua

SEQ ID NO: 582177 - RNA, 22 nt, Human
uagggcuguuaguaauucucag

SEQ ID NO: 582178 - RNA, 22 nt, Human
gcugcccugacaagcuacuccc

SEQ ID NO: 582179 - RNA, 22 nt, Human
agaggccaugcuagaggccugg

SEQ ID NO: 582180 - RNA, 22 nt, Human
ucuccacacuuucucucccagg

SEQ ID NO: 582181 - RNA, 22 nt, Human
aagcaucaacacuauauugaug

SEQ ID NO: 582182 - RNA, 22 nt, Human
auucauuccaggucagucagac

SEQ ID NO: 582183 - RNA, 22 nt, Human
ucuguacacuucagcaugcauc

SEQ ID NO: 582184 - RNA, 22 nt, Human
acuguagaggccuggauugagg

SEQ ID NO: 582185 - RNA, 22 nt, Human
uggccugggucacaccaggguc

SEQ ID NO: 582186 - RNA, 19 nt, Human
acccagggguuuaugugug

SEQ ID NO: 582187 - RNA, 22 nt, Human
auacagaacucucaguuguaua

SEQ ID NO: 582188 - RNA, 21 nt, Human
cagugagguccccagccuagg

SEQ ID NO: 582189 - RNA, 22 nt, Human
cucagggaauugaaucuccuug

SEQ ID NO: 582190 - RNA, 22 nt, Human
uuuucauuguaaaucaggaaac

SEQ ID NO: 582191 - RNA, 22 nt, Human
aaaaaagauugaugguggaugc

SEQ ID NO: 582192 - RNA, 22 nt, Human
uuagcaaaaauaucucauauua

SEQ ID NO: 582193 - RNA, 22 nt, Human
augcaggcagacacugugggca

SEQ ID NO: 582194 - RNA, 22 nt, Human
aaggcugaccaguuuacacuuu

SEQ ID NO: 582195 - RNA, 22 nt, Human
ucuguggagugaccugggcuuu

SEQ ID NO: 582196 - RNA, 22 nt, Human
cuggcuuccucaggagcagugg

SEQ ID NO: 582197 - RNA, 22 nt, Human
acuuuacucaacaaauauuuau

SEQ ID NO: 582198 - RNA, 22 nt, Human
gauauucuggugaaaccuuugg

SEQ ID NO: 582199 - RNA, 21 nt, Human
ccaggcuccugaggcugguca

SEQ ID NO: 582200 - RNA, 22 nt, Human
ucagaggaccuuacugagaacc

SEQ ID NO: 582201 - RNA, 19 nt, Human
ccccuuagggguuaagccu

SEQ ID NO: 582202 - RNA, 22 nt, Human
cuccagaaauucaacagcaaau

SEQ ID NO: 582203 - RNA, 20 nt, Human
uugcuagcuuuugugucacu

SEQ ID NO: 582204 - RNA, 22 nt, Human
uggcucagucauggaugaguaa

SEQ ID NO: 582205 - RNA, 22 nt, Human
ggcuggagugggcuccagaguu

SEQ ID NO: 582206 - RNA, 22 nt, Human
ugugugggugguaaggaaggcc

SEQ ID NO: 582207 - RNA, 22 nt, Human
gcugggcagccuggccgcugcc

SEQ ID NO: 582208 - RNA, 22 nt, Human
acuugaauaggaaagccacaaa

SEQ ID NO: 582209 - RNA, 22 nt, Human
agcagagcugcaguggccugcu

SEQ ID NO: 582210 - RNA, 22 nt, Human
acuuugacagcauuuuaauuau

SEQ ID NO: 582211 - RNA, 22 nt, Human
cuguggagcagggcagggucac

SEQ ID NO: 582212 - RNA, 18 nt, Human
gagcccugggagaucucu

SEQ ID NO: 582213 - RNA, 22 nt, Human
ggcaggagaaaggucucuucuu

SEQ ID NO: 582214 - RNA, 22 nt, Human
ucacugcaaccucugccuuccg

SEQ ID NO: 582215 - RNA, 22 nt, Human
uggcucauauugagugauuucu

SEQ ID NO: 582216 - RNA, 20 nt, Human
ugccaugguaacagagugug

SEQ ID NO: 582217 - RNA, 22 nt, Human
gcucugugaccuuaggcaaguu

SEQ ID NO: 582218 - RNA, 22 nt, Human
ccagggcacguugggacaguac

SEQ ID NO: 582219 - RNA, 22 nt, Human
gcagggugauagugaggcucag

SEQ ID NO: 582220 - RNA, 22 nt, Human
agaggaggaagagcuuuaaaau

SEQ ID NO: 582221 - RNA, 22 nt, Human
ccuggggauucugacacggagu

SEQ ID NO: 582222 - RNA, 22 nt, Human
uguccuugaugaauaugaaauu

SEQ ID NO: 582223 - RNA, 22 nt, Human
ucagggcaggcgagcagcugcu

SEQ ID NO: 582224 - RNA, 22 nt, Human
cuggccaguguggcucugaucu

SEQ ID NO: 582225 - RNA, 22 nt, Human
cuggcagcucuacucagagccu

SEQ ID NO: 582226 - RNA, 22 nt, Human
gggcuggaaaaacaacauacaa

SEQ ID NO: 582227 - RNA, 22 nt, Human
aaccugagucuuuugauuugcu

SEQ ID NO: 582228 - RNA, 18 nt, Human
gcccccagaugcuacuga

SEQ ID NO: 582229 - RNA, 19 nt, Human
gcccugcaggagguggggc

SEQ ID NO: 582230 - RNA, 22 nt, Human
uuugcugaguugaaguuugagg

SEQ ID NO: 582231 - RNA, 23 nt, Human
aaucacuucccuccaaauggauu

SEQ ID NO: 582232 - RNA, 22 nt, Human
agcugugugguuugggcaaauu

SEQ ID NO: 582233 - RNA, 22 nt, Human
ggcugcaggcaggguauccacu

SEQ ID NO: 582234 - RNA, 22 nt, Human
cacagaggaaugcaucagcaga

SEQ ID NO: 582235 - RNA, 22 nt, Human
ugacauuuaauuaacgaaugcu

SEQ ID NO: 582236 - RNA, 17 nt, Human
gcucugccccagccucu

SEQ ID NO: 582237 - RNA, 22 nt, Human
ugccuuuuccagcuuccaggag

SEQ ID NO: 582238 - RNA, 19 nt, Human
ugcuaaguccuuuagaggc

SEQ ID NO: 582239 - RNA, 22 nt, Human
uaagauaaguggguugagaugg

SEQ ID NO: 582240 - RNA, 22 nt, Human
auguguacacacauauauguau

SEQ ID NO: 582241 - RNA, 22 nt, Human
ccaggggcucucagggugugug

SEQ ID NO: 582242 - RNA, 22 nt, Human
uucuauuguaccuuuucucuca

SEQ ID NO: 582243 - RNA, 22 nt, Human
gacccagcuuaagucacauguu

SEQ ID NO: 582244 - RNA, 22 nt, Human
cuucuggaggcuccagggaggu

SEQ ID NO: 582245 - RNA, 22 nt, Human
gacagggaggaaagagacugcu

SEQ ID NO: 582246 - RNA, 23 nt, Human
uuguaucucuggaaauucuucaa

SEQ ID NO: 582247 - RNA, 22 nt, Human
aaguuaagcauggccaugugac

SEQ ID NO: 582248 - RNA, 22 nt, Human
cccucacucugccuccuggggu

SEQ ID NO: 582249 - RNA, 22 nt, Human
gagauuucuuuugaugccuguc

SEQ ID NO: 582250 - RNA, 22 nt, Human
uagcagcuuccagagagggcag

SEQ ID NO: 582251 - RNA, 22 nt, Human
uccugcagguggaugauucucu

SEQ ID NO: 582252 - RNA, 22 nt, Human
ugaaacaaaaguauguagcuug

SEQ ID NO: 582253 - RNA, 22 nt, Human
ggccugaaauaaaguagcagaa

SEQ ID NO: 582254 - RNA, 22 nt, Human
aaaauugguuccuuucugaggc

SEQ ID NO: 582255 - RNA, 22 nt, Human
cauuuuaaaugauuuaagccaa

SEQ ID NO: 582256 - RNA, 17 nt, Human
cugaagauaauggcaac

SEQ ID NO: 582257 - RNA, 23 nt, Human
agcuggaggcugucuacucccaa

SEQ ID NO: 582258 - RNA, 22 nt, Human
aggcugcucugcgaagucagcu

SEQ ID NO: 582259 - RNA, 22 nt, Human
ggccaggaagggaagaucagca

SEQ ID NO: 582260 - RNA, 22 nt, Human
cagcaggcugcgauugcucauu

SEQ ID NO: 582261 - RNA, 22 nt, Human
aauuuucugaugaugaagcacg

SEQ ID NO: 582262 - RNA, 22 nt, Human
uacuuccauguccuuagagucc

SEQ ID NO: 582263 - RNA, 22 nt, Human
auuuacagguagaauuuuaagu

SEQ ID NO: 582264 - RNA, 22 nt, Human
gcucacagccggcuggcagggg

SEQ ID NO: 582265 - RNA, 22 nt, Human
guggcaggagacuggaagaugg

SEQ ID NO: 582266 - RNA, 22 nt, Human
ucagggagagccugucugacgu

SEQ ID NO: 582267 - RNA, 22 nt, Human
gccaggcugcuccagggaggcc

SEQ ID NO: 582268 - RNA, 22 nt, Human
aacaguuuggguagguauguag

SEQ ID NO: 582269 - RNA, 22 nt, Human
cugggcucaaauccuggcccug

SEQ ID NO: 582270 - RNA, 22 nt, Human
acuguauauuggacaaggaaaa

SEQ ID NO: 582271 - RNA, 22 nt, Human
uccaucaccacagaggacagag

SEQ ID NO: 582272 - RNA, 22 nt, Human
ugauuuacaguagugucuaaac

SEQ ID NO: 582273 - RNA, 22 nt, Human
acauuaacaccgugaguuuggu

SEQ ID NO: 582274 - RNA, 22 nt, Human
augcaaauugccauaaaguggg

SEQ ID NO: 582275 - RNA, 22 nt, Human
agcccggcuuccccgguugcua

SEQ ID NO: 582276 - RNA, 22 nt, Human
gccaaggccucugcaggaugag

SEQ ID NO: 582277 - RNA, 22 nt, Human
cagcuccagcccaggcagcucc

SEQ ID NO: 582278 - RNA, 22 nt, Human
caggccugguugagcccugaga

SEQ ID NO: 582279 - RNA, 22 nt, Human
cccagacuccucuggcuggugg

SEQ ID NO: 582280 - RNA, 22 nt, Human
uucugaaauuucaacuuuacua

SEQ ID NO: 582281 - RNA, 22 nt, Human
acauuaacacuggugcuggugu

SEQ ID NO: 582282 - RNA, 20 nt, Human
augaaauuccuguuuucuga

SEQ ID NO: 582283 - RNA, 22 nt, Human
auugaaagagaauguagcucuu

SEQ ID NO: 582284 - RNA, 22 nt, Human
uguuuauugagugccuacuaua

SEQ ID NO: 582285 - RNA, 22 nt, Human
ucuccugaagaccaugugcacu

SEQ ID NO: 582286 - RNA, 22 nt, Human
cuguuauuuagaacauggaauc

SEQ ID NO: 582287 - RNA, 22 nt, Human
aaacagcugcacugcugauguc

SEQ ID NO: 582288 - RNA, 22 nt, Human
ucccugaggaagggguguggug

SEQ ID NO: 582289 - RNA, 22 nt, Human
auauuucuccaaauguuuucaa

SEQ ID NO: 582290 - RNA, 23 nt, Human
ugaugggaaggaacgacuaccac

SEQ ID NO: 582291 - RNA, 22 nt, Human
ccuggggaccugccucagcccu

SEQ ID NO: 582292 - RNA, 22 nt, Human
uuguucuuccaucaucccucag

SEQ ID NO: 582293 - RNA, 22 nt, Human
cugggaggcggagguuguagug

SEQ ID NO: 582294 - RNA, 22 nt, Human
acuggagucagggaaaaagugu

SEQ ID NO: 582295 - RNA, 22 nt, Human
ucucccagaggaucccagugga

SEQ ID NO: 582296 - RNA, 22 nt, Human
ucuuggcucugccacuaauuag

SEQ ID NO: 582297 - RNA, 22 nt, Human
ucuggcccaugauccugcuaac

SEQ ID NO: 582298 - RNA, 22 nt, Human
ggcuucucucccccagcuccac

SEQ ID NO: 582299 - RNA, 17 nt, Human
aaaucacugucaguuca

SEQ ID NO: 582300 - RNA, 22 nt, Human
ggaaggaggaugcucuggccuu

SEQ ID NO: 582301 - RNA, 22 nt, Human
ucuuuagaguuaacaauaauga

SEQ ID NO: 582302 - RNA, 22 nt, Human
augccuccucaaaucugccaca

SEQ ID NO: 582303 - RNA, 22 nt, Human
gcagagacagacuaaugaaaag

SEQ ID NO: 582304 - RNA, 22 nt, Human
acagggcagaaauguugcaucu

SEQ ID NO: 582305 - RNA, 22 nt, Human
cucuucccagcuccacgagagg

SEQ ID NO: 582306 - RNA, 22 nt, Human
cagaaggcaaacaaaaggauuu

SEQ ID NO: 582307 - RNA, 22 nt, Human
ugaggcacauccaggccagcuc

SEQ ID NO: 582308 - RNA, 22 nt, Human
aauauagcucacuauaccaugg

SEQ ID NO: 582309 - RNA, 21 nt, Human
aucuuuauuacgcagagaaga

SEQ ID NO: 582310 - RNA, 22 nt, Human
uuuaagacagugcaagcugaau

SEQ ID NO: 582311 - RNA, 22 nt, Human
gaagaauauauaaugauuuugu

SEQ ID NO: 582312 - RNA, 22 nt, Human
agauacugauucucaauggcuc

SEQ ID NO: 582313 - RNA, 22 nt, Human
gcaguccuccugccucagccuc

SEQ ID NO: 582314 - RNA, 22 nt, Human
aagcagcauaauugcuauuuua

SEQ ID NO: 582315 - RNA, 22 nt, Human
acuuuacauuugaucucucuaa

SEQ ID NO: 582316 - RNA, 22 nt, Human
agcuccagaggcagugaugaag

SEQ ID NO: 582317 - RNA, 22 nt, Human
aucagugcuucauagcccuggu

SEQ ID NO: 582318 - RNA, 22 nt, Human
cagagagcuuagugugcugcau

SEQ ID NO: 582319 - RNA, 17 nt, Human
uucugcugucguccucu

SEQ ID NO: 582320 - RNA, 22 nt, Human
gcucagaagauauuugaugcug

SEQ ID NO: 582321 - RNA, 22 nt, Human
ucucucauaagaugaguacuua

SEQ ID NO: 582322 - RNA, 22 nt, Human
ugugaaaucugaacucaaagau

SEQ ID NO: 582323 - RNA, 22 nt, Human
caagauaaagccaccagaagcu

SEQ ID NO: 582324 - RNA, 23 nt, Human
uggcugagguccagguaguuuca

SEQ ID NO: 582325 - RNA, 22 nt, Human
cagaggaagcagacacaucuug

SEQ ID NO: 582326 - RNA, 22 nt, Human
uaagagauucuaaagcuacugg

SEQ ID NO: 582327 - RNA, 20 nt, Human
uccagccccugcauguugcu

SEQ ID NO: 582328 - RNA, 22 nt, Human
uggaagugcucuucugaccaac

SEQ ID NO: 582329 - RNA, 17 nt, Human
ucuccaggacgagcuca

SEQ ID NO: 582330 - RNA, 22 nt, Human
gcuggccauggccugcgccauc

SEQ ID NO: 582331 - RNA, 22 nt, Human
cuuguauucugccuaaccuuca

SEQ ID NO: 582332 - RNA, 20 nt, Human
uggcuccugcgguggaacca

SEQ ID NO: 582333 - RNA, 22 nt, Human
uggcucaggugugagcugaaga

SEQ ID NO: 582334 - RNA, 22 nt, Human
cuggaggaaaacaacugcagac

SEQ ID NO: 582335 - RNA, 22 nt, Human
cagccagagaaagggcacugcc

SEQ ID NO: 582336 - RNA, 22 nt, Human
aggcagcaagauuauuuaaucc

SEQ ID NO: 582337 - RNA, 22 nt, Human
ggaaggaagaggaccgagcugg

SEQ ID NO: 582338 - RNA, 20 nt, Human
gcucccagccugcagucccc

SEQ ID NO: 582339 - RNA, 22 nt, Human
gaagcccagcaaacugugauca

SEQ ID NO: 582340 - RNA, 22 nt, Human
agaauuugagugcuuucugugu

SEQ ID NO: 582341 - RNA, 22 nt, Human
uugagguccccaguacccacug

SEQ ID NO: 582342 - RNA, 22 nt, Human
ccucagagacaguaacuggaau

SEQ ID NO: 582343 - RNA, 22 nt, Human
uaaggaggcugcugugaagaaa

SEQ ID NO: 582344 - RNA, 22 nt, Human
ucugaagauuaccagcuaaaug

SEQ ID NO: 582345 - RNA, 22 nt, Human
cuuccugagcaaggaacuauag

SEQ ID NO: 582346 - RNA, 22 nt, Human
ugggcuuaggucggaggcggcc

SEQ ID NO: 582347 - RNA, 22 nt, Human
ggcuggucuccaacccccgauc

SEQ ID NO: 582348 - RNA, 22 nt, Human
caaggaaguuuuaggagaggaa

SEQ ID NO: 582349 - RNA, 17 nt, Human
auaagacagaagacaau

SEQ ID NO: 582350 - RNA, 21 nt, Human
cucugggccauuuucuuccac

SEQ ID NO: 582351 - RNA, 22 nt, Human
uguuaagguccugacuucugca

SEQ ID NO: 582352 - RNA, 22 nt, Human
gcagggcugggauuugagccca

SEQ ID NO: 582353 - RNA, 22 nt, Human
agcuuuuacauaaugaucuuga

SEQ ID NO: 582354 - RNA, 22 nt, Human
ugcaggaggccccauggaaccg

SEQ ID NO: 582355 - RNA, 22 nt, Human
cagggugcgccacucagaugua

SEQ ID NO: 582356 - RNA, 22 nt, Human
aagacagagacucugcaacagg

SEQ ID NO: 582357 - RNA, 22 nt, Human
uauuggauugagacauuuuaga

SEQ ID NO: 582358 - RNA, 22 nt, Human
cucccucauauacccagcgaga

SEQ ID NO: 582359 - RNA, 22 nt, Human
uggauuuaguucuucacaggcc

SEQ ID NO: 582360 - RNA, 22 nt, Human
ccugugugaagguuaggcaggu

SEQ ID NO: 582361 - RNA, 22 nt, Human
acaguagaguaaaugguuagau

SEQ ID NO: 582362 - RNA, 22 nt, Human
auucaaaagaccaugcagacuc

SEQ ID NO: 582363 - RNA, 23 nt, Human
aucugaaaagcauuugcaguuug

SEQ ID NO: 582364 - RNA, 22 nt, Human
uuccaggaacaaacucaccuua

SEQ ID NO: 582365 - RNA, 22 nt, Human
ggguccagaaugagaaugggcu

SEQ ID NO: 582366 - RNA, 22 nt, Human
cagucccaugagcccagaacau

SEQ ID NO: 582367 - RNA, 22 nt, Human
cugaagcugaaaacuuccagca

SEQ ID NO: 582368 - RNA, 22 nt, Human
ccagugugcaaucucuggcuua

SEQ ID NO: 582369 - RNA, 22 nt, Human
guauuugauacaugaaauggug

SEQ ID NO: 582370 - RNA, 22 nt, Human
ccagagcccagggucaugcagg

SEQ ID NO: 582371 - RNA, 22 nt, Human
gcagcuuuaaaggaggcucuga

SEQ ID NO: 582372 - RNA, 22 nt, Human
cagcagcuggugagacacagcc

SEQ ID NO: 582373 - RNA, 22 nt, Human
uggggagguaacaauuucaggc

SEQ ID NO: 582374 - RNA, 22 nt, Human
ccugguggagaggggcggagcg

SEQ ID NO: 582375 - RNA, 22 nt, Human
uaguggagaggauguggagaaa

SEQ ID NO: 582376 - RNA, 22 nt, Human
uagauuuuaggagauuuuacug

SEQ ID NO: 582377 - RNA, 22 nt, Human
uccccagggcugcagagggugu

SEQ ID NO: 582378 - RNA, 22 nt, Human
acugcuuuagaccuagagcucu

SEQ ID NO: 582379 - RNA, 20 nt, Human
uuuccuuucauuuuaguacc

SEQ ID NO: 582380 - RNA, 19 nt, Human
cuuccccuguuaccucacu

SEQ ID NO: 582381 - RNA, 22 nt, Human
gcaaacauaauaugaagacacu

SEQ ID NO: 582382 - RNA, 22 nt, Human
gaggaagcagggcuuggcugag

SEQ ID NO: 582383 - RNA, 22 nt, Human
ccuuuugaagguguuguuaagu

SEQ ID NO: 582384 - RNA, 22 nt, Human
ccugucucccuggcauggcuca

SEQ ID NO: 582385 - RNA, 22 nt, Human
uacagcuuuucauauuuguguu

SEQ ID NO: 582386 - RNA, 22 nt, Human
aagagacuguaaaggcgugagu

SEQ ID NO: 582387 - RNA, 22 nt, Human
ugcugaaugaauggaugguugc

SEQ ID NO: 582388 - RNA, 22 nt, Human
ggcacacaggcagauggagugu

SEQ ID NO: 582389 - RNA, 22 nt, Human
gggcacuguggggcccaugcug

SEQ ID NO: 582390 - RNA, 22 nt, Human
uucugacaauucaguaacagca

SEQ ID NO: 582391 - RNA, 22 nt, Human
agugaccaaucaugguuagauu

SEQ ID NO: 582392 - RNA, 22 nt, Human
ggcugccucuggaagcuggaga

SEQ ID NO: 582393 - RNA, 21 nt, Human
acucugaaaauuaauaguuau

SEQ ID NO: 582394 - RNA, 22 nt, Human
guucaaguucauaucucuuaac

SEQ ID NO: 582395 - RNA, 22 nt, Human
ucaggaggccaccaggaccugu

SEQ ID NO: 582396 - RNA, 22 nt, Human
uaaaugacccaugcugaccuca

SEQ ID NO: 582397 - RNA, 22 nt, Human
gcucaguuauccgugugugacu

SEQ ID NO: 582398 - RNA, 22 nt, Human
aacacauggguguuuauuguac

SEQ ID NO: 582399 - RNA, 20 nt, Human
uugaaugaaugucuggcuca

SEQ ID NO: 582400 - RNA, 22 nt, Human
uucuuucucuacuagcagagcu

SEQ ID NO: 582401 - RNA, 22 nt, Human
caacuauagaucaaaugaguuu

SEQ ID NO: 582402 - RNA, 22 nt, Human
auuuauaacgugcagccagggu

SEQ ID NO: 582403 - RNA, 22 nt, Human
cagugaggaguccagggcagag

SEQ ID NO: 582404 - RNA, 22 nt, Human
aauguuacauaacccauugucc

SEQ ID NO: 582405 - RNA, 22 nt, Human
ccugaguaacauggugagaacc

SEQ ID NO: 582406 - RNA, 22 nt, Human
ucagcuuccucugugguuccag

SEQ ID NO: 582407 - RNA, 19 nt, Human
uccagaagucccugagcgg

SEQ ID NO: 582408 - RNA, 22 nt, Human
ucccugcugcacucacaccuac

SEQ ID NO: 582409 - RNA, 22 nt, Human
agaugggugccuucuuucuuua

SEQ ID NO: 582410 - RNA, 22 nt, Human
agagcagagggcucugggacaa

SEQ ID NO: 582411 - RNA, 23 nt, Human
acauuguucaaugaaaguuagga

SEQ ID NO: 582412 - RNA, 22 nt, Human
ggcucccugccuguccucaguc

SEQ ID NO: 582413 - RNA, 22 nt, Human
uguccucagauaugucuacucu

SEQ ID NO: 582414 - RNA, 22 nt, Human
ucugcagcuuuuugguggggug

SEQ ID NO: 582415 - RNA, 22 nt, Human
ccaggccaguguuugguccagg

SEQ ID NO: 582416 - RNA, 22 nt, Human
uuuuuaagagauucuccagucu

SEQ ID NO: 582417 - RNA, 22 nt, Human
ugagccuggagucguggagggg

SEQ ID NO: 582418 - RNA, 17 nt, Human
acagcaggcccggaggg

SEQ ID NO: 582419 - RNA, 22 nt, Human
uugcuguagggggaaaauacuu

SEQ ID NO: 582420 - RNA, 22 nt, Human
uuuuauucauagggauggagag

SEQ ID NO: 582421 - RNA, 19 nt, Human
agggcggggcccaggcaca

SEQ ID NO: 582422 - RNA, 22 nt, Human
auuugaaaucccuucuacugua

SEQ ID NO: 582423 - RNA, 22 nt, Human
aacuccaggcagggaggccacu

SEQ ID NO: 582424 - RNA, 22 nt, Human
auuaggcacuagaaugucaauu

SEQ ID NO: 582425 - RNA, 22 nt, Human
gccuggcaggccucaugagggg

SEQ ID NO: 582426 - RNA, 22 nt, Human
ugggaggucucuugcggccuag

SEQ ID NO: 582427 - RNA, 22 nt, Human
augggcaugcuucuaguugaaa

SEQ ID NO: 582428 - RNA, 22 nt, Human
ccugggcuugcaucugugcugg

SEQ ID NO: 582429 - RNA, 22 nt, Human
uucuaguuuugccuuaucaaca

SEQ ID NO: 582430 - RNA, 22 nt, Human
gcaggccacaguggagucucug

SEQ ID NO: 582431 - RNA, 22 nt, Human
cagcugaagaaagagugguuag

SEQ ID NO: 582432 - RNA, 21 nt, Human
cucagaccacagcucacaccc

SEQ ID NO: 582433 - RNA, 22 nt, Human
gacagguggguucucguaucug

SEQ ID NO: 582434 - RNA, 22 nt, Human
caggaggaacaagagguucugg

SEQ ID NO: 582435 - RNA, 22 nt, Human
gcagacagccagacugcacugg

SEQ ID NO: 582436 - RNA, 22 nt, Human
aaacaucauaggcaugcaugau

SEQ ID NO: 582437 - RNA, 22 nt, Human
ugguccuguagcacuugauuag

SEQ ID NO: 582438 - RNA, 22 nt, Human
ugcccugugccagacuuccugg

SEQ ID NO: 582439 - RNA, 22 nt, Human
gcagugcugaucccauggcaga

SEQ ID NO: 582440 - RNA, 22 nt, Human
ucuggccucuugggaugcuccc

SEQ ID NO: 582441 - RNA, 22 nt, Human
uucucagauauuuguauggaac

SEQ ID NO: 582442 - RNA, 22 nt, Human
cuugcucuagauguucagagcu

SEQ ID NO: 582443 - RNA, 17 nt, Human
uaucucuucaaguuuca

SEQ ID NO: 582444 - RNA, 22 nt, Human
agcaugaagacuucagagcuag

SEQ ID NO: 582445 - RNA, 22 nt, Human
agagaaggaaagcugacauggg

SEQ ID NO: 582446 - RNA, 22 nt, Human
gacaggccagacaggagacuga

SEQ ID NO: 582447 - RNA, 22 nt, Human
ggucucugacuuagagauggau

SEQ ID NO: 582448 - RNA, 21 nt, Human
ucaggcagugcaaauacaugg

SEQ ID NO: 582449 - RNA, 22 nt, Human
uaauacaucauucaucuaagga

SEQ ID NO: 582450 - RNA, 22 nt, Human
gcagaugguggaggcaagaggc

SEQ ID NO: 582451 - RNA, 22 nt, Human
ugcagagaaaccaguggaggac

SEQ ID NO: 582452 - RNA, 22 nt, Human
auguuccugguauaucaugacc

SEQ ID NO: 582453 - RNA, 16 nt, Human
uaaacagcagacaguu

SEQ ID NO: 582454 - RNA, 22 nt, Human
uuuaucacagaauaagaaguca

SEQ ID NO: 582455 - RNA, 22 nt, Human
aauggguugcuuuccacagccu

SEQ ID NO: 582456 - RNA, 22 nt, Human
gccgugggugucauggcccaua

SEQ ID NO: 582457 - RNA, 22 nt, Human
gggugcagggucuccagcagcu

SEQ ID NO: 582458 - RNA, 22 nt, Human
uugcauuagugucauaaggugg

SEQ ID NO: 582459 - RNA, 23 nt, Human
ucaguaaaugguaaagucucuuc

SEQ ID NO: 582460 - RNA, 22 nt, Human
uucucagaaaauguagagaaaa

SEQ ID NO: 582461 - RNA, 22 nt, Human
ugcagaccucccauggcugccu

SEQ ID NO: 582462 - RNA, 22 nt, Human
cuaaaaauccacacuaggugaa

SEQ ID NO: 582463 - RNA, 22 nt, Human
ucacagcauugucacaaggcug

SEQ ID NO: 582464 - RNA, 22 nt, Human
agaagauuauuagagacuuugu

SEQ ID NO: 582465 - RNA, 22 nt, Human
ccccaccaccaaggcucaguuu

SEQ ID NO: 582466 - RNA, 22 nt, Human
aaauaguuagcccugcauauau

SEQ ID NO: 582467 - RNA, 22 nt, Human
aaacaggcuuauauuuugcucu

SEQ ID NO: 582468 - RNA, 22 nt, Human
ucaguguucagcggugugugca

SEQ ID NO: 582469 - RNA, 20 nt, Human
augaguuuaaacauucagag

SEQ ID NO: 582470 - RNA, 22 nt, Human
gggggacuaacuggauccugga

SEQ ID NO: 582471 - RNA, 23 nt, Human
ugcaggacuacucgagcacugcu

SEQ ID NO: 582472 - RNA, 22 nt, Human
ccagagccuggcaucugcauaa

SEQ ID NO: 582473 - RNA, 22 nt, Human
auaagguuggucuuaacuaccu

SEQ ID NO: 582474 - RNA, 22 nt, Human
acaguccuuguguggaacauua

SEQ ID NO: 582475 - RNA, 22 nt, Human
ugugaggcuaccugccaggguc

SEQ ID NO: 582476 - RNA, 22 nt, Human
uccaggguguguuuacuggggu

SEQ ID NO: 582477 - RNA, 22 nt, Human
augacaauggacauaguuaaaa

SEQ ID NO: 582478 - RNA, 22 nt, Human
uucaguauguagaacaaguguu

SEQ ID NO: 582479 - RNA, 21 nt, Human
uagcacagcuguagacaguuu

SEQ ID NO: 582480 - RNA, 22 nt, Human
cugaguaagauacagaagcucc

SEQ ID NO: 582481 - RNA, 22 nt, Human
agcuggagaaaccugggagggu

SEQ ID NO: 582482 - RNA, 22 nt, Human
caggcucuagguuaguaggaga

SEQ ID NO: 582483 - RNA, 22 nt, Human
augaaauggugguuuuccauuu

SEQ ID NO: 582484 - RNA, 22 nt, Human
acuggauggugucaugagcagc

SEQ ID NO: 582485 - RNA, 22 nt, Human
aaccagcuaaacuuugcucgaa

SEQ ID NO: 582486 - RNA, 22 nt, Human
gugcaguucccaaggucacaca

SEQ ID NO: 582487 - RNA, 22 nt, Human
gagcuuccucagccuuucucac

SEQ ID NO: 582488 - RNA, 22 nt, Human
ugcugagggagcaucaaagaaa

SEQ ID NO: 582489 - RNA, 22 nt, Human
cagagcugucauuugccaguga

SEQ ID NO: 582490 - RNA, 22 nt, Human
uucuucaaauagcagggaguca

SEQ ID NO: 582491 - RNA, 23 nt, Human
gggagccaggaccucgcgcccca

SEQ ID NO: 582492 - RNA, 22 nt, Human
ucagaggaaaggucagauggcu

SEQ ID NO: 582493 - RNA, 22 nt, Human
uugaagcacaaugucuuuuauc

SEQ ID NO: 582494 - RNA, 22 nt, Human
uacauauuugucuuuguacugu

SEQ ID NO: 582495 - RNA, 22 nt, Human
cagcuguugcagcacugagaga

SEQ ID NO: 582496 - RNA, 22 nt, Human
uagcugacgcuaaauaaauguu

SEQ ID NO: 582497 - RNA, 22 nt, Human
cagaggcucuuccucacugccc

SEQ ID NO: 582498 - RNA, 23 nt, Human
gauacacucccugcugggcacug

SEQ ID NO: 582499 - RNA, 22 nt, Human
gagugguuagaaguaguguggc

SEQ ID NO: 582500 - RNA, 19 nt, Human
ccacuuugcuucucugggu

SEQ ID NO: 582501 - RNA, 22 nt, Human
gugugcagcagagacaggacuc

SEQ ID NO: 582502 - RNA, 22 nt, Human
accuugaacccagcuugcugca

SEQ ID NO: 582503 - RNA, 22 nt, Human
caguuuucuuguuauauuuggg

SEQ ID NO: 582504 - RNA, 22 nt, Human
aacauuuauauggguucaugaa

SEQ ID NO: 582505 - RNA, 22 nt, Human
aggcacugugcagucccaagca

SEQ ID NO: 582506 - RNA, 22 nt, Human
uuaagacaugugagcauaacuu

SEQ ID NO: 582507 - RNA, 23 nt, Human
gcagcugguuagaagggaaggag

SEQ ID NO: 582508 - RNA, 22 nt, Human
uucucuggauguuucucaguca

SEQ ID NO: 582509 - RNA, 22 nt, Human
caguuucugggcguucacaggu

SEQ ID NO: 582510 - RNA, 22 nt, Human
cucugggguuaagcuuccaugg

SEQ ID NO: 582511 - RNA, 22 nt, Human
cucugggcacauuuuccaggac

SEQ ID NO: 582512 - RNA, 22 nt, Human
cuggguggaaagugcugagaau

SEQ ID NO: 582513 - RNA, 21 nt, Human
uccugccuuaguccagagcag

SEQ ID NO: 582514 - RNA, 22 nt, Human
acaggcagggaccucuugaguu

SEQ ID NO: 582515 - RNA, 22 nt, Human
caggcccagggagggagaccaa

SEQ ID NO: 582516 - RNA, 22 nt, Human
cagggcuccaugcagggacucc

SEQ ID NO: 582517 - RNA, 22 nt, Human
cuguggaagguuuagauaggua

SEQ ID NO: 582518 - RNA, 21 nt, Human
caaugucugcucucugccuag

SEQ ID NO: 582519 - RNA, 22 nt, Human
uaccugaaguaacaaugaauau

SEQ ID NO: 582520 - RNA, 22 nt, Human
acugagguuuuuaguguuaaau

SEQ ID NO: 582521 - RNA, 22 nt, Human
uggaggacaggacuggacagcc

SEQ ID NO: 582522 - RNA, 22 nt, Human
cagguggucaggcagaugggcu

SEQ ID NO: 582523 - RNA, 22 nt, Human
ggcccugugguuuugcaaaguc

SEQ ID NO: 582524 - RNA, 23 nt, Human
ggcucugugcugggccugcagga

SEQ ID NO: 582525 - RNA, 22 nt, Human
uaaugcacauagaaguacuuag

SEQ ID NO: 582526 - RNA, 22 nt, Human
agaucauaugcaguaaugaacu

SEQ ID NO: 582527 - RNA, 22 nt, Human
uggccugaauuauggcagaucu

SEQ ID NO: 582528 - RNA, 22 nt, Human
ucaggcagagcuguggagcucu

SEQ ID NO: 582529 - RNA, 22 nt, Human
ccccaaagcugaguucccgccu

SEQ ID NO: 582530 - RNA, 22 nt, Human
gggcuggagccagcuguggcug

SEQ ID NO: 582531 - RNA, 22 nt, Human
cuccaggauaccuguuccuaua

SEQ ID NO: 582532 - RNA, 22 nt, Human
cuucagugaauguugaguaagg

SEQ ID NO: 582533 - RNA, 18 nt, Human
ugcaaauggcuguuugau

SEQ ID NO: 582534 - RNA, 22 nt, Human
ucuuccugaaacccuguuccag

SEQ ID NO: 582535 - RNA, 22 nt, Human
aggagagcaggccagccguccc

SEQ ID NO: 582536 - RNA, 22 nt, Human
ggagcuggagaguacagaguuu

SEQ ID NO: 582537 - RNA, 22 nt, Human
acauuucuggaguuucucaaca

SEQ ID NO: 582538 - RNA, 22 nt, Human
gaguuauuggguggaaagguag

SEQ ID NO: 582539 - RNA, 22 nt, Human
ucaggggcagccggggaagcca

SEQ ID NO: 582540 - RNA, 22 nt, Human
aguuuccaaauauuguuuuagc

SEQ ID NO: 582541 - RNA, 22 nt, Human
caguggcgugaucucugcucac

SEQ ID NO: 582542 - RNA, 18 nt, Human
aguccuuacgaggcuaua

SEQ ID NO: 582543 - RNA, 22 nt, Human
uccucagcaaacacuucacucu

SEQ ID NO: 582544 - RNA, 19 nt, Human
ugccugcuccuggcuucca

SEQ ID NO: 582545 - RNA, 22 nt, Human
cuggugccauucuguggccuag

SEQ ID NO: 582546 - RNA, 22 nt, Human
ucaggaagccgguuaaauagau

SEQ ID NO: 582547 - RNA, 21 nt, Human
ugcccuggggcucuucccuca

SEQ ID NO: 582548 - RNA, 22 nt, Human
cuggccccaucuggagucugag

SEQ ID NO: 582549 - RNA, 22 nt, Human
ggaggccaaggcagguggaucg

SEQ ID NO: 582550 - RNA, 22 nt, Human
aaaaggcauggagguugauagu

SEQ ID NO: 582551 - RNA, 22 nt, Human
uaacaaugauuagugacuacag

SEQ ID NO: 582552 - RNA, 22 nt, Human
aaauauguuuuccaguugucau

SEQ ID NO: 582553 - RNA, 22 nt, Human
acagcacagagugguauggcug

SEQ ID NO: 582554 - RNA, 22 nt, Human
cucagcuucuaccuccugagug

SEQ ID NO: 582555 - RNA, 22 nt, Human
cuaggaacaguucaacaguuua

SEQ ID NO: 582556 - RNA, 22 nt, Human
ucacacagggucggaaagagug

SEQ ID NO: 582557 - RNA, 22 nt, Human
aagccacuauggugauucucaa

SEQ ID NO: 582558 - RNA, 22 nt, Human
ugcugcagaaauucugugagga

SEQ ID NO: 582559 - RNA, 22 nt, Human
auggacagcaacuggaagcuuc

SEQ ID NO: 582560 - RNA, 22 nt, Human
uccugucugcucacagagcugg

SEQ ID NO: 582561 - RNA, 22 nt, Human
uauuuucuggacagucuugcuu

SEQ ID NO: 582562 - RNA, 22 nt, Human
uucuuacagcccuauuacuaaa

SEQ ID NO: 582563 - RNA, 22 nt, Human
acauuucuuucuauucaguagc

SEQ ID NO: 582564 - RNA, 22 nt, Human
uagcagaggcugucugacuuaa

SEQ ID NO: 582565 - RNA, 22 nt, Human
gaggaaaauaacaacuaagggc

SEQ ID NO: 582566 - RNA, 22 nt, Human
ucaguccuacacgcucagggac

SEQ ID NO: 582567 - RNA, 22 nt, Human
gaggccagaagucugagaucag

SEQ ID NO: 582568 - RNA, 22 nt, Human
auuucucagcacuuccuaucuc

SEQ ID NO: 582569 - RNA, 19 nt, Human
gcaggucauuaggcuaggu

SEQ ID NO: 582570 - RNA, 22 nt, Human
aauuacacagggaucacuuuuu

SEQ ID NO: 582571 - RNA, 22 nt, Human
cuucagcaccucagcuggagag

SEQ ID NO: 582572 - RNA, 19 nt, Human
ucccugaguuccagcccag

SEQ ID NO: 582573 - RNA, 22 nt, Human
guggaccaagguggaagauaaa

SEQ ID NO: 582574 - RNA, 22 nt, Human
aacaaggcacaagcuggcuguu

SEQ ID NO: 582575 - RNA, 22 nt, Human
guucugaguccuccuuugaagg

SEQ ID NO: 582576 - RNA, 22 nt, Human
uuacugaaaauucuucaggauu

SEQ ID NO: 582577 - RNA, 22 nt, Human
ucacaggagucaaggaauagua

SEQ ID NO: 582578 - RNA, 22 nt, Human
uugugaaugcuuaauauguuuc

SEQ ID NO: 582579 - RNA, 22 nt, Human
gauaccagacagggagggagaa

SEQ ID NO: 582580 - RNA, 22 nt, Human
guuacaaaggaagcuucacugc

SEQ ID NO: 582581 - RNA, 22 nt, Human
ucagaacagcgagaauauucac

SEQ ID NO: 582582 - RNA, 22 nt, Human
aaugaacaugggaguacuaaua

SEQ ID NO: 582583 - RNA, 22 nt, Human
auacaagacucagcacagacgg

SEQ ID NO: 582584 - RNA, 23 nt, Human
cugagggcuggucugaagucugc

SEQ ID NO: 582585 - RNA, 22 nt, Human
gcaguggggcgcugggaguugg

SEQ ID NO: 582586 - RNA, 19 nt, Human
ccagaagggcagcuaugga

SEQ ID NO: 582587 - RNA, 22 nt, Human
auagcuguagaauguauacaca

SEQ ID NO: 582588 - RNA, 22 nt, Human
gguuccuguacuuagcuaugua

SEQ ID NO: 582589 - RNA, 20 nt, Human
guucucacugaucugcaggg

SEQ ID NO: 582590 - RNA, 20 nt, Human
uccagcacccucacagagaa

SEQ ID NO: 582591 - RNA, 22 nt, Human
uuuaucuauuguauuguugaug

SEQ ID NO: 582592 - RNA, 22 nt, Human
ggcaguggcauguggguagugg

SEQ ID NO: 582593 - RNA, 22 nt, Human
gaggggccggcaugugccucuc

SEQ ID NO: 582594 - RNA, 22 nt, Human
aucaaguucugucacauuuguc

SEQ ID NO: 582595 - RNA, 22 nt, Human
gagggcugauaaaugcgcaugg

SEQ ID NO: 582596 - RNA, 22 nt, Human
ggagcagagcauuucacagccu

SEQ ID NO: 582597 - RNA, 23 nt, Human
ugaagcccagugauuuuguuuca

SEQ ID NO: 582598 - RNA, 22 nt, Human
gcugccuccacuggcucccagu

SEQ ID NO: 582599 - RNA, 22 nt, Human
uagaacaugugaaaauauagcc

SEQ ID NO: 582600 - RNA, 22 nt, Human
aucagaacaaaagaacaguuua

SEQ ID NO: 582601 - RNA, 22 nt, Human
ucagaggcuggaagagccuccu

SEQ ID NO: 582602 - RNA, 18 nt, Human
agcaccagucacuaacag

SEQ ID NO: 582603 - RNA, 22 nt, Human
ggaaggcuuuguagaagugcca

SEQ ID NO: 582604 - RNA, 22 nt, Human
uuuguuucgcagccucucucug

SEQ ID NO: 582605 - RNA, 22 nt, Human
acacagagcuggaacugcuuca

SEQ ID NO: 582606 - RNA, 22 nt, Human
acauuucuuugcuagacagcag

SEQ ID NO: 582607 - RNA, 22 nt, Human
guccccagcuaaucucuuugcc

SEQ ID NO: 582608 - RNA, 22 nt, Human
agcucuaucaccugucaguugc

SEQ ID NO: 582609 - RNA, 22 nt, Human
caguggaaacuaugcugcugga

SEQ ID NO: 582610 - RNA, 22 nt, Human
agauguguuucuaguuccugca

SEQ ID NO: 582611 - RNA, 22 nt, Human
auuucucaguaaucucagcaau

SEQ ID NO: 582612 - RNA, 22 nt, Human
aacaagaagggaaggcaugauu

SEQ ID NO: 582613 - RNA, 22 nt, Human
cccaggcugcguauccacaaua

SEQ ID NO: 582614 - RNA, 22 nt, Human
auacaacagaaaaugauuauuc

SEQ ID NO: 582615 - RNA, 22 nt, Human
aggcuauuuccacucuucucau

SEQ ID NO: 582616 - RNA, 22 nt, Human
gagugggcuuggggagaguuug

SEQ ID NO: 582617 - RNA, 22 nt, Human
agggcagaccacgugcaaggau

SEQ ID NO: 582618 - RNA, 22 nt, Human
gugaaggacugaaugaaaaugu

SEQ ID NO: 582619 - RNA, 22 nt, Human
aguggcuggcauaggaacagac

SEQ ID NO: 582620 - RNA, 22 nt, Human
gcccaggaaguugaggcugccg

SEQ ID NO: 582621 - RNA, 22 nt, Human
cccugcagccggccagcucauu

SEQ ID NO: 582622 - RNA, 22 nt, Human
gagauuuauugacuuaacagua

SEQ ID NO: 582623 - RNA, 22 nt, Human
ccuggaguugaaggaagguggg

SEQ ID NO: 582624 - RNA, 22 nt, Human
ggcuucuguccucuggaucugu

SEQ ID NO: 582625 - RNA, 22 nt, Human
aacuuuaucggaacagguacuc

SEQ ID NO: 582626 - RNA, 22 nt, Human
guggauggauuuugaggaaugg

SEQ ID NO: 582627 - RNA, 22 nt, Human
gcuaugaacaugagaaugcaaa

SEQ ID NO: 582628 - RNA, 22 nt, Human
ugugcaauaaucauagugauuu

SEQ ID NO: 582629 - RNA, 22 nt, Human
auuuccuauccuggucuuaaaa

SEQ ID NO: 582630 - RNA, 22 nt, Human
ucugagguuuucauguuuucug

SEQ ID NO: 582631 - RNA, 22 nt, Human
ggcugggaggaugacuugcuac

SEQ ID NO: 582632 - RNA, 22 nt, Human
agcagcuucuuucacuccugga

SEQ ID NO: 582633 - RNA, 22 nt, Human
uggaucucggcaaugcgggacu

SEQ ID NO: 582634 - RNA, 22 nt, Human
ccuggccagaggcgugccugug

SEQ ID NO: 582635 - RNA, 22 nt, Human
cuccaggacccaguggcuccag

SEQ ID NO: 582636 - RNA, 18 nt, Human
auguacauuugcuaaagc

SEQ ID NO: 582637 - RNA, 22 nt, Human
aaauuuuagaccaggcaaaacu

SEQ ID NO: 582638 - RNA, 22 nt, Human
ucaucuaauuuuggaacagaga

SEQ ID NO: 582639 - RNA, 22 nt, Human
augaaaagggagugauauuugu

SEQ ID NO: 582640 - RNA, 22 nt, Human
caggcugggcuccggagauaaa

SEQ ID NO: 582641 - RNA, 22 nt, Human
aacugcauucagaaagcucacu

SEQ ID NO: 582642 - RNA, 22 nt, Human
ucacugggagaugugggaaggg

SEQ ID NO: 582643 - RNA, 22 nt, Human
aggugcagcugacaccaugugg

SEQ ID NO: 582644 - RNA, 22 nt, Human
cuuaugcugagaaugaaagaau

SEQ ID NO: 582645 - RNA, 22 nt, Human
guccuguugggguguugcaguc

SEQ ID NO: 582646 - RNA, 22 nt, Human
cuuuuucccagguggagagagg

SEQ ID NO: 582647 - RNA, 22 nt, Human
ucauuucaugucucaggcacug

SEQ ID NO: 582648 - RNA, 22 nt, Human
ugaggcaggaguuaaugugcuc

SEQ ID NO: 582649 - RNA, 22 nt, Human
ccagagagguagcuuacccucu

SEQ ID NO: 582650 - RNA, 22 nt, Human
cuggcuuuguauaguucccuga

SEQ ID NO: 582651 - RNA, 22 nt, Human
aguccaagaccaaggugucacc

SEQ ID NO: 582652 - RNA, 22 nt, Human
guguucucuagagcuguacaaa

SEQ ID NO: 582653 - RNA, 18 nt, Human
uggacacauggccugggu

SEQ ID NO: 582654 - RNA, 22 nt, Human
ggaggcuuccuggcucuugauu

SEQ ID NO: 582655 - RNA, 19 nt, Human
cuggcugcaaugccagggu

SEQ ID NO: 582656 - RNA, 22 nt, Human
acuguauuuccaacagacaaau

SEQ ID NO: 582657 - RNA, 22 nt, Human
ugcagcugagucacccagccau

SEQ ID NO: 582658 - RNA, 22 nt, Human
gugugcacagagcuccaguguu

SEQ ID NO: 582659 - RNA, 18 nt, Human
acagaggcagacauguau

SEQ ID NO: 582660 - RNA, 22 nt, Human
uaggcaggugugcacugcccac

SEQ ID NO: 582661 - RNA, 22 nt, Human
cagaaagcucuuucaaucuugc

SEQ ID NO: 582662 - RNA, 22 nt, Human
aauaaaugaacaaagcagguug

SEQ ID NO: 582663 - RNA, 22 nt, Human
auuuaugauuagccuauuguug

SEQ ID NO: 582664 - RNA, 22 nt, Human
aagcucuucuguggauuugagu

SEQ ID NO: 582665 - RNA, 22 nt, Human
uagcagagcagggaucagagcc

SEQ ID NO: 582666 - RNA, 22 nt, Human
aauguuagauuccuccaccuag

SEQ ID NO: 582667 - RNA, 22 nt, Human
acagcaguuaacgaucagacuc

SEQ ID NO: 582668 - RNA, 22 nt, Human
agucccagugagaugaaccagg

SEQ ID NO: 582669 - RNA, 22 nt, Human
gcagggcagugugucugugggg

SEQ ID NO: 582670 - RNA, 22 nt, Human
ucaguaaacagguuuaaguccu

SEQ ID NO: 582671 - RNA, 22 nt, Human
gaaagggaguggacaacaggca

SEQ ID NO: 582672 - RNA, 22 nt, Human
cucaguuucuuacucuguauaa

SEQ ID NO: 582673 - RNA, 22 nt, Human
guuguuuuauugugagucccau

SEQ ID NO: 582674 - RNA, 22 nt, Human
auaugcuuaugaugguuaauuu

SEQ ID NO: 582675 - RNA, 22 nt, Human
cugcagggcuuaccuugcucug

SEQ ID NO: 582676 - RNA, 22 nt, Human
cagucuccaaaucaaucugaau

SEQ ID NO: 582677 - RNA, 22 nt, Human
ggccucuucugcucauacuuuc

SEQ ID NO: 582678 - RNA, 22 nt, Human
uggucuggaacuccuggcuuca

SEQ ID NO: 582679 - RNA, 22 nt, Human
ccaagggcucuggacagagugg

SEQ ID NO: 582680 - RNA, 22 nt, Human
ucaaaguuacuugugguuuucu

SEQ ID NO: 582681 - RNA, 22 nt, Human
aauuaacaaauguagcugugau

SEQ ID NO: 582682 - RNA, 22 nt, Human
acaguggaagaagcacugaacu

SEQ ID NO: 582683 - RNA, 22 nt, Human
auagccaggagaugauggggga

SEQ ID NO: 582684 - RNA, 22 nt, Human
uuucuuggguuccaguucccag

SEQ ID NO: 582685 - RNA, 22 nt, Human
uuccuagcuauaaagcucuucc

SEQ ID NO: 582686 - RNA, 22 nt, Human
uaaagauguucucauuucauag

SEQ ID NO: 582687 - RNA, 22 nt, Human
acagugucuccugguacccagu

SEQ ID NO: 582688 - RNA, 22 nt, Human
gcuucaaagauucacaguuuca

SEQ ID NO: 582689 - RNA, 22 nt, Human
cuggugagacucagggaugcuu

SEQ ID NO: 582690 - RNA, 22 nt, Human
uuucacaucagagguagauuag

SEQ ID NO: 582691 - RNA, 22 nt, Human
agccaggcagacucucuuucuu

SEQ ID NO: 582692 - RNA, 22 nt, Human
ucccaggcuggcaggcagcagu

SEQ ID NO: 582693 - RNA, 22 nt, Human
acuguacauauggauucuaaga

SEQ ID NO: 582694 - RNA, 22 nt, Human
cuggagugaagucuggcagcuu

SEQ ID NO: 582695 - RNA, 20 nt, Human
aacacacugguggcaucagg

SEQ ID NO: 582696 - RNA, 22 nt, Human
gagcugagacacacuuuggcaa

SEQ ID NO: 582697 - RNA, 22 nt, Human
ggccugagaauguaccagaucu

SEQ ID NO: 582698 - RNA, 22 nt, Human
agguccugggaguucuagugug

SEQ ID NO: 582699 - RNA, 22 nt, Human
auaagcuuuuaaagcuacuuug

SEQ ID NO: 582700 - RNA, 22 nt, Human
cugccugccacguucagcugua

SEQ ID NO: 582701 - RNA, 22 nt, Human
cuguuucuccacacucuuccca

SEQ ID NO: 582702 - RNA, 22 nt, Human
uucacaggaggguggaugcaug

SEQ ID NO: 582703 - RNA, 22 nt, Human
gcucccagggaccgcagggcag

SEQ ID NO: 582704 - RNA, 22 nt, Human
aacugcuuguaaauaauguuga

SEQ ID NO: 582705 - RNA, 22 nt, Human
gagaaggacuacacaucuggcc

SEQ ID NO: 582706 - RNA, 22 nt, Human
ugaaaauucaucucauagcaga

SEQ ID NO: 582707 - RNA, 20 nt, Human
gaaaucaguuaaugaugguu

SEQ ID NO: 582708 - RNA, 22 nt, Human
uugcuacuguucuuugcuagag

SEQ ID NO: 582709 - RNA, 22 nt, Human
auuagagauuaugaauuccuag

SEQ ID NO: 582710 - RNA, 22 nt, Human
cagugucugggacagaaaguca

SEQ ID NO: 582711 - RNA, 22 nt, Human
gaaaagcuaggccaguucagcu

SEQ ID NO: 582712 - RNA, 19 nt, Human
ucccaagauuucuguauca

SEQ ID NO: 582713 - RNA, 21 nt, Human
uugccccugaguuuuucugag

SEQ ID NO: 582714 - RNA, 22 nt, Human
cucugaaacuccugcaccuucu

SEQ ID NO: 582715 - RNA, 22 nt, Human
ucugagaauggagcuaaaaauc

SEQ ID NO: 582716 - RNA, 22 nt, Human
gcuucuguauuuauuguccuuu

SEQ ID NO: 582717 - RNA, 22 nt, Human
auccucagaccucagcaaagcc

SEQ ID NO: 582718 - RNA, 22 nt, Human
gaacccaguccaggugcagccu

SEQ ID NO: 582719 - RNA, 22 nt, Human
ucucuuucucagaugguggaga

SEQ ID NO: 582720 - RNA, 22 nt, Human
uccaauuuucugauuucacuug

SEQ ID NO: 582721 - RNA, 22 nt, Human
ugugaugcuggagugcgaauau

SEQ ID NO: 582722 - RNA, 22 nt, Human
cagccuguagaauacaguaaau

SEQ ID NO: 582723 - RNA, 22 nt, Human
aguggcaauguagagagugauc

SEQ ID NO: 582724 - RNA, 22 nt, Human
uacauacuccauaaugacagca

SEQ ID NO: 582725 - RNA, 22 nt, Human
ggccacacagaugacugcuuuc

SEQ ID NO: 582726 - RNA, 22 nt, Human
agcugagcacauucaaacaggu

SEQ ID NO: 582727 - RNA, 22 nt, Human
gcuuuguguagaaggaggaugg

SEQ ID NO: 582728 - RNA, 22 nt, Human
aaaugucagaaaacauggagug

SEQ ID NO: 582729 - RNA, 22 nt, Human
gccuuccuuuuaccaccagcca

SEQ ID NO: 582730 - RNA, 20 nt, Human
cugcagggugagugggcgau

SEQ ID NO: 582731 - RNA, 22 nt, Human
cugagcuuggcuuaucuccagc

SEQ ID NO: 582732 - RNA, 22 nt, Human
acaguguccccagcucugugag

SEQ ID NO: 582733 - RNA, 22 nt, Human
uuguuucugaguuuucauguau

SEQ ID NO: 582734 - RNA, 17 nt, Human
cccagcuggcagugccg

SEQ ID NO: 582735 - RNA, 22 nt, Human
ucugggaauaaaacuagggacu

SEQ ID NO: 582736 - RNA, 22 nt, Human
cucaucuaggauaaagcaucuu

SEQ ID NO: 582737 - RNA, 22 nt, Human
uggagcugggaguccugggcug

SEQ ID NO: 582738 - RNA, 22 nt, Human
auugcugaaucuaaggcuucca

SEQ ID NO: 582739 - RNA, 20 nt, Human
cucugcuuuccaccuuucag

SEQ ID NO: 582740 - RNA, 19 nt, Human
cccucuugcacaaagcaaa

SEQ ID NO: 582741 - RNA, 22 nt, Human
uaaacacucacuucauagccau

SEQ ID NO: 582742 - RNA, 22 nt, Human
uuucuucucacccaggacagag

SEQ ID NO: 582743 - RNA, 20 nt, Human
caaaugaagcuguuggccuc

SEQ ID NO: 582744 - RNA, 22 nt, Human
aguaguggcuuccuggagugcu

SEQ ID NO: 582745 - RNA, 22 nt, Human
uaguuuaggauccaaucuaaga

SEQ ID NO: 582746 - RNA, 22 nt, Human
gaggcagaggaagguggucucu

SEQ ID NO: 582747 - RNA, 22 nt, Human
aaauugcagguaggugggugau

SEQ ID NO: 582748 - RNA, 22 nt, Human
gcuccaguggauacagcagugg

SEQ ID NO: 582749 - RNA, 22 nt, Human
auuguaaguagaaauguuaugg

SEQ ID NO: 582750 - RNA, 18 nt, Human
aggcccuggccucgaaca

SEQ ID NO: 582751 - RNA, 22 nt, Human
acugccugccucugauucugca

SEQ ID NO: 582752 - RNA, 22 nt, Human
uucccuccuaugcccacugaaa

SEQ ID NO: 582753 - RNA, 22 nt, Human
uccucuccauauuuucugauuu

SEQ ID NO: 582754 - RNA, 22 nt, Human
acuuucugucaucuagacaagu

SEQ ID NO: 582755 - RNA, 22 nt, Human
agcuggccggccuccaggugga

SEQ ID NO: 582756 - RNA, 22 nt, Human
acugcaucugaaacauggguca

SEQ ID NO: 582757 - RNA, 22 nt, Human
uagugauugcugauauuccauu

SEQ ID NO: 582758 - RNA, 22 nt, Human
cuucaacuucccuagaugucau

SEQ ID NO: 582759 - RNA, 22 nt, Human
ucugcugagaugcccaugguua

SEQ ID NO: 582760 - RNA, 22 nt, Human
gcagguggaucaccacgucagg

SEQ ID NO: 582761 - RNA, 22 nt, Human
cugggccucauccccagaguuu

SEQ ID NO: 582762 - RNA, 22 nt, Human
cuggcagauaguaagugaucaa

SEQ ID NO: 582763 - RNA, 22 nt, Human
uacaucccagccagcagaauca

SEQ ID NO: 582764 - RNA, 22 nt, Human
aggagaccuucaccacuuccac

SEQ ID NO: 582765 - RNA, 22 nt, Human
uuuugcuugagugcacaaaaug

SEQ ID NO: 582766 - RNA, 22 nt, Human
cagcugcuguucaguuuuguuu

SEQ ID NO: 582767 - RNA, 22 nt, Human
agaaaauuacuccagagacaag

SEQ ID NO: 582768 - RNA, 22 nt, Human
aucauucagugaccacuuccca

SEQ ID NO: 582769 - RNA, 22 nt, Human
ccacaaauuagguuuugcuugu

SEQ ID NO: 582770 - RNA, 22 nt, Human
aacacaggcauacuggcuccag

SEQ ID NO: 582771 - RNA, 22 nt, Human
ugggaugcccugacccucugga

SEQ ID NO: 582772 - RNA, 22 nt, Human
agaucaaggacaugaagaggcu

SEQ ID NO: 582773 - RNA, 23 nt, Human
cagcccaaagagagagcuacuuu

SEQ ID NO: 582774 - RNA, 22 nt, Human
auuaggauguuccuaugcacau

SEQ ID NO: 582775 - RNA, 22 nt, Human
uaaucuuagacauguauuuuuc

SEQ ID NO: 582776 - RNA, 22 nt, Human
aggagugcaaauaguccagaga

SEQ ID NO: 582777 - RNA, 22 nt, Human
ugcugaauugguaguacuguug

SEQ ID NO: 582778 - RNA, 22 nt, Human
ugggguaggagucagcgagaga

SEQ ID NO: 582779 - RNA, 22 nt, Human
cucagggacguuagaggacagg

SEQ ID NO: 582780 - RNA, 22 nt, Human
uuauugcugcuaacauuuuaug

SEQ ID NO: 582781 - RNA, 22 nt, Human
uaaaguguguauauacauaugg

SEQ ID NO: 582782 - RNA, 22 nt, Human
cugccuggaaggagcaagggga

SEQ ID NO: 582783 - RNA, 22 nt, Human
gaggguggaucagccugauugg

SEQ ID NO: 582784 - RNA, 22 nt, Human
uagggcugaggcaacaagggag

SEQ ID NO: 582785 - RNA, 19 nt, Human
ccagucuccuugcagcauc

SEQ ID NO: 582786 - RNA, 22 nt, Human
gcacacccucucaccagcacug

SEQ ID NO: 582787 - RNA, 22 nt, Human
ccagucccagcucugccaugcu

SEQ ID NO: 582788 - RNA, 22 nt, Human
uggacaacauagugagaccuca

SEQ ID NO: 582789 - RNA, 20 nt, Human
gcugaggucccugugguuuu

SEQ ID NO: 582790 - RNA, 22 nt, Human
auaaauucucugauguauagua

SEQ ID NO: 582791 - RNA, 22 nt, Human
acuucagagacuuuauggucca

SEQ ID NO: 582792 - RNA, 22 nt, Human
caguccugggugcagcaggaaa

SEQ ID NO: 582793 - RNA, 22 nt, Human
uucaugucugccuuuucaagug

SEQ ID NO: 582794 - RNA, 22 nt, Human
cagaaguugccacaugacccuu

SEQ ID NO: 582795 - RNA, 22 nt, Human
uuggucagucagagaauggagu

SEQ ID NO: 582796 - RNA, 22 nt, Human
uggucaggcugcucugcggcgu

SEQ ID NO: 582797 - RNA, 22 nt, Human
gcagggcuugcagcagcuagac

SEQ ID NO: 582798 - RNA, 22 nt, Human
ucaaugcauaggagguggcaga

SEQ ID NO: 582799 - RNA, 22 nt, Human
ugggagcacccugaggagcuuc

SEQ ID NO: 582800 - RNA, 20 nt, Human
cuucaggacccauccucccc

SEQ ID NO: 582801 - RNA, 23 nt, Human
gggggcugguugacucucugcag

SEQ ID NO: 582802 - RNA, 22 nt, Human
cagcucuggggcagagugacua

SEQ ID NO: 582803 - RNA, 22 nt, Human
cugggaugauagugcuaguauu

SEQ ID NO: 582804 - RNA, 22 nt, Human
caugcagucuggagccuucugu

SEQ ID NO: 582805 - RNA, 22 nt, Human
agagggcugggaugugcugugu

SEQ ID NO: 582806 - RNA, 22 nt, Human
gguagacugagcuccuugagga

SEQ ID NO: 582807 - RNA, 22 nt, Human
gagagugaggccugggaaucua

SEQ ID NO: 582808 - RNA, 22 nt, Human
uggaugccugggccuccuucca

SEQ ID NO: 582809 - RNA, 22 nt, Human
accucaguucaauucaguuaga

SEQ ID NO: 582810 - RNA, 22 nt, Human
ugaauaaauugagagcgaaugu

SEQ ID NO: 582811 - RNA, 22 nt, Human
uuuuaacacucagcacuaucuc

SEQ ID NO: 582812 - RNA, 22 nt, Human
cugaaggacacgugaggagcca

SEQ ID NO: 582813 - RNA, 22 nt, Human
cuguguguccucggacgaguuu

SEQ ID NO: 582814 - RNA, 22 nt, Human
aaaucagaggucagcuguacca

SEQ ID NO: 582815 - RNA, 22 nt, Human
cuuggaauugaugauuuucaua

SEQ ID NO: 582816 - RNA, 22 nt, Human
augaagacaaacuggguagaaa

SEQ ID NO: 582817 - RNA, 22 nt, Human
ugugucagcacaguaucaauua

SEQ ID NO: 582818 - RNA, 22 nt, Human
cauucauucacauuuugucuau

SEQ ID NO: 582819 - RNA, 22 nt, Human
aggggccucgcaggaccgcucc

SEQ ID NO: 582820 - RNA, 22 nt, Human
ugcuggaggggccugaccagga

SEQ ID NO: 582821 - RNA, 22 nt, Human
aauguucauuguuuuccauaug

SEQ ID NO: 582822 - RNA, 22 nt, Human
agaaagcccaggagaacagauu

SEQ ID NO: 582823 - RNA, 21 nt, Human
caggaaacugaggccaugggg

SEQ ID NO: 582824 - RNA, 22 nt, Human
agcuguggggaggaggcuagca

SEQ ID NO: 582825 - RNA, 22 nt, Human
aaaucacugauuaaaguuagaa

SEQ ID NO: 582826 - RNA, 22 nt, Human
agcuuuguuugcucacccgccg

SEQ ID NO: 582827 - RNA, 16 nt, Human
acaguaaagcuggaca

SEQ ID NO: 582828 - RNA, 22 nt, Human
ggcuccaggcuccuauuucacu

SEQ ID NO: 582829 - RNA, 22 nt, Human
gccacaugcaauugcagcacgu

SEQ ID NO: 582830 - RNA, 23 nt, Human
ccaggccucucagagggugugcc

SEQ ID NO: 582831 - RNA, 22 nt, Human
aagcauuuauagauaagaauuu

SEQ ID NO: 582832 - RNA, 22 nt, Human
uccugcagcugaagcucaugug

SEQ ID NO: 582833 - RNA, 22 nt, Human
uagauucagauauuuaggacaa

SEQ ID NO: 582834 - RNA, 22 nt, Human
gcuguccagagcaugggagcaa

SEQ ID NO: 582835 - RNA, 22 nt, Human
uuagaggugucaggagcacagg

SEQ ID NO: 582836 - RNA, 22 nt, Human
uuuccuugccuccuguccuucu

SEQ ID NO: 582837 - RNA, 23 nt, Human
cauggaaaacugaaagcugaccu

SEQ ID NO: 582838 - RNA, 22 nt, Human
agcuccagagccacauccauca

SEQ ID NO: 582839 - RNA, 22 nt, Human
ggggcccagggcagcagugcag

SEQ ID NO: 582840 - RNA, 22 nt, Human
aacuagaacgagaaagcugaac

SEQ ID NO: 582841 - RNA, 17 nt, Human
caguggcagaucuucuc

SEQ ID NO: 582842 - RNA, 22 nt, Human
ugaacaaacugcauucuucacu

SEQ ID NO: 582843 - RNA, 22 nt, Human
caguuugcaaaugacuuacaga

SEQ ID NO: 582844 - RNA, 22 nt, Human
guuuguguaacaugaugaugau

SEQ ID NO: 582845 - RNA, 22 nt, Human
gcagggcaucccugagcgggug

SEQ ID NO: 582846 - RNA, 22 nt, Human
aggcaucugcagagcuugguga

SEQ ID NO: 582847 - RNA, 22 nt, Human
aggccaguguggcuggagcaca

SEQ ID NO: 582848 - RNA, 22 nt, Human
caauuuuauugguccaaauaca

SEQ ID NO: 582849 - RNA, 22 nt, Human
agccagugaugaagacucugga

SEQ ID NO: 582850 - RNA, 21 nt, Human
aguccccuguccuuacuucua

SEQ ID NO: 582851 - RNA, 22 nt, Human
ugccaggcagugucagauugag

SEQ ID NO: 582852 - RNA, 22 nt, Human
ggugcugccuauagucugaaac

SEQ ID NO: 582853 - RNA, 22 nt, Human
gauguguagagggaauuucaaa

SEQ ID NO: 582854 - RNA, 22 nt, Human
auuaauguguagccaacuuaau

SEQ ID NO: 582855 - RNA, 22 nt, Human
aguguccccuccaagggccugg

SEQ ID NO: 582856 - RNA, 22 nt, Human
uggcagcugccauguccacgug

SEQ ID NO: 582857 - RNA, 22 nt, Human
gcugcaggcuguggcaggggag

SEQ ID NO: 582858 - RNA, 22 nt, Human
gccaaggccugcagcaccucau

SEQ ID NO: 582859 - RNA, 22 nt, Human
cagccagaggggccagagucgg

SEQ ID NO: 582860 - RNA, 22 nt, Human
gcaguaggagaagaggaugcuu

SEQ ID NO: 582861 - RNA, 22 nt, Human
ccugaggucacaacuugcuuau

SEQ ID NO: 582862 - RNA, 22 nt, Human
aggacuuuagagccagaaagac

SEQ ID NO: 582863 - RNA, 22 nt, Human
ucugcauuuuuaacaagauccc

SEQ ID NO: 582864 - RNA, 22 nt, Human
cuucaaaagccagaagccugcg

SEQ ID NO: 582865 - RNA, 22 nt, Human
ugcuccagcuggagaugggggc

SEQ ID NO: 582866 - RNA, 22 nt, Human
gguuggggcgagcuggaggccc

SEQ ID NO: 582867 - RNA, 22 nt, Human
uauaggaaacauacgugacuag

SEQ ID NO: 582868 - RNA, 19 nt, Human
cuacuuuauaauaugccuc

SEQ ID NO: 582869 - RNA, 22 nt, Human
uggaaauagcuccaguuucauu

SEQ ID NO: 582870 - RNA, 22 nt, Human
cccccagccagcagugcucagc

SEQ ID NO: 582871 - RNA, 22 nt, Human
caaugucagaauuacaguugau

SEQ ID NO: 582872 - RNA, 22 nt, Human
uauuaugaucccagcccuggag

SEQ ID NO: 582873 - RNA, 22 nt, Human
uggcaugaguauaggcuucuca

SEQ ID NO: 582874 - RNA, 22 nt, Human
ccaggaggggucucugucuccc

SEQ ID NO: 582875 - RNA, 22 nt, Human
aaagcaaucagauucagauguc

SEQ ID NO: 582876 - RNA, 22 nt, Human
uccugaaguauggguauggagu

SEQ ID NO: 582877 - RNA, 22 nt, Human
cugcagagcauaaaucugaaua

SEQ ID NO: 582878 - RNA, 22 nt, Human
ggaggggcuccuguucgccccc

SEQ ID NO: 582879 - RNA, 22 nt, Human
gugaacuaaggauucaaacuuc

SEQ ID NO: 582880 - RNA, 22 nt, Human
agggcagcaaugcagcugcugc

SEQ ID NO: 582881 - RNA, 22 nt, Human
ugucucuucccacucagacccc

SEQ ID NO: 582882 - RNA, 22 nt, Human
caugggaggccugcugcuggug

SEQ ID NO: 582883 - RNA, 22 nt, Human
agcagcagaagguuugcaccca

SEQ ID NO: 582884 - RNA, 22 nt, Human
uugugucugggggagugacauc

SEQ ID NO: 582885 - RNA, 22 nt, Human
aggcaggugggucacuugaguc

SEQ ID NO: 582886 - RNA, 22 nt, Human
ugacaggaguggcuagugggag

SEQ ID NO: 582887 - RNA, 22 nt, Human
ccagagggaacugggccucauu

SEQ ID NO: 582888 - RNA, 22 nt, Human
ggccaauuccaggagccggcgg

SEQ ID NO: 582889 - RNA, 22 nt, Human
aaauguucccaauaugaagcug

SEQ ID NO: 582890 - RNA, 22 nt, Human
gaggguggcuccucccugggcc

SEQ ID NO: 582891 - RNA, 22 nt, Human
ucugcagaaaguggcucagugg

SEQ ID NO: 582892 - RNA, 23 nt, Human
accccaggcaucgcauuccucuu

SEQ ID NO: 582893 - RNA, 22 nt, Human
gaggcuggucagcccuaagauc

SEQ ID NO: 582894 - RNA, 22 nt, Human
uuuagcuucauuuggcgugauu

SEQ ID NO: 582895 - RNA, 22 nt, Human
ucugaaauaaaugcacuguuag

SEQ ID NO: 582896 - RNA, 22 nt, Human
aggccacaggcacccuguguuc

SEQ ID NO: 582897 - RNA, 22 nt, Human
cugcugagcaucagggcugccc

SEQ ID NO: 582898 - RNA, 22 nt, Human
auaguuccuacuuugcacuaau

SEQ ID NO: 582899 - RNA, 22 nt, Human
ugagggcugcuuccagagcuag

SEQ ID NO: 582900 - RNA, 21 nt, Human
acugucauuugcuuagggagg

SEQ ID NO: 582901 - RNA, 22 nt, Human
aagcaugucccuugugauucaa

SEQ ID NO: 582902 - RNA, 22 nt, Human
agcuaaggaugacuaguacuuc

SEQ ID NO: 582903 - RNA, 22 nt, Human
aggggcuggaguucgagguuac

SEQ ID NO: 582904 - RNA, 22 nt, Human
aggcagggcugggauuagacuc

SEQ ID NO: 582905 - RNA, 20 nt, Human
ucucauuauauccaagaggc

SEQ ID NO: 582906 - RNA, 22 nt, Human
aguuucucucaguauagaauag

SEQ ID NO: 582907 - RNA, 22 nt, Human
guguaacuuuuauucaugcucu

SEQ ID NO: 582908 - RNA, 22 nt, Human
ugucauuuacuccauacccuca

SEQ ID NO: 582909 - RNA, 22 nt, Human
ccaggagagcgcccucccggcc

SEQ ID NO: 582910 - RNA, 22 nt, Human
cccguguggacagcgugccagu

SEQ ID NO: 582911 - RNA, 22 nt, Human
ucuggccuauuucugucagauc

SEQ ID NO: 582912 - RNA, 22 nt, Human
aacaucuuuuuguuugcugaaa

SEQ ID NO: 582913 - RNA, 22 nt, Human
gcaucuucacacaaagccagug

SEQ ID NO: 582914 - RNA, 22 nt, Human
gagguggcuuagucucuggaca

SEQ ID NO: 582915 - RNA, 21 nt, Human
aucuggaagaacugguaagug

SEQ ID NO: 582916 - RNA, 22 nt, Human
ugggccaguagcuacucgcaag

SEQ ID NO: 582917 - RNA, 22 nt, Human
caagagcauuuaguuagcuggu

SEQ ID NO: 582918 - RNA, 22 nt, Human
agaccagcugccucccagggcc

SEQ ID NO: 582919 - RNA, 22 nt, Human
auuucagaugaccaaauggaaa

SEQ ID NO: 582920 - RNA, 22 nt, Human
gcugcauggagggugcccagga

SEQ ID NO: 582921 - RNA, 22 nt, Human
ggcccagcuuucauuccuugcu

SEQ ID NO: 582922 - RNA, 22 nt, Human
ucucugagcugcuucuugcaua

SEQ ID NO: 582923 - RNA, 22 nt, Human
cuuccuagcuucagagucuguu

SEQ ID NO: 582924 - RNA, 22 nt, Human
cuagcuuuuuaugacaaucuug

SEQ ID NO: 582925 - RNA, 22 nt, Human
aaauacugggcucaaaaggguu

SEQ ID NO: 582926 - RNA, 22 nt, Human
ggcauagauuucuuuagguuua

SEQ ID NO: 582927 - RNA, 22 nt, Human
uucaaaucucuccuaauccacu

SEQ ID NO: 582928 - RNA, 22 nt, Human
acugugauguucucuaucuugg

SEQ ID NO: 582929 - RNA, 22 nt, Human
ucaggcagaguuaauuugcucc

SEQ ID NO: 582930 - RNA, 22 nt, Human
gacagcuucuugggccgggccu

SEQ ID NO: 582931 - RNA, 22 nt, Human
gcagagccaggagcccaggauc

SEQ ID NO: 582932 - RNA, 22 nt, Human
cggggcagaaaguugucuuuug

SEQ ID NO: 582933 - RNA, 22 nt, Human
agggcucagcaucucauucugu

SEQ ID NO: 582934 - RNA, 22 nt, Human
uugcuaauaaaguuuuuaugug

SEQ ID NO: 582935 - RNA, 22 nt, Human
cccagccuuugcuuccugguuc

SEQ ID NO: 582936 - RNA, 22 nt, Human
gggccuggugcuucugacuccu

SEQ ID NO: 582937 - RNA, 22 nt, Human
ugcauuuccagauuucuggagu

SEQ ID NO: 582938 - RNA, 22 nt, Human
cagcaggggugucauuguaguu

SEQ ID NO: 582939 - RNA, 22 nt, Human
uggaggggcaauggagcgcgga

SEQ ID NO: 582940 - RNA, 22 nt, Human
uaagaguaucuauuaaguacuu

SEQ ID NO: 582941 - RNA, 22 nt, Human
uucagaauauccguuuaaguuu

SEQ ID NO: 582942 - RNA, 22 nt, Human
ccugaguggugcuaagcagaua

SEQ ID NO: 582943 - RNA, 21 nt, Human
uauugucaaucugcuuucaga

SEQ ID NO: 582944 - RNA, 22 nt, Human
gugcugagauuggagugagcag

SEQ ID NO: 582945 - RNA, 22 nt, Human
auguauaugaagcuaguauuuu

SEQ ID NO: 582946 - RNA, 22 nt, Human
caacuuuucugugaauuuaagu

SEQ ID NO: 582947 - RNA, 22 nt, Human
gugcucuccagccccacgugga

SEQ ID NO: 582948 - RNA, 22 nt, Human
aagaaaccuagucuggagcagc

SEQ ID NO: 582949 - RNA, 22 nt, Human
ggcagagcugcaugagcacuca

SEQ ID NO: 582950 - RNA, 19 nt, Human
uucucuggacuagaugcug

SEQ ID NO: 582951 - RNA, 22 nt, Human
ucuugcagacagcuuccagccu

SEQ ID NO: 582952 - RNA, 22 nt, Human
cacccagcauuggcuaagagag

SEQ ID NO: 582953 - RNA, 22 nt, Human
cugagguggcgccucucuuuaa

SEQ ID NO: 582954 - RNA, 22 nt, Human
uucuaacucuacacuagcuuug

SEQ ID NO: 582955 - RNA, 22 nt, Human
ucaauucuuauugguguucugc

SEQ ID NO: 582956 - RNA, 22 nt, Human
uacagugugacauuucuacaaa

SEQ ID NO: 582957 - RNA, 22 nt, Human
auaauucaugggccuuucaccu

SEQ ID NO: 582958 - RNA, 22 nt, Human
uaucuauuauguucuauguguc

SEQ ID NO: 582959 - RNA, 22 nt, Human
gggcuccugccuccuggcaccu

SEQ ID NO: 582960 - RNA, 22 nt, Human
aaaaacugguaacuauucccca

SEQ ID NO: 582961 - RNA, 22 nt, Human
gggcuuggguauugugagaggu

SEQ ID NO: 582962 - RNA, 22 nt, Human
aacauuuauugagcaccuacug

SEQ ID NO: 582963 - RNA, 22 nt, Human
caggccaauaaaugugauggcc

SEQ ID NO: 582964 - RNA, 22 nt, Human
auaccuuuuagacauguaguug

SEQ ID NO: 582965 - RNA, 22 nt, Human
auuauaaagaacaugugugugg

SEQ ID NO: 582966 - RNA, 22 nt, Human
augggaggaaggaggcccuuga

SEQ ID NO: 582967 - RNA, 22 nt, Human
auuuguagugaagugaaaauaa

SEQ ID NO: 582968 - RNA, 22 nt, Human
augaugcuguuauuaucuauac

SEQ ID NO: 582969 - RNA, 22 nt, Human
uugucgggcuuacgcagggcca

SEQ ID NO: 582970 - RNA, 22 nt, Human
aagagggguggucugugaggau

SEQ ID NO: 582971 - RNA, 22 nt, Human
ccacccuggguucugaugugga

SEQ ID NO: 582972 - RNA, 22 nt, Human
gcugaggauuacuugaagucag

SEQ ID NO: 582973 - RNA, 18 nt, Human
ucucaaaaauaauggcuu

SEQ ID NO: 582974 - RNA, 22 nt, Human
ggcucagguugggucacaugac

SEQ ID NO: 582975 - RNA, 22 nt, Human
ccuggggaauagagucaagggg

SEQ ID NO: 582976 - RNA, 22 nt, Human
aaacuugcgucaugucaugaaa

SEQ ID NO: 582977 - RNA, 22 nt, Human
auuaggauuuuguccaaguagc

SEQ ID NO: 582978 - RNA, 21 nt, Human
cacuauuuauauaugccagcu

SEQ ID NO: 582979 - RNA, 22 nt, Human
ugucaugggcauuuauugaggg

SEQ ID NO: 582980 - RNA, 22 nt, Human
gggacuggaacuacuggugcag

SEQ ID NO: 582981 - RNA, 22 nt, Human
uugaaacauucuccuauugauu

SEQ ID NO: 582982 - RNA, 22 nt, Human
gaauauauuauucagcuuuuca

SEQ ID NO: 582983 - RNA, 22 nt, Human
ugaggucccagggguagugugc

SEQ ID NO: 582984 - RNA, 19 nt, Human
caggagagcaugcacuuug

SEQ ID NO: 582985 - RNA, 18 nt, Human
uuggggugaggccaggaa

SEQ ID NO: 582986 - RNA, 22 nt, Human
ugccuaggcuggaaugcagugg

SEQ ID NO: 582987 - RNA, 22 nt, Human
gcauguggaaucucuccauggu

SEQ ID NO: 582988 - RNA, 22 nt, Human
uaaaucuuuaggaagcucaaac

SEQ ID NO: 582989 - RNA, 22 nt, Human
aguccccucucgcuuggcugag

SEQ ID NO: 582990 - RNA, 22 nt, Human
caggcuggagugcagugucgcc

SEQ ID NO: 582991 - RNA, 22 nt, Human
caaucuuagagagauucuuuua

SEQ ID NO: 582992 - RNA, 22 nt, Human
gcugcccaguucugcugcugcc

SEQ ID NO: 582993 - RNA, 22 nt, Human
gggauggcugccugcaucagga

SEQ ID NO: 582994 - RNA, 22 nt, Human
gccuguuuccaucaacacaugc

SEQ ID NO: 582995 - RNA, 22 nt, Human
ucuuugcaugugcuucuuggcc

SEQ ID NO: 582996 - RNA, 22 nt, Human
uacauugauucaggauauaggc

SEQ ID NO: 582997 - RNA, 22 nt, Human
uugccugugaggauucugguug

SEQ ID NO: 582998 - RNA, 22 nt, Human
cagcuccugccugggcagcugu

SEQ ID NO: 582999 - RNA, 22 nt, Human
aagaguuugucagaucugcacg

SEQ ID NO: 583000 - RNA, 22 nt, Human
acaaguggguccuacauaaagc

SEQ ID NO: 583001 - RNA, 22 nt, Human
gcaggcugcccucuuguguuga

SEQ ID NO: 583002 - RNA, 22 nt, Human
guggggcugcuuaggcugcgca

SEQ ID NO: 583003 - RNA, 22 nt, Human
ggaggcucuccuggccuugucu

SEQ ID NO: 583004 - RNA, 21 nt, Human
ggccagcagcguccacugugg

SEQ ID NO: 583005 - RNA, 22 nt, Human
cacccacauggaaauucacagu

SEQ ID NO: 583006 - RNA, 22 nt, Human
ucaggagagaguuggguaggcu

SEQ ID NO: 583007 - RNA, 22 nt, Human
caagauaagaucauuuacacua

SEQ ID NO: 583008 - RNA, 22 nt, Human
gucugcugcagagcauggcuuu

SEQ ID NO: 583009 - RNA, 22 nt, Human
ucugucuuagccaucucaggcu

SEQ ID NO: 583010 - RNA, 22 nt, Human
ucuucugaagguaggaagcauu

SEQ ID NO: 583011 - RNA, 22 nt, Human
cugacaguuuuugcuguauugu

SEQ ID NO: 583012 - RNA, 22 nt, Human
cagcuuuggagugugagugcug

SEQ ID NO: 583013 - RNA, 22 nt, Human
ucagggaaaccuaaggaagcca

SEQ ID NO: 583014 - RNA, 22 nt, Human
uagaaaagccccagcuggaggg

SEQ ID NO: 583015 - RNA, 22 nt, Human
agcaaacuaauugcaguucugg

SEQ ID NO: 583016 - RNA, 22 nt, Human
ggaggugggagccuccaguggu

SEQ ID NO: 583017 - RNA, 22 nt, Human
ucccagaaucuccagugcuaca

SEQ ID NO: 583018 - RNA, 22 nt, Human
aaaaguaauugcaauuuuguag

SEQ ID NO: 583019 - RNA, 19 nt, Human
gcugcucugggucucaucu

SEQ ID NO: 583020 - RNA, 22 nt, Human
agagccaguuaagcacuuacag

SEQ ID NO: 583021 - RNA, 22 nt, Human
acaugcuaaaucugagaugcuu

SEQ ID NO: 583022 - RNA, 22 nt, Human
ccugaaugccugacauuucacu

SEQ ID NO: 583023 - RNA, 22 nt, Human
agcuccugauucucagagauag

SEQ ID NO: 583024 - RNA, 22 nt, Human
aaaagagagcugaggagcucca

SEQ ID NO: 583025 - RNA, 22 nt, Human
gcacaugacuuugaggaaacca

SEQ ID NO: 583026 - RNA, 23 nt, Human
aucuuacauauuuagcaccugaa

SEQ ID NO: 583027 - RNA, 22 nt, Human
uggaagaccagacuucccgaac

SEQ ID NO: 583028 - RNA, 20 nt, Human
ugcaaacacagaguguauga

SEQ ID NO: 583029 - RNA, 19 nt, Human
ucuagucagucagucauuc

SEQ ID NO: 583030 - RNA, 22 nt, Human
aaagguuuugcccuggguauuc

SEQ ID NO: 583031 - RNA, 22 nt, Human
cuaagaaaauagaagcaugcua

SEQ ID NO: 583032 - RNA, 22 nt, Human
cugagggccuuggcuccugccc

SEQ ID NO: 583033 - RNA, 22 nt, Human
cggcaggaccucauuuccuucu

SEQ ID NO: 583034 - RNA, 22 nt, Human
ucuuaaaaguaugccaauugga

SEQ ID NO: 583035 - RNA, 19 nt, Human
aaaucagaaucugcauuuu

SEQ ID NO: 583036 - RNA, 22 nt, Human
ucuuuacacaagacaagaauaa

SEQ ID NO: 583037 - RNA, 22 nt, Human
ccugcagaccacacucaguccu

SEQ ID NO: 583038 - RNA, 22 nt, Human
cagcugccuaugaccuagccuc

SEQ ID NO: 583039 - RNA, 22 nt, Human
aggaggguggggucugccuguc

SEQ ID NO: 583040 - RNA, 22 nt, Human
uuucacagauccuacagcuugu

SEQ ID NO: 583041 - RNA, 22 nt, Human
ugcuccuuccucauccugugca

SEQ ID NO: 583042 - RNA, 22 nt, Human
ccagugcuaagguagccucugc

SEQ ID NO: 583043 - RNA, 22 nt, Human
gugcaguugagacaauaggcug

SEQ ID NO: 583044 - RNA, 22 nt, Human
ucuccaggggcagggucuggag

SEQ ID NO: 583045 - RNA, 22 nt, Human
ccucugggcggagaucugcugc

SEQ ID NO: 583046 - RNA, 22 nt, Human
gggagccacaguuuauagugau

SEQ ID NO: 583047 - RNA, 23 nt, Human
uccuccugagugagagugccagc

SEQ ID NO: 583048 - RNA, 22 nt, Human
gaaacugaguaggcuagagcac

SEQ ID NO: 583049 - RNA, 22 nt, Human
guacacuugacucauaggaaau

SEQ ID NO: 583050 - RNA, 22 nt, Human
aauuucagauauuaaagaauga

SEQ ID NO: 583051 - RNA, 23 nt, Human
ucugucacuuucugcuguggagu

SEQ ID NO: 583052 - RNA, 22 nt, Human
ggaaaaauagaguauacuuuaa

SEQ ID NO: 583053 - RNA, 22 nt, Human
ugcccugucuaagcugucagua

SEQ ID NO: 583054 - RNA, 22 nt, Human
gcuuagcaaugugacaagaugc

SEQ ID NO: 583055 - RNA, 22 nt, Human
aggcaauccccugaggauacuu

SEQ ID NO: 583056 - RNA, 22 nt, Human
uagcugccauugcuccaggaag

SEQ ID NO: 583057 - RNA, 23 nt, Human
aucucucugguggucacagucag

SEQ ID NO: 583058 - RNA, 22 nt, Human
gagcugguggugagaaagcucu

SEQ ID NO: 583059 - RNA, 22 nt, Human
ccccaaggugcucacugucugg

SEQ ID NO: 583060 - RNA, 22 nt, Human
caucucugguucagucucugug

SEQ ID NO: 583061 - RNA, 22 nt, Human
gcagcugccccgacugugaguc

SEQ ID NO: 583062 - RNA, 22 nt, Human
ucagaacauuugggacuuuggg

SEQ ID NO: 583063 - RNA, 22 nt, Human
uuucuuggaugugaaacuaggg

SEQ ID NO: 583064 - RNA, 22 nt, Human
ucaggcagaauuaucaaaagau

SEQ ID NO: 583065 - RNA, 22 nt, Human
cagccaggauggagaacuguug

SEQ ID NO: 583066 - RNA, 22 nt, Human
uggaaacugggaguuaaaugua

SEQ ID NO: 583067 - RNA, 18 nt, Human
ggcugugcguggaggcug

SEQ ID NO: 583068 - RNA, 22 nt, Human
cacaggaaaauaaaagaucuaa

SEQ ID NO: 583069 - RNA, 22 nt, Human
guagucugaacaguaauuuugu

SEQ ID NO: 583070 - RNA, 22 nt, Human
ccugcagggugcugccacagau

SEQ ID NO: 583071 - RNA, 22 nt, Human
gacacuuucucagguaaagcau

SEQ ID NO: 583072 - RNA, 22 nt, Human
uucuaguucuuaggaacagaca

SEQ ID NO: 583073 - RNA, 22 nt, Human
agggcaugcuggaggagagaca

SEQ ID NO: 583074 - RNA, 22 nt, Human
uuccaaauuaaaauguacaaug

SEQ ID NO: 583075 - RNA, 22 nt, Human
gcagccacagaggagggaugca

SEQ ID NO: 583076 - RNA, 22 nt, Human
uguguugugacauucuuggaug

SEQ ID NO: 583077 - RNA, 22 nt, Human
uucaccccaaauucccagugga

SEQ ID NO: 583078 - RNA, 22 nt, Human
ccacuccccacgugcugucaga

SEQ ID NO: 583079 - RNA, 22 nt, Human
ugacacugaccuaaagaccugg

SEQ ID NO: 583080 - RNA, 22 nt, Human
aacgcccgugguugccaaggua

SEQ ID NO: 583081 - RNA, 22 nt, Human
gccaccuguuucgcuugcccag

SEQ ID NO: 583082 - RNA, 22 nt, Human
ugcauaaacagauacuucaugu

SEQ ID NO: 583083 - RNA, 22 nt, Human
aaggcuggcaauauauuuguua

SEQ ID NO: 583084 - RNA, 22 nt, Human
acagcuggaggggcugcagagg

SEQ ID NO: 583085 - RNA, 22 nt, Human
ucuccccaaaggacucacucuc

SEQ ID NO: 583086 - RNA, 22 nt, Human
auagauacauuagguaacuugu

SEQ ID NO: 583087 - RNA, 22 nt, Human
ccaggcuggaguguagucgcau

SEQ ID NO: 583088 - RNA, 22 nt, Human
acacacaugccuuuccuaagua

SEQ ID NO: 583089 - RNA, 22 nt, Human
cugcagucaucugaagauuuug

SEQ ID NO: 583090 - RNA, 22 nt, Human
cagggccauuggcguggcuguc

SEQ ID NO: 583091 - RNA, 22 nt, Human
uuacaucuaaacugugaacaau

SEQ ID NO: 583092 - RNA, 22 nt, Human
gggagggagaggacaguucuau

SEQ ID NO: 583093 - RNA, 22 nt, Human
ugaaagcauaugcuaaagacca

SEQ ID NO: 583094 - RNA, 22 nt, Human
gauuggagaguggaacaugcug

SEQ ID NO: 583095 - RNA, 22 nt, Human
gagaggcugcauaugcacacug

SEQ ID NO: 583096 - RNA, 17 nt, Human
cagaccucugugaagcc

SEQ ID NO: 583097 - RNA, 22 nt, Human
uucuuuaugcuucuguuuaggc

SEQ ID NO: 583098 - RNA, 22 nt, Human
ccucccugucuaccuguugugg

SEQ ID NO: 583099 - RNA, 19 nt, Human
guuuccuuggguguaggga

SEQ ID NO: 583100 - RNA, 22 nt, Human
cacagggcagguacucucagag

SEQ ID NO: 583101 - RNA, 22 nt, Human
aagggcugaaugaaggguugaa

SEQ ID NO: 583102 - RNA, 22 nt, Human
uuggaaaaugaggcacagagag

SEQ ID NO: 583103 - RNA, 22 nt, Human
ucugcucugggccagcuauuaa

SEQ ID NO: 583104 - RNA, 22 nt, Human
cccugccccaggcggcuucacu

SEQ ID NO: 583105 - RNA, 22 nt, Human
cacagagaccccuucuggggcc

SEQ ID NO: 583106 - RNA, 22 nt, Human
gcugaagagaggccuugagcac

SEQ ID NO: 583107 - RNA, 22 nt, Human
gaggcugauucggggaacagca

SEQ ID NO: 583108 - RNA, 22 nt, Human
ggagccugcgggagcucccauu

SEQ ID NO: 583109 - RNA, 22 nt, Human
ugucaucugcggguggcacugc

SEQ ID NO: 583110 - RNA, 22 nt, Human
uaaguccacaggcugacagcgg

SEQ ID NO: 583111 - RNA, 22 nt, Human
cccagcccccgagugucuggaa

SEQ ID NO: 583112 - RNA, 22 nt, Human
aagcuggagaguuucacagaug

SEQ ID NO: 583113 - RNA, 22 nt, Human
agccacagagguugaugugguu

SEQ ID NO: 583114 - RNA, 22 nt, Human
cugacucccuccccaaagcugg

SEQ ID NO: 583115 - RNA, 22 nt, Human
ccucuauagaugugugcaucua

SEQ ID NO: 583116 - RNA, 22 nt, Human
acuccugguuuguguccuggcu

SEQ ID NO: 583117 - RNA, 22 nt, Human
aaauuccagaaacucaguauau

SEQ ID NO: 583118 - RNA, 19 nt, Human
agcagagcccugaagaucc

SEQ ID NO: 583119 - RNA, 22 nt, Human
uguaaaugaaacagcuaaaucc

SEQ ID NO: 583120 - RNA, 22 nt, Human
aaugaacacuuagccuuucuau

SEQ ID NO: 583121 - RNA, 22 nt, Human
aagggcugcauuugauguguca

SEQ ID NO: 583122 - RNA, 22 nt, Human
gccuaggaguggggauggcggu

SEQ ID NO: 583123 - RNA, 22 nt, Human
aacuuccaggccuugaauuauu

SEQ ID NO: 583124 - RNA, 21 nt, Human
aucaccagcagaagcugcaga

SEQ ID NO: 583125 - RNA, 22 nt, Human
ggggagcaauaguugaggugug

SEQ ID NO: 583126 - RNA, 22 nt, Human
ucagaaaugaucguuauucauu

SEQ ID NO: 583127 - RNA, 19 nt, Human
acugccugaggcucacagg

SEQ ID NO: 583128 - RNA, 18 nt, Human
ugaucuuugaguauaaug

SEQ ID NO: 583129 - RNA, 21 nt, Human
uucaaaguuugccuaaagauu

SEQ ID NO: 583130 - RNA, 21 nt, Human
uguuuauggaaaagagacaaa

SEQ ID NO: 583131 - RNA, 22 nt, Human
uuucacagcugggaagagauau

SEQ ID NO: 583132 - RNA, 22 nt, Human
cugggcugugguguggcccaaa

SEQ ID NO: 583133 - RNA, 22 nt, Human
aagcuuagguacagaaguuaag

SEQ ID NO: 583134 - RNA, 23 nt, Human
auguauuuaaauuucagugauga

SEQ ID NO: 583135 - RNA, 22 nt, Human
accaugggucagccaccucagc

SEQ ID NO: 583136 - RNA, 22 nt, Human
gcuuuggaaauauagacucaag

SEQ ID NO: 583137 - RNA, 22 nt, Human
acugaacaccauuuauaacauu

SEQ ID NO: 583138 - RNA, 22 nt, Human
agcagagcaugcuaagugacuc

SEQ ID NO: 583139 - RNA, 22 nt, Human
ucuagaaauuuugccuuguauu

SEQ ID NO: 583140 - RNA, 22 nt, Human
gggcccuggauuuaagcaugga

SEQ ID NO: 583141 - RNA, 22 nt, Human
ggcuguggggccggguacagug

SEQ ID NO: 583142 - RNA, 22 nt, Human
ucuuuucuggacucugcaugga

SEQ ID NO: 583143 - RNA, 22 nt, Human
agccccaguaagggagggccug

SEQ ID NO: 583144 - RNA, 22 nt, Human
ugcugaggacaccuagccuucu

SEQ ID NO: 583145 - RNA, 22 nt, Human
gaggaaaaugcaacaggaaugc

SEQ ID NO: 583146 - RNA, 22 nt, Human
ggagccuguggccgucacgacu

SEQ ID NO: 583147 - RNA, 19 nt, Human
ugaaacaaacuuaaaagga

SEQ ID NO: 583148 - RNA, 22 nt, Human
aaugcaaacagcccagaaucca

SEQ ID NO: 583149 - RNA, 22 nt, Human
auggguggccccgugugcaguc

SEQ ID NO: 583150 - RNA, 18 nt, Human
augggaggggccaagaga

SEQ ID NO: 583151 - RNA, 22 nt, Human
cuuccuuucagaggaaggccug

SEQ ID NO: 583152 - RNA, 22 nt, Human
aagugugggacuagggcuccag

SEQ ID NO: 583153 - RNA, 22 nt, Human
gaaaucuuuuccaauuguuuag

SEQ ID NO: 583154 - RNA, 22 nt, Human
aacccagggugaggggagucua

SEQ ID NO: 583155 - RNA, 22 nt, Human
uggggguguccuggugcacaca

SEQ ID NO: 583156 - RNA, 22 nt, Human
uuaacaaaguaacgggaaaaga

SEQ ID NO: 583157 - RNA, 22 nt, Human
gaggggcuggcacgauggcugc

SEQ ID NO: 583158 - RNA, 22 nt, Human
ccuccagucaccuggaugagaa

SEQ ID NO: 583159 - RNA, 21 nt, Human
agcuggugucagagcucuggg

SEQ ID NO: 583160 - RNA, 22 nt, Human
gugcucuguggauugaguugaa

SEQ ID NO: 583161 - RNA, 20 nt, Human
cuuugccuauucucugccug

SEQ ID NO: 583162 - RNA, 22 nt, Human
agacagguaaauagagaugcug

SEQ ID NO: 583163 - RNA, 22 nt, Human
gggagggaggugaugcuuggcu

SEQ ID NO: 583164 - RNA, 22 nt, Human
ucccugcaguaggcagcccucc

SEQ ID NO: 583165 - RNA, 20 nt, Human
gcugaggagcagugugguug

SEQ ID NO: 583166 - RNA, 22 nt, Human
ugggccaggauuucaagacccu

SEQ ID NO: 583167 - RNA, 22 nt, Human
aaagacauauuucuaaguuuau

SEQ ID NO: 583168 - RNA, 22 nt, Human
aggaagccuggggcugcccucg

SEQ ID NO: 583169 - RNA, 22 nt, Human
agguuuguuaaaccagauugcu

SEQ ID NO: 583170 - RNA, 22 nt, Human
ugaaauguguucuaguguuuug

SEQ ID NO: 583171 - RNA, 22 nt, Human
uuucaucuauuugcuuugugaa

SEQ ID NO: 583172 - RNA, 22 nt, Human
aaugcauacguguuuguggcaa

SEQ ID NO: 583173 - RNA, 20 nt, Human
uauaaauucagagcuuuggu

SEQ ID NO: 583174 - RNA, 22 nt, Human
uggcugaguuccuggcacacgg

SEQ ID NO: 583175 - RNA, 22 nt, Human
ggggcugauggaacucaggccu

SEQ ID NO: 583176 - RNA, 22 nt, Human
aaggccacuuuaccuuaaaucc

SEQ ID NO: 583177 - RNA, 22 nt, Human
cugucacacugauaucaggcuu

SEQ ID NO: 583178 - RNA, 22 nt, Human
cacagagaauucccauauguga

SEQ ID NO: 583179 - RNA, 22 nt, Human
cucccugggcagauguggcucu

SEQ ID NO: 583180 - RNA, 22 nt, Human
uacauuuauaaggcuucucugu

SEQ ID NO: 583181 - RNA, 22 nt, Human
acagcagggggagcuguuggac

SEQ ID NO: 583182 - RNA, 22 nt, Human
aaaagguuuugaguacaaauau

SEQ ID NO: 583183 - RNA, 22 nt, Human
cuccugggaauuuaguugugag

SEQ ID NO: 583184 - RNA, 22 nt, Human
gucugcccucacaugcacucuu

SEQ ID NO: 583185 - RNA, 22 nt, Human
guggcaucaagauuuagauuca

SEQ ID NO: 583186 - RNA, 22 nt, Human
gcagagcucaagguguucagcu

SEQ ID NO: 583187 - RNA, 22 nt, Human
uccugccaggagugcuggcccu

SEQ ID NO: 583188 - RNA, 22 nt, Human
augcuuuuccaggagaaauaua

SEQ ID NO: 583189 - RNA, 19 nt, Human
acaaacugaguacacuugu

SEQ ID NO: 583190 - RNA, 19 nt, Human
ugucaggggugugcugugc

SEQ ID NO: 583191 - RNA, 22 nt, Human
uagacacuagggauuuaguacu

SEQ ID NO: 583192 - RNA, 22 nt, Human
ggacagugaauguggggaugca

SEQ ID NO: 583193 - RNA, 22 nt, Human
uccagggcuguuacuuuacaua

SEQ ID NO: 583194 - RNA, 17 nt, Human
uccagccuccucugcug

SEQ ID NO: 583195 - RNA, 22 nt, Human
ugcuuaauauugugauguaaua

SEQ ID NO: 583196 - RNA, 22 nt, Human
gguucucuuccuccugacugag

SEQ ID NO: 583197 - RNA, 22 nt, Human
ccugagccugaguggugcaggg

SEQ ID NO: 583198 - RNA, 21 nt, Human
ugagccaggcugacggcugug

SEQ ID NO: 583199 - RNA, 22 nt, Human
uaaauguguuguggaugaaguu

SEQ ID NO: 583200 - RNA, 22 nt, Human
ggccuugggcuggcugcaguau

SEQ ID NO: 583201 - RNA, 22 nt, Human
aaucuaagccaccaguaguuuc

SEQ ID NO: 583202 - RNA, 21 nt, Human
aguuuacaacuguccagcccc

SEQ ID NO: 583203 - RNA, 22 nt, Human
cccaggcucuuaugugacuugc

SEQ ID NO: 583204 - RNA, 22 nt, Human
auacagggacauccaguuuuuc

SEQ ID NO: 583205 - RNA, 22 nt, Human
auaaaaucaacuggcuccaguu

SEQ ID NO: 583206 - RNA, 22 nt, Human
uccuguggagaggacuggaggu

SEQ ID NO: 583207 - RNA, 22 nt, Human
gccaggaggggagaguguguca

SEQ ID NO: 583208 - RNA, 22 nt, Human
cagggcaguuugugccuaugag

SEQ ID NO: 583209 - RNA, 22 nt, Human
caagucaacucaaauuguuauc

SEQ ID NO: 583210 - RNA, 20 nt, Human
uaugcuuuuuauaagauuga

SEQ ID NO: 583211 - RNA, 22 nt, Human
uuccaaggcaacagccuaggcu

SEQ ID NO: 583212 - RNA, 22 nt, Human
gaauuuaaaggccagaccugag

SEQ ID NO: 583213 - RNA, 18 nt, Human
cucucugggugaggacaa

SEQ ID NO: 583214 - RNA, 22 nt, Human
uuuagacagcaucuggugacuu

SEQ ID NO: 583215 - RNA, 22 nt, Human
aaugcaguugaauuuggguaug

SEQ ID NO: 583216 - RNA, 22 nt, Human
gaaggagaggauugugaggcug

SEQ ID NO: 583217 - RNA, 22 nt, Human
ccagggcauguccaagacuuag

SEQ ID NO: 583218 - RNA, 22 nt, Human
acccaggacacagagaugaccc

SEQ ID NO: 583219 - RNA, 22 nt, Human
agucccaggcagccgagccggu

SEQ ID NO: 583220 - RNA, 22 nt, Human
agggcagcuuccauagucuggc

SEQ ID NO: 583221 - RNA, 22 nt, Human
cucuucuuauggccguggcuga

SEQ ID NO: 583222 - RNA, 22 nt, Human
uuagaacaucugugucuuuaug

SEQ ID NO: 583223 - RNA, 22 nt, Human
uguacacugcaggaugcauugc

SEQ ID NO: 583224 - RNA, 22 nt, Human
aggugcagcaugaguccaacgg

SEQ ID NO: 583225 - RNA, 22 nt, Human
caggaagcugagcugcacugca

SEQ ID NO: 583226 - RNA, 22 nt, Human
gccucagcuguugcaggggccc

SEQ ID NO: 583227 - RNA, 22 nt, Human
cugggaugcggagguugcggug

SEQ ID NO: 583228 - RNA, 22 nt, Human
ucuucagauugcacugagcaag

SEQ ID NO: 583229 - RNA, 22 nt, Human
uacaguaauaaaaugagcuaca

SEQ ID NO: 583230 - RNA, 22 nt, Human
cugccugcaggacaccucgcua

SEQ ID NO: 583231 - RNA, 21 nt, Human
cauuuacaugacagauugguu

SEQ ID NO: 583232 - RNA, 22 nt, Human
gccaggcugaggcucuggaaga

SEQ ID NO: 583233 - RNA, 22 nt, Human
ugugccaagaucaaacuuuucu

SEQ ID NO: 583234 - RNA, 22 nt, Human
uucaggaagguccuauagcaga

SEQ ID NO: 583235 - RNA, 22 nt, Human
gucucuguuauuuccaggguca

SEQ ID NO: 583236 - RNA, 22 nt, Human
ccagggcucgggugcuuaguca

SEQ ID NO: 583237 - RNA, 22 nt, Human
ccaggcccguucccuucuccag

SEQ ID NO: 583238 - RNA, 22 nt, Human
ccucaggggugcccacagcugc

SEQ ID NO: 583239 - RNA, 22 nt, Human
cacaugggcguaauguccaugg

SEQ ID NO: 583240 - RNA, 22 nt, Human
gagcaggaugggagcuggggcc

SEQ ID NO: 583241 - RNA, 22 nt, Human
aucugagucaaauauuucauuu

SEQ ID NO: 583242 - RNA, 22 nt, Human
uccuguggucuggaaggaaugg

SEQ ID NO: 583243 - RNA, 22 nt, Human
gaacccaggagguugcagugag

SEQ ID NO: 583244 - RNA, 22 nt, Human
uccugagagucaagaaugcagg

SEQ ID NO: 583245 - RNA, 22 nt, Human
cuuucuuuguccaccaacaaug

SEQ ID NO: 583246 - RNA, 22 nt, Human
aucugaagaggucauggcugac

SEQ ID NO: 583247 - RNA, 22 nt, Human
uuacagguuguguauucaguga

SEQ ID NO: 583248 - RNA, 22 nt, Human
auucuaaaucagagagcucugu

SEQ ID NO: 583249 - RNA, 22 nt, Human
aaucagaacuucucaggguggg

SEQ ID NO: 583250 - RNA, 23 nt, Human
uaacaauggacuccucuuagcua

SEQ ID NO: 583251 - RNA, 22 nt, Human
guuuaagaaaauucauguuguu

SEQ ID NO: 583252 - RNA, 22 nt, Human
auucucuuuguauaacaucuug

SEQ ID NO: 583253 - RNA, 22 nt, Human
uuuauauuaccuggaauagcuu

SEQ ID NO: 583254 - RNA, 20 nt, Human
gcugagguggaggaaggaga

SEQ ID NO: 583255 - RNA, 18 nt, Human
acagggaugggguaagug

SEQ ID NO: 583256 - RNA, 22 nt, Human
accugagaccuaaucugacugu

SEQ ID NO: 583257 - RNA, 20 nt, Human
uggcagaguugucccaccca

SEQ ID NO: 583258 - RNA, 23 nt, Human
ucuccuggcugcacuguggccac

SEQ ID NO: 583259 - RNA, 22 nt, Human
aaaagagguuaaccaggugugu

SEQ ID NO: 583260 - RNA, 22 nt, Human
acagaauaacucuugcuugagu

SEQ ID NO: 583261 - RNA, 22 nt, Human
gccuccacuuuugcuggcuucu

SEQ ID NO: 583262 - RNA, 22 nt, Human
ucagagaggauuuuaauaagug

SEQ ID NO: 583263 - RNA, 22 nt, Human
gggcugacaaccaucugacaag

SEQ ID NO: 583264 - RNA, 22 nt, Human
ccuccaucuccagcuucugccu

SEQ ID NO: 583265 - RNA, 21 nt, Human
aggguccuacagggcucagga

SEQ ID NO: 583266 - RNA, 22 nt, Human
aacaguaggcaucacauaauga

SEQ ID NO: 583267 - RNA, 22 nt, Human
agggucaccugcuugccagggc

SEQ ID NO: 583268 - RNA, 22 nt, Human
gcccaggaugguguguaguggu

SEQ ID NO: 583269 - RNA, 22 nt, Human
uuuacaauagggucugaaugaa

SEQ ID NO: 583270 - RNA, 22 nt, Human
cacugccugugagcugugugcc

SEQ ID NO: 583271 - RNA, 22 nt, Human
uuuauugaacacuugcacuggc

SEQ ID NO: 583272 - RNA, 22 nt, Human
cagcccuuccaggcagaauucu

SEQ ID NO: 583273 - RNA, 22 nt, Human
cccuccucucccuaagagucac

SEQ ID NO: 583274 - RNA, 22 nt, Human
cuagcuuuguccauugucuugc

SEQ ID NO: 583275 - RNA, 22 nt, Human
gccuggagggcucuagagaggc

SEQ ID NO: 583276 - RNA, 22 nt, Human
cugcugagguccuugcucagac

SEQ ID NO: 583277 - RNA, 22 nt, Human
ucauggggugacagaagggagg

SEQ ID NO: 583278 - RNA, 22 nt, Human
cauacauuuugcauauuuacca

SEQ ID NO: 583279 - RNA, 19 nt, Human
ugggagaggcaacagagua

SEQ ID NO: 583280 - RNA, 22 nt, Human
cucugcccacgucuugcccaga

SEQ ID NO: 583281 - RNA, 22 nt, Human
agaggcaaaaaucuauggcaac

SEQ ID NO: 583282 - RNA, 22 nt, Human
agcuggcccucgagagccaauu

SEQ ID NO: 583283 - RNA, 22 nt, Human
uucaaagugugaccugacaagc

SEQ ID NO: 583284 - RNA, 22 nt, Human
gaaucccaaucuguuauugaca

SEQ ID NO: 583285 - RNA, 22 nt, Human
caucacugaaccccaacuuucu

SEQ ID NO: 583286 - RNA, 22 nt, Human
cuuuucaaacgcugaugucagu

SEQ ID NO: 583287 - RNA, 22 nt, Human
cucugagggcugucaggaaagg

SEQ ID NO: 583288 - RNA, 21 nt, Human
ccuggcagaagccugauaugc

SEQ ID NO: 583289 - RNA, 22 nt, Human
cagccugcuagggcaaugccuu

SEQ ID NO: 583290 - RNA, 22 nt, Human
augauucucugcuacucuaaau

SEQ ID NO: 583291 - RNA, 22 nt, Human
agugggcuuacugagggagugu

SEQ ID NO: 583292 - RNA, 22 nt, Human
ucuuggagacucuuguauauuu

SEQ ID NO: 583293 - RNA, 22 nt, Human
caguaugucuacuggacaaagu

SEQ ID NO: 583294 - RNA, 22 nt, Human
ugcaucauauaaugucuaugga

SEQ ID NO: 583295 - RNA, 22 nt, Human
aaaacacugcaaagcugauugg

SEQ ID NO: 583296 - RNA, 22 nt, Human
auguggggacaaaaugauggcc

SEQ ID NO: 583297 - RNA, 22 nt, Human
ugaauaaucauguccauagugu

SEQ ID NO: 583298 - RNA, 22 nt, Human
cucccagauuccugcuguggga

SEQ ID NO: 583299 - RNA, 22 nt, Human
auguaagacuuuaagaaccuaa

SEQ ID NO: 583300 - RNA, 22 nt, Human
aggcucugcauccaggcuuuau

SEQ ID NO: 583301 - RNA, 22 nt, Human
gggcugccaagccugccugccu

SEQ ID NO: 583302 - RNA, 22 nt, Human
gagcuggcuaauacugacuuau

SEQ ID NO: 583303 - RNA, 22 nt, Human
uuaauuaugcaaaaggccccau

SEQ ID NO: 583304 - RNA, 22 nt, Human
uccagcagguccgagacaaguu

SEQ ID NO: 583305 - RNA, 22 nt, Human
uaggaugugccaggaaagaaag

SEQ ID NO: 583306 - RNA, 22 nt, Human
acucucccagcuauauguggug

SEQ ID NO: 583307 - RNA, 22 nt, Human
aacagcuugagacuggauaugc

SEQ ID NO: 583308 - RNA, 22 nt, Human
aauggcuucuuuuugguauaau

SEQ ID NO: 583309 - RNA, 22 nt, Human
aaugucuuuaaagugcaauaga

SEQ ID NO: 583310 - RNA, 22 nt, Human
gcuggaguuguggguuuacuaa

SEQ ID NO: 583311 - RNA, 22 nt, Human
uauaguacacuuagguacuuca

SEQ ID NO: 583312 - RNA, 22 nt, Human
ccugggaggcuguuuccagccu

SEQ ID NO: 583313 - RNA, 22 nt, Human
auugauaucaguuugcugauug

SEQ ID NO: 583314 - RNA, 22 nt, Human
guauucucaggugguuccucga

SEQ ID NO: 583315 - RNA, 22 nt, Human
gagcuguccgccccugggccga

SEQ ID NO: 583316 - RNA, 22 nt, Human
uaaacaucuguagccuucaguc

SEQ ID NO: 583317 - RNA, 19 nt, Human
gcauaaaaugucaaugugu

SEQ ID NO: 583318 - RNA, 22 nt, Human
ugcucagugagucugugacagg

SEQ ID NO: 583319 - RNA, 22 nt, Human
aaagcaaugucucugccugguu

SEQ ID NO: 583320 - RNA, 22 nt, Human
gcagccccaggagacgcccagg

SEQ ID NO: 583321 - RNA, 22 nt, Human
gaggggcugggcagucccugga

SEQ ID NO: 583322 - RNA, 22 nt, Human
cccaggagagggaaccaaaugu

SEQ ID NO: 583323 - RNA, 22 nt, Human
guguuaauggcuaugaacugau

SEQ ID NO: 583324 - RNA, 21 nt, Human
ccccucauacacucuccuugc

SEQ ID NO: 583325 - RNA, 22 nt, Human
uccagccuaauguucuucccac

SEQ ID NO: 583326 - RNA, 22 nt, Human
auucauaacggcaaaugucacc

SEQ ID NO: 583327 - RNA, 22 nt, Human
uuuuccuuucaucaggacaaag

SEQ ID NO: 583328 - RNA, 22 nt, Human
ccuuagcagggccgggccuggg

SEQ ID NO: 583329 - RNA, 21 nt, Human
caaguguggauguggaaggua

SEQ ID NO: 583330 - RNA, 22 nt, Human
ugagguaggagugggaaaguag

SEQ ID NO: 583331 - RNA, 22 nt, Human
agggaugguggagguugcaagu

SEQ ID NO: 583332 - RNA, 22 nt, Human
gggucaggccucaaggugggcu

SEQ ID NO: 583333 - RNA, 22 nt, Human
cccagaggggucgucugagggg

SEQ ID NO: 583334 - RNA, 22 nt, Human
ggacaggcccucuggucagcuu

SEQ ID NO: 583335 - RNA, 20 nt, Human
gacauuguaauuaaugauga

SEQ ID NO: 583336 - RNA, 22 nt, Human
gugcucugccuggggucauggc

SEQ ID NO: 583337 - RNA, 22 nt, Human
uggcucugggcaccguguccac

SEQ ID NO: 583338 - RNA, 22 nt, Human
ucugaugcaauguaagucuugg

SEQ ID NO: 583339 - RNA, 22 nt, Human
cuucucagcauuuugucagucu

SEQ ID NO: 583340 - RNA, 22 nt, Human
cugccagcuggagaccaaggaa

SEQ ID NO: 583341 - RNA, 22 nt, Human
ugagggcuguggaaggcuaacc

SEQ ID NO: 583342 - RNA, 22 nt, Human
gggcuggaggccugccugguua

SEQ ID NO: 583343 - RNA, 20 nt, Human
augcaaacucacaaaauacc

SEQ ID NO: 583344 - RNA, 22 nt, Human
ugucugaaucgcuuccuagagg

SEQ ID NO: 583345 - RNA, 22 nt, Human
acaugaucuuauguagaagauc

SEQ ID NO: 583346 - RNA, 22 nt, Human
ccugaagagcacucuagaguug

SEQ ID NO: 583347 - RNA, 22 nt, Human
guguauaauaaugugagcuaaa

SEQ ID NO: 583348 - RNA, 22 nt, Human
uuuacacauaccucuuuaaagu

SEQ ID NO: 583349 - RNA, 22 nt, Human
agaauucuggaguugggaggaa

SEQ ID NO: 583350 - RNA, 22 nt, Human
acugcccagugauuggugguua

SEQ ID NO: 583351 - RNA, 20 nt, Human
gcuuuuucuaauagcagucc

SEQ ID NO: 583352 - RNA, 22 nt, Human
ucaggcugcaucuguaagggug

SEQ ID NO: 583353 - RNA, 22 nt, Human
gggcuucuagaauuucugauau

SEQ ID NO: 583354 - RNA, 19 nt, Human
aaaaggaauauucuuuggg

SEQ ID NO: 583355 - RNA, 22 nt, Human
gccugcagccccucugcaguag

SEQ ID NO: 583356 - RNA, 22 nt, Human
uaggaacaacugcagguacaag

SEQ ID NO: 583357 - RNA, 22 nt, Human
uugcucaggcuuagagcuacua

SEQ ID NO: 583358 - RNA, 22 nt, Human
ggagcugcuccuucagccaagu

SEQ ID NO: 583359 - RNA, 22 nt, Human
aaguggcacgcuuuuuggaguu

SEQ ID NO: 583360 - RNA, 22 nt, Human
ucuuagcaaauacuacuuagaa

SEQ ID NO: 583361 - RNA, 22 nt, Human
uauugaaauucuucauguccuc

SEQ ID NO: 583362 - RNA, 22 nt, Human
agaggggaggcgaaccagaguc

SEQ ID NO: 583363 - RNA, 22 nt, Human
uaaaauagaggaugucaugcua

SEQ ID NO: 583364 - RNA, 22 nt, Human
aaauuaguacauugcaaagucc

SEQ ID NO: 583365 - RNA, 22 nt, Human
ugccuugggauauauggacacu

SEQ ID NO: 583366 - RNA, 22 nt, Human
aggcagguguugggagacacca

SEQ ID NO: 583367 - RNA, 22 nt, Human
agcagcucuggcacuguagcau

SEQ ID NO: 583368 - RNA, 22 nt, Human
acccagggccacagcccgcagu

SEQ ID NO: 583369 - RNA, 22 nt, Human
agucuuuaaugaucauguauuu

SEQ ID NO: 583370 - RNA, 22 nt, Human
uuccuggggacuuaccgucauu

SEQ ID NO: 583371 - RNA, 22 nt, Human
cagugcaggaagugagaugccu

SEQ ID NO: 583372 - RNA, 20 nt, Human
uccagcugggaacagcugau

SEQ ID NO: 583373 - RNA, 22 nt, Human
gagagcugggcuuugggugaag

SEQ ID NO: 583374 - RNA, 22 nt, Human
ucuccaggcuuuuugugaauug

SEQ ID NO: 583375 - RNA, 22 nt, Human
gugcugagcugcagaugcgcuc

SEQ ID NO: 583376 - RNA, 23 nt, Human
ucucucuuagcuaugcuuauggc

SEQ ID NO: 583377 - RNA, 22 nt, Human
ucuuacauauagcaugaguaca

SEQ ID NO: 583378 - RNA, 22 nt, Human
uucugcagaucaacuugacugc

SEQ ID NO: 583379 - RNA, 22 nt, Human
uaggccaaggacaguaaggaca

SEQ ID NO: 583380 - RNA, 22 nt, Human
augguggaagagcaucagaaag

SEQ ID NO: 583381 - RNA, 22 nt, Human
ucuacaaugagaaaugaucagu

SEQ ID NO: 583382 - RNA, 22 nt, Human
agggaggaaggaacuccuucua

SEQ ID NO: 583383 - RNA, 22 nt, Human
ucuccagguggcuugggcuucu

SEQ ID NO: 583384 - RNA, 22 nt, Human
aguguaggugagggccuggguu

SEQ ID NO: 583385 - RNA, 22 nt, Human
gugcuucucugcucuacccggc

SEQ ID NO: 583386 - RNA, 22 nt, Human
caauuuuuguacuuauaguacu

SEQ ID NO: 583387 - RNA, 22 nt, Human
uagcacuaucuugggauuugga

SEQ ID NO: 583388 - RNA, 21 nt, Human
agcagcagcaguggggcuucu

SEQ ID NO: 583389 - RNA, 22 nt, Human
ucccagagucuucuccuguaau

SEQ ID NO: 583390 - RNA, 20 nt, Human
cuggaguguagcaguggcug

SEQ ID NO: 583391 - RNA, 22 nt, Human
aggucacagcuuucucgugagg

SEQ ID NO: 583392 - RNA, 22 nt, Human
uggcagagguauauugggagga

SEQ ID NO: 583393 - RNA, 22 nt, Human
gagagaaaacaaguucuccauu

SEQ ID NO: 583394 - RNA, 22 nt, Human
accaggcuugauaccaagaaau

SEQ ID NO: 583395 - RNA, 19 nt, Human
ucacaggcaucuccccaga

SEQ ID NO: 583396 - RNA, 22 nt, Human
gaggagacugacagcagauucu

SEQ ID NO: 583397 - RNA, 22 nt, Human
aaagaguugaaaacuaacagug

SEQ ID NO: 583398 - RNA, 22 nt, Human
ugcuccagaaaaacuugagacu

SEQ ID NO: 583399 - RNA, 22 nt, Human
ggcugcugggaauaugccagcu

SEQ ID NO: 583400 - RNA, 22 nt, Human
uggcucaggagggaucuuugcu

SEQ ID NO: 583401 - RNA, 22 nt, Human
cugccuguggguacaaguggaa

SEQ ID NO: 583402 - RNA, 22 nt, Human
ugcuuuuaggagauuaaaauua

SEQ ID NO: 583403 - RNA, 22 nt, Human
caauuuuuuccaugcucuuaca

SEQ ID NO: 583404 - RNA, 22 nt, Human
ggcuccagggaguggagagaag

SEQ ID NO: 583405 - RNA, 22 nt, Human
cuuaggauuuaauuucagacuc

SEQ ID NO: 583406 - RNA, 22 nt, Human
ggaaaacaagagaaugauguuu

SEQ ID NO: 583407 - RNA, 22 nt, Human
ucagcucuaaguuuuaugcaaa

SEQ ID NO: 583408 - RNA, 22 nt, Human
uucuucuugucugcccucacau

SEQ ID NO: 583409 - RNA, 22 nt, Human
acugcagacucuacaguuauaa

SEQ ID NO: 583410 - RNA, 22 nt, Human
agaagccaugguaugcaacuac

SEQ ID NO: 583411 - RNA, 22 nt, Human
ggucugaguggggccugagauu

SEQ ID NO: 583412 - RNA, 22 nt, Human
uugaaaugaaauauuuaagcuc

SEQ ID NO: 583413 - RNA, 22 nt, Human
uggagaagcuguagguggacuc

SEQ ID NO: 583414 - RNA, 22 nt, Human
cucugagcucgugcaguacuuc

SEQ ID NO: 583415 - RNA, 22 nt, Human
uucuugauuucaugcaguuaag

SEQ ID NO: 583416 - RNA, 22 nt, Human
acauaugcgaucauaggaugca

SEQ ID NO: 583417 - RNA, 22 nt, Human
acaggcugacuuccugccaugu

SEQ ID NO: 583418 - RNA, 20 nt, Human
ucugaacacaauauaucccc

SEQ ID NO: 583419 - RNA, 22 nt, Human
aaagcaauggcacaugauggua

SEQ ID NO: 583420 - RNA, 22 nt, Human
guaaaugccacuuaauguaaag

SEQ ID NO: 583421 - RNA, 22 nt, Human
uccuggggccagcacuggugga

SEQ ID NO: 583422 - RNA, 22 nt, Human
gugaggaucaaaugaaauagca

SEQ ID NO: 583423 - RNA, 22 nt, Human
uucaaaguaccguacuuaaugg

SEQ ID NO: 583424 - RNA, 22 nt, Human
ucugggcugggagcguguggac

SEQ ID NO: 583425 - RNA, 22 nt, Human
auuuaauuguucuucuggcuau

SEQ ID NO: 583426 - RNA, 22 nt, Human
ugucaccagcugcuccucagga

SEQ ID NO: 583427 - RNA, 22 nt, Human
ugcugaggagggcacccggggg

SEQ ID NO: 583428 - RNA, 22 nt, Human
agcuggucagaguggggauaga

SEQ ID NO: 583429 - RNA, 22 nt, Human
ugcagggaagucccagcuccug

SEQ ID NO: 583430 - RNA, 22 nt, Human
cauuguuuguaaaauuccagua

SEQ ID NO: 583431 - RNA, 22 nt, Human
ccaggagcagccggcccaccug

SEQ ID NO: 583432 - RNA, 22 nt, Human
ucaggaaauggaauucuugugu

SEQ ID NO: 583433 - RNA, 22 nt, Human
uggucccuaaagaugucuacau

SEQ ID NO: 583434 - RNA, 22 nt, Human
gucaggcccuggcagccgugac

SEQ ID NO: 583435 - RNA, 17 nt, Human
ccugggaggaguuauga

SEQ ID NO: 583436 - RNA, 22 nt, Human
cccagaggugcuucagaggugc

SEQ ID NO: 583437 - RNA, 22 nt, Human
gcugagucuugagcacugagca

SEQ ID NO: 583438 - RNA, 22 nt, Human
aaauuuucagagcacuagagaa

SEQ ID NO: 583439 - RNA, 22 nt, Human
ucugggaaaguaaauguaaagg

SEQ ID NO: 583440 - RNA, 22 nt, Human
uggcuccagcguccacguccug

SEQ ID NO: 583441 - RNA, 22 nt, Human
gaagagcuccaaaaacagugag

SEQ ID NO: 583442 - RNA, 22 nt, Human
agugaaauugcuguaagaggaa

SEQ ID NO: 583443 - RNA, 22 nt, Human
cuccaggagggggauggcugua

SEQ ID NO: 583444 - RNA, 22 nt, Human
gcugggcaaggcugaagcuacc

SEQ ID NO: 583445 - RNA, 22 nt, Human
ugcaugcacauguagguauggu

SEQ ID NO: 583446 - RNA, 22 nt, Human
uccccaggaguuuuacuuugca

SEQ ID NO: 583447 - RNA, 20 nt, Human
uuuuccugugguuugauaug

SEQ ID NO: 583448 - RNA, 22 nt, Human
ugcucugggaccgucauuaaaa

SEQ ID NO: 583449 - RNA, 22 nt, Human
ucagcucuaccugggagcuguc

SEQ ID NO: 583450 - RNA, 22 nt, Human
agacauauuggcuugcuuuaau

SEQ ID NO: 583451 - RNA, 22 nt, Human
gggcugagauuggugcccuguc

SEQ ID NO: 583452 - RNA, 18 nt, Human
ugcaggagugaccccggc

SEQ ID NO: 583453 - RNA, 22 nt, Human
gcagcacugauccuaaacuuag

SEQ ID NO: 583454 - RNA, 22 nt, Human
uucuguuuccugccuucccauu

SEQ ID NO: 583455 - RNA, 22 nt, Human
gaggauggugagcaggacccag

SEQ ID NO: 583456 - RNA, 18 nt, Human
cagcugugcccuguuugg

SEQ ID NO: 583457 - RNA, 22 nt, Human
cagggcugguuugucgaagaaa

SEQ ID NO: 583458 - RNA, 18 nt, Human
ggacccagggccucaccc

SEQ ID NO: 583459 - RNA, 22 nt, Human
ugguggggccagacuucagcuc

SEQ ID NO: 583460 - RNA, 22 nt, Human
aggcugucaucuuugcaggcag

SEQ ID NO: 583461 - RNA, 22 nt, Human
uccaaagagcuuaggagagaaa

SEQ ID NO: 583462 - RNA, 22 nt, Human
ucucagaaaaaggagaaacugg

SEQ ID NO: 583463 - RNA, 22 nt, Human
ucuguccaggucagccuacauu

SEQ ID NO: 583464 - RNA, 22 nt, Human
gcacugggcuccaggaaggagg

SEQ ID NO: 583465 - RNA, 22 nt, Human
caguaacaggcucugugguaua

SEQ ID NO: 583466 - RNA, 22 nt, Human
gggugagacagaaagagcaaaa

SEQ ID NO: 583467 - RNA, 22 nt, Human
cuuuucucugcaccauguguga

SEQ ID NO: 583468 - RNA, 22 nt, Human
gcccuuagguacuacuuauucu

SEQ ID NO: 583469 - RNA, 22 nt, Human
uggaggaggaacuucuuaucuc

SEQ ID NO: 583470 - RNA, 22 nt, Human
uucauuagaaaaguaaaaaugc

SEQ ID NO: 583471 - RNA, 22 nt, Human
ugugcaauuucaauuuacacag

SEQ ID NO: 583472 - RNA, 22 nt, Human
ccucccugcgcuccugcggcgg

SEQ ID NO: 583473 - RNA, 22 nt, Human
ugcccugcuguggcucugccca

SEQ ID NO: 583474 - RNA, 20 nt, Human
aggcacuguugucuguaucc

SEQ ID NO: 583475 - RNA, 22 nt, Human
gaauauauuggugaaaauaguu

SEQ ID NO: 583476 - RNA, 22 nt, Human
cuugggccaccuggagggacug

SEQ ID NO: 583477 - RNA, 22 nt, Human
gugggacagcggggugggacag

SEQ ID NO: 583478 - RNA, 22 nt, Human
ucaugcagauaagaauaaguaa

SEQ ID NO: 583479 - RNA, 22 nt, Human
agagugaaaagcuagagcagua

SEQ ID NO: 583480 - RNA, 22 nt, Human
aggagucagauuguuugaaugu

SEQ ID NO: 583481 - RNA, 22 nt, Human
uuccuggguucccucucauucu

SEQ ID NO: 583482 - RNA, 22 nt, Human
guggcauugacauguaaacagu

SEQ ID NO: 583483 - RNA, 22 nt, Human
ggcugcagaggcccccaguggg

SEQ ID NO: 583484 - RNA, 22 nt, Human
agaggccuccgaaaggugggcu

SEQ ID NO: 583485 - RNA, 22 nt, Human
gagcugaggugauguggucguu

SEQ ID NO: 583486 - RNA, 22 nt, Human
caggcaccucacguggguccca

SEQ ID NO: 583487 - RNA, 22 nt, Human
ugggcuggagcuuguugcuucc

SEQ ID NO: 583488 - RNA, 22 nt, Human
cugagggguauccaagggguaa

SEQ ID NO: 583489 - RNA, 22 nt, Human
agagauuuacacaugccuuuuc

SEQ ID NO: 583490 - RNA, 22 nt, Human
ugcugggcaccagugccugcag

SEQ ID NO: 583491 - RNA, 22 nt, Human
cuacaggucaagcaguagcucu

SEQ ID NO: 583492 - RNA, 22 nt, Human
ugacauuucagauaugguauuu

SEQ ID NO: 583493 - RNA, 22 nt, Human
aauguauaaaguguuaauaacu

SEQ ID NO: 583494 - RNA, 22 nt, Human
uucuuacauuacuuuacaugug

SEQ ID NO: 583495 - RNA, 22 nt, Human
ggaacauuggcauuuuaaggcu

SEQ ID NO: 583496 - RNA, 22 nt, Human
aggccacagagagugcaugugc

SEQ ID NO: 583497 - RNA, 22 nt, Human
gcuguuucuaccagaagaauca

SEQ ID NO: 583498 - RNA, 22 nt, Human
aaggugucaccagauuggcagg

SEQ ID NO: 583499 - RNA, 22 nt, Human
agaguacauucagagcuaccua

SEQ ID NO: 583500 - RNA, 22 nt, Human
aucuccccgagcuuaccuccug

SEQ ID NO: 583501 - RNA, 22 nt, Human
cugccaggcacugggcucugca

SEQ ID NO: 583502 - RNA, 22 nt, Human
gccugccugaaggcuguaccag

SEQ ID NO: 583503 - RNA, 22 nt, Human
uuuccucaacugucaaaugggg

SEQ ID NO: 583504 - RNA, 21 nt, Human
gacuucaugggucaaccaauu

SEQ ID NO: 583505 - RNA, 19 nt, Human
uccugaaaacuucuggaau

SEQ ID NO: 583506 - RNA, 21 nt, Human
gggcuggacaugguggcucau

SEQ ID NO: 583507 - RNA, 22 nt, Human
caggagcaaggagcagugggau

SEQ ID NO: 583508 - RNA, 22 nt, Human
gagcugaaauaugaagccaauu

SEQ ID NO: 583509 - RNA, 22 nt, Human
agcagagguuuguuggaaaccu

SEQ ID NO: 583510 - RNA, 22 nt, Human
caccaggggcagagaccaaagu

SEQ ID NO: 583511 - RNA, 22 nt, Human
augcauguauuaucuagaugag

SEQ ID NO: 583512 - RNA, 22 nt, Human
ccaaggcaacguuggugucagg

SEQ ID NO: 583513 - RNA, 22 nt, Human
gaagguuuuguuugcaaaucau

SEQ ID NO: 583514 - RNA, 22 nt, Human
ugggccagaaguaugcauguuu

SEQ ID NO: 583515 - RNA, 22 nt, Human
gcugugcagccaagugccucug

SEQ ID NO: 583516 - RNA, 22 nt, Human
aaaggucuuuuuucuaacacca

SEQ ID NO: 583517 - RNA, 22 nt, Human
aaagacuugggagcaguaugcu

SEQ ID NO: 583518 - RNA, 22 nt, Human
aggauaaaugaucuagauuuuc

SEQ ID NO: 583519 - RNA, 21 nt, Human
uugacaggaaagaggggagau

SEQ ID NO: 583520 - RNA, 22 nt, Human
cagagaaagggugaauuccuuc

SEQ ID NO: 583521 - RNA, 22 nt, Human
gcugggacaggcuuggcccugu

SEQ ID NO: 583522 - RNA, 22 nt, Human
cagcagagcuuauguuggguca

SEQ ID NO: 583523 - RNA, 22 nt, Human
agcaggaguuugaugcuuuuau

SEQ ID NO: 583524 - RNA, 22 nt, Human
uauaugacaguaucauuuuaaa

SEQ ID NO: 583525 - RNA, 20 nt, Human
ugaauucuggguuuaucugc

SEQ ID NO: 583526 - RNA, 22 nt, Human
ucagcuguagguauggaugucc

SEQ ID NO: 583527 - RNA, 22 nt, Human
gcugacagagugccuggccuca

SEQ ID NO: 583528 - RNA, 22 nt, Human
aggcagagaaaaaccagauaug

SEQ ID NO: 583529 - RNA, 22 nt, Human
uaagguuuugagaccagaacgu

SEQ ID NO: 583530 - RNA, 22 nt, Human
acagagagaaacaaucagcagc

SEQ ID NO: 583531 - RNA, 22 nt, Human
ucuugguauacgcauggcauug

SEQ ID NO: 583532 - RNA, 22 nt, Human
ucugcaaacuggcucuuacugc

SEQ ID NO: 583533 - RNA, 22 nt, Human
gcagccucagggcacucagaug

SEQ ID NO: 583534 - RNA, 22 nt, Human
ucaagacaucacugugcauuuu

SEQ ID NO: 583535 - RNA, 22 nt, Human
gugggagcauggucccagugcc

SEQ ID NO: 583536 - RNA, 21 nt, Human
uggcagggguaguaguacagc

SEQ ID NO: 583537 - RNA, 22 nt, Human
ucaguguccggagccugagugc

SEQ ID NO: 583538 - RNA, 22 nt, Human
aaguguguugacugaauugggg

SEQ ID NO: 583539 - RNA, 22 nt, Human
agcugcaguaaagcucuccagg

SEQ ID NO: 583540 - RNA, 22 nt, Human
gcugucacaagcaucuggggca

SEQ ID NO: 583541 - RNA, 22 nt, Human
auucacaaauaacaggugcaga

SEQ ID NO: 583542 - RNA, 22 nt, Human
caggcucagucagaaaauguau

SEQ ID NO: 583543 - RNA, 22 nt, Human
gaaugaguuaauauuugcuugg

SEQ ID NO: 583544 - RNA, 22 nt, Human
uauuucacauaccacagagugu

SEQ ID NO: 583545 - RNA, 22 nt, Human
agcugugguuagauagaguccu

SEQ ID NO: 583546 - RNA, 22 nt, Human
ugcugaaacaauaacauacugg

SEQ ID NO: 583547 - RNA, 22 nt, Human
gaggcugcuuuccuccuauccu

SEQ ID NO: 583548 - RNA, 22 nt, Human
cccaggaggcgcagguugcggu

SEQ ID NO: 583549 - RNA, 22 nt, Human
gugcaaaaguaauugagguuuu

SEQ ID NO: 583550 - RNA, 22 nt, Human
acauuaaaaaauguugcaugaa

SEQ ID NO: 583551 - RNA, 22 nt, Human
ugagcagagacuucaagggcag

SEQ ID NO: 583552 - RNA, 21 nt, Human
agggucaggaaccaggguacc

SEQ ID NO: 583553 - RNA, 21 nt, Human
uggcugcaagcagcugccucc

SEQ ID NO: 583554 - RNA, 22 nt, Human
agggccagcccauaaugccaaa

SEQ ID NO: 583555 - RNA, 22 nt, Human
aaaguguggagauugaacuaaa

SEQ ID NO: 583556 - RNA, 22 nt, Human
aggccacagccugggaggugac

SEQ ID NO: 583557 - RNA, 22 nt, Human
agaggaggcucugggaucgucc

SEQ ID NO: 583558 - RNA, 22 nt, Human
gcucaggucuuacccaugccug

SEQ ID NO: 583559 - RNA, 22 nt, Human
cuucuugcugggggccucagug

SEQ ID NO: 583560 - RNA, 21 nt, Human
gacaggggccauggguuucua

SEQ ID NO: 583561 - RNA, 22 nt, Human
ggaaacuuguuauuguauuuuc

SEQ ID NO: 583562 - RNA, 22 nt, Human
ugaguuauugagaaauaacugc

SEQ ID NO: 583563 - RNA, 22 nt, Human
cccaggagacauauagaaggac

SEQ ID NO: 583564 - RNA, 22 nt, Human
ccucagaauaguccucagauca

SEQ ID NO: 583565 - RNA, 22 nt, Human
agcuuuggggguagguauagag

SEQ ID NO: 583566 - RNA, 22 nt, Human
ccacucugcugugcuccaugau

SEQ ID NO: 583567 - RNA, 22 nt, Human
ccugucugaaucaugauuuccu

SEQ ID NO: 583568 - RNA, 22 nt, Human
uggcagaggagaauuaagauua

SEQ ID NO: 583569 - RNA, 22 nt, Human
agagccugguucaaauuuuacc

SEQ ID NO: 583570 - RNA, 22 nt, Human
agagacuguguccaucgugccu

SEQ ID NO: 583571 - RNA, 22 nt, Human
ucauaauguaguucauggcugg

SEQ ID NO: 583572 - RNA, 22 nt, Human
gagcugagaucgugccauugca

SEQ ID NO: 583573 - RNA, 22 nt, Human
ugcuuccugcuaaggcugccug

SEQ ID NO: 583574 - RNA, 22 nt, Human
ucagcagaggggaaggcaucug

SEQ ID NO: 583575 - RNA, 22 nt, Human
augaagcagccucuucccucug

SEQ ID NO: 583576 - RNA, 22 nt, Human
cugaggagagaucacguggugu

SEQ ID NO: 583577 - RNA, 22 nt, Human
ggcaggagauaaaauauuaguu

SEQ ID NO: 583578 - RNA, 22 nt, Human
acacuuuguuguggcauauacg

SEQ ID NO: 583579 - RNA, 22 nt, Human
ucacuuugacagagaaaugaau

SEQ ID NO: 583580 - RNA, 22 nt, Human
agccagggacgcugcaggcuac

SEQ ID NO: 583581 - RNA, 22 nt, Human
ucuuuccuuagaauaauucuuu

SEQ ID NO: 583582 - RNA, 22 nt, Human
cagagcugcacauucuaugaug

SEQ ID NO: 583583 - RNA, 22 nt, Human
acaaaccagcuuaagcaagaug

SEQ ID NO: 583584 - RNA, 22 nt, Human
ucuggggaugaggaccuagaug

SEQ ID NO: 583585 - RNA, 20 nt, Human
auaauuauuuacuuuugugc

SEQ ID NO: 583586 - RNA, 23 nt, Human
uguuuucuuguccugguauaauu

SEQ ID NO: 583587 - RNA, 22 nt, Human
cugcagggagcagauggcgugu

SEQ ID NO: 583588 - RNA, 22 nt, Human
aggaaaaagaguugcugccuuc

SEQ ID NO: 583589 - RNA, 22 nt, Human
ggauguucugggguucucuugu

SEQ ID NO: 583590 - RNA, 22 nt, Human
gaauuaaaauaguuuuggucga

SEQ ID NO: 583591 - RNA, 22 nt, Human
uacauauccaggcugagaagau

SEQ ID NO: 583592 - RNA, 22 nt, Human
uaugcuuuaacauuaaacaaca

SEQ ID NO: 583593 - RNA, 22 nt, Human
cuggaucaugcauugcuugucc

SEQ ID NO: 583594 - RNA, 22 nt, Human
caguagcaggcacucagcacgu

SEQ ID NO: 583595 - RNA, 22 nt, Human
gagccuccuccuggugugccga

SEQ ID NO: 583596 - RNA, 22 nt, Human
uuuuacuucauuccugacuuca

SEQ ID NO: 583597 - RNA, 22 nt, Human
gcuuccuuccuuacauuggugg

SEQ ID NO: 583598 - RNA, 22 nt, Human
accagccugucugagucguggg

SEQ ID NO: 583599 - RNA, 22 nt, Human
guuuugcucauuugguccaagg

SEQ ID NO: 583600 - RNA, 22 nt, Human
cugggcccuauggaagaaaggg

SEQ ID NO: 583601 - RNA, 22 nt, Human
gguggggccugcuccagcggcc

SEQ ID NO: 583602 - RNA, 22 nt, Human
ugaggugaauggugucccugga

SEQ ID NO: 583603 - RNA, 22 nt, Human
ugcaagggguuuaugcagauga

SEQ ID NO: 583604 - RNA, 22 nt, Human
aguuuuauguucacagaaggau

SEQ ID NO: 583605 - RNA, 22 nt, Human
uaauacagauacaaaggaggac

SEQ ID NO: 583606 - RNA, 23 nt, Human
aaagacugaggaaagucucuguc

SEQ ID NO: 583607 - RNA, 22 nt, Human
aauaauuacccaucuuuuugua

SEQ ID NO: 583608 - RNA, 23 nt, Human
aggguugugugcuucaugaucau

SEQ ID NO: 583609 - RNA, 22 nt, Human
aaauuauucucauguguuucuu

SEQ ID NO: 583610 - RNA, 22 nt, Human
caagcuggcugggagaggcacg

SEQ ID NO: 583611 - RNA, 22 nt, Human
uacuuuaucagcgucaaaggua

SEQ ID NO: 583612 - RNA, 22 nt, Human
gaacuacagugcauuuucuuaa

SEQ ID NO: 583613 - RNA, 23 nt, Human
ggcuucuugccugucuuggugcu

SEQ ID NO: 583614 - RNA, 22 nt, Human
auuucagacuguguuggaaaau

SEQ ID NO: 583615 - RNA, 22 nt, Human
uggaggcagucaaaugacugac

SEQ ID NO: 583616 - RNA, 22 nt, Human
uccaggugccggggacugaggc

SEQ ID NO: 583617 - RNA, 22 nt, Human
gcugagguggugaugguucauc

SEQ ID NO: 583618 - RNA, 22 nt, Human
aacaugaagguaggaugguuuu

SEQ ID NO: 583619 - RNA, 22 nt, Human
gcugugugcucacguaguggaa

SEQ ID NO: 583620 - RNA, 22 nt, Human
uaucuugagagacaacacagca

SEQ ID NO: 583621 - RNA, 22 nt, Human
agcacacagucuuccuuccucc

SEQ ID NO: 583622 - RNA, 22 nt, Human
agcuuguuggggaaggagaaag

SEQ ID NO: 583623 - RNA, 22 nt, Human
aaagcuucuauucacuuacuug

SEQ ID NO: 583624 - RNA, 22 nt, Human
gggccugccaggcuuucagcau

SEQ ID NO: 583625 - RNA, 22 nt, Human
uaaggcaggacuggauagcuau

SEQ ID NO: 583626 - RNA, 22 nt, Human
agcauugguggccagagugccu

SEQ ID NO: 583627 - RNA, 22 nt, Human
auugcacaaacacagucagacu

SEQ ID NO: 583628 - RNA, 22 nt, Human
agacagugacuuagugaccaga

SEQ ID NO: 583629 - RNA, 22 nt, Human
agggugcguucuaugagaaucu

SEQ ID NO: 583630 - RNA, 22 nt, Human
cagccagggagggcaaaugaga

SEQ ID NO: 583631 - RNA, 22 nt, Human
ccuuccaguauguuaagauggu

SEQ ID NO: 583632 - RNA, 22 nt, Human
cagagccccucagcucucuccc

SEQ ID NO: 583633 - RNA, 22 nt, Human
guggguggggagcucucuggag

SEQ ID NO: 583634 - RNA, 22 nt, Human
uuaccacacuuauuuacauugg

SEQ ID NO: 583635 - RNA, 19 nt, Human
cagucccaaauucuuguca

SEQ ID NO: 583636 - RNA, 22 nt, Human
cucugagaauauaagacuauuu

SEQ ID NO: 583637 - RNA, 22 nt, Human
aaauaucauucuggugcacaga

SEQ ID NO: 583638 - RNA, 22 nt, Human
cuucagagugcagaagauuggg

SEQ ID NO: 583639 - RNA, 22 nt, Human
uaaaauagcaugugcagugaaa

SEQ ID NO: 583640 - RNA, 23 nt, Human
cugccugcuggggagacagaucu

SEQ ID NO: 583641 - RNA, 22 nt, Human
agccuaggggguccugggccac

SEQ ID NO: 583642 - RNA, 22 nt, Human
ccagcugauucgguggugguug

SEQ ID NO: 583643 - RNA, 22 nt, Human
uacagugugaauaagcaggcau

SEQ ID NO: 583644 - RNA, 22 nt, Human
uuuuauucucaagacaauggga

SEQ ID NO: 583645 - RNA, 22 nt, Human
aguacauuuauuaaugguaaaa

SEQ ID NO: 583646 - RNA, 22 nt, Human
uggccacagccucugccaguuc

SEQ ID NO: 583647 - RNA, 22 nt, Human
acagggcucgucgggcccucgg

SEQ ID NO: 583648 - RNA, 22 nt, Human
gcaggagcagucaggggcagcu

SEQ ID NO: 583649 - RNA, 22 nt, Human
aaagcaugugaauagaauaugg

SEQ ID NO: 583650 - RNA, 20 nt, Human
aaauggccucagauaagcag

SEQ ID NO: 583651 - RNA, 22 nt, Human
gcugagugaggcugucaaaaug

SEQ ID NO: 583652 - RNA, 22 nt, Human
ugagugaggugcuuagggcaca

SEQ ID NO: 583653 - RNA, 23 nt, Human
agacagaggcugaggcuggccgc

SEQ ID NO: 583654 - RNA, 18 nt, Human
caucuacaaaugccagaa

SEQ ID NO: 583655 - RNA, 22 nt, Human
uuagauacauucucauuuguuu

SEQ ID NO: 583656 - RNA, 22 nt, Human
acuuuuaugauaaucaauguuc

SEQ ID NO: 583657 - RNA, 22 nt, Human
gcaggaagcauagaagaaugcc

SEQ ID NO: 583658 - RNA, 22 nt, Human
ccaagcuggauuuagcugcaca

SEQ ID NO: 583659 - RNA, 22 nt, Human
aaaauagauucuaggaugucuu

SEQ ID NO: 583660 - RNA, 21 nt, Human
uuacaguugauggaguauucc

SEQ ID NO: 583661 - RNA, 22 nt, Human
guuccuuggaagaacuugaggu

SEQ ID NO: 583662 - RNA, 22 nt, Human
uuccucaugggguuccuucaga

SEQ ID NO: 583663 - RNA, 22 nt, Human
ggcugcagagcugggugggccu

SEQ ID NO: 583664 - RNA, 22 nt, Human
acauucaugcaccuuccuaucc

SEQ ID NO: 583665 - RNA, 22 nt, Human
gauaacccccaagaaggucuuu

SEQ ID NO: 583666 - RNA, 22 nt, Human
ggcuggcuugccaagcucaggg

SEQ ID NO: 583667 - RNA, 22 nt, Human
ugcaguggaggccgugagacag

SEQ ID NO: 583668 - RNA, 22 nt, Human
agaggcaguauacaauccgagc

SEQ ID NO: 583669 - RNA, 22 nt, Human
uagucccauuuugagguauuug

SEQ ID NO: 583670 - RNA, 22 nt, Human
ugauacuuuucuuuuagacuaa

SEQ ID NO: 583671 - RNA, 22 nt, Human
acugccuggccuggccucacug

SEQ ID NO: 583672 - RNA, 19 nt, Human
agcugggcugucacaguga

SEQ ID NO: 583673 - RNA, 22 nt, Human
uuaaauucauuccaacuuuuga

SEQ ID NO: 583674 - RNA, 22 nt, Human
cgucuagacaguuuccaaaaga

SEQ ID NO: 583675 - RNA, 17 nt, Human
uuauugucaagguucca

SEQ ID NO: 583676 - RNA, 22 nt, Human
ccuuaaaagaacuaucucuucu

SEQ ID NO: 583677 - RNA, 22 nt, Human
aaugucauuuaaagacaaagaa

SEQ ID NO: 583678 - RNA, 22 nt, Human
acugccaaugguaguuugaugg

SEQ ID NO: 583679 - RNA, 22 nt, Human
gcugaagauaagugaagaggcu

SEQ ID NO: 583680 - RNA, 23 nt, Human
cuugcaggaagcagauggcacac

SEQ ID NO: 583681 - RNA, 22 nt, Human
acagaugauuuuuaugaaaaca

SEQ ID NO: 583682 - RNA, 22 nt, Human
agcaguguuggugggagcaucu

SEQ ID NO: 583683 - RNA, 22 nt, Human
aacucaguuacauauuagaaua

SEQ ID NO: 583684 - RNA, 22 nt, Human
gacugcuuugaccaauagcaca

SEQ ID NO: 583685 - RNA, 22 nt, Human
aagagcuggcccaaucugagca

SEQ ID NO: 583686 - RNA, 22 nt, Human
ucagcucugcacuccacugugg

SEQ ID NO: 583687 - RNA, 22 nt, Human
cagugcaguggcugagcuggag

SEQ ID NO: 583688 - RNA, 22 nt, Human
uuuccuuguucauuugcccuau

SEQ ID NO: 583689 - RNA, 22 nt, Human
auaaugcaccuuugaguauggc

SEQ ID NO: 583690 - RNA, 19 nt, Human
cuggccuguguccugugcu

SEQ ID NO: 583691 - RNA, 22 nt, Human
gcauugaguccacucugucuuu

SEQ ID NO: 583692 - RNA, 22 nt, Human
agccaggggauucaucagggac

SEQ ID NO: 583693 - RNA, 22 nt, Human
uguaucaaaccaaauuaauucu

SEQ ID NO: 583694 - RNA, 22 nt, Human
cugugccuccaaguggucucug

SEQ ID NO: 583695 - RNA, 22 nt, Human
auucuuuaauucaauugaagga

SEQ ID NO: 583696 - RNA, 22 nt, Human
ugcagagggagugacgguucac

SEQ ID NO: 583697 - RNA, 16 nt, Human
gugcaaaagugaggag

SEQ ID NO: 583698 - RNA, 22 nt, Human
gggugcagcagagcuccucugu

SEQ ID NO: 583699 - RNA, 22 nt, Human
ucucuuccuugaccuauuguaa

SEQ ID NO: 583700 - RNA, 22 nt, Human
agacauggauuucuuacauaaa

SEQ ID NO: 583701 - RNA, 22 nt, Human
aaugggaaagagacuagaugcu

SEQ ID NO: 583702 - RNA, 22 nt, Human
uauugccugaguguuucauaau

SEQ ID NO: 583703 - RNA, 22 nt, Human
auguuucuaguuguaugucacu

SEQ ID NO: 583704 - RNA, 22 nt, Human
ccagggcugcugggggaguuga

SEQ ID NO: 583705 - RNA, 22 nt, Human
gaggcugcagcuaucagacauu

SEQ ID NO: 583706 - RNA, 22 nt, Human
ugagcugugaggguacagauau

SEQ ID NO: 583707 - RNA, 22 nt, Human
caugccaagcauguucagaagu

SEQ ID NO: 583708 - RNA, 22 nt, Human
ucuacuguggaggcaaauccuu

SEQ ID NO: 583709 - RNA, 21 nt, Human
ggcuguguucagggcaugcgg

SEQ ID NO: 583710 - RNA, 22 nt, Human
cuucugagauguuguuuuacag

SEQ ID NO: 583711 - RNA, 22 nt, Human
acacagaguuauuaugugaacu

SEQ ID NO: 583712 - RNA, 22 nt, Human
aagugcugggauuacagguguc

SEQ ID NO: 583713 - RNA, 22 nt, Human
ucucaucuccauuauagcauca

SEQ ID NO: 583714 - RNA, 22 nt, Human
gauauguaccaccucuuaaaag

SEQ ID NO: 583715 - RNA, 22 nt, Human
gaggaggcuaagugggcucugg

SEQ ID NO: 583716 - RNA, 22 nt, Human
ucaggccagcaccaucccuauc

SEQ ID NO: 583717 - RNA, 21 nt, Human
auaccauuugccaaaaggauc

SEQ ID NO: 583718 - RNA, 22 nt, Human
aucaucaucuaaauugugucgc

SEQ ID NO: 583719 - RNA, 22 nt, Human
ccaggugggaggaaagcagaga

SEQ ID NO: 583720 - RNA, 22 nt, Human
uccugugugggcaggaugagaa

SEQ ID NO: 583721 - RNA, 22 nt, Human
gcacacacaugugaguacaugc

SEQ ID NO: 583722 - RNA, 22 nt, Human
uugguauacaaauauuuagcac

SEQ ID NO: 583723 - RNA, 22 nt, Human
agcaggugcguuacuucacucu

SEQ ID NO: 583724 - RNA, 22 nt, Human
cuauuucauguuccuauggccg

SEQ ID NO: 583725 - RNA, 22 nt, Human
ugagcuuccucccugcauccau

SEQ ID NO: 583726 - RNA, 22 nt, Human
cacagcauaaugaaauauacuu

SEQ ID NO: 583727 - RNA, 22 nt, Human
ucauaaacaaaacaguuuaugc

SEQ ID NO: 583728 - RNA, 22 nt, Human
ucaggaaagaguaauguauaca

SEQ ID NO: 583729 - RNA, 22 nt, Human
aaucacaauuacuuuugcacca

SEQ ID NO: 583730 - RNA, 22 nt, Human
ucaugcaaauacuguuccagaa

SEQ ID NO: 583731 - RNA, 22 nt, Human
ucucaagcuacuaccuuggauc

SEQ ID NO: 583732 - RNA, 22 nt, Human
cuccaggcuggggugcagguug

SEQ ID NO: 583733 - RNA, 23 nt, Human
ucuggcuuccaguggguucaacc

SEQ ID NO: 583734 - RNA, 22 nt, Human
ccuguccuccggagcgggcugu

SEQ ID NO: 583735 - RNA, 22 nt, Human
cgcccuccacacagccccuggc

SEQ ID NO: 583736 - RNA, 19 nt, Human
uggaggagaggaaaaguca

SEQ ID NO: 583737 - RNA, 22 nt, Human
auuucaaguguugagcucauaa

SEQ ID NO: 583738 - RNA, 18 nt, Human
agcauuaggagguuauca

SEQ ID NO: 583739 - RNA, 22 nt, Human
uagggguguuucgagagagguu

SEQ ID NO: 583740 - RNA, 17 nt, Human
acacagagauuaacaca

SEQ ID NO: 583741 - RNA, 22 nt, Human
uucuuaaaauucaagcuagguu

SEQ ID NO: 583742 - RNA, 20 nt, Human
gaggcugcggacugcuggac

SEQ ID NO: 583743 - RNA, 20 nt, Human
cacccucccagcaccuaugc

SEQ ID NO: 583744 - RNA, 23 nt, Human
gagcucagguagggcucgcccgc

SEQ ID NO: 583745 - RNA, 19 nt, Human
gccacuccugaugcugccc

SEQ ID NO: 583746 - RNA, 19 nt, Human
agcaaauauaauaguguuc

SEQ ID NO: 583747 - RNA, 22 nt, Human
gggaaugagagucagcccagga

SEQ ID NO: 583748 - RNA, 22 nt, Human
aucagaauggagcccacauggu

SEQ ID NO: 583749 - RNA, 22 nt, Human
guuuuguugcugcagagcucaa

SEQ ID NO: 583750 - RNA, 22 nt, Human
gcaguguuucccagagauggaa

SEQ ID NO: 583751 - RNA, 22 nt, Human
aggaacuggugggaggugauug

SEQ ID NO: 583752 - RNA, 22 nt, Human
augcauaucagugauuguuugc

SEQ ID NO: 583753 - RNA, 22 nt, Human
cucaaaaugguuaauuuuaaua

SEQ ID NO: 583754 - RNA, 22 nt, Human
caagccugucucaccagugcua

SEQ ID NO: 583755 - RNA, 22 nt, Human
uuuugucuaagaacuuugcaaa

SEQ ID NO: 583756 - RNA, 22 nt, Human
acagccccagcgcggcgggguc

SEQ ID NO: 583757 - RNA, 22 nt, Human
ugggccacagcucacacaucca

SEQ ID NO: 583758 - RNA, 22 nt, Human
uguuagcugugcuuuagccuuc

SEQ ID NO: 583759 - RNA, 18 nt, Human
aagcagacagcagacagu

SEQ ID NO: 583760 - RNA, 22 nt, Human
aggcagcuucugauuagcagcg

SEQ ID NO: 583761 - RNA, 22 nt, Human
gguggcagaggugcaucagccc

SEQ ID NO: 583762 - RNA, 22 nt, Human
ggcccagacccaagaguggugg

SEQ ID NO: 583763 - RNA, 22 nt, Human
acugaggucaugcauaguuucu

SEQ ID NO: 583764 - RNA, 22 nt, Human
gguggcaguggucucugacaga

SEQ ID NO: 583765 - RNA, 22 nt, Human
ugaggugagucaugcauuggag

SEQ ID NO: 583766 - RNA, 22 nt, Human
cccaggaggcagagauagcagu

SEQ ID NO: 583767 - RNA, 18 nt, Human
aggcaggugcuggaaguc

SEQ ID NO: 583768 - RNA, 22 nt, Human
guuccuuguauuucagacauga

SEQ ID NO: 583769 - RNA, 22 nt, Human
ugccagagaggagaaagcauuu

SEQ ID NO: 583770 - RNA, 22 nt, Human
cucacuggcaagacuacaggug

SEQ ID NO: 583771 - RNA, 22 nt, Human
ggguugaggcggaugucggcgg

SEQ ID NO: 583772 - RNA, 22 nt, Human
uagagaaaagcagggaucagga

SEQ ID NO: 583773 - RNA, 22 nt, Human
acauggaagauaaaaauacuca

SEQ ID NO: 583774 - RNA, 16 nt, Human
ccucucuuauuccucc

SEQ ID NO: 583775 - RNA, 22 nt, Human
cauacagucacugugguaccac

SEQ ID NO: 583776 - RNA, 21 nt, Human
aaaguucaugcuuuaauauuc

SEQ ID NO: 583777 - RNA, 19 nt, Human
ugcaaucagcuacccaggu

SEQ ID NO: 583778 - RNA, 22 nt, Human
ugcuccagaaccugaccaugcu

SEQ ID NO: 583779 - RNA, 22 nt, Human
uuucuagaucaaacuuuuauau

SEQ ID NO: 583780 - RNA, 22 nt, Human
accagcacggauuagaaugcuu

SEQ ID NO: 583781 - RNA, 22 nt, Human
cauguucucuuaauguuaacua

SEQ ID NO: 583782 - RNA, 22 nt, Human
ucuguuuauucaauuucuauau

SEQ ID NO: 583783 - RNA, 22 nt, Human
cugucaguaggcucccaucauu

SEQ ID NO: 583784 - RNA, 22 nt, Human
uagcuuuguguaugaugucugu

SEQ ID NO: 583785 - RNA, 22 nt, Human
aaauaggaaugugguccuggga

SEQ ID NO: 583786 - RNA, 22 nt, Human
caggaaauucuuuuguuugugc

SEQ ID NO: 583787 - RNA, 22 nt, Human
ggcagcagggcugucucccuac

SEQ ID NO: 583788 - RNA, 22 nt, Human
uaaagaauaauacccauggagc

SEQ ID NO: 583789 - RNA, 22 nt, Human
gcaggcagguggcaucuuguga

SEQ ID NO: 583790 - RNA, 22 nt, Human
ccaggcugcuguugguguccgc

SEQ ID NO: 583791 - RNA, 22 nt, Human
cucagggcucugcaugcacacg

SEQ ID NO: 583792 - RNA, 22 nt, Human
cacagcagaacuuaauuucaaa

SEQ ID NO: 583793 - RNA, 22 nt, Human
ccacuugaaacuuaguggcaua

SEQ ID NO: 583794 - RNA, 22 nt, Human
uaguaaaaguuuaguugaaagu

SEQ ID NO: 583795 - RNA, 22 nt, Human
guuuacaugcagaaaaucaaug

SEQ ID NO: 583796 - RNA, 22 nt, Human
ucuuucuugguauaaagcaggg

SEQ ID NO: 583797 - RNA, 22 nt, Human
ccagcuccccucagcagguaau

SEQ ID NO: 583798 - RNA, 22 nt, Human
cggaagcguucucagcaggggc

SEQ ID NO: 583799 - RNA, 22 nt, Human
ucucuguagaccugaccagcac

SEQ ID NO: 583800 - RNA, 22 nt, Human
cacaggguuguucugaggauuc

SEQ ID NO: 583801 - RNA, 22 nt, Human
uuucugauaauuuugugaaauc

SEQ ID NO: 583802 - RNA, 22 nt, Human
auguauguucaagcaaugauua

SEQ ID NO: 583803 - RNA, 22 nt, Human
aaaaagauguccugaaguuuag

SEQ ID NO: 583804 - RNA, 22 nt, Human
uguggggguacacguacacaug

SEQ ID NO: 583805 - RNA, 22 nt, Human
agcugucaccaggagccggacc

SEQ ID NO: 583806 - RNA, 22 nt, Human
aucauaaagugcuaucugauug

SEQ ID NO: 583807 - RNA, 22 nt, Human
ucaggaacuucuaggaaagcug

SEQ ID NO: 583808 - RNA, 21 nt, Human
uaagccaccaugugaaaccag

SEQ ID NO: 583809 - RNA, 22 nt, Human
cuggccagacuacacaugugug

SEQ ID NO: 583810 - RNA, 22 nt, Human
acacaaauuguaggauaauugc

SEQ ID NO: 583811 - RNA, 17 nt, Human
auggcucaccugugggc

SEQ ID NO: 583812 - RNA, 22 nt, Human
uuccucacacucccccauucga

SEQ ID NO: 583813 - RNA, 19 nt, Human
gcuccuggaugaccugugg

SEQ ID NO: 583814 - RNA, 22 nt, Human
aggaaugguuauggggauagua

SEQ ID NO: 583815 - RNA, 20 nt, Human
gcccacucuaauccacuguc

SEQ ID NO: 583816 - RNA, 22 nt, Human
cugccucagcguuguggcccua

SEQ ID NO: 583817 - RNA, 22 nt, Human
gccucacauauucaugguuacu

SEQ ID NO: 583818 - RNA, 22 nt, Human
ucaauguccgggccccauucca

SEQ ID NO: 583819 - RNA, 23 nt, Human
guuaacaugguccauggaagagc

SEQ ID NO: 583820 - RNA, 22 nt, Human
augugaaaauccaauggcagca

SEQ ID NO: 583821 - RNA, 22 nt, Human
agggaggaaggauguuccaaag

SEQ ID NO: 583822 - RNA, 22 nt, Human
uuggccuucccuaccugggcca

SEQ ID NO: 583823 - RNA, 22 nt, Human
gagggaugguaguugacacuga

SEQ ID NO: 583824 - RNA, 22 nt, Human
ucaccaggcaacuauguacucc

SEQ ID NO: 583825 - RNA, 19 nt, Human
ggacacagaaagcugcauu

SEQ ID NO: 583826 - RNA, 22 nt, Human
aauacauaauaaguuuugucug

SEQ ID NO: 583827 - RNA, 22 nt, Human
agauaaaaugauuuucuggauc

SEQ ID NO: 583828 - RNA, 18 nt, Human
ugggauggagaguaacug

SEQ ID NO: 583829 - RNA, 22 nt, Human
gaaagaaugcuauagugacuuc

SEQ ID NO: 583830 - RNA, 22 nt, Human
ggguggagccaguugacucugu

SEQ ID NO: 583831 - RNA, 22 nt, Human
uaaagacaaacccacuaggguu

SEQ ID NO: 583832 - RNA, 22 nt, Human
gggagcacugagaggcagguag

SEQ ID NO: 583833 - RNA, 21 nt, Human
uaugcaguuuacuuagguauu

SEQ ID NO: 583834 - RNA, 22 nt, Human
augcuaaauaacugguuugacu

SEQ ID NO: 583835 - RNA, 22 nt, Human
caggcuggaguuaccuuuaggg

SEQ ID NO: 583836 - RNA, 22 nt, Human
ccagaggcuggcaagggcuccu

SEQ ID NO: 583837 - RNA, 22 nt, Human
cagcccuggcgcccccagaucu

SEQ ID NO: 583838 - RNA, 22 nt, Human
cuguacaaguccuucaucaggg

SEQ ID NO: 583839 - RNA, 22 nt, Human
cccuguccuuggcugugaggcu

SEQ ID NO: 583840 - RNA, 22 nt, Human
cccaggagguggagguugcagc

SEQ ID NO: 583841 - RNA, 22 nt, Human
gcagacagaugagggugcuggg

SEQ ID NO: 583842 - RNA, 22 nt, Human
aaagagcacccucaaugucuga

SEQ ID NO: 583843 - RNA, 22 nt, Human
gcugcccucucuggccccacac

SEQ ID NO: 583844 - RNA, 20 nt, Human
gcugccagugccugaugcuu

SEQ ID NO: 583845 - RNA, 22 nt, Human
ggagauggucuguucucauauu

SEQ ID NO: 583846 - RNA, 22 nt, Human
cuuucucuggaggggagugguu

SEQ ID NO: 583847 - RNA, 22 nt, Human
cuacugaagauaacuggcucuu

SEQ ID NO: 583848 - RNA, 18 nt, Human
ugaggcccgcagaggugg

SEQ ID NO: 583849 - RNA, 16 nt, Human
gaggggagcaguaggc

SEQ ID NO: 583850 - RNA, 22 nt, Human
uccaggugagugcaggugcaga

SEQ ID NO: 583851 - RNA, 22 nt, Human
aggucagguaucagcagguauu

SEQ ID NO: 583852 - RNA, 22 nt, Human
auggcagggcacagcucuaguu

SEQ ID NO: 583853 - RNA, 22 nt, Human
gcaaacaucuuagccauagagu

SEQ ID NO: 583854 - RNA, 22 nt, Human
ugauuuugagguuucaggucuu

SEQ ID NO: 583855 - RNA, 22 nt, Human
aggguggcaccuggaagggaug

SEQ ID NO: 583856 - RNA, 22 nt, Human
agcaucagccucuguccuggag

SEQ ID NO: 583857 - RNA, 22 nt, Human
augggcagagcuggugggaggc

SEQ ID NO: 583858 - RNA, 22 nt, Human
cccagaggaggaucucggcccg

SEQ ID NO: 583859 - RNA, 22 nt, Human
ccucaggauacaggagccacag

SEQ ID NO: 583860 - RNA, 22 nt, Human
cugugccaggcccagcugacuu

SEQ ID NO: 583861 - RNA, 22 nt, Human
ugauuagauaguaagugacuaa

SEQ ID NO: 583862 - RNA, 22 nt, Human
uuagaggaaagugacuccgaug

SEQ ID NO: 583863 - RNA, 22 nt, Human
cugcaguugguggguccucggu

SEQ ID NO: 583864 - RNA, 22 nt, Human
ugucuguggcaauuguggguaa

SEQ ID NO: 583865 - RNA, 22 nt, Human
cacugucugcuucgacucuuca

SEQ ID NO: 583866 - RNA, 22 nt, Human
aggaaaggauuggcuucucugu

SEQ ID NO: 583867 - RNA, 22 nt, Human
auuuuccucaagccucuggaag

SEQ ID NO: 583868 - RNA, 18 nt, Human
uggcaaguaaugacaaaa

SEQ ID NO: 583869 - RNA, 22 nt, Human
aagaauuuaaacuaaccauaug

SEQ ID NO: 583870 - RNA, 22 nt, Human
gaggcuaaguaacuguccaugg

SEQ ID NO: 583871 - RNA, 19 nt, Human
uuuugaaguaugagacagg

SEQ ID NO: 583872 - RNA, 22 nt, Human
ggaaagggcauggccuuuucac

SEQ ID NO: 583873 - RNA, 22 nt, Human
aauggagacccuaaggaagagg

SEQ ID NO: 583874 - RNA, 23 nt, Human
gccuggagaaaagcugcaguuca

SEQ ID NO: 583875 - RNA, 22 nt, Human
uuucaguuucauggcacagcua

SEQ ID NO: 583876 - RNA, 22 nt, Human
gagcucagcacuaaaaucaugu

SEQ ID NO: 583877 - RNA, 22 nt, Human
aauaagaauuuacuugucaaga

SEQ ID NO: 583878 - RNA, 22 nt, Human
cugcaguucuuuggcuuuuaga

SEQ ID NO: 583879 - RNA, 22 nt, Human
ucucuguauucugauauucacu

SEQ ID NO: 583880 - RNA, 22 nt, Human
aggcaggcccugggccaucccg

SEQ ID NO: 583881 - RNA, 22 nt, Human
aggcaggcucaggcccaugcuu

SEQ ID NO: 583882 - RNA, 22 nt, Human
ucugaggaauaagaaggaagug

SEQ ID NO: 583883 - RNA, 22 nt, Human
auguuuuuggaaaugggaacau

SEQ ID NO: 583884 - RNA, 22 nt, Human
ggcucaccauuuucacucucug

SEQ ID NO: 583885 - RNA, 22 nt, Human
gucagugguagggcuaguucag

SEQ ID NO: 583886 - RNA, 22 nt, Human
gcacaagaaaucauggacugaa

SEQ ID NO: 583887 - RNA, 22 nt, Human
uggagggcauagcuguucuuuc

SEQ ID NO: 583888 - RNA, 22 nt, Human
uugccuguuugagagcuguguu

SEQ ID NO: 583889 - RNA, 22 nt, Human
augaaguucuagugagaaaugc

SEQ ID NO: 583890 - RNA, 22 nt, Human
acaucuguaaucuagucaaccc

SEQ ID NO: 583891 - RNA, 17 nt, Human
cccuggcucuaggugga

SEQ ID NO: 583892 - RNA, 22 nt, Human
agggauggaagacuugaagacc

SEQ ID NO: 583893 - RNA, 23 nt, Human
caucagagguugccacucccugg

SEQ ID NO: 583894 - RNA, 21 nt, Human
acaggagaccgccuggcaguc

SEQ ID NO: 583895 - RNA, 19 nt, Human
ugggccugcaucugggucu

SEQ ID NO: 583896 - RNA, 22 nt, Human
ccuuuauucaauuaguccuaau

SEQ ID NO: 583897 - RNA, 22 nt, Human
gcacuucacaugccuuuuccug

SEQ ID NO: 583898 - RNA, 22 nt, Human
acucacagcagacuaugaggga

SEQ ID NO: 583899 - RNA, 22 nt, Human
uucuauaagacucauauuucuu

SEQ ID NO: 583900 - RNA, 22 nt, Human
auuucuccuuguugcaaugcag

SEQ ID NO: 583901 - RNA, 22 nt, Human
ugccaggcuuagagcaggggcu

SEQ ID NO: 583902 - RNA, 22 nt, Human
uggcuacaaguguguuuaguuu

SEQ ID NO: 583903 - RNA, 22 nt, Human
uuuuaucagcagggauaacaag

SEQ ID NO: 583904 - RNA, 22 nt, Human
aggcaggccccugagaauagac

SEQ ID NO: 583905 - RNA, 19 nt, Human
cccaggcuacauggagagg

SEQ ID NO: 583906 - RNA, 22 nt, Human
augaaugauuuuauguaaauga

SEQ ID NO: 583907 - RNA, 22 nt, Human
gacaagacagcuugcagacaac

SEQ ID NO: 583908 - RNA, 22 nt, Human
gggcagcucuuugguauccuuc

SEQ ID NO: 583909 - RNA, 22 nt, Human
cuccuggccccagaucccaauc

SEQ ID NO: 583910 - RNA, 22 nt, Human
ccagagccucaacacagguccu

SEQ ID NO: 583911 - RNA, 22 nt, Human
uacagacauucaauuuugaccc

SEQ ID NO: 583912 - RNA, 22 nt, Human
auuuacaggacagcuuggcauu

SEQ ID NO: 583913 - RNA, 22 nt, Human
gaugcuuuccaagaaauccuca

SEQ ID NO: 583914 - RNA, 22 nt, Human
aauauacuauacuacuuucugg

SEQ ID NO: 583915 - RNA, 22 nt, Human
cuuuugcacccagaguuauuug

SEQ ID NO: 583916 - RNA, 22 nt, Human
cccucccugaagaaguuacucu

SEQ ID NO: 583917 - RNA, 22 nt, Human
ggagugugggauggagcucagg

SEQ ID NO: 583918 - RNA, 22 nt, Human
cugugaauugcaacaauugcaa

SEQ ID NO: 583919 - RNA, 22 nt, Human
gugccuggagcuaauguguaua

SEQ ID NO: 583920 - RNA, 22 nt, Human
ccugaagcucuuaagaccuuua

SEQ ID NO: 583921 - RNA, 22 nt, Human
auuccugagacuuaucuguuuc

SEQ ID NO: 583922 - RNA, 22 nt, Human
cauggcaggaucugggcccaca

SEQ ID NO: 583923 - RNA, 22 nt, Human
uaauguuauaaauucuugguuu

SEQ ID NO: 583924 - RNA, 22 nt, Human
cagcucuuugaguauuccauuu

SEQ ID NO: 583925 - RNA, 21 nt, Human
ucuuuccaauauucaugucuc

SEQ ID NO: 583926 - RNA, 22 nt, Human
ucauuuaucgcugccuuuuaaa

SEQ ID NO: 583927 - RNA, 22 nt, Human
caccaggagcaucuaggaggcg

SEQ ID NO: 583928 - RNA, 22 nt, Human
aagucuuagcaacuaucgcuuu

SEQ ID NO: 583929 - RNA, 22 nt, Human
caggcagcucaaccuugggagc

SEQ ID NO: 583930 - RNA, 22 nt, Human
agcugggagcugaaggcugauu

SEQ ID NO: 583931 - RNA, 23 nt, Human
cuggcucauccugguugcagugg

SEQ ID NO: 583932 - RNA, 22 nt, Human
agacagcagggagcaggauuca

SEQ ID NO: 583933 - RNA, 22 nt, Human
uaaaucucagccuuucugcuua

SEQ ID NO: 583934 - RNA, 22 nt, Human
uugcuaauagaagauuugggaa

SEQ ID NO: 583935 - RNA, 22 nt, Human
uuggaggcaaugggaaggaggc

SEQ ID NO: 583936 - RNA, 22 nt, Human
agaggggcagggucuccggauu

SEQ ID NO: 583937 - RNA, 20 nt, Human
aggaacuggaagggaggaaa

SEQ ID NO: 583938 - RNA, 22 nt, Human
agagggagaaaagaaucaguug

SEQ ID NO: 583939 - RNA, 22 nt, Human
uacacagaaccugguguacagu

SEQ ID NO: 583940 - RNA, 22 nt, Human
aaugucuaugauccuuuaaguu

SEQ ID NO: 583941 - RNA, 22 nt, Human
guuaacuuuuuacagaaaugaa

SEQ ID NO: 583942 - RNA, 22 nt, Human
aguaauaauuuauauuagggag

SEQ ID NO: 583943 - RNA, 22 nt, Human
aaggggaaaaaguguuaggagu

SEQ ID NO: 583944 - RNA, 22 nt, Human
uccagggccaugaaguugcaca

SEQ ID NO: 583945 - RNA, 22 nt, Human
ggagagcagggaggcugcucug

SEQ ID NO: 583946 - RNA, 22 nt, Human
ugaagacacauacaagggaaug

SEQ ID NO: 583947 - RNA, 22 nt, Human
cugugcauuguugaguguuuag

SEQ ID NO: 583948 - RNA, 22 nt, Human
aacugcauuugcauaaguccau

SEQ ID NO: 583949 - RNA, 22 nt, Human
cuggcucuaagugucagcuccc

SEQ ID NO: 583950 - RNA, 22 nt, Human
guggggcuuccuggggcaaguu

SEQ ID NO: 583951 - RNA, 22 nt, Human
uccaggagaggccugaccaggu

SEQ ID NO: 583952 - RNA, 22 nt, Human
ucccaucuccaacauuuuucuu

SEQ ID NO: 583953 - RNA, 22 nt, Human
uuuugcaucuggugaagaccag

SEQ ID NO: 583954 - RNA, 22 nt, Human
agucuucugaauaagaaucacu

SEQ ID NO: 583955 - RNA, 22 nt, Human
aggaagcccaagucucaucuuc

SEQ ID NO: 583956 - RNA, 22 nt, Human
acuguacacgugucauuuacag

SEQ ID NO: 583957 - RNA, 17 nt, Human
aacacugggugagccuc

SEQ ID NO: 583958 - RNA, 22 nt, Human
ugugugcuaauguaugcucuaa

SEQ ID NO: 583959 - RNA, 22 nt, Human
cuggugcacaugaaagagaagg

SEQ ID NO: 583960 - RNA, 22 nt, Human
gcacuaaaccaacauguaauaa

SEQ ID NO: 583961 - RNA, 22 nt, Human
uuuccacuguagagauguugaa

SEQ ID NO: 583962 - RNA, 22 nt, Human
ucugcugaaucagauagcuaag

SEQ ID NO: 583963 - RNA, 22 nt, Human
aagaggacuugugaagauguac

SEQ ID NO: 583964 - RNA, 22 nt, Human
ucuucccagcugcugcgaugcc

SEQ ID NO: 583965 - RNA, 22 nt, Human
caugcagugaugcacugcauca

SEQ ID NO: 583966 - RNA, 22 nt, Human
cugaagaggacuggguuggagg

SEQ ID NO: 583967 - RNA, 22 nt, Human
gagcauggugcuucagugaagg

SEQ ID NO: 583968 - RNA, 22 nt, Human
uuuuccuaguaggccuauuaga

SEQ ID NO: 583969 - RNA, 22 nt, Human
gaacaacucuucuugagagaug

SEQ ID NO: 583970 - RNA, 22 nt, Human
uaauucaugggcccagugauau

SEQ ID NO: 583971 - RNA, 22 nt, Human
aaaauugaagugaucaggaacu

SEQ ID NO: 583972 - RNA, 22 nt, Human
gggaaaucucguccucuauuua

SEQ ID NO: 583973 - RNA, 22 nt, Human
gccugcaagauggcuggucacu

SEQ ID NO: 583974 - RNA, 22 nt, Human
ccuggugccacuagagaauguc

SEQ ID NO: 583975 - RNA, 22 nt, Human
uuucuaaucuuuaguuacaaaa

SEQ ID NO: 583976 - RNA, 22 nt, Human
uagugauucugauguaagacaa

SEQ ID NO: 583977 - RNA, 22 nt, Human
uucugaaaggcaugucagguag

SEQ ID NO: 583978 - RNA, 22 nt, Human
ugcaguggaaagacucagacuu

SEQ ID NO: 583979 - RNA, 22 nt, Human
aaguuccuguuacuccccagaa

SEQ ID NO: 583980 - RNA, 22 nt, Human
ccucagaacggaaaugguuuug

SEQ ID NO: 583981 - RNA, 22 nt, Human
auuuauuauugugguuacuucu

SEQ ID NO: 583982 - RNA, 22 nt, Human
uccugaggugcucagccaggaa

SEQ ID NO: 583983 - RNA, 22 nt, Human
auaauaacuccuguugaagaac

SEQ ID NO: 583984 - RNA, 22 nt, Human
agggaaauaaucuauucugagg

SEQ ID NO: 583985 - RNA, 20 nt, Human
agugagauugcugcucuagc

SEQ ID NO: 583986 - RNA, 22 nt, Human
agagauuucuacugcacucuuu

SEQ ID NO: 583987 - RNA, 22 nt, Human
uuuuuacagucauggucacuca

SEQ ID NO: 583988 - RNA, 22 nt, Human
cuaggcagacugagcucuaggg

SEQ ID NO: 583989 - RNA, 22 nt, Human
uauugcuuucucagacguuuag

SEQ ID NO: 583990 - RNA, 22 nt, Human
auggcaaaaauuaacagaucaa

SEQ ID NO: 583991 - RNA, 22 nt, Human
uaagugucucucgaauuaugcu

SEQ ID NO: 583992 - RNA, 20 nt, Human
aguaccuuuuguauguuacc

SEQ ID NO: 583993 - RNA, 22 nt, Human
aacacuguacuggaagauggac

SEQ ID NO: 583994 - RNA, 22 nt, Human
agguacauggggugugugcacg

SEQ ID NO: 583995 - RNA, 22 nt, Human
agcagcagggacaaaggaacag

SEQ ID NO: 583996 - RNA, 22 nt, Human
agggccagcugaugagaaugag

SEQ ID NO: 583997 - RNA, 20 nt, Human
aguagcagugugacauugac

SEQ ID NO: 583998 - RNA, 22 nt, Human
aagcugcuuugucaggaauaug

SEQ ID NO: 583999 - RNA, 22 nt, Human
aguuucuaacauauagcauugg

SEQ ID NO: 584000 - RNA, 22 nt, Human
aagaggaggaugcuuuacagcu

SEQ ID NO: 584001 - RNA, 22 nt, Human
ggccuugggaggagggucagaa

SEQ ID NO: 584002 - RNA, 22 nt, Human
gcaguccaaaguggcucucacc

SEQ ID NO: 584003 - RNA, 22 nt, Human
cacugcagcaccaugcagggcu

SEQ ID NO: 584004 - RNA, 22 nt, Human
uccugaggaaugugaagagaac

SEQ ID NO: 584005 - RNA, 22 nt, Human
ccugggcaacauagugagaccc

SEQ ID NO: 584006 - RNA, 22 nt, Human
auauaccugaaguugguaauua

SEQ ID NO: 584007 - RNA, 22 nt, Human
cagagugggcugucagccacca

SEQ ID NO: 584008 - RNA, 22 nt, Human
aauaagaucuuaaagguuauau

SEQ ID NO: 584009 - RNA, 22 nt, Human
cagcagcucccauccgcugagc

SEQ ID NO: 584010 - RNA, 22 nt, Human
ucaagucuggagaucuggaacu

SEQ ID NO: 584011 - RNA, 22 nt, Human
uuaaagcaucacacuauuaauu

SEQ ID NO: 584012 - RNA, 22 nt, Human
uuuucuccuaagacccuucacc

SEQ ID NO: 584013 - RNA, 19 nt, Human
acagaagcauagaaaagga

SEQ ID NO: 584014 - RNA, 19 nt, Human
accuuugagaagaaauguc

SEQ ID NO: 584015 - RNA, 22 nt, Human
gaaacagcacguuuggagagau

SEQ ID NO: 584016 - RNA, 22 nt, Human
ugcacaguguaaugaaucagaa

SEQ ID NO: 584017 - RNA, 22 nt, Human
ccagcaccuugaucuuggaguu

SEQ ID NO: 584018 - RNA, 22 nt, Human
uuuguucugcaucacagaaaaa

SEQ ID NO: 584019 - RNA, 22 nt, Human
acagccugcugccugcuucuug

SEQ ID NO: 584020 - RNA, 22 nt, Human
aacuguaaugaauuguucauga

SEQ ID NO: 584021 - RNA, 22 nt, Human
augaagcagcguuguagaguga

SEQ ID NO: 584022 - RNA, 22 nt, Human
guggcaggucccauuggagcag

SEQ ID NO: 584023 - RNA, 22 nt, Human
cauaaauuguacccauuccaac

SEQ ID NO: 584024 - RNA, 22 nt, Human
gcggcgccuaagccccgaccuc

SEQ ID NO: 584025 - RNA, 22 nt, Human
ugcaggugccucuugagcuugu

SEQ ID NO: 584026 - RNA, 22 nt, Human
auuucccacucuacuacaugcu

SEQ ID NO: 584027 - RNA, 22 nt, Human
cccagguggguuggccucuguc

SEQ ID NO: 584028 - RNA, 22 nt, Human
aggcugagguaggaggaucgcu

SEQ ID NO: 584029 - RNA, 22 nt, Human
ggggacagucgaucuagugauu

SEQ ID NO: 584030 - RNA, 22 nt, Human
caggagugaaaugaggcccagg

SEQ ID NO: 584031 - RNA, 22 nt, Human
ucuguuauucugcucaguauag

SEQ ID NO: 584032 - RNA, 22 nt, Human
ugaggccagaguuuuuaauucc

SEQ ID NO: 584033 - RNA, 21 nt, Human
gucacacaggccuggagcuga

SEQ ID NO: 584034 - RNA, 22 nt, Human
aggagcagcuucugaaccaugu

SEQ ID NO: 584035 - RNA, 22 nt, Human
ucauggaaacagcaaugcuaau

SEQ ID NO: 584036 - RNA, 19 nt, Human
gacuacagggggaagaagu

SEQ ID NO: 584037 - RNA, 22 nt, Human
cagcaguggcugcaggcagcug

SEQ ID NO: 584038 - RNA, 22 nt, Human
cugugguggcacagcgggcugg

SEQ ID NO: 584039 - RNA, 22 nt, Human
ugccugggggacuaaggccaaa

SEQ ID NO: 584040 - RNA, 21 nt, Human
gggaggaagcugcuucucucu

SEQ ID NO: 584041 - RNA, 22 nt, Human
auaucuaccuagcuuaggcuga

SEQ ID NO: 584042 - RNA, 22 nt, Human
gaugucuuggcuugcucucugu

SEQ ID NO: 584043 - RNA, 17 nt, Human
cccugccaccaggaagc

SEQ ID NO: 584044 - RNA, 22 nt, Human
ucuguucagguuucagagaacu

SEQ ID NO: 584045 - RNA, 22 nt, Human
gagcagaugugugccaggaugc

SEQ ID NO: 584046 - RNA, 22 nt, Human
uccagcuccucuacccgaugcg

SEQ ID NO: 584047 - RNA, 22 nt, Human
gagauggggaauaggagcaagc

SEQ ID NO: 584048 - RNA, 22 nt, Human
uggugcagguguugaugcagga

SEQ ID NO: 584049 - RNA, 22 nt, Human
auguuucauuuagauaucaggc

SEQ ID NO: 584050 - RNA, 22 nt, Human
cuucaguuaugugccaaggaca

SEQ ID NO: 584051 - RNA, 20 nt, Human
ccuggccaaugagauaggaa

SEQ ID NO: 584052 - RNA, 22 nt, Human
uuucaggauuaguuuaagcagg

SEQ ID NO: 584053 - RNA, 22 nt, Human
gcaguggcaugaugugggcuca

SEQ ID NO: 584054 - RNA, 22 nt, Human
gugggagcccucagggaggugc

SEQ ID NO: 584055 - RNA, 23 nt, Human
uggcuccaugaaaauuacgagga

SEQ ID NO: 584056 - RNA, 22 nt, Human
caaaugaaaauggcgucuugga

SEQ ID NO: 584057 - RNA, 22 nt, Human
ccugucuguccuuugcauucuu

SEQ ID NO: 584058 - RNA, 22 nt, Human
aaggcuggggugcagacggccu

SEQ ID NO: 584059 - RNA, 22 nt, Human
cacuccaggucccaguuccugg

SEQ ID NO: 584060 - RNA, 22 nt, Human
gaacacagugugaucguauguc

SEQ ID NO: 584061 - RNA, 22 nt, Human
ucagaggauugccucagcgagc

SEQ ID NO: 584062 - RNA, 22 nt, Human
aacaucacaauuucauuuaugc

SEQ ID NO: 584063 - RNA, 22 nt, Human
uugaggucuuugagcaaacgca

SEQ ID NO: 584064 - RNA, 22 nt, Human
uauacucugagaaacgugucac

SEQ ID NO: 584065 - RNA, 19 nt, Human
aaagcagaggagcaucuga

SEQ ID NO: 584066 - RNA, 22 nt, Human
uggcauggcauuuagagaauua

SEQ ID NO: 584067 - RNA, 22 nt, Human
ucccaggaucugagggcagaga

SEQ ID NO: 584068 - RNA, 22 nt, Human
cuuagcagaauuccaagcuuga

SEQ ID NO: 584069 - RNA, 22 nt, Human
ucccaggguccucuucuggaau

SEQ ID NO: 584070 - RNA, 19 nt, Human
gccaugggcuggcagcaga

SEQ ID NO: 584071 - RNA, 22 nt, Human
ucaggcuggagugcaguggcgc

SEQ ID NO: 584072 - RNA, 22 nt, Human
gaagaagcaggaguguguagca

SEQ ID NO: 584073 - RNA, 22 nt, Human
gggcagcugccagaggccaugg

SEQ ID NO: 584074 - RNA, 21 nt, Human
uguuuuccaccuugaggcaag

SEQ ID NO: 584075 - RNA, 22 nt, Human
aggaagaaaacuaauuagaugg

SEQ ID NO: 584076 - RNA, 20 nt, Human
aaagauacuuuuuguaaugg

SEQ ID NO: 584077 - RNA, 22 nt, Human
ggcaguggcuccucucuacucc

SEQ ID NO: 584078 - RNA, 22 nt, Human
augaaugaagaacaucugugcc

SEQ ID NO: 584079 - RNA, 22 nt, Human
ucaauauagcaguguacuugag

SEQ ID NO: 584080 - RNA, 22 nt, Human
gagcacagcuggagguagcauu

SEQ ID NO: 584081 - RNA, 22 nt, Human
uuccugguaaauuauguccagg

SEQ ID NO: 584082 - RNA, 22 nt, Human
ugcagccaggaaauauuugcug

SEQ ID NO: 584083 - RNA, 22 nt, Human
auaguguguaaagugcagugau

SEQ ID NO: 584084 - RNA, 22 nt, Human
uaaugcaacgugagauaauuaa

SEQ ID NO: 584085 - RNA, 22 nt, Human
gugggaugcaguggugaguggc

SEQ ID NO: 584086 - RNA, 22 nt, Human
cugccugcguugccucgugccu

SEQ ID NO: 584087 - RNA, 22 nt, Human
agggcagaggcggacacggaag

SEQ ID NO: 584088 - RNA, 22 nt, Human
gggaagccaugcucagagguac

SEQ ID NO: 584089 - RNA, 22 nt, Human
gcagagcuguuaauggagcuga

SEQ ID NO: 584090 - RNA, 22 nt, Human
acugucauuaaugaauguaaua

SEQ ID NO: 584091 - RNA, 22 nt, Human
uucccagguaauucugaggcag

SEQ ID NO: 584092 - RNA, 22 nt, Human
ugaaugaguggauucugaguag

SEQ ID NO: 584093 - RNA, 22 nt, Human
cagaagaauggugucugagcuc

SEQ ID NO: 584094 - RNA, 22 nt, Human
cagguccuuuaguguccagaac

SEQ ID NO: 584095 - RNA, 22 nt, Human
gggggagagacgagcggcucug

SEQ ID NO: 584096 - RNA, 17 nt, Human
ugagaaguaggcaucau

SEQ ID NO: 584097 - RNA, 22 nt, Human
uuccugaaaauacagggagacc

SEQ ID NO: 584098 - RNA, 22 nt, Human
cacauuuaagugcuuguucaga

SEQ ID NO: 584099 - RNA, 22 nt, Human
cuggagcaggcuugucccagcu

SEQ ID NO: 584100 - RNA, 22 nt, Human
agcaucuggugagggccuaguu

SEQ ID NO: 584101 - RNA, 23 nt, Human
uuccacaaugaaaauaaagcagg

SEQ ID NO: 584102 - RNA, 22 nt, Human
auuuucaugacuaccuuaaaua

SEQ ID NO: 584103 - RNA, 22 nt, Human
ucaggaaagaguguauccauca

SEQ ID NO: 584104 - RNA, 22 nt, Human
auuccauuguguaaggauaucg

SEQ ID NO: 584105 - RNA, 22 nt, Human
gagcucagcccaaagagcagug

SEQ ID NO: 584106 - RNA, 22 nt, Human
ugaaggcaaccucugugguccu

SEQ ID NO: 584107 - RNA, 22 nt, Human
cacaaggacuggauggaguggg

SEQ ID NO: 584108 - RNA, 18 nt, Human
aggccagcccugcuacug

SEQ ID NO: 584109 - RNA, 22 nt, Human
uccugccugagcguggaggagg

SEQ ID NO: 584110 - RNA, 22 nt, Human
aagggcuggccacauucugggu

SEQ ID NO: 584111 - RNA, 22 nt, Human
uggggcagcagaccuuucuugg

SEQ ID NO: 584112 - RNA, 22 nt, Human
caguggcaugguugacugcagu

SEQ ID NO: 584113 - RNA, 22 nt, Human
aggcccugaccugggagaucua

SEQ ID NO: 584114 - RNA, 22 nt, Human
accugcagcuaaagauguaggg

SEQ ID NO: 584115 - RNA, 22 nt, Human
gcugccaugccacagcacucac

SEQ ID NO: 584116 - RNA, 22 nt, Human
ggaggccagaaucuguguugga

SEQ ID NO: 584117 - RNA, 22 nt, Human
aaaaguuaccucuguaauauaa

SEQ ID NO: 584118 - RNA, 22 nt, Human
uuaccaagcucugcauguuaag

SEQ ID NO: 584119 - RNA, 23 nt, Human
uccagcucccuucaauggcacug

SEQ ID NO: 584120 - RNA, 22 nt, Human
ccacugcccccugaagaccagg

SEQ ID NO: 584121 - RNA, 22 nt, Human
cacaggaggaggccagagcgua

SEQ ID NO: 584122 - RNA, 22 nt, Human
guagcuuauuagggauaauagu

SEQ ID NO: 584123 - RNA, 22 nt, Human
cuacauuuuaauaagcugcuua

SEQ ID NO: 584124 - RNA, 22 nt, Human
uuccagagaggcucauguuccc

SEQ ID NO: 584125 - RNA, 22 nt, Human
ugaaugauauauugggaauaau

SEQ ID NO: 584126 - RNA, 22 nt, Human
uggcucaguuugggggauugaa

SEQ ID NO: 584127 - RNA, 22 nt, Human
auuucucuaagcauccguuugc

SEQ ID NO: 584128 - RNA, 22 nt, Human
ggauuugggcuugcagcagagc

SEQ ID NO: 584129 - RNA, 23 nt, Human
auccaugcuuaaguaaucauuug

SEQ ID NO: 584130 - RNA, 22 nt, Human
uuuuguguccuucacaucaugu

SEQ ID NO: 584131 - RNA, 22 nt, Human
cccagcuccgagcuccgagccg

SEQ ID NO: 584132 - RNA, 22 nt, Human
gaaaacauccagagauagaccu

SEQ ID NO: 584133 - RNA, 22 nt, Human
uauuucuauuccccaggcaagu

SEQ ID NO: 584134 - RNA, 22 nt, Human
cuuacaaaggagaggagauagg

SEQ ID NO: 584135 - RNA, 22 nt, Human
ggcacacauggugguuggugaa

SEQ ID NO: 584136 - RNA, 23 nt, Human
auuugacagagcauagcauuucu

SEQ ID NO: 584137 - RNA, 21 nt, Human
agcugcagucaagccagaggu

SEQ ID NO: 584138 - RNA, 22 nt, Human
ugagcagaagauuggaacuuac

SEQ ID NO: 584139 - RNA, 22 nt, Human
ggggugggagugccauccuuga

SEQ ID NO: 584140 - RNA, 20 nt, Human
ugaagcagccuugauucugu

SEQ ID NO: 584141 - RNA, 22 nt, Human
ucacagcacccugaggugcugg

SEQ ID NO: 584142 - RNA, 22 nt, Human
uuugugcauucaaguaggagcc

SEQ ID NO: 584143 - RNA, 22 nt, Human
ggcugaggguauagcuguccca

SEQ ID NO: 584144 - RNA, 22 nt, Human
uaucuacaguuaauaugucauc

SEQ ID NO: 584145 - RNA, 22 nt, Human
gggucagcugcugggggcugac

SEQ ID NO: 584146 - RNA, 18 nt, Human
ugugguggagcugccuuc

SEQ ID NO: 584147 - RNA, 22 nt, Human
uucacaaagcuggagcauuucc

SEQ ID NO: 584148 - RNA, 22 nt, Human
cccuggagggcagacagaugcc

SEQ ID NO: 584149 - RNA, 19 nt, Human
auagcagcuauacccagau

SEQ ID NO: 584150 - RNA, 22 nt, Human
cagcauggcuugaguguuuccu

SEQ ID NO: 584151 - RNA, 21 nt, Human
agcugcuuucagcuccuagag

SEQ ID NO: 584152 - RNA, 22 nt, Human
ggcaggcaaggcagccugguga

SEQ ID NO: 584153 - RNA, 22 nt, Human
uugauauuagaguauuuguuug

SEQ ID NO: 584154 - RNA, 22 nt, Human
ugucuacuugggcucuacagca

SEQ ID NO: 584155 - RNA, 22 nt, Human
gaacauucacagacucaccauu

SEQ ID NO: 584156 - RNA, 22 nt, Human
aaucugagggaacuugaacucc

SEQ ID NO: 584157 - RNA, 22 nt, Human
uggcagcugauuagauggugcc

SEQ ID NO: 584158 - RNA, 22 nt, Human
ucuccaggugcuaagugugccu

SEQ ID NO: 584159 - RNA, 22 nt, Human
accagagauggggcuucucugu

SEQ ID NO: 584160 - RNA, 22 nt, Human
ugaaucuauguugccccauaau

SEQ ID NO: 584161 - RNA, 22 nt, Human
agcugccacugagggugcacag

SEQ ID NO: 584162 - RNA, 22 nt, Human
cucagggacggaggcuugcgga

SEQ ID NO: 584163 - RNA, 22 nt, Human
augaacaugugacucagaccug

SEQ ID NO: 584164 - RNA, 23 nt, Human
augcaguauaugucaguaguuua

SEQ ID NO: 584165 - RNA, 22 nt, Human
uuucugaggaauuaauacagaa

SEQ ID NO: 584166 - RNA, 22 nt, Human
gugcugaggccaaugucagggu

SEQ ID NO: 584167 - RNA, 21 nt, Human
aggcccagcuuuccucuugcu

SEQ ID NO: 584168 - RNA, 22 nt, Human
aauagcuuauugacagugaauu

SEQ ID NO: 584169 - RNA, 22 nt, Human
gaggcugaaguguacaugggug

SEQ ID NO: 584170 - RNA, 21 nt, Human
caauaaacugcacauugagac

SEQ ID NO: 584171 - RNA, 22 nt, Human
ucugcacauagguaggcuggaa

SEQ ID NO: 584172 - RNA, 22 nt, Human
aaggcaguucacucacgcagcc

SEQ ID NO: 584173 - RNA, 19 nt, Human
cuguuucugagcuugcuuu

SEQ ID NO: 584174 - RNA, 22 nt, Human
ucucuggagggcuccaggcggg

SEQ ID NO: 584175 - RNA, 22 nt, Human
uacacuguuugaacuguggucg

SEQ ID NO: 584176 - RNA, 22 nt, Human
ucagcacugaaucuggauuugc

SEQ ID NO: 584177 - RNA, 22 nt, Human
guguugaugacauuuuagaaac

SEQ ID NO: 584178 - RNA, 22 nt, Human
uuuacagggaauauuuuggcuu

SEQ ID NO: 584179 - RNA, 22 nt, Human
gcuuacaagaucgugcuccagu

SEQ ID NO: 584180 - RNA, 22 nt, Human
uccuccugucuaccaguuccug

SEQ ID NO: 584181 - RNA, 22 nt, Human
cuggcucuuuccuagcuaggcu

SEQ ID NO: 584182 - RNA, 22 nt, Human
gggcucagacaucccuccugga

SEQ ID NO: 584183 - RNA, 22 nt, Human
ucagggaauaaguagaugagug

SEQ ID NO: 584184 - RNA, 22 nt, Human
ugguuugacaaugaggacuggu

SEQ ID NO: 584185 - RNA, 20 nt, Human
cacugggcuggagucagggc

SEQ ID NO: 584186 - RNA, 22 nt, Human
gcagcuggagccagccagacac

SEQ ID NO: 584187 - RNA, 22 nt, Human
ucugccugagaaguggggugcc

SEQ ID NO: 584188 - RNA, 22 nt, Human
ugagagagccugaaucucuuac

SEQ ID NO: 584189 - RNA, 20 nt, Human
ugcagcugcaggaggguggg

SEQ ID NO: 584190 - RNA, 20 nt, Human
ggccuuggguuucgccuguu

SEQ ID NO: 584191 - RNA, 22 nt, Human
caggggaaggagccuugaaacu

SEQ ID NO: 584192 - RNA, 22 nt, Human
uggaaguggcagaaaaugaaca

SEQ ID NO: 584193 - RNA, 15 nt, Human
cagucccagggaccc

SEQ ID NO: 584194 - RNA, 22 nt, Human
ucuuuugagggccagaggaaga

SEQ ID NO: 584195 - RNA, 22 nt, Human
gggauggggucgggacccugcu

SEQ ID NO: 584196 - RNA, 22 nt, Human
augcaguuugcuucgcagcagu

SEQ ID NO: 584197 - RNA, 22 nt, Human
gcagcuuggauuucuguaguuu

SEQ ID NO: 584198 - RNA, 22 nt, Human
ugggcagaggacagggaagauc

SEQ ID NO: 584199 - RNA, 22 nt, Human
agaaucugcauuuuaacaagau

SEQ ID NO: 584200 - RNA, 22 nt, Human
cagcagcauugcucuggauucc

SEQ ID NO: 584201 - RNA, 22 nt, Human
ccacugauccugacuuuggagc

SEQ ID NO: 584202 - RNA, 22 nt, Human
ucuguacaccaggggccauucu

SEQ ID NO: 584203 - RNA, 22 nt, Human
uucaacaagucuuuuuucacug

SEQ ID NO: 584204 - RNA, 22 nt, Human
cagccagcuggcacugugagua

SEQ ID NO: 584205 - RNA, 22 nt, Human
uaguagcaaaacucaucucuuu

SEQ ID NO: 584206 - RNA, 17 nt, Human
agagagaaaagggccau

SEQ ID NO: 584207 - RNA, 20 nt, Human
ugugugcuaggacuacagug

SEQ ID NO: 584208 - RNA, 22 nt, Human
agagcuguggauaguccuggau

SEQ ID NO: 584209 - RNA, 22 nt, Human
ugcugcuggguuugacagucac

SEQ ID NO: 584210 - RNA, 22 nt, Human
aaagacauuagauuaacguaca

SEQ ID NO: 584211 - RNA, 22 nt, Human
aggcucccaugguguggcagga

SEQ ID NO: 584212 - RNA, 19 nt, Human
ugucuccuccccgccgucu

SEQ ID NO: 584213 - RNA, 22 nt, Human
cugaggugagaggaggccaugu

SEQ ID NO: 584214 - RNA, 22 nt, Human
ggccaggaacuuuugggauggg

SEQ ID NO: 584215 - RNA, 22 nt, Human
ugagaaaaguguggaggucaau

SEQ ID NO: 584216 - RNA, 19 nt, Human
ccucaaguaugaagaggcc

SEQ ID NO: 584217 - RNA, 22 nt, Human
uguuuacagaaggcagacuucc

SEQ ID NO: 584218 - RNA, 23 nt, Human
acacaauagaguacuauucagcc

SEQ ID NO: 584219 - RNA, 22 nt, Human
guauuucugguaacugcugcua

SEQ ID NO: 584220 - RNA, 22 nt, Human
agaugugccuccaaggggugca

SEQ ID NO: 584221 - RNA, 22 nt, Human
acagaacauauugcuucucuca

SEQ ID NO: 584222 - RNA, 22 nt, Human
augcuuccaaggcuaagacaag

SEQ ID NO: 584223 - RNA, 22 nt, Human
uuuuccuuugaaaggugagggc

SEQ ID NO: 584224 - RNA, 22 nt, Human
aagcagccaccucaucuccacu

SEQ ID NO: 584225 - RNA, 22 nt, Human
acuugcaaagugagggaguguu

SEQ ID NO: 584226 - RNA, 22 nt, Human
ucaguguggguaagcaugcugu

SEQ ID NO: 584227 - RNA, 22 nt, Human
uuuccuaagauagauacuucag

SEQ ID NO: 584228 - RNA, 22 nt, Human
uaggaaaagcacaggauguucu

SEQ ID NO: 584229 - RNA, 22 nt, Human
ugggccugggcuccuguccucu

SEQ ID NO: 584230 - RNA, 22 nt, Human
ugccuugguuuccccaucugua

SEQ ID NO: 584231 - RNA, 22 nt, Human
gguagcaucuuuggauguuauu

SEQ ID NO: 584232 - RNA, 22 nt, Human
gaggggcacaguaaaggguccc

SEQ ID NO: 584233 - RNA, 22 nt, Human
agggccugggauguccuccuag

SEQ ID NO: 584234 - RNA, 22 nt, Human
gagaggggcgcgcagcucgcga

SEQ ID NO: 584235 - RNA, 22 nt, Human
uaggcugggaagaaagauucuc

SEQ ID NO: 584236 - RNA, 22 nt, Human
cccaggaggcagagcuugcagu

SEQ ID NO: 584237 - RNA, 22 nt, Human
ggguaggcaaagcaaugacguu

SEQ ID NO: 584238 - RNA, 21 nt, Human
aaggaaaagcuuggucucuga

SEQ ID NO: 584239 - RNA, 22 nt, Human
gauuuuaucuuugugugcagua

SEQ ID NO: 584240 - RNA, 22 nt, Human
gugggcugcuuccuccuuccac

SEQ ID NO: 584241 - RNA, 21 nt, Human
cucuguguugaggguguugag

SEQ ID NO: 584242 - RNA, 22 nt, Human
ggucccagcugcucaagaggcu

SEQ ID NO: 584243 - RNA, 22 nt, Human
caaggacacugagcuuuguaaa

SEQ ID NO: 584244 - RNA, 23 nt, Human
caggcaggaugaggacuacacuc

SEQ ID NO: 584245 - RNA, 22 nt, Human
uucuccuuauucauaguugucu

SEQ ID NO: 584246 - RNA, 22 nt, Human
acuaaaacaguggcuaguagac

SEQ ID NO: 584247 - RNA, 22 nt, Human
agacagugauucuucacauuuc

SEQ ID NO: 584248 - RNA, 22 nt, Human
uggccuugagaugcagcagcca

SEQ ID NO: 584249 - RNA, 22 nt, Human
acugugcaugaaccgaaacaaa

SEQ ID NO: 584250 - RNA, 23 nt, Human
auccaugugagaauagacuagca

SEQ ID NO: 584251 - RNA, 22 nt, Human
aacccaggguggagguugcagu

SEQ ID NO: 584252 - RNA, 17 nt, Human
gccaggagguuugagcu

SEQ ID NO: 584253 - RNA, 22 nt, Human
auacacacugcuauccuuuuuu

SEQ ID NO: 584254 - RNA, 22 nt, Human
ucucacaccgucccuaaaccau

SEQ ID NO: 584255 - RNA, 21 nt, Human
cccaggaggagcuccggcucc

SEQ ID NO: 584256 - RNA, 22 nt, Human
ccugccuggaucagccauccug

SEQ ID NO: 584257 - RNA, 22 nt, Human
gcuggggccugaacagucagcu

SEQ ID NO: 584258 - RNA, 22 nt, Human
ugggauucaccaugggcuucag

SEQ ID NO: 584259 - RNA, 22 nt, Human
acccagugacauccuuuaccug

SEQ ID NO: 584260 - RNA, 22 nt, Human
ucagaacagguuguacuauguc

SEQ ID NO: 584261 - RNA, 22 nt, Human
auuuacauuuauuugagaaggu

SEQ ID NO: 584262 - RNA, 22 nt, Human
cacauaauaaauguuccugaug

SEQ ID NO: 584263 - RNA, 22 nt, Human
auguuuuauguuccacucaagg

SEQ ID NO: 584264 - RNA, 22 nt, Human
uauuauuauauuggaugagacu

SEQ ID NO: 584265 - RNA, 22 nt, Human
gcccugcugucuucagaguaua

SEQ ID NO: 584266 - RNA, 22 nt, Human
cugcugggucccccugcugauu

SEQ ID NO: 584267 - RNA, 22 nt, Human
gguaaacuaaccauuuuaauuu

SEQ ID NO: 584268 - RNA, 22 nt, Human
cuuuuguuaggagaaaacauca

SEQ ID NO: 584269 - RNA, 22 nt, Human
ugcugaauaaagauauauuuuc

SEQ ID NO: 584270 - RNA, 22 nt, Human
ugagaagcaguuucaguaagaa

SEQ ID NO: 584271 - RNA, 22 nt, Human
cugagucucccggcaguggagg

SEQ ID NO: 584272 - RNA, 22 nt, Human
agaaucugcauuuuaacaagcc

SEQ ID NO: 584273 - RNA, 17 nt, Human
cugaggauuaugguugu

SEQ ID NO: 584274 - RNA, 22 nt, Human
uuccaggcacaucccaacucca

SEQ ID NO: 584275 - RNA, 22 nt, Human
auugauuucugcuuacucacug

SEQ ID NO: 584276 - RNA, 22 nt, Human
ucacaaugaaaaacacuacaua

SEQ ID NO: 584277 - RNA, 20 nt, Human
uuccuguccucucuuucagg

SEQ ID NO: 584278 - RNA, 22 nt, Human
ucccagggucaguggugaggcc

SEQ ID NO: 584279 - RNA, 22 nt, Human
ggcagcugaccuagcaccaucc

SEQ ID NO: 584280 - RNA, 21 nt, Human
acagcagggcuggcaugacag

SEQ ID NO: 584281 - RNA, 22 nt, Human
aaugcuacagaagugaucuugg

SEQ ID NO: 584282 - RNA, 22 nt, Human
agcagauggagaauggagucag

SEQ ID NO: 584283 - RNA, 22 nt, Human
ccugcagguaaggcuaacugcc

SEQ ID NO: 584284 - RNA, 22 nt, Human
cucugggcaaguuucuucauga

SEQ ID NO: 584285 - RNA, 22 nt, Human
ggcagccaugugggcagcgagu

SEQ ID NO: 584286 - RNA, 22 nt, Human
gacuuagacccugucuuuauuc

SEQ ID NO: 584287 - RNA, 22 nt, Human
ugaagggcaaccccaggcccag

SEQ ID NO: 584288 - RNA, 21 nt, Human
uuaagacacacagauuaagga

SEQ ID NO: 584289 - RNA, 21 nt, Human
uagagaugacgagcucuagca

SEQ ID NO: 584290 - RNA, 17 nt, Human
acaacagaaauguauuc

SEQ ID NO: 584291 - RNA, 22 nt, Human
aggccaggauagcauggaucag

SEQ ID NO: 584292 - RNA, 22 nt, Human
agaguuuggagguguuccugga

SEQ ID NO: 584293 - RNA, 22 nt, Human
caggagagauaugaguccccac

SEQ ID NO: 584294 - RNA, 23 nt, Human
ugucacauuuaguuggcauuguu

SEQ ID NO: 584295 - RNA, 22 nt, Human
agcacagggcccagccuaggcc

SEQ ID NO: 584296 - RNA, 22 nt, Human
aaaauuuugcccuauccuucau

SEQ ID NO: 584297 - RNA, 22 nt, Human
ucagcuccucagagccucaguu

SEQ ID NO: 584298 - RNA, 22 nt, Human
ugaggcucauucugcaugccaa

SEQ ID NO: 584299 - RNA, 22 nt, Human
gugcaaaaguacuugcggauuu

SEQ ID NO: 584300 - RNA, 22 nt, Human
cagcuuuggcccagucgggagg

SEQ ID NO: 584301 - RNA, 22 nt, Human
cuagagaaucuuuuaagaagug

SEQ ID NO: 584302 - RNA, 22 nt, Human
agauggguaacuggagucugcu

SEQ ID NO: 584303 - RNA, 22 nt, Human
uguaaacaguaggacuaaagag

SEQ ID NO: 584304 - RNA, 22 nt, Human
uaaaucucagggaauauauuga

SEQ ID NO: 584305 - RNA, 22 nt, Human
gggagcugagggaccucugugg

SEQ ID NO: 584306 - RNA, 22 nt, Human
gggggccuuauucaucugccag

SEQ ID NO: 584307 - RNA, 22 nt, Human
ccuccugguccagcaucucuuu

SEQ ID NO: 584308 - RNA, 22 nt, Human
uuucaaaagcguacguagugaa

SEQ ID NO: 584309 - RNA, 22 nt, Human
agagcuguuaauuuugcacugg

SEQ ID NO: 584310 - RNA, 22 nt, Human
cuuccaagaugaacagcaagcg

SEQ ID NO: 584311 - RNA, 22 nt, Human
guucacagaaauuguguaccuc

SEQ ID NO: 584312 - RNA, 22 nt, Human
ucucaaauggacaauauugugg

SEQ ID NO: 584313 - RNA, 22 nt, Human
aggaaagauggaaggaggauaa

SEQ ID NO: 584314 - RNA, 22 nt, Human
gccuggaggggacagucucugg

SEQ ID NO: 584315 - RNA, 23 nt, Human
ggccuccuggucuaggcuagacu

SEQ ID NO: 584316 - RNA, 20 nt, Human
gagcugaguguggucauggg

SEQ ID NO: 584317 - RNA, 23 nt, Human
agggccaggugcggaaacagcuc

SEQ ID NO: 584318 - RNA, 22 nt, Human
auaagcucuggacagccacauu

SEQ ID NO: 584319 - RNA, 22 nt, Human
augcaaaaguaacugugauuuu

SEQ ID NO: 584320 - RNA, 22 nt, Human
aggaauuugggguuacaugaug

SEQ ID NO: 584321 - RNA, 22 nt, Human
caggcaagauuagagaugagca

SEQ ID NO: 584322 - RNA, 22 nt, Human
guguggcugauugacaugguca

SEQ ID NO: 584323 - RNA, 22 nt, Human
ggcuggcuggcuuagcagagga

SEQ ID NO: 584324 - RNA, 22 nt, Human
ugcugaggaaagaggauaaaag

SEQ ID NO: 584325 - RNA, 22 nt, Human
acaaaagugagugugucucaga

SEQ ID NO: 584326 - RNA, 22 nt, Human
ccugcucugccaaguccucuuu

SEQ ID NO: 584327 - RNA, 22 nt, Human
agaaaacugcagaguagccuca

SEQ ID NO: 584328 - RNA, 22 nt, Human
uggaacacacuucaaggagaaa

SEQ ID NO: 584329 - RNA, 22 nt, Human
uaaaugcuuucuaugaaagagg

SEQ ID NO: 584330 - RNA, 22 nt, Human
ugcaacauuauuaaacuaagca

SEQ ID NO: 584331 - RNA, 22 nt, Human
augcauauugucauuuaguccu

SEQ ID NO: 584332 - RNA, 22 nt, Human
uggcuccagaagggagggcgcc

SEQ ID NO: 584333 - RNA, 22 nt, Human
uuacauggauguaaaaaaguua

SEQ ID NO: 584334 - RNA, 22 nt, Human
gccagcuggagugagagugggc

SEQ ID NO: 584335 - RNA, 22 nt, Human
cuuauacugaaaaauuauuugu

SEQ ID NO: 584336 - RNA, 22 nt, Human
gccuggggaacuugauccuguc

SEQ ID NO: 584337 - RNA, 22 nt, Human
ugcugggcuucaacugccugag

SEQ ID NO: 584338 - RNA, 22 nt, Human
aaguggagcuauaggcucagau

SEQ ID NO: 584339 - RNA, 22 nt, Human
ucaaggcauacauuuagaagag

SEQ ID NO: 584340 - RNA, 22 nt, Human
gcaggaugggagcuucacucug

SEQ ID NO: 584341 - RNA, 21 nt, Human
agaagccaugugguggagaac

SEQ ID NO: 584342 - RNA, 20 nt, Human
caggcagaggaugcugacca

SEQ ID NO: 584343 - RNA, 22 nt, Human
cccugagccgcugcuccaaccu

SEQ ID NO: 584344 - RNA, 22 nt, Human
ugcuggagcggaggugagccag

SEQ ID NO: 584345 - RNA, 19 nt, Human
ggccuugaugaguggggag

SEQ ID NO: 584346 - RNA, 22 nt, Human
agcugguucauucauucauggu

SEQ ID NO: 584347 - RNA, 22 nt, Human
caguugaaaagauuuuauucug

SEQ ID NO: 584348 - RNA, 22 nt, Human
ugaacagucaaaaagugaccau

SEQ ID NO: 584349 - RNA, 22 nt, Human
cuggaccagaaaggacauggcu

SEQ ID NO: 584350 - RNA, 22 nt, Human
aggagguguagauuuccuguca

SEQ ID NO: 584351 - RNA, 22 nt, Human
uugauacaugcucuagaguuga

SEQ ID NO: 584352 - RNA, 22 nt, Human
uuucauaugggcauuggcaaua

SEQ ID NO: 584353 - RNA, 21 nt, Human
ugaggccugccagucucagaa

SEQ ID NO: 584354 - RNA, 22 nt, Human
acauuucagauucaugaaguga

SEQ ID NO: 584355 - RNA, 22 nt, Human
agaaacaucauuguuugguauu

SEQ ID NO: 584356 - RNA, 22 nt, Human
aucuuucagggccauuuguauu

SEQ ID NO: 584357 - RNA, 22 nt, Human
cugcuuuaaguauucaacaaag

SEQ ID NO: 584358 - RNA, 22 nt, Human
cuacauucugggaaaucagaug

SEQ ID NO: 584359 - RNA, 22 nt, Human
ggacacagcugcagccacaccc

SEQ ID NO: 584360 - RNA, 22 nt, Human
uagcccagagagccaggggcuu

SEQ ID NO: 584361 - RNA, 22 nt, Human
gacaauaaagugauacauggga

SEQ ID NO: 584362 - RNA, 22 nt, Human
uccugaagcaguuagcaugagc

SEQ ID NO: 584363 - RNA, 22 nt, Human
acaucccuugcucggggccccu

SEQ ID NO: 584364 - RNA, 22 nt, Human
cagucccaccaggaucgcucuu

SEQ ID NO: 584365 - RNA, 22 nt, Human
gaggcagagaccuucaggaccu

SEQ ID NO: 584366 - RNA, 22 nt, Human
ccugccuggcccaccuugccac

SEQ ID NO: 584367 - RNA, 22 nt, Human
ugguaagggguggaaccagagc

SEQ ID NO: 584368 - RNA, 22 nt, Human
uagaaacccauguuuauucagu

SEQ ID NO: 584369 - RNA, 22 nt, Human
aaauacauaaagguuguaccag

SEQ ID NO: 584370 - RNA, 22 nt, Human
aauaucuggagaugcuuuuugu

SEQ ID NO: 584371 - RNA, 22 nt, Human
acagagcacauagauuggaguu

SEQ ID NO: 584372 - RNA, 22 nt, Human
aguaaaauuguauuggaaaaca

SEQ ID NO: 584373 - RNA, 22 nt, Human
cuguccuguagcuccaucaguc

SEQ ID NO: 584374 - RNA, 22 nt, Human
caggggcuguuugccucaggcc

SEQ ID NO: 584375 - RNA, 22 nt, Human
cagagcagggugcaccuugggc

SEQ ID NO: 584376 - RNA, 22 nt, Human
ucucaggacuuugggaagcuca

SEQ ID NO: 584377 - RNA, 22 nt, Human
cugccucugguuuuggucccug

SEQ ID NO: 584378 - RNA, 22 nt, Human
ugguccuggagaguguuccaua

SEQ ID NO: 584379 - RNA, 22 nt, Human
caggaggacauacuggcucaca

SEQ ID NO: 584380 - RNA, 22 nt, Human
ccaggucuucacuuuacugaag

SEQ ID NO: 584381 - RNA, 22 nt, Human
guuuggcaucucacuuaaaccg

SEQ ID NO: 584382 - RNA, 22 nt, Human
gaggugggguuuuguucuugaa

SEQ ID NO: 584383 - RNA, 22 nt, Human
aauagcauaagaugucaaauag

SEQ ID NO: 584384 - RNA, 22 nt, Human
acaguguuauuucugaguaaug

SEQ ID NO: 584385 - RNA, 19 nt, Human
caucucugcaaggagcugc

SEQ ID NO: 584386 - RNA, 22 nt, Human
gggcagcucuggcugugggaag

SEQ ID NO: 584387 - RNA, 22 nt, Human
gagcaucuuguucccaacuucu

SEQ ID NO: 584388 - RNA, 22 nt, Human
caggugaccuauggucacuaca

SEQ ID NO: 584389 - RNA, 22 nt, Human
ccagggcaauaggaacacuuuu

SEQ ID NO: 584390 - RNA, 20 nt, Human
ugaggcucagagagguugag

SEQ ID NO: 584391 - RNA, 22 nt, Human
ucagcugccccaguggccccag

SEQ ID NO: 584392 - RNA, 22 nt, Human
gagaugcugccugauuuauuca

SEQ ID NO: 584393 - RNA, 22 nt, Human
agcagccaagguaaccugugcu

SEQ ID NO: 584394 - RNA, 22 nt, Human
ugcagucccuggcccacuuuaa

SEQ ID NO: 584395 - RNA, 18 nt, Human
gccagcccuccaaccucc

SEQ ID NO: 584396 - RNA, 22 nt, Human
ucagaggaauuugcuuuucaug

SEQ ID NO: 584397 - RNA, 22 nt, Human
gcauucuucgaaguaaguagug

SEQ ID NO: 584398 - RNA, 22 nt, Human
uuucuaguauauaacuagaucu

SEQ ID NO: 584399 - RNA, 22 nt, Human
acuacagugugauaagaggggc

SEQ ID NO: 584400 - RNA, 22 nt, Human
ggggccccucggacacgugcgg

SEQ ID NO: 584401 - RNA, 19 nt, Human
gcaggguggcagagcucuu

SEQ ID NO: 584402 - RNA, 18 nt, Human
gguggcaggucagaugcc

SEQ ID NO: 584403 - RNA, 22 nt, Human
cugcaccgugucucgggcugcc

SEQ ID NO: 584404 - RNA, 22 nt, Human
agagccuggcucccagcuaccg

SEQ ID NO: 584405 - RNA, 22 nt, Human
ugcagaagaauguaggcauaag

SEQ ID NO: 584406 - RNA, 22 nt, Human
auaaauuaggaucugggguucc

SEQ ID NO: 584407 - RNA, 18 nt, Human
cuccuuucccuacaccuc

SEQ ID NO: 584408 - RNA, 22 nt, Human
gcuccccagcuuagcccuggcu

SEQ ID NO: 584409 - RNA, 22 nt, Human
ccugggcuuugcuggcaaggcc

SEQ ID NO: 584410 - RNA, 19 nt, Human
agucuuugccuggggccuu

SEQ ID NO: 584411 - RNA, 21 nt, Human
uccuuauauuugaauacuuua

SEQ ID NO: 584412 - RNA, 22 nt, Human
ggugaagggccuuaggagacag

SEQ ID NO: 584413 - RNA, 22 nt, Human
uuugacaugugcuuauaacuuu

SEQ ID NO: 584414 - RNA, 22 nt, Human
uagaacacagaaauguguggcc

SEQ ID NO: 584415 - RNA, 22 nt, Human
acaauggcaugcuagcaaaugg

SEQ ID NO: 584416 - RNA, 23 nt, Human
acuuccaguuauaggaacucuuc

SEQ ID NO: 584417 - RNA, 22 nt, Human
aagaggaggauugaugugggag

SEQ ID NO: 584418 - RNA, 22 nt, Human
agcaggggucucugcuaaugaa

SEQ ID NO: 584419 - RNA, 22 nt, Human
ucucagggccccaaaggcuagu

SEQ ID NO: 584420 - RNA, 22 nt, Human
augaugucuggaggcaugcugu

SEQ ID NO: 584421 - RNA, 21 nt, Human
aagaggaagcauuauggcaua

SEQ ID NO: 584422 - RNA, 22 nt, Human
uuuagugagugugaaucaaaug

SEQ ID NO: 584423 - RNA, 22 nt, Human
acccagcuaacccuacccugga

SEQ ID NO: 584424 - RNA, 22 nt, Human
ucucucuaggcaucuauuuuca

SEQ ID NO: 584425 - RNA, 22 nt, Human
caucuccaggaguucuacucau

SEQ ID NO: 584426 - RNA, 22 nt, Human
acagugcugaacgacauggaag

SEQ ID NO: 584427 - RNA, 22 nt, Human
ucagcacugucuuuuauuugaa

SEQ ID NO: 584428 - RNA, 23 nt, Human
augugugggaggucagagagcca

SEQ ID NO: 584429 - RNA, 22 nt, Human
acucuugucucaacuuuuguau

SEQ ID NO: 584430 - RNA, 22 nt, Human
ucugucuucuguagcuaauaau

SEQ ID NO: 584431 - RNA, 22 nt, Human
ggcucuggugaggguaggagau

SEQ ID NO: 584432 - RNA, 22 nt, Human
guugcucaggcaggaguacagu

SEQ ID NO: 584433 - RNA, 22 nt, Human
agccacagagagggagcugcaa

SEQ ID NO: 584434 - RNA, 22 nt, Human
cucuuacaagcucccgauauaa

SEQ ID NO: 584435 - RNA, 22 nt, Human
cugcucacgccaccguucauca

SEQ ID NO: 584436 - RNA, 22 nt, Human
agucccagcuacucaagaggcu

SEQ ID NO: 584437 - RNA, 22 nt, Human
aggcauggcauggggcagaugu

SEQ ID NO: 584438 - RNA, 22 nt, Human
cagggagcacugcgagcggcag

SEQ ID NO: 584439 - RNA, 22 nt, Human
caaaaguaauggcgguuuuuac

SEQ ID NO: 584440 - RNA, 22 nt, Human
gcccagaagugacucagcacug

SEQ ID NO: 584441 - RNA, 22 nt, Human
uuggccuuuauucuguacuucu

SEQ ID NO: 584442 - RNA, 19 nt, Human
uuucugcagcccagcagca

SEQ ID NO: 584443 - RNA, 22 nt, Human
ugacagggugauuaugagagcu

SEQ ID NO: 584444 - RNA, 22 nt, Human
uugaagcauuucuuugagcuuc

SEQ ID NO: 584445 - RNA, 21 nt, Human
uggcacugcuuagcagguucc

SEQ ID NO: 584446 - RNA, 22 nt, Human
ugaguuaaaugagaacaugaaa

SEQ ID NO: 584447 - RNA, 22 nt, Human
gggagggaagguaccuguguga

SEQ ID NO: 584448 - RNA, 22 nt, Human
aacacuuuccugccuuucugau

SEQ ID NO: 584449 - RNA, 20 nt, Human
ggcuuagacugaguucucac

SEQ ID NO: 584450 - RNA, 22 nt, Human
ccacaggaggaacaauuagaug

SEQ ID NO: 584451 - RNA, 20 nt, Human
aggcagcuggccaggcaggu

SEQ ID NO: 584452 - RNA, 22 nt, Human
ccacccagcagaggaggcaaga

SEQ ID NO: 584453 - RNA, 22 nt, Human
ucagauagugauaauagcaugu

SEQ ID NO: 584454 - RNA, 22 nt, Human
cugugccacugccccaggccuc

SEQ ID NO: 584455 - RNA, 22 nt, Human
uaauuacaaagcaagcacaggg

SEQ ID NO: 584456 - RNA, 22 nt, Human
uaggugucugcucuuauuuaac

SEQ ID NO: 584457 - RNA, 22 nt, Human
aggagacauacuauaggaauau

SEQ ID NO: 584458 - RNA, 23 nt, Human
uggcucucucagugcugcagagg

SEQ ID NO: 584459 - RNA, 22 nt, Human
ugaggugggugucaggucagag

SEQ ID NO: 584460 - RNA, 20 nt, Human
gaggcucugggcauggcgcc

SEQ ID NO: 584461 - RNA, 22 nt, Human
gaaagggucuuugauuucccuc

SEQ ID NO: 584462 - RNA, 22 nt, Human
aagguuuuuuuccaguaucucu

SEQ ID NO: 584463 - RNA, 22 nt, Human
cugaagucagauggcacaaggu

SEQ ID NO: 584464 - RNA, 23 nt, Human
acugagguacugagguugugaca

SEQ ID NO: 584465 - RNA, 22 nt, Human
ugucccugcuguacuuagagca

SEQ ID NO: 584466 - RNA, 21 nt, Human
cuggaggcagguggugccagg

SEQ ID NO: 584467 - RNA, 22 nt, Human
ucuuuccuaggugauaugcaau

SEQ ID NO: 584468 - RNA, 22 nt, Human
agugggagagaagcaaguagua

SEQ ID NO: 584469 - RNA, 22 nt, Human
uuucucaucuggaaacagugcu

SEQ ID NO: 584470 - RNA, 22 nt, Human
cacgggagacgugaucuuggac

SEQ ID NO: 584471 - RNA, 22 nt, Human
augcacuuaaauaacauaacuu

SEQ ID NO: 584472 - RNA, 20 nt, Human
acacagagugagucugcuug

SEQ ID NO: 584473 - RNA, 22 nt, Human
auggcuggcauccaggugggcu

SEQ ID NO: 584474 - RNA, 21 nt, Human
auuucagagcacacaaguaaa

SEQ ID NO: 584475 - RNA, 22 nt, Human
ucuagggaggcaauagcaaugu

SEQ ID NO: 584476 - RNA, 22 nt, Human
aaguguuucuuggaauguugcg

SEQ ID NO: 584477 - RNA, 22 nt, Human
ugcugcuguauccuuaguguca

SEQ ID NO: 584478 - RNA, 22 nt, Human
uuaaauuaggacucuaguucug

SEQ ID NO: 584479 - RNA, 22 nt, Human
ggaggacacuggcucugccuuc

SEQ ID NO: 584480 - RNA, 22 nt, Human
cuggcucaauaaauauuagcug

SEQ ID NO: 584481 - RNA, 22 nt, Human
uucucagaauugacugggagca

SEQ ID NO: 584482 - RNA, 22 nt, Human
ggcuucuuuuuaguaaauguca

SEQ ID NO: 584483 - RNA, 22 nt, Human
cucugaaagcaaaacuagagaa

SEQ ID NO: 584484 - RNA, 22 nt, Human
ucucugaacuuccuggaaaggc

SEQ ID NO: 584485 - RNA, 22 nt, Human
augguuaaauugguuauuuaug

SEQ ID NO: 584486 - RNA, 22 nt, Human
agucccuguacuuuccacugcc

SEQ ID NO: 584487 - RNA, 22 nt, Human
ucaggcugaaggaggccuaucu

SEQ ID NO: 584488 - RNA, 22 nt, Human
aaaaaucacuuuuauaggcagc

SEQ ID NO: 584489 - RNA, 22 nt, Human
ggcagggcaggaaagucaggaa

SEQ ID NO: 584490 - RNA, 22 nt, Human
uguacacaauucuuaacauaca

SEQ ID NO: 584491 - RNA, 22 nt, Human
gcuucagagauuucacuaguuu

SEQ ID NO: 584492 - RNA, 22 nt, Human
gcugcccugugguccagcaggu

SEQ ID NO: 584493 - RNA, 22 nt, Human
gaaagcaaguugacugcagaau

SEQ ID NO: 584494 - RNA, 22 nt, Human
cagaugcagcaaaaugacaggc

SEQ ID NO: 584495 - RNA, 22 nt, Human
cucugacagguggcauuaucuc

SEQ ID NO: 584496 - RNA, 22 nt, Human
cauggauauauuguacaguagc

SEQ ID NO: 584497 - RNA, 22 nt, Human
uguauuagagcauauaauuuga

SEQ ID NO: 584498 - RNA, 20 nt, Human
aaagucuguuuaucucugga

SEQ ID NO: 584499 - RNA, 22 nt, Human
aguauuuucgccaucacaagaa

SEQ ID NO: 584500 - RNA, 22 nt, Human
ugcuucugggucccagccuggc

SEQ ID NO: 584501 - RNA, 22 nt, Human
gaggacugcagaugggugcauc

SEQ ID NO: 584502 - RNA, 22 nt, Human
augagguccagggaaguuaaau

SEQ ID NO: 584503 - RNA, 22 nt, Human
uuauuucccugaggguugcagg

SEQ ID NO: 584504 - RNA, 22 nt, Human
uaaagguuuauucaacaaaaua

SEQ ID NO: 584505 - RNA, 22 nt, Human
aacaagaacaccuacaguucua

SEQ ID NO: 584506 - RNA, 21 nt, Human
uccaggcuggaaggggcguug

SEQ ID NO: 584507 - RNA, 21 nt, Human
ucaguaaaccuaaagauugua

SEQ ID NO: 584508 - RNA, 22 nt, Human
auacuaagcccaagaacacaug

SEQ ID NO: 584509 - RNA, 22 nt, Human
auacacaugcacacaugugugu

SEQ ID NO: 584510 - RNA, 22 nt, Human
ucuuucugaauauuugaccuca

SEQ ID NO: 584511 - RNA, 22 nt, Human
ggcacagggaggcccuggugug

SEQ ID NO: 584512 - RNA, 22 nt, Human
ggcccaggcuggagugcggugg

SEQ ID NO: 584513 - RNA, 22 nt, Human
uugcagggucccagaggccugg

SEQ ID NO: 584514 - RNA, 22 nt, Human
ggacacuguucauggggagggg

SEQ ID NO: 584515 - RNA, 22 nt, Human
acaggcugcugggcuccgugcu

SEQ ID NO: 584516 - RNA, 22 nt, Human
aggaggugacagccugcaucug

SEQ ID NO: 584517 - RNA, 23 nt, Human
gaggagggucugacaaguguagc

SEQ ID NO: 584518 - RNA, 22 nt, Human
ucccaggaggugcuuccuagga

SEQ ID NO: 584519 - RNA, 20 nt, Human
gcugaccccugcugucaugc

SEQ ID NO: 584520 - RNA, 22 nt, Human
auauggaacuauucuguguaga

SEQ ID NO: 584521 - RNA, 22 nt, Human
caggguggcccuguggucucau

SEQ ID NO: 584522 - RNA, 22 nt, Human
uuggaacaaucacauccuugcu

SEQ ID NO: 584523 - RNA, 22 nt, Human
aggcccagggcugcucucugaa

SEQ ID NO: 584524 - RNA, 22 nt, Human
aggcuccugagaggcagaggcu

SEQ ID NO: 584525 - RNA, 23 nt, Human
ccagggcuacgggcaccguccug

SEQ ID NO: 584526 - RNA, 22 nt, Human
gcuguccuggggagggagaaug

SEQ ID NO: 584527 - RNA, 22 nt, Human
agcaagcuaccuagauagucua

SEQ ID NO: 584528 - RNA, 22 nt, Human
gagacagagaucuugcugaguc

SEQ ID NO: 584529 - RNA, 22 nt, Human
cugccaggauucugugaacccc

SEQ ID NO: 584530 - RNA, 22 nt, Human
ugcaugcacguaucugcgugug

SEQ ID NO: 584531 - RNA, 22 nt, Human
caugcucucuggcaacuugugu

SEQ ID NO: 584532 - RNA, 22 nt, Human
aaggggcucuugucaggcgcag

SEQ ID NO: 584533 - RNA, 17 nt, Human
uucauuaauaaaagcaa

SEQ ID NO: 584534 - RNA, 22 nt, Human
aagcaggcuugguguggccgcu

SEQ ID NO: 584535 - RNA, 22 nt, Human
ucuggaguuugagcacuucaau

SEQ ID NO: 584536 - RNA, 20 nt, Human
auuauucauacaugugugac

SEQ ID NO: 584537 - RNA, 22 nt, Human
gggcaauuaaggucccguuucc

SEQ ID NO: 584538 - RNA, 19 nt, Human
gacaggaaggcuaccagua

SEQ ID NO: 584539 - RNA, 22 nt, Human
auggggagagaagggcugagcu

SEQ ID NO: 584540 - RNA, 22 nt, Human
uguuuuugucuccuugucugcu

SEQ ID NO: 584541 - RNA, 22 nt, Human
ggaacauuuccuggcagagagg

SEQ ID NO: 584542 - RNA, 22 nt, Human
uguuucuuuguagauauucuuu

SEQ ID NO: 584543 - RNA, 22 nt, Human
ugggaagggucaacagcuggaa

SEQ ID NO: 584544 - RNA, 22 nt, Human
cagugcugagagccuggccagg

SEQ ID NO: 584545 - RNA, 22 nt, Human
cagccagaaccuaggaugagcu

SEQ ID NO: 584546 - RNA, 22 nt, Human
cuguguccucccgcugcaccca

SEQ ID NO: 584547 - RNA, 22 nt, Human
gggcacaggagaaggaucuggc

SEQ ID NO: 584548 - RNA, 22 nt, Human
gaaaguuucucacacaugcaga

SEQ ID NO: 584549 - RNA, 22 nt, Human
cugagcuaggaguuaggaagcu

SEQ ID NO: 584550 - RNA, 22 nt, Human
ucuucagucaauccagauguuu

SEQ ID NO: 584551 - RNA, 23 nt, Human
ugaggagcauagcugacugacag

SEQ ID NO: 584552 - RNA, 22 nt, Human
gcagaggcuccauuuuacagau

SEQ ID NO: 584553 - RNA, 22 nt, Human
aaugcaccuaccuugauucugc

SEQ ID NO: 584554 - RNA, 22 nt, Human
uaaagagccauuguaugguuuu

SEQ ID NO: 584555 - RNA, 22 nt, Human
aauacagugaaagugagcaagg

SEQ ID NO: 584556 - RNA, 22 nt, Human
ggcugugagcaggcagaaugcu

SEQ ID NO: 584557 - RNA, 22 nt, Human
ugcauauuuuauaaagauggaa

SEQ ID NO: 584558 - RNA, 22 nt, Human
ugaggggcgcuggcagguuccu

SEQ ID NO: 584559 - RNA, 22 nt, Human
cacuuuauaugcauuaccucau

SEQ ID NO: 584560 - RNA, 22 nt, Human
auucuuggcaaggagauuuaaa

SEQ ID NO: 584561 - RNA, 22 nt, Human
agauucaggcaugucuucauuu

SEQ ID NO: 584562 - RNA, 22 nt, Human
ucugcugcuacagacucucuag

SEQ ID NO: 584563 - RNA, 22 nt, Human
ggcucugggaaauggucuuccu

SEQ ID NO: 584564 - RNA, 22 nt, Human
uggucucugcaggccaggcuca

SEQ ID NO: 584565 - RNA, 22 nt, Human
gagcacagcgcaguuuguaauu

SEQ ID NO: 584566 - RNA, 22 nt, Human
cuguggagguaggagcaggaca

SEQ ID NO: 584567 - RNA, 22 nt, Human
caacaauaugccagacucaauu

SEQ ID NO: 584568 - RNA, 22 nt, Human
uaguuacaggaguuucugaaau

SEQ ID NO: 584569 - RNA, 17 nt, Human
cgggcauggagggcagg

SEQ ID NO: 584570 - RNA, 22 nt, Human
ucaggcuguuagccaccuccuc

SEQ ID NO: 584571 - RNA, 22 nt, Human
auuauugucaucuuaaucuuaa

SEQ ID NO: 584572 - RNA, 22 nt, Human
gacugagaaucauagaaggcaa

SEQ ID NO: 584573 - RNA, 22 nt, Human
aggguauaaagagcaagcagaa

SEQ ID NO: 584574 - RNA, 22 nt, Human
cagaggcucagauggcccuggc

SEQ ID NO: 584575 - RNA, 22 nt, Human
aaggcagaaauucaacuacugg

SEQ ID NO: 584576 - RNA, 22 nt, Human
cccagcagggucucugugucua

SEQ ID NO: 584577 - RNA, 22 nt, Human
cgcagagggcaggcagugcugg

SEQ ID NO: 584578 - RNA, 22 nt, Human
agauacauauagaaaacaucaa

SEQ ID NO: 584579 - RNA, 22 nt, Human
ucacagagaacuauaauccauc

SEQ ID NO: 584580 - RNA, 22 nt, Human
gugcccuccguguucauagagc

SEQ ID NO: 584581 - RNA, 22 nt, Human
ucugugcugccauccuguggcc

SEQ ID NO: 584582 - RNA, 22 nt, Human
uugaagacaagggcagggguuc

SEQ ID NO: 584583 - RNA, 23 nt, Human
ugauuuuaaaaaguaaguuauca

SEQ ID NO: 584584 - RNA, 22 nt, Human
ugagcagaaguuauaaauaaga

SEQ ID NO: 584585 - RNA, 21 nt, Human
gcugggcuccagucugccgcu

SEQ ID NO: 584586 - RNA, 22 nt, Human
caaggccuccugggcccagaga

SEQ ID NO: 584587 - RNA, 22 nt, Human
uuccugagucgccgagucuaug

SEQ ID NO: 584588 - RNA, 22 nt, Human
ccagggcaauuauuuggagggu

SEQ ID NO: 584589 - RNA, 22 nt, Human
ccccaggagcuuguuuuagaga

SEQ ID NO: 584590 - RNA, 22 nt, Human
aggcuggucuauacggagacga

SEQ ID NO: 584591 - RNA, 22 nt, Human
uuuuccucuguaugcgugagau

SEQ ID NO: 584592 - RNA, 22 nt, Human
acagauauaaacuauaguagug

SEQ ID NO: 584593 - RNA, 20 nt, Human
cuuaaacacagagauagauu

SEQ ID NO: 584594 - RNA, 22 nt, Human
cuuguauucagcaucuuaacua

SEQ ID NO: 584595 - RNA, 22 nt, Human
aagccagguguuuaggccagcg

SEQ ID NO: 584596 - RNA, 22 nt, Human
cagggaugucucuggaagggag

SEQ ID NO: 584597 - RNA, 22 nt, Human
aaagaggcagguguuacuggaa

SEQ ID NO: 584598 - RNA, 22 nt, Human
aaugccauuccaucacacaccu

SEQ ID NO: 584599 - RNA, 20 nt, Human
cuccagggaacagacuggag

SEQ ID NO: 584600 - RNA, 19 nt, Human
uggcuucuucgguguuccc

SEQ ID NO: 584601 - RNA, 22 nt, Human
ccauggccgccgcugcucagga

SEQ ID NO: 584602 - RNA, 22 nt, Human
cccuccagggagccaugcuggg

SEQ ID NO: 584603 - RNA, 22 nt, Human
ucuuuauuuuaugcuugugcaa

SEQ ID NO: 584604 - RNA, 22 nt, Human
agaugguaaucacauuuaucug

SEQ ID NO: 584605 - RNA, 22 nt, Human
cugagaggcggagguugcagug

SEQ ID NO: 584606 - RNA, 22 nt, Human
uggcugcagugcuugagauguc

SEQ ID NO: 584607 - RNA, 22 nt, Human
gcagggcauagaggcacggagg

SEQ ID NO: 584608 - RNA, 22 nt, Human
uggacaggcuccuagggguucc

SEQ ID NO: 584609 - RNA, 22 nt, Human
gccaguggugagauucccuggg

SEQ ID NO: 584610 - RNA, 22 nt, Human
auaaaguagcuuucagugccaa

SEQ ID NO: 584611 - RNA, 19 nt, Human
acaguucuaauuucugugg

SEQ ID NO: 584612 - RNA, 22 nt, Human
gaggcugguucugaaguacugu

SEQ ID NO: 584613 - RNA, 22 nt, Human
ugcccaggauugugaggucagg

SEQ ID NO: 584614 - RNA, 22 nt, Human
aaaguucuauuggauagugcug

SEQ ID NO: 584615 - RNA, 22 nt, Human
cauaaaagccaccuauuuaaag

SEQ ID NO: 584616 - RNA, 22 nt, Human
agaaaauuagauuuuacugugu

SEQ ID NO: 584617 - RNA, 22 nt, Human
gugcccaguugaggccaggacu

SEQ ID NO: 584618 - RNA, 22 nt, Human
uaccauuguaccaagguaauuu

SEQ ID NO: 584619 - RNA, 22 nt, Human
cagucacauugcccugcauuua

SEQ ID NO: 584620 - RNA, 22 nt, Human
augggggcggcugaagcccagg

SEQ ID NO: 584621 - RNA, 22 nt, Human
aaacucuuuccacgauuacuuu

SEQ ID NO: 584622 - RNA, 22 nt, Human
auaaagaccaguaucuuauguu

SEQ ID NO: 584623 - RNA, 22 nt, Human
cuuauuucagcccugggcaccc

SEQ ID NO: 584624 - RNA, 22 nt, Human
agaauaaaauagucugaagaug

SEQ ID NO: 584625 - RNA, 22 nt, Human
ugucaggaggguccagagaaaa

SEQ ID NO: 584626 - RNA, 23 nt, Human
ggaaagagaggaguugugcauag

SEQ ID NO: 584627 - RNA, 22 nt, Human
aauuaaaagauaacccaugagu

SEQ ID NO: 584628 - RNA, 22 nt, Human
ugguggagcuguggccacgacc

SEQ ID NO: 584629 - RNA, 22 nt, Human
auggcugagaugggcuccaggc

SEQ ID NO: 584630 - RNA, 22 nt, Human
cccaagccuuucaaaacucaga

SEQ ID NO: 584631 - RNA, 22 nt, Human
uauaaagaaguguaaacaggaa

SEQ ID NO: 584632 - RNA, 22 nt, Human
agugcuucuggugggcgugagg

SEQ ID NO: 584633 - RNA, 22 nt, Human
auucuguaauugaacuguguug

SEQ ID NO: 584634 - RNA, 22 nt, Human
ucuucuccaguucauccuacca

SEQ ID NO: 584635 - RNA, 22 nt, Human
caaucuauccucugauuuugua

SEQ ID NO: 584636 - RNA, 16 nt, Human
gcagguggggcgcgca

SEQ ID NO: 584637 - RNA, 22 nt, Human
acugcaugcuuuacaugacaug

SEQ ID NO: 584638 - RNA, 22 nt, Human
aaggacagagagccauuccaga

SEQ ID NO: 584639 - RNA, 22 nt, Human
cuucugggcauggcagagccug

SEQ ID NO: 584640 - RNA, 22 nt, Human
ccagagggagccaccagggugu

SEQ ID NO: 584641 - RNA, 22 nt, Human
aacacugguucugacuacacag

SEQ ID NO: 584642 - RNA, 16 nt, Human
gccuggaguggcaggg

SEQ ID NO: 584643 - RNA, 22 nt, Human
agaauucuguucuucgggugug

SEQ ID NO: 584644 - RNA, 22 nt, Human
augcaguuuuaggggaaggguu

SEQ ID NO: 584645 - RNA, 22 nt, Human
accugcccggggacauuccuuu

SEQ ID NO: 584646 - RNA, 22 nt, Human
uggccugguaccacauagauuu

SEQ ID NO: 584647 - RNA, 22 nt, Human
aguggcuagaucaugagugagc

SEQ ID NO: 584648 - RNA, 22 nt, Human
acagauccugguuacagccauu

SEQ ID NO: 584649 - RNA, 22 nt, Human
uuacaggugggaaaacuaagcu

SEQ ID NO: 584650 - RNA, 22 nt, Human
aaaugcaguuuccugagaccca

SEQ ID NO: 584651 - RNA, 22 nt, Human
aagggagaaaacuuguggcuua

SEQ ID NO: 584652 - RNA, 22 nt, Human
cugcacaguggguggggcguca

SEQ ID NO: 584653 - RNA, 22 nt, Human
ucuguuucuccaacauugugag

SEQ ID NO: 584654 - RNA, 22 nt, Human
ccaggguggaggcuggauggag

SEQ ID NO: 584655 - RNA, 22 nt, Human
ugccugggguuggcaaacugcu

SEQ ID NO: 584656 - RNA, 22 nt, Human
cucucuuucugaaugaggacua

SEQ ID NO: 584657 - RNA, 21 nt, Human
ugggauagaaauauggcugcu

SEQ ID NO: 584658 - RNA, 22 nt, Human
aagaaaccaacccugccagcac

SEQ ID NO: 584659 - RNA, 22 nt, Human
auugucauuccagucauuguua

SEQ ID NO: 584660 - RNA, 22 nt, Human
ugaaggcuugacugaggcagga

SEQ ID NO: 584661 - RNA, 22 nt, Human
ugugccuguugguguagacaua

SEQ ID NO: 584662 - RNA, 22 nt, Human
gggguaggcaggugaucugauc

SEQ ID NO: 584663 - RNA, 22 nt, Human
uccucacagcugguucauucag

SEQ ID NO: 584664 - RNA, 22 nt, Human
accuuugacgcuauuuaauuug

SEQ ID NO: 584665 - RNA, 22 nt, Human
aaacugaggaacaaggaaggau

SEQ ID NO: 584666 - RNA, 22 nt, Human
acagaggaagcauauagcacaa

SEQ ID NO: 584667 - RNA, 22 nt, Human
aagagagagugcgcucacagaa

SEQ ID NO: 584668 - RNA, 22 nt, Human
auugguuacucaauuugacuga

SEQ ID NO: 584669 - RNA, 22 nt, Human
auugaaaguccuaucuaaggga

SEQ ID NO: 584670 - RNA, 22 nt, Human
ugcugaaugcugcaugccguau

SEQ ID NO: 584671 - RNA, 18 nt, Human
guuagcuuccuguugccc

SEQ ID NO: 584672 - RNA, 22 nt, Human
cuucuggcaaaacaggcagaaa

SEQ ID NO: 584673 - RNA, 19 nt, Human
cagaccuguccagccugug

SEQ ID NO: 584674 - RNA, 19 nt, Human
ucaaaacacaaaugguuga

SEQ ID NO: 584675 - RNA, 22 nt, Human
ccaaagugcugggguuacaggc

SEQ ID NO: 584676 - RNA, 22 nt, Human
caguagcaggauuugggauuau

SEQ ID NO: 584677 - RNA, 22 nt, Human
gaaguuaucaggauuaaaguug

SEQ ID NO: 584678 - RNA, 21 nt, Human
cacaggugggucagugaggcc

SEQ ID NO: 584679 - RNA, 22 nt, Human
acacacuguaaggacuaucacu

SEQ ID NO: 584680 - RNA, 22 nt, Human
accugccuauggagccacaugg

SEQ ID NO: 584681 - RNA, 22 nt, Human
ggugggcacauucagucucugu

SEQ ID NO: 584682 - RNA, 17 nt, Human
aacaauaggauguguau

SEQ ID NO: 584683 - RNA, 22 nt, Human
cuaggcagggugcugugccaug

SEQ ID NO: 584684 - RNA, 22 nt, Human
guuaauaaagguauagaaucag

SEQ ID NO: 584685 - RNA, 22 nt, Human
guggcaggaucacggcucacug

SEQ ID NO: 584686 - RNA, 22 nt, Human
agcaccaggccauggggucccu

SEQ ID NO: 584687 - RNA, 22 nt, Human
aggccucugggucuccucugac

SEQ ID NO: 584688 - RNA, 22 nt, Human
ucugagccaccugccagugcug

SEQ ID NO: 584689 - RNA, 23 nt, Human
ccuucuguuaaccaucugggggg

SEQ ID NO: 584690 - RNA, 22 nt, Human
ugaagcagcaaaugaugggaga

SEQ ID NO: 584691 - RNA, 22 nt, Human
ggagaggguagggguccugccc

SEQ ID NO: 584692 - RNA, 19 nt, Human
uaccaaucccuugguuuac

SEQ ID NO: 584693 - RNA, 22 nt, Human
ggagcagagcugggcuuggcug

SEQ ID NO: 584694 - RNA, 22 nt, Human
agggccugggaagaggaacccu

SEQ ID NO: 584695 - RNA, 22 nt, Human
aguuuccacuggagacacugug

SEQ ID NO: 584696 - RNA, 22 nt, Human
ccauggaucuggaucuaucuuu

SEQ ID NO: 584697 - RNA, 22 nt, Human
cccagcuguggcagaggccggg

SEQ ID NO: 584698 - RNA, 16 nt, Human
gggggugagagagagu

SEQ ID NO: 584699 - RNA, 22 nt, Human
uggucaggggcuucugagcugu

SEQ ID NO: 584700 - RNA, 22 nt, Human
uaugucuucgucaccuaucuca

SEQ ID NO: 584701 - RNA, 22 nt, Human
aguacaaagugcuccugguucu

SEQ ID NO: 584702 - RNA, 22 nt, Human
uuuucuuacugucugugauccu

SEQ ID NO: 584703 - RNA, 20 nt, Human
gccugagcuccgccuccugu

SEQ ID NO: 584704 - RNA, 22 nt, Human
guugguuagauuuccucacuuu

SEQ ID NO: 584705 - RNA, 22 nt, Human
acucucugagcuaccaggugag

SEQ ID NO: 584706 - RNA, 22 nt, Human
ugaacaugcuguugauggccug

SEQ ID NO: 584707 - RNA, 19 nt, Human
ugcucaggccaaggagccc

SEQ ID NO: 584708 - RNA, 22 nt, Human
agaaucuugggcaaauucaucu

SEQ ID NO: 584709 - RNA, 22 nt, Human
ugcuccagggccuccagugggg

SEQ ID NO: 584710 - RNA, 21 nt, Human
aguggucuuuuucacccagug

SEQ ID NO: 584711 - RNA, 22 nt, Human
ggagcagacauaaccuuacaga

SEQ ID NO: 584712 - RNA, 22 nt, Human
cuggagauaagcagucccaggc

SEQ ID NO: 584713 - RNA, 22 nt, Human
uacugccugggggagacagcug

SEQ ID NO: 584714 - RNA, 19 nt, Human
ugcccugcacgcuguccug

SEQ ID NO: 584715 - RNA, 22 nt, Human
cccuuccugggugucccggagu

SEQ ID NO: 584716 - RNA, 22 nt, Human
ggcugcuggauuguguaucugu

SEQ ID NO: 584717 - RNA, 22 nt, Human
aaagaucagaggauagcugagu

SEQ ID NO: 584718 - RNA, 20 nt, Human
uguguguguacuucuaaaua

SEQ ID NO: 584719 - RNA, 22 nt, Human
auguagaaaguuauuuuacucu

SEQ ID NO: 584720 - RNA, 22 nt, Human
uuuuauucucagcuccagagag

SEQ ID NO: 584721 - RNA, 22 nt, Human
gccaccagccccaugcgcugug

SEQ ID NO: 584722 - RNA, 22 nt, Human
cugcuuuuuguaggucccagag

SEQ ID NO: 584723 - RNA, 22 nt, Human
uuaaaugacuuuuauuauucuc

SEQ ID NO: 584724 - RNA, 22 nt, Human
uaucugcaucugcauguguauu

SEQ ID NO: 584725 - RNA, 22 nt, Human
auugugcaccaccuuguggcag

SEQ ID NO: 584726 - RNA, 22 nt, Human
ucaccaauaauaacuugagaau

SEQ ID NO: 584727 - RNA, 22 nt, Human
gagacacagcagauauucaauc

SEQ ID NO: 584728 - RNA, 18 nt, Human
ucugaaagcaccggugaa

SEQ ID NO: 584729 - RNA, 22 nt, Human
cuggccagccugucgaugcccu

SEQ ID NO: 584730 - RNA, 22 nt, Human
ggguguccugugccaagcuggg

SEQ ID NO: 584731 - RNA, 22 nt, Human
aagcugccugccacgcuagaua

SEQ ID NO: 584732 - RNA, 22 nt, Human
acaaaagaauaagaugagucau

SEQ ID NO: 584733 - RNA, 22 nt, Human
uggaugcuuaaaucguuugaau

SEQ ID NO: 584734 - RNA, 22 nt, Human
cccagagggcugaggauaugaa

SEQ ID NO: 584735 - RNA, 22 nt, Human
augaagcagacucagguggugc

SEQ ID NO: 584736 - RNA, 20 nt, Human
ucugaggcugagcucuacuu

SEQ ID NO: 584737 - RNA, 22 nt, Human
auacauguuguaccauauguuu

SEQ ID NO: 584738 - RNA, 22 nt, Human
uccugggccaagggcugugagg

SEQ ID NO: 584739 - RNA, 21 nt, Human
uaaaagaugacaagacagcuc

SEQ ID NO: 584740 - RNA, 22 nt, Human
ugcuuugugacagauuaguuuu

SEQ ID NO: 584741 - RNA, 22 nt, Human
ugcuucuggaaacaguggcugu

SEQ ID NO: 584742 - RNA, 21 nt, Human
ugucucaaucagaagucauua

SEQ ID NO: 584743 - RNA, 21 nt, Human
cugaggcaugcaggccugggc

SEQ ID NO: 584744 - RNA, 22 nt, Human
gaggccacagucaguguucauc

SEQ ID NO: 584745 - RNA, 22 nt, Human
cagagcuggagaaguggauuua

SEQ ID NO: 584746 - RNA, 22 nt, Human
cugagccaaggggacagugaca

SEQ ID NO: 584747 - RNA, 22 nt, Human
agguuucugcuguccuccuucu

SEQ ID NO: 584748 - RNA, 22 nt, Human
aggcuaagggaugacuggagug

SEQ ID NO: 584749 - RNA, 22 nt, Human
agucucuuaaagacaguguuga

SEQ ID NO: 584750 - RNA, 22 nt, Human
uuauuuuguagcucugaucuuu

SEQ ID NO: 584751 - RNA, 22 nt, Human
agcuguuggcuggcugagcucu

SEQ ID NO: 584752 - RNA, 22 nt, Human
ccugggcuuugagggcaggaug

SEQ ID NO: 584753 - RNA, 20 nt, Human
cguccccuugagcagguccc

SEQ ID NO: 584754 - RNA, 22 nt, Human
aacauuaauuacagucaaacau

SEQ ID NO: 584755 - RNA, 22 nt, Human
uggggaggacgggcgccuuccu

SEQ ID NO: 584756 - RNA, 22 nt, Human
cagccugacaccagcuuugggc

SEQ ID NO: 584757 - RNA, 22 nt, Human
gagguugggaugagggauacag

SEQ ID NO: 584758 - RNA, 22 nt, Human
auuugcuuuaagguauaaaagg

SEQ ID NO: 584759 - RNA, 22 nt, Human
caugauuuacuaaaauuuguuu

SEQ ID NO: 584760 - RNA, 22 nt, Human
ugguauuuaagacuucacuccu

SEQ ID NO: 584761 - RNA, 22 nt, Human
uaagcaaucuguaguuggaauc

SEQ ID NO: 584762 - RNA, 22 nt, Human
cuacugccauugucucugccau

SEQ ID NO: 584763 - RNA, 22 nt, Human
uacuucauuauucuaguuuuga

SEQ ID NO: 584764 - RNA, 22 nt, Human
ugagccaggcucaagugauccu

SEQ ID NO: 584765 - RNA, 22 nt, Human
uuuaaacuguugauuuuaugaa

SEQ ID NO: 584766 - RNA, 22 nt, Human
ugaggccacaguaucagaacag

SEQ ID NO: 584767 - RNA, 22 nt, Human
uagcuuaaaccaaucugaauaa

SEQ ID NO: 584768 - RNA, 22 nt, Human
cugacucuccucaagcauaaau

SEQ ID NO: 584769 - RNA, 22 nt, Human
ugaggagccacucuagcaguca

SEQ ID NO: 584770 - RNA, 22 nt, Human
caggagaccugguaagccaagu

SEQ ID NO: 584771 - RNA, 22 nt, Human
acauauauuacuaguaaagaca

SEQ ID NO: 584772 - RNA, 22 nt, Human
uuauacagcauugcuagugaug

SEQ ID NO: 584773 - RNA, 22 nt, Human
aaguguaagcaaagcucaagcu

SEQ ID NO: 584774 - RNA, 22 nt, Human
gaagauuaaauggcucccauau

SEQ ID NO: 584775 - RNA, 17 nt, Human
aggucugagaguaucug

SEQ ID NO: 584776 - RNA, 22 nt, Human
uucucuggcgcgcugugcuaug

SEQ ID NO: 584777 - RNA, 22 nt, Human
agccuggaguucccaggagaag

SEQ ID NO: 584778 - RNA, 22 nt, Human
uucagaaagguaaauggauuuc

SEQ ID NO: 584779 - RNA, 22 nt, Human
aauuuacacuucauuuggaggg

SEQ ID NO: 584780 - RNA, 22 nt, Human
ucugagaaugguggauguggug

SEQ ID NO: 584781 - RNA, 22 nt, Human
agacgcuauuuugaggggucua

SEQ ID NO: 584782 - RNA, 22 nt, Human
guuuucaugucuauugggcaua

SEQ ID NO: 584783 - RNA, 22 nt, Human
aguuauucauuuauucuguaca

SEQ ID NO: 584784 - RNA, 22 nt, Human
ggcagcuggccuccucgcccac

SEQ ID NO: 584785 - RNA, 22 nt, Human
gugcaguuguggacaugacaac

SEQ ID NO: 584786 - RNA, 21 nt, Human
ugcauggaggaaaguuauaga

SEQ ID NO: 584787 - RNA, 22 nt, Human
ccacaagacucugucagcauaa

SEQ ID NO: 584788 - RNA, 22 nt, Human
uacaaaggaguagagaaggcuu

SEQ ID NO: 584789 - RNA, 22 nt, Human
gggaccagaagaaggaugguga

SEQ ID NO: 584790 - RNA, 22 nt, Human
cuuauuuuaagucaguuugggu

SEQ ID NO: 584791 - RNA, 22 nt, Human
ccaccaugggaagagagacuaa

SEQ ID NO: 584792 - RNA, 22 nt, Human
caagcauacucauuccagacuc

SEQ ID NO: 584793 - RNA, 22 nt, Human
cauuucugugacacuuccaucu

SEQ ID NO: 584794 - RNA, 22 nt, Human
agcaggagcauuuccaugauuc

SEQ ID NO: 584795 - RNA, 22 nt, Human
uagagaauuguagccugcaaga

SEQ ID NO: 584796 - RNA, 22 nt, Human
ccagggcugcucauuggcuggu

SEQ ID NO: 584797 - RNA, 22 nt, Human
acacauauguggcaacuguaga

SEQ ID NO: 584798 - RNA, 22 nt, Human
agugccuugugugugggcagcc

SEQ ID NO: 584799 - RNA, 22 nt, Human
ucaggcuguuccuguccaaaau

SEQ ID NO: 584800 - RNA, 22 nt, Human
gcccacagguccuaccucuuuc

SEQ ID NO: 584801 - RNA, 22 nt, Human
gcugagagaucaaggcaggauu

SEQ ID NO: 584802 - RNA, 22 nt, Human
gcaggcaguugcaguuuucuag

SEQ ID NO: 584803 - RNA, 22 nt, Human
uugacaucaaauagauaucuuu

SEQ ID NO: 584804 - RNA, 22 nt, Human
agagccugcagcugugaagaaa

SEQ ID NO: 584805 - RNA, 18 nt, Human
acagacaaaauggaaaug

SEQ ID NO: 584806 - RNA, 22 nt, Human
guacauuucucuuguucuuauu

SEQ ID NO: 584807 - RNA, 22 nt, Human
gcugccaugguccaggcuccag

SEQ ID NO: 584808 - RNA, 22 nt, Human
aagcugccuugcugaggagaaa

SEQ ID NO: 584809 - RNA, 21 nt, Human
uuccuggggaaggagcugccu

SEQ ID NO: 584810 - RNA, 22 nt, Human
agagauuaagucacuuggucag

SEQ ID NO: 584811 - RNA, 22 nt, Human
uuacacuaugaaugagaauaua

SEQ ID NO: 584812 - RNA, 22 nt, Human
aggggucuuuaggaacgucggg

SEQ ID NO: 584813 - RNA, 22 nt, Human
agagcuggggccagagucaagg

SEQ ID NO: 584814 - RNA, 22 nt, Human
cagcaugguggagcugcucuuu

SEQ ID NO: 584815 - RNA, 22 nt, Human
augcaggggcagcagagccugg

SEQ ID NO: 584816 - RNA, 22 nt, Human
gacaggguccaaaggcagggga

SEQ ID NO: 584817 - RNA, 22 nt, Human
agugucugugcuuugcagcaaa

SEQ ID NO: 584818 - RNA, 22 nt, Human
ucaggcuguggcuuugaccgca

SEQ ID NO: 584819 - RNA, 22 nt, Human
agugugugcaugcauucgugca

SEQ ID NO: 584820 - RNA, 22 nt, Human
uaucacaauuccuauaguuugu

SEQ ID NO: 584821 - RNA, 22 nt, Human
acaguucuccagugccuuugag

SEQ ID NO: 584822 - RNA, 22 nt, Human
gaggcagcugggcuggugguuu

SEQ ID NO: 584823 - RNA, 21 nt, Human
aucagaaaauguaauggagca

SEQ ID NO: 584824 - RNA, 22 nt, Human
auuccacuuagugacucauuug

SEQ ID NO: 584825 - RNA, 22 nt, Human
uuacaucauggaggguauugaa

SEQ ID NO: 584826 - RNA, 22 nt, Human
uuuaugcacacuuagacauggc

SEQ ID NO: 584827 - RNA, 22 nt, Human
cuucuugucagugauuucuucc

SEQ ID NO: 584828 - RNA, 22 nt, Human
uuagcaggaagaguuggcugga

SEQ ID NO: 584829 - RNA, 22 nt, Human
uucucaguauuacaugcuaaug

SEQ ID NO: 584830 - RNA, 20 nt, Human
caaauggcuuuuauuuccuu

SEQ ID NO: 584831 - RNA, 22 nt, Human
cagggaugggauggagucaguu

SEQ ID NO: 584832 - RNA, 22 nt, Human
cugccaggcagcagagggagaa

SEQ ID NO: 584833 - RNA, 22 nt, Human
cugggcucugcaguugauguuu

SEQ ID NO: 584834 - RNA, 23 nt, Human
ugcaagaguuccaaacuguucaa

SEQ ID NO: 584835 - RNA, 22 nt, Human
aaacaguacucgauuuuuguag

SEQ ID NO: 584836 - RNA, 22 nt, Human
ucuguuuucucuguauuuugac

SEQ ID NO: 584837 - RNA, 22 nt, Human
gggugggaugccgcugucucca

SEQ ID NO: 584838 - RNA, 22 nt, Human
gagcaggcuugcagagaagggg

SEQ ID NO: 584839 - RNA, 22 nt, Human
gacauuuagaagucuaauggcc

SEQ ID NO: 584840 - RNA, 22 nt, Human
agccuggagaggcgccauacac

SEQ ID NO: 584841 - RNA, 22 nt, Human
ccuggccuccuggccuucucau

SEQ ID NO: 584842 - RNA, 20 nt, Human
acugagguuagauaacaggu

SEQ ID NO: 584843 - RNA, 22 nt, Human
ccugucuggccuuccacggggg

SEQ ID NO: 584844 - RNA, 21 nt, Human
gccugcaguuuugaagcccuu

SEQ ID NO: 584845 - RNA, 22 nt, Human
acugcagagguggggugcagag

SEQ ID NO: 584846 - RNA, 22 nt, Human
gcugucucauacaaggcccugc

SEQ ID NO: 584847 - RNA, 22 nt, Human
cuuagaauuuuaauccagaaag

SEQ ID NO: 584848 - RNA, 22 nt, Human
gucuggggguccgggugccugc

SEQ ID NO: 584849 - RNA, 22 nt, Human
guuacaaaggacugggggccac

SEQ ID NO: 584850 - RNA, 22 nt, Human
agcucagaacugcagacaugug

SEQ ID NO: 584851 - RNA, 22 nt, Human
auguuacagaaagcaaagauga

SEQ ID NO: 584852 - RNA, 18 nt, Human
ucaagacaucaugaaaua

SEQ ID NO: 584853 - RNA, 19 nt, Human
acccugagaggugguccgg

SEQ ID NO: 584854 - RNA, 22 nt, Human
cacaggccugggguugagcggg

SEQ ID NO: 584855 - RNA, 22 nt, Human
ugcugcuguaucaugccuucau

SEQ ID NO: 584856 - RNA, 22 nt, Human
aauuaccaggauuuuucaguau

SEQ ID NO: 584857 - RNA, 22 nt, Human
aggaaaggccucagcagaaacc

SEQ ID NO: 584858 - RNA, 22 nt, Human
ccaggccagcaggcacaccugc

SEQ ID NO: 584859 - RNA, 22 nt, Human
gcaggggcuaaggacacagaga

SEQ ID NO: 584860 - RNA, 22 nt, Human
agccauuuggacuucugguagg

SEQ ID NO: 584861 - RNA, 23 nt, Human
gcugagguccugcugaguggugg

SEQ ID NO: 584862 - RNA, 22 nt, Human
gaauaucccgcuaugcaaagua

SEQ ID NO: 584863 - RNA, 22 nt, Human
agaaaggagcaccgugggggau

SEQ ID NO: 584864 - RNA, 22 nt, Human
cagacagacagccguggccacc

SEQ ID NO: 584865 - RNA, 22 nt, Human
cccaggcugaugggaugggcca

SEQ ID NO: 584866 - RNA, 22 nt, Human
cagugauggauauggagaaguc

SEQ ID NO: 584867 - RNA, 20 nt, Human
uguagccagccucucaaugc

SEQ ID NO: 584868 - RNA, 22 nt, Human
cucccuggcuuuguccugaggc

SEQ ID NO: 584869 - RNA, 22 nt, Human
ggccucaggguugggcccauua

SEQ ID NO: 584870 - RNA, 22 nt, Human
guuuuuaucuaauagcaguuau

SEQ ID NO: 584871 - RNA, 22 nt, Human
cugggccaucagaggggcugga

SEQ ID NO: 584872 - RNA, 22 nt, Human
gaacaggcauaagcauuugcau

SEQ ID NO: 584873 - RNA, 22 nt, Human
gugccugggguugagcuaugaa

SEQ ID NO: 584874 - RNA, 22 nt, Human
ucagaagcauguggggagccug

SEQ ID NO: 584875 - RNA, 22 nt, Human
agcagggcucuguggagggugg

SEQ ID NO: 584876 - RNA, 22 nt, Human
uggggaaacuauuuccuugucc

SEQ ID NO: 584877 - RNA, 22 nt, Human
aaauuauucaaaaagcuguguu

SEQ ID NO: 584878 - RNA, 22 nt, Human
ugggaagaggcgggaggcuguu

SEQ ID NO: 584879 - RNA, 22 nt, Human
acacggcacuuuaggaaggggc

SEQ ID NO: 584880 - RNA, 22 nt, Human
auuuauugagccuuuccuaugu

SEQ ID NO: 584881 - RNA, 21 nt, Human
acauuuucuguuuuaggaagu

SEQ ID NO: 584882 - RNA, 22 nt, Human
ugagggcaaaguggugcugagg

SEQ ID NO: 584883 - RNA, 22 nt, Human
ugcagcaagcaaguaugguucu

SEQ ID NO: 584884 - RNA, 22 nt, Human
cccaaccagaaauugacagaga

SEQ ID NO: 584885 - RNA, 22 nt, Human
uuuagcauccaagguuaugacu

SEQ ID NO: 584886 - RNA, 22 nt, Human
uuugcucuugcuggaaaaguug

SEQ ID NO: 584887 - RNA, 22 nt, Human
agcucccugagaugccacagca

SEQ ID NO: 584888 - RNA, 22 nt, Human
gagggugggccagauaugaggg

SEQ ID NO: 584889 - RNA, 22 nt, Human
ucucucuugaaguauuagcuag

SEQ ID NO: 584890 - RNA, 22 nt, Human
uacaguauguucuugaauuugg

SEQ ID NO: 584891 - RNA, 22 nt, Human
uggggcuggcacagucucuauu

SEQ ID NO: 584892 - RNA, 22 nt, Human
gaaauagaagcugccaauuucu

SEQ ID NO: 584893 - RNA, 22 nt, Human
acauuguugccuagccaugagu

SEQ ID NO: 584894 - RNA, 22 nt, Human
cuggcaccaggcaugcugggag

SEQ ID NO: 584895 - RNA, 22 nt, Human
agcucuuaucucuaagcacagc

SEQ ID NO: 584896 - RNA, 22 nt, Human
auauggcagaccaauuagaagc

SEQ ID NO: 584897 - RNA, 22 nt, Human
cccagagaaucuuucagaaagg

SEQ ID NO: 584898 - RNA, 22 nt, Human
ccagggugugggcgucggcacg

SEQ ID NO: 584899 - RNA, 22 nt, Human
cuggagucacucauguagcugc

SEQ ID NO: 584900 - RNA, 22 nt, Human
cugcagccucaaccuccugagc

SEQ ID NO: 584901 - RNA, 22 nt, Human
caagcugguaucagcuagagcg

SEQ ID NO: 584902 - RNA, 22 nt, Human
ggaggccaaggagggcggauca

SEQ ID NO: 584903 - RNA, 22 nt, Human
uggcccugacacgugguacugg

SEQ ID NO: 584904 - RNA, 22 nt, Human
cugucaguucuuccagauagag

SEQ ID NO: 584905 - RNA, 22 nt, Human
gcagagucugggcagccuccau

SEQ ID NO: 584906 - RNA, 22 nt, Human
auuuucaucauggguuuaacau

SEQ ID NO: 584907 - RNA, 22 nt, Human
acagccugauuuauggagcagu

SEQ ID NO: 584908 - RNA, 22 nt, Human
uucugcaucugaauuuaaguac

SEQ ID NO: 584909 - RNA, 19 nt, Human
ugugauaguugaaccugcc

SEQ ID NO: 584910 - RNA, 22 nt, Human
gucccucugggccaucaggucc

SEQ ID NO: 584911 - RNA, 22 nt, Human
uacagucuuuggaaagagauag

SEQ ID NO: 584912 - RNA, 22 nt, Human
ucagaggaauaaugcugcauuu

SEQ ID NO: 584913 - RNA, 22 nt, Human
guuuccuuugccaguaaauggg

SEQ ID NO: 584914 - RNA, 21 nt, Human
ugagguagccagugagaugga

SEQ ID NO: 584915 - RNA, 22 nt, Human
acuguaaugguggauccauguc

SEQ ID NO: 584916 - RNA, 22 nt, Human
ucuggcuuggcgcugcccucug

SEQ ID NO: 584917 - RNA, 22 nt, Human
ccaggguuuagcaagccuacaa

SEQ ID NO: 584918 - RNA, 20 nt, Human
uuaagaaaagcacauccugc

SEQ ID NO: 584919 - RNA, 22 nt, Human
aacaguagguguaaccaaacaa

SEQ ID NO: 584920 - RNA, 22 nt, Human
ucugggaacgaaggcuaauaug

SEQ ID NO: 584921 - RNA, 22 nt, Human
ucagaggagccaaaguucugag

SEQ ID NO: 584922 - RNA, 22 nt, Human
ccagugccuaucuccucuggga

SEQ ID NO: 584923 - RNA, 22 nt, Human
cuguauuagccaggugcacaag

SEQ ID NO: 584924 - RNA, 22 nt, Human
ugcauuccuuugucuguuaaag

SEQ ID NO: 584925 - RNA, 22 nt, Human
cagugcccaagaugugccaugc

SEQ ID NO: 584926 - RNA, 22 nt, Human
agucugggaacugggaacguuu

SEQ ID NO: 584927 - RNA, 22 nt, Human
uugaagcagcucaggaggcuua

SEQ ID NO: 584928 - RNA, 22 nt, Human
guggaaauaguuugguuauaga

SEQ ID NO: 584929 - RNA, 22 nt, Human
cagcucuuuauugccaauauuc

SEQ ID NO: 584930 - RNA, 22 nt, Human
gccaugggucugcuggcucagc

SEQ ID NO: 584931 - RNA, 22 nt, Human
ggaugcaggaacacagcgaccu

SEQ ID NO: 584932 - RNA, 18 nt, Human
gaagggagcuggaaugca

SEQ ID NO: 584933 - RNA, 22 nt, Human
ugggccaggggccucuucugau

SEQ ID NO: 584934 - RNA, 22 nt, Human
aggauuuagcaugaaaugugaa

SEQ ID NO: 584935 - RNA, 22 nt, Human
uuggccagagguuucucucaug

SEQ ID NO: 584936 - RNA, 22 nt, Human
cagugagggcauucagugcugg

SEQ ID NO: 584937 - RNA, 23 nt, Human
aucaccagcggaagcugcagacc

SEQ ID NO: 584938 - RNA, 22 nt, Human
gcaugagggggguuaggaaguu

SEQ ID NO: 584939 - RNA, 22 nt, Human
uggagggauacaaagaugaaaa

SEQ ID NO: 584940 - RNA, 22 nt, Human
cuggagcccugaaugggcagga

SEQ ID NO: 584941 - RNA, 22 nt, Human
auuuuccagccuuucuagaacu

SEQ ID NO: 584942 - RNA, 22 nt, Human
gugcccugucucuugucuccag

SEQ ID NO: 584943 - RNA, 22 nt, Human
ucccugugggcagaggcugccu

SEQ ID NO: 584944 - RNA, 22 nt, Human
ucugaggucucaugacuugcau

SEQ ID NO: 584945 - RNA, 22 nt, Human
guuauuuauaagguguaacucc

SEQ ID NO: 584946 - RNA, 22 nt, Human
cuggugggagcagcaggcagcu

SEQ ID NO: 584947 - RNA, 22 nt, Human
uugauuuuuuucuacuaugcgc

SEQ ID NO: 584948 - RNA, 22 nt, Human
auacauuccuacugacuagcua

SEQ ID NO: 584949 - RNA, 22 nt, Human
agcaccaggcuguuggaagccc

SEQ ID NO: 584950 - RNA, 22 nt, Human
uuuuguaagaaacugccaagcc

SEQ ID NO: 584951 - RNA, 22 nt, Human
aucauacagccuuuguuagugu

SEQ ID NO: 584952 - RNA, 22 nt, Human
cuuucauuugauaagaaugcca

SEQ ID NO: 584953 - RNA, 22 nt, Human
uguuaggacuccccagaagcug

SEQ ID NO: 584954 - RNA, 22 nt, Human
uuuuccucuguauuugaaaugc

SEQ ID NO: 584955 - RNA, 22 nt, Human
uccagguuucgcuacaggagag

SEQ ID NO: 584956 - RNA, 22 nt, Human
agauaagauaguccagcacaau

SEQ ID NO: 584957 - RNA, 22 nt, Human
cugagugauagcgauggggaac

SEQ ID NO: 584958 - RNA, 18 nt, Human
cugggacucaaugcuacu

SEQ ID NO: 584959 - RNA, 22 nt, Human
cacagaauaauucacauggcuc

SEQ ID NO: 584960 - RNA, 22 nt, Human
gggggccaucuucaaggaugug

SEQ ID NO: 584961 - RNA, 22 nt, Human
acggcuucuugacuguggguug

SEQ ID NO: 584962 - RNA, 22 nt, Human
aguguacauguuuacagcaucu

SEQ ID NO: 584963 - RNA, 22 nt, Human
caggguacagaguuuucuaaac

SEQ ID NO: 584964 - RNA, 22 nt, Human
aagggcuggaucucucugagca

SEQ ID NO: 584965 - RNA, 22 nt, Human
ccugccugcguccucugagggc

SEQ ID NO: 584966 - RNA, 23 nt, Human
ggggaaagaccaugcuugaggac

SEQ ID NO: 584967 - RNA, 22 nt, Human
uuaaucucuuagcaaauuaaug

SEQ ID NO: 584968 - RNA, 22 nt, Human
cagccagcuucagauccaagcc

SEQ ID NO: 584969 - RNA, 22 nt, Human
acagcugugggcucugcauaua

SEQ ID NO: 584970 - RNA, 22 nt, Human
acuuucuuaggcuguauaaaug

SEQ ID NO: 584971 - RNA, 21 nt, Human
uaauuuauucagcacaguguu

SEQ ID NO: 584972 - RNA, 22 nt, Human
agucaguguagaaagcccaggc

SEQ ID NO: 584973 - RNA, 21 nt, Human
gacaaacauuucauagcuuua

SEQ ID NO: 584974 - RNA, 22 nt, Human
gagcugagcagggagccucacu

SEQ ID NO: 584975 - RNA, 22 nt, Human
ggagcugcucagagccaguccc

SEQ ID NO: 584976 - RNA, 22 nt, Human
aguuuuauuaaauccacagaag

SEQ ID NO: 584977 - RNA, 22 nt, Human
cuggagcuggcuuccuuccacu

SEQ ID NO: 584978 - RNA, 22 nt, Human
uaacuucuggaaaugcaucugc

SEQ ID NO: 584979 - RNA, 22 nt, Human
guggcaggagagacacagccau

SEQ ID NO: 584980 - RNA, 19 nt, Human
ugugccucuauagcaugug

SEQ ID NO: 584981 - RNA, 22 nt, Human
gcaggcugaugacuggaguugg

SEQ ID NO: 584982 - RNA, 18 nt, Human
uggagagcagcagugggg

SEQ ID NO: 584983 - RNA, 16 nt, Human
gaggcuggcagauguc

SEQ ID NO: 584984 - RNA, 22 nt, Human
uacauacaagcauucaauuuua

SEQ ID NO: 584985 - RNA, 22 nt, Human
uuuaaugaauaauucaaaucug

SEQ ID NO: 584986 - RNA, 22 nt, Human
gcugccacucugagcuugcuuc

SEQ ID NO: 584987 - RNA, 22 nt, Human
uuuguguuggaagaaaugcuac

SEQ ID NO: 584988 - RNA, 22 nt, Human
aucuuucuauuucuaaaaacua

SEQ ID NO: 584989 - RNA, 22 nt, Human
cagaaagcagagcugagccuuu

SEQ ID NO: 584990 - RNA, 22 nt, Human
aaaugcuguagaucagugaguu

SEQ ID NO: 584991 - RNA, 22 nt, Human
gagcuuuucccgucuuucucgu

SEQ ID NO: 584992 - RNA, 22 nt, Human
aacacugguuuggcauuagaug

SEQ ID NO: 584993 - RNA, 19 nt, Human
uggaaaauggauugaauca

SEQ ID NO: 584994 - RNA, 23 nt, Human
cccagagcacagccuccagaugc

SEQ ID NO: 584995 - RNA, 18 nt, Human
agauuuugagaaauacaa

SEQ ID NO: 584996 - RNA, 22 nt, Human
cugggcucuguguuucaguuuc

SEQ ID NO: 584997 - RNA, 22 nt, Human
agggaugggucuaacccagaac

SEQ ID NO: 584998 - RNA, 22 nt, Human
uuggugcaaauuccuguaagag

SEQ ID NO: 584999 - RNA, 22 nt, Human
ggccacugccuccgccauggcu

SEQ ID NO: 585000 - RNA, 22 nt, Human
acacacagcgccuaccaugugc

SEQ ID NO: 585001 - RNA, 22 nt, Human
uucuuucucacucuuuaggaag

SEQ ID NO: 585002 - RNA, 22 nt, Human
auugugcaucuacugugugcag

SEQ ID NO: 585003 - RNA, 22 nt, Human
aacagcuucaucacauggcaua

SEQ ID NO: 585004 - RNA, 22 nt, Human
aauaagugaguuuagcaaguuu

SEQ ID NO: 585005 - RNA, 22 nt, Human
uccagucugguaugaauccuag

SEQ ID NO: 585006 - RNA, 22 nt, Human
caagggaguugcugcaugcagg

SEQ ID NO: 585007 - RNA, 22 nt, Human
aagacacuaagcuuucaggaua

SEQ ID NO: 585008 - RNA, 22 nt, Human
gugggcaggaggcccugcccug

SEQ ID NO: 585009 - RNA, 22 nt, Human
caaauuuagguaacagucugua

SEQ ID NO: 585010 - RNA, 22 nt, Human
ugaaauacacaaauuuaguaag

SEQ ID NO: 585011 - RNA, 22 nt, Human
agccugagagccaagcugugca

SEQ ID NO: 585012 - RNA, 22 nt, Human
cccagccugucuuucccaauga

SEQ ID NO: 585013 - RNA, 22 nt, Human
auguuuguagguaagugacacu

SEQ ID NO: 585014 - RNA, 22 nt, Human
uagcacuauuuuucacuauccu

SEQ ID NO: 585015 - RNA, 22 nt, Human
ggcacagggugauguugcaguu

SEQ ID NO: 585016 - RNA, 22 nt, Human
aggcuccuaucgcuuucagcaa

SEQ ID NO: 585017 - RNA, 22 nt, Human
agggaggcauuagcuacugcga

SEQ ID NO: 585018 - RNA, 22 nt, Human
gugcagcaaaguuugagauaua

SEQ ID NO: 585019 - RNA, 18 nt, Human
ugggcacaaugaacagca

SEQ ID NO: 585020 - RNA, 22 nt, Human
cacagagacagaagcacuuaug

SEQ ID NO: 585021 - RNA, 20 nt, Human
uacaauauucccacuuugcu

SEQ ID NO: 585022 - RNA, 22 nt, Human
cuguccccugugcuuucacuug

SEQ ID NO: 585023 - RNA, 22 nt, Human
gcucucuggaggccauggacag

SEQ ID NO: 585024 - RNA, 22 nt, Human
aauggcagaaugggccagaagc

SEQ ID NO: 585025 - RNA, 22 nt, Human
uucacaggugagcauuaggccg

SEQ ID NO: 585026 - RNA, 22 nt, Human
agucuaguaggaucucugggcu

SEQ ID NO: 585027 - RNA, 22 nt, Human
caaggaaucccauuucuaacuc

SEQ ID NO: 585028 - RNA, 22 nt, Human
cacaaugcguacauauaucaaa

SEQ ID NO: 585029 - RNA, 22 nt, Human
agcucccauuaucuucugaaac

SEQ ID NO: 585030 - RNA, 22 nt, Human
aucugaaaaaucuccuuuguca

SEQ ID NO: 585031 - RNA, 20 nt, Human
agaacaaguacuaaaggaga

SEQ ID NO: 585032 - RNA, 22 nt, Human
ggcuuccuggagaaggucugag

SEQ ID NO: 585033 - RNA, 22 nt, Human
ccaaagugcugagauuacaggu

SEQ ID NO: 585034 - RNA, 22 nt, Human
aguuuuugagaauuuacuaugu

SEQ ID NO: 585035 - RNA, 22 nt, Human
augcuuugauuugguuucucua

SEQ ID NO: 585036 - RNA, 22 nt, Human
uucugugugcuuacugguguuc

SEQ ID NO: 585037 - RNA, 22 nt, Human
cugaagcauaucaugccaaguu

SEQ ID NO: 585038 - RNA, 22 nt, Human
agcuccugcgcacggugcacac

SEQ ID NO: 585039 - RNA, 22 nt, Human
auuccuugggaauuauugaaug

SEQ ID NO: 585040 - RNA, 22 nt, Human
gcagcaggcacuuaccguugcu

SEQ ID NO: 585041 - RNA, 22 nt, Human
uugacuguugcugccauucugg

SEQ ID NO: 585042 - RNA, 22 nt, Human
uaaauaggguaagcguguuuac

SEQ ID NO: 585043 - RNA, 22 nt, Human
augacaauacuucaauaagcug

SEQ ID NO: 585044 - RNA, 22 nt, Human
cagcccugcuuccccgcuaguu

SEQ ID NO: 585045 - RNA, 22 nt, Human
gccaugaggcuccgagaaguca

SEQ ID NO: 585046 - RNA, 22 nt, Human
uggcucagugcauucacaguaa

SEQ ID NO: 585047 - RNA, 22 nt, Human
uuaagaggugaggccuuuaaga

SEQ ID NO: 585048 - RNA, 22 nt, Human
ucuucuucccaucccucaaaug

SEQ ID NO: 585049 - RNA, 22 nt, Human
gcagagugccgagauggaagcg

SEQ ID NO: 585050 - RNA, 22 nt, Human
agcugggcuggagcuccaagcg

SEQ ID NO: 585051 - RNA, 22 nt, Human
ugucaaaaauaagagagauugu

SEQ ID NO: 585052 - RNA, 22 nt, Human
cccuggagggacagcugcucua

SEQ ID NO: 585053 - RNA, 22 nt, Human
acaucucaugaaugauaaauca

SEQ ID NO: 585054 - RNA, 22 nt, Human
auggccugggcccgcuucagau

SEQ ID NO: 585055 - RNA, 22 nt, Human
agagcuaagaaacagaauugcu

SEQ ID NO: 585056 - RNA, 22 nt, Human
cugaaugacugaagucacaauu

SEQ ID NO: 585057 - RNA, 17 nt, Human
auucuguaagguuggau

SEQ ID NO: 585058 - RNA, 22 nt, Human
auucagaagcaaucacagugag

SEQ ID NO: 585059 - RNA, 22 nt, Human
aagcucagugaugccuccaggg

SEQ ID NO: 585060 - RNA, 22 nt, Human
gggcuacagacaugcucuaagc

SEQ ID NO: 585061 - RNA, 22 nt, Human
gagucuggcccugaugcaucau

SEQ ID NO: 585062 - RNA, 22 nt, Human
uucuuucugucaugguguacug

SEQ ID NO: 585063 - RNA, 22 nt, Human
gauagcugcugggauauuuuua

SEQ ID NO: 585064 - RNA, 22 nt, Human
ucugggaaugaggcuugggcaa

SEQ ID NO: 585065 - RNA, 22 nt, Human
gcuucagccgggcacuuaauga

SEQ ID NO: 585066 - RNA, 22 nt, Human
gccaggugggagacagacagca

SEQ ID NO: 585067 - RNA, 22 nt, Human
gaggagggagcuggaagcucuu

SEQ ID NO: 585068 - RNA, 22 nt, Human
uccuccacgauggcacaccugg

SEQ ID NO: 585069 - RNA, 22 nt, Human
gcacccagagggcagggucucc

SEQ ID NO: 585070 - RNA, 20 nt, Human
aaagcaguaugcaaguagag

SEQ ID NO: 585071 - RNA, 22 nt, Human
gaaaagaguccugugugaggag

SEQ ID NO: 585072 - RNA, 22 nt, Human
guuacaauguucuucaguucug

SEQ ID NO: 585073 - RNA, 22 nt, Human
uagcaaaaacugcaguuacuuu

SEQ ID NO: 585074 - RNA, 22 nt, Human
ucaggccaaagaaacagcauga

SEQ ID NO: 585075 - RNA, 22 nt, Human
ccuuccuucaagcacacaucua

SEQ ID NO: 585076 - RNA, 22 nt, Human
cugcagagagugccgggcagcc

SEQ ID NO: 585077 - RNA, 22 nt, Human
ucuuggccccaccugugccagc

SEQ ID NO: 585078 - RNA, 22 nt, Human
ucucuggucccaccuggccauu

SEQ ID NO: 585079 - RNA, 22 nt, Human
agaaacauuuagauuauauguc

SEQ ID NO: 585080 - RNA, 22 nt, Human
ggcugaggcucaugccaucuug

SEQ ID NO: 585081 - RNA, 22 nt, Human
caagauuuccaacccuggguaa

SEQ ID NO: 585082 - RNA, 22 nt, Human
gggcaauucacaggguuguuau

SEQ ID NO: 585083 - RNA, 22 nt, Human
auauauaaccuggauaaggcuu

SEQ ID NO: 585084 - RNA, 22 nt, Human
aaacugaauucaaguauccagu

SEQ ID NO: 585085 - RNA, 18 nt, Human
gauauauaggaggaaagu

SEQ ID NO: 585086 - RNA, 22 nt, Human
ucugacaagucaagucuugacu

SEQ ID NO: 585087 - RNA, 22 nt, Human
cacccaggcuggauugcagugg

SEQ ID NO: 585088 - RNA, 22 nt, Human
cagcaaagguagaagcacagga

SEQ ID NO: 585089 - RNA, 22 nt, Human
gagaaacaggaauugagucgcu

SEQ ID NO: 585090 - RNA, 22 nt, Human
aucucugggcuuugaguuuguu

SEQ ID NO: 585091 - RNA, 23 nt, Human
ugagucuacucaccacaacuggg

SEQ ID NO: 585092 - RNA, 22 nt, Human
aaccucaaacucuugggcuuaa

SEQ ID NO: 585093 - RNA, 22 nt, Human
uacacccuucuccugagugugu

SEQ ID NO: 585094 - RNA, 22 nt, Human
aagggagacaguugugugagga

SEQ ID NO: 585095 - RNA, 22 nt, Human
aaugacaugcuuuuuaauuaua

SEQ ID NO: 585096 - RNA, 22 nt, Human
ugcugcuggaucuuacucaucu

SEQ ID NO: 585097 - RNA, 22 nt, Human
cucagaaagcaaucuggugagg

SEQ ID NO: 585098 - RNA, 22 nt, Human
ucaagcaaguugcauauugcua

SEQ ID NO: 585099 - RNA, 22 nt, Human
gcuccgugggcauugcuaggug

SEQ ID NO: 585100 - RNA, 22 nt, Human
ucagaaauagucuuuaaaauga

SEQ ID NO: 585101 - RNA, 22 nt, Human
ggagggguggucaccuggcagg

SEQ ID NO: 585102 - RNA, 22 nt, Human
ccagguggacaaggcuuucaca

SEQ ID NO: 585103 - RNA, 22 nt, Human
cccaggaggucgaagcugcagu

SEQ ID NO: 585104 - RNA, 22 nt, Human
gggcagagguucaacuucaaca

SEQ ID NO: 585105 - RNA, 22 nt, Human
cccagaaggucgaggcugcagu

SEQ ID NO: 585106 - RNA, 22 nt, Human
cuggagugcaguggcaugauca

SEQ ID NO: 585107 - RNA, 22 nt, Human
ccuguggcucucuuuggagguc

SEQ ID NO: 585108 - RNA, 22 nt, Human
augcaguuagguaauagucuca

SEQ ID NO: 585109 - RNA, 22 nt, Human
uuccugggacuggagcagccca

SEQ ID NO: 585110 - RNA, 22 nt, Human
acagaacauggauuuuugaagu

SEQ ID NO: 585111 - RNA, 22 nt, Human
uagugauucccuaucaacccug

SEQ ID NO: 585112 - RNA, 22 nt, Human
accaggaguaacagugaguggu

SEQ ID NO: 585113 - RNA, 22 nt, Human
agccaggcugcaguuggcuggc

SEQ ID NO: 585114 - RNA, 22 nt, Human
aucuauuucugcuaauaacaau

SEQ ID NO: 585115 - RNA, 22 nt, Human
ugagcugugaucuaugauaaau

SEQ ID NO: 585116 - RNA, 23 nt, Human
cagugugacgaggugaggcaggc

SEQ ID NO: 585117 - RNA, 22 nt, Human
gcuggcucgggaagcaggggau

SEQ ID NO: 585118 - RNA, 22 nt, Human
caggcuguguuccuggaacccc

SEQ ID NO: 585119 - RNA, 20 nt, Human
uccugagauuuaagggguuc

SEQ ID NO: 585120 - RNA, 22 nt, Human
cuugaaccaaucacuguagcca

SEQ ID NO: 585121 - RNA, 22 nt, Human
uauuauugcaaguauauaaagu

SEQ ID NO: 585122 - RNA, 22 nt, Human
guuucacagauggggagacacg

SEQ ID NO: 585123 - RNA, 22 nt, Human
uguuuaugugugugcauauaua

SEQ ID NO: 585124 - RNA, 22 nt, Human
ugcagcagacugaguaugagaa

SEQ ID NO: 585125 - RNA, 22 nt, Human
aaacuugaggcaaugaaggugu

SEQ ID NO: 585126 - RNA, 22 nt, Human
ugacagaacagguugggagcaa

SEQ ID NO: 585127 - RNA, 22 nt, Human
cugggccaugggccagcgaggc

SEQ ID NO: 585128 - RNA, 22 nt, Human
guaaaacugucuaaugguauau

SEQ ID NO: 585129 - RNA, 22 nt, Human
ucaagcaaaguuuagcugguua

SEQ ID NO: 585130 - RNA, 22 nt, Human
acacauuaucucauuaaauacu

SEQ ID NO: 585131 - RNA, 22 nt, Human
cugccuggcccagggaugggcc

SEQ ID NO: 585132 - RNA, 22 nt, Human
aguuucuuauucuuaguuaugu

SEQ ID NO: 585133 - RNA, 22 nt, Human
uugauauucugagaagcugaag

SEQ ID NO: 585134 - RNA, 22 nt, Human
uucacaugacagggugaagcau

SEQ ID NO: 585135 - RNA, 22 nt, Human
caucacagggggcuagaagucu

SEQ ID NO: 585136 - RNA, 22 nt, Human
guuuccuaggcuuauacagcug

SEQ ID NO: 585137 - RNA, 22 nt, Human
ucugaagauucuuuccacuauu

SEQ ID NO: 585138 - RNA, 22 nt, Human
uucucuucccacuuucuguauu

SEQ ID NO: 585139 - RNA, 22 nt, Human
uguuuuccuccugguuucugcc

SEQ ID NO: 585140 - RNA, 22 nt, Human
cuguggagugcuuggcucagug

SEQ ID NO: 585141 - RNA, 18 nt, Human
agcugcagaccaggaggu

SEQ ID NO: 585142 - RNA, 22 nt, Human
caggccaagucccaagugcggg

SEQ ID NO: 585143 - RNA, 22 nt, Human
uguauaaacuuaagcaggaacc

SEQ ID NO: 585144 - RNA, 22 nt, Human
cagcugagcaucacuagucugg

SEQ ID NO: 585145 - RNA, 22 nt, Human
gcaaaguuccuacuuuacugga

SEQ ID NO: 585146 - RNA, 22 nt, Human
ugagccugaguucaaggcugca

SEQ ID NO: 585147 - RNA, 22 nt, Human
ucccuagguccuagucacagua

SEQ ID NO: 585148 - RNA, 22 nt, Human
accugcagcugagaaaaugacu

SEQ ID NO: 585149 - RNA, 22 nt, Human
augucucucagguuuaacuuua

SEQ ID NO: 585150 - RNA, 22 nt, Human
uacauauucuaccccuuuuucu

SEQ ID NO: 585151 - RNA, 22 nt, Human
uuaaaagaauccuguuauccuc

SEQ ID NO: 585152 - RNA, 22 nt, Human
ggacaagccugugaguggguuu

SEQ ID NO: 585153 - RNA, 23 nt, Human
uccuggugacaugccugagcauc

SEQ ID NO: 585154 - RNA, 22 nt, Human
gucaaaaaguagucauuucugu

SEQ ID NO: 585155 - RNA, 22 nt, Human
gccuguuuguuaugucauggua

SEQ ID NO: 585156 - RNA, 22 nt, Human
cggaucaugugaccuuugagug

SEQ ID NO: 585157 - RNA, 22 nt, Human
aaaguuuuagaacuaggaagca

SEQ ID NO: 585158 - RNA, 22 nt, Human
auugcuuacuaaucaucuucag

SEQ ID NO: 585159 - RNA, 22 nt, Human
ucagcaaguggaccauccuggg

SEQ ID NO: 585160 - RNA, 22 nt, Human
acugagguggggucugcuugga

SEQ ID NO: 585161 - RNA, 23 nt, Human
ucucugugugccucaguuucuuc

SEQ ID NO: 585162 - RNA, 22 nt, Human
auucuuaauuccaaagacugag

SEQ ID NO: 585163 - RNA, 22 nt, Human
gcagucccauaucuuuaacaua

SEQ ID NO: 585164 - RNA, 22 nt, Human
agauaauaagucugguaauaau

SEQ ID NO: 585165 - RNA, 22 nt, Human
cucugaaaguuagagaaaauag

SEQ ID NO: 585166 - RNA, 22 nt, Human
uucaguaugauuccuccaguag

SEQ ID NO: 585167 - RNA, 22 nt, Human
caagaugaucccugaaggcagc

SEQ ID NO: 585168 - RNA, 22 nt, Human
cugggcacaaguggcccuggau

SEQ ID NO: 585169 - RNA, 22 nt, Human
uccuucagauuccugcuucugg

SEQ ID NO: 585170 - RNA, 22 nt, Human
ugcacacacucugcauauacuu

SEQ ID NO: 585171 - RNA, 22 nt, Human
ucuggcaggguguguauuuaca

SEQ ID NO: 585172 - RNA, 22 nt, Human
ucuuagcauuuguuaauaccca

SEQ ID NO: 585173 - RNA, 22 nt, Human
acacccaggaauaaggacuggg

SEQ ID NO: 585174 - RNA, 22 nt, Human
uguauguaaaguuuguaauaga

SEQ ID NO: 585175 - RNA, 22 nt, Human
auguauuugcguauggacauac

SEQ ID NO: 585176 - RNA, 22 nt, Human
gcauaaaugugcacacacaugu

SEQ ID NO: 585177 - RNA, 22 nt, Human
auaucaaagcuaguggaaauuu

SEQ ID NO: 585178 - RNA, 22 nt, Human
cagggcugcuggccgugcccuc

SEQ ID NO: 585179 - RNA, 22 nt, Human
aagcacagaaaaggagcaugga

SEQ ID NO: 585180 - RNA, 22 nt, Human
acagagagggagugauaaaucc

SEQ ID NO: 585181 - RNA, 22 nt, Human
cagaagaaaguggggagacaag

SEQ ID NO: 585182 - RNA, 22 nt, Human
agauguggccuuugggagauua

SEQ ID NO: 585183 - RNA, 22 nt, Human
acuuuguauaagacaauaaaga

SEQ ID NO: 585184 - RNA, 18 nt, Human
aggaaagaaaggcaggug

SEQ ID NO: 585185 - RNA, 22 nt, Human
caggccuggcccccggcacacc

SEQ ID NO: 585186 - RNA, 22 nt, Human
ucaucuucuauuaauagggaga

SEQ ID NO: 585187 - RNA, 22 nt, Human
cagaaagaccugggcucaagag

SEQ ID NO: 585188 - RNA, 22 nt, Human
auucagugccaaggagaacuug

SEQ ID NO: 585189 - RNA, 18 nt, Human
acugugugaauuagcucc

SEQ ID NO: 585190 - RNA, 22 nt, Human
augcaggggccgccuggccagg

SEQ ID NO: 585191 - RNA, 21 nt, Human
cucuccagugguuccugauuc

SEQ ID NO: 585192 - RNA, 22 nt, Human
ggcuggucacaccacugcaggg

SEQ ID NO: 585193 - RNA, 22 nt, Human
uacauuaacuuacguccacaug

SEQ ID NO: 585194 - RNA, 22 nt, Human
ugagccaagaucaugccguugu

SEQ ID NO: 585195 - RNA, 22 nt, Human
uucuuucagaacacaagugauu

SEQ ID NO: 585196 - RNA, 18 nt, Human
cauuguacaaugcuuuau

SEQ ID NO: 585197 - RNA, 22 nt, Human
cucuggaagaauacacuuagaa

SEQ ID NO: 585198 - RNA, 22 nt, Human
augugagcuccggcagguggaa

SEQ ID NO: 585199 - RNA, 22 nt, Human
ucaguuacucaacagaggugga

SEQ ID NO: 585200 - RNA, 22 nt, Human
ugugcuucaucacuucucaguu

SEQ ID NO: 585201 - RNA, 19 nt, Human
aggcucugagcuccuggag

SEQ ID NO: 585202 - RNA, 22 nt, Human
gugaggugaguagugagaagcc

SEQ ID NO: 585203 - RNA, 22 nt, Human
acagcaagccagcuugucacug

SEQ ID NO: 585204 - RNA, 19 nt, Human
aaugccucaaauugggaga

SEQ ID NO: 585205 - RNA, 22 nt, Human
uucucagauauuuacugagcau

SEQ ID NO: 585206 - RNA, 22 nt, Human
ugcaauaaguuguguuaucacu

SEQ ID NO: 585207 - RNA, 22 nt, Human
uucuccaggcuugggccagguc

SEQ ID NO: 585208 - RNA, 22 nt, Human
uagaaaacuaauacaugcuuga

SEQ ID NO: 585209 - RNA, 18 nt, Human
augagaggugucagaaga

SEQ ID NO: 585210 - RNA, 22 nt, Human
uugggcagaggcugugcagagg

SEQ ID NO: 585211 - RNA, 22 nt, Human
aaguuucuggaccuuaccugcu

SEQ ID NO: 585212 - RNA, 19 nt, Human
gacucacaccuuccgcugu

SEQ ID NO: 585213 - RNA, 19 nt, Human
cagagagaccaaggcgcca

SEQ ID NO: 585214 - RNA, 22 nt, Human
agcuccugcacccagccuugag

SEQ ID NO: 585215 - RNA, 23 nt, Human
agacuggggcauaagaagauggc

SEQ ID NO: 585216 - RNA, 22 nt, Human
agaauucugacaauagaauugg

SEQ ID NO: 585217 - RNA, 22 nt, Human
agggcugcccagugugagagcu

SEQ ID NO: 585218 - RNA, 22 nt, Human
ugggaaauauucuaaaagucuu

SEQ ID NO: 585219 - RNA, 22 nt, Human
uuagccagugaaauggagaaau

SEQ ID NO: 585220 - RNA, 22 nt, Human
aucugaaaagccucuuacuccu

SEQ ID NO: 585221 - RNA, 23 nt, Human
cugggcugcuugagucccuggcu

SEQ ID NO: 585222 - RNA, 22 nt, Human
ccagggcugagcugugaccaug

SEQ ID NO: 585223 - RNA, 22 nt, Human
guacaauagucccuguuuggau

SEQ ID NO: 585224 - RNA, 22 nt, Human
ggaggcugagaaguccaagauc

SEQ ID NO: 585225 - RNA, 22 nt, Human
ucuggcucagggcucugaggga

SEQ ID NO: 585226 - RNA, 20 nt, Human
ugaggcccagcagagucggg

SEQ ID NO: 585227 - RNA, 22 nt, Human
cacaggcaccccugacugcuca

SEQ ID NO: 585228 - RNA, 22 nt, Human
aauaauuagugggacagagaac

SEQ ID NO: 585229 - RNA, 22 nt, Human
gaggccuggcucugcccuccug

SEQ ID NO: 585230 - RNA, 22 nt, Human
cugucuuuucuucucauugaug

SEQ ID NO: 585231 - RNA, 22 nt, Human
cauacauuuauacacaucuaug

SEQ ID NO: 585232 - RNA, 22 nt, Human
ccuggagaggagaaagggccca

SEQ ID NO: 585233 - RNA, 22 nt, Human
cuguuauucaagacaaaggcag

SEQ ID NO: 585234 - RNA, 22 nt, Human
ugcgcgcuggcgucacuuagca

SEQ ID NO: 585235 - RNA, 20 nt, Human
ucuccagaugcagaugacau

SEQ ID NO: 585236 - RNA, 22 nt, Human
ucuggaguaacucuguuucugg

SEQ ID NO: 585237 - RNA, 22 nt, Human
aaauuagaucaguggauuuucu

SEQ ID NO: 585238 - RNA, 22 nt, Human
cagaaaaccugacucuagaacu

SEQ ID NO: 585239 - RNA, 22 nt, Human
uccaguuuccuguggcugccua

SEQ ID NO: 585240 - RNA, 19 nt, Human
uggcucugucgaaggcaca

SEQ ID NO: 585241 - RNA, 22 nt, Human
cagcagcagcuuaguggucccc

SEQ ID NO: 585242 - RNA, 17 nt, Human
uagcacagugccuggua

SEQ ID NO: 585243 - RNA, 17 nt, Human
ucugucugugguccacu

SEQ ID NO: 585244 - RNA, 22 nt, Human
aacaggaugucauuucucaugu

SEQ ID NO: 585245 - RNA, 22 nt, Human
gcaggagaacaaagcaagcugc

SEQ ID NO: 585246 - RNA, 22 nt, Human
ccugagggcucagcccccagcc

SEQ ID NO: 585247 - RNA, 22 nt, Human
gcugcuuugucuguaaaaugga

SEQ ID NO: 585248 - RNA, 22 nt, Human
ccaggucuaucaaguugggcuc

SEQ ID NO: 585249 - RNA, 22 nt, Human
aacauuuauucuaauucuggga

SEQ ID NO: 585250 - RNA, 22 nt, Human
uuacaagacacagugcugaagg

SEQ ID NO: 585251 - RNA, 22 nt, Human
uggcacugagcagccgcggcag

SEQ ID NO: 585252 - RNA, 22 nt, Human
cucugggcaccaaagagcagcu

SEQ ID NO: 585253 - RNA, 22 nt, Human
uuggucaagucuuaaagaaaaa

SEQ ID NO: 585254 - RNA, 22 nt, Human
uggcacuggaaucguagccuug

SEQ ID NO: 585255 - RNA, 20 nt, Human
gaagccagaggggaaaggag

SEQ ID NO: 585256 - RNA, 22 nt, Human
cagcagugaugugugaggguuc

SEQ ID NO: 585257 - RNA, 22 nt, Human
cagaggguugucaggcgccuug

SEQ ID NO: 585258 - RNA, 22 nt, Human
uccucaggagagcuccuaugcc

SEQ ID NO: 585259 - RNA, 22 nt, Human
cagugcuaggucgugugcuggg

SEQ ID NO: 585260 - RNA, 22 nt, Human
acauuuauauaacucacuagga

SEQ ID NO: 585261 - RNA, 22 nt, Human
cuuccuggccauugccauggca

SEQ ID NO: 585262 - RNA, 22 nt, Human
aagaggggugugugucaaccca

SEQ ID NO: 585263 - RNA, 22 nt, Human
gcucucuuuaaacugcauggcu

SEQ ID NO: 585264 - RNA, 22 nt, Human
gggcacugggucuucuccacgc

SEQ ID NO: 585265 - RNA, 22 nt, Human
cacagcuguauccaggagaucc

SEQ ID NO: 585266 - RNA, 22 nt, Human
agugggagggccauauggugaa

SEQ ID NO: 585267 - RNA, 22 nt, Human
aacacuuucuuccuugcucagg

SEQ ID NO: 585268 - RNA, 19 nt, Human
agcucaggcccaucguccc

SEQ ID NO: 585269 - RNA, 22 nt, Human
uugcaaaaccauccuaaguaaa

SEQ ID NO: 585270 - RNA, 22 nt, Human
cuggccagugacugcucacccg

SEQ ID NO: 585271 - RNA, 22 nt, Human
agguggcauuuacaccauggga

SEQ ID NO: 585272 - RNA, 22 nt, Human
ugugaaggcagagccagugaaa

SEQ ID NO: 585273 - RNA, 22 nt, Human
aggcugagccugggcguggugg

SEQ ID NO: 585274 - RNA, 22 nt, Human
aggaggcaacugagauuuagaa

SEQ ID NO: 585275 - RNA, 22 nt, Human
ucugaggccuucagcaugaauc

SEQ ID NO: 585276 - RNA, 22 nt, Human
aucguaaagcccuauggcuuca

SEQ ID NO: 585277 - RNA, 22 nt, Human
auaaccugguaguauuaaaugu

SEQ ID NO: 585278 - RNA, 22 nt, Human
aaaaugaagcaaaggcauucag

SEQ ID NO: 585279 - RNA, 21 nt, Human
auuauuauaaagaccacaggg

SEQ ID NO: 585280 - RNA, 21 nt, Human
ucuaagccuugcagauggguu

SEQ ID NO: 585281 - RNA, 22 nt, Human
gugcaaaaguaauugcuguuuu

SEQ ID NO: 585282 - RNA, 22 nt, Human
agugaagccccgaugcguuuug

SEQ ID NO: 585283 - RNA, 22 nt, Human
cugggacuuuguaggccaguug

SEQ ID NO: 585284 - RNA, 19 nt, Human
ugggccucacaaugcuccc

SEQ ID NO: 585285 - RNA, 22 nt, Human
cagaagcagugagagaugugca

SEQ ID NO: 585286 - RNA, 23 nt, Human
ugaaugauggugcuccucaucuu

SEQ ID NO: 585287 - RNA, 22 nt, Human
ccagguguaggacaccaaggga

SEQ ID NO: 585288 - RNA, 22 nt, Human
uccuggccuugcgucuugggag

SEQ ID NO: 585289 - RNA, 22 nt, Human
ggaggccaccauggagucacuu

SEQ ID NO: 585290 - RNA, 22 nt, Human
auuucauugaaguuaauucuuc

SEQ ID NO: 585291 - RNA, 22 nt, Human
gaaaaggaaauuuauagagauc

SEQ ID NO: 585292 - RNA, 22 nt, Human
uuauugaaggaacugaaauaaa

SEQ ID NO: 585293 - RNA, 22 nt, Human
uucuccuggggccgugauguga

SEQ ID NO: 585294 - RNA, 22 nt, Human
agagcucaagacgcucacagua

SEQ ID NO: 585295 - RNA, 22 nt, Human
aaagacagauggcaaggaugau

SEQ ID NO: 585296 - RNA, 22 nt, Human
cagcugugcugauugcucagua

SEQ ID NO: 585297 - RNA, 22 nt, Human
ucugggguugagucugggucag

SEQ ID NO: 585298 - RNA, 22 nt, Human
acaugauuugcaugauuuguaa

SEQ ID NO: 585299 - RNA, 22 nt, Human
ggcuuccuuucacuacccucag

SEQ ID NO: 585300 - RNA, 22 nt, Human
uggcuuggcuaagaucuaagcu

SEQ ID NO: 585301 - RNA, 22 nt, Human
accugcucaacuggcuucucgc

SEQ ID NO: 585302 - RNA, 22 nt, Human
cccagaggugacaucccauucu

SEQ ID NO: 585303 - RNA, 22 nt, Human
uuuuacaccuguuaacucuaag

SEQ ID NO: 585304 - RNA, 22 nt, Human
auuuccuauagauauggugagu

SEQ ID NO: 585305 - RNA, 22 nt, Human
ucugaaagaagggcagucuuuu

SEQ ID NO: 585306 - RNA, 21 nt, Human
aaguggagaagaaaagcugga

SEQ ID NO: 585307 - RNA, 21 nt, Human
aggagaccggcuuguuugugc

SEQ ID NO: 585308 - RNA, 22 nt, Human
uagugaaagucaaagacagcua

SEQ ID NO: 585309 - RNA, 22 nt, Human
uagcauuccaucacucagcacc

SEQ ID NO: 585310 - RNA, 22 nt, Human
uggcaucuccgacagucuugau

SEQ ID NO: 585311 - RNA, 22 nt, Human
uccugguggcucuuugggaagg

SEQ ID NO: 585312 - RNA, 22 nt, Human
acaggcaacuucaaaucucacu

SEQ ID NO: 585313 - RNA, 22 nt, Human
cugccugugcaugcagucagaa

SEQ ID NO: 585314 - RNA, 22 nt, Human
gaggaucauuugagccuaggag

SEQ ID NO: 585315 - RNA, 22 nt, Human
gaggccacggaagggagcugug

SEQ ID NO: 585316 - RNA, 22 nt, Human
ccaggccuucugaggacacucu

SEQ ID NO: 585317 - RNA, 22 nt, Human
uaguacaguuuuggcacaugga

SEQ ID NO: 585318 - RNA, 22 nt, Human
aagcagaugcguuggagcaguu

SEQ ID NO: 585319 - RNA, 21 nt, Human
cauuucuaagccuggcuauag

SEQ ID NO: 585320 - RNA, 22 nt, Human
uuuucagaggccuaagagguuu

SEQ ID NO: 585321 - RNA, 18 nt, Human
uccuucacagcaggaagg

SEQ ID NO: 585322 - RNA, 22 nt, Human
uguuucaugaaacauguuuagg

SEQ ID NO: 585323 - RNA, 22 nt, Human
cccucaggugaaaggaaaaauu

SEQ ID NO: 585324 - RNA, 22 nt, Human
ugucuuucugacccaagguagu

SEQ ID NO: 585325 - RNA, 22 nt, Human
ucuguggaguugaggaagguug

SEQ ID NO: 585326 - RNA, 22 nt, Human
uccagaaaugcaagccaggugu

SEQ ID NO: 585327 - RNA, 22 nt, Human
aguucuauuggguagguucugu

SEQ ID NO: 585328 - RNA, 22 nt, Human
cagcuauuuucucauuaaggau

SEQ ID NO: 585329 - RNA, 22 nt, Human
agcagcucaacagugucucuau

SEQ ID NO: 585330 - RNA, 22 nt, Human
uguggaagaaacaagacacuuu

SEQ ID NO: 585331 - RNA, 22 nt, Human
cccuguuaaugucaaccugccu

SEQ ID NO: 585332 - RNA, 22 nt, Human
uuagagaauuccaaaugacuac

SEQ ID NO: 585333 - RNA, 22 nt, Human
uuuagagucauuuuauauugac

SEQ ID NO: 585334 - RNA, 22 nt, Human
acagagcuguacaugugccaug

SEQ ID NO: 585335 - RNA, 22 nt, Human
cugcugccaagggugccacagg

SEQ ID NO: 585336 - RNA, 22 nt, Human
acugccucuuggugcugagaga

SEQ ID NO: 585337 - RNA, 22 nt, Human
aaguuucuguucauaucucuga

SEQ ID NO: 585338 - RNA, 17 nt, Human
aggggagagugggaaga

SEQ ID NO: 585339 - RNA, 21 nt, Human
cugcaggugcugccaucaggg

SEQ ID NO: 585340 - RNA, 23 nt, Human
agagccugaaagacuucuggcac

SEQ ID NO: 585341 - RNA, 20 nt, Human
gucagugucuucaguaguga

SEQ ID NO: 585342 - RNA, 22 nt, Human
uucuuucugggguccuucggcu

SEQ ID NO: 585343 - RNA, 22 nt, Human
uagcuuuaaugaguugguaaga

SEQ ID NO: 585344 - RNA, 22 nt, Human
uguugcuaaggggaaugagagc

SEQ ID NO: 585345 - RNA, 22 nt, Human
auuucucauguacaaaaacacu

SEQ ID NO: 585346 - RNA, 22 nt, Human
uccuggaguugugcagugcaca

SEQ ID NO: 585347 - RNA, 22 nt, Human
ccuacauucucugaguuuuccu

SEQ ID NO: 585348 - RNA, 22 nt, Human
agcagagccagaauuggaccag

SEQ ID NO: 585349 - RNA, 22 nt, Human
ggucugcuuuccuugccacugu

SEQ ID NO: 585350 - RNA, 22 nt, Human
aucaucugcacagauccuauuu

SEQ ID NO: 585351 - RNA, 22 nt, Human
cacugccugcuggcugucacuu

SEQ ID NO: 585352 - RNA, 22 nt, Human
cuugggagacacaagaagacau

SEQ ID NO: 585353 - RNA, 22 nt, Human
gcugccugguuucucagcugca

SEQ ID NO: 585354 - RNA, 22 nt, Human
ugcugaauucucauucccugga

SEQ ID NO: 585355 - RNA, 22 nt, Human
acugagaacucaagagaaaagg

SEQ ID NO: 585356 - RNA, 22 nt, Human
uccuugagagccacugucuugg

SEQ ID NO: 585357 - RNA, 22 nt, Human
auauaguuuaagaaaguacagu

SEQ ID NO: 585358 - RNA, 22 nt, Human
ugaagauuuucggguacuugau

SEQ ID NO: 585359 - RNA, 23 nt, Human
aaugacaccucauagguaacuuc

SEQ ID NO: 585360 - RNA, 22 nt, Human
ucagcacuuacuaguggccuuu

SEQ ID NO: 585361 - RNA, 22 nt, Human
ucaguguguacacugagcauuu

SEQ ID NO: 585362 - RNA, 22 nt, Human
uggcauggcuacuggaauggcg

SEQ ID NO: 585363 - RNA, 18 nt, Human
agaggcuggacaggggau

SEQ ID NO: 585364 - RNA, 22 nt, Human
gcaagcagaucuccggagggaa

SEQ ID NO: 585365 - RNA, 21 nt, Human
ucugaugguagaugagaugug

SEQ ID NO: 585366 - RNA, 22 nt, Human
aggacacagcucuucaguaaga

SEQ ID NO: 585367 - RNA, 22 nt, Human
gacacauagaucuaucucacuc

SEQ ID NO: 585368 - RNA, 22 nt, Human
gggucagggcugccugggcuca

SEQ ID NO: 585369 - RNA, 22 nt, Human
uucucuggaaggcucuacggga

SEQ ID NO: 585370 - RNA, 22 nt, Human
ucagugcagggugggagagaga

SEQ ID NO: 585371 - RNA, 22 nt, Human
ccugggcaggaugggcccggug

SEQ ID NO: 585372 - RNA, 19 nt, Human
agaaauagccuuccuuguc

SEQ ID NO: 585373 - RNA, 22 nt, Human
aaaauguaaagcuugaguguag

SEQ ID NO: 585374 - RNA, 22 nt, Human
ugucuccucuguccugucagga

SEQ ID NO: 585375 - RNA, 22 nt, Human
cugaggccuggccccaccacag

SEQ ID NO: 585376 - RNA, 22 nt, Human
uauguacacacacaugcaugua

SEQ ID NO: 585377 - RNA, 22 nt, Human
agcagggcugcagugugucuuu

SEQ ID NO: 585378 - RNA, 22 nt, Human
cacugugcuccuaacuagcugu

SEQ ID NO: 585379 - RNA, 22 nt, Human
ugguggagccuaggcuaagucu

SEQ ID NO: 585380 - RNA, 22 nt, Human
ugcuggcuuugcgagaugcauu

SEQ ID NO: 585381 - RNA, 22 nt, Human
uaucauuuuacugugacauuuu

SEQ ID NO: 585382 - RNA, 22 nt, Human
uuacagaaggaacacuacucag

SEQ ID NO: 585383 - RNA, 22 nt, Human
cuggccugaucucaugcugucc

SEQ ID NO: 585384 - RNA, 23 nt, Human
agguuaugauuauagagcgagga

SEQ ID NO: 585385 - RNA, 22 nt, Human
agcugcccuguggggaggguug

SEQ ID NO: 585386 - RNA, 22 nt, Human
agcaccagagcuaugggccugc

SEQ ID NO: 585387 - RNA, 22 nt, Human
uccaacuucugcaaucaguuug

SEQ ID NO: 585388 - RNA, 22 nt, Human
ugccuuuuauggcuagccucag

SEQ ID NO: 585389 - RNA, 22 nt, Human
cuuuuuaucucuuaaugauguu

SEQ ID NO: 585390 - RNA, 22 nt, Human
ggccugaggcaauagucagaca

SEQ ID NO: 585391 - RNA, 22 nt, Human
caaacauuuucuacuuccagga

SEQ ID NO: 585392 - RNA, 22 nt, Human
ucauguguccuaguucauauaa

SEQ ID NO: 585393 - RNA, 22 nt, Human
acacauaugguugcugcaguga

SEQ ID NO: 585394 - RNA, 22 nt, Human
aacauucuuuagcucuuccugc

SEQ ID NO: 585395 - RNA, 21 nt, Human
ugguacaccuugccugucaga

SEQ ID NO: 585396 - RNA, 16 nt, Human
agcaccagaucauauc

SEQ ID NO: 585397 - RNA, 23 nt, Human
ucccagccucuucucuugcauac

SEQ ID NO: 585398 - RNA, 22 nt, Human
gcuuucugguuugugcuacagg

SEQ ID NO: 585399 - RNA, 22 nt, Human
caguaacaugucuguuaagaaa

SEQ ID NO: 585400 - RNA, 22 nt, Human
cacguccacccaggcugcccag

SEQ ID NO: 585401 - RNA, 22 nt, Human
ccuuggcuuccuucccucuaga

SEQ ID NO: 585402 - RNA, 22 nt, Human
cagcuccagccaccggggggug

SEQ ID NO: 585403 - RNA, 18 nt, Human
uggaagcuggugagcaga

SEQ ID NO: 585404 - RNA, 22 nt, Human
uucugucuguaaacuucucaau

SEQ ID NO: 585405 - RNA, 22 nt, Human
uuuauuucuuaguuugccacag

SEQ ID NO: 585406 - RNA, 22 nt, Human
ugcuuuaaccaucuuguuugga

SEQ ID NO: 585407 - RNA, 22 nt, Human
ugcuguguuaaauacaagcaug

SEQ ID NO: 585408 - RNA, 22 nt, Human
gacccuggcagguagccucaca

SEQ ID NO: 585409 - RNA, 22 nt, Human
ggcucccucaccaccaucacau

SEQ ID NO: 585410 - RNA, 22 nt, Human
ucacccagcagcugcuucugcu

SEQ ID NO: 585411 - RNA, 22 nt, Human
aacaugcucuuccuggcuaguc

SEQ ID NO: 585412 - RNA, 22 nt, Human
augcaguacauacaaacacuga

SEQ ID NO: 585413 - RNA, 17 nt, Human
uguuuucugcuaccuuu

SEQ ID NO: 585414 - RNA, 22 nt, Human
gcuggagcugcagccugggccu

SEQ ID NO: 585415 - RNA, 22 nt, Human
cugggcaguuuauucaguucug

SEQ ID NO: 585416 - RNA, 22 nt, Human
auccacuugccacuguauaguu

SEQ ID NO: 585417 - RNA, 22 nt, Human
agcacaggugaaacagucaggu

SEQ ID NO: 585418 - RNA, 22 nt, Human
ugcugccauggucgcugguguc

SEQ ID NO: 585419 - RNA, 22 nt, Human
uaugacagugaaaaaaaucaga

SEQ ID NO: 585420 - RNA, 22 nt, Human
ggccugaggccaccagcagccc

SEQ ID NO: 585421 - RNA, 22 nt, Human
ucccuaaacucugaacugauuc

SEQ ID NO: 585422 - RNA, 22 nt, Human
cugcucuguuucuuagcugggu

SEQ ID NO: 585423 - RNA, 22 nt, Human
ugaaaaugcccucuaugucuca

SEQ ID NO: 585424 - RNA, 22 nt, Human
uucugauacuggaaucgaugcc

SEQ ID NO: 585425 - RNA, 22 nt, Human
uggugaggucauagagaacugu

SEQ ID NO: 585426 - RNA, 22 nt, Human
ggaggagcacuugacggggucu

SEQ ID NO: 585427 - RNA, 22 nt, Human
ucuauaaagggccagauaguag

SEQ ID NO: 585428 - RNA, 22 nt, Human
acacauuccugcagacaugaug

SEQ ID NO: 585429 - RNA, 19 nt, Human
ggagccuggagcacgugcc

SEQ ID NO: 585430 - RNA, 16 nt, Human
ccagguggggcuguga

SEQ ID NO: 585431 - RNA, 22 nt, Human
ggcaccuggauguagcagugaa

SEQ ID NO: 585432 - RNA, 22 nt, Human
uagcucugaggccaucuccggu

SEQ ID NO: 585433 - RNA, 22 nt, Human
ugcugaggacuaaaggagauga

SEQ ID NO: 585434 - RNA, 22 nt, Human
cuugauuuauuacccacuauau

SEQ ID NO: 585435 - RNA, 22 nt, Human
ugugagacaauugcaucagggc

SEQ ID NO: 585436 - RNA, 22 nt, Human
auugcugaaaugaaaggauaug

SEQ ID NO: 585437 - RNA, 22 nt, Human
acauggaagcaaaguucuauuu

SEQ ID NO: 585438 - RNA, 22 nt, Human
ugucaccaguuccaggaaauaa

SEQ ID NO: 585439 - RNA, 22 nt, Human
auacaguaaccacauucuauag

SEQ ID NO: 585440 - RNA, 22 nt, Human
ugaccuuucucugggugcuugg

SEQ ID NO: 585441 - RNA, 22 nt, Human
gugaaggauuggagggcaucuu

SEQ ID NO: 585442 - RNA, 22 nt, Human
auugcuaaugugcgaaugugua

SEQ ID NO: 585443 - RNA, 22 nt, Human
gcauacauugcacccugguagu

SEQ ID NO: 585444 - RNA, 22 nt, Human
ucccagagugugggcaucaagg

SEQ ID NO: 585445 - RNA, 22 nt, Human
ugcaauaaagugcuauaaaucc

SEQ ID NO: 585446 - RNA, 19 nt, Human
agaaucuaaauuauuucug

SEQ ID NO: 585447 - RNA, 22 nt, Human
acagaauaagguuuaucucucc

SEQ ID NO: 585448 - RNA, 21 nt, Human
acucugcugcgggcuuggccu

SEQ ID NO: 585449 - RNA, 19 nt, Human
aucuccuuucuucaagcuu

SEQ ID NO: 585450 - RNA, 22 nt, Human
uacagcuucagugugccccagu

SEQ ID NO: 585451 - RNA, 22 nt, Human
uugagguauugauauuuuauga

SEQ ID NO: 585452 - RNA, 22 nt, Human
gucaauaauuuuauggagagaa

SEQ ID NO: 585453 - RNA, 22 nt, Human
acaaacagaguugaaaaauagg

SEQ ID NO: 585454 - RNA, 22 nt, Human
aggaaugauucaagacuuggcu

SEQ ID NO: 585455 - RNA, 22 nt, Human
ggggaaggauugaguugaccca

SEQ ID NO: 585456 - RNA, 22 nt, Human
uucugucuggaaaaggacauag

SEQ ID NO: 585457 - RNA, 22 nt, Human
uauaaaucuuuguuccuagaau

SEQ ID NO: 585458 - RNA, 22 nt, Human
ccaguguuuuccaguuugccca

SEQ ID NO: 585459 - RNA, 22 nt, Human
acauuguuaguagaccaguggc

SEQ ID NO: 585460 - RNA, 22 nt, Human
aggaauuuggaauuuuuccugu

SEQ ID NO: 585461 - RNA, 22 nt, Human
uuggccuuuaaacuggacuuuc

SEQ ID NO: 585462 - RNA, 22 nt, Human
cuuguauucagaguggacauga

SEQ ID NO: 585463 - RNA, 22 nt, Human
gagaaagauguaggcugggagg

SEQ ID NO: 585464 - RNA, 22 nt, Human
uuaagagguggucgugucugug

SEQ ID NO: 585465 - RNA, 22 nt, Human
ugggagaagcagcagccaagug

SEQ ID NO: 585466 - RNA, 22 nt, Human
cugcagugcaagcccagaugga

SEQ ID NO: 585467 - RNA, 18 nt, Human
uaagcaaugacauugcaa

SEQ ID NO: 585468 - RNA, 22 nt, Human
agggccaggcucccaugucagg

SEQ ID NO: 585469 - RNA, 22 nt, Human
cuccagggaaaggggcguccgc

SEQ ID NO: 585470 - RNA, 22 nt, Human
gauuauauaauggaagcucuug

SEQ ID NO: 585471 - RNA, 22 nt, Human
uuccugguuuauaccuguauca

SEQ ID NO: 585472 - RNA, 22 nt, Human
gcucuggcuacuguggcuaccg

SEQ ID NO: 585473 - RNA, 22 nt, Human
agggugcugccggacagguggg

SEQ ID NO: 585474 - RNA, 22 nt, Human
ccagcugcucucuucuccgcca

SEQ ID NO: 585475 - RNA, 22 nt, Human
aggcaucuaacagagaucuuua

SEQ ID NO: 585476 - RNA, 22 nt, Human
guggcccacuuacgucaugugu

SEQ ID NO: 585477 - RNA, 20 nt, Human
caagcccucuuuagccugcc

SEQ ID NO: 585478 - RNA, 22 nt, Human
ccaggugcucuugccagggcug

SEQ ID NO: 585479 - RNA, 18 nt, Human
gugggguguugugaggau

SEQ ID NO: 585480 - RNA, 22 nt, Human
aaggcugagggcuguaccuggc

SEQ ID NO: 585481 - RNA, 22 nt, Human
uuccucagggcggaugggcagg

SEQ ID NO: 585482 - RNA, 22 nt, Human
gccccuccauccaucaccgggg

SEQ ID NO: 585483 - RNA, 22 nt, Human
cuuuaugagccuugugaaggag

SEQ ID NO: 585484 - RNA, 22 nt, Human
aaauucaguuccucagccacau

SEQ ID NO: 585485 - RNA, 22 nt, Human
acagaguaggugcugucgacug

SEQ ID NO: 585486 - RNA, 22 nt, Human
ucuuuucacagacaaauggaga

SEQ ID NO: 585487 - RNA, 22 nt, Human
uuugucaauaacuaccaacagg

SEQ ID NO: 585488 - RNA, 22 nt, Human
uuucccaagaaaaauaauugga

SEQ ID NO: 585489 - RNA, 22 nt, Human
uauuuggaaaugauaaaguacu

SEQ ID NO: 585490 - RNA, 22 nt, Human
gaaauauuacaguggaggggau

SEQ ID NO: 585491 - RNA, 22 nt, Human
aaaugcauugguuucuacuugu

SEQ ID NO: 585492 - RNA, 22 nt, Human
uagaauaaguugaugauauaug

SEQ ID NO: 585493 - RNA, 21 nt, Human
uggagcugaauuuuuggcauc

SEQ ID NO: 585494 - RNA, 22 nt, Human
cuggccuuuagccccagugucu

SEQ ID NO: 585495 - RNA, 22 nt, Human
ugaggcagguggauuacaaggu

SEQ ID NO: 585496 - RNA, 22 nt, Human
uuucucaaaagacagaagugaa

SEQ ID NO: 585497 - RNA, 22 nt, Human
gccuccuaccacacccucaguc

SEQ ID NO: 585498 - RNA, 22 nt, Human
guugugcagggcgaggaccuga

SEQ ID NO: 585499 - RNA, 22 nt, Human
aaggcugguggauuaugagguc

SEQ ID NO: 585500 - RNA, 22 nt, Human
ugcugguccccugcagccugug

SEQ ID NO: 585501 - RNA, 22 nt, Human
auuaagaugugggaaaauuuaa

SEQ ID NO: 585502 - RNA, 22 nt, Human
aaugcuuauaacguuagaaugu

SEQ ID NO: 585503 - RNA, 22 nt, Human
uuauuuaaaagugguaagauuc

SEQ ID NO: 585504 - RNA, 22 nt, Human
gagggccaauggauuucaacug

SEQ ID NO: 585505 - RNA, 22 nt, Human
gaagccagccuugucugccucu

SEQ ID NO: 585506 - RNA, 22 nt, Human
ccacccuguguuuuugccauug

SEQ ID NO: 585507 - RNA, 22 nt, Human
ugcaaagaagcaacauccuugu

SEQ ID NO: 585508 - RNA, 21 nt, Human
uccucagggccccagagcacu

SEQ ID NO: 585509 - RNA, 22 nt, Human
acauuucucagguaagucauuu

SEQ ID NO: 585510 - RNA, 22 nt, Human
agccuagguuuccgauucucuu

SEQ ID NO: 585511 - RNA, 23 nt, Human
ugcagggcaaguuagagacccca

SEQ ID NO: 585512 - RNA, 22 nt, Human
cccaggagcuucucucugccuc

SEQ ID NO: 585513 - RNA, 22 nt, Human
uccugcagaucaaagccuuuga

SEQ ID NO: 585514 - RNA, 22 nt, Human
ugacaaaacugcaauuacuuuu

SEQ ID NO: 585515 - RNA, 22 nt, Human
ccacagagacagagcccagggu

SEQ ID NO: 585516 - RNA, 22 nt, Human
uuugugcagguauaggcggaga

SEQ ID NO: 585517 - RNA, 22 nt, Human
ugcagggauccuagcugaagag

SEQ ID NO: 585518 - RNA, 22 nt, Human
cuggccagagguuccucugccc

SEQ ID NO: 585519 - RNA, 22 nt, Human
ggccaugguuggggaagacaug

SEQ ID NO: 585520 - RNA, 22 nt, Human
uaguuuuauaauguuaacaucu

SEQ ID NO: 585521 - RNA, 22 nt, Human
ccaggcagagggauccccaucc

SEQ ID NO: 585522 - RNA, 22 nt, Human
ugcuuaaaggauaguuuaaacu

SEQ ID NO: 585523 - RNA, 22 nt, Human
ucuaauccuugcuaccugggug

SEQ ID NO: 585524 - RNA, 22 nt, Human
acacaguaugcaucuagaaauu

SEQ ID NO: 585525 - RNA, 21 nt, Human
uaucuacuggugucuuucaga

SEQ ID NO: 585526 - RNA, 19 nt, Human
uguggggagucagggggcu

SEQ ID NO: 585527 - RNA, 22 nt, Human
caaggcugucuccagcuuccaa

SEQ ID NO: 585528 - RNA, 22 nt, Human
ugacagggcuagaggcaaugca

SEQ ID NO: 585529 - RNA, 22 nt, Human
uugaagcaaauucugugcagua

SEQ ID NO: 585530 - RNA, 22 nt, Human
gcuuaaaauccaugauuuuuac

SEQ ID NO: 585531 - RNA, 22 nt, Human
guuuccuaccagugguuccaga

SEQ ID NO: 585532 - RNA, 22 nt, Human
aagagcagauuccuaguggagc

SEQ ID NO: 585533 - RNA, 22 nt, Human
gacaagugcugauuuaucuccc

SEQ ID NO: 585534 - RNA, 22 nt, Human
cugggugcuuacuuugugcuag

SEQ ID NO: 585535 - RNA, 22 nt, Human
acagaagcagccgucacagaua

SEQ ID NO: 585536 - RNA, 22 nt, Human
cugcuuuagacaacugcuggga

SEQ ID NO: 585537 - RNA, 22 nt, Human
cuuccccaaccccgacugugug

SEQ ID NO: 585538 - RNA, 22 nt, Human
ucccaggaugaagacaguguug

SEQ ID NO: 585539 - RNA, 22 nt, Human
gggcuccaguuuggccaggaag

SEQ ID NO: 585540 - RNA, 22 nt, Human
guuuuucuaggaccaugugauu

SEQ ID NO: 585541 - RNA, 22 nt, Human
cugcauaucaaauuacuccugg

SEQ ID NO: 585542 - RNA, 22 nt, Human
agcaccuauagaaguuguguuc

SEQ ID NO: 585543 - RNA, 22 nt, Human
cccucgccgcagcugcuucccg

SEQ ID NO: 585544 - RNA, 22 nt, Human
ugcaauuaauuuacaugcuuaa

SEQ ID NO: 585545 - RNA, 22 nt, Human
gauaacaauaugaaguagauau

SEQ ID NO: 585546 - RNA, 22 nt, Human
uacaugcuggugacuguagaca

SEQ ID NO: 585547 - RNA, 22 nt, Human
agaggcaggaagagcugauuuu

SEQ ID NO: 585548 - RNA, 22 nt, Human
ugagagaguaauugagugguaa

SEQ ID NO: 585549 - RNA, 22 nt, Human
cuguuauuuuauaauucaagaa

SEQ ID NO: 585550 - RNA, 22 nt, Human
ggaggccaggaugggaacucaa

SEQ ID NO: 585551 - RNA, 22 nt, Human
uauauuaaaugaccaguuuuaa

SEQ ID NO: 585552 - RNA, 22 nt, Human
cagccccucacagagcuguccu

SEQ ID NO: 585553 - RNA, 22 nt, Human
aagacauuuaugaaaagugcug

SEQ ID NO: 585554 - RNA, 20 nt, Human
uggagccacagucagguucc

SEQ ID NO: 585555 - RNA, 22 nt, Human
gagggcugcaaugagacagaga

SEQ ID NO: 585556 - RNA, 20 nt, Human
cagcucugggcaggucgagg

SEQ ID NO: 585557 - RNA, 22 nt, Human
uugcugaaaucuaugacauccu

SEQ ID NO: 585558 - RNA, 22 nt, Human
cuggcuuugcuggacugggagu

SEQ ID NO: 585559 - RNA, 21 nt, Human
agaugcaguuaugagaugcag

SEQ ID NO: 585560 - RNA, 22 nt, Human
uguaagugcucagcugaugguu

SEQ ID NO: 585561 - RNA, 22 nt, Human
guauuuucaugauuucagacca

SEQ ID NO: 585562 - RNA, 18 nt, Human
uggcagagugucuguucu

SEQ ID NO: 585563 - RNA, 22 nt, Human
guuuacaugcaugcaagaauga

SEQ ID NO: 585564 - RNA, 23 nt, Human
gggagaauaugaggaugauggug

SEQ ID NO: 585565 - RNA, 22 nt, Human
cacuggcccauuccugucuggc

SEQ ID NO: 585566 - RNA, 20 nt, Human
uagaacuuuucaguauggau

SEQ ID NO: 585567 - RNA, 19 nt, Human
ggagaagcccaggaauccu

SEQ ID NO: 585568 - RNA, 22 nt, Human
gcagaaauaugaugcauaaagg

SEQ ID NO: 585569 - RNA, 22 nt, Human
ggcuccagguacguaugggagg

SEQ ID NO: 585570 - RNA, 21 nt, Human
ccagcccagcugugucccagc

SEQ ID NO: 585571 - RNA, 22 nt, Human
ugugggaggaacacagccagaa

SEQ ID NO: 585572 - RNA, 20 nt, Human
cucuuaauugcucacauuag

SEQ ID NO: 585573 - RNA, 22 nt, Human
ccuuccuuugcaggucagguca

SEQ ID NO: 585574 - RNA, 22 nt, Human
aguggucugccugccucagccu

SEQ ID NO: 585575 - RNA, 21 nt, Human
ugaaugcuucgucauccuggc

SEQ ID NO: 585576 - RNA, 22 nt, Human
ggcugcuguacugaugucaguu

SEQ ID NO: 585577 - RNA, 22 nt, Human
ugcaguuuuccuucaacauugu

SEQ ID NO: 585578 - RNA, 23 nt, Human
acacuucacccauugugauagga

SEQ ID NO: 585579 - RNA, 22 nt, Human
ucuauguccuuucucccauucc

SEQ ID NO: 585580 - RNA, 18 nt, Human
auggucucauacugggag

SEQ ID NO: 585581 - RNA, 22 nt, Human
cugggccacaagccugugugau

SEQ ID NO: 585582 - RNA, 22 nt, Human
gguuuauuguuaauaaguuuga

SEQ ID NO: 585583 - RNA, 22 nt, Human
acaugcuaauggagaugccaag

SEQ ID NO: 585584 - RNA, 21 nt, Human
acacugugucauaaugcuuaa

SEQ ID NO: 585585 - RNA, 22 nt, Human
ccaggcuguuuucaaacuuggg

SEQ ID NO: 585586 - RNA, 22 nt, Human
augaaaauguacauguguauaa

SEQ ID NO: 585587 - RNA, 20 nt, Human
ggguggaguugcggucugug

SEQ ID NO: 585588 - RNA, 22 nt, Human
guggccugccgugugguauggg

SEQ ID NO: 585589 - RNA, 21 nt, Human
gcucuccagggccagcccagg

SEQ ID NO: 585590 - RNA, 22 nt, Human
gcagagugaagcaguauggaaa

SEQ ID NO: 585591 - RNA, 22 nt, Human
gggauagguuuggaagaggugg

SEQ ID NO: 585592 - RNA, 22 nt, Human
gcuucagacuggagcagaggaa

SEQ ID NO: 585593 - RNA, 22 nt, Human
aucuacaggcugaggugggagg

SEQ ID NO: 585594 - RNA, 22 nt, Human
ugggacaggaugaccagaaggu

SEQ ID NO: 585595 - RNA, 22 nt, Human
cggucaggugcagcguuggcac

SEQ ID NO: 585596 - RNA, 22 nt, Human
ggaaaggagauauuggagagug

SEQ ID NO: 585597 - RNA, 22 nt, Human
uggacucuaugaugcgccagca

SEQ ID NO: 585598 - RNA, 22 nt, Human
ucagggaaauucaagggagauu

SEQ ID NO: 585599 - RNA, 21 nt, Human
uuacagguaacacuuccuuuc

SEQ ID NO: 585600 - RNA, 22 nt, Human
agcucaagaguaguucgagggg

SEQ ID NO: 585601 - RNA, 22 nt, Human
ucucagaaaagagcuucagaaa

SEQ ID NO: 585602 - RNA, 21 nt, Human
acacagaggcaucaucacuuu

SEQ ID NO: 585603 - RNA, 22 nt, Human
uccaggcuagccugguagagaa

SEQ ID NO: 585604 - RNA, 22 nt, Human
cugugccuucuacuucacucua

SEQ ID NO: 585605 - RNA, 22 nt, Human
ccuuucucuggcagcaggacag

SEQ ID NO: 585606 - RNA, 22 nt, Human
gcugggacaacaggugagcacc

SEQ ID NO: 585607 - RNA, 21 nt, Human
aaguaaaucagagaaauaacc

SEQ ID NO: 585608 - RNA, 22 nt, Human
aaagcagcagcaccugcauuuc

SEQ ID NO: 585609 - RNA, 22 nt, Human
aucucuccuuaugaagcauuau

SEQ ID NO: 585610 - RNA, 22 nt, Human
caauagaaggcacagauaggua

SEQ ID NO: 585611 - RNA, 22 nt, Human
aauacuauguagccaaaauaau

SEQ ID NO: 585612 - RNA, 22 nt, Human
uacagugcaaugugauguagau

SEQ ID NO: 585613 - RNA, 22 nt, Human
gagggcugaagauuguggcccc

SEQ ID NO: 585614 - RNA, 22 nt, Human
gccucacugcagccccaggaag

SEQ ID NO: 585615 - RNA, 22 nt, Human
ccagaagggcuauugcagugac

SEQ ID NO: 585616 - RNA, 22 nt, Human
cccaccucucagagagccuugc

SEQ ID NO: 585617 - RNA, 22 nt, Human
gaagccuggagaccagauguug

SEQ ID NO: 585618 - RNA, 22 nt, Human
acuuccugcuaugagcuucugu

SEQ ID NO: 585619 - RNA, 22 nt, Human
gaggcagcaggcugaggaggau

SEQ ID NO: 585620 - RNA, 22 nt, Human
cuggcucagacagcugugcagu

SEQ ID NO: 585621 - RNA, 22 nt, Human
aaggugucggcagagccgcuuc

SEQ ID NO: 585622 - RNA, 22 nt, Human
cacccaggcuggaaugcaaugg

SEQ ID NO: 585623 - RNA, 22 nt, Human
uaguuacaauggguucugugac

SEQ ID NO: 585624 - RNA, 22 nt, Human
gccagcagguugucaaggagcu

SEQ ID NO: 585625 - RNA, 22 nt, Human
acacuuugaagauggaaacuug

SEQ ID NO: 585626 - RNA, 22 nt, Human
ucagaaggaaacgaugccagcu

SEQ ID NO: 585627 - RNA, 22 nt, Human
aaugcauaccaugucaucuuug

SEQ ID NO: 585628 - RNA, 22 nt, Human
uuuuuguguauccugcuccaug

SEQ ID NO: 585629 - RNA, 22 nt, Human
uggguggaauaaaucaguucug

SEQ ID NO: 585630 - RNA, 22 nt, Human
gccaggguucgaauccguaugg

SEQ ID NO: 585631 - RNA, 22 nt, Human
acaaaugaaucauacauaaugu

SEQ ID NO: 585632 - RNA, 22 nt, Human
gaggacacaaaguggcugagau

SEQ ID NO: 585633 - RNA, 22 nt, Human
aggcccaguuauccuacuuguu

SEQ ID NO: 585634 - RNA, 22 nt, Human
augaaguuccaguauaugcagu

SEQ ID NO: 585635 - RNA, 22 nt, Human
cucucccuggccagcugugcag

SEQ ID NO: 585636 - RNA, 22 nt, Human
cagaaacacuuguagagaaguu

SEQ ID NO: 585637 - RNA, 22 nt, Human
agagcugagaauguggcuuccu

SEQ ID NO: 585638 - RNA, 22 nt, Human
uaaccagacagaaacagcuaga

SEQ ID NO: 585639 - RNA, 22 nt, Human
ugaggcaguauucuccauucca

SEQ ID NO: 585640 - RNA, 22 nt, Human
agcagcuggggccugugacgau

SEQ ID NO: 585641 - RNA, 22 nt, Human
aggggaaaugccuuggugguac

SEQ ID NO: 585642 - RNA, 20 nt, Human
ugcugcaguuucaugggacu

SEQ ID NO: 585643 - RNA, 22 nt, Human
aaaaugaacagaacaaugggga

SEQ ID NO: 585644 - RNA, 22 nt, Human
ucugaacaugaugucaucugga

SEQ ID NO: 585645 - RNA, 22 nt, Human
cuggcucaauuuguacugcugu

SEQ ID NO: 585646 - RNA, 22 nt, Human
aaugaacuggagaacaaugacc

SEQ ID NO: 585647 - RNA, 22 nt, Human
agucccagugagaugagccacg

SEQ ID NO: 585648 - RNA, 22 nt, Human
agggucaccaguucauaggcac

SEQ ID NO: 585649 - RNA, 23 nt, Human
uaucuuuuucaauguuggaaaua

SEQ ID NO: 585650 - RNA, 22 nt, Human
uggcucaugcaucuuuucuaca

SEQ ID NO: 585651 - RNA, 22 nt, Human
cccaggaaaugggcucuugccu

SEQ ID NO: 585652 - RNA, 22 nt, Human
aaguuguaugucuuagaaagua

SEQ ID NO: 585653 - RNA, 22 nt, Human
auccagcuuugucuggucuucg

SEQ ID NO: 585654 - RNA, 23 nt, Human
ugagcugggccugcaggggucuc

SEQ ID NO: 585655 - RNA, 22 nt, Human
ggaagcugaggcccagugaagg

SEQ ID NO: 585656 - RNA, 22 nt, Human
uuaacacagggggagacaaagu

SEQ ID NO: 585657 - RNA, 22 nt, Human
ugcccagguuugagugcccaag

SEQ ID NO: 585658 - RNA, 22 nt, Human
cauuuuauguuuauggagugcu

SEQ ID NO: 585659 - RNA, 22 nt, Human
uugaacaauuugguauacaaac

SEQ ID NO: 585660 - RNA, 22 nt, Human
auacaauaguguuuguuuugag

SEQ ID NO: 585661 - RNA, 22 nt, Human
uacaaaugccugacacacagau

SEQ ID NO: 585662 - RNA, 22 nt, Human
cugaaggaagcagaagcgaggu

SEQ ID NO: 585663 - RNA, 22 nt, Human
ucugagaacaugcuuugaucau

SEQ ID NO: 585664 - RNA, 22 nt, Human
uugucuuaaauggauggacaau

SEQ ID NO: 585665 - RNA, 22 nt, Human
ucugggaugcaaacagaaucug

SEQ ID NO: 585666 - RNA, 22 nt, Human
ugcagggaaugcuugcagcaug

SEQ ID NO: 585667 - RNA, 21 nt, Human
augcauauuuuaaguuguguc

SEQ ID NO: 585668 - RNA, 22 nt, Human
cuggcuuuucaaacuguucagu

SEQ ID NO: 585669 - RNA, 22 nt, Human
gaaaauagcagauagaccaaug

SEQ ID NO: 585670 - RNA, 19 nt, Human
uuugauaucugaauuaugc

SEQ ID NO: 585671 - RNA, 22 nt, Human
gggcuggugaggcugcccugca

SEQ ID NO: 585672 - RNA, 22 nt, Human
uuacacaguugguaggggcaga

SEQ ID NO: 585673 - RNA, 22 nt, Human
uucacuguuucauccuacuucu

SEQ ID NO: 585674 - RNA, 22 nt, Human
cuugucugggcagcuugggagu

SEQ ID NO: 585675 - RNA, 22 nt, Human
agcuggucugcugcauggagug

SEQ ID NO: 585676 - RNA, 22 nt, Human
gaggaggaaguucucuguaggc

SEQ ID NO: 585677 - RNA, 22 nt, Human
gcaggcauggucgcugccaggu

SEQ ID NO: 585678 - RNA, 22 nt, Human
cuguuaucuguuauugccaguu

SEQ ID NO: 585679 - RNA, 19 nt, Human
guggccagggcaggggcug

SEQ ID NO: 585680 - RNA, 22 nt, Human
cuuccugaagagguuggucagg

SEQ ID NO: 585681 - RNA, 20 nt, Human
auacacuugcccagcuugug

SEQ ID NO: 585682 - RNA, 22 nt, Human
ccuagccccagauaucucacac

SEQ ID NO: 585683 - RNA, 22 nt, Human
uuacacuugaaaacaggauuua

SEQ ID NO: 585684 - RNA, 22 nt, Human
auuuacauaauagacuuuaggu

SEQ ID NO: 585685 - RNA, 22 nt, Human
ggaaaagacagguuaacuguga

SEQ ID NO: 585686 - RNA, 22 nt, Human
uggaccugcuggaugggcaggu

SEQ ID NO: 585687 - RNA, 23 nt, Human
auguggcuagugagaccaagaaa

SEQ ID NO: 585688 - RNA, 22 nt, Human
uguuuuaaucucccauugcucu

SEQ ID NO: 585689 - RNA, 22 nt, Human
ucccagagaagagcuggaugga

SEQ ID NO: 585690 - RNA, 22 nt, Human
cuggcugaguuacuccacugag

SEQ ID NO: 585691 - RNA, 22 nt, Human
caggacuggcucgcagugggug

SEQ ID NO: 585692 - RNA, 20 nt, Human
cugcucugcuuugcaggugg

SEQ ID NO: 585693 - RNA, 22 nt, Human
uccacagaccaguaucugcagc

SEQ ID NO: 585694 - RNA, 22 nt, Human
aaauacaguggcagcagauaau

SEQ ID NO: 585695 - RNA, 22 nt, Human
auuucucaaccaggucaaaaag

SEQ ID NO: 585696 - RNA, 22 nt, Human
ggaauguucuggucugguucau

SEQ ID NO: 585697 - RNA, 22 nt, Human
uacucaaacucacuaagacaga

SEQ ID NO: 585698 - RNA, 22 nt, Human
cucagagcaaugaacaugcaaa

SEQ ID NO: 585699 - RNA, 22 nt, Human
acacaguaguuugucauugcua

SEQ ID NO: 585700 - RNA, 22 nt, Human
uggcauugcuucugaaguggag

SEQ ID NO: 585701 - RNA, 22 nt, Human
cuggcaaguacugggccagcuc

SEQ ID NO: 585702 - RNA, 22 nt, Human
cucuguggcuugccuuucuguc

SEQ ID NO: 585703 - RNA, 22 nt, Human
gaaacagccccugugugaagca

SEQ ID NO: 585704 - RNA, 22 nt, Human
gagcugguccacaaucugcagg

SEQ ID NO: 585705 - RNA, 22 nt, Human
agcaaagacagggacgaccaag

SEQ ID NO: 585706 - RNA, 22 nt, Human
ucacagaaggcaucacagaaga

SEQ ID NO: 585707 - RNA, 23 nt, Human
auuagaaaggcuuucuggugaaa

SEQ ID NO: 585708 - RNA, 22 nt, Human
uaauaguuaugguugguucuca

SEQ ID NO: 585709 - RNA, 22 nt, Human
gucuucaggaccuggaauuuug

SEQ ID NO: 585710 - RNA, 22 nt, Human
gucuccuccauggagaugguau

SEQ ID NO: 585711 - RNA, 20 nt, Human
ugcugcugugagcgucccug

SEQ ID NO: 585712 - RNA, 22 nt, Human
uaguuucuugauuagccacuuu

SEQ ID NO: 585713 - RNA, 22 nt, Human
gcagccaagaccccaagaacug

SEQ ID NO: 585714 - RNA, 22 nt, Human
gaggccacagcuaucagggaca

SEQ ID NO: 585715 - RNA, 22 nt, Human
gcuuccugaguacacccucauc

SEQ ID NO: 585716 - RNA, 22 nt, Human
caacagagagaccagaaacagg

SEQ ID NO: 585717 - RNA, 22 nt, Human
uggccucagauuauugcacagu

SEQ ID NO: 585718 - RNA, 22 nt, Human
cagcugagaguagaaauggagg

SEQ ID NO: 585719 - RNA, 22 nt, Human
uuucaacagcucucaaaugauc

SEQ ID NO: 585720 - RNA, 22 nt, Human
uucacagggcagcagcugagcc

SEQ ID NO: 585721 - RNA, 22 nt, Human
guucuccacugcagagucucuc

SEQ ID NO: 585722 - RNA, 22 nt, Human
gugacaggcccagugggaugca

SEQ ID NO: 585723 - RNA, 22 nt, Human
ccagggcacuuaggcccagccc

SEQ ID NO: 585724 - RNA, 22 nt, Human
aauuccauaucugugauuauua

SEQ ID NO: 585725 - RNA, 22 nt, Human
acacuuuaagcauuucacacug

SEQ ID NO: 585726 - RNA, 22 nt, Human
auaacuugauguuauuugucca

SEQ ID NO: 585727 - RNA, 20 nt, Human
ugucuccagggcugagugga

SEQ ID NO: 585728 - RNA, 20 nt, Human
aacacagauaccaaagguug

SEQ ID NO: 585729 - RNA, 22 nt, Human
gggacccucaacaucugcuucu

SEQ ID NO: 585730 - RNA, 22 nt, Human
gagccacagugguggcccacgu

SEQ ID NO: 585731 - RNA, 19 nt, Human
uccagguggagagacaccc

SEQ ID NO: 585732 - RNA, 22 nt, Human
ucaggcagguuggcugcagguc

SEQ ID NO: 585733 - RNA, 22 nt, Human
ccuuccagaggcgugacacccu

SEQ ID NO: 585734 - RNA, 22 nt, Human
cagucugauguucgcaggugaa

SEQ ID NO: 585735 - RNA, 22 nt, Human
acauuccugccauaaauuuuuu

SEQ ID NO: 585736 - RNA, 22 nt, Human
uuugccucucagagucuacaca

SEQ ID NO: 585737 - RNA, 22 nt, Human
caggugaagaggauaaaaaguu

SEQ ID NO: 585738 - RNA, 22 nt, Human
gcuggagcugaguucccugggc

SEQ ID NO: 585739 - RNA, 22 nt, Human
gcugaaguuuugcagagaguaa

SEQ ID NO: 585740 - RNA, 22 nt, Human
aggaaauaagggcacuucagau

SEQ ID NO: 585741 - RNA, 22 nt, Human
agggaaggcuuuugacauuucc

SEQ ID NO: 585742 - RNA, 17 nt, Human
agcuucaguugcaaaac

SEQ ID NO: 585743 - RNA, 17 nt, Human
cacuuuguugcuguggg

SEQ ID NO: 585744 - RNA, 22 nt, Human
auagcuuucuuaaauauauaaa

SEQ ID NO: 585745 - RNA, 22 nt, Human
agccuguccagaggacagggcu

SEQ ID NO: 585746 - RNA, 22 nt, Human
aaggcagccgugugacugcaug

SEQ ID NO: 585747 - RNA, 22 nt, Human
gaacagaguugaaacaaggcug

SEQ ID NO: 585748 - RNA, 19 nt, Human
uaaggcagcagugacaggc

SEQ ID NO: 585749 - RNA, 22 nt, Human
uacaguagacaauguuaguaug

SEQ ID NO: 585750 - RNA, 22 nt, Human
guuccuaagcacugugcauucu

SEQ ID NO: 585751 - RNA, 22 nt, Human
gugcccaguaaaugaaagcuuu

SEQ ID NO: 585752 - RNA, 20 nt, Human
cuucuucagccuaugcuuca

SEQ ID NO: 585753 - RNA, 22 nt, Human
uuuaggaagaucugaaggaaga

SEQ ID NO: 585754 - RNA, 16 nt, Human
gcacugggaugucuuc

SEQ ID NO: 585755 - RNA, 22 nt, Human
cugugugugaacacagcccagc

SEQ ID NO: 585756 - RNA, 22 nt, Human
augcaguuuaucuccaaaucau

SEQ ID NO: 585757 - RNA, 22 nt, Human
cauucauuugcccaguaaguca

SEQ ID NO: 585758 - RNA, 22 nt, Human
gugugcagggggccagcgcagc

SEQ ID NO: 585759 - RNA, 22 nt, Human
cucucuggcuuggcacggagau

SEQ ID NO: 585760 - RNA, 22 nt, Human
uggcaggaaaguaacagagcac

SEQ ID NO: 585761 - RNA, 17 nt, Human
agguauaaaaugguagc

SEQ ID NO: 585762 - RNA, 22 nt, Human
uuucuaagucugagggaguaua

SEQ ID NO: 585763 - RNA, 22 nt, Human
cguuuucauggguagagguucu

SEQ ID NO: 585764 - RNA, 22 nt, Human
acuuuacaauauccugugacuu

SEQ ID NO: 585765 - RNA, 22 nt, Human
ucugccucuuucaggccuggca

SEQ ID NO: 585766 - RNA, 22 nt, Human
gaaguuauuugcuaucuacuga

SEQ ID NO: 585767 - RNA, 23 nt, Human
uuucacagcuuuuauucugcauc

SEQ ID NO: 585768 - RNA, 22 nt, Human
ggcugccaggagaagcucagug

SEQ ID NO: 585769 - RNA, 22 nt, Human
ucugcucugagagggccaucag

SEQ ID NO: 585770 - RNA, 22 nt, Human
aucugucuugccuugcauauuu

SEQ ID NO: 585771 - RNA, 22 nt, Human
uaaacucuucuguagaaucaga

SEQ ID NO: 585772 - RNA, 22 nt, Human
gcccaggauggcuggaggugcu

SEQ ID NO: 585773 - RNA, 22 nt, Human
gaugcugaagugaagugaucuu

SEQ ID NO: 585774 - RNA, 22 nt, Human
gaggaagaagggauuagaacuc

SEQ ID NO: 585775 - RNA, 22 nt, Human
uuucucauggcccuuggcuuuu

SEQ ID NO: 585776 - RNA, 22 nt, Human
uauuaagauacguaguuguaaa

SEQ ID NO: 585777 - RNA, 22 nt, Human
uccagcucaggguuggcucaag

SEQ ID NO: 585778 - RNA, 22 nt, Human
uacauguaggugacauuuuaau

SEQ ID NO: 585779 - RNA, 22 nt, Human
uucuucugugaggugugugccu

SEQ ID NO: 585780 - RNA, 22 nt, Human
cauuuccacuucugaaaacugg

SEQ ID NO: 585781 - RNA, 22 nt, Human
uaagguuugaagaagacugagc

SEQ ID NO: 585782 - RNA, 22 nt, Human
ugguuucucugaacucuacgac

SEQ ID NO: 585783 - RNA, 22 nt, Human
ugugacagaucucuauacauga

SEQ ID NO: 585784 - RNA, 22 nt, Human
uuuagacacacuuuguauauuu

SEQ ID NO: 585785 - RNA, 22 nt, Human
gagaaagggauaauuugaagag

SEQ ID NO: 585786 - RNA, 22 nt, Human
uauuucacagcagcucauuuaa

SEQ ID NO: 585787 - RNA, 23 nt, Human
agcauggaauaggaaagaggcag

SEQ ID NO: 585788 - RNA, 22 nt, Human
gaaagguuucaucuacuuuuca

SEQ ID NO: 585789 - RNA, 22 nt, Human
auugguuaagacgcaucaugcu

SEQ ID NO: 585790 - RNA, 19 nt, Human
gcaggcaguggcauucgga

SEQ ID NO: 585791 - RNA, 22 nt, Human
auaucaaacgaaguuauuuuaa

SEQ ID NO: 585792 - RNA, 22 nt, Human
agguccacaguucagcugccca

SEQ ID NO: 585793 - RNA, 22 nt, Human
ggucuggaguagaugagucaug

SEQ ID NO: 585794 - RNA, 22 nt, Human
agugaaaugauucugagcaaga

SEQ ID NO: 585795 - RNA, 22 nt, Human
auaagcuugauguaacuaacca

SEQ ID NO: 585796 - RNA, 22 nt, Human
ccucccuggccagagcagcagc

SEQ ID NO: 585797 - RNA, 20 nt, Human
ccuguguggccagcugaggc

SEQ ID NO: 585798 - RNA, 22 nt, Human
cagugguggaaugaggaauugu

SEQ ID NO: 585799 - RNA, 22 nt, Human
aggaaugaacucgagugaucug

SEQ ID NO: 585800 - RNA, 22 nt, Human
gcuuccuagaucugugguacuc

SEQ ID NO: 585801 - RNA, 22 nt, Human
agccucugaugaucacaggggg

SEQ ID NO: 585802 - RNA, 22 nt, Human
gauaaaagaggaaauuuguuca

SEQ ID NO: 585803 - RNA, 22 nt, Human
ucaauaaggcaacauuaaguua

SEQ ID NO: 585804 - RNA, 22 nt, Human
auaaagacaugcuuacuugccc

SEQ ID NO: 585805 - RNA, 22 nt, Human
ucacuagucgcggggggaggua

SEQ ID NO: 585806 - RNA, 22 nt, Human
cacuguaucuuuuccaaagucu

SEQ ID NO: 585807 - RNA, 22 nt, Human
cugcccuggucccauggcugau

SEQ ID NO: 585808 - RNA, 22 nt, Human
agccagagcugaugucauucuc

SEQ ID NO: 585809 - RNA, 22 nt, Human
ucuuucuacaucauuugcuucu

SEQ ID NO: 585810 - RNA, 22 nt, Human
uuuccucuaaacgcauuugcuu

SEQ ID NO: 585811 - RNA, 22 nt, Human
aguuuguaugccaacagcaaag

SEQ ID NO: 585812 - RNA, 22 nt, Human
aaugaacaagaaagacuuugag

SEQ ID NO: 585813 - RNA, 22 nt, Human
guaaaacauguuuuaacuagga

SEQ ID NO: 585814 - RNA, 22 nt, Human
gcugggaagaacaggagagaau

SEQ ID NO: 585815 - RNA, 22 nt, Human
aggcccugcccagugccacaag

SEQ ID NO: 585816 - RNA, 22 nt, Human
uggaagagaaaggaguggaucu

SEQ ID NO: 585817 - RNA, 22 nt, Human
guuuuccacuggauuguuugga

SEQ ID NO: 585818 - RNA, 22 nt, Human
cacacaggaaaauuggaauuaa

SEQ ID NO: 585819 - RNA, 22 nt, Human
gucuuauuuaaagagaucauac

SEQ ID NO: 585820 - RNA, 22 nt, Human
uuguuacacauaauaacauuuu

SEQ ID NO: 585821 - RNA, 22 nt, Human
cuggaguuuguggcuugcucaa

SEQ ID NO: 585822 - RNA, 22 nt, Human
caaagcucaugcucuuagccau

SEQ ID NO: 585823 - RNA, 22 nt, Human
agggcugaggcgagggagaugc

SEQ ID NO: 585824 - RNA, 22 nt, Human
ucugccuguaccucuuuuuugc

SEQ ID NO: 585825 - RNA, 22 nt, Human
gaagguuuugauuccacugaau

SEQ ID NO: 585826 - RNA, 22 nt, Human
ucacagcauuuuuagaaagauu

SEQ ID NO: 585827 - RNA, 22 nt, Human
aggagggauagaaaaauacuug

SEQ ID NO: 585828 - RNA, 22 nt, Human
gggucaaaugauaauugcuucu

SEQ ID NO: 585829 - RNA, 22 nt, Human
uagggcuggguacacucuugcc

SEQ ID NO: 585830 - RNA, 22 nt, Human
ccucaggcaggaaacugucccg

SEQ ID NO: 585831 - RNA, 22 nt, Human
gaugaaauuguuuugauacuuu

SEQ ID NO: 585832 - RNA, 22 nt, Human
cauguuaacuaagauuaacuau

SEQ ID NO: 585833 - RNA, 22 nt, Human
gaugcugaccagcuguuuccuu

SEQ ID NO: 585834 - RNA, 22 nt, Human
gccaguggcuugccaggcagga

SEQ ID NO: 585835 - RNA, 22 nt, Human
gggaaacuggggacugaaucug

SEQ ID NO: 585836 - RNA, 22 nt, Human
uagauucauuuuagcaaaaguu

SEQ ID NO: 585837 - RNA, 22 nt, Human
gugucccaggagaggagacaau

SEQ ID NO: 585838 - RNA, 22 nt, Human
uacaaugcauucguugucucgg

SEQ ID NO: 585839 - RNA, 22 nt, Human
ccugggucuugguucaugcucu

SEQ ID NO: 585840 - RNA, 22 nt, Human
gagugcaguaugagaggcugcu

SEQ ID NO: 585841 - RNA, 22 nt, Human
cucuggccugcagauccaugcu

SEQ ID NO: 585842 - RNA, 22 nt, Human
agccaaggacucagugguaggc

SEQ ID NO: 585843 - RNA, 22 nt, Human
uaagacauaaauaggcuuuuua

SEQ ID NO: 585844 - RNA, 22 nt, Human
ugcaguggcgccaucucagcuc

SEQ ID NO: 585845 - RNA, 21 nt, Human
accaggcuugugggagggagc

SEQ ID NO: 585846 - RNA, 22 nt, Human
uccuucuaccagcuggauaccu

SEQ ID NO: 585847 - RNA, 22 nt, Human
cucaggcuccagacuuccgucc

SEQ ID NO: 585848 - RNA, 22 nt, Human
ucugccuggauuccauucucca

SEQ ID NO: 585849 - RNA, 19 nt, Human
cucucuccaguggcuggcu

SEQ ID NO: 585850 - RNA, 22 nt, Human
cuuguuuugaaagcaguggcca

SEQ ID NO: 585851 - RNA, 22 nt, Human
cacauuuaagcagauguggacc

SEQ ID NO: 585852 - RNA, 22 nt, Human
augugaaaccugugaguagagu

SEQ ID NO: 585853 - RNA, 22 nt, Human
uaaaggcagccuaggaaguguu

SEQ ID NO: 585854 - RNA, 22 nt, Human
agugaggggauucaggcaaggu

SEQ ID NO: 585855 - RNA, 22 nt, Human
caguuuucuaugguagaagcau

SEQ ID NO: 585856 - RNA, 22 nt, Human
caaugauaauggcuguauuuau

SEQ ID NO: 585857 - RNA, 22 nt, Human
ggagccugggcauuaguaauuu

SEQ ID NO: 585858 - RNA, 22 nt, Human
ugggagcagccaacauggccuu

SEQ ID NO: 585859 - RNA, 22 nt, Human
gaagccacagggaaggagaaca

SEQ ID NO: 585860 - RNA, 22 nt, Human
gugugucugaaguugaguagac

SEQ ID NO: 585861 - RNA, 22 nt, Human
cauuucuagggaucauaaagua

SEQ ID NO: 585862 - RNA, 22 nt, Human
aagacaagcaucaaaucaggca

SEQ ID NO: 585863 - RNA, 22 nt, Human
gaggaggaggaaguggaaccca

SEQ ID NO: 585864 - RNA, 22 nt, Human
uuuaaggaaaaaauguacuuag

SEQ ID NO: 585865 - RNA, 22 nt, Human
cugcuggcaagcccaguuggag

SEQ ID NO: 585866 - RNA, 21 nt, Human
uccagcucucauaguguucca

SEQ ID NO: 585867 - RNA, 22 nt, Human
gacuguccagaauuccuaggug

SEQ ID NO: 585868 - RNA, 22 nt, Human
guaugucaugagccuugugcgu

SEQ ID NO: 585869 - RNA, 22 nt, Human
agaggcugugcagagggagugc

SEQ ID NO: 585870 - RNA, 22 nt, Human
cagggucauggcaccugcacgg

SEQ ID NO: 585871 - RNA, 22 nt, Human
ccaggagagcagaagcccaggc

SEQ ID NO: 585872 - RNA, 22 nt, Human
gccugccuuuuggaggcacauu

SEQ ID NO: 585873 - RNA, 22 nt, Human
gcaggcccuuagccuugguggg

SEQ ID NO: 585874 - RNA, 22 nt, Human
cagcuacaguuccacugagcau

SEQ ID NO: 585875 - RNA, 22 nt, Human
aagcucagcaugucuccuagaa

SEQ ID NO: 585876 - RNA, 22 nt, Human
ucugaaauaggaaagcaaaugg

SEQ ID NO: 585877 - RNA, 22 nt, Human
ccaggagcagaguagguguuca

SEQ ID NO: 585878 - RNA, 22 nt, Human
uuaaaguucauuaaaugagcca

SEQ ID NO: 585879 - RNA, 19 nt, Human
cauggcugcugcuugggag

SEQ ID NO: 585880 - RNA, 22 nt, Human
guacuaaacagagaaccaauau

SEQ ID NO: 585881 - RNA, 22 nt, Human
uacaaaggcuuaaagagauuuc

SEQ ID NO: 585882 - RNA, 22 nt, Human
aggcauucuagaaguagaagua

SEQ ID NO: 585883 - RNA, 22 nt, Human
ugauggaaauguucuguaucug

SEQ ID NO: 585884 - RNA, 22 nt, Human
aacuggaagagugaauauaacu

SEQ ID NO: 585885 - RNA, 22 nt, Human
aaacaaugaaauauuuuuaugg

SEQ ID NO: 585886 - RNA, 22 nt, Human
uauuuucaccauguaucccugu

SEQ ID NO: 585887 - RNA, 22 nt, Human
ucacaugccacagaugaggcaa

SEQ ID NO: 585888 - RNA, 22 nt, Human
gcugccugaucauacaccaggg

SEQ ID NO: 585889 - RNA, 22 nt, Human
aaacccaggguuuugucuuccc

SEQ ID NO: 585890 - RNA, 22 nt, Human
cugcugccugauugcagaccuc

SEQ ID NO: 585891 - RNA, 22 nt, Human
cugggguggagauuggcaaucu

SEQ ID NO: 585892 - RNA, 22 nt, Human
acugaacacuuuugaaagauua

SEQ ID NO: 585893 - RNA, 22 nt, Human
uggagaaagcugcauauggaaa

SEQ ID NO: 585894 - RNA, 22 nt, Human
ucccagggauuaggacauggau

SEQ ID NO: 585895 - RNA, 22 nt, Human
aagauucuacaaacucugguaa

SEQ ID NO: 585896 - RNA, 22 nt, Human
aggagacugugaauugacuguc

SEQ ID NO: 585897 - RNA, 22 nt, Human
uugugcaaugguguuuagguuu

SEQ ID NO: 585898 - RNA, 18 nt, Human
gucuggaggucaggagcu

SEQ ID NO: 585899 - RNA, 23 nt, Human
agcuuugaggacuuuaaaagaua

SEQ ID NO: 585900 - RNA, 22 nt, Human
aaaugugacagaugcaguacag

SEQ ID NO: 585901 - RNA, 22 nt, Human
agggggugggaagucuagaauc

SEQ ID NO: 585902 - RNA, 22 nt, Human
uuccagaggcuugaggaaaauu

SEQ ID NO: 585903 - RNA, 22 nt, Human
gcuugaguuuugggacaaagcc

SEQ ID NO: 585904 - RNA, 22 nt, Human
gcugccuuuugcuccucccacc

SEQ ID NO: 585905 - RNA, 22 nt, Human
aagacaaagggguccuuggaug

SEQ ID NO: 585906 - RNA, 22 nt, Human
cuggugcaagauucccugcuuc

SEQ ID NO: 585907 - RNA, 22 nt, Human
cagagguaccagcagccucugg

SEQ ID NO: 585908 - RNA, 22 nt, Human
uuaauauguugaaauuuauuag

SEQ ID NO: 585909 - RNA, 22 nt, Human
aggcuccacggucacuggcucu

SEQ ID NO: 585910 - RNA, 22 nt, Human
ucugaggccuugggacagaagu

SEQ ID NO: 585911 - RNA, 22 nt, Human
gcucugagacaguagagauggc

SEQ ID NO: 585912 - RNA, 22 nt, Human
caggccugagacaucugagaua

SEQ ID NO: 585913 - RNA, 19 nt, Human
ucauggaucagguaguuua

SEQ ID NO: 585914 - RNA, 22 nt, Human
uaggacuuuggcgucagaacug

SEQ ID NO: 585915 - RNA, 22 nt, Human
uggagcagccuuuucuaagcaa

SEQ ID NO: 585916 - RNA, 22 nt, Human
ucucaucucggaucagaaguga

SEQ ID NO: 585917 - RNA, 22 nt, Human
ugacauuuaagccucugauuuc

SEQ ID NO: 585918 - RNA, 22 nt, Human
aaaacuguaggaauugggugcc

SEQ ID NO: 585919 - RNA, 22 nt, Human
gagguuucacuguguuguccag

SEQ ID NO: 585920 - RNA, 22 nt, Human
agagcaaagggacauggaagag

SEQ ID NO: 585921 - RNA, 22 nt, Human
ggguccaguuucaucugagguu

SEQ ID NO: 585922 - RNA, 22 nt, Human
cugucccaggagcuguaagaca

SEQ ID NO: 585923 - RNA, 22 nt, Human
ggucccugcccaaagcccuugg

SEQ ID NO: 585924 - RNA, 22 nt, Human
uggcagucuuguaggcaucucc

SEQ ID NO: 585925 - RNA, 22 nt, Human
uaagauagaacucugaggcuac

SEQ ID NO: 585926 - RNA, 22 nt, Human
gauggccuggguccccuuccgg

SEQ ID NO: 585927 - RNA, 22 nt, Human
caggcagagucagauuagacuu

SEQ ID NO: 585928 - RNA, 22 nt, Human
gauaauuauaggcuaagccacu

SEQ ID NO: 585929 - RNA, 23 nt, Human
agcuccagcugacgugggcagcc

SEQ ID NO: 585930 - RNA, 22 nt, Human
auauuaugcuaagggaaauaag

SEQ ID NO: 585931 - RNA, 19 nt, Human
ugcagaagacacaguggug

SEQ ID NO: 585932 - RNA, 22 nt, Human
acucugccaucccaggugcugu

SEQ ID NO: 585933 - RNA, 22 nt, Human
gcuggcuugacagaggccuggg

SEQ ID NO: 585934 - RNA, 22 nt, Human
gacauaaaauggaauucuguug

SEQ ID NO: 585935 - RNA, 22 nt, Human
aagcacaugaaaaugugaagcu

SEQ ID NO: 585936 - RNA, 22 nt, Human
agggaagccaagccuuagagaa

SEQ ID NO: 585937 - RNA, 22 nt, Human
caggcugccgugaagcaggccu

SEQ ID NO: 585938 - RNA, 19 nt, Human
ucuuauugagcagcugagg

SEQ ID NO: 585939 - RNA, 22 nt, Human
agcagagcugggauccuggguc

SEQ ID NO: 585940 - RNA, 22 nt, Human
auccaggcugcgggucucaagu

SEQ ID NO: 585941 - RNA, 23 nt, Human
gggccuuggauuuguggaguuca

SEQ ID NO: 585942 - RNA, 19 nt, Human
ugcuucuggaaugcaaggc

SEQ ID NO: 585943 - RNA, 22 nt, Human
auucaguuagccacagcuauuc

SEQ ID NO: 585944 - RNA, 22 nt, Human
aaacccagagacuagaaagacc

SEQ ID NO: 585945 - RNA, 22 nt, Human
aagguauuuucuaauguauacu

SEQ ID NO: 585946 - RNA, 22 nt, Human
aaauucauauguugaaaugcua

SEQ ID NO: 585947 - RNA, 22 nt, Human
cucagagcccaggguacacccg

SEQ ID NO: 585948 - RNA, 22 nt, Human
ccaggcuggaaucaauauucug

SEQ ID NO: 585949 - RNA, 22 nt, Human
guucucucagcgauagugaugg

SEQ ID NO: 585950 - RNA, 22 nt, Human
ucuccucccaggcucuuccagg

SEQ ID NO: 585951 - RNA, 22 nt, Human
auuuuuucccaguuagccagga

SEQ ID NO: 585952 - RNA, 22 nt, Human
gugggcagaacauuuguaggcu

SEQ ID NO: 585953 - RNA, 22 nt, Human
aaagguuuccgagcuuuaauuu

SEQ ID NO: 585954 - RNA, 22 nt, Human
uguagaaauuaguaagaucaac

SEQ ID NO: 585955 - RNA, 22 nt, Human
ugguaugaccguggugcaagca

SEQ ID NO: 585956 - RNA, 22 nt, Human
ugacauuuaucuucuacaauga

SEQ ID NO: 585957 - RNA, 22 nt, Human
ggcccagcuguauauuacaguu

SEQ ID NO: 585958 - RNA, 22 nt, Human
ccugagagugguguacaggaga

SEQ ID NO: 585959 - RNA, 22 nt, Human
ucucugggaguugagcagcagc

SEQ ID NO: 585960 - RNA, 22 nt, Human
gcucugugguggggcagaguuu

SEQ ID NO: 585961 - RNA, 22 nt, Human
uggggcuaaacacgccuggccu

SEQ ID NO: 585962 - RNA, 22 nt, Human
accugggaggcggagguugcag

SEQ ID NO: 585963 - RNA, 22 nt, Human
agugaagcuaaccugcugauuu

SEQ ID NO: 585964 - RNA, 22 nt, Human
ccacagaguccgcauuugaggc

SEQ ID NO: 585965 - RNA, 22 nt, Human
ggcugcugugaccucaggugau

SEQ ID NO: 585966 - RNA, 22 nt, Human
uugaaagaacucuucagagaua

SEQ ID NO: 585967 - RNA, 21 nt, Human
guuuaugaaucuuguccugcu

SEQ ID NO: 585968 - RNA, 20 nt, Human
agcagauagcgggagaguuu

SEQ ID NO: 585969 - RNA, 22 nt, Human
uccaagaagcucagcaaacauc

SEQ ID NO: 585970 - RNA, 22 nt, Human
agcaaaauaagguaauuuauug

SEQ ID NO: 585971 - RNA, 22 nt, Human
aggucccaggcauagcuggucu

SEQ ID NO: 585972 - RNA, 20 nt, Human
agagguucagucuggagaag

SEQ ID NO: 585973 - RNA, 22 nt, Human
uagcacaguuccugacucuuug

SEQ ID NO: 585974 - RNA, 22 nt, Human
cagcuguugacugguacaugaa

SEQ ID NO: 585975 - RNA, 22 nt, Human
guucugcuguaauaucucugcu

SEQ ID NO: 585976 - RNA, 22 nt, Human
cugugccagccugucccaggag

SEQ ID NO: 585977 - RNA, 22 nt, Human
ggagccuguggcugcuugaagc

SEQ ID NO: 585978 - RNA, 23 nt, Human
gugauuucagggaacagaaucag

SEQ ID NO: 585979 - RNA, 22 nt, Human
ggugucuguugccuccugguua

SEQ ID NO: 585980 - RNA, 22 nt, Human
agggucuguggaugcaucuggg

SEQ ID NO: 585981 - RNA, 22 nt, Human
cagggcucaucugugugaccag

SEQ ID NO: 585982 - RNA, 22 nt, Human
ucugggcucugucagcaccucu

SEQ ID NO: 585983 - RNA, 22 nt, Human
ucuuggcuauccaaguuaucca

SEQ ID NO: 585984 - RNA, 20 nt, Human
cuccucaguuccaugggagg

SEQ ID NO: 585985 - RNA, 22 nt, Human
ugcugagggagggguuuuccag

SEQ ID NO: 585986 - RNA, 22 nt, Human
aauuagcuuuaccuaggauugu

SEQ ID NO: 585987 - RNA, 22 nt, Human
cuccuaggugcucacugggguc

SEQ ID NO: 585988 - RNA, 22 nt, Human
accugcccacacuuccuuccca

SEQ ID NO: 585989 - RNA, 23 nt, Human
ggcagagagcauggcuggggccc

SEQ ID NO: 585990 - RNA, 22 nt, Human
uucucaaggacaaaaugacaug

SEQ ID NO: 585991 - RNA, 22 nt, Human
aaggauacuuuuagagccugag

SEQ ID NO: 585992 - RNA, 22 nt, Human
gaaacauuuguugaguacuugc

SEQ ID NO: 585993 - RNA, 22 nt, Human
caggcuugguuggggcgaggga

SEQ ID NO: 585994 - RNA, 22 nt, Human
ugccugcuccaguccuguccac

SEQ ID NO: 585995 - RNA, 22 nt, Human
aaaauugugaagguuucugaaa

SEQ ID NO: 585996 - RNA, 22 nt, Human
auauucaaauuacauuuacuaa

SEQ ID NO: 585997 - RNA, 22 nt, Human
gagagaagaauguuccgaggcc

SEQ ID NO: 585998 - RNA, 20 nt, Human
gcaguguguaugaauagcug

SEQ ID NO: 585999 - RNA, 22 nt, Human
cagaggcuaaggguagcuuggg

SEQ ID NO: 586000 - RNA, 22 nt, Human
ggagagcugguauaugaagaca

SEQ ID NO: 586001 - RNA, 22 nt, Human
uuugugcaauuuauguacuaua

SEQ ID NO: 586002 - RNA, 22 nt, Human
uuaaaucuguucucaugucugu

SEQ ID NO: 586003 - RNA, 22 nt, Human
cagauggggcaaggccaucugu

SEQ ID NO: 586004 - RNA, 22 nt, Human
caggugcagggaguucaggaug

SEQ ID NO: 586005 - RNA, 22 nt, Human
acugaucacagauauguauauu

SEQ ID NO: 586006 - RNA, 22 nt, Human
ggagccagaggcugcugcugug

SEQ ID NO: 586007 - RNA, 22 nt, Human
cuggccugaggccgccuucaga

SEQ ID NO: 586008 - RNA, 22 nt, Human
guagcugauauuagcaaugagu

SEQ ID NO: 586009 - RNA, 22 nt, Human
ccaggagguggcaggacuugcc

SEQ ID NO: 586010 - RNA, 23 nt, Human
gguuauuugcauccuguaauuau

SEQ ID NO: 586011 - RNA, 22 nt, Human
augcaagauucagcaggaagau

SEQ ID NO: 586012 - RNA, 22 nt, Human
ucagagcacuggugcuaccuug

SEQ ID NO: 586013 - RNA, 22 nt, Human
acagcagauuucccugggcucc

SEQ ID NO: 586014 - RNA, 22 nt, Human
aaucacauuugcccccauauuc

SEQ ID NO: 586015 - RNA, 22 nt, Human
gaauuaauugugugguuugaau

SEQ ID NO: 586016 - RNA, 17 nt, Human
ugagauggaagaagacu

SEQ ID NO: 586017 - RNA, 22 nt, Human
uguucucacuggaugcuucaca

SEQ ID NO: 586018 - RNA, 22 nt, Human
ucugcccuaauucagugcuuag

SEQ ID NO: 586019 - RNA, 22 nt, Human
uaaagcuuguauugcaauauuu

SEQ ID NO: 586020 - RNA, 22 nt, Human
cuuuucaugagucuguuauggg

SEQ ID NO: 586021 - RNA, 22 nt, Human
uccucaggauguggaguagaau

SEQ ID NO: 586022 - RNA, 22 nt, Human
augcagucauggaaugcucuca

SEQ ID NO: 586023 - RNA, 22 nt, Human
ugcugaauuaaacucuaugugg

SEQ ID NO: 586024 - RNA, 22 nt, Human
caacugggauaaagagcuaaag

SEQ ID NO: 586025 - RNA, 22 nt, Human
aaccagcuccucaccccauugu

SEQ ID NO: 586026 - RNA, 22 nt, Human
aauugcuuaguugcaacuaugc

SEQ ID NO: 586027 - RNA, 22 nt, Human
agagccaguuguuaagcacuua

SEQ ID NO: 586028 - RNA, 22 nt, Human
acgucaucguugucaucgucau

SEQ ID NO: 586029 - RNA, 22 nt, Human
acaggcuggugguccuggccau

SEQ ID NO: 586030 - RNA, 22 nt, Human
aaagacauuagcuuagauguca

SEQ ID NO: 586031 - RNA, 22 nt, Human
ccaggguuuaaauucugacuau

SEQ ID NO: 586032 - RNA, 22 nt, Human
aaguuugucucauuugaucuuc

SEQ ID NO: 586033 - RNA, 20 nt, Human
ucagcaugcuccucagacau

SEQ ID NO: 586034 - RNA, 18 nt, Human
agugucuggauauuuggg

SEQ ID NO: 586035 - RNA, 22 nt, Human
aguguucagugauugucaaccg

SEQ ID NO: 586036 - RNA, 22 nt, Human
agagaugguagaacagucauaa

SEQ ID NO: 586037 - RNA, 22 nt, Human
ugggagcaagcuacuuagggaa

SEQ ID NO: 586038 - RNA, 18 nt, Human
acugucucugagaguggu

SEQ ID NO: 586039 - RNA, 22 nt, Human
ucuggaauagguccugaguauu

SEQ ID NO: 586040 - RNA, 22 nt, Human
ccaugcacaccagcaggcagac

SEQ ID NO: 586041 - RNA, 22 nt, Human
ccagcugcugugaggaccacag

SEQ ID NO: 586042 - RNA, 22 nt, Human
ugagguaggugguggcagccau

SEQ ID NO: 586043 - RNA, 20 nt, Human
agugggagagggcagacugc

SEQ ID NO: 586044 - RNA, 22 nt, Human
cucaucugauaaaucacucuua

SEQ ID NO: 586045 - RNA, 22 nt, Human
caggcugacaacugagcauuuu

SEQ ID NO: 586046 - RNA, 22 nt, Human
cagaggcacagcuucuuuuaau

SEQ ID NO: 586047 - RNA, 22 nt, Human
ucucuggcugauauuccucugc

SEQ ID NO: 586048 - RNA, 22 nt, Human
aggaccuggaucacagagaucu

SEQ ID NO: 586049 - RNA, 23 nt, Human
guaaugaugggaauuuacuuaga

SEQ ID NO: 586050 - RNA, 22 nt, Human
cugugucuaaucaggucaguca

SEQ ID NO: 586051 - RNA, 22 nt, Human
gagcucauucauucauugccug

SEQ ID NO: 586052 - RNA, 22 nt, Human
uccaggagguuuggaggaagca

SEQ ID NO: 586053 - RNA, 22 nt, Human
uuguggggcaacagcaggugaa

SEQ ID NO: 586054 - RNA, 22 nt, Human
guuauuuuaucucugagagguu

SEQ ID NO: 586055 - RNA, 22 nt, Human
ucaaagagcuauucaguugugg

SEQ ID NO: 586056 - RNA, 22 nt, Human
ccucuccaguuuuaacgugacc

SEQ ID NO: 586057 - RNA, 22 nt, Human
uccagcuugacaaaugauuuua

SEQ ID NO: 586058 - RNA, 22 nt, Human
cauaauuagucauguuaugcau

SEQ ID NO: 586059 - RNA, 22 nt, Human
ccugggagccgacugacugugc

SEQ ID NO: 586060 - RNA, 19 nt, Human
ggugugccaaaugggaaug

SEQ ID NO: 586061 - RNA, 22 nt, Human
ccauggcauuuuaugugucuua

SEQ ID NO: 586062 - RNA, 22 nt, Human
uggggaggaagucagauuucag

SEQ ID NO: 586063 - RNA, 22 nt, Human
aauucuuaaucccauaaaguga

SEQ ID NO: 586064 - RNA, 22 nt, Human
cugggcugagccugggcugugu

SEQ ID NO: 586065 - RNA, 22 nt, Human
uccuugaauggacauuacacug

SEQ ID NO: 586066 - RNA, 22 nt, Human
auguuuuucauaccaguguugg

SEQ ID NO: 586067 - RNA, 22 nt, Human
ugaagaaucccagggaauuugg

SEQ ID NO: 586068 - RNA, 22 nt, Human
acugagaacuuggggacagagg

SEQ ID NO: 586069 - RNA, 22 nt, Human
ucaggcugguccccacagugga

SEQ ID NO: 586070 - RNA, 22 nt, Human
cagcuggggcagccacgugcgg

SEQ ID NO: 586071 - RNA, 22 nt, Human
cuggcuuuuagugugaagacuu

SEQ ID NO: 586072 - RNA, 22 nt, Human
aggaauguaacaggaguaaaaa

SEQ ID NO: 586073 - RNA, 22 nt, Human
gcugggcugagaaguuaagcaa

SEQ ID NO: 586074 - RNA, 22 nt, Human
cugaggaggcuaauuugaggau

SEQ ID NO: 586075 - RNA, 22 nt, Human
uguccuggguggaugcuucauu

SEQ ID NO: 586076 - RNA, 22 nt, Human
ucuggaguagggucugggaauu

SEQ ID NO: 586077 - RNA, 22 nt, Human
gagggagccgccacagacuggg

SEQ ID NO: 586078 - RNA, 19 nt, Human
ugcccaggccagguugggc

SEQ ID NO: 586079 - RNA, 22 nt, Human
aauauaguucuagaaauauuuu

SEQ ID NO: 586080 - RNA, 22 nt, Human
aacaaucaaguuucuaaaugac

SEQ ID NO: 586081 - RNA, 22 nt, Human
uuuagugauucauuuagaaaaa

SEQ ID NO: 586082 - RNA, 18 nt, Human
aacaggauccuccacuuc

SEQ ID NO: 586083 - RNA, 22 nt, Human
ccuucuccccucugcagggugu

SEQ ID NO: 586084 - RNA, 22 nt, Human
uggcugggccgggccuugugcc

SEQ ID NO: 586085 - RNA, 22 nt, Human
ucugaacagcauggaaucauuu

SEQ ID NO: 586086 - RNA, 18 nt, Human
aggauauuaagaguacag

SEQ ID NO: 586087 - RNA, 22 nt, Human
agcacauugauuuauuuuggag

SEQ ID NO: 586088 - RNA, 22 nt, Human
ggggcaccuccucuuggcaauu

SEQ ID NO: 586089 - RNA, 22 nt, Human
cccugccuugggguccacaccg

SEQ ID NO: 586090 - RNA, 22 nt, Human
ucucagaaauacuauguuguca

SEQ ID NO: 586091 - RNA, 22 nt, Human
ugcuggagaccugcuugcacca

SEQ ID NO: 586092 - RNA, 22 nt, Human
ccaugggcacuggguggaggua

SEQ ID NO: 586093 - RNA, 22 nt, Human
gcccugcccugagccguagacc

SEQ ID NO: 586094 - RNA, 22 nt, Human
uccagcucuucaguucugcaaa

SEQ ID NO: 586095 - RNA, 22 nt, Human
auuugcuucauagaucugugga

SEQ ID NO: 586096 - RNA, 18 nt, Human
uccuuagcugagcuuguc

SEQ ID NO: 586097 - RNA, 22 nt, Human
ucuugaaguccuuacauuugau

SEQ ID NO: 586098 - RNA, 22 nt, Human
gcagugaaucuggcaagaauuu

SEQ ID NO: 586099 - RNA, 22 nt, Human
aggcucugacccaugggaccca

SEQ ID NO: 586100 - RNA, 22 nt, Human
auaaaagucugcuuauuugggc

SEQ ID NO: 586101 - RNA, 22 nt, Human
cucuuuaaaguaaaauuugucu

SEQ ID NO: 586102 - RNA, 22 nt, Human
gagagcuggauucuggauaggu

SEQ ID NO: 586103 - RNA, 22 nt, Human
uaugacauugcuuuuuagaacu

SEQ ID NO: 586104 - RNA, 22 nt, Human
cugcuucacuucgguugcauag

SEQ ID NO: 586105 - RNA, 22 nt, Human
gugaauaugaucuuauuuggaa

SEQ ID NO: 586106 - RNA, 22 nt, Human
cgccuucaggcccuuuuuguug

SEQ ID NO: 586107 - RNA, 22 nt, Human
ucuucaaagaauuuuaguaauu

SEQ ID NO: 586108 - RNA, 22 nt, Human
caguaguggucuaucacuggag

SEQ ID NO: 586109 - RNA, 22 nt, Human
agaggccacuuugccugugaug

SEQ ID NO: 586110 - RNA, 22 nt, Human
ccuucugagcuucaauuucagu

SEQ ID NO: 586111 - RNA, 22 nt, Human
acccagggaccccgcugacgcc

SEQ ID NO: 586112 - RNA, 22 nt, Human
ugcaaagaugaaauauuaaagg

SEQ ID NO: 586113 - RNA, 22 nt, Human
gguggccauggucagguagcgg

SEQ ID NO: 586114 - RNA, 22 nt, Human
cucacagcugcuucaggaucca

SEQ ID NO: 586115 - RNA, 22 nt, Human
acugggcuguggacacccagcg

SEQ ID NO: 586116 - RNA, 22 nt, Human
gagacacuugcugugaggucgc

SEQ ID NO: 586117 - RNA, 22 nt, Human
ugcaggcuggggaggcagacuu

SEQ ID NO: 586118 - RNA, 22 nt, Human
gcucuggcuuggggcacucguc

SEQ ID NO: 586119 - RNA, 22 nt, Human
aucccagagaauaaugaucagg

SEQ ID NO: 586120 - RNA, 22 nt, Human
ggcuggguacagggcagugugc

SEQ ID NO: 586121 - RNA, 22 nt, Human
cagugccauauugaaagacauu

SEQ ID NO: 586122 - RNA, 22 nt, Human
ggcagucacuuuugcuugugcc

SEQ ID NO: 586123 - RNA, 22 nt, Human
acuggggaauggaacugggaau

SEQ ID NO: 586124 - RNA, 22 nt, Human
uagcucugugcucuggaucugu

SEQ ID NO: 586125 - RNA, 22 nt, Human
ccagguggacggcgaguacagg

SEQ ID NO: 586126 - RNA, 22 nt, Human
caugaacauucagaaauacagc

SEQ ID NO: 586127 - RNA, 22 nt, Human
agggagacacaugaggaaguca

SEQ ID NO: 586128 - RNA, 19 nt, Human
ccaggagcaguggugagcu

SEQ ID NO: 586129 - RNA, 22 nt, Human
cuuccucugcggcgccgggcgc

SEQ ID NO: 586130 - RNA, 22 nt, Human
uccagcagggaauuaguagucu

SEQ ID NO: 586131 - RNA, 22 nt, Human
auuauuguugcggcuguuaccg

SEQ ID NO: 586132 - RNA, 22 nt, Human
cuugagaaucuucucugaagag

SEQ ID NO: 586133 - RNA, 22 nt, Human
cagagcaguccuugucaaucag

SEQ ID NO: 586134 - RNA, 22 nt, Human
aggagcuggaguccaggcaagu

SEQ ID NO: 586135 - RNA, 22 nt, Human
uguggcagaggaggcagcgucc

SEQ ID NO: 586136 - RNA, 22 nt, Human
auuuguaaagugcuuaaaagua

SEQ ID NO: 586137 - RNA, 22 nt, Human
acuuuguuccuuucacaaagaa

SEQ ID NO: 586138 - RNA, 22 nt, Human
aauguugccccaggacaaagga

SEQ ID NO: 586139 - RNA, 22 nt, Human
ugcccagcugucaaaguagaua

SEQ ID NO: 586140 - RNA, 22 nt, Human
ugggcaucauggacagcagagg

SEQ ID NO: 586141 - RNA, 22 nt, Human
auacaguagacaaucucaugaa

SEQ ID NO: 586142 - RNA, 22 nt, Human
cugcugggaaggucugcucagu

SEQ ID NO: 586143 - RNA, 22 nt, Human
gaggcacaucacuuggugcauu

SEQ ID NO: 586144 - RNA, 22 nt, Human
ucuugcuucugcucaaggggag

SEQ ID NO: 586145 - RNA, 22 nt, Human
acugugaaucacuacuaguaga

SEQ ID NO: 586146 - RNA, 22 nt, Human
uggcaguggauaggggagcggu

SEQ ID NO: 586147 - RNA, 22 nt, Human
uugaagaugcugucucuuccag

SEQ ID NO: 586148 - RNA, 22 nt, Human
cugacaguguacacugacagcu

SEQ ID NO: 586149 - RNA, 22 nt, Human
uggcagagucaucacaucugga

SEQ ID NO: 586150 - RNA, 22 nt, Human
auggagugggccaauuuuagug

SEQ ID NO: 586151 - RNA, 22 nt, Human
gcccugagaggcaaugacucuu

SEQ ID NO: 586152 - RNA, 18 nt, Human
ccucaggggaccuggcag

SEQ ID NO: 586153 - RNA, 22 nt, Human
uaagauaaggagagugcuagua

SEQ ID NO: 586154 - RNA, 22 nt, Human
agcagggcuuugcagacuuggg

SEQ ID NO: 586155 - RNA, 22 nt, Human
gcugcaggagcuggagcugugg

SEQ ID NO: 586156 - RNA, 22 nt, Human
cugcagaccucugagguccaug

SEQ ID NO: 586157 - RNA, 17 nt, Human
gcugcagcgguaggcag

SEQ ID NO: 586158 - RNA, 22 nt, Human
cacaauuuccaagucauguuau

SEQ ID NO: 586159 - RNA, 22 nt, Human
gagagguagaggcucugcuuaa

SEQ ID NO: 586160 - RNA, 22 nt, Human
cagaggcugaugugggaugggc

SEQ ID NO: 586161 - RNA, 22 nt, Human
acauguacauacacauauguaa

SEQ ID NO: 586162 - RNA, 22 nt, Human
acugaggcgcaguccggcuguc

SEQ ID NO: 586163 - RNA, 22 nt, Human
uccugggucucuuccuuaguuc

SEQ ID NO: 586164 - RNA, 22 nt, Human
gaaaauuauugaaaauggcucu

SEQ ID NO: 586165 - RNA, 22 nt, Human
uucaacacaggaacaugauaua

SEQ ID NO: 586166 - RNA, 22 nt, Human
agcugaaguccucgcggugcua

SEQ ID NO: 586167 - RNA, 17 nt, Human
ucugaggugaggaugca

SEQ ID NO: 586168 - RNA, 22 nt, Human
cagguggguacaucacagagac

SEQ ID NO: 586169 - RNA, 22 nt, Human
gagccugaugaaacaggcagac

SEQ ID NO: 586170 - RNA, 22 nt, Human
caggcugcguuugugaaaggua

SEQ ID NO: 586171 - RNA, 22 nt, Human
cauaauuucccaagagauugaa

SEQ ID NO: 586172 - RNA, 22 nt, Human
agaagccauucccuguaggcuc

SEQ ID NO: 586173 - RNA, 22 nt, Human
uaugcaaaucauuagauuuccu

SEQ ID NO: 586174 - RNA, 22 nt, Human
gcacacacuguuuuccucacau

SEQ ID NO: 586175 - RNA, 22 nt, Human
ugagagguaggaaaugaacaag

SEQ ID NO: 586176 - RNA, 22 nt, Human
caguaacagugaucaccugugg

SEQ ID NO: 586177 - RNA, 22 nt, Human
agcugcuguggggcucggccug

SEQ ID NO: 586178 - RNA, 22 nt, Human
agccucagggcucugcgcagac

SEQ ID NO: 586179 - RNA, 22 nt, Human
agauauuuaaaucagacaaaga

SEQ ID NO: 586180 - RNA, 22 nt, Human
gagcugagaagcagcgcuugau

SEQ ID NO: 586181 - RNA, 22 nt, Human
acugagguuauugcaauaaaau

SEQ ID NO: 586182 - RNA, 19 nt, Human
gguuaauguuaggauacuu

SEQ ID NO: 586183 - RNA, 22 nt, Human
aaggugaagcucccgaugagaa

SEQ ID NO: 586184 - RNA, 22 nt, Human
aauaagaacuugucucuggcag

SEQ ID NO: 586185 - RNA, 20 nt, Human
gcucugugguuugagucucc

SEQ ID NO: 586186 - RNA, 20 nt, Human
auacacauauucuugcaacu

SEQ ID NO: 586187 - RNA, 22 nt, Human
ccugggcugggcgucucauggg

SEQ ID NO: 586188 - RNA, 22 nt, Human
gcuccaggcagcauaguggaug

SEQ ID NO: 586189 - RNA, 22 nt, Human
uggggacagggcucagcaauuu

SEQ ID NO: 586190 - RNA, 23 nt, Human
ggcugagacuacaggcgcuugcc

SEQ ID NO: 586191 - RNA, 22 nt, Human
aaucagaauuuauugaaucuuu

SEQ ID NO: 586192 - RNA, 22 nt, Human
ggagauuuauagcacacuucag

SEQ ID NO: 586193 - RNA, 22 nt, Human
aggucugagucccagggguacc

SEQ ID NO: 586194 - RNA, 22 nt, Human
augacauugacagaccugcugc

SEQ ID NO: 586195 - RNA, 22 nt, Human
uaaagcauguuucaguaagguu

SEQ ID NO: 586196 - RNA, 19 nt, Human
uccucagugacaaccucag

SEQ ID NO: 586197 - RNA, 22 nt, Human
ccugccccucaaggccuggugc

SEQ ID NO: 586198 - RNA, 22 nt, Human
uauuuaauuagugauuguagag

SEQ ID NO: 586199 - RNA, 22 nt, Human
ccacaugcucucucuccagguu

SEQ ID NO: 586200 - RNA, 22 nt, Human
aggcagcauuucugcuuaucca

SEQ ID NO: 586201 - RNA, 20 nt, Human
gaggcccagagaggugaagc

SEQ ID NO: 586202 - RNA, 22 nt, Human
gcagaaggauccgcaggugcaa

SEQ ID NO: 586203 - RNA, 22 nt, Human
uccagcagaaaagagguaggga

SEQ ID NO: 586204 - RNA, 22 nt, Human
cugcaguuugaccuuguuuucu

SEQ ID NO: 586205 - RNA, 22 nt, Human
agcaggugagcacagccaggcu

SEQ ID NO: 586206 - RNA, 22 nt, Human
augcauauugauuauagauuca

SEQ ID NO: 586207 - RNA, 22 nt, Human
cagcagguauguuuguucagca

SEQ ID NO: 586208 - RNA, 22 nt, Human
cugaggcacagugaacuucucc

SEQ ID NO: 586209 - RNA, 22 nt, Human
caggagauaaaagagaugcuuu

SEQ ID NO: 586210 - RNA, 22 nt, Human
aguuacuugagacguuuaugaa

SEQ ID NO: 586211 - RNA, 22 nt, Human
acccaggagguggaggcugcag

SEQ ID NO: 586212 - RNA, 22 nt, Human
caguuuuucaaaauuacaugau

SEQ ID NO: 586213 - RNA, 22 nt, Human
aguuagaaaguaaaucauuuga

SEQ ID NO: 586214 - RNA, 22 nt, Human
ugcuugacuuaguuucucauuu

SEQ ID NO: 586215 - RNA, 22 nt, Human
aaauuauuaaacagugggaugc

SEQ ID NO: 586216 - RNA, 22 nt, Human
uuccacuuaguggaagggcaug

SEQ ID NO: 586217 - RNA, 22 nt, Human
auagcagaaaccaagcuucuuc

SEQ ID NO: 586218 - RNA, 20 nt, Human
cuccugugccucucugggcc

SEQ ID NO: 586219 - RNA, 22 nt, Human
uccugcagccacugcaggcaga

SEQ ID NO: 586220 - RNA, 22 nt, Human
ugacaagaagaccugguaauga

SEQ ID NO: 586221 - RNA, 22 nt, Human
aaaaugcaaaccuaccuacaua

SEQ ID NO: 586222 - RNA, 22 nt, Human
acauuuuuauccugagugccag

SEQ ID NO: 586223 - RNA, 22 nt, Human
augagguaggacaucaggaaau

SEQ ID NO: 586224 - RNA, 22 nt, Human
caagauucauuuuguccuuguc

SEQ ID NO: 586225 - RNA, 22 nt, Human
ugcaaggguguuugagcugccc

SEQ ID NO: 586226 - RNA, 22 nt, Human
aaugucuuuucccuuacuuucc

SEQ ID NO: 586227 - RNA, 22 nt, Human
agcagagguguuuauuauggga

SEQ ID NO: 586228 - RNA, 17 nt, Human
aggcugcugggccaggg

SEQ ID NO: 586229 - RNA, 22 nt, Human
cuucccuccuggauuccagacu

SEQ ID NO: 586230 - RNA, 22 nt, Human
uuucauugucuacauaugacau

SEQ ID NO: 586231 - RNA, 22 nt, Human
ucuuguuucuucuaagcagcag

SEQ ID NO: 586232 - RNA, 22 nt, Human
gacuauuuauuuacagaaagcu

SEQ ID NO: 586233 - RNA, 22 nt, Human
agugcuuugguauagaacuauu

SEQ ID NO: 586234 - RNA, 22 nt, Human
ggagagugggagcaacuguugc

SEQ ID NO: 586235 - RNA, 22 nt, Human
cugaaagaauaagauguuuaca

SEQ ID NO: 586236 - RNA, 19 nt, Human
ggugugaagugaggaguua

SEQ ID NO: 586237 - RNA, 22 nt, Human
uucugcucuuggcuuugcuggu

SEQ ID NO: 586238 - RNA, 22 nt, Human
uacaaugcaaaauacugucugc

SEQ ID NO: 586239 - RNA, 22 nt, Human
cagcugaggaauacuagaugua

SEQ ID NO: 586240 - RNA, 22 nt, Human
uaauguuuccagucuaugaugg

SEQ ID NO: 586241 - RNA, 22 nt, Human
gugacauuuauuagaugcuuac

SEQ ID NO: 586242 - RNA, 22 nt, Human
uauauuaucauaaaaccauuca

SEQ ID NO: 586243 - RNA, 22 nt, Human
aagcuguucugaaucaguaagu

SEQ ID NO: 586244 - RNA, 20 nt, Human
uaugaagauaugugaacagc

SEQ ID NO: 586245 - RNA, 22 nt, Human
uggcugccuagucccucagccu

SEQ ID NO: 586246 - RNA, 22 nt, Human
caguguuuguggaauucaggug

SEQ ID NO: 586247 - RNA, 22 nt, Human
agccuauuccaggaugagcuca

SEQ ID NO: 586248 - RNA, 22 nt, Human
ucaggcugggagacaaucacug

SEQ ID NO: 586249 - RNA, 22 nt, Human
ucauggcacaugcccuccaggg

SEQ ID NO: 586250 - RNA, 22 nt, Human
aaugguuuggacuauucaauag

SEQ ID NO: 586251 - RNA, 22 nt, Human
caguaucuccacauguaaagug

SEQ ID NO: 586252 - RNA, 22 nt, Human
agcugccaaguuggaguagcaa

SEQ ID NO: 586253 - RNA, 22 nt, Human
gugcugaggugggugggcagcc

SEQ ID NO: 586254 - RNA, 22 nt, Human
ugcauuuuugagguuaacucaa

SEQ ID NO: 586255 - RNA, 22 nt, Human
cuuuuucuaaucauaauugucu

SEQ ID NO: 586256 - RNA, 22 nt, Human
ggaggcauuauggggaagacuu

SEQ ID NO: 586257 - RNA, 22 nt, Human
guuucucuuugaagccuggcug

SEQ ID NO: 586258 - RNA, 22 nt, Human
uuauggcuucugugaagaauuu

SEQ ID NO: 586259 - RNA, 22 nt, Human
gcuccuggcaggcagugugugu

SEQ ID NO: 586260 - RNA, 22 nt, Human
aggaagagguagcugucaaggg

SEQ ID NO: 586261 - RNA, 22 nt, Human
auuuaaauuuucugauggagag

SEQ ID NO: 586262 - RNA, 22 nt, Human
ccugugggcuugaguguagggu

SEQ ID NO: 586263 - RNA, 22 nt, Human
auuuuguuauaggagcugaaau

SEQ ID NO: 586264 - RNA, 22 nt, Human
cccagagcugagggggcacguu

SEQ ID NO: 586265 - RNA, 22 nt, Human
ccagaggcuggguucaccucag

SEQ ID NO: 586266 - RNA, 22 nt, Human
agcaggaggagagccuggcggu

SEQ ID NO: 586267 - RNA, 22 nt, Human
cuggacagaaaccaguccuggg

SEQ ID NO: 586268 - RNA, 21 nt, Human
ucucuguggccuacccucuac

SEQ ID NO: 586269 - RNA, 22 nt, Human
gccuccuggaagucacauguuu

SEQ ID NO: 586270 - RNA, 22 nt, Human
gccaccagguuagauccagccu

SEQ ID NO: 586271 - RNA, 22 nt, Human
caaaacauucucugcagcaggg

SEQ ID NO: 586272 - RNA, 20 nt, Human
gcccaggaauuugcauuucu

SEQ ID NO: 586273 - RNA, 22 nt, Human
uaaguccuauuccaggucucuc

SEQ ID NO: 586274 - RNA, 22 nt, Human
cccaggcugggaacgauucuag

SEQ ID NO: 586275 - RNA, 22 nt, Human
agggggugucucugauuggguu

SEQ ID NO: 586276 - RNA, 22 nt, Human
cgccugggaguccacaccugcu

SEQ ID NO: 586277 - RNA, 22 nt, Human
cugaaagguauaaauaagacuu

SEQ ID NO: 586278 - RNA, 22 nt, Human
aagggcugcaauccaaaacacu

SEQ ID NO: 586279 - RNA, 22 nt, Human
uuaacacuugaacucuacaugu

SEQ ID NO: 586280 - RNA, 22 nt, Human
ccuugcucaucccccagugccu

SEQ ID NO: 586281 - RNA, 22 nt, Human
ggaggugggaguuuaguucuug

SEQ ID NO: 586282 - RNA, 22 nt, Human
acagugaaaaguagcuaacaca

SEQ ID NO: 586283 - RNA, 22 nt, Human
aaacacugguaugauguauagu

SEQ ID NO: 586284 - RNA, 22 nt, Human
aaugcuaucggcucuaagcaug

SEQ ID NO: 586285 - RNA, 22 nt, Human
auccugggcaguuuugagugcu

SEQ ID NO: 586286 - RNA, 22 nt, Human
ccagcuccacugucagaugaga

SEQ ID NO: 586287 - RNA, 22 nt, Human
gcugaggacauacacauugugc

SEQ ID NO: 586288 - RNA, 22 nt, Human
uaaugccaauuuaaugauccau

SEQ ID NO: 586289 - RNA, 22 nt, Human
ugggaaggacagaacauaauug

SEQ ID NO: 586290 - RNA, 22 nt, Human
gggcagugguuacacagcugag

SEQ ID NO: 586291 - RNA, 22 nt, Human
ucugagaauaaaaauugcauuu

SEQ ID NO: 586292 - RNA, 22 nt, Human
uggcagcucccagagcuuccaa

SEQ ID NO: 586293 - RNA, 22 nt, Human
aacauugaguucuacuuccauu

SEQ ID NO: 586294 - RNA, 22 nt, Human
ggcugagaguuuccucuggggc

SEQ ID NO: 586295 - RNA, 22 nt, Human
auuaugcugguuuacacauuuu

SEQ ID NO: 586296 - RNA, 22 nt, Human
gugccgcgacgcagucggugcc

SEQ ID NO: 586297 - RNA, 22 nt, Human
ucaaugucugucuaucuauuua

SEQ ID NO: 586298 - RNA, 22 nt, Human
acagaauugaagcugaguaaau

SEQ ID NO: 586299 - RNA, 22 nt, Human
ucuggcuuuauuccuucacuga

SEQ ID NO: 586300 - RNA, 18 nt, Human
uaaaucucucuuuaguca

SEQ ID NO: 586301 - RNA, 22 nt, Human
ugaggcagcaauuguauuguau

SEQ ID NO: 586302 - RNA, 22 nt, Human
auauaaugauuuucuggugagu

SEQ ID NO: 586303 - RNA, 22 nt, Human
aggcuccuugcucacaggcuca

SEQ ID NO: 586304 - RNA, 22 nt, Human
agaguggguuauaggcagacuu

SEQ ID NO: 586305 - RNA, 22 nt, Human
uccagggagcaagucaggccgg

SEQ ID NO: 586306 - RNA, 20 nt, Human
ccagaggguagggccgcccc

SEQ ID NO: 586307 - RNA, 22 nt, Human
cccagcccagcguucgaggggu

SEQ ID NO: 586308 - RNA, 22 nt, Human
aauguacacugaaagccuauca

SEQ ID NO: 586309 - RNA, 22 nt, Human
cacuguuuuuauguaaucagug

SEQ ID NO: 586310 - RNA, 22 nt, Human
ucaggcuguggcuucaguucuu

SEQ ID NO: 586311 - RNA, 18 nt, Human
cugcccagagcauuucau

SEQ ID NO: 586312 - RNA, 22 nt, Human
aggucacaggguugaaguacuu

SEQ ID NO: 586313 - RNA, 19 nt, Human
caucuuuggucaccuaguc

SEQ ID NO: 586314 - RNA, 22 nt, Human
auccaugauugcccagaggugu

SEQ ID NO: 586315 - RNA, 17 nt, Human
ggcagccucaggcguuu

SEQ ID NO: 586316 - RNA, 22 nt, Human
acacauuugggcuccuacauaa

SEQ ID NO: 586317 - RNA, 22 nt, Human
ugauuuuacuuagcaugauguu

SEQ ID NO: 586318 - RNA, 22 nt, Human
aaguugauagcauguuaagcuc

SEQ ID NO: 586319 - RNA, 22 nt, Human
uccaucuggagacuuccugguc

SEQ ID NO: 586320 - RNA, 22 nt, Human
uucauuuucuuucacgcugcug

SEQ ID NO: 586321 - RNA, 22 nt, Human
aggagacucagagaccuggccg

SEQ ID NO: 586322 - RNA, 22 nt, Human
cuuggccugcccagccagaagg

SEQ ID NO: 586323 - RNA, 22 nt, Human
uggagcaggugccaggugugug

SEQ ID NO: 586324 - RNA, 22 nt, Human
gggcaggggucaguggccccaa

SEQ ID NO: 586325 - RNA, 22 nt, Human
accuuuaugaaacagcugucgu

SEQ ID NO: 586326 - RNA, 23 nt, Human
cagcugguugugggaguggcugc

SEQ ID NO: 586327 - RNA, 22 nt, Human
aacaggaaaacagcacaauagc

SEQ ID NO: 586328 - RNA, 22 nt, Human
ccugcucuaaaucucauggaac

SEQ ID NO: 586329 - RNA, 22 nt, Human
gcuggucagagagaaaggaggc

SEQ ID NO: 586330 - RNA, 22 nt, Human
gggggugacgauggcagcuggu

SEQ ID NO: 586331 - RNA, 22 nt, Human
acaucugagcaacagaacacua

SEQ ID NO: 586332 - RNA, 22 nt, Human
aaagaaaccuaucagccacaug

SEQ ID NO: 586333 - RNA, 22 nt, Human
ggagcuggagagcuagccuagg

SEQ ID NO: 586334 - RNA, 22 nt, Human
ugaaaauggccugaagaagcaa

SEQ ID NO: 586335 - RNA, 22 nt, Human
ggccccugcggacugccuagag

SEQ ID NO: 586336 - RNA, 22 nt, Human
ugguggggcuuuccuucugcuu

SEQ ID NO: 586337 - RNA, 22 nt, Human
ucccagggacaccaagcuguuu

SEQ ID NO: 586338 - RNA, 22 nt, Human
aggcugugcaauuaggguaaga

SEQ ID NO: 586339 - RNA, 22 nt, Human
acugucacuccaacugagucgu

SEQ ID NO: 586340 - RNA, 19 nt, Human
aggugcaggucacagggga

SEQ ID NO: 586341 - RNA, 22 nt, Human
auaguuauuagagaagcuggua

SEQ ID NO: 586342 - RNA, 22 nt, Human
uguaucaaggguuuauguaagc

SEQ ID NO: 586343 - RNA, 22 nt, Human
aggaaggguggauaguaacgug

SEQ ID NO: 586344 - RNA, 22 nt, Human
acacagcaaggucugacuuugg

SEQ ID NO: 586345 - RNA, 22 nt, Human
guuguuuuugaacggugguggc

SEQ ID NO: 586346 - RNA, 20 nt, Human
ggguccugacuuggucuccu

SEQ ID NO: 586347 - RNA, 23 nt, Human
ggcacagaugcugagcaugugca

SEQ ID NO: 586348 - RNA, 22 nt, Human
cucugaaagaguuuaguauuau

SEQ ID NO: 586349 - RNA, 22 nt, Human
acuguuaugggugucagcuuaa

SEQ ID NO: 586350 - RNA, 22 nt, Human
caguaugacuacaaacagcuuu

SEQ ID NO: 586351 - RNA, 22 nt, Human
auugaaagauauacuguucuca

SEQ ID NO: 586352 - RNA, 22 nt, Human
gcacugggaagaaugagccugu

SEQ ID NO: 586353 - RNA, 22 nt, Human
uucucucugagagcaucuggaa

SEQ ID NO: 586354 - RNA, 22 nt, Human
ugucaacagaucucaaagcugg

SEQ ID NO: 586355 - RNA, 22 nt, Human
auguguuuguaccuuuaaauau

SEQ ID NO: 586356 - RNA, 22 nt, Human
aaaccauggaguaaguucacau

SEQ ID NO: 586357 - RNA, 22 nt, Human
uuuucuguauuauugugcuuca

SEQ ID NO: 586358 - RNA, 22 nt, Human
gcccugucggaacugcgaccuc

SEQ ID NO: 586359 - RNA, 22 nt, Human
cugagcugggaguagagacucu

SEQ ID NO: 586360 - RNA, 22 nt, Human
gcagcuuggugaaaggugaugg

SEQ ID NO: 586361 - RNA, 22 nt, Human
gaggccucugucccaccaggga

SEQ ID NO: 586362 - RNA, 22 nt, Human
accugccuucucaaggacauga

SEQ ID NO: 586363 - RNA, 22 nt, Human
caggagaugacagggaagaacc

SEQ ID NO: 586364 - RNA, 22 nt, Human
ugggauggcauccugggccuug

SEQ ID NO: 586365 - RNA, 22 nt, Human
gcugugagcugccugugucaca

SEQ ID NO: 586366 - RNA, 22 nt, Human
agcuggcagucauccuagugag

SEQ ID NO: 586367 - RNA, 22 nt, Human
ucugggaaccagugcggcuggg

SEQ ID NO: 586368 - RNA, 22 nt, Human
ugugaaggagaugaagggagug

SEQ ID NO: 586369 - RNA, 22 nt, Human
uugggcugaaguagagggcaga

SEQ ID NO: 586370 - RNA, 18 nt, Human
gcugccugcauuccucac

SEQ ID NO: 586371 - RNA, 22 nt, Human
gagcuagggguagucaggagac

SEQ ID NO: 586372 - RNA, 20 nt, Human
augauuuugcacuaacuuca

SEQ ID NO: 586373 - RNA, 22 nt, Human
gcuggcuccucuguccucacgg

SEQ ID NO: 586374 - RNA, 22 nt, Human
ccagaggcuggcagccagcuga

SEQ ID NO: 586375 - RNA, 17 nt, Human
aggccagaugaggcaag

SEQ ID NO: 586376 - RNA, 22 nt, Human
agggccaggaacaccugaaggg

SEQ ID NO: 586377 - RNA, 20 nt, Human
cucagcuaaacaacacugac

SEQ ID NO: 586378 - RNA, 22 nt, Human
uuguuaaaaauagauuuccagg

SEQ ID NO: 586379 - RNA, 22 nt, Human
agggcaucucuaacagucuccu

SEQ ID NO: 586380 - RNA, 22 nt, Human
uucauuguacuuuaagagaugc

SEQ ID NO: 586381 - RNA, 22 nt, Human
uguuuucuagaaacaaugccua

SEQ ID NO: 586382 - RNA, 22 nt, Human
ugcuccaggccgccuggggcug

SEQ ID NO: 586383 - RNA, 22 nt, Human
gcugaguguaaugauggcagag

SEQ ID NO: 586384 - RNA, 22 nt, Human
ccugugugauuggaagcugaga

SEQ ID NO: 586385 - RNA, 22 nt, Human
gccaggcuccaggcccuccuga

SEQ ID NO: 586386 - RNA, 22 nt, Human
cugccuguggucugugaucuaa

SEQ ID NO: 586387 - RNA, 22 nt, Human
ugcugucccuaagucucuucaa

SEQ ID NO: 586388 - RNA, 22 nt, Human
agagagggcauagaaaaaggga

SEQ ID NO: 586389 - RNA, 22 nt, Human
agcauauaggaaauguugaauc

SEQ ID NO: 586390 - RNA, 22 nt, Human
cuggggcccaucgagggcugag

SEQ ID NO: 586391 - RNA, 22 nt, Human
aggcucugcagugcuggaggac

SEQ ID NO: 586392 - RNA, 22 nt, Human
ugauucagucucuucaggagaa

SEQ ID NO: 586393 - RNA, 22 nt, Human
caccaggugcuggaggacauca

SEQ ID NO: 586394 - RNA, 22 nt, Human
aagccaggguuuguggaucuau

SEQ ID NO: 586395 - RNA, 21 nt, Human
ucagggcagcugcucuucaga

SEQ ID NO: 586396 - RNA, 22 nt, Human
acacaugcacaacaguucuuuc

SEQ ID NO: 586397 - RNA, 22 nt, Human
gccuuccugcagcucugagcgu

SEQ ID NO: 586398 - RNA, 22 nt, Human
ccugagcugcggggcagugcuc

SEQ ID NO: 586399 - RNA, 22 nt, Human
ucugaggcccuacccugagccu

SEQ ID NO: 586400 - RNA, 22 nt, Human
uuuuaagaugcuaguauuucag

SEQ ID NO: 586401 - RNA, 18 nt, Human
uccaggcuggauugauga

SEQ ID NO: 586402 - RNA, 22 nt, Human
uaggaagcucuuuguuuuguga

SEQ ID NO: 586403 - RNA, 22 nt, Human
cagaggcuaagaugagugggug

SEQ ID NO: 586404 - RNA, 22 nt, Human
augaggcagguggaggcugcca

SEQ ID NO: 586405 - RNA, 22 nt, Human
ggggcagagagaaggaagcuug

SEQ ID NO: 586406 - RNA, 22 nt, Human
ccaggggcugcagauccauggu

SEQ ID NO: 586407 - RNA, 22 nt, Human
ugugccagccucuggcuguguc

SEQ ID NO: 586408 - RNA, 22 nt, Human
ggcugagcguggcugccguggg

SEQ ID NO: 586409 - RNA, 22 nt, Human
uauuuuaaagacugccagccua

SEQ ID NO: 586410 - RNA, 22 nt, Human
ugaaaguauuugauuucuauua

SEQ ID NO: 586411 - RNA, 22 nt, Human
ggcaguguccuugcagcucuac

SEQ ID NO: 586412 - RNA, 22 nt, Human
aggaccuuggaauaacaaauuc

SEQ ID NO: 586413 - RNA, 22 nt, Human
ucccaggagcaccuuuugagcc

SEQ ID NO: 586414 - RNA, 22 nt, Human
gaaaaaugcuccaaaucugugg

SEQ ID NO: 586415 - RNA, 22 nt, Human
ugagguagcugcuauuuguagu

SEQ ID NO: 586416 - RNA, 19 nt, Human
ggaaacaggggccagagga

SEQ ID NO: 586417 - RNA, 22 nt, Human
ccagucugcagccccuggggac

SEQ ID NO: 586418 - RNA, 22 nt, Human
guccugacggcugauuggccug

SEQ ID NO: 586419 - RNA, 22 nt, Human
acuuuacuacauccacagaugg

SEQ ID NO: 586420 - RNA, 22 nt, Human
gcccccaggcucuggagaaccu

SEQ ID NO: 586421 - RNA, 22 nt, Human
aagaaggcggaccagaagggag

SEQ ID NO: 586422 - RNA, 22 nt, Human
aagucuuaggcauuuuauuucu

SEQ ID NO: 586423 - RNA, 22 nt, Human
ugcagaagcugcaggucagugg

SEQ ID NO: 586424 - RNA, 22 nt, Human
uucacagagcacugccaaguac

SEQ ID NO: 586425 - RNA, 22 nt, Human
cugcuucacccugccugagaac

SEQ ID NO: 586426 - RNA, 22 nt, Human
uuacauauuauccaaaacugcu

SEQ ID NO: 586427 - RNA, 22 nt, Human
caggcucccugggcaguggcag

SEQ ID NO: 586428 - RNA, 22 nt, Human
ucauggauaaaauauugguuaa

SEQ ID NO: 586429 - RNA, 22 nt, Human
uaagguuugcuuaucuucgccu

SEQ ID NO: 586430 - RNA, 22 nt, Human
aaauggcaggcucuuugcuagu

SEQ ID NO: 586431 - RNA, 22 nt, Human
cuagugaacgugguacuaugga

SEQ ID NO: 586432 - RNA, 22 nt, Human
agcugguuagcaaucuaaguga

SEQ ID NO: 586433 - RNA, 22 nt, Human
guguguucccguuuccuucacu

SEQ ID NO: 586434 - RNA, 22 nt, Human
ucuggaguaugucccuggugaa

SEQ ID NO: 586435 - RNA, 22 nt, Human
gcugugagugagcugccuaggc

SEQ ID NO: 586436 - RNA, 17 nt, Human
cuggagaagccugugga

SEQ ID NO: 586437 - RNA, 22 nt, Human
gagguccaacacaauggguguu

SEQ ID NO: 586438 - RNA, 22 nt, Human
cuaggcaguccugacgguacua

SEQ ID NO: 586439 - RNA, 22 nt, Human
ccacagaaugaugacacuucag

SEQ ID NO: 586440 - RNA, 22 nt, Human
aaugaacuggaucaggguuucu

SEQ ID NO: 586441 - RNA, 22 nt, Human
uugacaaaggaccuugcuauuu

SEQ ID NO: 586442 - RNA, 22 nt, Human
gagccuggauugaagugggugg

SEQ ID NO: 586443 - RNA, 22 nt, Human
ggcagcaacucggagagaagag

SEQ ID NO: 586444 - RNA, 22 nt, Human
ucccagccuuccagucugguuu

SEQ ID NO: 586445 - RNA, 22 nt, Human
ugcuccaggugugccucucaug

SEQ ID NO: 586446 - RNA, 22 nt, Human
ugcuucagcacuuugagagccu

SEQ ID NO: 586447 - RNA, 22 nt, Human
agugagggaugaagaacugcgg

SEQ ID NO: 586448 - RNA, 22 nt, Human
cccugccaaucccgucucucug

SEQ ID NO: 586449 - RNA, 22 nt, Human
caggacaggaguggggucaaag

SEQ ID NO: 586450 - RNA, 22 nt, Human
cugcaguuuguaaacauuuuaa

SEQ ID NO: 586451 - RNA, 22 nt, Human
uaggcagaaaggaaggcaaguu

SEQ ID NO: 586452 - RNA, 22 nt, Human
caggauggagagugagggguca

SEQ ID NO: 586453 - RNA, 22 nt, Human
ugcaauuuggcuuccauuuucu

SEQ ID NO: 586454 - RNA, 21 nt, Human
aggcagaaagagcccaggcug

SEQ ID NO: 586455 - RNA, 22 nt, Human
gguugcaaacuccugggaucaa

SEQ ID NO: 586456 - RNA, 22 nt, Human
ggucugaggcuccaaggaggug

SEQ ID NO: 586457 - RNA, 22 nt, Human
ggagugacucacagcugggaca

SEQ ID NO: 586458 - RNA, 22 nt, Human
gcagaugguggggcaggaaaau

SEQ ID NO: 586459 - RNA, 22 nt, Human
gagccccagcccugcuucuaua

SEQ ID NO: 586460 - RNA, 22 nt, Human
agcugcaggaaguagaagcgga

SEQ ID NO: 586461 - RNA, 22 nt, Human
uggcccucguccgacagguggg

SEQ ID NO: 586462 - RNA, 22 nt, Human
uuuauuucacucuccggauacu

SEQ ID NO: 586463 - RNA, 22 nt, Human
uccagccaagccuugguagcug

SEQ ID NO: 586464 - RNA, 22 nt, Human
ucacauuuguucuugaaucuaa

SEQ ID NO: 586465 - RNA, 22 nt, Human
ugaggcucagaaauguaaguuu

SEQ ID NO: 586466 - RNA, 22 nt, Human
ucugagaagcuagaggacaaag

SEQ ID NO: 586467 - RNA, 21 nt, Human
uccaaaaaggagcguccuucu

SEQ ID NO: 586468 - RNA, 22 nt, Human
cugauauuauugaagcuggagu

SEQ ID NO: 586469 - RNA, 22 nt, Human
auuccuuggaacagaugcgaag

SEQ ID NO: 586470 - RNA, 22 nt, Human
uugaaacauaaaauauuuccug

SEQ ID NO: 586471 - RNA, 22 nt, Human
uggggugggguuacucauucug

SEQ ID NO: 586472 - RNA, 22 nt, Human
gagcacagauugauuuaaaaua

SEQ ID NO: 586473 - RNA, 22 nt, Human
cauuugaucuccugaauaaaca

SEQ ID NO: 586474 - RNA, 22 nt, Human
caggugaacccagucuaaucau

SEQ ID NO: 586475 - RNA, 22 nt, Human
gggggaugcucaggaggcugcu

SEQ ID NO: 586476 - RNA, 22 nt, Human
ugagaugcugcuguaacaaaua

SEQ ID NO: 586477 - RNA, 22 nt, Human
auaaggaaccugggcuuaagag

SEQ ID NO: 586478 - RNA, 22 nt, Human
cagugcucauagcuguuccucc

SEQ ID NO: 586479 - RNA, 22 nt, Human
uggugggaguccgcugugcugc

SEQ ID NO: 586480 - RNA, 22 nt, Human
caagauuugggggcacggaauc

SEQ ID NO: 586481 - RNA, 22 nt, Human
uuaauuuaagaaacggcaggcc

SEQ ID NO: 586482 - RNA, 22 nt, Human
caggguagacaguaggugucug

SEQ ID NO: 586483 - RNA, 22 nt, Human
aaggcugggaaacaugcaggcc

SEQ ID NO: 586484 - RNA, 22 nt, Human
uccacgugagcuucgugugcag

SEQ ID NO: 586485 - RNA, 22 nt, Human
cagggcucccugcagccucugu

SEQ ID NO: 586486 - RNA, 22 nt, Human
ucagcugcugugguauguacau

SEQ ID NO: 586487 - RNA, 22 nt, Human
ccucacagagcccagaugucua

SEQ ID NO: 586488 - RNA, 22 nt, Human
cacuugguuugggaguacauaa

SEQ ID NO: 586489 - RNA, 22 nt, Human
agaaaacauuacauaggugugu

SEQ ID NO: 586490 - RNA, 22 nt, Human
aaguaugacauuuaagacaauu

SEQ ID NO: 586491 - RNA, 20 nt, Human
uccuugaaagugggguauau

SEQ ID NO: 586492 - RNA, 22 nt, Human
agggagccagaguugggagcuc

SEQ ID NO: 586493 - RNA, 22 nt, Human
ugaaagauaaguuauuauguac

SEQ ID NO: 586494 - RNA, 22 nt, Human
agcugcaguaugaggcuggugg

SEQ ID NO: 586495 - RNA, 17 nt, Human
aggcaggagauuggaga

SEQ ID NO: 586496 - RNA, 22 nt, Human
ugagcccaggaguuggagaccg

SEQ ID NO: 586497 - RNA, 22 nt, Human
gccaggcuggggggagaugucu

SEQ ID NO: 586498 - RNA, 22 nt, Human
acucucugugauggaggccagc

SEQ ID NO: 586499 - RNA, 22 nt, Human
agguaaggcuguaagcuaagcc

SEQ ID NO: 586500 - RNA, 22 nt, Human
uucacccuggaccagaaauugg

SEQ ID NO: 586501 - RNA, 22 nt, Human
ucugggaaguuggcagccagcu

SEQ ID NO: 586502 - RNA, 22 nt, Human
aacaugaaacccaaacagaaua

SEQ ID NO: 586503 - RNA, 22 nt, Human
gauuagaauaugucagucauaa

SEQ ID NO: 586504 - RNA, 22 nt, Human
cacccuggcuggaggugcagug

SEQ ID NO: 586505 - RNA, 19 nt, Human
auuagcagacuuccuuuca

SEQ ID NO: 586506 - RNA, 22 nt, Human
uuaaagcaaguagaagccugag

SEQ ID NO: 586507 - RNA, 22 nt, Human
uuugcuuucuguugaacagagu

SEQ ID NO: 586508 - RNA, 22 nt, Human
uuacauaacuuuaaaaugccgu

SEQ ID NO: 586509 - RNA, 22 nt, Human
ugcuuucuuuagcuccugaguc

SEQ ID NO: 586510 - RNA, 22 nt, Human
ccacagucuagcuagaaggcau

SEQ ID NO: 586511 - RNA, 22 nt, Human
ccaaugaaaggucaauucuaua

SEQ ID NO: 586512 - RNA, 22 nt, Human
aaggaagacacagaugaaguga

SEQ ID NO: 586513 - RNA, 21 nt, Human
acacauuaugagcauagacuc

SEQ ID NO: 586514 - RNA, 22 nt, Human
uaagacauuugacaaaccauuu

SEQ ID NO: 586515 - RNA, 22 nt, Human
ucugacauuagauuaauuggaa

SEQ ID NO: 586516 - RNA, 22 nt, Human
acuuuggaauaagcuauauaac

SEQ ID NO: 586517 - RNA, 22 nt, Human
ugcaggugcguuuucaagccuc

SEQ ID NO: 586518 - RNA, 22 nt, Human
cagggaaacuaggaaauaagcu

SEQ ID NO: 586519 - RNA, 21 nt, Human
agacaaugcuguaaaauucag

SEQ ID NO: 586520 - RNA, 22 nt, Human
aaaggcaugccuccauuucuau

SEQ ID NO: 586521 - RNA, 22 nt, Human
uuuacuuugugucaagucaaga

SEQ ID NO: 586522 - RNA, 22 nt, Human
ucagcacugauguuucagaaga

SEQ ID NO: 586523 - RNA, 22 nt, Human
uccuuuuuaagucguuguggua

SEQ ID NO: 586524 - RNA, 22 nt, Human
ccagggugggaggcugaaggcg

SEQ ID NO: 586525 - RNA, 22 nt, Human
cccagcaucuccaggcauggcc

SEQ ID NO: 586526 - RNA, 22 nt, Human
auaugcuugggacugauacagu

SEQ ID NO: 586527 - RNA, 23 nt, Human
auacauacagucuuacugacuuu

SEQ ID NO: 586528 - RNA, 19 nt, Human
uggcagaggcaguuuguac

SEQ ID NO: 586529 - RNA, 22 nt, Human
uacaccauucccagguggauuu

SEQ ID NO: 586530 - RNA, 22 nt, Human
acacugauuguagucuguggug

SEQ ID NO: 586531 - RNA, 22 nt, Human
ggcagugguuagaaacaugagc

SEQ ID NO: 586532 - RNA, 22 nt, Human
gaacaacuuugaaacaugaaga

SEQ ID NO: 586533 - RNA, 22 nt, Human
uuuuucaucugauugauaacuc

SEQ ID NO: 586534 - RNA, 22 nt, Human
uucacacagcaacuguaugaau

SEQ ID NO: 586535 - RNA, 22 nt, Human
ccagcagagggucuuggccauu

SEQ ID NO: 586536 - RNA, 22 nt, Human
ccugugucuuccccacuggugu

SEQ ID NO: 586537 - RNA, 19 nt, Human
cugucaggggcuggauguu

SEQ ID NO: 586538 - RNA, 22 nt, Human
aagaggcuggcauugaugguag

SEQ ID NO: 586539 - RNA, 22 nt, Human
agagccugggcagcuccucugg

SEQ ID NO: 586540 - RNA, 22 nt, Human
aagcacagagagguaaaguaac

SEQ ID NO: 586541 - RNA, 22 nt, Human
ggaugcaggacggcauggaugu

SEQ ID NO: 586542 - RNA, 22 nt, Human
uugagcaaugucacugaggcuu

SEQ ID NO: 586543 - RNA, 22 nt, Human
guccugggaaggaagccaggga

SEQ ID NO: 586544 - RNA, 22 nt, Human
cuguggaguuccaucaggggag

SEQ ID NO: 586545 - RNA, 22 nt, Human
gggggaagaggcaugaaguccu

SEQ ID NO: 586546 - RNA, 22 nt, Human
ucaagcaaguguuugguguaaa

SEQ ID NO: 586547 - RNA, 22 nt, Human
uccuuccugcaggccaaguccu

SEQ ID NO: 586548 - RNA, 22 nt, Human
agaccucuggauagaugugagg

SEQ ID NO: 586549 - RNA, 22 nt, Human
ccugaggcucuccugaauaaug

SEQ ID NO: 586550 - RNA, 22 nt, Human
uaagccugcaugaaccaugaga

SEQ ID NO: 586551 - RNA, 22 nt, Human
ugugugcacaugauuugaaaug

SEQ ID NO: 586552 - RNA, 22 nt, Human
ucuacaugauguaccaucuaag

SEQ ID NO: 586553 - RNA, 22 nt, Human
ggcaccaggaucagucugucau

SEQ ID NO: 586554 - RNA, 21 nt, Human
aggaaguggccagauugggaa

SEQ ID NO: 586555 - RNA, 22 nt, Human
acaaggcugaacagugaagccg

SEQ ID NO: 586556 - RNA, 19 nt, Human
ugcauguguucucccauug

SEQ ID NO: 586557 - RNA, 22 nt, Human
aacaggcuuccaggagggacga

SEQ ID NO: 586558 - RNA, 22 nt, Human
agguugaagagacuuuaaauua

SEQ ID NO: 586559 - RNA, 22 nt, Human
ggaggggucucuagcgaggaga

SEQ ID NO: 586560 - RNA, 22 nt, Human
ucuuuucauugagaacacacug

SEQ ID NO: 586561 - RNA, 22 nt, Human
uaugaguucaguuaucuuaagu

SEQ ID NO: 586562 - RNA, 20 nt, Human
aaaauauguauaacucuucu

SEQ ID NO: 586563 - RNA, 22 nt, Human
cagagcugggcauggugaaagg

SEQ ID NO: 586564 - RNA, 22 nt, Human
uggugacugggacuggauauga

SEQ ID NO: 586565 - RNA, 22 nt, Human
aucuaggauuugaaugcacagu

SEQ ID NO: 586566 - RNA, 23 nt, Human
ggccauggagacuuagaaugggc

SEQ ID NO: 586567 - RNA, 22 nt, Human
cagagcuuaaaacuccauggaa

SEQ ID NO: 586568 - RNA, 22 nt, Human
cagcacagugaccagacccacu

SEQ ID NO: 586569 - RNA, 22 nt, Human
accaccucaucaagcuggauug

SEQ ID NO: 586570 - RNA, 20 nt, Human
uucuuaaagaccucacuuug

SEQ ID NO: 586571 - RNA, 22 nt, Human
ggugucucagcugcuggcaggg

SEQ ID NO: 586572 - RNA, 22 nt, Human
cagcagagcauuugguaggagg

SEQ ID NO: 586573 - RNA, 22 nt, Human
cuagggcuccaaagcugagaag

SEQ ID NO: 586574 - RNA, 22 nt, Human
agagugggccucugagucccag

SEQ ID NO: 586575 - RNA, 22 nt, Human
agagaagggguaaagaguccug

SEQ ID NO: 586576 - RNA, 22 nt, Human
agagcagcacguuguccccaca

SEQ ID NO: 586577 - RNA, 22 nt, Human
guuggcucauuuuauagacagc

SEQ ID NO: 586578 - RNA, 22 nt, Human
cacugagagaugugucacagca

SEQ ID NO: 586579 - RNA, 22 nt, Human
cccucgcucuaggcagcccugu

SEQ ID NO: 586580 - RNA, 22 nt, Human
auaauguuuuuguauaagcaug

SEQ ID NO: 586581 - RNA, 22 nt, Human
gaagccccaaacccucgccauc

SEQ ID NO: 586582 - RNA, 22 nt, Human
agguggagugugcagggagagc

SEQ ID NO: 586583 - RNA, 22 nt, Human
gucccaggcagagucaggaggg

SEQ ID NO: 586584 - RNA, 22 nt, Human
uggaaugagcuggcuaauaacc

SEQ ID NO: 586585 - RNA, 22 nt, Human
ggugugggaacuacagguuuuu

SEQ ID NO: 586586 - RNA, 22 nt, Human
auccagggauaaaaguaagguu

SEQ ID NO: 586587 - RNA, 20 nt, Human
ugagugcuccauucugccca

SEQ ID NO: 586588 - RNA, 22 nt, Human
acagcagcagaccagcauaugu

SEQ ID NO: 586589 - RNA, 22 nt, Human
caggugggauuuugcugcuuga

SEQ ID NO: 586590 - RNA, 22 nt, Human
cucagggauggugaagcaccca

SEQ ID NO: 586591 - RNA, 22 nt, Human
aucauaaaauugcaccauuucu

SEQ ID NO: 586592 - RNA, 22 nt, Human
caaagguuguugagagugcagg

SEQ ID NO: 586593 - RNA, 22 nt, Human
agguuucugcaauguguguaca

SEQ ID NO: 586594 - RNA, 22 nt, Human
cagaaguggccucagagggagu

SEQ ID NO: 586595 - RNA, 22 nt, Human
uggagcagcacaagaaagggga

SEQ ID NO: 586596 - RNA, 22 nt, Human
uguggccucuaagcucacgaag

SEQ ID NO: 586597 - RNA, 22 nt, Human
cugcccugagucaugccagaug

SEQ ID NO: 586598 - RNA, 22 nt, Human
gaggagagagggacugucugca

SEQ ID NO: 586599 - RNA, 22 nt, Human
uuaacacuaucugucauaauua

SEQ ID NO: 586600 - RNA, 22 nt, Human
ggcucuggguucugcaaugcgu

SEQ ID NO: 586601 - RNA, 22 nt, Human
auuguauuuccagcuugaaugu

SEQ ID NO: 586602 - RNA, 23 nt, Human
uuauuuugucagaagggacuuuu

SEQ ID NO: 586603 - RNA, 22 nt, Human
ucagugaaccuucuguggcagg

SEQ ID NO: 586604 - RNA, 22 nt, Human
agccaggauuggcugagccuua

SEQ ID NO: 586605 - RNA, 21 nt, Human
aguaucauaaugaauaguucu

SEQ ID NO: 586606 - RNA, 22 nt, Human
gggggcuggaauauccaucaac

SEQ ID NO: 586607 - RNA, 22 nt, Human
acagaacaggcugagaaaaaca

SEQ ID NO: 586608 - RNA, 22 nt, Human
uauccauaguuuauagaucaag

SEQ ID NO: 586609 - RNA, 22 nt, Human
agcagagccaggucucucugua

SEQ ID NO: 586610 - RNA, 22 nt, Human
caccagagugaguggacugucg

SEQ ID NO: 586611 - RNA, 22 nt, Human
ccugccuggcugucagcagagc

SEQ ID NO: 586612 - RNA, 22 nt, Human
ugggcagaucuuugguggcuag

SEQ ID NO: 586613 - RNA, 22 nt, Human
uccugcccagagcucuccacuc

SEQ ID NO: 586614 - RNA, 22 nt, Human
gggagaugacucagugaccucg

SEQ ID NO: 586615 - RNA, 22 nt, Human
ggcaagagggcagauggagugc

SEQ ID NO: 586616 - RNA, 22 nt, Human
uaaucuuagcaaccuccagugu

SEQ ID NO: 586617 - RNA, 22 nt, Human
ggagcagagcucuucaucugca

SEQ ID NO: 586618 - RNA, 22 nt, Human
augaagauaagaccaggcugga

SEQ ID NO: 586619 - RNA, 22 nt, Human
uaaagacaugguguaggugaac

SEQ ID NO: 586620 - RNA, 22 nt, Human
ggcagcugggucacaccgaucu

SEQ ID NO: 586621 - RNA, 22 nt, Human
ccacccuggacaggccucugag

SEQ ID NO: 586622 - RNA, 22 nt, Human
ggaggggcagccauggaacucc

SEQ ID NO: 586623 - RNA, 22 nt, Human
cucccagaaaauucucagacaa

SEQ ID NO: 586624 - RNA, 22 nt, Human
cagucacauagguauacacaua

SEQ ID NO: 586625 - RNA, 22 nt, Human
ucucuuucuuuguaugucuauu

SEQ ID NO: 586626 - RNA, 22 nt, Human
cacauucagguggcauguuaga

SEQ ID NO: 586627 - RNA, 22 nt, Human
acaggaucgcccuguugcccag

SEQ ID NO: 586628 - RNA, 22 nt, Human
agugacugggcagggcagggcc

SEQ ID NO: 586629 - RNA, 22 nt, Human
gagagaaaggcuugcaggcugu

SEQ ID NO: 586630 - RNA, 22 nt, Human
uuucuacagcuggugcaacuuu

SEQ ID NO: 586631 - RNA, 22 nt, Human
auagccuugacucacagcucuu

SEQ ID NO: 586632 - RNA, 22 nt, Human
aagaauugguuuccucugucau

SEQ ID NO: 586633 - RNA, 22 nt, Human
uccagggccccccaguugcacg

SEQ ID NO: 586634 - RNA, 22 nt, Human
gcaguggcccagcuugcaggcu

SEQ ID NO: 586635 - RNA, 22 nt, Human
ucugaaggugcuagagaaagcu

SEQ ID NO: 586636 - RNA, 22 nt, Human
aggcuucagcagcccucucuug

SEQ ID NO: 586637 - RNA, 22 nt, Human
caggugcugcguggcggagcug

SEQ ID NO: 586638 - RNA, 22 nt, Human
agggagaagguuuagcugugag

SEQ ID NO: 586639 - RNA, 22 nt, Human
gaguagacauuaaauuacacug

SEQ ID NO: 586640 - RNA, 22 nt, Human
agauucuaccagagcuaguuug

SEQ ID NO: 586641 - RNA, 22 nt, Human
aggcagcaugcucugcuucuac

SEQ ID NO: 586642 - RNA, 22 nt, Human
ggaaagagaaguugggaggaau

SEQ ID NO: 586643 - RNA, 22 nt, Human
cgucccaguuccagccgcgcug

SEQ ID NO: 586644 - RNA, 22 nt, Human
cccagguguuuguggcagaggu

SEQ ID NO: 586645 - RNA, 22 nt, Human
agggaaggaaaagcugucgcuu

SEQ ID NO: 586646 - RNA, 22 nt, Human
cuccaggacagauucagggcca

SEQ ID NO: 586647 - RNA, 22 nt, Human
caggcagcugcgacaagagagc

SEQ ID NO: 586648 - RNA, 20 nt, Human
guuuagcauggcagugaaag

SEQ ID NO: 586649 - RNA, 22 nt, Human
ugcugggccuuuaccuccaggg

SEQ ID NO: 586650 - RNA, 18 nt, Human
guuuacauuacugaauag

SEQ ID NO: 586651 - RNA, 22 nt, Human
auucauuuagagggauuaagca

SEQ ID NO: 586652 - RNA, 22 nt, Human
cuaagaaggaggaaaagugcca

SEQ ID NO: 586653 - RNA, 22 nt, Human
uggcucucccaauaccuuucug

SEQ ID NO: 586654 - RNA, 22 nt, Human
cagauuuaggucacuagaauuu

SEQ ID NO: 586655 - RNA, 22 nt, Human
gcccccaggcacuacaugugaa

SEQ ID NO: 586656 - RNA, 22 nt, Human
uagaaagacaugggccagcagc

SEQ ID NO: 586657 - RNA, 22 nt, Human
auuguggugucaguuauaggca

SEQ ID NO: 586658 - RNA, 22 nt, Human
aguguuucuggaaucaguguuu

SEQ ID NO: 586659 - RNA, 22 nt, Human
agcuccugggccaagcccaugc

SEQ ID NO: 586660 - RNA, 22 nt, Human
gaaagaaugagcaucaugacuu

SEQ ID NO: 586661 - RNA, 22 nt, Human
ugucugggauguuggcagccac

SEQ ID NO: 586662 - RNA, 19 nt, Human
cauaaauguacaagauaca

SEQ ID NO: 586663 - RNA, 22 nt, Human
ccuggguggcagagguugcagu

SEQ ID NO: 586664 - RNA, 22 nt, Human
ugugggaggauucagaauuggg

SEQ ID NO: 586665 - RNA, 22 nt, Human
acagggugacuuugugacagau

SEQ ID NO: 586666 - RNA, 22 nt, Human
uuuuccuuagcuucucugcgag

SEQ ID NO: 586667 - RNA, 22 nt, Human
ggugaggggcaccucugcccgg

SEQ ID NO: 586668 - RNA, 22 nt, Human
auaaugugauauuucauuuaca

SEQ ID NO: 586669 - RNA, 22 nt, Human
aagcacagggacuuuaggaaua

SEQ ID NO: 586670 - RNA, 20 nt, Human
agcugggcaauuaugacuau

SEQ ID NO: 586671 - RNA, 22 nt, Human
agagacaggguuuugccauguu

SEQ ID NO: 586672 - RNA, 21 nt, Human
acaugcauagagagauuucug

SEQ ID NO: 586673 - RNA, 22 nt, Human
aucacagcacaccugacaugua

SEQ ID NO: 586674 - RNA, 22 nt, Human
cugcagagguugguucuaagau

SEQ ID NO: 586675 - RNA, 22 nt, Human
aauccauuaaaaacaagcgcau

SEQ ID NO: 586676 - RNA, 22 nt, Human
ugugacaagcauuguauauugg

SEQ ID NO: 586677 - RNA, 22 nt, Human
uucugcucugacuugcaaggaa

SEQ ID NO: 586678 - RNA, 22 nt, Human
agaaguuugguccuuuucaagg

SEQ ID NO: 586679 - RNA, 22 nt, Human
uugcaucaguccucaauaaaau

SEQ ID NO: 586680 - RNA, 22 nt, Human
cccaggagguggagguugcagu

SEQ ID NO: 586681 - RNA, 22 nt, Human
gaggaagcugcguggcauuuca

SEQ ID NO: 586682 - RNA, 19 nt, Human
uccaaggcauggcccagug

SEQ ID NO: 586683 - RNA, 20 nt, Human
gcuguggcaaagcuuugugu

SEQ ID NO: 586684 - RNA, 22 nt, Human
gucuccuguccugcaggaugga

SEQ ID NO: 586685 - RNA, 22 nt, Human
aggucaccauggcaugcuccac

SEQ ID NO: 586686 - RNA, 22 nt, Human
uucaguuuuauuguacugcuau

SEQ ID NO: 586687 - RNA, 22 nt, Human
gccuuggcugaugugcgaauga

SEQ ID NO: 586688 - RNA, 22 nt, Human
auuucuuaucugaggucuacau

SEQ ID NO: 586689 - RNA, 22 nt, Human
cauuccagcucucauacucugg

SEQ ID NO: 586690 - RNA, 23 nt, Human
gugagcagcaccaugaggcuaga

SEQ ID NO: 586691 - RNA, 22 nt, Human
ggcaggcaacggaccacuaguc

SEQ ID NO: 586692 - RNA, 22 nt, Human
uggagguggcaucugacagcug

SEQ ID NO: 586693 - RNA, 22 nt, Human
cucauguaagagagcauuaguu

SEQ ID NO: 586694 - RNA, 22 nt, Human
cccaggagguggaguucacagu

SEQ ID NO: 586695 - RNA, 23 nt, Human
acugaagaugucuuaguggcccu

SEQ ID NO: 586696 - RNA, 22 nt, Human
gauaaauggcugaagaaauagu

SEQ ID NO: 586697 - RNA, 22 nt, Human
ugccaggcuguccugggccugg

SEQ ID NO: 586698 - RNA, 22 nt, Human
gggauuacagaugugagccauu

SEQ ID NO: 586699 - RNA, 22 nt, Human
agcugggagcagagccacagcc

SEQ ID NO: 586700 - RNA, 16 nt, Human
guggcagccccuucuc

SEQ ID NO: 586701 - RNA, 22 nt, Human
agaagcagaaggaagcagggcc

SEQ ID NO: 586702 - RNA, 22 nt, Human
gggcccugggauucagagcaag

SEQ ID NO: 586703 - RNA, 22 nt, Human
gcuggagaaacaggaggaggaa

SEQ ID NO: 586704 - RNA, 22 nt, Human
aaugaacauauaaagagaucuu

SEQ ID NO: 586705 - RNA, 22 nt, Human
agcccuuaguacauuucucaag

SEQ ID NO: 586706 - RNA, 22 nt, Human
auuuguuuaucgucgauuguag

SEQ ID NO: 586707 - RNA, 22 nt, Human
auggcaagcaagcugaagagau

SEQ ID NO: 586708 - RNA, 22 nt, Human
aggcugagucgggaggaucacu

SEQ ID NO: 586709 - RNA, 22 nt, Human
gggcugugugcccacuucccau

SEQ ID NO: 586710 - RNA, 22 nt, Human
augaggcagauguugcaugagg

SEQ ID NO: 586711 - RNA, 22 nt, Human
uggcuucagagucugaguucuu

SEQ ID NO: 586712 - RNA, 22 nt, Human
gagagugucuggaggaagcuaa

SEQ ID NO: 586713 - RNA, 22 nt, Human
cccagacugcagagcgggcaga

SEQ ID NO: 586714 - RNA, 22 nt, Human
auauugaacccuacagacugua

SEQ ID NO: 586715 - RNA, 22 nt, Human
cagacugggcugguggaaagcu

SEQ ID NO: 586716 - RNA, 22 nt, Human
cuggcuuuccuugucugcaucc

SEQ ID NO: 586717 - RNA, 22 nt, Human
uccugagagccuuggcuucaga

SEQ ID NO: 586718 - RNA, 22 nt, Human
aacagcuguucgcagauguagg

SEQ ID NO: 586719 - RNA, 22 nt, Human
gguggguauaguuagggccucu

SEQ ID NO: 586720 - RNA, 22 nt, Human
uaccacagcaaaugaggccaac

SEQ ID NO: 586721 - RNA, 22 nt, Human
gcugagguuucaggaguggcag

SEQ ID NO: 586722 - RNA, 22 nt, Human
uucuuguauguaugcaaaauca

SEQ ID NO: 586723 - RNA, 22 nt, Human
ucucacacuucuguguugcaca

SEQ ID NO: 586724 - RNA, 22 nt, Human
acuguauuuuggguguauuuuc

SEQ ID NO: 586725 - RNA, 22 nt, Human
caagagggaaccuaagauguau

SEQ ID NO: 586726 - RNA, 22 nt, Human
guaugucaccucuccuaagcac

SEQ ID NO: 586727 - RNA, 22 nt, Human
agcugguugcuuaaccucucug

SEQ ID NO: 586728 - RNA, 22 nt, Human
gcagagauuggugcacugauga

SEQ ID NO: 586729 - RNA, 22 nt, Human
gagucccaugaugauagccaca

SEQ ID NO: 586730 - RNA, 19 nt, Human
cguaccugacacagaacag

SEQ ID NO: 586731 - RNA, 22 nt, Human
ucccaagagcucugggauaagg

SEQ ID NO: 586732 - RNA, 22 nt, Human
acuggaaauugagaggucacug

SEQ ID NO: 586733 - RNA, 22 nt, Human
uuugcagaugagaaaacugugg

SEQ ID NO: 586734 - RNA, 22 nt, Human
ucagaccucugaccuugccaaa

SEQ ID NO: 586735 - RNA, 22 nt, Human
ggcgcaggccuuggauccuggu

SEQ ID NO: 586736 - RNA, 22 nt, Human
aguaaacauuucagauuuauuu

SEQ ID NO: 586737 - RNA, 22 nt, Human
uaaauugaaaaucuacagaaca

SEQ ID NO: 586738 - RNA, 21 nt, Human
agcacagcuuuaagccaugug

SEQ ID NO: 586739 - RNA, 22 nt, Human
acacaagugaauauuuuaagga

SEQ ID NO: 586740 - RNA, 22 nt, Human
guagcagaaucagugcuacaga

SEQ ID NO: 586741 - RNA, 22 nt, Human
guggcagccgcaggcccugugu

SEQ ID NO: 586742 - RNA, 22 nt, Human
agggcugcuuaccuggaauggc

SEQ ID NO: 586743 - RNA, 22 nt, Human
guguuuguuuggguagcuagac

SEQ ID NO: 586744 - RNA, 22 nt, Human
cuauuuucauucuuacauuguc

SEQ ID NO: 586745 - RNA, 22 nt, Human
gaaagguucuugggaguucaca

SEQ ID NO: 586746 - RNA, 22 nt, Human
aaaauucauagaacuguacgcu

SEQ ID NO: 586747 - RNA, 22 nt, Human
aaguuccugggccaaguccagg

SEQ ID NO: 586748 - RNA, 22 nt, Human
agaguguggaaauguucagagu

SEQ ID NO: 586749 - RNA, 22 nt, Human
gcccuuagggccacugucacug

SEQ ID NO: 586750 - RNA, 19 nt, Human
ggggagaacuagagacagc

SEQ ID NO: 586751 - RNA, 22 nt, Human
aaguucuagagguugauuuggu

SEQ ID NO: 586752 - RNA, 21 nt, Human
uuugccuucacgaagcauccu

SEQ ID NO: 586753 - RNA, 22 nt, Human
gggacuggaguagaggccggug

SEQ ID NO: 586754 - RNA, 22 nt, Human
guucacagguucucuuucuaag

SEQ ID NO: 586755 - RNA, 22 nt, Human
gcugaagcccacguggcuugua

SEQ ID NO: 586756 - RNA, 22 nt, Human
auguguaaaaggcauguuuuau

SEQ ID NO: 586757 - RNA, 22 nt, Human
uugcugaaguugcucagcucca

SEQ ID NO: 586758 - RNA, 22 nt, Human
gagagugagauccuccugggga

SEQ ID NO: 586759 - RNA, 21 nt, Human
uguguucuucuaggucagcua

SEQ ID NO: 586760 - RNA, 22 nt, Human
auagucuuuacugcugaauuga

SEQ ID NO: 586761 - RNA, 21 nt, Human
gcacagcaugaguguuggcau

SEQ ID NO: 586762 - RNA, 22 nt, Human
aagugcucccauauccugcccu

SEQ ID NO: 586763 - RNA, 22 nt, Human
uggcagaaguacacaagcaugc

SEQ ID NO: 586764 - RNA, 22 nt, Human
auauauaagcugaugagccaca

SEQ ID NO: 586765 - RNA, 23 nt, Human
uuauaagaagcaucacaggaaga

SEQ ID NO: 586766 - RNA, 18 nt, Human
agcuggcccuggcugccg

SEQ ID NO: 586767 - RNA, 22 nt, Human
uggguccacuucugcacugugg

SEQ ID NO: 586768 - RNA, 22 nt, Human
ccacugccuauuugcagggccc

SEQ ID NO: 586769 - RNA, 22 nt, Human
caggcagcauuuacucugauga

SEQ ID NO: 586770 - RNA, 22 nt, Human
ugccucagcugaggccgcucca

SEQ ID NO: 586771 - RNA, 22 nt, Human
uaguccauuuucacacugcuga

SEQ ID NO: 586772 - RNA, 19 nt, Human
agcacagacaagaccagca

SEQ ID NO: 586773 - RNA, 22 nt, Human
uguugacucaacacugugggca

SEQ ID NO: 586774 - RNA, 19 nt, Human
gguagaagggaaguguuuu

SEQ ID NO: 586775 - RNA, 22 nt, Human
cacgcacgcuggguggaggcgc

SEQ ID NO: 586776 - RNA, 22 nt, Human
gcccaggagguugggcugugca

SEQ ID NO: 586777 - RNA, 22 nt, Human
uggcagaaagaaccaugugcaa

SEQ ID NO: 586778 - RNA, 22 nt, Human
uucugggcccacuguagcaucc

SEQ ID NO: 586779 - RNA, 20 nt, Human
acccagcucugugcccuggg

SEQ ID NO: 586780 - RNA, 22 nt, Human
uucccuggggaaggugaccuuu

SEQ ID NO: 586781 - RNA, 22 nt, Human
agauggccccaggugcccaggg

SEQ ID NO: 586782 - RNA, 20 nt, Human
gacagcuuggggugucaccu

SEQ ID NO: 586783 - RNA, 21 nt, Human
acaaacugaaaugaguuuccu

SEQ ID NO: 586784 - RNA, 22 nt, Human
augaaaaguucgaucuagaagg

SEQ ID NO: 586785 - RNA, 22 nt, Human
uuuaauuuuccugguaggccug

SEQ ID NO: 586786 - RNA, 21 nt, Human
acagaguaguugaaacagaga

SEQ ID NO: 586787 - RNA, 20 nt, Human
uuucacaaugaacaugucuc

SEQ ID NO: 586788 - RNA, 22 nt, Human
gacccaggagugcagagagugg

SEQ ID NO: 586789 - RNA, 22 nt, Human
augaagauuucccagagacaug

SEQ ID NO: 586790 - RNA, 22 nt, Human
caggaagaggacaggcuucccc

SEQ ID NO: 586791 - RNA, 22 nt, Human
cagcagggggcagcgcagauca

SEQ ID NO: 586792 - RNA, 23 nt, Human
acuacagauacuccugcuguuug

SEQ ID NO: 586793 - RNA, 22 nt, Human
uaggagggcccugaaaauggca

SEQ ID NO: 586794 - RNA, 22 nt, Human
cuggaggggccauccacagucu

SEQ ID NO: 586795 - RNA, 22 nt, Human
uuccuucuaauauucugccugu

SEQ ID NO: 586796 - RNA, 22 nt, Human
uuucagaugcaauuaauuuuca

SEQ ID NO: 586797 - RNA, 19 nt, Human
acauuggacauggaucuug

SEQ ID NO: 586798 - RNA, 22 nt, Human
ggcucaggaugagccuucucau

SEQ ID NO: 586799 - RNA, 22 nt, Human
uuuuauuaucuuugaaugggac

SEQ ID NO: 586800 - RNA, 22 nt, Human
agccuggacagcuacggagaac

SEQ ID NO: 586801 - RNA, 22 nt, Human
acuuucaagaacuucuuuaaug

SEQ ID NO: 586802 - RNA, 22 nt, Human
uuacaagggucaguguguuugu

SEQ ID NO: 586803 - RNA, 22 nt, Human
ugaaaggaagagggcuacuccu

SEQ ID NO: 586804 - RNA, 22 nt, Human
aaggcccuucggcuuccucagc

SEQ ID NO: 586805 - RNA, 22 nt, Human
gagaggggcccaagccacauag

SEQ ID NO: 586806 - RNA, 22 nt, Human
ugcauaauggaugauuucacaa

SEQ ID NO: 586807 - RNA, 22 nt, Human
auguguauauuuauuguaguuu

SEQ ID NO: 586808 - RNA, 22 nt, Human
uaggaaacaaaguggaugaaau

SEQ ID NO: 586809 - RNA, 22 nt, Human
gcuacaggggucaguccuuugc

SEQ ID NO: 586810 - RNA, 22 nt, Human
ggcucuggcguccaauggagcg

SEQ ID NO: 586811 - RNA, 19 nt, Human
ggggagguauuguuuucau

SEQ ID NO: 586812 - RNA, 22 nt, Human
ggcuuuggggugugcagagaug

SEQ ID NO: 586813 - RNA, 22 nt, Human
aaaguugcagugaaauaaggcu

SEQ ID NO: 586814 - RNA, 22 nt, Human
uuucuuauauucugucauuguu

SEQ ID NO: 586815 - RNA, 21 nt, Human
uuugaaagcuacaucuauagc

SEQ ID NO: 586816 - RNA, 22 nt, Human
ugaaaugucuuugcaauugaaa

SEQ ID NO: 586817 - RNA, 22 nt, Human
agugaggcuaauaggcaauggu

SEQ ID NO: 586818 - RNA, 22 nt, Human
cugacaaaccacugcuccagcu

SEQ ID NO: 586819 - RNA, 22 nt, Human
cacugucacguucugaaacugu

SEQ ID NO: 586820 - RNA, 22 nt, Human
cuccuggcucgcccccagcuga

SEQ ID NO: 586821 - RNA, 22 nt, Human
cugggaggugaacagaaaaacu

SEQ ID NO: 586822 - RNA, 22 nt, Human
uagaugauagggccagaauuug

SEQ ID NO: 586823 - RNA, 22 nt, Human
gauuuauuuuuaaucagcaggg

SEQ ID NO: 586824 - RNA, 22 nt, Human
uugaaaugcucuuuggaaucua

SEQ ID NO: 586825 - RNA, 19 nt, Human
ccucugccagcccgccucu

SEQ ID NO: 586826 - RNA, 22 nt, Human
uucacaaucuggcuuagcauug

SEQ ID NO: 586827 - RNA, 22 nt, Human
gugcugaauccacucuuaggaa

SEQ ID NO: 586828 - RNA, 22 nt, Human
ucauuuauaaggaugcaauuaa

SEQ ID NO: 586829 - RNA, 22 nt, Human
uggguagagcaggcuggggcuu

SEQ ID NO: 586830 - RNA, 22 nt, Human
agacauuuggagccaacuuucc

SEQ ID NO: 586831 - RNA, 22 nt, Human
gggagccagcagggcauggagc

SEQ ID NO: 586832 - RNA, 22 nt, Human
uuucugaaaucucuuuugagga

SEQ ID NO: 586833 - RNA, 22 nt, Human
uucacauuauaaucaguucugc

SEQ ID NO: 586834 - RNA, 22 nt, Human
aaacauugcuaaauaaugcugc

SEQ ID NO: 586835 - RNA, 22 nt, Human
cagcacaggaagugggccuuca

SEQ ID NO: 586836 - RNA, 22 nt, Human
gacaugcaugaaugcaggucuc

SEQ ID NO: 586837 - RNA, 22 nt, Human
uauauaacuacuauuuugcuca

SEQ ID NO: 586838 - RNA, 22 nt, Human
ucacugcuuugagccacugagc

SEQ ID NO: 586839 - RNA, 22 nt, Human
agccagggaugcagcacaguga

SEQ ID NO: 586840 - RNA, 22 nt, Human
aaggccacacuugcuggccagc

SEQ ID NO: 586841 - RNA, 22 nt, Human
ugccuucuucucccuggcucag

SEQ ID NO: 586842 - RNA, 22 nt, Human
agcagccauagauagcaugcaa

SEQ ID NO: 586843 - RNA, 23 nt, Human
ggugguggugagucacgggcuca

SEQ ID NO: 586844 - RNA, 22 nt, Human
gucuccagaagccuagacagcc

SEQ ID NO: 586845 - RNA, 22 nt, Human
uggccucugcacugggcucccc

SEQ ID NO: 586846 - RNA, 22 nt, Human
ggugugccacuucacugagcag

SEQ ID NO: 586847 - RNA, 22 nt, Human
gacacaguuuuucucacggugg

SEQ ID NO: 586848 - RNA, 21 nt, Human
gcagcaugagaaagccccaaa

SEQ ID NO: 586849 - RNA, 22 nt, Human
ccuuagcagggagucuguccag

SEQ ID NO: 586850 - RNA, 17 nt, Human
caggucccagggucucu

SEQ ID NO: 586851 - RNA, 22 nt, Human
caguuuuaugaaugcuuauuag

SEQ ID NO: 586852 - RNA, 20 nt, Human
ucugaagaaagacagggacu

SEQ ID NO: 586853 - RNA, 22 nt, Human
uggggcaagaagugcccugaag

SEQ ID NO: 586854 - RNA, 22 nt, Human
gaagaugggaaugaugaguggg

SEQ ID NO: 586855 - RNA, 22 nt, Human
cucaggaaaggccaugcaaggg

SEQ ID NO: 586856 - RNA, 22 nt, Human
uucaguuccuuaucauaggguu

SEQ ID NO: 586857 - RNA, 19 nt, Human
ccccaaaguuuagauguug

SEQ ID NO: 586858 - RNA, 22 nt, Human
ucagagcuuaucucuugcugga

SEQ ID NO: 586859 - RNA, 17 nt, Human
ggcucugggugucacau

SEQ ID NO: 586860 - RNA, 22 nt, Human
ucucugugcaggaugcugaguu

SEQ ID NO: 586861 - RNA, 22 nt, Human
uaagauaugguaggaaguuugg

SEQ ID NO: 586862 - RNA, 22 nt, Human
cuuccuugcggccccugccuag

SEQ ID NO: 586863 - RNA, 22 nt, Human
cucucucaguguaauacaggau

SEQ ID NO: 586864 - RNA, 22 nt, Human
ugcagaguaaaagcagaugcua

SEQ ID NO: 586865 - RNA, 22 nt, Human
caggagcagaggguggucagca

SEQ ID NO: 586866 - RNA, 22 nt, Human
cagaaguggcaucauucaagag

SEQ ID NO: 586867 - RNA, 18 nt, Human
ggaaggugcuggagugca

SEQ ID NO: 586868 - RNA, 22 nt, Human
uaucuuagggaauuaacuaaaa

SEQ ID NO: 586869 - RNA, 22 nt, Human
aaacagucugaugccaucugcc

SEQ ID NO: 586870 - RNA, 22 nt, Human
cugggugguucuaacuguugau

SEQ ID NO: 586871 - RNA, 22 nt, Human
ccucuggguaucuguggaagua

SEQ ID NO: 586872 - RNA, 22 nt, Human
cagauggcugccuucuugcugu

SEQ ID NO: 586873 - RNA, 22 nt, Human
augggggaaaguacgagcaugg

SEQ ID NO: 586874 - RNA, 22 nt, Human
aggagcugagggagcgcccuug

SEQ ID NO: 586875 - RNA, 23 nt, Human
gcaguuaguccacuuugcagaga

SEQ ID NO: 586876 - RNA, 22 nt, Human
uggaugaguucaaugaggcaga

SEQ ID NO: 586877 - RNA, 22 nt, Human
ggcaccagggaaggaaggcugg

SEQ ID NO: 586878 - RNA, 22 nt, Human
accaggcuuaauccuuugcuau

SEQ ID NO: 586879 - RNA, 22 nt, Human
ccaggucugucuucuuagcuca

SEQ ID NO: 586880 - RNA, 22 nt, Human
ggcaguggugggaggcucgcuc

SEQ ID NO: 586881 - RNA, 22 nt, Human
gcaaggcugagcacauuugcau

SEQ ID NO: 586882 - RNA, 22 nt, Human
acaguacugaguacugaguugg

SEQ ID NO: 586883 - RNA, 22 nt, Human
agaagcauuauuuaauuuuacu

SEQ ID NO: 586884 - RNA, 22 nt, Human
aauuuuaaucaguggugcugag

SEQ ID NO: 586885 - RNA, 22 nt, Human
ugugcaaucauauuuuaaaaug

SEQ ID NO: 586886 - RNA, 22 nt, Human
uguaacauauagcauguucuug

SEQ ID NO: 586887 - RNA, 18 nt, Human
ugaacacaguacaauucc

SEQ ID NO: 586888 - RNA, 22 nt, Human
aggaggcugcaacccugaggcc

SEQ ID NO: 586889 - RNA, 22 nt, Human
aggcuuguggauuggagcgagu

SEQ ID NO: 586890 - RNA, 22 nt, Human
auuuggaaacaauuauauucuu

SEQ ID NO: 586891 - RNA, 22 nt, Human
caggaccuggaaugcuugugaa

SEQ ID NO: 586892 - RNA, 22 nt, Human
caggcugcggucggcucugguc

SEQ ID NO: 586893 - RNA, 22 nt, Human
uaguggaggggaugcaaagcuu

SEQ ID NO: 586894 - RNA, 22 nt, Human
ccagguguagcacugcucacag

SEQ ID NO: 586895 - RNA, 19 nt, Human
uggagggguuugaaugugg

SEQ ID NO: 586896 - RNA, 22 nt, Human
agaggccagcuagcgggccauc

SEQ ID NO: 586897 - RNA, 22 nt, Human
aagcuucauauaugugugaguc

SEQ ID NO: 586898 - RNA, 22 nt, Human
agggccugacacccuugccagc

SEQ ID NO: 586899 - RNA, 22 nt, Human
uagagaaacagaaccaacaggg

SEQ ID NO: 586900 - RNA, 22 nt, Human
acugaggcuuacaaagguaaag

SEQ ID NO: 586901 - RNA, 22 nt, Human
ugggucagacagccagugggcc

SEQ ID NO: 586902 - RNA, 22 nt, Human
gaaauacuguaaaguuauuauu

SEQ ID NO: 586903 - RNA, 22 nt, Human
ugaagggguucagcaugggggu

SEQ ID NO: 586904 - RNA, 22 nt, Human
ccagugcccagcugcccaggca

SEQ ID NO: 586905 - RNA, 20 nt, Human
ucccucagcacuucuaccuc

SEQ ID NO: 586906 - RNA, 22 nt, Human
uaauugaacuaacaugcaaaca

SEQ ID NO: 586907 - RNA, 22 nt, Human
uaaugcuuaauuuucacaagcc

SEQ ID NO: 586908 - RNA, 22 nt, Human
ucauuuuucacacagggucacc

SEQ ID NO: 586909 - RNA, 22 nt, Human
ccugcucagagcgucuugugug

SEQ ID NO: 586910 - RNA, 17 nt, Human
gcagccagugcagcagg

SEQ ID NO: 586911 - RNA, 22 nt, Human
gucagaucuuuggggaugcugu

SEQ ID NO: 586912 - RNA, 22 nt, Human
ccagggcucugcuucugccaug

SEQ ID NO: 586913 - RNA, 22 nt, Human
ugagaagcugcugacuuagccu

SEQ ID NO: 586914 - RNA, 22 nt, Human
uggcagcuagauaguguguuua

SEQ ID NO: 586915 - RNA, 22 nt, Human
aaauaaagguccacuuuagggc

SEQ ID NO: 586916 - RNA, 20 nt, Human
ggaagcuguggguccccagg

SEQ ID NO: 586917 - RNA, 22 nt, Human
uccuggagaauccugccaccug

SEQ ID NO: 586918 - RNA, 22 nt, Human
acuguacacagugguguacugu

SEQ ID NO: 586919 - RNA, 22 nt, Human
uuggccagguccauuucuccau

SEQ ID NO: 586920 - RNA, 22 nt, Human
cagcuauugguccacagguaug

SEQ ID NO: 586921 - RNA, 22 nt, Human
gguuugguuuuggccaucuucc

SEQ ID NO: 586922 - RNA, 22 nt, Human
uggcccugcugggucagagcug

SEQ ID NO: 586923 - RNA, 22 nt, Human
gcacagaggaugaggcagcucu

SEQ ID NO: 586924 - RNA, 22 nt, Human
cagagcuggcucugcauguaca

SEQ ID NO: 586925 - RNA, 22 nt, Human
cugugugugucugcagcauacu

SEQ ID NO: 586926 - RNA, 18 nt, Human
uggguggcuagggaguuu

SEQ ID NO: 586927 - RNA, 18 nt, Human
cuuucaguaauuucagcc

SEQ ID NO: 586928 - RNA, 22 nt, Human
uccaacuuucuccuccggcuug

SEQ ID NO: 586929 - RNA, 21 nt, Human
acagcagcaaucugucuuucc

SEQ ID NO: 586930 - RNA, 22 nt, Human
gugagugucagucaaagguuuu

SEQ ID NO: 586931 - RNA, 22 nt, Human
agguggggcccaccaauuugca

SEQ ID NO: 586932 - RNA, 22 nt, Human
aaagcaaugggucuaagguaaa

SEQ ID NO: 586933 - RNA, 18 nt, Human
acauuucuaggugaaagc

SEQ ID NO: 586934 - RNA, 22 nt, Human
gcagcugccgugagcucacgcc

SEQ ID NO: 586935 - RNA, 22 nt, Human
gugggcaggccccaaagcaggg

SEQ ID NO: 586936 - RNA, 22 nt, Human
uccugaauugaacucaguuaau

SEQ ID NO: 586937 - RNA, 22 nt, Human
uuuacagagaauguacauaaag

SEQ ID NO: 586938 - RNA, 22 nt, Human
aacaaaccuucccuauacgucu

SEQ ID NO: 586939 - RNA, 22 nt, Human
aguguuuaaacugaagugauga

SEQ ID NO: 586940 - RNA, 22 nt, Human
uuaauugagccagaaaguaucu

SEQ ID NO: 586941 - RNA, 22 nt, Human
uuguaacacuuuucuauuaaua

SEQ ID NO: 586942 - RNA, 22 nt, Human
cugagccuuauucaccagcccu

SEQ ID NO: 586943 - RNA, 22 nt, Human
gaggacagagccgccuggcaag

SEQ ID NO: 586944 - RNA, 22 nt, Human
cuguuuuucagaagguaaggga

SEQ ID NO: 586945 - RNA, 18 nt, Human
ggagcccagaggacagga

SEQ ID NO: 586946 - RNA, 22 nt, Human
acaugacagugacuuuauaaga

SEQ ID NO: 586947 - RNA, 22 nt, Human
agagggugggcacgugauggau

SEQ ID NO: 586948 - RNA, 22 nt, Human
aguggcucuccaagaagucaca

SEQ ID NO: 586949 - RNA, 23 nt, Human
aacaggaugugcuucaucuuuug

SEQ ID NO: 586950 - RNA, 22 nt, Human
gcuuccuguccaggccccacau

SEQ ID NO: 586951 - RNA, 22 nt, Human
agguaaaugucagagccuuuaa

SEQ ID NO: 586952 - RNA, 22 nt, Human
augauucagcaauuuuauaucu

SEQ ID NO: 586953 - RNA, 22 nt, Human
gcugggcuccaggccaggguga

SEQ ID NO: 586954 - RNA, 22 nt, Human
uguacuaaugcauuuaacuaac

SEQ ID NO: 586955 - RNA, 22 nt, Human
uugggacagaaaaggagaagau

SEQ ID NO: 586956 - RNA, 22 nt, Human
auggaaagggaagcaaggaaca

SEQ ID NO: 586957 - RNA, 23 nt, Human
uccucccaaauuucagccucauu

SEQ ID NO: 586958 - RNA, 22 nt, Human
guggagcaaucagagggucagu

SEQ ID NO: 586959 - RNA, 17 nt, Human
aguuuauuuagccuucu

SEQ ID NO: 586960 - RNA, 18 nt, Human
ugagagaauguucaugcu

SEQ ID NO: 586961 - RNA, 22 nt, Human
auacacgugccauguuggugug

SEQ ID NO: 586962 - RNA, 22 nt, Human
ucugugucugcagaaguucagc

SEQ ID NO: 586963 - RNA, 22 nt, Human
augcaguacagauaauucuaca

SEQ ID NO: 586964 - RNA, 22 nt, Human
ggcagcuguuggcucucuagga

SEQ ID NO: 586965 - RNA, 22 nt, Human
cucaggaaggaagcagggagcc

SEQ ID NO: 586966 - RNA, 21 nt, Human
acauuauaauucauauuccac

SEQ ID NO: 586967 - RNA, 22 nt, Human
ccuucagaaugaaauucuaaug

SEQ ID NO: 586968 - RNA, 22 nt, Human
ucaugucaguuucuucuauaaa

SEQ ID NO: 586969 - RNA, 22 nt, Human
ugugggcucccccucacucugu

SEQ ID NO: 586970 - RNA, 22 nt, Human
ucccucagaugagcuccuagca

SEQ ID NO: 586971 - RNA, 22 nt, Human
uacuguguggugagcugucucc

SEQ ID NO: 586972 - RNA, 22 nt, Human
acaccaaaguagaauuaaugua

SEQ ID NO: 586973 - RNA, 22 nt, Human
aagucauucuauuucucuaugu

SEQ ID NO: 586974 - RNA, 22 nt, Human
uggggauggaugaaucuuugcu

SEQ ID NO: 586975 - RNA, 22 nt, Human
agccuggagguaaugaggaaac

SEQ ID NO: 586976 - RNA, 22 nt, Human
ugcuuuaagagauuguuaguac

SEQ ID NO: 586977 - RNA, 22 nt, Human
cuccaggacucaggccccuggg

SEQ ID NO: 586978 - RNA, 22 nt, Human
gcaccagcugccuucugugccc

SEQ ID NO: 586979 - RNA, 22 nt, Human
uaccuuuugcuuauuaugacac

SEQ ID NO: 586980 - RNA, 22 nt, Human
gugccuguuucuuuugaauuca

SEQ ID NO: 586981 - RNA, 22 nt, Human
aacaaaucuuaaaguaauucaa

SEQ ID NO: 586982 - RNA, 22 nt, Human
cucuuucucauugucagcagaa

SEQ ID NO: 586983 - RNA, 22 nt, Human
ggugaggggcgccucugcccag

SEQ ID NO: 586984 - RNA, 22 nt, Human
aauuccagcugauugacuuucc

SEQ ID NO: 586985 - RNA, 22 nt, Human
acauuuuuuagagucccacauu

SEQ ID NO: 586986 - RNA, 22 nt, Human
ggagagggggcucccugcuugg

SEQ ID NO: 586987 - RNA, 22 nt, Human
uggcugagaaguucugguggga

SEQ ID NO: 586988 - RNA, 20 nt, Human
ugagacccgcugacaaguuc

SEQ ID NO: 586989 - RNA, 20 nt, Human
aggccccaggaaacucucag

SEQ ID NO: 586990 - RNA, 21 nt, Human
ucaggaagagccaguucaugc

SEQ ID NO: 586991 - RNA, 19 nt, Human
ccucacccugcagaggagg

SEQ ID NO: 586992 - RNA, 22 nt, Human
agaaauaugcugauuagaugaa

SEQ ID NO: 586993 - RNA, 22 nt, Human
ggaagaaagguggacaacaggu

SEQ ID NO: 586994 - RNA, 22 nt, Human
aguagaaaguugcaggaggaau

SEQ ID NO: 586995 - RNA, 22 nt, Human
ucaggaaagaagaugcucagug

SEQ ID NO: 586996 - RNA, 22 nt, Human
cuggccaacuugcuuguuggca

SEQ ID NO: 586997 - RNA, 22 nt, Human
cugggugacagagugagauggu

SEQ ID NO: 586998 - RNA, 22 nt, Human
cagcaccccuccuggcuaugaa

SEQ ID NO: 586999 - RNA, 22 nt, Human
uggccagcccuucagccaugcc

SEQ ID NO: 587000 - RNA, 22 nt, Human
ugggcagagaucuggaucaaac

SEQ ID NO: 587001 - RNA, 22 nt, Human
aauaauguugacgauagucuua

SEQ ID NO: 587002 - RNA, 22 nt, Human
ggguccagauggugagaguuaa

SEQ ID NO: 587003 - RNA, 22 nt, Human
uuucaucuuauuugucuacauc

SEQ ID NO: 587004 - RNA, 22 nt, Human
auagucuucagcacuuugauca

SEQ ID NO: 587005 - RNA, 22 nt, Human
ucuggaguguuucuaauuacug

SEQ ID NO: 587006 - RNA, 20 nt, Human
cugccaugauugauagagug

SEQ ID NO: 587007 - RNA, 22 nt, Human
gcucugggccgggcaccagccu

SEQ ID NO: 587008 - RNA, 22 nt, Human
cuugccugccacuacagcugaa

SEQ ID NO: 587009 - RNA, 22 nt, Human
uacaugcuucuauaugugaagu

SEQ ID NO: 587010 - RNA, 22 nt, Human
aggccaggaccauuagcccaga

SEQ ID NO: 587011 - RNA, 22 nt, Human
ucauggagacuuugagccuguu

SEQ ID NO: 587012 - RNA, 20 nt, Human
gaagauggguagaggcacag

SEQ ID NO: 587013 - RNA, 23 nt, Human
gagaaaccucgguaagcaggagg

SEQ ID NO: 587014 - RNA, 22 nt, Human
aagcugcccaagacugaagcau

SEQ ID NO: 587015 - RNA, 22 nt, Human
gcuggcagcauuagacccuggg

SEQ ID NO: 587016 - RNA, 20 nt, Human
augguucaggccagcugucu

SEQ ID NO: 587017 - RNA, 21 nt, Human
uuacuuuugcagcaaccuaau

SEQ ID NO: 587018 - RNA, 22 nt, Human
uuuaaucuucaaaauagucuua

SEQ ID NO: 587019 - RNA, 22 nt, Human
ugggugaggaugaugaggcagc

SEQ ID NO: 587020 - RNA, 22 nt, Human
auaccauggcaguuuauucacg

SEQ ID NO: 587021 - RNA, 21 nt, Human
ugacauuuccaauauaaagcc

SEQ ID NO: 587022 - RNA, 22 nt, Human
aaucuguuuccauguuuuauug

SEQ ID NO: 587023 - RNA, 22 nt, Human
uucuccuuccugguuuucaggc

SEQ ID NO: 587024 - RNA, 22 nt, Human
ccugccugucccucaguccaca

SEQ ID NO: 587025 - RNA, 22 nt, Human
aaagccaggcagccaagccagu

SEQ ID NO: 587026 - RNA, 22 nt, Human
caucucugagaccucagcuggg

SEQ ID NO: 587027 - RNA, 22 nt, Human
gcuuuucuagcuagaacauccg

SEQ ID NO: 587028 - RNA, 22 nt, Human
uacaugaaccuuuaugugugau

SEQ ID NO: 587029 - RNA, 22 nt, Human
acuuccugacuucuggguugga

SEQ ID NO: 587030 - RNA, 22 nt, Human
ugggacaggaggccucuggaga

SEQ ID NO: 587031 - RNA, 22 nt, Human
ggcaagagguccaagaggucuc

SEQ ID NO: 587032 - RNA, 20 nt, Human
ggauucugacugugaagagg

SEQ ID NO: 587033 - RNA, 22 nt, Human
aagagauguugaaguuuauuag

SEQ ID NO: 587034 - RNA, 22 nt, Human
ugaguaggauaggguggggcuu

SEQ ID NO: 587035 - RNA, 22 nt, Human
acauucacuauguccaaacucu

SEQ ID NO: 587036 - RNA, 22 nt, Human
ucuaagaaagauuaagaaauuu

SEQ ID NO: 587037 - RNA, 22 nt, Human
gggcuggagccuggcggugguu

SEQ ID NO: 587038 - RNA, 22 nt, Human
uucuucaauuuuccauauacug

SEQ ID NO: 587039 - RNA, 22 nt, Human
gccucugcggagcuguacauca

SEQ ID NO: 587040 - RNA, 22 nt, Human
acaguccuaagauaauugucuc

SEQ ID NO: 587041 - RNA, 22 nt, Human
ugcugcauagcagcuccugaaa

SEQ ID NO: 587042 - RNA, 22 nt, Human
uaauguuaguauguaaucuuau

SEQ ID NO: 587043 - RNA, 22 nt, Human
uuggcucaccuggagccuguug

SEQ ID NO: 587044 - RNA, 22 nt, Human
gccaggagaaaaggcgaaugau

SEQ ID NO: 587045 - RNA, 22 nt, Human
agcaguggaccucagugcuauu

SEQ ID NO: 587046 - RNA, 22 nt, Human
accugcccacuucccaugacau

SEQ ID NO: 587047 - RNA, 22 nt, Human
ucuggcucucaacaaauauuua

SEQ ID NO: 587048 - RNA, 22 nt, Human
gcaaaugaguuguaacauaaaa

SEQ ID NO: 587049 - RNA, 22 nt, Human
gcaggugguggggcuaugaucu

SEQ ID NO: 587050 - RNA, 22 nt, Human
agccccuccaguggcauaaaau

SEQ ID NO: 587051 - RNA, 22 nt, Human
gaacacugggguaucauugagc

SEQ ID NO: 587052 - RNA, 22 nt, Human
cugccccauggucccugguggg

SEQ ID NO: 587053 - RNA, 22 nt, Human
aaaagagugacugauaaguaua

SEQ ID NO: 587054 - RNA, 22 nt, Human
ucucaucugcgagcucugccag

SEQ ID NO: 587055 - RNA, 22 nt, Human
cugaugcucuggauguagucaa

SEQ ID NO: 587056 - RNA, 22 nt, Human
cuggguguuggguacugaccgu

SEQ ID NO: 587057 - RNA, 19 nt, Human
gggcuuggggcugaagccu

SEQ ID NO: 587058 - RNA, 21 nt, Human
uggagcugccacuugagcugc

SEQ ID NO: 587059 - RNA, 22 nt, Human
agaagacagagucuacauucua

SEQ ID NO: 587060 - RNA, 22 nt, Human
guuuacauuaaguauuagcauc

SEQ ID NO: 587061 - RNA, 22 nt, Human
ucaugcaaacucuaguccuuua

SEQ ID NO: 587062 - RNA, 22 nt, Human
uccuuaaaugugaucuagauuu

SEQ ID NO: 587063 - RNA, 22 nt, Human
uuccucaggcugcuuucacaua

SEQ ID NO: 587064 - RNA, 22 nt, Human
uggcuugucauguaucugaggc

SEQ ID NO: 587065 - RNA, 20 nt, Human
agaguuuggggucauuuugg

SEQ ID NO: 587066 - RNA, 22 nt, Human
caagaugacaaggcuggaggcu

SEQ ID NO: 587067 - RNA, 23 nt, Human
uguagcuuuauacaagaucuguu

SEQ ID NO: 587068 - RNA, 22 nt, Human
cucacagagccucugugucuuc

SEQ ID NO: 587069 - RNA, 22 nt, Human
aagagcugauuaagucaugagg

SEQ ID NO: 587070 - RNA, 22 nt, Human
uuagagagaaccaucaggaucu

SEQ ID NO: 587071 - RNA, 22 nt, Human
acuuccagguuccacccaagac

SEQ ID NO: 587072 - RNA, 22 nt, Human
guugcugaaagcccugacuggc

SEQ ID NO: 587073 - RNA, 21 nt, Human
aaugucauugaauggugagac

SEQ ID NO: 587074 - RNA, 22 nt, Human
ugcucuggaauaguccuaggca

SEQ ID NO: 587075 - RNA, 19 nt, Human
agacuuuuguaaguugaga

SEQ ID NO: 587076 - RNA, 22 nt, Human
uucuuacaaguaugacguagca

SEQ ID NO: 587077 - RNA, 21 nt, Human
gcugcucgagauccagugcuu

SEQ ID NO: 587078 - RNA, 22 nt, Human
uacacagacucuucaauucaga

SEQ ID NO: 587079 - RNA, 21 nt, Human
uccaaaggagacugagugugu

SEQ ID NO: 587080 - RNA, 22 nt, Human
gagccagugaucagacagggag

SEQ ID NO: 587081 - RNA, 22 nt, Human
agaaguuuugggaaauacugau

SEQ ID NO: 587082 - RNA, 22 nt, Human
guggccagaggucccauguguc

SEQ ID NO: 587083 - RNA, 22 nt, Human
gaguaggguuuccagguuagag

SEQ ID NO: 587084 - RNA, 22 nt, Human
cugccucuguugggcauggucu

SEQ ID NO: 587085 - RNA, 22 nt, Human
cugcacagcuggccagggagag

SEQ ID NO: 587086 - RNA, 22 nt, Human
ugcccugggaacacagaugcca

SEQ ID NO: 587087 - RNA, 22 nt, Human
ggcagggcccugauuccugggg

SEQ ID NO: 587088 - RNA, 23 nt, Human
uuguuuuuagagguggcaugaga

SEQ ID NO: 587089 - RNA, 22 nt, Human
uugccuuuaaguauaacugcug

SEQ ID NO: 587090 - RNA, 22 nt, Human
uaaaacuuaacuauccagauua

SEQ ID NO: 587091 - RNA, 22 nt, Human
ccucagucauuggccuacacuu

SEQ ID NO: 587092 - RNA, 22 nt, Human
ucagccugcuccaagugcugcc

SEQ ID NO: 587093 - RNA, 18 nt, Human
ucuccuuccaaaucuuca

SEQ ID NO: 587094 - RNA, 22 nt, Human
aacuuaaacccacucauguaga

SEQ ID NO: 587095 - RNA, 22 nt, Human
gauaaaauauguggccuuuagu

SEQ ID NO: 587096 - RNA, 22 nt, Human
uguuuucaucacagaauguaac

SEQ ID NO: 587097 - RNA, 22 nt, Human
uggaagcaucacuucuugccug

SEQ ID NO: 587098 - RNA, 22 nt, Human
ugagcuggucuugaguguagcu

SEQ ID NO: 587099 - RNA, 22 nt, Human
uugaaaggugcugugugcugau

SEQ ID NO: 587100 - RNA, 22 nt, Human
aggugggaacccagcagggccc

SEQ ID NO: 587101 - RNA, 22 nt, Human
ugccagagaagacccagucacu

SEQ ID NO: 587102 - RNA, 22 nt, Human
gcaguguuucaaaucaaaggca

SEQ ID NO: 587103 - RNA, 22 nt, Human
cagccacuugugaugcugggga

SEQ ID NO: 587104 - RNA, 22 nt, Human
ccaccugugcuugguacuccau

SEQ ID NO: 587105 - RNA, 22 nt, Human
gcaguguugagugguggcugaa

SEQ ID NO: 587106 - RNA, 23 nt, Human
aacuuuuagaguuuaacaguguu

SEQ ID NO: 587107 - RNA, 22 nt, Human
uaugaaaauuuagcugaagcau

SEQ ID NO: 587108 - RNA, 19 nt, Human
uggccagguacugucugcu

SEQ ID NO: 587109 - RNA, 22 nt, Human
uguuuauuuucaggauggauug

SEQ ID NO: 587110 - RNA, 22 nt, Human
ucacuuauugcucaucucaugc

SEQ ID NO: 587111 - RNA, 22 nt, Human
gaguccuuaauacacuggugga

SEQ ID NO: 587112 - RNA, 21 nt, Human
cugcucugacagugaggccag

SEQ ID NO: 587113 - RNA, 17 nt, Human
ucacaucacacaagcaa

SEQ ID NO: 587114 - RNA, 22 nt, Human
ugugacguuccugcuggcgacc

SEQ ID NO: 587115 - RNA, 21 nt, Human
cagagcagcguucugcugugg

SEQ ID NO: 587116 - RNA, 22 nt, Human
uaauagucauuguauaccuugg

SEQ ID NO: 587117 - RNA, 22 nt, Human
cagccacugaacuccuggcuau

SEQ ID NO: 587118 - RNA, 22 nt, Human
gcaggagucacugacuuggucc

SEQ ID NO: 587119 - RNA, 22 nt, Human
gaaguuuagaguguuguaauuu

SEQ ID NO: 587120 - RNA, 22 nt, Human
caggacagguguucuagaucag

SEQ ID NO: 587121 - RNA, 22 nt, Human
cugggguggauggguccaaguu

SEQ ID NO: 587122 - RNA, 22 nt, Human
ucacuggggccaugugagggac

SEQ ID NO: 587123 - RNA, 22 nt, Human
ccagucugaggccuggugaggg

SEQ ID NO: 587124 - RNA, 22 nt, Human
ugcagaguugcuuugauagucc

SEQ ID NO: 587125 - RNA, 18 nt, Human
uguuuauucuccugacag

SEQ ID NO: 587126 - RNA, 22 nt, Human
cucccaggguagggagagacua

SEQ ID NO: 587127 - RNA, 22 nt, Human
ugugggaggaauuagaauggga

SEQ ID NO: 587128 - RNA, 21 nt, Human
agcuuccugcagugggagguc

SEQ ID NO: 587129 - RNA, 22 nt, Human
ucuggggagcagcccuggugag

SEQ ID NO: 587130 - RNA, 22 nt, Human
acacacaacucauuguguaaua

SEQ ID NO: 587131 - RNA, 22 nt, Human
ugagaauagcagacugguaacu

SEQ ID NO: 587132 - RNA, 22 nt, Human
acauuucuccuacuuguuauuu

SEQ ID NO: 587133 - RNA, 22 nt, Human
cucuuuaguuugaaauccacau

SEQ ID NO: 587134 - RNA, 22 nt, Human
uuuaagacuuagauuuauuggg

SEQ ID NO: 587135 - RNA, 22 nt, Human
ccuuccaggugcaggcaagccu

SEQ ID NO: 587136 - RNA, 22 nt, Human
uucuaguucccacauaguugcc

SEQ ID NO: 587137 - RNA, 22 nt, Human
aaaguuuuagcuguccaguucc

SEQ ID NO: 587138 - RNA, 22 nt, Human
uugcagaaaacaguuuucuugu

SEQ ID NO: 587139 - RNA, 22 nt, Human
uucaaugucuauguacauuuua

SEQ ID NO: 587140 - RNA, 22 nt, Human
gaaggcuggcuuucugagagca

SEQ ID NO: 587141 - RNA, 22 nt, Human
cuuccuugcugucugcuccagg

SEQ ID NO: 587142 - RNA, 22 nt, Human
aacuguaagaaauaaaauucug

SEQ ID NO: 587143 - RNA, 21 nt, Human
uccugcugcuccugucguguu

SEQ ID NO: 587144 - RNA, 22 nt, Human
cugcaaaauuguucuuugcucc

SEQ ID NO: 587145 - RNA, 22 nt, Human
gcacacauucuagccuuuugug

SEQ ID NO: 587146 - RNA, 22 nt, Human
uuguuuucacagcuuugcccgg

SEQ ID NO: 587147 - RNA, 22 nt, Human
aaggcugauuagacugauagcu

SEQ ID NO: 587148 - RNA, 22 nt, Human
gauauguaugaggaguauguau

SEQ ID NO: 587149 - RNA, 22 nt, Human
cugaggugagcuucccugggcu

SEQ ID NO: 587150 - RNA, 22 nt, Human
ucuccagguagauaugucagga

SEQ ID NO: 587151 - RNA, 20 nt, Human
gagcuucaacucagcaaaca

SEQ ID NO: 587152 - RNA, 22 nt, Human
aagacagagggaagcaaugaug

SEQ ID NO: 587153 - RNA, 22 nt, Human
aacuguauacaauugucagaca

SEQ ID NO: 587154 - RNA, 22 nt, Human
gcccaaggucccauggcagcac

SEQ ID NO: 587155 - RNA, 20 nt, Human
agccuggggaauuccacccc

SEQ ID NO: 587156 - RNA, 22 nt, Human
ucucagaaucaggaccuacuuc

SEQ ID NO: 587157 - RNA, 23 nt, Human
ugcauuccucacagggcagaaga

SEQ ID NO: 587158 - RNA, 22 nt, Human
ucugagccagacaagacagcca

SEQ ID NO: 587159 - RNA, 22 nt, Human
guuacauggagcaaugaugcau

SEQ ID NO: 587160 - RNA, 22 nt, Human
ggcagcugauuagcaucaagga

SEQ ID NO: 587161 - RNA, 22 nt, Human
cuucuucuucccccuucagggg

SEQ ID NO: 587162 - RNA, 22 nt, Human
ugacauuugagcauacauguaa

SEQ ID NO: 587163 - RNA, 18 nt, Human
aggaaagacgaagagggc

SEQ ID NO: 587164 - RNA, 22 nt, Human
cugccacuuucacccagugcuc

SEQ ID NO: 587165 - RNA, 22 nt, Human
agaggccagaaggcgcaccccg

SEQ ID NO: 587166 - RNA, 22 nt, Human
uuaggaguccagaugucuuggg

SEQ ID NO: 587167 - RNA, 22 nt, Human
augaguugaagcuacaagaggc

SEQ ID NO: 587168 - RNA, 20 nt, Human
accugggguugccugugcuc

SEQ ID NO: 587169 - RNA, 22 nt, Human
ugaggccugggcacauaaccuc

SEQ ID NO: 587170 - RNA, 22 nt, Human
uucucuggacagugaagagagg

SEQ ID NO: 587171 - RNA, 22 nt, Human
acugggccuugccauggcagcc

SEQ ID NO: 587172 - RNA, 22 nt, Human
acugagagaacgggcugcuccc

SEQ ID NO: 587173 - RNA, 22 nt, Human
uagcuuugccugaaguaaucag

SEQ ID NO: 587174 - RNA, 22 nt, Human
ucucuggccccauggcugagcu

SEQ ID NO: 587175 - RNA, 19 nt, Human
gugggccaggcagaaggcu

SEQ ID NO: 587176 - RNA, 22 nt, Human
uucuaccucaguuucccacuua

SEQ ID NO: 587177 - RNA, 22 nt, Human
cuugcaguguggccuugaagag

SEQ ID NO: 587178 - RNA, 22 nt, Human
ccaggagaaugggauuacccua

SEQ ID NO: 587179 - RNA, 17 nt, Human
aggugcuggagcaucag

SEQ ID NO: 587180 - RNA, 22 nt, Human
ugugaauggacaauuaaaucua

SEQ ID NO: 587181 - RNA, 22 nt, Human
ucugggaaauggcuacuuguca

SEQ ID NO: 587182 - RNA, 22 nt, Human
gccuguccacuaaacagccaag

SEQ ID NO: 587183 - RNA, 22 nt, Human
gcaagauuguguggcugaagua

SEQ ID NO: 587184 - RNA, 18 nt, Human
caguggugcugggaugug

SEQ ID NO: 587185 - RNA, 22 nt, Human
aaaucagaggcaacaacuacuu

SEQ ID NO: 587186 - RNA, 22 nt, Human
uacaucauuuuggagaugagca

SEQ ID NO: 587187 - RNA, 22 nt, Human
augccaggaacaaacaguggug

SEQ ID NO: 587188 - RNA, 22 nt, Human
aucacaaucuucaaaucgauuc

SEQ ID NO: 587189 - RNA, 22 nt, Human
agaagcaaggucugucaguaua

SEQ ID NO: 587190 - RNA, 22 nt, Human
guggggcaguggccugggagca

SEQ ID NO: 587191 - RNA, 22 nt, Human
agggccccaguaagauuacaug

SEQ ID NO: 587192 - RNA, 22 nt, Human
ggcucuucuacuucagaugggg

SEQ ID NO: 587193 - RNA, 17 nt, Human
acaagcaguggccaugg

SEQ ID NO: 587194 - RNA, 22 nt, Human
ugcugacuccuggcugugacac

SEQ ID NO: 587195 - RNA, 22 nt, Human
gagauggcuugcucucacgugg

SEQ ID NO: 587196 - RNA, 22 nt, Human
gagagcugcauucucagacaca

SEQ ID NO: 587197 - RNA, 22 nt, Human
cagucccagacauaguaaggga

SEQ ID NO: 587198 - RNA, 21 nt, Human
aaacugaagagacaggaacuu

SEQ ID NO: 587199 - RNA, 22 nt, Human
gaguguaguucauuccguccua

SEQ ID NO: 587200 - RNA, 22 nt, Human
caaauaauuacuauccucacuu

SEQ ID NO: 587201 - RNA, 22 nt, Human
uuuugugagcugagaaauguau

SEQ ID NO: 587202 - RNA, 22 nt, Human
ggccuuccuggcggcucagggu

SEQ ID NO: 587203 - RNA, 19 nt, Human
agcauggaagcuggugcca

SEQ ID NO: 587204 - RNA, 22 nt, Human
cagcauuguaagaaugaagacc

SEQ ID NO: 587205 - RNA, 22 nt, Human
gagucugaugucccccaggcca

SEQ ID NO: 587206 - RNA, 22 nt, Human
cuucagcuguggucuccaaggc

SEQ ID NO: 587207 - RNA, 22 nt, Human
cuggggcccgagccuugggcca

SEQ ID NO: 587208 - RNA, 22 nt, Human
ccauuuuugacagaaggccuaa

SEQ ID NO: 587209 - RNA, 18 nt, Human
ccagguggugacagagau

SEQ ID NO: 587210 - RNA, 22 nt, Human
caagcagucagccugaagacug

SEQ ID NO: 587211 - RNA, 22 nt, Human
aggcucauucuugccucugagc

SEQ ID NO: 587212 - RNA, 22 nt, Human
agaugauuaugauagcacuguu

SEQ ID NO: 587213 - RNA, 22 nt, Human
uaaaggaggaguuaaugagacu

SEQ ID NO: 587214 - RNA, 19 nt, Human
agcccccagacagcaggcc

SEQ ID NO: 587215 - RNA, 22 nt, Human
ucucaguuuccucauauguaaa

SEQ ID NO: 587216 - RNA, 22 nt, Human
cugcccugaccugccucagagu

SEQ ID NO: 587217 - RNA, 22 nt, Human
guggcagggugcucaucaugca

SEQ ID NO: 587218 - RNA, 21 nt, Human
aaacugaggcuucaagcagug

SEQ ID NO: 587219 - RNA, 22 nt, Human
gugcaggagccagggguaggaa

SEQ ID NO: 587220 - RNA, 22 nt, Human
gcccaguaguucaagguugcag

SEQ ID NO: 587221 - RNA, 22 nt, Human
gcauguguggaggagaugugcu

SEQ ID NO: 587222 - RNA, 22 nt, Human
ccugacaggagaagcgcagcau

SEQ ID NO: 587223 - RNA, 22 nt, Human
cagccccuuccuggcaucugga

SEQ ID NO: 587224 - RNA, 21 nt, Human
cgcagagcgaacuugcggcgc

SEQ ID NO: 587225 - RNA, 22 nt, Human
acugggcaccaucaugagauag

SEQ ID NO: 587226 - RNA, 22 nt, Human
caggcugauaggguccaaaguu

SEQ ID NO: 587227 - RNA, 22 nt, Human
gcccccagaccucagugggcug

SEQ ID NO: 587228 - RNA, 22 nt, Human
ucuugaagucuuaugguuuaaa

SEQ ID NO: 587229 - RNA, 22 nt, Human
gagcugaggcucaggcuggcgu

SEQ ID NO: 587230 - RNA, 22 nt, Human
auuucuacaguacacaugcauu

SEQ ID NO: 587231 - RNA, 20 nt, Human
aagauucauuguaauuaggg

SEQ ID NO: 587232 - RNA, 22 nt, Human
agcaaugcuaccgggugauucg

SEQ ID NO: 587233 - RNA, 22 nt, Human
uggggcucuccacagugucuca

SEQ ID NO: 587234 - RNA, 22 nt, Human
augaaacaugagaaauggagag

SEQ ID NO: 587235 - RNA, 22 nt, Human
uggcacuggcgcaggauggcgg

SEQ ID NO: 587236 - RNA, 22 nt, Human
uagccacaugcagacuuucaug

SEQ ID NO: 587237 - RNA, 22 nt, Human
caugcacacacaguucuaauua

SEQ ID NO: 587238 - RNA, 22 nt, Human
uggaauguuugacuuauucagu

SEQ ID NO: 587239 - RNA, 22 nt, Human
agucccagccuaggcugugcug

SEQ ID NO: 587240 - RNA, 22 nt, Human
ggucagccuuggauuugguagc

SEQ ID NO: 587241 - RNA, 22 nt, Human
agaaaagggcaggagggauaca

SEQ ID NO: 587242 - RNA, 23 nt, Human
cauaaaauauuaguaugguagca

SEQ ID NO: 587243 - RNA, 22 nt, Human
cagccaggccuggugaccaaag

SEQ ID NO: 587244 - RNA, 22 nt, Human
auacagugaauacuuacagugu

SEQ ID NO: 587245 - RNA, 22 nt, Human
ggaggcacuucccgucucagcc

SEQ ID NO: 587246 - RNA, 22 nt, Human
aaaguguugggauuacaggugu

SEQ ID NO: 587247 - RNA, 22 nt, Human
agcugguauuuguuagggaguu

SEQ ID NO: 587248 - RNA, 22 nt, Human
gggccagugaacaaugagggaa

SEQ ID NO: 587249 - RNA, 22 nt, Human
uaccaguugauguuuuaaauag

SEQ ID NO: 587250 - RNA, 22 nt, Human
gcugaaggucucuggagagguc

SEQ ID NO: 587251 - RNA, 22 nt, Human
cagcucuuauuuucucuccuaa

SEQ ID NO: 587252 - RNA, 22 nt, Human
ugggccugaaggagcugcgccc

SEQ ID NO: 587253 - RNA, 22 nt, Human
agcauaaguugguacagccacu

SEQ ID NO: 587254 - RNA, 22 nt, Human
uaguuacagcaggcaggauaua

SEQ ID NO: 587255 - RNA, 22 nt, Human
gggcucagcugggcgugcuggu

SEQ ID NO: 587256 - RNA, 19 nt, Human
agggccugcagcucaagcu

SEQ ID NO: 587257 - RNA, 21 nt, Human
ucugggcagcccaguccugag

SEQ ID NO: 587258 - RNA, 22 nt, Human
uggaagagguggaaguggcuuc

SEQ ID NO: 587259 - RNA, 22 nt, Human
caguuuauuuccaagaugacaa

SEQ ID NO: 587260 - RNA, 22 nt, Human
gagucacauuaauuuaauuuua

SEQ ID NO: 587261 - RNA, 22 nt, Human
ggccuuggugccauggccaguu

SEQ ID NO: 587262 - RNA, 22 nt, Human
aucuacagcagugccagguagc

SEQ ID NO: 587263 - RNA, 22 nt, Human
aaguucuacagcuucgcaggca

SEQ ID NO: 587264 - RNA, 22 nt, Human
aguuuugaaaugaaauguaguu

SEQ ID NO: 587265 - RNA, 22 nt, Human
gagaaaccuguaaggaaggaag

SEQ ID NO: 587266 - RNA, 22 nt, Human
caggugccgggaaugcagcaau

SEQ ID NO: 587267 - RNA, 22 nt, Human
ggagggugcauuuuacccugug

SEQ ID NO: 587268 - RNA, 22 nt, Human
cagcuggaugggagaccauguu

SEQ ID NO: 587269 - RNA, 23 nt, Human
ggcugcucuuuucaugcuguuuc

SEQ ID NO: 587270 - RNA, 22 nt, Human
uuccucuuccaucuucccaggg

SEQ ID NO: 587271 - RNA, 22 nt, Human
ucuuggaacccuaugugauuuc

SEQ ID NO: 587272 - RNA, 22 nt, Human
aaucacaucacugagaaugagg

SEQ ID NO: 587273 - RNA, 22 nt, Human
uaugauuuguagacauuugauu

SEQ ID NO: 587274 - RNA, 21 nt, Human
ccagagguucugggccucccu

SEQ ID NO: 587275 - RNA, 22 nt, Human
uguguguguuucugcucauaca

SEQ ID NO: 587276 - RNA, 22 nt, Human
ccuggugcaccaaguaagggug

SEQ ID NO: 587277 - RNA, 19 nt, Human
ggaagagaggaaaggugga

SEQ ID NO: 587278 - RNA, 22 nt, Human
agaaaucuauuauuucagaguu

SEQ ID NO: 587279 - RNA, 22 nt, Human
aggcugaggcagguggaucacu

SEQ ID NO: 587280 - RNA, 22 nt, Human
ccugaaaaucaagguaguuugg

SEQ ID NO: 587281 - RNA, 22 nt, Human
uggcugugauuugcacgagaug

SEQ ID NO: 587282 - RNA, 22 nt, Human
cagaaucagugacacauguaua

SEQ ID NO: 587283 - RNA, 22 nt, Human
uugcuuuuaauuaaucauugcu

SEQ ID NO: 587284 - RNA, 21 nt, Human
guuuuucagcccugaggugag

SEQ ID NO: 587285 - RNA, 22 nt, Human
gcagagccugugucugagcaaa

SEQ ID NO: 587286 - RNA, 22 nt, Human
gccugcagggugaugggcugcc

SEQ ID NO: 587287 - RNA, 22 nt, Human
auuagcuuaucccauuucugaa

SEQ ID NO: 587288 - RNA, 22 nt, Human
gcagggacgcagcacucuccgu

SEQ ID NO: 587289 - RNA, 18 nt, Human
ggccagccccaggccagc

SEQ ID NO: 587290 - RNA, 22 nt, Human
gcagggcugauggcuucccuca

SEQ ID NO: 587291 - RNA, 22 nt, Human
gaguggggaaagccaggacaga

SEQ ID NO: 587292 - RNA, 22 nt, Human
ugcagccuagacauucugguca

SEQ ID NO: 587293 - RNA, 22 nt, Human
agaaucugcuuuuuaacaagau

SEQ ID NO: 587294 - RNA, 22 nt, Human
ggagagccugugcagccggguu

SEQ ID NO: 587295 - RNA, 22 nt, Human
uguauuucgcuagguacucccu

SEQ ID NO: 587296 - RNA, 22 nt, Human
uagcaccuggucaauucaguca

SEQ ID NO: 587297 - RNA, 22 nt, Human
gugauaaaauagaaacaguggu

SEQ ID NO: 587298 - RNA, 22 nt, Human
ucucccaacauguggaggucag

SEQ ID NO: 587299 - RNA, 23 nt, Human
aggagaagagauuuccacaugca

SEQ ID NO: 587300 - RNA, 22 nt, Human
ccagagcuucggggcggcugua

SEQ ID NO: 587301 - RNA, 20 nt, Human
ccucucugaagaggucaucu

SEQ ID NO: 587302 - RNA, 22 nt, Human
augucuauauagucaauaauca

SEQ ID NO: 587303 - RNA, 22 nt, Human
agauacaaaagauaagauuuag

SEQ ID NO: 587304 - RNA, 22 nt, Human
augcugguugcuaagcagcgau

SEQ ID NO: 587305 - RNA, 22 nt, Human
ugugacuuugucaaguugcaua

SEQ ID NO: 587306 - RNA, 22 nt, Human
cacagcuuugcuuuccuuaaua

SEQ ID NO: 587307 - RNA, 22 nt, Human
guacccagugauuccuucuuca

SEQ ID NO: 587308 - RNA, 22 nt, Human
gaagcaauguguuuucaacauu

SEQ ID NO: 587309 - RNA, 22 nt, Human
gccuuuuuuguugcucugucac

SEQ ID NO: 587310 - RNA, 22 nt, Human
gcugccuguugaagggucugug

SEQ ID NO: 587311 - RNA, 23 nt, Human
ugaauuuggaacucagagaauua

SEQ ID NO: 587312 - RNA, 22 nt, Human
ugaguagcggcuauguguaacu

SEQ ID NO: 587313 - RNA, 22 nt, Human
augcugaaaauuggauuugaau

SEQ ID NO: 587314 - RNA, 22 nt, Human
gcagccuccgcacugcgagucc

SEQ ID NO: 587315 - RNA, 22 nt, Human
gugucucuuccuuucaaguggg

SEQ ID NO: 587316 - RNA, 21 nt, Human
cccuucugcuccagcuuugcc

SEQ ID NO: 587317 - RNA, 22 nt, Human
ugaggcaggaauggggaaaagu

SEQ ID NO: 587318 - RNA, 22 nt, Human
ggaggucauagcugugcaggua

SEQ ID NO: 587319 - RNA, 22 nt, Human
ucuccuggcucuaaaaggcugu

SEQ ID NO: 587320 - RNA, 22 nt, Human
cugggucuggaggccaagggug

SEQ ID NO: 587321 - RNA, 22 nt, Human
ggaggugguggcagugacaauu

SEQ ID NO: 587322 - RNA, 22 nt, Human
cacugcaguaacucuaggacug

SEQ ID NO: 587323 - RNA, 22 nt, Human
cuguggugggcccugggcuuca

SEQ ID NO: 587324 - RNA, 22 nt, Human
guccucuggugaaagcauuccc

SEQ ID NO: 587325 - RNA, 22 nt, Human
ggggucggggcauagccacuua

SEQ ID NO: 587326 - RNA, 23 nt, Human
gcugccucuguuggucuucaguu

SEQ ID NO: 587327 - RNA, 22 nt, Human
auuuguaacacgugacagguug

SEQ ID NO: 587328 - RNA, 22 nt, Human
uaggaaaagucuagauugauga

SEQ ID NO: 587329 - RNA, 22 nt, Human
ggaagccaggcugggggaucug

SEQ ID NO: 587330 - RNA, 22 nt, Human
aauuuaaucaaguucugcucug

SEQ ID NO: 587331 - RNA, 22 nt, Human
caagcaauauuuuagaaaggua

SEQ ID NO: 587332 - RNA, 22 nt, Human
caguggucccugagguugcugg

SEQ ID NO: 587333 - RNA, 22 nt, Human
uggagcugucacucagaaccaa

SEQ ID NO: 587334 - RNA, 19 nt, Human
uacaggcaguuucuacaau

SEQ ID NO: 587335 - RNA, 21 nt, Human
ugcucacagaugugcucagug

SEQ ID NO: 587336 - RNA, 22 nt, Human
uccauggagauggaugacugua

SEQ ID NO: 587337 - RNA, 22 nt, Human
caauuucaugccauguauugcu

SEQ ID NO: 587338 - RNA, 22 nt, Human
auaacagugaccucucagcacc

SEQ ID NO: 587339 - RNA, 22 nt, Human
aacauauuuggcugauauuccc

SEQ ID NO: 587340 - RNA, 22 nt, Human
aggcgcugugcuuggggcugga

SEQ ID NO: 587341 - RNA, 22 nt, Human
gcagcuuuguggagaggcccau

SEQ ID NO: 587342 - RNA, 22 nt, Human
agcauuagguguguuucagagg

SEQ ID NO: 587343 - RNA, 22 nt, Human
acaggacaacucagcagccagc

SEQ ID NO: 587344 - RNA, 22 nt, Human
ugggcugcuguuacaggggcug

SEQ ID NO: 587345 - RNA, 22 nt, Human
ucaugcagcaauaugcauuagg

SEQ ID NO: 587346 - RNA, 19 nt, Human
gcacacauacacccuuugg

SEQ ID NO: 587347 - RNA, 22 nt, Human
uugggaaguuuaaugacagacu

SEQ ID NO: 587348 - RNA, 22 nt, Human
acucacucuuucaauugaaaga

SEQ ID NO: 587349 - RNA, 22 nt, Human
agcuuccugucuucugcacaaa

SEQ ID NO: 587350 - RNA, 23 nt, Human
ucauaaauauuagcacaguagga

SEQ ID NO: 587351 - RNA, 22 nt, Human
auuaagacuauugauauuuaca

SEQ ID NO: 587352 - RNA, 22 nt, Human
acacacucaauugcauaagcac

SEQ ID NO: 587353 - RNA, 19 nt, Human
auuagcaugcuugaggaug

SEQ ID NO: 587354 - RNA, 22 nt, Human
aagaacaugcuauaauuaucuu

SEQ ID NO: 587355 - RNA, 22 nt, Human
gaggcuggugguuaguuccauu

SEQ ID NO: 587356 - RNA, 22 nt, Human
cugcagugaaaucaggaagcaa

SEQ ID NO: 587357 - RNA, 22 nt, Human
guuaauuuaguagaguccagau

SEQ ID NO: 587358 - RNA, 22 nt, Human
uaaggcagaaauaugagcaggg

SEQ ID NO: 587359 - RNA, 22 nt, Human
gcaugggaggacagucugggcu

SEQ ID NO: 587360 - RNA, 22 nt, Human
aggucuggaaacagcagggaga

SEQ ID NO: 587361 - RNA, 22 nt, Human
cugggugaguugaugaaggaga

SEQ ID NO: 587362 - RNA, 22 nt, Human
agacagcacuuuuguauggggg

SEQ ID NO: 587363 - RNA, 22 nt, Human
uacacagagacucaaaagggca

SEQ ID NO: 587364 - RNA, 22 nt, Human
agauuucucuuucccuggcuga

SEQ ID NO: 587365 - RNA, 22 nt, Human
acugaugaaaacuaauaaauua

SEQ ID NO: 587366 - RNA, 22 nt, Human
gcaggagcucguuuccaggcug

SEQ ID NO: 587367 - RNA, 22 nt, Human
caucaguguucacuauuccuuc

SEQ ID NO: 587368 - RNA, 22 nt, Human
cagaggcuuugcccuggaaacc

SEQ ID NO: 587369 - RNA, 22 nt, Human
ucccagcauuaaugccugucag

SEQ ID NO: 587370 - RNA, 22 nt, Human
uggcagagaugaagaguuguuu

SEQ ID NO: 587371 - RNA, 19 nt, Human
ggagaggcuggagggaugc

SEQ ID NO: 587372 - RNA, 20 nt, Human
gaaauucucguauuaguuua

SEQ ID NO: 587373 - RNA, 19 nt, Human
gccaggagggcucuggcug

SEQ ID NO: 587374 - RNA, 18 nt, Human
uucuaaauucuguuuuua

SEQ ID NO: 587375 - RNA, 22 nt, Human
caucaaaguugguauauuugca

SEQ ID NO: 587376 - RNA, 22 nt, Human
ucauuuaauaauuuuugaguag

SEQ ID NO: 587377 - RNA, 18 nt, Human
auuuacccagcaacgugg

SEQ ID NO: 587378 - RNA, 22 nt, Human
ucuaugucuccaccuucgcaga

SEQ ID NO: 587379 - RNA, 22 nt, Human
uucuccgcuaaguucucugcag

SEQ ID NO: 587380 - RNA, 22 nt, Human
ugagccaugggacuccaaggga

SEQ ID NO: 587381 - RNA, 22 nt, Human
cugccuggguucaaguccuguu

SEQ ID NO: 587382 - RNA, 22 nt, Human
uuuauuauccaguguugucaug

SEQ ID NO: 587383 - RNA, 22 nt, Human
gggugggaacaggaugccagga

SEQ ID NO: 587384 - RNA, 22 nt, Human
gccaccagugggggccugggca

SEQ ID NO: 587385 - RNA, 22 nt, Human
cagguaggggagagcuccaaca

SEQ ID NO: 587386 - RNA, 22 nt, Human
ugccaaaauggccaaaagcuag

SEQ ID NO: 587387 - RNA, 22 nt, Human
ucucugaagagucagacauaac

SEQ ID NO: 587388 - RNA, 22 nt, Human
aaagucaucuaggagcagauuu

SEQ ID NO: 587389 - RNA, 22 nt, Human
aaagucaaaaugcucuccuguc

SEQ ID NO: 587390 - RNA, 20 nt, Human
uuguuagaggaaugccauag

SEQ ID NO: 587391 - RNA, 22 nt, Human
acauuuuuacugggcaucugca

SEQ ID NO: 587392 - RNA, 22 nt, Human
ugucccaguuuaucugggacug

SEQ ID NO: 587393 - RNA, 19 nt, Human
cugcugaauuagcucugga

SEQ ID NO: 587394 - RNA, 21 nt, Human
gauaaaaugggccuugguccu

SEQ ID NO: 587395 - RNA, 22 nt, Human
uggcaguugugagguucauauu

SEQ ID NO: 587396 - RNA, 22 nt, Human
uacaucucaucugugcucuccg

SEQ ID NO: 587397 - RNA, 22 nt, Human
uuccugguuggauucugauuaa

SEQ ID NO: 587398 - RNA, 22 nt, Human
aaggcuggagaugguuggaaug

SEQ ID NO: 587399 - RNA, 19 nt, Human
ggcagucucaagcagcaca

SEQ ID NO: 587400 - RNA, 22 nt, Human
aaaaugacauuccagugauauu

SEQ ID NO: 587401 - RNA, 23 nt, Human
ucauuucauccagccuugagagu

SEQ ID NO: 587402 - RNA, 22 nt, Human
acuuucuuauccaugaucucac

SEQ ID NO: 587403 - RNA, 22 nt, Human
uugagcuguaaggugggaugug

SEQ ID NO: 587404 - RNA, 22 nt, Human
aggccagaagccagaaaugcuu

SEQ ID NO: 587405 - RNA, 22 nt, Human
uccuguccugaggcuccaggcc

SEQ ID NO: 587406 - RNA, 22 nt, Human
uuuaaagugguccauuucagaa

SEQ ID NO: 587407 - RNA, 22 nt, Human
ucccagccugacagugcaucaa

SEQ ID NO: 587408 - RNA, 20 nt, Human
aggaaggaaguuugcaugga

SEQ ID NO: 587409 - RNA, 22 nt, Human
ucccaggacuuccaguuggagg

SEQ ID NO: 587410 - RNA, 22 nt, Human
ugccugccaggugcuucuucau

SEQ ID NO: 587411 - RNA, 22 nt, Human
ugaacccaggagguugcaguga

SEQ ID NO: 587412 - RNA, 22 nt, Human
ucccaggugaugcugaggccac
